United States Patent Application Publication US 2019/0348154 A1 - sequence listing, part 69

SEQ ID NO: 259605 - DNA, 231 bp, Klebsiella pneumoniae
gtgttcgaattcccgaacttccgcaaagggactgaaatcgtagctaacgccatcgcagatagcgaagcgttctccatcgcaggcggcggcgacaccctggcagcaatcgacctgttcggcattgctgacaaaatctcctacatctccaccggcggcggcgcattcctcgaattcgtggaaggtaaagttctgccggcagtagccatgctcgaagagcgcgctaagcagtaa

SEQ ID NO: 259606 - DNA, 324 bp, Klebsiella pneumoniae
atggaattctgcaaagcgttcaacgcaaaaactgaatccctggaaaaaggtctgccaatcccggttgttatcaccgtttacgctgaccgttctttcaccttcgttaccaaaactccgccggcagcagttctgctgaaaaaagcggctggtatcaagtctggttccggtaaaccgaacaaagacaaagtaggtaaaatttcccgcgctcagctgcaggaaatcgcgcagaccaaagctgccgacatgactggttccgacattgaagcgatgactcgctccattgaaggtactgcacgttccatgggcctggtagtggaggactaa

SEQ ID NO: 259607 - DNA, 261 bp, Klebsiella pneumoniae
atgtttggcagcgatgttcatgttgccagaattagcaaccacctgccctttgttgtttgtcaggttaccggaaaggttaatgttagcatctcccgactgagagataatacgtccagaagtattgttgacattttttgcggtaatattcagatccttaccggcgattacaccgccttcctggttgatgtaaccgaaatattgtcctgcataagctccaaacatgttactagaactaacattaatgtcgccttccgcctttaa

SEQ ID NO: 259608 - DNA, 183 bp, Klebsiella pneumoniae
gtgctggaacgttcgcactacgcccatgcgggcaatctgctggcccggcagcccttccagatgctggtctcgcagcataatagtgccgccagtgggcttgtagaaaccggtcagacagttaaaaacggtggttttgcccgcgccgttcgggccgataagcgagacaatttcccgctcgcgtag

SEQ ID NO: 259609 - DNA, 210 bp, Klebsiella pneumoniae
atggcctttctgcccgtgataaaagacgttatagcccagctttgccacctcttcgagaggaaacatatcgtcgtgaactttggtttcctggaggccgatgacgtcgggttggtgtttgtcgatgatggcggccagctgatgcgggcgggcacgcaggccgttgatattaaaagagacaaatttcatagtcgctgccactgtgcaaggtga

SEQ ID NO: 259610 - DNA, 2562 bp, Klebsiella pneumoniae; identical to SEQ ID NO: 227147

SEQ ID NO: 259611 - DNA, 675 bp, Klebsiella pneumoniae
atgaagataaaggaagcagcggctgttttaagaaagaatgagtatgaagcatggatcagacgactcaactggaaatttatggatgaacgtatccagaatgaatttaacaattgcaagcttgatgcttcaagtgtagatgagttagggatgttatatttaggaaaggtgaaagatgattctaaagaatataaaaaatatcttagcactcaatatatcaatgctacacatatagtaacaggcagtagatatatagatattaatcttttggataaggaaaaaggttctcttattcaagggtatgaatcaagtgctcaattatggtactctcaaggaacatctggggatgtcatagtatttgttggcccctataaatccaaactatgtgaaatgaatgagaatgatatcataattggccgttatcgaaacccataccaagtgaatgaattggttattaaaaaacatttttcaattttctttagatattgtacatgcacgtcgtataattctactttaagctttaaagcctatttatataggcaatatcttgtgttcaatgatttaagatttaaagcaagatattggcaaaaaattataaaaatcggagagcgagtgcttatagttgctctatctaccgcagcagtattagtttctctttatgtaggcgggaagctataa

SEQ ID NO: 259612 - DNA, 600 bp, Klebsiella pneumoniae; identical to SEQ ID NO: 194187

SEQ ID NO: 259613 - DNA, 1149 bp, Klebsiella pneumoniae
atgaataaattaattagcgcatgtgcaggtgcaggaaaaacccaccgcattgttagtgaggctattcaagccattgacaaaggagaacgtattttaatcattacatatacaataaataaccaaaaagaaatttatgaaaaatataaatcattgggtggtaatgattacaagaactttaaagtaaaaggtttattcactttcctccttgaagatattatccgtccataccaaaatgtaatattcaaagagcgaatagagtccttaattttcaatgaaagagatcctcataaaataggcaatagaacgatcttcggcagaaaagagattttagataacggtgagacaaaccctttacattttctaactcaaaatggaaataaggctcattccacatatttatcaaaattagcaaagcggataattacaaaaactaaaaacgcccctataaagagacttgagtacatttacaacaaactttattttgatgaagtacaagatttagttggttgggattatgaaataatcgatgcaatttcaaagtcaaaaaaaatatctcttacatgcgtaggtgattttcgccaaacaatttaccaaacagcaataacgactaaaaagcccttatcgacgatagaaaaaaaacagttttacattgataagaattttgaaatggaagacatttcattgtgtagacgttcaatattagaaatttgtgagttatcagatacggtgcattccaatatgggtttttcccccaccacttctaatgttaaagtcaatgaccctaacattatgaatcatattggagctttcgctgtgaaagactcagatgttaataattatattaccaggtttaaccctgttttattaagatcaaaagtaacaagcggcaagaaatatgcgattgaatcattacagaaattcacatatggcaaagctaaggggcttggtttcgaccgagtgttaattcttcctactaaagagtacattagctttctttgtggagaaagggatgtttttaacgatcaaaaaacagaatcgtccaaaaacaaattatatgtagccttaacacgagcacgttatagtgttgcaataatttatcctgatgttattcctaaaaactgtccgcttaagatatggactccagaataa

SEQ ID NO: 259614 - DNA, 576 bp, Klebsiella pneumoniae
atgaatctttatctgtatctaactaaaccagaatgggccgatgcttggataaatggtggggtggtcccattttatgtagctagtaagtataagagtgaagaaagaactggagttttaaccccagatgaaaatctcatagatagctcaacctttgatgttaaatccatctctcctggtatcacatttgccgaaggtggaattgcgagaaacatcaggtttatcaattgttattctaatggagtagttgtaaatggtactgtaaatcgtcattatgaagatgggttggtcatttgtatggctacgaaaaaaagtaaatatatagctaggaagcttggtaaaacagcttgcgtaaaaattaacaatattaataagttaattaattgtgtaaatgagcatactggtgtgataggcgttcatggtgtttgtacctacacagccacacacgaaagaaatcattttctcaagtccacttatgatcagtggcagagggaatacagaatgttttggaagggggttggtaacattgaggttgaacttcctcctggtttgggtaaggttgaatttattcttccttaa

SEQ ID NO: 259615 - DNA, 768 bp, Klebsiella pneumoniae
atgctgttgatagcccgacgaactgctctcgcggcggcgctgctgctggttatgcccctcacggtctggctttccgggtggctgtggcagcctggactgccggttgccatgttgaaaagcctgtggtgggtgacggaaacggtgacccagccgtggggaattatcactcatgtcgtgctttgcggctggttcctctggtgtctgcgctttcggctgcgcgcggcgttgatcctgttccttatccttgccgccgctatcctggcgggacagggggcgaaatcctgggtcaaggcgcgggtccaggagccgagaccgttcgtcatctggctggaaaacacaaggcaggtgccggtgacgcaattctacgcgttaaagcgtaaagaacgcgctaaactggtgcatgaacagctggcgcaggcgcaggacattccgtcatttttacgcaaacactggcagaaggagacggggtttgctttcccgtcaggtcacaccatgtttgccgccagctgggcgttactcgctgcggggctgctgtggccgcgtcgccgctggggcacaatcgcggtgctgctggtgtgggcgacggcggtgatgggcagtcgcctggcgctgggcatgcactggccgctggatctcatcgtcgccacgctgatctcctggctgctggtcacggtggcctgctggctgacgcagcgcctttgtgggccgctctcgccgcccggagaagaggcgcaggatattaaaaaacggatgcctgaagcggaataa

SEQ ID NO: 259616 - DNA, 309 bp, Klebsiella pneumoniae; identical to SEQ ID NO: 211995

SEQ ID NO: 259617 - DNA, 1170 bp, Klebsiella pneumoniae
atgctggagttgttgtttctgcttttacccgttgccgccgcttacggctggtacatggggcgcagaagtgcacaacagtccaaacaggacgatgcgagccgcctgtcgcgagattacgtggcgggggttaacttcctgctcagcaaccagcaggataaagccgtcgacctgttccttgatatgctgaaagaggataccggtaccgttgaggcgcacctgacgctcggtaatttgttccgttcgcgcggcgaagtcgaccgcgcgatccgaattcaccagagcctgatggaaagcgcgtcgttaacctacgatcagcgcctgttagcggtgcagcagctgggacgggattatatggccgccggactgtatgaccgcgcggaagacatgttcaaacagctggtggatgagaccgatttccgcctcggcgcgctgcagcaactgctgcagatttaccaggcgaccagcgactggcagtcggctattgaagtggctgaacggctggtgaagctagggaaagagaaacatcgtggcgaaatcgccaacttctggtgcgaactggccctgcagcagatggcagccaacgatctggataaagcgatggcgttgttgagaaaaggcgccgccgcggaccgcaacagcgcccgggtatcgatcatgatgggccgggtgtggatggaaaagggcgactacgccaaagcggtggagagcctcgagcgggttatcgatcaggataaagagctggtgggtgaaacgctggagatactgcagacctgctaccagcagctcggcaaaaccgatgaatgggaagtttttctgcgccgctgcgtggaggagaacgccggggcgaccgccgaactgatgctggcgcagatccttgagcaacgggaaggcgtcgaagcggcgcaaaactacgtcacccggcagctggaacgccacccgaccatgcgcgtcttccataagctgatggactaccatctcaacgaagcggaagaagggcgggcgaaagaaagccttggggtgctgcgaaacatggttggtgagcaggtgcgcagcaaaccacgctatcgctgccagaaatgcggatttaccgctcatacactctactggcattgtccgtcctgccgctcgtgggcgaccattaaacccattcgcggtctcgacggccagtaa

SEQ ID NO: 259618 - DNA, 738 bp, Klebsiella pneumoniae
atgacgtctacagctatcccatcttcccgcgctgtcacatcctctcccgttgtggttgcgctcgactatgataatcgcgataaagcgctggcatttgtcgaccgcatcgacccgcgcgactgccgcctgaaggtgggcaaagagatgttcaccctgctgggcccgcagtttgtccgcgatctgcatcagcgtgggtttgaggtgttcctggaccttaagtttcacgatattcccaacaccaccgcccgcgcggtggccgcagcggctgagctgggcgtatggatggtgaatgtccatgcttccggcggcgcgcgaatgatgaccgccgcgcgcgaagcgctgctgccgtttggcaaagatgcgccgctgctgatcgctgtcacggtgctcaccagcatggagtccagcgatctacaggatctgggcattaccttatctccggctgactacgcggcgaagctggcggcgctgacccaacgctgcggccttgatggggtggtgtgttcagcccaggaggcggtgcgctttaagcatgagctggggcaggcgtttaagctggtgaccccggggattcgtccgcagggcagcgacgctggcgatcagcggcgaattatgactcctgagcaggctcaggaagctggggtagactatatggtgattggtcgcccggttactcagtcggcggatccagccgcgacgctgcgggcgatcaacgattctctgcgcaagggggcataa

SEQ ID NO: 259619 - DNA, 327 bp, Klebsiella pneumoniae
atgagcgattccaacagccgtctggtctactccaccgaaaccgggcgtatcgacgaggcgaaaccggcgccggtgcgcccgaaaggcgacggcattgtgcggatccagcgccagaccagcggccgcaagggcaaaggcgtctgtctgattagcgggattgatgccgatgatgctgcgctaaccgctctggcggcagagttgaaaaagaagtgcggctgcggcggcgcggtgaaagacggcgtgatcgagatccagggcgataagcgggatttactcaagtcgctgcttgaggcgaaagggatgaaggtcaagttagccggtggctga

SEQ ID NO: 259620 - DNA, 222 bp, Klebsiella pneumoniae
atgatgacttcaacgagcaaaaaaatggctgctgtcgttctggctgtcactgtagcaatgtctctgagcgcttgctctaacatgtctaaacgcgatcgtaacacggctatcggcgctggcgccggcgctatcggtggtgcggtgttaactgacggtagcgctctcggtaccctgggtggcgcagcagtcggtggtattattggtcaccaggtcggaaaataa

SEQ ID NO: 259621 - DNA, 750 bp, Klebsiella pneumoniae
atgaacgcccgacaacaaagtattttgcaagtggtcatcgataaaggccgcatgagtgtcgccgatctggcgaagatgaccggtgtctctgaggttactattcgtcaggatttgaatttgctggaaaagcagagctatttgcgccgtactcatggctatgccgtaccgctggacagcgaagatgtcgaaacccgcatgatgacccatttcgccattaagcgtgagctggccagccgggctgcggcgctagtgaataccggtgaaacggtatttatcgaaaacggcagcagcaatgccctgctggcgcgtacgctggccgagcgcggcgatatcaccatcattaccgtcagcagctatatcgcccatctgctgaaagagaccccaggagaggtgatcctgctgggcggaatttatcagaaacgcagtgagagtatggtcggtccgctaacccgtcagttcatccagcaggtgcatttcagcaaagccttcatcgggatcgacggttggcaggcggaaaccggctttaccggccgcgatatgatgcgtgcggacgtggtgaacgccgtgctagagaagcattgtgaggcaattattcttagcgacagttcaaaattcagcgcggtacatccctatccgctcggtcccgccggccgctttaatcgcgttattaccgacgatcgcttaccggacgcctgtcgcgaacaattgctccgcagcggcctgaccgtcgatatcgtgccctacatctga

SEQ ID NO: 259622 - DNA, 180 bp, Klebsiella pneumoniae; identical to SEQ ID NO: 138130

SEQ ID NO: 259623 - DNA, 1935 bp, Klebsiella pneumoniae
atgtttcaggataacccgctgctagcgcagcttaaacagcaactgcattcccagacgccgcgcgcggaaggggtcgttaagggcacggaaaagggctttggcttcctcgaagtggacgctcagaagagctacttcattccgccgccgcagatgaaaaaagtgatgcatggcgaccgtatcgtcgcggtgatccattctgaaaaagaacgcgaaagcgccgagccggaatcgctggttgagcccttcctgactcgttttgtcggtaaagtccagaagaaagacgatcgcctcgctatcgttcctgaccatccgctgctgaaagacgccattccctgccgcgccgcccgcggcgttgagcacgattttaaacagggtgactgggccgtcgccgagatgcgccgtcatccattaaaaggcgaccgcgggttttacgcggagttgacccagttcatcacttttagcgacgaccacttcgtcccatggtgggtaaccctggcgcgccataatcttgagaaagaggcaccggacggcgtcgccaccgagatgctcgacgaggggctgacgcgccgcgacctaaccgccctcgacttcgtcaccattgacagcgccagcaccgaagatatggacgatgcgttgtatgccgagtccactgctgatggcaaactgctgctgacggtcgccattgccgacccgaccgcctggattgccgaaggcagcaagctggataacgccgcaaaagtgcgcgcctttaccaactatctgccgggcttcaacattccaatgctgccgcgcgagctgtcggacgacctctgctccctgcgcgctaacgaagtgcgcccggtgctggcctgccggatgaccctggcggccgatggcaccatcgaagacaatatcgagttctttgccgccaccatcgaatcgaaagccaagctggcctatgacgacgtctctgactggctggaaggccgcggcagctggcagccggacagcgaggcgatcgcgcagcaaattacgctgctgaaggacgtgtgccagcgtcgtagcgaatggcgtcagacccatgcgctggtgttcaaagaccgtccggactaccgtttcgttctcggcgaaaaaggcgaagtgctggatatcgtcgcggaaccgcgtcgcattgccaaccgcattgtcgaagagtcgatgatcgccgccaacatctgtgccgcccgcgttctgcgcgacaagctcggcttcggcgtttataacgttcataccggtttcgatccggcgaacaccgagcagttggccgccctgctgaaaacccatgatgtgcacgtcgacccgacggaagtgctcaccctggaagggttctgcaagctgcgccgggaactggacgctcagccgaccggtttcctcgacagccgcattcgccgcttccagtcgtttgcggaaatcagcaccgagccgggcccacactttggtcttgggcttgaagcctatgccacctggacctcgccgatccgtaagtatggcgacatgatcaaccaccgtctgctgaaagccatcattaaaggcgagaccattgcgcgtccccaggatgaagccaccgtgcagatggcggagcgccgtcgtctcaaccggatggccgagcgcgacgtcgccgactggctgtacgcccgtttcctcaacgataaagccgggaccgatacccgcttcgcggcggagatcatcgacgtcagccgcggcgggatgcgcgtgcgtctggtggacaatggcgcggtcgcctttattccggccccgttcctccacgccgtgcgcgacgaactggtgtgcagccaggagaacggtaccgtgcagatcaaaggtgaagtagtctataaagtgactgacgttatcgatgtcactatcgctgaagttcgcatggaaacccgcagcattattgcgcgtccggcggtctga

SEQ ID NO: 259624 - DNA, 1158 bp, Klebsiella pneumoniae
atggagccacgccgcgtgaatggcaaaaatcactggtatcacgaaacccagtcaacaatctgcccggtggatgtcctgccgctcgtccctgaagccgcccatgttgaagaccgctttttgctggacctgacgctgccggccgcctggctacgtgcccacgctgactggctacaccccgcacgccagctggccgaactgctgtttcccgaccaggtggcggtgagtcgcctgcagacctttaccgcttacgatcgactcagcaccgcgctcaccgtcgcccaggtctacggcgtccagcggctgtgtaaccactacgccgcccgccttgctcccctgccaggccccgattcctcgcgcgagagcaaccgtcgtctggcgcaaatcacgcaatatgctcgtcagcttgccggttcgccctcggttattaacgctctctcccgtagccagctggacgaagtgggcttaaccagtcgggacattattctgttcaaccagattatcggattcgtcggcttccaggcgcgggcgattgccgtcctgcaggcggcccagggctttccggtgcgctggatccccggtatgccccagcaagaggaggcacccgcggaactgttcgccccgccgccgggagcatggcaggcagacattgcggatcccgacctgcagtatgccgatgatgagcgtcagcggcgcatcgccggctggcagtcgctgcccggtctgggcgagctggcgccgctgctggcctgcgacccacagttattcgcgcctctggagaccttgatccgccagctcagcacggatgatacctttggcccgcaggtcgccttactcacggcgcgcaccaatggcagccccacctgctttgacgcctggctcccccactggcagggtgaagaggagttcgccagccatctgcgggagggcgaccaggccctccatcactggctccagcagcatcctcaggcccggtctctcgtgaccgcggtgcagctgttaacacgctcgcctgaccggtttagcgccgcccagttaacgcccctcgcggaatatcgactctctgagcaacatgcaatcgatctgttgatctggagcgggctgtgcggatggatgaatcgtctgaaaatcgccctcggcaatgtgcgtcagcagacgtaa

SEQ ID NO: 259625 - DNA, 789 bp, Klebsiella pneumoniae
atgggttttctttccggtaagcgcattttgatcactggcgtcgccagcaaactgtccatcgcctacggcatcgcgcaggcaatgcaccgcgaaggcgcggaactggcattcacctatcagaatgagaaactgaaaggtcgcgtagaagagtttgctgccgcgctgggttctgacattgtgctgccgtgcgacgttgctgaagatgagagcatcaccgcgctgttcaccgagctggaaaaagtctggccaaaattcgatggtttcgtccactcaatcggttttgccccggctgaccagttagacggcgactacgttgacgttgtcactcgcgacggctttaaaatcgcgcacgacatcagcgcttacagcttcgtagcaatggccaaagcctgccgcggcatgctgaacccgggttcggctctgctgacgctctcctacctgggcgcagagcgcgcgatcccgaactataacgtgatgggtctggccaaagcctctctggaagctaacgtccgctatatggctaacgccatgggtccggaaggcgttcgcgtcaatgccatctctgccggtcctatccgtacgctggccgcgtccggtattaaagatttccgtaaaatgctggcgcactgcgaagcggtcaccccgatccgtcgcaccgtcaccattgaagatgtgggtaacagcgcagccttcctgtgctccaacctgtctgcggggatctccggtgaagtcgttcacgttgacggcgggttcaatatcgccgccatgaacgagctggaactgaaataa

SEQ ID NO: 259626 - DNA, 543 bp, Klebsiella pneumoniae; identical to SEQ ID NO: 216337

SEQ ID NO: 259627 - DNA, 810 bp, Klebsiella pneumoniae
atggtcgaaacattgctggaagttcgccaactgagtaagacctttcgctaccgcaccggctggtttcaccgtcagacggttgaggcggttaagccgctgagttttaccctgcgcgaacggcagacgctggcgattatcggcgagaacggctccgggaaatcgaccctcgcgaagatgctggcgggcatggtggaacccaccagcggcgaactgctgattgacgatcatccgctgacttttggggattactcctaccgcagccagaagattcgcatgatctttcaggatccgtcgacctcgctgaacccgcgtcagcgcatctcgcagatcctcgattttccgctgcgactgaataccgatctcgacgccgaggcgcggcagaagcagataatcgacaccctgcgcatggtcggtctgctgccggaccacgtcagctactacccccatatgctggcgcccggtcagaagcagcgtctcggcctcgccagggcgctgatcctgcgcccgaaggttatcgtctgcgatgaggcgctggcctcgctggatatgtcgatgcgctcccagcttatcaacctgatgctggagctgcaggagaaacagggcatctcctatatctatgtcactcagcacctgggaatgatgaaacacatcagcgatcaggtgctggtgatgcataacggcgaagtggtcgagcgcggcagcactgccgatgtgctggcctcgccgctgcacgacctgacccggcgcctgatcgccggccacttcggggaagccctcaccgccgacgcctggcgcaaagacgggaaatag

SEQ ID NO: 259628 - DNA, 993 bp, Klebsiella pneumoniae
atgccgttactcgatattcgtcacttaaccattgaatttaaaaccagcgaaggctgggtaaaagccgtcgatcgcgtcagcctgacgctgaccgaaggcgaaatccgcggcctggtgggggaatccggctccgggaaaagccttattgccaaagctatctgcggcgtgaccaaagacaactggcgggtcacggccgaccgcatgcgcttcgatgacattgacctgctgcgactgtcgaaccgcgagcgccggaagctgatcggccataacgtgtcgatgatttttcaggagccccagtcgtgcctcgatccctctgagcgcatcggccagcagctgattcagagtatccccggctggacctacaagggccgctggtggcaacggctgggctggcgcaagcgccgggccatcgagctgttgcaccgcgtaggcattaaagatcacaaagatgccatgcgcagcttcccctatcagctgaccgagggcgagtgccagaaggtgatgatcgccatcgccctggccaaccagccgcgtctgctgattgccgacgagccgaccaacgccatggagccgaccacccaggcgcagattattcgcctgctgacgcggctcaaccagaacaacaacaccaccatcttgctgatcagccatgacctgcaaatgctcagcaaatgggcggataaaatcaacgtcatgtactgcgggcagacggtggagagcgggcccagcgaagagctgatcaccctcccacatcacccctacacccaggcgttaatccgcgcgatcccggatttcggtagcgccatgccgcataaaagtcgcctcaacaccctgcctggagcgatcccgctgctggagcagttgcctatcggctgtcggctggggccgcgctgcccgtacgcccagcgggagtgtatcgaaacgccgcgtcttaccggggcgcgcaaccatctgtacgcctgtcatttcccgttgaacatggagaaagagtga

SEQ ID NO: 259629 - DNA, 891 bp, Klebsiella pneumoniae
atgccctacgatagcgtttatctggaaaagcgtccgcccggcgcgctgcgcaccgtatggcgtaagttctatggcgacaccacggcgatgatcggtctgtacggctgcgcgggcctgctgctgctctgcgtcttcggcggctggttcgccccctacggcatcgaccagcagttcctcggctaccagctgttgccgccgtcgtggtcgcgctatggcgaagtctccttctttctgggaaccgatgacctcggccgcgatgtgctgagccgactgctgagcggcgcggcgcccaccgtcggcggcgcttttgtcgtcaccctcggcgccacgctgtttggtctggtgctgggtgtgattgccggatcgacccacggcctgcgctcggcggtgatgaaccatatcctcgacaccctgctctccatcccctcgctgctgctggcgattatcgtcgtcgcctttgccgggccgcatctgagccatgcgatgttcgccgtctggctggcgctgctgccgcgcatggtgcgctccgtctacagcatggtccacgatgagctggagaaagagtacatcatcgccgcccgcctcgatggcgcctcgacgctgaatattctgctgttcgccatcctgcccaatatcgcctccggcctggtgaccgagatcactcgcgccctgtcgatggccattctggatattgccgcgctgggctttcttgatctcggcgcccagctgccttcgccggaatggggagccatgctgggcgatgcgctggagcttatctatgtggcgccgtggaccgtgatgctccccggggcggcgattatgctcagcgtactgctggtcaacctgctgggcgacggtattcgccgggcgatcattgccggggtagaataa

SEQ ID NO: 259630 - DNA, 225 bp, Klebsiella pneumoniae
atggcagagttcgaacccttccgtgaagcctgtctcgacaaggtcgttcgcgatggcctccatgaattcggagagctggaagctgccattggcctcggcgcccgccaaaagttcctgtcggaagtcgtggaagaactcttcgtcggtctgctccatcaatcctccccgaagatggatgcttcgtcacacttgtacggagcaatcgtttccagcctgatgtcgtag

SEQ ID NO: 259631 - DNA, 141 bp, Klebsiella pneumoniae
atgagccgtgacgttatcgaacgcatccgcgaccgctggcaaaagctccgcctcctgcgtagccgcggcaccgtgctggttgactacaaaatattacgcaatttcgtccgtatctataagcgcctgggagaagaagcatga

SEQ ID NO: 259632 - DNA, 234 bp, Klebsiella pneumoniae
atgaaggccactctcaacatcaccgtcgatggccagcctctgacggtgccggaagggatcagccccaccccccgccaggcggttaacggcgagctccgcgcgccgttttgcggcatgggcgtctgccaggagtgccggatcgccgtcgacggccatcgggtgctggcctgtcagaccctgtgccgggccggtatgcaaatagaaaggagccgcgatgaacacgctgcgctgtga

SEQ ID NO: 259633 - DNA, 537 bp, Klebsiella pneumoniae
atgccgggtggtgtgggaggggaacggtcagataagctgaccgcccctatcccgattcgcggaacgcggtgccggcgcattgccgattcccaacggacggtcgccgccatgtgccgcacgctggccgcatgttcgctggcgttgccggcagcatgcccaggcagtcgagaccttcaagactgcggcgcggttcgccgtgctggttgcttcgttctccgggcgcacccgcgtccatccacctcaccctcaagggacagacctcccttgcgggcgggagtcccttggttgccacaaggagtctccccatggatacccaagccatccgcgcacagatgccgacgctcgttgtcggtcatgtgccttccaacgtccgttcgttcaaattcaacatcttcgacggccagcccaaggtttcgacgctgggctttcacatcgacccgaagcctttcgagggcaaggtcatcgccaccaccgacgaggccatcgtcgtcaagacgggacgagccgagttcgcggtgctcgatcgcacgctcgtga

SEQ ID NO: 259634 - DNA, 270 bp, Klebsiella pneumoniae
atgcaaccgctgccgcaccagggctgcggcctgttgcgggtcggccggcaggtgcgcggcgagttcgaccttgatgcgcgtggcctggtccagctcgatgatccgcacgccggccggggcctgcaccggatgacggctgtcggtgacgacgagcacatcggcggcccaggcggaggggccgagcagcacagccaagagtccggccgcaagcaggcgccactgcgctacaaatgggttggatatgggagctggcatgtcgagccaccgtga

SEQ ID NO: 259635 - DNA, 351 bp, Klebsiella pneumoniae
atgcgtattgcaaaaataaagtgggcgatgccacactgctacgctctgattttcttcattattatattagtagcgctgctgacatggtgtattcccagcggcagttttgattatcactcagtgaccttacccggcggtgaaacgaaaacattagtgatcccagggtcttatcatctgctggacaaagtcagcagcgagggcgatctacgtcagggtattgccgccgtactggccgcgttgttggtggcgcttttggcattattttacgtactggcgcaattgagcggggtctggtggcgctggctgaacgcctggcaggtaaaggaattttggttatccctatcgcaatga

SEQ ID NO: 259636 - DNA, 270 bp, Klebsiella pneumoniae
atgctggccaatataagcgcgggtacgcagcatgccagtggtcggctcaagcttgtaaatcaggatcgcatgatcgtcttcccggctggaaaagttcaccgtttcgcccgtcgccaggttaagcgcttcaagatggggagccgccacatggatgatattcagcgaggagagcgctttctggccaacggcgatgaacttggtggtgagccgatagctacccgccgccggggccggtgtgacatacccacaggactgcaaaccctgcagtaa

SEQ ID NO: 259637 - DNA, 1338 bp, Klebsiella pneumoniae
ttgcaggccggcgttgagcatcacgttgacgagctgcaggccgcgcgcatcgagctgggccaggtcgcggccgcgcaggtagaacgccagcgcgccacggtagagcttgtgcgcgctgccgatcagcccgcgcgcctgctgcacgtcctgccgggtctgctccgaggccagggtctcgccgacggccttcctggcgaggtggttgaggtgcgcctccagtacgtcctggggtgtggcgaccagcgtcaggcacatcaccgtatcctcgggcatctggtcgaacagcgcgttcatggcatcgccgcctttgcgcgtctcaccggtcagatggccggtcgccggcggcgtgcgcagacgatccatcacgatcacccgatgcggcatgccatcgaagaaccacaggccgttgggcacgtccgaacgtggctggccgaagaacaggcgctgcgcgaagtcggtgccgctggcgagttcgatctcgccctcctcccgctcttccgggtagcgggtcagcgcgtagaagcgttcccgatcttcggcagtggcgccgagcaaagtcggattcgggttgaaccagcgcagcagccaggcgtggatgtccgccgcgccgagacgccgggctttcacgccggcattcgccagcccgccgacgaggcggtcgcagatcgtcgtcagcgcctgctcgggcgactggccgcgccgcgaggccggggccgcggacgtgctgcggtagacgaccatgcgcacgcgccggacctggccgcgccaaggcaggcgcgtcacggcagtatcctcgaacaggccacccggcttggcgatggcccgcaggtgatgggcgaagaaacgcaggtagaagtcgctgaatgcgctgccttgcgcacgcggctgcagatagttcgccagggagcgcagatagttgtcccagttggcctcgtcctgggcgtagagctgcaccacccaggggttgtcgtccaactcgtcgaaggagtcctgcagggcgttctccagcgcatcgcgcgcctgccacagccaggccatctcgcggccctcggtgccgaccggcgccagctcgaagaaggccgccaccgactggccatcttccagcaacatgcacttgctgccgggcaggtactcgacccagggcagcaagtccgcgaacgacggcgcgacgccatagagcgcatcgtggtcggcctgggtggccggcctgcgccggccccggccgagcgcgctgcccggctcggcgacaccctgtgccaccaaggccgccacgtgccgtgcccaggcatcatcggtcgcatccacggcgtcagcaggcgatgcgtcgggcttgcgtga

SEQ ID NO: 259638 - DNA, 996 bp, Klebsiella pneumoniae
gtggccttcgtccgtcacgttgatgatcggtcggcccaggaactggtcgcgctcggcgatgttgttgacggtgttgatgagcgagatgtaggcaatcgagagctgggcgttgtagccctcgcgcgcgaaggtggccaggtccacgatggtgatgtccgcctcgggccacggcgtgccggaccggtcgaacatctcgccgtccacgccctggcagaacatatccatggcgtcggccatctccagcagccgtgcgcgccgcatctccggcagcgtggcgtcgcgggcgcgctcgcgcagtgcctcgcgcacatcgcgcgtgagcaccgtgcgtctgtccgccacgcaatgctgggccgcatcgagaatgcactggcggatcaggctgcggtcggcgcgcgtcatgcgcgcttcttccttgtcctcgccgccggtaatcatcagccgtgcagtgatctccagctcgccgagcacgtcgcgctgctcgtcgccttccacggccatgccggcatcggtctggtcttcgtcgagcgcatcggcgtccagcgtctgtacctggctcggcgtatcgaccaggcgccaggcgtcggcgaacggcgccagactgacgcccgcgcccggcgcgagcttcactcgatgcacggtgagacccaaccgtgccgcgaagtcgccgaacaggccgaagctgttgcccgcctcgacgatgaacaggcgcggccggtagatcgccgtcacctggttcaggatgttgttgagcgtcgcgctcttgcccgaacccgtggggccgaacaggaacagatgcgcgttcatctgccggtcgaggcggttcaacggatcgaaggtgatcggaccgccgcctcggttgaagaacgtgatgccgggatgccctgtgccctggctgcgaccccagaccggggccaggttcgccgcgtgttgcgcgaacatgagttgggtgtaccactggcgcttgtcggcagccggatcgaacacgcacggtag

SEQ ID NO: 259639 - DNA, 471 bp, Klebsiella pneumoniae
atgagcctcgcgccttcccaggatcgcgcggagccctccggggcgcacttcatggcctggctgcgtcagagcatccagacgcgcaagctcatcatcaacgacgccaaggccctggtgcataccgtcgtcggtacgacctacctcgtcagccccggcgtgttccagcgctacgcgcaggagtaccttcaagtcgccgcgctggccaagcaagagaagctggaggggtggcagtgggtacagaagcgcttcgagaagctgggacagcaccgcaagcagccgagcgggctgaacatctggacctgcgaagtcacggggccgcgcaagtcgcgccggctgcacggctacctgctcgccagcccggatgcgctgttccaggagacgccgccagacaacccatacctgcggctcgtcaacgaggccgcaaagcgcgaagattcagcccttgggggcaaggacgacgatcaggcgtag

SEQ ID NO: 259640 - DNA, 282 bp, Klebsiella pneumoniae
atgcaccacgtcggccagggtgtagcccgcttcggtcatgatatctacgcagttctgaatcgccagacgcgactggtcgacaatcccgccttccacgacttcgccatttttcatcggcgtctggccggaaacgtacagccagcctcccgcttccaccgcccgcgcgaacggcaggtgctgcccgccggtaccggtaccaccttctacgccataacgcttgatactcatactcaactccttagtccatccgacgacgcaggaaacgccctgcccgtccggtaa

SEQ ID NO: 259641 - DNA, 249 bp, Klebsiella pneumoniae
atgatccaaataactgtcctcttgaagcgacttaagacgtttcgcgttatcaatatcagctttcctgtcgccgtccagcagcgtctggtgcaggtaacaaagctcggctttgtcatcggtagccagagcatacagggcctgatatacgcgcccagcatggcgctgacggtcacaaaaacgaacgccttctgccggcaggcggcttatcccccgttgcaggagataacccgccgcgctggttccccgtaa

SEQ ID NO: 259642 - DNA, 222 bp, Klebsiella pneumoniae
atggaagaattaaagttgcactgccatggttgcggcggttctttttctcgcgatgagctgcaataccgcccctctggcaagggtgcttatcggagagacttttatttctgcccggtatgcaatgagaaagaaaagcagaaaatcgccctctccgcttctgcttcctcgtttcgtaaaaccttgccgtcacgccctggacacctggcccacaagcgctggtag

SEQ ID NO: 259643 - DNA, 1503 bp, Klebsiella pneumoniae
gtgaaaataaatagagaaagtaaagatcgtagaaatacatttattacgtcaaacagtcattacgaattcttcaaaaacgaagacatatggattttagataagaatatcaagcttaatatgttaaatgttttaaatgtattagatgaaagacatcatgagtatttcttagatgttttagcaaattttgcaattacaaggtcatcatcctatacaaagaaaatgttctgggcattttatgattatattaagacaacagataaaggagtcatcactgatgagtctgttagagaataccatagtaggaatttattaaaaaagccggattatattaatagtataagagtttttttccgtaagtggtttaatttagaacttccaggtgtctctgaaaatcaagtgaaatgtttatatcaaggcaaacctaaaagaagggaacttggtaaagcggtaaaagttaaagatactaaaaaaggaccatttagtgatgatgaggtaattacctttaatgaaggtgccatgtggttatatgattcaggtgaaataacactcgatgaattggcaatggcgctgataacttcatacacggggaggcgacctatacagacgtcacacttgaaattgaaagatatcgtgagtctattccagaatgtaggaaccgattattcaataaattttccaagagcaaaacatagtggagtatttcgttctgagtttacaaagttgaaaataactgaagacttgcacgatattatcttgatattgggtgagagaagtattaacactgttgaaaactatcttggcagatgtgttgataattatgagttaaaggaaatacctttatttattgatgttattgcgcttgagaaaaacaaaaacaaatctaatattttagctcttttagaaaaagacatatttcatttaaaatctaatgtaattactacgaccatacagaaaatatcgataaaaactggttttataaaagatgattcttctattaacgcaagacgctttcgctattcacttggcacaagagctgcccaagaaggatatagtgagtatatcatagcgaagcttttggatcatagatcaacgagacttgttagctgttatgtaaaaaatgtaccagagtatgcagaaaggattgatgaggttatgacaacggaagttataaagtatgtgaatgcatttaaagggcatattataaataaaagtgatgctcaaaagaaaataaaaaatcacgagggtatagattcaggaaactgttcaaactgtaagagttgtgctgctatgattcctatcccatgctatacatgtatttattttaagccctgggtagatgcaccccatcaagatgtgtatgactttctaataaaagaaagaaaaagaatatctgggattacaaaagatataaaaatagctacatctcttgatagaacaatttctgctgtaagagaggtggttattaaatgcaacgagattaaaacaataggaggaataatatga

SEQ ID NO: 259644 - DNA, 774 bp, Klebsiella pneumoniae
atggttcgttctatcaaagaaaggaagccaataatacctaagaggcaagataggacttatgaaaatgacggtattgctgaaaatgtcataaaaattattatggatgtaattgatcctcattcaaatagtaatccatttaaaatttatgtaagacagaggaacgaaatattagttcttatgttatatgaacttggagtacgttgtggcgaacttttaaatataaagattgaagatattgattttcaaaaaaatagaattcgaattcaaaggagagcggatgaagtaaatgatttaagagttaaccaacctttagttaagacattaagtagaacagtttcattagataaaacgttagctttaaaaatatataattatattgtctttgatagaagtaaactttccaaaggaaaaggtggatttttattcctatcttataagcctggtccaactcaaggagacccactttctatgtctgcttatcacaaaataatttcaaaaatatcttcgtgcgatcctttgcttaacgatttaagaggccatcaattccgtcatacatggaactataacttttctaaattaatggattcgatgccaacgaaggtcagcgaaaagcaacaggaaaaaatgagagagagtctaatgggttggaaagaaaactctggcacttccagtatatataataaacgttttattaatgaaaaagcgaatgaagctgcattaaggttgcaggaacgattaaatacaacaataaggaggaagggtgaaaataaatag

SEQ ID NO: 259645 - DNA, 306 bp, Klebsiella pneumoniae
gtgtcgttgggcagcgggacgttgacctggcattgcgcggagcgcgtggtgtcgaacctgatcgtggcgagatccaccgggatgaacgggatgccggcgaacatgatgaccacgatcgccacccatacccggttctcgatgcgcatcgacgacagcacgcccttgttgccttcgtccgcaccttcgctgcgggccttgagccactcctggatcacgatggccacgaacggcagcgcgaacacgccgctggccacgagaatgctccagatgccgttgttgaccacccaagccaccagggtcaggtaa

SEQ ID NO: 259646 - DNA, 579 bp, Klebsiella pneumoniae
atgcttcacaactttcttaacccggaaccaacctcaacagggatccggtctggaaaccgggtgattggttactctgctgccattcgcttgctggataacggccgctatgacaaacacctcgccgaaggaatggagattctggcctgcatcatggaagcggtagaaagcaactggatcacgcttaacatcgagaagcaaatcatcgtctggcgctggttgcttgccgcagtattcatcactgaggagcgggagaagaatgggactgtcgacgttccgaacgacgagggcggtgttgacactgctgttatctattccggcgagcatggtgccattagcgtttacccagggccggaacgctttgcgctcgcaaaccacattgaggctggcgccattgagaagtacgggcctgatgttggcctgcagctggcgctgcggatgtatcaggacatggttgttgctgatgaagaacacggcttcaggttgtcggccatgggtcgggaaggtttcaacatgctacacgatggctttatcgagcaaatccagaccgaaggtgtgccagaagcaccaattatgcattga

SEQ ID NO: 259647 - DNA, 495 bp, Klebsiella pneumoniae
  misc_feature (411)..(420): n is a, c, g, or t
atgaacacgacagctaacactactcgtattcgctggtggatagccgggttaatgtggttggctattgccatcaactatatcgaccggacagtattatctgccgcagccccacatttaatcgatgaactgaaactcgaccccgaaatgatggggtttatcatggcggcttttttttggtcatactcgttattacagatccccgccgggtggttcgccgatcgttttggtcagaaaaaaggtcttggtttagccgtcgcctggtggtcaattgccacctcgatgatgggtgttgccacgggttttaaatcacttctggcactgcgtctggctttaggtgttggcgaggccgccgcctaccccagcaacgcagggatcgccgcacgctggtttccggataaagaacgtgccacnnnnnnnnnnccaccgtatccggactcttcgatagtgcgtcaaaatttggcggggcgattgccatgccgcttatcgtctggatga

SEQ ID NO: 259648 - DNA, 579 bp, Klebsiella pneumoniae
atgaaatacttcatgatgaagagtgtgttgctggcgattgcactccctgtccttgttgcttactttgggggttctaaagttatgtcagtgtattgggttcctctgtttttcgtcagtgcaatgcttctggctacagcatatggcaaatatgttgtcaaaaagaataactcatccactttcaattattttaatgacaataatgatgggatctatcttcataaattcaatgaatgtgaaatccggttagacacaaataaaaaagaggttttcctcaaaaatgagaaaggtgcaaaaacgtattcttttgatgatatcaaagagtggagctacaacattacatacggtggtgaagtggcaggtgctggcttaagtagtatcagagagaacggtaaaacattaggtcaaaacctctcagaaacaggtttatttattcgtgtaaaagacgttcgtaaaccagagtggcatatcaggttctatcctcgtaatagcgcttttaattcgcataatggcttgaatgacctgaaagcgcagctcaatcaatggatggagatctttgatcagaacttgaatgcagcatga

SEQ ID NO: 259649 - DNA, 1185 bp, Klebsiella pneumoniae
  misc_feature (852)..(861): n is a, c, g, or t
atgccttaccgcttcaagcacatctgtcaggtaggttgcatgaaagggatgcaaaaaatcaaaagaggaaaaacctttaatgggctaatttcttatttattaaaacctgcttcgcaccacaagtcagaaccgtatatagtaggtggtaatgtcattgagagcttcgcagaagcgttaagtgcagagttcaatgcgacgaagcttctacgttcagatgtcagtaaacctgtttggcacaattctctgcgtctgcctgctggtgagagtctacctatacaacaatggaagctgttagccgacgactatatgaagcgtatggacttctctgaaacgcatctacgtgcatacgtgcttcatgatgataaagatggtcaacatatccatatagtagcaagccgcattgatgcaacatccgggaagctctacttaggtaaaaatgagaatcttatcagcacacgtatcatccaggatcttgaaaaagactaccagctaacacaaaccaaaggaactgatgcactaaacccctcttcatcaccagtaaaacgtaaaaaatcacgtaatgaaacaatgttagaagagagaacaggcgagaaatgtgcaaagacgatcatacaagaagctatagatacgctcataaccagcaagatttccgaagaaaggtttgtgcagcagcttgcagctcagaagataaaagcaattcccaacagggcttcaaccggaaaaatgaacggtttttcgtttgagtacgccaacatttcattcaaggcttctcagcttggtaaaaagtattcatggaaaaacttagagccgttcatactcattgatacaatccaaacgatggaatctaatgcnnnnnnnnnngcaacagattttttttgggcagtgaatgcggaagacatattgcttccattacctgaacgacccaaacctctattagatgaatatttagatacgaaaacaataacagctaccaatagttatataaatatcgctatgagatggatagaagcaataccctggttagataacatagtcggtatcgtaaagagcttgaataatcctttctttaaacacaaaaacaaaccagcactgatcttttctgcttcaccactttctatagacctaccatctgttccctctgttgaaaaatctgtgaaaaaaaacgttttcagaccaaaaatttag

SEQ ID NO: 259650 - DNA, 498 bp, Klebsiella pneumoniae
atgcgggtcgatgcgccagtcgctcttgtcataaagcccgaagccgttggggccttccctccactcgggttgcggttcctcttgatcagagtcgtcgtgctgcacgagccatgcagcagtcaccgcaaaggcaagcagcagggccagccagaacgcggagtagagcagcgcaccgagcacggcgagcttgacgatccagagcaccgccgtcgccgcgcccgcgggcaccccgcgcgtcaccagccagccggcgacacgctgctcgcggcggaggtatccacgccaggcacggccagccccccggcccagccggtggctccagcgcccgttgtgcgtgttggtgctcatgctcatatgcctcggcttcagtggtgcctcacctcgcggagcggccggtcgtggcctgccctccagcatagaccgcgatcaggagggcgggttgcggccggcagagccgggttggctcgggccgcaggtcgattagattctgagcgataa

SEQ ID NO: 259651 - DNA, 279 bp, Klebsiella pneumoniae
  misc_feature (242)..(251): n is a, c, g, or t
atgcgtaaccatccgttagggatctatgagaaggcgctggcgaaagatctcagctggccggagcggctggtgctggcgaaaagctgcggctttgatttcgtcgagatgtcggtggatgagaccgacgagcggctgtcgcgtctcgactggagcccggcgcagcgcgcctcgctggtcaccgccatgctggaaaccggggtggcgatcccgtcgatgtgcctctctgcccatcgccgtttccnnnnnnnnnngtgcgccagcgggcgcgggagatcatga

SEQ ID NO: 259652 - DNA, 1218 bp, Klebsiella pneumoniae
atgtctgatgtaaacgagattctgaaaaaagtcaccgcttccattgaagaagcaaccggcaaatttaacgccaaagcggaagaagcgctgactgaagcgaaaaagaacggcaaattgtcggcggaaaccaaagaaaccgtggacaaaatggcgactgagtttaatgcgctgaaagaagccgaaaagactcttaaagcagcgctgggcgaactggagcagcatgttgcacagatgccgctggcaaacgcaaaacaggttattgaaactgtcggccagcaggttatctctgctgaagccattaaagttctgtcgtccagcatcgaagggaacaagcgtatttctgttcctgtaaaagctgctctgatttccagtgacgttcctgatggggttgttgaaccacaacgactgccgggtattgatgtagcgccaaagcagcggttatttattcgcgatcttatcgcgccaggccgtacgggttcaccggccattttctgggtgcagcagaccggctttaccaatgctgcggcagcggtaccggagaacacaaccaagccgtacagcaatattgagttcacgccgaaaatcactccagtgacaaccatcgcgcacatgttcaaggcatccaagcagattctggacgacttcgcccagttgcagtccatgattgatgcggaaatgcgttacggccttaagtacgtcgaagaacaggagattctgtttggtgatggcactggcgctcacctccatggcatcgtgccgcaggccacggcttacagcgcggcatttgccgttgaacagcagaacggtattgacgatctgcgcctggcaatgcttcaggctcaacttgcccgattccctgcatccggtcacgtcctgcacttcatggactgggcgaaaatcgaactgactaaagacaccctggggcgctatatcctggcgaacccggctgcgttgacggggccgacgctgtgggggcttccggttgtcgccactgaagcagcagctttccagggcaagttcctgacaggtgcatttaatgctgcggcacagcttttcgaccgcgaagacgcaaacgttgtgatctcgacggagaacggcgacgacttcgagaaaaacatgatctctattcgctgtgaagagcgtctggcgttagcagtaaaacgccctgaagcatttatttatggctcctttactgtgccggcttccggcggccagtaa

SEQ ID NO: 259653 - DNA, 669 bp, Klebsiella pneumoniae
atggggctgctggctatcgactatgcgctgcacggccccatcaatccttcactactggtagtgaccgataccaataagccgaagctcagctacgcccgccgtcattactcctctgagccgcagacgctgatccactacctcgacggccatgaggccagtcgcgatacgctgctggcgctcagcggcggccatggcttcgacgatatcttcgtgtttgtgccaaacgaacagctgatcaccctggcctcctcgttgctggctccggacggctgcctgaatttctttgctggcccccaggataagcaattcagcgccccgatcaacttctacgacgtgcactacgcctttacccactacgtcggcacctccggcggtaatactgacgatatgcgcgccgcggtggcgctgatgcaggcgaaaaaggtccagacggcgaaagtggtcacccatattctcggcctgaacgccgcgggcgaaaccaccctcgatctgcctgccgtcggcgggggaaaaaagctggtgtataccggaaaagccttcccgctcacgccgctgggcgagatcgccgatcccgaactggcagcgattgtggcgcgtcaccatgggatctggtcccaggaggcggaagcgtatctgctggcccacgcggaggatattacgcatgattaa

SEQ ID NO: 259654 - DNA, 213 bp, Klebsiella pneumoniae
atgaccaacgtccgtatcccggtgtggatgtcaaaaatgttcgaagggctggataacgacgccgaaacccgtcaactggtgggggcgaatatcgccatggacatggtgaagatcttaagccgggaaggggtcaaggatttccacttctacaccctgaaccgcgccgagatgagctacgccatctgccatacgctgggcgtacgcccggcctga

SEQ ID NO: 259655 - DNA, 378 bp, Klebsiella pneumoniae
atggaagtacaagcaggaacttttaatcccgccgatttcagctggcagggactgaccatgacgccggccgctgccgcgcatatccgcgatctgatgcgcaagcagccggataagaaagggctgcggctgggcattaaaaccagcggctgcgccggttttggctatgtgctcgaaatgattgccgagccggcgcccgacgatctgctctttgaatctgacggggcgaagctgtttgcgccgctgcaggcgatgccgttcatcgacggcaccgagctggattatgtccgggaaggtttaaatgaaatctttaaatttcataacccgaaagcgcagcatgagtgcggctgcggcgaaagttttggggtgcaggcggagtaa

SEQ ID NO: 259656 - DNA, 198 bp, Klebsiella pneumoniae; identical to SEQ ID NO: 137638

SEQ ID NO: 259657 - DNA, 684 bp, Klebsiella pneumoniae
atggatggaagtagcatcagatttaattctcatcaaataaggcatctactcaatactcttgcacagaggcagggactaactgatgaagaaatagctaaatggtcaggaagagtgaatgtaaaacagaaccgagtttacaaccatattagcgaggaagaaatcttagaaaaatatgaatcgctgaaagaacagtcagagaacttcattataactgaaaaaggtgattttaaagataagaactatattcatggctcgataccaatcagtggcaattcactgcatatcactgaatttggatattgtacacatgattatgtaatatcctcatgcgaaaagtttagagactgtgttaattgctctgagcaactttgcataaaaggtaatagtgaaaatttaacgaggctaaaaagcaggcttgcagaaataagcaatcttatagataaggtttcagatagaatgaatggagatattcagcaaatgaaaaatgatcaatggttaatggttcacacaaggaccaaagaaagattaattgaattgattggtatattggaaaatgaaaagattcctgatggttcatttatcagattagacaacacaaatttcacacatctttcaaggataataggagaacaaagacttttgaaacgaaatatggagaatataaatgtcaaaaaaactaactaa

SEQ ID NO: 259658 - DNA, 420 bp, Klebsiella pneumoniae
atgtcaaaaaaactaactaagagtgaaaagaatatgatacttgatacaatatggggatggagtgattcatcaattacatgggaacaactttgtgaggaatgttctgtatttcttaaatcccgaccgagcaggcaaactctgtcctatcacaaagatattgctaatgcctacctaagtaaaaaaaaagggattgttgataatgctaataagtttaaaaaaccatccagcctaatcaatgcatcaaaaataatttttaatctggaatcaaggatcaaacatctcgaagaagaaaataggaatttaaaagaacaatttatcaaatggcaattcaatgcatataaatacgatataaaggaacatcaattggaagaggagttgccaaaaatagatcgtagaaatgatgataaaaaaagaagatag

SEQ ID NO: 259659 - DNA, 567 bp, Klebsiella pneumoniae
atgaaaaaaataaccaagcaaacaaagaatacaatatttattgtggcagctcttgttggaatctgttcctacatttttcccagaagccctgatactcaaaagacagatgatatcgttggggtgtggacatctgattattcatatggcacacagagtgttcttgctggtgtcaatgtgagaacttcttatttttctaatgggaaatataatgtaaatggtcgaatgtcttttaagatagataatgcaaatggaaaaacagcccttattgaatattatgttagtggtgctggagagtgggtactccacgataaagaactgatagccacacttagcagcctgaaatcaattccagaccggattgtctctgatggaaaagacttcgacattcaggatcttgaaatattagaaaatatcatgcgcaaaaaatttccaactatcgaggaaagaatggctccaggaacaagccagtcttacatcatcaaaaatgacagtcataatcaaaagctactggaggtaataaatccgtttgggaacaactttgacataaccataacaagagagaaatag

SEQ ID NO: 259660 - DNA, 540 bp, Klebsiella pneumoniae
atgacagcagaccagattatcgaggggatcctcggaaaagagggtggttatgtcgatcacccctctgataaaggcgggccgacccgctggggcatcacgcagaccatagctcgcgcacatggctacaccggagatatgcgagagctgcccagggaaacagcaaagcaaatcctgctgagcgattactggaccggaccccggtttgaccaggtggcagctctatctacgttactggcggatgagctttgcgacactggcgtgaatatggggcccagcgtcgccagtaagtttttccagcgctggctcactgctctgaacatgcgcgggaagctttatcccgaccttatcccggatggcgtgattggaccccgaactatcaccgctctgaaggggtatctttctgcccgcgggaaagaaggcgagcaggtgctgctgagagcactgaactgcagccagggcgccagatatctcgaactggcggagggccgcgaagccaacgaggattttctctacggctgggttaaggagcgtgtcctgtga

SEQ ID NO: 259661 - DNA, 714 bp, Klebsiella pneumoniae
gtgaatctggttgcggcgcgtcacgatgtcgccggcgcgctgcgcgaccacggcgccgctcttgtggtcgtcggtctggtgcaagaaaccgccgcggggatacacgttgccccagaggttcaggccggtgcgcgtaccgatttcgcgccggccggggatgagcgcttcggggtagaacgcttccgggatgttgtagcgccaggcgatcgtgtcgagcgtgctcagcagatacggcatgaaggccgtgcccgcgccttcgcaggtgtagccggaggcgctggcgaactggctgaacaccatcccggccggatggccgatgacatcggcgttcttgaacttggcgaggttgttctcgttgtcgtgattggtcgtgccgtcaccgccagccttcgcggtcgggttaggcatgctcatcgccctgacttccagccacgggttttctccggtattcgagtagctagacaccaccgcatcggggacgtagtggcgcaccttgacggaggtgcgcaccgagcagccgaagggcgtgcagtacagccagtagcagattccgaccacgcggtattcgaggcagtcgggggacagcgccgacgagacgatggtggcggtgtccagggcgaacgtcgacgtggccgcgctcagcagcagcgaggcgacggtggcgcgcaggcggcggcatgccagcaggaggctcatggctgcgcgctctggtag

SEQ ID NO: 259662 - DNA, 276 bp, Klebsiella pneumoniae
atgtccctcaatacgtacttcagtaatatgttcctggtagttatcaagaactttaaggtagcgagggaagaaattatcaaggatctgtttaaattttggcttaagctctgtgcgatgttcaccacaaaaatggtattaaatatgataactcagctgaaaatctactcgtcttgtgtaaagattgccatcgaaagcaacctttgcacgaaggaatatttgtcactcaggctgacatggcaatcattcaacgcttacgttcccaacaagggcttttga

SEQ ID NO: 259663 - DNA, 621 bp, Klebsiella pneumoniae
atgctcgtcactgattcacttcttgcatacaccctcgctgccacactgcttactcttacaccaggtctcgataccgcgctcatcctgcgcacggccaccgctgaaggtggacgcaaagccttgcatgccgcgttaggcattgatctcggatgctttatttggggcgccgtggtggcctttggcttaggggcgctgctggcggtttctgagtttgcttataccttgttgaaatggtgcggagcgggctacctttgctggctgggcatccagttgcttctgcgcccgcgccagcaatttaacaccactccggcagaatccactaccaccagtaactggtttctgcgtgggatgctggggaatgtgcttaatcccaaaatgggtgttttctacgtttcgtttttacctcagtttatccctgccgggcattcacccgtgagctggacttttctcctggtcgctatccatgtattgattggtacgctgtggtcgttaacgctgattaccgccactcgctatgccgcaggcatcctgaaaaaaccagccgtagtgaaatggatggatcggacgaccggctgcctgtttctgtttttcgctgcgaagctggcaatgagtcggcggtag

SEQ ID NO: 259664 - DNA, 486 bp, Klebsiella pneumoniae
atgatgaaaatgcaaagtgtaatgttgttaaaaataaatgatttgctacacctaataaaaatgcaaaaaaaaggatatattatgaaaagtataggtattaataagtttattctaacatcaggagaacgatattgcatcattatggataacgaaaataaagccccgcttttttatcctaatttatacttaacaattcagttaaggaatagggaatgttctgtgttaacaatggaagcgacagccttaacactgtcgctattttatagatttttacgagagaatgatatatcaattgatgaacgtattttacataatagattcatatcgaattctgaaattgagcgcttgttcattttcttaacaaaaaaacgttcaaggcgcatacgttcacaaagtatatcaaagttaacattatatcacaggttaaataccatcgctggttatttatcgtggttaacagacacgctgtatagatatgatacatag

SEQ ID NO: 259665 - DNA, 306 bp, Klebsiella pneumoniae
atgaccgaagaggaaattaacggggaatatgagtatcagactggcgaagtgattattcagacctttgaagaacggcgcctcgatccggcgcaaatcccggcggtacttgtccattcacacggtccgttcgcctggggaaaagacgccgccgacgccgtacataacgccgtggtgctggaggagtgcgcgtatatggggctgttctcacgccagctctcgcctcagctgccggagatgcagtcggtattgctggataaacactatctgcgcaagcacggcgccaacgcctattacggacaaggctga

SEQ ID NO: 259666 - DNA, 204 bp, Klebsiella pneumoniae
gtggcgaactgccggcgcgagagcgatgtgcgctgccagatgtgttccagcagtttctgccgacgcggcgtggtcagcagcgatgcggccgactccggccgcatcgcccctttcggagtttcgatggcggatgtgggcggtgtgccggcggcgggtggcacccttttgcgctggaacagcgagagcatggcgaaccccggatga

SEQ ID NO: 259667 - DNA, 576 bp, Klebsiella pneumoniae
atgcatccagttattgcatgtagtttgctaatgatattctgtaatgaaaattttgtatcaagagaaaacggtggtgtttcagtaactggggcatttatccaattgcaaagagtaaacagtctttcatgtaaaagatcgctaacatcaacaagtttcgcatttttatcaatgcccaaaccttcagaaattgtatctggcaatttcagattattaatcttctctttcaacgaaaaaacaggagatttttcggacaataaattattggttagtttaacaaactcaataatcagcgatagactcatgtacgttttgaaagctgttgaccaaaattttccgagccaagcttcggttaataactggctaaaggatgtatccgggcgccaatatatacccagattggaaagatcctcaataccaatcgtatctttattcacacttagagctgttgacctgctccccgtattttcacacagactgctgttagttacttccgcctttggcacaaagcagacgttaagacttacagcatcgggaaacttctggatgccgcgtcagcggcatggaggcgccagatga

SEQ ID NO: 259668 - DNA, 732 bp, Klebsiella pneumoniae
atgaagcttaataaagtcatggctgtgatggtcgtcagctctgcgctggtgttatctggatgtagtgcaatgggaaccgccattaaaaagagaaatctggaagtaaaaacccagatgagcgaaacaatctggctggaaccttcaaataataagacggtttatctgcaaatcaaaaatacctccgataaggatatgagtggcctgcaggcaaaaattgccagcgccgtcacttcaaagggatatcaggtcgtcagtaacccggatacggcgggctactggatccaggcgaacgtgcttaaggccgataaaatggaccttcgtgagtctcagggctggttaagccggggttatgagggcgctgtgactggcgccgctttaggggcagggattaccgcttacaactccagttctgcgggagcaaccctgggggtaggacttgcagccggtctggtggggatggcggctgatgcgatggtggaagatgtgaactacaccatgatcaccgatgttcagatcgcggaaagaaccaaaactcaggttcagactgataacgtggccgtattacgtcagggaacatccggcgcaaaagtgcagacaagtactgaaacgggtaatcagcacaaataccagactcgcgtcgtctctaacgctaataaagttaacctcaagttccctgaagcccagcctgttcttgaagaccagctggcaaaatcgatcgctaatattctgtaa

SEQ ID NO: 259669 - DNA, 420 bp, Klebsiella pneumoniae
  misc_feature (343)..(352): n is a, c, g, or t
atgaatagcctggttccagttggatctccggcatctcccggaacattgctcccggtggccatcgattaccctgccgccctcgccctgcgccagatggcgctcgtacaggatgaactcccgaaatacctgctggcgccggaagtcagcgccctgctccattacgtgccggatcttcaccgcaagatgctgctggcgacgctgtggaacaccggcgcgcgcattaatgaagcgctcgcgctgacccggggggatttttcgctggcgccgccgtatccgttcgtgcagctggccacgctcaagcagcgtaccgagaaagcgaccaggacggcaggtcgtgcccccnnnnnnnnnncgcaggcagtcagatccatcgtctggttcccctttccgatcaccactatgtcagccagctgcagatga

SEQ ID NO: 259670 - DNA, 309 bp, Klebsiella pneumoniae
  misc_feature (233)..(242): n is a, c, g, or t
atgcagagcaaaaatattctgattatcgaggatgacgccgatgcggcagaggtgctggaagcctatctgcgtcgggaaagttacaccgttcgcctcatggcggacggtctctcagggcttgagcaggctcaacgctggcagccagacctgatagttctggacgtcatgttgcccggcctgaacggcactgaagtgctggcgaaaatcaggcgtagtagcgacgttcccgtcannnnnnnnnntcattatggtgacggctatcggggatacgcccgatcgtatcggtgcgctgcgctatggggcggatga

SEQ ID NO: 259671 - DNA, 948 bp, Klebsiella pneumoniae
  misc_feature (864)..(878): n is a, c, g, or t
atgaaacgactcttacttttattctgcctggtactgaccgcctgtgaccagaacaatacccacaaggacgcgccgatgaatccgctgactgatattaataccaacctggcgtttacctgtaaacaccagattattcctgaggcgtctgcggataccgatgtcctgtttaaatatgcccgctggctgcaaaaaaataatctggttaaccgggataaagcggtggatgcggaaattgcccgtctgtaccggatagcggcggaaaacggtcattataaagccagtattaatctgcagaatggcgcgctgcgcgggcgctttgcgctgagcagccatgaacgtctgcgcctgagtcagcaactgattgatgcgaaggtggccgccggctactactttattgccatctatctggagcacggtgcggcaggactggcgcaggacccggagatggcgctgcgttactatcgtaaggcggcagatgaagggaatcctcaggcgcaggcttttttaggcgaaaaactatttccggccaaaagagctcctcaggtagccatgcagatgtttcgatgcgctgccctacaaggtgagggaaaagcggctaattcgttaggaaatatgcttgcaatttacaaaaaatatccggaggcagttgaggttttccaactgggcgttgcagcaggagattcaacctcagccggtttcctgatgcacggattttccggacctgaaccaacggacaggctgttctatctggcactggagaaagacccggagcgtgcccgtcgttatgagcagataggcgctgtgctggcaaaatactcatgggctcagcctgtcgtcccggaaatcaacgatatcgtgccgctnnnnnnnnnnnnnnngaacccggcaacgggcaggccgttgccgacgtcaccggacttcgagaaggacagcgtggcggccccgtga

SEQ ID NO: 259672 - DNA, 252 bp, Klebsiella pneumoniae
  misc_feature (194)..(203): n is a, c, g, or t
atgtctgaaactcgttttcacggcgtccgctctcgcgaaaataccgacctacagcaggcaatcaatgacattgattccagcgtaatcggtattgttgcggttgctgatgacgccgatccggaaaccttcccgctcaatacgccggttctgctgacacgggtacgtaacgtcctcggcaaggcaggtaaaaccgnnnnnnnnnntacaaaacccttaaagccatttccgatcagtgcagtccgcgtgttgtga

SEQ ID NO: 259673 - DNA, 405 bp, Klebsiella pneumoniae; identical to SEQ ID NO: 229378

SEQ ID NO: 259674 - DNA, 393 bp, Klebsiella pneumoniae; identical to SEQ ID NO: 233642

SEQ ID NO: 259675 - DNA, 2640 bp, Klebsiella pneumoniae
atgagtaataacatcatcgatgccgtcacccagactgtgaattcactggtatcagcactgaagctgcccgacgaatctgcaaaagccaatgacacgctgggcagcatgaatttcccccagttcagccgtattctgccctataaggattatgattccgcgaccggtctgtttattaataacaaaaccgtcggttttatgtttgaggcgcgtcctttacccggtgcggataaaagtatcgtcgccacactggagcatttactgcgcagcaaacttccccggggcgtcccggtcagttttcatctggtctccagcaaactggtcggcaatgatatcgactacggtctgcgtgaattccgctggagtggtaaacaggctaaaaagtttaacgccattacccgcgcctactatctccgggcggcggaaacacaatttcccctgccggacaatctggatttgcccctgacgctgcgtaactaccgcgtgtacatctcctgctgcgtgccccggaagaagaactccgccacgcaaattgtggagatggagaaccagataaaaatcctgcgggcgtcactgggcggggcttacattccgacgcgtatccttgatgcggccgggctggtcgaactgatgcgtgagctgattaacccggacccgcacgagatgtaccgcgtaccgtataagctggacccctatcaggatctgaactatcagtgtgtcgatgacagctttgatatgaaggtcacggccggtcatctgaaaattggccgcctggggcgcgacgggaaagagtgcgtgacccgggtgacgagctaccatctggagaaagatccggaaatggccttcctctggtccaatgcggacaactacgccaacctgctgaacccggagctctccatctcctgcccctttgtcatcacgctgacgctgatggtggaggaccaggtgaagacccagaacgaagccaacctgaaattcatggacgtggagaagaaaagcaaaacctcctacgcgaagtactttccgaacgtgataaaggaaatgcaggagtggggcgatatccgccagcgactggcgaccaaccagacctccctggtgtcctacttctttaatatcaccacgtataccgccgataacgcagaggcctctctcgctaccgagcagcaggtgctcaacagttaccgtaagggtggcttccagcttatcccggcccgctaccatcacctgcgtaattttctggccatgatgccgttcaaatgcggcgaaggcctgttcaaagagctgcaggcggcaggcgtggtgaagcgggctgagacgttccaggtggccaacctcctgccgatcgtcgctgacagcccgctggcgccggcgggactcctggcccccacctaccgaaatcagctggcgttcatcgacctgttctacgagggaatgaacaataccaatttcaacatggcagtctgcgggacgtccggggcgggtaaaaccggtctgattcagcccctcattcgcagtgtgctcgactccggcgggtttgcctgggtgttcgacatgggcgatggctataagtccctgtgtgaaaacatggggggcgtatacctcaatggcgataccctcaagtttaacccgttcgccaacgtgctggatgatgctcactttgacatgtcagcagaacgtatacgcgatcagatgtcggtgatggccagtccgaacggcaacctcgatgaagtccatgaaggtctgcttctgcaggcagttcaggcggcctggttaagcaagcgtaatcatgcacgcgttgatgacgtagtgcagtttttacaggacgcgaaggacagcgatgaatatgctgattccccgacaatccggggccgtctggacgagatgataatcctgctcgatcagtacacggtgaatgggatctacggggactatttcaactcagataaaccaacacttcacgatgacgcccggatggtggtactggagctcggtggtctggagtcgaggccctctctgcttatcgcggtgatgttctcattgattatttacatcgagaacaggatgtatcagtcaccgcgtggcctgaaaaaactgaacgtcatcgatgagggctggaagctccttgatttcaagaatggaaaagtggggcagtttatcgagaaaggctaccgtaccgcgcgtcgacataccggcgcatacatcaccatcacgcaaaatatcgtcgacttcgactccccgaccgcctccagcgccgcacgtgcagcgtgggggaactcatcgtacaaggccattctgaaacagtcagcgaaggaatttgccaagtataaccagctgtacccggatcagttcagcaagctggagaaagacatgattaacggcttcggctcggcaaaagagcagtggttctcctcctttatgctgcaggtggaagcgaactgctcctggcaccgcctgttcgttgacccgctcagccgggcgatgtactcctccaaaggcccggattttgagtacatgcaagcgcgccggcaggagggggtcgatatccacgatgcggtatacggactggcgtgccgcaactttaaagacgaaatggcagagcttgaatcccgaataccggtgaatgacatggaggataaacagtga

SEQ ID NO: 259676 - DNA, 390 bp, Klebsiella pneumoniae
atgaaaaacaacaccgaacaaccggtcagtacgacctctcatacctttcgccggatacctgtcatcgttgctctcgtgcttttcgccctggcaaccagcgcgtttctctcacgcgtggttctggagtactccacgccgcgggtggtggcttttgatatgaagaagacgctcgacagctttatggacagtgtgagtcagaagcagctgacagaggcgcagtccaaagcgctctctgatcggtttaacgacgcgctggagaagagtctggcggagtatcagcagcagcatcatgtggtcattctggtttcacctgccgtggttcagggcgcgcctgatgtgacccgcaacatccagcacgacattgcccgccggatgaaaggagaacagtaa

SEQ ID NO: 259677 - DNA, 600 bp, Klebsiella pneumoniae
  misc_feature (584)..(593): n is a, c, g, or t
gtggttgaaatggcggatgaagttgttagtccgtctcagtatttaattgattggatgttgagtaagcactggaatgttcctgaagaacgtcatgtaattttaaattgcgagccatttcaagggtttgtgacgagagatgatgttacagttaaaataaatgaaaagccagcttctggcgttgagcttgtatttttcggccgccttgaaacccgtaaaggacttgacatattcctgcgtgcattaagaaaactatctgatgaagataaagagagcatttctggagtaaccttcctcggaaaaaatgtcactatggggaaaactgattcatttacttatattatgaatcagactaaaaatttgggactcgcagttaatgtcatcagcgactatgatcgtaccaacgctaatgaatatataaaaagaaaaaatgtattagtcatcattccatcacttgtagaaaactcaccctatactgtttatgaatgcttgattaataacgttaatttcctcgcttcaaacgttggtggaattccagagcttattccgcaggagcatcatgcggaagttctatttattcctacacnnnnnnnnnncgcttaa

SEQ ID NO: 259678 - DNA, 234 bp, Klebsiella pneumoniae
atgacgattgccgagtacctgaagcagaaagggcgcgaagagggaaaacaacgctggttacaggaaggcttgaacgaaggtttacaggcgggtgagcatcgcgaagcctgccgcatcgcactgatgatgttagagaacggcatggacactgaaaccgtattgcggatgactcgcctcagcgcggacgaactggcgacgctggcgcgccaggcacgccagtctccccccgcttag

SEQ ID NO: 259679 - DNA, 780 bp, Klebsiella pneumoniae
  misc_feature (731)..(760): n is a, c, g, or t
gtggagaaaaccgaggcaggcctcacggcagccaacagcaacatcgtcagcctgacggcagcggtgaacgccgggaatgctgccggggatgattacattccaaacccgtcatttgatccggcgtatgaccgcatgggttatgacgtggtggagaccaccgccgatggtgtgccggctgactgcccgttcaggtatgccgtccggctggccgggcgagaccatgtgccaaaaatcaacaacatcgccgtgacaccgggcgacgttttcgaaatgtctgctctggtagcgtgtggtacaggcagcgccgactttaatttctatatcggtcgggccaccaccgccaccggcggtatcggggcgagagcgtccgggggcaacactaagaccacctccgcgtggaaacgaaccacctggcgctttactgtgccggctgacacgaacttcctgcgaccgttcctgcaggttaatcagtccagcccgttcggcaccgtctggtacgctgccgactggcatatgcgcaacgtgacggcggcgaacagtgcgcagaaaaccgcagatgcgaccgcaaaagcggtggattcactgaccaccacggttagccagcagggcgatacgctcagcagcatcggcacgcggaccacctcgctggagaacagcctccggtcgacaaacgatacggtgagtaaaaaggctgacacgacagcggtgacgcagctgcagggcacggtgannnnnnnnnnnnnnnnnnnnnnnnnnnnnngtgaagcagcaggggaatga

SEQ ID NO: 259680 - DNA, 486 bp, Klebsiella pneumoniae
  misc_feature (382)..(391): n is a, c, g, or t
atggcagtgattgacctttcgcagttgcctgcgccgcagattgtggatgtgccggactttgagacgctgcttgccgaacgcaaggccgaatttgttgcgcttcatccgaaagatgagcaggaagcagtgatccgcacgctggaactggaatctgaacccgtcaccaaattgctgcaggagaacgcttatcgtgagttgcttctgcgccagcgcattaacgaagccgcgcaggcggtgatggcggcttatgccatagggagtgatctggaccagctcgctgccaattacaatgtgaaacgcctgacggtgacgcctgctgataatgacgctgtgccgcccgttgcagctgtgatggaaagcgatgaagcgttacgcctgcgtnnnnnnnnnngccaactgcagcttatgaatttcatgcccgaagcgccgacggtcgggtggcggatgccagtgcaaccagtccggcacctgcagaggtggtactga

SEQ ID NO: 259681 - DNA, 765 bp, Klebsiella pneumoniae
atgaactatgccgatcaggcttctgatctgagttcaatggcagccactgcaaccagcgagcttctggatgccaccactaactctatttccaacaacctgactaacgtcctgacgggcgccgcttcgtttaaagatggtatgtcgaatatcttcagctctctgggtgaaacggtgattaagacgctgatccagatggcaacacaggcgttgatcaccaaagcgattatggcgtcatttggcggcggagcgggtgggttgttcggtagtctttttggcggtgccagcggtgcggcaagtagtggtaccgctattcaaagcgcgggagctaatttttcattcaacgctctcggaggcgtttacgattctccgtcactttctgcctacagcaatggtgtttacagcactccccaatattttgcgtttgcgaaaggggcgggtgtattcggcgaggccgggccggaagccatcatgccgcttacccgtggcgctgatggctcgctgggggttcgtgcggttggtcgagagtctccggcggtacagaacgcagcaaatcagattcaggcgcagccacggatagctgttagcgtggacgcacgaagcacgttcaccggcaaaccggatgacataacgatgcaggctgttgagcgaagaaataacgctcttgaacagcggataattaacaccttaaccgcagaggtagataatccacagaagaaattcggccgggctatttactccaatctacagtccaaaaaaccacgataa

SEQ ID NO: 259682 - DNA, 474 bp, Klebsiella pneumoniae
atggcagatattttctacccggacgaatacctgcccatgccgcttatggacgggtacgggtttaagcccatatcacctttgctgcgaacggagatgacgtccggtcgcgctcaacaacgaaggcgatatacctcaacacccacccaggcatcggttaaatggatttttaaaactgatgctctggcgcaggtgtttgaggcgtttttcagggatgcgcttaaagatggccagtcctggttctatctgaaactccagactccagtcggggtaaagccttataaagcaaggttcgtggatatttacgaagggccgacgctggtcgcgccaaaatactggcagtacagcgcaacgctggaattatgggagcgcccgttaccgccttcaggctggggaaattacccggaatggctggcgggccagtcgttactggatattgcgctaaacagagagtggccgaagcatgacaattcttga

SEQ ID NO: 259683 - DNA, 477 bp, Klebsiella pneumoniae
atgacaattcttgagcgactatatgccagcagcggatcggaggttatccacgatacgctgcagatatccgcaggcgatgataactactggctgaccagtggctgggatgacgtttcagtgacgctggaaaatggtcagccggtgacgtttgatgccagcgcgatagatatcgccttaccagccaggaacgccgacgggacacaggatttaaagtttgctatcagcaatattgacggacgggtttcagaggcgatcgataaaattctggatgaaatgaaatcagccacgctgacattccggcggtacatttcatctgatctgtctgctccggcatcatcaccgtatacgctcgatatcaaatccggctcctggaccccgacagcagttcaggtcacggcaggctatatgaatgtcctcaaaacagcctggccccgtaaacgttacaacctcgccgagcatccgggcttacgttactaa

SEQ ID NO: 259684 - DNA, 381 bp, Klebsiella pneumoniae
atgtttaatcctgataaataccgttcagtcacctggctgaagggcgggcgcgtatatccgcagctcgactgcttcggcattgtaaatgagatacgtcgcgacctggggctacctgaatggccggattttgcaggtgtgaccaaagacggcgggggcctcgaccgggaagcgagaaagctgatgcttacgctgaaacgttgtgaaccctgtgaaggtgccggagtggcttgctattcgggttcaacggtttcccatgttgggatcgttgtgatgatcgataaccagctgcaggtcgcggaatgcaatccaggctcgggggttacgtttctgccactgtcgcgatttatccgtcgctttaaccgcgtggagttctggcaatga

SEQ ID NO: 259685 - DNA, 204 bp, Klebsiella pneumoniae
atgacctcacagctgatgcgcggtgcggcggataatgtcatcctgaatctccttcgacagctcaacaaagaaggcgctgtagcccgcgacccgtaccaccagaccggcaaagtcctgcggccgctgctgcgcttcacgcagggtgtcggcattgaccacgttgaactgaatatgctgcagcttgagcttgcagaaggcctgtaa

SEQ ID NO: 259686 - DNA, 258 bp, Klebsiella pneumoniae
atgctcgcccagacgccgggcgatttctttcgcggcttcgcgtccaacttcgtcattgtccagactgagccagatttcgtcgaagcggtccaggttgtgatactcgtactcaatccactgctgcttggcgcccttcccgccaccgaacggcaccgacagcgcactgatgcccagttgcgagtaggtcatacagtcgatttccccttcgcacaacacgacagcgcgggctttggcatccatagcctgccagccgaataa

SEQ ID NO: 259687 - DNA, 264 bp, Klebsiella pneumoniae
atggttaattttcggaataaaactcgagaccagacggccttcaggcccgttgctcagcaccacatttttccagtcaggcatcagcaaatcggtggtgttgtctccgcgaaacagtttcatatccaggcgctcgcccaaatagatattattgaaggtataagcgccttcgcaatattgccagtcggcatcactaccgatgatcatttcgcggtctgcaaacttcatataaatgtcagcgatgacctgtggttcaccgatggttaa

SEQ ID NO: 259688 - DNA, 876 bp, Klebsiella pneumoniae
atggtgcaggaatcccgctgcgtcaaaggttcgatattacttaatcatcgtctcgaaaaagaatatgttgaagatgatttccatattttttatagcctgcaagggcgagacgccctcaaatatcagtacgacagctcaggcagtggcgtccctgacagtatcaaagatattgccgggcaactacaggccgctaaatacctctattccagtgtgcttggccttcgctttccgttacagcaaaagatctatgctcaggccaggcaaatcaatgtctatgtgctgcaactgccgaaaggaaatggtttggccttcgatcgcgtggcggcagaaacgatgagtgacggcaggaagctgccttgcggtttaaagtttgtattgaatgccgcgctggaaccggcgcgtaacattacgccagctcatgaatttttccatctttatcagtatggctatgccgtttttaaacaaaaatggtatctggagggaatggcgcgatggatagagaacagctttaaagcgcctgagaaaaatacccggcggctctctccgcttcctcattgcgacagtaattttacccggggttataacgccgcgaattactgggcgagctttgcgcaagcacattttgctgatgtcgctatccccgccgcagcacagcgttttcgttacagcgacggttcgccagttttaatagcgcaggaagtaaaggggggagcaatgctagcgccgttttttaatcagttggcgcaggggagcgcggcacagtcgcggcagttaaatcaggcgaacatccgctggtctgaagctcagcagcgcagtccgcaatttaatgaggcgatctgtcaggcgttggccgccgcggtggcaaagaaaaaatag

SEQ ID NO: 259689 - DNA, 2142 bp, Klebsiella pneumoniae
atgcgtgatctgatccttcaactcagcaaaagttcgatttattcaacaaagcctgttcatgtccttaacagccacgatctctcattaaaagccaagcatcgcatcatctattacgacggtgaggcggcttttgccttaatgcgcttgtatagcttgacgttggcgccgcagtggctggttatggtggagaaagcatttgaatacttcattcgacaaaaacactggcagcatcacgatcactggttgagctattgcgttaacgaattaacgcgttttcgcccggaggagcgttatttccgcttcgggctggacaacgtgcgcgatcatctggatttcgtgctgcaacgggtaacaacctatccaacgctactggagttaatgatggcggcggcggaaatgattgcgcgcctggaggcctctaccacacagcgccatttgctcgacgactttgataaagacaaattttaccaggcgctggaggcgcgggcgcgttatttactggatggtttcttctggccagagctggcgatgttttttaaaaatcctgcgcgtatcgttaatagtttctttattcgtcaccatagctatcgtgttcgaattgatgatgtagagcactatctgtcaggttatatcgcttatcagaagtattttcaggcagccagcaaacgtcagcaatcgccaatcgcggcgccgcccgcgcctcggggaacgaccctttttttgttagagaatctgcgcgacgtggggaatggtattgaggtagcagctacccggcgagcaaggctgtttgttgaacatttacacactgtcccgtggcttatcaccgccgtctggaacccacaccttaacgatgcggtaaaagcgttgaaggcgcggggagcgttgccggaagcggtgccggtttataacctctacaatgcattagcgtcgtgcctgagtgcggggaagatcgtcccgcttcccgggctgaaaggggaggttgagcttcgtcagacagttgtgccgaaagcagaggcgccaatcggtaaaaataattatcaattacgcccgcaggggcaattggtggaagattacgtcgatagcgcaggaaacgtgttgctgcgtaaatattttgatatcaagaaagcgaatctgcagattatccgcatggatgtcgctttgccgggcggggaggtcaaatcctttaaccaacaggaagcgtttttctcctggatgctggaaatgatgctgcccgcagcgggcaactggcattttatcgtcgataaaaacaaagcgtggaaagattttgtctgttcgcaaccggcacagcggatgaactgcacggttagcgcggttatccactctcatcatcaattgctaaacggcgggataaaagcttcttaccgtcatttactggaacaaccgcaactggtggatcggttaatcgtactcaccgacgaacaatggcaagatttacagcaagaggggatccccggcgctcgccttgtggtcattcccaaccatatggatgacagcaaaattccggttaacccgcaaaaggagccctcagaaacggtcatttacctggcgcgttattctgaagaaaagcagcatctgacgctgttcaacgcattccgtaaagtgtccgcgcaacgtcccgatgcgcggctccatacttatggcgtcggcccgcttcgccgtaaacttagcgaccaggttaaggcgtggggattagaagacgtgataaaaatcaacggatttacctcggatattgctgccgttcatcgacacgcttgctgtacggtcctctgttcaaatcaggaggggcaatctctgtcggcggtcgaggccatggtctacggcacgccgttaattagttttgctattaaatatgggccgcgcgatattctgcaggaccgccaggccgggattctggtgccttacggcgacgaagaggcgttggccgcggccttagttcgggttatttccgataaggcgctacaaaaagagatgcaggccgccgctatccgcaatgcgcgccgttattacgctaccgcgatagccgggcgctgggaaagctggttacagcacaatgagcagcgaatgaaggagcaggaggagaagccactcaatgtggcttcgctcaaacaacgtgtcgtgtaa

SEQ ID NO: 259690 - DNA, 582 bp, Klebsiella pneumoniae
atgtgcagcagcgactgggctgagctcatcaccagcgaaaggtactcccgctgctccgcggtcagcggcgtgtcgaggcagagctgcgtcatgccgagaatgccgttcatcggggtgcggatttcgtggctcatattggcgaggaaagcgcttttcgcttcgttcgcctcacgggcctccttcgccgcctcaatggccagcagctctgcggctttgcgccgggtaatatcctgcaaggtgccgatcacccgctctgcctgctgctgcatgttgagggtgacgatctgccccgagagcagcatccagcgccagccctgcgtcgggtgctggacgcgaagctcacattcaaaaaccggcatgtgctcgttttgcgaggcgatcatcgcctgctgcagagtggcgcgatcgtcctcgtggaccaggttgagcataaagcgcagcggaaagcgccactgcgcccgcgactggccgaccatcgccagcagggtgtcattcacctgcaggctgtcgccggagacctgccagtcccagatgccgatctggatcgactccgcggtgaataaaaagtcatcatgcagttga

SEQ ID NO: 259691 - DNA, 396 bp, Klebsiella pneumoniae
atgacgcgaacgccgggcctcgtcaagctcggtgatgtcggtatgcaggctgacaatcccgccatccgccagccgctgatgctgaacgtaaatccggcggttgcccgactggcggacctcgcagtggttcgtctggcggcagttgcggataatcgcctcgcgcagcgtctgttgccggcctgggtcgatgttatatccggcatcgataaacttctccgccaggctctcaagagaggcgccgacggcgagccagggcgcgatcgttggataaaacagcgccaccttatcattccaggcctgcagtcgttcgcgctcatcgtagatcatcaccgccgagggcaggaggttaaggtcgttacggttagcggcatgcatgattactggccaacagtttga

SEQ ID NO: 259692 - DNA, 399 bp, Klebsiella pneumoniae
  misc_feature (358)..(367): n is a, c, g, or t
atgggcgacacccttatcgccctgctcgccgccagagagctggggttggtaaaggaagcggaattcgacgcccgcctgacgcccctgctcggcaccctcaatcgcctgacgctgaccgacggcggttcgccgggcaggctatactccactcagacggcgacccctgtcgacttcagcggcaaaccggcggccagcggctggtcagcaaaagatatggcccgactgatgctcgccctgcggctcaccgccgaacgcgcgccgcagtatggtgaatacattgataaaattgtcctgcgctggaacttctgtccggttatcgataaagacggggagctgtggtccgcctcactgcagaacnnnnnnnnnnatccgcgaggagctccgactgggagacagtga

SEQ ID NO: 259693 - DNA, 198 bp, Klebsiella pneumoniae
atgaacggcgatgccgacaatgtggtttcacccagccagtcaacgcttttacacgaggcgctggtagcgaaaaaaataccgtccacccattacgtggtgaaaggggcggatcacgcaggtttgatgtggtatcagcctgaagtatcaaaaattattattaattttttagaccaaaatctcaaagataagcatcaataa

SEQ ID NO: 259694 - DNA, 612 bp, Klebsiella pneumoniae
atgctcggagcgagcggtgaggatcccggtgatggcgtagcgattctcctgggcctggtagacccggtcggcaaagtttttcatccatggatgggagtactcgcgcgggctatcgttccggtcagcaggattatcaaagccaaactccatgccatacagcacgtaagattcactgaccacatagttatgctggctggtttgccgcgggtcgcgagaatcataggggaccatcacgcagtaaatttccgccagctcataaggctggggccggctggcctgacaggtattaaatccccacagttgaaagcccgccgcgccgtactcctcgtagccgaggcgtccttcctgaacgtatttgggctggccgttttccagataagccccatacagcgtgccgcaggggtcgacaacatggctgaagtcccaccccagcaccacgttatcgatgctgttgctgtattccgggtagcgctccttgatcaccttcagccagatcagcattctgccgatatccagcgccgaatagcctatttcacccggcttgttctggtagttcaccttttgtccgctcacggtgttataggctttgttgggcaattcgttacggaataa

SEQ ID NO: 259695 - DNA, 1167 bp, Klebsiella pneumoniae
atgacgttgagccaggattttccgccgctccctgccccgcgcgagctgacctttgacgaggcgatctgggcgcgagtggcctggcagtattatgtgaataatactcagccaaacggtctggccaacgcgcacgatgacgaaccctggcttagcctgtggagcgtcggcagctattttttcgccgtggtcgccgcagagcagctgcatattgtgaccgccgccgaaggcgatctgcccctcaacgcccagggattgcccgccgctcagtaccatgccgacacgctgcagatcctcggcaacccggactcctccgccatcggtatgggacgcctgctcaccgccctgcaaacgctgctctggcgctatcctcagcacgccgccgcggtgcgggatctgtttaatcagtggcgggtcggcgcgctcatcagcaacagccccgccagccaggccgcggcgccgctgcaccactggacgctggcggcggatgaaccgcgggacagctttggctaccggctgtatgccagccatacgctgcggctgatcgacagcgccgcggggctggcggtgaccaacccgccgcaggggcagcagatgatcgacatcgacggcatcatggtgcccgacgaggggctgcgcacgccgtgggggcggcaaccttcgctgatcagcctgccgtacctgctcaccgggcttgagctgggctttgacgcgcagagtgcggagatcgcctggcgcatcatgcaaatccagcagcgccgtcatagcctgagggtcagcaagccgccgatcagcaccgactacgccgagcccgcgccggattatgccagcgcgctggcggaccggcagccgcagagcgccttcgccccgcgcagtgccaccccggagcaaacggcgatcacctctacccgcaccgcctttgcctggtacgccctgttccgcaatagctggagcgaagcgcttcgccagcaggtccagacgctgcaggtcccgggcaagggctggcagcgtgggttaaatctcaaccgcagcgtcaacgacgttgttgacggcgataccaacgcgatcgtgctggaaagcctggcctacatttcccgggggcagatgctgtgtctggcctgcctgagccctgcccctctaccctcgtcctcagcaggagcaacgccatga

SEQ ID NO: 259696 - DNA, 183 bp, Klebsiella pneumoniae
atgaaactgatcactctactgaacaagcattttgatactgatttaaaggagtatgaggacgagaacggcgttaaccaccccgctatatgggtttatgagaaaggtgaagactgtgagcctgtcgtggtgttatcagagactgaactcaaagcgttagtgaaagctggcaaggtaatgaagtga

SEQ ID NO: 259697 - DNA, 1248 bp, Klebsiella pneumoniae
atggcccttaccgatatcaaagttaggactactaagccttccgacaaaccctttaaacttacagatgggcagggtatgcacctgctgatcaaccccaatggttcaaaatactggcgactccaataccgtttcgggggcaagcagaaagttttagcattaggtgtttatccaatggtctctcttggtgaagcccgcaggaagcgagatgaagccaaaaagttggtatctgatggtatcgacccttctgagaagaaaaaagcagataagattgagcaaagcgaagccctgacattcgaagctgttgcgagagactggcatactgcctgtaaaaggaaatggtcagattcccatagtgaaagggttttaaagagccttgaagacaaccttttctcttccataggacagagaaaaatagccgagcttaaaactaaggatcttctcgatccagtcaaaactgttgcggcttctggacgactagaagtagctgcacgtctgcaacaacgaaccacagcaataatgcgatatgccgtccagaatggcttaattgattataatccagcacaagagatgtctggagcaattgctgttgcgaaacgaacccacaggccagcattaccatttgataggttctcagagcttttagagcgcatcgagagttttaaaggtaggaaacttactaaattagctgtgaagctgacattgctcatttttatccgttccagtgaactccgattcgcaagatggtcggagatcgactttgtaaattcgatgtggactatcccaggagaacgcgagccattaccaggggtcaaacattcccatcgaggctcaaaaatgaagactccacacctcgtgccgttaagtcgtcaggctttagaacttctaaaagccatcagagaaatcagcggtgaatgcgaccttgtattcattggcgatcatgatttcagaaaacctatgagcgaaaacacagtcaacaaggcactaaggtcgatgggttatgacacaaccgttgaggtatgtgggcatggttttagagcgatggcttgtagtgctttgatcgagtcaggaaagtggtcgagagatgctgttgaacggcagatgagccaccaagagcgaaactccgttcgtgctgcctacattcataaagcagaacacctcgatgagagaaggcttatgttgcagtggtgggctgattatcttgatgaaacaactaagagaagaattgcaccttttgactttaataactaa

SEQ ID NO: 259698 - DNA, 774 bp, Klebsiella pneumoniae; identical to SEQ ID NO: 244537

SEQ ID NO: 259699 - DNA, 618 bp, Klebsiella pneumoniae
  misc_feature (576)..(585): n is a, c, g, or t
atgttacaagttcataatgagatcagtcgacaaactgaaaaacgagatgcacttcttaagtctttaaatgaacaattaaagaaagagtgtaaaaaggatgcagaaagtgaggccgtaaaattacttaaccaccaaattgacgctataaaaaatggaggtgtaattccggaggatgccgaagatcctgcattgccgggctacgtccttctgatgggtgagccagaaaatgctttgcatccaatggcagcaagagctgcacaatcacacctttatgctctgggaaaacatcctgactggcaagtattattgactacgcactcaccttactttattaacccacttgaagaccatacgacaattgcacgtatgcaacgttcacctgatgggaaatcattatctccaaaattatatgtcgcagatgaagccaacttttctgcagaagagaaagataatttacaggcattgcaactaaccgatataggttttgcagaaatattctttggcagttatccaattattgtagagggtgatactgaacatgcggaatttatttctgcaatagtaaaaactcagcannnnnnnnnnaggaaagataagcattatccgggcgcggggtaa

SEQ ID NO: 259700 - DNA, 246 bp, Klebsiella pneumoniae
atgagcctgattattgtcagcaatgatttatcggaagaagtacatctggtgaaggtggagaacggcgcggccacggcaacggagcgactgagcgggaacagcgtatcagcggaggaaatggaaaccctgtttcccggattcgccgacgcaattaccgcggcccaggatactgccgaactactggggacgctgggatcactgaatgagagttttatctgggcgcaggtgtccggcgccctgcggtaa

SEQ ID NO: 259701 - DNA, 228 bp, Klebsiella pneumoniae
atggccggcggcgcgcgcggggtcatcaacgccctcggcaatcttggcggtttctgcggcccctatgcggtgggcgtcctgatcaccctctacagcaaagacgcgggggtgtattgcctggctatctccctggcgctggccgcgctgatggccctgctgctgccggcgaaatgcgatgccggcgccacgcccgtcaatacggtgaatccgcggaagcacgccgcgtaa

SEQ ID NO: 259702 - DNA, 768 bp, Klebsiella pneumoniae
atgaactcatcatcggctaactttctcgatgcgttaggcgccagccagacgctcagcgcgcaaatgaaacacgagctcgacaccctcggctacaccgtcgtgcataacgtcgttgacgcccagtggctgagcgaaatgcgcctgcttattgacaccctggttgaacgcgaaggcgataatctggcgatggagcaccatcaggaggcgacggcgacgcggatcgctaacctgattaataagggggttatctgggagaaagtctggtcacacccgctgatcctctccgcttgtcgctatatcttcaacggggattttaaagtctccagcctgaacgcccgcgaggcgctgtataacggcggccaccagccgctgcacgccgactggaaaaagccgcgcccggattttcccaaagtccacctggtgaataccatctgggcgatagacgatttgagcgccgccaacggcgcaccgcggatcattcctggtacccacctccgccccgagttaccggaggaggtgctggccgacccggaacaggcccatcccgatgagattgtgtttgccgcgccggccggcagcgtgatgatctacaacgcccacgcctggcacggcggcacccgtaatcgtgaaggcagcagacgacgcgtactgcatgggttatatatcgatcgtgcggatacgccgcagcaggaccagcggcgctggctcacgccggagacggcaagccgcctgacgccggcgcaaaagtggctgctggatgtagaataa

SEQ ID NO: 259703 - DNA, 339 bp, Klebsiella pneumoniae
atggacgtcaaaggcacaggcgcattaaccgatatgcccgacaacgtaatggctatctggcgcaatatcccccgagaactggcgcagcgtaaggctgagcgaatgggatatgagagtctggataaggacgaacagacagctattcagatgccagcttcaatgatccgcctgctcaaacagcgtgagggagaagggtggattggtgacattggcgccacctttgacgcccggtcacaccagtttcttgaaggcgataaggggccgtttaactacctggtcggtaaacaacaaagcgaactcgatattgagtgggacgctgataacgttacgaggtactga

SEQ ID NO: 259704 - DNA, 687 bp, Klebsiella pneumoniae
atgaccagtattaagataaaggaaattattggccaattttcggaggatctgattgaattaataaaaatagttttctcatcacactattttaacattacaatagtcccttcgacatataaccaatatatgaggaatggagctaattatttacgattagtccagaaaacagaaggtgttcccactcccacacctcttcatccaaataacgagggttttattaaaagttttaagaaaagaataacccaattgtcaaagattaataaaaaatatcgtgatttatttgttctatttgattacggcttgcatctcgaaaaaatgggtttatttaacgacgcttatatagcctattataaaattattgaatcctgtttcaaagaagctaatttcctgaaacattgggatgaattaaaccagagaccgaggaaatacatagaaggttatacaaaaataataccatcaatgaatcaaaaaatgatgatgtttacattatatgaaatgttctcatccgcaagtaatgttgaggaagataaatttataccaatcgaaaattttttgaatgttgcagaaataagaaacaaactatctcatacggcatcgattaccattcccactgaattatattctttatgtagagtcgtttcgtattcgatgttagatcttacatgttttcatgcgaacaaaaattaa

SEQ ID NO: 259705 - DNA, 567 bp, Klebsiella pneumoniae
atggatctggcaaaaccggagtggaaagggcgctgggcggcttcgccatcgggggctgatttccaggctatcgtcagcgcgatgctggcgctgaagggtgagcaggcgactctcgactggctgaaggcgatgaaaaccaactttgtcgcttacaaaggcaatagcacggtgatgaaagcggtcaacgccgggcagatcgacggcggggtgatctaccactattaccgcttcgtcgatcagtcaaaaaccggcgaaaacagcaaaaacacccaactgtattacttcaaacaccaggatccgggcgccttcgtcagcatttccggtggcggtgtgctggcttccagcaaacataaagcgcaggcgcaggcctttattaaatggatcaccggcaagcaggggcaggatgcactgcgcaccaataacgccttcgaatatgccgtgggggtagatgcggcctctaacccgaaactgaccccgctgaaagatctggatgcaccgaaggtagaaccttcctcgctgaacagtaaaaaggtcattgagctgatgacgcaggctggcctgctctga

SEQ ID NO: 259706 - DNA, 651 bp, Klebsiella pneumoniae
atggtctatatcattggtacgcctatcggtatctttacggaagcgctgacatctttcctaagaagtatgggcacgtcatcgaatcttgtgttgggcgcagtgataggcgctctgtgtattgttgactttggcggcccgcttaataagacatgctttgccttcgttctcacgctgcaggcgcagggaataaatgagccgattaccgcgcttcagttagttaacaccgcaacgcctattggtttcggcctggctttcttcattgctaagcttctgcgtaagaacatctataacagtgaagaagtggaaaccttaaaatcggcggttccaatggggattgttaatatcgttgaaggctctatcccgatcgtcatgaacgatatcgtccgcggtatcgccgccgcggccatcggtggcgcgtgcggtggcgcagtcaccatggtgtatggtgcggatgccacggtgccttttggtggggtactgatgatccccaccatgtcacacccgatggctggcattatggccctgctggtgaatattgttgttaccgccacggtttatgctgtcatcaaaaaagatattccgcgtgatgtgctggttactcatgatcacgaagaagaggatatcgaccttaatgatattaaagtgagctaa

SEQ ID NO: 259707 - DNA, 531 bp, Klebsiella pneumoniae; identical to SEQ ID NO: 185372

SEQ ID NO: 259708 - DNA, 312 bp, Klebsiella pneumoniae
atgaatattgtcggagttaccgcctgtacggtggggattgcacacacctatattgctcaaaagaaaattgaaacagccgccaaaaaagccggtcataacgttaaaatcgagacccaagggaccatcggcattgagaatcagttaaccgctgatgagattgccatggcagatattgttctgcttgcggcggatgttaaagtgacgggagaagaacggtttgcgggtaagaaagtggtcaaagtcgccacggaaacggcagtgaaatcccctaataaactgattgaaaaactcagtgaaatagtcaattcataa

SEQ ID NO: 259709 - DNA, 360 bp, Klebsiella pneumoniae
atgatcaaacctaaaacgccaaactcaatggagattgccggccagcctgccgttatcaattacgtgcctgagctcaatgcattccgcggtaagttcctgggattatcaggatattgcgattttgtttccgatagtattcaagggttacaacaggagggcgagatatcattacaggagtatctcgcagattgtcatgaagcggggattgagccttatgctcacccggaaaagatgaaaaccttcacgctgcgctatcctgagtcatttggtgagcgtcttagctccgccgctgcggaggagcaggtttccgtaaatacctggatccttgagacgctcagtgaacgtctcaaaaaggcttaa

SEQ ID NO: 259710 - DNA, 1023 bp, Klebsiella pneumoniae
atgttgaacatgaaagatactcacggcccagttccggaattcgtaagtgatggtaaaattaaacttatcaatgagaggttatttaatttcactttaaaaagaattagttacataaatggtgctttatgcgatggtttttctgatgctcataacttcatttcttatataccatcaggtaaagttagagagcacaatagccctaattattttcattacacatctgttgacaactttaagaatatcattcattcaggatcattttgggcgtctcagttaggtgcaatgaatgatcctaaagaattaacatatgcacaagaaaaattgatacatcaaatatttcttttgtgtgagtcaataaagatagaaaagaacacagtcactcacatcatcaaaaatatatcaactttttttgataggtatatatttaatgattttttctgcatttcacttagcaaacgaggcaatttgtctagtcaatggtctaaatattcatgcgaaaatggcgtttccttttctttaaatacaaaaattataaattacataccggatttttacaataaagctattttgacagatgttgtttatgacccatcagaacagctaaaaatacttagtcgattagcacaggatatgatggaaagcaaaattttattacttaatgagaaatcggctcatgcaattttaaatgagcaatttaaagaatcccttacatatattactgtagcatttaaacatgccttttacatggaagaagaggagtatcgaattgtgataccttctaaaggaaatgaatcccatataaaaacaaagccagacggaattagtaagtatatgcacattgagtttatgaatatatataaatacaaagaagacatagacattccaatagaatatatttttaccgccccaacaaaaaatgaacgaaaggcattacataatatcaataaactcctttccgctaaaaatattaaatttggaatgataataggatctggtgcatcatttatttggccaaacaagtaa

SEQ ID NO: 259711 - DNA, 129 bp, Klebsiella pneumoniae
atgattgcatacatagtgccacaacttatcagcaacgaggtttgtaaccaacatccagaaaaaaatttgaaagctctgaacgtgttatttcaatatgataggaatgaagcctgcatcactattcattga

SEQ ID NO: 259712 - DNA, 1821 bp, Klebsiella pneumoniae
atgcagattactaatattttaatatggcaaattgattcaaccttgaggaatttagaacttgaggaaaataaggtaaatgtaataacaggtgattctggcaaagggaaatcctcaatactggctatcattgattattgccttttatcctcatcatctgatggtatatcaaaaacaaatgtcgataattttgtaaattggtatgggattagattaagtataaacggtaaatatttcactatttgtagaaaagcgacacactttgaagaagatgatctagtttactttgacaaaaatggagacattccacaaatccctattaacaatatcaaaaaggatgttttaaaggaacatctgaattatgagtttggtattaatagttctctaaaaatcccttatggtggtagattcatacaacaagggtcaaaagtatcctatagatattttatcccgcattgctttatagatcaaacaacactaacctcttcagaacatctttattcgaaaatctccgatttaaagacaagagagcgtattgaccgaacctttgacatggctcttggcagtgaaaacgccgaaactatgataatgagaacgcggttagaagaattacaaaggaatcttgctcgtatcgaatataaacagtcggctagcaaagactcttatttcaatttcgaaagtgaaatagaatcactatacgacagggcgtattattttggtttaataagtgaaagcagcaagaatgaaccaactgtaagtgataaacttgaaaatttgaaagcgatagttaattacaaggatataaacgaaatcccagcaattaatgaaagaacaaaaactgaaaaagaacttttcctcttaaaaaaagaactgacagacattaatgaatatatagaaacaaatactgaatataagaagtttttaaaagacaaccaagactctcttttaatagccaaatatttagatgataattttagcgaaatattatatacaaaaaacatctattcaatcattaaatccttattgaaccaaagctcagagataaaaaaggctatagccgaaaaaggacaaaactcactcatatcaaaaacaaatgctaagagaaaagagttagaacttaaaatattatccttgaataaaaaacttgcaactgttagtgatgaaaagatcacaccaatcgagctttatcggttcatgggtgaactcagctctgaaattaaacggatagttgttctccctaaatatgattatactgatactatagaaaagataactactaaaattaatgagttagaaagcaagataacagataataatgcctttaaagaatatacattgagtttactgaacggaaaaataaaggaaatattcaaacggatgcctttaaaaggatttgaggatgcaactccgatattcaacaaggcaaaaaaaacacttgatttgataaataaaaatcaacttgaaaaaatgatagatattggaagtgcttctaactatatgtatgtacatgtagcttatttccttgcacttcacgaattggtaagagatagaaaagtaccgtgggttccacgattcttagtcattgaccagcccagcactccatattttagtactgctggtaaaaaaactgatgactttgcaagtcttgatgcagccctaaatgaaattaattcctttgttgagaaaatgcggcctcatggtggtttccaaataatactgttagagcatattgaagagtcttattggcttgacagagaaatgacgaactttacgcttgttgataatgaattaagaggaaattatggtttaattcatttcaaataa

SEQ ID NO: 259713 - DNA, 1200 bp, Klebsiella pneumoniae
atgctttcattgcttgtttccttagtgggctaccatatggatttctttgaaaaaactaatgctgacaaaaattcaataggttttacctatcaagattacgttgctttaaaacatgccttagagcttaaaccagaagaacacattgggattgaagtttatgacgatctccatcttgagagcatcgagggtcataaaactttggttcaagttaaacattcaattaacaagtctaatataactaataaagacatagacttatggaaaacattatataattggtcagaggcgattaagaccataggcgacaaaagcattagccttattttttacactaacaaaggtcttaccttagagcctggtatcgtgcaacttttgactaacgacactaaggacattgaaaaaataaaagatgaaatagaaaagatagaacaagatcataaaaataagtcagatgacctctataagtatatttctatcataaactcactcgatagcaattcttctaaacgtttatttaatagtataagttttcaacacagcgaagatgggatcattcgccaaataaaaacattactaaaaacattagcaatccctgatgataaaatagatgatgcttttaattatatttcaggtgctttttttaaacataaatatgatttggttaaaaatcacaccaaaataaatataagttatgatgattttcgaaataatttgggaatagataggattattcaaatttcaagaaattgtataaataatttcgaccaatactacgattttgaatctgcatacccaactaacgttgagtcaaagatatcttacaaacaactcaaagatttggatttgaatagcgattcaatcgtaaaatatataaatgaaatggccaaaacagaagctttcattcaaaaattgcaaagttctggagatttaacaactcaagaagaaagactaatatatctaaaagcgcttgatgaatggcaatcacgtcattcagcaacgtatatacgaagctgttttacagaaataaatgaagatcatcttaataaagccttcgctgtctatactgaattgacaggaaattgtaatattgtgttggataaaaatcaattacctaaatctatgactacaggaacgtttttgctcctttcagataagcccaaaataggatggcttcaaaactgggagtcagtctataaatga

SEQ ID NO: 259714 - DNA, 1020 bp, Klebsiella pneumoniae
atgacatcagaaagcaacagaagaggtgtgttaggaacgaattatgttcaaagagttttaacaaaatgggggtggggctttcaaaaaattgaccaagaaaatgatgatggatttgatgcgattatttatatacgttcaaaaaaaactgatgcagacgctccaaatgacatccgcaaacagttttgggaaggtactggaggtctgcttcatgtccaaataaaatatggtgatggatatataactaagaaagatgcaaatgaattgagattaaatataaaaaacctcccattaaagagagagatttgggtgaagtcagcactgccaagtatcttgatttttgtttctgaagacgagaaaggaaatgattacggctattggactgacttaaagtcaataaactcttatgtaagtgagacgagcacaattttaaaagtgccattaaaaaacagattttttgtttctcaggaatgtaaggggccattgagaaagcttgcgagggcatcataccactattccaaaaaaaccgtaatagatctttcagtatatgattcacttgatggaattttagaacctaaacttcgcggtgggattgggttaccaataaaacaaaaagcacttaatttttataaagcatggaaaaaggttggtgcaataaatccatattttggggaggtattgattaataggactggatggtcacatataacccgtaaaagtcggcctatgggacgtatagaatctagttttaatcttttgccatacgcttcaagaataattaatgatatttctaagtggcgtatgcttaccggcccaaaagtatatagtaagagacaagataatcatattacttatgtggattttattggtttgactgcaaaggtgattatgaaaaatagagaatcaacagaggtaatggttgttttaaaaagggaaacgaaatacagtaatggtgacttgtcttctgatcccataacaagactttggttctatacagtatacgaacctggcagaggaaaatga

SEQ ID NO: 259715 - DNA, 921 bp, Klebsiella pneumoniae
atgaatgcccgacttgggatttatctaaaaatactctccgcgctatgcgctacattaatgctggcctgcgtcaaaggattgcagggggcgattcccaccggcgaggtgatcttctttcgctcttttattgctatgtttcccctgcttatctggttaaaaattcagggcaacgtgctggccagtatcaagaccaaaaatattttcggccatctgattcgcggcttttccggtaccggtgggatgtacttcaactatctggcgctggtatcgatttctctcgccgacgccaccgcactgagctacgctgctccgctcttcaccgtcatcatggcggccctgctgctgaaagagcgggtacgtttttcccgttggctgggggttatcgtcggtttttccggcattctgtttatgctctccgccagtttaaccgccagcggttctctgttcgctggcggccatctgcagtccgggatggctctcggcgtcgcgttcgccctgcttgccgctctttgcaccgccacctccaacattcagatccgttttctcaacggcattgaaaaacctggcgccatcgtcttttacttctcgctgatgaccaccctgattggcctggcaaccagcctcttcggctgggtacgtcctacgccgggtcagttgctgttgctggtgggctgcggcttcttcggcggcatggcacagattctggtcacgctgagcctgcggtttaccgacgcttcgctactggcgccgtttgactacaccacgctggtctggtcgatggtcatcggttatctgttcttaaacagcctgcccggttcttcaacgctgatcggcgcagggatcgtagcgctggcggggatattcaccctgtggtgtgaccagcggcaacggcgggcgcatatcgcgcgcgcctcttcctga

SEQ ID NO: 259716 - DNA, 1083 bp, Klebsiella pneumoniae
ttgtccttgatccaaatagttttttcaataccccgtggtatcattattaagctgatcaacctcacatgtattggtgtctttatgaaacgaaaatatgctcgttgttttcttttacttttaagtattttgtatagcggttattctttttcatttgaggttggagttggaacacatatatctggctttacaggaactccagagcaatacattaatttactaaagaaatataatattacatcttttcgtacggactaccattgggccgacgtagaaaaacaaaagggggtctatactccagcttctcataaattagatgagctcatcaatttagcagtcataaataatattaagcccattttaatcttagactatggaaatccactttatgtaaacggaaaacctacaacagataatgagcgtgatgcatttgctagatatgctgcttggactgttagtcattttaagggtaaagtagatgtttttgagatatggaatgaatggcatttagaaaaaccaaggtatttatctcaaaaccaaaagtcagcacagcagtatgtatccttagttcattcatgctatactgctataaaaaaggttgatcccaatgtgaaagtaattgctggttcttttaatcctacccaaaaagacgaaattatttggcaggataaactcttcgagttaggctttttaaattatatcgacggcgtttcaattcatacttatcataatacagattctacctttatgccccctcaagataacttatctctcattgacgctatgcaagaaaaaataattaaaattaaaggggctgctcttccggtttttataacagaaatcggtattagcgattattacaaaaacaaaatcccacaagctgatataggtaagttcgcttctgagtattttatgttttcggccaaaagaaattatatccaaggcgtttggtggtatgattttattaatgatggcattgataagaaaaatggcgagcataatttcggcatgctgaatcgtgatctaagtgagaaagatacagcatctgcaataaaacagttttcgcaaaggctaagagttaaatga

SEQ ID NO: 259717 - DNA, 984 bp, Klebsiella pneumoniae
atgatacgttttaaatgtaaaaagaaaacggccattgaattctttgttttattgttgctgacaatcgttggggcttttgttataagtggccgtaatcagtatttacctgattatcaaatgtaccttactttgtatcactatgcatctgatctcgtagagttttcatttaatgcaattgctggtttttataggggcttttttcctggtgatgatggttttatatattttttatttacgtatgccatcttagggtttgtactccatatgtattttgcttatttttatataaagaaagagcaagggtggattagatatttgttttttttaatgccatatttttgttatttttttattttctgggatttgattcaaattagatacgctgctggaatcagttttcttttatttggtatgtttgcaagttctgttaggtggcggtttttcttctttgctttagctattttatttcataattcgatggttttaccggaggcactttttttattattcactctcataagaaaggattatattaaactgatagcggttccgggaattgcaataactgcattaataggattacagtttacaagatattcggtgaagtatgaacaaagctcagctgagtgggatcacttaaatttacttggtggtaattgtttaatgctttatctaatggtcttgtctatgctgtattttaaaaaatatttaaataataattataaaaaaactgtaacgtcccttatttatactgtttctgtattaacacttttgatagttgtacttaacggaaattatcctgctatagcaaacaggttacttgcattaacattgtttcttgcttttatatgtgtttcttttgttaagggtaaatataatttaatcttttttatagcgttatcaatagtattctctctatggaatttgaatattattgtccttgatccaaatagttttttcaataccccgtggtatcattattaa

SEQ ID NO: 259718 - DNA, 1044 bp, Klebsiella pneumoniae
atgggaagaaattatagtcttcaggcactcagagcaattgccgcagttttagttgttttcgctcacaccataactcagattaatatggcctcagaaattaatggatatttgggatatgtgctgaaaacgattgaaagtctaggtggtcttggcgtttatattttttttatcataagtggttatatcatgtcttatactacatgtgataaaaaaggaggaaggcaggaagctatttctttcttaaagaaaagatttcttcgtgtctatcctgtttactggatttgtttgtcaattatgactattggttgggcgggcggtatttttttaaaatcacatgattatagtatatataaagtcatagcatcgtatcttttacttcctttctctgacccttattcagggaatattaatccaatcctgtcccagggctggactttaatgtatgaaatatttttttacttttcattttctgttttgctgtatctggatgtcaaaggtttaaagaaagtttattatctttttggattttatttttttgtttattttttcggaaggttcaattttttcccttggttttctctaaacctttttcttcaaaaaccatcctttttcttatttattctgggtatgatattctttgagtgtcaggttgtttttcgacatcttcttcataattacttattaaggctttttattgttgtaatttgtatttttttactgttttatgtttttgatcccaactgcagcattaaacctgactttataatgtatccattgtcagctttgatctttttattatttaacagctgcaatatcaataatagaactttaaacttattaggcgattcctcttattctatatatttgactcatggcttcattgttctgatgtttggtaatataatcaagaggttggatgtaaactataattatgcattgcttttttcttcaatcccatttatattttctataatgataggtgtttatttttataaatatgttgaaactaaggttatttataaatctaaattgatctttagctaa

SEQ ID NO: 259719 - DNA, 528 bp, Klebsiella pneumoniae
atgtttttgacggttggtagattaggaacataccaaaagaatactgaatttctcttggatgttattgaggggttgaatttaaaagattggacattccatttcgttggcccagttcaagattcttttgctggccgtatagaagaattttatgcgagaaatcctcatttagcaaaaagtgttttttttgagggcagcataagtgacctaactttaaaaaatagtttctacgaacgtgcaaaagtatttgttttgccctctcgttatgaaagttacggtttggttcttttggaggcggcttcatacaattgtcacttgatttctacaaatgtaggggcgataaatgatcttatttcaatatataattgtagtggtcaagtcttagagcaagatattgaatgctttagaagtaaaatgcaaaaaataatagattgtaatatttatccagtctccaatgatgttaagtctctagaaatgaatgagcttgttcatacacttatcaattttatttatagtaatagaaaaatttaa

SEQ ID NO: 259720 - DNA, 393 bp, Klebsiella pneumoniae
atgcagctaaatcaatgggcagttaaaacaactgtagaacatacatccctatcagatattggtcgcgtattaattccacggctggataaaagcttagaaaacaagcttgctgattatttactcaatgcgaggctggcttatcgttatgccaaatttttaacacaagtagccaaaaccttagtcgaagccctcatcgaaggccaactgaccgagcaacaattaatccaggcccaacaagccctggaagatggcgacaacagcttagatcaggcgattttaagcaaactaagtgctgagggttatgccatagaaggcaccacaccgttatttagcgatgtggatgagttataccgtttgctggaagatgcggcacaagatgaggctgaagagtaa

SEQ ID NO: 259721 - DNA, 2172 bp, Klebsiella pneumoniae
atgccatcagtgacaaacaaatctatctcgaaagaagaagatgaaatcgatttaggccgtttagtcggtgaattgattgaccacagaaaacttattattgcaataacggcatttttttctttagtatcgatagtatatgcaatatttgcaacacctatatatcaagcagacgcgttgatccaagttgaacaaaaacaaggtaatgctattttaagcaatcttagtcaaatgttgcctgatagtcagccgcagtctgcacccgaaattgctcttattcagtcaagaatgattatagggcaaacagtagacgatttaaatttacaaacgattatcaaacagaaatactttccaatttttgggcagggattatctcgcttactaggaaaagaggctgaaaatatttctgtatcacaattattcatacctgatgaaggcaaagacgaggcaactataaccttaactgttatagataaaaatcattataaaatcaattttggcaatgattcgtttgagggtaaagttggtgagctcttacaaaaagataatgtcagaataaaagtagattatattgatgctttgccaactagtagttttattatttcatatgtaccgaagcttaaagcaataacaagcttgcaaaaggtactttcagtaaatgatcaagcgaaagatacaggcatgctcacaatttcattgactggggacgatccaaagttaattaaaaacatagtaaatagtatcagtaataattatctggctcagaacattgctagacaggctgcacaggatgctaaaagtctcgactttctaaataagcaattacctaaggtgagaaatgatttagatttagctgaagataaattaaatgaatacagaaggaaaagtgattctgtcgatttatctcttgaagctaaatcggtacttgatcaaatcgttaatgttgataatcagttgaatgaattgactttccgtgagtcggaaatatcgcagctttatacaaaagagcatccaacatataaggctttgatggagaaaagaaaaacactgcaagatgagaaagctaaattaaataaaagagtttctgctatgcccgaaacacagcaagaaatactaagattaagcagggatgttgaatctggtcgagctgtttatatgcaattattgaataggcagcaggaacttaatatagcgaaatcaagtgctatagggaatgtaaggataattgatgatgctgtggtacagccaaagccggtaaaacctaaaaagataataatagttttggttgggtttgcgctaggcttcattttatccatgagtttggtattcattcgagttctattaagacgaggaattgagtctccggagcaactggaagagttgggtattaatgtttatgctagtgttccagtagctgagtctgttgcacagaaagcacgagcttataaaataattgggaagagacaacaacttaataatgaaaaatcacttcttgcgattgaaaatccggcagatttggcaatagaggctattcgaggcttgcgaacaagtttgcattttgcaatgttggaggcgagaaacaatatcctcatgatatctggcgcgagtcctaatgcaggtaaaacttttgtcagttctaatttggccgcagtaatcgcccaaagcggcaagaacgtattatttattgatacagatatgagaaaaggatatgtgcataaagtgtttaacactaccaatgagaatggtctgtctgaatatttagcaggaaaaataaacatcagccaagctattaaaaaggttagccaagctgggtttgattatatatctcgtggtatggtgccaccaaatcctgcagagcttctgatgcatcgacgtcttgaggatttacttcagtgggccagtaagaattatgatattgttatattagatacaccaccaattttagctgttactgatgccgctgtactgggacattatgttggaacaacattgcttgtagcaagatttgaaattaatacagcaaaagaaattgagattgcaaaaaaacgttttgaacaaagcggcattgtcgttaaaggttgtattctgaatggtgttataaagaaagcaagtggctattatggttacggttataaccattacggatattcctattccgagggtgaaaagcgttaa

SEQ ID NO: 259722 - DNA, 990 bp, Klebsiella pneumoniae
gtgaatgtgtatccaatgacaccaggcctgatcgatcaactccgtccggagacagtactcgctcgtccaaacccgcagcttgataatttactacgcagttatgaatatcgtatcggtgtgggtgatgtactgatggtcactgtttgggatcatccggaattgaccacacctgcaggccaataccgtagcgccagcgacaccggtaactgggttaactccgatgggaccatcttctatccttatatcggtaaggtgcaggtagcggggaaaacacttagccaggtacgccaggatatagctagccgcttgaccacctatattgaaagtcctcaagttgatgttagcgttgctgcattccgttctcagaaagcttatgttacgggtgaagttatcaaatctggtcaacagcctattactaatatacctctgactattatggatgcaatcaatgcagcaggtggattggctcctgatgctgattggcgaaatgttgtgttgactcataatggtaaagatacaaaagtgtctctttatgctttgatgcagaaaggcgatttaactcagaaccatctactatatccaggggatattctctttgtgcctcgaaatgatgacctcaaagtatttgtaatgggcgaagtcggtaaacaaagcacaatgaagatggaccggagcggtatgacattagcagaggcattaggtaatgctgagggtatgtcgcaagccttcagtgatgctacaggggtatttgttattcgtcagataaaaggtgacagccatggcaaaattgcagatatctatcaacttaatgctcaggatgcatcagcaatggtattaggtacggaatttcaactgcaaccatacgacatagtttatgtcacaactgcgccacttgtgcgttggaaccgtgtaatctctcaacttgtaccgacgattactggtgtacatgatatgacagaaacagttaaatatatcaaagagtggccctaa

SEQ ID NO: 259723 - DNA, 303 bp, Klebsiella pneumoniae
atgttaacccgtaaattacctctggccgccttcctggcggcgacgcttgttgctgccagcagccacgcctgtgggccgtttttccccaactatttgttagcagatcgccaggctaatctgctgtatctgccggagggggagctttgctttagagagcagccgcctggtgcttgccgacccgcgacttccgcaatggcgtgttacttctgccgacaaacctacctctcccacgaccgaggagacgctgctgaagacgatccgggccagcggttcgttagccgccgcagaaaaaatggccgctga

SEQ ID NO: 259724 - DNA, 1869 bp, Klebsiella pneumoniae
atgaaagaaccaaataaaatagatggaaatcgccgccatctcctcaaaggtctggggattgccgctgtcgtgagcctgttaccagagacgggaaacgccgcacaaaataattccgccccgaaagcggcatgggatattcctttcaccggcgaaatccctgacacactgcccgaaggctacaatattttactaataacatgcgatcaggaacgttatttcgagcggtatccctttccggtgccgggccgggaacgcctgatgaaaacgggtatcacttttaccaatcatcagaacacggccaacgtttgtacgccatcgcgctctgtcatgtacaccgggctccatatgccgcacacccggatgtttgataatcttggcttcccctggatgaattacgatctggacccggaattacgtaccgtgggccatatgatgcgtgaactgggttattacacggcgtataaaggtaaatggcatcttacccgggagatcgatcagccggtcgctggtaaatcggtagaagaaatggacctgggcgagatcccgacgccgcgactgcatgaaattatggaaaagtatggtttctctgattatcacggcattggcgatgtcatcgggaaaagtaagggcggctatttctttgattcagtcaccacggggcagaccattagttggctacgtaacaccggccgcccgctgaatgatgaaaataaaccctggttcgcggcagtaaacctggttaacccccacgatgtcatgtttatcgacaccgatgagcatggtgagcaggtgcagtggaaagggccaatggataaagaaaaccacaccctgctgccaacccaacccccgcacaaccaaatctatcagcaaagctggccagactatccgctgcctgcaaaccgccaccagccgctcgatgagcctggcagacctgccgcccataaagagtaccagaatgccagggcggtgatggagggacagttccccgatgaagaccggcgctggcgcaaattactggattattatttcaactgtattcgcgataatgaccagcatcttgaggcgattctcaatgagctggataacctgcagctgacgcaaaatacgattatcgtctttaccgccgaccatggggaactcggtggctcccaccagatgcatggtaaaggttcctcggtgtacaaagagcagatccatgtgccgatgatcattcgccatccggcgtatccgggaaatatccgctgcaacagtttgaccaatcatctggatttagtaccgaccctgattggtctgactggacgcgatcgctcgctgcgagagaaagtcctggagggcagaaaaggccgggatatgagcccattactggcgcatcctgagcaagcgggcttaaatgcgctgcgtccgggttcgctttattgttacggcatgatcctgtatatggatgcgcaatacacggcaaaattcagaaagctggctggagaaaaactcccgcacgatcaatttaaaaaagcgatcgcgtcactccatcctgatttttcccatcgctcagggatccgtatgatcaacgatggacactataaatttgcccgctacttttcgctcaagcagcatcatattcctgctaccctggccgagctgctggagaataatgatgttgaacttttcgatctggttaacgaccccgaagaaaatcataacctcgcccgggagccagagaaataccgggatctgttaatgacaatgaacgataaactcaatcagctcactgccgctgagattggcgaagatgatggcagctatatgcccccgtttgaaggaagccagtgggatctgacggcggcccagatgcatcaatatatgcgcgattag

SEQ ID NO: 259725 - DNA, 1524 bp, Klebsiella pneumoniae
atgaccccttctgaataccagaatcctatcttatgcgccgattattccgacccggatatcgtgcgcgtaggcgatgatttctttatggtctcttccagttttaaccatgtgcccgctttaccgatcctgcattcaacggacctggttaattggactatcatcaaccacgttatggatgaactgccgctacctggttatgaccggtatcagccgggtaagggcgtatgggcgccgtcgattcgctggcacgatggcaagctgtgggtctgcttcagcacgccagatgaaggtatttttatctgccataccgaggatccgtggggggaatggagcgctccgcactgcctgcgcgaggccagaggttggatagatccctgcccgttctgggacgacaatggtcaggcctggttggtacatgccttcgcccatagccgcagcggcatcaagcataaactgcagttgtttgcgatggcgccggacgccagcgaattgctgggcgaagggcagattatctatgacggctgctgcgatttacctacccttgaggggccaaaggtttatcaacgcgccggttggtactacatctttgctcctgcgggcggggttgaaaatggctggcagacggtactgcgcgcgcgccagatgacggggccctgggaagccaaaaacgtgcttttccagggaaacacctcgataaatggaccacatcagggcggctgggtggagggtgaggagggcgaatgctggtttgttcatttccaggacttacacctctatggccgcgtggttcacctccagccgatgtcctggggtaacgatggctggccgcgtatcggtgagcagattggcaactgcggcgtcggacagccggttttacgttggccgcgtcctaaagggttaacgccttcaccggcattggcgccgcaaaccagcgactattttgcgcaaggccaaccgggaatacagtggcagtggcaggctaaccccagccctgagtggctgctgccggcggaaggcgaacttcgattacgctgcgtcccattatccgaagtcgatggacagagagcgttatactgggcgccgcagctgttgctgcagaaattcccggcgctaacttttagcgcgaaaacaagcgtaacgttatatgccgctcaggacggtgatgccggaggcctgatcgtatacggcgaacgctacgccgctttgctggtggagtttgggcaagggggttaccggctcgtgtggcgacacggttggatgagcgatgcgggcgtggtgcgcgaaactcgtcaggttcttgctgagcttaagtgcggcaagtgtcagctgcaggtggccgtaggcgaaggcggcctgtgtcaattttcctggcgagccgaggaggagtggcggaaggttcctctttgttttgctgccgggaagggaaaatgggtcggcgcgaaatttggcctgctggctgcttcaatggttggcctacaaagcgagggctactccgctttgcaggactttgaggtcatactttaa

SEQ ID NO: 259726 - DNA, 162 bp, Klebsiella pneumoniae
atgcgcgcgatcgcctccgccgcattcctcagcttgcggttgatctcccccgacgccgggaacgccgcctggcggtccgccaccagcgatttcagcgaactgttcttcaggcacagcagctccgccaccagcagccacgggatcatcccgctgtcgcagtag

SEQ ID NO: 259727 - DNA, 1191 bp, Klebsiella pneumoniae
atggtgaaggccggggctggcaccgatagcgccatcgattccctgaagccttaccttgataaaggcgacatcatcattgatggcggtaacaccttcttccaggacacgatccgtcgtaaccgtgagctttctgccgaaggttttaactttatcggtacaggtgtttccggtggtgaagagggggctctgaaagggccttccatcatgcctggtgggcaaaaagaagcctatgagctggttgctccaattctcaagcagatcgcggcggttgcggaagacggtgagccatgtgtgacatatatcggtgctgacggtgctggccattatgtgaagatggtacataacggcatcgagtatggtgacatgcagctgattgctgaagcttatgcactgttgaaaggcggtctggctctttccaacgaagagctggcgcaaaccttcaccgaatggaacgaaggcgagctgagcagctacctgatcgatattaccaaagatatcttcaccaaaaaggatgaagagggtaaatacctcgtcgatgttatccttgatgaagcagcaaacaaaggtaccggtaagtggaccagccagagctcactggatctcggcgaacctctgtctctgatcaccgagtccgtgtttgctcgctatatttcttcgcttaaagatcagcgtgtagccgcgtcgaaagtgctgagtggtccgcaggctcagccggccggtgataaagctgaatttatcgaaaaagtgcgtcgcgcgttgtacctcggtaaaatcgtttcctatgctcagggcttctcccagctgcgtgctgcttctgacgagtacaactgggatctgaactacggcgagatcgctaagattttccgcgctggctgcatcattcgtgcgcagttcctgcagaagatcactgatgcttatgcgcaaaacgcaggcattgctaacctgttgctggcgccctacttcaaacagatcgctgatgactatcagcaggcgctgcgtgatgtcgtggcttatgccgtgcagaatggtattccggtaccgacgttctctgccgcgattgcttactacgacagctaccgttccgcagttctgccagctaacctgatccaagctcagcgtgattactttggtgcgcatacctataagcgtattgataaagaaggtgtattccacacagagtggttggaataa

SEQ ID NO: 259728 - DNA, 813 bp, Klebsiella pneumoniae
gtggggtatgcagaaagcgggctcagtcgaatggatgtatatcagggcatcccaacattgggcacttcagctgtagggtatcgatattatcttgattttcgaaagatgagtaaaggaattcatgttgtagatgtcgtccatgacgataatgggaaattgacattgatgaaaagcatagatgtgccggtaatggatcgacaacaaacaaaacctgttcgtgtcggagaaggcataaagttgctcgaagagaaaagcatgaagttctggaatgattatcctgagacattacaaccagtgtattacaatccattgtccgaggaattttataactttagaaaaaaagaggtagcaagagagatacaaaaatatgcagatattgtaagctcatcatgcattgggagggatagaaccttttctcaccaaatagcgccaatgtttaatgcagactggaatgaggaaaaaattgcagttgaagactcacttaaaaagaataatcattataacattggattaaatgcctgtggttcagcattttatggtgactatatatttaactggttaaaaacgtctggaattgaaagttatggaatcccagaagtgcaccctatggttgaaaacgaagaaatcatctatgatgcattggaacatcatcataacaatggtgcaatattcattagcccttactatttagaaatcaaaccagaaagttttggcgtcgataaagaacacaaaaaattcagtatcaatgaaaataacacaaattattattcatcaagtttctatcatgccctaagcagaatcatgaaagaatag

SEQ ID NO: 259729 - DNA, 147 bp, Klebsiella pneumoniae
gtggagaccgcgctggccgccacggtgaacgaccgcttcgagctgaagaatgaggcgtcggacctgatgtaccacctgctggtgctgctgcaggaccaggggctggatctcggggaagtgattgataatctgaagagtcggcactga

SEQ ID NO: 259730 - DNA, 309 bp, Klebsiella pneumoniae
gtgttgagcttcacccgcggtctgcaggatgagtttgccgacagcggcgtgcgtattcaggcggtattgccggcggcgaccgccaccgatctctggccgacctccggcgtggcgttgaacgccctgcccaccggcacggtgatgaccacagaggatctggtggacgccgctctcagggggctggagatgggggaacaggtcaccttaccaccggttcatgacctgggactatgggaggcttttgagcagtccagactggcgctgtttaccagcgcacgaaccggacagcctgcgccgcggtatcgctaa

SEQ ID NO: 259731 - DNA, 222 bp, Klebsiella pneumoniae
atgtataagaaatccctcagcctgctgggcgtggtgctggcgctgtctgcctttgccagccaggctgaaagtgaacgtcaggcgagccgcgagcagatcgtggagcaggtcctcaagccgtgtgaaggcaaaaaagcgggcgataaggtggtgatcatcgatcgccgcggcggcgagcacgaggccatttgtaccctgacggcggttccgctaccggagtaa

SEQ ID NO: 259732 - DNA, 564 bp, Klebsiella pneumoniae
gtgggcaactcgctggtggacgccttcaccctgcaatattatgaaggtttcccgaaagaccaggtggcgtggggggaaatcaccagcgataagcaatggcaggtgctgtcgaagctgaagaacggctaccaggatagtctgtttacctcggtagcggtggcacaaaacgtcgccaaaccgttggttaaatatatcgataacgcgctggtgggcgaggaggccaacaaggcgaaagtcacgctgctggtggggcacgactcgaacatcgcctcgctgctgacggccctggactttaagccttatcaactacctggccagtacgagcgcacgcccattggcggcaaactgctgtttcagcgctggcatgacagcgccggtaatcgcgatctgatgaagattgagtatgtctatcaaagtactgaacagctgcgtaacgccgacgcgttaaccctgcaggccccgccgcagcgggtcaccctggcgcttaacggctgcccggttgacgatcagggattctgtccgctggagacctttaaaaaggtgatcaacgaggcggcgaaataa

SEQ ID NO: 259733 - DNA, 504 bp, Klebsiella pneumoniae
gtggacgcggcgaaagcggcattttatccggacatcaatctgatggcgttcttgcagcaggatgccctgcacttaagcgatcttttccgccattcggcgcagcagatgggcgttactgccgggttgacgctgccgatctttgacagcggccgccttaacgccaacctggatatcgccagcgcgcagaatagcctgtcgatcgcccagtacaacaaagcggtggtggatgccgttaaccaggtggcgaaaaccgccagccaggtcgaaacattaatggccaaaagccagcagcagcagcaggttgaaaaagacgctcagcgggtagtagatctggcgcaggcccgaatggcggcggggatcttacctggctccagagtcagtatggcgaagctcccggcgctgcaggagcggatcaccgcactgcgcctgcacggccagtggattgacgctagcattcaactgacctcggccctcggcggcggctaccaccagacggtgaagtaa

SEQ ID NO: 259734 - DNA, 177 bp, Klebsiella pneumoniae
atgaacggccgctcggtggcgagggggaaatatctgctgcgccgcatcgatattgaagaggcgcaggagctgtcgcgtcgcagccttgatgcgcagatgaccaccgaggtgcgccatcaggtggcggcctttatggagcgtcgcggtctcggcggcctgatccgcggcggacggtag

SEQ ID NO: 259735 - DNA, 1176 bp, Klebsiella pneumoniae
atgagcctgcaaaaaacctggggaaacattcacctgaccgcgctcggcgcgatgatgctctcctttctgctcgtcggctgcgacgacagcgtcgcgcagaatgctgcgcctcccgccccgacggtcagcgccgctaaggtgctggtgaagtcgatcagtcagtgggatagttttaacggtcgcattgaagcggtggagagcgttcagcttcgccctcgcgtctcgggatacattgataaagtgaattacaccgacggccaggaggtgaaaaagggccaggtgctgttcacgatagatgacagaacctatcgcgccgcgctggagcaggcgcaggcggcgttggcaagagccaaaacgcaggccagcctggcgcaaagcgaggcgaaccgcaccgataaattattccataccaacctcgtctcccgtgaagagtgggagcagcgccggtcagccgcggttcaggcgcaggccgacattcgcgccgcgcaggcggcggtggatgccgcgcagcttaacctcgacttcaccaaagtgaccgcccctattgacggccgcgccagccgggcgctgatcaccagcggtaacctggtcaccgcgggcgacaccgccagcgtgctcaccaccctggtctcgcagaagacggtgtacgtctactttgacgtcgacgagtcaacctacctccactatcaaaacctcgcccgccgcgggcaaggcgcgtccagcgataatcaggcgctcccggtggagattggcctggttggcgaggagggttacccccaccagggcaaagtggattttctcgataatcagttaacgccgagtaccggcaccatccgcatgcgtgcgctgctggataactcgcagcgtctgttcacaccggggctgtttgcccgcgtgcgtctgccgggcagcgcagagttcaaagccacgctgatcgacgacaaagcggtactgaccgatcaggatcgtaaatacgtctatatcgttgataaagatggtaaagcacagcgccgcgacattaccccagggcggctggcagacggtttacgcatcgttcagaaggggttgaatcctggggatagcgtcatcgtcgacggcttacaaaaagtgtttatgccgggtatgccggttaacgccaaaactgttgccatgacctccagcgccacccttaactga

SEQ ID NO: 259736 - DNA, 1875 bp, Klebsiella pneumoniae
atgtctcagcgatataaactctatcgtcgaaccagcggcatttatgttgtccgcattagcgttccccaacgttttcgtcgatacgcaggacagtgtgagattcacacttcaacaggcactcacgatcttcatgaagcaaagcagaagtccgcgctcctgttggcggtctggtatcagaccttacaagagtatgaacaattggattatcgaactttaagtgactgcgccccgctgcttgctggtgagggtatgatctcgctttctaactttgctcagtcagttgagttgcctgttgcgcaattaatacaggcggtgatgaaccgtaatctgcccgtattctggctggcgacggggcaggctggcttttatgttgcagcgctctctgaggctgagctagacccgcttgatggcagttacgttcttaattatggcgaagagaagggtatcgagggggttgctaaaggctatctgcaactcactgcgcaaccagcacatttacgtaacattattagcgacggttattcagaagcttcggtgttcaaaactgccggaagcgacgctaaaggcggttggtttttcacctccggttggccggtaattaaacccgatacgcttttgatcaataaagtccatgcagaaagcctaaggcttgattggctggctaagaccacgcctccagtcgctagcgttcatcctaccgtgcctcttgccgctcctgcccctactatcgataacgagtatgttaatcgaaagtattacactaagaacctgtcgtggttatgctctgaatatctaaagcatcggcgcaagggcaaggtatcggagtcggctataagtgatatccgtaactatttcagctttatgatcgaagcgatgggtgacattcagttggaagattttgatcgcgatttcctccgggcttatgagagcaaactgcgcacgatcccagcaaaccgtaatttagtcaaagctaaatatggagtgaaaacgctggatcagttaatcgccaaagcggcagaatgcggcgataaattgatgactgaggaatccgttaggaagtatatcaacggcatttatggtgcaatgaagtgggctgttgctgacggtaagctactgaaatcgccatgcgaaaacttttttccatccgatgataaagatgagcgagatcaggatcacactgacatatttgaaccgcatgaaattaaagcgattttttcgttaccgtggtttgaggctggaactgttgaacgcaatgcgcaagggcgattccatcaatattgcccgtttaactattgggcacctttgctgggcttgatgacgggggcgcgagttaatgaaatcgctcagttactgctgagtgatgttctggcagacgacggcgtctattatttgaaccttgaaagcgataatgaaagcggaaagaaactcaaaaacgctaatgctcgccgcaagattccgctccattcaaagctgattagtctcggtttcatcgactacgtgaacgccttaaaagatgcagggtatacccgtctcttcccggagcttaaaccacataaaacaaaaggctatggtaggccagtttccgcatggttcaatgaatcgttgcttgcggggcggttgaaactcgagaggaacagaagcaaatctttccattcttttcgccactcagtttcgactttgctcaaggagaagggcgttagctcagaattacgagcgcagctacttgggcatgtgcgcggcgaaactgaaacggaagtgcgatatagcaaagacctcaaaccaattcatatgattgaagtcgtggagaaaattgatttttcgttacctgatatagcggaattcaacattcctgacgggctggatgggctttgttga

SEQ ID NO: 259737 - DNA, 897 bp, Klebsiella pneumoniae
atgatgtctacgtttcctgccagcttactgatccttaacggcaaaggtgccaatgaaccgcagctacgtgaagcggttaacctgttacgcgatgaagggattgatatttacgtccgcgtcacctgggaaaagggcgatgccgctcggtttatcgatgaagccctgcagttgaacgttgaaacggtgatcgccggcggcggcgatggcaccattaatgaagtggcgaccgcactggtggagcgcgacagcaagatggcgctggggattttaccgctgggcacggctaacgacttcgccaccagcgtcggtattccgcaggatctggccagcgccctcaagctggcgatcatcggccgcgatgtgccgatagatatcgcccgcgtgaatgataaaaccggctttattaatatggcgaccggcgggttcggcacccggatcaccaccgaaacgccggaaaaactcaaagctgcgctcggcggtgtctcgtatttaatccacggcctgatgcgcatggataccctgaagccggaccgctgcgagatccgcggggagaacttccactggcagggcgatgcgctggtcattggcatcggcaacggccgccaggcgggcggcggccagcagctgtgtccggaggcattgatcaatgatggtctgctgcatctgcgtattttcaccggcgaagagctgatccctgccttgttcagcactctggcgaatccggaaaactcgccgaatattgttgacggtgtctcctcatggtttgagatcaccgccccccatgagatgacgtttaacctcgacggcgagccgctcagcggcaaaaccttccgcatggagctgttaccggcggccctgcgctgccggctgccgcccgactgcccgctgttgcgctga

SEQ ID NO: 259738 - DNA, 207 bp, Klebsiella pneumoniae
gtgacaagagtaatattggcgatatcagggctattgttctcgcagtttgtggcagcagagcagatcacaatgtccgatcctcagcaggaaacgacggagagcgggaaaacgctatgcacgtatcagaacagcaattacctcttcacctacgtaactaaggggaaatgtccgtataccaaaacctttcaaaccgatgatgcaaagtaa

SEQ ID NO: 259739 - DNA, 393 bp, Klebsiella pneumoniae
ttggaaaataaaaacttagcgtcaatcgacgtaacggactccgcacgtctgcgcggcaaggttgaccacaccacatggcacgcgtgcaaatcgcggctaaaactgctgggcctgccacagacaccgaaacgaatcggcttccttctctggctggaacaccagcaacatcacgtcttcacctttgaagagtacgtggagagatggggctacaacaacgcccatctgcatctcaatgagtatgaaaaaagcggacttatccatcatcgcgacgagtattttcttagcgaaactgccaccagcaccgatagcccattccgctgtaagtgctgcaagtccataaatctgaacaaaattcttaaagcaaaggagcgcattattaatgaaactaactaa

SEQ ID NO: 259740 - DNA, 1407 bp, Klebsiella pneumoniae
atgatgaaaaagctatcccagcatgacattgatgctttcgtagccgcgcaacatgcagagatttatggctatgttgagaatatccccgccgacgctcgccagcgaaaaataaggggagatgtaaccccaccgttatcaccagatactggtcgggcgttcgcacagttttttcaagagttctatgaagatcaactcttcaacggcgaagcatccccgacggaatctttttttcttgagtctctggctcagcgtttcgatatttcaggtatggaaagtgccattgtcgccgcagcgtcaaagtacgatattcttttgcaccagtcgcagaaggccaatgcagcttttctgagtaaagatttttcgacgtactcccagatcctcaacgatctgaaacagaaaatccctctacctgtcgcagtgtctccggttgaagattctgcgccagccatgacattgcaaaaggcatgggatggttttctggtgttcaaatcagattggaatccgaagattcggaaggggaacgaaaagtacttcatggtcatcagagaagtgctgggggctgatacgccagtggacaaaatcacccgccgcgatatcaaaaacttgctggaagtggtggcgggtctaccccgtcagaacaagaagccatataacaagatgacggttcgggagtgtttagatttggatgaggttcccgaggatgaccgtgtggcaccgaagaccgttaaagattatctgaagctatgccaggggttgttctctacttatctaacatctgaaatggatatactggcatcttcaccgacgctaaacgttcgttatgaagcacacagcaaaagctatggagactacagcaaaacagaaatgcgcaggctggtggcccatttcaaaaatctatcaggttggaaaaagtggataccgctcctccttgcctatactggtgcacgtcgggcagagatcgccaaactaaagcgttcggatgttcgtcttgatgatgattcccagcgttactacatcatgattgatgataccaaaaccgaagcaggtacgaggcaagtaccgctatcacttcatctgcttgatcttggatttttggactatgtagagggattctctgctggcgattcgcttttccctgacctcactaacttcaaccagatcacccactttttccacgatattcgtgaggttcttgagatcccttatctcaatgattatggcgctcgccgcgtcgtgcacagccttcgccacacatttattacagaagcgcgaaaaactaacgagcttacgccagttcagaaggtggtcggacatgagcatagtggggaagggcaaacccagcgatacacccacaagtttactgtgacgaatttacttccagtggttgatggtatttgctgggactaa

SEQ ID NO: 259741 - DNA, 171 bp, Klebsiella pneumoniae
atgggattctggagaatcgttttcactatcattctgccgccgctgggtgtgccgctgggtgtgctgctgggaaaaggcttcggctgggcgtttattctcaatatcattttgaccctgctgggctatattcctggcctgatccacgccttttgggtgcagacccgcgattaa

SEQ ID NO: 259742 - DNA, 384 bp, Klebsiella pneumoniae; identical to SEQ ID NO: 209243

SEQ ID NO: 259743 - DNA, 225 bp, Klebsiella pneumoniae
atgacagacatatatgaatctataggatttgaaccaggtaaacccgatggaatcgaggcaacttatactgtcggttattacatcaagggtgagaatgggctctacgcgttcactcatggcgacccgagatctattaatttagataccgatatcccggaatacaacatagagctcgatcccgcatggtcgtttattcgcccttttgagttacctatcgaagagtag

SEQ ID NO: 259744 - DNA, 1221 bp, Klebsiella pneumoniae
atgtcagtgattggacccagccgggcttcttctgttatctgcagactgttttcaagcccggaaggggcggttgcatcgatggctacgcaatcgtgctcaattcaggagtttggtgtaggtgatgagtttcgtacgaatgcctatatcattgatcattacaatcctgatatcagtcgctgtgggattcatgcgtatatgccgggtggttacagtaactatggtgaagctatccgctatcacggcggttcgctcagcacgtcccgtggtgtggcagtacaaaatgataaccagaatggggctatcaggctatttggcacctctgttgattatgttggcagggtggccgtttgcaatcgtggtcgtattgaacttaaatcctgccaccaggagtttaacaattcatcaaaccctctgattggtctgcctccctattactgcgggaacggaggtgagtgcaggttactgatttccggtggtgaaatacatggctggatacgggagttgggtgttgaatctgtcttccattcagagcccggtggtaacggcatccatctgattgatgtctcgttgcagaatctggtcactactacggaatatatcaactcgggttctggggattttaatactgattttatttcagttattgacgggaatggcaatacacgagtctcaatgctgaagagcccctctcagaatctgctcgcagatcctgactttacccgcactgagattgttgactggtatctgtttactgataccagtgcaatcaccagccgcacaacgggcgcaaaccttcagctcacagtctcatctttagcatcgcgtgtgactggcggcgtatcaatggagattaacaaaaaatttggtgtcgggtccggcgcagttattcgggcaatagtcccggcgaaagagaatgctctgagtcagtacgagctttttttaaagtccgtgggatgcaccggttcaatcttcataacaacctatttttatacgcttcagtataaaaatcagtacggtacacccattggtgcacgaggtgttcagtttggagctataaggtcagtaaatgctgcggatttaactgagtggggacgggttgctcagcagtcaatcagaaggcgcatacccgcctgggctgaatatgtcatgattgagatatcgctgacacaggtatcgccagggaaaatttatctggatgacgcactggtgacacagctatga

SEQ ID NO: 259745 - DNA, 369 bp, Klebsiella pneumoniae
atgcgacctaccgttgaggcgattattcgccacgagaacggcaaaggcccactgcgtaccgaaaacacatggtacagcattgacgtcatcgatgaaggcttgcgccgcgccggtgtggtgaagccgatcaaaaccacggcttccattcctgtcaccaaagaaaccgctggcgcaactgtcacagcaggtatcggtctggcgcaactggctgatgtcgcgccgcagatcagcgccgcaatggataaggctcaggggaacatttcaagcggtgacacggttcgtattgtatttggcattgcgacaattgctgtggcggtattcatcgccattgcccaggtacggaaataccagagaggtgttgcgcaatga

SEQ ID NO: 259746 - DNA, 204 bp, Klebsiella pneumoniae
atgacgatgctgttgacgatgagctttctgctaactggatgcgtgattaaacagcctcaaggtcttttattctgcgaagtcgctcatcctatttatatcggaaaggaagactcgttgaccgtggaaaccaaacggcagattttgtctcatgatattgtcggtcaacgtatatgtcagtggggagagcgcaatcaatcaagttaa

SEQ ID NO: 259747 - DNA, 1137 bp, Klebsiella pneumoniae
atgcatccaggaaaagccaataaccttcgttctaagatattagatttacttgactatattcatatagatgaaagtagaatgataactttctccaaccctataaagtcatttgagaaacttgagaatgaattaagaaaaaaaagtgacgtattcgatacatttaccactgtactggcgtatatagatgcaatctactactactgcaaccatatatcgcctagcatcaataaagatttatcactaatatctaaggaggagaaacaaaagattgtagatttcactttatcttatttgataacaattccatttgattacaaatcgacaattgaactaactagcatctcgctgcctgagtatgtacaagaagagtcaaaagtatctattaaaaggcgtaaacatttcggctctaacgcaacaattattgagattaaatgcagtgggtattacacacaccaaaatagcgaatcttttataaaagaaccattgaaggttttaaattgcctactttatttcatgttagtaactaaaataattaaacataccccacaaagtttaatttcggcgggactaggcggtaatacaatccaaaactatacatcaataaatgttttcattcgccctgaatcatttgaaaaaatatctcaccaccagcatttaccacttcacatatctaaattcttaagtgaattaaaaatgacagataattatgatcagaattcaaaaccaggccgcgcagaaatagcaatagaatccgctcttgcccttataaatgcaaaaaccgaaggggccgagtatatacgctccgccattgattggtatatgaactctctatatacgactgatagtacaatgtcattcatccaaacatgcatgggtttggaggctttacttggagaaaaggaaaatggtgcaggagggcttaccagaactttagcagatcgctgtgcataccttattggaaatggtcacgaagaaagagtgataataaaacaaaacattgaagatatatacaaattacgttcaaacattgttcacggagtgacaaatacaattagaaacagcgagaagaaacatacggcgcttgcaactatttatctaaacaaggtgatttcttcggagtgtagatttgtaaaataa

SEQ ID NO: 259748 - DNA, 477 bp, Klebsiella pneumoniae
gtgattaattcaaagaatatactatcagcaccgttattatttgcactgctatctaaccctgtttttgctcaaacacaatacaacaccgcactatctctaccaatggcatcccctagcgataaaatgatagatccttctttacctaaaatctctgagtggtatcaatcctgcaaaaatgctgaagatcccaaaaacgctagagattggggttactgcaatggttatctggactccgttatccagagtcattatgaaaccacaaagaaaaaatgcccgaacttttcgatcaagaactttttggacgcagttgaaaaagaagcctctgcatatcgggaacataactcaacaccagcggctggaatagatgggaaggttatgaatggtgcgagagtctacaacaaaaacactcttaccgagtggcagcgcccagctttccaggttctttctcatattattaaaaaggaatgcacattctga

SEQ ID NO: 259749 - DNA, 219 bp, Klebsiella pneumoniae
atgacaccagaacagtttgcatattggcttcagggattcgttgagcttggcggcgagcgtccaacggaggcgcagtgggatagcatcaaagagcatctacaaaccgtcttcaataaagtgacgccaccggttcatgtgtcgaatattggcatggcgttgcacaagctggaagaagacctcaccagccgcggtaaaaatatcacatctttatcttgctaa

SEQ ID NO: 259750 - DNA, 420 bp, Klebsiella pneumoniae
atgtcttacgaacgccaaaatgctattaaacgcactgcttcaatgcaggttgcgttggatagacgtgcagctcgtatgctccgtgctcgcgaagcccgtctagaaggcaagacagttgacgccactaagcaagatgtagatgcaagcctcgccattcttaaagaaatgagaaagctgagtgttgtcgagccagtgacagctaaactgtttagtggtcacaaattcaataacccacatgctgccgcaagatactccgttgtaaaaggtggcagaattaagtataacgccgaaagtgatactgaattagttttggtaaatgctggcctcagaaatgaaaatccatttgacccaaaagagttagatcttggtatatcattagtatcaagtcattggcaggtatgcgagccgaaagtcaagtaa

SEQ ID NO: 259751 - DNA, 465 bp, Klebsiella pneumoniae
atggttacacagtttacaaccatgaggttctcggcttactctcgtgtccatacagctatttttttctcaaatggtcatgagtatgagctgaaccttcagagcatttcagaatttaatcttgttgattcttcagtgattttccctgaagggtatatttttagccctaatgggtgctgggagatctcatttgacctggctgaaaacctggcaaatggaacctattttgatcgccctgaattaggtacggtcagcgctatcagcgtcatgaggacggttgaaagagcgattcgtgaccactataatgaatacaaggcaggaatgtacgtttttttgcctgacaatgacaaattagaagctgtgtacaaacgacttgtcgcaagacatttaggacgcggcttcacgatagaaacaggactggatccggacaggaggggttatgtcttacgaacgccaaaatgctattaa

SEQ ID NO: 259752 - DNA, 621 bp, Klebsiella pneumoniae
atgaacgtcctaatttatgcacgagcctctaccagagaacaagattccacacgtgctgtcccggcgttgcgtgagtttgcaagggagcgtggttgggctatcagtaaggaatatgtcgagaatgcttccggggcttcccttgaacgtcctcagctatcgctgttgcttgatgaggctaacaatggggatttgttgctggtggagtctattgaccgcctgagtcgtctggaggctgtccaatgggaaagtttgaagcgtaccatccaagataagggactgaagctggtagtggtggatttacccacctcgtggaaaatgcttcaaggggataaatcgtcatctgtggtggatggcattatggcagcagtaaataacatgctgatcgatatgctggctactatggcccgtcaggattatgagactcgacgtgcacgtcaaaagcaaggtatcgagaaagcaaaagaggctggtgtgtatgtcggtaaagctaaggatgaaagtaagcgtgcagcaagaaccgtattgacggggatgtgttattcagtcggcagtgctacgcgccaggggagcagttcgccgacccggtttatcggccagtcggctatgacgtcaaggacatag

SEQ ID NO: 259753 - DNA, 264 bp, Klebsiella pneumoniae
atgaagaagcgtttttccgacgaacagatcatatgtattctccgcgaggccgaagctggggtacccgcccgtgaactctgccgcaagcatgccatttccgatgccacgttttacacctggcgtaagaagtatggcggtatggaggtgcctgaggttaagcgcctgaagtcgcttgaggaagagaacgccagactcaagaagctgcttgccgaagccatgctggataaagaggcgcttcaggtggctcttgggcgaaagtactga

SEQ ID NO: 259754 - DNA, 942 bp, Klebsiella pneumoniae
atggaaatggattgcatcccagcaggcatggagttgttcccagcaattgatgaaggtcaatgggagttcataaaaaaaataattgatgactgtgattactatctgctgatcattggtggtcgttatggctctgtcgcagaagatggtttgagttacaccgaaaaggaattcgattacgcagtttcaaaaggcttacgcgtcgttgttttggtgcatgagaatccggaagatctacctttagccaaatctgaaaaggattctaaactcagagagaagctaactgcattcatagagaaggcctcaaccagtcgtctcaggaaaacatgggcaacagccaaagatttacccgggttggttgctttaagtatgagtaaaacgatgaaaacttatccagcaatcggatgggtaagagccaacttaacttcttccgaaactgatttacgtgcaatcgttgatttacaaaaagagaatgaatggttaaaaagcgaactggcaaaagtaacttctattcgtagccaaaaccttgacttagatctagcggatttcgacgacgttttcgattttgattgtcagtctaattttcctagggggcaatactccgctggcggcacaaaaatttggtctgttagcatgaaatggaaagatatatttcatacaatatccccatatctcgtacagtattattctgaatcaaatgtctcgtctcttatagcccaaagagctcagcaggtcgctagtaaaggaggtacattggcaaaagtgtcctctcaagatcttaagaccataggtgtgcagttgaaagcctatggcttgataaaaatcgagtatttaaaaaccaccaatgggagcatgaacactttctggtcattaactgaagctggccagactgaaatgctgaaaatacgaacgataaaaaagcaaagccaagaaacttccgaatag

SEQ ID NO: 259755 - DNA, 657 bp, Klebsiella pneumoniae
atgaaccggtactcacttatctatgcggatccgccatgggcttacggcaatacgatcagcaacggcgccgctgccgatcactactcgacgatgcgactcatcgacctgaagcgtctgcctgtgtgggaactggctgccgaaaacgcggtgctggcgatgtggtacaccggcacgcataaccaggaggctatcgaacttgccgaggcctggggctttacagtgcgcacgatgaagggctttacctgggtgaagttgaatcaactggccgagctgcgcattagcaaggctcttgcagagggagaggtcgcagacttttacgacttcctcgacctgctgaacgccgagacgcgcatgaacggcggaaaccatacccgcgctaataccgaagacgtgttgatcgccacccgcggcgccgggctggagcgcaagcacgccggcattaagcaggtggtctacagcccactcggcgcgcacagcgagaaaccgtgggaagttcgccaccgcctggagctgctctacggcgacgtgccgcggattgagctgttcagccgcagcgcagcgccaggctggagccactggggcaaccagtgcgccaccgcttccgttgaactgatccccggctgcgccatcgacgttgtgaagacggaggcagcatga

SEQ ID NO: 259756 - DNA, 861 bp, Klebsiella pneumoniae; identical to SEQ ID NO: 180326

SEQ ID NO: 259757 - DNA, 306 bp, Klebsiella pneumoniae; identical to SEQ ID NO: 192673

SEQ ID NO: 259758 - DNA, 351 bp, Klebsiella pneumoniae
atgagccgattaaccgccattatcagcgcagtggttatcctgctgctttgctgtgttttctcatggcgttctggctggaattctcacgctgaccatatcaatgccctggcggtgaagaaaaaagagaaagccgaaaaggctatccagcctgttgagcaaaaggccgctgccgctacagaagagggcaaggtcatctaccgaaccataacccgcgacgtggtgaaatatgtccagtctccgaatcgtactgtttgccggtttgacgatgatgctgtgcagctgcgccaacgtgccatcgacgctgccaatgccatccccggatttgatgacggcgccttgcaaagcaagtga

SEQ ID NO: 259759 - DNA, 1224 bp, Klebsiella pneumoniae
atgggattcagatttcgtaaatcgatcagcattatcccgggggtcagggttaacctgagtaacgggacccccagtctgagtattggcccccgtggagcttcgctgtcagtgggaaagaatggtacgtttgccaacctgggccttcccggaacgggactgagttaccgcacccggattgacagaacagcacgggaaagagtgaataccaggcatcaggcagatcccggtctgaggtctgaactggagctggtggtggaaaaactgatgtccaccgtaacagcgataaccaatatccatgaactctccccttctccaaagggagggaatacctgggccacgctcgagacacagtacctggcgctccgtcagggcagtttcactcttcctgcgccggtacgaccaaacaaacctgaatatatacctcttccaccagaacctgatgagcatgccggtcgcggtttccttgggggatggcttgaatctgatgcagcccgacaggagcgacagaacgaaaatcttcggcggtggcagacgtccgtcgctgatattgaacgtgaaaatgcgttgctgaaacagcgttatgagaaacagcgtatagcgtgggctgagcagtacgcagaatggcagcatcagtaccaggagcatgaaaaaaatcgcacggactctgtagctttagcgaaagagcaattccgctctgacgcccgcttctttgaacattgtcttgaggaagttttctcgcaaacagaatggccgcgagaaacgctggtgacgtttgaggtacggcctgaagaatcaacagtctggcttgatgttgatttacctgagattgaggatatgcctgataaagtgtatagcgtgaatgcccggggaactgatatcaatgaaaaagccatgacacagaaagcggtccgggaaagttacgctaaacacgttcacggatgcctgctgagattagcagcaatcgtttttcagacgcttccgtttgaacaggttgtcatttcaggcttcactcagcgggtaagtaaacgcactggatatcttgaagacgagtacattatttcctggcgggtatgccgctctgaaatcgagctaatcaacttcgggaatctgcgaggcgttgaccctattgaagcattgggtgatcgaggtctgatcaggaaaatgagttcaacttacatttttcagcctatagaaccactgacccagatggcaggtaccgactga

SEQ ID NO: 259760 - DNA, 219 bp, Klebsiella pneumoniae
atgctgcttatccagctgactcttgcagcctgcgcggcgatcattatgccgcttaccacgccgatgatgctggcggatttcagcgccgtcggcggcatgctgctggtggccaccgggctgcgcatctgcgggataaaaatgtttgccgtagtgaatatgctgcctgcgctggtgttggcgatgccgatttccgcggcctggacgctgttttttgcctga

SEQ ID NO: 259761 - DNA, 486 bp, Klebsiella pneumoniae
atgatatccttaaagccattggtggctgatggatttaggggtcaccagatggcatttaaagggacactttctggatactttcgcgatggcgaaaatgatactgaattctgcactgactggaaattcttaactaaagaagaaaaaactgaaatcattaatttcataaaagaaattgctgagaaagagtttatcactggtaagaataaggagtcttgggtggatgataatcaccaggatatccccggagccgatggttatagagatgagaactattggcattaccattgcggtccggattgggccggcgggcgactgaaaagtatgacaaagtgccttttcttcaaccctggcggaatggcttcacaacagtgtatacactactatccattagaaaatgaagagaatgagatagttataattgggtattcaagaaaccatatcccttttttgttgcctgatgacccaaataacaagtttttttcctga

SEQ ID NO: 259762 - DNA, 729 bp, Klebsiella pneumoniae
gtggcgtcgacctacggcgtgctggcctcggtgtcgcgccgctacgcgcatcgcatccctttcctggtgaagctcaaccataacgaaacgctgagctaccccactgaatacgaccagaccctctacgccagcgttgagcaggcgttcaatatgggggcggtggccgtgggtgcgacgatctatttcggctcggaacaatcgcgtcgtcagatagaagagatttccgccgcctttgagcgggcgcatgagctgggcctggtcaccgtgctgtgggcctatctgcgcaattcggcgttcaagaaagacggcgtcgactaccatgtgtccgcggatctgaccggtcaggccaaccacctggcggccaccattggcgccgatatcgttaagcaaaaaatggcggagaataacggcggctacaaagcggttaacttcggctataccgacgatcgggtgtacagcaaactgaccagcgataaccccatcgatctggtgcgctaccagctggccaactgctatatgggccgcgccgggctgattaactctggcggcgcggcgagcggagagaccgaccttaccgacgcggtgcgcaccgcggtgatcaataaacgcgctggcggtatggggctgatccttggccggaaggcgtttaagaaatcgatggccgacggcgtgaagctgatcaatgccgtgcaggacgtctaccttgacgggaaagtcactatcgcctaa

SEQ ID NO: 259763 - DNA, 321 bp, Klebsiella pneumoniae; identical to SEQ ID NO: 234546

SEQ ID NO: 259764 - DNA, 564 bp, Klebsiella pneumoniae; identical to SEQ ID NO: 234839

SEQ ID NO: 259765 - DNA, 1074 bp, Klebsiella pneumoniae
atgaaagggataacgacatggatagtgctgggcagcctgctgctgtcaggctgtgatcagaagagtgtccacatggaggcatcttcagatacagacccgctgagcgatataagttcctctccggcgtttacctgtcagcatgagacacttcccgcgccctccgcggataccgatgttctgtttaaatacgcccgctggctgcagaaaaataacctgctgaagcaggacaagagcgtcgatgcgcaaaccgaacggctgtaccggatagcggcagagaacgggcactataaggccagcattaatctgcagaacggcgccctgcgctggcagttttcgctgagcagccatgagcagttccggctgagccagcagcttatcgctgccggggtggcgaccgggtactatctgaccgctatctatctggaacggggcgtcgcggggctgcagcaggatccggcgcttgccctgcgatattaccgtaaggcggcggatgagggcaatccgcaggcgcaggcatatgtgggggataagctggcgccggtggacagggcgcccaatattgcgcaccagatgcgtcgttgcgccgcggagcagggagaggggaaggcggcggcaatgctgggtattaatttacaaggtaaagaggattatcagagtgcaatagaagccttccagttgggagtcgctgcgggtaacgggagttcagcgaggtttttagcaaatggatttagtggtcctgaacctggagacaggctctattatctggctcagcagaaggatccggaacgtgccaggcgctataaacagatagcgaagatcctgagcaattattcctacgccagccccacggtcccggaaatcaatgatatcgtcccgctaccacccgcgctgctccctgagtgggacggcaaactgaaatggctggaagagcgcgaggccaatgtgccgccgccgaagcccagcgcagcgctgatagagaaacttgcgaaagcgaaacaactgaacccggcgacgggcaggccgctgccgacgtcaccggactccgggaaatacaacaggtcagctggccagtaa

SEQ ID NO: 259766 - DNA, 294 bp, Klebsiella pneumoniae
atggcgcttgatccggatatcagccctgacacgatgcttactcttgcaggtaccgtgacccatcatcaaaaaacggtgctggttgactacgaactgccggagtctgcggttggttttgttatgggtcacaacatgcttgatgagtactgggatacggataaacattctgcactgtttcgcccgggcaacaatatggatccccgcttaggcgctaacggtaagctgccgcggcaggatatctccagtcgggtaaccggcccgattctggagcatctgcatggctttgttgaataa

SEQ ID NO: 259767 - DNA, 741 bp, Klebsiella pneumoniae
atgaatactttacaatcgactaactggcttcagtacggtataaaagacattaaacacctcaaacacgccaatatgcacgatccattgattccattcgaaccggtgttttcaccccagggacccactttactcgtcgcggtacgtcagtctgaggtaatacgggagactccacgccaccatcacagctgtgggcagttaatcggtgccatacgtgggctacttacggtcgatggcggtgattgtcgctgggtggtaccggcaacacatgccgtctggataccgccaggtgttccgcacggcctgcgctcgcacggtccatattcaggatggagtgtttatgtttctgccaaagcctgtggcgagctacctgataagccatctgttcttgaaattggttcccttcccagggttaatcttgggcttccaataccgcaagatagccgattgctcagaatcgcgcaggcgctgtcagcaaacccggacgacgggcgcaggttggaagaatgggcagcctgggccggcatgtcatcacgcacgctcacgcgacgattccgagccgaaacgggttttagcttcaatgaatggcgacagcggatacgcttactcagggctcttgagctactggctgccggcaagccagtgacggtgatagcgctggatctgggatatgacaatgtgagtgccttcatagccttgttccgtcggatgttcggcacgactccagggcggtataaaatttaa

SEQ ID NO: 259768 - DNA, 696 bp, Klebsiella pneumoniae
atggaggatgctgaaaacagcctgtccagtgcggcgatgacgcccaggggacggctacgggtggatgtaccgagtccgctggcccgccttattctggtgccggcgctaccggctttccacgcccgctaccctgatatccagatcgacatgggtgtgagcgaccgggaagtggatctgatcggcgacaacgtggattgcgttctgcgcggtggtcaaatcaccgaccagtccctaatcgcacgccatgtcggcgatttgcaaatcggcgtctacgtcgcccccagctatgtggaacgccttggcgctcccgcacacccgcgcgagctgcaaaatactgaccattgcatagtgggattcttgtcctcgcgcaccagtaagattgatcctttggtactgtgcagtgagaatgaacgtattgaaatcacgggcaactacgtacttgccgtggatgatggcaatgcttacctcgaagctgggttagttggcttaggcgtgattgcgctgcccaactatatggcggcagcgcatcaggccgttggcgctttgattccattatttacacaatggcggattagcccaatgcctctgtacctggcgtttccaccgaaccgccatgtcaacgccaagctgcgcgtttttattgactggatcgttgaagtgatgctgcagcatgtccccattgccaacaatcagtga

SEQ ID NO: 259769 - DNA, 942 bp, Klebsiella pneumoniae
atgacgatgcggcgtgtgaaattactctgtacggcgctgatgctgcttgccagccacggcgcgctggccgtcagctatccgctgccgccggaggggagccgtttggtgggcagcgcatttaccattgccgttccggacaataacacccagccgctggaaagttttgccgcccagtacggccaggggttaagcaatatgctggaagccaaccccggggtcgatgtctatttgccacgctccggttcgacgctgactattccgcaacagctgatcctgcccgacaccgtgcgcgaagggatcgtgatcaacgttgccgaaatgcgtctctattattacccgccgctgggcaacagcgtggaagtcctgccaatcggcattggccaggccggacgcgaaacgccgcgtaactgggtgacggcagtagagcgtaagcaggaaggccccacctgggtgccaaccgccaatacccgccgcgagtatgcgaaagagggcaaaaccctgccggcgctggtgccccccgggcccgataatccgatggggctgtatgcgatctacatcggcaggctctacgccatccacggcaccaatgccaactttggtatcgggctgcgcgtcagccagggatgcatccgcctgcgcaatgacgatattaaattcctgtttgataacgtgccggttgggacgcgggttcagctgatcgatcagccggtgaagtacagcgtggagccggacggcagtcactggctggaggtgcacgagccgctgtcgcgcaaccgcgcggagtttgaatccgacagaaaagtccccttgccgatgacctcggcgctgcgcgactttacccaggggccgggagtgagccctgcccaggtcgagcagaccctgcagcgccgctccggcatgccggtgaatatcagcgccacagcggcgcagggaagtttgtag

SEQ ID NO: 259770 - DNA, 951 bp, Klebsiella pneumoniae
gtgaacttccagcagctgaaaattatccgtgaggcggcccgtcaggattacaacctgacggaagtcgcgaatatgctctatacctcgcagtcaggcgtcagtcgccatatccgggaactggaagaggagctggggattgagatctttatccgccgcggcaaacgcctgttaggcatgaccgagccgggtaaagcgctgttatcgattgccgagcggatcctcaatgaagccagtaacgttcggcggctggcggatctcttcactaacgatgcgtcaggcgtcttaactatcgccaccacccatactcaggcgcgctacagcctgccgccggtcattaaagctttccgcgagctgttctcagatgttcgcgtcgagctggtgcagggtaccccgcaggaaatcgaagcgctgctgcataacggcggagcggatatcggcatcgccagcgagcgcctgagcaacgatccgacgctggcggctttcccctggttccgctggcatcacagcctgctggtgccgaaggatcatcctttgacgcaggtttctcccctgacgctggaggcgatcgcccgctggccgttaatcacctaccgccaggggatcactggccgttcgcgcatagatgaggcgttcaaccgcaaggggttgatgccggatatcgtgctgagcgcgcaggattccgatgtgatcaagacctatgtggagctggggctgggcgtcgggctggtcgccgagcagtccggtgatgcccgggaagcggacacctttacgcgtcttgatacccgccatctgttcgatgccaataccgtgtggttgggactgaagcggggccagctgcagcggaattacgtttggcgctttatcgaattgtgcaatgccggactgtcgctggatgagattaagcgtcaggcgatggagccggaagaggtcgcaatcgactatcagatttaa

SEQ ID NO: 259771 - DNA, 918 bp, Klebsiella pneumoniae
atgaacttaagacgactgaaatattttgtgaaaatcgtcgatatcggcagtctgacccaggccgctgaagtcttgcatatcgcccaaccggccctcagccaacaggtcgcgaccctggaaggtgaaatggaccagcagttgctgatacgcaccaagcgaggggtcacgccaacggaagccggtaaaattctctacacccatgcgcgcactatcctgcgccagtgcgagcaggcgcagctggcggtcaataacgtcggccagacgctgcgtggtcaggtgtcgatcggcctggcgccgggcaccgcggcctccgccattaccatgccgttgctgcaaacggtgcgcaatgagttgcctgaggtgatggtctatctgcaggagagcagcggcacagcgctgaatgacaagctgctggcgggccagctggatatggcggtgctctatgagcgttcgccggtggcaggcatcgtcagccagccgctgctgaaagaagacctttacctggtcggcacccgcgactgcccggggcagagcgtggatctcacggcggtggcggagatgaacctgttcctgccgcgcgattacagcgcagtgcgggcgcgggtcactgaggcattcaccctgcgtcgtctatcggcgaaaattatcggcgagatcgaatccatcaccaccctgaccgcggccatcgccagcggcatgggggcgacggtgttaccggaatccgctgcccgttccctgtgcggggcggcgaacggctggatggcgcggatcagcacgccttcaatgagcctgtcgctgtcgctgaacatgtcggctcgcggcagtctgtcgccgcaggcgcaggcggtgaaagagatcctgctgtctctggtgagccgcccatcgctggaaaaccgtgaactgcagctggtcagttag

SEQ ID NO: 259772 - DNA, 933 bp, Klebsiella pneumoniae
atggatgtcataagcatcattatggcggcgggcaagtcgtccgttgacgtcgcgctgtatacgctgttgccgatcatggtgatcatgctgatcatcatgaaataccttgaggtccgcggtatcctcgatgtgattgttcgctgggtggccccgctgctgaagcccttcggcttaaccgggatgagcgccttcgccctgatccagattaattttgtcagctttgccgccccgctcgccacgctgtcgattatggataaacgcggcgtctcggaccgacaaatggccgccacgctggccatggtgttcgccatggggcaaggcaacgtcttctatcctcttaccccttttggtctgcactggctggcctcgatcgttatctcggtggtcggcggcctgtgcgcggcagccgtcgcctggcacgtcaccggacggcgcttatcggtcgccgagagcccccgcgcggaagcgctgccgaacgccgagcagaacagccagggaattctggccgtgattaacagcgccggctccgacgccatccgcctggcgctcggcgcggtgccaatgctgatcctgtcgttaaccatcgtcgggctgctgcagggcgccggggctatcgacctgctgcagcagctgctgaagccgcttctcagctggctgcacatcccgcagaactttgtgctgccggcgctggtgaagtgcgttgccgggggcaccgcctactttggcgtcatttccgagctgatccagcagggcaaagtcaccgtcggccaggtcaacgcctcggcaggtctactgatccagacctttgatcttcccggtatcggcatttttcttggcatcagctcacggtttgtccgcctgttccgcttcgtggctcccgcggcgatcgtcggtatcctgctgcgtaccgttctgcacctgaccctgttttaa

SEQ ID NO: 259773 - DNA, 1623 bp, Klebsiella pneumoniae
atgaagcatctatttcgacactggcgaacgtcgggcgccgttatcggctcactgctgaaaaaagggagcattgcggtactggcgctgctggtggtctttctcgccgggcggatctatgagtcccagcgcggcccggccctgcatcgctggcatacctggagtggcaacgagatgtcggccgaagagatcgaccaggccacctttgcccagtatctggcgcgggagaagacgattttcgccgatctccagcgtgaggtgacagaggctttgccggaggaagataaaacctcggtcaaccgcttttatcgtcacagccgggtctggccggggcagtttcagcaggactggaaccgttcttttgtgctgctgccgctgggcaagccgcgcggcggcgtggtgctcctccatggcctgaccgattcgccctacagcgtgcgctatctggcgcaactctggcagcagcagggttatgtggcggtggtgccgcgtttgccgggacacggcaccgcgccgggggcgttaacggcggttgactgggagacctggctggcggcgacgcgtctggcggtacgcgaagcgacccgccttgccggggcggacgtgccgctggatctggtcggctactctaacggcggcgcgctggcgctcaagtatgtcctcgatagcctggaggatagccacctgcgtcagccgcagcagattattctgctgtcgccgatgatcggcgtgaccgcgtttgcccgtttcgccggcctcgccgggctaccgtccgtcttcccggcgttcgcccgcgcggcctggctgaacgtggcgcctgagtttaatccgttcaagtacaactcctttccggtcaaggcggcgagacaatcgtggttattgagccaggcgctgcagcagcagattatccgcgcggcccggcagggcgagctgaaagcgctgccgccgatcctcacctttcagtcggtgatggattccacggtcagcacccgcgcggtggtggagtccctgtatcgctatctgccggataacggcagcgagctggtggtgttcgatattaaccaggcggcggatctccgggtcctgtttcgccctgcgctctatgcggcggtgaatacgctgctgcccccggcgccgcgggcctataccaccacggtggtgaccaacgcgacggcgcacacgctgcagaccgtcgcccggaccacgctggcccaggatcgggaagagcatcgttatcctttacacctggcctggccggcggatatgtactctttgtcgcatgtggcggtgccgtttcccctgagcgactcgctgtatggtcgcgagccggacgagaagaaccgctacggcattagcctgggcaccatttcactgcgcggagagaccgggacgctgagcgtggggctggagacgttaatgcgcgtcacctccaatccattctttccatggatgatgacgcgcgtcgatgagcgcatcgcctgcggcgaacaggcggcggtggcggcctgcctgaaagcgcagaccagagcagaggcattaaaacagggtcaggtgcagaacggtacgcagcaggataccgacgatcgccgcgggagccacgaagcggaacaggcggacaaaccgtga

SEQ ID NO: 259774 - DNA, 246 bp, Klebsiella pneumoniae
atggagtggtgggtaaaaaaagtacaggacaacgcttcggccagcctctgccgcgtcgtgcttcagagcggtgcgctggagatgagcgcagagattgaagcctgtcgcctccgcctgcgggaaggggataaactcactccgctggccgatgcgcgctattgtctgaataataatccgacgcaaactttgaagatccgcaacgccactcattatagcagcgagcgttggacaaacgccggcaaataa

SEQ ID NO: 259775 - DNA, 2658 bp, Klebsiella pneumoniae
atgaccccgaaaaaattctccctgatccccggcaacatcagccgcttcttcattttgatggttattgtcctgctggcgacaatgggggtgatgattcaaagcgccgtcaatgcctggctgaaggagaaaagctatcaggtggttgatgtctcccacgctctgcaccagcgcattgacgcctggcgctatgccacctggcagatctacgacaatatcgccgccacctcagtcaacaccgcaagcggcggtctgcaggagacgcgtttaaaacaggacgtttactacctggagaaaccccggcgtaaaaccgaagccctgatctttggctcccatgacagctccaccctcgaaatgacgcagaaaatgtccgattatctcgatattttgtggggcgcggagaccattccgtggtcgatgtactatctcaacggcctggacaatagtctgatcctggtctccaccctgccgttgaaggacctctcttcgagcttcaaagagtcaacgatcagcagcgtcgtggagtcgcggcgcgcggaaatgctgctgcaggctaatacccttgatgagcgcgagacgttctcgccgttgcgccatctcgcctggcagaacgcgcactattttacgttacgcaccaccttcaaccagcccggacaccttgccacggtggttgccttcgacctgccgattaacgatctgatcccgcccggcatgaccatcgacagcttccgtatcgagcctgacccgtcgcaaaatctcgccaccacgccggataaagagagcgccgatcatatcgggatcacctttaacggcatgcagattgacatcgccaccgacatcagcaccaccggtatgcagttgctgtggacggtaccaatgagcaccatgctgctggagtccatgcagaacattcttctgccgctgctgctcaacattggtctgctggcgctggcgctgtttggttttaccacctttcgccactataaaggacgcagccattcgtctggcgccgggctcccctccgccgccaacagcgaactgcgtctgctgcgcgccattaacgaagagattgtttctctgctgccgctggggctgctcgttcacgatcaggaagccaaccgaacggttatcagcaatccaattgccgaccatctgcttccgcacctgaatctgcagaacatcaccaatatggcggaccagcatcagggggtgatccaggccaccgtcaataatgagcagtatgaaatccgccagtatcgcagccaggtagcgccgcgcacccagatcctgatcatccgtgatcaggaccgcgaagtgctggtcaataaaaagctcaagcaggcccagcgcttgtatgagaaaaaccagcagggacgggccgcctttatgcagcacatcggcagcgccctgaagcagcccgcgctgacgctggcggcagaggcggcggcgctcagtagtacagagaatcggacgctggcccagcatgccgatgagctggtcaaactcatcgatgacattcagctcgccaatctgctggaaagcgatgcctggaaaaccaaccagacgttgttctcggtgcaggagcttattgacgacgtcgtgccggaagtgctgccggcgatgaaacgcaagggtctgcagctgctcatcaacaatgcgctcccggccggcgagcagcgctatggcgaccgtgaagctctgcggcgcacgctggtgctgttaatccagtattcagtgaccaccacgcctatcggcaagatcaccctcgacgtctgtcaggatgagtcggccagcgatcgcctgaccttccgcattctggataccggcaacggcgtctcggcaaacgagatcgacaatatgcacttcccgtatctcaacgagacccagagcgacctgtacggcaaagcaaacgcccttaccttctggctatgcgaccgcatgacgcgcaagctgggcgggcaattgaccattaaagcccgggagtcgctggggacgcgctataccctgcatctgaaaatgccggccagcgaagaggcgccagaggcgggagagcatttgctggatgacgttatcgtcctgctggatgtgacttccagcgaagtgcggcggattgtcactcgccagctggagagctggggagcgtcctgcatcacaccggacgatcgggcgaccagtcaagcctttgatctttatttaacggataatccgtctaatcttactgcttcaggcttgcttttaagcgatgatgaggtcgggatacgcaagatcggcccgggccaactgcgggtcaactttaatattagcacggcgatgcaggaggctatcctgcagcttattgagcagcagctggcggaggaggcggttcagcccgtcacctcaggaaacgagagtaacgccgaactccatgccagcggctattacgcactgtttgccgatacggtaccggatgatgttcagagattgtatactgaaatcgaagcgggcgattttgctgctctggcgcaaaccgcccaccgcctcaaaggggcatttgctatgcttaatctgatacccggcaagcagttatgtgaaacgcttgagcatctgattcgcgaaaaggatgcgcaaggcatagaaaaatatatcagcgacattgacgcttacgtcaagagcttgctgtag

SEQ ID NO: 259776 - DNA, 2634 bp, Klebsiella pneumoniae
atgagcgaccttgcgagagaaattacaccggtcaacattgaggaagagcttaagaactcttatctggattatgcgatgtcggtcattgttggccgtgcgctgccggatgtccgagatggcctgaagccggtacaccgtcgcgtactttacgccatgaacgtattgggcaatgactggaacaaagcctataaaaaatcagcccgtgtcgttggtgacgtaatcggtaaataccacccgcacggcgactccgcggtatacgacaccatcgtgcgtatggcgcagccgttctcgctgcgttacatgctggtggacggccagggtaactttggttccatcgacggcgactccgccgcggcgatgcgttataccgaaattcgtctggcgaaaatcgctcatgagctgatggccgatcttgaaaaagagacggtcgatttcgtcgacaactatgacggtacggagcgtattccggacgtcatgccgaccaaaattcctaacctgctggtgaacggcgcctccgggatcgccgtagggatggccaccaacataccgccgcataacctgacggaagtgattaacggctgtctggcgtatgttgacgatgaagacatcagcattgaaggactgatggcgcatattcctggccctgatttcccgaccgccgccattatcaatggccgtcgcggcatcgaagaggcctatcgcaccggtcgcggtaaagtgtacatccgcgcgcgcgcggaagtggaagtggacgcgaaatccggccgcgaaaccatcatcgtgcacgaaattccgtatcaggtgaacaaagcgcgcctgatcgagaaaatcgccgagctggtcaaagaaaaacgcgtggaaggcatcagcgcgctgcgtgacgagtctgataaagacgggatgcgcatcgtgattgaagtgaagcgcgatgcggtaggggaagtggtgcttaacaacctctattcccagacccagctgcaggtctccttcggcatcaacatggtagctctgcaccatggtcagccgaagatcatgaacctgaaggacatcatcgccgcgtttgtacgccaccgccgtgaagtggtgacccgtcgtacgattttcgaactgcgcaaagcgcgcgaccgggcgcatatcctcgaagcgctggccgttgcgctggccaacatcgacccgattatcgaactgatccgtcgcgcgccgaccccggcagaagcgaaaacggcgctggttgcccaagcgtgggatctcggtaacgttgcggcgatgctggagcgcgccggggatgacgccgcgcgtccggaatggctggaaccagagttcggcgtgcgcgacggtaaatactacctgaccgagcagcaggctcaggcgattctggatctgcgtctgcagaaactgaccggccttgagcatgaaaaactgctcgacgaatataaagagctgctggagcagatcgcagagctgctgcacattctcggcagcgctgaccgtctgatggaagtgattcgcgaagagctggagctgatccgcgaccagttcggcgacgaacgtcgtaccgaaatcaccgccaacagcgctgatattaacatcgaagatctgatcaaccaggaagatgtggtggtcaccctgtcgcatcaggggtatgtgaagtatcagccgctgaccgactacgaagcacagcgtcgtggcggtaaaggcaaatcggcagcgcgcattaaagaagaagactttatcgaccgtctgctggtggccaacacccatgacaccatcctctgcttctcaagccgcggccgtctgtactggatgaaggtctatcagctgccggaagccagccgcggcgcgcgcggtcggccgatcgtcaacctgctgccgctggaagccgatgagcgcatcaccgccatcctgccggtccgcgagtacgaagagggcgtcaacgtctttatggccaccgccagcggtaccgtgaagaaaaccgcgctgaccgagttcagccgtccgcgttccgccggtatcatcgcggtcaacctgaacgaaggcgatgagctgatcggcgtcgatctgacctctggtcaggatgaagtgatgctgttctccgcggccggtaaggttgtacgcttcaaagaagacgccgttcgcgccatgggccgtaccgccaccggcgtacgcggtattaagcttgcggaaaacgacagcgtcgtctcgctgattattccacgcggcgaaggcgcgatcctgacggtgacgcaaaacggttatggtaaacgtaccgcggcggcggagtatccgaccaagtcgcgtgccacccagggcgttatttcgatcaaagtcaccgagcgtaacggttccgtggtcggcgccgtgcaggtggatgactgcgatcagatcatgatgatcaccgacgccgggacgctggtgcgtacccgcgtttccgaagtgagcatcgtgggccgtaacacccagggcgtgatcctcatccgcaccgcggaagatgaaaacgtggtaggtctgcagcgcgtggctgagccggtggatgatgaagagctggatgccatcgacggtagcgcggcggaaggcgatgacgatatcgccccggaagcggataccgatgacgatgtcgccgaagacgaagaataa

SEQ ID NO: 259777 - DNA, 729 bp, Klebsiella pneumoniae
atgaatgccgaaaaaacgtcggtagcccctaacgtcgatcatgctgaaatcgccaaattcgaagccgtcgcctcgcgctggtgggatctggagggcgagttcaaaccgctccaccgcatcaacccgctgcggctgggctatattgccgaacgctccggcggcctgttcggtaaaaaagtcctcgatgtcggctgcggcggcggcatcctcgccgagagcatggcgcgcgaaggcgcgacggtcaccgggctggacatgggggccgaaccgctgcaggtcgccaggctgcacgccctggagagcggtattcaggtagactatgttcaggaaacagttgaggaacatgccgcgaagcacccgcagcagtatgacgtcgtgacctgcatggagatgctggagcacgtccccgacccgcagtcggtggtgcacgcctgcgcgcggttagtgaagcccggcggccaggtcttcttctccaccatcaaccgcaacggcaaggcctggctgatggcggtagtcggggcggaatatgtcatgaagatggtgcccaaaggcactcatgatgtgaagaagtttatcaaaccggccgagctgctgggctgggtagatcagactactctgaaagagcagcatatcatcggtctgcattacaatccgctgaccaataccttcaagttagcgccaggggttgatgttaactatatgttgcataccaccgccaaacaggactga

SEQ ID NO: 259778 - DNA, 2286 bp, Klebsiella pneumoniae
atgaatcagagtctgctggtgacaaagcgcgacgggaccaccgagcgcatcaatctcgacaaaatccatcgcgtactggattgggcggcagaaggactgaataacgtttcgatttcccaggtagagctgcgctcccatatccagttctatgacggcatcaaaaccgcggacatccacgaaaccattattaaagccgctgcggatctgatctcccgcgacgcaccggattaccagtacctcgccgcgcgtctggcgattttccatttgcgtaaaaaagccttcggtcagtttgagccgccggcgctctacgatcacgtggtgaagatggtcgagaaaggtaaatacgatcatcatctgctggaagactacacggaagaagagttccagcagatggacggtttcctcgaccactggcgcgacatgaacttctcctacgcagccgttaaacagctggaaggcaagtatctggtacaaaaccgcgtcaccggcgaaatttatgagagcgcgcagttcctctatattctggtcgccgcttgcctgttctcgaactatccgcgcgaaacgcgtctggactatatcaagcgtttctacgacgcggtgtccacctttaaaatctcgctgccgacgccgatcatgtccggcgtgcgtacccccacccgtcagttcagctcctgcgtgctgatcgagtgcggcgacagcttggattccatcaacgccacctccagcgcgattgtgaaatacgtttcccagcgcgccggcatcggcatcaacgccgggcgcattcgcgcgctgggcagcccgatccgcggcggcgaagccttccacaccggctgcattccgttctacaagcatttccagaccgcggtgaaatcctgctcgcagggcggcgtgcgcggcggcgcggcaaccctcttctacccaatgtggcatctggaagtggaaagcctgctggtgctgaaaaacaaccgtggtaccgacgccaaccgcgttcgtcacatggactacggggtacagatcaacaagctgatgtacacccgtctgctgaagggcggcgatattaccctgttcagcccttccgacgtcccgggcctgtatgacgccttcttcgccgatcaggacgagtttgagcgcctgtacacccagtacgagcaggacgacaccattcgtaagcagcgtattaaagccgttgagctgttctcgctgatgatgcaggagcgcgcctctaccggccgcatctatatccagaacgtcgaccactgtaacacccacagcccgttcgatccggtagtcgccccggtgcgtcagtctaacctgtgcctggagatcgccctgccgaccaaaccgctggaagatgtcaacgacgaaaacggcgaaatcgcgctgtgcaccctgtcggccttcaacctcggggctatcgacagcctcgacgagctggaagagctggcggtgctggcggtgcgtgctctggatgcgctgctcgactatcaggattaccccatcccggcggctaaacgcggtgcgatggggcgtcgtacgctgggtatcggcgtgatcaacttcgcttactatctggcgaagcatggcaaacgctactccgacggcagcgccaacaacctgacgcacaaaacgttcgaagcgattcagtactatctgctgaaggcctctaacgagctggctatcgagcaaggcgcctgcccgtggttcaacgaaaccacctatgcgcagggcatcctgccgatcgatacctataagaaagatctggacggcatcgtcagcgaacccctgcactacgactgggaagcattgcgcgaatccattaaaacccacggcctgcgcaactccacgctctccgcgctgatgccgtccgagacctcgtcgcagatctccaacgccaccaacggcattgagccgccgcgcggccacgtgagtatcaaagcgtccaaggacggtatcctgcgccaggtggtgccggattacgaaaacctgcagaacgcctacgagctgctgtgggagatgccgaacaacgacggttatctgcagctggtgggtatcatgcagaagtttatcgaccagtcgatctctgccaacactaactacgatccgacgcgcttcccgtccggaaaagtgccgatgcagcagttgctcaaagacctgctcaacgcctataaattcggcgtcaaaacgctgtactatcacaacacccgtgatggcgctgaagacgcccaggatgacctggccccgtccatccaggacgacggctgcgaaagcggcgcttgtaagatctaa

SEQ ID NO: 259779 - DNA, 1131 bp, Klebsiella pneumoniae
atggcatacaccactttttcacagacgaaaaacgatcagctgctggaacccatgttttttggccagccggttaacgtggcccgctacgatcagcaaaaatacgacatctttgaaaagctgattgaaaagcagctttccttcttctggcgtccggaagaggttgacgtttcccgcgatcgcatcgactaccaggcgctgccggaacacgaaaaacatattttcatcagcaacctgaagtaccaggcgctgctcgactccatccagggccgtagcccgaatgtggcgctgctgccgctgatctccatcccggagctggagacctgggtagaaacctgggccttctccgagaccattcactcgcgttcgtacactcacatcatccgcaacatcgtcaacgacccggcgaccgtgttcgacgacatcgtcaccaacgagcagatccagaaacgtgcggaaggcatctctcactattacgattcgctgatcgagatgaccagctactggcatctgctgggcgaaggcacccacaccgtcaacggcaaaaccgtgaccgtgaatctgcgcgagctgaaaaagaaactctatctgtgcctgatgagcgttaatgccctggaagcgatccgcttctacgtcagcttcgcctgctccttcgcctttgccgaacgcaaactgatggaaggcaacgccaaaattatccgcctgatcgcccgcgatgaagcgctgcacctgaccggcacccagcatatgctgaacctgctgcgctccggcagcgacgatccggaaatggcggaaatcgccgaagagtgcaagcaggagtgctatgacctgttcgtgctggcggcgcagcaggagaaagagtgggcggactacctgttccgcgacggctcgatgatcggcctgaataaagatattctctgccagtacgtcgagtacatcaccaatatccgcatgcaggcggtgggcctcgatctgccgttccagacccgctccaacccgatcccatggatcaacacctggctagtctccgacaacgttcaggtggcgccgcaggaagtggaagtcagttcttatctcgtcggccagatcgattctgaagtcgatgccgacgatctgagcaacttccagctgtaa

SEQ ID NO: 259780 - DNA, 255 bp, Klebsiella pneumoniae
atgaagcggatcttcctgaaaatctctgacactcgccttgagtgtcaggatgaacacccttccctgctggcggcgctggagtcgcataatatcgacgtcgaatatcagtgccgcgaaggctactgcggctcctgccgcacgcgtctggtctccggccaggttgactggctgaccgagccgctggcctttatccagccgggagaaattttgccctgctgctgccgggcgaaaggcgatattgagatcgagatgtag

SEQ ID NO: 259781 - DNA, 417 bp, Klebsiella pneumoniae
atgaacataaaagagatcggggacgtatttcactgtgattgcggattttcttggtcgcgcggaaaaaacggtaaccataactgcgctaatggattgcgtgaaaaggtacggcagctggctgcggagaatgtggggctgaagaaattcatccagaccgattgctttgtgggacacatcgagcctgaaactttctatgaggaggaggttactcgctacgtcagtgctgatggctatgagcctgaaacccccgccaccgacgcctaccttgccgggattaaggctgatggggtggaggagttcgcaaaacattgcgatgaaagcattggatttgtcgagccagaagacgaggagctttacacgttgatggaagaacaggctcgtgacttcgtcaagcagctgcgcgagggggataaatga

SEQ ID NO: 259782 - DNA, 693 bp, Klebsiella pneumoniae
atgaactcattgatgaacactaataataacatcgtcagaatgtccagccgtgacatcgctgatctggttgagtccaggcatgatgatgttaagcggtccattgagcgcctgacagagcggggtgcaatacaacttccgccaatggcggatgttaaaaatcaccttaatcagtcggtcactgtgtacatggtcggtaagcgcgacagttacgttgttgtcgctcaactgtcccctgaatttaccgcccgtctcgttgaccgctggcaggaacttgaagcggccagtaattcagtgatacctcagtcattctctgacgcgcttcgactggcagcagaccttgaagaagaaaaacagcgtctggcactggagctggcatctgcggccccaaaagtggaatttgtcgaccgttactgcacggcgaacggttccctctcttttcggcaggtggcaaagctactgaaagcaaaagagccagagctccgcttgttcctcatcgagagagaaatcatgtaccggctgggaggtacgttaacgcctatggcccaacacattgacgctggtcgatttgaagtgaaaacagggacgtcccaggcatcaaaccatgcgtttagccaggcacgatttacagccaaaggtgtgcgctggatcggtggcctgtggactgaatacaaggccggagggcatgcagcgtga

SEQ ID NO: 259783 - DNA, 288 bp, Klebsiella pneumoniae
atggttgggactataacaagtagtgttggctctggattaggatatggggttggtcattatgtagtgaagcctactgcaaatacaatcggtaaatggataactggtggatgggacccaaaatttgatcccgttagattaaaatatacggaaataaaagggctgattggaatatcgaaagaaatgtcgccaagtaaaattcctggagcaacaggaaacataactagttcctttagcacagaatacggcagtgttgaaactcaagaaattatcaataaggttaagaaatga

SEQ ID NO: 259784 - DNA, 135 bp, Klebsiella pneumoniae
gtgataatgcagatccagcagttcgctaatgcgcaggccatggcgaaaggccagcagaatgaggcagtagtcccgttcgccggtagggccctgacgagcagcctgcatcatggcctgaacttctttggcggttag

SEQ ID NO: 259785 - DNA, 522 bp, Klebsiella pneumoniae
atggagcccaatctgacctggtcaatggatttcgtcatggacgcactttccaccggtcgcaggatcaagtgcctgacctgcgtggatgatttcacaaaggaatgcctgacggtcactgttgccttcgggatttcaggcgtgcaggtcacgcgtattctggacagcattgcgctgtttcgcggctatccggctatgataagaaccgatcagggcccggagtttacctgccgcgcactcgatcagtgggcttttgagcatggtgtggagctgcgacttatccagcccggcaagccaacgcagaacggatttattgagagttttaacggacgctttcgtgatgaatgcctgaatgagcactggttcagcgatattgttcacgccaggaagatcattaatgactggcgactggattataacgagtgtcgaccacattcatcactgaattacctgacgccggctgaatttgcagcgggctggcgaaacgggaaatatgaagaaaaaccaaccgacattactaactga

SEQ ID NO: 259786 - DNA, 459 bp, Klebsiella pneumoniae; identical to SEQ ID NO: 215432

SEQ ID NO: 259787 - DNA, 444 bp, Klebsiella pneumoniae; identical to SEQ ID NO: 215433

SEQ ID NO: 259788 - DNA, 1566 bp, Klebsiella pneumoniae
atgaaaattaaaaaaggattctctttactagaattaactcttgttttaggtgttgggacgatagtggcttttatgaagtttcaggatatgaaaaatgaacaggagagtatattggcttctgctgtcgggcaacaaatgaaacagatcggtgaagcagttaatggctatataaatatccgttatgataaattatcaaccttatccaatgctgccggaacaggaaccgatccggggccaagaacctgttcaggttcagtatgtgaaattacttaccagacattgattaacgaaggtttactaccttcaacctacacaggcactaatgctaataaatcctcgtataaaatcatattaaaacgagatggaacttcacctaactatgttattaatggtcttataacgacatcgacggcatggattgaaggcggaaaaacacgttatgatttattagggaaagccatgcaaacagcgggtattgacagtggtatgacgcaatcagcaacgttagcatcaggtttgcagggtgcatggaaagaaacatcaacagtttacagtaatatcaccagtgcaggtcttatggcctatcgtgttggatacgattctgctatgtattctgtttatctccgtcgtgatggaaccctaccgatgacaggtgatttgaatatgggaggaaataatatcaacaatgctaaaaatataacagcatcaggaacaggaacgtttggtggagatgtcaactcagcaggtaatataatagcagcaaaagaaataacagcacataatggatatggtgatacaataactataggtggagacaattatccgggttctttaggaccggattatgaaataagattaggagctaataaaccattaactttacattctcctacttcaagtagaggaggtgatattatatttgatatagatggtaatacaagagtacagaccagattaggtacaatgggatacaaccctaatgatttaccctctggttggggaggtggattaagaacgcttgatgtatatgccgcgggcactctggcaacaggaagtgggggtaatctgacatcatatatgaatgctacgggtgttcatacacagtccaatattacagcctctggaaacatagaggccgccaaaaatgtcaaaggcgctacattagaatccacaggacgcgctacggtgggtgaatttgttcaggttaatggaacagtaagcgagggggattcttgctcaactaatggacttatgggaagaacaggtaatggaactccaatgtattgtgttaacgggtattggtctaatattgtatcaagtaaaacagataatggaggtttaatattgccgggaggtataaagattatgtggggtaaagtatcggggagcctttataaatttcagaataatacttatgaatccgatttcattagaattaaccctacatttattgccaatggaataacgtatagttttaccaagattttaaatgtccagcttactccttttgataagccaaaccagaatcaagaaattatgtggacaacagatacttataataggtga

SEQ ID NO: 259789 - DNA, 987 bp, Klebsiella pneumoniae
atgaactatacgcatcttggccgcaccggcctgaaagtcagccgcctttgtctcggaaccatgaattttggtgacgtcaccgacgagaagaccagcgcccgcattctggatgaggcgcttgaggcgggtatcaatttcattgatacagcagacgtgtatggcactgaacaatctcccgatatccagcaaggctcggggctgtccgaggaaattattggtcgctggcttcagcagggtggccgccgtgaacgcatcgttctggcgacaaaagtctatcagcctatgggaccgggcccgaacgatcgccgactttctgcttaccatattcgcaaagcctgcgaggacagtttgcgacggcttaataccgaccatattgacgtctatcagatgcatcacatcgatcgtcatacgccgtgggaagagatctggcaggccatggaactgcttgttcagcagggaaaggttctttatatcggtagcagcaatttcgcgggctgggacattgcgactgcgcagtcagtcgccacggcccgtcatttcctgggcctggtcgccgagcaaagtctttataatctgacagcccgcaccattgagctggaggtcatacccgcatgccgccattttggcctggggttgatcccctggagcccgcttgccggagggctgcttggcggcgtactgaaaaagatggcaagcgggcgccgtgccaggcccgcgtttgcccgtctaatcgaacagtatcgtccgcagctggaagcctacgagggattatgtgaggacctcggcgaaaccccctccgatgtggccctggcgtggctcctgcagaatcctgtcgttaccgctccactgattgggcctcgtacggtcgaacaactccagcaggcgcttcacgcaacgacagtcacgctatcagacgacaccatgagctgtctcgacgaaatctggcccggccccgggggagaagcgccccaggcttatgcctggtaa

SEQ ID NO: 259790 - DNA, 351 bp, Klebsiella pneumoniae
atgaatcccagctttgccgataagcgctaccagcgcgaactggcgcagcgcggggcgtttctcgaatacgacatgattggcatgagctattactacgccgacgagtcggcgcagtcgccctccgacgaggagaacgcccgcgcgatccgcgagctgattgacgacggctacatccagcaaattctgctgtcgcaggacgtcttcctgaaaaccatgctcacccgctacggcggccacggttatggctacatactcaagcattttgttccccgtctgcggcgccacggcgtcagcggcgaacaacttgaaaccttaatgattggaaacccccagcgggtctttggcggataa

SEQ ID NO: 259791 - DNA, 450 bp, Klebsiella pneumoniae
  misc_feature (425)..(434): n is a, c, g, or t
atgatgaaaacggaacgtccgttgtggggccggggcattatggtgtcgcctcagcattttcaacagcaggctgcgtatgcagcctggactgcggaagtgattgcccggatgggtcttaaccacccctggggagtggttgaggcgaccttcgaaccagagatgctcaaactgggccgcctgcaggctcacaggctgcaggtccggttccaggatggcacgatgattgatacggacaatgccgatgcgctgccgtccgcgctgtcgctggacggcgcgtccggcgaggcggtgatcgtgctggcgctgcccctgatgcaggcgaatggcggcaactgtctgaagccggaggaggtggccgaaaggccggcgcgcttccggcagcgctggcgcgatgtccgcaaccagttcggggatgatacccggcnnnnnnnnnnatacagccggagctga

SEQ ID NO: 259792 - DNA, 522 bp, Klebsiella pneumoniae
atggcgcccaatctgacctggtcaatggatttcgtcatggacgcactggccacaggtcgcaggatcaagtgcctgacctgcgtggatgatttcacaaaggaatgcctgacggtcactgttgccttcgggatttcaggcgtgcaggtcacgcgtattctggacagcattgcgctgtttcgcggctatccggctatgataagaaccgatcagggcccggagtttacctgccgcgcactcgatcagtgggcttttgagcatggtgtggagctgcgacttatccagcccggcaagccaacgcagaacggatttattgagagttttaacggacgctttcgtgatgaatgcctgaatgagcactggttcagcgatattgttcacgccaggaagatcattaatgactggcgactggattataacgagtgtcgaccacattcatcactgaattacctgacgccggctgaatttgcagcgggctggcgaaacgggaaatatgaagaaaaaccaaccgacattactaactga

SEQ ID NO: 259793 - DNA, 729 bp, Klebsiella pneumoniae; identical to SEQ ID NO: 259762

SEQ ID NO: 259794 - DNA, 321 bp, Klebsiella pneumoniae; identical to SEQ ID NO: 234546

SEQ ID NO: 259795 - DNA, 897 bp, Klebsiella pneumoniae; identical to SEQ ID NO: 259737

SEQ ID NO: 259796 - DNA, 1362 bp, Klebsiella pneumoniae
atgtttaaacctgaactcctctccccggcgggaacgctgaaaaatatgcgttacgctttcgcctatggcgccgatgccgtttatgccggccagccgcgctactcgctgcgcgtgcgtaacaacgaattcaatcacgaaaatctgcagctcggtatcaatgaagctcacgcgctgggtaaaaaattctatgtggtggtcaatattgccccgcataacgccaagctgaaaacctttattcgcgatctgaagccggtggtggagatgggtccggacgcgctgatcatgtccgatccaggtttaatcatgttggtgcgggaaaactttccggatatgccgatccatctttcggtgcaggccaacgccgtcaactgggcgacggttaaattctggcagcagatggggctgacccgcgtgatcctctcccgtgaactgtcgctggatgaaatcgaagagatccgtcgccaggtgccggagatggagattgagattttcgtccacggcgcgctgtgcatggcctactctggccgctgtctgctctccgggtatatcaacaagcgcgatccgaaccaggggacctgcacaaacgcctgccgctgggaatacaacgtggcggaaggcaaagaggacgacgtcggcaacatcgttcataaatacgagccgatcccggtgcagaccgtggagccaaccctcggcatcggcgcgccgaccgataaagtctttatgattgaggaagccaaacgtccgggcgagtacatgaccgcctttgaggacgaacacggcacctacatcatgaactcgaaagatctgcgggctatctcccacgttgagcgtctgacccagatgggcgttcactcgctgaagatcgaaggccgcaccaaatccttctactactgcgcgcgcaccgctcaggtttatcgcaaggcgatcgacgatgccgccgccggcaaaccgttcgataccagcctgctggaaaccctggaagggctggcccaccgcggatacaccgaaggcttcctgcgccgccatacccatgacgattaccagaactacgagtacggctattccgtctccgagcgccagcagtttgtcggtgaattcaccggggagcgtaacggcccgctggcggccgtggcggtcaaaaataagttcagcgtcggcgacagcctcgagctgatgaccccgcagggtaacgtcaacttcacccttgagcatctggagaatggcaaaggcgaagccatgccggtagcgccgggcgatggctataccgtatggttgcctgtaccggacgatctgcgcctgcagtatgcgctgctgatgcgcaactttactggtcagacaaccagaaacccgcacggtaactag

SEQ ID NO: 259797 - DNA, 384 bp, Klebsiella pneumoniae; identical to SEQ ID NO: 209243

SEQ ID NO: 259798 - DNA, 735 bp, Klebsiella pneumoniae
atgcaactctggccgatcgtcacgggtgacaaagcggttgtgttgctcctgctgacgaaaatagtgcgcgataaccagcgattgcgagaaatatttcgagatgcagtggccagtggtgatgttgttgccgataaaatactgattctcgccgctgaccaccgaggcgagagcctgatagtcgctatcataaagggtgattttggcgttgggaaacgcctgctgaataatatcgaaaaaagcgcaatcgcgggtgcaggccagcgtgacgcggcggtcagtggtcagcggcggcagaggggatttcagcgaggtgaccagcgtcggccaggttttaagcagcggcgcggattgaaccaggcccggggcgagcgcatcccggtgcgccacctgagtgagcagggtatccacctggcggtcggccagggcggtgagcgcctgctgctcggtgtcatactggcggataatcaccttcagtccgaggctgtgcgccatcagcgccagatagtcggcgttaataccctgataacttttctcgtcgccgtcatagacgatgggcgtcctctcgggaagccaggtcccgacggtcagcgtaggctgcgccgccagccatgctttctccttaccggtaagcgggatatcgatcgccgcgatatgagaatggctcttcagctccagctgtttcatggcatacgcggcaggcgagaggctcagcgccagcccgacaacgacggataa

SEQ ID NO: 259799 - DNA, 885 bp, Klebsiella pneumoniae
gtgatcgccgacagcgatgagcgcgaagattaccagagcctgcgcggcttcaccggccggatggccctgagcgccgaccagctgcagtggcgcgggctgaacttcacccaggtgcagagcgagatcagtaaccagcaggggctgctgacggtcagcaaaatgcagggcaatcttgacggcgggcagctctctctccccggcactctggatgctcgcggcgacacgccgcaggcgacgttccagccggcgctgcagaatgtggagatcggctcgctgatcaaagcctttaactattccttaaacctgaccggcaagctgtcgctgagcggcgagttttccggtacgcgcattgacgcggatgatttccgtcgccactggcaggggcaggcccagctccagatggccgatacccgtaccgaagggctgaacttccagcagctggtgcagcaggccgtggagcgcagcaccaacgtgcgggcgcaggaaaattacgacaacgccacccgcctggattccgtgagcagccagctgacgctggataacgggctggtgacgctgaaccgcctgcaggggcagtccgacgtaatggcgatgaccggcgaaggtcagctcgatctgcagaaagagaactgcgatatgcgcttcaacgtgcgcgtgctcggcggctggaaaggggagggcaaacttatcgaccgcctgaaacagaccgcgatcccgctgcgtatctacggtgactggaaatcgctgagctacagcctgcaggtcgatcagatcctgcgcaaacagctacaggatgaagcgaagcagcgcctcaacgactgggttgagcgtaataaaggcagtaaagacggcaatgatgccaaaaagctgctcgataagctgtaa

SEQ ID NO: 259800 - DNA, 1536 bp, Klebsiella pneumoniae
gtggttatcgaactggtgttgggtatcgataacctggtctttatcgctatcctcgccgaaaagctgccgcccgcccagcgcgaccgcgcgcggatcaccggcctgctgctggcgatggtgatgcgcctgctgctgctggcctctatctcctggctggtcactctgaccaaaccgctgattgtttttcacgacttcagcttcagcgcccgcgatttaattatgctgttcggcggcctgttcctgctgtttaaagccaccgtcgaacttaatgagcgtctggaggggaaagacagtgataaccctacccagcgccgaggggcgaaattctgggccgtggtggcacagattgtggtgcttgatgctatcttctcgctcgactcggtgatcactgccgtcggcatggttgatcacctggcggtgatgatggccgccgtggtcatcgccatcagcctgatgctgatggccagcaaagcccttacgcgcttcgtcaacagccatccgaccatcgtgatcctctgtctgagcttcctgctgatgatcggcttcagcctgattgctgaaggcttcagctttattattccgaaaggctatttatatgcggccattggcttctcggtcatgattgaagcgcttaatcaactggcgcagtttaaccgccgtcgcttcctctccgccaatatgacgctgcgtcagcgcaccaccgaggcggtgatgaacctgctgagcgggcagaaagaaaaagctgaactggatgctgacacggcgtcgctggtcgccgatcaggatcatcacccgctgtttaatccgcaggaacggttgatgattgagcgggtgctgaaccttaatcagcgcagcgtcagcagtattatgacctcccgccatgatatcgagcgcatcgatctcagcgcgccggaggaggagatccgcagcctggtggagaaaaatcagcatacccggctggtggtcaccggcgggaaggataatgaagatctgctgggggtggttcacgttatcgacctgcttcaacagtctctgcgccaggagccgctggatctacaagcgctggtacgtcagccgctggtcttcccggaggggctgccgcttctctcagcgcttgagcagtttcgccaggcccgcacccattttgcctttgtggtcgatgagtttggctccgtcgaggggattgtgaccctgagcgacgtgatggaaaccatcgccggtaatctgcccaatgaggtggaggagatcgatgcccggcacgatatccagcatcatcaggacggtacgtggacggtcaacggtcatatgccgctggaggacctggtgcagtacgttccgctgccgctggatgataagcgtgagtatcataccgttgccggtctgctgatggagtatttgcagcatgtgccgcaggtgggggaaactgttgagattgacggctataccctgcgcacgctgcaggtcgacagccatcgggtgcagaaggtgcagatcgtcccgccggtaaagcaggatgagctggattatgaggtgtaa

SEQ ID NO: 259801 - DNA, 453 bp, Klebsiella pneumoniae
atgcacctcgaagcccgccccggcaaagatggccacatggttctcccaggtcggatcgctgacccagaccgcggagtcggggaagtagcgcttgaggaaatctgcgcccaccttcagcgcgccggagccgcccagcgtctggatggtggcgatgcgtccggcacgcaacgccggatgatgttcgccaaacagcagggtctggacggcgcggcgatagggcgccagtccctccatcggcagatagaggctggccttttgcaactggctctgcagccggtcagcggcctgacggaccgcctccagctgaggaatgatggcctgctcgttatagtacagcccgatgctgaggttaactttgtctgcccggggatcctgttgaaaggcttccatcagggacaggataggatcgcccgcgtaggcgtcaacgttctggaacacagtggttactcctga

SEQ ID NO: 259802 - DNA, 267 bp, Klebsiella pneumoniae; identical to SEQ ID NO: 215167

SEQ ID NO: 259803 - DNA, 279 bp, Klebsiella pneumoniae
atgcgggatacttacatcacgctgcattcgagtggcgacaggcaggtgcggatgaatatgacgaaaaaaggcgacaagcatctgcggacactttttattcatggtgcccgcgctgtcgtcagggttgccacgaataacaatgatggccatatgaatcagtcggttaaccagttaaaggaacggcgcggatttaataaaacgaccgtggcggtcgctaacaaaaacgcgcgaataatctggtcgatgctgagaaatgagaccgagtatcgggtagtgtga

SEQ ID NO: 259804 - DNA, 522 bp, Klebsiella pneumoniae; identical to SEQ ID NO: 259792

SEQ ID NO: 259805 - DNA, 267 bp, Klebsiella pneumoniae
atgaccggtatggaccagcatgaacaggccattattgctcatgagaccatgacgaacggctcggcggatgcgcaccagaaaatggtggaaagtcatcagaagatgatgggaaataacacggtatccacgaccgtcccgtcaacgtcttacgcggcgatgaatgagcatgaaagagcagcggttgcccatgaattcatgaataacgggcaatccggcccacatcaggccatggccgaagcgcaccgccgcatgatcaatgcaggctga

SEQ ID NO: 259806 - DNA, 534 bp, Klebsiella pneumoniae
atggctggcgtcgtggagcacattgacggcaacgatcaggtcgtaacccgcctccgggtgggcggtgaaatccagcggctggttgatgtcgaacaaggcataagacacctgcgattcatcatggaaacgggctctggcgtcattgaggaactgcgcggagacgtccgtgaagtggtacgactgccgcgtgttccgcgtggccttcagcaccggcgcggtagtggctgcggttccggcgccaacctccagaatccgttctgcgctgcacaaggcggcaatctgcgcggtatagcgattcagacaggcgctggcggggttgtcgcgatacagcgcgtcggtaacgcgatgctgctcgttgaacagcaattccagcggagaacaccgcccggagaagagggcgtcgtgccgggcgatgcaggtttccagatactgcgccagcgcctggctccattggctttgcgggcacgcttcctgaggctcaggaatctcgctgagcggaatgcggcagcgccagctttcaccttcgcggattaa

SEQ ID NO: 259807 - DNA, 447 bp, Klebsiella pneumoniae; identical to SEQ ID NO: 103901

SEQ ID NO: 259808 - DNA, 153 bp, Klebsiella pneumoniae
atgcatcaaatccaattcaacctgtggcagatcaaaaaaacaaccatacctaaaattataatcaaaaatatttttaatgtatttggaaatttatctttccaaaaagttaaggataactgttcctcaatccatcgcttctccaattcactgtaa

SEQ ID NO: 259809 - DNA, 474 bp, Klebsiella pneumoniae
atggcactcaaaaccttgtcagcactcccggtatttgctgattctctttttgccgatcgctttaatcgtattgaccgtcttttcagccagttaacgggcgatacgccggtgggcactttaccggcttatgatttacagaaagtcgacgacagcaatttcctgctcagcgtcagcgtgcctggctggaaagatgatgagctggaaatagaaaccgtaggggggaatctgcatatttccgggaaacgccaggaaaccgatgcctcgacagacagcggtgaacgctggatttataaaggtatccgccgcgctaatttccagctcagtttctctcttcctgaacacgcccaaattaatcaggcgcagctggatagcggcatcttaaaaatagccatccaccaggaaatcccggagagcgaaaaaccgcgtaaaattgcgatcgagaatcaggggcgcgtgatagaacataaagtttga

SEQ ID NO: 259810 - DNA, 477 bp, Klebsiella pneumoniae; identical to SEQ ID NO: 107983

SEQ ID NO: 259811 - DNA, 324 bp, Klebsiella pneumoniae; identical to SEQ ID NO: 180346

SEQ ID NO: 259812 - DNA, 516 bp, Klebsiella pneumoniae
atgaaaaaattgaaaacaaaaaacttgaaggaaagtgagtttataagacatattgaaaacaattctgttgtctcaaaggctctgtgtgagaaatatggagtctcaactgaaaccattgcctatgctttatatgttcatagcaatagtttctttcttaaaaacgactacgttcaggatgacattcactatgatatagttaaatataatttaataataatgaaacccacgcttaggcaatattatagaagaacaaggcaagtagattataacggatatacttttttatcaggtattaaagaatatcaagactattgtattttgttgacgctttgctgctatcattggatagctgatgtatttactgtctataatcatagtgaaagaagtcaatttatcgttgatgttgccaatgatcttctgaaaaggagtatagatcatttttcagtagagcatgagaatgttatcaactgctttaatatgttaaaagaaaagctcccatcgtataaaaagaaataa

SEQ ID NO: 259813 - DNA, 510 bp, Klebsiella pneumoniae; identical to SEQ ID NO: 182540

SEQ ID NO: 259814 - DNA, 213 bp, Klebsiella pneumoniae
atgtataaaattaatgtctctctcgtctttgttgatagctacaactcccccctccatcattgctgtggatttaccatcaaaagtaacttttacgtttttgtagacttgcttattatggtgctttgtttttttatctttcagaacagcctcatgagtaaggcgaagaaacgccatacacaaggtgatcacttcatcatcactcagctttgttga

SEQ ID NO: 259815 - DNA, 348 bp, Klebsiella pneumoniae
atgtgcaaacagggcaacaacggatttaggcagtttggccgtattgatacagcgggtaatgatcttacgagagatgttttccgcatcggcaagcgcagaaatgtttccagcaaactcattctgcagccggcttgtataacgcaggccacgttcataagcacttgttgggcgataatcgttacccagtcgggacaatgcagccatctgctcatcgtccagttcaccaaccagaacgcgataatcactttccgtcaggattgcggctttacggcgacggctgccgtctgcaatttctatgacatcagaaacccggcggccaaaagctggagtctgctgaccggtcagtaa

SEQ ID NO: 259816 - DNA, 804 bp, Klebsiella pneumoniae
atgggaaaaataaaatattggttaatagcgggatttattatccttcttgcaattgtttacactgctatcagtgacaggtattctacgctttctaggttgaaatcagcaggtgaaaacggagatgtagaagctcagtatgcgttgggtctcatgtatttatatggagaaatactggatgtcgattatcagcaggcaaagatttggtatgaaaaagccgctacccaaaatgatccgcgtgcacaggttaaactcggtttgatgtatgcaaatggtctcgggataaatcaggattatcaacaggccaaatcttggtatgaaaaagcatcggttcaaaatgatgttgatgcgcaatttttgcttggagagatgtataacgatgctaatggtgtagagcaggactatcagcaggcaaaagactggtatgagaaagcagcagaacaaaatttcgccaatgctcagtttaatcttggtatgttctattacaaaggtgagggagttaatcaaaactttcagcaagccagagaatggtttgaaaaagccgcgtctcaaaatcagctgaatgctcaatataatttaggtcagatctattactacggtcagggcgtaactcagagctatcgaaaggctaaggaatggttcgaaaaagcagctggggaaggtcatgtcgatgcccaatataaccttggtgttatgaatgagcttggtcaggggggaagtataaatctgaaacaagcaagaacttggtttgggctggcatgcaataatgggcataaggaaggttgcgaacgttatgaaaataattga

SEQ ID NO: 259817 - DNA, 615 bp, Klebsiella pneumoniae
atgcgtgatctgatccttcaactcagcaaaagttcgatttattcaacaaatccgcaaataaaactcgaaagggtcgaaaagagtgcatgccttagaagtttaggtgcacaagtttcagggcggccagatgaactccaagcagtaaagcctattatcgaattcaacatggttgataaacgctttattgaacaaggtgatgctttatctgcccttgaaacacgaccaaaccttatggaactttcaccttcagaatttgaggtgttagtatcaaatcttttcagccaaatgggactggataccaaactcaccagaggtacaaaagacggtggcgttgatgcggtggcattcgacacacgtccgatactcggtggcaaagtggtgattcaggctaaaagatataaagacactgtcggtgtcagttctgttagagatctttatggaacaatgatgaatgaaggtgctaacaaaggtattctggtgtgtacaagtcaatacggtaaagatgcatatcgtttctgcgaagataaaccaatcgaactcatagatggaggcgggcttctctacctcttaaaagagcatgctggggtatcagcacgtatcaaccccattttttaa

SEQ ID NO: 259818 - DNA, 939 bp, Klebsiella pneumoniae
gtgatcattgcgacgccgaccgattacgatcccaaaactaactacttcaacacctctacggtggaagcggttattcgcgatgtcacagagatcaacccgaacgcggtaatgatcattaaatcgaccatcccggtggggttcacccgcgacatcaaagaacgtttagggattgataatgttattttctctcctgagttcctgcgtgaaggacgtgcgctgtacgacaacctacatccgtcgcgtattgtcatcggtgagcgctccgcgcgtgccgaacgtttcgctgatctgctgaaagaaggcgcgatcaagcaggatatcccgaccctgtttaccgactctaccgaagcggaagcgatcaaactgttcgctaacacctatctggcgctgcgcgttgcctatttcaacgagctcgacagctatgctgaaagccaggggctgaacagcaagcagattatcgaaggggtatgcctggatccgcgtatcggcaaccattataacaacccgtcctttggctacggcggctactgcctgccaaaagataccaagcagctgctggcgaactacgaatcggtcccgaacaatatcatcgcggctatcgtcgatgccaaccgtacccgtaaagactttatcgcggattctattctcgctcgtaagccgaaagtagtgggtgtgtatcgcctgatcatgaagagtggttcggacaacttccgtgcctcttctattcagggcattatgaagcgcatcaaggcgaaaggtattccggttattatctatgaaccggtgatgcaggaagatgagttcttcaactcccgtgtcgtgcgcgacctgaatgccttcaagcaagaagctgatgtgatcatttctaaccgtatggcggaagagttggcggatgtggcggacaaggtctacacccgcgatctgtttggtaacgattaa

SEQ ID NO: 259819 - DNA, 300 bp, Klebsiella pneumoniae; identical to SEQ ID NO: 84330

SEQ ID NO: 259820 - DNA, 564 bp, Klebsiella pneumoniae
ttgcagcagtatcccgacctggagctgatcctctgctcaagcgacaacgtggaagatattattcaggagggattcgactgcgtgatccgtaccgggcggatcgaagattccaccaccctggtggcgcgtcctctggcccgctaccgctggatggtcctcgcctcgccggcctggctcgcggcccacggccggccgcagaacatcgacgaactgcaccagcatcgggcggtgggctacctgaatcaccgtaccgggcggaccatcgactggcttttctccctcgatgaaggcgactgcgcgatccgcatgcgggagacgctggtggtcgacgataccgatgcctacattcaggccggcattcaggggctgggcctgatccgcgtcgccagctatctggcgcaaccttatctgcagagcggggcgctggtcgcctgtctggatcaggccgcttctgctcttcccttgtcgctggtctatccgcaaaaccgctatctgccgccggcggtgcgcgcgttttatgactggagcaggcgtgtgctgcaacccccgcacagcgaggcctga

SEQ ID NO: 259821 - DNA, 390 bp, Klebsiella pneumoniae; identical to SEQ ID NO: 211557

SEQ ID NO: 259822 - DNA, 153 bp, Klebsiella pneumoniae
atgaaaaagacccgttataccgaagaacagattgcatttgcactgaagcaggccgaaaccggcatctgtgtcggggaagtctgccgaaagatggacatttctgaagccatttttataattagaagagaaattcgctgctctgggcgtaactga

SEQ ID NO: 259823 - DNA, 201 bp, Klebsiella pneumoniae
atgtcaaaaaaatatcagccattgcttataactcattatatgtcaacatgggtcactataacggaagcagttgagatcactaccaaagccataaaacaaaaaattactcctagcgatatttatcgtcatgccttgagtggcaacatcctactatcggtctatttccagtcggctttgttgaataaatcgaacttttgctga

SEQ ID NO: 259824 - DNA, 264 bp, Klebsiella pneumoniae
atgaagaagcgtttttccgacgaacagatcatcagtattctccgcgaagccgaagctggggtacccgcccgtgaactctgccgcaagcatgccatttccgatgccacgttttacacctggcgtaagaagtatggcggtatggaggtgcctgaagttaagcgcctgaagtcgcttgaggaagagaacgccagactcaagaagctgcttgctgaagccatgctggataaggaggcgcttcaggtggctcttgggcgaaagtactga

SEQ ID NO: 259825 - DNA, 522 bp, Klebsiella pneumoniae
atgcgcaatctggcactggttatcaatgataaccccgttgccaatcacggtatcgtccagcgcaccacggtcaatcgtggtgcaggcgccaatctccacgcgatcgccaataatgacgcgacccagctgcgggatctttacccagttaccgcgatcgttagcgtagccgaagccatccgcgccaatcaccgtgctggactgaatcaggcaattctctccgatctcaatctcatggtaaacggtcacattagcccacaaacgcgagccggcgcctattttcgtatttttcccaacgaagcagcctgcgccgataactacgttatcgcccagcactacgccggattcgataaccgcgttggcgccgatggcaacgttgctacccagcttcgccgacggatcgatgaccgcgctcggcgcgatatcctgagccggctgcggcgtggtatcaagaatttgagccatgcgcgcgtaggtcaggtaggggttacgcactaccagcgcggcgctatgggcaaaaggtaa

SEQ ID NO: 259826 - DNA, 375 bp, Klebsiella pneumoniae
gtggtcgcccgggtaaaaaccatcctccgccgctgcaaaccgcagcgcgatctgcaggcgctggacgcccagagcccgctgattgtcgacgaaggtcgttttcaggcctcctggcgcgacaagctgctggacctcactcccgccgagttccggctgctgaaaaccctctcccaggagccgggcaaagtgttctcccgcgaacagctactcaaccatctgtatgacgattatcgggtagtcaccgatcgcaccatcgacagccacatcaagaacctgcggcgcaagctggaggcgctggacgccgagcagtcgtttatccgcgcggtgtatggcgttggctaccgctgggaagcggacgcctgccggctggcgtag

SEQ ID NO: 259827 - DNA, 237 bp, Klebsiella pneumoniae
gtgattaacgcagcgctgaatggctcggccaatgtgtttgatgatgtatgcgttttgaccataggtatcgcctactccaaattcctgcgcggtaatacccagcgtcataaacccggcaccctgaccctcagggctatggaatacgttgaacgcgacattgctattacggctagggccgataacagtgaggccctgctgtttaacagtaaatatattggcgagattattaatgtctga

SEQ ID NO: 259828 - DNA, 459 bp, Klebsiella pneumoniae
atgggctggggtcttggtattcgtgaactggatttcaccggcttcagcggccactccgcgctatccgcggccttctggcctatcttcctgtggctgctcagcgcccgtttctccgtcggtctgcgtaaagcggccgttattaccggctatgttctggccgccgtggtgggctattcgcggctggtcatccatgcgcattccgtctcggaagtgattgccggcctgctgctgggcgctgctggcagcgctttgttcctggtgttgcaaaaacgtacccctgatccggagaacgtgaatatctcatggggcggtgttgcatgcctggtgatggttccgcttatccttttacatagcggcagcaaagcgccgactcagtccctgctgggacaaatcgccaccgcggtggggccgctggataaaccctttacgcgtaccgatctgcacaagcaggcctggtaa

SEQ ID NO: 259829 - DNA, 336 bp, Klebsiella pneumoniae
atggctggccccggcggcggcaaaaccggcgatttcgccctccgccagcgccagttcgctaccgccgaaaccggtgcactcgccggcggcgtagatatccgcgatgctggtctgctgccagcggttaacctgtatcgcctcctgcgccgtggcgcagccaaacagcagcgccgtctcgatattgggtatcagcccgtagccgatagccagccgatcgcaggcgatagttcgctcgacgccgcgctggcgcaacgtaacggcttccagccgcgttgtgccgtgagcgcggttcacctgcgtgccgctaagatagcctttcggagccagcgtcgctaa

SEQ ID NO: 259830 - DNA, 324 bp, Klebsiella pneumoniae
atgatcggcgtcccgagcgtactggcccccaccgtcgaggcaatggtcgcggtaccaatattgacgatgaccgaggtgcggatccccgccaggatcaccggggccgccagcggaagctccaccttatacagacgctgccagccggtcattcccatcccttcagcaacgcctgacaccccaggcggtatcgaacccagcccggccagcgtcccctgcagcaccggcagtatgccatacagcgcgagggctatcagcgccggcagccagccaaagcccagcaccggcaccgccatcgccagcaccgccaccggcggaaaggtctga

SEQ ID NO: 259831 - DNA, 468 bp, Klebsiella pneumoniae
gtgagcaaaagcccctaccaccgccccgcgacgtccgccggtaatgttgccgtaaacccccgccgtggccccgcagaaaaagtggggaaccaggcccgggacgatgacgctcaagccgaacagcgggcagaggaacatactgaccagccctgcgacaaagcttgcgaggaagccgacgatgacggcattcggagcgaagggaaacaccgtcggacagtccagcgccggcttcgcgtctttaaccagtttgtccgcaatccctttaaacgccgggacgatctcggcaatcaccatccgaaccccggcgaggatgatataaactcctgcagcaaacgtgagggactgaataatggcgaagataataaagttctgaccagcgctcagggtctcctcgacaaaggatttgcccgcaacgagcaccagcaccagaaacagaatcatcatggtgagagagatggccaccgatga

SEQ ID NO: 259832 - DNA, 312 bp, Klebsiella pneumoniae
atgagcatcgactactttgatattgaagaattattgagcgctatgtatggcatcaccgatgagcagcggaatgatggtttgattttgatgagcttctatacgagaaattcgatatcggatttgaagaattctcaaaagttatttcggtcctgctgcaactgccgccagtggttgaatctgcgcttaccggcaagaaataccacgcatttatcaaggatgggctggcgctcgttaagcaggaggccaagcatgactgatatcaccgaactggcgcagagcctgaaagcggcagcagaaggagccaaccaatga

SEQ ID NO: 259833 - DNA, 441 bp, Klebsiella pneumoniae
atgcaaacgataatgatcaccggctgttcatcgggttttggcctggagacggcgcgttattttctcgagcaaggctggaaggttattgccacgatgcgcgctccgcaggaaggtgtgttacccgccagcgaccgcctgcggctggtacgtcttgacgtcacttcggcgcagagtatcgcagaggccattgccgaagtcggagagattgatgtgctggttaacaacgccggggtggggatgcttaatgccctggagggcgccccgcgcgaggcgatagccaacctgtttgccaccaataccctgggaacgattgccatgacccaggcggtgatcccccggttcagagagcgccgaagcgggaccatcgttaatattacctcggcggtcaccctgcaaccgatgcccctgctgctgtctacaccgcgagtaaggcggcggtga

SEQ ID NO: 259834 - DNA, 216 bp, Klebsiella pneumoniae
atgggaatcagctttgaaaaaatcacaccagcatttgcattaaaaattgcaagtgtaggtgagattacagatggacagtgcacgttaactctggagagtggtcaggaagtttcagaccctgttgttgtgccagaagagtacgtgcaaaaatacgaccctcaacctggtggttattacatcatgtgcgaaggaggtataggtctttattctatatag

SEQ ID NO: 259835 - DNA, 606 bp, Klebsiella pneumoniae
atgtcatctactagccagaagaaatatatacaggattatattgctgaaactaaagccatacttaatgaatataaagagccatcgcagttttacaataaattctctcgtgaccttaaaacgctttctgatgatgatcgagaatctctttttgaacagttatttagtgatattcgcaatgaacgtgtagaaggaaagaatcacattcacgactcaaacacagcattgcattatgccttctttgctttagaggctgctgggtgcacagagtgggcgaaaagagttacaaaaataattcccataatttcaagcatgaatgaagctggcgaggcatacgcccgtatgcggatcagggaagagaaagccaaagccggaaaaggtaaagttagccgccataaggaaacagccgttcaaatcgctgcagccacttgggcgaaataccctaacgccagtctcccgggtatgcgtgacgagctatacgcttatttgcgggggaaatggaaggattgcccagcctcatcaactattcagggatggttgcaagaactggagctaaacccggtaaataacggagttaaaaacagagatttttctctggtgatcctgtga

SEQ ID NO: 259836 - DNA, 540 bp, Klebsiella pneumoniae
gtggatcgcaatgccggtataacgcgcggccagtatgagcgccttttcgttatcagccagatcgcggaggtttacatccgtcagcggtttgccgaccaccatacttttaccggcttcagcgtcggctttcaggcgtggcagctgaggtgtccagtcttccagaagttgataagcctcggagtagaattgcgcacgctccacgccagccagcgccagctttgttgctatgatcgttatttctcgttcggtcagatgcccgccgcgacaaacccgggcataaagtcgcccatcatcaacaatgcggatattctccagttcggcaagttgctttttatcgagcacaactggcggtaccgtatcgccaatcggattcatttcttcccatgctttggcaaacgtccaggcgtccgcgccagcaaagataattgcctcttccatgagatccgccagctgctttttaaggtttggtgcattcttcactttttattacctcgctcctggattatttcacgcataacccgaatcctttcgacgccatga

SEQ ID NO: 259837 - DNA, 237 bp, Klebsiella pneumoniae
atgctcttgccgacgaactgcgcccgccccctcgcgctgtcgagcgccgccatgttcccgctggcggtgttatgcgcacctgccagcatcgtggctatatgggtgaagacgcttttcccgctgccgccctccccggttatctcgaggaacaactgccagtcgtaccggttcgccagtaccataaagagcgctgcagcgatgcgctgcatcttaattgcgtctctatctgatgcgtaa

SEQ ID NO: 259838 - DNA, 345 bp, Klebsiella pneumoniae
gtgaactcgctgctgggcattaaggccaaacccggctggctgatcgtggtggcaggccataccgacagcatcggcaacgataaatccaatcaacaactctccctgaagcgtgccgaggcggtccgcgactggatgcgcgataccggcgatgtgccggagagctgttttgcggtgcagggctacggcgcaagccgtcctgtcgccagcaacgagacgccagaggggcgggcgcaaaatcgccgggtggagatcagtctggtcccgcagaaggacgcctgtctggcgccgggcacggccaatacctcaggagcagagactaacggattaaaaagcgaaaccgagtaa

SEQ ID NO: 259839 - DNA, 480 bp, Klebsiella pneumoniae; identical to SEQ ID NO: 218366

SEQ ID NO: 259840 - DNA, 864 bp, Klebsiella pneumoniae
atgatccgcagtatgaccgcctatgcccgccgtgaaatcaagggtgactggggtagcgccgcatgggagctgcgctcggtaaaccagcgctatctggaaacgtacttccgcctgccggagcagttccgtagtctggagcccgtggtacgcgagcgcattcgcgcccgcctgactcgcggtaaagtcgaatgcaccttgcgttttgaacaagatcccagcgctcagggtgaactcatcctcaacgaaaagctggctaaacagctggtaaacgctgccaactgggtgaaaatgcagagcgatgaaggggaaatcaacccggttgatatcctgcgctggccgggcgtgatggccgccaaagagcaggatctcgacgccatcgccgccgacattctggccgctcttgacggcgcgctggacgacttcatcgtcgcccgcgaaacggaaggccaggccctgaaagcgcttatcgagcagcggcttgaaggcgtgagcggcgaagtagcgaaagttcgcgctcatatgccggaaattctccagtggcagcgcgagcgtctggtcgccaagctggaagatgcggaagtgcagctggagaataaccgccttgagcaagagctggtgctgatggcgcagcgtatcgacgttgccgaagaactggaccgtctcgaagcgcacgttaaagagacctataacattctgaagaagaaagaagctgtgggtcgccgtctcgactttatgatgcaggagttcaaccgtgaatcgaacaccctggcgtcaaaatcgattaacgccgaggtgaccaactccgcgattgagctgaaggtactcatcgagcaaatgcgcgagcaaatccagaatatcgagtaa

SEQ ID NO: 259841 - DNA, 834 bp, Klebsiella pneumoniae
atgaacatcgaaaaaagcagattaatttctgaggccgcccctcatctgaacgcctatcagggcacaattaacggtaatgaatttgccgcaattgtcccggttattcctggtcatatcggtgggcgtgaaaccaatattgttagcgcaaaagcgttacacaaagcgttgggcgtgggaaaagacttctctacatggatcactgatcgcatctctgaatatgacttcaccattgggcacgattactcagtccataaaactatttccccaaatttggggaaaagcccgaatggcgcggcttacagcaagattaagcactctggcagacccggcaaagactatctgttaagtgtcggaatggcgaaagaactggcaatgatcgaacgcaccgaacagggccgcgctatccgccgttatttcatccagtgcgaggaagaattacagcgtagcgtgcctgaaatcgccgcccgctatcgtcgccagctaaaagcccgtatcagtgccgcaaacaactttaagccgatgtgcgatgcgctgaatatggcccgtgccgagatgggtaaaacgacgcagcaacaccactacacaaacgagagcaatatgatttctcgtatcgttcttggtgggctaactgctaagcagtgggcgcggataaatggctattctggcgaacctcgcgaccatatgaacgcagaacagcttgagcacctctcatatctcgaaagcaccaatatcacgttaattgatatgggcatggaatatgagcagcgcaaaggagaactcacccgcctgtcgcaacgctggctcgctaaacgtctggaggtaaaccatgcgtaa

SEQ ID NO: 259842 - DNA, 726 bp, Klebsiella pneumoniae
gtgatactgaatgaacctgccgcccagaaagaagcctttaatctggctagcctgttaacaaatgttaacccttacaacctgtcaaaacctgacattcatcgccgcgccgttgcgacaaatgacgacattttagaggcgttttctgggctgagaattgggctgcgaatcctaataaatcctaagtttttttcgagttttgcgaccagtacgcgcacgcgcgaaggtgagttttgcgagtccataaaaaagggcttgccgactatcgccaacccggtttatggttatagcgcacctgcaaaatcaggtgccgggattggcgtcccgataacctgtatagtgccgacacgcactaagcgtgtttttttgtcggcaaaattcctgcgcacccaaattatggtgggctggatgaggcttccgaaaggaaggccggtgtctatacaggccggttacgccaaccttgttcagctcaccaccagtctgagattggcgtctcttggtggtgaattcaaaattcactgtatagaggctgccatcatggctactacccctacccaaaatccacaatttatctggttaatcgcagccgttcgccgcgacatgccgacaattaccgccaaaattcaccatatcgccgcagaaactgagcaggaagcccgccgcattctggcgcgggatcacgtttgcttttttgccggacgtattcgcacagggggcgcacatgcttaa

SEQ ID NO: 259843 - DNA, 264 bp, Klebsiella pneumoniae
atgaacataaataccatctaccgccacccggcagagctggaagccgaagcgatgctatctcgcaaagaatcatacccggatgattttacgctggcagaccgaacagcagaacgcatgacccgcgcccgcaatgggctggctcacgttatgaccgatttattaccactcctcgaagttgagcaagcagccatcgcgtattgctggctgagtaaagtcctgacgattgtcgatatagccagaattgatgcggagggcagcgcatga

SEQ ID NO: 259844 - DNA, 825 bp, Klebsiella pneumoniae
atgaacgagcaccatcaaccatttgaagacttacgacaatatggaagcgaagggcaggaatattggtcagcaagagatttggcaccactactggattatcgagattggcgaaactttcaaaacgttctatcacgagcagctcaggcgtgtgaaaccagcaaccaagaggtttcagaccatttcgttgataccaccaaaatggttgttctagggtctggtgcccaacgagagttggaagatgttcatttgtccagatatgcctgctatctagttgtgcagaacggcgatcctagcaagccagttattgctgctgggcaaacatattttgcaatacagaccagacggcaagaactagctgacgatgaaacattcaagcgactccgcgaggatcaaaagcgcctttttctccgaaacgagttaaaggaacacaacaagcaacttgttgaggcagcacagcaagctggtgttgaaacaacattggactttgcaatcttccagaatcacggatacaaggggctttatggcgggttagaccaaaaggctatccatcagcgaaaaggtcttaaaaagagccaaaagatactcgatcacatgggttctaccgaattggcagccaacctgttccgagcgactcaggcagaagaaaagctccgcagagataatgttaaatcgaagcaaaaagctaatgaaactcacttcgaggtcggccggaaagttaggcaaacaatccaggagctaggcgggacaatgccagagaatctgcccgtaccggaaaaaagcatcaaacaattagaatctgccgccaagaagctggataaaaaatag

SEQ ID NO: 259845 - DNA, 729 bp, Klebsiella pneumoniae
atggcacacgcttcggcccctcaggcggtattcagtccggagcaggaggctcgtatcggagaaatcgctgccgactttctgatctcccacccggagattctcgtgacggtcagtcaaaagctgcaggaacagcaggaggtacgtaagcagaaaatgtttgcactcagcgtgatggagaatcaggcgaaccttctgcatgatccggacacaccggcttacgggcctgaaaatgcaaaagtcgcggtgattgaattctttgattaccagtgcgtgttctgcagccgctttgcgccggagctggagaaggttatgaaagcgcagccggacgtccgctaccactttaaggagtggccaatttttggtggtcgctgggaagcttcatttcaggcagcacagcaggggctgacggtctggcaaaagaaagggccgcaggcctatgtcacctatcacaatgccatctacgccaccggtcataatgaaggcaaactgacggcggaggatattcacggagcagcgtcaaaggcgggactgaccaccccagctcctggcgaccataccgcatccctggagaaaaacagtaacctggctgaggcgctgggactcaccggaacgccggggatcatcgtcatgcccgttagcggagcgactcctgataccatcacggttttcccggaagccgtaaccgctgaaagactccaggcagcaatcctgaaagccacggccagatag

SEQ ID NO: 259846 - DNA, 549 bp, Klebsiella pneumoniae; identical to SEQ ID NO: 124434

SEQ ID NO: 259847 - DNA, 417 bp, Klebsiella pneumoniae; identical to SEQ ID NO: 124433

SEQ ID NO: 259848 - DNA, 978 bp, Klebsiella pneumoniae; identical to SEQ ID NO: 126393

SEQ ID NO: 259849 - DNA, 345 bp, Klebsiella pneumoniae
atgctggccatactcgatgatctggattttcgtacctggcaaaccaggcacaatctggcaatcctcgcagaacgggcagggttaatgaccagcggcaagtttatatctcttgctagccgtggatgtgaccgtctctactggttagatttgatcatcaccgataaagcaaaatttaacccttatgatgcgaaatgtgcctgtaagcaaattgaagttacagagagcttttttgctgcgctggggatgccgctaaagttggtttatcgggagcgtgcgcgcctgttaaatgaagaccctaacgaagtgatcttgaccctccatctccgaacagcttttgtatcttaa

SEQ ID NO: 259850 - DNA, 1719 bp, Klebsiella pneumoniae
atgaaaaaaaatttctttatcattttggttgctctgcttttgttgatagcattcactgtgtctagtgttgttaagtacaccagtcttttatcggagaaaaatttatacaccgtcgctggcacccaagaaaactacggtttctcagtggcaaaattcattatacagttgaatgagctttacacgctaatcaatagcgataatactattgacgatgttaggcttaaattcgatatcctttattctcgtttgaatgttatttatgtaaagagtgaggcgactgcacctctatataaacagcaaggctatgaagaaacaattgattcgataaacaaaaagcttgaagacatagacgggctgctttcgcataatcaccctgattataaaaaaataagtacaatcatagctgatataaaaccgctaactaaaaccgttacaaatcttgctgatatggctgaaatagcacaaaggaatgacgctcttaaagatttcaggagcaaacgtcagcagttatggactctgctttttattacaggtgggttgatttccttacttctttttgtcctatttatttacataagtaaaattaaccgattgttactatcagaacgggctgcttttgccagtaaaaatgcatttttaggtatggtaggccatgaactcagaacatctttacaggcaatagtgtctatcattgatgtcgtaaccaataatctgagtggagggattaaatctggtcagatagaacgacttgaaactgctgtttcgaaaatggagcgccagttaaatgatttggctgaatttgcaaaaattgacaacggatctgtagagataaaaaacacctataatagcttgcaagcaattgttactaacgctgtgcaggattgcattgctatttatgaaaaaaaggatgtcacagttaaaataaaaaacaataatgatgcagtgatttttacagatgctctacgccttaatcaagtaattgaaaacttaaccagtaacgctattaagtacactgagcgcggggaagttaatgtagattactttatagaaaaaggtaaggtattaaatattgtcatttctgataccggaaagggaatccctaaagacaaactaaagttcatatttaaaccatttacacgagttgtagattcgaaatccactgtacctggatttgggatgggacttgctattgttgcagggataatcagactattaaaaggtactattcatatatctagtgaagtaaatgtaggtacaactgttacagtgagaatacctatcaagttgggagatagcagccttgcaacagctgaggtatctgcttcagctcccggagatgtcttcggcgttcttagcttgcttgttattgatgataatgaaatggcctgttcgtctctttccagtctgcttactaatgctggatacattgtcgaggctacaacctcgcctgaacgagccctggaaaagcttctgcgtaaaccttatgacgttgtcctgagtgatttacaaatgccaggcatgacaggtgatgagctgtatgcaactgttagtagcagtcagaatcctaatcgatccacgcctttcatattcatcagcgcatacagtgatgcacactctatcggacaggctcctttgttaactaaacctgtcaggttaaaagatataaaccttaaaatacatgaggttatgtcaaatcaaggacgagtcaaaagtgagtag

SEQ ID NO: 259851 - DNA, 489 bp, Klebsiella pneumoniae
atggttaaaataatatcattcttatccctaatgcttttgtcaattagtgcatatagcaatattggggatatagttatagatggttcaatcgctaatgctaacagtgataaaggttatgtgattactgaaaagcagtttgattcgttcccacgggataccatcgtaacgacaacaccttggacgccaaccggtaaaaaagtaaaattcaagggcgtcgacctaagttatgttttaaaactcgctggcgctaatggagcaaagctaaaattccatgctctgaataattatgaaatcattgtagacatgaatgacgttgaaaaatataacattttattggctacagaaatggatggaaaaaggcttcaaataagggattttggaccttattttttggtatatcctttagatgaacattatattgagcttaacacgccacactatcttgcacggttcatttggcagatagacaaaattacggtgctcaaatga

SEQ ID NO: 259852 - DNA, 984 bp, Klebsiella pneumoniae
atgagaaatttacttgaatattccggtagcttgataagtaacgatagtttgatcgtagcaccttacgattatcagaagctaagctatgaaaatattttaccattaaacaatggtcttataaaaaactggaatatacaaaaattctcaagtgattactctgaaatagaacacctaaatgtgatcaatggcatgggagtgacattaggtgattctatcgtcgggatttctgtgctgtcagcaatcaaaaaaaagaatcccaagattaaaattaagcttattcgaccggagactgcaccgtcatatgttgaggaactgtatgaattagcatcctcggttatagatgagcttcattacatgccttttcatattcagaaattgccttgtactgcattgaatattgatgtgggaaatcagctatattctccagatttccatattatggaaatgcatgattattttatccaaggtcttggcgtgaaacttgatgatgttaaccataatgagctatctaataaatggttaggcaatattgatctcggagcgccagtttttgaaaactacacactttttgcacctattgctagcacaaaaataagaagtataccgtcgaagttctattatgacatagttgatatgctttctaggcgcgaaggaaaaacggtactaggtttcgtggatgtgaatcataaaaattatattaacatatcaaagtattcaccccatacgaaagatttcatagcgctaattaagtatgctagcaacgtttatacttgtgactcctctgcattgcatatagccgctggatttggtgtacctactgaatgcgtgtttaatacaataccgccagaattaagaacaaagtattacagtaattgtaagtcgatttatgttgggaataaaagattagaaaaaattcagagtagtgaagatttccaactggttaaaatggtggaaaataattacagggagtatctttatggttaa

SEQ ID NO: 259853 - DNA, 915 bp, Klebsiella pneumoniae
atgttggagatgtttgaaaaaattgaaaaaaaatactggcaggataaaatcaagaaaatctccaaattcagagtaataaaaatgcaagatctcgatgatgcaaaagtgatagaggtactggcgaaggtattgaccaaaaaaggtatttccaaggtaaagcacaatagttacataagtaaggtgctacagatcactacatcagcgggctataagaagttgaatggtgcgaccaagtgggaggttcagcaactcataaaagtagtccaatccgttggcatggatatgattgagtttttccgtatttattatgaggataataaagaaattcaagatgcgatctggaacgatggccgcagtgaacactcttgtaaggtatgcctctatcctgaaggttcggaagtaaacacagaatactcagcactgaaagtagctgaccaatggaacatttttccgacaaatgatttaaaagatgaactgctttatgaatcaaaacgaagcatagaaagtattgtcataaatccaaaggtaattagcagcactaagtatcgaattgcactacttgatgacgatgctaatatcaccgaaagcttaaaagaaatcctttcgaacgattattatcaagtagatacttatgataacttgaaaaaacttactcaagctgtcgcaacaaatccgtatgacgcatatgttttggactggatcatcggtgatgaaacaagctttaagttggttaaagctataaggtcgtcaaaaaataaaaatgcaatgataatcgttcttacaggtcaactatctggtataaaagatgatgaaattgtaaagtcaattcatgattatgacattgtgggaccatacgaaaagccgattaaatcaggcatcatcaaatctaacattgaaaaatatttcgccagatag

SEQ ID NO: 259854 - DNA, 309 bp, Klebsiella pneumoniae
atgagcatgcaaaccgtccaccgtaaggcgctgcgtcagaatccttattcaactctcggcaagccgccgctacgctcctcccgtgaccgtatcacgcgtgccattaatggcacctggtcgctcagggagctgccggataacgtccgagaattgctaattgaacgggcagccctgcgggcagaaatcactaccctgactgtgaaagcgcagggactcaaaaaatccgatgtatccgtacttattgccgacaggctgcgacgtatcgatgcaatcacctcactgctggaaaataggaaatgtaatgcctga

SEQ ID NO: 259855 - DNA, 663 bp, Klebsiella pneumoniae
atgttaaccactgccgcgttgtttcagctcgcaatgcagtgtgctcccgccgttcaccccgataccatccacgacatcacccgcaccgaatccggcttaaatccatatgccatcgctgagattgtcccggtaaagggcggcaggagccgcgtgatttctcatctgccttcgtcgaaagacgaggcgctaaaaattgtggaggccataaagcagaaaaagcaccgttattcagtagggctgatgcagataaccagcaccaacttcccgcagttcggcgtaagcgccgaatccatgtttaacccctgtgacaacatgactgttgccgcgaaaatcatcaccgactgctatcaacgaggaggaacattacagcgcgccctgagctgctattactcaggcaattttgaaaccggccagcgcccggaaagcgcgttcggcaacacaagctacgtacagcgtattggctacgttgtgccctcaacgcgggcagaacagcagacagcatctccctcatccggggaagcgcctgccgtcccgtccgacaacactgtttacccggatagcgtcatacgcggcgtaattccggcacccgacaccaccccgaccagcatcgctgcttatccgccacatgtcgtgcgcggcggcctcgctgtgtcttctgattaa

SEQ ID NO: 259856 - DNA, 300 bp, Klebsiella pneumoniae
atgactttacgtactatcaaaaccgctgcaacccgcctgattgccgcattttccgccctgtctgctgttccagcaatggcggccagcgctgaccaggcatttcagaaaggcagtgacgccattaactgggtcttcctcggcctaactggtatgtcagtcgtcacgatcagctgtgcggtggcctttatcgcctacaagatgcttgttgacggcaaggcctggcacgatctccagcgcgtgttctgggcgggtgtcctgctcgccggggcgtccgggttcggtgcctacttcgccgcctaa

SEQ ID NO: 259857 - DNA, 2751 bp, Klebsiella pneumoniae
atggccatcctcaacaaggcgctgacccgaccggcggcgctgtggggggtcccgcttgtccccctgctgttcaccctgtgcatccttaccctggcggccgtctggtcacgtttttactggcttctcctgcttctcatacctgcctttatcgagctgagacggctggcaaaagaggacattcatttctttgacctgaagttgctggcgtttaaaacgcgcggcaaccgcgcggcgacccggcatttcgggacaaaggcgcttgtcgcaaaccagtacgacgccatagacgttacggagtttataaaacatatgcggctcaacgagagtatcccgctgtcccgctatctcccctggtcttcccacctgcacgagcaggtggtgaagaacaaaaaaggtgactttgtcagcacctgggagatcggcggtaccatttttgaatgcgaggatgaacattacctcgccaccctggacatgcagctcaacaacgttatccgctcctttgaggggctacccgttaccttctatacccatctggtgagcgacgaatttaccgacacgcttgaatgtgaatccgggattccgttttcagatgaaatcgcgcgtctgttttacgcctcccgcgagggcaaacctttctaccagcgtcatctcttcttcaccgtctgcttcaatccgcacaccggcattgagcgggcgaccatgaaacagaagtccctgggcgaacgtaaaaccctgctcgacaatgccctgcaggtgatgcaggagcaccggcaagcgattggcacggcgctgtcacgctacgcggcgcggccgcttggcacttatgaggagaacgggcacgtgttctcctcccagctggcgttttacaactttctgatcaccggcaggtggcagaaagtccgcgtcacccgcacgccgttttatgacgtgctgggcggcacggatattttcccttccaccgacattggccaggtcagccacaccgacggccagagctactttcgcgggctggaaatcaaggattacagcactgaaaccatcaccgggctgtatgactcgcttctttatgcccgctgccggtacgtgttcacgcagtcctatacctgcatgggtaaggatgaagcgcggggctgcatccgcaccatcgagaaacgcctgaagtctgccgaggatgatgcgatctcccagcaggaagacctgaaggtcgcccgcgacatgcttcagtccggcattatttcattcgggaaatatcaccagacgcttattgtcagcgccccaaccagcgagcaggttatccgggacaccaacactctggcggataccctgaaggatctcggtttcatcatgaccctgtcccgcgagtcgctgtcggcggcgtatctcgcgcagttgccgggtgtgtatcacctgcgcccgcgtctggtgccggtgagcagcctcaactacgccgaaatggtgtcgtttcacaactttcacccgcacaagcgggacgggaatgcctggggggaggcgattgccgttgttccgaccccgtccggggggtgtcagtacgtgaatctgcacaacagccaggccgatgttgacgagttcagcgagaagccgccgggtaacaccatgctgctcggcagtaccgggacggggaaatcgaccctgctgatgatgttccagcatctgatgcagaaataccggcgtcctgagtcgtttgcgccgggggcgacgaaaaagcgcttcacctcggtggtctttgataaagaccgttcggcggaaatgtcgatacgcctccagggcggctcgtacttccgtttccgttcaggcgagaagaccggccttaacccgtttgcgcttgctccaacgaaacgtaaccgcaacttcctcaagaagctgatgcgaatgatttgcacaagggacggcaaaccgctcgacccgcgcgatgaagaacgcctcagcgaggcagtggacaccatcatgctggactacccgcctgagcttcgtcgcaacggcatcacccgcatgctggaagtgctgcatgaagccccgacgaaggacgcacggatgaacgggctgcgcatccgtctccagcagtgggcgcagggcggggagtttggctgggtgtttgataatgacgtggacacctttgatatcgacaatattgataatttcggcatcgacggcacggagttcctggacgacaaagacgtgcgcagcccgctcaccttctacctgctctaccgcgtgaccagcctcctcgatggccgccgcctggtcattttcatggatgaattctggaaatggcttcaggacccggagttttcaaaattcgccctcgacatgctgaaggtcattcgaaagctcaacggcattttcttcccggccacgcagtcgccggaggagatgtgcaagcacgagatctcggcggccattatcgagcagtgtagtacccgcatcttcatggcgaaccagcaggcgaaggagtacgactacgtggacatgctgcgggtgccgaaagcggtttacgacatcgtgaccaccctcgacccctacgcccgccagatggtgatcatgaaatctccgctgcggcgtggtgacgtgcgcccgtatatcgcacaaatcaccctcgacctctccgggctaggtcgctacacgaagctgctcagcgccagtgcggacaacctgaaaatttttgacgagatctggcaggagggtatgaagccggaagactggaaagacgaaatgctgagacgtgccgtttaa

SEQ ID NO: 259858 - DNA, 717 bp, Klebsiella pneumoniae
atgaaactgaaaaccaccctgacggcgctgaccgtcgccttgtgtctctttcacgtcccggctcaggccggtattcccgtttttgatgaagtagccaacgccagcaacatccagcagtgggcggagaagctccagcagtggcagcagacggttcaacattatcagtcgcagatgaacgcttataaacaacagctggcaacggccaccggtattcgggacgtccaggcattcctgaatcaggcaaaaaacctgacggctgacattaaaaatctgaaaaacagggggatttccttaaacgatctgttaaccggctcaggcgggtcttatgctggggaactaaacaggctgtatgacaaatacaaactgttcgacaactgcccggagaacgccagcgaggcgtaccgggatagctgcaaacagatgctcctcaatcaggcggtgtccgtcgaggacacttctgacatccaggaaaaaatttccgacacgctgagcgatattagtaatctcgccagtcgcatcgagaatgcgaaggacagtaaagaatcgcaggatctggcgaacgtagtgtccgcgaggagtatccagctgaacgccctgaccactcaatgggaaatgtcggtcaaacaaagtgagatgcgcaaccagctgcttgccgaacaacgccgcaaggcgcaggccgagcaaatgcgcacagctccaatcgcagaccttaactaa

SEQ ID NO: 259859 - DNA, 285 bp, Klebsiella pneumoniae
atgaaactgaagacactgacctttattgttctggcctcagtggccgcgcttactggctgcaaggataaaacctccgtagactggtatatggcacaccatgacgacatgctggcgaaatacagggagtgcatttttaatcataattttgtgcccaccgattgccagaatgcacgctccgcccttcaccgtgaaaaagctaaacctgatgttgccgaaggatataagcaaatcctgaaagaccttgataaagctcgcgtgcaagagcctattgctgacctgaattag

SEQ ID NO: 259860 - DNA, 1008 bp, Klebsiella pneumoniae
atgagtggaatattcgtcggattaaacagccacatcatggaggggtttgacagcgtgctcaccagcgtggccgccgatacgggggggtggatggcacacctgttctccgtcgcggtgctctcgctgtacatcacgtggcgcgcctaccagacgatggcaggcaagcttgtccgccccttcgaggagatcgtgtgggacgtgagccggatgctcatcatcatgattttcgtcaccaacgccggaggctatctcgatctggtttcggatgccatcaccggcctgcgggacggattcagcggcgacgcgtcgatctgggcgcggctggatacggtctgggaaaaggctcaagcacttggggagaagctttactcttatgatgattcaacctatgtcgctctaaaaggcactctggcgcagtttctggtctgggcaggcgtcatgttactggtaggcatcacggccatcattaacctgatagccgaactggtgatgctgctgatgctggcgaccgccccgatctttatctactgcctgatgtggtcgtggttccgggatatgttcagcaactggctcagaattattctgggctgcatccttacatccctgttcagcggcatcgccctgacggtggtaatggattacctggactacatcctggcgggcgccacaaaagcatccgatgccaactacctgactctggccgttcaggtcttcctcggcacggcgggtgccgccgccgtgatggtcctgacctataagctggccgaggcgcttgccggtgcatccgcacagggtgccgcgcaggcacttgccgcgtcgggaataggttcagcccgtcaatccgcctcctccgcagccggtgcggtgggggataaagcctcacagaaccttaacagtaccggcagcgcaacggcctcgtctgcctccacggcctcccgcgccaccggcgatgcgcgcagccgcagccgcgccgccgttcagcggatgcaggaacgctaccagagataa

SEQ ID NO: 259861 - DNA, 894 bp, Klebsiella pneumoniae
atgaataaggtactgatgtgtgccctcctgctgaccgccgcgtcagcatggggtgcggcgacaccgcacggcagcgcctatgacagccgcatgcagaacatcccctacaacagccagaacacgacagtgattaacacgcgggcgggttacatcacgacgctggtttttgacgccgacgaggaggtgatcaccgccaccgctggttttccgcagggctggacgatcacatccgaccgtaaccgcgtggggattagccccgcgccggtgaagcagccggtaacggatgcggacggcaaaaccgtccagaagattttcacccccacgcagcaggactggcagaccaacctgtttgtgaccaccacaaagcgcgactacagcctgatgctgaacgtgatcgataacgatcgcgaggcgggaaatctggcctttgtggtgcgcttcagctaccccgacgatacccgcaggcagaacgacgcagcccgcctcgcccgtcagcaggagcttcaggccgcgcaggagaaagaacgcattcagtttgccctgaagaaatccactgcgccgcgcaactggaactacacccgcagggtggcggcaggttcggagtcgatcaccccggattttgcgtatgacgacggccggtttacctatctcggcttttcaccgcagaagctgatcccgtcgccgaccgtcatcgtcggcggcagcgagcaggtgatcaccccgaccttcagcaccgagggtaactaccgggtgatggtactgcgctctctttctccacgctttgtgctgcgctacggcagccaggtcgtggggattgaaaacggcagttacgggaaagtcaccgtggcgaacggcagcaccgtctcaccggatgtgaaactggagagcaaatga

SEQ ID NO: 259862 - DNA, 1197 bp, Klebsiella pneumoniae
atgatgaacgaacaggaagacattaaaaccgccgccgaactggaggcggaagcccgcgagcgggcgcgggcagagattgacggcgataaacccgccgcaggcgcggtgccacccggacagccacaggtggtgcagcacgcgaaacgccgcagccgccgcacgctcgtgctggccgccatcagcctggtgttactggtcattatcgccaccggcggggattacctgatggcgaaactgaagggtgacggcagcgggaaaagcgcgagccatgaaccggaatcgcacgccacctcccccgcccgcgagcgcaataacctcggacgggatctgaacccgctgggacagctggcagacacaaccggccaggagaagactactccgactgataccgccgcgccaccgcaggcatcaccgccccccctgacgtttgacaaggtcagcgccctggcagacagcgccccaaccactgcaagcagcgccccgaaaagcacggccagcagtaacgtatcacctgcgggcagcgcgtccgcgccaggctctgcaacacccgccgggcagtcgcaggataacgggctggcgcgcattaccggcgtgaagcggctcggcctcgatccggatttgtacattccggccgaccggcatatcccctgcgcgatgatgcagcgctttgtatcggacgtgggcgggcgctttaactgccttatcagcgaggacatttacagcgccagcaacgccgtgcgccttatcccggcaggcactgaggcgcgcggcctgtaccgcaccggcacgctgaaaaacgggcaggggcgtctgttcctcgccatcaccgagctacgcacgccggaacccggccgcctggttattccgatggttgacagccaggccgtgggggcgctgggcgagaacggcgtcgcgggctggatagacaatcactggctggagcggataggtaataccctcctgctcggcacggtacaggactttgccgctgcggcctccggctcgtcgccgggcaaggatcgcaacacggactacacggagaacacccgcgcggccacggcggaaatggcaaaaacgctcctggaaaacagcatcaacatcccgccgacgatgtacctcaaccagggtgacgtgattggcctagtcacgggggcggacattgatttttcagacgtctacagactgcgcatgaggtaa

SEQ ID NO: 259863 - DNA, 1050 bp, Klebsiella pneumoniae
atggacgataaactgactgataccccgtcagagggcaacgtcgcgctgtcacacctgcgcgttctgttgttcggggactacctgagccgggaggggctgacggaaattgccatcaaccgccccggagagctgcacacaaaaatcaacggggcgtgggaaatgcacgcctcgccggtcacgctgcgccagtgctcgtcctttgccagggcgctggccgtgtggaacaacgacaccattgatgaaacgtcgcctatcctctcggccacgctccctacaggagaacgctgccagatagtggtgcccccggcctgtgagcgcaacaccatctcaatcaccctgcgtaagccggactacttccagcgcacccatcagtcgtatatcgatgccgggttttatgaccgggtgcagggtacagaaaaggtggaatcaaaagacggggagctgagccgcatatacctgtccgggaatatcccgctttttatggaaaagtgcgtggagtacggcaaaacgctctttgtggtgggggaaacaggctctgggaaaaccacctacatgaagatgctgctgcactacattcccgagacgctgcgccttatcaccatcgaggacaacccggagctgaagttttacagccagaaaaactacgttcatctgttctacccggcggacgccggagagggcgcaatagtcacctctgatcgcctagtgcgcgcgatttaccgtatgaaccccgaccgccccctgctcgccgaggtgcgtggccgcgaggcgtgggacgcactcaagctgattgagtccgggcacgaggggtttatgtcctccctgcacgcgggcagcccgcgcgagtgtatctccgggctgatagaccgctgctacgagcatccggcgtgccggggcatgccggttgacgtgctgctgcgcaaggtactgcactgcgtcgacgtcattgtgagcgtggacgttcacggcaacgtgcgccgcatgagcgacgtctattttaaacccctgcacatgcaggctatgaaggagagtttcaatgatgctgcctaa

SEQ ID NO: 259864 - DNA, 402 bp, Klebsiella pneumoniae
atgatgctgcctaaactgaccggcctgacggcgatcgtcgtcctcctggcgggctgttcttcgccaccggagcctgcggccgttgactggtcacaaccggcgcagccggtaacgaccacccggccggtatgggaacccaaccgtcttatcgtggcctcgccggtgacggaagggcactggtcgcaggtgcttgcgcgttttgaacccggcgggatttacccggccgcacagtggtacgcggttgcgcacgcctcgcgcgcggtagtaaatgccccggacggccagcgcttctttgcggccaaaacctggctccgcgagggcggctacaagggtgtggtggagtttcgcccccgctccggctgcctgacctgcgacacctcagaaatcgtcttctaccgataa

SEQ ID NO: 259865 - DNA, 318 bp, Klebsiella pneumoniae
atgaaacacaccgtaatcacggcggcgctgctgtgcgcccttacttctccggcgttcgccgccgatggccagaatgccgacccgaatgacccgtgcgcgatggtgctgtgcctggccggaaagctcgacggcagcagtcccgccgagtgtgacccgatgtacaaaaatttcatgagcatcaaaaagaaaaaaaaggggtcgtttttacccgatcacaccgccgcagcgcggcagaaaaaactgagcgcctgcccgtccgctgacagcgccattgtcggcaagatcatctcgaaatttggccgtatgaacggttggtaa

SEQ ID NO: 259866 - DNA, 336 bp, Klebsiella pneumoniae
gtgattaatcaaaccgtttctattaataacttttccgggctgctgaaagatgaggagcttcctgcaggtgatttgcagacggtgctgctcgttttgtcggaaatcagccagaaacaggatcattttcaggccaacacgtccgaactcgtccagctcgccgcgcagcactcgccgaccttccaggcattaccagcagaacgtcagtcgttcttccgctccgtgctcagtatgccggtcttcttttacaccgttccgctgagcgacgacgaggcggcggaatgggaaaaactcgacgataaggatgcactccaatggcaacaaaaaccggatttatag

SEQ ID NO: 259867 - DNA, 309 bp, Klebsiella pneumoniae
atggcaacaaaaaccggatttatagccccgccgtggccgcatgtgcgtggtgattccgttagtgccgcgagcctgatttctcgcatcgagaaagaagcgcatcgcggctgcggcctgcattacgaaatctaccaatatcgcgccctgtgcgaattgcacgatgttctgaccaatctcagcgtccgtgatgctgagacgttcatgacagtagcggcggatcatggctttagtctgtctgataacgactttcaggaaagtcgaatgatgtacttcgaaacgatggatgaaatcaggagagatcaagaatga

SEQ ID NO: 259868 - DNA, 1020 bp, Klebsiella pneumoniae
atgcagtatacccggctcgggaagagtgacttactggtctcccgtatctgcatgggatgtatggggtttggcgatccgtcaacgggtcagcatcgctggacgctggacgaaacagccagccgggacatcatccgccacgctctggaacagggcatcaatttttacgataccgccatcgcctatcagaacggctccagcgaacggtacgttggccgggcgctgcgggagatggcaaaacgcgaggaggtggtgctggccaccaagtttctgccacgaaccgccgcgcagattgccgaggggatcagcggaaaacaggcgatagcccgctcgcttgaccagagtctgcgaaacctcgggatggactacatcgacctctacatctaccacatctgggattacaacaccccggttatcgacgtgctggaggcgctgcacaccgcagtgaccgccggcaagatgcgcgcgattggcatttccaattgctatgcctggcagctggcgaaggcgaacgcccttgccgaacgcgaagggctgacatcctttgtttctgtgcagagccactacaacctgattatgcgtgaagatgaacgagagctgttcgggctgtgcgcagaagagggtatcgccatgactccctatagcgcgctggccagcggccgtctctcccgcttagaaggccacacgcggcgagaggtggaagatgattatgcccggggcaaatacgacggcacagcagagcaggatcggatcattattgcccgcgtcgctgaacttgccgaacggcatcaggtctcgatgaccgaaatttcgctggcctggctgctgataaaagtcaccgccccggtgatcggcgccacgcaaaagcatcatgttgacggcgcggtcaatgctgtagcccttcaactgagcccggaagacatccgttatctggaagaagcctatcagccgcacttcctcacaggcgtgatggcgcaaaacacgccgcaagccaaagaccatcatcaggtgtggacgcgctaa

SEQ ID NO: 259869 - DNA, 192 bp, Klebsiella pneumoniae
atgaccctcaatgccactcccaccttcagcgcctgtggaactgtcgttccactcctcgtcacgtccggttccgtgagagcgctggacctgctccggactgaactgatagctgaggagtgcctctggtctctgactgttaaaataattgtctcgtcagaaaaacgcctcaagggtccggatattccggcataa

SEQ ID NO: 259870 - DNA, 1410 bp, Klebsiella pneumoniae
atgttcggattagatgccttccatttggccagggtacagtttgcatttactgtttccttccacattattttcccagcaataaccattggtctggccagtttcctggccgtgctcgaagggttatggttaaagacacgaaatgacacttacaaggagctctatcacttctggtcaaaaatttttgcagtaaactttggtatgggtgttgtttccggtctggttatggcttatcagtttggtaccaactggagtggcttctcacagtttgcagggagtatcaccggtccattgctgacctacgaagttctgactgcgttcttccttgaagcgggtttccttggtgtcatgctgtttggctggaatcgtgttggccccggtctgcacttctttgctacctgtatggtggcgctggggacactgttttccacgttctggatcctgtcatccaatagctggatgcagactccacagggttatgccatcgagaatggtgttgttatccctgtagactggctgaaaattatctttaacccttccttcccgttccgcctgttacatatgtccactgcggctttccttgcaagcgctttttttgtcggagcatcagcagcatggcatctgctaaaaggcaatgatactcccgctattcgcaaaatgttctctatggcattgtggatggcattaatcgtttccccgatccaggccgttatcggtgatgcgcatggtctgaatactcttgagcaccagccggcaaaaatcgctgcgattgaaggacactgggaaaataaacctggtgaagcaacccctctggttctgtttggcctgccagatatgaatgcagaagagacgaagtacaaaatagaggtcccttatcttggcagtattatccttacacacagccttgataagcaggtgcctgccctgaagagtttccctaaagaagatcgtcctaactccactatcatattctggtctttccgcgtaatggctggcttagggatgctgatgattcttctcggggtggtcagcgtatggctgcgctggcggaaacgtctctatacatctaaaccgttcctctatttttctctcttcatggggccttcgggactgattgcgttactggccggttggttcacaactgaaataggtcgtcaaccatgggtcgtttatggcgtacagcgaacgaaagatgctgtttctgcacatggcgatttacatatgtcaatcagcttactggcgtttcttcttgtttacacctcagtctttggcgtcggttatatatatctcgtacgtctgatcaaaaaagggcctgtacatgctgaggagcatcaggaggtaacggatggaacacctgcccgtcctctgtcagcggtaaatgagggtttggcaacacgtgggagagacaaataa

SEQ ID NO: 259871 - DNA, 1011 bp, Klebsiella pneumoniae
atgggtattgatctgtcaattatctggtttgtcatcatcgtcttcgctacgttgatgtatatagtgatggatggatttgatctgggaatcggtattttgttcccgtttcataagcacgatgtcgatcgcgatacaatgatgaataccgttgcgccggtatgggatggcaacgaaacctggatggtactggggggagcggcattgtacggcgcgtttcctctggcttacgctgttatcattgatgctcttagtattccgcttaccgcaatgttacttgggcttatctttcgtggtgtggccttcgagtttcgttttaaagcaatcccggaacatcgacctatctgggacaaagcatttatagtcggctctgtactggccactttcagtcagggtgttgcagtcggaaccttattaaatggattgagtgtgtccggacgtgcatttagcggttctgcattggtttggctcgccccgttccctctgttctgcggattgggactggtactggcctatgccctgctgggttgcacctggctgattatgaaaacagaagactcgcttcaccgcaggatgtcagagcttgcaactccgttaaccattggtttactggcagttattgcaattatcagtgtctggaccccattgactcatcctgagattgccagtcgctggttcagtatgccaaatgtcatctttttcctgcctgtaccattgctggtccttgtttgttgctggggtatcgttcgcagtgtttatagccgtcgatccagctttggtccctttatgctgacgttaggattaatcttccttggtttcagtggtcttgggatcagtatctggccatatatcataccgccttctgtaaccatctggcaggccgcgtcacctcctcagagtcagggctttatgctaataggtggcttgttgattatccctgtaatcctgatgtacacctgctggagttactatgtattccgggggaaggtaaaaactggcgacggttatcactaa

SEQ ID NO: 259872 - DNA, 147 bp, Klebsiella pneumoniae
atgaaaaccgttgatgaaacacctcgtccattctggaaaaaattgatgtggctggtgattatctgggctgtcagtgtaatggcgttgggggtcgttgccacaatattcaaattgctaatgacagccgctgggatgaaaactcactaa

SEQ ID NO: 259873 - DNA, 1152 bp, Klebsiella pneumoniae
atgagtaatgtattttatatgccgcctgtaaccctaatgggacttaatgctattcgtcttttaggggatgaacttgtttcaagggagttaaaaaaagcgctgatcgtcactgaccgtgttttggctgacacgggactggttaacaaactgacagatgagcttgaggcgcataaaattagttatgcaatatttgatggtgttcaacctaatccaacagagaaaaatattgatgacggtttagccttgcttgcaaaaagtaatgctgattttgtcatttcctttggtggggggtcttctcacgatacagctaaaggtattgcattggtggccactaatggtgggcatattcgggattactcgaaaggtgtgcatctgtccaaaaaaccacaattaccattagttactgtaaatacgacagcgggtacggcatcggaaatgaccgtatttgcaatcgtcactaaccaggaagatgaaactaaatacccggtagtggataagcactttacgcctatcattgcggttaacgattctgaacttatggtcgcaatgcctgcgttccttacggcaactacaggtatggatgccttaactcatgcaattgaagcgtatgtatcaacagcagctacgcctgttactgatgcttgtgctatcaaagcaattgaaattattgttaataatcttaaagacgttgtagatgatggccaaaaccgcgaagcacgtgatgccatgcaatatggtgaatatctggctggaatggcattttcaaacgcgtctcttggttatgtccattcaatggctcaccagttaggtggcgtttataatctgtctcacggtttgtgtaatgcgatcctgctgggtgaagtatcccgatttaatgcgaaaaaggttcccgatcgttttgttgaaatcgcccgggcaatggggattgatgtctcaacaatgactcaggagcaggccattaattctgctatcgaagcaattgagatgttgtcgcaaaaagtcggtacgaatcaacgcctggctgatcttggtgtaacggaggataaacttgcatttatggcacaaaatgcactaaatgatgcttgttctttaaccaatcctcgtcaggcaagcctttcggagattattgagctctacaaagctcgtatgtaa

SEQ ID NO: 259874 - DNA, 276 bp, Klebsiella pneumoniae
atgcccagtactccggaagagaaaaaaaaggtactgacacgggttcgccgcatcagagggcagattgatgctctggaaagagcacttgaaaatggtgctgaatgccgcgccattctccagcaaattgctgccgttcgtggcgcatctaacggattgatggctgaggttctggagagtcacatacgagaaacctttgaccagaatgacaactatagccatgaagtcagtaaatcagttgacgatacgattgaactggttcgcgcctatcttaaatag

SEQ ID NO: 259875 - DNA, 432 bp, Klebsiella pneumoniae; identical to SEQ ID NO: 204348

SEQ ID NO: 259876 - DNA, 1605 bp, Klebsiella pneumoniae
atgcgttggctgcgtcagctcaccccagtcacttatttgagtaagctcctggggattcgctgccttgccgccttcctacaacttgaaatccatagagtaacgacacacaacatcacggagtacaccatcatggctaactactttaatacactgaatctgcgccagcagctggcgcagctgggtaaatgccgttttatgggccgcgacgaattcgccgacggcgcgagctacctgcagggtaaaaaagtggtcatcgtcggctgtggcgctcagggtctgaaccagggcctgaacatgcgtgactccggtctggatatctcctatgccctgcgtaaagaagcaatcgctgaaaagcgtgcttcctggcgtaaagcgaccgaaaacggcttcaaagtaggcacctacgaagagctgatcccgcaggcggacctggtggttaacctgacgccagacaaacagcactccgacgtggtgcgttctgtacagccgctgatgaaagatggcgcggcgctgggctactctcacggcttcaacatcgttgaagtgggcgagcagatccgtaaagacatcaccgtggtgatggtagcgccgaaatgcccgggtaccgaagtgcgtgaagagtacaaacgtggtttcggtgttccgaccctgatcgccgttcacccggaaaacgatccgaaaggcgaaggtatggcgattgctaaagcctgggctgcggccaccggcggtcaccgtgcgggcgtactggaatcttctttcgttgcggaagtgaaatctgacctgatgggcgagcagactatcctgtgcggtatgctgcaggccggttctctgctgtgcttcgacaagctggtggcagaaggcaccgacccggcttatgcggaaaaactgattcagttcggctgggaaaccatcaccgaagcgctgaagcagggcggcatcaccctgatgatggaccgtctgtctaacccggcgaaactgcgtgcttacgcgctgtccgagcagctgaaagagatcatggcgccgctgttccagaaacacatggatgacatcatctccggcgaattctcctccggcatgatggctgactgggctaacgacgataagaaactgctgacctggcgtgaagagaccggcaaaaccgcgttcgaaaccgctccgcagtatgaaggcaaaatcggcgagcaggagtacttcgataaaggcgtgctgatgatcgcgatggtgaaagcgggcgttgagctggcgttcgaaaccatggtcgattccggcatcatcgaagaatccgcttactacgaatcactgcacgaactgccgctgatcgccaacaccattgcccgtaagcgtctgtacgaaatgaacgtggttatctccgataccgcagaatacggtaactacctgttctcttacgcttgcgtaccgctgctgaaagagttcatgaccaccctgcagaccggcgacctgggcaaagcgattgccgaaggcgcggtagacaacgcgcagctgcgtgatgtaaacgacgccattcgcagccatgctatcgagaaagtgggccagaaactgcgtggctacatgactgatatgaaacgtattgcagtcgcgggctga

SEQ ID NO: 259877 - DNA, 282 bp, Klebsiella pneumoniae; identical to SEQ ID NO: 119597

SEQ ID NO: 259878 - DNA, 210 bp, Klebsiella pneumoniae
atgaataaagacgaaatcggcggtaactggaaacagttgaaaggtaaagccaaggaacagtggggcaaacttaccgatgacgatatgaccgtaatcgaagggaagcgcgaccagctggtcggcaaaattcaggagcgttacggctatgagaaagatcaggctgagaaagaagtctcagactgggagcataagaacgactatcgctggtag

SEQ ID NO: 259879 - DNA, 1317 bp, Klebsiella pneumoniae
atgctgctcaacgctgctgataaagcgctgtggcgccttgcactccccatgattttctgcaatatcaccgtcccgctgctggggctggtggataccgcggtgatcggccaccttgacagcccggtatacctcggcggcgtcgcggtcggagcgacggccaccagtttcctgtttatgctgctgctgtttcttcgcatgagtaccaccgggttgaccgctcaggcctggggggccaaagatccgctgcgactggcacgggcgctgttgcagccgctggctctggcgctgggcgccggggtgttgattatcctgtttcgcctgccgttgattaacctcaccctgcatatcgtcggcggcagcgaggcggttctcgagcaggcgagacggtttctcgatatccgctggctcagcgctcccgcgtcgctggccaaccttgtgctgctcggctggctgctgggggtccagtatgcccgggcgccggtgattttgctggtggtcggtaatctgttgaatattgtgctcgacctgtggctggtgatgggcctgcggatgaacgtccagagggcggcgctggccacggtcaccgcggagtacgccactctcattatcggcctgatgatggcgaagcgggtgctaacgctgcgcggcgtgtcgctggcgatgctgaaaaacgcctggcgcggcgacatgcgccgtctgctggcgttgaatcgcgacatcatgctgcgctccctgctgctgcagctgtgctttggcgcgctgaccgtctacggcgcccgtctgggcagcgatatcgtggcggtcaacgccgtactaatgaccatgctgacctttaccgcctacgcgctggatggctttgcctatgccgtggaggcccactccggccaggcctacggcgcgcgcgacggcagccagctgctggaggtgtggcgggcggcctgccggcagtccggtatggtggcgctggcgtttgccctggtttacagcctggcgggggagtacatcatcgcgctgttaacctcgctgccttccctgcagcagctggccgatcgctatctgatctggcagaccatcctgccggtggtcggggtctggtgctatctgctggacggcatgtttatcggcgcgacgcgcggcgcggagatgcggaacagtatggcggtcgccgcggccggcttcgccgtgacgctgcttacggtcccggcgctcggcaatcacggcctgtggctggcggtggcggtgtttctcgcgctgcgaggcctgtcgctggcgctgatctggcgccgccactggcgacgcggcacctggtttagttag

SEQ ID NO: 259880 - DNA, 609 bp, Klebsiella pneumoniae
atgaaagcgttaacgaccaggcagcaagaggtgtttgatctcattcgggatcatatcagccagacgggcatgccgccgacgcgtgcggagattgctcagcgcttggggttccgttccccaaacgcggcggaagaacacctgaaagcgctggcgcgtaaaggcgcaatcgagatcgtctccggcgcctcgcgcggtatccgcctgctgacggaagaagagcacggcctgccgctgatcggccgcgtcgccgccggcgagccgctgctggcgcagcagcatattgaaggccactatcaggtcgacccgtcgatgttcaagcccaacgccgattttctgctgcgcgtcagcgggatgtcgatgaaagacatcggtattctggatggcgatctgctggcggtccacaaaacccaggatgtgcgtaacggccaggtggtggtagcgcgcattgacgatgaagtgacggtgaagcgcctgaaaaagcagggcaacgtcgtcgaactgttgccggaaaacagcgaatttacccctatcgttgtcgatctgcgtcagcagagttttaccattgagggtctggccgttggcgtgatccgtaatggagaatggctgtaa

SEQ ID NO: 259881 - DNA, 369 bp, Klebsiella pneumoniae
atggccaataataccaccgggttaacccgaatcattaaggcggcaggttactcctggaaaggatttcgcgcggcgtggatcaacgaggccgcgtttcgtcaggaaggtgtcgccgccatcgtggccgtcgcgatagcctgctggctggacgtcgacgccatcacccgcgtattgctgattggctcggtcctgctagtgatgatagtcgaaattctcaacagcgcgattgaggcggtcgtggaccgtattggctcggattatcacgagctttcagggcgcgccaaagacatggggtcggcggcggtcctgctggcgataatcatcgcgctgatcacctggggaacgctgctgtggagccattatcactaa

SEQ ID NO: 259882 - DNA, 2424 bp, Klebsiella pneumoniae
atgtccggctggcaacgaatttactataaattactgaatttaccattacgggtgctggtaaaaagcaagtctattccggcagagcctgctcaggaattaggactcgatacctcgcgtccggtcatgtacgtcctgccctataactccaaggcggacctgctgacgctgcgcgcccaatgtctggcgcatgatttacctgacccgcttgaaccgctggaaatcgacggcgccctgctgccgcgctacgtattcatccacggcgggccgcgcgtattcacctactacacgccaaaagaagagtccatcaagctgttccacgactacctcgatctgcaccgcaaccatccggatctcgatgtgcaaatggtgccggtgtcggtgatgttcggccgctcgccgggtcgtgagaaaggggaagttaatccgccgctgcggatgcttaacggcattcagaaatttttcgccgtctcctggctcggccgcgacagtttcgtgcgtttctcgccttccgtgtcgctgcgccgcatggcggatgagcacggtaccgataagatcatcgcccagaagctggctcgcgtcgcccggatgcactttgcccgccagcgcctggccgccgtcggcccgcgtctgccggcccgccaggatctgtttaataaactgctggcctcgaaagcgattgcccgcgcggtggaagacgaagcgcgcagcaagaaaatttcgcacgagaaggcacagcagaacgctatcgcgctgatggaagagattgcggcgaacttctcatacgagatgatccgcctgaccgaccgcattctcggcttcacctggaaccgcctgtaccagggcatcaacgtgcataacgccgagcgcgtacgccagttggcgcacgacggccatgaaattgtctatgtcccctgccaccgcagccacatggactatctgctgctctcctacgtcctgtaccatcaggggctggtccctccgcatatcgcggcgggcatcaacctcaacttctggccggccgggccgatcttccgccgcctcggcgctttctttattcgccgcacctttaagggcaacaagctctattccaccgtgttccgcgaataccttggcgaactgttcagccgcggctattccgtggagtatttcgtcgaaggcggccgctcccgtaccggccgcctgctcgatccgaagaccggtacgctgtcgatgaccatccaggcgatgctgcgcggcggcacccggccgatcaccctggtgccgatttacatcggctatgagcacgtgatggaggtaggaacctacgccaaagagctgcgcggcgccactaaagagaaagagagtctgccgcagatggtgcgcggtttaagcaagttgcgcaacctgggccagggttacgttaacttcggcgaaccgctgccgctgatgacctatcttaaccagcatgtgccggattggcgggaagcgatcgacccgatcgaagcggttcgcccctcctggctgacgccgacggtgaatagcatcgccgctgacctgatggtgcgcatcaataacgccggcgcggccaacgccatgaacctgtgctgtacggcgctactggcctcccgccagcgttcgctgacccgtgagcagctcacccagcagttagagtgctacctcgcgctgctgcgcaatgtgccctattctccggatgcgaccgccccatccgcttcggccagcgagctcatcgatcatgcgctgcagatgaacaagttcgaagtggagaaggacaccattggcgacatcatcatcctgccgcgcgagcaggcggtgctgatgacctactatcgcaacaatatcgcccatatgctggtgatgccgtcgctgttagccgctctggtgactcagcatcgtcatctcagccgcgccgaagtgctgcgtcatgtggaaacactctatccgttcctcaaggccgagctgttcctgcgctgggaaaaagcggagctggccggagtggtggatgcgctgattgccgagatgctgcgtcaggagctgatcgtcgtcgatggcgatgtcatgagcctcaacccgtcgcactctcgctccctgcagctgctggccgctggcgcccgcgagacgctgcagcgctatgccatcaccttctggctgctgagcgctaacccggcgatcaaccgcagctcgctggaaaaagagagtcgcaccgtggcccagcgtctgtcggtgctacacggcatcaatgcgccggagttcttcgacaaagcggtgttcagcaccctggtgttgaccctgcgcgatgaaggctatatcagcgacaccggcgacgccgagccggaagagaccctgaaggtttatcgaatgctggcggacttgattacgtcggatgtccgactgaccattgagagcgtcacgcaggacgacgcgtaa

SEQ ID NO: 259883 - DNA, 867 bp, Klebsiella pneumoniae
atggagtggagtctgtcgcagaataagctgttggcgtttcatcgcctgatgcgcactgacaaaccaatcggcgctttgctgctgctgtggccgacgctgtgggcgctatgggtggcctcgccgggcgtcccgccgctgtggatcctggcggtattcgtcgccggcgtctggctgatgcgcgccgccggctgcgtggtgaatgactatgccgaccgaaaatttgatggtcacgtaaagcgtaccgcccgccgtccgctgccgagcggcgatgttaccgagaaagaggcgcgaacgctgttcatcgtgctggtgctgctctctttcctgttggtgctcaccctcaacaccatgaccattctgctgtcggtggcggcgctggcgctggcgtgggtctatccgtttatgaagcgctacactcatctgccgcaggtggtgctgggcgcggcctttggctggtcgatcccgatggccttctcggccgtcagcgaatcgctgccgctgagctgctggctgatgttcctcgccaatattctgtgggcggtggcctacgatacccagtatgcgatggtggatcgcgatgacgacgttaagatcggcatcaagtcgacggcgatcctgtttggcgaaaacgatcgtctgattatcggtatcctgcaggtggccgtactggcgctgatgggcgcggtgggttggctgaatgggctgggctgggaatattactggtcgctgttcgtggcggcgggtctgtttggctggcagcagaagcttatcttcaatcgcgaccgcgataactgcttcaaagcgtttatgaacaataactacgtcgggctggtgctgttcctcggcctggcgatgagctacctgtaa

SEQ ID NO: 259884 - DNA, 498 bp, Klebsiella pneumoniae
atgtcccatcctgcgcttacgcgactgcgtgcgctgcgctattttgccgttatgccatccctgccgccgccgctaagtgactggctgctgctggaggactcaatgacccagcgctttgaacaacaaggaaagcaggtcaccgtgaccctggttaacgaagggtatatcggccgtgacgcgctgactgacgaagcggcgctgctgcccgacgagccgcgctactggctgcgggagattatactcaatgccgatggcgagccctggctggccgggcgcacggtggcgccggagtcgacgctgtgtggtccggagctggcgctacagcagctcggacaaactccgctgggccgatacctgtttacgtcgtcgacattaacccgcgattttattgaaattggtcgcgatgcagcgctgtgggggcgtcgttcccgcctgcggctgagcggcaaacccctgctgctgaccgagctttttttgcctgcgtcgccgttgtactaa

SEQ ID NO: 259885 - DNA, 924 bp, Klebsiella pneumoniae
atgaaaatgaagaaaactctcgtcgctctgtgtttatccgcagggatgttggcatgcgtgccggggatgagccttgccgatgttaactttgtaccgcagaacaccagcgccgcgccggctattccagccagcgcgctgcagcagctgatctggacgcctgccgatcaatcaaagacgcagagcgttgatttaaccaccggcggtcaacgcctggatgtcccggggatcgtcggaccggtcgccgcctggagcgtgccggccaatatcggtgagctgaccctgacgctcgacagcgaactaaacaaacataagcagatttttgcgccgaacgtgctgattctcgaccagaacatgacgcccgcggcgttcttccccagcaattactttacctatcagcagccgggcgtgatgaccgctgaccgcctgggcggcgtgatgcgcctgaccccggcgctgggccagcaaaagctctatgtgctggtgtttaccactgaaaaagatctccagcagaccacgaccctgctggatccggcgaaagcctatgccaaaggcgctggcaatgcggccccggatatcccggatccgatcgctaaacataccaccgatggcgtgctgaagctgaaagtgaaaactaatagcacttccagcgtgctggtagggccgctgttcggctcttccggcccgggtccggtaaccgtcggcaacaccgcggcgccggtagccgcgccagccgccgccgcggcgccggccgccaaaagcgaaccgatgctcagcgataccgaaacctacttcaacaatggtattaagcaggcggtgaaacaaggtgacatcgacaaagccctgaaattgatgaacgaagctgagcgcctcggctcgaaatccgctcgttccacctttatcagcagtgtaaaaggcaaggggtaa

SEQ ID NO: 259886 - DNA, 1290 bp, Klebsiella pneumoniae
atgatgattactctgcgcaaacttcctctggcggtcgccgtcacagcaggcgtgatgtctgctcaggcgctggctgtcgatttccatggctacgcgcgttccggcattggctggaccggcagcggcggcgagcaacagtgcttcaaagcaaccggcgctcaaagtaaataccgtcttggtaacgaatgtgaaacctatgcggaactgaagctgggccaggagctgtggaaggaaggggataagagtttttatttcgatactaacgttgcctattccgtgaatcaggaagatgactgggaaagcacctctccggcgttccgtgaagccaacatccagggtaaaaacctgatcgactggctgccgggctccacgctgtgggcgggtaaacgcttctatcagcgtcatgacgttaacatgatcgacttctactactgggatatctccggcccgggtgcaggtctggaaaacgttgaccttggcttcggtaagctctctctggccgctacccgtaactcagaaagcggcggctcttatactttctccagcgatgacaccaaaaaatatgctgcgaaaactgccaacgacgtctttgatatccgtctggcgggtcttgaaaccaacccgggcggcgtgctggagttaggggtcgattacggccgtgctaacccgcaggatgactatcgcctggaagacggcgcgtcgaaagacggctggatgtggaccggtgaacatactcagtctatctggggcggcttcaacaagtttgtggttcagtacgccactgacgcaatgacctccttgaacagcggccactctcaggggaccagcattgataacaacggcagcatgatccgcgttctggatcacggcgcgatggacttcaacgatgactggggcctgatgtacgtggcaatgtaccaggatgtggatctggacagcaagaacggttctacctggtacaccgtgggtgtccgtccgatgtacaaatggacgccgatcatgagcacccagctggaaatcggttacgacaacgtgaaatcccagcgtaccagcgaaaacaacaaccagtacaaaattactctggctcaacagtggcaggcaggcaacagcgtctggtctcgtccggctatccgtatcttcgcaacctacgcgaagtgggatgaaaactggggctacagcaacacctccggtctgcagacgaaagacagcagcggaagcggcgctttcacctccagccgcggtgacgacagcgaagttaccttcggtgcccagatggaagtgtggtggtaa

SEQ ID NO: 259887 - DNA, 1110 bp, Klebsiella pneumoniae
atggcgagcgtacagctgcgaaatgtaacgaaagcctggggtgacgtggtggtatcgaaagatatcaatctcgatatccacgaaggggaattcgtcgtgtttgtcgggccatcgggctgcggcaaatctaccctgctgcgtatgattgccgggttagaaactattaccagcggggacctgtttatcggtgacacccgcatgaacgagatcccaccggcagaacgcggcgttgggatggtattccagtcttatgcactctatccccacctttccgttgcggaaaatatgtcgtttggcctgaagctggccggcgcgaaaaaagatctgattaaccagcgggtgactcaggttgcggaagtgttgcagctggcccatctgctggagcgtaaaccgaaagccctctccggcggtcagcgccagcgcgtggcgattggtcgtacgctggtggcagagccaagcgttttcctgctggatgagccgctttccaacctcgatgccgccctgcgcgtccagatgcgtatcgaaatctcccgtctgcataagcgactgggccgcaccatgatctatgtcacccacgatcaggtggaagcgatgaccctcgccgacaagatcgtggtcctcgacgccggccgtgtggcgcaggttgggaaaccgctggagctctatcactatccggctgaccgcttcgttgccggcttcattggttcgccgaagatgaacttcctgccggtcaaagtcaccgcgacggctatcgatcaggtgcaggttgaactgccgaaccgtcagcaaatctggctaccggtggacagcgccaacgtgcaggcgggcgccaatatgtccttaggtattcgaccggagcatttactgcccagcgatatcgccgatgtaagccttgaaggcgaggtccaggtcgtcgaacagctcggtcacgaaacgcaaattcatatccagatccccgccatccgtcagaacctggtttaccgccagaacgacgtggtgttggtagaagagggagccacattcgctatcggtttgccgccagaacgttgccatttattccgtgaggatggcaccgcttgtcgtcggctgcataaagagccgggcgtgtaa

SEQ ID NO: 259888 - DNA, 1191 bp, Klebsiella pneumoniae
atgaaaatcaaaactggcgctcgcatcctcgcgctgtcggcactgaccacgatgatgttttccgcctctgccctcgcaaaaattgaagaaggtaagctggttatctggattaacggcgacaaaggctacaacggcctcgctgaagtgggtaaaaagtttgaaaaagacaccggcattaaagtttccgtagaacacccggacaagctggaagagaaattcccgcaggttgcggcgaccggcgacggcccggacatcatcttctgggcgcatgaccgttttggcggctacgcgcagtcgggcctgctggcggaagtcaccccggacaaagcgttccaggacaaactctatccgttcacctgggatgcggttcactataacggcaaactgatcgcctacccgatcgcagtcgaagccctgtccctgatttacaacaaagacctggtgccgaacccgccgaagacctgggaagagatcccggcgctggataaagaactgaaagcgaaaggtaagagcgcgctgatgttcaacctgcaggaaccgtacttcacctggccgctgatcgctgccgacggcggatacgccttcaagtttgaaaacggcaagtacgatgtgaaagacgtcggcgtggacagcgcaggcgcgaaagcgggcctgaccttcctggttgacctgatcaagaacaagcacatgaatgccgacaccgactactccatcgcggaagcggccttcaacaaaggcgaaaccgcgatgaccatcaacggtccgtgggcgtggtctaacatcgataagagcaaggttaactacggcgtgaccctgctgccaacctttaaaggcaagccatcgaaaccgttcgttggcgtgctgagcgcggggatcaacgccgccagcccgaacaaagagctggccaaagagttcctcgaaaactacctgatgaccgatcagggtctggaagccgttaacaacgacaaaccgctgggtgccgtggcgctgaaatccttccaggaaaaactggaaaaagatccgcgcatcgctgccaccatggcgaacgcccagaaaggcgaaattatgcctaacatcccgcagatgtctgccttctggtatgccgttcgtaccgcggttatcaacgccgccagcggtcgtcagactgtcgatgctgcgctgaaggatgcccagagccgtatcactaagtaa

SEQ ID NO: 259889 - DNA, 1545 bp, Klebsiella pneumoniae
atggatgccgttaaaaagagacactggtggcaaagcccgcaactcacatggtctgtgattggcttactgtgcctgctggtgggttaccttgttgttttgatgtacgcccagggggagtacctgttcgccatcatgacgctgattttaagctcagttggcctgtatattttcgctaatcgcaaggcctatgcctggcgctatgtttatcccggcctcgccggcatgggcctgtttgtcctgtttccgctgatctgcactatcgctatcgcgtttaccaactacagcagcaccaaccagctgacctttgagcgtgcgcagcaggtgctgatggatcgttccttccaggccggcaaagcctataatttcacgctgatcccggcaggcgacgagtggaagctggccctgaccgatggcgagagcggtaaaaactatctttccgacgcctttaaattcggcggcgagcagaagctggcgttaaaagaaactgacgccctgccggaaggcgagcgcgccaacctgcgcgtcattacccagaaccgcaccgcgctgaaccagctgaccgccgtactgcctgatgacagcaaagtgatcatgagctcgctgcgccagttctccggcacccaaccgctgtatacgcttggcgaaaacggcgagctgaccaacaatcaaacccacgtcaaataccgcccgaacaacgacgttggtttctaccaggcaatcaacgccgacggtagctggggcacagaaaagctgagcccgggctacaccgtgactatcggctgggataactttacccgcgtcttccacgatgaaggcatccagaaaccgttcttcgccatcttcgtctggacggtggtgttctcggttctgaccgtggtgctgaccgtcgcggtggggatgatcctcgcctgcctggtgcagtgggaagcgctgaaaggcaaagcgatttaccgtgtcctgctgattctgccgtatgccgtaccgtcatttatttcgattctgattttcaaaggcctgttcaaccagagctttggtgaaatcaacatgatgctcagcgcgctgttcggcattaaaccggcgtggtttagcgacccgaccaccgcgcgcaccatgatcatcatcgtcaacacctggctgggctacccgtacatgatgatcctgtgcatggggctgctgaaggcgattccggacgatctgtacgaagcgtcggcaatggatggcgccggcccgttccagaacttctttaaaattaccttcccgctgctgattaagccgctgacgccgctgatgatcgccagcttcgcctttaactttaacaacttcgtcctgattcaactgttgaccaacggcggtccggaccgtctcggcaccaccaccccggccggttataccgacctgctggtgagctacacctaccgtatcgcctttgaaggcggcggcggtcaggacttcggcctggcggcggctatcgcaacgcttatcttcctgctggttggcgcgttagcgattgtgaatctgaaagccacacgcatgaagtttgattaa

SEQ ID NO: 259890 - DNA, 891 bp, Klebsiella pneumoniae
atggctatggtccaacccaaatcgcagaagctacgtttatttaccacgcatctcctgctactgatttttatcgccgcgattatgtttccgctgctgatggttatcgctatctcgctgcgcgaaggcaacttcgccaccggcagcctgatcccggataccatctcctgggaacactggcgtctggcgttaggcttcagcgtcgaacacgcggatggccgcgtcacgccgccgccgttcccggtcctgctgtggctgtggaactcgattaaggtcgccgggattaccgcgatcggcatcgtcgccctctccaccacctgcgcctacgcttttgcccgtatgcgcttcccggggaaagcgaccctgctgaaagggatgctgattttccagatgttcccggcggtgctgtcgctggttgccctgtacgcgttgtttgaccgcctgggccagtacatcccgttcgtcggcctcaacacccacggcggcgtgatctttgcctacatgggcggtatcgccctgcacgtctggacgattaaaggctacttcgaaaccatcgatggctcgctggaagaagcggcggcgctggatggcgcgaccccatggcaggcgttccgcctcgtgctgctgccgctgtcggtgccgattctggcggtggtctttattctgtcgttcatcgccgccatcaccgaagtgccggtcgcctcgctgctgctgcgcgatgtgaacagctataccctggcggtaggcatgcaacagtatctcaacccgcagaactatctgtggggcgactttgccgccgcggcggtactctccgccatcccaatcacggtagtgttcctgctggcgcagcgctggctggtgaacggcctgacggcgggtggggtgaaaggttaa

SEQ ID NO: 259891 - DNA, 2391 bp, Klebsiella pneumoniae
atgtcacagactacatttaacaaagctcagtttcaggctgcactgacgcgtcagtggcagcattttggtttacagtccgcttccgagatgacacagcgtcaatggtggcgcgcagtcagcggagcgttggcggaactcctggcggcgcagccggtagcgaaaccggcgcaaggacagcgtcacgttaactacatctcaatggagtttctgattggtcgtctgaccggcaacaacctgctcaacctgggctggtacgagggcgtcagcgacgcgctgaaaggctacgatgtcaacctcaccgatctgctggaagaagagactgacccggcgctgggtaacggtggcctgggacgtctggcagcctgcttcctcgactccatggcgacggtggggcagtcggcgaccggttacggtctcaactaccagtatggcctgttccgccagtcatttgacgatggccagcagatggaagcccctgacgactgggggcgcagcagctacccgtggttccgtcataacgaagcgctggatgtccaggtaggtatcggcgggaaagtcagcaaaaacggcgaatggcagccggcgttcgtcattaccggcgaagcctgggacctgccggtgcttggctatcgcaacaacgtcgcccagccgctgcgtctgtggcaggccaaacacgctcatccgttcaacctgaccaaattcaacgatggcgatttcctgcgcgccgagcagcagggcatcgacgcggaaaaactgaccaaagtgctgtacccgaacgacaaccatcaggccggtaaaaaactgcgcctgatgcagcagtacttccagtgcgcctgctcagtggccgatatcctgcgccgtcatcatctggcaggccgcaagctggccgaactggcggattacgaagtgatccagctgaacgatacgcacccgaccatcgccattccggagctgctgcgcgtgctgatcgacgagcaccagctgagctgggacgacgcctgggcgatcaccagcaaaacctttgcttacaccaaccacaccctgatgccggaagcgttggaatgctgggatgagaagctggtaaaagcgctgctgccgcgccatatgcagatcattaaagagatcaacgaccgctttaaacagctggtggacaaaacctggccgggcgataagcaggtctgggcgaagctggcggtggtgcatgacaaacaggttcggatggccaacatgtgcgtggtgggcggctttgctgtcaacggcgtggcggcgctgcactcggatctggtggtaaaagatctgttcccggaatataaccagctgtggccgaacaaattccataacgtgaccaacggcatcacgccgcgccgctggatcaagcagtgcaacccggcgctggcctcgctgctggatgagacgctgaaaaaagagtgggccaatgacctcgaccagctgatcaacctggaaaaatatgctgacgatgcggcgttccgtcagacttatcgcgatatcaagcaggccaacaaagttcatctggctgagtttgtgaagcagcgtaccgggattgagatcaacccgcaggcgatcttcgatatccagatcaaacgtctgcacgagtataagcgtcagcaccttaacctgctgcatatccttgcgctgtacaaagagatccgcgaaaacccgcagtccgaccgcgtaccgcgcgtcttcctgttcggcgcgaaagcggcgccgggctactatctggcgaaaaacattatttttgccatcaataaggtagcggaagcgatcaacaacgacccgaaagtcggcgataagctgaaggtggtcttcctgccggactattgtgtatcggcagcagaaaaactgatcccggcggcggatatctccgagcagatctccaccgcgggtaaagaagcctctggcaccggcaacatgaagctggcgctgaacggcgcgctgaccgtcgggacgctggatggcgctaacgtggaaatcgctgagcaggtgggcgaggagaacatctttatcttcggccacacggttgaagaggtgaaagccctgaaagcgaaaggctacgatccgctgaaatggcgtaaaaaagacaagctgctcgatgcggtgcttaaggagctggagaacggcacctacagcaacggcgacaagcatgccttcgatcagatgctgcacagcctgctgcagggcggcgatccgtacctggtgctggccgatttcgaagcctacgtagcggcgcaaaaacgggtagatgagctgtatcgcgacgaggaggcctggacccgcgcggctatcctcaacaccgcgcgctgcggcatgttcagctccgaccgctcgatccgcgattatcagcaacgtatctggcaggcgaaacgctaa

SEQ ID NO: 259892 - DNA, 2094 bp, Klebsiella pneumoniae
atggagagtaaacgcctcgataatgccgcgctggcggcgggcatcagccccagctatatcaacgcgcacggcaagccgcagtctatcgcggctgtcaccaaacagcgcctgctggatgcgatgcatcgctctaccgccgccacgaaagtggcggttaacccgctgccgaacgtgaaaattttcactcacggcaaaaaaatgtcgctgccggtggcaggacgcggtgagtatcagtggatcctgactactgaggacggtaagcagtatcaagggaaaacccgcggcggcgagacgctgccgctgccggccaaactgccggaggggtaccactccctgaccctcacccaggagggggagcgctggcactgccggactatcgtcgcgccagcccgctgctatgagccgcagccgctgaaagaggggaaaaagctgtggggcacctgcgtgcagctgtataccctgcgctcagagaaaaactgggggatcggcgattttggcgatctgcgggccatgctgccggaaatcgcccgccgcggcgggtcgtttattggccttaacccgattcatgccctctatccggcgaacccggagagcgccagcccctatagcccgtcttcacgtcgctggctgaacgttatttatatcgacgtcaacgcggttgaagatttccagcgtagcgaagaggcgcaggcgtggtggcagtctccggcaacgcagcaggcactgcaggcggcgcgggaaacggacgatgtggattataccgccgtcactacgctgaaaatgaccgcgctgcgtatggcgtggaaacaattctctcgtcgtgaagatgagcagatggcagcgttccgcgagtttgttctgcgcgaaggggaaagcctctactggcaggcggctttcgatgcgctgcacgcctggcaggtacaacaggacccgctgcgctggggctggccggcctggccgaaggcctttcaggatatcgacagcccggaggtgaaagccttctgcgtcgagcatgaggatgacgtcagtttctatctctggctgcagtggctggcctggagtcagtttgccgcctgctgggaaaccagccagcgtgacggcatgccgatcggcctctaccgcgacctggcggtgggcgtcgccgagggcgggtcggaaacctggtgcgatcgtgaactgtactgcctgaaagcatccgtaggcgcgccgccggatattctgggcccgctgggccagaactggggcctgccgccgatggatccgcatatcattgccgcccgcgcctatgagccgtttatcgacctgctgcgcgctaatatgcagaactgcggcgcgttgcgcatcgatcacgtgatgtctgtgctgcgtctgtggtggatcccgtatggtgaaaccgccgaccatggcgcttacgttcagtatccggtcgacgatctgctgtcgctgctggcgctggaaagccagcgtcatcgctgcatggtgatcggtgaagatctgggcacggtaccggtggagatcgtcagcaagttacgcaacagcggcgtctattcttataaggtgctctattttgagagtgatgcagagaaaacgttccgcgcgccggcgctgtacccggagcaatcaatggctgtggcgacgacgcacgacctgcccactctccgcggctactgggaaagcggcgatctgacgttaggtaaagcgctgggcctctatcctgatgaggtggtgctgcgcggactgtaccaggaccgcgagctggcgaaacaagggctgctggacgcactgcataagtacggctgtctgcccaagcgcgccggccataaggcctcgctgatgagcatgacggggatcctcaaccgggggatgcagcgttatattgccgacagcaacagcgccctgctgggcctgcagccggaagactggctggagatggcgacgccggttaacattccgggcaccagcaccgagtacccgaactggcgccggaagctgtccgtcaccctggagcagatgtttgccgatgaacgggtcaataagctgattaaggatctggataaacggcgcaaggcggcgagcaagaaagccgcctcctga

SEQ ID NO: 259893 - DNA, 1317 bp, Klebsiella pneumoniae
atgccattagtcatcgttgctatcggggttgccctgttgttgctgttaatgatccgtttcaaaatgaacggcttcattgcgctggttctggtggcgctcgccgtcggattaatgcagggtatgccactggataaagtgatcgtctccatcaaaaacggcgttggcggcacccttggcagcctcgcgctgatcatgggcttcggcgctatgctcggtaagctgctggcagactgcggcggcgcccagcgtatcgccaccacgcttatcaataagttcggtaagaagcatattcagtgggcggtggtcctgaccggcttcaccgttggcttcgccctgttctatgaagtgggcttcgtgctgatgctgccgctggtgttcaccatcgccgcctcggcccgtattccgttgctgtacgtcggcgtaccgatggcagccgcgctctccgtcacccacggcttcctgccgccgcatccgggtccgaccgcgatcgccaccatcttccatgccgatatgggcaaaacgctgctctacggcaccattctggctatcccgacggttatcctggcgggaccggtgtttgcgcgcttcctgaaagggatagataagccgatcccggaaggcctgcataacccgaaagtgttcactgaagaagagatgccaggctttggcgtcagcgtctggacctcgctggttccggtgatgctgatggcgatgcgcgccgtggctgagatgatcctgccgaaaggccacgccttcctgccaattgccgagttcttcggcgacccggtgatggccaccctgattgcggtactgattgccctgttcaccttcggtttgaaccgcggccgctccatggagcagatcaatgataccctgacctcttcgatcaaaatcatcgccatgatgctgttgattatcggcggcggcggtgccttcaagcaggtgctggtggatagcggcatggataaatacatcgcctctatcatgcacgaatcgaacatgtctccgctgtttatggcgtggtctatcgccgcggtgctgcgtatcgcgctgggttcggcgaccgtagccgccatcaccgcgggcgggatcgccgcgccgctgatcgccaccaccggcgtcagcccggagctgatggttatcgccgttggctccggcagcgttatcttctcccatgttaacgatccgggcttctggctgttcaaagagtactttaacctgaccatcggcgagaccatcaagtcctggtcggtgctggaaaccattatctcagtctgcggcctagtgggctgtctgctgctggggatggtggtgtaa

SEQ ID NO: 259894 - DNA, 576 bp, Klebsiella pneumoniae
atgatccgtatttccgatgctgcacaagcgcactttgccaaactgctggcaaatcaggaagaagggacgcaaattcgcgtatttgtgattaatcccggcaccccaaacgctgagtgcggcgtatcctactgcccaccggatgcggtggaagacaccgacacggcgctgaaatttgaacagctgaccgcctatgtcgatgagctcagcgcgccctatctggaagacgctgaaattgatttcgtcactgaccagctcggctcgcagctgacgctgaaagcgccgaacgccaaaatgcgcaaagtctctgacgatgccccgctgatggagcgcgtcgagtacctgctgcagtcgcagattaacccgcagctggcgggccacggcggccgcgtatcgctgatggagatcaccgacgacggtctggctatcctgcagttcggcggcggatgcaacggctgctcgatggtcgacgtgaccctgaaagaaggtattgaaaaacagctgctgaacgagtttccggagctgaaaggggttcgcgatctgaccgagcatcagcgcggcgagcactcctactactaa

SEQ ID NO: 259895 - DNA, 675 bp, Klebsiella pneumoniae
atgctaacagcacacagcttatgctggctatgccaaatgccgctggcagtcgcccgctgggggatctgctcccgctgcagccgcgccctgctcgcctgtcccccgctctgcccgcagtgcggcctgccggcggcggcatcccgtcacccctgcggccgctgcctgcaaaagccgcctccctggcatcggctggtggcggtcaatgactatcgcccgccgctgagcggtctggtgcagcagctgaagtttcaccatcgcccggagctgggggccgccctcgcgcgtctgctgctgcagcgccttctgcagcgtgacgatttgccgccagtagacgctctggtcggcgtgccgctatggcatcgccgtcgctggcgccggggttataatcagtgcgacgaactgtgccgaccgttagcccgctggcgaggatgcgtctggcatcgcgaaggcctgactcgccagcgagccggcgccgtccaacattcgctcaatgcccgccagcgcaggcagaacctgaaaaatgcctttcagcttgaatttgccgtgcagggactccatatcgctctggtggatgatgtcgtcacgaccggcagcaccgtcgccgagatatcccgcctgcttttgcgaaacggcgccgcgacggttcaggtatggtgtttgtgccgtaccttgtag

SEQ ID NO: 259896 - DNA, 774 bp, Klebsiella pneumoniae; identical to SEQ ID NO: 135068

SEQ ID NO: 259897 - DNA, 270 bp, Klebsiella pneumoniae; identical to SEQ ID NO: 223340

SEQ ID NO: 259898 - DNA, 240 bp, Klebsiella pneumoniae
gtggcgtcgttaatggaagtccgcgatatgctggccctgcagggccgcatggaggcgaaacagctcagtgctcgcctgcagacgcctcagccgctgattgacgccatgcttgagcgaatggaagccatgggtaaggtggtccggatcagcgaaacgagcgagggctgcctctccggcagctgtaaaagttgccctgaagggaaagcggcgtgccggcaggagtggtgggcgctgcgatga

SEQ ID NO: 259899 - DNA, 2319 bp, Klebsiella pneumoniae
atgcaaaaattaaccgttggtttaattggtaatcctaattccggcaagaccaccttatttaatcagctgaccggcgctcgccagcgcgtgggcaactgggctggggtgaccgttgagcgtaaagaggggattttcgccaccactgaccaccaggtcacgctggtcgacctcccgggaacctactccctgaccaccatctcctcgcagacctcgctggacgagcagattgcctgccactacatcctgagcggcgacgccgacatgctgattaacgtggtcgatgcctccaacctcgagcgcaacctctatctgacgctacagctgctcgagctggggatcccctgcgtcgtcgcgctgaacatgctggatatcgccgaaaagcagcaggtgcggatcgatatcgacgccctcgccgcccgtctcggttgcccggtcattccgctggtatcgactcgcggacgggggatcgaagcgctgaagatcgccctcgaccgtcatcaggcgaacagcgatcttgagctggtccactatccgcagccgctgctgcgcgaagctgacctgctggcgcagcagatgtcagcgcagatcccgacccggcagcggcgctggctgggtctgcagatgctggagggcgatatctacagccgggcctatgccggcgacgccgccgataaactggatatcgccctggcgaatctcagcgacgagatcgacgacccggcgctgcacatcgctgacgcgcgctatcagaccatcgccgccatttgcgacgccgtcagcaataccctgaccgccgaaccaagccgcttcaccgccgcgatggacaaagtgatcctcaaccgcttcctcgggttgccgatttttctctttgtcatgtacttgatgttcctgctggcgatcaacatcggcggcgcgctgcagccgattttcgatgccggctcggtcgcgatctttgtgcatggcattcaatggctgggttacaccctgcacttcccggactggctgaccgtgttcctcgcccaggggatcggcggcggtatcaacaccgtgctgccgctggtgccgcagatcggcatgatgtatctgtttctctccttccttgaggactccggctacatggcgcgcgccgcctttgtgatggatcgcctgatgcaagccctcggcctgccggggaaatccttcgtcccgctgattgtcggttttggctgcaacgtgccgtcggtgatgggcgcccgcacccttgacgcgccgcgcgagcgtctgatgaccattatgatggcgccgtttatgtcctgcggcgcgcggctggcgatcttcgccgtcttcgcggccgccttctttgggcagaacggcgcgctggcggtcttctcgctctatgtgctgggcattgtgatggccatcctcaccggcctgatgctgaagcacaccattatgcgcggcgaagcctcgccgttcgtgatggagctgccggtgtaccacgtcccgcatatcaaaagtctgattatccagacctggcagcgcctgaaaggctttgtgctgcgcgccgggaaggtgatcgtcatcgtcagcatcttcctcagtgcgctgaacagtttctcactgagcggtaaggtcgtcgacaacatcaacgactccgcgctggcctcggtgagccgggtcattacgccggtgtttaaaccgatcggcgtgcatgaagataactggcaggccaccgtcggcctgtttaccggcgcgatggcgaaagaggtggtagtgggtacgctgaacaccctctataccgccgaagatatccagaatgaggaattcaatccgcagaccttcagtctcggcgaagaactgctcgccgccgtcgatgagacatggcagggactgaaagacaccttcagcctcagcgtcctggccaaccccatcgaagccagcaaaggcgatggcgaaatggccaccggcgccatgggggtgatgggcagtaaatttggcagcgcagcggcggcatacagctacctgatcttcgtcctgctctatattccctgcatctcggtgatgggcgccatcgcccgcgaatcaagccgcggctggatgaccttctccatcctgtgggggctgaatatcgcctattcgctctcgacgctctattaccagaccgttagctttagcgatcacccgcgctacagtctggtgtgtatcctggcggtagtgttgttcaacgtggtgctcttcggcctgttgcgccgggcgcgcagccgggtggacgtctcgctgcttgccacccggaaaacgccggcctcctgctgttccagcccggctggcgattgccactaa

SEQ ID NO: 259900 - DNA, 228 bp, Klebsiella pneumoniae; identical to SEQ ID NO: 135073

SEQ ID NO: 259901 - DNA, 408 bp, Klebsiella pneumoniae
gtgctggatattctcgagcaggaaggcgccgatttacgccataccgtgctgtgccatatgaatcccagctttgccgataagcgctaccagcgcgaactggcgcagcgcggggcgtttctcgaatacgacatgattggcatgagctattactacgccgacgagtcggcgcagtcgccctccgacgaggagaacgcccgcgcgatccgcgagctgattgacgacggctacatccagcaaattctgctgtcgcaggacgtcttcctgaaaaccatgctcacccgctacggcggccacggttatggctacatactcaagcattttgttccccgtctgcggcgccacggcgtcagcggcgaacaacttgaaaccttaatgattggaaacccccagcgggtctttggcggataa

SEQ ID NO: 259902 - DNA, 1416 bp, Klebsiella pneumoniae
atggcaggaaataaacccttcaacaaaccacagacagaaacccgcgaacgcgatccgcagctcgccgggctgaaagtcccgccgcactcgattgaagcggagcagtcggtgttgggcggtttaatgctggataacgagcgctgggacgacgtcgccgaacgcgtcgttgccgacgacttttatacccgtccgcatcgtcatatctttaccgagatggcgcgcctgcaggagtcgggcagcccgattgacctgatcacccttgcggagtcgctggagcgtcagggacagctggacagcgtgggcggcttcgcctatctggctgaactgtccaaaaatacccccagcgcggcaaacatcagcgcctatgccgacatcgtgcgcgaacgcgcggtcgtgcgcgagatgatctcggtggccaatgaaatcgccgaggccggcttcgacccgcaggggcgaaccagcgaagatctgctcgacctcgccgagtcccgcgtctttaaaatcgctgaaagccgggccaataaagacgaagggccgaaaaacatcgccgatgtcctcgacgccaccgtcgcccgtatcgaacagctgttccagcagccccacgacggcgttaccggggtcaacaccggctacgacgacctcaacaaaaagaccgccggcctgcagccgtcggatctgattatcgtcgccgcccgtccgtcgatgggtaaaacgaccttcgccatgaacctcgtggaaaacgcagcgatgctgcaggacaagccggtactcatcttcagtctcgagatgccctcggaacagatcatgatgcgttctctggcctcgctgtcgcgcgtcgatcagacccgcattcgtaccggtcagctggacgatgaggactgggcgcggatctccggcaccatgggcattttgctggaaaaacgtaacatctatatcgatgactcctccggcctgacgccgacggaagtgcgttcccgcgcgcggcgtatcgctcgtgagcacggcggcatcgggctgattatgatcgactacctgcagctgatgcgcgtgccgtcgctctccgacaaccgtaccctcgagatcgccgaaatctcccgctcgctgaaggcgctggccaaagagctgcaggtgccggtggtggcgctgtcgcagctgaaccgctcgctggagcaacgtgccgataaacgcccggtcaactccgacctgcgtgagtccggctctatcgaacaggatgccgacttaatcatgttcatttaccgtgatgaggtctatcacgagaacagcgatctgaagggcatcgcggaaattatcattggtaaacaacgtaatggcccgatcggcaccgtgcgactgaccttcaacggccagtggtcgcgtttcgataattatgctggccctcagtatgatgatgagtaa

SEQ ID NO: 259903 - DNA, 1080 bp, Klebsiella pneumoniae
atgcaagcggcaactgtagttatcaaccgccgcgctctgcgacacaacctgcaacgtctgcgtgaactggcgcctgccagcaaactggttgcggtggtgaaagcgaacgcctacggacacggtcttcttgagaccgcgcgaacgctgaccgacgccgacgcttttggcgtcgcccgcctggaagaggcgctgcgcctgcgagcgggggggatcgcccagccgatcctcctgctggaaggcttttttgcggcggaagacctggcggtgatcgccgctcagcgtctgcatacggcggtgcatagccccgaacagctggcggcgctggagcaagccgatctccccgagccggtaaccgtgtggatgaaactggataccggtatgcatcgcttaggggtgcgcccggaggaagctgaggcgttttatcagcgtctgagccagtgcaaaaacgtccgccagccggtcaacgtggtcagtcacttcgcccgcgccgatgagccgacctgcggcgccaccgaacggcagctggatatcttcaccacctttaccgaaggcaagccgggatggcgctctattgccgcctcgggcggcatcctgctgtggccgcagtcgcattatgactgggtgcgtccgggcattatcctgtatggcgtgtcgccgctggacgatcgctccaccgggaaagattttggctgtcagccggtgatgaccctgacgtccagcctgattgccgtgcgcgagcataaagcaggggagcccgtcggctacggcggcacctggatcagcgaacgcgacactcggctcggcgtggtcgcgatgggctatggcgacggttatccgcgcgccgcgccgtcgggcaccccagtgctggtcaatggccgcgaagtgccgattgtcggccgggtggcgatggatatgatctgtgttgacctcggcccgcaggccgaggataaagccggcgacgcggtggtgctgtggggagagggactcccggtagagcgcatcgccgagataacgaaagtgagcgcttacgaacttattacgcgactgacctcccgcgtcgccatgaaatacctcgactga

SEQ ID NO: 259904 - DNA, 1194 bp, Klebsiella pneumoniae
gtgtttcaaaaagttgacgcctacgccggcgacccaattctttctctgatggaacgcttcaaagaagacccgcgaagcgacaaagtcaacctgagtatcgggctgtattacaacgatgacggcattatcccgcagctgcaggcggtggcggaagcggaagcgcgcctgaacgccgagccgcacggcgcctcgctgtatctgccgatggaagggctgagcggctaccgccaggtgattgccccgctgctgtttggcgcagagcatagcgcgcttaagcaaaaccgcatcgcctccattcagacggtcggcggttcgggcgcgctgaaggtcggggccgacttcctcaaacgctactttcctgagtctcatgtctgggtcagtgacccgacctgggaaaaccacatcgccatatttgaaggggctggcttagaagtaagtacttacccctggtttgataaagccaccaacggcgtgcgctttgaagcgctgctggcgacgctgcaaacgctgccggcgcgcgacattgtgctgctgcacccctgctgccacaacccgaccggcgccgacctgacgccggaacagtgggatcgtgtggtggagatcctgaaagcgcgtcagctgatcccgttcctcgacattgcctaccagggctttggcgcagggctggaagaggatgcctacgccattcgcgccatcgccagcgccgggatgccgatgctggtcagcaactctttctccaaaattttctccctgtacggggagcgcgtcggcggcctgtcggtggtctgtgaagacagtgaaaccgcaggccgcgtgctgggccagctgaaggccaccgtgcgccgcaactactccagcccgccgagctttggcgcgcaggtggtggcgacggtgctgaacgatgccgggctgaaagccacctggcaggcggaagtggacgccatgcgcgcgcatatcctgaccatgcgtcaggcgctggtcgacgcgctgcagcaggttgctccgggcagcaaagtggattatctgctcaagcagcgcgggatgttcagctacaccggcttcagcgcggcgcaggtggatcgcctgcgcgacgagtttggcgtctacctgattgccagcggacgtatgtgcgtggcggggttaaactcacgtaatgttcagcaggtagcgaaagcctttgccgcggtaatgtaa

SEQ ID NO: 259905 - DNA, 2826 bp, Klebsiella pneumoniae
atggataagatcgaagttcggggcgcccgcacccataatctcaaaaacatcaacctcgttatcccgcgcgacaaactcattgtcgtcaccgggctttccgggtctggcaaatcttcactggctttcgacaccctgtatgccgaaggccagcgtcgctacgtcgaatcgctctccgcctatgcgcgacagttcctgtcgctgatggagaagccggacgtcgaccatatcgaagggctgtcgccggcgatttccatcgaacagaaatcaacctctcacaacccccgctcgacggtgggtactattaccgaaattcacgactacctgcgtctgctgtacgcccgcgtcggcgagccgcgctgtccggaccacgacgtgccgctggcggcgcagaccgtcagccagatggtcgataacgtcctcgcccagccggaaggcctgcgtctgatgctgctggcgcccattattaaagagcgtaaaggcgagcacaccaaaaccctggaaaacctcgccagccagggctatatccgcgcacggatcgacggcgaagtctgcgatctctcggatccgccgaagctggagctgcagaagaaacacaccatcgaggtggtaattgaccgcttcaaggtccgcgacgatctggcgcaacgtctggccgagtcgttcgaaaccgcgctggagctctccggcggtaccgccatcgtggccaatatggatgatgagaaagcggaagaactgctgttttccgccaacttcgcctgcccgatctgcggctacagcatgcgcgagctggagcctcgcctgttctccttcaacaacccggcgggcgcctgcccgacctgcgacggcctcggcgtgcagcaatatttcgaccccgatcgcgtggtgcaaaatccggagctgtcgctggcgggcggcgccatccgcggctgggatcggcgtaacttctactacttccagatgctgaagtcgctggcggagcactacaagttcgacgtcgaagcgccgtggggcactctcagcgccagcgtgcagaaagtggtcctgtacggttccggtaaagagaatattgaattcaaatacatgaacgaccgcggcgacacctcggtacgccgccatccgttcgaaggcgtgctgcataacatggagcgccgctacaaagagacggaatccagcgcggtgcgcgaagagctggcgaagttcatcagcaatcgcccgtgcgccagctgcgacggtacgcgtctgcgccgcgaggcgcgccacgtgtttgtggaaaacaccccgctgccgaccatttccgatatgagcatcggccacgcgatggacttcttcaacaatctgaaactctccggccagcgggcgaaaatcgccgaaaaagtgctgaaagagattggcgatcgcctgaagttcctcgtcaacgtcggcctcaactacctgacgctctcccgttcggcggaaacgctctccggcggcgaggcccagcgtatccgtctggcgagccagattggcgccggactggttggcgtgatgtacgtcctggatgagccctccatcggcctgcaccagcgcgataacgagcgcctgctcgggaccctgatccacctgcgtaatttaggcaacacggtgatcgtcgttgagcatgacgaagacgccattcgcgccgccgaccatgtgatcgatatcggccctggggccggggtccacggcggccaggtggtggcggaagggccgctggaggccattatggccgtcccggaatccctgaccggccagttcatgagcggcaagcgcaaaattgaagtgccgaagcagcgcgtgcccgccgatccggagaaagtcctcaaactgaccggcgcgcgcggcaacaacctgaaagacgtgacgctgactctgccggtgggcctgtttacctgcattaccggcgtctccggctcgggtaaatcaacgctgatcaacgataccctgttcccgattgcccagcgtcagcttaacggggcgaccatcgccgaaccggcgccgtatcgcgatattcaggggctggagcacttcgataaagtcatcgatatcgaccagagcccgatcggccgtacgccgcgctccaaccccgcgacctataccggggtgtttacgccggtgcgcgagctcttcgccggggtgccggaatcacgttcccgtggctatacgccgggtcgtttcagttttaacgtccgcggcggtcgctgcgaagcctgccagggcgacggggtgatcaaggtcgaaatgcacttcctgccggatatctacgtaccgtgcgaccagtgcaaaggtaagcgttataaccgcgaaacgctggagattaagtacaagggcaaaaccatccacgaagtgctggatatgaccattgaagaagcgcgcgagttctttgatgccgtaccggcgctggcgcgtaagctgcaaaccctgatggatgtcggcctgacctatatccgtctcggccagtcggcgacgacgctgtccggcggcgaggcgcagcgcgtgaagctggcgcgcgagctgtccaagcgcggtaccggccagacgctgtatatcctcgatgagccgaccaccggtctgcacttcgccgatatccagcagctgctggaagtgctgcaccagctgcgcgatcagggcaataccatcgtggtgattgagcacaacctcgacgtgataaaaactgccgactggattgtcgatctcggcccggaaggcggcagcggcggcggcgaaattctggtttccggtacgccggaaaccgtcgctgagtgcgaagcctcgcacaccgcgcgcttcctgaagccgatgctgaaataa

SEQ ID NO: 259906 - DNA, 273 bp, Klebsiella pneumoniae
atgtccaccgcgaggctctccatctgcccctgtaccgacggcagggccagcgccagtgcctctttgatggcgtggacgtccggcgcgcagtggagcttcgcggcaatcaccgccagctgcgccgggtcgtggttggagagcaggccgccgaagccaatcggcagcagcagtaacggctcgaacttcttcgcaatcgccagccagagcagcagcaggctgaccagcagcatgatggcctggccggcgccgaggtgcatcagccccatgccctga

SEQ ID NO: 259907 - DNA, 510 bp, Klebsiella pneumoniae
  misc_feature (397)..(406): n is a, c, g, or t
atggcgattatcgccgagtatcagcagcggctggtcggctgcggtgctatcgccggcaatgtgctgaaatgcatcgccatcgatccctcgctgcagggggaggggctgagccttaaattactgaccgagctcctgacgctggcctatgagctggggcgcagcgaactgtttttgttcactaaaccttgcaatgccgcgttattttccggcgccggcttctggccgatagcccaggcgggcgaccgcgccgtgctaatggaaaatagccgcgaacggctgactcgttactgtcgacagctggcgatgtaccgtcagccgggaagaaaaatcggcgctatcgtgatgaatgccaatcccttcaccctcggccaccgctggttggtagaacaggcggccnnnnnnnnnncgactggctgcatctgtttgtggtcaaagaagatgcgtcctgcttttcctatcacgatcgcttcaagctcattgaacaggggattaccggcatcgataaggtga

SEQ ID NO: 259908 - DNA, 318 bp, Klebsiella pneumoniae
atggctaaacgtatgcaagacaaagagagcattgccgggatgtcctggctggttctgctgatcattgcttgctggggtggacttgtccgctacctgatagatgtgaagcagagcaaggcaacatggagcttgatcaatgctcttgcccaaatggtggtttcagggtttaccggcgttattgctggcctggtgagcattgaaagcggactgagcatttacatgattctggcaaccgcggggataagcggcgcgatgggttccgtagcgttgacctatttctgggaacgcctgacggggattaaaaatgctggaaattaa

SEQ ID NO: 259909 - DNA, 471 bp, Klebsiella pneumoniae
gtgcgggtaagcatccagccgccgctcggggctgggaatgcgcacctggcgcagggcctccagcgccctgtcccgggccgcctggcgcgacagcccttcgtggcggcgcaacccttcaataatctgctgcccgacggtgtagaccggatcgaaggccagcagcggctcctgaaaaatcatcgcgcagcgtccgccgcgatagcgccgcagctggctggcgctcatcgtcagcacctcgtcatcccccacctgcagggtgccggagagctcactgctccctggcgggtgcaggcgcatcagcgcccgcagggtcacgctcttgccggaacccgactcgccaatcagcgccatcacctcccccttttgtacctcaaaggagactccattgaccgcgttgatggtctgcccgtcgcggcgaaagacgacccgcaggtcgcgcacatggacaaaggcgttatccgacatggctga

SEQ ID NO: 259910 - DNA, 288 bp, Klebsiella pneumoniae
  misc_feature (224)..(233): n is a, c, g, or t
atggtggatacggcaacgacgaaagcggtcccggccgcagcggcccacgctacccggcaaggttactggcgcggcgtgctgcgccgcctactgcgcgaccccggcggggtggtggtgggcgtggtgatcctcctgctgctggccctggcgctgttcggtccgtggcttatcgtcaaagatccctatcaaacgtcgatgttcctgcgcctgaaacccatcggcannnnnnnnnngatggcttcccgctgggctcggatgagctgggacgcgacatgctgtcgcggctga

SEQ ID NO: 259911 - DNA, 744 bp, Klebsiella pneumoniae
atgtacctgctttatcgctcacgtcacgttgttagctggctacccgcccttgtcgtcgccggatgtttactgtttgtcagccagcaggcagtgctgcaggtcaaaccgcattacgacgatacggtcatggaactgtcgctggctgaacccgaaccgccgcagccggagcctgtcccggaaccgcagccggaaataccgccgcaaattcaacctgagccggaaccggaggcggtcgctgaacccgtcgtttctgcgccagaacccattatccaggccaaaccggttgttaaaccgaaagccaaacccaggcccaaaccggttgtgaaggaaaaagcgccgaaaccgcaggcgatcgcggctccgcagcccgccgccgttcgtcgcccggcgagtaaaccggccccgccgccttctcccccggcgccgaaggcgaacgcgcaggcggtggaaaacggctatctgcaggcgctgcgccgggagctggagcagcgcaagcgctacccgagcggccgtcaggcttcgctggagcgcccgcagggcaacgtggaggtctggctggaggttgaccgcagcggcagagtgctggcttccggtattgccagcagggcgccgaacatgctgctcaatcgcgctgcgcttagttccctgcaaagcatcagccagctgaagcccttccctgaagaggcttttgccggacaaagcagcaaaaaatttaccgcgacgtttaattatcaggcgccataa

SEQ ID NO: 259912 - DNA, 1299 bp, Klebsiella pneumoniae
atgcgtttcacggaagcctgcttactgaaaacggagaacaacatgacgacactcagtgaaccgttggttaccccgaaatatggcaaatggcgccagctggtgctgggtttgatctgtatggccgccatttccagtccgcaatatgtctggacgctgttgacaaaacccctggccgctaaactgggcgtgggtttgccagaattgcaggtcaccttctcgctgctgatcatcctgcagaccttcttttccccttttcaggggcggttagtggaaaagtttggcccacggcggctgatcgctattggcacggtgatggcgggaatgagctgggtgctttccgcgcaggtgaatggcctggcaacgctctggctggtttatggctgcatgggcggcctcgggaccgggatcgtctacatcggcgttgtcggcctgatggtcaaatggttcccacagcagcggggatttgccgccggcgcggtggcggcgggctacgggatgggggccatcataaccaccttccccatctccctgtcgctgaccactaacggccttgaacacacgatgacgactttcgggatccttttcgccctcgtcggcttcctcgccagtcaggggctgaagctgccgccgcccgctgtctcccagcccgtcagtcagacggtggcgcagagcagcagatcgtttacttcccgggaaatgctgcgccagccgctgttctggctgatgttcgccatgatggcgatgatgtcgacttccgggctgatggtcacttcgcagatggcggtgttcgccgaggatttcggcattagccaggcggtggtgtttggcatggcggcgctgccgttggcgttaacgatagaccgcttcaccaacggattgacccggccgctgtttggctttatttccgaccgcttcggccgcgagcaaaccatgtttatcgcctttgcactggaaggcgtggcgatgatgctctggctggcgtgccgggaagatccgctgctgtttgtcctgctctccggggtggtgttctttggctggggggagatcttctctctcttcccgtcgacactcaccgatacgttcggcagcgagcatgccgccaccaactatggctggctgtatatttctcagggcatcgggtcaatctttggcggtccgctggcggcactgctctatcagtacacccacggctggcatgtagtcttcagctgcgcgattggccttgattttatcaccgccgccctcgcgctgtgggtgctaaaaccgtggcgcgcgcggtttatccgccagcacagctaa

SEQ ID NO: 259913 - DNA, 1059 bp, Klebsiella pneumoniae
gtgattttggtgaagagtttcgacgcggacggtagcccgaaagaaaaacgacgtaaaggaacgggtaagataaccctgaccgaggtggctgagtttgtcggtgtgagcgccatgaccgtctcgcgagcgctgagaatgcctgaaaaagtgaatcctgagcttcgcgatcgcatcgatgcggccgtcagtcaactcggctatgtccctaatctgcaggcacgtaatctggcctcggtccattccgatcttattctcgccgtcgttcccaccttctcttcgccgggttttttgccggtctctgaagcgctgcaaaaagtgctgaccgaacgcggatataccatgatgtttatggaatccgggcatgacggtcaaagtgaacaaaagacgtttgaaaaaatgctcgcctataacccggcggccattattcagttcaatatcgataccattgagagctgcacccagttgctggccaacgtggatgttcctattctggaaattggcgcgctaaatacccaccctgtgggtatgtgcatcggcgtggattacggtaaggccgtaaaacagctcgtgactcatctggccgacgcctcattaaaaaacatcgcactgctctgtaccccggctaataacacaatgtttcgccagttgctgagcggttggaatacggcgatgctcgctctgaaccgctccccgcaccgggtggtaaccacgcatttgccatccaccattgccacaggggtgaatattttcaaggatatgatgatcacctggggcgatctggatgcgctaatttgcacatcggatgaaatggcgtgtggatgcatgatggcctgccacagcgccgggatcaaagtgcccaataccgtagccattgcgagtttaggcggtggggtattatcgacagtctgttcccctgccctgacaaccgttgaatttccctggcatgacattggggtgaaggccgggaaagcgcttctcgacctgctcaacgataaaccttgtgaaaagtttattgaaattccgtcagtactcaaagtccgggccagtaccgcggcatga

SEQ ID NO: 259914 - DNA, 438 bp, Klebsiella pneumoniae
atgatcagagactggttaaccccggataaaattaaagtcattaactcaatagatagctgggaaaatgccgttcgacttgcagcagaacccttgctgatgcaagggtatatagccgggtcgtatattgaggcgattttgcaaagccataaagaacttgggccctattacgtattagctcccggcttggcgatgcctcatgcccgtcctgaacagggggtgttaagaaatggattatcgcttcttcatattaaagaaggggtgtcgttcggctcgtcagagaacgatccggtatacgtggtaatcatactatgcgctcgttccgggaatgaacatatcacgatgattggtgaactggctgaaatctttagcgatcagcaaaagttacaccgattgttaaatgccgatgatagcaaggcgattcaggccgttattgactga

SEQ ID NO: 259915 - DNA, 267 bp, Klebsiella pneumoniae
atgaaaaaagtgcttatcgtgtgcggtaatggtttaggcagcagcttcatcgttgaaatgaatgtcaaaaagatccttgccgaaatgaataaagaagctgaagtcgcacataccgacctgacgtcggcaaaaagcgaaactgccgatcttattcttagcgccaaagacattgcagaacatcttagcagtcactctgcaaaggtcgttggattaagtaatttacttgataacaataaaattaaagaaattttagcagagaacatttaa

SEQ ID NO: 259916 - DNA, 468 bp, Klebsiella pneumoniae; identical to SEQ ID NO: 259831

SEQ ID NO: 259917 - DNA, 267 bp, Klebsiella pneumoniae; identical to SEQ ID NO: 24084

SEQ ID NO: 259918 - DNA, 276 bp, Klebsiella pneumoniae; identical to SEQ ID NO: 101446

SEQ ID NO: 259919 - DNA, 219 bp, Klebsiella pneumoniae; identical to SEQ ID NO: 101445

SEQ ID NO: 259920 - DNA, 459 bp, Klebsiella pneumoniae
ttgaaaaacaccggctccgttcgtctgctgaatattattgatgatttcaatcgcgaggccctggcaatagaagtcgatttttcccttccggccagtcgggtagtcagaactctcgaacaactgattgaatggaaagggaaaccggcatcgattcgatgtgacaacggaccagaatatgcaggtaacactctgatagtatgggctgaacgacaaaatatcatcctcaattttattcagccggggaagccacaacagaatgcgtatattgagcgttataaccggacagtgcgttatgactggctggggcactatctgttttattcgctgagtgagttacaggaatacgccacacaatggcaatggttctataatcacgaacgaccgaatatggcactgaatggcttcacaccaatgcagcatattcagcgcttatctgattctacttatctgcccggttaa

SEQ ID NO: 259921 - DNA, 603 bp, Klebsiella pneumoniae
atggcgctagaattacaacttatcaaacaccattcaggaatactgatcccggctacgcccgagaccagggatatcctgcaatcaaaaacccggctcggcgatattcttgttgccgagttcaggcgggtacgaaacccggcatttcaccggcgctttttcgcgcttctcaatctcggttttgaatactgggaaccaaccggcggggctatctcgagtaacgagaggaagctgattactggctacgccaagttcctggcttcgtatgccggcaatgagggcgcgctgatcgatgctgctgagcattatcttgagcaggttgcataccgccgggtcacaaatggcattagcctgtgcaaatcctttgacgcttaccgctcctgggtgatcgtcgaagcagggcactttgatgccattcagctgcctgacggcacactcaaaaagcatcctcgtagcatttctttcgcaagcatggacgaatgcgagttccaggaactgtacaaagcatcgctggatgttctctggcggtggatcctctctcgttcattcaacagcctgcaggaagctgagaacgccgcaaaccagcttttaagcttcgcggggtga

SEQ ID NO: 259922 - DNA, 318 bp, Klebsiella pneumoniae
atgagtaaagcaaaagagaaaatagataataggatggcttaccatcttcaacagcttgcacaactaagagcaaagaaaaaagaagaagagagcaaagaaaaagtagctgaaagaaaaaaaagagcgagtaaaaatattttgcttggttcttctatctgtaaagttttaaatattgattacactcaaatagacgaatatttgccttctgttattggatatttagatttaaaaaaacagaacttaagaaatagtgtgtatgccgatagaggtaatgaacttttagagagctggaaaaatgacggcgacagaaacgagtaa

SEQ ID NO: 259923 - DNA, 492 bp, Klebsiella pneumoniae
gtgatcggcatgcagcaccaggatctggttcatcgcctgctcgataaccggattgagaacgtatttttccgccgggatagcaaacagcatctgcaggaaattaccggcataggagagatcgttgcgcggatacgctgcgggttgctcaatggtgtacttgtagctcatggcggcgatagtgggcattttcgacagcagccgggtggcggccagcgcccggtgctgcggattttccacgtccaggacgtcatgataaaacgccgccagcgcccccaccagggcgcacatcagcgccatcgggtgcgagtcgcgacgaaagccgctgcacatgcgggctatctgctcatggaccagagtatggcgggtgatggtctcgcgaaaggtttgatagctggcctcatccggcgcgtcaccgttcagcatgatgtaggccacttcgagaaaatcgcactggcgagccagctgatccaccggatagccgcggtgcaatag

SEQ ID NO: 259924 - DNA, 747 bp, Klebsiella pneumoniae
atggattataagagtaaaaatcgctactacagcgccacgctgagtcgtctgctctcccacacccggcagcaaaaaaccaccgctgacctgcggatcgccaagagcacctcgcattattacttcggcggcagtgagctactggtgatgcgcaagcagaacccctcatgggaattcaccctcaaccaccagcactactttaacaaaaagattgttgatgccagcatcggcatccagcgcagcctgccgtggctcagctcgacagcaacgccggaagagcaggccgggctgtatagcccgctgtcgcggattgtgcatggtaatctgcaggcaatgatgaaatttgacgccaccggcgacaaatttacctgggctccccgcctcagcgcccagttcagcccggacaaactcgcttccgataataaattcaatattggtagtcgctggagcgtgcgcggttttgacggtgaaaacagcctgtccggcaatcagggatggtactggcgcaacgattttatctgggatctggccacccacgagcggcaattctatttgggcgcggatataggccgtcttatcggcgccgatctatatcaaaaaggcaaagtgctctccggcgccgtcagcgggctgcgcggtcagctatggtcaacgcagtacgatctgtttattagtaccccgctgagtaaaccggataagtttcatagcgacgccctgaatatgggcttttcattacagtggaggtattaa

SEQ ID NO: 259925 - DNA, 693 bp, Klebsiella pneumoniae
  misc_feature (670)..(679): n is a, c, g, or t
atgttaattcgatctcgcacgctcaccgggctgctgtttatcacgctggcgggcacctcagccgccggggccgcgccattggcctcttctactcaccagacggagcaggataaagcccgccaggaggcgctggcgccgcagcaacaggattttcagtcttcacaacagcgcgtggcgccgcaggggatcccttttcctgaggaaacgcattgcaaattgatcaaccgggtcgatatcgactccgataaccaggcgctcacccggaaattactggcgaaaaccgcacggcaggcgcagggacgctgtctgggtagcgaaggcattcgcctgctggcctataccttgcaaaatgagctgatcgcgcaaggctacatcacctcgctgattgatgtgccctcccagtcgctggagcacggcatactcaggttcacgctgcactatggcaaagtgggcgctatcgactatgccgacggctcggacaccacccgcctgtggaattccctacccacctcttccggtactatcctgcgcttaagcgaccttgagcaagggatggccaacctgcagcgtctgcccggcgccaccgcgcacatgaaactgttgccgggccaacacgagggagaaagcgatatccagatcgcccgcagcctggcgaaaaaatggcagcttnnnnnnnnnnggcgcctggcttga

SEQ ID NO: 259926 - DNA, 336 bp, Klebsiella pneumoniae
atgatcgacgataataagccgcacaattgcggtaataccgatatagacgaaatagcgcagtggaaagtgaaaaccggattcaaaatatttaacaatcagcgcgataaactcaaagtagagaaaatagaccaccagcccttcgaccagcttgtacttactcaccggctccggcgtaaacagtacgtgcgccagatgcagggtctccttacccaggaacaccaccagaataattcccaggcacagcagtgccagattcagcacggcctgcatggccttcgcaacgaaattaaccagcggacgatataccgacggcatagtgacacctcaaatgcatga

SEQ ID NO: 259927 - DNA, 153 bp, Klebsiella pneumoniae
atggtgatgatggccggcagaacggtgaccggcacgaagcgtagcgttttggtcacccgctcggacatctggatcttgccggccaggccgataaacgagaaacggatgagaaaagtcaccgcggccatgcccagcgtcagcgcgataaaatag

SEQ ID NO: 259928 - DNA, 816 bp, Klebsiella pneumoniae
atgagggtgttgaccaattttacgaaatcctttcaacagcgagagaaaataaaaaatctaatcagaggaattaagtataggactctttttttaccagctgttcggcagttgttcactgattacaagaaaaaatcgcaagaaattattaatagtgttggagcgggaatattgattgcagagggagagaaagatattattgagagtgattttaattgtgtattgaaacgcagcattttagtgaagaatggagttgatctaaagaacttatcgattaaaagagccagctttgaacgcgatatagatatactaatttgtggcaggattgagtcacgtaaaaatagtttagctgttgcgcgttttttagccggaacatcttataaagcaacatttgtgggagcattaaataataacgataaatcatatgcgaatgagtttctttcaataattaatagaagtgataatttatcttatttaggcagggttaatcctgatgatatgcctgcaatttattgtagaagtaaaattcatttatctgccagttggtttgaggttgcatcattggttgatttagaagcttatgcatatggatgccatgtcatatcttctgtatatgggcatacaaatagctatcttaaagatagagcctattacctagatccaaaaaacttatcatcattaaattctatattagaagccttgaacactaaagaagctgattgtgaagaacagttttcatttatctcgaataattttacttgggaaaaatcctatactcaactatttaatggattaaacgaaattaatcttaatcaataa

SEQ ID NO: 259929 - DNA, 1401 bp, Klebsiella pneumoniae
gtgcaggcgctcagccagcagaccacggctcgcgaacaaaaacagcaggccactaatcagcaactgagcgagcagctggcgaagcgcgccccggacgatgggtttacctttaacgcctacgcccgttccgggatgttagtcaacagccatggtaaaggcgcccgcggcgggccgggcgtctccccggccagttcgctcaacggcgatgcccatgtcggtcgtctcggtaacgaaaaagataattacgctgagctgagctttggcaaaaagctcaccttcaacgatggttcatgggcgcgctttaagaccatgctcgccgacggggccaccaacccggatccgtgggttcaggataacgacagccaccatctgaacattcgtcagctgtacgtcgagatgggtaactttgccgaattcaccggtccgttaaaacgcgcctcaatttgggccggcaagcgctttgatcgggataacttcgatatccactttaccgatagcgacatcatgttcctcggcggtaccggcggcgggatcaatgatgtcgactggggaagcggcctgcgcggcgactattcggtgtatgcacgtaacttcggcgaccttggcagcgataattacgcggataatgacatccagaatctgctgttcaccgccaaccatttttacggcaactggcaactgatgaccacggtgatgaccgcccagggcaacgatgatctgaaagataatacctcgaccaccgggagctatgccctgcgcagcgataacaccgccaaaaacggctactacgcgatgctggccctgcacgacaaacaacagttctacggcctggcgccgggggtgtcggaaagcgccctgcaatacggcgtcgggctgggcgccgaagcgcgtcagccggggagcgatggcgatctgaccgagaacgcggcctccctgcgctttgcgtcgtatggcatcctgccgttggggaaaaactggcagctggcgccgtcggtgatagcccagcatagcgaagaccgctatcgcgacggcgaccgctacgactgggcgacgtttaacctgcgggtatcacaggggatctccgctcacttcgccctgctgtatgaggcctcgtggcagtatatggatctcaatccgaacgggcgcagctatcgctataatgacaacgtttatcagtatcaggcggtgcgcggtgatttctacaagctgaccttcgcccccacctttaaagtgggtgatgtgctggatatcaaggcgcggccggaaatccgcttctttgccacctggatgaactgggataaagcgctggatcgctacgcgataaatgacgatttcggcagcaaaggctttaccgccggcgggacatggaacttcggcgtgcagacggagatttggttttaa

SEQ ID NO: 259930 - DNA, 759 bp, Klebsiella pneumoniae; identical to SEQ ID NO: 232152

SEQ ID NO: 259931 - DNA, 285 bp, Klebsiella pneumoniae
atgaacgcataccgcgcatacgacgtgatcgaagagcgtaagtgggccgagcaaacgctcaccgaagagaagcaaaagtgggttgacgatcgggcgcaggaaattatcgacgcgctgccgaaagagccgtcaggcctgttccgcttctctgtgccgatggacaaaagcccatacgaaggcctccgcagcgattccgccggagaggcatataacgatttcatttcggcagttgcttacgcccaggcggaatacgactgggatcaccgcaccggctgcccgttttaa

SEQ ID NO: 259932 - DNA, 540 bp, Klebsiella pneumoniae
atgacagccacccccgaactgggggaaaccttcgccattgtggaagcgcccggcgcggtgggggcccgggtggctaaccgccctggacagccgattaaccgccagggttttacgatcatcccttacctcgatccctttaccgctaactggctggatctcgatccgcagggtctgaacgaccatgtggagattgtctccagcagcacgacggtggtgcccgattcgggcgcggcggtgaaggtcaaatttgtcacgcgtaccggctatccctggtttgcccatgtcacgctgccggatggcgcggcgcccccgctgggcgcggaggtgttcgacgacaacggtcgggcggttggcgccgtcggtcagggcgggctgctgtatgcccgggtgccgcaggaccacggcagcgtctcggtagtatggggcgaacgcagcgggcaacgctgccggttggcctatgccatccgcgacgacgcggtgcagcaggttagcagcggcacgccgcatcaggtctgccggccgggaataaaggagaagtaa

SEQ ID NO: 259933 - DNA, 225 bp, Klebsiella pneumoniae
atgagcgaaacaatctggctggaaccttcaaataataagacggtttatctgcaaatcaaaaatacctctgataaggatatgagtggcctgcaggcaaaaattgccagcgccgtcacttcaaagggatatcaggtcgtcagtaacccggatacggcgggctactggatccaggctaatgtgctcaaggccgataaaatggaccttcgtgagggctttgttgaataa

SEQ ID NO: 259934 - DNA, 147 bp, Klebsiella pneumoniae
atgaagcttaataaagtcatggctgtgatggtcgtcagctctgcgctggtgttatctggatgtagtgcaatgggaaccgctattaaagagaaatctggaagtaaaaacccagatgagcgaaacaatctggctggaaccttcaaataa

SEQ ID NO: 259935 - DNA, 798 bp, Klebsiella pneumoniae
gtgcggtttgcaaaacagctggataaagagacatggggttttgaagatccttcaattaaaggcacatttgtctggtcccggtctgccgggcagggaaaatttgagtggggagccagtcagacgactgttcatgacgggagcactggcggctctaccacaccacctacacccattccggaaccgcggagcgtctggggattgcctaacccggccccggcatcgttaccgcccgtaccgggaacgccgatcccggaggaacagggaccaaatattgaaacattgcccatcgaagaccgggatttcaatgactttattattgttgacccgatgggggttgtcccggcaatctatgtgtattttaagaaggctcctgccggatttctagaaaccggttattataacgactttgatgggaggtcaagagaaggaatgtacgaggttgaccatttaccatcaaaagcggcggttagagaatatttgattaataaatatcctgaagcagaaaaggatgatataaaaaaattacttggtaaggttgcagtcgtttctatccctatagatgtacatcgtgactgtagtgaaaccttcagagggcgtaataatagtaggatagaaacagaaaatggtgagacaatatctaaaaaagaacttgatgctcgtgatttagaatttgccgttgactcgaattggaatgctaatgctaagtgtcttaaagaaagatatggcataagtgatgaaaaaattgaagaagttagagcaaaattgcatgacttaaacagaagagtggggttgtactaa

SEQ ID NO: 259936 - DNA, 327 bp, Klebsiella pneumoniae
atgaatattgatatcgaaacacttgtgaagcaattgggtaaagattatcaggaaatttatgatagtgggctaattaaatataagacaaaaccaactgccacagtgggctatgatacagctacattagatacgaaacgagaaggattatttttatctttcgagaatgataaaaataaaaccttcaaaggaattacattaacattagaagatgatgacataacagactgggtctttccgaattcaatgccttttaatcttgaaccggtaatgactcaaaactggatgcgtgagcgttttgggttcccaatgatttatggcgagccataa

SEQ ID NO: 259937 - DNA, 351 bp, Klebsiella pneumoniae
gtgacaacaatcctgacacagggggtgactctgacggtactgatgactctgacggctctgatgactctgacggctctgatgactctgacggctctgatgactctgatgactctgatgactctgatgactctgatgactctgacggctctgacggctctgatgactctgacggctctgatgactctgatggctctgatggctctgatggctctgatggctctgatggctctgatggctctgatggctctgatggctctgatggctctgacggttctgatggctctgatgaccctgacggctctgacggttctgatggctctgatgactctgacgtctctgatggttctgtaa

SEQ ID NO: 259938 - DNA, 423 bp, Klebsiella pneumoniae
gtgtcgcagaacggccagctcgctgcgttcatggccggccagctcctggacggtcacctgctcggcgcgccagcggcgcgggcgggcgctctcctggccgtcatcaagattgccgccgctggcgctgagcagcggcagagcgagcagaacctccaccctgtcctgcatcacgtccgatacatcgcggaccggtggcaaaatatccgccagctcggtgtcaatcagcgttccgtcggcgaaacgcacgatcagccgggtagcgttgagccgggaaagggtgagcgcgctcgcgtcaaactccgcgcgcaataccccccacgggtgggcgagcgccatgcgggagaccgtatcggcgacgtgcgcgtcccagcgggcctgttgctgaaactgctgcgggaccagaaaagccccgtcgcgccataa

SEQ ID NO: 259939 - DNA, 1317 bp, Klebsiella pneumoniae
atggcagaaacaacgtttaccctgtggcggcagcgccttggctatggcattgccgatctctcctgcaaccttgtgtggcagatgatctctctgtatctgatgttcttttacaccgacgtcatgggtctcccggcctattatgtcggcctgatgttcctggtcacccggctggtagacggcgtggccgacgtgctgatggggctggtgatcgacaataccaccacccgctgggggcgctgccgcccctggctgctgatcggcgccctgccttttggcctgctgtgtattctggccttttatgtgccggatttcggcaccaccggcaaactgctgtacgcctttgtcacctatctgtgtctgtcgttcctctacaccctggtgaatattccgttctgcgccatgctgccgtttttaaccagtgattccgcagaacgcaccacgctgtcggcggtgcgcattttgctgggctcccttggcgccaccatcgtcgccgtggctacgctgccgctggtcggcatgctaggcaaaggcaaccagcagcagggattcctctataccgcggtgatttttggcgtactggcggcctttttcctgctggtgagctttcgcaacgtcgaagaaaagatcacccttaccggggagcgcatgaccctgaaacgcgcctggattagtctgcgcgccaatcgtccgtggtgggtcttcgccagcaatatctttctgatgtggggtgcctttttctttcagaccggggccctggtgtacttcttccattattacgtcgggaataccgagctgacggcggttatcgccgggatctccaccttcgttcccctgctcggcaccctcaccgtcccgctgctggcccgacgcatgaaaaaacgtcatgtctatctggtggccagcgcggtcaatttgctcgggatggggattatgatggtgtctggcgcccacgttctgggactgatcgtcggggccgtgatcctctccctcggcgccggccaacgcacggctatctatttctcgatgcaggccgacccggtggattacggcgtgtggaaaaccgggattaatatccccggcgtgctgctctcctccagcggctatatcgccaaccacacgcagagcgacagcgccctgttggccatcaaggcctgctatctatacattccggcgctattgatcctcgcctcgatgctgtggatgggccgcttctaccgcctcgacgatcagtatgagcagattcgtgccgaccttgatgccggacgcggcgcctcgccagccccggccccgaccgccggagaatctcccgccatgtaa

SEQ ID NO: 259940 - DNA, 477 bp, Klebsiella pneumoniae; identical to SEQ ID NO: 216071

SEQ ID NO: 259941 - DNA, 501 bp, Klebsiella pneumoniae
atggctcggtattcaccagaacgtaaagaagcgatccttaaaaaattattacctcctcacaacttaacggtcgcagaggtcgctcgggaagaaggcatcgcggtgcaaaccttgtatcattggcgagatattgccagaaaagaaggtcgccccgtgccaggtaaaacattaacagccgatgattggtcggctgaagcaaaacttgccgtgattattgaaacagcgccgctgtcggaagcggagataaaccagtattgccgtgaaaagggcttgttccgcgagcaagtacagcagtggaaacaggattgtttagctggttttcaaacctcagaagtacaaactaaaaccattaaacagcaggctaaggctgacaaagccgaaatcaaatcgctgcaacgggaattgcgctataaggagaaagcgctggctgaagctgctgcgttactggtgctcagaaaaaagctcaatgcgctctggggggacgacagcgaggagagctaa

SEQ ID NO: 259942 - DNA, 921 bp, Klebsiella pneumoniae
gtgcaagctgatttaaggccaacagcagctcgaccagagccagcaaataaactcgaagaacatgagcgacaacagatattaagtgtgtgcaatcaagcggagtacgccagcttacccccgtcgcaaattgtgccaacattattagataacgggatttatatcgcctcggaatccagcttctacagagtgttaaatgctcatggtcaacttaaccatcgtggccgcactcaggctgcggtcaatcgaagcaaaccgttgagttatcgggcagatgggccgaatcaagtgtggtcatgggacatcacttatttagcctcaatcgtcaaaggccagttctactatttgtacctgtttgaagatatttacagtagaaaaatagtgggttacgaagttcatgagcaagaaagtggggaatatgccgctgcgctaatccaacgctgtctgttacgcgagcaatgctttaacacgccattagtgctgcattctgataatggggcgccgatgaagtcactgaccatgaaagccaagctggaagagcttggtattacggcatcattaagtcggccgcgggtgagtaatgacaaccccttttcagagtcgttatttaaaacgttgaaataccgcccacagtggccggcatcaggttttagctgcttagcaacagcaagagaatgggtggaaaagtttgtaacctggtacaacgatgagcataaacacagccagctaaattttgtctcaccagggcaacgtcatgcactgcaagatggcgctattttagcgaagcgcaagaaagtgcttgaggcggcgaaggaaagaaaaccgatgcgttggtctacagagatcagaaattgtgaagcggttggcgctgtaacactcaacccagataaggcaccagaagaaggcgtaataaatgcagcttaa

SEQ ID NO: 259943 - DNA, 537 bp, Klebsiella pneumoniae
atgaaggtagaaaaaagcgatgttctggcgtttaccatttccgatgttgatcgcctcgaccctgtcagggtgatgattgaaaactacgagccggggaagggccgcatcactgtcacctgcttcggaaaggcgtggaccggcgcctggtttgctatgggcggagacaccgttcaggaattcattaagcgtgtcagcaatgactaccttatcggctatttcgacccgcaactgcaaagcacagttgatgatgataacgacgcaaaccttgaattcgtaaagggtgaaatcatcaaactccggcgtcagcaggaaatcgatgctgatgaagccagggatatgtgggaagaggcagaaagcgctgagaatgtgaaggaaaactgctgcgattgtcgcattggtaataagttgcctggtctgcttggtgatgagccgtggtatgcaaaatggccagcagtgccaaaccacaattatcagtacctcgaacgcatcattgattcggtacgtgacgggctagcagaactggagcgtgcagcatga

SEQ ID NO: 259944 - DNA, 675 bp, Klebsiella pneumoniae
atgctgaaactccgcattacatccgacgatttccaatccctcgataaagctctgcaacccctctacgttgaacagtctgacggctacgcgctgaacgtcgaacaggacgaaaccgccgccgctggcctgaaagcgaagaacgccgagctgctgactaagttggccggagagaaagagcgccggattaccgcagaggcgcagttaaaggtggttaacgaaaccgttgccgggcacgaccagaaaatcaaccagatcgccggagagcgtgacagctaccgcgctggactggaaaaatccctcattgacgagccattagcagcgttcatgcgctctaacttcattgacggatcagatgattttgtggtgccggtgctgaagaaattcttccagcttcaccgaaacgatgatggaacctatgagagcgccattttcatcaacagcgatgatggcagcggccagaaggaagtgagagcagacgttgaacagctgcgcaaacacttacacgctgacggcaaacttgattgggttctgaaagcgtcagggaactgcggcagcggtagtgcgcaatctgtcagcattaattcgccaaccactcaccgctacgagccaggcccgggcggacagcaggatctcaccagtcaggctcgtgaaatcatcggacagaaagaacagtaa

SEQ ID NO: 259945 - DNA, 321 bp, Klebsiella pneumoniae; identical to SEQ ID NO: 233321

SEQ ID NO: 259946 - DNA, 723 bp, Klebsiella pneumoniae
  misc_feature (593)..(602): n is a, c, g, or t
atgtttggcgcttgcctgatgggcaatgcgccactggtggccgactgcatcaaggcgatgcgcgatgtggtgtcgattccggtcacggtgaaaacccgtatcggcattgacgaccaggacagctatgagtttctgtgcgatttcattgagacagtctccggcaagggcgagtgtgagatgtttattattcacgcccgcaaagcctggctctccggcctgagtccaaaagagaaccgcgagatcccgccgctggattacccccgcgtctggcagctgaagcgcgatttcccccaccttacgatggcgatcaacggcggcatcaaatcgctggacgaagccagagtacagcttgagcatatggatggggtgatggtcgggcgtgaggcctatcagaacccgggcattctggcctcggtcgaccgcgaaattttcggcgtcgccggcgcggatgctgatccggtagcggtggtgcgagccatgtacccctatattgagcgcgagctcagcaagggcacctatctgggccatattacccgccatatgctggggctgtttcaggggatccccggcgctcgccagtggcgtcgctaccnnnnnnnnnngtttcaggggatccccggcgctcgccagtggcgtcgctacctgagcgaaaatgcgcataaagccggcgccgatattgtagtgctggagcatgccctgaagctggtggcagataaacgttaa

SEQ ID NO: 259947 - DNA, 243 bp, Klebsiella pneumoniae; identical to SEQ ID NO: 212505

SEQ ID NO: 259948 - DNA, 201 bp, Klebsiella pneumoniae
atgggtgaggaagaacttcactttgttcagcagcccatctttgaggctatttgcggcttcaacgaggcttgccgtttcgacttcgccttcctgaccatcggcattcacgaacatgccgacgccttcttctggagtaccggcgcccggctcatcgagcaggatagcgatatggtcgaactgcatattgcgagcgatccatga

SEQ ID NO: 259949 - DNA, 330 bp, Klebsiella pneumoniae
atgatcgatgatgatcaaacgcacaatcgcggtgatgccgatatagacgaaatagcgcagcgggaagtggaaccccgactgaaaatacttgacgatcagcgcgataaattcgaagtagagaaagtagaccaccagtccttccaccagccggtacttactggtcggctccggggtaaagaggacatcggccagatgcagcgtctctttaccgaggaagacaatcaggataatccccaggcacagcagccccagattcaaaaccgtttgcatcgcagtggcgataaaattcaccagtgggcgataaaccgacgacatattcacacctcataa

SEQ ID NO: 259950 - DNA, 156 bp, Klebsiella pneumoniae
atgggcgtcgcgaccctggtctgcgggccgggcagcatggcccagggccataaggccgatgagtacatcagcatcgaccagaccgaacgctgcatggcgatgctgggccagctttgcgcctggatgcgcgccgaaccggcggaaccgcttacctga

SEQ ID NO: 259951 - DNA, 366 bp, Klebsiella pneumoniae
atgcaccagcgacggaatactgttgcgtcgggcgcgcagcggcgggatgacgatctcaaaggagtgcagcgcatagtacagctggcggctaaagcggttctgttccaccagattggccagatcgacggtggtggtggcaatcaccttcacatccaccgggatcaggcgccgggcgtcgaggcgggtgagcacgccctgcttaattacctgcagcagggccgactgcagctccggcgccagatactcgatcttttccagaaacagggtgccgccgttggccagctcaaggcggctcaggcgaccattttcatcgtcggtaggggcgctgcccataaaatcctggcccagcacgctgtcggcatatag

SEQ ID NO: 259952 - DNA, 390 bp, Klebsiella pneumoniae
gtgctgaccctgcgtgaaggcgaggacgtcgcgctggtggccaccggttcgacggtgcatgaggtggtggaggcggcgcagcagcttgccgacctcggtatccaggcgaaagtggtcagcgtgccgtcgattcgcccctgcgataccgcggcgctgctggcggtgctccagccatgtggttcggtgatcaccgtcgaagagcataacgtcaacggcgggttgggtagcctggtggcggaagtgctggcgggagcgggcgtgggcattgccctgcagcggttggggatcccggacggggagtacgccgccgccgccgatcgcggctggatgcgtcagtaccatgggtttgatgccgccgccatcgttgccctggtgcaaaaaagagactga

SEQ ID NO: 259953 - DNA, 420 bp, Klebsiella pneumoniae
atgctgactttcaaaggtgacttcgacgtgattcaggccgcgggcgtgtttgatggcgcggcgcagcagcgccgggagggtcaccagatcggcgatatttttcccctggctggcctgagcatcaagatgcagcagtctcgccgcctgaacattgagaaactgcagcacgccctgttcgttccacgccatcaccccatcgtccatgctctccagcaggccgtacatctgattaaggtgacggttggattccgccagcaggctgtcggtaagcagggagttacccacctcgcgggcgatggccagcgtcagggagaggtcggcgctggactggtgctcgaccagacagcaaagcgagatagagccgaacagccgcccgtggttatcaaacaccggcgtcgagcaaaaactccatggctgtag

SEQ ID NO: 259954 - DNA, 423 bp, Klebsiella pneumoniae
gtgtactacagcctggtagagaacgatctgttcaagaacgccgagcagctctacaagctgggcgacattgccgtgttcactgatggcctgaacgggcgctttcttgtcactgattacgttccgtcaaatacagcctatggcatggtgaatggcgcagtaatcatcgacaacggctaccagtccaagtttgttgcacagccgcaactgggcggggaatctcttaccacgatgatgcaaagcgagggggagtttaagattgccgtgaagagctaccgcattaagtccacactggctgatgcgctggctaacacgatatcgatcaccgctgaccaggtgaaagacccggataactgggaatatgtcgccagcgatgaaagccgcgcacaaccgggggttaaactgactttcacacctaaagcataa

SEQ ID NO: 259955 - DNA, 423 bp, Klebsiella pneumoniae; identical to SEQ ID NO: 103081

SEQ ID NO: 259956 - DNA, 231 bp, Klebsiella pneumoniae
atggagcagtattttctcaacgccgtaccggacaatgcgccgtatgaacatgactatgaaggccctgacgatatgccgtcgcacatcaaatcatcgatgcttggcgtgtcgctaatgctgccggtcgaggacgggcgcgtcaggctgggaacctggcagggcatctggctgggggagcatcggatacacggcggttcgcggcgcatcgttgcgacgctcatgggggaataa

SEQ ID NO: 259957 - DNA, 231 bp, Klebsiella pneumoniae
atggagcagtattttcttaacgccgtgccggacaatgcgccgtacgaacatgattatgaaggccctgatgatatgccgtcgcacatcaaatcatcgatgcttggcgtgtcgctgatgctgccggtcgaggacggacgcgtcaggctggggacctggcagggcatctggctgggggagcatcggatacacggcggttcgcggcacatcgttgcgacgctcatgggggaataa

SEQ ID NO: 259958 - DNA, 324 bp, Klebsiella pneumoniae
atgctggccggtcagggggtaatcgccgcgatggtgggcgcctttgaggccgccaccggagagctggccagccggctgctggccgggctgcgcgccgggatcgtcgccgggggcgaggccgggccggtccactcggcggcggtgaaggtggtggacgattacccgtggccggtggtcgacctgcgcattgactgggcggaggtggatccgctggcggcccttgagcagctgtggctggcgtgggagccgcaaatggaggcctatattacccgggcgctcgacccgcgagaagcgccggcctatggcgtgcctggcgatgaataa

SEQ ID NO: 259959 - DNA, 192 bp, Klebsiella pneumoniae; identical to SEQ ID NO: 101358

SEQ ID NO: 259960 - DNA, 123 bp, Klebsiella pneumoniae
atggatacccgtcccggccgcccgcgggtgatccagtcctgtgacgtgtttgtcgatgcgcaaggcattatctacagcaccgattacaacggcgggctatcggtgattgagtatctggggtga

SEQ ID NO: 259961 - DNA, 504 bp, Klebsiella pneumoniae
atgcacaaaggcccgctggccgatattgccggcatagtttgcacgcacgatggcgccgcgcgtcggaacgacgctctgcgtggtttccggcagctccatatcttcgccaagcgtggagctgtcgagcgtaatatcggtgcgacggtatggtgttacatatgggacgatggcgtagccgcgatagtcggtagaaatggtgttgtcgttagtcagtctgacgttatccagccccggcgctttaaccagtaccgctgcgtcggtgatgtcctgacccagagtgatgccatcggcatgagcaacgatactgccgttggcgccgtagtcaatgcgctcgctgctgcgatcatagctgtagccagcgttgacgctgccgcgggcaccgttataggtcgcccgcatatcgccgctgtagtattcccggttgctgtacccttgctgcaggctccactccaggctatcgttctccagcgcattaccaccgatggaaaccgactgatcggttga

SEQ ID NO: 259962 - DNA, 447 bp, Klebsiella pneumoniae; identical to SEQ ID NO: 135305

SEQ ID NO: 259963 - DNA, 531 bp, Klebsiella pneumoniae
atgactacatccttttcactgcgcacgctctcgcgtgacgatattctccatcacctcccggcattaagcgagatcctggcaagctgcgtcaacggcggcgcctcggtgagctttatgctgcctttcgcgccgcaaacggcgataacgttctggcaacgcactgccgacagcgtgacggccggggagcgcattgtgctggccgccttcgacgcggaggaacgtcccgttggcactgtgcaacttatcaccagtcaaccggaaaaccagccccatcgagcggatgtcgccaaattattggttcaccaaaatgtccgccgccaggggatcgcccaggcgttgatgagcgagctggagcgcattgcccggcgggaaaggaagacggtgctggtgctggacacggcgaccggcagcggggcggaacagttctatgcccgctgcggctgggaaaaagtgggggaaattccgcgctatgcgctgatgcccgacggcgaaatgactgccacctcactattctataagtttctgccctga

SEQ ID NO: 259964 - DNA, 1425 bp, Klebsiella pneumoniae
atgtcttcactgtcgattcggtcatttacgctgtttcgtgaagaacaacccgtgcgcgatgcattggtcttatttacgttaacgctactgctgcattttcttggcgctatgctgcgtctggtgcaggagctctctttcttctggccgctcaatgcagtgatggccgggatttttgcacgctatgtatggcttaaccgcagctatttttatgccgtctgttttgcggcaatgctggtctatgacggattaacctcgcgctggggaatgggctttgcctcattgctgattaacttttccaatattgtctttattgtgacgctggcgcagctggtgctgtgggataaacgtcgcgccgactccatgccgggcccgataaacgcgcttaatttattctgtttctgcctgttagccgccttactgtgcgcagcggtcggcgcgctggggtcggtggatgttgaacgcgccaccttcgttccccagctggcggactggtttagcgaacagttctcgacggcggtattaatcctgccctttattctgaccctgacgctgccttcggcattaagcggttttcgctttcgccagctgctgccggtgctggcgctggtcctgtcaattgcgcttggcgtggcggtaggcggcgcgggcagcattaccttcccgttaccggctttgatctggtgcgctgtacgctatccgctgccgctgacctgtctgctgacttttctcactggcatcggcgaaatactgctggtcgctaattcgttaattcacttttcgccagatgcgcgaatgcagccgtggcagctgttctccacccgcctcggaattgccgccatgctgattagcccggtgattgtcgcatccagtgtcgaagcgattaacacgctggtgaagcagctggccctgcgcgccgattttgactttcagacccgcgtctattctcgttccggactgagcgaagcgttgaagcgtcagacgctgccggcggataagctgctgacggtgatggtgctggatatcgatggcttcaaacgggtgaatgatgctctgggccatgaaggcggcgattgcgtgctgacccagtttgcccagcaggttcgacagctggtgggtgagcaggggatggtggcccgtatcggcggcgaagagtttgcggtggccgccgtcgtcgacagcgcccagcagggctatttgctggcggaaaagatccgtcacggggtggagtcgcagcctttcggcctgggccagaacccgatccacttgaccatcagtctgggactggagacgcgcgaggtaggccacgcccgcatcaccgagctgtttaaccagctgctgttggcggcggacgatgagatggtgaaagccaaacagagcggtcgtaaccaaatttgtatgccgacgctgaccgaaagcgcgccataa

SEQ ID NO: 259965 - DNA, 369 bp, Klebsiella pneumoniae
atggtcgatcaggatcgcttgtttgcgcgcctggcgcgctcgacgtttcgctcacgcttccgtctgggggggaaagagcggcaatattgtctcgataagggaccggaggtcattgatcggcatgccgcagactttattcgccagcggctggcgcccgctgcgccgatcaatgatggcaagcagacgccgatgcgcggtcacccggtgtttatcgcccagcacgcgaccgctacctgctgtcgcggctgcctggaaaaatggcatgccattccccacggccgcgcgctgagcgagccggagcaggactatatcgtgcaggtcatccaccgctggctggtactacaaatgaatgcgccgtctgtgcgctaa

SEQ ID NO: 259966 - DNA, 1389 bp, Klebsiella pneumoniae
atgatgaatttatctgcaacgcacgccgtctccgtcaatccgactaccggtgaggtggtctcctcgctgccgtgggccagcgaacgcgaggtcgacgcggcgatcgcgctcgccgcggcgggctatcgccagtggcgtcagacgccgcttgccgaccgcgccgacgccctgcgccgcatcggggccgcgctgcgcgcccgtggcgaagaggtggcccagatgatcacccttgagatgggcaagccgatcgctcaggcgcgcggcgaggtggcgaaatcggccaacctctgcgactggtacgctgaacacggcccggcgatgctggcgacggaagctaccctggtggaaaataaccaggcggtaatagagtatcgtccactgggcgccatactggcggtcatgccgtggaacttcccggtctggcaggtgatgcgcggcgcggtgccgatcctgctggccggcaacagctatctgctgaagcatgccccgaacgtgatgggcagcgcccgtctgctgggcgaaatttttgccgccgccggcctgccggatggtgtatttggttgggtgaacgccaccaatgacggcgtttcgcagattatcaatgacgaccgcatcgcggcggtgaccgtcaccggcagcgtccgcgccgggaaggcgattggcgcccaggcgggcgcggcgctgaagaaatgcgtgcttgagctggggggatccgatccctttatcgtgctcaacgatgccgatctcgatgaagcggtgaaagccgccgtcaccggccgctatcagaacagcggccaggtgtgtgcggcgtcgaaacgctttattctcgaagccggcattgccgaggccttcacccgcaaatttgtcgacgccgtggcagcgctgaagatgggcgacccgcgcgatgagcaaaactacgtcggaccgatggcgcggttcgatttacgcgatgaactgcaccagcaggtaacggcgacccttgatgaaggggcgactctgctgctgggcgcggaaaaaatcgaaggggcgggcaactactatgcgccaacggtgctgggcaacgtcactgccgggatgaccggctttcgtcaggagctgtttggtccggtagcaaccctgaccaccgctcgcgacgcagaccatgcactggccctcgccaacgacagcgagtttggcctgtccgccacggtctataccaccgacgaggcgcaggcccagcgctttgcccgcgagctggagtgcggcggcgtcttcctcaatggctactgcgccagcgacgcccgcgtggccttcggcggcgtgaagaagagcggttttggccgcgagctgtcgcattttggcctgcacgagttctgtaatgcgcagaccgtctggaaagaccgtcgctaa

SEQ ID NO: 259967 - DNA, 879 bp, Klebsiella pneumoniae
atggacctgactcagctagagatgtttaacgctgtcgccagcaccggcagcattacccaggcggcgcagagagtgcatcgcgtgccgtccaacctcaccacccgcatccgccagctggaggccgacctcggcgttgagctgtttatccgcgagaaccagcgcctgcgcctgtcgcctgcgggacacagctttttgcgctatagccagcagatcctcgccctggtggacgaggcgagaatggtggtggcgggcgacgaaccccaggggctgttttcacttggttcgctggagagcaccgcggcggtacggatccccagcactctggcccactttaatcagcgctacccgaaaattcatctggcgctctcaaccggcccttccgggacgatgatcgacggcgtactggaaggcgccctgagcgccgcgtttgtcgacggcccgctggtgcatccgggcctggaggggctgccggtgttccctgaagagatgatgatcgtcgccccctacggccacgcacccatcacccgcgccagcgaagtgaacggggccaacgtctacgcctttcgcgccaactgttcctatcgccggcattttgagagctggtttcatgccgacagagcgaccccgggcaggatccacgagatggagtcttaccacgggatgctggcctgcgtcatcgccggcgccggcctggcgttgatcccgcgcagcatgctggagagtatgcccggccatcagcaggtttccgcctggccgctggccgaagaatggcgctggctcaccacctggctggtgtggcgccggggcgccaaaacccgccagctggaggcgtttacagcgctgctgaacgaagatcggcaaacagtggtttctccataa

SEQ ID NO: 259968 - DNA, 483 bp, Klebsiella pneumoniae
atgtacaccatcaccgacatcgcccctaccgacgccgaatttatcgccctgattgccgccctcgacgcctggcaggagaccctctacccggcggagagcaaccacctgctggaccttagccagctgccgccgcagacggtcatcgccctggcgatccgcagcccgcagggcgaggccgttggctgcggggctattgtcctcagtgaggaaggctttggcgagatgaagcgggtctatatcgatcctcagcaccgcggccagcagctgggagaaaagctgctggcggcactggaagcgaaagcgcgtcagcgcgactgccataccctgcgcctggagaccggtatccatcagcatgcggccatcgccctctacacgcgcaacggctaccagacccgctgcgcgtttgcgccgtatcaacccgatccgctcagcgtgtttatggagaaaccactgtttgccgatcttcgttcagcagcgctgtaa

SEQ ID NO: 259969 - DNA, 945 bp, Klebsiella pneumoniae
atgcacaccaaagcccgtaaagtgatgattattggcgccggcaatgtcggcgcgtcggcggcctacgccctgctcaaccagagcatttgcgaggagctgatcctcgtcgaccttaaccaacagcgcgcagaggcccacgctcaggacctgagcgacgccgcggcctacctgccggggatgatgaccatctccacccgcgaggccagcgactgcgccgatgtcgatatcgcggtgatcaccgtctccggcggcgcgctgcgccccggccagagccggctggatgaactgacctccaccgcgaagattgtgaagagcattgtgccgacgatgatggccaacggatttaacggcatctttctggtggccaccaacccctgcgacatcatcacctggcaggtatggcagctttccggcctgccgcgcagccaggtgctgggcactggcgtctggctggataccacccgcctgcgtcgcctgctggcgcaagaactggagattggcgcccagagcatcgacgcctttatcctcggcgagcatggcgatacccagtttccggtgtggtcgcactcctcggtatatggcacgccaatcgccgacctctaccagcagcgcaccggcctgccgctcgatcgcgaggcgatggctgacaaagtgcgcaaactgggatttgagatctacgcgggtaaaggctgcaccgaatatggcgtggcagggaccatcgccgagatatgccgcaatatcttcaccggcagccaccgcgcgctggcggtctcctgcattcttgacggcgagtacggggtcagcggcgcggcggctggggtgccggcggtgctggcccagggtggcgtaaagcagatcattgaactgcagctggccggcgaagagcaggcgaagttcagccagtcgatcgcggtgatcaaggccaatatcgcccgtctgccctga

SEQ ID NO: 259970 - DNA, 762 bp, Klebsiella pneumoniae
atgaagggatataaccggttagagcagattatggacttcctgaaaagccataatctggtgacagtcgaccagctggtggcggcgaccaacgcctcgccggccaccattcgccgcgacctgatcaaactcgatcaggaaggggtgatcagccgaacgcatggcggggtgacgctgaaccggtttattccttcccagccgacgacgctggagaaagcccagcgtagtccgcttgagaagcaggctatcgccagtgcggcggcagcgctggtgaaagccggcgacgccattgtgcttgacgccggcaccaccatgattgagctggcgcggcagatcacccatctgccgctgcgggtgatcaccagcgatttacatatcgcgctgttcctatcggaatttaagcagatcgaagtgacgattatcggcgggcgcatcgacgacagcagccagtcgtgcatcggcgatcacggccgccgcctgctgcagaccatctggcccgatctcgccttcgtcagctgcaacggctgggaccttgagaaggggatcaccgccccgacggaggaaaaggccgccctgaagcgcgatctgatggccaatgcccggcggcggattctgctggcggacagctccaaatacggcgcctggtcactgttcaacatcgctccgctggcgtcgttgaccgatatcgtcaccgacgcccacctgccggataaaacccgcgaggcgctggagaccctttccccgcagctgatcattgccgactga

SEQ ID NO: 259971 - DNA, 987 bp, Klebsiella pneumoniae
gtgtctaagatgattgcagtgacaatgggcgacccggcagggattggtccggagattattatcaaatccctcgccgagggggcgctgagcggcgcgccggtggtggtggtgggctgcgcgcagacgctgcggcggatcctggcgctaaatatcacgccgcgggcggagctgcgcatcattgaccatcccgccgaggcgagtttttccccagcgaccatcaacgtcattgatgaaccactcagcgacccgcaggggctgcgccctggcgaagtccaggcccaggcaggggatctcgcgtttcgctgcatcaggcgggcgaccgcgctggcgctggagggcgcggtcgcggccatcgctaccgcgccgctgaataaagaggcgctgcatctcgccgggcacgcttatcccggccataccgaactgctggcccacctgacgcagactaccgattacgccatggtgctctataccgagaagcttaaggttatccatatcactacccatatttccttgcgccagttcctcgataccctcaaccagccgcggattgagacggtgattggcgtggcggatcgctttctgcgccgcgtcggctatccgcgtccgcgcatcgcggtcgccggcgttaacccgcacgccggggagaacggcctgtttggcgatgaagagatccgtatcgtcgccccggcggtcgccgccatgcgggcgaagggagtggaggtgaccggcccctgtccgccggacacggtgtttatgcagtgtcacgaaggcatgtacgacatggtagtggcgatgtatcacgaccaggggcatattccgctgaagctgctgggattctatgacggggtgaatattaccgccgggctgccgtttatccgtacctccgcggatcatggcactgcgtttgatattgcctggacaggtaaagcgaagtctgagagcatggcaacctccattgagctcgccatgcacatcgcgcaggaataa

SEQ ID NO: 259972 - DNA, 1236 bp, Klebsiella pneumoniae
atgaacgacggcaataacagagtgctggtgctggcggatgactttaccggggccaatgacgccggggtcagcctggcggaggcgggtatgtcggtggaagtggccttcaccgccggacagccatcaaccgcccgggcattaattctcaacagcgacagccgggcgatgaccgccgcggcggcggcggacaaggtcgccgctctgctgcgcggcgcggcgacattcgtcccgcactggcaggtaaagaagattgactccacgctgcgcggtaaccccggcggcgaactggaggcaatgatggcggcgcaaggctgccggatggcggtggtggccccggcttatccggcagccgggcggcatacccgggacgggcgctgctatgtgcatggcgtgcccctcgatcagaccgaatttgccagcgatccgaaaacgccggtgagccgggcggagattagcgaaattatcgccatgcagagccgtcttccctgtctgaccctgaacgctggccagcttccggcggcattagcgacggcgggcgaggagaagcgagtgttgattgtcgacgcctgggaagacagccatctggaccaggtgatcgacgccgttgcgccccatgcgcgggagaccctgctggtcggctcggcaggtctctgcgaggcgctggctcgccgcctgcgccgcagcgagcagggcccgctgctggcggtggtcggttcgatgagcgagatggcgcagcgccaggttgctgcgctgcaggtccattcccgagtacgggtgattgaaattgatgtcgaacaggcctttagcggatcgccaaaggaggaagcttcacggatcgccggggcgctgcgcgagggccagcactgcgtggtaaccacccgcccgaatcacgccgtccggcaagggattgaagcccggtgccgtgaacgcggtctcagccgcgccgcctacggggagcacatctgcgcctggcttgccgacgtcacggcgcaggcggtggcgcagtcttcccctggcgcgctgtatctttccggcggcgatgtggctatcgccgtcgcgcacgcgctcggcgccacagggtttcagatccgcggccgggtggcggagtgcgttccatacgggcattttctcggcggccgctggtcgcggccggtgatgaccaaagccggaggattcggcaccgacaccacgctgttacatgttgtgaattttattgaggagaaactgagtgtctaa

SEQ ID NO: 259973 - DNA, 1149 bp, Klebsiella pneumoniae
gtggcgacgatacacagcacaatcatcagcggggctggcgcctcatcggccctgctcccgctgctggccggtaaaacctcaatcctgctggtgaccgacaagaacgtcggggcgctggaggcaacccaggcgattcatcgcctgctggcggctgaagggcgtgaagttgaggtcattgacagcgtgccagcggagcccaaccatcacgatgttacgcagatcgtcagccagctgggcgccagccagccgcagatggtcgttggtatcggcggggggagcgtactggatgtagcaaaactgctttcggtacttctgcaccctgaggcgccctcgctgacgtccctgctggcaggcgagcagccgcaacgacgaatttgctcattgttaatcccggctaccgcgggcaccggatccgaagcgacgccgaacgccattctggcgatccccgagcagcagacgaaggtggggatcatctccccggtgctgcttccggactatgtcgccctgctgccggagctgaccaccagcatgccgcccagcatcgcggcgtcgaccggaatcgatgctctgtgtcatctgctggagtgctttacctccaccgtcgccaacccggtgagcgataacgcggcgttaatcggtttacacaagctggtacgccatatcgagcgttcggtaaatcagccgcaggatctgacggcgaagctggagatgctctgggcctcgtggtacggcggcgcagcgatcaactatgccggcactcacctggtgcatgcgctctcctatccgcttggcggtacctggcacctgccgcacggggtggccaacgccattctgctggcgccctgcatgcgggtggtccgccctcacgcggtggcgaagttcgctcaagtctgggacctgatccccgatgcagatcgcacgctcagcgcggaagagaaatcccatgcgctggtcgcatggctggcggcgctggtcaaacgactgccgctgccggacaacctggccgcgctaggcgtgcctcaggagagtatttccgccctcagcgcagcggcgcaaaacgtcaaacgcctgatgaacaatgccccatgcagcgtcagccgcgaagagatcgcggccatctaccaaacgctgtatccagaacatgcctaa

SEQ ID NO: 259974 - DNA, 444 bp, Klebsiella pneumoniae
gtggcccgctttcagagctggacctactacggcatgacagaggcgacagccttctatgaacaacagcgttcgcaggcctttgctgaggatgagagctggttccagcttgccgtagagatccaggccaacggtgcgctggcgggggatgtggggatccactttttcgatcagggcagacaggccgagctggggatgaccttttccccggcatatcagcaccagggttatgccagagaagccatgcaggcggtgatggccttactctttgaacagttagcccatcaccggctgatagccgtggttgatacccggaattccggcgcgatcaaactcctggaagggctgggcttccgtcgcgaggcgcattaccggcagaatatcttttttaaaggcgagtggggcgatgagtacctgtacgcgctgctgcgtagcgaatatccgtga

SEQ ID NO: 259975 - DNA, 1299 bp, Klebsiella pneumoniae; identical to SEQ ID NO: 259912

SEQ ID NO: 259976 - DNA, 1059 bp, Klebsiella pneumoniae; identical to SEQ ID NO: 259913

SEQ ID NO: 259977 - DNA, 438 bp, Klebsiella pneumoniae; identical to SEQ ID NO: 259914

SEQ ID NO: 259978 - DNA, 267 bp, Klebsiella pneumoniae; identical to SEQ ID NO: 259915

SEQ ID NO: 259979 - DNA, 966 bp, Klebsiella pneumoniae
gtgtccggccagtcaattgccagcctgatggacgacagcaaatattttaaccgcttaacagaatgtgtggcgaaagccaaagccctggcagacagcgaggggaaaacctattccgtcacgggagtagatttcgttcaggggcagcgtgactacgacgatggcacgcctaaagctgtttataaatcgcaactggggcaactctacaacaaaatcaataatacaattcgtgggatcaccggccagaaagacaatccagcctggtttatttctcagacgggatacacctacagtcctaatccagccacgcagccggtgaacgctgtcgagctttgggtgggaatggcgcactgggagttttgtcaggaaacaccaaactgtttcctcattgggccggactatcagttgccggataaaggcggccatctgatgacgaacggcagtcgctggctgggttgttattttgccaaagcaaaagatcgtgtactgaatcagcggcgtccattccagccactcgctcccacaggtattacctgtgcaggttcagattttctgttgagttactacgtcgatcatccacctttaaaatttaccagcccgttcaggaacggaaccagaacccccatcactaatagcggatttcgcgcctggcataggattgatgccgatccatctggtatagggacagaactgaatatcaccagcgttgctgttgcagccgacacggttattcgcctgacatgcgatacagagccgcaggggaaagtccgggtggcctatgcaacacgcccccagtatgggcagggtatggtaaccgattctgataattacgtaccggatgaagtgtacgaatatgacccgcagttcacccagtggccggaagagaatattccggagctgatcggcaaaccctatccgatggaaaactggtctattgccttttccatgaccttcaataaggatgaataa

SEQ ID NO: 259980 - DNA, 222 bp, Klebsiella pneumoniae
atgatgattagcggcctgctggcgattctggtcttctcgcggctgtttggcatgcacggcctgtggtacgccgtgctggaagagaactacgcccgggtggtaaaaaatacggtcgaggaaggcagcgagtcgtttggctatatgctgtgtctgaccgccaccctcggctacgcctgctactttcgcggtctggcgcgacaggcactgtcgccgcagcgctaa

SEQ ID NO: 259981 - DNA, 516 bp, Klebsiella pneumoniae
gtgggcagcaccaagttaatggcggcgatcgagtcggcgctgggcgtggtgaacgcggtggaaatcgcccgcgccagcccgcgtctggcggcgatcgcgctggcggccttcgattacgtgatggatatgggcacctcccgcggcgacggtactgaactgttctacgcccgctgcgctgtactgcatgccgcccgcgttgccggcatcgccgcctatgacgtggtgtggtcggatatcaataacgaagagggcttcctggcggaagcgaatctggccaaaaacctcggttttaacggcaaatcgttggttaacccacgacaaattgaactcctgcatcaggtctatgccccgacgcgcaaagaggtcgatcacgcgctggaagtgattgccgcggcggaagaagccgaaacgcgaggtctgggtgtggtatcgctgaacggcaagatgatcgatggaccgattatcgaccatgctcgcaaagtggtggcgctctcggcttccggtattcgtgattaa

SEQ ID NO: 259982 - DNA, 1764 bp, Klebsiella pneumoniae
atggcggtggaaaaactgattgtcggccatatcgacacctggaccacggcgctgcaaacccgctccacggcagggcgcggcagctcgggcaagattgacctgtacggcattaagaagctgcgcgagctgattctggagctagcggtgcgcggcaagctggtgccgcaggatccgaacgacgaaccggcgtctgagctgctaaaacgcattgcggcggaaaaagccgagctggtgaagcaggggaaaattaagaagcagaagccgctgccggagattagcgaggaagagaaaccttttgagctgccggcggggtgggaatgggcgcgactgggcgttttatgtaagaaattgactgatgggtctcacaatccccccaaagacgcaggcaatggttatcctatgctcagcagtcaaaatattcaggatggttatatagatatagagaacccatctcgatatgtaagtgaagatgattttgaaaaagaaaacgctaggacactcgtccaaaaaaatgatgttttattaacaatcgtggggtcaatcggaagatccgcagttgttttagatcataaatcctttgtattgcaacgcagtgttgcggttatagccacatctctatattcacattttttatctaatttcttcaaggctattaccgcacaaaactattttatagaaaatgggaaaggaaccgctcaaaaaggaatttatttaggccaactgtctttgatgttaatacctgtacctgcattagttgaacagaagcgtattagtgacagattgaatgagttaatgatcctctgtgaccaactggagcagcactccctgaccagtctggatgcccatcaacagctggttgaaaccctgctaaccacgctaaccgacagccagaatgccgatgaactggccgaaaactgggcgcgtatcagcgagcatttcgacacgctgtttaccaccgaagccagcattgacgcattaaaacagaccattctgcaactggcggtgatgggcaaactggtgccgcaggatccgaacgacgaaccggcttctgaactgctcaaacgtattgcgcaggaaaaagcgcaactggtgaaagacgggaaaattaaaaagcaaaaaccgttgccaccgattagtgatgaggaaaaaccgtttgaactgcctgaggggtgggagtggtgtaaatttggtttaatctctgagtttattaacggagatcggggaagtaactatcctaataaaaatgaatacgttgttcacggaatcccttggataaatacaggtcatatagagaaaaatggaactctatcaataacagatatgaatttcattactgagaaaaaatttaatgagttaagaagtggtaaaattcaaagcggagatttagtttattgtttgcgcggagctacattcggtaaaacagcattcgtaaagccatatgaatctggtgctatcgcatcttctctaatgatcattcggccgtttattagagagatgggagaatatatatataattatttaatcagtccatttggacgctcgcaaattttccgttttgataatggttcagcgcagcctaatctatctgctaatagtgtgatgctttatgcttttgcatgcccaccattacaagaacaatttagaattcataaaaaaataactgagctctttcatatatgtgataatttgaaattacaaactcaatccgcccaacaaacccagctccacctggccaacgccctcaccgacgccgccatcaattaa

SEQ ID NO: 259983 - DNA, 1011 bp, Klebsiella pneumoniae
atgtcatttggcagctacgatttgttaagcctcgctgaagctcgtgaaaagcgcgaggtcgcccgtaagcaagttgctaatggaatcgacccggttgaggaacggaaggcgcaaaaactggcactgcagctttcaacagaaaactcattcgaagccataagccgcgaatggcatgcaaacaaagccgaccgctggacaatggcataccgagacgaaataattaagaccttcgaacaagatgttttcccgttcatcggcaaacgtcctatcggtgagatcaaacctttagaattgcttgaagtgctgcgacgaatagagaaacgtggagcactggagaaaacacgcaaggtacgccagcggtgcggagagatttttcgctacgcgatcataactggccgagctgaatacaaccctgcccctgatttagctatcacattggccgtgccgaagcaaaagcaccatccttttttatctgccgaagaattacctcattttatcagagatcttgaagcctataccggcagcatcatcactaaaaatgcgactaagatagtgatgttgactggtgtgaggacgcaggaaatgcgctttgctacgtgggatgaaattgatttagaaaaggcaatttgggaaattccagcagaacggatgaaaatgcgtaggcctcacattgtccctttatctactcaagtgattgaactctgtaagcagctcaagcctattaccagtcattattcttacatttttatcggcaggaataaccgcagtaagccaatttgcaaagaaagtgtgacacaagtcattgagctacttagttataaaggacgtgcaacaggtcacggatttagacacacaatgtcgactatactacatgaacaggggtttgatagtgcatggattgaaatgcaactcacgcatgtggaaaaaatagtattcgaggaatatataaccatgctcaataccttgaaagaagaaggaaaatgtttcagtggtatagcggctatcttttaa

SEQ ID NO: 259984 - DNA, 1878 bp, Klebsiella pneumoniae
atgagtcacaatgatattgttaccccggttgctacggttgacaccagccaatgtatgatcacctcgccctggtttgttcagaatacggaatacccaccggcagtggcgacgtataagccgctggtaaacggtgaggaggcctttgcggcggtatatcgagccatcgaaaaggcgcaaaaatcggtggatattatctgctgggggtttcaaccatccatgtattttattcgtgacggacaggcgctgcgcatcggggaattgctctgtctgcttgcggaaaaacaggttcaggtgcgtatactggggtgggaggcgccgtttaataccgccggggttgtcggcgaggcaaaccttcccggaaaggggatcctgcatcttcaggatcgcgccgggcagagcgcgacagacgaacaatatgcttttgaccgcgattggtttacccgtcattcatatagtgacgatctgctggattccagcaactttttagccagcacaatcaataagcagttcaatcagtggactgtcaatcccctatttgtgggccgcgggtttaacaaagtagaacgtgcggaaatcgcctggcgggcgagatatcaggctctcgataaagggctcagtgccagctcggtggggataatgacgctagcgccatcccatcatcagaaaacggtgttggtggactatgaattacctgaaagcgccatcggttttgtcatgggacacaatatgctcgatgagtactgggataccgatgcgcactcttcccagaatcggctcgggggcccggccccctggggacctgatcaaggctctcgcggctttttaccccggcaggatatttccagtcaggtgacgggacccattcttgaacatctgcacgaaaattttgccaaagcatggtgtaaggaaaccggggaggaccttatcaaaaagcgtcaggcccttgagatggcgaaacgccttaaaccgcggaaagagtgtggtaccctgatacttgcccagctcctgcgcacgcagccgcaggagaataaacgtgatatcgaaaaactctatctgcaggcagtcaacaatagcacacagtttatctatattgagaaccagtactttcgttggccaccgttggcggaagttataaaaaaagcggcgcacgtgcagattgataaaggacgaacgccagaaaaagacggatcgttacatttatttgttatcaccaatgtcacggaaggggggattggggcgggtacggtaaatacccagcgtatgctggaaagcctggggcgcgccaatacgattccaggcgtgacccggtcccgaatgatagagaagatcagggaggaagatccaggcaaattcgcctctctcgcctggtcccgcaatccggccacccaggcgcagattaatgaagagtttatccgccagcagaaagaatatgaagcaaagctaaaacaagcagaagagttaaaagatagcgatattccaatggtaccaatacccggcctgaaaatacatatctgctcactggtggctcaggactctcccgtggataactggatgccagtttatatccactccaagctgatgatcattaatgacgttttcacaacacatggttcggcgaatattaatacccgcagtatgcaggtggacagtgaaatgaatattgcacatgagtggggcagtgtgacccgggatttaaggcgacgtctgtgggggttgcataccagcgggaaaggcgtgcaggacaatgcttctgatgcgtttgatgcatgggaatatattctaagtgaaaataaaaaacgccagcaaaaccatcaaaagcctattgccccgctgattgcgttttattacgccaaaaacgaacttaaggatctggattga

SEQ ID NO: 259985 - DNA, 408 bp, Klebsiella pneumoniae
gtgatagcccagcatagcgaagaccgctatcgcgacggcgaccgctacgactgggcgacgtttaacctgcgggtatcacaggggatctccgctcacttcgccctgctgtatgaggcctcgtggcagtatatggatctcaatccgaacgggcgcagctatcgctataatgacaacgtttatcagtatcaggcggtgcgcggtgatttctacaagctgaccttcgcccccacctttaaagtgggcgatgtgctggatatcaaggcgcggccggaaatccgcttctttgccacctggatgaactgggataaagcgctggatcgctacgcgataaatgacgatttcggcagcaaaggctttaccgccggtgggacatggaacttcggcgtgcagacggagatttggttttaa

SEQ ID NO: 259986 - DNA, 894 bp, Klebsiella pneumoniae
  misc_feature (841)..(850): n is a, c, g, or t
atgttagtcaacagccatggcaaaggcgcccgcggcgggccaggcgtctccccggccagttcgctcaacggcgatgcccatgtcggtcgtctcggtaacgaaaaagataattacgctgagctgagcttcggcaaaaagctcaccttcaacgatggctcatgggcgcgcttcaagaccatgctcgccgacggggccaccaacccggatccgtgggttcaggataacgacagccaccatctgaacattcgtcagctgtacgtcgagatgggtaactttgccgaattcaccggtccgttaaaacgcgcctcaatttgggccggcaagcgcttcgatcgggataacttcgatatccactttaccgatagcgacatcatgttcctcggcggtaccggcggcgggatcaatgatgttgactggggaagcggcctgcgcggcgactattcggtgtatgcgcgtaacttcggcgaccttggcagcgataattacgcggataatgacatccagaatctgctgttcaccgccaaccatttttacggcaactggcaactgatgaccacggtgatgaccgcccagggcaacgatgacctgaaagataatacctcgaccaccgggagctatgccctgcgcagcgataacaccgccaaaaacggctactacgcgatgctggccctgcacgacaaacagcagttctacggcctggcgccgggggtgtctgaaagcgccctgcaatacggcgtcgggctgggcgccgaagcgcgtcagccggggagcgatggcgatctgaccgagaacgcggcctccctgcgctttgcgtcgtatggcatcctgccgttggggaaannnnnnnnnngggaaaaactggcagctggcgccgtcggtgatagcccagcatag

SEQ ID NO: 259987 - DNA, 504 bp, Klebsiella pneumoniae; identical to SEQ ID NO: 259961

SEQ ID NO: 259988 - DNA, 936 bp, Klebsiella pneumoniae
atggaataccagttggaccttaaagaaaacgcattggatagttttaatgaggcactagaaaaatttaaacaaggtgagagcggtgaactacgtcattataaatttgccatactacatatttctcatttcttagaactagttcttaagctatatatctcatctgttaatgaaaatctgttatttagcaaatgttataggcatatagaaaaacgttcaaagagagactctatcgaacttctccaagcatatgaattgatttgtaaggaggactttgaattatcatcattactagaaggtattcagcaccctcacacaataacactcgatcaagcgttggagttcgctaaatgtgaaaaatgcagtattaccggtgtcgattttgtagacattaacttttgtaatgacattgagtggataaagggtcgaagaaacaatatcgagcattatcaattcagattatcacccaaagaagcccgtttatgtataggacgattagttcgcggagtggcagaatttgttgatatatttagtttattcaatcttgaagatgaagtaggaaaagataattatcaattatttgaaatattagctgatgaatactcacatttgcttaaagaggctgaaaatgaggtcgcagaaaaagaggcagaagcatttcgaggcgttagacctaaacactatgcattaattgaatggaatatatatcaatgtcctgaatgctcgaacaatacaatgattccgtctgatgattccagcactggatataaatgcacattttgttcaaacgaagagagtgatgagatagaatttccttgtgattgttgtggtacactggcaacacttgaggaaatggaaacatggcccatggatgatggttcaattgaacacagatgctatttctgctcagggcaatactatgcagataaagacgattaa

SEQ ID NO: 259989 - DNA, 408 bp, Klebsiella pneumoniae
gtggatatatttttagatacaaacatactatataataactggtttcttactaacgccaactttaaatttttattgaattttataagtaacgatgggcatactcttttgatatgtgatgttgttaaaaatgaaattgagcacaaacacgctgaggagttacaaaagaacattaaaaaactcaaagaatctcttgatgaattatataagctcacgaatattcgtgaaaaagtagacactgaaaagttcgacataaaatatagcatcctagatatttttaattcaggtggaattgattataaagagatttcttgcgattccatacctcaatcaactgtaatgtacagagcaattaatagaatacgtccattccaagataatgaaaaaggatatcgagatactttaatatga

SEQ ID NO: 259990 - DNA, 798 bp, Klebsiella pneumoniae; identical to SEQ ID NO: 259935

SEQ ID NO: 259991 - DNA, 234 bp, Klebsiella pneumoniae
atgcccgatcagcagaatcagaatgccgagcagtgcgggcatggggatcccgacgacccacgcgcgtccgataaaggtaaacaggctgtcagccggcaccggaatcgagtagccctgggtgaccagcagcgcgatgccgcgaactacggccagggtggcgagcgtgacgataaacgccggaatgccttcataggcaataaagaagccgttgatggcgccaacgaatccgcctag

SEQ ID NO: 259992 - DNA, 951 bp, Klebsiella pneumoniae
atggataacctctttcaccaaccgcagggtggcaatgagatgccacgcttcgccggccgcgccacaatgatgcgcctgccgtttatcgaagatttacagggacttgacgcggcatttgtcggcattccgctggatatcggcacctcgcagcgctcgggcacgcgctacggaccacgctatattcgcgccgaatcggtgatgatccgtccgtacaatatggcgaccggcgccgcgccgttcgactcgctgtcggtggccgacatcggcgatgtgccgatcaatacctacagcctgctcaaatcggtgcaaattatcgaagattactacaccggtttgaatagttatccgctgatcccgctgaccctcggcggggaccacaccattaccctgccgatcctgcgggcgctgaccaaaaaacatggtccggtggggctcatccacgtcgatgcccataccgacaccaatgatgagatgttcggagagaaaatcgcccacggcaccaccttccgccgcgccgttgaggagggactgctcgacctcaaacgggtggtgcagattggtcagcgcgcccagggctatgccgccggcgacttccagtggggcgttgaccagggctttcgcctggtgcaggcggagcagtgctggcatacctcgctggcgccgctgatggccgaagtccgccagcagatgggcaacgggccggtgtatctcagctttgatatcgacagcctcgatcccatctgggctccaggaaccgggacgccggaagttggcggtctgagctccattcaggcgctggagatcgtccgcggctgccgcggcctgaacctgattggcgccgatctggtcgaggtctcgcccccctacgacgtgagcggtaatacctcccagctggcggccaacctgctgtacgagatgctctgcgtcctgcccggcgtgaagtacgcctga

SEQ ID NO: 259993 - DNA, 525 bp, Klebsiella pneumoniae
atgctccggcagatagccaatatatttccccgagaggatcagcagcagctgggcgtcgacggtctcgacggtggcgctccctttgctgaagccccgacggcggagatcgctggtgttccagtagctgcgggtcaccagtgggcactggctgatctgctctttatcgagctggcggctgaagaacatcgggtgcagatcgctgcagtagagccagtgctgttcacggtacagcggctcgctgatgatgttatgcacctgcgagttgtagctgccgatagccaggtcgatatggttgttcagcacgccgttcagttgctccgccggggtgcggataatcagtttgatatgcacatggggaaatttgtcgctgaagctgcgcagaaccaccggcagcgagagcgccgtttcggtctcgatggagtcgagcgtcgagatgcacagggtgccgctgtgctcccctttgagcagcgccgactgccgctccagctcattgagttcgctcagtacgcggatcgcctgctgtaa

SEQ ID NO: 259994 - DNA, 525 bp, Klebsiella pneumoniae
gtggaaggtgccgatctcctgcatgccgtctttatgacgaccatagctgttgtcgttggccgggttaccgtttacgaagcgatcggtcaggacgaagtagacggtggcattgtgccagtcaaacggcgccggggcggcggtctcggcacgctcaagcagcagcaggccattgctgccgaaggcgggctgcagagtgattttgccgccgctgacagtcgcgacattgccgctgtaaaaatcgcgaaccttactgccctcggcgaaggttttgctgacgtcgatggtcagaggttttccatcccacttcggacactggcggatctgcggcgctgcggcgctggcctctttttcctccagcgaaatcatcatcgtcggcgtgccggagcgggtatccacctccagggtatacagaccctggcggaagatgcgccattgcggcggcgtgccgcgacagggttccatggagagcatctggttgagcttaatgccgccggaaggctgccagcactgctggtcaaaatttag

SEQ ID NO: 259995 - DNA, 285 bp, Klebsiella pneumoniae; identical to SEQ ID NO: 259931

SEQ ID NO: 259996 - DNA, 969 bp, Klebsiella pneumoniae; identical to SEQ ID NO: 235618

SEQ ID NO: 259997 - DNA, 519 bp, Klebsiella pneumoniae; identical to SEQ ID NO: 195039

SEQ ID NO: 259998 - DNA, 819 bp, Klebsiella pneumoniae
gtggctcatgctggccagaaagcggctcttggcttttgtcgcctgaatcgctttgtctttttcgcgctccagcgcacaggagagggcctccttctgcgccagctcctcctcgagccgctgctgggagtctttacgtttgcgcacttcccgacacagagagagtccccagccgaggctgatggcgatcagcaccagcgcaaaggcgatcagctggtaaaactggcggctgtactggctccagttctctatttgctgactggagattttcgaccacttctcggtcatctgcagaatatcccgtggcggaataacctgcagcgctttgttaagaatggcggccagcaccggttcatcgcgcgggatggccagccgaatggccgcgacggggagtccatcaatgcgggtgtagtgcagaccctgtggatagtagtggtcgatcatatagcgggcggaaagctccgaggctacggcggcatccacttcgccttcctctaccatcttcatggcgacgccaacgttatccgtttccacccagttaatcagcggaaaacgcgctttcagatcatgggcggcgataggcccgaccggcagggcgatccgcgccgagcgcgtcagcagatgctgatcgggggcgctgccgcgggcgaccagcacaaaggccacgttaatgagcggatcgctgagggtgacgtaggcctgcggctgtggggtcagggtggcggcgggcatgatcgcccagtcctctttttccatgcgctttgccagagcctgacggttgcgcaccagaatagggtcaaactgcaggccggtctggagtga

SEQ ID NO: 259999 - DNA, 753 bp, Klebsiella pneumoniae
atgggtattactcttttcactaataatgcgttttcgtctgtttcagaccctgacgaatactcgccagggtttgatgtgacgtcccttcgtcgtgccgaaatatttacctggacagggattggtaaaaaccttatgccgggggaaggcggacccactgtagttggcaccccgacgtttatcaccgactcgccctttgttcagttctcaaataacgcgaatgtggcacatttgaacctgggcattaaagatactgaccaacaaacgtggtttttactctttgacccgaataatgattccacgcagagaattatcgcaggcagcttttcgggaaccggtgccactaccccgccagggacatctgtaatagttgatgaggcgggggcgctggctgtcatgcagggtatccactacacggacaatgacgcttacggaaccgcgcgcgcaactctgagcgcatttaataaaacaaagccgatgcttctttgtcttacccttgacggccagaccaccaggctgaccgacatgaccaacaatgtttcagcgtccctcaccctggcagcaggtcgtgagcgagccccggccccccttcgtatcggtaagggcggagttacatactggggaccaacctctgcaaacagccgacttggggcttatatggttttcgatcgcgtattatctgatgctgagaaaattactgttcgtgactatttgctccgttgcatacaggcaaaatatccgtcattgattttctga

SEQ ID NO: 260000 - DNA, 975 bp, Klebsiella pneumoniae
ttgctaaccgacccttctcgcctgcttgttctggcaagctgtggagtcaacgggaggaccgttgaggcgctgtctaagggcgccgacccggagctgtataaccgtatccgtgaggccgtgtctaaaataaaggccatcgcggatggcgaaaacaaggcattcggcatcggtgctttctgtttcctgcagggagaatggaattacaaccctgggtacggaggtgactatacgcgtgagggctataaagcgaaggtgcgccaactttataacgatgtaattacggatttctgcgcaggacagaggccacctgcgatgttcacctatcagactggtggcaagtacaccattgatacctatgagttggcaatcggcatggcgcaacttgacatggcgacggagggcgggaacatctatggagtctgcccgtcgtatccattccccaatggggatagtgggcatctgaccagtaacggttatcgctggatggacatgtttttcggcaaggtcatgttccgggtcctggttcttggtgagggatgggagccgttacactgcacaggcgttgaagttcaggatgattacgcactccttaactatgcagtcccgtatccgccactgcagtgggggacaccatatgatgggcgaacagctaaaacgtatgctgataaagggtatcgggcgactgatgcaaatggcgcgttggacattactgccgcagagattgttgctgatacggtggtaaaactgacattctccagacgtgtctccgggacaatcaaaatctggtacgcagataaaacatcacataacgggaatggctgcctcaaagacagcgatccattcctggcaactgaaaattacgtgtataccgcagggagcggccaatatgcggacgaaaatattcctgaactggtagataagccataccctctggaaaactgggcgtgggcacaaattatcgagacaactgtatag

SEQ ID NO: 260001 - DNA, 183 bp, Klebsiella pneumoniae
atgcttgcgcttgaactggctggcgtcaatatcgtactgcttcattttgcgccacagggtggtgcggccgatattgagcagctgcgacatctcctgcacccgcccgctggtcacccgggcggcgtgaataatagcttccttttcgatggcgctaaaggtcaggctggccggcagcagcgatga

SEQ ID NO: 260002 - DNA, 537 bp, Klebsiella pneumoniae
atgtttcaccgtcagcaggtaaattggcagccagctgatcatgccgaaacgcaccatatagacaaacacatccacaaaggagacataccaggcgtttttgttacgcagtacgtaggtacagaagatctgaaatgcgctcatgttctccggcgctttctggccgtgtttggtcttcagcaccactttctcttccggcatcatctctgccagcgaaggcagaccttcctcacgcggcgaacccttccccagcaccagtacgctaatggcgaataccaccgccacgcaggccggtacaatgtagctggcgctctgccagtgctcggtgccgagaatggcgaatgcggcgccgacgatcggggcgacaattccgccgccgacgttatgggaaatgttccagaacgcccctacgcggccacgctcacggcgcgggaaccagttcgcaatagtaataaaagaggggccgacccccataccctgaaacaggccgttcaggacaaccagcgcagcgaagacccagaatgcggtactgaatcctaa

SEQ ID NO: 260003 - DNA, 588 bp, Klebsiella pneumoniae
gtgcgcgacagcgatgactggtgggtctttatcgactggcaggcggagctgaataaacaggcgtcggcgcagggggtgctcatctactgtctgcagcgagccctctggctggcgcagcgttttgaaccgcagcgggtacccgactacactgccacgctctggcagctgaaggaggccgccctccaccacctgtgggacaacgatcggcaggtgtttatcagcggcgccgtgcgtcaggtctcatgggcgtcgcagatctggctggtgctggcggaagttggcaccgccgggcagcgtcaggcgctgatgcgccgcctgcagcagcagccgcccgccattgccatgaacaccccgtacctgcgtcatcatcacattgttgccctgctacagtccggcctgcgcgaggaggcggtggcggagatcaaagcctactggggggcgatggtcgcctacggcgccgacaccttctgggaaattttcgacccccaacatcctgacttttccccgtatggcagtaagcttatcaacagttactgccatgcgtggagctgtaccccggcctggtttattcgccagtacggactttaa

SEQ ID NO: 260004 - DNA, 921 bp, Klebsiella pneumoniae; identical to SEQ ID NO: 259942

SEQ ID NO: 260005 - DNA, 501 bp, Klebsiella pneumoniae; identical to SEQ ID NO: 259941

SEQ ID NO: 260006 - DNA, 588 bp, Klebsiella pneumoniae
atgggaattgtcccggtggtgttcgccttttttatcggcggggccatcgggattatcgccggctatacgggcggcaaaaccaataccgtgattatgcgcaccgtggatgtgttctatgcctttccctccgtcctgctggcgattgcgctgtcgggagcgttgggggcgggcatcggcaatgcgctgttgtcgctgaccctcgtgtttgtcccgcaggtggcgcggattgccgagagcgtgaccgcccaggtgcggcatatggactatatcgacgccgcccgggccactggcgccagcgcgttgaccattatccgcgtccaggtgttgggcaacgtgctcgggccgatcttcgtcttctccaccgggctgatttcggtgtgcatgatcctcgcctccggcctgtcgtttctcggcctcggcgtgcggccgccggagcccgagtgggggctgatgctcaatacgctgcgcacggcaatctatacccagccgtgggtggccgccctgccgggcctgatgatttttatcacctccatttcgttcaatatcctcgcggaccgcctgcgtgcggcaatggcgattaaggagtaa

SEQ ID NO: 260007 - DNA, 273 bp, Klebsiella pneumoniae
  misc_feature (253)..(262): n is a, c, g, or t
atggtggatacggcaacgacgaaagcggtcccggccgcagcggcccacgctacccggcaaggttactggcgcggcgtgctgcgccgcctactgcgcgaccccggcggggtggttgtgggcgtggtgatcctcctgctgctggccctggcgctgttcggtccgtggcttatcgtcaaagatccctatcaaacgtcgatgttcctgcgcctgaaacccatcggcagcgacggcttcccgctgggctcggatgagnnnnnnnnnngtcgcggctga

SEQ ID NO: 260008 - DNA, 408 bp, Klebsiella pneumoniae
atgtggatgcgggtacgtggaaaagaccccggccaggttaagactggcggcagtgccgcgcacgatatgctgactctgttcaagatcgagaaacagctggcgatagagcccatacaccagcgcggcggcgcagaaggccccggccgtctgggcaacaataaacggcagcaccttgcggcgttcaaaacaggcgaacagccacagggcaatggtcaccgccggattaaggtgcgcgccggagacaccggccgtcaggtagatggccatggcgacgccaaggccccagataatactgatctcccactgaccaaagctggccccggcgacccgcagcgcagcgacgcagcccgcgccgaagaaaatgagcaatccggtgccaagaaactcggccacgcactgcccggttaa

SEQ ID NO: 260009 - DNA, 684 bp, Klebsiella pneumoniae
atggttaaagaagtaacgcaatacataggtgaagaaaaatgcgaactatgtaagaaaactgcaatattgaagaatagccatttaatgcccaaaagtttatacaaaattataacacggactttctcaccgtatgactccgctccagtttgggccagtaacagtcaaaaatcaatatatttttcaaatgcacaaatcacaaaaaaactcttatgtggtatttgcgaagatcgttttaataaacatggagaaaagtatgtgatagaaaaatgcttgaagaacgaatatacttttgaattaaagaaaatgctagatagttctattccgagcattcatgtcaatggttcttcttatttctcaccaaatgacatacataaactcaattcagagaaatttatgtactttgtagcaagcatagtatggagagtagctacaacgaactggagtaatgatgatatcgcaaatctgaatggctcgttaccagatgagtacaatgaatctttgcgaaattacttacttaagaaaacagaattccctaaaaatatctacattaccgtatgcatagatagtgatacagatccagtaccaattatgtctttaccttctggtgatattataaataatatgcacgtatcattttttatcccaggaattaaattcaatattttttttcggcgaaaaagctga

SEQ ID NO: 260010 - DNA, 1152 bp, Klebsiella pneumoniae
  misc_feature (324)..(333): n is a, c, g, or t
atgcttgaagataatggtgtaatggctttagtgcttccatttgatttgttacaggtgaagtttggtagctatatacaatcgtatcttacgtcaaatttttcacgaatagaaatatacacatcaaataagttagcctttgatatggctgaacaagatactataatcctgattgcgtttaaaaattctaaaagaaaaggattgtttttaaatgatcttgagtttgataaaaacaaaaaaaagaaacttttacaccacaccgcagataaatgtaggagattaatttctcaagatgaaaacatcaaatggagttcattaacgttatcnnnnnnnnnnttatctgattgcgagttgaattttctgacaagactagcaggtcaattaaagagtataggtagttacgcaacttctaaacctggcatagtaaccgctgcaaacagtttctttatagtatcgaaaagaaaaatagaagaatactcattacagaaatatgcttccccaataattcaaaaaagtcaattttttcaaaataatatagtttttaatgaaagtgattttaacgaattagtaaattcaaacaagccgagttattttattgatttatcagtgtacatcaaaaattcatcagagcgagttgaagactatttaaaacttggagagtccttagaaattcataaacgttataaatgtcagcgaagaaaaaattggtacgtagttcctaaggtaccaccgggagaaggttttttctttaagagatgtaatgagtaccctaaactgcataaaaataattttgagatccttacgactgatgctgcatataacctggtagttaatgagggttataatatcgaatctttaatatactctttctataaccctctaactttatgctttgctgagttatatggacggtattacggaggtggtgttctagagcttgttcctaacgaatttagaagactaccgataccctataaagaaatatcatcgcaattgtttctggatttctctaataaattcaaaaacaaagctaatatagatgaaattcttctaagcagtgggagggacgttctttcagatatcatcgaagagcatgagtttattgaaataattaatatttataagaaattaatccaacgtagattaaaaagctga

SEQ ID NO: 260011 - DNA, 246 bp, Klebsiella pneumoniae
  misc_feature (198)..(207): n is a, c, g, or t
atgaaaggttcaatttttcgccatccctccccgctgccggttggcgttagcagcggttacgtaatgactgtgcttggcccactgccgattaacgaaatgggcgttactctgatgcatgagcatattctgctggatgcctccggcaaatgggtgccgccctgctgctgcagcgatcgccatcttgccgaaatcccggtnnnnnnnnnnaaatggaaaaccttggcgaactgtcgctcaacccgctga

SEQ ID NO: 260012 - DNA, 516 bp, Klebsiella pneumoniae
atgcgcgccggggtacggcgcatcggcatggtcttccagagcttcaacctgttcccccaccgcacggtgctcgacaacgtgatgctggccccgcgctatcaccagctgctggaccagccggtcgcccgcgagcaggccctggcgctgctcgaccgcgtcggcctgctggcccatgcccacaagtaccccggacagctctccggcggccagcagcagcgcgtggcgatcgcccgggcgctggcgctgaagccggacatcatgctgtttgacgaaccgacctcggcgctggatcccgagctggtaggcgaagtgctgaaggtcattcagtcgctggcccgcgaaggcatgaccatgctgattgtcactcacgagatggacttcgccctgtcgatttccgaccgcgtggtgctgatggagaacggcgtggtgcaggccgatatcgccccgcaggtgatccgcagcccgctggaggcgccttctctgcaacgaatccgtgaatttatgggagtacgctaa

SEQ ID NO: 260013 - DNA, 543 bp, Klebsiella pneumoniae
  misc_feature (324)..(333): n is a, c, g, or t
atgctctatgtcgtcgaatgcgcctacaccgatccccaaagcgaagcggcgtggaataccttttacaatcaggaaaaactaccggcgctggtctctgtgcccggtttctacgcctcccagcgcttccgcgctctcagcgagggctgcccctgctacctggcgctgcacgatatccacgatgctaccgtcatcgacagcgacgcctaccgccgcaacggcggcggccattttgcccgctggcaatcggcgatcgccgactggcatcgccacctctatcttacgaataatacgctgcgggaggttgccccggatgaagtgctgctnnnnnnnnnnggacttgcccgtcgctgcgccgatactcctgcagccaggcggcctggcgaccgaacaaagccggtatgccgccatcgtcccacgagacaacctgcatcacctggccacgactgccgccgtctttatctatcagcccatcaccgcccggttacgcaacccggcgcagcgcgcgtgaggtcgccatgtcacctgctcccttttatacgttga

SEQ ID NO: 260014 - DNA, 663 bp, Klebsiella pneumoniae
atgcgccgtaacggcattaccgccagcttcggcctcggcggtatcaccgggacgatggtcgatttgcacgaaaaagggttgatcaaaacgctgctcgatacccagtccttcgatggtgacgcggcgcgttcgctggcgcagaacccgaaccatgtcgagatctccaccaatcagtatgccagcccgggctccaaaggcgcctcctgcgagcgcttaaacgtggtgatgctcagcgcgctggaaattgatatcgactttaacgttaacgtgatgaccggttctaacggtgtgctgcgcggggcgtccggtggccatagcgataccgccgccggtgcggatttgaccattattaccgcgccgttagttcgcggccgtattccctgcgtcgtggaaaaggtgctgacccgcgtcacgccgggggccagcgtggatgtgctggtcactgaccacggcattgcggtcaacccggcacgtcaggacctgatcgacaatttgcgcagcgcaggcattccgctgatgaccattgaggaactgcagcagcgtgctgagctgttgactggcaagccgcagccgatcgaattcaccgatcgggtggtggcggtggtgcgctatcgcgacggttcggtcatcgatgtgattcgtcaggtgaaaaacagcgactaa

SEQ ID NO: 260015 - DNA, 405 bp, Klebsiella pneumoniae
atgatctgcggcttctattcgctgtacagcctgattgtcttcagccagcagcactggaaatcacgcctggtggcgctgatcttcgccatcgcctggatcgtgctcggcctgagctttgtcgtcaatcctctcaacggtatgagcagtctggccattttatttggctttttatttgttctcggcggtatttcccgcatcgttaacggatgtcaaacccgcaaacaaagcggcgctggctggaatatttttatcggcctgttggatttacttatcgcctgcctgtggctggccatgaacccgcagcaaagctggttatttattaccgcctttatcggcgttgaaatgatatttagcgccatcggcttgttggtcctgcgcaataaaatgaagcacgctgaggcttaa

SEQ ID NO: 260016 - DNA, 258 bp, Klebsiella pneumoniae
atgttggatatattgaaccttgtgatgaggtctacgctacgtcattttacagggactcatcaggaaaaattaaagtttgggttaaagcgacatgaaatattttggctcgccgattatttttacgacttagtaccaagaataagtaaaaaactcagagaaacccctgagagtaatccattacatgatgaattaaaaaaattattattagactctatcgaacaaatggataaatacagacaactacaacgagaactataa

SEQ ID NO: 260017 - DNA, 180 bp, Klebsiella pneumoniae
atgccgagtgaatatactcttctgatttatgagggaaaggtggtattatttaactggtttttcttaaaattaacaaccgttttagatgctgtcagtacttatcaagtccgagttcgtttccatgtgcagttagaatcacttactaaaatagctattaaactcgtcaagttcaaaggttag

SEQ ID NO: 260018 - DNA, 576 bp, Klebsiella pneumoniae
gtgattcggattccgacagcgattccgactccgacagcgattcggactctgacagtgactccgactctgacagtgactcggattctgacagcgattccgactctgacagcgactccgattccgacagtgattcggactctgacagcgactccgactccgacagcgattctgactcggacagcgactcggactccgacagcgactcggactccgacagcgactcggattccgacagcgactccgattcggatagtgactcggattccgacagcgactccgactctgattccgacagcgattccgactccgacagtgactccgactctgacagcgactccgattcggacagcgactctgactcggacagtgattccgactctgacagcgactccgactccgacagcgattcggactctgacagcgactcggattctgacagcgattcggattctgacagtgattccgattcggacagtgattcggatgctgacagcgactctgactccgacagcgattcggattctgacagtgattccgactcggacccccctgtgtcaggattgttgtcacccctaa

SEQ ID NO: 260019 - DNA, 489 bp, Klebsiella pneumoniae
atgaaacgacctgattgcattcgccactggcgcgaactggaaggacccgacgatgctacttatcccgacagcccggagcgtttttcaatcggcgcgccgctggggcgaggtttacgtctcaaccggctggggatccaccacgagcggctgccgcccgggcggcgcacctcttatccacacgcggagagcgatgaggaagagttcatctacgtgctggagggctatccggaagtgtggataaacggctatctctggaagctggagcccggcgacagcgtgggttttcccgctggtaccggcatctgccacacctttctcaataacaccgagcaggaagttcgtctgctggtggtgggcgaggccaacaagaagtacaaccgcatttattacccgctcaatcccggctatgccgcgacgcgccaggatcgttgggttgaccatccgccgcagttcttcggtccacacgacggcaagccgcggaaaaagtaa

SEQ ID NO: 260020 - DNA, 216 bp, Klebsiella pneumoniae
atggcggaaattgacgagatccgcgcggcgacggaactaccgctcctggtgggctccggggtgacaccggctaacgtgaagcagatcctcgggcggactcagggggtcattgtggccagtacaatgaaggtcgatggcgtctggtggaacgatgttgagctggcccgggtgaaacattttatgtcggtcgcgcaggccgcgctggaggaagcttaa

SEQ ID NO: 260021 - DNA, 267 bp, Klebsiella pneumoniae
atgggcatatttgcccttgatgcccactatgaacgcggcagccagaccagctttcagaccattaaatcgatgctgtcgcgctatttatatcgcggcgaaattgatgggggtcagcatgagagcctgtcggcatttattattaaacgaaccaatctctcgcgcagctatgtgtaccaggtgctggccgcgctgcgcgaggggggatatatcacggtgaaaaaaggcaagctgatctccatcgaccgtcatattcctgagaaattctga

SEQ ID NO: 260022 - DNA, 309 bp, Klebsiella pneumoniae
atggaggccgcccaggcgctggtgcgtgaaaaggctcgcccgggcgcgcaacagtcagagcaagagctgctccgccagcgggagaaagtggctcgcggtctcgaccggctggaagcctgcgcggcagacggaacgctgcgcggcgacgaggttaatctggcgaccatctctacggcctgcgccattgcctacctgaactttcgtcgggtagcgcccggctggtgcgccacccggccgcagctggtgaagctggtggatgcgttgttccagcgcgccagctttgcgcgcactgaaccgccgcggacttga

SEQ ID NO: 260023 - DNA, 360 bp, Klebsiella pneumoniae
atgcaaaaaatggtactggcgctggcaagcatcgccgttcttttttccggtacagcggcagcacgtgagctaacggcgtcggaaaaaaaagtcatcgaagagtctgcgaagcagaagctgaaagatccggatagcgccaaaatttattggcagccagatatgggtggggatatttactgtgctcagataaatgccaaaaactcttatagtggctatgcaggaaaagcgctcttactggttggcccgaggagaaacaactctgggataataattagcgcggacaccattatccatagtgatgatatggaaagaatgatgatgccaatttgcactgatgccggctaccactttccccgttaa

SEQ ID NO: 260024 - DNA, 228 bp, Klebsiella pneumoniae
atgacgaacaaaaccatccagaaggcaattgatatcgctggcagtcagaaaaaattggccgatctgtgtggcgtagcgcagccgacagtttggcgctggctgcatggcggcggaattgacgctcgctatgtaatgaaaatcgtgtctgcgaccaacggcaagattaaggcggcagagatcaggcctgaccttgctcagttgctgagcgcgcattcaccggccgcctaa

SEQ ID NO: 260025 - DNA, 861 bp, Klebsiella pneumoniae
atgaaacagatcacaggagtctacaccgcgcctgcgcagcattgggtaggcgacggcttcccggttcgctcgatgttttcctatcagacgcacggccagcagctgagccccttcttactgctcgactatgccgggccgtacaccttcccggcgggcagcgaaaaacgcggcgtcggtgagcatccgcatcgcggatttgaaaccgtcaccatcgtctacgccggtgaagtagagcatcgtgactccaccggacgcggcggggtgattggtccaggcgacgtgcagtggatgacggcgggcgccgggatcctgcacgaagagttccactcggaggccttcacccgcagcggcggcgagctgaagatgatccagctgtgggtcaacctgcccgcgaaagacaaaatggcgacccccggctaccagagcattaccgctgggacgatccccaccgtggcgctggcgaacggcgccggacaggttcgggttattgccggccagtatgacgacgtcagcggcccggcccataccttctcaccgcttaacgtgtgggatctgcagctgaatcaggggcacgacctcacgctgcgccaaccggagggctggagtaccgctctggtggtgctggaaggggaagtgatcattaacggttccgaatctgctcgcgaaggccagctggccgtcctgagccaggcaggtgacgcagtgcatctggaggcgaccgctccggcaaaagttctgctgatggccggagaaccgctacatgagccgattgtgggctatggcccgtttgtcatgaataacaaaacgcagatcgcagaagctgtacgcgattttaacagcggccgctttggccaaatctaa

SEQ ID NO: 260026 - DNA, 228 bp, Klebsiella pneumoniae; identical to SEQ ID NO: 129169

SEQ ID NO: 260027 - DNA, 261 bp, Klebsiella pneumoniae
atgtccttccgcggcccggatatccgtgttcacgcccaccgtgagccctggcgttacgccatccataagattggggtcgccagccttgccgattcctacgatccggccattcttaatgccgatgtcggccttgatgatgcccgcaacggcgtcgatgatcagagcgttggttatgatcaggtccaaaatgccgtcggcagcggtcagcacaccgtcacaaccggtgccccctcgtaccgtcttgcccgcgccaaagactaa

SEQ ID NO: 260028 - DNA, 687 bp, Klebsiella pneumoniae
atgcaacagctgaaacagcaggtgttcgaggccaatatggatctgccgcgctacggcctggtgacctttacctggggtaacgttagcgccattgatcggcagcgtgggctggtggtgattaagcccagcggcatcgcctacgagtcaatgaccgtcgatgacatgtcggtggttgatctgcaggggcacgtggtggaagggcgctggcgtccctcctctgataccgccacccatctggcgctctatcgccgttatcccgaccttggcggggtggtgcatacccattcgacgcacgccaccgcctgggcgcaggcggggctggcgatcccagcgctcggcaccacccatgcggactacttcttcggcgatattccctgcacccgggcgcttagcgcacaggaggtggacgaggcctacgagctgaacaccgggcaggtgattatcgaaacgctgggtgaggccaatccgctgcataccccggggatcgtcgtctatcagcacgggccatttgcctggggcaaagacgcccacgaggcggtacacaacgcggtggtgatggaagaggtggcgtgcatggcgtggattgcccgcggcattaatccgcagttgcagcccatcgatagctggctgatgaataagcattttcagcgtaagcatgggccaaacgcctactatgggcaaaagtag

SEQ ID NO: 260029 - DNA, 651 bp, Klebsiella pneumoniae
atgtcattacctatgttacaggtcgccctcgacaaccaaacgctggccagcgcttatgaaacaacccgtctgatcgccgaagaggtagatatcattgaagtcggcactatcctctgcgtcggtgaaggtgtacgcgcggtgcgcgatctgaaagcgctgtatccgcataaaatcgtgctggcggacgccaaaattgccgatgcaggcaagatcctgtcgcggatgtgcttcgaagccaacgccgactgggtcacggtgatctgctgcgccgatatcaacaccgccaaaggggcgctggatgtcgccaaagagttcaacggcgatgtgcaaattgagctgaccggcttctggacctgggaacaggcgcaggcgtggcgcgaggcgggtattcagcaggtggtctatcaccgcagccgcgacgcgcaggcggcaggcgtggcgtggagtgaggcggatatcagcgcgattaagcgtctgtctgatatgggcttcaaagtgaccgtcaccggcgggctggcgctggaggacctgccgctgtttgccgggatccctgttcacgtctttattgccggacgcagcatccgcgatgctgcctcgccggtggaagcggcgcgccagtttaaacgctctatcgcccagctgtggggttaa

SEQ ID NO: 260030 - DNA, 468 bp, Klebsiella pneumoniae
atgaaactccatgaatcactggcgcagaatcactccattcgcctgcaggcggaagcggaaacctggcaggaggcggtgaaaatcggcgtcgatctgctggtggccgccgacgtggtggaaccgcgctactaccaggcaattctcgacggcgtcgcgcagcacggcccctattttgtgatcgctccgggattagccatgccgcacgggcggccggaagagggcgtcaaaaaaaccggctttgcgctggtcacgctaaagaaaccgctgattttcaaccacgaagataacgacccggtcgacatcctgatcaccatggcggcggttgacgccaccacccaccaggaagtgggcatcatgcagatcgttaacctgtttgatgacgaagccaatttcgaccgtttacgcgcctgccgcagcgagcaggaagtgctggatttaatcaaaaacgccaccgcggcggctgtttaa

SEQ ID NO: 260031 - DNA, 306 bp, Klebsiella pneumoniae; identical to SEQ ID NO: 212663

SEQ ID NO: 260032 - DNA, 1065 bp, Klebsiella pneumoniae
atgagtaaagtacagaccatcacccgtgaatcatggatcctgaacacctttccggaatggggctgctggctgaatgaagagattgagcaggagcaggttgcgcccggcaccttcgccatgtggtggctcggctgtaccggtatctggttaaaatccgaaggcggggctaacgtctgcgtcgatttctggtgcggcactggcaaacagagccacggcaatccgctgatgaaaaccggccaccagatgcagcggatggcaggcgtgaaaaaattacagcctaacctgcgcaccacgccgttcgtgctggatccgttcgccattcgccagattgacgcggtcctcgcgacccacgatcacaacgatcatattgacgtcaacgtcgccgccgccgtcatgcagaactgcccggccgatgtgccgtttatcggcccgaaaacctgcgtcgacctgtggatcggttggggcgtgccgaaagcgcgctgtatcgtcatgaaacctggcgatgtcgtgaagatcaaagacattgagatccatgcgctcgatgcgttcgatcgcaccgcgctgatcaccctcccggcggaccaaaaagccgctggcgtactgccggacggcatggaccagcgcgcggtcaactacctgtttaaaacaccgggcggcaacctgtaccacagcggcgattcccactactccaactactacgcgaagcatggcaacgagcatcggattgacgtcgccctcggctcgtatggcgagaacccgcgcgggatcaccgacaaaatgaccagcgccgatatcctgcgcatggcagagtcgctcaacgccaaagttgtgatcccgttccaccatgatatctggtcaaactttcaggccgatccgcaggagatccgcgttctgtgggagatgaaaaaggatcgtctgaagtacggcttcaagccgtttatctggcaggtcggcggcaaatttacctggccgctggataaagacaatttcgaatatcactacccgcgcggtttcgacgattgcttcaccattgagccggatctgcctttcaaatccttcctgtaa

SEQ ID NO: 260033 - DNA, 756 bp, Klebsiella pneumoniae
atgacggaagcgcaaaggcaccaaattctgctggatctgctcgcccaaacggggtttgttaccgtggagcaggtgatgtcgcggctcgggatctcacccgctaccgcccgacgtgatatcaacaagctggatgaaagcggcaaactgaaaaaggttcgtaatggcgcggaagccattagcgaacagcgcccccgctggacgccgatgaacatccaccaggcgcaaaatctggatgaaaaagtgcgtattgcacgcgccgcttcgcaactgatcgcgccgggtgagagcatcgtcattaactgcggctccaccgcctttctgttgggtcgggaactgtgcggcaaaccggtgcagatcatcaccaactatctaccgctggctaactacctgatcgaccaggagcatgacagcgtgattatcatgggcggccagtacaaccgcagccacgccatcaccctcagcccccacggtagcgagaacagcctctatgccggacactggatgtttaccagcggcaaagggctcaccgccgaaggcctctacaaaacggatatgttgaccgccatggccgagcaaaaaatgcttaacgtggtcggcaaactggcggtgctggtcgacagcagcaagatcggcgagcgcgccgggatgctattcagccaggccggacaaatagacgtggtgatcaccggcaaacaggccgatgccgcgatcctcaaacagcttgaggatcaaggcgtcagcgtaatccgcgtttaa

SEQ ID NO: 260034 - DNA, 717 bp, Klebsiella pneumoniae
atgattgcactagaaatgcgcaacctcggcggtggtgaaattttacatgcctgtccgcaggagagtctggataagcccttgccctgtatcgtcttttatcatggctttacctcgtcgaagctggtctacagctactttgcggtggcgctggccgaggccggattccgggtgatcatgccggacgcgccggagcatggggcgcgctatcagggcgatgaggccgggcggatgcagcgcttctggccgattctgcagcagaatttcagggagtttcctgcgctgcgcgaggcgataatcgctgaaggatggctggaaggggagcggctggcggtggcgggcgcttcgatggggggaatgacggcgttgggcatcatgacgcatcaccccgagctgaacagcgtcgcctgtctgatggggtcgggctattttcgttccctgtcgcaaaccctgttcccctcgcctgattttgatgtcgatagcctcaacgaatgggatgtcagccatcagctggcgtcccttgcccggcgaccgctgctgctctggcatggcgatgccgatgacgtggtgccgccggaagaaacctttcgactagaacaggcgctccggcaaggcgatcttgccgccaggctgacctgtgtctggcagaaaggcgtccgccatcgcattacgccagaggcgctggctaccacggtcgccttttttcagcagcacctttaa

SEQ ID NO: 260035 - DNA, 309 bp, Klebsiella pneumoniae
atggttatgcgcaggttttcaccgtggttactggctatcgtcctcagcgggtgtagcgccctgcagggaacgccggaagccccgccgcccgccaccgaccatccgcaggagatccagcgctaccagactgctggcctgcagaaaatggccacggtaagcgtactgatgtacggttcgccgatggatgtcgaagcggcgctgaaggccaaagcagaagcggccaaagccgattactacgtcatcatcatgatcgatgacaccatggtacccggccagtggtattcgcaggcgatcctctatcgtcgataa

SEQ ID NO: 260036 - DNA, 276 bp, Klebsiella pneumoniae; identical to SEQ ID NO: 135891

SEQ ID NO: 260037 - DNA, 1638 bp, Klebsiella pneumoniae
atgcactggcaaacgcacaccgtttttaatcaacccaccccgctgaataacagcaatctgtttctgtccgataccgctctgcgtgaagccgtggtccgcgaaggcgccggctgggatggcgatctgctcgccagcattggccagcagctggggacagccgaatcgctggagctgggacgcctggccaacagcaatccgccggagctgctgcgctatgacgccaccggcgcccggctggacgacgtgcgcttccatcccgcctggcacctgctgatgcaggggctgtgcgcgaaccgggtacataatctcgcctggcaggaggatgcccgcgaaggcgcgtttgtcgcccgcgccgcccgctttctgctccatgcccaggtggaggccgggacgttgtgcccgattaccatgaccttcgccgcaacgcccctgctgcagcacgccctgcccgcgccctttcgcgactggctgtcgccactgctgagcgaccgttacgatccgcaccttgcgcctggcggccagaagcgcggcctgctgatcggcatggggatgaccgagaagcaaggggggtctgatgtgctgagcaataccactcgcgcggagaaaacggcggaagggttttaccgactggtgggacacaagtggttcttctcggtgccgcagagcgatgctcacctggtgctggctcaggctccgacggggctctcatgcttctttgtgccgcgtctgctgcccgacgggcagcgtaacggcgtgcgtcttgaacgcttgaaagagaagctcggcaaccgctccaacgccagtagcgaagtggagttttatgatgcctgcggctggctggtgggcgacgaaggcgacggcgtgcggcagatcctcaggatgggcggcctgacccgctttgactgcgcgctgggcagccatgccctgatgcgtcgcgccttctcggtggcgctgtatcacgcgctacagcgtcaggcgtttggcaaaaacctggtcgaacagccgatgatgcgccagttgctggggcaaatggcgctccgtctggaggggcagaccgcgtttctgtttcgcctggcgcgggcctgggaccgtcgggatgatgcccgggaaagcgcctgggcgcgcctgtttacgcctgcggccaagtttgccatctgtaaggccggtatcccgtttgtcgccgaggcgatggaagtgctgggcggcatcggctattgcgaggagagcgaactaccgcggttgtatcgcgagatgccggtcaacagcatctgggaaggctccggcaatattatgtgcctcgatgtgatgcgggtgctgagcaagcagccggcggcgatggagctgctggccgcggagtgtgcggaggtgaaaggacagaaccgccatctcgaccgcgcatggcgtcagctgcagcaactgctgaaacgacccgccgaagagcaggggagagagattgcccggctggtctatcgtcttggcgcgggggcgcagatgctgcgccatgcttcgccgccgctggccgaagcctggtgccggatgatgctcgacacccgcggcggcatacgtcttgacgcgccgaccctcgacgatctgctgctgcgggctatggggcgcgggcgccaggcgcctcaggcgtag

SEQ ID NO: 260038 - DNA, 954 bp, Klebsiella pneumoniae; identical to SEQ ID NO: 234552

SEQ ID NO: 260039 - DNA, 357 bp, Klebsiella pneumoniae
atgctgcataaacattgcaaacaaatcagctttactatccgggaagttatttttggcaaactctttcagctcactattcattcccttgccacccatatacggcggattcgccactaccgcatcataccgctgcgccagtatccacgcctgctgaatatacggaataaaagccttcgctgcggctttctgctgaaaatcgccttccagctccagacggtacaacgtatcgagaaacgccttcagttccgcttcttcttcctgcggcacctgaatcagcgagcccagcgttttggcattcacaaagcgtttcagcgtgcgcatcagcagctgatattccgcgctgtcggtatgcgctaa

SEQ ID NO: 260040 - DNA, 507 bp, Klebsiella pneumoniae
atggcaacgacgtcgccgatcagcgggcgcacaacctgctcggcttcacggattttccggaagttttccgcagcctttttagttgcgctgtcggccgccagacgaatcgcagagtccatcgccgttttggagactttgtcgtcttcttcatcgtcttcatcttcggctgttttcttcttgtccttgtcttcttcgtcgtcctcatcgtccgccgtttttttcttttccttctcgtcgtcgtcttcgtcgtcggcggttttgttttcttcttcgtctttcttttcggcctcatcaagagccagaagagctttgcggacttctgcctccagatcagcatcctgcgccagaagtggcttaagggtggcgcggatcgcctctgccttatgtttacgcatgtggttaagctccggtggtaatgaatctgcgaccagtacatctggccctgcgcggccgtcagggaccagcgcttcgtggtttccgaaaatgtcacgcataacgccgtcataa

SEQ ID NO: 260041 - DNA, 228 bp, Klebsiella pneumoniae
atgcaggatccttcattgcgaacgtatcggatcgcatttctgggaagcaatgccagcggcaatctgccgatgtttacccgggtgcaggccacgaccggaaaacgggcgataaaagcgtttattgaacgctgtaaacccgtcaaaggctggtttctgggcgcacctgaagacattaccgatcaggttcagaaggaggaagaagaggcgggaagcaaaccgcaggcatga

SEQ ID NO: 260042 - DNA, 231 bp, Klebsiella pneumoniae
atgatcgtttctattttttcaccttccgcaggcgctgtaaagccccgtcgtcattcgcgcattctgcgcgcagatatcaccgcacctgagattgatcccgctctcagagctttcgggcgtcatatcgccagaagtcactgcaaagggcgcggtgtccacatccccgcgatgaaaaataccgccctcgggcaggtactccgcacgctggaactgaaacgcgcatttaactga

SEQ ID NO: 260043 - DNA, 1356 bp, Klebsiella pneumoniae
atggcaccgactaccgcacagatcatgacggaaaataccgtcagccagacttaccgggcaacttattcacccgatgataataaattgcgactttacgcatcattgcgactcgatgaagaaacgtattccctgatcaacaaagcaggctttcgctgggcgcccaaacaggaactctttgtggcgccagcctggacgccggggcgggaggatgtcctgctttccctcgccggtgatatcgaggacgaggacagcaccctgtttgatcgccaggagcagcgcgccgggcggttcagtgactacagtgaccggcgggcggttgaatcggagcaggcgcttgcgcatgttgattcgctggcatcggctgtcccgctgggacagccgatcctggtaggccaccacagcgagcgccgcgcgcgccggcatgcgcagaaaattgagaacggcatgaaacgtgcggtgatgctgttcgagcgcgccgaatactgggaacagcgcgcgcaggcctctctgcggcacgcgaaatacaaggagcgtccggatgtgcgttaccgccgtatcaaaaaaatcgaggcggaattacgcaagtcacaaaagcacattacccggtctgaagagtatatgacgatgtggcgtgcgcagacgctcgatctgaaaatggcgttactggtcagtaattatgaccatatttatgcctgcttcacgctcgacaaatacccccgcccggcagagaaaagccagtatgagggctcgatgtctctccattcagccctgtctgaggagatcattacttttgaacaggcgcgtgatattgcgatccgctgtcatgagcgcacgattagccaccaacagcgctgggttaatcattaccagaaccgcctggcctacgaacgcgcgatgctcaatgaaaacggtggcattgtcacccgaacacaggaatttgaaccaggcgggcaggtactgagccggggagaatggttaaccattctccgggttaaccggagtaagggggaggtgagttcagtcgaaacgcccggttatcgctttctgggctacagcggcacgatgaaactcacgcccgaccgtatcacggactacaaagccccgacagcggaggaagccagcgacgcgaagaaagcggcgaagcgcccaccgatcgtcaattatccgggggaagggttccgggaaatgacaaaagccgagtgggctaaattacccgctgattataaaggcgtgcggggtgctgcagaaaccgaaacacacggcgcctaccgcttccgccggtgcatgacgcacggttgtacgctcgtgaatgtgtatatcacagacatgaaaaccgttgaaattccgaaaaaataa

SEQ ID NO: 260044 - DNA, 486 bp, Klebsiella pneumoniae
atgaagggagcagcgtttggtatcatcctgtctttaataccattgtcatcaatggcagcagactgctttgatatggctggcagggattacaaaattgatccggatctcctgcgtgctatatcatggcaagaatcacgatttaaaattgatgcgattgggcgtaatcctgttacgggttatggatcaggcttgatgcaaattgactcgcagcatttcaacgaactgtcgcgatatggaataaaaccggatcatcttcttagcgatgcttgtcttaacatctacaccggagcctattatctggctcaggcgtttaaaaagtggggcgtttcgtgggatgcagtcggggcatacaatgcaggcttcaaaaagaccccgcgccaggcagcaagacgttacgagtatgcgaagaagatccattactactacacggctatcaaagcaagcaaactaacttcttctaaagatcagaaaatcgccatgaactaa

SEQ ID NO: 260045 - DNA, 741 bp, Klebsiella pneumoniae
atgaacagcatcattcccctgcagaattcaccagaacgcgtctccctgctgccgatcgccccgggcgttgattttgcgaccgcggtggcactccggcggatggccacctcaacaggtgccacgccggcttacctcctggcgccggaagtgagcgccctcctctggtatatgcctgaccagcgtcaccacatgttgttcgccaccatgtggaataccgggatccgtatcggtgaagcccggacgctcaccccggaatcgttcgacctggatggtctgcgcccttttgttcgggtgctgtcggaaaaagtgcgggcacgtcgtggccggccgccaaaagatgaagtgcgtctggtaccgctgacggatgccagttttgtgcgtcagatggaaagctggatggtcaccacccgcccccgccggcgtgagccgttatggccggtcacggatgagacaatgcgcaactggctgaaacaggcggtgaagcgggctgaagctgacggcgtgcatttttcgatccccgtgacgccgcatactttccgtcacagctatattatgcacatgctttatcaccggcagcccaggaaggtcatccaggcactggccgggcataaggatccgcgctcgatggaagtctatacccgggtatttgcgctggacatggctgccaccctggccgttccctttaccggtgacggtcgcgatgccgcggagatccttcgctccctgcccccggccggctga

SEQ ID NO: 260046 - DNA, 1011 bp, Klebsiella pneumoniae
atgacgagcgaaaataacagcttacttctgaaccttcaggaggttgataagacaaccggtgaagttgttaagctggatgtcaacagcaccagtaccgtgcagccagtagcgctcatgagactcggtctcttcgtcccaactctgaaatcaacagggaagagcaaggcgaaccggaaaaacgttacagacgcgactgaggagcttgtacagctgtccattgccaaaagcgaaggatacactgacgttaagatcaccggttcgcgtcttgatatggacacggattttaaagtctggctggggataattcgctccatgtcggagtatggggtaaaaagtgacaccctggaactgtcgttcgtcgaattcgttaagatgtgcggatttgactcccgtcgttcaaacaaaaaaatgcgcgatcgcatcagtaattccctgtttaaactcgcctcggttacgctgaagttccagagcgagaccaaaggatggaccacccatctggtgcagtcagcctattatgacatcaacgaggatatcgttgagatcaaggctgaacctaagctgtttgagctttaccacatggacagaagggtactgctgcggctgaaagccattgacgccctgcagcgcaaggaatcagcccaggcgctttatacctacatcgaaagtcttccccagaatcctgcacctatttccatgaaacggatgcgtgaccggctgaatctcacctcaaatgtctatacgcagaaccacacggtgcgtaaggcgatggagcagctgcgggatattggttatctggattacactgagtttaaacgtggccgagccacctatttcagcgtgcattatcgcaaccccaaactcatcagtggtcctgtgaaggttccgcgcaaagaggaagaagagaaggcgccagagcaaaattatgacgaagtcattaaggcgctgaaggctgctggcatcgatccccttaaactggccgaagctctctcagcgatgaagccagaaaattga

SEQ ID NO: 260047 - DNA, 1167 bp, Klebsiella pneumoniae
atgggactcatggatacactcaaccagtgcataagtgctggtcatgaaatgacgaaagcaatcgccattgcacagtttaatgatgacagtccggaagcccggaaaataacccggcgctggaggattggtgaagcggcagatttagttggcgtgtcatctcaggctatcagggatgccgagaaagctggccggctgccgcaccctgatatggaaacccgtgggagagttgagcaacgcgttggttataccatcgaacaaatcaatcacatgcgggatgtatttggtacacgactgcgccgtgctgaagatgcgtttccgccggtgattggcgttgcagctcacaaaggtggtgtttacaaaacctcagtatccgttcacctggctcaggatcttgctctgaaaggactccgtgttctgcttgttgaaggcaatgacccacagggaactgcttctatgtatcacggatgggtgcccgatcttcatattcatgctgaggacactctcctgcccttttatcttggggaaaaggatgacgccagctacgctataaagcccacctgctggcctggccttgatatcatcccgtcctgtctggcactgcaccgcattgaaaccgagctgatggggaaatttgacgaaggcaaattacctgctgacccgcacctgatgctccgtctggccattgaaactgtcgctcatgattatgacgtgatagttgtcgacagcgcacccaaccttggtatcggtacgataaatgttgtatgcgctgctgatgttctgattgtccctactccggcagagctgttcgactacacctccgcactgcagtttttcgatatgcttcgtgacctgcttaagaacgtggatcttaaaggcttcgagccagatgtccgtattctgcttaccaaatacagtaataataatggctcgcagtccccgtggatggaagaacaaattcgggatgcctggggaagcatggtccttaaaaatgttgtgcgcgaaacggatgaagtcggcaaaggtcagatccgtatgagaaccgtttttgaacaggctattgatcaacgttcttcaaccggtgcctggcgtaatgccctctctatctgggagcctgtttgcaatgagatttttgatcgtctgattaaaccacgctgggagattagataa

SEQ ID NO: 260048 - DNA, 972 bp, Klebsiella pneumoniae
atgaagcgtgctcctgtcattccaagacataccacacatactcaattgactgaagatacttcatcaccggcgccggccgcgccgatggtggattcattaattgcgcgcgtgggtgctatggcccgcggtaatgcaatctctcttccggtaagtggacgggaagtaaaatttacccttgaggtgctccggggagactctgttgagagcgcttcacgcgtatggtcaggcaatgagcgcgatcaggaactacttaccgaagatgctctggatgatctcattccttcatttttactgaccggtcagcagactccagctttcggccgccgggtttctgatgtcatagaaattgcagacggcagccgtcgccgtaaagccgcaatcctgacggaaagtgattatcgcgttctggttggtgaactggacgatgagcagatggctgcattgtcccgactgggtaacgattatcggccgacgagtgcttatgaacgtggcctgcgttatacaagccggctgcagaatgagtttgcaggaaatatttctgcgcttgccgatgcggaaaacatttctcgtaagatcattacccgctgtattaatacggccaaactgcctaaatccgttgttgccctgtttgcacatcctggagaactgtctgcccggtcaggtgaagcccttcagaaggcttttgcagataaagaagaattactgaagcagcaggctgagactctccacgatcagaagaaagcgggactaatctttgaagctgaagaggtcattagtcttttaacatccgtactgaaacaatctcccgcatcaagagttaatctgagctcacgtcatcagtttgctccaggggcaacagcattgtataagggcgataaaatggtgcttaacctggataagtcccgcattcctgcggagtgtatagagaaaatagaagccattcttaaggagcttgagaaaccaggggtctga

SEQ ID NO: 260049 - DNA, 1053 bp, Klebsiella pneumoniae; identical to SEQ ID NO: 235762

SEQ ID NO: 260050 - DNA, 825 bp, Klebsiella pneumoniae
  misc_feature (804)..(813): n is a, c, g, or t
atgggtgccgccggtgtcggtatggcgacgacaggcacgctggccggtgttgcactgatgaaaccgggttatgattttgcgcaaaaaaactccgagttacaggctgtactcggcgtggcgaaagactccgcagaaatgactgcgttgcgaaagcaggcccgactgctgggtgacaatacagccgcctctgccgatgatgcggccggtgctcagattatcattgcgaaagcaggcggagacgcggcagcgattcaggcggcgacgcccgtcacacttaatatggcgcttgctaaccgtcgaacaatggaagagaacgcacagcttttgctcggtaccaaaaacgctttccagctttcaaatgaccgggtagcccatatcggcgatgtgctttcagcaacgatgaataaatcagcggccgattttcagggattaagcgacgccttaacctatctggccccagttgccaaagctgcgggagtaagcctcgaagaagccgccgccatgacgggtgtgcttcatgataacaatatcacgggatcgatggccggtaccgggagcagcgctgtcgtcagccggttacaggccccaacaggtaaggcatgggcggcattaaaagagctgggggttaagacggcagatagcaagggcaacatgcggcccgtatttaccattctgaaagaaatccaggccagttttaaaaagaataagctcggaacaagtcagacaggcgaatacctgaaaacgatattcggcgaggaagcgctgaaatcgtctaatgccctgttagacgctgcggccagcggnnnnnnnnnntcgataagctga

SEQ ID NO: 260051 - DNA, 597 bp, Klebsiella pneumoniae
atggcgcaaacactgcaatttgagaagagttatcaaaacgtactgattcccgcagagccgggaaccagcgaatacctgcaacttatcccggtggggcaactgctttgcggtgagttccgcaagccccgaaattacgcattccataagaagttcttcaagcttctgactctcgggtatcactactggacgccttccggtggactcattgagcccgctgggcgcgccctcatatccgggtttatcgactttctctcatccgacctcgatcagcgcgctgcactccagaacgccgcggagatgtatctctcctcggtcggtatctcccgttcccgcgatatggcgctgctgaaacacttcgaatcattccgcgagtgggcaaccattcaggctggcttttacgacgaatacctgatgcctgacggtagccgtcgtcgtgtcgcaaagtcgatctccttcgccagtatggacgatagccagtttaacggcgtctacaaatcagtgctgaatgtgctctggaactacattctgcgtcgcaaattccactcgccggctgaggctgaaaatgccgccagtcagctgctgagctttgcggggtga

SEQ ID NO: 260052 - DNA, 492 bp, Klebsiella pneumoniae
atgacgcgcctgggatcaaccagccgctactctgcgcatcggggtggccagggatatatgttgcccatttgcaacaccacagcggcttctctccacaacaacacccgaccaaaacctcatgacgacttggcggcatctgctcgcttacctgaatccatccctggctttgcgctggaacgtcgccgttttgctccggagaaacgtggttttgcgccgggcagcaatcggattgcgccggagatttggtgtgcagcacctgcacattttcgtcacccctgcagatcgcttcagttcctgcacttttttttaattcctgcagcatggcggcgcggcaggcgttccagcccttcacctcagcgatggctgctactgcatccacggcgtacatgctcagtgtatttggaattgatttttcctccggcactaccggcaccggctgcgcgtggcgatagagcgttaggaactctgcattttccccggcattctctttga

SEQ ID NO: 260053 - DNA, 294 bp, Klebsiella pneumoniae
atgaacctgctcaatatccgcaaagtcggctacggcgtgcggtcgattgacgagcttcgcgctccgggcagccgccctgagccgcagccgaccatcgtctctccggcgagcgatccgcagcgcagcattcttgatgacgtgcgttttaacgccccggccaacgccgcgccagcgcgatccgcaggcagcgatgaccgtttcgccagcgcaggcgccgccagcatggaaggcgaaatcaacgagcaaaacgtggaacgcgttatccgccaggtgctggagcgccttgctaagtaa

SEQ ID NO: 260054 - DNA, 921 bp, Klebsiella pneumoniae
atggaaaggaaattatcaaaaatagagttaaataaaataatcaagcagattaataggatggatcttgatactgttgattacgattatataaaaagtctgtttaagaagatgacagatggggttatgtttgtggttcaacttcgctctggcgctgattcactttaccatgtgcgacgaactgcaggaaagaaaataacaagcgtggaagaaatttctgcacctccaaactctgctgtagttaactatcaaagatgcaaccccccagggcaatcaaggttttatgcagcctcgaccagaatgactgctattaaggaaagtagatgtgaagttggagaggttatatatatagggcaatggataaacaaagctgcgtatccagttagcgctgctttatctacgaatgaaaatgcgtttaactttgaatcaaaaaaccatgaagatatactgtacacatattttgatgctctgtttactcgaagagttcatgcaactttttcaagtgactataaactaacagcagcactttcggaaatcttgatgacaaatgtcccacggaatatagacaatgttggtgaggatggaagggtcgctttaaaattcccgtcaactgtaaaccatggagtggatgtacacaatacagtaatgcatccggagtttctagcaagaaactttgatttgatgcatgttttggaatgtcgagtagtatccgcacttactggcggattaactattgaagttatggatactgcatcacattttaatgatggtgaaatattatggacaggtaataaaaacatgcttccgagattattagataatgaaggaatgaggctgtttataaatgacaatggggtggcgaggttagtgccaattgactttgagccagatgagaatttcattttaaatttcttgaatgattag

SEQ ID NO: 260055 - DNA, 381 bp, Klebsiella pneumoniae
atgcagtcccagcactttaaaaccatctcatcctactgggacagcctggatgtggcgctggtgggtattggttcaccggccattcgcgacggcgcaaactggcacgccttctacggcagcgaagagagcgacgatctcaacgcccgccacgtcgccggggatatctgttcgcgtttctacgatattaacggcgggttagtcgataccaatatgagcgaaaaaaccctgtcgatcgaaatggcgaagctgcgccaggctcgctattccatcggcatcgccatgggggaagagaaatactctggcattcttggcgcattgcacggacgctatattaattgtctggtgacaaacagagaaacggctgagttattactgaaataa

SEQ ID NO: 260056 - DNA, 396 bp, Klebsiella pneumoniae; identical to SEQ ID NO: 223260

SEQ ID NO: 260057 - DNA, 267 bp, Klebsiella pneumoniae
atgggccgcacgctgggcgaactgcgacaaaccatgacggttggcgaattcaggatgtgggctgaatacgaccgtatcagcccaatcggcgatattcgcggcgatattctcaatgctcagctggtatctgcggtttacggagcgcagggcggtaaagtcaccattgaagatgctcagcttcagtggagcacagaagaggatgaggtaaacgaccgcggcgatccctttgccggattagaggccgctttgttcgccgcttctaagtga

SEQ ID NO: 260058 - DNA, 255 bp, Klebsiella pneumoniae
atgaataaccagcaaacaatgctctatcagggtgtgctgatcccccgccccgtgttgaacgtggatctgcatgtcctccctgattttaccgggcgggtagtcgtgcacatcgagaacgggagggtgatatgcgaccgccagctgttcgacgacgagcacatttgcacactggccacgtttatcgaaatggcccgcgacgcggggttgaggatcgaggaggaagctggtggcactgacagcgatacgaattcctga

SEQ ID NO: 260059 - DNA, 219 bp, Klebsiella pneumoniae; identical to SEQ ID NO: 211935

SEQ ID NO: 260060 - DNA, 426 bp, Klebsiella pneumoniae
atgattgacaacagaactgtcagcgccattgacctggcgttgcaaaagcacccaacgccagttggtgatctgttcgccgcgatccgccacggacgcatgaagcggtgcttcagccgggataccgcaattcgttacctggcgttcttcatgacctcccgagcttttgggcgctctggtttcaagcagcgttatccggacgtgcaggtaattcatccactgaatccagaactgagtagctggcaacgtggcgccgtgaccactgagtattttaacgcccaccagcgcaccgttcgccggctgcgtcgcatcctcgcccgcaaaagagaaatgcaaaagtggtgcaaaaagtgggatgccatgcacgaccgctacgtgaaagagcgcgaagaactacaggcctgtaagcctggagggctgagtcgatga

SEQ ID NO: 260061 - DNA, 195 bp, Klebsiella pneumoniae
atgattgcttacttacgcgttgttctatcggtggtgattgtcgccagcgtttatgggctgttcgttccgatcctcatttcgatgaaggacacgacagcagttatatccggttttgccctggcgattctgaccccgccgtgcatctacgccatttgtaagggtcttgtgcttaccgtaacgaaggaaaagaaatga

SEQ ID NO: 260062 - DNA, 828 bp, Klebsiella pneumoniae
atgaaaaaagcaattatggcttcaattatcgcactctctgccatcggccttgttggttgcgatcgagttgagcccggcaacgtgggtatcaaggtgaataagttgggcgacgataaaggcgttggtgaagtcgtcggagtcggccgctactggaccggctggaatacagaggtttatatctttccgaccttcaagcagatgaaaacgtatgaagacgctttcaacttccagatgagcgatggaaccaccatcggctaccacatcggggtcgcgtacaaggttgatccgaccaaagttacaaccgttttccagacctaccgtaaaggcgtggacgacatcaccgacaccgacctgcggcagaaaattgctgacgcccttaatcgtctcgcaagtcggatgagcaccgataaattcattgacggcgggaaagctgagctgcttgaaaacgcactgaaagagatccagtccgatatggggccggttggtatccaggtgatcagcctttcttacgttggccgtccggaatacccgccgacagtgatcgaaagcatcaacgccaaagttacggccaaccagaagacgctgcagcgcgagcaggaagttaaacaacgtgaagctgaagccaacatgttgcgagccgaagccgatggccaggcggatgcaaagctgaaattggctgaagcagaagcaaagtctatccagatccgtgggcaggccatgcgtgagaaccctgaggtactgcaactggaggccatcaacaaatggaatggcaccctgccccagtacatgaccagcggaacaaacaccccttttatccaggttaaatga

SEQ ID NO: 260063 - DNA, 594 bp, Klebsiella pneumoniae
gtgctggagctgcgaggcgaaccatgcctcgggctggaggagttcgcgccggtaaagcaggagattgtctgtagtcgcagctttgggcagcggatttccacctacgaagagatgcgccaggcaatatgcagctacgcatcgcgcgcagcggagaaactccgtggtgagcaccagtattgcagatttatctcagtatttgttaaaaccagcccctttgcgttgaatgaaccgtactacgggaacagcgcatcagtaaagctgctaactccaacccaggacagtcgggacataattaccgcggcgacgaaatgcctcgatgtaatctggcgagacggacattgctaccaaaaagcaggagtgatgctcggggatttcttcagccagagcgtagcgcagcttaacctcttcgatgataacgcaccacggaagaacagtgaaaagcttatggaagttctcgaccacctcaacgcaaaggatggcagggggacgctatattttgctgggcaggggatccagactgcctggcagatgaagcgagaaatgctatcacctcgatacaccacgagatatagtgacttgattaaaatcagataa

SEQ ID NO: 260064 - DNA, 639 bp, Klebsiella pneumoniae
gtgctgacggtccagaccgaccccagcccgctaagcggccaaacctcgggtgatattctcgcgcgggtgaaaccgcgcattgacgcactgccgctgccgcacggctaccgtatcgaatggggcggcgatgccgagaactccagtgaggcgcagcaggggctgtttacaaccctgccgcttggctatctggtgatgtttatcataacggtgctgatgttcagttcgctgaaaaacgccgtcgccatctggctgaccgttccgctggcgctgatcggggtcacacccggctttctgcttaccggcatccccttcggctttatggccttaatcggcttgctcagcctgagcggtatgctgatccgtaacggcattgtgctggtagaagagatagagcaacaaaaacaggagaaagatcaaagacaagctattattgatgcggcaacctctcgtctgcggccgatcctgctgaccgccttcaccaccgtacttggcctggccccgctgctgcgcgatgtctttttccagagtatggcggtggtgatcatgttcggcctcgcctttgccaccgtgctgacgctgctggttctgccggtgatttacgcctgctttcaccataaggatatgacgcctcaacgatga

SEQ ID NO: 260065 - DNA, 1530 bp, Klebsiella pneumoniae
  misc_feature (1501)..(1510): n is a, c, g, or t
atgggagtttcttttatccctggcgtcaacgttattgacgtcggccacgctctcgaggcccgcctccagcagatggccgccgacaaaccggcgggcatcgacatcgctattttttacgatcaggcagctgaggtcgcccactcggtcaatggctttattaccaattttctgatggccctggcgattgtcgtcggcgtgctgctggtatttatgggggtgcgcagcgggattattattgctctgtcgctggcgctcaacgttctcggcaccctgcttatcatgtatatctgggggatcgaactacaacggatctccctcggagcgctaatcatcgccctgagtatgttggtggacaatgccattgtgattgtcgaaggggtgctcatcgcccgtcagcaaggctctccgctgctgggcgcgattaactatgtgatccgtcgctctgccctgccgctgcttggcgcgacgatcatcgccatcctcgccttcgcgccgattggcctctcccaggactctaccggggagtattgcaaatcgctgttccaggtgctgctgatctccctgatgctgagctggttttccgctctgaccatcaccccggtgcttattaagtggtggctgtttaaaaacgccccgtcggccgccgccgcggaggaaaaggccgatccttaccgcggcagcttttaccgtggctatcagcaggcgctgcgaatactgctgcagcaaaagaccctgaccctggtgctgatgggtgcgctgttagccggagcgatctggggctttacctttgttcggcagaatttttttccgtcatcgaatacgcctatattctttgtcgacctgtggctaccctacggtaccgatataaacgccacggagaagatgacccgggatatcgagcggtcgatagccggtcagccgggggtggtcaccaccgtctccaccatcggccagggcagtatgcgtttcattctcacctacagcgggcagcgccagtacagcaactacgcgcagattatggtgcggatggatgatcaacgcggcatcgcccctgtcacccgccacgtggaggactggattgccagaaactacccgcaggttaacgccagcaccaaacgcattatgttcgggccctccggggatagcgcgattgaggtgcgcattaagggcccagacccggatacgctgcgcgcgctggcgagtcaggtaggcgatatcctcgccgcggacccggcgaccgacagcgtgcgtaatgactggcagaaccgcagcaaagtgatccgcccgcagtattccccggcgctgggacgcgagctgggggtggataaacaggatattgataacgcgctggagatgaatttctccgggagtcgcgccgggttatatcgtgaaggggccgatctgctgccagtgatcgtccggccgccggaagcagaacgtcaggatgccaaccatctgaataatgtgctggtctggagccagagtcgccagcaatatatcnnnnnnnnnnggagtgggaagatccgttga

SEQ ID NO: 260066 - DNA, 330 bp, Klebsiella pneumoniae
atggtcccacttactgccgtagatgcggggatctttgttcatgctctggtcctattgtttggatggacgtacgatcctcacctgaccgaacagcggctgccgctaaacctcgccgttcttggcaatgaggcaaccccggctgtcaagcacggaggctatcatttcggctttatcatcatcagccgagaagacgtgcataacctcattaccatcaagaaaaattgtgatgcgttcacgtcccggaactatgcgctctcagggatcatcgtcaaatacagtcaggcgcatattacctccattaaaaaggccacccatcggtggcctttttaa

SEQ ID NO: 260067 - DNA, 300 bp, Klebsiella pneumoniae
gtggaggcaaaagttctggatttcggagtttttaagaataggcagatcgccaattttaatatcagaggccataccatcacgcttcatctggcgggccacttctttgggcttatcggaaagctggcgcccgccggtattctcatcctcactctgctgtttcccctggcggcccagcacccagctggcgatgaagaatgtcacgatacagataacaagagaaaccacggcagcaaagacgaaactggtccacagctgctctccgcaccagatagtatatttatcggccaggatttgttctga

SEQ ID NO: 260068 - DNA, 477 bp, Klebsiella pneumoniae
atgggtgtcagcgttggaggagataaacagccagccattgggtcggtcctcacggacaccgcgcatccagtccctgatagtgaacggctccccgttcttctcgatgccctgcaggtagcgaatagccttgacgtagttggtcagcacggcacgaatggagatggccgttttctcaattttctcttcaaccaggttcgctgccggcgtgttctgcagataggcgcgcagcttgtcgattttaatggacagcatggtatcaaccagcttctcgtagctgcgatccttgtcttcacgcatcaggtacgcgccttcggcaaagatagtgcgaccggagccctgccagaacgggtcttctttggtgcccatcgggataagagtgttggagatgttgtcgaagtccggcagcgtcaggcactctttccacaaatcccaggccgcgcagcgcgagtccagcgggttgaggattttatccagtga

SEQ ID NO: 260069 - DNA, 273 bp, Klebsiella pneumoniae
  misc_feature (148)..(157): n is a, c, g, or t
atgccgcaacaacaacacaactccgccgccgggcggccaatactgcaactgcgcaacgtctctaaacattttggcgcggtgtccgcgctgacggatatcgaattagaagtccacgccggcgaggtggtcgcgctggtcggcgacaacnnnnnnnnnnagcctggacgctgctgcaggagctggcggcacgtattccgtcggtacgcgaaccggtggcatcgctttccggcggccagcggcagaccgtcgccatcgcccgttcgctgctgctga

SEQ ID NO: 260070 - DNA, 411 bp, Klebsiella pneumoniae
atggttgccctgacggatcgccaccgcctcgctggacagcatattgcggatactctgcagcgatttttccgcattactctcctgaatgaagccgatcagcgcattgaccaccgccacggcgaggatcaccgccatgtcgatccaatggcccatcaccgccttgagcaacgctgccgccagcaggacgtagatcagcacatcgttaaaatgcgcaataaaacgcagccaggcgggtttacccggcttctgcggcagggcgttttcgccatactgctgcaggcgcgtagccgcctctgttccgctaatcccttccggcgaactctgcacgctggcgagagtctcctcgacggagcgctgataatagggcgcccccggtttatctgtattcatactctttccctcgatttctga

SEQ ID NO: 260071 - DNA, 183 bp, Klebsiella pneumoniae
atgtatttatattgcgaatcaaaaggaattttactgcgcagttcgctggtcagcggcggcagagtgaccttcgccgccagcaccttcagcgccccctcggtcgggccgccggtgattttccacagcccgctctcctctttgataagctggctgtcgttacacagatcgatggtgcgcagatag

SEQ ID NO: 260072 - DNA, 135 bp, Klebsiella pneumoniae
atgtacattgattccatttatttctttagtataaatattaccagcaacatgcgagcgtttatcaatgacaaggcattttttccctttcttttttgcttcgtacgcgaaggtggcgctttcatgtcttactcctaa

SEQ ID NO: 260073 - DNA, 927 bp, Klebsiella pneumoniae
atgaggcaagaaccacgaggcgtaattgttcctagtatggactttgagagcaagatgataaagagctcaccacttctctcagcacacagtttgagatattttttactttattgggataaagtggtttctgtaaataatcccattttcgggattggtaattcagactctaattctgacttctcagttttaaaaaagattaatttcattgaggagaggggggagcatttctctgaatatatgcaaaggatgggggggaatctgcagattagagaggataatagagtcgatgttttatcagaaaccttcgcatataccgctgaaaaaataatttcagctaatcctggggtatttgccacacatcaatttggagatgaaggttatttctccaaagtaagcacaagcatacagaatgcaaattctcttgagtttgagttatactcttgtttcccatgcccgccggcaagtgtacccttaggtgatatatggtgctttaggcagagaaggggcgatgaactgatggcgttgagagagtcaatagatgatatatatttctctatgctaaaatctggtgatattttaagggagaaatctgtaacattaagagggttaagaaatgccgtctcagatttgaacagagtatatgatgaatcttggaaaagcaaactcctccttaacaggaagattacttttgatttcccctctgtaaatattaactcattgcttaaaagtgttgctgttggatcactctcattcccagttacagggtcgccattagtttctctttgtctagccggagggcattttttactgaatagtagtataaagatatcaaaacctaactctaaaattattagaactatttcgggtaagcaagtggacttgtcatatattagtagttacgacggaaattttgtaaggcgagcttag

SEQ ID NO: 260074 - DNA, 333 bp, Klebsiella pneumoniae
atgagtgttaaagattacgagattgatttaaatggcgttgatccagcgaacctggatgctgttacaggagtgttggagtcacactcccatctgttcgaagattatttccttgctggttatggcggtgatgcaagctactccgttattgatggcacatttgaagttgtcagcattggtgaaaattactttgaatatgaagtcgggattaatttctttgctggatgcagggatatgaatgattcccacgaagatacagggttgattaattatgaagttagagatgggtgcattcacattgaattggatgactctatctggagactagataattag

SEQ ID NO: 260075 - DNA, 849 bp, Klebsiella pneumoniae
atgtttttttataaaaaaataattaactctaagattaacccaaacatcattcctaaaataacagcatttgtagcaaaaaaaggacattatagagaagcgtttagattaataaatattgcgaacttatcatcagcacctgcttttgatgacactaattttttattcgggttgaaaaacctgtctattgtttatgaaataactagccttatcatgctccataagagtatctccgaaattttcggagtaagtttaagccttcaatcataccgagagcattctgaaaccaatgggttcggtggggtagcggttaacaggccaaccggagcagtcaataatcactttatgttctctggagacactttccaggtggagcttttatatgagccaaagatttttccaatggcaagctcaacacgtccaggcgatttgatcgataccagcaattcctatgccacatctctatatggaaaacatcatttctgtcctgactttgtaattaaaatacattcaaaaaaatggaaaaaatcattaacactaatccttgattctaaatataaagatgcaagaaatgtacgggattacgatattcctaaactagtaccacgctatctctttaatattcattctctatcaaacgacaactcagtaacaccaattgacttgctgattgttttattcccacacgacaaagcaggaacattagtaaaaaccgtttcttctaagcatttcatcactggatctcatccagtattacctcaagcacttggaacaatatacacaccacttaataatgggctagatgacaagttaaaaagcttagtgcaatattataatcttaaaatgatgtag

SEQ ID NO: 260076 - DNA, 249 bp, Klebsiella pneumoniae
atgcgtgtagaaatcagcattgccaaagagaaagccgcgaaaatgccaaaggggtcaatggaggccttgaaagacgaaatgacccgtcgaatcagcaagcaatatgacgacgttgaagtgatcgtgaaaacagccagtaatgatggactgagcgttttgtgggcgactgataaggaaatcgccaaagaatttgtagagaccactcttaaagacgcctgggagacggctgacgactggtttgtgcgttga

SEQ ID NO: 260077 - DNA, 483 bp, Klebsiella pneumoniae
atgtcaaatccagcatgtttatggttaactgatgagaatgattcgcctattataggttcttgcctgatgcccacacgcacgggttccatcgaattgcgcgcagtgaatcatcatgtttggttacctaccgataataatacaggaaagctgacgggaacccgtcttcatacaccggttaaaattcaaaaagagtttgacagaacaacacctttgctatttagggctctttgtgaaggtcgaacattaagatcggcaacgctaaaaatgtacagaataaatgaggcgggactggaagttgaatattttaacatagcgatggcgaatattaagattacggcaatcacaccaaatttacatccggccggaatgacaagtactcaccttgaagacattgatttccgttatgagacgatcacctggatatacacagaagggaacatcatgtatcgtgattcatggaacgatcgctgttgtgcatggtag

SEQ ID NO: 260078 - DNA, 195 bp, Klebsiella pneumoniae
atggatttcttgaaaagatggttaaaagaagaattcattctttttttatggggatggggtattgtattattaatcattatatttagcatgattgcagtctctcttttttctgacattgccattaacttaataggactttttgttttattaatcattgggtttcacgttgtcgtttggtttaaagttaaaaactga

SEQ ID NO: 260079 - DNA, 141 bp, Klebsiella pneumoniae
atgctgaccattcatcattatcaaagactgataggcagcattctgttcagcggcttgctggcgaatcagagcgacacgacgattctcaagaccctcaagcacctgctgaatctcctgggctttagcctgcagttgcgttaa

SEQ ID NO: 260080 - DNA, 270 bp, Klebsiella pneumoniae
gtgataggtgttcttctcgatctgcatcagactgacctgcatggtccgcccggttccgacgtaggcgacatccggctctgccagcggatcgttaatcaggctgtatttaaccgagccgacagtattcccgcttcctttcacacacagcacacaccgggcgctgtcattgaaaccctggaagatgttggccctgacggcaagacggcccattttggttaccttctgattgcgtacgtcaaagttagcgaacgcctgagccccggcgcctaa

SEQ ID NO: 260081 - DNA, 246 bp, Klebsiella pneumoniae; identical to SEQ ID NO: 136434

SEQ ID NO: 260082 - DNA, 195 bp, Klebsiella pneumoniae
atgaatcgagccccgcgtgatattgccgtccagcttaaacgcggtatcgccgccatttcgcagcatgcgaagattcgtgaagtcgaggtcggtaaaggtaccactggcaatattcaccggataacgaccgttatttttgatatccatattgtcgaagcgaacatccgccagggtgttagcgccagcctcgattaa

SEQ ID NO: 260083 - DNA, 255 bp, Klebsiella pneumoniae
atggagcccggtcaccccgttacgctcagcctgacagttcagcatcagcccgttcttgcccgggcggggagcgataccgttgttagccagcgtccctgcgtcaatgctgataccggttttgaggttgtcattgaactggccgttgaccaccaccagtccggatgcgccacagtcgccaaacccatgcccgtttccggtacacacagcatcggacacgataatctgccgggaaacgtaaggctgacctggccctga

SEQ ID NO: 260084 - DNA, 249 bp, Klebsiella pneumoniae
atgcgtgtagaaatcagcattgccaaagagaaagccgggaaaatgccaaagggttcactggaggctttgaaagacgagatgacccgccgtgtcagtaagcaatatgacgatgttgaagtgatcgtgaaaacggccagtaatgatgggctgagcgttttgtgggcgactgataaggaaattgctaaggagtttgtagagactactctgaaagacgcctgggaaacggctgatgactggtttataaactga

SEQ ID NO: 260085 - DNA, 141 bp, Klebsiella pneumoniae
atgagtatcgagctgggaaggataagtgttatagctattgcgagagataatactacagcggatcttaataaagatactaatcctatattaatggaaaaggaatctatcagtaaatctagtctgccgatgttatttaaataa

SEQ ID NO: 260086 - DNA, 138 bp, Klebsiella pneumoniae
atgaaagccaacgctattagcagtgatgcagttttctctcctgtactattttttaacaaaaatgtaatggggatggtgattgataacgtggcgaatactgttgtgaatgtttctattaatgccttgccgacgttttga

SEQ ID NO: 260087 - DNA, 252 bp, Klebsiella pneumoniae
gtgttgttcagaaccgtcgatctcgacatcaatcaggttaaagttttcgaggtagatttcctgcggcgaacggtaataaaacgcggcatttgccagcatcggcatgaataccgcgcctggaacgcagcggatcgtcacgttaggtttcgcagtgatataggtatgcaggcgatatacgccagggcgaaaaacgatttcgccaccatatggcaacttgcttacctggttgactgcggtctgcatctgcagtga

SEQ ID NO: 260088 - DNA, 246 bp, Klebsiella pneumoniae
atgtcagagatcactgcatccgagcaaatccgcctggatataatcaagaaagttaattatgacaccgcagcggccaagctggccattgactgggtaggcgacagctatctgaagtctgagctattcgctgactctttcgatcgtgttttcacggaaagtgagattgtctcgaagacccgtaaggcaatccaggaagcgaccgaagcgctggcgctgtttgatactgccgctgagaaagtcagctaa

SEQ ID NO: 260089 - DNA, 441 bp, Klebsiella pneumoniae
atgccaaggcatcggagaggttggaggcagcatttatttgaatggttcgccattattgcgaccacgattctcgctttgtttttaagctttgcttctgaaaatagcccaacaattcacgcattattttttgggagctttttcatcattattggaatatgctcaaacatagttaaacgtggaaaagcaaagctatacaaagaaatattcaataccatatggaattatgaaactgcattagtatttatttacagcttatattcatttttggcacatttaaaagatgaaaagcccattacccaagtgatgaacgaattattagaaggcagcccatacattatttactcaggtattgcgattctaacaatcacagtatcttttcgatttggtttaggtttggcagagttacttattaaaacagagcccccaaaaaatgagcaataa

SEQ ID NO: 260090 - DNA, 1929 bp, Klebsiella pneumoniae
gtgtttgacggcgtcgattactttgccgaggtggcgctcaacggcaagacgctgacccggcacgaaggctattttcagcgcttcccggtggacatcaccggggccgttcgccgccataatcagctcgccgtgcgggtcgacagcccctatgaagacccgcaaaaaatctggccactgcacaagacgctgatgaaagggatcctcaatcagcacgatacccgtccgggcggcgcctggtcggttcaggggcaggatgccaactccggggggatctgggcgccggtgaagctccatctgagccgcggcgtcactatcgacgaggtgatcctgcgcccggactggcaacaggggctggagaagcccatgctgcgtgccgaaatccgctatcgggccgtgacgcccggccccgtcacgctgcgcctgacggccaccccggacaatttttccggcccgccttttcagcaggcctttgcggtcaccctggagaataccgcaggcactctgcgcgtctcgctgcccatgccctcggcaaagctctggtggccggtgggcacaggtaaaccgaacctgtaccgcgtgcgcgccaccctcgtggataagcgggggatcatggataccgccgtcacccgcaccggattacgtaaggtggaagcgctggcggataatcagggctggcgcatcaacgacagacggctgttcattaagggcagcaactatattggctccccatggctaagcaccatgacgcggaaaaagtaccgtcgggatttcaggcttgtcacggcgatgaacgccaacgccatccgtgtacacggccacgtggcgggccgcgcgctgtatgaggtggccgatgagatgggactcatgatttggcaggatgtcccgctgcagtggggttatgatgacagcgccgccttcgccgataacgccgtgcgccagacccgggcgatgatggaccagttcggcaattcaccggcgattattgtctggggcggtcacaacgagccgccgtggaactcgccgtggatggagaaacgcttccccgactggcgtaaaaccttaaaccagaccctgacgcagcgggtgggcgatgcgctggcggaagacacctcccgcatcgtgcatcgcttttccgctgtcgaagagcactactgggcaggctggtatttcggcaccctgcgcgacctgctcgccccggcgaaaaccgggattattaccgagtttggcgcccaggcgctgccccggctctccaccctgaagaccattatcccggcccgtctgctgtggccgaaaaccaccgctgccgacgaccccggctgggtgcgatggaagtaccataattttcagcctttccagacctttaaatttgccggtattccacgaggcaacaatattcaggagatgattgaaaacacccaagcatatcaggcccggctggtggcgctggcggcggagagctatcgccgtcagcgttatcagccggtgaccgccctgttccactttatgtttgttgagacatggccctccatcaactggggggtggtggattatctgcgccagccgaaggccggttactatgccctgcagcgcgcctatcagccgatcctgccgtccatcgagccggtgaccgccagctggcgtcagggaagcccggcgacggtgcgcctgtgggcgattaacgatacctgggcagcctgcgaggattgccgcctgacctggcaggtcaggcaaaatggccagatgctcgctcagggagaaacctcgctgaccctgccgcccgacgctggccaaatggtcagggagttgaccgtcacccccgccggcccgcagcccgtgacgatcgtctaccgcattgacaaccgtcgcggcaaacacgtgggtgctaaccaacataccgagcccgtcgccgcggcgcaggcggggagatga

SEQ ID NO: 260091 - DNA, 222 bp, Klebsiella pneumoniae
atgagtgaacttcagagcattacccagcaggttggtcaggatttgccgcagccgggggccatcgacgatcagcacctcaggcaccgcaggggagatatccaccagcagctcaatgcccttttcgctggcggcaggcatatgcgggcggatcagcgactgaacaaaagggcggatctccagcggctctacgtccacctgcatctttcccgactcaatgcgtga

SEQ ID NO: 260092 - DNA, 489 bp, Klebsiella pneumoniae
gtgctctgctttaaaggtttctaccgcttccgggtcactaatatcaaccttctgcagggctttcagcgtggcaaattcatcgtagttttgcaggatgttttctgcccgcagatattcaccaaacagtttgacgaaggcttttttctctttttcactctcgatactggcagggtcagggaagcgctgctccagctccgaaacaatagacataaaacctcgtttagcttcgccggttgccgcatcgctaaagccctgcatgtactcttcgtagcttttttccagtaccacattcttggtgtttttgtcgccaaaaagtgtaatggcatcaatggtcggacgctccaggtccctgaaagtcacgatattgccgaaggttttggttgcatcatagatacggttggtgcgggaaaatgcctgcatcaggccgtgataacgcaggtttttgtcaacgaacagagtgttaagcgtcggggcatcaaagccggttaa

SEQ ID NO: 260093 - DNA, 396 bp, Klebsiella pneumoniae
ttgcgggaaaataggcgtaccggtaaaaccaaactgataaaagcgtctgaatttctttttgaggtttttctgggcctcaccaaactggctgcggtgacactcatcaaagataaacaccacctgctgctgatagacgggcaggtcagcttcggctttcatcaggttattgagtttctgaatggtagtgacgatgattttgttatcgtctttatccaggtttcttctgaggcctgctgtattatccgaaccattgacactgtccggagagaagcgctgatactccttcatggtctggtaatcgaggtctttcctgtcgaccacgaagaagactttatcaataaagtccagttccgtagccagacgtgcggccttaaagctggtcagggtttttcctga

SEQ ID NO: 260094 - DNA, 924 bp, Klebsiella pneumoniae
  misc_feature (801)..(810): n is a, c, g, or t
atgcttagtgacctgcgggcgctgacgcgtccttttcgcatcatgctgtattccgcgctggcgctgcaggcgctggccggcgtcagttgtcatcggctgcgcagccaattggccgccaagctggcgcgtctgccgctgaactggtttgtgcggcagggcgagagcggcgccgcccgggcgctgtcgcaggacattcaggcgctgcatcagctggtggcccatgcgccggcggagctggtgcagttggccgtggtacccggctgcgcgctggcgctgctggcggcggtgcagtggccgctgctgctgttcacgctgatacctttgctggcggccgcgctgctgtttcgcgtcatccgttcgccgcgcatgcggtcggcgtttgaacaacgcgatcgggcgtttcggcagttgaacgacgattatcggcagctggcggcgtatccgctgttggcacgccagtttcccggtgcgggcatcgaagcgcgcgcgcggcagagcctgcggggctttctcgccgcctttcaccgttggctgcggcgtatcggcgcgctcggcgccgtggcccaattactgctcagcgccgcgctgtcggccggctggctgttgctcggcgttcgctggctggcgcccgatctcacgctggcggagctggcgctgttcgtgttgctgttgcgcagcgtagcgcaaccggtgatggcgatggggcacggcggcgatgcgttgcgtgcggcgacgctggccgctggccgcattcgggcgctgctggcgcatcccgaaatacgctggggagggcgctcgacnnnnnnnnnngcggttgagcgatctcggttgccgacaggacgaacgctggttgctgcagggcgtcaatctggccgtcgaaccgggggagtggctggcaattgtcggtgcgtcgggcagcggtaa

SEQ ID NO: 260095 - DNA, 255 bp, Klebsiella pneumoniae
atgggggaggggacgacgggtgatatcgatggcaaagtagcggtacagcacatgaccaaactggatgtcggccagggtgaacgtatcgcccaccagatagcgactgccggcgagacgtgcctcggcaatcgccagcttttgctccagggccgtcaccgccgcggcgatggcctgcggatcccgctcggcggcaggcgtgcgcaccacgcgccagaacaccggcgccgtaaagccgagggcgatattctgctttga

SEQ ID NO: 260096 - DNA, 1182 bp, Klebsiella pneumoniae
atgagcaagatgatgcatgaccagccttctgctgccgtacccgcttcccgggaccggcgcaattttctgatcgccggcgccggtctggcgttggccgcaaccacccttggcaggagcggcgccgtgatggcgaaaccggctggtcaggacacgccgaacgcccctgcagatgctgttcccgtccggaaggaaaccttaaccacgcgtaaactcggctcgctggaggtttccggcatgggactcgggtgcctgccgatggtgggctattacggcggaggtccgcgcgatcgtaaagccatggtttcgctcatccgggcagccttcgaacaaggtatcacgttctttgatactgccgaggtgtacggcccccatctcagtgaagaatttgtcggggaagcactggcccccgttcgcgatcatgtggtgattgccaccaagttcggcttcggcgtggaggaggggaagcccacttcccttaacagccaccctgaccatatccgccgtgccgtagagggctcactaaagcgtctgaaaacggaccacatcgatcttctttatcagcatcgccccgacccgaatgtgccgatcgaggatgtggcggaaaccgtgaaggcgctgatccaggaggggaaagtgaaacactggggactgtcggaagcgagtgccaggacaatccgccgcgcacatgcggtactccctgtgactgcagtgcagagtgagtatgccatgtggcggcgggaaccagagacgcggatatttccaacgctcgaagagctgggtatcggtttcgtaccttactgcccgactgcccgcagcttccttgccggagcagtcaatccaagccagcggttcgacagcaccgatcggcggcataacctgccacgcttccagcccgatgccctggccaaaaacatggtgctgcttgaattcgcgcagtcgtgggcccgtcgcaaaaacaccactccggttcagttcgcgctggcctgggtgatggcgcagcggccctggattgtccctatcccgggtacgacgcaatatccgcacctgatagaaaacagcggtgcaccgcaagtccggttgacggacagcgagctacgcgaaatcgatgcggcgcttgccaaaatcccattgcagggcggtcgcgccgatccgtttaccgaaagtcagtttgataaaagttaa

SEQ ID NO: 260097 - DNA, 909 bp, Klebsiella pneumoniae
atgcaaataagcagagctgatgttgccgatcttatttatttcatggcgattgcacgtcatcgcagcttcagccgtgcggcaattgaattaggcgtcagtgcatcagcgctgagtcatgccctgaagggactggaaacccggctcggagttcgcctgcttaatcgcacgaccaagagcgtcacccctacggcagctggtgaggaactggttcagtctgttcttcagcctttcgacaccatagaaggcgcgcttgaatcgcttaaccggtatcgcaatacccctaccggacgtatccgcatcaatgcagccgttgaagcggcaaatcttttgcttgcgccggtcatgcccgcttttatggatcgctatcccgatattgaaatcgatattgtggccagcaaccgtatggttgacgtgactgatgcgggcttcgatgccggcatccgctatggtggcaccgtcccggaggacatggttgcccggcgtttatctgccgatattcgctgggttatcgcggcctcccctgattacctggaacgctacggaacgcctgaacatccggatgatttattacaccatcgctgcatcagcaatcgtctcggtgacgatcgggtttatcgctgggaacttaagcgagacggcgaaacataccaaatgacagtgccaggctcagtgacggtcaatcatgccgaaacgggccttgtagccgtattgggcggggctggcctgatgtattttccggagcctctcgttgctccctatgtcaaggatggacggctccgcctggtgcttacggaatggtcaccgctagaggaaggttttcatatctattattcaagccgccggcaactgccgaccgggcttcgccttctgattgagttcatacaggaggccaggccgctggggttgtga

SEQ ID NO: 260098 - DNA, 1221 bp, Klebsiella pneumoniae; identical to SEQ ID NO: 216104

SEQ ID NO: 260099 - DNA, 1392 bp, Klebsiella pneumoniae
atgttatcattattaaaaaaaggcccgtcggcgaataaagttcctgctgagaaaattcaggcaacctatggtcgataccgtatgcaggcgctgctaagcgtatttctgggatacctggcgtactatatcgtgcgcaataacttcaccttatccacgccctatctgaaagaacagttagacctcagcgccacgcagatcggtttgctcagcagctgtatgctcatcgcctacgggatcagtaaaggcgtaatgagcagcctcgcggataaagccagcccgaaagtctttatggcctgtggcctggtgctgtgcgccatcgtcaacgtcgggttaggattcagtaccgcattctgggtcttcgctgcgctggttgtcctgaacggcctgtttcagggtatgggggtcggcccctcttttattactattgcgaactggttcccgcgccgtgagcgtggccgcgtaggggcgttctggaacatttcccataacgtcggcggcggaattgtcgccccgatcgtcggcgccgcattcgccattctcggcaccgagcactggcagagcgccagctacattgtaccggcctgcgtggcggtggtattcgccattagcgtactggtgctgggtaagggttcgccgcgcgaggaaggtctgccttcgctggcagagatgatgccggaagagaaagtggtgctgaagaccaaacacggccagaaagcgccggagaacatgagcgcatttcagatcttctgtacctacgtactgcgtaacaaaaacgcctggtatgtctcctttgtggatgtgtttgtctatatggtgcgtttcggcatgatcagctggctgccaatttacctgctgacggtgaaacatttttccaaagaacaaatgagcgtcgcattcctgttttttgagtgggcggcgattccgtctactctgctggccggctggctctccgacaagctgtttaaagggcgccggatgccgttagccataatctgtatgacgctaatcttcatctgtctgatcggctactggaaaagcgaatcgctactgatggtcacggtattcgcggcgattgtgggctgccttatttatgtcccgcagtttctggcctcggtccagaccatggaaatcgtccccagctttgccgtcggttcagccgtgggcctgcgcggatttatgagctatatctttggcgcatcgttaggcaccagcctgttcggcgtaatggtcgataaaatgggctggcacggcgggttctatctgctgatgggcgggatcgtctgctgcatactcttctgctacctctctcatcgcggcgcgctggaacttgagcaacagcgtaaaatcaccgagcaggaagaggcccggctggcactggctgacgcacagtaa

SEQ ID NO: 260100 - DNA, 450 bp, Klebsiella pneumoniae; identical to SEQ ID NO: 216103

SEQ ID NO: 260101 - DNA, 864 bp, Klebsiella pneumoniae
atgcaaggaacgtttattggatttaataccgcaggtattacctttgaaaatcgctttatggcattgctgttgaaaataaagcaggaaaatggtttctgtcagcagtattatctgcaagcaccgatagtgctcgatcttcttcttatcctgcaaaaccgtctgcttgtaacatttaaatctttgcaagatcaaggcgaaacgtataaagaaaagctgatcgcttataatgaatcgttgatcgcaaatatccctgctgtagagatgaccgagattcagcagccaaatccggaacgtcgcattatgtcgatcactcacaaaccagacgaaacctggtcaacgcttatactggttctccagaatgagcaagtttgtacgctatgtattgaagacaggcaggtagaagctctccttgctggcattgagtacacattgaaaaccgtaggcgatcaagcgtttattcagtacttaagctcgaatcttgaattcttaatgtgctatgccgtggacttaaccactcaacccaatattgattaccagcagtatccccaggaagaatggaagctaaacctgttttcgcattatctgggcgtgctgtactgctgcgagacagacgaaggcaagaaaattgtctccggggcggtggtgaaaaccagcgcgccgcatttatcggaactggaaaacaacgtcgtgacgcggcttatcgagaaaagccccaagctcaaggcgatgcacgcagagctggcgccatgccagatcttcagtaccattatcccttcccagccgggaagaatgctcagtctggaagagtgtctgcgtcccctgcacgccttctaccttgaaaagaaagcggagcttagcgcctga

SEQ ID NO: 260102 - DNA, 549 bp, Klebsiella pneumoniae
atgacagacaggcaccagcgtctcgtgcagcaaccggtgcgtcctcattccggtccatgcgggatgctcgtaatggatggcggcgtcgaaaccgcttccggcgagcacgaatggttccattcgttcggcaagatgcacgatgatgttggggtggcgctcctgaaatcgtccaaggcggggaatgagccatcgcgtggcgaaagtcgggatcgtcgcgatatcgatgctggcgccatcgctgggctgtcccatcagatactggctgtcacgctccagccgatcaagagactcgcgaacctgggcggcataccgctccccgcttggcagaagcctgacgcgattgccgacgcgctcgaacagcgtcacgccgaggaaagcctccagccgaccgatctggcggctgattgctccttcggtcagtgccaactcgtccgctgcgcgtgcgaagctgccatgacgcgccgacgcctcgaacgccatgagagcggaattgctgggaattttacggcgcatcggcggcctccacgggttcgatcgactccagcttga

SEQ ID NO: 260103 - DNA, 369 bp, Klebsiella pneumoniae
atggctagagcattgtcagcagttgagcgcagagagtacgtccgtgcagtgattcggatcaccaggcatcaggggcgactcacgaccgccgaggcaatgaaaaaactgggcctgagccgcgctactgttcagcggtatttttccgaagcagaagcgactggcgaggttgtccggcatggtcgcttggggttgttccgcgatcagcgggccgttatcgactttgacatgaagcggtttggcctggtgccaaaaacggctgttggtatgaactacagcctgctgggcagtcctgtatttcagcgtgttctggatgtgcaggaagctatctgcgcaagtaggccgacaactgcgcgcggggaggccttatga

SEQ ID NO: 260104 - DNA, 315 bp, Klebsiella pneumoniae
atggtcgttgtagttattgatttgttggatatcgagcaccatatcgccggcggactcaagcgttgcgctgtggttattaaacactcccgcccggccgctgagcgaaccgtcttcggcaagctggccgccaatggcgagcgtaccgtcgctgtagatcagcgcgtgatcctggttattgagcgtgccgacgcccattgccagcgatgcccgtgcggcaatcgtcgccgccacgccgttctccgcggcgttagtcagcgttgccgcctgcagcgcgacggcgtcgccgtacaggcgcccgctgccgatattggttaa

SEQ ID NO: 260105 - DNA, 264 bp, Klebsiella pneumoniae
atggttctcgccagcgctgatttcaccttcctgacggttatccagctttgccgcatagagattgagcgcccggccggcgctgataaccccctggttaatcagccccagtccggagagattccactgcaggttgccgttggcgatgaccctcccggcgttatgaaacgcctgacgcaacgtgagcgacatatcgccctgagagagcacctcgccatcgccgctgagggaatcggcatcgaggctaagtttgctcgcggcaagtaa

SEQ ID NO: 260106 - DNA, 171 bp, Klebsiella pneumoniae
atgcagttctccctgccggttatcaacggtggcgctctgaatacccagggcatcaaaggcggtaattgtgccctgctggttatccagcaaaccgctcgtcgtcaggttgacgctgccccgctgcgccgtgcctatctgcccgtgacgattattaagattttcagcctgtag

SEQ ID NO: 260107 - DNA, 204 bp, Klebsiella pneumoniae
atggcgcgcagtaagctgaatgtcgccctgcgccgcgctgatttttccgccatggttggtcagattgtcggcgtcaagcttgatattgccatttgcggcaagaacgccttcgcggttatccagccctccttcagcactcatggccaggtcgccctgcgccgcaatcacttgcccctgctggttccgaaggctggccacttgtag

SEQ ID NO: 260108 - DNA, 576 bp, Klebsiella pneumoniae
gtgctgagcgtcaaagcatggctgttgctggcaatctcaccgccgcggttatccaatcccgcgcgaaaatcaaggcgtagatcgtcctcgcccgtctgctggattacgccctgttggttatccagcgccattgctttcagctcaagctggctggccgtcaacaggccactgtggttgttgagtttgccgctggcggccaactggagtttttcactggccgccaccaccgcatctcgggtggtgatatcgccggacacggcgctgaccacgatccgcgcccccgaggttcgactgttatcaagatccaccgtcctgccctgcgccgtcagcgtccctgccgccatattgcggccatttagcgccagcgagctctggctattcagcgtcagcgcgccgctgctggcggtagaaccatcgctatttaatccggcggcgagcgtactgttttgcgcgctacgcaaagcgttggcggcaatccgcgtatcgccttgcgcggcgatcatgccgtcattggttagcgtcgcgctggccgtcaccacgctatcttttccggcgtacagctgcccctggttgtga

SEQ ID NO: 260109 - DNA, 234 bp, Klebsiella pneumoniae
gtgaagatcgcccttaacggacagttgcaaattctgcgcggactgaatcacgccgcggttgctgagcgcgccatcggcgctgattgctacgtcccccgccgccgcgccgatattgccggcactgtgaacgcctacgccgcgctcggtaccgacaagacgaattttatgggcgtacatcccgcccagcgcgctgacgtctatcgccaccgctggcgccgcactgccgtcggctga

SEQ ID NO: 260110 - DNA, 165 bp, Klebsiella pneumoniae
atgcgtctgaagtggcgtttacatgcacaacagcatcttgtcattctcagccatgttttcatcactgccgatacgggattgttaggtcggcttgcaaatacgcaggaaggggaagagacctggaacgcgacggcacggaatttctccctgaaggacgcgggctga

SEQ ID NO: 260111 - DNA, 873 bp, Klebsiella pneumoniae
gtgacctgctgcctgggtgactggggaagccgcgttcatgatatgcgtaattacaaaaatggctcgccagctctccatttcaccagtgcttgtttctattattatcatttgttaattatcgcaaaaatatgtgatgatcttggctttaaagaaaaatggctaaaatatattggcaaggccaataaaattagagagaaaattttatcactctataagaatacggatggcagctttgccgatcgcagtcagaccagctttgtttttgcaatctacttcgatttgtgtgatgatatcgagagttcattgaatgcattgatcgatctcatcaaaaaagagcaaaatgttatcacttgtgggatttttggccaaagttttgcctatgaaatatttcatcgctatggtcataatgaattaatccttgaatggttaagagtcgaagccggattcaagaaaatgcttaaaaatgatgccagcacattgaaggaatttttcggtgataacctgaatggttcgaataatcacgcgatgttcagttcttattccagttggctgtttcaggctttgggcggcattaccgtcgctgaggaggcggttggtgctgatgttattttaatcagtccatcctttactgacacgattaactttgtggattgctggcatcaaaccatcagagggcgtattgagtgtcgctggcggcgctataaaaaaggcattgaattagtcatcaaagtgccatttaacctcaaaaaatgcacccttaaattaccaaaagtgtatcaacttaataaacaattacctgcgccgatagactgtgatacctatcatcacttttatgacattaccgatgcaggtgagataaaagtactattgtaa

SEQ ID NO: 260112 - DNA, 774 bp, Klebsiella pneumoniae
atgccaggtagtatagataaagcgccaagacatgatgaagccacaggctggtccagtactgcgataagctatcaacgcggcgaggcagatcctccccatcatcatgttgaggggcagctactcttcgccaccagaggggttatgctggtgcaaacagagagcgaccgttgggtgatccctcctcagcgggcattatggctaccgcctctgcatatccatagttatcatctgctttcacaaaccgatctcagggcgatctatttcagcagtagccttatcgcagaatgtacgagctttacgaagagtcagcaggtacatgtgatcacggctacgccgttagtcaaagagcttatcgctgggctgttcagtgaggactacgccagaccgagtcaacggaagatagcgttgttgcttctggaaattctcagcgaggctccacctttaacgatggcgcttcccatgccgaatgatgagcgattattcagcgcggccagatcgctactggtcaatcagcgctgggaagcatcgctgagcgagctggcttttatgtcggccatgtcggaacggaccttttcccgattgtttatgaaggatacaggctttagtttaaaaacatggaagcagagagccagaatttgcgcttcgttggatcttctcgcgaacggtattccaatcaaacaggtcgcttaccagcttggtttctcatgcccggcggcctttaccgctgcttttcgctgcattttgggggcaacgccacgcgattatgtgccttaa

SEQ ID NO: 260113 - DNA, 900 bp, Klebsiella pneumoniae
atgctatcttacatgctatctcaatatgccaggctacctgtgtctgaagttactctacgttcatggttaaaacaatggttgtcagagcaggaatcgaggtgtacagacagaaatttctcggcgggatttccctggagagaaactggattatgtcaggaatattttttacaacgaaaactcaaaattgatggaaagcaatttcttactggcccccgttatcagggcggaaatattaacaaaccttttattgatattgtaggtatggattctgacctaaatcatactgcattagaactcattagtaaggaatggtcacaactcagagctcagtatgtccgcattcttgtacccggccagtccttcctgcagggtattcccgaccagtatatatatgccacgtctttttctgaaccccctgaattcaatgataaatctcttactttgcaagtggcgacatacgaagattttgactggtgttgtcaggccctgggtgatgcctataagcatacatggcagacagttcgcgaactgtctgcaagcaatttggtagcagttgatgacgaagagttgtgtgaccatatttcagagagagaagtatatattatctatgaaaacgatgttcgcgccgggttgctaatatgccagaaaggaaacctcgcttttctgagaggatatcgtattactgacaaagtaatacttcctgcttttcgtggtcgatcattgtcggcccgagcgcaacgcctgctgtaccgattattaactcattccgattcggaactatctttgtatatgggcacaattattccgcagaatatcccctcgatgaaaactgcagaaagagcgggacgaacttgcatcctaagttatcaatttctacccatctgcagaacccacgattaa

SEQ ID NO: 260114 - DNA, 2103 bp, Klebsiella pneumoniae
atgccccgacccatccctctcgaacgttatcgcaacatcggtatctccgcgcatatcgatgccggtaaaaccaccaccaccgagcgcatcctgttttataccgggatgagccataagctgggtgaagtacacgatggcgcggcaaccaccgactggatggcccaggagcaagagcgcgggatcaccattacctcggcggcggtaagctgcttctggccggggatggaccgcagcttcgagccgcaccggatcaatatcatcgacaccccggggcacgtggatttcaccattgaggtggagcgttccatgcgcgtgctcgacggcgcggtgatggtgtatgactccgtcggcggggtgcagccccagtcggagaccgtctggcgccaggcgaataaataccacgttccgcggctggccttcgtcaacaagatggaccgccccggcgcggacttcttccgcgtggtgcagatgatgatcgaccgtctgaaggctaacccggtgccgattgtgatacctattggcgccgaagagcatttcaccggcgtcgtcgacctggtgaaaatgcgcgccatcctgtgggatgacgccacccagggcatgacctttagctatgggccagtcccagacgatctgctggcgacggcgcagcagtggcgggagaaaatggtctcggcggcggcggaagccagcgatgagctgatggataaatacctggaaaccggtgagctggacgaggcggagatcgtcgccggtctgcgccaacgcacggtgaagggggagatccaggcggtgctctgcgggagcgcctttaaaaacaaaggcgtgcagcgcatgctcgatgcggtggtggagctgatgccgtcgccgctggatattccggcgatacagggcgttgatgagcaaggccagccggcggaacgccatccgagcgacgatgagccgctgtcggcgctggcgttcaaactgatgaccgacccctacgtcggccagctgacctttatccgcgtctactccgggacgctgaagaaaggcgatgcggtgtggaacccggtgaagggtaagaaagagcgcatcgggcgtatcgtgctgatgcaggccaacgaccgtcacgaagttgacgaactgcacgccggggatatcgcggcctgcgtcggtctgaaggatgtgaccaccggtgatacgctgtgtgatccggatgcgatcattaccctcgaacggatggagtttccggagccggtgatttcgctggcgattgagccgaagaccaaagcggaccaggagaaaatgggcatcgcgctgcagcggctggcggcggaagatccgtcgttccgtctgcataccgatgaagagtccggccagacgattatctccggcatgggtgagctgcatctggagatcattgtcgaccggatgaagcgcgagtttggcgtcgaggccaacattggccgtccgcaggtcacctaccgcgaaaccctgcgcaagaaagtgacggacgtggaaggcaaatttgtgcgccagtccggcggcaaagggcagtatggccacgtcgtactgaccctggagccgctggagccgggcagcggtttcgtcttcgaggacgccaccaaaggcggcgtggtgccgcgcgagtacatcccttccgtggagaaagggctgcgcgaagcgatgggcaccggcgtgctggcgggttatccggtggttgacgtgaaagcgaccctgaccttcgggtcgtaccacgacgtggactcctcggagatggcgttccgcatggcggcgatcttcggcttccgggagggcgcgcgcaaagcggacccggtgatccttgagccggtgatgcacgtcgaggtggagacgccggaagagtacgccgggaatattatgggcgatctctcttcccgtcgcgggatggtgcaggggatggaagagcgcttcggcagccagatcatccgcgccgacgtgccgctggcggagatgtttggttattccaccacgctgcgctcgatgtctcagggacgggcaacctacagcatggagttccaccattacgcggaagcgccgcgtaatgtggcggatgaaatcatcgccagccgcgcgaaaagctaa

SEQ ID NO: 260115 - DNA, 921 bp, Klebsiella pneumoniae
gtggcgggtgcgcaggccgggaagaacgcggttgagaataattaccttagtagtacagaagccagacagcttgataaagagctatccgactgcaaagcgtccggtaatgactgcaagtcagttgttgagaaatatatcgaaatcagtaacaaaaatagcaaagaactggttgatgcatgttctggtggtggcattgcttgcgtgacatgggaagaacttcttcaaggggcgactaatgtagccaatgacgcgaatgcctcacagttccggctggatgagaaactgaaagatcctgaggctgcggcgctggtgaactaccttaatggcactgatttgaaattcttacaagaaaatatcacatcaggcgatagattgctgtccgtcatcaccgatccgacatcatggccagtgctggtcatgggcgggaaagcgattatcacaaataccgtgaccaatggaaaagaactgttaattgctgctggggcatcagtggctgggagtgcagctattcagtatggtgtacatggcgaagtgaaactgtcggatgtgattggtgccggagtgattggtgctattacagcaggaaaaggttataacccaacggtgacatggaatgcggctggtgggtattaccaggcagagcttaaaggtgatgaccccttcttaggggcactcttgagtaaagtaggtgctgcaacaggttatgctgctggtaatatacttaaagttccggccgataagatatttaatccggtatcgaaacaatatgaatggattcctacaggtgtctggacgataacaaaaccagcgccacaaaactctctaccttcgatcttaggtaatacagggaatgcagctgcttccggagcatttacagagggtatgaatgaagttctgaaaaacaatgaggtgcaacaatga

SEQ ID NO: 260116 - DNA, 129 bp, Klebsiella pneumoniae
atggtctgtggacatcctcagatactgagcgactctaattttatgatttttctgactttcatcacccattacactttctccgaccagtcaaaagcgaacaaacccccaacaaaattgatcattttttaa

SEQ ID NO: 260117 - DNA, 870 bp, Klebsiella pneumoniae
gtggaatattcagtattaagtaacgctcgcaaaatgccgatgctgggtttcggcgttttcaaggtgaccgataaagcggagtgtaagcaggcggtgttgaacgccattcgcaccggttatcgcctcatcgataccgctgccgtctacgataatgaagatgcggtgggtgaggccgtgcgcgaagccatcgccgaaggtctgtgtacccgcgaggcgctgtttattacctccaaactgtgggtccaggacatggccaacaccgggatggcgaaagccgggattgccgcgtcattaaaaaaatcgggcctggaatactttgatctttatttgctacatcaggcgatgggcgattatttcagcgcctggcgtgcgctggaagaggcctatgaggccggtaccctgaaagcgatcggcgtctccaatttttacccccatgtgttagctaacttctgcgaaactgtcagaattaaaccaatggtgaaccaggttgaactgcatccttatttcgcgcagcccgcggcgctggaagccatgaagcattatcacgttcagcctgaagcgtgggcgccgttaggcggtggcagacataatccgtatcaagatgcattgcttcgggggatcgccgatgcgcaccagaaaaccattgcgcaggttgttctgcggtggaacgtgcagcgtggcgtcacggtgatccctaaatccacccgccaggagcgcattgaagaaaattttgctatctgggatttcgtattaacagataacgaaatggcgcaaatcagcgccctggatttaggctatgttggcgaagcggtaaaacacttcaaccctgagttcgttcgcggatgtctgggggtgaaaatccacgactga

SEQ ID NO: 260118 - DNA, 1929 bp, Klebsiella pneumoniae; identical to SEQ ID NO: 260090

SEQ ID NO: 260119 - DNA, 342 bp, Klebsiella pneumoniae
atgctgcgcgtaacttttcgccatcgagagcgcccgacgctggccatcagactcaacctgatagttagcgaatgtgcagctgcggtgcagatcctgaattccagcacgtccaaagattttctctgcacgtgcgcgctggttttgtttttccagttcctcgcagcacttacggccttcttcggcttgccaggcacgccattcatcaacgctgccgaattttggctgaacgccagggggaatgagttttttcagtcgctccagtgcattcccggtaccaatcatgtttttcatcgctaccccctgaatcccgatgggatggttttgtcaggttccgaaatctga

SEQ ID NO: 260120 - DNA, 960 bp, Klebsiella pneumoniae
atgccatcaaacagcatcccccattacctctataagcgtaaccacacctggtggttcaggaagcgtttcgtatctgagggcaatgccatcgaatacagactgagcctgcaaacagccagctttcagcgtgctcgtcttcttgcccttcggttacagacactttgccaacagatggttgcttctttgggggcccccaagacactgaagaatggcgtgatggaaaaaacaacacaagagcaaatcaaagcaaaacttcgagcaaaaattgccgaatggaccgccgaggaaacagaatattggttcagtggctctgcacgtaatgaaggtgatctgaacgattatcttgagacattagatatggttgtctctgatttgaaagaacgcatcgcttacgatgataaaccatctctgcaccgagccgaagcaagtacagttctggacgaactgccacacctcaaagctactctcagtgaagacgattaccaggtcattgctcgcatggtggcacaagccaaggtcaaatccttgcaggataccagagcaattattcttggtggggatgctgactggcttacaactagcccagtttcctcacaagagacgtcccactctgatgttcattttctttcagatatgatcagcaagtaccaagccgagaacgcaagcaaagagcactcgcagaaaagtcaggacaaatatgctcactcgctcgcactcacctttagcttcttcggcaatgtgcccatttcggagatctcattatccagcggtagagagtttcgtgagttacttgcctcattacctgagaaactcaaagccaaagaattgctcgaaactccactacttgagcttatttctaagaaaaaggctactaaaactatcgcaacggctacggctaacgatcaccttgaaaaagtacgccgcttctttcaatggatgctagatacagggtacccctga

SEQ ID NO: 260121 - DNA, 810 bp, Klebsiella pneumoniae
atggccagacgcgacgagatcgttgtagcgacaaagaccttctttccgtggcgcaactcacccaataccgggtttctttcccgcaaggccatttttcagtctattgacgatagcctgatgcgcttaggcatggattatgtggatctctttcagattcatcgctttgactactccacgcctgttgaagagaccatggaggctctgcatgacgttgttaaagcaggaaaagcgcgttatatcggcgcatcttctatggaagcctggcgctttgcaaaaatgcagcataccgctgagcgtaacggttggacccgatttatcacgatgcaaccgcaatacaacctgctttaccgggaagaagagcgcgagatgctgcccctgtgtgaagaccagggcgttggggtgatcccctggagtccgatggcacgcggcaggctcacgcgcgactggagtgtcacgtcccgacgaacgcaaaacgatgcctttgcgttaaaaatgtatgagaacgcagcccttctggataagcccgtgattgatgttgttgccagcattgccgaaaagcacgcggtgccaagagctcatgttgcaattgcctggctgttatcaaaatccgtcatcacagcaccgatcattggcgcaacgaaaccagaacatctttccacggctatcagcgcgctggacttttcacttagcgatgccgaaatcacggaactggaagctcgctatctgccgcaccccgttgacgggatcattcccccgcttccggatacgccgccttccctcacgccgccttcagcgatccagaactattaa

SEQ ID NO: 260122 - DNA, 1008 bp, Klebsiella pneumoniae
atgaaccatccacaaaccatcctcaccggcgaccgcccgaccggccaacttcatcttggccactacgtcggctcgctgcgccagcgcgtcgcgctgcagcataaccaccagcaatttatcctgatcgccgacctgcaagggctcacggacaacggcagcaatccgcaaaaaatcagccaccatatcctcgaagtcatggccgattatctggccgtcggcatcgaccccaggctcaccactatttgcctgcagtccgccctgccggcgctggcggagctcagcgcgctgtatatgaatatcgtcaccgtcgcccgcgtagaacgtaatccgacggtcaaaaatgagattgcccagaagggattcgcccgctcgctgccggtgggttttctcgcctatccgattagccaggcggccgatatcaccgcgttcaaggccgaactggtgccggtgggcgacgatcagctaccgatgattgagcagaccaacgagatcgtccacaagatgaatagcctcaccggcgagccggtgctgcgccactgcaaggcgctactcagcgaagtgagtcgcctgccgggcgtcgatggcaacgccaaaatgtcgaaatcgctgggcaatacgctgacgttatcggccacagaggaggagatccaccacgcggtcagcgcgatgtataccgacccgacgcacctgagagtcagcgatccgggacatgtcgacggcaacgtggtgtttacctatctcgatgcattccacagcgataaggcgcgggtggcagagatgaaaacccactatcagcgcggcgggctgggcgatcgccagtgtaagattgagctggagacctgcttgcagacgctactggcgccgatccgcgaacgcagggccacttttattcaggataaagggatgctgttggaactgctgcgccagggcagcgaacgcgcccaccacctcacacagcagacgctgcatgaggtgaagcgtgggctgggtctgccggtgctgttctga

SEQ ID NO: 260123 - DNA, 1005 bp, Klebsiella pneumoniae
atgaagtttttggtcactggtgccgcaggttttatcggcttccatatcgcgcagcgcctgctgaatgaagggcatgatgttgtcggaatcgacaacatgaacgactattatgacgtcagcctgaagcaggcccgtctggatcgcctggcatctccggcattccatttccagcagctggatctggccgaccgggaaggtatggcaaagctgttcgccacagagcaatttgatcgtgtgatccacctggccgcccaggccggtgtgcgctactcgctcgaaaacccgtatgcctacgcagacgctaacctgatggggtatctgaacattctggaaggctgccgtcataccaaggtgaaacacctggtgtacgcctcctccagctcggtttacggccttaaccgtaaaatgccgttctccaccgaagattccgtcgatcatccggtctccttgtatgccgccaccaagaaagctaatgaactgatggcgcacacctattctcacctgtacggcatcccgactaccgggctgcgcttctttacagtgtatggtccgtggggtcgcccggatatggcgctgttcaagttcacgaaagcgatgctggaaggaaaaagtatcgacgtttacaactacggcaaaatgaagcgcgacttcacctatatcgacgacatcgtcgaggcggtggttcgggtgcaggatgtgatcccgcaggccaatgccgactggaccgttgagagcggttccccggccaccagctccgcgccatacagggtatataacattggcaacagctcaccagtggaactgatggactacatcactgccctggaagaggcgctgggaatggaagcgcagaagaatatgatgccgatccagccgggagatgtgctggacaccagcgcagacacccaaccgctgtatgacctggtcggctttaagccgcaaacgtcagtgaaggacggcgtgaagaacttcgtggagtggtacaaggattactatcagatctaa

SEQ ID NO: 260124 - DNA, 1071 bp, Klebsiella pneumoniae
atggtgggttggtcctctctgctcgactacctgttcgcgccgatgatcaacatcctgttggcgaaaatctactttgaagcgctggtgccttcgattccatcgtgggtgtttgttatcgcgttggtcgcgttcatgaccgcctttaacctgcgcagcatcaagtccgtcgccaacttcaacaccgttatcgtggtgctgcaggtggtactgattgccgtgatcctcggcatggtggtgtatggcgtatttgaaggcgagggggccggtacgctggccagcagccgtccgttctggtccggcgatgcgcacgttatcccgatgattaccggggcgacgatactctgcttctcatttaccggctttgatggcatcagcaatctgtctgaagagaccaaagatgcagagcgcgttattccgcgcgctatcttcctgactgcgctgattggcggcctgatcttcatttttgccacctacttcctgcagctgtacttcccggatatctcgcgctttaaggatccggatgcctcacagcctgaaattatgctgtatgtggcaggtaaagccttccaggtaggcgcgctgatcttctccaccatcaccgtgctggcttccggtatggcggcgcatgctggcgttgcgcgtctgatgtacgtgatgggccgtgatggcgtattcccgaaaagcttcttcggctacgtgcatccgacctggcgcactccggcgatgaacatcatcctggttggcgcgatcgcgctgctggcgattaactttgacctggtgatggcgacggcgctgattaacttcggtgcgctggtggcgttcaccttcgttaacctgtcggttatctcgcagttctggatccgcgagaaacgcaacaagacgctgaaagaccacttccagtatctgttcctgccgatgtgcggcgccctgaccgttggcgcgctgtgggttaacctggaagagagctcgatgatcctgggtctgatctgggccggtatcggtctgatttacctggcgtgcgtaaccaaaagctttcgcaacccggtaccgcagtacgaagatgtggcctaa

SEQ ID NO: 260125 - DNA, 165 bp, Klebsiella pneumoniae
gtgccgttctgcggcctggcagtgatggaagccctgagcggcatccgcaccgaggtccaggatccgctgctggaatttattcaacagcagcagccgcgcgccacgttcgcgcagtttcagcgccaggccatcgatcggctggcgcagcagtttggcctgcaatag

SEQ ID NO: 260126 - DNA, 309 bp, Klebsiella pneumoniae
gtgacgatcctgacgccggcggtgcgtcggctggatgcttccgtcgcagtagcctttaaatcggcaatcgcccaggagataggcgaagcgcccggcgatctgattgttgatttcagcgaaattgattttatcgacagtagcggtctgggaaccctggtttctctgatgaagatgatgaacgggagaggggagatgacgctgtgcgcgctgaatcctggcatccgcaatatgttcacgctgacccgtatggatcgtattttccgcatttgcgaggatcgcacctcggcacttgcgcagttaaatgagtga

SEQ ID NO: 260127 - DNA, 384 bp, Klebsiella pneumoniae
atgggtatacgtgatgagttgcagacagaagtcgccacagcattcgatactgatctgcaggatgcggttaaggcgttcaccggcagttacaccgttcgtggtgcatgggatccggtaacggaaaccggtaacgaaatggtggtggcctattcagggcgcggtgttctggctcgttacaaactccgccgtatcgatggcgttaacattctgcacggtgacctgaaattaaccgccctggttaacgaagtgaacgacaagccggcagtcgggcatttcatcacggcgccagatccgattacgggtgagcttcagcgttacgacatcataaccgcttttgccgactctactggcgctgcgtactccattcaactgcggagggcgtga

SEQ ID NO: 260128 - DNA, 234 bp, Klebsiella pneumoniae
atgcaaaacactgatgtgcattatgccggtgacgggctcggccctcgcgatgtgtttgtgaatggaaacccgatcaattatgtcgtttacgcaaacccggcaaagggcgttgttgagtttgcacctcatccactccgggcgaaacgaaatggtgaaatctatacccgtaggcttcgcggttctgtgatcgttaaattccgtcatagcggtggtgaatgcgatgggtatacgtga

SEQ ID NO: 260129 - DNA, 426 bp, Klebsiella pneumoniae
gtgagtcttgaggcgctacgggaagccatcgcccgcgtcggcgcagcggaagatagcggtttggaggaagagaaaggcctgccggacgaggcccacctgctaaaacagtgcgccgacgatcctgagctggtcgaggagctgctgggactcttcgctgaagggcttgacgccgcaacgtcggcccttacccacgccattgacgccaatgaccgggagacgctgcgccgtaccgcccacaagctgcgcggcgaggcggtcaccctcggctttcaacgccttgccggggtgctccagcagctggagagccaggcgacgtcgcccgaccggaccgtcccagatgacctgcgcgacgcgctggccgaggcaaccacaggctgccaccggtggctacatcgcagatcgcaggaggttccccgtgctccatag

SEQ ID NO: 260130 - DNA, 222 bp, Klebsiella pneumoniae; identical to SEQ ID NO: 260091

SEQ ID NO: 260131 - DNA, 294 bp, Klebsiella pneumoniae
atgataaacgtgacgttcttcggccatgtactgcgccagcagctgagcgcgaaaggggagttctgccacgttaaaaagcgcgctcgaatcgtcctggtattcatcgctaccgaaagtttccacggtctcaccttgtgccgcatcgccagtagtattggcatcaaccagcacgccactaacgggctcagcggtttctccggcatcatcgccgtgatgaacatcagcaggcgcctgtcctggcttcaaagtccaggtgcggccatcgtcgccgagctggtagcgttcgcaccatga

SEQ ID NO: 260132 - DNA, 2145 bp, Klebsiella pneumoniae
atggatactgtttccgcttttaagcttgaggtccgtgcggacaaaatcgcggtgatcaccattgatgccccgggtgaaaaaatgaataccctgaaagccgaatttggcagtcaggtacggggattgatacgccagttacgtgacgataagtcagtgcgcggcgtagtatttatctccgccaaagcggataactttatcgccggcgctgatatcaacatgattgcccgctgccgcagcgcgcaggaggcggaagcgctggcgcgccagggacagcagattatggctgagatccatggcctgtcgatcccggtgattgccgctatccacggcgcctgccttggcggcggtctggagctggcgctggcctgtcatggccgtatctgtagcgatgacgaaaaaacccgactcggcttgccggaggtacagcttggcctgctgccgggttccggcgggacgcagcgtttaccgcggctgatcggggtcagcaccgcgctggatatgatgctcaccggcaagcagctgcggccgcggcaggcgctgaaggccggtctggtggacgaggtggtgccgcaggcgattttactgcaggcggcggtggagttggcgctgaagggacgaccgaccagccgggaggtgcctgttcgtgaacgcgtactggcagggcccctggggcgccatctgttattccagtttgtcggtaaacaaacgcagcgcaaaacgcagggaaattacccggcggtgaagcgaatcttgcaggtcgtcgagaatggtctggcccatggctgcagcagcggatacgctgaagaggcgcgcgcatttggcgaactggcaatgagcccgcagtcgcaggcgctgcgatcgatcttctttgccagtaccgatctgaaaaaagaccctggcgccgaggcgggccccggcccgctgagaagcgttgcagtactgggcggtggcttgatgggcggggggatcgcctatgtgaccgcctgtaagggtgggctgccggtgcggattaaagatatccagccgcgtggcatcaaccacgccttaaagtacagctgggatctgctgaataaacaggttcgtcagcgtcgactgcgcccagtggagcgcgatcgtcagatggcgctgatctccggcactaccgactatcagggctttgctcatcgcgatgtggtgatcgaggcggtatttgaagacctggctctcaaacagcggatggtcagcgaagtggaacaatacggcgggccgcagaccatctttgcgtcgaatacctcatcgttgccaatcggcgatattgccgctcacgccagccgcccggggcaggtaatcggcctgcattttttcagtccggtggaaaaaatgccgctggttgaggtgatcccgcacaagggaaccgacccgcagactatcgccaccgtggtgcagctggctaaacggcaggggaaaacgccgattgttgtcgcagataaagcggggttctatgtgaaccgtatcctcgcgccgtatatcaatgaagcgatgcgcctgctggtggaaggcgaaccgattgaagtcattgataacgcgttggttaaattcggtttcccggtggggccaattcaactgctggatgaggtgggtatcgataccggcaccaaaattatccccgtgctggagggcgcgtttggagaacgttttagcccgcctgcaaacatcattgacgcgattttgaaggacgatcgcaaaggcagaaaaaataatcgtggtttctatctttatgagacaaaagggcgtaaaagcaaaaaacggcccgacccggcagtctatccgctgctcggcatcggccgcccgcagtcgcggctttccgcgcagcaggtggcggagcgctgtgtgatgatgatgcttaacgaagcggcgcgctgctttgatgagcagattatccggagcgcgcgcgatggcgatatcggcgccgtctttggtatagggtttccgccatttcttggcggcccgttccggtatatggatactatcggcgcgggtgaagttgccgcgatcctgcagcgcctggccgcccagttcggcccacgttttacaccctgtgacactttattacgcatggccgaacaggggaccaccttttggccagcggatgaacggctgacctaa

SEQ ID NO: 260133 - DNA, 387 bp, Klebsiella pneumoniae; identical to SEQ ID NO: 209555

SEQ ID NO: 260134 - DNA, 552 bp, Klebsiella pneumoniae
atgaaaaagaagacatcgcttagcgaggaggatcaggcgctgttccgtcagctgatgaccggcacgcggaagatcaaacaggacactattgttcaccgcccgcagcgcaagaaaattaccgaggttgctcctaagcgtttgctgcaggaacaggtcgataacagccactatttttccgatgagtttcaaccgctactgaataccgaaggctcgacgaaatatgtccgccccgacgtcagccatttcgagctgaaaaagctgcgccgtggagattattcgccggagctgttcctcgatctgcatgggcttacccagcagcaggccaaacaggagctgggcgcgctaattgccgcctgccgccgcgagcatgtgttttgcgcctgcgtgatgcacgggcacgggaaacacatcctcaaacagcaaaccccgctgtggctggcgcaacatccgcatattatggcgtttcaccaggcaccaaaagagtacggcggtgacgccgcactgctgatattgattgaggtcgaggagtggcaaccgccggagctgccataa

SEQ ID NO: 260135 - DNA, 1005 bp, Klebsiella pneumoniae
atgctgatttatcgccgtcttcatggcacactagccgccgaatttatagcagagtgtgccctggaggatgtcgtggataaaatttttgttgatgaggcagtcaatgagctgcataccattcaggacatgctgcgctgggcggtaagccgtttcagcgctgctaatatctggtacggtcacgggactgataacccgtgggacgaggcggtacagctggtgctgccttcactgtatctgccgctggatatcccggaagacatgcgcactgcgcgcctgacctccagcgagaaacaccgcattgtagagcgggtgattcgccgcgtgaacgagcgtattcccgtcgcctatctgaccaacaaagcatggttctgcgggcatgagttttacgttgatgagcgggtgctggtgccgcgctccccgattggcgaactgatcaataaccagtttgccggactgattaaccataagccgcagcacatccttgatatgtgcaccggtagcggctgcatcgccatcgcctgcgcctatgccttcccggaggcggaagtcgatgcggtagatatctccccggacgcgctggccgtcgccgagcacaacgttgagtcccacggcctgatccatcacgtgacgccgatccgttccgacctgttccgcgatctgccgaagctgcagtacgatctgatcgtcaccaatccgccgtatgtcgatgaagaggacatggccgatctgccggaagagtatgagcatgagccggtgctggggctggcctccggaagcgacggcctgaagctaacgcgccgtatcctcggcaacgcgccggattatctcagcgacgacgggattctgatttgtgaagtcggtaacagcatggtacatctgatggagcagtatccggacgtgccgtttacctggcttgagtttgataacggcggcgacggggtctttatgctgaccaaacagcagctgattgacgcccgtgcgcacttcggtatttataaagactaa

SEQ ID NO: 260136 - DNA, 1086 bp, Klebsiella pneumoniae
atggcaggaaatacaattggacaactctttcgcgtcactaccttcggcgaatcgcacggtctggcgctgggctgcatcgttgacggcgtgccgccgggcatcccgctgaccgaagccgacctgcagcacgacctcgatcgtcgtcgcccgggtacctcgcgttacaccacgcagcgtcgcgagccggatcaggtcaaaatcctctccggcgtcttcgaaggcgttaccaccgggaccagtatcggtctgctgattgagaacaccgatcagcgttcgcaggattacggcgcgatcaaagatctgttccgtccgggtcacgccgattacacctacgagcaaaagtatggtctgcgcgactatcgtggcggcggtcgttcttctgcgcgcgaaaccgcgatgcgcgtagcggccggggcgattgccaaaaaataccttgccgcgaagttcggcatcgtcattcgcggctgcctgacgcagatgggcgatattccgctggccatcaaagactgggatcaggttgagcagaaccccttcttctgtccggacccggataaaatcgacgccctggatgaactgatgcgcggcctgaaaaaagagggcgactccattggcgcgaaagtgacggtagtggctgacggcgtaccgccaggcctcggtgagccggtcttcgaccgcctggatgccgatatcgcccacgcgctgatgagcatcaacgccgtgaaaggggtggaaattggcgacggcttcgaggtggtgaagctgcgcggcagcgaaaaccgcgatgagatcaccaaagccgggttccagagcaaccacgccggcggcattcttggcggcatcagcagcggccagcagatcgttgccaacatcgcgctgaagcctacctccagtattaccgttcccggtcatacgattaaccgctttggcgaagaagtggagatgatcaccaaagggcgtcacgatccgtgcgtcggcatccgcgccgtaccgatcgctgaggcgatgctggcgatcgttctgatggatcactttatgcgtcagcgcgcgcagaatggcgacgtgacgacgacaattccacgctggtaa

SEQ ID NO: 260137 - DNA, 810 bp, Klebsiella pneumoniae; identical to SEQ ID NO: 209560

SEQ ID NO: 260138 - DNA, 549 bp, Klebsiella pneumoniae; identical to SEQ ID NO: 209561

SEQ ID NO: 260139 - DNA, 282 bp, Klebsiella pneumoniae; identical to SEQ ID NO: 209562

SEQ ID NO: 260140 - DNA, 1989 bp, Klebsiella pneumoniae
gtgaaacaaaacgccatacaacccgccaacctggaattcaacgctgagggtacacctgtttcccgagatttcgacgatgtttacttttccaatgacaacggtctggaagagactcgctacgtttttctcggcggaaatcgcctgccggagcgcttccccagccaccctcgcccgctgatgatcgtcgcggagagtggcttcggcaccgggctcaatttcctcaccctctggcaggcgtttgacgtttttgttcgtgataacccggacgttaccttgcaaaggttacatttcatcagttttgaaaaatatccgctgaaggctgaggatctccgcctggcgcaccagcgctggccagagctggctccgtgggcgcagcagctgcaggcgcaatggccgtcggccttcggcgggtgccatcgtctgctgctcgacggcgggcgggtgacgctcgatctgtggtttggcgatatcaatgagctgaccagggagctggatgattcgctgaaccagcaggtggacgcctggtttcttgacggctttgccccggcgaaaaatcccgacatgtggactcaggatctgttcagcgccatggcgcgcctggcgcgacccggcgggacgctggccacctttacctccgccggttttgtccgccgtggcctgcaggaggccggctttaccatgcgtaaaagcaaaggcttcggccgcaagcgggagatgctgaccggcgagatggcgcaaacgctgagctttcctgcgcgcgtcccctggttcgctcgcagtagcagcgatgcccgcgaggcggccatcatcggcggcgggatcgccagcgccctgctctccctggcgctgctgcgccgcggctggcaggtgaccctttactgcgccgatgaggctccagcgcagggcgcctccggcaatcgccagggcgcgctgtatccgctgttaagtcagcacgatccggcgctggcacgcttttttccggccgcctttaccttcgcccgccgaatgtatgacgcgctgccggtgatgttcgatcaccaatggtgcggtgttacccagctcggctgggatgagaaaagcacgcataaaatcgcccagatgctggcgctgaatttacccccggacatcgcctgcgcggtgacggcggaacaggttgccgggctgaccggcgtcgataccggctgcggcggcatcacctatccggccggcggctggctgtgcccgcagcagctcaccgccgagctgctggcgctggcggccacgcgcggactgcacgtgcactatggttatcccgtcgaaacgctcagcgcggagggcgatggctggctgctcaatcagcagcgctatcatcaggcggtggttctggcgaacggccaccgcatcactggttttgcgcaaacagcccaactgccggtctacccggttggcggccaggtcagccatattcccaccaccccgcggcttgccgccctgcgccaggtgctgtgctacgacggctacctgacgccacagaatccgcaaaatcagcagcactgcattggcgccagctaccaccgcgggaaaaccgacaccaccttcagcgaagaagatcagcagcacaaccggcaacggctgatcgactgcttcccgggcgcggagtggccacaggacgtggatatcagcgccaacgacgctcgctgcggcgtgcgctgcgccacccgcgatcatctaccgatggtcggcaacgtgccggactacgcggcaacattgacgcaatacgccagcctccacgaacaaccggatatcgccgatagcgcgccggtctgtcgtaacctgtttatgcttggcgcgctcgggtcgcgcggactttgcaccgcgccgttaagcgctgagctgctggcggcgcaaatgagcacggaaccgctgccgctggatagcgacaccctggcggcgctgaatccgaatcggctgtgggtgagaaaactgctgaagggaaaagcggtgaaataa

SEQ ID NO: 260141 - DNA, 1221 bp, Klebsiella pneumoniae
atgaaacgtgcagtgattactggcttgggcatcgtttccagcatcggtaataaccagcaggaagtcctggcatctctgcgtgaaggacgttcagggatcactttctctcaggagcttaaagattcagggatgcgcagccacgtatggggcaacgtcaaactggataccactggcctcattgaccgcaaagtagtgcgctttatgagcgacgcctccatctatgcttacctgtccatggaacaggctgttgccgacgcaggtctggcgcctgaagcatatcagaataacccgcgtgtcggcctgatcgcaggctccggcggcggttccccgaaattccaggtcttcggcgccgatgccatgcgtagcccgcgtggtctgaaagccgtgggcccgtatgtggtcaccaaagcgatggcttccggcgtttccgcctgcctcgctacgccgttcaaaattcacggcgttaactactccatcagctcggcctgcgccacttccgcccactgtattggtaacgcggtagagcagatccagctgggcaaacaggacatcgtctttgccggcggcggcgaagagctgtgctgggaaatggcctgcgaattcgacgccatgggcgcgctgtccactaaatacaacgacaccccggaaaaagcgtcccgtacctatgatgctaaccgtgacggcttcgttatcgccggcggcggcggtatggtcgtggtggaagagctggaacacgccctggcgcgtggcgcgcacatctatgccgaaatcgtcggctatggcgcgacctccgatggcgcggacatggtcgccccgtctggtgaaggcgcagtgcgctgcatgcagatggcgatgcatggcgttgatacgccgatcgactatctgaactcccacggtacctccactccggtcggcgacgtgaaagagctgggcgccatccgcgaagtattcggcgacaacagcccggctatttcggcaactaaagcgatgaccggccactcgctgggcgcggcgggcgtacaggaagccatttactctctgctgatgctggagcacggctttatcgcgccgagcatcaacgttgaagagctggacgagcaggctgccggcctgaacatcgtcaccaaaccgacggacgctaagctgaccaccgtaatgtccaacagcttcggcttcggcggcaccaacgccacgctggtgatgcgtaaatacaacgcctaa

SEQ ID NO: 260142 - DNA, 1176 bp, Klebsiella pneumoniae
atgtccgcagttactgaaacaacatccaattcttcggcgaatttttcgcttttccgtattacgtttgccgtctttttgacctatatgaccgttggtttgccgctgccggtgatcccgctctttgtccatcaggagctggggtttggcaacaccgtggttggcgtggcggtagggatccagttcctcgccaccgttctgacccgggggtacgccgggcgcctggcagaccagtacggcgccaaacgttccgtcctgcaggggatgctggcctgcgccctggcgggcgcggcatggctggccgctgcgctgctgccgctgccggtgctcgccaggctcggcctgctgctgctgggccgcttgatcctcgggtttggcgaaagccagctgctgaccggaaacctgagctgggggatgggcctggtgggaccggcccgttccggcaaagtgatgtcatggaacggcatggcgatgtacggctcgctggcggtgggcgccccgctgggattattgatctatagccattttggcgtggcggtgctggcctgtgtcaccatgggactaccgctcgtcgcctggcttattaacggtaccgtgcgcaaagtggcggcccacggaggcgagcggccttcactctggagcgtcatcggcatgatctggcggccgggcattggcctgggcctgcagggtgtcggctttgcggtgatcggcaccttcgtctccctctatttcgccagccatagctggccaatggccggctttaccctgacggcgtttggtggcgcctttgtgctgatgcgagtgctgttcggctggatgccggatcggtttggcggcgttaaggtggcgatggtctcgctgctgatagaggcggttggtctgacgctgctgggactggcgccgaatgcctggctggcgctggccggtgcagcgctgaccgggtgcggctgttcgcttattttcccctcacttggcgtggaagtagtgaagcgcgtcccggcgcaggtgcgcggcaccgcgctcggcggctatgcggcctttcaggacatctcctatggcctgaccgggccgctgaccggcctgctggcgacctcgctgggctactcgtcggtgttccttgccggcgccctctgcgcggcgctggggatcctcgtcacccttatctcatttcgccgctag

SEQ ID NO: 260143 - DNA, 978 bp, Klebsiella pneumoniae
atgacgcacccccttgctgatatgccagaccgtcctccagggcgaggcccatcaggcactgccgccaccggcgaaccttcgctttccatgcagcaacgcaccgttctggagcgactgatcacgcgcctggtggcgctgacctcgcagcagaacgcggaagtgtgggcctgcgtcaaacatgacctcggactgaaaggcgactcgcccctgctggcctgccatttcagcgccgcggaggccagtctcaaccagcgcttagccgccgctcaggataatcatcatcatcgccagaccttagcgcagctcagcgatctgctcggtcagggcaataaccgccaggcggtgagcgattatattcgtcagcattatgggcaaacggcgctgcatgcccttagccagacgcagctggagaccattctgcatctgctgcagcatggccagctgtcgatcccgcagccgcagcagcgcccgccgaccctgcgcccgctgttgccagccgagcataatacgctcaatcagctggtgactaagctggcggccgccaccggcgaaccaagcaagctgatttggcaatccatgctggagctttgcggcgtcaagtccggggagctgatcccggcgacgcacttcctgccgctttcgtactggctgcaggcgcggcaaacgctgagtgcgcaaagcgcgccgacgctcacctcgctgcagggagcgctcaagcagccgctggaggccgcggagtggcagacaattgtcgactttgcccgtcgcagctggcaggtcacgccgcggaccacgctgagcccggcgcagatcctggcgctgctgaacaaggtgtttgtgctgcgggtggcccgcgcccaggagacgctggccatcccgcaggaggagccagtcgccaggcggacgtggagcgctaagccgtggcagctggcgctgggcgcggttgtcctgctccttgtgctgtggctcctgctgtag

SEQ ID NO: 260144 - DNA, 1137 bp, Klebsiella pneumoniae
gtgaaaatcctcgttgatgaaaatatgccctatgcccgtgagctttttagccgtttaggcgacgtgcaggcgatcccaggccgtccggtcccggccgatgccctgaccgatgcggatgccctaatggtgcgctcggtcacccgggtcaatgaagcattgctcgccggcaaggccattaagttcgtcggcaccgctaccgccggcaccgatcacgtcgatcaggcgtggctgcagcaggcggggattggtttctctgcggcgcccggctgtaacgccattgcggtggtagagtacgtcttttcatcgctgctgatgctggctgaacgcgacggctttgcgctgcgcgatcgcaccgtcgggatcgtcggcgtcggtaacgttggcgggcgactgcaaaagcgcctggaagcgttggggatcaaaactctgctctgcgacccaccgcgcgccgatcgcggcgacgaaggtgacttccgctccctcgaggcgctggtccaggaagccgatgtcatcaccttccatacgccgctgtataaagaagggcaatataaaaccctgcatctggcggatgaggcgctgataagccgcctgaagcctggaacgattttgatcaacgcctgccgcgggccggtggtcgataacgccgcactgctaaagcggctggaagctggtcagccgctgagtgtggtattggacgtctgggagccggagccggatctaaacgttgagcttctcaagcgagtggatatcggtaccgcgcatatcgccggctacactctcgaagggaaagcgcgcgggacgacgcaggtttttgaagcctacagcgcctttatcggccatccgcagcaggtagcgctggacactctgctgccggcgccggaatttggccgcattaccctgcatggaccgctcgatcagccgacgctgaaaagactggtccacttggtgtatgatgtgcgccgcgatgatgcgccgctgcggaaggtggccggcgtcgccggtgaattcgacaagctgcgtaaaaattatcaggaacgtcgcgaatggtcttcgctgtatgtgcagtgcagcgatgagcaggcggcgacgctgttgcgccagctcggttttaacgccgtgcatcatcctgttcgttaa

SEQ ID NO: 260145 - DNA, 1014 bp, Klebsiella pneumoniae
atgtctgaaggctggaatattgccgtactgggcgcaacgggcgccgtaggcgaagccctgctcgaaactcttgctgaacgccagttcccggtaggagagatttttgctctggcgcgcaacgacagcgcgggcgaacatctgcgttttggtggcaagtcggtgatcgtcaaagacgccgccgaatttgactggacccaggcccagctggctttcttcgccgccggcgtcgaagccagtgcagcgtatgtcgaagaagcgaccaacgccgggtgtctggttatcgatctcagcggcctgtttgcgctggagccggacgtaccgctggtggtgccggacgtgaacccgttcgtattaggcgattaccgcaaccgcaacctgattgcggtgcctaatagcctgaccagtcagctgttgacggcgctcaaaccgctgatcgatcagggcgggttgtcgcgcattagcgtcacgaacctgctctccgcctcggggcaggggaaaaaagcggtggatgcgctggcggggcagagcgctaagcttctgaacggcatccctatcgatgaagacgatttctttggtcgccagctggcgttcaacatgctgccgctgctgccggatcgtgaaggtagcgtgcgcgaagagcgccggatcgtcgatgaagcgcgcaaaattcttcaggatgacgggctgatgatctccgccagcgtcgttcagtcgccggtcttctacggccatgcgcagatggtgagcttcgaagcgatgcgcccgctggcggcggaggaggcgcgcgacgcttttacccgcggcgaggatatcgaactttctgaagagggcgaattcccgactcaggttggcgatgcctcaggcaatgcccgcctctccatcggctgcgtgcataacgattacggtatgccggagcagatacagttctggtcggtagcggataatgtgcgcttcggcggcgcgctgatggcggtgaagatcgccgagaagctgattgaggagtacctgtactga

SEQ ID NO: 260146 - DNA, 813 bp, Klebsiella pneumoniae; identical to SEQ ID NO: 138395

SEQ ID NO: 260147 - DNA, 660 bp, Klebsiella pneumoniae; identical to SEQ ID NO: 209570

SEQ ID NO: 260148 - DNA, 984 bp, Klebsiella pneumoniae
atggcattatgcgccccttacgacaaaactggcatcgaccaggttcaggcagaaaggttatcaatgagctggattgaacgaattaaaagcaacatcactcccacccgcaaggcgagcattcctgagggtgtatggaccaagtgcgacagctgcggtcaggtactctaccgcgccgagctggagcgcaacctggaggtttgtcctaagtgcgatcaccatatgcgcatgtcggcgcgtaatcgcctgcatagcctgttggatgaaggttctctggtagaactgggtagcgaacttgagccaaaagatgtgctgaagttccgcgattcaaaaaaatacaaagaccgcctggcgtccgctcagaaagagacgggcgagaaagacgcgctggtggtgatgaaaggtacgctctacgcgatgccggtggttgccgccgcctttgaattctcctttatggggggatcgatggggtccgtcgtcggcgcacgctttgtacgcgcggtggagcaggcgctggaagataactgcccgctgatctgcttctccgcctccggtggcgcccgtatgcaggaagcgctgatgtcgctgatgcagatggcgaaaacctccgcggcgctggcgaaaatgcaggagcgcggactgccgtacatctccgtgctgaccgacccgaccatgggcggcgtatcggcgagctttgcgatgctgggcgatctgaacattgccgagccgaaagcgctgatcggctttgccggtcctcgcgttatcgagcagaccgtacgcgagaagctgccgccgggattccagcgcagtgagtttctgattgaaaaaggggcgatcgatatgatcgttcgccgtccggaaatgcgtctcaagctggccagcattctggcgaagctgatgaacctgccggcgccggttgccgtttcggaagcgcctcatgaaggcgtggtggtgccgccggcaccggatcaggaacctgaggcctga

SEQ ID NO: 260149 - DNA, 1269 bp, Klebsiella pneumoniae
atggaaaaagatcctattcctaaggccacgtcgcccctggctacgtggctttcttatctggaacatctgcacagtaaaaccatcgaccttgggctggcgcgcgtcagcgaggtcgccgggcagatggatatcgttaaaccggcgccgttcgtttttaccgtcgcgggcaccaatggcaaaggcaccacctgccgcacgctggaaaccatcctgatggcggccggttataaagtgggggtctacagctctccgcatctggtgcgctacaccgaacgcgtgcgcattcagggggctgaactgccggaggcggcgcatacggcttcgtttgctgaaatcgaagcggcgcggggtgacatctcgctgacctattttgaatacggcacgctctcggcgctgtggctgtttaagcaggcgcagctggatgtggtgatccttgaggtcgggctcggcgggcgtctcgacgccaccaacatcgttgatgccgacgttgcggtggtcaccagcatcgccctcgatcataccgactggctgggcccggatcgcgaaagtatcggccgggaaaaagcgggcatctttcgcgccggtaaaccggcggtggtgggggagccggatatgccgctcaccatcgcggaagtggctagcgagaagggcgcgctgctccagcgccgcggcgtcgactggcgctatgaggtggagggcgaaacgtggtccttccgcgatacggcaggggcgttaagccacctgcctctgcctcaggtaccgttgccgaatgcggcgacggccgtggcggcgctgcgcgccagcgggcttgccgtggatgacgctatcctgcgcgcagggatccgcgatgcgatgctcccgggacgctttcagataatcagcgatgccccgcgagtgatcctcgatgtggcgcacaacccgcacgcggcggcctatctcgccgggcgtctcaaaacgttagcgaaaacgggacgcgtgctggcggttattggtatgctgcatgataaggatatcgccggcacgttggccaatttggccccggaagtcgatgcctggtactgcgcgccgctggaaggcccgcgcggcgcgacggcagagcagctggtggaacatttgcgctgcggtacagtctatagcagcgtggcgcaggcgtggcgtgcggccatggctgacgctaaagtggaagataccgtgctggtgtgtggttcgtttcacaccgtagcgcaggttatggaagagatagacgcggggagaatcggtggcgagtaa

SEQ ID NO: 260150 - DNA, 690 bp, Klebsiella pneumoniae
gtggcgagtaagtttcagaaccgtttagtcgggacaatcgtgctggtggcgctgggggtgattatcctgccagggctgctggacgggcagaaaaagcattaccaggatgagtttgccgcgatcccgctggtaccgaaaccaggcgatcgcgatgaaccggatatgttgccggcggcaacccaggcgttgccttcgcaaccgccggaaggggcggcggaagaggtgcgggcgggcgatgccgccgcgccatcgttagatccatcgcgtattccggtgaacagcaacagcttcgatgacgttcaggagccggtggtggccgcgaaaccgcagcccaagccgcagccgaaaccgcagccgcaacagcaggcctcgacgccaacgccgccgccggctaagccacagcagcaacagccaccgcagcagcaggcggccctgccggcgccgaccggcaaagcctatgtggttcagctgggcgcgttgaagaacgccgataaggtgaatgagattgtcggtaaactgcgggcctcgggtttcaaagtctatacgtcgccttcgacgccggtacagggtaaaattacccgcatcctcgtcggcccggatgcgtcaaaagacaagctgaaaggccagctgggcgatctgcagcagatctccgggcttagcggggtggtgatgggcttcaccccgaactga

SEQ ID NO: 260151 - DNA, 489 bp, Klebsiella pneumoniae; identical to SEQ ID NO: 136409

SEQ ID NO: 260152 - DNA, 1518 bp, Klebsiella pneumoniae
atgtgcggtattgtcggtatcgccggtgttatgccggttaaccagtcgatttatgatgcgctaacggtgctccagcaccgtggacaggatgccgctggcatcatcaccattgatgccaacaactgcttccggttgcgtaaggctaacgggctggtaagcgacgtattcgaggcccgccacatgcagcgtatgcagggcaatatgggtattggccacgtgcgttatcctacggcgggcagctccagcgcctccgaggcgcagccgttttacgttaactcgccgtatggcatcacattggcgcataacggcaacctgaccaatgcgcatgagctgcgtaaaaagctgtttgaagaaaaacgccgccatatcaataccacctctgattccgaaatcctcctcaatattttcgccagtgagctggataacttccgtcactacccgctggaagcggacaacatcttcgcggcgattgcggcgaccaaccgcctgatccgcggcgcgtacgcgtgcgtggcgatgatcatcgggcatggcatggtggccttccgcgaccctaacggcattcgtccgctggtgctgggtaaacgtgacgttggcgacggtcgcaccgagtatatggtggcctcggagagcgtggcccttgatacgcttggttttgaattcctgcgcgatgtggcgccgggcgaagcggtctatattaccgagaagggccagctctatacccgtcagtgtgccgataatccggtcagcaacccgtgcctgttcgagtacgtctattttgcccgtccggactcgtttattgacaaaatttccgtctacagcgcccgcgtcaacatggggactaagctgggcgaaaagattgcccgcgagtgggaagatctggatattgacgtcgttattccgatcccggagacctcctgcgacatcgcgctggaaatcgcccgcattctcgacaaaccttatcgtcagggcttcgtgaagaaccgctacgtcggccggacgtttatcatgcccggtcagcagctgcgtcgtaaatctgttcgccgtaagctcaacgccaaccgtgcggaattccgcgataagaacgtgctgctggtcgatgattccattgtacgcggcaccacctcggagcagatcattgagatggcgcgtgaagcaggggcgaaaaaagtgtatctcgcctccgctgcgccggaaattcgtttcccgaacgtgtacggtatcgatatgccgaccgccaacgaactgatcgcccatggccgcgaagtggatgagatccgccagatcattggcgccgacggcctgattttccaggatctcaacgatctgatcgacgcggtgcgcgcggagaacccggatattcagcagtttgaatgctcggtgttcaacggcgtatatgtgacccgggatgtcgaccagcagtacctcgactatcttgactccctgcgtaacgatgatgccaaagcggtccagctacagaacgaagtcgaaaacctcgagatgcacaacgagggttaa

SEQ ID NO: 260153 - DNA, 570 bp, Klebsiella pneumoniae
gtgaaacgactgattattggcatttccggcgccagcggcgccatttacggcgtgcggatgctgcaggtgctaagagatgtgccggatattgaaactcatctcatcctcagccaggcggcgcgccagacgttggccatggagaccgactactccgtacgtgaggtgcaggcgctagccgatgtggtgcatgacgcccgcgatatcgccgccagtatctcttccggttcgtttaaaaccgccgggatggtgattttaccctgctcaatgaagacgctctcgggcattgtccatagctatacggatggcctgctgacccgggcggcggatgtcgtggtgaaagagcgtcgtccgctggtgctctgcgtgcgggaaacgccgttccatttgggccatctgcgtctgctggttcaggctgcagagctgggggcggtgataatgccgccggtaccggctttttaccaccggccacaaagcctggacgatgtcatcaaccagaccgtcaatcgggtactcgatcaatttgatattagtctggaacacgacttgtttacccgctggcagggggcctag

SEQ ID NO: 260154 - DNA, 783 bp, Klebsiella pneumoniae
atgaagaagacgattctggctctctctttactcgtgggaatgagcagcacggccagcgtgtttgctgctctgccgcagagcattcgcattggcaccgacgcgacctatgcgccattttcgtcgaaagacgcgaaaggggactttgttggctttgatatcgatttaggcaatgagttgtgctcccgaattaaggtgaaatgtacctgggtcggcagcgattttgactccctgatcccctccctgaaggcgaagaagattgacgccatcatctcttccctctctattaccgagaagcgccagcaagagatcgccttctctgacaagctatatgccgctgactcgcgtctgatcgccgccaaagggtcgccgatccagccgacgctggaggcgctgaaaggcaagcacgtcggcgtgctgcagggttctactcaggaagcctatgctaacgaccgctggcgcagccagggcgttgacgtggtggcttaccagaaccaggatctgatctattcagacctcgcagctggccgtctggatgcggcgctgcaggatgaagtcgccgccagcgaaggcttcctgaaacagcctgccgggaaagatttcgccttcgccggcccgtccgttaaagacaaaaagtactttggcgacggcaccggtatcggcctgcgtaaggacgacgccgagctgaaagccgcgtttgataaagcgctgggcgaaatgcgtaaagacggcacctacgacaaaatggcgaagaaatacttcgattttaacgtgtacggcgactaa

SEQ ID NO: 260155 - DNA, 783 bp, Klebsiella pneumoniae
atgaaaaaactggcgttgtctctctctttagcgctggccctttccagcgtttccacggtctttgccgccatcccgcaaaaaattcgtatcggtaccgatccgacttatgctcccttcgaatcgaagaatgcgcagggagaattggtcggttttgatatcgatctggcaaaagagctgtgtaagcgtattaatacgcaatgtacctttgttgaaaacccgctggatgcgctgatcccctccttaaaagcgaagaaaatcgacgcgattatgtcttcgctgtcgattactgaaaagcgccagcaggaaattgccttcactgacaagctgtatgcggcagattcgcgtctggtggtgaaaaagggcagcccggtaacgccggatctcgccaccctcaagggtaagcgcgtgggcgtgctgcaggggacgactcaggaaacctatggcaatgagcactgggcgccgaaaggtatcgaaattgtctcctatcaggggcaggacaatatctattccgacctgaccgccggccggatcgacgccgcgttccaggatgaggtcgcggccagcgaagggttcctgaaacagcctatcggtaaagattaccagtttggtggcccgtcaatcaaagacgagaaactgtttggtgttggcaccggtatggggctgcgtaaggaagacaacgaactgcgtgaagcgctgaataaggcgtttgcagagatgcgtaaggacggcacctacgacaagctggcgaaaaaatatttcgattttaacgtatacggcgaataa

SEQ ID NO: 260156 - DNA, 687 bp, Klebsiella pneumoniae
atgctgtatgggttttcacaggttattttgcagggtgcgctcgtcaccctggagcttgcgctcagctcggtcgttctcgccgtcctgattgggctggcgggcgctggcgcaaagttatcgagcaaccgtccactggcgctggtatttgaaggctataccactcttatccgcggcgtgcccgatctggtgctgatgctgctgattttctacggcctgcagattgcgctaaacagcgttaccgacgcgctgggtatggcccagtttgatatcgatccgatgatcgccgggattattacccttggctttatctatggcgcctattttacggaaaccttccgcggcgcctacctggcggtgccgaaggggcatatcgaagcggctaccgcctttggctttagcggcgggcagacgttccggcgtattctcttcccggcgatgatgcgctacgcgctgccggggataggcaacaactggcaggttatcctcaaggcgacggcgctggtctcgttgctggggctggaggatgtggtcaaagccacgcagctggccgggaaaagcacctggcagccgttctacttcgccatcgtctgcggcctgatttatctggtgtttaccaccgtttctaatggcgtactgctgctgctcgaacgccgctataccgttggcgtgaagagggctgacctgtga

SEQ ID NO: 260157 - DNA, 717 bp, Klebsiella pneumoniae
gtgattgaaattattcaggagtactggaaatcactactgtggaccgacggctatcgctttaccggcgtggcgattaccttatggttgctgatctcttcagtggtaatggggggcatcctggcggtgtttctggccatcggccgcgtctcgagcaataagtttatccagttccccatctggctgttcacttacatatttcgcggcacgccgctgtatgtgcaactgctggttttttactccggcatgtataccctggaaatcgtcaaaggcacggagctgttgaacgcttttttccgcagcgggctaaactgcacggtactggcgttaaccctgaatacctgcgcctataccactgaaattttcgccggcgcgatccgctcagtacccgccggagaaattgaagcggcgcgggcctacggcttctcgtcagtcaaactgtatcgctgcattattctgccttccgcgctgcggattgcgctaccggcctacagtaacgaagtgatcctcatgctgcactctaccgcgctggcgtttaccgctacggtaccggatctgctgaaaatcgcccgcgatatcaactcggccacctatcagccgttcaccgcgtttggcatcgccgcggtgctctatttaattatctcgtatgtgctgattagcttgttccgtaaagcggaaaagcgctggttgcagcatatcaaaccttcttcgacgcattga

SEQ ID NO: 260158 - DNA, 774 bp, Klebsiella pneumoniae
atgtccgacaataaattaaacgttatcgatctgcataaacgctatggggaacacgaggtgctgaagggcgtctcgctgcaggcgaaagccggggacgttatcagcatcatcggttcatcgggttccggaaaaagtacctttttgcgctgtattaacttccttgaaaaaccgagcgaaggcacgatcgtcgtcagcggccaaaatattggtctggtacgggataaagacggccagctgaaggtggccgacaagaaccagttgcgcctgctgcgcacccggttgaccatggtgtttcagcatttcaatctgtggagccatatgacggtgctggagaacgtcatggaggcgccgattcaggtgctgggcttaagcaaacaggaagcgcgcgaacgggcggtaaaatatctggccaaggtcgggatagacgaacgtcagcaggcgaagtatccggtgcatctttccggtggccagcagcagcgtgtctctattgcccgcgcgctggcgatggaaccggaagtgctgctgtttgatgagccgacctccgcgctggatccggaactggtgggcgaagtgttacgcattatgcagcagctggcagaagagggaaaaaccatggtggtggtgacccatgaaatgggctttgcccgccacgtctcttcacatgtcatttttctgcatcagggtaaaattgaagaagaagggcatccggatgcgctgtttggcgcgccgaaaagcccgcgcctgcagcagtttctgaaaggttcgctgaaataa

SEQ ID NO: 260159 - DNA, 528 bp, Klebsiella pneumoniae
atgacgaccatcaccacaccacgcctttcgcttacccgctttgttaccgatgactggcccttttttctgcgcctgcgccaggatccgcaggtgatgcgttttatgggggaggtgttaagcgaggaggcgctgcgcagcgtcttcgtcagtcgctgtgccgatcccggggtgtttgtattgcgcgataaattcggcgaggcgctgggcgatattgggctccgcatcagtccgaaaaatccgcacgaagctgacgtcggctacgcgctgctgcctcaggctcagggaaaaggctatgccagcgaagcgctgcgggcggtctgcgagtatggtttcaccaccctgggggtgcaggccatcaatgcctgggtgctgggtgaaaaccgtggctcatcgcgcctgctggagaagcaaggctttgtgcgcacccaggtgctggagaaagcctatcatctgaacggcgtcgattacgatgactggatctatcggctggagcgggaagctcatccggcgtccgcagacgccggatga

SEQ ID NO: 260160 - DNA, 363 bp, Klebsiella pneumoniae; identical to SEQ ID NO: 209584

SEQ ID NO: 260161 - DNA, 630 bp, Klebsiella pneumoniae
atgatcgatctttactatgcacccaccccaaacggccacaaaatcaccctgttcctcgaagaggcggagctagcctatcggctaattcgggtcgatatcggcaaaggggaacaatttcatccgcagtttctggcgatttcgccgaataataaagttccggctatcgtcgaccacatgcctgctgacggcggggcgccattgagcgttttcgagtccggcgccatcctgctctatctggcggaaaaaagcggtaagctgctgagcggcgagctgcgggaacgctacgtcacgctgcagtggctgttctggcaggtcggcgggctggggccgatgctggggcaaaatcaacatttttcccactccgcgccgcaaaccgtgccctacgctattgaacgttttcaggtggaaacccaacgactgtatggggtgctaaatcagcgtctgggatgcagcccgtggcttggcggcgaccactacagtatagccgacatcgccgcctggccctgggtgaactgccatgtccgacagcgtatcgatctggcgaactatccggcggtgcacaactggtatgagcgcattaagcagcggccggcaacggcggaagcgatgttaaaaattcagctttattaa

SEQ ID NO: 260162 - DNA, 639 bp, Klebsiella pneumoniae
atgagccagcctgtcattaccctgtggtccgatgccgattttttctcaccgtacgtgatgtctgtctatgtcgctctgcaggaaaaaagcctgccttttacccttaaaaccgtcgacctgaaccgcggcgaacatctgcaggcgggctggacaggctatgccgccacccgtcgcgtaccgctgctggaggttgatgatttcgcgctaagtgagtcttcggcgattactgagtatctggatgagcgtttcgcgccgccggagtgggagcgcatctacccgcatgatctgcaaaaacgagcccgcgcccggcagatccaggcctggctgcgcagcgatctgatgccaattcgtgaagagcgatccaccgccgtggtgtttgacggggcgaaaatgccggacctcagcgaggccggcaggcaatctgcggaaaagctgtttgccaccgccaccacgctactggcccacggcgggaaaaatttatttggcgaatggtctattgccgacgcagacctggcgctgatgctcaatcgcctggttctcaatggcgataaggtaccggaggcgctggctgattatgcgtctttccagtggcagcgggcctcaatccagcgttacgtggcgctttccgccaaacgctga

SEQ ID NO: 260163 - DNA, 552 bp, Klebsiella pneumoniae
atgaagctgatgtttgcctccgatattcatggttcgctgcccgccacggaacgcgtgcttgaacggttcgcgcaaagcggcgccaggtggctgatcatactcggcgatgtgctcaatcacggtccgcgtaacgcgctgcctgaggggtatgcgccgggtgaggtggcggagcggttgaacagcgtggcggaacgcattgttgccgttcgcggcaactgcgacagcgaagtggatcagatgctgcttcgttttccaatgaccgcgccctggcagcaggtgcttagcgaacgctatcgcctgtttctgacccacgggcatctctatagtccggataatctgccgccgctggccgctggcgatgtcctggcatatggccatactcatataccggtcgcggaaaaacgcggcgcaatttacctctttaatcccggctcagtgagtatcccgaaagggggatattccgccagctatgggctgctggatcaggggcggctgcaggttttagcactcaatgataatcaggttattgcagaggttgcaatttacccgtaa

SEQ ID NO: 260164 - DNA, 552 bp, Klebsiella pneumoniae
atggcggaacagaatcatttggcaagcacagaatgggtcgatattgttaatgaaaacaatgaggtgatagcacagtccagccgcgagcaaatgcgcgcgcagtgcctgcgccaccgggcgacctatatcgtcgttcatgacggaatggggaaaattctggtgcagcgacgcaccgagacaaaagactttcatccgggcatgctggatgccaccgctggcggcgtcgtgcaggctgatgagcagctgctggaatcggcccgtcgcgaggcggaagaggagttaggcatcgccggggtgccgtttgccgatcacggccagttttattacgaagacaaattctgccgcgtctggggaagtctgttcagctgcgtctcccacgggccgttcgccctgcaggaagaagaggtcagcgaggtgtgctggttaacgccggaagagatcaccgcccgctgcgatgagttcacgccggactccctgaaagcgctggcgctgtggatgacccgcaacgccggtaatgagtatgatgatgcggaagagagcgagcgcgaataa

SEQ ID NO: 260165 - DNA, 2148 bp, Klebsiella pneumoniae
gtgtcccgtactatcatgttaattcctaccggtaccagcgtaggtctgaccagcgtcagcctcggtgtgatccgcgctatggaacgcaaaggcgttcgtctgagcgtctttaaacctatcgcccagccgcgttccggtggcgatgccccagaccagaccaccaccatcgttcgcgccagctcctccaccaccaccgccgctgaaccgctgaagatgagccatgttgagtctctgctctccagcaatcagaaagatgtgctgatggaagagatcattgccaactaccacgcgaatactcaggacgcggaagtggtgctggtggaaggcctggtaccgacccgtaagcatcagttcgcccaggcgctgaactttgaaatcgccaaaacgctgaacgctgaaatcgtcttcgtgatgtctcagggcaccgacacgccagaacagctgaacgagcgtatcgaactgacccgtaacagctttggcggcgccaaaaataccagcatcaccggcgttatcgtcaacaaactgaatgcccctgtcgacgatcagggccgtacccgtcctgacctgtcggaaattttcgacgactcgtcgaaagcaaaaatcgtgaagattgacccggctcagctgcagaaaggcagcacgctgccggtgctgggcgcagtgccatggagcttcgatctgatcgcgacccgcgcgatcgacatggctcatcatctgaatgcgaccatcattaacgaaggcgatatcaatacccgccgcgtgaaatccgtgactttctgcgcgcgcagcatcccgcacatgctggaacacttccgccctggttctctgctggttacctccgcagaccgtcctgacgtgctggttgcggcctgcctggcggcaatgaacggcgtggaaatcggtgccattctgctgaccggcggctatgaaatggacgcgcgcatcagcaagctgtgtgaacgcgctttcgcgaccggcctgccggtattcatggtcaacaccaacacctggcagacctccctgagcctgcagagctttaacctcgaagtaccggttgacgatcacgagcgtatcgagaaagttcaggaatacgtggccaactacatcaacgccgactggatcgaatcgctgaccgcgacctccgagcgcagccgccgtctctctccgccagccttccgctaccagctgaccgagctggcgcgcaaagccggcaaacgtgtcgttctgccggaaggcgacgaaccgcgtaccgtgaaagcggcggcgatttgcgccgaacgcgggatcgccacctgcgtcctgctgggtaacccggatgagatcaaccgcgtagccgcggcccagggcgtggagcttggcgccggcattgaaatcgtcgatccggaagtggttcgcgaaagctatgtgggtcgcctggtcgaactgcgtaagaacaaaggcatgaccgaagcggtcgcgcgtgagcagctggaagacaacgtggttctcggcaccctgatgctggaacaggacgaagtcgacggtctggtatccggcgcggttcacaccactgccaacaccattcgtccgccgctgcagctgatcaaaaccgcgccgggcagctcgctggtctcctccgtgttcttcatgctgctgccggaacaggtttacgtttacggcgactgcgcgatcaacccggacccgaccgccgatcagctggcggaaatcgctattcagtccgctgaatccgcgattgccttcggcatcgaaccgcgcgtggcgatgctctcctactccaccggtacctccggcgcgggtagcgatgtcgagaaagtccgcgaagcgacccgtctggcgcaggaaaaacgtcctgacctgatgatcgacggcccgctgcagtatgacgccgcggtgatggctgacgtagcgaagtccaaagcgccgaactcaccggtagctggccgcgcgaccgtgttcatcttcccggatctgaacaccggtaacaccacgtacaaagcggtacagcgctctgccgacctgatctccatcgggccgatgctgcagggtatgcgcaagccggtcaacgacctgtcccgtggcgcgctggtagacgatatcgtctataccatcgcactgaccgcgatccaatcggctcagcagcagaagtaa

SEQ ID NO: 260166 - DNA, 1203 bp, Klebsiella pneumoniae; identical to SEQ ID NO: 139480

SEQ ID NO: 260167 - DNA, 456 bp, Klebsiella pneumoniae; identical to SEQ ID NO: 139481

SEQ ID NO: 260168 - DNA, 495 bp, Klebsiella pneumoniae
atggaaatgaccaatgcgcagcgtctgattttatccaatcagtacaaaatgatgacgatgctcgacccggataatgcggaacgctaccgtcgtctgcaaaccatcatagagcgtgggtatgggctacagatgcgtgaactggaccgcgagtttggccagttgacggaagaaacctgccgtaccgttattgatatcatggagatgtaccacgcgctgcacgtctcctggaccaacctgaaagacgcggcgggtatcgatgaacgccgggtcaccttcctcggatttgatgccgccaccgaagcgcgttatctcggctatgtgcgttttatggtcaacgttgaaggccgctacagccattttgacgccggtacccatggctttaactcgcagactccgatgtgggagaaatatcagcggatgctgagcgtctggcacgcttgcccgcgccagtatcatctgagcagtaatgaaattaatcaaattatcaacgcctga

SEQ ID NO: 260169 - DNA, 660 bp, Klebsiella pneumoniae
gtgcagtgtaaaggtttcctgttcgatttagacgggacgctggtggattccttgccggtggtggagcgttcatggtgcaagtggggggatcgtttcgccattgaccatgatgaaattctcagttttattcacggcaagcaggccattacctccattcgccattttatgccggggcgcagcgaggaggatatccaggccgaatttcgctacctcgagcagatagaagccactgatattgagggtatcgtcgcgctgccgggggcattagccctgctgaatacgctcaatgaggccgggatcccgtgggcgattgtcacctccggctcgattccggttgcccacgcgcgtcaccgcgcggcgggcctgccgatgcctgaggtgttcgtcaccgccgagcaggtgaaacacggcaaaccggcgccggacgcctatctgctgggcgccgagcggctgggtctgcctgccggggagtgcgcggtggtggaagatgcgccggcggggctcctctccggactggcggccggctgtcgcactatcgcggtcaacgtgcccgccgatgcccctcgcctggatgaagccgacctcgtgctgagcagcctggaagatctggtggttgaacgccagactgacggcgtggtaaatgtgcgtcttaaagcgtaa

SEQ ID NO: 260170 - DNA, 1833 bp, Klebsiella pneumoniae
gtgaacggtgaattgatttgggttttatccctcctggccatcgcggttgtgctgtttgctaccggcaaggtgcgcatggatgctatcgccctgatggtcattgtcgcctttgtcctcagcggaacgctgacgttaaatgaagctttttccggattcagcgatcctaacgtgatcctgattgccgccctgtttattatcggcgatggcctggtgcgcaccggagtcgccaccaaaatgggggcatggctggtgagcgtggcggggaacagcgaaaccaaaatgctgatctacctgatgctcaccgtcgccggtctgggcgcgtttatgagctccaccggggtggtcgccattttcatcccggtggtacttagcgtctcggcgcggatgaatacctcgccatcgcggctgatgatgccgctgagcttcgccgggcttatcagcgggatgatgaccctggtggcgacgccgcccaacctggtggtcaacagtgaattgctgcgcgagggactgcacggcttcagctttttcagcgtcacgccgattggcctggtggtgctgatcctgggcatcgtctatatgctggcggtgcgctttatgctgaagacggataatggcgactccgcacgcgatgggcgaaaaagaagcaccttccgcgatttgatccgcgagtatcacctcaccggccgcgctcgccggctggccatccgcccgggttcgccgatgatcggtcagcggctggatgatttaaagctgcgtgagcgctactgcgccaacgtgatcggcgttgaacgctggcggcggttccgccgggtaattgtcaacgtcaacggggtatcggaatttcgcgcccgcgacgtcctgctgatcgatatgtccgcctccgatgtcgatttacgccagttctgcggcgagcaaatgcttgagccgatggtattgcgcggcgagtattttgccgatcaggcgctggatgtggggatggcggaggtggcgctgatcccggattcagagatgattggcaaaacggtgcgtgagatagccttccgcacccggtttggtctcaatatcgtcggcatgaagcgcgatggcaaagcgatggatggttcggtggtcgacgagccgctgcagctcggcgatatcctgctggtggtcggcaactggcggcaaattgccctgctggcgaagcgcggccgggatttcgtggtgctcaatatgccggttgaggtcgatgacgcttcgcccgcccacagccaggctccgcatgcgattttctgcctggtgctgatggtagccctgatgctcaccgatgaaattcccaacccgattgccgcgattatcgcctgtctgctgatgggcaaattccgctgcatcaatgccgagagcgcctacaaggcgatccactggccgagcattattttgattgttgggatgatgccgtttgccctggcgctgcaaaaaaccggcggggtggatctggtggtgaagggcctgatggatgtcgccggaggcgaggggccttatctgatgctcggctgcctgttcatgatgtgcgcggcgattgggctgtttatctcaaacaccgccacggcggtgctgatggcgcctattgccttagcggcggcgaagtcaatgggcgtctctccctatccttttgccatggtggtggcgatggcggcttcggcggcgtttatgaccccggtctcctcgccggttaacaccctggtgcttggccctggcaagtactcatttagcgattttgtcaaaataggcgtgccctttaccatactggtgatggtggtctgcgtcctgctgatcccggtactgtttccgttttaa

SEQ ID NO: 260171 - DNA, 600 bp, Klebsiella pneumoniae
atgagtcagagtcatttctttgcccacctctcccgcctgaaactgattaaccgctggccgctgatgcgcaacgtgcgcaccgaaaatgtctccgaacacagcctgcaggtggcgatggtcgcccacgcgctggcggcgattaaaaaccgcaaatttggcggccaggtcaacgccgagcgtatcgccctgctggcgatgtaccatgacgcctcggaagtactaactggcgacctccctactccggtgaaatatttcaattcgcagattgcccaggaatataaggcgattgagaaaattgctcagcaaaagctggtggatatggtccctgacgagctgcgcgatattttcgagccgctgattgatgagcatcactacagtgaggaagagcagtcgatcgttaaacaggctgacgccctctgcgcttacctgaagtgcctcgaagagctgtctgcaggcaataacgaatttctgctggccaaaggtcggctggaaaagaccctggcatcgcggcgcagcgcggagatggattactttatgcaagtgttcgtcccaagcttccagctgtcgctggacgaaattagccaggattcgccgctgtaa

SEQ ID NO: 260172 - DNA, 1218 bp, Klebsiella pneumoniae
atgtcccccatcgaaaaatccagcaagttagagaacgtctgttatgacatccgcggcccggttctgaaagaagccaaacgtcttgaagaagaaggcaataaggttctgaaactgaacatcggcaacccggcgccattcggcttcgaggctcctgacgagatcctcgtcgacgtcatccgcaatttgcctaccgcccagggttactgcgattcgaaaggattgtactcggcgcgtaaagctatcatgcagcattaccaggcccggggtatgcgcgatgtcacggtggaggacatctatatcggcaacggcgtgtccgagctgattgtacaggcgatgcaggcgctgttaaacagcggcgatgagatgctggttcccgccccggactacccgctgtggacggcggcggtgtcgctttccagcggcaaagcggtgcactatctgtgtgacgaatcctctgactggttcccggatctggacgacatccgcgcaaaaatcacaccgcgcacccgcgggatcgtgatcattaaccctaacaaccccaccggcgcggtctattccaaagaattgctgcaggagatcgtggagatcgctcgtcagcataatctgatcattttcgccgatgaaatttacgacaagatcctctacgacgaagcccagcatcactctattgccgccctggcgccggacctgctgacggtgacctttaacggattgtcgaaaacctatcgcgttgccggcttccgtcagggctggatggtgctgaatggcccgaaaaaacacgcgaagggctatatcgaagggctggagatgctggcttcaatgcgtctgtgcgccaacgtgccggcccagcatgctatccagacggcgctgggcggctatcagagcatcagcgaattcatcatccccggcggacgcctgtatgaacaacgcaaccgcgcctgggagcttatcaacgatattccgggcgtctcctgcgtgaagccaaaaggcgcgctgtatatgttcccgaaaatcgacgccaaacgcttcaatattcatgacgaccagaaaatggtgctcgacttcctgctgcaggagaaagtcctgctggtgcaaggcaccgcctttaactggccgtggccggatcacgtacgcatcgtgaccctgccgcgcgaagacgacctggagatggctatctcccgctttggccgcttcctctccggctaccatcagctttaa

SEQ ID NO: 260173 - DNA, 927 bp, Klebsiella pneumoniae
atgattaatacaacacgtcccatactcaacctcgatctcgatctgctgcgtacctttgtcgcggtcgctgatttgaacacttttgccgccgccgccgccgcagtgtgtcgtactcagtccgcggtcagtcagcaaatgcaacgcctggaacagctggtgggcaaagagcttttcgcccgccacggccgcaataagctgctgaccgagcaggggatccagctgctgggctatgcccgcaaaattctccgttttaacgatgaagcctgtatgtcgctgatgtatggcagcctgcagggggctctgagcatcggtgcgtcagaagaaacggctgacaccatcctgccgtttttgttaaaccgcatcggctgtttctatcccagaatgacgttggagatcaaagttcatccccatgccgccatcatggagatgctggccgaggggctggtcgatctggcgttgaccacccatcagcctcccggctttacctcttttaccctgagaacatcacctactctctggtattgcgcagcggaatatgtgctggcgaagggggaatctatccccctgatcctgctcgaagagccaagtccattccgccaggatattatcgccgcgctggaaactgctcgcgtcagttggcatctggcccacggagcttcctcgctatcgggcgtgaaagcggcggtgaaggccgggctgggcgtgactgcgcgcccggtcgaaatgatgagcccggatctacgcgtggctggcatcagtgaggggttaccggcgttgccggacacccggtacgtcgtcagctgcaatccgcggacggtgagcgaactgccgcaggcgatttttcagtctctgagtcaggagatccatccctgggaaacgggcacagcacttactccggaagagggagggaataccttggttttgtaa

SEQ ID NO: 260174 - DNA, 360 bp, Klebsiella pneumoniae; identical to SEQ ID NO: 217478

SEQ ID NO: 260175 - DNA, 675 bp, Klebsiella pneumoniae
atggattatacgctcacccgcatagatcctaacggtgagaacgaccgttaccccctgcagaaacaggagatcgttaccgatcctctggagcaggaagtcaataaaagcgtgtatatggggaaactcgaacacgcgctgcatgacatggtgaactggggccgtaagaactcaatttggccgtacaacttcggcctttcttgctgttatgtggaaatggtgacgtcattcactgcggtgcatgacgttgcgcgttttggggcagaagttctgcgcgcctctccgcgtcaggcggacctgatggtggtcgcgggaacctgctttaccaaaatggcgccggttattcagcgtctctacgatcagatgctggagccgaagtgggtgatctccatgggcgcctgcgccaactcaggcgggatgtacgacatctattccgtcgtccagggcgtggataaattcattccggtcgatgtgtacatcccgggctgcccgccgcgtccggaggcctatatgcaggcgctgatgctgctgcaggagtccattggtaaagaacgtcgcccgctctcatgggtggttggcgatcagggcgtttatcgcgccaatatgcagtcggaacgcgagcgtaaacgcggcgaacgtattgcagtgaccaatctgcggacgccggacgagatttaa

SEQ ID NO: 260176 - DNA, 1809 bp, Klebsiella pneumoniae
atggtgaacaatatgaccgatttaaccgcgcatgacgccgcaccagcctggcaaacccgcgatcaccttgatgacccggtgattggcgaactgcgcaaccgctttgggccggatgcctttaccgttcagccaacccgtaccggcgtaccggtggtatgggtgaagcgtgaacagctgctggaggtgggtgatttcctgaagaaattgccgaagccttacgtgatgctgtttgacctgcacggcatggacgaacgtctgcgcacgcaccgcgatggcctgcccgccgcggatttttccgttttctatcacctgatctccatcgatcgcaaccgcgacatcatgctcaaggtggcgctgtcggaaaacgatctgcatctgccgaccttcaccaaactgttccccaacgccaactggtatgagcgtgaaacctgggaaatgtttggcattaccttcgatggtcacccgaacctgcgtcgcatcatgatgccgccgacctgggaaggtcacccgctgcgtaaagattatccggcgcgtgccaccgagttcgacccgtttgagctgaccaaagccaaacaggatctggagatggaggcgctgacctttaaaccggaagagtggggcatgaagcgcggcaccgacaacgaggacttcatgttcctcaacctcggtccgaaccacccatcggcgcatggtgcgttccgcattattctgcaactggacggcgaagagatcgtcgactgcgtaccggatatcggttatcaccaccgcggcgccgagaagatgggcgagcgtcagtcctggcacagctacatcccgtataccgaccgtattgaatatctcggcggctgcgtcaacgagatgccgtacgtgctggcggtggaaaaactggctgggatcaccgtaccggatcgcgtgaacgtgatccgcgtgatgctctccgagctgttccgcatcaacagccacctgctgtatatctcgacctttattcaggacgtcggcgcgatgacgccggtcttcttcgcctttaccgatcggcagaaaatttacgatctggtggaagcgattaccggattccgtatgcacccggcgtggttccgcatcggcggcgtcgcgcacgatctgccgcgtggctgggatcgcctgctgcgtgagttcctcgagtggatgccgaagcgtctggactcctatgagaaggccgccctgcgcaacaccattctgaaaggccgttccgtcggcgtggcagcctataccgccaaagaggcgctggagtggggcaccaccggcgcaggcctgcgcgccaccggtatcgacttcgacgtgcgtaaatggcgtccttactctggctatgaaaacttcgacttcgaagtcccgaccggggggggcgtctcagactgctacacccgcgtgatgctgaaagtagaagagctgcgccagagtctgcgcattcttcagcagtgcctcgataacatgccggaaggcccgttcaaagcggatcacccgctgaccacgccgccgccgaaagagcgcacgctgcagcatatcgaaaccctgatcacccacttcctgcaggtatcgtggggcccggtgatgccggccaacgaatctttccagatgattgaggcgaccaaagggatcaacagttactacctgaccagcgacggcagcaccatgagctaccgtacccgcgtgcgtacgccgagctttgcgcacctgcagcagatcccgtcggcgatccgcggcagcctggtatccgacctgatcgtctatctgggtagtatcgattttgttatgtcagacgtggaccgctaa

SEQ ID NO: 260177 - DNA, 501 bp, Klebsiella pneumoniae; identical to SEQ ID NO: 209601

SEQ ID NO: 260178 - DNA, 1338 bp, Klebsiella pneumoniae
atgaaaaccgtaattcgtactgcggaaacgcatccgctcacctggcgcctgcgcgacgacaagcagccggtgtggctggacgagtatcgcagtaaaaatggctatgaaggggcgcgtaaagccctgaccgggatggccccggatgagattgtcacggcggtaaaagacgctggcctgaaagggcgcggcggcgcgggcttctccactggtctgaagtggagcctgatgccgaaagacgaatccatgaacatccgttacctgctgtgtaacgccgatgaaatggagccgggcacctataaagaccgcctgctgatggagcagctgccgcacctgctggtggaaggcatgctgatctccgcgtttgcgctgaaagcgtaccgcggctacatcttcctgcgcggggaatatattgaagcggcccagcatctgcgtcgcgcgattgctgaagccaccgaagcgggtctgttggggaaaaacatcctcggcaccgggtttgacttcgagctgttcgtgcacaccggggcagggcgctatatctgcggcgaagagacggcgctgatcaactctctggaaggccgccgcgccaacccgcgatccaagccgccgttcccggcgagctccggcgtctggggcaagccgacctgcgtcaacaacgtagaaaccctgtgcaacgtgccagcgatcctcgccaacggcgtcgagtggtaccagaacatttccaccagcaaagatgctggcaccaagctgatgggcttctccggccgggtgaagaatccgggcgtctgggagctgccgttcggcaccactgcccgcgagatcctcgaagattacgccggcggtatgcgcgatggcctgaagtttaaagcctggcaaccgggcggagcagggaccgacttcctcaccgaagcgcacctcgatctgccgatggaattcgaaagcattggtaaagcgggcagccgtctgggcacctcgctggcgatggccgttgaccacgagatcaacatggtctcgctggtgcgcaaccttgaagagttctttgcccgcgagtcctgcggctggtgtacgccgtgccgcgatggtctgccgtggagcgtgaagatcctgcgcgccctggagcgcggcgaaggccagcctggcgatatcgaaacccttgagcaactgtgtcgattcctgggcccgggtaaaaccttctgcgcgcacgcgccgggcgcggtcgagccgctacagagcgcgattaaatatttccgcgaagaattcgaggctggcattaagcagcagttcagcaatacccatgcaatcaacgggattcagccgaacctgcttaagacgcgctggtaa

SEQ ID NO: 260179 - DNA, 2727 bp, Klebsiella pneumoniae
atggctacgattcatgtagacggcaaagaatacgaggtcaacggggcggacaacctgctagaggcttgtctctctcttggtcttgatattccctacttttgctggcacccggcgctagggagcgtcggtgcttgccgccagtgtgcggtgaagcaatatcagaacgcggaagacacgcgtggtcgcctggtgatgtcctgtatgactccggcatccgacggcacctttatttctatcgacgacagcgaagcgaagcagttccgcgaaagcgtggtggagtggttgatgactaaccacccgcacgactgcccggtctgcgaagagggcggcaactgccacctgcaggatatgacggtgatgaccggtcatagcttccgccgctatcgtttcaccaagcgtacccaccgcaatcaggatctggggccgtttatttcgcacgaaatgaaccgctgcatcgcctgctaccgctgcgtgcgctactacaaagattatgccgacggcaccgatctgggcgtctatggcgcgcacgacaacgtctacttcggccgcccggaagatggcaccctggagagcgagttctccggcaacctggtggaagtctgcccaaccggcgtcttcaccgacaaaacccactccgagcgctataaccgtaagtgggacatgcagtttgcgccgagcatctgccagcagtgttccatcggctgtaacatcagcccgggcgaacgctatggcgagttgcgtcgtatcgaaaaccgctataacggtaccgtgaaccgctacttcctctgcgaccgcggtcgtttcggctatggctacgtgaacctgaaagaccgtccgcgtcagccggtacagcgccgcggcgacgatctgatcacccttaacgccgagcaggcgatgcagggggcggcggatatcctgcgccagtcgaagaaagtgatcggcatcggctccccgcgcgccagcattgaaagcaacttcgcgctgcgcgagctggtgggcgccgacaacttctataccggcatcgccaaaggcgaacaagcgcgcctgcagatgatgctgaaagtgctgcgcgagggcgggatccacacgccaagcctgcgcgatatcgaatcctacgatgcggtactggtgctgggcgaagacattacccagaccggcgcgcgcgtggccctggcggtacgccaggcagtgaaagggaaagcacgcgaaatggcggcggcgcagaaagtggccgactggcagatcgccgcgatcctcaacatcggccagcgcgccaagcacccgctattcgtcaccaacgtcgatgacacccgcctggatgacatcgcggcgtggacctaccgcgcgccggtagaagatcaggcgcgtctcggctttgctattgcccatgcgctggacgacagcgcgccggcggttgacggcctgagccaggacctgcagggtaaagtcgacgttatcgttcaggcgctggccggggcgaaaaaaccgctgatcatctccgggaccaacgccggcagcatggagatcatccaggccgccgctaacgtggcgaaagctctgaaaggccgcggcgccgatgtcggggtgaccatggtcgcccgggcggttaacagcgtcggactgggcatgatcggcggcggctcgcttgaagaggcgctggacgaactggaaagcggcgccgcagacgcggttatcgtgctggaaaacgaccttcaccgtcatgcctccgccgcgcgcgttgacgctgcgctggcgaaagcgccgctggtgatggtggtggatcatcagcgcaccgcgattatggacaaagcgcacctggtgctctccgcggcaagctttgcggaaagcgacggtaccgtggtgaacaacgaaggccgcgcccagcgtttcttccaggtttacgatccggcttactacgacgcgaaaaccgtaatgctggaaagctggcgctggctgcattcgctgcacagcaccgtcaacaaccgtcaggttgactggactcagctggaccacgtcattgatgcggcgattgccgcgctgccgcagctggcgggcattaaagacgccgcgccggatgcgaccttccgcattcgcggccagaagctggcgcgtgaaccgcaccgctacagcggccgcacggcgatgcgcgctaacatcagcgtgcacgagccgcgtcagccgcaggataaagacacgatgttcgccttctccatggaagggaacaaccagccgtccgccccgcgttcgcagatcccgttcgcctgggcgccgggctggaactccccgcaggcatggaacaagttccaggatgaagtgggcgggaaactgcgccacggcgatccgggcgttcgtctgtttgaagcgtccgccagcggactggagtacttcacggcggtgccggccagcttccaggcggaagagggcaaatggcgaattgcgccgtactaccatctgttcggcagcgatgagctgtctcagcgcgcgccggtgttccagagccggatgcctgagccgtacatcaagctgaacccggcggatgccgcgaagcttggcgtcaacccaggggcaatgctctcctttagcgtggaaggccagaccctgcgtctgccgctggttatctctgaaggcctgaccgcgggacaggttggcttaccgatgggcatgccgggcattgcgccggtgctgaccggatcgcgtattgattcactgcaggaggcgaaagcatga

SEQ ID NO: 260180 - DNA, 978 bp, Klebsiella pneumoniae
atgagctggttaacgccggatcttatcgacattctgttaagcatcctgaaggccgtggtcattctgctggtggttgtcacctgcggcgcgttcatgagcttcggcgagcgtcgtctgctcggcttgttccagaaccgctacggacctaaccgcgtcggctggggcggttcgctgcagctggtcgccgacatgatcaagatgttctttaaagaggactggatcccgcgcttctccgatcgcgtgatctttactctggcgccggttatcgcctttacctcgctgctgctggccttcgctatcgtgccggttagcccgacgtgggtggtggccgacctgaacatcggcatcctcttcttcctgatgatggcaggcctggcggtctacgcggtgctgttcgccggttggtcgagcaataacaaatactcgctgctgggggcgatgcgtgcttccgcgcagaccctgagctacgaagtgtttctcggtctctccctgatgggcgtggtggcgcaggcggggtcattcaatatgaccgatatcgttaacaaccaggcgcatctgtggaacgttatcccgcagttcttcggcttcgtgactttcgccatcgccggcgtggcggtgtgtcaccgtcacccgttcgaccagccggaagcggagcaggaactggccgatggttaccacattgaatattccggcatgaaattcggtctgttcttcgtcggggaatacatcggtatcgtcaccgtttcagcgctgatcgtcacgctgttcttcggcggctggaatggcccgtggttacctcctttcatctggttcgcgctgaaaaccgcgttcttcatgatgatgttcattttgatccgcgcatcattaccgcgtccgcgctatgaccaggtaatgtcctttggctggaaggtatgcctgccgttaacgctggtcaacttgttggtaacggcggctgtcattctctggcaggcgcaataa

SEQ ID NO: 260181 - DNA, 543 bp, Klebsiella pneumoniae; identical to SEQ ID NO: 134516

SEQ ID NO: 260182 - DNA, 555 bp, Klebsiella pneumoniae; identical to SEQ ID NO: 134517

SEQ ID NO: 260183 - DNA, 303 bp, Klebsiella pneumoniae; identical to SEQ ID NO: 209607

SEQ ID NO: 260184 - DNA, 1842 bp, Klebsiella pneumoniae
atgaacatgcttgccttaaccattcttttgccattgattggctttgtgctgctggccttctcccgcgggcgctggtcggaaaatctttccgccaccgttggcatgggctcggtaggcctggcggcgctggtcaccgcgtacgttggcgtcgactttttcgctaacggcaaacaggcggtcagcgtgccgctgtggacctggatgtcggtcggtgatttcaacatcggcttcaacctggtgttggacggcctgtcgctgaccatgctctccgtagttaccggcgtcggcttcctgatccacatgttcgcctcctggtacatgcgcggtgaagagggatattcccgcttcttcgcctataccaacctgtttatcgccagcatggtggttctggtactggccgataacctgctgctgatgtacctcggatgggaaggcgtgggcctctgttcttacctgctgatcggtttctactacaccgatccgaagaacggcgccgcagcgatgaaagcgtttgtggtgacccgcgtcggcgacgtgttcctcgccttcgcgctgttcattctttataacgaactgggtaccctgaacttccgcgaaatggtggagctggcgccgcagcacttcgctaacggcagcgccacgctgcagtgggcgacgctgatgctgcttggcggcgcggtcggtaaatccgcccagctgccgctgcaaacgtggcttgccgatgcgatggcgggtccgacgccggtctctgcgctgatccacgccgcgaccatggtcaccgcgggcgtctatctgatcgcccgtacccacggcctgttcctgatgacgccggaagtgctgcatctggtcggtatcgtcggggcggtcaccctggtgttggcgggcttcgccgcgctggtgcagaccgatatcaaacgcgttctcgcctactctaccatgagccagattggctacatgttcctcgcgctgggcgtgcaggcatgggacgcggcgattttccacctgatgactcacgcgttctttaaagcgctgctgttcctgtcgtctggttcggtcattctggcctgccatcacgaacagaacatcttcaagatgggcggcctgcgcaaatcgattccgctggtatacgtctgcttcctggtggggggcgcggcgctgtccgcactgccgcttatcaccgcaggcttcttcagtaaggatgagattctggcaggcgcgatggccaatggccatatcaatctgatggtggcaggcctggtcggcgcctttatgacctcgctgtacaccttccggatgattttcatcgtattccacggtaaagagcaaattcacgcgcacgcagggaaggggattacccatcatctgccgctgattgtgctgctggtactatccaccttcgttggcgcgctgattgtgccgccgctggaaggcgtactgccgcagaccactgagctcgcccacggtagcgtgatgacgctggagattgcctccgggatcatcgccattgccgggattctgatcgccgcatggctgtggctgggcaaacgcacgctggtgacctccatcgccaacagtgcgcctggccgcttcttcggtacctggtggttccatgcctggggcttcgactggttatacgacaaggtgttcgtaaaaccattcctcggtattgcctggctgctgaaacgcgatccgctgaactcgttgatgaatatcccggcgatcctttcccgcttcgcaggcaaaggcctgctggtgagcgagaacggttatctgcgctggtatgtggcttcaatgagcatcggcgcggtggtggtgctggcgctgctgatggtattgcgttga

SEQ ID NO: 260185 - DNA, 1530 bp, Klebsiella pneumoniae
atgttactaccctggctaatattaattccctttatcggcggcttcctgtgctggcagaccgaacgctttggcgtgaaagtgccgcgctggatcgcgctgattaccatgggactgacgctggtgcttggcctgcagctgtggatgcagggcggctattctctgacgcaatccgcgggtattccgcaatggcagtcggaattcgtgctgccgtggatcccacgcttcggcattagcatccatctggcgatcgacggcctgtcgctgctgatggtggtgctgaccggtctcctcggcgtgctggcggtgctctgttcgtggcgtgaaatcgaaaaataccagggcttcttccacctcaacctgatgtggatcctgggcggcgttatcggcgtgttcctcgccatcgacatgttcctgttcttcttcttctgggaaatgatgttggtgccgatgtacttcctgatcgcgctgtgggggcacaaagcctcggacggtaaaacgcgtatcacagcggccaccaagttcttcatctatacccaggcgagcggtctggtgatgctgattgccattctggcgctggccttcgtccacttcaacgccaccggcgtgtggaccttcaactatgaagatctgctgaaaaccccgatgtctcacggcgtggaatacctgctgatgctcggcttcttcatcgccttcgcggtgaaaatgccggtggtgccgctgcacggctggctgccggacgctcactcccaggcgccgaccgccggctctgtcgacctcgcggggatcttgctgaaaaccgccgcctacggtctgctgcgctttgcgctgccgctgttcccgaatgcctccgccgagtttgcgcccatcgccatgtggctgggcgtgatcggtatcttctacggcgcgtggatggccttcgcccagaccgatattaaacgcctgatcgcctacacctccgtgtcccacatgggcttcgtgctgattgctatctacaccggcagccagctggcctatcagggagcggtgatccagatgattgctcacggtctgtccgcggcgggtctgttcattctgtgcggccagctgtacgaacgtctgcacacccgcgatatgcgccagatgggcggcttgtggagcaaaattaaatggctgccggcgatgtcgatgttcttcgcggtcgccaccctggggatgccgggcaccggtaacttcgtcggcgaatttatgatcctgttcggcagctataaagtggtgccgacaatcaccgtcatctccacctttggtctggtattcgcgtccgtttactcgctgtcgatgttacatcgcgcttacttcggtaaagcgaagagcgaagtggcggcgaaagagttgccggggatgtccctgcgtgaactgtctatcatcctgctgctggtggtgctgctggtgctgttgggcttcttcccgcagccgatcctcgacacctcgcatgctgcgatgagcaacattcagcagtggtttgttaattctgtttctactacaaggccgtaa

SEQ ID NO: 260186 - DNA, 1458 bp, Klebsiella pneumoniae
atgacaataactccacaacaactgatcgcactgctaccgctgctgatcgtcggcttgacggtggtggttgtgatgctctccattgcgtggcgacgcaatcattttctcaatgccacgctgtcggttcttggacttaacgccgcgctggtctcgctctggttcgtcggccagaacggggcgatggacgtcacgccgctgatccgcgttgacggctacgccatgctttacaccggtctggtgctgctggcgagcctcgcgacctgtactttcgcctacccgtggcttgagggttacaaggacaacaaagaagagttctacctgctggtgctgatcgccgccctgggcggcattctgctggccggtgcgaatcatctggcggcgctgttcctcggtattgagctgatttcgctgccgctgttcggcctggttggttacgccttccgccagaagcgttcgctggaagcgagcatcaaatacaccatcctctccgcggcagcttcgtccttcctgctgttcggtatggcgctggtgtatgcgaactccggcaacctgtccttcctcgcgctgggcaaaagcctggcggacaacatgctgcacgagccgctgctgctggcgggcctcggtctgatgatcgtcggtcttggctttaaactgtcgctggtgccgttccacctgtggacgccggacgtttaccagggggcgcctgcgccggtctccaccttcctggcgaccgccagcaagatcgctatcttcggcgtagtgatgcgtctgttcctgtacatgccggtgggcaacagcgaagcggtacgcgtggtgctgggcctgatcgccttcgcctctatcatcttcggtaacctgatggcgctgagccagaccaacattaagcgcctgctcggttactcttccatctcccatctcggctatctgctggtggcgctgattgccctgcagagcggtgaaatgtcgatggaagccgtgggcgtctacctggccggttacctgttcagcagcctcggcgcgttcggcgtggtcagcctgatgtccagcccgtaccgcggcccggatgctgactcgctgttctcctaccgcggcctgttctggcaccgtccgatcctgtcggctgtgatgacggtgatgatgctctccctggccggcatcccgatgaccctcggctttatcggtaagttctacgtgctggccgtcggtgtgcatgcgcatctgtggtggctggttgccgcggtggttgtcggctcggcgatcggtctctactactacctgcgcgtggcagtgagcctgtacctgagcgcgccggagcaactgaatcgcgatgcgccgtcaaactggcagtacagcgccggcggtatcgtggtgctgatctccgcgctgctggtgctggtgctcggtatctggccgcagccgctgattagcatcgtgcagctggcgacgcctctgatgtaa

SEQ ID NO: 260187 - DNA, 921 bp, Klebsiella pneumoniae
atggaattaacttttttggggacatccgccggggtgccgacccgcacgcgtaatatgacgtcgataatactgaatttgcaacagccgacccgcgccgaaatgtggttgtttgactgcggcgaagggacccagcatcagtttcttcacacgccctaccatcccggcaaactgaataagatttttattacccatctgcacggcgaccacctgttcggcctgcccggtctgctgtgcagccgctcgatgcagggaaactctctgcccctcaccctctacgggccaaaaggactcaaagagtttgttgagaccgcgctgcgcctgagcggttcgtggaccgactatccgctcaccatcatcgaagtcggccctggtctggtgttcgacgaagagggctatcgggtcaccgcgtatccgctcagccatccggtggagtgctatgggtatcgcattgagcagcatgacaagcccggcaccctcgacgccgcccagctgattgccgatggcgtgcctcccgggccgctgttccatcaactcaagcgcggacagcgcgtcgagctggcagatggccgggtcattgacggcagccgctatctggggccagcaaccccgggtaaaacgctggccatcttcggcgataccgccccctgcccgcaggcgctggagatggctcgcggggcggatgtaatggtccacgaaaccacccttgagcaggcgatggcggagaaagccaatagccgcggccactcttccagtcagcagaccgcggcgcttgccaaagaagcgggggtcggtacgctgatcgccacccactttagctcgcgctacgatgccgaaggctgtctgcgtatgctggcggaatgccgggagattttccctaacacgctgctggcggaagactttatggtctacaagatggcgtaa

SEQ ID NO: 260188 - DNA, 462 bp, Klebsiella pneumoniae
atgatgacctggcaggatctccaccatagtgaactcaccgttccccagctgtatgcgctgctgaaattgcgcagtgaagtctttgtcgtagagcagcagtgcgtctatcaggatgtcgacggcgatgatttggttggtgaaaatcgccatctgctcggctggcgcgatggcgaactggtggcctacgcgcggatcctcaaaagcgaagaggagtttgcgccggtggtgattggccgggtcatcgtcagccccgccgcccgtggtgcgaagctcggctatcagctgatggagcaggcgctggccagctgtcagcagcactggccgcaaaaggcgatttacctcggggcgcaggcgcacctgcaatccttttacgcccacttcggttttacgccggtgaccgaggtctatgatgaggatggcatcccccacattggcatggcgcgagaaaagcgcgctgtctga

SEQ ID NO: 260189 - DNA, 1290 bp, Klebsiella pneumoniae
gtgctgtctgtttccactgcgctggcccgtttgcaagacggcctgggcgagtcatttccagactcgcccggcacgcgaattatcgatgttgcctttccgctgaatgatgccttcgatccgctactatggtgcggccagcaggcgcaatggccgcagttttactggcagcagcgcaatggcgatgaggaactggcgacgctgggggcggtaaaaacctttacctcgctcgacgcggcgaaccgctttttacgccaggccggccggcaggatctgcgtatctgcggcctgaatgcgtttgaaccgcagcagggcagcctggcgctgccgcgtctggagtggcgccggtgcggcggcagggccgtgctgcggctggtgctgcatagtgatatctccctgcgtgaggatgccgcgacggcccgcgcgtttctcgccagcctgacaaccactcaggcgactcccggcgccataccgccgttgctgagcgagcgccactcatccgactatcctcaatggcaggcaatgattgcgcgggcgactaaggcgatcagcgccggtgaaatggataaagtagtgctggcgcgggcaaccgacctgcagtttgccgccccgctggacgccgtgagcatcatggcggctagccggcgcagcaatcttaactgttttcatttcctgatggcgttcaatgcccggcaggcatttttcggctccacgccggaacggctgtggcgccggcgcggcgcgctgctgcgcaccgaagcgctggcggggaccgtcgcgaaccatcaggaagacgcgaaggcgcagcaactggccgactggctgatgaaagacgacaaaaaccagcgggaaaacatgctggtagtagaggatatctgccagcgcctgcagagtgaggcctcgacgctggacgtcctgccgccgcaggtggtgaggctgcgtaaggtgcagcatctccgacgctgcatctggaccgagctggcggcgcctgacgacagccgctgtcagctgcagctgcagcccaccgccgcggtggccggcctgccgcgccgggcggcgctggcgttcattcagcgtcatgaaccgttttcccgcgaatggtacgccgggtccgccgggtatctgtcactggcgcaaagcgagttttgcgtggcgctgcgttcggcgaaagtgaaccacgacaccctgcggctgtatgccggggcggggatcgtcagcggctctgatgcacagcaggagtggcaggagattgacaacaaagcggccgggctgcgctcgctgctgtgtccataa

SEQ ID NO: 260190 - DNA, 1671 bp, Klebsiella pneumoniae
atgtcagtaagcgcatttaaccgacgctgggcggcggtgatcctggaagctttaacgcgccatggcgtgcagcatatctgcatcgcgccgggctcgcgctcgacacccttaaccctggcggcggcggaaaaccgcgcctttatccatcatacccatttcgacgaacgcggcctcggccacctggcgctcggactggcgaaggccagccggcagccggtggcggtgatagtcacctccgggaccgccaccgcaaacctctatccggcgctgattgaggcagggctcaccggtgaaaagctgatcctgttaaccgccgaccgtccgccggagctgatcgactgcggcgcgaaccaggctatccgccagccggggatgtttgcctcccatcctgcgcagacgatttctttgccgcgtccctcgcaggatattcctgcccgctggctggtctcaaccatcgaccaggcgctgggcgcgctgcacgccggcggggtgcatattaactgtccgttcgctgaaccgctgtatggtgatatggatgagaccggcgtggagtggcagcagcagctcggcaactggtggcagagcgacaaaccctggctgcgccaggcgctgcagttagagagcgagaagcagcgcgactggttcttctggcgacaaaaacgcggcgtcgtcgtggcgggcagaatgagcgccgcggaagggaaaaaggtcgctgagtgggcgcagaccctcggctggccgctgatcggcgatgtcctgtcgcagaccgggcagccgctgccgtgcgccgacctgtggctgggcaacggcaaagcggtcagcgagctggcgcaggcgcagatcgtcgtgcaactcggcagcagcctgaccggcaaacgcgtgctccagtggcaggcgacctgcgagccggatgaatactggctggtggataatctgcccggtcgcctcgacccggcgcagcaccgcggtcgccgtctgctctcaagcgttgagcgctggctcgaattacatccggcggagaaacgccagccgtgggcgacggtgatcccacagcttgccgggcaggcgtggcaggctgcggtcgccagcaacgagccttttggcgaagcgcagctggcgcagcgtattcggcgctatctgccggagcagggccaattgtttgttggcaacagcctggtggtgcgcctgatcgacgccctggcgcagttgccggccgggtatccggtctacagcaaccgcggcgccagcggtatcgatggcctgatcgccactgcggccggcgtgcagcgcgccagcgcccgaccgacgctggccatcgttggcgatctctccgcgctctacgatctcaactcgctggccctgctgcgccaggcgtcggcgccgctggtgctgatcgtggtgaataacaacggcgggcagattttttctatgctgccgacgccgcaggacgaacgccgtcagttctatttaatgccgcaggacgtggatttcagccacgcggcggcgatgttcggcctggcctatcatcgccctgatgactggccgtcgctggatgaggcgctggccggcgcctggcgcagggcgggggcgacggtgattgagctggcggtcaatgagaccgacggcgcgcagaccctccagcagctgctggcgcaggtaagtcgcctgtga

SEQ ID NO: 260191 - DNA, 759 bp, Klebsiella pneumoniae
gtgatcctcagcgctgctgtcgacaacggccagccgggctatccctggctggtgtttctgcacggtttttccggcgaccgcaacgagtggcggaaagtgggcgacgcctttcccgcctggccgcggctgtacctcgatctgccggggcacggcggctccgcggatatcgcggtgcaggactttgccggggtcaatactctgctgcagtctacgcttaatagttacaacatacataagtattggctgatcggctactcgctgggcggccgggtggcaatgaacttcgccagccagccgcgcgcaggcatgcgcgggctgatcgttgaaggcggccatccgggcctgcaggatgtagaggcgcggcaggcgcggcgcagcaatgaccgcgcctgggcggaacgttttcgccgcgagccgcttgagcaggtctttgccgactggtatcagcagccggtcttcgcttcgctgaatgccgcgcagcgtgagtcattggtcgccttacgcagccggaacaacggcgcgacgctggcggcgatgctgcaggcaacctcccttgccgcgcaggccgatctgcgcgcgtctctgcaggcgcgcgattttccttttcactacctgtgcggcgagcgcgacgcgaagtttcgcgccatcgcgcagacgctcgcggcggatctccatcttattcaccatgccggacacaacgcgcaccgggacaacccggcggcggtgattgcctgtctggcgcagattctggcaagttaa

SEQ ID NO: 260192 - DNA, 858 bp, Klebsiella pneumoniae
atgatctctcttgatgaagcaatgctctacgcccccgttgaatggcacgattgctccgaaggctataccgatattcgctatcacaaatcgactgacgggattgccaaaatcaccattaatcgtccgcaggtgcgcaacgccttccgcccgctgaccgtcaaagagatgatccaggcgctggcggatgcccggtatgacgacaatatcggcgtcatcgtgctgactggtgaaggtgagaaagccttctgcgccggcggcgaccagaaagtccgcggcgactacggcggctatcaggacgactccggggttcatcatcttaacgtgctcgacttccagcgtcagatccgcacctgcccgaaaccggtggtcgcgatggtggccggctactctatcggcggcggtcacgtgctgcatatgatgtgcgatctgactatcgcggcggaaaacgccatcttcggccagaccgggccaaaagtcggctctttcgacggcggctggggcgcctcctatatggcgcggatcgtcgggcagaaaaaagcgcgcgaaatctggttcctgtgccgccagtatgacgctcagcaggcgctggacatggggctggtgaataccgtggtaccgctggcggatctggaaaaagagaccgtgcgctggtgtcgtgaaatgctgcagaacagcccgatggccttgcgctgcctgaaagcggcgctgaacgccgactgcgacggccaggctggtctgcaggagctggcgggcaacgccaccatgctgttctatatgacggaagaggggcaggaaggacgcaacgccttcaaccagaaacgtcagccggacttcagcaaatttaaacggaatccataa

SEQ ID NO: 260193 - DNA, 966 bp, Klebsiella pneumoniae
atgcgcgtttcgcaggtttaccgctggcagataccgatggacgcgggcgtggtgctgcgcgagcggcggttaaaaacccgcgacgggctgttcatccgcctgcaggagggggaacgcgaaggctggggcgaaatttctcccctgccgggattcagtgtcgagacgctggaagaggcgcaaatggcgctgttagcgtgggcacaggcctggcgcgacggcgccgagccgccgcttcccacgcagccctccgtcgcgtttggcatcagctgtgcgcaggcggagcttggcggcgaactgccacaggccgcggattatcgcgcggcgccgctctgctccggcgatccggatgagctattcgccagactggcggcgatgcccggcgagaaggtcgctaaggtcaaagttggcctctgggaggcggtccgcgacggtatggtggtcaatctgctgctggaggcgatccccgacctgcagctgcggctcgatgccaaccgcgcctggacgccgctcaaagcgcaacagttcgccaaatacgttaatccggcgtaccgccagcgcattgcttttcttgaagaaccttgcaaaacgcgggaggattctcgggcctttagccgcgagacagggatcgctatcgcctgggatgaaagcttgcgcgaggcggatttccgctttgtcgccgagccgggggtgcgtgcggtggtgatcaaaccgacgctaaccggcagtttgcagaaggtgcagcaacaggtcgccgcggcgcatgcgctggggttgagcgtagtgatcagctcgtcgatcgagtccagcctcgggttaacccagctggcgcgggttgccgcctggctgacgccgcagaccatccccggactcgatacgctggcgctgatgggcgcccagctggtacggccgtggcccgaaagtgcgctgccggtgctcaacattgatgcgctggagccgctgctgtga

SEQ ID NO: 260194 - DNA, 1377 bp, Klebsiella pneumoniae
gtgacctttaacgactggccctggcggcattggcgtcagcggcgcggagaggccctcgccttacgtctgaataaccagccgctgacctggcgggagctatgcgcgcgggttgacgcgctggcgtctggttttgccgcgcagggcgtaatggaagggcagggcgtggcgctccgggcctataaccagccggaaactctgctggcatggctggcgctgctacagtgcggggcgcgggtgctgccgctgaatccgcagctgccagcggtgttgctgcaggcgttgttacccgcgttaaccatgcagcatcagctggtgctgaatggcgatgtgttgccggggaatttaccgatgttaaccctgcagttggtcgagggcgagcatgctgcttgctggcatggcgatcggttgctgtcgatgacgttgacctccggttcaaccggcctgccgaaagcggcggtacatagcgccaacgcccatctggccagcgcggctggcgtgctggcgctgatgccgtttgccgcaggagatgactggctgctgtcgctgccgttgttccatgtctccggtcaggggatcgtctggcgctggctgctggccggcgcgcgactcacggtacgtgacaaacagccgctggcgcagatgctgcacggctgcacccatgcttcgctggtgccgactcagctatggcgcctgctgaatgatgatgctgcggtttccctcaaggcggtgctgctcggcggcgcgtcgatcccggtcgaattgactgaacgggcgcgaaagcagggcatacgcagcttctgcggctatggcctcaccgaattcgcctccaccgtgtgtgccaaagaggccgacggcgctgcggatgttggcgaagcgctgccggggcgagaggtgaaaattgtcgccggcgagatctggctgcgggcgtcgagtatggccgcaggctactggcgggatggtcaattgttgtcattaaccaacaatgaaggttggtttgcgacgcgcgatcgcggagcattgcataacggtcggctgacggttgttgggcgactggataacctcttttttagcggtggagaaggtattcaaccggaagaggtcgagcgtgtgatactcgcccatccacaggtacagcaggtgtttatcgtgccgctggatgatgcggaatacggccagcgcccggtagcggtggtggaatgcgatgacggctgcgagttgagcgcgctggcggcatggagcgctgagcggttagcgcgttttcagcagccggtgcgttggctgcggttgccggaaacgttaaaaaacggcgggattaagatttcgcgccgggcgctgtgcgagtgggtcaggcagcagacgcatgcgaccgtatcgtag

SEQ ID NO: 260195 - DNA, 426 bp, Klebsiella pneumoniae
atgcgccacaggacgattgtttgcccgctgatcgagaatgaaggccattatctgctttgcaaaatggccgccgaccgcggggtttttcccgggcaatgggccttatccggcggcggcgtggagccaggggaacgtattgaagaggcgctgcggcgggaaatacgcgaagagctcggcgaaaaactcatccttacccatatcgcgccatggtgctttcgcgacgatacccgcgtcaaaacctaccccgacgggcatcaggaaacgatctacatgatctatctcatcttcgactgcgtgagcgccaatcgcgatgtgacgatcaacgaggagtttgacgattacgcctgggtcaaagccgaagatctcaaaaactacgatcttaatgccgccacccgcgttactctcagcctgaaagggctactttag

SEQ ID NO: 260196 - DNA, 966 bp, Klebsiella pneumoniae
atggaaagggcgacgaattccccccacgatgctgtatttaaacacctgctgtcgcatcgggcgacggccagggattttctggacattcaccttcccgcaccgctgcgcgcgttatgtaatctgaacacgctgcggctggagtccgggagctttattgacgacgaactgcgggcgagtcattccgatatcctttactcgctgcaaacgcaggcgggggagggctatatctatctgttgatagagcaccaaagctcggcggaccgccatatggcatttcgcctgatgcgctatgcgatagccgcgatgcagcgtcatctggataaagggcatacgcagctgccgctggtgatcccgctgctgttttatcatggtcgcgtttctccctggccttacccgatgtgctggctggcaggctttgccgatccggacatcgcgcggcggatctatggtgaagattttcccttaattgatatcactagcaccccggacgatgaaatcatgcgccatcggcgcgtggcgatgctggagctgctacagaagcatattcgccagcgggatttgatggacctgcatgagcagctggtcaggctcctggcgctgggatacactagccgcaggcagcttaagacgctgttgcactatttattacaggcaggaaacgccgccgatccggttgcttttttgcgccatcttgcgcaaaacgtcccccggcggccgcataaggagacgctaatgaatattgcccagtttctggaacaacgcggccatcagcaaggattaaagcaaggtcttgaacaaggtctacagcaaggtatcgaacaaggtatcgaaaaaggtatcgagcaaggtgagcagcagaccgcggagcgtatcgcccgggcgatgcttgctaacggactcgacctgtcgctggtggcgaaactgaccggcctcgccccggaatgtctggcccggctgcagcattaa

SEQ ID NO: 260197 - DNA, 543 bp, Klebsiella pneumoniae
atgaaaaaaagcatttttatggcgctggcgggcgtgatgatgatttcttcggcggcccatgcgattagcgttactggtgaagccggcgagcattacaccaaccttggcgtcggcttcggcaccgagtccaccggcctggccgtttcgggtaactggctgcacagcgataacgacggcgacgccgcgggtttaggcctgggactcaatattccgctggggccgttcctcgcgaccgtgggtggtaaaggtatttacaccaatccgaaacagggcgatgaaggttatgcggccgcggtcggcggcggcctacagtggaaaatcggcgacagcttccgcctgtacggcgattattactactctccggattcgctctccagcggcattgatagctaccaggaagccaacgtcggcgccagctggaccattatgcgtccgcttagcatccaggccggctaccgttacctgaacctggcgggcaaagatggcaaccgcgataacaccatcgccgacggcccatacatcggcgccagcgccagcttctaa

SEQ ID NO: 260198 - DNA, 1197 bp, Klebsiella pneumoniae
atgttgaatgtggaaatgctgtccaccggcgatgaagtgttgcatggtcaaatcattgataccaatgcggcatggctggcggatttcttttttaatcagggtttaccgttaacgcgccgcaataccgttggcgacgatctcgatgcgctggtggcgattctgcgcgaacgcagcgaacaggcggatgtgctgatcgtcaacggcggcctcggcccaaccagcgacgacctgagcgcgctggccgctgccactgcgaaaggcgaagggcttattttgcatccggagtggctggaaaccatgacccgcttttttgccgagcgcggcaggccgatggcggaaagcaaccgtaagcaggcggaaatcccggccagcgctgagatgatcaacaacccggtcggtacggcctgtggctttgccatccagctcaaccgctgcctgatgtttttcactcccggggtcccctctgaatttaaggtgatggtcgagcaggaaattttaccgcgcctgcgccagcgctttacgctgccggacccgccggtatgcctgcgtttgaccacctttggccgctcggagagcgagctggcgcaaagtcttaatccgctgacgctgcctccgggcgtggtgatgggttaccgctcgtcgatgccgatcattgaactcaagctaaccggaccggccaaccagcgcgacgccatgctggctctgtggccggaggtgcgtaaggtggctggcgacagcctgattttcgaaggtacggaagggttacccgcgcaaatcgcccgctgtctgcaggagcggcagctgagcctgacgctcagcgagcagtttaccagcggcctgctggcgctccagctgtcccgcgccggcgcgccgctgctggccagcgaagtcgttccggcgcaggaggagacgctggcgcaggcggcccgctgggcggccgagcggcgcataaaccattttgccggcctggctctggcggtgagcggtcaggaaaacgatcatcttaacgtggccctggccaccccggacggcaccttcgcgctgcgggtgaagtttagcgccacccgccacagcctggcggtacgccaggaagtctgcgctatgatggcgttaaacatgctgcgtcgctggctgaatggtcaaccgctggccagcgaacatggctggattaacgtggtggattccctctcgctgtaa

SEQ ID NO: 260199 - DNA, 786 bp, Klebsiella pneumoniae
atgttggaatcaacgaaagtcccggcgctgacccgcgcgattgagatcctcaatttaattggccgcatcggcccctgcagcgcggcgacgataatagcggagctggggatcccgaaaagcacggtgtatctgctgctgggcgagctgaaaaagcagcgcttcatcagtatggataatcaggataactactgcctgtggaccaagctggtggagctggccgggcaggcgctgagcaaaatggacctgcgcgagctggcgcggccgcgcctcacccggctgatggatgagtgcggcctgctttgtcacttgggcattatcgatcagggtaacgcctactacattctgaaaattgagtctcccgccaccatcagcgtgcgctcgcatgagggtaagagcctgtctctttaccgctccgggatcggcaaatgtttgctggcctggcagcccgccagcgttcaggcgtcgattatcgaagacctacagtgggagcgggccacgccaacgaccatcaccgatgctcaacagctgcgggaggagctggggcggatccgcgcccggggctggagctttgataatggcgaagactatccggatgtgcgctgcgtggctgccccggtatttaacgccaataacgacctgaccgccgccatctcggtggtgggtacccgtctgcaaatcaatgaagacaatcgcgattacctggctggtaaggcgattgcctgcgcgaaagatatttcacgtctgctggggtggaaaagccccttcgaacaactcgcctcatcataa

SEQ ID NO: 260200 - DNA, 1206 bp, Klebsiella pneumoniae
atgaccctaccgaaaattaaacacgtccgcgcctggttcatcggcggcgccacagcagagcagggcgccggcggcggcgattaccatgaccagggggataaccactggattgacgatcatatcgccaccccgatgagcaaatataaacagtatgagcagtcccggcagtcgtttggcatcaacgtgctggggacgctgattgtggaagtggaagccgacaacggacagaccggctttgcggtgtcgacggccggggagatgggctgctttatcgtcgaaaaacatctcaaccgctttatcgaaggcaaatgcgtcagcgatatcaaactgatccatgaccagatgcttaacgccaccctttactacgcgggatccggcggcctggtgatgaataccatctcctgtgtcgacctggcgctgtgggacctgttcgggaaagtggttggcctgccggtctacaaactgttgggtggggcggtgcgcgacgaaatccagttctatgccaccggcgcacgtccggacctggcgcaggagatgggctttatcggcggcaaaatgcctacccactgggggccgcacgatggcgacgccgggatccgcaaagacgtcgccatggtggcggatatgcgcgaaaaatgcggcccggatttctggttaatgctggactgctggatgagccaggacgttaactatgccaccaaacttgcccatgcctgcgccccttataacctcaagtggatcgaagagtgcctgccgccgcagcagtatgaaggctatcgcgagctgaagcgccaggcgcctgccgggatgatggtgaccagcggcgagcaccacggcacgctgcagtccttccgcaccctgtcggaaaccggcatcgatattatgcagcccgacgtcggctggtgcggcggcttaaccaccctggtggagatcgcggccatcgccaaagcgcgcgggcagctggtagtgccccacggctcgtcggtttactcacatcatgcggtgatcaccttcaccaacacgccgttcagtgagtttctgatgaccagtccggactgcgccacgctgcgcccgcagttcgacccgatcctgctcggcgagccggtgccggagagagggcgcattcataaatcggtcctggataaacccggctttggcgtcgagctcaatcgcgactgcaacctgaagcgtccttatcaacactga

SEQ ID NO: 260201 - DNA, 1293 bp, Klebsiella pneumoniae
atgatgagcaacactctgctggagagcgtggtgaagaaaaaccgcgcccgcttaatcccctttatgctggcgttgtacgtgctggcgtttcttgaccgttctaatatcggtttcgccaaagagacctaccagctggataccggactcagcaatgaggcctacgcgctgggggccggtatcttctttgtggtctatgccttcctcggggtgccggccaatctgctgatgcgcaaatttggcgccaggcgatggatcggctgcaccacgctgctgtggggcgtgctgtcggcggcgatggcgtgggcggatacggaagcgaaattcctgctggtacgtaccctgctgggcgcggcggaggcgggcttctttcccggaatgatctacctcacttcacagtggtttccccagcaaaaccgcgccagcattatggggctgttttatatgggcgcgccgctggccctgacgctgggatcgcctttatccggtgcgctgctggagatgcatggatttatgggccatcccggctggttctggatgtttgtcattgaaggcctgctcgccgtcgccgcgggagcgttcaccttcttctggctggacgattcgccgcagcatgcccgcttcctgagcgcagcggagaaacaggcgctgataagcgagctggcgcgcgaggaggagaaaaagattgcctcgcgcctgtccgatgcgctgcgtaacgggcgggtctggcagctggcgctgatttatctgaccattcaggtggcggtctatggtctgattttcttcctgcccacccaggttgctgcgctgctgggcaccaaagtcggcttcgttgcctcggtggtgacggccatcccgtgggtggcggcgctgtttggcacctggcttatccctcgctactccgatcgcaccggcgagcgacgcaatattgccgccctgacgctgctggcggcggcggtcgggattgcagtgtccggactggtggcgccggtgctggctatcatcgcgctgtgcgtggcggcggtcggggtgatcgccgtgcagccggtcttctggacgatgccgacgcagctgctgtccggcacggcgctggccgcagggattggctttgttaacctgtttggcgccatcggtggttttctggcgccgatcgtgcgcgtgcaggccgaaacgttgttcgccagcagcgccgccggactgttaaccctggccggcgtcgccattgtcggggtggtcattatcttttcattgagccttacccgcgcggtaccccagcgcggcagcgtacagcattga

SEQ ID NO: 260202 - DNA, 804 bp, Klebsiella pneumoniae
atgaacgcactgttatctaaccccttcaaacggggattattacgcggtgagacgcaaatcggcctgtggctgagctccacctcatcctacatggcggagatcgctgcgacgtcgggatacgactggctgctgatcgacggcgagcatgccccgaacaccattcaggatctttatcatcagctgcaggcgattgccccctatgccagccagccggtcattcgcccggtcgagggcaaccgcagcctgataaaacaggtgctggatattggcgccagaaccttgctggtgccgatggtcgataccgccgagcaggctcgggaggtggtctcagcgacccgttatccccccatcgggagccgcggcgttggcgccggcgtggcgagagcggcgcgctggggaagggtggagaattatatggcggaggcgaatgacgaactctgtctgctgattcaggtcgagagccgaaccgcgctggagaacctggacgctattctcgaggtggacggcattgacggggtgttcatcggtccggcggatctctccgcctcgctgggctacccggacgatgccggtcaccctgacgtgcagcgggtgatcgagcagagcatccggcgcattcgcgcggcggggaaagcggccggatttctggcggtcgacccggcgatggcggaaaaatgtcttgcctggggggccaacttcgtcgccgtcggggtggataccatgctgtatacccaggcgctggaccgccggctggcgatgtttaaatctgccagcgcccagccgcaagagaaaacgagctattga

SEQ ID NO: 260203 - DNA, 189 bp, Klebsiella pneumoniae; identical to SEQ ID NO: 135359

SEQ ID NO: 260204 - DNA, 615 bp, Klebsiella pneumoniae
atgaataatacgcttcttcctccctctgccagcgcgtggatgcgttgcgccgaagctgccacggcgaagctgtccggaatcacggtagccattcgcacgctgtggacgccgacggcatgcccggttgatttattgccgtatctggcgtgggcgctgtcggttgatcggtgggataagaactggccggcagagaaaaaaatagcgtcaatccagcaatcctactggcttcatcgtcggaagggtacgcgcgcagccgtgcggcgagtgatcgaagatatgggtttttccgcgacgtttgcggaatggttcgatgtcggagatgagccgggcacgttccggcttgagattgatgtaaatgaagttggccttacaccaaaaacactggatgaactgaatcgcatgataagcgatgcaaaaccggtgagccgacatatttcgcaattgacgctctcagccagtgcaaggggaaccgcatatatcggttcagtcatccatgatggtgaggtgattaccgtttacccgccagggtactcaccgggtgacagccttgtttatgacggtgtgactcactatgacgggaattatcatttttcaggtgaagcgaatgaacattaa

SEQ ID NO: 260205 - DNA, 1017 bp, Klebsiella pneumoniae
gtggctgcttattacaacgaaatagacccccacgcggcgcagcacctgcgcaaccttatcgacgccggccatattgcgccgggcgtcgttgacacccgttcaattgaggatgtaacccccaatgaccttatcggattcaatcagtgccatttcttcgccgggatcggcggatggtctctcgcgctgcgtcgcgcaggatggcccgacagtcgctcggcatggacagcatcatgcccctgccagcctttcagcgcggcaggcaaagggcttgggtttgctgacgagcggcacttatggccctccgcacattggcttgtcggccagcgtcgccctgtcgtggtctttggcgagcaatctggcagcgctgacgcgaatgactggatcgaccttgtacaagttgacgtggaagccctgggttatgccttcggggcgactgcgtttccgtctgcgagcgtcggcgcgccgcaccaaagagaccgtgcttattgggtggccgacgccgatcgccagcaatgggagaggtgcggggaatttcaaccgacaggggggggtaaaccttcagacagcagcgttattagcgggttggcctacaccgacggcaacggacggaaagggcggttatcagggcggacggatccgcaacgggaagctatcgacggacaggctggacatggctgcgcaattagcgggctggccgacgccaaccacgagcaacgaccgctcaccctgtccgcaagaagctatacggacatatcgcgaaaatggaacaaagattcagaagcggctacaggatgtagcggcgctatgcggcgcagcccggttaacggcttctggcgagatgctgactggctgtactgccgggatggaaagtggaggccagttagacccggatcattcccgctggctaatggggttcccgccagagtgggaagactgcgcacctacggaaacgctatcaacattgaagcggcggcagcgttcataaagtcctacatggtagcggtggatcatgtctga

SEQ ID NO: 260206 - DNA, 156 bp, Klebsiella pneumoniae; identical to SEQ ID NO: 251511

SEQ ID NO: 260207 - DNA, 549 bp, Klebsiella pneumoniae
atgaaattgaaactcaataacgtccgcctttcctttcctgaattatttgaagccagccaggtaaacggccagggggacttcaaattccgcgcgtctttcctgctcccgcctgaccacccgggcaataaagctatcgaacaggcgatcaagaaagtcgctactgacaaatggggagccaaagcggagacaattctttctcaaatccgcgggaaccctatgcgcttcaactaccgcagcggcgacgagaaaggcgactacgaggggtacgcaggcaacatggtgatcagcgccagcaacaaagcgcgaccattggttatcgaccgcgacctttcaccccttaccgcgcaggacggccggccctactccggttgctacgttaacgccaccatcactattttcgcgtacgagaataacggtaaaggcattagcgcatcgctcggtggcgtccagttcttcaaagatggtgatgcgttcagtggtggcggtgtagcaacgccggacgacttcgacaatatcagcgaaggcgccgacgctggcgagctgatttaa

SEQ ID NO: 260208 - DNA, 249 bp, Klebsiella pneumoniae
atgcagataagggtcatcgacagcacaaaattcatggtagctcctcttcatcctttctttttcaacgtaaattttgacagcgatgatcgcctttatccttggcgatttgtgccgctatccggcggtgggctggggaaagacggcctgtttccccgtgaaggccagcaaaatatcctctttgccagggttatagtgatgacatcaatgaataagctgcatcacattggttatgttggtctttccgcctga

SEQ ID NO: 260209 - DNA, 921 bp, Klebsiella pneumoniae
atgaaaacgaagagttcaacgattggagcagtaagtactttcattgaaaggattatggattttagttttggaaatacttcacccacagcatttagagggcataagaatgatacatggaaggcgattccttctatttttagagatgagtatgtcgaagcttataataatgagaactctatagttcgtgatattgtttcggctcatcctgccgagtttgagtcagacaaaactatgtttgatcgactcgttagaatgcaacattattcattgcccacgcgactgttggatgtgactattaatcctttagttgctttgtggtttgccaccgaagataatgaagataaagtacatttacctaatggtagggtaagaaataaaaaaatggatggaaaagttttcatctactttgtgcctgataatcggaagagatattatgacagtgatacagttacttgtttatctaatctctccaatttgaaaaagaatcaaaaagatgatttcctggtaagagcttttaattattctaatcgaagtgatgaaatggttaacataataaaagatttcaatgataaagatgataatgttgatcaactttattaccatgcaggaatggagaagtctcattttagaaaagtcattaaccccaagcattttattagtcctgtttatgtcaaacccaaaatgagtaataaaagaattatcgctcaatcaggagcatttttactatatcctcatcatccagaacaaacaaaaaaccatcagggtaacgatctagatattcatgtggaaacattgattgtacaagcaagagctaaagctaaaattcgtgggcaactggctaagttgggaatccatgctggttcaattttcccggaaatggataaagcatcagaatacatacttgctcaatataataaataa

SEQ ID NO: 260210 - DNA, 276 bp, Klebsiella pneumoniae; identical to SEQ ID NO: 94066

SEQ ID NO: 260211 - DNA, 177 bp, Klebsiella pneumoniae
atgggcacaccacatttacacctgaatttaaggaagaagccgtccgccagacaacgaaacgcggttattctgttgccgaagcacctaaccgtctgggcgtttccgcacatagtctctattagtggttacgggctatttaacccgataacagcgaacagcatgcccgggatttactga

SEQ ID NO: 260212 - DNA, 141 bp, Klebsiella pneumoniae
atggaaattgatctcgacaacctggtcttcagcggcctggatgaagcggaagagcgcaacgcggagcgtctggaagaagcggacaaaaaagcccaggcgatcgttgccgacgacgactgcggcgacgcctgtaaaatctga

SEQ ID NO: 260213 - DNA, 891 bp, Klebsiella pneumoniae
atgagaatgagtgtcaaacagttacgcgcgtttttagcggtagctcacactctgaatttcgcccacgccagcgaaaggctgaatctgtcgcagccagctctcagcctgaccatcaaagggttggaggaggcgctgggcggcgcgctgctgcagcgcagcacccgcaaagtgacccttacccaggagggggaactctttctgccgatggcccgtcagctgctggccgactgggataacgtcgaggaggccatgcgtcagagctttaccctgcagcggggtaaaatttcggtcgccgcgatgccgtcgtttgccgccaacgttctgccggaggcgctgaaagcctttcgcgaccgctatgccggggtgaacgttacggtgcatgacgtgattaatgagcaggtgatcgagatggtgcgcgaggggcgggtggagatgggcatcgctttcgagccatcgcccaaccacaacctgctgtttaccccgctggcggtggaccgcttcgtggcgatcgttccccaacaatccccgctggcgaagaaaaagcagctcacctggcaggagctgttgaccctcgactttattaccctgcagcgcccctcggcggtacgcctgatgctggaggaggcgctggcgcgcagcggacgtcagctggacgtggcgctggagagtcatcagctggtgacggtggggaggatggtggccagcggcctggggggcagcgcggtgccggcgctgtgtaaaacgcagatggcatcgttgggcgccgtctgcatcccgctcagcgatccgccgattgagaagtgcgtcggcgcgatccatgccggacatctgccgctgtcgaaggcggcgcaggcgctgctggatacgctgaaagggtttttacccacctga

SEQ ID NO: 260214 - DNA, 708 bp, Klebsiella pneumoniae
atggcaggactggataaacgcgtcgccagttacgaagcggcgctggaagggttaacggacggcatgacgctgctcgccggcggcttcggcctgtgcggcattcccgagaacttgatcgccgaggtgcagcgtcgccaggtgcaggggctgacggtggtctccaacaactgcggggtcgacggtttcggtctcggcatgctgctggagtcgcgccaggtcagcaaggtggtggcctcttacgtcggggaaaacgcgctgtttgaacagctggtgctgagcggcgagctggcggtagaactcaccccgcagggaacgctggcggaaaaaatccgcgccggcggcgctggcatccccggcttttacaccgccaccgggtatggcaccccggtcgccgaaggcaaagaggtgcgccagttcgacggccgacactacatccttgaagaggcgatccgcggcgatttcgcgctggtcaaaggctggaaagccgactggtacggcaacgtggtctatcgccacaccgcgcagaatttcaacccgctgatggccaccgccgggcgcattacggtggtggaggtggaagagattgtgccgccgggcgaactgcccccctccgccatccatactccggggatctatgtcgaccggctgatcgtcgggcaattcgaaaaacgtattgaacagcgcaccctgcgcgccggagggcactga

SEQ ID NO: 260215 - DNA, 657 bp, Klebsiella pneumoniae
atgctgacccgtgaacaaatggcgatgcgcgtcgcccaggagctgcgcgacggcgactacgtcaacctcgggatcggtatcccgacgctggtggccaactacattcccgccggcattgaagtgatgctccagtcggagaacggcctgctggggatgggcgaatttcccgatgaggaaaccatcgacgccgacatgattaacgccggtaaacaaaccgtcaccgcgcaaaccggggcggcgatcttcgattccgcccagtcgttcgccatgatccgcggcggccacgtcgacctgaccgttcttggcgcctttgaggtcgacgtcgcgggcaacatcgcctcatggatgatccctggaaaaatggtcaaggggatgggcggcgccatggacctggtagccggcgcgcagaacatcatcgtggtgatgacccacgcctcaaaaaacggcgaatccaaactgctgccgcagtgcaccctgccgctcaccggcgtgggctgtattcgccgggtactcaccgatctggccctgctggagattgtcgacggcgcgtttgtcctgcgcgaagtggccccgggggtcagccccgacgaggtgatacgtaaaacggcgggacggctgatcgtcgctgacgacgtgcgcgaaatgcgcttcagttaa

SEQ ID NO: 260216 - DNA, 1182 bp, Klebsiella pneumoniae
atgaccgatattgccattgttgctgcagtacgcaccccggtaggcagctttcgcggcgccttcgcccctctttccgccgtcgacctcggcgcagcggtggtgcgcggcctgcttgaacgctgccagctgcccgccgcagcggtcgacgaactaattttcggccaggtgcttaccgccggctgcgggcaaaacccggcgcgccagaccgcgctgcgggccggcctgccggtcgacactccggcggtcaccgtcaatctggtgtgcggctccggactgaaagcggttcagcaggcggtgcaggcgatccgctgcggcgacgccgggatcgttatcgccggcggccaggagagtatgagcaatgctccctatctgatgcatggcgcccgcgacggcctgcgtttcggccacgccagcctgcaggacagcatgatccaggacggcctgtgggacgcctttaacgactaccacatgggcattaccgccgagaacctcgccgacgccttcgacatcagccgcgagcgccaggacgccttcgccgccagctcccagcgcaaagcggcggctgctatcgccgccgggcgctttcgtgaggagatcgttccggtcagcgtcccgcagggcaaaaagccgccgcgattcgtgactgacgatgagcaaccgcgcccggagaccagcgagcagcagttggcccagctgcgcccggcgtttcgcccggctgacggcagcgtcaccgccgggaatgcctcgtcgctgaacgacggcgccgcggcggtcctgctgatgcgcgtcgataaagcgcgcgagcttgggctgccggtgctggcgcgcattgtcagctcagcggtcgccggggtcgacccatcggtgatgggcatcggcccggtgagcgcctgccgccaggcgctgcagcgcgccggctggacgctggacgaggtggaccttatcgaagccaacgaggcttttgccgtccaggcgctggccgtcggtcagctgcttgagtgggatagcgagaaggtcaacgtcaacggcggcgccatcgcccttggacatcccatcggcgcctccggctgccggatcctcgtcagcctggtgcatgagatgcagcgccggggcgccagcaaagggctggcaaccctgtgcgtcggcggcggccagggcatcgccatgactctacaacgttaa

SEQ ID NO: 260217 - DNA, 924 bp, Klebsiella pneumoniae
atgtttacaccacgcctggcggtactcggcgcgggactgatgggcgtcggtatcgcctgccatttcgcccgtcacggtcacgccgtccgcctgtatgacaccgacccgcagcgtctcgccgaggttccggcggtggccagcgccatcctgtgcgagctggaggccagcggtcagcaggatcccgccgaccgcgacgcggtgctggcccgtctgacccccaccccgacgctgaatgccctggccgatgccacgctgctgattgaagcgatccccgagcggctggcgctgaagcacgccctgtacgccgagctggaaacgctgatcgccgacgaggcgattatcgccagcaacaccagcggcctgccgccggatcggctggctcagggcatgcgcctcccggaacggctactgatcgctcatttctggcatccgccgcacctgatcccgctggtggaagtggtgcccgggagcgccacgctgcctcatctggcacgccaggtgagcgacttttgcgccgcctgcgcgctggaggcggtggtgctcaaccgcgccgcgccgggctttgtcggcaaccggctgcagttcgccctgctgcgcgaagcactgcatatcgtccacagcggcatcgcttccccggaggtggtggaccaggtgatgcgcgcctcgctgggccgccgctatgcgatggtcggcccgctggaggctgcggacatgaccggcctggcgacagtccaggatatctgccagcacctgctgccggagctggccagcggcacggagatgatgtcgctggtggcggagaaagtggcgcgaggcgacaccggcgcccgcagcgggcaaggcttttacctctgggacgaggcccggcaccagcgcatccagtcgcgccgggaacaccagctgcgcttcgccctgaaaccctag

SEQ ID NO: 260218 - DNA, 873 bp, Klebsiella pneumoniae
atggaacttcgttatcttcgctattttgtcgccgtcgccaggacgcggcacttcacccaggccgccaaggagctgggtatttcacagcctccgttaagtcagcaaattcagcggcttgagcgcgaagtggggaccccgctgtttcggcgtttaacccgcggggtggagctgacggaagcgggagagtctttctatgaggatgcccgccagatcctcgccatgagcgatgcggcgctggagaaggccaagggcattgcgcgcgggatgaacggcagcctgtcgctaggcattaccagttctgatgctttccatccgcaaatcttcacgctgctgcaccgttttcagctcgaccaccccggggtgaccctgcaccagatggaagacaatatggccaatctgatgaccgccctgagcgaggccgagctggatatcgccttcgtccgcctgccgtgcgagagcagtaaagcctttaatctgcggattatcgatgaggagccgatggttatcgcgctgccgcgcgataacccgctggcgacgcagccgaccctggccctggagaagctgcgcgacgtggcgccgatcctcttcccgcgggaggtggcccccgggctgtatgagctggtgtataacagttgcctgcgcgccgggatcgatatggagcgcgcctggcagtcgtcgcaaatttcgtcgtcgctgagcatggtcaatgctggcttcggcttcgcgctggttccgcagtcgatgacctgcatccagcagccgaacgtcagctatcacccgcttagcggggcgccgctgaagaccgatatcgccatcgcctggcggcgcttcgagcgctcgcgtacggtgaaacgctttctggcgatgttctga

SEQ ID NO: 260219 - DNA, 780 bp, Klebsiella pneumoniae
atgaatcattctgctgaatgcacctgcgaagagagtctatgcgaaaccctgcgggcgttttccgcgcagcatcccgagagcgtactctatcagacatcgctcatgagcgccctgctgagcggggtttacgaaggcagcaccaccatcgccgacctgctgaaacacggcgatttcggcctcggcacctttaatgagctggacggggagctgatcgccttcagcagtcaggtctatcagctgcgcgccgacggcagcgcgcgcaaagcccagccggagcagaaaacgccgttcgcggtgatgacctggttccagccgcagtaccggaaaacctttgaccatccggtgagccgccagcagctgcacgaggtgatcgaccagcaaatcccctctgacaacctgttctgcgccctgcgcatcgacggccatttccgccatgcccatacccgcaccgtgccgcgccagacgccgccgtaccgggcgatgaccgacgtcctcgacgatcagccggtgttccgctttaaccagcgcgaaggggtgctggtcggctttcggaccccgcagcatatgcaggggatcaacgtcgccgggtatcacgagcattttattaccgatgaccgcaaaggcggcggtcacctgctggattaccagctcgaccacggggtgctgaccttcggcgaaattcacaagctgatgatcgacctgcccgccgacagcgcgttcctgcaggctaatctgcatcccgataatctcgatgccgccatccgttccgtagaaagttaa

SEQ ID NO: 260220 - DNA, 1680 bp, Klebsiella pneumoniae
atggacaaacagtatccggtacgccagtgggcgcacggcgccgatctcgtcgtcagtcagctggaagctcagggggtacgccaggtgttcggcatccccggcgccaaaatcgacaaggtcttcgattcactgctggattcctccattcgcattattccggtacgccacgaagccaacgccgcatttatggccgccgccgtcggacgtattaccggcaaagcgggcgtggcgctggtcacctccggtccgggttgttctaacctgatcaccggcatggccaccgcgaacagcgaaggcgacccggtggtggccctgggcggcgcggtaaaacgcgccgataaagccaaacaggtccatcagagtatggatacggtggcgatgttcagcccggtaaccaaatacgccgtcgaggtgacggcgccggatgcgctggcggaagtggtctccaacgccttccgcgccgccgagcagggccggccgggcagctcgttcgttagcctgccgcaggatgtggtcgatggcccggtcagcggcaaagtgctgccggccagcggggccccgcagatgggcgccgcgccggatgatgccatcgaccaggtggcgaagcttatcgcccaggcgaagaacccgatcttcctgctcggcctgatggccagccagccggaaaacagcaaggcgctgcgccgtttgctggagaccagccatattccagtcaccagcacctatcaggccgccggagcggtgaatcaggataacttctctcgcttcgccggccgggttgggctgtttaacaaccaggccggggaccgtctgctgcagctcgccgacctggtgatctgcatcggctacagcccggtggaatacgaaccggcgatgtggaacagcggcaacgcgacgctggtgcacatcgacgtgctgcccgcctatgaagagcgcaactataccccggatgtcgagctggtgggcgatatcgccggcactctcaacaagctggcgcaaaatatcgatcatcggctggtgctctccccgcaggcggcggagatcctccgcgaccgccagcaccagcgcgagctgctggaccgccgcggcgcgcagctcaaccagtttgccctgcatcccctgcgcatcgttcgcgccatgcaggatatcgtcaacagcgacgtcacgttgaccgtggacatgggcagcttccatatctggattgcccgctacctgtacagcttccgcgcccgtcaggtgatgatctccaacggccagcagaccatgggcgtcgccctgccctgggccatcggcgcctggctggtcaatcctgagcgcaaagtggtctccgtctccggcgacggcggcttcctgcagtcgagcatggagctggagaccgccgtccgtctgaaagccaacgtactgcacctgatctgggtcgataacggctacaacatggtggccattcaggaagagaaaaaataccagcgcctgtccggcgtcgagttcgggccgatggattttaaagcctatgccgaatccttcggcgcgaaagggtttgccgtggaaagcgccgaggcgctggagccaaccctgcgcgcggcgatggacgtcgacggcccggcggtagtggccatcccggtagattatcgcgataacccgctgctgatgggccagctgcatctgagtcagattctgtaa

SEQ ID NO: 260221 - DNA, 771 bp, Klebsiella pneumoniae
atgaaaaaagtcgcacttgttaccggcgccggccaggggattggtaaagctatcgcccttcgtctggtgaaggatggatttgccgtggccattgccgattataacgacaccaccgccaaagcggtcgcctccgaaatcaaccaggccggcggccgcgccatggcggtgaaagtggatgtctccgaccgcgatcaggtgtttgccgccgtcgaacaggcgcgcaaaacgctgggcggcttcgacgtcatcgtcaacaacgccggcgtggcgccgtccacgccgatcgagtccattaccccggagattgtcgataaagtctacaacatcaacgttaaaggggtgatctggggcattcaggcggcggtcgaggcctttaagaaagagggtcacggcgggaaaatcatcaacgcctgttcccaggccggccacgtcggcaacccggagctggcggtatatagctcgagtaaattcgccgtacgcggcttaacccagaccgccgctcgcgacctcgcgccgctgggcatcacagtcaacggctactgcccggggattgtcaaaacgccaatgtgggccgaaattgaccgccaggtgtccgaagccgccggtaaaccgctgggttacggtaccgccgagttcgccaaacgcatcaccctcggccgcctgtccgagccggaagatgtcgccgcctgcgtctcctatcttgccagcccggattctgattatatgaccggtcagtcattgctgatcgacggcgggatggtgtttaactaa

SEQ ID NO: 260222 - DNA, 198 bp, Klebsiella pneumoniae
atgaattcaaatactacaatcgccttacatttttcgcttgcattactatttacgttgctatcagtggctggtagcaaccatgatttagcaggagttgtatctcaattattccttattttcatggctgcattttttttctttagggcaatgagggcctttctgaacatcattaatgtgattgatagctgtaaaaggtga

SEQ ID NO: 260223 - DNA, 2700 bp, Klebsiella pneumoniae
atgacagcaaagctacccaaaatcagttatcccgtaccatcaaacaaaaatggtcatgccttttcctctgcggaagagttgttatcgacgctcggaggggaaagctcaggactgtatctggtgggaagtcagggaatgtggcatggcggtatccatattactgatgccactattccctggtgcgccctgagtactgacagcgaagctgagaatgaatattgtcgtgagctctataaaggggaacaatttattcgttgtatggcggatggtgagatagtggcctggcgcgtcagtaaggactatgagagtgctgcgattgaatggtgcggtgaaaaactgttcctttccacttcctttgtgctggtgaaacattatatccagccgggtgatatggaagagagcggactgacatttttcactctgtatatgaatctggcgccttatgctgcttatcaacaacagggaagtctgtctgacagaaaagtggcaggcgtccagcgctattataccagtgccgaagatgtgcaggcagagcacgaagccgggaaactggataaagacacgcttgtcacgctgagtgacgctattgtcacccgcagcagagacaggcgtcagtttactgaagtgaccattgtcagtgagacgaaaaatacagcaggagacacccttgtcgctggcactaaagtctggacggtgtctgaccggggttctctgaaaacgctggcatcagcgcccgttccgtcctggtgggcaaaatgtactccggcttacaccactcagccggaaggggtggtgaagtgcacctcacgtacagactgggcgtactatctgagccgggaagatgtgctgcactataaaaaggccggcaggctggcggcaggtttcccgctttcttacgaacctggtaatacggcgcagcaggtcatccgcccgggtaaagaacctgacaaggcggcaaggatattcagtctggtcacgctgggccgggataaggatacgctgaaaaagggcgaccgggtatgggtggtgtcggatggtgacagtctgacgccggttacagtggccgcatccggtaatgagcctgtttttaatgatgtatatgtaccttcggcgcctgtatctgtcagtgccggagacagcctcgggcatatgggtttttatcagctaccggaagaaaacggcaaacgctcgcgctaccaggtacatatagagtgcctgagcatggatgatatggagaagttcatcaccaatcccggaagagtgggggaagatgcgccggtgtatctgacctggaaagccgatgccccactatctgacaagagcgataccggaataacagcgggcagtcgtaaaacaaagatatcaggtgttctgacgctggcaaaagtccctggcgttgatgctgaggggaatacgctgtccggtaatcaggatgcggcatattatcagatacgtcctgaaggtggctggctggccgcagccagtgttaagaaagtttcgcagtatgcgttaggtgagctcgggtttgtcacgctgaataaggcgccggagagttttgacctgattgatgggataaaacaaccgaacaacgtggtgaaggggattctggaacagttgtataaagcggcacaggatgaaacgcgcaccactcacgcgctgaacaagtataactataaacggctgctggaattgatagacagtaaccaggacgggtattaccaggagcaggagtatcttcaggcggtacataatatctcttaccgcgaccgcttataccgtgtaattgcgaaacacgccagtgaatggtactacggcaaggatgccccgctctggaagacatacctcgatacgttaaccagggatgcgccattgtggaagacgtatctggaaacgtttctggataagatgacgtggatgaagacggtatccgaaaagggcgttgcgctggggtcggagccgtggcatatgcatcctatagtatttttaaattctataaaaaaagggaaatccaaaattacacgagagatgctcaggagaatttggtctgacccaggaaatgtttctgactctgttcttgatgttgttgcagaagaatttacgaataaatttgaagtttgtaatattaatactaaaaatagactgtatcacttttttgctcaaatatatcaagaagtaggccccactttcaatttgaatgaggggtttaattataggccacaagtacttataaataagtttgcatattatcgtaatcatcctcaagatgctcaaacggatggatatattccgggaagacaagtagcaaataaacagaatattgcgaacagagcatatggtggtcgagaggggaatgataatattgcaagtggagatggatggcgatatcgtggaagaggaatgaaacagttaacatttaagaataactatagatcttttacaaattatcacgaaagagtttggggagaacgtgttgattttgaatccaccccagatctcctagttgaaacggtttatgcggcaagatctgctttgtacttttgggatcagaataatttatttagtagcgctgataatggcattagtagagctgtatcagactcaataacgcgaattgttaatctctatgataatcactatgaagatagacataataatttaataagatttctacaagagggcatttttgatgaaatattctaa

SEQ ID NO: 260224 - DNA, 753 bp, Klebsiella pneumoniae
atgcggcgaaacagtggcaggagactgaatctgaaaccagccctccgccgccgatcggagatccagtaccagaaaagcctactggcgatagtcgaccagataaaccaaatcgtcacgggctcctacgatggttcacaggcaagcgctgacagcattgctaaatcgcttgttgactactccggggtgatcgacgactgggccgaaatggtcggtcgaaagatgtttgcccaggtagaacgtgaagagtggaatcagtggcgttctgtttcggaagaaatatccgctggtctgcgtgacgtgattagtaacactcctgtcggcatggtggcgcaagacatcgtttaccgacagattcgctacatgaagtctctgccattagaggcggccggacgtgtcagggaaattcaggagcgtgcgatacaggctgtcatccatggtgagcgccccgatcagctttacgagatgatcatgcaatccggtgacgtggcggccagcagggcgcggatgatagcccgcacagagatagggcgcgccactaccgcattaactcaggctcgggcactgtcagttggttctgaggggtactggtggcgcatcaagggggctggtaccaggacatcgcaccgaggaatgaaagataagtttgtacgctgggatagcccgccaacgctcgatggcatgaccggacacgccgggtgcctgcctaactgcaagtgttggtcggaagtgcaaatacctgaccctgtaaaataa

SEQ ID NO: 260225 - DNA, 1530 bp, Klebsiella pneumoniae
atgatgaaagccttcttcggcgacaaagccaccgcggaaaacagctggggctatgactggctgccgaagtgggataagagctacgacgttctgcagtacttcgagatgatgaatcagggcaaagtgaatggctatatttgccagggctttaacccggtcgcctcgttcccgaacaaaaacaaggtcgtcgcttccctgtcgaagctgaagttcctcgtgactatcgacccgctcaataccgaaacgtccaccttctggcaaaaccatggtgagtcgaacgatgtcgatccggcgaaaatccagaccgaagtgttccgtctgccctccacctgcttcgccgaagagaatgggtctatcgtcaactccggccgctggctgcagtggcactggaaaggcgcggacgccccggggatcgccgtcaccgatggtgaaattctcgccggtatcttcactcgcctgcgtaagatgtatgccgaagagggtggcccggcgccggagccggtgctcaacatgacgtggaactactccacgccacacgagccggcatcggaagaagtggcgatggaaagcaacggtaaagcgctggcggatatcaccgacccggcaaccggcgcggtgatcgtcaagaaaggccaacagctgagctcctttgcgcagctgcgagatgatggcaccacctccagcggctgctggatcttcgccgggagctggacgccggaaggtaaccagatggcgcgccgcgataacgccgatccatccggtctcggcaataccctgggctgggcctgggcctggccgctcaaccgccgcatcctgtataaccgcgcctccgcggacccgcagggtaaaccgtgggatccgaagcgtcagttgctgaaatgggacggcgccaaatggggcggcgtggatattccggactacagcgccgccgcgcctggcagcgacgtcggtccgtttatcatgcagccggaagggatgggccgtctgttcgctatcgacaagatggcggaaggaccgttcccggaacactacgagccgtttgaaacgccgctcggaaccaacccgctgcacccgaacgtggtctctaacccggccgctcgcgtcttcaaaggcgatctcgagcagatgggtaaggccgagaagttcccgtacgtcggcaccacttaccgtctgaccgagcacttccactactggaccaagcatgcgctacttaacgccatcgcccagccggaacagttcgtggagatcggggaaaaactggcgaataagctcggcatcggccacggcgataccgtgaaagtttcctccaaccgcggctatatcaaagccaaggcggtggtgaccaaacgtattcgcacgctgaaagttgacggtaaggatatcgataccatcggcattcctattcactggggctatgagggcgtggcgaaaaaaggctttattgccaataccctgacgccgttcgtcggtgatgcgaatacgcagacgccggagttcaaagctttccttgtgaacgtggaaaaggtgtaa

SEQ ID NO: 260226 - DNA, 903 bp, Klebsiella pneumoniae
atggcttaccaatcgcaagatattattcgtcgttccgcgactaacggtttcacccccgcgcctcaggcgcgggaccaccagcaggaggtggcgaagcttatcgacgtcaccacctgtatcggctgtaaagcctgtcaggtggcctgctccgaatggaacgatattcgtgatgaagtcggtcacaatgtcggggtgtatgacaacccggcggacctgaccgccaagtcatggacggtcatgcgcttctcggaggtggaacaaaacgacaagctggaatggctcatccgcaaggatggctgcatgcactgcgcggacccgggctgcctgaaggcctgcccgtcagaaggcgcgatcattcagtacgccaacggcattgtcgacttccagtccgagcagtgcatcggctgcggctactgtatcgccggctgtccgttcgatgtaccgcgtctgaacccggaagacaaccgcgtctacaaatgtaccctgtgcgtagaccgcgtgaccgtcggccaggagcctgcctgcgtgaaaacctgtccgaccggcgcaatccactttggctccaaagaggatatgaaaacgctggccggcgaacgcgtggctgagctgaaaacccgcggttatgacaatgcgggcctgtacgatccggccggcgtcggtggcacccacgtcatgtacgtgctgcaccatgccgacaagccgaatctgtaccacggcctgccggaaaacccggagatcagccagaccgtcaagttctggaaaggcatctggaaaccgctggcggccgtcggcttcgccgcgaccttcgcagccagtatcttccactacgtcggcgtcggtccgaaccgcgcggaagaggaagaggacaatctgcatgaagagaaagacgaggtgcgcaaatga

SEQ ID NO: 260227 - DNA, 636 bp, Klebsiella pneumoniae; identical to SEQ ID NO: 213097

SEQ ID NO: 260228 - DNA, 930 bp, Klebsiella pneumoniae
atgagtattcgcataatcccgcaagacgagctgggttcgagcgagaaacgcacggcggaagcaattccgccgttactgttccccaggctgaaaaatctgtataaccgccgcgctgaacgcttgcgcgagctggccgctaataacccgctaggcgattacctgcgctttgccgcgctgattgcccatgcccaggaagtagtgctgtacgaccatccgctgcagatggatctcaccgcccgcattaaagcggccagcgaacagggcaagccgccgctggatatccacgtcctgccgcgcgacaagcactggcacaagctgttgcactcgctgattgccgagctgaagccggaaatgagcggcccggcgctggcggtcattgagaatctggaaaaagcctctgagcaggagctggagcagatggccagcgcgctgtttgtttccgatttcgcctccgtcagtagcgacaaagcgccgttcatctgggctgcgctgtcgctctactgggcgcagatggccagtctgatcccaggaaaagcgcgcgccgaatacggcgaacagcgccagttctgcccggtgtgcggctcgatgccggtctccagcatcgtgcaaatcggcaccactcaggggctgcgctatctgcactgcaacctgtgcgaaactgagtggcacgtagtacgcgtcaagtgcagcaactgcgagcagagccgcgacctgcactactggtcgctggacaacgagcaggcggcggtgaaagccgaaagctgcggcgactgcggaacctacctgaagattatgtatcaggagaaggatccgaaagtcgaagccgtcgccgacgatttggcctccctggtgctcgacgcccgcatggaacaggagggcttcgccaggagctcaattaacccgttcatgttccccggcgaaggggagtaa

SEQ ID NO: 260229 - DNA, 384 bp, Klebsiella pneumoniae; identical to SEQ ID NO: 138968

SEQ ID NO: 260230 - DNA, 249 bp, Klebsiella pneumoniae; identical to SEQ ID NO: 138969

SEQ ID NO: 260231 - DNA, 918 bp, Klebsiella pneumoniae
atggcgctggaaaaagggattgcttcgctggttgaggcatttattgcggcaggtcgtccgtcatcacgcgatcagcatattgatgatcggagggccggctatatcgccagtgcggtactcgccggggagacggaaacgcgagtgcgggtggaggatatcaccctggagggtatgcacttccgcgtcgtttcaccgcccacagccgacggcctgctacccacgcttatctactaccacggcggctgttttgtcagcggcggctttaccacccacgataaccaactccgtcagttagccatgttcagcggttgccgggtgatcgctgtacagtaccgcctggcgccggagcatacctttccggcggcgcacgatgacgcagaacaaggtgtcatgattatccaccggcacgcggagcagcttggcgttgacgcatcacgtatcaccctggctggcgacagcgccggcgggcacctcgctctggtcacggccctgcgcctgaaagcggcgggagcatggcaacctgcacagcttatcctgatttacccgatgctcgacgctaccgccagcatggcaagctacgccagcaacggcgaggattacatcattacccgggacacgctgcttagcggctacgaaatgtatttagcggccacacccgctacccatccggatgcctgcccgctctggcgcgaagattttcacggtctgccaccggtccacatcctgacggcggagttcgatcctttacgtgatgagggcgaagtgctgtaccgaaggctgacggagcaaggggtggagagttcctgtcagcgctatctgggggtgatccacggcttctttcagctgggaggcgtcagccacgcagcgcgtgatgccatgcgggatatcgcctggcgtgtggcatcgccaggacgataa

SEQ ID NO: 260232 - DNA, 276 bp, Klebsiella pneumoniae
atgctgcgcgagcggcacctgggaggcaccattattctggcggatgcgcatatccgctacagccagcctattagcggccgccccagcgccatcgccgacctcggttctctgagcggcgatctcgaccgactggcgcgcgggcgtaaagcccgcgtgcaaatgcaggtggagctttttggcgacgataaacagggcgccgttttcgaggggatctacatcgtgctgccggcgaagccctttggctcgtacgaagagggcggcaacgaggaagagtaa

SEQ ID NO: 260233 - DNA, 666 bp, Klebsiella pneumoniae; identical to SEQ ID NO: 94326

SEQ ID NO: 260234 - DNA, 240 bp, Klebsiella pneumoniae; identical to SEQ ID NO: 94327

SEQ ID NO: 260235 - DNA, 1440 bp, Klebsiella pneumoniae
atgattaaaattacgctacctgacgggcattattatgacgagatgctgaccgcgcagggtgaacagcggccgcactataatgcctggtggcaatggtttcgcaacaccgatcaattctctatccggcagaaaaaagcgcaagcggaactgctttttcaccgtatcggcatcacctttaacgtgtacggcgaggatgagggaaccgagcggctgatcccgtttgacagcgtgccgcggatcatacccgccggggagtggcagcgcattgaccgcggcatacgccagcgggtgaaagcgctgaacgccttcctctatgacatctatcatgagcagaatatcctgcgcgcggggctgatcccggccgagcaggtgctggccaacgagcagtatcagccgtgcatgcagggcatcaacctgccaaacaacacctatgcccatatcaccggcgtcgatatggtgcgcaataacgacggtcagtactacgtgctggaggataatctgcgcacgccgtccggcgtctcctacatgctcgaaaaccgtaagatgatgatgcgcctctatccggagatgttcgagcagcatcacattgcgccggtggagcgctacccgagctacctcctgcagaccctgcgcgaaagctcgctggtggatgatccctgcgtcgtggtgatgaccccgggtcgcttcaacagcgcctacttcgagcacagcttcctggcgcagcagatgggggtcgagctggtggagagcgccgatctgtttattaaaaacggcgcggtgtatatgcgcaccaccgaggggccgcggcgggtggatgtgatttatcgccgcatcgacgacgcctggctcgacccgctggccttccgcgccgattcgatgctcggcgtcccggggctgctgtccgtctatcgcgccggcggcgtagtgctggccaacgccatcggcaccggggtggctgacgacaaatcgatctatccgtacgtcccggagatgatccgcttttacctcggcgaacagccgatcctcagcaatatacccacctggcagtgccggaaagcggaggacctgcgctacgtgctgagcaatctcgagctgatggtggtcaaggaggtccatggcgccgggggctacggcatgctggtcggcccgcgttcgactaaagaggagcgagaggccttccgccagcgcctgctggccaatccggccaactatatcgcccaggacacccttgcgctgtcgacctgccccaccttcgttgatgaaggtctgtcgccgcgacatatcgatttacgcccctacgtgctgtccgggcaggagatgcggctggtgcccggcggcctgacccgcgtggccctcaccgaagggtcgctggtggtcaactcgtcgcagggcggcggaaccaaggatacctgggtgatggaggatgacgcatcatgctaa

SEQ ID NO: 260236 - DNA, 930 bp, Klebsiella pneumoniae
atgctaagtcgtacggcgagtgaactgttctggatggcccgctatctcgagcgggcggagagctacgcccgggtgctggacgtgacctggaaattatcgatgatcccccgccacagccagcagtcgcgggatctggcgctgccgctgaatttgtcgatgacccacgagttgtttcaggcgcgccatgcccgctttaccatgagcaatctgctcaacttttttgcccttgatggcaacaacccctgcagtatttacagctgcgtggagatggcgtggaacaatgcgcacgccgtgcgcggcagtctgtcggccgaagtgtgggagagcatcaatgccacccgcattgagctgcgaagcctgcgccagcaggggctgggcgagctggggagcgacggcttttttgagtgggtgaaagagcgggtgcatctgtttcgcggggcagtgatcggcacgctgctgcgcaacgacgcgctgagctttatcggtatcggcaccctgattgagcgcgccttcgccaccacccagttgctgctgattaaggatcaacagctgaccaacgatccggatccggtgcgggaatactaccgactggataccctgctcaatgcggtcagcgcccgcgaagcctacaacagcctctaccgccagccggtcagtcgcgaaacggtgatggagctgctgatcctgcggaacgatattccgcgttcgctgcgcgccagcattgccgacctggtgggcgaactggagaagatcgccaacgatcgctcctatcaaccgttgcgcctcgcccatcagctcaacgttgacctgcgcttcagcacccgtgacgacctggcgcaggcggacctgcagaccacccttaacgggctgctggcgagaattaacgcgctgtccgacagcatcagacaaacctacctggaggccttatga

SEQ ID NO: 260237 - DNA, 816 bp, Klebsiella pneumoniae; identical to SEQ ID NO: 211426

SEQ ID NO: 260238 - DNA, 747 bp, Klebsiella pneumoniae; identical to SEQ ID NO: 138716

SEQ ID NO: 260239 - DNA, 339 bp, Klebsiella pneumoniae; identical to SEQ ID NO: 94229

SEQ ID NO: 260240 - DNA, 918 bp, Klebsiella pneumoniae
atgaaaatatctctggtcgttcccgtccttaatgaagaggacacgatccctcttttttataaagaagtgcggtcgaaacttgagaactgggaaacggaaattgtttttgtgaacgacggcagcagtgatgctaccgaaaatatcatcagcgccctgagtctctccgatccgttagtcaaattgctgtcttttacccggaattttggtaaagagccggctctgtttgccggtctggagcatgccacaggcgacgttgtcattcctatcgatgttgatctgcaagatcccatagaggtgatcccgctgatgctgcagaagtaccagcaaggcgcggaaattgtgttggcgaagcgaatcgatcgccatacggacggctatttaaaacgtaagacggcggaatggttctatcgcttacataataaaattagctcacccaaaattgaagagaatgtcggggatttccgcctgatgtcgcgttcagttgtggataatatcctgcgcttacaggaaagaaacctcttcatgaaaggtgtgttatcctgggtcggtggttcggttgatatcgttgagtacgcgcgtgcggagcgcattgccggcaaaactaaattcaacggctggaagctgtggaatcttgcactggaagggattacctctttttcaacgtttcctttgcgggtgtggacgtatattggtgttattgtcgccggactgtcgtttctgtacggtgtttttatgatagtcgacacgctgatttttggtaatcgggttagtggctatccctctatcatggtatccatactgtttctgggcggtatccagctcatcgggattggcgtattaggcgagtatattggcagaatatatttagaaacgaaaaaccgaccgagatatttattgaaggataaggaaagaaaatga

SEQ ID NO: 260241 - DNA, 642 bp, Klebsiella pneumoniae
atggcgaagctgattattcagttgattaataccgtcgcccggaaaattaaccgcgacccgcaggtcgccggacagcttaaagtggtttttctcgaagattacaaagtctcgctggcggaaaaaatcattccggccacagacctctccgagcaaatttccaccgccgggaccgaggcgtccggcaccagcaatatgaagtttgccatgaacggcgcgttaaccatcggcacctatgatggggcgaatatcgaaattcgcgaggccgtggggatcgataatttttatctgtttggcgccgtggcggaagagattgaagagagccggcgccttgggcatcaccataatttctatcatcagaacccggctatggcgcgtgttgtcgataccctcgtgtctgggttgttcaccagcgatcgtgagctgtttgcaccccttcaccacatgttgactgagggcgatcattactgtcatttactggatttcgacagctattgccaggcgcagcagcaggcgatgatcgattttgaacagccggaacaatggcaccgtcgggccttactcaatatttgccggatgggcgaattttccagcgacagaaccatacgtggctacgcccgggatatttggggtatcaccagctaa

SEQ ID NO: 260242 - DNA, 654 bp, Klebsiella pneumoniae
atgaattctgtgctcccaatttgcgaaaatactgatatcaataacgaacatttaaaaactttttgcaggcagataaatgccaatgctactccacttttagtccctgtaatccctacgcctcttccttttgcgaactgctactggaatgttgaagccgtagttggaaagttcggtggacgattttgtctcgggtgggatatcagcagttggccagggagccatctttcagcggtacatcacgcagtctacttggacgcacacggaaatcttcacgacgtgacagaaaggcagcaaggttcatcagatatgaataacaccattttcttacctgacactaccttttccataaatctcaattcagttccagctataagtatgaaattttttgtaataaaagaaagcaatgaggtcaataattacatttccgcttatcaaagatttaataaaactgaaaaagaaatcagtaaatttatatatgaccttggatttagatgcgagtctaaccgagccatagccatggggcagccaatcccatacacaacaatccccggagataaggtggctgtttaccaggatatagacgctagaatgaataaagcaaaacagaaaataaccgaaacaatcatttcccttagggggttaacggaaaattaa

SEQ ID NO: 260243 - DNA, 786 bp, Klebsiella pneumoniae
atgaataacctggttccagttggatctccgccatctcccggaacattgctcccggtggccatcgattaccctgccgccctcgccctgcgccagatggcgctcgtgcaggatgaactgccgaaatacctgctggcgccggaagtcagcgccctgctccattacgtgccggatcttcaccgcaagatgctgctggcgacgctgtggaacaccggcgcgcgcattaatgaagcgctcgcgctgacccggggggatttttcgctggcgccgccgtatccgttcgtgcagctggccacgctcaagcagcgcaccgagaaagccgccagaacggctggccgagttcccgccggtagccaggctcatcgcctggttccgctttccgatcaccactacgtcagccagctgcagatgatggtggccaccctgaaaattccgatggaaagacgaaacaaacgcaccggcagaatggagaaggcgcgtatctgggagatcacagaccgtaccgtccgcacctggcttagcgaagcggtggaggccgcagcggccgacggggtgacgttctcagtaccggtgaccccccatacgttccgtcactcctacgcgatgcacatgctgtatgccggcataccactgaaggttttgcagagcctgatgggccacaaatcgattagctcgacggaggtctatacgaaggtgtttgcgctcgatgtcgcggcgcgccatcgtgtgcagttccagatgcctggcgatgaggcggtggcgctgcttaaaggacggtgttgtgattaa

SEQ ID NO: 260244 - DNA, 2013 bp, Klebsiella pneumoniae
atgtacaatggtacacctactgaagtagaagaaaaactcagatcatgtcaagtggaaagtattagtgtagctgcaaaatattttagatcacgctcatctggatcatgtcttataagcttgccgacaggtgcagggaaaagtggtgttatatgttgcctaagtcaattcagtaaatataaaaacatattaattgttacatatcgaagagctgtttgtgatcagttgtataaacagattagaggtgatttttttactaaactaaccgattctggtaaatctaaatcacttacaattaaagatgtgcataatgacatcaataaagaaagtaacagtgggatattttgcactaccttccaaaaattgctaaaaatcaacagtgatgagatcaataaaatctgtgatgaatttgagttgatcattattgatgaaggtcattccgaaccatcgccagaatggggagggcttattcgtaagtttaaagcaaaaaaaataatagtgactgccacaccataccgaaacgacttatttagttttgatattgatacagatcactcatatatatatacatacaaaaatgccatagacgaaggcataatatcagcacctgtttttgcaaaagcaaaaaaggaagatttagtcagtgtagtaagggattacttaaacaaaaatagtgatacattgtgtattgtcaagtgtgataattttaaaaacatatgcgaatattataatctttttaaagatgaatttaaaacgcttgcgattcataggcaatttgagacttcaccactggatgagaatttatataatgtaccaagcaatttatctgaaagcccttataaaatactaattcatcaacgtatgttagatgaaggtatcgatcttccgaatgcaaaactactaatattaacctatagtgttcggagtggtaaggaattagtacaaacaatggggcgtgttgtaaggtggtacaaagacaaaagcccactagttatagactacaatgagtgcaccaacgttgatttatgggagaactaccaagaatttgataattacttgacggataaaacatctttaaggaaattcattaatactttaaatacagcatctttagttgaaaagtatttagacgcatttccggaaattagttattttgacgcgacatataaaaagaaatttgacttcaaaacattcaacccttctacatccttaaaaatacctctcgcgtcagtatgtttttattacaaagataagggctttaatctaattgattgtttagataaaatatattgggaatttacaagagaagggtctttatcaaaaattgatagtgactctggcatcattacatcagtttgttttgacagttccaaatttcttaaggatacgttattctttcaaccatcacttgagtttgtaattatacgtgaagtaggtgatattgttgcgatttatgatagtcgcggtagaaaatacaataaaagaattgaattaggtatcagacagccagttggcccggataagctatttaagctaatttcgctaaatgaaaaatctaaaacaacgcaagctagcacaagggctatacagattaattcacagcaagcagaaagtattctttatgtgtctgataggttagagtcaacgacttcaactcaagccaatggaagctatgcagtatcaactacaataggttctaatcttcatgatgatctttcgattatgtcctcatattatttaggcgtaggatccggccgtgttagtgatcaaaaagaaagacaatttagttttgaaaggttttgtgaatggattaatgatgtaaaaaccaatttagaaggtgctaacaaagtatctagttcatttcttaattcatttgctcaaactgttgatggtatacctactgaaaaaccagttgcttgtattattgatctaagcagctataacggttttttgaaagtgtattgtaatggcaagcacaaaaaaataacatcaaacttgacctgcccccaggattag

SEQ ID NO: 260245 - DNA, 375 bp, Klebsiella pneumoniae
atggatgtcgctgatagtgacaatcacccggatcgccgctacgcgcgcctgatagatcagtaccggccgtttattgaccatcattctggccgggagcagcagcagaggttcgtcaggcaaagactcagggctgagcgtcaggacccgattgccgggcagggacgagcaccacacctggccatcttttatcagcagaatggtacgcaggtgcggctgcagggcggcttccgttccgagctgaaattgaccctggccggagcaaccactgcggctaacgttcagcgccgtggccgtcgcttcacgagcctcatccagaatggctgcgatctttttcgccgcctgacgggcggcggcgacatgggtggcctggtctga

SEQ ID NO: 260246 - DNA, 1653 bp, Klebsiella pneumoniae
atgacattacacaaaaaaaatcacatcacccgaacactcctggctgtcagtatgctggctatgagcggcggggcgctggcggcgcaggtgccgccgggcacccagctggcggaaaagcaggagctggtcagaaataacggcagtgaaccggcgtcactcgatccgcataaagtcgagagcgatgttgaattcaatatcattagcgatctctttgaagggctggttaacgtgtcgccagcgggggcgatccagccgcgactggcggaacgctgggaaaacaaagacaacctgttatggacctttcatttacgccccggtctgacctggtctgacggcacggccattacagcgcaggatatcgtctggagctggcaacggctggtctcgccggcaacagcctccccctacgcgagctaccctggcaatatgcatatcgccaacgcccgcgagattgccctcgggcaaaagggacccgagacgttgggggtgaaagcgctgaacgacaccacgctgcaggtcactctgacccagccgaatgccgccttcctggcgatgctggcgcacccttcgctggtaccgatcgacaaagtgctggtggagcggtatgccgataaatggacccgaccagagcatatcgtcaccagcggcccgtataagctgtcccaatgggtggtgaatgagcggctggtggctgaacgtaatgcaaagtactgggataatgcgcataccgttattaataaagtgacttacctgccaatctcttcggaggccgctgatgtcaaccgctacaaagcaggggagattgatattgtctatacggtgccgatcaatcagtttgcgcagttgcagaaaaccatgggcgaccagctggacgtttcgccgcagctggcgacctattactacgaattcaatactacccggccgccgtttaacgacgcccgtgtgcgtcgcgcgctgaatatggcgcttgataaagatatcattgccggaaaagtgcttggccagggccagcgcccggcctggctgatcggtcagccggatatcggcggcgtgacgctgcataacccggactacgccagctggccgcgtgagaaacggattgccgaggcgaaaaaactgctggcgcaggcggggtatgatgaaagccatccgctggtctttaccctgctctataacacctctgagtcgcaccagcgtatcgccattgccgccagctctatgtggaagaaaaacctcggcgtcgaggcgaagctacagaaccaggagtggaagacgatgctggataccatgcatacgcataacttcgacgccgtccgctacgcgtggattgccgactacgacgatgccgccaccttcctcaatactttccgtaccggtgatagcgagaacaccagtcagtacagcaaccctgcttacgatgaggccctgcgcaatgcggcgaaagcctccgacgtggcgacccggggcaaatactatcagcaggcggaagatctgctggcgcaggatgttcccgccattccggtctatcactatgtacgtacccatctggtgaaaccttgggtagggggcttcacgccggataagctggggtattactacaccaaagacatgtacattaaaaaacacccatccgccagcggcgatgggcgttga

SEQ ID NO: 260247 - DNA, 267 bp, Klebsiella pneumoniae
atgagctttgaagctaaaaaggaacatgccattgccatcatggaaagcaagaaaatgtggcgtagtaactatgcgcctcctttgctacgcctcgcatggaaagctggcctcaagatcccaccgttgccttttgcctcgttctggcaaataaccttgctgatgggacagtggtatgcaaccgggcgttgtatttctcacaagcatagtcgcaggtatttgctttggtgttcttatggctgcgtatcattggtggcgaaaggtagttaa

SEQ ID NO: 260248 - DNA, 1371 bp, Klebsiella pneumoniae
atgggagccaatgaacaaattctttcaccagcagcagaaaaattagatcaatttgtggctttgggaagtggtggacagtatgccaactaccaagagcaggcacaaactgcgcccgatacatcaggtgtctcttcagccggagctattaccggtggcatggatagtcagcgaggtctgacatcttctaatctaggacaacaccaggaagccgctagagttcaacctagcacatcaattggtggcatatctgctcaaacactttcaggtaacaatgggcgccagtatgttgaagatgaagctggaaagggggcatcgcgtgttctttcctctggtgatagagacaagctcaattatattagagaaaatatgccggtaggctctccaaaagaaacatacgaaagtgcgaaacaagctggagacgctgctgatgccacaacaggcaaagcgcagtctctcgttctgggagatcctaaatcaagcgattacaaagctagtacacaacagactatgcaaagtttgcagtcagaagaaccccctaaaagcattgatacctttagatcatcaggtgacagaaccagcgatgctgaaagcgcgctggcccaggctgcactgcatgctgccaacgccaataatcaaataggaaccgcaagagagcagagtttagctgagagcaatgcctatagagaaaaatacaatcaaataaccggaagtaatctctccgaggctggagttgaacgcatagttcgacaagccgctgacggaaaaaataatggctttagtggtggtcttaaggatgtaattagtgctgaagttaatggtactggaacaacaggccgaccagttaccggatctgctgactcatcgcttggtaaggagttgcgtgaaaataacggggcaagcgaacatcccatggataaggcgtccgctgcgtttcaaaagacaggagacgctattcctggccatgaagtagcttcagatttagcacaacgtgttgcgggtattatccctggtgggaatgcactggttccagacattggttcgcaaagaaacgtgccgaatgcaatgggtatatcgaacaatagagctccgggctcacttatcagtaatatcagtaataacatacagttaagtcaggctgttgatagtgcttctgttaacgctggtataaatgatgagaaatttaccaggatgtctgatcaaaatcagatgcttaccgaatcagtacaaaaagcattagctaatgattcgcgatatgggcccgatgtagcggcagaatatcctaagtttatagcaagtttacctagtaacatcggtgtaaatgaagggactaaaatgactaaagattttttagataagcatagaaagaattag

SEQ ID NO: 260249 - DNA, 1338 bp, Klebsiella pneumoniae
atgttaaacagtattttagtaatactctgtctgatagccgtcagtgcgtttttttcgatatcggaaatttcactggccgcctcacgtaaaatcaaactgaaactgctggccgatgaaggcaacgtcaacgcacagcgggtgctgaagatgcaggagaacccgggcaccttctttaccgtcgtgcagattggcctcaacgccgtcgccattcttggcggtattgtgggcgacgcggctttctcaccggcgtttcatagcctgctcagcgggtatttgtcgccggagctctccgagcagctgagcttcatcatctcttttaccctggtcaccagcttgttcatcctgtttgctgacctgactccgaaacgcatcggtatgattgcgcccgaaactgtggccctgcgcatcatcaacccgatgcgcttctgcctgttagtcttccgcccgctggtgtggttgtttaacggcatggccaacatgatcttccgcatcttcaaactgccgatggtgcggaaagacgatatcacttccgatgatatctatgccgtggtcgaggccggcgcgctggccggggtgctgcgcaagcaggagcatgagctaattgagaacgtgttcgagctggagtcccgcaccgttccttcctccatgaccccgcgtgaaagcgtcatttggtttgatttgcacgaagacgagcagagcctgaagaataaagtggccgaacatccgcactcgaagttcctcgtctgtaatgaagatatcgaccacattatcggttacgtcgattcaaaagatctgctgaaccgcgtgctggcgaaccagagcctggtgctgaccggcggcgtacagatccgcaacacgttgatcgtgccggacaccctgaccctgtcggaagcgctggaaagcttcaaaaccgccggggaagacttcgcggtgatcatgaatgaatacgcgctggtggtcgggatcatcactctcaacgacgtaatgaccaccctgatgggcgacctcgtcggccaggggctggaagagcagatcgtcgcccgcgatgaaaactcgtggctgatcgatggcggtacgccgattgatgacgtgatgcgcgtgctggatatcgacgagttcccgcagtccgggaattacgagaccatcggcggctttatgatgtttatgctgcgtaaaatccccaaacgcaccgacgcggtgaagttctccggctataagtttgaggtcgtggatatcgataactaccgtatcgaccagctgctggtaacccgcatcgataacaagccaacggtgctggtgccgaagcaggcggaaacggcggaaagccagaacgcctga

SEQ ID NO: 260250 - DNA, 513 bp, Klebsiella pneumoniae; identical to SEQ ID NO: 252434

SEQ ID NO: 260251 - DNA, 585 bp, Klebsiella pneumoniae
atggtttctttaagtaaaaaccagacggtatcactcagcaaacaatccaccgatctcagccagcttcagttcggattaggttgggatcctgttaagaaaaagggattatttggcagcttttttggtggcaatgattccatagatctggatgcaggttgcgttcttctggatgtggcaggtaataaaattgacaccatctggttccgtaaactgaaatccagctgtggttctgtcgtccactccggcgataacctgacgggtgagggggatggcgatgatgaaatcattcacgtcaacctcttaaaattgccggcaaatgttgaatacctcgcttttactgtgaacagcttccgtggacagtccttcaacgacgtggataacgccttctgccgcgtcgtggatcagaccaataaggaacttgcccgctatcagctgacagaacaaggcccacataccggcatcattatcgcttccctgcgccgcaacaacggccactgggactttaccgcccacggtaaagcaagcggtggccgcacaatcgacgatatgcagcgcgatatcatcagtacggtggtaaaagcatga

SEQ ID NO: 260252 - DNA, 372 bp, Klebsiella pneumoniae
atggatctgactgcctgcgggggcacgacctgccgtcctggtcgctttctcggtacgctgcttgagcgtggccagctgcacgaacggatacggcggcgccagcgaaaaatccccccgggtcagcgcgagcgcttcattaatgcgcgcgccggtgttccacagcgtcgccagcagcatcttgcggtgaagatccggcacgtaatggagcagggcgctgacttccggcgccagcaggtatttcgggagttcatcctgtacgagcgccatctggcgcagggcgagggcggcagggtaatcgatggccaccgggagcaatgttccgggagatgccggagatccaactggaaccaggctattcataatttatgttaa

SEQ ID NO: 260253 - DNA, 255 bp, Klebsiella pneumoniae
atgtcgcagtggaatattgcctctttttcaaaagaggagcaggacaaagttgccgttgataaggtggccgctgctgtcgcctggcaggaaaggatgagcaagcccgtcgtgccggaacttgttgagcgggaacagcctgagcacctgcgcgagtatttccgtgaacggctccgcgtacatcggctgaacagtctgcagctgccgcgcgcaaatgcgcccgaatataataaaccgggcgaggatcagcagaattga

SEQ ID NO: 260254 - DNA, 192 bp, Klebsiella pneumoniae; identical to SEQ ID NO: 92451

SEQ ID NO: 260255 - DNA, 246 bp, Klebsiella pneumoniae
atgggacggattttatttgttagttcaggtggtgggcattgggtccagttgacacgaataattaaagaactaaaactggaaaggcatgaatttcatatcgcctctacttctgatggaattagatgtttagggaaggatgtaaaaactatacctgatttcaataaaagcaagccattcaaaatattgatgggtagtattactgtctcttatacacatctgacgctgccgacgatctactctgtgtag

SEQ ID NO: 260256 - DNA, 867 bp, Klebsiella pneumoniae
atggcctcaattagcatagtgcttcttagaatgcttctacgtcgtggtattgaatctcctgaacagctagaggaagtgggtattaatgtgtatgcaagtattcccgtatctgatactctgtcaaattataatcagaagaaaggtatacgaataagagcggataaactagaacataagtcatttcttgcaattgctaaccctgcagatatagcaatagagacaattagaggcctacgaactagtttacattttgcaatgatggaagctcgaaataatattttaatgatttcgggtgctagccctaatgcgggtaaaacattcgtaagtactaacttagcagctgtgatagcacaaaccggtaaaaaagttcttttcattgatacggatatgcgaaaagggtatgttcataagttatttaattctacgaatgagaatggcttgtcggatatattatcgggaggtattaatattaccgatgcaatcaagagaatgtctggtggtggatttgattatataactcgaggaacagtaccccctaatcctgctgaattattaatgcatccaagatttggtgaactccttaaatggggaggcgagaattacgatttggtcataattgacactcctccaattttagcagtcacggatgcagctataataggtaattactccggcactactttgttggttgctcgttttgaaaaaaatacaactaaagagattgagataagtataagacgattcgaacaaagtggtgtgaaggtaaaagggtgtattttgaatggagttgtaaaaaaatccagtagctattatggctacggttataaccactatggttatagctatgaaagctcctccgataaataa

SEQ ID NO: 260257 - DNA, 831 bp, Klebsiella pneumoniae
atgacagcaggtccttttgagaaacgtggaaatgtcactctggcgagcggcgagtatctgtaccgtgatgcggctattaacgatgcgtgtcgcttgttgctggattttggtcgcacctggccgggtgggaataaaacatctggctacgccagcaacgatgttgtgaaaaacttttgctatacggatgatgtggctaccgtcggcaacgcaatggattacgacggtggcggcattaagtcaactggtcattatctgggtcgtgtcctgctacctgatagcgctattttgcccgcgtcatgcacaaggcagttaatcaccctgacgttcaaaatccctgtgacgggatatgaccctcaaaataacgcccgacagtgcgcgttactttcagtgggtagtggtgcggcggatgcaacaaccctttctggaattctaggtaacagtaatgcctctggcgcactgaacaacatgcagtttcaggcatggggggcatcgtgggatggttcaggtggtgtggataccgctgtgaaggccgcgcttgggacggtaacgcaggtggcgatgtacgcctacaaagtcagttcgacgcaggttaagagccagctttttgttaatggctccccggtagttgaaaaagcgatagctaactcagcagcatatccgtctgcgtttacaaaaaaacaacttttcagcgggtcattcggtacagcggttacaggcggtacggtggcgacaatctatcgcgctgctatctatgacatgacgtcctctgatgttaatcctgcggatatcgttgctctggattattctcgcaatcattcgcgctttagctaa

SEQ ID NO: 260258 - DNA, 375 bp, Klebsiella pneumoniae
atgaggttgaggcgtaagtggatcgcctactttgatgtagctgctgatttccagatgcacgcgtaccgttgccccattcagcccacccgtgctgactgtcaccgtgtcgctgtctccattggtgtccgtccgcaacccaatctgcgtatgactctcgcgccatactgtctgttcaggggggtcagcgccagtcagggagaagccattgatgggcgtcccgatgacatcaatatgtcctgtccagtacgccccacggtagcggtctttgatacgtgcgccactcagacgtacacgaaactgtcgctgagaacggcccagttctgcgtgcaaatcccggtgccacacctctttttcaccgtcataaagcgttattga

SEQ ID NO: 260259 - DNA, 198 bp, Klebsiella pneumoniae
atgactgaactccagcagatgcagggcagaaacacggcggaaaccatcttaaaagttattaacttaccagcttatcagccctgggaggatgagagtaaacacggtataatggtgtcggcgcttgaggctttttgcctcatgatgtttgagtgttttgatgttgtgaggcagaaagaagaaagccccgtaggacgttaa

SEQ ID NO: 260260 - DNA, 453 bp, Klebsiella pneumoniae
atggactgctttactccacaagtactgatgccctatttacccgggccagaatactccgtggatatggtggtaagtcaagggacggtcctggccgctattgggcggcgtaaggttggtgtgcttcagtatctggagaatgaaggggaagcgattgaacttgccatcgactgcgcccgcctaatgaacgcagatggcatggtcaacgtacagacacgccataatgccgaaggaaagccgctattgctggaaattaacatgcggccttcaggaggtatcggttatacgcggcacagtggcgtgaatctgccgggtctctatgccttccatacacttggactgatggatgatgaacaggtccggcagtcagccaaaactgatttttcacctgcagtcgtccgctctgtcaccgatgttattccctatccggcatcattgaccaacagaatcgattaa

SEQ ID NO: 260261 - DNA, 396 bp, Klebsiella pneumoniae
gtggatatggtggtaagtcaaggcacggtcctggccgctatcgggcggcgtaaagaaggtgtgcttcagtatctggaaaatgaaggggaagcgattgaacttgccatcaactgcgcccgcctaatgaacgcagacggcatggtcaatgtacagacacgccataatgccgaaggcaaaccactattgctggaaattaacatgcggccatcaggtggtatcggttatacgcagcacagtggcgtgaatctgccgggtctgtatgccttccatacacttgggctgatggatgatgatcaggtcaggcagtcagcgaaaactgatttttcacctgcagtcgtccgctctgttaccgatgtcattctctatccggcatcattgaccaacaggattgattaa

SEQ ID NO: 260262 - DNA, 378 bp, Klebsiella pneumoniae; identical to SEQ ID NO: 94272

SEQ ID NO: 260263 - DNA, 141 bp, Klebsiella pneumoniae
atgtatagtgagttcataaagttaaaaatagtcctaagcatcattagcttatcaaatgcatttaaaaacaaatggttaattgaaagcaccccaatgtgcaatattttctaccagaataatttccattggccacaaaggtaa

SEQ ID NO: 260264 - DNA, 210 bp, Klebsiella pneumoniae
atggccgacggtattcgccacggactggggattggccgtttatttgaacctatcctgcaattacagcccgatcgtgagcagtttattcccgtgatggaggactactggaaaacctatccgccggtttatctctattactcaaaaaacgcaggcagaacgaaaagggtgaaagccctgattgatttcctgataatgcatgccgcggaataa

SEQ ID NO: 260265 - DNA, 141 bp, Klebsiella pneumoniae; identical to SEQ ID NO: 36145

SEQ ID NO: 260266 - DNA, 174 bp, Klebsiella pneumoniae
atggaaaacctcaatcaggcgagtgtccagattgccgcttttcagtcccgtgttcaggttcagcaggacgccttgcttgtggttgacagacaaatgagttacatgcgccagcaggtctctgcccgcatgatgacccgctaccagaataactatcattttggggggaatctgtaa

SEQ ID NO: 260267 - DNA, 567 bp, Klebsiella pneumoniae
atgaagccaaaactgacgcatgctctctttttaattccttttttgttgttggcaggatgctcctcctcaccgaaacaggcaaagaacacaaaatctcatgcggatatgaccattgacggcggatcggacgatctgatcccggtggtagcggccctgcatgatcagatgcacacctggcagggaaccccctatgaatggggcggtactgaacaaagcggcgtcgactgctcgggtttcgtctggcgcacgctgaaggatcgctttaacctgccgatggagcggatcaccacccgcgagctgctgcacatgggcgtgcgggtcaataagcgggatttacgtcccggcgatctggtgttcttccgcacccgggccgggatgcacgttggcttttacgataccgatcataatttccttcacgcctcgagcagccagggcgtgatgcgctcttcgctggacaacccttactgggaatcggcgttctatcaggcgcgtcgtctgccgaaggagtataacgcgcagatcaccatgaacagcgacaccctgcatctggcgaagaatcgccgctaa

SEQ ID NO: 260268 - DNA, 180 bp, Klebsiella pneumoniae
atgctaatttcagttctgagttttattgtcggcctcactggtgctggattgttatccgcaggtgcctggcttatttctccatcagtgggattgataacaggagggattatttgtctgggctggtcatatatgacaacccgggccttttcctccggcatcagcaatggcggaggtaaataa

SEQ ID NO: 260269 - DNA, 759 bp, Klebsiella pneumoniae
atgtcgactaaaccgtttgtttatcaggatccgtttccgctggcgcacgacgatacggaatactatctgctcagcaaagagcacgtctccgtcgccgaatttgacggccagcaggtcctgaaagtagagccgcaggcgctgaccctgctcgctcagcaggccttccacgacgccgcctttatgctgcgcgtctcccatcagcaacaggtcgcctcgattttgctcgacccggaagccagcgataacgataaatatgtcgccctgcagttcctgcgcaactcggaaattgccgccaagggcgtgctgccgacctgccaggataccggcaccgcgattatcatggggaaaaaaggccagcgcgtctggaccggcggcggcgatgaagccgccctggcgcagggggtgtacaacacctataccgaagataacctgcgctactcacagaacgcgccgctggatatgtataaagaggttaacaccggcaccaacctgccggcgcagatcgatctctacagcgtcgacggtgaagaatataagttcctgtgcatggcgaaaggcggcggttccgccaacaaaacctatctgtaccaggagaccaaggccctgatcaccccggcgaagctgaaaaactacctcgttgagaagatgcgcactctcggcaccgccgcctgcccgccgtaccacatcgcgtttgtgatcggcggcacctcagcggaagcgacgctgaagaccgtcaaactggcctcgacccgctattag

SEQ ID NO: 260270 - DNA, 219 bp, Klebsiella pneumoniae
atggttcctgaaacgtgcggtgaatcgtggttgtctgactggtttgcccggcaagcgctgatgcttaccgggccagaatacgcaaaatcattcgcgttgcaggaaggcggcgacacagcgactccccgggagcttacaaaagtaagtgaccggggggagccaggaagccaacgcccctgcagcgtgaaggatgaagcgtatttattcgtcttccagtaa

SEQ ID NO: 260271 - DNA, 249 bp, Klebsiella pneumoniae
atgccattcccgaaggttgtcggcgagggaggctggtttactggggtgacattgcccagtagacaggcaatcaatcatgacggcattgatagccgccttgccgtggccggaagcccaagccttcatcatcatgcgggtatcatcaagaggatcagggatgtacaggacgtggaaacccccaggaaagattcatcagttcagccagctcaccctttctttacccttcagatcgcggcctcttatcgttag

SEQ ID NO: 260272 - DNA, 288 bp, Klebsiella pneumoniae; identical to SEQ ID NO: 199625

SEQ ID NO: 260273 - DNA, 363 bp, Klebsiella pneumoniae; identical to SEQ ID NO: 25043

SEQ ID NO: 260274 - DNA, 294 bp, Klebsiella pneumoniae; identical to SEQ ID NO: 25037

SEQ ID NO: 260275 - DNA, 741 bp, Klebsiella pneumoniae; identical to SEQ ID NO: 133102

SEQ ID NO: 260276 - DNA, 1566 bp, Klebsiella pneumoniae; identical to SEQ ID NO: 133101

SEQ ID NO: 260277 - DNA, 1173 bp, Klebsiella pneumoniae; identical to SEQ ID NO: 133095

SEQ ID NO: 260278 - DNA, 519 bp, Klebsiella pneumoniae; identical to SEQ ID NO: 133094

SEQ ID NO: 260279 - DNA, 882 bp, Klebsiella pneumoniae; identical to SEQ ID NO: 133093

SEQ ID NO: 260280 - DNA, 948 bp, Klebsiella pneumoniae; identical to SEQ ID NO: 133092

SEQ ID NO: 260281 - DNA, 309 bp, Klebsiella pneumoniae
atgaagtgtccaatatgtacagacaaagagcttgtaatgacagaccgtgttggtgttgagattgactattgccctcaatgtcgaggggtgtggctcgatcgaggagagttggacaaaattatcgaacgtagcaataccgttgccatccctcaaccagggaaccaatctaatcagtttgaacaagaacagagacattcaacggcacatacacaacatagccatgatgaccaccactaccgagattcaaagcatggttatgaacgtacagatcgaaaaaaatcattcatcaaagatttatttgatttttaa

SEQ ID NO: 260282 - DNA, 2298 bp, Klebsiella pneumoniae; identical to SEQ ID NO: 133091

SEQ ID NO: 260283 - DNA, 309 bp, Klebsiella pneumoniae; identical to SEQ ID NO: 133090

SEQ ID NO: 260284 - DNA, 1272 bp, Klebsiella pneumoniae; identical to SEQ ID NO: 133089

SEQ ID NO: 260285 - DNA, 171 bp, Klebsiella pneumoniae; identical to SEQ ID NO: 133088

SEQ ID NO: 260286 - DNA, 1248 bp, Klebsiella pneumoniae; identical to SEQ ID NO: 133087

SEQ ID NO: 260287 - DNA, 135 bp, Klebsiella pneumoniae
atgctgattcgtaacctcttgcctcttgtattggtatggtgttttccttccggcgcggaggcgactagcttgattggtgctgaggtgccccccccttcgttatgcatcaagccaaccccctcggacctgggctaa

SEQ ID NO: 260288 - DNA, 633 bp, Klebsiella pneumoniae
atgcatcaagccaaccccctcggacctgggctaacggctgaaatattgctggttgcggcgcaaagactcggtgaacccgcacagctcgaagttagaccttttgttcgcgctctgaaaatgacggcttatggtcacgatagcctgttggtgccgccgggccgaatccccgaacgggagctgttgtttcattgggttacgcctttggttgatgaggcctttgtgttatttactgatcgtcagcaccaccctcggccgatccagcaagatgagctagctgggttaactgtcggtgtcatgcgtgattccgtcggcgagcagctcatgaagtcgtttccgggagtccatctggaaacggcggctgacgaggtcatcaatgcaaagaagctggctcgagggcgtattcatgtttgggctgtcagcctcaatactgggttttatgctcagtgcgttgctgggttggatgagagacaattagtccgtggtgctattttgtcgcatgtgactctctatctggcggcttcgccagactttccgcacagtgagatgcttcgctggcagcagatgattgagaccatgaagcatgatggtaccctgttgcagatcaagcagcgctatcattatgtggagccttag

SEQ ID NO: 260289 - DNA, 264 bp, Klebsiella pneumoniae; identical to SEQ ID NO: 34918

SEQ ID NO: 260290 - DNA, 300 bp, Klebsiella pneumoniae; identical to SEQ ID NO: 25124

SEQ ID NO: 260291 - DNA, 147 bp, Klebsiella pneumoniae; identical to SEQ ID NO: 25102

SEQ ID NO: 260292 - DNA, 198 bp, Klebsiella pneumoniae
atgttacaacggcttgccatcgccatttatcttcttacgatgacggcccgcgcgatatattgcgcctgtggcgaaggcggcgatccttttccccttgccgacggcgaaatattttccttattagcgaaattaaatcccctgaacagaaagtatttcacggctagagataagcttttaatatttacggttatcgcatga

SEQ ID NO: 260293 - DNA, 795 bp, Klebsiella pneumoniae
atggatctgttgtaccgggtaaaaacgctttgggccgcgctgcgcggtaatcattacacctggcctgctatcgatatctctcttcccggcaatcgccattttcatctgattggcagtattcatatgggcagccacgatatggctcccctgcccacccgtttgctcaaaaagctcaaaaacgccgatgcgctgatcgtcgaggcggatgtttccaccagcgatacgccttttgctaatttgcctgcctgcgaggcgctggaagagcgcattagcgaggagcaactccaaaacctgcagcacattagccaggagatgggcatttctacctcactcttttctacccaaccgctgtggcaaatcgcgatggttcttcaggcgacgcaggcacaaaaactggggctgcgggcagaatacggtatcgattaccagctattgcaggcggcgaagcaacaacataaacccgtgattgaactggaaggggctgaaaaccagattgccatgttgctccagctccctgacaacggactggcactgctggacgatacgctgacccactggcacaccaatgcacggttgctgcaacaaatgatgagctggtggctgaatgcgccgccgcaaaataatgaaataacgctgcctaatacgttcagtcaatcgctgtacgatgtgctgatgcatcagcgaaatctcgcctggcgggacaaattatgcgccatgccgccggggcgctatgtggtcgcagtcggtgcactacacctgtatggagaagggaatttgtcgcagatgttgcgctaa

SEQ ID NO: 260294 - DNA, 933 bp, Klebsiella pneumoniae
atgttagatgcaaacaaattacagcaggcagtggatcaggcttacacccaatttcactcacttaacggcggacaaaatgccgactacattccctttctggcgaatgtacctggtcaactggcagcagtggctattgtgacctgcgatggcaacatctatcgcgcgggtgatagtgattaccgttttgcgctggaatccatctcgaaagtctgtacgttagcccttgcgttagaagatgtcggcccgcaggcggtacaggacaaagttggcgctgacccgaccggattgccctttaactcagttatcgccttagagttgcatggcggcaaaccgctgtcgccactggtaaatgctggcgctattgccaccaccagcctgattaacgctgaaaatgccgaacaacgctggcagcgaattttacatatccaacaacaactggctggtgagcaggtagcgctctctgacgaagtcaaccagtcggaacaaacaaccaacttccataaccgggccattgcctggctgctgtactccgccggatatctctattgtgatgcaatggaagcctgtgacgtgtacacccgtcagtgctccacgctcatcaatactgttgaactggcaacgcttggcgcgacgctggcggcgggtggtgtgaatccgctgactcataagcgcgttcttcaggccgacaacgtgccgtacattctggctgaaatgatgatggaagggctgtatggtcgctccggtgactgggcgtatcgcgttggtttaccgggcaaaagcggtgtaggtggcggtattctggcggtcgtccctggcgtgatgggaattgccgcgttctcaccaccgctggacgaagaaggcaacagtgttcgcggtcaaaaaatggtggcatcggtcgctaagcaactcggctataacgtgtttaagggctga

SEQ ID NO: 260295 - DNA, 1293 bp, Klebsiella pneumoniae
atgatgaacacggaaggtaataacggtaacaaacccctcggtctatggaacgtcgtttccatcggtattggggcaatggtgggggcggggatcttcgcgctgctggggcaggctgcgttgctaatggaagcctcgacctgggtcgcctttgcatttggcggtattgtggcgatgttttccggttatgcctatgcgcgcctgggggcgagctatcccagcaatggcggtattatcgacttctttcgtcgcggattaggcaacggcgtcttttcgctggcgctctcgttactgtacctgttgacgctggcggtgagcatcgccatggtcgcccgtgcttttggcgcttatgccgtgcagtttttgcatgaaggcagccaggaggagcaccttatattgctctacgcgttggggatcattgcggtgatgacgcttttcaactccttaagcaaccatgcggtagggcggctggaagtgatcctcgtcggcattaaaatgatgatcctgttattgctgattattgccggtgtctggtcgctgcaaccggcgcatatttctgtctctgcgccccccagctccggtgcgttcttctcctgtatcgggataaccttccttgcctatgcgggctttggcatgatggcgaacgcggcggataaagtgaaagatccgcaggtcattatgccacgggcgtttctggtggcgattggcgttaccacgttgctttatatctcgctggcgctggttttgcttagcgatgtatcggctttagagttagaaaaatatgccgataccgccgtagcgcaggcagcttctccgctgctcgggcatgtgggttatgtgatcgtcgtcatcggcgctttactggcgacggcttcagccatcaacgcgaacctgttcgccgtgtttaacatcatggacaacatgggcagcgaacgcgaactgccgaagctaatgaataaatccctgtggcggcagagtacctggggcaacatcattgtcgtggtgctgattatgctgatgacggcggcgctgaatttaggctcactcgccagcgttgccagcgccacctttttgatctgctatctggcggtgtttgtggtggcgatccgcctgcgtcatgatattcacgccttgttgccgattcttatcgttggtacgttggtgatgttgttggtgatcattggctttatctacagcctgtggtcccagggcagccgtgcgttgatatggattattggtgcaatcttactcagccttattgtggcaatggtcatgaagcgcaataaaaccgtataa

SEQ ID NO: 260296 - DNA, 1356 bp, Klebsiella pneumoniae
atggcgcgattccagtttaaaagccgtaaaaataatgggtttatttttttaataagttttatggtgatgggagaagctacaattgctgcaccgctgccacaatgggcgaacgccccagcggtaacgccagttgcccaattatctttacaggaaagtatattacgcgcctttgcgcgaaatcccgacgtcactcaacaggcggcgcagataggtattggcgaagcgcaaattgatgaagccaaaagtgcctggtatccgcacgttggattaaccggcaatgcgggaccgtcccgacaaacggactccagtggcaggcttgataacaacgtttcgtatggcataaccctgacacagctggtgtatgactttggtaaaactaacaacgatatcaaactgcaaactgccgcccgtgacagctaccgctttaaattgatggcaaccttaaccgatgttgcagagaaaacggcgactgcctatatggaagtcagtcgttatcaggctttgtgcgatgcggctcaacgcaatattcactcgctggaaaacgtctacaacatggcagcattgcgtgctaacgctggcctgaactcgtcgtcggatgaattacaggcccagacgcgcattgccggaatgcgctcaacgctggagcaatatcaggcgcagatggcaagcgccaaagcgcaactggcggtgctcactggcgtacagccggaggcgatagccgcgccacctgctgaattagccgagcagccggtatcgctgaaaaatattgattaccagtccatcccgctggtgctggcggcagaaaacttacgccagtcagcacagtacggcgtggaaaaaacgaaagcgcaatactggccaacgctgagtattcaggggggcaaaacgcgctaccagaccagcgaccgctcgtattgggatgatcagctacaactgaacgttaacgcgccgctgtatcagggcggcgcggtttctgcccaggtgcaacaggctgaagggcaacaaaaaatctctgcctcgcaggtcgaacaggcaaaactggatgtgctgcaacgagcgtctgtggcatatgccaactggacaggcgcacggggtcgtgaagaggctgggttagcgcaatctgaaagtgcgcacagaacgcgagatgtctaccaaaatgaatataaattgggtaaacgcagcctgaatgatctattaaccgtcgagcaagatgtctttcaggcgcaatcggctgaaataaatgccaattatgatggctgggtcgccgcagtgaattatgccgctgcggttaataaccttattccattagcgggaattaaacagggcttatacaacgacttacccgacttgaaataa

SEQ ID NO: 260297 - DNA, 17181 bp, Klebsiella pneumoniae
atgagcctgattattgatgttatttcgcgaaaaacatccgtcaaacaaacgctgatcaatcctggcgacgttacggttgtcatttatgagccctctgtggtgcaggttcatgctcaggcatctgccgttgcgcgttatgttcgtgacggaaatgacttgttgatctatatgcaggacggcacggtgatccgctgcaacggttatttcctgcaagcggcaaataccagcgaacaatccgaactggtgtttgtcgatggtcaacaactgacccacgtaacatttgccgataccgcggcaggtggattagcgcccgtggagctgaccgctcagaccaccgcaattgaaagcattgcgccgtaccttgatatcgtcggccagacgacggctttcccgtggggatggctggcgggggcggcggtaggtggcggcgcgcttggcgctttactggcaagcggtggcgatgatgactcaaaaactgaagtggttaacaacccaccgccagccgaacccggcaacgccacgccatcgtttttggtaaccgataatcagggcgatcaacgcggtattctttccgccaacgataccaccgatgacactacgccaacctttagcggcagcgggcaggcgggggcgaccatccagattaaagacagcaatggtgacaccatcgccagtactcaggtcggtagcgatggacgctggagcgtcgatttgcccacgcaaagcgcgggcgaacatacctggtcagtggtgcaaatcgtcggcagtaccatcactgacgccggttcgataacgttaaccatcgacaatagtcaggccagcgtgcaggttgccaccaccgcaggcgataacattattaacgccagcgaacaggccgccgggtttacgctttctggcaccagtagtcatctggcacagggaacagaactcaccgttacgctaaacggcaaaacctacaccaccagcgtaggcgctaacggtgcctggagcgtgcaggtaccgaccgccgatgcgcaggcgttaggcgaagggaatcaggcagtgctggtcagcgggaaagacgccacaggcaataccgtcaccggcgtgcaactgctaacggtcgatacccaaccgccaacgcttgccatcaacaccatcgctcaggacaacatcatcagtgctgcggaacataacgtcgcgctggtactgagcggcacgtcgaatgcagaagcggggcaaaccgtaacactgaccgtcaacgggaaaagccatacagcaaccgtcggtagcgacggaacctggcaagtgacgctgcctgccacggaagtccaggcgctggcggagggtaattacgctgtcaatgccagtgtcagcgatcgggcagggaacagcaccagccacagcgcgaatttcacggtagatacctcagcacccgtggtcagtgttaataccgtagcgggcgacgatattcttaataatgctgagcaggccgtcgcgcagatcatctccggacaagtcagcggtgcttctcctggcgatacggtaacggtgaaattgggcactcatgtcctgacgggcattgtgctggcagatggcagctggaatgtggcgctggacccagcggtaacccgcacgctggatcgcggagccaatacgattttcgtcaccgtgacagatactgcaggaaataccggcgcggcgtctcgagcaatcacgctggtcggtgtttctccgttaatcaccattaacaccgtctccggcgatgacattatcagtggcgcagaaaaaggtgcgccactgacccttaccggtagcactcaacaggccgagacaggacaaaccgtcacagtaaccctggctggacagagttttaccactaccgtgcaggctgatggctcctggagtctgacggtacctgccgccgcgatgggaaatctgcctgacggcgcggtggcgattaccgcttctgtgacggatctcagcggcaataccggcaacacctcccgcaccattaccgtcgacagccaggccccggcgttgagcatcgatccactgaccgctgataacatcattaacgccgccgaaagcgggcaggatttgcccatcaccggcaccaccgacgctcagccagggcagacggtgaccgttacgttgaatgggcagacgtaccagggcgtcgtgcagccagacggcacctggagcgtgaccgttcccgccgccaacgttggcgcactggctgacggcaacgccaccgtcaccgccagcgtgaacgatatcgccggtaacccgaccagcgtctcacgcgtggcgctggtcgatgccacgccgccggtggtaaccattaatccggtggcgaccgataacgtcatcaacacgccggaacacacccaggcgcaaatcatcagcggcacggttactggcgctcaggcgggcgatatcgtcaccgtgacgctgaataatgtggattacacaacggtggtggatggttccggcaactggagcctgggcgttccggcttccgttgtcagcggactggtggatggcagttatccgatcaacgtgtcagtgactgaccgcgccggaaacacgggcagccagtcattgaccgtcacggtcaatactgccgcgccccttatcggcattaacagcattgcgggcgatgatgtgattaacgccagcgaaaaaggggccgatctccagatcaccggcaccagcgatcagcctgttaataccgccatcaccgtgacgctgaacgggcaaaattacaccaccacgaccgacgcctccggcaactggagcgtcaccgttccggcatcggcggtaaccgcactgggccaggccaactacacggtaacggcggcggtgacgagtaatatcggcaacagcaacaccgcaagccataacgtgctggtcgacagcgcgctgcccggcgtgaccattaacccggtggcaaccgacgatattattaacgccgccgaagcgggcgttgcgcaaaccattagcgggcaggttactggcgcggaagatggcgacacggtaactattacgttgggcggtaatacttatacggcgacggtgggcagcaatttcacctggagcgtgagcgttccggcggcagatattcaggcgctgggtaatggcgatttaacggtgagtgcctcagtcaccaatcaaaacggcaacaccggcagcggcacgcgggatatcaccatcgacgccaatctgcccggcctgcgggtcgatacggtggcgggcgatgatgtggtcaatatcatcgagcacgggcaggcgctggtggtcaccggcagcagttcggggctggcagaaggcacgccgcttaccgtcacgattaataatgtggaatacaccaccgcggtgcaggccgatggtagctggagcgtgggcgtcactgcggcgcaggttagcacctggcctgcggggacggttaatattgctgtatccggggaaagtagcgccggaaactcggtgagcattacgcatccggtgacggtcgatctcactccggcggcgatcgccatcaacaccatcgccacggatgacgtgattaacgccgcagaaaaaggcgctgatttaaccctttccggcaccaccactaacgtagaacccggtcaaaccgtcaccgtcacctttggcgggaaaaattacaccgccagcgtagcaagcgacggtagctggactgccaccttacctgccgccgatctgacagcattaccagagggcagcgcctccgcgcaggccagcgtcagcaatattaatggcaatagcgcctcggcggtgcataactacagcgtcgacagcagtgccccgaccatcattatcaataccgtcgccagcgacaatatcgtcaacgccagcgaagccgatgcgggtgtgacggtgagcggcagcaccaccgctgaagcggggcagattgttacggtaacgctcaatagcccgaccgtgcagacctatcaggcaacggtgcaggcggacggcagctggagcatcaatattccggcggcagatcttgaggcattgaccgatggcagccacaccctgaccgccacggtcaatgacaaagcgggcaacccggcgagcaccacgcataatctggcggtggatctcaccgttccggtacttaccatcaacaccattgcgggcgacgatattattaacgccgccgaacacgggcaggcgctggtgatttccggttccagcactggcggagaagcgggggatgtcgtcaccgtcacgctaaacagtaaaacctacaccacgacgctggatgcctccggcaactggagcgtcggcgttccggcggcggatgtcacggcgctgggtagcggcccgcaaaccgtgatggcgaccgttaccgatgcggcaggtaatagcgacagcgaaacgcacacggtcaccgttaaccttaccgcgccaaccattggcattaacaccatcgctaccgatgacataattaacgccaccgaaaaaggcgcggatctgcaaatttccggcaccagcaatcagccagcgggcaccactattacggtgacactgaacgggcaaaattacaccgccacgaccgatgcttccggcaactggagcaccacggtgccagcctccgctgtcggtgcgctgggcgaagccagttacacggtgacggcgaacgtcaccgatagtgcaggcaacagcaattccgccagccataacgtgctggtcaacagcgcgctgcctgccgtcaccattaacgcggtggcgaccgacgatattattaacgctgctgaatccggaaacgcgcaaaccatcagcggccaggtcacgggcgcggcggcgggcgatacggtcaccgttacgctgggcggcaacacctacaccgccacggtgcaggctaatttaagctggagtgtcagcgttccggcggcagatattcaggccatcggcaacggctctctcaccgtaaacgcctcggtgaccaacgtcgtcggcaacaccggcaacggttcgcgagacatcactatcgatgccaatctgcctggcctgcgggtcgataccgtggcgggcgatgatgttattaacagcattgagcacaatcaggcgctggtgatcaccggcagcagcagcggattaacggcgggaacggcgttaacggtcgagattaacaacgttacttatggcgcgacggtattagccgacggcacgtggagcctcggtattccggcggcagacgtcagcaactggcctgcgggtacggtggatattacggtaagcggcaccaacagcgccggaacaacctccaccattacccatccggttaccgtcgatctggctggggtcgccatcaccattaacactctctctggtgatgatgtgatcaacgccgtcgaaaaaggcgaaacgctggtcgtaagcggcagcaccagcggtgtggaagctgggcaaacggtgactgtcacctttggtggcaaaaattacaccaccactgtggaatctaacggtagctggacggtgaatgtgccgcctgccgatctcgctgcgctaccggacggcgcgggcaacgtgcaggcgagcgtcagtaatattaacggcaacagcgcccaggcggatcgcgcgtatagcgttgatgccaccgcgccgcttgtgaccatcaacaccatcgccagcgacgatattcttaacgccgccgaagcgggatcggcgctgaccatcagcggcaccagcacggcagaagccgggcagacggtgaccgtgacgcttaacggcgtcaattacagcggtaacgtgcaggcagacggaagctggagcgtcagcgtcccgaccggcgatttagctaacctcactgccagcccctatacggtgagcgcagcggtcagcgacaaagccggaaatccggcttcagcaacacataatctgacggtggaccttgccgctccggttgtcaccattaacacggtggcgggcgatgacatcatcaacgccacagaacatgcacaggcgcagattatcagcggctcggcaacgggcgcgactaccggtaacacggtttccgtgaccattggcacgaccacctacaccaccgtgctggacgccaacggcaactggagcatcggcgtgcctgccagcgtgatttccgcactggcgcagggcgatgtcaccattaccgccacggtcaccgactccgcaggcaacagcggcacggcctcgcacactgtcaccgtggcgctcggcgctccggtgctcgccattaacaccatcgccgttgatgacatcattaatgccacggagaaaggcgcggatctggcgatttccggcagcagcaaccagcctgcgggtacgcagataaccgttacgctcaacgggcaaaattacaccaccactgccgatgcatccggtaactggagcgtgaccgttccggcgtcacgggtgagcgccctcggtgaagccacttacacggtgaccgccgccgctactgactctgatggcaacagcggttccgccagccataacgtgcaggttaataccgcgctgccgggcgtcaccattaacgtggtggcaacggacgatattattaacgccgccgaagcgggcgtggaccagaccatcagcgggcaggtgacgggtgctacggcaggcgacacggtgaccgtcacgctcggcggggcgacgtacaccgccacggtgcaggcgaatttaagctggagcgtcgatgttccggcagccgctttacaggcgctgggcaacggcgagctgaccatttcggcttcggtaacgaacagcgtaggtaataccggtaacggcacgcgtgaaatcaccatcgacgcgaatctgcccggtctgcgggtcgataccgtggcgggcgatgatgtggtcaatattatcgagcacggacaggcgctggtgattaccggcagcagttccggtctggcgacggacagtaacgtcacgctgaccattaacgggcaaacctatgttgcggcggtactggcggatggctcatggagcgtcggcgttccggcggcagatgtcagcgcctggcctgcggggacggtcacgattacggcgagcggtagcaccacagccggaaatccggtcagcgttacgcatccggtgactgtcgatctcactgcggtggcggtcagcatcaacgccattactgccgatgacgtgattaacgctgccgaaaaaggcgcggcgttaacgctctctggcagcacttctggtgtggaggccgggcaaacggtcaccgtcacctttggcggcaaaacctacactgcaagcgtcgcggcgaatggttcctggagcacctcggttccggcggcagatatggcggccctgcgtaatggcgatgccagcgcacaggccagcgtcagcaatgttaacggcaacaacgccactactacccacgcttacagcgtcgatgccagcgtgccaacggtgaccattaacaccattgcgggcgacgacattcttaacgccgccgaagcgggtgctgcgctgactatcactggcagcagcacggcggaagcggggcagacggtgaccgtcaccctcaatggtgcaaactatactggcaccgtacagacggacggcagctggagcatcagcgtaccgccagccgacttaagcgccctgaccgacagcaactacaccgttagcgcggcggtgagcgacaaagccggaaacccggcctcggttaatcacaacctgacggtggatacttccgttccggtcgtcaccatcaacacggtggcaggcgatgatgtgatcaacgcgacggaacacgcccaggcgcagatcatcagcggctccgccacgggtgcggcaaccggtagcaccgtgacggtgactatcggcacaaataccttcaccaccgtgctggatgccagcggtaactggagcgtcggcgttccggcaagcgtcgtctcggcgctggcgaacggcacggtgaccattaacgccagcgtcaccgatgccgccggaaacagcggcagcgccacgcatcaggtgacggtcaatactggcctgccgtcaattacctttaacgccatcagcggcgataacgtcctgaacgccgatgaaaaaggccagccgttgaccattagcggtagcagtacggggttggcgaccggcgcacaggttaccgtcacactcaacggtcataactacagcgctaccaccgacgcggcgggcaactggaccttaaccgtgccggtgagcgatctggcggctttaggccaggccaactatatcgtcagcgccagcgccaccagtgcggcaggtaacaccgccagcagccaggcgaatttactggtcgacagcggcctgccgggcgtcaccatcaacaccgtggcaggcgacgatattatcaacgccgccgaagcgggagccgctcaaaccatcagcggggtggtgactcgcgccgccgctggcgatacggtcaccgtgacgcttggcggcaacacttatactgcacaagttcaggccgatttaagctggagcgtcagcgttccggcagccgacctccaggcgctgggcaatggtgatttgaccattaccgcctcggtcaccaacgcgaatggcaacaccggcagcggcacgcgggatatcaccattgatgccaacctgccggggctgcgcgtggatacggtggcgggcgatgatatcgtcaacagcattgaacacgggcaggcgctggtgatcaccggcggcagcagtggtctgaatgccggtgtgccattgacgatcacgattaacggtacggcttattccgccacggtacaggcggacggaagctggagtgtcggcattccggcggcaaacgttagcgcctggccagcgggagcattaaccgttgaggtagacgggcagagcagcgccggaaatccggtcggcgtcagccatccgttcactgtcgatttaacggcggtggcaatcagcatcagcaccgttgccagcgatgacgtaattaatgccgccgagaaaggcaccaatctgaccctttccggcagtaccagcgggattgagagcgggcaaaccgtcaccgtcacttttggcggtaaaacctacactgcaagcgtcgccgccaacgggagctggagtgtaaacgttccggcggcagatctggcaattctgccagacggcgcggcgaacgtgcaggctagtgtcagcagcgcgagcggtaacagtgcctcggcgacccatgcgtatagcgttgacgccagcgcaccgacgctcaccattaacaccattgccagcgacgatattcttaacgccacggaggcgggaagcccgctcatcatcagcggcaccagcaccgccgaaaccgggcagacggtcaccgtcacccttaacggcgcaacctacagcggtaatgtgcaggcagacggtagctggagcgtcagcgttcccccttcagccttaggcgcgctgagcgcaagcaattacaccgtcagcgccacggtcaacgacaaagcgggcaaccccggcagcgccagccataatctggcggtagacaccaccgcgccggttctcaccattaacactgtggtgggcgatgacattatcaacgatgccgaacatgcgcaggcgctggtgatctccggcaccagcacgggcggggaagcgggcgatgtggtgagcgttgtgctcaacggcaaaacctacaccaccaccctggatgcctccggtaactggagcgttggcgttccagcggcggatgttgcggcactcggtagcggtgcgcagaccatcaccgccagcgtcagcgatcgggcaggcaacagcgacgacgccagccgcaccgtgaccgtcagtctcaccgcgccagtgattagcatcaacaccatcgcgggcgatgatgtgatcaacgcgacggaaaaaggatctgatctggcgctttccggcatcagcgatcagccagcgggcacggcgatcaccgtcaccctgaacggacaaaactacagcgccaccaccgactcttctggcaactggagcgtcaccgtgcccgcctcggcggtcagtgcgctgggcgaagcctcctacagcgtgacggcgagcgtcaccaatgctcagggtaacagcagcaccgccagccataacgtgcaggtcaataccgcgctaccgggcgtcaccattaatccggtaacgacggacgatattattaacgccgcagaagcaggcagcgcgcaaactatcagcggccaggtaaccggtgcggcggcgggcagcaccgtcaccgttgaactgggcggtaaaacttacaccgccaccgtccaggctgatttaagctggaatgtgagcgtacctgccgccgactggcaggcgctgggtaacggtgagttaacggttaatgcctcggtgaccaacgccgttggtaacaccggtagcggcacgcgcgatatcaccatcgatgccagtctgcctggcctgcgggtggataccgtcgcgggtgatgatgtggtcaatatcatcgaacacagtcaggcgcaggtgatcaccggtagcagctccggctttgcggcgggcacggcgctgaccgtagtgataaataatcaaacttacgccgccacggtgctggcgaacggcagctggagcgtcggcgttcctgcgacggatgtcagtaactggcctgcgggaacgctgaatattaccgttagcggcgcgaacagtgccggaacgcaaaccagcattacccatccgctgaccgttgatctcaccaccgtcgccgtcagcataaacagcatcaccagcgatgatgtgattaacgccgccgaaaaaggcgcggcgctaacgctctccggcagcacgtccggtgtcgaagcggggcaaaccgttaccattacttttggcggcaaaacctacaccaccacggtggcggctaacggtagctggagcaccaccgttccggctgtggatatggcgaccctgcgtgacggcgatgccagcgcccaggtgcgggtgactaacgtcaatggcaacagcgccacggcaacgcatgaatacagcgtcgatagcgccgcgccaacggtgaccatcaacaccattgccagtgataacatcatcaacgccagcgaagcggcggcgggcgtgacggtatccggcaccagcacggcggagacggggcagacgctgaccgtcacgcttaacggcactaactaccagaccacggtgcaggcagacggcagctggagtttaacgctgcccgccagcgacttaaccgcacttgccaataacggctacaccctgaccgcctcggtcagcgatttggcgggtaaccctggcagcgccagcaaaggtgtgaccgtcgataccaccgcgcccgtcatcagtttcaacaccgtggcgggcgacgatgtgattaacaacgtcgaacacactcaggcgcagattatcagtggcaccgccacaggcgcggtggcgggcgaccgcctggtggtgaccatcgccgggcagcagtatgtcaccagcaccgatgccagcggcaactggagcgttggcgtgcctgccagcgtgatttccggccttgcggacggcacggtgaccatcagcgccaccattaccgatagcgcaggcaacagcagtacgcagacgcacaacgtgcaggtaaacacggcggcagtgtcgctctcggtcagcaccatcagcggcgataatattattaacgccgccgaagcaggcagtgcgctgaccctgagcggcaccggaacgaactttgccgcaggtacagtagtgaccgtgttgcttaacggcaaaggctacagcgccaccattcagagcaacgggagctggagcgtgaacgtgccggcggcagacgtcgcagcactcagtgatggcaccagctacacggttagcgcctccgcgcaggacagcgccggaaacagcgccacggcctcacgcagcgtggcggtggatctcaccgcgccggttatcagcataaacacggtttcaacggacgaccgactcaacgccgccgaacagcagcagccgttaacccttaacggctcgactagcgcggaagtggggcagacggtcaccgtcacctttggcggcaaaacctataccgccacggttgccgccaatggcacctgggcgcttaacgtgcctgcggcggatctggccgcgctcgggcagggtgcgcagaccattaccgccagcgtgaacgatcgcgccggtaaccccggtcaaaccacgcacgccctgaccgtcgataccgttgcgccaacggtcaccatcgccacggtggcgggtgacgatattatcaacaacgccgagcagcttgccgggcagaccatcagcggcaccaccaccgccgaagtgggccagacggtgaccgttacctttaacggtcagagctggactgcaacggtcggcagcggcggaagctggtcggtgtttattccggcgcagcagtttgccggattaagcgacggcagctacaccattagcgcgacggttagcgatcaggccggaaaccccggcagcgccagccgtggcgtgacgctgaacggcgacgtcccctccgtcaccatcaacacctttgcgggcgatgatgtggtgaatgcagcggagcacggctcgtcgctggtgatcagcggcaccaccaccgccccagtcgggcagacgctgaccctgaccttaaacggcaaaacctacaccaccacggtacagaccggcggtagctggagctacaccctcggcagcgtcgatgtcaccgcgctggcggacggcaatgcctacgtgattaacgcctcggtgagcaacgctattggcaacaccggcagcagcaatcacaccattactgtcgatctcagcgccccggcgatgggtattaatatcgattccctgcaagccgacactggccttagctccagcgactttatcaccagcgtcagtccggtggtggtcaacggctcgctcaccgccgcgcttgccagtaacgagacggcacaaatcagtatcgacggcggcgtaacctggaccacgctcaccgttaccggcacgacctggcgctataacgacagccgcacgctgaccgatggcagttatctctatcaggtgcgggtgattgacgcggcgggcaacgtcggtgccactgacagccagaatgtggtgatcgacaccatcgcgccagatcccgcggtgaaaaccatcgccatcaacgcgatcaccaccgatactggattgattactaacgattttgtcaccagcgacacgacgcttgcggtaagcggcacgctgggggcggcgctttcttccggtgagttcgcgcaaatcagcattgatggcggcaccacctggcagaatctttcggtaagcggtttgacctggacatatcttgacgggcggacgctgagcgatggcaactacaactatcaggtgcgggttatcgacaccgccggaaatatcggcgcgaccgccagccagatagtcactgtggacaccaccgcgccgctggcgagcaaaaccatcgccattgcgggcatcagcgatgacactgggttaagtagcagcgattttgttactcgcgacaccacgctgaccgtgcgcggcacgctcggcgcggcgcttgccgccgatgaacgggcgcaaatcagccttgacggcggtgtcacctggaccacgttaaccgttatcggcaccagctggagctatgccgatggtcgcacactgaccgacggcacctggaactacacggtgcgggtggtggatctggcggggaacgttgggcagaccgcaacgcaaaatgtggtggtcgacaccaccagcccggaagcggcgaaaagtatcaccattaccggtatcagcgatgacaccggagccagcagcagcgattttattaccagcgacacctcgcttaccgtgcgcggcgtattgggggcggcgctcggcgctaacgagttcgcgcaaatcagtaccgacaacggcgcaacctgggtgaacgtaacgctggcggcagatggcctgaactggagttacgttgacggacgcacgctaacgaatggcacgacgacctggcaggtgcgggtggtcgatctggcgggcaacgttggcgcaaccagcagccagtcggcgcagatcgacaccgttaacccggcgcaggtgttgaccatcgccagcatcagcaccgacacggggagttcggcaactgactttatcaccagtgacaccacgctcaccctaaccggttcgctgggggcggggcttgccagcggcgaagtggcgcagattagcctcgatggcggcgcgacctggatcacactcaccaccaacggcacgcagtggacctacactgacagccgcacgctgaccgacggcagctatgtttatcaggtgcgggtgctggatctggcggggaacaccggcccggtggtgtcgaaaacggtggtggtcgatacgattaaccctaccgccacgccgaccattgtgtcgtataccgatgatgtcgggcagcggcaggggacattaagcagttcgcaggccaccgacgacactacgccgttgctgaacggcgtgctctccggcccgcttgccagcggtgaagtggtttacctctaccgtaacggcctgctgttaggcgcggtaacgatggtcggcgcactgaactggacctacagcgacagcgggctggtgagcggtgcctacacctacagtgcgcgagtggtggatctggcggggaatatcaccgcctccagtgattttgtcctgacggtcgatacctctattccgaccacgctggcgcaaattaccagccagaccacgcgcgataccacgccgattatcagcggggtaatcacggcggcactcgccagtgggcagtatgttgaagtggtgatcaacggcaaaacctacacctctgaaccgggtggcgcggtagtggtcgatccggcgcacaacacctggtatgtacagttgccggataccgacgcgctggcggcttctgcgaccgcctataacgtcaccgcgcaggtaaaaagctcggcgggcaacggcaataacgccaatattagcaacggcacggtgacggttaacgcggcgattgattacacaccgacctggaccaccgccagcaaaaccaccgcctggggattgacctacggccttgactcgcacgggatgtggacggtgctggcaaaccagcaggtaatgcaatcgactgacccactcacctggtcgaagaccgcgctgacgctgtatcagagcggcaacaactacgccaccagctccatcgccgattacgaccgtaacggcacgggcgatctgtttatcacccgtgatgactacggtacaggctatatcaacggctttaccaataacggcgatggcaccttttccagcgctattcaggtcaccgtcggcaccctgacgtggtacggctcgattgtggcatttgataaagagggcgacggctatctcgacttctggattggcgacgcgggcgggccggactccaacaccttcttgtggaacaacgcaggtacgctggtaggtaactccaccacgtcgaacagcggcggtagcgccacggtgggcggggcggtgacagggtatctttcgctcaacgaaggttctggtgtcgatctgaacaatgacggcaggatcgacctggttcagcacacctacaacctgaacaactattacacgctatcttcgctcatcaaccaagggaatgggacgtttgtctgggggcagaacaccaccaataccttcctgagcggggcgggcagtggcgctatgagcagcagcgtttccatgacctgggccgatttcgatggtgacggcgatatggatctcttcctgcctgccagccagggaagagctaactacggctcgctgttattcaacaccaacggcgtactgggtagcccggtggcggtgggcgcaacggcaaccacctatgccagccagtttagcgtggcggtggactggaaccatgacggcctgatggatatcgcccgtatcgcccagaccgggcagtcgtatctttataccaacgtcagcaatgccagcaactggacacaatcggccctcggcggcagccagagcggtaccaccagcggcgtggcggcaatggactacgactgggacggcgcggtggatgtgctggtgaccaaacagtcgggcagcgtctatcttattcgcaacaccaacacggtgagctacggcacctcgctgcacctgcgcatcaccgatcctaacggcattaacgtctattacggcaataccgtaaaactgtacaactcggcgggagtgctggtcgccacgcaaatcatcaacccgcagtcggggatgggggttaacgacacctcggcgctggtcaacttctacgggctgaatgccggagaaacctacaacgcggtgctgatcaaatccactggcaccaccgccagcaatatcgaccagacggtcaacaccagctggggcggcttacaggccaccgatgccactcacgcttacgacctcagcgccgaagcaggcaccgcgagcaacaatggcaagttcgtcggcaccggctataacgacaccttctttgccaccgcaggcaccgacacttacgacggttccggcggctgggtgtacagctccggcaccggaacctggcttgcgaacggcggcatggacgtggttgatttccgcctctcgacggtgggcgtgaccgcgaacttaagcagcaccgccgcgcaggccaccggctttaacacctcgacatttaccaatatcgaagggatatccggctcgaattttaacgacactctgaccggcagcagcggcgataaccaactggaagggcgcggcggtaacgacacgctcaacatcggcaacggcggccacgacaccttgctctataaactgctcaacgcaagcgacgcgaccggcggcaacggctcggatgtggtgaatggctttacggtagggacatgggaaggcaccgccgacaccgatcgcattgatatccgcgagttgttacagggcagcggctacaccggcaacggcaaagccagctacgtcaacggcgtggcaacgctggatgcgcaggccggaaacatcggtgattttgtcaaagtcacccagagcggcagcgacaccatcgtgcagatcgaccgcgacggcacgggcggcacttttgcggcaactaacgtggtcacgctgacgggcgtgcataccgacctcgccactttgctggcgaatcatcagttgatggtggtgtag

SEQ ID NO: 260298 - DNA, 2163 bp, Klebsiella pneumoniae
atgaaaaaaaatgcccagtccgtggaagcctggctggaggcgatgatcgccgtggcgcgctattaccgccttgatttttctcaggagaatgtgcgcgcgaccgtcaactgggagcgcgacagtaagcgggaggagttactcaccgacatggcgcggcagttggggatggggcttcggctggtggagttctccaccgactcgctcaacccctggcggctgccgttgatcgccgtttttgataatcaacaaattggcgtgatcacccgccgcgataatcacgacaatatcagcgttcagttcagcggtgacgaagggctggaaaccacgcttaacgttacggatattgaagataacatcgtcgaactggcgctgttgcgcccgctcagcgctattcctgacgcgcgggtagacgactatattcgcccgtatcaggcgaactggttctggaatctctcgctaaaagactggcggcgctatggcgatattatgctggcgtcactggtggcgaacgtgctggcgcttgcggcgatgattttctcgatgcaggtttacgaccgggtggttccggcgcagtcctacccgacgctgtgggtgctgttcgccggggtgatgatggcgatcctgtttgaattctgtatgcgcatggtgcgcacgcacctttccgatgtgattggtaagcgggcagatctgcgcatttcggatcgcgtttttggtcacgcattacggctgaaaaataacgtgcgatcgaaatccaccggatcgtttatctcgcagatccgcgaactggaatcggtgcgggagctgatcacctccaccactattggtgcagtggcggatctgccgttcttcctgctgtttgtctttattttgtggatgattggcggctggctggtgctggtggttttgctggcgctgccgttattggtgatccccggcctgctggtacaacgcccgctggcgcggctggcgaacgaagggatgcgcgagtcggcggtgcgtaacgctacgctggtggaagccgtgcagtcgattgaagacattaaactgctgcgcgctgaacagcgttttcagaatcagtggaatcacactaacgacgtggcctcgtccatcagcatgaagcaacgttttctcaccgggctactgctcacctggacgcaggaagtgcaatccatcgtctacgtcgtggtgctgttggtgggctgctttatggtaatgaacggtgacatgactaccggcgcgctggtcgggacgacgatcctggcttcgcgcaccatcgcgccgctgtcgcagatatccggtgtgctctcgcgctggcagcaggcgaaagtggcgcgcaacggacttgatgaactgatgaagcgcccggtggatcagccggaacacggcaaactggtgcataaagcggtgctacacggcaattatcagttcagcaacgctatcttttattacgatgaagaagagaaaattgccgatgtggcgattggcaaactcaacatccaggccggagagaaaatcgccattctcgggcgcaacggcgcgggtaaatcaacgctactgcaaatgctcgccggaatgcgtatcgcccagcaggggcaggtgctactggataacatcagtatcgggcagcttgatccggcagatctgcgccgcgacatggggctactgagccagaccggacgactgtttttcggctcgctgcgggaaaacctgacgatggggatgccggaggccagcgatgaagatatcgaacgcgcattaaccctcagcggggcgctgccgtttgtgcagaagcagaaaaacggcctcaactacatgattcaggaagggggatttggtctttctggcggtcagcggcaaacgctgctgctggcgcggcttctcatctctcaacccaatatcgtgctgctcgatgaacccagcgcctcgctggatgaaatggcagaagcgtatttaatcgaacaactgaaacagtggattggccatcgcacgctgattatcgccactcaccgcacggcgatgctgcaactggtggaccgcattatcgtgatggatcaggggcggattgtgatggatggcgcgaaagaggccattttgcgtgaacagggcgaacccacgacgcgacgggtggtgttgcaggagaagaataaggggtctgccgcatga

SEQ ID NO: 260299 - DNA, 1176 bp, Klebsiella pneumoniae
atgaatggacaactgcaatacaaccgtggcctgactgaaccccgcctgccgcgttcggcgctggcggtacgcgttaccgctgtgatgctgctctgttttctcggctgggcgtggtacttccagcttgatgaagtcaccaccggcagcggcacggtagaaccttccgggcgcgaacaggtggtgcagtcgctggaaggcggaattctgtatcatctcgacgtcaaggttggcgatattgttgaacagggccagccgctggcgcagcttaaccgcaccaaaacggaatccgacgtccaggaagcaatgtcgcggctgtacgcggcgctggcaacctcggcgcggctgcgggcggaagtgagtaataaaccgctggtcttccctgacgaactgaataaattccccgaacttatcgagtcggaaacggcgttgtacaacactcgccgcgatgggctgaacaaagccaccaccgggctgacgcaggggattagcctggtcaaccgcgaactggcgatgacccagccgctggtaaaacagggggcggcgagcagcgttgaagtgctgcgcctgcaacgccaggccaatgaactggaaaacaaactcagcgacgtgcgcacgcaatactacgtacaggcgcgggaagagttagcgaaagccaatgcggaagtagaaacccagcgttcggtgatccgcgggcgggaagattctctcacccggctcaactttaccgcgccggtacgtggcattgttcaggacattgacgtcaccacggttggcggcgttattgcccccggtggtaaactgatgaccatcgtgccgctggatgagcaactgctgatcgaggcaaaaatctccccgcgcgatgtggcgtttatccatccggggcaaaaatcgctggtgaaaataaccgcctacgattactccatctacggcggcctgccgggagaagtggcggtgatatcaccagacaccgtgcaggatgaagtacggcgcgatgtttattactatcgggtgtacattcgcactttcagcaaccatctggaaaacaaaagcaaacagcaatttccgatatttcccggtatggtggcgacggtcgatatccgcaccggcaaaaaaagcgtgctggattatctgttgaaaccctttaacaaagcacaggaggcgttgcgcgaacgatga

SEQ ID NO: 260300 - DNA, 408 bp, Klebsiella pneumoniae
atgaacattagcgatgtagcaaaaattaccggcctgaccagcaaagcaatccgcttctatgaagagaaggggctggtgacgccgccgatgcgtagcgaaaatggttatcgaacctacacgcagcagcatctcaacgaactgaccttactgcgccaggcgcgccaggtgggctttaacctggaagagagcggcgaactggtgaatctgtttaacgacccgcagcgtcacagcgccgatgtaaaacggcgcaccctggagaaagtggcggagatcgaacgacacattgaggagctgcaatccatgcgcaaccagctgttggcgctggcgaatgcctgccctggcgatgacagcgccgactgcccgattatcgaaaatctctccggctgctgtcatcatcgggcggggtga

SEQ ID NO: 260301 - DNA, 204 bp, Klebsiella pneumoniae
atgaaggagcaaaggaaaatacccctgacgcatattatgattatcggtgcgtttatttttgccttcttgcaagtagtattattagcctccctggttcacgctgtgaatgttaacaacgaaatccaggaaggcttatttcagtcggggcgcattatggtagaaagtttgcagcatattctttcggtgcaaacggggattaactga

SEQ ID NO: 260302 - DNA, 423 bp, Klebsiella pneumoniae
atgatgaatagctccattaaatcgttttccctgctggcggttatattactggctggctgtagttcacccacttcccgcatcgcagattgccaggcgcagggcgtcagccatgacacctgttatctcgcagaacaacagcgtcagacggctattttaagtgcatccgaggcgcaggcatttaaaaatgcagaagccgcacaacatgcccaggcggcaaagaaagccatttataaaggatttggaatgacctttagaatgagcagtaaaaactttgcttatctcaatgattcattatgtgcaattgatgaagacaataaagatgccactgtttatcagtcaggtctgtataacgtcattgtttatcatcacacaggaaaagtcgccttaatgaaggaaggtcaatttgtgggttatttaaaatga

SEQ ID NO: 260303 - DNA, 1017 bp, Klebsiella pneumoniae
atgaaaactgtaaacgtagctttactggcactcataatttcagcaacatccagccctgttgttttagctggtgataccattgaagcggcggcaacagagctttcagccattaactctggcatgtcgcaatcggagattgagcagaagattacccgctttttagaacgcacagacaacagccccgctgcgtatacctatttgactgaacatcactacatcccttctgaaacacctgataccactcagactcccactgtccagacagatcctgacgcaggacaaaaaaccgttgccgctacaggtgatgtacagacaaccgcccgttatcagagcatgatcaacgcccgacagtctgcggtaactgatgcccagcaaacgcaaattacagagcaacaggcgcagatcgtagccacacaaaaaacgctcgccgcgactggagatacgcaaaatactgcgcattatcaggagatgattaatgccagactggcggctcaaaatgaggctaatcagcgcactaccacggaacaagggcagaaaatgaatgcactgacaaccgatgtggcagcacaacagcaaaaagaaagggctcaatacgataaacaaatgcaaagtctggcgcagaagtctgtccaggcacatgagcaaattgaaagtctgagacaagattccgcacaaacgcagcaacagttaaccaacacgcaaaaacgggtcgcagataacagccaacaaattaacacgctcaataaccatttcgattctctgaaaaacgaagttgaggacaatcgtaaagaagccaatgcgggaactgcatcagccatcgctatcgcctcacaaccacaggtgaaaaccggtgacttgatgatggtgtcagcgggagcgggaaccttcaacggtgaatctgcggtgtctgtaggaacatcttttaatgccggaacgcatacggtacttaaagcaggtatttctgcggatacacaatctgatttcggtgcgggtgtcggcgtgggatattcgttctaa

SEQ ID NO: 260304 - DNA, 363 bp, Klebsiella pneumoniae
atgaatgaatttgagaagatttttaatgaaatgaatctggaccgggcattgctaccgatcctttttcgttcgaaccggtcaacagtgtggaaatatttgagtggtgatagtacggctcctgcctcagctatgtcactgattatgctgttgcagttaatccagaaacgaaaccccgatctgttagccgaatggttaacgctttctgatttcaccattccgccagaagtttacctggaccagcctgattactggaaagggtgggtgtatacgcaacacaaggtcaataaaaacgtcctggaatatctaaaaaaacattatccggatgaagaccaaaaaaacatgaataaaggtagtgacgagtaa

SEQ ID NO: 260305 - DNA, 459 bp, Klebsiella pneumoniae
atgatggagttaatggtcgttcatccacatattttctggctcagtctcggcgggttgttgctggcagccgagatgctgggcggaaatggttatttgttgtggagcggcgtggccgcggtgattaccggcctggtagtctggctggtgccgctgggttgggagtggcaaggagtaatgtttgccatcctgacgctgctcgccgcctggctgtggtggaaatggttgtcgcggcgggtgcgcgaacaaaagcacagcgatagtcatttaaaccagcgggggcagcagctgattggtcgacgttttgtgctggaatcaccgctggtcaatgggcgaggtcatatgcgcgtcggcgacagttcatggcctgtcagcgccagcgaggatctcagtgcaggtacgcatgttgaggtgattgcgatagaagggataacgctgattatccgtgcggtcatcgcctga

SEQ ID NO: 260306 - DNA, 918 bp, Klebsiella pneumoniae
atgcttatctttatcccgattctcatttttgtcgcgctggtcattgtcggcgcgggcgtcaaaatcgtgccgcagggctatcagtggacagtagaacgctttggtcgctataccaaaacgttacagcctgggctaagtctggtggtgccgtttatggatcgcattggtcgcaagatcaatatgatggagcaagtgctcgatatcccttcccaggaagttatctcgaaagataacgccaacgttaccatcgacgcagtctgttttattcaggtgattgacgcgccacgcgctgcctatgaagtcagcaatctggagctggcgatcatcaacctgaccatgactaacatccgtaccgtgctgggttcaatggaacttgacgaaatgctctctcagcgcgacagcatcaactcacgcctgctgcgtattgtcgatgaagccactaacccgtgggggattaaagtcacccgtattgaaattcgcgacgtgcgcccaccggcagagcttatctcttcaatgaacgcgcagatgaaagcagaacgtaccaaacgcgcttacatcctcgaagcggaagggatccgtcaggcggaaatcctcaaagctgaaggtgaaaaacagtcgcaaatcctgaaagcggaaggcgaacgtcagtcggcgtttttacaggctgaagcgcgtgaacgttctgccgaagcagaagcccgcgccaccaaaatggtgtctgaagctatcgcctccggtgatattcaggcggtgaactacttcgtagcgcagaaatacaccgaagcgttacagcagatcggttcctccagtaacagcaaagtagtgatgatgccattagaggccagcagcctgatggggtcgattgccgggattgccgagctggtgaaagacagcgccaacaaacggactcagccatga

SEQ ID NO: 260307 - DNA, 678 bp, Klebsiella pneumoniae
atgcaggaaaatagtcctttgcttcagctacaaaacgtaggatatctggcgggtgatgcgaagattcttaataacatcaatttttcgctgcgtgctggcgaatttaagttaattaccggtccttctggttgtggcaaaagtacgctgctaaaaatagttgcttcattgatcagcccaaccagcggaacgttactgtttgaaggtgaggatgtcagcacactaaagccagaaatctaccgccagcaagtctcttactgcgcccagacaccgacgctgtttggcgatacggtatacgataatctgatctttccctggcagatccgtaaccagcagcctgacccggccatttttctcgattttctcgaacgcttcgctttaccggacagcattttgacgaagaatatcgccgagctatctgggggtgaaaaacaacgcatctcattaattcgtaacctgcaatttatgccgaaggttttattgctggatgaaatcaccagtgcgctggatgaaagtaataaacataacgttaatgagatgatccaccggtatgtgcgcgagcaaaatattgccgtgctgtgggtgacacacgataaagacgaaattaatcatgcggataaggtgattacactgcaaccgcatgccggagaaatgcaggaagcacgctatgaactcgcataa

SEQ ID NO: 260308 - DNA, 780 bp, Klebsiella pneumoniae
atgaactcgcataatattactaacgaatcattggcactggcattaatgctggtggtggtggcaatcttaattagccataaagaaaaactggcgctggagaaagatattctctggagcgtcgggcgagcgataattcagctgattattgtcggctatgtgctgaagtatattttcagcgtggatgatgccagcctgacattattgatggtgttatttatctgctttaatgcggcgtggaacgcgcaaaaacgcagtaaatatattgctaaagcttttatctcatcgtttattgccattacggtcggggcgggaattaccctggcggtgctgattctctctgggtcgattgaatttatcccgatgcaggtgatccctatcgccgggatgatagccggtaacgccatggtagcggtggggttgtgttacaacaatttagggcaacgggtgattagcgaacagcaacagattcaggagaaactgagtcttggcgcgacgccgaaacaggcttcagcgatattgattcgcgacagtattcgcgcggctttaattccgacggtcgattcagcaaaaacggttggcttagtgagtttaccaggaatgatgtccgggctgatatttgccgggattgatccggtgaaggcgattaaatatcagattatggtgacctttatgctgctctcaactgccagcctgtctaccattattgcctgctatttaacctatcgtaaattttataattcgcgccaccagttggtggtgacgcaattgaagaagaaatga

SEQ ID NO: 260309 - DNA, 855 bp, Klebsiella pneumoniae
atgtccgtagaaaatattgtcaacattaacgaatctaacctgcaacaggttcttgaacagtcgatgaccactccggtgctgttctatttttggtctgaacgtagccagcactgtttgcagttaaccccaattctggaaagcctcgcggcgcagtacaacgggcaatttattctggcgaagctggactgcgacgcggagcagatgattgccgcccagtttggtctgcgcgcgattccgaccgtgtatctgttccagaacgggcaaccggtagacggcttccaggggccgcaaccggaagaggcgatccgcgccctgctggataaagtgctgccgcgcgaagaagaactgaaagcacagcaggcgatgcaactgatgcaagaaggcaattacaccgacgccctgccattgctgaaagacgcctggcagttgtcgaatcagaacggggagatcggcctgctgctggcagaaacgctgattgcgctgaaccgttctgaagatgctgaagccgtgctgaaaaccattccgttacaggatcaggacacccgctatcaggggctggtggcgcaaatcgaactgctgaagcaggcggctgatacgccggaaattcaacagctgcaacagcaggtggcagagaatccagaagatgccgcactggcgacgcaactggcgctgcaactgcatcaggttgggcgcaatgaagaggcgctggagttactgtttgggcatctgcgtaaagatctcactgccgcagacggtcagacgcgtaaaacgttccaggagatcctcgctgcgctgggtacaggtgatgcactggcgtcgaagtatcgccgccagctgtatgcgttgttgtattga

SEQ ID NO: 260310 - DNA, 771 bp, Klebsiella pneumoniae
atgcaaaaatcggtcttaattaccggatgttccagtggaattggcctggaaagcgcgctcgaattaaaacgccagggttttcatgtgctggcaggttgccggaaaccggatgatgttgagcgcatgaacagcatgggatttaccggcgtgttgatcgatctggattcaccagaaagtgttgatcgcgcagccgacgaagtgatcgccctgaccgataattgtctgtatgggatctttaacaatgccggattcggcatgtatggccccctttccaccatcagccgtgcgcagatggaacagcagttttctgccaactttttcggcgcacaccagctcaccatgcgcctgttacccgcgatgttaccgcacggtgaagggcgtattgtgatgacctcatcggtgatgggattaatctccacgccgggtcgcggcgcttacgcagccagtaaatatgcgctggaggcgtggtcggatgcgctgcgcatggagctacgccacagcggaattaaagttagcctgatcgaacccggtcccattcgtactcgcttcaccgacaacgtcaaccagacgcaaagtgataaacctgtcgaaaatcccggcatcgccgcccgctttacgttggggccggaagcggtggtcgacaaagtgcgccatgcttttattagcgagaaaccgaagatgcgctatccggtaacgctggtgacctgggcagtaatggtgcttaagcgcctgctgccggggcgcgtgatggacaaaatattgcaggggtaa

SEQ ID NO: 260311 - DNA, 594 bp, Klebsiella pneumoniae
ttgcccttcctgttcctggtcctgttaaccttccgtgccgccgcagcggacacgttattgattctgggtgatagcctgagcgccgggtatcgaatgtctgccagcgcggcctggcctgccttgttgaatgataagtggcagagtaaaacgtcggtagttaatgccagcatcagcggcgacacctcgcaacaagggctggcgcgccttccggctctgctgaaacagcatcagccgcgctgggtgctggttgaactgggcggcaatgacggtttgcgtggttttcagccacaacaaaccgagcaaacgctgcgccagattttgcaggatgtcaaagccgccaacgctgaaccattgttaatgcaaatacgtctgcctgcaaactatggtcgccgttataatgaagcctttagcgccatttaccccaaactcgccaaagagtttgatgttccgctgctgcccttttttatggaagaggtctacctcaagccacaatggatgcaggatgacggtattcatcccaaccgcgacgcccagccgtttattgccgactggatggcgaagcagttgcagcctttagtaaatcatgactcataa

SEQ ID NO: 260312 - DNA, 687 bp, Klebsiella pneumoniae
atgccagcggaaaacattgttgaagttcatcatcttaagaagtccgtcggtcagggggagcatgaactctccatcctcaccggagttgagctggttgtcaaacgtggcgagaccatcgcactggtgggtgagtcgggatcgggtaagtcaaccttgctggcaatcctcgccgggctggatgacggcagcagtggcgaagtgagtctggtgggacaaccgctacataatatggacgaagaagcgcgggcaaagttgcgcgcgaagcacgtaggttttgtttttcagtcatttatgttaattcctacccttaacgcgctggaaaacgtcgagcttccggcgctgctgcgcggtgagagtagcgcggaaagtcgtaacggggcgaaagcgttgctcgaacagttagggctgggtaaacgtcttgatcatcttccggcacagctttccggcggcgaacagcaacgagtggcgctggcgcgagcctttaacggtcgacctgatgtgctgtttgccgacgaacccaccggcaaccttgaccgccagacgggcgataaaattgccgacctgctgttttccctcaaccgtgagcatggcaccacgttgattatggtgacccacgacctgcaactggcggcacgctgcgaccgctgcttacggctggtgaacgggcagttgcaggaggaagcatga

SEQ ID NO: 260313 - DNA, 2415 bp, Klebsiella pneumoniae
atgattgcacgttggttctggcgcgaatggcgctcgccgtcgctattaattgtctggctggcgctaagcctggcggtggcctgcgtgctggcgctgggcaatatcagcgatcgcatggagaagggcttaagccagcaaagccgggagtttatggcgggcgatcgggcgttgcgcagttcgcgcgaagtgccgcaagcgtggctggaggaagcgcaaaagcgcggcctgaaagtcggcaagcagctgactttcgccaccatgacatttgcaggcgacacaccgcagctggcgaacgtcaaagcggtggatgatatctatccgatgtatggcgatctgcaaaccaatccccctggcctgaaaccgcaggcgggcagcgtattgctggccccacgcctgatggcactgcttaacctgaaaacgggcgacaccatcgacgtgggtgatgccaccttgcggattgccggagaagtgattcaggaaccggattccggttttaaccccttccagatggctccgcgtctgatgatgaatctggcggatgtcgataaaaccggagccgtgcagccgggaagtcgggtcacctggcgctataaattcggcggcaacgagaaccagctcgacggctatgagaaatggttgttacctcagcttaaacccgaacaacgctggtacggtctggaacaggacgaaggcgcgctggggcgctcgatggaacgctcgcaacagttcctgctgctttcggcgcttctgaccttgctgctggcagtggcagcggtggcggtggcgatgaatcattactgtcgcagtcgctacgatcttgtggcgatcctcaaaacgctgggggcagggcgagcgcaactgcgtaagctaatcgtcggtcagtggttgatggtgctggcgctttcagccgttaccggcggggcgataggcctgttgttcgaaaacgtgttgatggtgctgctcaagcccgttctgcctgccgcactaccgccagccagcctctggccgtggctatgggcgctgggcaccatgacggttatctcgctgctggtggggctacgaccgtaccgcttgttgctggcaacgcagcctttacgcgtattacgtaatgatgtggtagcgaacgtctggccgctcaagttttatctgccgattgtcagtgtggtggttgtgctgctgctcgccggattaatgggtggcagcatgctgctttgggcggtgctggcgggcgcggtagtactggctttgctgtgcggtgtgctgggctggatgctgctgaatgtacttcgccgcatgacgctgaaatcgctatctctgcgcctggcggttagccgcctgttacgtcagccgtggtcaacgttaagccagctttcggcattttcgctctcctttatgctgttggcactgctgctggtgctgcgtggcgatctgctcgaccgctggcagcagcagctacctccagaaagcccgaactactttttaattaacatcgccacagaacaggtagcaccgctaaaagcgttcctcgcggaacatcagatagtcccggaatcgttttatccggtggtgcgggcgcggctgacggcgattaacgataagccgacagaaggtaatgaagatgaggcgcttaaccgcgaactcaatcttacctggcaaaatacgcggcccgatcataatccgattatcgccggtaactggccgccaaaagccgatgaagtgtcgatggaagaggggctggcgaaacgcttaaacgttggcctcggcgatacagtcacctttatgggcgatacccaggagttccgcgctaaagtgaccagcctgcgcaaagtggactgggaaagtctgcggcctaatttctattttattttcccggaaggggcattagacgggcaaccgcagagctggcttaccagtttccgctgggagaatggcaatggcatgttgacgcaactcaaccgccagttcccgaccattagcctgttagacattggcgcgattttaaaacaggtcggtcaggtgctggagcaggtaagtcgggcgctggaggtgatggtggtgctggtcactgcctgcggtatgttgctgttgctggcacaggtgcaggtgggaatgcgtcagcgtcatcaggagctggtggtgtggcgcacactcggtgcggggaaaaaactgctgcacaccacgttgtggtgtgaattcgccatgctcgggtttgtttctggcctggtggccgcaattggtgcggaaacggcgctggcagtgttgcaggcgaaagtgtttgatttcccgtgggagccagactggcgattgtggattgttctgccgtgcagcggtgcgctgctgctgtcgcttttcggcggctggctgggtgcgcgactggttaagggtaaggcgctgttcaggcagtttgcgggatga

SEQ ID NO: 260314 - DNA, 1095 bp, Klebsiella pneumoniae
atgcaagagagacacacggaacaggactatcgtgccctgctgattgctgatacgcccattattgatgttcgtgcccctatagagtttgagcaaggcgcaatgcccgccgctatcaatctgccgttaatgaataacgatgaacgcgccgccgttggaacctgctataaacagcaagggtcagacgcggcgctggcgctggggcataaactggtggcgggtgaaattcgtcagcagcgtatagacgcctggcgggcagcgtgcctgcaaaatccgcaaggtattctctgctgcgcccgtggcggtcagcgctcacatattgtgcaaagctggttgcatgcagcggggattgattatccgctggtagaaggcggttataaggcactgcgccagaccgcgattcaggcgaccattgaactgtcacaaaaaccgatagtgctgattggcggttgtaccggcagcggtaaaacgctattagtgcaacaacagccaaacggtgttgatctggaagggctggcgcgtcatcgcggttcggcgtttggtcgcacgttacaaccacaacttagccaggcaagttttgaaaacctgctggctgccgaaatgctaaaaaccgacgcccgtcagaatttgcgcctgtgggtgctggaagatgaaagccggatgatcggttcgaatcacctgccggaatgtctgcgcgaacgaatgacccaggcggcgattgcggtggtagaagatccgtttgagatccgtcttgagcgcctgaacgaagagtatttcttgcgtatgcatcatgattttacccacgcgtacggcgacgaacagggctggcaggaatattgcgaatacctgcatcacggactttcggcgattaagcgtcggctggggttacagcgatataacgaactggctgcaaggctggatgctgcgctgacaacgcaactcaccaccggcagcaccgacggtcatctggcctggctggtgccgttacttgaagaatattacgacccgatgtatcgctatcagcttgagaaaaaagctgaaaaagttgtctttcgcggtgagtgggcggaagtggcggaatgggttaaggcgcagtga

SEQ ID NO: 260315 - DNA, 927 bp, Klebsiella pneumoniae
atgttcgatccagaaaccttgcggactttcattgcggttgctgaaacaggaagtttttcaaaagcggcagaacgattgtgtaaaaccacggcgacgatcagttatcgcattaaacttctggaagagaataccggagtggcgctgtttttccgcacgactcgcagcgtgacgttgacagcggctggcgagcatctactttctcaggccagagactggctgagctggctggaaagtatgcccagcgagctgcaacaggtgaatgatggcgtggaacgccaggtgaatattgtcatcaacaacctgctctacaccccccaggccgtcgcccagctgctggcgtggctgaatgaacgttacccgtttacccagtttcacatctcccgacaaatctatatgggcgtctgggactcgctattgtacgaaggtttttcactggctatcggcgtcacgggaaccgaggcgctggcaaatacctttagtcttgatcccttaggatcggtgcaatggcgctttgtcatggcggcggatcatccgctggcgaacgttgaagagccgctaacagaagcacagttgcggcgctttccggcggtcaatattgaagacagcgcccgaacactaaccaaacgcgtcgcctggcgattgccggggcaaaaagagattattgttcccgatatggaaacgaaaatcgccgcccatctggcgggcgttggcattggttttttgccaaaatcactttgccagtcaatgatcgataatcaacaactggtcagccgggtaatcccaacgatgcgccctccttcgccattgagtctggcatggcgcaaatttggcagcggcaaagcggtagaagatattgtgaccttgtttacccagcgcaggccagaaatcagcggatttttagaaattttcggcaacccacgcagttaa

SEQ ID NO: 260316 - DNA, 483 bp, Klebsiella pneumoniae
atgaaacttcaggtattaccgttaagtcaggaagcctttagtgcttatggcgatgtaatcgaaacgcagcaacgggattttttccatattaacaatggtctggtagagcgttaccacgatttggcgctggttgagattcttgagcaagaccgtacgctcatcagcattaaccgcgcgcaaccggcgaatctgccgctgaccattcacgaactcgaacgtcatccgctgggcactcaggcctttatcccgatgaaaggtgaagtgtttgtggtggtcgtggcgttaggtgacgacaaaccagacctgtcaacgctgcgggcgtttatcaccaacggtgaacagggggtgaattaccatcgtaatgtctggcatcacccacttttcgcctggcagcgcgtcaccgattttctgaccatcgatcgcggcggcagtgacaactgtgatgttgaaagtattcctgaacaggaactctgttttgcgtga

SEQ ID NO: 260317 - DNA, 816 bp, Klebsiella pneumoniae
atgacggaagttagacggcgcggcaggccaggacaggcggagcctgtggcacagaagggcgcacaggcgttagagcggggaattgcgattctgcaatatctggaaaaaagtgggggaagttcatcggttagcgatatttctctcaatctggatttgccgctctccacgacctttcgcttgctgaaggttttacaggcagcggattttgtctatcaggacagtcagttaggctggtggcatataggattaggtgtctttaatgtcggtgcggcgtacatccataaccgcgatgtcctctccgtcgccgggccgtttatgcgccgcctgatgttactttccggcgaaacggtcaatgtcgcgattcgtaacggcaatgaagcagtattaattggtcagttagagtgtaaatcgatggtcaggatgtgtgcgccactgggcagtcgtctgccgctgcatgcttccggtgcgggcaaggcgttgctttatccgctggcggaagaggagttgatgagcatcattctgcaaaccggtttgcagcagtttacgccaactacgcttgtggatatgcccaccttgctgaaggacctggaacaagcgcgtgaactgggctataccgtagataaagaagagcatgttgtaggtctgaattgcatagcttcagcaatttacgatgatgtaggtagcgttgttgccgctatctccatctccgggccttcatcaagactgacagaagatcgttttgtcagtcagggtgagctggtcagagacaccgcccgcgatatcagcacggcgttgggactgaaagcacatccatag

SEQ ID NO: 260318 - DNA, 777 bp, Klebsiella pneumoniae
atgttacgtttctctgctaatttatcgatgttatttggtgaatatgattttctcgcccgttttgagaaagctgcgcagtgtggttttcgcggcgttgaatttatgttcccttatgactatgacattgaagaattaaaacaggtgctggcgagtaataaactcgaacatacgttgcacaatttaccggcaggtgactgggcggcgggcgagcggggtattgcttgtattcctggtcgtgaagaagagtttcgggatggcgtagcagcagcgattcgttatgctcgtgcgctgggtaataaaaaaattaactgtctggtcggtaaaacgccggctggtttcagcagtgaacagattcacacaacgcttgtagaaaacctgcgttatgccgcgaatatgctgatgaaagaagatattttattactgattgaacctatcaaccattttgatattcctggtttccatctcaccggaactcgccaggcactgaaactgattgatgatgttggttgctgcaatttgaaaattcagtatgacatttatcacatgcagcggatggaaggtgaattaaccaacactatgacgcaatgggccgataaaattggtcacctgcaaattgccgataatccgcatcgcggggaaccggggaccggagaaattaattatgattatctctttaaggtaatcgaaaattctgactacaacggttgggttgggtgtgaatataaaccccaaactaccacggaagccggtttacgctggatggatccgtaccgttaa

SEQ ID NO: 260319 - DNA, 1302 bp, Klebsiella pneumoniae
atgttcaattttgcagtgagccgcgaaagcctgttatcaggatttcagtggtttttctttattttttgcaacacggttgtggttcctcctacgctactttctgcttttcagttgccgcaaagtagcctgcttacgctcacgcaatatgcttttcttgctaccgcactggcctgcttcgctcaggcgttctgcggtcatcgtcgcgctattatggaagggcccggtggcctgtggtggggaaccatccttactatcacccttggtgaagcatcgcgcgggacaccgatcaacgatatcgctaccagcctggcggtggggattgctctctctggcgtgctgacgatgttgattggttttagcggattaggccatcgcctggcacggttatttacgccgtcggtgatggtcttgtttatgttgatgctgggcgcgcagctgaccactatctttttcaaaggtatgctcgggctgccgtttggcatagccgacccgaattttaaaattcagttaccgccgttcgcgctctcggtggcggtgatgtgcctggtactggcgatgattattttcctgccgcaacgttttgcccgttatggcctgctggtcggcaccataaccggctggttgttgtggtacttttgctttccttcttcgcattcgctctccggtgagttgcactggcagtggttcccgctcggcagtggcggtgctttgtctccggggattattctgacggcggtgattacaggtctggtgaatatcagcaatacctacggtgcgattcggggcacggatgttttttatccgcagcagggcgcggggaatacgcgttatcgtcgcagctttgtggcgaccggatttatgacactgataactgtaccgctggcggtaattccattttcaccgtttgtttcatccattggtttattaacccagactggcgattacacgcggcgttcgtttatttatggcagcgttatttgcctgctggtggcgctggttccggcactcacacgactgttttgcagtatccctttacccgtgagtagcgcggtcatgctggtttcttatctgcctttactcttttcggcgctggtgtttagccagcaaataacctttaccgctcgcaatatttatcgactcgcattgccgttatttgtcggcatatttttaatggcattaccgcctgtgtatctgcaagaccttccattaacgctgcgtcctctgctcagtaacggcttattggtcgggatcttactggctgttcttatggataaccttattccgtgggaacgcatcgaataa

SEQ ID NO: 260320 - DNA, 1146 bp, Klebsiella pneumoniae
atgaagattgtcattgcgccagactcttttaaagagagcttaagtgcagaaaaatgttgtcaggcaattaaagccgggttttcgaccctctttcccgatgcgaactatatctgtttgccgatagcggatggcggcgaagggacggtggatgcgatggtcgccgcgacgggtggtaacatcgtgacgcttgaagtctgcgggccgatgggcgaaaaagtgaatgctttttatggccttaccggcgacgggaaaacagcggtgattgagatggcggcagcaagtggcctgatgctggtcgcgcctgaaaagcgtaatccgttgctggcctccagttttggtacgggggagttaattcgtcatgcgctggataacggcattcgccatattattctcggcattggcggcagtgcgacggtcgacggcggtatgggcatggcgcaggcgcttggtgtgcgtttccttgatgccgacggccaggtgctggcggctaacggcggcaatttagcgcgcgtggcaagcattgaaatggatgaatgcgatccgcgtctggcgaactgccatattgaagtagcatgtgacgttgataacccgctggtaggggcacgcggcgcggcggcggtgtttggcccgcaaaaaggggcaacgccggagatggtcgaagaacttgaacaggggctgcaaaattacgcccgtgttttacaacagcaaactgaaattaatgtctgccagatggcgggcggcggcgctgcgggcggtatgggtattgcggcggcggtattcctcaatgcggatattaaaccgggcattgaaattgtgttgaatgcggtcaatcttgcgcaggcagtgcagggcgcagcactggtgatcaccggggaagggcgcatcgactcgcaaacggcaggcggtaaagcgccgctgggtgtggcgtcggtggcgaagcagtttaatgtaccggtgattgggattgctggcgtattgggtgatggcgtggaagtggtgcaccagtacggcattgatgcggtattcagcattttgccacgtctggcacctttagccgaagtgctcgccagcggtgaaatcaatctcttcaacagcgcgcgaaatattgcctgcgccattaaaataggtcagggaattaaaaactga

SEQ ID NO: 260321 - DNA, 786 bp, Klebsiella pneumoniae
atgggatatttaaataacgtcaccggttaccgcgatgatttactggctaaccgtgcgattgttaaacacggtaatttcgcgctgctaaccccggacggtctggtaaaaaatattattccgggctttgaaaattgtgacgcgacaatcctctccacgccaaagctgggggcctcttttgttgattatctggtcacactgcatcaaaacggcggcaaccaacagggcttcggtggcgaaggcattgaaacgttcctgtatgtgatctctggaaatatcactgccaaagccgaagggaaaacatttaccttaagtgaaggtggctatctttattgcccgccaggctccttaatgacgtttgttaacgcccatgccgaagacagccaaatctttttatataagcgtcgctatgttccggtagaaggtcatgcgccgtggctggtttctggcaatgcctgcgaactcgaacgcattcattatgaaggcatggacgatgttattctgctggattttctgcccaaagagttaggttttgatatgaacatgcatatcctctcttttgcgccaggtgccagccacggttatatcgaaactcacgtccaggaacacggtgcctatattctttccggtcagggggtttataacctcgacaataactggatcccggtgaaaaaaggcgattacatctttatgggcgcttattccttacaggccggttatggcgtaggacgtggtgaagcgtttagttatatttactcaaaagattgcaaccgcgacgtagagatttaa

SEQ ID NO: 260322 - DNA, 1236 bp, Klebsiella pneumoniae
atgattacacatttccgtcaagccatagaagaaacgctgccctggctttcctcttttggcgctgacccaacgggtgggatgacccgtttactttattcgccggaatggctggaaacccagcagcaatttaaaaaaagaatggcagcaagcgggctggaaacacgtttcgatgaagtggggaatttatacggtcgcctgagtggcaccgaatatccacaggaagtggttctgagcggttcgcatatcgataccgtggttaacggcggtaacctcgacgggcaattcggcgcgctggcggcgtggctggcaattgactggttgaaaacgcaatacggcgcgccgttacgtacggtcgaagtggtggcgatggcagaagaagaaggcagccgcttcccgtatgtcttctggggcagtaaaaatatctttgggctggcgaatcctgacgacgtgcggaatatctgtgatgccaaaggaaatagttttgtcgatgcgatgaaggcttgcggatttactctgccgaacgccccactaactccgcgtcaggatattaaagcctttgttgaactgcatattgaacagggctgtgtgctggaaagtaatgggcagtcaattggcgtggtgaatgcaattgtcgggcagcgtcgttatacggtgacgctgaacggcgaatcaaaccatgcaggcaccacgccgatgggttatcgtcgtgatacggtttacgctttcagtcgcatttgccatcagtctgtcgaaaaagcgaaaaaaatgggcgatccgctggttctgacctttggcaaagtagagccgcgcccgaatacggtgaatgtggtgccgggtaaaaccacgttcaccattgattgtcgtcataccgacgctgccgtgctgcgcgatttcacccagcagttagaaaacgacatgcgggcgatttgcgatgaaatggacattggtattgatatcgatttatggatggacgaagaacccgtgccgatgaataaggacctggtcgccaccctgacagaattgtgtgaaagagaaaaactgaattaccgggtgatgcacagtggtgccgggcacgacgcgcaaattttcgcgcctcgcgtaccaacctgcatgatttttatccccagcatcaacgggatcagccataacccggcggaacgcaccaatattaccgaccttgccgaaggggtcaaaacgttggcactcatgctttatcaacttgcctggcagaaataa

SEQ ID NO: 260323 - DNA, 1050 bp, Klebsiella pneumoniae
atgaaaatcagtcgggaaacactccaccagctaatcgagaataaactctgccaggctgggttaaaacgtgagcacgctgcaaccgtggctgaagtattggtttacgccgatgccagagggatccactctcatggcgcggtgcgtgttgaatactacgcagaacgcatttcaaaaggcggcaccaaccgtgaaccggaatttcgtcttgaagaaaccgggccgtgttcggcaattttacatgccgacaatgccgccggacaggtcgcggcgaaaatgggtatggaacatgccataaaaaccgcccagcaaaatggcgttgcggtggtcggtatcagccggatgggtcacagcggcgcaatctcttattttgtacagcaggcagctcgcgcagggttaattggcatttcgatgtgccagtccgatccaatggtggtgccgtttggcggcgcggaaatttactacggtactaacccactggcctttgccgcgccgggagaaggcgacgagatccttacctttgatatggcgactaccgtacaggcatggggaaaagtgctcgacgcccgctcgcgtaatatgtctatcccggatacctgggcggtcgataaaaacggagcaccaacaaccgatccgttcgcggtacatgctctgctccccgccgccgggccgaaagggtatggcctgatgatgatgattgacgtcctctcaggcgtcttactcggcttaccgttcgggcgacaggttagttcgatgtatgacgatttacacgccgggcgtaatttggggcaattacatatcgttattaacccgaactttttctcctccagcgaattattccgtcaacatcttagccagaccatgcgcgaattaaatgccattacccccgcgcccggttttaaccaggtttattatcccggacaggatcaggatattaaacaacgcaaagccgccgtcgaaggcatcgaaattgttgatgatatttaccagtatttaatttcagacgcgctttataacacgtcatacgaaacgaaaaatccctttgcgcaataa

SEQ ID NO: 260324 - DNA, 1668 bp, Klebsiella pneumoniae
atgatccacgcctttattaaaaaagggtgttttcaggattcggtcagtttaatgattatttcacgaaaactaagcgaatcagaaaatgttgatgatgtttctgtaatgatgggtacgcccgccaataaagcgttattagagacgacaggtttctggcatgacgattttaataacgccacgccgaacgatatttgcgtggcaattcgtagcgaagcggcggatgcggggatcgcgcaggcgattatgcaacagcttgaagaggcgctaaaacaactggcgcaggggtcaggcagcagccaggcgttgacgcaggtgcgtcgctgggacagtgcctgtcagaaattacccgacgccagtctggcgctgatttcagtggctggcgagtatgcggcggagctggcgaatcaggcgctggatcgcaacctcaacgtgatgatgttctccgataacgtcacgctggaagatgaaatccaacttaaaacccgcgcgcgggaaaaaggcttgctggtgatggggccggactgcggtacgtcgatgattgccggcacgccgctggcttttgctaacgtgatgccggaaggcaacattggcgtcattggcgcttccggtaccgggattcaggagctgtgctcgcagattgcgctggcaggggagggaattacccacgcgattggtcttggcgggcgcgacctcagccgtgaagtgggcggcatcagtgcgctgacggcgctggaaatgctcagtgcagacgagaaaagcgaagtgctggcatttgtttcaaaaccacctgccgaagcggtgcgtctgaaaattgttaatgccatgaaagcaaccggcaaaccgacggtggcgctgtttttaggttataccccggcggtggcccgcgacgagaatgtctggtttgcctcctcgctggatgaggccgcacgcctggcttgcctgctttcacgcgttacggcgcgacgtaacgcgataacgcctgccagcagcggatttatttgcggtttgtataccggcggtacgctggctgccgaagcggcgggattacttgccggacaccttggcgtggaagccgatgatgcccatcatcacggcatgatgctcgacgccgacggacatcagatcctcgacctgggcgatgatttttacaccgtcgggcgtccccatccgatgatcgacccgaccttacgcaacctgttaattgccgatctcggcgctaaaccgcaagtgcgcgtgttgctgcttgatgtcgtgattggcttcggtgcgactgccgatcctgccgcctcgctggtgagcgcctggcaaaaagcctgtgccgcgcgtccagacaatcaaccactgtatgccattgccacggtgacaggcaccgaacgtgacccgcaatgccgctcgcaacaaatcgccacgctggaagatgcggggatcgcggtcgtgagttcgctgccggaagccaccttgctggcggcagcgttaattcatccgctctcgcctgccacacagcaacacacaccgtcattactggaaaacgtcgccgtgattaacatcggattacgcagctttgcgctggcgctacaaagcgccagcaaaccggttgtgcattaccaatggtcgccagtcgccggcggcaataaaaaactggctcgtttattagaacgtttgcaataa

SEQ ID NO: 260325 - DNA, 816 bp, Klebsiella pneumoniae
atgacgatcatccatcctctacttgccagccgtagcgcaccgaattatcgccagtcatggcggttagcgggcgtgtggcgacgggcgattaacctgatgacggaaagcggcgaactgttaacgctgcatcgtcagggtagtggtttcggccccggcggatgggtgcttcgccgcgcgcaattcgatgtgttatgcggtggattatgcggcaatgaacgaccacaggttgtggcgcaagggattcgcctcgggcgtttcacggttaaacagccacagcgttattgtttgctgcgtattacgccgcctgcgcatcctcaaccgcttgccgttgcatggatgcaacgcgcggaggaaaccgggcttttcgggccactggcattggcggcaagcgatccgctgcctgctgaattacgccagtttcgtcactgttttcaggccgcgctcaatggcgttaagaccgactggcggcactggctgggtaaaggccccggattaacgccaagtcatgatgacacgctgagcggaatgctgctggcggcctggtattatggcgctttagatgcgcgctccggtcgcccgttttttgcctgttccgacaatcttcaactcgttaccactgcggtgagcgtcagttatttacgttatgccgcgcaaggatatttcgcctcgccactcctgcactttgttcatgctctgagttgcccgaaacgtaccgcagcggcgattgattcgctgctggcgctggggcacacgtcaggggcagatacgctgttggggttctggcttggtcaacaattattacaaggaaaaccatga

SEQ ID NO: 260326 - DNA, 894 bp, Klebsiella pneumoniae
atgaaaacactggttgtagctcttgggggcaacgccttactccagcgcggtgaggcgctgacggcggaaaatcaatatcgcaatatcgccagtgctgtacccgcgttgacgcgcctggcccgttcttatcggctggcgattgttcacggcaacgggccacaggtggggctgctggcgttacagaatctggcgtggaaagaggtagaaccgtatccgctggatgtgctggtggcggaaagccaggggatgattggctatatgctggcgcagagtttgagcgcgcagccgcagatgccgcctgtcacgacggtgctgacgcgcattgaagtttcgcctgatgatccggcgtttttgcagccagagaagtttattggtccggtttatctgccagaagaacaagaggcactggaagcagcttacggctggcagatgaaacgtgatggtaaatacttgcgccgggtggtggcgtctccgcaaccgcgtaaaattctcgacagcgaagccatcgagttgttgctcaaagaggggcatgtggtgatttgcagtggcggcggcggtgtgcctgtgacggaagatggggcagggagtgaagcagtgattgataaagatctcgccgctgcgttgctcgccgagcagattaatgccgatgggctggtgatcctcaccgatgctgatgcggtatatgaaaactggggaacgccacagcaacgtgccattcgccatgccacaccggatgagttagcgccatttgccaaagccgatggttcgatggggcctaaggtgactgcggtgagtggttatgtcagaagccgtggtaaacctgcgtggattggggcgttatcgcggattgaagagacgctggcgggcgaagcggggacctgtatttcgctgtag

SEQ ID NO: 260327 - DNA, 723 bp, Klebsiella pneumoniae
gtggcgacactctttattgcagatcttcatctctgcgcggaagaaccggcgatcaccgccggttttctgcgttttttagcgggggaagcccgcaaggccgacgcgctgtatattcttggcgatctgtttgaagcgtggattggcgacgacgatcccaacccactccatcgccagatggcggcagcgatcaaagcggtgtccgattccggcgttccctgctatttcattcatggcaaccgtgattttctgctcggcaaacgctttgcccgtgaaagcggcatgacgttattgccggaagaaaaggtgctcgaactgtatggtcgccgggtgttgattatgcatggcgacacgctgtgcaccgatgacgcgggttatcaggcttttcgcgccaaagtccacaaaccctggctgcaaacgctattcctcgccctgccgttgtttgtgcgtaaacgcattgccgcgcgaatgcgcgcgaacagcaaagaagccaacagcagtaaatcgctggcgatcatggacgttaaccaaaacgcggtggtcagtgcgatggaaaaacatcaggtgcaatggctgatccacgggcatacccatcgcccggcagtacatgaacttatcgccaatcagcaacctgctttccgcgtcgtgttgggtgcctggcatacggaaggttcaatggtcaaagtcacggcggatgacgttgagctgattcatttcccgttttaa

SEQ ID NO: 260328 - DNA, 522 bp, Klebsiella pneumoniae
atgccaaccattattacgcacgcagccgttcccctttgcattgctttagggttgggttcgaaagtcatccctccgcgcctgttatttgccggaatcatcctggcgatgctgcccgatgccgacgtcttgtcgtttaaatttggcgttgcttacggcaatgtttttggtcatcgcgggtttacccattcgctggtgtttgcgtttgttgtcccgctgttatgtgtgctgattggacgccgatggttcagggctgggctgattcgctgctggctgtttttaaccgtctcgttgctatcgcacagcttgctggatgcggtaaccactggtggtaaaggcgttggctggctatggccgtggtcagatgaacgctttttcgctccctggcaggtgattaaagtcgcgccgtttgcattgtctcgttacagcacgccgtacgggcatcaggtgattatttctgaattaatgtgggtgtggttgccggggatgctactgatgggaatgttgtggtggcgcaggcgataa

SEQ ID NO: 260329 - DNA, 543 bp, Klebsiella pneumoniae; identical to SEQ ID NO: 6625

SEQ ID NO: 260330 - DNA, 693 bp, Klebsiella pneumoniae; identical to SEQ ID NO: 9628

SEQ ID NO: 260331 - DNA, 2610 bp, Klebsiella pneumoniae
atgaaaatacccactactacggatattccgcagaggtatacctggtgtctggccggaatttgttattcatctcttgccattttaccctcctttttaagctatgcggaaagttatttcaacccggcatttttattagagaatggcacatccgttgctgatttatcgcgctttgagagaggtaatcatcaacctgcgggcgtgtatcgggtggatctctggcgtaatgatgagttcattggttcacaggatatcgtatttgaatcgacgacagtaaatacaggtgataaatcaggtgggttaatgccttgttttaatcaggcactccttgaacgaattggccttaatagcagtgcattccccgagttagcccagcagcaaaataataaatgcattaatttactgaaagctgtacctgatgccacaattaactttgattttgcagcgatgcgcctgaacatcactattcctcagatagcgttgttgagtagcgctcacggttacattccgcctgaagagtgggatgaaggtattcctgctttactcctgaattataatttcaccggtaacagaggtaatggtaacgatagctatttttttagtgaactcagcgggattaatattggcccgtggcgtttacgcaacaatagttcctggaattattttcgcggaaatggatatcattcagaacagtggaataatattggcacctgggtacagcgcgccattattccgctgaaaagtgaactggtaatgggagacggtaatacagggagtgatattttcgatggcgttggatttcgtggtgtacggctttattcttccgataatatgtatcctgatagccagcaggggtttgctccaacggtacgtgggattgcccgtacggcggcccagctaacgattcggcaaaatggttttattatctatcaaagctatgtttcccccggcgcttttgaaattacagatttacacccgacatcttcaaatggcgatctggacgtcaccatcgacgagcgcgatggtaatcagcagaattacactattccgtattcaacagtgccaattttacaacgcgaagggcgtttcaaatttgacctgacggcgggtgattttcgtagcggtaatagtcagcaatcgtcgcctttcttttttcagggcacggcactcggcggtttaccacaggaatttactgcctacggcgggacgcaattatctgcaaattacaccgcctttttgttagggttggggcgcaacctcgggaactggggcgcagtgtcgctggatgtaacgcatgcgcgcagtcagttagccgacgacagtcgtcatgagggggattccattcgcttcctctatgcgaaatcaatgaacactttcggcaccaattttcagttaatgggttaccgctattcgacacaaggtttttatacccttgatgatgttgcgtatcgtcgtatggaggggtacgaatatgattacgattatgacggtgagcatcgcgatgaaccgataatcgtgaattaccacaatttacgctttagccgtaaagaccgtttgcagttaaatatttcacaatcacttaatgactttggctcgctttatatttctggtacccatcaaaaatactggaatacttcggattcagatacgtggtatcaggtggggtataccagcagctgggttggcatcagttactcactctcattttcgtggaatgaatctgtagggatccccgataacgaacgtattgtcggacttaatgtttcagtgcctttcaatgtcctgaccaaacgtcgctacacccgggaaaatgcgctcgatcgcgcttatgcctcctttaacgccaaccgtaacagcaacggtcaaaatagctggctggcaggcgttggtgggaccttactggaaggccacaacctgagttatcacgtaagccagggcgatacctcgaataatgggtacacgggcagcgccacggcaaactggcaggccgcttacggtacgctgggggtcgggtataactacgaccgcgatcaacatgacgttaactggcagctgtctggcggtgtggtcgggcatgaaaatggtataacgctgagccagcctttaggggataccaatgttttgattaaagcgcctggcgcaggcggtgtacgcattgaaaatcaaactggaattttaaccgactggcgcggctatgcggtgatgccgtatgccacggtttatcggtataaccgtatcgcgcttgataccaatacgatggggaattccatcgatgttgaaaaaaatattagcagcgttgtgccgacgcaaggcgcgttggttcgtgccaattttgatacccgcataggcgtgcgggcgctcattaccgttacccagggcggaaaaccggtgccgtttggatcactggtacgggaaaacagtaccggaataaccagtatggtgggtgatgacgggcaagtttatttaagtggtgcgccattgtctggtgaattactggttcagtggggagacggcgcgaactcacgctgcattgcgcactatgtattgccgaagcaaagcttacagcaagccgtcactgttatttcggcagtttgcacacatcctggctcataa

SEQ ID NO: 260332 - DNA, 1008 bp, Klebsiella pneumoniae
atgaagataatctgcagattattattggcgatggcatgtttgtggttaacaaacatatcctgggctactgtttgtgcaaatagtactggcgtagcagaagatgaacactatgatctctcaaatgtctttaatagcaccaataaccagccaggccagattgttgttttaccggaaaaatccggctgggtaggtgtgtcagcaatttgtccacccggcacgctggtgaattatacataccgtagttatgtcaccaactttattgttcaggaaactatcgataattataaatatatgaaattaaatgattatctattaggtgcgatgagtctggttgatagcgtgatggatattcagtttcccccgcaaaattatatccgtatgggaacagatcctaacgtttcgcaaaaccttccgttcggggtgatggattctcgtttgatatttcgtttaaaggttattcgtccctttattaacatggtggagatccccagacaggtgatgtttaccgtgtatgtgacatcaacgcctaacgatccgttggttacacctgtttataccattagttttggtggccgggttgaagtaccgcaaaactgcgaattaaatgccgggcaaattgttgaatttgattttggtgatatcggcgcatcgttatttagtgcggcagggccggggaatcgaccagctggtgtcatgccgcaaaccaagagcattgcgatcaaatgtacgaatgttgctgcgcaggcttatttaacaatgcgtctggaagccagtgccgtttctggtcaggcgatggtgtcggacaatcaggatttaggttttattgtggccgatcagaacgatacgccgatcacgcctaacgatctcaatagcgttattcctttccgtctggatgcagctgcggcagccaatgtcacacttcgcgcctggcctatcagtattaccggtcaaaaaccgaccgaagggccgtttagcgcgctggggtatttacgcgtcgattatcaatga

SEQ ID NO: 260333 - DNA, 516 bp, Klebsiella pneumoniae
atgagaagagtactctttagctgtttctgcgggctactgtggagttccagtggatgggcagttgaccctttaggaacgattaatatcaatttgcacggtaacgttgttgatttctcctgtaccgtaaacacagcggataaggataagacggtagatttaggcagatggcctacgacacaattactgagcgctggcgataccacggcactcgtcccttttagcctgcggctggagggatgtcctccgggttcagttgcgattttatttacgggaacgccggcatctgatgccaacctgctggctctggatgatcccgcaatggcacaaaccgtcgccatcgaattacgtaatagcgatcgctcccggctcgcactgggggaggcgagcccgactgaggaagtagatgcaaatggcaatgtcacactaaacttttttgccaattatcgagcgttagccagcggtgttcagccaggtgtggcgaaagcggatgcgatatttatgatcaattataattaa

SEQ ID NO: 260334 - DNA, 633 bp, Klebsiella pneumoniae
atgaaaccaacgtcggtgatcattatggatactcatcctatcatcagaatgtctattgaagttctgttgcaaaaaaacaatgaattgcaaattgtcctgaaaacggatgattatcgcataaccatcgattatctccgaacccgtcctgttgatttaatcattatggatatagacttgcccggaacagacggttttaccttcctgaaaaggatcaaacaaatccagagcacagtgaaagtattatttttatcatcgaaatcagaatgcttttatgctggcagagcgatacaagctggtgctaacggttttgtcagtaaatgcaatgatcaaaatgatatttttcacgccgttcagatgatcctctccggatacacttttttccccagcgaaacgctcaactatataaaaagcaataaatgcagtacgaatagttcaacggtcacggtgctatctaatcgtgaagtgaccatattacgttatctggttagcggattatccaataaagaaattgccgataagttattacttagcaataaaacagttagtgcgcataaatctaatatttatggcaagctaggtttgcattcaattgtagagcttatcgactatgccaaattatatgaattaatataa

SEQ ID NO: 260335 - DNA, 762 bp, Klebsiella pneumoniae
atgcaattgagcagcagtgaaccttgcgtggtgatcctgaccgaaaaagaggtagaggtaagcgtcaataaccatgccacgtttacccttccgaaaaattacctggccgccttcgcgtgcaacaataacgtcattgaactctcaacgttaaatcacgtattaatcacccacatcaaccgcaacatcatcaacgattatctgttgtttttaaataagaacttaacctgtgtaaagccctggtcgcggctggcaaccccggttatcgcttgtcatagccgtacaccggaagtgttccggctagccgccaaccacagcaagcagcaacccagcaaaccctgcgaagcggagttgacgcgcgcattgctttttaccgtattgtctaactttcttgagcaatcgcggtttattgccctactgatgtatatcttacgcagcagcgtccgcgacagcgtctgccgcattattcaaagcgatattcagcattactggaatctgcgaattgtcgccagttcgctatgtttaagccccagcctgctcaaaaagaaattaaaaaacgaaaataccagctatagccagattgtcacagagtgtcgtatgcgttacgccgtacagatgttattgatggataacaaaaatatcactcaggtagcgcaattatgtggctatagcagcacgtcgtactttatctctgtttttaaggcgttttacggcctgacaccgttgaattatctcgccaaacagcgacaaaaagtgatgtggtga

SEQ ID NO: 260336 - DNA, 891 bp, Klebsiella pneumoniae
atgcgtaagttcattttcgtattgctgacactgcttttggtcagccctttttcctttgcgatgaaaggtattatctggcaaccacaaaaccgtgatagtcaggttaccgatacccagtggcaggggctgatgagtcagttacgtttgcaaggcttcgataccctggttttgcaatggactcgttacggcgatgcattcacccagccagaacagcgcgcgttattgtttaagcgtgccgcagctgcgcaacaggctggcctgaagctgattgtcgggctgaatgccgatccggaattttttatgcaccagaaacagtcatccgcggcgctggaaagctatcttaatcgcctgctggctgccgatctccagcaagccagattatggagcgccgtacctggcgtaacgccggatggctggtacatcagcgcggaaattgacgacctgaactggcgcagcgaagccgcccgtcagcctttgctgacatggttaaacaacgcgcagcggttgattagcgatgtttcagcaaaaccggtttatatcagtagttttttcgccggaaacatgtcgcccgatggctatcgccaactgctggaacacgttaaagcaaccggcgttaatgtctgggtacaggatggcagcggcgtggataaacttaccgctgaacagcgtgaacgttatctacaggccagcgccgattgccaaagttccgcccctgccagcggcattgtttatgaactgtttgtcgccggcaaaggcaaaacctttacagcgaaaccgaaaccggatgcagagatcgcctcgctgttagcgaaacgttcctcttgcggtaaagacacgctctatttctctctgcgctatttgcccgtcgcgcacggcattctcgagtattaa

SEQ ID NO: 260337 - DNA, 417 bp, Klebsiella pneumoniae
atgctgcgcgccagcgcctcattctttaatggcggcaaatacagcgacgaatggcacccgaacggttcaggctggtttgcccaaaacctgtacctcgatgcagcgcaatatatccgccaggatattcaggcgtggacggcagattatcgcgtcagctggcatcagaaggtagctaacggacagactattgagccttacgctcacgttcaggacaacggctatcgtgataaaggcactcagggcgcgcagcttggcggtgtcggggtccgctggaatatctggaccggcgagacgcactacgacgcctggccgcacaaagtcagtctcggcgtcgagtatcaacatacctttaaggcgattaatcaacgtaacggagagcgcaacaatgcgtttctcaccattggagtgcactggtaa

SEQ ID NO: 260338 - DNA, 2586 bp, Klebsiella pneumoniae
atgaaggagaataaccttaatcgcgtcatcggatggtctggtttactgctgacgtctttattgagtaccagcgcactcgcagacaatatcggcaccagcgcagaagagctggggctgagcgattatcgccattttgttatttatccccgtctcgacaaggcgctgaaggcacagaaaaataacgacgaagcaaccgccatccgcgaatttgaatatatacaccagcaggtgccggataatattccgctaactttataccttgctgaagcctatcgccattttggtcatgatgcccgggcgcggctgttgcttgaggatcaactgaaacgtcacccaggagatgcccgacttgagcgcagtctggcggctattccagttgaagtgaaaagcgttacgactgttgaagaactgcttgcccagcaaaaagcgtgcgatgctgcgccgaccctgcgttgtcgcagtgaagttgggcagaatgccctgcggctggcacaattacctgtcgccagagcgcaactgaacgatgcgacgtttgctgcatcgccggaaggaaaaacgctgcgaaccgatctgctgcaacgggcaatctacctgaagcaatggtcccaggcagatacgctatacaatgaagcacgccagcagaacacattaagcgcggcagaacgccgccagtggtttgatgtgcttcttgccgggcagctggacgatcggatcctggcgctgcaatcacaggggatcttcaccgatcctcagtcatatattacttacgcgaccgcgctggcttatcgtggcgaaaaagcgcgcctccagcattatctcattgaaaataagccgctgtttaccacggacgcacaagagaaaagttggctctatctgatatctaaatacagcgccaaccccgttcaggcgttggcgaattatacggtacagtttgccgataaccgccagtatgttgttggcgcgacgctaccggtgctgttaaaagaaggtcagtacgacgcagcgcaaaaactgctcgccaccctccccgccaatgaaatgcttgaggagcgttataccgttagcgtagcgacccataacaaggctgaagctctgcgtctggcacgattgctgtatcagcaagaaccggcaaatcttacccgcctggatcaactgacctggcaactgatgcagaacgagcagtcacgcgaagctgccgatttattgctgcaacgctatcctttccagggcgatgcgcgtgtcagccagacgttaatggcgcgactggcgtctctgctggaaagtcatccttacctggcaacgccggcgaaggtggcgattttatcgaaacccttaccgctggcggagcaacgtcagtggcaaagtcagttgccgggtattgcagataattgcccggctatagttcgcttgctgggcgatatgtcgccttcctacgatgccgccgcctggaaccgtctggcaaagtgttatcgggacacgctacccggtgtggcgttgtatgcatggcttcaggccgaacaacgacaaccgaacgcctggcaacatcgtgcggtagcctatcaggcgtatcaggttgaggactacgccaccgcactggcggcctggcagaaaatcagtcttcacgacatgagcaatgaggatctgcttgctgctgccaataccgcccaggcggcaggaaatggtgcggctcgcgatcgctggcttcagcaggcagaacaacgtgggctgggaaacaatgccctctactggtggctgcatgcgcaacgttacattcctggtcagccggaactcgcactgaacgatctcacgcgctcaatcaatattgcgccttctgccaacgcttacgttgcgcgggcgacaatttatcgccaacgtcataatgtcccggcggcggtgagtgatttgcgcgccgcgctggaactggaaccgaataatagcaacacccaggcagcgctcggttacgccttgtgggatagcggtgatatcgcacagtcgcgggaaatgctcgaacaggcgcataaagggctaccggacgatccggcacttatccgacaactggcctacgtgaaccagcgtctggatgacatgcctgcgacgcagcactacgcccggctggtgattgatgacattgataatcaggcgctgataaccccactgaccccagagcaaaatcagcaacgcttcaatttccgccgtctgcatgaggaggtcggtcgccgctggacgttcagtttcgattcttctatcggcttgcgttccggcgcaatgagtaccgctaacaataatgtcggcggcgcagcgccagggaaaagctatcgtagctacgggcaactggaagccgagtaccgcatcggacgcaatatgctgctggaaggcgacctgctctcggtttacagccgtgtatttgccgatactggagaaaacggggtgatgatgccggtgaaaaatccgatgtccggcaccggtctgcgctggaagccgctgcgcgatcagatctttttcctcgccgtcgaacagcaagttgccgctgaacgggcaaaatggcgcatccgataccatgctgcgcgccagcgcctcattctttaa

SEQ ID NO: 260339 - DNA, 2238 bp, Klebsiella pneumoniae
gtggactggcttcttgatgtttttgctacctggctctacggcttaaaagtaatcgcgataacgttagcggtcatcatgttcatcagcgggctggacgatttttttattgatgtcgtctactgggtacgccgcattaaacgcaagttgagtgtttatcgccgctacccgcgaatgagttaccgcgaactgtataaaccagatgaaaaaccgttagcgattatggttccggcgtggaatgaaacgggcgtcatcggcaatatggccgagctggcggcgaccacgctcgactatgaaaactatcatatctttgttggcacctaccccaacgaccccgatactcagcgtgatgttgacgaagtgtgcgctcgcttcccgaatgtgcataaggtagtctgcgcgcgacctggccccaccagcaaagccgactgcctgaacaacgtgctggacgccatcacccagtttgagcgtagcgccaatttcgcttttgctggttttattctgcatgacgccgaagatgtgatttcaccgatggaattgcgtctgttcaactatctggtcgagcgtaaagatctgattcagatcccggtgtatccgttcgaacgcgaatggacgcacttcaccagcatgacttacattgatgagttttcagaactgcatggcaaagatgttccggtgcgtgaagccctcgccggacaagtgcccagcgcaggcgtcggtacctgtttcagccgccgcgccgtgaccgcactgttagctgacggtgacggtattgctttcgacgtgcagagtcttactgaagattacgacattggcttccgcctgaaagaaaaaggtatgacggaaatttttgtccgttttccggtggtggacgaagccaaagaacgcgagcagcgtaaatttttacagcacgcgcggacgtcaaacatgatctgcgtgcgcgaatatttccccgataccttttcgactgcggttcgacaaaaatctcgctggatcatcggcattgttttccagggctttaaaacccacaaatggacctccagtctgacgctgaactactttctctggcgcgaccgcaaaggggcaatcagtaactttgtcagcttcctcgcgatgctggtgatgatccagcttttgctgttgctggcgtatgaaagtttgtggcccgatgcctggcatttcctttctattttcagcggcagcgcatggttaatgactctgctgtggctaaactttggcttgatgattaaccgcatcgtgcagcgggtgattttcgttactggctactacggcctgacgcaggggctgctatctgtcctgcgtcttttctggggcaacctgattaacttcatggccaactggcgcgcgttaaaacaggtacttcaacacggcgatccacgtcgtgtcgcgtgggataaaacaacgcatgacttccccagcgtgactggcgatacccgctcgttgcgtccgttaggtcaaatcctgctggaaaatcaggtcatcactgaagaacaactcgatacagcactgcgtaatcgcgtcgaaggtctacgcctgggcggttcaatgctgatgcaggggctgattagcgccgaacagctggcacaggcgctggcagagcaaaacggcgtggcgtgggagtcgatcgacgcctggcagatcccttcatcactgattgccgaaatgccggcttccgtggcgctgcattatgcagtactgccgctgcgtctggaaaatgatgagttaattgtcggcagtgaagatggtattgacccggtttcgctggcggccctgacgcgtaaagtcggacgcaaagtgcgttacgtcattgttctgcggggacaaattgtcacggggttacgccactggtatgcgcgccgacgcggtcacgatccgcgggcaatgttgtacaatgcggttcagcatcagtggctcacggaacagcaggccggtgaaatctggcggcaatatgtgccgcatcagttcctgttcgccgaaatactgaccacgctcggtcatattaatcgttcagcaattaacgtgttgttattgcgccatgaacgcagttctctgccgctcggcaagtttttggtcaccgaaggcgttatcagccaggaaacgttggatcgcgtcctgacaattcaacgcgaattacaagtttcgatgcaatcactattactcaaagcaggtttaaacacagaacaggttgcgcaactggagtccgaaaatgaaggagaataa

SEQ ID NO: 260340 - DNA, 135 bp, Klebsiella pneumoniae
atgatgacctgctcggtgccaccgctccttttcactatgacgttaacctccctgtcccaggacaccatgcttttgtctacattctacgcaaacggcaacttttataaccagtgtaaaaataacgtgccgcaatag

SEQ ID NO: 260341 - DNA, 303 bp, Klebsiella pneumoniae
atgacggtcagatattatattagttctgctgatttaaccgcagagaagttcgccacagcaatccaaaaccactggcacgtggagaataagctgcactggcgtctggacgtggtaatgaatgaagacgactgcaaaataagaagaggaaatgcagcagaattattttcagggatacggcacatcgctattaatattttgacgaatgataaggtattcaaggcagggttaagacgtaagatgcgaaaagcagccatggacagaaactatctggcgtcagtccttgcggggagcgggctttcgtaa

SEQ ID NO: 260342 - DNA, 405 bp, Klebsiella pneumoniae
atgcacagtctggtcatcggacagatcaggacggatgagaaatccaatgagattacagctatcccagaacttcttaacatgctggatattaaaggaaaaatcatcacaactgatgcgatgggttgccagaaagatattgcagagaagatacaaaaacagggaggtgattatttattcgcggtaaaaggaaaccaggggcggctaaataaagccttcgaggaaaaatttccgctgaaagaattaaataatccagagcatgacagttacgcaatgagtgaaaagagtcacggcagagaagaaatccgtcttcatattgtttgcgatgtccctgatgaacttattgattttacatttgaatggaaaggactgaaaaattatacgtggcagtctcctttcggtcaataa

SEQ ID NO: 260343 - DNA, 597 bp, Klebsiella pneumoniae
atgctggaaaatttgaatctctctctattctctctcattaacgcgacgccagactctgcgccgtggatgatctcgttggcgatttttattgctaaagatttgattaccgtggtgccgctgctggctgcggtactttggctgtgggggcttacagcacaacggcaactggtgataaaaatcgctatcgcgctggcggtcagcctgtttgtgtcctggacgatggggcatctttttccgcacgaccgaccctttgtcgaaaatatcggctataacttcctgcatcatgcggcggatgactcattcccgagcgatcacggtacggtgattttcacctttgcactggcatttttatgctggcatcgcctgtggtccggctcacttttaatggtgctggccgtcgtcattgcctggtcgcgcgtttatcttggcgtccactggccgctggatatgctcggtggattgctggcaggtatgattggctgccttagcgcccagattatctggcaagcgatggggcataaactctatcaacgtctgcaatcgtggtatcgcttctgttttgcattaccgatccgcaaaggctgggtgcgtgactga

SEQ ID NO: 260344 - DNA, 759 bp, Klebsiella pneumoniae
atggaaacacgtcgcgaagagcgtatcgggcagctgctgcaagaattaaaacgcagcgataagttacatcttaaagacgccgccgccctgcttggggtttcggagatgacgattcgtcgcgatctgaacaaccacagtgcgcccgtcgttttgctcggcggctatattgttctggaaccgcgcagcgccagccattacctgttaagcgatcaaaaatcccgcctggtggaagaaaaacgccgggcggcaaaactggctgcgacgctggtagaacccgatcagaccctcttttttgactgtggcaccaccacaccgtggattattgaagcgattgataatgaaatccctttcaccgccgtttgttattcgctaaatacctttctggcactgaaagagaaaccccattgccgcgcgtttctttgcggtggtgaatttcacgccagcaacgccattttcaaacccatcgattttcagcaaacgctgaataatttttgcccggatatcgctttttattccgctgcgggcgtgcatgtcagtaaaggcgctacctgctttaatcttgaagagttgccggtaaaacactgggccatgtcgatggcgcaaaagcatgtgctggttgtcgaccacagtaaatttggcaaggtgcgtccggcgcgcatgggtgacctgaaacgctttgatattgttgtgagcgattgttgcccggaagatgagtatgtgaagtacgcgcagacgcagcgtattaagttgatgtattaa

SEQ ID NO: 260345 - DNA, 1203 bp, Klebsiella pneumoniae
atgacgcaatactcctctctccttcgtggtcttgcagcgggttctgcatttttattcctttttgccccaacggcattcgcggcggaacaaaccgttgaagcgccgagcgtggatgcgcgtgcatggattttaatggattacgccagcggtaaagtgctggcagaaggcaatgcggatgaaaaactggaccccgcgagcctgactaaaatcatgaccagctatgtggttgggcaggcgcttaaggccgataagattaaactcaccgatatggtgacggtcggtaaagatgcctgggcgacgggaaatccggcactgcgtggttcatcggtaatgttccttaaaccgggcgatcaggtttcggtggcagacctgaacaaaggtgtgattatccagtccggtaatgacgcctgtattgcgctggccgattacgttgccgggagccaggagtcatttattggtctgatgaatggttatgccaaaaaattgggtctgaccaacactaccttccagacggtgcacggtctggatgcgccggggcagttcagtaccgcgcgcgatatggcattgctgggtaaagcattaatccacgatgtgccggaagagtacgccattcataaagagaaagagttcaccttcaacaaaattcgacagcctaaccgtaaccgtctgctatggagcagcaatctgaatgttgatggcatgaagacaggaaccacggcaggcgcgggatataatctggttgcttcggctacccagggcgatatgcgtttgatctccgtagtactgggtgcgaaaactgaccgtatccgttttaatgagtctgagaaattattgacctggggtttccgcttctttgaaaccgtgacgccaattaaacctgatgccacctttgtgactcagcgcgtctggtttggtgataagagcgaagtgaatctcggggcaggcgaagcgggctcagtgaccataccgcgtgggcagctgaaaaacctgaaagcgagctacacgttaacggaaccgcagcttaccgcaccgctgaaaaaaggtcaggttgttggcaccattgatttccagcttaacggtaaatccattgagcagcgtccgctgatcgtgatggaaaatgtggaagagggcggattctttggtcggatgtgggatttcgtgatgatgaaattccatcagtggttcggcagctggttctcttaa

SEQ ID NO: 260346 - DNA, 627 bp, Klebsiella pneumoniae
atgattacgctgtggggtcggaataattcaaccaacgtaaaaaaagtattgctgacgctcgaagaactggaactaccttatgagcaaattctcgcgggccgtgagtttgggataaatcacgatgctgattttctggcgatgaaccctaacgggctggtgccgttgttacgcgacgacgaaagtgatctcattctttgggaatcaaacgccattgtccgctatctggcggcacagtacgggcaaaaacgcctgtggatcgactcaccggcacgtcgtgcggaagcagaaaaatggatggactgggcaaaccagacgctcagtaatgctcatcgcgggatcctgatgggattagtcagaacaccaccggaagagcgcgatcaggccgccattgatgccagttgtaaagagtgcgacgccctgtttgccctgctcgatgcggaactggcaaaagtaaaatggttctctggcgacgagtttggtgtgggcgatatcgctatcgctccgttcatctacaatttgtttaacgttggcctgacctggacaccgcgtccaaatctgcaacgctggtatcagcaactcactgaacgccccgcagtgcgcaaagtggtgatgattcccgttagctaa

SEQ ID NO: 260347 - DNA, 1116 bp, Klebsiella pneumoniae
atgcatcgacaatcctttttccttgtgccccttatttgtctttcttccgctctctgggcggctcctgcaacggtaaatgtcgaagtactgcaggacaaactcgaccatccctgggcgctggcctttttacccgacaatcacggtatgttaatcactctgcgcggcggcgagttgcgtcactggcaagcaggaaaaggattatctgcgccgctttccggagtgccggaagtttgggcgcacgggcagggtggcctgctggatgtggttttagcgcctgattttgctcagtctcgccgcatctggttaagttattccgaagttggcgatgatggcaaagccggaactgctgtgggttatggccgcttaagtgatgatctctcaaaggtgaccgacttccgcaccgtctttcgccagatgccaaaactgtctaccggcaaccattttggcgggcggctggtattcgacggtaaaggttatctttttattgctctgggcgaaaacaatcagcgcccgacggcgcaggatctgaataaattacagggcaaactggtgcgtctgaccgaccagggcgaaatcccggatgataatccttttataaaggaatccggtgcgcgcgccgagatctggtcttatggcattcgtaatccgcaaggaatggcgatgaatccgtggagtaatgcactatggctgaatgaacatggcccgcgcggtggcgatgaaattaatatcccgcaaaaaggcaaaaactacggctggccgctggcaacctggggaatcaactattcaggctttaagataccggaagcgaaaggggagatcgtcgccgggaccgagcaacctgttttttactggaaagattcgcccgccgtgagcggcatggccttctataacagcgataaattcccccagtggcagcaaaaattatttattggcgcgctgaaagataaagatgtcattgtgatgagcgtcaacggcgacaaagtgacagaagatggccgtattttaacggacagagggcagcgaattcgtgatgttcgcactggacccgacggttatttatacgttctcaccgacgagtccagtggggaattacttaaagttagcccacgcaattag

SEQ ID NO: 260348 - DNA, 384 bp, Klebsiella pneumoniae
atgttcgttgacagacagcgaatcgatctgctgaaccggttgatcgacgcacgcgttgacctcgccgcatacgtgcaactgaggaaggcaaaaggatacatgtccgtcagcgaaagcaatcatctacgagataacttttttaaactgaatcgcgaactgcacgataaatcgctgcggttgaatcttcatctggatcaggaagagtggagtgctcttcatcatgctgaagaagcattagcgacagccgcagtatgtttgatgagtgggcaccatgattgcccgactgttattaccgtcaacgccgataagcttgaaaattgtctgatgagcttaacgctgagtatccagagcctgcagaagcacgccatgcttgagaaggcctga

SEQ ID NO: 260349 - DNA, 387 bp, Klebsiella pneumoniae; identical to SEQ ID NO: 6563

SEQ ID NO: 260350 - DNA, 330 bp, Klebsiella pneumoniae; identical to SEQ ID NO: 6564

SEQ ID NO: 260351 - DNA, 1329 bp, Klebsiella pneumoniae
atgtccagaatcaataaattcgtacttacagtcagtctgctgatttttatcatgatttcagcagttgcctgcgggatctacactcaaatggtaaaggaacgggtgtatggcctgaaacagtccgttattgatactgcttttgcggtggcaaatattgctgaatatcggcgtagcgtggcaattgatcttatcaacacgctaaatcccacggaggaacagctgttggttggcttacgcacagcttacgccgactcggtttcaccctcttatttgtacgatgtcggtccttatctgatttccagtgacgaatgtattcaggtaaaggagttcgagaaaaattattgtgcagatattatgcagattgtgaagtatcgacatgtcaaaaatacagggtttatctcttttgacggtaaaaccttcgtctattacctctatccggtaactcataatcgtagtctgatatttttgcttggtctggagcgtttttctttactgtcaaaatcgctggcgatggatagcgagaacctgatgttctctctgtttaagaacggtaaaccggtgaccggtgatgaatataatgctaaaaacgccatcttcaccgtttcggaagcgatggagcacttcgcctatttgccgaccggattgtacgtatttgcgtataaaaaagatgtttatttgcgggtctgtacattgattattttctttgccgcattggtggcagtgatatcgggtgtcagttgcctctatctggtacgcagagtgattaatcgtggtattgtggagaaagaagccatcattaataaccattttgaacgcgtactggatggcgggcttttcttttcagctgccgatgtcaaaaaactctacagtttgtataactcggcgttcctggatgacctgaccaaagcaatgggcagaaaatcctttgacgaagatttaaaagcgctgccggaaaaaggcggttatttgtgcctgtttgacgtcgataaattcaaaaacatcaacgacaccttcggtcatttgctgggcgatgaagtgttgatgaaagtggtgaaaatccttaaatcacagatccccgtagataaaggtaaagtctaccgcttcggcggtgacgaatttgcggtgatttatacgggtggaacgctggaagagttgctatcgattctaaaagaaattgttcatttccaggtgggaagcattaatttaagcaccagtatcggtgtagcgcattcaaatgaatgtactaccgttgaacgcttgaaaatgctggcggatgagcggctgtataagagtaagaaaaacggcagggcgcagattagctggcagtag

SEQ ID NO: 260352 - DNA, 2349 bp, Klebsiella pneumoniae
atgctgagtttatacgaaaagataaagataaggctgataattttatttttattggcagcactgtcatttattggtctttttttcatcattaactatcaactggtatcggagcgcgcggtaaaacgtgccgatagccgctttgaacttattcagaaaaacgttggctatttctttaaagatattgaacgctcggccctgacattaaaggactcactgtatttattaaaaaatacagaggagattcaacgcgctgtgatccttaaaatggaaatgatgccatttttagactcggtgggactggtacttgatgataataaatattatctcttttcgcggagggcgaatgataaaatcgttgtttatcatcaggaacaagtaaatggaccgcttgtcgacgagtcagggcgggttatttttgccgattttaatccagcgaaacgaccatggtcggtggcttcagatgactctaacaacagctggaatccggcctacaattgctttgatcgtccgggtaaaaaatgtatctcttttacgctacgcatcaacggcaaagatcacgatttgttagcggtggataaaatacatgtcgatttaaactggcgatatctgaacgagtatcttgatcaaatcagcgctaatgatgaagttctatttttgaaacaaggccatgagatcattgccaagaatcaactcgcgcgtgaaaaactgattatttataatagcgaaggtaattataatattattgattctgtcgatactgaatatatcgaaaaaacatcagcggtgccaaacaacgcattattcgaaatctatttttattatcctggcggtaatttattgaacgcatcagataaacttttttatctgccgtttgctttcattattatcgtattgctggtggtttatttaatgaccactcgtgtgttccgtcggcaattttctgaaatgaccgagctggttaatacgctggcgtttttgcccgactcaacggatcagatcgaggctctgaaaattcgcgaaggcgatgcgaaagagattatcagcatcaaaaattcgatcgcggaaatgaaagatgccgaaattgaaaggtcaaataaattgctctcactgatctcttacgatcaggaaagcggttttattaaaaatatggcgattattgagtccaacaataatcagtatctggctgtggggatcatcaaactgtgtggtctggaagccgtggaagcggtgtttggtgttgatgaacgcaataaaatcgtcaggaaattgtgtcagcgaattgccgagaaatatgcgcaatgctgcgatatcgtgacattcaatgccgatctctatttacttctgtgccgggaaaatgtacagacatttacccgtaaaatagcgatgataaacgattttgacagcagctttggctaccgcaatctgcgcatccataagtctgccatttgtgaacctttgcagggagaaaacgcctggagttacgcagaaaaactgaaactggcgatttccagtatccgtgaccatatgttctcagagtttattttctgtgatgacgcgaaactcaacgaaatagaagagaatatctggattgcgcgtaatattcgccatgcaatggaaattggcgaactattcctcgtctatcaaccgatcgttgatattaacacccgcgccattctgggcgcggaggcgttgtgccgttgggtgtctgcggagcgggggatcatttcaccgctaaagttcattaccattgctgaagatatcgggtttatcaatgagctgggttatcagattattaaaacggcaatgggtgaattcagacattttagtcagcgtgcgtcgctgaaggatgatttcttactgcatattaatgtttcgccctggcagttaaacgaaccacactttcatgagcgttttaccaccatcatgaaagaaaatggcctgaaggcgaacagcctctgtgttgagatcactgaaaccgtgatcgagcgaattaatgaacatttttatctcaatattgaacaactgcgtaaacaaggggtacggatatcgattgatgactttggcaccggtttgtcaaacctgaaacgtttttatgaaattaatccagatagcataaaagtggactcacaatttaccggcgatattttcggtactgcgggaaaaattgtgcgcattattttcgatctggcacgctataaccggatcccggtgattgcggaaggcgtagagagcgaagacgttgcgcgtgaattaatcaaattaggatgtgttcaggctcaggggtatctgtaccagaaacccatgccattctccgcctgggataaaagtggaaaattagtaaaagagtag

SEQ ID NO: 260353 - DNA, 912 bp, Klebsiella pneumoniae
atgcgactatttaactggcgacgtcaggcggtgttaaacgccatgccactggtcaaacctgaccaggtacgtacaccgtggcatgaattctggcgacgatttcgccgtcagcatatggcgatgaccgccgcattattcgttattttattgattgtggtggctatttttgcacgctggatcgccccctatgacgccgaaaattattttgattatgacaatctgaataacggaccttctttgcagcactggtttggcgttgattcactggggcgtgacattttcagccgtgtcctggttggtgcacaaatctcgctggcggcgggcgtgtttgccgtgtttatcggtgcggcgatcgggacgttgctgggcttgttggctggatattatgaaggctggtgggatcggctgatcatgcgcatttgcgatgtgctgtttgccttcccgggtattttactggcgatcgctgttgttgcggtgttgggaagcggcattgctaacgtgattatcgcagtcgccattttttccatccccgcgtttgcccggctggtgcgcggcaacacgctggtgttgaaacagcaaacctttatcgagtcagcacgtagtattggtgccagcgatatgaccattttgttgcgtcatatcttgcctgggaccgtctcttctatcgtggtgtttttcaccatgcgcattggcacctcgattatctctgccgccagcctgtcatttctcggcctcggtgcgcagccgccgacaccagagtggggagcaatgctcaatgaggcacgagcggatatggttatcgcgccgcatgtcgctatttttccggccctggctatttttctgactgtactggcgttcaatttgttgggcgatggtttacgcgatgcgctggatccgaaaattaaaggatag

SEQ ID NO: 260354 - DNA, 921 bp, Klebsiella pneumoniae
atgcttaattacgttatcaaacgcttactggggttgattccaacgctgtttatcgtctcggtgctggtgtttttatttgtgcatatgctgcccggcgatccggcgcgattgattgccgggcccgaagctgatgcgcaggttatagaactggtgcgtcagcagctggggttggatcagccgctgtatcaccagttctggcactatatcagcaatgctgtgcagggggattttggcctgtcgatggtgtcgcgtcgtccggttggcgatgagattgccagccgctttatgccaacgctgtggctgaccataaccagtatggtctgggcggtgatatttggtatggcggcgggaattatcgccgccgtctggcgtaatcgttggccggatcgattgagtatgaccattgcggtgtcggggatctcgtttccggcatttgcgctggggatgcttttaattcaggtattctccgttgaactgggctggctgcctaccgtgggagcagacagttggcagcactacattttaccctccctgacgctcggcgcggcagtggcagccgtgatggcgcgctttacccgcgcgtcgtttgtcgatgttttaagcgaagattatatgcgtaccgcgagggcgaaaggggtgagcgaaacctgggttgtcctcaaacacgggctacgtaacgcgatgatcccggttgtgaccatgatgggcttacagtttggctttttgctcggtggttccatcgtggtggagaaagttttcaactggcccggacttggacgcttactcgttgactccgtagaaatgcgcgattacccggtgattcaggcggaaattctgcttttctcgctggaatttattcttatcaacttagtggtggatgtgctttacgccgccattaacccggctatcaggtacaagtaa

SEQ ID NO: 260355 - DNA, 1539 bp, Klebsiella pneumoniae
atggcaagagctgtacaccgtagtgggttagtggcgctgggcattgcgacagcgttgatggcatcttgtgcattcgctgccaaagatgtggtggtggcggtaggatcgaacttcaccacgctcgatccgtatgacgcaaatgacacgttatctcaggccgtagcgaaatcgttttaccaggggctgttcggtctcgataaagagatgaaactgaaaaacgtactggcggagagttataccgtttccgatgacggccttacttacaccgtgaaactgcgggaaggaattaaattccaggatggcaccgatttcaacgcagcggcggtaaaagcgaatctggaccgggccagcgatccggcgaatcatcttaaacgctacaacctgtataagaatattgccaaaacggaagcgatcgatccaacaacggtaaagattaccctcaaacagccgttctcagcgtttattaatattcttgcccatccggcgaccgcgatgatttcgccggcagcgctggaaaaatatggcaaggagattggttttcatccggtgggaaccgggccgtatgaactggatacctggaatcagaccgattttgtgaaggtgaaaaaattcgcgggttactggcagccaggattgcccaaactggacagcataacctggcgtccggtggcggataacaacacccgcgcggcaatgctgcaaaccggtgaagcgcagtttgctttccccattccttacgagcaggccgcactgctggagaaaaacaaaaatatcgagttgatggccagtccgtcaattatgcagcgttatatcagtatgaacgtgacgcaaaagccgttcgataacccgaaggtccgtgaggcgctgaattacgccattaaccgcccggcgctggtgaaagtggccttcgcgggctatgcaacgccagctactggtgtggtaccgccgagtatcgcctacgcgcaaagttataaaccgtggccttacgatccagtgaaagcgcgcgaattactgaaagaggcgggatatcccaacggtttcaataccacgctgtggtcgtcacataaccacagcaccgcgcagaaagtgctgcaatttacccagcagcagttagcgcaggtcgggattaaaacccaggtgactgcgatggatgccggacagcgggcggcagaagttgaaggtaaagggcaaaaagagagcggcgtgcggatgttctacactggctggtcggcttcaaccggcgaagcggactgggcactatcgccgctgtttgcatcgcaaaactggccaccgacgctgtttaataccgcgttttacagcaataaacaggtggatgacttcctggctcaggcactgaaaactaatgatccggcggaaaagacccgtttatataaggcggcgcaggatatcatctggcaagagtcgccgtggatcccgctggtggtagaaaaactggtgtcggcacacagtaaaaacctgaccggtttttggatcatgccagacaccggtttcagctttgaagacgcggatttgcaataa

SEQ ID NO: 260356 - DNA, 1872 bp, Klebsiella pneumoniae
ttgccacacagtgatgaacttgatgccggtgatgtgctggcggttgaaaatctgaatattgcctttatgcaggaccagcagaaaatagctgcggtccgcaatctctcttttagcctgcaacgcggtgagacgctggcaattgttggcgaatccggctctggtaagtcagtgactgcgctggcattgatgcgcttgttggaacaggcgggcggtttagtgcagtgcgatcaaatgctgttgcggcggcgcagtcgcgaagtgattgaacttagcgagcagagcgctgcacaaatgcgccatgtgcgcggtgcggatatggcgatgatatttcaggaaccgatgacatcgctgaacccggtatttactgtgggtgaacagattgccgaatcaattcgtctgcatcagaacgccagtcgtgaagaagcgatggtcgaggcgaagcggatgctggatcaggtacgcattccggaggcacaaaccattctttcacgttatccgcatcaactctctggcgggatgcgccagcgagtgatgattgcgatggcgctgtcatgccgcccggcggtgctgattgccgatgagccaaccaccgcgctggatgtcactattcaggcgcagatcctgcaattaatcaaagtattgcaaaaagagatgtcgatgggcgttatctttatcactcacgatatgggcgtggtggcagagattgccgatcgggtactggtgatgtatcagggcgaggcggtggaaacgggtagcgtcgaacagatttttcatgcaccgcaacatccttacacccgtgcgctgttagctgctgttccgcaacttggtgcgatgaaagggttagattatccccgacgtttcccattgatatcgcttgaacatccagcgaaacaggaaccacccatcgagcagaaaacggtggtggatggcgaacctgttttacgggtgcgtaatctggtcacccgtttccctttgcgcagcggtttgttgaatcgcgtaacacgggaagtgcatgccgttgagaaagtcagttttgatctctggcctggtgaaacgctatcgctggtgggcgagtctggcagcggtaaatccactaccgggcgggcgttgctgcgcctggtcgaatcgcagggcggcgaaattatctttaacggtcagcgaatcgataccttgtcatccggtaaacttcaggcattgcgccgggatattcagtttatttttcaggacccttacgcttcgctggacccacgtcagaccatcggtgattcgattatcgaaccgctgcgcgtacacggtttattgccaggtaaagaagcggctgcacgcgttgcgtggttgctggagcgcgtgggcctgttacctgaacatgcctggcgttacccgcatgagttttccggcggtcagcgccagcgcatctgcattgctcgcgcgttggcattgaatccaaaagtgatcattgccgacgaagccgtctcggcgctggatgtttctattcgcgggcagattatcaacttgttgctcgatctccagcgtgatttcggcattgcgtatctgtttatctcccacgatatggccgtggtagagcggattagtcatcgtgtggcggtgatgtatctcggacaaattgttgaaattggtccacggcgcgcggtcttcgaaaacccgcagcatccttatacgcgtaaattactggcggcagttccggtcgctgaaccgtcccgacaacgaccgcagcgtgtactgctgtcggacgatcttcccagcaatattcatctgcgtggcgaagaggtggcagccgtctcgttgcaatgcgtcgggccggggcattacgtcgcacaaccacaatcagaatacgcattcatgcgtagataa

SEQ ID NO: 260357 - DNA, 966 bp, Klebsiella pneumoniae; identical to SEQ ID NO: 15963

SEQ ID NO: 260358 - DNA, 1236 bp, Klebsiella pneumoniae
atggaatttaccaccggattgatgtcgctcgacaccgcgcttaatgagatgctttctcgcgttaccccactgaccgcccaggaaacgctgccactggtacagtgttttggtcgtattctggcgagcgatgtcgtttcgccactggatgtcccggggtttgataactccgctatggacggctacgcggtgcgtttagccgatattgcctccgggcaaccgctgcccgttgccggtaaatcctttgccggtcagccgtaccatggtgaatggcctgcgggtacctgcattcgtattatgaccggtgcgccggtgccggaaggctgcgaagcggtggtgatgcaggaacagaccgaacagactgacgctggcgtgcgttttactgctgaagtgcgtagcgggcaaaatattcgccgtcgcggtgaagatatctctgcaggtgcggttgttttcccggcgggaacacgcctgactaccgcagagctgccagtaattgcttcactggggattgccgaagttccggtgattcgtaaagtgcgtgtagcgctgttttctaccggtgatgaactccagttgccaggccagccgctgggcgacggccaaatctacgataccaaccgtctcgccgtacacctgatgttagaacagttgggatgcgaggtaatcaacttagggattatccgcgacgatccccatgccctgcgcgccgcatttattgaagccgacagccaggcggatgtggtgatcagttccggcggtgtttcagtgggtgaagcggattacaccaaaacgattcttgaagagctgggggagatcgccttctggaagctggcgattaaaccaggtaaaccgttcgcgttcggtaaactcagcaatagctggttctgcggcctgccgggcaacccggtttcagcaacgctgaccttctatcaactggtacagcctttgctggcaaaactaagcggcaataccgccagcggcctgcccgcgcgccagcgtgtacgcacggcatcgcgtctgaaaaaaacgccaggacgccttgatttccagcgcggcgtgctgcaacgcaacgccgatggcgaactggaagtgacgaccaccggacatcagggttcacatatatttagctcctttagcctcggcaactgctttatcgtgctggagcgcgaacgcggcaatgtggaagcgggcgaatgggtggaagtagaaccgtttaacgcgttgttcggaggcctgtaa

SEQ ID NO: 260359 - DNA, 750 bp, Klebsiella pneumoniae
atggcggaactcagcgatcaggagatgctgcgctataaccggcaaatcattctgcgcggctttgattttgatggtcaggaggcgctaaaagattctcgtgtgctgatcgtcggcctcggtggactcggctgcgcagcctcacagtatctggcaagcgccggtgtcggcaacctgacgctgctcgacttcgacacggtttcgctctcaaatttacagcgccaaacgctgcacagcgatgccacagtcgggcaaccgaaggtggattctgcccgtgacgccctgacgcggatcaacccacatatcgcgattacgccagtcaatgcactgctggatgacgcagaacttgctgcgatgattgcaaaacacgatctggtgctcgactgtacggataacgttgcggtacgtaatcaactgaacgcaggctgttttgccgcgaaggtgccgctggtttccggcgcggcaattcgtatggaaggtcaaatcacggtcttcacttatcaggacggcgaaccgtgctatcgctgccttagccgtttgtttggcgagaacgcgttaacctgcgtagaagcaggcgtgatggcaccgttgatcggcgtaattggttcgttgcaggcaatggaagcgatcaaactgctggcaggttatggcaaaccggccagcgggaaaatcgtcatgtacgatgcgatgacctgtcagtttcgtgaaatgaaactgatgcgtaacccggggtgtgaggtgtgtgggcagtaa

SEQ ID NO: 260360 - DNA, 663 bp, Klebsiella pneumoniae
atggaactgtatctggatacttcagacgttgttgcggtgaaggcgctgtcacgtatttttccgctggcgggtgtgaccactaacccaagcattatcgccgcgggtaaaaaaccgctggaggttgtgcttccggaacttcatgaagcgatgggcggtcaggggcgtctgtttgcccaggtaatggctaccactgctgaagggatggtgaatgacgcacgtaaattgcgttctattattgcggatatcgtggtgaaagttccggtgaccgctgaggggctggcagctattaagatgttaaaagcggaagggattccgacgctgggaaccgcggtatatggcgcagcacaagggctgctgtcggcgctggcaggtgcggaatatgttgcgccttacgttaatcgtattgatgctcagggcggtagcggtattcagactgtgaccgacttacaccagttattgaaaatgcatgcgccgcaggcgaaagtgttagccgcgagtttcaaaaccccgcgtcaggcgctggactgcttactggcagggtgtgaatcaattactctgccgctggatgtggcacaacagatgattagctatccggcggttgatgccgctgtggcgaagtttgaacaggactggctgggagcgtttggcagaacgtcgatttaa

SEQ ID NO: 260361 - DNA, 900 bp, Klebsiella pneumoniae
atgattttcaatattcagcgctactcgacccatgatggccccggtatccgcacggtcgtatttcttaaaggctgttcgctgggctgccgctggtgtcagaacccggaaagccgcgcccgcacgcaagatctgctgtatgacgcacgactgtgtctggaaggctgcgagctgtgcgctaaggccgcgccggaagtgattgagcgcgcgctgaatggtttgcttattcatcgggaaaagttaaccccggagcatctgacggcgttaaccgactgctgtccgacacaggcgttaaccgtgtgtggtgaagtgaaaagcgttgaggagatcatggcgaccgttttgcgcgataaaccgttttacgatcgcagcggcggcggcttaacgctttccggcggtgaaccattcatgcagccggaaatggcgacggcgctgctgcaagccagccacgaggccggcattcatactgcggtagaaacctgtctgcatgtgccgtggaaatatatcgccccttctctgccctatatcgatctgtttcttgccgatttaaaacacgttgccgacgcgccgtttaaacagtggaccgacggtaacgccgccagagtgctggataacctgaaaaaactcgccgcagcgggcaaaaaaatcattatccgcgtgccgctgattcagggctttaatgccgacgaaacctctgtaaaagccattaccgattttgccgccgacgagctgcacgttagcgaaattcatttcctgccctaccacacgctgggcatcaacaaatattacttacttaatctgccctatgacgccccggaaaaaccgcttgatgcgccagaactgctcgactttgcccagcagtatgcctgccagaaagggttaaccgcgaccttacgaggataa

SEQ ID NO: 260362 - DNA, 2433 bp, Klebsiella pneumoniae; identical to SEQ ID NO: 15964

SEQ ID NO: 260363 - DNA, 816 bp, Klebsiella pneumoniae
atgagcgtaaaagttatcgtcacagacatggacggtacttttcttaacgacgccaaaacgtacaaccaaccacgttttatggcgcaatatcaggaactgaaaaagcgcggcattgagttcgttgtcgccagcggtaatcagtattaccagcttatttcattctttcctgagctaaaggatgagatctcttttgtcgcggaaaacggcgcactggtttacgaacatggcaagcaactgttccacggcgaactgacccgacatgaatcgcggattgttattggcgagttgctaaaagataagcaactcaattttgtcgcctgcggtctgcaaagtgcatatgtcagcgaaaatgcccccgaagcattcgtcgcactgatggcaaaacactaccatcgcctgaaacctgtaaaagattatcaggagattgacgacgtactgttcaagttttcgctcaacctgccggatgaacaaatcccgttagtgatcgacaaactgcacgtagcgctcgacggcattatgaagccggttaccagtggttttggctttatcgacctgattattcctggcctgcataaagcgaatggtatttcgcggttactgaaacgctgggatctgtcaccgcaaaatgtggtagcgattggcgacagcggtaacgatgcggagatgctgaaaatggcgcgttattcctttgcgatgggcaatgctgcggaaaacattaaacaaatcgcccgttacgctaccgatgataataatcatgaaggcgcgctgaatgtgattcaggctgtgctggataacacatccccttttaacagctga

SEQ ID NO: 260364 - DNA, 1104 bp, Klebsiella pneumoniae
atggacaagaagctgaaaatcgccgatatcgccgcacgtaccgggctatcgccgagtacggtttcgcgggtgctggctggcaaagcgaataccagtgcacgcgctcgcgaacaggtgctggcctgcgcgcgtgagttgggcgtgatggatggcatggcagcaggtcgtatgttgctgaacaacctgattattttcgcgccgcaacgcgcttttgaccaacgatctgatatcttttattaccgtgtgatccagagcatcagcaaagcgttatcgccgcatgaagtgcggctgcgttactgcgcgctggaggagtttgacagcgatcccgcgctatttctctcgcggatgaatgaagcagatacgcaggcggcgatcctgctggggattgacgatccgcacatccatgatctggccgccgatctcgctaagccttgtgtgctgatcaactgccgtgatgaacgaatgcgcctcccggcgattgcgccggaccatcggttaattggcgcgttcgccgcccgctatctgtttgaaatgggtcaccgggaggtgatgaatgtgatgtgcctgcgccgctacactatggagcagcggtttgcagggattaaagaatcatggcgtcagcataatctggcctttcaccatgaccgtcatttgctgaatatcagcagttttagcgctaaagaagcggaagaaaaggtcggagcgtggctggatgccgccaatggcaagacgttgccgacggcgtttctggtcggcggggattttatggcggcgggaacggtaaatgcgctacatcgtcgtggtctgcgcgtaccacaggatgtctcggtgatgagtatcgacggctttaaccttgcggcaatcgaggatgttcccctgacggctgtgcatgtgccacgcgatgagctaggcaatgaagcggtgcaaatgttgcaacagcggctgattcgcccggatgctccggtgggctcgctgctgctgcacggacgattggcggtgcgggagtcagtgcggcgggttcgcccaggaaaagggaacaccgccgtggaacgggaagggctgtacgacactcagctgtcgattcccaacgctcgcttaccgtga

SEQ ID NO: 260365 - DNA, 1302 bp, Klebsiella pneumoniae; identical to SEQ ID NO: 9602

SEQ ID NO: 260366 - DNA, 2364 bp, Klebsiella pneumoniae
atgaaaacgctgaaaaactggaccctgcacaaacagtctgcccaccacgttgaactgctggtcgatggccagcatatcctgtgcctgtacgtgctggaagaaaatctgttccgcgtgctgttaaaacgcaaaggcgagctggcgctggatcgcacctggagcattgctccggcgcaggatgtgccatgggaagggcgcagccgcgaagatctcagcggctttagcctgcccgcgtggacattgatccagcacgacgacaccgtggttatcgccaccgagtcactgcgtgccaccgttcaccagccgctgtggctggagtggcactatcgtaacaacgaaggcgaatggctgccgttggtgaatgaccgcccgaccagcgcttatctgctgaatgcccacggcgatggcgtggcacactatcagagccgtcgtaaagatgaacgcttttatggcctcggagataaagccggcgacctgcaacgcaacggtaaacgttacgagatgcgtaacctcgacgcgatgggctacaacgccgttagtactgacccgctgtacaaacacattccattcaccatcacccgccgcgatgacattagcttcggcctgttttatgacaacctcagcagctgctggctggatctgggcaacgagatcgacaactaccacaccgcctatcgccgctggcaggcggaagcgggtgatatcgactactacctgtttaccggcgaacgcgtacttgatatcaccaaagccttcgtacgcctgaccggcaaaaccctgttcggaccgaaatggagcctgggctacagcggttcaactatgcactacaccgatgcgccggacgcacaaaatcagttgatgaactttatccgcctgtgtgaagaacatgcgattccctgcgattcgttccagctctcttccggttatacctcaattaacggcaagcgctatgtgttcaactggaattacgacaaagtgccgcagccgaaagtgatgagccaggcatttcacaatgctggtttgcacctggccgccaatatcaagccgtgcctgttgcaggatcacccacgctataacgaagtggcagaaagaggactgttcatccgtgattcagaaacagatgaaccagaacgttccagcttctgggatgacgaaggttctaacctcgactttactaatccgcagaccatccagtggtggcaggaaggcgtgaccacacagcttctggagatgggtatcgactccacctggaacgacaacaacgaattcgaagtatgggacggtgaagcacgctgtcacggctttggtcagacgatcgcgatcaaacatattcgcccggtgatgccactgctgatgatgcgagcctcgatggaagcccagcaacgtttcgctccggaaaaacgtccgtacttgatctcccgctccggctgcgcgggaatgcagcgctatgtgcagacctggagcggcgataaccgcactagctgggacactctgcgctacaacacccgcatgggtctggggatgagcctctccgggctgtataacctcggtcacgacgtcggcggtttctccggtgataagccggacccggaactgtttgtacgctgggtacaaaacggcgtgatgcatccgcgctttacgattcactcgtggaacgatgaccataccgtaaacgaaccgtggatgtatccgggcgtcactccggcgatccgcagcgctattgagttgcgctatcgcctgctgccctacttttataccctgatgtggcaggcatacgccgatgatgaaccaatgctgcgtccgactttccttgaccacgagcacgacgttcagacttttgaagagtgtgatgacttcctgcttggtcgcgatattttggttgccagcgtcgtagagcaaggcgagcgccagcgccgtgtatggctgccagataacgaaactggctggtacgatttctacaacggcgaatggttcagtggcggtcagtggatcaccctcgacgcaccgctggagaaactgccgctgatggtgcgtgccggggctggtctaccgctcagcaaacgcatcacctatgtgagcgcagaacaagacgatacccgcgaactgaaactgttcccgctgaaaggtgtgggcacaacgtccggcctgctgtttgaagacgatggcgaaagctggggctaccaaactggtaatgcgctttgggtggaatgggaaatggtttgcgatggggcgaccatcaacctgaaagtcaacgcgcgcggggattatcgacctgcatggagtgcactgaaagtgtcattaccagtggaagaaaaacgcacgctgctggtcaatggtgttgaagggagtgaatggatgcgttaa

SEQ ID NO: 260367 - DNA, 921 bp, Klebsiella pneumoniae
atgaatatgaaattgaaaacattattcgcagcggccttcgctgttgtcggcttttgcagtaccgcctctgcggtaacttatcctctgccaaccgacgggagtcgcctggttggtcagaatcaggtgatcaccattcctgaaggtaacactcagccgctggagtattttgccgccgagtaccagatggggctttccaatatgatggaagcgaacccgggtgtggataccttcctgccgaaaggcggtactgtactgaacattccgcagcagctgatcctgccggataccgttcatgaaggcatcgtcattaacagtgcagagatgcgtctgtattactatccgaaaggaaccaacaccgttatcgtgctgccgatcggcattggtcagttaggcaaagacacgcctatcaactggaccaccaaagttgagcgtaagaaagcaggcccgacctggacgccaaccgctaaaatgcacgcagagtaccgcgctgcgggcgaaccgcttccggctgtcgttccggcaggtccggataacccgatgggtctgtatgcactctacatcggtcgcctgtacgctatccatggcaccaacgccaacttcggtatcggcctgcgcgtaagtcatggttgtgtgcgcctgcgtaacgaagacatcaaattcctgttcgagaaagtgccggtcggtactcgcgtacagtttattgatgagccggtaaaagcgaccaccgagccagacggcagccgttatattgaagtccataatccgctgtctaccaccgaagcccagtttgaaggtcaggaaattgtgccaattaccctgacgaagagtgtgcagacagtgaccggtcagcctgatgttgaccaggttgttctggatgaagcgatcaaaaatcgttccgggatgccggttcgtctgaattaa

SEQ ID NO: 260368 - DNA, 468 bp, Klebsiella pneumoniae
atgagtcgtcgcgcaggtacgccaacagcaaaaaaagtgacgcagttagtgaacgtggaagagcacgttgaagggttccgccaggtcagagaggcgcatcggcgcgagcttattgatgattacgttgagctgatttctgacttgatcagggaagtgggggaagctcgtcaggtagacatggctgctcgtttgggagtttcgcaaccgacggtggctaaaatgcttaagcgactggcaaccatggggctgattgaaatgatcccctggcgtggcgtgtttttaacggcagaaggagagaagctggcgcaggaaagccgcgagcgacatcagatagtcgaaaatttcttgttggtgttgggcgtcagtccggaaatcgcccgtcgcgacgcggaaggcatggagcaccatgttagtgaagagacgctcgacgcttttcgtttgtttacccagaaacacggtgccaaatga

SEQ ID NO: 260369 - DNA, 129 bp, Klebsiella pneumoniae; identical to SEQ ID NO: 775

SEQ ID NO: 260370 - DNA, 1584 bp, Klebsiella pneumoniae
atgaatttaaccctcaaagaatcgcttgttacccgtagccgggtatttagcccgtggactgcgttctactttttacagtcgctattaattaacctcggcttaggttatcccttcagtttgctctacaccgctgcgtttacggctatgttgcttttgctatggcgaacattgcctcgcgtacaaaaagttctggtcggtgtcagttcgctggtggcggcttgttatttcccttttgctcaggcctacggcgcgcctaatttcaatacattgctggcattgcactccaccaatatggaagagtcgaccgaaatcctgacgatttttccgtggtacagctacctggtcggcttatttatttttgcgctcggcttaatagcaatcaggcgaaaaaaagagaatgaaaaagcgcgctggaataccttcgacagcctgtgtctggtattcagtgtggcgacattttttgttgctcccatgcaaaacctggcctggggcggcgtatttaaactgaaagataccggctatccggtatttcgttttgctaaggatgtcatcgtcaataataacgaggtgattgaagagcaagaacggatggcaaaactttccggaatgaaagatacctggacggtcactgccgttaagccgaaatatcagacctatgtggtggtgatcggtgaaagcgcgcgtcgcgatgccctcggtgcctttggcggtcactgggacaataccccgtttgccagcagtgttaacggtttgatatttgctgactacattgccgccagtggctccacgcagaaatcgcttggcttaacgctcaatcgcgtagtcgatggcaaaccacagtttcaggataactttgtcaccctggcaaatcgcgcgggcttccagacctggtggttttccaaccagggccaaatcggcgaatacgataccgccatcgccagcatcgccaaacgtgcagatgaagtgtacttcctgaaagaaggtaattttgaagcagataaaaacacgaaagacgaagcgttactggatatgaccgctcaagtgctggcacaagagcactcgcaaccgcagctgattgttttacatctgatgggctcgcatccgcaggcctgcgacaggacacaaggcaaatacgaaacctttgtgcaatcgaaagaaacgtcgtgctatctctataccatgacgcaaacagacgatttactgcgtaagctgtacgatcagttacgcaacagcggcagcagcttctcgctggtttacttttctgaccacggtctggcctttaaagagcgcggcaaagacgtgcaataccttgcccatgatgataaatatcagcaaaatttccaggtgccttttatggtcatttcgagcgacgataaagcgcatcgggtgattaaagcccgccgctctgccaatgacttcttaggctttttctcccagtggacgggaattaaagcgaaggaaattaacatcaaatacccgtttatatctgagaagaaagccgggccgatatacatcaccaacttccagttacagaaggtggattacaaccatctcggaaccgatattttcgacccgaaaccttaa

SEQ ID NO: 260371 - DNA, 516 bp, Klebsiella pneumoniae
atgaaaaaaattgcatgtctttcagcactggccgcagttctggctttcaccgcaggtacttccgtagctgcaacttctaccgtaactggcggttacgcacagagcgacgctcagggccaaatgaacaaaatgggcggtttcaacctgaaataccgctatgaagaagacaacagcccgctgggtgtgatcggttctttcacttacaccgagaaaagccgtactgcaagctctggtgactacaacaaaaaccagtactacggcatcactgctggtccggcttaccgcattaacgactgggcaagcatctacggtgtagtgggtgtgggttatggtaaattccagaccactgaatacccgacctacaaacacgacaccagcgactacggtttctcctacggtgctggtctgcagttcaacccgatggaaaacgttgctctggacttctcttacgagcagagccgtattcgtagcgttgacgtaggcacctggattgccggtgttggttaccgcttctaa

SEQ ID NO: 260372 - DNA, 888 bp, Klebsiella pneumoniae
atgcctggttcattacgtaaaatgccggtctggttaccaatagtcatattgctcgttgccatggcgtctattcagggtggagcctcgttagctaagtcactttttcctctggtgggcgcaccgggtgtcactgcgctgcgtctggcattaggaacgctgatcctcatcgcgttctttaagccatggcgactgcgctttgccaaagagcaacggttaccgctgttgttttacggcgtttcgctgggggggatgaattatcttttttatctttctattcagacggtaccgctgggtattgcggtggcgctggagttcaccggaccactggcggtggcgctgttctcttctcgtcgcccggtagatttcgtctgggttgtgctggcggttcttggtctgtggttcctgctaccgctggggcaagacgtttcccatgtcgatttaatcggctgtgcgctggcactgggggccggggcttgttgggctatttacattttaagtgggcaacgcgcaggagcggaacatggccctgcgacggtggctattggttcgttgattgcagcgttaattttcgtgccaattggagcgcttcaggctggtgaagcactctggcactggtcggttattccattgggtctggcggtcgctattctctcgaccgctctgccttattcgctggaaatgattgccctcacccgtttgccaacacggacatttggtacgctgatgagcatggaaccggcgctggctgccgtttccgggatgattttcctcggagaaacactgacacccatacagctgctggcgctcggcgctatcatcgccgcttcaatggggtctacgctgacagtacgcaaagagagcaaaataaaagaattagacattaattaa

SEQ ID NO: 260373 - DNA, 2226 bp, Klebsiella pneumoniae
atgcggtggatcctgttcatcctcttctgcctgctgggcgcacctgcccacgcggtatccatacccggcgttacaaccacaacgacaacggactcaacgactgaaccggccccggaaccggatatcgaacaaaaaaaagcggcctatggcgcactggcggatgtgctggataatgacacctcgcgtaaagagttgatcgaccagttgcgcaccgtcgccgcgacgccccctgcggaacccgtaccgaagatcgtgccgccgacgctggttgaagagcaaaccgtgctgcaaaaagtcaccgaagtcagccgccattatggtgaagccctttccgcccgcttcggacaactttatcgcaatatcaccggctccccgcataagccgtttaatccacaaaccttcagcaatgcgttgacccatttttcaatgttagcggtattagtgtttggtttttactggctgattcgtctgtgcgcactgccgctgtatcgcaaaatgggccagtgggcgcggcaaaaaaatcgcgaacgcagcaactggttgcagcttccggcgatgattatcggggcgtttattatcgacctgctgttactggcactgacattatttgtcggtcaggttttaagcgacaacctgaatgcgggcagtcgcaccatcgctttccaacaaagtttgtttctcagcgcctttgccctgattgaatttttcaaagccgtactacgcctgattttttgcccaaacgtggcggaactgcgcccgttcacgatacaggacgagagcgcccgttactggagtcgccgcctgagctggttaagcagtttgataggttatggcctgattgtggccgtgccgattatctctaatcaggtgaatgtacaaattggcgcgctggcgaacgtcatcattatgctgtgcatgaccatctgggcgttgtacctgatctttcgtaataaaaaagagattacccaacatttgctcaactttgcggagcattcgctggcctttttcagcttgtttatccgcgcctttgcgctggtgtggcactggctggcaagcgcctattttatcgtgctgtttttcttttcgttgttcgatccgggcaacagcctgaaatttatgatgggtgcaacggtgcgcagcctggcgattattggtatcgcagcatttgtttccggtatgttttcccgctggctggcaaaaaccatcaccctctcgccacatactcagcgtaactatccagaactgcaaaaacggttgaatggctggctgtcggcggcgctgaaaacggcgcgtattctgacagtctgcgtggcggtaatgttgctgttgagcgcatggggattgttcgatttctggaactggctgcaaaacggcgcggggcagaaaactgtagatatcctgatccgtatcgcactcattcttttcttctcggcggttggctggacagtgctcgccagtttgatcgaaaaccggctggcttcggatattcatggccgcccgctacccagcgcccgtacgcgtaccctgctgacgctgtttcgtaacgcgctggcggtgattatcagtaccatcaccatcatgattgtgttgtcggaaatcggcgtcaatatcgcgccattgctggcaggtgccggtgcattggggctggctatctcttttggttcgcaaacgctggtgaaagatattatcaccggggtatttattcagtttgaaaacggcatgaacactggagatttggtgactatcgggccgttgaccggcactgtggaacggatgtcgattcgctccgtgggcgtgcgtcaggataccggggcgtatcacatcattccgtggtcttcgattaccacctttgctaactttgtccgcggcattggttcggtagtggcaaattacgatgttgatcgccatgaagatgctgataaagccaatcaggcactgaaagatgcggtaacggaattgatggaaaacgaagatattcgcgggctgattattggtgaaccgaactttgccgggattgtcggcttaagcaataccgcgtttacactgcgtgtttcgttcaccacgctgccactcaaacagtggacggtacgctttgccctcgacagccaggtgaaaaaacatttcgacctggcgggcgttcgcgcgccagtgcagacttatcaggtgctgcctgctccgggcgcgaccccggctgcaccgctgccgccgggggagccaacgctttaa

SEQ ID NO: 260374 - DNA, 927 bp, Klebsiella pneumoniae
atgtccgcccagaaaccggggttgcatccgcgcaaccgtcatcacagccgctacgatctcgccacgctttgtcaggtcaatcctgaactcaggcaattcctcacgcttacacccgccggggagcaaagcgtagactttgccaatccgctggcggtgaaggcgctcaataaggcgttgctggcccatttttacgccgtagcgaactgggatatcccggacggttttctctgcccaccagtaccgggccgggcggattatattcatcaccttgccgatttactggccgaagcaagcggaacaattccagcgaatgccagcattctggatatcggcgttggtgcgaactgtatttatccgctgattggcgtacatgaatatggctggcgttttaccggtagtgaaaccagcagccaggcgttaagcagtgtgcaggcgatcatcagtgctaatccggggcttaaccgcgccattcgtctgcgtcggcaaaaagagagtggggcgatttttaacggcattatccataaaaacgagcaatacgacgcgaccttgtgtaacccgccattccacgattccgccgctgcggcgcgggcaggtagtgagcgtaaacgccgtaacctggggctgaacaaagacgatgcactgaactttggtggtcagcaacaggagttgtggtgtgaaggcggtgaagtcgcctttatcaaaaagatgattgaagagagcaaaggcttcgcgaagcaggtgatgtggtttacctcgctggtatctcgtggtgaaaacttaccgccgttgtatcgtgctctgacggacgtgggcgcggtgaaggtggttaaaaaagagatggcccaggggcaaaagcagagtcgctttattgcctggacctttatgaacgacgagcagcgccgccgttttgttaatcgccaacgttaa

SEQ ID NO: 260375 - DNA, 261 bp, Klebsiella pneumoniae
atgaaaaagtgcctcacactactgattgccaccgtcctgagcggaatctctctcacggcttatgccgcgcaaccgatgagtaacctggacagcggtcagctacggcccgccggtaccgtttcggcaactggcgcatcaaacctaagcgatctggaggataaactggcagaaaaagcgcgcgagcaaggcgcgaaaggttatgtcattaattccgcaggcggaaatgaccagatgttcggtactgcaaccatctacaaataa

SEQ ID NO: 260376 - DNA, 2283 bp, Klebsiella pneumoniae
atggaaaacaatcgcaatttccctgccagacaatttcattcgctcacgttctttgccggtctttgtattggtattacgcctgtggcacaggcactcgccgccgaagggcaagctaacgcggatgacacgctggttgtcgaagcatcaacgccttcgctttatgcgccacaacaatctgcagatccgaaattctcgcgtccggtagcgaatactacccgcacgatgacggtgatttctgaacaagtgattaaagatcagggcgcaaccaaccttaccgacgcactcaaaaacgtccccggcgtgggtgcgttttttgcgggtgagaacggtaactccaccactggcgacgccatttatatgcgcggtgctgatacctctaacagtatttatattgatggcattcgcgatatcggcagcgtctcgcgcgacaccttcaataccgagcaggtcgaagtgattaaagggccgtccggcaccgactacgggcgcagcgcaccgacaggctcgatcaatatgatcagcaagcagccgcgcaatgattccggcattgacgcctccgccagtattggtagcgcctggttccgccgcggcacgctggacgtcaatcaggtcattggtgataccaccgcggcgcgcctgaatgtgatgggcgaaaaaacgcacgatgccggacgcgacaaagtcaaaaatgagcgttacggcatcgccccttctgtcgcttttggccttggtacagcgaatcgtttgtatcttaattatctgcatgtcacccagcacaacacgccagacggcggcattccgaccatcggtttgccgggctattctgccccatctgcgggaacggcggccctgaatcattccggaaaagttgatacgcataacttttacggcacggattccgattacgacgattcgaccaccgacaccgctaccatgcgttttgagcacgacatcaacgataacaccaccattcgcaatactacccgttggtcgcgcgtgaagcaggattacctgatgacggcgattatgggtggggcgtcgaatattacccagcccaccagcgatgtgaatagctggacctggtcacgcacggcgaatactaaagatgtgagtaataaaattctcaccaaccagaccaacctgacctcgacgttctataccgcttctatcggtcatgatgtcagtaccggcgtggaatttacccgtgaaacgcagactaactacggcgttaatccggtgacgttacctgcggtaaatatttatcatcctgacagcagcattcatcccggcggcctgacgcgcaacggcgcaaacgccaatggtcagacggataccttcgcaatttacgccttcgatacgctgcaaatcacccgtgattttgagctgaacggcgggatccgtctggataattatcatactgaatatgacagtgccaccgcctgcggcggcagcggacgcggtgccatcacctgcccagctggtgtggcaaaaggttctccggtcaccaccgtcgacaccgccaagtcgggcaatctggtgaactggaaagccggggcgctgtatcacctgacggaaaacggtaatgtctatattaactatgccgtttcccagcagcctccgggcggcaacaacttcgcccttgcgcagtctggcagcggtaacagtgccaaccgcaccgattttaaaccgcaaaaagccaacaccagcgagattggcaccaaatggcaggttctggataaacgcctgttgctcaccgccgcgctgttccgtactgatatcgaaaatgaagttgagcaaaatgatgacggaacttactcgcaatacggtaagaaacgcgtcgaaggctatgagatatccgtggccgggaatatcactcccgcgtggcaggtgattggcggctatacccagcaaaaagcaaccatcaaaaacggcaaagatgttgcccaggatggttcctcatcgctgccgtataccccggagcacgcctttaccttatggagccagtatcaggcaaccgatgatatttccgttggtgcgggcgcacgctatatcggcagtatgcataaaggttctgacggcgcggtgggaacgccagcgtttaccgaaggttattgggtcgccgacgctaaactggggtatcgggttaatcgcaatctcgacttccagctaaacgtctacaacctgtttgataccgattacgtcgcctcaatcaacaagagcggctaccgttatcacccgggcgagccaagaaccttcttgctcacggccaatatgcatttctga

SEQ ID NO: 260377 - DNA, 675 bp, Klebsiella pneumoniae
atgtaccacattcccggcgtgctatcgccaaaggacgtcgcccgttttcgcgaacaactggaacaagccgaatgggtggatggacgcgtcaccaccggcgcacaaggtgcgcaagttaagaacaatcaacaggtagacacccgcagcacgttatacgccgccctgcaaaatgaggtgctgaacgcggttaaccaacatgctttgttctttgccgcggccttgccgcgtaccctttccacgccgctgtttaatcgctatcagaacaatgaaacttatggttttcatgtggatggcgcagtacgcagtcacccacaaaacggctggatgcgcactgacctttctgccacgctgtttttaagcgatccacaaagctacgatggcggcgaactggtcgttaatgacaccttcgggcaacatcgggtaaaacttccggcaggcgatctggtgttgtatccctccagcagcttgcattgcgtgacacccgtaacccgcggcgtacgagtggcatcatttatgtggatccagtcgatgatccgtgatgataaaaagcgcgccatgctgtttgaactggacaacaatattcagtcgctgaaaagccgctacggcgaaagtgaagagatcctgtcgctgctcaatctttatcataatctgctgcgggaatggtcggagatctga

SEQ ID NO: 260378 - DNA, 267 bp, Klebsiella pneumoniae
atggcatccggttgggctaacgatgacgccgtcaacgaacagatcaacagtacaattgaagatgcgattgcccgcgctcggggtgaaattccgcgtggcgaaagcctgtatgaatgtgaagagtgcggagcccccatcccgcaagcccgtcgggaagccattcctggtgtgcgcttatgcattcattgtcagcaggagaaagatttacaaaaaccagcttatacaggatataatcgcagaggttcgaaagacagccagttacgttaa

SEQ ID NO: 260379 - DNA, 261 bp, Klebsiella pneumoniae
atgaaaactatcaatactgttgttgctgctatggctctttcaactctgtcatttggcgtgtttgccgcggaaccggtaacggcatcccaggcacagaacatgaataaaatcggcgtggtttctgccgatggcgcatccaccctcgatgccctggaagcgaaactggctgagaaagctgcggcagctggggcgagtggatacagcatcacttctgccaccaacaacaataaattaagcggtactgcggtaatttataagtaa

SEQ ID NO: 260380 - DNA, 1086 bp, Klebsiella pneumoniae
atggaaagtggtcatcgctttgatgctcagacgctgcacagttttattcaggctgtatttcgtcagatgggtagtgaggaacaagaagcgaaattagttgccgatcatttaatcgcggcaaacctggcagggcatgattcacatggtattggcatgatcccaagctatgtgcgctcctggagtcaggggcacctgcaaattaaccatcatgccaaaatcgttaaagaggcgggggcggcggtcacgctcgatggcgatcgcgcatttggtcaggtcgcggcacatgaagcgatggcgctggggattgagaaagcgcatcagcacggcattgccgccgtggcgctccataactcgcatcatatcggccgtatcggttactgggcggagcagtgtgcagcggcggggtttgtctctatccactttgttagcgtggtcggtattccaatggtcgcgccgttccacggtcgcgacagccgctttggcaccaatccgttctgtgtggttttccctcgtaaagataatttcccgctgttgcttgattacgccaccagcgccatcgcatttggcaaaacccgcgtcgcctggcataaaggcgtccccgtgccgccaggttgcctgattgacgttaacggcatgccgacgaccaatccggcggtaatgcaggagtcgccgttgggttcgctgttgacctttgccgaacataaaggctacgcccttgcagcgatgtgtgaaattcttggtggggcgctttccggcggtaaaacgacgcatcagaaaacgttacaaaccagtcccgatgccattcttaactgcatgaccactatcatcatcaacccggaactgttcggcgcgccggattgtagcgcgcagaccgaagcctttgccgagtgggtgaaagcctcgccgcatgatgacgataagccgattttgctaccgggcgagtgggaagttaacacgcgtcgcgaacggcaggagcaggggattccattggatgcgggaagctggcaggccatttgtgatgcggcgcgaaaggttggtatgccggaagagacgttgcaggctttctgtcagcagttagccagctaa

SEQ ID NO: 260381 - DNA, 963 bp, Klebsiella pneumoniae
atggactatcgcaaaatcattaaagagatcgggcgcgggaaaaaccacgcgcgcgatttagaccgggatactgcgcgcggtctgtatgcccatatgctcaatggtgaagtccctgaccttgagttgggcggcgtattgattgcgctgcgtatcaaaggggaaggggaagcagagatgctcggcttttacgaagccatgcaaaatcacaccatcaagctgacgccgcctgcagacaagccgatgccgattgtcatccccagttacaacggcgcgcgtaaacaggccaacctgacgccgttgttggcgattctcctgcacaaactcggttttcctgtggtggttcacggggttagcgaagatccaacccgcgtgctgacagaaaccattttcgaactgatgggtattacgccaacgttgcacggcgggcaggcgcaggcgaagctcgacgaacatcaaccggtgtttatgcctgtcggcgcgttttgcccgccgctggaaaaacaactggcgatgcgctggcggatgggcgtgcgtaacagtgcacataccctggcgaaactggcgacgccatttgccgaaggtgaggcactgcgtctttccagcgtttcgcatccggaatacatcgggcgagtcgcgaagttctttagcgatatcggcgggcgggcgttactaatgcatggtactgaaggcgaagtgtatgctaatccgcagcgctgcccgcagatcaatctcattgaccgtgaagggatgcgggtgctgtatgaaaaacaggaccctgctggtagcgagttactgccacaagcaaaagatccggaaaccacggcgcagtggattgagcgttgcctggctggcagcgaaccgattcccgaatcgctgaaaatccagatggcttgctgcctggtggctacgggggaagcggcaactatcagcgacggcctggcgcgtgttaatcaggcattttaa

SEQ ID NO: 260382 - DNA, 282 bp, Klebsiella pneumoniae; identical to SEQ ID NO: 9601

SEQ ID NO: 260383 - DNA, 441 bp, Klebsiella pneumoniae; identical to SEQ ID NO: 9600

SEQ ID NO: 260384 - DNA, 1365 bp, Klebsiella pneumoniae
atgtctttcgattctttgggtttaagccctgatatcctgcgcgccgttgccgagcagggttaccgtgaacccacccctattcagcagcaggcgatccctgcggtgctggaaggccgcgacctgatggctagcgcccagactggcaccggcaaaacagcgggctttacgctgccgctgttgcaacacctgatcactcgccagccgcacgccaaagggcgtcgtccggtacgtgcgctcattcttaccccgacccgtgaactggcggcgcagattggcgaaaacgtccgtgattacagcaaatacctgaacattcgttcgctggtggtgtttggcggtgtcagcattaacccgcagatgatgaagttgcgcggcggcgttgatgtgctggttgcaacgccgggacgtctgctggacctggaacatcagaatgcggtgaagctggatcaggttgaaatcctcgtcctcgatgaagctgaccgcatgctcgacatgggctttatccacgatatccgtcgcgtgttaacaaaactacctgcgaagcgccagaacctgttgttctccgcgaccttctctgacgatattaaagctctggcggaaaaactgttgcacaacccgctggaaatcgaagtggcacgccgcaataccgcgtctgatcaggtgacccagcatgttcactttgttgataagaaacgcaaacgcgaattgttgtcgcacatgattgggaaagggaactggcagcaggtgctggtgtttacccgtaccaaacatggcgctaaccatctggctgaacagctcaataaagatggcatccgtagtgcggcgatccacggcaataaatcgcaaggtgcgcgtacccgtgcgctggctgattttaaatcgggcgatattcgtgtactggtggcaactgacatcgctgcgcgcggcctggatattgaagagctgccgcacgtggtcaactatgaactgccaaacgtaccggaagattatgtccaccgtatcgggcgtaccggtcgtgcggctgctaccggtgaagcgttgtcgctggtgtgtgttgatgaacacaaactgctgcgtgatatcgaaaaactgctgaaaaaagagatcccgcgcattgcgattccgggttatgagccggacccgtcaatcaaagccgaaccgatccagaacggtcgccagcaacgtggcggcggcggtcgtgggcaaggtggtggtcgcggtcaacagcaaccacgccgtgcggaaagtggtgcgaagtctggtaacgcgaagcccgcagaaaaaccgtctcgtcgtctcggcgatgccaaaccggcaggcgaacaacaacgtcgccgccgtccgcgtaaacctgccgctgcgcagtaa

SEQ ID NO: 260385 - DNA, 672 bp, Klebsiella pneumoniae
atgaataatcctgccatgacaatcaagggtgaacaggcgaaaaaacagctgattgctgccgcactggcgcagtttggtgaatatggaatgaacgccaccacccgcgagatagccgcccaggccgggcagaatatcgctgccatcacctactacttcggttcgaaagaggatttgtacctcgcctgcgcccagtggattgccgattttattggcgagcagttccgtccgcacgccgaagaggccgaacgcttgttcgcacaaccacagccagatcgggctgccatccgtgaactgatccttcgcgcctgcaggaacatgattaagctgctcacccaggatgacactgtcaacctcagcaaatttatctcccgtgagcagctctctcccacggcagcctatcacctggtgcacgaacaggtgattagtccgctacacagccaccttacacgcctgattgccgcctggaccggctgcgacgccaatgatacccgcatgatccttcatacccatgcgttgattggtgagattctggcgtttcgtcttggcaaagaaacaattctgttacgtaccggctggaccgcgttcgatgaagaaaagaccgaactgattaaccagacggtgacctgtcatatcgacctgattttgcaaggattatcgcaaaggagtttgtag

SEQ ID NO: 260386 - DNA, 996 bp, Klebsiella pneumoniae
atgaaaaaacctgtcgtgatcggactggcggtagtagtacttgccgccgtggttgccggaggctactggtggtatcaaagccgccaggataacggcctgacgctgtatggcaacgtggatattcgtacggtgaatcttagtttccgtgttggggggcgcgttgagtcgctggcagtggacgaaggtgatgcgatcaaagcgggccaggtgctgggcgaactggatcacaagccgtatgagattgccctgatgcaggcgaaagcgggcgtttcggtggctcaggcgcagtatgacctgatgcttgccgggtatcgcgatgaagaaatcgctcaggccgccgcagcggtgaaacaggcgcaagctgcctatgactatgcgcagaacttctataaccgccagcaaggactgtggaaaagccgcaccatttcggcaaatgacctggaaaatgcccgctcctcgcgcgaccaggcgcaggcaacgctgaaatcggcacaggataaattgcgtcagtaccgttccggtaaccgcgaacaggatatcgcccaggcaaaagccagcctcgaacaggcgcaggcgcaactggcgcaggcggagctgaatttgcaggactcaacgttgatagccccgtctgatggcacgctgttaacgcgcgcggtggagccaggcacggttctcaatgaaggtggcacggtgtttaccgtctcgctaacacgtccagtgtgggtgcgtgcctatgttgacgaacgtaatcttgaccaggcccagccggggcgcaaagtgctgctttataccgatggtcgcccggacaagccgtatcacgggcagattggtttcgtttcaccgactgctgaatttaccccgaaaaccgtcgaaacgccggatctgcgtaccgacctcgtctatcgcctgcgtattgtggtgaccgacgccgatgatgcgttacgccagggaatgccagtgacggtacaattcggtgacgaggcaggacatgaatga

SEQ ID NO: 260387 - DNA, 1737 bp, Klebsiella pneumoniae
atgaatgatgccgttatcacgctgaacggcctggaaaaacgctttccgggcatgaacaagcccgccgtcgcgccgctcgattgcaccattcatgccggttatgtgacggggctggtagggccagacggtgcgggtaaaaccacgctgatgcggatgctggcgggattactgaaacccgacagcggcagtgccacggtgattggctttgatccgatcaaaaatgacggcgcgctgcacgccgtgctcggctatatgccgcagaaatttggtctgtatgaagatctgacggtgatggagaacctcaatctttacgcggatttgcgcagcgtcaccggcgaggcacggaagcagactttttctcgcctgctggagtttacgtctcttggcccgtttaccggacgcctggcgggcaagctctccggtgggatgaaacaaaaactcggcctggcctgtaccctggtgggcgaaccgaaagtgttgctgctcgatgaacccggcgtcggcgttgaccctatctcacggcgcgaactgtggcagatggtgcatgagctggcgggcgaagggatgttaattctctggagcacctcgtatctcgacgaagccgagcagtgccgtgacgtgttactgatgaacgaaggcgaattgttgtaccagggagaaccgacggccctgacacaaaccatggccggacgcagctttctgatgaccagcccgcacgagggcaaccgcaaactgttgcaacgggcattgaaactgccgcaagtcagcgacggcatgattcaggggaaatcggtacgtctgatcctcaaaaaagaggccacaccagacgatattcgccatgccgacgggatgccggaaatcaacatcaacgaaactacgccgcgttttgaagatgcgtttattgatttgctgggcggtgccggaacctcggaatcgccgctgggtgcaatattgcatacggtagaaggcacacccggtgagacggtgatcgaagcgaaagaactgaccaagaaatttggtgattttgccgccaccgatcacgtcaactttgccgttaaacgcggggagatttttggtttgctggggccaaacggcgcgggcaaatcgaccacctttaagatgatgtgcggtttgctggtaccgacctctggccaggcgctggtgctgggcatggatctgaaagagagttccggtaaagcgcgccagcatctcggctatatggcgcaaaaattttcgctctacggcaacctgacggtcgaacagaatttacgctttttctctggtgtgtatggcttacgcggtcgggcgcagaacgaaaaaatctcccgtatgagcgaggcgttcggcctgaaaagtatcgcctcccacgcgaccgatgaactgccattaggttttaaacagcggctggcactggcctgctcgctgatgcatgaaccggacattctgtttctcgacgaaccgacgtccggcgttgatcccatcacccgccgtgaattttggctacatatcaacagtatggtagagaaaggcgtcacggtgatggtcaccacccactttatggatgaagcggaatattgcgaccgcatcggcctggtgtaccgcgggaaattaatcgccagcggcacaccggacgatttgaaagcgcagtcggccaacgatgagcaacccgatcccactatggagcaagcctttattcagttgatccacgactgggataaggagcatagcaatgagtaa

SEQ ID NO: 260388 - DNA, 1134 bp, Klebsiella pneumoniae
atgagtaatccgatcctgtcctggcgtcgcgtgcgggcgctgtgcgtcaaagagacacggcagatcgttcgcgatccgagtagctggctgattgcggtagtgatccctctgctgctgctgtttatttttggctacggcattaacctcgactccagcaagctgcgggtcgggatattgctggaacagcgtagcgaagcggcgctggatttcacccacaccatgacaggttcgccctacatcgacgccaccatcagcgataaccgtcaggaactgatcgccaaaatgcaggcggggaaaattcgcggtctggtggttattccggtggatttcgccgaacagatggagcgcgccaacgccaccgcaccgattcaggtgatcaccgacggcagtgagccgaataccgctaactttgtgcaggggtatgtcgaagggatctggcagatctggcaaatgcagcgagcggaggacaacgggcagacttttgaaccgcttattgatgtacaaacccgctactggtttaacccggcggcgattagccagcacttcattatccccggtgcggtgaccatcatcatgacggtcatcggcgcgattctcacctcgctggtggtggcgcgagaatgggaacgcggcaccatggaggctctgctctctacggagattacccgcacggaactgctgctgtgtaagctcataccctactatttcctcgggatgctggcgatgttgctgtgtatgctggtgtcggtgtttattctcggcgtgccgtatcgcgggtcgctgctgattctgttttttatctccagcctgtttttactcagtaccctggggatggggctgcttatttccacgattacccgcaaccagttcaatgccgctcaggtcgccctgaacgcggcttttctgccgtcgattatgctttccggctttatttttcagatcgacagtatgcccgcggtgatccgcgcggtgacgtacattattcccgcacgttatttcgtcagcaccctgcaaagcctgtttctcgccgggaatattccggtggtgctggtggtgaacgtactgtttttgatcgcttcggcggtgatgtttatcggcctgacgtggctgaaaaccaaacgtcggctggattag

SEQ ID NO: 260389 - DNA, 411 bp, Klebsiella pneumoniae
atgaagtggcaacaacgtgttcgtgtcgcaacgggtctaagttgctggcagattatgttgcatttactggtagtggcgctgctggtggtgggctggatgagtaagactctggttcacgtcggcgtgggattatgcgcactgtattgtgtcacggtagtgatgatgctggtgtttcagcgccaccccgagcaacgctggcgtgaggtggcagacgtgctggaagagctgaccacgacctggtattttggcgcagcgctgattgtgctgtggctattgtcccgtgtactggaaaacaactttttgctggcgattgcagggctggcaatccttgccggcccggcggtggtgtctttgctggcgaaagataagaagttacatcaccttacgtctaaacatcgcgtacgccgctga

SEQ ID NO: 260390 - DNA, 762 bp, Klebsiella pneumoniae
atgcccgatcaaacacaacaattttcgttcaaggtgctcaccatcaatattcacaaaggctttaccgcgtttaaccgacgcttcattttgccggaacttcgcgacgccgtgcgtaccgtcagcgccgatattgtttgcctgcaggaagtgatgggcgcgcacgaagttcatccgctgcatgtggaaaactggcccgatacctcgcactacgagtttctcgccgacactatgtggagcgattttgcctacggtcgcaatgccgtatacccggaagggcatcacggtaacgccgtactgtcgcgctatcccattgaacattatgaaaaccgcgatgtttcggtcgatggtgcggaaaagcgcggcgtgctctactgccgcattgtgccgccgatgaccggaaaagcgattcatgtaatgtgcgtacatttgggcctgcgtgaggcgcaccgtcaggcgcagcttgcgatgctcgccgaatgggtgaatgagctaccggacggcgaaccggtattggtggcgggtgatttcaatgactggcggcaaaaagctaatcatccgttaaaagtgcaggccggactggatgagatttttacccgcgcccacggacgcccggcgcgcacgtttccggtgcaatttcctctactacgactggacaggatctacgtcaaaaatgccagcgccagcgcgccaaccgcgttgccgctgcggacatggcgacacctttctgatcatgcccctttaagtgcggagattcatttatga

SEQ ID NO: 260391 - DNA, 1242 bp, Klebsiella pneumoniae
atgaaatgtagctggcgcgaaggcaataagatccagttgctggaaaacggcgagcaatattatcccgcggtgtttaaggcgattggcgaggcacaagaacgcatcattcttgaaacgtttatctggtttgaggatgacgtcggcaaacaactgcatgcggcactactggcagcagcgcaacgcggggtaaaagcggaagtcttacttgatggctacggttcgccggatctcagcgatgagtttgtcaatgaactgacggccgctggcgtggtgttccgctactacgatccccgccctcgcctttttggtatgcgcaccaatgtgtttcgccggatgcatcgcaaaattgtggtgatcgacgcgcatatcgcctttattggcgggctgaattactccgccgagcatatgtccagctacggtccagaggctaaacaggattacgcggtgcgccttgaagggccgattgtcgaagatattctgcaatttgaactggaaaacctgccaggacagagcgcggcacgacgctggtggcgacgtcatcacaaagcggaagagaaccgccagccgggagaagcgcaggtattgctggtctggcgcgataacgaagaacatcgcgatgatattgaacgtcactatctgaaaatgctcactcaggcacggcgggaagtgattatcgccaacgcctacttcttccccggctatcgatttttacacgccttgcgtaaagcggcacggcgcggggtgcggatcaaactgatcattcagggcgaaccggatatgccgattgtcagagtcggcgcgcgcttgctgtataactatctggttaaaggcggcgttcaggtttttgagtatcgccgccgcccgctccacggcaaagtggcgttgatggacgatcactgggcgacggtagggtccagtaatctcgatccgctcagtttgtcactgaatctcgaagcaaatgtcatcatccacgatcgtcattttaaccagacgctgcgcgataatctgaacggcattatcgccgcagactgccagcaggtggatgaaaccatgctgccgaaacgcacctggtggaatctgaccaaaagcgtgctggccttccactttttacgccacttcccggcgctggtcggctggcttccggcacacacaccacgtctggcgcaggttgacccgcccgctcagccgacaatggaaacgcaggatcgggtagaaactgaaaacacgggggtaaaaccctga

SEQ ID NO: 260392 - DNA, 957 bp, Klebsiella pneumoniae
atgagtaaatcacacccacgctggcgcttagcaaagaagatcctcacctggctgttttttatcgcggtgatagtgttgctggtggtctacgccaaaaaggtggactgggaagaggtctggaaggtcatccgcgactacaatcgcgttgcgttgctcagtgcggtcgggctggtggtcgtcagttatctgatttacggctgctatgatctgctcgcccgcttttactgcggtcacaaactggcgaagcgccaggtgatgctggtgtcgtttatctgctacgccttcaacctgacgctcagtacctgggtcggcggcattggtatgcgctatcgtttgtactcccggctagggttaccgggcagcactattacgcggattttctcgctcagtattaccaccaactggctgggctatattttactggcagggattatctttaccgcaggcgtggtggagttgccggatcactggtatgtcgatcaaaccacgctgcgtattctcggcattggcttattgatgattatcgcggtttatttgtggttttgcgctttcgcgaagcaccgccatatgaccatcaaaggacaaaagctggtgctgccttcatggaaatttgccctcgcccagatgctgatttccagcgttaactggatggtaatgggggcgattatctggctgttacttggtcaaagcgtgaactatttctttgtactgggcgtgttactggttagtagtattgctggcgtcatcgtgcatattccggcggggattggtgtgctggaagcggtatttatcgcgctactggctggggagcatacctcgaaagggagcattatcgccgccctgctcgcttatcgcgtcctgtattactttatcccgctgctgctggcgctgatctgttacctgctactggaaagccaggcgaagaagctacgagcgaaaaatgaagcggcgatgtga

SEQ ID NO: 260393 - DNA, 390 bp, Klebsiella pneumoniae
atggaatcatactcgcaaaacagcaataaattagattttcagcacgaggccaggatattaaacggtatatggctcattaccgctttgggtatggtggcaaccgcagagctggccctggtgatcatcatggatgccgcattaatgagtgaacgacccgtttgggtaataagttgcttaatgatagtgttatggtcaggcattatctcgcatggacgaaataagctccttgaactggcaggaaaatgccatagcgaagagttgtggagtccggttcgttgcgcttttacaggtgcattaacactctattactattttatcggcttctttgggatacttgccgcgatagctataacgcttgtctggcaaaggcatacgcgtttttttcattag

SEQ ID NO: 260394 - DNA, 705 bp, Klebsiella pneumoniae
atggacagattcccacgttctgattcaattgtacaaccccgggctggcttgcaaacttatatggcgcaagtctatggctggatgaccgttggcttgttgctgaccgcatttgttgcctggtatgcggctaattccgcggccgtgatggagctgttgttcactaaccgtgtctttttaatcggtctgatcatcgcgcaattagcattggttattgtgttatcagcgatgattcaaaagctgagcgcaggtgtaacgacgatgctctttatgctttattcggcgctgacgggtcttacgctttccagtattttcattgtctataccgctgcttctatcgccagtactttcgtcgttactgccgggatgtttggcgcaatgagcctgtacggttacaccacgaagcgcgatctaagcggctttggcaatatgctgtttatggcgttaatcggcattgtgctggcatcgctggtcaacttctggctgaaaagcgaagcattgatgtgggcagttacctacatcggcgtgattgtctttgtcggattgacggcgtatgacactcagaaattgaaaaatatgggtgagcagattgatacccgcgacacgtcgaacctgcgcaaatattccattcttggcgcgttaaccttgtatctggacttcatcaacttgttcctgatgttgttgcggatcttcggcaaccgccgttaa

SEQ ID NO: 260395 - DNA, 453 bp, Klebsiella pneumoniae
atggcagaaaccaaaattgttgtcggcccgcagccattcagcgtaggagaagagtatccgtggctggcggagcgtgatgaagacggtgcggtagtcacctttaccggtaaggtgcgcaaccataaccttggcgacagcgtcaaagcattaaccctcgaacactatccggggatgactgaaaaagcactggcagaaattgtcgatgaagcgcgtaaccgctggccgctggggcgcgtcacggtgattcaccgcatcggggaattatggccgggcgatgaaatcgtttttgtcggtgtcaccagtgcgcatcgcagcagtgcgtttgaagccgggcagtttattatggattatctcaaaacccgcgcaccgttctggaagcgcgaagccacgccggaaggcgaccgctgggtcgaagctcgggagagcgatcagcaggcggcaaaacgctggtag

SEQ ID NO: 260396 - DNA, 246 bp, Klebsiella pneumoniae
atgattaaagttctttttttcgcccaggtgcgcgagttggtgggaacagatgcaaccgaagtggctgcggatttcccaaccgttgaagcgttacgccaacatctggctgcgcagagcgatcgctgggcgctggcgctggaagatggcaaattgctggctgccgtcaaccagacgctggtgagtcttgaccatccgctgactgacggcgacgaagtggctttcttcccgccggtaaccggaggttaa

SEQ ID NO: 260397 - DNA, 486 bp, Klebsiella pneumoniae
atgtcgcaactgacccatatcaacgccgctggcgaagcacacatggtggatgtctccgccaaagcggaaaccgtgcgtgaagcgcgggcggaagcctttgtcaccatgcgcagcgagacgctggcgatgattattgatggtcgccaccacaaaggcgacgtatttgccactgcgcgtatcgccggtattcaggcggcaaaacgcacctgggatctgatcccgctgtgtcacccgctgatgctcagcaaagttgaagtcaatttacaggccgagccggagcacaatcgggtacgtatagaaaccttatgccgcctgaccgggaaaaccggtgtcgaaatggaagcgttaaccgcggcctccgtggcggcgctgaccatttatgacatgtgcaaagcggtgcaaaaagatatggtaattggtccggtacgtttgctggcgaagagcggcggcaagtcgggtgactttaaggtggaagcggatgattaa

SEQ ID NO: 260398 - DNA, 513 bp, Klebsiella pneumoniae
atgagtcaggtaagcactgaatttatcccgacccgtattgctattcttacggtttctaatcgtcgtggtgaagaagacgatacctccggtcactatctgcgcgattcggcgcaggaagcgggccatcacgttgtcgataaagccattgtgaaagaaaaccgctacgctattcgcgctcaggtatctgcgtggatcgccagcgacgatgtacaagtggtattgattacgggtggtactggcctgacggaaggtgatcaggctcccgaagcgctgctgccgttgttcgaccgtgaagttgaaggttttggtgaagtgttccggatgttgtcgtttgaagagattggcacctcaacgttgcaatctcgtgcggtagcgggcgtcgctaacaaaacgctgattttcgccatgccgggttcgaccaaagcgtgccgcaccgcgtgggaaaatatcatcgcgccgcagctcgatgcccgtacacgtccatgcaatttccatccacatttgaagaaataa

SEQ ID NO: 260399 - DNA, 990 bp, Klebsiella pneumoniae
atggcttcacaactgactgatgcatttgcgcgtaagttttactacttgcgcctgtcgattaccgatgtgtgtaactttcgttgcacctactgcctgccggatggctacaaaccgagcggcgtcaccaataaaggctttcttaccgtcgatgaaattcgccgggttacgcgcgccttcgccagtcttggcaccgaaaaagtccgtctgacaggtggtgagccgtctttacgccgcgactttaccgatatcatcgccgctgtgcgggaaaacgacgctatccgccagattgcggtcaccaccaatggttaccgtctggaacgcgatgtggcgaactggcgcgatgctggacttactggcatcaacgtcagcgttgatagccttgacgctcaccagtttcatgccattaccgggcaggataaattcaaccaggtcatggcagggatcgatgccgcatttgaggccggttttgaaaaggtcaaagtcaataccgtgctgatgcgtgatgttaatcatcatcagctcgacacctttctgaactggatccagcatcgccctatccagctgcgtttcatcgaattgatggaaacgggtgagggcagcgagctcttccgtaagcatcacatctctggtcaggttctgcgtgacgagctactgcgtcgcggctggatccaccaattacgtcaacgcagcgacggtcccgcgcaagtcttttgtcatccggattacgccggagagattggccttatcatgccgtatgaaaaagacttctgcgccacttgcaaccgcctgcgcgtttcctccattggtaaactccatctctgcctgtttggtgaaggcggcgttaacctgcgcgatctgctggaagacgatacccagcaacaggcgctggaagcgcgtatttcagcggcgctgcgggagaagaaacagacccatttcctgcatcaaaacaacaccggtattacgcaaaacttatcgtacattggcggctaa

SEQ ID NO: 260400 - DNA, 909 bp, Klebsiella pneumoniae
atgcgcaatcgtacgctggctgaccttgatcgtgtcgttgctctcggcggagggcatggactgggacgcgttctctcatcactttcgtctttgggttctcgtttaacgggtatcgtcaccaccacggataatggtggctcgacggggcgtattcgccgctcagaaggcggtattgcctggggcgatatgcgtaactgcctcaaccagctgataactgaacccagcgtcgcttccgcaatgtttgaatatcgtttcggcggtaatggcgaactttccggacacaaccttggaaacctgatgctgaaggcactggatcaccttagcgtgcgacctcttgaagcgatcaatctgattcgcaatctgctgaaagtggacgcacatttgattccgatgtcggagcatcctgttgatctgatggcgattgacgatcaggggcatgaagtttacggcgaggtcaatatcgaccagttaactgcgccgattcaagagttattgttaacgccgaatgtacccgcaacccgtgaggcggttcacgctatcagtgaagcggatctcatcattattgggcctggcagtttttacaccagcctgatgccaattctgctgctgaatgaaatcgcacaagcattacgccgcacgccagcgccgatggtctatatcggcaatctggggcgtgagttaagtttacctgcggctaatctgaagctggaaagcaagctggcaattatggagcagtatgttggtaaaaaggtcattgatgcggtcatcgtcgggcccaaagtggatgtctcggcggtgaaagagcggattgtgattcaggaggtgctggaggccagcgatattccgtatcgtcatgaccgccagttgctgcatagcgcgctggaaaaggcattacaggcactgggttaa

SEQ ID NO: 260401 - DNA, 2022 bp, Klebsiella pneumoniae
atgagtaaaccgttcaaactgaattccgcttttaaaccttctggcgatcagccagaggcgattcgacgtctcgaagaggggctggaagatggcctggcgcaccagacgttactcggtgtaactggctccgggaaaaccttcaccatcgccaatgtcattgctgaccttcagcgcccaaccatggtactggcgcccaacaaaacgctggcggcccaactgtacggcgaaatgaaagagttcttcccggaaaacgcggtggaatatttcgtctcctactacgactactatcagccggaagcctatgtaccgagttccgacaccttcattgagaaagatgcctcggtaaacgaacatattgagcagatgcgtttgtccgctaccaaagcgatgctggagcggcgtgatgtggttgtggtggcgtctgtttccgcgatttatggtctgggcgatcctgatttatatctcaagatgatgctccatctcacggtcggcatgattatcgatcagcgcgcgatcctgcgccgactggcggagctgcaatacgctcgtaatgatcaggcattccagcgcggtactttccgcgttcgtggtgaggtgatagatatcttcccggcagaatcggatgacattgcacttcgcgtggaactgtttgacgaggaagtggaacgattgtcgttatttgacccgctaaccgggcagattgtttccactattccacgttttaccatctacccgaaaacgcactacgtcacgccacgtgagcgcatcgtacaggcgatggaggagatcaaagaagaactggccgccagacgcaaagtgctgttggaaaacaacaaactgctggaagagcagcggctgacccagcgtacccagtttgatctggagatgatgaacgagctgggctactgttcggggattgaaaactactcgcgcttcctctccggtcgtggaccgggtgagccaccgccgacgctgtttgattacctgcctgccgatgggctgctggtcgtcgacgaatctcacgtcaccattccacaaattggtggcatgtatcgcggtgaccgggcgcgtaaagagactctggtggagtacggcttccgcctgccatcagcgctggataaccgtccgctgaaatttgaagagttcgaagcattagcgccgcaaaccatctatgtttcggcgacgccgggtaattacgagctggaaaaatccggtggtgatgtggtggatcaggtggtgcgtccaacaggcttactcgacccgattatcgaagtgcggccggtagcaacacaggtggatgatcttctttcggagattcgtcagcgagcggcaattaacgaacgcgtactggttacaactctgaccaagcggatggcggaagatctcactgaatatctcgaagaacacggtgagcgcgtgcgttatcttcactcagatatcgacaccgtcgaacgtatggagattatccgcgacttgcgtctgggtgagttcgacgtattggtagggatcaacttactgcgcgaaggtctggatatgccggaagtgtcgctggtggcgatcctcgacgctgacaaagaaggcttcctgcgttccgaacgttcgttgatccagaccattggtcgtgcggcacgtaacgttaacggtaaagcgattctctacggcgataagatcaccccatcaatggcgaaagcgattggcgaaaccgaacgtcgccgcgagaaacagcagaagtacaacgaggaacacggcattacgccgcaaggcttgaacaagaaagtggtcgatatcctggcgctggggcagaacattgccaaaaccaaagcgaagggcagaggaaaatcgcgcccgattgttgagccggataatgtgccgatggatatgtcgcctaaagcgttgcagcagaagatccatgaactggaagggttgatgatgcaacacgcgcagaatctggagttcgaagaagcggcgcaaattcgtgaccagttgcatcagctgcgtgagctgtttattgccgcgtcgtga

SEQ ID NO: 260402 - DNA, 678 bp, Klebsiella pneumoniae
gtgagtaaacgttattttgtcaccggaacggataccgaagtggggaaaaccgtcgccagttgtgcacttttacaagccgcaaaggcagtaggctaccggacggcaggttataaaccggtcgcctctggcagcgaaaagaccccggaaggcttacgtaatagcgacgcgctggcgttacagcgcaacagcagcctgcagctggattacgcaacggtaaatccttacaccttcgcagaacccacttcgccgcacatcatcagcgcacaagagggcaggccgatagaatcattggtaatgagcgccggattacgcgcgcttgaacaacaggctgactgggtgttagtggaaggtgctggcggctggtttacgccgctttctgacactttcacttttgcggattgggtaacacaggaacaactgccggtgatactggtagttggtgtgaaactcggctgtattaatcacgcgatgttgacggcacaggcaatacaacacgccggactgactctggcgggttgggtggcgaacgatgtcacgcctccgggaaaacgtcacgctgaatatatgaccacgctcacccgcatgattcccgcgccgctgctgggcgaaattccctggcttgcagaaaatccagaaaatgcggcaaccggaaagtacatcaatcttgccttaatgtag

SEQ ID NO: 260403 - DNA, 756 bp, Klebsiella pneumoniae
atgacaacggttaataaacaagccattgcagcggcatttggtcgggcagccgcgcactatgagcaacatgcggatctacagcgccagagtgctgacgtcttactggcaatgctcccacagcgtaaatacacccatgtactggatgcgggttgtggacctggctggatgagccgtcattggcgggaacgtcacgcgcaggtgacggcgttagatctctcgccgccaatgcttgttcaggcacgccagaaggatgccgcagaccattatctggcgggagatatcgaatccctgccgttagcgactgcaaccttcgatcttgcatggagcaatctcgcggtgcagtggtgcggtaatttatccacggcactccgcgagctgtatcgggtggtgcgccccggaggcgtggtcgcgtttaccacgctggtgcagggatcgttacccgaactgcatcaggcgtggcaggcggtggacgagcgtccgcatgctaatcgctttttaccgccagatgaaatcgaacagtcactgaacggcgtgcattatcaacatcatattcagcccatcacgctgtggtttgatgatgcgctcagtgccatgcgttcgctgaaaggcatcggtgccacgcatcttcatgaagggcgcgacccgcggatattaacgcgttcgcagttgcagcgattgcaactggcctggccacaaaaacaggggcgatatcctctgacgtatcatctttttttgggagtgattgctcgtgagtaa

SEQ ID NO: 260404 - DNA, 1155 bp, Klebsiella pneumoniae
atgagctggcaggagaaaatcaacgcggcgctcgatgcgcggcgtgctgccgatgccctgcgtcgccgttatccagtggcgcaaggagccggacgctggctggtggcggacgatcgccagtatctgaacttttccagtaacgattatttaggtttaagccatcatccgcaaattatccgtgcctggaagctgagtgcggagcaatttggcgtcggtagcggcggctccggtcacgtcagcggttatagcgtggcgcatcaggcgctggaagaagaactggccgagtggctgggctattcgcgggcactgctgtttatctctggttttgccgctaaccaggcagttattaccgcgatgatggcgaaagaggaccgtattgttgccgaccggcttagccatgcctcattgctggaggctgcaagtttaagcccgtcgccgcttcgccgttttgctcataacgatgtcactcatctggcgcgactgcttgcttccccctgtccggggcagcaactggtagtgacagaaggcgtgttcagcatggacggcgatagtgcgccactggaggaaatccagcaggtaacgcaacagcacgatggctggttgatggtcgatgacgcccacggcacgggcgttatcggggagcaggggcgtggcagctgctggctgcaaaaggtaaaaccagaattgctggtggtgacttttggcaaaggatttggcgtcagcggggcagcggtgctttgctccaatacggtggcggattatctgctgcaattcgcccgccatcttatctacagcaccagtatgccgcccgctcaggcgcaggcattacgtgcgtcgctggcggtcattcgcagtgatgagggtgatgcacggcgcgaaaaactggcggcactcattacgcgttttcgtgccggagtgcaggatttgccgtttacgcttgctgattcatggagcgccatccagccattgatcgtcggtgataacagccgtgcgttacaactggcagaaaaactgcgccagcaaggttgctgggtcacggcgattcgcccgccaaccgtacccgctggtactgcgcgactgcgcttaacgctaaccgcagcgcatgaaatgcaggatatcgatagtctgctggaggtgctgcatgacaacggttaa

SEQ ID NO: 260405 - DNA, 1041 bp, Klebsiella pneumoniae
atggctcaccgcccacgctggacattgtcgcaagtcacagaattatttgaaaaaccgttgctggatctgctgtttgaagcgcagcaggtgcatcgtcagcatttcgatccacgtcaggtgcaggtcagcactttgctgtcgattaagaccggagcttgtccggaagattgcaaatactgcccgcaaagctcgcgctacaaaaccgggctggaagccgagcggttgatggaagttgaacaggtgctggagtcggcgcgcaaagcgaaagcggcaggatcgacgcgcttctgcatgggcgcggcgtggaagaatccccacgaacgcgatatgccctacctggaacaaatggtgcagggagtaaaagcgatggggctggaggcgtgtatgacgctgggtacgttgagtgaatctcaggcgcagcgccttgcgaacgccgggctggattactacaaccacaacctcgacacctcgccggagttttacggcaatatcatcaccacgcgtacctatcaggaacgcctcgatacgctggaaaaagtgcgcgacgccgggatcaaagtctgctcgggcggcattgtgggcttaggcgaaacagtaaaagatcgcgccggattattgctgcaactggcaaacctgccaacgccgccggaaagcgtaccaatcaacatgctggtgaaggtgaaaggcacgccgcttgctgataacgatgatgtcgatgcctttgattttattcgcaccattgcagttgcgcggatcatgatgccgacctcttacgtacgcctttctgccggacgcgagcagatgaacgaacagactcaggcgatgtgctttatggctggcgcaaactcgattttctacggttgcaaactgctgaccacgccgaatccggaagaagataaagacctgcaactgttccgcaaactggggctaaatccgcagcaaactgccgtgctggcgggcgataacgaacaacagcagcgtctggagcaggcgctgatgaccccggacactgacgaatattacaacgcggcagcactatga

SEQ ID NO: 260406 - DNA, 1290 bp, Klebsiella pneumoniae
atgacaacggacgatcttgcctttgaccaacgccatatctggcacccatacacatccatgacctccccgctaccggtttatccggtggcgagcgccgagggttgcgagctaattttgtctgacggcagacgccttgttgacggtatgtcgtcctggtgggcggcgatccacggttacaatcacccgcagcttaatgcggcgatgaaatcgcaaattgatgctatgtcgcatgtgatgtttggcggtatcacccatgcgcccgccattgagctgtgccgcaaattggtggcaatgacgccgcaaccgctggagtgcgtttttctcgcggactccggctccgtagcggtagaagtggcgatgaaaatggcgttgcagtactggcaggccaaaggcgaagcgcgccagcgttttctgaccttccgcaatggttatcatggcgatacctttggcgcgatgtcggtgtgcgatccggacaactcaatgcacagcctgtggaaaggctatctgccagaaaacttgtttgctcccgccccgcaaagccgcctggatggtgaatgggatgaacgcgatatggtgggctttgcccgcctgatggcggcgcatcgtcatgaaatcgccgcagtgatcattgaaccgattgtccagggcgcaggcgggatgcgcatctaccatccggaatggttaaaacgaatccgcaaaatgtgcgatcgcgaaggtatcttgctgattgccgacgagatcgccaccggatttggtcgtaccggcaaactgtttgcctgtgaacatgcagaaatcgcgccggatattttgtgtctcggtaaagccttaaccggcggcacaatgaccctttccgccacgctcaccacgcgcgaggttgcggaaaccatcagtaacggcgaagccggctgctttatgcatgggccaacttttatgggcaatccgctggcctgcgcagcagcaaacgccagcctggcgattctcgaatctggcgactggcagcatcaggtggcggctattgaagggcagctacgcgagcaacttgcccccgcctgtgacgccgaaatggttgccgatgtgcgcgtactgggggcaatcggcgtggtcgaaaccactcgtccggtgaatatggcagcgctgcaaaaattctttgtcgaacagggtgtctggatccggccttttggcaaactgatttacctgatgccgccctatattattctcccgcaacagttgcagcgtctgaccgcagcggttaatcgtgcggtgcaggatgaaacatttttttgccaataa

SEQ ID NO: 260407 - DNA, 477 bp, Klebsiella pneumoniae
atgaaactcatcagtaatgatttacgcgatggcgataagctgccgcatcgtcatgtctttaacggcatgggttacgatggcgataatatttcaccgcatctggcgtgggatgatgttcctgtgggaacgaaaagttttgttgtcacctgctacgacccggatgcgccaactggctccggctggtggcactgggtagttgttaatttacccgcggatacccgcgtattaccgcaagggtttggctctggtctggtagcaatgccagacggcgttttgcagacgcgtaccgactttggtaaaaccggatacgatggcgcagcgccgccgaaaggcgaaacccatcgctacatttttaccgttcacgcgctggatgtagaacgtattgatgtcgatgaaggtgccagcggcgcgatggtcgggtttaacgttcattttcactctctggcgagagcctcgattactgcgatgtttagttaa

SEQ ID NO: 260408 - DNA, 201 bp, Klebsiella pneumoniae
atgttgaaagaagatgccctggcattctttgggaatgccacaaaactggctcacgcagccggtgtgtctctaccagcagtttctcgttggggggaagtgatccccgaacgccgcgctgctcgcctggacagagcgacaaaaggcgctctcaaatatgatcctgtgttttatcaagagcagcagccaggtaacgcagcttag

SEQ ID NO: 260409 - DNA, 408 bp, Klebsiella pneumoniae
atgaacaacgtgacccctggcgatcggattaaaaatcggcgcaaagaattgaacctcacccagcgcgaagttgcgaagctcgcgcaggtttcccacgtgtccatttctaaatgggaaagcagtgataacgaaccccgcggccagaacctcttccagctcagtaaagcgttgaggtgctcacctacatggattctttttggtgatgaaaaccatcagccaacaattcctgaatcaaacgaagagccgcttaagcttgatgatcttgaaagtgagctgatcaccctattcaggtcactgccggaatcagagaaagagcgacatatcgctgacttacgtggcaaggttgacgatttcaatcgccttttttacgaacttcttcaggcaagaaaatcaaacaagaaaaaataa

SEQ ID NO: 260410 - DNA, 804 bp, Klebsiella pneumoniae; identical to SEQ ID NO: 35847

SEQ ID NO: 260411 - DNA, 855 bp, Klebsiella pneumoniae; identical to SEQ ID NO: 35848

SEQ ID NO: 260412 - DNA, 1281 bp, Klebsiella pneumoniae
atgatgcctacgcttgctccaccatctgtcctttcggctccccagcgccgctgccagatcttgctgacactctttcagccggggttgaccgccaccacggcaactttcagcgagcttaatggtgtggatgatgatattgccagtcttgatatcagcgaaacaggacgtgagatcctgcgctatcatcaactcacactgactactggttatgacggtagctaccgggttgaaggtacagtgcttaaccaacgtttgtgtttatttcactggctacgacgtggtttccgtctgtgtccgtcatttattaccagccatttcacccccgccctgaagagtgaactgaagcggcgcggaattgcgcgtaacttttacgacgataccaatctacaagcgttagtgaatctctgctcccgacggctgcaaaaacgctttgaaacacgcgatattcatttcctgtgtctgtatctgcaatattgtttgctgcaacaccacgctggaattacgcctcagtttaatccgctccaacgtcgctgggcggaatcctgccttgaatttcaggtagcgcaggaaattggacgccactggcagcgtcgggcgctccagcctgtaccgcctgatgagccactgttcatggcattacttttttccatgttgcgggttcccgatccactgcgggatgcgcatcagcgggacagacaactgcgtcagtctatcaaacgtctggtaaaccattttcgtgagctgggaaatgttcgtttttatgatgaacaggggttgtgcgatcagctttatacccacctcgcccaggcgttaaatcgcagtttgtttgccatcggtattgataacaccctgccggaagagttcgcccgcctgtatccacgcctggtgcgcaccacccgcgcggcgctgaccggatttgaaagtgaatacggcgtccatctttctgatgaggaaagcggtctggtcgcggtgatttttggtgcctggctaatgcaggaaaacgacctgcatgagaaacagattattctactgaccgggaatgatagtgagcgagaagcgcagattgagcagcagctacgcgaactaacgttactgccgctcaatattaaacatatgtcggtaaaggtatttttgcagacaggcgctccgcgcagcgcggcactgattattgctccttataccatgccgttaccgctcttttcaccaccgctgatctatacggacctgacgttgacaacacatcaacaggagcagatccgcaaaatgctcgaatcagcatga

SEQ ID NO: 260413 - DNA, 1140 bp, Klebsiella pneumoniae; identical to SEQ ID NO: 35849

SEQ ID NO: 260414 - DNA, 891 bp, Klebsiella pneumoniae; identical to SEQ ID NO: 35850

SEQ ID NO: 260415 - DNA, 519 bp, Klebsiella pneumoniae; identical to SEQ ID NO: 35852

SEQ ID NO: 260416 - DNA, 321 bp, Klebsiella pneumoniae; identical to SEQ ID NO: 35853

SEQ ID NO: 260417 - DNA, 813 bp, Klebsiella pneumoniae; identical to SEQ ID NO: 35854

SEQ ID NO: 260418 - DNA, 1203 bp, Klebsiella pneumoniae; identical to SEQ ID NO: 35855

SEQ ID NO: 260419 - DNA, 423 bp, Klebsiella pneumoniae; identical to SEQ ID NO: 35856

SEQ ID NO: 260420 - DNA, 873 bp, Klebsiella pneumoniae; identical to SEQ ID NO: 35857

SEQ ID NO: 260421 - DNA, 1062 bp, Klebsiella pneumoniae; identical to SEQ ID NO: 35858

SEQ ID NO: 260422 - DNA, 999 bp, Klebsiella pneumoniae; identical to SEQ ID NO: 35859

SEQ ID NO: 260423 - DNA, 1512 bp, Klebsiella pneumoniae; identical to SEQ ID NO: 35860

SEQ ID NO: 260424 - DNA, 984 bp, Klebsiella pneumoniae; identical to SEQ ID NO: 35861

SEQ ID NO: 260425 - DNA, 3282 bp, Klebsiella pneumoniae; identical to SEQ ID NO: 9459

SEQ ID NO: 260426 - DNA, 1194 bp, Klebsiella pneumoniae; identical to SEQ ID NO: 35863

SEQ ID NO: 260427 - DNA, 1191 bp, Klebsiella pneumoniae; identical to SEQ ID NO: 35865

SEQ ID NO: 260428 - DNA, 339 bp, Klebsiella pneumoniae; identical to SEQ ID NO: 35866

SEQ ID NO: 260429 - DNA, 1335 bp, Klebsiella pneumoniae; identical to SEQ ID NO: 35867

SEQ ID NO: 260430 - DNA, 714 bp, Klebsiella pneumoniae; identical to SEQ ID NO: 35868

SEQ ID NO: 260431 - DNA, 1383 bp, Klebsiella pneumoniae; identical to SEQ ID NO: 35869

SEQ ID NO: 260432 - DNA, 3888 bp, Klebsiella pneumoniae; identical to SEQ ID NO: 35870

SEQ ID NO: 260433 - DNA, 1557 bp, Klebsiella pneumoniae; identical to SEQ ID NO: 35871

SEQ ID NO: 260434 - DNA, 504 bp, Klebsiella pneumoniae; identical to SEQ ID NO: 35872

SEQ ID NO: 260435 - DNA, 636 bp, Klebsiella pneumoniae; identical to SEQ ID NO: 35873

SEQ ID NO: 260436 - DNA, 849 bp, Klebsiella pneumoniae; identical to SEQ ID NO: 35874

SEQ ID NO: 260437 - DNA, 219 bp, Klebsiella pneumoniae
atgtatttttatttaatttcacacatatcacaattgatgcattttttagtgattaacagcgccataaggaaactctcaaaacaacacaaaccgggcgggcattatacgcgcattctttactcagaccagttttttcaccagcgcttcactgtgacgaatacgttctggagccagttccagatcctgctgaatcagcgcaatgaacagcaaatccgttaa

SEQ ID NO: 260438 - DNA, 267 bp, Klebsiella pneumoniae; identical to SEQ ID NO: 15945

SEQ ID NO: 260439 - DNA, 846 bp, Klebsiella pneumoniae; identical to SEQ ID NO: 15946

SEQ ID NO: 260440 - DNA, 315 bp, Klebsiella pneumoniae
atgcttattggctatgtacgtgtgtcaacaaatgaccagaacacagatctacaacgtaatgcgctgaactgtgcaggatgcgagctgttttttgaagacaagataagcggtacaaagtccgaaaggccgggactgaaaaaactgctcaggacattatcggcaggtgacactctggttgtctggaagctggatcggctggggcgcagtgtgcggcatcttgtcgtgctggtggaggagttgtgcgaacaaggtgttaattttagtagttatgttattacaggtgggggatttctcccccttatgcagattttctag

SEQ ID NO: 260441 - DNA, 495 bp, Klebsiella pneumoniae
atgccatttgctcgttatttctgcattttcataaacgttggtttgggagaaggtgccccagctattggcgttccgttcttctggccgtccgctgcaatgccaaattctgtcatcgacagctggtccggtatggtgtttttgaagtttaacggggcgaaattttctgcctctgattaccctgtgctggcgaaagtgtttccttcgctggtattacctgaagcccgcggtgatttcattcgtatctgggatgacgggcgaggtgcagacggtggtcgcgaattattaagctggcaggcagctacaaacttttctcagtttgccgggaatataggcgatggtgcgggccacacaattaattttcatgatggtatcgccggaaatcagccaggattttcacgatttaatttcaccagtaactctgtgggtgatggtgtgaattttgttgccgtcagaccgcgaaatattgcatttaactttctggtgagggctaaatga

SEQ ID NO: 260442 - DNA, 681 bp, Klebsiella pneumoniae
atgagcaaatacaccgaactaatcacgaactaccacgccaccaaacctaaatttcttgcgcatgttgatctgatgacccggccacttattgatgttgcggctgccaccagagggctgattagtgcatttgatattgactctgcggttggtgtgcaacttgacatccttggattgtggatcggacgtagccgtgttgtcagccagcctatctcaggtgtctatttcagctgggataccgacgggcttggatatgatcagggggtatggcagggaccatacgatcctgattcaggatacatgtatctcagcgatgaaacttatcgtgtcattcttaaagcgaagattgcgattaataactgggacggacggaatgattcgcttccggcaattcttgacgcggcaacagcaggatccgggctgcgaatgcagatagtcgataaccaggacatgacgatatcggtctgggtctttcctgatactgatatttcagatgtatcgcgtgagttaattgcggcaattaaacaggggtatctcacagtaaaagccgccggggtatgggcgggtggcattgaaacaccttcggtggaaaccccatcggaaggctcaaaattttttggttttgatatggataacgaattcatcagtggttttgatgtaggagcatggggagtattactctga

SEQ ID NO: 260443 - DNA, 1200 bp, Klebsiella pneumoniae
atggctctgaaccttgattctctcggtttatctgcaaaggtaaccgcggaggggatcagtgcgcctgattatcagacgatactcagcaccctgattagctattttcagcagatttatggcagtgatgcctacctcgaaccggacagcaaagacggccagatggtggctctgatggcgctggcgattcatgatgccaataatactgcgataactgtctacaactgtttttcaccggcaaccggctatggggctgcactgacctgtaacgtgaaaataaatggtatttcacgtaaaggcgcgacgaactctacggttgatttgcttcttacaggaactgccggaacaaccatcattaatggcagcgtgaaagacagtaataatgtgatatggcgtttgcctgcttcagtggtggtaggcgtggatggtacagtgatggtgaccgcaacatgttccgtcagtggtgcagtggcggcgctggctggaactatcactgaaattaatacgccaacccgtggctgggtttcggtaaccaatcctgctgcagccactgtgggcactccggcagaaactgacgctgagttacgtatccgccagtcgcaaagtgttgcgttgccatcaataaccccatttgaagcactggatggtgctgtttctaatgttaccggtgtaacccgccacaaactctatgaaaacgatactggttcggaggacggtaacgggttaccgccacactctgttgctgtaattgtggatggcggtgatgtaacggatattgctcaggctatcagagggaataaaggccaggggacagccactcacggtacaacatccgttacggttccggataaatacggcaatccccatgtaatcaaattctcgcgttccagtgatgtgcctgtttatgccctgattaaattaaaagtttttacgggttatacctcacagatagggcagcagatccagcaggctatttccgactatatcaatagtctgatgattggtgattcggtccttttaagtcgcatttactcaccggcgaatcttggcgtggtgagtggcgggaatgcacgctattacgatattcaggaactgacgattgggaaatccccgggggctttgtcgtcatcaaacattgatatcagatacaacgaatctgcgtcctgtaccccgaaaaatatcgttataacggtggagtcatga

SEQ ID NO: 260444 - DNA, 354 bp, Klebsiella pneumoniae
atgcgatacagacgtgaagacgccgatggcgattacacctttggcagcggtgatgacacctggctgattaactcaccggaggccgtggcgcaggcggtaaaaacgcgattcgaattgtggtatgggcaatggtttctcgacaccaccgaggggactccgtggatccagtccgtactcggtaagcagaagccggaaacctacaacctggcgatccgtaagcgcatcctcgaaacgcagggcgttaaatcaatcctctctttcaatacgacgctggataccacgacccgacgtgtcatgttttccgctgaaatcgacactctttatggaataacgactgttacatcggaggcgtaa

SEQ ID NO: 260445 - DNA, 753 bp, Klebsiella pneumoniae
atggcagtaactgaccagacccgcagtggcgatcttgccgaaacatttaaatctgaacgggaaacaacaaagaaccagatccgtgtcgccttgcctggcattattcagtcattcgatcctgacgcggtgacggcggttgtgcagccagctatccggtcagttgaaaaggataacgacggtaaccgcattaccaaaaattacccattgctggtggatgtgccagtggtattcccgcgcggcggaggctgtacgttgacttttccggtaaaagctggggatgagtgtcttgtcgtttttgccgatcgttgtattgatttctggtggcagagcggcgggatacaggagacggttgatgacagaatgcatgatttatcggatgcgttttgtattgtcggtccccagtcgcaggctaggaagattagcggtattaataccagtgccacacagttgcgtagtgacgacggcagcacctattttgagcttaatcctgataccaggaaaattaaaattgtcgctccgggggggcttgatgtggttgcccccctggctgatttttctgagaaagtaaccattcatggcctgttaacctggatggggggcatggtggggtctgtggtttctggtgtggcttcaaaaatcactggtgctgttgagtttttggggagcgtgaaggctaacggcaagccaatcgatgatacgcacactcatggtggtgttcagcgcggtggaagcagtaccgacggggtaaactga

SEQ ID NO: 260446 - DNA, 513 bp, Klebsiella pneumoniae; identical to SEQ ID NO: 15947

SEQ ID NO: 260447 - DNA, 336 bp, Klebsiella pneumoniae
atgaaacggttatgtttggcgttagttatgatggttactgctccggcgatggctgcaattcagtgcggcaactacacgatgaccggtgacggaatgactgttattaacggtgaaactgtcacatcacagaagataaaatttctgggaaaagatggtgactattcaaacatgaaaatggacatgggcctgatgccttcccgtgatggtaacaattacggctttgagtttgtgaaacgtaacggaaaagctttcctgaacgtccagctgctgcagaacagcatggacgcgccgaaaatcattggatctttcccgtgtaaaaaagtgagcagcaagtga

SEQ ID NO: 260448 - DNA, 1065 bp, Klebsiella pneumoniae
atgtcacagaactggatgagacatttcgagctgcagcttgtggacgggaacggtcagggaattgagctaagtgatttcaaagtcacctttacgatcgactggttcaacatcagcagcgcgtcccgggtagggactatcaaaatttataacctctcggcagatactgtgaaccgaattaccgggcaggagttttcgaaagtgcgtctgattgccggttacgacggtatcgcgccggaggtgtcagcaagcgacgtagggaccgtgcgggaagttgacgcggcggacgtgggccagagagatggccgcaactacggactgattttcagcggtgaaattcgctactcggtcacaggaaaagacagtccggttgatacctacgtcctgattcaggcagcagatactgatctggcttttgctaccagtataacctcacagacgctggctgccggttacacggtcgctgatgtgaaccgtgcgctgatgaaagacttcgaagccaaaggcgcgaccgaaggcctgacgcctgaaatgcctgctactgtattcccccgggggcgggtactctttggcatgacgcggcatctaatggataacgtagccggacaatgtggcgcaacatggcaattcgtggacggtcagcgccagatggtggtgaataacgaatatgttcacgaagcgattgtgctcaacagcgctaccgggcttattggaatgccgcagcagactatcggtaacggcgtaaacgtccgcgcgcttattaatccgaacatccgggttaacgggctcattcagctggatcaggcttccgtctatcgtaccgcgttgtcgaacaacgatattgcgatggctggtggtcagatcaccgaccagaacacggacggaaatatcacgctcagcggcaccacatcgcagcctgccagcatcgcaacggatggcgtttatattgtgcgcgggattatgtacactggcgacacaaggggccaggcgtggtacatggatatgatgtgtgaagcgcgtggcgcggcggatcttgtttcctcatcagcgagggaaagagggctttaa

SEQ ID NO: 260449 - DNA, 303 bp, Klebsiella pneumoniae
atgacaattcaggaaattccgctgacagcggacaaccagcagttcagcatcgtcctgggtggtgtcacctggcggattagcatcatatggcgcgatctgtactggattatggacctgcagaacgacagaggggagccggtaatctccggtattcctctcgtcactggtgctgacctgctggcgcagtacgcctgtatggggcttggttttaagctggtggtggtctgtgatgacaacacacaggattaccccacaaaaactgacctgggcggtcgcagccatttactggtatcaacggagtaa

SEQ ID NO: 260450 - DNA, 588 bp, Klebsiella pneumoniae
gtggatattctctctacactttttcatcagcagagcagaaaaataggaatgattgttcccagtgttgttatttcagagaagcatacagatatgcttgaaataacagagcatccggtagaggtcggggccgctgtcgctgatcatgcctataaaaaaccgtcagaagtggtgatggaggttggtttcgccggtggcggcgcattgctggattttgccagtaacctgacggctaccagcctgctcggcctgagtcctcagcagacgtatcaggagctactgggtctgcaggaaagccgtatccccttcgatgtggtaaccggtaaacggctgtacagcaacatgttgatccgggcgctggaagtgacgacggacaagacaaccgaaaacgtcctgtccgccgtcctcaccctgagggaggtcattatctcccggacacagcagattaccgtcgcggataaaaccaacatgaaggaaggggccagcacgtcggcggtacagaacagcggcaacaaaaccacaaagcctccagatacttcactgctgaaaagcatcacgggtaacgtggcgtcattactggggggcggctaa

SEQ ID NO: 260451 - DNA, 1986 bp, Klebsiella pneumoniae
atgaacgctgaaactattaaagatttcctcgtctcgcttggcttccgtgtggatgatgcaggagcgaaaaagttcggttctgtcctcgccggtacaactgcaaatgtcatcaaaatggggctggctgttgaaggggctgcgctgtccgtggtggccttcacggctaagatcgcctccggcctggataatctttactgggcgtcacagcgcaccggcgcgacggtccagggaattcagtctattggctatgcggtttcgcaggttggcggcagtgtggacgctgcgcgatcttctctggaaagcctctcccggtttattcgtaacaatcccggagcagaaggctttctgaatcgcctgggcgtacagacccgtgatgccagcggtaacatgcgtgacatggctgctatctttacgggcgttggacagaaactcagcagcatgccgtattaccgggctaaccagtatgcgcagatgctgggcattgacgaaaataccctgatggctatgcgtcgcggagtggggcagttcagcgctcagtattcagaaatggtgaaagcgatcggatttaatgccgatcaggctgccttatcgtcaaaccggtttatgacctcgctgaaatcgctcggtgaaatggccaggatggcgcgggacaaaatcggatcgaatcttgcggacggactggcggggcagattgataacctgcgcaaaaagataattgaaaattttcccaaaattgaagtcaccatcacaaaggtcataaaggggatcctctggctgggtgagatagtcgggcgggtagcatttcggatagtcgatggtgtcggagatatcatcgagtggtgggggaaactggatgccgaaacgaaaaccctgatagaggttatcggcggtctggttgtcgccatgcggatacttaactctactttctggatgtcacctatagggctgattaccggtctgatcgtggctctcggtctcttgtgggaagactacaaaacatggaaagaaggcggtaacagtcttatcgactgggaaaaatggcaaccggcaatagataaagcgaaggatgcgatcacctggcttcgtgatcaccttctggaactaaaagatggtgttggcggctggcaaaatgcactggaaatccttggtacattcatcgcgggtgtctgggtatccagggttctgggggctttcgggaaaatatcaggtttgccggtcccgccgtggttaaaaggctggatggcttatgctgcgtatttgtactctgatcgcgaaaatattggtgccagtgcgaagtcatcctgggattacacgaaacaaaatattggagattcattgcgctggcttggcattgataccgattttggtcgtaatcctcataccgtaaaaggcgcaaatattcagtcagatattccaggtgctgagccggaacaatatgcacaggctacgaaacgaggagaacggaataacaatccgggaaaccttaattttgctggtcaggcaggggcttctcttgaacgcccgggcgggcgatttgccagatttgaaactgcctttgatggattacgggctcttgctcgtcagttaatgctgtacgccggacggggaataaacagtgtggagaaaattatctctacctgggcacctgcgtctgataataacaacacaacagcgtatatcagggctgtatcgcaacgactgggagtggatccccgggctgccctgaatatgagcgatccgcaaaccatgtcagcattgatgagcagcattatccagcatgagaatggaagaaatatctattctcgagagctgattaataaggctgccgtggcgggaattagtggcaaagtgacagaggttaaccagcaaaatacctaccacatttacggtggcggagatccgcacgctgtcggtaatgaggttgcacgtcggcaacagtctgcaaatgctcaggtcatgcgaagtaatcaggtgagggtgggttag

SEQ ID NO: 260452 - DNA, 453 bp, Klebsiella pneumoniae
atggaattcgaaattaaaggcgtgaaatatcgcacggcaaaactcagcgtttttgaccagctgaaagtgacccgcaaacttctgccggtgctggcaggaatgatgtcagatttcgggagtattcgctcccgtttgcctgctgacggcaaaatcgacaccgtgaaattcgaacagttaaaaccggtgtttgaaaccatgctcccgcgtatcgctgaggaactgtcttccctgaccgaagatgacaccgatgcgattattcatccctgtcttgcggtggtatcgcggcgtcatatggacggatgggtgccggtatttacccagggcgaactgatgtttgatgatattgacttgctggtcatgctgcagctggtggcgcgggtggtcgccgattcgctgggaaattttttgcctacaccccttaccagcacgacgcagagcctgcaacagggctga

SEQ ID NO: 260453 - DNA, 441 bp, Klebsiella pneumoniae
atgtctacctattcttttatggatgtcactgcgacgctgaccgggccgaccggttcgattgacctcgggtacggttcggcaagttctgaagaggggattgtggttgcgatgggcggtcctaaaaacaccatgaccatcggtgctgatggtgaagtgatgcacagcctccatgcagataaaagcgggacgattaccgttaaccttctgaagacatcaccgacaaataaaaaattgtcgctggcgtataacgcacagagccagtcttctgccacatgggggaataacgttatcgttatccgcaacaaggtcagcggcgacatcatcacggcacgcagtgttgcgttccagaaacaaccggataacgccaacgctaaaaccggtaatacgatgccgtgggtgtttgactgcggcaagattgaccaggttctcggggagttttaa

SEQ ID NO: 260454 - DNA, 1146 bp, Klebsiella pneumoniae
atggcacagggcttgcctgtatcaaacgttgttaatgttgatgtgatcatgtcgccgcgtgcagcatcagggcgaaattttggtgcattactcattctcggcccgtccacaatcattccggtaagtgagcgcattcgccgttattctgccgcggaagatattggaaaagattttggcgtggaatcaccagaatataaagctgcgcaggtgtttttctcacaatcaccgaaacctcaggaggtttttgttggtcgttgggtgaaaacgaagggagacagcgaacaggccacgcctgagacgctggagcaggctgtgaatgccatgcttgattatacttcatggtatgggctggggattgcagacgatgcagatattccggatgcagactggctgaaagtggctgcggcgatcgaatcctcttctgtaagccgtattctggcgattacgacaagcgatgagaaatgcctgcagactgcatccagagatgatttggcatcaaaactgaaaagcgccggatattcacgcagttttatacaatattcatcgggtaataaattcgctgcgttatctgcatttggccgggcattcacggttaatttcaatggcagtaataccgcgattacgctcaagtttaagcaggagccgggtgtcgggtatgaaacactgacagtcagccaggcatcggcacttgatgcaaaaaactgcaatgtgttcgtgtactaccagaatgatacagctatcctccagcagggagtgatggctaacggcgatttctttgatgaacgccacggcctggactggttacagaattatgtgcagaccaacctctataacctgctttataccagcaccacgaaggttccccagactgaagccggtattacccgactgttatcaaatgttgaaaaatcactggatcaggccgttcagaatggactgattgctccgggcgtatggaacggtggcgaccttggccagttgtcatcaggtgacacgctgcccaaaggttattacgtatacgcccagccgctggatgaacaggcacaatcagaacgtgaagcccgtaaggctccggtgattcaggctgcaataaaacttgcaggcgcggttcattacgctgacgtacagattaacgttgttcgctaa

SEQ ID NO: 260455 - DNA, 564 bp, Klebsiella pneumoniae
atgggggaactccggttgagcaataacaccagtacagagcgcggatggttaataccaaccagtggcgatccggattatgacgaagcgctcgacaggctgttaagccagtggatgcgtaacgtttccggcctgtctgccgggatggttcgcccgcgctggcagaaagagcagccgccactgctaccggttgaaacgaactggtgtgcgtttggggttatcggatggtcaggtgatgacagtccggcattcaccagacagaccgatgatggctctcagctctggcggcatgaaacgattgagtgtatggcttcgttttatggaccggcggggatggtgtatgcgtcccggtttcgtgacggtatatctgtgccgcagaacaatgcagcactgaatgcgctggggctgtctcttggcgattacacaggtctgactcccttccctgaacttattaatcagcaatgggtccgccgctacgatatgacggtgcgcctgcgccggaaggttgtgcgcgagtacggtattaaatcgctggtggaagcaccagtcatctttttcggagattaa

SEQ ID NO: 260456 - DNA, 390 bp, Klebsiella pneumoniae
atgccgactcttgatgtaacagatgtgctttttgaccccgatttttgcggcttcaatttgtgggtaacacgccgagtgcaaacggtggatgaggacgggatcggcagcgacagtgaagttaaaaagcagtttgccggagtcgtaactgttgatcgctctctggaaaaccgtcgtatgcaggccgggcaggtaatcagtggtgcaattctgattgtgacgactgagcgactgacacagggacagactggccgtgatgccgatatcgtgacgtatcagggccgtgattatcgtgtgactttcgtcgacccgtatacagcgtatggtgccggattcgttcaggcgcattgtgagttgatgccgtttgatgggggaactccggttgagcaataa

SEQ ID NO: 260457 - DNA, 555 bp, Klebsiella pneumoniae
atgagtttcaaaagcggtgtaacaacgagggtggataacgctaaggccattctggatgcgctcaggtcgttaaccaaaaaagatgtgctggtcggcatcccttcggaagacagcgggcgggatgatgttccgtttggtaatgcgggcatcggttacctcaacgaatacggctcaccagagcagaacatcccgccacgacctcacctggtccccggcgttaaatcggcagaagagcagacggtgccgcagctcaaaaccgcggcgcaggctgctcttgatggtaatgctgcgggagcagaacgcgcactcaaccgtgccggaacgctggccgctaatggcgtcaggcgttacatgactattaccggctttacgccgcttgctgacagcactgttgaagcccgggctcgtcgggggcgcaagggggcaacactggaacttgcccggcgtgttgctggcgaatctcccggaaccgatctggcgaaaccattaattgacaccgggcaatatcgcagagctattacccatgtagtgagggataaagatgccgactcttga

SEQ ID NO: 260458 - DNA, 408 bp, Klebsiella pneumoniae
atgccaaagaatcaaaatctgccagcggtaagtgattttcgccgcgacttcccgcagtttgctgaccctgccaaatatcccgaagcgcaaatccagtttcgtctgaatctggccgatgaactgctgagcgaaaacgtcaccggcaaaaagttgtttccgtattttgccggattgttcgttgcacactacatgacgctctgggcggcagacagccgggcgatgctggctggcgggccgggcggttcaaccaatggtgttcagtcctcaaagtccgttgacaaggtaagcgtcagctatgacaccagcgcgacgctgaatcctgatgcaggtttctggaataacacccgatatggcgctgaattttatcagttgatcacgatgttcggtgcaggcggtcgccagctatga

SEQ ID NO: 260459 - DNA, 222 bp, Klebsiella pneumoniae
atggcaaaaaataatgcagtaatacacgtacataccccgtttgtgctcacgcttcccgacggttcacggcgcgagtttgttaaaggccgtcatgctgtggaggaagacgttgccacgcactggttcactcgtgcgcacgcggaagtatccgttggcaaagccacagacgcgcgtaacgaggtaaaaaatgccaaagaatcaaaatctgccagcggtaagtga

SEQ ID NO: 260460 - DNA, 942 bp, Klebsiella pneumoniae
atgattacttttgatcaggcaaccgttgacagctctggtgcctttctcatcggggagctggagcgactcgaccagacgctgaacctgccactggtggggtacacctggacccgcgatattcagttgcgtgaagatgtctctatcgcagatgacatttccagctggacgaataccagcttcgccgctgcgggtactggtgcaaatccgaatggcaaaaactgggtaggcaaagactcaaccgctattgctggcgtgaacgtggatatcggcaaatccggtaacccgctgaacctgtgggggatggaacttggctggacggtcatagaattgcaggctgctcagcaggtcggccgcccgattgatacgcagaagtatgacggtatgcaactgaaatggcagatggataacgatgaacaggtatatgttggcgattccgcattaaacctgaaaggccttgttaccctggacggcgtgcctgtcaacaacgctgccaaaacgtgggcaacctcaacaccggacgaaatccgcgcaagcattaaccaggtgctgtctgatgcgtgggccgcttccggttactctgtggttccgcgtgatttgctgatcccgcctgagcagtttgctctgttgtccagcatcatcgtttcatctgcgggtaaccagtccctgttgacgtatcttcagaccaacaccatcagctatcaccagaacggtgttccgctgaatatccgcgcggttaaatggctgaaaggccgtggtgtgaggaaaaaggatcgcatggttgcgtacaccaacgataaaaaatacgttcgctacccgctggttccgcttcagagcgtgccggtgcagtatcgcggtctgtatcagatcgtcacttactacggcaagctgggtgcggttgagccagtgtacaaagaaaccatttcgtacgttgatggcatttaa

SEQ ID NO: 260461 - DNA, 507 bp, Klebsiella pneumoniae
atgaataatgtatttctgtaccggatgcctgttggcattgccggggctgtctctcgcccgcaggacttaaccgtcgaaccggtggtccttaaatccgataacgccttcgctgcctatggcctggctggtaaatacgatgatgacggttttttcgtgccgctggcagatggtgataccgcagacaaggtaaaggggatctacgtgcgcccttatccgaccacgtcgcagccggacatggttcgccaggtgggaacaggcaagaacttcccgggcgacgccatgaagcgtggctacgtgactgttaatctcggttctgattttgatgccagcaccatcaaaaaaggcgacccggtatacgttgtcgtctccactgatgaatccatcaaagtgccgctggggggattcatgtccacgtcagtcagtggcaaaaatgtggtgctgaccaacgctgaattcacaggtgccggtgatgctgacggcaatgcagaaatttcctggaagatttaa

SEQ ID NO: 260462 - DNA, 1221 bp, Klebsiella pneumoniae
atgaaatattttttcaatacccggctgggggaaacccgctatcagctggctgacggctcgttgctgtgcaaagacgtgccgataggacgaacaggtaagcagctctatggtgctgatgacctgccaaaactgaaacccgataagttcggtgaaatagtcgtcacgcgttctcctgagcaggtattccatccggccacgctcgcctcattcgaagggatgagcatcacgatcctgcatcctgaagatgaaaacgggaatgtgcggctggtaaatcccgagaactggaaagagcttgctgtcgggcacctccagaatgtccggcgcgggacgggtgagcagtctgatttgatgctggctgaccttatcgtcaaagacgaaaacgccattcagcttatcgaagatggcctgcgagaagtgtcgtgcggctatgacgcggagtacgagcagaccgagccaggtaaagccgggcaggtcgatattaccggaaaccatgtggctcttgtccccaaaggcagagccggaaatcgttgtgcaattggagacagagacacaatggcaaatcaaaagaaaaactggtggaaccgcatgcgtgcagccatcaagacaggagatgccgacaccatgaacgaactggtggagtcggctcccgcatcggttacaggagatgagggggatttgccgcagggcgttaatctcaacatcaacctgtccccgcagcaaccactaccggacaaagcaccagagatgggtggaggtccaaccggcgacagtgatgatgacctcaaaacattactgaaagccctgctggctaagctggaaggaaatgccacgggcgataacgataataagcctgacgataatccgaccggtgacggcgaggacgatgaagaggaaaccacgattactggtgactcagcctggcgtgccgaagttatcgttccgggtatcgatctgagccgtaagatgaaaccgaccgagttcaaacgcgaggttctggcttccgcagataaaacgctggttcgccagattgtcggtgatgcggatatccgcaaattgccgaaacaatcggtcgacatggcgtttaatgccgtgtctgagattgccaaagggcgaaacacccgcgccaccaccggcgatgcacagcgcctaaacatgggcatgaccagtatcgcttccctgaacaaacaaaacgctgaattctgggcaaaccgtaaagggtaa

SEQ ID NO: 260463 - DNA, 381 bp, Klebsiella pneumoniae
atgggaggtgggaaaaacgatttctttataacagcggcaattcgggagctcgccagcgtgaccggtcatgccatcaagcgttggaggtttgccccattcgacaaatttaccttccatttcccgatgagaatgcctgacgtcaccatcttcggctgtacgccagatataaccattcgaaccaattgccagcgcacgcgcctgatccagcgcgccggttgcacgtccaagttcagtacgggcaatcaggtcagctctggactttgctatatcacccgatgcggctatttctttagcaaaatgttccgctctcccaccggtcacaacagcttcaatcgcccgattctggatgtcgtacaccctgtcagccgcctcgaggggtag

SEQ ID NO: 260464 - DNA, 1467 bp, Klebsiella pneumoniae
atggcacgaaacaaacaagccctgcggcgaactgcgcaggccacagctgatggttatgagaattttattgcccgcgtagggatgcagacacctaaccagcactcagcatccacctaccgggctaatttcaccagtcgtaaccgcatgctggtggaatggtcctatcgttcgtcctggatcatcggcgaagcagtcgatgctatcccggatgatatgacccgcaaaggcattcgcatcacttcggaaattgatgcaaaagatcgtggcattctcgaatcacaactggatgagttgcaaatctgggatgcgctgaatgacgtgctgaaatggtcgcgcctctacggcggcgcggtgggtttcatcatgattgaggggcaggcaccaatgaccccgctgcgacccgaaaccatcggtaagggcaagtttaagggaattctcccgctcgaccgctggatgattgacccggtactgacccgccgcattaaagatatggggccggacctgggtaaacctgagttttacgatgtggtgaccacagcaacgggaattcctgcctggcgcattcatcacagtcgactgattcgctttgatggcgtcacgctgccatttcagcagaagatgaccgagaacgaatggggaatgtcggttgtagagcgtatctgggatcgtcttaccgcgttcgacagcgctactgtcggcgcggcgcagctggtctacaaagcgcatttgcgtacctacagcgtggagaagctacgcgagcttatcgcacttggtggtcctgcgtatgaagcgttgctgaagaatattgacctgattcgacagttccagagcaatgaaggcatgactctcatggactcgcgggataagtttgaaacccatcagtacagcttcagtggtctggatgacatcctttcacagtttgcagaacagattagtggcgctgttggtatcccactggtgcggttgttcggacagtccccgaagggattttctaccggcgatgcagaccttgccaactattacgaccgggtaagctcgttgcaggagaggcgtttacgtcttccggtgcggcggatactggacatcatgcatcgttcggaacttggcaagccgctgccggacgatttcacgtttgagtttaacccgctctggcaaatgtctgatgtcgatcgctcaacggtggcgttaaacactaccaacgcaatcagtacagcgctgggtgatggtctgatgacactgaaagccgctatgactgatttgcgagaaaattctgacgtaaccggcatcggggcatccattaccgacgaggacatcgagaatgccgaagatgaagcgccgcccggcatcggcgaacctgatgacgaaccgcaggaaccgtcaggcggaaatccggtatcgaaccagcctacgcaggatagcgcgggcggtcggggacatcgtaaatggtcactacgatggttcaaatga

SEQ ID NO: 260465 - DNA, 1623 bp, Klebsiella pneumoniae
atgccgttaccattccccttcgattttaaacatcctgattaccagatggtttttgaatggcggatggaacgcctacagcgcattcgccagaatcctgaaatattgcctgcactaaaacagttttaccgaaccaatccggctcagttcatcatcgactggggcatgacaacggacccgcgtaatattgattatggcctgccggtgaccattccgtttttactcttccctaagcaggaggagtggatccactggattatggaacgctggggcaatcgggagaatggtattaccgaaaaatcccgtgaaatggggctcagttggaccgcgatcggactggcatgttcgctttgtctcttcaacaaagaaatggttatcggtttcggctcccgtaaagaggaatacgtcgacagcaccggtgacccgaaagcattgttctggaaggcgcgcaagttcgtggaaacactgcctgtagagtttcgcggttcgtggagcgagaagaagcacgcgccatatatgcgtgttgagtttcctgaaactggtgccgttatcaaaggcgaggctggcgataatattggtcgtggtgaccgtaccacgctttatctggttgatgaggctgcattccttcagcgtcctctgctgattgatgcggcgttgtcacaaacgacgcgttgccgtatcgacctgagttcagttaacggcatggctaacccgttcgctcagaagcgtcatggcgggaagataccggtattcacattccactggcgggatgatcctcgcaaggatgaagagtggtatcgcagggaatgcgagaaaatcgataatccggtggtggtggcacaggaacttgatctgaactacagcgcatcagcggaaggcgtcctgattccatccgaatgggtacaggctgccgttgatgcgcatatcaaactgggtatccagccaacaggcaaacgacttggcgcgatggatgtcgccgacgaaggcagggacaaaaatgccttttccacccgtcatggcttcctcctggaaaatgtgcgggaatggtccggtgtgggcagcgacatttatcagtccgtcaagaaggttttcggcttttgcgaacaggacaacctcgaagagtttcgctttgacgaggacgggctgggcgctggcgttcgcggcgatgcacgcgctatcaacgaactgcgtaacgctgcgcgtcgaccgtcaatacttgccacaccgtttcgaggtagtggcgcggtatttgatccggatgatgaagctgttcgcggggacaacgggcaagccgcacgtctgaacaaggacttcttcgctaacgccaaagcccagagctggtggcggttacgtaaactttttcagaatacctggcgcgccgtggttgaaggtatggcttacaacccggacgaaatcatctcaatcagcagtagcatggcactcaaagataaactcatcatcgagctttcgcagccgacctattccattaatggtgtgggaaaaatagttattgataaacagcctgatggaacccgatcgccaaaccttgccgactcggtgatgatcaactatgccccaatgaattcagccctgaacatctgggagctgctagggagacaggcctga

SEQ ID NO: 260466 - DNA, 573 bp, Klebsiella pneumoniae
atgactaagaagctgaaagcaaaacacgaggtgttttgtcgcgagtttcttgtcgatctgaatgctacacaagcagctattcgcgcaggctacgtctccaggcgagcacatgttacgggggctgaactatacggtaaacctgagatacgcgcccgtattaacgagctaaagcaggagcgtattgatcaactgggcattgatgcgaattatgtgctgatgcgactggttgagatcgacaggctcgatgtggctgacatcctagaggacgatttaagtattaagcctctgtctgcgtggccggaatcgtggcgtcggtacctgagtggatttaacctcgctgaaatgtttgaggggcgaggagatgacagagaaatggtcgggatccttaaaaagattaagtggcctgataaggttaaaaaccttgagttgcttgggcgtcatgtttctgttcaggcgtttaaagacaacgtcaaaaatgaagtgactggcgctgatggaggaccagtcagaacagaaattaccaacttaacgccggagcaggctgcagaggcgtatagaaaaatgatgggctaa

SEQ ID NO: 260467 - DNA, 525 bp, Klebsiella pneumoniae
atgaagctgacttataagattgtcatcgcggcatttttcttctctgcctttggggcgctcgtctggtctgcaaaccattaccacagcaagtatcaggcagaaaagttgcgggctgataaagcggaaggtgaagctgaatatcaagggaaagtgatagctaatcaggcattaaacttcaatcgttttaaccagatagcagaaaacgcaagccgattaaattctctggtcgacatcggtcacgagaagacagtcatcaaataccgtgaggttctgctccgtgaaaagaactgtgatttccctgttcctgctgatattgctgtcgggttgctcaactacgcgaaccgtttacgcgccagcgcattgcacgccgattccgggtacattgacccagccggtgatcgtgccactaccaccagaacgttgacatattgccaggctgttctgtggattaacccattgttggcagccatcgagaaggcgaataaccagttggctggtgtccgacaaatagaacagtcccggtaa

SEQ ID NO: 260468 - DNA, 342 bp, Klebsiella pneumoniae
atgaaaatgcacaatgctcctcattcctggcctgacttactggaactcttacaaagttggtggcgtggagatacgccgttgggcgcagtggttatgtcaattgttatggctggcttgcgcattgcctattttggcggtggcggcggctggaaacgaaaaacgcttgagattttgctctgtggtgctctgacgctgacttttgcatccgctcttgagtatgtcggatggcctaaatcgctttctgttgccattggtggtggtgttgggctgatcggtgtcgatgctattcgtggggctgcaatgcgagtaatcggtaacaagtttggtggctctaaggagtaa

SEQ ID NO: 260469 - DNA, 423 bp, Klebsiella pneumoniae; identical to SEQ ID NO: 15948

SEQ ID NO: 260470 - DNA, 291 bp, Klebsiella pneumoniae; identical to SEQ ID NO: 15949

SEQ ID NO: 260471 - DNA, 2262 bp, Klebsiella pneumoniae; identical to SEQ ID NO: 15950

SEQ ID NO: 260472 - DNA, 201 bp, Klebsiella pneumoniae
atgtccggactaacaccacaagagatggtcaaaagcttgattgattcagggtatacccaaaaccaaattgccgaaattgcaggcgtgaagcagtcttctattagtcggcttctcaccggggttcattctgaccctcgcttttctacagtacgtgcgatagaaaagctttttcaggaagtgacagctagacaaaaggcgtaa

SEQ ID NO: 260473 - DNA, 675 bp, Klebsiella pneumoniae
atgattgatactaccgatatcctttctcaaaacatcaagtacctgatggacaaagccaagataagctcgataactgagctggcacgtcggttacaactgaaccaaccaacgctacacaggctggtatcaggagaggtgaaagatccgaaatacgcaacgttaaagcagatcgccgactacttccacgtgtcaccaatagacctggcagaaaggagccttcaagaaatggagaaagaggacgcgacgggtataaaaacgtatatttctcttaggtttaataaagtacctgttttgggaaacactcagctaggcgttggaggactttggagcgacacccaatattcagtaggtagcagtgatggtttcatatactggccgacaaaggatgaagatgcatacgccctgaaatgtgttggtgattcaatgatgcctagaatcaaagagggtgagttcgtaatcgtcgaacccaaccacgactacactcctggtgatgaagtacttgtggttacccgggacggtgaggtcatggttaaaaccttcttgttcgaacgcgatggcctgttccatctaatgtctgtaaatgaagatcatccaccagtcagagtaccacgcgaaaacattgaaaaaatccattacgtggcggggatcgccaaatccgcgctacgcatgtactaa

SEQ ID NO: 260474 - DNA, 150 bp, Klebsiella pneumoniae
atgaaacctgaacacctctatcgactgacggggcgcgatgttctccgttatcgccgtaaaaacttcgatttgatgaccggtctggccgttgccactgcgctcggtctgatcatcactttcattctccttgtagcgaggaccacagtatga

SEQ ID NO: 260475 - DNA, 903 bp, Klebsiella pneumoniae
atgagtttagaaaccagtctcgaacttaataatcaacttctggcacaacataatgcgctgcttgaacgtcttatccgcacaatggcatcaggtattgttatgcatcctgacacgatttcacgagtgcaggaatgtcgggatacagcaactgaaactgaaaatatgtcagcggcaatgacactggatgatctggagttcagcgacgttatcgcactggctggtttctacccagtagccacccctatcacagaagacatgctgcaacgtgctgttgcctaccgtgatgctgaaggcgataaacgagtagttcagattgatgctctcgacagcgcattgcagggcgtcaaacgagccagggcgctgcttaaacctgctctcctggacctgtcccgtaacatccttaagttctgggacgacctgccaaccatcggcgagcgacgtgcttttgccgagcagctacttgatgcacctgcggatgggcgtgatgaagttaagccgaaaaaggccagtaacaaagatggagaacgcacggggccgttttacgtcaaaaatgtatccggcacagcagccagtgaactccacaccttacgcaagttgaacgagatgctgaaaaaaggccatatcgagaccaaccgtgttgagtaccttcagctgcaggaagaatttgcacgcagagacacagcaaattccagccagaataatgacgccaaagatgaccatacaattgatttcgcggcactacgcaaacaagctgaagggttgatcctccagttagcaaaagggggttaccgggcagaagctattgcaattctggaaaaacagggagccaggaaacttggtgaagtaacggatgaaaatctcgctgaagtaatcaccctggctgaaaaagcactggagggttaa

SEQ ID NO: 260476 - DNA, 1302 bp, Klebsiella pneumoniae
atgccagacgttcatgcacaactttctccatcatcagcgcatcgatggatgcgctgcccaggaagtctggcgctggaggccacacaaccggataaagaaacaacttttgcaatcgagggcactgcagcgcacgcgcttgctgaaaaagttctacgaaacaggcaaagccacccggaacactacgccggatgcaatgtttctatgtttctcggctcatacccccttcgcgaaaatcctgatgatacatctggcccacaggtggatgatgaaatggtcgaagccgttggccggtatgttgatacggtctggactcttgcacagaataatgaactattggttgaacaacgtgttgatttctcacatataacgggtgtggaagaatctttcggaactgccgacggcataatcatcgctggtagcgaattacaaatccacgacctgaaatatggcaaaggcgtccgcattgatgcagaacaaaatgagcaactacaactgtatgctctgggtgctctcgaacaattcagcatgctgtatgactttgagactgtaagattatttattcaccagccaaggctcaaccacgtttcagaatggtcgttaaccgtgcaggaacttcagtctttcggtaaacgagcacaggaggccgcaaccagtgcgatccttgttctcaatattgctgaatgcgaaggcattgagacactaccgctggaaaacttcatacctggagaaaagcagtgccgcttctgtaaagcaaaagctatttgcactgcccagaaaatgcagcatttacaaacagcggccagcgactttgaagatctgacaaagcctgtcagcgaaataatcaccaatgccagcgcacgtgtacctctgttaaccattgagcagcttgcggagatctatagccaggccgactttattgagtcctggctaaaggcagtacgggaccgggttcacaatgaactcaatgccggacatccggtaccggggtttaaactggtaacaggaaaacaaggtaaccgggcctggagtgatgaagaggcagctcgcgcacttctgaaggaccagttcaggtacaaaactgaagaagtattcgactttaaacttattagtcccacaaaagccgaaaaacttatcaaaaaggccagtccacgccgttggtcaaaagtcgaggcactgataacacgagctgatggtaaaccaaccgtcgttcccgagtcagacccacgccccgcactcaatatcaaccctgtaaatgatttcgacgacgtatccgacgatacgctaaccgcagacctcatctga

SEQ ID NO: 260477 - DNA, 924 bp, Klebsiella pneumoniae
atgaataatttaccgctgctgaacgatttgcgcgtctttatgctggtggctcgccgggctggttttgccgccgtggcggaagaactgggcgtttctccagcgttcgtcagcaagcgcatcgccttgctggagcaaacgctaaacgtggtgttgttacaccgcaccacccgccgtgtcaccattaccgaagaaggagagcggatttatgaatgggcgcagcggattttgcaggatgtcggtcaaatgatggacgaactttctgacgtgcgtcaggtgccgcaggggatgctgcgtattatcagcagctttggttttggacgacaggtggtggccccggcgttatcagcgctggcgaaggcgtatccgcaactggaattacgttttgatgtggaagaccggttggtcgatttggtcaatgaaggtgtcgatctcgatattcgcattggcgatgatatcgcccctaatttaatcgcccgcaaactggcgaccaattatcgcattctctgcgcgtcaccggaatttattgcgcaacatggcgcgccgaaacatttaaccgatctttctgcattgccgtgcctggtcattaaagagcgcgatcatccttttggtgtctggcaattacgcaataaagaaggccaccatgcgattaaagttaccggcccactgtcgtctaatcatggagaaattgtccatcagtggtgtcttgatgggcaggggattgctctgcgctcctggtgggatgttagcgaaaatattgccagtggtcatttagtgcagttgctaccggaatattaccagccagcgaatgtctgggccgtttatgtttcaaggctggcgacgtcagcgaaagtgcggataacggtagaatttttacgccagtattttgccgagcactacccgaatttttcactggagcatgcctga

SEQ ID NO: 260478 - DNA, 639 bp, Klebsiella pneumoniae
gtgttcgctgaatacggggttctgaattactggacctatctggttggggccatttttattgtgttggtgccagggccaaataccctgtttgtactcaaaaatagcgtcagtagcggtatgaaaggcggttatcttgcggcctgcggtgtatttattggcgatgcggtattgatgtttctggcatgggctggagtggcgacattaattaagaccaccccgatattattcaacattgtacgttatcttggtgcgttttatttgctctatctggggagtaaaattctctacgcgaccctgaagggtaaaaataacgaggccaaatccgatgagcctcaatacggtgccatttttaaacgcgcgttaattttgagcctgactaatccgaaagccattttgttctatgtgtcgtttttcgtacagtttatcgatgttaatgccccacatacgggaatttcattctttattctggcgacgacgctggaactggtgagtttctgctatttgagcttcctgattatttctggtgcttttgtcacacagtacatacgtaccaaaaagaaactggctaaagtgggcaactcactgattggtttgatgttcgtgggtttcgccgcccgactggcgacgctgcaatcctga

SEQ ID NO: 260479 - DNA, 360 bp, Klebsiella pneumoniae
atgctgcaaatcccacagaattatattcatacgcgctcaacgcctttctggaataaacaaactgcgcctgccggaatattcgaacgtcatcttgataaaggaacgcgcccgggagtttacccacgcctttccgttatgcatggggcggtcaaatatctcggctaccctgatgaacacagtgcagagcctgatcaggtgatccttatcgaagcggggcagtttgcggtgttccctccagaaaagtggcacaacattgaagccatgactgacgatacttatttcaacattgacttcttcgttgcccctgaagtcctgatggaaggtgcgcaacaacggaaagtcattcataacgggaaatga

SEQ ID NO: 260480 - DNA, 183 bp, Klebsiella pneumoniae; identical to SEQ ID NO: 1468

SEQ ID NO: 260481 - DNA, 249 bp, Klebsiella pneumoniae
atgggcattctgtcatggattatttttgggcttattgccggtattctggcgaagtggatcatgccaggtaaagatggtggtggattctttatgactatcctgctggggatagtcggtgccgtagtcggcggatggatcagcacgctgtttggctttggtaaagtcgatggcttcaattttggcagcttcgtggttgccgttattggcgcgattgtcgtgctgtttatctacagaaagattaaaagttaa

SEQ ID NO: 260482 - DNA, 1026 bp, Klebsiella pneumoniae
gtgtcagatcagattatcgcccgcgtctcgcaatcccttgccaaagaacagtcactggaaagtctggtccgacagcttctggagatgctggaaatggtcactgatatggaatcaacctacctgaccaaagtggatgtcgaagcgcgcctgcagcatattatgtttgcccgtaacagccagaaaatgcacatcccggagaattttaccgtctcgtgggattactcgttatgcaaacgcgccattgatgaaaactgctttttcagcgatgaagtccctgaccgttggggcgactgtattgcggcacgcaatcttggcatcaccacatttctgagcacgccaattcacttaccggatggatcattctatggcacgctttgcgccgccagtagtgagaagcgccagtggagtgaacgcgcggaacaggttttacagttattcgccggactgattgcacaatatattcaaaaagaggcactggttgaacagctgcgcgaagccaatgctgcgctgattgcgcaatcgtataccgactcgttaaccgggctaccgaatcggcgggcgatttttgaaaacctgacgacgctgttttctctcgcccgacatcttaaccataagataatgatcgcgtttatcgatctggataacttcaaattaatcaacgatcgttttggtcataatagtggtgatttgttcctcattcaggttggcgagcgccttaatacgctccagcaaaatggcgaagttattggtcgtctcggcggtgatgagtttttgattgtttcactgaacaacgagaatgcggatatttcgtctctgcgagaacgtattcagcagcaaatatgcggagaatatcacttaggtgatgttgatttgtattatcccggtgccagtcttggcatagtagaagtcgatcctgaaacgaccgatgcagacagtgccctgcatgctgccgatatcgcgatgtatcaggagaaaaaacacaaacagaaaacaccttttgtcgcgcatccagcgctacattcctga

SEQ ID NO: 260483 - DNA, 255 bp, Klebsiella pneumoniae
atgaaaattatcagttttgttctgccttgcttgctggtcctggctggttgttcaaccccttctcagccagaagcacccaaaccgccgcagattggtatggcaaatccggcgtcggtctattgccagcagaagggcgggacgctcattccagtgcagacagcgcaaggggtcagcaacaattgcaaattaccgggcggtgaaacgattgatgaatgggcattgtggcgacgggaccatccggctggtgaaaaataa

SEQ ID NO: 260484 - DNA, 348 bp, Klebsiella pneumoniae
atgaatattcagtgcaaacgcgtttatgatccggcagaacagagcgatggttatcgcgtactggtcgaccgcctctggccgcgtggtatcaaaaaaaccgatttagcccttgatgagtgggataaagaaatcacgccgtcaacggaactgcgcaaagcctttcacggcgaagtcgtcgattttgcaacctttcgcgagcaatatcttgcagaactagcgcaacacgagcaagaaggaaagcggctggcggacatcgccaaaaaacagccgctgaccctgctctactcagcaaaaaacaccacgcagaaccatgcgctggtgctggccgactggctacgtagcttgtga

SEQ ID NO: 260485 - DNA, 1182 bp, Klebsiella pneumoniae
atgacctgttcaacttcattaagcggcaaaaacaggattgtccttatcgctggcattttaatgattgccacaacattacgcgtcacctttaccggcgcagcaccgttactggatacgattcgttccgcttactcgctgacgacggcgcaaaccggcttattgaccaccctgccattattagcctttgcgctaatctcacctctggctgccccggtggcgcgacgttttggtatggaacgtagcctgtttgccgcgttacttttgatctgtgctggcatcgcaattcgctctctcccttcgccttacttcttatttggcggtacagcggtcattggcggtgggattgcattaggcaatgtcttactgccaggattaattaaacgcgatttccctcattccgtcgccagacttaccggcgcatattccctgacaatgggagctgcagcggcactgggatcggctatggtcgtgccgctggctttgaacggttttggctggcaaggcgcgttgctcatgctgatgtcttttcctctgctggctctttttttatggctgccacagtggcgaagtcaacaacatgcaaatttgagtacctcacgcgccttacatactcggggtatctggcgttcgccgcttgcctggcaggtaacattgtttcttgggatcaactcactggtctattacgtgattattggctggcttccggcgatcctcatcagccacggctatagcgaagcacaggcgggttcactgcatggtttgctgcaactagccacagcagctcccggtttgctgatcccacttttcttacatcatgtgaaagatcagcgtggtattgcagcgttcgttgccttgatgtgcgcagtgggcgcggttgggctctgctttatgccagcgcacgcgatcacctggactctgcttttcggttttggttccggcgcaacaatgatactgggattgacgttcattggtcttcgggcaagttctgcgcatcaggcggcggcactctcggggatggcacaatccgtcgggtatttgctggcagcctgtgggccgccgctgatgggtaaaatacacgatactaacggtgactggtccataccattgatgggtgttgccatactttcactactgatggcgattttcggactttgcgccgggagagacaaagaaattcgctaa

SEQ ID NO: 260486 - DNA, 819 bp, Klebsiella pneumoniae
atgcacaggttgaatctcaatggctatgaacccgaccgacaccatgaagccgcggtcgcattttgtattcacgccggaacggatgagttaaccagtcctgtacatcagcaccgcaaaggacagctgatactggcgctacatggtgcaattacctgtacggtggaaaatgctttgtggatggtgccaccgcaatatgcggtttggataccgggcggagtggaacatagcaatcaagtgacagctaacgctgaactctgttttctgtttatcgaacccagcgcagtgacaatgccgacaacctgttgcacattgaaaatatcgcccttatgccgggaattaattttaaccctggcaaacaggacgtcgactcagcgtgctgagccgatgacccgcagattaattcaggtcctgtttgatgaactccctcagcagccacaacaacagctgcacctacccgtttcttctcatcctaaaattcgcgcgatggtggagatgatggcgaaagagcccgtcgagtgggggtcattggggcaatgggctcgcttttttgcgatgagtgaacgcaatcttgcccgactgatagtgaaagagacggggttgagttttcgccagtggcgtcagcagttacagctgattatggcgcttcagggattagtgaaaggcgatactgtacagaaagttgctcatacgctggggtatgattcaacaacggcctttattactatgtttaagaaaggcctggggcaaacgccaggccgatatattgcgggattaactactgtttccccacaatcagcgaaaccagacccgcggcaataa

SEQ ID NO: 260487 - DNA, 504 bp, Klebsiella pneumoniae
atgactgaaatggctaaaggaagcgtgacgcatcagcggttaatcgctttattatcacaagaaggtgctgacttccgcgtcgttacccatgaagcggtaggtaaatgcgaagcggtgtcagaaattcgtggcaccgctttaggccagggggctaaggcactggtatgtaaagtcaaaggcaatggtgtaaatcaacatgttctggcgatcctcgcggccgatcaacaggccgatctgagccaactcgccagccatataggcggattacgcgcttcgttggccagcccggcggaagtcgatgaactcacaggctgtgtcttcggcgcgatcccccctttcagcttccatccaaaactcaaactggttgccgatcccctactcttcgaacgatttgatgaaatcgccttcaatgcaggcatgctggataaatccgttattttgaaaaccgcggattatttgcgcattgcgcaaccagaactggtcaatttccgccgcactgtgtaa

SEQ ID NO: 260488 - DNA, 1491 bp, Klebsiella pneumoniae
atgaaattgcaccatagaatgctccggcattttatcgccgcaagtgtcattgtgctgacatcttccttccttatttttgaacttgtcgccagcgacagagcaatgagtgcctatctgcgctatatcgtgcagagagcagactcctcctttctttatgataagtatcagaatcagagtattgccgcgcatgtgatgcgcgctctcgctgctgagcagtcggaagtgtcgccagaacagcggcgcgccatctgcgaggcttttgagtctgccaataatacccatggcttaaacctgactgcccataaatacccgggcttacgcggcacactacaaaccgcatccactgactgcgacacaattgtggaagctgctgcactattacccgcttttgatcaggcagtggaaggcaaccgccaccaggatgattacggttcaggtcttgggatggccgaagagaaatttcactattatctcgatctcaatgaccgctatgtctatttttatgagccggttaatgttgaatactttgcgatgaataactggtccttcctgcagtcaggaagtattggcatcgatcgcaaagatattgaaaaggtatttaccgggcgtaccgtattatcgagcatttaccaggatcagcgtactaaacagaacgtgatgagtttgctgacgccggtatatgtcgcagggcagctaaaagggattgtgctgctggatattaacaaaaacaatctgcggaatatcttttacactcatgaccgccctctcctctggcgttttctcaatgtcacgctaaccgataccgattcggggcgcgacattatcatcaaccagagcgaagataatctgttccagtatgtcagttacgtccatgacttaccgggcggcattcgtgtctcgttatccattgatattctttactttatcacgtcttcgtggaaaagcgttctgttctggattttgacggcgttaattttgctgaatatggtgcggatgcacttccgtttataccaaaatgtgtcgcgagaaaatattagtgatgcgatgactggactctataatcgcaaaattttaacccctgaactggagcagcggttgcaaaaactggtgcaatccggttcttcggtgatgtttattgcaattgacatggacaagttaaagcaaataaatgacacccttggtcatcaggagggggatttagcgattacgttattagctcaggcgattaaacagtcgattcgtaaaagtgattatgccatccgactcggtggcgatgaattctgcatcattcttgtcgattcgacgccgcaaattgcagcacaactgcctgaacgtatcgaaaaacgtctgcaacatatcgcgccgcagaaagagatcggcttctcttccggtatttacgcgatgaaagaaaacgatacgttacatgatgcgtataaagcttccgatgagcgtttatatgtcaataagcagaacaaaaacagccgttcatga

SEQ ID NO: 260489 - DNA, 1344 bp, Klebsiella pneumoniae
atggcttctatgggtacacaaaaattaaaagctcaaggcttttttattttcagtttattgctgacgttaattttattttgcattactaccttatataacgaaaacacgaatgtaaaactcatcccacagatgaattacctgatggttgttgtggctttgtttttccttaacgccgtcatttttcttttcatgttaatgaaatatttcactaacaaacaaattttaccaacactcattttaagccttgcgtttttaagtggccttatctatttagttgaaaccattgtaattatccataaaccaatcaacggcagtacactgatccagacaaagtcgaatgatgtttctattttctatattttccgccaactcagtttcatttgtttaacctcgctggcgctcttttgttatggtaaagacaacatcctgaacaataataagaaaaaaacgggaatactgttgctggcgctgatcccttttttagtttttccccttctggcacacaatctgagcagttataacgctgactattctttgtatgtcgtcgattactgtccggacaaccatactgcgacctggggaatcaactatacaaaaatattggtttgtctgtgggcatttttactgttctttattatcatgcgtacacgattagccagcgaactatggccgttaatagcattattatgtctggcatcgctatgctgcaacttacttctactgactctggatgagtataattataccatctggtatatcagtcgcgggattgaagtttccagtaaactgtttgtggtgtcttttctgatttataacatttttcaggaactgcaactctccagcaaactggcagttcatgatgtactgaccaatatttataatcggcgctactttttcaacagcgtagagtcattattgtcgcgacctgttgttaaggacttctgtgtcatgctggttgatattaatcagttcaaacgcatcaatgcccaatggggacatcgtgtgggtgataaagtgctggtttcaattgtcgatattatccagcaaagcatccgccccgatgatattttagcgcgactggagggtgaggtgtttggcttgctatttaccgaactcaatagtgcccaggcaaaaatcattgcggaacgtatgcgtaaaaatgtcgaactcctgaccggctttagtaacagatatgatgttcctgagcaaatgaccatcagtattggcacggttttttcaacgggtgacacacgtaatatctcgcttgtcatgacggaagcagataaagccttacgcgaagcgaaaagcgaggggggcaacaaagtgattattcatcatatttaa

SEQ ID NO: 260490 - DNA, 747 bp, Klebsiella pneumoniae
gtgaccaaactcaaacttctggcacttggagtgcttatcgcaacgtctgcaggcgtagcgcacgctgaaggtaaattttccctgggcgcaggcgtaggtgtcgttgaacacccatataaagattacgataccgatgtttacccagtaccggtaatcaactatgaaggcgataacttctggttccgtggcttaggtggtggttactacctgtggaatgacgcaacggacaaactttcaattaccgcttactggtcgccgctttacttcaaagcgaaagacagtggcgatcaccaaatgcgtcacctggatgaccgtaagagcaccatgatggctggtctgtcttatgctcactttacccagtacggttacctgcgtaccaccctggctggcgataccctggataacagcaacggcatcgtctgggatatggcctggttgtatcgttacaccaacggtggcctgaccgtgaccccgggtatcggtgtacagtggaacagcgaaaaccagaacgaatactattatggcgtatcgcgcaaagagtctgctcgcagcggtctgcgtggctataacccgaacgacagctggagcccttacctggagctgagcgccagctacaacttcctcggcgactggagtgtttacggtaccgcgcgctacacccgtctgtctgatgaagttactgacagcccaatggtggataaatcctggactggcctgatttctaccgggatcacctacaaattctga

SEQ ID NO: 260491 - DNA, 855 bp, Klebsiella pneumoniae
atgcaacaaaaaatgattcaatttagtggcgatgtctcactgccagccatagggcagggaacatggtatatgggcgaagatgccagtcagcgtaaaacagaagtagctgcactacgcgcgggcattgagttcggtttaaccctcattgataccgccgaaatgtatgccgagggcggtgccgaaatggtggttggggaagcattaaccggcctacgtgataacgtctttctcgtctctaaagtctatccgtggaatgctggcgggcaaaaagcgataaatgcatgcgaagccagtttacgccgtctcaatactgattatctcgatctctacttattacactggtctggcagtttcgcttttgaagagactgtcgcagcgatggaaaaattgatcgcccagggaaaaatccgccgctggggcgtttctaaccttgattatgccgatatgcaggaactctggcagctgccggggggaaatcagtgtgccactaatcaggtactttaccatctcggttcacgagggattgagtacgatctactcccctggtgccagcaacagcagataccggtgatggcttacagtccgttagctcaggccgggcggttgcgcaatgggctgctaaaaaacgcagtagtcaacgaaattgcacatgctcacaatatcagcgcggcacaagtattgttggcgtgggtaatcagccatcagggggtgatggcgattccaaaagcggcaactgtcgcacatgtccaacaaaatgcggctgtgcttgaggttgaactttcgtcagcggaattagctatgctggataaagcgtatccggcaccaaaaggaaaaactgcgctggatatggtgtga

SEQ ID NO: 260492 - DNA, 885 bp, Klebsiella pneumoniae
atgattaagaaaatttttgcccttccggtcatcgaacaaatctcccctgtcctctcccgtcgtaaactggatgaactggacctcattgtggtcgatcatccccaggtaaaagcctcttttgcattacagggcgcacaccttctctcatggaaacctgcgggtgaagaagaagttctgtggttgagtaacaacacaccgttcaaaaatggcgtcgctattcgcggtggcgtaccggtttgctggccgtggtttggtccggctgcacaacaaggcctgcctgcgcacggttttgcccgcaacctgccgtggacgctgaaatcacatcatgaagatgctgatggcgtagcgctgacttttgaattgacgcaaagcgaagagacgaaaaaattctggccgcacgactttacgctgttagcgcatttccgcgtgggtaaaacctgtgaaatcgatcttgaatcacatggcgaatttgaaaccacctctgccctgcatacctactttaacgtgggtgatatcgctaaggtaagcgtcagtgggctgggcgatcgcttcattgataaagtgaatgacgcgaaagaagatgtactgaccgacggtattcagaccttccctgaccgtaccgaccgcgtgtatctgaatccgcaagattgcagcgtgattaatgatgaagcgctgaatcgtattatcgccgtaggtcaccagcatcatctgaacgttgtaggctggaatccgggaccggcgctttcagttagcatgggcgacatgccggacgatggctacaagacctttgtttgtgtagaaacggcttacgcttcagaaacgcaaaaagtcaccaaagaaaaacctgcacatctggcgcaatccattcgcgttgccaaacgttaa

SEQ ID NO: 260493 - DNA, 414 bp, Klebsiella pneumoniae
atggctaataaaccttcggcagaagaactgaaaaaaaatttgtccgagatgcagttctacgtgacgcagaatcatgggacagagccgccatttacgggtcgtttactgcataacaagcgtgacggcgtatatcactgtttgatctgcgatgccccgctgtttcattcccaaaccaagtatgattccggctgtggctggcccagtttctacgaaccggtgagtgaagaatccattcgttatatcaaagacttgtcacatggaatgcagcgcatagaaattcgttgcggtaactgtgatgcccatctggggcatgtcttccccgacgggccgcagccaacgggtgaacgttattgtgttaactcagcctctttacgctttaccgatggcgaaaacggcgaagaaatcaacggttga

SEQ ID NO: 260494 - DNA, 273 bp, Klebsiella pneumoniae
atgaatcttgatgacattatcaacagcatgacgcttgaggtataccagcgtttgtcgaccgccgttgaattgggcaaatggcctgatggcgttgcgttgaccgaggaacaaaaagagaactgcctgcaactggtgatgctgtggcaagcccgcaataataccgaagcacagcatatgacaattgacacaaatggtcagatggtcatgaagagcaaacaacagttaaaagaagattttggtatctcagcaaaggctattgccatgtttaagtaa

SEQ ID NO: 260495 - DNA, 948 bp, Klebsiella pneumoniae
atggataatctcgacgttatttgtataggtgccgctattgttgatattccattgcaaccggtcagtaaaaatatctttgatgtggattcttatcctcttgaaagaatcgcaatgaccaccgggggtgatgcaataaatgaagcaacaattatttctcgtctgggccatcgcacagcattaatgagtcgtattggtaaagatgccgccgggcaatttattctcgaccattgccgcaaagagaatattgatattcaaagcctgaagcaggacgtcagcatagatacctcaattaacgttggactggtgacggaggatggcgagcggacgtttgtcacaaactgtaacggcagtctgtggaaattgaatattgacgatgttgatttttcgcggttttctcaggcgaaattattatctctggccagtattttcaacagtcctctattggatggtaaagcgctaacagaaatttttacgcaagctaaagcccggcagatgattatctgtgccgatatgatcaaaccgcggttgaatgaaacgctggatgatatttgcgaagcattgagttatgtcgattatctgtttcctaattatgccgaggcaaaattactcaccgggaaagagacactggatgaaattgctgactgctttcttgcgtgcggcgtaaaaacggtggtgattaaaacgggtaaagacggctgctttatcaagcgtggtgacatgacgatgaaggtgccggcggtcgcaggaataaccgccatcgacaccattggcgcgggcgataactttgcttcaggttttattgcggcactgttagaaggcaaaaatctgcgtgaatgcgcacgctttgccaatgcaacggcggctatctcggttctaagcgtcggtgcctccaccggcgtaaaaaacagaaagctggtcgaacaattgctggaagaatgcgaaggataa

SEQ ID NO: 260496 - DNA, 981 bp, Klebsiella pneumoniae
atgaaaaagatacctttaggcacaacggatattacgctttcgcgaatggggttggggacatgggccattggcggcggtcctgcatggaatggcgatctcgatcgacaaatatgtattgatacgattcttgaagcccatcgttgcggcattaacctgattgatactgcgccaggatataactttggcaatagtgaagttatcgtcggtcaggcgttaaaaaaactgccccgtgaacaggttgtagtagaaaccaaatgcggcattgtctgggaacgaaaagggagtttattcaacaaagttggcgatcggcagttgtataaaaacctttccccggaatctatccgcaaagaggtagaagccagcttgcaacgtctgggtattgattacatcgatatctacatgacgcactggcagtcggtgccgccattttttacgccgatcgctgaaactgtcgcagtgctcaatgagttaaaggacgaagggaaaattcgcgctataggcgctgctaacgtcgatgctgaccatatccgcgagtatctgcaatatggtgaactggatattattcaggcgaaatacagtatcctcgaccgggcaatggaaagcgaactgctgccgctatgtcgtgataatggcattgtggtacaggtttattcgccgttagagcagggattgttgaccggtaccatcactcgtgattacgttccgggcggcgctcgggcaaataaagtctggttccagcgtgaaaacatgctgaaagtgattgatatgcttgaacagtggcagccactctgtgctcgttatcagtgcacaattcccactctggcactggcgtggatattaaaacagagtgatttaatctccattcttagtggggctactgcaccggaacaggtacgcgaaaatgtcgcggcattgaatatcaacttatcggatgcagacgcaacattgatgagggaaatggcagaggccctggagcgttaa

SEQ ID NO: 260497 - DNA, 759 bp, Klebsiella pneumoniae
gtggcggcaaaagacaggattcaggcaattaagcaaatggttgccaacgataaaaaggtgacagtctcaaatttgagtgggatttttcaggtaaccgaagaaaccattcgccgcgatctcgagaagctggaagatgaaggctttttgaccagaacctatggtggtgctgttttaaatacagcgatgttgacggagaatatccatttttataagcgcgcttcatcgttttatgaagagaagcagcttattgcacgcaaggcactaccctttatcgacaataaaaccactatggcagccgattccagtagtaccgttatggaattgctcaaattgttgcaggaccgtagtgacctgacgttgctaactaactcggcggaagcgattcatgttctggctcaatcagaaattaaagtcgtttcaacggggggggaactaaacaaaaatacactttccctgcaaggaagaattactaaagagatcatcagccgctaccatgtcgatatcatggtaatgagttgtaaaggtcttgatattaacagcggcgcgctggactctaacgaagcggaagctgaaatcaaaaagacaatgatccgtcaggcgacagaggttgcgttattggttgatcactctaagtttgatcgcaaagcttttgtccagttagctgactttagtcatattaattacataataactgataaatcaccgggtgcagagtggatagcattttgcaaagacaataatatccagctggtgtggtaa

SEQ ID NO: 260498 - DNA, 1359 bp, Klebsiella pneumoniae
atggaacaatatgatcaaattggcgcaagactggaccgcttgcctttggcccggtttcattatcgtatatttggtattataagctttagtctgttattaacgggttttttgagttattcaggcaatgttgttttagcaaagctggtaagcaatggatggtcaaataatttcctcaatgccgcctttacctcggcattaatgtttggttatttcatcggctctcttaccggtgggttcatcggtgattattttgggcggcgcagggcttttcgcataaatcttctcatcgtcggtattgcggcaacaggggccgcttttgtccctgatatgtactggctcatcttctttcgcttcctgatgggcacaggaatgggggcgctgattatggttggctatgcttcgtttacggagtttatccccgcgacggtgcgtggaaaatggtccgcgcggctctcatttgtcggtaactggtcgcccatgttgtctgcggcgataggcgtggtggttatcgctttttttagttggcggataatgtttctgctgggtggtattgtcatactgttagcctggtttctctcaggtaaatactttattgagtcgcctcgatggttggcggggaaaggacaaatcgcaggtgcagaaagccaacttcgtgaagtagagcagcaaattgaaagagagaagagtgttcgtttacccccgcttactttgaatcagagcaacagcaaggctaacgtaatcaatggtactttctggctgctgtttaaaggggaaatgttacgacgtacattagtcgcgattactgttttaattgcaatgaatatttcactttataccatcaccgtatggataccgaccatatttgttaactccggcattgatgtcgataaatcaatattaatgactgctgttattatgattggcgctccggtaggaatatttattgcggcattaattattgatcattttcctcgtcgattatttggctccgccttacttattattattgccgtgttaggctatatctattcaattcagactacagagtgggcgattttaatctatggcctggtgatgatcttctttttatacatgtatgtttgcttcgcgtcggcggtttatatcccggagctctggccaacgcatttacgcttgcgcggttcgggtttcgttaatgccgtcggacggatcgtcgcggtcttcacgccttatggcgttgcggcactattaacgcattatgggtcaatcacggtgtttatggtgcttggcgtgatgttagtgctctgtgcgctggttctctccatttttggcatcgaaacgcggaaggtgtcgctggaagagatttctgaggtgaattaa

SEQ ID NO: 260499 - DNA, 642 bp, Klebsiella pneumoniae; identical to SEQ ID NO: 32623

SEQ ID NO: 260500 - DNA, 1017 bp, Klebsiella pneumoniae
atgcaaaagaaatcaatttacgtcgcctacacgggcgggaccatcgggatgcagcgttccgagcagggttatattccggtgtcaggtcatctacagcgccaactggcgctgatgccggaattccatcgcccggagatgccagatttcaccattcatgaatatacgccgctgatggactcttcagatatgacgccagaagactggcagcatattgctgaagatattaaagcgcattatgacgactatgatggttttgtcattctgcacggcaccgacacgatggcgtataccgcctctgcgctgtcgttcatgctcgagaatctcggtaaaccggtcattgtgacagggtcacaaatcccgctagctgagttacgctctgacggacaaattaatctgctgaatgcgttgtacgttgcggcgaattatcctatcaacgaagtaactctcttttttaataatcgactttatcgtggcaaccgtaccaccaaagcccatgccgatggttttgatgcgtttgcctctccaaaccttcctccgttactggaagcaggtatccatattcgtcgtttgaatacgccacccgccccgcacggtgaaggggaattgatcgttcatccaatcaccccacaaccgattggcgtagtgacgatttatccagggatttctgctgacgtcgtgcgcaattttctgcgccaaccggtgaaagcattgattctgcgctcatatggcgtgggtaatgcgccacaaaacaaagccttcctgcaggaattacaagaagccagcgatcgcggtattgtggtggtcaacctgacacaatgtatgtccggtaaagtgaacatgggtggttatgccaccggtaacgccctcgcccatgccggcgttattggcggtgcagatatgactgtagaagccacactaaccaaactgcattacctgcttagccaggaactggatactgaaaccattcgcaaggccatgagccaaaacctgcgcggcgaactgacgccggatgattaa

SEQ ID NO: 260501 - DNA, 1857 bp, Klebsiella pneumoniae
atgcgaaccctttggcgatttattgccggattttttaaatggacgtggcgtctgctgaatttcgtccgtgaaatggtacttaacctgttctttatttttctcgtactggttggtgtggggatttggatgcaggtcagtggtggtgattcgaaagaaacggccagtcgtggcgcactgctgctggacatttctggtgtgatcgtcgataaacccgacagttctcagcggtttagtaaattaagccgccaactgcttggtgccagttccgatcgtctgcaggaaaactcactgtttgatatcgtcaataccattcgccaggcgaaggatgaccgcaatatcaccggtatcgtgatggatctgaaaaacttcgcaggtggcgaccagccgtctatgcagtacatcggcaaagctctgaaagagtttcgtgacagcgggaaaccggtttatgccgttggcgagaactacagccaggggcaatattatctcgccagtttcgccaataaaatttggctgtcaccgcaaggcgtggtggatctgcacggctttgccaccaacggtctgtactacaaatcgttgctggataagctgaaagtttccacccatgtgttccgcgtgggtacgtataaatctgccgttgaaccgtttattcgtgatgatatgtcgcctgcagcccgcgaagctgacagccgctggattggtgagctgtggcaaaactatctgaatactgttgccgctaaccggcagatccctgctcagcaggtattccctggcgcgcaaggggtgcttgagggtttaaccaaaaccggtggcgataccgcgaaatatgcgctggaaaacaagctggtcgatgcactggcatcgagtgccgaaatcgaaaaaactctgaccaaagagttcggctggagtaaaactgataaaaattatcgcgccatcagttattacgattacgcattgaaaacgccggcagataccggtgacagtatcggtgtcgtcttcgctaatggcgcaattatggatggcgaggaaactcaggggaatgttggcggtgataccactgcggcacaaatccgcgacgctcgccttgacccgaaagtgaaagcgattgtcctgcgtgttaatagcccaggcggcagcgttaccgcgtctgaagtgattcgcgctgaactggcagcagcccgggcagcgggtaagcctgtggttgtatcgatgggtggcatggcagcatctggtggttactggatttccacgccagctaattacattgtggctaaccccagcaccctgaccggttctatcggtatcttcggcgtgatcaccaccgtagaaaatagtctggattcgattggtgttcatactgatggtgtctcaacttcaccgctggcggatgtttctatcaccagggcactgccgccggaagcgcagcagatgatgcagttaagcattgagaatggctataaacgctttatcacgctggttgctgatgcgcgtcattcgacgccggagcagattgataaaatcgcccagggccacgtctggaccggtcaggatgcaaaagctaacgggctggtcgatagtctcggggatttcgatgatgcggtcgccaaagcagcagagctggcaaaagtgaaacagtggcatctggaatactacgttgatgaaccgaccttcttcgacaaagtgatggacaacatgtctggttctgtccgggcaatgttgccagatgcgttccaggccatgttacctgcaccgctggcctcggtagcctctaccgttaaaagtgaaagcgacaagctggccgcgtttaacgacccacaaaaccgttatgcgttttgcctgacctgcgccaacgtgcgttaa

SEQ ID NO: 260502 - DNA, 552 bp, Klebsiella pneumoniae
atggatgcactcgaactattgatcaatcgccgtagcgcctcccgcctggctgaacctgcgccaacgggtgaacaactgcaaaacatcctgcgtgcgggtatgcgtgcgccggaccataagtccatgcaaccgtggcatttttttgtgattgaaggggaagggcgcgagcgtttcagcgccgttctggagcagggggcgattgctggcggtagtgatgacaaagccatcgacaaagcccgtaatgcgccgtaccgcgcaccgctcatcataacggtggtggcaaaatgcgaagaaaatcataaagtcccgcgctgggaacaggaaatgtctgcgggatgcgcggtcatggcgatgcaaatggcagcagttgcccaggggtttggcggcatctggcgcagtggcgcattaactgaaagtccggtagtgcgtgaagcattcggttgccgtgagcaggataaaattgtcggttttctctaccttggtacgccgcagctgaaagcatctacgtcgattaacgtcccggacccgacgccgtttgtcacttatttctga

SEQ ID NO: 260503 - DNA, 1044 bp, Klebsiella pneumoniae
atgagcgagaactcgattcgtttgacccaatacagccacggagctggttgcggctgtaaaatttccccaaaagtgttggaaaccatcctgcacagtgagcaggcgaagtttgttgatccgaatttgcttgtgggtaatgaaacccgcgacgatgcggcggtgtacgatctgggcaatggcaccagcgttatcagtaccaccgacttctttatgccgatcgttgataatcctttcgattttggccgcattgcggcgactaacgccatcagcgatatcttcgcgatggggggcaaaccgattatggcgattgcgatcctcggctggccgattaacaaactttccccggaaattgcccgcgaagtaaccgaaggtggacgctatgcatgccgtcaggcgggtattgcgctggctggcggtcactccatcgatgcgccggagccgatttttggtctggcggtaacggggatcgtaccgaccgagcgggtgaagaaaaacagtaccgcacaagccggatgcaaactgttcctgacgaaaccgctggggatcggcgttcttaccacggctgagaaaaaatcactgctgaaaccagaacatcagggactggcgacggaagtgatgtgccggatgaacatcgcaggcgcgtcctttgccaacatcgaaggcgtaaaagcgatgaccgacgttacgggctttggtctgctggggcatttaagcgaaatgtgtcagggtgctggtgtgcaggcgcgcgtcgactatgaagcgatcccgaaactgccgggggttgaagagtacattaagttgggcgcagtgcctggcggcaccgaacgtaactttgccagctacggtcatctgatgggtgaaatgccgcgtgaagtgcgcgatctgctgtgcgatccgcaaacttctggcggtctgctgctggcggtcatgccggaagcagaaaatgaggtcaaagctacagccgccgagtttggcattgaactgacggcgattggcgaactggtgccagcgcgcggcggtcgtgccatggttgagatccgttaa

SEQ ID NO: 260504 - DNA, 1956 bp, Klebsiella pneumoniae
atgcggttgtttattgccgaaaaaccgagtctggcgcgcgccattgctgatgtcctgcccaaaccgcaccggaaaggcgatggctttatcgagtgcggtaatggtcaggtggtgacctggtgtatcggtcacctgcttgagcaggcgcagccagacgcctacgacagccgctatgcgcgctggaatcttgctgatttgccgattgtcccggaaaagtggcaattacagccccgaccctccgtgaccaaacaacttaatgtcatcaaacgcttcctgcatgaagccagcgaaatcgttcacgccggtgacccggatcgcgaagggcaattactggtggatgaagtgctggactatctgcaactggcaccggaaaagcgccagcaggtgcagcgttgcttgataaacgacctgaacccgcaggcggttgagcgggcgatcgaccgtcttcgttccaacagtgagtttgtgccgttgtgcgtttctgcactggcgcgagcccgagccgactggctgtacggcatcaatatgacccgcgcttacaccattctcggtcgcaatgcgggttatcagggcgtactttccgtgggacgcgtgcagacgcccgtactcggactggtggtgcgccgcgacgaagagattgaaaacttcgtggcgaaagatttctttgaagtcaaagcgcatatcgtgacacctgccgatgagcggtttaccgctatctggcaaccgagcgaagcgtgtgaaccttatcaggatgaagaagggcgcttgttacatcgtccgctggcggagcatgtggtcaaccgcatcagcggccaaccggctattgtcaccagctataacgataaacgggaatcagaatccgcaccgctgccgttttcgctttcggcgttgcagattgaagcggcaaaacgctttggtctgagtgcgcagaacgtgcttgatatctgccagaagttgtacgaaacgcacaagctaatcacttatccgcgttccgattgtcgctatctgccggaagagcattttgccggacgccacgcagtgatgaatgccatcagcgttcatgcaccggacttgttaccgcagccagtggtcgatccagatatacgcaaccgctgctgggatgacaaaaaggtcgatgcgcaccacgccatcatcccgaccgcacggagttctgcgatcaacctgacggagaacgaagcgaaggtctataacctgattgcccgtcagtatttgatgcagttctgcccggatgcggtgttccgcaagtgtgttatcgaactggatattgccaaaggcaaatttgtcgctaaagcgcgttttcttgctgaagcaggctggcgcacgctgttaggcagcaaagagcgcgatgaagaaaacgacggtacgccattgcctgtggtggcgaaaggcgatgagttgctgtgtgaaaaaggtgaagtggtagagcggcaaacccagccgccgcgtcattttaccgatgcaacactgctttcggcgatgaccgggatagcacgttttgtgcaggacaaagatctgaaaaagatccttcgtgcgaccgatggtctggggacagaagcgactcgcgccgggattattgaactgctgttcaagcgaggcttcctgaccaaaaaagggcgctatatccactccaccgacgccggaaaagcattattccattcgctgccagagatggcgacgcgaccggacatgaccgcgcactgggaatcggtgctgacgcaaatcagcgaaaagcagtgtcgctaccaggactttatgcaaccgctggtggggacattgtaccagttgattgatcaggcaaagcgcacgtcggtaaggcagtttcggggaataatggctcccggcggtggagaagggaagaaaaaggattcgccacgcaagagagcgccgaaaaaaagcccgccatcagaagaggcgggcaatggagtgataacataa

SEQ ID NO: 260505 - DNA, 1344 bp, Klebsiella pneumoniae
atggatcagacatattctctggagtcattcctcaaccatgtccaaaagcgcgacccgaatcaaaccgagttcgcgcaagccgttcgtgaagtaatgaccacactctggccttttcttgaacaaaatccaaaatatcgccagatgtcattactggagcgtctggttgaaccggagcgcgtgatccagtttcgcgtggtatgggttgatgatcgcaaccaggtacaggtcaaccgtgcatggcgtgtgcagttcagctctgccatcggcccgtacaaaggcggtatgcgcttccatccgtcagttaacctttccattctcaaattcctcggcttcgaacaaaccttcaaaaatgccctgactactctgccgatgggcggtggtaaaggcggcagcgatttcgatccgaaaggaaaaagcgaaggtgaagtgatgcgtttttgccaggcgctgatgactgaactgtatcgccacctgggcgcggataccgacgttccggcaggtgatatcggggttggtggtcgtgaagtcggctttatggcggggatgatgaaaaagctctccaacaataccgcctgcgtcttcaccggtaagggcctttcatttggcggcagtcttattcgcccggaagctaccggctacggtctggtttatttcacagaagcaatgctaaaacgccacggtatgggttttgaaggaatgcgcgtttccgtttctggctccggcaacgtcgcccagtacgctatcgaaaaagcgatggaatttggtgctcgtgtgatcactgcgtcagactccagtggcactgtagttgatgaaagcggattcacgaaagagaaactggcgcgtcttatcgaaatcaaagccagccgcgatggtcgagtggcagattacgccaaagaatttggtctggtctatctcgaaggccaacagccgtggtctgtaccagttgatatcgccctgccttgcgccacccagaacgaactggatgttgacgccgcgcatcagcttatcgccaatggcgttaaagccgtcgccgaaggggcaaatatgccgaccaccatcgaagcgactgaactgttccagcaggcaggcgtactgtttgcaccgggtaaagcggctaatgctggcggtgtagcaacatcgggcctggaaatggcgcaaaacgctgcgcgcctgggctggaaagccgagaaagttgacgcacgtttgcatcacatcatgctggatatccaccatgcctgtgttgagcatggtggtgaaggtgagcaaaccaactacgtgcagggcgcgaacattgccggttttgtgaaggttgcggatgcgatgttaagccagggcgtgatttaa

SEQ ID NO: 260506 - DNA, 273 bp, Klebsiella pneumoniae
gtgagtcgagcattgttcgccgtagtattagcatttccattaattgcactggctaacccgcattatcgtccggacgtggaggtaaacgtaccgccagaagtgttcagttcaggcgggcagtcagcgcagccctgtactcagtgctgcgtttatcaggatcaaaattattctgaaggggcggtaattaaagccgaaggaatactgctgcaatgccagcgtgatgacaaaacccttagcactaatccgctggtctggcggcgcgtaaagccataa

SEQ ID NO: 260507 - DNA, 408 bp, Klebsiella pneumoniae
atgaaaatggttgaagttgttgccgccatcatcgaacgtgatggcaaaattttactcgcgcaacgccccgcccatagcgatcaggcgggattatgggagtttgccggtggtaaagtcgagccggatgaaagccagcggcaggcgctggtgcgtgagttacgcgaagaactgggcatcgaagcagctgtgggtgaatatgttgccagccatcagcgagaagtttcggggcggattatccatcttcatgcctggcacgtacccgacttccacgggacgttacaggcacatgaacatcaggcgctggtctggtgctcacctgaagaggcgctgcaatatccgctggcccctgctgacattccattattagaggcgtttatggctttacgcgccgccagaccagcggattag

SEQ ID NO: 260508 - DNA, 621 bp, Klebsiella pneumoniae
gtgctagaccgccatcttcatccccgaattaaacctttgttgcatcagtgtgtgaaggtgctggataaacccggcatcacgccagatggtttaacattagtgggatttgccatcggtgtgctggcactgccttttctggcgctgggctggtatctggcggcgcttgtcgtcattttgttaaacaggctgcttgatggtctggacggtgcgctggcgcggcgcagagggcttaccgacgcgggcggctttctcgatatttctctcgattttctcttttacgcgctggtgccgtttggttttattcttgctgcaccggagcaaaatgcgctggcaggcggctggctgctgtttgcgtttatcggtacgggcagcagttttctcgcctttgctgcactggcagcaaaacatcagattgataaccccggttatgcacataagtcgttttactatctggggggattaaccgaaggcactgaaacgatcttactgtttgtgctgggatgtttattccctgcatggtttgtgtggtttgcgtggatcttcggtgcgttgtgctggatgacgacctttacgcgggtgtggagtgggtatctgacgctgaagtcgctccagcgtcagtaa

SEQ ID NO: 260509 - DNA, 1308 bp, Klebsiella pneumoniae
atgaaacgtgtttctcaaatgaccgcgctggcaatggctttagggctggcttgcgcttcttcgtgggccgctgaactggcgaagcctcttacacttgaccagcttcaacaacaaaatggcaaagcgatagatactcgccccagcgcgttttataacggctggccacaaatcttaaatggcccttctggtcatgagcctgccgccttaaacctctctgccagctggctcgacaaaatgagcaccgaacagcttaacgcgtggatcaagctacataacctgaaagccgatgctccggttgcgctgtacggtaatgacaaagatgtcgatgccgtcaaaacgcgtctgcaaaaagcaggttttacgcatatctccatcctgagtgacgcgctaagtgaaccttcccgtctgcaaaaactgccgcactttgagcagctggtttatccgcaatggctgcacgacctgcaacaaggtaaagaggttacggcgaaacctgccggtgactggaaagtcattgaagcggcctggggcgctcctaagctttaccttatcagtcatattcccggcgctgactacatcgataccaacgaagtggaaagcgaaccgctgtggaacaaagtttctgatgaacaactaaaagcgatgctggcaaaacacggcattcgccatgacaccacggtcattctgtacgggcgtgacgtatacgctgcagcgcgtgtggcgcagataatgctttatgccggcgtgaaagatgtccgcctgctggatggcggctggcaaacctggtccgacgcgggactgcctgttgagcgcggaacgccaccgaaagtgaaagcggaaccggatttcggcgtgaagatcccggcacaaccgcaactgatgcttgatatggaacaggcgcgtggactgctgcatcgccaggatgcatcgctggtgagcattcgttcgtggccagaatttatcggtacgaccagcggttacagctatattaaaccaaaaggtgaaatagccggagcacgttggggacacgctggtagcgactcgacgcatatggaagatttccataacccggatggcaccatgcgtagcgccgatgatattaccgctatgtggaaagcatggaatatcaagccagatcagcaagtttcattctactgcggcaccggctggcgcgcatccgaaacctttatgtacgcacgagcaatgggctggaataacgtctccgtttacgacggcggctggtacgaatggagcagcgatccaaaaaatccggttgcaaccggtgaacgcggcccggacagcagcaaataa

SEQ ID NO: 260510 - DNA, 654 bp, Klebsiella pneumoniae
atgctctgcgtgaaaaatgtttcgctacgtttaccagaaagctgcttgctgacaaacgttaactttacggtggataaatgtgacattgtcacgttaatggggccgtctggctgtggaaaatccactctgttttcatggatgattggtgcgctggccggacagttttcttgtacaggtgagctatggctcaatgagcaacggattgacatgctacccaccgcagagcgtcagattggcattcttttccaggatgcactgttatttgaccagttcagcgtcgggcaaaatttactgctggctctgccagcggcactcaaaggtgttgcaaggcgcgatgcggtaaatgatgcgctggagcgtgcggggcttggcggtatgttccatcaggatcctgccactttgtctggcggtcagcgagcgcgcgttgctctgcttcgcgctcttctcgctcagccaaaagcgttgctactggatgagccattcagccgtcttgatgtagctctgcgcgataattttcgccagtgggtgttcagcgaagttcgcgcccaggcgatcccagtcgttcaggtaacgcacgatctccaggatgttcctgctgatagttctgttctggatatggcgcagtggtcagaaaattacaacaaactgcgataa

SEQ ID NO: 260511 - DNA, 1536 bp, Klebsiella pneumoniae
atggctacaccgttacggtacgcattaatctttttgctgtgggcgatggtggcggtgatttatgcaccgctgatcccggcagctctcacgctgatatcgcctgctttgtcgttgacacactggcagacgttatttgccgatccacagttaccgcaggcattactggcaacgctggtgtcgacaaccatcgcggcggtcggggcgttgttgattgccctgctggtgattgtggcgctgtggcctgggccgaaatggcagcgtatgtgcgcccgtctgccgtggctgctcgccattccccatgtggcttttgccaccagcgcccttctgctctttgctgacggagggctgctttatgactatttcccgtatttcactccgccaatggaccgatttggcatcggtctgggcctcacccttgcagtgaaagaaagcgcatttctgctgtggatcttagcggcagtattgagcgaaaaacggctgttgcagcaagttattgtactggattcgctgggctacagccgctggcaatgcctgaactggctgttgttgccctccgtcgcacctgcactggcaatggcgatgctggcgattgtcgcctggtcgctgtcggtcgtggatgtggcgattatccttgggccaggtaatcccccgacgctggcagtaattagctggcagtggttaactcagggcgacgccgatcaacaaacgaaaggcgcactcgccagcctgctgctgatgctgttactcgccgcctacgttttgctgggctatctgctatggcgtagctggcggcgtactattccccgcgtagatggcgttcgtaagcctgccacgcctttattgccaggcaatacgctggcgagttttttacccttaaccggtgtgctgtgtgtggttctgctggcgatcctcgcggatcagtcgacgatcaatagtgaagcgctcatcaacagcctgacaatggggctggtggcggcattcatcgctttgctcctgttactgctgtggctggaatgggggccacagcgtcgccagttgtggctatggttgcccattttattacccgctctgccgctggtggcgggccagtacacgctggcgctatggctgaacctggatggaagctggacggcggtggtctgggggcatctgctgtgggtaatgccgtggatgctgtttatcctgcaacccgcctggcagcgcattgattcacggttaattttgattgcgcaaacactgggctggtcgcgggccaaaatcttcttttacgtgaaatgcccactcatgctacgccctgcgctgattgtcttcgcggtgggattttcagtcagtattgcacagtatatgccgacgctgtggctgggcgcggggcgttttccgacgctcaccactgaagcggtggcattaagcagcggcggcagcaacggtattctcgccgcccaggctttatggcaactactgttgccgcttattatttttgccctgaccgcgttagtcgcaaaatgggtaggttatgtcagacaaggactccgctaa

SEQ ID NO: 260512 - DNA, 1167 bp, Klebsiella pneumoniae
atgcgccattgtgggtggttgctgggattgttatcgctgttttctttggcaacacatgccagtgactggcaggaaataaaaaatgaggccaaaggacaaaccgtctggtttaacgcctggggcggcgataccgcaattaaccgctatctcgactgggttagcggcgagatgaaaacccattacgctataaacctgaagattgttcgtctcgcggatgccgcagacgcggtgaagcgcattcagaccgaagctgctgccggacgcaaaacaggcggctcggtggatctgctctgggtgaacggcgaaaacttccgcaccttaaaagaggccaatttattacaaacgggctgggcggagactctgcccaactggcgctatgtcgacacacagctgccggtgcgggaagatttttcagtgcctacagaaggggctgaatcgccctgggggggcgcgcaactgacgtttatcgcccgccgcgatgttacgccgcagccaccacaaacgccgcaagccttactggagtttgctaaagccaatcccggtacggttacctatccgcgcccaccggactttaccggcacggcgtttcttgaacagttgctgattatgctaacgccagatcccacagcattaaaagaagcgccggacgatgcgactttcgcccgtgtcactgctcccttgtggcaatatcttgatgcgctgcatccgtatttgtggcgcgaaggaaaggatttcccgccttcgcccgcgcggatggatgctctgctgaaagccggcacattgcgcctgtcgctgacctttaatcccgcgcatgcgcagcaaaaaatcgccagcggcgatttacccgccagcagttacagctttggctttagcgagggaatgattggcaacgtgcatttcgtcaccattcccgccaacgcgaatgccagtgctgcggcgaaggtagttgccaatttcctgctctcacccgatgcacaactgcgtaaagcagaccctgctgtctggggcgatccttcggttctcgatccgcaaaaactgcctgacgggcagcgcgaaatattgcaatcaagaatgccgcaggatctgccgccggtactggctgaaccgcacgcaggttgggtaaatgcgctggaacaagaatggctacaccgttacggtacgcattaa

SEQ ID NO: 260513 - DNA, 549 bp, Klebsiella pneumoniae
atgggtttaccgccgcttagcaaaattcctttcattttacgtccgcaggcgtggctgcatcgtcgccattacggcgaggtgctaagcccgattcgctggtgggggcggatcccgtttatcttttatctggtgtcgatgtttgtcggctggctggagcgcaaacgctcaccgctggatccagtagtgcgatcgcttgtcagcgcgcgcattgcgcaaatgtgtctgtgtgagttttgcgtggatatcaccagtatgaaagtcgccgagcgcactggcagcaccgataaactgctggcagtggctgactggcggcaaagcccgctctttagcgatgaagaacggctggcgctggagtacgccgaagccgcaagcgtaacgccgccaacggtcgatgatgccctgcgtacccgactggctgcgcattttgacgcccaggcgctcaccgaactgacggcattgatcggcctgcaaaacctgtcagcccgttttaattctgccatggacattcccgctcaggggctgtgccgtattcctgaaaaacgttcttaa

SEQ ID NO: 260514 - DNA, 708 bp, Klebsiella pneumoniae
atgatgaagatgcaatcgcgaaaaatctggtactaccgtataaccctcatcatcctgttgttcgctatgctgctggcatgggcgctgcttcccggcgtccatgagtttattaatcgcagcgttgcggcgtttgccgccgtggaccaacagggtatagaacgctttattcagtcttacggcgcactggcggcagttgtctcgttcttgttgatgattttacaggccattgctgcaccgctacctgcgtttttgatcacctttgccaatgcgtcgctgtttggcgcgctctggggcggcttgctgtcgtggaccagttcgatggccggcgcggcgctgtgcttttttatcgccagagtgatgggccgcgaagtggtggaaaagttaacgggtaaaacggtactcaatagtatggacggcttttttacccgctatggtaaacacaccattctggtatgccgattattgccttttgtgccttttgatcccgtaagctatgctgccggtttgacttcaatacgttttcgctcgttttttatcgccaccgggcttggtcagttaccagcgactattgtttattcctgggcgggcagcatattaacaggcggtactttctggtttgtcaccggactgtttattctgtttgccctgaccgtggtgatttttatggcgaagaaaatatggcttgagcgccagaagaggaatgcctga

SEQ ID NO: 260515 - DNA, 678 bp, Klebsiella pneumoniae
atgttgcaacattattcagcgtcatggaaaaaaggactggctgcactctgcttactggctgttgccgggcttagcggctgcgatcaaaaagagaatgcggctgcaaaagtggaatacgacggactttcgaacagccaaccgctgcgtgtcgatgccaataaccatacggtaaccatgctggtgcaaattaatggtcgtttcctgaccgacgacacccgccacggcattgtgtttaaagatggctcaaacgggcataaatcgctgtttatgggttatgcgaccccgaaagcattttatgaagccctgaaagaggcaggtggtacaccgggcgaaaacatgacgatggataataaagaaacgactcacgtcgcaggcagcaaactggatatttcggtcaactggcaaggggcggcaaaagcgtattccttcgatgaagtgattgttgacagtaatggcaagaaactggacatgcgctttggcggtaatttaacggcagcagaagagaagaaaacgggctgcctggtgtgtctggatagctgcccggtcggcatcgtcagcaatgcaacatacacttatggtgcggtggaaaaacgcggcgaagtgaaattcaaaggcaatgcctcggttctcccggcggataacacgctggcaacggttacctttaaaatcaccgaataa

SEQ ID NO: 260516 - DNA, 711 bp, Klebsiella pneumoniae
atgaacgctgagcgtaaatttctttttgcctgtcttatttttgcgctgctcatttacgctatccacgctttcggtttattcgatctgctcaccgatttaccccacttacagacactcattcgccagagcggattgttcggttatagcctctatattctgttattcatcattgccaccctctttctgttaccaggaagcatactggtgatcgctggaggaatagtttttggcccgctcttagggacactactatcattaattgccgccacgctggcctcctcgtgctcattcctgctggcgcgctggctgggacgtgatttactgctgaaatacgttggccatagccataccttccaggccattgaaaaaggcattgcgcgtaacggtattgattttcttattctgacccgcttaatcccgttgtttccttacaatattcaaaattacgcttacggattaaccaccatcgccttctggccttatacccttatttcggcactcacgaccctgcccggtattgttatttataccgtgatggcaagcgatctcgccaatgaaggcattacgctgcgctttattttacaactctgtctggcgggcctggcgctgtttattctcgtccagctcgccaaactctacgcccgacacaaacatgtggatctgtctgcttcgcgccgcagcccacttactcacccaaaaaatgaaggatag

SEQ ID NO: 260517 - DNA, 807 bp, Klebsiella pneumoniae
atgaaatttgtctcttttaatatcaacggcctgcgcgccagacctcatcagcttgaagccatcgtcgaaaagcaccaaccggatgtgattggcctgcaggagacaaaagttcatgacgatatgtttccactcgaagaggtggcgaagctcggctacaacgtgttttatcacgggcagaaaggccattatggcgtggcgctgctgaccaaagagacgccgattgccgtgcgtcgcggttttccgggtgatgacgaagaggcgcaacggcgaattattatggctgaaatcccctcgacgctgggcaatgttaccgtgatcaacggttacttcccgcagggtgaaagccgcgaccatccgataaaattcccggcaaaggcgcagttttatcagaatctgcaaaactacctggaaaccgaactcaagcgtgaaaatccggtgctgattatgggtgatatgaatatcagtcctggcgacctggatattggcattggcgaagagaaccgtaagcgctggctgcgtaccggaaaatgctctttccttccggaagaacgcgaatggatggagagactgatgagctgggggttggtcgataccttccgccatgcgaatccgcaaacagccgatcgtttctcatggtttgattaccgctcaaaaggttttgacgataaccgtggtctgcgcatcgacctgcttctcgccagccaaccgctggcagaatgttgtgttgaaaccggcatcgactatgaaatccgcagcatggaaaaaccgtcagatcatgcccccgtctgggcgaccttccgccgctaa

SEQ ID NO: 260518 - DNA, 1221 bp, Klebsiella pneumoniae
atgtctcagccaattacgcgtgaaaactttgatgaatggatgatacctgtttacgctccggcaccgtttataccggtacgtggcgaaggttcgcgcttgtgggatcagcaggggaaagagtatatcgacttcgcgggtggcattgcggtgaacgcgctgggccatgcgcacccggaactgcgtgaggcgctgaacgaacaggcgagtaagttctggcataccggcaacggttacaccaacgagccggtactgcgactggcgaaaaaattgaccgacgccacgtttgccgatcgcgtcttcttttgtaactccggtgcggaagccaatgaagcggcgctaaaactggcgcgtaaattcgctcacgaccgctacggcagccataagagcggtatcgtggcgtttaaaaatgcgtttcatggtcgcacgctgtttactgtcagtgcgggtgggcagccagcctattcacaggattttgcgccactgccgccggatattcttcatgccgcatataacgatattaactctgccagcgcgctgattgacgactctacctgtgcggtgattgtcgaacccatccagggggaaggcggtgtggtgccagccagcaacgcgtttttacatggtctgcgtgaattgtgtgaccgccacaatgcattgctgatttttgatgaagtacaaaccggcgtcggacgcaccggggaactgtatgcctatatgcactacggcgtgacgcccgatctgttaactaccgccaaagcgctgggcggcggtttcccggttggtgcgttgttggcaaccgaagagtgcgccagtgtgatgaccgttggcactcatggcaccacctatggcggcaatccgctggcctcggcggtggcaggcaaagtgctggatctcatcaacacgccagagatgcttaatggcgttaaacagcgtcacgactggtttgttgagcgtcttaataccattaatcaccgctacggtttgttcagtgaagttcgcggcttaggtttgttgattggttgcgtgttgaatgccgattacgccgggcaagcgaaacagatctctcaggaagcggcgaaagcaggcgtgatggtactgattgcgggtggcaacgtggtgcgttttgcgcctgcgctcaatgttagcgaagaagaggtgacgaccggactggatcgctttgcagctgcttgcgaacactttgttagccgaggttcttcatga

SEQ ID NO: 260519 - DNA, 1035 bp, Klebsiella pneumoniae
atgatggtcatccgtcccgttgagcgttcagatatctcggcgctgatgcagcttgccagcaaaactggcggcggcctgacgtcgcttcccgccaatgaagccacgctttcggcgcgtatcgaaagggcaatcaaaacctggcaaggcgaactgcccaaaagtgagcagggctatgtgttcgtgctggaagatagcgagacaggcacagtggcggggatttgcgccattgaggtggcagttgggctgaacgatccctggtacaactatcgcgtcggcacgctggttcacgcttcgaaagagctgaatgtctataacgcgttgccgacgctgtttctcagtaacgatcacaccggcagcagcgagctgtgcacgctgtttctcgacccggagtggcgcaaagagggcaacggctatttgctgtcgaaatcgcgctttatgtttatggcggcttttcgcgacaagtttaatgacaaagtggttgccgaaatgcgcggggtgattgacgaacatggctattcaccgttctggcaaagcctcggtaagcgcttcttttcgatggattttagccgcgccgattttctctgcggcaccgggcaaaaggcatttattgcagaactgatgccgaaacatccgatctatacccactttttatctcaggaagcccaggacgtcatcggtcaggtacatccgcaaaccgcgcctgcccgtgcggtactggagaaagaaggttttcgctaccgtaattatatcgacatcttcgacggtgggccgacgcttgagtgtgacatcgaccgcgtgcgcgccatccgtaaaagtcggctggtggaagtggcagaagggcagcctgcgcagggcgattttccggcctgcttggtcgccaatgaaaattatcaccatttccgcgtggtgctggtgcgtaccgatccggcaaccgagcgtttgattttaaccgccgcacaactggatgccctcaaatgccacgcaggggatcgcgttcgtctggtgcgcctgtgcgcagaggagaaaacagcatga

SEQ ID NO: 260520 - DNA, 1479 bp, Klebsiella pneumoniae
atgactttatggattaacggtgattgggtaacgggccagggcgcattgcgtgtgaagcgtaatccggtatcgggcgaggtgttatggcaaggcaatgatgccgatgccgctcaggtcgggcaggcttgtcgggcagcccgtgcggcgtttccgcgctgggcgcgtctctcctttggcgatcgtcaggtaagagttgaacgctttgccggattgctggaaagcaataaagccgaattaaccgcgattattgccagagaaacgggtaagccgcgctgggaagcggcaaccgaagtgacggcgatgatcaataaaatcgcgatatcaattaaggcgtatcatgttcgtaccggcgagcagcgtagcgaaatgccggacggcgcggcgagcctgcgacatcgcccgcacggcgtgctggcggtgtttgggccgtataatttccctggtcatttgccgaacgggcatatcgttccggcattgctggcgggtaacaccattatctttaaacccagcgaactgacaccctggagcggcgaagcggtaatgcgtttatggcagcaggctggcttgccgccgggcgtgctgaacctggtgcagggcgggcgtgaaacgggtcaggcgctgagtgcgctggaggatctcgacggcttgctgtttaccggtagcgccaatactggctaccagttgcatcgtcagctttccggtcagccggagaaaattctcgccctcgaaatgggcggcaataacccgctgattatcgatgaggtggcggatatcgatgccgctgtccatctgaccattcagtcggcatttgtcacagccgggcaacgctgcacctgcgcccgccgtttattgctgaaaagcggggcgcagggcgatgcgtttcttgctcgtctggttgccgtcagccagcgattaacgccgggcaaatgggatgacgaaccgcagccgtttattggcgggctgatttctgaacaggccgcacagcaggtggttactgcctggcagcaactggaagcgatgggcagacgaaccctgcttgcgccgcgcttattacaagcagggacatcgttgctgacgccggggatcattgaaatgacaggcgttgctggcgtaccagatgaagaggtgttcggaccgttattgcgcgtctggcgttatgatactttcgatgaagcgattcgaatggcgaataacactcgcttcggactctcttgcggactggtttcccccgcgcgggaaaaattcgatcaactgttgctggaggcgcgggcggggattgttaactggaacaaaccgcttaccggcgctgccagtaccgcgccattcggcggcattggcgcttccggtaaccatcgccccagcgcctggtatgccgcagattactgcgcctggccgatggcgagtctggagtcggactcgttaacattgcccgccacgcttaaccctgggctggatttttccgatgaggtggtgcgatga

SEQ ID NO: 260521 - DNA, 1344 bp, Klebsiella pneumoniae
atgaacgcctgggaaatcaatttcgacgggctggtagggctgacgcatcattacgcgggcctgtcgtttggtaatgaagcctccaccagtcaccgttttcaggtctctaacccgcgactggcggcgaagcagggcttactgaaaatgaaagcccttgccgacgcgggattcccccaggcggtgatcccgccgcacgagcgtccgtttattccggtgctgcgtcagttgggtttcagcggcagcgatgagcaggtactggaaaaggttgcccgccaggcaccgcactggctttccagcgtcagttccgcttcgccaatgtgggtagctaatgcggccacggtagcgccatccaccgatacgctggatggcaaagtgcatctcaccgttgctaacctgaacaataaatttcaccgttcgctggaagcgcccgtctctgaatcgctgttaaaagcgatttttaacgacgaagagaaatttagtgtccattcggcgttgccgcaggtagccttgctcggtgatgagggggcggcaaaccacaatcgtctcggcggtcattacggtgaaccgggtatgcaactttttgtctacgggcgagaagagggcaatgatacccggccttcccgttatccggcgcgacagactcgcgaagccagcgaggcggtggcaaggttgaatcaggtgaatccccaacaggtgattttcgcccagcaaaacccggacgttatcgaccagggcgtttttcataatgacgtgattgccgtgagtaaccgccaggtgctgttttgtcatcaacaggcgttcgctcgacaggtgcagttactggcaaacctgcgtgcgcgggtgaacggttttatggcgatagaagttccggcgactcaggtttccgtgtcggatgcggtgtctacatatctgtttaacagccaactgttgagccgcgatgatggttccatgatgttggtgctgcctcaggagtgtcgggaacacgccggagtatggggttatctcaatgaactccttgccgctgacaacccgattagcgaactaaaagtctttgatttacgtgaaagcatggcgaatggtggcggcccggcgtgcctgcggttgcgggtggtattgacagaagaagaacgccgggcggtgaatccggcggtgatgatgaacgatacgctgtttaatgcgctcaatgactgggtggatcgttactaccgcgatcgtcttactgctgccgatctggccgacccgcaattgctgcgcgaagggcgggaagcactggatgtattgagccaattactgaatctcggttcggtttatccgttccagcgcgagggagggggcaatggataa

SEQ ID NO: 260522 - DNA, 969 bp, Klebsiella pneumoniae
atggataattttcttgctctgaccttaacgggtaaaaaaccggttatcaccgagcgagaaatcaacggcgttcgctggcgctggctgggcgatggtgtgctggaactgacgccattaacgccaccgcaaggcgcactggtgatttcagcgggaatacacggtaatgagacggcacctgtggagatgctggacgcgttgcttggcgcgatatctcacggcgagatcccgttacgttggcggttgctggtgatcctcgggaatcctcctgcgctgaagcaagggaaacgttattgccatagcgatatgaaccgaatgtttggcggtcgttggcagctatttgctgaaagcggggaaacctgtcgcgcgcgcgaactggaacagtgcctggaagatttttatgaccagggcaaagaatctgtgcgctggcaccttgatctccataccgcaattcgtggctccttgcatccgcagttcggtgtattaccgcaacgcgacattccctgggacgagaaatttctgacgtggctgggggcggcggggctggaggcactggtattccatcagacgcctggtggtacgtttactcatttcagcgccagacattttggcgcgctggcctgtacgctggaactcggcaaagcgttgccctttggacaaaacgatcttcgccagtttgcagtcactgccagcgccattgctgcgctgctatctggtgagagtgttggtatcgtgagaacgccgccgctccgttatcgggtggtttcgcaaattactcgccactcgccgtccttcgaaatgcatatggcaagtgacacgctgaattttatgccgtttgagaaaggaacattgctggcgcaggacggggaggaacgttttaccgtaacccatgatgtagagtatgtgttattccctaatcctttggtagcgttgggattacgcgcgggattaatgctcgaaaaaataagctaa

SEQ ID NO: 260523 - DNA, 486 bp, Klebsiella pneumoniae
atgcgtaaattaactgcactgtttgttgcctctaccctggctcttggcgcggctaacctggcccatgccgcagacaccactaccgcagcaccggctgacgcgaagccgatgatgcaccacaaaggcaagttcggtccgcatcaggacatgatgttcaaagacctgaacctgaccgacgcgcagaaacagcagatccgcgaaatcatgaaaggccagcgtgaccagatgaaacgtccgccgctggaagaacgccgcgcaatgcatgacatcattgccagcgataccttcgataaagcaaaagctgaagcgcagatcgcaaaaatggaagaacagcgcaaagctaacatgctggcgcacatggaaacccagaacaaaatttacaacatcctgacgccggaacagaaaaagcaatttaatgctaattttgagaagcgtctgacagaacgtccagcggcaaaaggtaaaatgcctgcaactgctgaataa

SEQ ID NO: 260524 - DNA, 576 bp, Klebsiella pneumoniae
atggaatactttgatatgcgtaaaatgtcggtgaatctgtggcgaaatgctgccggtgaaacgcgcgaaatttgcactttcccaccggcaaaacgtgatttttactggcgtgccagcattgcatccatcgcggcgaatggggagttttctttgtttccaggtatggaaaggatagtgacgttgctggaaggcggcgagatgttccttgaaagcgcagaccgctttaaccataccttaaaaccgttacagccttttgcctttgcggcggaccaggtggtaaaagcgaaactgacggcagggcagatgtcgatggatttcaacatcatgacacgcctggatgtctgtaaggcgaaagtcagaattgccgaacgtacgtttactacctttggctcacgcggcggggtggtgtttgtaattaacggcgcgtggcaactgggcgacaaactgctcactaccgaccagggcgcgtgctggttcgatggcaggcacaccctgcggcttttacaaccgcagggtaaactgttgttcagtgaaatcaactggctcgctggtcattcgccggatcaagttcagtaa

SEQ ID NO: 260525 - DNA, 888 bp, Klebsiella pneumoniae
gtggtacggcgtttaacttctccgcggctcgaatttgaagctgcggcaatttatgaatatcccgaacatttacgttcattccttaatgacttacccacccgaccaggggtgtatctgtttcatggcgaaagtgacaccatgccgctctatatcggcaaaagcgttaatatccgcagtcgggtgctttctcatttacgcaccccggatgaagccgccatgctacggcaatcccggcgaattagctggatctgcaccgcaggcgaaatcggcgctctgctccttgaagcgcgattaatcaaagaacaacaaccgctgtttaataaacggttgcgccgcaatcgccagctctgcgccctgcaattaaatgaaaagcgtgttgatgtggtgtatgccaaagaggtggatttttcacgagcccccaacctgtttggcctgtttgccaataggcgcgcagctttgcaagcattgcagaccatcgctgatgaacaaaaactttgctatggcctgctgggactggaaccgttaagccgcgggcgtgcttgttttcgttctgcattaaaacgttgcgctggggcgtgttgcggtaaagagagccatgaggaacatgcgctacgtttgcgccagtctctggagcgtttgcgggtggtgtgttggccttggcaaggggcggtggcgctgaaagaacagcacccggaaatgactcaatatcatattattcaaaactggctgtggctgggagcggttaattcgctggaagaagcgacaacgttaattcggacacccgccgggtttgatcacgacggttataaaattctttgtaagccgctgctttccggtaactatgaaattactgaacttgatccggcgaatgaccagcgagccagttga

SEQ ID NO: 260526 - DNA, 1359 bp, Klebsiella pneumoniae
atgagtaatgttattgcatcgcttgaaaaggtactcctcccttttgcagttaaaataggaaagcagccacacgttaatgcaatcaaaaatggctttattcgcttaatgccgttaacccttgcgggggccatgtttgtattaattaacaacgtttttctaagctttggggaggggtcgtttttttattccttaggtattcgcctggatgcctcaaccattgaaacacttaatggtctgaaaggtattggcggcaacgtatataacggaacattagggataatgtctttaatggcaccgttctttattggcatggcgctggcagaagagcgtaaagtcgatgcgctggcggctgggttgttatccgttgcagcatttatgaccgtcaccccatacagtgtcggtgaggcctatgcggttggcgcaaactggttaggtggggcgaatatcatctccgggattattattggcctggtggtggcagaaatgtttacctttattgtccaccgcaattgggtcattaaattgcccgacagcgtacctgcttcagtatcgcgttccttctcggcattaatccccggctttattattctttccgtgatggggattattgcctgggcgttgaatacctggggtaccaatttccatcagatcattatggataccatctcaaccccactggcatcgttgggtagcgtggtgggatgggcctatgtgatctttgttccactgctctggttcttcggtattcatggcgcgctggcgctgaccgcactggacaacggcattatgacgccgtgggcgctggaaaacatcgcgacctatcagcaatatggttccgtcgaagcggcgctggcagccggtaagaccttccatatctgggccaagccgatgctggactcctttattttcctcggtggcagtggtgcgactttgggtctgatcctggctatctttatcgcttctcgccgtgctgattatcgtcaggtggcaaaactggcgctgccgtccggcatcttccagattaacgaaccgattctgtttggtctgccaattatcatgaacccggtgatgtttattccgtttgtactggtacaaccgattctggcggcaatcaccctcgcagcttactacatgggcattattcctccggtgaccaatattgcaccgtggaccatgccaaccggtctgggagccttctttaacaccaacggtagcgtcgccgcattgctggtcgcactcttcaaccttggtatcgcaacgttaatttatctgccctttgttgtggtcgctaacaaagcacaaaacgcgattgataaagaagagagcgaagaagatatcgctaacgccctgaaattttaa

SEQ ID NO: 260527 - DNA, 351 bp, Klebsiella pneumoniae
atgatggatctcgataacattcccgatacgcaaacagaagctgaagagctggaagaagtggtgatgggacttatcatcaactccggacaagcgcgcagcctggcgtatgccgcactgaaacaggcgaagcagggcgattttgccgcagcaaaagccatgatggatcagtcacggatggcattgaatgaagcgcatctggtacagacgaaactgattgaaggcgatgcgggcgaaggtaagatgaaagtgagtctggtgctggtccacgctcaggatcatttaatgacgtccatgcttgcgcgtgaactgattaccgaattaattgagcttcatgaaaaactgaaggcataa

SEQ ID NO: 260528 - DNA, 1353 bp, Klebsiella pneumoniae
atgagccagaaattaaaagtcgtcactattggtggcgggagcagctataccccggagttactggaaggatttattaagcgttatcacgaattgccggtcagcgaattatggctggtggatgtcgaaggtggtaaagctaaactggatattatttttgatctctgccaacggatgattgataacgctggcgtcccgatgaagctttataaaacgctggatcgccgcgaagcattgaaagatgctgatttcgttactacccaactgcgcgtaggccaattaccggcgcgcgaactggatgaacgtattccattaagtcatggttatcttggtcaggaaaccaacggcgcgggcggtctttttaaaggtctgcgtaccattccggtgatttttgacatcgtaaaagatgtcgaagaactttgtccgaatgcatgggtgattaacttcactaacccggcgggaatggtcactgaagccgtttatcgtcataccggatttaaacgctttatcggcgtgtgtaatattccgatcggcatgaagatgtttattcgcgatgttctgatgctgaaagacagcgatgatttatctatcgatctgttcggcctcaaccatatggtgttcattaaagatgtgctggtaaatggcaaatcacgctttgccgaattgcttgatggtgtggcatccgggcagttaaaagcatctggcgttaaaaatattttcgatctgccatttagcgaaggcttaattcgttctctgaatctgttgccgtgttcttatttgctttattacttcaagcaaaaagagatgctggctattgaaatgggcgaatactacaaaggcggcgcacgagcacaggtagtacagaaagtcgagaaacaactttttgagctgtataaaaacccggagttgaaagttaagccgaaagaactggaacagcgcggtggggcttattactctgatgcagcgtgcgaagtgatcaacgctatctacaacgacaagcaagctgaacattacgttaatatcccgcatcatgggcatattgataatattccggcagactgggcggtagaaatgacctgtacgctggggcgcgatggcgcgacgccacatccgcgcattacgcatttcgatgataaagtgatggggctgattcacaccattaaaggcttcgagattgctgccagcaacgctgcacttagcggagaatttaacgatgtgttactggcgctaaaccttagtccgttggtgcattccgatcgcgatgctgagctgctggcacgcgagatgattctggcgcacgagaaatggctgccaaattttgccgactgcatcgcagagcttaaaaaagcacattaa

SEQ ID NO: 260529 - DNA, 750 bp, Klebsiella pneumoniae
atggaacgcttactgattgttaatgccgatgattttggcttaagcaaaggtcagaactacggcattatcgaggcctgtcgcaatgggattgtcacatcgacgacggcgctggtgaatgggcaggctattgaccatgcggtgcagttgagtcgtgatgaaccgagtctggccatagggatgcactttgtccttactatgggcaagccactgacagctatgccggggttaacccgcgatggtgtgctgggaaaatggatctggcagttggcagaagaagatgctttaccgctggaagaaattactcaggagcttgccagtcagtatttgcgtttcattgagctatttggacgcaaacctacgcatcttgatagccatcatcatgtgcatatgttcccgcagattttcccgattgttgccaggtttgcggcagaagagggcattgcgttgcgggcggatcgtcagatggtgtttgatttgccggtcaacctgcgcactacccagggattcagcagtgcattctacggtgaagagatcagtgagtcgctgttcctgcaagtgcttgatgactccagtcatcgcggcgagcgctctctggaagtgatgtgtcatccggcgtttatcgataatacgattcgccagagtgcttattgcttacctcggttaacggaactggatgtgctgacttcagcgtcgttgaaatatgcgattgctgagcgtggttatcggttgggtagttatcttgatgtgtaa

SEQ ID NO: 260530 - DNA, 2262 bp, Klebsiella pneumoniae
atgtcgcaacataacgaaaagaatccacatcagcaccagtcaccactacacgattccagcgaagcgaaaccggggatggactcactggcacctgaagacggatctcatcgtccaacggctgaaccaacaccgccaggcgcacaacctaccacccctgggagcctgaaagcccctgatacgcgtaacgaaaaacttaattctctggaagacgtacgcaaaggcagtgaaaattttgcgctgaccactaatcagggcgtgcgcatcgccgatgatcaaaactcactgcgtgccggtagccgtggtccaacgctgctggaagattttattctgcgcgagaaaatcacccactttgaccatgagcgcatcccggaacgtattgttcatgcacgcggatcagccgctcacggttatttccagccatataaaagcttaagcgatatcaccaaagcggatttcctctcagatccgaacaaaatcaccccagtatttgttaggttctctaccgttcagggtggtgctggctctgccgataccgtgcgtgatatccgtggctttgccaccaagttctataccgaagagggtatttttgacctcgttggcaataacacgccaatcttctttatccaggatgcgcataaattccccgattttgttcatgcggtaaaaccagaaccgcactgggcaattccacaagggcaaagcgcccacgatactttctgggattatgtttctctgcaacctgaaactctgcacaacgtgatgtgggcgatgtcggatcgcggtatcccgcgcagttaccgcaccatggaaggcttcggtattcacaccttccgcctgattaatgccgaagggaaggcaacgttcgtacgtttccactggaaaccactggcaggtaaagcctcactcgtttgggatgaagcacaaaaactaaccggacgtgacccggacttccaccgccgcgagttgtgggaagccatcgaagcaggcgattttccggaatacgaactgggcttccagttgattcctgaggaagatgaatttaagttcgacttcgaccttcttgatccaactaaacttatcccggaagaactggtgcccgttcagcgtgtcggcaaaatggtgctcaatcgcaatccggataacttctttgccgaaaacgaacaagcagcattccatccaggtcatattgttcctggtctggacttcaccaacgatcccctgttgcagggacgtttgttctcctataccgatacacaaatcagtcgtcttggtgggccgaatttccatgagattccgattaaccgcccgacctgcccttaccataatttccagcgtgacggcatgcatcgtatggggatcgacactaacccggcgaattatgaaccgaactcgatcaacgataactggccgcgcgaaacaccgccggggccgaaacgcggcggttttgaatcataccaggagcgcgtggaaggcaataaagttcgcgagcgcagcccatcgtttggcgaatattattcccatccgcgtctgttctggctaagtcagacgccattcgagcagcgccatattgtcgatggtttcagttttgagttaagcaaagtagttcgtccgtatattcgtgagcgcgttgttgaccagctggcgcatattgatctcactctggcccaggcggtggcgaaaaatctcggtatcgagctgacggacgaccagctgaatatcaccccgcctccggacgtcaacggtctgaaaaaggatccatccttaagtttgtacgccattcctgacggtgatgtgaaaggtcgcgtggtagcgattttacttaatgatgaagtgagatcggcagaccttctggccattctcaaggcgctgaaggccaaaggcgttcatgccaaactgctctactcccgaatgggtgaagtgactgcggatgacggtacggtgttgcctatagccgctacctttgccggtgcaccttcgctgacggtcgatgcggttattgtcccttgcggcaatatcgcggatatcgctgacaacggcgatgccaactactacctgatggaagcctacaaacaccttaaaccgattgcgctggcgggagacgcgcgcaagtttaaagcaacaatcaaggtcgctgaccagggtgaagaagggattgtggaagctgacagcgccgatggtagttttatggatgaactgttaacgctgatggcagcacaccgcatgtggtcacgcattcctaagattgacaaaattccggcgtaa

SEQ ID NO: 260531 - DNA, 264 bp, Klebsiella pneumoniae
atgcgtttagtgaagccagtaatgaagaaaccgctccgtcagcaaaaccgccagattattagctatatcccacgcacggaacccgcgccgccagaacatgcgataaagatggattcgtttcgtgatgtctggatgctgcgtggcaaatatgttgcgtttgtactgatgggagagtcatttctgcgctcaccggcatttactgtgcctgaatccgcccagcgttgggcaaatcagatccgccaggaaggggaagtgactgagtaa

SEQ ID NO: 260532 - DNA, 282 bp, Klebsiella pneumoniae
atgttaattaatataaggcatggggttgagcgtcttgcattcgtgattgctgctatctgcattattattggaattttaatgtctttaagttccatatcagatggttactggagtgatgcaaagattgggctttatttttcattgtatatttcaatgcttttcatttatggctctcaggtttttttgtgggtgttatatggatttgctggccaagaatttaagtttaaaataaatcccctttgtttattaaatataaccacttctaatcgtaataatgcttaa

SEQ ID NO: 260533 - DNA, 852 bp, Klebsiella pneumoniae
ttgaacaatatccccatatctactcaatggactttagacgctacgggtgaagttggacgctcatcagtaaattctgtttatatgattatatgtcctgcgacaggctcgaaaggatctggttttttaatagataatgggttaatagtaacgaacgagcatgttatcactggatgctctacaaatcagattttcgcaatttcagcttatggacagaagattccaatttctcaaaaatggatagattctgatcgcgatttagctgtgctgagacctgccattacccagactggtgggctaagtattgttaaggataatgatcttaaagttggtgaatcagtaacaacttggggatacccattaggatacaacggtcctgcaccgttactatccgttggttatctagcaggatttaactcataccaaaccgccaagggacaaaaaaaacatctagtggtaaatggggcatttaactcaggaaattctggtggagctcttttaaaagcttcagataataaagtaataggtattgtagtgagtaagcatgctcctatcagtcaataccatcaatcagctattgaagctttgtctgaaaatatgagtggcgtcacctataccgctactaatgacgctggagaaactaaaagttttgtagaatctcaaattgtagcagaattattgattcatatgagaagtctaactcaagttatgattggagaagcaattgcagcagaggaattactttcgatgcttagcgaaattgacttgagtccaccacaatctatgtcaagaaatgccttatgtcattgcgggagtggaaaacgcttcaaagaatgtcatggaaagatatcctag

SEQ ID NO: 260534 - DNA, 297 bp, Klebsiella pneumoniae
gtgcgtattattaaactcatgccaaaagccaatgaggatttagaaggcatctggtattacagctatcaccatttcggcgaaccacaagccgacagatatgtggaacatctttcagacgttctccagattctgagtaacaataatataggtacgcccagacctgaattaggcgaaggtatttttgttcttccttttgaacgccacgtcatttatttcctgcaatcaccaggggaaattatcgtcattcgtatccttaaccaaaaccaggacgccaccagacatttacactggagctaa

SEQ ID NO: 260535 - DNA, 333 bp, Klebsiella pneumoniae
atggctggttggtttgaactcagtaagagcagtgataatcagttccggtttgtgctaaaagcgggcaatggtgagactatcctcaccagcgagctgtatacctcaaaagcctctgcggaaaagggcatcgcgtcggtgcgtagcaacagcccgcaagaagaacgctatgagaaaaaaacggcaagtaacggcaaattctatttcaatctgaaagccgctaatcatcaaattatcggctccagccagatgtacgccaccgcgcaatctcgtgaaaccggaattgcctccgttaaagccaatggcacaagccagacggtgaaagacaatacgtaa

SEQ ID NO: 260536 - DNA, 1404 bp, Klebsiella pneumoniae
atgaagttctggcgacccggtattaccggcaaactgtttctggcgattttcgccacctgcattgtcttgctgatcagtatgcactgggcggtgcgtatcagttttgagcgtggctttattgattacatcaagcatggtaatgaacagcgattacaactgttaagtgatgcgcttggcgagcagtatgcgcagcatggcaactggcgcttcctgcgcaacaatgatcgctttgtctttcagatcctgcgttcatttgaacacgataattcggaagataaacccggcccgggtatgccaccgcacggctggcgtacccagttctgggtggttgatcaaaacaacaaagtgctggttggtccgcgagcgccgattccacctgacggtacacggcgacccattctggtcaacggtgcggaagttggcgcggtgatcgcctcccccgttgagcggttaacgcgcaatactgatatcaatttcgataaacaacagcggcaaaccagctggttgattgtcgctctggcaacgttactcgcggcgctcgccacctttctgctggcgcgcggtttactggcaccggtaaaacgacttgtcgatggcacgcacaaactggcggcgggcgatttcactacccgcgtaacgcccaccagtgaagatgaactgggcaaactggcgcaagacttcaaccagcttgccagcacactggagaaaaaccagcaaatgcggcgcgattttatggccgatatttctcacgaactgcgtacgccattagcggtgctgcgcggtgaactggaagccattcaggatggcgtgcgtaaattcacgccggagacggtggcgtctttacaggcggaggtcggtacactgaccaaactggttgacgatctccatcagttgtcgatgtctgatgaaggcgctctcgcctatcaaaaagcaccggtagatttgatcccactgctggaagtggcgggcggcgcatttcgcgaacgattcgccagtcgtggcctgaaactgcaattttccctgccagacagtattaccgtatttggcgatcgcgaccgtttaatgcagttattcaataacttactcgaaaacagcctgcgctacactgatagcggcggcagcctgaaaatctctgccgggcagcacgacaaaacggtgcgcctgacctttgccgacagtgcgccaggtgtcagtgacgagcagctacaaaaattatttgaacgtttttatcgcaccgaaggttcccgcaaccgcgccagcggtggttccgggctggggctggcgatttgcctgaacattgttgaagcacataatggccgcattattgctgcccattcgccttttggcggggtaagcattacagtagagttaccgctggaacgggatttacagagagaagtatga

SEQ ID NO: 260537 - DNA, 1416 bp, Klebsiella pneumoniae
atgacagatcttcccgacagcacccgctggcaattgtggattgtggctttcggcttctttatgcagtcgctggacaccaccatcgtaaacaccgcccttccctcaatggcgcaaagcctcggggaaagtccgttgcatatgcacatggtcattgtctcttatgtgctgaccgtggcggtgatgctgcccgccagcggctggctggcggacaaagtcggcgtgcgcaatattttctttaccgccatcgtgctgtttactctcggttcactgttttgcgcgctttccggcacgctgaacgaactgttgctggcacgcgcgttacagggcgttggcggcgcgatgatggtgccggtcggcagattgacggtgatgaaaatcgtaccgcgcgagcaatatatggcggcgatgacctttgtcacgttacccggtcaggtcggtccgctgctcggtccggcgctcggcggtctgctggtggagtacgcgtcgtggcactggatctttttgatcaacattccggtggggattatcggtgcgatcgccacattgatgttaatgccgaactataccatgcagacgcggcgcttcgatctctccggctttttattgctggcggttggcatggcggtattaaccctggcgctggacggcagtaaaggtacaggtttatcgccgctgacgattgctggcctggtcgcagttggcgtggtagcactggtgctttatctgctgcacgccagaaataacaaccgcgctcttttcagtctgaaactgttccgcactcgtaccttttcgctgggcctggcggggagctttgccggacgtattggcagtggcatgttgccctttatgacaccggttttcctgcaaattggcctcggtttctcaccgtttcatgccggactgatgatgatcccgatggtgcttggcagcatgggaatgaagcgaattgtggtacaggtggtgaatcgctttggttatcgtcgggtactggtagcgaccacgctgggtctgtcgctggtcaccctgttgtttatgactaccgccctgctgggctggtactacgttttgccgttcgtcctgtttttacaagggatggtcaactcgacgcgtttctcctccatgaacaccctgacgctgaaagatctcccggacaatctggcgagcagcggcaacagcctgctgtcgatgattatgcaattgtcgatgagtatcggcgtcactatcgccgggctgttgctgggactttttggttcacagcatgtcagcgtcgacagcggcaccacacaaaccgtctttatgtacacctggcttagcatggcgttgatcatcgcccttccggcgttcatctttgccagagtgccgaacgatacgcatcaaaatgtagctatttcgcggcgaaaaaggagcgcgcaatga

SEQ ID NO: 260538 - DNA, 3078 bp, Klebsiella pneumoniae
gtgaagttttttgccctcttcatttaccgtccggtggcgacgattttactgtcggttgccattaccctgtgcggcatactgggcttccgtatgctgccggtcgccccgctgccgcaggtcgattttccggtgattatggtcagcgcctcgctgcccggtgcgtcaccagaaacaatggcgtcttccgttgccacgccgctggagcgctcacttgggcgcattgccggagtcagtgaaatgacctccagcagttcgctcggcagcacgcgtattattttgcagtttgattttgaccgggatatcaacggcgcggcgcgcgatgtgcaggcggcgatcaacgctgcacaaagtttgctgcccagcgggatgcccagccgtccgacctatcgcaaagctaacccgtcggatgcgccaattatgatcctcacgctgacatccgatacttattcgcagggtgaactgtacgatttcgcctcgacgcagctggctccgacgatttcgcaaatcgacggtgttggtgatgtcgatgtcggcggcagctcactgcccgccgtacgcgtcgggctgaatccgcaggcgctgtttaatcagggcgtctcgctggacgacgtacgcactgccatcagcaatgccaacgtgcgtaaaccgcagggggcgctggaagatggcactcaccgctggcagatccagaccaatgatgagctaaaaaccgccgccgaatatcagccgctgattattcattacaacaacggcggcgcggttcgtctgggcgatgtggcgacagtgaccgactctgtacaggatgtacgtaacgccgggatgaccaatgccaaaccggctattttgctgatgatccgcaagctgccggaagccaatattatccagacggttgacagcatccgggcaaaattaccggagttgcaggaaaccattccggcggcgattgatctgcaaattgctcaggatcgctcccccaccattcgcgcctcgctggaagaagtcgagcaaacgctgattatctcggtggcgctggtgattctggtggtgtttttattcctgcgctcgggtcgcgcaactattattcccgccgttgcggtgccggtttcgctgattggtacgtttgcggcgatgtacctgtgcggtttcagtctcaataatctttcgttaatggcgctcaccatcgctactggtttcgtggtggatgacgccatcgtggtgctggaaaacattgcccgtcatctggaagcgggaatgaaaccgttgcaagccgcactgcaaggtactcgcgaagtcggttttacggtgctgtcgatgagtctgtcactggtggcggtgttcctgccgctgctgttgatgggcggattgccgggccgactgttacgcgaatttgccgtgacgctttctgtcgccattggtatttcgttgctggtttctctgacattaacgccaatgatgtgtggctggatgctgaaagccagcaagccgcgcgagcaaaagcgactgcgtggttttggtcgcatgttggtagccctgcaacaaggctacggcaagtcactgaaatgggtgctcaatcatacccgtctggtgggcgtggtgctgcttggcaccattgcgctgaatatctggctgtatatctcgatcccgaaaaccttcttcccggagcaggacactggcgtgttgatgggcgggattcaggcggatcagagtatttcgtttcaggcgatgcgcggtaagttgcaggatttcatgaaaattatccgtgacgatccggcagtggataatgtcaccggctttacaggcggttcgcgagtgaacagcgggatgatgtttatcaccctcaagccacgcgacgaacgcagcgaaacggcgcagcaaattatcgaccgtctgcgcgtaaaactggcgaaagaaccgggggcgaatctgttcctgatggcggtacaggatattcgcgttggtgggcgtcagtcgaacgccagctaccagtacacgttgttatccgacgacctggcggcactgcgcgaatgggagccgaaaatccgcaaaaaactggcgacgttgccggaactggcggacgtgaactccgatcagcaggataacggcgcggagatgaatctggtttacgaccgcgacaccatggcacggctgggaatcgacgtacaagccgccaacagtctgttaaataacgccttcggtcagcggcaaatctcgaccatttaccagccgatgaaccagtataaagtggtgatggaagtggatccgcgctatacccaggacatcagtgcgctggaaaaaatgttcgttatcaataacgaaggcaaagcgatcccgctgtcgtatttcgctaaatggcaaccggcgaatgccccactatcggtgaatcatcagggattatcggcggcctcgaccatttcgtttaacctgccgaccggaaaatcgctctcggacgccagtgcggcgatcgatcgcgcaatgacccagcttggggtgccttcgacggtgcgcggcagttttgccggcacggcgcaggtgttccaggagacgatgaactcgcaggtgatcctgattatcgccgccatcgccacggtgtatatcgtgctgggtatcctttacgagagttacgtacatccgctgacgattctctccaccctgccctcggcgggcgttggagcgctgttggcgctggagctgttcaatgccccgttcagcctaatcgccctgatagggatcatgctattaatcggcatcgtgaagaaaaacgccattatgatggtcgattttgcgcttgaagcccaacggcacggtaacctgacgccgcaggaagctattttccaggcctgtctgctgcgttttcgcccgattatgatgactaccctggcggcgctgtttggtgcgctgccgctggtattgtcgggcggcgacggctcggagctgcggcaacccctggggatcaccattgtcggcggactggtaatgagccagctccttacgctgtataccacgccggtggtgtatctctttttcgaccgtctgcggctgcgtttttcgcataaacctaaacaaacggtaaccgagtaa

SEQ ID NO: 260539 - DNA, 3123 bp, Klebsiella pneumoniae
atgcaggtgttacccccgagcagcacaggcggcccgtcgcgcctttttattatgcgtcctgtcgccaccacgctgctgatggtggcgatcttactcgccgggattatcggttatcgcgccctgcccgtttcggcgctgccggaagtggactatccgaccattcaggtggtcacgctctacccaggtgccagcccggatgtcatgacctctgccgttaccgcgccgctagaacgccagttcgggcagatgtctggcctgaaacagatgtcgtcgcaaagttccggcggtgcgtcagttatcactttgcagttccagctaacattaccgctcgatgtcgccgagcaggaagtgcaggccgcgattaacgctgcgaccaacttgttgccgagcgatctgcctaacccgccggtttacagcaaagtgaacccggcagatccgccgatcatgacgctcgccgtcacctcaaccgccatgccgatgacgcaagtggaagatatggtggaaacccgcgtcgcgcagaaaatctcgcagatttccggtgtcggactggtgacgctttccggcggtcagcgtccggctgttcgcgtcaaacttaacgctcaggcgattgccgccctcggcctgaccagcgaaaccgtgcgcaccgccattaccggcgctaacgttaactcggcaaaaggtagcctcgacggcccttcccgtgcggtcacgctttccgctaacgaccagatgcaatccgccgaagagtatcgccagctaatcatcgcctaccagaacggcgcaccgattcgtctgggcgatgtcgcaaccgtagagcaaggagcagaaaacagctggctcggcgcgtgggcgaacaaagaacaggccattgtgatgaatgttcagcgccagcccggtgctaacattatctccaccgccgacagcatccggcagatgctgccacagctcaccgagagtctgccgaaatcggtgaaggtgacagtgctttccgatcgcaccaccaatattcgcgcatccgtcgatgatactcagtttgaattgatgatggctatcgcgctggtagtcatgatcatctacctgtttttgcgcaatattccggcgaccatcattcccggtgttgctgtaccgctgtcgttaatcggcacttttgcggttatggtgtttctcgatttttcaatcaataacctgacactgatggcgttaactatcgccaccggattcgtggtcgatgacgccatcgtagtgatcgaaaacatttcccgctatatcgaaaaaggcgaaaaaccgttggcggcggcgctcaaaggcgcgggtgaaatcggctttaccattatctcgctgaccttctcgctgattgcggtgttgattccactgctgtttatgggcgatatcgtcgggcgactgttccgcgaatttgctattaccctggcggtagcgattttgatctcagcggtggtgtcgctgaccctgacaccgatgatgtgcgcgcggatgctcagccaggagtcgctgcgtaaacagaaccgattctcccgtgcctcggaaaaaatgttcgacaggataatcgccgcctatggtcgtggactggcgaaggtgctgaatcatccgtggctgaccttaagcgtggcgctcagcacgctgctgcttagcgttctcttatgggtgttcattccgaaaggtttcttcccggtacaggacaacggcattattcagggcactttgcaggcaccgcaatccagctcctttgccaatatggcccagcgacaacgccaggtcgcggacgtgattttgcaggatccggcagtgcaaagcctgacctcatttgttggcgttgatggcactaacccgtcgctgaatagtgcacgtttacaaatcaacctcaaaccgctggatgaacgtgatgaccgagtgcaaaaagtcattgcccgtctgcaaacggcggtggataaagtgccgggcgtcgatctcttcctgcaaccaacgcaggatctgactattgatactcaggtcagccgcacccagtaccagtttaccttgcaggccacctcactggatgcgctcagtacctgggtgccacagttgatggaaaaactccagcaactgccacagctttctgatgtctccagcgactggcaggacaaagggctggtggcgtatgtcaatgttgatcgcgacagcgccagccgtctggggatcagcatggcggatgtcgataacgccctgtacaacgcgtttggtcagcgactgatttccactatttatactcaggctaaccagtatcgcgtagtgctggagcacaacaccgaaattaccccgggcctcgcggcgctggataccattcgcctgaccagtagcgacggcggcgtggtgccgttaagctcaattgccaaagttgaacagcgttttgcgccgctttccatcaaccatctggatcagttcccggtaacgaccatctcctttaacgtgccggataactattcgctgggcgatgcggtgcaggcgattatggacaccgaaaagacgctgaatctgccggtggatatcaccacgcagttccagggcagcaccctcgccttccagtcggcgctgggcagcactgtctggctgattgtcgcggcggtggtggcgatgtatatcgtgctcggcattctgtacgagagctttattcacccgatcaccattctctcgacgctacccaccgcaggggttggcgcactgctggcgttgctgattgctggtagcgaactggatgtgattgcgattatcggcattattttgctgatcggtatcgtgaagaagaacgccatcatgatgatcgacttcgcgctggctgccgagcgcgagcaaggcatgtcgccgcgcgaggcaatctaccaggcttgtctgttgcgttttcgtccgatcctgatgaccactctggcggctctgcttggcgcgctgccgctgatgttgagtaccggggtcggcgcggaactgcgtcgtccgttaggtatcggcatggtcggcggcctgattgtcagccaggtgctgacgctgtttaccacgccggtgatttatctgctgttcgaccgcctggcattgtggaccaaaagtcgctttgctcgccatgaagaggaggcgtaa

SEQ ID NO: 260540 - DNA, 1368 bp, Klebsiella pneumoniae
atgtgcccgccattcagacgattcccgatagtgtttcataattcctccatttttctcccttattggctggctacactagtatcattccgcgaaacgtttcaggaagagaaactcttaacgatgaaaggcagttataaatcccgttgggtaatcgtaatcgtggtggttatcgccgccatcgccgcattctggttctggcaaggccgcaatgactcccagagtgcagccccaggggcgacgaaacaagcgcagcaatcgccagcgggtggtcgccgtggtatgcgttccggcccattagccccggttcaggcggcgaccgccgtagaacaggcagttccgcgttacctcatcgggcttggcaccattaccgccgctaatactgttacggtgcgcagccgcgtggacggtcaactgatggcgttacatttccaggaaggccagcaggtcaaagcaggcgatttactggcagaaattgaccccagccagttcaaagttgcattagcacaagcccagggccaactggcaaaagataaagccacgcttgctaacgcccgccgtgatctggcgcgttatcagcaactggcaaaaaccaatctcgtctcccgtcaggagctggatgcccaacaggcgctggtcagtgaaaccgaaggcaccattaaggctgatgaagcaagcgtcgccagcgcgcagctgcaactcgactggagccgcatcaccgcaccagtcgatggtcgcgttggtctcaagcaggttgatgttggtaaccaaatctccagtggtgataccaccggaattgtggtgatcacccagacgcatcctatcgatttagtctttaccctgccggaaagcgatatcgctactgtagtgcaggcgcaaaaagccggaaaaccgctggtggtagaagcctgggatcgcaccaattcgaagaaattaagtgaaggcacgctgttaagcctcgataaccaaatcgatgccacaaccggtacgattaaagtgaaagcacgctttaataatcaggatgatgcgctgtttcccaatcagtttgttaacgcgcgcatgttagtcgacaccgaacaaaacgccgtagtgatcccaacagccgccctgcaaatgggcaatgaaggccattttgtctgggtgctgaatagcgaaaacaaggtcagcaaacatctggtgacgccgggcattcaggacagtcagaaagtggtgatccgtgcaggtatttctgcgggcgatcgcgtggtgacagacggcattgatcgcctgaccgaaggggcgaaagtggaagtggtggaagcccagagcgccaccactccggaagagaaagccaccagccgcgaatacgcgaaaaaaggagcacgctcctga

SEQ ID NO: 260541 - DNA, 147 bp, Klebsiella pneumoniae
atgactaagagcaccacgatgatgagtagcttcatcatgaccctttccttatttaaggccccttcctcgggaggggctttcccgtttcagcgtcccgctgaaatcgtcggcttacctcctttcgccctgtatgtagtctatcgctaa

SEQ ID NO: 260542 - DNA, 660 bp, Klebsiella pneumoniae
atgagcgaacaaatcacgtttgccaccagcgattttgccagtaacccggaaccacgttgcccctgcattttgctgctggatgtttctggctcgatgagcggcagacctattaatgaacttaacgccggattggtgacctttcgtgatgaactgcttgccgatccgctggctttaaaaagagtggaactcggcattgtgacgttcggcccggtgcatgtggaacaaccctttaccagcgccgctaatttttttccgcccatcctgtttgcccagggcgatacaccaatgggtgcggccattaccaaagccctggatatggtagaggagcggaaacgtgagtatcgtgcaaatggtatttcgtattatcgcccgtggattttcctgattaccgatggtgcaccaaccgatgagtggcaggctgcagccaacaaagtgtttcggggggaagaagataaaaggtttgctttcttttccatcggtgttcagggggcggatatgaagacgctggcccaaatcagcgttcgtcagcctttgcctctgcaaggattacaattccgtgaactgtttagctggttatccagttcgctgcgttcggtttcccgctccacgccgggaacggaagttgtgctggaagcgccaaaaggctggacgtcagtgtga

SEQ ID NO: 260543 - DNA, 681 bp, Klebsiella pneumoniae
atgcaggttgcctggctaaatgaccagcagccattactggtgatgttccttgctgatggcgcaggtagcgtttcgcagggaggagaaggcgcgacgctcgccgtcaatgaagcgatggcttatatgtcgcaaaaagtgcagggtggggaattggggcttaatgatatcctcgccacggatattgtgctgaccgtttgtcagcgactttttgccgaggcggaagccaaagaattagcagttcgcgattttgcctgcacgtttctgggattgatttcatcgcctgacggcaccttgattatgcagattggcgatggcggcgtggtggtggattttggtcacggtctgcaattgccgcttacgccgatggtgggtgaatatgccaatatgacgcacttcattaccgatgaagatgccgtttccagactggaaactttcaccagcactgagcgtgtgcataaagttgcagcatttacggatggtatccagcgactggcgttaaatatgctggataattctcctcatgtacctttctttaccccgtttttcaatggactggcgtcagcaacgcaggaacaactcgatttattacctgaattgttaaagcagtttttgtccagcccggcggtaaacgagcgtacggatgatgataaaacgttggcactggcgctgtggttaccatga

SEQ ID NO: 260544 - DNA, 1941 bp, Klebsiella pneumoniae
atgaaacccactttatatactgctactggtgagtgcgttacgccaggccgtgaactgggcaaaggcggtgaaggcgcggtttatgatatcaatgagtttgtcgatagcgtcgccaagatttatcacacgccgccacccgccttaaaacaggacaaacttgcctttatggctgcgacagctgacgcgcaattgttgaattatgtcgcctggccgcaggcaacgcttcacggtggacgaggtggaaaaattatcggttttatgatgccaaaagtttctggtaaagaaccgattcatatgatctatagcccggcacatcgtcgccagagttaccctcattgtgcgtgggattttctactctatgttgcgcgcaatattgcttcatcttttgctacggttcacgagcacgggcacgtcgtgggtgacgtaaaccagaacagttttatggtaggtcgcgacagcaaagtggtgttgattgatagcgactcctttcagattaacgctaatggcacgttgcatttatgcgaagttggcgtgtcgcattttacgccgccagagctacaaaccctgtcgtcatttgtcggctttgaacgcacagaaaatcacgataattttggccttgcgttgctgatttttcacgtcttgtttggtgggcggcatccttattccggtgtgccgcttatctctgatgcggggaatgcgctggagacggatattgctcatttccgttatgcctacgcgtcagataatcagcggcgtggtttaaaaccgccgccacgatcgattccactgtcgatgttaccgggcgatgttgaagccatgtttcagcaggcattcacggaaagtggcgtggaaaccgggcgtccgacggcaaaagcgtgggtagcggcacttgatttactacgccaacagttaaagaaatgtaccgtttcggcaatgcatgtttaccccggtcatttgactgactgcccgtggtgtgcgctggataatcaaggcgttatctattttattgatctcggcgaagaggtcattaccaccagtggtgattttgtgctggcgaaagtctgggcgatggtgatggcgtcagtagcaccgccagcattgcaattgccattacccgatcatttccaaccgactggcaggccgcttcctttaggcctgttacggcgcgaatacatcattctgattgagatcgcactgtcagcgttatcgctgttgctttgcggccttcaggcagaaccgcgttatattattttggttcctgtgctggcggctatctggattattggcagtctgacaagcaaagcttataaagcagaaatccagcaacgccgtgaggcatttaatcgcgcgaaaatggactatgaccatttagtcagccagatccaacagttgggcgggctggaaggttttatcgccaaacggacgatgctcgaaaaaatgaaggacgaaatgctcgggttaccggaagaagaaaaacgcgctctggcagcacttcacgacactgcaagggaacggcagaagcagaagtttctggagggattttttattgatgttgcctctattcccggcgttggccctgcgcgtaaagcggcgttacggtcttttggtattgaaacagccgcagatgttacccgtcgtggcgttaagcaagtgaaagggtttggcgaccatctgacccaggcggttatcgactggaaagcgagttgtgaacgccgttttgtgttcaggccgaacgaagcggtaacgcctgcagacagacaagcggtactgactaaaatggccgccaaacgacatcggctggaatcgacgttgactgtcggcgcgacagagttgcagcgattccgccttcaagctccagcacggaccatgccgttgatggaaccgttacgtcaggcagcagaaaaactggcccaggcgcaggcagatttaagccgctgctga

SEQ ID NO: 260545 - DNA, 858 bp, Klebsiella pneumoniae
atgtataccctgaactggcagccgccgtatgactggtcgtggatgttgggatttctcgccgcccgtgcagtgagtggtgtggaaacggtcgctgaggattattatgcccgtagtctggcggtgggcgaatatcgcggcgtggtgactgctattccggatatagcccgccatactctgcacataaatttaagtgcaggtttagaacccgttgccgctgagtgtctggcgaaaatgagccgcctgtttgatctgcaatgtaacccgcagattgttaacggtgcgttgggcaagttaggcgcggcgcggcccggattgcgtttacccggctgtattgatgcttttgagcagggtgtgcgggcgattttaggccaactggtgagcgtggcgatggcggcaaaattgactgccaaagttgtacagctttatggcgaacggctggatgattttccggagtatatctgcttccccacgcctcagcggctggcagcagccgacccgcaggcattaaaagcgttaggcatgccgttgaaacgggcagaggcactgattcatctggcaaatgcggcgctggagggcagcttaccaatgacaattccgggcgatgtggagcaggcgatgaaaacgctgcaaacttttccgggtatcgggcgctggacggcgaattatttcgctttgcgtggctggcaggcgaaagatgtttttctgccggatgattatctgattaaacagcgatttccggggatgacaccggcacaaatccgccgttatgccgagcgctggaagccctggcgttcttatgcgctgttgcatatctggtatacggaaggctggcaaccagacggaacggacgaattgtag

SEQ ID NO: 260546 - DNA, 3318 bp, Klebsiella pneumoniae
atgagcaaacaatcacagcatgtattaattgccctgccccacccgctgcttcacctggtcagtttaggtttagtctcgtttatctttacccttttctcgcttgagctttcgcagtttggcacccaactcgccccactgtggttcccgacgtccatcatgatggtggcgttttatcgccatgccgggcgcatgtggccgggaattgcgctgagctgctcgctgggaaatatcgccgcatccatcctgcttttttccaccagctcgctgaacatgacctggacgaccatcaatattgttgaagccgtggtcggggcagtgctgctacgtaaattgctgccgtggtataaccccttgcaaaatctggctgactggctgcgtctggcattcggcagcgccattgttccgcctctgctagggggtgttctggttgtcctgctgacgcccggagacgatcctctcagggcatttttgatatgggtactgtcagaatccatcggcgctctggcactggtgccgctgggattgttatttaaaccacactatctgctgcgccatcgcaacccacggttgctttttgagtcgctgctcacgttagccatcacactgacgttaagctggctttcgatgctgtatctgccgtggccttttactttcattattgtgctgttgatgtggagcgccgtgcgcctgccacgaatggaagcctttttgatcttccttaccacggtgatgatggtgtcgctgatgatggccgcggatccctccctgcttgctacgccgcgtacatacctgatgagccatatgccgtggctaccgtttttgctgatcctgctgcccgccaacatcatgacgatggtgatgtatgcctttcgtgcggaacgcaaacacatttccgaaagcgaaacccgttttcggaacgccatggaatattccgctatcggtatggcgttagtgggcaccgagggacaatggctgcaaaccaacaaagcgctctgccagtttctcgggtacagtcaggaagagctgcgcggactcacctttcagcaactgacctggccggaggatctcaataaagatctccaacaggttgaaaagctgataagcggtgaaataaacacctattcaatggaaaaacgctactacaaccgcaatggcgatgttgtctgggcgttgcttgccgtctcactggtgcgccacacggatggcacgccgctctattttatcgctcagattgaagacattaacgagctaaaacgcaccgaacaggtgaatcagcaactgatggagcgcatcacgctggctaacgaagcgggcgggattggcatctgggagtgggagttgaagccgaatatttttagctgggataagcggatgttcgagctgtatgaaattcctccacatatcaaaccgaactggcaggtgtggtacgagtgcgtgctgccggaagatcgccagcatgccgaaaaagtgattcgtgattcgttgcaatcacgctcgccctttaaactggaatttcgcattaccgtaaaagacggtattcgccatatccgcgccctcgccaaccgggtactgaataaagaaggcgaagtcgaacgcctgctcggcattaatatggatatgactgaggttaaacagcttaacgaggcattgtttcaggaaaaagagcgcctgcacataacgctggactccatcggcgaagccgtggtctgtattgatatggcaatgaaaattacctttatgaatccagtggcggagaagatgagcggctggacgcaggaagaagcattaggtgttccgctcctgacggtgttgcatattacctttggcgacaatggtcccctgatggagaacatttacagtgccgacacctcacgttccgcgattgaacaagatgtggtgttgcactgccggagcggcggcagctacgacgtgcattacagtattacgccgttaagtactctggacggcagcaatattggttcggttctggtgattcaggacgttaccgaatcacgcaaaatgctgcgccagctgagctacagcgcctcccatgatgcactgacgcatctcgccaatcgcgccagttttgagaagcaactgcgtatgctgctgcaaacggtaaacagtacacatcagcgacatgccctggtgtttatcgatcttgatcgctttaaagcggtgaatgacagcgccgggcatgcggcgggcgacgctttgctgcgcgaactggcgtcgttgatgctgagtatgctgcgttccagcgacgtgctggcgcgactcggtggggatgaatttggtctgctgctaccagactgtaatgttgaaagcgcgcgttttatcgctacacgcattatcagtgccgtgaatgactatcactttatatgggaaggccgtgtgcatcgggtaggtgccagtgccgggattaccttgattgatgacaacaatcatcaggcggcagaagtgatgtcgcaggctgatatcgcctgttatgcctccaaaaatggtggacggggccgggtgacggtttacgaaccacagcaagctgccgcacatagcgaacgggcggcgatgtcgcttgatgaacagtggcggatgattaaagagaatcagttgatgatgatggcccacggtgtcgcttcgccgcggatcccggaagcgcgtaatttgtggctgatttcgcttaaactctggagttgcgaaggcgagattattgatgaacaaaaatttcgtcgtagcttcagcgatccggcacttagccatgctcttgaccgacgggtattccacgaatttttccagctggccgcaaaagcggttgccagtaaaggcataagcatcgccctccccctttccgttgccggtttgagtagcgccacgctggtgaatgatctgcttgagcagctggaaaatagccctctaccaccacggttattacatctgattattccggcagacgcgattttagatcacgcagaaagcgtgcaaaaactgcggctggcgggatgtcggatagtgctcagccaggtgggccgcgatctgcaaatcttcaactcgctgaaagcgaatatggcagattacctgctacttgatggtgagttatgcgccaacgtgcagggtaatttgatggatgagatgctgattacgattattcaggggcacgctcagcgactcgggatgaaaaccatcgccgggccagtcgttttacccttagtgatggatacgctttctggcatcggcgtcgatctgatttatggtgatgtgattgccgatgcccaaccgctggatttgctggtgaatagcagttatttcgcgattaactga

SEQ ID NO: 260547 - DNA, 1854 bp, Klebsiella pneumoniae
atgagacgatttctgacgacgctgatgatactcctggtcgtgctggtggccgggttatctgcgttagtgttgctggtgaatccgaatgatttccgcgactatatggtcaagcaagttgctgcacgtagcggttatcaattgcagctcgacgggccactgcgttggcacgtctggccgcagcttagtatcctctccgggcgaatgtctctcaccgcccagggcgcaagccagccactggttcgcgccgacaacatgcgtctggacgtggcgcttttaccactactgagtcatcaactgagcgttaagcaggtgatgctaaaaggggcagtgattcaactgacgccgcagacggaagcggtgcgcagtgaagacgctccggttgcaccgcgcgacaataccttgccggatctgtcagacgatcgcggatggtcgtttgatatatccagtcttaaggtggcggacagcgtgctggtgttccagcatgaagatgacgagcaggtgacaatccgcaatattcgcctgcaaatggaacaagatccccaacatcgtggttcatttgagttctccgggcgggttaatcgcgatcagcgcgatctcacgatatcccttaacggtacggtagatgcttctgattatccgcatgatttaacggcggctattgaacaaattaactggcagttgcagggtgcagatttaccaaaacaaggtattcaggggcaggggagtttccaggcccagtggcaggagtcacataaacgcctttcatttaaccaaatcagcttgaccgccaatgacagcacgctgagcgggcaagcacaggtcacgctgacagagaaacctgaatggcagctgagactgcaatttccgcaactgaatcttgacaacctcatcccgcttaatgaaacagcgaatggtgaaaacggtgccgcgcagcaggggcagagccaatcaacattgccgcgcccggtcatttcttcgcgtattgatgaaccggcatatcagggactgcaaggctttacggctgatattttgttgcaggccagtaacgtgcgctggcgcggaatgaattttacagatgttgccacgcaaatgaccaacaagtcgggtttgctggaaattactcaactgcagggcaagcttaacggtggacaggtttcactgccgggcacgctggacgcgacatcaataaatccgcggataaacttccagccacggctggaaaacgttgagattggtaccattctgaaggcgtttaactatccgatttcgttgaccggaaaaatgtcactggctggtgatttctccggtgctgacatagatgccgacgcattccgccacaactggcaaggacaggcacatgtcgaaatgaccgacacgcgcatggaagggatgaacttccagcagatgattcagcaagcggtagagcgtaatggcggtgatgtgaaggccgctgaaaactttgataacgtgacgcggcttgaccgctttaccaccgatttgacgttgaaggatggcgtcgtgacgttaaacgacatgcaaggtcaatcgcctgtgctggcgctgactggggaaggcatgttgaatctggcagatcaaacctgcgacacccagtttgatattcgggtcgtgggtggctggaacggggaaagcaaactgattgatttcctcaaagaaacgccagtaccgctgcgggtttatggcaactggcagcaactcaattacagtctgcaagtggatcagttactgcgcaaacatctacaggacgaagcgaaacgtcgcctgaatgactgggccgagcggaataaagattcccgcaatggcaaagatgtgaagaagttgctggagaagatgtag

SEQ ID NO: 260548 - DNA, 1140 bp, Klebsiella pneumoniae
atgatgaaatccaaaatgaaattgatgccattattggtgtcagtaaccttgataagcggttgcacagtacttccgggcagcaatatgtcgacgatgggcaaagacgtcatcaaacagcaggacgctgatttcgatctcgacaaaatggtgaatgtttatccgctgaccccgcgcctgattgaccaattacgcccacgcccgaatgtagcgcgccccaatatgacgctggaaagtgagatcgcgaattaccagtatcgcgtcgggccgggggacgttcttaatgtcaccgtctgggatcacccggaactcaccacgccagccggtcagtaccgcagctccagcgacaccggcaactgggtacagcctgacggcactatgttttacccgtatatcggcaaggtccacgtagtcgggaaaacgctcgctgaaatccgcagtgatattaccgggcgcttagcgacgtacatcgctgacccgcaggtggacgttaatatcgccgccttccgctcacaaaaggcctatatctccggtcaggtgaataaatccggtcaacaggcgatcaccaacgtgccactgactattctcgacgccatcaacgccgcaggtggcctgaccgacaccgctgactggcgcaacgtggtgctaacacacaatggtcgtgaagagcgcatttctttgcaggcgctgatgcaaaacggcgacctcaaccagaatcgcctgctttaccccggcgatattctctacgtgccacgtaatgatgatctgaaagtatttgtgatgggtgaagtgaagaaacagagcaccctgaaaatggactttagcggcatgaccctgactgaagccctgggcaatgctgaaggcatcgacatgaccacctccaacgccagcggcatctttgtcattcgtccgctgaaaggcgagggcgggcgtaacggcaagattgccaatatctaccagctggatatgtccgatgccacgtcgctggtgatggcgacagaattccgcctgcaaccttatgacgtggtgtatgtcaccaccgccccggtttcccgctggaaccgtctgatcaatcagttgctgccaactattagcggtgtccgttacatgacggatacagccagcgacattcataactggtaa

SEQ ID NO: 260549 - DNA, 444 bp, Klebsiella pneumoniae
atgtttaacaacatcttagttgtctgtgtcggcaatatttgccgttccccgacggcggaacgcttactgcaacgttatcacccggagctgaaagtggagtccgctggactcggcgcgctggtcggtaagggcgctgatcctaccgctatcagcgtcgccgcagaacatcaactgtctctggaaggtcactgtgcccgtcaaatcagccgccgtctgtgtcgcaactacgacctgattttgaccatggaaaagcgccatatcgaacgcttatgcgagatggcaccggagatgcgcggcaaagtgatgctgtttggtcactgggataacgaatgtgaaatccccgatccgtatcgcaaaagccgggaaacgtttgcagcggtgtacacattacttgaacggtctgcccgccagtgggcgcaggcattgaacgcagagcaggtataa

SEQ ID NO: 260550 - DNA, 2163 bp, Klebsiella pneumoniae
atgacagaaaaagtaaaacaacatgccgctccggtaacgggcagtgatgaaatcgatattggtcgcctggtcggcaccgtcattgaagcgcgctggtgggtgattggcatcaccaccgtattcgccctctgtgccgtggtttacaccttcttcgccacgccgatttatagtgccgacgcactggtacaaatcgagcaaaacagcggcaattcgttagtgcaggacattggttcggcattagccaacaaaccgcctgcatcggacgccgagatccagttgattcgttcgcgtctggtgcttggtaaaacggtggacgatctcgacctcgatattgcagtgagcaaaaacacgttcccgattttcggtgcgggctgggatcgcctgatgggacgtcagaacgagacggtgaaagtgaccacctttaaccgcccgaaagagatggcggatcaggtgtttacgcttaatgtgctggacaacaaaaactacaccctgagcagcgacggcggctttagcgcccgggggcaagcgggccagatgctgaaaaaagaaggcgtcacgctgatggttgaagccattcacgccagcccgggcagtgagtttaccgtcaccaaatactccacgctggggatgatcaaccaactgcaaaacagcctgacggtaacggagaacggcaaagacgctggcgttttgagcctgacttataccggtgaagatcgtgaacagatccgcgacattcttaacagcatcgcccgtaactatcaggaacaaaatattgagcgcaaatcggcggaagcgtcgaaaagcctcgccttcctcgcgcaacagttaccggaagtacgtagccgcttggatgttgccgaaaacaaactgaatgccttccgtcaggataaagattctgttgatctgccgctggaagcaaaagcggtgctcgattcgatggtgaacatcgatgcgcagttgaacgaactgacctttaaagaggcggaaatctccaagctgtacaccaaagttcacccggcgtaccgcacactgctggagaaacgtcaggcgctggaagacgaaaaagccaaacttaacggtcgcgtaacggcgatgccgaaaacccagcaggagattgtccgtctgacccgcgatgtcgagtctggtcagcaggtctatatgcaactgctgaataaagagcaggagctgaaaatcaccgaagccagcaccgtcggcgatgtgcgcattgtcgacccggcaatcacccagccaggtgtactgaaaccgaagaaagtgctgattatccttggggcgattatccttggcctgatgctctctatcgtgggtgtgctgctgcgctcgttgtttaatcgcggtatcgaaagcccgcaggtgctggaagaacacggtatcagcgtttatgccagcatcccgctgtcggagtggcagaaagcgcgcgatagcgtcaaaaccatcaaagggattaaacgctataaacagagccagctactggcggtggggaatccaaccgatctggcgattgaagccatccgtagtctgcgtaccagtctgcacttcgcgatgatgcaggcacagaacaatgtgttgatgatgaccggggttagcccgtcaatcggtaaaacctttgtctgcgccaacctggcggcggtgattagccagaccaataaacgggtgttgttgatcgactgcgatatgcgcaaaggctacacccacgagctgttgggcactaataacgttaatggcctgtcggaaattctgattggacagggcgatattactaccgctgctaaaccgacctctattgccaaatttgacctgatcccgcgcggtcaggtaccgccaaatccttctgaactgttaatgagcgaacgctttgccgaactggtgaagtgggcgagtaaaaactacgacctggtgttgattgatacgccgccgattctggcagtgaccgatgcggcaattgttggtcgtcatgtcggaaccacgttgatggtggcgcgttatgcggtcaacacattgaaagaagtggaaaccagtctgagccgctttgagcaaaacggtattccggtgaaaggggtgattctgaactccatcttccgccgcgccagcgcgtatcaggattatggctattacgaatacgaatataagtcggatgcgaaataa

SEQ ID NO: 260551 - DNA, 840 bp, Klebsiella pneumoniae
atgaaagacaatccgctgatttcaatctatatgccgacctggaaccgccaacaactggcgattcgggcgataaaatcggtcctgcgccaggactacaacaactgggagatgatcatcgtggatgattgctccacctcctgggaacaactacaacagtacgtcaccgccctcaacgatccgcgtatcacttacattcacaacgacattaacagcggggcgtgcgcggtacgtaaccaggcgattatgctggcgcaaggggaatacatcaccgggatcgatgacgatgatgaatggacacccaaccgcctgagcgtcttcctcgcccataaacagcaactggtcacacacgcctttttgtacgctaacgactacgtttgccagggcgaagtttattcccaaccggcaagcttgccgctgtatcccaaatcgccgtattcacgccgcctgttttacaaacgcaatatcattggcaatcaggtctttacctgggcgtggcgtttcaaagagtgcttgttcgataccgaactgaaagcggcacaggattacgacatcttcctgcggatggtggtggagtacggcgaaccgtggaaagtggaagaggcgacgcagatcctgcatatcaatcacggcgaaatgcagatcacctcgtcaccgaaaaaattctccggatacttccacttttaccgcaagcacaaagacaaattcgaccgcgccagcaaaaaatatcagctgtttaccctctaccagatccgcaataaacgcatgacctggcgcactttgctgacgctgctgtcggtgcgtaacggcaaacgtctggctgatggtattcgggggcgctaa

SEQ ID NO: 260552 - DNA, 489 bp, Klebsiella pneumoniae
atgctggaagatctgcgcgccaacagctggagtttacgcccgtgctgcatggttcttgcctatcgtgccgctcatttttgttcggtgtggcgcaaaaagaacgtcctcaacaatctttgggcggccccgctgctggtgctgtatcgcattatcaccgaatgctttttcggttatgaaatccaggccgccgcgaccataggccgacgctttactatccatcacggttacgccgtagtgatcaataaaaacgtggtcgcgggggatgatttcaccattcgtcacggcgtcactatcggcaatcgtggtgccgataacatggcatgtccacacattggcaacggcgtcgaactcggtgccaacgtcattattcttggtgatatcacgattggtaacaacgtcaccgtgggcgcgggcagcgtggtgctcgactctgtcccggacaacgcgctggtggtgggagaaaaagcgcgagtgaaggtaattaaatga

SEQ ID NO: 260553 - DNA, 1218 bp, Klebsiella pneumoniae
atgaatattctgcaatttaatgtgcgactggcggaaggcggggcagcaggtgtggcattagatctccaccagcgcgcgctgcaacaggggctggcgtcacattttgtctacggctacggcaaaggcggcaaagagagcgtcagccatcagaactatccgcaggtcatcaaacatacgccacggatgaccgcgatggcgaacattgcgttgtttcgtctgcttaatcgcgatctgttcggcaatttcaatgagttatatcgcaccattactcgcacaccgggcccggtggttctgcattttcatgtgctgcacagctactggttgaatcttaagagcgtggtgcgcttttgcgaaaaagtgaaaaaccataaaccggatgtcactctggtctggacgctacacgaccactggagcgttaccggacgctgcgcctttaccgacggttgcgaaggctggaaaacgggctgccagaaatgcccgaccttaaataactatccaccggtgaagattgatcgcgcgcaccagctggtggcgggtaaacgccagttattccgcgagatgctggcactgggctgtcagtttatttcccccagccagcatgtggctgatgctttcaatagtctgtacggtccagggcgttgccggattatcaataatggcattgatatggcaaccgaagcgattctggcggacttgcctccggtacgcgaaacccagggcaagccgaaaatcgcggtggtggcgcatgacctgcgttacgacggcaaaactaaccagcaactggtacgcgagatgatggcgctgggtgacaaaatcgaactgcatacctttggtaagttctcgccgttcaccgctggtaacgttgtcaatcacggctttgaaactgacaagcgcaagttaatgagcgtgctcaatcagatggatgcgctggtgttcagttctcgcgtcgataactacccgctgattttgtgtgaggcgttatcgattggcgtgccggtgatcgccacccatagcgatgcggcgcgggaagtgctgcaaaaatccggtggtaaaaccgtcagcgaagaagatgtgctgcaactggtgcagttaagcaaaccggaaatcgcacaggcgatatttggtaccacgctggctgaattcagccagcgcagccgcgccgcctacagtggacaacagatgctggaggagtatgtcaacttctatcagaatctgtag

SEQ ID NO: 260554 - DNA, 1218 bp, Klebsiella pneumoniae
atgtcaacttctatcagaatctgtagctacctgctgctgccgctgatctacctgctggttaacgtcaaaatcgcccagcttggcgaaagtttccccatcaccatcgtcacttttttacctgtcctgttactgctgtttttagagcgcatcagcgttaaaaaattgatgattgccttggggattggcgcgggacttacggcgtttaactacctgtttggtcagtcgctggatgccagtaaatacgtcacttcaaccatgctgtttgtctatattgtgatcattattggcatggtgtggagtattcgctttaaaacgatttcgccacacaaccatcgcaagatattacgtttcttttatctggtggtcgggctggtggtggtgctggcggcggtggagatggcgcaaattatcctcaccggcggtagcagtattatggagtcgatttcgaaatatctgatttacagcaacagctatgtgctgaatttcattaaattcggcggcaagcgcacgacagcactttatttcgaaccggcatttttcgctctggcattaatctcaatttggctcagcatcaaacagtttggtatcaaaacgcctaaaacagatgctatgattctcgcagggataatattatccggttcattttcaggggttatgacctttatccttttttatttgctggagtgggcatttcaatatctgaataaagaggcgattaagaaaaagttaccgttagcattgatttctctggctgtattcctggttggtgtggtaatcgcgttcccttatatttccacccgtctgggcgatttaggtacagaaggatcgtcatcgtattatcgtattgtcggtccgctggtgatggtcggttattctttaacccatattgacggtgtagtcagatttggctcactttatgaatatgtcgcatcattcggaatatttaacggtgcggatgtcggaaaaaccatagacaatggtttgtatctgctgattatttatttttcctggttcgcagtgtttttatcgctgtggtacatgggaaaagtgataaaaatgatgatcaacgcttttggtgataaccgcaattttcgcgtgcaattatatctttttactccggtatcgctgttttttaccggttcgatatttagcccggaatatgcatttttaatcgtctgtccgtttattttgcgaaaagcgttaaatattacgaggtaa

SEQ ID NO: 260555 - DNA, 747 bp, Klebsiella pneumoniae
atgttgcttagcataatcactgtcgcgtttcgtaacctcgaaggaatagtcaaaacacacgcctcgctggcgcatctggcgcaggcggacgatatcagcttcgaatggattgttgttgatggcggttccaacgacggcacccgtgagtatctggaaaatctcaatggtatctataacttacactttgtcagcgaaccagataacggtatctacgacgccatgaacaaaggtattgaaatggcgcaaggcaagttcgcgttgtttctcaactcgggcgatatttttcatcaggatgccgcatattttgtccgtaagttaaaagtgcaaaaagataacgtgatgatcaccggcgatgcgctgctggattttggcgacgggcataaaattaaacgtagcgccaaaccgggttggtatatttaccacagcctgcccgccagtcatcaggcgatatttttcccggtgtccggcttgaagaaatggcgttatgacctggagtataaagtttcttccgattacgcgctggcggccaaaatgtataaagccggttatgcatttaaaaaactcaatggcctggtgtctgaattttctatgggtggggtatctaccaccaataatatggaattgtgtgctgacgccaaaaaagtccaacggcaaatattgcacgtgcctggcttttgggctgaattatcctggcatttacgccaacgtacgacctcaaagacgaaagccttatataacaaaagctga

SEQ ID NO: 260556 - DNA, 549 bp, Klebsiella pneumoniae
atgcaggatttaagtggattctcggtgccgaaagggttccggggtggcaacgctattaaagtgcaattgtggtgggcagtacaggcaacaatatttgcctggtcgccacaagtattgtatcgctggcgggcatttttattacgtttattcggcgcaaaaataggaaaaaacgtagtcattcgtccgtcagtaaaaattacctatccgtggaaattaacgttaggtgattacgcgtgggtcggcgatgaggtcaatttatataccctcggtgaaataaccattggcgcacattcggtgatatcgcaaaaaagttatttatgcactggtagccacgaccatgcaagtcaacatttcaccattaacgccacgcctattgtgattggcgagaaatgctggctggcaaccgatgtctttgttgcccctggcgtcacgatcggcgacggcaccgtcgtgggtgcgcgaagcagtgtttttaaatcgcttccggcaaatgtggtttgtcgggggcaccccgcagtggtgatacgcaaacgcgttgaaactgaataa

SEQ ID NO: 260557 - DNA, 966 bp, Klebsiella pneumoniae
atgagtaaacaacgcatttttattgctggccatcgcgggatggtcggttccgccatcaggcggcagctcgaacagcgcggtgatgtggagctggtattacgcacccgcgatgaactgaacctgctggacagccgcgcggtgcatgatttctttgccagcgaaagcattgaccaggtctatctggcggcggcgaaagtgggtggtattgttgccaacaacacgtatccggcagatttcatctaccagaacatgatgattgagagcaacatcattcacgccgcgcatcagaacgacgtgaacaaactgctgtttctcggatcgtcctgcatctacccgaaactggcaaaacagccgatggcagaaagcgagttgttgcagggcacgctggagccgaccaacgagccttacgccattgccaaaatcgccgggatcaaactgtgtgaatcttacaatcgccagtacggacgggattaccgctcagtcatgccaaccaacctgtacgggccacacgacaacttccacccgagtaattcgcatgtgatcccagcattgctgcgtcgcttccatgaggcgacggcacagaatgcgccggacgtggtggtgtggggcagcggtacgccgatgcgcgaatttctacacgttgatgatatggcagcggcgagcattcatgtcatggagctggcacacgaagtctggcaggagaacacccagccgatgctgtcgcacattaacgtcggcacgggcgttgactgcactatccgtgagctggcgcaaaccatcgccaaagtggtgggttacaaaggtcgggtggtttttgatgccagcaaaccggatggcacgccgcgcaaactgctggatgtgacgcggctgcatcagcttggctggtatcacgaaatctcactggaagcggggcttgccagcacttaccagtggttccttgagaatcaagaccgctttcgggggtaa

SEQ ID NO: 260558 - DNA, 483 bp, Klebsiella pneumoniae
atgatgtttttacgtcaggaagactttgccacggtagtgcgctccactccgcttgtctctctcgactttattgtcgagaacagtcgcggcgagtttctgcttggcaaaagaaccaaccgcccggcgcagggttactggtttgtgccgggagggcgcgtgcagaaagacgaaacgctggaagccgcatttgagcggctgacgatggcggaactggggttgcgtctgccgataacagcaggccagttttacggtgtctggcagcacttttatgacgataacttctccggctcggattttaccactcactatgtggtgctcggttttcgcttcagagtagcggaggaagagctgttactgccggatgagcagcatgacgattaccgctggctgacgccggacgcgttgctcgccagtgacaatgttcacgctaacagccgcgcctattttctcgctgagaagcgtgccggagtacccggattatga

SEQ ID NO: 260559 - DNA, 1224 bp, Klebsiella pneumoniae
atgaaaatactggtctacggcattaactactcgccggagttaaccggcatcggcaaatacaccggcgagatggtggaatggctggcggcacaaggtcatgaggtgcgggtcattaccgcgccgccttactacccgcagtggcaggtgggcgagaactattccgcctggcggtacaaacgggaagagggggccgccatggtgtggcgctgcccgctgtacgtgccaaaacagccgagcactctgaaacgcctgttgcatctcggcagttttgccgtcagcagtttctttccactgatggcgcaacgtcgctggaagccggatcgcattatcggcgtagtgccaacgctgttttgcacgccgggaatgcgcctgctggcgaaactctctggtgcgcgtaccgtgctgcatattcaggattacgaagtggacgccatgctggggctgggccttgccggaaaaggcaaaggcggcaaagtggcacagctggcgacggcgttcgaacgtagcggactgcataacgtcgataacgtctccacgatttcgcgttcgatgatgaataaagccatcgaaaaaggcgtggcggcggaaaacgtcattttcttcccaaactggtcggaaatcgcccgttttcagcatgtcgcagacgccgatgttgatgcccttcgtaaccagcttggcctgccggataacaaaaaaatcattctttactccggcaatattggtgaaaagcaggggctggaaaacgttattgaagctgccgatcgcctgcgcgatgaaccgcttatttttgccattgtcgggcagggcggcggcaaagcgcggctggaaaaaatggcgcagcagcgtggactgcgcaacatgcaattttttccgctgcaatcgtatgacgctttacccgcactgctgaagatgggggattgccatctggtggtgcaaaaacgcggcgcggcagatgccgtattgccgtcgaaactgaccaatattctggcggtaggcggtaacgcggtgattaccgcagaagcccacaccgaactggggcagctttgcgaaacctttccgggcattgcggtttgcgtggaaccggaatcggtcgaggcgctggtggcggggattcgtcaggcgctcctgctgcccaaacacaacacggtggcacgtgaatatgccgaacgcacgctcgataaagagaacgtgttacgtcaatttataaatgatattcggggataa

SEQ ID NO: 260560 - DNA, 1437 bp, Klebsiella pneumoniae
atggcgcagtcgaaactctatccagttgtgatggcaggtggctccggtagccgcttatggccgctttcccgcgtactttaccccaagcagtttttatgcctgaaaggcgatctcaccatgctgcaaaccaccatctgccgcctgaacggcgtggagtgcgaaagcccggtggtgatttgcaatgagcagcaccgctttattgtcgcggaacagctgcgtcaactaaataaactcaccgagaacattattctcgaaccggcggggcgtaacaccgcacctgccattgcgctggcggcgctggcggcaaaacgtcatagcccggagaacgacccattaatgctggtgctggcggcggatcatgtgattgccgatgaagacgcgttccgtgccgccgtgcgtaatgccatgccgtatgccgaagcgggcaagctggtgaccttcggcattgtgccggatctacctgaaaccggatatggctatattcgtcgcggtgaagtgtcggcgggtgagcaggatacggtggcctttgaagtggcgcagtttgtcgaaaaaccgaatctggaaaccgcgcaggcctatgtggcaagtggcgaatattactggaacagcggtatgttcctgttccgtgccggacgttatctcgaagaactgaaaaagtatcgtccggatattctcgatgcctgtgaaaaagcgatgagcgccgtcgatccggatctcgattttattcgtgtggatgaagaggcgtttctcgcctgtccggaagagtcggtagattacgcggtcatggaacgcacggcagatgccgttgtggtgccgatggatgcgggctggagtgatgtcggttcctggtcctctttatgggagatcagtgcccacaccgccgagggcaacgtttgccatggcgatgtgattaatcacaaaactgaaaacagctatgtgtatgccgaatctggcctggtcaccaccgtcggggtgaaagatttggtggtagtgcagaccaaagatgcagtgctgattgctgaccgtaacgcggtgcaggatgtgaaaaaagtggtcgagcagatcaaagctgatggtcgccatgagcatcgggtgcatcgcgaagtgtatcgtccgtggggcaaatatgactctatcgacgcgggcgaccgctaccaggtgaaacgcatcaccgtgaaaccgggcgaagggttgtcggtacagatgcatcatcaccgcgcggaacactgggtggttgtcgcgggaacggcaaaagtcactatcgacggtgatatcaaactgcttggtgaaaacgagtccatttatattccgctgggggcgacgcattgcctggaaaacccggggaaaattccgctcgatttaattgaagtgcgctccggctcttatctcgaagaggatgatgtggtgcgcttcgcggatcgctacggacgggtgtaa

SEQ ID NO: 260561 - DNA, 1395 bp, Klebsiella pneumoniae
atgacaaatctaaaaaagcgcgagcgagcgaaaaccaatgcatcgttaatctctatggtgcaacgcttttcagatatcaccatcatgtttgccgggctatggctggtttgcgaagtgagcggactgtcattcctctacatgcacctgttggtggcgctgattacgctggtggtgttccagatgctgggcggcatcaccgatttttatcgctcatggcgcggtgttcgggcagcgacagaatttgccctgttgctacaaaactggacgttaagcgtgattttcagcgccggactggtggcgttcaacaatgatttcgacacgcaattgaaaatctggctggcgtggtatgggctgaccagcatcggactggtggtttgccgttcatgtattcgtattggggcgggctggctgcgtaatcatggctataacaagcgcatggtcgcggtggcgggggatttagccgccggacaaatgctgatggagagcttccgtaatcagccgtggttagggtttgaagtggtgggcgtttaccacgacccgaaaccgggtggcgtttctaacgactgggcgggtaatctgcaacagctggtcgaggatgcgaaagcgggcaagattcataacgtctatatcgcgatgcagatgtgcgacggcgcgcgagtgaaaaaactggtccatcaactggcggacaccacctgttcggtgctgctgatccccgatgtctttaccttcaacattctccattcccgtatcgaagagatgaacggcgtaccggtggtgccgctgtatgacacgccgctttccggggttaaccgcctgataaaacgtgcggaagatattgtgctggcgacgcttatcctgctgctgatctccccggtgctgtgctgcattgcgctggcggtgaaactgagctcaccggggccggttattttccgccagactcgctacggcatggatggcaagccgatcaaagtgtggaagttccgttccatgaaagtgatggagaacgacaaagtggtgacccaggcgacgcagaacgatccgcgcgtcaccaaagtggggaactttctgcgccgcacctcgctggacgaattgccgcagtttatcaatgtgctgactggcgggatgtcgattgtcggtccgcgtccgcacgcggtggcgcataacgaacagtatcgccagctcattgaaggctacatgctgcgccataaagtgaaaccgggcattaccggctgggcgcagattaacggctggcgcggcgaaaccgacacgctggagaaaatggaaaaacgcgtcgagttcgaccttgagtacatccgcgaatggagcgtctggttcgatatcaaaatcgttttcctgacggtattcaagggcttcgttaacaaagcggcatattga

SEQ ID NO: 260562 - DNA, 1479 bp, Klebsiella pneumoniae
atgagcttacgtgaaaaaaccatcagcggcgcgaagtggtcggcgattgccacggtgatcatcatcggcctcggtctggtgcaaatgactgtgctggcgcggattatagataaccaccagttcggtttgcttaccgtgtcgctggtgatcatcgcgctggcagatacgctttctgacttcggtatcgctaactccattattcagcgaaaagaaatcagccaccttgaactcaccacgctgtactggctgaacgtcgggctggggatcgtggtgtgcgtggcggtgtttttgttgagtgatctcatcggcgacttgctgaataacccggacctggcaccgttgattaaaacattgtcgctggcgtttgtggtgatcccccacgggcaacagttccgcgcgttgatgcaaaaggagctggagttcaacaaaatcggcatgatcgaaaccagcgcggtgctggcgggctttacttttacggtggttagcgcccatttctggccgctggcgatgaccgcgattctcggttatctggtcaatagtgcggtgagaacgctgctgtttggctactttggccgcaaaatttatcgccccggtctgcatttctcgctggcgtcggtggcaccgaacttacgctttggtgcctggctgacggcggacagcatcatcaactatctcaacactaacctttcaacgctggtgctggcgcgtattctcggcgcgggcgtggctgggggatacaacctggcgtacaacgtggccgttgtgccaccgatgaagctgaacccgatcatcacccgcgtgttgtttccggcgttcgccaaaattcaggacgatacagaaaagctgcgcgtcaacttctacaagctgctgtcggtggtggggattatcaactttccggcgctgctggggctaatggtggtgtcgaataactttgtaccgctggtatttggcgaaaagtggagcagcattattccggtgctgcaattgctgtgtattgtggggctactgcgctccgtgggtaacccgattggttcgctgctgatggcgaaagcgcgggtcgatatcagctttaaattcaacgtattcaaaacctttctgtttattccggcaatcatcattggtgggcagatggcgggcgcaatcggcgtcacgcttggcttcctgctggtgcagattatcaacaccattctgagctatttcgtgatgattaaaccggtgctcggttccagttatcgccagtacatcctgagtttgtggctgccgttttatctctcgctgccgacgctggtggtcagttatgcgctgggcattgtgctgaaagggcaactggcgctggggatgctgctggcggtgcaaatagccacgggcgtgctggcgtttgtggtgatgattgtgctgtcgcgccatccgctggtggtggaagtgaagcgtcagttttgtcgcagcgaaaaaatgaaaatgcttttacgggcggggtga

SEQ ID NO: 260563 - DNA, 1281 bp, Klebsiella pneumoniae
atgaaattacttattctgggcaaccacacttgcggcaatcgcggcgacagcgccatcctgcgcggcttacttgatgccatcaatatcctcaatccacatgccgaagtggacgtgatgagtcgctatccggtcagttcttcctggctgctcaaccgcccggtaatgggcgatccgctgttcctgcaaatgaaacaacacaacagtgcagcgggcgttgtcgggcgcgttaaaaaagtcctccgtcgccgttaccaacatcaggtactgctctcacgcgtcaccgacactggcaagttgcgtaatatcgccatcgcccagggattcactgacttcgtgcgcctgctgtcaggttacgacgccattattcaggtcggcggatcgttttttgtcgatctctatggcgtgccgcagtttgaacatgcgctttgcacgtttatggcgaaaaagccgctgtttatgattggtcacagcgtcggcccgttccaggataagcaatttaaccaactggcgaactacgtttttggtcactgcgacgcgctgatcctgcgcgaatcggtcagccttgatttgatgaaacgcagcaatatcactaccgcaaaagttgaacatggcgtcgataccgcgtggctggtcgatcaccacacagaagacttcaccgccagctatgctgttcaacactggctggacgttgccgcacaacagaaagcggtggccattaccctgcgtgaactggcaccgttcgacaaacgcctcggcaccactcaacaagcgtatgaaaaagcctttgccggggtggtcaatcgcattctcgacgaaggctatcaggtgattgcgctctccacctgtacgggcatcgacagctataacaaagacgaccgcatggtggcgctcaatctgcgccagcacatcagcgatcctgcccgttaccacgtggtgatggatgaactcaacgatctggaaatgggcaaaattctgggggcctgtgaactcaccgtcggtacgcgcctgcactccgccattatctcaatgaactttgccaccccggcgattgccatcaactatgaacataaatccgccgggatcatgcagcagctgggactaccggagatggcgattgatatccgtcatttattagacggcagcctgcaagcgatggttgcggataccttaggccaacttccggcgctgaacgcacgacttaacgaagccgtcagtcgcgaacgtcagacaggaatgcagatggtgcagtctgtgcttgagcgcatcggggaggtgaaatga

SEQ ID NO: 260564 - DNA, 1221 bp, Klebsiella pneumoniae
atgaaggtcggcttctttttattgaaatttccgctgtcgtcggaaaccttcgtcctcaaccaaatcactgcgtttattgatatgggctttgaggtggagattgtcgcgttgcaaaaaggcgacacacaaaacacccacgcggcatggacgaaatacaaccttgccgccagaacccgctggttacaggacgaacctacgggcaaagtggcgaagctgcgccaccgagccagccagaccttacgcggcattcatcgtaaaaatacctggcaggcgctcaacctcaaacgctatggcgcagagtcgcggaacctgattttgtctgccatttgtggtcaggtcgcaacatcgttacatgccgatgtctttatcgcacattttggccctgcgggggtaaccgcagcaaaactccgcgaactgggtgtcattcgcggcaaaattgccactatcttccacggcattgatatctccagtcgggaggtgctcaaccattacactcccgaatatcagcaactgtttcgccgtggcgacctgatgctaccaataagcgatctgtgggccggaaggctgcaaaaaatgggctgcccgagggaaaaaatcgccgtatcgcgcatgggcgtggacatgacgcgctttagcccgcgtccggtgaaagcgcctgcaacgccgctggaaatcatttccgtcgcacgcttaaccgagaaaaaaggcctgcatgtggcgattgaagcctgccgtcagttgaaagagcagggcgtggcatttcgctatcgcatcctcggcattggcccgtgggaacgacgcctgcgcaccctcatcgaacaatatcaactggaagatgtggtggagatgccgggctttaaaccgagccatgaagtgaaagagatgctcgatgacgcggatgtcttcctgttgccatcggttacgggtgcggatggcgatatggaaggtattccggtggcgctaatggaagcgatggcggtcggtattccggtggtttctactctgcatagcggaattcctgaactggtggaggctgacaaatccggctggctggtgcctgagaacgatgctcgcgcactggcgcaacgactggcggcgtttagccaactggacagcgacgaactggctcctgtcgtcaaacgtgctcgcgaaaaagtcgaacacgattttaaccagcaggtgatcaatcgagaactcgccagcttgctgcaggctttatag

SEQ ID NO: 260565 - DNA, 1395 bp, Klebsiella pneumoniae
atgccatttaaaaaactctcccgacgcaccttcctgacggcaagttctgtgcttgccttcctccatacgcctttcgcccgcgcacttcccgctcaacaaagcgttaacattaacgactacaaccctcacgactggatcgcctcatttaaacaagccttcagcgaagggcaaacggtcgtcgtgcccgccggattggtttgtgacaatatcaacaccggcatcttcattcctcctggcaaaacgttacacatccttggaagcctgcgcggcaacggcaaagggcgatttgtcttacaggacggcagccaggtgacaggggaggggggcggcagtatgcataacatcaccctggatgtgcgcggctctgactgcaccatcaaagggctggcgatgagcggctttggtccggtaacgcagatttatatcggcggcaaaaacaaacgggtcatgcacaacctgaccatcgataacctgaccgttagccacgctaattacgccatcttacgccagggatttcataaccagataatcggtgccaacatcaccaactgtaagttcagcgacttacagggcgacgctattgaatggaacgtggcgattaacgacagtgatattttgatatccgaccatgtcatcgagcgcatcaactgtactaatggcaaaatcaactggggcattggcataggccttgcgggaagcacttatgataataattacccagaagatcaggcagtgaaaaactttgtcgtggcgaatatcacgggatcggattgtcggcaactgatccatgttgaaaatggtaaacattttgttatccgtaatatcaaagctcgtaatatcacgccggatttcagtaagaaagcaggtattgataacgccacagttgctatttatggttgtgacaactttgtgattgataatattgaaatgattaatagtgccgggatgttaatcggctatggggtaattaaaggcaaatatctctcgataccgcagaatttccgagtgaatgatattcaattggataatactcatcttgcttataaattgcgcggcatccaaatctccgccgggaatgctgtctcctttgtggcgctgactaacattgagatgaagcgtgcgtcgctggagttacacaacaaaccgcaacatctttttatgcgtaatatcaatgtgatgcaggaatcctcagttggaccagcattgagcatgaactttgacatgcgcaaagacgttcgaggcgtgtttatggcgaaaaaagaaacactgctgtctcttgcaaatgttcatgcggtgaatgaaaaagggcaaagctccgtcgatatcgacaggattaatcaccatattgttaatgtggaaaagattaactttagattgccggaacggagagagtag

SEQ ID NO: 260566 - DNA, 855 bp, Klebsiella pneumoniae
atgcacctggcagctgaaagccatgttgaccgttcaattacaggccctgcggcatttattgaaaccaatattgtgggtacttatgtccttttagaagcggctcggaattattggtctggtctggatgatgaaaagaaaaaaaacttccgttttcatcatatttctactgatgaggtgtatggtgacttaccccatccggatgaagtaaatagcaatgaaacgttgccgctatttacggaaacgacagcatacgcgccaagtagtccatattctgcttctaaagcttccagcgatcatttggttcgcgcatggaaacgtacttatggtttaccgaccattgtgactaattgctcgaacaactatggtccttatcatttcccggaaaagcttattccactggttattcttaattcactggaaggtaaggcattacctatttatggcaaaggagatcagatccgcgactggttgtatgtagaggatcatgctcgagcgttatataccgtcgtaaccgaaggtaaagcgggcgaaacttataacattggtggacacaacgaaaagaaaaacatcgacgtagtgttcactatttgtgatttgttggatgagatagtcccgaaagagaaatcttaccgcgagcaaattacttatgttaccgatcgtccgggacacgatcgccgttatgcgattgatgctgagaagattggtcgcgaattgggatggaaaccacaggaaacgtttgagagtgggattcgtaaaacggtggaatggtacctgtccaatacaaaatgggttgataatgtgaaaagtggtgcctatcaatcgtggattgaacagaactatgagggccgccagtaa

SEQ ID NO: 260567 - DNA, 900 bp, Klebsiella pneumoniae
atgaatatcctcctttttggcaaaacagggcaggtaggttgggaactacagcgtgctctggcacctctgggtaatttgattgctcttgatgttcactccactgattactgtggtgattttagtaatcctgaaggtgtagctgaaaccgtaagaagcattcggcctgatattattgtcaacgcagccgctcacaccgcagtagacaaagcagaatcagaaccgaagtttgcacaattactgaacgcgacgagtgtcgaagcgatcgcgaaagcagccaatgaagtcggcgcctgggttattcactactctactgactacgtatttccggggaccggtgaaataccatggcaggaggaggatgcaaccgcaccgctaaatgtttacggtgaaaccaagttagcgggagaaaaagcattacaagagcattgtgcgaagcaccttattttccggaccagctgggtctatgcaggtaaaggaaataacttcgccaaaacaatgttgcgtctggcaaaagagcgtgaagaattagccgttattaatgatcagtttggtgcgccaactggcgcagagttactggctgattgtacggcacatgctattcgtgtggcactgaataaaccggaagtcgcaggcttgtaccatctggtagctagtggtaccacaacgtggcacgattatgctgcgctggtttttgaagaggcgcgcaaagcaggcattccccttgcactcaacaagctcaacgcagtaccaacaacagcctatcctacaccagctcgtcgtccacataactctcgccttaatacagaaaaatttcagcagaactttgcgcttgtcttgcctgactggcaggttggcgtgaaacgaatgcttaacgaattatttacgactacagcaatttaa

SEQ ID NO: 260568 - DNA, 879 bp, Klebsiella pneumoniae; identical to SEQ ID NO: 20551

SEQ ID NO: 260569 - DNA, 543 bp, Klebsiella pneumoniae
atgaacgtaattaaaactgaaattcctgatgtgctgatttttgaaccaaaagtttttggggatgaacgtggcttcttttttgagagttttaatcagaggatttttgaagaagcagtaggtcgtaaggttgagtttgttcaggataaccattctaagtccagtaaaggtgttttacgtggtcttcattatcagttagaaccttatgctcaaggaaaactggtgcgctgtgttgttggcgaggtttttgatgttgcggttgatattcgtaaatcgtcacctacatttgggaaatgggttggggtgaatttgtctgctgagaataagcgtcagttgtggattcctgagggatttgcacatggttttttggtgctgagtgatttagcagaagttttatataaaacgaatcaatattatgctccatcacatgaaaaaaatattatatggaatgacctcttgcttaatattaaatggccgagcacagcactgatcactctgtctgataaggatgcaaatggggaaagatttgaactaagtgagttttga

SEQ ID NO: 260570 - DNA, 261 bp, Klebsiella pneumoniae
atgtctgtagcccgtaatctctggcgcgttgccgatgcgccgcacattgttccggctgactccgttgagcgccagacggtacaacggttgattaacgcttgtccggctggtcttttttcgctcacaccggaaggtgacttacgcgttgattatcgcggctgcctggagtgtggcacctgccgtttgctgtgcgacgaatcaacactacaacagtggcgctatccgccttccggattcggcatcacctaccgctttggataa

SEQ ID NO: 260571 - DNA, 1272 bp, Klebsiella pneumoniae
atggaagacaactgcgacattattattattggtgccggtatagcaggtaccgcttgtgctttacgctgcgcgcgggcaggtttgtccgttctgttactggaacgcgctgaaatccccggcagcaaaaatctttccggcgggcgtttatacacccatgcgctcgcggaactcctcccgcaatttcatctgaccgcgcctcttgaacgacgcatcactcacgaaagcctttctctgctaacgccggatggcgcaacgacgttttccagcttacagcccggcggtgaatcctggagtgtattacgtgcacggttcgatccgtggctggttgccgaagccgaaaaagaaggtgtcgaatgcatccccggtgcgacggtggatgcgctgtatgaagaaaacggcagggtgtgtggtgtcatttgtggtgacgatattctccgcgcccgttatgtggtgctggcagaaggtgccaacagcgtcctggctgaacgtcacgggttagtgactcgtcctgctggcgaagcgatggcgttggggatcaaagaagtgctgtcgctggaaacatccgctattgaagaacgttttcatctggagaataacgaaggcgcagcgttgctgttcagcggcgggatctgtgatgacttacccggcggcgcatttctttatactaatcaacaaacgctctcgttagggattgtttgcccgctctcttcccttacgcaaagtcgtgttccggcaagcgagctgctggctcgctttaaaacgcatccggcagtgcgcccgcttatcaaaaacacggaatcactggagtatggtgcgcatctggtgccagaaggtggcttgcacagtatgccggtgcaatacgccggtaacggctggctgctgctgggcgatgcgttgcgcagttgcgtcaataccggaatttccgtgcgcggcatggatatggcgctaactggcgcgcaggcggcggcacaaacgctgataagcgcctgccagcaccgcgagccgcaaaatctgtttccgctttatcatcacaacgtcgagcgcagcctgctatgggatgttctacaacgttatcagcatgttccggcgcttttgcaacgccctggctggtaccgtgcgtggcctgcgttaatgcaggatatttcccgcgatttatgggatcagggtgataaacctgttccaccgctgcgccagttattctggcgtcatttacgtcgtcacggcctgtggcatctggcgggcgatgttatcaggagtctgcgatgtctgtag

SEQ ID NO: 260572 - DNA, 153 bp, Klebsiella pneumoniae
atgctgacaaaatatgcccttgtggcaatcatcgtactgtgttgtacagtactgggattcacgctgatggtaggcgactcgttgtgtgagttgagtatcagagaacgtggtatggagtttaaggcagttctcgcttacgaatcgaagaagtag

SEQ ID NO: 260573 - DNA, 2700 bp, Klebsiella pneumoniae
atgcgtaaatatcctttaagtttactgaaggataaaaatattgtgactttttttgatttctggggaaaaacccgacgcggcgagaaagacgggggcgacgactatcaccttctttgctggcattcgctggatgtagccgcgatgggctatttaatggttaaaagcaattgcttcgggctgactgactattttcgtcaactaggtttcgctgatacggagcaggcagcacaatttttcgcctggctattgtgctggcacgatactggaaaatttgcccgctcttttcagcaactttacctgcacccacaactcaaggttccggaaggcgcaagaaagaattacgaaaagatctctcattcaacgctgggctactggctgtggcatcattatttaagtgaatacgaagaattgcttccttcatcttcactctctccgcgcaaacttaaacgggtgatggagatgtggatgcccatgactaccgggcatcatggtcggccccctgaccgtattgatgaactggataattttctgcctgaagacaaagctgccgcacgagattttctccttgaaatcaaggtactgtttccgctcatcgagatccccgcattctgggatgatgacgagggcattgaacttttaaaacaactttcctggtatatctctgcaaccgtcgtactcgcagactggacgggatcgtcaacgcggttttttccacgcgttgcacaggcaatggatattaaagattactggcagaaggctttagttcaggctcaaaacgccttaaccgtctttcctccaaaagcacaaaccgcgcctttcaccggaattaatacgctgtttccttttattgagcacccgacaccgttacagcaaaaggtgctggatctggatatcagccagcttgggccacagttatttattctggaggatgtgactggcgcaggtaaaacagaagcggcgcttatcctggcccacaggttgatggctgcggggaaagcacagggtttgttttttggcctgccaacaatggcaacggccaatgccatgtacgatcggctggtaaaaacctggcttgctttctattcgccagaatcccgccccagcctggtgctggcacacagtgcccgcacattaatggaccgctttaatgaatcactctggtccggtgatttagtcgggtcagaagaaccggatgaacaagcgttcagtcagggatgtgcggcctggtttgccgacagtaacaagaaggcgttgctggctgaaattggcgtcggcacgctggatcaggcgatgatggcggtgatgccgtttaaacataataatctgcggcttctgggactgagtaacaaaatcctgctggctgatgagatccatgcctgtgacgcttacatgtcgtgcattcttgaaggattgattgagcggcaggcgcgtggaggaaacagcgttattttgctttctgccacgttatctcaacagcagcgcgacaaactcgttgctgcctttgcgcgtggtgcagagggccagcaagaagctccgttcctggaaaaggatgattacccctggctgacgcacgttacgaaatcggatgtgcattcacaccgggtagcaacgcgcaaagacgttgagcgtagcgtgagcgtgggttggcttcatagcgaacaagaatgtattgcgcgtatcgaatcggcagtaagtcaggggaaatgcatcgcctggatccggaattctgtcgatgacgctattaaggtttatcgtcagttgcttgcccgcggcgtcattcctgcttccagcctttctctgtttcatagccgctttgcttttagcgatcgccagcgaattgaaacggaaacgctggcacgcttcggtaaaagttgtagtttacagagatcatcgcaagtcattgtttgtacacaagtaattgaacaaagtgtggatattgacctggacgaaatgatatccgacctggcccctgttgatttgctgatccaacgggcggggcgattacagcggcatatccgcgatattaatggtcagttaaagcgtgacggaaaagacgagcgttcccctcctgaattgctgattctggcccccgtctgggacgacgctccaggtgacgaatggttcggcagtgccatgcgtaacagtgcatatgtctatcccgatcatggacgaatctggctgacgcagcgtgtactgcgtgagcaaggcgcgattcaaatgccacacgcagcccgccttcttattgaatcagtctacggtgaggacgtggtaatgccggaaggatttgcccgcagcgagcaggaacaagtgggcaaatattactgcgatcgcgcaatggctaaaaagtttgtgctgaacttcaggcccggctatgccgccaatatcaacgattacctcccggaaaaactgtcgacacgtctggctgaggagtctgtttccctgtggctgtctacctgtattgccggtgtggtgaagccttatgccaacggtgctcacgcatgggaaatgagcgttgtcagagtgcgtcgaagctggtggaaaaaacatcgggatgagttttctttactggaaggggatgcgttcaggcagtggtgcattgaacagcggcaagagccggagatggcaaacgtgattttagtcaccgatgacgaaagttgcgggtattcggctatggaaggattgactggcaaggttggttga

SEQ ID NO: 260574 - DNA, 1563 bp, Klebsiella pneumoniae
atgaactcgttttcacttctgacaaccccgtggttgcccgttcgttataaagacggaacgacaggcaaactggcgccagtcgatctggcggatgaaaatgttgtcgatatcgctgcgccgcgggcagatctccagggggcggcatggcagtttttgctgggactattacaaaccagcttcgcgccaaaagatcaacgtcgttgggatgatatctgggaagacggactggaagctgaaaagctacgggaagcattgctgtcattagaccatgctttccagttcgggccagattcaccttcatttatgcaggattttgaggcgctcacgggagataaagttccggtcgcttcgctactgcctgagattcccggcgttcaaacaacaaagtttaataaagaccactttatcaagcgtggtgtaacggaacacctgtgcccacagtgttctgcactagccttgttctctctacagttaaatgcgccgtcaggtggcaaaggctatcgcaccggcttacgcggcggtgggccgatgaccacgctgattgaattacaggaatatcagggcaatcaacaaactcccttgtggcgcaaactatggctcaacgtgatgccgcaggatgaagccgacttaccgctacccaaaaaatttgacgatctgattttcccctggctaggcccgacgcgtaccagcgaactggccggtgcggtggtaacccatgatcaggtcaataaactccaggcgtactggggaatgccgcggcgtatacgtattgattttaataccacgacagtcggcaactgcgatatttgcgacgagcagaacgacgcgctcctgagcctgatgacgaccaaaaattatggtgccaattatgccatgtggcagcatcccttaacgccttaccgtgtaccacttaaagaggggggcgagttttactccgttaaaccacaaccgggcggtttaatctggcgcgactggttaggccttatcgaaacgggtaaatcagaaaacaatacggaacttcccgcgctggtggtgaaactctttaatgccagcagtctgaaacaggcaaaagtgggcctatggggatttggttatgattttgacaacatgaaagcgcgctgttggtacgaacaccatttcccgctactgctcaataaaaaagaaggccagataccgaagctgcggctggctgcgcaaacggcttcacggattctgagtctgttacggagtgcattgaaagaagcatggttctccgatccaaaaggtgcaaggggtgatttcagttttgtggatatcgacttctggaacaaaactcagcatcgcttcctgaggttagtgcgccaaattgaagaaggtcaggatgcggatgaattactcggcaaatggcaaaaggaaatttggttattcgcgcgtcaggattttgacgagcgtgtattcactaatccttatgagcccgttgatttgaaacgcgtcatgaccgcgcgcaagaaatattttacaacatcggcggagaagcaaagtgctaaagccgccagggagaaaaagcaggaggctgctgaatga

SEQ ID NO: 260575 - DNA, 537 bp, Klebsiella pneumoniae
atgagtattgtaaaagaggagcacaaagccacgctgcgtaaatggcacgaagagttgcaggaaaaacgcggcaatcgtgccagtctgcggcgtagcacaacggttaatgatgtttgtctgtcagaagggtttcgttctctgctgatgcagacccacactttgtggaaaattgaagcacaagagtggcgttttaccgcactggcgctggtcgccgcagttagcgccaatgttaaagctattgatgaacggcagccttttgccgcgcagctggcggcggtaatgtcggaggggcgttttactcgcctgtcggcagtaaaaacgcctgatgatttactgcgtcagttacgtcgcgcggtcaaattattaaatggttccgtcaatcttatctctttggcagaagatattttccgctggtgccaggagagcgacgacctgctcaatcatcaccgccgccagcagcggccaacagaatttatccgtatccgctgggcgctggaatattaccaggctggcgacgccgataacgaacaaaattaa

SEQ ID NO: 260576 - DNA, 1056 bp, Klebsiella pneumoniae
atgacgacatttattcagcttcatttgttaaccgcttaccctgctgccaaccttaaccgtgatgacaccggtgcgccaaaaactgtggtactgggtggagcaacgcgtctgcgcgtttcctcacaaagtctgaaacgtgcgtggcgcacttctgcactttttgaacaggcactggcgggccatattggtattcgcagtgggcgtattgcgcgtgaggcggcaactatcctgattgagaaaggcatcgaagagaaaaaagccatcgaatgggcggcaaaaattgcggattatcttgggaaagctaaaaacgacaaaaaaccaaaagatccgctcactaacgccgaaactgaacagctagtccatatcagcccggcagaatttgacgccgtaaaagcgctggcccatcaactggccgaagaaaagcgcgcgccaaaagaggaagatctcgctttgttacgtaaagatcgcatggcggtagatatcgctatgtttggtcgtatgctggcgaataaacccgaatttaatgttgaagccgcctgccaggtcgcgcatgcatttggtgtcagtgaaacgattgtcgaagatgattttttcaccgccgttgatgatttgcgccaggcttctgaagatgccggtgccgggcatcttggtgaaaccggattcggttctgcgctgttctacacctatatctgcatcgataaagatctgctggtcgaaaacctcggcggtgacgaagcgttagctaatcagaccttgcgcgcctttacggaagccgcacttaaagtctccccaaccggcaaacagaacagctttgccagccgtgcctacgcctcctgggcgctggcagaaaaaggcactgaacaaccacgctctctggcggcggctttctatgaacccattaatggcacccggcagttagatgtggcggtgcagcgtattacaacgcttcgcgaaaatatgaatacggtctatgaacagaagaccgaatgcgcaagctttgacgtgatgaacaaacagggaagcatgaaggacgtgctggactttatctgcgcgtaa

SEQ ID NO: 260577 - DNA, 747 bp, Klebsiella pneumoniae
atgagccaatatttgatttttcagcttcatgggccaatggcatcctggggcgtcgatgcccccggcgaagtgcgtcatacccatgaactgccttcgcgctcagcattgctggggctgctggctgccggggtagggattcggcgtgatgataccgaacgattaaacgcgtttaacagccactattcactggtggtttgcgccagccgtaacccgcgctgggcacgggattatcacacggtccagatgccaaaagaggtgcgtaaagcgcgttatttcagccgtcgcgaagagttgagcgcccctgatcttctgagcgcgattatctcccggcgcgactactacaccgatgcctggtggatggtggcggtggcaacaacccccgatgcgccttacaggcttgaacagttgcaggacggtttacgtcatccggtttttccgctttatctggggcgaaaaagtcatccgctggcgttaccacttgcgccgttactgctcgaaggcaacgcgtctgatgtcttacgtaacgcataccaacagtatcaggatagtttccgcgaactgaaagtctcactcccgaaacttcaggatgaatgctggtgggaaggggaacacgacggcctggtcgcgagcaaaatattacgtcgccgggatgttcctttaaatcgtcagcagtggctgtttggggaacgcaccatcaatcaggggccgtggctcagcaaggaggaaccatgtacctctcaagaataa

SEQ ID NO: 260578 - DNA, 651 bp, Klebsiella pneumoniae
atgtacctctcaagaataaccttacataccggccagctttcgcctgcgcagttgctgcatctggtggatcgcggtgaatatgtaatgcatcagtggctgtgggatctttttcctggcggcaaagaaaggcaatttctttatcgtcgggaagaactccagggggcgtttcgcttttttgtcctgtcgcaggaacgcccggcggaaagtgatattttcaccatcgaatgccgaccatttgcgccagagttgcgtaccggacaatccctttgtttcaacctgcgggcgaatccaacaatttgtaaagcgggcaaacgccacgacttgctgatggaggcgaaacggcaggtgagggggcaggtggaaggaagtgatgtctggttgcatcaacaacaggcggcgctggactggctggcagcgcagggggaaagaagcggttttacactactggatacctcggtcgatgcctaccgacaacagcaactgcggcgggaaaactcccggcaactgatccagttcagtagcgtggattatacggggatgcttacggtcaccgatcctgggttatttctgcaacgtctgagccaggggtatggcaaaagccgcgcgttcggctgtggtctgatgctgatcaaacccggagcagaggcgtga

SEQ ID NO: 260579 - DNA, 294 bp, Klebsiella pneumoniae
atgagtatggtcgtcgttgttacagaaaatgtccctccgcgcttacgtggacggctcgcgatctggctcctggaagtgcgtgccggtgtttatgtcggagatacgtccaaacgtattcgggagatgatctggcagcaaatctctcaactggcaggttgcggaaatgtggtaatggcctgggcgaccaataccgagtcgggttttgaatttcagacctggggtgaaaatagacgtattccggtggatttggatggggtgcgtttggtttcttttcttcctgttgataatcaataa

SEQ ID NO: 260580 - DNA, 1038 bp, Klebsiella pneumoniae
atgttttccgcattgcgccaccgtaccgctgccctggcgctcggcgtatgctttattctccccgtacacgcctcgtcacctaaacctggcgattttgctaatactcaggcacgacatattgctactttctttccgggacgcatgaccggaactcctgcagaaatgttatctgccgattatattcgccaacagtttcagcaaatgggttatcgcagtgatattcggacatttaatagtcggtatatttataccgcccgcgataatcgcaagagctggcataacgtgacgggaagtacggtgattgccgctcatgaaggcaaagcgccgcagcagatcatcattatggcgcatctggatacatacgccccgctgagcgatgctgacgccgatgccaatctcggcgggctgacgttacaaggaatggatgataacgccgcaggtttaggtgtcatgctggaactggcagaacgcctgaaaaatacgcctaccgagtatggtattcgatttgtggcgaccagtggtgaagaggaagggaaattaggtgctgagaatttactcaagcggatgagtgacaccgaaaagaaaaatacgctgctggtgattaatctcgataacttaattgttggcgataaattgtatttcaacagcggtgtaaaaacccctgaagcagtaaggaaattaacgcgcgacagggcgctggcaattgcgcgtagtcatggaattgccgcaacgaccaatccgggtttgaataaaaattatccgaagggtaccgggtgctgtaacgacgcggaagtttttgacaaagccggtattgcggtactttcggtggaggcaactaactggaatcttgggaataaggatggctatcagcaacgtgcaaaaaccgccgccttccctgcgggaacaagctggcacgatgtcaggcttgataatcaacaacatattgataaggcgcttcctggaagaatagaacgtcgctgccgtgatgttatacggataatgctaccgctggtgaaagagctggcgaaggcgtcttga

SEQ ID NO: 260581 - DNA, 1428 bp, Klebsiella pneumoniae
atgaacaccgcacttgcacaacaaatcgccaatgaaggcggcgtcgaagcctggatgattgcgcaacaacataaaagcctgctgcgttttctgacctgtggtagcgtcgatgacggcaaaagtaccctgattggtcgcctgctgcacgatacccgccaaatctacgaagatcagctctcatcgctgcataacgacagtaaacgtcacggcacccagggcgaaaaactggatctggcactgctggtggacggcctgcaagctgagcgcgaacagggcatcaccattgacgtggcttaccgttatttctctaccgagaagcgtaaatttattatcgccgataccccagggcacgagcagtacactcgcaatatggcgactggcgcatcgacatgtgaactggcgatcttactgatcgatgcccgtaaaggcgtgctcgatcaaacccgtcgtcacagttttatctccacactgttggggatcaaacatctggtcgtggcgatcaacaaaatggatctggtgggttacagtgaagagacgttcacccgtattcgcgaagattatctgacgtttgccgggcagctgccgggtaatctggatatccgctttgtgccgctctctgcactggaaggcgacaacgtggcttcgcaaagtgaaagtatgccgtggtacagcggtccgacactgctcgaagtgctggaaaccgtggagatccagcgagtggtggatgcccagccaatgcgcttcccggtgcagtacgttaatcgcccgaatctcgattttcgtggctacgccggaacgctggcatccggtcgcgtggaagtcgggcaacgtgtcaaagtgctgccctctggtgtggaatcaaacgtcgcgcggatcgtgacttttgatggcgatcgcgaagaagcctttgccggagaagcgatcaccctggtgctgacggatgagatcgacatcagccgtggcgatctgctgctggcggcagacgaatcattaccggctgtgcagagcgcgtcggtggatgtggtatggatggcggaacagccgctttccccaggccagcgttacgacatcaaaattgccggtaagaagacgcgtgctcgtgttgatggcattcgttatcaggttgatattaataaccttacccaacgcgaagttgaaaacctgccgctgaacggcatcggcttggtggatctcacctttgacgagccactggtgttagatcgttatcagcaaaacccggttaccggtgggctgatttttatcgatcgcctgagtaatgtgaccgtaggtgccggtatggtgcacgagccagttagccaggcaactactgcgccatctgaattcagtgcattcgaactggaattgaatgcactggttcgtcgccactttccgcactggggcgcgcgcgatttgctgggggataaataa

SEQ ID NO: 260582 - DNA, 324 bp, Klebsiella pneumoniae
atgcgtaatagccataacattacactaacaaataacgacagccttactgaggatgaagaaaccacatggtcactgcctggtgccgtgatcggttttatctcatggttatttgcgctggcgatgccgatgttgatttatggctctaacacgctgttcttctttatctacacctggcctttctttctggcactgatgcctgtcgcggtagtggtggggattgcgctgcattcattgatggacggaaagctacgctacagtattgttttcaccctggtgacagtaggcattatgtttggcgcactgtttatgtggctactgggctaa

SEQ ID NO: 260583 - DNA, 711 bp, Klebsiella pneumoniae
atggcaaccactcatttggatgtttgcgccgtggttccggcggccggatttggccgtcgaatgcaaacggaatgtcctaagcaatatctctcaatcggtaatcaaaccattcttgaacactcggtgcatgcgctgctggcgcatccccgggtgaaacatgtcgtcattgccataagtcctggcgatagccgttttgcacaacttcctctggcgaatcatccgcaaatcaccgttgtagatggcggtgatgagcgtgccgattcggtgctggcaggtctgaaagccgctggcgacgcgcagtgggtattggtgcatgacgcagctcgtccttgtctgcatcaggatgacctcgcgcgattgttggcgttgagcgaaaccagccgcacgggggggatcctcgccgcaccagtgcgcgatacgatgaaacgtgccgaaccgggcaaaaatgccattgctcataccgttgatcgcaacggcttatggcacgcgctgacgccgcaatttttccctcgtgagctgttacatgactgcctgacgcgcgctctaaatgaaggcgctaccattaccgacgaagcctcggcgctggaatattgcggatttcatccgcagttggtcgaaggccgcgcggataacattaaagtcacgcgcccggaagatttggcactggccgagttttacctcacccgaaccatccatcaggagaatacataa

SEQ ID NO: 260584 - DNA, 480 bp, Klebsiella pneumoniae
atgcgaattggacacggttttgacgtacacgcctttggcggtgaaggcccaattatcattggtggcgtacgcattccttacgaaaaaggattgctggcgcattctgatggcgacgtggcgctccatgcgttgaccgatgcattgcttggcgcggcggcgctgggggatatcggcaaactgttcccggataccgatccggcatttaaaggtgccgacagccgcgagctgctacgcgaagcctggcgtcgtattcaggcgaagggttataccctgggcaacgtcgatgtcactatcatcgctcaggcaccgaagatgttgccgcacattccacaaatgcgcgtgtttattgccgaagatctcggctgccatatggatgatgttaacgtgaaagccactactacggaaaaacttggatttaccggacgtggggaagggattgcctgtgaagcggtggcgctactcattaaggcaacaaaatga

SEQ ID NO: 260585 - DNA, 1050 bp, Klebsiella pneumoniae
atgattgagtttgataatctcacttacctccacggtaaaccgcaaggcaccgggctgctgaaagccaatccggaagactttgtggtggtggaagatttgggctttgagcctgatggtgaaggtgagcatattctggttagaatcctcaaaaacggctgcaatacccgttttgtggcggatgcactggcgaaattccttaaaattcatgcccgtgaagtcagcttcgctgggcaaaaagacaaacatgctgtaacggaacagtggttatgtgctcgcgtgccgggcaaggaaatgcccgatctgagcgcctttcaactggaaggctgccaggtgctggagtatgcgcggcacaagcgcaagctgcgtttaggcgcgctgaaaggtaacgcctttaccctggttctgcgcgaagtgagcaatcgcgatgacgttgaacaacgtctgatcgatatttgcgtaaaaggcgtgcctaactattttggtgcccaacgttttgggattggcggtagcaacttgcagggcgcgctgcgctgggcgcaaaccaatactccggtgcgcgatcgcaataaacggagtttttggttgtcggcagcccgcagtgcgttgtttaatcagattgttgctgagcgcctcaaaaaagcagacgttaatcaagttgttgacggcgatgcgctacaattagccggacgtggtagctggtttgtcgcaaccaccgaagaactggcggaattacagcgtcgcgtcaacgataaagagctgatgataaccgccgcattgccgggcagtggcgaatggggaactcagcgtgaagcgttggcattcgaacaagcagctgtcgccgcagaaactgaattacaagccttactggtgcgcgaaaaagttgaagccgcgcgcagagcgatgctgctgtatccgcaacaattaagctggaactggtgggatgacgtcaccgtagaaatccgtttctggcttccggcgggtagttttgcaaccagcgttgtcagggaacttatcaacacaacaggtgattatgcgcatattgctgagtaa

SEQ ID NO: 260586 - DNA, 762 bp, Klebsiella pneumoniae
atgcgcatattgctgagtaatgatgacggggtacatgcacccggtatacaaacgctggcgaaagccttgcgtgagtttgctgacgttcaggtggtcgcccccgatcgtaaccgcagcggcgcttcaaattctctgacactggaatcctccctgcgcacgtttacctttgaaaatggtgatattgctgtgcaaatgggaaccccgaccgattgcgtctatcttggcgtgaatgctctgatgcgtccgcgcccggacattgttgtgtccggaattaacgccgggccgaatctgggggatgatgttatttattccggtacggtagccgccgcgatggaaggccgtcatttaggttttccggcgcttgccgtctcgcttgacgggcataaacattacgacactgccgcggcggtaacctgttcaattttgcgcgcactgtgtaaagagccgctgcgcaccggacgtattcttaatattaacgttccggatttaccattggatcaaatcaaaggtattcgcgtgacgcgctgcggtacacgacatccggcagatcaggtgatcccgcagcaagatccgcgcggcaatacgctgtactggattggcccgccgggcggtaaatgtgatgccggtccggggaccgattttgctgcggtagatgagggctatgtctccatcacgccgctgcatgtggatttaactgcgcatagcgcgcaagatgtggtttcagactggttaaacagcgtgggagttggcacgcaatggtaa

SEQ ID NO: 260587 - DNA, 627 bp, Klebsiella pneumoniae; identical to SEQ ID NO: 32586

SEQ ID NO: 260588 - DNA, 1140 bp, Klebsiella pneumoniae
atgagcgcgggaagcccaaaattcaccgttcgccgcattgcggctttgtcactggtttcgctatggctggcaggctgttctgacacttcaaatccaccggcaccggtcagctccgttaatggcaatgcgcctgcaaataccaattctggtatgttgattacgccgccgccgaaaatgggaacgacgtctacagcgcagcaaccgcaaattcagccggtacagcagccacaaattcaggctactcaacaaccgcaaatccagccagtacagccagtagctcagcagccggtacagatggaaaacggacgcatcgtctacaaccgtcagtatgggaacattccgaaaggcagttatagcggcagtacctataccgtgaaaaaaggcgacacacttttctatatcgcctggattactggcaacgatttccgtgaccttgctcagcgcaacaatattcaggcaccatacgcgctgaacgtcggtcagaccttacaggtgggtaatgcttccggtacgccaatcactggcggaaatgccattacccaggccgatgcagcagagcaaggagttgtgatcaagcctgcacaaaattccaccgttgctgttgcttcgcaaccgacaattacgtattctgagtcttcgggtgaacagagtgctaacaaaatgttgccgaacaacaagccaactgcgaccacggtcacagcgcctgtaacggtaccaacagcaagcacaaccgagccgactgtcagcagtacatcaaccagtacgcctatctccacctggcgctggccgactgagggcaaagtgatcgaaacctttggcgcttctgaggggggcaacaaggggattgatatcgcgggcagcaaaggacaggcaattatcgcgaccgcagatggccgcgttgtttatgccggtaacgcgctgcgcggctacggtaatctgattatcatcaaacataatgatgattacctgagtgcctacgcccataacgacacaatgctggtccgggaacaacaagaagtgaaggcggggcaaaaaatagcaaccatgggtagcaccggaaccagttcaacacgcttgcattttgaaattcgttacaaggggaaatccgtaaacccgctgcgttatttgccgcagcgataa

SEQ ID NO: 260589 - DNA, 993 bp, Klebsiella pneumoniae
atgagtcagaatacgctgaaagttcatgatttaaatgaagatgcggaatttgatgagaacggagttgaggtttttgacgaaaaggccttagtagaagaggaacccagtgataacgatttggccgaagaggaactgttatcgcagggagccacacagcgtgtgttggacgcgactcagctttaccttggtgagattggttattcaccactgttaacggccgaagaagaagtttattttgcgcgtcgcgcactgcgtggagatgttgcctcccgccgccggatgatcgagagtaacttgcgtctggtggtaaaaattgcccgccgttatggcaatcgtggtctggcgttgctggacctgatcgaagagggcaacctggggctgatccgcgcggtagagaagtttgacccggaacgtggtttccgcttctcaacatacgcaacctggtggattcgccagacgatcgaacgggcgattatgaaccaaacccgtactattcgtttgccgattcacatcgtaaaggagctgaacgtttacctgcgaaccgcacgcgagttgtcccataaactggaccacgaaccaagtgcggaagagatcgcagagcaactggataagccagttgatgacgtcagccgtatgcttcgtcttaacgagcgcattacctcggtagacaccccgctgggtggtgattccgaaaaagcgttgctggacatcctggccgatgaaaaagagaacggtccggaagataccacgcaagatgacgatatgaagcagagcatcgtcaaatggctgttcgagctgaacgccaaacagcgtgaagtactggcacgtcgattcggtttgctggggtacgaagcggcaacactggaagatgtaggtcgtgaaattggcctcacccgtgaacgtgttcgccagattcaggttgaaggcctgcgccgtttgcgcgaaatcctgcaaacgcaggggctgaatatcgaagcgctgttccgcgagtaa

SEQ ID NO: 260590 - DNA, 408 bp, Klebsiella pneumoniae
atggcgttacgaaataaagcgttccatcagttacgacagctttttcagcagcacacggctcgctggcagcacgagttacctgacctcaccaaaccacagtacgcggtgatgcgcgccattgctgataagcctggtatcgaacaggtggcactgatagaagcagcagtcagcaccaaagcaacgctggcagaaatgttggcaagaatggaaaatcgtggcttagtcagacgtgaacatgacgccgctgacaagcggcgacgctttgtctggctgactgccgaaggagaaaaggtacttgctgcggcgatccccattggtgacagcgtggatgaggaatttttggggcgtttgagtgcagaagagcaggagctgtttatgcagttggtgcgcaagatgatgaacacatag

SEQ ID NO: 260591 - DNA, 1365 bp, Klebsiella pneumoniae
atgtccacaattacattgttatgcattgcgttaactggcgtaatcatgctgttgctgctggtcatcaaggcaaaggtacaaccattcgttgctctgctcctcgtcagcctgttagtcgcacttgcggcgggtataccggcgggcgaagtgggtaaagtgatgatcgccgggatgggcggtgtgcttggttccgtcactattattattggtctgggcgctatgctggggcgtatgatcgaacactctggtggtgcagagtcactggctaattatttcagtcgcaagttaggtgacaaacgaactatcgctgcgctgactctggcagcgttcttcctcggtattcccgtcttctttgatgtcggctttattattcttgcgccaatcatttacggttttgccaaggttgccaaaatatcgccactcaaatttggcctgcctgtcgctggaatcatgctaactgttcatgtggcggtaccgccgcatccaggccctgtcgccgcagcggggttactccacgcagacatcggctggctaaccatcatcggtattgcgatttctattcccgtagggattgttggctactttgcagcgaaaataatcaataagcgccaatatgcgatgtcggtggaagtactggaacagatgcaactggctccggccagtgaggaaggcgcgacaaaattaagcgataaaataaatccaccgggcgtcgcgctggtcacctcgctaattgttattcctatcgcgattatcatggcgggtacggtttccgcaacactgatgccgccttcgcatcccctgcttggtacgctacagctgatcggctcaccaatggtagctctaatgattgcgctggtgctggcattctggttattggctttacgtcgcggctggagcttacaacacaccagcgacattatgggctcagcccttcccaccgcggcggtagtgattttggttactggtgctggaggggtatttggcaaagtgctggtggaatcgggcgtcggcaaagcccttgccaacatgctacaaatgattgacctgcctctgttaccagccgcatttattatttcactggcgctgcgtgcatcgcaggggtcagcaaccgtagcaatcctgacaaccggcgggttactctcagaagcggtgatgggattgaatccgattcagtgcgtattggtgacgctggcagcctgctttggtgggcttggcgcgtcacatattaatgactcagggttctggattgtgaccaaatatctggggttatcggtagcagacggtctgaaaacctggacagtgttaacgaccattctcggttttaccggattcttaattacctggtgcgtatgggcggtaatttga

SEQ ID NO: 260592 - DNA, 777 bp, Klebsiella pneumoniae
atgcctcgttttgcagctaatttatccatgatgttcaccgaagtgccttttattgaacgcttcgccgcagcgcgaaaagccgggttcgatgctgtggaatttctgtttccctatgactactccaccctgcaaatccaaaagcaactggagcaaaaccatctgacactggcgctgttcaataccgctcccggagatattaatgcgggggaatggggattatccgcccttcccggacgtgagcacgaagcacacgcagacatcgacctggcactggaatatgcattggcgctcaattgtgaacaagtccatgtgatggcaggcgtcgtgcccgctggcgaagatgctgaacggtacagggcagtatttatcgataatctccgctacgctgccgaccgctttgcgccacacggcaagcgaatattagttgaagcactcagccccggcgttaagcctcattatctcttctccagccagtatcaggcactggctattgttgaagaagttgcacgagataacgtgtttattcaactagatacttttcatgcgcaaaaagtagatggcaacctgacgcatttaatccgcgactacgccgggaaatatgcgcacgtacaaattgccggactacctgatcgacatgaaccggacgatggagaaatcaactatccgtggctgttccgcctgttcgatgaggtgggatatcagggctggatcggttgtgaatataaacctcgtggcctcaccgaagaagggcttggctggtttgacgcctggcgctaa

SEQ ID NO: 260593 - DNA, 1263 bp, Klebsiella pneumoniae
atgatcaagattggcgttatcgccgatgattttaccggcgcgacggatatcgccagttttctggtggaaaacggtctaccaacggtacaaattaacggtgttccaacaggtaaaatgccggaagcaatcgacgcactggtgatcagcctgaaaacgcgttcctgtccggtggttgaagccacacagcaatcgctggcggcactgagctggttgcaacagcaaggttgcaaacagatctatttcaaatactgctctactttcgacagttcggcgaaaggtaatatcggcccggttaccgatgcattaatggatgctctcgacacgccgtttacggtcttctctccggccctgccggtcaacggacgtacggtttatcaggggtatttgttcgtaatgaatcaactgctggccgaatccgggatgcgccatcacccggtaaatcccatgaccgacagctatcttccccgtctggttgaagcgcaatccacagggcgctgcggcgtcgtttcggcacatgttttcgaacaaggtgtggatgccgttcgtcaagagctggctcgcttacagcaagagggctaccgctacgcggtgcttgatgcgctgaccgaacaccatctggaaattcagggagaagccttgcgcgataccccactggtaacgggcggttctggtctggcgattggccttgcccggcagtgggcgcaagaaaacggtaaccaggctcgcaaagcagggcatccgctcgctgggcgcggcgtagtgctctccggttcatgctctcaaatgaccaaccgccaggtagcacattaccgtcaaattgcaccagcccgtgaagttgatgtggcacgctgcctctcaattgaaactctggccgcttatgcacacgaactggcagagtgggttctgggccaggaaagtgtacttgctccactggtttttgccaccgccagcactgacgcattggcagcaattcaacagcaatacggtgcacaaaaagccagtcaggcagtagaaacactgttttctcaactagcggcgcggttagcagcggaaggcgtgacacgctttattgtcgcaggcggtgagacctccggcgtagtcacacagagcctgggaataaaagggtttcatattggcccaaccatttctcccggcgtgccgtgggtaaacgcactggataaacctgtctcactcgcccttaaatctggcaacttcggtgatgaagcctttttttcacgagcccaaagagagtttttatcatga

SEQ ID NO: 260594 - DNA, 909 bp, Klebsiella pneumoniae
atgaaaacgggatctgagtttcatgtcggtatcgttggcttagggtcaatgggaatgggagcagcactgtcatgtgtccgcgcaggtctttctacctggggcgcagacctgaacagcaatgcctgcgctacgttgaaagaggcaggtgcttgcggggtttctgataacgccgcgacgtttgccgaaaaactggacgctctgctggtgctggtggtcaatgcggcccaggttaaacaggtgctgtttggtgaaacaggcgttgcacaacatctgaaacccggtacggcagtaatggtttcttccactatcgctagtgctgatgcgcaagaaattgctaccgctctggctggattcgatctggaaatgctggatgcgccagtttctggtggtgcagtaaaagccgctaacggtgaaatgactgtcatggcctccggtagcgatattgcctttgaacgactggcacccgtgctggaagccgttgccggaaaagtttatcgcataggtgcagaaccgggactaggttcgaccgtaaaaattattcaccagttgttagcgggcgtacatattgctgccggagccgaagcgatggcacttgcagcccgtgcggggatcccgctggatgtgatgtatgacgtcgtgaccaatgccgccggaaattcctggatgttcgaaaaccggatgcgtcatgtggtggatggcgattacaccccgcattcagccgtcgatatttttgttaaggatcttggtctggttgccgatacagccaaagccctgcacttcccgctgccattggcctcaacagcattgaatatgttcaccagcgccagtaacgcgggttacgggaaagaagacgatagcgcagttatcaagattttctctggcatcactctaccgggagcgaaatcatga

SEQ ID NO: 260595 - DNA, 768 bp, Klebsiella pneumoniae
ttgatacccgtagagcgtcgccaaatcatccttgagatggtagctgaaaaaggcattgtcagtattgctgaactaacggacagaatgaatgtgtcacatatgaccattcgtcgggatttacaaaaactggagcagcagggagccgttgtgctggtgtccggaggcgtccagtctccgggacgcgtggcgcatgaaccttctcatcaggtaaaaactgcgctggcaatgacgcaaaaagcggctattggcaagctggcggcaagtcttgttcagccgggaagttgtatctatctggatgcgggaacgaccacgctagcgatagcacagcatctgattcacatggagtcactgactgtggtcacaaacgatttcgttattgcggactacttgctcgacaacagtaattgcacaattattcacactggcggtgcagtgtgtcgggaaaaccgttcctgtgtcggggaagccgctgcgaccatgctgcgcagcctgatgattgatcaggcttttatttctgcatcgtcatggagtgtgcgggggatttctacgccagcggaagataaagtcacggtgaaacgggcgattgccagtgccagccgccagcgagttttggtctgtgatgcgacgaaatatggtcaggtggcgacatggctggcgttaccattaagcgagtttgatcagattattacagacgacggtttgccggagagtgccagtcgcgcgctggcgaagcaggatctctctttgctggtagcgaaaaatgaataa

SEQ ID NO: 260596 - DNA, 657 bp, Klebsiella pneumoniae
atgccatctacacgctatcaaaaaattaatgcccatcactatcgttatatatgggccgttggtgatattcatggtgactatcaattattacaatcccgcttacatcaactctcttttttccctgaaaccgacttacttatttctgtcggcgataatattgatcgtgggccggagagtcttaacgtactacgcctgttaaaccagccctggtttacatcggttaaaggcaaccatgaagcgatggcgcttgatgcattcgaaactggcgatggaaatatgtggcttgccagcggcggcgactggttctttgaattaaatgagacggaacaacaagaagcaataaatctgttgctgaaatttcatcgccttccacatattattgaaatcactaacgacataataaaatatgtcatcgcacatgcagattatccggggaatgaatatctctttggcaaagaaatagcggagagagaactactctggcctgttgatcgtgtgcagaaatcgcttaatggcgagttacaacaaataaacggcgctgattattttatatttggacatatgatgtttgataacattcagacgttcgcaaaccagatttatattgataccggatcgccgaaaagcgggcggctgtcattttataaaataaagtag

SEQ ID NO: 260597 - DNA, 135 bp, Klebsiella pneumoniae; identical to SEQ ID NO: 9594

SEQ ID NO: 260598 - DNA, 345 bp, Klebsiella pneumoniae
atgtccggcaagcgtatctctcgtgaaaaactgacgattaaaaaaatgatcgatctttatcaagcgaaatgcccgcaggcgtcagcggagccggagcattatgagacgttgtttacttacgcgcaaaagcggctggataaatgtgtgttcggcgaagagaaaccagcctgtaagcagtgtccggtgcactgttaccagcctgcaaagcgtgaagagatgaaacagattatgcgttgggctgggccgcgaatgctgtggcgtcatccgatcttaaccgtgcgtcatctcatcgatgacaagcgtccggtgccggagttgccagaaaaatatcgtccaaagaaataa

SEQ ID NO: 260599 - DNA, 429 bp, Klebsiella pneumoniae
atggcagtttcagcaagaaatcaattaaccggaacagttagcgcagtagcaatgggcgctgtgaatgatgaagtagaactgacgctggcaggtggtgcaaagctggtggcaattgtgactcacagcagccagcaagcgctgggtctggcgaaagggaaagaagcgattgccctgattaaagccccgtgggtaacgctggcaacggaagactgtggactgaaattctctgctcgcaaccagtttgctggcagcgtgtcgacaatcaccgaaggcgcagtgaacgccactgtccatatcaaaacggatgcgggttttgaaattgtggcagtggtaacaaatgaaagtcaggatgaaatgaaactcaccactggctcgcgcgttattgcattgatcaaagcatcagccatcctgattgccaccaaagcgtaa

SEQ ID NO: 260600 - DNA, 2079 bp, Klebsiella pneumoniae
atgtcatatacaccgatgagtgatctcggacaacaagggttgttcgacatcactcggacactattgcagcagcccgatctggcctcgctgtgtgaggctctttcgcaactggtaaagcgttctgcgctcgccgacaacgcggctattgtgttgtggcaagcgcagactcaacgtgcgtcttattacgcatcgcgtgaaaaagacacccccattaaatatgaagacgaaactgttctggcacacggtccggtacgcagcattttgtcgcgccctgatacgctgcattgcagttacgaagaattttgtgaaacctggccgcagctggccgcaggtgggctataccccaaatttggtcactattgcctgatgccactggcggcggaagggcatatttttgatggctgtgaatttattcgttatgacgatcgcccctggagcgaaaaagagttcaatcgtctgcaaacatttacgcagatcgtttctgtcgtcaccgaacaaatccagagccgcgtcgtcaataatgtcgactatgagttgttatgccgggagcgcgataacttccgcatcctggttgccattaccaacgcggtgctttcccgcctggatatggacgaactggtcagcgaagtcgccaaagaaatccattactacttcgacattgacgatatcagcatcgtcttacgcagccaccgtaaaaacaaactcaacatctactccactcactatcttgataaacagcatcccgcccacgaacagagcgaagtcgatgaagccggaaccctcaccgaacgcgtgttcaaaagcaaagagatgctgctgattaatctccacgagcgggacgatttagccccctatgaacgcatgttgttcgacacctggggcaaccagattcaaaccttgtgcctgttaccgctgatgtctggcgacaccatgctgggcgtgctgaaactggcgcaatgcgaagagaaagtgtttaccactaccaatctgaatttactgcgccagattgccgaacgtgtggcaatcgctgtcgataacgccctcgcctatcaggaaatccatcgtctgaaagaacggctggttgatgaaaacctcgccctgaccgagcagctcaacaatgttgatagtgaatttggcgagattattggccgcagcgaagccatgtacagcgtacttaaacaagttgaaatggtggcgcaaagcgacagtaccgtgctgattctcggtgaaactggtacaggtaaagagctgattgcccgcgcgatccataatctcagtgggcgtaataatcgccgcatggtaaaaatgaactgcgcggcaatgcctgccggattgctggagagcgatctgtttggtcatgagcgtggggcttttaccggtgccagcgcccagcgcattggtcgttttgaactggcggataaaagctccctgttcctcgacgaagtgggcgatatgccactggagttacagccgaagttgctgcgtgtattacaggaacaggagtttgaacgcctcggcagcaacaaaatcattcagacggacgtacgtttaattgccgcgactaaccgcgatctgaaaaaaatggtcgccgaccgtgagttccgtagcgatctctattaccgcctgaatgtattcccgatccacctgccgccactacgcgagcgtccggaagatattccgctgctggcgaaagcctttaccttcaaaattgcccgtcgtctcgggcgcaatatcgacagcattcctgccgagacgctgcgcaccttgagcaacatggagtggccgggtaacgtacgcgaactggaaaacgtcattgagcgcgcggtattgctaacacgcggcaacgtgctgcagctgtcactgccagatattgctttaccggagcctgaaacgccgcctgccgcaacggttgtcgcccaggagggcgaagatgaatatcagttgattgttcgcgtgctgaaagaaaccaacggcgtggttgccgggcctaaaggcgctgcgcaacgtctggggctgaaacgcacgaccctgctgtcacggatgaagcgactgggaattgataaatcggcattgatttaa

SEQ ID NO: 260601 - DNA, 1011 bp, Klebsiella pneumoniae
gtgaataatatccaactcgcccacggtagcggcggccaggcgatgcagcaattaatcaacagcctgtttatggaagcctttgccaacccgtggctggcagagcaggaagatcaggcacgtcttgatctggcgcagctggtagcggaaggcgaccgtctggcgttctccaccgacagttacgtcattgacccgctgttctttcctggcggtaatatcggcaagctggcgatttgcggaaccgcgaatgacgttgcggtcagtggcgctattccgcgctatctctcctgtggctttatcctcgaagaaggattgccgatggagacactgaaagccgtagtgaccagcatggcagaaaccgcccgcgcggcaggcattgccatcgtcactggcgatactaaagtggtgcagcgcggcgcggcagataaactgtttatcaacaccgctggcatgggcgcaattccggcgaatattcactggggcgcacagacgctaaccgcaggcgatgtattgctggttagcggtacactcggcgaccacggggcgactatccttaacctgcgtgagcagctggggctggatggcgaactggtcagcgactgtgcggtactaacgccgcttattcagacgctgcgtgacattcccggcgtgaaagcgctgcgtgatgccacccgtggtggtgtgaacgcggtagttcatgagttcgcggcagcctgcggttgcggtattgaaatttcagaagcggcactgccggttaaacctgctgtgcgcggcgtttgcgaactgctgggactggacgcccttaactttgccaacgaaggcaaactggtgatcgccgttgaacgcaacgcggcagagcaagttttggcagcgttacattcccatccactggggaaagacgcggcgctgattggtgaagtggtggaacgtaaaggtgttcgtcttgccggtctgtatggcgtgaaacgaaccctcgatttaccacacgccgaaccgcttccgcgtatatgctaa

SEQ ID NO: 260602 - DNA, 1122 bp, Klebsiella pneumoniae
atgcgttttgttgatgaatatcgcgcgccggaacaggtgatgcagttaattgagcatctgcgcgaacgtgcttcacatctctcttacacagccgaacgccctctgcggattatggaagtgtgtggcggtcatacccacgctatctttaaattcggcctcgaccagttactgccggaaaacgttgagtttatccacggtccgggttgtccggtgtgtgtactgccgatgggtagaatcgatacctgcgtggagattgccagccatccggaagtcatcttctgtacctttggcgacgccatgcgcgtgccggggaaacagggatcgctgttgcaggcaaaagcacgcggtgccgatgtgcgcatcgtttactcgccgatggatgcgttgaaactggcgcaggagaatccaacccgcaaagtggtgttcttcggcttaggttttgaaaccaccatgccgacgacggccatcactctgcaacaggcgaaagcgcgtgatgtgcagaatttttacttcttctgccagcatattacgcttatcccgacgctgcgcagtttgctggaagagccggataacggtatcgacgcgtttcttgcgcccggtcacgttagtatggttatcggcactgatgcctataattttatcgccagcgattttcatcgtccgctggtggtcgctggtttcgaaccccttgatctactgcaaggcgtggtgatgctggtggagcagaaaatagcggcccacagcaaggtagagaatcagtatcgtcgggtggtgccggatgccggtaacctgctggcgcaacaggcgattgccgatgtgttctgtgtcaacggcgacagcgaatggcgcggcttaggcgtgattgaatcttctggtgtacacctgacgccggattatcaacgattcgatgccgaagcgcatttccgcccggcaccgcagcaggtctgcgatgacccgcgcgcacgttgtggcgaagtattaacgggcaaatgtaagccgcatcaatgcccgctgtttggtaacacctgtaatcctcaaaccgcgtttggtgcgctgatggtttcctccgaaggagcgtgcgccgcgtggtatcagtatcgtcagcaggagagtgaagcgtga

SEQ ID NO: 260603 - DNA, 273 bp, Klebsiella pneumoniae
atgtgcataggcgttcccggccagatccgcaccattgacggcaaccaggcgaaagtcgacgtctgcggcattcagcgcgatgtcgatttaacgttagtcggcagctgcgatgaaaacggtcagccacgcgtaggccagtgggtactggtccacgttggctttgccatgagcgtaattaatgaagccgaagcgcgcgacactctcgacgccttacaaaacatgtttgacgttgagccggatgtcggtgcgctgttgtatggcgaggaaaaataa

SEQ ID NO: 260604 - DNA, 873 bp, Klebsiella pneumoniae
atgtgtacaacatgcggttgcggtgaaggcaacctgtatatcgagggtgatgaacataaccctcattccgcgtttcgtagcgcgccatttgccccggcggcacgcccgaagatgaaaatcaccggcattaaagcgcctgaatttacccccagccagactgaagaaggcgatctgcattacggtcatggcgaagcgggtactcacgcgccgggcatgagccagcgtcggatgctggaagtcgaaattgacgtgctggacaaaaataaccgtctggctgaacgcaaccgcgcgcgctttgctgcccgcaagcaactggtgctcaacctggtttccagccctggttccggtaaaaccaccctgctgacggaaaccttaatgcgcctgaaagacagcgttccgtgcgcggttattgaaggcgaccagcaaaccgtgaacgatgccgcgcgcattcgcgctaccggcacaccagcgattcaggtgaataccggtaaaggctgccatcttgacgcacagatgattgccgacgccgcacctcgcctgccactggacgataacggtattctgtttatcgaaaacgtcggcaacctcgtgtgcccggccagcttcgatctcggtgaaaaacacaaagtggcggtgctttccgttaccgaaggtgaagacaaaccgctgaaatatccgcatatgtttgccgcagcttcgctgatgctgctcaacaaagttgacttgctgccgtatctcaactttgacgttgagaagtgcatcgcctgcgcccgcgaagtcaatccagaaattgaaatcatccttatttccgccaccagcggcgaagggatggaccagtggctgaactggctggagacacagcgatgtgcatag

SEQ ID NO: 260605 - DNA, 351 bp, Klebsiella pneumoniae
atgcacgaaataaccctctgccaacgggcactggaattgatcgaacagcaggccgcaaaacacggcgcaaaacgcgtaactggggtctggctcaaaattggcgcattttcttgtgtcgaaaccagctctcttgccttttgttttgatctggtttgccgcggcagcgtggcggaaggttgtaaactgcacctcgaagaacaagaggccgaatgctggtgtgaaacatgccaacagtatgtgacgctactgacccagcgcgtccgccgctgtccacagtgtcatggtgacatgctacagattgtggcagacgacggtttacagattcggcggatagaaatagaccaggagtga

SEQ ID NO: 260606 - DNA, 462 bp, Klebsiella pneumoniae
atgactatttgggaaataagcgagaaagccgattacatcgcacagcggcatcgtcgcctacaggaccagtggcacatctactgcaattcgctggttcaggggatcacgttatcgaaagcgcgcctgcatcacgccatgagctgcgcgccggacaaagaactctgtttcgtcctttttgaacattttcgcatttacgtcaccctggcggatggctttaacagccacaccatcgagtattacgtcgaaacaaaagatggtgaagacaaacagcggattgcgcaggcgcaactgagcattgacggcatgattgatggcaaggtcaacatccgcgatcgcgaacaggttctggaacactatctcgaaaaaatcgctggcgtttacgacagcttatacaccgccattgaaaacaatgtgccggtgaatttaagccaactggtaaagggacaaagcccggcagcatga

SEQ ID NO: 260607 - DNA, 612 bp, Klebsiella pneumoniae
gtgaatcgttttgtaattgctgactccacgctctgtatcggctgccacacctgtgaggccgcctgttcagagacgcatcgccagcacggcctgcaatcaatgccgcgcctgcgagtgatgctcaatgaaaaagaatctgcgccgcagctctgtcaccactgtgaagatgcgccctgtgcggtggtttgcccggttaacgccatcacccgcgttgatggggccgtgcagttgaatgaaagtctgtgcgtaagctgcaaactgtgcggcatcgcctgcccgtttggcgcaattgaattttccggcagccgtccgctggatattccggcaaacgccaataccccgaaagcgccaccggcaccgcctgctccggcgcgtgtcagcacattgcttgactgggtgccaggtattcgcgcgatcgccgtcaaatgtgacctttgtagctttgatgaacaaggtccggcctgcgtgcggatgtgcccgactaaagccctgcatctggtggataacaccgatatcgcccgcgtcagcaaacgtaagcgtgagctgacttttaacacggactttggcgatctcaccttgtttcagcaggctcaaagtggagaggctaaatga

SEQ ID NO: 260608 - DNA, 1827 bp, Klebsiella pneumoniae; identical to SEQ ID NO: 24229

SEQ ID NO: 260609 - DNA, 924 bp, Klebsiella pneumoniae; identical to SEQ ID NO: 24228

SEQ ID NO: 260610 - DNA, 714 bp, Klebsiella pneumoniae
  misc_feature (538)..(547): n is a, c, g, or t
atgtctgaagaaaaattaggtcaacattatctcgctgcgctgaatgaggcatttccgggcgtcgtgctggaccacgcctggcagaccaaagatcagctgaccgtgaccgtgaaggtgaactacctgccggaagtggtggagtttctctactacaagcaggggggctggctgtcggtgctgtttggtaacgacgaacgcaaacttaatggtcattacgccgtttactacgtgctgtcgatggagaagggcaccaaatgctggataaccgtgcgcgttgaagttgacgccaacaaaccggaatatccgtccgtaacgccgcgcgttccggcggcggtatggggcgagcgtgaagtgcgcgatatgtacggtttgattccggtagggctgccggatgaacgtcgtctggtgctgccggatgactggccggatgaactttatccgctgcgtaaagacagcatggattatcgtcaacgtccggcaccgactaccgatgctgaaacctacgagttcatcaacgaactgggcgacaagaaaaacnnnnnnnnnnaaacaacgtcgtcccgattggtccgctgcacgtcacttccgacgaaccgggtcacttccgtctgttcgtcgatggcgaaaacattatcgacgccgactaccgcctgttctatgtccatcgcggcatggaaaaactggcggaaacccgcatgggttacaacgaagtga

SEQ ID NO: 260611 - DNA, 411 bp, Klebsiella pneumoniae
atgagtgaaaaggtggtgttcagtcaactgagccgtaaatttattgatgagaacgatgccacgcccgccgaggcgcagcaggtggtctattacagcctggcgattggtcaccaccttggggttatcgattgcctggaagcggcgctcacctgtccgtgggatgaatatctggcatggattgccactctggaggcgggcagcgaagcccgccgcaaaatggaaggcgtgccgaaatatggtgagatcgtcatcgacattaaccatgtgccgatgctggccaacgcattcgataaagcccgggctgcgcaaacttcgcagcagaaagaatggagtacaatgctgttaagtatgctgcatgatattcatcaggaaaacgccatctatttgatggtgaggagattgcgtgactga

SEQ ID NO: 260612 - DNA, 312 bp, Klebsiella pneumoniae
atgcacatcatttcgaaagcgccatttgaagagtgtgcgcgcaaatatcctaacgacgctctggctctacactcattgtatcgggttattaaggaaacggatttttctacaccagaagaaatgcgaacggcgtttcctaacctcgacaattttaaatatcgcaacaaatggtacgttctggatgtcggcgggaacaatcttagggttattgcctacataaactttgttaataagcggttctttgtgaagcacataacgaatcacgcagagtatgacaaactgacacgttactacagagagaacaaagaatga

SEQ ID NO: 260613 - DNA, 420 bp, Klebsiella pneumoniae
atgactgctaatgctgcacgcgctgttaaagcaacaagagaactggtcaatgcagtcccctttctgggaggcagtgactcagaagatgattatcgtgaagcactggaactggtcgaatatttgattgaagaagatgacaccaatccacttatcgactttctggcgagccgcattgcagaatatgaaaacaacaacgaaaagtttgcagagttcgacaaagccgttgcagcaatgccggttggcgtggccttacttcgtacgctgattgatcaacataatttgacctatgcggatttgaagaacgaaatcggctctaaatctctggtcagtcagattttgtctgggcaacgatccctgacgatatcccatattaaggcactttcagcccgatttggcgttaagccggaatggtttctttga

SEQ ID NO: 260614 - DNA, 1425 bp, Klebsiella pneumoniae
atgtcagtatttccagaaggttttttatggggcggcgcgcttgccgccaaccagtctgaaggtgcgtaccgtgaaggtggcaaagggctgaccaccgtcgatatgatcccacacggcgagcatcgaatggcggtgaaactggggctggaaaaacgttttcagttgcgcgatgacgagttttatcccagccatgaggcgacggatttttatcatcgttataaagaagatatcgccctgatggcagagatgggattcaaagtgttccgtacctcaattgcctggagccgcctcttcccgcagggcgatgaactgacgcccaaccagcagggcattgctttttaccgttctgtctttgaagagtgtaaaaagtacggtatcgaaccgctggtcacgttgtgccacttcgatgtgccgatgcatctggtcaccgaatatggctcctggcgtaaccgcaagctggtggagtttttcagccgctacgccagaatctgctttgaagcatttgatggtctggtgaaatactggctaaccttcaatgaaatcaacattatgttgcatagcccgttctccggcgcgggtctggtgtttgaagaaggcgaaaatcaggatcaggtgaaatatcaggctgcgcatcaccaactgattgccagtgcattagccaccaaaatcgcccatgaggttaacccgcaaaatcaggtgggctgtatgctggcgggcggtaacttctacccttacagttgcaagccggaagatgtctgggcggcgctggagaaagatcgggaaaacctgttttttatcgatgtgcaggcgcggggcgcgtatccggcttactctgcccgcgtattccgcgaaaaaggggtaaccatcgacaaagcaccgggcgatgatgagatcctgaaaaacaccgtcgattttgtctctttcagctattacgcctcacgctgcgcctcggcggagatgaacgccaacaatagcagtgcggcgaacgtagtgaaatcgctgcgtaacccgtatctgcaagtgagcgactggggctggggtattgatccactcggtctgcgtatcaccatgaatatgatgtacgaccgttatcagaagccactgtttctggtggaaaacggcctcggcgcaaaagatgaatttgctgccaatggtgagattaacgatgactatcgcatcagctatttacgcgaacatatccgcgcaatgggcgaagcgattgcagatggcattccgctgatgggctacaccacatggggctgtattgatttagtttccgcctctacgggtgaaatgagcaaacgctacggttttgtctacgtagaccgtgacgacgtaggcaacggcacgctgacgcgcacacgtaagaaatcgttctggtggtataaaaaagtaattgccagtaatggtgaagatttagagtaa

SEQ ID NO: 260615 - DNA, 816 bp, Klebsiella pneumoniae
gtgaaatacacctacacggtgatcccggcgctggtgatgacctggtgcctgtcatatatcgaacgctgggtggacagcattacaccggcggtgactaaaaacttcctcaagccaatgctgattgtgttgattgccgcaccgctggcaattctgctgattggcccgattggtatctggatcggtagcgccatttcggcgctggtttacaccattcatggttatctgggctggctttcagtcgccattatgggcgcgctgtggcctctgctggtaatgaccgggatgcaccgcgtctttacgccaaccatcattcagaccattgccgaaaccggcaaagaagggatggtcatgccgtcagagatcggcgctaacctgtcgctgggcggttcatcactggcggtggcgtggaaaacgaaaaacccggaactgcgccagacggcgctggctgcggcggcatcagccattatggcggggatttccgaaccggcgttatatggcgtggcgatccgcctgaaacgtccgcttatcgccagtcttatcagcggttttatttgcggcgcggttgccggtatggcggggcttgccagccactcaatggcagcgccggggctatttaccagcgtgcagttcttcgatccggcgaatccaatgagcatcgtctgggtgttcgcggtcatggcgctggcggtggtgctgtcgtttatcctcacactgttgctcggctttgaggatattcctgttgaggaagcgactgccgaggcgcgaaagcatcagagcgcacaaccgaccgtcgccaaagaagtaagtcttaattga

SEQ ID NO: 260616 - DNA, 336 bp, Klebsiella pneumoniae
atgtcattaccacactgcccaaaatgcaactccgaatacacctacgaagataacggcatgtacatctgcccggaatgtgcctacgaatggaacgacgcagaacctgcacaggaaagcgacgagctgatcgttaaagatgctaacggcaatctgctggctgacggcgacagcgttaccatcattaaagatctgaaggtgaaaggtagctcttcgatgctgaaaattggcaccaaagtgaaaaacatccgcctggttgaaggcgaccataacatcgattgcaaaatcgacggttttggtccgatgaaactgaaatctgagtttgtgaaaaagaactga

SEQ ID NO: 260617 - DNA, 444 bp, Klebsiella pneumoniae
atgccgttaagtccctacctctcttttgccggtaactgtgccgacgcaattgcttattatcaacgtacgttgggcgctgaactgctctataaaatcagcttcggcgaaatgccaaaatcagcgcaggacagcgccaagaactgcccttccggaatgcaatttcccgataccgccatcgcccacgccaatgtgcgcattgccggaagcgatatcatgatgagcgatgctataccgtcaggaaaagccagctactccggctttacgctggtgctcgattcgcaacaggtcgaagaaggaaaacgctggtttgacaaccttgccgctaacggaaaaatcgaaatggcctggcaggaaactttctgggcgcatggcttcggcaaagtcaccgataaatttggcgtaccgtggatgattaatgtcgtcaaacaacaaccaacgcactaa

SEQ ID NO: 260618 - DNA, 789 bp, Klebsiella pneumoniae
atgcaaacgattatccgtgtcgagaagctcgccaaaaccttcaatcagcatcaggcgctgcacgcggttgatctgaacattcatcacggtgaaatggtggctctgcttgggccgtcgggttccggcaaatccacccttttacgtcacttaagcggtttgattaccggcgataaatctgccggtagccatatcgagctgctgggccgcacagtccagcgcgaaggccgcctggcccgcgatatccgcaaaagccgcgccaacaccggctacatcttccaacaattcaacctggtgaatcgcctgagcgtactggagaacgtgctgattggcgcgctcggcagcacgccattctggcgcacctgttttagctacttcactcgcgagcagaaacagcgcgcgttacaggcgctgacccgcgttggcatggtgcactttgcccatcagcgcgtttccaccctctccggcggacagcagcagcgtgtggcgattgcccgtgcgctgatgcagcaggcgaaggtgattctggccgatgaacccatcgcctcgctggacccggaatcagcgcgcatcgtgatggacaccctgcgcgacatcaaccagaacgacggcatcaccgtggtcgtcacgctgcatcaggtggattacgccctgcgctactgcgaacgcatcgtcgccctgcgtcaggggcacgtcttctacgacggcagcagccaacagtttgataacgaacgctttgatcatctctatcgcagcatcaaccgcgtcgaagagaacgcgaaagctgcctga

SEQ ID NO: 260619 - DNA, 1017 bp, Klebsiella pneumoniae
atgaacgctaagataattgcctcgctggccttcaccagcatgttcagcctcagcaccctgttaagcccggcgcacgccgaagagcaggaaaaggcgctgaatttcggcattatttcaacggaatcacagcaaaacctgaaaccgcaatggacgccgttcttacaggatatggagaagaagctgggcgtaaaggtcaacgccttctttgccccggactacgcgggcattatccaggggatgcgcttcaataaagtggatatcgcctggtacggcaatctgtcggcgatggaagcggtggatcgcgccaacggtcaggtcttcgcccagacggtcgcagcggatggatcgccgggttactggagcgtgttgatcgtcaacaaagacagtccgatcaacaacctgaacgatctgctggcgaagcgtaaagatctcaccttcggcaatggcgatcctaactccacctctggcttcctcgtccccggctactacgtcttcgccaaaaacaatatctccgccagcgacttcaagcgcaccgtcaacgccgggcatgaaaccaacgcgctggccgtcgccaacaagcaggtggatgtggcgaccaacaacaccgaaaacctcgacaagctgaaaacctccgcgccagagaagctcaaagaactgaaggtgatctggaagtcgccgctgatcccaggcgatccgatcgtctggcgcaagaatctttccgaaaccaccaaagacaagatctacgacttctttatgaattacggcaaaacgccggaagagaaagcggtgctggaacgcctgggctgggccccgttccgcgcctccagcgacctgcaactggtgccgattcgccagctcgcgctgtttaaagagatgcagggcgtgaaaggcaataaagggctgaatgagcaggacaagctggcaaaaactagcgccattcaggcgcaactggatgacctggaccgcctgaacaacgcgttaagcgcgatgagttcggtgagtaaagcggtgcagtaa

SEQ ID NO: 260620 - DNA, 780 bp, Klebsiella pneumoniae
atgcaaaccatcaccatcgccccacccaagcgcagctggttctcgcttctgagctgggccattgttctcgccgtgctggtcgtctcgtggcagggcgcggaaatggccccgctcacgctgattaaagacggcggcaacatggcgacgttcgctgccgacttcttcccgcccgatttcagccagtggcaggattacctcaccgaaatggccgtcacgctgcaaatcgccgtctggggcaccgcgctggcggtggttctctccatccccttcggtctgatgagcgccgaaaacctggtgccgtggtgggtttaccagcccgtacgccgcctgatggacgcctgccgcgccattaacgaaatggtcttcgccatgctgttcgtggtcgccgtcggccttggcccgttcgctggcgtgctggcgctgtttatccacaccaccggcgtgctctccaagctgctttccgaagcggtggaagcgattgaacccggcccggtggaaggcattcgcgccaccggtgccaacaagctggaagagatcctctacggcgtgctgccacaggtgatgccgctgctgatctcctactccctctatcgcttcgaatccaacgtccgttcggccaccgttgttggcatggtcggcgctggcgggatcggcgtcaccctgtgggaagcgattcgcggtttccagttccagcaaacctgcgccctgatggtgctgattatcgtcacggtcagcctgctggatttcctctctcaacggttgcgtaagcactttatctga

SEQ ID NO: 260621 - DNA, 726 bp, Klebsiella pneumoniae
atgcacttgtctacacatccgaccagctacccaacacgctatcaggagatagccgcaaaacttgagcaggagcttcgtcaacactaccgctgcggcgactatcttcccgccgagcagcaactggcggcgcgctttgaggtgaaccgccacaccctgcgccgcgccatcgaccaactggtggaaaaaggctgggtacagcgccgtcagggcgtcggcgtgctggtgctgatgcgcccgttcgattacccgctcaacgcccaggcgcgttttagccagaacctgctggatcagggcagccatcccaccagcgaaaaactgctgtctgtgctgcgcccggcctccggtcacgtcgctgacgcgctggggataaccgagggcgagaacgttatccacctgcgcaccctgcgccgggtcaacggcgtcgcgctctgtttaatcgaccactactttgcggacctcaccctctggccgacgctgcaacgcttcgacagcggctcgctgcacgattttctgcgcgagcaaacggggattgcgctgcgccgcagccagacgcggatcagcgcccgccgcgcccaggccaaagagtgccagcgtcttgaaatcccgaatatgtcgccgctgctgtgcgtgcgcacccttaaccaccgtgacggtgaaagcagcccggcggagtactccgtcagcctgacgcgcgccgacatgattgaattcactatggagcactga

SEQ ID NO: 260622 - DNA, 453 bp, Klebsiella pneumoniae
atgcacgcagataccgcgactcgccagcactggatgtccgtactggcacacagccaaccggctgaactggcagcccgcctgaaggcgctgaacatcactgccgactatgaagtaatccgcgccgctgaaaccggcctggtgcagattcaggcgcggatgggtggcaccggcgaacgcttttttgctggcgacgccacgctcacccgcgccaccgtacgcctgactgacggcacgctcggctacagctgggtgctggggcgcgacaaacagcacgccgaacgctgcgcgctgattgacgcgctgatgcagcaaacccgccattttcaaaacttatcagaaacccttattgccccgctggacgctgaccgtatggcacgcattgccgcacgccaggccgaagtgaacgccagccgggtcgacttctttacgatggttcgcggagataacgcatga

SEQ ID NO: 260623 - DNA, 585 bp, Klebsiella pneumoniae
atgaccctggaaaccgcttttatgcttcctgtgcaggatgcccagcacagttttcgtcgcctgttaaaggccatgagcgagccgggcgtgattgtcgccctgcatcagctcaaacgcggctggcagccgctgaatatcgccaccaccagcgtgctgctgacgctggccgataacgacacgccggtgtggctttctgcgccattaagtaacgatatcgtcagccagagcctgcgttttcataccaacgcgccgctggtcaatcagccggaactggcgaccttcgcggtaacggatgaggcgatttccagcgaacagcttaacgccctttccagcggcaccgctgttgcgccagaagcgggcgcgacgctgattttacaggtcgtcagcctgagcggcgggcgcatgctgcgccttactggcgcgggtattgccgaagaacgaatgatcgctccgcagctgccggagtgcattctgcacgaacttaccgagcgcccgcacccgttcccgctcggcatcgacctgatcctgacctgcggcgagcgcctgctggctatcccgcgaaccactcatgtggaggtgtgctga

SEQ ID NO: 260624 - DNA, 285 bp, Klebsiella pneumoniae
  misc_feature (235)..(244): n is a, c, g, or t
atgtacgttgccgtgaaagggggcgaaaaggcgatcgacgccgcccacgccctgcaagagagccgacgccggggcaataccgatttgcctgaactgagcgtcgcccagattgaacagcagcttaatcttgcagtagatcgcgtgatgaccgaaggcggcattgccgaccgcgaactggcggcgctggcgctgaaacaggccagcggcgataacgtcgaagcgattttcctgctannnnnnnnnngctacgcgcctaccgcaccacgctggcgaagctggcggtaa

SEQ ID NO: 260625 - DNA, 771 bp, Klebsiella pneumoniae
atgcgtctcgaacggcgtatttcagcggtttataaagatattcccggcggccagctgcttggcccaacctacgactacacccatcgcctgctcgatttcaccctgctggcaaacggcgaagcgccgacgctgaccaccgccgacagcgcacaacagccgtcgccgcacgttttcagcctgctggcgcgtcaggggctggcgaagtttgaagaggatagcggcgcacagccggatgacatcacccgcacgccgccggtttacccctgctcacgttcttcccgtttgcagcagctcatgcgcggagacgaaggctatttgctggcgctggcctactccacccaacgcggttacggacgcaatcatccgttcgcaggcgaaatccgcagcggctatatcgacgtgtcgattgtgccggaagagctgggatttgcggtgaacgtcggcgaactgctgataactgagtgtgaaatggtcaacggttttatcgacccgccggatgagccgccgcacttcacgcgcggctacgggctggtgttcggcatgagcgagcgcaaagcgatggcaatggcgctggttgaccgcgctctacaagccccggagtacggcgagcacgcgacaggcccggcacaggatgaagagttcgtgctggcgcatgccgacaacgtcgaagccgcaggctttgtctcgcacctcaaactcccccactacgtcgatttccaggccgaactggagctactcaaacgtctgcaacaggagcagaaccatggctaa

SEQ ID NO: 260626 - DNA, 846 bp, Klebsiella pneumoniae
atggctaatctgagcggctacaactttgcttacctcgacgagcagaccaaacgcatgatccgccgcgccatcttaaaagcggtggcgatccccggttatcaggtgccgtttggcgggcgcgagatgccgatgccatacggctggggaactggtggtatccagcttaccgccagcgtgattggcgaaagcgacgtgttgaaggtgattgaccagggtgcggatgacaccaccaacgccgtgtcgattcgcaacttctttaagcgcgtgaccggggtaaacaccactgaacgtacggacgatgcgacgcttatccagacgcgtcaccgcatccccgaaacgccgctgaccgaagatcagatcattatcttccaggtgccaatcccggaaccgctgcgctttatcgagccgcgcgaaacggagacccgcactatgcacgcgctggaggagtacggcgtgatgcaggtgaaactgtatgaagatatcgcccgcttcggtcatatcgccaccacctatgcttatccggtgaaggtgaacgggcgctacgtgatggacccgtcgccgatcccgaaattcgataacccgaaaatggacatgatgcccgccctgcagctgttcggcgcagggcgcgagaagcgcatctatgcggtgccgccgtttacccgcgtggaaagcctcgatttcgacgatcacccgttcaccgttcagcagtggaatgagccatgcgccatctgcggatcgacccacagctatcttgatgaagtggtgctggatgacgccggaaaccgcatgtttgtctgctccgataccgattattgccgccaacagagcgaggcaaaaaaccaatga

SEQ ID NO: 260627 - DNA, 759 bp, Klebsiella pneumoniae
atgaatcaaccgttactttcggtcaataacctgacccacctttacgcgccgggcaaaggctttagcgatgtctcttttgatttatggccgggggaagtgctgggcatcgtcggggaatccggctccgggaagaccacgctgctgaaatcaatttccgcgcgtctgacgccgcagcaaggggagattcactatgaaaaccgttccctctatggcatgagcgaggccgaccgccgtcgcctgctgcgcaccgaatggggcgtggtgcatcagcatccactcgacggcctgcgccgccaggtgtcggcaggcggcaatatcggcgagcggctgatggcgaccggggcgcgtcattacggcgatattcgcgccaccgcgcagaagtggctggaggaggtggagattccctccaaccggatcgacgacctgccgaccaccttttccggcggtatgcagcaacgtttgcagattgcccgcaacctggtgacgcatccgaagctggtgtttatggatgaaccgaccggcgggctggatgtatcggtacaggcgcgcctgctcgatctgctgcgcggtctggtggtggagctgaatctggcggtggtgattgtcacccacgatctgggcgtcgcccgcttgctggcggaccgtttgctggtgatgaagcaggggcaagtagtggagagtgggttaaccgaccgcgtgctcgacgaccctcaccatccatatacccagctgctggtgtcatcggttttgcagaattga

SEQ ID NO: 260628 - DNA, 681 bp, Klebsiella pneumoniae
atgattaacgtacaaaacgtcagtaaaaccttcatcctgcaccagcaaaacggcgtgcacctgcccgtcctcaaccgtgcctcgctcaccgtcaacgcaggcgaatgcgtggtgcttcacggccactccggcagcggaaaatcaaccctgctgcgctcgctgtacgccaactatctgcccgacgaagggcaaatccagatcaaacacggtgaggaatgggtagacctggtcaccgcgccagcccgcaaagtggtggagatccgcaaaaccaccatcggctgggtgagccagtttctgcgcgtcatcccgcgtatttcggcactggaagtggtgatgcagcctctgctcgataccggcgtaccgcgtgaagcctgcgccgctaaagccgcgcgtctgctcacccgcctgaacgtgcctgaacgcctgtggcacctggcaccatcgaccttctccggcggcgaacagcagcgcgtcaacatcgcccgtggctttatcgtcgactatccgattctgctgctcgacgaacctaccgcctcgctggacgctaaaaacagcgccgccgtagtggaactgatccgcgaagccaaagcccgtggcgcggccatcgtcggtatcttccatgacgaagccgtacgcaatgacgtcgccgaccgcctgcacccgatgggagcctcttcatga

SEQ ID NO: 260629 - DNA, 1137 bp, Klebsiella pneumoniae; identical to SEQ ID NO: 9573

SEQ ID NO: 260630 - DNA, 558 bp, Klebsiella pneumoniae
atgacgggaaaactgatttggttaatgggggcctctggctccggaaaagacagtctgttgacggaactccgccagcgggaacaaactcagctactggtagcgcatcgctacatcacgcgcgccgccagcgccggaagtgaaaaccatatcgccctgagcgagcaggagttttttacccgcgcggggcagaaccttctggccttaagctggcacgccaacggcctgtattatggcatcggcgtcgagattgacctctggctgcacgctggatttgacgtggtggtcaacggctcacgcgcccatctgccgcaggcgcgggcgcgctatcaatcggcgctgctgcccgtttgtttacaggtttcgccggagatcctgcgccagcgcctcgaaaaccgtggtcgtgaaaatgccagtgaaattaacgcccgactggcacgcgctgcccgctatactcctcaggattgtcttacgctcaataatgacggcagcctgcgccagtcggtcgacaagctgctgacgctgattcatcagaaggagaaacaccatgcctgcttgtga

SEQ ID NO: 260631 - DNA, 435 bp, Klebsiella pneumoniae
atgcctgcttgtgagcttcgcccggctacgcagtacgacaccgacgcagtttacgcgctgatttgtgagctaaaacaggcggagtttgaccaccacgcgtttcgcgtggggtttaacgccaatctgcgcgacccgaacatgcgctaccatttggcgctgctggatggcgaagttgtcggcatgatcggcctgcatttgcagtttcatctgcatcatgtcaactggatcggcgaaattcaggaactggtggtgatgccgcaggcgcgcggtctgaacatcggcagtaaattactggcatgggcagaagaagaagcccgccaggccggggccgaaatgaccgagctttccaccaacgtgaagcgccacgacgcgcaccgtttctatctgcgcgaaggctacgagcagagccatttccgcttcaccaaggcgctgtaa

SEQ ID NO: 260632 - DNA, 759 bp, Klebsiella pneumoniae
atgagcctgaccctcacacttactggcactggcggcgcacagggcgttcccgcatggggctgtgagtgcgcggcctgcgccagagcgcggcgctcaccgcagtatcgccgccagccatgcagcggcgtcgtgaagtttaacgacgcgatcaccctgatcgacgccgggctgcacgatctcgccgatcgctggtcgcccggatcgttccagcagtttttgctgacgcactaccatatggatcacgtgcaggggctgtttccgctgcgctggggcgtgggcgatcagatcccggtctacggcccgccggatgaacagggctgcgacgatctgtttaaacatccgggcctgcttgatttcagccacacgatggaaccgtttgtggtgtttgatttacaggggttacaggtcacgcccctgccgctcaaccactcaaaactcaccttcggctatttgctggaaaccgcgcacagccgcgtggcgtggctgtctgacaccgcaggcctaccggaaaaaacgctgaaatttttacgcaataatcaaccgcaggtgatggtgattgattgcagccatccgccgcgcgaggatgcgccacgtaatcactgcgatttaaacaccgtgctggcactgaatgaggttatccgctcgccacgggtgattctgacgcatatcagccaccagtttgatgcgtggctgatggaaaacgcactgccgtcggggtttgaggcggggtttgatgggatggagattggggtggcgtga

SEQ ID NO: 260633 - DNA, 330 bp, Klebsiella pneumoniae
atgaaacgctttccgctatttcttttattcaccctgctcacgctgtccaccgttccggcccaggccgatattatcgacgacaccattggcaatattcagcaggcgattaacgatgcttataaccctgaccgtgggcgagactatgaagattcgcgcgacgacggatggcagcgtgaagtgaacgacgatcggcgcagacaatatgacgatcgccgccgccagtttgaagatcgccgcaggcagctggacgatcgccagcgccagcttgatcaggagcgtcggcagctagaagatgaagagcggagaatggaagatgagtatgggcgttga

SEQ ID NO: 260634 - DNA, 318 bp, Klebsiella pneumoniae; identical to SEQ ID NO: 9572

SEQ ID NO: 260635 - DNA, 1986 bp, Klebsiella pneumoniae; identical to SEQ ID NO: 9571

SEQ ID NO: 260636 - DNA, 276 bp, Klebsiella pneumoniae
atgccaacagttctctctcgcatggcgatgcaactcaaaaaaacagcctggataattcccgtcttcatggtttcgggatgctcattatctccggcaatcccggtgatcggcgcttattatcccagctggtttttctgcgccattgccagccttattttgacgctcatcacgaggcgaattattcagcgggcaaatatcaatctggcatttgtcggaattatttataccgccctttttgctctctacgccatgctgctctggctggcatttttctaa

SEQ ID NO: 260637 - DNA, 1032 bp, Klebsiella pneumoniae
atggaaagtacgccgaaaaaagctcctcgcagtaaattccctgctctgttagtggttgcgttggcgctggttgcccttgttttcgttatctggcgcgtagacagtgcgccatcaactaatgacgcctacgcgtcagcagataccattgatgtggtgccggaagtcagcggtcgcattgtagaactggcggtcaccgacaaccaggcggtgaaacagggcgatttgctgtttcgcatcgacccgcgcccatacgaggccaatctggcgaaagccgaagcctccctcgcggcgctggataagcaaattatgctcacccagcgtagcgttgacgcgcaacagtttggtgccgactcggttaatgccacggtagaaaaagcccgtgccgccgcgaaacaggccagtgatacattacgccgcaccgagccattactgaaagaaggtttcgtctcagcggaagacgttgaccgcgcgagaaccgcgcagcgcgccgcagaagccgatcttaatgccggattgttgcaggcgcagtcagccgccagcgccgtcagcggcgtggatgcgctggtggcgcaacgtgcggcagtggaagcggatattgcgttgacgaaactgcatctggaaatggcgaccgttcgcgcgccgtttgatggccgggtcatttccctcaaaacctccgtcgggcaatttgcttctgccatgcgccctattttcaccctaatcgacactcgtcactggtacgtgatcgccaacttccgcgaaactgatctgaaaaatattcgctcaggtacacccgcaaccattcgcctgatgagcgacagcggcaaaaccttcgagggtaaagtggattcgattggctacggcgtgctaccggatgacggcggcctggtgctgggcggcctgccgaaagtgtctcgttctattaactgggtccgcgttgcccagcgttttccggtcaaaatcatggttgataaacctgacccggaaatgttccgcatcggcacttcggcagtcgctaatcttgagccgcaataa

SEQ ID NO: 260638 - DNA, 2052 bp, Klebsiella pneumoniae; identical to SEQ ID NO: 9570

SEQ ID NO: 260639 - DNA, 1467 bp, Klebsiella pneumoniae
atgatcaatcgtcaactttcacgtctgctgttgtgcagcattctcggcagcacgacgctgatttccggctgtgccctggtacgtaaggattctgcacctcatcaacagctcaaaccggaacaaatcaaactggccgatgatattcatcttgccagctccggctggccgcaggcgcagtggtggaaacaactcaatgacccgcagttggatgccctgatccaacggacgctaagtggttcacacaccctcgccgaagcgaaactgcgggaagaaaaagcgcagtcccaggccgatttgttagatgctggttcacagttgcaggtggcagcgttagggatgctcaaccgccaacgtgtctcggcgaacggctttttaagcccttatgcgatggatgcgccagcactgggtatggacgggccgtactatacggaagccacagtcggtttgtttgccggactggatcttgatttgtggggtgtgcatcgctcagcggttgccgccgccattggcgcgcataatgccgcgctggcagaaaccgcagcagtagagctatcgctgaccacgggcgtagcgcagctttattacagtatgcaggccagctatcagatgctcgatctgttagaacaaacacgcgatgtgattgattacgcggtgaaagcgcaccagagtaaagtggcgcacggtctggaagcgcaagtgcctttccacggcgcgcgggcacagattctggcggtcgataaacaaattgctgccgttaaagggcaaatcaccgaaacgcgagaatctctgcgtgcattgattggcgcgggagccagcgatatgccggagatcaaaccggtggcattaccgcaagtccagaccggtattccggcgacactctcttatgagttgctcgccagacgcccggatctgcaagctatgcactggtatgttcaggcgtcattagatcaggtggattccgcgcgggcgctgttctatccgagctttgatatcaaagcgtttttcggcctggattctatccacctggataccttattcaaaaaaaccagtcgccagttcaactttatcccaggtctgaaattgccgctgtttgacggtggacggttgaatgccaatctcgaaggcactcgcgccgccagcaacatgatgattgaacgttacaaccagtcagtgctgaatgcggtgcgcgacgttgccgtcaacggcacgcgtctgcaaacgctcaacgacgagcgagagatgcaggctgaacgcgtggaagcaacgcgcttcacccagcgcgctgccgaggccgcctatcaacgcggcttaaccagccgcttacaggccaccgaagcccggttgccagtgcttgccgaggagatgtcattactgatgctggacagccgccgggtgatccaaagcattcagttgatgaaatcgctgggcggcgggtatcaggcaagtcccgtcgtcgagaaaaaataa

SEQ ID NO: 260640 - DNA, 690 bp, Klebsiella pneumoniae
atgaaaaaaattatcgcattgatgttgtttttgacattctttgcccacgcgaacgactccgagcctggcagccagtatttaaaggcagcagaggccggggaccgacgcgcacaatattttcttgccgacagctggtttagctccggcgatttgagcaaagccgaatattgggcacagaaagccgccgacagcggtgatgctgatgcctgcgcgctgttggcgcagatcaaaatcaccaatccagtcagtctggactatccacaagcaaaagttcttgcagagaaagcggcgcaagcggggagtaaagaaggtgaagtaacgctggcgcatattctggtaaatacgcaagcgggtaaaccggattatccaaaggcgatttcgctgttagaaaacgcttcggaagatctggagaacgactctgccgtcgatgcccaaatgctgcttggtttgatttacgccaacggcgtgggcattaaggccgacgatgacaaggcaacctggtatttcaaacgcagctctgcgatttcccgaaccggttattccgagtactgggcgggaatgatgttcttaaatggtgaagaaggttttatcgagaagaacaagcaaaaggcgctgcactggttaaatctgagctgtatggaagggtttgataccgggtgtgaagagtttgaaaaattaactaacggttaa

SEQ ID NO: 260641 - DNA, 597 bp, Klebsiella pneumoniae
atgaaaccgcctcaaataccggtgaaaatgctgacaacactcacgatattgatggtatttctctgtgtcggcagttatctgctaagtccaaaatggctggcggtgcgtgcggagtatcagcgtcagcgcgatccgctacatcagtttgccagccagcaaaccccggaagcgcagcttcaggcattgcaggataaaatccgcactaatccacaaaacagcgaacaatgggcgttactgggcgagtattatctgtggcaaaacgattacagcaattcgctgctggcttaccgtcaggcgttgcaactacgtggtgagaacgctgaactgtatgcggcgctggcgacggtgctttattaccaggctagccagcatatgaccgcccagactcgcgcaatgatcgacaaagccctcgcgctggactctaacgaaatcaccgctctgatgctgctggcttccgatgcgtttatgcaggcgaattacgcgcaagccatcgaactatggcaaaaagtgatggatctcaactcaccccggatcaacaggacacagctggtcgagtcgattaatatggcgaaattgttgcagcggagatcagattaa

SEQ ID NO: 260642 - DNA, 384 bp, Klebsiella pneumoniae
atgaataaaggacttctcacgctactgctgttatttacctgttttgcgcgcgctcaggttgtagacacctggcaattcgccaatccgcaacaacaggaacgggcgttaaatattgccagccagttacgttgtccgcagtgccagaatcagaacttactggaatccaatgcgccggtggcagttagtatgcgccatcaggtttacagcatggtggcggaggggaaaagtgaagtcgaaatcattggctggatgaccgaacgctacggagattttgttcgctataacccaccgttaacgggtcagacgctggtattgtgggctctgccagtggtgttgttactgctgatggcactgatcctctggcgagtgagggcgaagcgatga

SEQ ID NO: 260643 - DNA, 1683 bp, Klebsiella pneumoniae
ttgttgttaagtctcggggtcaacgtgttgaccccgttgacggccttcgcgggagtgcggttgcgctggcctgccatgatgcgactcacttgcatcggcattctggcgcagttcgcgctcctgctgctcgcctttggcgtactgacgtactgttttctcatcagcgatttctcggtcatttatgtcgcccaacatagctacagcctgctgtcgtgggaactcaaactggcggcggtgtggggcggtcatgaaggttcgctgctgctttgggtgctgttgctttccgcctggagcgcgctgtttgcctggcattatcggcagcaaaccgatccgctatttccgctgacgctagccgttttatctctcatgctcgccgcactgctactgtttgtggtgctgtggtccgatcccttcgtgcggatatttccaccagcaatcgaaggccgcgatctcaatccgatgctgcaacatcccggtcttatctttcatccgccgctgctttatctcggctatggcggtttgatggtggcagcgagcgtggcgctggggagtttactgcgcggcgagtttgatggtgccagcgcccgaatttgctggcgctgggcactacctggctggagcgcattaacggcggggatcatcctcggttcctggtgggcctattgcgaactgggctggggcggctggtggttctgggatccggtggaaaacgcctctttattaccctggctttctgccactgcgctgctgcacagtttgtccctgacacgccagcgggggattttccgccactggtcgctgttactggcgatagtcactctgatgctgtcgctgctgggtaccttaattgtccgttctggcattctggtttcggttcatgcgttcgcgctggataacgtccgcgccgtgccgttgttcaccctgtttgcactgattagccttgcgtctctggctctgtatggctggcgagcgcgggacggtggcccggcggtgcatttttcggggttatcgcgggaaatgttaatcctcgctacgctgttgctgttttgcgcagtgctattgatcgtgctggtgggaacgctttatccgatgatttacggcctgctgggctggggacgcctctccgttggcgcgccgtattttaaccgcgcgacgttaccgtttggtctgttgatgctggtggtgattgtgctggcgacgtttgtctctggcaaacgcgtgcagcttccggcgctggtagctcatgcgggcgtgctgttatttgccgcggggatcgtggtctccagcgtcagccgtcaggagatcagcctgaatttacagccgggtcagcaggtgacgctggcaggatacaccttccgttttgagcgcctcgatctgcaagccagaggcaattacaccagcgaaaaagcgatagtggcactgtttgaccatcagcaacgtattggtgaactgacgccggagcggcgtttttacgaagcacgccgtcagcaaatgatggagccgtcaattcgctggaacggcatccatgactggtatgcggttatgggggagaaaactgggccggatcgttacgcttttcgtttgtatgtacaaagcggtgtgcgctggatctgggggggaggattgttgatgattgcgggcgcattgttaagcggatggcgggggaggaagcgcgatgaataa

SEQ ID NO: 260644 - DNA, 957 bp, Klebsiella pneumoniae
atgacgcagacttccgcatttcattttgaatcgctggtgtgggactggccgattgccatctacctgtttttgattggtatttctgccggtctggtgacactggccgtgctgttacgtcgcttctacccgcaggcgggcggtgcagacagtacgttgttgcgcaccacgctgattgtcgggcctggcgcggtgatccttggtctgttgatcctcgtcttccacctgacaagaccgtggaccttctggaagctgatgttccactacagttttacctcggtgatgtcgatgggggtgatgctgtttcagctctacatggtggtgctgttgctgtggctggcgaaaatctttgaacatgatttgcttgccctgcaacaacgctggttgccgaagctggggttcgtgcaaaaggttctgagcctgctgacgcccgttcatcgcggactggaaacattgatgctggtgctggcggtgctgctgggggcttataccggctttctgctatcggcgctgaaatcgtatccgttcctcaataacccgatcctgccggtgctgttcctcttctccggcatctcgtccggtgcggcggtggcgctgatcgccatggcgatacgccaacgcagtaacccgcattccacggaagcgcactttgtacaccgtatggagatccctgtggtatggggcgaaatcttcctgctggtggcgttttttgtcggtctggcgctgggcgatgacggtaaagtgcgtgcgctggtggcggcattgggcggcggtttctggacgtggtggttctggcttggtgtcgccgggctggggttgattgtgccaatgttgctcaaaccgtgggtcaatcgcagttccggcattcctgccgtgctggcggcgtgtggggccagcctggtcggcgtgttgatgttgcgatttttcattctctacgccgggcagttaacggtggcgtaa

SEQ ID NO: 260645 - DNA, 672 bp, Klebsiella pneumoniae
atgacctggtcacgtcgccagtttctcaccggcgtcggcgtgctggcagccgtcagcggcaccgcagggcgcgtggtggcgaaaacgttgaatatcaatggggtgcgttacggcatggtgcatgacgagtcgttatgtatcggctgtaccgcctgtatggatgcttgtcgggaagtgaacaaggtgccggaaggcgtctcgcgcctgacgattattcgtagcgagccgcagggcgaatttcctgatgtgaaatatcgcttcttccgtaagtcttgccagcactgcgatcatgcgccgtgcgttgacgtctgcccgaccggtgcgtcttttcgtgatgccgctagcgggattgtcgatgttaacccggatctctgcgtcggttgtcagtactgcatcgccgcctgtccgtaccgcgtgcgctttatccatccggtcacgaagacagcggacaaatgcgatttctgccgtaagaccaatttgcaggccggtaagctgcccgcgtgcgttgaggcttgcccgacgaaggcgctgacgtttggcaatctggacgatcccaacagtgagatttcgcaactgctgcgccagaagcccacttaccgctacaagctggcgctgggaaccaaaccgaagctgtaccgcgtaccgtttaaatacggggaggtgagccaatga

SEQ ID NO: 260646 - DNA, 567 bp, Klebsiella pneumoniae
atgagcgtattacgttcgttattaactgccggggtgctggcgtcgggcctgttgtggagcctgaacggaattaccgctacccctgcggcgcaggcatctggtgatcgctacgaagttacccagcagcgtaacccggatgccgcctgtctggactgtcataagccagataccgaaggtatgcatggcaaacatgcttccgttatcaacccgaataacaaactgccggtcacctgcaccaactgtcacggccagccatcaccgcaacaccgcgaaggggtgaaagatgtgatgcgctttaacgagccgatgtacaaggttggagagcagaacagcgtctgtatgtcctgccatctgccggaacagttgcaaaaagcgttctggccacacgatgtccacgtaaccaaagtggcgtgcgccagctgccattccctgcatccacagcaagatacgatgcagacgttaagtgacaaaggacggattaagatttgcgtcgattgccacagcgatcagcgcaccaatccgaactttaacccggcgtctgttccgttgcttaaggagcagccatga

SEQ ID NO: 260647 - DNA, 1437 bp, Klebsiella pneumoniae
atgacaaggataaaaataaacgcacgccgtatcttcagcttattgattccttttttctttttcacttctgttcacgctgaacaaacggcagctcccgcaaaacctgtaactgttgaagcgaagaatgaaacctttgccccgcaacatcccgatcaatatctctcctggaaagccacctcggaacagtcagagcgtgttgacgccctggcggaagatccacggctggtgatcctgtgggcggggtatcccttctcgcgcgattacaacaagccgcgtggacatgcctttgctgtgaccgatgtgcgtgaaaccctgcgcaccggtgcgccgaaaaacgctgaagatggtccgctaccgatggcatgctggagttgtaaaagcccggatgtggcgcgtctgatccagaaagacggcgaagatggctacttccacggaaaatgggcgcgcggcggcccggaaatcgtcaacaacttaggttgtgccgattgccataacaccgcctcaccagagttcgccaaaggcaaaccggagttaaccctttcccgtccgtatgcggctcgcgcgatggaagccattggtaaaccttttgagaaagccggacgtttcgaccagcaatcgatggtttgcggtcagtgccatgtggagtattacttcgacggcaaaaacaaagcggttaaattcccgtgggatgacggcatgaaagtcgaaaatatggagcagtattacgacaaaattgccttctctgactggactaactccctgtcgaaaacgccaatgctgaaagcgcagcacccggaatatgaaacctggacagcgggcattcatggcaaaaacaacgtgacctgtatcgattgccatatgccaaaagtgcagaacgccgaaggcaaactctacaccgaccataaaattggtaatccgtttgataacttcgcccagacttgtgcgaactgccatacccaggacaaagctgccttgcaaaaagtggtcgcggaacgtaagcagtcgattaacgacctgaaaatcaaggttgaagatcaactggttcacgctcacttcgaagcgaaagcggcgctggatgcaggcgcgacggaagccgaaatgaagccgattcaggacgatatccgtcatgcccagtggcgttgggatctggcgatcgcttcccacggcattcatatgcacgcaccggaagaaggtctgaggatgctcggtacggcgatggataaagcggcggatgcgcgcactaaactggcgcgactgctggcaaccaaaggcatcacccatgaaatccagatcccggatatctcgaccaaagagaaagcccagaaggccattggcctgaacatggaacaaatcaaggccgagaagcaggacttcatcaaaacggtgatcccgcagtgggaagagcaggcacgtaaaaacggtctgttaagccaataa

SEQ ID NO: 260648 - DNA, 315 bp, Klebsiella pneumoniae
atgaatggtacgatttatcagcggatagaagacaatgcgcatttcagggagttagtcgaaaaacggcaacggtttgccaccatcctgtcgattattatgctggcagtttatatcggctttattttactgatcgccttcgcgcccggctggctgggcactccgctgaatccgaacaccagcgtcacacgcggtattccgattggtgttggggtaattgtgatctcctttgttctcactggtatctacatctggcgggcgaacggcgaattcgaccgtcttaataatgaagtcctgcatgaggtacaagcatcatga

SEQ ID NO: 260649 - DNA, 1293 bp, Klebsiella pneumoniae; identical to SEQ ID NO: 9569

SEQ ID NO: 260650 - DNA, 1650 bp, Klebsiella pneumoniae
atggaaatcttcttcaccatactgataatgaccctcgtggtctcgctgtccggggtggtcactcgtgtcatgccctttcagatcccgcttccgcttatgcaaatcgccatcggtgcgctactggcgtggccgacgtttggtttgcatgtggagtttgatcctgaactctttttagtcttgtttatcccgccgttgctgttcgctgatggctggaaaacgccgacccgtgaatttctcgaacatggtcgagagattttcggcctcgcgctggcgctggtggtggtcaccgtggtcggcattggcttccttatttactgggtggtgccgggcattccgctgatccccgcctttgcgctggcggcggtgctttctccgaccgatgctgtggcgctctccgggattgttggcgaagggcgcatcccgaaaaaaatcatgggcattttgcagggcgaagcgttgatgaatgacgcctctggcctggtgtcgttgaagtttgccgtagcagtggcgatggggacgatgatcttcaccgttggcggtgcgacggtcgaatttatgaaagtagccattggcggtattctcgccggttttgtggtgagctggctgtacggtcgctcgctgcgattcctcagccgctggggcggtgatgaacccgcgacgcagatcgtcctgctgttcctgctgccattcgcttcttatctgattgccgaacatattggcgtttccggcatcctcgctgcggttgctgccgggatgaccatcacccgctccggtgtgatgcgccgtgcgccgctggcaatgcgcctgcgcgcaaacagcacctgggcgatgctggaatttgtctttaacggcatggtattcctgctgttaggtctgcagctgccgggtattctggagacgtcgctgatggcggcagaaatcgaccctaacgtcgaaatctggatgctgtttaccgatatcattctgatttatgcggcgctgatgctggtccgtttcggctggctgtggacgatgaaaaagttcagcaaccgcttcctgaaaaagaagccgatggagtttggttcgtggaccacacgagaaatcctgatcgcgtctttcgccggggtgcgtggggcgatcactctggctggtgtgctctctatcccgctgctcttgccggatggtaacgtcttcccggcgcgctatgagctggtattcctggcggctggtgtcattctcttctcgctgtttgtcggcgtggtgatgttgcctattctgctacaacacattgaagtcgcggaccattcgcaacaattgaaagaggaacgtattgcgcgagcggcaacggcagaagtggcgattgtggcgatccagaaaatggaggagcgtctggcggcggataccgaagagaatatcgataaccagctgctcacggaggtcagttctcgcgtcattggtaacctgcgtcgtcgcgccgatggacgtaacgacgttgaaagttccgtgcaggaagagaaccttgagcgtcgcttccgtctggcggcattgcgttctgaacgtgctgaactgtaccacctgcgcgccacgcgggagatcagcaatgaaacgctgcaaaaattactgcacgatctcgatttgcttgaagcgttgttgattgaggaaaatcagtaa

SEQ ID NO: 260651 - DNA, 1350 bp, Klebsiella pneumoniae
atgtctacgccatcagcgcgtaccggcggttcactcgacgcctggtttaaaatttcacaacgtggaagcactgtccgtcaggaagtggttgccgggttaacaacatttctggcgatggtctactcggttatcgtcgttccaggcatgttgggtaaagcaggcttcccgcctgcggcagttttcgttgcgacctgtctggttgccggactcggttctatcgtgatgggtctgtgggctaatctgccgttggcgattggttgcgccatctccctgacggcgtttaccgcattcagtctggtgctggggcaacatattagcgtacctgtcgcgctgggtgctgtgttcctgatgggtgtactgtttacggtaatttctgccacgggtatccgtagctggattttgcgcaacttgccgcacggtgtggcgcacggcacggggatcggtatcggtctgttcctgctgctcattgccgctaatggtgtcggtctggtgattaaaaacccgcttgatggtctgcccgttgcgctgggtgatttcgcgaccttcccggtgattatgtcactggtaggtctggcggtgatcatcggcctggaaaaactgaaagtccctggtggcattctgctgaccattatcggtatctcaattgtcggtttgatcttcgatcctaacgtccatttctccggcgttttcgccatgccttcattgagcgatgaaaacggcaattcactgattggtagcctggacattatgggcgcgctgaatcctgtagtcctgccaagcgttctggcgctggtgatgacggcagtatttgatgccaccggaactatccgcgccgtcgccggtcaggcgaacctgctggataaagatgggcagatcattgacggtgggaaagcactgaccaccgactccatgagcagcgttttctctggcctggtgggtgcagctccggcagcggtatacatcgagtctgcggcgggtacggcggcgggcggtaaaaccgggttgacggctatcaccgttggcgtgctgttcctgctgattctgttcctctctccgctctcttacctcgttccggggtatgcaacggctccggcgctgatgtacgttggcctgctgatgctgagtaacgtggcgaaaatcgactttgctgattttgttgatgcgatggcgggtctggttacggcggtattcatcgtgctgacctgtaacatcgtaacaggcatcatgatcggcttcgcgactctggtgattggtcgtctggtttccggcgaatggcgcaagttgaacatcggtacggtcgttatcgctgtggcgctggtgaccttctatgcgggtggctgggctatctaa

SEQ ID NO: 260652 - DNA, 465 bp, Klebsiella pneumoniae
atggaaaagaaattaccccgcattaaagcgctgctaacccccggcgaagtggcaaaacgcagcggtgtggcggtatcggcgctgcatttctatgaaagcaaagggttgattagcagtatccgtaatagtggcaatcagcggcgatataaacgtgatgtgttgcgatatgtcgcaatcatcaaaattgctcagcgtattggcattccgctggcgaccattcgtgaagcattcggcgtgttgcccgaagggcatacattaagtgcgaaagagtggaaacagctttcgtcccaatggcgagaagagttggatcggcgcattcataccttagtggcgctgcgtgacgagctggacggatgtattggttgtggctgcctttcgcgcagtgattgcccattgcgtaacccgggcgaccgcttaggagaagaaggcacaggcgcacgcttgctggaagatgaacaaaactaa

SEQ ID NO: 260653 - DNA, 324 bp, Klebsiella pneumoniae
atgtcccatcagaaaattattcaggatcttatcgcatggattgacgagcatattgaccagccgcttaacattgacgtcgtcgcaaaaaaatcaggctattcaaagtggtacttacagcggatgttccgcacggtgacgcatcagacacttggtgattacattcgccaacgccgcctgttactggccgccgttgagttgcgcaccaccgagcgtccgatttttgatatcgcaatggacctgggttatgtctctcagcagaccttctcccgcgttttccgtcggcagtttgatcgcactcccagcgattatcgccaccgcctgtag

SEQ ID NO: 260654 - DNA, 1587 bp, Klebsiella pneumoniae; identical to SEQ ID NO: 9568

SEQ ID NO: 260655 - DNA, 282 bp, Klebsiella pneumoniae
atggctaccctcaccactggcgtggttcttcttcgctggcaacttcttagtgccgtaatgatgtttctggccagcacactcaacatccgttttcgtcggtctgattatgtcgggcttgcagtgatcagcagcggtctgggcgtagtttccgcctgctggttcgcaatggggttgcttggcatcacaatggcggatatcaccgccatctggcacaacatcgagtcggtgatgatagaagagatgaatcagacaccgccacaatggccaatgattttgacttga

SEQ ID NO: 260656 - DNA, 537 bp, Klebsiella pneumoniae
atggccagcagaggcgtaaacaaggttattctcgttggtaatctgggtcaggacccggaagtacgctacatgccaaatggtggcgctgttgccaacattacgctggctacttccgaatcctggcgtgataaagcgaccggcgagatgaaagagcagactgaatggcaccgcgttgtgctgttcggcaaactggcagaagtggccagcgaatatctgcgtaaaggttctcaggtttatatcgaaggtcagctgcgtacccgtaaatggaccgatcaatccggtcaggatcgctacaccactgaagtggtggtgaacgttggcggcaccatgcagatgctgggtggtcgtcagggtggtggcgctcctgcaggtggcaatatcggtggtggccagccgcagggcggttggggtcagcctcagcagccgcagggcggcaatcagttcagcggcggcgcgcagtctcgcccgcagcagtctgctccggcagcaccgtctaatgagccgccgatggactttgatgacgatattccgttctga

SEQ ID NO: 260657 - DNA, 2823 bp, Klebsiella pneumoniae
atggataagatcgaagttcggggcgcccgcacccataatctcaaaaacatcaacctcgttatcccccgcgacaaacttattgtcgtgaccgggctttcgggttctggcaaatcctcgctcgctttcgacaccttatatgccgaagggcagcgccgttacgttgaatccctttccgcctacgcgcggcagtttctgtcactgatggaaaagccggacgtcgatcatattgaggggctttctcctgccatctcaattgagcagaaatcgacgtctcataacccgcgttctacggtggggacaatcaccgaaatccacgactatttgcgtttgttgttcgcccgcgtcggtgagccgcgctgcccggaccacgatgtaccgctggcggcgcaaaccgtcagtcagatggtggataacgtgttgtcccagccggaaggtaaacgcctgatgctgctcgcaccaatcattaaagagcgcaaaggcgaacacaccaaaacgctggaaaatctggcaagccagggttacatccgtgctcgtattgatggcgaagtctgcgatctttccgatccgccgaaactggaactgcaaaagaaacataccattgaagtggtggttgatcgcttcaaggtgcgtgacgatctcacccaacgtctggcagagtcgtttgaaaccgcgctggagctttccggtggtaccgcggtagttgccgatatggacgatccaaaagcggaagagctgctattttccgccaacttcgcctgcccaatttgcggctatagtatgcgtgaactggaaccacgcctgttttcgtttaacaacccggcgggggcctgcccaacctgtgacggccttggcgtgcagcaatatttcgatcctgaccgcgtgatccagaatccggaactgtcgctggctggcggtgcgatccgaggctgggatcgccgcaacttctattacttccagatgctgaaatcgctggcagatcactataagttcgacgtcgaagcgccgtggggcagcctgagcgcgaacgtgcataaagtggtgttgtacggttctggcaaagaaaacattgaattcaaatacatgaacgatcgtggcgatacctccattcgtcgtcatccgttcgaaggcgtgctgcacaatatggagcgccgttataaagagacggaatccagtgcggtacgtgaagaattagccaagtttatcagcaatcgcccgtgcgccagctgcgaaggaacccgtctgcgtcgggaagcgcgccatgtgtatgtcgagaatacgccgctgcctgctatctccgacatgagcatcggtcatgcgatggaattcttcaacaatctcaaactcgcaggtcagcgagcgaagattgcggaaaaaattcttaaagagattggcgatcgcctgaaattcctcgttaacgtcggcctgaattacctgacactttcccgctcggcagagacactttctggcggtgaagcccagcgtatccgtctggcgagccagattggtgcgggcctggttggcgttatgtacgtgctcgatgagccgtctatcggcctgcaccagcgcgataacgagcgcctgttgggtacgcttatccatctgcgcgatctcggtaataccgtgattgtggtggagcacgacgaagacgcgattcgcgccgctgaccatgtgatcgacattggtcctggtgcgggtgttcacggcggtgaagtggtcgcggaaggtccactggaagcgattatggcggtgccggagtcgttgaccgggcagtacatgagcggtaaacgcaagattgaagtgccgaagaaacgcgttccggcgaatccggaaaaagtgctgaagctgacaggcgcacgcggtaataacctgaaagacgtgacgctgacgctgccagtcggtctgtttacctgcatcacaggggtttcaggttccggtaaatcgacactgattaacgacacactgttcccgattgcccaacgccagttgaatggggcgaccatcgccgaaccggcaccgtatcgcgatattcagggactggagcatttcgataaagtgatcgatatcgaccaaagcccaattggtcgtactccgcgttctaacccggcgacctataccggcgtgtttacacctgtgcgcgaactgtttgcgggcgtaccggaatcccgtgcgcgcggctatacgccgggacgtttcagctttaacgtccgtggcgggcgctgcgaagcctgtcagggcgatggcgtgatcaaagtggagatgcacttcctgccggatatctacgtgccgtgcgaccagtgcaaaggtaaacgctataaccgcgaaacgctggaaattaagtacaaaggcaaaaccatccacgaagtgctggatatgaccatcgaagaggcgcgtgagttctttgatgcggtgccagctctggcgcgtaagctgcaaacgttgatggacgttggcctgacgtacattcgcctcgggcagtccgcaaccacgctttctggtggtgaagcccagcgcgtgaagctggcgcgtgagctgtcaaaacgcggcaccgggcagacgctgtatattcttgatgagccgaccaccggtctgcacttcgccgatattcagcaactgctcgacgtactgcataaactgcgcgatcagggcaacaccattgtggtgattgagcacaatctcgacgtgatcaaaaccgctgactggattgtcgacctgggaccagaaggcggcagtggcggcggcgaaatcctcgtctccggtacgccagaaaccgtcgcggagtgcgaagcttcgcatacggcacgcttcctcaagccgatgctgtaa

SEQ ID NO: 260658 - DNA, 357 bp, Klebsiella pneumoniae
atgaccatttcggagttgctacaatattgcatggcaaaaccaggcgcagaacagagcgtgcataacgactggaaagcgacgcagatcaaagtggaagatgtactgtttgcgatggtgaaagaagtagaaaatcgcccggcggtttcgctgaaaaccagcccggagctggcggagctgctacgtcagcagcacagcgatgtgcgtccaagccgccatctgaataaagcgcactggagcaccgtgtatctcgacggttcgctgccagattcgcaaatctattatctggtggatgcgtcttatcagcaggcggtgaatttgctgccggaagaaaaacgtaaattgctggtgcaactctga

SEQ ID NO: 260659 - DNA, 417 bp, Klebsiella pneumoniae
atgtggtatcaaaagacgctcacgcttagcgccaaatctcgtgggtttcatctggtaacggatgaaattctgaatcagctggctgatatgccgcgcgttaacatcggtttactgcatctgttgctgcaacatacctccgcctctctgacacttaatgagaactgcgatcccaccgtacgccacgacatggagcgttttttcctccgcaccgttcccgacaacggaaattatgagcatgactatgagggagcagacgatatgccttctcatatcaaatcctcaatgctgggaacatcgcttgtattgccggtgcataaagggcgtattcagaccggcacctggcaaggcatctggctgggggaacatcgcatccacggcggatcgcgtcgcattatcgcgacactacaaggggagtaa

SEQ ID NO: 260660 - DNA, 714 bp, Klebsiella pneumoniae
atgcgcaagatcacacaggcaatcagtgccgtttgcttattgttcgctctaaacagttccgctgttgccctggcctcatctccttcgccgcttaaccctggtactaacgttgccaggcttgctgaacaggcaccaattcattgggtttcggtcgcacaaattgaaaatagcctcgcagggcgtccgccaatggcggtggggtttgatatcgatgacacggtacttttttccagtccgggcttctggcgcggcaaaaaaaccttctcgccagaaagcgaagattatctgaaaaatcctgtgttctgggaaaaaatgaacaatggctgggatgaattcagcattccaaaagaggtcgctcgccagctgattgatatgcatgtacgccgcggtgacgcgatcttctttgtgactggtcgtagcccgacgaaaacagaaacggtttcaaaaacgctggcggataattttcatattcctgccaccaatatgaatccggtgatctttgcgggtgataaaccagggcaaaatacaaaatcgcaatggctgcaggataaaaatatccgaattttttatggcgattccgataacgatattaccgccgcacgcgatgtcggcgctcgtggtatccgcattctgcgcgcctccaactctacctacaaacccttgccacaagcgggtgcgtttggtgaagaggtgatcgtcaattcagaatactga

SEQ ID NO: 260661 - DNA, 504 bp, Klebsiella pneumoniae
atgaatatatcatatgtgaatagcaacaaaatgacatctttacctgttgagctagatgcactaaataataaagatatctcttattccaaagatttttcttatgccaaagatctctttttatatatagaaacacagttaaaaattgcaaaagatttttgtagaccaggagaggaagtatcaagatctattgcaaataaagtttttcatgcatttattgatttagttaacaaaatcagaggcaagaaagattgtatgtatatttgcacactttgctgttttgccgaggaggttaaaggtgattattctcattacagaacctttttatttgatattggtaatcaatataaggttaaacttacacaaagcggaaaaaaagagttctctttaacattagaatttaacgatactataattgaatctcagaaagtcacaggcaataaggcaaagcatattcttgaggatatagaaatattctatcgtaacaaacccgatacttattattaa

SEQ ID NO: 260662 - DNA, 1194 bp, Klebsiella pneumoniae
gtgtttcaaaaagttgacgcctacgctggcgacccgattcttacgcttatggagcgtttcaaagaagaccctcgcagcgacaaagtgaatttaagtatcggtctgtactacaacgaagacggaattattccccaactgaaagccgtggcggatgcggaagcgcgcctgaatgcgcagcctcatggcgcttcgctttatttaccgatggaagggcttaatagctatcgccatgccattgcgccgctgctgtttggtgcggaccatccggtactgcaacaacagcgcgtagcaaccattcaaacccttggcggctcaggggcattgaaagtgggcgcagatttcctgaaacgctacttcccggaatcaggcgtctgggtcagcgatcctacctgggaaaaccacgtagcaatattcgccggggctggattcgaagtgagtacttacccctggtatgacgaagcgactaacggcgtgcgctttaatgacctgttggcgacgctgaaaacattacctgcccgcagtattgtgttgctgcatccatgttgccacaacccaacgggtgccgatctcactaatgatcagtgggatgcggtgattgaaattctcaaagcccgcgagcttattccattcctcgatattgcctatcaaggatttggtgccggtatggaagaggatgcctacgccattcgtgccattgccagcgctggattacccgctctggtgagcaattcgttctcgaaaattttctccctttacggcgagcgcgttggcggactttctgttctgtgtgaagatgccgaagccgctggccgcgtactggggcaattgaaagcaacagttcgccgcaactactccagcccgccgaattttggtgcgcaggtggtggctgcggtgctgaatgacgaggcattgaaagccagctggctggcggaagtagaagagatgcgtactcgcattctggcgatgcgtcaggaactggtgaaggtattgagcacagagataccagaacgcaatttcgattatctgcttaatcagcgcggcatgttcagttataccggtttaagtgccgctcaggttgaccgactacgtgaggagtttggtatttatctcatcgccagcggtcgcatgtgtgtcgccgggttaaatacggcaaatgtacaacgtgtagcaaaggcgtttgctgcggtaatgtaa

SEQ ID NO: 260663 - DNA, 984 bp, Klebsiella pneumoniae
atggcaacacgaattgaatttcacaagcacggtggcccggaagtacttcaagccgtagagttcactcctgccgatccggcggagaatgaaatccaggtcgaaaataaagccatcggcatcaattttatcgacacgtatatccgcagcggcctttacccgccgccatcactacccagcggattaggtaccgaagcggcaggcatcgtgagtaaagtcggcagtggtgtaaagcatattaaggcaggcgatcgtgtagtctatgcgcagtcggcgttaggcgcttacagctcggtgcataacattaatgcggataaagcggcgattctgcctgcggcaatttcttttgagcaagctgcggcatccttcctgaaaggcttaacggtttattatctgctgcgcaaaacctatgaaattaaacccgatgagcagttcctgttccacgcagcggctggcggcgttggcttaattgcctgccagtgggcaaaagcccttggggcgaaacttatcggcactgtgggaaccgcgcaaaaagcgcagagtgcgctaaaagcgggcgcatggcaggttattaactatcgcgaagagaatctggtcgagcggttaaaagagatcaccggtggcaagaaagtgcgcgtggtgtacgattccgtgggcagagacacctgggaacggtcgctggattgcctgcaacgccgcggcttaatggtgagttttggcaactcatcaggtgcggttaccggcgtgaacttaggcattctcaatcagaaaggctcgttgtatgtgacacgcccttccctgcaaggctatatcaccacgcgggaggaattaaccgaggccagtaatgaactgttctctttgattgccagcggtgtgattaaggtcgatgtcgccgagcagcagaaatatccgctgaaggatgcgcagcgtgcgcatgagattctggaaagccgggcgacgcaaggttccagcctgttgattccataa

SEQ ID NO: 260664 - DNA, 243 bp, Klebsiella pneumoniae
atgctggaactactttttgtgattggcttttttgtcatgttgatggtcaccggcgtttcgttgctgggcattatcgccgcgctggttgtggcgacggccattatgttcctcggcggtatgctggcattgatgattaagttgctgccgtggttactcctggcgattgcggtggtgtgggttattaaggcgattaaagcaccaaaagtgccgaaatatcagcgttatgaccgctggcgttactaa

SEQ ID NO: 260665 - DNA, 324 bp, Klebsiella pneumoniae
gtgaagattaatgaatataatgagaactatctgacagctcagtttgaagaattatctcaacgtgatatgaagaagtacctgggagagatgaagcgtctggcagatgggggagaaatgaattttgatgactatctggataaaatgtcacttctggtgaatgaaggaaagctcgaacctgatattttaagcaaaatgcgagatgctgcaccgaaattaattgactttgctaagtcgtttgacccaaactcaaaggaaaagattaaaatacttacagacacttctaaattaatttatgatttattcggggttaaatcggagaaataa

SEQ ID NO: 260666 - DNA, 1569 bp, Klebsiella pneumoniae
atgttagatatagtcgaactgtcgcgcttacagtttgccttgaccgcgatgtaccacttcctgtttgtgccgctaacgctcggtatggcgttcctgctggccatcatggaaacggtctacgtcctttccggcaaacagatttataaagatatgaccaaattctggggcaagttgtttggtatcaacttcgcgctgggtgtggcgaccggtctgactatggagttccagttcgggactaactggtcttactattcccactatgtaggggatatcttcggtgcgccgctggcaatcgaaggtctgatggccttcttcctcgaatccacctttgtaggtctgttcttcttcggttgggatcgtctgggtaaagttcagcatatgtgtgtcacctggctggtggcgctcggttcaaacctgtccgcactgtggattctggttgcgaacggctggatgcaaaacccaatcgcgtccgatttcaactttgaaactatgcgtatggagatggtgagcttctccgagctggtgcttaacccggttgctcaggtgaaattcgttcacactgtagcgtctggttatgtgactggcgcgatgttcatcctcggtatcagcgcatggtatatgctgaaaggtcgtgacttcgccttcgctaaacgctcctttgctatcgctgccagcttcggtatggctgccgttctgtctgttattgttctgggtgatgaatctggttacgaaatgggcgacgtgcagaaaaccaaactggctgctattgaagccgagtgggaaacgcaacctgcgcctgctgcctttactctgttcggcattcctgatcaggaagaggagacgaacaaatttgcgatccagatcccttacgcgctgggtatcattgcaacgcgttccgtggatactccagttatcggcctgaaagaactgatggtgcagcatgaagaacgcattcgtaacgggatgaaggcgtactctctgctcgagcaactgcgttctggttctaccgaccaggcggttcgtgaccagttcaatagcatgaagaaagacctcggttacggtctgctgctgaaacgctatacgccaaacgtggctgatgcgactgaagcgcagattcaacaggcaaccaaagactccattccgcgtgtagcgccgctgtacttcgcgttccgtatcatggtggcgtgtggcttcctgctgctggcaatcatcgcgctctctttctggagtgtcatccgcaaccgcattggcgagaaaaaatggctgctgcgcgccgcgctgtacggtattccgctgccgtggattgctgtagaagcgggctggtttgtggctgaatatggccgccaaccgtgggctatcggtgaagtgctgccgacagctgtggcgaactcgtcactgaccgcaggcgatctcatcttctcaatggtgctgatttgcggcctgtataccctgttcctggtggcagaattgttcttaatgttcaagtttgcacgcctcggcccaagcagcctgaaaaccggtcgctatcactttgagcagtcttccacgactactcagccggcacgctaa

SEQ ID NO: 260667 - DNA, 1140 bp, Klebsiella pneumoniae
atgatcgattatgaagtattgcgttttatctggtggctgctggttggcgttctgctgattggttttgcagtcactgacggtttcgacatgggggtgggcatgctcacccgtttcctcggtcgtaacgacaccgagcgtcgaattatgattaactccatcgcaccacactgggacggtaaccaggtttggctgatcaccgcaggcggcgcactctttgctgcctggccgatggtctatgccgctgcgttctccggcttctatgtggcgatgatcctcgtgctggcgtctttgttcttccgtccggtcggttttgactaccgctccaagattgaagaaacccgctggcgtaacatgtgggactggggcatcttcattggtagcttcgttccgccgctggtgattggtgtagcattcggtaacctgttgcagggcgtaccgttcaacgttgatgaatatctgcgtctgtactacaccggtaacttcttccagctgcttaacccgttcggcctgctggctggcgtggtgagcgtagggatgatcattactcagggcgcaacctatctgcaaatgcgtaccgtgggcgaactgcacctgcgtacccgtgcaacggctcaggtggcggcactggtgacactggtctgcttcgcactggctggcgtatgggtgatgtacggtatcgatggttatgttgtgaaatcaacaatggaccattacgcagcctctaacccgttgaataaagaagtggttcgtgaagctggcgcatggctggttaacttcaacaacacgccaattctgtgggctattccggcactgggtgtagttctgccgctgctgaccatcctgactgctcgtatggataaagctgcgtgggcgtttgtgttctcctccctgacgctggcctgcatcatcctgactgccggtatcgcaatgttcccgtttgtgatgccgtccagcaccatgatgaacgcaagtctgacaatgtgggatgcaacttccagccagctgacgcttaacgtcatgacctgggttgcggtggttctggtaccgatcattctgctctacaccgcctggtgttactggaaaatgttcggccgtatcaccaaagaagatattgaacgtaacacccactctctgtactaa

SEQ ID NO: 260668 - DNA, 294 bp, Klebsiella pneumoniae
atgagtaagattatcgcaaccttgtatgcggtaatggacaagcgccccctgcgggcgctttccttcgtgatggcgcttctgttagcaggatgtatgttttgggacccatcacgtttcgccgcgaagaccagtgaactggaaatctggcatggtttattgctgatgtgggccgtctgtgctggtgttattcacggcgtgggctttcgtccgcagaaggttctctggcaagggattttttgccctttgcttgccgatattgttctcattgtcgggctgattttcttcttcttttaa

SEQ ID NO: 260669 - DNA, 429 bp, Klebsiella pneumoniae
atggccagagcgcgtggacgaggtcgtcgcgatctcaagtccgaaatcaacattgtaccgttgctggacgtactgctggtgctgttgctgatctttatggcgacagcgcccatcatcacccagagcgtggaggtcgatctgccagacgctactgaatcacaggcggtgagcagtaacgataatccgccagtgattgttgaagtgtctggtattggtcagtacaccgtggtggttgagaaagatcgcctggagcgtttaccaccagagcaggtggtggcggaagtgtccagccgtttcaaggccaacccgaaaacggtctttctgatcggtggcgcaaaagatgtgccttacgatgaaataattaaagcactgaacttgttacatagtgcgggtgtgaaatcggttggtttaatgacgcagcctatctaa

SEQ ID NO: 260670 - DNA, 1299 bp, Klebsiella pneumoniae
gtgtcaaaggcaaccgaacaaaacgacaagctcaagcgggcgataattatttcagcagtgctgcatgtcatcttatttgcggcgctgatctggagttcgttcgatgagaatatagaagcttcagccggaggcggcggtggttcatccatcgacgctgtcatggttgattcaggtgcggtagttgagcagtacaaacgcatgcaaagccaggaatcaagcgcgaagcgttctgatgagcagcgcaagatgaaagaacagcaggctgctgaagaactgcgtgagaaacaagcggctgaacaggaacgcctgaagcaacttgagaaagagcggttagctgctcaggaacagaaaaagcaggctgaagaagccgcaaaacaggccgagttaaagcagaagcaagcggaagaagcggcagcgaaagcggcggcagatgctaaagcgaaggccgaagcggatgctaaagctgcggaagaagctgcgaagaaagcggttgcagacgcgaagaaaaaagcagaagcagaagctgccaaagccgcagccgaagcgcagaaaaaagccgaggcagccgcggcggcactgaagaagaaagcggaagcggcagaagcagctgcagctgaagcaagaaagaaagcggcaactgaagctgctgaaaaagccaaagcagaagctgagaagaaagcggctgctgaaaaggctgcagctgagaagaaagcggctgctgaaaaggctgcagctgataagaaagcggcagcagagaaagctgcagccgacaaaaaagcagcagaaaaagcggctgctgaaaaggcagcagctgataagaaagcagcggcagaaaaagccgccgcagacaaaaaagcggcagctgcaaaagcagcagctgaaaaagccgctgcagcaaaagctgccgcagaggcagatgatattttcggtgagctaagctctggtaagaatgcaccgaaaacggggggaggggcgaaagggaacaatgcttcgccagccgggagtggtaatactaaaaacaatggcgcatcaggggccgatatcaataactatgccgggcagattaaatctgctatcgaaagtaagttctatgacgcatcgtcctatgcaggcaaaacctgtacgctgcgcataaaactggcacccgatggtatgttactggatatcaaacctgaaggtggcgatcccgcactttgtcaggctgcgttggcagcagctaaacttgcgaagatcccgaaaccaccaagccaggcagtatatgaagtgttcaaaaacgcgccattggacttcaaaccgtaa

SEQ ID NO: 260671 - DNA, 1293 bp, Klebsiella pneumoniae
atgaagcaggcattacgagtagcatttggttttctcatactgtgggcatcagttctgcatgctgaagtccgcattgtgatcgacagcggtgtagattccggtcgtcctattggtgttgttcctttccagtgggcgggtcctggtgcggcacctgaagatattggcggcatcgttgctgctgacttgcgtaacagcggtaaatttaatccgttagatcgcgctcgtctgccacagcagccgggtagtgcgcaggaagtacaaccagctgcatggtccgcgctgggtattgacgctgtagttgtcggtcaggtcactccgaatccggatggttcttacaatgttgcttatcaacttgttgacactggcggcgcaccgggtactgtacttgctcagaactcgtacaaagtgaacaagcagtggctgcgttatgctggtcataccgccagtgatgaagtgtttgaaaaactgaccggcattaaaggtgcgttccgtacccgtattgcctacgttgttcagaccaacggcggtcagttcccgtatgaactgcgcgtatctgactatgacggttacaaccagtttgtcgttcaccgttcaccgcagccgctgatgtctccggcgtggtcaccagacggttctaaactggcttatgtgaccttcgaaagcggtcgttccgcgctggtcatccaaacgctggcaaatggcgctgtacgtcaggtggcttcattcccgcgtcacaacggtgcacctgcattctcgccagacggcagcaaactggcattcgccttgtcgaaaaccggtagtctgaacctgtacgtaatggatttggcttctggtcagatccgccaggtgacggatggtcgcagtaacaataccgaaccgacctggttcccggacagccagaacctggcatttacttctgaccaggccggtcgtccacaggtttataaagtgaatatcaacggcggtgcgccacaacgtattacctgggaaggttcgcagaaccaggatgcggatgtcagcagcgacggtaaatttatggtaatggtcagctccaatggtgggcagcagcacattgccaaacaagatctggcaacgggaggcgtacaagttctgtcgtccacgttcctggatgaaacgccaagtctggcacctaacggcactatggtaatctacagctcttctcaggggatgggatccgtgctgaatttggtttctacagatgggcgtttcaaagcgcgtcttccggcaactgatggacaggtcaaattccctgcctggtcgccgtatctgtga

SEQ ID NO: 260672 - DNA, 690 bp, Klebsiella pneumoniae
atgcaggataaaaatgcgctgaacttactggcaggtacaacgcttgaggaaaatttgctaccgggaacactggaaagcctgccggaacagatgataagtctggttcctgcgggagtgtcatctgacgttctgctgcgtcgcccggatatccaggaagcggaacataatttgaagagcgccaatgccgatattggcgcggcgcgggctaacttttttccgacgatttcgctgactgccagcgctggtgttggcagtgaagcattgtcgtcgttgttcagccacggaatgcagatctggtcatttacgccatcggtcacattaccgctgttcactggcggaagtaatctggcgcagcttcgttacgcagaagcacaaaagcgtggactcattgccacctatgaaaaaaccgttcagagcgcatttaaagatgtcgctaacgcactggcgcggcggaccacgcttgaagagcaactggatgcacagcgccagtatgttaaagctgagcaacaaacggtcgatgttggcttgcgtcgctatcaggcgggtgttggtgattacctgaccgtgttgacggcgcagcgcagcttgtggagcgcacagcaggcgctgctggcactacaactgactgattttacaaaccgaatcacgctctggcagtcgctgggcggcggcatgtcatcactcaagtaa

SEQ ID NO: 260673 - DNA, 1164 bp, Klebsiella pneumoniae
atggctagagtctctctttcatgggcattgattcttggtcttttagccggtatcggcccgatgtgtaccgatctttatttgccggctttgccggagatgtctgagcaactggcggcaaccacgaccataacgcaattaaccctgaccgcatcgctgatcggtcttggcgtcggacaactgttatttggccctctgagcgacaaaatagggcgtaaacgtccgttaatcttgtcgttgctattgtttattgtttcttccattttgtgcgcgacaacgaacaatatttactggctggtggtctggcgttttattcaagggatcgcgggggcgggtggttcggtgctctctcgttctattgctcgtgacaaatatcagggagtaacgttgacccagttttttgcgctgttaatgacggtgaatggcctggcaccggtgttgtcgccagtgctgggcgggtacattgtcagcacttttgactggcgcactttattctgggtaatggctgaaattagcaccgtactgttgctgggctgcctgttatttattaatgagaccttgccagaaaataaaaggggctcatcattgctattaaccggacgaagcgtggtgcagaaccgccgttttatgcgcttttgcctgattcaaagttttatgctggccggtttgtttgcatatatcggctcttcgtcgttcgtgttgcagaaggaatttggctttagtccaatgcaatttagcctggtgtttggccttaacggcatcggacttatcattgcttcatggatcttctcgcgcctggcgcgacggattaacgcgatgacattgttgcgaggtggcctgatagcggcaattttgtgtgcattgctcacggtcttatgcgcatggacacaattgcccattccggcactggtggcattatttttcactattgcattttgtagcggcatcggcactgttggcggggcagaggctatgagtggagtagggacgcaggaatctggaacggcgtctgcgttgatggggatgagcatgtttgtcttcggcggtatagccgcgccattgtcggggtttggcggagaaacactgttaaaaatgagtctggcaattacggtgtgttatacgctggcattgctggttgctctcaccagaatcgacaatcaaaagtaa

SEQ ID NO: 260674 - DNA, 246 bp, Klebsiella pneumoniae
atgaaccacgatatcccgctaaaatattttgatattgccgatgagtacgcgaccgaatgcgcagagcctgtcgcagacgctgaacgcacaccgctggccctctacttccagttactgctcacccgtttgatgaacaatgaagagatcagcgaagaagcccaacatgaaatggctgctgaagcggggattaatcccgtacgcattgatgagatcgcagagtttttgaatcaatggggtaatgagtaa

SEQ ID NO: 260675 - DNA, 765 bp, Klebsiella pneumoniae
atggaaaatataatgaacaatccggttatcggtgtcgtaatgtgcaggaacaggcttaagggtcatgcgacccagactctgcaagaaaagtacctgaatgccatcatccacgcaggcggcttgccaattgcgctgccacatgcgctggcggaaccgtcattacttgaacaacttttgccgaaactcgatggtatttatcttcctggtagtcccagcaatgtgcagccgcacctatatggtgaaaacggcgatgagcctgacgccgatcccgggcgtgatcttctgagcatggcgttaattaatgccgcactcgaaaggcgcatccccattttcgccatctgccggggtttacaggaactggtggtggcaaccggtggttcgttgcatcgcaagctgtgcgaacagcctgaattgctggaacatcgggaagatcccgaactgccggtggagcagcaatatgcgccgtcgcatgaagttctggttgaagaggggggattactgtctgcgttgttacctgaatgtagcaacttttgggtaaactctctgcatggacaaggggcgaaggtcgttagcccacggttgcgtgttgaagctcgctcgccggatggcttagttgaggcggttagcgtcatcaatcatccttttgcgctgggcgtacagtggcacccggaatggaacagtagcgagtacgcgctttcgcgtatattgttcgagggctttatcaccgcttgtcagcaccatatcgctgaaaaacagcgactctga

SEQ ID NO: 260676 - DNA, 1488 bp, Klebsiella pneumoniae
atgaattttcatcatctggcttactggcaggataaagcgttaagtctcgccattgaaacccgcttatttattaacggtgaatatactgctgcggcggaaaatgaaacttttgaaaccgttgatccggtcacccaggcaccgctggcgaaaattgcccgcggcaagagcgtcgatatcgaccgtgcggtgagcgcagcacgcggcgtatttgaacgcggcgactggtcactctcttctccggctaaacgtaaagcggtactgaataaactcgccgattttatggaagccaacgccgaagagctggcgctgctggaaacgctcgacaccggcaaaccgattcgtcacagcctgcgtgatgatattcccggcgcggcgcgcgccattcgctggtacaccgaggctatcgacaaagtgtatggcgaagtggcgaccaccagtagccatgagctggcgatgatcgtgcgtgaaccggtcggcgtgattgccgccatcgtgccgtggaacttcccgctgctgctgacttgctggaaactcggcccggcgctggcggcgggaaacagcgtgatcctaaaaccgtctgaaaaatcaccgctcagtgcgattcgtctcgccgggctggcgaaagaagcaggtctgccggatggcgtgttgaacgtggtgacgggttttggtcatgaagcggggcaggcgctgtcgcgtcataacgatatcgatgccatcgcctttaccggttcgacccgtaccgggaaacagctgctgaaagatgcaggcgacagcaacatgaaacgcgtctggctggaagcgggcggcaaaagcgccaacatcgttttcgctgactgtccggatttgcaaaaagcggcgagcgcgaccgcagcaggcatcttctacaaccaggggcaggtgtgtatcgccggaacgcgcctgttgctggaagagagcatcgccgatgaattcttagacctgttaaaacagcaggcgcaaaactggcagccgggccatccacttgatcccgcaaccaccatgggcaccttaatcgactgcgcccacgccgactcggtccatagctttattcgtgaaggcgaaagcaaagggcaactgctgctggatggccgtaacgccgagctggctgccgccatcggcccgacgatctttgtggatgtagacccgaatgcgtccttaagccgcgaagagattttcggtccagtgctggtggtcacgcgtttcacatcagaagaacaggcgctacagcttgctaacgacagccagtacggacttggcgcggcagtatggacgcgcgacctctcccgcgcgcaccgcatgagccgtcgcctgaaagccggttccgtctttgtcaataactacaacgacggcgatatgaccgtgccgtttggcggctataagcagagcggcaatggtcgcgacaaatccctgcacgcccttgaaaaattcaccgaactgaaaactatctggataagcctggaggcctga

SEQ ID NO: 260677 - DNA, 1266 bp, Klebsiella pneumoniae
atgagcaacaatgaattccatcagcgtcgtctttctgctaccccacgcggggttggcgtgatgtgtaacttcttcgcccagtcggcagaaaacgctacgctgaaggatgtagagggcaacgaatatatcgatttcgccgcaggcattgcggtgctgaataccgggcatcgccaccctgatctggtcgcggcggtggagcagcaattgcaacagtttacccacacggcgtatcagattgtgccgtacgaaagctacgtcacgctggcggagaaaattaacgcccttgccccggtgagcgggcaggctaaaactgcgttcttcaccaccggtgcggaagcggttgagaacgcggtgaaaatcgcccgcgcccataccggacgccctggcgtgattgcgtttagcggcggcttccacggtcgtacatatatgactatggcgctgaccggaaaggtcgcgccgtacaaaatcggcttcggcccgttccccggttcggtatatcacgtaccttatccgtcagatttacacggcatttcaacgcaggactccctcgacgccatcgaacgcttgtttaaatcggacattgaagcgaagcaggtggcggcgattattttcgaaccggtgcagggcgaaggcggtttcaacgttgcaccaaaagagctggttgccgccattcgccgcctgtgcgacgatcacggcattgtgatgattgccgatgaagtgcaaagcggctttgcgcgtaccggtaaactgtttgccatggatcactacgccgataagccggatttaatgacgatggcgaaaagcctcgcgggcgggatgccgctttcgggcgtggtcggtaatgccaacattatggacgcacccgcgccgggcgggcttggtggtacctacgccgggaacccgctggcggtggctgccgcgcacgcggtgctcaacattatcgacaaagaatcactctgcgaacgcgcgaatcaactgggccagcgtctgacaaacacgctgattgatgccaaagaaagcgttccgtccatcgcggcggtacgcggtctggggtctatgattgcggcagagtttaacgatccgcaaacgggcgagccgtcagcggcgattgcacagaaaatccagcaacgcgcgctggcgcaggggctgcttctgctgacctgtggcgcatacggcaacgtgattcgtttcctgtatccgctgaccatcccggatgcgcaattcgatgcggcaatgaaaatattgcaggatgcgctgaacgattaa

SEQ ID NO: 260678 - DNA, 978 bp, Klebsiella pneumoniae
atggcagaatacaaagataatttactcggtgaggcgaacagctttctcgaagtgctggaacaggtttcgcatctcgcaccgctggacaaaccggtgctcatcatcggcgagcgcggcacaggtaaagagctgattgccagccgtctgcattatctctcctcccgttggcaggggccgtttatttcccttaactgcgcggcgttaaatgaaaatctgctggattccgaactgtttggtcacgaagcgggcgcgtttaccggtgcgcaaaaacgtcatccagggagatttgaacgtgccgacggcggtacgctatttcttgatgaactcgctacggcaccgatgatggtgcaggagaaattattgcgcgtgattgagtacggtgaactggagcgcgttggcggcagccagccattgcaggtgaatgtgcggttggtatgcgcgacgaatgccgatctcccggcgatggtcaatgaaggtacttttcgcgctgacctgctcgaccggctggctttcgatgtagtgcaactgccgcccctgcgcgagcgcgaaagcgacattatgctgatggcagaacactttgccattcagatgtgtcgggaaatcaagctgcctctgttcccggggtttacggagcgcgccagagaaacattgctgaattatcgctggccgggaaatattcgtgaattgaaaaacgtggtggaacgttcagtatatcgccacggcaccagcgattatccgcttgatgacattattattgatccctttaaacggcgtccgcctgaagacgctatcgccgtttcagaaaccacctcgcttccaacactgccgctggatttacgtgagtttcagatgcagcaggaaaaagagttgctgcaactcagtttgcaacaagggaaatataaccagaagcgcgcagctgaattgctggggttaacctatcatcagttccgcgcgttgttgaaaaagcaccagatttag

SEQ ID NO: 260679 - DNA, 669 bp, Klebsiella pneumoniae
atgggtattttttctcgctttgccgacatcgtgaatgccaacatcaacgctctgttagagaaagcggaagatccacagaaactggtgcgtttgatgatccaggagatggaagatacattggttgaagtgcgttctacttcggcgcgtgcgctggcagaaaagaaacagctgactcgccgtattgaacaagcgtcggcgcgtgaagttgaatggcaggaaaaagccgaactggcgctgctgaaagagagagaggatctggcgcgtgcggcgttaattgaaaaacagaaactgaccgatctgattaagagcctggaacatgaagtgacgctggtggacgatacgctggcacgcatgaagaaagagatcggcgagctggaaaacaaattgagcgaaacacgcgctcgccagcaggcattgatgttacgccatcaggcggcaaactcgtcgcgcgatgtgcgtcgtcagctggacaatggcaaactggatgaagcaatggctcgtttcgaatctttcgaacgtcgaattgaccagatggaagcggaagcagaaagccacagcttcggtaaacaaaaatcgctggacgatcagtttgccgaactgaaagccgatgatgcaatcagcgagcaactggcacaattaaaagccaaaatgaagcaagacaatcaataa

SEQ ID NO: 260680 - DNA, 225 bp, Klebsiella pneumoniae
atgagcgcgctatttctggctattccgttaaccatttttgtgctgtttgttttaccgatctggttatggctgcattacagcaatcgttctggtcgcagtgaattgtcgcaaagtgagcagcagcgattagcgcaactggctgatgaagcaaaacggatgcgcgaacgtattcaggcgctggaatccattcttgatgcagaacatccgaactggagggatcgctaa

SEQ ID NO: 260681 - DNA, 360 bp, Klebsiella pneumoniae
atggcgggcattaatctcaataaaaaattatggcgtattccacagcagggcatggtccgtggcgtctgcgccgggattgccaactattttgatgtaccagtaaaactggtgcgtatcctggtggtgctgtcgattttcttcggtctggcgctgtttaccctggttgcttacatcattttgtcatttgcgcttgatccaatgccggacaacatggcctttggtgagcagctaccttccagcagtgaattgctggatgaagtcgaccgtgaactggcggcaagtgaaacgcgtttacgcgagatggaacgttatgtcacttccgatactttcacgttacgtagccgtttccgtcaactgtga

SEQ ID NO: 260682 - DNA, 222 bp, Klebsiella pneumoniae
atgaatactcgctggcaacaggccgggcaaaaggtgaagcctggtttcaaattagcaggcaagctggtacttcttaccgcactgcgctatggcccggcgggtgtagctggctgggcgataaaatcagttgctcgccgaccactgaaaatgttgctggccgtggcgctggaaccgctgttaagtcgggctgccaataaactggcgcagcgttataaaaggtga

SEQ ID NO: 260683 - DNA, 315 bp, Klebsiella pneumoniae
atgtttaaaaaaggcttacttgctctgacactggtgttttcactgcccgttttcgccgctgaacactggatcgatgttcgtgttccagagcagtatcagcaagagcacgttcagggagccatcaatattcccctgaaggaagtgaaagagcgcattgccaccgccgttccggataaaaacgacaccgtgaaagtgtattgcaatgccggacgccagtcagggcaggcaaaagagatccttagcgagatgggatatacccacgttgagaacgccggcggcctgaaagacatcgcaatgccgaaggtcaaaggttaa

SEQ ID NO: 260684 - DNA, 1398 bp, Klebsiella pneumoniae
atgaagcgacttaaaaatgaacttaatgcgctggtgaatcggggtgtcgacagacatctgcgcctcgctgtaaccggacttagccgcagcggcaaaacagcgtttatcaccgcgatggttaatcagttgctcaatattcatgccggagcacgtttgccgcttttaagtgcggtgcgtgaagagcgcctgctgggcgtaaaacgcattccccagcgtgactttggcattccgcgcttcacctatgatgaagggttggcgcagttatatggcgatcctcccgcctggccgacgcctacgcgcggcgtcagtgaaattcgcctggcgttacgttttaaatcgaacgattcgctgctacgccactttaaggacacctccacgctgtatctggaaattgtggattaccccggcgaatggttgctcgacctgccgatgctggcgcaggactatttaagctggtcgcgccagatgacgggcttactcaatggtcagcgcggcgaatggtcggcgaaatggcgaatgatgtgcgaagggctggacccgctagcgcctgccgacgaaaaccggctggcagacattgccgccgcctggaccgagtatctccaccactgcaaacagcaggggttgcactttattcagcctgggcgctttgtcttgccgggagatatggcaggagcacccgcgctgcaattcttcccgtggccggatgtcgatgcctggggcgagtccaaactggcgcaggccgataagcataccaatgccggaatgctgcgcgagcgctttaattattattgcgagaaggtggtgaaggggttctataagaatcattttctgcgctttgaccgccagattgtgctggtggattgcctgcagcctctcaacagtgggccacaggcatttaatgatatgcgtctggcgctgacgcagctgatgcaaagtttccactacgggcagcgaaccctgttccggcgtttgttttcgccggttatcgataagctattgtttgctgcgactaaagcagaccatgtgaccatcgatcagcacgccaatatggtttcattactgcaacaactaattcaggatgcctggcaaaatgcggcgttcgaagggatcagcatggactgcctggggctggcgtcagttcaggcgaccaccagcggcattattgatgttaacggtgagaaaatcccggcgctgcgcggtaatcgactcagtgatggcgcaccgctcactgtttatcctggcgaagttcccgcacgtttgcctggtcaggcgttctgggataagcaaggcttccagtttgaggcgtttcgtccgcaggtgatggatgtcgacaaaccgctaccgcatattcgtcttgatgctgcgctggaatttttaataggagataaattgcgatga

SEQ ID NO: 260685 - DNA, 1062 bp, Klebsiella pneumoniae
atgaccgaaccgttaaaaccacgtattgatttcgacggtccactggaggtcgatcagaatccaaaattcagggcgcaacagacctttgacgaaaatcaggcgcaaaattttgccccggccacgctcgacgaagcgcaggaagaagaggggcaagttgaagcggtgatcgacgcagcgttacgtccgaaacgcagcctgtggcgcaaaatggtgataggcgggttggctctgtttggcgcaagcgttgtcgggcagggcgtgcagtggacaatgaacgcctggcaaacccaggactgggtggcgctgggtggatgtgccgctggggcattgattatcggcgctggcgtaggttctgtggtaacagagtggcggcgcttatggcgcttgcgacagcgcgcccatgaacgcgacgaagcgcgcgatttgttgcacagtcacggcacgggtaaaggccgtgcattctgcgaaaaactggcgcagcaggcgggtatcgatcagtcgcatccggcgctgcagcgctggtatgcctcaatccatgaaacgcaaaacgaccgtgaagtggtcagcctgtatgcgcatttggtccagccagttttagatgcccaggcgcggcgcgaaatcagccgttcggcggcggaatcaacgttgatgattgcggtcagcccgctggcgctggtggatatggcgtttatcgcctggcgcaatctgcgtttgattaatcgcatcgccacgctgtatggcattgaactgggatattacagccgtttgcgcctgtttaagctggtattgctgaatatcgctttcgccggagccagcgaactggtgcgcgacgtggggatggactggatgtcgcaagatctcgctgcgcgtttgtctacccgggcagctcaggggattggtgcaggacttctgacggcacgactggggattaaagctatggagctttgccgccctctgccgtggattgacgatgacaagccacgcctcggggatttccgtcgtcagcttatcggtcaggtgaaagaaactctgcaaaaaggcaaaacgcccagcgaaaaataa

SEQ ID NO: 260686 - DNA, 1542 bp, Klebsiella pneumoniae; identical to SEQ ID NO: 9565

SEQ ID NO: 260687 - DNA, 507 bp, Klebsiella pneumoniae; identical to SEQ ID NO: 3403

SEQ ID NO: 260688 - DNA, 966 bp, Klebsiella pneumoniae
atgagaaccgttaaggtattcgaggaagcctggcccttacataccccgtttgtgattgctcggggaagtcgcagtgaagcgcgcgtggtggtggttgaactggaagaagaaggtattaaaggcaccggcgaatgcacgccgtatccgcgttatggagaaagtgatgcctcggtaatggcgcaaattatgagcgtcgtaccgcaattagagaaagggctgacacgggaggagttgcaaaaaattctccctgccggcgcagcacgtaatgcgctggattgtgcattgtgggatctcgcggcgcgaaaacagcagcaatcgctggctgatttgatcggcataacgcttcccgggacagttatcactgcacagacggtagtcatcggtacgcctgatcagatggccaatagtgcatcaacactctggcaggcaggcgcgaaattactgaaagtaaagctggataaccatcttatcagtgagcggatggtggcaattcgcaccgctgtgcccgatgcgacgctgatcgttgatgcaaatgaatcctggcgtgcagaagggttggcggcgcgttgccagctattggcggatttaggcgttgcgatgcttgaacaaccgcttcctgcgcaggacgatgcggcgttggagaattttattcatccgttaccgatttgcgcagatgaaagttgtcatactcgtagcaatctgaaggcgctgaaagggcgctatgagatggttaacattaagctcgataaaacgggtggcctgacggaagcgctggcgctggcgactgaatcacgtgcacaaggttttagtctgatgctgggctgcatgttgtgtacctctcgtgccattagcgccgctttaccgctggtgccgcaggtcagtttcgccgatcttgacggaccgacctggctggcggtagatgtggaaccggcgcttcagttcacgacgggcgaattgcatctttag

SEQ ID NO: 260689 - DNA, 729 bp, Klebsiella pneumoniae
atgaccgtaactcgcccacgcgccgaacgcggcgcatttccgcccggaacagaacattacggacgttcattattgggcgcgccgttaatctggtttcctgcccctgcagccagccgcgaaagtggtttgattctggctggcactcacggtgatgaaaactcttcgatcgtcacgctctcctgtgctctgcggacgttgacaccttctttgcgccgccatcatgtggtgctgtgtgtgaatcctgacggctgccagttagggttacgggccaatgctaatggtgtggatttaaacagaaactttccggcggcgaattggaaggaaggtgaaaccgtttatcgctggaacagcgccgctgaagaacgtgatgtcgtattgctgacaggtgacaaacctggctctgaacctgaaacccaggcgctgtgccagcttatacaccgcattcaacccgcctgggtggtctcattccacgatccgctggcctgtattgaagatcccagacacagtgaattaggcgaatggctggcccaggcgtttgaattgcctctggtaaccagcgtcggttatgaaacacctggctctttcggcagttggtgtgcagatctcaacttgcattgcatcaccgcagagtttccgcccatctcctccgacgaagccagcgaaaaatatctctttgcgatggcaaacttgctgcgctggcatcctaaagatgcaattcgcccgtcgtga

SEQ ID NO: 260690 - DNA, 639 bp, Klebsiella pneumoniae
atgaaaaatgtactgattcttggtgctggcggtcagatagcccgccatgtgattaatcaactggcagataaacaaaccattaaacaaactttatttgcccgtcagccagcaaaaatccacaaaccctatccaactaatagcaagattattatgggggatgtactgaatcatgcagcactgaagcaggccatgcagggacaggatgttgtgtatgccaaccttacgggggaagatttagatattcaggcaaattcagtgatcgctgcgatgaaagcctgtgatgttaaacgtctgatctttgttctttccctcggtatttatgatgaagttccaggaaaatttggcgaatggaataatgcagttattggtgaacccctaaaaccattccgcagggctgcggatgcaattgaggcttctggactggaatatacaattcttcgccctgcctggctgactgatgaagatattattgattatgagcttacctcacgcaatgaaccattcaaaggtacgatcgtatcacgtaagagtgtcgcagcattaattacagatatcatcgataaacctgagaaacacattggtgagaatataggcatcaatcaacccgggactgatggcgataagccattcttcatgtaa

SEQ ID NO: 260691 - DNA, 921 bp, Klebsiella pneumoniae
atgatgaataataaagtcagcttcactaacagcaataatccaaccatctctttgtctgcagtgatctatttccctccaaaatttgatgaaacccgtcagtatccggcaattgtggtatctcacccaggtgggggcgttaaagagcaaacggccggaacctatgccgaaaaactggcggaaaagggatttgtcactattgcttatgacgcatcttatcaaggtgaaagcggcggcgagccgcgtcagttagaaaacccatacattcgtactgaagacgtcagtgccgtgattgattacctgacaacgctttcttatgtcgacaatacccgaattggtgcgatgggaatttgtgccggtgcaggatatacagccaatgctgcaattcaggatcgccgcatcaaggccatcggtaccgttagtgcggtcaatattggttcgatgttccgtaatggttgggaaaacaatgtgaaatctattgatgccctaccatacgttgacgcgggttcaaacgcccgaaccagcgatattagcagcggagaatacgccaccatgccactggcaccaatgaaggagtccgatgcgccgaacgaagaactgcgtcaggcctgggagtattaccacacccctcgcgcgcagtatccaacagcaccgggttacgctactttgcgcagccttaaccagattattacctatgatgcttaccatatggcggaagtgtacctgactcagccgatacagattgtggcgggcagccaggcagggagcaaatggatgagtgacgacctgtacgatcgagcatcaagccaggataaacgctatcacattgttgaaggcgcaaaccatatggatctttatgacggcaaagtctatgtggctgaagcaatttcagtattagcgccgttctttgaggaaactctgtaa

SEQ ID NO: 260692 - DNA, 900 bp, Klebsiella pneumoniae
atgaagcgtgaagaaatcgctgatctgatggcgtttgtcgtcgttgcagaggagcgtagcttcactcgcgcagcagcccgcctgagcatggcgcaatcagctttaagccagatagtgcgccgtatagaagaacgattaggattgcggcttctgacgcgaaccacgcgcagcgttgtacccactgaagcgggcgagcatcttttgtctgttcttggccctatgttgcatgacatagattctgccctgacatccctgagcgatctgcagaaccgcccatccgggacaatacgtattactactgtagaacatgcagcaaaaacgatattgttaccagctatgcgcacattcctgaaatcgcatcctgaaattgatatccagcttaccattgattatggtttgaccgatgtcgtttctgaacgttttgatgcaggcgtccgtctgggtggggagatggataaagatatgatcgccattcgaatcgggccagatataccaatggctattgttggctcaccggattatttttctcgtcgaagtgctccaacgtcagtgtcacaattaatagatcatcaggcaattaatttgtatcttcccacatcgggtacagcaaatcgctggagattaatacgcggtggacgtgaagttcgtgttcgcatggaaggtcagcttttactgaatacgatagacctgatcattgatgctgcaattgatgggcatggattggcgtatctaccttatgatcaggttgagcgggctattaaagaaaaaaaactgatacgtgttttggataaattcacaccagatttacccggttatcacctgtactatccacaccgtcgacatgctggctcggcattctcattatttatagataggctgaagtataaaggtgctgtttag

SEQ ID NO: 260693 - DNA, 1614 bp, Klebsiella pneumoniae
atgaagcactctgtttcagtcacgtgttgtgcgctgttgatcagcagcatttctctttcgtatgctgcagaagttccgagcggcacagtactggcagagaagcaggagttggtgcgccacattaaagatgagcctgcgtcgctggatcccgctaaagccgtgggcctgccagagattcaggtcattcgcgatctgtttgaaggactggtgaatcagaacgagaaaggggagattgtccccggcgttgcgactcagtggaaaagtaatgacaaccgtatctggacttttaccctgcgcgataacgcaaaatgggcggatggcacaccggtaacggcgcaagattttgtctacagctggcagcgtctggtggacccgaaaacgctatcgccatttgcatggtttgccgcgctggcgggaatcaacaacgcacaggcgattattgatggtaaagctacgcctgaccagcttggcgtcaccgcagttgatgcccatactttgaaaattcagcttgataaaccgttgccgtggtttgtgaatttaaccgctaactttgccttcttcccggtgcaaaaagccaacgtagaaagcagtaaagagtggacgaaacccggaaaactgatcggcaatggcgcttatgttcttaaagagcgcgtagtcaatgaaaaactggtcgtggtaccgaatacccattattgggataacgccaaaacggtactgcaaaaagtgaccttcctgccaattaatcaggaatccgcagccactaagcgttacctcgcgggggatattgatatcaccgaatccttcccgaaaaatatgtatcagaagctgttgaaggatattccggggcaggtttatacgccgccgcagctcgggacctattattatgcgtttaacacgcaaaaagggccgacggccgatcagcgcgttcgcctggcattaagtatgacgatagatcgccgcctgatgaccgaaaaagtgttggggacgggggaaaagccagcgtggcattttacaccagatgttactgccggttttacgccggagccttcgccgtttgaacaaatgagtcaggaagaactgaatgcgcaggcaaaaactttgttgagcgccgctggttatggtccgcaaaaaccgctgaagctgacgcttttgtataacacttcagaaaaccatcaaaaaattgcgattgctgtagcatcgatgtggaaaaagaaccttggcgtagatgttaaattgcagaatcaggaatggaaaacctatatcgatagccgtaacaccggcaattttgatgttatccgcgcctcatgggtaggggattataatgaaccctccactttccttacgttgttaacgtcaacgcattcagggaatatttcacgctttaacaatccggcatacgacaaagtactggcccaggcatcaacggaaaataccgttaaagcgcgtaatgccgattacaatgcggcagaaaaaatcctcatggagcaagcaccgattgcaccaatttatcaatataccaatggacgattaatcaagccgtggctgaaaggttatcccattaataacccggaagatgtggcgtacagtcggactatgtatattgtgaagcattga

SEQ ID NO: 260694 - DNA, 1032 bp, Klebsiella pneumoniae
atgatcgctgaactgtttacaaataatgcgcttaatctggtcattattttcggtagctgcgcagcattgattctgatgagcttttggtttcgccgcggaaatcgtaaaagaaaaggttttttattccatgcggtgcaatttttaatctacaccataattatcagtgctgttggtagcatcattaattatgttatagaaaactataaactcaaatttatcaccccaggcgttatcgattttatctgtacgtccctgattgcggttattctgacgattaagctatttctgctgattaatcagtttgaaaaacagcagattaaaaaaggtcgcgatatcaccagtgcgcggattatgtcgcgtatcatcaaaatcaccattattgtggtgcttgttctgctttatggcgaacatttcggcatgagcctttctggcttgttgacctttggtggtattggtggtctggctgtcggtatggccggtaaagatattctgagtaacttcttttccgggattatgctctatttcgaccgtccttttagtattggcgactggatccgttcaccggacagaaatatcgaaggtacagtagcggaaattggctggcgaattaccaaaattacgacctttgataatcgtccattgtacgtaccgaactcgctgttttcgtcgatcagcgtagaaaatcctggacgaatgaccaaccggcgcattaccacgaccattggtttacgttatgaggatgcggcaaaagtgggcgttattgtcgaagccgtacgtgagatgctgaaaaatcacccggccatcgaccagcgacaaaccttactggtttatttcaaccagtttgccgattcgtcattaaatattatggtttattgctttaccaaaaccacggtatgggctgaatggcttgctgcacagcaagacgtttatttgaagattatcgatattgtacagtcacacggcgcggactttgccttccccagccagacgctgtatatggataacattacaccgccggaccagggtcgctaa

SEQ ID NO: 260695 - DNA, 258 bp, Klebsiella pneumoniae
atgattatggcgaaactgaagtcagcgaaagggaagaaatttctctttggtttgttggcggttttcattattgcggcgtcggttgtgactcgcgcgaccatcggcggcgttatagaacagtacaatattccgctgtctgagtggacgacatcaatgtatgtgattcagtcatcgatgatttttgtttatagcctggtctttactgtgttgctggcaataccgttgggaatttattttcttggcggcgaagagcagtaa

SEQ ID NO: 260696 - DNA, 753 bp, Klebsiella pneumoniae
atgatcccggaaaagcgaattatacggcgcattcagtctggcggttgtgctatccattgccaggattgcagcatcagccagctttgcatcccgttcacactcaacgaacatgagcttgatcagcttgataatatcattgagcggaagaagcctattcagaaaggccagacgctgtttaaggctggtgatgaacttaaatcgctttatgccatccgctccggtacgattaaaagttataccatcactgagcaaggcgacgagcaaattactggtttccatttagcaggcgatctggtgggatttgatgccatcggcagcggtcatcacccgagcttcgcgcaggcgctggaaacctcgatggtatgtgaaatcccgttcgaaacgctggacgatttgtctggtaaaatgccgaatctgcgtcagcagatgatgcgtctgatgagcggtgaaatcaaaggcgatcaggacatgatcctgctgttgtcgaagaaaaatgccgaggaacgtctggctgcattcatctacaacctgtcccgtcgttttgcccaacgcggcttctcccctcgtgaattccgcctgacgatgactcgtggcgatatcggtaactatctgggcctgacggtagaaaccatcagccgtctgctgggtcgcttccagaaaagcggtatgctggcagtcaaaggtaaatacatcaccatcgaaaataacgatgcgctggcccagcttgctggtcatacgcgtaacgttgcctga

SEQ ID NO: 260697 - DNA, 516 bp, Klebsiella pneumoniae
atgctgagattacttgaagaaaaaattgtcacgccactgggtccactgtgggtgatttgcgatgagcaatttcgcctgcgggcggttgaatgggaagagtacagcgaacgcatggtgcagctgctggacatccattatcgcaaagaaggctatgagcgcatttctgccaccaacccaggcggtttaagcgacaaacttcgtgattattttgccggtaatcttagcattattgatacgcttcccactgccacaggggggacgccatttcagcgcgaagtctggaaaacactacgcactatcccctgcgggcaggtaatgcattacggtcaactggccgaacaattgggtcgccctggcgcggcgcgtgccgttggtgcggctaacggatcgaatcccatcagcattgttgtgccttgtcatcgggtcattggcagaaacggtaccatgaccggatatgcaggcggagttcagcgaaaagagtggttattgcgccacgaaggttatcttttgctgtaa

SEQ ID NO: 260698 - DNA, 1527 bp, Klebsiella pneumoniae; identical to SEQ ID NO: 9564

SEQ ID NO: 260699 - DNA, 1446 bp, Klebsiella pneumoniae; identical to SEQ ID NO: 9563

SEQ ID NO: 260700 - DNA, 1311 bp, Klebsiella pneumoniae
atggagtctttgaatcaatttattaattcgcttgccccaaaattatcgcactggcgacgtgattttcaccactatgcagagtctggctgggtggaattccgcactgccacccttgttgcggaagaattgcaccagctcggttattcactggcgctgggccgcgaagtagttaatgaaagtagccggatgggattacctgatgaattcactctacaacgcgaattcgagcgcgctcgtcaacagggtgcgctagaacaatggattgcggcttttgaaggcggtttcactggcatcgtcgctaccctggataccggtcgccccggtccggtgatggctttccgtgtcgatatggacgcgctggatctcagtgaagaacgggatgtcagccatcgcccctaccgcgacggttttgcgtcatgtaacgccggaatgatgcatgcctgtggtcatgatggacataccgccattggacttgggctggcgcatacccttaaacagttcgagtccggactacatggcgtcatcaaactgatttttcaacctgcagaagaaggtacgcgtggcgcgcgggcgatggtcgatgcaggtgtagtggatgatgttgattattttactgccgtgcacattggcactggcgtacctgcgggcaccgtggtgtgcggcagtgataattttatggcaaccaccaaatttgacgcgcacttcaccgggaccgccgctcacgcaggcgcaaaaccagaagacggtcacaatgccttgttggcggcagcacaagcaactcttgcactgcatgcaatcgccccgcacagcgaaggcgcttccagagtaaacgtgggcgttatgcaggcaggaagcggtcgtaatgttgttcccgcctcagcgttgctgaaagtggaaacacgcggggccagcgacgtcattaatcaatatgtttttgaacgtgcacaacaagcgattcagggcgcagcaaccatgtatggtgtcggcgttgaaactcgtctgatgggtgcagctaccgccagttctccttcgccgcaatgggtcgcatggttgcaaagtcaggcagctcaggtcccgggggtcaatcaagccattgaacgtgttgaagcgcctgcgggttccgaagatgccacattaatgatggcccgcgtgcagcaacatcaagggcaagcctcctacgtggtgtttggcacacagctggcggcaggtcatcacaacgaaaaattcgattttgacgagcaggttctcgctattgccgtcgaaacgctggcgcgcaccgcgctcaattttccctggacgcgaggtatctga

SEQ ID NO: 260701 - DNA, 828 bp, Klebsiella pneumoniae
atgttgaatatgtcgcaaccggcactgagtaaatctattcaggagctggaagaagggttggcggcacaactcttttttcgccgtagtaaaggcgtgacgttaactgatgccggcgaaagtttttatcagcacgccagtcttattcttgaagagctgcgcgcagcgcaagaggatattcgccaacgacaagggcaactagcagggcaaattaatatcggcatgggggccagtatttcccgcagtctgatgccagctgtcatatctcgttttcatcagcagcatccgcaggtaaaagtacgcattatggaagggcaactggtatcgatgattaatgaattgcgccagggggaactggatttcaccatcaatacctattatcagggaccctacgaccacgaatttacttttgagaaattactggaaaagcaattcgcgatcttttgccgcccgggacatcccgccattggtgcccgttcgatcaaacagttactggactacagctggacaatgccgacgccacacggcagctactacaaacacttgagtgaattgcttgacgatcaggcgcaaacgccacaggtcggcgtagtctgcgagacgttctcagcctgtatcagtctggtggcaaaaagcgattttctcagcatactacctgaagaaatgggctgcgatcccttgcacggacaggggctggtgatgttgccggttagcgaaattttaccgaaagcgacctattatttgattcagcgacgtgatagtcgccagacaccactgaccgcgtcattaatcacgcaatttcggcgagaatgcggctatctgcaaagttaa

SEQ ID NO: 260702 - DNA, 387 bp, Klebsiella pneumoniae
atgggggtgaaaatgtcacttgaactcccttggccaaatgatgagcggctacagcagctttgtgagaatttgctaaacaaccaagggtatctgccaacattggataatctagcggataaaattaacgtcagtagccgtacactcatgcgcttatttgttaaagagacgggattaacatttcgccactgggttcagcaaatgcacgttatttctgcagtgacgcttcttgatgatggatattcgttgaccaaaattgcccatcgtctgggctatgcctcagctgaatcgttcggcaatatgtttaagcgtcgaacgggctactcgcccggtaaatttactcgtcgattaacgatgcatgattatgcaatcacaagacaaatgatttaa

SEQ ID NO: 260703 - DNA, 1029 bp, Klebsiella pneumoniae
atgataatttctaaaaaacagcttattggggtggtagcgatcggtattattttagctggcgttgtcttttttatctggtgggtaagcacaggaagatttatacagacgacggatgatgcttacattggtggtaatatcaccacggtggcaagtaaagtttctggttatatttctgctatagaggtgcgcgataatcagagcgtaaaaaaaggcgatattatcctgcgtctcgatgatcgggattatcgtgcaaatgtcgccaggcttgaggcaaaaataaaaagtagcaaagccaatctcgaaagcattcaagccactattgcgatgcagcagtcgataattcaaagtgccagtgaaacatggcaggcagtaaaacatgaggagcaaaagcgcctgcgagatactgaacgttatgaaaaactcgcacaatcagcggcaatatcgcaacaaattattgataacgccaggtttgactaccagcaggtcgcagcaaaggagcgcaaagccgcgaacgatttcctggtggagaagcaacggctggcagttttatctgctcaggaagaaaacgtacgtgcgagtatcgaagaagttcaggccgctttgactcaggcactactggatctggaatatacccttgttcgtgcgccgattgatggcattgtcgcaaaccgcagcgcccatacaggcagttgggtggaaggcggcacatcgttagtttcacttgtaccagtcagtgagttgtgggttgatgcaaattataaagaaaaccaaatagcgggaatgaagccaggaatgaaggctgagatccgtgctgatattctcaaaggggaagtgtttcacggtcacattgaaagcctttccccagcgacaggagccagtttcagcttgattccgatagaaaatgccactggcaatttcaccaaaattgttcagcgtgtcccggtacggattgcatttgacgacgcaaaggaattaaagcaacttcttcgcccgggactgtccgtcaccgtcagtgttgatgagagatga

SEQ ID NO: 260704 - DNA, 1512 bp, Klebsiella pneumoniae; identical to SEQ ID NO: 9562

SEQ ID NO: 260705 - DNA, 564 bp, Klebsiella pneumoniae
atgaaccttgacgacaaatcgctgtttcttgacgccatggaagatgtccagccgctgaaacgtgctacagatgtccactggcatccaacgcgtaaccaacgtgcgccgcagcgtatcgacacgctgcaacttgataatttcctcaccaccggatttctcgacatcatcccgctaagtcagccgctggagtttcggcgggaagggttgcaacatggggtgctggataagctgcgcagtggtaaatatccgcaacaggcgagcctgaatcttttgcgccagccggtggaagagtgccgcaaaatggtgttcagtttcattcaacaagccctggcggatggtttgcgtaatgtgctgattattcatggtaaagggcgggaagataaatcgcatgccaatattgtccgcagctatgtggcgcgctggttgaccgaatttgatgatgtccaggcatattgtaccgcgctaccgcatcatggcggcagcggggcgtgttacgtcgcactacgtaaaacggcacaggcaaagcaagaaaactgggagcgccacgctaagcgcagtcgttga

SEQ ID NO: 260706 - DNA, 1233 bp, Klebsiella pneumoniae
atgattacgcacaacttcaataccctggacttactcaccagtcctgtctggatcgtttcgccctttgaggaacagttaatttatgccaacagcgcggcgcgactgttgatgcaagacctcacgtttagtcagctacgaaccggtccctattccgtctcctcacaaaaagaactgccgaaatacctctccgatctgcaaaaccaacacgatattatcgaaatcctcaccgttcagcgcaatgaagaggaaacagcattgagttgtcggcttgttttgcgaaagctgacagaagcagaaccggtgattattttcgaaggtatcgaagcaccggcaacgctgggtttaaaagccagtcgctcggcaaattatcagcgcaaaaaacaaggtttttatgcgcgcttttttctgactaactctgcaccaatgttgttgattgacccctcacgagatggccaaatcgttgatgctaacctcgccgcgctcaatttctatggctataaccatgaaacgatgtgccagaaacatacctgggaaataaatatgctcgggcgacgcgtcatgcctatcatgcatgaaatttcgcatttacccggtggccataagcctttgaattttgttcataaactggcggatggttcgactcgtcatgtgcagacctatgccggtccgattgaaatttatggcgacaagctcatgttatgtattgtgcatgatattactgagcaaaaacggctggaggagcagctggaacatgctgcccaccatgacgcgatgaccggattactgaatcggcgacagttttatcacattaccgagccaggccaaatgcagcacctcgccatcgctcaggattacagcttattgctcatcgacaccgatcgttttaaacacattaacgatctctatgggcattctaaaggtgatgaggtgttatgcaccctcgcccgcactctcgaaagttgcgctcgcaaaggcgatttggtgtttcgttggggaggcgaagagtttgtcttattgctaccaagaaccccactggataccgcgctttcgctggctgaaactatccgcgtaagcgtggcaaaagtgagtatttcgggcttaccacgctttaccgtcagcattggtgtggcgcatcacgaaggaaatgaaagcatcgatgaactgtttaaacgcgttgatgatgctttgtatcgggcgaaaaatgatggacgcaaccgcgtgctggcggcataa

SEQ ID NO: 260707 - DNA, 984 bp, Klebsiella pneumoniae
gtggaagcgattaagggatcggacgttaatgtcccggatgcagtatttgcctggatgctggatggtagaggcggcgttaaaccgctggaaaatacagatgtgattgatgaagcgcatccctgctggctccaccttaattatgtacaccatgatagcgcccaatggctggcgacaacaccgctgcttcccaataacgtacgtgatgcgctggcgggcgagagcacacggccccgagtcagccgtctcggtgaaggcacgctgattacattgcgctgtataaacggcagcaccgatgaacgccccgatcaactggtcgccatgcgtgtatatatggacgggcggttaattgtttcgacccgacaacgcaaagtgctggcgctggacgatgtggtaagcgatctggaagagggcacgggtccgaccgattgcgggggatggctggtggatgtatgtgatgcgttgaccgatcattccagcgaatttatcgagcagctgcacgataaaattatcgaccttgaagataatctccttgatcagcaaattccaccgcgtggattcctggctctgctgcgcaaacaattaattgtgatgcgtcgctatatggcaccgcaacgtgatgtttatgctcgtcttgccagtgaacgtttgccgtggatgagcgatgaccaacgccgtcgtatgcaggatattgccgatcgccttgggcgcgggcttgacgaaatcgacgcctgtatagcacggactggcgtgatggcggatgaaatcgctcaggtgatgcaggaaaatttagcgcgtcgtacctatacaatgtcgttgatggcaatggtctttttacccagtacctttctgaccgggttatttggcgtcaaccttggtgggatcccaggcggcgggtggcaattcggattttcaattttttgtattctgttagttgttcttattggtggtgttgctttatggttgcatcgtagtaaatggttgtaa

SEQ ID NO: 260708 - DNA, 1374 bp, Klebsiella pneumoniae; identical to SEQ ID NO: 9561

SEQ ID NO: 260709 - DNA, 1236 bp, Klebsiella pneumoniae; identical to SEQ ID NO: 9560

SEQ ID NO: 260710 - DNA, 216 bp, Klebsiella pneumoniae; identical to SEQ ID NO: 9559

SEQ ID NO: 260711 - DNA, 189 bp, Klebsiella pneumoniae; identical to SEQ ID NO: 9558

SEQ ID NO: 260712 - DNA, 810 bp, Klebsiella pneumoniae
atgactaagcaaccaccaatcgcaaaagccgatctgcaaaaaactcaggaaaaccgtgcaccagcagcaattaaaaataacgacgtgattagttttattaaccagccatcaatgaaagagcaactggcagcagctcttccacgccatatgacggctgaacgtatgatccgtatcgccaccacagaaattcgtaaagttccggcgttaggaaactgtgacactatgagttttgtcagtgcaatcgtacagtgttcacagctcggacttgagccaggtagcgccctcggtcatgcatatttactgccttttggtaataaaaacgaaaagagcggtaaaaaaaacgttcagctaatcattggctatcgcggcatgattgatctggctcgccgttcaggtcaaatcgccagcctgtcagcccgtgttgtccgtgaaggtgacgaatttaatttcgaatttggccttgatgaaaagttaatacaccgcccaggagaaaacgaagatgccccggttacccacgtctatgctgtcgcaagactgaaagacggaggtactcagtttgaagttatgacgcgcagacagattgagctggtgcgcagccagagtaaagctggtaataacgggccgtgggtaactcactgggaagaaatggcaaagaaaacagctattcgtcgcctgttcaaatatctgcccgtatcaattgagatccagcgtgcagtatcaatggatgaaaaggaactactgacaatcgatcctgcagattcctctgtattaaccggggaatacagtgtaatcgataattcagaggaataa

SEQ ID NO: 260713 - DNA, 2652 bp, Klebsiella pneumoniae
atgagcacaaaaccactcttcctgttacggaaagcgaaaaaatcatccggtgaacctgacgtcgtcctgtgggcaagcgacgattttgaatcgacctgtgccactctggactacctgatcgttaagtcaggtaaaaaactgagcaactattttaaagctgttgccacaaattttcctgtcgttaatgaccttccccctgaaggtgagatcgattttacctggagtgaacgctatcaactcagcaaagactccatgacatgggaactaaaaccgggagcagcgccagacgacgttcaccaccaggataatgctcaagaaaccaacgaactggcgggaggccaggaagaaaacgcgcaggcagacgcccacgaggattgccaggattgcgaagtctctgtagccactttgcggttcacacagcgtcttctgcacatttttacgtatgcggccggggatcggaaatacctgcatcatgccacccgagaacaacgcgaacacattactgctcttgagatggatcaggaaaacagctatgtccagaatctgctgttggccatacgcggcatggcagaaccgacaactctggataatgccgccctgctccgcctgactgatgcaattaaggcagttttctctatcactaaaaaacatcagccctatgaatttaagaatttcatttcagcctggctggataccgaacacattgatcgcggtcttctgacaaaagaatggcgaaaagggaatcgtgtttcacgcatcactcgcacggcttccggtgctaatgctggcggcgggaacctcacagatcgcggcgaaggtttcgtccacgatctgacgtcactggcgcgcgatatagccactggcgtactggcccgttcaatggacgtggacatctataaccttcatccggcacacgctaaacgcattgaggaaattatcgctgaaaataaaccgcccttttctgttttccgcgacaaattcatcaccatgcctggcgggctggattattcccgcgccatcgtggttgcgtccgtgaaagaagcaccaattgggatcgaggtcatccccgctcacgtcactgcatatctgaacaaagtactgactgaaaccgatcatgccaaccctgatccggaaatcgtggatattgcctgcggtcgctcctctgccccgatgccgcagcgagtaacagaagaaggaaaacaggatgatgaagaaaaactgcaaccatctggaacaacggcagatgaacagggagaggctgaaacaatggaaccggacgcaactaaacatcatcaggacacgcagccgctggatgctcagtcacaggtaaattctgttgatgcgaaatatcaggaactgcgggcagaactccatgaagctcggaaaaacattccatcaaaaaatcctgtcgatgccgataaattgcttgctgcatcacgtggtgaatttgttgacggaattagcgacccgaacgatccgaaatgggttaaggggatccagactcgcgattctgtgtaccagaaccagccagaaacggaaaaaaccagcccggatatgaaacaacctgagccagtagtgcaacaggaaccggaaatagccttcaatgcctgcggccagactggcggggataactgccctgactgtggtgcggtgatgggcgacgcaacaaaccaggaaacattcgatgaagagaatcaggttgaagctaaggaaaatgatccggaggaaatggaaggcgctgaacatccgcacaatgagaatgctggcagcgatccgcatcgcgattgcagtgatgaaactggcgaagtcgcagatcccgtaatcgtagaagacatagagccaggtatttattacggaatttcgaatgagaattaccacgcaggtcccggtgtcagtaagtctcagctcgatgacattgctgatactccggcactgtatttgtggcgtaaaaatgcccccgtggacaccacaaagacaaaaacgctcgatttaggaaccgctttccactgccgggtacttgaaccggaagaattcagtaaccgctttatcgtagcacctgaatttaaccgccgtacaaacgccggaaaagaagaagagaaagcgtttctgatggaatgcgcaagcacaggaaaaatggttatcactgcggaagaaggccggaaaattgaactgatgtatcaaagcgttatggctttgccgctggggcaatggcttgttgaaagcgccggacacgctgaatcatcaatttactgggaagatcctgaaacaggaattttgtgtcggtgccgtccggacaaaattatccctgaatttcactggatcatggacgtgaaaactacggcggatattcaacgattcaaaaccgcttattacgactaccgctatcacgttcaggatgcattctacagtgacggttatgaagcacagtttggagtgcagccaactttcgtttttctggttgccagcacaactattgaatgcggacgttatccggttgaaattttcatgatgggcgaagaagcaaaactagcaggtcagctggaatatcaccgcaatctgcgaaccctggctgactgcctcaataccgatgaatggccagctattaagacgttatcactgccccgctgggctaaggaatatgcaaatgactaa

SEQ ID NO: 260714 - DNA, 276 bp, Klebsiella pneumoniae; identical to SEQ ID NO: 9555

SEQ ID NO: 260715 - DNA, 171 bp, Klebsiella pneumoniae; identical to SEQ ID NO: 9554

SEQ ID NO: 260716 - DNA, 222 bp, Klebsiella pneumoniae; identical to SEQ ID NO: 9553

SEQ ID NO: 260717 - DNA, 153 bp, Klebsiella pneumoniae; identical to SEQ ID NO: 9552

SEQ ID NO: 260718 - DNA, 135 bp, Klebsiella pneumoniae; identical to SEQ ID NO: 9551

SEQ ID NO: 260719 - DNA, 894 bp, Klebsiella pneumoniae
atgaatattgaacttcgtcatctgcgttactttgttgcggttgcagaagagctgcatttcgggcgcgccgctgcccgcctgaatatttcgcaaccaccgctaagtcaacagattcaggcgctggagcaacaaattggtgcccgactgctggcacggaccaatcgcagtgtattgctgacggcagcaggaaaacagtttcttgtagatagtcggcaaatcctgtctatggtggatgatgctgccgctcgcgctgaaagactgcatcagggtgaagcgggggagttgcgcattggttttacttcgtccgctccttttattcgggcggtgtccgatacgttatcgctgtttcgccgtgattatcccgatgtccatttacaaacccgcgaaatgaacactcgcgagcaaatcgctccgctcattgaaggaacgctggatatgggattgctgcgtaacacagcgttaccggagacgcttgaacacgcagtcatcgtccatgaaccgcttatggcgatgatcccgcacgatcatcccctggcaaataacccgagtgtaacgctggctgaactggcgaaagaaccctttgtcttttttgatccgcacgtcgggacagggctgtatgacgatattctcgggctgatgagacgttacaatttgacgcccgtcatcactcaggaggtgggtgaggcaatgaccatcatcggtctggtttccgccggtctgggtgtttcaattttgcctgcgtcatttaaacgtgttcagctcaacgaaatgcgctgggtgccgattgctgaagaggatgcggtttctgaaatgtggttggtctggccgaaacatcatgaacaaagtccggctgcgcgtaactttcgtattcatctgctgaatgctctcaggtga

SEQ ID NO: 260720 - DNA, 696 bp, Klebsiella pneumoniae
atgctgaagcgtttctttattaccggtacagacacttctgtagggaaaacggtggtttcccgcgcattgctacaagcgttagcctcccagggaaaaacggttgcgggatataaacccgtagcgaaggggagcaaagagacacccgaagggctgcgtaataaagatgccctggtgttgcagagtgtttcaaccatcgaactgccttatgaagcagttaatcctatcgcgttaagcgaagaagaaagtagcgtggcgcacagttgcccaatcaattacaccctcatttcaaacggcctggcaaacctgaccgataaagtcgatcatgtggtggtagaagggactggcggctggcgcagtctgatgaatgatttgcgtccgctctctgaatgggtggtgcaggaacaactgccggtgttgatggttgtcggtattcaggaaggttgcattaaccatgcactgctaacagctcaggcgatcgccaacgacgggctaccgctcattggctgggtggctaaccgaatcaatccaggactggcgcattatgcggaaatcattgatgtgctgggtaaaaaacttccggcaccgctcattggtgaactgccttatctgccgcgcgccgaacagcgtgaactggggcaatacatccgcttagctatgctgcgcagtgtgctggcggtagatagagtcacggtgtaa

SEQ ID NO: 260721 - DNA, 1257 bp, Klebsiella pneumoniae
atgttccgccgtctgcttatcgcaacagtcgtcggtattctcgcggcctttgccgttgccgggtttcgtcatgcaatgctgctactggagtggttgttcctcaataatgactcgggcagtctggtcaatgcagcgacaaatctttccccgtggcgacggctgctaactccggcgctcggcggactggcggcgggtttgttgctgatgggctggcagaaatttacccagcaacgccctcatgcgccgaccgattacatggaagcgttgcaaaccgatgggcagtttgattacgcagcaagcctggttaaatcgcttgcctctctgctggtagtaaccagcggcagtgcaattggtcgcgaaggtgcgatgattcttttagctgcccttgccgcctcctgttttgtccaacgttttacgccacgccaggagtggaaattatggatcgcctgtggagctgcggcgggaatggctgcggcctatcgcgccccgcttgctggcagtttatttatagccgaagtgctgtttggcactatgatgttggcctctctcggcccggtgattatttccgccgtcgtggcgttgctggttagcaatctgattaatcatagcgacgcgttactctacagcgtacaactctcagtgacggttcaggctcgtgactatgcgctgattatcagtacaggtgtgctggcaggtctgtgcggaccactgttgttaacgttaatgaacgcctgtcatcgtggatttgtaagtctcaaacttgcgccgccctggcaactggcactgggcgggttgatcgtgggtctgctttccctgttcacacctgcagtgtggggcaacggctatagcaccgtacaatcctttttaaccgccccgccactgttaatgatcattgccgggatcttcctctgtaaactgtttgccgtgctggcgagtagtggttctggcgcgcccggtggtgtctttacaccgacgctatttatcggtcttgccattggcatgttgtatggtcgtagcctgggattatggttccctgatggcgaagaaattacgcttttactcggattgaccgggatggcgacactgttggcggcaaccacgcacgcgccgattatgtcgacgttgatgatatgtgaaatgaccggggagtatcagctactccccggtttattgattgcctgcgtaattgcgtcggtaatttcgcggactttacaccgtgactctatctaccgccagcacactgcgcagcatagctaa

SEQ ID NO: 260722 - DNA, 615 bp, Klebsiella pneumoniae
atgacccatttttcacagcaagataatttttctgtcgcggcgcgcgtgttgggcgcgctgttttattacgctccagagagtgcggaagccgcccccctggttgcggtactcacccgtgacggctgggaaactcagtggcctctaccagaagcgtcattagcgccgctggtgacggcttttcagacacagagtgaagagactcacgcccaggcctggcagcgtttgtttgtcggcccgtgggcactgccgtcaccgccgtgggggtcggtctggctggatcgcgaatctgtgctgtttggcgattcaacattggcacttcgtcagtggatgcgcgagaaaggcattcagtttgaaatgcagcaaaacgaaccggaagatcattttggttcactgctgttgatggctgcgtggttggcggagaatggtcgccagacagaatgcgaagaattgctggcatggcacctttttccgtggtcaacacgatttcttgacgtttttatcgaaaaagcagaacaccctttctaccgtgcactgggtgaactggctcgcttaacgctggcgcaatggcaatcacaactgttaattcctgtcgcggttaaatcgctgtttcgatag

SEQ ID NO: 260723 - DNA, 855 bp, Klebsiella pneumoniae
atgggaaatggatggcatgaatggccactggttatctttaccgtattgggtcaatgcgtagtaggcgcgctgattgttagcggaattggctggttcgccgccaaaaatgacgcagaccgtcagcacattgttcgtggcatgtttttcctctggctgttgatgggcatcgggtttattgcctctgtcatgcacctgggatcgccactgcgggcgtttaactcgctgaatcgaatcggagcttctggtctgagtaacgagattgctgccggttcaatattttttgccgttggcggattatggtggctggtgacgatcatcggtaaaatgccgcaagcgttggggaaactctggttacttgtcagcatggcgctcggcgtcattttcgtctggatgatgaccggcgtgtatcaaatcgacactgtgccaacctggcataacggttacactacgctggctttctttctgacagtattattgagcggtccaatacttgctgctgcaattctgcgggcagcccgcgttacatttaataccacaccatttgccatcattagcgttctggcgctgatcgcttgtgccggggtgattgtgctgcaaggtttgtctctggcgtctattcactcatccgtacaacaagccagcgcactggtaccagattacgcctccttacaggtctggcgtgtggtattgttatgcacaggtctaggatgctggctttgtccgctcattcgtcgccgtgaacctcacgttgccggacttgttctggggctaatcctcatacttggcggtgagatgatcgggcgtgtgctcttttatggcctgcacatgacggtaggaatggctattgcaggttaa

SEQ ID NO: 260724 - DNA, 618 bp, Klebsiella pneumoniae
atgaccacacaatatggattttttatcgattccagccgctgtactggctgtaaaacctgcgaactggcgtgcaaagattttaaagatcttggcccggaagtcagtttccgccgtatttatgaatatgctggcggcgactggcaggaagataatggcgtctggcaccagaacgtgttcgcttattatctctccatctcctgtaaccattgcgatgaccccgcatgtacaaaagtctgccccagcggcgcaatgcataagcgtgaagatggctttgtggtggttgatgaagatgtttgtatcggctgccgctactgccacatggcttgtccgtacggcgcgccacagtacaatgctgaaaaagggcacatgacgaagtgcgatggttgttattcgcgcgtcgccgaggggaaacaacccatatgtgtcgaatcctgcccgctgcgtgcacttgagttcggtccaattgaagagctgcgccagaagcacggcactctggctgccgtcgcgccactgccgcgcgcgcatttcacaaaacccaatatcgttatcaaacctaacgccaacagccgcccgaccggcgataccactggttatctggctaatccggaggaagtgtaa

SEQ ID NO: 260725 - DNA, 2397 bp, Klebsiella pneumoniae
atgaaggctgaaatcagccgtagaagtctgatgaaaacctccgcacttggcagtcttgcgctggcaagcagtgctttcactctgccattttcccaaatggtccgagcggcagagacaccggtagaagagaaagcggtctggagttcctgcaccgttaactgcgggagccgctgtctgttacgtttgcatgtgaaagatgacaccgtgtactgggtggagtctgatacgacaggtgacgacgtctacggtaatcatcaggttcgggcatgtttacgcgggcgctctatccgccgacggatgaatcatcctgacaggttgaaatatcccatgaagcgcgtcggcaagcgcggtgaaggtaaatttgaacggataagttgggatgaagccctggataccatcagtgataatcttcggcggatccttaaagattacggcaatgaggctgtacatgtcctgtacggaacaggcgtagatggcggaaacatcaccaactcgaacgtcccgtaccgtctgatgaactcttgcggtggttttctcagtcgctatggcagctacagtaccgctcaaatcagtgccgcaatgagttatatgttcggtgccaatgatggcaacagcccggatgatatcgccaatacgaaactggtcgttatgttcggaaataacccggcagaaacccggatgagcggcggtggtgtcacttactacgtcgagcaagcccgcgaacgttcaaatgcacgcatgatcgtcatcgatccacgttataacgacacagctgccggacgtgaagatgaatggctgcccattcgccctggcaccgatggagcactggcctgtgcgattgcctgggtactgattactgaaaacatggtcgatcagccatttctcgacaaatattgtgttggttacgatgaaaaaacgctgcccgccaacgcaccacgtaacgcgcattataaagcctatattctgggcgaagggcctgacggcatagctaaaacgccggaatgggcagcaaaaatcaccagcataccggcagaaaaaattatccatttggcacgagagatcggttcagcaaaacctgcttatatttgtcagggttgggggccacaacgacactccaacggcgaacaaacgtcccgcgctattgccatgctttccgttctcaccggtaacgtcggcataaacggcggcaactcaggtgtacgcgaaggtagctgggatctgggggtagaatggttcccgatgcttgagaatcctgttaaaacgcagatttccgtctttacatggacagatgccatcgaccacggtacggaaatgaccgcgacccgtgatggtgttcgtggaaaagaaaaactggatgtccccatcaagtttttatggtgctacgccagtaacacattgatcaatcaacatggcgacatcaatcacacccatgaggtgcttcaggatgacagcaagtgcgagatgattgttggcattgaccacttcatgacggcctcggctaagtattgcgatatcctgttgcccgacctgatgccaacagagcaagaagaccttatctctcatgaatctgcagggaatatgggctatgtgatcctcgcccaacccgcaacctcagcaaaatttgaacgcaaacccatctactggatgctgagtgaagtcgccaaacgcttaggaccggacgtttatcaaacctttactgaaggtcgcagtcagcatgaatggatcaaatatctccatgcgaaaacgaaggaacgtaaccctgagatgcccgactacgaggagatgaaaacgaccgggatctttaagaaaaaatgcccggaagaacactacgtcgctttccgcgcattccgtgaagatccacaggcaaacccgttgaaaacaccttcggggaaaatcgaaatttattctgaacgactggcgacgattgcggatacctgggaattgaaaaaagatgaaattattcatccccttcctgcgtataccccaggttttgatggctgggacgatcccctgcggaaaacctatccactgcagctaacgggcttccactacaaagcgcgtacccactccagctacggcaatattgatgtgttacagcaggcctgcccacaagaggtgtggatcaaccccattgatgctcaggcacgcggtatccgtcatggcgataccgtgcgggtatttaacaataatggagaaatgctgattgccgcaaaagtgactccgcgtattctgcctggcgttaccgccatcgggcaaggtgcgtggcttaaagcggatatgtttggtgaccgggtcgatcacggcggcagtatcaatattctgacctctcaccgcccttcaccgctggcaaagggaaacccgtcgcacagcaatcttgtccagatcgaaaaggtttaa

SEQ ID NO: 260726 - DNA, 2427 bp, Klebsiella pneumoniae
atgtccaaaaatgaacaaatggtaggcatcagccgcagaacactcgttaaatctaccgcgataggttctctggcgctggctgcaggcggtttttctttaccgttcaccctgcgcagtgcagcggcagcggtacaacaggccagcgagaaagtggtctggggtgcctgttccgtcaactgtggtagccgctgtgcacttcgtctgcatgttaaagataatgaagtgacctgggtggaaactgacaacaccggcaacgacgagtatggcaatcatcaagtacgtgcctgtttgcgcggtcgctccatccgtcggcgtattaatcatcccgatcgcttgaattacccaatgaaacgcgtgggcaaacgcggcgaaggcaaattcgaacggattagctgggatgaagccctggatactatcgccagtagcctgaaaaaaaccgtcgaacaatatggcaatgaggctgtatatattcagtactcttcggggattgttggcggcaatatgacccgctcttcaccatcagcctcggcggtcaaacgcctgatgaactgctacggcggttcactcaaccagtatggctcctacagcaccgcgcaaatttcctgtgccatgccctacacctacggcagtaatgatggcaacagcaccacggatattgaaaacagcaagctggtcgtgatgtttggtaacaacccggcagaaacccgcatgagcggcggtggcatcacttatcttcttgaaaaagcgcgcgagaaatcgaacgcaaaaatgattgttatcgatccgcgatataccgatacggctgctggtcgtgaagacgaatggctacctattcgcccgggcaccgatgccgcgctggttgcgggtattgcctgggtattgattaacgaaaatctcgttgatcaaccttttctcgataaatactgcgtcggctatgacgaaaaaaccttacccgcagatgcaccaaaaaatggtcactataaagcctatattcttggtgaaggagacgacaaaacagcgaaaacgccgcagtgggcttcgcaaattaccggtatcccggtggaccgtatcatcaagctggcgcgtgaaattggcacagcaaaacccgcttatatctgccagggctgggggccgcaacgccaggcaaacggtgagctgaccgcacgcgctattgctatgttgcctattttgacgggcaatgtcggcatcagcggcgggaatagtggcgcgcgtgaatcgacctataccattaccatagaacgcctaccggtgctggataatccggtcaaaacgtcaatctcctgcttcagctggacggatgctatcgatcatggcccgcaaatgacggcaatccgcgacggcgtccggggcaaagataaactggatgtgcccattaagttcatctggaactacgcgggaaataccctggttaatcagcattctgacatcaacaaaacgcatgaaattctgcaggacgaatcgaaatgcgaaatgattgtggtcatcgaaaactttatgacctcatcggcaaaatatgccgacattctgctgccagacctgatgaccgttgagcaggaagatattattcctaacgactacgccggtaacatgggatatctcattttcctccagccagtcaccagcgaaaaattcgaacgcaaaccgatttactggatcctgagtgaggtcgcgaaacgtcttggacctgacgtctatcaaaagttcacagaaggtcgcacgcaggaacaatggttacaacatctgtacgccaaaatgcttgccaaagatccggcgttaccgtcttacgacgaactgaaaaaaatgggtatctataagcgtaaagatcccaatggtcattttgtcgcctacaaagcatttcgtgacgaccccgaggcaaatccacttaaaacgccttccggtaagattgaaatttattccagcaagctggcggaaattgcccgtacctgggaactggaaaaagatgaagtgataagcccactgccagtttatgcctcaacctttgaaggctgggactcccctgaacgtagaaccttcccactgcaactgtttggtttccattacaaatcccgtacccactcgacctacggcaatattgatgtcctgaaggcagcctgccgtcaggaggtgtggatcaaccctatagatgcacagaaacgtgggattgccaacggcgatatggtgcgggtgtttaaccatcgtggcgaagttcggctaccagccaaagtgacaccacgcattcttcctggagttagcgctatgggtcagggagcctggcacgaggccaatatgtctggcgataaaatcgaccacggcggctgtgtgaatacgctaaccactctgcgcccttcaccactggcgaagggaaacccgcagcacactaatctggtcgagatcgaaaaaatataa

SEQ ID NO: 260727 - DNA, 306 bp, Klebsiella pneumoniae
atgaaactctcaacctgctgtgccgcgcttctgctcgccctcgcctcacccgcggtactcgccgcgccgggatcctgtgagcgcatacagagcgatatatcacagcgcattatcaataatggcgttcccgaaagcagcttcacgttaagtattgtacccaatgaccaggttgatcagcctgattcccaggtcgtcgggcattgcgctaatgatacgcataaaattctctacacccgcaccaccagcggtaacgtctctgctcccgcgcagtctacccaggatggcgcgcctgccgaaccgcagtaa

SEQ ID NO: 260728 - DNA, 747 bp, Klebsiella pneumoniae
atgattgagaatcatctctactctctggtgactgttgtgaaatacaaattactgccatgcttactcgcgatattcctcacaggatgtgaccgcacagaggtaacactttcatttacccctgagatggccagtttctctaatgaattcgattttgatccgctgcgtggtccggtaaaagatttcactcagacattaatggatgagcaaggtgaagtgacgaaacgtgtttcggggactttgtcggaagaaggctgttttgattcactcgaattactggatctggaaaataataccgtggttgccctggtactggacgccaattattaccgtgatgcccagacactggagaaaagagttcgtttgcagggaaaatgccagctagcagaattaccttctgcaggggtgagttgggaaaccgatgataatggctttgtgattaaagccagcagcaaacagatgcagatggaatatcgctatgatgatcagggttatccgctgggtaaaaccacgaaaagtaacgacaaaacattatctgtcagcgctacgccatcaacggatccgatcaaaaaattagattacacagcggttactttactgaataatcaacgagttggtaatgtaaaacagagctgtgaatatgacagtcacgccaatccggtggactgtcagctaatcattgttgatgaaggagtaaaacccgccgtcgaacgggtttacaccatcaaaaatactatcgattattattaa

SEQ ID NO: 260729 - DNA, 561 bp, Klebsiella pneumoniae
atgccaagcgcccacagtgttaagctacgcccgctggagcgtgaagatttacgctatgtacatcaactcgacaataacgccagtgtgatgcgttactggtttgaggaaccctacgaagcctttgttgaactctctgatctgtacgataagcatattcacgatcagagcgaacggcgctttgtggtggaatgtgacggcgaaaaagccggtctggtggagctggtggaaattaaccatgttcatcgccgcgcagaatttcagataattatctccccggaatatcaggggaaaggtctggcaacccgtgctgcaaaattagcaatggactatggcttcaccgttctcaatctctataagctgtatctgatcgtcgataaagagaatgaaaaagcgattcacatttaccgcaagcttggctttacggttgaaggtgaattgatgcatgagttctttattaatggtcaatatcggaatgccattcgcatgtgcatattccagcatcagtatctggcagagcacaaaacaccgggtcagactctcctgaagccgaccgcacaatag

SEQ ID NO: 260730 - DNA, 342 bp, Klebsiella pneumoniae
atgaaaattactctcagcaaacgaattggcctgctcgcttttctgctgccttgcgcaatggcattgagcacaactgttcatgccgaaactaacaaactggtgattgagtctggcgacagtgcacaaagccgccagcacgccgctatggaaaaagagcaatggaatgacacgcgcaatctgcgtcagaaagtgaataaacgcactgaaaaagagtgggataaagccgacgccgcttttgataaccgcgataaatgtgagcaaagcgccaacatcaatgcctactgggagccaaatactttgcgctgcctggaccgtcgaactggccgcgttattaccccctaa

SEQ ID NO: 260731 - DNA, 327 bp, Klebsiella pneumoniae
atgattaaaacaacgttactattttttgctactgcgctgtgtgaaattattggatgctttctgccctggttgtggttaaaacgaaacgccagtatctggctgttgcttccggcggggatttctctggcactgtttgtctggttgttaacgttgcatcctgcggcgagtgggcgtgtttacgcggcttatggtggcgtttatgtctgcacggcgttgatttggctgcgtgttgtggatggcgtgaaactgagtctttatgactggacgggggcgttgattgcgctttgcggcatgttgatcattgttgcgggctgggggcgcgcgtaa

SEQ ID NO: 260732 - DNA, 1020 bp, Klebsiella pneumoniae
atgaaaagcattttaattgaaaaaccgaatcaactggcaattatcgaacgcgaaatacccaccccgtcagcgggtgaagtacgagtaaaagtgaaacttgccggaatttgtggttcagatagccatatttatcgtgggcataatccttttgcgaaatatccgcgcgtcattggtcatgaattctttggcgtcattgatgcagtgggtgaaggcgtggaaagcgccagagtcggtgaacgcgttgctgtcgatccggtggtcagctgtgggcattgctatccgtgctctataggtaagccgaacgtttgtacgacactggctgtattaggtgtgcacgctgacggtggtttcagtgaatatgccgtggttccggcaaaaaatgcgtggaaaattcctgaagcagtggccgatcaatatgcggtgatgatcgaaccttttaccattgcggcgaacgtaaccggtcatggtcaaccgactgaaaatgataccgttctggtttacggtgccggtccaatcggcctgacgatcgttcaggtattaaaaggcgtctataacgttaaaaatgtgattgttgccgatcgcattgatgaacgactggaaaaagcgaaagagagcggggctgactgggcgattaataacagccagacaccgcttggcgagattttcgctgaaaaaggcataaagccgacattaattatcgatgcggcttgtcatccttctatcctgaaagaggccgtaacgctggcttctccagcggcacgtattgtattgatgggcttctccagtgaaccgtctgaagtgattcagcaaggaattaccggaaaagaactctctattttctcttcacgcttaaatgcaaataaattcccggtcgttatcgactggttaagtaaagggttaattaaaccagaaaaattaattacccatatgtttgatttccagcatgttgctgatgccatcagtttatttgaacaggatcaaaaacattgctgcaaagtcttactcactttttctgaataa

SEQ ID NO: 260733 - DNA, 1368 bp, Klebsiella pneumoniae
atgacaatagaaaaacacgaaagaagcactaaggatttggtgaaagcagcagtatcgggatggctgggcactgcgcttgaatttatggatttccagttatattcgctcggcgcagcgttagtgtttcatgaaatattttttcctgaatcatcaacggcaatggcgttaattctggcaatgggaacctacggtgcaggttatgtggcgcgtattgtcggagcatttattttcggcaaaatgggcgacagaatcgggcgtaaaaaagtgctctttattaccatcactatgatggggatctgtaccaccttaattggtgtgctgccgacctatgcacaaattggtgtgtttgcgccaattttgctggtgacgctgcgtattattcaggggctgggggcaggcgcggaaatttccggtgccggcacgatgctggcggaatatgcaccaaaaggtaagcgcggaattatctcctcatttgttgctatggggactaactgcggaaccttgagcgcaacggcaatctgggcctttatgttcttcattctcagtaaagaggaactgctggcgtggggatggcgtataccgttcctggcgagcgttgtcgtgatggtctttgctatctggttgcgtatgaatctgaaagaaagcccggtctttgagaaggttaacgacagcaaccaaccgacagcaaaacttgcacctgctggtagcatgttccagagcaaatccttctggctggcaacagggctgcgttttggtcaggcgggtaactccggtttaattcagactttccttgcaggctatttagtgcagacgttattgtttaacaaagcaattccaacagatgcattgatgatcagttcgattctcggctttatgaccattccgttccttggttggttatccgataaaattggtcgccggatcccgtatattattatgaatacctctgcgattgtgctggcgtggccaatgctttctatcatcgtagataaaagctatgccccgagcaccattatggttgcactgattgtgattcataactgtgcggtgctgggattatttgctctggaaaacattaccatggcagaaatgttcggctgtaaaaaccgctttacccggatggctatttctaaagaaattggtggtcttatcgcttccggttttggtcctatcctggcgggtattttctgcaccatgacggaatcctggtatccgatcgccattatgatcatggcatattcagtgattggtttaatctctgcgctgaaaatgccagaagtgaaagaccgtgatttaagtgcgctggaagacgctgcggaagatcaaccgcgtgttgtcagagctgcgcaaccttccagaagtctttaa

SEQ ID NO: 260734 - DNA, 1461 bp, Klebsiella pneumoniae
atgggaaataatttgttatcagcaaaagcgacgctccctgtttatgatcgtaataacctggccccaagaattgttcatttaggctttggtgcatttcaccgtgcgcatcagggcgtgtatgccgatattcttgctacggaacatttcagtgactggggatattatgaggtcaatttaatcggcggtgaacagcaaattgccgatttacaacagcaagataatctttataccgttgcggaaatgtcggccgatgcgtggacggctcgcgtcgttggcgtcgttaaaaaagccttgcacgtacagattgatggcttagaaaccgtgttggctgcgatgtgtgaaccacaaatcgcgattgtctctctgacaatcaccgaaaaagggtatttccactctccggcgaccggacagttaatgctcgatcacccgatggtcgttgccgacgtacaaaatccccaccagccgaaaactgcaacaggggtgattgtcgaagcgctggctcgccgtaaagcggcaggacttcccgcatttaccgtcatgtcatgtgacaacatgccagaaaacggtcatgttatgcgtgacgttgtcacttcctacgcgcaagctgttgatgtaaaactggcacaatggatcgaagaaaacgtgactttcccatcaacaatggtggaccgtattgtgcccgcagtgacggaggatacgctggcgaaaatcgaacaacttaccggtgtgcgcgatcctgcgggcgttgcctgtgaacctttccgccagtgggttatcgaagataactttgttgccggacgtccggaatgggaaaaagcgggagccgaactggttagtgatgtgctgccttatgaagagatgaagttgcgcatgctcaacggcagtcattcattcctggcgtatctggggtatcttgccggatatcagcacattaatgactgcatggaagatgaacattatcatcatgcagcgtatgccttgatgttgcaggaacaagcgccgacgttgaaagtgcagggcgttgatttgcaagattacgctaaccgattgattgaacgctatagcaacccggcgctacgtcatcgaacctggcagattgcgatggatggcagccagaaattgccacagcggatgttagattctgttcgctggcatctggcgcatgacagcaagttcgatctgctggcgctgggcgtcgcaggttggatgcgttatgtgggtggtgttgatgaacagggaaatccgatagaaatcagtgacccactgttacctgttattcagaaggctgtacaaagtagtgccgaagggaaagcgcgcgtccagtcattgctggcgattaaggcgatctttggtgatgatttgccagacaatagcttgtttactgcaaaagtgacggaagcgtacttgtctttattagcgcatggtgcaaaagcgaccgtggcgaaatattccgtgaagtaa

SEQ ID NO: 260735 - DNA, 204 bp, Klebsiella pneumoniae
atgacgacctacgatcgtaaccgtaacgcaatcaccactggcagccgtgttatggttagcggcaccggtcacactggcaagatcctgtcgattgatactgaaggtctgaccgctgagcaaatccgccgcggaaaaaccgtagttgttgaaggttgtgaagagaaactggcacctctggacctgattcgtctcggcatgaactaa

SEQ ID NO: 260736 - DNA, 687 bp, Klebsiella pneumoniae
atgaccgtcgaaacgcaacttaatcccacacagcctgtcaatcagcaaatttatcgtatccttcgtcgcgacattgtccattgcctgattgcaccaggcacaccgttgtcggaaaaagaagtttctgttcgtttcaatgtgtcacgccagccggttcgtgaagcctttattaaactggcggaaaacggcctgatccaaattcgtccgcagcgtggcagctacgtcaacaaaatttccatggcccaggtgcgcaacggcagttttatccgtcaggccattgagtgcgcggtggcgcgtcgggcggcgagcatgattaccgaaagccagtgctaccaactggaacaaaatcttcaccagcaacgcattgccattgagcgcaagcaactggatgatttttttgaacttgatgacaacttccatcaactcctgacccagattgccgactgtcaactggcgtgggataccattgagaacctgaaagcgaccgttgatcgcgtgcgctatatgagtttcgaccacgtttctccaccagaaatgctgttacgccagcatcttgagattttctctgccctgcaaaaacgtgatagcgatgcggtagaacgtgcaatgacgcaacatttgcaggaaatcagcgaatccgtgcgccagatccgtcaggaaaacagcgactggtttagcgaagagtaa

SEQ ID NO: 260737 - DNA, 747 bp, Klebsiella pneumoniae
atgatcgttttagtaactggagcaacggcaggttttggtgaatgcattactcgtcgttttattcaacaagggcataaagttatcgccactggccgtcgccaggagcggttgcaggagttaaaagacgaactgggagataatctttatatcgcccaactggacgttcgcaaccgcgccgctattgaagagatgctggcatcgcttcctgccgagtggtgcaatattgatatcctggtaaataatgccggtctggcgttgggcatggagcctgcgcataaagccagcgttgaagactgggaaacgatgattgataccaacaacaaaggcctggtatatatgacgcgcgccgtcttaccgggtatggttgaacgtaatcatggtcatattattaacattggctcaacggcaggcagctggccgtatgccggtggtaacgtttacggtgcgacgaaagcgtttgttcgtcagtttagcctgaatctgcgtacggacctgcatggtacggcggtgcgcgtcaccgacatcgaaccgggtctggtgggtggcaccgagttttccaatgtccgctttaaaggcgatgacggtaaagcggaaaaaacctatcaaaataccgttgcattgacgccagaagatgtcagcgaagccgtctggtgggtgtcaacgctgcctgctcacgttaatatcaataccctggaaatgatgccggttacccaaagctatgccggactgaatgtccaccgtcagtaa

SEQ ID NO: 260738 - DNA, 2046 bp, Klebsiella pneumoniae
atgacaacaatgaatcctttccttgtgcaaagcacactgccgtatctggctccccattttgatcaaattgccaatcatcactatcgcccggcattcgatgagggaatgctgcaaaagcgggcagaaattgctgccatcgcgcttaacccgcaaacgcctgatttcaacaatactattctggcactggaacaaagcggagaattacttacccgcgttaccagcgtcttttttgcgatgactgcggcgcataccaatgatgaattacagcgtcttgatgaacagttttccgctgaactggcggaactggctaatgatatctatctgaacggtgaattattcgcgcgggtagatgctgtctggcagcgccgagaatccctggggcttgatagtgaatccatccgcctggtggaggtgattcatcaacgttttgtccttgccggagccaaacttgcgcaagctgataaagcaaaattaaaagtactgaatacagaagctgcgaccctgaccagccagtataaccagcggttactggcagcaaataaatccggcggtctggttgtgaacgatttcgcgcagctggcaggaatgagtgagcaagagattgctctggcggcagaggcggctcgcgagaaaggtctggataacaaatggctgattccgttgctgaataccacccaacaaccggcgcttgccgaaatgcgcgatcgtgcgacgcgtgaaaaactgtttattgcgggctggacgcgagcggaaaaaaatgatgccaatgatacccgcgctatcattcaacgtctggtggagatccgtgcgcagcaggcgaaactgcttggtttccctcattatgccgcatggaaaatcgccgatcagatggcaaaaacgccagaagcagcactcaactttatgcgggaaattgttccagcggcgcgtcaacgtgcgagcgatgaattagcctccatacaggcggttattgataagcagcagggcgggtttagcgcgcagccgtgggactgggcattttatgccgaacaggtacggcgggagaaatttgatcttgatgaggcgcagctaaagccatattttgaattaaacacggtgttgaatgaaggtgtattctggaccgcgaatcagctcttcggtattaagtttgtcgaacgttttgatattcctgtctaccatcctgacgttcgggtgtgggaaatttttgatcataatggcgtggggctggcgttattttacggtgatttcttcgcccgtgattcaaaaagcggcggtgcatggatgggcaattttgttgagcaatcaacgcttaatgaaacgcacccggtaatttataacgtttgcaattatcagaaacccgctgccggtgagcctgcgttgttactctgggatgatgtaataaccttattccatgaatttggtcatacgctgcacggcctttttgcccgccagcgttatgccacgctttccggcaccaacacgccgcgtgattttgtcgaatttccgtcgcaaatcaatgaacactgggcaacgcatccgcaggtattcgctcgctacgcccggcattatcagagcggggcagcaatgcctgacgaactgcaacagaaaatgcgtaatgccagcctgttcaacaaagggtatgagatgagcgaactgcttagcgccgcacttctcgatatgcgctggcattgcctggaagaaaacgaagcaatgcaggatgtcgatgattttgaattgcgggcgctggtggcggaaaatatggatcttcctgctataccgccacgctatcgcagcagttatttcgcccatatttttggtggcggatatgccgcaggttattacgcttatctgtggacgcaaatgttggccgatgatggttaccagtggtttgttgagcagggcggattaacgcgtgaaaatgggctgcgttttcgcgaggcgatcctttccagaggtaacagcgaggatctggaacgcctgtatcgacaatggcgcggtaaggcacctcagattatgccgatgctgcaacatcgtggcttgaacgtataa

SEQ ID NO: 260739 - DNA, 393 bp, Klebsiella pneumoniae
atgaaatttcaggccattgtattagcaagttttcttgtcatgccttatgcgttggcagatgaccagggcggattaaaacaggatgcagcgccaccgccgcctcatgcaatagaagatggctatcgcggaaccgatgatgcaaaaaaaatgaccgttgatttcgcaaaaaaaatgcacgatggcgcttcggtttcactacgcggtaatttgatttctcacaaaggagaggaccgttacgtttttcgcgataagagcggtgaaattaatgtcgttattcctgcggccgtctttgatggacgagaagttcagccggaccagatgatcaacattagcggcagtctggataagaaaagcgcgccggccgtcgttcgggtcactcatttgcagaaataa

SEQ ID NO: 260740 - DNA, 912 bp, Klebsiella pneumoniae
atgatcaagaagacaacggaaattgatgccatcttgttaaatctcaataaggctatcgatgcccactaccagtggctggtgagtatgtttcacagcgtggtcgcgagagatgccagtaagccagaaataacggataaccattcttatggactgtgccagtttggtcggtggattgatcatctgggaccactcgataacgatgaattaccttacgttcggctaatggattctgcccatcaacatatgcataactgtggtcgggaattaatgttggctattgttgaaaatcactggcaggacgcgcatttcgacgcctttcaggaagggttgctttcttttactgcggcattaaccgattacaaaatttatttgctgacgatccgtagcaatatggatgttttgacgggattgccgggtcgtcgggttcttgatgaatcctttgatcatcagttacgcaacgctgagcctctgaatctttatttaatgttgttggatattgaccgatttaaattggttaatgatacctacgggcatttaatcggcgatgtagtattacgcaccctggcaacttacttagccagttggacgcgcgattacgaaacggtttatcgctacggtggcgaagaatttatcattattgtcaaagcggctaatgatgaagaagcatgtcgtgcaggtatcagaatttgccagttagtcgataaccatgccatcacacattctgaagggcatatcaacattaccgtgactgcaggtgtgagtcgcgcatttcctgaagagcctctggatgtggtcattggaagagcggaccgggcaatgtatgagggtaagcaaaccggaagaaatcgctgcatgtttattgacgaacaaaatgtgattaaccgagtttcagctccgtttaacattcattga

SEQ ID NO: 260741 - DNA, 1188 bp, Klebsiella pneumoniae
atgaacttatccctacgacgctctaccagcgcccttcttgcctcgtcgttgttattaaccatcggacgcggcgctacgctgccgtttatgaccatttacttgagtcgccagtacagcctgagtgtcgatctaatcggttatgcgatgacaattgcgctcactattggcgtcgtttttagtctcggttttggtatcctggcggataagttcgacaagaaacgctatatgttactggcaattaccgccttcgccagcggttttattgccattcctttagtgaataacgtgacgctggtggtgctcttttttgccctcattaactgcgcctattccgtttttgctaccgtgttgaaagcctggtttgccgacaatctttcctccaccagcaaaacgaaaatcttctcaatcaactacaccatgctcaacattggctggaccatcggtccgccgctcggcacgctgttggtgatgcagagcatcaatctgcccttttggctggcagctatctgttccgcgtttcccatgcttttcattcaaatttgggtaaagcgcagcgagaaaatcatcgccacggaaacagtcagtgtctggacgccgaaagttttattacaagataaagcactgttgtggtttacctgctctggttttctggcttcctttgttagcggcgcatttgcttcatgcatttcacaatatgtgatggtgattgctgatggtgattttgccgaaaaggtggttgcggttgttcttccggttaatgctgccatggtagttacgttgcaatattccgtgggacgccgacttaacccggctaacatccgcgcgctgatgacagcaggcaccctctgtttcgtcatcggtctggttggttttattttttccggcaacagcctgctattgtggggtatgtcagctgcggtatttactgtcggtgaaatcatttatgcgccgggcgagtatatgttgattgaccatattgcgccgccaggaatgaaagccagctatttttccgctcagtctttaggctggcttggtgcggcgattaacccattagtgagtggcatagtgcttaccagtctgccgcctttctcgctgtttatcatcttagcgttggtgatcattgctgcgtgggtgctgatgttaaaaggaattcgtgcaagaccgtgggggcagcccgcgctttgttga

SEQ ID NO: 260742 - DNA, 900 bp, Klebsiella pneumoniae
atgtcgcgaaaagatggggtgttggcgctactggtagtggtcgtatgggggctaaattttgtggtcatcaaagtggggcttcataacatgccaccgctgatgttggccggtttgcgctttatgctggttgcttttccggctatcttttttgtcgcacgaccgaaagtaccgctgaatttgctgctggggtatggattaaccatcagttttgcgcagtttgcttttcttttttgtgccattaacttcggtatgcctgctggactggcttcgctggtgttacaggcacaggcgttttttactatcgtgcttggcgcgtttactttcggtgagcgactgcatggcaaacaattggcggggatcgccttagcgatttttggcgtactggtgttaatcgaagatagtctgaacggtcagcatgtggcgatgctcggctttatgttgaccctggcggcagcatttagttgggcgtgtggcaacatcttcaataaaaagatcatgtcgcactcaacgcgtccggcggtgatgtcgctggtaatctggagcgctttaatcccaatcattcccttctttgttgcctcgctgattctcgatggttccgcaaccatgattcacagtctggttactatcgatatgaccaccatcttgtctctgatgtatctggcgtttgtggcgacaattgttggttatgggatctgggggacgttactgggacgctatgaaacctggcgggttgcaccgttatcgttactggtgcccgtagtaggactggcaagtgcggcactattgttggatgaacgcttaacgggtctacaatttttcggggcggtgctcattatgaccgggctgtatatcaatgtatttggcttgcggtggcgtaaagcggtaaaggttagaggctaa

SEQ ID NO: 260743 - DNA, 699 bp, Klebsiella pneumoniae
gtgatttttcaaaagattgcccgcttacttaaatccgagatcaatggctattcatggcatgttggtgatttgttgccgtcagaagctgaactcgctgttcgttataatgtttcgcgtaataccctgcgtaaggcattatccttgctggaaggcgaaggaattattcatagaaagcatggttcaggaacatatattcaaaaaaagaattttgttgcacacattgatcacatgaacagcttcagtgaaattgcgcataaaagcggcaaggaggcaggaagtcagattatgaaatttgaagtgcaggatgcttctccccctattgcgactgagctgaatttagtgactggtgagcaggtttattacataaagagactgcgattcattgaggataatgcagcacaattagaagaaacgtggatgtcagtggcacgttttcctgatttaaccgtagcacatatgcaaaaatccaaattttcgtatattgagaacgaatgcgggatcaaaatcattggcacctttgaaactttctcccctacttttcctaccccagaaatcgccagtattttacggatcagcccacgggatcccatacttaaaattcagacccaggctgtggacagtaactctattccgctggattattcgttactttacagcaatattttcgagttccaggtaaagtactttttcccgcgataa

SEQ ID NO: 260744 - DNA, 312 bp, Klebsiella pneumoniae
atgaaaaagatattgttagtttgcgctgcgggcatgtcaaccagtatgctggttaaacgtatgattgatcatgctaacgctatttcacttgaagttaatatttccgcattggcgattgcagaggctaaagggaaaattaaaaataacgaagttgacgttgttttacttggcccgcaagttcgctttcagaaaccagagattgaagctgttgcacaggggaaaatgcctgtagctgttatcgagatgaaagactatggcaccatgaacggacaggcagttcttgaatttgcgatgaaactactgcaagagtaa

SEQ ID NO: 260745 - DNA, 1323 bp, Klebsiella pneumoniae
atgggattaatgacctcattcgaacgtggaatggaacgttttcttgttccagttgctatcaagttaaactcacaaaaacatgttgcagcggtgagagatggattcgtttttacgtttccaattatcatggcaagctcattaattatattaattaactttgccatattatcgcccgacggctttattgccgggctgctgcatctgaaccgcgttttccccaaccttgaaaaagcacaagctatttttactccggtaatgaatggctctgtaaatatcatgtcaattatgattgctttcctggtcgccagaaatatggcgattagctatgagcaagatgatcttttatgcggattaacggcaataggagcattttttattgtttatacgccatatcagatgatagatgggcaagcattcctgacgaccaaatatctcggcgcacagggggtgtttgttgctgttatcgttgcattaatcaccagtgaaatattttgtcgcttagctcgaaacccaaaaatcaccataacgatgccggcagctgtacctcctgcggtatcgcgttcatttaaagttttattgccaatattttttgtcatggtgttcttttccgcacttaattattgcctgacactgatatccccggcaggattaaacgatctcatttacacattaatccagacgccgctcaaacatatgggaacgaatatctttgcggtaattatcctgggggctgtgggtaatttcctgtgggtgctggggatccacggacctaataccacctcggcaattcgagaaactgttttttctgaggctaatctggagaatctctcctgggccgctcaacacggcactacctggggcgcgccatatccgattacctggacttctattaatgatgcattcgccaactgcggcggttcaggtatgacgttggggttattgttggctatttttatcgcgtctaagcgtgcggaataccgtgatctggcaaaaatgtcgtttatccccggtattttcaatatcaatgaaccgataatgttcggccttcctattgtacttaaccccatcatgatggtgccgtttattctggttcccattgttaactgtgccattggttacttctttgtttcgatggaaattattccaccggttgcttatgccgtgccctggactacgcccggacctttaattgctttcctcggaaccgggggaaactggttggcgttactggtgggttttttatgtttaggtgtggcgacaatgatctatttaccttttgttattgccgccaacaaggtcaataacatgacaactaacggataa

SEQ ID NO: 260746 - DNA, 312 bp, Klebsiella pneumoniae
atgtttgcagatgaagaacttgttatggagttactgatcaacgcgggacaggcacgttctgatgcgatggaagccatacgttgtgccgggcaaaaagactggcagggcgcaactcagctaatggccagttcggaattagcctgtcttcaggcacataagattcagaccgcgttaattagtcaggatgaaggttgtggcaaaatagaagttaatttaattctggttcatgcacaggatcatttgatgaatgcaatattatgccaggatttagccagggaaattatttcattaagaaaagagctccatgcctga

SEQ ID NO: 260747 - DNA, 1674 bp, Klebsiella pneumoniae
atgaatataaagacgattaacgtcagccttttgtctttttctattattacagcattgtttccgttgaacgcgttggcaacaaaattaaccattgagcagcgccttgaactgcttgaaaatgaattgtcgcaaaataaacaagagctgagagcaacacagaatgaactgggggtatataaatcccgactttcgaccttacaaaaaagtattacggaaaataaatacaaatcagcctcacttgctgaaatatcagcgacatctcccgtcgctgataacatcaaaaatgaaaacggtgaacagaactcgtctgccgcagcgcatactataaatggatcgcagcaagttgccgttattgaaagtaaaggcgacaaaaccactatcgaaagcgtgaccctgaaagatatcagtaaatatataaaggatgatattgggttcagctatcaggggtacttccgctcaggctggggtaccggaaatcatggctcaccacaaacttatgcagcgggttctctgggacgttttggtaacgagatgagcggttggtttgacttaaccttaaatcagcgtgtttataatcaggacggtaaaacggcaaatgcggtcgttacctatgatggcaacgtaggtgagcagtataacgatgcctggtttggtgacagtgccaatgaaaatatcatgcagttcagtgatatttatctgacaacgcgaggttttttacccttcgcgccagaggcagacttctgggtaggcaaacataaactcccgcaatatgagatccaaatgctggactggaaaaccttaaccacggatgtcgctgcgggtgtggggattgaaaactgggcacttggtgtagggctgtttgatatgtccttaagccgtgatgatgtcgatgtttactctcgtgattttacgcgtaccagtcagatgaataccaattctgtggatgttcgttatcgcaatatcccgttatgggatgatgcaacattatcattaatggctaaatattccgcaccaaataaaacggatcaacaacaagataatgaaaatgacgacagttattttgaaatgaaagatagctggatgctgacttctgttttacggcaaaacctgcaacgcgatacgtttaatgaatttacgttacaggttgccaataattcctatgccagcagttttgccagtttctcagatgccagtaacacgatggcgcatggtcgctattactatggtgaccataccaatgggatcgcctggcgtttaatctctcagggcgagatgtatcttactgacaatattattatggctaacgcgcttgtctattctcatggcgaagatgtttatagttatgaaagtggcgctcatagtgattttgacagtattcgcaccgtagtaagaccggcctggatctggaatacatggaatcagacggggcttgaattaggctggtttaagcaacagaacaaaacacagcagggtgtaacactaaatgaatcggcttataaaacgacactctggcatgcattgaaagtgggtgaaagcattttaggttcacgaccagaaattcgcttctatggaacgtatatcaatattctggataacgaattatcgaattttaagtttaatgagaacagcaaagacgagtttatggccggcatccaggcggaagtctggtggtaa

SEQ ID NO: 260748 - DNA, 1440 bp, Klebsiella pneumoniae
atgtcaggatttaaaaaaggttttttatggggcggcgcggtagccgcgcatcagttggaaggtggctggaatgaaggaggaaaaggcatcagtatcgctgatgtgatgactgctggcgctcacggtgtgccgcgtgaagtgacagaaggcgttatcgacggacttaattatcccaatcatgaagcaattgatttttatcatcgctataaaacagatattcagttatttgccgagatgggattcaaatgctttcgaacttccattgcctggacacgaatctttccgcaaggtgacgaacaggagccgaatgaagagggtttaaaattttatgatgatctgttcgatgaatgcctgaagcagggaatggaacctgtggtgacgctttcgcattttgagatgccttatcatctggtgacaaaatatggtggctggcgaaaccgtaaactgatcgactttttcatccgcttcgcatcaacggtcttcacgcgctataaagaaaaagtaaagtactggatgacgtttaacgaaatcaataatcaggtgaatttcagcgaaagcctgtgtccatttactaattccggtatcttgtattcgccagaggaagatatcaatgagcgcgaacaaataatgtaccaggcggtacattacgagttagttgccagtgccctggcagtacagactggtaaatcgatcaatcctgaatttaatatcggctgtatgatcgccatgtgccccatctatcctctgacttgtgcacccaacgatatgatgatggccacgaaagcgatgcatcgtcgttactggtttactgatgttcatgcgcgtggatattatccgcaacatatgctgaattactttgccaggaaaggattcaacctcgatatcacaccagaagataatgcgattcttgccagaggttgtgtcgactttatcggctttagctactacatgtcttttactacgcaattttcgccagataacccgcaactgaattatgttgaaccacgagatttggtcagcaacccttatatcgatacatccgaatggggatggcaaattgatccggcagggctacgttattcactcaactggttctgggatcatttccagttgccgctgtttattgtcgaaaatggatttggtgcggttgaccagagacaagctgacggcacggtgaacgatcactatcgcattgattactttgcttcccatattcgggaaatgaaaaaagccgtagtcgaagatggtgttgacttaattggctacaccccatggggctgtattgacctggtttctgccggaacaggggaaatgaaaaagcgctacggaatgatttacgtcgataaagacaacgaagggaagggaaccctggaacggatacgtaaagcgtcgttttactggtatagggatctcatcgccaacaatggcgaaaatatttga

SEQ ID NO: 260749 - DNA, 219 bp, Klebsiella pneumoniae
atgaaaccacttttatccgcaatagcagctgcgtttattctcttttccacgcagggcattgcggaacaaaccacgcagccggttgttacttcctgtgccaatgtcgtggttgttcccccatcgcaggaacaaccaccgtttgatttaaatcacatgggtactggcagtgataagtcggatgcgctcggcgtgccctattataatcaacacgctatgtag

SEQ ID NO: 260750 - DNA, 384 bp, Klebsiella pneumoniae
atgtccagacgcaatactgacgctattaccattcatagcattttggactggatcgaggacaacctggaatcgccactgtcactggagaaagtgtcagagcgttcgggttactctaaatggcacctgcaacggatgtttaaaaaagaaaccggtcattcattaggccaatacatccgcagccgtaagatgacggaaatcgcgcaaaagctgaaggaaagtaacgagccgatactctatctggcagaacgatatggcttcgagtcgcaacaaactctgacccgaaccttcaaaaattactttgatgttccgccacataaataccggatgaccaatatgcagggcgaatcgcgctttttacatccattaaatcattacaacagctag

SEQ ID NO: 260751 - DNA, 435 bp, Klebsiella pneumoniae
gtgaaaagtaccagcgatctgttcaatgaaattattccattgggtcgcttaatccatatggttaatcagaagaaagatcgcctgcttaacgagtatctgtctccgctggatattaccgcggcacagtttaaggtgctctgctctatccgctgcgcggcgtgtattactccggttgaactgaaaagagtgttatcggtcgacctgggggcgctgacccgtatgctggatcgcctggtctgtaaaggctgggtggaaaggttgccgaacccgaatgacaagcgcggcgtactggtaaaacttaccaccagcggcgcggcaatatgtgaacaatgccatcaattagttggccaggacctgcatcaagaattaacaaaaaacctgacggcggacgaagtggcaacacttgagcatttgcttaagaaagtcctgccgtaa

SEQ ID NO: 260752 - DNA, 666 bp, Klebsiella pneumoniae
atgttagatttatttaaagcaattggcctggggctggtggtgttactaccgttagctaacccattaacaactgtcgcgttatttcttggcctggcaggcaacatgaacagtgccgaacgtaatcgtcagtcgttgatggcctcggtgtacgtctttgccatcatgatggtggcgtattacgccgggcaactggtgatggatacatttggcatttcgattcccggtctgcgaattgcaggcggcttaatcgtcgcgtttatcggttttcggatgctctttccgcaacagaaagcaattgattcaccggaagcgaaaagcaagtcggaagagctggaagatgaacccagcgccaatattgcttttgtaccactggcaatgccaagtaccgccggtccgggaaccatagcgatgattattagctcggcgtccacagtgcgtcagagttcaacctttgctgattgggtactgatggttgcgccgccgctgatctttttcctggtggcggttattttgtggggaagtctacgcagctctggcgcaattatgcggctggtgggtaaggggggcattgaagcgatctcccgtctgatgggattcctgctggtatgtatgggggtgcagtttattattaacggcatcctggaaatcattaaaacgtaccactaa

SEQ ID NO: 260753 - DNA, 1191 bp, Klebsiella pneumoniae
atgacaacaaacactgtttcccgcaaagtggcgtggctacgggtcgttacgctggcagtcgccgccttcatcttcaacaccaccgaatttgtcccagttggcctgctctctgacattgcgcaaagttttcacatgcaaaccgctcaggtcggcattatgttgaccatttacgcatgggtagtagcgctaatgtcattgccttttatgttaatgaccagccaggttgaacggcgcaaattactgatctgcctgtttgtggtgtttattgccagccacgtactgtcgtttttatcgtggagttttaccgttctggtgatcagtcgcattggtgtggcttttgcacatgcgattttctggtcgattacggcgtctctggcgatccgtatggctccggccgggaagcgagcacaggcattgagtttaattgccaccggtactgcactggcgatggtattaggtttacctctcgggcgcattgtggggcagtattttggctggcgaatgaccttcttcgcgattggtatcggggcgtttattacccttttgtgcctgattaagttacttcccttgctgcccagtgagcattccggttcattgaaaagcctcccgctattgttccgccgcccggcattaatgagcatttatttgttaactgtggtggttgtcaccgcccattacacggcatacagctatatcgagccttttgtgcaaaacattgcgggattcagcgccaactttgccacggcattactgttattactcggtggtgcgggcattattggcagcgtgattttcggtaaactgggtaatcagtatgcgtctgcgttggtgagtacggcgattgcgttgttgctggtgtgcctcgcactgctgctacctgcggcgaacagtgaaatacacctcggggtgctaagtattttctgggggatcgcgatgatgatcatcgggcttggtatgcaggttaaagtgctggcgctggcaccagatgccaccgacgtcgcgatggcgctattctccgggatatttaatattggaatcggcgcgggtgcgttggtaggtaatcaggtcagtctgcactggtcaatgtcgatgattggttatgtgggcgcggtgcctgcttttgccgcgttaatatggtcaatcatcattttccgccgctggccagtgacactcgaagaacagacgcaatag

SEQ ID NO: 260754 - DNA, 1116 bp, Klebsiella pneumoniae
atggttacgccagtaagcatcagcaattacatatctcttcctgataattttcccgctcgtaatattgcacctcaggtaaaagaagttttaaaggattttattgatgcactcagtaccataatatgtgatgaagagtggcgcacgtttttaaacatcaactcagccacaaaaaagatatttaacaaccttgataacttatcatatattcagaggacttcttttcggggtaacgacacactatacaatgaaaaggttcagtttaaactcacttatcccgtcaagaatggaagacacaaagaaaatattgaatttcaggtagtaataaatttaagccctatttatttagataattttcgccatgatggagaaattaatattttttgcgctcccaacccaaagcctgtcactatggggcgcgtatttcagaccggcgtcgagcgtgtgctctttctgtttctgaatgattttattgaacaatttccaatgatcaaccctggtgttcctatcaaaagagcgcatacgccacatattgaacccctgcatccggatcaccataccgctgcagattacttacgccagtttgatttgcttgtcctgaattttatctctcgcggtaattttgtcatactcccccgattatggaataactctgaggttcacagatggttcgggaataaagaacctaacttgctcaccgctattctcgacataacggacagcgaattaaaagaggatttattgcaaagtctgatggattcactaggttctaacaaacatgtactacccgaagtctgcatctgctttttatcccttttagcagaacaagattttccacattttcaggacttgtttttatttttcgccaatatgttattgcactatcaccaatttatgaatcccaatgaaagtgatttgattgacgtgttgatgccagcatcattaagtgatgataaaattatcaaacatatggcgcgcaagaccctcaaactttttgtaaaaaatgaaacgccgccaaaagttactcatgaagacctggtgaaaaacaggcctcgctcccctgtcagaccacctatacccgcaacctccaaaacgccagacctccctgaacgtcattaa

SEQ ID NO: 260755 - DNA, 882 bp, Klebsiella pneumoniae
atggatctgacccaactggagatgttcaacgcggttgccgaagctggcagcattacgcaggctgcagcaatagtgcatcgcgtgccgtcgaatctcactacccgtctacgccagctggaaacagaactgggggtagatctgtttattcgcgagaatcagcgtttacgtctctctcctgccgggcataactttttacgctatagccaacaaattctcgcgttagtggatgaagcgcggagcgttgtcgctggcgatgagccgcaaggtttattttctctgggttcgctggaaagcaccgcagcagttcgcattccggccacgctggcggaattcaaccgtcgttatcccaaaattcagttttcactttccaccggcccttccggcactatgctggaaggagtgctggagggaaaactgaatgcggcatttattgatgggcccattaaccatactgccattgacgggataccggtataccgcgaggagctgatgatcgtcacgccacaaggtcatgcgccagtaatccgcgccagtcaggttaacggcagtaacatttatgccttccgcgccaattgttcgtatcgtcgccacttcgagagctggtttcatgctgacggtgccgctccgggaactattcacgagatggagtcgtatcacgggatgttggcctgtgtggtcgcaggagcaggcattgcgcttattccacgctctatgctggaaagtatgccggggcatcaccaggttgaagcgtggccgttagctgagcaatggcgttggttaacaacctggctggtctggcgtcgtggtgcgaaaacgcttccgcttgaggcatttattcaactactggatgttcctgactcggcaaaacagggttaccaatga

SEQ ID NO: 260756 - DNA, 1389 bp, Klebsiella pneumoniae
atgaccattactccggcaactcatgcaatttcgataaatcctgccacgggtgaacaactttctgtgttgccgtgggctggcgctgatgatatcgaaaacgcacttcagctggcggcagcaggctttcgtgactggcgcgagacaaatatagattatcgtgctgaaaaactgcgtgatatcggtaaggctctgcgcgctcgtagcgaagaaatggcgcaaatgatcaccagcgaaatgggcaaaccaatcaaccaggcgcgcgctgaagtggcgaaatcggcgaatttgtgtgactggtatgcagaacatggtccggcaatgctgaaggcggaacctacgctggtggaaaatcagcaggcggttattgagtatcgaccgttggggacgattctggcgattatgccgtggaattttccgttatggcaggtgatgcgtggcgctgttcccatcattcttgcaggtaacggctacttacttaaacatgcgccgaatgtgatgggctgtgcacagctcattgcccaggtgtttaaagatgcgggtatcccacaaggcgtatatggctggctgaatgccgacaacgacggtgtcagtcagatgattaaagactcgcgcattgctgctatcacggtgaccggaagtgttcgtgctggagcggctattggcgcacaggctggagcggcactgaaaaaatgcgtactggaactgggcggttcggatccgtttattgtgcttaacgatgccgatctggaactggcggtgaaagcggcggtagccggacgttatcagaataccggacaggtttgtgcagcggcaaaacgttttatcatcgaagagggaattgcttcggcatttaccgaacgttttgtggcagctgcggcagccttgaaaatgggcgatccccgtgacgaagagaacactctcggaccaatggctcgttttgatttacgtgatgagctgcatcatcaggtggagaaaaccctggcgcagggtgcgcatttgttactgggcggggaaaagatggctggggcaggtaactactatccgccaacggttctggcgaatgttaccccagaaatgaccgcatttcgggaagaaatgtttggccccgttgcggcaatcaccattgcgaaagatgcagaacatgcactggaactggctaatgatagtgagttcggcctttcagcgaccatttttaccaccgacgaaacacgggccagacagatggcggcacgtctggaatgcggtggggtgtttatcaatggttattgtgccagcgacgcgcgagtggcctttggtggcgtgaaaaagagtggctttggtcgtgagctttcccatttcggcttacacgaattctgtaatatccagacggtgtggaaagaccggatctga

SEQ ID NO: 260757 - DNA, 927 bp, Klebsiella pneumoniae
gtggcagtcgccatggataatgcaattttagaaaacatcttgcggcaagtgcggccgctcattggtcagggtaaagtcgcggattatattccggcgctggctacggtagacggttcccgattgggcattgctatctgtaccgttgacggacagctttttcaggccggagacgcgcaagaacgtttttccattcagtctatttccaaagtgctgagtctcgttgtcgccatgcgtcattactccgaagaggaaatctggcaacgcgtcggcaaagatccgtctggatcaccgttcaattctttagtgcaactggaaatggagcagggtattccgcgcaatccgtttattaatgccggtgcgctggtggtctgcgatatgttgcaagggcgattaagcgcaccacggcaacgtatgctggaagtcgtgcgcggcttaagcggtgtgtctgatatttcctacgatacggtggtagcgcgttccgaatttgaacattccgcgcgaaatgcggctatcgcctggctgatgaagtcgtttggcaatttccatcatgacgtgacaaccgttctgcaaaactactttcattactgcgctctgaaaatgagctgtgtagagctggcccggacgtttgtctttctggctaatcaggggaaagctattcatattgatgaacctgtggtgacgccaatgcaggcacggcaaattaacgcgctgatggcgaccagtggtatgtaccagaacgcgggggagtttgcctggcgggtgggactaccggcgaaatctggcgttggtggcggtattgtggcgattgttccgcatgaaatggccatcgcagtctggagtccggaactggatgatgctggtaactcgcttgcgggcattgccgtccttgaacaattgacgaaacagttagggcgttcggtttattaa

SEQ ID NO: 260758 - DNA, 360 bp, Klebsiella pneumoniae
atgcagtctctcgatccactcttcgcgcgtttatcccgttcaaaatttcgatctcgctttcgtttgggcatgaaagagcgtcagtattgtctggataaaggtgcgccagtcatcgaacaacatgcggcggattttgtcgctaaacgtcttgctccggcattaccggctaatgacggtaagcaaacccccatgcgcgggcatccggtgtttatcgctcagcacgccactgcaacctgttgtcgctgttgtctggctaagtggcataacattccgcagggtgtttcgttaagcgagcaacaacaacgttatatcgtggcggtaatctatcactggctggttatacagatgaatcagccatga

SEQ ID NO: 260759 - DNA, 1419 bp, Klebsiella pneumoniae
atgcatgtacaccccatttcaactttccgtttgttccaggaaggtcatctgctacgtaatagcatcgctatttttgcgctaaccacgctgttctattttattggtgcagagttacggctggttcacgaactttctcttttctggccgctgaatggcgtaatggcgggggtgtttgcccgctatgtctggcttaatcgactgcattactatgcgatcagttatgtggcgatgctggtttatgatgccataaccaccgaatggggactggtttcactggctatcaatttctccaatatgatgtttattgttaccgtcgccttactggtcgtgcgggataagcgtctggggaaaaataagtatgagccagtaagtgccttacggctatttaattactgtctgattgccgcattattatgcgctattgtcggggcgattggttcggtcagtattgatagtctggatttctggcctttgcttgcggactggttcagtgagcaattctcaacgggcgtgttgatcgtgccttgtatgctgacgttggcaattcctggagtgctgccgcgctttaaagcagaacagatgatgcccgccatcgcgcttattgtgtcggttattgcctcggtagtcattggcggagcggggagtctggcgttcccgctgcctgcattaatctggtgtgcagtgcgctatacgccgcaggtaacatgtctgttgacctttgttaccggtgcagtggaaatcgtactggtggctaattcggtgattgatatctcggtcggttcgccgttctccattccggaaatgttctccgcacgtctcggtattgccacgatggcgatatgcccaattatggtttcttttagcgtggcagcgatcaattcgctaatgaagcaagttgcgctgcgagccgactttgattttctgactcaggtttactcacggtccggtctttatgaggcgctgaaaagtccatcgctgaaacagacacaacatctgactgtcatgctgcttgatatcgactatttcaaaagtattaacgataactatggacataaatgtggcgataaagtgttaagcgtgtttgcccggcatattcagaagattgtcggtgataaggggctggtggcgcgcatgggcggcgaagaatttgctgttgcagtgccgtcggtgaatcctgtcgatggtctgctaatggcggaaaaaatccgtaaaggcgttgaactgcaaccattcacctggcaacaaaaaacgctttatctcacggtaagtattggcgtcggtagtggtcgcgcatcgtaccgaacgctgaccgatgattttaataaattgatggtcgaagccgatacgtgtctgtatcgctcgaagaaagatgggcgcaaccgtaccagcactatgcgttacggtgaggaagttgtctga

SEQ ID NO: 260760 - DNA, 1452 bp, Klebsiella pneumoniae
gtgaaaacactaaatcgtcgcgattttcccggtgcacagtatccagaacgtatcattcagtttggtgaaggtaacttcctgcgcgcctttgttgactggcaaatcgatctcctgaatgagcacaccgatctgaattctggcgtggtcgttgttcgtccgattgaaacttcattcccgccgtcactgagcacgcaggatggtctgtacaccaccattatccgtggcctgaatgagaagggggaagcggtcagcgacgcgcgtctgattcgctcggttaatcgtgaaatcagcgtctacagtgaatacgatgaattcctgaaactggcgcacaacccggaaatgcgctttgttttctctaacaccaccgaagcggggatcagctaccatgcgggcgataaattcgatgacgcaccagcggtaagctatccggcaaaactgacccgtctgctgttcgaacgctttagccatttcaacggtgcgctggataaaggttggatcatcattccgtgtgagttgattgactacaatggcgacgcgttgcgtgaactggtgctgcgctatgcgcaagagtgggcactgccagaagcatttattcaatggctggatcaggctaacagcttctgttctacgctggtggaccgtatcgttaccggttatccgcgcgatgaagtggctaaactggaagaagaactgggttatcacgatggtttcctcgacaccgctgaacacttttacctgtttgtgattcaggggccgaaatccttagcgactgagctgcgcctggacaaatatccgctcaacgtgctgattgttgacgatattaaaccgtataaagaacgcaaagtggcaatcctcaacggtgcgcacaccgcgctggtgccggtggcgttccaggcagggctggataccgtaggtgaagcgatgaacgatgctgaaatttgcgcattcgttgaaaaagccatctacgaagaaattattccggtactggatttgcctcgtgatgaactggaatctttcgccagtgcagtcaccgggcgtttccgtaacccgtacattaagcatcagctgctgtctatcgcgctcaacggtatgaccaagttccgcacccgcatcctgccgcagctgctggcagggcagaaggcaaacggcacacttccggcgcgccttactttcgcattagcggcattgattgcgttctatcgtggtgagcgtaacggagaaacatatccggtacaggacgatgcacactggctggaacgttatcagcaactctggagccagcatcgtgaccgtgttatcggtacccaggaactggtagcgattgtgttggcagaaaaagaccactgggagcaggacctgacgcaagtgcctggtctggtcgagcaggttgctaatgacctggatgcgattcttgaaaaagggatgcgcgaagctgtacgtccgttgtgctaa

SEQ ID NO: 260761 - DNA, 915 bp, Klebsiella pneumoniae
atgattgttcgtccacaacaacactggctgcgccgtatttttgtctggcacggctcagtattatccaagatatcatcgcgcttactactcaattttctcttttctatcgctgttattttcatgctgccctggtacacgcatctgggcatcaaattcaccctcgcaccgttcagcattctcggtgtcgccatcgccatttttcttggttttcgtaataatgccgggtacgcccgttacgttgaagcgcgaaaactttgggggcagttgatgattgcctcacggtcgttactgcgcgaggtaaaaacgacattgccggattcggcaagtgtaagggagtttgcccggttgcaaatcgccttcgcccactgtttacgcatgacattacgcaaacagccacaggcggaagtgctggctcattatctcaagactgaagatcttcagcctgtactggcttcgaactctccagctaaccgtatcttgttaataatgggggagtggttggcggttcagcgccgcaatgggcagctttcagatatcctgtttattagcctcaacgatcggcttaatgatatttcagcggtcctggcaggatgcgagcgcattgcctatacgccaattccctttgcctacaccctgattttgcatcgtaccgtttatctgttttgtatcatgctgccgttcgcgctggtcgtggacctgcattacatgacgccttttatctctgtgctgatttcctacacttttatttcgctggattgtctggcggaagaactggaagatccgttcggtactgaaaacaatgatttaccgctggatgccatctgcaacgctattgaaattgacctgttacagatgaacgatgaagccgaaattccagcaaaaattcttcccgatcgtcattaccagctgacgtga

SEQ ID NO: 260762 - DNA, 759 bp, Klebsiella pneumoniae
atgtctgactggaacccctctttatatctgcactttgccgctgaacgatcgcgtccggcggtggagctgcttgccagagtgccgctggagaatatcaaatacgttgccgatcttggctgtggcccaggtaacagcaccgccctgctgcatcaacgttggcctgcggccaggataacaggcgtcgactcatctccggcgatgattgctgaagcgcgcagtgctttgccagactgcctgtttgtggaagcagatatccgcaactggcaaccggaacaggcactcgatctgatttttgctaatgcctcactgcaatggctgcccgaccactacgaattgtttcctcatttggtttcgttactcagtccgcttggcgtgctggcagtacagatgccagataactggctggagccgacccatgtgctcatgcgcgaagttgcctgggaacaaaactacccggatcgcgggcgtgagccgttggctggcgttcatgcttactacgatattttgagcgaagccggatgtgaggtcgatatctggcgaaccacctactatcaccagatgccgtcacaccaggcgattatcgattgggtgaccgccactggattacgtccgtggttacaggatctgaccgagagcgaacagcagctttttcttaagcgctaccatcagatgctggaagagcagtatccactgcaagagaacggacagatactgctggcatttccgcgtctttttattgttgcccgccgtacggagtaa

SEQ ID NO: 260763 - DNA, 291 bp, Klebsiella pneumoniae
atgcacgtcacactggttgaaattaacgttcatgaagacaaggttgacgagtttatcgaagtttttcgccagaaccacctgggctcggtacaggaagaaggcaatttgcgcttcgatgtcttacaggacccggaagtgaattcgcgcttttttatctacgaagcctataaagatgaagacgcagtggcgttccataaaaccacgccccactacaaaacctgtgtcgcgaaactggaatctttaatgaccgggccgcgtaaaaaacgtctgttcaatgggttgatgccgtga

SEQ ID NO: 260764 - DNA, 876 bp, Klebsiella pneumoniae
atggcagatttagacgatattaaagatggtaaagattttcgtaccgatcaaccgcaacaaaatatcccttttaccctgaaaggttgcggtgcactggattggggaatgcagtcacgcttatcgcggatatttaatccgaaaacgggtaaaaccgtgatgctggcctttgaccatggttattttcaggggccgactaccggacttgaacgcattgatataaatatcgccccgctgtttgaacatgccgatgtattaatgtgtacgcgcggcattttgcgcagcgtagttcccccggcgaccaataagccggtggtactgcgggcgtcaggtgcaaactctattctggcggaattaagtaatgaagccgtggcgttatcgatggatgacgccgtgcgcctgaacagttgcgcggtggcggcgcaggtttatatcggtagcgaatatgaacaccagtcgatcaaaaatattattcaactggtcgatgccggaatgaaagtgggaatgcccaccatggccgtgacaggcgtgggcaaagatatggtgcgcgatcagcgttatttctcgctggctacccgaatcgccgctgaaatgggggcgcagattatcaaaacttattatgtcgataaaggttttgaacggattgttgccggatgtccggtacccattgttattgctggcggtaaaaagttaccggagcgcgaagcgcttgaaatgtgctggcaggctatcgatcagggcgcttctggtgtggatatggggcgtaatattttccagtctgaccatccggtggcgatgatgaaagccgtacaggcggtggtacaccataacgaaacggctgatcgggcatatgaactctatctgagtgaaaaacagtaa

SEQ ID NO: 260765 - DNA, 1023 bp, Klebsiella pneumoniae
atgacacttcatcgctttaagaaaatcgccttacttagcgcgcttggcattgccgcaatctctatgaatgtgcaggccgcagagcgtattgcatttattcccaaactggttggcgtgggattttttaccagcggtggcaacggcgcacaacaagcgggtaaagagctgggcgttgatgtgacctacgacgggccgacagaacccagtgtttctggtcaggtacagttgattaataactttgtcaatcaaggttataacgccattatcgtttctgcggtttcgcctgatggcttgtgtccggcactgaaacgcgccatgcaacgtggtgtgagagtgctgacctgggactctgatactaaaccggagtgccgctcttactacattaatcagggaacgcccgcccagttgggaggtatgttggtggatatggcggcgcgtcaggtgaataaagacaaagccaaagtcgcgtttttctactcaagccccaccgttacggaccaaaaccagtgggtgaaagaagcgaaagctaaaatcgccaaagagcatcctggctgggaaattgtcactacgcagtttggctataacgatgccactaaatcattacaaaccgcagaaggaatattaaaagcgtatagcgatctcgacgccattatcgcccccgacgccaacgccctgcccgctgccgcacaagccgcagaaaacctgaaaaatgacaaagttgcgattgtcggattcagtacgccaaacgtgatgcgtccgtatgtggaacgcggcacggtgaaagaatttggcctgtgggatgtggttcagcaaggcaaaatttcagtttatgtcgcggatgaattattgaaaaaaggatcaatgaaaacgggcgacaagctggatattcagggcgtaggtcaggtggaagtctcgccaaacagcgttcagggctatgactacgaagcggatggtaatggcatcgtactgttaccggagcgcgtgatattcaacaaagagaatatcggcaaatacgatttctga

SEQ ID NO: 260766 - DNA, 993 bp, Klebsiella pneumoniae
atgcgtattcgctacggttgggaactggctcttgccgcactgctcgttatggagattgttgcatttggtgcaattaacccgcggatgttagatctcaatatgttgctgttcagcaccagtgactttatttgcattggcattgtcgccctaccgctgacgatggtgattgtcagtggcgggatcgatatttcgtttggttcgactatcggcctctgcgccattgcattgggcgtactgtttcaaagtggtgtgccgatgccgctggcgattcttctgaccttactgctcggcgcattgtgcgggttgatcaacgccggattaattatctataccaaagttaacccgctggtgattacgcttggcacgctgtatctgtttgccggaagcgccctgctgctttccgggatggccggagcgacggggtacgaaggtattggtggattcccgatggcgtttacagatttcgctaacctggatgtgctgggactccctgttccgctgattatcttcctgatatgtctcctcgttttctggctctggctgcataaaacccatgccggacgtaacgtgtttttgattgggcaaagcccgcgcgtggcgctttatagcgcgattccagttaaccgtaccttatgtgcgctctatgccatgacggggctggcgtctgcggtcgccgctgtgctgctggtgtcgtattttggttcagcacgttccgatctcggtgcgtcgtttctgatgcccgccatcaccgccgtggtgcttggcggtgccaatatttatggtggttccggttccattatcggcaccgccattgcggttttactagtgggatatttgcaacaaggtttgcaaatggcaggagtgccaaatcaggtgtccagcgccctttccggtgcgctacttatcgtcgttgtcgtaggtcgttccgttagcctgcatcgccagcaaattaaagagtggctggcgcgtcgggccaataacccattgccataa

SEQ ID NO: 260767 - DNA, 1029 bp, Klebsiella pneumoniae
atgctgaagtttattcagaacaaccgtgaaatcacggcattgctggcggtggtgctgctgtttgtattacccggttttctcgaccgccagtatttaagtgtgcaaacgctgaccatggtttatagcagcgcgcaaatcctgatcctgctggcaatgggcgccacgctggtaatgcttacgcgcaatattgatgtttcagtgggttcgattaccggaatgtgcgcggtgctgttggggatgttactgaacgcggggtattcactacctgttgcttgtgtcgcgactttactgcttggtttgctcgcgggatttttcaacggtgtcctggtcgcgtggctaaagatccctgccattgtcgccacccttggcacgttagggttgtacagaggcatcatgttgctgtggactggcggtaaatggattgagggattacccgccgaactgaaacaactctccgccccgctgctgtttggcgtttccgcgattggttggttgacgataattctgatggcatttatggcctggctgctggcgaagacggcgtttggacgcagtttttatgccacgggcgataatttacagggcgctcgtcaactgggcgttcgtacggaagccattcgcattgtggcattttcgttgaacggctgcatggcggcactggcgggaattgtgtttgcttcgcagattggttttatccccaaccagaccggtaccgggctggagatgaaagcaattgcagcctgcgtgctgggcggcattagtttgctcggcggttccggcgcgatcatcggtgcggtactcggcgcatggttcctgacgcagatcgatagtgtactggtgctgttgcgcattccggcatggtggaatgattttatcgcgggcatggttctgctggcggtgctggtgtttgatggacgcctgcgttgtgcgctggaacgtaatctgcggcggcaaaaatatgcccgctttatgatgccaccgccatccgttaaacccgcttcgtcaggtaaaaaacgggaggccgcgtaa

SEQ ID NO: 260768 - DNA, 900 bp, Klebsiella pneumoniae
atgcgcgacggaactatcgccttaagcggcaaaaccatcgaactgtctaccgacgacattattcaggccatcacgccagcgctacgggaaaaatcgctctctgccagccaaaaattatggctggagttacctggcaacctcgcacaacatgccgccggaacgtcgatgctgacactagaaaatctgaccggcgaaggtttcaggaatgtcagcctgacgctcaatgccggagaaattctggggctggctgggctggtgggggccggacgcacagaactggccgagacgctctatggtctgcgtactttgcgtggcggacgcattatgctgaatggtaaagagatcaataaattatccactggagaacgtttactgcgcggtctggtttatctgccggaagatcgccagtcatccggactgaatctcgatgcttcgctggcctggaacgtctgcgcccttactcataaccttcgtggattctgggcgaaaaccgcgaaagataatgccaccctggaacgttatcgtcgggcgctgaatattaaatttaaccaaccggaacaagctgcacgcacattatccggtggcaaccagcaaaaaatcctcattgccaaatgcctggaagcttcgccgcaagcattgattgtcgatgagccgacgcgcggcgtggatgtctcggcccgtaatgatatctaccagctgttgcgcagcatcgccgcacaaaatgtggctgtgctgcttatctcctcagacctggaagagatcgaactgatggcagatcgtgtgtatgtgatgcatcagggcgaaattacccactctgcactgaccgggcgcgatattaatgtcgagactattatgcgcgttgccttcggcgatagtcagcgtcaggaggcatcatgctga

SEQ ID NO: 260769 - DNA, 642 bp, Klebsiella pneumoniae
  misc_feature (590)..(599): n is a, c, g, or t
atgcaaacgagtgatacccgcgcgttaccgctactttgcgcccgctcggtttataaacagtattcaggggttaatgtcctgaaaggcatcgattttacgttgcatcagggggaggtccacgccctgctcggcggcaatggtgccggtaaatcgacgttaatgaagattattgccggtattacccctgctgatagcggtacgcttgagattgggggcaacaactacaccagattaacgccagttcatgctcatcagttgggtatttatctcgttccccaggaaccgctgcttttcccaagcctgtcgataaaagaaaacatcctgtttgggctggcaaaaaaacagctctccatgcagaaaatgaagaacttgctggcggcgctgggctgccagtttgatctgcatagtctggcaggatcgctggatgtcgccgatcgccaaatggtggaaatcctccgcgggctgatgcgcgactcgcggattctgatcctcgatgaacctaccgcctcgcttacccctgcggaaaccgaacgcttgtttactcgcttgcaagagctgcttgctactggcgtgggtattgtttttatctnnnnnnnnnnaagctgccggaaattcgccagattgccgatcggattagcgtga

SEQ ID NO: 260770 - DNA, 954 bp, Klebsiella pneumoniae
atgacaatcaacgattcggtaatttcagaacagggaatgtgtgaagaagaacaggtcgcgcggattgcgtggttttactaccacgacgggctgacccagagtgagatcagcgatcgtctcggcctgacccgtttgaaagtgtcgcgattactggagaaagggcatcaatccggcattattcgcgtacagattaattctcgctttgaaggctgtctggaatatgaaacacaattacgtcgtcagttttcgctgcaacatgtccgggtgatcccagggcttgcggatgctgatgtcggcgggcgactagggataggcgcggcgcatatgttgatgagtttacttcaaccacaacagatgctggcgattggttttggcgaggcaaccatgaatacgctgcaacgcttaagtggttttatttcgtcgcagcaaattcgcctggtcacgctctccggtggcgtcggttcttatatgacgggtatcggacagcttaacgcggcgtgcagtgtgaatattattccggctccgctgcgggcatcctccgctgacattgcccgtacgctaaaaaatgaaaattgcgtcaaagatgttctgttagccgcgcaagcagcggatgtggcgattgtcggcattggggccgtgagtcaacaagacgacgcgacgatcattcgctccggttatatcagccagggcgaacagttaatgattggccgaaaaggggcggttggcgacatcttaggctacttttttgatgcaaaaggtgacgttgtcacggatatcaaaatacataacgaactgattggcttacctttaagcgcgctgaagaccattcccgtccgggttggcgtagcagggggagaaaataaagccgaagccattgcctctgcaatgaaaggcggttatatcaacgcactggttaccgatcaggacacagcagcggcgattttacgtagttaa

SEQ ID NO: 260771 - DNA, 1593 bp, Klebsiella pneumoniae
atggctcgactctttaccccttcagaatcaaagtattacctgatggcgctggatgcaggtaccggaagtattcgggctgtgatattcgacctggaaggcaatcaaatagccgtgggacaggcggagtggcggcacctggcagtaccggacgttcctggttctatggaatttgatctcaacaaaaactggcaactggcgtgtgagtgtatgcgccaggcgctgcacaacgccggcatagccccggagtatatcgctgccgtttcggcatgttcgatgcgtgaaggcattgttttatataacaatgatggaacaccgatctgggcctgcgccaatgtggatgccagagcggcgcgcgaagttagcgaacttaaagaactgcacaacaatacctttgaaaacgaagtttatcgcgccaccggacaaacgctggctttaagcgctattcccagattactttggctggcgcaccatcgttctgatatctaccgacaggcgtcgaccatcaccatgatcagcgactggctggcctatatgctcagcggcgaactggcggtggatccctctaacgctggcaccacgggacttcttgatctaaccacccgtgactggaaacctgcattgctggatatggccggactgcgggccgatattctttctcctgtcaaagaaaccggcacattgctgggcgtggtaagttcacaagcggcggaactctgcggtctgaaggcgggcactccggtggtcgttggaggaggcgacgtgcaacttggttgccttgggttaggcgttgtccgtccggcacaaaccgctgttcttggcggcacattctggcagcaagttgtaaacttagccgcgccggtgacagacccagaaatgaacgtgcgcgttaatcctcatgttattcctggcatggtacaagctgaatctataagcttttttaccggactcaccatgcgctggttccgcgatgctttctgtgccgaagaaaaactgattgccgaacgtttaggcatcgacacctatacgctgcttgaagagatggcaagtcgggtgccgcctgggtcgtggggcgtaatgccgatattctccgacagaatgcgctttaaaacctggtatcacgctgcgccttcctttattaatttgtctattgatccggataaatgtaacaaagcgacattgttccgtgcgctggaagaaaatgcggcgatagtatcagcgtgtaacttgcagcaaatcgctgatttctcgaatattcatccttcatcgttagtctttgcaggcggaggttcaaaagggaaattatggagtcaaattctcgctgatgtctcgggattacccgtcaatattccggtggtcaaagaagccactgcattaggatgtgccattgcagctggcgtcggtgccggaattttttcatcaatggcagaaaccggagaacgcctggttcgctgggaacggacgcacacaccagacccggaaaagcatgaactttatcaggattcacgcgataagtggcaggcagtttatcaggatcagctggggctggttgatcacgggctgacgacgtcgttatggaaagcgcctgggttatag

SEQ ID NO: 260772 - DNA, 732 bp, Klebsiella pneumoniae
atgaaaaaatggaaagtacgtagcgcgttgatagcattagtcgtgctgctggccggttgttccagtaatgcgcagtataatagcagtacatcgggcaatgtcggcaccgcctggggtggggatgtgcactcatcggttcagggcgtatctgctgagcgagcctggcgcgatccggcagagatgatcgttattagttattcgactactgttccttcgggctacgaccgcgtttatagcattcgtattaacgaacttgaatatgctattcgcgatggtaattttaattctctacctattacgcgggtttatgattcatccaataatgaaccacgctatattgtccatgccagagtaggaatgaattatcaattatatgtccgcaattacagtcgtaataccaactacgagatcgttgctacggttgatggcctggatgtgctgaacggcaagcaaggttcgctgaataacaacggctatattgtgaatgccggagattcgttagcgattaaaggattccgcaaagataaacataccgaagcggcttttcagttcgccaacgttgctgattcctacgcagccaattcggcgcaaggcgatgtgcgtaataccggtgtaatcggctttgccgcctttgaattacaaggcccggcgcaaaacgcgctgccgccgtgctctggacaagcctttccggcggacaacaatggctatgcgccgccaccgtgtcggaaatag

SEQ ID NO: 260773 - DNA, 921 bp, Klebsiella pneumoniae
atgagcaccttaggtcatcaatacgataactcactggtttccaacgcctttggttttttacgcctgccgatgaacttccagccatatgacagcgatgctgactgggtgattactggcgtgccgttcgatatggccacttctggtcgtgcgggtggtcgccacggtccggcagcgatccgtcaggtttcgacgaatctggcctgggaacacaatcgcttcccgtggaatttcgacatgcgtgagcgcctgaacgtcgtggactgcggcgatctggtatatgccttcggagatgcccgtgagatgagcgagaagctgcaggcgcacgccgagaagctgctggctgccggtaagcgtatgctctccttcggtggtgaccactttgttacgctgccgctgctgcgtgctcatgcgaagcatttcggcaaaatggcgctggtacactttgacgcccacaccgacacctatgcgaacggttgtgaatttgaccacggcaccatgttctataccgcgccgaaagaaggtctgatcgacccgaatcattccgtgcagattggtattcgtaccgagtttgataaagacaacggctttaccgtgctggacgcctgccaggtgaacgatcgcagcgtggatgacgttatcgctcaggtgaaacagattgtaggtgatatgccggtttacctgacttttgatatcgactgtctggatcctgctttcgcgccgggaactggtacgccggtgattggcggcctgacctccgatcgcgccattaaactggtacgcggcctgaaagatctcaacatcgttgggatggacgtagtggaggtggctccggcatacgatcagtcggaaatcaccgctctggctgcggcgacgctggcgctggagatgctgtatatccaggcggcgaaaaagggcgagtaa

SEQ ID NO: 260774 - DNA, 909 bp, Klebsiella pneumoniae
atgaaagcacctgtttcattaacctcatttcgcccacaaaaatctcttgctatcgccattggcgtgcttgccgtggttgtgctgccatttctctcgtattacaccgttaatgaaggtgaacgcggcattttgctgcgctacggaaaaatcgtaaaagttgccgagccgggtctgggttttaagatcccgtttatggaaagcgtggagaaaatttccacgcgtaatcaggctgtggtctatcagggattacaggcctacagccgcgaccagcaaccggcacaaatgacagtatcagtcagcttccacattaaaccttcagaagcaggcgcggtttataccacctacaacaccattgaagcattaaaagatcgtctgattgtccgtcagttgccaactcaactggagaacgttttcggccaatataccgccatcagcgctgtacaggatcgtacaaaactggttcaggatctgcaaaatgccatgcgcaaagccgttgttgggccagtggtaattgacggggtccagattgaaaatattgatttttctgacgcttatgaaaagtcgattgaagaccgaatgaaagcagaagtcgccattgccacgcgtaagcaaaatctggaaacagagaaaatccaggcgcaaatagcggtaactcaggcccaggcagaagcagacagtaaactggcggcagctaaagcagaagcggaaactattcgcgtaagaggcgcggcagaggctgaaactattcgtttaaaaagtgcggctgaagcagaagcgatccgcctgcgcggtgaagctctgcgggataatcccggacttgtagccctcaccactgccgaacgttgggacggtaaactgcccgataccatgatccccggcagcacagttccgtttatctctactaagtaa

SEQ ID NO: 260775 - DNA, 444 bp, Klebsiella pneumoniae
atgcggcttagtgattattttccagaatcatcaatctcagttatacattcagcaaaagattggcaggaagctatcgatttctcgatggtatcattgctggataaaaactatatcagcgagaattacattcaggcaattaaagattccaccattaacaatggcccttattatattctcgcaccaggcgtggcaatgcctcatgcgcgaccggaatgtggggcgcttaaaaccgggatgtctttgacattacttgaacaaggtgtttattttccggggaatgacgaaccaattaaattactcatcggactctctgctgccgatgccgattcgcacattggcgctattcaggcgttaagtgaattactgtgcgaagaagaaatactcgaacaactcttaacagcatcatcagaaaaacaattagcggacattatcagccgcggataa

SEQ ID NO: 260776 - DNA, 1389 bp, Klebsiella pneumoniae
atggaaaacaagtctgctcgtgcaaaggtccaagcttttgggggctttttgactgcaatggtcatccccaatattggtgcttttattgcctggggttttattactgcgttatttattcccaccggttggctgcctaacgaacatttcgccaaaattgtcggcccgatgattacctatttattgcccgtgatgattggttctaccggtggtcatctggtcggcggtaaacgcggcgcggtcatgggcggaattggtactattggtgtgatcgtcggcgcagagatcccgatgttccttggctcaatgattatggggccgctcggtgggctggtcataaaatatgtcgataaggcactggaaaaacgcatacctgctggttttgagatggttatcaataacttctcattaggtatcgcggggatgctcctttgtctgctgggttttgaagtgatcggcccggcggtgttaattgccaatactttcgtcaaagagtgtattgaggcgctggtacatgcgggttatctgcctctgctgtcagtcatcaatgaaccggcgaaagtgcttttccttaataatgcgatcgatcagggcgtctattatccgctgggaatgcaacaggcttcggttaacggtaaatccatcttctttatggtggcctctaacccaggtccgggcctggggctgctgctggcgtttaccttgtttggtaaagggatgagtaaacgttctgcgcccggggcgatgattattcacttcctcggtgggatccacgaactgtatttcccatatgtgctgatgaagccgctgaccattattgccatgattgcgggcggtatgtctggcacctggatgtttaacttactggacggtggtctggtggctggcccaagtccggggtctatctttgcttacctggcgctgacgccgaaaggctcattcctggcgacaattgctggtgttacggtaggtaccctggtgtcctttgctatcacttcgctgatactgaagatggaaaaaacggtggaaacggagagcgaagatgagtttgctcagtcagccaatgcggttaaggcgatgaaacaagagggtgcattctcgctaagcagagttaagcgtatcgcctttgtttgcgatgcggggatgggctccagcgcgatgggcgcaaccaccttccgtaaacgcctggaaaaagcggggctggcaattgaagtaaaacattacgcgatagaaaacgtgcctgcggatgcggatatcgtcgttactcacgctagtctggaagggcgcgtgaaacgtgtgacggataaaccgctgatactgattaataactatattggcgatcccaaactcgacactttatttaatcaattaaccgccgaacataaacactga

SEQ ID NO: 260777 - DNA, 1278 bp, Klebsiella pneumoniae
atgaaaaccaaagttgctgctatttatggcaagcgggatgtccgtctgcgcgaatttgaactgccagaaattaccgataatgaactgttagtgagtgtaatttctgacagcgtctgtttatcgacctggaaagcggcgttactcggtagtgaacataaacgcgtacccgacgatttagaaaatcatccggtcattaccgggcatgaatgtgccggggttattgttgaagtgggtaaaaatctcaccgacaaatataaaaaaggccagcgttttgtattgcaaccggcgatggggttaccaagcggatattcagcgggctacagctacgaatattttggcggtaacgccacctatatgattattcccgagatcgccattaacctgggctgcgtattaccctatcacggctcttattttgctgcggcgtcgctggcagagcctatgtgctgcattattggcgcttatcatgccaattatcacaccacgcaatatgtttatgagcatcgcatgggcgtcaaacctggcggcaatattgcactgctggcgtgtgctggcccaatgggcattggcgctatcgattacgccattaacggcggcatacaaccgtcgcgggtggtggtggtcgatatcgacgacaaacggctggcgcaggtagagaagctgctgccggtggaactggcggccagtaaaggcattgagctggtgtatgtgaataccaaagggatgagcgatccggtacagatgctgcgggcgctgacggatgatgccggatttgatgacgtatttgtctatgcagcggtgccttcagtcgtcgagatggctgatgaattactggcggaagatggctgcatgaacttctttgccgggccaacggataaaaacttcaaagtgccgtttaatttctacaacgtccattacaacagcacgcacgtcgtcggtacatctggcggttcaacggacgacatgaaagaggcgattacccttagcgccacgggacagttacagccgtcgtttatggtgacccatattggtggccttgatgcggtgccagaaaccgtgctcaatctgccggatatcccaggcggtaaaaaactcatttataacggcgtgaccatgccgctcactgccattgccgattttgccgaaaaaggcaaaaccgatccgctgtttaaagagttggcgcggctggttgaggaaacgcacggcatctggaatgagcaggccgagaaatatctgctggcgcaatttggcgttgatatcggggaggccgcgcaatga

SEQ ID NO: 260778 - DNA, 966 bp, Klebsiella pneumoniae
atgatgtccctggcgtggccattatttcgcgttacggaacaggcagcgttggctgcctggccgcaaatcggatgtggcgacaaaaataaaattgatggcctggcggtcaccgcgatgcgccaggcattaaacgacgtcgcttttcgtgggcgagtggttatcggcgagggagagattgaccatgcgccgatgctgtggattggcgaagaggtgggcaaaggcgatgggccagaagtcgatatcgcggttgatccgattgaaggcaccaggatggtggcgatggggcagagcaatgcgctggcagtcatggccttcgccccacgaggcagcctgctacacgctcccgatatgtatatgaaaaaactggttgttaatcggctggcggcgggcgcgattgatctgtctttgccactggtggacaacctgcgcaacgtggcgaaagcgttaggcaaaccgctggacaagctgcgcatggttacgctggataaaccgcgcctgagtgccgcgattgaagaagcaacacagctgggcgtgaaggttttcgctctgccggatggcgatgtcgccgccagcgtgctgacctgcaggcaggataatccttacgatgtgatgtacaccatcggcggtgcgccagaaggcgtgatttctgcctgtgccgttaaagcattaggcggggatatgcaggcccagctgattgacttttgtcaggctaaaggggattacacggaaaatcggcagattgcagagcaggagcgcaagcgttgcaaggcaatgggcgttgacgttaaccgtgtgtactcgctcgatgaactggtgagggggaacgatatcctctttagcgctacgggcgtgacgggtggcgagttggtgaacggtatccaacagacggcgaatggggtgcggacgcagacattactgatcggcggcgcggaccaaacgtgtaatataatagactccctgcattga

SEQ ID NO: 260779 - DNA, 510 bp, Klebsiella pneumoniae
atggcgacgctgacagaagatgatgtgcttgagcaactggacgcacaggacaatttattttcatttatgaaaactgcgcattctattttgctccaggggatacgccagtttctgccgtcgctgtttgtcgataacgatgaagagatcgtcgaatatgcagtgaagccgttactcgcccaaagcggcccgcttgacgatattgatgttgcgctgcgtttgatttatgcgctggggaaaatggataaatggctgtacgccgatatcacgcatttttcccagttctggcattacctgaacgaacaggatgaaacgcccggatttgctgatgacatgacctgggattttatcagcaacgtcaatagtataacccgcaatgcgacgctctatgacgcattgaaagcgatgaagttcgccgatttcgccgtctggtcagaggcgcgttttagcgggatggtcaaaacggcgctgacgctggcagtaacgaccaccttaaaggaattaacgccgtga

SEQ ID NO: 260780 - DNA, 714 bp, Klebsiella pneumoniae
gtgaaaattgaattaacggtgaatgggctgaagatacaggcacagtaccagaacgaagagattgaaaatgtacataaaccgttgctgcacatgttggcggccttacagacggtaaatccgcagcggcgtacggtggtttttctttgcgctccgccggggacgggtaaatctaccctaaccaccttctgggaatatatcgcgcaacaagacccggaactgcccgctattcagacgctaccgatggatggttttcaccattacaatagctggctggatgcgcatcaattgcgccccttcaaaggcgcaccagagacatttgacgttgcgaaactggcggaaaatctgcgccaggtcgtggaaggggattgtacgtggccgcagtacgatcgacaaaagcatgatcctgttgaagatgcgttgcacgttaccgcaccactcgtcatcgtcgaaggaaactggttgttgctggacgacgagaagtggcgccagcttgcgcaattttgtgatttctcgatctttatcaaagctcccgcatctgcgttgcgggagcgtctggtggggcgcaagctggcgggagggttatcgctggcagacgcagaagccttttatgaccgtaccgacgggccgaatgttcgccgggtgctggaagagagtctgcctgcaaatttgaccttaatgatgaccgctacgggtgaatatcgtctgatggattaa

SEQ ID NO: 260781 - DNA, 678 bp, Klebsiella pneumoniae
atgttaacgttaaatcagataacttatcgctggcctgacgcggcaacggattgtctttgcgacatttctctgcaactcaaacaaggtgaatggttggcgctgaccggcgacaatggcgcgggaaaatcgacgctgttacgagtaatggcaggtcttcttacgcccacagccggtacggttatgctgcaacaacaggcgatgaaaaacctgaaaaaccgccagcgcgcggcaaagattggcgtactgtttcaggaagcggaaaaccagctttttcacagcaccgtcgctgacgagatcgcatttggtttgaaactgcaaaaatgcccggcggatgaaatcactcaacgtaccaatgctgccctgcaatgctgtcagttagcagacactgccagcgcgcatccgctggatctgcatagtgcgcagcgacggatggtcgccgtcgcctgcctggaagcactctctccgccgctattgctgctggacgagccgagtcgggattttgacgaaaattggatgagcgtgtttgaaagttggctggaaaagtgccgccagcgaggcacgagcgtcgtagcaatcagtcatgacgccgcatttacccggcgtcatttctctcgtgtggtgcgactggaagatggtgtaatcaggaacgttaatccatcagacgatattcacccgtag

SEQ ID NO: 260782 - DNA, 678 bp, Klebsiella pneumoniae
atggttacgttagaacagtttagctattgcccgacacactcaacgcatcctccgttctgttatgactttcactatgtcaaaccggggatagtcgccatctttggtgacaacggcagtggcaaaagtacgctggcgcaactgatggcaggctggtatccggactttctgccaggagagataaccggcacggggacgcttctcggtacgcccattgggcatatcccgcttaatgaacaatccgccaccatccagctcgttcagcaatcgccctatttgcagctctccggctgtacctttagcgtggaagaagaagttgcctttgggccagaaaatctgtgtcttgctgaagaggagattatggcgcggattgatgccgccctgactctgaccgagtgccagccgttgcgccatcgtcacccggcaacactctccggtggagagacacagcgtgtggtcatcgcctgcgccatcgcgatgcagccaaagctcttaattcttgatgaagcctttagccgcctgacgccgcaggcctgcgaaatgctgttgcagcgcttacaacactgggcgcttgaacgtggttcgctgattattctttttgaacgtcatcgtacacctttcctgaactactgccagcaagcgtggcaattgcaaaacggagcgctccagccactatgttaa

SEQ ID NO: 260783 - DNA, 708 bp, Klebsiella pneumoniae
atgcatccgtttacatccttaacgctgtggacgctggcggcctgcaccacgcttatcctgcccacacagacaatactgccagtctatagcgcggcgacctttttctgccttattgcgctgaaggccacgcggcggcgggcaaaatatgttgtctggctgatgttctcgctgggggctggactgtggctggtacacggtggctggctgacagaatggctaagcggcacgccacgctcgccagaacggtggacgcatgctattacgctctggttgcggattctggcgattgtttcaacctcgcagttgtggatgcaattcgtccccgtgcaacgttttatccgcgctttgtttgcttctcgcctgccgccgggcgtcgcttatctgttcgccgggccgttgttggtcgttgagcagttaaaacggcaattagcgattattcatgaagcgcagcgcgcccgcggcgtaccgctggatgagggctggtatcagcgtttacgtgcgatgcccgcgctaattattccgctaacacacaatgcgctaaacgatctggctatccgtggtgcggcgttggacatgcgggcatttcggatccacaaccggcgcactacgttatgggcaccgcctgacagtaacctggaaaaagtggcacgttacgccatgatcttgctgatgctggcagaattcggagcgtggatatggttacgttag

SEQ ID NO: 260784 - DNA, 579 bp, Klebsiella pneumoniae
atggcgcgtcgccacttctccagtcaggcgctggtgttaatcgttatctctatcgccatcaatatgatcggcgggcaactggccagcatggtcaaattacctatatttctcgactccgtcggcacacttattagcgcagtactgcttggtccggtgatcgggatgctgaccggcttactgaccaatttactctggggattgctgaccgacccgatcgccgccgcatttgcgcccgtcgcgatggtcatcggcctggtcaccggttggctggcgcgagcgggttggttccgcaccctgccaaaagtcgttgttagcggcgtgattattacgcttgcggtaacggtcgtcgctgtaccgctgcgtactgcgctgttcggcggtgtcaccggtagcggagccgatttgttcgttgcctggatgcactctatggggcaaaacctggtggagtcggtggcgattacggtgataggcgcgaacctggtcgataaaattctcacggcggtgattgtctggcttttactgcgccagttgccgattcgcaccacacgacatttcccggcaatggctgccgtgcgctaa

SEQ ID NO: 260785 - DNA, 432 bp, Klebsiella pneumoniae
atgatgacattgccctacccatattcttcctccgcacgtttttacgcgctgcgcctgctccccgggcaggaagttctctcccaattacgcgccttcgcgcagcaacaacaactccacgccgcgtggattgcaggttgtaccggcagtctgactgacgtcgccttacgctatgccgggcaagaaaacactgccctgctaagcggtaagttcgaagtcatcgcattgaacggcacgctggaacagagtggtgaacatcttcatctctgcgtttccgatccacacggcacgatgcttggcggtcatatcatgcccggctgtaccgtgcggaccacgcttgaactggtgatcggctgccttgaggaactggcctttagccgccagccttgcgcgctttctggttacgacgagttgcatatttcccccgttaactaa

SEQ ID NO: 260786 - DNA, 861 bp, Klebsiella pneumoniae
atggaagatttgaatgttgtcgatagcataaacggcgcgggaagctggctggtggctaaccaggcgctgctgctaagttatgcagtaaacatcgtggcggcactcgcgatcatcatcgttggtttgattatcgcgcggatgatttccaacgcggtgaatcgcctgatgatctcccgtaaaatcgatgccactgttgctgattttctctctgcattagtccgttacggtattatcgcctttacgctaatcgctgcactgggccgcgtgggcgtacaaacagcgtcagtcattgctgtactcggtgccgcaggcttagcggttggtctggctttgcaggggtcactgtctaacctggccgctggcgtgttacttgtcatgttccgcccgttccgtgccggagaatatgttgacctcggcggcgtagccggtactgtgctgagtgtgcagattttctccaccaccatgcgtactgcagacggtaaaattatcgttattccgaacggtaaaattattgccggaaatattattaacttctcccgcgagccagttcgccgtaacgaatttattattggcgtggcgtatgattccgatatcgatcaggttaagcagatcctgaccaatattatccagtctgaagatcgcattttgaaagatcgcgaaatgactgtgcgcctgaacgaacttggtgcatcgtcgattaatttcgtggtccgcgtctggagcaacagcggcgatctgcaaaacgtgtactgggatgtgctggagcgtattaaacgtgaatttgatgccgccggtatcagcttcccgtacccgcaaatggatgtgaactttaagcgggtgaaagaagacaaagctgtgtaa

SEQ ID NO: 260787 - DNA, 1479 bp, Klebsiella pneumoniae; identical to SEQ ID NO: 9588

SEQ ID NO: 260788 - DNA, 996 bp, Klebsiella pneumoniae
atgattaatgaagccacgctggcagaaagtattcgccgcttacgtcagggtgagcgtgccacgctcgcccaggccatgacgctggtggaaagccgtcacccgcgtcatcaggcgctaagtacgcaactgcttgatgccattatgccgttctgtggtaacgccctgcgactgggtgttaccggcacacccggcgcggggaaaagtacctttcttgaagcctttggcatgttgttgattcgtgagggattaaaggttgcggttattgcggtcgatcccagcagcccggtcactggcggtagcattctcggggataaaacccgcatgaatgaccttgcgcgtgccgaggcggcgtttattcgcccggtatcctcctccggccatctgggcggtgccagtcagcgagcgcgggaattaatgctgttatgcgaagcggcgggttatgacgtagtgattgtcgaaacggttggcgtcggacagtcggaaacggaagtcgcccgcatggtggactgttttatctcgttgcaaattgccggtggcggagatgatctgcagggcattaaaaaggggctgatggaagtggcagatctgatcgttatcaacaaagacgatggcgataaccataccaatgtcgccattgcccagcatatgtacgagagtgccctgcatattctgcgacgtaaatacgacgaatggcagccacgggttctgacttgtagcgcactggaaaaacgtggaatcgatgagatctggcacgccatcatcgacttcaaaaccgcgctaactgccagtggtcgattacaacaagtgcggcaacaacaatcggtggaatggctgcgtaaacaaaccgaagaagaagtactgaatcacctgttcgcgaatgaagatttcgatcgctattaccgccagacgcttttagcggtcaaaaacaatacgctctcaccgcgcaccggcctgcgacagctcagtgaatttatccagacgcaatattttgattaa

SEQ ID NO: 260789 - DNA, 471 bp, Klebsiella pneumoniae
  misc_feature (451)..(460): n is a, c, g, or t
atgaaacgcccggactacagaacattacaggcactggatgcggtgatacgtgaacgaggatttgaacgcgcggcacaaaagctgtgcattacacaatcagccgtctcacagcgcattaagcaactggaaaatatgttcgggcagccgctgttggtgcgtaccgtaccgccgcgcccgacagaacaagggcaaaaactgctggcactgctacgccaggtggagttgctggaagaagagtggctgggcgatgaacaaaccggttcgactccgctgctgctttcactggcggtcaacgccgacagtctggcgacgtggttgcttccggcgctggctcctgtgttagctgattcgcctatccgcctcaacttgcaggtagaagatgaaacccgcactcaggaacgtctgcgccgcggcgaagtggtcggcgcggtgagtattcaacatcaggcgnnnnnnnnnncttgtcgataa

SEQ ID NO: 260790 - DNA, 549 bp, Klebsiella pneumoniae
atgattcggcaacgtcgtcgtaagttaacgccggaacaacagcaggaaatgggtcaacaagccgctacccggatgatgacttatcccccggtggtgatggcatatacggtcgctgtattcctctcttttgatggcgaactcgacacccagccactcatagaacaactctggcgcgccggtaagcgcgtatatcttccagttttgcatccctttagtgccggtaacttgctgttcctgaattaccatccgcaaagcgaactggtgatgaacaggttgaagatccatgagccaaaactggatgtgcgtgacgtgctacccctttcccgattagacgtgttgatcacaccgctggtcgcctttgatgagtacggccagcgcctgggaatgggcggtggtttttatgatcggaccttacaaaactggcagcactataaaatgcaaccggtgggttatgcgcatgattgtcagttggtggaaaaactccccgttgaagagtgggatatccctcttcctgcggtggttacaccgtcgaaagtctgggagtggtga

SEQ ID NO: 260791 - DNA, 189 bp, Klebsiella pneumoniae
atgatatgctaccactttgggccctggtggaccagaaaagggcttgtctcttctcatcagggtagctatagtgtcgccccttcgcagaccatgggtctaaagacgaaggcagcgcagtcaatcagcaggaaggtggcatgtctgcacaacccgtcgatatccaaatttttggccgttcactgcgtgtga

SEQ ID NO: 260792 - DNA, 579 bp, Klebsiella pneumoniae
atgtctatacagaacgaaatgcctggttacaacgaaatgaaccagtatctgaaccaacaagggacgggtctgacccctgctgagatgcatggtttaatcagtgggatgatatgtggcggtaacgatgacagctcatggctgccgctacttcacgacctgacgaacgaaggcatggctttcggtcatgagctggcacaggcactgcgtaaaatgcactctgccaccagcgatgccctgcaggatgacggcttcctttttcagctttatctgcctgatggcgatgatgtcagcgttttcgatcgggctgatgcgctggcaggttgggtcaatcacttcctgcttggtcttggcgttacgcaaccgaagctggacaaagtgaccggagaaaccggtgaagccatcgacgatctgcgtaacatcgcgcagctgggctacgacgaagacgaagatcaggaagagcttgaaatgtcgcttgaagagatcatcgaatacgttcgtgttgccgcgttgttatgccacgacacctttactcatccgcaaccgaccgcgccagaagtacaaaaaccgactctacactaa

SEQ ID NO: 260793 - DNA, 1326 bp, Klebsiella pneumoniae
atgagtgagatatcccggcaagagtttcagcgtcgccgtcaggccctggtggagcaaatgcaacccggcagcgccgcgctgatttttgctgcaccagaagtaacacgtagcgccgacagcgaatacccctatcgtcagaacagtgacttctggtacttcaccggctttaacgaaccggaagcggtgctggtgctgattaaaagcgacgacactcataaccacagcgttttgtttaaccgcgttcgcgacctgacggcagagatctggtttggtcgtcgcttaggccaggatgccgcgccagagaaactgggcgttgaccgcgcactggcattcagtgaaatcaatcagcaactttatcaactacttaacggcctggatgtggtttaccatgctcagggcgaatatgcatatgctgatgaaatcgtgaacagcgcgctggaaaagttgcgtaaaggctcgcgacagaatctcactgccccggctacgatgatcgactggcgtcccattgttcatgaaatgcgcctgttcaaatccccagaagagattgccgtacttcgccgcgcgggggaaattaccgccctggcgcatacccgggcgatggaaaaatgccgtccgggaatgttcgagtaccatctggaaggcgaaattcaccacgaatttaaccgccacggtgcgcgctatccttcctataacaccattgtcggcagcggtgaaaacggctgcattctgcactacaccgaaaacgagtgtgaaatgcgcgacggtgacctggtgttgattgacgcgggttgtgaatacaaaggttacgcgggcgatattacccgcaccttcccggtcaacggcaaattcaccctggcccagcgtgaaatctacgacattgtgctggagtctcttgaaaccagcctgcggctgtatcgtccgggaacttccattcaggaagtcactggtgaagtggtgcgcatcatggttagcggcctggtaaaactcggcatcctgaaaggtgatgttgatgaactgatcgctcagaacgcccatcgtcctttctttatgcatggccttagccactggttaggactggatgtccatgacgttggcgtttatggccaggatcgctcgcgcattctggaaccgggcatggtactgaccgtagagccggggctgtatattgcgccggatgcagaagtgccagaacaatatcgcggcatcggcattcgtattgaagacgacattgtgattaccgaaaccggtaacgaaaacctcaccgccagcgtggtgaaaaagccggaagaaatcgaagcgttgatggcagctgcgagaaagcaatga

SEQ ID NO: 260794 - DNA, 1179 bp, Klebsiella pneumoniae
atgagcgtaatcatcgtcggtggcggcatggcgggcgcgacgctggcgctggctatttcccggttaagtcacggggcgctgccggtacatttgattgaagcgactgcgccagagtcacatgctcatccgggctttgatggacgggctattgcgctggcggcgggcacttgtcagcaactggcgcgcatcggcgtctggcaatctctggctgattgcgcaaccgccatcaccagcgtgcatgtcagcgatcgtggtcatgccggattcgtcaccctcgccgcagaagattaccaactggcggcgctggggcaggttgtcgaattgcacaatgtcgggcaacggctgtttgcattgctgcgcaaagcacctggcgtaacgctgcattgccctgatcgcgtggctaacgttgcccgtactcagagccacgttgaagtgacgctggagagtggcgagacgctgacgggccgcgtgctggtagccgctgatggcacccattcagcgttagccactgtgtgcggcgttgactggcagcaggagccttacgaacaactggctgtgattgctaacgttgcgacttccgttgcgcacgaaggccgcgcttttgaacgcttcacgaaacatggcccgctggcgatgttgccgatgtctgacggacgctgttcgctggtctggtgtcatccactggaacggcgcgaagaggtgctgtcgtggagcgacgagaagttttgccgtgaactccagtctgcctttggctggcgactggggcaaattacccacgccggtaaacgcagtgcttatccgctggcattaacccgcgccgccagaccgattacccatcgcactgtgctggtgggcaatgcggcgcaaactctgcaccccatcgccgggcaagggttcaacctcggtatgcgtgatgtgatgagccttgcagaaaccctgactcaggcgcaggagcgcggagaagacatcggtgattacggcatattgtgccgctatcagcagcgtcgacagagcgatcgcgaagcaaccatcggcgtcacggacagcctggtacatctttttgccaaccgttgggcaccgctggttgtcgggcgcaacatcggactgatgacgatggaattattcaccccggcacgcgatgtgctggcgcagcgcaccctcggttgggtggcgcgttga

SEQ ID NO: 260795 - DNA, 1203 bp, Klebsiella pneumoniae
atgcaaagtgttgatgtagccattgttggtggcggcatggtggggctggcggttgcctgcggcttacaggggagcggcttacgcgttgccgtactggagcagcgcgtaccggaacctctggcggcggatgcaccaccacaactgcgcgtttcggctatcaatgccgccagcgaaaaattactcacccgtcttggcgtctggcaggacattctctctcgtagggccagttgttatcacggtatggaagtgtgggacaaagacagttttggtcacatttcgtttgacgatcaaagcatgggctatagccatcttgggcatatcgttgaaaactcagtgattcactacgcgctgtggaacaaagcgcagcagtcgtcagatatcactctgttggcccccgcagaattacagcaggtcgcctggggagaaaatgaaaccttcctgacgctgaaagatggccgcatgttaacggcgcgtctggtgattggcgcggacggcgctaattcctggttgcgcaacaaagccgatattccgctgaccttctgggattatcagcatcacgcgctggtggcgaccattcgcacggaagaaccgcatgatgcggtggcgcggcaggttttccatggcgaaggcattctggcctttttaccgcttagcgatccgcatctttgctcgattgtctggtcactgtcgccagaggaagcgcagcggatgcagcaggcaagtgaagacgaatttaatcgcgcgttaaatatcgcttttgataatcgcctgggcttatgcaaggttgagagcgcgcgtcaggtgttcccactgacggggcgttatgcgcgccaatttgccgcgcaccgtctggcgttggtgggcgacgccgcgcataccattcacccgctcgcggggcagggcgttaatctcggctttatggatgctgcagagctgattgctgaactgaaacggttgcatcgtcagggtaaagacatcgggcagtacatttatctgcgtcgctatgagcgtagccgcaagcacagtgcggcgctgatgctggctggtatgcagggattccgcgatctgttttccggtactaatccggcgaaaaaactgctgcgtgatattggtttgaaactggccgacacgcttcctggcgttaaaccacaacttatccgccaggcaatgggattaaacgatttgcctgaatggctgcgttaa

SEQ ID NO: 260796 - DNA, 1095 bp, Klebsiella pneumoniae
atggcacaacagactcctttgtacgaacaacacacgctttgcggcgctcgcatggtggatttccacggctggatgatgccgctgcattacggttcgcaaatcgacgaacatcatgcggtacgtaccgatgccggaatgtttgatgtgtcacatatgaccatcgtcgatcttcgcggcagtcgcacccgggagtttctgcgttatctgctggcgaacgatgtggcgaagctcaccaaaagcggcaaagccctttactcggggatgttgaatgcctctggcggtgtgatagatgatctcatcgtctactactttactgaagatttcttccgcctcgttgttaactccgccacccgcgaaaaagacctctcctggattacccaacacgctgaacctttcggcatcgaaattaccgttcgcgatgacctttccatgattgccgtgcaagggccgaatgcgcaggcaaaagctgccacactgtttaatgacgcccagcgacaggcggtggaagggatgaaaccgttctttggcgtgcaggcgggggatctgtttattgccaccactggttataccggtgaagcgggctatgaaattgcgctgcccaatgaaaaagcggcggatttctggcgcgcgctggtggaagcgggcgttaagccctgcggtctgggcgcgcgtgacacgctgcgtctggaagctggcatgaatttgtatagtcaggagatggacgaaaccatctctcctttagccgccaacatgggctggaccatcgcctgggaaccggcagatcgtgacttcatcggtcgtgaagccctggaagtgcagcgtgagcatggcacagaaaaactggttggtctggtgatgaccgaaaaaggcgtgctgcgtaatgaactgccggtacgttttactgatgcgcagggcaaccagcatgaaggcattatcaccagcgggactttctccccgacgctgggttacagcattgcgctggcgcgcgtgccggaaggtattggcgaaacggcgattgtgcaaattcgcaaccgtgaaatgccggttaaagtgacaaaacctgtttttgtgcgtaacggtaaagccgtcgcgtga

SEQ ID NO: 260797 - DNA, 312 bp, Klebsiella pneumoniae
atgcagccaaacgacatcactttttttcaacgtttccaggatgacattctggctgggcgtaaaaccatcaccatccgcgacgagtctgaatcgcacttcaaaacgggtgatgtgcttcgtgtcgggcgttttgaagatggcggttatttttgcacgattgaagtcactgcaacctcaaccgtaacgctggatacgctgacggaaaaacatgcagagcaggagaatatgaccctgccagaactgaaaaaggtcattgccgacatctatcccggccagacacagttttatgtgattgaatttaaatgcctttaa

SEQ ID NO: 260798 - DNA, 690 bp, Klebsiella pneumoniae
atgtgcgtgtacgtttctccggagcaagttatggttcagaagccccttattaagcagggatattcgctggcagaggaaattgccaacagcgtcagtcacggcattgggttggtgtttggtatcgttgggctggtgttgctactggttcaggcggtggatctcaatgccagcgccacagcgataaccagttacagcctctatggcggcagtatgatcctgctgttcctcgcttcgacactctatcacgccattcctcatcaacgggcaaaaatgtggctgaagaaatttgaccactgtgccatttatctgttgattgccggaacctacacgccgtttttgctggtggggttagattctccgttagcgcgcgggttgatgattgttatctggagcctggcgctgctggggattctgttcaaactgaccatcgcgcaccgatttaaaattttatctctggtgacctatctggcgatgggctggctgtcgctggtggtgatttatgaaatggcagttaagctcgcggcgggcagcgttaccttattggcagtaggcggcgtggtctactcgctcggggtgattttctacgtctgcaagcgcatcccatacaaccatgccatctggcacggctttgtgctcggcggtagtgtgtgccactttctggcgatctatttgtatattgggcaggcgtaa

SEQ ID NO: 260799 - DNA, 981 bp, Klebsiella pneumoniae
atggcttttacaccttttcctccccgtcagcctacggcttctgcccgtttaccgctgacgctgatgacgcttgatgactgggcgcttgccaccattactggcgcggacagcgaaaaatatatgcagggtcaggtgacagcagatgtcagccagatgacagaagatcagcacctgctcgccgcccattgcgacgccaaaggtaaaatgtggagcaatttacgtctgttccgcgacggcgatggctttgcatggattgaacggcgcagcgtgcgtgaatcgcagctgactgaactgaaaaaatatgcggtattctctaaagtgaccatcgcgccagacgacgagcgtgtgctgcttggtgttgccggttttcaggcgcgcgccgcgctggcaaatatctttagtgaactgccttcgaaagaaaaacaggtagttaaagaaggcgcgaccactttgctatggtttgaacaccctgcagaacgtttcctgaccgtaaccgatgaagccactgccaatatgctgaccgataaactgcgcggtgaagcggaactgaacaatagccaacagtggctggcattaaacattgaagcgggtttcccggtgattgatgccgccaacagcgggcagtttatcccacaggcgaccaacctccaggcgctgggcggcattagctttaaaaaaggctgctataccggacaagagatggtggcgcgagctaaattccgtggtgccaacaaacgcgcgctctggttgctgacgggtagcgccagccgactgccggaagccggtgaagacttagagctgaaaatgggcgagaactggcgtcgtaccggaaccgtgctggctgcggtaaaactggaagatggtcaggtcgtggtacaggtcgtcatgaataacgatatggaaccggacagcatcttccgcgtgcgtgacgatgcgaatacattgcatatcgagccgctgccgtattcgctcgaagagtaa

SEQ ID NO: 260800 - DNA, 267 bp, Klebsiella pneumoniae
atggacattaacaacaaagcccgcattcattgggcatgccgccgtggtatgcgcgaactcgatatttcaatcatgccgtttttcgaacatgagtacgacagcttaagcgatgacgaaaaacgcatctttattcgtctgctggaatgtgacgatccggacctgtttaactggatgatgaatcacggtaaaccggccgatgcagaactggaaatgatggtccgactcatccagacacggaaccgggaacgtggtcctgtggcaatctga

SEQ ID NO: 260801 - DNA, 408 bp, Klebsiella pneumoniae
gtggtcctgtggcaatctgatttgcgcgtctcctggcgcgcacagtggctttccttgctgattcatgggctggttgccgctgttattttactcatgccctggccgctcagttacaccccgttatggatggtgttactttcgctggtggtgtttgattgcgttcgcagccagcggcgcattaatgctcgccagggggaaattcgcctgttgatggacgggcgtttgcgctggcaagggcaggagtggagcatcgtcaaagcgccgtggatgattaagagcggcatgatgctgcgtttacgttctgacagcggtaaacggcaacatttatggctggcagccgacagcatggacgaagccgaatggcgggatttacggcggattttgttgcaacaagagacgcaaagataa

SEQ ID NO: 260802 - DNA, 711 bp, Klebsiella pneumoniae
atgaagaaaggttttatgttgtttactttgttagcggcgttttcaggctttgctcaggctgatgacgcggcaattcaacaaacgttagccaaaatgggcatcaaaagcagcgatattcagcccgcgcccgtagctggcatgaagacagttctgactaacagcggtgtgttgtacatcaccgatgatggtaaacatatcattcaggggccaatgtatgacgttagcggaacgactccggtcaatgtcactaataagatgttgttaaagcagctgaacgcgcttgaaaacgagatgatcgtttataaagcgccgcaggaaaaacacgtcattaccgtgtttactgatattacctgtggttactgccacaaactgcatgagcaaatggcagactacaacgcgctggggatcaccgtgcgttatcttgctttcccgcgccaggggctggagagccaggctgagcaacaaatgaaagccatctggtgtgcgaaagataaaaagaaagcgtttgatgatgtgatggcgggtaaagctgccactccggcaagttgcgatatcgatattgccgatcattacgcacttggcgtccagcttggcgttagcggcactccggcaattgtgctgagcaatggcacacttgttccgggttaccagccaccgaaagacatgaaagaattcctcgacgaacaccaaaaaatgaccagcggtaaataa

SEQ ID NO: 260803 - DNA, 1518 bp, Klebsiella pneumoniae
atgtctgaacaacacgcacagggcgctgacgcggtagtcgatcttaacaatgaactgaaaacgcgtcgtgagaagctggcgaacctgcgcgagcaggggattgccttcccgaacgatttccgtcgcgatcatacctctgaccaattgcacgcagaattcgacggtaaagagaacgaagaactggaagcgctgaacatcgaagttgccgttgctggccgcatgatgacccgccgtattatgggtaaagcgtctttcgttaccctgcaggatgtgggtggccgcattcagctgtacgttgcccgtgacgatctgccggaaggcgtttacaacgagcagttcaaaaaatgggacctcggcgacatcctcggcgcgaaaggtaaactgttcaaaaccaaaaccggcgaactgtctatccactgtaccgagctgcgtctgctgaccaaagcactgcgtccgctgccggataaattccacggcttgcaggatcaggaagcgcgctatcgtcagcgttatctggatctcatctctaacgatgaatcccgcaacacctttaaagtgcgctcgcagatcctctctggtattcgccagttcatggtgaaccgcggctttatggaagttgaaacgccgatgatgcaggtgatcccaggcggtgccgctgcgcgtccgtttatcacccaccataatgcgctggatctcgacatgtacctgcgtatcgcgccggaactgtacctcaagcgtctggtggtcggtggcttcgagcgtgtattcgaaatcaaccgtaacttccgtaacgaaggtatttccgtacgtcataacccagagttcaccatgatggaactctatatggcttacgcagattacaaagatcttatcgagctgaccgaatcgctgttccgtactctggcacaggatattctcggtaagacggaagtgacctatggcgacgtaacgctggacttcggtaaaccgttcgaaaaactgaccatgcgtgaagcgatcaagaaatatcgcccggaaaccgacatggcggatctggacaacttcgactctgcgaaagcgattgctgaatctatcggcatccacgttgaaaagagctggggtctgggccgtatcgttaccgagatcttcgaagaagtggcagaagcacatctgatccagccgaccttcattactgaatatccggcagaagtttctccgctggcgcgtcgtaacgacgttaacccggaaatcacagaccgctttgagttctttatcggtggtcgtgaaatcggtaacggctttagcgagctgaatgacgcggaagatcaggcgcagcgcttcctggatcaggttgccgcgaaagacgcaggcgacgacgaagcgatgttctacgacgaagattatgtcaccgcactggaacacggcttaccgccgacagcaggtctgggaattggtatcgaccgtatggtaatgctgttcaccaacagccataccatccgcgacgttattctgttcccggcgatgcgtccggtgaaataa

SEQ ID NO: 260804 - DNA, 549 bp, Klebsiella pneumoniae
atgcaaacggaacacgtcattttattgaatgcacagggagttcccacgggtacgctggaaaagtatgccgcacacacggcagacaccctcttacatctcgcgttctccagttggctgtttaatgccaaggggcaattattagttacccgccgcgcccttagcaaaaaagcatggccgggcgtgtggactaactcggtttgtgggcacccacaactgggcgaaagcaacgaagacgcggtgatccgccgttgccgctttgagctgggtgtggaaataacagcaccagaaccggtctatcctgactttcgctaccgcgccaccgatccgaatggcattgtggaaaatgaagtgtgtccggtatttgccgcacgcacgaccagtgcgttacagatcaacgatgatgaagtgatggattatcaatggtgtgatttagcagatgtattacacggtattgatgccacaccgtgggcgttcagtccgtggatggtgatgcaggcgacaaatcgcgaagccagaaaacgattatctgcatttacccagcttaaataa

SEQ ID NO: 260805 - DNA, 126 bp, Klebsiella pneumoniae
atgaatcttttaatgcgcgctatattcagtctgttgttgctttttactctctctattcctgtcatttctgactgtgttgcaatggccattgaaagtcgcttcaaatatatgatgctgcttttttaa

SEQ ID NO: 260806 - DNA, 1449 bp, Klebsiella pneumoniae
atgagcgccatagattcccaacttccctcatcttcagggcaagatcgcccaactgatgaggttgaccgcatattatcaccaggaaagctgatcatactcggtctgcaacacgtccttgtcatgtacgcaggtgcagtcgctgttccacttatgattggagaccgactgggcctctcaaaagaagctattgcgatgctcattagctcggatctcttttgctgcgggatcgtcacattattgcaatgtatcggtatcggccgctttatggggatccgcctgccggtgattatgtcggtgacctttgctgctgtaacaccaatgatagccattgggatgaacccggatatcggcctgctggggatatttggtgccactatcgccgcgggttttatcaccacattattagcgccacttatcggtcgcttgatgcctttattcccgccactggttaccggtgtggttattacttctatcggacttagcatcattcaggtgggtattgactgggccgccggaggtaaagggaatccgcaatatggtaatcccgtttatttggggatctcctttgccgtcttaatttttatcttgctcattactcgctatgcgaaaggatttatgtccaacgtcgccgtattactggggattgtatttggctttttactttcgtggatgatgaatgaagtcaatttatccgggctacatgatgcctcgtggtttgcgattgttacgccgatgtcgtttggtatgccgattttcgatcccgtttccattctgaccatgactgccgtgttaatcatcgtgtttatcgagtcgatggggatgttcctggcactaggtgaaatagtcggtcgtaaactctcttcacacgatattattcgcgggctgcgtgtcgatggcgtagggacaatgataggcggaacgtttaacagcttcccccacacgtcattttctcaaaacgttggcctggttagcgtgacgcgcgttcatagccgctgggtgtgtatttcttcgggaattatattaatcctgtttggcatggtgccaaaaatggcggtgctggtcgcctccattccgcaatttgtgctgggcggtgctgggctggtgatgttcggcatggtactggcgacagggattcgaattctgtcgcgctgtaactacaccaccaaccgttacaacctctatattgtggcgatcagtctcggcgttggcatgactccgacgctctctcacgatttcttttctaagttaccggccgtactgcaaccgctgctgcatagcggcattatgctcgcaacccttagcgccgttgtgctgaacgtcttctttaatggctatcagcatcatgctgatctggtgaaggaatccgtctctgataaagatttaaaagtcaggacagtacgtatgtggcttctgatgcgcaagctgaagaaaaatgagcatggagaataa

SEQ ID NO: 260807 - DNA, 489 bp, Klebsiella pneumoniae
atgagtgagatagtgatacgccatgctgaaacgcgcgattacgaggccatcaggcagattcacgcccagccggaggtgtattgcaacacgctacaggtgcctcatccttccgatcatatgtggcaggagcgactcgccgatcgtcccggcatcaagcaactcgtcgcctgtattgatggagacgtcgtgggccatctcaccattgacgtgcaacagcgcccacgccgcagtcatgttgcagattttggtatttgtgtcgactcccgttggaagaatcgcggcgtcgccagcgccctgatgcgagagatgattgaaatgtgcgacaactggttgcgggtagatcgtattgagctaacggtgttcatcgataacgcgccagcaattaaagtctataaaaaatttggatttgagattgaagggactggcaagaagtacgcattacgtaatggtgaatatgtcgatgcgtattatatggcgcgggtgaagtaa

SEQ ID NO: 260808 - DNA, 1038 bp, Klebsiella pneumoniae; identical to SEQ ID NO: 9595

SEQ ID NO: 260809 - DNA, 2097 bp, Klebsiella pneumoniae
atggaaaagcacggagctgaattgcttttacagcggatgttaggaaataccaccgctactttcagggaagggcaatgggaagccatagatgcagtggttaatcagcggcgaaaactgctggttgtacagcgcaccggctgggggaaaagtgccgtgtacttcatcgccagtaaaatcttccgcgatcgcggcgctggcccgacaattatcatctctcctttgcttgccctgatgcgtaaccaggttgccgccgctgaacggttaggtattacggctgaaacgttgaattctacaaacagggaagaatggcagcgcattagcgataagttgctgcaaggtgaggtcgattgcttgctggtttccccggaacgtttggcaaaccaggactttatcgaaacggttttatatcctatagccgatcgtattggcttgcttgtggtcgacgaggcgcactgcatctctgattggggccacgattttcgcccggattaccgacgtatattagatattttgcgccaactgcctgcgaatacccctgttctgggtacaaccgcgacagcgaataaccgtgttgttgaggatatccgtcagcaattgggtgacattgtgattcagcgtggaacgctggctcgcgaaagtttggcgcttgatgccttagtcttaggagaacagtcatcccgtctggcatggttagcaacggttatccctcagttttccaaatcgggaattgtttataccctgacgactcgcgatgctgaacttgtcgccgagtggttaaggaaaaatggtatcagtgcatttgcttactacagcggcgtgacttgtgaaggcgcggaagattctaatactgccagggaatatctggagcaggcactgctggcaaataaaatcaaagtgctggtcgcgacgacggcattaggtatggggtttgataaacctgatttaggtttcgtcattcattatcagatgccggggtctattgtcggttactaccaacaggtggggcgtgccgggcgtgctatagattccgcagttggcatattgctttgtggtggtgaagaccgcgctattcatcaattcttccgtgaaagcgcctttcctgcggaggcgcaaattcatgaaatactcaacgtacttagcgagaatgacggtcttaccctacgaggcattgaacaacggacgaatcttcgttatgggcaaatagaaaaagcactgaaattattggtagcggaaaatccatcgcctgtggtgtataccgagaaattatggcgcagaactatcgtcagtttttctcctgatcatgaacgaattaaccatttgatgaatcagagaaaaagtgaactggcagacgttgaaagctatatcacgaccaaggagtgcaaaatgcaatttctgcgccgtgcactcgatgagccaagtgccgaacgttgtggtaaatgtagcagttgtcttcagcatccgttattgtcgcccgacattgatagcggcttactccatgcggcaaatttatttattaaacacgctgacctgccgttaaatctcaataaacaggtggcagctggggcttttacgcaatacggatttaaagggaacttgcctgcgggtttacaaggatctacggggcgaatcctttctcgttggggagattccgggtggggaaagcaggtagcacaggagaaaaaaacggggcgcttaagtgatgagctggtagaagcatgtgcggaaatggttcgccaacgctggaatccgcatcctgaaccaacctgggtatgctgcgttccttcattaaggcacctcgacctggttcctgattttgcccggcgactggcggcgaaacttggcttaccttttattgatgccattgaaaaagtcgtggacaatccaccgcagaaaatgcagcaaaaccgttttcaccagtgtcaaaatctcgacggggcgtttgtgattacccctcctttgatgccaggtccggcgttgctggttgacgatatcgtggattctgcatggacgctgacagttctgacagcactgttacgccaggcaggttgcccgacggtttatcctcttgcccttgcttctacctcggtaaaaaattga

SEQ ID NO: 260810 - DNA, 1203 bp, Klebsiella pneumoniae
atgaatctttcagccaatgcacaagcgactctcctgctaaccagcgatttttctcgcgcggcggcgagtgagtataaacctcttagtaatagtgaatgggggaagtttgcattatggctgaagcaccaacgtatcagtcccgccgatcttctggtgccgcaaccgcaagagaaacttacaggctggagcgatccgcgtatttctcaggagcgtattcttggcttgctggcgcgtggtcatagtctggcgttggcggtagataagtggcaacgcgccggtttatggatcttaacccgcggagatgccgattatcccgttcgcttgaaaaaccgattgcgaacggatgcacctcccgttttatttggctgcgggaataaagcattactgcaagcggaaggtatggcgattgttggctcgcgagatgctccgactgccgatttgcgctatacccaacaactggcagcgaaactggcccaacaggggatttgcgttatctctggtggtgcgcgaggtattgatgaatgtgcaatagcgtcggcgctggaggccggaggaactgccgttggcgtattagctgatagcttgttaaaaacgagcacgttagtgaaatggcgtgaagggcttatagcaggcaacctggtgttgatttcaccgttttacccagaggtacgtttcaccgtcggcaatgcgatggcgcggaataaatatatttattgccttgctgaaagcgcaatggttgtacgtgcgggaatgaccggtggaacgataaccggagcgatggaggcgttaaaacatcagtggctgcctgttctggttaaaccaaatcaggatgtgcaatcagccaattcacgattagtagaaaatggggcgtcatggagtgctgaacaggctgagaatgtgacgatcagactgccagacgttcctgggctgatgtatgacagagcactccgtaacgctcaaccagaattgttttcgctgcacgaagatgacgcaaattacgcagtgatgccctcgcatacccctgtcgatttttatcaactttttgtggcggaactggcgatccttgcaaaggaatcgataagtattgaaaggctggcgtcttgtactggtttaaccatcgaacaaattagtatgtggctgaaccgcgcagaagaagagggaagggttatccgattgggcgaaggtcattatcagttcaggtaa

SEQ ID NO: 260811 - DNA, 594 bp, Klebsiella pneumoniae
atgaatgaaatcatttctgcagcagttttattgatcctgattatggatccgctcggaaacctacctattttcatgtccgtactgaaacatactgaaccgaaaagacggcgggcaatcatggtgcgagagttgcttattgctctcctggtgatgctggtgttcctgtttgcgggtgagaaaattctggcatttcttagcctgcgggcagaaaccgtctccatttctggcggcatcattctgtttctgatcgccattaagatgattttccccagtgcttcaggaaatagcagcgggcttccggcaggtgaagagccgtttatcgtgccgttggcaattccgttagtcgccgggccgactattctcgccacgctgatgttgttgtctcatcagtacccgaatcagatgggacatttggtaattgctctgctgctggcctggggtggcacctttgtcatcctgctacagtcttcgctatttttacgtctgctgggcgagaaaggggtgaacgcacttgaacgcctgatgggattgattctggtgatgatggcaacccagatgttcctcgacggcattcgaatgtggatgaaggggtaa

SEQ ID NO: 260812 - DNA, 1296 bp, Klebsiella pneumoniae
  misc_feature (1277)..(1286): n is a, c, g, or t
atgacacaactcgccattggcaaacccgcacccctcggcgcgcattacgacggtcagggcgtcaacttcacacttttctccgctcatgccgagcgggtagaactgtgtatctttgacgccaatggccaggaacatcgctatgacttgccagggcacagtggcgacatttggcacggttatctgccggatgcgcgtccgggtttgcgttatggttatcgcgttcatggcccctggcaacccgccgaggggcatcgctttaacccggcgaagttgttgattgatccttgcgcgcggcaaattgacggggaatttaaagataacccgctgctgcacgccggtcataatgaacctgactatcgcgacaacgccgccattgcgccgaaatgcgtagtggtggttgatcactatgactgggaagatgatgccccgccgcgcacgccgtggggcagcaccatcatttatgaagcccatgtcaaaggattaacgtacctgcatccggagatcccggtcgagatccgtggcacttataaagccctggggcatccggtgatgatcaactatttgaaacagttgggcattaccgcgctggaactgctgccggtggcgcagtttgccagcgaaccacgcctgcaacgtatgggtctaagtaactactggggttataacccggtggcgatgtttgcgctgcatccggcgtatgcctgctccccagaaacggcgctggatgagtttcgcgatgcaatcaaagcactgcataaagcgggtatcgaagtcattcttgatatcgtgctcaaccatagtgcggaactggacctcgacggtccgttattctctctgcgtgggatcgacaaccgtagctattattggataagagaagacggcgattatcacaactggaccggttgtggcaacacgctcaatttgagtcatccggcggtagtggattatgccagcgcttgcctgcgttattgggtagaaacctgccacgtcgatggtttccgctttgatctggcggcagtcatgggccgtacgccagagttccgtcaggatgcgccgttgtttaccgctatccagaactgcccggtgctctcgcaggtgaagttaattgctgaaccgtgggatattgctcctggtggttatcaggtgggaaatttcccgccgctgtttgccgagtggaacgatcatttccgcgatgctgcccgtcgtttctggcttcattatgatttgcctctgggggcgtttgccgggcgttttgctgcctccagcgatgtttttannnnnnnnnnatgtttttaa

SEQ ID NO: 260813 - DNA, 726 bp, Klebsiella pneumoniae
  misc_feature (10)..(19): n is a, c, g, or t
atgtttttannnnnnnnnnatgtttttaaacgtaatggtcgtctgccgagtgccgcgattaatctcgtcaccgcgcatgacggttttacgcttcgcgactgcgtttgcttcaaccataaacataatgaagcaaacggagaagaaaatcgcgacgggaccaacaacaattatagtaacaatcatggtaaagaagggttaggcggtactcttgacctggttgaacggcgtcgcgacagcattcacgccctgttaacaacgttgttgctctcccagggtacgccgatgttactggccggtgacgaacatggtcacagccagcatggcaataacaatgcctactgtcaggataaccaattaacctggttggactggtcgcaggcaagcagtggtttaaccgcatttaccgccgcgttaatccatctgcgcaagcgcattcccgctttggtggagaatcgctggtgggaagaaggcgacggcaatgtccgttggctaaatcgatatgctcaacctttaagcacggatgagtggcaaaacgggccgaaacagctgcaaattctgctctcggatcgctttttgatcgcaattaacgccacgcttgaggtaacagagattgttttacctgctggggagtggcacgccattcccccattcgctggagaggataacccagtgattacggctgtctggcagggacctgcacacggattgtgtgtgttccagagatga

SEQ ID NO: 260814 - DNA, 1296 bp, Klebsiella pneumoniae
atggttagtttagagaagaacgatcacttaatgttggcgcgccagctgccattgaaatctgttgccctgatactggcgggaggacgtggtacccgcctgaaggatttaaccaataagcgagcaaaaccggccgtacacttcggcggtaagttccgcattatcgactttgcgctgtctaactgcatcaactccgggatccgtcgtatgggcgtgatcacccagtaccagtcccacactctggtgcagcacattcagcgcggctggtcattcttcaatgaagaaatgaacgagtttgtcgatctgctgccagcacagcagagaatgaaaggggaaaactggtatcgcggcaccgcagatgcagttacccaaaacctcgacattatccgccgttataaagcggaatacgtggtgatcctggcgggcgaccatatctacaagcaagactactcgcgtatgcttatcgaccacgtcgaaaaaggcgcacgttgcaccgttgcttgtatgccagtaccgattgaagaagcctccgcatttggcgttatggcggttgatgagaacgataaaattatcgaattcgttgaaaaaccagctaacccgccgtcaatgccgaacgatccgagcaaatctctggcgagtatgggtatctacgtctttgacgccgactatctgtatgaactgctggaagaagacgatcgcgatgagaactccagccacgactttggcaaagatttgattcccaagatcaccgaagccggtctggcctatgcacacccattcccgctctcttgcgtacaatccgacccggatgccgagccgtactggcgcgatgtgggtacgctggaagcttactggaaagcgaacctcgatctggcctctgtggtgccggaactggatatgtacgatcgcaattggccaattcgcacctacaatgaatcattaccgccagcgaaattcgtgcaggatcgctccggtagccacgggatgacccttaactcactggtatccggcggttgtgtgatctccggttcggtggtggtgcagtccgttctgttctcgcgcgttcgcgtgaattcattctgcaacattgattccgccgtattgttaccggaagtatgggtaggtcgctcgtgccgtctgcgccgctgcgtcatcgatcgtgcttgtgttattccggaaggcatggtgattggtgaaaacgcagaggaagatgcacgtcgtttctatcgttcagaagaaggcatcgtgctggtaacgcgcgaaatgctacggaagttagggcataaacaggagcgataa

SEQ ID NO: 260815 - DNA, 1506 bp, Klebsiella pneumoniae
atgcaaaacggaaaatggattttgacctcgctggtaatgactttttttggcatccccatactggcgcaatttttggcagcggttgttgccatgctgggggccgggcttgccgctattcttgagttttgcaatttactctttacaccaacaatttatcttctactcaacgtctttatgctgacgctgggcgcattactgctatttttctctgggcgagtgtgggcgggcgatagcgcaccagaaaacagagaaatagccgcctggcgacaatgtctttttttagttcccgctttattaaccctggttggctggataatcacgctacatctggcagattatcaatttcgccagatgggagccggttggttggcaaaccttatgcttccctggttgggcgtttttacagtctcattcgtcggtggtgagtactggtggatagtcattattcccgttggcgcgcatatcagtttttcactgggatacggctggccgaccagacaccctttaaccggcacctccggtctacgttgccgtaatttacttctgttcattcttctcttactgggtattgtcgctggttatcaggcttatttatataaacagcttaatcccggcgtcggtgtgcgtgaaaatattgatacctgggcctggcgacccgataaacttaataatcaactgacgccactgcgtggtaaaccacaaattcaatttacgcaaaactggccgcgactcgatggcgctacggcggcgtaccccatttatgcctctgcattttatgcattaagtgtaataccagaggattttcacgtttgggattatctggataactctcgtacgcaagaagcatataacaaaatcgttaacggtgatgccgatattattttcgtggcgcaaccttccgatgggcaaaaaaaacgcgctgagaaatcgggcgtcactttgctgtacacgccatttgcccgtgaagcgtttgttttcatcgtcaatgcggataatccggttaattccctgactgaacaacaagtgcgtgacatttttagtggcgcaattaccaactggcgcacggttggcggtaacgatcaggagatccagacctggcaacgcccggaagactctggcagccagacagtgatgcaatcgcaggtcatgaaaaatgtccgcatgatctcgccgcaggaaaccgaagtggcaagcatgatggagggaatgattaaagtcgttgccgaataccgtaatacaaacaacgcaataggctacaccttccgctattacgcaacacaaatgaatgccgataaaaatataaaactgctagcgattaacggtattgcaccgactgcagaaaatattcgcaatggcaaatatccctatgtcgtcgatgcatttatggtaacgcgggacaatatgacgtcagaaacacaaaaactggttgaatggtttttaacgccgcaggggcagagtctggtggaagatgtgggctatgtgccgctgtatccaacaatgaaataa

SEQ ID NO: 260816 - DNA, 993 bp, Klebsiella pneumoniae
atgaataaattcacctgtgttttactattaggtacggcgctactggcgggatgtgtcgaccgggaagggtactataacagcgtcagggaagaagacagccatggactgacgtctctgcgggggcaacctgaattacgttacaacgatgattggtcaagatggccgagagtgtacggcgctacagccttatacccgctgtatgcctccgcgtattatgaattagtacccgagccaaaagataaggatcgaacctcgctggcctggcaggcgtatggtttgcaacaaacccgaacagctgaagcctacgatagtctgattaagggtaccgcgacggttatttttgttgcacaaccgtcggaaggacagaaaaaacgtgcagaagaagcaggtgttaaactcaaatataccgctttcgcccgcgaagcctttgtctttatcgttgatatcaaaaacccggttaattcacttagcgaacagcaggtcaaagacatttttagcggtaaagtgagtcgctggaataaagtgggcggcggtgacgaaggtataaaaatctggcagcggccagaagattctggaagccaaacggttatgaagggactggttatgcaagatactccaatgctgccagccaaaaaatccactgttatcgatcttatgggcggtttaattaccgaagtcgccgactaccaaaatacaccatcttctattggatacaccttccactattacgtcacacgtatgaatgacaatatgctcaaaatgcgcaaacagatcaaactgctggctataaatggcgttgcacctacagaggaaaatatccgtaacggcacttatccgtacataattcatgcttatatggtgacgcacgaaaaccctacgctggaaacgcagaaattcgtcgactggtttttaagcccgcagggacagcaattggtagaggatgtgggctatgtgccgatttatgacgcatcatccgaatcatcaggacaataa

SEQ ID NO: 260817 - DNA, 267 bp, Klebsiella pneumoniae; identical to SEQ ID NO: 6637

SEQ ID NO: 260818 - DNA, 327 bp, Klebsiella pneumoniae
atggatcagttcgaatgtattaacgttgccgacgcgcaccagaagttgcaggaaaaagaggcggtgctggtcgatattcgcgatccacagagtttcgcaatggggcatgcggtgcaggctttccatttaaccaacgacacactgggcgcgtttatgcgtgataacgactttgacactccggtgatggtgatgtgttatcacggcaatagcagcaaaggggcggcgcagtatctgctgcaacagggctacgatgtggtctatagcattgacggcggctttgaagcctggcagcgacagtttcccgcagaggtggcgtacggcgcgtaa

SEQ ID NO: 260819 - DNA, 831 bp, Klebsiella pneumoniae
atgttgatgattacctcttttgctaacccccgcgtggcgcaggcgtttgttgattacatggcgacgcagggtgttatcctcacgattcaacaacataaccaaagcgacgtctggctggcggatgagtcccaggccgagcgcgtacgggcggagctggcgcgttttctcgaaaacccggcagattcgcgttatctggcggccagctggcaggcgggccataccggcagtggcctgcattatcgccgttatcctttctttgctgccttgcgtgaacgcgcaggtccggtaacctgggtgatgatgatcgcctgcgtggtggtgtttattgccatgcaaattctcggcgatcaggaagtgatgttatggctggcctggccattcgatccaacactgaaatttgagttctggcgttacttcacccacgcgttaatgcacttctcgctgatgcatatcctctttaacctgctctggtggtggtatctcggcggtgcggtggaaaaacgcctcggtagcggtaagctaattgtcattactctcattagcgccctgttaagcggctatgtgcagcaaaaattcagcgggccgtggtttggcgggctttctggcgtggtgtatgcgctgatgggctacgtctggctacgtggcgaacgcgatccgcaaagtggcatttacctgcaacgtgggttaattatctttgcgctgatctggattgtcgccggatggtttgatttgtttgggatgtcgatggcgaacggagcacacatcgccgggttagccgtgggtttagcgatggcttttgttgattcgctcaatgcgcgaaaacgaaaataa

SEQ ID NO: 260820 - DNA, 759 bp, Klebsiella pneumoniae
atgaaacaaacacaacgtcacaacggtattatcgaactggttaaacagcaaggttatgtcagtaccgaggaactggtggagcacttctccgtcagcccgcagactattcgtcgtgacctcaatgagctggcagagcaaaacctgatcctgcgccatcatggcggcgcggcgctgccttccagttcggttaacaccccgtggcacgatcgcaaggccacccagaccgaagaaaaagagcgcatcgcccgcaaagtggcggagcaaatccccaacggctcgacgctgtttatcgatatcggcaccaccccggaagcggtggcgcacgcgctgcttaatcacagcaatttgcgcattgtcaccaacaatctcaacgtcgctaacacgttgatggtaaaagaagatttccgtattattctcgccggtggcgaattacgtagccgcgatggtgggatcataggcgaagcgacgctcgattttatctcccagttccgccttgatttcggcattctggggatcagcggcatcgatagcgacggctcgttgctggaattcgattaccacgaagttcgcaccaaacgcgctattattgagaactcgcgccacgttatgctggttgtcgatcactcgaaatttggccgtaatgcgatggtcaatatggggagcatcagcatggttgatgctgtctacaccgacgccccgccgccagtaagcgtcatgcaggtgctgacggaccatcatattcaactggagctgtgctga

SEQ ID NO: 260821 - DNA, 1599 bp, Klebsiella pneumoniae
atgcgtaaaacagtggcttttggttttgtcggaacggtgctggattatgccgggcgcggcagtcagcgctggtcaaaatggcgtccgacactctgtctatgccagcaagaatcgttagttatcgatcggctggaattattgcacgacgcccgctcgcgctcgctattcgaaacgcttaaacgcgatatcgccagcgtttcgccagaaacagaagtggtgggcgttgagatagaactgcataacccgtgggatttcgaagaggtttacgcctgcctgcatgatttcgcccgtggttacgcgttccagccagaaaatgaagattatttaattcacatcaccaccggcacccacgtcgcgcagatttgctggtttctactggcagaagcgcgttacctgcccgcccggttgatacaatcttcaccaccgcgcaaaaaagaacaaccgcgcggcgcaggtgaagtgacgattatcgatctcgatttaagccgttataacgctatcgccagccgctttgccgaggaacgccaacaaacgctcgatttcctcaaatcaggcatcgccacgcgtaacccacacttcaaccgcatgattgagcagatcgaaaaagtggcgatcaaatcccgcgcaccgatcctgcttaacggcccgaccggggcgggtaagtcatttctggcgcgacgcatctttgaattgaaacaggcgcggcatcagtttagcggcgcgtttgtggaaatgaactgcgccaccctgcgtggcgataccgccatgtcgacgctgtttggtcatgtgaaaggcgcgtttaccggggcgcgggagtcgcgggaaggattattacgcagcgccaacggcgggatgttatttcttgatgagattggcgaattgggcgcagacgaacaggcaatgctgctgaaagccattgaagagaaaaccttttatccgtttggcagcgatcgccaggtgagtagcgactttcagcttatcgccggaacggtgcgcgatttgcgtcagctggttgccgaaggcaaattccgcgaagatctgtacgcgcggatcaatctctggaccttcaccctgccgggtctactccagcgccaggaagatattgaaccgaacctggattatgaagtggagcgccacgcctcactcactggtgacagcgtgcgttttaacaccgaagcgcggcgcgcctggctggcctttgcgacatctccccaggcaacatggcgcggtaactttcgcgaactttctgccagcgtcacgcggatggccacctttgccactagcggacgcatcactctggacgtggttgaagatgagataaaccgtctgcgctataactggcaggagagccgtccctccgcgcttacacaactgctgggcgcagaggcagaaaacatcgatctcttcgaccgtatgcaactggaacacgttatcgctatctgccgccaggcaaagtcgctttctgctgccggacgccagctttttgacgtttcgcgccagggcaaagccagcgtcaacgacgcagatcggctacgcaaatacctggcgcgttttggtctgacgtgggaagccttgcaggatcagcacagctccagttga

SEQ ID NO: 260822 - DNA, 1227 bp, Klebsiella pneumoniae
atgaattacgaattactgaccactgaaaatgccccggtaaaaatgtggaccaaaggcgtgccggtagaggccgatgcgcgtcagcaacttattaatacggcgaagatgccgtttattttcaaacatattgcggtaatgcctgatgtacacctgggtaaaggttccaccattggtagcgtgatcccaaccaaaggggcgattattccggcggcggtgggcgtggatatcggttgtggaatgaacgcgctgcgtaccgcgttaacggcggcagacctgcctgaaaacctggcggagctgcgtcaggcgattgaaacagccgtgccgcacggacgtactaccggacgttgtaaacgtgataaaggcgcatgggaaaatccgcctgttaacgtcgatgcgaaatgggctgagctggaagccggttatcagtggttaacgcaaaaatatccccgtttcctgaataccaataactataaacacctgggaacgctgggaacgggtaaccactttattgaaatctgccttgatgagtcggaccaggtgtggattatgctgcactccggttcacgcggaattggtaacgccatcgggacttactttatcgatctggcgcaaaaagagatgcaggaccaacttgagacgttgccgtcgcgtgatctggcgtactttatggaaggtacggaatactttgatgattacctgaaagccgtggcctgggcgcagctttttgccagccttaaccgcgatgcgatgatggaaaacgtggtaacggcgttgcagagcgttacgcagaaaacggtaagacagccacaaacgctggcgatggaagagatcaactgtcatcacaactatgtgcaaaaagaacagcactttggtgaagagatctacgtgacgcgtaaaggcgcggtgtctgcgcgtgcgggtcaatatggaattattccagggtcgatgggagcgaaaagctttatcgtccgtgggctgggaaatgaagaatcgttctgttcgtgcagccacggtgccgggcgggtaatgagccgtaccaaagcgaaaaaactgttcagcgtggaagatcaaattcgtgccaccgcgcatgtggaatgccgtaaagatgccgaagtgatcgacgaaatcccgatggcgtataaagatattgatgcggtgatggcggcacaaagcgatctggtggaagttatctataccctgcgtcaggtggtgtgcgtaaaaggataa

SEQ ID NO: 260823 - DNA, 1017 bp, Klebsiella pneumoniae
atgaaaaggatgattgcgctggatggcgcacagggcgaaggcggcgggcagatcctgcgctcggcgctgagcctgtcgatgataactggccagccatttaccatcactggcattcgtgccgggcgggcgaaaccggggctgttgcgccagcatctgaccgcggtaaaagcggctgcggaaatttgtagggcaacggtggaaggcgcggagctagggtcgcagcgtctggtcttccggccaggtaccgtgcacggcggcgattaccgctttgctatcggtagcgccggaagttgtacgctggtactgcaaacggtgctgcccgcgctgtggtttgctgatggaccttcgcgtgttgaagtgagcggtggcaccgataacccgtcggcaccgcctgcggattttatctgtcgggtgctggagccgctgctggcgaaaatgggcattcatcagcaaaccacattattacgccacggtttttatcctgctggaggcggggtggtggcagcggaagtctcgcccgtggcattgtttaacaccttgcaacttggcgagcgcgggaacattgtgcagatgcgtggagaggtgctattagctggcgtgccgaggcatgttgctgagcgtgaaatcgctacgctggtggcaagtttttccctgcatgagcagaatattcatagcctgccgcgcgaccaggggccgggtaataccgtctcgctggaagtcgaaagtgaaaatatcactgaacgctttttcgtcgtcggtgaaaagcgcgtcagtgccgaagtggtagccgcgcagttagtgaaagaggtgaaacgctacctggcaagcccggcggcagtgggggaatatctcgccgaccagctggtgctaccgatggcgctggcgggcgcgggagaatttacggtcgcccatccctcatgccatctgctgaccaatatcgcggtggtggagcgtttcttgccagtgcggtttagtctggtggaggctgatggcgtaacgcgggtgagcattgaatga

SEQ ID NO: 260824 - DNA, 2394 bp, Klebsiella pneumoniae
atgtcacaacctatttttaacgataagcaatttcaggaagcgctttcacgtcagtggcagcgttatggcttaaattctgcggctgaaatgactcctcgccagtggtggctggctgtgagtgaagcactggccgaaatgctgcgtgctcagccatttgccaaaccggtggcgaatcagcgacatgttaactacatctcaatggagtttttgattggtcgtctgacgggcaacaacctgttgaatctcggctggtatcaggatgtacaggattcgttgaaggcttatgacatcaacctgactgacttgctggaagaagagatcgacccggcgctgggtaacggtggtctgggacgtctggcggcgtgcttcctcgactcaatggcaactgtcgggcagtcagctactggctacggccttaattatcaatatggcttgttccgccagtcatttgtcgatggcaaacaggttgaagcgccggatgactggcatcgtggtaactatccgtggttccgccacaatgaagcactggatgtgcaggttggaattggcggtaaagtgacgaaagacggacgctgggagccggaatttaccattactggtcaagcgtgggatctccccgttgtcggctatcgtaatggcgtggcgcagccactgcgtctgtggcaggcgacgcatgcgcatccgtttgatctgactaaatttaacgatggtgatttcctgcgtgccgaacagcagggcatcaacgcggaaaaactgaccaaagttctctatccaaacgacaaccatactgccggtaaaaagctgcgcctgatgcagcaatacttccagtgtgcctgttcggtagcggatattttgcgtcgccatcatctggcggggcgtaaactgcacgaactggcggattatgaagttattcagctgaacgatacccacccaactatcgcgattccagaactgctgcgcgtgctgatcgatgagcaccagatgagctgggatgacgcctgggccattaccagcaaaacattcgcttacaccaaccataccctgatgccagaagcgctggaacgctgggatgtgaaactggtgaaaggcttactgccgcgccacatgcagattattaacgaaattaatacacgctttaaaacgctggtggaaaatacctggccgggcgatgaaaaagtgtgggccaaactggcggtggtgcacgacaaacaagtgcatatggcgaacctgtgtgtggttggcggtttcgcggtgaacggtgttgcggcgctgcactcggatctggtggtgaaagatctgttcccggaatatcaccagctatggccgaacaaattccataacgtcaccaacggtattaccccacgtcgctggatcaaacagtgcaacccggcactggcggctctgttggataaatcactgaaaaaagagtgggctaacgatctcgatcagctgatcaatctggaaaaattcgctgatgatgcgaaattccgtcagcaatatcgcgagatcaagcaggcgaataaagtccgtctggcagagtttgtgaaagttcgtaccggtattgagatcaatccacaggcgattttcgatattcagatcaaacgtctgcatgagtacaaacgccagcacctgaatctgctgcatattctggcgttgtacaaagaaattcgtgaaaacccgcaggctgatcgcgtaccgcgcgtcttcctcttcggcgcgaaagcagcaccaggctactacctggcgaaaaacattatctttgcgatcaacaaagtggctgacgtgatcaacaacgatccgctggttggcgacaagttgaaggtggtgttcttgccggattattgtgtttcggcggcggaaaaactgatcccggcggcggatatctccgaacaaatttcgacggcaggtaaagaagcttccggtaccggcaatatgaaactggcgctcaatggtgcgcttactgtcggtacgctggatggtgcgaacgttgaaatcgctgagaaagtcggtgaagaaaatatctttatttttggtcataccgtggaacaagtgaaggcaattctggccaaaggctacgacccggtgaaatggcggaagaaagataaggtgctggacgcagtattgaaagagctggaaagcggtaaatacagcgacggcgataagcatgccttcgaccagatgctgcacagtatcggcaaacagggcggcgatccgtatctggtgatggcagatttcgccgcttatgtagaggcacaaaagcaggtggatgtgctgtaccgcgaccaggaggcctggacccgcgcggcgatcctcaataccgcccgctgcggtatgtttagctcggatcgctctattcgcgattatcaggctcgtatctggcaggcaaaacgctaa

SEQ ID NO: 260825 - DNA, 2082 bp, Klebsiella pneumoniae
atggaaagcaaacgtctggataatgccgcgctggcggcggggattagccccaattacatcaatgcccacggtaaaccgcagtcgattagcgccgaaaccaaacggcgtttgcttgacgcgatgcatcaacgtaccgccacgaaagtggcggtaacgccagtcccgaatgtcatggtttataccagcggcaaaaaaatgccgatggtggtggagggcagcggcgaatatagctggctgctgaccaccgaagaaggaacgcagtacaaaggccatgtaacggggggcaaagcgttcaatctaccgacgaagctgccggaaggttatcacacgctgacactcacccaggacgaccagcgcgcgcattgccgggtgattgtggcaccgaaacgctgttacgaaccgcaggcgttgctgaataaacaaaagctgtggggtgcctgcgttcagctttatacgctgcgatcggaaaaaaactggggtattggggattttggcgatctcaaagcgatgcttgaggatgtggcaaaacgtggcgggtcgttcatcggtctgaacccgattcatgcgctctatccggcaaatccggaaagtgccagcccgtatagcccgtcttctcgccgttggctgaatgtgatttatatcgacgttaacgccgtcgaagatttccatcttagcgaagaggctcaggcctggtggaagttgccgaccacgcaacagacgctgcaacaggcgcgggatgccgactgggttgattactccacggttaccgccctaaaaatgacagcattacgaatggcgtggaaaggtttcgcgcaacgtgatgatgaacagatgaccgcgtttcgccagtttgttgccgagcaaggcgacagcctgttctggcaggcggcgtttgacgcactacatgcccagcaagtgaaagaggacgaaatgcgctggggctggcctgcatggccagagatgtatcagaacgtggattcaccagaagtgcgccagttctgcgaagaacatcgtgatgacgtcgatttttatctctggttgcagtggctggcttacagccagtttgccgactgctgggagataagccagggctatgaaatgccgattggcttgtatcgtgatctggcggttggcgtagcggaaggtggggcggaaacctggtgcgaccgtgaactgtattgcctgaaagcgtcggtaggcgcaccgccggatatcctcggcccgttggggcagaactggggattgccgccaatggacccgcatatcatcaccgcgcgtgcctatgaaccgtttatcgagctgttgcgtgccaatatgcaaaactgcggcgcattacgaattgaccatgtgatgtcgatgctgcgtttgtggtggataccgtatggcgagacggcggatcagggcgcgtatgtacactatccggtggatgatctgctctcgattctggcactcgaaagtaaacgtcatcgctgcatggtgattggtgaagatctcggtaccgtaccggtagagattgtcggtaagctgcgcagcagcggtgtgtactcctacaaagtgctctatttcgaaaacgaccacgagaagacattccgctcaccgaaagcgtacccagagcagtcgatggcggttgcggcgacacacgacctgcctacgctacgcggctactgggagagcggggatctaacgctgggcaaaacgctggggttgtatccggatgaagtggtactgcgcggtctgtatcaggatcgcgaactggcgaagcaaggactgctggatgctctgcataaatatggttgcctgccaaaacgtgccgggcataaggcatcgttgatgtcgatgacgccgacgctgaatcgtggtttgcaacgttatatcgctgacagtaacagtgccctgttagggctacagccagaagactggctggatatggcggaaccggtaaatattcccggcaccagttaccagtataaaaactggcggcgcaagctctctgcaacgcttgaggcgatgtttgccgatgatggcgtgaacaagttgctgaaggatttggacagacggcgcagagcggcagcgaagaagtag

SEQ ID NO: 260826 - DNA, 1260 bp, Klebsiella pneumoniae
  misc_feature (1245)..(1251): n is a, c, g, or t
atgccattagtcattgttgctatcggtgtaatcttgttgttgctcctgatgatccgcttcaaaatgaacggcttcatcgctctcgtcctcgtggcgcttgctgttggattaatgcaaggaatgccgctggataaagttattggctccatcaaagccggtgtcggcgggacgctcggtagccttgccctgatcatgggttttggcgcaatgctgggcaaaatgctggcagactgtggtggcgcacaacgtatcgccaccacgctgattgctaaatttggtaaaaaacacatccagtgggcggtggtactgaccggttttaccgttggttttgccctgttctatgaagtgggtttcgtgctgatgctgccgctggtgtttaccatcgcggcttccgcgaatattccactgctgtatgttggtgtaccaatggcggctgcactgtctgtgacccacggcttcctgccaccgcatccgggtccgactgcgattgccaccattttcaatgccgatatgggtaaaactctgctgtacggtactattctggcaatcccgaccgtgattctcgccggtccggtttacgctcgcgtgctgaaaggtatcgataagccgatcccggaaggtctgtacagcgcgaaaaccttcagcgaagaagagatgccgagttttggcgtaagcgtctggacctctctggtcccggttgtgctgatggcgatgcgtgcgattgccgaaatgatcctgccgaaaggtcacgctttcctgccggtagcggagttcctcggtgacccggtaatggctacgctgattgccgtactgattgcgatgttcacctttggtctgaaccgtggtcgttcaatggatcagattaacgacacgctggtttcttccatcaaaatcattgcgatgatgctgttgattatcggtggtggcggtgcgttcaagcaggtgctggtagacagcggcgtggacaaatacattgcttccatgatgcacgaaaccaacatttctccgctgctgatggcctggtcgattgctgccgtactgcgtatcgcgctgggttccgcaaccgttgcggcaatcactgcgggtggtatcgcggcaccgctgattgcaacgacgggtgttagcccggagctgatggttattgcggttggttccggtagtgtgattttctctcacgtgaacgatccgggcttctggctgttcaaagagtactttaacctgactatcggcgagaccatcaagtcnnnnnnnttaacctga

SEQ ID NO: 260827 - DNA, 684 bp, Klebsiella pneumoniae
atgctaacagtaccgggattatgctggctatgccgaatgccgctggcgttaggtcattgggggatttgttcggtctgctcacgcgccgcccgtagcgataaaacgttatgcccacaatgtggattacccgctacacacgcccatcttccctgcggccgctgcctgcaaaaaccgccgccctggcaaagactggtcacggttgccgactatgcgccgccgttaagtccgcttatccaccagcttaagttttcccggcgcagcgaaatcgccagcgccctggcacgtctgttactattggaagtcttacacgctcgtcgcaccactggcttgcaactgccggatcgcatcatcagcgttccgttatggcagcgacgtcactggcgtcggggatttaatcagagcgatttgctgtgtcagccgttatcacgcttgttgcactgccgatgggatagcgaagccgtcacacgaacacgggccactgcgacccagcattttctcagtgcccggctgcgcaagcgcaacctgaaaaatgcctttcgccttgaattgcctgtgcaaggtcgccatatggtgatagtggatgatgtcgtcaccaccggaagtaccgtcgcagagattgcgcagctgcttttacgcaatggtgcggcgactgtccaggtctggtgcctttgtcgaaccttgtag

SEQ ID NO: 260828 - DNA, 771 bp, Klebsiella pneumoniae
atgaataacatctggtggcagaccaaaggtcaggggaatgttcatcttgtgctgttgcacggatggggactgaatgccgaagtgtggcgttgcattgacgaggaacttagctcgcattttacgctgcaccttgttgacctgcccggcttcgggcgtagccggggatttggtgcgatgtcacttgctgatatggccgaagccgtgctgcgacaggcacctgataaagccatttggttaggctggagtctgggcgggctggtggcaagccagattgcgttaacccatcccgagcgtgttcaggcgctggtcaccgtggcgtcgtcaccttgttttagtgctcgtgacgagtggccggggataaaaccggacgtgctggcgggatttcagcagcaactcagtgatgattttcagcgtacagtggagcggttcctggcgttacaaaccatgggtactgaaacggcccgccaggatgcgcgggcgctgaagaaaaccgttctggcgttaccgatgccggaggttgacgtgcttaatggcgggctggaaatcctgaaaacggtcgatctccgtcagtcgctgcaaaacgtgtccatgccgtttttgcgattgtatggctatctcgacggtctggtgccgcgcaaagtggtgccgatgctggataaactttggcctcacagcgaatcatacatcttcgccaaagcggcccatgcgccgtttatttcgcatccggccgagttttgtcgcatgctggtggcgttgaagcagagggtgtag

SEQ ID NO: 260829 - DNA, 894 bp, Klebsiella pneumoniae
atgagcaaaaagcagagttccaccccacacgatgcgctgttcaaactctttttacgccaaccggagacggcacgcgattttcttgcgtttcatttaccggcacccattcacgcgctctgtgatatgaaaaccctcaagctggagtcgagcagctttattgatgacgatctgcgtgaaagctattccgacgtgctgtggtcggtgaaaacggaacaagggccaggatacatctattgtctgattgaacatcaaagcacctcaaacaaactgatcgcatttcgcatgatgcgctacgccattgccgcaatgcaaaatcacctggatgccggatacaaaaccttgccgatggtggtgccattgttgttttaccacggtattgaaagcccctatccctattcgctgtgttggcttgattgtttcgccgatcccaacctggcaaggcagctttatgcctctgcatttccgctgattgatgtcaccgtcatgcctgatgatgaaatcatgcagcaccgacgtatggcactgctggagttaattcaaaaacatattcgtcaacgcgacctgatggggctggtagagcaaatggcctgcttattaagtagtggatacgctaatgacagacaaatcaaagggctgtttaattacatactgcaaactggcgatgcggtacgttttaacgattttatcgacggtgtggccgaacgttcaccgaaacacaaggagagtttaatgactattgcggaaagattgcggcaggaggggtttcagaaaggtatacgtaccaacgccctaaatattgccaaaaccatgctggatgccggagtctctcttgaggacgttctgcgatttaccagcctgacggttgaagaccttgctgaaataaatcatcaataa

SEQ ID NO: 260830 - DNA, 237 bp, Klebsiella pneumoniae
atggcttcacttattcaggtacgtgatttgctggcgttacggggccgtatggaagcggcccagataagccaggcattgaatacgccgcagccaatgattaacgccatgctgcaacagctggaaagcatgggcaaagccgtgcggattcaggaagaacctgacggctgcctctctggcagttgtaaaagctgcccggaaggcaaagtctgtctgcgcgagtggtgggcgctgcgttaa

SEQ ID NO: 260831 - DNA, 1353 bp, Klebsiella pneumoniae
atgaggcgattgcgcttctcgccacgaagttcatttgcccgtacgttattgctcatcgtcaccttgctgttcgtcagcctggtgacgacttatctggtggtgctgaacttcgcgattttgccgagcctccagcagtttaataaagtcctcgcgtacgaagtgcgtatgttgatgaccgacaaactgcaactggaggacggtacgcagttggttgtgcctcccgctttccgtcgggagatctaccgtgagctggggatctctctctactccaacgaagctgctgaagaggcaggtctgcgttgggcacaacactatgaattcttaagccatcagatggcgcagcaactgggcggcccgacggaagtacgcgttgaggtcaacaaaagttcgcctgtcgtctggctgaaaacctggctgtcgcccaatatctgggtgcgcgtgccgctgaccgaaattcatcagggcgatttttctccgctgttccgctatacgctggcgattatgctattggcgataggcggggcgtggttgtttattcgtatccagaaccgaccgttggttgatctcgaacatgctgctttgcaggtcggtaaagggattataccgccaccgctgcgtgaatatggcgcttcggaggtgcgttccgttacccgcgcctttaaccatatggcggctggtgttaagcaactggcggatgatcgcacgctgctgatggcgggggtaagtcatgatctgcgcacgccgctgacgcgcattcgtctggctaccgagatgatgagcgaacaggatggctacctggcagaatcgatcaataaagatatcgaagagtgcaacgccatcattgagcagtttatcgactacctgcgcaccgggcaggagatgccgatggaaatggcggatctcaacgcagtgctcggtgaggtgattgccgccgaaagtggctatgagcgggaaattgaaaccgcgctttaccccggcagcattgaggtgaaaatgcacccgctgtcgatcaaacgtgcggtggcgaatatggtggtcaacgccgcccgttacggcaatggctggatcaaagtcagcagcggaacggagccgaatcgcgcctggttccaggtggaagatgacggtccgggaattgcgccggaacaacgtaagcacctgttccagccgtttgttcgcggcgacagtgcgcgcaccattagcggcacgggattagggctggcgattgtgcagcgtatcgtggataaccataacgggatgctggagcttggcaccagcgaacggggcgggctttccattcgcgcctggctgcctgtgccggtaacgcgggcgcagggtgcgacaaaagaagggtaa

SEQ ID NO: 260832 - DNA, 297 bp, Klebsiella pneumoniae
atgaaagacgaattatttgctgatcttcttgccagcgcagaagaaatggtacgcatcgaaaagggtgaagaagcgcctgaaccagagcacgtccatacttttagcgaaatcgatgtaaaagcgatccgtgaagcaacgggtttacgtcagcaagattttgctgtcgccgtaggggtaagttatgacctggtcaaaagctgggaaaccaaacgccgtcaacctaccggagcaccccgaaaattgctcctgcttttgcaagcgaatcctttcattatcaatcaattgaaaacaatctaa

SEQ ID NO: 260833 - DNA, 318 bp, Klebsiella pneumoniae
atgttcacgtttattgaactacaaggatttagcaaacgccgccagttattgttacctgatgatgagttccgggcttttcaggaactactcattcaagatcccactgccggtgacattatcgcaggcacaggcagttttagaaaaattcgctggaaccgttctggaatggggaaacggggtggcattcggataatttattacaacgtaacacgcaatggccgaatttatctggcgttgatttatcctaaaaatgaacaggatgatttaacagaagaacaaagaaaggcattgaaactattgtccgagaagctgctttaa

SEQ ID NO: 260834 - DNA, 972 bp, Klebsiella pneumoniae
atgatgaactacctgctgccgctgaaaggtatcgcttctatgcactgctccgccaacgttggcgagaaaggcgatgttgcggtgttcttcggcctttccggcaccggtaaaaccaccctttccaccgacccaaaacgccgcctgattggcgatgacgagcacggctgggacgatgacggcgtatttaacttcgaaggcggctgctacgcaaaaactatcaagctgtcgaaagaagcggaacctgaaatctacaacgctatccgtcgtgatgcgctgctggaaaacgtcaccgtgcgtgaagatggcactatcgactttgatgatggttcaaaaaccgagaacacccgcgtttcttatccgatctatcacatcgaaaacatcgttaagccggtttccaaagcgggccacgcaactaaagttatcttcctgaccgcagacgcctttggtgtgctgccgccggtttctcgtctgactgccgatcaaacccagtaccacttcctctctggcttcaccgccaaactggctggtacagagcgcggcatcaccgaaccgacgccaactttctccgcctgcttcggcgcggcattcctgtcgctgcacccgactcagtacgcagaagtgctggtgaaacgtatgcaggcggcaggcgcgcaggcgtatctggttaacaccggctggaacggcactggcaaacgtatctccattaaagatacccgcgccattatcgacgccatcctcaacggttcgctggataacgcagaaaccttcactctgccgatgtttaacctggcgatcccaacagaactgccgggcgtagacacgaagattctcgatccgcgtaacacctacgcctctccggaacagtggcaggaaaaagctgaaacgctggcgaaactgtttatcgacaacttcgataaatacaccgacacccctgcgggtgccgcgctggtagcggctggtccgaagctgtaa

SEQ ID NO: 260835 - DNA, 468 bp, Klebsiella pneumoniae
atgcgctcggtcaggttaaacgccacgaagttttcggaattcagaccctgttctttccactgcgggttagtgcacttcgcgccgttcataacgataaagtctggtttgaaacctgccagctcttcatcgctcgggcgaataaacatgtttttgacaaaatgcgcctgccaggccacttcggtgatgaaacggacggaaagacgagtatccgggttcgcaccacagaaagcatcgacaacgaacagacgtttgccggaaagctgtttggtcaccaggcttttaagatgctgccaggtttccggagagagaggtttgttgtcgttcttacctttgcctttgtctgcccaccagaaagtatcgcgagtggtatcgtcacggacgatatacttatcttttggtgaacgaccggtgaagatcccggtatcgacggcaacggcacccagattagttaacaccccgcgctcataa

SEQ ID NO: 260836 - DNA, 1725 bp, Klebsiella pneumoniae
gtggataacgttgaactttcacccgcaacacgctgggggatgattgctaccggattacttcagggtctggtttgctacctactgatcgcctggcttgccggaaaaaatctcagttggattgtttatggcgtgcctgcgaccgtcgcgttttcatccgttttactcttctccgtgatctcctttaaacagaagcgcctttggggatggctggcgctggtgtttattgccacgctagggatgagcggttggctaaagtggcaaattgatggcatgaacccctggagagcagaaaaggcgctttgggattttggctgctatctgctgctgatggcaatgttgttgctaccgtggatacaacaaagccttcgcatccgcaatgacagtagccgctatggctatttttaccagtcagtatggcataacgtacttatattactggtgatttttctcgccaatggcctgacgtggctggtgcttttactgtggggtgagttgtttaaacttgttggcatcacgtttttcaaaacgctcttttttgcaaccgactggtttatttatctcacgttaggtctggttaccgcactggcggtgatcctcgcgcgtacacagtcacgtttaatcgactctattcaaaagttgttcacgttaatcgccacggggttgctgccgttagtatcattgctaaccctgatgtttatcatcaccctgccgtttacgggcctgagcgcgatttctcgccacatttccgccgccgggttgctgttgacgctggcctttttgcaattgatcttaatggctattgtccgcgatccgcaaaaatcgtcacttccctggacggggccgttgcgttgcctgattaaaaccgctctgctggctgctccgctgtatgtgttcgtcgccgcctgggcgttatggctgcgggtcgctcagtacggctggactgtcgaccgcttgcagggcgcgctggcggtgctggtgttactggtatggtcgctggggtattttgtcagtatcgtctggcgtaaagggcaaaacccccttgttcttcagggcaaagtgaaccttgcggtttcgttattggtgttggtaatactggtgcttcttaattctccggtgctggacagtatgcgcattagcgtgaacagtcatatggcgcgttatcagagcggcaaaaacacgccagaccaggtaagtctctatatgctcgaacagagcggtcgctatggacgtgcggcgcttgagtcgctgaaaagcgatgccgggtttatgaaagacccgaaacgcgcgcgggatctgttgatggcgttagatggagagcaacatcttcagcaacagatatcggaaaaagtattagccgaaaatgtgttaattgcccctggttctgttaaaccggatgcgacattctggtcggccttaatccaggatcgctataacgtgatgacctgcattgaaaaagacgcctgcgtcctggtcgagcaagatctgaatagtgatggtcaggcggagcggatcctgtttgcttttaatgatgacagagtcattgtctatggctttgactcagacagaaaagaatgggacgcgcttgatatgagtttacttccgaacgaaataacgaaagaaaaattactcacagctgcgaaggatggaaaactggggacgaggccgaaagcgtggcgcgatctgacggtagatggtgaaacgctggaaataaacttaagtaagtga

SEQ ID NO: 260837 - DNA, 879 bp, Klebsiella pneumoniae
atgccgcaacatgaccaattacatcgctatctgtttgaaaactttgccgtgcgcggcgaactggtaaccgtttcggaaaccctgcaacagatccttgagaatcacgattatccgcagcccgttaaaaacgtgctggcagaactgctggttgcgaccagcctgttaaccgctacgctgaagtttgatggtgatatcaccgtacagctgcaaggcgacggtccgatgaatctggcggttattaacggtaacaacaaccagcagatgcgcggtgtagcgcgcgtgcagggagaaattccagaaaatgccgacctgaaaacgctggtcggcaatggttacgtggtgatcaccatcaccccgagcgaaggtgaacgctatcagggcgtggttggtctggaaggtgataccctggcggcctgcctggaagattactttatgcgttctgaacagctgccgacgcgcctgtttattcgcaccggcgacgtagacggcaaaccggctgcaggcggaatgttgttgcaggtaatgcctgcgcaaaatgcccagcaggacgactttgaccacctggcgacgctaaccgaaaccatcaaaaccgaagaattgttgaccttaccggcaaacgaagtgttgtggcgtttgtatcacgaagaagaggtgacggtttacgatccgcaggatgtggagttcaaatgcacctgttcgcgtgaacgttgcgccgacgcgctaaaaacgctgccggatgaagaagtcgatagtatcctggcggaagatggcgaaattgacatgcattgcgattactgcggtaaccactatctgttcaatgcgatggatattgctgaaatccgcaataacgcctctccggcagatccgcaagttcattaa

SEQ ID NO: 260838 - DNA, 402 bp, Klebsiella pneumoniae
atgaaagaaaaacctgctgttgaggttcgactggataaatggctatgggctgcccgtttttataaaacccgcgcgctggcccgtgaaatgattgaaggcggtaaggtgcattacaacgggcagcgcagcaagccgagcaaaatcgtcgagctgaatgccacgctcactctgcgccagggaaatgacgaacgcacggtgattgtaaaggcgattactgaacagcgtcgccccgccagcgaggcagccttgctgtatgaagagactgcggaaagtgtagagaaacgcgaaaaaatggcgctggcacgtaaacttaatgccttaaccatgccgcacccggaccgacgcccggacaaaaaagagcgccgcgacctgttacgatttaaacacggcgacagtgaataa

SEQ ID NO: 260839 - DNA, 669 bp, Klebsiella pneumoniae
atgcatatcaacattgcctggcaggacgtagataccgttctgctggatatggacggcacgttgctcgacctcgccttcgataattatttctggcaaaagctggtgcctgaaacatggggcgcgaaaaacggggttacgccacaggaagcgatggaatatatgcgccagcaatatcacgacgtacagcatacgctaaactggtactgtcttgattactggagtgagcaactgggtctggatatctgtgcgatgaccaccgagatgggaccgcgtgccgtactgcgtgaagataccattccgtttcttgaggcactgaaagccagcggtaagcagcgaattttgctcaccaatgcgcatccgcacaacctggcggtaaaacttgagcataccggtctggacgcacaccttgatttattactttccacccacacatttggttatccgaaagaggatcagcggttatggcatgcggtggccgaagctacgggtctgaaagctgaaagaacgctgtttattgatgacagcgaagcgattctcgatgctgccgcgcaatttggtattcgttactgcctcggcgtgactaatcctgactccgggattgccgagaaacagtatcaacgccatccgtcactgaatgactaccgccgcctgatcccctcgctaatgtga

SEQ ID NO: 260840 - DNA, 2136 bp, Klebsiella pneumoniae
atgagcaccattgtgatttttttagctgctttgctggcctgctcactacttgcgggatggctgataaaagtgcgatccagacggcgtcagctgccctggaccaacgccttcgcggatgcgcaaacgcgtaaactcacacctgaagaacatagcgccgttgaaaattatcttgagagcctgacgcaggtattacaggtgcctggcccaacgggagccagcgcggcaccgatctctctggcgctgaatgccgaaagcaacaacgtcatgatgctgacacacgctatcacgcgttacggcatctctaccgacgatccgaataaatggcgttactacctcgattcggtagaagtccacctgccccccttctgggaacagtacatcaacgatgagaataccgttgaactgattcataccgattcgctgccgctggttatttcactcaacggtcatacgctgcaggagtacatgcaggaaactcgcggctatgccttgcaacctgttccgtcaacacaggcgtcgattcgcggggaagagagtgagcaaatcgagctactcaatattcgcaaagaaacgcacgaagagtatgcgctaagtcgtccgcgcgggctgcgtgaagcgttgctgattgtcgcctcattcctgatgttctttttctgcctgattaccccggatgtatttgttccgtggctggcaggcggcgcgttactgctgctgggcgcaggtctgtgggggctattcgcgcccccggcaaaatcctccctgcgggaaattcattgtctgcgcggtacaccccgtcgttggggattgtttggcgaaaacgatcaggaacagatcaacaatatttcactcggtattatcgacctggtctaccccgcacactggcagccatacattgctcaggatctcggtcaacaaaccgatatcgatatctatctcgaccgccacgtagtgcgtcaggggcgatatctttctctccatgatgaagtaaaaaactttccgttacagcactggctgcgcagtacgattatcgctgcgggctcgctactggtgctgtttatgctgttattctggatcccgctggatatgccgctgaaattcaccctctcgtggatgaaaggcgcgcagaccattgaagccaccagcgtgaaacaactggctgacgctggcgtgcgggttggcgatacattgcgtattagcggtacgggaatgtgtaatattcgcacttccggtacctggagcgcgaaaaccaactcaccttttttaccgtttgactgctcgcagatcatctggaatgacgcccgctcattgccattaccagaatctgaattggtcaacaaagcgacggcattgaccgaagcagttaatcgccagctgcaccctaaaccggaagatgaatctcgcgtcagcgcctcattacgttcagcaattcaaaaatccggcatggtattgcttgatgattttggcgacatagtactgaagacagcggatctgtgttctgccaaagatgactgtgtgcgactgaaaaatgcgctggtcaatctcggcaacagtaaagactgggacgcgctggtaaaacgcgccaacgccgggaagctcgatggcgtgaatgtgttattacgcccggtgagtgcggaatcgctggataacctggtggcaacctccaccgcgccgtttatcacgcatgaaacggcgcgagcggcacaatcactaaacagtccggcccccggcggattcctgattgtcagcgacgaaggcagcgattttgttgatcagccctggccttcggcatcactttacgactacccgccgcaagaacagtggaacgctttccagaaactggcacaaatgctgatgcatacgccgtttaacgccgaaggtatcgtcacaaaaatcttcactgacgccaatggtacgcagcatataggccttcatccgatcccggatcgttccggcctgtggcgctatctcagcaccacgctgctgctactgacgatgctgggtagcgccatttataatggcgtacaggcctggcgtcgttaccagcgtcatcgtactcgcatgatgaagattcaggcctattatgaaagctgcctgaacccgcaactgatcaccccttcagaaagccttatcgaataa

SEQ ID NO: 260841 - DNA, 561 bp, Klebsiella pneumoniae
atgagcaaatcattacaaaaacccaccattctgaatgttgaaactgtagcccgttcccgactgtttaccgtcgaaagcgtggatctggagttcagcaatggcgtgcggcgtgtttatgaacgaatgcgtccaaccaaccgggaagcagtgatgattgtgccgattgtggacgatcacctgatcctgatccgcgaatacgcagtgggaactgaatcctacgaattaggtttttcgaaaggattaattgatccgggtgaaagcgtcttcgaagccgcgaaccgcgagctaaaagaagaggtgggatttggtgcgaacgatctgacttttttgaagaagctcagcatggcaccgtcttacttttccagcaaaatgaatatcgtggtagcgcaagatctctacccggaatcgctggaaggcgatgagccagagccgctaccacaggtgcgctggccgctggcgcatatgatggatttgctggaagaccctgacttcaacgaagcgcgtaatgtcagcgcgctgttcctcgtgcgcgaatggttgaaggggcaggggcggttgtaa

SEQ ID NO: 260842 - DNA, 2553 bp, Klebsiella pneumoniae
gtgaagttcgtaaagtattttttgatccttgcagtctgttgcattctgctgggagcaggctcgatttatggcctataccgctacatcgagccacaactgccggatgtggcgacattaaaagatgttcgcctgcaaattccgatgcagatttacagcgccgatggcgagctgatcgctcaatacggtgagaaacgtcgtattccggttacgttggatcaaatcccgccggagatggtgaaagcctttatcgcgacggaagacagccgcttctacgagcatcacggcgttgacccggtggggatcttccgtgcggcaagcgtggcgctgttctccggccacgcgtcacaaggggcgagtaccattacccagcagctggcgagaaacttcttcctcagtccagaacgcacgctgatgcgtaagattaaggaagtcttcctcgcgattcgcattgaacagttgctgacgaaagacgagatcctcgagctttatctgaacaagatttacctcggttaccgcgcctatggtgtcggtgctgcggcacaagtctatttcggtaaaacggtcgaccaactgacgctgaacgaaatggcggtgatagccgggctgccgaaagcgccttccacctttaatccgctctactcaatggatcgtgccgtcgcgcggcgtaacgtcgtgctatcgcggatgctggatgaagggtatatcacccaacaacagttcgatcagacacgcactgaggcgattaacgctaactatcacgcgccggagattgctttctctgcaccgtacctgagcgaaatggtgcgccaggagatgtataaccgttatggcgaaagtgcctatgaagacggttatcgcatttacaccaccatcacccgcaaagtacagcaggccgcacagcaggcagtacgtaataacgtgctggactacgacatgcgccacggctatcgcggcccggcaaatgtgctgtggaaagtgggcgaatcggcgtgggataacaacaagattaccgatacgctgaaggcgctgccgacctatggtccgctgctgcctgccgcagtcaccagcgccaatcctcaggaagcgacggcgatgctggcggacgggtcgaccgtcgcattgagtatggaaggcgttcgctgggcgcgtccttaccgttcggatactcagcagggaccgacgccgcgtaaagtgaccgatgttctgcaaacgggtcagcaaatctgggttcgtcaggttggcgatgcatggtggctggcacaagtgccggaagtgaactcggcactggtgtcgatcaatccgcaaaacggtgccgttatggcgctggtcggtggctttgatttcaatcagagcaagtttaaccgcgccacccaggcactgcgtcaggtaggttccaacatcaaaccgttcctctacaccgcggcgatggataaaggtctgacgctggcaagtatgttgaacgatgtgccaatttcccgctgggatgcaggtgccggttctgactggcagccgaagaactcaccaccgcagtatgccggtccaattcgcttacgtcagggactgggccagtcgaaaaacgtggtgatggtacgcgcaatgcgggcgatgggcgtcgactacgctgccgaatatctgcaacgcttcggcttcccggcgcaaaacattgtccacaccgaatcgctggcgctgggttcagcgtcattcaccccaatgcaggtggcgcgcggctacgcggtcatggcgaacggcggcttcctggtggacccgtggtttatcagcaaaattgaaaacgatcagggcggcgtgattttcgaagcgaaaccgaaagtagcctgcccggaatgcgatattccggtaatttacggtgatacgcagaaatcgaacgtgctggaaaataacgatgttgaagatgtcgctatctcccgcgagcagcagaatgtttctgtgccaatgccgcagctggagcaggcaaatcaggcgttagtggcgaagactggcgcgcaggagtacgcaccgcacgtcatcaacactccgctggcattcctgattaagagtgctttgaacaccaatatctttggtgagccaggctggcagggtaccggctggcgtgcaggtcgtgatttgcagcgtcgcgatatcggcgggaaaaccggtaccactaacagttcgaaagatgcgtggttttcgggttacggtccgggcgttgtgacctcggtctggattggctttgatgatcaccgtcgtaatctcggtcatacaacggcttccggagcgattaaagatcagatctcaggttacgaaggcggtgccaagagtgcccagcctgcatgggacgcttatatgaaagccgttcttgaaggtgtgccggagcagccgctgacgccgccgccgggtattgtgacggtgaatatcgatcgcagcaccgggcagttagctaatggtggcaacagccgcgaagagtatttcatcgaaggtacgcagccgacacaacaggcggtgcacgaggtgggaacgaccattatcgataatggcgaggcacaggaattgttctga

SEQ ID NO: 260843 - DNA, 780 bp, Klebsiella pneumoniae
atggcatttaagatctggcaaattggtttgcatttacaacagcaagaagcggtagcggttgctatcgtgcggggcgcaaaagaatgctttttgcaacgctggtggcggttgccgctggcgcacgacattatcaaagatgggcggattgttgatgcgcagcggctggctaacacgttgttaccgtggagtcgcgaactgccgcagcgtcatcacattatgttggcgtttcccgccagtcgcacattacagcggtcatttccacgcccgtcgatgtcccttggtgagcgggagcaaacggcctggctgtccgggacgatggcccgcgagctggatatggatccggactccctgcgcttcgattacagcgaagactcactcagtcccgcctataacgtgactgccgcgcaaagcaaagagttggcaacgctgcttactctggcagaaaggttgcgtgttcatgttagcgcgatcaccccggatgccagtgcattacagcgattcctgccttttttaccttctcatcagcaatgtctggcctggcgtgataacgaacagtggctgtgggcgacgcgctatagctgggggcgcaaactggcggtggggataactagcgcgaaggagctggcggcagcgttatccgttgatcccgaaagcgtcgcgatatgtggcgaaggcggatttgacccctgggaggcggtttctgttcgtcagccgccgctaccgccgccaggtggagactttgccatcgcgctggggctggcgcttgggaaggtgtactga

SEQ ID NO: 260844 - DNA, 540 bp, Klebsiella pneumoniae
atgaacccgccaattaattttttgccctggcgacagcaacgccggaccgcttttcttcgtttctggttgctgatgttcgttgcgcctctgctgctggctgtcgggataacgctaatactgcgtctgacaagcaacgccgaagcacgcgtagacaccgttttgcttcaggcggaacaacaactcgcccgcagcttacagataacgaaaccacgtttgctggaacgccagcagttacgcgaacagcgtttgcaaaggcagcgccagcgacaatttacccgcgactggcaatctgcgctggaagcactggcggcgcttttacccgaacatgcctggctgacaacgataagctggcagcagggaacgctggagatcaaggggctgacaacaagcattaccgcgttaaactcgctggaaacgtcactccgccaggatgcttcttttcatctcaatcagcggggggccacgcagcaggatgcgcagggacgctggcaatttgagtatcagttaacaaggaaggttagcgatggacatgctctttga

SEQ ID NO: 260845 - DNA, 441 bp, Klebsiella pneumoniae
atggacatgctctttgactggtggttcgccacatcaccccgcctccgccagctttgctgggcattctggttgatgatgttagttacgctcatttttctgtcatcgacacaccaggaagagagcgacgcattaattcgactacgggcgagtcatcaccagcagtgggctgcactgtatcgcctggtagacgccactcccttcagcgaagaaaaaacgctgcccttttcgccactggattttcagttatccggcgcgcaactggtttcctggcatccatccgcgcagggaggtgagttggcgttgaaaacgctgtgggaagcagtgccgtcggcatttacacggctggcagagcgcaacgtcagcgtgagccgtttttcgttaagcgtggaaggtgatgatcttttgttcacgctacaactggagacgccgcatgaggggtaa

SEQ ID NO: 260846 - DNA, 1239 bp, Klebsiella pneumoniae
atgaagcaatggatagccgcactactgttgatgctgatacccggcgtacaggcggcaaagccgcaaaaagtgacgctgatggtggatgacgttccggtagctcaggtgttgcaggcgctggctgaacaggagaagttgaacctggtggtgtcgccagacgtcagcggtacggtgtcgttacatctaacagatgttccctggaagcaagcactacaaactgtagtgaaaagcgccggactgataacgcgtcaggagggcaacattctctcggtgcattccgttgcctggcagaatgacaatatcgcccgtcaggaggcggagcaggcgcgggcgcaggcaaatctgccgctggaaaatcgcagtataacgctgcaatacgccgacgcgggagaactggcgaaagcgggggagaagctactgagtgccaaagggagtatgaccgtcgataaacgcaccaatcgccttttgctgcgagataacaaaacggcgttaagcgcgcttgaacagtgggtagcgcaaatggatctgccggtcgggcaggttgagctgtcggcgcatattgtcaccattaatgaaaaaagtttgcgtgagttaggcgtgaaatggacgttggctgatgcgcaacaagctggtggcgttgggcaagtcaccacgcttggcagcgacctctccgtagcgacggcgacaacgcatgtcggttttaacattggacgcatcaacggacgtttactggatcttgagctttccgcgctcgaacaaaaacagcagctggatattatcgccagtccgcgtctgctggcctctcatcttcagcctgccagcattaaacaggggagcgaaattccatatcaggtttccagcggggaaagtggcgcgacgtcggtggaatttaaagaggccgtcctggggatggaagttacgcccacggtgttacaaaaaggtcgcatccggctgaaattacacatcagccagaacgttccggggcaggtgctacagcaggccgatggcgaagtgttggcgattgataagcaggagatcgaaacgcaggtcgaggtcaaaagcggagaaacgttggcgctgggcggcatttttacccgtaaaaataaatcgggtcaggatagcgtaccgttgcttggcgacattccctggttcgggcaattatttcgtcatgacggaaaagaagatgaacgacgcgagttagtggtgtttatcacgccacgactggtttccagtgagtaa

SEQ ID NO: 260847 - DNA, 1089 bp, Klebsiella pneumoniae
atggagaggattgtcgttactctcggggaacgtagttacccaattaccatcgcatctggtttgtttaatgaaccagcttcattcttaccgctgaaatcgggcgagcaggtcatgttggttaccaacgaaaccctggctcctctgtatctcgataaggtccgcggcgtacttgaacaggcgggtgttaacgtcgatagcgttatcctccctgacggcgagcagtataaaagcctggctgtactcgataccgtctttacggcgttgttacaaaaaccgcatggtcgcgatactacgctggtggcgcttggcggcggcgtagtgggcgatctgaccggctttgcggcggcgagttatcagcgcggtgtacgtttcattcaagtcccgacgacgttactgtcgcaggtcgattcctccgttggcggcaaaactgcggtcaaccatcccctcggtaaaaacatgattggcgcgttctaccagcctgcttcagtggtggtggatctcgactgtctgaaaacgcttcccccgcgtgagttagcgtcggggctggcagaagtcatcaaatacggcattattcttgacggtgcgtttttcaactggctggaagagaatctggatgcgttgttgcgtctggacggtccggcaatggcgtactgtattcgccgttgttgtgaactgaaggcagaagttgtcgccgccgacgagcgcgaaaccgggttacgtgctttactgaatctgggacatacctttggtcatgccattgaagctgaaatggggtatggcaattggttacacggtgaagcggttgctgcgggtatggtgatggcggcgcggacgtcggaacgtctcgggcagtttagttctgccgaaacgcagcgtattataaccctgctcacgcgggctgggttaccggtcaatgggccgcgcgaaatgtccgcgcaggcgtatttaccgcatatgctgcgtgacaagaaagtccttgcgggagagatgcgcttaattcttccgttggcaattggtaagagtgaagttcgcagcggcgtttcgcacgagcttgttcttaacgccattgccgattgtcaatcagcgtaa

SEQ ID NO: 260848 - DNA, 1287 bp, Klebsiella pneumoniae
atggatgaattcaaaccagaagacgagctgaaacccgatcccagcgatcgtcgtactggtcgttctcgtcaatcttctgaacgttctgagcgtactgaacgtggcgaaccgcagatcaattttgatgatattgaacttgatgacactgacgatcgccgtccgactcgtgcgcaaaaagagcgcaatgaggaaccggaactcgaagaagaaattgacgaatccgaagatgaaaccgtggatgaagagcgcgtagagcgtcgtccgcgtaagcgcaaaaaagtagccagtaaacccgcttctcgtcagtatatgatgatgggcgtcggcattctggttctcctgctgttgatcatcggtatcggttctgcgctaaaagccccctcgacctcttccagcgatcaaaccgcgtctggcgagaagagtattgatcttgctggcaatgcgaccgatcaggcgaatggcgtgcagccagcgccgggaaccacgtctgcggaaaatactcagcaggatgtttctctgccgccgatctcttctacgccgactcaagggcaaaccccggtggcaacggatggtcaacaacgtgttgaagtgcagggtgacctgaacaatgcgctgacccagccacaaaatcagcaacagttgaataatgtggcggtcaattccacgttgccgactgaacccgcgacggtcgcgcctgttcgcaatggcaatgcatcgcgtgacacggcgaaaacgcaaaccgctgaacgtccggccactacgcgcccagctcgtcagcaggcggtgattgaaccgaaaaaaccgcaagcaaccgtgaaaacggagccgaagccggtagcacagacgccgaagcgtactgaaccagctgctcctgtggcgagcacgaaggcaccggctgcgacctctacgccagcaccaaaagagaccgcaactacggctccagtacagacggcatccccggcgcaaaccacggcaacaccagccgctggagggaagaccgcaggtaatgttggttcgttgaaatcggcaccgtccagccattacactctgcagctgagcagttcctctaactacgacaacctgaacggttgggcgaagaaagagaatctgaaaaactacgttgtctatgaaacgacgcgtaatggtcagccgtggtatgtcctggtttctggcgtgtacgcctcgaaagaagaggcgaaaaaagcggtatctacattgccagccgatgtccaggccaaaaacccgtgggcgaaaccgctgcgtcaggtacaggccgatctgaagtaa

SEQ ID NO: 260849 - DNA, 837 bp, Klebsiella pneumoniae
atgaagaaaaatcgcgcttttttgaagtgggcagggggcaagtatcccctgcttgatgatattaaacggcatttgcccaagggcgaatgtctggttgagccttttgtaggtgccgggtcggtgtttctcaacaccgacttttctcgttatatccttgccgatatcaatagcgacctgatcagtctctataacattgtgaagatgcgtactgatgagtacgtacaggccgcacgcgagctgtttgttcccgaaacaaattgcgccgaggtttactatcagttccgcgaagagttcaacaaaagccaggatccgttccgtcgggcggtactgtttttatatttgaaccgctacggttacaacggcctgtgtcgttacaatctgcgcggtgagtttaacgtgccgtttggccgctacaaaaaaccctatttcccggaagcagagttgtatcacttcgctgaaaaagcgcagaatgcctttttctactgtgagtcttacgccgatagcatggcgcgcgcagatgatgcatccgtcgtctattgcgatccgccttatgcgccgctgtctgcgaccgccaactttacggcgtatcacacaaacagttttacgcttgaacaacaagcgcatctggcggagatcgctgaaggtctggttgatcgccatattccagtgctgatctccaatcacgatacgatgttaacgcgtgagtggtatcagcgcgcaaaattgcatgtcgtcaaagttcgacgcagtataagcagcaacggcggcacacgtaaaaaggtggacgaactgctggctttgtacaaaccaggagtcgtttcacccgcgaaaaaataa

SEQ ID NO: 260850 - DNA, 759 bp, Klebsiella pneumoniae
atgaataagtttgaagatattcgcggcgtcgcttttgatctcgatggtacgctggtggacagtgctcctggcttggctaccgcagtagatatggcgctgtatgcgctggagttgcccgtcgcaggtgaagaacgcgttataacctggattggtaacggcgcagatgttctgatggagcgcgcattgacctgggcgcgtcaggaacgtgcgactctgcgtaaaacaatgggtaaaccgcccgttgatgacgacattccggcagaagaacaagtacgtattctgcgtaaactattcgatcgctactatggcgaggttgccgaagaggggacgtttttgttcccgcacgttgccgatacgctgggcgcattgcaggctaaaggcctgccgttgggcctggtcaccaacaaaccgacgccgttcgtcgcgccgctgctggaagccttagatatcgctaaatacttcagcgtggtgattggtggtgatgatgtgcaaaacaaaaaaccgcatccggacccgctgttactggtggctgagcggatgggaattaccccacaacagatgctgtttgttggcgactcacgcaatgatattcaggcagcaaaagcggcaggttgcccatcagttggcttaacctacggatataactacggcgaggctatcgatctcagccagcctgatgtaatttatcagtctataaatgaccttctgcccgcattagggcttccgcatagcgaaaatcaggaatcgaaaaatgactaa

SEQ ID NO: 260851 - DNA, 906 bp, Klebsiella pneumoniae
atgcgtcgaacgtttatcaaaaaagaaggcgtcgtcatcacgacactggcccgttatttgttgggtgaaaagtgcggtaatcgactgaaaaccatagatgaactggcaactgaatgccgttcatccgttggcctgacgcaggccgcgttgaaaacgctggaatcaagcggagcgatacggatagaacgccgtgggcgtaatggcagttatctggtggaaatggataacaaagcgctgctgagtcatgtggatatcaacaatgtggtgtgcgcgatgcccttgccctatacccgtttgtacgaaggcctggcgagcggattgaaagctcagtttgatggtattcctttttactatgcgcacatgcgcggcgcggatattcgcgtggagtgtttacttaacggcgtgtatgacatggcggttgtttcccgactggcggcggaaagttatctcacgcaaaaagggttatgcctcgcgctggagctggggccgcacacctacgttggcgagcaccagttgatttgccgtaaaggcgagtccgcaaacgtgaagcgcgtggggctggataaccgttcggcggatcagaaaatcatgaccgatgtcttttttggcgatagtgatgtggaacgtgtcgatctctcttatcacgagagtttacaacgcattgttaaaggcgatgtcgatgcggttatctggaacgtggtggcggaaaacgaactgaccatgctgggattagaagcgacgccgctcacagacgatccgcgatttttacaggccaccgaagccgtggtcctgacgcgtgccgatgattacccgatgcaacaactgctgcgtgcagttgttgataaacacgccctgctcgcccatcaacaacgagtggtgagtggggaacaggaaccgagttattaa

SEQ ID NO: 260852 - DNA, 363 bp, Klebsiella pneumoniae
atggaaaccagactcaacctgctttgcgatgcaggcgttattgataaggacatctgcaaaggcatgatgcaggtcgtcaacgtactggaaacagagtgccatctgccggtgcgtagtgagcaaggaacgatggcgatgacacatatggcgagcgcactgatgcgcagtcgccgtggtgaagaaatagagccgctggacgccgaattgctggcagaactggcgcaatccagccactggcaagccgttgtgcaattgcatcaggtgttgttgaaggaatttacactggaagttaacccgtgtgaagaaggctatttgctggccaacctttatggattatggatggctgctaacgaagaggtttga

SEQ ID NO: 260853 - DNA, 1164 bp, Klebsiella pneumoniae
atgtttgtagaagcattgaaacgccagaacccggcgctaatttccgccgcactaagcttgtggcaaaagggcaagatcgccccggacagctgggtgatcgacgtggatcagatactgaaaaacggtaagcggctgattgagacggcgcggctttacggcattgaactgtatctgatgactaagcagtttggtcgtaatccgtggctggcggaaaaactgctgccattaggctacagcggcattgtggcggtggattacaaagaggcgcgagtcatgcgccgcgccggtttgccggtggcgcatcaggggcatctggtacaaatcccttgtcatcaggttgctgacgccgttgcacagggcaccgacgtcatcaccgtgtttactctcgacaaagcgcgggaagtttctgcggcagcggtgaaggccggacgtgtgcagtctgtgctgctcaaagtttatagcgacgatgattttctttatccggggcaggagagcggttttgtacagcattcgctgcacgaggtggttgctgaaattaagaaactgtcggggctgcatttagccggattaacccatttcccttgcctgctttgggatgaggctgccgggaaagttttgccgacaccgaatcttcacacgctggtacaggcacgggatcaactggcgaaatctggtattgcgattgagcaactgaacgcgccttcagcgaccagctgcacttcgctgccattgctggcggaatacggtgtgactcatgccgaacccggtcatgcgctgacggggacgattccggcaaaccagcagggcgaccagcctgaacgtatcgcgatgctctggttaagtgaaatctcccatcattttcgtggcgacagctactgctacggcggcggttattaccgtcgtggtcacgcgcaacatgcgctggtgtttacgccagaaaatcaaaagattactgaaaccaatctcaaaactgtggatgacagcagtatcgactacaccctgccgctggcaggcgagtttccggtaagcagtgcagtagtgctctgttttcgcacgcagatttttgtcacccgtagcgatgtggtgctggtgtctggtattcatcgtggcgaaccggaaatcgtcggtcgttatgacagcctcggcaaccctctggaggcgtaa

SEQ ID NO: 260854 - DNA, 1227 bp, Klebsiella pneumoniae
atggcgcgatttgtggtgttagtgattgatagctttggcgtaggggcaatgaaagatgtcacgttggtgcgtccgcaggatgccggggcgaatacctgtggtcacatcctgagccagttgccgcatttgcagctatcagcgctggagaagctggggctaatcaacgcattgggttatgcaccaggtgatatgcaaccgtcagattccgcaacctggggggtggcagaactgcaacatgaaggtggcgatacctttatggggcatcaggaaattttaggcacgcgtccgttaccaccgctgcggatgccttttcgcgatgtgattgaccgtgttgagcaggcattagtttccgctggctggcaggttgcgcgccgtggcgaagagttacagtttctgtgggtcaatcaggcggttgcgattggcgataatctcgaggcggatttaggccaggtctataacatcaccgccaatctctctgtgatctcctttgacgacgcaatcaaaattggtcgtatcgtgcgtgagcaggtacaggtcggtcgggtcattacatttggtggcctgttagcggacagccagcgcattctcgatgccgcagaaagtaaagaagggcgatttattggtatcaacgcgccgcgttctggcgcttatgacaacggcttccaggtcgtgcatatgggctacggcgtcgatgagaaagtacaagtgccgcaaaaactgtatgaagcgggcgtgccaaccgtgctggtgggtaaggtggcggatatcgtcagcaatccttatggcgtgagctggcaaaacctggtggatagccagcggattatggatatcaccctcgacgaatttaacacgcatccgacggcgtttatttgcaccaatatccaggaaaccgacctcgctggtcacgcggaagacgtcgcacgttatgccgaacgtttgcagatcgttgaccgtaaccttgcccggcttattgaggcgatgcagccagatgattgcctggtcgtgatggcggatcacggtaacgatccgaccattggtcacagccaccatacccgcgaagtggtgccagtgctggtttatcagcaagggatggtcgctacgcagctcggtgtgcgcaccacgctttctgatgtgggggctaccgtatgtgaatttttccgcgcgccaccgccacaaaatggtcgctcttttctttcctccctccggtttgcaggagacaccctatga

SEQ ID NO: 260855 - DNA, 879 bp, Klebsiella pneumoniae
atgagttttgatccgacgggttacaccctcgcccatgagcatctgcatattgatctctccggctttaaaaacaacgtggactgccgccttgatcagtatgcgttcatttgccaggagatgaacgacctgatggcccagggcgtgcgtaatgtgattgagatgaccaaccgttacatggggcgcaatgcgcaatttatgctcgatgtaatgcacgcgacggggatcaacgtagtggcctgcaccggttattaccaggacgcgtttttcccggaacatgtggcgacccgcagcgtgcaggaactggcgcaggagatgatcgatgaaattgaacagggtatcgatggcacggaactgaaagccgggatcatcgcggagatcggctccagcgaagggaagattacgccgctggaagagaaggtgtttattgccgccgcgctggcacataaccagaccggacgtccgatctccacgcatacctcttttagcaccatggggctggaacaactggcgctactgcaagcccacggagttgatctttcgcgcgtcaccgttggtcactgcgatctgaaagacaacctcgacaacattttgaagatgatcgatctcggcgcgtttgtgcagttcgacaccatcggcaagaacagttactacccggacgaaaagcgcattgcgatgctccacgcactacgtgactgtggtttgctgaaccgcgtcatgctgtcgatggatattacgcgccgctcccatttaaaagccaacggtggttatggctatgactatttattgaccacctttattccgcaattgcgccagtcaggattcagtcaggccgatgtggatgtgatgttacgtgaaactccctctcaatttttccaataa

SEQ ID NO: 260856 - DNA, 354 bp, Klebsiella pneumoniae
atgaaaaagattggtgttgcaggcttacagcgtgagcagattaaaaaaaccattgaagcgacggctcctggctgttttgaagttttcattcacaacgacatggaagcggcaatgaaagtgaaatccgggcaactggattactacatcggcgcgtgtaataccggtgcgggcgcggcattgtcgattgccatcgcggtgattggctataacaaaagttgcaccattgccaagccgggcattaaagcgaaagacgaacatatcgccaaaatgatcgccgaagggaaagtggcgtttgggctttccgttgagcacgtcgaacacgcgattccgatgctgattaaccatctgaaataa

SEQ ID NO: 260857 - DNA, 1305 bp, Klebsiella pneumoniae
atggatctgtatattcagattatcgtggtggcgtgcctgacgggtatgacatcgcttctggcgcatcgctcggcggccgtttttcatgacggtatccgcccgatcctgccgcaactgattgaaggctatatgaaccgtcgcgaggcggggagtatcgcttttggtctgagcattggttttgtggcttcggtggggatctcttttaccctgaaaaccggactgctcaacgcatggttactctttcttcctaccgatatcctcggcgtactggcgataaacagcctgatggcgtttggtcttggcgctatctggggcgtgttgatccttacttgcctgttaccggtaaaccagctgctgaccgcgctaccggtggatgtattaggtagcctgggggaattaagctcgccggtggtttcagcttttgcactgttcccgttggtggcgattttctaccagtttggctggaagcaaagtctgatcgccgccgtggtggtactgatgacccgtgtggtggtagtgcgctatttcccgcatctcaatccggaatctatcgaaatctttattggcatggtgatgctgctggggatcgcgataactcacgacctgcgtcatcgtgatgaaaatgatattgatgccagcgggctttcggtgtttgaagaacgcacgtcgcggattatcaaaaacttaccgtatatcgctattgtcggggcgctgattgccgccgttgccagcatgaagatttttgctggcagtgaagtgtcgatcttcacactggagaaagcatattccgcaggcgtaacgccggaacaatcacaaacgctgattaaccaggcagctctggcggaatttatgcgcgggctgggttttgtaccgttgattgccaccaccgcgttagccactggtgtgtatgcagttgcgggctttacctttgtttatgcggtgggctatctctcgccgaatccgatggttgcagcggtattaggcgcagtggttatttcggcggaagtcctgctgcttcgttcgatcggcaaatggctggggcgctatccgtcggtgcgtaatgcgtcagataacatccgtaacgccatgaatatgctgatggaagtggcgttgctggtcggttcgattttcgcagcaattaaaatggcgggttataccggattttctatcgcagttgccatttacttcctcaacgaatccctgggccgtccggtacagaaaatggcggcaccggtcgtggcagtaatgatcaccggtattctgctgaatgttctttactggtttggcctgttcgttccggcttaa

SEQ ID NO: 260858 - DNA, 1086 bp, Klebsiella pneumoniae
atgaagacgtatcctttgcaaagcctgacgcttattgaggcgcagcaaaagcagtttgcgctggtggacacgatttgccgccattttcccggcagcgagtttcttacccgcggggatttgggcttaacgccggggctgaatcaaccgcgcattacccagcgagtggaacaggtgctggctgatgcatttcacgcacaggctgcggcgctggtacagggtgcgggtactggagcgattcgtgcggcgttggcggctttgctcaaaccggggcagcgtcttctggtgcatgacgcgcctgtttacccgacgactcaggtcattattgcgcagatggggctgacgcttatcactgctgatttcaatgacctgttggcactgaagcaggttgtcgacgagcaacaaccagatgccgcgctggtgcagcatacgcgccagcagccgcaggacgggtacattctggcagatgtgctggcaacgttgcgctcggctggcgttcctgcattaaccgatgacaactatgcggtgatgaaggtggcgcgcattggctgtgaatgcggggcgaatgtctcgacattttcctgcttcaagctatttgggccagagggtgttggcgcggtggtaggcgatgctgatgttattaaccgtattcgcgccacgctctactccggcggcagccagattcagggcgctcaggcgttggaagtcttgcgtgggctggtgtttgcgccagtgatgcacgcggtgcaggcgggggtatctgaacggttgctggccttgctcaacggtggtgcagttccggaagtgaaaagcgccgtcattgccaatgcgcagtcgaaggtgttgattgtggagtttcatcagccgattgccgccagagtactggaagaggcgcaaaagctcggtgccttgccttacccggtcggtgcagagtcgaaatatgaaatcccgccgctcttttaccgtctttccggaacgtttcgccaggcgaatccgcaactcgaacattgcgcgattcgcattaacccaaatcgcagcggtgaagagacggtgctgcggattttgcgtgagagtattgccagtatttaa

SEQ ID NO: 260859 - DNA, 168 bp, Klebsiella pneumoniae
atgaacaaatttattaaagttgcactggtaggtgcagtactggctacgttaactgcatgtactggtcatatcgaaaaccgtgataagaactgctcttacgactacctgctgcacccggcaatttctatttctaaaatcattggcggttgcggtcctactgcacagtaa

SEQ ID NO: 260860 - DNA, 1374 bp, Klebsiella pneumoniae
gtggatcatttgcctatattttgccaattacgcgatcgcgactgtctgattgtcggcggtggtgatgtcgcggaacgcaaagcaaggttgctgttagacgcaggcgctcgcttaacggtgaatgcattagcgtttattccacagttcaccgcatgggcagatgcaggcatgttaaccctcgtcgaagggccatttgatgaaagccttctcgacacctgctggctggcgattgcagcgacggatgatgacgcgcttaaccagcgcgtcagtgaagccgctgaagctcgtcgcatcttctgtaacgtggtcgatgcgccgaaagccgccagctttattatgccgtcgattattgaccgctcaccgctcatggtcgcggtctcctctggcggcacctctccggttctggcacgcctgttgcgtgaaaaacttgaatcactgctgccgttgcatctgggccaggtagcgaaatacgccgggcaattacgcggtcgagtgaaacaacagttcgcaacaatgggtgaacgtcgccgtttctgggaaaaactgttcgttaatgaccgtctggcgcagtcgctggcaaacaacgatcagaaagccattactgaaacgaccgaacaattaatcaacgaaccgctcgaccatcgcggtgaagtggtgctggttggcgcaggtccgggcgatgccgggctgctgacactgaaaggactgcaacaaattcagcaggcagatgtggtggtctacgaccgtctggtttctgacgatattatgaatctggtacgccgcgatgcggatcgcgttttcgtcggcaaacgcgcgggataccactgcgtaccgcaggaagagattaaccagatcctgctgcgggaagcgcaaaaaggcaaacgcgtggtgcggctgaaaggcggcgatccgtttatttttggccgtggtggcgaagagctggaaacactgtgcaacgcgggtattccgttctcggtggttccgggtattaccgcagcttctggttgctctgcctattcgggtattccgctcacgcatcgcgattatgcccagagcgtacgcttaattaccggacacttaaaaaccggtggcgaactggactgggaaaacctggcggcagaaaaacagacgctggtgttctatatggggttgaatcaggccgcgactattcagcaaaagctgattgaacacggtatgcctggcgaaatgccggtggcaattgtcgaaaacggaacggcagtcacgcagcgcgtgattgacggtacactctcgcagctgggcgaactggcgcagcaaatgaacagtccatcgctaattattattggtcgggttgttggcctgcgcgataaactgaactggttctccaatcattaa

SEQ ID NO: 260861 - DNA, 807 bp, Klebsiella pneumoniae
atgtttacagacactattaataagtgtgcggctaacgctgcgcgcattgcacgcctgtcggcaaataacccgctcggcttctgggtcagctccgccatggcgggcgcgtatgtgggtcttgggatcatcctgattttcacgctcggtaatttgctcgacccgtccgtacgtcctctggtgatgggcgcgacctttggtatcgccttaacgctggtcattattgctggttctgagctgttcaccggacacaccatgttcctcacctttggagtgaaagcgggcactatcagccacgggcaaatgtgggcaatcctgccgcaaacctggctgggtaacctggtcggttccgtcttcgttgccatgctctatagctggggtggcggtagcctgctgccggtagataccagcatcgttcactccgtcgcgctggctaaaaccactgcaccggcaatggtactgttcttcaaaggtgcattgtgtaactggctggtttgcctggctatctggatggcgctgcgcactgaaggggcggcgaaatttatcgctatctggtggtgtctgctggcatttatcgcgtccggctacgagcactccatcgctaacatgacgctgttcgccctctcctggtttggcaaccacagcgaagcctacacgctggcgggtattggtcataacctgctgtgggtgacgctgggtaatactttatcaggtgccgtattcatgggattgggttattggtatgctacgccgaaagcgaatcgtccggttgcggacaaatttaatcaaactgaaacagctgccggttaa

SEQ ID NO: 260862 - DNA, 2544 bp, Klebsiella pneumoniae
atgagcaaagtcagactcgcaattatcggtaacggtatggtcggccatcgctttatcgaagatcttcttgataaatctgatgcggccaactttgatattaccgttttctgtgaagaaccgcgcatcgcttatgaccgcgtacacctctcgtcttacttctctcaccacaccgccgaagagctgtcgctggtgcgcgaaggcttctacgagaaacacggcatcaaagttctggtcggcgaacgcgctatcaccatcaaccgtcaggagaaggtgattcactccagcgccggacgtaccgttttttatgacaagctgatcatggcgaccggttcctacccgtggatcccaccaatcaaaggttctgatactcaggactgctttgtctatcgcaccattgaagacctcaacgctatagaatcctgcgcccggcgcagcaagcgtggtgccgttgtaggtggcggcctgttaggtctggaagccgctggcgcgctgaaaaacttaggcattgaaacccacgttatcgaatttgcccctatgctgatggcagaacagcttgatcagatgggcggcgagcagctgcgtcgcaaaatcgaaagtatgggcgtgcgcgttcacaccagcaaaaacacccttgagattgtgcaggaaggtgttgaagcgcgtaaaaccatgcgttttgccgacggcagcgaactggaagtcgactttatcgtcttctctaccggtatccgtccgcgcgataagctggcaacccagtgtggtctggacgttgctccgcgtgggggtatcgtcataaatgattcctgccagacttccgatccggatatctacgccatcggtgaatgcgcaagctggaacaaccgtgtatttggtctggtagcaccaggctacaaaatggcgcaggtcgccgttgaccatattcttggcagcgaaaacgcctttgaaggtgctgaccttagcgccaagctgaaactgctgggcgtagatgtaggtggtattggtgatgcgcacggtcgcacgcctggcgcacgtagctacgtttacctcgacgaaagcaaagagatctacaaacgcctgattgtcagcgaagacaacaaaaccctgctcggtgcggtactggtgggcgataccagcgactacggcaacctgctgcaactggtgctgaacgctatcgagctgccggaaaacccggattctctgattctgccggcgcactctggtagcggtaagccgtctatcggtgttgataaactgccggacagcgcgcaaatctgctcctgcttcgacgtcaccaaaggcgacctgattgctgctatcaacaaaggctgccacaccgttgcggcgctgaaagctgaaaccaaagcgggtactggctgcggtggctgtatcccgctggtcactcaggtactgaacgcggaactggcgaaacagggcatcgaagttaacaacaacctgtgcgaacactttgcttattcgcgtcaggaactgttccatttaatccgcgttgaaggcattaaaaccttcgaagaactgctggcgaaacacggcaaaggctacggttgtgaagtttgtaaaccgaccgtcggttcgctgctggcctcctgctggaacgaatacattctgaagccggaacatactccgctgcaggattcaaacgacaacttcctcgctaacatccagaaagacggcacctactcggtgatcccgcgttctccgggcggtgaaatcaccccggaagggctgatggcagtaggtcgtatcgcgcgtgaatttaatctctacaccaaaatcaccggctcccagcgcctggcgatgtttggcgcacagaaagacgatctgccggagatctggcgtcagctgattgaagccggcttcgaaaccggtcatgcctatgcgaaagcactgcgtatggcgaaaacctgcgtgggtagcacctggtgccgctacggcgttggcgatagcgtcggcctcggcgtggaactggaaaaccgctacaaaggcatccgtacgccgcacaaaatgaagttcggtgtctccggctgtacccgtgaatgttcagaagctcagggtaaagacgtgggtattatcgccaccgaaaaaggctggaacctgtacgtttgcggcaacggcggcatgaaaccgcgtcatgcggatctgctggcggcggatatcgatcgcgaaacgctgatcaaatatctcgaccgcttcatgatgttctacatccgtactgccgacaaactgacgcgtaccgcgccgtggttagaaaaccttgaaggcggcatcgattacctgaaagcggtgatcattgacgataaactggggctgaacgcacatctggaagaagagatggcgcgcctgcgtgaagcggtagtatgtgagtggactgagacggtcaatacaccgtccgcgcagactcgcttcaaacacttcatcaacagcgacaagcgtgacccgaacgtgcagatggtgccagagcgcgaacagcaccgtccggcaacgccgtatgaacgtatcccggtaactctggtggaggacaacgcatga

SEQ ID NO: 260863 - DNA, 1182 bp, Klebsiella pneumoniae
atgactaacagcaatcgcatcaagctcacatggattagctttctctcctacgcactgaccggtgcgttggttattgtcaccgggatggtgatgggaaatatcgccgattatttcaatctgcctgtttccagtatgagtaataccttcaccttcctcaacgccggcattttaatctctatcttcctcaacgcctggctgatggaaatcgtcccgttgaaaacgcagttacgttttggctttctcctgatggtgctggcggttgccggtttgatgttcagccacagcctggcgctgttctcggcggcgatgttcattctcggggtggtcagcggcatcaccatgtcgattggtacattcctgataacacaaatgtatgaagggcgtcagcgcggttcccgcctgttatttaccgactccttcttcagtatggctgggatgattttcccaatgatcgccgcgtttctactggcgcgcagcattgagtggtactgggtttatgcctgcatcgggctggtgtatgtcgctatttttattctgaccttcggctgtgagttcccggcactgggcaaacatgcaccaaaaacggatgctccggtagagaaagaaaagtgggggatcggcgtgctgtttctctccattgcggcactgtgctacatcctcggtcagttaggttttatctcctgggtgcctgagtatgccaaaggcctgggcatgagcctgaatgatgctggtacgctggtgagtaacttctggatgtcatacatggtcggcatgtgggcgttcagctttattcttcgcttctttgatttgcaacgtatcctgaccgtactggcgggtctggccgcgattctgatgtacgtctttaacaccggaacaccggcacatatggcgtggtcaattctcgccctgggcttcttctccagcgcgatctataccaccatcatcaccctgggttcacagcagaccaaagtaccgtcgccaaaactggttaactttgtcctgacctgcgggaccatcggtactatgttgacctttgtggttaccggcccgattgttgaacatagcggtccgcaggcggcactgcttacagcaaacggtctgtacgctgtcgtctttgtgatgtgcttcctgttaggtttcgtcagccgtcaccgtcagcataacaccctgacctctcattaa

SEQ ID NO: 260864 - DNA, 168 bp, Klebsiella pneumoniae
gtgaagaaactcaccgataagcaaaagtcccgtctctgggagcttcagcgtaatcgtaatttccaggccagtcgccgtcttgaaggcgtcgagatgcctttagtcactcttactgccgcagaggctttagcgcgccttgaagagctgaggaggcactatgagcgataa

SEQ ID NO: 260865 - DNA, 603 bp, Klebsiella pneumoniae
atgagcgataaattcggcgaagggcgcgatccgtatctttatcctggccttgatatcatgcgtaaccggctgaacatccgccagcagcagcggctggaacaggccgcttacgaaatgacggcgctgcgtgctgcgaccattgagcttggtccgctggtgcgcggtttaccgcatttgcgcactatccatcgccagctgtatcaggatattttcgactgggcggggcaattgcgtgaagttgatatttatcagggtgatacgccgttctgccactttgcctatatcgaaaaagagggcaatgccctgatgcaggatctggaggaagaaggttatctggttggcctggagaaagagaagttcgtcgagcggctggcacattactattgtgaaatcaacgtgctgcatcccttccgtgtgggaagcggactggcacagcggatcttcttcgagcaactggcgattcatgcgggctaccaactgagctggcagggtatcgaaaaagaggcctggaatcaggcaaatcagagtggggcaatgggggatctcaccgcactgcagatgatatttagcaaagtggtaagcgaagccggggaatctgagtaa

SEQ ID NO: 260866 - DNA, 564 bp, Klebsiella pneumoniae
atgatcctgcttatagataactacgattcttttacctggaacctctaccagtacttttgtgaactgggggcggatgtgctggttaagcgcaacgatgcgttgacgctggcggatatcgacgcccttaaaccacaaaaaattgtcatctcacccggaccctgtacgccagatgaagccgggatctcccttgacgttattcgccactatgccgggcgcttgccgattcttggcgtttgcctcggtcaccaggcaatggcgcaggcatttggcggcaaagttgtgcgcgccgcaaaggtcatgcacggcaaaacctcgccgattacacataatggtgtgggcgtatttaaggggctggcaaatccacttaccgtgacacgctaccattcgctggtggtggaacctgactcattacctgtgtgctttgaagtgacggcctggagcgaaacccgcgagattatgggtattcgccatcgccagtgggatctggaaggcgtgcagttccatccagaaagtattctcagcgaacaaggacatcaactgctggctaatttcctgcatcgctga

SEQ ID NO: 260867 - DNA, 1224 bp, Klebsiella pneumoniae
atggcaactgaacaaacagcaattacacgcgcgactttcgatgaagtgatcctgccgatttatgctccggcagagtttattccggtaaaaggtcaggggagccgaatctgggatcagcaaggcaaggagtatgtcgatttcgcgggtggcattgcagttacggcgttgggccattgccatcctgcgctggtgaacgcgttaaaaacccagggcgaaactctgtggcatatcagtaacgttttcaccaatgaaccggcgctgcgtcttggtcgtaaactgattgaggcaacgtttgccgaacgcgtggtgtttatgaactccggcacggaagctaacgaaaccgcctttaaactggcacgccattacgcctgtgtgcgtcatagcccgttcaaaaccaaaattattgccttccataacgcttttcatggtcgctcgctgtttaccgtttcggtgggtgggcagccaaaatattccgacggctttgggccgaaaccggcagacatcatccacgttccctttaacgatctccacgcagtgaaagcggtgatggatgatcacacctgtgcggtggtggttgagccgatccagggcgagggcggcgtgacggctgcgacgccagagtttttgcagggcttgcgcgagctgtgcgatcaacatcaggcattattggtgtttgatgaagtgcagtgcgggatggggcggactggcgatttgtttgcttacatgcactacggtgtgacgccggatattctgacctctgcgaaagcgttaggcggcggcttcccgattagcgccatgctgaccacggcggaaattgcttctgcgtttcatcctggttctcacggttccacctacggcggtaatcctctggcctgtgcagtagcgggcgcggcgtttgatatcatcaatacccctgaagtgctggaaggcattcaggcgaaacgccagcgttttgttgaccatttgcagaagatcgatcagcagtacgatgtgtttagcgatattcgcggtatggggctgttaattggcgcggagctgaaaccacagtacaaaggtcaggcgcgtgatttcctgtatgcgggcgcagaggctggcgtaatggtgctgaatgccgggcctgatgtgatgcgttttgcgccgtcgctggtggtggaagatgcggatatcgatgaagggatgcatcgtttcgcccacgcggtggcgaaggtgattgggggtaaataa

SEQ ID NO: 260868 - DNA, 2091 bp, Klebsiella pneumoniae
atgtggcgcaggctgatttatcaccccgatatcaactatgcacttcgacaaacgctggtgctatgtttgcccgtggccgttgggttaatgcttggcgaattacgattcggtctgctcttctccctcgttcctgcttgttgcaatattgcgggccttgatacgcctcataaacgttttttcaaacgcttaatcattggtgcgtcgctgtttgccacctgtagcttgctgacacagctactactggcaaaagatgttcctctgccctttttgctgaccggattaacgctggtacttggcgtcactgctgagctggggccattgcacgcaaaattgcttcccgcatcgctgctcgccgccatttttaccctcagtctggcgggatacatgccggtctgggaaccgttgctcatctatgcgttgggcactctctggtacggattgtttaactggttttggttctggatctggcgcgaacaaccgctgcgcgagtcactaagtctgctgtaccgtgaactggcagattattgtgaagccaaatacagcctgcttacccagcacaccgaccctgaaaaagcgctgccgccgctgctggtgcgccagcaaaaagcggtcgatctaattacccagtgctatcagcaaatgcatatgctttccgcgcaaaataataccgattacaagcggatgctgcgtattttccaggaggcgctggatttgcaggaacatatttcggtcagtttgcatcagccggaagaggtgcaaaagctggtcgagcgtagccatgcggaggaagttattcgctggaatgcgcaaaccgtcgccgctcgcctgcgcgtgctggctgatgacattctttaccatcgcctgccgacgcgttttacgatggaaaagcaaattggcgcactggaaaaaatcgcccgccagcatccggataatccggttgggcaattctgctactggcatttcagccgcatcgcccgcgtgctgcgcacccaaaaaccgctctatgcgcgtgacttactggccgataaacagcggcgaatgccattacttccggcgctgaaaagttatctgtcactaaagtctccggcgctacgcaatgccggacgactcagtgtgatgttaagcgttgccagcctgatgggcaccgcgctgcatctgccgaagtcgtactggatcctgatgacggtattgctggtgacgcaaaatggctatggcgcaacccgtctgaggattgtgaatcgctccgtgggaaccgtggttgggttaatcattgcgggcgtggcgctgcactttaaaattcccgaaggttacaccctgaccttgatgctgattaccaccctcgccagctacctgatattgcgcaaaaactacggctgggcgacggtcggttttaccattaccgcagtgtataccctgcaactgttgtggctgaacggtgagcagtacatccttccacgtcttatcgataccattattggttgtttaattgctttcggcggtactgtctggctgtggccgcagtggcagagcgggttattgcgtaagaacgcccatgacgctttagaagcctatcaggaagcgattcgcttgattctgagcgaggacccgcaacctacgccactggcctggcagcgaatgcgggtaaatcaggcgcataacactctgtataactcattgaatcaggcgatgcaggaaccggcgtttaacagccattatctggcagatatgaaactgtgggtaacgcacagccagtttattgttgagcatattaatgccatgaccacgctggcgcgggaacaccgggcattgccacctgaactggcgcaagaatatttacagtcttgtgaaatcgccattcagcgttgtcagcagcgactggagtatgacgaaccgggtagttctggcgatgccaatatcatggatgcgccggagatgcagccgcacgaaggcgcggcaggtacgctggagcagcatttacagcgggttattggtcatctgaacaccatgcacaccatttcgtcgatggcatggcgtcagcgaccgcatcacgggatttggctgagtcgcaagttgcgggattcgaaggcgtaa

SEQ ID NO: 260869 - DNA, 219 bp, Klebsiella pneumoniae; identical to SEQ ID NO: 2405

SEQ ID NO: 260870 - DNA, 1023 bp, Klebsiella pneumoniae
atggcgcagataacgacgaccaatgccaatgaattcagcagcagtgctgaattcacccctatgcgcggctttagcaattgtcatctacaaaccatgctgccgcgtctgtttcgtcgcaaggtgaaattcaccccgcactggcagcgactggagttgcccgacggcgattttgtcgatctcgcgtggagtgaagatcctgcacaggcgcggcataaaccgcgtttagtcgtgtttcacgggctcgaaggcagtctcaatagcccttacgcccacggtctggttgaggcggcgcaaaagcgtggctggctgggcgtggtgatgcattttcgcggatgcagcggtgaaccaaaccgtatgcaccgcatttaccattcgggcgaaaccgaagacgccagttggtttttacgctggctgcaacgcgagtctggtcatgcgccaacggctgccgtcggctattcgctcggcggtaatatgctggcctgtttgctggcaaaagaaggcaatgatctcccgattgatgcggcggtgattgtctctgcgccgtttatgctggaagcctgtagctatcatatggaaaagggcttttcccgcgtctatcagcgttacttgctgaacctgttaaaagccaatgccgcacgcaagctggctgcctaccccggaacgctgccgattaatctcgcgcagttaaaatcggtacgtcgcatccgtgaatttgacgatctaatcaccgccagaattcacggctacgctgacgctatcgactattatcgtcagtgtagcgccatgccgatgctcaatcggatagccaaaccgacgctgattattcacgccaaagacgatccgtttatggatcatcaggtgatcccgaaaccggaaagtctccccccgcaggtggagtatcagctgactgaacatggcggtcatgttggctttattggcggtacattacttcatccgcaaatgtggctggagtcacgcattcctgactggttaacaacgtatctggaggcgaaatcatgttga

SEQ ID NO: 260871 - DNA, 552 bp, Klebsiella pneumoniae
atgtctcagccagcgaaagttttgctgctgtatgcccatccggaatctcaggactcggtggcaaaccgggtactgcttaaaccggccacgcagctcagcaatgttaccgtgcacgacctttacgcgcactatcccgatttttttattgatatcccccgtgagcaggcattactgcgcgagcacgaggtgattgtctttcagcatcctctttatacctatagctgcccggcgctactgaaagagtggctggaccgggtattaagtcgtggttttgccagcgggccggggggaaaccaactggcgggaaagtactggcgtagcgtgattaccaccggcgagccggaaagtgcttaccgttatgacgccttgaatcgctacccgatgagcgatgttctgcgcccctttgaactagcggcgggcatgtgccggatgcattggttgagtcccatcattatttactgggcgagacggcaaagcgcacaggagctggcgagtcacgccagagcctacggtgactggctggcaaatccgctgtctccaggaggccgctga

SEQ ID NO: 260872 - DNA, 1806 bp, Klebsiella pneumoniae
atggaaggttccgattttttactcgcaggagtgttgtttctcttcgcggcggtggctgcggtgccgctggcatcgcggctgggtattggcgctgtgttgggatatttgctggcagggattgcaattggcccgtgggggctgggttttattagcgacgtcgatgagatcctccacttttcggaactcggcgtggtgttcctgatgtttatcatcggcctggagttgaatccctccaagctttggcaattgcggcgttcgatttttggcgtaggtgcggcacaggtgctgttaagcgcggcgttgctggcgggattattgatgctgacggatttcgcctggcaggcggcggtggtcggtggtattggccttgcgatgtcctcaaccgcaatggcgttgcaactgatgcgtgagaaagggatgaatcgcagcgaatccggccagttaggtttctcggtactgctgtttcaggatctggcggtgatcccggcactggcgttagtgccgttgttggcgggggcggcagacgaacatttcgactggatgaaaatcggcatgaaggtgctggcgtttgtcggcatgctgattggcgggcgttatttactgcgtccggtattccgttttattgcagcttctggtgtgcgggaagtgttcaccgccgcgacgctgctgctggtgttgggttccgcattgtttatggatgcgctggggctgtcgatggcgctcggtacgtttattgcgggcgtgttgctggcagaaagcgaatatcgccacgaactggaaacagctatcgacccgtttaaggggttgctgctcgggctattttttatctcggtcggaatgtcgctcaacctcggtgtgctttatacccatctgttgtgggtggtgttaagcgttattgtgttggtggcggtgaaaattctcgtgctgtatctgctggcgcgactgtatggcgtgcgtagctcagagcggatgcagtttgctggcgtgttgagtcagggcggtgagtttgcctttgtgctcttttctaccgcttcttcacaacgcttattccagggtgaccagatggcgctgttgctggtgacggtgacgctttccatgatgaccacgccgctgctgatgaagctggtggataaatggctatcccgccagtttaacggaccggaagaagaagacgaaaaaccgtgggtcaacgatgataaaccccaggtcattgtcgtgggctttgggcgttttggtcaggtgattggtcgtttgctgatggcaaataaaatgcgcattactgtgctggagcgggatatcagtgccgttaacctgatgcgtaaatatggctacaaagtttattacggcgacgccacgcaggtcgatcttttacgttctgcgggagcagaggccgctgagtctatcgtcattacctgtaacgagccggaagacaccatgaagctggtggaaatatgccagcagcactttccgcatttgcatattcttgcgcgagcgcgcggacgtgtggaagcgcatgagttattacaggcaggggtgacgcagttttcccgtgaaacattctccagtgcgttagagctggggcgcaagacgctggtcacgcttggcatgcatccgcatcaggcacagcgggcgcaactgcattttcgtcgcctggatatgcggatgctgcgagagctcatcccaatgcataccgataccgtacaaatttctcgcgccagggaagcccgacgcgaactggaagagattttccagcgtgaaatgcaacaagaacgacgccagctggacggctgggatgaatttgagtag

SEQ ID NO: 260873 - DNA, 219 bp, Klebsiella pneumoniae
atgcaggatttatcattggaagcacgcctggcagagctggagagccgactggcttttcaggaaatcaccattgaagaactgaacgtcacggtgaccgctcatgaaatggagatggcgaaactgcgcgatcatctgcgtctgctgaccgagaagctaaaagccagccagccgtcgaacatcgcgtcgcaggctgaagaaacgccaccgccacattattga

SEQ ID NO: 260874 - DNA, 813 bp, Klebsiella pneumoniae
atgaaatcactgtttaaagtaacgctgctggcgaccacaatggccgttgccctgcatgcaccaatcacttttgctgctgaagctgcaaaacctgctacaactgctgacagcaaagcagcgttcaaaaatgacgatcagaaatcagcttatgcactgggtgcctcgctgggtcgttacatggaaaactctcttaaagaacaagaaaaactgggcatcaaactggataaagatcagctgatcgctggtgttcaggatgcatttgctgataagagcaaactctccgaccaagagatcgaacagacactgcaagcattcgaagctcgcgtgaagtcttctgctcaggcgaagatggaaaaagacgcggcagataacgaagcgaaaggtaaagagtaccgcgagaaatttgccaaagagaaaggtgtgaaaacctcttcaactggtctggtttatcaggtagtcgaagccggtaaaggcgaagcaccgaaagacagcgatactgttgtcgtgaactacaaaggtacgctgatcgacggtaaagagttcgacaactcttacacccgtggtgaaccgctctctttccgtctggacggtgttattccgggttggacagaaggtctgaagaacatcaagaaaggcggtaagatcaaactggttattccaccagaactggcttacggcaaagcgggtgttccggggatcccaccgaattctaccctggtgtttgacgtagagctgctggatgtgaaaccagcgccgaaggctgatgcaaagccggaagctgatgcgaaagccgcagattctgctaaaaaataa

SEQ ID NO: 260875 - DNA, 387 bp, Klebsiella pneumoniae
atgcgttttgccatcgtggtgaccgggccagcatacggtacgcaacaggcgagtagtgcttttcagtttgcgcaagcactgatagccgaaggccatgagttaagctgcgtctttttctatcgggaaggggtctataacgctaaccaattgacctcaccggcaagcgatgaatttgaccttgtgcgcggctggcaacagttgaatgcgcaacatggtgtggcgctgaatatctgcgtagcggcagcgttacgccgcggtatcgtcgatgaaactgaagcaggaaggctggggctggcttcgtcaaatcttcagtcgggatttaccttaagcggacttggcgcgctggcggaagcctcgctgacctgtgacagggtggtacagttctga

SEQ ID NO: 260876 - DNA, 360 bp, Klebsiella pneumoniae
atgaaacgaattgcgtttgttttttctactgcacctcatggtacagctgctggtcgggaaggtttagatgctttactggcaacttccgcattaactgacgatctggccgtcttctttattgctgatggtgtttttcagctgctgccaggacaaaagcccgatgcagtgctggcgcgtgattacattgccacttttaaattgttgggtctgtacgacattgaacagtgctgggtttgtgcggcttcactgcgcgaacgcgggttagatccgctgacaccctttgttgtcgaagccacgccgctcgaagcagatgccttacgccgcgaactcgccaactacgatgttattttgagattttga

SEQ ID NO: 260877 - DNA, 288 bp, Klebsiella pneumoniae
atgctgcacacattacatcgttcaccctggctgacggattttgctgcgctgctgcgtctgctcagtgaaggcgacgaactgctgttattgcaagatggtgtaactgccgcagttgacggtaaccgctaccttgaaagtctgcgtaatgcccccattaaggtctatgccctgaacgaagaccttattgcccgcggtttgactggtcaaatttcgaacgatatcattctcattgactatactgatttcgtcagacttacggttaagcactccagccagatggcctggtga

SEQ ID NO: 260878 - DNA, 1221 bp, Klebsiella pneumoniae
gtgatccgctttgaacgggccttccggcatgttgttgaggcactgctcaagaatgcgcagactctgacgcagctcttccactttaagcattacgcgggtgtagcagtcagaaacaccaccacccaccgggatttcaaagtcgaagttttcatagccagaatacggacgcgccttacgcacgtcgaagtcgatcccggtagcacgcaggcccgcgccggtggtgccccactccagcgcctctttcgcgccataggcggcaacgccctgggaacgacctttcagaatggtgttttgcagcgccgctttctcgtaagacgccagacgtttcggcatccagtcgaggaactcacgcagcaggcgatcccagccacgcggcaggtcgtgcgctacgccgccaatacggaaccacgccgggtgcatacggaaacccgtgatcgcttccaccagatcgtaaattttctgacgatcggtaaaggcgaagaacactggcgtcattgcgccgacgtcctgaataaaggtcgagatatacagcagatggctgttgatgcggaacagctcagaaagcattacgcgaatgacgttaacgcgatccggcacggtgatcccggccagtttctctacagccagcacgtaaggcatttcgttaacgcagccgccgaggtattcgatacggtcggtatacggaatgtagctatgccaggactggcgctcgcccattttctccgcaccacggtggtggtagccgatgtctggtacgcagtcgacaatctcttcgccatcgagctgcaaaacgatacggaaagccccgtgcgccgacgggtggttcgggccgaggttgaggaacatgaagtcctcgttttcggttccgcgcttcatcccccactcttccggtttgaaggtcagggcttccatctccagatcctgtttggctttggtcagctcaaacggcgagaattcggtagcgcgcgccgggtaatctttacgcagcgggtgacctttccaggtttgcggcatcatgatgcggcgcaggttcgggtgaccgtcgaaagtaatgccaaacagatcccaggtctcacgctcataccagttagcgttcgggaacagtttggtgaaggtcggtacgtgcaggtcgttttctgccagcgccaccttcaacatgatgtcgcggttacgatcgatagaaatcagatggtagaaaacggaaaaatccgcggcaggtaa

SEQ ID NO: 260879 - DNA, 663 bp, Klebsiella pneumoniae
atggattatacgctcacccgcatagatcccaacggtgagaacgaccgttaccccctgcaaaagcaggagatcgtaaccgaccctctggagcaagaagttaacaaaaacgtgtttatgggcaagctcaatgacatggttaactggggtcgtaaaaactcaatttggccgtataacttcggtctttcctgctgttacgttgagatggtgacttcgtttaccgcggtgcatgacgtggcgcgttttggcgcagaagtattgcgtgcttcgccgcgtcaggctgacctgatggtggtggcaggaacctgctttaccaaaatggcaccggttattcagcgtctgtatgaccagatgctggagccaaaatgggttatctcaatgggtgcctgtgccaactctggcggtatgtacgatatttattccgttgtgcagggcgttgataaattcatcccggttgatgtgtatatcccgggctgcccgccgcgtcctgaagcgtacatgcaggcactgatgctgttgcaggaatctatcggcaaagaacgtcgtccgctctcctgggtggttggcgatcagggcgtttatcgcgccaatatgcaatcagagcgcgaacgcaagcgcggtgaacgcattgccgtaaccaacctgcgtacacctgacgagatttaa

SEQ ID NO: 260880 - DNA, 165 bp, Klebsiella pneumoniae; identical to SEQ ID NO: 36102

SEQ ID NO: 260881 - DNA, 1833 bp, Klebsiella pneumoniae
gtgaacggtgaattgatttgggttctttcattactggccgttgccatcgtcttgtttgcgacgggcagagtgcgtatggatgcggtcgctttgtttgttattgtcgcgtttgcattaagcggaacgctgacggtccccgaagtattttccggcttttccgatcctaacgttgtcctgattgccgccttgttcattattggcgatggtttggtccgtaccggtgttgccaccgtaatggggacatggctggtcaaagtggcgggcaacagtgaaatcaaaatgttggttttgttgatgctgaccgtcgcggggcttggcgcgtttatgagttcaaccggcgttgtcgctatctttattcccgtggtgttaagcgttgccatgcgtatgcaaacgtcgccgtcgcgcctgatgatgccgttaagttttgccgggctgataagcggcatgatgacgctggtggcgacgccgccgaacctggtagtcaacagtgaattgctgcgtgaaggctatcatggttttagtttctttagcgtaacacctattggcctggtcgtgctggtgctgggtattttgtatatgttagtgatgcgtttcatgctgaaaggggatacccagaccccgcagcgcgaaggctggacgcgtcgaacctttcgcgatcttatccgtgaatatcgactgaccgggcgtgcgcgacgtctggctattcgccccggatcgccaatgattggtcaacggctggacgatctcaaattacgtgagcgttatggcgctaacgtcatcggtgttgaacgctggcggcgttttcgtcgcgttatcgtgaacgttaatggggtttctgaatttcgcgcgcgtgacgttttgcttattgatatgtctgcggctgatgtcgatctccggcaattttgtagtgagcaattgctggagccgatggtactgcgcggcgagtatttttctgaccaggcacttgatgtgggcatggcagagatttcattaattcctgagtcagaacttattggtaaatcggtgcgcgaaattggttttcgtacccgctacggactgaatgtggtggggctaaagcgcaatggcgaggcgatggaaggttcgctggcggatgagcctctgctgctgggcgatatcatcctggttgtgggtaactggaaactgatcggtatgctggcaaaacaagggcgtgactttgtggcgctgaacttaccagaagaagtgagtgaagcatcgccagcacacagtcaggcacctcatgccattttttgcctggtgttgatggtggcgttaatgctgaccgatgaaattcctaatcctgttgccgctatcatcgcctgcctgctgatggggaaattccgctgtatcgatgctgaaagcgcctataaatccattcactggccgagcattattttgatcgttgggatgatgccgtttgctgtggcattacagaaaacgggaggtgtcgcgctggcggtgaaagggctgatggacattggcggcggttacgggccacatatgatgctgggttgtttgtttgtcttgtcggcggttattgggctatttatctctaataccgcaacggcggtgttgatggctccgattgcgctggctgctgccaaaacgatgggtgtgtcgccttatccatttgcgatggtcgtggcgatggcagcatccgccgcctttatgacgccggtttcttcaccggttaacacactggttttaggtccgggaaattacagcttcagtgactttgtgaagttgggggtaccgttcaccattatcgtgatggcggtttgtgtggtgatgatcccgatgctgtttccgttttga

SEQ ID NO: 260882 - DNA, 651 bp, Klebsiella pneumoniae
gtgcggtgcaaaggttttctgtttgatcttgatggaacgctggtggattccctgcctgcggtagagcgggcgtggagcaactgggccagacgtcatgggttagcgccggaagaggtgctggctttcattcacggtaaacaggcgatcacctctctgcgccattttatggcgggcaaatccgaggctgatattgccgccgagtttacgtgtctggagcaaatcgaggccacggaaaccgagggtattaccgcgcttccgggggcaatcgccttactcaatcatttgaataaagcaggtattccgtgggccattgtgacttctggctccatgccggtagcgcgagcgcgccataaagtagctgggcttcccgcaccagaggtgtttgtaaccgctgagcgagtgaagcgcggaaaaccagaacctgatgcgtatctgttaggcgcgcagctgctggggcttgcgccgcaggagtgtgtggtggtggaagatgctcccgctggcgtgctttctggcctggcggcgggttgtcatgtcattgcggttaacgctccggcagataccccgcgcctgaatgaggtcgatttggtcctccacagtctggagcaaattactgtgaccaaacagccaaatggcgatgttattattcagtga

SEQ ID NO: 260883 - DNA, 456 bp, Klebsiella pneumoniae
atgtcaacgccggataatcgttctgttaatttttttagcttgtttcgccggggacagcattactcaaagacgtggccgctggaaaaacgccttgccccggtctttgtcgaaaatcgcgttatcaagatgacgcgttatgcgatccgttttatgccgccgatcgccgtatttactctctgctggcagattgccctgggcggtcagcttgggccggcagttgccactgcgctgttcgccttaagtttacccatgcagggattgtggtggctgggcaagcgttctgtaacgccattaccccctgctatcctcaactggttttatgaagttcgcggtaaattgcaggagtctggacaggtgttggcacccgttgaaggcaagcctgattaccaggcattagctgacacgcttaagcgcgccttcaaacaactggataaaactttccttgatgatttgtaa

SEQ ID NO: 260884 - DNA, 1479 bp, Klebsiella pneumoniae
atgcccgatacgttggtgattatcttttttgttgccattttaaccagtcttgccacctgggtagttccggtgggcatgtttgacagtcaggaagtgcagtatcaggttgatggtcaaacaaaaacacgaaaagtcgtagatccacactcatttcgcattctgactaacgaagcaggcgaacctgagtatcaccgcgtacagctgtttacgacgggcgatgaacgcccgggcctgatgaacttcccgtttgaagggttaacctcaggatcgaaatacgggacagccgttggcatcatcatgtttatgctggtgattggcggcgcgtttggcattgtgatgcgtacaggaaccattgataacggtatcctggcgcttattcgccatacccgcggaaatgaaattctctttattcctgcgctctttattctgttttcacttggcggcgcggtatttggtatgggagaagaggccgtcgcctttgccattatcatcgcaccgctaatggtccggctaggctatgacagtattaccaccgtcctggtgacctatatcgccacgcaaatcggttttgccagttcgtggatgaacccgttttgtgtggttgttgctcaggggattgccggcgttccggtgctttctggctccgggttgcgcatcgtggtgtgggttatcgccactctgattggcctgatctttaccatggtgtacgcctcacgagtgaaaaagaatcctcttctgtcacgcgtgcatgagtccgaccgcttctttcgtgaaaagcaggcggatgttgaacaacgtccgtttacctttggtgactggctggtattgattgtcctgaccgccgtaatggtctgggtgatttggggcgtgatcgttaatgcctggtttattccagaaattgccagccagttcttcaccatgggtctggtgattggcatcatcggcgttgttttccgccttaacggcatgacggttaataccatggcttcatccttcaccgaaggggcgcgaatgatgatcgcccctgccctgctggtaggtttcgccaaagggattttgctgctggtcggtaatggtgaagcgggtgatgccagcgtgttaaataccatcctcaacagcattgccaatgccattagcggtctggataacgcggtcgcggcctggtttatgttgctcttccaggcggtatttaatttcttcgtgacgtccggttctggtcaggcggcgttaaccatgccgttactggcaccgcttggcgatctggtcggtgttaaccgtcaggttaccgtgctggcgttccagtttggtgatggcttcagccacatcatttacccaacctcagcttcgttaatggcgacgctcggtgtgtgccgggtggacttccgtaactggctgaaggtgggcgcgaccctgcttggactgctgtttattatgtccagcgtcgtagtgatcggcgctcagttgatgggctaccactaa

SEQ ID NO: 260885 - DNA, 543 bp, Klebsiella pneumoniae
atggaacagcgtcgtttggcaagtactgaatgggtggatattgtcaatgaagagaacgaagtcattgcacaagccagccgggaacaaatgcgggcacagtgtctgcgtcatcgtgcaacttacatcgtcgtgcatgatggcatgggcaaaattctggtccagcgtcgtaccgagacaaaagactttttacccggcatgttagatgcgaccgcaggcggtgtagtccaggccgatgagcaactgctggaatccgcgcgtcgcgaagcggaagaagagttgggcattgccggtgtcccctttgccgagcacgggcagttctatttcgaagataaaaattgccgtgtctggggcgcgttgttcagttgcgtctctcacggtcccttcgccctacaggaagatgaagtcagtgaagtttgctggctgacaccggaagaaatcaccgcacgctgcgatgagttcactccagactcgctgaaagcgctggcgttgtggatgaagcgcaatgccaaaaatgaagccgtagagactgaaacggcagaatga

SEQ ID NO: 260886 - DNA, 552 bp, Klebsiella pneumoniae
atgaaactgatgtttgcatcggacattcatgggtcgttaccggcgacggaacgtgttctggagttgtttgcccaaagcggtgcccagtggctggtgatccttggcgacgtgttgaatcacggcccgcgtaatgctttaccggagggttacgcgccagccaaagtcgctgaacggcttaatgaagtggcacataaggttatcgctgtgcgcggcaactgcgacagcgaagtggatcaaatgcttttgcatttcccgataaccgcgccgtggcaacaggtattactggaaaaacaacgtctgtttttgacgcatggtcatctgtttgggccggaaaatctgcctgctttaaaccagaacgatgtgctggtgtacggtcatacccatctgccagtggcagaacagcggggggagattttccacttcaaccccggctcggtgagtattccgaaaggcggtaatccggcgagttatggcatgctggataatgacgtacttagtgtaatcgcactcaatgatcaaagtatcattgcgcaggtcgcgattaatccgtaa

SEQ ID NO: 260887 - DNA, 645 bp, Klebsiella pneumoniae
atgagtaaacccgctatcacgctttggtcagatgcccattttttctccccttatgtgttatccgcctgggtggcgttgcaggaaaaaggcctgtcgtttcatatcaagaccatcgacctcgacagcggtgaacatttgcagccgacgtggcaaggttacggtcagacacgccgtgtgccgttattacaaattgatgattttgagttgagtgaatcttctgccattgcggagtatctggaagatcgatttgcgccaccgacctgggaacgcatttatccgcttgatttagaaaatcgtgcgcgtgcacgacagattcaggcctggctgcgtagcgatctgatgcccatccgcgaggaacgtccaacggatgttgtctttgcgggtgcgaaaaaagcgccattaacggcggagggaaaagccagtgcagagaaactgttcgcgatggcagaacatttgttagcactgggtcagccgaatttatttggtgaatggtgcattgctgatactgatctggcgctaatgattaaccgcctggtactccatggcgatgaggtgccggaacgcctggtggattatgcgacattccagtggcagcgagcgtctgtccagcgttttattgcactttcggcgaagcaatctggctga

SEQ ID NO: 260888 - DNA, 648 bp, Klebsiella pneumoniae
atgatcgatctctatttcgccccgacaccaaatggtcacaaaattacgctgtttctcgaagaagcagggctggattatcgcttgattaaggtagacctggggaaaggcggtcagtttcgcccggaatttttgcacatttcgcctaacaacaaaattccggcaattgttgatcattctccagccgatggcggcgaaccgctaagcctctttgagtctggtgccattttgttgtatctggctgagaaaacaggactctttttgagtcatgaaacgcgtgagcgcgccgccacattacagtggttattctggcaggtaggcggactggggccgatgcttgggcagaatcatcattttaatcacgctgccccccaaaccattccttacgctattgaacgttatcaggttgaaactcagcgtctgtaccatgtactgaacaagcggctggaaaactcgccctggctgggaggtgagaactacagcattgcggatattgcctgctggccgtgggttaatgcctggactcgccagcgaattgaccttgcaatgtatccggcagtcaagaactggcatgagcggatccgttcgcgccctgccaccggtcaggcactgctaaaagcacaactcggtgatgagcgttcggatagttaa

SEQ ID NO: 260889 - DNA, 363 bp, Klebsiella pneumoniae
atggcacaacctgccgctattattcgtataaagaaccttcgtttacgtacgtttatcggaattaaggaagaagaaattaacaaccgtcaggatattgttatcaatgtgacgatccactaccccgccgataaagcgcgcactagcgaagatatcaacgatgcgctgaattatcgcaccgtaacgaaaaacattattcagcatgtagagaataaccgtttctctttgctggaaaaattaactcaggatgtgctcgatatcgcacgtgaacatcactgggtgacgtatgctgaagtggagatcgataaactgcacgcgctgcgctacgctgattcggtatccatgaccttaagctggcagcgttaa

SEQ ID NO: 260890 - DNA, 894 bp, Klebsiella pneumoniae
atgaacatagtgatcaccggagggacgggattaattggtcgccatttgattccacgtttgctggagctgggccatcaaatcacggtaatgacgcgtaacccgcagaaagccagttccgttctcggccctcgggtgacactatggcaagggcttgccgatcaaagcaacctcaacggcgttgatgcggtaatcaatctggccggagaaccgattgctgataaacgctggactcacgagcaaaaagagcgtctctgccaaagccgctggaatatcacgcaaaaactggtcgatttgattaatgccagcgacacgccaccgtcggtactcatttccggctcggcaacgggctattatggcgacttaggtgaagtggtggttaccgaagaggaaccgccgcataacgaatttacccataaactctgcgcccgctgggaagaaattgcctgccgggcacaaagtgacaaaacgcgagtgtgcctgctgcgtaccggcgtagtgttggcaccggatggcggtattctcggtaaaatgctgccgccgtttcgtcttggtctgggcgggccgattggctccggtcggcagtatctggcctggattcatattgatgatatggtcaacggcattctctggctgctggataacgagctgcgtggaccatttaatatggtttcgccctacccggtacgcaatgaacaatttgcccatgcgctcggtcatgcgctgcatcgcccggccattttgcgcgtccccgcgaccgccattcgactgttaatgggcgaatcttcagtactggtattaggtggacaacgcgcgctgcctaaacggctggaagaagcgggttttgcgtttcgctggtacgatttagaagaggcgctggcggatgttgttcgctga

SEQ ID NO: 260891 - DNA, 891 bp, Klebsiella pneumoniae
atgacaatatcgacaacttccacgccgcatgatgcggtatttaaatcttttttacgccatccagacaccgcgcgggattttattgatattcatcttcccgcgccgctgcgcaaactgtgtgatttaacaacgcttaaactggaaccaaacagttttattgatgaagacctgcggcaatattattccgacctcttgtggtctgtgaaaacgcaggagggagcgggttatatttatgtagtgatagagcaccaaagtaagccggaagaattaatggcttttcgcatgatgcgctattccattgcggcgatgcaaaaccatcttgatgcaggctataaagagcttccattggtgatcccgatgctgttttatcatggttgcagaagtccttatccttattcactctgctggcttgatgaatttgccgagcctgctatagcccgcaaaatatattcatcggcttttccgctggtggatattaccgtggtgccggatgacgagattatgcaacatcgcaaaatggcgctgttggagttaattcagaaacatattcgtcagcgcgatctgttgggattagtcgaccaaattgtttcgctgctagttacaggaaacactaatgacaggcagctaaaagccctgtttaattatgtattacaaacgggagatgcccagcgtttccgtgcatttattggtgagatagcggaacgcgcaccacaagaaaaggagaaactgatgactattgctgacagattacgtgaagaaggcgcaatgcagggcaaacacgaagaagccctgcgtattgctcaggagatgctggagagaggtttagacagagagttagttatgatggtgacccgactttcaccagacgatcttatcgcgcaaagccactaa

SEQ ID NO: 260892 - DNA, 687 bp, Klebsiella pneumoniae
atgttgtatgggttttcaggtgttattttacagggtgcgctcgtcacgctggagctggctatcagctctgtagtgctcgctgtaatcatcggtttaattggcgctggcggtaagctctcgcaaaatcggctttcggggctgattttcgaagggtacaccacgctgattcgaggcgtgccggacttggtgttgatgctgctaattttctacggtttgcagattgcactaaacacggtgacggaggcgatgggcgtcgggcagattgatatcgatccgatggtcgctggtattattactctcggttttatctacggtgcttattttaccgaaacgttccgtggcgcttttatggcagtgccgaaaggacatatagaggcggcgacggcgttcggtttcactcgtgggcaagtgtttcggcggatcatgtttccggcgatgatgcgttacgccctgccaggcattggcaacaactggcaggtgatcctcaaatctaccgcactcgtttcgttactcggcctggaagatgtggtcaaagccacgcagctggcaggcaaaagtacctgggaaccgttctatttcgccatcgtctgtggcgtgatttacctggttttcaccactgtttccaatggtgtgctgctgttccttgagcgccgctactccgtgggtgtgaagagggctgacctgtga

SEQ ID NO: 260893 - DNA, 663 bp, Klebsiella pneumoniae
gtggcaagtaagtttcagaatcggttagtgggcacgatcgtgctggtggcgctgggggtgattgtacttccagggctgctggacgggcagaaaaaacattatcaggatgagttcgcggctatcccgctggtgccaaaagcgggcgatcgcgatgagcctgatatgatgccagccgccacccaggcgctgccgacgcagccgccggaaggcgcagcggaagaggtgcgggcaggtgatgccgcagcaccgtcgctcgatccggccactattgcagccaataacaccgagtttgaaccggaacctgcaccggtcgccccaccgaagccgaaaccggtggagtcgcctaaaccgaaggttgaagcaccacctgcgccgaagccagaaccgaagccggtcgtggaagaaaaagcagcgccaacgggtaaagcttatgttgtgcaactgggcgcgctgaaaaatgccgataaagtgaatgagattgtcggtaagctgcgcggtgccggttatcgggtttatacgtcgccatccacgccagtgcagggtaaaattacccgtattctggttgggcctgatgcttccaaagagaagctgaaaggatcgctgggtgagctcaagcagctttctggcttaagtggcgtggtaatgggctatacgccgaattaa

SEQ ID NO: 260894 - DNA, 1269 bp, Klebsiella pneumoniae
atgattatcaaacgcactcctcaagccgcgtcgcctctggcttcgtggctttcttatctggaaaacctgcacagtaaaactatcgatctcggccttgagcgcgtgagccaggtcgcggcgcgtcttggcgttctgaaaccagcgccatttgtgtttaccgttgcgggtacgaatggcaaaggcaccacctgccgtacgctggagtcgattctgatggcggcagggtacaaagtgggcgtctacagttcaccgcatctggtgcgttataccgagcgcgtacgtgtgcagggtcaggaattgccggaatcggcccacaccgcctcttttgcggagattgaatcggcacgcggtgatatttccctgacctatttcgagtacggtacgctgtcggcgttgtggctgttcaagcaggcacaacttgacgtggtgattctggaagtagggctgggtggtcgtctggacgcaaccaatattgtcgatgccgatgtcgcggttgtaaccagcattgcgctggatcataccgactggctggggccagatcgcgaaagcattggtcgcgagaaagcaggcatcttccgcagcgaaaaaccggcaattgtcggtgagccggaaatgccttctaccattgctgatgtggcgcaggaaaaaagtgcactgttacaacgtcggggcgttgagtggaactattccgtcaccgatcatgactggacgtttagcgatgctcacggcacgctggaaaatctgccgttgccgcttgtcccgcaaccgaatgccgcaacggcgctggcggcactgcgtgccagcgggctggaggtcagtgaaaatgccattcgcgacgggattgccagcgcaattttgccgggacgtttccagattgtgagcgagtcgccacgtgttatttttgatgtcgcgcataatccacatgcggcggaatatctcaccgggcgtatgaaagcgctaccgaaaaacgggcgcgtgctggcggttatcggtatgctacatgataaagatattgccggaactctggcctggttgaaaagcgtggttgatgactggtattgtgcgccactggaagggccgcgcggtgccacggcagaacaactgcttgagcatttgggtaacggcaaatcatttgatagcgtggcgcaggcatgggatgccgcaatggcggacgctaaagcggaagataccgtgctggtgtgtggttcgttccacacggtcgcacatgtcatggaagtgattgacgcgaggagaagcggtggcaagtaa

SEQ ID NO: 260895 - DNA, 1014 bp, Klebsiella pneumoniae
atgtctgaaggctggaacattgccgtcctgggcgcaactggcgctgtgggcgaagccctgcttgaaacgctggctgaacgtcagttcccggttggggaaatttatgcactggcacgtaacgaaagcgcaggcgaacaactgcgctttggtggtaagacaatcaccgtgcaggatgccgctgaattcgactggacgcaggcgcagctggcgttttttgtcgcaggcaaagaagctaccgctgcctgggttgaagaagcgaccaactcaggttgcctggtgatcgatagcagcggattgtttgctctcgaacctgacgtaccgctggtggtgccggaagtaaacccgtttgtactgaccgattaccgcaaccggaatgtcatcgccgtaccggacagtctgaccagccaactgctggcggcactgaaaccgttaatcgatcagggcggtttgtcgcgtatcagcgttaccagcctgatttcagcctccgcccagggtaaaaaagcggtcgatgcgttagcggggcagagtgctaaattgctcaacggcattccgattgatgaagaagatttcttcgggcgtcagctggcgttcaacatgctgccgttactgccggatagcgaaggtagcgtgcgtgaagaacgtcgtatcgttgacgaagtacgcaaaatcctgcaggacgaagggctgatgatttcggcaagcgtcgtccaggcaccggtattctacggtcatgcccagatggtcaactttgaagcactgcgtccgctggcagcagaagaagcgcgtgatgcgtttgctcagggcgaagatattgtgctctctgaagagaacgaattcccgactcaggtgggggatgcttctggtacgccgcatctttccgttggctgcgtacgtaatgactacggtatgccggagcaagttcagttctggtcggtggccgataacgttcgctttggcggcgcgctgatggcagtaaaaatcgccgagaaactggtgcaggagtatctgtactaa

SEQ ID NO: 260896 - DNA, 1137 bp, Klebsiella pneumoniae
gtgaaaatccttgttgatgaaaatatgccttatgcccgcgacttatttagccgtttgggtgaggtgaccgcggttcccgggcgtccaatccccgtcgctcaactggcagacgcggatgcgctgatggtgcgttcggtcacgaaagtgaatgaatctttgctggcaggaagacccattaaatttgttggcactgccaccgcggggaccgaccatgtcgatgaagcgtggttaaagcaggcgggaattggtttttccgcggcacctggctgtaatgcgattgcggtggtggaatatgttttctcctcactgctgatgcttgccgaacgtgatggattttcactgcacgagcgtaccgtggggatcgtgggcgttggtaacgttggtcgccgtttacaggcgcgactggaagcgttagggattacaaccttgctttgcgatccgcctcgcgccgaccgtggggatgagggggatttccgctcgctggatgaattagttcagcatgcggatattctgactttccatacgccactctttaaagatggtccgtacaaaacgctgcatctggcggatgaaaaactgatccgtagcctgaaaccaggagcgattctgattaacgcctgccgtggcgcagtcgtcgataatactgccctattgacctgcctgaacgaaggccagaagttaagcgtagtgctggatgtctgggaaggcgaaccggaacttaacgtggaattgctgaaaaaagtggatatcggcacgccgcatatcgcaggctataccctggaaggtaaagcacgcggtactacgcaagtgtttgaagcttatagcaagtttattgggcatgaacagcacgttgcgctggatacattactgcccgcgccagagtttggtcgcattacgctgcatggcccgctcgatcagccaacgctgaaaaggctggtgcatttggtgtatgatgtgcgccgcgatgacgcaccgctgcgtaaagtcgccgggataccgggtgagttcgataaactgcgcaaaaactatcttgagcgccgtgaatggtcatctctgtatgtgatttgtgatgacgccagcgcggcatcattgctgtgtaaactgggttttaacgccgttcatcatccggcacgttaa

SEQ ID NO: 260897 - DNA, 996 bp, Klebsiella pneumoniae
atgatacaacctatttccggccctcctcctgggcaaccaccaggtcagggagataacctgccgtctggcgcgggcaatcagcctttatccagtcagcaacgtacttcgctggaaagcttaatgacgaaagtgacctcactgacgcaacagcaaagagcagaactgtgggcgggtatcaggcacgatattggtctgtcgggagattcaccgctgctttcgcgtcacttccctgccgctgagcacaatctggcgcaacgtctgctggccgcgcaaaaaagccattctgcccgccagcttttagcgcaattaggggagtatttacgtctggggaataatcgtcaggcggtcacggattatatccgtcataactttggtcagacgccgctgaatcagctctcaccggagcaattaaaaaacattctcaccctgttgcaggaagggaagatggttattccgcaaccgcagcagcgcgaggcgaccgaccgtcctttattaccggcggagcacaatgcgcttaaacagctggtgaccaaacttgcggcggcaacgggagaacccagcaagcagatctggcaatcgatgctggaactttccggggtgaaagatggtgagttaattccagcgaaactgtttaaccatctggtgacctggctgcaggcgcgtcagacgctaagccagcaaaatacgccgacgctggaatcactacagatggcgctgaaacaacctttagatgccagtgaactggcggcgttatcggcatatatccagcaaaaatatggtctttctgcgcaatcatcgctttcttcagcccaggccgaggatattcttaatcagctttatcaacggcgggttaaagggattgatccgcgtgatatgcaaccgctgcttaatccttttccaccgatgatggacacgttgcaaaatatggcaacgcgtcccgcgctgtggatactgttagtcgcgattatcctgatgctggtctggctggttcgttaa

SEQ ID NO: 260898 - DNA, 1179 bp, Klebsiella pneumoniae
atgactgctgtaagccaaacagaaacacgatcttctgccaatttttcgctcttccgcatcgcttttgcggtttttctcacctacatgaccgtagggctgccgttgccggttatcccgctgtttgttcatcatgaactgggctatggcaacaccatggtcgggattgccgtcggcattcagtttctggctacggtgctgacgcgtggctatgccgggcgactggccgatcaatatggcgcaaaacgttcggcgcttcagggaatgttagcttgtggtctggcgggcggcgcgctgctgttggcggcgattttgcccgtctccgcaccgttcaaatttgccctgctggtcgtcgggcgtttgattcttggctttggtgaaagccagttactgacgggcgctctgacctggggattaggcatcgttgggccaaaacattccggcaaagtgatgtcatggaacggaatggcgatttacggtgccctcgctgttggtgcgccgcttggcctattgattcatagccattacggttttgccgcactggcgctcaccacaatggcattacccttactggcgtgggcctgtaacggcacagtgcgcaaagtaccggccctggcgggagaacgtccatcgctgtggagtgttgtcgggcttatctggaaacctgggttaggtctggcactacaaggcgttggttttgcggttatcgggactttcgtttcgctctactttgccagcaaaggatgggcgatggcgggctttactcttaccgcgtttggcggcgcatttgtcgtgatgcgtgtcatgtttggctggatgccggaccgttttggcggcgtgaaagtggcgattgtctctctgcttgtagaaacggtgggcttgttgctgctctggcaagcccctggtgcgtgggtcgcattagcgggcgcggcgttaaccggagccggatgttcgcttatctttcctgcgctgggcgtggaggtggttaaacgcgtcccctcacaagttcgcggcaccgcattgggcggttacgccgcgtttcaggatatcgccctcggcgtctccgggccgctggcgggaatgctggcgaccacgtttggttactcttcggtatttcttgccggggcgatctctgcggtgctgggaattattgtcacgatactgtcgtttcgtcggggttaa

SEQ ID NO: 260899 - DNA, 2007 bp, Klebsiella pneumoniae
gtgaaacacaacgccatacaacctgccaacctcgaatttaatgctgagggtacacctgtttcccgagattttgacgatgtctatttttccaacgataacggactggaagagacacgctatgtttttctcggaggtaaccaattagaggcacgctttcctgagcatccacatcctctgtttgtggtagcagagagcggcttcggcaccggattaaacttcctgacgctatggcaggcatttgttcagtttcgcgaagcacatccgcaagcgcaattacaacgcttacatttcatcagttttgagaaatttcccctcacccgtactgatttagccttagcgcatcaacactggccggaactggctccgtgggcggaacaacttcaggcgcagtggccaatgcccttgcccggttgccatcgtttattactcgatgaaggccgcgtgacgctggatttatggtttggcgatattaatgaactgaccagcaaactggacgattcgctaaatcaaaaagtagatgcctggtttctggacggctttgcgccagcgaaaaacccggatatgtggacgcaaaatctgtttaacgccatggcaaggttggcgcgtccgggcggcacgctggcgacatttacgtctgccggttttgtccgccgtggtttacaggaagccggcttcacgatgcaaaaacgtaagggctttgggcgcaaacgggaaatgctttgtggggtgatggaacaaacattacccctcccctgctccacgccgtggtttaaccgcacgggcagcaacaaacgggaagtggcgattatcggcggcggtattgccagcgcgttgttgtcgctggcgctattgcgtcgcggctggcaggtaacgctttattgcgcggatgaagcccccgcgctgggtgcttccggcaatcgtcagggggcgctgtatccgttattaagcaaacacgatgaggcgctaaaccgctttttctctaatgcgtttacttttgctcgtcggctttacgatttattgcccgtcaaatttgagcatgactggtgcggcgtcacgcagttaggctgggatgagaaaagccagcataaaatcgcacagatgctgtcgatggatttacccacagaactggctgttgcggtcggggcgaatgaggttgaaggcgttacaggtgtagtaacaaattgtggcggtattacatatccgcaaggtggatggctgtgtccagcagaactgacctgtaatgtcctggaactggcgcaacagcaaggtttacagattcattatcaatatcagttgcaggatttatcccgtaaggatgactgttggttgctgaattttgcaggagatcagcaagcaacacacaatgtagtggtactggcgaacgggcatcaaatcagcggtttcagccaaacgtcgtctcttccagtgtattcagttgctggtcaggtcagccatattccgacaacgccggaactggcaaagctgaaacaggtgctgtgctatgacggttatctcacgccacaaaatccggcgaatcagcaccattgtattggtgccagttatcatcgcggcagcgaagatacggcgtacagtgaggacgatcagcaacagaatcgccagcggttgattgattgtttcccgcaggcacagtgggcaaaagaggttgatgtcagtgataaagaggcgcgctgcggtgtgcgttgtgccacccgcgatcatctgccaatggtaggtaatgttcccgattatgaggcaacactcgtggaatatgcgtcgctggcggagcagaaagataaggcggtaagcgcgccggtttatgacgatctctttatgcttgctgctttgggttcgcgtggtttgtgttctgccccactgtgcgcagagattctggcggcacagatgagtgaagaaccgattccgatggatgccagtacgctggcggcgttaaatccgaataggttatgggtgcggaaattgttgaagggtaaagcagttaaggctgggtaa

SEQ ID NO: 260900 - DNA, 279 bp, Klebsiella pneumoniae
atgatcgcggagtttgaatcacgcattctggcattaatcgacggtatggttgaccatgccagtgatgatgagttgtttgccagtgggtatttgcgtggccacctgacattagccatcgcagaactggaaagtggtgatgaccactccgcccaggcggtacatacgaccgttagccagagtctggaaaaagccattggtgccggtgagttgtcgccgcgtgaccaggcgctggtgaccgatatgtgggaaaacctgtttcagcaggcgtcacagcagtaa

SEQ ID NO: 260901 - DNA, 810 bp, Klebsiella pneumoniae
atggaaacgtttaatagcctgtttatggtttccccgctgttgctgggagttctcttttttgtcgccatgctggcgggatttatcgactcgattgccggtggcggtgggttactcaccattccggcattgatggcggcggggatgtctcccgctaacgcgctggcaaccaataaactgcaagcctgcggtggctctatttccgccactatctactttattcgccgcaaagtggttagtttaagcgatcagaaactcaatatcgccatgacctttgtcggctcaatgagcggcgcattgctggtgcagtatgttcaggctgatgtcttacggcagattttgcccattctggtgatttgtatcggcctctatttcttgctgatgccaaagctgggtgaagaagatcgccagcgccggatgtacggtttacccttcgcgttaattgccggtggctgcgtcggtttttatgacggcttctttggtccggcagcgggatcgttttacgcgctggcctttgttacgctgtgcggattcaacctcgccaaagccacggctcacgccaaattactcaacgcaacgtcaaatatcggcggtttactgctgtttattctcggtggcaaagtgatttgggcgacaggattcgtgatgctggtggggcagttcctcggcgcgcgcatgggttcacgactggtgttgagcaaaggacaaaagctgatccgcccgatgattgttattgtctcagcggtgatgagtgccaaattactttacgatagccacggacaggagatcctccactggttggggatgaactaa

SEQ ID NO: 260902 - DNA, 825 bp, Klebsiella pneumoniae
atgaacaaaaccgcgattgcgctgctggccctgcttgccagtagcgccagcctggcagcgacgccgtggcaaaaaataacccaacctgtgccgggtagcgcacaatcgataggcagtttttctaatggttgtatcgtcggcgctgacacgctgccgatacagtccgaacattatcaggtcatgcgtaccgatcagcgtcgctatttcggacatccggatctggtgatgtttatccagcgtctgagtagccaggtgagcaatctgggcttgggcacggtgctgattggcgatatggggatgcctgctggtggtcgtttcaacggcggtcacgccagccaccagaccggactggatgtggacatcttcctgcaactgccaaaaacacgctggacctccgcgcagctcttgcgcccgcaagcgttagatttagtttcccgcgacggtaaacacgttgttccgacgctgtggaagccagaaattttcagcttgatcaaactcgccgcccaggacaaagacgtcacgcgcatttttgttaatccggcgattaaacaacaactttgccttgatgcgggcaccgatcgcgactggttgcgcaaagtgcgaccctggttccagcatcgcgcgcatatgcatgtacgattacgttgtcctgccgatagtctgaagtgtgaagatcaacctttaccgccaccaggcgatggttgcggggcagaactgcaaagctggtttgaacctccaaaaccgggaacaacaaagcctgagaagaagacaccgcctccgttgccgccttcctgccaggcgctactggatgagcacgtgatctaa

SEQ ID NO: 260903 - DNA, 855 bp, Klebsiella pneumoniae; identical to SEQ ID NO: 9642

SEQ ID NO: 260904 - DNA, 525 bp, Klebsiella pneumoniae; identical to SEQ ID NO: 9641

SEQ ID NO: 260905 - DNA, 471 bp, Klebsiella pneumoniae; identical to SEQ ID NO: 9640

SEQ ID NO: 260906 - DNA, 507 bp, Klebsiella pneumoniae; identical to SEQ ID NO: 9639

SEQ ID NO: 260907 - DNA, 750 bp, Klebsiella pneumoniae; identical to SEQ ID NO: 9638

SEQ ID NO: 260908 - DNA, 2640 bp, Klebsiella pneumoniae; identical to SEQ ID NO: 9637

SEQ ID NO: 260909 - DNA, 567 bp, Klebsiella pneumoniae; identical to SEQ ID NO: 9636

SEQ ID NO: 260910 - DNA, 603 bp, Klebsiella pneumoniae
gtgctgggtcggcttggttttgacttcgcccgcggcggccatgtacggcaccagagtcaggtgcatgaacagggtatgctcgcggccgatctctaccgccatctgacgaatcgcttcgaggaacggcagggattcgatatcgcctacggtaccgccgatttccaccagcacgacgtcatggccttcgccgcccgccagtacgcgctctttgatagcgttggtgatgtgcgggataacctgaacggtcgcgcccaggtagtcgccacggcgctctttgcgcagcacgtcggagtagatacggccggtggtgaagttattgcggcgcgtcatcttggtgcggataaaacgctcatagtggcccaggtccagatcggtttctgcgccgtcttcagtaacgaacacttccccatgctggattgggctcatggtgcccggatcgacgttgatatacggatccagtttcatgatggtcacgttgagaccacgggcttcaagaatggctgccagggaggctgcggcaatgcctttacccagagaggatacgaccccgccggtcacaaaaatatagttcgttgtcatgctgaacctgagaagttagggtaa

SEQ ID NO: 260911 - DNA, 372 bp, Klebsiella pneumoniae
atgacgctcggtgatggtcggctcgccgtaaagctggcgtaccagagaatcatcactcagctggcactgctgcgcgcccaggcgcatggtgccgcccagatcgctcttctcagagcggacttcaacgttgccatcttcgtcacgccattcggtaatcagggccacgaccgggtatttacagtctggcacaaattccgtcgagttggcattttccatacccgctacgttacgcgcgaactcaatcagcgcaacctgcatacccaggcagatgcccagataaggaatattgttttcacgcgcatagcgcgcggtggcgatcttgccttcaacgccgcggtagccgaagccacccgggatcaggatagcgtctaa

SEQ ID NO: 260912 - DNA, 1089 bp, Klebsiella pneumoniae
atgaacaaccgggagaaggagatccttgcaattttacggcgtaacccgctgattcagcagaacgaaattgctgatatgctgcaaatcagccgttcgcgcgttgcggcgcatattatggatttaatgcgcaaaggtcggattaaaggcaaaggttacattctcaccgagcaggaatactgcgtagtggtggggacaatcaatatggatattcgcgggatggcggatatccgttacccgcaagcggcttctcatcccggtacaattcattgctcggcaggcggcgttggacgcaatatcgcccacaatctggcgctgttaggccgcgacgtccatttgctttcagtgattggcgatgacttttatggcgaaatgctcctggaagaaacgcgccgcgccggcgtgaatgtctccggctgcgttcgtttacatggtcaaagcacatcgacgtatctggcaattgccaatcgagacgatcaaaccgtgctggcgattaacgatacccatctgctggaacagttgacaccgcaactactgaacgggtcgcgcgatttacttcgtcatgcgggcgtggtactggctgattgcaacctgacagccgaggcgctggagtgggtctttaccctcgctgatgaaatcccggtgtttgtcgataccgtttcagaattcaaagcgggcaaaatcaaacactggctggcgcatattcacaccctgaaacccactttaccggagctggaaattttatggggacaggcgatcaccagcgatgctgaccgtaataccgcagtgaatgcgttgcatcagcaaggcgttcagcaactgtttgtttatttgcccgatgagtcagtttattgcagcgaaaaggatggagaacaatttttgctgaccgcaccagcgcatacgacagtagacagttttggtgctgacgatggttttatggcgggcctggtatatagctttctggaaggaaacaatttccgtgacagcgcccgttttgcgatggcctgcgcggcaatttcacgcgccagcggcagcttaaacaaccctaccctgtctgccgataacgcgctttcattagtgccgatggtgtaa

SEQ ID NO: 260913 - DNA, 1251 bp, Klebsiella pneumoniae
atggatgtcatgagaagtgttctgggaatggttgtattgctggcaattgcgtttttgctgtcagtaaacaagaagaagatcagcctgcgtaccgttggcgcggcgttagtgttacaggtcgtgattggcggcattatgctttggttaccaccagggcgttgggtcgcagaaaaagtcgcttttggcgtgcataaagtgatggcgtacagcgatgcaggtagcgcatttatctttggttctctggtcggaccgaaaatggataccttatttgatggcgcaggatttatctttggtttcagggtattaccggcaattatcttcgttacagcactggtgagtattctctactacatcggtgtgatggggatcttaattcgcattctcggcggtatcttccagaaagcattaaatatcagcaagatcgagtcattcgtcgcggtcactaccattttcctcgggcaaaacgaaattccggcaatcgtcaaaccctttatcgatcggctgaatcgcaatgaattatttacagcgatttgtagtggcatggcctcgattgctggttcgacaatgattggttacgctgcactgggcgtgcctgtggaatatctgctggcggcatcgttaatggcgatccccggcgggatcttgtttgcccgcctgttaagcccggctaccgaatcttcgcaggtttcctttaataacctctctttcaccgaaactccgccaaaaagctttatcgaagcagcggcgagcggtgcgatgaccggactgaaaatcgccgcaggtgtggcgacagtggtgatggcatttgttgcaataattgcgttgattaacggtattatcggcggcgttggcggctggtttggttttgaacatgcctcgctggagtccattttaggttacctgttggctccactggcgtgggtgatgggggttgactggagtgatgcgaatcttgccgggagtttgattggacagaaactggcgattaatgaatttgtcgcttacctcaatttctcaccttatctgcaaacagctggcactctggatgctaaaaccgtggcgattatttccttcgcgttgtgcggtttcgctaactttggttctatcggggtggtggtgggggcgttttctgcggttgcgccacaccgtgcgccggaaatcgcccagcttggtttacgcgcgctggcggcggcgacactttctaacctgatgagtgccaccattgcaggattctttattggcttagcgtag

SEQ ID NO: 260914 - DNA, 942 bp, Klebsiella pneumoniae
atggaaaagagaaaaattattctggattgtgatccgggtcatgatgatgctattgccataatgatggcagcgaaacatccggcaatagatttattaggcatcaccattgtggcgggtaatcagacgcttgataaaacattaattaatggcctgaatgtttgccagaaactggagattaatgttccggtttatgcggggatgccacagcccattatgcgtcaacaaatcgttgccgataatattcacggtgaaaccggactggatggcccggtattcgagccgctgacccgccaggcagaaagcactcatgcggtgaaatatatcatcgataccctgatggcaagcgatggcgatatcactctggtgccggttggtccgctttcaaatatcgcggtggcaatgcgcatgcagcccgcaatcctgccgaaaatccgtgaaattgtgctgatgggcggcgcttacggtactggcaactttacgccatccgccgagttcaacatctttgctgacccggaagccgcacgcgtggtgttcacctccggcgttccgttggtgatgatgggcctcgatctcaccaaccagaccgtttgcaccccggacgtgattgcccggatggaaagggcaggcggccctgccggagagctgttcagcgacatcatgaacttcactctcaaaacccagttcgaaaactatggcctggctggcggcccggtgcacgacgccacctgcatcggttatctgatcaaccctgatggcattaaaacccaggatatgtacgtcgaagtggatgttaacagtggcccttgctatgggcgtaccgtctgcgacgagctgggcgttcttggcaagccagccaataccaaagtcggcatcactattgataccgactggttctggggcttagtcgaagagtgcgtgcgcggctacatcaaaacccattaa

SEQ ID NO: 260915 - DNA, 699 bp, Klebsiella pneumoniae
gtgaaagaaatccacaataatgaccttaagcagcaattgatgagtgaatccgcgtttaaggattgcttttcaacggatgtttcagccgatacgcggctgtttcattttttagcgcgtgactacattgtgcaggaagggcaacagccgtcctggctgttttacctgacgcgaggccgcgccaggctttacgccacgctagctaatggtcgcgtgtcgctgatcgatttctttgccgctccctgttttattggcgagattgagttaatcgacaaagaccatgaaccgcgtgcggtacaggctattgaagagtgttggtgccttgcgctccctatgaaacattaccgtccgctgttattaaacgacacgctatttttacgaaaactctgcgtcaccttaagccataaaaattatcgcaatattgtttctttaactcagaatcaatcatttccgttagtgaatcgcctggcagcttttatattactctcgcaggaaggtgatctttatcacgaaaagcatacgcaagcggcagagtatttaggcgtttcttatcgacatcttttatatgttctagcgcaattcattcacgacggtttattaattaaaagcaagaaagggtatctaattaaaaacagaaagcagttgtcaggactggcactggagatggacccggaaaataaattctcagggatgatgcagtaa

SEQ ID NO: 260916 - DNA, 942 bp, Klebsiella pneumoniae
atgcgcgaaaaggattatgtcgtaattataggttcggcgaatattgatgtcgccggatattcacatgaatcattaaattatgcggattcaaatccaggtaaaataaaatttacgcctggtggagtagggcgcaatattgcacaaaacctggcgttgctggggaataaagcctggctactgagcgcagtaggcagtgatttttatggtcaatcgttgctaacgcaaaccaatcaatctggtgtttatgtcgataaatgcctgattgtgccgggagaaaatacgtcgagctatttatcattactcgataataccggtgaaatgctggttgctataaatgacatgaatattagcaacgctattacagctgaatatctcgcacagcacggtgaatttattcagagggcaaaggtcattgtcgcggactgtaatatcagtgaagaggcactggcatggattctggataatgccgccaacgtacccgtatttgtcgatcctgtttccgcgtggaaatgtgtcaaagtgcgcgaccgtctaaatcaaatccacactctcaagccaaaccgccttgaagcggaaaccctgagtgggattgctttgtcagggcgtgaagatgtggcaaaagttgctgcctggttccatcaacatggcctgaaccgactggtattgagcatgggcggcgacggcgtttattacagtgatatcagcggtgaaagtggttggtctgtgccgatcaaaaccaatgtcattaatgttaccggagcgggcgatgccatgatggctggacttgcttcgtgttgggtagacggaatgccgtttgccgaatctgttcgtttcgcacagggatgttcgtcaatggcgctctcctgtgaatacaccaataaccccgatttatcgattgccaacgttatatcgttagtggagaacgcagaatgtctgaattaa

SEQ ID NO: 260917 - DNA, 939 bp, Klebsiella pneumoniae
atgagcagacgtgttgctactatcacccttaatccggcttatgaccttgttggtttctgcccggaaattgaacgcggcgaagtgaacctggtgaaaaccaccggtctgcatgcggcgggtaaaggcatcaacgtggccaaagtgttaaaagacctgggaattgatgtcactgttggcggcttcctcggtaaagacaatcaggatggttttcagcaactgttcagcgagctgggcattgccaaccgtttccaggttgtacaggggcgcacccgaattaacgttaagctgacggaaaaagacggcgaagtgaccgacttcaacttctcgggttttgaagtcactcccgccgactgggaacgctttgtgactgattctctgagctggctcggtcagttcgatatggtctgtgtcagcggaagcttaccgtcaggcgtcagcccggaagcgttcaccgactggatgactcgcctgcgtagtcagtgtccttgcattatctttgatagtagccgtgaagcgttagtagcaggtttgaaagcggcaccgtggctggtgaaacctaaccgccgcgagctggaaatctgggcaggccgtaaactgcctgaaatgaaagatgtgattgaagctgcacatgcgctacgtgaacaaggtatcgcgcatgtcgttatttcactgggtgccgaaggcgcgctttgggttaatgcctccggcgaatggatcgccaaaccaccgtcagtcgatgtcgtaagcaccgttggcgcaggggattctatggttggtggcctgatttatggcttgctgatgcgtgaatccagtgaacacacactgcgtctggcgacagctgttgcagccctggcggtaagtcaaagcaatgtgggtattaccgatcgtccgcagttggccgcaatgatggcgcgcgtcgacttacaaccttttaactga

SEQ ID NO: 260918 - DNA, 1131 bp, Klebsiella pneumoniae
atgttccagttatccgtacaggacatccatccgggcgaaaaggccggagacaaagaagaggcgattcgccaggtcgctgcggcgctggtgcaggccggtaatgtagctgaaggctacgtcaatggcatgctggcgcgcgaacagcaaacctctacgttcctcggcaatggtattgctattccacacggcactaccgacacccgcgatcaggtgctgaaaaccggcgttcaggtatttcagttcccggaaggcgtcacctggggtgacggccaggtagcgtacgtggcgatcggtattgctgccagctcggatgaacatttgggcctgctacgccagctgacccacgtactgagcgatgattccgttgctgaacaactgaagtcagcaacaacagcagaagaacttcgcgcattgctgatgggcgaaaagcagagtgagcagctgaagctcgacaacgaaatgctgacgctggatatcgtcgccagcgatctgctgactcttcaggcgctgaacgctgctcgtctgaaagaggcgggggcagttgacgccactttcgtcaccaaagccatcaatgaacaaccgctgaacctcggacagggtatctggctgagcgatagcgccgaaggcaatctgcgtagcgcgattgcggtaagccgtgcggcaaatgcttttgatgtggacggcgaaacggcagccatgctggtgagtgtggcgatgaatgacgatcagcccattgcggttctaaagcgtctcgctgatttgttactcgacaataaagctgaccgcttgctgaaagcggatgcggcaacgttgctggcgctgctgaccagcgatgatgcgccgaccgacgacgtgttaagcgcggagtttgtggtgcgcaatgaacacggcctgcatgctcgtccaggtaccatgctggtcaataccattaaacaatttaacagtgatattaccgtgacaaaccttgatggcaccggcaaaccggcaaacggacgtagtctgatgaaagttgtggcacttggcgttaagaaaggtcatcgcctacgctttaccgcccagggtgcagatgctgaacaggcgctgaaagccattggcgacgctatcgctgctggtcttggggagggcgcataa

SEQ ID NO: 260919 - DNA, 1182 bp, Klebsiella pneumoniae
atgcataactcccccgcagtctccagcgcgaaatcgtttgacctgacctcgatggcgtttttaatcgttgcctttctcaccggtattgcgggcgctctacaaaccccgacactcagtatttttcttactgatgaagtacatgcccgcccggcgatggtgggattcttctttaccggcagcgctgtcattgggattctggtaagtcagtttctcgccgggcgctctgataagcgcggcgatcgcaaatcgctgattgtcttttgctgcctgttaggcgtgctggcctgcactctttttgcctggaatcgcaactactttgttttgctattcgttggcgtctttcttagcagctttggctcgactgctaacccgcaaatgtttgccctcgcccgtgaacatgctgacaaaaccggacgtgaagcggtgatgttcagctcttttttacgcgctcaggtttcactggcatgggtcattggcccgccgctggcttatgccttagcgatgggtttcagctttacggtaatgtatctgagcgcagcggtagcgtttattgtttgcggtgtgatggtgtggctgtttttaccgtcgatgcaaaaagaacttccactggcgaccggcacggttgaagcgccgcgccgtaaccgtcgcgatacgctgctgctgtttgtcatttgtacattgatgtggggctcgaacagcctgtacatcatcaacatgccgctatttattatcaacgaactgcatcttcccgagaaactggccggtgtgatgatggggaccgccgccgggctggaaatcccgaccatgttgattgccggatatttcgccaaacgtttgggtaagcgtttcttaatgcgcgttgctgccgtgggtggcgtctgtttttacgcaggaatgctgatggcgcattcacctgtcattctgttgggcttgcagctgcttaatgctatttttattggcattctgggcggcatcgggatgctctattttcaggatttgatgcccggtcaggcaggttcagccaccacgctctataccaacacttcgcgcgtgggctggatcatcgcaggatcagtggcgggcatcgtcgccgagatctggaattatcacgctgtgttctggtttgcgatggtgatgattatcgccactctgttttgcttactgcggattaaagatgtttaa

SEQ ID NO: 260920 - DNA, 255 bp, Klebsiella pneumoniae
atggaatgccgtccgggttgcggggcgtgttgcactgccccttcaatttccagccctattcccggtatgccagatggcaagcccgccaatacgccctgcattcagcttgatgaacagcaacgctgtaaaattttcacctcgccactgcgaccgaaagtttgtgcgggcttacaagccagcgctgaaatgtgcggtaactcgcgtcagcaggcaatgacctggcttatcgatctggaaatgctgaccgcgccttaa

SEQ ID NO: 260921 - DNA, 573 bp, Klebsiella pneumoniae
atgccaagagcgaacgaaattaaaaaaggtatggtactgaattacaacggcaaactgctgctggttaaggacattgatattcagtcgcccactgcccgcggtgccgctacgctgtacaaaatgcgtttttctgatgtccgtaccgggctgaaagtagaagagcgtttcaaaggagatgatatcgttgacaccgtgactctgacccgccgttacgttgacttctcctatgtcgatggtaacgaatatgtctttatggataaagaagactataccccgtataccttcaccaaagatcagattgaagaagagttgctgtttatgccagagggcggcatgccggacatgcaggtgctgacctgggacggtcaactgctggcgcttgagctgccgcagaccgttgatctggaaatcgttgaaaccgcacctggcatcaaaggggcatctgccagcgcccgtaacaaaccggcgacattgagcactggtctggtgattcaggtaccagaatacttaagcccgggcgaaaaaattcgtatccatatcgaagaacgccgttatatggggcgtgctgactaa

SEQ ID NO: 260922 - DNA, 1467 bp, Klebsiella pneumoniae
atgaatacaatcgcctccgttacgctcccgcatcatgtacacgctccacgctacgatcgccagcagttgcaatcacgtatcgttcattttggctttggtgcctttcaccgcgcacatcaggcattactgaccgatcgtgtgctgaatgcccagggcggcgactgggggatctgtgaaatcagcttgttcagcggcgatcaactgatgagccagctccgcgcacagaaccatttatataccgtgctggagaaaggggcggacggcaatcaggcgataattgtcggtgccgttcacgaatgcctgaatgcaaaactggattccttagcggcaattattgagaagttttgcgagccacaggtggcaattgtttccctgacgattaccgaaaaaggctattgtattgacccggccaccggtgcactcgacaccagcaatccgcggattattcacgatctacaaaaccctgaagaacctcactccgcgccgggtattctcgtcgaagcactgaaacgacgccgtgaacgcggccttgcaccgtttaccgtactctcctgcgacaatattcccgacaatggccatgtggtgaaaaacgcggtgctggggatggcggaaaaacgttcaccagaactcgccgggtggataaaagaacacgtcagttttccgggaaccatggtcgaccgcattgttccggctgcaaccgacgaatcactagcggaaatcagccagcatctgggggtgaatgatccctgcgcgattagctgcgaaccgtttatccagtgggtggtggaagataacttcgtcgctgggcgtcctgcctgggaagtcgcaggtgtacaaatggtgaatgatgtcctgccatgggaagagatgaaactgcgtatgcttaatggcagccactcttttctcgcttatctgggttacctctcaggattcgcccatatcagtgattgcatgcaggatcgcgcatttcgccatgccgccagaacattaatgctggatgagcaagcgccaacactgcgaattaaagatgtcgatttaacacaatatgcggataagttaattgcacgttttgctaacccggcgctgaaacataagacctggcaaatcgcaatggatggtagccagaaattaccgcaacgtatgctggcaggtattcgcatacatctggcgcgcgaaacggactggtcgttgctggcattaggcgttgcaggctggatgcgttacgtcagcggcgttgatgatgccggaaatgccattgatgttcgcgatccgcttagcgataaaattcgcgaacttgttgcgggcagtagcagtgaacaacgcgtcaccgccctgctttccctgcgtgaagttttcggtgatgatctgccagataacccgcattttgtgcaggctatcgaacaagcctggcaacaaatcgcacaattcggcgcgcatcaggcgctattaaacaccctcaaaatttaa

SEQ ID NO: 260923 - DNA, 987 bp, Klebsiella pneumoniae
gtgaccaggaccaacctcatcaccggttttctcggcagcgggaaaactacgtcgattcttcatctgttagcccataaagatcccaacgaaagatgggcggtactggttaatgaatttggggaagtcggaattgatggtgctttgctcgccgatagcggcgcattgctgaaagagatccccggcggctgcatgtgctgcgttaatggtttacccatgcaggtaggattgaataccttactgcgtcagggaaaaccagaccgcttgttgatagagccgaccgggctgggccatccgaaacaaatcctcgatctcttaaccgcaccagtctatgaaccgtggatagatctgcgcgccacgttgtgcattctcgatccacgcctgctgctggacgaaaaaagcgccagcaatgaaaacttccgtgaccagctggctgccgcagacattattgtcgccaataaatccgaccgtgcgacgcccgaaagtgagcaagcgctacagcgctggtggcagcaaaatggtggcgatcggcaattaattcacagcgagcatgggaaaattgacggtcatcttctggatttgccgcgtcgcaatttagccgagttgcccgccagcgccgcacattctcatcatcatagcgtgaaaaaagggttagcagcgttaagcctgccagagcatcaacgctggcgtcgcagtctgaacagcggacaagggcatcaggcttgtggctggatattcgacgctgatacggtattcgacaccattggcattctggaatgggcgcgacttgcaccggtggaacgcgtcaaaggcgtgatgcgtattcccgaagggctggtgcgaatcaaccgtcagggcgatgacctgcacattgaaacgcaaaacgttgcgccaccggacagtcgtattgagctgatttccagcagcgaagctgactggaatgccttgcagagcgcgctgttgaagcttcgtttagcgactaccgcgtaa

SEQ ID NO: 260924 - DNA, 714 bp, Klebsiella pneumoniae
atgattaaaaatttgccgcaaatagtgttgttgaatattgtcggcctcgcgctgtttctttcctggtatattcccgttaatcatggattctggttgccgattgatgcggatattttttatttctttaatcagaaactggtcgaaagtaaggcctttttgtggctggttgcattgaccaacaatcgcgctttcgacggttgttctctgctggcgatgggaatgttgatgctgagtttctggctgaaagaaaacgcccctggcagacgacgtatcgtgattattggtctggtcatgctattaactgcagtggtattaaaccagctgggtcaggcattaattcctgtaaaacgggccagcccaacattgacttttaccaatattaaccgcgtcagcgaactgctctctgtccccacgaaagatgcctcacgagatagctttcccggtgatcacggtatgatgctgcttattttttcggcattcatgtggcgttatttcggcaaagttgcaggccttatcgcccttattatttttgtggtttttgcatttcccagagtaatgattggcgcacactggtttactgacatcattgtaggttcgatgaccgtgatattgatcggtttgccctgggtgttgctgacgccattaagtgatcgattaatcaccttttttgacaaatcactaccgggaaaaaacaaacatttccaaaacaaataa

SEQ ID NO: 260925 - DNA, 567 bp, Klebsiella pneumoniae
atggtcaaatctcaaccgattttgagatatatcttgcgcgggattcccgcgattgcagtagcggttctgctttctgcatgtagtgcaaataacaccgcaaagaatatgcatcctgagacacgtgcagtgggtagtgaaacatcatcactgcaagcttctcaggatgaatttgaaaacctggttcgtaatgtcgacgtaaaatcgcgaattatggatcagtatgctgactggaaaggcgtacgttatcgcctgggcggcagcactaaaaaaggtatcgattgttctggtttcgtacagcgtacattccgtgagcaatttggcttagaacttccgcgttcgacttacgaacagcaggaaatgggtaaatctgtttcccgcagtaatttgcgtacgggtgatttagttctgttccgtgccggttcaacgggacgccatgtcggtatttatatcggcaacaatcagtttgtccatgcttccaccagcagtggtgttattatttccagcatgaatgaaccgtactggaagaagcgttacaacgaagcacgccgggttctcagccgcagctaa

SEQ ID NO: 260926 - DNA, 1557 bp, Klebsiella pneumoniae
atgttcatacgcgctcccaattctggacgtaagctcctgcttacctgcattgttgcaggcgtgatgattgcgatactggtgagctgccttcagtttttagtggcctggcataagcacgaagtcaaatacgacacactgattaccgacgtacaaaaatatctcgatacctattttgccgacctgaaatccactactgaccggctccagccgctgaccttagatacctgccagcaggctaaccccgaactgactgcccgcgcggcatttagcatgaatgtccgtacgtttgtgctggtaaaagataaaaaaacattctgttcatctgcgactggtgagatggacattccactcaatgaattgattccggcgctcgacattaataaaaacgtcgatatggcgatcttacccggcacgccgatggtgccgaacaaacccgcaatcgtcatctggtatcgcaaccctttgctgaaaaatagcggcgtgtttgccgctctgaatctcaatctgacgccttctctcttttatagttcacggcaggaagattacgatggcgtcgccctcattattggcaatactgcgctatctaccttttcttcacgtttgatgaacgttaatgaattaaccgacatgccggtccgtgaaactaaaattgcgggcattcctctgaccgttcggctttatgcagatgactggacatggaacgatgtgtggtacgcatttttactgggcggcatgagtggaactgtcgttggcctgctctgctattacctgatgagcgtacgtatgcgccccggcagagaaatcatgaccgccatcaagcgcgaacaattttacgtggcgtatcaaccggtggtggatacacaatctttgcgagtaacgggcctggaagtactgctacgctggcggcatcctgtcgcgggagaaatacccccggatgccttcattaactttgccgaatcgcaaaagatgattgtgccactgactcagcacctgtttgagttgattgcccgcgatgccgcagaattagaaaaagtactgccggtaggcgtcaaatttggcattaacattgcgccggaccatctgcacagcgaaagctttaaagcagatatccagaaactgctcacttccctgcccgcacaccatttccagattgtgctggaaattaccgagcgcgatatgctgaaagagcaagaagccacgcaactctttgcctggctacactcggtcggcgtagaaattgctattgatgacttcggtaccgggcacagcgcgcttatctaccttgagcgttttacgctcgattatctgaaaattgaccgtggatttatcaacgccatcggtacggaaacgatcacttcacccgtacttgacgcggtgctgacgctggcgaaacgtctcaatatgctgacggttgctgaaggggtcgaaacgccggaacaggcgcgatggctaagcgaacgcggcgttaatttcatgcaaggctactggattagtcgcccgttaccgctggacgattttgtccgctggctgaagaaaccgtatacgccgcagtggtaa

SEQ ID NO: 260927 - DNA, 1815 bp, Klebsiella pneumoniae
atgattgtgcgcatactgctgctgtttatcgctctgttcacctttggtgcgcaggcgcaggctatcaaggaaagctatgcctttgccgtgctgggcgaaccccggtacgcgtttaatttcaaccattttgattatgtgaaccccgccgcgccaaaaggggggcagataacgttgtcagccctcggcaccttcgataatttcaaccgctatgcactgcgcggcaacccgggcgcacgcaccgagcagctgtacgacacgctatttacaacttccgatgacgaaccaggcagttattacccgctgattgctgaaagtgcacgctatgctgacgattattcctgggtggaggtcgctattaatccgctcgcccgttttcatgatggttcgcccattactgcccgcgatgtagagtttacttttcaaaaatttatgaccgaaggcgtgccgcaatttcgtctggtctacaaaggcaccaccgtcaaagccattgcgccgttaaccgtgcgcattgagttagctaaacccggcaaagaagatatgctgagtctgttttcgctgccggtgtttccagaaaagtactggaagaatcacaaacttagcgacccgctcgccacgcctccgcttgccagtggtccgtaccgaattacgtcctggaaaatggggcaaaatattgtctattcccgcgtgaaagattactgggcagcaaacttaccggtaaaccgtggacgctggaatttcgacaccattcgctacgattattacctcgatgataatgtcgcctttgaagcgtttaaagccggtgcctttgatttgcgtatggaaaacgacgccaaaaactgggccacgcgctataccggtaaaaatttcgataagaaatacatcatcaaagatgagcaaaagaacgaatcagcccaggatacgcgctggctggcgtttaatatccaacgtccggtattcagcgatcgccgggtgcgggaagcgatcactctcgcctttgactttgaatggatgaacaaagcgttgttttacaatgcctggagtcgcacgaacagttattttcagaataccgaatacgcggccagaaattaccccgacgccgcggagctggtgcttctggcaccaatgaaaaaagatctaccgccagaagtcttcacgcaaatctaccagccgccggtatccaaaggcgatggctacgatcgtgacaacctgttaaaagccgacaaacttctcaacgaagcgggctgggtgctgaagggtcagcaacgcgtaaatgccacaacgggtcagccgctcagctttgagttattgctaccttcgagcagcaatagtcagtgggtattgccgttccagcacagcctgcaacggctgggtatcaacatggacattcgcaaagtggataactcgcaaatcaccaaccgcatgcgcagtcgcgactatgacatgatgccgcgcgtatggcgggcgatgccgtggcccagttccgatttacagatttcctggtcatcggaatatatcaattccacttataatgcccccggcgtgcaaagcccggttatcgactcgctgatcaaccaaattattgccgcgcagggaaataaagaaaaattactgccgttggggcgagcactggatcgcgtattaacgtggaattattacatgctgccaatgtggtacatggcggaagaccgtctcgcctggtgggataaattctcccaacccgctgtacgccctgtttacagcctgggtatcgatacctggtggtatgacgttaataaagcggccaaactgccgtcagccagacaacagggagagtag

SEQ ID NO: 260928 - DNA, 1095 bp, Klebsiella pneumoniae
atgggcgcttatctgattcgccgtctgttgctggtgatcccaacgttatgggcgattatcactatcaactttttcatcgtgcaaattgcgcctggcggtccggtcgaccaggccatcgccgccattgagtttggtaatgccggagtattacccggcgcaggcggtgaaggtgttcgcgccagccatgcgcaaacgggcgtcggcaatatcagcgacagtaattaccgtggcggacgcggattagatccagaagtgatcgccgagatcactcatcgctacggtttcgataagccgatccacgaacgttacttcaaaatgctctgggactacatccgctttgattttggcgacagcctttttcgcagcgcctcggtactgacgctgattaaagatagtctgccggtttccatcaccctcggattatggagcacgctgattatctatctggtgtcgattccgttaggcattcgcaaagctgtttataatggtagtcgctttgacgtctggagtagtgcatttatcatcatcggctacgccattccggcctttttgtttgccatcctgctgattgtcttcttcgcaggcggcagctatttcgacctgttccctctacgcggcctggtttccgctaactttgattcgctgccgtggtatcagaaaatcaccgattatctgtggcatatcacgctgccggtgctggcgacagtgattggcggctttgcggcgctgaccatgctgacaaaaaactcattccttgatgaagtgcgcaagcaatacgtggtgaccgcccgtgcgaaaggggtaagtgaaaaaaatattctctggaaacatgtgttccgcaacgccatgctgctggtgattgccggttttccggcgacgtttatcagcatgttttttaccggctcgctgctgattgaggtgatgttttcactcaatggtcttggcttactgggctacgaagcgaccgtctcgcgcgattatcctgtaatgtttggtaccttgtatattttcaccctgattggcctgctgctgaatattgtcagtgatatcagctatacgctggtcgatccgcgtatagattttgagggacgttaa

SEQ ID NO: 260929 - DNA, 1026 bp, Klebsiella pneumoniae
atgtcgcgactcagccccgtcaatcaggcccgttgggcgcgttttcgtcataaccgtcgcggctactggtcgttatggattttcctcgttttgtttggtttgagtttgtgttctgaactgatcgccaacgataaaccgttgctggtacgttatgacggcagttggtatttcccgttgttgaaaaactacagcgaaagcgattttggcggcccgctggcaagccaggctgattatcaggacccgtggctgaaacagcggttggaagataaaggctgggtactatgggcaccgattcgctttggcgctaccagtatcaacttttctaccgacaagcccttcccctccccaccctcccggcaaaactggctgggaacggatgccaatggcggcgatgtgctggcacgtattctctatggcacgcggatctcagttctgtttggcctgatgctgaccctctgctccagcgtgatgggcgtgctggcgggggcgctacaaggctattacggcggtaaagtcgatctctgggggcaacgttttattgaagtatggtcggggatgccgacgctgtttttgattattttactttccagcgtcgtacagcctaacttctggtggctgttggcaattaccgtcttgtttggctggatgagtctggtcggcgtggtgcgggcggagtttttacgtacccgtaatttcgactacatccgcgcggcgcaggcgcttggcgtcagcgatcgcagtatcatcctgcgtcatatgttgccaaatgccatggtcgctaccctcacctttttaccgtttattttatgtagttcgatcaccaccctgacctcactcgatttcctcggcttcggtctgccgctcggttcaccgtcactcggcgaactgctgttacaagggaaaaataaccttcaggccccgtggcttgggatcaccgccttcttgtcggtggcgatattgttgtctttgctgatctttattggtgaagccgtccgcgacgcatttgatcctaataaggcggtgtag

SEQ ID NO: 260930 - DNA, 1590 bp, Klebsiella pneumoniae
atgacgcaaactctgttagcgattgaaaatttgtcggtgggttttcgccatcagcaaaccgtacgtacagtagtcaatgatgtttcacttcagattgaggctggcgaaacgctggcgctggtgggtgagtcaggttcaggcaaaagcgttaccgcgctgtcaattttacgcctgctcccttccccgccggttgaatatctctccggcgatattcgttttcatggcgaatcgctgcttcatgccagcgatcaaacgttgcgcggtgtacgcggtaataagatcgccatgatttttcaggagccgatggtgtcattaaatccattgcataccctggaaaaacagctttatgaagtgctttcactccaccgcgggatgcgtcgggaagcggctcgtggcgaaattcttaactgccttgatcgcgtcggtatccgccaggcggcaaaacggctgacagattatccgcatcagctctccggcggcgaacgccagcgggtgatgattgcgatggcgctgttaacgcgacctgaattattaattgccgatgaaccaaccaccgcactggacgtctctgttcaggcgcaaattttacagctgttgcgcgaactgcaaggcgagctgaatatgggtatgctgtttattactcataacctcagcattgtcagaaaactggcccatcgcgtggcggtaatgcaaaacggtcgctgtgtcgagcaaaataacgccgctacgctatttgcctcacccactcatccttacacacaaaagctactcaacagtgaaccgtcaggcgacccggtaccattgccagaacctgcctcaacgttgctggatgttgaacagcttcaggttgccttccccattcgcaaagggattttgaagcgcattgtggatcataatgtggtggtgaaaaacatcagttttacgctacgagcgggtgaaacactgggtttagtaggcgagtcaggttccgggaaaagcacgacgggactggcgctgctgcgactgattaactctcagggcagcattatctttgacggtcagccactgcaaaatttaaatcgtcgccagctgttacctattcgtcatcgcattcaggtggtatttcaggatccaaactcctcgctcaacccacgactcaacgttttgcagattattgaggaaggcttacgggttcaccagccgacgctttctgccgcacaacgcgaacaacaagtgatagccgtgatgcatgaagtgggattagatcctgaaacacgccaccgttatccggcggagttctctggtggtcagcggcaacgtattgcgattgccagggcgttaattcttaagccctcgctgatcattcttgatgaaccaacatcatcgctcgacaaaacggtacaggcgcaaatattgacgctattgaaatcattgcaacaaaagcatcaactggcctatttgtttatcagtcacgatttgcacgttgtccgcgcgttatgtcatcaggttatcgtactgcgacaaggggaagtagtggaacaaggaccgtgcgcgcgcgtgtttgccgcaccgcagcaggagtatacgcgtcagctactggcgttgagctga

SEQ ID NO: 260931 - DNA, 345 bp, Klebsiella pneumoniae
gtgacttcattacaactctcaatcgtccatcgactgccgcagaactatcgctggtctgctggtttcgcaggttcgaaggttgaaccgattccgcaaaatggaccgtgcggtgacaacagcctggtggcgcttaaattgcttagcccggatggtgataatgcatggtcggtgatgtacaaactcagccaggcgttaagcgacatcgaagttccatgttcggtactggagtgtgaaggtgagccgtgcctgtttgtaaatcgccaggacgagtttgctgcaacatgccgattgaaaaattttggtgtggcaattgccgaacccttctcaaactacaatcctttttaa

SEQ ID NO: 260932 - DNA, 1191 bp, Klebsiella pneumoniae
gtgaccacccgacagcattcgtcgtttgctattgtttttatccttggcctgctggccatgttgatgccgctgtcgattgatatgtatctgcccgcgctaccggtaatttcagcgcagtttggcgtaccggcaggcagtacgcagatgaccctcagtacttatattctgggctttgcgttggggcagttaatctacgggccgatggcagacagcttcgggcgtaagccggtggttcttggcggtacgctggtgtttgccgccgccgcggtggcgtgtgcgttggcaaacaccatcgatcagctgattgtgatgcgtttcttccacgggctggctgcggctgcggccagcgtggtcattaatgccctgatgcgcgatatttacccgaaagaagagttctcgcggatgatgtcgtttgtcatgctggtgaccactattgcaccgttgatggcaccgattgtcggcggttgggtgctggtgtggctgagctggcattacatcttctggatcctggcattagcggcgattctggcttcggcaatgattttcttcctgattaaagaaacgttgccgccagagcgtcgtcagccatttcacattcgtaccactattggtaactttgcggcgctgttccgtcataagcgtgtcctgagttatatgcttgccagtggtttcagctttgccgggatgttctcgttcttaagcgccggaccgtttgtctacattgaaattaaccacgtcgcgccggaaaactttggttattactttgcgctaaacattgttttcctgttcgtgatgactatctttaacagccgcttcgtccgccgaattggcgcgttaaatatgttccgctcggggttgtggatacagtttattatggcggcgtggatggtcatcagtgcgctgctggggctgggattctggtcgctggtggttggcgttgcggcgtttgtgggctgcgtgtcgatggtgtcatctaatgcgatggcggtcattcttgatgagtttccccatatggcgggaacggcatcttcgctggcaggaaccttccgtttcggcataggggcaattgttggcgcattactttctcttgcgacctttaactctgcatggccgatgatttggtcaattgcattctgcgcaaccagctccattctcttctgtctgtacgccagtcggccgaaaaaacggtga

SEQ ID NO: 260933 - DNA, 696 bp, Klebsiella pneumoniae
atgcgacttgataaatttatcgcacagcaactcggcgttagccgtgctattgccgggcgtgaaatccgcggcaatcgtgtcaccgtcgatggcgaaatcgtccgtaatgcagcgttcaaactgctccctgaacatgatgtcgcttacgatggcaacccgctggcgcagcaacacggtccacgttacttcatgctcaataaacctcagggctatgtttgctccacggacgacccggatcacccaacggtgctctattttcttgatgaaccggtagcgtggaaactgcacgctgcagggcgtctggatatcgataccaccggtctggtactaatgacagatgatggtcagtggtcgcaccgcattacttctccgcgccatcattgcgagaagacctatctggtgacgctggaatcacccgtagctgacgatacggcagagcaatttgctaaaggcgtgcagctgcataacgaaaaagatctcactaagccggcggtgctggaagtgattaccccaacgcaggttcgtttgaccatcagcgaagggcgttatcatcaggtgaaacgtatgttcgccgccgtgggtaaccatgtggttgagctgcatcgtgaacgtattggcggcattacgctggatgctgatttagctcccggtgaatatcgtccgttaactgaagaagaaattgccagcgtcgtctaa

SEQ ID NO: 260934 - DNA, 1761 bp, Klebsiella pneumoniae
atgatttttacactccgcccatatcagcaagaagccgtggatgccacgctcaaccattttcgtcgtcataaaacccctgccgttatcgtgctgcccaccggtgcaggtaaaagcctggtgatagcggaactggcgcggctggcgcgtggtcgcgtgctggtgctggcacacgttaaagaactggtggcgcaaaaccatgcaaaatatcaggcgctggggctggaagccgatatttttgccgccgggctaaagcgcaaagagagccacggtaaagtggtatttggcagcgtgcagtcggtcgcccgtaatcttgatgcctttcagggtgaattttcgctgttgattgtcgatgaatgtcaccgtattggtgacgatgaagagagccagtatcagcaaatcctcactcacctgacaaaagtgaatccccacttacgcctgctggggctgactgccacgccttttcgattgggcaaaggctggatctaccagttccattatcacggcatggtacgcggcgatgagaaagcccttttccgtgactgcatttatgagctgccgctgcgttatatgattaaacacggctatctgacgccgccagaacgactggatatgccagtagtgcaatacgatttcagccgcttgcaggcacagagtaacgggcttttcagcgaagccgatctcaaccgcgagctgaaaaaacagcaacgtattaccccgcacatcatcagccagattatggagttcgccgaaaagcgtaaaggagtgatgattttcgccgccaccgttgaacacgccaaggagatagtgggactgctgcctgccgaagatgcagcactgattactggcgacacacccggcgctgagcgcgatgtgttaattgaagattttaaagcccagcgttttcgctatctggtcaacgtcgcggtactgaccactggatttgacgccccgcacgtcgatcttattgctattctgcgccctaccgaatcggtgagtctttaccaacaaattgtcgggcgcggtctgcgtctcgctccaggcaagactgattgcttaattcttgattatgcgggtaaccctcacgatctctacgcgccggaagttggtacaccgaaaggcaaaagtgacaacgttccggtacaggttttctgccctgcctgcggttttgccaacaccttttgggggaaaacgaccgccgacgggacattgattgaacactttggtcgccgctgtcagggatggtttgaagatgacgacggtcatcgagaacagtgtgatttccgtttccgttttaaaaattgcccgcaatgtaacgcggaaaacgatattgccgcccgccgctgccgcgaatgtgacaccgtactggttgatccggatgatatgttaaaagcggcgctacgactgaaagacgcgctggtattacgctgtagcggcatgtctttgcagcatgggcacgacgagaaaggcgaatggttgaaaatcacctattacgatgaagacggcgcggatgtgagtgagcgtttccgtctgcaaacgcccgctcagcgtaccgccttcgagcagctttttatccgcccgcatacgcgcacaccgggcatccctctgcgctggatcaccgccgctgatatcctcgcccagcaagcattactgcgacacccggattttgtcgtcgcccgcatgaaaggtcagtactggcaagtgcgtgaaaaagtgttcgattacgaaggtcgttttcgtcgggcgcacgaattacgcggttaa

SEQ ID NO: 260935 - DNA, 285 bp, Klebsiella pneumoniae
atgtttactatcaacgcagaagtacgtaaagagcagggtaagggtgcgagccgccgcctgcgtgccgctaacaagttcccggcaatcatctacggtggcaaagaagcgccgctggctgtcgaactggatcacgacaaagtcatgaacatgcaagttaaagctgaattctatagcgaagttctgaccatcgttgttgacggtaaagaaatcaaagttaaagctcaggacgtacagcgtcacccgtacaaaccgaagctgctgcacatcgacttcgttcgcgcttaa

SEQ ID NO: 260936 - DNA, 228 bp, Klebsiella pneumoniae; identical to SEQ ID NO: 27937

SEQ ID NO: 260937 - DNA, 1761 bp, Klebsiella pneumoniae
atggtaactcatcgtcagcgctaccgtgaaaaagtctcccagatggtcagttgggggcactggtttgcactgttcaatattctgctttcgctcgtcattggcagccgttacctgtttatcgccgactggccgacaacgcttgctggtcgcatttattcctacgtaagcattatcggccatttcagcttcctggtgttcgccacctacttgctgatcctcttcccgctgacctttatcgtcggctcccagaggctgatgaggtttttgtccgtcattctggcaacggcgggaatgacgctattactgatcgatagcgaagtctttactcgtttccatctccatcttaatcccatcgtctggcagctggttatcaaccctgacgaaaatgagatggcgcgcgactggcagctgatgttcatcagcgtgccggttattttattgcttgaactggtgtttgcgacgtggagctggcaaaagctgcgaagcctgacgcgtcgtcgacgcttcgcgcgcccgctggccgcattcttatttatcgcctttatcgcctcgcatgtggtttatatctgggccgatgccaacttctatcgcccgatcaccatgcagcgcgctaacctaccgctttcgtacccgatgacggcgcgacgttttcttgagaagcatggtctgcttgatgcgcaggagtatcaacgccgtctcattgagcaaggtaatccagacgccgtttccgttcagtatccgttaagcgaactgcgctatcgcgatatgggcaccgggcagaatgtgctgttgattactgtcgatggcctgaactactcacgcttcgagaagcagatgcctgcgctggcaggttttgctgagcaaaatatttcgttcacgcgccatatgagctccggcaacactacagacaacggcatctttggcctgttctatggcatctcgccgagctatatggacggtattctgtcgacccgtacgcctgcggcattaattactgcgcttaatcagcaaggctatcagctggggttattctcatcagatggctttaccagcccgctgtatcgccaggcattgttgtcagatttctcgatgccgagcgtacgcacccaatccgacgagcagaccgccacgcagtggatcaactggctgggccgctacgcacaagaagataaccgctggttctcgtgggtttctttcaatggcactaacattgacgacagcaatcagcaggcatttgcacggaaatatagccgggcggcaagcaatgtcgatgaccagatcaaccgcgtgctcaatgcactacgcgattctggcaaactggacaatacggtggtgattatcactgccggtcggggtattccgctgagcgaagaggaagaaacctttgactggtcccacggtcatctgcaggtaccattagtgattcactggccaggtacgccggcgcagcgtattaatgctctgactgatcataccgatctgatgacgacgctgatgcaacgcctgctacatgtcagcacacctgccagcgaatattcgcaaggtcaggatttgttcaaccctcaacgccgtcattactgggttaccgccgcggataacgatacgctggcaattaccaccccgaaaaagacgctggtgctgaacaataacggtaaataccgtacttacaacttacgtggtgaaagagtgaaagatgaaaaaccacagttaagtttgttattgcaagtactgacagacgagaagcgttttatcgctaactga

SEQ ID NO: 260938 - DNA, 2592 bp, Klebsiella pneumoniae
atgcatcaatctggttctgtttctctttgtcgttccgcaatatctgttctggtggctacagcgttatattcacccatagcattggcatcaacagttgagtatggtgagacagttgatggtgttgtcctggaaaaagatatccagctggtttatgggaccgccaataatacgaaaatcaatcctggcggagaacagcatattaaagaatttggtataagtagtaatactgaaattaacggcgggtatcagtacattgaaatgaatggcaccgcagaatactcagtattaaatgatggttatcaaattgttcaaatgggtggtgcggcaaaccagactaccctcaataatggtgtgctacaggtttatggcgcagcgaatgaacctacgattaaaggcgggcgcttaattattgaaaaagatgggattaccgtctttgccgctatcgaaaagggaggattactggaggttaaagagggaggattagcatttgcggtagatcagaaagcaggcggtgcgattaaaacaaccacccgggccatggaggtattcggaacaaaccgtctcggtcagttcgatatcaaggatggtattgctaataatatgctgttggaaaacggcggaagtttgcgagttgaagaaaatgacttcgcttataataccactgtggatagtggcggcttactggaggttatggatggcgggactgcaactggcgttgataaaaaagcaggcggaaaattaattgtctcaacgaatgcgctggaagtgagtggtacaaacagtaaaggccaatttagtataaaagatggtgtgtcaaaaaattatgagctggatgatggttccgggcttattgttatggaggacacgcaggccattgacactatccttgatgagcatgccactatgcaatcgctgggaaaggatactggtacgagagtgcaggcaaatgcggtatatgatctcggtcgatcagatcagaatggaagtataacgtattcctctaaagccatctctgaaaatatggttatcaacaatggccgcgctaatgtctgggctggcacaatggttaacgtttcagtcagagggaatgatggcattcttgaggtcatgaagccgcaaataaattatgcacccgctatgttggtgggtaaggtagtggtttctgagggcgcttcttttagaacgcatggtgccgtggataccagcaaagcggatgtttcgctcgaaaatagcgcatggaccatcattgccgatatcactacgacgaaccaaaacactcgcctcaacttagccaaccttgcgatgtctggcgcaaatgtgattatgatggctgagccagtgactcgttcatctgtgacggcaagtgcggaaaatttcactacgttgaccaccaataccctatcgggaaacggcaatttttatatgcgtactgatatggctaatcatcagagcgatcagctcaacgtgaccggtcaggcaacaggtgatttcaaaatatttgtgacggacacaggggccagcccggcagcaggtgatagccttacactggtaacaacgggcggcggtgatgctgcatttacgttgggcaatgccggaggcgttgttgatatcggtacgtatgaatataccttgctggataatggcaaccatagctggagtctggcagagaatcgcgcgcaaattaccccttcaaccactgatgtgctgaacatggcagcagcacaaccgctggtatttgatgcagaactgtacaccgtgcgtgagcgtcttggtagcgtaaaaggcgttagttacgatacggcgatgtggagttcggcaattaacacccgcaacaacgtgaccactgatgcgggagctggctttgagcaaacattgacgggcctgacgctcggtatcgatagccgtttctcccgtgaagaaagcagcacaattcgcggcttgttctttggttactctcattctgatattggttttgatcgcggcggcaaaggtaatatcgatagctacaccctgggggcttatgccggttgggagcatcagaacggtgcctatgttgatggagtggtgaaagttgaccgttttgccaacaccatccatggcaagatgagtaatggagcaacagcgtttggcgattacaatagtaacggcgcgggtgctcatgtcgagagcgggttccgttgggttgacggattgtggagtgttagaccctatctggcctttaccggctttaccacagatggtcaggactacacgttatcaaacggcatgagcgcggatgtgggaaatacccgcatattacgggctgaagcgggaacggcggtaagctatcacatggacctgcaaaacggtacgacgctggaaccctggctgaaagccgccgtacgtcaggaatacgccgattctaaccaggtgaaagttaatgacgatggcaaatttaataatgatgtggctggaaccagtggcgtttatcaggctgggataaggtcatcgtttaccccgacgttaagcggtcatttgtctgtcagctatggcaatggcgcaggggtagaatcaccgtggaatactcaggcgggtgtggtctggtcgttctga

SEQ ID NO: 260939 - DNA, 648 bp, Klebsiella pneumoniae
atgcctgaagcaacgccttttcaggtgatgattgtggatgatcatccacttatgcgacgcggtgttcgtcagttactggagcttgatcctggctttgaagtggtcgccgaagcgggcgacggcgcgagcgcaatcgatctggcgaatagactggatatcgacgtgatcttgctggatctcaatatgaaaggtatgagtggcctggataccctcaatgccttgcgcagggatggcgttaccgcgcaaattattatcctgaccgtatcagatgcctccagcgatgtctttgcgctgatagacgcaggcgcagacggttatctgttgaaagacagcgacccggaagtgttgctggaagcgattcgtgccggagcgaaaggcagcaaagtctttagcgaacgcgtcaatcagtacttacgtgaacgtgaaatgtttggcgcggaagaagatcccttcagcgtgctgacggagcgcgagctggatgttctgcacgagctggcacaggggctgtcaaataaacagattgcctcggtgttgaatatttccgagcagacagtaaaagtacacattcgcaatctgctgcgtaaactcaatgtccgctcacgcgtggcggccaccattctgttcctgcaacaacgcggggcacaataa

SEQ ID NO: 260940 - DNA, 1053 bp, Klebsiella pneumoniae
atgaggtttttattgggcgtgctgatgctgatgatctccggctcagcgctggcgaccatcgacgtgttgcagtttaaggatgaagcgcaggagcagcagttccggcaactcactgaagaactacgctgcccgaaatgccagaacaacagcattgccgattccaactcgatgattgccaccgacctgcgccagaaagtgtatgaactgatgcaggaaggtaaaagtaaaaaagagattgtcgattatatggtggcgcgttacggcaactttgtcacttacgatccgccgttaacgccgctgaccgtgctgctgtgggtgcttccggtagtggctattggcattggcggttgggtcatttacgcccgttcgcggcgtcgggtacgcgtggtgccggacgcgtttcctgaacaaagcgtgccggaaggtaagcgtgccggatatattgtttatctgccgggtattgtggtggcgttaattgtggctggcgtcagctactaccagactggcaattatcagcaggtgaaaatctggcagcaggccacggcacaggctccggcgttgctggacagggcgctggatccgaaagccgatccgctcaacgaagaagagatgtcgcgccttgcgctggggatgcgtactcaactgcaaaaaaatccgggagatatagaaggctggattatgttgggccgcgttggcatggcgctgggtaacgccagtatcgccaccgatgcatacgctactgcgtatcgcctcgatccgaagaacagcgatgctgcactgggatacgctgaagcgttgacacgttcatctgatcccaacgacaaccgcctcggcggcgaactgctgcgccagttggtgagaacggaccatagcaatattcgtgtgttaagcatgtatgcgtttaacgcctttgagcagcagcgatttggcgaagccgttgccgcgtgggagatgatgttgaaactcttacctgccaacgatactcgccgtgcggtgattgaacgtagtatcgcgcaggcgatgcaacatttgtcgccgcaggagagtaaataa

SEQ ID NO: 260941 - DNA, 558 bp, Klebsiella pneumoniae
atgaagcgcaaagtattgttaattccgttgattatcttcctggcgattgccgcggcgctactgtggcagctggcgcgtaatgccgaaggggatgatccgaccaatctggaatcggcgctcattggcaagccagtgccgaagtttcgcctcgaatcactggacaatccggggcagttttatcaggcggatgtgctgactcagggcaaaccagtgctgcttaacgtctgggcgacctggtgtccgacctgccgtgcggaacatcaatatctgaatcagctttctgcgcagggcatccgcgtggtcggcatgaactataaagacgatcgccagaaggcaatcagctggctgaaagagctgggcaatccttacgcactaagcctgtttgatggcgacggcatgttaggactggatctcggtgtctatggcgcgccagaaacgttcctcatcgacggcaacggcatcattcgctatcgccatgcgggcgatctcaatcctcgcgtctgggaagaagagatcaagccgctgtgggagaaatacagtaaggaggccgcacaatga

SEQ ID NO: 260942 - DNA, 1944 bp, Klebsiella pneumoniae
atgatgccagaaattggtaacgggctgctgtgcctggcgttagggattgcgctgctgctgtccgtgtatccgctatggggcgtggcgcgcggagatgcgcgcatgatggcgtcttcccgcttgtttgcctggctgctgtttatgtctgtggctggcgcatttctggtgctggtcaatgctttcgtggtcaacgactttaccgtcacctatgttgccagcaactccaatacccagcttccggtgtggtatcgcgtggcggctacctggggcgcgcatgaaggttcgcttctgctgtgggtgctgctgatgagcggctggacctttgcggtggcgatttttagtcagcgtattccgctggatattgtggcccgcgtactggcgataatggggatggtcagcgtcggctttttgctgttcattctctttacctctaacccgttctcacgcacgttgccgaacttcccgattgaaggtcgcgatcttaacccgctgttacaggatccggggctgatcttccatccgcctctgctttatatggggtacgtcggcttctcggtggcgtttgcttttgccattgcttctttgttgagcgggcgtctggacagcacttatgcgcgttttactcgtccgtggacactggcagcgtggatcttcctgacgctcggcatcgtgctcggttccgcatgggcctattacgaactcggctggggcggctggtggttctgggatccggtagaaaacgcctcgtttatgccgtggctggtggggactgcgctgatgcactcactggcggtcactgaacaacgcgccagcttcaaagcgtggacattactgctggcaatcagtgccttctcgttgtgtctgttggggactttcctcgtgcgttccggcgtgctggtatcggtacacgcgtttgcgtctgatccggcgcgcggtatgtttatcctcgcctttatggtgctggtgattggtggttcgctgctgctgtttgccgcgcgtggacacaaagttcgctcacgcgtaaacaatgcgctgtggtcgcgggaatctctgctgttagcgaacaacgttttgctggtcgccgcgatgctggtggtattactggggacgctgctgccgctggtgcacaagcaactgggactgggcagtatttcgattggcgaaccgttcttcaacaccatgtttacctggctgatggtgccgtttgcgctgctgcttggtgtcggtcctctggtgcgctgggggcgcgatcgcccacgtaaaatccgcaatttattgattatcgccttcatctcaacgctggtgctgtcgctgctgctgccgtggctgttcgaaagcaaagttgtggcgatgacggtgctcggcctggcaatggcctgctggattgcggtgctggcaattgcggaagctgcgctgcgtatttcacgtggcacgaaaaccaccttcagttattggggaatggtggcggctcacctggggctggcagtgacaattgttggtattgcctttagccagaactatagcgttgagcgtgatgtgcgcatgaagtccggcgatagtgtcgatattcatgaatatcgcttcaccttccgtgatgtcaaagaggtgactggcccgaactggcgtggcggtgtggcgactatcggcgtaacgcgcgatggcaagccggaaacggtgctgtatgcggaaaaacgttattacaacactgccgggtcgatgatgaccgaagcggcgattgacggcggcatcacgcgtgacctgtacgccgcgctcggtgaagagctggaaaacggcgcgtgggccgtgcgtctttactacaaaccgtttgttcgctggatttgggcgggcgggctgatgatggcattgggcgggctgctgtgcctgtttgatcctcgctatcgtaagcgcgtgaacccgcagaaaactgcgccggaggctgtatga

SEQ ID NO: 260943 - DNA, 480 bp, Klebsiella pneumoniae
atgaatattcgccgtaaaaaccgcttgtggattgcctgtgccgttttggcggggctggcgcttactatcggtctggtgctgtatgcgctgcgctcgaatatcgatctcttttatacgccgggggaaattctctacggcaagcgtgaaactcagcaaatgccggaagtcggtcagcgtctgcgcgttggcgggatggtgatgccgggtagtgtgcagcgcgatcccaattcgctgaaagtaactttcaccatttacgatgctgaaggttcagtggatgtctcttacgaaggcattttgccggatctgttccgtgaagggcagggcgttgtggtgcagggcgagctggaaaaaggcaatcatatcctcgcgaaagaagtgctggcgaaacatgatgaaaactacacgccgccagaagttgagaaagcgatggaagctaaccaccgtcgcccggcgagtgtttataaggacccagcatcatga

SEQ ID NO: 260944 - DNA, 210 bp, Klebsiella pneumoniae
atgacccctgcatttgcttcctggaatgaatttttcgcaatgggcggttacgccttttttgtctggctggcggtagcgatgaccgttattccgctggtgattttagtcgtgcactcggtgatgcagcatcgcgcaattctgcgtggcgtggcgcaacagcgggcgcgtgaggcgcgtttacgtgctgcgcaacagcaggaggctgcatga

SEQ ID NO: 260945 - DNA, 738 bp, Klebsiella pneumoniae
atgtggaaaacactgcatcaactggcgatcccaccacggctgtatcaaatctgtggctggtttataccgtggctggcaattgccagtgtggtcgtgcttaccgtcggctggatctggggattcggctttgctccggctgattatcagcagggaaatagctaccgcattatctacctgcatgtgcctgcggcgatctggtcgatgggcatttatgcatcaatggcggtggcggcgtttattggccttgtctggcagatgaaaatggccaacctggcggtagcggcgatggcccccattggtgccgtgtttacctttattgccctggttaccggctctgcatggggaaaaccgatgtggggcacctggtgggtatgggacgcacgcctgacttctgaactggtgctgctgtttctgtatgttggtgtaattgccctgtggcacgccttcgacgaccgccgtctggcgggccgtgcggcaggtattctggtgctgattggcgtggtgaatctgccgattattcattactccgtggagtggtggaacaccctgcatcagggatcaacgcggatgcagcaaagtatcgatccggcgatgcgttcgccgctgcgctggtcgatttttggcttcctgctgctgtctgccacgctgacgctgatgcggatgcgtaatttgattttgctgatggaaaaacgccgtccgtgggtgagtgaactgatactgaaaagaggccgtaaatga

SEQ ID NO: 260946 - DNA, 663 bp, Klebsiella pneumoniae
atgatgttctggcgcattttccgtcttgagctgcgcgtagcgtttcgccatagcgccgaaatcgccaacccgctgtggttcttcctgattgtcattaccctttttccgctcagtatcggtccggagccgcaactgctggcgcgtattgcaccgggcgttatctgggttgccgcactgctttcatccttgctggcactggagcgtctgttccgtgacgatttgcaggacggcagtcttgaacaattgatgttgttgccgttacccttgcccgccgttgtgctggcgaaggtgatggcgcactggatggtaaccggtctgccgttacttatcctttcgcccctggtagcaatgctactgggaatggatgtttatggctggcaagtgatggcgctgacgctgctgctgggaacccctacgcttggctttctcggtgcaccgggcgtggcgctgacagtgggacttaagcgcggtggtgtgctgctcagcatactggtgttaccgctgactatcccattactcatctttgccaccgccgcgatggacgcggcttccatgcatttgcccgttgacgggtatctggcaattttaggcgcgttgctggcaggcaccgcgactttaagtccttttgcgacggcggcagcgttacgaatcagcattcaataa

SEQ ID NO: 260947 - DNA, 618 bp, Klebsiella pneumoniae
atgcttgaagccagagagttactttgcgagcgggatgaacgaaccttatttagtggcttgtcatttacgctgaacgcaggagagtgggtacaaatcaccggtagcaacggcgcggggaagacaacgcttctccgtttgctgacggggttgtctcgccctgatgcgggtgacgttctctggcaagggcagcccttgcatcaggtacgcgacagctaccatcaaaacctgttatggataggccatcagccggggatcaaaacccggctgacggcgttagaaaatctgcacttttatcatcgcgatggcgataccgcacaatgtctggaagccctggcgcaggctgggcttgccggatttgaagatattcctgtaaatcaactttctgccgggcaacaacgccgcgtcgctttagcgcgtctgtggctgacccgtgccacgttatggatcctcgacgagccttttaccgcgattgacgttaacggcgtcgatcgtctgacccagcgtatggcgcagcatacggagcagggggggattgtgattctgactacccaccagccgctcaacgttgctgaaagtaaaattcgccgcatttcactgacgcaaacgagggccgcatga

SEQ ID NO: 260948 - DNA, 603 bp, Klebsiella pneumoniae
atgggaaattctgaccgtaagcctggtctgattaagcgcctgtggaaatggtggcgtacccccagccgtctggcgctggggacgctgctgttgatcggctttgttggcggcatcgtcttctggggcggctttaacaccgggatggaaaaagccaataccgaagagttctgcattagctgccacgaaatgcgtaacacggtgtatcaggaatacatggattccgtgcactacaacaaccgtagcggcgtccgtgcgacctgtccggattgtcacgttccgcacgagtttgtgccgaagatgatacgcaagctcaaagcaagtaaagagctgtatggtaaaatttttggcgttattgacacgccgcagaaatttgaagctcatcgcctgacgatggcacagaatgagtggcggcgcatgaaggacaataactcgcaggagtgccgtaactgtcacaacttcgagtatatggatacaaccgcccagaaatcggttgccgcgaagatgcatgaccaggcggtgaaagatgggcaaacctgtattgattgccataaagggatagcgcacaagctgcccgatatgcgcgaagtcgagccaggtttttaa

SEQ ID NO: 260949 - DNA, 450 bp, Klebsiella pneumoniae
atgaaaagccatgacctgaagaaagcgctgtgtcaatggacggcgatgctggccctggtggtaagcggcgcggtttgggcggctaatggcgtcgattttagccagtcgccggaagtatccgggacgcaggaaggggccattcggatgccaaaagagcaggaacggatgccgctgaactatgtgaatcagccgccaatgatcccgcatagcgttgaaggttatcaggtaacgaccaataccaaccgctgcttgcagtgccacggtgtcgaaagctatcgcaccactggcgcgccgcgcatcagtcctactcactttatggacagcgacggcaaagtgggcgcggaagtggctccgcgtcgttatttctgtctgcaatgtcacgtaccgcaggccgataccgcgccaatcgtggggaatacctttaccccgtcaaaaggttacgggaaataa

SEQ ID NO: 260950 - DNA, 864 bp, Klebsiella pneumoniae
atggcaaatcgtaaacgtgacgccgggcgcgaggcgctggagaaaaaaggctggtggcgcagtcaccgttggctggtgttacgtcgcctttgtcagttcttcgtgctggggatgtttttgagcggtccgtggtttggtgtgtggatcttgcacggcaactacagcagtagcctgttattcgacaccgttccactgaccgatccgctgatgacgctgcaaagtcttgccagcggtcatctgcctgccacggtggcgttgaccggtgcggtgattatcaccgtgctctacgcgctggcaggaaagcgattattttgcagctgggtctgcccgctgaatccgattaccgacttagcgaactggttacgcagacgatttgacctcaatcagtctgcgacgatccctcgccacattcgctacgtgctgttggtggtcattctgctgggatcggccttaaccggcacgctcatctgggaatggatcaaccccgtttccctgatggggcgcagtctggtaatgggattcggcagcggcgcgctgcttattctcgcgctgtttttatttgatctactggtcgttgaacacggctggtgcgggcacatttgtccggttggcgcgctgtatggcgtgctgggtagcaaaggtgtcattaccgttgcggccaccgatcggcagaaatgtaaccgctgtatggattgttttcatgtttgcccggaaccgcatgtgctacgtgccccggtgctggatgaacaaagcccggtgcaggtcaccagccgcgattgcatgacgtgcggtcgctgcgtggatgtctgttctgaggatgtatttacaataactacacgatggagttcgggagcgaaatcatga

SEQ ID NO: 260951 - DNA, 696 bp, Klebsiella pneumoniae
atgtcccggtcagcgaaacctcaaaatggtcgccgccgctttctgcgcgatgtcgttcgcacagctggcgggctggctgccgtgggtgtggcgctggggttacaacagcaaaccgcacgcgcatctggcgtgcggttgcgcccgcccggagccataaacgagaacgcctttgccagtgcctgtgtgcgttgcggtcagtgtgttcaggcttgcccttacgacaccttaaaactggcgacgctggcttctggcctgtcggcgggcacgccatattttgtcgcacgggatattccttgcgaaatgtgtgaggacattccgtgcgccaaagtgtgcccgagcggtgcgctggatcgtgagatcgaatcgatcgacgacgcgcggatggggctggcggtactggtggaccaggaaaactgtctcaactttcaggggctgcgctgcgatgtttgttatcgcgaatgcccgaaaattgatgaggcaatcaccctggagctggagcgcaacacgcgtaccggtaagcacgcccgctttctgccgacggttcacagcgacgcctgtaccggctgcggtaagtgcgaaaaagtgtgcgtgctggaacaaccggcaatcaaggtgttaccgctgtcactggcgaaaggggagttaggtcaccattaccgcttcggctggctggaggggaacaatggcaaatcgtaa

SEQ ID NO: 260952 - DNA, 2487 bp, Klebsiella pneumoniae
atgaaactcagtcgtcgtagctttatgaaagctaacgccgttgcggccgctgcggcggctgccggtctcagcgtgccgggcgttgcccgcgccgttgttggtcagcaggaagccattaaatgggataaagcgccgtgccgtttctgcggtactggttgcggcgttctggtcggaacgcagcaggggcgtgtggtggcctgtcagggcgacccggacgcaccggttaaccgtggtctgaactgcattaagggctatttcctgcccaaaatcatgtacggtaaagaccgtttgacgcagccgcttctgcgtatgaaaaacggtaaatatgacaaagaaggcgaatttaccccaatcacctgggatcaagccttcgatgtgatggaagagaaattcaaaaccgccctgaaagaaaaagggccggaatcgatcggtatgttcggttctggtcagtggactatctgggaaggttatgccgcgtccaagctgtttaaagcgggattccgttcgaacaacatcgacccgaacgcgcgtcactgtatggcgtcggcggtagttggctttatgcgtacctttggtatggatgagccgatgggctgctatgacgacatcgagcaggctgatgcgtttgtgctgtggggcgcgaacatggcggaaatgcacccgatcctctggtcgcgcatcactaaccgtcgtctctctaaccagaacgtcaccgtggcggtgctttctacctaccagcatcgtagcttcgagctggcggataatggcatcatctttacgccgcaatcagacctggtgatcctgaactacatcgccaactatatcattcaaaacaatgcgataaatcaggacttctttagcaaacacgttaacctgcgcaaaggggcgacggacatcggctacggtttacgtccgacccatccgctggaaaaagcagcgaagaatccaggttctgacgcctccgaaccgatgagctttgaagattacaaagccttcgttgctgagtatacgctggaaaaaactgccgaaatgaccggcgtgccgaaagaccagttagaacaactggcgcagctgtatgccgatccgaacaagaaagtcatctcctactggacgatgggcttcaaccagcatacccgtggtgtatgggccaacaacctggtctacaacctgcacctgctgaccggcaaaatttccaagccgggttgcggtccgttctccctgaccgggcagccttccgcgtgtggtactgcgcgtgaagtgggcacctttgctcaccgtctgcctgcggacatggtggtaactaacgagaaacatcgtgatatctgcgagaagaagtggaatatcccgagcggcaccattccggcgaaaatcggtctgcatgcggtagcacaagaccgtgcgctgaaagacggcaagctgaatgtttactggaccatgtgtaccaacaacatgcaggccgggccgaacatcaatgaagagcgtatgccgggctggcgcgatccgcgcaacttcatcatcgtctccgatccgtatccgacagtcagtgcgctggccgccgacttgatcctgccgaccgcaatgtgggtagaaaaagagggtgcttacggtaacgccgaacgccgtactcagttctggcgtcagcaggtacaggcaccgggcgaagcgaaatcggatctctggcagttagtccagttctcccgccgcttcaaaactgaagaagtatggccggaagatctgctggcgaagaaaccggaactgcgtggcaaaacgctgtacgaagttctgtatgccaccccggaagtgagcaaataccctgtatccgaactggcggaagatcagctgaacgatgaatcccgcgagctgggcttctatctgcaaaaagggctgttcgaagagtacgcatggtttggtcgcggtcacggtcacgatctggcaccgttcgatgactaccacaaagcgcgcggtctgcgctggccggtggtgaacggtaaagaaacacagtggcgttacagcgaaggtaacgacccgtacgtgaaagcgggcgaaggctataagttctacggtaaaccggatggcaaagcggtgatcttcgcactgccgttcgaaccggcggcggaggcaccggatgaagagtacgacctgtggctctctaccggacgcgtcctggagcactggcataccggcagtatgactcgccgtgtaccggaactgcaccgtgccttcccggaagcggtcctgtttattcacccgttggatgcgaaagcgcgcgatctgcgccgtggcgacaaagtgaaagtggtttctcgccgtggcgaagtgatctcgattgttgaaacgcgcggtcgtaaccgtccgccacagggcctggtgtacatgccgttcttcgacgccgcacagctggttaacaaactgacgctggacgcgaccgatccgctctcgaaagagacggacttcaagaagtgcgcggtcaaactggagaaggtgtaa

SEQ ID NO: 260953 - DNA, 264 bp, Klebsiella pneumoniae
atgcacactaactggcaagtttgcagcctggtcgtgcaggccaaaagcgaacgaatttcagacatcagcacccaactgaacgcctttcccggctgtgaagttgctgtcagcgacgcgccgagcggtcagttgattgtggtggtggaagcagaagacagcgaaacgctgattcaaaccattgagtcagtacgcaacgtagagggcgtgctggcggtgtcgctggtttatcaccagcaggaagagcaaggtgaggaaacaccatga

SEQ ID NO: 260954 - DNA, 495 bp, Klebsiella pneumoniae
gtgaagattgatgcatcccgtcggggcatactcactggtcgctggcgcaaagccagtaacggtatccgtccgccctggtccggtgatgaatctcattttctgacccattgcacccgctgcgacgcctgtattaatgcttgtgaaaacaacattctgcaacgcggcgcgggtggctatccgagtgttaatttcaaaaataacgagtgcagcttctgttacgcctgcgcgcaggcttgccccgaatcgctattttctccgcgccacaccagggcctgggatttgctgttcaccatcggggaggcgtgcctggcgtatcaaacagttgaatgccgccgctgtcaggatagctgtgagccaatggcaattatctttcgcccgacgctctccgggatctaccagccgcaacttaatagccaactttgcaacggatgtggagcatgtgcagccagctgtccggtatcagccataactgcggagtatctccatgcacactaa

SEQ ID NO: 260955 - DNA, 666 bp, Klebsiella pneumoniae
gtgacgctgccggtcagccagatgggaatggcgattgcgccttttgataagccgcatccggtaatgcggattcagccgattgccattagtgcctctggtgctttgccagacacattaagtagcctgccagcattaccttcgctggaagggctgacggtacgtaagctgcaactctctatggacccgatgctcgatatgatggggatgcagatgctgatggagaaatatggcgatcaggcgatggccgggatggatcacagccagatgatgggccatatggggcacggcaatatgaatcatatgaaccacggcgggaagttcgatttccaccatgccaataaaatcaacggtcaggcgtttgatatgaataagccgatgtttgcggcggcgaaagggcagtacgaacgttgggttatctctggcgtgggcgacatgatgctgcatccgttccatattcacggcacgcagttccgtatcttgtcagaaaatggcaaaccgccagcgactcatcgcgcaggctggaaagataccgttaaggtagaaggtaatgtcagcgaagtgctggtgaagtttaatcacgatgcaccgaaagaacatgcttatatggcgcactgccatttgctggagcatgaagatacggggatgatgttagggtttacggtataa

SEQ ID NO: 260956 - DNA, 441 bp, Klebsiella pneumoniae
atgttaggttgggtaattacctgtcacgatgaccgggcgcaagagatactggatgcgctggagaaaaaacatggggcacttcttcagtgccgggccgtgaatttctggtgcggattaagttctaatatgctcagccgcatgatgtgcgatgctctgcatgaagcggactctggtgagggtgtcatcttcttaaccgatatagccggagcgccaccgtaccgcgtggcttcattattaagccacaaacactcccgttgcgaagtgatttctggtgtcacgttaccgttaattgagcagatgctggtctaccgtgaaacgttatccagcgcagagtttcgcgagcgtattgtcgaactgggtgcgccggaggtgagtagtctttggcaccagcaacaaaaaaatccgcctttcgtcctcaaacataatttgtatgagtattaa

SEQ ID NO: 260957 - DNA, 1230 bp, Klebsiella pneumoniae
atgtacaaacaagctgttattctcctgctgatgctgtttaccgcaagcgtcagtgccgcattacctgcccgttatatgcaaaccatcgaaaatgctgcggtctgggcgcaaattggcgacaagatggtgaccgtggggaatattcgggccgggcaaatcattgccgtggagcccactgccgcaagttattacgcatttaattttggctttggtaaagggtttatcgataaaggtcatcttgagccggttcaggggcgacaaaaagttgaagatggtttgggtgacctcaacaagccgctgagtaatcagaacttaataacctggaaagatacgccggtcttcaacgcgccgagtgcgggcagtgcgccgtttggggtactggcggacaatttgcgctacccaattttgcataaactgaaagacaggttaaatcaaacctggtatcagatccgtattggcgatcgactggcctatatcagcgcgctggatgcccaacccgataatggcctgccggtgctaacctatcaccatattctgcgcgacgaagaaaatacccgttttcgccatacttcgacgaccacctcggtacgcgctttcaataaccagatggcctggctgcgcgacaggggatacgtgacactgagcatggcgcaactggaaggttacgtgaagaataagatcaatctccctgcgcgagcggtggtgattacctttgatgatggcctaaagtcggtgagccgctatgcgtatcctgtgttgaaacaatatggcatgaaggcgacggcgtttattgttacctcgcgcatcaaacgtcacccgcagaagtgggacccaaaatcgctgcaatttatgagcgtttctgaacttaacgaaattcgcgatgtatttgatttccagtcacatacccattttttgcatcgggtggatggttatcgccgacccatattactgagccgtagtgagcacaatatcctgtttgattttgcacgttcacgccgcgctctggcgcaatttaatccgcatgtctggtatctttcgtatccgtttggcggatttaatgacaaagccgtgaaggcagcaaaagaagccggatttcacctggcggtgacaaccatgaaaggcaaagtaaaaccgggggataatccgttgttactaaaacgactttatatcttaagaacggattcgctggagacaatgtcgcggctggtgagtaaccagccgcaggggtga

SEQ ID NO: 260958 - DNA, 945 bp, Klebsiella pneumoniae
atggatgcaccgagtaccacaccgcatgacgcggtatttaaacaatttttaatgcatgcggaaacggctcgtgactttctggatatccatttgccagcggaactacgcgaactgtgtgacctcgacacgctgcatcttgagtcggggagttttattgaagaaagcctgaaagggcacagcactgacgtgctctattccgtgcaaatgcagggtaatcccggttatttgcatgtggtgattgaacatcaaagcaagccggataagaaaatggcctttcgcatgatgcgttattctattgctgccatgcaccggcatctggaggcggatcacgataagctgccgctggtggtgccgattctgttttatcagggcgaggccacaccttatccgctctcaatgtgctggtttgatatgttttactcgccggagctggcgcgacgcgtttacaacaaccctttcccgctggtggatatcaccatcacaccggatgacgaaatcatgcagcatcggcggattgcgattctcgaactactgcaaaaacatattcgccagcgcgacttaatgttattgctggagcaactggtcacgctgattgacgaagggtacactagcggaagtcagttagttgccatgcaaaactatatgctgcaacgcggtcatactgaacaagcggatttgttttatggtgtgctgagagacagggaaacgggaggggagtctatgatgacgctggcgcagtggtttgaagagaggggaagacaggaaggaagacaggaggtaagacaagaggtaagacaagaggtaagacaagaggtaatacaggaagtaacacaggaagtaagtcaggaattcgcccagcgtcttctgagtaaaggaatgtctcgggaagacgttgcagagatggcaaatttaccccttgccgagattgataagctgattaactaa

SEQ ID NO: 260959 - DNA, 216 bp, Klebsiella pneumoniae
atggaaataaagacacggagagaaaccaggcagacgttggcgcagtggtttgaagagaagggatttcagaagggatttcagaagggatataaagagggactccggaaggtaaggctggcacagcgtcttctgagtaaaggaatgtctcgggaagacgttgcagagatggcaactttatctcttacagaggttgataagctaattaactctaactaa

SEQ ID NO: 260960 - DNA, 852 bp, Klebsiella pneumoniae
gtgttaattatcgaaaccctgccgctgctgcgtcagcaaatccgccgcctgcgtatggaaggtaagcgcgtggcgctggtgcccaccatgggtaacctgcacgacggccatatgaagctggtcgacgaagccaaagcccgcgccgatgtggtcgtcgtcagtattttcgttaacccgatgcagttcgaccgcccggaagatctggcacgttatccacggaccttgcaagaggactgcgaaaagctgaacaagcgcaaagtggatttagttttcgccccttcggtaaaagagatctacccgaacggtacagaaacccacacctatgttgatgttcccggtctttctaccatgctggaaggtgccagccgtccgggacattttcgcggcgtttcgactatcgtcagcaagctgttcaatctggtccagccggacatcgcctgcttcggtgaaaaagattttcagcaactggcgctgatccgcaaaatggttgctgatatgggctttgatattgagattgtcggtgtgccaattatgcgcgccaaagacggtctggcgctgagttcccgtaacggttatctgacggcggaacaacgcaaaattgcgcctggtctgtacaaggttttaagttcgattgccgacaaattgcaggctggcgaacgggatctcgatgaaattattactattgccgggcaagaactgaatgaaaaaggcttccgcgccgatgatattcagattcgtgatgccgacaccttgctggaggtctctgaaaacagcaaacgtgcagtgattctggtagccgcctggcttggcgatgcccgcctgatcgacaacaaaatagtcgagctggtgtaa

SEQ ID NO: 260961 - DNA, 795 bp, Klebsiella pneumoniae
atgaaaccaaccactattgcttcattgcaaaaatgcaaacaagaaaaaaaacgtttcgcgaccatcaccgcttacgactatagcttcgcaaaactgtttgccgatgaagggcttaacgtcatgctggttggcgattcactgggcatgacggttcaggggcatgactccactctgccagttaccgttgccgatatcgcctaccacactgctgctgtacgtcgcggtgcgccaaactgtctgctgctggctgatctgccgtttatggcgtatgccacacaagaacaagcctttgaaaacgccgcgactgtcatgcgtgccggtgccaacatggtcaaaattgagggcggtgagtggctggtagaaaccgtacaaatgctgaccgaacgtgccgttccggtttgtggtcatttaggcctaaccccacagtcagtaaatattttcggtggctacaaagtccaggggcgcggcgatgaagcggccgatcgactgctcagcgatgcattagctttagaagctgctggggcacaactgctggtactggagtgcgtgccggttgaactggcaaaacgtattaccgaagcactggcgatcccggttattggcattggcgcaggcaacgtcactgacgggcaaattctcgtgatgcacgacgcattcggcattaccggcggtcatattcctaaattcgccaaaaatttcctcgccgaaacgggcgacatccgcgcggctgtgcggcagtatatggctgaagtggagtccggcgtttatccgggcgaagaacacagtttccattaa

SEQ ID NO: 260962 - DNA, 1251 bp, Klebsiella pneumoniae; identical to SEQ ID NO: 9434

SEQ ID NO: 260963 - DNA, 600 bp, Klebsiella pneumoniae; identical to SEQ ID NO: 9433

SEQ ID NO: 260964 - DNA, 561 bp, Klebsiella pneumoniae; identical to SEQ ID NO: 9432

SEQ ID NO: 260965 - DNA, 2622 bp, Klebsiella pneumoniae; identical to SEQ ID NO: 9431

SEQ ID NO: 260966 - DNA, 780 bp, Klebsiella pneumoniae; identical to SEQ ID NO: 9430

SEQ ID NO: 260967 - DNA, 573 bp, Klebsiella pneumoniae; identical to SEQ ID NO: 9429

SEQ ID NO: 260968 - DNA, 480 bp, Klebsiella pneumoniae
atgacagtggcgtatattgccataggcagcaatctggcctctccgctggagcaggtcaatgctgccctgaaagcattaggcgatatccctgaaagccacattcttgccgtttcttcgttttaccgcaccccaccgctggggccgcaagatcaacccgattacttaaacgcagccgtggcgctggaaacctctcttgcacctgaagagttactcaaccacacacaacgtattgagttacaacaaggtcgcgtccgtaaagcggaacgctgggggccgcgcacactggatctcgacatcatgctatttggtaatgaagtaataaataccgaacgcctgaccgttccgcactacgatatgaagaatcgtggatttatgctgtggccgctgtttgaaattgcgccggagctggtgtttcctgatggaacagtattaggaaatttattaaaaataaataaatttcatgaattaaacaaatggtga

SEQ ID NO: 260969 - DNA, 1365 bp, Klebsiella pneumoniae
gtgctaagccgcgaggaaagcgaggctgaacaggcagtcgcccgtccacaggtgacggtgatcccgcgtgagcagcatgctatttcccgcaaagatatcagtgaaaatgccctgaaggtaatgtacaggctcaataaagcgggatacgaagcctggctggttggcggcggcgtgcgcgacctgttacttggcaaaaagccgaaagattttgacgtaaccactaacgccacgcctgaacaggtacgtaaactgttccgtaactgccgcctggtgggtcgccgtttccgtctggctcatgtgatgtttggcccggagattatcgaagttgcgaccttccgtggacatcacgaaggtaacgtcagcgaccgcacgacctcccaacgcgggcaaaacggtatgttgctgcgcgacaacattttcggctccatcgaagaagacgcccagcgccgcgatttcactatcaacagcctgtattacagcgtagcggattttaccgtccgtgattacgttggcggcatgaaggatctgaaagacggcgttatccgtctgattggtaacccggaaacgcgctaccgtgaagatccggtacggatgctgcgcgcggtacgttttgccgccaaattgggtatgcgtatcagtcctgaaaccgcagaaccgatccctcgcctcgctaccctgctgaacgatattccaccggcacgtctgtttgaagaatctttgaaactgctgcaagcgggctacggttacgaaacctataagctgctgtgtgaatatcacctgttccagccgctgttcccgaccattacccgctacttcacggaaaatggcgacagcccgatggagcggatcattgaacaggtgctgaagaataccgatacgcgtatccataacgatatgcgcgtgaacccggcgttcctgtttgccgccatgttctggtacccactgctggagacggcacagaagatcgcccaggaaagcggcctgacctatcacgacgctttcgcgctggcgatgaacgacgtgctggacgaagcctgccgttcactggcgatcccgaaacgtctgacgacgttaacccgcgatatctggcagttgcagttgcgtatgtcccgacgtcagggtaaacgcgcctggaaactgctggagcatcctaagttccgtgcggcttatgacctgttggccttgcgagctgaagttgaacgtaacgctgaactgcagcgtcttgtgaaatggtggggggagttccaggtttccgcgccaccagatcaaaaagggatgctcaacgagctggatgaagagccgtcaccgcgtcgccgttctcgtcgtccacgcaaacgcgcaccgcgtcgtgagggtaccgcatga

SEQ ID NO: 260970 - DNA, 927 bp, Klebsiella pneumoniae
atgctcccgccttattttttgttcaacgagatgacagacacacactatattggccgctttgccccctctccttccggcgagcttcattttggctctctgattgccgcgcttggcagctatttacaggctcgcgctaggcacggtcgctggctggtacgcattgaagatatcgacccgcctcgtgaagttcccggtgccgcagaaactatcctgcgccagctggaacattacggcctgcactgggacggcgatgttctctggcaatcgcaacgtcaccacgcctatcgcgaagcactcgcctggttacatgagcaaggattaagttattactgcacctgcacgcgtgcgcgtattcaaagcattggcggtatttacgacggtcattgccgggaattacatcatggaccagacaacgccgcagtacgtatccgccagcagcatccggtcacccagtttactgacctgctgcgaggcattattcacgccgacgaaaaactggcacgggaagattttattattcatcgccgtgatggtttgtttgcctataacctggcggtggtggtggatgatcacttccagggcgtgagcgaaattgtccgcggggcagatttgatcgaaccgacagtgcggcaaatctcgctgtaccagctttttggctggaaagtgccagattacatccatttaccgctggcgcttaatccacaaggcgctaaactttccaagcagaatcatgcgcctgcgttgccgaaaggcgatccacgcccggttttaatcgcggcacttcaatttctgggtcaacaggcagaagcacactggcaggatttcagcgtcgagcaaatccttcagtcagccgtcaaaaactggcggctcaccgcagtgcctgagtcggcaattgtaaattcaacattctcaaatgcgtcatgctga

SEQ ID NO: 260971 - DNA, 705 bp, Klebsiella pneumoniae
atggaattttctccccctctacagcgcgcgacgctaattcagcgttacaaacgttttttagccgatgtgatcacacccgatggtcgcgaattaacgctacactgcccgaatacgggtgcgatgaccggttgtgcaacgcctggcgataccgtctggtattcgacttcagacaacaccaaacggaaatacccacacacctgggaattgactcaaagccagagcggcgcaattatttgcgtcaatacgctttgggctaacaggttgacgaaagaggctatccttaatgaatcaatttcagaactgtcaggctatagctcgctgaaaagcgaagttaaatacggcgcagaacgcagccgtattgactttatgttgcaggcggattcgcgtccagactgctatattgaagtgaaatcggttacgttagcggaaaacgaacagggatattttcccgatgcggtcactgaacgaggtcagaaacaccttcgggagttgatgagcgtagcggctgaaggccagcgtgcggttatcttttttgccgtgctgcattcagccattacacggttttcacccgcgcgccacatcgatgagaaatacgcgcaactattgtcagaagctcaacagaggggggtagaaattctggcttacaaagcggaactttctgccgaaggcatggctcttaaaaaatcattaccggttacattgtag

SEQ ID NO: 260972 - DNA, 531 bp, Klebsiella pneumoniae
atgtctgaaccgcaacggctgttctttgctatcgacttacctgcagaaatccgcgaacagattatccactggcgcgccacacacttcccacctgacgcgggacgtccggtcgccgccgataatttgcatctgactctggcatttttaggcgaagtgagcgccgagaaagagaaggcgctttctcttttagccgggcggattcgtcaaccgggtttcacactcacgcttgatgacgccggtcaatggctgcgttcgcgtgtggtgtggttagggatgcgtcagccaccacgcggcttaatccagctggcgaatatgctccgttcacaggctgcccgcagcggttgttttcaaagcaatcgtccgtttcatccacatattaccttattgcgcgacgccagcgaggcggtgacaatcccgccgccaggttttaactggtcgtatacggtgacggagttcaccctttatgcctcctcgtttgcgcgtggacgcacacgctacacgccgctaaaacgctgggcgctaacgcaataa

SEQ ID NO: 260973 - DNA, 2430 bp, Klebsiella pneumoniae
gtgtcgtcgttgcccgttgctgccgtcttacctgaattacttaccgctctcgattgtgcatcgcaggtgttattaagtgcgccgaccggggccgggaaatcaacctggctgccgctgcaactgctggcgcattcagctattcacgggaaaatcattctgctggagccgcgtcgtctggcggcgcgtaacgttgcgcaacggctggcggagctgcttaacgaaaagccaggcgataccgttggctaccggatgcgtgcgcaaaactgcgtcgggccgaatacccgcctggaagtggttaccgaaggcgtgctgacgcgcatgatccagcgtgacccggaactgagcggtgttggattggtgatcctcgatgagtttcatgagcgcagcttgcaggcggatttggcgttggcgctgttactcgatgtgcaacaaggtctgcgtgatgaccttaaactgctgattatgtcggctacgctggacaacgaccgcttgcagcaaatgctgccagaagcgcccgtcatcatctcagaagggcgctcgtttccggttgaacgccgttatttaccgctgcccgcgcatcagcgttttgacgaagccgttgcggtagccaccgccgaaatgctgcgtcaggaaagtggatcattactgttatttttacctggcgtcggagaaattcagcgcgtgcaggaacaactggcttcgcgcatcggcagtgatgtgttgctctgcccgctgtatggcgcgttgtcgctgaacgatcagcgaaaagcgatcctcccggcaccgcaagggatgcgcaaagtggtgctggcgaccaatattgctgaaaccagtttaaccattgaaggtattcgtctggtggtggattgtgcccaggagcgtgtggcgcgttttgatccgcgcacggggcttacgcggttgattactcaacgcgttagtcaggcatccatgacgcagcgtgccgggcgcgccgggcgtctggagccgggtatctgcctgcatttaatcgccaaagaacaagcagaacgcgctgcggcgcaaagtgaaccggaaatattacaaagcgatctttccggtttgctgatggaattactgcaatggggatgcagcgatccggcgcagatgagctggctggatcaaccgccaacggtgaatctactggccgcgaaacgcctgttacggatgctgggggcgctggacggtgaacggcttagtgcgcaagggcaaaaaatggcagcgctgggtaacgatccgcgtttagcggcaatgctggttagcgcgaagaacgacgacgaagctgctaccgcggcaaaaattgccgccattctcgaagagccgccacggatgggcaatagtgacctgggcgtggcgttttcgcgcaatcaaccagcctggcagcaacgtagtcagcaactgttaaaacgtttaaacgtacgcggcggtgaggcagacagttctcttatcgcgccgctacttgccggggcgtatgccgatcgcattgctcgtcgccgtgggcaagatggacgctatcaactggcaaacggcatgggggcgatgctcgatgccgacgatgcgctaagccgccacgaatggttgatcgcaccgttattattgcagggcagcgcctcgccggatgcgcggattttactggcgctgccggtcgatattgatgagttagtacaacgctgcccgcagctggtacagcagtcggacaccgtggaatgggatgacgcgcaaggcacgctgaaagcctggcgtcggctgcaaatcggtcagttgacggtgaaagtgcagccactggcgaaaccctcggaagacgagttgcatcaggcgatgcttaacggcattcgtgataaaggtttaagcgtgctcaactggacggcggaagcggaacagctacgcttgcgtttgttatgcgccgcaaagtggttgccggaatatgactggccagcggttgatgatgagagtttgttggcgacgctggaaacgtggctactgccgcatatgagcggcgtgcattcactacgcggcctgaaatcactcgacatttatcaggcactacgcggattacttgattggggaatgcagcaacgtctggatagtgaattgcctgcgcattacactgtgccgacgggaagccggatcgccattcgttatcatgaagataacccgcccgcgctggcggtgagaatgcaggagatgtttggcgaggccaccaatccgacgatcgctcaggggcgcgtgccgctggtgctggagttgctttcccctgcccaaaggccgctgcaaatcacgcgtgatttgggggccttctggaaaggggcgtatcgtgaggtgcaaaaggagatgaaagggcgttatcccaaacacgtctggccggacgacccggcaaacacggcaccgacgcgacggacgaaaaagtattcgtga

SEQ ID NO: 260974 - DNA, 2535 bp, Klebsiella pneumoniae
atggccgggaatgaccgcgagccaattggacgcaaagggaaaccgacgcgtccggtcaaacaaaaggtaagccgtcgtcgttacgaagatgacgatgattacgacgattatgatgactatgaggatgaagaaccgatgccgcgcaaaggtaagggcaaaggcaaagggcgtaagcctcgtggcaaacgcggctggctatggctgctgctaaaactggctatcgtttttgccgtgctgatcgccatttacggcgtttatctcgatcaaaaaattcgcagccgtattgatggcaaggtctggcaactgcctgcggcagtttatggccgaatggtcaaccttgagccagatatgaccatcagcaagaacgagatggtgaagctgctggaggcaacccagtatcgtcaggtgtcgaaaatgacccgtcctggcgaatttaccgtgcaggccaacagcattgagatgatccgccgtccgtttgatttcccggacagtaaagaagggcaggtgcgtgcgcgtctgacctttgatggcgatcatctggcgaccatcgtcaatatggagaacaaccgtcagtttggtttcttccgtcttgatccgcgcctgatcaccatgatctcctcgccaaacggtgagcaacgtctgtttgtgccgcgcagtggtttccctgatttgctggtggatactttgctggcgacagaagaccgccatttctacgagcatgatgggatcagtctctactccatcggacgtgcggtgctggcaaacctgaccgccggacgcacggtgcagggggcgagtacgctgacgcaacagctggtgaaaaacctgttcctctccagcgagcgctcttactggcgtaaagcgaacgaagcttacatggcgctgatcatggacgcgcgttacagcaaagaccgtattcttgagctgtatatgaacgaggtgtatctcggtcagagcggcgacaacgaaatccgcggcttcccgctggcgagcttgtattactttggtcgcccagtagaagaattgagcctcgaccagcaggcgctgttggtgggtatggtgaaaggggcgtccatctacaatccgtggcgtaacccgaaactggcgctggagcgacgtaatctggtactgcgtctgctgcaacagcaacagattattgatcaagaactctatgacatgttgagtgcacgtccgctgggcgttcagccgcgcggtggggtaatctctccacagccagcctttatgcagctggtgcgtcaggagctgcaggcaaaactgggcgataaggtaaaagatctctccggcgtgaagatcttcactacctttgactcggtggcccaggacgcggcagaaaaagccgccgtggaaggcattccggcactgaagaaacagcgtaagttgagtgatcttgaaaccgcgattgtggttgttgaccgctttagcggtgaagttcgtgcgatggtcggtggttctgagccgcagtttgcgggctacaaccgtgcgatgcaggcgcgtcgttcgattggttcccttgcaaaaccagcgacttatctgactgccttaagccagccgaaaatctatcgtttgaatacgtggattgccgatgcgccaatcgcgctgcgtcagccgaatggccaggtctggtcaccgcagaatgatgaccgtcgttatagcgaaagtggcagagtgatgctggtggatgcgttgacccgttcgatgaacgtgccgacggtgaatctggggatggcgctggggctgcctgcggttacggagacctggattaaactgggcgtaccgaaagatcagctgcatccggttccggcaatgctgctgggggcgttgaacttaacgccaatcgaagtggcgcaggcattccagaccatcgccagcggtggtaaccgtgcaccgctttctgcgctgcgttcagtcatcgctgaagatggcaaggtgctgtatcagagcttcccgcaggcagaacgcgctgttccggcgcaggcggcatatctgacactatggaccatgcagcaggtggtacaacgtggtacgggtcgtcagcttggggcgaaatacccgaacctgcatctggcagggaaaacagggactaccaacaataacgtagatacctggtttgcgggcattgacggcagcacggtgaccatcacctgggtaggccgtgataacaaccaaccgaccaaactgtatggagccagcggggcaatgtcgatttatcagcgttatctggctaaccagacgccaacgccgctaaatcttgttccgccagaagatattgcaaatatgggcgtggactacgacggcaactttgtttgcagcggtggtatgcgtgtcttgccggtctggaccagcgatccgcaatcgctgtgccagcagagtgagatgcagcagcaaccgtcaggcaatccgtttgatcagtcttctcagccgcagcaacagccgcaacagcaacctgctcagcaagagcagaaagacagcgacggtgtagccggttggatcaaggatatgtttggtagtaattaa

SEQ ID NO: 260975 - DNA, 2190 bp, Klebsiella pneumoniae
atggcgcgttccaaaactgctcagccaaaacactcactgcgtaaaatcgcagttgtagtagccacagcggttagcggcatgtctgtttatgcacaggcagcggttgaaccgaaagaagacactatcaccgttaccgctgcacctgcgccgcaagaaagcgcatgggggccagctgcaactattgcggcgaagcactctgctactgcgactaaaacggatacaccaattgaaaaaacgccgcagtctatttcggttgtgacaaatgaagagatgcagatgcatcaatttcagtctgtaaaagaagcattaggttatacacctggcgttacggttagcagtcgtggtgcttctaatacatatgattttgttattattcgtggtttctcatctgttggtctgaatcaaaataattaccttgatgggctaaaacttcagggcaacttttataacgatgctgtgattgatccttacatgctcgagagggttgaactgatgcgcgggccgacgtctgttctctatgggaaaagtaatcctggtgggattatttctatggtgagtaagcgtccgacaactgaacccctgaaagaaattcagtttaaaatggggacggataatctgtttcagaccggattcgatttcagtgatgcgctggatgataacggtgagttctcctaccgtttgactggcctcgcacgctcaacaaacgaacagcagaaaaactctgaatctcagcgttataccattgctccatcattctcatggcgtccagacgacaaaaccaattttactttcctgtcctattttcagaacgaaccagaaacgggttattacggttggttgccgaaagaggggaccgttgagccattgcctaatggtaagcgtctaccgactgatttcaatgaaggtgcatcgaataatacatactcccgtaaccagaaaatggtgggatatagttttgaacatggttttaatgacaccttcaccgtgcgtcagaatctgcgtttcagtgaaatgaaaacctcacagaaaagtgtttatggcacagggattgccagcgatggtcataccttaaaccgcgggacagtggtggataatgagcgtctacaaaactttagcgttgatacccaacttgaaagtaagtttgctacaggtgacgtcgggcatactttgctgacaggggtagacttcatgcgtatgcgcaatgatatcaatgccagctttggatctgcaccatccatcgatctttataacaaataccatcctgaatactttgcatttggtagcgcagagccataccagatgaatgaaagcaaacaaacaggtatttatgttcaggatcaggcggaatggaataaatgggtattcactctggggggacgctacgattggtctaagcaagcgaccactgttcgtgaaaactcttatacgccgactgaaggttatattgagcgcaatgatcatcagttcacctggcgcggtggtgtaaattacttattcgataatggtatttcaccttactttagctatagccagtcctttgaaccgagtgctttcgatctgtggagcaacccgcgcgtttcctataagccatcgaaaggtgaacagtatgaagctggcgtaaaatatgttccgaatgatatgccggtcgttgttacgggcgcagtctatcaattgacgaaaacaaataacctgacagcagacccaacaaacccattagcgcaagtcccggcaggtgagattcgcgctcgtggtgtggaacttgaagcaaaagcggcgttaaatgccaatattaacttgacggcttcttatacctacaccgatgcggaatacaccaaagacaccaatctcaaaggtaaaactccagaacaagtaccggagcatatggcatctctctggggggattataccttcaatgaagggccgctttctggtttaacattgggaacaggtggtcgttttattggttccagctatggtgatccggcaaacacttttaaagtgggtagcgcagctgtaatggatgctgttgtaaaatatgatctggcacgctttggtatggcgggatccagccttgctgtgaacgtcaacaatttgctcgatcgtgagtatgttgccagttgcttccagacctatggctgcttctggggcgcagaacgtcaggtcgttgcaaccgcaaccttccgtttctaa

SEQ ID NO: 260976 - DNA, 798 bp, Klebsiella pneumoniae
atgcaggaatacacgaatcattccgataccacttttgcactgcgtaatatctcctttcgtgtgcccgggcgcacgcttttgcatccgctgtcgttaacctttcctgccgggaaagtgaccggtctgattggtcacaacggttctggtaaatccactctgctcaaaatgcttggtcgtcaccagccaccgtcggaaggggagattcttcttgatgcccaaccgctggaaagctggagcagcaaagcgtttgcccgcaaagtggcttatttgccgcagcagcttcctccggcagaagggatgacagtgcgtgaactggtggcgattggtcgttacccgtggcatggcgcactagggcgctttggtgcggcagatcgcgaaaaggtcgaggaagctatctcgctggttggcttaaaaccgctggcgcatcggctggtcgatagtctctctggcggcgaacgtcagcgggcgtggatcgccatgctggtggcacaggatagccgttgtctgttgctcgacgaaccgacctcggcgctggatatcgcccaccaggttgatgtgctggcgctggtgcatcgtttaagtcaggagcgtggcctgacggtcattgccgtgctgcacgatatcaatatggctgcgcgttactgtgattatctggtcgccctgcgcggcggtgaaatgattgctcagggaacgcctgcggaaattatgcgcggcgaaaccctcgaaatgatttatggcatcccgatgggtattttgccgcatccggcgggtgctgcacctgtgagttttgtttattga

SEQ ID NO: 260977 - DNA, 891 bp, Klebsiella pneumoniae
atgagcggcttacctcttatttcgcgccgtcgactgttaacggcgatggcgctttctccgttgttatggcagatgaatactgcccacgcggcggctattgatcccaatcgtattgtggcgctggagtggttgccggtggaattactgctggcgctcggcatcgtgccttacggcgtggcggataccatcaactatcgcctgtgggtcagcgaaccgccattgccggactcagtgattgacgttggtttgcgtacagaacctaaccttgaactgctgaccgaaatgaaaccgtcgtttatggtctggtcggcaggatatggcccttcaccagaaatgctggcacgcattgcgccggggcgcggatttaacttcagcgacggcaaacagccgctggcgatggcgcgtaagtcactgacggaaatggcagatttacttaacctgcaaagcgcagcagaaacgcatttagcgcactatgaagactttatccgcagcatgaaaccccgctttgtgaagcgtggtgcgcgcccgttattgctgacgacacttatcgatccgcgccatatgctggtcttcggtccaaacagcttgttccaggaaattcttgatgagtacggcatcccaaatgcctggcaaggggaaaccaacttctggggcagtaccgccgtcagtatcgatcgtctggcagcgtataaagacgttgatgtgctctgttttgatcacgacaacagcaaagacatggatgcgctaatggcaaccccgctgtggcaggccatgccgtttgtccgtgcaggacgttttcagcgcgttccggcggtctggttctatggcgcgacgctttcggcaatgcactttgtgcgtattctggataacgccatcggaggtaaagcgtga

SEQ ID NO: 260978 - DNA, 1983 bp, Klebsiella pneumoniae
gtgagtaaacgaattgcgcttttcccggcgttattgctggcgctgctggttattgtcgcagcggcgctcacctggatgaacttttcgcaagcgctgccgcgtagccagtgggcgcaggctgcctggtcgccggatattgacgtcatcgagcagatgatttttcactacagcttgttgccgcgtctggcgatttcgctgctggtgggcgcgggcctggggctggtgggcgtgctgtttcagcaagtgctgcgtaacccgctggcggaaccgacgacgttgggcgttgcaacaggcgcgcaactggggattaccgtcactacgctctgggcgatcccaggtgctatggcgagccagtttgctgcgctggcaggggcttgcgttgttggcttaattgtctttggcgtcgcgtgggggaaacggctgtcgccggtaacgctgattctcgcggggctggtagtgagcctttattgtggggcaatcaatcagttactggttatcttccatcatgaccagttgcaaagcatgttcctgtggagcaccggaacgctgacgcaaaccgactggggcggcgttgagcgtttatggccgcagttgctgggcggcgtgatgctgacgttactgctacttcgtccgttaaccctgatggggcttgatgatggcgtggcgcgcaacctcgggctggccttgtcgctcgcgcgtctggcggcgctgtcgctggcgatagtcatcagtgcgctgctggtgaacgcagtggggattatcggctttatcgggttgttcgcgccactgctggcaaaaatgctgggggcgcggcgtttgttgccacgattgatgctggcgtcgctgattggggcgttaattctgtggctttctgatcaaatcatcctctggctgactcgcgtgtggatggaagtttctaccggttcggtcactgcgttgataggtgcgccgctgctactttggctgctgccgcgtttacgcagcattagcgcgccggatatgaaggtgaacgatcgtgtcgctgctgaacgccaacatgtgctggcgtttgccctcgcgggcggcgtgctgctgttgatggcagtggtggtggcgctgtcgtttggccgtgatgcgcacggctggacgtgggcgagcggggcgttgctcgaggatttgatgccctggcgctggccgcgaattatggcggcgctgtttgcgggagtcatgctggcggtggcgggctgtattattcagcggctgaccggaaacccgatggcaagcccggaagtgctggggattagctccggcgcggcgtttggcgtggtgttgatgctgtttctggtgccgggtaatgcctttggctggctgttacctgcaggcagtctcggcgcggcggtgacgctgttgatcattatgatcgccgccggacgcggtggattttccccacaccgcatgttactggcggggatggcgttaagtaccgcgttcaccatgcttttgatgatgttgcaggcaagtggtgacccgcgaatggcgcaagttctgacctggatttccggttcgacctacaacgcgaccgatgcgcaggtctggcgtaccggaattgtgatggtgattttgctggcgattaccccgctgtgccgccgctggctgaccattttaccgctgggaggtgataccgcacgagccgtggggatggcgctgacgccgacgcgaattgcgctgctgctgttagcggcttgcctgacagcgactgcgacaatgaccattggaccgttgagttttgttggtttaatggcaccacatattgcgcggatgatgggctttcgacggacgatgccacacatcgtaatttcggcgctggtgggaggattactgctggtgttcgctgactggtgtgggcggatggtgctgtttccattccagatcccagcggggctgctgtcgacctttatcggcgcgccatattttatctatttgttgagaaagcagagccgttaa

SEQ ID NO: 260979 - DNA, 1422 bp, Klebsiella pneumoniae
atgaaaactgatactccctctttagaaacaccgcaggccgcgcgcctgcgacgcagacaactgattcgccaacttcttgagcgcgataaaaccccgttagccattttgtttatggcggcagtcgtcggcacgcttgtcgggctggctgcggttgcttttgacaaaggtgtcgcctggttgcagaaccagcgtatgggggcgctggtacatactgctgataattatccgcttctgttaaccgtcgcttttctctgttcggcggtgctggcgatgttcggctactttttggtgcgcaaatacgcgccggaagcaggtggttcggggatcccggaaattgaaggggcgctggaagatcaacgtcccgttcgctggtggcgtgtgttgccggtgaaattctttggcgggctggggacactcggcggaggcatggtgttggggcgcgaagggccaaccgtacagatcggcggcaatatcggtcgcatggtgcttgatattttccgcctgaaaggtgatgaagctcgccatacgctgttggcaaccggtgcggcggcgggtctggcggcggcctttaacgccccgctagcgggtattttgtttattatcgaagagatgcgtccgcagtttcgctatacgttaatttcgattaaagcggtatttattggcgtcattatgtcgaccattatgtaccggatttttaatcatgaagttgcattgattgacgtcggtaaactttctgacgcgccgcttaatacgctgtggctttatctgatcctcggtattatttttggcattttcggccctatttttaataaatgggtgctggggatgcaggatttgctgcaccgtgttcacggcggcaatattaccaaatgggtactgatgggcggtgtaattggcggtctgtgtggattgctggggtttgtggcaccagcaacgtcgggcggcggctttaacctgattcctatcgctaccgcagggaatttcagcatgggaatgctggtgtttatcttcgtcgcgcgggtcattaccaccttactctgtttctcttccggcgcgccgggcggtatttttgccccgatgctggcgctgggtactgtgctgggaaccgctttcggaatggttgccgttgagctgtttccgcaatatcaccttgaagcaggcacttttgctattgccggaatgggggcgttactggcggcatctattcgcgcgccgttaacgggaatcattctggttctggaaatgaccgataactaccagctcattttgccaatgattattaccggtcttggcgcaacactattagcacaatttaccggcgggaaaccgctatactcggcgattcttgcgcgcacgctggcaaaacaggaagctgagcaactggcgcgaagcaaggccgcatcagccagcgagaatacttga

SEQ ID NO: 260980 - DNA, 801 bp, Klebsiella pneumoniae
atggctaagtcactgttcagggcgctggtcgccctgtcttttcttgcgccactgtggctcaacgccgcgccgcgcgtcatcacgctttctcccgccaacactgaacttgcctttgccgccgggatcacgccggttggggtcagcagctattccgactatcctccacaagcgcaaaagattgagcaggtttccacctggcaggggatgaatctggaacgcattgtcgcgctgaaacccgatctggtgattgcctggcgtggaggtaatgccgagcggcaggttgaccagctggcttcgctgggaataaaagtgatgtgggtcgatgcgacaagcattgaacaaattgccaatgcgttacgtcaactggccccctggagtccgcaaccagacaaggccgaacaagccgcgcaatccctgctggatcagtacgcgcaattgaaagcgcaatatgctgataaacctaaaaaacgtgtttttctgcaattcggcattaatccgccatttaccagtggaaaagagtcgattcagaaccaggtactcgaagtttgtggcggagaaaacatctttaaagatagccgggttccctggccgcaagttagccgcgaacaggtgttagcacgcgcgccacaggcgatagtcattacaggcggaccggaccaaattcctaaaatcaaacaatactggggtgaacagctcaaaattcccgttattcctctcacgagtgactggtttgaacgtgcaagcccacgtattatcctcgctgcacaacagctctgtaatgcgctttcacaggtagattag

SEQ ID NO: 260981 - DNA, 1518 bp, Klebsiella pneumoniae
atggcacagattgatttccgaaaaaaaataaactggcatcgtcgttaccgttcaccgcagggcgttaaaaccgaacatgagatcctgcggatcttcgagagcgatcgcgggcgtatcatcaactctccggcaattcgtcgtctgcaacaaaagacccaggtttttccactggagcgcaatgccgccgtgcgcacgcgtcttacccactcgatggaagtccagcaggtggggcgctacatcgccaaagaaattttaagccgtctgaaagagcttaaattgctggaagcatacggcctggatgaactgaccggcccttttgaaagcattgttgagatgtcatgcctgatgcacgatatcggcaatccgccgtttggtcattttggcgaagcggcgataaatgactggtttcgccagcgtttgcacccggaagatgccgaaagccagcctctgactgacgatcgctgcagcgtggcagcactacgtttacgggacggggaagaaccgcttaacgagctgcggcgcaaaatacgtcaggacttatgtcattttgaggggaatgcacaaggcattcgcctggtgcatacattgatgcggatgaatctcacctgggcacaggttggcggtattttaaaatatactcgtccggcgtggtggcgtggtgaaacgcctgagacacatcactatttaatgaaaaagccgggttattatctttctgaggaagcctatattgcccggttgcgtaaagaacttaatttggcgctttacagtcgttttccattaacgtggattatggaagctgctgacgacatctcctattgtgtggcagaccttgaagatgcggtagagaaaagaatatttaccgttgagcagctttatcatcatttgcacgaagcgtggggccagcatgagaaaggttcgctcttttcgctggtggttgaaaatgcctgggaaaaatcacgctcaaatagtttaagccgcagtacggaagatcagttttttatgtatttacgggtaaacaccctaaataaactggtaccctacgcggcacaacgatttattgataatctgcctgcgattttcgccggaacgtttaatcatgcattattggaagatgccagcgaatgcagcgatcttctaaagttatataaaaatgtcgctgtaaaacatgtgtttagccatccagatgtcgagcagcttgaattgcagggctatcgggtcattagcggattattagagatttatcgccctttattaagcctgtcgttatcagactttactgaactggtagaaaaagaacgggtgaaacgtttccctattgaatcgcgcttattcaacaaactctcgacgcgccatcggctggcctatgtcgaggctgtcagtaaattaccgtcagattctcctgagtttccgctatgggaatattattaccgttgccgcctgctgcaggattatatcagcggtatgaccgacctctatgcctgggatgaataccgacgtctgatggccgtagaacaataa

SEQ ID NO: 260982 - DNA, 1425 bp, Klebsiella pneumoniae
atgaaaaaaaccacattagcactgagtgcactggctctgagtttaggtttggcgttatctccgctctctgcaacggcggctgagacttcttcagcaacgacagcccagcagatgccaagccttgcaccgatgctcgaaaaggtgatgccttcagtggtcagcattaacgtagaaggtagcacaaccgttaatacgccgcgtatgccgcgtaatttccagcagttcttcggtgatgattctccgttctgccaggaaggttctccgttccagagctctccgttctgccaggggggccagggcggtaatggcggcggccagcaacagaaattcatggcgctgggttccggcgtcatcattgatgccgataaaggctatgttgtcaccaacaaccacgttgttgataacgcgacggtgattaaagtccagctgagcgatggtcgtaagttcgacgcgaagatggttggcaaagatccgcgctctgatatcgcgctgatccagatccagaacccgaaaaatctgaccgcaattaagatggcggattctgatgcactgcgcgtgggtgattacaccgtagcgattggtaacccgtttggtctgggcgagacggtaacttccgggattgtctctgcgctggggcgtagcggcctgaatgctgaaaactacgaaaacttcatccagaccgatgcagcgatcaaccgtggtaactccggtggtgcgctggttaacctgaacggcgaactgatcggtatcaacaccgcgatcctcgcaccggacggcggcaacatcggtatcggttttgctatcccgagtaacatggtgaaaaacctgacctcgcagatggtggaatacggccaggtgaaacgcggtgagctgggtattatggggactgagctgaactctgaactggcgaaagcgatgaaagttgacgcccagcgcggtgctttcgtaagccaggttctgcctaattcctccgctgcaaaagcgggcattaaagcgggtgatgtgatcacctcactgaacggtaagccgatcagcagctttgccgccctgcgtgctcaggtgggtactatgccggtgggcagcaaactgaccctgggcttactgcgcgacggtaagcaggttaacgtgaacctggaactgcagcagagcagccagaatcaggttgattccagctccatcttcaacggcattgaaggcgctgagatgagcaacaaaggcaaagatcagggcgtggtagtgaacaacgtgaaaacgggcactccggctgcgcagatcggcctgaaaaaaggtgatgtgattattggcgcgaaccagcaggcagtgaaaaacatcgctgaactgcgtaaagttctcgacagcaaaccatctgtgctggcactgaacattcagcgcggcgacagcaccatctacctgttaatgcagtaa

SEQ ID NO: 260983 - DNA, 1158 bp, Klebsiella pneumoniae
atggctggctggcatcttgataccaaaatggcgcaggatatcgtggcacgtaccatgcgcatcatcgataccaatatcaacgtaatggatgcccgcgggcgaattatcggcagcggcgatcgtgagcgtattggtgaattgcacgaaggtgcattgctggtactttcacagggacgagtcgtcgatatcgatgacgcggtggcacgtcatctgcacggtgtgcggcaagggattaatctaccgttacggctggaaggtgaaattgtcggcgtaattggcctgactggtgaaccagagaacctgcgtaaatatggcgaactggtctgcatgacggctgaaatgatgctggaacagtcgcggttgatgcacctgttggcgcaggatagccgtttgcgggaagaactggtgatgaacctgattcaggctgaggagaatacccccgcacttactgaatgggcgcaacggctggggatcgatctcaatcaaccgcgagtggtggctattgttgaggtcgacagcggtcagcttggcgtggacagcgcaatggcggagttacagcaactgcaaaacgcgctgactacgcctgagcgtaataatctggtggcaattgtttcgctgaccgaaatggtggtgttgaaaccggcgttgaactcttttgggcgctgggatgcagaagatcatcgtaagcgagttgaacaactgattacccgcatgaaagagtacggccagctgcgttttcgcgtttcgctgggtaactattttaccggaccgggcagtattgcccgctcttatcgtacggcgaaaacgacgatggtggtgggtaaacagcgaatgccagaaagtcgctgctatttttatcaggatctgatgttgcctgtgttactcgacagtttgcgtggcgactggcaggccaacgaactggcgcgaccgctggcgcggctgaaagcgatggacaataacggcttgctgcgacgaacgctggcggcgtggtttcgccacaatgtgcaaccgctggctacgtcaaaggcgctgtttattcatcgtaatactctggagtatcggcttaatcgtatatcggaactgaccgggctggatttgggcaattttgatgacaggttgctgctgtatgtggcgttgcaactggatgaagagcggtag

SEQ ID NO: 260984 - DNA, 2673 bp, Klebsiella pneumoniae
atgaatacccttccagaacagtacgcaaataccgctctccccacccttcccggtcaaccgcaaaatccatgtgcctggccccgtgatgaattaaccgtctgtgggataaaagcccatattgatactttccagcgttggctgggtgatgcctttgacaatggaatctctgcagaagagttgattgaggcgcgtaccgagtttatcgaccagctcctgcaacggttatggattgacgcgggattcagccagattgccgacctggcattagtcgccgtcggtggctacggtcgtggcgagctgcatccactttccgacatcgatttgctgatcttaagccgtaagaaactcccggatgatcaggcacagaaagttggcgaactgttaacactattatgggatgtgaaactggaagtcggtcatagcgtgcgcacgcttgaagagtgcatgctggaagggttatcggatttaaccgtcgccaccaatttaatcgaatcccgcttattaattggcgatgttgcgctgttcctcgaactgcaaaaacatattttcagcgaaggattctggccttccgacaagttctacgcggcgaaagttgaagaacagaaccagcgccatcagcgttaccacggcaccagctacaaccttgaaccagacatcaaaagtagccccggcggcttgcgcgatatccacacgctgcaatgggtggcccgccgtcattttggcgcaacatcgttggatgaaatggtcgggtttggcttcttaacctcagcggagcgagcggaattaaacgaatgtctgcatatattgtggcgtattcgctttgccctgcatcttgtcgtcagccgttacgataatcgcctgttattcgatcgccagcttagcgtcgcccagcgtttgaattacagtggtgaaggtaacgaaccggtcgagcggatgatgaaggattacttccgcgttacacgccgcgtcagcgaactcaaccagatgctgctgcaactgttcgatgaagccatcctcgcccttcccgccgacgaaaaaccacgtccaatcgacgatgagtttcagctacgcggtacgctaatcgacctgcgtgatgaaacactatttatgcgccagccggaagccatcttgcgtatgttctacaccatggtgcgcaacagtgcgatcactggcatttactctaccacgctgcgccagttacgccacgcccgtcgccatttgcaacaaccgctgtgtaatattccggaagcgcgaaaactgtttttgagcattctgcgtcaccctggtgcggtgcgtcgcggactattaccgatgcatcgtcatagcgtgctcggcgcgtatatgccccaatggtcgcatatcgtcgggcagatgcagtttgacctgttccacgcctacacggtggatgaacatactattcgcgtgatgctgaaactggagagttttgccagtgaagaaacgcgccagcgccatccgttgtgtgtggacgtctggccgcgcctgccgtcaactgagctgattttcatcgccgcgctgtttcacgatatcgccaaaggacgcggcggcgaccactccattctcggtgcacaagacgtggtgcattttgccgaactccacgggcttaactcgcgcgaaacacagctggtggcgtggctggttcgccagcacttgctgatgtcggtgacagctcagcgccgcgatattcaggacccggaagtgatcaagcagtttgccgaagaagttcaaacggaaaatcgtctgcgctatctggtatgcctgacagtggctgacatttgcgccaccaacgaaacgctgtggaatagctggaagcaaagtctgttgcgcgaactctatttcgccaccgaaaagcagctacgacgtggaatgcaaaacacgccggatatgcgcgaacgggttcgccatcaccaactccaggcgctggcactactgcgcatggataacatcgacgaagaggcgctgcaccaaatttggtcacgctgtcgtgctaactattttgtccgccatagcccaaatcaactggcctggcatgcgcgccatttattacagcatgatttaagcaaaccgctggtattgcttagtccgcaggctacgcgtggaggcaccgagatttttatctggagcccggaccgcccctatctgtttgccgccgtctgtgccgaattagaccgccgcaatttaagtgtccacgacgcacaaattttcaccactcgcgacggtatggcgatggataccttcatcgtgctggaacccgatggcagcccgctgtccgcagatcgccatgaagttattcgatttggtctggagcaggtactgacacaaagtagctggcagccaccgcagccacgtcgccaaccggccaaactacgtcactttactgttgaaactgaagtgacatttttgccgacccataccgaccgcaaatcgttccttgagcttatcgcgctcgaccaaccaggactgctggcgagagtcgggaaaatttttgccgatctgggaatttcgcttcatggcgcccgaattacaaccattggcgaacgagtagaagatttattcataattgccaccgctgaccggcgtgcacttaataacgagttgcagcaggaagtgcatcagcggttgacagaggccctcaatccaaacgataaagggtga

SEQ ID NO: 260985 - DNA, 267 bp, Klebsiella pneumoniae
atgatgaagcccaatatccatcctgagtatcgtactgtggtgttccacgacaccagtgttgatgagtactttaaaatcggctcgactatcaaaacagaccgtgagattgagctggatggcgtaacgtatccgtacgtgacaattgatgtctcttctaaatcgcacccgttctatacagggaagctgagaacagtggcatcagaaggaaatgttgcacgattcacccaacgttttggtcgttttgttagcacgaaaaagggggcatga

SEQ ID NO: 260986 - DNA, 141 bp, Klebsiella pneumoniae
atgaaagtccttaactctctgcgtaccgcaaaagaacgccatccagactgtcagattgtgaagcgaaaaggacggctatatgtgatttgtaaatctaatccacgttttaaggccgttcagggtcgtaagaaaaaacgttga

SEQ ID NO: 260987 - DNA, 588 bp, Klebsiella pneumoniae
atgaaaaaaaaggttctggcaatagctctggtaacggtgtttaccggcatgggtgtggcgcaggctgctgacgtaacagctcaggctgtagcgacctggtcagcaacagccaaaaaagacaccaccagtaagctggttgtgacgccactcggtagcctggcgttccagtatgccgaaggcattaaaggttttaactcacagaaaggtctatttgacgtagctatcgagggtgactcaacggctaccgcctttaaactgacctcacgtcttatcaccaacaccttaacccagttggatacctcaggttccacactgaatgtgggcgttgattataacggcgcggcagtcgaaaaaactggcgataccgtgatgatcgataccgccaacggcgtactgggcggcaaccttagcccactggctaacggttacaatgccagcaatcgtaccaccgcacaggatggtttcactttctccatcatcagcggcaccaccaatggtaccaccgcagtaaccgattacagcactctaccggaaggcatctggagcggcgacgttagcgtacagttcgacgctacctggaccagttaa

SEQ ID NO: 260988 - DNA, 669 bp, Klebsiella pneumoniae
atgaaaaagcaccttctgcctctcgctctgctgttttccggaatatctccggcccaggcgctggatgtcggcgatatatcatcgtttatgaacagtgacagcagcacgctgagcaaaacgatccaaaacagtaccgacagtggccgcctcatcaatatccgtctcgaacggctctcttcaccgcttgacgacgggcaggttatcgcaatggacaagccggatgagttgctactcactcccgccagcttgctgctacccgcccaagccagcgaagtgatccgcttcttctataagggaccagcagatgaaaaagagcgctactaccgcattgtctggtttgatcaggccctcagtgatgcgcagcgcgataatgccaaccgtagcgctgtggccactgcttccgcccgcatcggcaccattctggtcgtcgccccccgccaggcgaactaccactttcagtacgccaacggctccctgacaaatacaggaaatgcgacgctgcggatcctcgcctacggcccctgcctgaaagccgccaatggtaaagagtgtaaagagaattactacctgatgccgggcaagtcgcgtcgttttacccgcgtggacacggcggataacaaaggacgggttgcactttggcagggtgataagttcattcccgtgaaatag

SEQ ID NO: 260989 - DNA, 2526 bp, Klebsiella pneumoniae
atgcctttacgacggttctccccaggactgaaagcccagtttgccttcggcatggtctttttgttcgttcagcccgatgccagcgctgctgacataagtgcgcagcaaataggtggggtgattattccgcaggccttcagtcaggcgcttcaggacggcatgagcgtcccactttatattcatctcgccggtagccaggggcgccagaacgatcagcgaatcggcagcgcttttatctggctggatgatggacagctacgcatccggaaaatacagctggaagagagtgaagataacgccagtgtcagcgaacaaactcgacagcagctgatggctctggcgaacgccctgttcaatgaggcccttaccatccccctgactgacaacgcgcagctggatctcagcttgcgccaactgctgctgcagctagtggtcaagcgcgaagcgctgggcaccgtactacgctcacgtagcgaagacatcgggcagtccagtgttaacaccctcagcagtaatctgagctataacttcggcgtctataacaaccagttgcgtaacggcgggagcaacacatccagctatctgtcgctgaataacgttactgcactgcgcgaacatcacgtggtgctcgacggctcgctgtacgggatcggtagcggtcaacaggacagtgaattatataaagcgatgtatgaacgcgattttgccggtcaccgatttgccggtggaatgctcgacacctggaacttgcagtccttagggccgatgaccgccatttcagcagggaagatttacggcctttcctggggaaaccaggccagctccaccatcttcgacagcagccagtcagccacgccagtgatcgcctttttaccggcggcgggcgaagtacatctcacccgtgatgggcggctactaagcgttcagaacttcactatgggcaatcatgaagtggatacccggggtctaccgtacggtatttacgatgtggaagttgaggtcatcgttaacggtcgcgtgatcagcaaacgcactcagcgggtcaataagctgtttagccgggggcgcggcgtcggtgcgccactggcgtggcagatatggggcggtagctttcatatggatcgctggtcggaaaacgggaaaaagacgcgaccagctaaagagagctggctagcaggtgcctcgacctccggctcactgagtacgcttagctgggcggcaacgggatatggatacgataatcaggcggtgggtgaaacccgtctgacgctgccgcttgggggggcgatcaacgttaacctgcaaaatatgctggccagtgacagctcatggagcagcatcggcagcatcagcgccactctaccgggaggctttagttcgctgtgggttaatcaggaaaaaacccgcattggcaatcaattgcgacgtagcgatgccgacaaccgtgcaatcggcggcacactcaacctgaactcactgtggtcgaagctgggtacgttcagcatcagctacaatgatgaccgccgctacaacagccattattacacggcagattactatcaaagtgtctacagcggtacctttggttcgcttggcctgcgggccggtattcagcgctataacaacggcgacagcagcgccaatacagggaaatatatcgctctcgatctctcgctaccactgggcaactggtttagcgcagggatgacccatcaaaacggctacaccatggcaaacctgtcagcacgcaaacagtttgatgaaggaaccattcgcactgttggtgccaatctgtcacgagccatctccggcgataccggtgatgacaaaaccctcagcggtggggcgtatgcacagttcgacgctcgttacgccagcggaacgctgaacgtcaatagcgcggcggacggctacatcaataccaatttgaccgccaacggcagcgtcggctggcaaggtaaaaacatcgctgccagcgggcggaccgatggcaatgctggggtgatattcgacactggcctggagaacgatggtcagatcagcgccaaaatcaacgggcggattttcccgcttaacggcaagcgtaactatctcccgctctctccctatggaagatatgaggtggagttacagaacagcaaaaactcactcgacagttacgatatcgtcagcggtcgcaaaagccatctgactctctatccaggcaatgtcgctgtcattgagccagaagtgaagcagatggttaccgtctccggtcgtatccgtgcggaagacggcacactgctagctaacgcacggattaacaaccatatcggccgaacccgaaccgatgaaaacggcgagtttgtcatggacgtggacaagaaataccccactatcgattttcgctacagtggcaataaaacctgcgaagtggcactggaactcaaccaggcgcgcggtgccgtttgggtcggtgatgtggtctgcagcggcctctcatcgtgggcggcggtgacgcagacaggagaagagaatgagagttaa

SEQ ID NO: 260990 - DNA, 1644 bp, Klebsiella pneumoniae
atgagagttaacctactgatagcgatgataatctttgcgctaatctggcctgcaaccgcgctcagagcggcagtgagcaaaacaacctgggcggatgctccggcacgcgagtttgtgtttgtcgaaaacaactcagacgacaactttttcgtcactcctggcggggcgctggatccgcgcctgaccggtgccaaccgctggaccggtttaaaatacaatggttcaggaaccatctatcagcaaagcctcggctacattgataacggttacaacaccggcctttataccaactggaagtttgatatgtggctggaaaattcaccagtttcatctcctttaactggcttgcgctgcatcaactggtacgctgggtgtaatatgaccaccagtcttatcctgccgcaaaccaccgacgccagtggattttatggcgcgacggtgaccagcggcggcgcgaagtggatgcacggcatgttgtcagacgcgttttaccagtatctgcaacaaatgcccgtcggcagcagctttacaatgaccatcaatgcctgccagacctctgtgaactatgacgccagcagcggcgcacgctgtaaggatcaggcctccggcaactggtatgttcgcaacgtcacccatacgaaagcagcaaatctacggttgataaatacccactcgctggcggaggtgtttatcaacagcgacggagtaccgactctgggcgaagggaacgccgactgccggacgcaaaccatcggcagccgttcaggattaagttgtaagatggttaactataccctgcaaacaaacggactcagcaacacctcaatccatatattcccggcgatcgccaactcgtcgttagcctcggccgtcggggcgtacgatatgcagttcagtctgaatggcagttcatggaaaccggtgagcaatactgcctattactacaccttcaacgagatgaagagcgcagactcgatctatgttttcttctcgagcaacttctttaagcagatggtgaacctcgggatcagcgatatcaacaccaaagatctattcaactttcgctttcagaacaccacatcaccggagtctggctggtatgaattttctacctccaacacgctgattatcaaaccccgtgatttcagcatcagtattatctccgatgaatatactcagacaccgtcgcgggagggatatgttggcagcggcgagtcggcactcgatttcggctatatcgtaaccaccagcggtaaaacagctgccgacgaagtgctgatcaaggtgaccggacccgcgcaggtgattggcgggcgctcctattgtgtcttcagctccgatgacggtaaggcgaaagtaccgttcccggcgacactttcctttattacccgcaacggagctacaaaaacctacgatgccgggtgcgatgatagctggcgggatatgaccgatgcgctgtggttgaccacaccgtggactgatatctctggcgaagtggggcagatggataagaccacagtcaaattttcgattccaatggataacgccatttcgctgcgtacggtagatgataacggctggtttggcgaagtcagcgcttcaggagaaattcatgttcaggcgacgtggcgtaacattaactaa

SEQ ID NO: 260991 - DNA, 690 bp, Klebsiella pneumoniae; identical to SEQ ID NO: 9499

SEQ ID NO: 260992 - DNA, 957 bp, Klebsiella pneumoniae; identical to SEQ ID NO: 9500

SEQ ID NO: 260993 - DNA, 2199 bp, Klebsiella pneumoniae; identical to SEQ ID NO: 9501

SEQ ID NO: 260994 - DNA, 954 bp, Klebsiella pneumoniae; identical to SEQ ID NO: 9502

SEQ ID NO: 260995 - DNA, 1128 bp, Klebsiella pneumoniae; identical to SEQ ID NO: 9503

SEQ ID NO: 260996 - DNA, 1137 bp, Klebsiella pneumoniae; identical to SEQ ID NO: 9504

SEQ ID NO: 260997 - DNA, 885 bp, Klebsiella pneumoniae; identical to SEQ ID NO: 9505

SEQ ID NO: 260998 - DNA, 921 bp, Klebsiella pneumoniae
atggatctgcgtgatagctatgcccggcaggtcaaactgttgatggccgctctgccgtatgtggcgaaggagtcctgtttcgcgttgaaaggcggcaccgcaatcaatttgtttgtgcaggattttccccgtctgtcggtggatattgatctggcgtacaagagctttgcggatcgcgatactgatttggcggctatcaacgacgctttgaagaggattactgcatcgctgaacggcagaccggggatcaccgcgattcggcaggaaaataaagcggatgaaaagcgcatcattgtgaataccgctgatgcaaagattaagatcgaggttagcccggtctggcgcgggctgttgttgcctccggcagaaatgcctgtgtgcgaacgtgtggaaatggagtatggcttcaccaccatgagtgtcgtctcgctggcggatctttatggcggtaaaatctgcgctgcgcttgatcgtcagcacccgcgcgatctgtttgatgtgctgaatatgctggagaaaccgggactgatgcgggagatctttgacggttttctttgttatctggcaggccatccccgccccatcgccgagttgctggctccaaactgggatacagagcggatcgccacgttgtacgcgcaggaattttcagggatgacgcaacaggaaacgtcgctggaatcgcttctgtcagtaacgactttgctgccgcaggcgttgaagtcacatcttacggatctggatcgcgagttcttgctcagttttaagcaaaacagccctgactggtcgcggtatcgctatcctgaaattcagcatcttccggctattcgctggaagcaacgcaatctggcggtgcttaaagataaaaatccggcgaagtatgtggcggcggtgaataagctagagagggttctggcgtaa

SEQ ID NO: 260999 - DNA, 783 bp, Klebsiella pneumoniae
ttgccaaactatctaaactggctgatgcagcacacgctacccggccaggtgctgctccagtcatggcttacccgcaacggcatagatcgtaagctctcttatctctatgtgaagaatggctggctcaggcggatcgctcacggcgtatactgccggacgggtcgtgaaccggattgggtggatgcggtttactgcctgcaatcgcagtgggaaaagcctgttcgggtggcggggctaaccagccttgcgcttcagggtcatgcgcactataccgaacagggtaagccgcaggtctggctcgcgcttccggcttacgtcaaactgccgggatggttttctgcctttgaacaatccgcaacgtttgtcacgctgtatacgtcaggccttaccgctgatgtaacgccatttactacggaactgaaaattggcgaccgccagttagcaggcagtgttccggaactggccgcgtatgagatcgcctgcggcgttccttcgttaatctcgttcgaacatgccgatgctctgtttcaggggttgaatcttctcagcccacgcaaattgcaggcactgcttcgcgccagccattcggttaaaaccaaccgggtgatgctttaccttgcccggcgtaatggacacccttattttcagtatattgatcaaagcggtatagaaacaggtacgggaaagcggcaaatcatacccggcggctggctggagccggattatcaaattactgttccacgcgcatttaaaccggaaggagtcgaagatggatctgcgtga

SEQ ID NO: 261000 - DNA, 3210 bp, Klebsiella pneumoniae; identical to SEQ ID NO: 9506

SEQ ID NO: 261001 - DNA, 471 bp, Klebsiella pneumoniae
atggctacaatcctcaccactgacagcgatttactcgatctattgaccgtccccttcaatgccaccacggatttcactgtccttgctgactactgcgcccgctttgccgaaaccctgattgaaaccgacgatccagcgctacgactggcgctctgcgggcggcttcacgcggctcttgcgctactgcaacccacactacacgaccccatcccaccgcatcttaccgaaagcctgaccgtggatacccttcccgccacaccagagcactttatttccgaacctgattccttgtgcgaatactgcctcgcactactccagcttctgctggaacgtccggcggaaccaaaaatggagcaaaccctgaccgggctgctgtgtgagctggtctggtatttcacggaaggactcaaagccccacgctggctgcgtaccgccgacggcgtaaaatttatcagcgaggtggccgcatga

SEQ ID NO: 261002 - DNA, 141 bp, Klebsiella pneumoniae; identical to SEQ ID NO: 9507

SEQ ID NO: 261003 - DNA, 1254 bp, Klebsiella pneumoniae
atgctggaacaaatgggcattgccgcgaagcaagcctcgtataaattagcgcaactctccagccgcgaaaaaaatcgcgtgctggaaaaaatcgccgatgaactggaagcacaaagcgaaatcatcctcaacgctaacgcccaggatgttgctgacgcgcgtgccaatggccttagcgaagcgatgcttgaccgtctggcactgacgcccgcacggctgaaaggcatcgccgacgatgtgcgtcaggtgtgtaatctcgccgatccggtggggcaggtaatcgatggcggcgtactggacagcggcctgcgtcttgagcgtcgtcgcgtaccgctgggggttattggcgtgatttatgaagcgcgcccgaacgtgacggttgatgtcgcttcgctgtgcctgaaaaccggtaacgcggtgatcctgcgtggtggcaaagaaacctgtcgcactaacgctgcaacggtagcggtgattcaggacgccctgaaatcctgcggcttaccggcgggtgccgtgcaggcgattgataatcctgaccgtgcgctggtcagtgaaatgctgcgtatggataaatacatcgacatgctgatcccgcgtggaggcgctggcctgcataagctgtgccgcgaacagtcgacaatcccggtgatcacaggcggtataggcgtatgccatatttacgttgatgaaagtgcagagatcgctgaagccctgaaagtaatcgtcaacgcaaaaactcagcgtccgagcacatgtaatacggtagaaacgttgctggtaaataaaaacatcgccgatagcttcctgcccgcattaagcaagcaaatggcggaaagcagcgtggcattacacgcagatgtagctgcgctggcgcagttgcaggcaggccccgcgaaggtggtggctgttaaagccgaagagtatgacgatgagtttctgtcattagatttgaacgttaaaatcgtcagcgatcttgacgatgccatcgcccatattcgtgaacacggcacacaacactccgatgcgatcctgacccgcgatatgcgcaacgcccagcgttttgttaacgaagtggattcgtccgctgtttacgttaacgcctctacgcgttttaccgatggcggccagtttggtctgggtgcggaagtggcggtaagcacacaaaaactccacgcgcgtggcccaatggggctggaagcactgaccacttacaagtggatcggcattggtgattacaccattcgtgcgtaa

SEQ ID NO: 261004 - DNA, 1056 bp, Klebsiella pneumoniae
atgaaaaagagcactctggcattagtggtgatgggcattgtggcatctgcatccgtacaggccgcagaaatatataacaaagacggtaataaactggatgtctatggcaaagttaaagccatgcattatatgagtgataacgacagtaaagatggcgaccagagttatatccgttttggttttaaaggcgaaacacaaattaacgatcaactgacgggttatggtcgttgggaagcagagtttgccggtaataaagcggagagtgatactgcacagcaaaaaacgcgtctcgcttttgccgggttgaaatataaagatttgggttctttcgattatggtcgtaacctgggcgcgctgtatgacgtggaagcctggaccgatatgttcccggaatttggtggcgactcctcggcgcagaccgacaactttatgaccaaacgcgccagcggtctggcgacgtatcggaacaccgacttcttcggcgttatcgatggcctgaacttaaccctgcaatatcaagggaaaaacgaaaaccgcgacgttaaaaagcaaaacggcgatggcttcggtacgtcattgacatatgactttggtggcagcgatttcgccatcagtggggcctataccaactccgatcgcactaacgagcagaacctgcaaagccgtggcacaggcaagcgtgcagaagcatgggcaacaggtctgaaatacgatgccaataatatttatctggcaactttctattctgaaacacgcaaaatgacgccaataactggcggctttgccaataagacacagaactttgaagcggtcgcccaataccagtttgactttggtctgcgtccgtcgctgggttatgtcttatcgaaagggaaagatattgaaggcatcggtgatgaagatctggtcaattatatcgacgtcggtgctacatattatttcaacaaaaatatgtcagcgtttgttgattataaaatcaaccaactggatagcgataataagctgaacatcaataatgatgatattgtcgcggttggcatgacctatcagttttaa

SEQ ID NO: 261005 - DNA, 402 bp, Klebsiella pneumoniae
atgacgttaccgagtggacacccgaagagcagattgatcaaaaaatttaccgcactaggcccgtatattcgtgaaggtaagtgcgaagataatcgattctttttcgattgtctggctgtatgcgtcaacgtgaaaccggcaccggaagtgcgtgagttctggggctggtggatggaactggaagcgcaggaatcccgttttacctacagttaccagtttggtctgttcgataaagcaggcgactggacgagtgttcagataaaagatgccgaagtggttgaacgactggagcacaccctgcgtgaatttcacgagaagctgcgtgagctgctggcgacgctgaatctgaagctggaaccggcggatgattttcgtgatgaaccggtgaagttaacggcgtga

SEQ ID NO: 261006 - DNA, 1245 bp, Klebsiella pneumoniae
atgacacaggcaaacctgagcgaaaccctgttcaaaccccgctttaaacatcctgaaacctcgacgctagtccgccgctttaatcacggcgcacaaccgcctgtgcagtcggcccttgatggtaaaaccatccctcactggtatcgcatgattaaccgtctgatgtggatctggcgcggcattgacccacgtgaaatcctcgacgtccaggcacgtattgtgatgagcgatgccgaacgtaccgacgatgatttatacgatacggtgattggctaccgtggtggcaactggatttatgagtgggccacccaggcgatggtgtggcaacaaaaagcctgtgcggaagaagatccgcaactcagtggtcgtcactggctgcatgcggctacgttgtacaacattgccgcctatcctcatctgaaaggagatgacctggccgagcaagcgcaggctttgtcaaaccgcgcctatgaagaggccgctcagcgtctgccgggcaccatgcggcagatggagtttaccgtacccggcggtgcgcccatcaccggctttttgcatatgccgaaaggcgatggcccgttcccgacagtattaatgtgtggtggtctggatgcgatgcagacggactattacagcctgtatgaacgttattttgcgccgcgcggcattgcgatgctgactattgatatgccgtcggtgggcttttcttcaaaatggaagctcacccaggactccagcctgttgcatcagcacgtcttaaaggcgctgcctaacgtaccgtgggtagatcacactcgcgtcgcggcctttggtttccgtttcggcgctaacgttgccgtgcgtctggcataccttgaatcgccgcgtctgaaagcggttgcctgtcttggtccggtagttcataccctgttgagtgattttaagtgccagcaacaggtgccggaaatgtatcttgacgttctggcgagccgtttggggatgcatgatgcttccgacgaagcgttgcgcgtggagctgaatcgctattcattaaaagtgcaaggattgctgggacgtcgctgcccaacgccaatgttatcaggctactggaagaacgatccgttcagcccggaagaggactcacgcttaatcacctcatcatctgctgacggtaaattgttagagatcccatttaacccggtgtatcggaattttgacaaaggtcttcaggaaataacagactggattgaaaaacgattgtgttaa

SEQ ID NO: 261007 - DNA, 258 bp, Klebsiella pneumoniae
atgggcattaagcgaaagttggtgcggcactattcagtggatttgtccgagtccgtatcggcctcatcatgggcgcaaaaacttgtttctgggcatgctaacaagcggctggcgcgattgctgattgcctggaagctggaacaacagcaacaggaaaatagcgcggtgctgaaatcgcagcggcgaatgttccatcaccagattgaacgtggcaacccgagacggacatttacagggatggcttttatcgaaggataa

SEQ ID NO: 261008 - DNA, 255 bp, Klebsiella pneumoniae
atgggcaaatatattcgtcccttatccgatgcggtatttaccatcgcatctgatgacctgtggatcgagagtttagcgatccaacaattacacaccacggcaaatttacccaacatgcagcgcgtagtagggatgccagatttacaccccggacgcggctacccgattggcgcagcgttattctctgttggtcgtttttacccggcaagacgtcgcggtaacggtgctggaaacagaaacgggccgctgctctga

SEQ ID NO: 261009 - DNA, 375 bp, Klebsiella pneumoniae
atgaccgccagtcagcattattcaccacaacaaattgccgcctgggcgcagattgacgaatctcgctggaaggagaaactcgcgaaatcacaagtgcgggttgcagtcattaatgcaaaactggtcggctttattacctgcgttgaacattatatcgatatgttatttgttgaccctgaatacacccgccgtggggttgccagcgctttgttaaaacctttgattaagtctgaatccgaactaacggtagatgccagcataaccgcaaaacccttttttgaacgttatggttttcagacagttaagcagcagcgcgttgaatgccggggagcgtggtttactaatttttatatgcgatataaaccgcaacattaa

SEQ ID NO: 261010 - DNA, 399 bp, Klebsiella pneumoniae
atgcgggtattcaaaacaaaacttattcgcctgcaacttacagcagaggaacttgatgcgttaacggcggattttatttcctataagcgtgacggtgttttgccagatatatttggtcgcgatgcactctacgacgactcgtttacctggccattaatcaaatttgagcgagttgctcatattcatctggcaaatgtgaataatccatttccgccacagttgcgccaattcagcagaacgaatgacgaagcgcatttggtatattgtcagggtgcgtttgatgagcaagcatggttgctcattgccattctgaagcctgaacctcataaactggctcgagataacaaccaaatgcataaaattggaaaaatggcagaagcgtttcgcatgcgtttttga

SEQ ID NO: 261011 - DNA, 294 bp, Klebsiella pneumoniae
atgcatcgaattctcgctgaaaaatcggtcaatatcactgagttacgtaaaaatccagcaaaatactttattgatcaaccggttgcggttctttctaataatcgccccgcaggatatctcttaagtgccagcgcattcgaagcgttaatggacatgcttgcagaacaagaggagaaaaaactggtgaaggcgcgcttccgtccgagtgccgcaagattagaggaaattacacgccgcgctgaacaatatcttaatgatatgacggatgatgatttcaatgactttaaggaataa

SEQ ID NO: 261012 - DNA, 1056 bp, Klebsiella pneumoniae
atgcgtaaaatcattcatgtggatatggactgctttttcgccgcagtggagatgcgcgacaatcccgccctgcgcgatatccctattgctattggcggcagccgcgaacgtcggggggtgatcagcaccgccaattatcccgcgcgtaaatttggcgtacgtagcgctatgcctactgggatggcgctcaaattatgcccacatctcaccttgcttccggggcgctttgacgcctacaaagaagcctcaaatcatatccgtgaaatcttctcgcgctacacctcgcgcattgaaccgttgtcactggatgaggcctatctcgatgtcaccgatagcgtccattgccacggttctgcgaccctcatcgcccaggaaatccgccagacgattttcagcgagctgcaactgacggcgtctgcgggcgtggcaccagtaaagtttctcgccaaaatcgcctccgacatgaataaacccaacggccagtttgtgattacgccggcagaagttccgacatttttacaaaccttaccgctggcaaaaatccccggcgtcggcaaagtctcggcggcaaaactggaagcgatggggctgcggacctgcggtgatgtgcaaaagtgtgatctggtgactctgctcaaacgttttggcaaatttggccgcattttgtgggagcgtagtcaggggattgacgagcgcgacgttaacagcgaacggttgcgaaaatccgtcggcgtggaacgcacgatggcggaagatattcatcactggtctgaatgtgaagcgattatcgagcggctgtacccggaacttgaacgccgtctggcaaaagtaaaacctgatttactgattgctcgccagggggtgaaattaaagtttgatgattttcagcaaaccactcaggagcacgtctggccgcggctgaataaagctgacttaattgccaccgcgcgtaaaacctgggatgaacgtcgcggcgggcgcggtgtgcggctggtggggctgcatgtgacgttgcttgacccgcaaatggaaagacaactggtgctgggattatga

SEQ ID NO: 261013 - DNA, 636 bp, Klebsiella pneumoniae
gtggcggtgccggaagagacggagaaaaaagcgcgtgacgtcaatgagaaaacggcgctgctgaagaagaaatccgctactgagcttggcgagctggcgaccagtatcaacaccattgcccgtgatgcacatatggaagcgaatctggagatggagattgttccccagggactgcgcgtgctgattaaagatgaccagaaccgcaatatgtttgaacgcggcagcgcacagattatgccgttctttaaaactttgctggtggagctcgcgccagtgttcgactcgctcgataacaaaattattattaccgggcataccgatgcgatggcctacaaaaacaatatctacaacaactggaacctttcgggcgatcgcgcgctttcggctcgtcgggtgctggaagaggccggaatgccggaagataaagtgatgcaggtgagcgcgatggcggaccagatgctgctggacgcgaaaaatccgcaaagcgcgggcaaccgacgcattgagattatggtgctgaccaaaagtgcgtccgatacgctgtatcaatactttggtcagcatggggataaagtggtgcagccgctggtgcaaaagctggataagcagcaggtgctttcgcagcgaacgcgctag

SEQ ID NO: 261014 - DNA, 1740 bp, Klebsiella pneumoniae
atgctttcacgctcggatttactgacgctgttgacaatcaactttatcgtcgtcaccaaaggggccgagcgtatttccgaggtttctgcccgctttaccctggacgcgatgcccggcaaacagatggcgattgacgccgatcttaacgccgggttgatcaaccaggcgcaggcgcaaacccggcgtaaagatgttgccagcgaggccgatttctacggcgcaatggacggggcatcgaagtttgtgcgcggggatgccatcgccgggatgatgattctggcgatcaacctgatcggcggcgtctgtatcgggatcttcaaatacaacctgagcgccgatgccgccttccagcaatatgtgctgatgaccatcggcgacggcctggtggcgcagatcccgtccctgctgctttccaccgcggcggcgattatcgtcacccgcgtcagcgacaacggcgatattgcccatgacgtgcgtaaccagttgctggcaagcccgtcggtgctctacaccgccaccgggatcatgtttgtgctggcggttgtgccggggatgccgcatctgccgtttttgctgttcagcgccctgcttggttttaccggctggcggatgagcaaacgcccgcaggcggcggaggcggaggagaaaagcctcgaaacgctgacccgcaccatcaccgaaaccagcgagcaacaggtcagttgggagactattccgctgatcgaacccatcagtttaagcctcggttacaaactggtggcgctggtcgataaagcgcagggtaacccactcacccagcgtattcgcggcgtgcggcaagtgatatccgacggcaacggcgtgctgctgccggagatccgtattcgggaaaacttccgcctcaagcccagccagtacgccatattcatcaacggcattaaggccgatgaagcggatattccggcggataaactgatggccctgccctccagcgaaacctacggcgagattgacggcgtgctggggaacgacccggcgtacgggatgccggtgacctggatccagcccgcgcagaaagcgaaagcgctgaatatggggtatcaggtgatcgacagcgccagcgtgatcgctacccatgtgaacaagattgtgcgcagctatattcctgatttgtttaactatgatgacatcacgcagttgcataaccgtttgtcgtcgatggcaccgcgcctggcggaagatttgagcgcggcgctcaattacagccaattgctgaaagtgtaccgggcgctgctgaccgaaggcgtttccctgcgcgatattgtcaccatcgccaccgtgctggtcgccagtagcacagtgaccaaagatcatatcctgctggcggccgatgtgcgcctggcattgcggcgcagcattacccatccgttcgttcgcaagcaggagctgacggtgtatacgctgaataatgagctggaaaatctgctcaccaacgtggtgaatcaggcgcaacagggcgggaaagtgatgctcgacagcgtgccggtcgatccgaatatgctcaaccagttccagagtacgatgccgcaggtaaaagagcagatgaaagcggcggggaaagacccggtgctgctggtgccgccgcagttgcgtcctttgctggcgcgttatgcaaggttgtttgcgccggggctgcatgtgctgtcgtataacgaagtgccggacgagctggagttgaagattatgggggcgttgagttga

SEQ ID NO: 261015 - DNA, 279 bp, Klebsiella pneumoniae; identical to SEQ ID NO: 9508

SEQ ID NO: 261016 - DNA, 357 bp, Klebsiella pneumoniae; identical to SEQ ID NO: 9509

SEQ ID NO: 261017 - DNA, 759 bp, Klebsiella pneumoniae
atgtccttcatgtcttcgttcttgctcggcagatttctgcatccaggcgtgttttcgttatgcgttttgctccctttactcgccagcgccaccacatcacatatctctttcagctacgccgcccgccagcggatgcaaaaccgtgcgcgtttattaaaacagtaccaaacccatctgaaaaaacaggccagctatattgtggaaggcaatgccgaaagcagaaaggcgctgcgccagcacaaccgcgaacagataaaacagcatccagaatggtttcctgcgccgctcaaggcaagtgacagacgctggcaggcgctggcggagaacaaccatttcttaagcagcgaccatctacacaacatcaccgaagtggcgattcaccgcctggagcagcagcttggcaagccttacgtctggggcggcacgcggcccgatcaaggcttcgactgtagcgggttggttttttatgcctacaacaagatcctcgaggcgaagctcccacgcacggctaatgagatgtatcactatcgccgggcaaccattgtggcgaataacgacctgcgccggggagatttgctgttttttcatatccacagccgcgagattgccgaccatatgggcgtgtatctgggcgatggacagtttattgagtcgccgcgcaccggggaaaccatacgggtaagtcggttagctgaacctttctggcaggaccattttttaggcgcgcgccggattttgacggaagagacgattttgtaa

SEQ ID NO: 261018 - DNA, 741 bp, Klebsiella pneumoniae
atgcgtaaaatcgcattaattcttgcgatgttgttgatcccgtgcgtttcgtttgccggtttgctgggcagcagtagctcgaccacgccagtgagcaaagagtataagcagcagttgatgggatcccctgtctacatccagatcttcaaggaagaacgtacactcgatctctacgtcaaaatgggcgagcaatatcaactgctcgacagctataaaatctgtaaatattccggcggcttagggccaaaacagcgtcagggcgatttcaaaagcccggaagggttttatagcgtccagcgtaatcagttaaaaccagacagccgttactacaaagcgattaatattggattccccaatgcctatgaccgtgcgcatggttatgaagggaaatatctgatgatccacggcgattgtgtttccatcggctgctacgcgatgaccaatcagggtattgatgagatcttccagttcgttactggtgcgctggtttttggtcagccgagcgtgcaagtgagtatttacccgttccgcatgaccgacgccaatatgaagcgccataaatattccaactttaaggacttctgggagcaactgaagccgggctacgactactttgagcaaacccgtaagccaccgaccgtttctgtggtcaatggccgttacgtggtcagcaagccgttaagccacgaagttgtgcaaccacagctggcatcaaactacacgctccccgaggcaaaataa

SEQ ID NO: 261019 - DNA, 2445 bp, Klebsiella pneumoniae
atgatgattttgagtattctcgctacggttgtcctgctcggcgcgttgttctatcaccgcgtgagcttatttatcagcagtctgattttgctcgcctggacagccgccctcggcgttgctggtctgtggtcggcgtgggtactggtgccgctggccattatcctcgtgccgtttaactttgcacctatgcgtaagtcgatgatttccgcgccggtatttcgcggtttccgtaaggtgatgccgccgatgtcgcgcactgagaaagaagcgattgatgcgggcaccacctggtgggagggcgacttgttccagggcaagccggactggaaaaagctgcataactatccgcagccgcgcctgaccgccgaagagcaagcgtttctcgacggcccggtagaagaagcctgccggatggcgaatgatttccagatcacccatgagctggcggatctgccgccggagttgtgggcgtaccttaaagagcatcgtttcttcgcgatgattatcaaaaaagagtacggcgggctggagttctcggcttatgcccagtctcgcgtgctgcaaaaactctccggcgtgagcgggatcctggcgattaccgtcggcgtgccaaactcattaggcccgggcgagctgctgcaacattacggcactgacgagcagaaaaatcactatctgccgcgtctggcgcgtggtcaggagatcccttgctttgcactgacaagccccgaagcgggttccgatgcgggcgcgattccggacaccgggattgtctgcatgggcgaatggcagggccagcaggtgctgggcatgcgtctgacctggaacaagcgttacattacgctggcaccgattgcgactgtgcttggcctggcgtttaaactctccgacccggaaaaactgctgggtggcgcagaagatttaggtattacctgtgcgctgatcccgaccaccacgccgggcgtggaaattggtcgtcgccatttcccgctgaacgtaccgttccagaacggaccgacgcgcggtaaagatgtcttcgtaccgatcgattacattatcggcggaccaaaaatggccgggcaaggctggcggatgctggtggagtgcctctcggtaggccgcggcatcaccctgccttccaactcaaccggcggtgtgaaatcggtagcgctggcaacgggcgcgtatgcgcacattcgccgtcagttcaaaatttctattggtaagatggaagggattgaagagccgctggcgcgtattgccggtaatgcctatgtgatggatgctgcggcatcgctgattacctacggcattatgctcggtgaaaaacctgccgtgctgtcggctatcgttaagtatcactgtacccaccgcgggcagcagtcgattattgatgcgatggatattaccggcggtaaaggcattatgctcgggcaaagcaacttcctggcgcgtgcttaccagggcgcaccgattgccatcaccgttgaaggggctaacattctgacccgcagcatgatgatcttcggacaaggagcgattcgttgccatccgtacgtgctggaagagatggaagcggcgaagaacaatgacgttaacgcgttcgataaactgctgttcaaacatatcggtcacgtcggcagtaacaaagttcgcagcttctggctgggcctgacgcgcggtttaaccagcagcacgccaaccggcgatgccactaaacgctactatcagcacctgaaccgcctgagcgccaacctcgccctgctttctgatgtctcgatggctgtgctgggcggcagcctgaaacgtcgtgagcgtatctcggcccgcctgggggatattttaagccagctttacctcgcctctgccgttctgaagcgttatgacgacgaaggccgtaatgaagccgatctgccgctggtgcactggggcgtacaggatgcgctgtataaggctgaacaggcgatggacgatttactgcaaaacttcccgaaccgcgtggttgccgggctgctgaatgtagtgatcttcccgaccggacgtcattatctggcaccgtctgacaagctggatcataaagtggcgaagattttacaagtgccgaacgccacccgttcccgcattggtcgcggtcagtacctgacgccgagcgagcataatccggttggcttgctggaagaggcgctggtggatgtgattgccgccgacccaattcatcagcggatctgtaaagagctgggtaaaaacctgccgtttacccgtctggatgaactggcgcataacgcgctggcgaaggggctgattgataaagatgaagccgctattctggtgaaagctgaagaaagccgtctgcgcagtattaacgttgatgactttgatccggaagagctggcgacgaagccggtaaagttgccggataaagtgcggaaagttgaagccgcgtaa

SEQ ID NO: 261020 - DNA, 474 bp, Klebsiella pneumoniae
atgggcaggataagctcgggaggaatgatgtttaaggcaataacgacagtcgccgctctggtcatcgccaccagtgcaatggcgcaggatgatttaaccattagcagccttgcaaagggcgaaaccaccaaagctgcgtttaatcagatggtgcaagggcataagctacctgcatgggtgatgaaaggcggtacttatactcccgcacaaaccgtaacgttgggagatgagacgtatcaggtgatgagcgcgtgcaaaccgcatgactgtggctcgcaacgtatcgctgtgatgtggtccgagaaatctaatcagatgacggggctgttctcgactattgatgagaaaacgtcgcaagagaaactcacctggctgaatgtgaacgatgcgctttcgattgatggtaaaacggtgctgttcgcggcgttgaccggcagcctggaaaaccatccggatggctttaattttaaataa

SEQ ID NO: 261021 - DNA, 771 bp, Klebsiella pneumoniae
gtgtctggtttgaagattacgcttttacagcaaccactggtgtggatggatggtcctgccaacctgcgtcattttgatcgtcaactggaaggtattaccggacgcgatgtgatcgttctaccggagatgtttaccagcggctttgccatggaagcggcagcttcgtcgctagcacaagatgacgtagtgaactggatgacagccaaagcgcagcagtgcaatgcgctgattgcaggcagtgttgcattacaaacggagtctggttcggttaaccgctttttgctggttgagccgggcggcacggtacatttttatgataagcgtcatctgttccgcatggcagatgagcatctacattataaagcgggcaatgcgcgagtgattgtggaatggcgcggctggcgtattttgccgctggtgtgctacgacttacgttttcctgtgtggtcgcgcaatctcaacgattatgacctcgccctatacgtcgccaactggcctgctccgcgctctctgcactggcaggcattgctgacggcccgcgcgattgagaatcaggcgtatgtggcgggatgcaatcgcgtcggcagcgatggcaacggctgccattatcgcggtgacagccgggtgattaatccacagggcgagattatcgctactgccgacgcgcatcaggcaacgcgcattgatgcggagctgtcgatggtggcgttgcgggaatatagagaaaagtttccggcatggcgggatgcggatgagtttaggttgtggtga

SEQ ID NO: 261022 - DNA, 243 bp, Klebsiella pneumoniae
gtgtacccggaggcgatccgcaaggttatctacaccactaacgcaatcgaatcgctgaatagcatcatcacacatgcgataaagaaacggaaagtgttcccgacagatgagtcggtgaaaaaagtggtgtggctggctttccagtcagcgtcgcaaaaatggacgatgccacttcaggactggcggatagggatgagtcgctttattatcgagttcggtgaccgccttgacggtcacttctga

SEQ ID NO: 261023 - DNA, 303 bp, Klebsiella pneumoniae
atgacggtcagatattatattagttctgctgatttaaccgcagagaagttcgccacagcaatccgaaaccactggcacgtggagaataagctgcactggcgtctggacgtggtaatgaatgaagacgactgcaaaataagaagaggaaacgcagcagaattattttcagggatacggcacatcgctattaatattttgacgaatgataaggtattcaaggcagggttaagacgtaagatgcgaaaagcagccatggacagaaactatctggcgtcagtccttgcggggagcgggctttcgtaa

SEQ ID NO: 261024 - DNA, 405 bp, Klebsiella pneumoniae
atgcacagtctggtcatcggacagatcaggacggatgagaaatccaatgagattacagctatcccagaacttcttaacatgctggatattaaaggaaaaatcatcacaactgatgcgatgggttgccagaaagatattgcagagaagatacaaaaacagggaggtgattatttattcgcggtaaaaggaaaccaggggcggctaaataaagccttcgaggaaaaatttccgctgaaagaattaaataatccagagcatgacagttacgcaatgagtgaaaagagtcacggcagagaagaaatccgtcttcacattgtttgcgatgtccctgatgaacttattgattttacatttgaatggaaaggactgaaaaattatgcgtggcagtctcctttcggtcaataa

SEQ ID NO: 261025 - DNA, 477 bp, Klebsiella pneumoniae
ttgctggaggacaaactggaggctggctgcgcgccgctggtattgtggcaggcggcaacgcaaaacgtcttgccgacagattcgctgttaccgccgcccattgatggcctgatgaatggcctaccgttggcgcatgagttactggcgcatgtacgtaaccccgacgcgcagccgcacagcattaatctgacgcaattacccatcagcgaggctgatcggctttttctctcacgtctctgtgggccgggaaatattcagattcgtaccattggctatggcgagagctatatcaacgccacggggttacgccatgtctggcatttacgctgtacggacaccttaaaaggcccgttactggaaagttatgaaatctgcccaataccggaagtggtgctggcagcgccagaagatttggtcgactctgcgcagcggcttagtgaggtatgtcagtggctggcggaaggggcaccgtcgtaa

SEQ ID NO: 261026 - DNA, 1545 bp, Klebsiella pneumoniae
atgtgggatgtcattgatttatcgcgctggcagtttgctctgaccgcgctgtatcactttttatttgtaccccttaccctggggctgatttttttgctggctatcatggaaaccatttacgtggtcaccggcaaaacaatctaccgcgatatgacgcgcttctggggtaagctcttcggtatcaactttgctcttggcgtggctaccggcctgacgatggagtttcagtttggtactaactggtcattctattccaactatgtgggcgatatttttggcgcaccgctggcaatggaagcattaatggccttcttcctcgagtccacctttgtcgggctgttcttcttcggctggcagcggctgaataaataccagcacctgctggtgacgtggctggtggcgttcggttcaaatctctctgcgttgtggatattgaatgccaacggttggatgcaatacccgaccggtgcgcattttgatatcgacacccttcgtatggaaatgaccagcttcagcgagctggtctttaacccggtcagccaggtgaaatttgtgcacaccgtaatggcgggctacgtgaccggggccatgtttattatggcgatcagcgcctggtatttactgcgcggacgggagcgcgatgtcgcattacgctcgtttgccatcggttccgtcttcggtactctggcgattatcggtacgctgcaactcggagacagttcggcgtatgaagtcgcgcaagtacaaccggttaaactggcggcaatggaaggggagtggcaaacggaacctgcacctgcaccgttccatgtggttgcctggccggaacaggatcaagagcgtaacgcctttgccatcaaaattcccgcgctgctagggatcctcgccactcactcattagataaacccgtgccgggtctgaagaatttgatggctgaaacctacccacgcttgcaacgcggacgtatggcctggctgttaatgcaggaaatatcgcagggcaatcgtgagccgcatgtgttgcaggcattccgggagctggaaggcgaccttggttacggcatgttgctctcccgctatgcgccggatatgaatcatgtcacagccgcacagtaccaggtggcgatgcgtggcgcgatacctcaggttgcgccggtattctggagtttccgcatcatggtgggctgtggttccctgctgctactggtgatgctgattgcgcttgtccagacgctgcgtggcaaaatcgaccagcatcgctgggtgctgaaaatggcgctctggagtttgccgctgccgtggattgcgattgaagccgggtggtttatgaccgagtttggtcgtcagccgtgggcgatacaggacatcttaccgacatactccgcgcactccgccttaaccacaggacaactggctttctcactgatcatgatcgtagggctttacaccctgttcttaatcgccgaagtctacctgatgcagaaatatgcccgtctggggccgagcgcgatgcagagtgaacaaccgacgcagcaacaggggtaa

SEQ ID NO: 261027 - DNA, 1137 bp, Klebsiella pneumoniae
atgtttgattatgaaacattgcgcttcatctggtggctgctgattggcgtgatcctggtagtctttatgatctccgatggatttgacatggggatcggctgtctgctgccgctggtggcgcgtaatgatgatgaacgtcggatagtgataaacagcgttggcgcgcactgggaaggcaatcaggtctggttaatcctcgcaggtggggcattatttgccgcctggcccagagtgtatgcagcggcgttttccggcttttatgtggcgatgatcctggtgctgtgctcgctgttcttccgcccgctggcctttgattatcgcggaaaaattgccgatgcacgctggcgtaaaatgtgggatgccggtctggtcatcggcagtctggtgccgccggtagtcttcggtattgccttcggcaacttgctgctcggcgtgccgtttgccttcacaccgcaattacgcgtggaatatctcggcagcttttggcaactgctgacgccattccctttattgtgcggattgctcagccttgggatggtgattttgcaaggtggcgtctggttacaactaaaaactgttggtgcgattcatctgcgttcacagctggcgaccaaacgcgccgcactgctggtgatgctctgctttttgctggcgggttactggctgtgggtcggtattgatggctttgtactgctcgcccaggatgctaacggtccttccaatccgttaatgaaactggtggcagtgctacctggtgcctggatgaataatttcgtcgaatcgcccgttctgtggatcttcccgctgctggggttcttctgcccattgctgacggtgatggcgatttatcgtggtcgcccgggttggggatttttgatggcgtcattgatgcaatttggcgtgattttcacggcaggcatcacgctgttcccctttgtcatgccgtcaagcgtgagtccgatctccagcctgacgttgtgggacagtacttccagtcagctgacgctgagcatcatgttggtaatcgtgctgatatttttgcccattgtgttgctctacactctctggagctactacaaaatgtgggggcgcatgacaacagaaactctccgccgtaacgaaaacgagttgtactaa

SEQ ID NO: 261028 - DNA, 1311 bp, Klebsiella pneumoniae
atgaaagcgatcttgatcccattcttatctcttctgattccgttcaccccgcaatctgcattcgctcagagtgagccggagctgaagctggaaagtgtggtgattgtcagtcgtcatggtgtgcgtgccccaaccaaggccacgcaactgatgcaggatgtcaccccagacgcatggccaacatggccggtaaaactggggtggctgacaccgcgcggtggtgagctaatcgcttatctcggacattaccaacgccagcgtctggtggctgacggattgctggcgaaaaagggctgcccgcagcctggtcaggtcgcgattattgctgatgtcgacgagcgtacccgtaaaacaggcgaagccttcgccgccgggctggcacctgactgtgcaataaccatacatacccaggcagatacgtccagtcccgatccgttatttaatcctctaaaaactggcgtttgccaactggataacgcgaatgtgactgacgcgatcctcagcagggcaggagggtcaattgctgactttaccgggcatcgacaaacggcgtttcgcgaactggaacaggtgcttaatttcccacaatcaaacttgtgccttaaccgtgagaaacaggacgaaagctgttcattaacgcaggcattaccatcggaactcaaggtgagcgccgacaatgtctcattaaccggtgcggtaagcctcgcatcaatgctgacggaaatatttctcctgcaacaagcacagggaatgccggagccggggtggggaaggatcactgattcacaccagtggaacacgttgctaagtttgcataacgcgcaattttatttactacaacgcacgccagaggttgcccgcagccgcgccaccccgttgttggatttgatcatgacagcgttgacgccccatccaccgcaaaaacaggcgtatggtgtgacattacccacttcagtgctgtttatcgccggacacgatactaatctggcaaatctcggcggcgcactggagctcaactggacacttccaggtcagccggataacacgccgccagggggtgaactggtgtttgaacgctggcgtcggctcagcgataacagccagtggattcaggtttcgctggtcttccagactttacagcagatgcgtgataaaacgccgctgtcattaaatacgccgcccggagaggtgaaactgaccctggcaggatgtgaagagcgaaatgcgcagggcatgtgttcgttggccggttttacgcaaatcgtgaatgaagcacgcataccagcgtgcgctctccatcaagacaaataa

SEQ ID NO: 261029 - DNA, 213 bp, Klebsiella pneumoniae
atgtctaataaaatgactggtttagtaaaatggtttaacgcagataaaggttttggctttatcactcctgatgatggcagcaaagacgttttcgtccatttcaccgccatccagagcaatgaattccgcacgctgaacgaaaatcagaaagttgaattttctattgagcaggggcaacgtggtcccgcggcagcgaacgttgttacgctctaa

SEQ ID NO: 261030 - DNA, 174 bp, Klebsiella pneumoniae
gtgaatattgaagagttaaaaaaacaagccgaaacggaaatcgctgactttatcgcgcaaaaaatcgccgagctgaacaagaatacagggaaagaagtctctgaaattcgcttcactgcacgagaaaaaatgaccgggcttgaaagttatgatgtcaaaatcaaaataatgtga

SEQ ID NO: 261031 - DNA, 1074 bp, Klebsiella pneumoniae
atgacagagaaaagaagaacccgctggcagcggcggccaggcacgacgggcggcaaattaccgtggtatgactggcgcaatgccacgacctggcgtaaagcgacgcaattattactgttggcaatgaatatttatattgccatcacgttctggtattgggtgcgctattacgaaacggcaggtagtacgacatttgtcgccaggccaggaggcatcgaaggctggctaccgattgccggtctgatgaatctgaaatatagccttgcaacaggtcagttaccgtccgtccacgccgccgcgatgctgttattggtcgcttttatcgtcatcagtctattactcaaaaaggccttttgttcatggttatgcccggttggtacgctttctgaattaatcggcgatctcggtaacaaactgtttggtcggcaatgtgtccttccccgctggctggatattcctctgcgcggcgtgaagtatttgctgttgagtttttttctctatattgcgttattgatgcccgctcaggcgattcactattttatgttgtcgccctacagcgtggtgatagacgttaaaatgctcgatttctttcgccatatggggacagcgacattaatcagcgtgatcgttttgctgattgccagcctgtttattcgccatgcctggtgtcgttatctttgcccatatggcgcgctgatgggcgtggtttcgctattatcaccgtttaagattcgtcgcaatgccgaaagttgtatcgattgtggcaaatgcgcaaaaaattgcccatcgcggatcccggtcgataaattaattcaggtacgaaccgtggaatgtaccggttgtatgacttgcgtagagtcatgtccggtagcctcaacattgaccttttcactgcaaaaacctgcggcaaataaaaaagcctttgcgttgtctggctggttaatgacgctactggttctggggattatgtttgcggtgattggttacgcaatgtatgcgggtgtatggcaaagcccggtgccggaagaattgtaccgacgcttaattccgcaagcgccaatgattgggcactaa

SEQ ID NO: 261032 - DNA, 2700 bp, Klebsiella pneumoniae
atggcgctgttaaccctgaccagtaccctggtgggatggtacaacctgcgctttatcagccaggtggaaaaagacaacactcaggcattgattcctaccatgaatatggcgcgccagttgagcgaagccagcgcctgggaacttttcgccgcgcagaacctgaccagtgccgataacgaaaagatgtggcaggcgcaggggcgaatgctcaccgcacaaagcctgaagattaatgcgttgctgcaagcgttacgggaacaaggttttgataccaccgctattgaacaacaggagcaggagatttcccgttcgttacgtcaacaaggggagctggtggggcagcgtttgcaactgcgccagcaacaacagcaactcagtcagcagatagtcgccgccgccgatgaaatcgcacgcctggcgcaaggtcaggcgaataatgcggcaacctccgccggagcgacccaggccgggatttacgatttgattgaacaacatcagcgtcaggccgcagaaagtgcactcgatcggctgattgatatcgatcttgagtatgttaaccagatgaatgaactgcgccttagcgccctgcgggtgcagcaaatggtgatgaatctggggttggaacagatccagaaaaatgcgccaacgctggaaaagcagctcaataatgcggtgaaaattctgcaacgtcggcaaatacgcattgaagatccgggagttcgtgctcaggtcgcaacaacgttaactaccgtaagccaatatggcgatttgctggcgctgtatcaacaggacaatgaaatcagtcatcgcctgcaaactctcacgcaaaataacatcgcccagttcgcgcagtttagtagcgaagtcagtcagctggtcgacagtattgagctgcgcaatcagcacgggctggcacatctggaaaaagccagtgcacgcgggcaatacagcctgttattactggggatagtttcactttgtgcattgattctgatcctctggcgcgtggtttatcgctcagtcacgcgtccacttgccgaacaaacgcaggcgctgcaacgcttactggacggtgatatcgactccccttttccggaaaccgctggcgtgcgggagctggacaccatcgggcggctgatggatgcgtttcgcagcagtgttcatgcactgaatcgccaccgcgaacagctggcggcgcaggtcaaagcgcgtacagctgaattgcaggaactggtgatagaacaccgacaggcacgagcggaagcagaaaaagccagccaggcaaaatcggcgtttctggcggcgatgagccatgagatccgcacaccgctgtacggtattcttggcaccgcgcaactgctggcagataaccccgcacttaatgcccagcgtgatgatttgcgggcaattaccgactctggtgaatcgttgctgaccatcctcaacgatattctcgattattcggctatcgaagcaggcggcaagaatgtttcggtcagcgatgaaccctttgaaccgcgcccgctgctggaaagtaccctgcaattaatgagcggaagggtgaaaggtcgcccgattcgcctggcaacagaaattgccgacgatgtaccgactgcgttaatgggcgatccgcggcgtattcgtcaggtcataaccaacctgttgagcaacgccctgcgtttcaccgacgaagggcacattatcctgcgtagtcgcactgatggcgagctgtggctggtcgaagtggaagacagcggctgcggtattgatcccgcgaaactggctgaaatcttccagccatttgttcaggttagcggcaaacgcggcggcaccgggctggggctgactatcagtagccgtctggcccaggcgatgagcggcgaactgagcgccaccagcacgccggaggttggaagctgtttttgtttacgcttgccgttacgtgttgccactgcacccgtgccaaaaacagtcaatcaggcggtgcatctggacggtttacgtttgctgttaattgaagataacccgctaacccagcgaattaccgttgagatgctgaacaacagtggggcgcaggtcgttgcggtaggaaatgccgcgcacgcaatagagacgttgcaaaatagcgaaccgtttgctgccgcactggtggattttgatctgcccgatatcgacggcattacgcttgcccggcaactggcacagcaatatccgtcgctggttttgattggctttagcgctcatgtcatcgacgaaacgttgcgccagcgtaccagttcattatttcgcgggattatccctaaaccggtgccgcgtgaagtgctcggtcagttactggcgcactatctccaactgcaagtcaataacgatcaaccgctggatgtatcgcaactcaatgaagatgctcagttgatggggacggagaagatccacgaatggctggcattatttaaacaacatgccctgccgcttctcgatgacatcggcatcgcccgctccagccagaacagcgaaaaaataaagcgtgccgcacatcagctaaaaagcagttgctcgagtctgggaatgcgtagcgccagccagctatgcgcacaactggagcagcagccattatctgccccccttccacacgaagaaattacacgcagtgttgccgctctggaagcatggttgaataagaaagacctgaacgcgatttga

SEQ ID NO: 261033 - DNA, 1029 bp, Klebsiella pneumoniae
atgcgcgtactgctattgttacttctttcccttttcatgttgcctggtttttcggctgataacctgttgcgctggcatgatgcgcagcatttctctgtgcaagcctctacgccgcttaaagccaaacgcgcatggaaactgtgcgcgctttatcccagcctgaaagattcatactggttatcgttgaactatggtatgcaggaggctgctcgccgctacggtgtggatttaaaagtgctggaggcaggcggctacagccagttggctacccagcaagcacaaatcgaccagtgtaaacagtggggcgcagaggccattttgctcggtagtagcacgacgtcatttcccgatctgcaaaagcaggtagcaagtctgccggtgatcgaactggtaaatgctattgatgctccccacgtgaaaagccgcgttggtgtgccctggtttcagatgggctatcaaccaggacgatatctggtgcaatggagccacggtaaaccactgaacgtgctgttgatgcccggacccgataacgccgggggcagtaaggagatggtcgagggttttcgcgcagccattgccggaagcccggtacgtattgttgatattgcgcttggcgataacgatattgaaatccagcgtaacctgttgcaggagatgctggagcgccatccagaaatcgacgtcgttgccggaacggccattgcggcagaggcggcaatgggggaagggcgtaatctgaaaacaccgcttaccgtggtgtcgttttatctttcacatcaggtgtatcgcgggctgaagcggggaagagtgattatggctgccagcgatcaaatggtctggcagggggaactggcggttgagcaggccatcaggcaattacaggggcaatcggtgtctgataatgtcagcccaccgattttagttctgacgccgaaaaatgccgaccgtgaacatatccgccgctcgctgtcaccagggggatttcgtccggtctatttttatcagcacacatcagcggctaagaaataa

SEQ ID NO: 261034 - DNA, 693 bp, Klebsiella pneumoniae
atgccacatcacattgttattgttgaagatgagccggttacccaggcgcgattacaatcctacttcactcaggaggggtataccgtttccgttacggcgagcggtgccgggctgcgggaaattatgcagaatcagccggtggatttaattctgctggatatcaatttgcccgatgaaaatggcctgatgttgacccgcgccctgcgagaacgctcaacggtggggattattctggttacgggacgcagcgatcggattgaccgtattgttgggctggaaatgggcgcagacgattacgtcaccaaaccgctggaactgcgcgaactggtagtacgggtgaaaaatctgctctggcgaatcgacctcacgcgacaagctcaaccgcacacacaggacaactgctatcgctttgccggttattgcctgaatgtgtcgcgccatacgctggagcgggatggcgagccgattaaactgacccgcgcagagtatgaaatgttggtggcatttgtgacgaatccgggcgaaattcttagccgtgaacgtctgctgcgtatgctctctgcgcgtcgggtggaaaaccctgacctgcgcaccgtcgatgtgttaattcgtcgtttacgccataaactcagcgcggatttactggtgacgcaacatggtgaaggttatttcttagccgctgatgtgtgctga

SEQ ID NO: 261035 - DNA, 1173 bp, Klebsiella pneumoniae
atgcggaaactctggaacgcgctacgccgacccagtgctcgttggtcggtactggcgctggtcgctattgggattgtgattggcattgcgctgattgtattgccacacgttgggatcaaagtcaccagcacaaccgaattttgtgtcagttgccacagtatgcaaccggtgtatgaagaatataaacagtcggtgcatttccagaatgcctccggcgtgcgagctgaatgccatgactgtcatatcccgccggatattccaggcatggtgaagcgcaaactggaagcgagcaacgatatctaccagacctttattgcccactccattgatacacctgaaaaattcgaagccaaacgcgcggaacttgccgagcgtgaatgggcgcgaatgaaagaaaacaactcggcaacctgccgctcctgccataactacgacgcgatggatcatgccaagcagcatcctgaagcggcacgtcagatgaaggtggcagcgaaagataatcaatcctgcatcgactgtcataaaggtattgcccaccagttgccggatatgagtagtggcttccgtaagcagttcgatgagctgcgcgccagtgctaatgacagtggtgacacgctgtactccattgatattaagccgatttatgcggggaaaggcgataaagaagcctctggttctctgctgcctgcttcggaagtgaaagtccttaaacgtgacggcgactggctgcaaattgaaattaccggctggacggaaagcgccggacgtcagcgtgttctcacccagttcccaggtaaacgcatctttgttgcctcgattcgtggtgatgtgcagcagcaggtgaaaacgctggagaaaactaccgttgccgacaccaatactgagtggagcaaattgcaggccactgcgtggatgaagaaaggcgacatggtaaacgatatcaaaccgatctgggcttatgcggattcgttgtacaacggcacctgtaaccagtgccacggcgcaccggaaatctctcactttgacgctaacggttggatcggcacgctcaacggcatgattggctttaccagcctcgataaacgtgaagaacgcaccttgttgaaatatctgcaaatgaatgcgtctgacaccgcaggtaaggctcacggcgataagaaggaagaaaaataa

SEQ ID NO: 261036 - DNA, 2547 bp, Klebsiella pneumoniae
atgaacaataacgatctctttcaggcatcacgtcggcgttttctggcacaactcggcggcttaaccgtcgccgggatgctggggccgtcattgttaacgccgcgccgtgcgtctgcggcgcaagcggcgactgaggctgtcacctcgaaagagggcattcttaccgggtcgcactggggggctatccgcgcgacggtgaaggagggtcgctttgtggcggcaaaaccgttcgaactggataaatattcgtcgaaaatgatcgccggattgccggatcacgtacacaacgcggcgcgtattcgttatccgatggtacgcgtggactggctacgtaagcgccatctgagcgacacctcccagcgcggtgataaccgttttgtgcgcgtgagctgggatgaagccctcgacatgttctatgaagagctggaacgtgtgcagaaaacgcacgggccgagtgccttgctgaccgccagtggttggcagtcgacggggatgttccataacgcttcggggatgctggcgaaagcgattgccttgcatggtaatagcgttggtacgggcggagattactctaccggtgctgcgcaggtgatcctgccgcgcgtagtcggttcgatggaagtgtatgaacagcaaacctcctggccgctggtattgcagaacagcaaaaccattgtgctgtggggctccgatttgctgaaaaaccagcaagcgaactggtggtgcccggatcacgatgtttatgaatattacgagcagctaaaagcgaaagtcgccgccggtgaaattgaggtcatcagcatcgatccggttgtcacatccacccatgagtatctggggcgcgagcatgtgaagcacattgcggttaacccgcaaactgacgtgccgctgcaactggcgctggcgcatacgctgtacagtgaaaacctgtacgacaaaaacttcctcgctaactactgtgtaggttttgagcagttcctgccgtatctgctgggtgagaaagacggtcagccgaaagatgccgcatgggctgaaaaactgaccggcattgatgccgaaaccattcgtgggctggcgcggcagatggcggcgaacagaacgcaaattattgctggctggtgcgtgcagcgtatgcagcacggtgaacagtgggcgtggatgattgtcgttctggcggcgatgctggggcaaattggcctgccaggtggtggctttggttttggctggcactataacggcgcaggcacgccggggcgtaaaggcgttattctgagtggtttctccggctctacgtcgattccgtctgttcacgacaacagtgactacaaaggttacagcagcaccattccgattgcccgttttatcgatgcgatcctcgaaccggggaaagtgatcaactggaacggtaaatcggtaaaactgccgccgctgaaaatgtgtatttttgccggaactaacccgttccatcgccatcagcagatcaaccgcattattgaaggctggcgtaagctggaaacggttatcgccatagataaccagtggacctcaacctgccgctttgccgatatcgtactgcctgcgaccacgcagtttgagcgtaacgatctcgaccagtacggcaaccactccaaccgtggcattatcgccatgaaacaggtcgtgccgccgcagttcgaggcgcgcaacgacttcgatattttccgcgagctgtgccgtcgctttaatcgcgaagaagcctttaccgaagggctggacgaaatgggctggctgaaacgcatctggcaggaaggtgtacaacagggcaaaggacgcggcgttcatctgccagcgtttgatgacttctggaataacaaagagtatgtcgagtttgaccatccgcagatgtttgttcgtcaccaggcattccgcgaagatccggatctcgaaccgctgggtacgccgagtggcctgattgagatctactcgaaaaccatcgccgatatgaactacgacgattgtcaggggcatccgatgtggtttgagaaaatcgaacgctcccacggcgggcccggctcgcagaagtatccgttgcatctgcaatctgtgcatccggatttccgacttcactcgcagttatgtgagtcggaaacgctgcgtcagcaatatacggtagcgggcaaagagccagtgttcattaacccgcaggatgccagcgcgcgtggtattcgtaacggtgatgtggtacgcgtctttaacgctcgtggccaggtgttggctggagcagtggtttctgaccgctatgcacccggcgtggcgcgaattcatgaaggggcatggtacgatccagataaaggcggcgagcctggtgcgctgtgcaaatacggtaaccccaacgtgctgaccatcgacatcggtacatcgcagctggcgcaggcgaccagtgcgcacactacgctggtggaaattgagaagtacaacggaacagtggagcaagtgacggcgtttaacggccccgtggagatggtggcgcagtgcgaatatgttcccgcgtcgcaggtgaaatcatga

SEQ ID NO: 261037 - DNA, 600 bp, Klebsiella pneumoniae
atgaccacgctgacagcacaacagattgcctgtgtttacgcctggctggcgcagttgttctcccgtgaactggacgatgaacaactgacgcaaatcgccagtgcgcagatggctgaatggttttcgttgctgaaaagtgaaccgccgctcactgcggcggtgaatgagctggaaaaccgtattgccacgctgacagtacgtgacgatgcccgtctggaactggccgctgacttttgcggtctgtttctgatgaccgacaaacaagcggcgctgccttatgcatcggcctacaaacaggacgagcaagagattaaacgcttgttagttgaggcagggatggaaaccagcggcaatttcaacgaaccggcagatcatctggcgatctatctcgagttgttgagtcatctgcatttttcgctgggagaggggaccgttcctgcgcgaagaatcgacaatttgcggcaaaaaacactgacggcgctgcgacaatggttaccagagtttgctgcgcgttgccatcagtacgacagtttcggtttttacgcggcactaagccagttattgctggtgttagtggaatgcgaccaccaaaacagataa

SEQ ID NO: 261038 - DNA, 306 bp, Klebsiella pneumoniae
atggctaatgttacggtgacttttactattaccgaattttgcctgcataccggcatctctgaagaggagctaaatgaaattgtcggtttgggggtggttgaaccgcgtgagatccaggaaacaacctgggtatttgacgaccatgccgccattgtggtgcaacgcgcggtacgcctgcgtcatgaactcgctctggactggccggggatcgcggtggcgctgacgttaatggatgatattgcgcacctgaagcaggaaaaccgcctgctgcgccagcggctttcccggtttgtagctcatccgtga

SEQ ID NO: 261039 - DNA, 921 bp, Klebsiella pneumoniae
atggaattaaaggattattacgccatcatgggcgtgaaaccgacggacgatctcaagacaatcaagaccgcctatcgtcgactggcccgcaaataccatcctgatgtcagcaaagaaccggatgccgaagcccgcttcaaagaggtcgctgaagcctgggaagtgttaagtgatgaacaacgtcgcgctgagtatgatcagatgtggcaacatcgcaacgatccgcaatttagccgtcagttccagcatggcgacggtcagagttttaacgccgaagattttgacgatatcttctcgtcaattttcggtcagcatgcccgccagagccgtcaacgccccgccacacgcggccacgatattgaaatcgaagtggcggtattcctcgaagaaacgcttactgagcataagcgtaccatcagctataacctgccggtttataacgcctttggcatgatcgaacaggaaatcccgaaaacgctgaatgtgaagatcccggcgggcgtcggcaatggtcaacgcatccgcctgaaaggccaggggacgcctggcgaaaatggcggcccgaatggcgatttgtggctggtgattcatattgcgccacatccgctgtttgatattgtcggccaggatctggaaattgtggtgccggttagcccgtgggaagcggcgctgggtgctaaagtcaccgttccaacactgaaagaaagcattttgctgactatcccgcctggcagccaggcagggcaacgattgcgcgttaaaggcaaaggtctggtgagcaaaaaacagaccggcgatctgtatgcggtactgaaaatcgtgatgccgccgaaaccggatgaaaacactgccgcgctatggcagcaactggcagacgcccagtcgtcttttgatccacgtaaagattgggggaaagcataa

SEQ ID NO: 261040 - DNA, 1257 bp, Klebsiella pneumoniae
atgagtagtaatatacatggaattagttgcactgcaaataattatttgaaagaagcatggagcaatataaaaaatgagcacgaaaaaaatcaaacatattcaatcacgctttttgaaaacacactggtgtgttttatgcggttgtataaagaaatcagacgtcaaaaagctgaagactacattccatgcctggaatgcgaatcactagaaaaagaatttgaggaaatgcagaatgataatgatctatcattatttatgagaacattgcgtactaatgatacaaaaatttattcaggggtttcaggaggtatgacatatactatacaatatgttcaagatattgatgttgttagagtgtccttgccgggcagagcttcagagtctatcacagattttaaaggttattattggtatggctttatggaatatattgaaaacattaatgcgtgtgatgatgttttttctgagtattgtttagaagatgaaaatataagtgtccagccagaacggttaaatacgccgggaatatttaatttagatgctggtattgatttgtctggtatatcttttattcagagtgaaattaataaaacttatgaattaaaatacgctccagtagatggcgatggatattgtctgttaagagccatactggttttaaaacaacatgattattcatgggcgctgggcagtcataagacgcaaaaggaagtatacgaagagtttattaaaattgttgataaaccaacaatcgaggctcttgttgatgctgcattttgtgatctcagggaagatgttaagacattatttggcgttgatctgcaatctgacaacaaaattcagggtgtgggtagtcttatgtcatggagctttctgttttttaaaaaagaattcattgatagttgcttgaataacgaaaaatgtatcctgcatttacccgagtttatatttaatgataacaagaatttgcttgctttagataccgacacgtcggataggattaaagcggtgaagaattttcttgctgttctttcagatagcatttgctcattatttattgttaatagtaatgtggcatcaatctccttgggaaatgaatccttttcaacagatgaagatcttgaatatggttatttaataaataccggcaatcattatgacgtttacctccctcctgaactttttgctcaggcttacaagttaaacaataaggaaatgaatgcgcaacttgactatttaaatcgttatgcaatttaa

SEQ ID NO: 261041 - DNA, 495 bp, Klebsiella pneumoniae
atgaacattgtcgatcaacaaacttttcgcgatgcgatgtcctgcatgggcgcggcggtcaatattatcaccacggacggtccagccgggcgcgccgggttcaccgccagcgccgtctgcagcgtgaccgatacgccgcccacattactggtgtgcctgaatcgtggggcgtccgtctggccggtattcaatgaaaatcgaacgctgtgtgtaaatacacttagcgccgggcaggagccgctttcaaacctttttggcggcaaaacgcccatggaacaccgctttgccgccgcccgctggcagactggtgtgaccggatgcccgcaactggaagaggcactggtttcgtttgactgccgtatcagccaggtggtgagcgtcggcacccacgacattctgttttgtgccatagaagcgattcatcgtcacgccaccccctacgggctggtgtggttcgatcgcagttatcacgcgttgatgcgccctgcttgttaa

SEQ ID NO: 261042 - DNA, 591 bp, Klebsiella pneumoniae
atgaacgaagccattagcccaggtgcgcttagcaccctgttcaccgatgcccgcactcacaacggctggcgggagacacccgtcagcgatgagacgttacgggagctttatgccctgatgaaatgggggccgacatcagctaactgttctccggcacggatcgtgtttatccgcactgcagaaggaaaagaacgtctgcgcccggcgctttccagcggcaatctgcaaaaaaccctgaccgcgcccgtcaccgcgatcgtcgcctgggacagtgaattttatgaacggttaccacagctgtttcctcacggcgatgcccgcagttggtttacctccagcccacaacttgccgaagaaacagcgtttcgcaacagttccatacaggcggcctatctgatcgtcgcctgccgggcgctggggctggataccggcccgatgtccggctttgaccgtcaacacgtggacgacgccttttttacgggcagcacgctgaagagcaatctgctgattaatatcggctatggcgatagcagcaagctttatgcgcgcctgccacgtctgtcctttgaagaagcctgcgggctgttgtaa

SEQ ID NO: 261043 - DNA, 801 bp, Klebsiella pneumoniae
atgaaactttcactctcacctcccccttatgctgatgcgcccgtagtggtgttgatttcgggtcttggcggtagcggcagttactggttaccgcaactggcggtactggagcaggagtatcaggtaatctgttacgaccagcgcggcaccggcaataatcccgacacgctggaagaagattacagtatcgcccagatggcagcggaactgcatcaggcgctggtagccgcagggattgagcgttacgcggtggtcggccatgcgctcggtgcactggtgggaatgcagctggcgctggattatcccgcgtcgttaactgtgctggtcagcgttaacggctggctacgaataaacgcccatacgcgccgctgttttcaggttcgcgagcagttactacatagcggcggcgcgcaggcatgggtggaagctcagccattgttcctctatcccgccgactggatggcggcccgcgcacctcgcctggaagctgaagacgcgctggcactggcgcattttcagggcaaaaataatttactgcgtcgacttaacgccctcaaacgcgctgactttagtcaccatgcggatcgcatccgctgcccggtgcaaatcatctgcgccagtgatgatctgctggtgccaacagcatgttccagtgaacttcatgccgccctgcccgatagccagaaaatggtgatgcgctatggcggacacgcctgcaacgtgaccgatcccgaaacgtttaatgctctgttactcaacgggcttgccagcctgttacatcaccgtgaagccgccctgtaa

SEQ ID NO: 261044 - DNA, 696 bp, Klebsiella pneumoniae
atgatgacaatcttaaccgctcgaccggaagccattaccttcgatccgcagcaaagtgcgctgattgtggtggatatgcaaaacgcttatgccacgccaggcggctacttagatctcgccgggtttgatgtctcaaccactcgcccggtcattgccaacattcaaaccgccgtgaccgcagcgcgagcggcagggatgttgattatctggtttcaaaatggctgggatgaacagtatgtcgaggctggcggccccggctcaccaaattttcataaatcgaacgccctgaaaaccatgcgtaagcagccgcagctacaggggaaattgctggcgaaaggctcctgggattatcaactggtggatgaactggtgccgcagcctggcgatattgtgctgcctaagccgcgctacagcggtttcttcaatacgccgctggacagcattttgcgcagccgcggaatacgccatctggttttcaccggtatcgctaccaacgtctgcgtcgaatcgacgctacgcgacggcttttttctggagtatttcggcgtggtgctggaagacgcaacacaccaggcggggccggaatttgcacagaaggccgcgttgttcaatatcgaaaccttttttggctgggtcagcgacgtcgaaacgttctgcgacgcgctttctcccacgtcctttgctcgtatcgcttaa

SEQ ID NO: 261045 - DNA, 1092 bp, Klebsiella pneumoniae
atgaaaattggcgtattcgtacctattggcaacaacggctggctcatttcgacccacgcgccgcagtacatgccgacctttgaactgaataaagccattgtgcaaaaagcggagcactaccatttcgatttcgccctgtcgatgatcaaactgcgtggctttggcggcaaaactgagttctgggatcacaaccttgagtcgttcaccttgatggcggggctggcagccgtgacctcgcgcattcagatatacgcgacagctgccaccttaacgttacctccggcaatcgtcgcccgtatggccgcaaccattgactccatctctggcgggcgttttggcgtcaacctcgtgactggctggcaaaagcccgagtatgagcagatgggtatctggcctggcgatgactatttctcccgtcgttacgactatctcaccgaatatgttcaggtgctgcgcgacctgtggggctcggggaaaagcgattttaaaggcgattttttcactatggatgattgtcgcgtcagtccgcaaccgagtgtccccatgaaagtgatctgcgccgggcaaagcgacgctggcatggcgttctccgcccggtatgccgattttaacttctgtttcggcaaaggcgtaaatacacccacggctttcgccccgaccgctgcgcggatgaaacaggccgcagagcaaaccggacgcgacgttggctcttatgtgttgtttatggtgattgccgatgaaaccgacgatgccgctcgcgccaaatgggaacactacaaagcgggcgcggatgaagaggcgttaagctggctaaccgaacaaagtcagaaagatacccgctccggtactgacaccaacgtccgtcagatggccgatcccacttcggcggtaaacatcaatatggggacgttagtcggttcttacgccagtgtcgcgcgcatgttagatgaagtcgcaagcgtgcctggtgccgaaggcgtgctattgaccttcgatgattttctgtcgggaatcgaaaccttcggcgagcgcattcaaccactgatgcagtgccgcgcccatctccctgcgctgactcaggaggtggcatga

SEQ ID NO: 261046 - DNA, 639 bp, Klebsiella pneumoniae
atgacgcaaggcgcagtgaaaacaacgggtaaacgttcgcgcgcagtgagcgcgaagaaaaaagcgattcttagcgcagcactggacactttttcacaattcggttttcacggcacaaggctggagcagatcgcagagttggcgggtgtttcaaaaaccaatctgctgtattactttccgtcaaaagaggcgctgtatattgccgtgctgcggcagattctcgatatctggctggcaccgttaaaagcgtttcgtgaagatttcgccccgctggcggcgatcaaagagtacatccgtctgaagctggaagtctcacgcgattatccgcaggcttcgcgcctgttctgtatggagatgctggcaggcgcgccgctgttaatggatgaactgacgggcgatttgaaggcattaattgatgagaaatcggcgctgattgccggttgggtaaaaagcggcaaactcgcgccgattgacccgcagcatttgatttttatgatttgggcttccactcaacattacgccgatttcgcccctcaggtggaggcggtgacaggcgcgacgttgcgcgatgaggtatttttcaatcaaacggttgaaaacgtgcagcggattattattgaggggattcgaccacgttaa

SEQ ID NO: 261047 - DNA, 210 bp, Klebsiella pneumoniae
atgatgttgcaactttgtgcaaccatgttaaatgtgacctgcgtagcaagcttaaaaatgaatgaaatgttaataaaagaaatcgatatgacagggattaaaaaaataactcagactttttctctgcggcagttaacatttttgaaaggtgcaaccgcaaaaaatgtgagagagtgcaacctgatgaaaaatagtgtcgctgagcactaa

SEQ ID NO: 261048 - DNA, 1509 bp, Klebsiella pneumoniae
atggctattagcacaccgatgttggtgacattttgtgtctatatctttggcatgatattgattgggtttatcgcctggcgatcaacgaaaaactttgacgactatattctgggcggacgtagccttgggccattcgtgacggcattatcggcgggtgcatcggatatgagcggctggctgttaatggggttgccgggcgcggtttttctttccgggatttccgaaagctggatcgccattggcctgacattaggcgcgtggattaactggaagctggtggccgggcggttgcgtgtgcataccgaatacaacaataacgccttaacattgccggattattttaccgggcgctttgaagataaaagccgtattttgcgcattatctccgcgctggtgattttgctgttcttcaccatttattgcgcttcgggcatcgtggcaggcgcgcgtctgtttgaaagtacctttggcatgagctacgaaacggctctgtgggcgggcgctgcggcgacgatcctttacacctttattggtggcttccttgcagtgagctggactgacactgtacaggccagcctgatgatttttgccctgatcctgacgccggttatcgtaatcattagcgttggtgggtttggcgactcgctggaagtgatcaaacaaaagagcatcgaaaacgtcgatatgctcaaaggactgaactttgttgccattatctcgctgatgggctgggggctgggttacttcgggcagccgcacatcctggcgcgttttatggcggcggattctcaccacagcattgtccatgcgcgtcgtatcagtatgacctggatgatcctctgcctggcaggggcggtggctgtcggcttctttggtattgcttactttaatgagcacccgtcggtagcaggtgcggtaaaccagaatgctgaacgtgtgtttatcgaactggcgcaaattctgtttaacccgtggattgccgggattctgctgtcggcgattctggcggcggtaatgtcaaccttaagttgccagctgctggtgtgctccagtgcgattaccgaagatttatacaaagcgtttctgcgtaaacaggccagccagaaagagctggtgtgggtagggcgtgtgatggtgctggtggtggcgctggtggccattgcgctggcggcaaacccggaaaaccgcgtgctgggcttagtgagctacgcgtgggcaggctttggcgcggcgtttggtccggtggtgctgttctcggtgatgtggtcacgcatgacgcgcaacggtgcgctggcggggatgatcatcggtgcgctgacggttatcgtctggaaacagttcggctggctgggtctgtacgaaattattccgggctttatctttggtagtatcgggattgtagtgtttagtttgctgggtaaagcgccgtcagcggcgatgcaaaaacgctttgccgaggccgatgcgcactatcattcggctccgccgtcacggttgcaggaaagctaa

SEQ ID NO: 261049 - DNA, 831 bp, Klebsiella pneumoniae
atgtttgttccatttctcattatgttgcgcgaaggacttgaagccgcgctgattgtcagtttgatcgccagctatcttaagcgtacccagcgaggccgatggattggtgtgatgtggattggcgtgttgcttgccgctgcgttgtgcctgggcttgggtatcttcattaacgaaaccaccggcgaatttccgcaaaaagaacaggaactgtttgaaggtatcgtggcggtgatcgccgtggtgatccttacctggatggttttctggatgcgcaaagtgtcgcgcaacgtcaaagtacaactggagcaggcagtcgatagcgcattgcagcgtggaaatcatcatggctgggcgctggtgatgatggtcttttttgccgttgcaagggaggggctggagtcggtctttttcctgctggcggcgtttcaacaagatgtcgggatctggccgccgctgggtgcaatgctcggtcttgctacagccgtggtgctcggcttcctgctctactggggcggtattcgcctcaatcttggtgcattttttaaatggaccagcctgtttattctcttcgtcgccgcagggctggcggctggtgccattcgcgcatttcatgaagccggattgtggaaccactttcaggaaatcgccttcgatatgagtgcggtgctctcaactcactcgctgtttggcacgctgatggaagggatttttggctatcaggaagcgccaagtgtcagcgaagtcgccgtctggtttatttatctcatcccggcgctggtggcatttgctctgccaccacgcgcaggggcgacagcgtctcgctctgcgtag

SEQ ID NO: 261050 - DNA, 1128 bp, Klebsiella pneumoniae
atgaccattaacttccgccgtaacgcattgcagttgagcgtggctgcgctgttttcttctgcttttatggctaacgccgctgatgtgccgcaggtcaaagtgaccgtgacggataagcagtgcgaaccgatgaccattacggttaacgccgggaaaacacagttcattattcagaaccacagccagaaggcgctggagtgggagatcctcaaaggcgtgatggtggtggaagagcgggaaaatatcgcccctggttttagccagaaaatgacggcgaatttacagcctggcgaatacgatatgacctgcggtctgctgactaacccgaaagggaagttgatcgtcaaaggtgaggcaacggcggatgcggcgcaaagtgatgcgctgttaagtcttggtggtgcaattactgcatataaagcgtatgtcatggcggaaaccacgcagctggtgaccgacaccaaagcctttaccgacgctattaaagcaggcgatatcgaaaaagcaaaagcactgtatgcgccgacgcgccagcactatgagcgcattgaaccgattgctgaactgttctccgatctggatggtagcattgacgcccgtgaagatgattacgagcaaaaagccgccgatccaaaattcaccggtttccaccgtctggaaaaagcattgtttggcgataacaccactaaagggatggataagtatgccgaccagctttataccgatgtggtcgatttgcaaaaacgcatcagtgaactggctttcccaccttcaaaagtggtcggcggtgcagccggactgattgaggaagtggcagccagcaaaatcagcggtgaagaagatcgctacagccacaccgatctgtgggatttccaggctaacgttgaaggctcgcagaaaattgtcgatctgctgcgtccacaactgcaaaaggccaacccggaactgctggcaaaagtcgatgccaatttcaaaaaggtcgataccattctggcgaaataccgtactaaagacggttttgaaacctacgacaaattgaccgatgctgaccgtaatgcgctgaaagggccgattactgcgctggcggaagatctggcgcaacttcgcggtgtgctggggctggattaa

SEQ ID NO: 261051 - DNA, 1272 bp, Klebsiella pneumoniae
atgcagtatgaagatgaaaacggcgtgaatgaaccgtcacgccgacgtttactgaaagggattggtgcgctggcgctggcgggaagttgtccggtcgctcatgcacaaaaaacgcaaagtgcaccgggcacgctttcaccggatgcacgcaatgagaaacagccgttttatggtgagcatcaggcagggatcctgacgccacaacaggccgcaatgatgctggtggcgtttgatgtgcttgccagcgataaagccgatcttgaaaggttgtttcgcttgttgactcagcgttttgcttttctgactcagggcggagcggcaccagaaacgccaaatccgcgcctgcctccactcgattccggcattcttggcggctacattgcgtccgataatctcaccataacgttatcggtgggccactcattgtttgatgagcggtttggccttacaccgcagatgccgaaaaagttgcagaaaatgacgcgtttccccaacgactcgctggatgcggcgttatgtcatggtgatgtgttgctacaaatttgcgccaacacccaggacacggtgatccatgcgctgcgcgatatcatcaaacacacgccggatttgctcagcgtgcgctggaagcgggaagggtttatttccgatcatgcagcgcgtagtaaaggcaaagagacgccgattaatttgctgggtttcaaagacggcactgccaatcccgatagccagaatgataagttgatgcaacaagtggtgtgggtgacggcagatcagcaggagcctgcgtggacaatcggcggcagctaccaggcggtgcggttgattcagtttcgggtggagttttgggacagaacgccactgaaagaacagcagacgatttttggtcgcgacaaacaaaccggtgcgccgctgggaatgcagcatgagcatgatgttcccgattacgccagcgatccggaggggaaggtgattgcgctggacagccatatccggctggcgaatccccgcacgccagagagtgagtccagcctgatgctgcgtcgtggctacagttattcgttgggcgtcaccaactccggacaactggatatggggctactgtttgtctgctatcaacacgatctggaaaaaggcttcctgacagtacaaaaaaggctcaatggcgaagcgctggaggaatacgttaaacctatcggcggcggttattttttttcgctgccgggagtgaaggacgcgaacgattatctcggaagcgcgttattgcgggtttaa

SEQ ID NO: 261052 - DNA, 297 bp, Klebsiella pneumoniae
atggtaacgtcctgttctggacaatgttttgttaagcaaggctccaccactcgcggagatttctcctccggtagcaacttcgtcactctgtatttttctcacttcctctctttactcgtgttaccgacgccgcaaacggtgtgcgtagccgtttttcggcattttatccaaaagcaaactatggcttacaaggaagccaaccctctgatgttcgtgcgcataatcgcgctgccaacggcgcgtgtgatgaatacaaacaactcaaggtgctctccatgggaagacaaaaagcagtga

SEQ ID NO: 261053 - DNA, 789 bp, Klebsiella pneumoniae
atgggaagacaaaaagcagtgatcaaagctcgtcgcgaggcaaaacgtgtgctgagacgggattcgcgcagccataagcagcgtgaagaagaatcggtcacctcgcttgtgcagatgagcggcgtagaagccattggtatggcccgcgacagtcgcgatacctcgcccatcctcgcgcgaaatgaagcgcaattgcactatctgaaggctattgagagtaagcagctgatattcgccacgggcgaagccgggtgcggaaaaacctggatcagcgcagcaaaagcggcagaggccctgatacataaggatgtcgacaggattatcgtcacccgtccagttctgcaagccgatgaagatcttggcttcttacctggtgatatcgcagaaaagtttgctccctattttcgtccggtctacgacgtgctggtccggcgcttaggggcttcctttatgcagtactgcctgcgaccggaaatagggaaggtggaaattgcgccgttcgcctatatgcgtggacgtacctttgaaaatgcagtcgtcattcttgacgaggcgcagaatgtgactgccgcgcaaatgaaaatgtttttaacccgcctcggggagaacgtgacggttatcgtcaacggtgatatcacgcaatgcgatttgcctcgcggcgtgcgctccggattaagtgacgcgctggaacgtttcgaagaagatgaaatggtcgggatcgtccgattcggtaaagaggattgcgtacgttcggcactttgccaacgtacgctacatgcatacagttaa

SEQ ID NO: 261054 - DNA, 414 bp, Klebsiella pneumoniae
atgaacaatttaattattacgacccgacaatcgccagtacgtttactggttgattatgttgccacaaccatcttatggacattatttgctttgttcatattcttattcgcaatggatctgctgacgggttattactggcaaagcgaggccagaagccgacttcagttctattttttgctggcagtggcgaatgccgtcgtgttaattgtctgggcgctgtacaataagctacgttttcaaaaacagcagcatcatgcagcctaccaatatacgccgcaagaatatgctgagagcttagcaatacctgatgagctctatcagcaactacaaaaaagccacaggatgagcgtacacttcaccagccaggggcaaataaaaatggtggtttcagaaaaagcgctagtccgggcgtaa

SEQ ID NO: 261055 - DNA, 1326 bp, Klebsiella pneumoniae
atgattaatcgcatcgtatcgttttttatattatgtctggtgttatgcatacccctatgcgtagcgtactttcactctggtgaactgatgatgaggttcgttttcttctggccgttttttatgtccatcatgtggattgttggcggcgtctatttctgggtctatcgtgaacgccactggccgtggggagaaaacgcaccagctccccagttgaaagataatccgtctatctccattatcattccctgttttaatgaggagaaaaacgttgaggaaaccatacacgccgctttagcacagcgttatgagaacattgaagttattgccgtaaatgacggttcaacagacaaaacccgtgccatcctggatcgcatggctgcacaaattccccacctgcgggtcattcatctggcgcaaaaccaggggaaagccattgcgcttaaaaccggagctgccgcggcgaaaagtgaatatctggtgtgcattgatggcgatgcgttattagaccgcgatgcggcggcatatattgtggaaccgatgttgtacaacccgcgtgtgggtgccgtaaccggtaatcctcgtattcgaacacgttctaccctggtgggtaaaattcaggttggcgagtattcctcaattattggtttgatcaagcgaacccagcgtatctatggaaacgtatttaccgtttccggtgttattgccgcatttcgtcgcagcgccctggcagaagtgggttactggagtgacgatatgatcaccgaagatattgatattagctggaagctgcagttgaatcagtgggcgattttttacgagccacgggcgctgtgctggatattaatgcctgaaacgttaaaagggctgtggaaacagcgcctgcgctgggctcagggcggtgcagaagtattcctcaaaaatatgacaaggttgtggcgcaaagaaaactttcgaatgtggccgctgttttttgaatactgcctgacgacaatatgggccttcacttgcctggtcggtttcattatttacgcagtccaacttgccggtgtaccgttaaatattgaattgacacatatcgctgcgacacatactgccggaatattattgtgtacgttatgtttactgcaatttattgtcagcctgatgatcgagaatcgctatgagcataatctgacttcatcgcttttctggattatttggttcccggttattttctggatgctgagtctggcaacgacattggtatcatttacacgagtcatgttgatgcctaaaaagcaacgcgcccgttgggtaagtcccgatcgcgggattctgagaggttaa

SEQ ID NO: 261056 - DNA, 2019 bp, Klebsiella pneumoniae
atgttacgtaatggaaataaatatctcctgatgctggtgagtataattatgctcactgcgtgcattagccagtcaagaacatcatttataccgccacaggatcgcgaatctttactcgccgagcaaccgtggccgcataatggttttgtggcgatttcatggcataacgttgaagacgaagctgccgaccagcgttttatgtcagtgcggacatcagcactgcgtgaacaatttgcctggctgcgcgagaacggttatcaaccggtcagtattgctcaaattcgtgaagcacatcaaggaggaaagccgctaccggaaaaagcagtagtgctaacttttgatgacggctaccagagtttttatacccgcgtcttcccaattcttcaggccttccagtggcctgctgtatgggcccccgtcggcagttgggtcgatacgccagcggatgaacaagtaaaatttggcgatgagatggtcgatcgagaatattttgccacgtggcaacaagtgcgagaagttgcgcgttcccggctcgttgaggtcgcttctcatacatggaattctcactacggtattcaggctaatgccaccggcagcttattgcctgtatatgtaaatcgtgcatattttactgaccacgcacggtatgaaaccgcagcagaataccgggaaagaattcgtctggatgctgtaaaaatgacggaatacctgcgtacaaaggctaaggtaaatccacacgtttttgtttggccttatggcgaagcgaatggcatagcgatagaggaattaaaaaaactcggttatgacatgttcttcacccttgaatcaggtttggcaaatgcgtcacaattggattccattccgcgagtattaatcgccaataatccctcattaaaagagtttgcccagcaaattattaccgtacaggaaaaatcaccacaacggataatgcatatcgatcttgattacgtttatgacgaaaaccgccagcaaatggatcgcaatattgatgtgctaattcagcgggtgaaagatatgcaaatatcaaccgtgtatttgcaggcatttgctgatcccgatggtgatgggctggtcaaagaggtctggtttccaaatcgtttgctaccaatgaaagcagatatttttagtcgggttgcctggcaattacgtacccgctcaggtgtaaacatctatgcgtggatgccggtattaagctgggatttagatcccacattaacgcgagtaaaatacttaccgactggggagaaaaaagcacaaattcatcctgaacaatatcgccgtctctctcctttcgatgacagagtcagagcacaagttggcatgttatatgaagatcttgccggacatgctgcttttgatggcatattgttccacgatgatgctttgctttcagattatgaagatgccagtgcaccggctatcacggcttatcagcaagcaggctttagcgggagtctgagcgaaattcgacaaaacccggagcaatttaaacagtggacccgctttaaaagtcgtgcgttaactgacttcactttagaacttagtgcgcgcgtaaaagccattcgcggtccacatgttaaaactgcacgaaatatttttgcacttccggtaatacaacctgaaagtgaagcctggtttgcacagaattatgctgatttcctaaaaagctatgactggaccgctattatggctatgccttatatggaaggtgtcgcagaaaaatcggctgaccaatggttaatacaattgaccaatcaaattaaaaacatccctcaggctaaagacaaatctattttagaattacaggcacaaaactggcagaaaaatggtcagcatcaggctatttcttcgcaacaactcgctcactggatgagcctattacaactgaatggagtgaaaaactatggttattatcccgacaattttctgcataaccaacctgaaatagacgttattcgtcctgagttttcaacagcctggtatccgaaaaatgattaa

SEQ ID NO: 261057 - DNA, 2424 bp, Klebsiella pneumoniae
atgtattcaagtagcagaaaaaggtgcccgaaaaccaaatgggctttgaaaattcttactgccgcatttttagcagcgagtcccgcggcgaagagtgctgctaataatgcctatgatgcattgattatcgaagctcgcaagggaaatactcagccagctttgttatggtttgcacaaaaatcagcactcagtaataaccaaattgctgactggttacagattgccttatgggccgggcaagataaacaggttattaccgtttacaaccgctaccgtcatcagcaattaccagcgcgtggttatgcagctgtcgccgtcgcttatcgtaacctgcaacaatggcaaaactcgcttacactgtggcaaaaggcactctctctggagtcgcaaaataaggattatcaacggggacaaattttaaccctggcagatgcgggtcactatgattctgcgctggttaaacttaagcagcttaactctggagcaccggacaaagctaatttactcgcagaagcctatatctataaactggcggggcggcatgaggatgaattacgggcgatgacagggtcattacctgaaaatgccttaacgcaacaatatcccacagaatacgtgcaggcattacggaataatcaacttgctgccgcgattgacgatgccaatttaacgccagatattcgcgctgatattcatgccgaactggtcagactgtcatttatgcctacgcgcagtgaaagtgaacgttatgccattgccgatcgggccctcgcccaatacgctgcattagaaattctgtggcatgataaccctgaccgcactgcccagtaccagcgtattcaggttgatcatcttggcgcgttattaactcgcgatcgttataaagacgttatttctcactatcagcgtttaaaaaagacggggcaaattattccgccctgggcgcaatattgggttgcgtcggcttatctcaaagaacatcagccaaaaaaagcacagtcaataatgacagagctcttttatcacaaggagaccattgccccggatttatccgatgaagaacttgcggatctcttttacagccacctggagagtgaaaattatcccggcgcgctaactgtcacccaacataccattaatacttcgccgcctttccttcggttaatgggcacgcctacgagcatcccgaatgatacctggttacaggggcattcgtttctctcaaccgtagcaaaatatagtaatgatcttcctcaggctgaaatgacagccagagagcttgcttataacgcaccaggaaatcagggactgcgcattgattacgcgagtgtgttacaagcccgcggttggcctcgtgcggcagaaaatgaattaaaaaaagcagaagtgatcgagccacgtaatattaatctggaggttgaacaagcctggacagcattaacgttacaagaatggcagcaggcagcggtcttaacgcacgatgttgtcgaacgtgaaccgcaagatcccggcgttgtacgtttaaaacgtgcggttgatgtacataatcttgcagagcttcgtatcgctggctcaacaggaattgatgccgaaggtccggatagtggcaaacatgatgtcgacttaaccaccatcgtttattcaccaccgctgaatgataactggcgcggttttgctggattcggttatgccgatggacaatttagcgaaggaaaagggattattcgcgactggcttgcgggtgttgagtggcggtcacgtaatatctggcttgaggcggagtacaccgaacgctttttcaatcatgagcataaacccggcgcgcgcctgtctggctggtatgattttaatgataactggcgtattggttcgcaactggaacgcctctctcaccgcgttccattacgggcaatgaaaaatggtgttacaggcaacagtgcacaggcttatgttcgctggtatcaaaatgagcggcgtaagtacggtgtctcctgggctttcactgatttttctgacagtaatcagcgtcatgaagtctcacttgagggtcaggaacgcatctggtcttcaccatatttgattgtcgatttcctacccaatctgtattacgaacaaaatacagaacacgacactccatactacaaccctataaaaacgttcgatattgttccggcatttgaggcaagtcatttgttatggcgtagctatgaaaatagctgggagcaaatcttcagcgcaggtgttggtgcctcctggcaaaaacattatggcacggatgtcgtcacccaactcggctacgggcaacgcattagctggaatgacgtgattgatgctggcgcaacgctacgctgggaaaaacgaccttatgacggtgacagagaacacaacttatacgttgaattcgatatgacattcagattttaa

SEQ ID NO: 261058 - DNA, 5022 bp, Klebsiella pneumoniae; identical to SEQ ID NO: 9687

SEQ ID NO: 261059 - DNA, 861 bp, Klebsiella pneumoniae
atgagcagcaacacatttactctcggtacaaaatccgttaaccgtcttggttatggcgcgatgcaactggcaggccctggggtttttggccccccaagagatcgccacgttgctataaccgtgctgcgcgaggcgctggcattgggcgtcaatcatattgataccagcgacttttatggtccgcacgtcaccaatcagattatccgcgaagcgctacatccttactctgacgacctgacaattgtcactaaaattggtgcacgacgtggtgaggatgcttcctggttgcccgcattttctccggcagagctgcaaaaagcggtacacgataatctacgtaatctcggcctggacgtactggatgtggttaacctgcgcgtcatgatgggggatggtcatggcccggcggaaggatcgattgaagccagcctgaccgtgctggcagagatgcaacaacaaggcctggtaaaacatattggcctgagcaacgtcacaccgacgcaggtcgcagaggcgcgtaagattaccgaaatcgtctgtgtgcagaacgaatacaacattgctcatcgtgctgatgacgcaatgattgatgatttggcccgcgttggcattgcttacgtgccgttcttcccgcttgggggctttacgccgctgcaatcctccacactttcggatgtagcagcgagcctgggcgcaacaccaatgcaggtggcgctggcgtggctgttacaacgttcaccgaatattttgctgatcccagggacatcttctgttgcgcatttacgggagaatatggctgctgaaaaattgcatctttctgaggaagtgttgtctacgttggatggtatttcgcgagaataa

SEQ ID NO: 261060 - DNA, 3903 bp, Klebsiella pneumoniae
atgacagaacaacaaaaattgacctttactgccttgcagcagcggctggattcgctgatgctgcgcgacagacagcgttttttacgccgtctgcacggtgtgaagaaggttaaaaatcctgatgcacaacaggccattttccaggagatggcgaaagagattgaccaggcggcagggaaagtcctgctgcgtgaagcggcacgaccggaaatcacttatcccgacaatttgccagttagtcagaaaaagaaggacattctcgaagcgattcgtgatcaccaggtggtgatcgtcgccggggaaaccggttccggtaagacgactcagctaccgaaaatctgtatggaactggggcgcgggattaaagggctgatcggccatacccagccgcgtcgcctggcggcacgaacggtggcgaaccgtattgcggaagagctgaaaacggagccgggcggttgcatcggttacaaagtgcgtttcagcgatcacgtaagtgataacacgatggtcaagctgatgaccgacggtatcctgctggcggagatccagcaagaccgcctgctgatgcagtacgacactatcattattgacgaagcgcacgaacgcagcctgaatatcgattttctgctcggctatttgaaagagttgctaccgcggcgtcctgacctaaaaatcattatcacttccgcgactatcgacccggaacgcttttcgcgccactttaataatgcgccgattatcgaagtctccggtcggacctatccggtggaagtgcgctatcgcccgattgttgaagaagccgatgacaccgagcgcgatcagttgcaggcgatttttgacgccgtagacgaactgagccaggaaagtcccggcgacattctgatctttatgagcggtgagcgggaaattcgcgataccgccgatgcgctgaacaagctgaacttacgccataccgaaatcttgccgctttatgcgcggctttcgaacagcgaacagaaccgcgtgttccagtcgcacagtggacggcgcattgtgctggcgaccaacgtcgcggaaacgtcgctgaccgtaccggggattaaatacgttatcgacccaggtacggcgcgtatcagccgctacagctatcgcaccaaagtgcagcgtttgccgattgagcccatttcgcaggcgtctgccaaccagcgtaaaggccgctgtggtcgtgtgtccgaagggatctgtattcgtctctattccgaagacgatttcctctcgcgcccggagtttaccgatccggagattctgcgtaccaacctggcctcggttattttacagatgaccgcgctggggttgggcgatatcgccgcgttcccatttgtcgaagcaccggataaacgtaatatccaggatggcgtgcgtctgctcgaagagctgggcgcgatcaccactgatgaacaggccagcgcctataaactgacgccgctcggtcgccagctttcgcaattgcctgtcgatcctcgtctggcgcgtatggtgctggaagcgcaaaaacatggctgcgtgcgtgaggcgatgattatcacgtccgcgctctccatccaggatccgcgcgaacgaccgatggacaaacagcaggcatcggacgaaaaacatcgtcgcttccacgacaaagaatccgacttcctcgcgtttgtaaatctgtggaattatcttggcgagcagcaaaaggcgctttcttccaacgctttccgtcgcctgtgtcgtaccgattatctcaactatctgcgcgtgcgcgaatggcaggatatctacacccagttgcgccaggtggtaaaagaacttggcattccggttaacagcgaaccggcggagtatcgcgaaattcacatcgccttactgaccggtttgctttcccatatcggcatgaaagatgccgataaacaagaatataccggcgcacgtaacgcgcgtttctccattttccccggttccggcttatttaaaaagccgccgaaatgggtaatggtggcggaactggtagaaaccagccgcctgtgggggcgcattgcggcacgcatcgatccagaatgggtggagccagttgctcagcatttgattaaacgcacctacagcgaaccgcactgggaacgggcgcagggcgcggtgatggcaacggaaaaagtcactgtttatggcttgccgattgttgccgcgcgcaaggtcaactacagccagatcgatccggcgttatgtcgtgaactctttattcgccacgcgctggtggaaggtgactggcagacgcgtcacgcattcttccgtgaaaacctgaaactacgggccgaagtggaagaactggaacacaaaacacgtcgccgcgatattctggtggatgacgaaacgctgtttgagttttacgaccagcgcatcagccacgatgtgatctccgcacgtcacttcgacagctggtggaaaaaagtcagccgcgaaacgcctgatttgctcaactttgaaaagagcatgttgatcaaagaaggggcggaaaagatcagcaagctggattacccgaacttctggcatcagggcaatctcaagctgcgtttgagttatcagtttgagccaggggcggatgcggacggcgtgacggtacatatcccgctgccgttacttaaccaggtggaggagagcggatttgagtggcagatccccggtctgcgccgcgaactggtgattgctctgattaaatcgttgccgaaaccggtacggcgtaattttgtgcccgcgccaaactacgccgaagcttttttaggccgcgtcacaccgctggaattgccgttgctcgacagccttgaacgagagctacggcggatgactggcgtcaccgttgaccgcgaagactggcactgggatcaggtgcccgatcacctgaaaatcaccttccgtgtggtggatgacaaaaacaagaagctaaaagaagggcgctctctacaagatctgaaagatgcgctgaaaggcaaagtgcaggaaacgctgtctgcggtggcggatgacggtatcgagcagagcggcttacatatctggagttttggtcagctgccggaaagctacgaacagaagcgtggcaactataaagtgaaggcgtggccagcgctagtggatgaacgcgacagcgtggcgatcaaactgtttgataatccgctggaacaaaagcaggcaatgtggaacggtcttcgccgtctactgctgctgaatattccctcgccaatcaaatatttgcatgagaagttgccaaacaaagccaagctggggctgtactttaacccgtatggcaaagtgctggagctgatcgacgactgtatctcctgcggtgtggatcaactgatcgacgccaatggtggcccggtctggacggaagaaggttttgctgcgctgcatgaaaaagtccgcgctgaactgaacgacacggtggtggatattgcgaagcaggtcgagcaaatccttactgcggtgttcaatatcaataaacgtctgaaagggcgggtggatatgaccatggcgctggggctttctgacattaaagcgcagatgggcgggttggtatatcgcggttttgtcactagtaacggcttcaaacggttgggcgacacgctgcgttatttgcaggcgattgaaaaacggctggaaaaactggcggttgacccacatcgcgaccgtgctcagatgctgaaagtcgaaaatgtccagcaggcgtggcagcaatggatcaacaaactgccgcccgcacgtcgtgaggatgaagacgtgaaagagatccgttggatgatagaagagttgcgcgttagttacttcgctcaacaacttggtacgccttatccgatttcagataagcgtattttgcaggcgatggagcagattagcggttaa

SEQ ID NO: 261061 - DNA, 135 bp, Klebsiella pneumoniae; identical to SEQ ID NO: 9686

SEQ ID NO: 261062 - DNA, 339 bp, Klebsiella pneumoniae; identical to SEQ ID NO: 9685

SEQ ID NO: 261063 - DNA, 450 bp, Klebsiella pneumoniae; identical to SEQ ID NO: 9684

SEQ ID NO: 261064 - DNA, 378 bp, Klebsiella pneumoniae; identical to SEQ ID NO: 9683

SEQ ID NO: 261065 - DNA, 801 bp, Klebsiella pneumoniae
atgaacattaccccgtttccgacgctttcgacggcaactatagatgccataaatgttatcggacagtggctggcgcaggatgatttctccggtgagatgccgtatcaggccgattgcgtgatccttgcaggcaatgcggttatgccgactatcgatgcggcatgtaagattgcccgcgatcagcaaattcctctactgattagtggtggtatcggtcactcgacaacttttttgtatagcgctatcgcacagcatccgcactacaacactatccgcaccactggcagagcagaagccaccatcctggcggatatcgctcatcagttctggcatattccgcatgaaaaaatctggattgaagaccagtcaacaaactgcggtgaaaacgcacgctttagcatcgcgctattgaatcaggccgtagaacgagttcatacggctatcgttgttcaggaccccaccatgcagcggcgcacgatggcgacgttccgccgtatgaccggggacaatccagatgcacctcgctggttaagttatcccggattcgttcctcagctaggaaacaacgcagacagtgtaatctttgttaatccgttgcaaggattatggccggttgagcgttatctctcactactcactggcgagctgccgcgtttacgcgatgatagcgatggctacggtccccgcgggcgagattttatcgttcacgttgattttccggcagaagtcatccatgcatggcaaacgctgaaacacgatgcggtgctcatcgaggcgatggaaagtcgctcgttacgttaa

SEQ ID NO: 261066 - DNA, 1440 bp, Klebsiella pneumoniae; identical to SEQ ID NO: 9682

SEQ ID NO: 261067 - DNA, 1002 bp, Klebsiella pneumoniae; identical to SEQ ID NO: 9681

SEQ ID NO: 261068 - DNA, 531 bp, Klebsiella pneumoniae
atggaaaataaatactcaaggttacaaatcagcattcactggctggtctttttgctggttattgcagcgtattgcgcaatggagtttcgggggttcttcccacgtagcgatcggccactcatcaacatgattcatgtttcctgtggcatatcaattctcgtgctgatggtcgttcgtcttttgttaaggctgaaatacccaaccccgccgattatacctaagccaaaaccgatgatgacgggactggcgcatttgggacatttggtgatttatctcctgtttattgcgctgccagtgattggtttggtgatgatgtataaccgaggcaacccgtggtttgcgtttggtttgacgatgccttatgcatcagaggccaatttcgaacgggttgatagcttaaagtcgtggcatgaaatgctggcgaatctgggatattttgtcatcgggttgcacgctgcggctgcactggcacaccactatttctggaaggacaacacacttctacgcatgatgccgcgtaaacgttcctga

SEQ ID NO: 261069 - DNA, 174 bp, Klebsiella pneumoniae
atgaaaaaactggcacttatcttgtttatgggaacgcttgtttccttttatgccgatgccgggcgcaaaccctgttctggttcgaaaggggggatctcacactgtacggcaggcggcaaatttgtctgtaatgatggttctattagtgcatcgaaaaaaacatgcactaactga

SEQ ID NO: 261070 - DNA, 150 bp, Klebsiella pneumoniae; identical to SEQ ID NO: 10611

SEQ ID NO: 261071 - DNA, 1641 bp, Klebsiella pneumoniae
atgaatacaactccctcacagcgattaggttttttgcatcacatcaggctggttccgttatttgcctgcattcttggcggtatcttagttctattcgcattaagttcagccctggccggctatttcctttggcaggccgatcgcgatcagcgtgatgttactgcggagattgagattcggaccgggttagcgaacagttcagattttttgcgttcagcccggatcaatatgattcaggctggtgctgcgagtcgtattgctgaaatggaagcaatgaagcgaaatattgcgcaagccgaatcggagattaaacagtcgcagcaaggttatcgtgcttatcagaatcggtcggtgaaaacacctgctgatgaagccctcgacactgaattaaatcaacgcttccaggcttatatcacgggtatgcaaccgatgttgaaatatgccaaaaatggcatgtttgaagcgattatcaatcatgaaagtgagcagatccgaccgctggataatgcttataccgatattttgagcaaagccgttaagatacgtagcgccagagccaaccaactggcggaactggcccatcagcgcacccgcctgggtgggatgttcatgattggcgcgtttgtgcttgccctggtcatgacgctgataacatttatagtgctacgtcggatcgtcattcgtccactgcaacatgccgcacaacggattgaaaaaatcgccagtggcgatctgacgatgaatgatgaaccggcgggtcgtaatgaaatcggtcgcttaagtcgtcatttacagcaaatgcagcattcactggggatgacagtagggactgttcgacagggtgcggaagagatttatcgtggcaccagcgaaatttcagctggcaatgcggacctgtcatctcgcaccgaagaacaagcggcggctatcgaacaaactgccgccagcatggagcaacttactgcgacggtgaaacagaatgcggataacgcgcatcatgccagcaaactggcgcaagaggcttctattaaagccagcgatggcgggcagacggtttccggtgtagtaaaaacgatgggcgctatctccacgagttcgaagaaaatttctgagatcaccgccgtcatcaacagtattgctttccagacgaatattctggcactgaatgctgccgttgaagccgcgcgagcgggtgagcaagggcgtggatttgccgttgtcgccagcgaagtacggacactcgcaagccgcagcgctcaggcggcgaaagagattgaaggcttgatcagtgaatcagtcaggttaattgacctggggtcggatgaggtggcaatggcagggaaaaccatgagcactattgttgatgccgtcgcgagtgtcacacatatcatgcaggaaatcgccgctgcctcggatgaacaaagcagaggcataactcaggttagccaggcgatttctgaaatggataaggtgacgcaacagaatgcttctctggtagaagaggcctcagcggcggcggtgtcccttgaagaacaggcggcacgattaactgaggcggtggacgtattccgtctgaacaaacattctgtgttggcagaacctcgcggagcgggtgaacaagttagtttcgctacggtgtga

SEQ ID NO: 261072 - DNA, 924 bp, Klebsiella pneumoniae
atggaaaaaaatagtctgtttagtcagcgcatccgtttgcgccaccttcatacattcgtagctgtcgcacaacaaggaactttggggcgcgcggctgaaacccttaatttgagtcaacctgcgctctctaaaacattgaatgaactggagcaactgacgggcgctcgcttgtttgagcgtggtcgtcagggggcgcaacttaccttacccggcgaacaatttttaacgcatgcagtcagagttcttgacgccatcaacactgccggacagtcgcttcatcgtaaagaaggtcttaataatgatgtcgtcagggttggtgcactacctactgcggcactggggatattaccttcggttataggtcagtttcatcagcaacaaaaagaaacgaccttgcaagttgcgacaatgagtaaccctatgattctggcgggtttgaaaaccggggaaatcgatatcggcattggtcggatgtcagatcctgaactgatgaccgggcttaattacgaactgctgtttcttgaatcgctgaagctggttgtccgccccaatcatccgctacttcaggagaacgtaacgctaagccgggtgctggaatggccggtcgttgtatcaccagaaggcactgcgccacgccagcattcagatgcattagtgcagagccagggatgtaaaattccttcgggttgtatcgaaacgctgtctgcttcgctatctcgtcaacttacggttgaatacgactacgtgtggtttgtcccttctggcgcggtaaaagacgacctgcgtcatgccacgctggtggccctgcctgttccgggacatggtgcaggcgaaccgattggaatactgacccgcgtagatgcaacgttctcttctggttgccagttgatgattaacgctattcgaaaatcaatgccgttctga

SEQ ID NO: 261073 - DNA, 1344 bp, Klebsiella pneumoniae; identical to SEQ ID NO: 9645

SEQ ID NO: 261074 - DNA, 1620 bp, Klebsiella pneumoniae
atggccgccgtgtgcggtaccagcggcattgcttctcttttttctcaggcggcattcgcggcagattctgatattgccgacgggcaaacccaacgttttgacttctccattctacagtcaatggcgcacgacttagcgcaaacagcgtggcgaggtgcgccgcgtccgttacctgacactctggcgacaatgacgccgcaggcttataacagtattcaatacgacgccgaaaaatcgctctggcataacgttgagaaccgtcaactggacgctcagttcttccatatgggaatgggattccgtcgccgcgttcgtatgttttctgtagatcccgcaacacatctggcgcgtgaaattcactttcgcccggagttgttcaaatacaacgatgcgggtgttgataccaaacaattagaagggcaaagcgatctcggttttgccggttttcgcgtgtttaaagcccccgaactggcgcgccgtgatgtcgtatcattcctcggtgcgagttatttccgcgccgttgacgacacatatcaatacggtctatcggctcgcggcctggcgatcgacacttacaccgacagtaaagaagagttccccgactttaccgccttctggtttgatacggtaaaaccgggggcaaccacctttaccgtttatgcgttgctcgatagcgccagcattactggtgcctataagttcactatccattgtgagaaaagtcaggtgattatggatgtggaaaatcacctgtatgcgcgcaaagacattaaacagctgggcattgcgccgatgaccagcatgttcagctgcggtactaatgaacgtcggatgtgcgacaccattcatccgcaaatccatgactctgatcgtctgtccatgtggcggggcaacggcgagtggatttgccgtccgctgaacaatccgcaaaaattgcagttcaatgcttacaccgacaacaacccgaaagggtttggtttattgcaactggatcgtgatttctctcattatcaggacattatgggctggtataacaaacgcccaagtctgtgggtggaaccgcgtaacaagtggggtaagggcaccatcggcctgatggaaatcccaactacgggtgaaacgctggataacattgtctgcttctggcagccagaaaaagctgtaaaagcgggtgatgagtttgcattccagtatcgtctgtactggagtgcgcaaccgcctgttcattgcccattagcgcgcgttatggcgacgcgtaccggcatgggcggtttcccggaaggttgggcgccaggtgaacactatcccgaaaaatgggcgcgtcgttttgccgtcgatttcgttggtggtgatctgaaagctgccgcaccaaaaggcattgagccggtgattacgctttccagtggggaagcgaagcaaatcgaaattctctatattgaacccattgatggttatcgtattcagtttgactggtatccgacttcggactccactgatccggtcgatatgcggatgtatctgcgttgtcagggcgacgctatcagtgaaacatggctgtatcagtatttcccgccagcgccggataaacgtcagtatgttgacgaccgcgtgatgagttaa

SEQ ID NO: 261075 - DNA, 225 bp, Klebsiella pneumoniae
atgtttccagaataccgagatttaatatcccgtctgaaaaacgaaaatcctcgctttatgtccttgttcgataaacacaataaacttgatcatgaaattgccagaaaggaaggttccgacggtcgagggtacaatgcggaagtggtccgcatgaaaaaacaaaagctacagttaaaagatgagatgctcaaaatcctgcagcaggagagcgtcaaagaggtgtaa

SEQ ID NO: 261076 - DNA, 540 bp, Klebsiella pneumoniae
atgaccgaaacgataaaagtaagcgaatcacttgaattacatgctgttgcagaaaatcacgtcacacctctttatcagttaatctgtaaaaataaaacctggttacagcagtcgctaaactggccgcagtttgttcaaagtgaagaggacacgcgaaaaacggtgcagggcaatgtaatgttgcatcaacgcggatatgccaaaatgttcatgattttcaaagaagatgaacttatcggcgttatctcgtttaatcgtattgaaccactgaataaaaccgctgaaatcggctactggctggacgaatctcatcaggggcaggggatcatttctcaggcgctgcaggcattgattcatcattacgcccagtctggtgaacttagacgcttcgtgatcaaatgtcgggtggacaatgtgcaaagcaaccaggtcgccttgcgcaatggttttatccttgaaggttgtctgaaacaggctgagttcctgaatgatgcctatgatgatgtgaacttatacgcgcgtattatcgattcacaataa

SEQ ID NO: 261077 - DNA, 981 bp, Klebsiella pneumoniae
atgcgcaaatatcgtctaagtgaagaacagcgagcctttagttatcaggaagatggcactaaaaaaagtgtgttattacggcagattatcgccattagcgattttaacgatgtgatagcaggaaccgctggcggctggatcgatcgcgaaacggtgttagcacaggaaggaaattgctggatttacgatcagaatgctattgcgttcggcggaacggtgatttccggtaatacgcgtatcaccggcaccagcgttctttggggagaggtttacgcaacggataacgtctggatcgataatagtgaaatcagccaggatgcatatataagtgacagcgtcaccattcgtgactcattagtttgtggtcaatgtagaatatttggtcacgccttaattgatcaacattctatgatcgtcgccgcacaaggcttaacgcccgaccatcaactcctgctacaaatttatgatcgcgcaagggttagcgcctcgcgtattgttcaccaggcacaaatttatggcgatgccgtcgtccggtatgcttttattgaacatcgcgccgaagtttttgattttgccagcgttgaaggtaatgaagagaacaacgtctggctatgcgattgcgctaaagtctacggtcacgcgcaggtgaaagctggcatagaagaagatgccattccgacgattcattacagttcgcaggtggcggaatatgccattgtggaaggtaattgtgtgttaaaacatcatgtattgattggcggaaatgccgtggtacgtggcggaccgattctgctcgacgagcacgttgtaatacaaggtgagagccgtattacaggtgcggtgataattgaaaaacatgtggagttaaccgaccacgccgtcgttgaagcctttgatggcgacacggttcatgtccgtggtccaaaagtcattaacggcgaggagcgcattacgcgaacgccgctggcagggttattgtga

SEQ ID NO: 261078 - DNA, 993 bp, Klebsiella pneumoniae
atgcagagcgataaagtgctcaatttgccggcaggctactttggtattgtgttggggacgatagggatgggatttgcctggcgctatgccagccaggtttggcaggtcagccactggttaggggatgggctagtgattctggcgatgatcatctggggattattgactagcgcatttattacccgactcatacgctttccgcatagcgtgctggcggaagttcgccatccagtgctgagcagttttgtgagtttgtttccggcaacgacgatgctggtggcgattggttttgttccgtggtttcgtccactggcggtgtgcctgttcagttttggtgtcgtggtgcaactggcttatgccgcatggcaaactgcgggattatggcgcggatctcaccctgaagaagctaccacgcctggactgtatctgccgacagttgccaacaactttatcagcgcaatggcctgtggtgcgttgggctacaccgacgcaggtctggtgtttttaggcgcaggcgttttctcatggctaagccttgaacctgtgatcttgcagcgtctgcgcagttcgggagaattacccacggcactgcggacctcactcggcattcagctcgctcctgcactggtggcctgtagtgcctggctgagcgtcaacggcggcgagggtgacacgctggcgaaaatgcttttcggttatggactgctgcaactgctgtttatgctacgtctgatgccatggtatctctcccagccatttaatgcttcattctggagtttctcgttcggcgtatctgcactggcaaccaccggtttgcatctggggagtggcagcgataatggatttttccatacgctggcggtgccgctgtttatctttaccaattttattattgcaatactgctcatccgtacttttgcgcttctgatgcagggaaaattgttagtcagaaccgagcgcgccgttttaatgaaagcagaggacaaagaatga

SEQ ID NO: 261079 - DNA, 594 bp, Klebsiella pneumoniae
atgatcattcgtgatgaaaactattttactgataaatatgaattaacccgcacacactctgaagtgctggaagcggtgaaagtggttaaaccgggtaaaacgctggatctgggctgtggcaatggtcgtaacagtctttacctggcagccaatggttatgatgttgacgcatgggataaaaatgccatgagtgtcgccaacgtcgagcgcattaagtccattgaaaatctggataatttacacacccgggtcgttgatctgaataacctcacatttgatggacagtacgattttattctttcgactgtggtgctgatgttccttgaggctaaaaccatcccagggctgattgccaatatgcaacgttgcactaaacctggcggttacaacctgattgtggcggcgatggataccgctgattatccatgtaccgtcggcttcccgtttgccttcaaagagggggaattacgtcgatattacgaaggctgggagatggtgaaatacaatgaagacgtcggcgagctgcaccgcaccgacgccaacggtaatcgtattaaactgcgtttcgccacgatgctggcacgtaaaaaatga

SEQ ID NO: 261080 - DNA, 669 bp, Klebsiella pneumoniae
atgcgtaccacatcatttgcgaaagttgcagctttatgcggcttgttggctctgtctggttgtgcctctaaaatcacccagccagataaatattctggttttttaaacaattactctgatttaaaagaaacaacctcggcaacaggtaaacctgttttacgttgggtagacccgagttttgatcaaagcaaatatgacagcatcgtctggaacccaatcacttattatccggtaccgaaaccttctacccaggtagggcagaaagttctggataaaattttgaactataccaacaccgaaatgaaagaagcgatagcgcagcgtaaaccactggttaccaccgctgggccgcatagtctgattttccgtggggccattaccggtgtagataccagcaaagaagggctgcaattctatgaagtggttcctgttgcattagtggttgcggggacgcaaatggctacaggccaccgtaccatggatactcgcctctattttgaaggtgagctgattgatgcagcgactaataaaccggttatcaaagtcgttcgtcagggcgaaggtaaagacctgaataacgaaagtacgccaatggctttcgaaaatattaaacaagttattgatgacatggcgaccgatgccaccatgtttgacgttaacaaaaagtag

SEQ ID NO: 261081 - DNA, 1173 bp, Klebsiella pneumoniae
atgcgtctgttttctattcctccgcccacgctacttgcggggtttctggcggtattaattggctacgccagttcagcggcaataatctggcaagcagcgattgtcgccggagccaccactgcacaaatctctggctggatgacggcgctggggctggcaatgggcgtcagtacgctgactctgacattatggtatcgcgtacctgttctcactgcatggtcaacgcctggcgcggctttgttggtcaccggattgcagggactaacacttaacgaagccatcggcgtttttattgtcaccaacgcgttaatagtcctctgcggcataacgggactctttgctcgtctgatgcgcattattccgcactcgcttgcggcggcaatgcttgccgggattttattacgctttggtttacaggcgtttgcgagcctggatggtcaatttacgttgtgtggcagtatgttgctggtatggctggcaaccagggccgttgcgccgcgctatgcggtaattgccgcgatgattattgggatcgtcatcgttatcgcgcagggtgacgttgtcacaactgatgttgtctttaaacccgttctccccacttatatcacccctgattttgcgtttgctcacagtctgagcgttgcacttcccctttttctggtgacgatggcatcgcaaaacgcaccgggtatcgcagcaatgaaagcagccggatattcggctcctgtttcgccattaattgtatttactggattgctggcactgtttttttcccctttcggcgtttattccgtcggtattgcggcaatcaccgcggctatttgccaaagcccggaagcgcatccggataaagatcaacgttggctggccgctgccgttgcaggcattttctatttgctcgcaggtctgtttggtagtgccattaccgggatgatgtctgccctgcccgtaagttggatccagatgctggcaggtctggcgctgttgagtaccattggcggcagtttgtatcaggcgctgcataatgagcgtgagcgagacgcggcggtggtggcatttctggtaacggcaagtggattgacgctgttcgggattggttctgcgttttggggattaattgccggaggcgtttgttacgtggtgttgaatttaatcgctaacagaaaccgataa

SEQ ID NO: 261082 - DNA, 537 bp, Klebsiella pneumoniae
atggaaaatctcgctcgctttttatccaccacacttaaacaactacgtcagcagcatggctggagtctttcgcgactggcagaagcgacgggcgtttctaaagcgatgttagggcagattgagcgtaatgagtccagcccgacggtcgcgacattatggaaaattgccaccgggttgaatgtgccattttcgacatttatttctccgccgcagtccgctacgccttcagtttatgatccgcaacagcaggcgatggtgatcacttcgctgtttccttatgatccacaactctgctttgaacacttctcgattcagatggcacccggtgcaataagcgaatcgacgccccatgagaagggagtaatcgaacatgttgtcgtcattgatgggcaacttgatctgtgcgttgatggtgaatggcagagccttaattgtggaaaaggcgctcgatttgctgcagacgttacgcatgtctatcgtaatggtggggagcaaatcgtacattttcattccctcatccattacccgcgcagttaa

SEQ ID NO: 261083 - DNA, 2004 bp, Klebsiella pneumoniae
gtggctaaaatagccgccatttttcagctactggataagaatgtgaccgtatcttctcatcgacttgaactgttaagcccggcacgcgatgccgccattgcccgcgaagctattttgcacggtgccgatgctgtttatatcggcggccctggttttggtgcccgtcataatgccagtaatagcctgaaagatattgccgaactggtgccgtttgcccatcgttatggtgcaaaaattttcgtcacgcttaacaccattttgcatgatgatgagctggaacctgcgcaacggctgattaccgacttctaccagaccggcgtcgatgcgctgattgttcaggatatggggattctggaacttgatattccgccgattgaactgcacgccagtacgcagtgcgatattcgcacagtagaaaaagcgaagttcctctctgatgttggcttcacgcagattgtgctggcgcgagagctgaatcttgagcagatccgcgcgattcaccaggccacggacgcgaccattgaattctttattcatggcgcactgtgcgtggcctattcgggtcagtgctacatttctcatgcgcaaacagggcgtagcgccaaccgtggcgattgctcgcaggcgtgccgtttgccatacacattgaaagacgatcaggggcgggtggtttcctatgaaaaacatctgctgtcgatgaaagataacgatcagactgccaacctcggcgcgctgattgatgctggcgtacgctccttcaagattgaagggcgttacaaagatatgagctacgtgaagaatatcaccgcccattatcgccagatgctggatgccattattgaagaacgtggcgatctgacgcgtgcttcatcaggtcgtactgaacatttctttgttccatcgacggaaaagactttccaccgtggtagcacagattattttgtgaatgcccgtaaaggcgatattggcgcgttcgattcgccgaaatttatcggcctgccggtgggtgaagtattgaaagtggcgaaagatcatctcgatgttgccgtttccgaaccactggcaaatggcgacggcctgaacgtgatgattaaacgtgaagtcgtcggctttcgtgccaatacggtcgagaaaaccggagaaaatcagtaccgcgtctggcccaatgaaatgccagcagagttgcacaaaattcgcccgcatcacccactaaaccgtaatcttgatcataactggcagcaggcactgacaaaaacctccagcgaacgtcgggtggcggtagacattgaactgggcggctggcaggaacaactgattctgaccctcaccagtgaagagggtgtcagcatcacgcatacgctggacgggcagttcgacgaagccaataacgccgaaaaagcaatgaacaatctaaaggatggtctggcaaaactggggcaaaccatctattacgcccgcgatgtgcaaattaatttgccgggtgcgctgtttgtaccaaacagtctgttaaatcagttccgccgtgaagccgccgacatgctggatgctgcacgtcttgccggttaccagcggggcagccgtaaaccggttgctgatcctgcgccggtttatccgcaaacgcatctgagtttcctcgcgaacgtatacaaccagaaagcgcgtgaattttatcatcgctacggtgtgcagctgattgacgcggcgtatgaggcacatgaagagaagggcgaagtcccggtgatgatcactaagcattgtctgcgctttgccttcaatctgtgcccgaaacaggcgaaaggcaatatcaaaagctggaaggcgacgccaatgcaactggttaacggcgatgaagtattaacgctaaagtttgattgccgcccatgcgagatgcacgtcatcggcaaaattaaaaatcacattctgaaaatgccgttaccgggaagtgttgtcgcctccgtaagtccggatgagctgctgaaaacattgccgaagcgaaaagggtaa

SEQ ID NO: 261084 - DNA, 171 bp, Klebsiella pneumoniae
atggcagggcacaaaggacatgaatttgtgtgggtaaagaatgtggatcatcagctgcgtcatgaagcggacagcgatgaattgcgtgctgtggcggaagagtcggcggaaggtttgcgcgagcatttttactggcaacaatcgcgcaaaccagaagcgggacaacgttga

SEQ ID NO: 261085 - DNA, 177 bp, Klebsiella pneumoniae; identical to SEQ ID NO: 9647

SEQ ID NO: 261086 - DNA, 438 bp, Klebsiella pneumoniae; identical to SEQ ID NO: 9648

SEQ ID NO: 261087 - DNA, 1407 bp, Klebsiella pneumoniae; identical to SEQ ID NO: 9649

SEQ ID NO: 261088 - DNA, 1146 bp, Klebsiella pneumoniae
atgagcaagacatttgcccgcagcagcctgtgtgcgctcaccatgacaataatgaccgctcacgccgccgaaccacctaccaatttagataaaccggaagggcgactggatattatcgcctggccgggatacatcgaacgcggacaaactgataaacaatacgactgggtaacgcaattcgaaaaagagactggctgcgcggtgaatgtgaaaaccgccgcgacttccgatgaaatggtcagtctgatgaccaaagggggttacgatctggttacggcatccggcgatgcctcgctgcgcctgattatgggcaaacgcgtgcagccgattaataccgcattgattcccaactggaaaacgctcgatccgcgcgtggttaaaggcgactggtttaacgttagtggcaaagtttatggcacaccttaccaatggggtccgaacctgttgatgtacaacactaaaaccttcccgacgccgccggatagctggcaagtggtttttgttgagcagaatctgccggacggcaagagcaataaaggccgcgttcaggcttatgatggccctatctacattgcggacgctgcgttgttcgttaaagccactcagccgcagttgggcatcagcgatccgtatcaactcaccgaagaacagtaccaggcggtgctgaaagtgctgcgcgatcaacatagtttgatccatcgctactggcatgacactaccgtgcaaatgagcgatttcaaaaacgagggtgtggttgcttccagtgcatggccctatcaggccaacgccctgaaagccgaaggccagcctgtcgcgaccctattcccgaaagagggcgttaccggttgggctgacaccaccatgctacatagtgaagcgaaacatccggtttgcgcctacaaatggatgaactggtcattaacgccaaaagtgcagggcgatgtggcggcctggtttggctcgttaccggtagtgccggaagggtgtaaagccagtccgttattaggcgagaaagggtgtgaaacaaacggttttaactatttcgataaaatcgccttctggaaaacacctatagcagaagggggcaagtttgttccctacagtcgctggacgcaggattacattgccattatgggcggtcgctaa

SEQ ID NO: 261089 - DNA, 1014 bp, Klebsiella pneumoniae
atgacgtacgcagtggagtttggcaacgtctcgcggttgtacggtgacgtgcgcgcagtagatggcgtcagtattgcgataaaagatggtgagttcttctctatgctggggccgtccggctccggcaaaaccacctgcctgcgcctgattgctggcttcgaacagctttccggcggggctatctctatctttggtaaacccgccagcaatctgccaccgtgggagcgggacgtgaatactgtcttccaggactacgcactatttccgcatatgtcgattcttgacaacgtcgcctatggtctgatggtcaaaggcgtgaataaaaaacagcggcatgcgatggcgcaagaggcgctggagaaagtggcattggggtttgtacagcaacgcaaaccgtcacaactttctggtggtcagcgccagcgagtcgccatcgccagagcactggtgaacgaaccgcgtgtgttattgctggatgaaccgctcggcgcactggatctcaaattgcgtgagcagatgcagctggaactgaaaaaactgcaacagtctctcggtatcacttttatcttcgttacccacgatcagggcgaagcgttatcgatgtccgatcgtgtggcggttttcaataatggacgcattgagcaggtcgattccccgcgcgatctctatatgcgcccgcgcacgccgtttgttgccgggttcgttggtacatcgaatgtttttgatggactgatggcagagaaactttgtggcatgacgggaagcttcgccctgcgaccggaacatatccgcctcaacacccctggtgaactgcagaccaatggcacgatccaggcggtgcaatatcagggcgcggcaacacgttttgaactgaaattgaacggcggtgaaaaactgcttgtgagtcaggccaatatgacaggcgaagaactgcctgccacgctcacgcccggacaacaggtgatggtttcctggtcgcgtgatgtgatggtgccgctggttgaggagaggtga

SEQ ID NO: 261090 - DNA, 942 bp, Klebsiella pneumoniae
atggcgatgaatgtattgcaatcaccttcacgtccaggtctgggtaaggtgtccggtttcttctggcgtaatccggggctggggctgtttttactgctgcttggcccgctaatgtggtttggcattgtctatttcggctcgctgctgacactgttatggcagggattttatacctttgacgatttcaccatgtcggtaacgccggaactgacgctggcgaatatccgtgcgctgtttaatccggcgaattacgacatcattctccgcacgctgactatggctgtggcagtcactatcgccagcgccattctggcttttccaatggcgtggtatatggcgcgctataccagcgggaaaatgaaagcgtttttttatattgcggtaatgttgccgatgtgggcgagctacattgttaaagcctatgcctggacgttattgctggcaaaagatggcgtggctcagtggtttttacaacatcttgggctggaaccactgctgactgcgttccttacattacctgcggtgggcggcaatacgctgtcaacttccgggctggggcgctttctggtgtttctctatatctggctgccgttcatgatcctgcccgtgcaggcggcgcttgagcgtttgccgccgtcattgttgcaggcgtcggctgatcttggcgcgcgtccacggcaaacctttcgctatgtggtgctgccgctggcaatccctggtattgccgctggctctatctttaccttttcactcacactgggcgattttattgttccgcagctggttggccctccaggatattttatcggcaatatggtttattcccagcagggagcgattggcaatatgccgatggcggcggcattcaccctggtgccgattgttctcatcgcactgtacctggcgttcgtgaaacgtctgggagcgttcgatgcactctga

SEQ ID NO: 261091 - DNA, 795 bp, Klebsiella pneumoniae; identical to SEQ ID NO: 9650

SEQ ID NO: 261092 - DNA, 1425 bp, Klebsiella pneumoniae; identical to SEQ ID NO: 9651

SEQ ID NO: 261093 - DNA, 174 bp, Klebsiella pneumoniae
atgtctctctatcaacacatgcttgttttttatgcggttatggcagcaatcgcatttcttatcacctggtttctttctcacgataagaaacgcatccgtttcttaagcgcctttctggtgggggcaacatggccgatgagtttcccggtggcgctgttgttttcactgttttaa

SEQ ID NO: 261094 - DNA, 234 bp, Klebsiella pneumoniae
atgtcgcatctggatgaagtcatcgcgcgcgtggatgccgcgattgaagagagcgtcattgcccatatgaacgaattattaatcgccctgagcgatgacgcggagttaagtcgggaagatcgctacacccagcagcagcgtctgcgcacagcgatcgcccatcacggtcgcaagcataaagaagatatggaagcgcgccacgaacagttaaccaaaggtggcaccatcctctga

SEQ ID NO: 261095 - DNA, 450 bp, Klebsiella pneumoniae
atgaatcagtcgcttacccttgcttttttgattgccgccggaattggtctggtagtccagaacacgctgatggtgcgcatcacccagacctcctctaccattctcatcgccatgttgctgaactctttggtaggaattgtgctgttcgtttctattttatggtttaaacaaggcatggcggggtttggcgaactggtgtccagcgtgcgctggtggacacttatacctggcttgctgggatcgttttttgtcttcgccagtatcagcggatatcagaatgtgggagcggcgacaactattgcggcactggtcgccagccagctgattggcggtctggtgctggatatcttccgcagccatggcgtaccactacgggcgttgatcggcccaatttgtggcgcaattttacttgtggttggtgcctggctggtggccaggcgcacattttaa

SEQ ID NO: 261096 - DNA, 519 bp, Klebsiella pneumoniae
atgtccatccgttttgcccgcaaagccgactgtgctgccattgcggaaatttataaccacgccgtgttgtatacggcggctatctggaatgaccaaacggtggatgcagataaccgcattgcctggttcgaagcgcggactttagcaggttatccggtgctggtgagtgaagaagatggcgtcgttacaggatatgcctcgtttggcgactggcgtagtttcgatggttttcgccataccgtggaacattcggtttatgtccatcccgatcatcagggcaaaggtcttgggcgtaaattgttaagccgattgattgatgaagcgcgggattgcgggaagcatgtcatggtcgccgggatcgaatcgcaaaatcaggcgtctttgcatctgcaccagtcgttgggatttgtcgtcaccgcacaaatgccgcaggtaggcactaaatttgggcgctggctggatctgacatttatgcagttgcaactcgacgagcgcactgaaccggacgcgattggatga

SEQ ID NO: 261097 - DNA, 1038 bp, Klebsiella pneumoniae
atggggcaacaaaagcagcgtaaccgccgttgggttctggcctcgcgtccgcatggcgcaccggttccggagaatttccgtcttgaagaagatgatgtcgccacaccgggtgaaggacaggtgttactgcgcacagtttatttgtccctggacccgtatatgcgtggacgtatgagcgatgagccatcttattcaccgcctgttgatattggcggcgtgatggtcggcggcacggtgagccgtgtcgtggagtcgaatcatcctgattatcagcctggcgactgggtgctgggctacagtggatggcaggactatgacatatccagtggtgatgatttggtgaaacttggcgatcatccgcaaaatccatcgtggtcgctgggtgtgctggggatgccaggctttactgcttatatgggcctactggatatcggccagcctaaagagggcgaaacgctggtggtagctgcggcgacaggaccagtaggggcgacggtgggtcaaatcggcaaacttaaaggttgtagagtggttggggtggccggtggcgcggaaaaatgccgccatgctactgaggtgcagggcttcgatgtttgtcttgaccatcacgcggatgattttgccgaacaactggcgaaagcgtgcccaaaaggcgttgatatctattatgaaaacgtgggcggtaaagtatttgatgcggtgctaccgttacttaatacatctgcgcgcattcccgtctgcggcttagtgagcagctataacgctacagagctaccacccggcccggatcgtttacctctgctgatggctacggtgctgaaaaaacgtattcgcttgcaaggatttattatcgctcaggattatggtcaccgcatccatgagtttcagaaggagatggggcaatgggtgaaagaggataaaatccactaccgcgaagaaattactgacggtttagagaatgcgccacagacatttatcggcctgctgaagggtaaaaacttcggcaaagtggtgatccgcgtggcgggtgatgattaa

SEQ ID NO: 261098 - DNA, 666 bp, Klebsiella pneumoniae
atgcctggaacggaaaaaatgaaacatgtcagtttgactctgcaggttgagaatgacctgaaacatcagcttagtattggcgcactaaaacctggcgcacgcctgattactaaaaatctggcggagcaattaggtatgagtattacacctgtgcgtgaagcattattacgtctggtttcggtgaatgcgctttctgtcgcaccagcgcaagcatttacagttccggaagtggggaaacgtcaattagacgaaatcaatcggatccgctacgagctggaattaatggcagttactctggctgttgaaaacctcacctcgcaagacctggcggaactcgaggaattgctcgagaaattacagcaggcgcaagaaaagggcgacatggaacaaatcattaatgcgaacaggctatttcgcttagcaatttatcatcgttcaaatatgcccatcctgtgtgagatgattgagcaactgtgggtcaggatgggacctggtttacattatctttatgaagcgattaatccagcggaattacgggaacgtatagaaaactatcgtctattactcgccgcgttaaaagcaaaagacaaagagggatgcagacattgtcttgctgaaattatgcaacaaaatattgctattttataccagcaatacaatcgttaa

SEQ ID NO: 261099 - DNA, 282 bp, Klebsiella pneumoniae
gtgccatgctttgtgggtgaagtgagtatcggtagatactgcgtatacgtctacgcccagtttctgcagttcttcgtagtggtcagcaacgtcacccagttcggtcgggcatacgaaagtaaagtcagccgggtagaagaagaagacgctccagcggccttcggtatctttttcggtgatttcgatgaattcgccgtttttgaatgcctggtttttaaaaggtttaattttggtgttaatcaaggacatctatacttcctccgtgttttcgatgagatgtaa

SEQ ID NO: 261100 - DNA, 747 bp, Klebsiella pneumoniae
atgttaaaaaagatacttttactggctctgcttcctgcaatcgccttcgcagaggaacttcctgccccagtaaaagcgattgaaaaacagggcattacaatcatcaaaacgttcgatgctcccggaggaatgaaaggttatctcggaaagtatcaggatatgggcgtcaccatctacctgactccagatggtaagcacgctatctccggttacatgtacaacgagaaaggtgaaaacctgagtaacacacttatcgaaaaagaaatttacgcaccagccggacgcgaaatgtggcaacggatggaacaatcccactggctcctcgacggtaaaaaagacgcgccggtcattgtttacgtcttcgccgatccgttctgcccatattgtaaacagttctggcagcaggcgcgcccgtgggtagattctggcaaagtgcaattaagaacattgttggttggggttatcaagccagaaagcccggcgacagcagcggcaattcttgcctccaaagatcccgcaaaaacctggcaagaatatgaagcctctggtggcaagcttaagctaaacgtgcctgcaaacgtaagtacagagcaaatgaaagtgttaagcgacaacgagaaactgatggacgatctgggggcaaatgtcacaccagctatctattacatgagtaaggaaaatactctgcaacaggccgtggggttgcccgatcagaaaacgcttaatatcattatggggaataaataa

SEQ ID NO: 261101 - DNA, 903 bp, Klebsiella pneumoniae
atggcgaatctttatgacctaaaaaaatttgatctgaatttactggtcatatttgagtgtatttatcaacatctcagcattagtaaagcggcagaatcattatatataacgccctctgctgttagtcagtcgttacaacgtttacgtgcgcaatttaatgacccgttattcattcgctcagggaaaggtatcgcgccgactacgacagggttaaatctgcatcatcatcttgagaaaaatctcagaggcattgaacaaacgatcaatattgttaataagtctgagctaaagaaaaattttattatctacggtcctcagcttatttcttgtactaataacaacatgctaatccgctgtcttagacaagatacttcaatcgatatagaatgccatgacatactgctttcagctgaaaatgccgaagaactgttggttcaacgcaaaactgacctggcaattacactacaaccagtaattagccgctctgtcatctgcatgccgttacatactattcgcaattctcttatatgtagcaacaaacatcctcgtattaccgataccagtaactatgaacaaattatcgccgaagaattcaccttgttgatatctaaatcagcagggattgacgaaattcaaatggacatagatgaacgttttatgaaccgtaaagtttcatttcgcagttcttctttgttgacgataattaatagtatttctgttactgacttattgggcattgtgcccaccgaactgtacgatttacatcgtgattttttgaagttacaagagataaaactggaacaaccacttcctgcggttaaactttatatttcctataacaaggcttcgttgaacaaccttgtcttctcacgattcatagatcgtttaaatgatagcttctga

SEQ ID NO: 261102 - DNA, 1221 bp, Klebsiella pneumoniae
atgtctatttataaaatcccgcttccactgaatattctggaagctgcaaaagaacgtattacctggacacttaacaccctaccccgcgtctgcgtttctttttcgggtggtaaagattccggattaatgctgcatctgaccgccgaacttgcccgacaaatgggcaaaaaaatttgtgttttatttatcgactgggaagctcagttctcttgcaccattaactatgttcagtccctgcgcgagttgtacaccgatgtcatcgaagagttttactgggttgcgctcccgcttacaacgcaaaattccctatcacaataccaacccgaatggcagtgctgggaacctgatgtcgaatgggtacgtcagcctccgcaagatgcgataaccgatcctgactttttctccttttaccagccaggcatgaccttcgaacaatttgtgcgtgagtttgccgaatggttttcacaaaaacgtccggcggcgatgatgatcggcatccgtgcggatgagtcctacaaccgttttgtcgccatcgccagtttaaataaacaacgttttgccgatgataagccctggaccactgccgcaccaggcggtcatagctggtacatttaccccatctacgactggaaagtcgctgatatctggacctggtatgctagccatcaacgcctctgtaacccactgtataatataatgtatcaggcaggcgttcctctacgtcatatgcgaatttgcgaaccttttggtccggaacaacggcaaggattatggctctatcacgttatcgaaccggatcgctgggctgctatgtgcgcacgagtcagcggggtaaaaagtggcggcatttacgccggacatgacaaccatttttatggtcatcggaaaatcctcaagcccgaacatttagactggcaggagtatgcattattgctactcaacagcatgccggagaaaacagctgagcattatcgcaataaaatcgccatttatttgcactggtatcagaaaaaaggcatcgaggttccacaaacccagcaaggggacattggcgcgaaagatatcccctcctggcggcgaatatgcaaagttttactcaataacgattactggtgtcgggcattatcatttagcccgaccaaagcgaagaactatcagcgttataacgaacgaataaaaggaaaacgtcaggaatgggggatactatgcaacaacgattaa

SEQ ID NO: 261103 - DNA, 630 bp, Klebsiella pneumoniae
atgggggatactatgcaacaacgattaacgcaggatttaacccaatttctcgccagcttgccggaagacgatcgcatcaaagcgattaatgaaatccgcatggcgatccatcaggttagcccctttcgagaagagcctgtggattgcgttctgtgggttaaaaacagccaacttatgcctaatgattacaacccaaacaacgtggcaccacccgaaaaaaaactgctgaaaaaatccattgaaatagatggttttacccaacccattgtggtcacgcatacggataaaaatgccctggaaatcgtggatggttttcaccgccatgaaattggtaaaggctcatcatcgttaaaattacgcttaaaaggttatttgccggtgacctgtctggaaggtacgcgtaatcaacgcatcgccgcgactattcgtcataatcgcgcccgtggacgtcaccaaatcactgccatgtcagaaatcgtccgtgaactcagccagttgggatgggacgataataaaattggcaaagagctgggaatggacagcgacgaggtgctgcgcctgaaacaaattaatggcctgcaagagttgtttgccgaccgtcaatattcccgtgcctggactgtcaaataa

SEQ ID NO: 261104 - DNA, 1161 bp, Klebsiella pneumoniae
atgacaaataaccctctgattccacaaagcaaacttccacaacttggcaccactattttcacccagatgagcgcgctggcgcagcaacaccaggcaattaacctgtcgcaaggctttcctgattttgatggtccgcgctatttgcaggagcgcctggcgtaccacgttgcccagggggcaaaccaatacgcgcctatgactggcgtgcaggccttgcgcgaggcgattgctcagaaaacggaacgtctgtatggctatcaaccggatgccgatagcgatatcaccgtaacggcaggggcgacggaagcgttatatgcagcgattaccgcattggtgcgcaatggtgatgaagtgatctgctttgatcccagctatgacagttacgcgcccgccatcgcgctttcggggggaatagtgaaacgtattgcactgcaaccaccgcattttcgcgtggactggcaggaatttgccgcattgttaagcgagcgcacccgactggtgatcctcaacaccccgcataaccccagtgcaactgtctggcagcaggctgatttcgccgctttgtggcaggcaattgccgggcacgagatttttgtcattagcgatgaagtttacgagcacatcaacttttcacaacagggccatgccagcgtgctggcgcatccgcagctgcgtgagcgggcggtggcagtttcttcatttggcaagacctatcatatgaccggctggaaagtgggttattgcgttgcgccagcgcccatcagcgctgaaattcgcaaggtacaccagtatctgaccttttcggtgaataccccggcacagctggcacttgcggatatgctacgtgcagaacctgagcattatcttgcgttaccggacttttatcgccaaaaacgcgatattctggtgaatgccttaagtgagagtcggctggagattttaccgtgcgaaggcacttactttttgctggtggattacagcgcggtttcttcgctggatgacgttgagttttgccagtggctgacgcgggagcacggtgtagcggcgatcccgctgtcggtattttgcgccgatcccttcccccataaactgattcgtctctgttttgccaagaaggaatcgacgttgctggcagcagctgaacgcctgcgccagctgtag

SEQ ID NO: 261105 - DNA, 1089 bp, Klebsiella pneumoniae
atgcctcacaatcctatccgcgtggtcgtcggcccagctaactacttttcacatccaggcagtctcaatcacctgcatgattttttcactgatgaacagctttctcgcgcggtgtggatctacggcgaacgcgccattgcagcggcgcaaacaaaacttccgccagcgtttgaacggccaggggcaaagcatattttgtttcgcggtcattgcagcgaaagcggtgtacaacaactggcggctgactccggtgacgatcgcagcgtggtgattggcgtcggcggcggcgcactgctcgacaccgcaaaagccctcgcccgccgtctcggtctgccgtttgttgccgttccgacgatagccgctacctgcgccgcctggacaccgctctccgtctggtataacgatgccggacaggcgctgcattttgagattttcgacgacgccaattttatggtgctggtggaaccagagattatcctcaatgcgccgcaagaatatctgctggcggggatcggtgacacgctggcgaaatggtatgaagcggtggtgctggctccgcaaccagaaacgttgccgctaaccgtgcggctggggatcaataatgcgcaggccatttgcgacgtcttgttaaacagtagcgaacaggcgctgagcgatcagcaaaaacaacagttaacgcaatcattttgcgatgtggtggatgctattattgctggtggtgggatggtcggtggtctgggcgatcgttttacgcgtgtggcggcggcccatgccgtgcataacggtctgaccgtgctgccgcaaaccgagaagtttcttcacggcaccaaagtcgcctacggaattctggtgcaaagcgccttgctgggtcaggatgatgtgctggcacaattaaccggggcgtatcagcgttttcatctgccgactacgctggcggagctggaagtggatatcaataatcaggcggagatcgacaacgtgattgcccacaccttacgtccggtggaatccattcattacctgccagtcacgctgacaccagatacgttgcgtgcagcgttcgaaaaagtggaatcgtttaaagcctga

SEQ ID NO: 261106 - DNA, 414 bp, Klebsiella pneumoniae
atgatctggaaacgccatttaacgctcgacgagctgaacgccaccagcgataacacaatggtggcgcatctgggaattgtgtatacccgtctgggcgatgatgtactcgaagccgaaatgccggtcgatacccgtactcatcagccgttcggtttactacatggcggcgcgtcggcggcgctggcggaaacgctgggatcgatggccggatttatgatgaccctcgacggacagtgtgtggtgggcacggaacttaacgccacacatcatcgcccggtgtctgaaggcaaggtacgcggcatctgccagccgctgcatcttgggcggcaaaatcagagctgggaaatcgttgttttcgatgaacaggggcggcgttgctgcacctgtcggctgggtacggcagttttgggatga

SEQ ID NO: 261107 - DNA, 858 bp, Klebsiella pneumoniae
atggctattccaaaattacaggcttacgcactgccggagtctcacgatattccgcagaataaagttgactgggcctttgaaccgcaacgtgccgcgttgttaatccatgatatgcaggactattttgtcagcttctggggcgagaactgcccgatgatggagcaggtgatcgcgaatattgcggcactacgcgactactgcaaacagcacaatatcccggtttattacaccgcccagccgaaagagcagagcgatgaagatcgggcgctgttgaatgatatgtgggggcctggcctgacccgttcgccggaacagcaaaaggtggtggatcgcctgacgccagatgccgacgacacggtgctggtgaagtggcgctacagcgcgtttcatcgttccccgctggagcaaatgctcaaagagagtggacgtaaccagctgattattaccggggtatatgcccacattggctgtatgaccaccgcaaccgacgcatttatgcgcgatattaaaccgtttatggtggcggatgcgctggctgatttcagccgtgacgagcatttgatgtcgctgaaatatgtggccggacgttctggccgggtggtgatgaccgaagaattactgccagcacctatccccgccagcaaagcggcgctgcgtgaggtgatcctgccgttgctggacgagtccgatgaaccgttcgatgacgacaacctgatcgactacggtctggattcggtgcgcatgatggcgctggcggcgcgctggcgcaaagtgcatggcgatatcgactttgtcatgctggcgaaaaacccgaccatcgacgcctggtggaagctactctcccgcgaggtgaaataa

SEQ ID NO: 261108 - DNA, 1611 bp, Klebsiella pneumoniae
atgagcattccattcacccgctggccggaagagtttgcccgtcgctatcgggaaaaaggctactggcaggatttgccgctgaccgacattctgacccgtcatgccgcaagcgacagcatcgcggtcatcgacggcgagcggcagttgagttaccgggagctgaatcgggcggcagataacctcgcctgtagtttgcgccgccagggcattaaacctggtgaaaccgcgctggtacagctgggtaacgtcgctgaattgtatattacctttttcgcgctgctgaagctgggcgttgcgccggtgctggcgctgttcagccatcagcgtagtgaactgaacgcctatgccagccagattgaaccggcgttactgattgccgatcgccagcatgcgctgtttagcggggatgatttcctcaatacatttgttgcagagcattcctccattcgcgtggtgcaactgcacaacgacagcggtgagcataatttgcaggatgcgattaaccatccggctgaggattttactgccacgccgtcacctgctgatgaagtggcctatttccagctttccggcggcaccaccggcacaccgaaactgatcccgcgcactcataacgactactactacagcgtgcgtcgtagcgtcgagatttgtcagttcacacaacagacacgctacctgtgcgcgatcccggcggctcataactacgccatgagttcgccgggatcgctgggcgtctttcttgccggaggaacggtcgttctggcggccgatcccagcgccacgctctgtttcccattgattgaaaaacatcaggtgaacgtcaccgcgctggtgccacccgcagtcagcctgtggttacaggcgctgaccgaaggcgaaagccgggcgcagcttgcctcgctgaaactgttacaggtcggcggcgcacgtctttctgccacgcttgcggcgcgtattcccgctgagattggctgccagttgcagcaggtgtttggcatggcggaagggctggtgaactacacccgtcttgatgatagcgcggagaaaattatccatacccagggttacccaatgtgcccggacgatgaagtgtgggttgccgatgccgaaggaaatccactgccgcaaggggaagttggacgcctgatgacgcgcgggccgtacaccttccgcggttattacaaaagcccgcagcacaatgccagtgcctttgatgccaacggtttttactgttccggcgatctgatctctattgatccagagggttacatcaccgtgcaggggcgcgagaaagatcagatcaaccgtggcggcgagaagatcgctgccgaagagatcgaaaacctgctgctgcgccatccggcggtgatctatgccgcactggtgagcatggaagatgagctgatgggcgaaaaaagctgtgcttatctggtggtaaaagagcctctacgcgcggtgcaggtgcgtcgtttcctgcgtgaacagggtattgccgaatttaaattaccggatcgcgtggagtgtgtggattcacttccgctgacggcggtcgggaaagtcgataaaaaacaattacgtcagtggctggcgtcacgcgcatcagcctga

SEQ ID NO: 261109 - DNA, 1176 bp, Klebsiella pneumoniae
atggatacgtcactggctgaggaagtacagcagaccatggcaacacttgcgcccaatcgctttttctttatgtcgccgtaccgcagttttacgacgtcaggatgtttcgcccgcttcgatgaaccggctgtgaacggggattcgcccgacagtcccttccagcaaaaactcgccgcgctgtttgccgatgccaaagcgaagggcatcaaaaatccggtgatggtcggggcgattcccttcgatccacgtcagccttcatcgctgtatattcctgaatcctggcagtcgttctcccgccaggaaaaacaagcttccgcacgccgtttcacccgcagccagtcgctgaacgtggtggaacgtcaggcaattccggatcaaaccacgtttgaacagatggttgctcgcgccgccgcacttaccgccacgccgcaggtcgacaaagtggtgttgtcacggttgattgatatcaccactgacgccgccattgatagtggcgtattgctggaacggttgattgcgcaaaacccggttagttacaacttccatgtcccgctggctgatggtggcgttctgctgggggccagcccggaactgctggtacataaagacggcgagcgttttagctccattccgttagccggttccgcgcgtcgtcagccggatgaagtgctcgatcgcgaagcgggtaatcgtctgctggcgtcagaaaaagatcgccatgaacatgaactggtgactcaggcgatgaaagaggtactgcgcgaacgaagtagtgagttacacgtcccttcttctccacaactgatcaccacgccgacgctgtggcatctcgcaactccctttgaaggtaaagcgaattcgcatgagaacgcactgacgctggcctgtctgctgcatccgacccccgcgctgagcggtttcccgcatcaggccgcgacccaggttattgctgaactggagccgttcgaccgcgaactgtttggcggcattgtgggttggtgtgacagcgaaggtaacggcgagtgggtggtgaccatccgctgcgcgaagctgcgggaaaatcaggtgcgtctgtttgccggagcggggattgtgcctgcgtcgtcaccgttgggtgagtggcgcgaaacgggcgtcaaactttctaccatgttgaacgtttttggattgcattaa

SEQ ID NO: 261110 - DNA, 957 bp, Klebsiella pneumoniae
gtgagactcgccccgctctaccgcaacgcccttctattaacaggacttttgctttcaggaatagtcgcagttcaggccgccgactggccgcgtcagattactgacagccggggcactcataccctggaaagccagccgcagcgtattgtttccaccagcgtcaccctgaccggctcactgctggcgattgatgctccggtgattgccagcggcgcgaccacgccgaataaccgcgtcgcggatgaccagggctttttacgccagtggagcaaggtggcgaaagaacgcaaactgcaacggctctatatcggcgaaccgagcgccgaagccgttgccgcgcaaatgccggatctgattttaattagcgcaactggcggggattcggcgctggcgctgtacgatcagctttctaccatcgccccaacattaatcatcaattacgacgacaaaagctggcaggcgctgttaacgcaacttggcgaaattaccgggcatgagaaacaagcggcagagcggattgcacagtttgataagcaactggcggcggcgaaagagcaaatcaaattaccgccgcagccggtcactgccattgtctataccgccgctgcacacagtgccaatctctggacgccggaatcagcacaagggcagatgctggaacaactcggctttacgttggcgaaattgcccgcagggttaaacgccagccaaagccagggcaaacgtcatgatatcgttcagcttggtggggaaaatctggctgcagggttaaatggcgagtcactattcctgttcgccggtgatcagaaagatgccgatgctatttatgctaatccgctgctcgcgcacctgcctgcagtacaaaacaagcaggtttatgcgctgggaaccgagacgttccgactggattactacagcgccatgcaagtgctggaacgacttaaggcgctgttttaa

SEQ ID NO: 261111 - DNA, 1251 bp, Klebsiella pneumoniae
atgaataaacaatcctggctgcttaacctcagcctgttgaaaacgcacccggcgtttcgcgcagtattcctcgctcgttttatctcaattgtgtctctgggtttgctcggcgtcgcggtgccggtgcagatccagatgatgacgcattctacctggcaggtggggctttcggtgacgctgaccggcggcgcgatgtttgttggcctgatggtcggcggtgtgctggcggatcgctatgaacgcaaaaaagtgattttgctggcgcgcggcacctgtggcattggcttcattggactgtgccttaatgcactgctgccggagccgtcattgttggcaatctatttacttggtttatgggatggttttttcgcatcacttggcgttacggcgctactggcggcgacacctgcactggtagggcgtgaaaacttaatgcaggccggggcgatcaccatgttgaccgtgcgcctggggtcggtgatttcgcccatgattggcggtttattgctggcgaccggcggcgtagcctggaactacgggctggcggcggcgggcacgtttattaccttgctgccgttattaagccttccggcgttgccaccgccacctcagccgcgtgagcatccgttgaaatcattactggcaggatttcgttttctgctcgccagcccgctggtgggagggattgcgctgctgggtggtttattgacgatggcgagcgcggtgcgggtactgtatccggcgctggctgacaactggcagatgtcggcggcacagattggttttctctatgcggcgatcccgctcggcgcggctattggcgcgttaaccagcgggaagctggcacatagcgcgcgaccagggttattgatgctgctctccacgctgggatcgttcctcgccattgggctgtttggcctgatgccgatgtggattttaggcgtgatttgtctggcgctattcggctggctgagcgcggtcagctcgttgctgcaatacacaatgctgcaaacgcaaaccccggaagcgatgttagggcggattaacggtttgtggacggcgcaaaacgtgacgggcgatgccataggtgcggcgctgttaggcggtctgggagcgatgatgacaccggttgcttccgcaagcgcgagcggttttggtttgttgattatcggtgtgttgttattgctggtgctggtggagttgcgacgttttcgccagacgccgccgcaggtgacagcgtccgacagttaa

SEQ ID NO: 261112 - DNA, 1005 bp, Klebsiella pneumoniae
atgtctggttctgttgccgtgacacgcgccattgccgtgcccggattgctgttcttactgattatcgcgacggcattaagcctgctcattggggcaaaatcactccccgcttccgtagtgctggaggccatctccggcacctgccagagcgccgactgcaccatcgtgctcgacgcgcgactgccgcgcacccttgccggtttactggccggcggtgcgcttgggcttgcaggggcgctgatgcaaaccctcacccgaaacccacttgccgaccccggcttgcttggcgtgaacgccggagccagctttgccattgtgctgggtgcggcgctgtttggttactcttccgcacaggaacaactggcgatggccttcgccggggcgctggtggcctcattgattgttgcctttaccggcagccagggcggcgggcagttaagtccggtgcgtttaaccctggcgggcgtggcactggcggcggtgctggaagggctgaccagcggcatcgccctgcttaatcctgacgtctacgatcagttgcgtttctggcaagccggttcgctggatattcgcaatctacataccttaaaagtggtgctgatcccggtgctgatcgccggagcaaccgcgctattactgagccgcgcgctgaacagtttaagcctcggcagtgacaccgcgacggcgctgggtagtcgcgtggcgcgcacacagttgattggtctgctggcgattaccgtgctttgtggtagtgcgacggcggtagttggcccgattgcctttattggcctgatgatgccgcatatggcacgttggttggtgggtgccgatcatcgctggtcgctgcccgtcacgctacttgccacccctgccctgctgctgtttgccgatatcatcgggcgggtgattgtgcccggcgagttgcgcgtttctgtggtcagtgcctttattggcgcaccggtgctgatcttcctcgtgcgacgtaaaacgcgaggtggcgcatga

SEQ ID NO: 261113 - DNA, 993 bp, Klebsiella pneumoniae
atgatttacgtctctcgccgattaatcatcacctgtttgctgctaattaccgcctgtgtggttgcaggtatctggggattacgcagcggtaccgtcacgctggaaacctcgcaggtattcgccgcgctgatgggcgatgcgccgcgcagtatgacgatggtggtcaccgaatggcgtttaccacgcgtgctgatggcgctgttaattggcgcggctctgggcgtcagcggcgcgatttttcagtcgctgatgcgtaacccgctcggcagccctgacgtaatgggctttaacaccggggcgtggagcggcgtgctggtggcgatggtgctgtttggtcaggacctgacggctatcgccctggcagcaatggtgggcggcattgtcacctcgctgctggtctggctgctcgcctggcgtaacggcatcgacacctttcggttgattattatcggcatcggcgttcgcgccatgctggtggcctttaatacctggctgttgctgaaagcgtctttagaaacggcgctaacagcaggtttgtggaatgccggatcgctcaacggcctgacgtgggcaaaaacctcgccttccgcacccatcattatattgatgctcattgccgccgccttactggtacgccggatgcgcttgctggaaatgggcgatgataccgcgtgtgcgttgggcgtcagcgtcgaacgttcgcggctgttaatgatgctggtggcagtggtgctcaccgctgcggcaacggcgcttgccgggccgatttcctttattgctttagtcgcgccgcacattgcccgacgcattagcggcaccgctcgctgggggctgacccaggcggcgctgtgcggggcgctgttactgctggcggccgatctctgcgcccaacaactgtttatgccgtatcaacttccggttggcgtcgttaccgtcagcctcggcggtatttaccttatcgtcttgttaattcaggagtctcgcaaaaaatga

SEQ ID NO: 261114 - DNA, 816 bp, Klebsiella pneumoniae
atgaccgaatcagtagcccgtttgcgtggcgaacagttaaccctcggatatggcaaatataccgttgcggaaaatctgactgtagaaattcctgatggtcacttcacggcaattatcgggccaaatggctgcggtaaatccacgttactgcgtaccttaagccgcctgatgacgcctgctcacgggcatgtctggctggatggcgagcacattcaacattacgccagtaaagaggttgcacgccggattggcctgttggcgcaaaacgccacaacgccgggagatatcaccgtgcaggagctggtggcgcgtgggcgttacccgcatcaaccgctgtttactcgctggcgcaaagaagatgaagaagcggtaacgaaagcgatgcaggccacgggaatcactcatctggcagatcaaagcgtggataccctttctggcggacaacgccagcgagcgtggatagcaatggtgctggcccaggaaacggcaattatgctgctcgatgaaccaacgacctggctggatatcagtcatcagattgatctcctggaactgttaagcgaactgaaccgcgagaaaggctataccctggcggcggtgctgcacgatcttaatcaggcctgtcgttacgccagccatttgattgcattgcgggaagggaaaattgttgctcagggagcgccgaaggagattgtcactgctgaattgatcgagcgcatttatggtctgcgctgcatgattattgacgatccggtagccggaactccgctcgtggtgccgctcggacgaacggcaccttcaactgccaagatttaa

SEQ ID NO: 261115 - DNA, 1134 bp, Klebsiella pneumoniae
atgtcatcaatgaatattaaacagggaagtgacgctcattttcccgagtatcctctggcgtcgcccagtaataatgaaattgatttacttaatctaattgaagttttatggcgggccaaaaaaacggtcatggcggtcgtttttgcgtttgcctgcgcaggtttactgatctctttcatcctgccgcaaaaatggaccagcgcggcggttgtcacacctccagaacctgttcagtggcaggcgcttgagaaaacattcactaagcttcgtgtgctggatctggatatcaaaattgatcgtacagaagcatttaacctgtttatcaagaagtttcagtcggttagcttgctggaagagtacctgcgctcaacaccttatgtgatggaccaattaaaagaggcgaaaatcgacgaactggatttgcatcgcgcaattgtcgcattgagcgaaaaaatgaaagcggttgatgacaatgccagtaagaaaaaagatgaaccgtcactgtatacctcctggacgctaagttttaccgcgccaaccagcgaagaggcgcagaccgttttgagcgggtatatcgattatatctctgcgttggtggtgaaagagtcgatagaaaacgtccgtaataaactggagatcaaaacccagtttgaaaaagaaaaactggctcaggaccgcattaaaacgaaaaatcaacttgatgcaaacattcagcgcctcaattattcactcgacattgctaacgcggcaggaattaaaaagcccgtttacagtaatggtcaggccgttaaagatgaccccgatttctctatttctctcggcgcagacggtattgaacgcaaactggaaattgaaaaagcggttactgacgttgcggaactgaacggtgaattacgtaatcgccagtatcttgttgagcagctaacaaaagcaaatatcaacgatgtgaattttacgccgtttaaatatcagttaagcccgtcattgccagtgaaaaaagacggtccgggtaaggcgattattgtgatcctttctgcgatgatcggcgggatggtggcttgtggtggcgtgctgttgcgctatgcgatggcatccagaaaacaggatgccgtgatggaagagcacttagtttaa

SEQ ID NO: 261116 - DNA, 3882 bp, Klebsiella pneumoniae
atgagccagcatttacctttggtcgccgcacagcccggcatctggatggcagaaaaactgtcagatttaccctccgcctggagcgtggcgcattacgttgagttaaccggagaggttgatgcgccactactggcccgcgcggtggttgccggactagcgcaagcagatacgttgcggatgcgttttacggaagataacggcgaagtctggcagtgggtcgatgatgcgcagacgttcgaattgccagaaattatcgacctgcgaaccaacattgatccgcacggtactgcgcgggcattaatgcaggcggatttgcaacaagatttgcgcgtcgatagcggtaaaccactggtctttcatcagttgatacaggtggcggataaccgctggtactggtatcagcgttatcaccatttgctggtcgatggcttcagtttcccggccattacacgccagatcgccaatatttactgcgcatggctgcgtggcgaaccaacgcctgcttcgccgtttacgcctttcgctgatgtagtggaagagtaccagcaataccgcgaaagcgaagcctggcagcgtgatgcggcattctgggcggaacagcgtcgtcaactgccgccgcccgcgtcactttctccggcacctttaccggggcgcagcgcttcggcagatattcttcgcctgaaactggaatttactgacggggaattccgccagctggctacgcaactttcaggtgtgcagcgtaccgatttagcccttgcgctggcggctttgtggctggggcgattgtgcaaccgcatggactacgctgccggatttatctttatgcgtcgactgggctcggcggcgctgacggctaccggacccgtgctcaacgttttgccgttgggtattcacattgcggcacaagaaacgctgccggaactggcaacccgactggcagcacaactgaaaaaaatgcgtcgtcatcaacgttacgatgccgaacaaattgtccgtgacagcgggcgagcggcaggagaggaaccgctgttcggtccggtactcaatatcaaggtatttgattaccaactggatattcctggtgttcaggcgcaaacccataccctggcaaccggtccggttaatgaccttgaactggcactgttcccggatgaacacggtgatttgagtattgagatcctcgccaataaacagcgttacgatgagccaacgttaattcaacacgctgaacgcctgaaaatgctgattgcccagttcgccgcggatccggcgctgttgtgcggcgatgtcgatattatgctgccaggtgaatacgcgcagctggcgcagatcaacgccactcaggttgagattccagaaaccacgctgagcgcgctggtggcagaacaagcggcaaaaacaccgcatgctccggcgctggttgatgcgagttaccagtttagctatcgggaaatgcgcgagcaggtggtggcgctggcgaatctgctgcgtgagcgcggcgttaaaccaggcgacagcgtggcggtggcgctaccgcgctcggtatttttgactctggcgctacatgcaattgttgaggctggtgcggcctggttaccgctggataccggctatccggacgatcgcctgaaaatgatgctggaagatgcgcgtccgtcgctgttaattaccaccgacgatcaactgccgcgctttagcgatgttcccaatttaacaaacctttgctataacgccccgcttaccccccagggcagtgcgccgctgcaactttcacaaccgcataacacggcttatatcatctttacctctggctccaccggcaggccgaaaggggtaatggtcgggcagacggctatcgttaaccgcctgttgtggatgcaaaatcattatccacttacaggtgaagatgtcgttgcccaaaaaacgccgtgcagttttgatgtctcggtgtgggagtttttctggccgtttattgccggggctaaactggtgatggctgaaccggaagcgcaccgcgatccgctcgctatgcagcaattctttgccgaatatggcgtaacgactacgcactttgtgccgtcgatgctggcggcatttgttgcatcgctgacgccgcaaaccgctcgccagagttgcgcgacgttgaaacaggttttctgtagtggtgaggccttaccagctgatttatgccgcgaatggcaacagttaaccagcgtgccgttgcataatctatatggcccgacggaagcggcggtagatgtcagctggtatccggcttttggcgaggaactggcagaggtgcgcggcagtagtgtgccgattggttatccggtgtggaatacgggcctgcgtattcttgatgcgatgatgcatccggtgccgccaggtgtggcgggtgatctctatctcaccggtattcaactggcgcaggggtatctgggacgacccgatctgaccgccagtcgctttattgccgatccttttgctccaggggaacggatgtaccgtaccggagacgttgcccgctggctggataacggcgcggtggagtacctcgggcgcagtgacgatcagctaaaaattcgcgggcagcgtattgaactgggcgaaatcgatcgcgtgatgcaggcgctgccggacgttgaacaggccgtgacccacgcctgcgtcattaaccaggctgccgcaacgggaggcgatgcgcgtcagttggttgggtatctggtgtcgcaatcaggcctgccgctggataccactgcattgcaggcgcagttgcgcgaaacattgccaccgcatatggtgcccgtggttctgctgcaacttccgcagttgccgcttagcgccaacggcaagctggatcgcaaagccttaccgttgcctgaactgaaagcacaagcgccggggcgtgcgccgaaagcgggcagtgaaacgattatcgccgcggcattctcgtcgttgctgggttgtgacgtgcaggatgccgatgctgatttctttgcgcttggcggtcattcgctactggcaatgaaactggctgcgcagttaagtcggcagtttgcccgtcaggtgacgccggggcaggtgatggtcgcgtcaactgtcgccaaactggcaacgattattgatggtgaagaagacagctcccggcgcatgggattcgaaaccattctgccgttgcgtgaaggtaatggcccgacgctgttttgtttccatcctgcgtccggttttgcctggcagttcagcgtgctctcgcgttatctcgatccacaatggtcgattatcggcattcagtcgccgcgccctcatggccccatgcagatcgcggcaaacctggatgaagtctgcgaagcgcatctggcaacgttacttgaacaacaaccgcacggcccttattacctgctggggtattcgctgggcggtacgctggcgcagggcattgcggcgcggctgcgtgcccgtggcgaacaggtggcatttattggcttgctggatacctggccgccagaaacgcaaaactggcaggaaaaagaggctaatggcctggacccggaagtgctggcggagattaaccgcgagcgcgaggccttcctggcggcacagcagggaagtacttcaacggagttgtttaccaccattgaaggcaactacgctgatgctgtgcgcctgctgacgactgctcatagtgtaccgtttgacggtaaagcgacgctgtttgttgctgaacgcacgcttcaggaaggtatgaatcccgaacgcgcctggtcgccgtggattgcggagctggatatctatcgtcaggattgtgcgcatgtggatattatctctccaggggcgtttgaaaaaattgggccgattattcgcgctacgctaaacaggtaa

SEQ ID NO: 261117 - DNA, 219 bp, Klebsiella pneumoniae
atggcattcagtaatcccttcgatgatccgcagggagcgttttacattttgcgcaatgcgcaggggcaattcagtctgtggccgcaacaatgcctcttaccggcaggctgggacgttgtgtgtcagccgcagtcacaggcgtcctgccagcagtggcttgaagcccactggcgtactctgacaccggcgaatttcacccagttgcagggggcacaatga

SEQ ID NO: 261118 - DNA, 1203 bp, Klebsiella pneumoniae
gtgacggcgttaaaagtaggaagtgagagctggtggcagtcgaaacatggcccggaatggcagcgtctgaatgacgaaatgtttgaggtcactttctggtggcgtgatccccagggttctgaagaatactcgacgataaagcgcgtatgggtctacatcactggtgtgaccgatcaccatcagaacagccagccccagtcgatgcagcgaattgcaggtaccaacgtctggcagtggacgacacaacttaatgccaactggcgcggcagctactgttttattcccaccgaacgcgttgacattttttctgcaccatcccccgatcgcctcgaattacgcgaaggctggcgaaaactattaccccaggcgatagccgatccgctgaatccacaaagctggaaaggcgggcgagggcacgctgtttctacactcgaaatgccgcaagcgcccctacaacctggttgggattgtccgcaagcgccagaaacgcctgccaaagaaattatctggaaaagtgagcggctgaaaaattcacgccgtgtatggatttttaccaccggcgatgcaacagcagaagaacgcccgctggcagttttgcttgatggcgaattttgggcgcagagtatgcccgtctggccggcgctaacttcgctgacccatcgtcggcaacttcctcccgccgtgtatgtgttgatcgacgctatcgacaccacgcaccgcgcccacgaactgccgtgtaatgcggatttctggctggcagtacagcaagagttattacccctggtgaaagatattgccccttttagcgatcgcgccgatcgcaccgtggtcgccgggcagagttttggtgggctttccgcgctgtatgccggactgcactggcctgaacgctttggctgtgtattaagccagtcaggatcgtactggtggccgcatcggggcgggcagcaagaaggtgttttacttgagcaacttaaagctggtcaagttagtgccgaaggtctgcgcattgtgctggaagcgggtattcgcgagccgatgatcatgcaggccaatcaggcgctgtatgcgcaattacaccccataaaagaatccattttctggcgtcaggttgacggcggacatgatgcgctttgttggcgcggtggcttgatgcaggggctaatcgacctctggcaaccacttttccatgacaggagttga

SEQ ID NO: 261119 - DNA, 2241 bp, Klebsiella pneumoniae
atgaacaagaagattcattccctggccttgttggtcaatctggggatttatggggtagcacaggcacaagagccaaccgatactcctgtttcacatgacgataccattgtcgttaccgccgccgagcagaacttgcaggcacctggcgtttcgaccatcaccgcagatgaaatccgcaaaaacccggttgcccgcgatgtgtcggagatcatccgtaccatgccaggcgttaacctgaccggtaactccaccagtggtcagcgtgggaataaccgacagattgatattcgcggcatgggtccggaaaacacgctgattttgattgacggcaagccggtaagcagccgtaactcggtgcgtcagggctggcgtggcgagcgcgatacccgtggtgatacctcctgggtgccacctgaaatgattgaacgtattgaagttctgcgtggtccggcagctgcgcgttatggcaacggcgcggcgggcggcgtggttaacatcattaccaaaaaaggcagtggtgagtggcacggctcgtgggacgcatatttcaatgcgccagaacataaagaggaaggtgccaccaaacgcactaactttagcctcaccggtccgctgggcgacgaattcagcttccgcttgtatggcaacctcgacaaaactcaggctgacgcgtgggatatcaaccagggccatcagtccgcgcgtgccggaacgtatgccacgacgttaccagccgggcgcgaaggggtgatcaataaagatattaacggcgtggtgcgctgggacttcgcaccattacaatcgctggaactggaagcaggttacagccgccagggtaacctgtatgcgggcgatacccagaacaccaactctgactcctatacccgctcgaaatatggcgatgaaaccaaccgtctgtatcgccagaactactcgctgacctggaacggcggctgggataacggcgtgaccaccagcaactgggtgcagtacgaacacacccgtaactcgcgtattccggaaggtctggcgggcggtaccgaagggaaatttaacgaaaaagcgacacaggatttcgtcgatatcgatctcgatgacgtgatgctgcacagcgaagttaacctgccgattgatttcctcgttaaccagacgctgacgctgggtacggagtggaatcagcagcggatgaaggacttgagttccaacacccaggcgctcaccgggacgaataccggcggcgctattgatggcgtgagtgccaccgaccgtagcccgtattcaaaagcagaaattttctcgctgtttgccgaaaacaatatggagctgactgacagcaccatcgtaacgccggggctgcgtttcgatcatcacagcattgttggcaataactggagtccggctctaaacatatcgcaaggtttaggcgatgacttcacgctgaaaatgggcattgcccgtgcttataaagcgccgagtctgtaccagactaacccaaactacattctctacagtaaaggtcagggctgctatgccagcgcgggcggctgctatctgcaaggtaatgatgacctgaaagcggaaaccagcatcaacaaagagattggtctggagttcaaacgcgacggctggctggcgggtgtgacctggttccgtaacgattatcgcaataagattgaagcgggctatgtggctgtagggcaaaacgcagtcggcaccgatctctatcagtgggataacgtaccgaaagcggtggttgaaggtctggaaggatcgttaaacgtaccggttagcgaaacggtgatgtggaccaataacatcacttatatgctgaagagtgaaaacaaaaccacgggcgaccgtttgtcgatcatcccggagtatacgttgaactcaacgctgagctggcaggcacgggaagatttgtcgatgcaaacaaccttcacctggtacggcaagcagcagccgaagaagtacaactataaaggtcagccagcggttggaccggaaaccaaagaaatcagtccgtacagcattgtgggtctgagcgcgacctgggatgtgacgaagaatgtcagtctgaccggcggcgtggacaacctgttcgacaaacgtttgtggcgtgcaggtaatgcccagaccacgggcgatctggcaggagccaactatatcgccggtgccggggcgtatacctataacgagccgggacgtacgtggtatatgagcattaatactcacttctga

SEQ ID NO: 261120 - DNA, 744 bp, Klebsiella pneumoniae
gtgaacgccttatccggcctacaaaaatcttgccaattcaatatattgcaggaccacgtaggcctgataagcgtagcgcatcaggcagttttgcgtttgtcatcagtctctaatatggtcgacatgaaaactacgcataccgccctcccctttgccggaaatacgctgcattttgttaagttcgatccggcgagtttttgtgagcaggatttactctggctgccacactacgcgcaactgcaacacgctggacgtaaacgtaaaacagagcatttagccggacggatcgctgcagtttatgcgctgcgggaatatggctataaatgtgtgcccgcaatcggcgagctacgccaacctgtgtggcctgcgggggtatacggcagtattagccactgtggggctacggcattagccgtggtatctcgtcaaccgattggcattgatattgaagaaattttttctgcgcaaacagcggcagaattgacagacaacattattacaccagcagaacacgagcgactcgcagaatgcggtttaaccttttctctggcgctgacactggcattttccgccaaagagagcgcatttaaggcaagcaagatacaggccgctcaaggttttctggattatcagataattagctggaataaacagcagatcatcattcgactagaggatgagcagtttgctgtgcactggcagataaaagaaaaaatagtcataacgctgtgccaacacgattaa

SEQ ID NO: 261121 - DNA, 153 bp, Klebsiella pneumoniae
atgctgacgaaatatgcccttgtggcagtcatagtgctgtgtttaacggtgctgggatttacgcttctggtccgcgactcgctgtgtgagtttacggtgaaggaacgtaatattgagtttaaggctgttctcgcttacgaaccgaagaagtag

SEQ ID NO: 261122 - DNA, 1119 bp, Klebsiella pneumoniae
atgccattacccgattttcatgtttctgaaccttttaccctcggtattgaactggaaatgcaggtggttaatccgccgggctatgacttaagccaggactcttcaatgctgattgacgcggttaaaaataagatcacggccggagaggtaaagcacgatatcaccgaaagtatgctggagctggcgacggatgtttgccgtgatatcaaccaggctgccgggcaattttcagcgatgcagaaagtcgtattgcaggcagccgcagatcatcatctggaaatttgcggcggtggcacgcacccgtttcagaaatggcaacgtcaggaggtatgcgataacgaacgctatcaacgaacgctggaaaactttggttatctcattcaacaggcgaccgtttttggtcagcatgtccatgttggttgcgccagtggcgatgatgccatttatttgctgcacggcctgtcacggtttgtgccgcactttatcgccctttccgccgcgtcaccatatatgcaaggaacggatacgcgttttgcctcctcacgaccgaatattttttccgcctttcccgataatggcccgatgccgtgggtcagtaactggcaacaatttgaagccctgtttcgctgcctgagttacaccacgatgatcgacagcattaaagatctgcactgggatattcgccccagtcctcattttggcacggtggaggttcgggtaatggataccccgttaacccttagccatgcggtaaatatggcaggattgattcaggctaccgcccactggttactgacggaacgcccgtttaaacatcaggagaaagattacctgctgtataaattcaaccgtttccaggcctgtcgctatgggctggaaggcgtcattaccgatccgcatactggcgatcgtcggtcactaacggaagacaccttgcgtttactggaaaaaatcgtcccttctgcacataaaatgggtgcatcgagtgcgattgaggccctgcatcgccaggtcgtcagcggtctgaatgaagcgcagctgatgcgcgatttcgtcgccgatggcggctcgctgattgggctggtgaaaaagcattgtgagatctgggctggtgactaa

SEQ ID NO: 261123 - DNA, 249 bp, Klebsiella pneumoniae
atgaaacaccctttagaaaccttgaccaccgcagcaggcattttgctgatggctttcctttcttgcctgctgctacccgcccccgcactggggctgacgctggcacaaaaactggtgaccatgttccatctgatggatcttagccagctttacactttattgttttgtctgtggtttttagtgctgggcgctattgagtattttgttctgcgctttatctggcgacgctggttctcgctggcggattaa

SEQ ID NO: 261124 - DNA, 369 bp, Klebsiella pneumoniae
atggataagcaatcactgcacgaaacggcgaaacgcctggcccttgagttaccctttgtcgagctttgctggccttttggcccggagttcgatgtttttaaaattggcggcaagatttttatgctgtcgtcggagctgcgcggcgtcccctttatcaatctgaagtccgatccacaaaaatccctgttaaatcagcaaatatatccgagcattaagccagggtatcacatgaataaaaagcactggatttcggtgtatcccggagaggaaatctccgaagcgttacttcgcgatctgatcaacgattcgtggaatctggtggttgatggtctggctaaacgcgatcaaaaaagagtgcgtccaggctaa

SEQ ID NO: 261125 - DNA, 654 bp, Klebsiella pneumoniae
atggatatcatttctgtcgccttaaagcgtcattccactaaggcatttgatgccagcaaaaaactaaccccggaacaggccgagcagatcaaaactctcctgcaatacagcccatccagcaccaactcccagccgtggcattttattgttgccagcacggaagaaggtaaagcgcgtgttgccaaatccgctgccggtaattacgtgttcaacgagcgtaaaatgcttgatgcctcgcacgttgtggtgttctgtgcaaaaaccgcgatggacgatgcctggctgaagctggttgttgaccaggaagatgccgatggccgctttgccacgccggaagcgaaagccgcgaacgataaaggtcgcaggttcttcgccgatatgcaccgtaaagatctgcatgatgatgcagagtggatggcaaaacaggtttatctcaacgtcggcaacttcctgctcggcgtggcggcgctgggtctggacgcggtacccatcgaaggttttgacgccgcaatcctcgatgcagaatttggtctgaaagagaaaggctacaccagtctggtggttgttccggtgggtcatcacagcgttgaagattttaacgctacgctgccgaaatctcgtctgccgcaaaacatcaccttaaccgaagtgtaa

SEQ ID NO: 261126 - DNA, 1248 bp, Klebsiella pneumoniae
atgcaggatttaatatcccaggttgaagatttagcgggtattgagattgatcacaccacctcaatggtgatgattttcggtattatttttctgaccgccgtcgtggtgcatatttttttgcattgggtggtactgcggaccttcgaaaaacgtgccatcgccagttcacggctatggttgcaaatcattacccagaataaactcttccaccgtttagcttttaccctgcaggggattatcgtcaatattcaggcggtattctggctgcaaaaaggcaccgaagcggcagatattctgactacctgcgcgcagttgtggatcatgatgtatgcgctgctttcagtcttctcgttgctggatgttattttgaatctggcgcagaaattcccggcggcatctcagttaccgctgaaagggatatttcaggggattaaactgatcggcgcgattctggtcggcattttgatgatctcgctgctgattggtcagtcgccagcgattctgatcagcggtcttggtgcaatggctgccgtgctgatgttggtatttaaagatccgattcttggtctggtggcaggtattcagctttccgcgaacgatatgctgaaactgggcgactggctggagatgccgaaatacggcgcggatggcgcggtgatcgatattgggttaaccaccgtcaaagtgcgtaactgggacaataccattaccactattcccacctggtctctggtctctgactcctttaaaaactggagcgggatgtcagcatctggcgggcgacgtattaagcgcagtatcagtattgatgtcaccagtattcgttttcttgatgaagacgaaatgcaacgtctgaataaagcgcatttgttaaaaccttatttaaccagccgccacaaggaaattaatgagtggaatcgccagcaaggttctacggagtcggtattaaacctgcgccgaatgaccaatattggaacctttcgtgcctatctgaacgaatatctgcggaatcatccgcggattcgcaaagatatgaccttaatggtgcgccaattagctccgggcgataacggtttaccgcttgagatctacgcgtttactaataccgtggtgtggctggaatatgaaagcattcaggctgatatattcgatcacatatttgcgattgtcgaagagtttggtctgcgacttcatcagtcgccaaccggcaatgatattcgctctctggcgggtgcatttaagcagtaa

SEQ ID NO: 261127 - DNA, 1377 bp, Klebsiella pneumoniae
gtgaaaaacgcgtcaaccgtatcggaagatactgcgtcgaatcaagagccgacgcttcatcgcggattacataaccgtcatattcaactgattgcgctgggtggcgcaattggtactggtctgtttcttggcattggcccggcgattcagatggcgggtccggctgtattgctgggctacggcgtcgccgggatcatcgctttcctgattatgcgccagctcggcgagatggtggtcgaagagccggtatctggttcatttgcccactttgcctataaatactggggaccgtttgcgggcttcctctctggctggaactactgggtgatgttcgtgctggtgggaatggcagagctgaccgctgcgggcatctatatgcagtactggttcccggatgttccaacgtggatttgggctgccgccttctttattatcatcaacgccgttaacctggtaaacgtgcgcttatatggcgaaaccgaattctggtttgcgctgattaaagtgctggcgatcatcggtatgatcggctttggcctgtggctgctgttttctgggcacggcggcgaaaaagccagtatcgacaacctctggcgctacggtggtttcttcgccaccggctggaatgggctgattttgtcgctggcggtaattatgttctccttcggcggtctggagctgattgggattactgcggctgaagcgcgcgatccggaaaaaagcatcccgaaagcagtgaatcaggtggtgtatcgcatcctgctgttttatatcggttcactggtggttttactggcactctatccgtgggtggaagtgaaatccaacagtagcccttttgtgatgattttccataatctcgacagcaacgtggtagcttctgcgctgaacttcgtcattctggtagcatcattatcggtgtataacagcggggtttactctaacagccgcatgctgtttggcctttctgtgcagggtaatgcgccgaagtttttgactcgcgtcagccgtcgcggcgtgccgattaactcgctgatgctttccggagcgatcacttcgctggtggtgttaatcaactatctgctgccgcaaaaagcgtttggtctgctgatggcgctggtggtagcaacgctgctgttgaactggattatgatctgcctggcgcatctgcgttttcgcgcggcgatgcgacgtcagggacgtgaaacacagtttaaggcgctgctttatccgttcggcaactatctctgcattgccttcctcggcatgattttgctgctgatgtgcacgatggatgatatgcgcttgtcagcgattctgctgccagtgtggattgtattcctgtttgtagcgtttaaaacgctgcgtcggaaataa

SEQ ID NO: 261128 - DNA, 1224 bp, Klebsiella pneumoniae
atgaaaaaaatcgcgcttattatcggcagcatgatcgcgggcggtattatttctgcggcaggttttacctggtttgaccgggctgaaccgcccgcagaaaaaacgtcgaccgcagaacgtaaaatcttattctggtacgacccgatgtatcccaatacgcggttcgataaaccaggtaaatcgccgtttatggatatggatctggtgccgaaatatgccgatgaagagagttctgcgtctggtgtgcgcattgacccgactcagacgcagaatctgggggtgaaaacggctaccgtcacgcgcggaccgctgacttttgcccagagtttcccggcgaatgtcagttacaacgagtatcagtatgccattgtgcaggctcgcgctgccgggtttatcgacaaggtgtatccgcttaccgtgggcgataaagtacaaaagggcacaccgcttctcgacctgaccattcccgactgggtggaagcgcagagtgagtatttactgctgcgcgaaaccggcggtacggcgacccagactgaaggcattcttgagcggctgagactggcgggaatgccggaggcggatattcgccgcctgatcgccacgcaaaaaatacagactcgctttacgctcaaagcgcccattgatggcgtgatcaccgcgtttgatctgcgcgcgggaatgaatatcgccaaagataacgtggtcgcgaaaattcagggtatggacccggtgtgggtcactgctgcgatcccggagtccatcgcctggctggtgaaagatgcctcgcagtttacgctcaccgttccggcgcgacctgataaaacactcaccatccgcaaatggacgctactacctggcgtggatgccgcgacccgcacgttgcagctgcgtctggaagtcgacaacgccgacgaggcgctaaaaccgggaatgaacgcctggttgcaactcaacaccgccagcgaaccgatgctgctcattccgtcacaggcgctgattgataccggcaacgaacagcgggtgattaccgttgatgccgacgggcgctttgtaccgaaacgcgttgccgttttccaggcatcgcaaggcgtcaccgcgttacgctctggtctggcggaaggtgaaaaggtggtttccagcggcctgttcctgattgattccgaagccaatatttctggcgcactggagcggatgcgctctgaaagtgctacccatgcacattga

SEQ ID NO: 261129 - DNA, 333 bp, Klebsiella pneumoniae
atgaaaaaagcactgcaagtcgcaatgttcagtctgtttaccgtgattggctttaatgcccaggctaacgaacatcatcatgaaaccatgagcgaggcacaaccacaggtcattagcgccactggggtggtaaaaaccattgatctggaaagcaaaaaaatcaccatccaccacgatccaattaccgcggtgaactggccggagatgaccatgcgctttaccatcactccgcagacgaaaatgagtgaaattaaaactggcgacaaagtggcgtttaattttgtccagcagggcaacctttctttattacaggatattaaagtcagccagtaa

SEQ ID NO: 261130 - DNA, 1383 bp, Klebsiella pneumoniae
atgtctccttgtaaacttctgccattttgtgtggcccttgcgctaaccggttgttcactggcaccggattatcagcgcccggcaatgcccgtgccgcagcagttctcactcaaccagaacggcctggttaacgcagcagataactaccagaacgcgggctggcgcaccttttttgttgataatcaggtgaagacgctgattagcgaggcgctggtgaataaccgggatttgcgcatggcgacgctgaaagtgcaggaagcgcgggcgcaatatcgtctgaccgatgccgaccgctacccacagctcaatggcgagggcagcggcagctggagcggcaatcttaaaggcgattcagccacgacgcgggagttctcgactggccttaacgccagctttgatctcgattttttcggtcgcttaaagaacgtgagcgaagccgagcgacaaaattatttagccactgaggaagcccagcgcgcggtgcatattctgctggtttctaatgtcgcgcaaagctatttcaatcagcagctggcgtatgcgcaattgcaaatagccgaagaaacgctgcgtaattatcagcagtcatatgcgtttgtcgaaaaacaactgttgaccggtagcagcaatgttctggcgctggaacaggctcgcggggtgattgaaagtacccgcagcgacatcgctaaacgtcagggggaactggcgcaggcgaataatgcattgcaactattattgggaagctacggcaagctgccgcaagcgcagacagtaaacagcgacagcctgcaaagcgttaaattaccggcgggcttgtcgtcgcaaatcttattgcagcgcccggatattatggaagctgaacacgcgttaatggcggctaatgccaatattggggccgcacgcgcggcatttttcccatctataagcctgaccagcggaatatcaaccgccagcagcgatctgtcgtcattatttaacgccagcagcgggatgtggaattttattcctaaaattgagatccccatttttaatgccggacgcaaccaggccaatctggatatcgccgaaattcgccagcagcagtcggtagtgaattatgaacagaaaatccagaacgcctttaaagaagtggcagatgcgctggcattacgtcaaagcctgaacgatcaaatcagcgcccagcagcgttatctggcgtcgctgcaaattactttgcaacgggcgcgggcattatatcagcacggcgcagtcagttatctggaagtgctggatgccgagcgttctttatttgcaacccgacaaaccttacttgacctgaattatgcccgtcaggtcaacgaaatttctttatataccgcacttggtggcggttggcagcaataa

SEQ ID NO: 261131 - DNA, 684 bp, Klebsiella pneumoniae
atgaaactgttgattgtcgaagatgaaaagaaaaccggagaatacttgaccaaagggttaaccgaagccggttttgtggtcgatttggccgacaatgggctgaatggctaccatctggcgatgaccggtgattatgacctgataatcctcgatattatgctgccggacgtgaacggctgggatatcgtgcgcatgttgcgctccgccaataaagggatgccgattctgttgcttaccgcgcttggtaccattgaacatcgcgtcaaggggctggagttgggggcggatgactacctggtgaagccgttcgcttttgctgaactgctggcgcgggtgcgcactctactgcggcgcggggcggcggtaattatcgaaagtcagtttcaggttgccgatttgatggtcgatctcgtcagccgcaaagtcacccgtagcggcacgcgcatcacgttgaccagtaaagaatttactttgctggagtttttcctccgccatcaaggcgaagtgctgccccgctcgcttatcgcctcgcaggtgtgggacatgaatttcgacagcgataccaacgccattgatgtggcagtgaagcggctgcgcggcaaaatcgacaacgactttgagccgaagctgattcaaaccgtgcgcggcgtgggttacatgcttgaggtgccggatggtcagtaa

SEQ ID NO: 261132 - DNA, 1449 bp, Klebsiella pneumoniae
atggtcagtaagccatttcagcgcccgttttcgctggcaacccgcctgaccttttttatcagcctggccaccatcgcggcgtttttcgcctttgcctggatcatgattcactcggtaaaagtgcattttgctgagcaggatattaatgatttaaaagagattagcgccacactcaagcgcgttcttaatcatcccgaagagacacaagcccgacgcttaatgacgctggaagatatcgtcagtggttattccaatgtgttgatttccctggcagatagccagggtaaaacggtgtatcactcccccggtgcgccggatatccgcgagtttacgcgtgacgccatacccgataaagacacgcggggcggcgaggtgtatctcctttccggcccgacgattatgatgccgggccacggtcacgggcatatggaacacagcaactggcggatgattaacttgccggttggcccgttggtggacggcaaaccgatttatacgctctacatcgcgctttcgatcgattttcatcttcattacataaatgatttgatgaataaacttattatgaccgcatcgatcatcagcatcctgatcgtctttatcgtgctgttggcggtacataaaggtcacgcaccgatccgcagcgtcagccgtcaaatccagaacattacctcgaaagatctcgacgttcgccttgacccgcagaccgtgccgattgagctggaacagctggtactgtcgttcaaccatatgatcgagcgtattgaggatgtctttactcgccagtccaatttctcagcggatatcgctcacgaaattcgtacaccaattacgaatctcataacgcaaaccgaaatcgccctcagccagtcacgcagccagaaggagctggaagatgtgctctactctaatctcgaagagctgacgcgaatggcgaaaatggtcagcgatatgctgtttctcgcccaggccgataacaaccagctaatccccgaaaagaaaatgctcaacctggcggatgaaatcggcacagtgttcgattttttcgaggcgctagcggaagatcgcggcgtggaactgcggtttgttggtgacgagtgtcaggttgcgggcgatccgctgatgctgcgtcgggcgttaagcaacctgctttcgaacgccctgcgttatacgccgcccggagaggcgattgtagtgcgctgccagacggtcgatcaccaggtgcaagtttccgtcgaaaaccccggtacgcccattgcgcccgagcacttaccgcgattgtttgaccgtttctaccgcgttgacccctcccgccagcgaaaaggcgaaggtagcggtattgggctggcgatagtgaaatcgattgttgtcgcgcataaaggcacggttgcagtaacgtcagatgctcgggggacaaggtttgtgattatgctgccggagagagagtga

SEQ ID NO: 261133 - DNA, 870 bp, Klebsiella pneumoniae
gtggaattttccgtattaagtaacaatctgaaaatgccgatgatgggatttggtgtttttcaggttaccgataaagacgtgtgcaaacagtcagtgttgaatgctatccgcacgggttatcgactcatcgacactgcagcggtatacggtaatgaagatgccgtcggtgaagccgttcgtgaagctatatctgaaggtttatgtacccgagatgagttatttataacgtctaaattgtgggtgcaggatatgttgaatcaggatacggcaaaagcaggtattgaagcatcattaaaaaaatcgggactagaatacttcgacctctatttattgcaccaggctatgcgcgattatttcagtgcgtggcgtgcactcgaagatgcctatgaagagggcaaattaaaagcaattggggtttccaatttctatcctcatgttctggcgaacttttgtgaaacggtaagagttaaaccgatggtcaaccaggtcgagttgcatccctattttgcccaaccagaggcgctggcaaccatgaagtattataacgtgcagcctgaagcatgggctccgttaggtggtggacgacataaaccctttgaaaataatctgcttcagagtattgcagatgcccatcaaaaatcgatttctcaagtcattctgcgttggaatattcaacggggagtggtcgttattccgaaatcgacacatcaacagcgtatcgaagaaaattttgctatctgggatttctcactgacagagaaagaaatggcacaaattagttcgcttgatttgggttatgttggggagtcggtaaaacattttaatcctgaatttgttcgtggttgtcttgctgtaaaaatacatgattga

SEQ ID NO: 261134 - DNA, 594 bp, Klebsiella pneumoniae
atggaaaaatacctgcatctgttaagtcggggagataaaattggcctgacattgattcgtctgagtattgcgattgtttttatgtggattgggttattaaagtttgtcccttacgaggcagacagcattacaccattcgtcgcaaacagtccactaatgtcgttcttttatgaacacccggaagactataaacagtatctgactcacgaaggcgaatacaaaccagaagcaagggcatggcaatcggccaataatacctatggtttttccaacggtcttggcgtcgtggaggtgattattgctctgctggttttggctaatcctgtcaatcgctggttaggtttattgggagggctgatggcatttaccacaccgttggtaacactctcatttttaatcaccaccccggaggcatgggtacccgcattgggtgacgctcatcatggtttcccttatttatccggtgctggtcgcctggtattgaaagatactctgatgctggcaggtgctgtcatgataatggcagattcggcgcgggaaattcttaaacaacgcagtaatgaatccagttcaacgttaaaaactgaatattga

SEQ ID NO: 261135 - DNA, 855 bp, Klebsiella pneumoniae
atggatgctcttagccgtttgttgatgcttaacgctccacaaggaacgatcgataagaattgcgtgttaggaagtgactggcagcttccacatggtgccggggaattgtcggttattcgttggcatgcgttaacgcaaggagcggcgaagctggaaatgccgacgggagagatttttacattacgcccgggaaatgtggtcctgctaccacaaaattcagctcatcgcctgagtcatgtcgataatgaatcgacctgtattgtctgtggcactcttcggctgcaacattcggcgcgttattttttaacgtctttgccggaaacgctgtttgtagcaccagtgaaccatagcgtggaatataactggctgagggaggcgatcccgtttttacaacaggaatccagatcggcaatgccgggagtggatgctctgtgtagccagatctgcgctacattctttaccctcgcggtgcgtgagtggattgcacaggttaatacagagaaaaacattctcagtttgcttctgcatccacgtcttggtgcggtaatacagcaaatgctggaaatgccaggacacgcctggaccgtcgaatcgctggccagcatcgcccacatgtcccgggcaagttttgcccagcttttccgtgatgtttccggaaccacgccgctagctgtattaacaaagttgcgtctacaaatagcggcccagatgttttcccgggaaatgctccctgttgtggtgatcgctgagtcagtaggctatgccagtgaatcatcttttcacaaggcgtttgtccgcgagtttggttgtactccgggagaatatcgggaaagggtcagacagcttgcaccctga

SEQ ID NO: 261136 - DNA, 669 bp, Klebsiella pneumoniae
atgagtgaacaaatcaaacaggatatcgatctgattgagattttattttatctgaagaaaaagatgcgtgttatcctttttattatagctatctgtatggcaatggtgcttttatttctgtatatcaataaagataatataaaagtgagttacagcctaaaaataaaccagacaacaccaggcatacttgttagctgtgatagcaataataactttgcctgtcagaccacaatgactgaagatgttattcagcgaattactacattttttcacaccagcccagatgtcaagaacagagaaataaagctggaatggtcaggagataagagagatttaccaactgctgaagcggaaatatctcgcgtgcaggcgtctattatcaaatggtatgcgtcagaatatcataatggcaggcaagttctcgatgagatacaaacgccttcagcaattaacagtgagctttatacaaaaatgatatacctgaccaggaactggtcattgtatccgaacggtgatggctgtgtaactataagctcaccagaaataaaaaataaataccctgctgccatttgcctggctctgggattttttctaagcattgtaatttctgtaatgttttgccttgtcaaaaaaatggtagatgaataccaacaaaactctgggcagtaa

SEQ ID NO: 261137 - DNA, 1089 bp, Klebsiella pneumoniae
atgaattcatgtgattttcgtgtttttctgcaagagttcggtacaacggttcatttgtcattgcctggtagcgtatccgagaaagaacgactgctactcaagctgctgatgcagggaatgtctgtaacagaaatatcacagtacagaaatcgcagtgcaaagaccatttcacatcaaaagaaacagctctttgagaaactggggattcagagcgatattactttctggcgggatattttctttcagtacaatccggagatcatatccgccacgggtaataatagtcacaaatatattaatgataatcactatcaccatatcgtcacgcctgaagccatcagtctggcgttggaaaaccacgaattcaaaccgtggatccaaccggttttctgcgcgcagactggggtactgacgggctgtgaggtgcttgtccgctgggaacatccacaaacgggaattatcccaccggatcagtttattcctctggcggagtcatctggtcttatcgtcataatgactcgccagttgatgaaacagactgcggatattctgatgccggtaaaacatttgctgccggacaatttccatattggcatcaacgtctcggcgggttgttttttggctgcgggatttgaaaaagaatgcctgaacctggttaagaaattaggtaacgataaaatcaaactggttctcgagctaacggaacgtaaccctattccggtaacgccagaagccagagcgatatttgacagccttcatcagcacaacattacctttgcgctggatgactttggtacgggttatgcgacctatcgttacttgcaggcgttcccggtcgattttattaagatcgataagtcatttgtgcaaatggcgagcgtggacgaaatatccggtcatattgtggacaatattgtcgaactggcgcgtaagcctggtctgagtatcgtggcggaaggggtagaaacccaggagcaggcggatttaatgatcggcaaaggcgttcactttttgcagggctatttgtactctccgccagtaccgggtaataaatttatctctgaatgggtaatgaaagcaggtggttga

SEQ ID NO: 261138 - DNA, 933 bp, Klebsiella pneumoniae
atgaactcaatttttaccgaagagaatctgttggcatttactaccgctgcgcgttttggcagcttcagtaaagccgcagaagagttgggtttaaccacttccgccattagctacaccatcaagcgaatggaaacagggctggatgtggtgctgttcactcgcagtacccgaagcattgagttaacggagtccgggcgttattttttccgcaaagctaccgacctgctgaatgattttcacgccatcaaacgcagcatcgatactatttcgcagggtatagaagcacgggtgcgcatttgtattaaccaactgctttatacgcccaaacacaccgcacgcttattacaggtactgaaaaagcagtttccaacctgccagattaccgtgacgaccgaagtgtataacggcgtctgggatgcgattattaataatcaggcgaatattgctatcggcgcgcccgacacactgctggacggcggcggcattgattacacggagattggcgcaattcgctgggcttttgctatcgccccggatcacccattagcctttgtgccggagccgatcgccgaaagccaactgcgtctctatcctaatatcatggtggaggacaccgcgcatacgattaataaaaaagtgggctggttgctgcatgggcaggagtcgattctggtgccagatttcaacaccaaatgtcagtgccagattttaggtgaagggattggttttttgccggattacatggtccgtgaggcgatggcgcaatccctgctggttacccgacaaatccataatccgcgccaggattcacgcatgttactcgcaactcagcattctgctacgggtcaggtgacgcagtggattaaaaaacaattttcgccaaatggcatattaacggggatctatcaggatttactgcatcgggagaattaa

SEQ ID NO: 261139 - DNA, 498 bp, Klebsiella pneumoniae
atgaacggactcacggcaacgggtgtcaccgtcggtatttgtgcagggctttggcagttagtgtcttcacatgtagggctctctcagggatgggaattattaggaaccattggcttcgtcgccttttgcagtttttatgccgcaggcggcggtaaatcggggtttatcagaagtctggcggttaattattccgggatggtgtgggcgtttttcgccgcgctggctgccggctggctggcctcggtgagtggattgtccacgttctgggcgagcgtgattatgactgtacccttctcggcggtagtggtctggcaaggacgtttcggtttattgtcttttattcccggaggctttctcggcatgacgctattttttgccagcgggatgaactggacggtgacattactgggttttctggcgggtaactgcgtggggataatttcagaatatggcggacaaaaattaagcgaagcgacgactaaacgcgacgggtattaa

SEQ ID NO: 261140 - DNA, 606 bp, Klebsiella pneumoniae
atgactataaaaaatctacctgccgactatttattggctgcgcaacagggtgatatcgataaagtaaaaacctgccttgcgctgggtgtcgatattaatacctgcgatcgtcaggggaaaacggcaattacgctggcaagtttatatcagcaatatgcttgcgttcaggcattaattgatgccggagcggatattaataagcaagatcaaatatgttcaaatccttttttaattagctgcctgaccggcgatttaaccctgttacggattattttaccggctaaacctgatcttaattgcgtcacccgttttggcggtgtcggcctgacgcctgcctgtgaaaaaggccatttaagtattgtaaaagagcttttggcgcatacggagattaacgttaaccagaccaaccatgttggctggacgccgctactggaagcaattgtgcttaatgatggcgggattaaacagcaggcgattgtccagttattgctggaacacggtgccagcccgcacatgacggataaatatggcaaaacgccgctggaactggcgcgggaacgaggctttgaagagattgcgcagttactgattgccgcaggtgcataa

SEQ ID NO: 261141 - DNA, 864 bp, Klebsiella pneumoniae
gtgtgggcgctaactgcggatgctgattttctggcgcagcgggggcaaggtcaggttgaacaggtctttgccagagcggtaaatatcgcacttccggcccgccagcagttgctgacgctgctttgtgaagagtacgacaatgcgccaaacagttgtcggttggcactcactcactttgatggtctgttccggcatggtgataaggttcagtttgacgatcaaggcattacggttggtcaacatcttcatatagagatgagtcattgcctgcgttggctgtccccaaccttgcaaatggccgctgtgaattttcaccttatcgcctggcaacagtggcatgacattattcatcagcacctgggggaaaatgaaaccctgtttaattattgcggcgataatccgttttatcaggcgttaaataaagaattacatattaaacgacgggcagttattcaggccgtaaacgataaacaaaataccgcctcagcagtcgccagtatgatgggcttagggattggccttacgccatcagccgacgattatttaacaggtctggcgcttattttatttatttccggacatccggcggaaaaatacaaagaggaattttatctcggtctgcaacgcggcagaaataataccacgttattaagtgccataacgctggaagccgcattacaacaacgctgccgggaaaatattcatcgttttattcataacattatttatgacatccctgggaacgcaactcaggcaatagaaaaaattaaacatattggctccagttccggctgcgacatgctgtatggcatggccgatggttgtgcgctgagccaaacctacggagggaattatgtcagttaa

SEQ ID NO: 261142 - DNA, 1548 bp, Klebsiella pneumoniae
atgtcagttaaaatagtcattaaaccgaatacctattttgattctgtctcgctgatgtctatctccacgcgtgcaaataaactcgacggcgtcgagcaggcatttgtggcgatggcgaccgaaatgaacaaaggcgtgctgaagaatttagggctgctgacgccggaactggagcaggcgaaaaacggcgacctgatgattgtcatcaacggcaaagcgggcgcagacaacgagcagttgctggtggagattgaagaactgttcaacaccaaagctcaaactggttcacatgaagcacgctatgccactattgccagcgccaaaaagcatatcccggaaagtaacctggcggtgatttcggtcaacggtctgtttgccgctcgcgaagcgcgtcaggcgctgcaaaacgatcttaacgtgatgctgttttccgataacgtctcagttgaagatgaactggcgctcaaacagttggcccacgaaaaagggctgctgatgatggggccagactgcggtacggcgattatcaacgccgcggcgctctgctttggtaacgccgtgcgtcgcggcaacatcggcattgttggcgcatctggcaccggcagccaggaactgagcgtccgtatccatgaattttgcggcggcgtttcgcaactgattggcaccggcgggcgcgacctgagcgagaaaatcggcggtctgatgatgctcgatgccatcgggatgctggaaaacgatccgcaaacagaaattattgtgcttatctccaaaccgcctgcgcctgcggtggcccgcaaagtgctggaacgcgcacgtgcctgccgcaagccggtggtggtctgcttcctcggtcgcgttgaaacgccggtggatgagcaggggctacagtttgctcgcggcagcaaagaagcggcgctgaaagcggtaatgctctccggcgtgaaacaggaacatctcgagctgcatacgctgaaccagccgttgattgctgacgtgcgcgctcgcctgcaaccgcaacagaaatacattcgtggcctgttctgcggcggcacgctgtgcgacgaaacgatgttcgcggtgatggaaaaacacggcgatgtctacagcaacatccagcccgatcctgaattccgcctgcaagatattaaccgcagcatcaaacacaccttcctcgactttggcgatgacgacttcaccaacggcaagccgcatccaatgattgaccccaccaaccgcatcagccggttgatcgaagaagcgcgcgatccagaagtggcggtgatcgtgatggattttgtgctcggatttggatcgcatgaagatccggtcggttccaccattgaggcgatcaaagaggcgaaagcgatcgccgctgccgaaggacgtgagttgatcattctcgcctatgtgctgggtaccgatcttgatacgccatcattagaacaacaaagccagatgctgcttgatgctggggtaattctggccagcagtagcaccaataccggattgctggcgcgtgaatttatctgcaaaggggaggaagcctga

SEQ ID NO: 261143 - DNA, 1419 bp, Klebsiella pneumoniae
atgagccagtcactgtttagccaaccattgaacgttattaacgtcggcatcgccatgtttagcgatgatctgaaaaagcagcatgtagaagtgacccaactcgactggacgccgccggggcagggcaatatgcaggtggtgcaggcgctggacaacattgccgattccccgctggcagacaaaatcgccgccgctaaccagcaggctttggagcgcattatccagtcgcatccggtgctgattggttttgatcaggcgattaacgtggtgccgggtatgacgccgaaaaccattcttcacgccggaccgccgatcacctgggaaaaaatgtgtggcgcgatgaaaggcgcggtcaccggagcgctggtgttcgaagggctggcgaaagatctcgatgaggcggctgaactggcggcctccggggagatcaccttctcgccgtgccacgaacatgactgcgtgggatcgatggcgggtgttacctcggcctcgatgtttatgcacatcgtgaaaaacaaaacctacggcaacatcgcttacaccaatatgagcgagcagatggcaaagattttgcgtatgggcgctaacgaccagagcgtgatcgaccgactcaactggatgcgcgatgtgcagggacccatgctgcgcgacgcgatgaaaattatcggcgaaatcgatctgcgcttaatgctggcgcaggcgctgcatatgggcgatgagtgccataaccgcaataacgccgggacgacgctgctgattcaggcgctgacgccggggattattcaggcgggctactccgtcgagcaacagcgcgaagtgtttgagtttgtcgccagcagcgactacttctccggcccgacgtggatggcgatgtgtaaagcggcgatggatgcggcgcacggcatcgaatacagcaccgtggtgaccacgatggcgcgtaacggcgtcgagttcggcctgcgggtcagcggattaccggggcagtggtttaccggtccggcgcagcaggtgatcggcccgatgtttgccggttataagccggaagattctggattggatattggcgacagcgccatcactgaaacctacggcattggcggatttgccatggcgaccgcgcctgctatcgtcgcgctggtgggcggtacggtggaagaggctatcgatttctcccgccagatgcgtgaaatcactctcggtgaaaaccccaacgtcaccattccgctgctcggttttatgggcgtgccgtcggcaatcgacatcacccgcgtgggcagcagcggcattttgccggtgatcaataccgccattgcccataaagatgcgggcgttggcatgattggcgcgggcattgtgcatccaccattcgcctgcttcgagaaagccattcttggctggtgcgaacgttacggcgtctga

SEQ ID NO: 261144 - DNA, 744 bp, Klebsiella pneumoniae
atgaaagaacttgtggtcgttgccattggtggcaacagcattatcaaagataacgccagccagtcgattgagcatcaggcggaggcggtgaaagccgtcgccgatacggtgctggaaatgctggcttccgattacgacattgtgctgacccacggcaacgggccgcaggtcgggctggatttacgccgtgcggagattgcccacgagcgcgaagggctgcccttaacgccgctggcaaactgtgtggcggatacgcagggcggcattggctatctgatccagcaggcgctgaacaaccggctggcccgccacggcgagaaaaaagccgtcaccgtggtgactcaggtggaagtggataaaaacgatccgggatttgcccatcccaccaagcccatcggcgcattctttagtgacagccagcgtgacgaattacaaaaggcaaaccctgactggcgttttgttgaagatggcggacggggctatcgccgcgtagtcgcctcgccggaaccgaaacgtattgtcgaagcaccggccattaaggcgctgatccaacaaggctttgtggtgattggcgcgggcggcggcggaattcctgtggtgcgcaccgaagcgggagattaccaaagcgtggacgcggttatcgacaaagatctctctaccgcgctactggctcccgaaattcacgccgacattctggtgaaccgcagcagcaggcgctcgatcgggtggatattgccaccatga

SEQ ID NO: 261145 - DNA, 171 bp, Klebsiella pneumoniae
atgacccgctatatgcaggaagggcattttccgcctggcagcatgttgccaaaaatcatcgccagcctgacgttcctggaacagggcggcaaagaagtgattatcaccacgccggaatgcctgcctgcggcgctgcgcggtgaaacgggcacccatattattaaaacgtaa

SEQ ID NO: 261146 - DNA, 1383 bp, Klebsiella pneumoniae
atgaaagaaagcaatagccgccgtgagtttctgagccagagcggtaagatggtcaccgccgccgcgctgtttggtacctctgtgccgctcgcccatgcggcagtctctggcacaacccactgcgacgcgaataacaccatgaaaatcactgacccgcactactatctcgacaacgtgttgctggaaaccggttttgactacgaaaatggcgtggcggtgcagacccgcacggcgcgccagactgtggaaattcagaacggcaaaattgttgcactgcgcgagaacaatcagcatccggacgccacgctgccgcactatgacgctggcggtaagctgatgctgcccaccacccgcgacatgcatattcatctcgacaaaaccttctacggcgggccgtggcgctcgctcaatcgtccggcaggcaccaccatccaggacatgatcaaactcgagcagaaaatgctgccggagttgcaatcgtacactcaggaaagggcggaaaaactgattgatttattgcagtcgaaaggcactaccattgcccgcagccactgcaatatcgaaccggtttccggcctgaaaaatctgcaaaatttgcaggcggttctggcgcgacgtcaggcgggcttcgagtgtgaaattgtcgccttcccgcagcacggtttgctgctgtcgaaatcagaacccttaatgcgcgaagcgatgcaggcgggggcgcattacgtcggcgggctggacccgaccagtgttgatggcgcgatggaaaaatccctcgacaccatgttccagattgcgctggactacgacaaaggcgttgatattcacctgcacgaaaccactccggcaggcgtggcagccatcaattatatggttgaaacggtggagaaaacgccgcaactgaagggcaagctgaccatcagccacgcctttgcgctggcaacgctcaatgagcaacaggtagatgaactggcgcaccggatggcggcgcagcaaatttctatcgcctcgacggtgccgattggcacgctgcatatgccgctcaaacagttgcacgacaaaggcgtaaaagtgatgaccggcaccgacagcgttatcgaccactggtcgccttacggcctgggcgacatgctggaaaaagccaatctgtacgcgcagctctatattcgtcctaacgaacagaacctctcccgctcgctgtttttagccactggcgatgtattgccgctcaacgaaaaaggcgagcgcgtgtggcccaaagcgcaggatgatgccagctttgtgctggtggacgcctcctgttccgccgaggcggtggcgcgtatctcgccgagaaccgcaacgttccataaagggcaactggtgtgggggagtgtggcaggttga

SEQ ID NO: 261147 - DNA, 411 bp, Klebsiella pneumoniae
atgaccataaaagaaaaattctcacaaaaatatccccatgcttccttttgtacttttggcgattcagcagcgttggccgatcacctcgcaacgttgattgcgactggtgttaaaacagcttcctgtggttcgctggcgggatgtattgaagacaacgtatttccgatgattggtgagtataagattgtagaaaatagccgtggtgaacctgtatgtgttatcagagtgattggcctgcatttactgcgcttttctgatgtcaccgcagagcttgcccgtaaggaaggtgaaggtgacctcagtcttgaatattggcgtaatgaacaccgtcgttttttccaggtagaaggaagctattcaccagaaatggacgttatctttgaagaagatacccttattgacattgtgtag

SEQ ID NO: 261148 - DNA, 987 bp, Klebsiella pneumoniae
atgatgaataaacgttttgttatcaatatggtgtcttcgctgttattaggcgctgcgctaatttctgcgccgctccaggcagcggaaaaagtcgtggtgaatatctctaaagtcgatggtatgccgtggtttaatcgcatgggcgaaggtgtggttgaggcgggtaaagcctttggtgttaatgcgtcacaggtggggccttcaagtactgatgctccgcaacaagttaaaattattgaggatttaatcgcccgtaaggttaatgcaattacaattgtgccaaacgatgccaacgtgctggaaccggtattcaaaaaagcgcgagatgccggaattgtggttctgaccaacgaatcccccggtcagccaagtgctaactgggatatcgaaatcattgataacgaaaaatttgccgctgaatatgttgagcatatggcgaaacgcatgggtggcaagggcggctatgtgatttacgtgggtagtttgaccgtgccgcagcataacttatgggctgacttgctggtgaaataccagaaagagcattacccggatatgcatgaagttacccgccgcatgccggttgccgagagtgtggatgactcacgtcgtaccacactggacctcatgaaaacctatcctgacttgaaagcggttgtctcctttggttcaaacggtccgattggcgcgggacgtgcagtgaaagagaaacgggcgaaaaataaagtcgcagtctatggcatgatgattccttcacaggcggcatcactgattaaaagtggtgatatcaccgaagggattacttacgatccggcctctgcaggttacgcactcgcggccgtcgccagcacgttgctgaagggtgaagagatcaaacctggattagaaatggagaatctcggtaaggccgacgtagatatggataagcgaattatccgtttccataaggtattactggtcaacaaagacaatatcgactcactttattaa

SEQ ID NO: 261149 - DNA, 1485 bp, Klebsiella pneumoniae
atggaaaccttcctttcccttcgtcatatcaacaaaacgtttcatgccacgcgagcgctgcgcgatgtttctctcgactttatgtcgggtgaagtgcactgccttgccgggcaaaacggctgtggtaaatcgacgttgattaaaattatgtccggtgtttatcgcccggatgagggagcggaaattacgcttggtgggaaaaactggtcaaagctgacacccgccgcttcggtggcgcaggggattcaggtgatttatcaggacctctctttatttcctaacctgagtgtctgggagaatatcgccgtgaatcactatcaccacggtctgtttgttaaccgacgtcgtctgcgtgaggtggcgcaggcggcaatgaccagtattaacgtcacattgcctctggatacgctcgtttctgagctttcaattgcccgctgtcagctggtggcaatttgccgtgcactggcgcaggacgcacggttgatcgtgatggatgaaccaaccgcttcgctgacccatcaggaagtgcaagggttattacaggtggtgcatcaattgcgggaacgcgggatctgcgtggtcttcgtcagtcatcgtctggaagaggtgatggaagtttccgaccgtatttcagtgttgaaagatggtgagctggtcgggacctttccggccgcagagatgaccacaaaacaactcagttttctgatgaccggccaggagttcgaatatcaggtgcgagagttgtggcagggaaaatccagcactccggtgctggaggtgcgtcatttaagtcgtcatggggaatatcaaaatattaacttgcgggtggaagcgggcgaagtggtgtcgattgttggcctgcttggtgcggggcgcacggaattatgtctgagtctgtttggtatgacccgaccggatgctggcgagatcctcatcaacggtcagccggttacactgcatagtaaccaggacgccatccgccacggtattggttatgtttcggaagatcgcatgtcgcgcggtttggtgatggcgcaatctattgaagacaacatcattagcactgtttttcacaaggtaaaagatcgcttcggctttctgagtgaagctaaagtgcgtgacctggtggacaggctaatcaaggcattgaccatcaaagtttctgatcctcatctcccggtgaatacgctttctgggggtaacgcgcagcgagtatcgatcgccaaatggctggcgattgggccacgactgttgattctcgatagcccgacagtcggtgttgatatcgccaacaaagcaggaatatacggcattatcagcgatctggcggctcatggcattgcggtattgatgatctgcgatgaaattgaagaagcgtggtatcaaagccaccggattttggtaatgcaaaaaggtcagatcacccatagcttcctgcctgacagcagttctcaggccaggattgcggaggtggtaaatggctga

SEQ ID NO: 261150 - DNA, 972 bp, Klebsiella pneumoniae
atggctgaactgaaaaaacgtcatgaattctggctggcattactgattgtggggctgtttgtcggccttgcctggcgcagcgacgagtttctgacattcggtaatttgtacgatctcgccaataactatgccatgttgactattctcgcctgtggtttgtttgtggtgttaatttccggtgggattgatatttcgtttccggcaatgaccatcattgcgcaatacggcatggtgctgctgctgcaaaaaattggtggcaactttgctgtcgcgtttgccctggcgggcggcatcggcattttacttggcttaattaacgccttactggttaatcgcctacgggtgccttctatcatcatcactatctcgacgctgaatattttttatggcctgctgttatggttgagtaaaggtgtgtggctgtacgactttccgccgtggtttgagcagggggtaatgttgttcaagtacaccgatgctgatggctatgactatggccttggtctgccgctgatcgccatgattacggtggtgctgctgacagcgtttatcatgaatttcaccagtgtagggcgcaaaatttatgcccttggcgggaaccgtgaatccgccagtcgcatcggctttagcgtgctgaaactgcaacttttcgtctacggctatatgggattgatgtctggtgctgcgggtgtagtgcagtcgtggacggtgatgactgtcgcccccgattctcttctgggttatgagctgacagtactggctgcggtggtgcttggcggcactagtttgctcggcgggcgcggcacgttaaccggtactttgctcggcgtggtgttgttggcagtgatgcaaaacgggctaaatttattgggagtctcgtcttactggcaaacattgatcaccggcatcatcatcgttgccagcattagtgccacggcgtggagtcagcatcagaaccggagtctgctatga

SEQ ID NO: 261151 - DNA, 957 bp, Klebsiella pneumoniae
atgaaaaaatcgtggcgtaacaacgttgagttttacttgatcggcctgctggtgctaactgttgcagccttcagcattactatgccggagattttctggtcgataagtaatttccagtccgtcgcttcgcaaatgcccgtgctgggcattctggcgttggctatggcggtgaccatgctttgcggtggcattaacttgtcaattatagccactgctaacgcctgttcactggtgatggcgtgggtggcgactcagtatccaccgggtattgctacggttgtcgctacgctgctggcgggcgctggcgcggcggtgataatcggtttatgtaacggcgtattgattgctggtattcgagtgtcgccaattcttgcaacgcttgggatgatgacgttgctcaaaggggtaaatattctggtgacaggcggtagcgccattgccaattatccctcatgggtgctgtggttgaatcatgcacagtggttcggtattccgctaccgatgtggttgtttaccgcagtgtcgctagggctgtggatattgctggagaaaacgccgctcggtaaatccatttatctgattggttctaacgaacgagcaacactttactccggcattaacactcgtcgggtgctgatttgggtgtatgtcatttccgccttgctttgtgcggtagcggcatttttgatgatgtcgaaactcaactcggctaaggcctcttatggcgaatcgtacttgctggtgtcaatcctcgcggcagtactcggcggggttaatccggacggcggcagcgggcggataattggtatggtgctggcgctgtttcttctgcaaattattgaaagcggcttcaatattctcggtataagcccctacctgacgatggccttatggggaacgttgctgctctgtttcattcaggctcgcggcatgttggggctggatcgggtggtttaa

SEQ ID NO: 261152 - DNA, 1050 bp, Klebsiella pneumoniae
atgaagatcaaagctgttggtgcatattccgctaaacaaccacttgaaccgatggatatcacccggcgtgaaccgggaccgcatgatgtcaaaattgaaatcgcttactgtggcgtctgccattccgatatccaccaggtccgttccgagtgggcggggacggtttatccctgcgtgccgggccatgaaattgtagggcgcgtggtagctgttggtgatcaggtagaaaaatatgcgccgggcgatctggtcggtgtcggctgtattgtcgacagttgtaaacattgcgaagagtgtgaagacgggctggaaaactactgtgatcacatgaccggcacctataactcgccgacgccggacgaaccgggccatactctgggcggctactcacaacagatcgtcgttcatgagcgatatgttctgcgtattcgtcacccgcaagagcagctggcggcggtggcacctttgttgtgtgcagggatcaccacgtattcgccgctacgtcactggcaggtcggtccgggtaaaaaagtgggcgtggtcggcatcggcggtctgggacatatggggattaagctggcccacgcgatgggggcgcatgtggtggcatttaccacttctgagtcaaaacgcgaagcggcaaaagccctgggggccgatgaagttgttaactcacgcaatgccgatgagatggcggctcatgtgaagagtttcgatttcattttgaatacagtagctgcgccacataatctcgacgattttaccaccttgctgaagcgtgatggcaccatgacgctggttggtgcgcctgcgacaccgcataaatcgccggaagttttcaacctgatcatgaaacgccgtgcgatagccggttctatgattggcggcattccagaaactcaggagatgctcgatttttgcgccgaacatggcatcgtggctgatatagagatgattcgggccgatcaaattaatgaagcctatgagcgaatgctgcgaggagatgtgaaatatcgttttgttatcgataatcgcacactaacagactga

SEQ ID NO: 261153 - DNA, 816 bp, Klebsiella pneumoniae
atgatatcattaaaagctccgcacaataatttgatgccatatacgcaacaaagcatacttaatacggttaaaaacaatcagttaccagaggatatcaaaagctccctggtttcctgtgtcgatatattcaaggttttgattaaacaatattatgattatccttatgattgtcgtgatgatttagtcgatgacgacaaactcattcatctcatggctgccgtacgagactgtgagtggtcagacgataacgcactcaccataaatgtgcagtttaatgatttccctgggttttatgactggatggattaccctgatcacccggttaagtttgtttttcgcatacttgaaaatcaaaaagggacagtttgggtatatgaccaggacgatgcgtttcttgatattaaagcaaatgtgcaggctggacgctttaccgggcttaagaaattagtgcagtttatcgattcagtgcgaacagattgcaaatgtattcttcttgaacaccatatgcctttgctgagacttttccctaaagggaaagagtgtatgcatgtggaaaaatggcttcgcgaaatgtcgtctatcccggagaccgacgcgcccattaagcaggcgcttgcgcatggattattattacacttaaaaaatatctaccctgtttttcctgaatcactggtgatgttattgctctctgttctggacgtaaaaacatacagagatgatgcgcgattaaatcaatggatatctaatagagtccaggaattaggtgacagatattatcctgtaaataagcacgttaaaatccgctacactctttag

SEQ ID NO: 261154 - DNA, 633 bp, Klebsiella pneumoniae
atggatcctttgcacgccgtttacctgaccgtaggactgttcgtgattactttttttaatccgggagccaatctctttgtggtagtacaaaccagcctggcttccggtcgacgcgcaggggtgctgaccgggctgggcgtggcgctgggcgatgcattttattccgggttgggtttgtttggtcttgcaacgctaattacgcagtgtgaggagattttttcgcttatcagaatcgtcggcggcgcttatctcttatggtttgcgtggtgcagcatgcgccgccagtcaacaccgcaaatgagcacactacaacaaccgattaacgccccctggtatgtcttttttcgccgcggattaattaccgatctctctaacccgcaaaccgttttattttttatcagtattttctcagtaacattaaatgccgaaacaccaacatgggcacgtttaatggcctgggcggggattgtgctcgcatcaattatctggcgcgtttttcttagtcaggcgttttctttgcccgcagtgcgtcgtgcttatgggcgtatgcaacgcgttgccagtcgggttattggtgcaattattggtgtattcgcgctacgcctgatttacgaaggggtgacgcagcggtga

SEQ ID NO: 261155 - DNA, 276 bp, Klebsiella pneumoniae
atgaaaataatctctaaaatgttagtcggtgcgttagcgtttgccgttaccaatgtctatgccgcagaattaatgaccaaagcggaatttgaaaaggttgaatcgcaatatgaaaaaataggtgatatttcaaccagtaatgaaatgtcgaccgcagatgcgaaagaagatttgatcaaaaaagccgatgaaaaaggggctgatgtgttggtgctgacctctggtcaaactgacaataagattcacggcacggcaaatatttataagaagaagtaa

SEQ ID NO: 261156 - DNA, 1587 bp, Klebsiella pneumoniae
atggcacatccaccacggctgaatgacgacaaaccggttatctggacggtatctgtaacgcgcctgttcgagctgtttcgcgatatcagcctcgagtttgatcatctggcgaacattacccctatccagcttggctttgaaaaagcggtgacctacatccgcaagaaactggctagcgaacgctgcgacgccatcatcgctgctggctctaacggcgcgtacctgaaaagccgcctgtcagtgccagttattttgattaaaccgagcggctacgatgtgttacaggcactggcaaaagccggaaaactcacctcttctatcggcgttgtgacttatcaggaaactattccggcgctggtggcgtttcaaaaaacctttaatttgcgcctcgaccaacgtagctacattaccgaagaagacgcgcgcgggcagattaacgagctgaaagctaacggcaccgaagcggtggtcggcgcggggctgattaccgatttggcagaagaagccggaatgaccggaatttttatctattccgccgccaccgtgcgccaggcattcagcgatgcgctggatatgacgcgcatgtcgttacgccataacactcacgatgccacccgcaacgccctgcgtactcgttacgtgctgggcgatatgctcggtcaatcaccacagatggaacaggtacggcagactattttgctgtatgcccgctccagtgcggcggtgttgattgagggggaaacggggacgggcaaagagctggcggcccaggcgattcatcgggaatattttgcccgccacgatgcgcgacagggcaaaaagtcgcatccgtttgttgccgtcaactgcggggcgattgccgaatcgctgctggaagcagagctgtttggctatgaggaaggggcgttcaccggctcgcgacgtggaggtcgcgccgggctgttcgaaattgcccacggcggtacgctgtttctggatgagattggcgaaatgccgctacctttgcagactcgcctgttacgggtgctggaagaaaaagaggtcacccgcgtcggcgggcatcagcctgttccggtagatgtgcgggtcattagcgccactcactgcaatctggaagaagatatgcggcaagggcagtttcgccgtgatctgttttatcggctgagtattttgcgtctgcaattgccaccactgcgcgagcgggtgacggatattctgccgctggcggaaagctttttgaaagtgtctctggcggcgctctccgccccgttttctgccgcattacgccagggattacaggcaagcgaaaccgtgctggtgcactacgactggccgggcaatattcgtgaactgcgcaatatgatggagcgactggcgctgtttttaagtgtggaaccgacgccggatttaacgccgcagtttttgcagctgctactgccggagctggcgcgcgagtcagcgaaaattccctccccatccttgctgacaccacaacaggcactggagaaatttaatggcgataaaacagcagcggcgaattatttaggtatcagccggacgacgttctggcggcggctgaaaagctga

SEQ ID NO: 261157 - DNA, 891 bp, Klebsiella pneumoniae
atgtctctacactctccaggtaaagcgtttcgcgctgcactgactaaagaaaatccattgcagattgttggcaccattaacgccaaccatgcgctgctggcgcagcgtgccggatatcaggcgatttatctttccggcggtggcgtggcggcaggttcgctggggctgccggatctcggtatttctacccttgatgacgtgctgacagatattcgccgtatcaccgacgtttgttcgctgccgctgctggtggatgcggatatcggttttggttcttctgcttttaacgtggcgcgcaccgtgaaatcgatgattaaagccggtgcggcaggactgcatattgaagatcaggttggtgcgaaacgctgcggtcatcgtccgaacaaagcgatcgtctcgaaagaggagatggtggatcggatccgcgcggcggtggatgcgaaaaccgatcctgattttgtgatcatggcgcgcaccgatgcgctggcggtagaggggctggatgcggcgatcgagcgtgcgcaggcctatgttgaagcgggtgccgagatgttgttcccggaggcgattaccgaactcgccatgtaccgccagtttgccgatgcggtgcaggtgccgatcctcgccaacatcaccgaatttggcgcaacaccgctgtttaccaccgacgaattacgcagcgcccatgttgcaatggcgctgtacccgctttcagcgtttcgcgccatgaaccgcgccgccgaacatgtctacaacgtcctgcgtcaggaaggcacgcagaaaagtgtcatcgacaccatgcaaacccgcaacgagctgtacgaaagcatcaactactaccagtacgaagagaagctcgacgacctgtttgcccgtagccaggcgaaataa

SEQ ID NO: 261158 - DNA, 1170 bp, Klebsiella pneumoniae
atgagcgacacaacgatcctgcaaaacagtacccatgtcattaaaccgaaaaaatctgtggcactatccggcgttccggcgggcaatacggcgctctgcaccgtgggtaaaagcggcaacgacctgcattaccgcggctacgatattcttgatctggcggaacattgcgaatttgaagaagtggcgcacctgctgatccacggcaaactgccgacccgtgacgaactcgccgcctacaaaacgaaactgaaagccctgcgcggtttaccagctaacgtgcgtaccgtgctggaagccttacccgcggcgtcgcacccgatggatgttatgcgcaccggcgtctccgcgctcggttgcacgctgccagaaaaagagggtcataccgtctctggtgcgcgggatattgccgacaaactgttggcgtcgcttagctcgattcttctctactggtatcactacagccacaacggcgaacgcatccagccagaaaccgatgacgattccatcggcggtcacttcctgcatctgctgcatggcgaaaagccgtcgcaaagctgggaaaaggcgatgcatatttcgctggtgctgtacgccgagcacgagtttaacgcctccacttttaccagccgggtgattgcgggcactggctctgatatgtattccgcgattattggcgcgattggcgcactgcgcgggccaaaacacggcggggcgaatgaagtgtcgctggagatccagcaacgctacgaaacaccggacgaagccgaagccgatatccgcaagcgcgtggaaaacaaagaagtggtcattggttttggtcatccggtttacaccatcgccgacccgcgtcatcaggtgatcaaacgcgtggcgaagcagctctcgcaggaaggcggttcgctgaagatgtacaacatcgccgatcgcctggaaacggtgatgtgggagagcaaaaagatgttccccaatctcgactggttctccgctgtttcctacaacatgatgggcgttcccaccgagatgttcacaccactgtttgttatcgcccgcgtcaccggctgggcggcgcacattatcgaacaacgtcaggacaacaaaattatccgtccttccgccaattatgttggaccggaagaccgccagtttgtcgcgctggataagcgccagtaa

SEQ ID NO: 261159 - DNA, 1452 bp, Klebsiella pneumoniae
atgtcagctcaaatcaacaacatccgcccggaatttgatcgtgaaatcgttgatatcgtcgattacgtgatgaactacgaaattagctctaaagtggcctacgacaccgcacattactgcctgctcgacactctcggctgcggtctggaagctctcgaatacccggcctgtaaaaaactgctggggccaattgttcctggcactgtcgtccctaacggcgtgcgcgtccccggaactcagttccagctcgaccccgtccaggcggcatttaacatcggcgtgatgatccgttggctcgatttcaacgatacctggctggcggcggagtggggccatccttccgacaacctcggcggcattctggcaacggcggactggctttcgcgtaacgcggtcgctagcggcaaagcgccgttgaccatgaagcaggtgctgaccgcaatgatcaaagcccatgaaattcagggctgcatcgcgctggaaaactcctttaaccgcgtcggcctcgaccacgttctgttagtgaaagtggcttccaccgccgtggtcgccgaaatgctcggcctgacccgcgaggaaattctcaacgccgtttcgctggcgtgggtggacggtcagtcgctgcgcacctatcgccatgcgccgaacaccggcacgcgtaaatcctgggcggcgggcgatgccacttcccgcgcggtacgtctggcactgatggcgaaaacgggcgaaatgggttacccgtcagccctgactgcgcctgtgtggggcttctacgacgtctccttcaaaggtgaatcgttccgcttccagcgcccgtacggttcttacgtcatggaaaatgtgctgttcaaaatctccttcccggcggagttccactcccagacggcagttgaagcggcgatgacgctctatgaacagatgcaggtagcaggcaaaacggcggcggatatcgaaaaagtgaccattcgcacccacgaagcctgtattcgcatcatcgacaaaaaagggccgctcaataacccggctgaccgcgaccactgcattcagtacatggtggcgatcccgctgctgttcgggcgcttaacggcggcagattacgaggacaacgtggcgcaagataaacgcatcgacgccctgcgcgagaagatcaattgctttgaagatccggcatttaccgctgactaccacgacccggaaaaacgtgccatcgccaatgccataacccttgagttcaccgacggcacgcgatttgaagaagtggtggtggagtacccaattggtcatgctcgccgccgtcaggatggcattccgaagctggtcgataaattcaaaatcaatctcgcgcgccagttcccgactcgccaacagcagcgcattctggacgtttctctcgacagagctcgcctggaacagatgccggtcaatgagtatctcgacctgtacgtcatttaa

SEQ ID NO: 261160 - DNA, 1533 bp, Klebsiella pneumoniae
atggcgacgatcgattctatgaataaggacaccacacgtttgagcgatggacccgactggacgttcgacctgctggatgtttatctggcagagatagaccgggtggcgaaactctaccggctggatacctacccgcaccagattgaagtgataacctcagaacagatgatggatgcctactccagcgtcggcatgccaattaactatccgcactggtcattcggtaaaaagtttatcgagactgaacggctgtataagcacggtcagcaaggactggcctatgaaatcgtcattaactctaacccgtgtatcgcttacctgatggaagaaaacaccattaccatgcaagcgctggtgatggcacacgcctgctatgggcataactctttcttcaaaaacaattacttattccgtagctggaccgacgccagttcgattgtcgattatctgatttttgcccgtaaatatattaccgagtgcgaagaacgttatggcgttgatgaagtagaacggcttctggactcgtgccacgcgctgatgaactacggcgtggaccggtacaaacgcccgcaaaaaatctcgctgcaagaagagaaagcccggcagaaaagtcgcgaagagtatctgcaaagtcaggtcaatatgctctggcgtaccctgccgaagcgcgaggaagagaaaacggttgctgaagcgcgccgctatccgtccgagccacaagaaaacctgctctattttatggagaaaaatgcgccactgctggaatcatggcagcgtgaaattctgcgtattgtgcgtaaggtgagccagtatttttatccgcaaaaacagactcaggtgatgaacgaaggctgggcgaccttctggcactacaccatccttaaccatctgtatgatgaagggaaagtaacggaacgttttatgctggagtttttgcacagccacaccaatgtggtcttccagccaccctataacagcccgtggtacagcggcatcaacccgtatgccctcgggttcgccatgttccaggatattaaacggatttgtcagtcgccaacggaagaagacaaatactggttcccggatatcgccggttccgactggctggaaacgctgcatttcgcgatgcgtgatttcaaagatgagagttttatcagccagttcctgtcaccgaaagtgatgcgtgatttccgcttcttcaccgtgctggatgacgatcggcataattatctggagatttccgctattcataatgaagaaggttatcgggagatccgtaaccggttatcgtctcaatataatttaagtaatctggagccgaatattcagatctggaacgtggatttgcgcggcgaccgttcgctgacgctgcgttacattccacataatcgcgcaccgctagatcgggggcgcaaagaagtactgaagcatgtgcatcgcctgtggggatttgatgtaatgctggaacagcaaaacgaagacggcagcgtcgagttgctggaacgttgcccgccgagaatgggaaatctgtaa

SEQ ID NO: 261161 - DNA, 1299 bp, Klebsiella pneumoniae
atgcgagttgtcatactgggaagtggtgtggtaggcgttgccagcgcctggtacttaaatcaggcaggacatgaggtcaccgtcattgatcgagagccgggggccgccctggaaaccagtgccgcgaatgccgggcaaatctcccccggatatgcagcaccgtgggcggcaccaggtgtgcctttaaaagcgattaaatggatgttccagcgccatgcgccgctggcggttcgtctcgacggtacgcagttccagttgaaatggatgtggcaaatgttacgtaactgcgacaccagccactacatggaaaacaaagggcggatggtgcgtctggcggaatacagccgtgattgcctgaaagcattgcgcgccgaaaccaatattcagtatgaagggcgtcagggtgggacgctgcaactgttccgtaccgaacaacagtatgaaaatgcgacccgcgatatcgccgtgctggaagatgctggcgtaccgtatcaactgttggaatccagccgcctggcggaagtggagcccgcgctggcagaagtagcgcacaaactgacgggggggctccagctgcccaatgatgaaaccggagactgccagctgtttacccagaatctggcgcggatggcggagcaggcgggggttaaattccgctttaatacgcccgttgaccaactgctttgcgacggcgagcaaatctacggcgtgaagtgtggcgatgaagtgattaaggccgatgcatatgtgatggcatttggttcttactcgacggcgatgctcaaaggcattgttgatattccggtgtatccgctgaaaggctactcgctgactattccgattgcgcaggaagatggtgcgccggtgtctactatccttgatgaaacctacaaaatcgccattacccgtttcgataaccgcattcgtgttggcggaatggcggaaattgttggttttaacaccgagctgttgcaaccgcgtcgtgaaacgctggaaatggtggttcgcgatctctatccacgcggcggtcatgtcgagcaggcgactttctggacgggtctgcgcccgatgacgccagacggcacgccggttgtcgggcgtacacgctttaaaaatctgtggctgaataccggtcacggcacgctcggctggacgatggcttgcggttccggtcagttgttaagcgatctgctctctggtcgcacgccagcgattccgtatgaggatctaagcgtagcgcgctacagccgtggatttacgccatcacgcccgggccatttacatggcgcgcacagctaa

SEQ ID NO: 261162 - DNA, 1071 bp, Klebsiella pneumoniae
atgacccgtccgatacaggccagcctcgatctgcaggcattaaaacagaatctgtccattgtccgccaggccgcgccgcacgcgcgcgtctggtcagtggtaaaagcgaacgcttacgggcacggtattgagcgtatctggagcgcgctcggggccaccgatggctttgcattacttaacctggaagaggcaataacgttacgtgagcgcggctggaaaggaccgatcctgatgctggaaggatttttccatgctcaggatctggagatttatgaccagcaccgcctgaccacctgcgtacacagcaactggcagctcaaagcactgcaaaatgcgcggctaaaagcaccgttggatatttatcttaaagtgaatagtgggatgaatcggttgggcttccagcccgatcgcgtacttaccgtctggcagcagttgcgggcgatggcgaatgttggcgaaatgaccctgatgtcgcattttgccgaggcggaacatcctgatggaatttccggcgcgatggagcgtattgagcaggcggcggaagggctggagtgtcggcgttcgttgtccaattcggcggcgactctgtggcacccggaagcgcattttgactgggttcggcctggcattattttgtatggcgcttcgccgtccggtcagtggcgtgatatcgccaataccggattacgtccggtgatgacgctaagcagtgagattattggtgtccagacgctaaaagcgggcgagcgtgtgggctacggcggtcgctatactgcgcgcgatgaacagcgaatcggcattgtcgccgcaggatacgccgacggttatccgcgccatgcgcctaccggtactcctgttttagtggacggcgtgcgcaccatgacggtggggaccgtctcgatggatatgctggcggttgatttaacgccttgcccgcaggcggggattggtacgccggttgagctgtggggcaaggagatcaaaattgatgatgtcgccgccgctgccggaacggtgggctatgagttgatgtgcgcgctggcgttacgtgtcccggttatgacagtgtaa

SEQ ID NO: 261163 - DNA, 1437 bp, Klebsiella pneumoniae; identical to SEQ ID NO: 9654

SEQ ID NO: 261164 - DNA, 288 bp, Klebsiella pneumoniae
atgcatccggtgctacaggcggatgaaacgccactacagttactgagcagtctgaaacgcgtattgtgtgggctacgccagtgcggcaggttgcgtgggggaatatgttcaggcgatgtcaggctggggcccctgatggttgacggggataccggtaatgcggggctggttattcttcacctgttgcagtcagaagaagccattatgctgactttcttgagccggcgttttgagttgattagccagagcctgcaatggtttgtcatccataatttaaccttcttctga

SEQ ID NO: 261165 - DNA, 1737 bp, Klebsiella pneumoniae
ttggatgccacaacaataattagccttttcatcttaggatccatccttgtcaccagcagtatattacttagttcattttcttcccgtcttggcattcctattctggttatttttctggcgatcggcatgctggcgggagtcgatggcgtcggaggtatcccgtttgataattaccccttcgcctacatggtaagtaacctggcgctggcgattattttgctcgacggcgggatgcgcactcaggccagttcctttcgtgtggcgttaggaccggccctgtcgctggcgacgctgggcgtgcttatcacctctggtttaaccggcatgatggcggcgtggctgtttaatcttgatttgattgaaggcttattaatcggcgctatcgtcggctccaccgatgctgcagcggtcttttctctgctgggtggtaaggggcttaacgaacgtgttggctcgacgctggaaattgaatccggcagtaatgatccaatggcggtctttctgacgattaccctgattgcgatgatccagcaacatgaaagcagtgtcagttggatgttcgtagtcgatattctgcagcaatttggcctcgggattgtcatcggtcttggcggtggttatttactgctgcaaatgattaatcgcatcgccctgcccgccggattatatccattgctggcattaagcggcggtattttaatttttgctttaaccacggcgctggaaggtagcggtattctggctgtttatctgtgcggttttctgctgggtaatcgcccgattcgcaaccgctatggcatcctgcaaaatttcgacggcctcgcctggctggcgcaaatcgccatgttcctggtgctggggctattggttaacccaagcgatctgctgcctattgctattccggcgctcattttgtccgcatggatgatattcttcgctcgtcctctttcggtatttgccggattgctaccgttccgtggttttaatctgcgtgagcgcgtgtttatcagctgggtgggattacgcggcgcggtgccaatcatcctggccgtgttcccgatgatggcggggctggagaatgcgcgactgttctttaatgtcgccttctttgtggttctggtttcactgctcttgcagggaacatcactctcgtgggcggcgaaaaaagccaaagtggtcgttccgccagtgggacgtccggtgtcacgcgttggtctggatattcatccggaaaatccgtgggagcagtttgtttatcagttgagtgccgataaatggtgcgtgggcgcggcactgcgtgatctgcatatgccaaaagagacgcgtattgcggcactgtttcgtgataaccagttgcttcatcctaccggcagcacccgactgcgcgaaggcgatgtgttgtgtgtaattggtcgggaacgcgatctcccggcgctcggtaaactgttcagccagtcgccgccggtcgcgctggatcaacgcttctttggtgacttcattctcgaagccagcgccaaatatgcagatgtggcgctgatatatggcctggaagacgggcgagaatatcgtgataagcaacaaacgctgggtgaaattgtccagcagttgttaggcgcggcaccggttgtcggtgaccaggtagagtttgccggaatgatctggacggtggccgagaaagaagataatgaagtgttgaagattggcgtacgggtggcggaagaggaagctgaatcttaa

SEQ ID NO: 261166 - DNA, 915 bp, Klebsiella pneumoniae
atgtctctgtttcacttaattgccccatcgggttactgcattaaacagcacgccgcgctgcgtggtatccagcgccttaccgacgcggggcatcaggtcaataacgtcgatgttattgcccgtcgttgtgagcgttttgcgggtacggaaacggagcgtctggaagatctcaattcccttgccagactgactacccccaacactatcgtgctggctgtacgcggtggttacggtgccagtcgtttactggcggatattgactggcaggcactggtggctcgccaacaacatgacccgttgctcatttgcggacatagcgattttaccgccattcagtgcggtcttctggcgcatggcaatgtcatcacctttagcggccccatgctggtagcaaactttggcgcggatgaactgaacgcctttaccgagcaccatttctggctggcgttacgcaatgaaaccttcaccattgaatggcaaggggaaggcccgacatgtcagaccgaaggcacgttatggggaggcaatctcgcgatgctgatttcactgattggtacaccgtggatgccgcaaatcgaaaacggtattctggtgctggaagatattaacgagcaccctttccgcgtcgaacgtatgctgttgcagctctatcatgctggaattttgccacgtcagaaggcgattattctcggtagctttagcggcagcacgcccaatgattatgacgcaggttacaacctggagtcagtgtacgcgtttttgcgttcccgcctgtcgattccactcattaccggcctcgattttggtcatgaaccacgcacggttacgctgccgttgggcgcacatgccattcttactaacacccgggaaggcactcagttgacgattagcggtcatcctgttcttaaaatgtaa

SEQ ID NO: 261167 - DNA, 612 bp, Klebsiella pneumoniae
gtgaaattgagatggtttgcctttttgattgtgttattagcaggttgttcatcaaagcatgactacacgaacccgccgtggaacgcgaaagttccggtgcaacgtgcgatgcagtggatgccaataagccagaaagccggtgcagcctggggcgtcgatccacaattgatcacagcgattatcgctatcgaatcgggtggtaatccgaatgcggtgagtaaatcgaatgccattggtttgatgcagttaaaagcttcaacctccggacgtgatgtttatcgccgtatgggctggagtggtgagccgacgaccagcgagctgaaaaatccggagcgtaatatttcaatgggggcggcttacctgaatattctggaaaccggcccgctggcaggtattgaagatccgaaggtactgcaatatgcgctggtggtgtcatacgctaacggggcaggtgcgctgctacggactttctcgtcagatcggaaaaaggcgatcagcaaaatcaacgatctggatgctgacgagttcctcgatcacgtagcgcgaaatcatcctgcgccgcaggctccgcgctatatctacaaacttgagcaggcactggacgcgatgtaa

SEQ ID NO: 261168 - DNA, 735 bp, Klebsiella pneumoniae
gtgagtcattaccatgagcagttcctgaaacaaaatccgttagccgtcctgggcgtgttacgcgatttgcacaaagccgcaattcctttgcgtatcagttggaatggcgggcagctgatcagcaaaatactggcaataaccccggataaactggtgctggatttcggcagccaggccgaagataacaacgctgtgttaaaggcgcagcacattaccattaccgccgaaacccagggcgcgaaagtcgaatttactgttgaacaactacagcagagtgaatacttgcagcttccggcatttattaccgtaccgcctcccaccttgtggtttgtacaacgacgccgatatttccgcatctccgccccactccatccgccttatttttgccagaccaaactggcggataacagtacgttacgtttccgcctgtatgatttgtcgttaggcggcatgggcgcattactggaaacagcaaagcctgccggattgcacgaaggcatgcgcttcgctcagattgaagtcaacatggggcaatggggtgtttttcactttgacgcccagttaatctcaatcagcgagcgcaaagtgattgatggcaagaatgaaaccatcaccactccccgtctgagcttccgttttcttaacgtcagcccgacggtggagcggcaattacagcggattattttctctctcgagcgggaagcccgggagaaagcggacaaagtgcgcgactga

SEQ ID NO: 261169 - DNA, 255 bp, Klebsiella pneumoniae
atgggaattattgcctggattatttttggcctgatagccggcattatcgccaagctaatcatgccggggcgtgatggtggtggatttttcctgacctgtattctcgggatagtcggtgcggtggtcggcggctggctggcgaccatgtttggcattggcggctccatcagcggttttaatttgcacagcttcctggtggcggtagtgggcgctattctggtgctgggcgtattccgcctcctgcgaagagaataa

SEQ ID NO: 261170 - DNA, 1971 bp, Klebsiella pneumoniae
atgagactcaaaaaacgttatctctgcacagcattatcacttgcctttacccagcaggccgtagcggctcaggagagtgacacgctgaccgtatggtccagtccggtatcatcgacgacgaccaccgttctcgatcaacccaccatgaaggccctggataaacagaatgtcgctcaggcattaagtgtcgtccccggcgtggtgctgcaaaagtcaggtagccgcaacgaagaacaggtcaaagttcgtggctttgatagtcgtcaggtgccggtctatttcgacggtgtgcccatttatgttccctatgacggcaacctcgatctggcgcggattctgaccaacaatttgggggcagttgaagtttccaaagggtattcgtcgctgcttcaggggcctaatcagatgggcggagccattaatatcaccacccagaagccaacaaaacctctggaagcaaatctgggatatcgccagggatggagccgtagccaggacaatgcctacgatatgcatgcttcatttgccgccagcagcgatctggggtatttgcaagtcagcggtagccagctaaagcaggattttctcggcctgccgcatggtgtaaataatgatattgcaggcaaacacggcaagatgattaattcatcggctgatgataaacgcggcattgtgaagctcggttttacaccacgcgaaaacgatgaatacacattgacttacattaagcaggatggtgaaaaagataacccgccatacagtggaaatagtggtcaaaaatcacgctactggcagtggccagagtatgacaaagaaagtttttattatcagggaacgacccaactaaacgatcgttttaccctgaaaagtcggctgtatcgcgacacctttgaaaatacgctgatgatgtacaactcgctggctgatttgaaaaataaaaaaggcagctacagccattattccgattacagcgacggtgccgggttacaactggcagccgatgtgcgtgaaaacgatctgctgtcgtttgccgttaactggaaagatgacgtacaccgggaaaaaggtgcgccgcacgccgcttacgatcgctatgaagatcgtacctggtcgctcgccagtgaatatcaatgggctgctgccgataatgtcgatgtcgtggctggaatcagctatgactggcgcgatagcgtagaagcgaaaaaacatgagaaagatggaagcatcacccattatgacgacaacaatcagtcagcttttaactggcaggtgatggggaaataccactttgccaatgaagacacgctggcgctttcgtactatgaccgcacacgctttccgacgctgaaagaacgctataccacgtccaaacctgcgtataaccagatagcgattgttaacccgcagctcaaaccggaacgcgcgcgcggggtggatttaacctggaatggtgccttcacgcacgactgggggtttgaggtcagcgtttactataaccgggtgagtgatgccatcctctcgcacaatatcgatgccgataccattcaaaatcagaacagcggcacggtggattacagcggtctggatgccggtattaaggggaaaatcagcaatatactggatgtaggattgagctacgccctgatccacgctgatgccaaacgcaaagacatcggcaagataaccgatctgccaacgcagacaatgaccgcatggatgactctcaaaccgtgggagccgttaagcgtaacgctgtcggaagaggcgcgttcctccagctacagcaacagtgacggttcacaaaaagccgccggttttgcggtgacccacattcgagccgattacaccttaggtcatggcttcagcgtcaatgcgtcggtcaataacctgtttgatacccaatatgcctacagtgaagggtttattgaagaaggtcgcaatttctgggcaggtatcgagtatacgttctga

SEQ ID NO: 261171 - DNA, 855 bp, Klebsiella pneumoniae
atgattttcctttctcaggcacaaatcgatgcgttacttctggaagatatccagggcggtgacctgaccacgcgagcattaaatattggacaccagcatggctatatagagttttttcaccgtcagggcggctgcgtcagcggaatttctgtcgcgtgtaagatgttaaccacgctggggttaaccattgatgacgcggtcagcgacggttcacaagcgaacgcgggtcagcggctaatccgtgcgcagggtaatgccgcagcacttcatcagggatggaaggcagtccagaatgtgctggagtggagttgcggtgtttctgattatctcgctcaaatgctggcgttacttcgtgaacgttaccctgatggcaatatcgcctgcacccgaaaagcgattccgggcacccgcttactggcctcgcaggcaattctggctgccggaggactgattcatcgtgccggatgtgcggaaaccatattattgtttgccaaccaccgtcattttcttcatgacaatcaggactggtcaggcgcaatcaatcagttacgtcgccacgcacccgagaagaaaatagttgttgaagccgacacgccgaaagaggcaatcgccgcgttacgcgcgcaaccagacgtacttcagctcgacaaatttagtccacaacaggcaactgaaattgcgcaaatagcaccgtcgctggctccccactgcacgctggctctgaccggcggaattaatctgacaacactcaaaaattacctcgactgcggcattcgcctttttattacctccgcgccttattacgcgacaccggctgacattaaagtcagtctgcaacccgcagcctctatttaa

SEQ ID NO: 261172 - DNA, 813 bp, Klebsiella pneumoniae
atgctcattgacgatattgattttgcagacctttaccttcagcaactcaaactggcccaccgcacagaaaaaacgccggatcactgggatcaacgggcggaaaaaatggcggaaaattgcgcctcgcctacggacagctacctgcaacaactgaccgctaaaattgatctgcaaggcgcgcagaccttattcgatatgggctgcggaccgggtaccgtatcgctggcgctggctgacaaactcacgacgatttatggcgttgattacagtcaggggatgctgaaggttgccgcccgtcgcgccgccgcgctaaaggcagacaatgtccactggatccagcgcgcctgggaagaggactggagtgacctgccacgctgcgatattgccatggcttcccgctccactctggtggctgatatgcgccaggcaatgagcaaactgaataatcaggcacggcttcgcgtctatacgactcatctggtcagcacctcgttcgtctctccagccattcagcgggctgctggtcgggaagtgatcgaattacccaactatatctttgcgctcaacgtcctgtatcagatgggaatttatgctcacgttgattttatccgtggacaaaattgccaacaggataacagcacctgggaacgttttgagcagaacgtcagctggagtctgggcgcgcttaacgacgatgagcgtgagcggttatatcgctggtatcaacaacaagatgctcgtgccctcgcccctgccagccgcgactgggcgctcatctggtgggatagcgtgcagccggaggcactgcgatga

SEQ ID NO: 261173 - DNA, 759 bp, Klebsiella pneumoniae
gtgactttgcttgccgtccgtcatgcgtctctgggttactcccgccatccggtgctacgcgacgtgtccttcaccctgtcgcaaggaacaatttgttgtctgttaggagccaatggttgcggcaaaaccacactcatgcgctccattcttggcgttataccgttattaaaaggcgagatcttactggatagcctccctgtgcagacactcagccatcgccagcgcgcgcaggctattgcctgggtgccgcaggcgcacgacggcatttttgcttttagtgtgctggatatggtgttgatgggcctggcccccaccataggcgctttttccgttcccggtaagcaagaacgcctgaaagcaacggagcaactggaaaagctgggcattttgcatctggcgacacgacgctggaatacgcttagcggcggtgaacgtcagctggctttaatcgcccgtgcactcgtccagcaaccgcgcttgttattactggatgagcctgcctccagcctcgatttcggtcatcagatccaactactggacacgctggcgcagctcaaaaataacggcatgacaatgttaatgtcgactcatcatccgctccatgccaacgccattgccgacagcattatccaggtagagccagatggacgagtaacacaaggcttaccgaccgaacagttaacaacgaacaaactggctgccctgtaccgggtttctgccgaccagattcaccatcacctctctgcaattaagcactaa

SEQ ID NO: 261174 - DNA, 981 bp, Klebsiella pneumoniae
atgagaaccgtaaacggatgtattttgctgctggcagctatcagtatcacttttgccgccgtaagtggggcttatcatctcgatatacagcaactgctggcgctcattctgcgtcaagaaaatgttcctgtgcaggaacaaattgtcttctggcaaatccgcgtgccgcgtattcttgctgcgctgtttctgggcgcggcgctggcaggggccggaaccacctatcagggaatgttccgtaatcccttagtgtcaccggatattttaggcgtctccgccggtgccggacttggtgcctgcgcggcaatcctgtggggattatccattgtttacatccagctgtacgcattttgcggcgggctgatggtggtcgcgggcgtctggttgattacgcgtcgggtgacccgccacgatccgatcttaaccctggtgctggtaggcattgcgttaggaacgttgtgcggagcggggatatcgctaataaaaacgctggccgatccttacacccagttaccgtcaattaccttctggttgctgggggggctgtccaccgtgaccttacgcgatctctgctatgctgcaccgatcattctcataggctccttgcccctgttttttctccgctggcgcatgaatttactcacgctttccgacgacgaagcccgttcgctgggactgaacgtgacacgtctgcgctttggattaattgtctgcgccacactaatcaccgccagcacggtagcaatagcgggcataattggttgggtcggcctggtcgttccgcacattgcccgcttgttgaccggtcataaccatcagcaactgttgcccatggcaatgtgtactggcgcgattctgctcctgcttaccgatacgctggcacgcagcattggaacaacagaaatcccacttggcattctgaccgcttttgttggtgcaccgtttttcctgtttttgttgttacgcggaggtcgccagtga

SEQ ID NO: 261175 - DNA, 1023 bp, Klebsiella pneumoniae
atgtcactaaccagacggaggtttacacagattcttgcgtcgacgttgttcctgcatcatctgccgtcctttgcacaatcagtcaaattctgggcctcactgacgcttcccgaagcccaaaacattacacgcatcgtcagcgcaggcgcgcccgccgatttactattgctggctgtcgcgccagaaaaaatggtcggtttttcctcttttgattttgcccgtcaggcattaattccattgccagagcacattcgccagttccccaggctgggacgactcgccgggcgcgccagcacactctcgctggaagggcttatggcgttacatcccgatttggtcgttgattgcggcaatacggatgaaacctggatctcccaggcacggcaggttagcgaacagacacaaataccctggttattgcttaacgggaaactggaacaatcagcagaacagttaacaacgcttggcaaaacgttaggcgaagagcaccgcgccgcagaacaagccaatctcgccagccgcttcgttggtgaagctcaggcattcgccacctcacccgccgctaacctcagcttttatgctgcgcgcggtcctcgagggctggaaacgggcttacagggttcgttgcataccgaggcggcggaattattaggtttgcataacgtcgcgcaaatagccgatcgccacggtctgacacaggtttccatggaaaatctcctgcgctggcagccggatattattctggttcaggaggccgttactgcagattttattcgtcgtgatcctctctggcagggcgtgaaagcggttgcggaacaacgcatcttatttttaagtggcctgccctttggctggctggatgtcccgccgggaatcaaccgtcttctgggattacgcagacttcacgcctggctggatcccgccatcaatcgccagtttaaaagtgacatgcagcattacgcccaactgttctggcattgcccattaagtgacgccgactatcaaaaattggtggcgagctaa

SEQ ID NO: 261176 - DNA, 1698 bp, Klebsiella pneumoniae
atgaaatcccccaccccttctcgcccgcaaaaaatggcgttaattccagcctgcatctttttgtgttttgctgcgctatcggtgcaggcagaagaaacaccggtaacgccacagccgcctgatattttattagggccgctgtttaatgatgtgcaaaacgccaaactttttccggaccaaaaaacctttgctgatgccgtgccgaacagcgatccgctgatgatccttgctgattatcggatgcagcaaaaccagagcggatttgatctgcgccatttcgttaacgtcaattttaccctgccgaaagagggcgagaaatatgttccgccagaggggcagtcactgcgcgaacatattgacggactttggccggtattaacgcgttctaccgaaaacaccgaaaaatgggattctctgttaccgctgccggaaccttatgtcgtgccaggcggacgttttcgcgaggtatattactgggacagttacttcaccatgttaggacttgccgaaagcggtcactgggataaagtcgcggatatggtggccaattttgctcatgaaatagacacttacggtcatattcccaacggcaaccgcagttactatttaagtcgctcgcagccgcccttctttgccctgatggtagagttactggcgcagcatgaaggcgatgccgcgttgaagcaatacctgccgcaaatgcaaaaagaatatgcttactggatggacggtgttgaaaacctgcaagccggacaacaggaaaaacgcgttgtaaaacttcaggatggtacccttctcaaccgctactgggacgatcgcgatacgccacgaccagagtcatgggtggaagatattgccaccgccaaaagcaatccgaatcgacctgccactgaaatttaccgcgacctgcgctctgccgctgcgtctggctgggatttcagctcgcgctggatggacaacccgcagcagttaaataccttacgcaccaccagcatcgtaccggtcgatctgaacagcctgatgtttaaaatggaaaaaatcctcgcccgcgccagcaaagctgccggagataacgcgatagcaaaccagtacgaaacgctggcaaatgcccgtcaaaaagggatcgaaaaatacctgtggaacgatcaacaaggctggtatgccgattacgacctgaaaagtcataaagtgcgcaatcagttaaccgcggccgccctgttcccgctgtacgtcaatgcggcagcgaaagatcgcgccagcaaaatggcgacggcgacgaaaacacatctgctgcaaccaggcggcctgaacaccacgtcggtgaaaagtgggcaacaatgggatgcgccaaacggctgggcaccgttgcagtgggtcgcgacagaagggttacaaaactacgggcaaaaagaggtggcgatggacattagctggcacttcctgaccaatgttcagcacacctatgaccgggagaaaaagctggtggaaaaatatgatgtcagcaccaccggaacagggggcggcggtggcgaatatccattacaggatggctttggctggaccaatggcgtgacgctgaaaatgctggatttgatctgcccgaaagagcaaccgtgtgacaatgttccggcgacgcgtccactcagtgaatcaacaacacagccggtaaaacaaaatgaggcggaacctacgccttaa

SEQ ID NO: 261177 - DNA, 1419 bp, Klebsiella pneumoniae
atggtaaacctggtcatagtttcacatagcagccgactgggagaaggtgtcggtgaactagcccgtcagatgttaatgagtgatagttgtaaaatcgccattgccgcgggaattgacgatccacaaaatcccattggtaccgatgccgtcaaagtgatggaggccatcgaatctgttgctgatgccgaccatgtgctggtcatgatggatatgggtagcgcattattgagtgctgaaactgcgctggaattgctggctcccgagatcgccgcaaaagtacgtttgtgtgctgcaccgttggtcgaaggtacactggcagcaacggtcagcgcggcctcgggggcggagatcgacaaagttatctttgacgccatgcatgcgctggaagccaaacgtgaacaactgggtttaccgtcctccaacactgaaatctctgacacatgtcctccgtacgatgaagaagcccgttctctggcggtggtcataaaaaaccgtaacggcctgcatgtacgtccggcctcccggctggtttataccttatcgacatttaatgccgatatgttgctggagaaaaacggcaaatgcgtcacaccggagagtattaaccagattgcgttactacaagttcgctataacgatacgctgcgcctgattgcgaaagggccagaagctgaagaggcactgatcgctttccgtcagctggctgaagataactttggtgaaacggaggaagttgctccacctattctgcgtcccgttccgcctgtttcgggtaaagccttttattatcaaccggttttatgtacggtacaggcaaaatcaaccctgaccgtggatgaagaacaagaacgattacgccaggccattgacttcacgttattagatctgatgacgttaacagcgaaagcagaagccagcgggcttgacgatattgccgcaatcttttctggtcaccatacactgttagatgatccggaactgctggcggcggcaagcgaactccttcagcatgaacattgcacggcagaatatgcctggcagcaagttcttaaagaacttagccagcaataccagcaactggatgatgaatatctacaggctcgctatattgatgtggacgatcttctgcatcgcaccctggtccacctgacccaaacgaaagaagaactcccgcagtttaactcgccaactattctactggcggagaacatctatccctccacaatactgcaactggatccggcggttgtaaaaggtatctgccttagcgccggaagtccgctatcccacagcgccctgatcgcccgtgaactggggattggctggatttgccagcagggtgagaaactgtatgcgatacaaccagaagaaacgctaacgctggacgttaaaacgcaacgtttcagccgtcagggttaa

SEQ ID NO: 261178 - DNA, 633 bp, Klebsiella pneumoniae
atgtcactgagcagaactcaaattgttaactggctcactcgttgtggcgatattttcagcaccgagagcgagtatcttaccggactggatcgcgaaattggcgacgctgaccacgggctaaatatgaaccgaggctttagcaaagtggtggaaaaactccctgctatcgcagataaagatatcggtttcattctcaagaataccggtatgacgctactttccagcgtcggtggtgccagtggtccgcttttcggtaccttctttatccgcgccgcacaggcgacccaggcacggcaaagcctgacgctggaagagctttatcagatgttccgcgatggcgcggacggcgtaatcagtcgcggtaaagccgaaccaggcgataaaaccatgtgtgatgtgtgggtgccggtggtggaatcgttacgtcagtccagcgagcaaaatctctctgttccggcggcgctcgaagctgccagtagcatcgccgagtccgctgcacaaagtacgattacgatgcaagcccgcaaaggccgcgccagttatctcggtgaacgcagtattggtcaccaggaccccggtgcgacctcggtgatgtttatgatgcaaatgttggcgttagccgcaaaagagtaa

SEQ ID NO: 261179 - DNA, 1071 bp, Klebsiella pneumoniae
atgaaaaaattgatcaatgatgtgcaagacgtactggacgaacaactggcaggactagcgaaagcgcatccatcgctgacactgcatcaggatccggtgtatgtcacccgagctgatgcccccgttgcaggtaaagtcgccctgctgtcgggtggcggcagcggacacgagccgatgcattgtggttatatcggtcaggggatgctttcgggggcctgtccgggcgaaattttcacctcaccgacgcccgataaaatctttgaatgcgccatgcaaattgatggcggcgaaggtgtactgttgattatcaaaaattacaccggcgatattcttaacttcgaaacagcaaccgagttactgcacgatagcggcgtaaaagtgaccactgtggtcattgatgacgacgttgcagtaaaagacagtctttataccgccgggcggcgcggcgttgccaacaccgtattaattgaaaaactcgtaggcgcagcggcggagcgtggcgactcactggacgcctgtgcggaactggggcgtaagttgaataatcaaggccactcaataggtattgctctcggtgcctgtaccgttcctgccgcgggcaaaccttcttttaccctggcggacaatgagatggagtttggcgtcggcattcatggtgagccgggtattgaccgacgccccttctcttctcttgatcaaaccgtcgatgaaatgttcgacaccctgctggaaaatggctcataccatcgcactttgcgtttctgggattatcaacaaggcagctggcaggaagaatcacaaaccaaacaaccgctccagtctggcgatcgggtgattgcgctggttaacaatcttggcgcaactccgctttctgagctgtacggcgtctataaccgcctgaccacacgttgccagcaagcgggattgactatcgagcgtaatttaattggcgcgtactgcacctcactggatatgaccggtttctcaatcaccttactgaaagttgatgacgaaacgctggcactctgggacgccccggtccacaccccggcccttaactggggtaaataa

SEQ ID NO: 261180 - DNA, 1920 bp, Klebsiella pneumoniae
atgagtggcgcttttaacaacgatggtcggggcatatctcccttaattgcaacctcctgggagagatgcaataagctgatgaaacgggagacatggaacgtaccacaccaggcccagggcgtgacatttgcttctatttatcggcgtaagaaagcgatgctgacgctcgggcaggctgcgctggaagatgcctgggaatatatggcaccgcgagagtgtgcgttgcttatcctcgatgaaaccgcctgcattctcagccgtaatggcgatccgcaaaccttgcagcaactaagtacactgggattcaatgacggcacgtattgcgccgagggaattattggtacttgtgcgctatcgttagcggctatctctggtcaggccgtgaaaacgatggccgatcaacatttcaaacaggcactctggaactgggccttttgtgcaacgccgttgtttgacagcaagggccgattgacgggaacaatagcgctggcgtgtccggttgagcaaactaccgcagctgatttgccgttgacgttggcaatcgcacgcgaggtcggaaatttactgctgacggacagtttgctcgctgaaactaaccgtcatttaaatcaacttaatgccctgttagaaagtatggatgatggtgtgattagctgggacgagcagggtcatttgcaatttatcaatgcccaggcggcgcgggtcttgcgccttgacgcgacggcaagtcagggaagggcgatcactgaactcttaacgttacccgccgtattgcaacaagcaataaaacaggcacatccgctcaaacacgtagaagcaacctttgaaagtcagcatcagtttattgatgcggtgataacccttaaaccgataatagaaacgcagggaaccagctttattttgttgctccatcctgtggaacagatgcggcagttaatgaccagtcaattaggaaaagtcagccatactttcgctcatatgccacaagaggatccgcaaacccgccgcttgattcattttggtcgccaggcggcgcgcagtagctttcctgtcctgctttgtggagaggagggcgtgggcaaggcactgctaagtcaggcaattcataatgaaagcgagcgtgcagcggggccttatattgccgtcaattgtgagttatatggtgatgcggcgctggcggaagaatttattggtggcgatcgcacggataatgaaaatggccgtctgagtcggctggaactggcgcacggcggcacgctgtttcttgaaaagattgaatatctggcggtggagttacagtctgctttgcttcaggttatcaagcagggtgttatcacgcgactggatgcgcggcgtttaatacccattgatgtcaaagtgattgccacaacgaccgcggacctcgcaatgctggtggaacaaaatcgctttagtcgccagctgtattacgcgctgcatgcatttgaaattaccatcccgcctctgcgtatgcggcgtggcagcattccggcgctggtgaataacaaattacacagtcttgaaaaacgcttctctacgcggctgaaaattgatgacgatgccctcgctcgcctggtttcctgtgcatggcctggcaacgattttgaactttacagcgtcatcgagaatcttgctctgagtagtgataacgggcgcattcgcgtcagtgatttacctgaacatctgtttaccgagcaggcgacagatgatgtcagcgccacccgcctttccaccagtctgtcatttgcggaagttgaaaaagaggcaattattaacgcagcccaggtcacaggcggtcgcattcaggaaatgtcggctttacttggaatcggccgcactacgctgtggcggaaaatgaagcaacatggcattgatgcagggcagtttaagcgccgggtatga

SEQ ID NO: 261181 - DNA, 2868 bp, Klebsiella pneumoniae; identical to SEQ ID NO: 9653

SEQ ID NO: 261182 - DNA, 204 bp, Klebsiella pneumoniae; identical to SEQ ID NO: 9652

SEQ ID NO: 261183 - DNA, 852 bp, Klebsiella pneumoniae
atgcggacacagtggccctctccggcaaaacttaatctgtttttatacattaccggtcagcgtgcggatggttaccacacgctgcaaacgctgtttcagtttcttgattacggcgacaccatcagcattgagcttcgtgacgatggggatattcgtctgttaacgcccgttgaaggcgtggaacatgaagataacctgatcgttcgcgcagcacgattgttgatgaaaactgcggcagacagcgggcgtcttccgacgggaagcggtgcggatatcagcattgacaagcgtttgccgatgggcggcggtctcggcggtggttcatccaatgccgcgacggtcctggtggcattaaatcatctctggcaatgcgggctaagcatggatgagctggcggaaatggggctgacgctgggcgcagatgttcctgtctttgttcgggggcatgccgcgtttgccgaaggcgttggtgaaatactaacgccggtggatccgccagagaagtggtatctggtggcgcaccctggtgtaagtattccgacaccagtgatttttaaagatcctgaactcccgcgcaatacgccaaaaaggtcaatagaaacgttgctaaaatgtgaattcagcaatgattgcgaggttatcgcaagaaaacgttttcgcgaggttgatgcggtgctttcctggctgttagaatacgccccgtcgcgcctgactgggacaggggcctgtgtctttgctgaatttgatacagagtctgaagcccgccaggtgctagagcaagccccggaatggctcaatggctttgtggcgaaaggcgttaatctttccccattgcacagagccatgctttaa

SEQ ID NO: 261184 - DNA, 624 bp, Klebsiella pneumoniae
atgcccctgcccgattttcgtcttatccgcctgctaccgctggctgctcttgtgctcactgcctgttccgttaccacacccaaaggtcctggcaaaagcccggattcaccacaatggcgtcagcatcagcaagacgtgcgcaatcttaatcagtatcaaactcgcggcgcgttcgcttatatttctgaccaacaaaaagtgtacgcccgtttcttctggcagcaaactggccaggatcgctaccgtctgctgctgactaacccattaggcagcacggaactggagctgaatgctcaaccgggtaacgtgcagttagtcgacaataaaggccagcgttataccgccgatgacgccgaagagatgattggcaaattgaccggaatgccaattccgctcaacagcttgcgccagtggattttaggtttaccgggtgatgcaaccgactacaaactggacgaccagtaccgcctgagcgaaatcacctacagccagaatggcaaaaactggaaagttgtttacggtggttatgacacaaaaactcaacctgcgatgccagccaatatggaactcaccgacggtggtcaacgcatcaagttaaaaatggataactggatagtgaaataa

SEQ ID NO: 261185 - DNA, 834 bp, Klebsiella pneumoniae
atggaatatcaatactggttacgtgaagcaataagccaacttcaggcgagcgaaagcccgcggcgtgatgctgaaatcctgctggagcatgttaccggcagagggcgtacttttattctcgcctttggtgaaacgcagctgactgacgaacaatgtcagcaacttgatgcgctactgacacgtcgtcgcgatggtgaacccattgctcatttaaccggggtgcgagaattctggtcgttgccgttatttgtttcgccagcgaccttaattccgcgcccggatacggagtgtctggtggagcaggcactggcgcggttgcctgaacaaccttgccgtattctcgatctcgggacgggtaccggggcgattgcgctggcgctggctagcgagcgcccggactgcgaaattaccgctgtagatcgtatgcccgatgctgtctctctggcgcaacgtaatgcccagaatctggcgatcaaaaacatccatattctgcaaagcgactggtttagcgcgctagccgggcagcagtttgcgatgattgtcagtaatccgccgtatattgacgagcaggacccacatcttcaacaaggcgatgttcgctttgagccgctcactgcgctggttgcggcagacagtggaatggcagacatcgtgcatatcatcgaacagtcgcgtaacgcgctggtatccggcggctttctgcttctggaacatggttggcagcagggcgaagcggtgcgacaggcatttatcctcgcggggtatcatgacgtcgaaacctgtcgggactatggtgataacgagcgcgtaacgctcggccgctattatcaatga

SEQ ID NO: 261186 - DNA, 393 bp, Klebsiella pneumoniae
atgacaagtttttctacactgcttagcgttcatctcattagcattgcgctttctgtagggctattaaccttacgtttctggctacgttatcagaagcatccacaggcatttgcgcgctggacgcgcattgtgccgccggttgtcgatacggtgttattgttaagcggcattgcgttgatggctaaagcgcacatcctgccattttccgggcaggcacagtggctgactgaaaagctgtttggagttatcatttatatcgttttgggttttattgcattcgattatcgtcgtatgcacagtcagcaggcgcgcattattgccttcccgctggcgttggtggtgctgtacatcatcattaaactcgccaccacaaaagtaccgttactggggtaa

SEQ ID NO: 261187 - DNA, 810 bp, Klebsiella pneumoniae
atgagatcgttagctgatttcgaatttaataaagcgccattgtgcgaaggcatgatcctggcttgcgaagcaatccgccgcgattttccctcgcaagatgtttacgacgaactggagcgtctcgttagtctggcgaaggaagaaatcagccagcttctgcctttagaagagcagttggaaaaactgatcgcgctgttttacggcgactggggatttaaagcctcacgcggcgtttatcgcctttccgatgcattatggctggaccaggtgttaaagaatcgacagggcagtgcggtatcattaggtgccgttttattatgggtcgcgaatcgtctcgatttgccgctattgccggtgattttcccgacgcagctgatattgcgcattgaatgtccggatggcgaaatttggctgattaatccttttaacggtgaatcgttaagcgaacatatgctggatgtatggttaaagggaaatatcagcccgtcggcggaactgttttatgaagaccttgatgaagctgataacattgaggtaatccgcaaattgctggatacactcaaagcttcgttgatggaagaaaatcagatggagctggcgttacgcaccagcgaagctttattacaattcaacccggaagatccctatgaaattcgcgatcgcgggttgatttatgcgcaactggattgcgaacacgttgcgttgaacgatttaagttatttcgttgaacagtgtccggaagacccgatcagcgaaatgatccgtgcgcaaataaataacatcgcgcataaacatattgtgctgcattaa

SEQ ID NO: 261188 - DNA, 1272 bp, Klebsiella pneumoniae; identical to SEQ ID NO: 38922

SEQ ID NO: 261189 - DNA, 1680 bp, Klebsiella pneumoniae
atgactcaatttacgcaaaataccgccatgccttcttccctctggcaatactggcgcggcctttccggctggaacttctattttctggttaagttcggcctgttgtgggcgggatatcttaacttccatccgctcctcaatctggtgtttgccgcgtttctgctgatgcccattccgcgctacagcctgcatcgcttacgccactggattgccctgccgatcggctttgctttgttctggcatgacacctggttgcctggcccggaaagcataatgagccagggttcgcaggtggcggggttcagtaccgattatttaatcgaccttgtcacacgctttattaactggcagatgattggggccatttttgttttattagtggcctggttattcctgtcacaatggattcgcattaccgtttttgtggttgccattctgctatggctgaacgtacttaccctggcgggaccaagtttctccttgtggccagccggtcaaccgacgaccactgtaacaacgacgggtggcaacgcagcggcaaccgttgcggcgacgggtggcgcaccggtagtgggtgatatgcccgcacaaactgcaccgccaacaacggcgaaccttaacgcctggctgaataatttctataacgcggaggcgaaacgtaaatcgaccttcccgtcttcgctgcccgctgatgctcaaccatttgaactactggtgattaatatctgttcgctttcctggtcggatattgaagccgccgggttgatgtcgcatccgctgtggtcgcatttcgatattgagttcaagaactttaactccgccacctcctacagtggcccggcggcgatccgtttactgcgcgccagctgcgggcagacttcgcacactaatctgtatcaaccggcaaataacgactgctatctgtttgataacctgtcgaaactgggctttacccagcacctgatgatgggacataacggccagttcggcggttttttgaaagaagttcgcgaaaatggcggcatgcagaccgaattgatggatcaaacaaatctgccggttattttgctgggctttgatggttcgccggtttatgacgataccgccgtgcttaaccgctggctggacgttaccgaaaaagataaaaacagccgtagtgccacgttctacaacacgcttccactgcatgacggcaaccattatccgggcgtcagcaaaacagcggattacaaagcgcgggcgcagaaattctttgatgaactggacgccttctttactgaactggagaaatcgggtcgtaaagtgatggtggtcgtggtgccggaacacgacggcgcgctgaagggcgacagaatgcaggtatctggcctacgtgatatccctagcccgtctatcacagacgtccccgttggggtgaaattcttcggcatgaaggcaccacatcagggggcaccgattgtcatcgaccaaccgagcagcttcctggctatctccgatctggtggttcgcgttcttgatggcaagattttcaccgaagacaatgttgactggaaaaaactcaccagtgggttgccacaaacagcaccggtctcagagaactcaaatgcagtagttattcaataccaggataaaccgtacgttcgcctgaacggcggcgactgggtgccttacccgcagtaa

SEQ ID NO: 261190 - DNA, 192 bp, Klebsiella pneumoniae; identical to SEQ ID NO: 1653

SEQ ID NO: 261191 - DNA, 1560 bp, Klebsiella pneumoniae
gtggaccctgtattctctatcggtatctcatcattatgggatgagctgcgacatatgccagcaggcggcgtctggtggtttaacgtcgatcgccatgaagatgctatcagtctggcgaatcaaacaattgcatcccaggctgaaaccgcacacgtcgcggtcattagcatggacagcgatccggcgaaaatctttcaattagatgattctcaaggaccggaaaaaataaaattattttcaatgctaaatcatgaaaaaggtctatactatttggcccgtgatttgcagtgttctattgatccccataattacctttttattcttgtttgcgcaaataacgcatggcaaaacattcctgccgagcggcttcgctcatggttggataaaatgaataaatggagcaggttaaaccattgttcgcttttggtaattaatcccggaaataataacgataaacaattttcattgttgcttgaggaataccgttcactttttggtcttgccagtttgcgttttcagggcgaccaacatttgctggatattgccttctggtgcaacgaaaaaggggttagcgcccgtcagcagcttagcgttcagcaacaaaatggtatctggacattagttcaaagcgaagaggcggagatccaaccacgcagcgacgaaaaacgcattctgagtaatgttgctgtactggaaggtgcgccgccgctatcagaacactggcaactgttcaacaataacgaagtcctgttcaatgaagcccgtaccgctcaggcggcgacggtggtcttttctttacaacaaaatgcgcaaatcgagccactggcccgcagcattcatactctgcgtcgccagcgcggtagtgcgatgaaaatcctcgtacgggaaaataccgctagcctgcgcgccaccgatgaacgtttgttattggcctgcggtgcaaatatggttatcccatggaatgccccactctcccgctgtctgacgatgatcgaaagcgtgcaagggcagaagtttagtcgctatgtgccggaaggtatcactaccttgctgtcaatgacccagccgctcaaactgcgtggtttccagaagtgggatgtgttctgtaatgccgtcaacaacatgatgaataaccctctattacctgcccacggtaaaggcgttctggttgccctacgtccggtaccgggtatccgcgttgagcaagccctgacgctgtgtcgccctaaccgcaccggcgatatcatgactattggcggtaatcggctggtgctgtttctctcattctgtcggattaacgatctggataccgcgttgaatcatattttcccattgccgactggcgacattttctcaaaccgtatggtctggtttgaagatgatcaaatcagtgccgagctggtgcagatgcgcctgcttgccccagaacaatggggcatgccgctgcctttaacgcaaaattctaaaccggtcattaatgccgagcacgatggtcgccactggcgacgaataccagaaccaatgcgactgttagatgatgctgtggagcgctcatcatga

SEQ ID NO: 261192 - DNA, 189 bp, Klebsiella pneumoniae; identical to SEQ ID NO: 1651

SEQ ID NO: 261193 - DNA, 753 bp, Klebsiella pneumoniae
atggccgtactgggattgcagggggtgcggggaggcgtggggacaacaaccatcaccgccgcattagcctggtcattacaaatgttgggagaaaatgtcctggtggtcgatgcctgcccggacaacttgttgcgcctgtcatttaacgttgattttacccaccgtcagggctgggccagagctatgctggatgaccaggactggcgtgacgccgggttgcgctatacctcgcagctcgatttgctgccttttggtcagttatccattgaagaacaagaaaatccacagcactggcaaacccggctgagcgatatttgctccggcttacagcaactaaaagccagcgggcgttaccagtggattttaatcgacttaccgcgtgattcctcgcagataacccaccagctgctgagtttgtgcgatcactcgctggcaatcgtcaatgtggatgccaactgccatatccggctgcatcagcaggcgctgccggatggcgcgcatattttgattaatgacttccgtatcggcagtcaagttcaggacgatatttaccagctttggttgcaaagccagcgccgattactgccgatgctcattcatcgtgatgaagcgatggctgaatgcctggcggctaagcaaccagtcggtgaatatcgcagtgatgcgctggcggctgaagagatactgacgctggctaactggtgcctgttgaactattccgggctgaaaacgccagtcgggagtaaatcatga

SEQ ID NO: 261194 - DNA, 2619 bp, Klebsiella pneumoniae
atgagtatcctgacccggtggttgcttatcccgccggtcaacgcgcggcttatcgggcgttatcgcgattatcgtcgtcacggcgcgtcggctttcagcgcgacgctcggctgtttttggttgatcctggcctggatttttattccgctggagcacccgcgctggcagcgtattcgcgcagaacataaaaacctgtatccgcatatcaacgcctcgcgtccgcgtccgctggacccggtccgttatctcattcaaacatgctggttactgatcggtgcatcgcgcaaagaaacgccgaaaccgcgcaggcgggcattttcaggtctgcagaatattcgtggacgttaccatcaatggatgaacgagctgcctgagcgcgttagccataaaacacagcatcttgatgagaaaaaagagctcggccatttgagtgccggggcgcggcggttgatcctcggtatcatcgtcaccttctcgctgattctggcgttaatctgcgttactcagccgtttaacccgctggcgcagtttatcttcctgatgctgctgtggggggtagcgctgatcgtacggcggatgccggggcgcttctcggcgctaatgttgattgtgctgtcgctgaccgtttcttgccgttatatctggtggcgctacacctctacgctgaactgggacgatccggtcagcctggtgtgcgggcttattctgctgttcgccgaaacgtacgcgtggattgtgctggtgctcggctacttccaggtagtatggccgctgaatcgtcagccggtgccattgccgaaagatatgtcgttgtggccgtcggtggatatctttgtcccgacttacaacgaagatctcaacgtggtgaaaaataccatttacgcctcgctgggtatcgactggccgaaagacaagctgaacatctggatccttgatgacggcggcagggaagagtttcgccagtttgcgcaaaacgtgggggtgaaatatatcgcccgtaccactcatgaacatgcgaaagcgggcaacatcaacaatgcgctgaaatatgccaaaggcgagttcgtgtcgattttcgactgcgaccacgtaccaacgcgatcgttcctgcaaatgaccatgggctggttcctgaaagaaaaacaactggcgatgatgcagacgccgcaccacttcttctcaccggacccgtttgaacgcaacctggggcgtttccgtaaaacacctaacgaaggcacgctgttctatggtctggtgcaggatggcaacgatatgtgggacgccactttcttctgcggttcctgtgcggtgattcgccgtaagccgctggatgaaattggcggcattgctgtcgaaactgtgactgaagatgcgcatacctctttgcgcctgcaccgtcgtggctacacctctgcatatatgcgtattccgcaggcggcggggctggcgaccgaaagtctgtcggcgcatatcggtcagcgtattcgctgggcgcgcgggatggtgcaaatctttcgtctcgataacccgctcaccggtaaagggctgaagtttgctcagcggctatgttacgtcaacgccatgttccacttcttgtcgggcattccacgactgatcttcctgactgcgccgctggcgttcctgctgctgcatgcctacatcatctatgcgccagcgttgatgattgccctgttcgtgctgccgcatatgatccatgccagcctgaccaactccaagatccagggcaaatatcgccactctttctggagtgaaatctacgaaacggtgctggcgtggtatatcgcaccaccgacgctggtggcgctgattaacccgcacaaaggcaaatttaacgtcaccgccaaaggtggactggtggaagaagagtacgtcgactgggtgatctcgcggccctacatcttccttgttctgctcaacctggtgggcgttgcggtaggcatctggcgctacttctatggcccgccaaccgagatgctcaccgtggtcgtcagtatggtgtgggtattctacaacctgattgttcttggcggcgcagttgcggtatcggtagaaagcaaacaggtacgccgatcgcaccgcgtggagatgacgatgcccgcggcaattgcccgcgaagatggtcacctcttctcgtgtaccgttcaggatttctccgacggtggtttggggatcaagatcaacggtcaggcgcagattctggaagggcagaaagtgaatctgttgcttaaacgcggtcagcaggaatacgtcttcccgacccaggtggcgcgcgtgatgggtaatgaagttgggttgaaattaatgccgctcaccacccagcaacatatcgattttgtgcagtgtacgtttgcccgtgcggatacatgggcgctctggcaggacagctacccggaagataagccgctggaaagtctgctggatattctgaagctcggcttccgtggctaccgccatctggcggagtttgcgccttcttcggtgaagggcatattccgtgtgctgacttctctggtttcctgggttgtatcgtttattccgcgccgcccggagcggagcgaaacggcacaaccatcggatcaggctttggctcaacaatga

SEQ ID NO: 261195 - DNA, 2310 bp, Klebsiella pneumoniae; identical to SEQ ID NO: 31867

SEQ ID NO: 261196 - DNA, 1107 bp, Klebsiella pneumoniae
atgaatgtgttgcgtagtggactcgtgacgatgctgctgctggctgcctttagtgttcaggcagcctgtacctggcctgcctgggaacagtttaaaaaggattacatcagtcaggaagggcgcgtcatcgaccccagcgacgcgcgcaaaatcaccacttccgaagggcaaagttacggcatgttctttgccctggcggctaacgaccgtgcagctttcgataatattctcgactggacgcagaacaatctcgctcagggttctttaaaagaacgtttgcctgcctggctgtggggcaagaaagagaacagtaagtgggaagtgctggacagcaattcggcctccgatggtgatgtctggatggcctggtcgttgctggaggcggggcgtttgtggaaagagcagcgttataccgacatcggcagcgcgttgttaaaacgtatcgcgcgggaggaagtggtgacggtgcctgggctgggttccatgttgttaccgggcaaagtgggttttgctgaggataacagctggcgttttaaccccagctacctgccgccgacgctggcgcagtatttcacccgctttggcgcgccgtggactacgctgcgcgaaaccaatcaacgtttattgctggaaaccgccccgaaaggcttttcgccagactgggtgcgctatgagaaagacaaaggctggcagctaaaagccgaaaaaacattgatcagcagctacgacgcgatccgcgtttacatgtgggtaggcatgatgcctgacagcgatccgcaaaaagcgcggatgctcaaccggtttaaaccgatggcgacattcaccgagaaaaacggctatccgccagaaaaagtggatgtggctacggggaaagcgcagggtaaaggaccggtcggtttttctgccgccatgctgccctttttacaaaaccgcgatgcgcaggccgttcagcgccagcgcgtggccgataactttcccggcagcgatgcctattacaactatgtgctgaccctgtttggacaaggctgggatcaacaccgtttccgcttctcgacaaaaggtgagttattacctgactggggccaggaatgcgcaaattcacactaa

SEQ ID NO: 261197 - DNA, 3474 bp, Klebsiella pneumoniae
atgcgcaaattcacactaaacatattcacgctttccctcggtctggccgtcatgccgatggtcgaggcagcaccaaccgctcagcaacagttgctggagcaagttcggttaggcgaagcgacccatcgtgaagacctggtgcaacagtcgttgtatcggctggaacttattgatccgaataacccggacgtcgttgccgcccgtttccgttctctgttacgtcagggcgatattgatggcgcgcaaaaacagctcgatcggctgtcgcagttagcgccgagttcaaatgcgtataaatcgtcgcggaccacaatgttgctttccacgccggatggtcgtcaggcactgcaacaggcaagattgcaggcgacgactggtcatgcagaagaagctgtggcgagttacaacaaactgttcaacggtgcgccgccggaaggtgacattgccgtcgagtactggagtacggtggcgaaaattccggctcgccgtggcgaagcgattaatcagctaaaacgcattaatgcggatacgccgggcaatacgggcctgcaaaacaatctggcgctattgctgtttagtagcgatcgccgtgacgaaggttttgccgtcctggaacagatggcgaaatcaaacgccgggcgcgaaggggcctctaaaatctggtacgggcagattaaagacatgcccgtcagcgatgccagtgtgtcggcgctgaaaaaatatctctcgatctttagtgatggcgatagcgtagctgcggcgcaatcgcaactggcagaacagcaaaaacagctggccgaccctgctttccgcgctcgtgcgcaaggtttagcggcggtggactctggtatggcgggtaaagccattcccgaactacaacaggcagtgcgggcgaacccgaaagacagtgaggctctgggggcgctgggccaggcgtattctcagaaaggcgatcgcgccaatgcggtggcgaatctggaaaaagccctcgccctggatccgcacagcagcaacaacgacaaatggaacagtctcctgaaagtaaaccgctactggctggcgatccagcagggcgatgctgcgctgaaagccaataatcctgaccgggcagaacgcctgttccagcaggcgcgtaatgtcgataacaccgacagctatgcagtgctggggctgggcgatgtggcgatggcgcgaaaagattatcccgccgccgaacgttattatcagcagaccttgcgtatggacagcggcaacactaacgccgtgcgcgggctggcgaatatataccgccagcaatcgccagaaaaagctgaagcgtttatcgcctcgctctctgccagtcagcggcgaagcattgatgatatcgaacgcagcctgcaaaacgaccgtctggcacagcaggcagaggcactggaaaaccagggcaaatgggcgcaggcggcagcacttcagtggcaacgactggcgctggatcccggcagcgtatggattacttaccgactttcgcaggatctctggcaggccggacaacgcagccaggctgatacattaatgcgcaatctggcacagcagaagccaaacgacccggagcaggtttacgcttacgggctgtatctctctggtcatgaccaggacagagcggcgctggcgcatatcaacagcctgccgcgcgcgcagtggagcagcaatattcaggagctggttaatcgactgcaaagcgatcaggtactggaaaccgctaatcgcctgcgagaaagcggcaaagaagctgaagcggaagcgatgctgcgccagcaaccaccttccacgcgcatagacctcacgctggctgactgggcgcaacaacgacgtgattacaccgccgctcgcgctgcatatcagaatgtcctgacgcgggagccaactaacgccgatgccattcttggtctgacggaagtggatattgctgccggtgacaaagcggcggcacgtagccagctggcgaaactgcccgctaccgataacgcctcgctgaacacacagcggcgcgtggcgctggcacaggcgcagcttggcgataccgcagcggcgcagcagacgtttaatcagttgatcccgctggcaaaatctcagccgccgtcgatggaaagtgcgatggtgctgcgcgacggtgcgaagtttgaagcgcgggcgggcgatccaaagcaggcgctggaaacctacaaagacgctatggtcgcatccggtgtgaccacgacgcgtccgcaggataacgacacctttacccggctgacccgtaacgacgagaaagatgactggctgaaacgcggcgtgcgcagcgatgcagcggacctctatcgccagcaggatcttaacgtcacccttgagcacgattattggggatcgagcggcaccggtggttactccgatctgaaagcgcacactaccatgttgcaggtggatgcgccgtattctgacgggcggatgttctttcgcagtgatttcgtcaatatgaacgtcggcagtttctccactaatgccgatggcaaatgggatgacaactggggcacctgtacattacaagactgtagcggcaaccgcagccagtcggattccggtgccagcgtggcggtcggctggcgaaatgacgtctggagctgggatatcggcaccacgccgatgggcttcaatgtggtggatgtggtcggcggcatcagttacagcgatgatatcgggccgctgggttacaccgttaacgcccatcgtcggcccatctccagttctttgctggcctttggcgggcaaaaagactccccgagcaataccgggaaaaaatggggcggcgtgcgtgccgacggcgtggggctaagcctgagctacgataaaggtgaagcaaacggcgtctgggcatcgcttagcggtgaccagttaaccggtaaaaatgtcgaagataactggcgcgtgcgctggatgacgggctattactataagatcatcaaccagaataatcgccgtgtgaccattggtcttaacaatatgatctggcattacgacaaagacctgagtggctactcactcggtcagggcggttactacagcccgcaggaatacctgtcgtttgccataccggtgatgtggcgggagcgcacggaaaactggtcgtgggagctgggggcgtctggctcgtggtcgcattcacgcaccaaaaccatgccgcgttatccgctgatgaatctgatcccgaccgactggcaggaagaagctgcgcggcaatcgaacgatggcggcagcagtcagggctttggctacacggcgcgggcattacttgaacgacgtgttacttccaactggtttgtcggcacggcaattgatatccagcaggcgaaagattacgcacccagccatttcctgctctacgtacgttattccgccgccggatggcagggtgacatggatttaccgccgcagccgctgataccttacgccgactggtaa

SEQ ID NO: 261198 - DNA, 1950 bp, Klebsiella pneumoniae
atggtggcagccgttgtcctggtgttcgtttttattttttgcaccgttttgctgttccatctggtccagcagaatcgctataacacggctacgcaactggaaagcattgctcgctctgtccgcgaacccttatcttcagctattttgaaaggcgatattcccgaagcggaagctattcttgccagcattaaaccggcaggcgtggtcagccgtgccgatgtggtgctgcccaaccagttccaggcactgcgtaaaagttttattccagagcgtccggtgccggtaatggttactcgcctgtttgagctaccggtgcaaatctcgctgggcgtttactcgctggaacgtccggcaaacccgcagccaattgcctatctggtgctacaggcggattccttccgcatgtataagttcgtgatgagcaccctctcaacgttagtgaccatttacttacttttgtcgcttatcctgaccgtcgccatcagctggtgtattaatcgactgattttacatcctttacgcaatattgctcgcgaacttaacgccatcccagcccaggagcttgttggtcaccaactggcattaccgcgtctgcatcaggatgatgaaatcggtatgttggtgcgcagttacaacctcaaccagcaattgctgcagcgccattatgaagaacagaacgaaaacgcgatgcgcttcccggtgtcggatttgccgaacaaagccttgctgatggagatgctggagcaggttgtcgcgcgtaaacaaaccaccgcgctgatgatcatcacctgtgaaaccctgcgtgatactgcgggcgtgctgaaagaggcgcaacgagaaattctgctgctgacgctggtggaaaaactcaaatcggtactgtcgccacgtatgatcctcgcgcagattagtggttatgactttgctgtcattgccaatggtgtacaggaaccgtggcacgcaatcactttaggtcagcaagtgctcactatcatgagcgagcgcctgccgattgaacgtattcaactccgtccgcactgtagcattggcgtggcgatgttctacggcgatctcaccgccgaacagctttacagtcgcgctatttctgcggcatttaccgctcgccataaaggcaagaatcagattcagttctttgatccgcagcagatggaagccgcccagcagcggttgacggaagagagcgatatccttaatgcgctggaaaatcatcagtttgcgatttggttacagccacaggtcgagatgaacagcggtaaactggtcagtgcggaagtgttactgcgtatccagcaaccggatggcagttgggatctgccggatggcttaatcgatcgcattgagtgctgtgggctgatggttaccgtcggtcactgggtgctggaagagtcctgtcgattgcttgcagcctggcaagagcgcggcattatgctgcccttgtcggtaaacctctctgcgctgcaactgatgcacccgaatatggtggcggatatgctggaactgttaacccgctatcgcattcagccgggaacactgattctggaagtgacagaaagccgacgtattgacgaccctcatgctgcggtggcaatcctccgtccgctgcgcaatgccggagttcgggtggcgctggatgatttcggcatgggctacgcagggctgcgtcagctgcagcatatgaaatcgttgccaatcgacgtgttaaaaatcgacaaaatgtttgttgaaggcttgccggaagatagcagcatgattgctgcaattatcatgttggcgcaaagcctgaacttacaaatgattgccgaaggcgtggagactgaagcacaacgcgactggctggcaaaagcgggcgttggtattgcccagggcttcctttttgctcgcccactccctattgaaatcttcgaagagagttacctggaagaaaagtag

SEQ ID NO: 261199 - DNA, 1497 bp, Klebsiella pneumoniae
atgcagggcacaaaaattcgacttttagcgggcggtttgctgatgatggccactgctggctatgtgcaggcagatgcgctccagcctgatccagcatggcaacaggggacgctttccaacggtttacagtggcaagtgctgaccacgccccagcgtcccagcgatcgtgttgaaattcgcctgctggttaataccggttcgctcgccgaaagtacacaacagagcggttacagccacgccatccctcgtattgcgttaacgcaaagcggtggccttgaagcagcacaggcgcgttcattgtggcagcaggggatcgaccctaaacgcccgatgccgccggtaattgtctcttatgacaccacgctgtttaatctgagtttgcccaataaccgtaacgacttgctgaaagaagcgctctcttatctggcaaatgccactggcaaactgactatcacgccagaaaccatcaaccacgcgctgcaaagtcaggacatggtggcaacctggcctgccgatactaaagagggctggtggcgctatcgtctgaaaggatcaaccttgttaggtcacgatcctgccgatccgctgaaacaacccgttgaagcggaaaagattaaagatttctatcagaaatggtataccccggatgcaatgacgctgctggtggtgggaaacgtggatgcgcgctcggtcgtcgaccaaatcaataaaacgtttggcgaactgaaaggcaaacgtgaaacaccggctccggtgccgacgctttctccgctgcgtgcggaagcggtgagtattatgactgacgcggtgcgtcaggaccggttatcaatcatgtgggatacgccgtggcagccgattcgtgaatcagccgcactgctgcgctactggcgtgcggacctggcccgtgaggcgctgttctggcatgttcagcaagcgttaagcgccagtaacagcaaagatatcggtcttggatttgactgtcgtgtgctgtatctgcgtgcgcagtgtgccattaacatcgaatcaccaaacgacaagctgagcagcaaccttaatctggtggcgcgtgaactggcgaaggttcgcgataaaggtctgccggaagaagagttcaatgcgttagtggcgcaaaagaaactggagctgcagaaactgtttgccgcctatgcgcgagctgataccgatattctgatggggcagcggatgcgttcgttgcaaaatcaggttgtcgatatcgcgccggagcaatatcagaaactgcgccaggacttccttaacagcctgacggtggagatgttaaatcaggatctgcgtcagcagttgtcgaacgatatggcgttaatactgctgcagccgaaaggcgagccggaatttaacatgaaagcgttgcaggcggcctgggatcaaatcatgaccccatctactgccgctgcgaccacctctgtcgccacggatgacgttcatcctgaagtgacggatattccacccgcacagtaa

SEQ ID NO: 261200 - DNA, 930 bp, Klebsiella pneumoniae
atgtccaaaaagattgccgtgattggcgaatgcatgattgagctttccgagaaaggcgcggacgttaagcgcggtttcggcggcgataccctgaacacttccgtctatatcgcccgtcaggtcgatcctgcggcattaaccgttcattacgtaacggcgctgggaacggacagttttagccagcagatgctggacgcctggcacggcgagaacgttgatacttccctgacccaacggatggaaaaccgtctgccgggcctttactacattgaaaccgacagcaccggcgaacgtacgttctactactggcgtaacgaagccgccgccaaattctggctggagagcgagcaatctgcggcgatttgcgaagagctggcgaatttcgattatctctacctgagcgggattagcctggcgatcttaagcccgaccagccgcgagaaactgctttctttgttgcgcgaatgccgcgccaacggcggaaaagtgattttcgacaataactatcgtccgcgcctgtgggccagcaaagaagagacacagcaggtgtaccagcaaatgctggaatgcacggatatcgccttcctgacgctggacgacgaagacgcgctgtggggtcaacagccggtggaagacgtcattgcgcgcacccataacgcgggcgtgaaagaagtggtggtgaaacgcggggcggattcttgcctggtgtccattgctggcgaagggttagtggatgttccggcggtgaaactgccgaaagaaaaagtgatcgataccaccgcagctggcgactctttcagtgccggttatctggcggtacgtttgacgggcggcagtgcggaaaacgcggcgaaacgcgggcacctgaccgcaagtaccgttattcagtatcgcggcgcgattatcccgcgtgaggcgatgccggcgtaa

SEQ ID NO: 261201 - DNA, 768 bp, Klebsiella pneumoniae
atgataaggcaggttatccagcgaataagcaaccctgaagcaagcatcgagagcttgcaggaacggcgtttttggttgcagtgtgagcgtgcttacacctggcagccgatctatcaaacatgcgggcggttaatggccgtggagctattaacggtggtcacgcatcccttgaacccttcgcaacgcctgtcgccggatcgctattttactgaaatcaccgtcagccatcggatggaggttgtgaaagagcagattgatttgctggcgcaaaaagccgacttctttatagagcacggcctgctggcatcggtcaatattgatggacctacgctcatcgccctgcgtcagcaaccaaaaatcctgcgccagattgagcgtcttccctggctgcgtttcgaactggtggagcatatccgtctgccgaaagattcaacctttgcctcgatgtgtgaatttggcccgctgtggctggatgattttggcaccgggatggcaaatttctctgcactaagtgaagtgcgttatgactacatcaaaatcgcgcgagaactgtttgtgatgctgcgtcagtcgccggaaggccgcacactcttttctcagcttttacatctaatgaatcgctattgtcgcggggtgatcgtcgagggcgtagaaacgccggaagagtggcgcgatgtacagaactcgcccgcattcgccgcacaaggctggtttctttcacgcccggcaccgatagaaacgctgaatacggcggttctggcgctataa

SEQ ID NO: 261202 - DNA, 2076 bp, Klebsiella pneumoniae
atgaggaagcgaacgatgagcaaggcaggcaaaataaccgctgcgatttcaggggctttcttgttgttgattgtcgtggcgatcattttgattgcaacttttgactggaatcgactcaaaccgaccatcaaccagaaagtctctgcggagttgaatcgtccgttcgctatccgtggcgatctgggcgtggtgtgggagcgacaaaaacaagaaactggctggcgcagctgggtgccgtggccccatatacacgcggaagacatcattctcggcaacccaccagatattcccgaagtcacaatggtgcatttgccacgcgtagaggcaacgctggccccgctggcgctgctgaccaaaacggtctggctaccgtggatcaaactggaaaagcccgacgcacgcctgattcgcctctctgaaaagaacaataactggacgtttaatcttgccaacgatggcaacaaagacgcgaatgcaaagccgtcggcatggtcgtttcggctggataatattcttttcgatcaagggcggatcgccattgatgacaaagtaagcaaagcggatctggaaatttttgtcgatccgttaggcaagccgctgccgttcagcgaagttactggatcgaaaggtaaagcggataaagaaaaggtgggtgattacgtttttggcctgaaggcgcagggacgttataacggtgaaccgctcactggtacgggaaaaataggcggtatgctggcgctgcgtggcgaaggtacaccatttccggtacaggctgattttcgctctggtaacacccgtgttgcttttgatggcgttgtgaatgacccaatgaagatgggtggtgtcgatttacggcttaaattttctggcgattcgctgggtgatctctatgaactgacgggcgttctgctgcccgataccccgccgtttgaaacggatggtcggctggtagcgaaaatcgacactgaaaaatcgtcggtctttgattatcgcggttttaatgggcgcattggcgatagcgatatccacggttctctggtctacaccaccggcaagccacgaccaaaactggaaggtgatgtcgagtcgcggcaattgcggctggcggacttgggaccgttgattggcgttgattccgggaaaggagctgaaaagtcgaaacggtctgaacagaagaagggtgaaaaaagcgttcagcctgcgggcaaagtgctgccttatgaccgcttcgaaaccgataaatgggacgtcatggatgccgatgttcgcttcaaagggcggcgcattgagcatggcagtagcctgccgattagcgatctttctactcatatcatcctcaaaaatgctgacctgcgcctgcaaccgctgaaatttggcatggcgggcggcagcattgcggcgaatattcatctggaaggtgataaaaaaccgatgcaagggcgggcagatattcaggctcgtcggctgaaactgaaagaactgatgcccgatgtagaactgatgcagaagacgctgggggaaatgaacggtgacgcggaactacgcggtagcggtaactcggtggcggcgcttttaggcaacagtaacggcaacctgaaactgttgatgaatgacgggctggtgagccgcaacctgatggagattgtcgggctgaatgtcggtaactacattgtcggtgcgatatttggtgacgatgaggtgcgggtgaactgtgcggcggcgaatctggatattgccaacggcgtggcgcgtccgcagatttttgcttttgatactgagaatgcgttgatcaatgttaccggcacggcaagttttgcttcggagcaactggatttgactatcgatccagaaagtaaagggattcggattatcacgctgcgttcgccgctgtatgtgcgtgggacatttaaaaatccgcaggctggggtgaaagccgggccgttgattgcccgtggtgctgttgcggcggcactggcaacgctggttacgccagcggcggcgttactggcgctgatctcaccttccgaaggggaggctaatcagtgccggacaattttgtcgcagatgaagaagtga

SEQ ID NO: 261203 - DNA, 972 bp, Klebsiella pneumoniae
atgttagaaaaaacaataaacaatgcgatatgcgcgttactgtttcgctgtgaacaacaatcggtcaaagaaatggataaaattcacgcaatgcagttgttcatcaaagtcgcggagctggaaagtttttcccgcgcggcggatttctttgctttgccaaagggaagtgtttcgcgccagatacaggcactggaacatcaacttggcacccagcttctccagcgcaccacgcggcgggtcaaactcacgccagaaggcatgacctattatcaacgggcaaaagatgtgttgagtaatctcaacgaactggacggtctgtttcaacaggatgccaccagtatcagcggtaaattacgcatcgacatcccgccaggaatcgcgaaaagcctgttactgccgcgtctgtcggagtttctctatctgcatccgggaattgagctggagctgagtagccatgaccgtccggtagatattcttcacgatggttttgattgcgtgatacgcactggcgcgtcaccggaagatggcgttatcgcccgtcccctcggcaaactgaccgtggtcaattgtgccagtccacactatctgacgcgctttggttatcctcaaagccccgacgatctgacttcgcacgcaatagtgcgttacacaccgcacctgggtgtacatccgttaggttttgaggttgccagcgttaatggcgtccagtggtttaagtctggcggcatgttgacggtaaacagtcgcgaaaactatctcgccgccggtcttgccggtctggggattattcagatcccgcgcattgccgtgcgcgaagccctgcgtgccgggaggcttattgaagtattacctggctaccgtgccgagccgctctccctttcgctgatttatccgcagcgtcgggagctttcccggcgtgtaaacctgtttatgcagtggctggctggcgtaatgaaagagcacctggactga

SEQ ID NO: 261204 - DNA, 603 bp, Klebsiella pneumoniae
atgcaaatagtcatgtttgacaggcagtcaatatttattcatggaatgaaaatcagtttacagcagcgtattccaggagtgagtattcagggggccagtcaggcagatgagttatggcaaaagctggaaagttaccctgaagccttagtgatgctcgatggcgatcaggatggtgagttttgctactggttactgcaaaaaaccgtggtgcaatttcctgaggttaaggtgttaattacggcgacggattgcaataaacggtggttacaggaagttatccattttaatgtgctggccattgtgcctcgtgattcaaccgtcgagacatttgcgttggcggtaaatagtgcggcgatggggatgatgtttctgcctggagactggcggacgacgccggaaaaggacattaaagatctcaaatcgttaagcgcccgccagcgggagattttaaccatgttagcggcgggcgaatcaaataaggagatcggcagggcgctgaatatcagtaccggaacggtaaaagcgcatctggaatccctgtatcgccgtctggaagtgaaaaatcgcacccaggcggcaatgatgttaaatatctcctcctga

SEQ ID NO: 261205 - DNA, 1650 bp, Klebsiella pneumoniae
atgctcaatcagaaaattcaaaaccctaatccagacgaactgatgatcgaggtcgatctctgctatgaactggacccgtatgaattaaaactggatgagatgatcgaggcagaaccggaacccgagatgattgaagggctgcccgcctctgatgcgctgacgcctgctgatcgctatctcgaactgttcgagcatgttcagtcggcgaaaattttccccgacagtaaaacctttcccgactgcgcacctaaaatggacccgctggatattttaatccgctaccgtaaagtgcgccgtcatcgtgattttgacttgcgcaagtttgttgaaaaccacttctggctaccggaggtctactccagcgagtatgtatcggacccgcaaaattccctgaaagagcatatcgaccagctgtggccggtgctaacccgcgaaccacaggatcacattccgtggtcttctctgctggcgctgccgcagtcatatattgtcccgggcggccgttttagcgaaacctactattgggattcctatttcaccatgctggggctggcggaaagtggtcgggaagatttgctgaaatgcatggccgataacttcgcctggatgatcgaaaactacggtcacatccccaacggcaaccgcacctattatttgagccgctcgcaaccaccggtttttgcgctgatggtggagttgtttgaagaggatggtgtacgcggtgcgcgccgctatctcgaccacctgaaaatggaatatgccttctggatggacggtgcagaatcgttgatccctaatcaggcctatcgccatgttgtgcggatgccggacggatcgctgctcaaccgttactgggacgatcgcgacacaccgcgtgacgaatcctggcttgaggacgttgaaaccgcgaaacattctggtcgcccgcccaacgaggtgtaccgcgatttacgcgcgggggcggcctccggttgggattactcttcccgctggctgcgtgatactggtcgtctggcgagcattcgtaccacccagttcatccccatcgatctgaatgccttcctgtttaaactggagagcgccatcgccaacatctcggcgctgaaaggcgagaaagagacagaagcactgttccgccagaaggccagtgcccgtcgcgatgcggtaaaccgttacctctgggatgatgaaaacggtatctaccgcgattacgactggcgacgcgaacaactggcgctgttttccgctgccgccattgtgccgctctatgtcggtatggcgaaccatgaacaggccgatcgtctggcaaacgccgtgcgcagtcggttactgacacctggcgggattctggcaagcgagtacgaaaccggtgaacagtgggataaacctaacggctgggcaccattacaatggatggcgattcagggatttaaaatgtacggcgatgaccttctgggtgatgaaatcgcgcgcagctggctgaagacggtgaatcagttctatctggaacagcacaaactgatcgagaaataccatattgccgatggtgttccccgcgaaggcggcggtggcgagtatccgttgcaggatgggtttggctggactaacggtgtggtgcgccgtttaattggtttgtacggtgaaccataa

SEQ ID NO: 261206 - DNA, 1398 bp, Klebsiella pneumoniae
atgaaaatggtctcacgtattaccgcgatcggcctggctggcgtcgcgatttgctatttagggttatctggttatgtgtggtaccacgataataaacgcagtaaacaggctgatgttcaggcatctgctgtcagtgaaaataataaggttttaggctttctccgcgaaaaaggatgcgactattgccacacgccttcggcagaattacccgcctattattatattcctggcgcgaaacagttgatggattacgacattaagcttggatataaatcttttaacctcgaggccgtgcgtgcggctctgctggctgataaacccgtttcgcaaagcgatctgaataagattgaatgggtgatgcagtatgaaaccatgccaccaacgcgttataccgcgctacactgggcgggtaaggtgagtgatgaagagcgggcggaaatactcgcctggattgcaaaacagcgcgcggaatattacgccagcaatgacactgcaccggatcatcgtaatgaaccggtgcagcccatcccgcaaaaactgcctaccgatgcgcaaaaagtggcgttgggctttgcgctgtatcacgatccccgtttatcggcggatagcaccatttcatgcgctcattgccatgcgttgaatgcggggggcgtcgatggcagaaaaacatcgattggtgttggtggcgcagtggggccgattaacgcgccgacggtatttaactcagtatttaacgttgagcagttctgggatggtcgtgcagcaacattgcaggatcaggctggtggaccgccgttgaatccgattgaaatggcgtcgaaatcctgggacgaaattattgctaagctggaaaaagatccgcagcttaaagcgcagttccttgaagtctatccgcaaggtttcagtggcgaaaatattactgatgccattgctgaatttgagaaaacattaattacgccggattccccatttgataaatggttgcgtggagatgagaatgcgctgacggcacaacagaaaaaaggctatcaattattcaaagataataaatgtgcaacttgtcatggtggtattattctcggcggacgttccttcgaaccgttggggctgaaaaaagactttaactttggtgaaattacggcggcggatattggtcgtatgaatgttactaaagaagagcgcgataaattgcgtcagaaagtacccggtttacgtaacgttgcactaacggcaccgtacttccatcgcggtgatgtgccgacgctggacggggcggtgaaactgatgttgcgctatcaggtaggcaaagagctgccgcaggaggatgtggatgatatcgtagctttcctgcacagtctgaacggggtttacacgccgtatatgcaggataaacaataa

SEQ ID NO: 261207 - DNA, 1518 bp, Klebsiella pneumoniae
atgtattgccacgcgaaactaaaaaatatatcgcaacacacggtaatctccgcgcaccttttcttacctgattattcccccatgaatcgtgattctttttatccagccatcgcctgttttccgctgttactgatgctggccgggtgtgcgcctatgcatgaaacccgccaggcgttaagccagcaaacgcccgctgtgcaagttgacaccgcattacccacggcgctgaaaaatggttggccagacagccaatggtggctggagtatcacgataatcaactcacttcattaattaataacgcactacagaacgcaccggatatgcaggtggctgaacaacgcattcaactggctgaagcccaggcgaaggcagttgccactcaggatggtccgcagctcgacttttctgcggatatggagcggcaaaaaatgtcggcagaagggttaatggggccgtttgctttgaacgatccggccgcaggtacgaccggtccgtggtacaccaacggtacttttggcttaacggcgggctggcatctcgatatctggggaaagaatcgggcggaggttactgctcgcctgggtacggttaaagcacgggcggcggaacgcgagcaaacccgccaattgctggctggcagcgtagcccgtctgtactgggagtggcaaacccaggcggcgttaaacactgtcttacagcaaatcgaaaaagagcagaacaccattatcgccaccgatcgccagctatatcagaacgggattacttcttcagttgaaggtgtggaaaccgatattaatgccagcaaaacccggcagcagctcaacgatgtcgcggggaaaatgaaaattattgaggcacggttaagcgcacttacaaatcaccagacaaaggcattgaagcttaatccggtcgcgttgccgaaagtggcaagccagcttcctgatgaactggggtactccttactggcccggcgggcagatttgcaggcggcgcactggtacgttgagtcatcgttaagcactattgatgcggcaaaagcggcattttatcctgacatcaacctgatggccttcctgcaacaggatgcgttgcacttaagcgatctgttccgtcattccgcgcagcaaatgggcgttacggcaggcctgacgctacccattttcgatagtggccgtcttaacgccaacctcgatatcgcaaaagccgaaagcaacttgtctatcgccagctacaacaaagcggtggttgaagcggtgaatgacgtggcgcgggcagctagtcaggttcagacactggcggagaaaaaccagcatcaggcgcaaattgagcgcgatgccttgcgtgtagtaggtcttgcgcaggcgcgctttaacgcgggcatcattgcgggttcccgggtcagcgaagccagaatcccggcgctgcgtgagcgggccaatggcctgttattgcaagggcagtggctggatgcttccattcaactcactggtgcgttgggcgggggttacaaacgttga

SEQ ID NO: 261208 - DNA, 762 bp, Klebsiella pneumoniae
atggcacaggtcgcgattattaccgcctccgattcggggatcggcaaagagtgcgcgttattactggcgcagcagggggttgatattggtattacctggcactctgatgaagaaggggcaaaagataccgcgcgtgaggtggttagccacggcgtacgtgcggagatcgtgcaactggatctcggcaatctgccagaaggtgtgcaggcgctggagaaactcattcaacggctggggcgtattgatgtgctggtgaataatgcgggcgcaatgaccaaagcgccgtttcttgatatggctttcgatgagtggcgcaagatttttaccgttgatgtcgatggtgcatttttatgctcgcaaattgctgcccgccagatggtgaaacaagggcagggtggtcgcatcatcaacattacgtcggtgcatgaacatacgccgttgccggatgccagcgcctacacagccgctaaacatgcgctcggcgggttaaccaaagcgatggcgctggagctggtcaggcataagattttggtgaatgcggttgcacctggggcgatcgccacgccaatgaacggcatggatgatggcgacgtgaagcccggcgcggagccttcgattcccttgcggcgttttggcgcaacgcatgagattgccagcctggtggtgtggctttgttcggagggcgcaaattacaccactgggcagtcgttgatagtggatggcggctttatgctggcgaatccgcagttcaacccagaatag

SEQ ID NO: 261209 - DNA, 579 bp, Klebsiella pneumoniae
atggatctcaatacactcatctcacaatatggttatgccgcgctggtgatcggtagcctggcggaaggtgaaaccgtgactttgctgggaggcgttgcggcacatcaggggctattaaagttcccgctggtggtactttctgtggcgcttggcggcatgattggcgaccaggtgctttatctgtgcgggcggcgctttggcggcaagctattacgccgtttctcgaaacatcaggataaaattgagcgggcgcagaaacttatccaacgccatccgtatctgtttgtcattggtacgcgttttatgtatggctttagggtgattggcccgacgctgattggtgccagccagctgccgccgaaaatctttctgccactgaatatccttggcgcatttgcctgggcgttgatttttaccactatcggttacgctggtggtcaggtgattgcgccgtggttgcacaatctcgaccagcatttgaagcactgggtctggttgattctggtcgtggttctggtggtaggcgtgcgctggtggctgaaacgacgcgggaagaaaaagccggataatcaggcgtaa

SEQ ID NO: 261210 - DNA, 588 bp, Klebsiella pneumoniae
atgagccatgtctggggactgttttcccatcccgatcgtgaaatgcaggtgattaatcgcgaaaacgaaacgatttctcatcactacacccaccacgttttgctgatggcggcgattccggtgatttgcgccttcattggcaccacacaaattggctggaattttggcgatggcactatcctgaagttatcctggtttaccggactggcgctggctgtcttgttttatggcgttatgctggctggggtcgcggtgatggggcgggtcatctggtggatggcgcgcaattatccgcagcgtccgtcacttgcgcactgcatggtctttgcgggctacgttgcaactccgctgtttttaagcggtctggtggcgctttatccgctggtctggttgtgtgcgctggtcggcacggtggcgctgttttacaccggctacctgctttacctcggtattccgagcttcctgaatatcaacaaagaggatggacttagcttctccagttcgacgctggcgattggcgtgctggtactggaagtgctgctcgcccttaccgttatactatggggctacggttatcgtttgttctag

SEQ ID NO: 261211 - DNA, 933 bp, Klebsiella pneumoniae
atgccgaaatttcgagtttctttatttagcctggccctgatgctggctgtgccttttgcaccgcaggccgttgcgaaaacggcagccgctaccaccgcttcacaaccggaaattgcctccggtagcgcgatgattgttgatctgaataccaacaaagtgatctattcgaaccacccggatctggtgcgtccgattgcgtctatcagcaaattaatgaccgcgatggtcgtgctggatgcacgactgccgctggatgaaaaactaaaagtggatatcagccagacgccggagatgaaaggggtctattcgcgcgtacgactgaacagcgaaatcagccgtaaagatatgctgttgctggcgctgatgtcttcagaaaaccgcgcggcggcaagccttgcgcaccattatcccggtggttacaaagcctttattaaggcgatgaatgcgaaagcgaaatcgctcggaatgaacaacacgcgctttgttgaaccgaccggactatcggtgcataacgtttcaactgcccgtgacttaaccaaactgctcattgccagcaaacaatatccgttgatcgggcagttaagtactacccgggaagatatggcaaccttctctaacccgacgtatacgctgccgttccgcaatactaaccatctggtgtatcgcgataactggaatatccagctaaccaaaaccggctttaccaatgcggcgggccattgtctggtgatgcgtacggttatcaataataaaccggtggcgctggtagtgatggatgcgtttggcaaatatacccattttgccgatgccagccgcctgcgtacctggattgaaaccggtaaagtgatgcctgttccggcagcagcgttgagctataaaaaacaaaaagccgcccaaatggcggcggcggggcagacggcacagaacgattaa

SEQ ID NO: 261212 - DNA, 1716 bp, Klebsiella pneumoniae
atgtcttccatgacaacaactgataataaagcctttttgaatgaacttgcccgactggtgggttcttcacacctgctcaccgatcccgcaaaaacggcccgctatcgcaagggcttccgttctggtcagggcgatgcactggctgtcgttttccctggctcactactggaattgtggcgggtgctgaaagcctgcgtcaccgccgacaaaattattctgatgcaggcagccaatacaggtctgaccgaaggctcgacgccaaacggtaacgactatgatcgcgatatcgtgatcatcagcaccctgcgtctcgacaagctgcacgttcttggcaagggcgaacaggtgctggcctatccgggcaccacgctctattcgctggaaaaagccctcaaaccgctgggacgcgaaccgcactcggtgattggatcatcgtgtataggcgcatcggtcatcggcggtatctgtaataactctggtggttcgctggtgcaacgtggcccggcgtataccgaaatgtcgttattcgcgcgtataaatgaagatggcaagctgacgctggttaaccatctggggattgatctgggcgaaacgccggagcagatccttagcaagctggatgacgatcgcatcaaagatgacgatgtgcgtcacgatggtcgtcacgcccacgattatgactatgtccaccgcgttcgtgatattgaagccgacacgcctgcacgttataacgccgatccggatcggttatttgaatcttctggttgcgccgggaagctggccgtctttgcggtacgtcttgataccttcgaagcggaaaaaaatcagcaggtgttttatatcggcaccaaccagccggaagtactgaccgaaatccgccgtcatattctggctaatttcgaaaatctgccggttgccggggaatatatgcaccgggatatctacgatattgcggaaaaatacggcaaagacaccttcctgatgattgataagttaggcaccgacaagatgccgttcttctttaatctcaaggggcgcaccgatgcgatgctggagaaagtgaaattcttccgtccgcattttaccgaccgtgcgatgcaaaaattcggtcacctgttccccagccatttaccgccgcgcatgaaaaactggcgcgataaatacgagcatcatctgctgttaaaaatggcgggcgatggcgtcggtgaagccaaatcgtggctggtggattatttcaaacaggccgaaggcgatttctttgtctgtacgccggaggaaggtagcaaagcgtttttacaccgtttcgccgctgcgggcgcagcaattcgttatcaggcggtgcattccgatgaagtcgaagacattctggcgctggatatcgctctgcggcgtaacgacaccgagtggtatgagcatttaccgccggagatcgacagccagctggtgcacaagctctattacggccattttatgtgctatgtcttccatcaggattacatcgttaaaaaaggcgtggatgtgcatgcgttgaaagaacagatgctggagctgctacagcagcgcggcgcgcaataccctgccgaacataacgtcggtcatttgtataaagcaccggagacgttgcagaagttttatcgcgagaacgatccgaccaacagtatgaatccggggatcggtaaaaccagtaagcggaaaaactggcaggaagtggagtaa

SEQ ID NO: 261213 - DNA, 918 bp, Klebsiella pneumoniae
atgccactctcaaagctctgggcaggttcattggttttgttggcagccgtgagcctgccgctacaggcggcttcccccgttaaggtcggttcaaaaatcgataccgaaggcgcgctgctcggcaatatcattttgcaggtgctggaaagtcacggtgttcctacggtaaataaagtgcaactgggaacgactcccgtggtgcgcggggcgattacttccggtgaactggatatctatccggaatataccggcaatggcgcgtttttctttaaagatgaaaacgatgcggcatggaaaaatgccgggcaaggctacgagaaagtcaaaaaactcgatgcagagcaaaacaagttaatctggctgacgcccgcgcctgcaaataacacctggactatcgccgtgcgtcaggatgtggcagagaaaaacaaactcacttcgcttgccgacctgagtcgttatctgaaagagggcggcaccttcaaactggcggcctcggcagaatttattgaacgcgccgatgcgttacccgcgtttgaaaaagcctatggctttaagctcggtcaggatcagttgctgtcactggctggtggcgacacggcggtgacgatcaaagccgctgcccagcaaacctctggcgttaatgcggcgatggcttacggcactgacggcccggtcgcggcgctggggctgcaaaccttaagtgatccgcaaggcgtgcaacctatctacgcgcctgcaccagtggtgcgtgagtcggtgttgaaagagtatccacaaatggcacagtggctacagccagtcttcgccagcctcgatgaaaaaacattgcagcaactgaatgccagcattgctgtggaaggactggatgccaaaaaagtggctgccgactacctgaaacaaaaagggtggacgaagtaa

SEQ ID NO: 261214 - DNA, 1158 bp, Klebsiella pneumoniae
gtgacttatttccgtattaatcctgttctggcgctgctgctgttgctgacggcaatcgcagcggcgctgccatttatcagttacgcgcctaatcgtttagtttcgggtgaggggcgtcatctctggcagctgtggccgcaaacgatctggatgctggtgggcgttggttgcgcctggatgacagcctgttttattcccgctaaaaaaggcagcatttttgcactcattctggcgcaattcgtcttcgtattgctggtgtggggagcaggaaaggcggcgacacaactggcacaaaatggcagtgcgctggcgcgtaccagcctcggcagtggtttctggctggctgcggcgctggcattgctggcctgtagcgatgccatccgccgaatctccacgcatccgctgtggcgctggttgttgcatatgcagattgccattattccgctgtggttgctgtactccggcacgcttaacgatctctcgctaatgaaagaatacgccaaccgtcaggatgtgtttgacgacgcgctggcacaacatctgacgttgctgtttggtgcggtgctgcctgcgttagtgattggtgtgccgttgggcgtctggtgctacttttccactgcgcggcagggggcgattttttcgctactcaatgtcattcagaccgtgccttcggtggcgctctttggcttgttgattgcgccgcttgccggactggttacggcctttccgtggctgggtaagctcggcatagcaggaaccggaatgacacccgcactgattgcgctggtgctctatgccttgctgccgctggtgcgcggcgtggtagtcggcttgaaccagatcccgcgcgatgtgctggagagcgccagagcgatgggcatgagcggggcgcagcgattcctgcatgttcagttaccgctggcgttaccggtatttctgcgtagcctgcgggtggtgatggtgcaaaccgtcggcatggcggtgattgcggcgttaatcggcgcaggcggttttggtgcgctggttttccaggggctgctaagcagtgccattgatttagtgttgctgggggtgatcccggtaattgttctggcggtgctgatcgatgcgctgttcgatttgcttatcgcactgctgaaggtgaaacgtaatgattga

SEQ ID NO: 261215 - DNA, 927 bp, Klebsiella pneumoniae
atgattgaatttagccatgtcagcaaactgttcggcgcacaaaaagccgttaacgatctcaatctcaattttcaggaggggagtttttcggtgctgattggtacatcaggctccggtaaatccaccaccctgaaaatgattaaccgcctggtggagcatgacagcggcgtgatccgctttgccggagaagaaattcgctcgctgccagtgctggagttgcgccgccggatgggctatgccattcaatctattggcctgtttccccactggagcgtggcgcaaaatattgccaccgtgccgcaattacaaaaatggtcgcgggcgcggattgacgatcgtatcgacgaattaatggcgctactggggctggagccaaatttgcgtgagcgttatccgcatcagctttctggcggtcagcagcaacgtgtgggagtggcgcgcgcactggctgccgatccgcaagtcttactgatggatgaaccttttggcgcgctggacccggtaacgcgcggcgcgttgcaacaagagatgacgcgcatacaccgtttgctggggcgtaccattgtgctggtcactcatgatattgatgaggcgctacgactggcagaacatctggtgttgatggatcacggtgaagtggtgcagcagggcaatccgctgacgatgctgactcgtccggcgaatgattttgtccgccagttttttgggcatagtgaactgggtgtccgcctgctttcgttacgtagcgtggcggattacgtgcgtcgcgaagaacgggcagaaggtgaggcgctggcagaagagatgactctacgcgatgcgctctccctgtttgtcgcgcggggatgcgaggtgctgccggtggtgaacacgcagggccagccttgcggcacgctgcattttcaggatctgctggtggaggcgtaa

SEQ ID NO: 261216 - DNA, 732 bp, Klebsiella pneumoniae
atgaagatgttgcgcgatccgctgttctggctcattgctctgtttgtggcgctgattttctggctgccttacagccagccgctgtttgctgccttgttcccacaactgccacgacccgtttatcagcaagaaagttttgctgctctggcactggctcatttctggctggtgggaatttcgagtttgtttgcggtgatcattggcactggtgcaggaattattgttactcgcccgtggggcgcggaatttcgcccactggtggaaactattgccgccgttggacagacttttccgcccgtcgcggtgctggcgattgccgttccggtgattgggtttggtctgcaacccgcgattatcgccttgatcctttatggtgtgctgcccgtcctgcaggcaacacttgccgggctgggagcgattgatgccagcgtgacagaagttgcgaaaggtatgggaatgagccgtggtcagcgactgcgtaaggtcgagctaccgctggcggctccggtgattctggcgggcgtgcgaacttcggtgattatcaacattggtacggcgacgatcgcctcaacggtaggggccagcacgctgggtacgccgatcatcatcgggcttagcggatttaataccgcgtatgtgatccagggggcgttactggtggcactggcggcgatcattgcagaccgcctgtttgaaaggctggtgcaggcgcttagccagcacgcaaaataa

SEQ ID NO: 261217 - DNA, 732 bp, Klebsiella pneumoniae
atggcgctttacacaattggtgaagtggcgttgctttgtgatattaaccctgtcacgttacgcgcgtggcagaggcgttacggattgctgaaaccgcaacggacagacggcggccatcggctgttcaacgatgccgatattgaccggatccgcgagatcaaacgctggatcgacaacggcgtgcaggtcagcaaagttaaaatgctgctcagtaatgaaaatgttgatgtgcagaacggctggcgcgatcagcaagaaacattactgacttacctgcaaagcggcaatctgcatagcctgcgaacgtggatcaaagagcgcggtcaggattaccccgcccagacgctcaccacacatctgtttattcctctgcgccgacgacttcagtgccaacaaccgactctccaggcgctgctggcgatcctcgacggcgtactgatcaactacatcgccatttgcctggcttcggcacgtaaaaaacagggtaaagatgcgttggtggttggctggaatattcatgataccacccgtctgtggctggagggctggattgccagtcaacaaggatggcgcattgatgtcctcgcccactcgctcaatcaactacgccctgaactgttcgaaggccgtacattgctggtgtggtgcggtgaaaatcgaacctccgcccaacagcagcaactcaccagttggcaggaacaaggccatgatattttcccactcggcatttaa

SEQ ID NO: 261218 - DNA, 1686 bp, Klebsiella pneumoniae
atgtacgattttaatctggtgttgctgctgcttcagcagatgtgcgtttttttagtcattgcgtggttaatgagtaaaacgccattattcataccgttaatgcaggtcacggttcgtctgccgcataaatttctctgctacatcgtcttttccatcttctgcatcatgggcacctggtttgggttgcacattgacgattctattgccaatacccgtgcgataggcgcggtaatgggcggcttactcggcggtccggtcgtcggtgggctggttggtctgaccggcgggttacatcgatattcgatggggggcatgaccgcgctaagttgcatgatctcgaccatcgttgaagggttgctcggcggcctggtacacagcatcctgatccgtcgcgggcgcactgataaagtctttaaccccattaccgccggtgccgtcacgttcgtcgctgaaatggtgcaaatgttgatcatcctggcaatcgcccgaccttatgaagatgcggtgcgtctggtgagtaatattgctgcgccaatgatggtcaccaataccgtcggcgcggcgctgtttatgcgtatattgctcgataaacgcgcgatgtttgaaaaatacacttcggctttttctgccactgcgctaaaagtggctgcctcgacggaaggcattttgcgccaggggtttaacgaagtgaacagcatgaaagtggcacaggtgctgtatcaggagctggatattggtgcagtcgcgattaccgatcgagagaaattgctggcctttaccggaattggtgacgatcaccatttacccggcaaaccgatttcttcgacttacaccttaaaagcgattgaaaccggtgaagtggtctacgctgatggcaacgaagtaccttatcgttgctctttgcatccgcaatgcaaactggggtcgacgctggtaattccgttgcgtggtgaaaatcagcgggtgatgggtaccatcaaattgtatgaagccaaaaaccgtttattcagttcaatcaatcgcacgctgggtgaggggattgcgcaactgctttcggcgcagatcctcgccgggcaatatgagcggcaaaaagcgatgctcacccagtcagagatcaaactgcttcacgcccaggtgaacccccattttttgtttaatgcgcttaacaccattaaagcggtgatccgccgcgacagcgaacaggccagccagctggtgcagtatctttccacttttttccgcaaaaacttaaagcggccttcggagtttgttactctcgccgacgaaattgaacatgtgaacgcttatctgcaaattgaaaaggcgcgcttccagtcgcggttgcaggtcaacattgctattccgcaagaattatcccagcagcaattgcccgcgtttaccctgcaaccgatagtggaaaacgctattaaacatgggacatcacaactgctggatacagggcgagtggcaatcagcgcccgacgtgaggggcaacatttgatgctggagatcgaagacaacgccggtttgtatcaaccggtaaccaatgccagtgggctggggatgaatctggtggataagcgtttacgtgaacggtttggcgatgactatgggataagcgtcgcctgtgagcctgatagttacacccgaataacgttacgactaccatggagggacgaggcatga

SEQ ID NO: 261219 - DNA, 720 bp, Klebsiella pneumoniae
atgattaaagtcttaattgtcgatgatgagccgttagcacgggagaacctgcgcgtatttttgcaggagcagagcgatattgaaatcgttggagagtgttcaaacgccgtggaagggatcggcgcggtgcataaactgcgcccggatgtgctgtttcttgatatccagatgccgcgcatcagtggtctggaaatggtggggatgctcgacccggaacatcgtccgtatatcgtttttctcaccgcgtttgatgaatacgccattaaagcctttgaagaacatgcttttgattatctgctgaagccaattgatgaagcgcgactggagaaaacgctggcgcgattgcgtctggagcgcagcaagcaggatgtttcgctgttaccggaaaatcaacaggcgctgaaatttatcccttgtacggggcatagtcggatttatttgctgcaaatgaaagatgtagcatttgtcagcagtcggatgagcggtgtctacgttaccagtcacgaagggaaagagggctttaccgaattgacattacgtaccctggagagtcgtacaccactactacgctgccatcgtcagtatctggttaacctcgcgcatttacaggagattcgtctggaagataacggccaggccgagttgattttgcgtaatggcttaaccgtgccggtcagccgtcgttatctgaaaagcttaaaagaggcgattggcctgtaa

SEQ ID NO: 261220 - DNA, 471 bp, Klebsiella pneumoniae
atgctaagtaacgatattctgcgcagcgtgcgctacattttgaaagccaataataatgacctggtgcgtattctggcgctgggtaatgtcgaagccaccacggaacagatcgccgtctggctacgtaaagaagacgaagagggttttcagcgttgtccggacattgttttgtcttccttcctcaatggcctgatttatgaaaaacgcggcaaggatgagtctgctccggcactggagccggaacgtcgcattaataacaacatcgtgctgaaaaaattacgcatcgcgttttcgctgaagaccgatgacattctggcgatcctcaccgaacagcagttccgcgtttcgatgccggaaattacggcgatgatgcgtgcaccggatcataaaaacttccgcgaatgcggcgatcaatttttacgttattttctgcgtggactggcagcgcgccagcatgtgaagaaaagctaa

SEQ ID NO: 261221 - DNA, 462 bp, Klebsiella pneumoniae
atgaaggctttcaataagctgttttccctcgttgttgcatctgttctggttttctctcttgctggctgcggtgacaaagaagaatcgaaaaaattcagcgccaatctgaacggtactgaaattgccattacctatgtctacaaaggtgacaaggtgcttaagcaatcttctgaaaccaaaattcaatttgcctccattggtgcaaccaccaaagaagatgctgccaagacacttgagccgttaagcgccaaatacaaaaacatcgcgggtgttgaagaaaaattaacctataccgatacctacgcgcaggaaaacgtgactatcgatatggaaaaagtggatttcaaagccctgcagggtatttcaggaatcaacgtttctgctgaagatgccaaaaaaggtatcactatggcgcaaatggaactggtgatgaaagccgctggttttaaagaagtgaaataa

SEQ ID NO: 261222 - DNA, 2001 bp, Klebsiella pneumoniae
atgaattcactacgtccggaattattagaactgacaccgcaggccctgacagcgttaagcaatgccggttttgttaagcgcagtcttaaggaactggaaaatggcaacgtcccggagatcagccatgagaacggcgctttaatcgccaccttcagtgacggtgtccgtacccagctggcgaacggtcaggcactgaaagaggctcagtgcagctgcggggccagcggcatgtgccgccatcgcgtgatgctggttttaagttatcagcgactttgcgccaccacccagactacggaaaaagaagaagagtgggatccggcaatctggctggaagaactggctaccctgcccgatgccacccgcaaacgcgcacaggcactggtcgctaaaggcatcaccattgagttgttctgtacgccgagcgaaattccctctgcccgcttaccgatgagcgatgtacgtttttattcccgcagcagcattcgtttcgctcgctgtgattgtattgaaggaacactttgcgaacatgtcgtactggcagtacaggcctttgtccaggccaaagcgcagcaagcggaatttactcatttaatctggcagatgcgcagcgaacacgtcacatcatctgacgatccgtttgccaacgatgagggggacgcgtgtcgtcaatatgttcagcaattaagccaggcgttatggcttggcggcatcagccagccgcttattcattacgaggctgctttcagccgcgcgcagcaagcggcggaacgctgcaactggcgctgggtgagtgaatcgctacggcaactgcgcgccagcgttgatgccttccacgcccgcgccagccactatcatgccggagaatgcttacgtcagcttgcggcattaaacaatcgattaaattgtgcacaagagatggcccggcgcgacagtgttggtgaagttcctcccatgccgtggcgcacggtcgttggcgctggcattgccggagaagcaaagcttgatcatctgcggctggtgtctttaggtatgcgttgctggcaggatattgagcagtatggtttacgcatctggtttaccgatcccgacaccggcagtattttgcatctttcgcgtagttggccgagaagcgaacaggaaaactcaccggcagcgacgcgtcggctgtttagttttcaggctggcgcactggctggtgggcaaattgtttcacaagcagcaaaacgcagtgccgatggcgagctgctgttagctacccgcaaccgcttgagtagtgttgttccactgtcgccagacgcctggcaaatgttgagtgcgccgttgcgccagccgggcattgtggctttgcgtgaatatttacgccagcgtccccccgcctgcatacggcctcttaatcaggtggataacttatttattctgccagtcgctgagtgtatttcactcggttgggatagcagccgccagacgctggacgcgcaggtaatcagcggcgaaggtgaagataatctgctgacgttatcccttccggcatctgcctgttctccttttgccgttgaacgcatggcggcgcttttgcaacaaacagacgaccccgtgagtctggtttctggctttgtcagctttgtagaggggcaattgacactggaaccacgggtaatgatgaccaaaacccgcgcctgggcgctggacgcagaaactgcgcctgtggcaccgctaccttctgccagcgttttgcctgtgccgtctaccgctcatcagttgctgatgcgctgccaggcgttacttattcaactgctccataacggctggcgctatcaggaacagagtgctattggtcaggcagagttgctggcgaatgacctcaccgcggtggttttttatcggctggcacatgtgttggcacaatttcgtaatacagaaagcgaggcacgggtagaagcaatgaataacggtgttttactttgcgaacaattattccccatgcttcagcaacaaggatga

SEQ ID NO: 261223 - DNA, 1137 bp, Klebsiella pneumoniae
atgtctgaactgaacgatcttctgaccacccgtgagctacaacgctggcgattaattcttggcgaagcggcagaaacgaccctttgtgggctggatgacaatgcccggcagatagaccacgcgctggagtggctgtatgggcgcgatcctgaacggctccagcgtggtgaacgctccggtggattaggttgctcaaatctcaccacccctgagtggatcaacagtattcacacgctgtttccgcaacaggtgatcgagcggctggaaagcgatgccgtgctgcgctatggcattgaagatgtggtgacgaatctcgacgtactggaacgtatgcagccttctgaaagcctgctacgcgccgttttgcacaccaaacatctgatgaatcccgaagtgctggctgccgctcgccggatagtgcgccaggttgttgaagagattatggcgcgactggcaaaggaagttcgccaggctttttctggtgtccgcgatcgccgccgtcgctcatttattccactggcgcgtaatttcgatttcaaaagtacgctgcgtgccaacctgcaacactggcatccgcaacacggcaagttgtatatcgaatccccccgctttaacagccgcattaagcgccatagcgatcaatggcaactggtcttactggttgatcaaagcggatcgatggttgactcggtgatccactcagcggtgatggcggcctgtttatggcagttacccggtattcgtacccatctggtggcgtttgacaccagcgtggttgatctcacggcagacgttgccgatccggtagagttattaatgaaagtgcaattaggcggcggaaccaatatcgccagtgccatggaatatggtcggcaacttattgaacaaccagcgaaaagcgtcattatcctcgtgagcgatttttacgaagggggttcatcatcattactgacgcatcaggtgaaaaagtgtgtccagagcggcatcaaagtgctgggactggcggcgctcgatagcaccgcaacaccttgctatgaccacgatacggcccaggcgctggttaatgtcggcgcacaaatagccgccatgacaccgggcgagctggcatcatggcttgcggagaatcttcagtcatga

SEQ ID NO: 261224 - DNA, 1527 bp, Klebsiella pneumoniae
atgcctgccccggtctggcaaaactggtgctggcagtggggcctacagcaggccggtgaacaactgctaaaaactatccttacccgtttgcgccagcacaaattgcccgcttctaccgctgatatggctgccgctcatctgcatgcgatggcgctggcacagttgcgcggtcatacactaccgttacgcactgactggctggatgccatagcaggctcgctgattaaagaagccttgaacgcgccgttgccgtggagctatcgcggcgttattcatcccgataccgatccgattctgctaacgttgatagacacattagcgggtgacggattcggtaaacttgccccttctacgccacaaccgcctctgccaaaagatgtcacctgcgaactggaacgtaccggaatctctcttccggcggagcttaccttaaatcgctttacccccgatggactggcgcaaagtcaggtgttacatcggttggcaatactggagatcccaggggttgtgcgccagcagggaagtacactgtcacttgcaggcaacggtgaagaatgctggaaattaacccgcccgcttagccagcatgcggcattgattgaggccgcctgctttggtgccacactccaggaagccgcacgccataaattagaagccgatatgctggacgcgggtggaatcagcatcatcaccacatgtcttagccaggcggcgttagcgggtctggcgtctttcagtcaacaattactggagcaacttacattattaatcgcccaggaaaatcaatttgccgaaatgggccaggcgctggaagtgctatatgccttatggcggttagatgaaatcagcggtatgcaaggcgcgcagatattgcagacgacgttatgcgcggctatcgatcgcacactctggctgtgtgaatccaacggcaaaccggaggaaaaggagtttcacgctcacctgcatagctggcaggcgctttgccatatcctgcgcgatctacatagcggcgttaatttacccggcgtttcgctttctgcggcggtagccttactggagcgccgcagtcaggcgattcatgccccggcgctggatcgcggcgcggctcttggcgcactaatgcgtctggaacatcccaacgccagtgccgaagcggcgctgacaatgctggcgcaattatccccggcacaatccggcgaagcgctgcacggtttgctggcgctggcccgccatcaactggcctgtcagccggcatttatcgccggtttcagtagtcatttaaatcaactgagtaacgacgattttattaacgccctgcccgatttacgcgcggcgatggcctggctaccaccacgagaacgcgggacgctggcgcatcaggtgtttgagcattatcaactggcgcaacttcccgtttcggcactgcaaatgccgttgcattgtccaccgcaagccattgcacatcatcaacaactcgaacagcaggcactggcatcgctgcaacactggggagttttccatgtctga

SEQ ID NO: 261225 - DNA, 672 bp, Klebsiella pneumoniae; identical to SEQ ID NO: 9451

SEQ ID NO: 261226 - DNA, 456 bp, Klebsiella pneumoniae; identical to SEQ ID NO: 9452

SEQ ID NO: 261227 - DNA, 321 bp, Klebsiella pneumoniae
atgatcgtgcaaaaagagctggttgctatttacgattatgaggtccctgtacctgaagatccgttttccttcagacttgagatccataaatgctctgaattatttacaggttccgtctaccgactggagcgattccggctacatccaacatttcatcaacgtgatcgagaggatgtcgacccgctaataaatgatgcgttgatttatataagagatgagtttattgatgagcgaaaattacggggcgaatcaccagaaacggtaatagccatttttaatcgcgaactacagaatatattcaaccaagaaatagaaaaatag

SEQ ID NO: 261228 - DNA, 3633 bp, Klebsiella pneumoniae
atggacaaggaattaccgtggctggcggataacgcccaagtggaactgaaatataaaaaaggcaaaacgccgctcagccatcgcagttggccgggcgaaccggtgcctgttatcactgaaagcctcatccagacactgggtgatgaattgctacaaaaagctgagaagaaaaaaaacattgtctggcgttatgaaaatttttcactggagtggcagtcggccattacgcaggccatcaacttgattggcgaacacaaaccctcagttccggcccggacaatggcggcgctagcctgtatcgcgcaaaatgatagccaacagttgctcgacgaaatcgtccaacaagagggactggaatatgcgactgaggtggtgattgcacgccagtttattacacgatgttatgaaagtgatcctctgctagtgacattgcagtatcagaacgaggattatggctatggttatcgatcagaaacctataacgaattcgatctccgactgcgtaagcatctctctctggcagaggaaagcagctggcagcgttgcgccgacaaactcattgccgcactgccaggaataaccaaagttcgccgcccttttattgctctgatcctcccggaaaaaccagaaatcgccaatgagttggtaagccttgaatgcccgtggactcattttcattctaaggagtggttaaaagttgttgctattgaccccagagcggtgagaaaactcgaacgctactggagccaggatatatttagcgatcgggaagccagctacatgtcgcatgaaaaccacttcggctacgcggcctgcgctgcccttttgcgcgaacaaggactggcagccgttccacgcctggcaatgtatgcccataaagaagattgcggcagtctgctggtacaaattaaccatccgcaggtcatccgcaccctgctgttagttgctgataaaaacaaacccagcctgcaacgtgtagctaaatacagtaaaaatttcccccatgcgacgcttgccgcactggcagaactgctggcgctaaaagaaccacctacgcgccctggttatccaatcatcgaagacaaaaagctgcctgcacagcaaaaagcacgtgatgaatactggcgtacgctgttacaaacgctgatggcatcgcagccacaactggcagaagaggtgatgccgtggttaagtactcaagcccggtcagtgctgaatagttatttatcggcaccgcctaaaacggttattgatagcaccgataacagccaaatgcctgaaatcctcgtttcaccaccgtggcgtagtaagaaaaaaatgacagttccacgtcttgatttggcaccgttcgaattaacgccgcaagtttactggcaaccaggcgaacgagagaggcttgccgccactgagtctgcccgttatttcagcacggaatctcttgcggaacgcatggaacataaaagtggacgagttgtactacaggagctgggttttggagatgatgtatggctgtttctgaattatatactccccggaaaactggatgctgcacgcaattcactcattgttcagtggcattactaccaggggcgggttgaagagatcctgaatggctggaactccccggaagcacaattagcagaacaggcgcttcgcagcggtcacgtagaagtgttaattaacatatgggaaaatgacagctactcacgctatcgtcgggaaaagagtatctggaacctgtatttattggcacagttgccgcgtgagatagctttgactttctggctacgtatcaatgagaaaaagcatctgttcgcgggtgaggactattttctcagtatcttcggattggatgctctaccaggtctgctgttggctttttcatatcgtccaaaagaaacatttccgttaattttaaattttggcgcaacagaactggccctgcccgttgcccgcgtctggcgacgtttcgcggcgcagcgtgatctggctcgccagtggattttacaatggccggaacatacggctactgcacttatccctcttgtcttcaccaaatccagcgataatagcgaagctgcattacttgccctacgtttactttacgaacagggacatggtgaattgctgcaaaccgcggcaaaccgctggcagcgtacagatgtatggcctgccctggagcatttacttaaacagagtccaatagagatttacccgacacgcattccaaaagcccctgatttctggcagccggcaatgtggtccaggccgcgccttatcacgaataatcagcctgttaccgatgacgcactggaaattatcggcgaaatgctgcgctttacccagggcggacgtttttatagcggactggaacaactgaaaactttctgccagccgcaaacgctggcagcttttgcctgggatcttttcaccgcgtggcaacaagctggtgctcccgcaaaagacaactgggcatttctggcgttaagtctctttggcgacgaaagcacggcacgggatctgacgacacagatccttgcctggccacaggaaggcaaatctgcccgtgccgtcagcggcctgaacatacttactcagatgaataatgatatggcactgatacagctgcatcatatatcgcaacgggcgaaatcccgccccttacgtgataacgcggcggaatttcttcaggtggtcgcagaaaatcgagggctaagccaggaacagttagcggacagattagtcccaacactgggtcttgatgatccgcaggcgttgatttttgattttggtccacggcaatttaccgttcgcttcgatgaaaaccttaacccggttatctttgatcagcaaaacgttcgccagaaaagcgttccccggttgcgcgccgatgacgatcaactgaaagcacccgaggcactggcccgactaaaagggctaaaaaaagatgccactcaggtgagcaaaaacctgctcccgcgtcttgaaactgccctgcgcaccacccgacgctggtcgctggcagattttcattctctgtttgttaatcatccctttacccgtctggttactcagcgattaatatggggtgtttatccggcaaatgaaccgcgtcgtttactcaacgcctttcgtgtggccgctgagggggagttctgcaatgagcaagatgagccaattgacctgcctgccgatgctctgattggcattgcccacccgttagaaatggcagcagaaatgcgcagtgagtttgcacagctttttgccgattacgaaattatgccgccttttcgccaattggcacggcgcacagtactgctcacgcctgacgagtcagccagtaatagtttgaatcgctgggaaggtaaatctgctaccgttgggcaacttatgggaatgcgatacaaaggctgggagtcaggctatgagaatgcatttgtctatgacctgggcgagtaccggctggtccttaagttttcatccggttttaaccactacaatgttgatagcaaagcgctaatgagcttccgttctcttcatgtataccgtgacaataaatctgtcacttttgccgaacttgatgtgtttgatttgagtgaagcgttaagcgcacccgacgtcattttccattaa

SEQ ID NO: 261229 - DNA, 3795 bp, Klebsiella pneumoniae
atgaaaacctatatttatcaggacgaaaaatcacataaattctgggcggtggagcagcagggaaacgaactgaatatcagttggggcaaagtcggcaccaacgggcaaagtcaggtaaaaagctttgcagatgctgcggcggcggaaaaagcggaactcaagctgattgcggagaaaacgaaaaaggggtatgtggaacatgcggagaatgctacatcgaaacatactcgaacggtaacgaaatctctcgaattatctgacttttctaccatcattcaggaacagccctcagttacaccagaattctacgtggctgacaaaaatacagacgttattttaccgtggctggcaaaagatattgctgtcgtttttccgcttgaagtcgtacccaccaccttaagccatcgccgctttcccggagatcctgttacacctgtagataaattaacccagttacgtcgcttagcctgtggcgtgtcgcaacgggataacaaaacagctacatttgacttcagcgcctgtactttagagtggcaaaacttcatcgctcaggcgatcgatctgattaacagcccgaaaacgacaaaattaccatcaccggtaatggctgtactcgcggcacttgaactgcactgcacgagatataaagagcgtgcggatgttatggatcagattattcaggaaggcggtctggaatatgctactgatgtaataatacatcttcaacaaatatctattgaatgggattatgtcaacaataatattgttttcctgtcgtctggcatttcacctgattatttgcagcaatattccagctttgaattacgcctacgtaaacatttatcactggcggaagagtctctctggcaaaaatgtgcacaaaaacttattgccgcagttccacatattccagaatggcggcaaccattaattgctttgttattgcccgaaaaaccagaaattgcacatgaaattgcccagcgtctactggggcaaaagaaattaccctcgctggagtggctaaaaatagtggcgactgatgagcacattcttgcctcattagaaaaatatcacgagccatatgccatttttgatgattactattgtggtgcgatatggtcagccaccgtattacaggagcaaggtgttgcggccctgccccgatttgctccctatgtcgcaagtgactactgcgccgatgtgttgcgtcatatcaatcatccgttcgcattaacactgcttatacgtgtagcagggcatactaaacgctgtcacgatcgaatgacgaaagcctgcgctgcgttcccacacgcagcactggcagcactggcggaacttctagtgcaaaaagaagagaatagttggcgcattatgctaatgacgatgcttatctcgcaaccgacactagcagaacaggtcattccctggctttcgacacccgcagttgcagtgctgaaatcatgccagcaacaactgacacagccctcaaaccatgccagcgccgatctactgccggccatagtagtctccccaccatggctttcgaaaaagaaaaaatcgccgattccagtgcttgatttagcaccattaggtattgagccaatcagttatctgacagaagaaatcagtaatcaacttttggcgaaatatatctggtattcaaaacacatcacggttagtcatgaagaaagtactgccaatctgttggcaaggatgggttttcaacgacggatcgctggtacatatattaaagctcccgaagcggtagttgaggcatggctaaatgaagattattcaactttaataagtgaatttaaggtgtttcattcacctaccgggcattattggcatttggggattttgacaacattgccgctggagaaagcagtaagagcatggaatgcccttactctatctccgcataccgataccgaatacgccatgttacattttggactcaaaggattacctgggttagtaaactcacttgcacgctatccacaggaagccttgcccataacgaattacttcgcagcgagtgagctggcacctgccgtcgcccgcgccttcaacaaactcaaaaccctacgacaagacgcccgcacctggctgctgaaatacccggaacacgccattaccggcctgctgtctgcggcgctcggcaaagccggtgaagcacaggataacgcccgcgctgcattgcgtatgcttaccgaaaacggtcatcaaccattactgcaagaaatcgcccggcgttataaccagccggaagtaacagatgcggtgaacgctatgcttgcgctcgatcccttagataatcacccgacaaaaatccccactcttccggccttttatcagccatcgatctggacccgcccggtattaaaagcaaatgcccaatcactgcccgatagcgcactccagcacctcggtgaaatgctccgcttccatcaggaggaggcgctgtatccgggattattgcaggtgaaagatgcctgtaccgccgactcactggctgaatttgcctgggatctgtttaccgcctggcagaccgctggcgcgccgtcgaaagagagttgggcgttcactgcgttaggcgttctcggtaacgatgacaccgcccgcaaactgacgccattaatacgcgcctggcctggtgaatcccagcataaacgcgccaccgtcgggctggatatcctcgccgctatcagtagtgatatcgccctgatgcagcttaacggcattgcccagaaactgaaattcaaagcattacaggagcgggcgaaagagaaaattgccgacattgccgaaagtcgcgaactgacggtagcggagcttgaagatcggttagcaccggctctcggtctggatgataacggttcgctgctgctggattttggcccacggcagttcaccgtcagctttgatgaaaccttaaaaccgtttgtgcgcgatgtttccggcagccgcctgaaagacttacctaaacccaataaaagcgatgatgaatcacaggcaaacgatgctgttaaccgctacaaattgctgaaaaaagatgcgcgtaccgtcgccgcccagcaggtagcaaggctggaatccgccatgtgcctgcgccgccgctggtcgccggaaaactttcagctcttcctggttgagcatccgctggttcgtcacttaacccgccgtctgatttggggcgtttatagcgccgaaaaccagctacaggcgtgctttagggtggcggaagataacagctacagcaccgctgacgatgatcttttcaccttgcaggaaggcgatatctctgttggcattcctcacgttctggaaatatcaccgacggatgctgtcgcctttggtcagctttttgccgactacgaactgctaccaccgttccgtcagcttgaacgtaacagttacgccctgacagaagccgagcgcaacgccagcgaactgacccgctgggcaggcagaaaatgcccgagcggccgggtcatggggctggcaaataaaggctggataaagggcgaaccacaggatggaggctggatcggatggatgatcaaacctctcggtcgctggtcgttaatcatggaaatcgacgaaggttttgcggtgggtatgtcaccagccgatcttagcgctgagcaggtcttaagcaagctgtggctatgggaaggcaaagcggaaagctatggctgggggagtaattcaactcaggaagcgcagttctccgtgctcgacgacatcaccgccagcgaactcattaacgatattgaagccctgtttgaataa

SEQ ID NO: 261230 - DNA, 3798 bp, Klebsiella pneumoniae
atgaaacactttatctatcaggacgaaaaatcacataaattctgggcggtggagcagcagggaaacgagttgcatatctgttggggaaaagttggcaccaaagggcaaaaccaggtaaaaagttttgcggatgctgcggcagcggcaaaagcggagcttaagctgatcgcagagaaaacgaaaaaaggctatgtggaaaatgctttagcaaacgtgcatatcccccccatcaccaaagccactcctgaagttgaaacctcccctgagagtaaaaacaaacgcccatgggtggctgatgatgcagtcattccggtaactggcgatattaatcgatttgcttttcctcatcgctctcgccccagagagatcaattatctgtacaaagatggccaaatatggaagcgcatcgcgaataacaccagggcatatgaccccgacaataattaccgctcttatcctgaaaactggcagctggcgtttgccgagttacaaaggcgaattctgaataatcaacaaacaggaagtatacaatctgatgcggcattgctctggaatttatggaactcttactctacagatgaactggtcgatgacttagtcattcgctgtggtctggaaactaccgttgaaatcgcccttctcgctcttcaactcaaatataaaccagtaaaagccgacgtcaccaccattattccccctgatctcaaagcagaatcactaccgaactggcatcaacgtctatgtcatcatctttcactcgcttcagaagatgagtggcaacgctgtgtagataaagttctcgctgctattccctcgctatccccagcacggcaaccttttgcggcgttactgctccctgaacgcccggatattgccaatgctatggcgctacgttatgcagatcaaaacgttccggcgatgacctggttaagactggtggtaaccgatgacgccgctctgactacagcagaaaaatacgacttcccaccgttgtatcatgattttcgcgcttatctggcaatgttgctggcaaataatggggtgcgcggtgtaagccggatacttcttgagtttacggaagagcattctgacaatcccacttatctcttcgagcgcatcagcgagactgaagatcttgtcaaatggctatggaaaacgaatcacccggatgcgattcaaattctgatcctcggtgtaattggcaagaaaaagcacctggaatacttaagcaaagcctgtcaaaaacatcccgctgcggctcttgccgcttatgcaactttactggcaatacatgaagatgcacagtggcgtaaagcgcttgtcaaactgattaccgccacgccagatttagtcactgacgtcattccctgggttaatgctaaagcggcaggcatcttatctgaatgtcgtactcagttagtcgctgaagaatgtgaatacgccactgcggatatgttgccggagctgtttgtcgctccaccgtgggtaataaataagaaaacgaatgtaatacccgtatttgatttaccggtgcttcccatccctgcagtcactgacatcacgccaggaattacagagttaatcagtcatactgacatatccagattcagtgaaatcgcgcaatatcagtcatcacagcaaaccttatttaccgacctgccactaattgaaaaagaaagctgggagacatctttcattccttttacaccagaacaacaaatcctttggcaattaggttttaatgaatggctgcattgcgaagatgacttacatgaaaaaaaatatataccgcaaagcgctgttgatgccttgttgcgctttgattttccagcactaaaagctgagtttgcgaaatatcacaacaatgccaacaaaagctggaatctatctgcgctttgttacttaccgggacaacaggcgatttcatttctcaaccaaataatcattgaggagcgatattcaggtgagaaagagattctggcagtttttggtagtacggccattcctgcgtttatgacctgcttgcaacgagatcatcaacgactgtggatattcaccctctttattggggccagtgaactagccttaccaatggcgcagcggttacagaaaaaaatggcttacaaggatgccattaattggctggcaaataacccgcgccatgccgccgccgggctactgcctttggcgctgggcaaaccgtgccaaaatcgggaatatgcccgccaggcattccgcctgctagtgaaattaaaccagcgagaaacgattgaagaaatcggccggagatacaaccaacctgatgttttagctgcgctggcaacattgttcgatagcgatccgctggaagaatatcccgctaaaatcgccccactgcccggcttttatcagttcaccttatggcgcagaccacggcttaaaagtaacaacctgcctctgccagatgacgctatgcgccacctgggcacaatgttgagctttccacgcgacattacctcctacgctgggctggcgaccatcaaagagaccttcacccacgaatcactggctgactttggctgggatctctacacggcatggacagaagctggcgcacccgcaaaagaaaactgggcatttacttcgcttgggattttaggcaatgacgacaccgcacgtaaattaaccccgcttatccgtgcctggccgggtgaatcccagcataaacgcgcggtttacgggctggatgtattagctgatattggcagcgatgttgcgctaatgctgcttaatggcatcgcgcgaaaaattaaattcaaagcattacaggaacatgcccgcgagaaaatcaacatagttgctgaaaaccgtgggctgactatggctgaactggaagaccgcctggctccagatttagggcttgataacagtggctcgctgatactggatttcggcccacgtcaattcaccgttggttttgacgaaaccttaaaacctgtagtgcacgatgcaaacggcaaagtcctgaaagatttacccaaaccaaatcagagcgatgatcaaacactggcaactgactccgttaacctcttcaaacaattgaagaaagatgtgcacgccattgccagccagcagattgatcgtctggagcaggatatgtgccagcgcagacgctggacggcagagcagttccgcctgtttctggtggagcatccgctggtacgtcacttaacccgacgggtgttatggggggtatatactgaggaaaacacgctgatcgcctgcttccgggtcgcagaagacagcacttacagcgatgcgcaggatgagttattcacgctgccagcaggaaacatcggtataccgcatgtgctggaaatatctcctgaatccgccactgcatttgggcaaatttatgctgattacgaaaagcttcctccctttcgccaactcgatcgtggttattaccaccttactgataatgaacgtgatacccatgaattgatacgctggcaaggacgtctttgccaggccgggcgcattgtcgggctggaacgtcgaggctggcaacgtctggaagaaagcggcagcgtctatgcgatgcgcaaatctaccccttatggcgctctcgaacttgaaacagaacatttttcattaatttatggcgaaacggggtatagcgacctgctacctgttgaaagcgtaaaaatcacttcaccaggggaacgctacagtacacagccctcgctcacgttctccgcgcttgatgccatcaccgccagcgaactcattaacgacatcgaatcactttttgattaa

SEQ ID NO: 261231 - DNA, 2034 bp, Klebsiella pneumoniae
atgactcaagtcgcgaagaaaattctggtgacgtgcgcactgccgtacgctaacggctcaatccacctcggccatatgctggagcacatccaggctgatgtctgggtccgttaccagcgaatgcgcggccacgaggtcaacttcatctgcgccgacgatgcccacggcacaccgatcatgctgaaagctcagcagcttggtatcactccggagcagatgattggcgaaatgagtcaggagcatcagactgatttcgcaggctttaacatcagctacgacaactatcactcgacgcacagcgaagagaaccgccagttgtcagaacttatttattctcgcctgaaagagaacggttttattaaaaaccgcaccatctctcagctttacgatccggaaaaaggcatgttcctgccggaccgttttgtaaaaggcacctgcccgaaatgtaaatccccggatcaatacggcgataactgcgaagtttgtggcgcgacctacagcccgactgagctgatcgagcctaaatcggtggtttctggtgctacgccggtaatgcgtgattctgaacacttcttctttgatctgccctctttcagcgaaatgctgcaggcatggacccgcagcggcgcgttgcaggagcaagtggcaaacaaaatgcaggagtggtttgaatctggcctgcaacagtgggatatctcccgcgacgccccgtacttcggttttgaaattccgaatgcaccgggcaaatatttctacgtctggctggatgcgccgattggctacatgggttccttcaagaatctgtgcgacaaacgcggcgacaccaccagcttcgatgaatactggaagaaagattccaccgccgagctgtatcacttcatcggcaaagatattgtttacttccacagcctgttctggccagcaatgctggaaggcagcaacttccgcaagccgactaacctgtttgttcatggctatgtgacggtgaacggcgcgaagatgtccaagtctcgcggcacctttattaaagccagcacctggctgaatcattttgatgctgacagcctgcgttactactacactgcgaaactctcttcgcgcattgatgatatcgatctcaacctggaagatttcgttcagcgtgtgaatgccgatatcgtgaataaagtggttaacctggcatcccgtaacgctggctttatcaacaagcgttttgacggcgtgctggcaagcgaactgactgacccgcagttgtacaaaaccttcacggatgccgctgaagtgattggtgaagcgtgggaaagccgcgaatttggtaaagcgatccgcgaaatcatggcgctggcagatctggctaaccgttatgtcgatgaacaggctccgtgggtggtggcgaaacaggaaggacgcgatgccgacctgcaggcaatttgctcgatgggcataaacctgttccgcgtgctgatgacttacctgaagccggtactgccgaaactgaccgagcgcgcggaagcattccttaatacggaactgacctgggatggtatccagcaaccgctgttgggccataaagtgaatccgttcaaagcgctgtataaccgcatcgatatgaagcaggttgaagcactggtggaagcgtctaaagaagaagtgaaagcagctgccgcgccagttactggcccactggcagatgatccgattcaggaaaccatcacctttgacgacttcgctaaagttgacctgcgcgtggcgctgattgaaaacgcagagtttgttgaaggttctgacaaactgctgcgcctgacgctggatctcggcggtgaaaaacgcaatgtcttctccggtattcgttctgcttacccggatccgcaggcactgattggtcgtcacaccattatggtggctaacctggcaccacgtaaaatgcgcttcggtatctctgaaggcatggtgatggctgccggtcctggcgggaaagatattttcctgctaagcccggatgccggtgctaaaccgggtcatcaggtgaaataa

SEQ ID NO: 261232 - DNA, 1110 bp, Klebsiella pneumoniae
atgaacgaacaatcccaggccaaatcaccagaagccttgcgcgcaatggtcgccgggacactggccaattttcagcacccaaccctgaagcataacctcaccacgctgaaagcgttgcaccatgtcgcctggatggacgacacgttgcatgtggaactggttatgccattcgtctggcatagcgcgttcgaagagttaaaagagcaatgtagcgccgaactgctgcgcatcaccggggcgaaagctatcgactggaaactgtcgcacaatatcgccaccttaaaacgcgtgaagaatcagccgggaattaacggcgtgaagaacatcattgcggtcagctcaggtaaaggcggcgtgggtaaatcctccacggcggtaaacctggcgctggcactggcggcggaaggggcgaaagtcggcattctggatgccgatatctacggcccatcaatacccaccatgctgggtgcagaaaatcagcgtccaacttcgccggacggtacccatatggcaccgattatgtctcatggactggcaaccaattcaattggttatctggtcactgacgacaatgcgatggtgtggcgtggtccgatggcgagcaaggcgttaatgcagatgttgcaggaaaccttgtggccggatctcgactatctggtgcttgatatgccgccaggcaccggtgacattcaattgacactggcacaaaacattccagtaactggcgcggtagtggtcaccaccccgcaggacattgcgttgatcgatgcgaaaaaaggcattgtgatgttcgagaaagtcgaggttccggtgctcggtattgtcgagaacatgagtgtgcatatttgcagtaactgtggtcaccatgaaccgattttcggtaccggtggtgctgagaaactggctgaaaaataccacacacagctgctggggcagatgccgttacacatctccttacgtgaggatctcgataaaggcacgccaacggttatcagccgtccggagagcgaatttaccgctatctaccgccagctggctgaccgcgttgcagctcagctctactggcagggtgaagtcattccaggcgaaatttccttccgcgcggtctaa

SEQ ID NO: 261233 - DNA, 945 bp, Klebsiella pneumoniae
atgccagaggtacaaacagatcatccagagacggcggagttaagcaagccacagctacgcatggtcgatctcaacttattaaccgttttcgatgccgtgatgcaggagcaaaacattacccgtgccgctcatgttctgggaatgtcgcaacctgcggtcagtaacgctgttgcacgcctgaaggtgatgtttaatgacgagctttttgttcgttatggccgtggtattcaaccgactgctcgcgcatttcaactttttggttcagttcgtcaggcattgcaattagtacaaaatgaattaccaggttcaggctttgagcctgccagtagtgaacgtatatttcatctttgtgtctgcagcccgttagacagcattctgacctcgcagatttataatcacattgagcagattgcgccaaatatacatgttatgttcaagtcttcattaaatcagaacactgaacatcagctgcgttatcaggaaacggagtttgtgattagttatgaagacttccatcgtcctgaatttaccagtgtgccattatttaaagatgaaatggtgctggtagccagcaaaaatcatccaacaattaaaggcccgttactgaaacatgatgtttataacgaacaacatgcggcggtttcgctcgatcgtttcgcgtcatttagtcaaccgtggtatgacacggtagataagcaagccagtatcgcgtatcagggcatggcaatgatgagcgtacttagcgtggtgtcgcaaacgcatctggtcgctattgcgccgcgttggctggcggaagagttcgctgaatccttagaattacaggtattaccgctgccgttaaaacaaaacagcagaacctgttatctctcctggcatgaagctgccgggcgcgataaaggccatcagtggatggaagagcaattagtctcaatttgcaaacgctaa

SEQ ID NO: 261234 - DNA, 459 bp, Klebsiella pneumoniae
atgttccggggagcaacgttagtcaatctcgacagcaaagggcgcttatcagtgcctacccgttatcgggagcagctgcttgagaacgctgccggtcaaatggtttgcaccattgacattcatcacccgtgcctgctgctttaccccctgcctgaatgggaaattatcgagcaaaaattatcgcgtctgtcgagcatgaacccggttgagcgccgtgtgcagcgcctactgttaggtcatgccagcgaatgtcagatggatggcgcaggtcgattgttaatcgcgccagtactgcggcaacatgccgggctgacaaaagaagtgatgctggttggacagttcaacaagtttgagctgtgggatgaaacaacctggcatcaacaggtcaaggaagatatcgacgcagagcagttggctactggagacttatcagagcgactgcaggacttgtctctataa

SEQ ID NO: 261235 - DNA, 366 bp, Klebsiella pneumoniae
atgatcagcagagtgacagaagctctaagcaaagttaaaggatcgatgggaagccacgagcgccatgcattgcctggtgttatcggtgacgatcttttgcgatttgggaagctgccactctgcctgttcatttgcattattttgacggcggtgaccgtggtaaccacggcgcaccatacccgtttactgaccgctcagcgcgaacaactggtgctggagcgagatgctttagacattgaatggcgcaacctgatccttgaagagaatgcgctcggcgaccatagccgggtggaaaggatcgccacggaaaagctgcaaatgcagcatgttgatccgtcacaagaaaatatcgtagtgcaaaaataa

SEQ ID NO: 261236 - DNA, 1359 bp, Klebsiella pneumoniae
atgattagcgtaacccttagccaacttaccgatattctcaacggtgaactgcaaggtgcagatatcacccttgatgctgtaaccactgacacgcgaaaactgacgccgggctgcctgtttgttgccctgaaaggcgaacgtttcgatgctcatgattttgccgaccaggcgaaagctggcggcgcgggcgcactactggtcagccgtccgctggatatcgatctgccgcagttaatcgtcaaggatacgcgtctggcgtttggtgaactggctgcatgggttcgccagcaagttccggcgcgcgtggttgctctgacgggctcctccggcaaaacctctgttaaagagatgacggcggcaattttaagccagtgcggcaacacgctttatacggcaggcaatctcaacaacgacatcggcgtgccgatgacgctgctgcgcttaacgccggaatacgattacgcagttattgaacttggcgcgaaccatcagggcgaaattgcctggaccgtgagtctgactcgcccggaagcggcgctggtcaataacctggcggcagcgcatctggaaggtttcggttctttggctggcgtggcaaaagcgaaaggcgaaatctttagcggcctgccggaaaacggtatcgccattatgaatgccgacaacaacgactggctgaactggcagagcgtaattggctcacgcaaagtgtggcgtttctcaccgaatgccgccaacagcgatttcaccgccaccaacatccatgtgacttcgcacggtacggaatttaccctccaaaccccaacaggtagcgtcgatgttctgctgccgcttccagggcgtcacaatattgcgaatgcgctggcagccgctgcgctctccatgtccgtgggcgcaacgcttgatgctatcaaagcggggctggcaaatctgaaagctgttccaggccgtctgttccccatccaactggcggaaaaccagttgctgctcgacgactcctacaacgccaatgtcggttcaatgaccgcagcagtccaggtactggctgaaatgccgggctaccgcgtgctggtggtgggcgatatggcggaattgggcgctgaaagcgaagcctgccatgtacaggtgggcgaggcggcaaaagctgctggtattgaccgcgtgttaagcgtgggtaaacaaagccatgctatcagcaccgccagcggcgttggcgaacattttgcagataaaacagcgcttatcgcgcgtattaaatcactgattgctgagcaacaggtaattacgattttagttaagggttcacgtagtgccgccatggaagaggtagtacgcgctttacaggagaatgggacatgttag

SEQ ID NO: 261237 - DNA, 1317 bp, Klebsiella pneumoniae
atggctgattaccagggtaaaaatgtcgtcattatcggcctgggcctcaccgggctttcttgcgtggactttttcctcgctcgcggtgtgacgccgcgcgttatggatacgcgtatgacaccgcctggcctggataaattacccgaagctgtagaacgccacacgggcggtctgaatgatgaatggctgatggcggccgatctgattgtcgccagtcccggtattgcactggcgcatccatccttaagcgctgccgctgatgccggaatcgaaatcgttggcgatatcgagctgttctgtcgtgaagcacaagcaccgattgtggcgatcaccggttctaacggcaaaagcacggtcaccacgctagtgggtgaaatggcgaaagcggcgggggttaacgttggtgtgggtggcaatattggcctgcctgcgttgatgctgctggatgatgagtgcgaactgtacgtgctggagctgtcgagcttccagcttgaaaccacctccagtttacaggcggtagcagcgaccattctgaacgtgactgaagatcatatggatcgctatccgtttggtttacaacagtatcgtgcagcaaaactgcgcatttacgaaaacgcgaaagtttgcgtggttaatgctgatgatgccttaacaatgccgattcgcggtgcggatgaacgctgcgtcagctttggcgtcaacatgggtgactatcacctgaatcatcagcagggtgaaacctggctgcgggtgaagggcgagaaagtgctgaacgtgaaagaaatgaaactttccgggcagcataactacaccaatgcactggcagctctggcactggcagatgccgctggtttgccgcgcgccagcagcctgaaagcgttaaccacattcactggtctgccgcatcgctttgaagttgtgctggagcataacggtgtgcgctggattaacgattcaaaagcgaccaacgtcggcagtacggaagcggcactgaatggcctgcacgtagacggcacgctgcatttgttgctgggcggcgatggtaaatcggcagattttagcccactggcgcgttacctgaatggcgataacgtacgtctgtattgtttcggtcgggacggcgcgcagctggcggcgctacgcccggaagtggcagaacaaaccgaaaccatggaacaggcgatgcgcttgctggctccgcgtgttcagccgggcgatatggttctgctctccccggcctgtgccagccttgatcagttcaagaactttgaacaacgaggcaatgagtttgcccgtctggcgaaggagttaggttga

SEQ ID NO: 261238 - DNA, 1245 bp, Klebsiella pneumoniae
atgcgtttatctctccctcgcctgaaaatgccgcgcctgccaggattcagtattctggtctggatctccacggcgctaaagggctgggtgatgggctcgcgggaaaaagataccgacagcctgatcatgtacgatcgcaccttactgtggctgaccttcggcctcgcggcgattggctttatcatggtgacctcggcgtcaatgcccatcgggcaacgcttaaccaacgatccgttcttcttcgcgaagcgtgatggcgtctatctgatcctggcattcattctggcgatcattacgctgcgtctgccgatggagttctggcaacgttacagcgctacgatgctactcggatcaatcatcctgttgatgatcgttctggtagtgggtagctctgttaaaggggcatcgcgttggatcgatctcggcttgctgcgtatccagcctgcggagctgacaaaactgtcgttgttttgctatatcgccaactatctggtgcgtaaaggcgacgaagtacgtaataacctgcgcggcttcctgaaaccgatgggcgtgattctggtgttggcagtgttactgctggcacagccagaccttggtacggtggtggtgttgtttgtgactacgctggcgatgttattcctggcgggagcgaaattgtggcagttcattgccattatcggtatgggcatttcagcggttgtgttgctgatcctcgccgaaccgtaccgtatccgccgtgttaccgcattctggaacccgtgggaagatccctttggcagcggctatcagttaacgcaatcgctgatggcgtttggtcgcggcgaactttgggggcaaggcttaggtaactcggtacaaaaactggagtatctgccggaagcgcacactgactttattttcgccattatcggcgaagaattaggttatgtcggtgtggtactagcacttttaatggtattcttcgtcgcttttcgtgcgatgtcgattggccgtaaagcattagaaattgaccatcgtttttccggttttctcgcctgttccattggcatctggtttagcttccaggcgctggttaacgtaggcgcggcggcggggatgttaccgaccaaaggtctgacattgccactgatcagttacggtggttcgagcttactgattatgtcgacagccatcatgatgctgttgcgtattgattatgaaacgcgtctggagaaagcgcaggcgtttgtacgaggttcacgatga

SEQ ID NO: 261239 - DNA, 1044 bp, Klebsiella pneumoniae
atggtgatggcaggcggaaccggtggacatgtattcccgggactggcggttgcgcaccatctaatggctcagggttggcaagttcgctggctggggactgccgaccgtatggaagcggacttagtgccaaaacatggcatcgaaattgatttcattcgtatctctggtctgcgtggaaaaggtataaaagcactgatagctgcgccactgcgaatcttcaacgcctggcgtcaggcgcgggcgattatgaaagcgtacaaacctgacgtggtgctcggaatgggcggctacgtatcaggcccaggtggtctggccgcgtggtcgttaggcattccggttgtacttcatgaacaaaacggtattgcgggcttaaccaataaatggctggcgaagattgccaccaaagtgatgcaggcgtttccaggcgctttccctaatgcggaagtggtgggtaacccggtgcgtaccgatgtgctggcgctgccgttgccgcagcaacgtttggctggacgtgaaggtccggttcgtgtgttggtagtgggtggttcccagggcgcacgcattcttaaccagacaatgccgcaggttgctgtgaaactgggtgattcagtcactatctggcatcagagcggcaaaggttcgcaacaatccgttgaacaggcgtatgccgaagcggggcaatcgcagcataaagtgacggaatttattgatgatatggcggcggcgtatgcgtgggcggatgtcgtcgtttgccgctccggtgcgttaacggtgagtgaaatcgctgcggcaggactaccggcgttgtttgtgccgtttcaacataaagaccgccagcaatactggaatgctctaccgctggaaaaagcgggcgcagccaaaattatcgagcagccacagcttagcgtggatgctgtcgccaacaccctggccgggtggtcgcgagaaaccttattaaccatggcagaacgcgcccgcgctgcatccattccggatgccaccgagcgagtggcaaatgaagtgagccgggctgcccgggcgtaa

SEQ ID NO: 261240 - DNA, 921 bp, Klebsiella pneumoniae
atgactgataaaatcgcggtcctgttgggtgggacctccgctgagcgggaagtttctctgaattctggcgcagcggtgttagccgggctgcgtgaaggcggtattgacgcgtatcctgtcgacccgaaagaagtcgacgtgacgcaactgaagtcgatgggctttcagaaagtgtttatcgcgctacacggtcgcggcggtgaagatggcacgctgcagggcatgctcgagctgatgggcttgccttataccggcagcggagtgatggcatctgcgctttcaatggataaactacgcagcaaacttctgtggcaaggtgccggtttaccggtcgctccgtgggtagcgttaacccgcgcagagtttgaaaaaggcctgagtgataagcagttagcagaaatttctgccttaggtttgccggttatcgttaagccgagccgcgaaggttccagtgtgggaatgtcaaaagtagtagcagaaaatgctctacaagatgcattaagattggcatttcagcacgatgaagaagtattgattgaaaaatggctaagtgggccggagttcacggttgcgatactcggtgaagaaattttaccgtcaatacgtattcaaccgtccggaaccttctatgattatgaggcgaagtatctctctgatgagacacagtatttctgccccgcaggtctggaagcgtcacaagaggccaatttgcaggcattagtgctgaaagcatggacgacgttaggttgcaaaggatggggacgtattgacgttatgctggacagcgatggacagttttatctgctggaagccaatacctcaccgggtatgaccagccacagcctggtgccgatggcggcacgtcaggcaggtatgagcttctcgcagttggtagtacgaattctggaactggcggactaa

SEQ ID NO: 261241 - DNA, 831 bp, Klebsiella pneumoniae
atgtcgcaggctgctctgaacacgcgaaacagcgaagaagaggtttcttctcgccgcaataatggaacgcgtctggcggggatccttttcctgctgaccgttttaacgacagtgttggtgagcggctgggtcgtgttgggctggatggaagatgcgcaacgcctgccgctctcaaagctggtgttgaccggtgaacgccattacacgcgtaatgacgatatccggcagtcgatcctggcattgggtgagccgggtacctttatgacccaggatgtcaacatcatccagacgcaaatagaacaacgcctgccgtggattaagcaggtgagcgtcagaaagcagtggcctgatgaattgaagattcatctggttgaatatgtgccgattgcgcggtggaatgatcaacacatggtagacgcggaaggaaacaccttcagcgtgccgccagatcgcaccagcaagcaggtgcttccaatgctgtatggcccggaaggcagcgctaatgaagtgttgcagggctatcgcgaaatggggcagatgctggcaaaggacagatttactctgaaggaagcggcgatgaccgcgcggcgttcctggcagttgacgctgaataacgatattaagctcaatcttggccggggcgatacgatgaaacgtttggctcgctttgtagaactttatccggttttacagcagcaggcgcaaaccgatggcaaacggattagctacgttgatttgcgttatgactctggagcggcagtaggctgggcgcccttgccgccagaggaatctactcagcaacaaaatcaggcacaggcagaacaacaatga

SEQ ID NO: 261242 - DNA, 1263 bp, Klebsiella pneumoniae
atgatcaaggcgacggacagaaaactggtagtaggactggagattggtaccgcgaaggttgccgctttagtaggggaagttctgcccgacggtatggtcaatatcattggcgtgggcagctgcccgtcacgtggtatggataaaggcggggtgaacgacctcgaatccgtggtcaagtgcgtacaacgtgccattgaccaggcagaattgatggcagattgtcagatctcttcggtatatctggcgctttctggtaagcacatcagctgccagaatgaaattggtatggtgcctatttctgaagaagaagtgacgcaagaagatgtggaaaacgtcgtccataccgcgaaatcggtgcgtgtgcgcgatgagcatcgtgtgctgcatgtgatcccgcaagagtatgcgattgactatcaggaagggatcaagaatccggtaggactttcgggcgtgcggatgcaggcaaaagtgcacctgatcacatgtcacaacgatatggcgaaaaacatcgtcaaagcggttgaacgttgtgggctgaaagttgaccaactgatatttgccggactggcatcaagttattcggtattgacggaagatgaacgtgaactgggtgtctgcgtcgtcgatatcggtggtggtacaatggatatcgccgtttataccggtggggcattgcgccacactaaggtaattccttatgctggcaatgtcgtgaccagtgatatcgcttacgcctttggcacgccgccaagcgacgccgaagcgattaaagttcgccacggttgtgcgctgggttccatcgttggaaaagatgagagcgtggaagtgccgagcgtaggcggtcgtccgccgcggagtctgcaacgtcagaccctggcagaggtgatcgagccgcgctataccgagctgctcaacctggtcaacgaagagatattgcagttgcaggaaaagcttcgccaacaaggggttaaacatcacctggcggcaggcattgtattaactggtggcgcagcgcagatcgaaggtcttgcagcctgtgctcagcgcgtgtttcatacgcaagtgcgtatcggcgcgccgctgaacattaccggtttaacggattatgctcaggagccgtattattcgacggcggtgggattgcttcactatggaaaagagtcacatcttaacggtgaagctgaagtagaaaaacgtgttacagcatcagttggctcgtggatcaagcgactcaatagttggctgcgaaaagagttttaa

SEQ ID NO: 261243 - DNA, 1152 bp, Klebsiella pneumoniae
atgtttgaaccaatggaacttaccaatgacgcggtgattaaagtcatcggcgtcggcggcggcggcggtaatgctgttgaacacatggtgcgcgagcgcattgaaggtgttgaattcttcgcggtaaataccgatgcacaagcgctgcgtaaaacagcggttggacagacgattcaaatcggtagcggtatcaccaaaggactgggcgctggcgctaatccagaagttggccgtaatgcggctgatgaggatcgcgatgcactgcgtgcggcgctggaaggtgcagacatggtctttattgctgcgggtatgggtggtggtaccggtacaggcgcagctccagtcgtcgctgaagtggcaaaagatttgggtatcctgaccgttgctgtcgtcactaagcctttcaactttgaaggcaagaagcgtatggcattcgcggagcaggggatcactgaactgtccaaacatgtggactctctgatcactatcccgaacgacaaactgctgaaagttctgggccgcggtatctccctgctggatgcgtttggcgcagcgaacgatgtactcaaaggcgctgtgcaaggtatcgccgaactgattactcgtccgggtttgatgaacgtggactttgcagacgtacgcaccgtaatgtctgaaatgggctacgcaatgatgggttctggcgtggcgagcggtgaagaccgtgcggaagaagctgctgaaatggctatctcttctccgctgcttgaagatatcgacctgtctggcgcacgcggcgtgctggttaacatcacggcgggcttcgacctgcgtctggatgagttcgaaacggtaggtaacaccatccgtgcatttgcttccgacaacgcgactgtggttatcggtacttctcttgacccggatatgaatgacgagctgcgcgtaactgttgttgcgacaggtatcggcatggacaaacgtcctgaaatcactctggtgaccaataagcaggttcagcagccagtgatggatcgctaccagcagcacgggatggctccgctgacccaggagcagaagccggttgctaaagtcgtgaatgacaatgcgccgcaaactgcgaaagagccagattatctggatatcccagcattcctgcgtaagcaagctgattaa

SEQ ID NO: 261244 - DNA, 588 bp, Klebsiella pneumoniae
gtgctgtggacttcaggctttaatgataagatttgtgcgctaaatacgtttgaatacgatcgggatggcaataacgtgagtggaatactgacgcgctggcgacagtttggtaaacgctacttctggccgcatctcttattagggatggtcgcggcgagtttaggtttgcctgcgctcagcaacgccgccgaaccaaacgcgcccgcaaaagcgacaacccgcaaccacgagccttcagccaaagttaactttggtcaattggccttgctggaagcgaacacgcgccgcccgaattcgaactattccgttgattactggcatcaacatgccattcgcacggtaatccgtcatctttccttcgcaatggcaccgcaaacgctgcccgttgctgaagaatctttgcctcttcaggcgcaacatcttgcattactggatacgctcagcgcgctgttgacccaggaaggcacgccgtctgaaaagggttatcgcattgattatgcgcattttaccccgcaagcaaaattcagcacgcccgtctggataagccaggcgcaaggcatccgtgctggccctcaacgcctcagctaa

SEQ ID NO: 261245 - DNA, 399 bp, Klebsiella pneumoniae
atgaaaaagctgcaaattgcggtaggtattattcgcaacgagaacaatgaaatctttataacccgtcgcgcagcagatgcgcacatggcgaataaactagagtttcccggcggtaaaattgaaatgagcgaaacgccggaacaggcggtggtgcgtgaacttcaggaggaagtcgggattaccccgcaacatttttcgctatttgaaaaactggaatatgaattcccggacaggcatataactctgtggttctggctggtcgaaagctgggaaggggagccgtggggtaaagaagggcaacccggtgagtggatgtcgctggtcggtctgaatgccgatgattttccgccagccaatgaaccggtacttgcgaagcttaagcgtgtatatgtcggatag

SEQ ID NO: 261246 - DNA, 198 bp, Klebsiella pneumoniae
atgtcagaaactattacggtgaattgcccaacctgcgggaaaacggtggtgtggggcgaaatcagcccgtttcggccattttgttccaaacgttgccagctgatcgacctcggagaatgggctgctgaagaaaaacgaatccccagcagtggcgatctttccgaaagcgatgactggagcgaagagccaaagcagtga

SEQ ID NO: 261247 - DNA, 744 bp, Klebsiella pneumoniae
atgcagacccaggtcctttttgaacatccactaaatgaaaaaatgcgtacatggctgcgcattgagtttttgattcagcaactcaccgttaatctacccatcgttgaccacgctggcgcgctgcatttcttccgtaatgtcagtgaattactggatgttttcgagcgcggcgaagtccgcactgagctgttgaaagaacttgaccggcagcaacgtaaactccagacctggattggcgtgcctggcgtggaccagagccgtattgaagcattaattcagcagttaaaagcggcggggagcgtattaatttccgcgccgcgtatcgggcaatttctgcgtgaagatcgtttgattgctctggtgcgtcagcgactgagcatcccaggcggctgttgcagctttgatttacctacattgcacatttggctgcatctaccccagacgcagcgcgacagccaggtagaaacctggattgccagcctgaacccgctcacccaggcacttaccatggtgctggatttaattcgccagtcggcccccttccgtaaacaaaccagcctgaatggtttttatcaggataacggtggcgatgccgacttgctgcgtctgaatctgtcgctcgattcacagctttatccgcaaatttccggtcataagagccgttttgccattcgttttatgccgctggacagtgaaaacggacaggtaccggaacgtctggatttcgaactggcctgttgctaa

SEQ ID NO: 261248 - DNA, 621 bp, Klebsiella pneumoniae
atgaggtatatagttgccttaacgggaggcattggcagtggcaagagtaccgttgccaatgcgtttgctgatctcggaattaacgtcattgatgccgatattattgcgcgtcaggtggttgaaccaggcgcacctgcgctacatgccattgctgatcactttggcgctaacatgattgctgctgatggaacattgcagcgccgggccttgcgcgagcggatcttcgccaacccggaagagaaaaactggcttaacgccctgctgcatccgctgattcagcaagagacgcaacaccagatccagcaagctacttccccctatgtactatgggttgtgccattgctggtagaaaactcactgtataaaaaagcgaatcgagtgctggtggtggatgtcagcccagaaacgcaacttaagcgcaccatgcagcgcgatgatgtaactcgcgagcatgttgaacaaatccttgctgctcaggcaacgcgcgaagcccgccttgccgtggcagatgacgtcattgataataacggcgcaccggatgctatcgcatcggatgttgcccgcctgcacgcacactatttgcagcttgcgtcgcagtttgtctcacaggaaaaaccgtaa

SEQ ID NO: 261249 - DNA, 1203 bp, Klebsiella pneumoniae
atggcgagtaagcaactctggcgctggcatggcataaccggcgacggcaatgcgcaagatgggatgctatgggctgagagccgtgctttgctgctcatagcactacagcaacagatggttaccccacttagcctgaagcgaatcgccatcaattctgcgcagtggcgaggagataaaagcgcggaagtcattcatcaactggcgacgctactcaaagccgggttaacgctttctgaagggctggcactgctggcggaacagcatcccagtaagcaatggcaagcgttgctgcaatcgctggcgcacgatcttgaacagggcgttgccttttccaatgccttattaccctggtcagaggtatttccgccgctctatcaggcgatgatccgcacgggtgaactgaccggtaagctggatgaatgctgctttgaactggcgcgtcagcaaaaagcccagcgtcagttgaccgacaaagtgaaatcagcgttacgttatcccattatcattttagcgatggcaatcatggtggttgtggcaatgctgcattttgttctaccggagtttgccgctatctataagacctttaacactccgctaccggcgctaacgcaggggatcatgacgctggcaagctttagtggcgaatggggttggttgctggtgctattcggctttctgctggcgatagccaataagctgctgatgcgccacccaaccaggcttatcgcacggcagaaattgctgttacgcatcccgattatgggttcactgatgcggggacaaaaactcacacagatctttacgattctggcgctgacacaaagtgcaggcattacttttttacagggcgtagagagcgtcagagaaacaatgcgctgcccgtactgggtgcaacttctgacacaaatccagcacgatatcagtaacggtcaacccatctggctggcgctaaaaaatgccggtgagtttagcccactctgtttgcaattagtgagaacaggagaggcatccggctcgctggatctcatgttagacaacctcgcccatcatcatcgggataacacactggcgctggcggataacctcgcagccttactggaaccggcgttgctgatcataacgggaggaattatcggtacgctggtggtggcaatgtatctgcccattttccatttaggcgatacaatgagtggaatgggataa

SEQ ID NO: 261250 - DNA, 1386 bp, Klebsiella pneumoniae
atgaatattccacagctcaccgccctgtgtctgcgttatcagggagtcttgctggatgccagcgaagaggtggttcatgttgcggtggtcgatgccccttcgcatgagctactggacgcattgcatttcgctaccaccaaacgtattgagatcacctgctggacgcgccaacaaatggaaggtcacgccagtcgcacacaacagacattgcccgtagctgttcaggagaagcatcagcccaaagcagagttgctgactcgaacgttacaatctgcgctggaacaacgcgcgtctgatattcatatcgaaccagcggacaatgcctaccgcatccgcttgcgtatcgacggcgtattgcatcctttaccggatgtttcaccggatgccggagtcgcattaaccgccagattaaaagtgctgggcaacctggatattgcggaacatcgcctgccgcaggacgggcaattcactgtcgaactggcaggaaacgccgtctcatttcgtattgcgaccttaccatgtcggggtggtgaaaaggtggtattaagattgttacagcaggtgagtcaggcactggatgtcaacacgcttggaatgcagccgttacaactggcggactttgctcatgccttgcaacaaccacagggactggtgctggtaacaggccctacaggcagcggcaaaacggtcacgctttatagtgccctgcaaacgctgaatactgctgatattaatatttgtagcgtcgaagatccggttgagatccccatagccggactaaaccagacgcaaatccatccgcgtgccggtcttacctttcagggcgttttgcgtgcgttattgcgccaggaccctgacgtcattatgatcggagagatccgcgatggcgaaacagcagagatcgctattaaagcggcgcaaaccggtcacctggtgttgtctaccctacacaccaactccacctgcgaaacgctggtgcgtttacagcaaatgggcgttgctcgctggatgctctcatcagcgcttacgctggtaatagcccagcgtctggtacgcaaactttgcccacattgtcgccgacagcaaggggagccaatccatattccagacaatgtatggccgtcgccgctgccccgctggcaagcccctggttgtagacactgctaccacggtttttatggtcgtacggccttatttgaagttctacccataacaccgatcatacgccagcttatttccgctaataccgacgttgaatcgctggaaacacacgcccgacaggcgggtatgcgtacgctttttgaaaacggctgcctggccgtggagcaaggcttaaccacctttgaagagttaatccgcgtattggggatgccgcatggcgagtaa

SEQ ID NO: 261251 - DNA, 441 bp, Klebsiella pneumoniae
atggacaagcaacgcggttttacacttatcgaactgatggtggttattggcatcattgccattttaagcgccattggtattcccgcttatcaaaactacctgcgcaaagccgcactcaccgacatgctacaaacctttgtgccttaccgtaccgccgtagagttgtgcgcgctggaacatggtggattaaatacctgcgacagtggcagcaatggcattccctcgcctaccaccacccgctatgtttcagccatgagtgtggcaaagggcgtggtgtcgctgaccgggcaagaaagtctcaatgggctaagcgtcgtcatgacaccgggttgggataacgcaaacggcgtcaccggttggacgcgcaactgcaatattcaaagtgacagcgcattgcagcaagcctgcgaagatatcttccgttttgatgacgccaactaa

SEQ ID NO: 261252 - DNA, 894 bp, Klebsiella pneumoniae
atgccgcctcgccgctataaccctgacacccgacgtgacgagctgctggaacgcattaatctcgatatccccggcgcggtggcccaggcgctgcgggaagatttaggcggaacagtcgatgccaacaatgacattacggcaaaacttttaccggaaaactctcgctctcatgccacagtgatcacccgcgagaatggcgtattttgcggcaaacgctgggttgaagaggtgtttattcaactggcaggcgacgatgtcaccataatctggcatgtggatgacggcgatgtcatcaacgccaatcaacccttgttcgaacttgaaggcccatcccgcgtgctgttaacgggcgaacgcactgcgcttaattttgtgcaaaccctttcaggggttgccagtaaggtacgccactatgtcgaattactggagggcaccaacacgcagttgttggatacgcgcaaaaccttacccggcctgcgttcagctctgaaatacgcggtactttgcggcggcggagcgaatcaccgtctggggctttctgatgcctttctgatcaaagaaaaccatattattgcctccggctcagtgcgccaggcggtcgaaaaagcatcctggctgcacccggatgcgccagtagaagtcgaagtagagaatctggaagaacttgatgaagccctgaaagcaggtgccgatatcatcatgctggataacttcgaaacagaacagatgcgcgaagccgtcaaacgcaccaacggcaaggcgctactggaagtgtctggcaacgtcactgacaaaacactgcgcgaatttgccgaaacgggcgtggactttatctccgttggtgcactaactaaacacgtacaggcactcgacctttcaatgcgttttcgctaa

SEQ ID NO: 261253 - DNA, 552 bp, Klebsiella pneumoniae
atgttgttagaacaggggtggctggttggcgcgcgccgcgttccctcaccacattacgattgccgcccggatgacgaaacacccaccctgctggtggtgcacaatattagcctgccgccaggcgagtttggcggtccgtggatcgacgcattattcactggaactattgatccgcaggcacatcctttctttgctgagatcgcccatttgcgcgtctccgctcactgtttgattcgccgcgatggtgaaatagtccagtatgttcctttcgataaacgtgcctggcatgccggagtctctcagtatcaggggcgcgaacgctgcaatgatttttctattgggattgagctggaaggcaccgatacgctggcgtataccgatgcgcagtatcaacagcttgcggcggttacgcgggcactgattgatcgctatccagatatcgctaataacatgacgggccattgtgatattgcgccggatcggaaaaccgatcccggtcctgcatttgattgggcacggtttcgtgcgctggtcaacaaggagacaacatga

SEQ ID NO: 261254 - DNA, 855 bp, Klebsiella pneumoniae
atgacgctatttacaaccttactggtgttaattttcgagcgcctgtttaagttgggcgagcactggcagcttgatcatcgtcttgaagcgttctttcggcgggtgaaacatttttctctcgggcgcacattaggcatgaccattattgcgatgggcgtgacttttttactgttacgcgcattgcagggagtattgttcaacgttcccacgctgctggtgtggctgctgattggtttgctgtgtattggcgcaggtaaagttcgtcttcattatcatgcttatctgacagctgcttcacgtaatgatagccatgcccgtgccacgatggctggcgaactcaccatgattcacggcgtcccggcaggctgcgatgaacgtgagtatttgcgtgagctgcaaaatgcattgctgtggattaactttcgtttttatcttgcaccgctgttctggctgattgtggggggaacctggggacccgttacgctgatggggtatgcgtttttgcgtgcatggcaatactggctggcgcgttaccagacgccgcatcatcgtttacagtccggcattgatgccgtgcttcatgtactggattgggtgccggttcgtcttgcgggtgtggtatatgccttgatcggtcatggggagaaagcgttaccggcctggtttgcttcgctgggtgatttccatacttcgcaatatcaggtattaacgcgtctggcgcagttctctctggcgcgtgaaccgcatgtcgataagctggagacgccgaaggcagcggtttccatggcgaagaaaacctcgttcgtggtcgtggtggtgattgcgctactgacgatttacggggcgttggtgtaa

SEQ ID NO: 261255 - DNA, 204 bp, Klebsiella pneumoniae
ttgttcttcaacggggatggtgttgatgtagttgctgataccggtgcctgcggctacgttgacaccgcctttgcgggcttcagcaagcagttggtcgatcagatactgagcacgctcaacaccttcttcacggatgaccgattcgatcgcctggagccagtcgcgagtttcgatcggatccacgtcatttgggaaacgttctga

SEQ ID NO: 261256 - DNA, 1191 bp, Klebsiella pneumoniae
ttgcaggctcggcagctcaagcttctcggtgaagttcggctgacggcttggcagataaccgtgcagtttctgacgctgagcgtgcagataggtatgctcttcagaaccttccgggaaggtgatgtacggcagtttttcgatatctgcatcagacaccggcacattgaaacggtcgcggatatgacgcacgccgtccatgttcattttcttaacctggtgcgcgatgtttttaccttcagccgcgtcgcccatgccgtaacctttaatggtatgagcaaggattaccgtcgctttgcctttggtttcctgcgctttcttgaatgcagcgtagattttcttcggatcgtgaccgccacggttcagcgcccagatctgctcgtcagtccagtctgcaaccagagctgcggtttccggatatttaccgaagaagtgttcacgaacgtacgcaccatctttcgatttgaaggtctggtagtcgccgtcaacggtttcgttcatcagctggatcagtttaccgctggtatctttacgcagcagttcatcccaacggctaccccacatcactttgatcacgttccagccagcaccttcgaagatgccttccagttcgttgatgatcttgccgttaccggtgaccgggccgtcaagacgctgcaggttacagttgataacgaagaccaggttatccagtttttcacgggtagcgatggtgatcgcacctttggattccggttcgtccatttcaccgtcgccgaggaaggcgtaaacggtctgtttagaggtatctttcaggccacggtgttccagatatttcaggaatttagcctggtaaatagcaccaatcggacccagacccatagatacggtcgggaactgccagaattccggcatcagtttcgggtgcggataggaagagaggccattgccgtgaacttcctgacggaagttatccagctgctcctgagtcagacgaccttccaggaaagcacgagcgtaaacgcccggggagatgtggccctggaagtaaaccagatcgccgccatcctgctcgttgcgtgcacggaagaagtgattaaagcacacatcataaatggttgcggaagactggaaggacgccatgtggccgcccagttcgaggtcttttttcgacgcacgcagaaccgtcatgatggcgttccagcggatagctga

SEQ ID NO: 261257 - DNA, 1119 bp, Klebsiella pneumoniae
atgactggagataacaccctcatccattctcacggcattaaccgtcgtgatttcatgaagctttgtgcagcattagccgccaccatggggttaagtagcaaagccgctgcagagatggccgaatcggttactaacccgcagcgtccgccagttatctggattggcgcgcaggagtgcaccggttgtacggaatctctgcttcgtgcaacgcatccaacggtagaaaacctcgtgctggagactatctctctggagtatcacgaagtgctttccgccgccttcggtcatcaggtcgaagagaacaaacataacgctctcgagaagtacaaagggcagtatgtgttagtggtggatggttccatcccattaaaagataacggtatttattgcatggttgccggtgagccgattgtggatcacatccgcaaagcggcggaaggcgcagcagccattatcgctatcggttcctgctctgcgtggggcggtgttgccgcggctggggttaacccaactggcgcagtcagcctgcaagaagttctgccgggcaaaactgtaatcaacattcctggctgcccgccgaacccgcacaacttcctcgcgaccgttgcgcacatcatcacttacggcaagccgccgaaactggatgacaaaaaccgtccgaccttcgcctatggccgtctgattcacgaacactgcgaacgtcgcccgcacttcgatgctggtcgttttgccaaagagttcggtgatgaaggccaccgcgaaggctggtgcctgtaccacctcggctgtaaagggccagaaacttacggcaactgctcaacgctgcaattctgcgatgttggcggtgtgtggccggtggcgattggtcacccgtgctatggctgtaacgaagaaggtatcggcttccataaaggcatccatcagcttgccaacgtcgaaaaccagactccgcgttcacagaaaccggatgttaacgctaaagaaggcggcaacgtctcggcaggcgctattggtttgctcggcggtgtggttgggctggttgccggtgtcagcgtgatggcggtgcgtgaactgggtcgtcagcaaaagaaagataacgctgactcacggggagaataa

SEQ ID NO: 261258 - DNA, 288 bp, Klebsiella pneumoniae; identical to SEQ ID NO: 1280

SEQ ID NO: 261259 - DNA, 765 bp, Klebsiella pneumoniae
atgacggcattagcgttgtttgatttgctcaagccaaattatgcgctggcgactcaggtagagtttaccgacccggaaattgttgctgagtacatcacgtatccttcgccaaatggtcacggcgaggtgcggggttatctggtgaagcccgcaaagatgagcggcaaaacgccagccgtagtggtggtgcatgagaatcgtggactgaatccgtatatcgaagatgtggcacggcgagtggcgaaggcggggtatatcgccctggcacctgacggcttaagttccgttggaggttatccgggaaatgatgataaaggtcgtgagctgcaacagcaggttgatccaaccaaactgatgaatgatttctttgccgcgattgagtttatgcaaagctatccgcaagcgacaggcaaagtgggtattactggattttgctatggcggtggcgtatcgaacgcggcagcggtcgcttacccggaactggcctgcgcggtgccgttttatggtcgtcaggcacccactgccgatgtggcgaagattgaagcgcctttactgttgcactacgcggaactggatacccgaatcaacgagggctggcctgcttacgaggcggcgttgaaagccaataataaggtctatgaggcgtatatctatccgggggttaatcacggattccataatgattccacgccccgttatgacaaatctgccgccgatcttgcctggcaaaggacgctgaaatggttcgataaatatctctcctga

SEQ ID NO: 261260 - DNA, 144 bp, Klebsiella pneumoniae; identical to SEQ ID NO: 5468

SEQ ID NO: 261261 - DNA, 1041 bp, Klebsiella pneumoniae
atggtctggttagcgaatcccgaacgttacgggcagatgcaataccgctattgcggaaaaagtggtttacgcctgcccgcgttatcgctcggtttatggcacaatttcggtcacgttaacgcgctggaatcacagcgtgcgatcctgcgtaaagcgtttgatttgggcattacgcactttgatttagccaacaattacgggccgcctccaggaagcgcagaagagaactttggtcgcctgctgcgggaggattttgccgcttatcgcgatgaactgattatctctaccaaggctggctacgatatgtggcccggcccttacggctctggcggttcacgtaaatacctgctcgccagcctcgaccaaagcctgaagcgtatggggcttgagtatgtcgatatcttttactctcatcgcgtcgatgaaaatacgccgatggaagaaaccgcctctgcgctggctcatgcggtacaaagcggtaaggcgctgtatgtcgggatctcctcttactcgccagagcggacgcaaaaaatggtcgagttgctgcgcgagtggaaaattccgcagttaattcatcaaccttcgtacaatttactgaaccgctgggtggataaaagcggcctgctggataccctgcaaaataacggcgtgggctgtattgcctttactcctctggctcagggattgctgaccggaaaatatctcaacggcattccgcaagattcacggatgcatcgtgaagggaataaagttcgtggtctgacaccgaaaatgcttaccgaagccaacctcaacagcctgcgcttattgaatgaaatggcacagcagcgtggacaatcaatggcgcaaatggcgttaagctggttgctgaaagatgatcgcgtgacgtcggtattgattggtgccagccgcgcggagcaactagaggagaacgtgcaggcgctgaataatctgacatttagcaccaaggagctggcgcagattgatcagcatatcgccgatggcgagctgaatctgtggcaggcgtcttccgataaatga

SEQ ID NO: 261262 - DNA, 495 bp, Klebsiella pneumoniae
atggaacgttttcttgaaaatgcaatgtatgcttctcgctggctgcttgcccccgtgtactttggcctttcgctggcgttagttgccctggcgctgaagttcttccaggagattattcacgtactgccgaatatcttctcgatggcggaatcagatttgatcctcgtgttgctgtcgctggtggatatgacgctggttggcggtttgctggtgatggtgatgttttccggttatgagaatttcgtctcacagctggatatctccgagaacaaagagaagctgaactggctggggaaaatggacgcaacgtcgctgaaaaacaaagtagcagcgtcgattgtggcaatttcttccattcacttactgcgcgtctttatggatgcgaaaaatgtcccggataacaaactgatgtggtacgtcattatccatctgacgtttgtgctttctgcatttgtgatgggctatcttgaccgactgactcgtcataatcactga

SEQ ID NO: 261263 - DNA, 885 bp, Klebsiella pneumoniae; identical to SEQ ID NO: 15131

SEQ ID NO: 261264 - DNA, 426 bp, Klebsiella pneumoniae
atggcaatgcatcttaacgaaaacctcgacgataacggcgaaatgcatgatatcaacgtgacgccgtttatcgacgtgatgttggttctgctgattatctttatggtggcggcaccgttagcgacggtagatgtgaaggtgaacttgcctgcttctaccagcacgccgcagccgcgcccggaaaaaccggtttatctgtcggtgaaggcagacaactcgatgtttatcggtaacgatccggtcaccgatgaaacaatgattacggcgttgaatgcgttaaccgaaggcaagaaagacaccaccatcttcttccgagcggacaaaaccgtcgattacgagacgttgatgaaggtaatggatacgctgcatcaggcgggttacctgaagataggtctggtcggcgaagaaaccgccaaagcgaagtaa

SEQ ID NO: 261265 - DNA, 735 bp, Klebsiella pneumoniae
gtgggtaataatttaatgcagacggacctttccgtctggggtatgtatcagcacgccgatattgtcgttaagtgcgtgatgattgggcttattttggcctccgtagtcacctgggcaatcttcttcagtaagagcgtagagttcttcaatcagaagcgtcgccttaagcgcgagcagcaactgctggctgaagcgcgttccttaaaccaggccaacgatatcgccgctgattttggtagcaaaagcttaagcctgcatttgctcaatgaagcgcagaatgagctggaactgtcagaaggcagcgacgataacgaaggtattaaagaacgtaccagcttccgtctggagcgtcgggtcgccgcagtgggtcgtcaaatgggccgcggtaacggctatctggcaaccatcggcgcgatttctccgttcgttggtctgtttggtacggtctggggcatcatgaacagctttattggtatcgcgcaaacgcagaccactaacctggcagtcgttgcgccgggtatcgcagaagctctgttagcaacggcaatcggcctcgtggcagcgattcctgcggtcgttatctataacgtatttgcacgccagattggcggctttaaagcgatgctgggtgatgttgcagcgcaggtattgttgctgcaaagccgtgacctggatctggaagccagcgccgctgcgcatccggttcgtgtcgcacaaaaattacgcgcaggataa

SEQ ID NO: 261266 - DNA, 1188 bp, Klebsiella pneumoniae
atggcggacaaaaagcttgatactcaactggtgaatgcaggacgcagcaaaaaatacactctcggcgcggtaaatagcgtgattcagcgcgcttcttcgctggtctttgacagtgtagaagccaaaaaacacgcgacacgtaatcgcgccaatggagagttgttctatggacggcgcggaacgttaacccatttctccttacaacaagcgatgtgtgaactggaaggtggcgcaggctgcgtgctatttccctgcggggcggcagcggttgctaattccattcttgcttttatcgaacagggcgatcatgtgttgatgaccaacaccgcctatgaaccgagtcaggatttctgtagcaaaatcctcagcaaactgggcgtaacgacatcatggtttgatccgctgattggtgccgatatcgttaagcatctgcagccaaacactaaaatcgtgtttctggaatcgccaggctccatcaccatggaagtccacgacgttccggcgattgttgccgccgtacgcagtgtggtgccggatgccatcattatgatcgacaacacctgggcagccggtgtgctgtttaaggcgctggattttggcatcgatgtttctattcaagccgccaccaaatatctggttgggcattcagatgcgatgattggcactgccgtgtgcaatgcccgttgctgggagcagctacgggaaaatgcctatctgatgggccagatggtcgatgccgataccgcctatataaccagccgtggcctgcgcacattaggtgtgcgtttgcgtcaacatcatgaaagcagtctgaaagtggctgaatggctggcagaacatccgcaagttgcgcgagttaaccaccctgctctgcctggcagtaaaggtcacgaattctggaaacgagactttacaggcagcagcgggctattttcctttgtgcttaagaaaaaactcaataatgaagagctggcgaactatctggataacttcagtttattcagcatagcctactcgtggggcgggtatgaatcgttgatcctggcaaatcaaccagaacatatcgccgccattcgcccacaaggcgagatcgattttagcgggaccttgattcgcctgcatattggtctggaagatgtcgacgatctgattgccgatctggacgccggttttgcgcgaattgtataa

SEQ ID NO: 261267 - DNA, 660 bp, Klebsiella pneumoniae
atggctgttattcaagatatcatcgctgcgctctggcaacacgactttgccgcgctggcggatcctcatattgttagcgttgtttactttgtcatgtttgccacgctgtttttagaaaacggcctgctgcccgcctcatttttgccaggcgacagcttgttgatactggcaggcgcattgattgcccagggggttatggattttctgcctacgattgcgattctgaccgccgcagcaagtctgggctgctggctaagttatattcaggggcgctggttagggaataccaaaacggtgaaaggctggctggcacagcttcctgctaaatatcaccagcgcgccacctgcatgtttgaccgccacggtctgctggcgctgctggctggacgttttcttgcatttgtccgtacgctgctgccaaccatggcgggaatttccggtctgccaaaccgccgcttccagtttttcaactggttaagtggattgctgtgggtcagcgtggtaaccagttttggctatgccttaagtatgattccgttcgttaaacgccatgaagatcaggtaatgacgttcctgatgatcctgccaattgccttgttaaccgctggcttgttaggcacgctgtttgtggtgattaaaaaaaaatactgtaacgcctga

SEQ ID NO: 261268 - DNA, 1164 bp, Klebsiella pneumoniae
atgaacaactttaatctgcacaccccaacccgcattctgtttggtaaaggcgcaatcgctggtttacgcgaacaaattcctcacgatgctcgcgtattgattacctacggcggcggcagcgtgaaaaaaaccggcgttctcgatcaagttctggatgccctgaaaggcatggacgtgctggaatttggcggtattgagccaaacccggcttatgaaacgctgatgaacgccgtgaaactggttcgcgaacagaaagtgactttcctgctggcggttggcggcggttctgtactggacggcaccaaatttatcgccgcagcggctaactatccggaaaatatcgatccgtggcacattctgcaaacgggcggtaaagagattaaaagcgccatcccgatgggctgtgtgctgacgctgccagcaaccggttcagaatccaacgcaggcgcggtgatctcccgtaaaaccacaggcgacaagcaggcgttccattctgcccatgttcagccggtatttgccgtgctcgatccggtttatacctacaccctgccgccgcgtcaggtggctaacggcgtagtggacgcctttgtacacaccgtggaacagtatgttaccaaaccggttgatgccaaaattcaggaccgtttcgcagaaggcattttgctgacgctaatcgaagatggtccgaaagccctgaaagagccagaaaactacgatgtgcgcgccaacgtcatgtgggcggcgactcaggcgctgaacggtttgattggcgctggcgtaccgcaggactgggcaacgcatatgctgggccacgaactgactgcgatgcacggtctggatcacgcgcaaacactggctatcgtcctgcctgcactgtggaatgaaaaacgcgataccaagcgcgctaagctgctgcaatatgctgaacgcgtctggaacatcactgaaggttccgatgatgagcgtattgacgccgcgattgccgcaacccgcaatttctttgagcaattaggcgtgccgacccacctctccgactacggtctggacggcagctccatcccggctttgctgaaaaaactggaagagcacggcatgacccaactgggcgaaaatcatgacattacgttggatgtcagccgccgtatatacgaagccgcccgctaa

SEQ ID NO: 261269 - DNA, 828 bp, Klebsiella pneumoniae
atggctaatccaaccgttattaagctacaggatggcaatgtcatgccccagctgggactgggcgtctggcaagcaagtaatgaggaagtaatcaccgccattcaaaaagcgttagaagtgggttatcgctcgattgataccgccgcggcctacaagaacgaagaaggtgtcggcaaagccctgaaaaatgcctcagtcaacagagaagaactgttcatcaccactaagctgtggaacgacgaccacaagcgcccccgcgaagccctgctcgacagcctgaaaaaactccagcttgattatatcgacctctacttaatgcactggcccgttcccgctatcgaccattatgtcgaagcatggaaaggcatgatcgaattgcaaaaagagggattaatcaaaagcatcggcgtgtgcaacttccagatccatcacctgcaacgcctgattgatgaaactggcgtgacgcctgtgataaaccagatcgaacttcatccgctgatgcaacaacgccagctacacgcctggaacgcgacacacaaaatccagaccgaatcctggagcccattagcgcgaggagggaaaggcgttttcgatcagaaagtcattcgcgatctggcagataaatacggcaaaaccccggcgcagattgttatccgctggcatctggatagcggcctggtggtgatcccgaaatcggtcacaccttcacgtattgccgaaaactttgatgtctgggatttccgtctcgacaaagacgaactcggcgaaattgcaaaactcgatcagggcaagcgtctcggtcccgatcctgaccagttcggcggctaa

SEQ ID NO: 261270 - DNA, 927 bp, Klebsiella pneumoniae
atgaaaataatacttctgtttttagcagccctggcaagttttaccgtacacgcacagcccccctcacagaccgtagaacaaacagtccggcatatttatcagaactataaatcagatgccactgccccttattttggtgaaaccggagagcgggcgataacttctgcgcgtattcaacaggcgcttaccctgaacgacaatcttacgctgccgggcaatattggctggctggattatgatccggtttgtgattgtcaggattttggcgatctggtgctagaaagcgttgcgataacccaaactgacgccgatcatgccgatgccgttgtgcgctttcgtatctttaaagatgataaagaaaagaccacgcagacactgaaaatggtggcggaaaatggtcgttgggtcattgacgatattgtcagcaatcatggcagcgtcttacaagcagttaatagcgagaatgaaaaaacgctggccgctttagcttcgttgcaaaaagaacagccggaagcctttgttgccgaactctttgaacatattgctgattatagctggccgtggacgtgggtggtttccgactcttaccgccaggcggttaatgccttctataaaaccaccttcaagacggccaataatcccgatgaagatatgcaaatagaacggcaatttatttacgacaatccgatctgttttggcgaagagtcgctattttcacgcgttgatgaaattcgagtcctggagaaaaccgccgattccgcccgcattcatgttcgttttacgctgaccaatggcaacaacgaagagcaagaactggttttacagcggcgcgaaggcaagtgggaaatcgctgattttatccgcccgaacagcggcagcctacttaagcagattgaggcaaaaactgccgccagattaaagcaatga

SEQ ID NO: 261271 - DNA, 258 bp, Klebsiella pneumoniae
atgaaaacgattttcaccgtgggagctgttgttctggcaacctgcttgctcagtggctgcgtcaatgagcaaaaggtcaatcagctggcgagcaatgtgcaaacattaaatgccaaaatcgcccggcttgagcaggatatgaaagcactacgcccacaaatctatgctgccaaatccgaagctaacagagccaatacgcgtcttgatgctcaggactattttgattgcctgcgctgcttgcgtatgtacgcagaatga

SEQ ID NO: 261272 - DNA, 738 bp, Klebsiella pneumoniae
atgctatatatctttcgtcttattattaccgtgatttacagcatcttagtctgtgtattcggctccatttactgccttttcagcccgcgtaacccgaaacatgtggccacctttgggcatatgtttggccgtcttgcgccgctgtttggcctgaaagttgagtgccgtaaacctacagacgctgaaagctacggcaatgctatctatatcgctaaccaccagaacaactatgacatggtgacagcatcgaacatcgtgcaaccgccgacggtgacggtaggtaaaaagagcttgctgtggatccccttcttcgggcagttgtactggttaaccggcaacttattgatcgacagaaacaatcgcactaaagctcacggcaccattgcggaagtagtgaatcacttcaaaaaacgccgtatttccatctggatgttcccggaaggaacccgcagccgtggtcgcggcctgctaccgttcaagactggagcatttcacgcggcaattgcggcgggcgtcccgattattcccgtgtgcgtctctacaacttcgaataagattaatcttaatcgactgcacaacggtctggtgattgtcgaaatgctgccgccaattgacgtcagtcagtatggcaaagatcaggttcgtgagctggctgcccattgtcgttcgataatggaacaaaaaatcgccgagctcgataaagaagtcgcagaacgcgaagccgccggaaaagtttaa

SEQ ID NO: 261273 - DNA, 765 bp, Klebsiella pneumoniae
atggcctttagcgctgcgtacccagcccatctgcgacagcacaatggtgacaggttcagacggcagcatgtcgtgctcgctcatcgctttcgcttcttcgcgttcctgcaacggcgaacgacgatcgtcaccgtaggcttgcgcgtctgcctgcagttctttcttcagcaggttattcattttacgctcggaagccaaaatgccctgcaactggtcgcgctctttttccagttcactctgctcaccgcgaatcttcatctcttccagtttggcaagatgacgcagtttcagttcgaggatcgcttccgcctgggtttccgtaaggccaaaccgcgacatcagcgccggtttcggttcatcttcattacgaatgatctcaatcacttcgtcgatattgagaaacgccaccagcaaaccttcgaggatatgcaggcgcttgaggactttctccagacgatagttcagtcggcggcgcacggtatcgcggcggaacaccagccattcggagaggatttccagcaggtttttcaccgccggacgaccatccagaccgatcatattaaggttaatacgatagctcttttccagatcggtggtagcgaagaggtggttcatcacctgatccatatccacgcggttggaacgcggcacaatcaccaggcgggtcgggttctcgtggtcagattcatcgcgcagatcgtcaaccatcggcagctttttgttgcgcatttgcgcagcaatttgctccagtacgcgcgcacctga

SEQ ID NO: 261274 - DNA, 1608 bp, Klebsiella pneumoniae
atgtatacgcgaaatttattatggctggtcagcctggtaagtgcggctcctctctacgctgctgacgttcccgccaacacaccgctcgccccgcaacaagtctttcgttacaacaatcatagcgacccaggtacgctcgacccgcaaaaggtggaggagaatactgccgcgcagattgtgctggatctgtttgaaggtctggtatggatggacggtgaaggcctggtgcagcccgctcaggctgaacgctgggagatactggacggcggcaagcgctatattttccatctgcgtagcggtttgcagtggtccgacggtcagcctctgacggcagaggattttgtcctcggctggcagcgcgcggttgacccgaaaacggcaagcccttttgctggctatctggcacaggcgcacattaacaatgccgcagctattgttgcgggtaaagcagatgttacatcgctgggtgtcaaagcgacggatgatcgtactcttgaagttacgcttgagcagccggttccttggttcacgacgatgctcgcctggccgacgctgttcccggttcctcatcatgtcatcgctaaacatggcgatagctggagtaagccagagaacatggtttacaacggtgcctttgtgcttgatcagtgggtagttaacgaaaagattactgcacgcaaaaatccaaagtaccgcgatgcgcaacatacagtattgcaacaggttgagtatctggcgctagataattcggtcaccggctataaccgctatcgcgcgggagaggtcgatctcacctgggttccggcgcagcaaattcccgccattgaaaaatcactgcctggcgagctacgaattattccgcgtctgaacagcgaatattacaacttcaaccttgagaaaccgccatttaacgatgtgcgagtgcgtcgggcgctatatcttacggttgatcgacagcttattgcgcaaaaggtactggggttgagaacgcccgcaaccacgctgacgccgccagaggtaaaaggctttagcgcgacgacgttcgatgaactgcaaaagccaatgagtgagcgcgtcgcgatggcaaaagccttgctgaaacaggcgggatacgacgcctctcatccgctacgctttgagctgttctacaacaagtacgatctgcatgaaaagacctcgatagcgttgtcttccgaatggaaaaaatggctgggtgcacaggtgacgctgcgcacaatggagtggaaaacctatcttgatgcccgacgagccggtgatttcatgctgtctcggcagtcgtgggatgcgacgtacaatgatgcttccagcttcctgaacacgctcaaaagcgatagtgaagaaaacgtcggtcactggaaaaatgcgcagtatgacgccttactaaaccaggccacgcagatcactgatgcgacaaagcgtaatgcgttgtatcagcaggcagaagtgatcatcaaccaacaggcaccgctgattcctatctactatcagccgttaatcaaactgcttaaaccctacgttggcggttttccgctgcataatccccaggattatgtctacagcaaagagttgtatatcaaggcacattga

SEQ ID NO: 261275 - DNA, 396 bp, Klebsiella pneumoniae; identical to SEQ ID NO: 11178

SEQ ID NO: 261276 - DNA, 297 bp, Klebsiella pneumoniae
atggaaaaacgcacaccacatacacgtttgagtcaggttaaaaaacttgtcaatgccgggcaagttcgtacaacacgtagtgccctgttaaatgcagatgagttaggtttggattttgatggtatgtgtaatgttatcattggattatcagagagcgacttttataaaagcatgaccacctactctgatcatactatctggcaggatgtttacagacccaggcttgttacaggccaggtttatcttaaaattacggtaattcatgacgtactgatcgtctcgtttaaggagaagtaa

SEQ ID NO: 261277 - DNA, 483 bp, Klebsiella pneumoniae
atgacaaacctgacactggatgtaaacattatcgatttcccatcaatacctgtggcgatgttgccgcaccgctgtagccctgaattgctcaactacagcgtggcgaaatttatcatgtggcgtaaagagacggggctttctcctgttaaccaaagccagacttttggcgtcgcctgggacgaccctgccaccaccgcaccggaagcgtttcgctttgatatctgcggcagcgttagcgaaccgattcccgataatcgttatggtgtgagcaatggtgaacttaccggtggacgttatgccgtggcccgccacgttggcgagctggacgatatttcacacacggtatggggcatcattcgccactggctgcctgcaagcggcgagaaaatgcgtaaagcaccgattctgtttcactacaccaatcttgccgaaggggtgacagagcagcgactggaaacggatgtttatgtgccgttggcgtga

SEQ ID NO: 261278 - DNA, 393 bp, Klebsiella pneumoniae
atgaaaaaattcgcagcagtaatcgcagtaatggccctgtgcagcgcaccggtgatggcagcagagcagggcggtttttctggcccatcggcaacgcaaagtcaggccggaggattccaggggccgaacggcagcgtaacgactgtagaaagcgcaaaatccctgcgtgacgacacctgggtaaccctgcgcggcaatatcgttgaacgcatctctgacgatctctacgtgttcaaagatgccagcggtactatcaatgttgatatcgaccacaaacgctggaacggcgtgacggtgacgccgaaagatacggttgagattcagggtgaagtcgataaagactggaattctgttgaaattgacgtcaaacagatccgcaaagtaaatccgtaa

SEQ ID NO: 261279 - DNA, 660 bp, Klebsiella pneumoniae
atgcgaattttactgatagaagatgacatgctgattggcgacggcatcaaaacgggccttagtaaaatgggttttagcgtcgactggtttacacaaggtcgtcagggaaaagaggcgctttatagcgcaccttatgatgcggtgatcctggatttaaccttaccaggcatggatggtcgcgatattttgcgcgaatggcgagaaaaaggtcagcgtgagccggtactgatcctgaccgcgcgcgatgcgctggcggaacgtgtagaagggctgcgtctgggagctgacgattatctgtgtaaaccttttgcgttgatagaagtcgccgccaggctggaagctctgatgcgccgaaccaacggccaggccagcaacgagctgcgccacggtaacgtcatgctcgaccccggcaaacgtatcgccacgctggctggcgaacccttaacactgaaaccaaaagaatttgccctgctggaattactgatgcgtaacgctggtcgggtactgccgcgcaaactgattgaagagaaactgtatacctgggacgaagaggtcaccagtaatgccgttgaagtgcatgtgcatcatctgcgacgcaaactcggtagtgattttattcgtaccgtgcatggtattggttacacattaggtgagaaatga

SEQ ID NO: 261280 - DNA, 1350 bp, Klebsiella pneumoniae
atgaaatttacccaacgtcttagtctgcgcgtcaggctgacgctaatctttttaattctggcctcggtgacctggctgctttccagctttgtcgcctggaaacaaacaacggataacgtcgatgaattgttcgacacccaactgatgctgtttgccaagcggttaagtacgctcgatctcaacgaaatcaacgcggcggatcgcatggcacagacgccaaatagattaaaacacggtcatgttgatgacgatgcgctgacctttgccatctttacccacgacggcagaatggtccttaatgatggcgataacggagaagatattccctatagctatcaacgggaaggttttgctgacgggcaactggtcggtgaagacgatccttggcgttttgtctggatgacctcacctgatggcaaatatcgcatcgttgttggccaggaatgggaataccgtgaagacatggcgctggcgattgttgccgggcaattgatcccgtggctggtcgcactgccgattatgttaatcatcatgatggtactactgggtcgtgaactcgcgccgctgaacaaactggcgctggcactacgtatgcgtgaccctgactcggaaaaaccactaaacgcgactggcgtacccagcgaagtgcggccactggttgagtcgctaaatcaactgttcgcccgcacacatgcgatgatggttcgtgaacgacgctttacctccgacgcagctcacgaacttcgtagcccgttaacggcgctgaaagtgcaaaccgaagttgcgcagctctctgacgatgatccgcaggcgcggaaaaaagcactgctccaattacattccgggatcgatcgcgctactcgtctggttgatcaactgctcacgctatcgcggctggactcactggataaccttcaggacgtcgcggagatcccgcttgaagatctcctgcaatcgtcggtgatggatatttaccacacggcgcagcaggcgaaaattgacgtgcgactgacactcaatgcccacagcatcaaacgcaccgggcaaccgctattgctaagtttgttggtgcgaaatttgctggataacgccgtgcgctacagtccacagggcagcgtggtagacgtcacgctgaatgctgataatttcatcgtgagggataacggccccggtgtgacaccagaggcactggcgcgaattggcgaacgcttctatcgcccacccggacaaaccgctaccggcagcgggcttgggctatcgattgtccagcgaatcgccaaattgcatggcatgaatgttgaatttgggaatgcggaacaaggtggatttgaggcgaaggtaagctggtaa

SEQ ID NO: 261281 - DNA, 582 bp, Klebsiella pneumoniae
atgagcaacatcctgattatcaacggcgcgaaaaaattcgcccactccaatggtcaactgaacgacaccctgaccgaagtcgcggatggcacactgcgcgaccttgggcatgatgtccgcatcgttcgcgccgacagcgactacgatgtcaaagcggaagtacaaaactttctctgggctgatgtggtgatctggcagatgccaggctggtggatgggcgcgccgtggacagtgaaaaaatacattgatgatgtattcaccgaaggtcacgggacgctgtatgccagcgatggtcgtacccgcaaagatccgtcgaaaaaatacggttccggcggcctggtacagggcaaaaaatatatgctttctctgacctggaacgcaccaatggaagccttcaccgaaaaagatcagttcttccacggcgttggcgttgacggtgtgtatctgccgttccataaagcaaaccaattcctcggtatggaaccgctgccgacatttatcgctaatgacgtgataaaaatgcctgatgttccccgctatactgaagaatatcgcaagcatcttgtggaaatttttggttaa

SEQ ID NO: 261282 - DNA, 315 bp, Klebsiella pneumoniae
atgcttaccgtaatcgcagaaatccgtactcgtcctggtcaacatcaccgtcaggcggtattggatcagtttgctaaaatcgttccaaccgtactgaaagaagaaggttgccacggctatgcgccaatggtggattgcgcagctggcgtgagtttccagtctatggcaccggattctatcgtgatgattgagcagtgggaaagcatcgcgcatcttgaagcgcatctgcaaaccccgcacatgaaggcgtatagcgaagccgtaaaaggtgacgtgctggagatgaatatccgtattctgcagccagggatttaa

SEQ ID NO: 261283 - DNA, 1893 bp, Klebsiella pneumoniae
atgacgcaaacttataacgctgatgccattgaggtactcaccgggcttgagccggttcgccgccgtccggggatgtataccgataccactcgccctaaccatttggggcaagaagtcattgataacagtgtggatgaagcactggcgggtcacgcaaaacgcgtggacgttattttacatgctgaccagtcgttagaagttattgacgatgggcgcgggatgccggtggatattcacccggaagagggtgtaccggcggttgaactgattctttgccgtctgcatgcaggcggtaaattctctaacaaaaattaccagttctctggcggcctgcatggcgtggggatttcggtggttaacgccctgtcgaagcgcgtagaagttaacgtgcgccgcgatggtcaggtttataacatcgcctttgaaaatggcgaaaaggtgcaggatttacaggttgtcggcacttgcggtaaacgcaatactggtaccagtgtgcacttctggccggatgaaaccttctttgacagcccgcgattttctgtttcacgcctgacgcatgtgctgaaagccaaagcggtattgtgccctggcgttgagatcacttttaaagatgagatcaacaataccgaacaacgctggtgctatcaggacggtctgaatgattacctggcggaagcggtaaatggtctgccgacgctgccggaaaaaccgtttatcggtaattttgctggtgatactgaagctgtggactgggcgctactgtggctgccggaaggcggtgaactgctgaccgaaagctacgtcaaccttatcccaacgatgcagggcggtacccatgttaatggtctgcgtcagggcctgttggacgcgatgcgtgagttctgtgaataccgcaatattctgccgcgcggtgtaaagctgtcggcggaagatatctgggatcgctgcgcctatgtgctgtcagtaaaaatgcaggatccgcagtttgccgggcagacgaaagagcgtctctcttcgcgtcaatgcgcggcattcgtttctggcgtggtgaaagatgcctttatcctgtggctgaaccagaacgttcaggcggctgaactgctggcggagatggcgatttccagcgcccagcgccgtatgcgtgcggccaaaaaagtggtgcgtaaaaagctgaccagcggcccggcgttgcctggcaaactggctgattgtaccgcgcaggaccttaaccgtaccgagctgttccttgtggaaggtgactccgcaggcggatctgccaagcaggcgcgcgatcgcgaatatcaggcgatcatgccactgaaaggtaagatccttaacacctgggaagtctcttccgacgaagtgctggcttcgcaggaagtgcacgatatttcggtagcgatcggtatcgatcctgacagcgacgatctgagccagcttcgttatggcaaaatctgtatcctcgcggatgcggactctgatggtctgcacattgccacgctgctctgcgctttgttcgtaaaacatttccgcgcgttggtgaaacacggtcacgtttacgtcgcactgccaccgctctaccgtattgatctcgggaaagaggtttattacgcgctgacggaagaagagaaagagggcgtacttgagcaattaaaacgcaagaaaggcaagccgaacgtccagcgttttaaaggtctgggggaaatgaacccgatgcaattgcgcgaaaccacgcttgatccgaacactcgccgtctggtgcagttgactatcgatgatgaagacgatcagcgtactgacgcgatgatggatatgctgctggcgaagaaacgctcggaagatcgccgcaactggttgcaagagaaaggcgacatggcggagattgaggtttaa

SEQ ID NO: 261284 - DNA, 582 bp, Klebsiella pneumoniae
atgtctacgcttctttatttacacggtttcaacagctcgccgcgctctgcaaaagcgagcttgttaaaaaactggctggcggaacatcaccctgacgttgagatgatcattccgcagttgccgccgtatccttccgacgcggcagagctgctggaatccattgtcctggaacatggcggtgattcgctgggtattgtcggttcgtcactggggggatattacgccacctggttgtcacaatgttttatgctgcccgcagtggtggtaaacccggcggtgcgcccgtttgaactgctgacggactatctcggtcagaacgagaacccctacaccgggcagcaatatgtgctagagtcacgccatatttacgatcttaaagtcatgcagattgacccgctggaagcgccggatttgatctggctgctgcaacagacgggagatgaagtgctggattaccgccaggcggtggcgtactacgcttcctgccgccagactgtcatagaaggcggcaaccacgcattcacgggcttcgaagattatttcaacccgatcgtcgattttcttggtctgcaccatctctga

SEQ ID NO: 261285 - DNA, 828 bp, Klebsiella pneumoniae
ttggaaagcctgttaacccttcctctggctggtgaggccagagtcaggattttacaaattaccgacactcacctgtttgcacaaaagcacgaagccctgttaggggtaaacacctgggagagttaccaggcggtgctggaggcgattcggccacaccagcacgaattcgacctgattgtcgcgacaggtgatttagcgcaggatcaatcctctgcggcctatcagcatttcgctgaaggcatcgcaagttttcgtgcgccctgcgtctggctgccgggcaaccacgatttccagcccgcgatgtacagcgcgttacaggatgcgggtatctccccggcgaagcgcgtgtttattggtgagcaatggcaaatcctgttgctggatagccaggtgtttggcgtgccgcacggtgagctgagcgagtttcagcttgagtggctggaacgtaaactggccgatgcgccagaacgccatacgttgctgctgctgcatcatcatccgctacctgcgggttgtagttggctcgatcaacacagtctgcgtaacgcgggcgaactggataccgtgctggcgaagtttccgcacgtcaaatacttgctgtgcggtcatattcatcaggagctggatctcgactggaatggtcgccgcctgctggcaacgccgtcgacctgtgtgcagtttaagccgcactgttccaactttacgctggataccatcgcgcccggctggcgtactctcgagttacatgctgatggcacgctgaccaccgaggtgcatcgcctggcggacacacgtttccaacctgataccgcttcagaaggctactga

SEQ ID NO: 261286 - DNA, 630 bp, Klebsiella pneumoniae
atgcttaagccagacaacctgcccgttacatttggcaaaaacgatgtagaaattattgcacgagaaacactttatcgcggctttttttcattagatctttatagatttcgtcatcgtctattcaacgggcaaatgagtcatgaggtgcggcgggaaatttttgagcgcggtcacgccgcagtcttgctaccctttgacccagtgcgtgatgaagttgtgctgattgagcagattcggattgccgcgtacgacaccagcgaaaccccttggctactggagatggttgccgggatgattgaagagggtgaaagtgtggaagatgttgcccgtcgcgaagcgattgaagaggcgggactgatagtcaaacggaccaaaccggtgttaagtttcctggcaagcccggggggcaccagtgagcgttcgtcaattatggtgggcgaagtggacgccacgaccgcaagcggtattcacggtctggctgatgaaaacgaagatattcgcgttcatgtggtaagccgggaacaggcataccagtgggtagaagaggggaaaatcgacaacgcagcgtcggtcatcgctttgcaatggctgcagctgcatcatcaagcgttaaaaaatgagtgggcataa

SEQ ID NO: 261287 - DNA, 1482 bp, Klebsiella pneumoniae
atgaagaaattgctccccattcttatcggcctgagcctttctgggttcagttcgttgagccaggccgagaacctgatgcaagtttatcagcaagcacgccttagtaacccggaattgcgtaagtctgccgccgatcgtgatgctgcctttgaaaaaattaatgaagcgcgcagtccattactgccacagctaggtttaggtgcagattacacctatagcaacggctaccgcgacgcgaacggcatcaactctaacgcgaccagtgcgtccttgcagttaactcaatccatttttgatatgtcgaaatggcgtgcgttaacgctgcaggaaaaagcagcagggattcaggacgtcacgtatcagaccgatcagcaaaccttgatcctcaacaccgcgaccgcttatttcaacgtgttgaatgctattgacgttctttcctatacacaggcacaaaaagaagcgatctaccgtcaattagatcaaaccacccaacgttttaacgtgggcctggtagcgatcaccgacgtgcagaacgcccgcgcacagtacgataccgtgctggcgaacgaagtgaccgcacgtaataaccttgataacgcggtagagcagctgcgccagatcaccggtaactactatccggaactggctgcgctgaatgtcgaaaactttaaaaccgacaaaccacagccggttaacgcgctgctgaaagaagccgaaaaacgcaacctgtcgctgttacaggcacgcttgagccaggacctggcgcgcgagcaaattcgccaggcgcaggatggtcacttaccgactctggatttaacggcttctaccgggatttctgacacctcttatagcggttcgaaaacccgtggtgccgctggtacccagtatgacgatagcaatatgggccagaacaaagttggcctgagcttctcgctgccgatttatcagggcggaatggttaactcgcaggtgaaacaggcacagtacaactttgtcggtgccagcgagcaactggaaagtgcccatcgtagcgtcgtgcagaccgtgcgttcctccttcaacaacattaatgcatctatcagtagcattaacgcctacaaacaagccgtagtttccgctcaaagctcattagacgcgatggaagcgggctactcggtcggtacgcgtaccattgttgatgtgttggatgcgaccaccacgttgtacaacgccaagcaagagctggcgaatgcgcgttataactacctgattaatcagctgaatattaagtcagctctgggtacgttgaacgagcaggatctgctggcactgaacaatgcgctgagcaaaccggtttccactaatccggaaaacgttgcaccgcaaacgccggaacagaatgctattgctgatggttatgcgcctgatagcccggcaccagtcgttcagcaaacatccgcacgcactaccaccagtaacggtcataaccctttccgtaactga

SEQ ID NO: 261288 - DNA, 672 bp, Klebsiella pneumoniae
atgaaacggacaaaatccatacgccacgcatcgttccgcaaaaactggagcgcacgccatctgacaccagtcgctctcgcggttgccactgtttttatgctggctggctgtgaaaagagtgatgaaacagtgtctctctatcaaaatgctgacgactgttcagctgcaaacccaggcaaaagcgccgaatgtaccaccgcgtacaacaatgcgctgaaagaagccgaacgtactgcgccgaaatacgccacccgtgaagactgtgttgctgaatttggtgaaggtcagtgccagcaggcaccagcccaggctggcatggcaccagaaaaccaggcgcaggcccagcaatccagcgggagtttctggatgccgctgatggccggttacatgatggggcgtctgatgggcggcggcgcgggatttgcacagcagccgctgttctcctcgaaaaacccagccagtccggcttacggtaaatataccgacgcgacgggtaaaaactatggcgcagcccagccaggccgcaccatgaccgtaccgaagacggcaatggcaccaaaaccggcgaccaccactaccgttacccgtggcggttttggtgaatctgttgccaaacaaagcactatgcagcgtagtgcaaccggtacctcttctcgttcaatgggtggctga

SEQ ID NO: 261289 - DNA, 1161 bp, Klebsiella pneumoniae
atggaaagagtcagtattaccgagcgcccggactggcgtgagaaagcccacgaatacggtttcaattttcacaccatgtacggcgagccgtactggtgtgaagatgcttactacaagttgaccctcgcccaggttgaaaagctggaagaagtcaccgccgaactgcaccagatgtgcctgaaagtggtggaaaaagtgatcgccagcgatgagctgatgaccaaattccgcattccaaaacacacctggagttttgtgcgccagtcatggctgacgcaccagccatcgctttattcgcgtcttgatctggcgtgggatggcactggtgaacctaaacttctggaaaataacgccgatacgccaacgtcactatacgaggcggcgttctttcagtggatctggctggaagatcagcttaacgccggtaacttgccggagggcagcgaccagtttaacagtctgcaagaaaaactgatcgatcgcttcgttgagctgcgtgaacagtatggcttccagttgctgcatctcacctgctgtcgcgacacggtggaagatcgcggaaccattcagtatttgcaggactgcgcaacggaagctgaaattgctactgagttcctctacatcgatgatatcgggttaggtgaaaaaggtcagttcacggatttacaggatcaggtaatttccaacctgttcaaactgtatccgtgggaatttatgttgcgtgagatgttctcaaccaagctggaggatgcaggcgtacgctggctggaaccggcgtggaagagcattatctccaacaaggcacttctaccgctactgtgggagatgttcccgaatcacccgaacctgctgcccgcttattttgcggaagatgatcatccgcaaatggaaaaatatgtggttaaaccgatcttctcccgtgaaggcgcaaacgtgtcgatcattgagaacggcaaaaccattgaagcagcggaaggtccgtatggcgaagaagggatgattgttcagcaattccacccgttaccgaaattcggcgacagctatatgctgattggtagctggctggtgaacgatcaacccgccggaattggcattcgtgaagaccgtgcattgatcacccaggatatgtctcggttttatccacatatttttgttgaataa

SEQ ID NO: 261290 - DNA, 816 bp, Klebsiella pneumoniae
atgacacctttagttaaggatatcatcatgtcttcaacacgtatgccagcattgtttttaggtcacggtagtccgatgaacgtgctggaagataatttgtatacccgcagctggcagaagttggggatgacattgccacgcccgcaagcgattgtggtggtttcggctcactggtttacccgtggaacaggagtgaccgcgatggagacgccgcccacgattcatgactttggtggcttcccgcaggcgctgtacgatacgcattatcctgctccgggttcgcctgcgctggcacagcgtctggttgagctgttagcgccgatcccggtgacgctggataaagaagcctggggctttgaccacggctcgtggggcgtgctgattaagatgtatcctgacgctgatatcccgatggtgcagttgagtatcgacagtagcaaacctgccgcctggcatttcgaaatggggcgcaaactggcagcgctgcgagatgaaggaataatgttggtcgccagcggtaacgtggtgcataacctgcgcacagtgaagtggcacggtgatagttcaccgtatccgtgggcgacgtcgtttaatgagtatgtgaaagcgaatctgacgtggcaagggccagtggaacaacatcctctggtgaattacctcgaccatgaaggtggcacgttatcgaacccaacgccagagcattatttgccgttgttgtatgtgttaggtgcgtgggatgggcaggagccaattaccattccggttgagggtatagaaatgggcagcctgagtatgctgtcggtgcagataggctaa

SEQ ID NO: 261291 - DNA, 774 bp, Klebsiella pneumoniae
atgtcagtacctctcattctgaccatactggcgggggcagccacgtttattggcgcgtttctcggcgttctcgggcaaaaaccctcgaaccgcttactggcgttttcgctaggttttgcggcggggatcatgttgctcatctcattaatggaaatgcttcctgccgcactagcagctgaaggaatgtcgcctgtgttgggttatggaatgtttatcttcggtctgcttggctattttggcctggaccgcatgttgccacatgctcatccgcaggatttaatgcaaaaatcggtgcagccgttgccaaaatcgatcaagcgcacagccattctgctcactctcggcatcagtctgcataacttcccggaagggattgctacctttgtcacggcgagcagcaacctggagctgggatttggcatcgcactggccgtcgcgttgcacaatatccctgaaggtctggcagtggcaggcccggtttatgcggcaacggggtctaaacgcaccgcgattctgtgggcggggatttctggactagcagaaattcttggtggtgtgctggcgtggttaatcctcggtagcatgatttccccggtggtcatggcggcaatcatggcggcggttgcaggaattatggtggcgctctcggttgatgaattaatgccgctcgccaaagagattgaccctaataataaccccagctatggcgtactatgtggaatgtcagtgatgggattcagtttagtgctgctacaaacggcgggaattggttaa

SEQ ID NO: 261292 - DNA, 171 bp, Klebsiella pneumoniae
atgtttatcgcctggtactggattgtattgattgctctggttgtggtgggttatttcctgcatttgaaacgttattgtcgggcgtttcgccaggacagagacgcactgcttgaagcgcggaacaaatacttaaacagtacgagagaagagacagccgaaaaggtagaataa

SEQ ID NO: 261293 - DNA, 654 bp, Klebsiella pneumoniae
atgaatcagacgctactttcctcttttggtacgcctttcgaacgtgttgaaaatgcactggctgcgctgcgtgaaggacgcggtgtaatggtgcttgatgatgaagaccgtgaaaacgaaggtgatatgatcttcccggcagaaaccatgactgttgagcagatggcgctgaccattcgccacggtagcggtattgtttgcctgtgcattactgaagatcgccgtaaacaactcgatctgccaatgatggtagaaaataacaccagcgcctatggcaccggttttaccgtgaccattgaagcagctgaaggtgtgactaccggtgtttctgccgctgaccgtattacgaccgttcgcgcagcgattgccgatggcgcaaaaccgtcagatctgaatcgtcctggccacgttttcccacttcgcgctcaggcaggtggtgtactgacgcgtggcggtcatactgaagcaactattgatctgatgacgctggcaggctttaaaccggctggtgtactgtgtgagctgactaatgacgatggcacgatggcgcgtgcaccagagtgtattgagtttgccaataaacacaatatggcgctcgtgactattgaagacctggtggcataccgtcaggcacatgagcgtaaagccagctga

SEQ ID NO: 261294 - DNA, 291 bp, Klebsiella pneumoniae
atgattgacccgaaaaaaattgagcaaatcgctcgccaggttcacgaatcaatgcctaaaggaatcagggagttcggggaagatgtggagaaaaaaatccgccaaaccctacaagcgcagctgacgcgcctcgaccttgtaagccgtgaagagttcgacgtccaaacgcaagtcctgttacggactcgtgaaaaactggcgctgcttgaacaaagaatcagcgaactggaaaatcgcagtactgagatcaaaaagcagccagatccagagactctccccccaacgctgtaa

SEQ ID NO: 261295 - DNA, 489 bp, Klebsiella pneumoniae
atgaagaccattctacctgcagtattgtttgccgctttcgccaccacctccgcctgggcggcagagagcgtccagccactggaaaaaatcgcgccttatccgcaagctgaaaaaggcatgaagcgtcaggtgattcagttaaccccgcaagaagatgaatctaccctgaaagtagaactgttaatcggtcagacgctggaagtcgattgcaatttgcatcgtctcggcgggaagctggaaagcaaaacgctggaaggctggggctatgattattatgtctttgataaagtcagttccccggtttcgacgatgatggcctgcccggatggcaagaaagagaagaaatttgtcaccgcgtatctgggcgatgccggaatgctgcgttataacagcaagctgccgatcgtggtgtatacgccagacaatgtggatgtgaagtaccgcatctggaaggcggaagagaaaattgacaacgcggtagtccgctaa

SEQ ID NO: 261296 - DNA, 1647 bp, Klebsiella pneumoniae
atgaaaaaagtgactgccatgctcttctcgatggccgtgggccttaatgccgtttcgatggcggcaaaagcgaaagcgtccgaggagcaggaaactgatgtactgttgattggcggcggcattatgagcgccacgttggggacctatttacgcgagctggagcctgaatggtcgatgaccatggtggagcgcctggagggtgtcgcgcaggagagttcgaacggctggaacaacgccggaaccgggcattctgcactgatggaactcaattacactccgcaaaacgccgatggcagcatcagtattgaaaaagcagtcgccattaacgaagcattccagatttcccgccagttctgggcgcaccaggtcgagcgcggcgtgctgcgtactccgcgttcatttatcaataccgttccgcatatgagctttgtctggggcgaggataacgtcaatttcctgcgcgcccgttacgccgcgttacaacaaagctcgctgtttcgtggtatgcgttactctgaagatcacgcgcagatcaaagagtgggcaccgttagtgatggaagggcgcgatccgcaacagaaagtggcagccacgcgtacggaaatcggtactgatgtgaactatggcgagatcacccgccagttaattgcttccttgcagaagaaatctaatttttcgctgcaactcagcagcgaagtccgcgccctaaagcgtaatgacgataacacctggaccgtcactgttgccgatctgaaaaacggcactgcacagaacatccgcgctaaatttgtctttatcggcgcgggcggtgcggcgctgaagttgttacaggaatcgggtattccggaagcgaaagactacgccggtttcccggtgggcggacagttccttgtttcggaaaacccggacgtggttaatcaccatctggcgaaggtttacggtaaagcatccgttggcgcaccaccgatgtcggttccgcatatcgatacccgtgttctggacggtaaacgcgtagtgctgtttgggccatttgccaccttctcaaccaaattcctcaaaaacggttcattgtgggatctgatgagttccaccaccacctctaacgtgatgccgatgatgcacgttgggctggataatttcgatctggtgaaatatctggtgagtcaggtgatgttgagtgaagaggatcgttttgaagcgttgaaagagtactatccgcaggcgaaaaaagaggactggcgtttgtggcaagcggggcagcgtgtgcagattatcaagcgtgatgccgagaaaggtggcgtactgcgtctgggtaccgaagtggtcagcgaccagcaagggactattgccgcgctgctgggggcatcgccaggtgcgtcaaccgccgcgccgattatgttgaatctgctggaaaaagtatttggcgatcgcgtttccagcccgcaatggcaggcaacgttgaaggcgatcgttccgtcttatggacgcaagctgaacggtgatgtagcggcaacggagcgcgagttgcagtacaccagcgaagtgctggggctgaaatacgacaaaccgcaagcagcagatagtacgccgaaaccgcagttgaaaccgcaacccgttcaaaaagaagtggcggatattgcgttgtaa

SEQ ID NO: 261297 - DNA, 1644 bp, Klebsiella pneumoniae
atggaacttcttgtacttgtctggcggcagtatcgctggccatttatcagtgtgatggcgctaagcctcgccagtgcggcattaggcattggcttaattgcttttatcaatcagcgccttatcgaaacggcggataccagtctgctggtgttgccggagtttctggggttattgctgctgttgatggccgtcactctcggatcgcaactggcgctcaccactttggggcatcacttcgtttaccgactgcgtagtgaatttatcaagcgaattctcgatacccacgtcgagcgcattgaacaacttggtagcgcctcgttgttggcggggttaaccagcgatgtgcgcaatatcaccattgcttttgtgcgtctgccggaactggtgcaggggatcatcctcactatcggttccgcggcgtacttgtggatgctgtcgggcaaaatgttgctggtaacggctatctggatggcagtcaccatctggggcggttttatactggtggcgcgggtgtacaaacatatggcgaccctgcgtgaaaccgaagacaagctgtacacggattttcaaaccgtactcgaagggcgcaaagagctgactctgaaccgggaacgcgccgagtatgtgtttaacaacctctacattcctgatgcgcaagagtatcgccatcatattatccgcgcagacaccttccatcttagtgccgtgaactggtcaaacatcatgatgctgggcgcaatcggtctggtgttctggatggcgaacagtctcggttgggctgataccaacgttgccgcgacctattcgttgacgctgttattcctgcgtacgccgctgctttcggcggttggtgcattaccgacgctgctgacggcgcaggtggcgtttaacaagctgaacaaattcgcactcgcgcctttcaaagcagagtttccgcgcccacaggcgtttcccaactggcaaacgctggagctgcgtaacgtgacgtttgcttatcaggataacgcgttttccgttgggccgattaacctcaccatcaaacgtggcgagctgctgtttctgattggcggcaacggtagcggaaaatcgacgctggcgatgttgctgacgggcttgtatcagccacaaagcggcgaaatcttgctggatggcaaccctgtcagcggcgaacaaccggaagattatcgcaaactgttttcggcagtgtttaccgatgtctggctgttcgatcaactgttggggccggagggtcaacccgctaacccgcaactgattgagaagtggctggtgcagctgaaaatggctcataagcttgagttaagcaacgggcgtattgttaacctgaagttatcaaaagggcagaaaaaacgcgtcgcgctgttgctggcgctggcagaagaacgcgatattatcctgctggatgaatgggcggcggatcaggatccacacttccgtcgtgagttttatcaggtgttgctgccgctgatgcaggagatgggtaaaactattttcgccatcagtcatgatgatcattactttatccacgccgaccgcctgctggaaatgcgcaacgggctacttagcgagctgacaggcgaagagcgcgatgctgcttcgcgtgatgccgttgcccggacggcataa

SEQ ID NO: 261298 - DNA, 651 bp, Klebsiella pneumoniae
atgttggatctgtttgccgatgctgaaccgtggcaagagccactggcggctggtgcggtaattttacggcgttttgcttttaatgctgcggagcaactgatccgcgatattaatgacgttgccagccagtcgccgtttcgccagatggtcacccccgggggatatactatgtcggtggcgatgaccaactgtgggcatctgggctggacgacccatcggcaaggttatctctattcgcccattgatccgcaaacaaataaaccgtggcccgccatgccacaaagctttcatgatttatgtcaacgtgcggctacggcggcgggctatccagatttccagccagatgcttgtcttatcaaccgctacgctcctggcgcgaaactgtcgctgcatcaggataaagacgaaccggatctgcgcgcgccgattgtttctgtttctctgggcttacccgcgatttttcaatttggcggcctgaaacgaaatgatccgctaaaacgtttgttgttggaacatggcgatgtggtggtatggggcggtgaatcgcggctgttttatcatgggattcaaccgttgaaagcggggtttcatccactcaccaccgactgccgctacaacctgacattccgtcaggcaggtaaaaaagaataa

SEQ ID NO: 261299 - DNA, 1065 bp, Klebsiella pneumoniae
atgaaaaacgccacacgcttaactgacgatcaacgctggcaatctgtcttagcacgcgacccgaacgccgacggcgaattcgttttcgccgtgcgcaccacgggtatcttttgccgtccgtcttgccgcgccagacatgccttgcgggaaaacgtttctttctatacggatgccagcgaggcgcttgccgctggctttcgcccctgcaaacgttgtcagccagataaagccaatgcccagcaacatcgccttgataaaattacccacgcctgccgactgctggaacaggaaacgcctgtaacgctggaagccttagctgaccaggtggcgatgagtccgttccatttgcatcgattgtttaaagcgactaccggaatgacgccgaaagcctggcaacaggcatggcgtgctcgccgtttacgcgactcgctggcgaaaggggagagcgtgactacatctattcttaacgctggattccccgacagcagcagttactaccgtaaagccgacgaaacgttgggcatgacggctaaacagtttcgtcacggaggtgaaaatctggctgtgcgttatgcgctggctgattgtgaactgggccgttgcctggtggctgaaagcgagcgggggatttgcgcgatattgctgggcgatgatgacgcgacattaatcagcgagttgcagcagatgtttcccgctgccgacaacgcgcctgccgatttgacgtttcaacaacatgtgcgtgacgtgatcgccagcctcaatcaacgcgatacgccgctgacgttaccgctggatattcgcggcactgcttttcagcaacaagtctggcaggcactgcgcacgataccttgcggtgaaaccgtcagttatcagcaactggctaacgccatcggcaaaccgaaagcggtacgggccgttgccagcgcctgtgccgccaacaagctggctatcgtaataccctgtcatcgagtggtccgtggtgatggcacactttcaggttaccgctggggcgtgtcgcgtaaagcgcaactgctgcgccgcgaagctgagaatgaggagaggtaa

SEQ ID NO: 261300 - DNA, 1056 bp, Klebsiella pneumoniae
atggaaataagctttacccgcgtggcactgctggctgccgcgctcttctttgttggttgcgatcaaaaaacacaacccgccaaaacccacgctactgaagttaccgttcttgaaggcaaaaccatgggtaccttctggcgtgccagcattccgggcattgacgccaaacgcagtgccgaacttaaagaaaagattcagacccagctggacgccgacgatcagctgctttcgacctataaaaaagattccgcgctgatgcgatttaacgactcgcaaagtttatcgccgtggccggtaagtgaagcgatggccgatatcgtcaccacctcgctgcgcattggcgcaaggaccgatggtgcgatggatataaccgtcgggccgctggtgaatctgtggggctttggcccggaacaacagccggttcaaattccgagccaggaacagatcgatgcgatgaaagccaaaaccggcttacagcacctgtcggtcattaatcagtcgcatcagcaatatctgcaaaaagacctgccggatttatatgtcgatctctccactgtcggtgaaggttatgcggcggatcacctggcacgcttgatggagcaggaaggtatttctcgctacctggtgtcggtgggcggggcgctgaacagccgtggtatgaacggtgaaggccagccgtggcgagtggcgattcaaaaaccaaccgataaagaaaacgcagttcaggcggtggtggatatcaacggccacggtatcagcacctccggcagctaccgcaactattacgaactggacggcaaacgcctttctcatgttatcgatccgcaaaccggacgacctatcgagcataatctggtatccgtgacggtgattgcaccgacggcgctggaagccgacgcctgggatacaggtttgatggtgctcgggccagagaaagccaaagaggttgttcgccgggaagggctggcggtttatatgatcaccaaagagggcgatagctttaaaacctggatgtcgccgcagtttaaaagcttcctggtgagcgaaaaaaattaa

SEQ ID NO: 261301 - DNA, 2673 bp, Klebsiella pneumoniae
atgcgtcagaaagagacaacggccacgacccgcttttcactcctaccggggagcattacccgcttctttttactgttgatcattgtgttactggtgacgatgggagtaatggtacaaagcgccgttaacgcctggctgaaagataaaagttaccagattgtcgacattacccacgcaatccaaaagcgcgtcgatacctggcgttacgtgacctggcagatctacgacaacattgccgcgacgacctccccctcctccggcgaaggtttacaagagacgcgcctgaaacaggatgtctactatctggaaaaaccgcgccgcaaaacggaagcgttaatctttggctctcacgacaactcaacgcttgagatgactcaacggatgtccacttatctggatacattgtggggcgcagaaaatgtaccgtggtcgatgtattacctgaatggtcaggataacagcctggtgctgatctcaaccctgccccttaaagatctcacctccggatttaaagaatcgaccgtcagcgacattgttgattcacgtcgtgcagagatgttgcaacaggccaacgccctcgatgaacgcgaaagcttttctaacatgcgccgcctagcctggcagaacggtcattactttaccttgcgtactacctttaaccagccgggacatctggcaacggtcgtggcttttgatctgccgattaatgatttgatcccaccgggcatgccgctggacagtttccgccttgagccagacgcgacggcaacgggaaacaatgataatgagaaagaagggacggatagcgtcagtatccactttaacagtacgaagattgaaatctcctcggcactcaactctaccgatatgcgcctggtctggcaggttccttatggcaccttactgctggatacgttgcaaaacattctgctgccactgctgctgaatatcggtttgctggcgctggcgttatttggctataccacattccgccatttctccagccgcagtacagaaaacgtccccagcacggcggtcaataacgaattgcgcattttacgtgcaatcaatgaagagatagtctcactgctgccgcttggcctgctggttcacgatcaggaatcgaaccgcactgtcataagtaacaaaattgccgatcatttgctgccgcatttgaatctgcaaaacatcaccaccatggcggaacagcatcaggggattattcaggcgacgatcaataacgagctgtatgagatccgcatgttccgcagccaggtcgcgccgcgcacacaaattttcattattcgcgatcaggatcgcgaagtgctggtaaacaagaaactcaagcaggcgcagcgtctgtatgagaaaaaccagcaggggcggatgacctttatgaaaaacattggcgatgcgctgaaagaacctgcacagtccctggcggagagcgcggctaaactcaacgccccggaaagcaaacaactggcgaatcaggcagatgtgctggtgcggctggtcgatgaaatacagttagcgaacatgcttgcggatgatagctggaaaagtgagacggtgctgttctccgtgcaggatttaattgatgaagttgtgccttcagtgttgcctgccatcaagcgtaaaggtctgcaactgctgattaacaatcatctgaaagcacacgatatgcgccgcggcgatcgcgatgccttacgacgcattttgctgctactgatgcaatatgccgtgacctcaacgcaattgggaaaaatcacccttgaggttgatcaggatgagtcctccgaagaccgcctgacgttccgcattctggacaccggagaaggcgtaagcattcatgaaatggataatttgcacttcccgtttatcaaccagacccaaaacgatcgctatggcaaggcggacccgctggcattctggctgagcgatcaactggcacgtaaactgggcggtcatttaaacattaaaacgcgggatgggcttggtacacgctactctgtgcatatcaaaatgctcgcagctgacccggaagttgaagaggaagaagagcgtttactggatgatgtctgcgtaatggtggatgttacttcggcagaaattcggaatattgtcactcgccagttagaaaattggggtgcaacctgtatcacacccgatgaaagattaattagtcaagattatgatatctttttaacggataatccgtctaatcttactgcctctggcttgcttttaagcgatgatgagtctggcgtacgggaaattgggcctggtcaattgtgcgtcaacttcaatatgagcaacgctatgcaggaagcggtcttacaattaattgaagtgcaactggcgcaggaagaggtgacagaatcgcctctgggcggagatgaaaatgcgcaactccatgccagcggctattatgcgctctttgtagacacagtaccggatgatgttaagaggctgtatactgaagcagcaaccagtgactttgctgcgttagcccaaacggctcatcgtcttaaaggcgtgtttgccatgctaaatctggtacccggcaagcagttatgtgaaacgctggaacatctgattcgtgaaaaggatgttccaggaatagaaaaatacatcagcgacattgacagttatgtcaagagcttgctgtag

SEQ ID NO: 261302 - DNA, 2850 bp, Klebsiella pneumoniae
ttgaaataccttgcttcttttcgtacaaccctgaaagcctcgcgctacatgttcagagcattggcgttagtgctctggctgttgattgctttttcatccgttttttacatcgttaatgcgttacatcagcgagaatcggaaattcgtcaggaatttaatctgagttccgatcaggctcagcgctttattcaacgtacctctgatgtgatgaaagagctgaagtacatcgctgaaaatcgcttatcggcagaaaacggtgtgctttccccgcgtggacgagaaacgcaggcggatgtgcctgcgtttgaaccgctgtttgccgactccgattgttccgcaatgagtaacacctggcgaggctctctggagtcattggcgtggtttatgcgctactggcgcgataatttctctgcggcttacgatctcaaccgggtatttttaatcggcagcgataacctctgcatggccaatttcggtctgcgtgatatgccagtggaacgcgataccgcgttgaaagcgttgcatgaacgcattaataaatatcgaaatgcaccacaagatgatagtggcagtaacctctactggatcagcgaaggtccgcgccctggcgtcgggtatttttacgcgttgacgccagtttatctggcgaaccggttgcaggcgcttttgggtgtcgagcagactatccggatggagaattttttcttacctggtacgttgccgatgggggttaccattcttgatgaaaatggtcataccctgatttcgcttaccggaccagaaagtaaaattaagggcgatcctcgctggatgcaggaacgctcctggtttggctatacggaagggttccgggagctggtgctgaagaaaaatctgccaccctcatcgctaagcatcgtgtattcggtgccggttgataaggtgctggaacgcattcgcatgttgatccttaacgcaattttgctgaatgtgcttgccggagctgcattgtttactctcgcgcggatgtacgagcgacgtattttcattccggcggaaagcgacgccctgcgactggaagaacatgagcagtttaatcgcaagattgtcgcctccgcgccagtgggtatctgcattttgcgtaccgctgatggcgtcaatattttaagtaacgaactggcgcatacctatctcaatatgcttacgcatgaggatcgccaacggctgacacaaattatctgtgggcagcaggtcaattttgttgatgtcctgaccagcaacaataccaatctgcaaatcagcttcgtccattcgcgctatcgtaatgaaaacgtggccatttgtgtgctggtggatgtttcttcgcgcgtgaagatggaagagtcgttgcaggagatggcacaagcagcggaacaggcgagccagtcaaaatcgatgttccttgccaccgtcagtcatgagctgcgaacgccgctgtatggcattatcggtaacctggatctgttgcaaaccaaagagttaccgaaaggcgtcgatcgtctggtgacggcaatgaacaactcttccagcctgttgttgaaaattatcagcgatattctcgatttctcgaagattgaatcggaacagttgaagatcgaaccgcgtgagttttcaccgcgtgaagtgatgaaccacatcaccgccaactatttaccgctggtggtacgcaagcagttaggcttgtactgctttattgaaccggatgtgccagtggccttaaatggcgacccgatgcgtttacagcaggtcatctccaacctgttgagtaacgccataaaattcaccgataccggctgtatagttttgcatgttcgcactgatggcgattatctctctatccgtgttcgcgataccggcgtggggattccggcgaaagaagtggtgcgcttgtttgatcccttcttccaggtcggaacgggcgtacagcgtaacttccaggggaccggtctgggtctggcgatttgtgaaaaactgatcagcatgatggacggcgatatctcggtagattcagaaccgggaatgggtagccagtttaccgtgcgtattccgttgtacggcgctcagtacccgcagaaaaaaggcgtggaagggttgagtggtaaacgctgctggctggcggtccgcaatgcgtcgctctgtcagttcctggaaaccagtttgcagcgcagcggcatcgtcgttacaacatacgaagggcaggaaccgactcccgaagatgtgttaattactgacgaggtagtgagtaaaaaatggcagggtagagcggtagtgaccttctgtcgtcgccatattggtattccgctggagaaagcgccaggggagtgggtacacagtgtggctgccccgcatgagctaccggcattgttggcgcgtatttatttgatcgagatggagagcgacgatcctgctaacgctctgccgttaacggacaaagcggtcagcgataacgacgatatgatgattctggtcgtggatgatcatccgattaaccggcgtctgctggcagatcagttgggatcgttgggctatcaatgtaaaaccgcgaatgatggcgtcgatgcgcttaatgtacttagcaagaatcatattgatatcgtgcttagcgacgtcaacatgccaaatatggatggttaccgcttgacgcaacgcattcgtcagttgggactgacgttgccggtaatcggagtaactgctaatgcgttggctgaagagaagcagcggtgtctggagtctggtatggacagctgcctgtcgaagccggtaacgctggatgtgataaaacagacgctaacggtatatgccgagagggtcaggaaatcgcgggattcgtag

SEQ ID NO: 261303 - DNA, 1827 bp, Klebsiella pneumoniae
atgcattatatgaagtggatttatccacgccgcttacgcaatcaaatgattctgatggcaatcctgatggtcattgtcccaacgcttactattggttatatcgtagaaacggaaggacgttcagcagtcttatctgaaaaagagaaaaaactttctgccgtggtcaacctgcttaatcaggcactaggcgatcgctatgatctctacatcgacttaccacgtgaggagcgtatccgcgcattaaatgcagaacttgcccccattaccgaaaatatcactcacgccttccctggcatcggcgctggttattacaacaaaacgctggatgcgataatcacctacgcgccttcagcgctatatcagaataatgtcggcgttaccattgccgcagatcaccctggtcgcgaagtcatgcgtacaaatacccctttggtttattcaggcaggcaggtgcgcggcgatattttgaattcaatgatccccattgagcgtaatggtgaaatcctcggctatatctgggccaatgaattaaccgaagatattcgccgccaggcctggaaaatggatgtgaggattatcattgtgctcaccgccggtttgctgataagcctgctgttgattgtccttttctcccgtcgcctgagcgccaatattgatatcatcaccgatggcctctcgactctggcacaaaatattcccactcgattaccacaattgcccggtgaaatggggcaaatcagtcagagtgttaacaacctcgcccaggcactgcgtgaaacgcggacacttaacgatctgattattgaaaacgctgccgatggcgtcattgccattgaccgccagggtgatgtaaccaccatgaacccggcagcagaagtcatcactggctatcaacgtcatgaactggtagggcagccttactccatgttgttcgacaatactcagttctacagtccagtactggatacgctggaacatggcaccgaacatgtagcgctggagatcagttttccaggccgtgaccgcaccattgaactcagtgtcactaccagtcgtattcataacacgcatggtgaaatgataggtgctttggtgattttctctgatttaactgcccgcaaagaaacccagcgccgcatggcgcaagcagaacgcctcgccacactgggtgagctgatggctggcgtcgcgcatgaagtacgtaatccgctaacggctattcgtggttatgtacagatcttgcgccaacaaaccagcgacctaatacatcaggaatatctgtccgtagtactcaaagaaatcgattcaattaacaaagttattcagcaattgctcgaattttcacgtccacgccacagtcaatggcaacaagtcagtctcaatgcattggttgaagaaactctggtactggtacaaaccgccggcgtacaagcgcgggtcgacttcataagcgaactggataatgaattaaacccgattaacgccgatcgtgaactgctcaaacaggtactactgaatatcctgatcaatgccgtccaggctatcagcgcacgagggaaaattcgcattcaaacctggcaatacagcgactcacaacaggccatttcgatagaggacaacggctgtggcattgatctctcgctgcaaaaaaagatcttcgatccctttttcaccaccaaagcctctggaaccgggcttggtctggcgttaagtcaacgcatcattaatgcccatcagggtgatattcgcgtcgccagtttgccgggctacggcgcaaccttcacgcttattttaccgatcaatccgcagggaaatcagactgtatga

SEQ ID NO: 261304 - DNA, 1386 bp, Klebsiella pneumoniae
atgactgctattaatcgcatccttattgtggatgatgaagataatgttcgccgtatgctgagcaccgcttttgcactacaaggattcgaaacacattgtgcgaacaacggacgcacagcattacacctgtttgccgatattcaccctgacgtggtgttgatggatatccgcatgccagagatggacggcatcaaggcactcaaggagatgcgcagccatgagacacggacccccgttattctgatgacggcctatgctgaagtggaaaccgccgtcgaagcgctacgctgcggggccttcgactatgttatcaaaccgtttgatctcgatgagttgaatttaatcgttcagcgcgctttacaactccagtcaatgaaaaaagagatccgtcatctgcaccaggcactgagcaccagctggcaatgggggcacattctcaccaacagccctgcgatgatggatatctgcaaagacaccgccaaaattgccctttctcaggccagcgtcttgattagcggtgaaagcggcaccgggaaagagttgattgccagagcgattcactacaattcgcggcgggcaaaggggccgttcattaaagtcaactgcgcggcgctgccggaatcgttgctcgaaagtgaactgtttggtcatgaaaaaggtgcatttactggtgcacaaaccttgcgtcagggattatttgaacgtgccaacgaaggtactctgctcctcgacgaaattggcgaaatgccgctcgtactgcaagccaaattactacgcattctgcaggaacgggaatttgaacggattggcggccatcagaccataaaagttgatatccgcatcattgctgccaccaaccgtgacttgcaggcaatggtaaaagaaggcaccttccgtgaagatctcttttatcgccttaacgttattcatttaatactgccgcctctgcgcgatcgccgggaagatatttccctgttagctaatcactttttgcaaaaattcagtagtgagaatcagcgcgatattatcgacatcgatccgatggcaatgtcactgcttaccgcctggtcatggccgggaaatattcgagagctttccaacgttattgaacgcgccgtcgtgatgaactcaggcccgatcattttctctgaggatcttccgccgcagattcgtcagccagtctgtaatgctggtgaggcaaaaacagcccctgtcggtgagcgtaatttaaaagaggaaattaaacgcgtcgaaaaacgcatcattatggaagtgctggaacaacaagaaggaaaccgaacccgcactgctttaatgctgggcatcagtcgccgtgcattgatgtataaactccaggaatacggtatcgatccggcggatgtataa

SEQ ID NO: 261305 - DNA, 1185 bp, Klebsiella pneumoniae
atgaaaaattgtgtcatcgtcagtgcggtacgtactgctatcggtagttttaacggctcactcgcttccaccagcgccatcgacctgggggcgacagtaattaaagccgccattgaacgtgcaagaatcgattcactacacattgatgaagtgattatgggtaacgtgttgcaagccgggttggggcaaaatccggcacgtcaggcactgttaaaaagcgggctggcagaaacggtgtgcggattcacggtcaataaagtgtgtggttcgggtcttaaaagtgtggcgcttgccgcccaggcaattcaggcaggtcaggcgcaaagcattgtggcggggggtatggaaaatatgagtttagcgccctacttactcgatgcaaaagcacgctctggttatcgtcttggagacggacaggtttatgacgtaatcctgcgcgatggtctgatgtgcgccacccatggttatcatatggggattaccgccgagaacgtggccaaagagtacggaattacccgagaaatgcaggatgaactggcgctacattcacagcgtaaagcggcagccgcaattgagtccggtgcttttacagccgaaatcgtcccggtaaatgttgtcactcggaagaaaaccttcgtcttcagtcaagacgaattcccgaaagcggattctacgactgaagcgttaggcgcattgcgcccggccttcgataaagcaggaacagtcaccgccgggaacgcgtctggtattaacgacggtgctgccgctctggtgattatggaagaatctgcggcgctggcagcaggccttacccccctggctcgcattaaaagttatgccagcggtggcgtgccccccgcatttatgggtatggggccagtacctgccacgcaaaaagcgttacaactggcggggctgcaactggcggatattgatctcattgaggctaatgaagcatttgctgcacagttccttgccgttgggaaaaccctgggctttgattctgagaaagtgaatgtcaacggcggggccatcgcgctcgggcatcctatcggtgccagtggtgctcgtattctggtcacactattacatgccatgcaggcacgcgataaaacgctggggctggcaacactgtgcattggtggcggccagggaattgcgatggtgattgaacggttgaattaa

SEQ ID NO: 261306 - DNA, 777 bp, Klebsiella pneumoniae
atgcgaaagatttttcttccgttgttactggtggcgctttcgcctgtcgctcacagtgaaggtgtgcaggaagtcgagattgatgcaccgctctctggctggcatccggcagagggcgaagatgccagtttttcacaatcgatcaattacccggcgtcgtccgtcaacatggcagatgatcaaaatatctcagcgcagatccgcggcaaaataaagaattatgctgcggcgggtaaagttcagcagggccggctggtggtcaacggtgccagtatgccgcagagaattgaatccgatggttcatttgcacgcccttatatttttactgaaggcagcaacagcgtgcaggtcatcagcccggatgggcaaagccgacaaaaaatgcagttttactcaacgccgggcgctggagcgatccgcgcgcgtttacggctggttctctcctgggacacggacaataccgacctcgaccttcacgttgttacacctgatggcgaacacgcctggtacggtaacagcgtgctgaaaaacagtggtgcactggatatggatgtcacgacggggtacggccccgagattttcgccatgccagcgccgattcacggacgttatcaggtgtatatcaactactatggcggacgcagcgaaacggaattgacgaccgcccaactgacgctgatcaccgaggaaggatcggtcaatgagaaacaggaaacatttattgtaccgatgcgtaatgctggcgagctgacgctggtgaaaagttttgactggtga

SEQ ID NO: 261307 - DNA, 1650 bp, Klebsiella pneumoniae
gtgaactggcgcagaattgtctggctattggcgttggttactctgccaacgcttgcggaggagacgccgttacaactggtgctgcgcggtgcgcagcacgatcaactgtatcagctgtcgtcatcaggcgtgaccaaagtctcagcattacctgacacgctcaccacgccgttagggagtttgtggaaactgtatgtttacgcctggctggaggatacccatcaaccggagcagccctaccagtgtcgcggaaactccccggaagaggtttattgttgtcaggctggggagagcataacgcgcgataccgcgctggtacgttcctgtggactctattttgcgccgcagcggttgcatattggcgcagatgtgtgggggcaatactggcaacagcgtcaggcaccggcgtggttagcgtctcttactacgctgaagccagaaacctcggtaacggttaaatcactgcttgattcattagcgacgttacccgcgcaaaacaaagctcaggaagtcttactggatgtggtgctggacgaggcgaaaatcggtgtcgcatccatgctcggtagtcgggtacgggtgaaaacctggagctggtttgccgatgataaacaggaaatccgtcagggtggttttgccggctggttaaccgatggttcaccgctgtgggttactggcagtggcaccagcaaaacggtactaacccgttatgcgacggtgcttaatcgggttttgccagtgccgacgcaggttgccagtgggcaatgtgtagaggtggagctgtttgcccgctatccgctgaagaaaatcacagcggaaaagagtacgacggcagtaaaacccggcgtacttaatgggcgctatcgtgtgacatttgccaatggtaaccacattacgtttgtcagccacggtgagacgaccttactgagcgaaaagggcaaactgaaattgcagtcgcatcttgatcgtgaagagtacgttgccagagttctggatcgcgaggcgaaaagtacgccccctgaggcagcgaaagccatgaccgtggcgattcgcacttttttacagcaaaacgccaatcgggaaggcgattgcctgaccatccccgacagtagcgccacgcagcgtgtttctgcttcgccagcgaccacgggggcgcgaacgatgaccgcctggacgcaggatcttatctatgcgggcgatccggttcattatcatggcagtcgcgctaccgaagggacgctttcctggcggcaagccacggcccaggcggggcagggagagcgttacgaccagatactcgcgtttgcttatcccgacaacagccttagccgctggggagcgccacgctcaagctgccagttattacccaaagcgaaagcctggctggcgaaaaaaatgccgcagtggcggcgtatattacaaggcgagacggggtacaacgaaccagacgtgtttgcggtctgtcgtttagtctcaggtttcccctataccgatcggcagcagaaacggctgtttattcgtaacttctttacgcttcaggatcggctcgatttaacccatgagtatctgcacctggcctttgatggttatcccaccgggcttgatgagaactatatcgaaacgctgacccgacaattattaatggactaa

SEQ ID NO: 261308 - DNA, 4395 bp, Klebsiella pneumoniae
gtgcgactggaagcgccggggcgtgattatcggcgctatcagatggaagagtacggcggcgtggacgttcgcctgtatcgtattcctgacccgatggcatttttgcgccagcagaaaaacctgcatcgcattgtggtgcaaccgcaatatctgggcgacgggctgaacaatacgctgacctggctgtgggataactggtacggcaaatctcgccgcgtgatgcagcgtactttctcttctcagtcacggcagaatgtgactcaggcgttacccgaattacagctcggcaatgccattattaaaccttcccgttatgtacagaacagccagttttcaccgctgaaaaaatatccactggtggaacagttccgttacccactatggcaggctaaaccggtcgagccgcagcaaggggtaaaactggaaggcgcatccagcaatttcatctcgccgcagccgggtaacatctatattcctctcggcaaacaagagccgggactgtacctcgtcgaggcgatggtcggtggatatcgggcgacgacggtggtatttgtctctgataccgtggcgcttagcaaagtgtcgggtaacgagctcctggtgtggaccgcgggtaaaaaacagggtgaagcgaagccgggatcagagatcttgtggactgacggtcttggcgtgatgacccgcggtgtgaccgatgacagtggtaccttgcagttacaacatatatcgccggaacgttcatacattctgggtaaagatgctgaaggcggcgtttttgtctccgagaattttttctacgaaagcgaaatttacaacacccgcttgtatatcttcaccgaccgccctctgtatcgcgcaggcgatcgtgttgatgtcaaagtgatgggccgcgagttccacgacccgttgcattcatcccccatcgttagcgccccggcgaagctttcagtgctggacgccaacggcagtctgttgcaaaccatcaatgtcacgctggatgcgcgtaatggcgggcaggggagtttccgcctgccagaaaatgccgtcgccggaggttatgagttacgcctggcttaccgcaaacaggtctatagcagcagttttcgcgtagccaactacatcaaaccacattttgagattggcttagccctcgacaaaaaagatttcaaaactggcgaagcggtcagcggcaaactgcaactactctatccggatggcgaaccggtaaaagatgccagcgtgcagttgagtttgcgcgctcagcaactttcgatggttggtaacgatttgcgttatgccggacgtttcccggtgtcgctggaaggtagcgacgctgtttctgacgataaaggcaatgtagcgttaaaccttcccgccgccgataaaccgagccgctatttactgaccgtctccgccagcgatggcgcggcatatcgtgttactactaccaaagagatcctcattgaacgcggtctggcgcattactctctaagcacctccgcacaatacagtaatagcggcgagtcggttgttttccgttatgccgcgctggaatcttcaaagcaggtgcctgttaagtatgagtggctacgcctggaagaccgaacaagccacagcggagatctaccttctggtggcaaatcctttaccgtcaatttcgataaaccgggtaactacaatctgacgttacgcgataaagacggcttaattctcgccgggttaagccatgcagtcagcggtaagggcagcacgtcgcatactggtacggtagatattgtggcagataaaacgctgtaccagcctggcgaaaccgcgaagatgctgattaccttcccggagccaattgatgaagcattattgacgctggaacgcgatcgcgttgaacagcagtcgctgctatcgcatccggcaaactggctgacgttacaacgtttaaacgatacccagtatgaagcccgcgtaccggtgagcaattcctttgcgcctaatatcactttttcggtgctgtatacccgtaacggtcagtacagttttcagaacgccgggatcaaagttgccgttccccagctggatatccgggtgaaaacggacaaaacccattaccagcctggtgaactggtcaatgtcgaattaacctcgttgctgaaaggtaaacctgtttctgcgcagctaacggttggcgtggtcgatgaaatgatctatgcgctgcaaccggaaatcgcgccgaatatcggcaaatttttctatccgctggggcgtaacaatgtgcgtaccagctccagtctttcgtttatcagctacgaccaggcgctctccagcgagccggttgcgccaggcgcgactaaccgcagcgagcggcgagtaaaaatgcttgaacgtccacggcgtgaagaggtggataccgcggcatggatgccgtcactcacaactgataaacaaggcaaagcgtatttcacgttcctgatgcctgattcgttaacccgttggcgcattacagccagagggatgaacggcgacgggctggtcgggcaggggcgtgcttatcttcgttcggaaaaaaatctctacatgaagtggagtatgccaacggtgtatcgcgtgggcgacaaaccggcggcaggactgtttatcttcagtcagcaggataacgaaccggtggcgctggtgactaaatttgcaggcgctgagatgcgccagacgctgacgctgcacaaaggggcgaattatatttcgctgacgcagaatattcagcaatctggcttgttaagtgcagaactgcaacaaaatgggcaagtgcaggacagcattagcacaaaactgtcttttgtggataacagctggcccgttgaacagcagaaaaatgtcatgctcggcggtggcgagaacgcgctgatattgcccgagcaggcgagcaatatccggctacaaagtagtgaaacgccgcaggagattttccgcaacaatcttgatgcgttagtcgatgaaccgtggggtggggtgatcaacaccggtagccgtctgatcccgctcagtctcgcctggcgttcgcttgccgatcatcaaagtgccgccgctaacgacattcgtcagatgattcaggataaccgtctgcggctgatgcaactggcggggcccggagcacgctttacctggtggggtgaagatggcaatggcgacgccttcctgactgcatgggcatggtacgccgactggcaggccagccaggcgctcggcgtaacgcaacaaccggaatactggcagcatatgctcgacagttatgccgagcaggcagataacatgccgttattgcatcgggcgctggtgctggcgtgggcacaggagatgaatctgccgtgcaaaacgttgttgaaagggttggatgaagctatcgcccggcgcggaactaaaactgaagatttctctgaggaagacacccgcgatatcaatgacagcctgatcctcgatacaccggaatctccactggcagatgcggtggcaaacgtcttaaccatgacgttgctgaaaaaagcgcagttgaagtccactgtgatgccacaggttcagcaatatgcgtgggataaagcggcaaacagcaatcagccgctggcgcacacggttgtgctgctcaatagcgggggcgacgctacccaggcggctgctattttaagtggtttgaccgctgagcaatctactattgagcgcgcgctggccatgaactggctggcgaaatatatggcgacaatgccttcggttgtgttgcctgcgcctgcgggcgcatgggccaaacataagttaactggagggggcgaagactggcgttgggttggtcagggcgtgccggacattctctcttttggtgacgaattatcgccgcaaaatgtgcaggtccgctggcgtgaaccggcaaaaacggctcaacaaagtaacattccgatgaccgttgaacgccagttgtatcggcttatccccggtgaagaagagatgagctttactctgcagccggtgaccagcaatgagattgacagcgatgcgctgtatctcgatgaaatcacgcttaccagcgagcaggatgcagttctgcgctatggtcaggtggaagtaccgctcccgccgggagccgatgttgagcgcacaacatggggcatttcggtcaataaacccaacgccgcgaaacagcaggggcaattgctggaaaaagcgcgaaatgaaatgggcgaattggcctatatggtgccggtgaaagaactgacgggaacggtcactttccgccatttgctgcgcttctcgcaaaaagggcaattcgttctgcctcctgctcgttatgtgcgttcctatgcacctgcacagcaaagtgttgcggcagggagtgaatggaccgggatgcaggtgaaataa

SEQ ID NO: 261309 - DNA, 624 bp, Klebsiella pneumoniae
atgaggcacggactgctggcgctgatttgctggctgtgttgtgttgttgcccatagcgaaatgctgaatgtcgaacagtcggggctgtttcgcgcctggtttgtgcgtattgcacaggaacagctccgacaggggccaagtccgcgctggtatcagcaggattgtgcgggcctggtgcgattttcggcgaacgaggcgctgaaagttcacgacagcaaatggctaaaaagtaacggcatagcaagtcagtatttgccgcctgaaatgacgctaacacctgaacagcgtcaactggcgcaaaactggaatcaggggaacggaaaaaccggcccctatgtgaccgcgattaatttgattcagtacaacagccagttcattggccaggacataaaccaggcgctgcctggcgatatgatttttttcgatcagggcgatgcccagcacttaatggtctggatggggcgttacgtcatctaccacaccggaagcgccacgaaaactgacaacggaatgcgcgcagtcagtctgcaacaacttatgacatggaaggacacccgatggatacccaacgattccaatcccaatttcattggcatttatcgtttaaattttctggcgcgatag

SEQ ID NO: 261310 - DNA, 1689 bp, Klebsiella pneumoniae; identical to SEQ ID NO: 9531

SEQ ID NO: 261311 - DNA, 3729 bp, Klebsiella pneumoniae
atgcggattatttttctacgcaaggagtatttatctttactcccgtcaatgattgcatctcttttctctgctaacggtgtcgcggcggtcattgattcatgtcagggatatgatatcaaagcgagttgtcacgccagcaggcaaagcctttcaggcattacgcaggactggagcatcgccgatgggcaatggctggttttttcggatatgaacaataacgccagcggtggggccgtatttttgcaacaaggagcggagttttctctatcgccagaaaatgaaactggaatgactctgtttgccaataatactgtctcaggagaatataataacggcggggcaatatttgctaaagaaaactcaacgctgaatcttactgatgttattttttccgataacgttgcaggtggctatggtggcgcaatctattcttctggtactaacgataccggtgtcgtcgatttaagtgtcactaacgccgtgtttcgcaataacatcgctaatgacggcaaaggtggtgcaatttataccatcaacaatgacgtctatttaagtgaagttatttttgataacaaccaggcatatacatcaacaagttacagtgatggcgatggaggggcaatcgatgtcaccgataataatagcaatatcacgcatccgtcaggtttcacaataataaataacaccgcatttacaaataactctgctgagggatatggtggggcgatttataccaatagcgtgacggctccctatcttattgatatttcagttgatgacagctacagccagaacaacggcgtgttagtggatgagaacaacagcgcagcaggttatggggatggtccttccactgcggcgggcggctttatgtatctcggcttaagtgaagttacctttgatattgccgacggaaaaacgctggttatcggcaatacagagaatgacggagctgttgactctattgctggtaccggggtaatcaccaaaacaggttccggcgatctggtacttaatgcaaataacaatgactttactggcgagatgcagatagaaaacggtgaagttaccctgggccgcagcaactccctgatgaatgtcggcgatacgcattgccaggacgatccgcaagactgctacggtctgacgatagggagtattgatcagtatcagaatcaggctgagctaaacgttggctcgacccaacaaacttttgtgcacgcattgacgggctttcagaatggcactttaaatatcgatgctggtggcaatgttactgttaatcaaggcagttttgctggcaccatcgaaggtgctggtcagctcaccattgcgcaaaacggcagctacgtgctggcaggggcacagtcgatggcgctaactggcgatatagtcgttgatgatggcgcggtgcttacgctggaaggcgacgcggcagatcttgccgctctccaggacgatccgcagtcgatcgtgttaaacggcggcgtgcttgatctctctgatttcgccacctggcagagcggcacatcatacaacgatggccttgaagtcagcggcagcggcggtacggttatcggcagtcaggatgtggtggatctcgcaggcggcgacaatttgcatatcggcggcgacgggaaagatggcgtctacgtggtgatcgatgcgggcgacgggctggttagcctggcaaacaataatagttacctgggcaccacgcaaatcgcttccggtacgctggtggtgagcgacaactcgcagcttggcaataccgacgaaaaccgtcagctcatctttactgatagccaacaacaaagtgagatggaaattaccgctgacgttgatactcgttcagaggcagcaggtcacgggcgtgatattgaaatgcgcgccgacggtgaagtggcggttgatgcgggggtagacacgcagtggggcggactgatggctgacagcagcgggcagcatcaggatgagggtagcacattgactaaaacgggggcgggtacgctggaactgaccgccagcggtacgacgcagtcggcggtacgtgtcgaagaaggcaccctgaaaggcgatgttgcggatatcttcccttatgcttcgtcgctgtgggtcggtgacggggcaacgttcaagactggcgcggatcaggatattcagtcaattgatgttacttccagcggcactatcgacatcagcgatggtacggttttgcgcctgaccgggcaggatacttccgtcgcccttaatgcctcactgtttaacggcgatgggacgctggtgaatgccaccgatggcgtgacgttgacaggcgagcttaacaccaaccttgaaactgacagcctgacttatctttccgacgtaacagttaatggcaatctgaccaatacgtccggtgcggtcagcctgcaaaatggcgtcgccggcgacacgctgacggtaaacggtgattataccggcggtggtacgctactgctcgatagcgaattaaacggcgatgactcggcaagtgaccaactggtgttgaacggtaatactgctggcaacacgaccgtggtaattaatcccattacgggtattggtgagccgacatctacaggcattaaagtggttgatttcgcagccgatccaacgcaatttcaaaacaatgcgcagttcagtctggcgggcagcggctacgtcaatatgggagcgtatgactacacgctggtggaagataacaacgactggtatctgcgatcgcaagaagcaacgccaccatcgccacctgatccagacccgactcctgatccaacacccgacccggaacctacgcctgcctaccagccggtgttgaatgccaaagttggtggatattttaataacctgcgggcggcaaatcaggcgtttgtgatggagcgacacgatcacgctggtggcgatggtcagacgctgaatttacgtattatcggcggagattatcattacacagcagcggggcaactggctcagcatgaagatacttctacggtgcagcttagcggcgacttgtttagcggacgctggggcgcggatggcgagtggatgcttggggcggttggtggctacagtgataaccagggcgacagccgctcgaatatgaccggaactcgcgccgataaccagaaccacggttatgccgttggtctgacctcaagctggtttcagcacggtaatcagaagcagggggcctggctggatagctggctgcaatacgcgtggtttaacaatgatgtttccgaacatgaagatggcgtggatcattaccactcatcggggattatcgcctcgctggaagccgggtatcagtggttaccggggcatggagtggtgattgaaccacaggcgcaggtgatttatcagggcgtgcagcaggatgattttaccgccgctaaccatgcgcgcgtgtcacaatcgcagggtgatgatattcaaacgcggctgggtttacacagcgaatggcgtaccgctgttcatgtcataccatcattagatctgaattattatcacgatccccatgcgacggaaattgaagaagatggcagcactatcagtgacgatgcggtgaagcaacggggtgaaataaaagtgggagtcacgggcaatatcagtcagcgagtttcgctgcgcggcagcgtggcgtggcagaaagggagtgatgattttgcccagacggcagggtttttgtcgatgacggtgaaatggtag

SEQ ID NO: 261312 - DNA, 756 bp, Klebsiella pneumoniae
atgacaagtctggtttccctggaaaatgtctcggtttcttttggccaacgccgcgtcctctctgatgtgtcgctggaacttaaacctggaaaaattttgactttacttgggccaaatggcgcaggtaagtcgacactggtacgggtagtgctcgggctggtaacacccgatgaaggggttatcaagcgcaacggaaaactgcgcatcggctatgtaccgcagaagctgtatctcgacaccacgttgccacttaccgtaaaccgttttttacgcttacgccctggcacacataaagaagatattttgcctgcactgaaacgtgtccaggccgggcatctgattaacgcaccgatgcaaaagctctcgggtggcgaaacacagcgtgtattgttagcgcgagcattgttaaatcgaccgcaattattagtgctggatgaacccactcagggcgtggatgtgaatggtcaggtggcgttatatgaccttattgaccagttgcgtcgcgaactggattgtggcgttttaatggtctctcacgatctgcatctggtaatggcaaaaaccgatgaagtgctttgcctgaatcaccacatttgttgttccggtacaccggaagttgtttccctgcatccggagtttatttctatgtttggtcctcgtggtgctgaacaactgggtatctatcgccatcatcataatcatcgtcacgatttacagggacgaattgttttgcgtcggggaaatgatcgctcatga

SEQ ID NO: 261313 - DNA, 987 bp, Klebsiella pneumoniae
atgaaatgttataatatcacacttctcatattcattacgatgattggtcgcattatgttacataaaaaaacgcttcttttcgcagcattatccgccgctctctggggcggtgcaacacaggccgcagatgctgccgttgtcgcttcgcttaaacccgttgggttcatcgcttctgccattgctgatggggtaacagaaacggaggttttactacctgacggcgcttcagaacatgattattcactgcgtccatcagatgtaaaacgcttacagaacgcggacttagtcgtttgggttggcccggagatggaagcgttcatgcaaaaaccggtaagtaaattacctgaagcgaaacaggtaacgattgcgcagctagagaatgtgaaaccgctgctgatgaaaagtattcacggcgatgatgatgatcacgaccacgcggaaaaaagtgacgaagatcaccatcacggcgatttcaacatgcatctttggctttccccagagatagcgcgggctacagcggttgcaatccatggaaaattagtggaacttatgccgcaaagtcgagccaaacttgacgccaacctgaaggattttgaggcacaattagcctcaaccgaaaagcaggttggtaacgagctcgcgccgctcaaggggaaaggttatttcgtttttcacgatgcttacggctatttcgaaaaacagttcggactgacaccgcttggtcattttaccgttaaccctgagattcaacctggcgcgcagcgtttacatgaaataagaacacagttggttgagcaaaaagcaacctgcgtttttgctgagccacagttcaggccagcggtcgttgagagcgtcgcacgagggacatccgttcgtatgggaacgttggatcccctggggacgaatatcaaactgggtaaaacaagctattcagaattcctgaatcaattagccaaccagtatgcgagctgcctgaaaggagattaa

SEQ ID NO: 261314 - DNA, 1323 bp, Klebsiella pneumoniae
gtgcaacagatagcccgctctgtcgccctggcgtttaataatttaccgcgaccacaccgcgttatgttggggtcgctcaccgttcttactctggccgtcgctgtctggcggccctatgtttatcaccgcgatgccacgccaattgtcaaaaccattgagctggaacagaacgaaattcgttcgctcttacctgaagccagtgagccgattgatcaagctgcacaagaagatgaagccattccccaggatgaactggatgacaaaatcgccggtgaagcgggcgtgcatgaatatgttgtttccactggcgatacgctaagcagcattctcaatcagtatggtattgatatgggtgatatcacccaactggctgctgccgacaaagaattgcgtaacctgaaaatcggtcaacaactctcctggacattaaccgcggacggcgaactgcagcgcctcacctgggaagtgtctcgtcgtgaaacccgaacctatgaccgtactgccgctaacggttttaaaatgaccagcgaaatgcagcaaggagagtgggtcaacaatctgctgaaaggtaccgtcgggggaagctttgttgccagcgccagaaacgccggtttaaccagcgccgaagtgagcgcagtgattaaagccatgcagtggcaaatggatttccgcaaactgaaaaaaggcgatgaatttgcggtgttaatgtcacgagaaatgcttgatggtaaacgtgagcaaagccaactgctgggcgtacgtttgcgttcagaaggtaaagattattacgcaatccgcgctgaagatggcaaattctatgatcgtaacggtactggtctggcgaaaggattcttgcgattcccgacggcgaaacagttccgtatctcgtctaactttaacccgcgtcgtactaatccggtgactggtcgtgttgcgccacacagaggtgttgatttcgccatgccacagggtacgccggtgctttcagtgggtgacggtgaagtggtggttgccaaacgcagtggcgcagcaggttattatgtggctattcgtcatggtcgcagctacaccacgcgttatatgcacttgcgcaagattctggtgaaaccgggacagaaggtgaaacgtggcgaccgtatcgcgctttccggtaataccggacgttcaaccgggccgcatctgcactatgaagtatggataaaccagcaggccgtaaacccgctgacggcaaaactgccgcgtaccgaagggctgaccggctccgatcgtcgcgaattcctggcgcaggccaaagagattgtgccgcagctacggtttgattaa

SEQ ID NO: 261315 - DNA, 972 bp, Klebsiella pneumoniae
atggaaacgaaaaaaaataatagcgaatacattcctgagtttgataaatcctttcgccacctgcgctactggggagcatggctgggcgtagcagcgatggcgggtattgctttaacgccgccaaagtttcgcgaccccattctggcacggctgggacgttttgccggacgcctgggaaaaagctcacgccgtcgtgcgttaatcaatttgtcgctctgctttccagaacgtagtgaagctgaacgcgaagcgattgttgatgagatgtttgccaccgcgccgcaagcgatggcaatgatggctgagttggcaatacgcgggccggagaaaattcagccgcgcgttgactggcaagggctggagattatcgaagagatgcgacgtaataacgagaaagtgatctttctggtgccgcacggttgggccgtcgatattcctgccatgctgatggcctcgcaagggcagaaaatggcagcgatgttccataatcagggcaacccggtttttgattatgtctggaacacggtgcgtcgtcgttttggcggtcgtctgcatgcgagaaatgatggtattaaaccattcatccagtcggtacgtcaggggtactggggatattatttacccgatcaggatcatggcccagagcacagcgaatttgttgatttctttgccacctataaagcgacgttgcccgcgattggtcgtttgatgaaagtgtgccgtgcgcgcgttgtaccgctgtttccgatttatgatggcaagacgcatcgcctgacgattcaggtgcgcccaccgatggatgatctgttagaggcagatgaccatacgattgcgcggcggatgaatgaagaagtcgagatttttgttggtccgcgaccagaacaatacacctggatattaaaattgctgaaaactcgcaagccgggcgaaatccaaccgtataagcgcaaagatctttatcccatcaaataa

SEQ ID NO: 261316 - DNA, 1179 bp, Klebsiella pneumoniae; identical to SEQ ID NO: 9520

SEQ ID NO: 261317 - DNA, 291 bp, Klebsiella pneumoniae
atggcggttgaagttaaatacgtagtcattcgtgagggcgaagagaaaatgtcgtttaccagcaaaaaggaagccgatgcttatgacaaaatgcttgatacggcggatctgcttgacacctggctgacaaattctccagtgcaaatggaagacgagcaacgtgaagccctttcgctatggctggcagaacaaaaagatgtgctgagcaccattctgaaaaccggcaaattaccgtccccacaggtcgtcggtgctgaatccgaagaggaagatgcctcacacgcggcctga

SEQ ID NO: 261318 - DNA, 357 bp, Klebsiella pneumoniae
atgaaaaaaagaggggcgtttttagggctgttgttggtttctgcctgcgcatcagttttcgctgccaataatgaaaccagcaagtcggtcactttcccaaagtgtgaaggtctggatgctgccggaattgccgcgagcgtaaaacgtgattatcaacaaaatcgcgtggcgcgctgggcagatgatcaaaaaattgtcggtcaggccgatcccgtggcttgggtcagtttgcaggacattcagggtaaagatgataaatggtcagtaccgctaaccgtgcgtggtaaaagtgccgatattcattatcaggtcagcgtggactgcaaagcgggaatggcggaatatcagcggcgttaa

SEQ ID NO: 261319 - DNA, 660 bp, Klebsiella pneumoniae; identical to SEQ ID NO: 9519

SEQ ID NO: 261320 - DNA, 1170 bp, Klebsiella pneumoniae; identical to SEQ ID NO: 9518

SEQ ID NO: 261321 - DNA, 426 bp, Klebsiella pneumoniae; identical to SEQ ID NO: 9517

SEQ ID NO: 261322 - DNA, 2061 bp, Klebsiella pneumoniae
atgctaccaaaagccgcccgcattccccacgccatgacgcttcatggcgatacgcgcatcgataattactactggctgcgggacgatacgcgttctcagccggaagtcctggactacctgcaacaagaaaatagttacggtcatcgggtgatggcctcgcaacaagccttgcaggatcgcatcttaaaggaaatcatcgaccgcattccgcaaagagaagtttctgcgccctacataaaaaatggctaccgctatcggcatatttatgaaccaggctgtgaatatgctatctaccagcgtcaatcggcattcagtgaagagtgggatgagtgggaaatattgctcgatgccaataagcgcgcagctcatagtgagttttattcgatgggcggaatggcgattacgcccgataacaccattatggcgctggcagaagattttctttcccgacgccagtacggcattcgttttcgtaatctggaaacaggtaactggtatccggaactgctggataacgttgaacccagctttgtctgggcaaatgattcctggactttctactatgttcgcaagcatccggtgacgctgcttccttatcaggtctggcgtcacgccatcggtacgccagcatcgcaagatacactgatctacgaagaaaaagacgatacctattatgtcagcctgcataaaacgacgtcgaagcactatgtagtcattcatctggccagcgccaccaccagtgaagttcgcctgctggacgcggaaatggccgatgccgagccgtttgtttttctgccgcgccgcaaagatcacgaatacagccttgatcactaccagcatcggttttatctgcgttccaaccgccacggcaaaaactttggcttataccgtacccgtatgcgtgatgagcaacagtgggaagagttaattccgccacgcgataacattatgctggaagggtttacgctgtttaccgactggctggtggttgaagagcgtcagcgcgggttaaccagtttgcgccaaatcaaccgcaagacccgggaagtcattggcattgcctttgatgatccggcctatgtgacctggattgcctacaatccagaacctgaaaccgcgcgattgcgttatggttattcttccatgaccacaccagacactttgtttgaactggatatggataccggtgagcgtcgtgtattaaaacaaacagaagtgcccggttttgatgcggcgaattaccgcagtgaacacctgtggatagtcgcccgtgatggcgtcgaagttccggtttcgctggtctatcatcgcaaacattttcgcaaaggacacaacccattgctggtgtatggctatggttcttacggcgcaagtattgatgccgatttcagttttagccgcttgagtttgttagatcgtggctttgtctacgccattgtccatgttcgcggcggtggtgagctggggcaacaatggtacgaagacggaaaattcctgaagaagaaaaatacgtttaatgattatcttgatgcctgcgatgcattgttaaaactgggctatggctctccttcgctctgttatgcgatgggcgggagtgcggggggcatgttgatgggcgttgcaattaatcaacgcccggaattgttccacggcgttatcgcccaggtaccgtttgttgatgttgtaacaacaatgcttgatgaatcaattcctcttaccactggtgagtttgaagagtgggggaatccgcaggatccgcaatattacgagtacatgaaaagctacagcccgtatgacaacgtcaccgcacaggcttatccgcatttactggtaacgaccggtttacacgattctcaggtgcaatattgggaaccggcaaaatgggtcgctaaattgcgcgagctgaaaaccgataaccatcttttattgctctgtaccgacatggactcaggccatggcggtaaatctggccgctttaaatcgtacgaaggcgtagcgatggaatatgcttttctggtcgcgctggcgcagggaacattacccgctacgcctgaggattaa

SEQ ID NO: 261323 - DNA, 663 bp, Klebsiella pneumoniae
atgttgcgcattatcgatacagaaacctgcggtttgcagggagggatcgttgagattgcctctgttgatgtcattgacggaaaaatcgtcaaccccatgagccacctggtgcgccccgatcgtcctattagtccacaggcgatggcgattcatcgcatcaccgaagccatggtcgccgataaaccgtggattgaagatgtgatcccgcactattacggtagtgaatggtatgtcgcgcacaacgccagctttgaccgccgcgtactgcctgagatgcccggtgagtggatttgcactatgaaactggcccgtcgtttgtggccagggatcaagtacagcaatatggcgttatataaaacacggaagctcaatgtacagacgccgccgggcctgcatcatcaccgcgcgttgtatgactgttatatcaccgctgcgttgcttatcgatattatgaacacctccggctggacggcagaacagatggccgatatcaccggacgtccgtcgttgatgacgaccttcacctttggcaaataccgtggcaaagcggtttccgacgttgccgaacgcgatccgggctatctgcgctggttgtttaataacctggacagcatgagcccggagctgcgtttaacactgaaacattatctggaaaatacttaa

SEQ ID NO: 261324 - DNA, 657 bp, Klebsiella pneumoniae
atgtcgttctggaaagttgcagcagcgcaatatgagcctcgtaaaacctcactgaccgaacaggtagctcatcatctggagtttgtgagggccgccgccaggcaacaatgtcagctgttagtttttccatcgctttctttactggggtgtgattattcgcgacgtgcccttcctgccccacccgatctctcgctgttagacccgctttgttatgctgcaacgacctggcgaatgaccatcattgccggccttcccgttgaatataacgatcgctttattcgtggaattgcggtgttcgcaccgtggcgaaaaacaccagggatctaccatcagagtcatggtgcatgtctgggccgtcgttccagaaccatcacggtggtcgatgaacaaccggaaggtatggatatggatccgacctgttcactgtttacgacagggcaatgtctgggggaacccgacctactggcatctacccgccgcttacaatttttttcacatcagtactcaattgccgtgctgatggcaaatgcccgtggtaacagtgcactatgggatgaacatggtcgtctcatcgttcgcgccgatcgtggttcattattgttagtcggtcagcgttcatcacagggttggcaaggcgatatcattccattacgctag

SEQ ID NO: 261325 - DNA, 231 bp, Klebsiella pneumoniae
atgctgaagaatctggctaaactggatcaaacagaaatggataaagtgaatgtcgatttggcggcggccggggtggcatttaaagaacgctacaatatgccggtgatcgctgaagcggttgaacgtgaacagcctgaacatttgcgcagctggtttcgcgagcggcttatcgcccaccgtttggcttcggtcaatctgtcacgtttaccttacgagcccaaacttaaataa

SEQ ID NO: 261326 - DNA, 375 bp, Klebsiella pneumoniae
atggcttcaactgcacgctcccttcgctacgcgctggcaatcctgaccacttcgttggtgacaccttccgtctgggcacatgcgcatttaacgcatcagtatcctgcggcaaatgcgcaagtgacagctgccccgcaggcaatcactttaaacttctcggaaggcgttgaaacaggattcagtggtgcaaaaatcacggggccaaaaaacgaaaatattaaaacattaccggcgaagcggaatgagcaggaccaaaagcaactgattgttccactggccgattcgctgaaacccggaacctacaccgttgactggcatgttgtttcggtggacgggcataaaacgaaaggacactacacctttagcgtgaaataa

SEQ ID NO: 261327 - DNA, 873 bp, Klebsiella pneumoniae
atgctggcgtttacctggatcgcgctgcgatttatccatttcacctcgctgatgctggtctttggcttcgcaatgtacggtgcctggctggcccccttaacgattcgtcgcttgctgacgaagcgttttctgcgtttacaacagcacgctgccgtctggagtttgatcagtgccactgcaatgctcgccgttcagggcgggttgatgggaacgggatggacagatgtattttcgccaaacatttggcaggctgttttgcaaacgcagtttggtggcgtctggttatggcaaattgttctcgccctcgtaacgctgatcgtcgcccttatgcaaccgcggaatatgccacgtttgatgtttatgctcactaccgcgcaatttattctgctggcgggagtcgggcatgcgacgctgaatgaaggggtaacggcgaaaatccatcagactaatcacgcgattcacctgatctgtgcggcggcgtggtttgggggattactgccggtgctctggtgtatgcaactcatcaaaggtcgttggcgacaccaggctattcaggcgctgatgcgtttttcctggtgcgggcattttgcggtgatcggcgtactggcaagcggcgtgcttaatgcattgttgattaccggatttccccccacgcttacgacttactggggccaactcttattgctcaaagccatcctggtgatgattatggtggtcatcgcgctggctaatcgttatgttcttgtaccgcgcatgaggcaggatgaagatcgtgcggcaccctggtttgtgtggatgactaaactcgaatgggcgataggtgcggtagtgctggtgatcatcagcctgcttgcgactctcgaacctttttga

SEQ ID NO: 261328 - DNA, 342 bp, Klebsiella pneumoniae
atgatgaaaaaaagtattctggcgtttctgttactcaccagttctgcagcggcgctggctgcaccgcaggtgattaccgttagccgttttgaagtgggtaaagacaaatgggcgtttaatcgcgaagaggtgatgctgacttgccgaccgggtaatgctttgtatgtcatcaacccaagtaccctcgtgcagtatcctttaaacgatatcgcacaaaaggaagttgccagtgggaagactaaagcccaacccatttcggtgattcagattgatgatcctaacaatcccggcgaaaaaatgagtctggcaccgtttatagaacgagctgaaaaactctgttaa

SEQ ID NO: 261329 - DNA, 657 bp, Klebsiella pneumoniae
atgaaacagcctgcgcccgtttatcagagaattgcgggtcatcaatggcgacatatctggctttcaggcgatatacacggttgtcttgagcagttgcgccgcaaattatggcattgtggttttgatccgtggcgagatttacttatctcagtgggagacgttatcgatcgtgggccgcaaagtttacgttgcctgcagttactggaacaacattgggttcgtgcggtaagaggcaatcatgaacagatggcgatggatgcgctggcatcccagcagatgtctttatggttgatgaatggcggcgactggtttattgcgctggcagataatcaacagaaacaagcgaaaacggcgctggaaaaatgtcagcatttgccctttattcttgaagtacacagtcgcaccggcaagcatattattgctcatgccgattatccagatgatgtttatgaatggcaaaaggacgtcgatttgcatcaggtcttgtggagccgctcgcgattaagtgaacgccaaaaagtgcagggaattacaggtgctgatcatttctggtttggtcatacaccgttgcgccatcgcgtggatattggcaacctgcattatattgatacaggtgttgtctttgggggcgaactgactgttgtgcaattgcaataa

SEQ ID NO: 261330 - DNA, 183 bp, Klebsiella pneumoniae
atggcggatccgttgatcgctcatagaataaagacactgctgttccgtgttgtagacatccacaacaatatcttcacaaccgccatccaggtagcaaacaaaaagtaccagcgcgaacatttcatccccgaagtgtggtgccgtaccgttaagtttaggagagattttacaacgggggaataa

SEQ ID NO: 261331 - DNA, 237 bp, Klebsiella pneumoniae
atgaaaaccagtgtgcgcataggcgcttttgaaatcgacgacggcgaattacacggcgaatcgccgggtgatcgaacgttaaccattccttgtaaatctgaccccgatttatgtatgcaactggatgcctgggatgctgaaaccagtatccctgccctgctaaatggcgaacactctgtcctttaccgtacccgttacgatcaacaatctgatgcctggattatgcgtcttgcctaa

SEQ ID NO: 261332 - DNA, 1446 bp, Klebsiella pneumoniae
atgctcgtggcccaacacaccgtttatttcccggacgcctttctgacgcaaatgcgcgaagcgatgccttcgacgctctcttttgatgattttcttgccgcctgtcagcgcccgttgcgccgcagcattcgcgttaatacgctgaaaatctccgttgctgatttcctgcaattaaccgcctcttatggctggacgcttacgccaattccgtggtgtgaagaaggtttctggattgaacgcgacgatgaagatgcattgccattgggtagtaccgccgagcatttaagcggcctgttttatattcaggaagccagttcaatgttgcccgttgccgccttgtttgctgacggtaatgcaccacagcgggtgatggatgtcgctgctgcgccaggctccaaaacgacgcaaattgccgcgcggatgaataacgaaggggctatccttgccaatgagttttccgccagtcgggtaaaagtgttacatgccaatatcagccgctgtggcatccgtaatgttgcgctcacgcattttgatggccgtgtatttggtgcggcagtgccagaaatgttcgatgccattttgctggacgctccctgctccggcgaaggcgtggtgcgtaaagatcccgatgcgctaaaaaactggtcaccagaaagcaatcaggaaatcgcagctacccaacgggaactgatcgacagcgcctttcatgcattacgccctggcggtacgctggtttactcgacctgtaccttaaaccaggaagaaaatgaagccgtctgccggtggcttaaagagacttaccccgatgcagtagagtttttaccgcttggcgatctcttccctggtgcaaataaggcgctgaccgaagaaggctttttgcatgttttcccacaaatttacgactgcgaaggcttcttcgttgctcgtctgcgtaaaactcaggcgatccccgtcttacccgccccaaaatacaaagtgggcaatttcccgtttagcccggtgaaagatcgcgaagctggacaaattcgtcaggcggctgcaggtgttggcttaaactgggatgaaaacctgcgcctctggcagcgtgacaaagaactgtggttgttcccggtgggcattgaagccctgatcggtaaagtccgattttctcgcctggggattaaacttgccgaaacgcataacaaaggttatcgctggcagcatgaagcggttattgcccttgcctcacccgacaatgtgaacgcttttgaactaacggcgcaggaagcggaggagtggtatcgcgggcgcgatgtttacccgcaagccgcgccagtagcggatgatgtattggttactttccagcatcagccgattggtttagccaaacgaattggttcgcgactgaaaaacagctacccgcgtgaactggtgcgcgatgggaaactttttaccggtaacgcctga

SEQ ID NO: 261333 - DNA, 1284 bp, Klebsiella pneumoniae
atggctcttaacacaccacaaattacgccgacaaaaaagataacagtgagggcaatgggcgaggaactgccgcgtggtgattaccaacgttgcccgcaatgtgacatgctgtttagcctgcctgagataaattctcatcaaagtgcctattgtccgcgctgccaggcaaaaattcgtgacgggcgcgactggtcgctaacgcgcctggcggcaatggccttcaccatgctgttgctgatgccgtttgcctggggcgaaccgctgttgcatatctggctgttaggcattcgtattgacgccaacgtcatgcaaggcatctggcaaatgaccaaacagggcgatgcgataacgggatcaatggtctttttttgcgttattggtgcccccctcattctggtgacctccatagcttatttatggtttggtaaccgactgggaatgaatctacgtccggtactgctgatgcttgagcgactgaaagagtgggtaatgctcgatatctacctggtcggcattggcgttgcttctataaaggtgcaggattatgcccatatccaggcgggtgtcggcttgttctcttttgtggcgttggtgattttaacgacggtgacgttgtcacatctcaatgtcgaagaactgtgggagcgattttatccgcagcgccccgctacgcgtagggacgagaaactccgtgtctgtcttgggtgccattttaccggctatcctgatcagcgtggtcgctgcccgcgttgccatatcccgctacgcctgcgtcgccgtcatagtctgcaaaaatgctgggcggcgctgttagcgtcaatcgttttgttgttacctgccaacctgttgcctatttctatcatttatctgaacggaggacggcaggaagatacaattctttccggaattatgtcgctggcaagtagcaacattgccgttgcgggaatcgtgtttatcgccagtattctggtaccgtttactaaagtgatcgtcatgttcactttactgttgagtattcattttaaatgccagcaaggtttacgcacacgcattctgttactgcggatggtgacctggattggtcgctggtcgatgctcgacctgtttgtcatatctttaaccatgtcgctgattaatcgcgatcagatcctcgcttttactatgggaccggctgcgttttatttcggcgcagcggtaattttgactattcttgctgtggaatggctggacagccgcttactttgggatgcacatgagtcaggaaacgcccgcttcgacgactga

SEQ ID NO: 261334 - DNA, 552 bp, Klebsiella pneumoniae
atgcttattttaataggctggcagttccaggtaagacaaccaagtgattatataatgaacaaaacagaattttacgcggatttaaatcgcgactttaacgcgctgatggcaggagaaaccagttttctggcaacgcttgctaacaccagtgcgttgttatatgagcgtctcagtgacgtaaactgggcaggtttttatttgcttgaggacgatacactggtgctcggaccatttcagggcaaaattgcctgtgtccggatacccgtcgggcgcggcgtgtgcggtactgcggttgcccgcaatcaagtgcagcgtatcgaggatgttcatgcgtttgacgggcatattgcctgtgatgcgacgagtaattctgaaattgttctgccgctggtggtgaaaaatcagattattggtgttctcgacatcgatagtaccgtcttcggtcgctttacagacgaggacgagcaaggcttacgtcagcttgtggcacagcttgaaaaggtgcttgcaacgacggattacaaaaaattctttgcgagcgtcgcaggataa

SEQ ID NO: 261335 - DNA, 699 bp, Klebsiella pneumoniae
atggaaaatcaacctaagttgaatagcagtaaagaagtaatcgcgtttctggccgaacgttttccccactgtttcagtgcggaaggtgaagcgcgtccgctgaaaatcggtatttttcaggatttggtcgatcgtgttgccggggaaatgaacctgagcaaaacgcaattgcgatccgctttacgtctctacacttcgagctggcgttacctttacggtgttaaacccggcgcaacgcgtgtcgatcttgacggcaacccatgcggtgagctggacgagcaacatgtagagcatgctcgcaagcagcttgaagaagcgaaagcgcgtgttcaggcacagcgtgctgaacagcaagcgaaaaaacgcgaagctgccgcagctgctggtgagaaagaagacgcaccgcgccgcgaacgcaagccacgtccgaccacgccacgccgcaaagaaggcgctgaacgtaaacctcgtgcgcaaaagccggtagagaaagcgccaaaaacagtaaaagcacctcgcgaagaacagcacaccccggtttctgacatttcagctctgactgtcggacaagccctgaaggtgaaagcgggtcaaaacgcgatggatgccaccgtattagaaatcaccaaagacggcgtccgcgtccagctgaattcgggtatgtctttgattgtgcgcgcagaacacctggtgttctga

SEQ ID NO: 261336 - DNA, 1374 bp, Klebsiella pneumoniae
atgccaaaagttcaggccgacggcctgccgttgccccagcgatacggtgcgatattaaccattgtgattggtatttcgatggctgtccttgacggcgcaatcgccaacgtcgccttgccaacaatcgccacggaccttcatgccacaccggccagttccatctgggtagtgaacgcctatcaaatcgccattgtcatctccctgctctcattttcgtttctgggcgatatgtttggctatcgacgtatttataaatgcggtctggtcgtttttctgttgtcttcactgttctgcgccctttctgattcgctgcaaatgctcacccttgcgcgtgtcatacaaggtttcggcggtgcagcgttgatgagcgttaataccgcacttatccgcctgatctatccacaacgttttctgggtcgagggatgggcataaactcgtttattgttgccgtttcttctgctgccgggccgacaattgctgcagcaatcctctccatcgcatcctggaaatggttatttttaatcaacgtaccgttgggtattatcgccctgcttctggcgatgcgttttctgccacccaatggttctcgcgccagtaaaccccgtttcgacctgcccagcgccgtgatgaacgcgttaaccttcggcctgcttatcactgcgttgagtggtttcgctcaggggcaatcgctgacattgattggtgcggaactggtggtaatggttgtcgttggtattttctttattcgccgccagctttttcttcccgtaccgctgctaccggtggatttactgcgtatcccgctgttttcactttctatttgcacatctgtttgctctttctgcgcacaaatgctggcaatggtttccctgcccttttacctgcaaaccgtgctcgggcgtagtgaagtcgaaacaggtttacttctgacaccgtggccgttagcaacgatggtgatggctccgctggcaggctatttgattgaacgcgtacatgcaggattgctgggtgctttaggattgttcatcatggctgcggggcttttttccctggttctgctgcccgcgtcacctgcggatatcaatattatctggccgatgatcttatgtggcgctggatttggcttgttccagtcacccaataaccacaccattattacctccgctcctcgcgaacgtagcggtggagccagtggcatgttaggaacggctcgtctactgggtcagagtagcggcgcggcgctggtggcgctgatgctaaatcagtttggtgataatggtactcacgtctcgctgatggctgcggctattctggcagtgattgctgcctgtatcagtgggttacgtatcactcagccaagatccagggcataa

SEQ ID NO: 261337 - DNA, 240 bp, Klebsiella pneumoniae
atgcgattcatcattcgcacagttatgctgatagcactggtatggataggattattactcagcggatatggcgttttgattggaagcaaagagaatgccgcgggattaggtttgcaatgtacctatctgaccgccagaggcaccagcacggtacaatacctgcacactaaaagtggttttctggggataacagattgcccgttgttacgtaaaagcaatattgtggtcgataatggttaa

SEQ ID NO: 261338 - DNA, 288 bp, Klebsiella pneumoniae
atgaacgaagttgttaattcaggcgtgatgaacattgcgtctttggttgtatcggtggtggttctttttatcgggcttatcttgtggttttttatcaatcgtgccagttcacggactaacgaacagattgaactgcttgaggcgttgctggatcagcaaaaacgtcaaaatgctctgttacgtcgtttgtgcgaagcaaacgaacctgagaaagcagataaaaagaccgttgagagtcaaaaatcggttgaagacgaagatattattcgtctggtcgccgaacgataa

SEQ ID NO: 261339 - DNA, 948 bp, Klebsiella pneumoniae
atggataatgtagaaaaactcaagttgattaactggaaagagttaatcgtcaataaacatacttggattgaatcaaggttagtgaatcatccttcagatactcacgccaaaatagtatctagaatattcacgattccttttagtggcgttattcaggagcatcatcatttagttgaatcaatggctgatgctattgagcattacgtatttgataaagaaacactagataaaatgaaggctgaaggggtggtaccctttaggaaggctgctcagttcttcggtgatacaaatccagttaaggatggtaaatacggtgaattacttctctatattctgtctgaagctatattaagcacaccaatggtttcacataaaatcacaagcttgagtaacttaaatgatcaggtcaagggtggggatggcgttttttttggcgtctacagagacaatttatcaatactgattggcgagtcaaagatttataaaagtttttccggcgcattggagagtgcattcgattcccttgatcgattcactaaaagctacactagtggtgcactcggccatgaacttttcatggctagaactaatatttcaaataattttgattttgaaactatggaactaatatatagggcatttactcccggagatgatatttattccgagtgtgtcaaaacgcatccggtattgcttatttttgaagatagggaaataaaagtaattgaagaaaattctgtgactaaggttgatgcagaaaatgctcttgatgcgtggcttacaacaaaaaaaattgcaattaaagctgcgattgatgagaggttaacgaaatacccaaacgtaaggccgtgtttcttagacttctttttaataccaatgagcgatgtgggggagtttaaaaaatcgttgtatagagctatccatgcaatagactataaagaaaattaa

SEQ ID NO: 261340 - DNA, 210 bp, Klebsiella pneumoniae
atgagccatcatatttcttcccgcttcattggagcgtttgctaaaatccacataacccagggtaaatatttttaccaaaaactccaaaaatgtcttaggatcaaggatatttcttgtattatcctgcccctcggcattacgggcaaaattattcattccaacacgccaggtatttataacttcacttttttgtttaaaattgtcggctga

SEQ ID NO: 261341 - DNA, 453 bp, Klebsiella pneumoniae
atgatcatcggaaatattcataatcttcagtcgtggctaccccaggagttacgccaggcgattgagcatatcaaagcacacgttacggcagaaacgcccaagggcaagcacgatatcgaaggcaatcgtctgttttatcttatctcggaagatatgaccgagccgtacgaagctcgccgtgcggagtaccatgcccgctatctcgacattcagattgtgttaaaaggtcaggaaggcatgaccttcagcacgcaacctgcaggcaccccggataccgactggttagcagacaaagacatcgcatttttgccggaaggcgttgatgagaaaacagttatccttaatgaaggtgattttgttgtgttttatccgggggaagtgcataaaccgctgtgcgcagtgggcgcgccagcccaggttcgcaaagcagtagtgaagatgctgatggcgtga

SEQ ID NO: 261342 - DNA, 594 bp, Klebsiella pneumoniae
atggtcactaaaaaacaatctcgcgttccaggtcgtcccagacgtttcgctcctgagcaggcagtctctgcggcaaaagtgctttttcaccaaaaaggtttcgatgctgtcagtgttgctgaagttactgattatcttggtattaaccccccgagcctctacgcggcttttggcagtaaggctgggttatttagccgtgtactcaatgaatatgtcggtacggaagctattccgcttgccgatattcttcgtgatgatcgtccggtaggcgagtgcctggttgaggtattaaaagaagcggcgcgcagatatagccaaaacggcggctgcgctggctgtatggttcttgaaggtattcatagtcatgatccacaagcgcgtgatattgccgttcaatattatcacgccgcagaaacgaccatttatgactatatcgccaggcggcatccacaaagcgcacaatgtgtgactgattttatgagtaccgtgatgtcagggctttctgcgaaggcacgggaggggcactccatcgaacaactctgtgcaacagctgccctggcgggggaagcgataaaaactcttatcaaggagtga

SEQ ID NO: 261343 - DNA, 714 bp, Klebsiella pneumoniae
atgggcgcttttaccggtaagacagttctcatcctcggtggtagccgtggaatcggtgccgctatcgtacgtcgtttcgtcaccgatggagccaatgtacgattcacctatgcggggtcgaaagatgccgctgaacgcctggcacatgagactggagcgacagcagtattcacagatagtgctgacagagacgctgttattgatgtcgttcgtaagagcggcgcattggatatcctggtggtaaatgcaggtattggcgtctttggcgatgccctggaattaaatgccgacgatattgatcgccttttcaaaatcaatattcatgctccttatcatgcctctgttgaagccgcccggcagatgcccgaaggcgggcgtatcttaatcatcggctccgtgaatggcgatcgtatgcctgttgcaggcatggctgcttatgccgccagtaaatctgccctgcaaggcatggcacgcgggctggcccgtgattttggaccgcgtgggataaccatcaacgtcgtccagccagggccaatagataccgacgctaatcccgccaacgggccaatgcgcgatatgttgcatggttttatggccatcaaaagacatgggcaaccggaagaggtcgctggtatggtcgcatggttagcagggccagaagccagttttgttaccggcgcgatgcataccattgatggcgcgtttggcgcataa

SEQ ID NO: 261344 - DNA, 396 bp, Klebsiella pneumoniae
atggtagaaagaaccgctgttttccctgctggccgacattcactgtatgctgagcatcgttattctgcggctattcgttccggcgatttgctgtttgtttccgggcaagtaggaagtcgagaggacggaacaccagaacccgattttcagcaacaagtcagactggcctttgataatttgcatgcgaccctggctgctgcgggatgcacttttgacgatatcattgatgttacgagctttcataccgatccagaaaaacaatttgaaggcatcatgacggtcaaaaatgaaatatttagcgccccaccttatccaaactggacggcggtgggtgttacctggctggcaggctttgattttgaaattaaagtgatagcgcgcatccctgcgcagtaa

SEQ ID NO: 261345 - DNA, 948 bp, Klebsiella pneumoniae
atgcaaaatcggctgaccatcaaagacatcgcgcgcttaagcggcgtggggaaatctacggtttcccgggtgctgaataacgaaagcggcgtgagccagcgcacgcgcgagcgtgttgaagcagtgatgaatcagcatggattttccccttcccgctctgcgcgcgctatgcgtgggcaaagcgataaagtggtcgccatcattgttacccgtctggattcgttgtcagaaaatctcgccgttcaaaccatgctgccagcgttctatgaacaaggttacgatccaatcatgatggaaagtcagttttccccgcaattagttgccgaacatttgggggtgctgaaacggcgtaatatcgacggcgtagtgctgttcggttttaccggcataacagaagaaatgttagcccactggcagtcatcgctggttctgctggcgcgtgacgcaaaaggctttgcttcggtctgttatgacgacgaaggggcaatcaagatcctgatgcaacggctgtatgaccaggggcatcgtaatatcagttatctcggcgtgccgcatagtgacgtgacgaccggtaagcgacgtcacgaagcctacctggcgttctgcaaagtgcataaactgcatcccgttgccgctctgccagggcttgctatgaagcaaggctatgagaacgtagcaaaagtgattacgcctgaaactaccgcgttactgtgcgcaaccgacacgctggcacttggcgcaagtaaatacctgcaagagcaacgcatcgagaccttgcaactggcgagcgtcggtaatacgccgttaatgaaattcctccatccggagatcgtcaccgtagatcccggttacgccgaagctggacgccaggcggcctgccagttgatcgcgcaggtaaccgggcgcagcgaaccgcaacaaatcatcatccccgccaccctgtcctga

SEQ ID NO: 261346 - DNA, 1656 bp, Klebsiella pneumoniae
atgactcatcttccccactggtggcaaaacggcgttatctaccagatttatccaaagagttttcaggacaccacgggtagcggcaccggcgatttacgtggcgttatccagcgcctggactatctgcataaactgggcgttgatgccatctggctaacccccttttatgtctctccccaggttgataacggttacgacgtagcgaactatacggcgattgatcccacctacggcacgctggacgattttgacgaactggtgacacaggcaaaatcgcgcgggattcgtatcattctcgatatggtgtttaaccatacctctacccaacatgcctggtttcgcgaggcgctgaacaaagaaagcccttaccgccagttttatatctggcgcgatggcgaaccagaaacgccaccgaacaactggcgttcaaaatttggcggtagtgcgtggcgctggcatgcggaaagcgaacagtactatttgcatctctttgcaccagaacaggcggatctcaactgggagaatccagcggtacgcgcagagctgaaaaaagtctgtgagttctgggccgatcgtggggtcgacgggttgcggctggatgtggtgaatctgatctccaaagatccgcgttaccctgaagacctggatggcgacgggcgtcgcttctacaccgacgggccacgagcacacgagtttttgcacgagatgaaccgcgatgtgtttacgccacgcgtgttaatgaccgtaggtgaaatgtcctccaccagccttgagcattgccagcgatacgcggctctgacaggcagtgaattgtcgatgacctttaattttcatcacctgaaggtcgattatcccggtggtgagaaatggacgctggctaaacctgactttgtggcgttgaaaacattgttccgccactggcaacaaggaatgcacaacgtggcatggaatgccttgttctggtgtaaccacgatcagccgcgcattgtttctcgctttggtgatgaaggtgaataccgcgtgcctgcggcaaaaatgctggcgatggtgctgcatggcatgcagggaacgccgtatatctaccagggcgaagagattggcatgaccaacccgcatttcacgcgcattactgactatcgcgacgtggagagcctcaatatgtttgccgagctgcgcaacgatggtcgtgatgccgacgagttattggcaatcctcgccagtaaatcccgtgacaacagtcgcacacccatgcaatggagcaacggcgataatgccgggtttacggctggcgaaccgtggattggtctgggcgataactatcaggaaatcaacgtagaagctgcgctgaccgatgagtcctcggtgttttacacctaccaaaagttaatcgcactgcgtaagcaagaagccgtcctgacatggggcgattaccaggatctgctgccaaacagccctgtattgtggtgctatcgccgtgaatggaaggggcaaaccttgttggtcattgccaaccttagccgtgagacccaaccctggcagccagggaaaatgctcggcaactggcagcttgtgatgcataactacgaagaagcctcaccacaaccctgtgccatgactttacggccttttgaggctgtctggtggttacagaagtaa

SEQ ID NO: 261347 - DNA, 2139 bp, Klebsiella pneumoniae
atgacaccgcatgtgatgaaacgagacggctgcaaagtgccgtttaaatcagagcgcatcaaagaagcgattctgcgtgcagctaaagcagcggaagtcgatgatgccgattattgcgccactgttgctgcggttgtcagcgagcagatgcagggccgcaaccaggtggatatcaatgagatccagaccgcagttgaaaaccagctgatgtcgggtccatacaaacaactggctcgtgcttacatcgagtaccgtcacgatcgcgacattgaacgtgaaaaacgcggtcgcctgaaccaggagatccgtggtctggtcgagcagaccaactcctcgttactcaacgaaaacgccaacaaagacagcaaggtgattccaacccagcgcgacctgctggccgggatcgtggctaaacactatgcacgccagcacctgctgccgcgtgacgtggtgcaggcacatgaacgtggtgatattcactatcacgatctcgattactcaccgttcttcccgatgttcaactgcatgttgatcgacctgaaaggcatgctgacccagggctttaaaatggggaacgccgagattgaaccgccgaagtcgatctctacggcaaccgcggtaactgcgcagattattgcccaggtcgccagccatatttatggcggcaccaccattaaccgtatcgatgaagtgctggcaccgtttgtcaccgccagctacaacaaacatcgcaagaccgcagaagagtggaacatcccggacgccgaaggctacgctaactctcgtaccatcaaagagtgctacgatgccttccagtcgctggagtacgaagtaaacaccctgcacaccgccaacggtcaaacgccgtttgtgacctttggttttggtctgggcaccagctgggaatcgcgcctgattcaggaatctatcctgcgtaaccgtatcgcaggcctcggtaaaaaccgtaaaacggcggtgttcccgaaactggtgtttgcgattcgcgatggcctgaaccataaaaaaggcgatccgaactacgacatcaaacagctggcgctggagtgcgcaagcaagcgcatgtatccggatatcctgaactacgatcaggtagtgaaagtcaccggttcgtttaaaaccccgatgggctgccgcagcttcctcggcgtgtgggaaaatgaaaacggcgagcagatccacgatggtcgtaacaacctcggcgtgatcagcctgaacctgccgcgtattgctctggaggcaaaaggcgatgaagccaccttctggaagctgctggatgaacgtctggtgctggcacgtaaggcgctgatgacccgtatcgctcgtctcgaaggcgtgaaagcgcgcgtagccccgatcctctatatggaaggcgcttgtggcgtgcgtctgaatgctgacgacgacgtttctgaaatcttcaaaaacggtcgtgcgtctatttcgctgggttacatcggcatccacgaaaccattaacgcgctgttcggcggcgagcatgtttacgacaacgagcagctgcgcgcgaaaggtattgcgattgttgaacgtctgcgtcaggcagtggatcagtggaaagaagaaacgggttatggcttcagtctctacagcacgccgagtgaaaacctgtgcgaccgcttctgccgtctcgataccgctgagtttggcgtggtgccgggcgtgaccgataaaggttactacaccaacagtttccacctcgatgtggagaagaaggtgaacccgtacgacaagatcgactttgaagcgccttacccgccactggcgaacggtggcttcatttgctatggcgagtatccaaacattcagcacaacctgaaggcgctggaagatgtctgggattacagctatcagcatgtaccgtattacggcaccaacacaccgatcgatgaatgctacgagtgtggctttaccggcgagtttgagtgcaccagcaaaggcttcacttgcccgaaatgtggtaaccatgacgcctcccgtgtgtcggtgactcgccgcgtgtgcggatatttaggtagcccggatgcacgtccatttaacgccggtaagcaggaagaagttaagcgccgcgttaaacatttggggaatgggcagataggttaa

SEQ ID NO: 261348 - DNA, 465 bp, Klebsiella pneumoniae
atgaactttcatcagtactatcctgtcgacatcgtcaacggccccggcactcgctgcaccctgtttgtctccgggtgtgttcatgaatgccccggttgctataacaaaagcacatggcgggtaaattccggtcagccatttaccaaagcaatggaagaccagatcattaacgatctgaatgacactcgcatcaaacgccaggggatttccctctccggcggcgatccgctgcatccgcaaaacgtgccggatattctgaaactggtacaacgcatccgcgccgaatgtccgggtaaagacatctgggtgtggacaggctataaactcgacgaactcaacgctgcgcaaatgcaggttgttgatttgattaacgtactggtcgacggcaaatttgtgcaggatttaaaagacccttccctgatctggcgcggcagcagcaatcaggtggtgcatcatttgcgttag

SEQ ID NO: 261349 - DNA, 291 bp, Klebsiella pneumoniae; identical to SEQ ID NO: 9657

SEQ ID NO: 261350 - DNA, 243 bp, Klebsiella pneumoniae; identical to SEQ ID NO: 9656

SEQ ID NO: 261351 - DNA, 387 bp, Klebsiella pneumoniae
atgcgtaaaagcctgttagctattcttgcagtctcctcgttggtattcagttcggcgtcgtttgccgctgatcttgaagacaatatggaaaccctcaacgacaatttaaaagtggtcgaaaaagccgataacgcggcgcaagtcaaagacgcgttaacgaagatgcgcgccgcagcgctggatgcgcaaaaagcgacgccgccgaagctcgaaggcaaatcaccggacagcccggaaatgaaagacttccgccacggtttcgacattctggtcggtcagattgacgacgcgctgaagctggcaaatgaaggtaaagtaaaagaagcgcaggccgccgcagagcaactgaaaacgacccgcaacgcctatcaccagaagtatcgttaa

SEQ ID NO: 261352 - DNA, 1374 bp, Klebsiella pneumoniae
atgcgcattcatattttaggaatttgtggcacgtttatgggcggtctggcgatgctggcgcgccagttaggccatgaagtaacgggttcggacgccaatgtgtatccgccgatgagcaccttacttgagaagcaaggcattgaactgattcagggttacgatgccagccagctcgaaccgcagccggatctggtgattattggcaacgccatgacccgtggaaatccgtgtgtggaagcggtactggaaaaaaacatcccttatatgtcaggtccacagtggctgcacgattttgtgctgcgcgaccgctgggtgctggccgttgccggtacacacggcaaaactaccaccgcgggaatggcgacctggattctggaacagtgcggttacaaaccgggatttgtgatcggcggtgtgccggggaactttgaggtttcggcgcgtctgggcgaaagcgacttctttgttatcgaagcggatgagtatgactgcgccttcttcgacaaacgctctaaatttgtccattactgcccgcgtacgctgatcctcaacaaccttgagttcgatcacgccgatatctttgacgacctgaaagcgatccagaaacagttccaccatctggtgcgtatcgttccggggcagggccgtattatctggccggaaaacgacatcaacctgaaacagaccatggcgatgggctgctggagcgagcaggagctggtgggcgagcagggtcactggcaggcgaaaaagctgaccaccgatgcttccgaatgggaagtcttgctggatggcgaaaaagtgggcgaagtgaaatggtcgctggtaggcgaacataatatgcacaatggcctgatggcgattgcggcggctcgccatgttggtgtagcgccggcagatgccgctaacgcgctgggttcgtttattaatgctcgtcgccgtctggagttgcgtggtgaagcgaatggcgtcacggtatatgacgattttgcccatcacccgacggcgattctggcaacgcttgcggcgctgcgtggcaaagttggtggtacggcgcgcattattgctgtgctggaaccgcgctcgaataccatgaaaatggggatctgcaaagacgatctggcaccttcattaggtcgtgccgatgaagtcttcctgctgcaaccggcgcatattccgtggcaggtggcagaagtggcagaagcctgcgttcagcctgcacactggagcggcgatgtcgatgcgctggcagatatggtggtgaaaaccgctcagcctggcgaccatattctggtgatgagcaatggcggttttggtgggatccatcagaaactgctggatgggctggcgaagaaagcggaagccgcgcagtaa

SEQ ID NO: 261353 - DNA, 315 bp, Klebsiella pneumoniae
gtgctggttggctttgatccagcaagcggccatgaacagcaaggtgctggtcgacctgcgcttgtgctctccgttcaagcctttaatcaactgggaatgacgctggtggcccccattacgcagggcggaaattttgcccgttatgccggatttagcgttcctttacattgcgaagaaggcgatgtgcacggcgtggtgctggtgaatcaggtgtggatgatggatctacgcgcccggctggcaaagcgtattggtctggctgcgggtgaggtggtggaagaggcgttattacgtttgcaggcggtggtggaataa

SEQ ID NO: 261354 - DNA, 252 bp, Klebsiella pneumoniae
atgcgtattaccataaaaagatgggggaacagttcaggtatggtcattcctaatgttgtgatgaaagaacttaacttacggccggggcagagcgtggaggcgcaagtgagcaacaatcaactgattctgacacccatctccaggcgctactcgcttgatgaactgctggcacagtgtgacatgaacgccacggaacttagcgagcaggatgtctggggtaaatccacccctgcgggtgacgaaatatggtaa

SEQ ID NO: 261355 - DNA, 342 bp, Klebsiella pneumoniae
atgcgaatatttgtctacggcagtttacgccacaaacaaggcaacagtcactggatgaccaatgcccagttactgggcgatttcagtatcgataactaccagttgtatagcctgggccactatccaggcgcagttccggggaacggaacagtacacggtgaagtttatcgtattgacaacgccacgctggccgaacttgatgccttgcgcatcaggggcggtgaatacgcgcgccagttgattcagacgccgtacgggagtgcatggatgtacgtttatcaacgacccgtggatggattaaagctaattgaaagcggcgactggttagacagggataagtaa

SEQ ID NO: 261356 - DNA, 3780 bp, Klebsiella pneumoniae
atgagtttatggaaaaaaatcagcctcggcgtggttatcgttatcttactgttgctgggatcggtggcgtttctggtgggcaccaccagcggcctgcatctggtatttaaagcggcggatcgctgggtgccaggactggatattggcaaagtcaccggcggctggcgcgatctcaccttgtctgacgttcgttatgagcagccaggcgtggcggtaaaagcgggcaatctgcatctggcggttgggctggattgtctttggaacagtagcgtttgtattaatgacctggcgctgaaagacattcaggtcaacatcgacagtaaaaaaatgcctccttctgaacaggttgaagaagaggaagatagcggcccgctggatctctccacgccatatcccatcaccctgacacgggtggcgctggataacgtcaacatcaagattgatgacaccacggtatcggtgatggacttcacctccggcctgaactggcaggagaaaaccctgaccctgaaaccgacgtcgctgaaaggcctgttgattgctttgccgaaagtggcggaagtggcgcaggaagaagtggtcgaaccgaagattgaaaatccgcagccggaggaaaagccgctcggcgaaacgctgaaagatctcttttctcgcccggtattgccggaaatgaccgacgtgcatttgccgcttaacctgaacattgaagagtttaagggcgagcagctgcgcgtgacgggcgacacagacatcaccgtgcgcaccatgctgctgaaagtgagcagtatcgacggcaataccaaactggacgcgctggatatcgactccaaccaggggattgtcaacgccagcggcacggcgcagctatcagacaactggccggtggatatcaccctcaacagcacactgaacgtggagccgttgaaaggtgaaaaggtgaagctgaaagtgggcggcgcgctgcgcgaacagctggagataggcgttaacctttctggtccggtggatatggatttacgcgcccagacgcgactggcggaagccggattgccgctcaacgtggaagtgaacagcaaacagctttactggccgttcactggagagaagcagtatcaggcggatgatctgaaactgaaacttaccggcaaaatgaccgattacacgctctctatgcgcacggcagtgaagggacaggagatcccgccagccaccattacccttgatgccaaaggtaatgaacagcaggtcaatctcgacaaactcaccgtcgcggcgctggaagggaaaactgaactcaaagcgttgctcgactggcagcaggccattagttggcgcggtgagctaacgcttaacggcattaacaccgccaaagagttcccggagtggccgtcgaaactcaatggcttgattaaaacccgcggtagcctgtacggcggcacctggcagatggaggtgccagaactgaagctgaccggtaacgtcaaacagaacaaagtgaacgttgacggcacgctgaaaggcaacagttatatgcagtggaagatcccagggctgcatctggaactggggccaaacagtgccgaagtgaaaggcgagctgggggtaaaagatctcaatcttgatgccaccatcaacgcgccggggctggataacgcgctgccggggcttggcggtacagcgaaagggctggtgaaagtacgcggcacggtggaagcgccacaactactggcagatatcaccgcgcgcggcctgcgctggcaggaactttccgtggcgcaggttcgcgtggaaggcgatatcaaatccaccgatcagattgcgggtaaacttgacgtacgcgttgagcaaatctcgcagccggatgtaaatatcaacctcgtcactctgaatgccaaaggtagcgaaaaacagcacgagctacagttgcggattcagggcgaaccggtttccggacagcttaatctggcaggaagttttgatcgcaaagaagaacgctggaagggaacacttagcaatacccgcttccagacgccggtcggcccgtggtcgctgacccgcgatattgcgctggattatcgcaacaaggagcaaaaaatcagcatcgggccacactgctggcttaacccgaatgcggaactgtgcgtgccgcaaaccattgatgccggggctgaagggcgtgcggtggtgaatctcaaccgcttcgacctggcgatgctgaaaccgtttatgccagaaaccactcaggccagcggtatcttcacgggtaaagcggatgtcgcctgggacaccacgaaagaggggctgccgcagggcagtatcaccctttcggggcgtaacgtgcaggtaacgcaaatcgtcaacgatgcggcgctgcccgtggcgtttcagacgctgaatctgacggcggagttgcgtaacaaccgtgccgaattgggctggaccatccgcctgaccaataacggccagtttgatggacaggtgcaggtgaccgatccgcaaggccgccgtaatcttggtggcaacgtcaatatccgtaacttcaaccttgcgatgataaaccctatctttacccgtggggaaaaagctgcggggatggtgagtgccaacttacgtctgggtggtgatgtgcaaagcccccagttgtttgggcagatacaggttacgggtgtggatatcgacggcaactttatgccgtttgatatgcagccgagccagcttgcggtcaactttaacggtatgcgctcgacgcttgccggtaccgtgcggacccagcagggtgagatctacctgaacggcgacgccgactggagccagattgaaaactggcgggcgcgggtaacagcgaagggcagtaaagtgcggatcaccgtgccgccgatggtacgaatggatgtatcgccagatgttgtattcgaggctacaccaaacctgtttaccctcgatggtcgcgtggatgtcccgtgggcgcgcatcgtggtgcacgatctgccggaaagtgcggtgggcgtctccagcgatgtggtgatgcttaacgataacctgcaaccggaagaggcaaaaacggcgtcgattccgattaacagcaacctgattgtccacgtcggcaacaatgtgcgcattgacgcctttggcctgaaagcgcggctgacgggcgatcttaacgtcgtacaggataaacaagggctgggcctgaacgggcagatcaacatccctgaagggcgtttccatgcctatggtcaggatctgattgtgcgtaagggtgagttactgttctctggtccgccggatcaaccgtatcttaatatcgaagctattcgtaacccggatgctacagaagacgacgtaatcgccggagttcgcgtcactggtctggcggacgaaccgaaagcggagatcttctctgacccggccatgtcgcaacaagctgcattgtcttatttgctacgtggacaagggctggagagcgatcagagcgacagtgcggcgatgacctcaatgctgattggtctgggggttgcacaaagtggtcagattgtgggtaaaatcggcgagacgtttggcgtaagcaatttagcgctcgacacccagggagtaggcgactcctcccaggtggtggtcagcggctatgtattgccaggtctgcaagtgaaatacggcgtgggtatatttgactctatagcaacactcacgttacgttatcgcctgatgcctaagctatatctggaagccgtgtctggtgtagaccaggcactggatttgctctatcagttcgagttttag

SEQ ID NO: 261357 - DNA, 1734 bp, Klebsiella pneumoniae
gtgcgctatatccgacagttatgctgtgtaagcttactctgcttaagcggagctgccgtcgccgcgaacgtccgtctacaggtcgaggggttatcgggacagctggaaaagaacgttcgtgcgcagctttctacgattgaaagtgatgaagtgacgccagaccgtcgctttcgcgcacgcgtcgatgatgccatccgcgaaggtctgaaagcgctgggttattaccagccgaccattgaatttgatctccgtccaccgccaaagaaagggcggcaggtattgatcgccaaagtcacgccaggcgtgccggtgttaattggcggcaccgatgtggtattgcgcggcggcgcgcggaccgataaagactatttgaaattgctcgatactcgcccggctattggtacggtactgaaccagggcgattatgaaaatttcaaaaagtccttaaccagcattgcgttgcgtaaaggttatttcgatagcgaatttaccaaagcgcagctgggcattgcgctcggcctgcataaagccttctgggatattgattataacagtggcgaacgttaccgctttgggcatgtgacctttgaaggatcacaaatccgcgatgaatacctgcaaaatctggtgccgtttaaagagggcgatgagtacgaatcgaaagatctggcggaactgaaccgtcgactttctgctaccggctggtttaattcggtggtggtggcaccacaatttgataaagcgcgcgaaacgaaagtattaccattgacgggcgtggtttcgccgcgaactgaaaacaccatcgaaaccggggtcggttactctacggacgtagggccacgtgttaaggcaacgtggaaaaaaccatggatgaactcgtacggtcatagcctgaccaccagtaccagtatttccgcgccggaacagaccctcgacttcagctataaaatgccactgctgaagaatccactggaacaatattatttggtgcagggcggttttaagcgcactgacctgaacgataccgagtctgactccactacgctggtggcttctcgctactgggatctttccagcggctggcagcgtgccattaacctgcgctggagtctcgaccactttacccaaggtgaaattaccaacaccacgatgctgttttatcctggggtgatgattagccgcacgcgttctcgcggtggcctgatgccaacctggggcgactcgcaacgctactctatcgactactccaacacggcctggggctcagatgtcgatttctccgttttccaggcgcagaacgtctggatccgcacactgtacgatcgccatcgttttgttacacgtggcacgctgggctggattgaaaccggtgatttcgacaaagtaccgccggatctgcgtttcttcgccgggggcgatcgcagtattcgcggctacaaatacaaatcaatcgctccgaaatacgccaacggtgacctgaaaggggcctcgaagttgataaccggatcgctggagtaccagtacaacgtgaccggaaaatggtggggcgcggtgtttgtcgatagcggcgaagcggtaagcgatattcgccgcagcgactttaaaaccggtaccggggtcggcgtgcgctgggaatcgccggtcgggccaatcaaactcgattttgccgtaccggtcgcggataaagacgaacacgggttacagttttacatcggtctggggccagaattatga

SEQ ID NO: 261358 - DNA, 639 bp, Klebsiella pneumoniae
atgagtttatttgataaaaagcatctggtttcccccgccgatgccctgcctggacgtaacaccccgatgcccgtagccacactgcatgcggtcaacggtcactcaatgaccaatgtacctgacggaatggagattgccatttttgcgatgggttgtttctggggtgtggagcgtctgttctggcagttacccggcgtttacagcaccgccgcaggctataccggcggctatacgccaaatccgacttatcgggaagtgtgctccggtgatacgggtcatgccgaagcggtacgcattgtttacgatccttccgtcatcagctatgaacagttgctacaagtattttgggagaatcacgatcccgcccagggaatgcgtcagggcaatgaccacggcacgcagtatcgttcagcgatttatccactgaccccagaacaggatgctgctgctcgcgccagtctggaacgttttcaggcggcgatgcttgccgccgatgacgatcgtcacatcaccacggaaatcgcgaacgccacaccgttttattatgccgaagatgaccaccagcaatatctgcataaaaacccgtatggttactgtggaattggcggaattggcgtctgtctgccgccggaagcatag

SEQ ID NO: 261359 - DNA, 1344 bp, Klebsiella pneumoniae
atgttaaacagtattttagtcatactctgcttgatcgctgtaagtgcgttcttctcgatgtccgagatctcgcttgccgcttcacgcaaaatcaaacttaaactgctggctgatgaaggcaatataaatgcccaacgcgttctgaatatgcaggaaaatcccggcatgttctttaccgtggtccaaatcggtctgaacgcagtggcgattctcggcggtatcgtcggtgatgcggcattttctccagcttttcacagcctgttctcccgctatatgtcggcagaactctctgagcaactgagctttattctctctttctcgttagtgactggcatgtttatcctgtttgcggatttaaccccgaaacgcatcggtatgattgcgccagaagctgtggctttgcgtatcatcaacccgatgcgcttctgcctgtacgtttgcaccccgctggtgtggttcttcaacggactggcgaacatgatcttccgtattttcaaactgccaatggtacgtaaagatgacatcacttctgatgacatctacgcggtagtggaagctggtgcgctggcgggcgtgttacgtaaacaggaacacgagctgattgaaaacgtctttgagctggaatcccgtaccgttccgtcgtcaatgacaccgcgtgaaaacgtgatttggtttgatctccacgaagatgagcaaagtctgaagaataaggtggcggaacatccgcactctaagttcctcgtctgtaatgaagatattgaccacatcatcggctatgtcgattctaaagacctgctgaaccgcgtgctggctaaccaaagcctggcactgaacagcggcgtacaaatccgcaacacgctgattgtgccggatacgttaaccctttcagaggcgttggaaagttttaaaaccgcaggtgaagacttcgcggtgatcatgaacgagtacgcgctggtagtggggatcatcaccctcaacgacgtgatgaccacgctgatgggcgatctggtcggtcaggggctggaagagcagattgtcgcccgtgatgagaactcatggctgattgacggcggcactccgattgacgacgtcatgcgcgtgctggatattgacgagttcccgcagtcgggcaactacgaaaccatcggcggctttatgatgtttatgctgcgtaagatcccgaaacgcaccgattcggtgaaattcgccggctacaaatttgaagtggtggatatcgataactaccgcatcgaccagctgctggtgacccgaatcgacagcaaggccaccgccctttcgccaaaactgcctgacgctaaagataaagaagaaagcgtcgcgtaa

SEQ ID NO: 261360 - DNA, 207 bp, Klebsiella pneumoniae; identical to SEQ ID NO: 1927

SEQ ID NO: 261361 - DNA, 555 bp, Klebsiella pneumoniae
atgaccctacgcaagattctggcactcacctgcctgctgttgccgatgatggcttccgcacatcagttcgaaaccggtcagcgagtgccgccgattggcattaccgatcggggcgagttggtgcttgataaagatcagtttagctacaaaacctggaacagcgcgcagttagtgggaaaagtgcgagtactgcaacatattgctggtcgcacctctgcaaaagagaaaaacgcgacgctgattgaagcgattaaatcagcaaagttaccgcacgatcgttaccagaccaccaccattgttaacaccgacgacgcaattccgggttccggcatgtttgtgcgcagcagtctggagagtaataaaaagctttatccctggtcgcagtttattgtcgatagcaatggcgtcgcgcgcggtgcctggcagctggatgaagaaagttccgctgtagtggtgctggataaagacggtcgcgtgcaatgggccaaagacggggcgctcacaccggaagaggtacagcaagtgatgggcctgctgcaaaagttgctcaaataa

SEQ ID NO: 261362 - DNA, 912 bp, Klebsiella pneumoniae; identical to SEQ ID NO: 9655

SEQ ID NO: 261363 - DNA, 438 bp, Klebsiella pneumoniae
atgcttggttactggtttgatttggatgcgaatatgaacttcgaagaacggctgttaagagctcttgatgaggctggtatatctcaatctgagttaggccggcgagtgggtgtaaactctcagacagtcagtaactggtgcaatacaggtaacttcccgcgaaaggaaaagttagagttattcccgcaagcacttggaaaaccactgtattggttctttatgacggatgaagaagagtcttcattacaggctgtcacagccagcaaaacagtactaaatcagaagcaattagagttattagaagtatttgatcaacttcctgaagtggagcaggacagatttattgaactagcgagaacgcgactggaagagttagatcggtttatggctgagttcctgagtaagcgaaaaatcccccctccattcgaaaaagactaa

SEQ ID NO: 261364 - DNA, 153 bp, Klebsiella pneumoniae
atgcctatgagcacgcggtttcatgtcaaaaataaacagctgaacgaccgctcctggcactcagcggacatctcagctttgcctcaccccggaataattaaacttagctttgacatcccgtaccagctgctgttgattctatttaaggtataa

SEQ ID NO: 261365 - DNA, 159 bp, Klebsiella pneumoniae
atgtcaatcaaatgcacagtaacaacccgcgaaatctattttaatgagccgcgcgggcgaattgggatagcaaagtatctgaaaaggaaagccccgcgagatggcgaggcaactcgcgcattaagtaggtactattcggcggttatgttaggttgctga

SEQ ID NO: 261366 - DNA, 681 bp, Klebsiella pneumoniae
atggaaaagctctgggtttttactcaattagttacaggaaaagatgatacctcaggatttttggcttacgcgctctataagcacgacaaaaatgaatacgcagagaagctgcgtaggagcggcgaatgcacagaagactatattaacacccagctgaagatctttcatgagcagacagttaatacgcctggccgaatcgagtcttacaaagagaaagctgaagccatcgtcactaacttaacagaccagattgatgctgacatcaggcttgagtacgatgcacagttagccggtgctaacttacaagatgttgaaatagaacggctgaaagcagaaatacagacaatgaaggcatcacgtgagagcgaattaaggaaggctggagaggatgctatcctcaattttcaccgcatggttgaaataacccaagcacgcaaacgtgggcgtgtttcccgctcgttaggatggtactggaatgggtttgccagcattttcgccaccataaccttcgctgtcattgtctatggcatttgtacttgggcattgccacaaaaatctagaaacgacattgtggatggagcgtttaaaaatctgcaaggttcattattccagcagccaaacattcagcttaataacgaaaaaaatgagaacgctcagcaacctaacataaccgccgaatag

SEQ ID NO: 261367 - DNA, 1254 bp, Klebsiella pneumoniae
gtgagccgtactacaactgttgatggcgctccggcaagcgacactgacaagcaaagcatttctcagccaaatcaatttattaaacgcggtacgccgcaatttatgcgtgtcaccctggcgcttttctctgccggactggcaaccttcgcacttctctattgtgtgcaacctatccttccggtgctttcgcaggagtttggcttaacgcctgctaacagtagtatttcactgtccatttcaacggcgatgttggctatcggtttgctgtttactggcccgctatccgatgccattggtcgcaaaccagtgatggtcacggcgctactgttggcctccatttgtacgttactttcgacaatgatgaccagctggcacggcattttgattatgcgcgccttgattgggctttcgttaagtggcgtggcagctgttggcatgacttatcttagcgaggaaatccaccccagtttcgtggccttttcgatggggttgtatatcagcggcaactcaattggcggtatgagcggacgcttaattagcggtgtcttcacggactttttcaactggcgaattgctctggcggcaatcggttgtttcgcgctggcctcggcgttaatgttctggaaaatcctccctgaatcacgccattttcgcccgacttcgctgcgacctaagacgttgtttatcaactttcgtctgcactggcgtgaccggggattaccgttattgttcgcagaaggctttttgctgatggggtcgttcgtcacgctgtttaattacatcggctatcggttgatgctctctccctggcatgtcagccaggccgtggttggcttattatcgctggcttatttgaccggtacatggagctcacccaaagccggaaccatgaccacccgctatgggcgcggtccggtgatgttgttttcgacgggggttatgctgtttggtttactgatgaccttatttagctcgctgtggctgatctttgccggaatgttactcttctcagccggattcttcgcagcccactcagtagccagcagctggatcggcccccgcgcaaaacgcgctaaaggccaggcctcctcgctgtatctgttcagttactatctggggtcgagtattgccgggacgctgggtggtgttttctggcataactatggctggaacggcgtcggcgcatttattgctctgatgctggtcattgctctgctggtcgggacgcgtttgcatcgtcgtctgcacgcctga

SEQ ID NO: 261368 - DNA, 309 bp, Klebsiella pneumoniae
atgaaaaaagtattagctctggttgttgccgctgctatgggtctgtcttctgccgcctttgctgcagagactgcgaccacacctgctccgactgcgacgaccaccaaagcagcgcctgcgaaaaccacacatcataaaaaacagcataaagcagcacctgcccagaaagcgcaggcggctaaaaagcatcataaaaatgccaaagctgaacagaaagctcctgaacaaaaagcgcaggcagcgaagaaacacgccaagaaacacagccatcagcaaccggcaaaacctgctgcacaacccgcagcgtaa

SEQ ID NO: 261369 - DNA, 822 bp, Klebsiella pneumoniae
atgcgtacaaccattgctgtagtgttgggtgcaattagtttgacgtctgcttttgtgtttgcagataaaccagacgttgccaaatcggcaaacgatgaggtcagcaccctgttttttggtcatgatgatcgtgtgccagtgaatgacacgacccaatcaccgtgggatgcggttggccaactggaaacggccagcggcaatttatgtacggcgacgctgattgcacccaatctggcattaacggcaggacactgtttattgacgccgccaaagggtaaagccgataaagcggtagcgctgcgtttcgtgtcaaataaaggtctttggcgctatgagatccacgacatagaaggccgcgttgatccgacactgggaaagcggttaaaagcagatggggatggttggattgttcctcccgcagctgcgccgtgggacttcggtttgattgtgctacgtaatccgccttctggcattacaccattgccgttatttgagggagataaagccgcgcttaccgccgcattaaaagcggcaggtcgtaaagtgactcaggcgggataccctgaagatcatctcgatacgttgtacagtcatcaaaactgtgaagtgactggctgggcgcaaacgtcggtgatgtcgcatcagtgcgataccttgccgggtgacagcggttcgcctctgatgttgcataccgatgacggctggcaattaattggggtgcaaagttcggctcctgccgcgaaagatcgctggcgcgccgataaccgggccatttctgttaccggttttcgcgacaggctggatcaactgtcgcaaaaataa

SEQ ID NO: 261370 - DNA, 330 bp, Klebsiella pneumoniae
atggcgcagtttgaatgggttcacgccgcctggctggcattggcaatcgtgctggaaatcgttgctaacgtctttttgaaattttctgacggctttcgtcgcaaaatatttggcttgctctccctggcggcggtgctggctgcctttagtgcgctttctcaggccgttaaagggatcgacttgtctgtcgcttatgcattgtggggcgggtttggtattgccgccacgttagccgcaggttggatcttgtttggtcaacggttaaatcgtaaaggctggattggcctggtcttgctgttggctggaatgatcatggtgaaacttgcctga

SEQ ID NO: 261371 - DNA, 366 bp, Klebsiella pneumoniae
atgtatatttattggattttattaggtctggctattgctacagaaattaccggtacgctgtctatgaaatgggcgagcgtcagtgagggaaatggcggctttattttaatgctggtgatgatttctctgtcgtatatatttctctctttcgccgttaaaaagatcgccttaggcgtggcttatgcgctgtgggaaggtatcggtattttatttattaccttgtttagtgttttgttattcgacgaaagtttatcgctgatgaaaattgccgggttaaccaccctggtggccgggattgtattgatcaaatcaggtacccgtaaagcgcgtaaacctgaactggaggtgaaccatggcgcagtttga

SEQ ID NO: 261372 - DNA, 1035 bp, Klebsiella pneumoniae
atggcaaagccgatcatcacgctcaatggcctaaaaatcgtcattatgttgggaatgctggtcattattctctgcggtatccgttttgccgccgagatcatcgtgccgtttattctcgcattatttattgctgttattcttaacccgctggtgcaacacatggtccgctggcgagtgccgcgtgtactggcggtgtcgattttgatgaccatcatcgtgatggcgatggtgttgctgttagcttatctgggttccgcactcaacgagttgacgcggacgttaccgcaatatcgcaactctattatgacgccgctgcaagcgattgaaccgttgttgcaacgcgtagggattgatgtctcagttgaccaactggcgcattacattgatccgaacgcggcgatgacgttgctcaccaacttattgacgcagttatctaatgccatgtcatcaatatttttattgctgctgacggtgctgtttatgctgctcgaagtgccacaattgcccggaaaatttcagcaaatgatggcgcgtccggttgaagggatggcggcgattcaacgtgcgattgacagtgtttctcattatctggtgctgaaaacagccatcagcatcatcaccggcctggtcgcctgggcgatgctcgccgcactcgatgttcgcttcgcttttgtctggggattgctggcctttgcgcttaattacatccctaatattggttcagttctcgcggcaattccccctatcgctcaggtactggtgtttaatggcttctacgaagcgttgctggtgctggcgggatatctgctgattaatctggtcttcggcaatattctggagccacgcatcatggggcgtgggctggggctttccacattggtggtatttttgtcgttgattttttggggatggttgttaggaccggtgggtatgctgctttccgtgccgttgacaattattgtcaaaattgcgcttgaacaaacagcgggaggtcaaagcatcgccgttctgttaagcgatctcaataaagagtga

SEQ ID NO: 261373 - DNA, 471 bp, Klebsiella pneumoniae
  misc_feature (439)..(448): n is a, c, g, or t
atgtctggaggattagttacagctgcatacattgttgccgcgatcctgtttatcttcagtctggccgggctttcgaaacatgaaacgtctcgccagggtaacaacttcggtatcgccgggatggcgattgcgttaatcgcaaccatttttggaccggatacgggtaatgttggctggatcttgctggcgatggtcattggtggggcaattggtatccggctggcgaagaaagttgaaatgaccgaaatgccagaactggtggcgatcctgcatagcttcgtgggtctggcggcagtgctggttggctttaacagctatctgcatcatgacgcgggaatggcaccgattctggtcaatattcacctgacggaagtgttcctcggtatcttcatcggggcggtaacgttcacggggtcggtggtggcgttcggcaaactgnnnnnnnnnnctgtgtggcaagatttcgtctaa

SEQ ID NO: 261374 - DNA, 945 bp, Klebsiella pneumoniae
atgaagcttaagaacaccctcctggcgtcggcactgctttctgctacggcattctccgttaacgcagcaacagaactgacaccggagcaagcggcagcggttaaaccttttgaccgtgtagtggttaccggtcgttttaatgctattggcgaagcggtgaaagccgtttctcgtcgcgcagataaagaaggtgccgcctctttttatgttgtcgacacttctgattttggtaacagcggtaactggcgtgtggtcgctgacctctataaagccgatgctgaaaaagcagaagaaacaagtaatcgcgtaattaacggtgttgtcgaactgccgaaagatcaggctgttctgattgaaccgtttgacacggtcaccgtccagggcttctatcgtagccagccagaagtcaatgatgccatcaccaaagcggcaaaagcgaaaggtgcctactctttctacatcgttcgtcaaatcgatgccaaccagggcggcaaccagcgtattactgcattcatctataaaaaagatgcgaagaaacgtatcgtccagagcccggatgtgatcccggcagattccgaagcaggacgtgcagctctggctgccggtggcgaagctgcgaagaaagttgagatcccgggtgttgcgactaccgcatcaccaagttctgaagtcggtcgcttctttgaaacccagtcatcaaaaggcgggcgttacaccgtcacgctcccggatggcactaaagtcgaagaactgaacaaagcgaccgcagcgatgatggtcccgttcgacagcatcaaattctctggcaactacggcaacatgaccgaagtctcctatcaggttgcgaaacgtgccgcgaagaaaggtgctaagtattaccacatcacccgccagtggcaggaacgtggtaataacctgaccgtcagcgcagatctgtataaataa

SEQ ID NO: 261375 - DNA, 1383 bp, Klebsiella pneumoniae
atggaaaagaaactgggactgagcgcactcaccgcgctggtattaagctcaatgctgggcgcgggtgttttcagtctgccgcaaaatatggcggcagttgccagcccggcagcactgctcatcggctggggtattactggcgctggcattttattgctggcctttgccatgctgatcctcacgcgcattcgtcccgaacttgacggcggtatctttacctatgcccgcgaagggtttggcgagctaatcggcttttgttccgcatggggatactggctgtgcgcagtcatcgccaacgtctcctatctggtgatcgttttttccgcgttaagcttttttacggacacgccggaattgcgcctgtttggtgatggtaatacctggcaatcgatcgtcggtgcatcggcgttattgtggattgttcactttttgatcctgcgcggagtgcaaaccgctgccagcattaacctggtggcgacactggcaaagttgttgccgctgggtctgtttgttgtgctggcgatgatgatgttcaaactggataccttcaagctcgacttcaccggacttgcacttggcgtacccgtgtgggaacaggtgaaaaacaccatgctgatcaccctgtgggttttcattggtgttgaaggtgccgtggttgtttctgcgcgtgcgcgtaataaacgtgatgttggcaaagcgacactgctggcggttctctccgctctgggcgtttatttgctggtaacgctgctttcgctgggcgtggtggcacgtcctgaactggctgaaattcgtaacccgtcaatggccggtctgatggtggaaatgatgggaccgtggggcgaaatcatcatcgctgccggtttgatcgtttccgtttgcggcgcgtacttaagctggaccatcatggcggcagaagttccgttcctggctgccactcataaagcattcccacgcatttttgcgcgccagaacgcacaagccgcgccatccgcctcactgtggttgaccaacatctgcgtgcaaatttgtctggtgctcatctggctgaccggttccgattacaacacgttgctgaccatcgcctcagaaatgattctggtgccctatttcctggtcggcgcgttcttgctgaaaatcgcaacccgtccactgcataaagcggtaggtgtcggtgcctgcatttatggcttatggttattgtacgcctctggtccaatgcacttgctgttatccgttgttctgtatgcgccggggctgctggttttcctgtatgcgcgtaaaacgcatacacatgataacgtactgaaccgtcaggaaatggtgctaattggcatgctgttaattgcctcagttccggcgacctggatgctggtgggataa

SEQ ID NO: 261376 - DNA, 723 bp, Klebsiella pneumoniae
atgggtaaagcccagcccttgccaatattaattactggcggaggtcgtcgcatcggcctcgcactcgcctggcatttcattaatcaaaagcaaccggtgattgtcagctatcggacgcactatccagccattgatggactgattaaggcaggtgcgcagtgtattcaggctgatttttcgaccaacgacggtgtgatggcgtttgccgatgaagtactaaaaagcacccatggcctgcgtgctattttgcataacgccagcgcgtggatggcggaaaaaccgggagcgccactgaccgacgtactggcttgcatgatgcagatccacgttaataccccatatctactcaaccatgccctggaaagattactgcgtgggcacggacacgccgccagcgatatcattcactttaccgattatgtggtggagcgcggtagcgacaaacatattgcctatgctgcaagcaaagcggcactggataatatgacccgttcgtttgcccgcaagctggcaccggaagtgaaagtgaattctattgcgccatcgctgatcctgtttaatgaacatgatgatgccgaatatcgacaacaggcgctgaataaatcactgatgaaaaccgcgcctggcgagaaagaagtgatcgacctggtcgattacttacttaccagctgctttgtcaccggacgcagtttccctcttgatggcggtcgtcatctgcgttaa

SEQ ID NO: 261377 - DNA, 336 bp, Klebsiella pneumoniae
atggggctggtaatcaaagccgcgctcggtgcgctggtagtgctgttgattggtgttttagcaaaaacgaaaaattattatatcgccgggctgatcccacttttcccgacctttgcgctcatcgcgcattatattgttgccagcgaacgcggcattgaagccttacgcgcaaccatcatttttagcatgtggtcgattattccctattttgtttacctggcgtcgctgtggtatttcaccggaatgatgcgcttgcccgccgcttttgttggttctgttgcatgctgggggataagcgcatgggtgttgattatatgctggattaagctgcattaa

SEQ ID NO: 261378 - DNA, 720 bp, Klebsiella pneumoniae
atgaacactatcgtatttgtggaagatgatgcggaagtcggttcactgattgccgcgtacctggcaaaacatgatatgcaggttaccgtagagccgcgcggcgaccatgccgaagaaaccattttgcgagaaaatccggatttggtgttactcgacatcatgctaccaggcaaggacggcatgaccatttgtcgtgatttacgcgcaaagtggtccggaccaattgttcttctaacctctctcgatagcgatatgaaccacatcctggcactggaaatgggagcctgcgactatattctcaaaacgacgccccctgctgttttgttagcgcgtttacgtttgcatttgcgtcagaatgagcaagccacgctgaccaaaggtcttcaggaaacgtcactgactccctacaaagccctgcatttcggcacgttgaccatcgatcctatcaaccgcgtagtcaccctggctaacactgaaatctcgctctcgacagctgatttcgaattattgtgggaattagctacccatgccgggcaaatcatggaccgcgatgcattgctgaaaaatttacgcggcgtcagttatgacggcctggatcgtagcgtggacgtggctatttcgcggttaagaaaaaaactgctcgataacgccgcagaaccttatcgcattaaaactgtgcgtaacaaaggctatctttttgcgcctcatgcatgggaataa

SEQ ID NO: 261379 - DNA, 1302 bp, Klebsiella pneumoniae
atgaaaaaactgtttatccagttttacctgttattgtttgtctgcttccttgtgatgtctctgctggttgggctggtgtacaaatttaccgccgaacgcgcgggcaaacagtcgctggatgatttgatgaacagttcgctgtatctgatgcgcagcgaattgcgtgagatccccccacacgattggggtaagacgctgaaggagatggatttaaatctctctttcgatctgcgagtcgagccactgagtaaataccatcttgatgatatttccatgcaccggctgcgtggcggcgaaattgtcgccctggacgatcagtacacgtttttgcaacgtatcccgcgcagccactacgtgctggcagttggtcctgttccttatctttattacctccatcagatgcgattgctggatatcgccctgatcgcttttattgccatttccctcgcctttccggtgtttatctggatgcgtccgcactggcaggatatgttaaaactggaagcagcggcgcaacgatttggcgatgggcatctcaatgaacgtatccactttgatgagggttcgagctttgaacgccttggcgtcgcatttaaccagatggcggacaatatcaacgccttgatagccagcaaaaaacagcttattgacggagtcgctcacgaactgcgaacgccgttagtgcgcttgcgttatcgactggagatgagtgataacctgagcgccgccgaatcccaggcattgaatcgtgatatcagtcaacttgaagctttaattgaagagttgctaacttatgcccgactcgatcgcccacaaaatgagcttcatcttagcgaaccagacctgccgttatggctgtcaacgcatctggcagatattcaggcagtaacgcccgataaaatggtacggataaaaacgctcatgcaaggccattatgcggcgttggatatgcgcttaatggagcgcgtgctggataatttgctcaataacgccctgcgctactgtcactcaacggttgaaaccagcctgctactgtcggggaatagagcgacattaattgttgaggatgatggcccagggattgcccctgaaaaccgcgaacatatctttgaaccttttgttcgcctcgatcccagccgggatcgctcaaccggcggctgcgggctggggttggcgattgtccactctatagcactagcaatgggcggtacggttaattgtgacaccagcgaactgggtggtgcccgcttctcgtttagttggccgttatggcataacatcccgcaatttacctctgcctga

SEQ ID NO: 261380 - DNA, 1002 bp, Klebsiella pneumoniae
atgcgcacggtggtcaggctgtcgatactgtgctataaaataaagtatgttgtaactaaagtggttaatattatggcgcgttacgatctcgtagaccgactcaacactacctttcgccagatggaacaagaactggctgcatttgccgctgagctagaacagcacaaattgctggttgcccgcgtgttctctttgccggaggtaaaaaaagaggatgagcataatccgcttaatcgtattgaggtaaagcaacatctcggcaacgacgcgcagtcgctggcgttacgtcatttccgccatttatttattcaacaacagtccgaaaatcgcagcagcaaggccgctgttcgtctacctggcgtattgtgttaccaggtcgataacctttcgcaagcagcgttggtcagtcatattcagcgcatcaatcaactcaagactacgttcgagcgtatcgtcacggttgagtcagaactccccacagcggcgcgttttgaatgggtgcatcgtcatttgccggggctgatcacccttaatgcttaccgaacgctcactgttctgcacgaccccgccactttacgttttggctgggccaataaacatatcattaagaatttgcatcgtgatgaagtcctggcacagctggaaaaaagcctgaaatcaccgcgcagtgtcgcaccgtggacgcgcgaggagtggcaaagaaaactggagagagagtatcaggatattgctaccctgccacaggacgcgaagttaaaaatcaaacgtccggtgaaggtgcagccgattgcccgcgtctggtacaagggagatcaaaaacaagtacaacacgcttgccctacaccgcttattgcgctgattaatcgggataatggcgcgggcgtgccggacgttggggagttgttaaattacgatgccgacaatgtgcaacaccgttataaaccacaggcgcagccgcttcgtttgatcattccccggctgcacctgtatgttgcagattaa

SEQ ID NO: 261381 - DNA, 1404 bp, Klebsiella pneumoniae
atgaatacagtacgcagcgaaaaagattcgatgggggcgattgatgtcccggcagataagctgtggggcgcacaaactcaacgctcgctggagcatttccgcatttcgacggagaaaatgcccacctcactgattcatgcgctggcgctaaccaagcgcgcagcggcaaaagttaatgaagatttaggcttgttgtctgaagagaaagcgagcgccattcggcaggcggcggatgaagtactggcaggacagcatgacgacgaattcccattggctatctggcagaccggctccggcacgcaaagtaacatgaacatgaacgaagtgctggctaaccgggccagtgaattactcggcggcgtgcgtgggatggagcgtaaagttcaccctaacgacgacgtgaacaaaagccaaagttctaacgatgtctttccaacggcgatgcacgttgcggcgctgctggcgctgcgcaagcaactcattccgcagcttaaaaccctgacacagacgctgagtgaaaaatcccgtgcatttgccgatatcgtaaaaatcggtcgaacccacttgcaggacgccacgccgctaacactggggcaggagatttccggctgggtagcgatgctcgagcataatctcaaacatattgaatacagcctgcctcacgtagcggaactggctatgggcggtacagctgtgggtactggactaaatacccatccggagtatgcgcgtcgcgtggcagatgaactggcagtcattacctgcgcaccgtttgttaccgcgccgaacaaatttgaagcgctggcgacctgtgatgccctggttcaggcgcacggcgcgttgaaagggttggctgcgtcactgatgaaaattgccaatgatgtccgctggctggcctctggcccgcgctgcggaattggtgaaatctcaatcccggaaaatgagccgggcagctcaatcatgccggggaaagtgaacccaacccagtgtgaggcattaaccatgctctgctgtcaggtgatggggaacgacgtggcaatcaacatggggggcgcttccggtaactttgaactgaacgtcttccgtccgatggtgatccacaatttcctgcaatcggtgcgcttgctggcagatggcatggaaagttttaacaaacactgcgcagtgggtattgaaccgaatcgtgagcgaatcaatcaattactcaatgaatcgctgatgctggtgactgcgctcaacacccacattggttatgacaaagccgccgagatcgccaaaaaagcgcataaagaagggctgaccttaaaagcggcggcccttgcgctggggtatcttagcgaaaccgagtttgacagctgggtacggccagaacagatggtcggcagtatgaaagcagggcgttaa

SEQ ID NO: 261382 - DNA, 1647 bp, Klebsiella pneumoniae
atgtcaaacaaaccctttcattatcaggctccttttccactcaaaaaagatgatactgagtattacctgctaaccagcgaacacgttagcgtatctgaatttgaagggcaggagattttgaaagtcgcacccgaagcgttaactttgttggcgcgtcaggcgtttcatgatgcgtcatttatgctgcgtccggctcaccaacaacaggtggccgacattctgcgtgacccggaagccagcgaaaatgataaatatgtggcgctgcaattcctgcgcaactccgacatcgccgcaaaaggcgttctgccaacctgtcaggataccggcaccgcgattattgttggtaaaaaagggcagcgtgtatggaccggtggcggtgatgaagcggcgctggcacgcggtgtctataacacttatatcgaagataatctgcgctactcgcaaaacgcgccgctggatatgtataaagaggtgaataccggcaccaatctaccagcgcagatcgatctttatgccgttgatggcgacgagtacaaattcctctgtatcgccaaaggtggcggttcggcaaacaagacgtatctctatcaggaaaccaaagcgttactgacgccggggaaactgaaaaattacctggttgagaagatgcgcacgctgggtacggcggcctgtcctccgtatcatattgcgttcgttattggtggaacttctgcagaaacgaaccttaaaacggtgaaactggcttccgctaaatactatgatgaactgccaacggaagggaatgagcacggacaggcgttccgcgatgtggaactggaaaaagaattgctgatcgaagcgcaaaatcttggtctgggtgcgcagtttggcggtaaatacttcgctcacgacatccgcgtgattcgcctgccacgtcacggcgcatcctgcccggtcggtatgggcgtctcctgttctgctgaccgtaatatcaaagcaaagatcaaccgtcaggggatttggatcgaaaaactggaacataatccaggcaaatatatcccggaagagctgcgcaaagcgggagaaggcgaagcggtgcgcgttgaccttaaccgtccgatgaaagagatcctcgcacagttgtcgcagtatcccgtttctacacgcttatcgctgaatggcacgattatcgttggtcgtgatattgctcacgccaaactgaaagagcggatggataacggcgaagggctgccgcagtatattaaagatcatccgatttactacgcgggtccggccaaaacgccggaaggttatgcctccggttctcttggcccaacgaccgccggacggatggattcttatgtcgatcaactgcaagcgcagggcggaagtatgatcatgctggcgaaaggcaaccgcagccagcaggtgacggatgcctgtaaaaaacacggcggtttctacctcggtagtatcggtggtccggcagctgtattggcgcagggaagtattaagagcctggaatgtgttgaatatccggaactgggaatggaagccatctggaaaattgaagtggaagatttcccggcatttatccttgtggatgataaaggaaatgacttcttccagcagatacaactcacacagtgcacccgctgtgtgaaataa

SEQ ID NO: 261383 - DNA, 1176 bp, Klebsiella pneumoniae
atgcaaaaactcattaactcagtgcaaaactatgcctggggcagcaaaacggcgttgactgaactttatggtatggaaaatccgtccagccagccgatggccgagctgtggatgggcgcacatccgaaaagcagttcacgagtgcagaatgccgccggagatatcgtttcactgcgtgatgtgattgagagtgataaatcgactctgctcggagaggccgttgccaaacgctttggcgaactgcctttcctgttcaaagtattatgcgcagcacagccgctctccattcaggttcatccaaacaaacgcaattctgaaatcggttttgccaaagaaaatgccgcaggtattccgttggatgccgccgagcgtaactataaagatcctaaccacaagccggagctggtttttgcgctgacgcctttccttgcgatgaacgcgtttcgtgagttttccgagattgtctccctgctccagccggtcgcaggtgcacatccggcgattgctcactttttacaacagcctgatgccgaacgtttaagcgaactgttcgccagcctgttgaatatgcagggtgaagaaaaatcccgcgcgctggcgattttaaaatcggcccttgacagccagcagggtgaaccgtggcaaacaattcgtttaatttctgaattttacccggatgacagcggtctgttctccccgctgttgctgaatgtggtgaaattgaatcctggcgaagcgatgttcctgttcgctgaaacaccgcacgcttacctgcaaggcgtggcgctggaagtgatggcgaactccgataacgtgctgcgtgcgggtctgacgcctaaatacattgatattccggaactggttgccaatgtgaagttcgaagccaaaccggctaaccagttgttgacccagccggtgaaacaaggtgcagaactggacttcccgattcctgtggatgattttgccttctcgctgcatgaccttagtgataaagaaaccaccatcagccagcagagtgccgccattttgttctgcgtcgaaggcgatgcaacgctgtggaaaggttctcagcagttacagcttaaaccgggtgaatcagcgtttattgccgccaacgaatcaccggtgactgtcaaaggccacggccgtttagcgcgtgtttacaacaagctgtaa

SEQ ID NO: 261384 - DNA, 1509 bp, Klebsiella pneumoniae
atgaataaatcgctggtagcggtaggcgtcattgttgcgctaggcgtagtctggacaggcggcgcatggtatacaggcaagaagattgaaacccatctcgaagacatggtcgcgcaggcgaacgcgcaactcaaactgaccgctcctgaatccaacctggaagtgagttatcaaaactatcatcgcggcgtattcagcagtcagctgcaactattggtgaaacccattgccgggaaagaaaatccgtggattaaaagcggtcagagcgtcatcttcaacgaatcagttgatcatggtcccttcccccttgcccagctaaaaaaactgaacctgatcccgtcgatggcatcaattcaaaccacgctggttaataacgaagttagcaagccactgtttgatatggcaaaaggtgaaacgccttttgagattaactcccgcattggttacagaggtgattccagttccgatatttcgctcaagccactgaattacgagcaaaaggatgaaaaagtcgcctttagcggcggcgagttccagttaaatgcagacagagacggcaaagctatctccctttccggggaggcgcaaagtggtcggatagacgcggttaacgaatacaaccagaaagtacagttgacctttaataatctgaaaaccgacggttccagcacgctggcaagttttggtgagcgcgtaggaaatcaaaaactgtcgctggaaaaaatgaccatttcagtggaaggcaaagaactggcactgctggaaggcatggagatcagcggtaaatcggatctggtcaatgacggtaaaacgatcaatagccaactggattactcgctaaacagcctgaaggtacagaatcaggatctgggcagcggcaagctgactttaaaagtcggccagattgatggtgaagcctggcatcagtttagccagcaatataacgcgcaaactcaggcgctgctggcacagccagaaattgccaacaatcccgaactttatcaggagaaagtgacggaagccttctttagcgccctgccgctgatgttgaaaggcgatccggtgattactatcgcgccgctaagctggaaaaacagtcagggtgaaagtgcgctgaatctgtcgctgttcctgaaagatccggcaacgactaaagaagcgccgcaaacgctggcgcaggaagtagaccgctcggttaaatctctggatgcgaaactgaccattccggtggatatggcaactgagtttatgactcaggtagcgaagctggaaggttatcaggaagatcaagcaaaaaaactggcgaaacagcaagttgaaggtgcgtcagcaatggggcagatgttccgcctgaccaccttgcaggacaataccatcaccaccagcctgcaatatgctaacggtcagatcacgttaaacgggcagaaaatgccactggaagattttgttgggatgtttgcaatgccggcattaaacgttccggctgtacccgctattccgcagcagtaa

SEQ ID NO: 261385 - DNA, 1266 bp, Klebsiella pneumoniae
atgagaaaaatagtggccatggccgttatttgcctgacggctgcctctggccttacctctgcttacgcggcacaactggctgacgatgaagcgggactacgcatcagactgaaaaatgaattacgcagggctgataagcccagtgctggcgcgggaagagatatttacgcatgggtacagggaggattgctcgatttcaatagtggttattattccaatattattggcgttgaaggtggggcgtattatgtttataaattaggtgctcgtgctgatatgagtacccggtggtatcttgatggtgataaaagttttggctttgccctgggagcagtaaaaataaaacccagtgaaaatagcctacttaaattaggtcgcttcgggacggattatagttatggtagcttaccttatcgtattccgttaatggctggcagttcgcaacgtacattaccgacagtttctgaaggagcattaggttattgggctttaacgccaaatattgatctgtggggaatgtggcgttcacgagtatttttatggaccgattcaacaaccggtattcgtgatgaaggggtgtataacagccagacgggaaaatacgataaacaccgcgcacgttcttttttagccgccagttggcatgatgataccagtcgctattctctgggggcatcggtacagaaagatgtatccaatcagatacaaagtattctcgagaaaagcataccgcttgacccgaattatacgttgaaaggggagttgctcggcttttacgcgcaactcgaaggtttaagtcgtaataccagccagcccaatgaaacggcgttggttagtggacaattgacctggaatgcgccgtggggaagcgtatttggcagtggtggttatttgcgccatgcaatgaatggtgccgtggtggataccgacattggctatcccttttcattaagtcttgatcgtaaccgtgaaggaatgcagtcctggcaattgggtgtcaactatcgtttaacgccgcaatttacgctgacatttgcaccgattgtgactcgcggctatgaatccagtaaacgagatgtgcggattgaaggcgcgggtatcttaggtggtatgaactatcgggtcagcgaagggccgttacaagggatgaatttctttcttgctgccgataaaggacgggaaaaacgcgatggcagtgcgctgggcgatcgcctgaattactgggatgtgaaaatgagtattcagtatgactttatgctgaagtaa

SEQ ID NO: 261386 - DNA, 1374 bp, Klebsiella pneumoniae
atgaatcaacaactctcctggcgcaccatcgtcggctacagcctcggtgacgtcgccaataacttcgccttcgcaatgggggcgctcttcctgttgagttactacaccgacgtcgctggcgtcggtgccgctgcggcgggcaccatgctgttactggtgcgggtattcgatgccttcgccgacgtctttgccggacgagtggtggacagtgtgaatacccgctggggaaaattccgcccgtttttactctttggtactgcgccgttaatgatcttcagcgtgctggtattctgggtaccgaccgactggagccatagcagcaaagtagtgtatgcatatttgacctacatgggcctcgggctttgctacagcctggtgaatattccttatggttcacttgctaccgcgatgacccaacaaccacaatcccgcgcccgtctgggcgcggctcgcgggattgccgcttcattgacctttgtctgtctggcatttctgataggaccgagcattaagaactccagtccggaagagatggtgtcggtataccatttctggacgattgtgctggcgattgccggaatggtgctttacttcatctgcttcaaatcgacgcgtgagaatgtggtacgtatcgtggcgcagccgtcattgaagatcagtctgcaaaccctgaaacggaatcgcccgctgtttatgttgtgcatcggtgcgctgtgtgtgctgatttcgaccttcgcggtcagcgcctcgtcgttgttctacgtgcgctatgtgttaaatgataccgggctgttcactgtgctggtactggtacaaaacctggtcggtactgtggcatcggcaccgctggtgccggggatggtcgcgaggatcggtaaaaagaataccttcctgattggcgctttgctgggaacctgcggttatctgctgttcttttgggtttcggtctggtcactgccggtggcgttggttgcgttggccatcgcttcaattggtcagggcgttaccatgaccgtgatgtgggcactggaagctgatactgtagaatacggtgaatacctgaccggcgtgcgaatagaagggctcacctattcactattctcatttacccgtaaatgcggtcaggcaatcggaggttcaattcctgcctttattttgggattaagcggatatattgccaatcaggtgcaaacgccggaagttattatgggcatccgcacatcaattgccttagtaccttgcggatttatgctgctggcattcgtcattatctggttttatccgctcacggataaaaaattcaaagaaatcgtggttgaaattgataatcgtaaaaaaatgcagcagcaattaatcagcgatatcactaattaa

SEQ ID NO: 261387 - DNA, 591 bp, Klebsiella pneumoniae
atgatggataacatgcagactgaagcacaaccgacacggacccggatcctcaatgctgccagagagattttttcagaaaatggatttcacagtgcctcgatgaaagccatctgtaaatcttgcgccattagtcccgggacgctctatcaccatttcatctccaaagaagccctgattcaggcgattatcttacaggaccaggagagggcgctggcccgtttccgggaaccgattgaagggattcatttcgttgactatatggtcgagtctattgtctctctcacccatgaagcctttggacaacgggcgctggtggtcgaaattatggcggaagggatgcgtaacccacaggtcgccgccatgcttaaaaataagcatatgacgatcacggaatttgttgcccagcggatgcgtgatgcccagcaaaaaggcgagataagcccagacatcaacacggcaatgacttcacgtttactgctggatctgacctacggtgtactggccgatatcgaagcggaagatctggcgcgtgaagcgtcgtttgctcagggattacgcgcgatgattggcggtatcttaaccgcatcctga

SEQ ID NO: 261388 - DNA, 768 bp, Klebsiella pneumoniae
gtgtttaattctgacaacctgagactcgacggaaaatgtgccatcatcacaggtgccggtgcaggtattggtaaagaaattgccattacattcgcgacagctggcgcatctgtggtggtcagtgatattaacgccgatgcagctaatcatgttgtagatgaaattcaacaactgggtggtcaggcatttgcctggcgctgcgatattacttccgaacaggaactctctgcactggcagactttgccgtcagtaagctgggtaaagttgatatcctggttaacaacgccggtggcggtgggcctaaaccgtttgatatgccaatggcagattttcgccgcgcttatgaactgaatgtattttcttttttccatctgtcacaacttgttgcgccagaaatggaaaaaaatggcggtggcgttattctgaccattacttctatggcggcagaaaataaaaatataaacatgacctcctatgcatcatctaaagctgcggccagtcatctggtcagaaacatggcgtttgacctgggtgaaaaaaatattcgggtgaatggcattgcgccgggggcaatattaaccgatgccctgaaatccgttattacaccagaaattgaacaaaaaatgttacagcacacgccgatcagacgtctgggccaaccgcaagatattgctaacgcggcgctgttcctttgctcgcctgcagccagctgggtaagcggacaaattctcaccgtctccggtggtggggtacaggagctcaattaa

SEQ ID NO: 261389 - DNA, 1029 bp, Klebsiella pneumoniae
atggctaccgccaaaaaaataaccattcatgatgttgcgctggctgcgggcgtgtcggtaagtaccgtttcgctggtgcttagtggcaaagggcgaatctctaccgccacaggagaacgcgttaacgccgccattgaagagctgggatttgtgcgcaatcgccaggcgtcggcgctgcgcggcgggcaaagcggcgtcattggtttgatcgtccgtgatttatctgcgccgttttacgccgaattgacggccggattgacggaagctctggaagcgcagggacggatggtgtttttgcttcacggcggtaaagacggcgagcagctggcacaacggttttcactgttactgaatcagggggtcgatggtgtggtaattgccggggctgcaggaagcagcgatgacctgcgacggatggcagaagaaaaagctatcccggtgattttcgcttcccgtgccagttatcttgatgatgttgatacggttcgcccggacaacatgcaggctgcacagttgttgacggagcatctcattcgcaatgggcatcagcggatcgcctggctgggagggcaaagttcctcattaacccgtgcagaacgggtggggggctattgtgcgactctactaaaatttggcctgccgtttcacagtgattgggtgctggagtgcacttccagccagaagcaagccgcggaagctatcacggcgcttttacgtcataacccgaccatcagtgccgtggtttgctataacgaaactattgcgatgggggcatggtttggtttgctgaaagcagggcggcaaagcggggaaagcggagtcgatcgttactttgagcaacaggtttcgctggcggcatttaccgatgcgacaccaaccacacttgatgatatacccgttacctgggccagcacgccagcgcgggaacttggtaccacacttgcggatcgcatgatgcaaaaaatcactcatgaagaggcgcattcacgcaatcttattattcccgcccggctcattgcgccgaaataa

SEQ ID NO: 261390 - DNA, 1173 bp, Klebsiella pneumoniae
atgttcgatttttcaaaggtcgtggatcgtcatggcacatggtgtacgcagtgggattatgtcgctgaccgtttcggcactgctgacctgttaccgttcacgatttcagacatggattttgccactgccccctgcattatcgaggcgctgaatcagcgcctgatgcacggcgtgtttggctacagccgctggaaaaacgatgagtttctcgcggctattgcccactggttttccacccagcattacaccgcaattgatacgcagtcggtggtgtatggcccttctgttatctatatggtttcagaactgattcgtcagtggtctgaaacaggtgaaggcgtggtgatccacacacccgcctatgacgcattttacaaggccattgaaggtaaccagcgcacagtaatgcccgtcgctttagagaagcgggctgacggctggttttgcgatatgggcaagcttgaagccgtgttggcgaaaccagaatgtaaaattatgctcctgtgtagcccacagaatcctaccgggaaagtgtggacgtgcgatgaactggagatcatggctgacctgtgcgagcgtcatggtgtgcgggttatttccgatgaaatccatatggatatggtttgggccgagcagccgcatattccctggagtaatgtggcgcgcggagactgggcattgctaacgtcgggatcgaaaagtttcaatattcccgccctgaccggtgcttacgggattatagaaaatagcagcagccgtgatgcctatttatcggcactgaaaggacgtgatggcctttcttccccttcagtactggcgttaactgcccatatcgctgcctatcagcaaggcgcgccgtggctggatgccttacgcgtctatctgaaagataacctgacgtatatcgcagataaaatgaacgccgcgttccctgaactcaactggcagatcccgcaatccacttatctggcctggattgatctacgtccgttgaatattgacgacaacgcgttgcaaaaagcgcttatcgagcaagagaaggtcgcgatcatgccggggtatacctacggtgaagaaggtcgtggttttgtccgtctcaatgccgggtgcccgcgttcgaaactggaaaaaggtgttgctggattaattaacgccatccgcgctgttcgttaa

SEQ ID NO: 261391 - DNA, 1002 bp, Klebsiella pneumoniae
atgattgataccaccctgccattaactgatatccatcgccaccttgatggcaacattcgtccccagaccattcttgaacttggccgccagtataatatctcgcttcctgcacaatccctagaaacactgattccccacgttcaggtcattgccaacgaacccgatcttgtgagctttctgaccaaacttgactggggcgttaaagttctcgcctctcttgatgcctgtcgccgcgtgtcatttgaaaacattgaagatgcagcccgtaacggcctgcactatgtcgagctgcgtttttcaccgggctacatggcaatggcacatcagctgcctgtagcgggtgttgtcgaagcggtgatcgatggcgtacgtgagggttgccgcacctttggtgtacaggcgaagcttatcggcattatgagccggaccttcggtgaagccgcctgtcagcaagagctggaggcctttttagcccaccgagaccagattaccgcacttgatttagccggtgatgaacttggtttcccgggaagtctgttcctttctcacttcaaccgcgcgcgtgatgcgggctggcatattaccgtccatgcaggcgaagctgccgggccggaaagcatctggcaggcgattcgtgaactgggggcggaacgtattggacatggcgtaaaagccattgaagatcgggcgctgatggattttctcgccgagcagcaaattggtattgaatcctgtctgacctccaatattcagaccagcaccgtggcagagctggcggcacatccgctgaaaacgttccttgagcatggcattcgtgccagcattaacactgacgatcccggcgtacagggagtggatatcattcacgaatataccgttgccgcgccggctgctgggttatcccgcgagcaaatccgccaggcgcagattaatggtctggaaatggctttcctcagcgcagaggaaaaacgcgcactgcgagaaaaagtcgctgcgaagtaa

SEQ ID NO: 261392 - DNA, 1041 bp, Klebsiella pneumoniae
atgagcgacaacatccgtgttgggttgattgggtatggttatgcgagcaaaaccttccatgcgcccctgattgcgggcacgcccgggctggaactggcggtaatctccagcagcgatgaaacaaaagtaaaagccgactggccaacggttacggttgtctctgagccgaagcatctgtttaacgatcccaacatagacctgattgtcatccctacacccaacgatacccatttcccgttagccaaagcggcgcttgaggcgggtaaacatgtggtcgttgataaaccctttaccgtgacactgtcacaagcgcgagagctggaagcgctggcaaaaagcctggggcgtgtgctgtctgtattccataaccgtcgctgggatagcgatttcctgacgctaaaaggtttgctcgcggaaggcgtactgggtgaagttgcttactttgagtctcattttgaccgcttccgtccgcaggtgcgcgatcgttggcgtgaacagggcggcccaggcagcggtatctggtacgatttagcaccgcaccttcttgatcaggccattacgctatttggtttaccggtcagcatgacggtagatttggcacagttacggcccggagcgcagtcgaccgattatttccacgccatcttgtcctatccgcagcggcgagtcattttacacggtaccatgctggcagccgctgagtcagcacgttatatcgtgcatggatcccgaggcagttatgtaaaatatggcctcgatccacaggaagaacgtctgaaaaatggccagcgtctgccgcaggaagactggggctacgatatgcgtgatggcgtacttacccgcgtggaaggtgaggaacgtgtcgaagaaacgctgttgacagtaccagggaattatccggcttactatgcggctattcgtgatgcgttaaatggcgatggtgaaaatccggttccggcaagtcaggcaatccaggtaatggagttgattgagctgggcatcgaatccgccaaacatcgcgcgacgctgtgccttgcgtga

SEQ ID NO: 261393 - DNA, 216 bp, Klebsiella pneumoniae
atgactgttcaggactacttattaaaatttcgcaaaatcagttcactcgaaagtctggaaaaactctacgaccatcttaattacaccctgacggacgatcaggaactgatcaatatgtatcgtgctgccgatcaccgtcgcgcagagctggtttctggcgggcgtttgtttgacctcggccaggtaccgaagtccgtctggcactatgtccaataa

SEQ ID NO: 261394 - DNA, 441 bp, Klebsiella pneumoniae
atgaccaccacaacgccacaacgtattggaggctggttgcttggcccattggcctggcttttagtcgctctgttaagtacgacgctggcgttgttgctgtataccgctgcgttatcttctccgcaaacatttcaaacgctcggcgaacaagcactgacgacacaaatcttatggggcgtttcttttattaccgctatcgccatgtggtattacacactgtggttgaccatcgctttctttaaacgtcggcgttgtgttcctaaacactatattatctggctgcttatttccgtattggtggcagtaaaagcgttcgctttttcacccgtggaagatggcatagccgttcgccagttactgtttactttgttggcaaccgcattgatcgtcccctattttaaacgctcgtcgcgggtgaaagcgacgtttgtgaatccgtaa

SEQ ID NO: 261395 - DNA, 579 bp, Klebsiella pneumoniae
atgaatgctatctggattgccgttgccgccgtgagcctgctgggcctggcgtttggcgccattctgggttatgcctcccgccgttttgcggtggaagacgatccggtcgttgagaaaattgacgaaatcttaccgcagagccagtgtggtcagtgcggttatcccggctgtcgcccctacgcggaagccatcagctgtaacggtgaaaaaattaaccgctgcgccccaggtggcgaagctgtgatgctaaaaattgctgagttgcttaatgtcgagccacagccgctggatggcgaagcgcaagagctaacgcctacgcggatggtggcggttattgatgaaaataactgtattggctgcactaaatgtattcaggcgtgtccggtagacgccatcgttggcgctacccgcgccatgcatacggtaatgagtgatctctgtacgggctgcaatttatgtgttgatccgtgcccgacgcactgcatctcgttgcaaccggttgcagaaacacctgactcctggaaatgggatctgaacaccattcccgtgcgtatcattcccgtggaacaccatgcttaa

SEQ ID NO: 261396 - DNA, 237 bp, Klebsiella pneumoniae
gtgaactggcagcattttgccgcgaccacgggtaagcggctggccgcgcagtactttatcgccgacgctaacgcacaactcaccttcagagccaatatgttgtttcagtggtatgacaaaacgctgcgccaggggtacctggcgcaggggcgtaccgttggactgggttttcatctccggtggatggatgccgccgttgaaatcccagattttattttttctgaatgcagagaataa

SEQ ID NO: 261397 - DNA, 294 bp, Klebsiella pneumoniae
gtgagagtccgccagcaccgcgcggagcatggaaatcgcctgcggtttgttatcttcaatgccgataagaatttcgcgtggctgcagaatatgcgcaagaatgcgaataccctctacgacctgagccgcgcaatcctgcatcaaacggtcatcggcggtaatgtacggctcgcactcagcagcgttgataatcaacgtttcaatcttatctccgccgccctgcaatttaacgcctgtcgggaatcccgcaccacccagcccggcaacaccaaactgatgaatgcgctcgattaa

SEQ ID NO: 261398 - DNA, 990 bp, Klebsiella pneumoniae
ttgctgttccagcttgcgtgctttggcgcgggcaatagcggcttcgacggcggctttgcgcggatcgacctgttcttctggttccgcattagcctgttgctgttccagcttgcgtgctttggcacgggcaatagcggcttcgacggcggctttgcgcgggtcaaccttttcttctggctccgcattagcctgttgctgctccagcttgcgcgctttggcgcgggcgatagcggcttcgacggcggctttgcgcgggtcaacctgttcttctggcttcgcattagcctgttgctgctccagcttgcgtgctttggcgcgggcgatagcggcttcaactgcggttttacgtggatcagcaacggttgctgcgtcgttagtttgctgcagttctgcctgtttcgctctggcttgcgctttacgggcttctcgtactgcaataattgcactgttatccgggcgttcgcccgctttaatcacaatcggctgtgtagcctgggcctgtttctctttcacccgcgccagagcggcagcaatcgcatctttatctttggctgcaggttgaacggctgcgctcttatgtcgttcaaggcgagccgctttttcgcgctccagacgagcctggcgcgcttcgaaacgcgctttggcttctgcggcgcgcttttcttcctgatgaatagccgcaatttcagctttttcctgacggaaatattgcaccaggggaatattgctcgggcaaacccacgcgcaagccccacattcaatgcagtcggcaatgttatgcgtggtagctttatcgtgttgctgacctttgctgaaccagtacaactgttgcggcaaaagatccgcagggcaggcgtcagcacaggcgctacaccggatgcagctttgttcttcctgtggttcgccaagctcattggcagagggagccaacagacagttggtaatctttacgaccgggacatccagccatggcaaggtaaagcccattag

SEQ ID NO: 261399 - DNA, 1098 bp, Klebsiella pneumoniae
atgaaaggacgttgggtaaagtaccttcttatgggcacggttgtggcaatgcttgccgcctgctcttccaaaccaaccgatcgcggacagcaatataaagacgggaaatttacccagcctttctctctggtgaaccagccagatgccgttggcgcgccgattaacgccggtgattttgccgagcaaattaaccatatccgtaattcgtcaccgcgtctgtatggcaaccagagtaatgtttataacgcggtgcaagagtggctgcgcgcaggcggtgatacccgcaatatgcgccagttcggcattgatgcctggcagatggaaggtgccgacaactatggtaacgtgcagtttacaggctattacacgccggtaattcaggcgcgccatacccgccagggcgagttccagtatcctatttaccgtatgccgccaaaacgtggtcgtctgccgtctcgtgcggagatctacgcgggggcattgagcgataaatacatcctcgcttacagcaactccctgatggataacttcattatggatgtgcagggtagcgggtatattgactttggtgatggcagtccgcttaactttttcagctatgcagggaaaaacggtcatgcatatcgcagcattggtaaggtgctgatcgaccgtggcgaagtgaaaaaagaagatatgtcgatgcaggcgattcgtcactggggcgaaacacacagtgaagccgaggttcgcgagctgttggaacagaacccgtctttcgtcttctttaaaccgcaatcttttgcaccggtgaaaggggcaagtgcggtgccgctggttggccgtgcttctgttgcctccgatcgttcaattattccgccaggtactaccttgctggcagaagtgccgctgctggataataacggcaaatttaacggtcagtacgaattgcgtctgatggtggcgctggatgtcggtggcgcaatcaaaggccaacacttcgatatctatcaagggatcgggccggaagccgggcaccgcgcaggttggtacaaccactatggacgtgtctgggtgctgaaaacggctccgggcgcaggtaacgtctttagcggctga

SEQ ID NO: 261400 - DNA, 444 bp, Klebsiella pneumoniae
atgacgaacccgcaattcgccggacatccgttcggcacaaccgtaaccgcagaaacgttacgcaataccttcgcaccgttgacgcaatgggaagataaatatcgccagttgatcatgctggggaaacagcttcctgctttgccagacgagttaaaagcgcaggctaaagagattgccggatgcgaaaaccgcgtctggctgggatataccatggctgaaaacggcaagatgcatttctttggcgacagcgaagggcgcattgtgcgcggcctgctggcggtgttgttgactgccgttgaggggaaaaccgccgccgaattgcaggcacagtcgccgctggcattgtttgatgagctgggattgcgtgcgcagcttagcgcctcacgaagccaggggttgaatgcgttaagcgaggcgattatcgctgtggcgaagcaggtttaa

SEQ ID NO: 261401 - DNA, 1206 bp, Klebsiella pneumoniae
atgaacgtttttaatcccgcgcagtttcgcgcccagtttcccgcacttcaggatgcgggcgtctatctcgacagcgccgcgaccgcgcttaaacctgaagccgtggttgaagccacccgacagttttacagcctgagcgccggaaacgtccatcgcagccagtttgccgaagcccaacgcctgaccgcgcgttatgaagctgcacgagagaaagtggcgcaattactgaatgcaccagatgacaaaactatcgtctggacgcgcggcaccactgaatccatcaacatggtggcacaatgctatgcgcgtccacgtctgcaaccgggcgatgagattattgtcagcgtggcagaacaccacgccaacctcgtcccctggctgatggtcgcccaacaaacgggagccaaagtggtgaaattgccgcttaatgcgcagcgactgccggatgtcgatttgttgccagaactgattactccccgtagtcggattctggcgttgggtcagatgtcgaacgtgactggcggttgcccggatctggcgcgagcgattacctttgctcattcagccgggatggtggtgatggttgatggtgctcagggggcggtgcatttccctgcggatgttcagcaactggatattgatttctatgctttctctggtcacaaactgtatggcccgacgggtatcggcgtgctgtatggcaaatcagaactgctggaagcgatgtcaccctggctgggtggcggcaaaatgattcacgaagtgagttttgacggcttcacgactcaatctgcgccgtggaaactggaagccggaacgccaaatgtcgctggtgtcataggattaagcgcggcgctggaatggctggcagattacgatatcaaccaggccgaaagctggagccgtagcttagcaacgctagcggaagatgcgctggcaaaacgtcctggcttccgctcatttcgctgccaggattccagcctgctggcctttgattttgctggcgttcatcacagcgatatggtgacgctgctggcggagtacggtattgccctgcgggccgggcagcattgcgctcagccgctactggcagaattaggcgtaaccggcacactgcgcgcctcttttgcgccatataatacaaagagtgatgtggatgcgctggtgaatgccgttgaccgcgcgctggaattattggtggattaa

SEQ ID NO: 261402 - DNA, 228 bp, Klebsiella pneumoniae; identical to SEQ ID NO: 3241

SEQ ID NO: 261403 - DNA, 732 bp, Klebsiella pneumoniae
atgaaagcggcacgccagcaagcgatagtcgacctgctgctgaaccataccagcctgaccacggaagctctctctgaacagctaaaggtcagtaaagaaaccattcgtcgcgatctcaatgaattacagacgcagggtaaaattctgcgcaatcatgggcgcgctaaatatatccaccgtcaaaatcaagacagtggcgatccctttcacatccggctgaaaagccattatgcgcataaagcagatatcgcgcgcgaggcgctcgcgtggattgaagaagggatggtaatagccttagacgccagttcaacctgctggtatctggcacgccagttgcctgacatcaacatccaggtcttcaccaatagccatccgatttgccatgaactcggtaaacgcgaacgcattcaactaatcagttccggcggcacacttgagcgcaaatatggctgttacgtcaatccctcgctgatttcccaacttaaatcgctggaaatcgatctgtttattttttcttgtgaagggatcgatagcagcggcgcactgtgggactccaatgccatcaacgctgattacaaatcaatgctattaaaacgcgccgcgcaatcgttgttattgattgataaaagtaaatttaatcgttcaggggaagcccgcatcgggcatctggatgaggtaacgcacattatttctgatgagcgccaggttgcaacttctttggtaacagcctga

SEQ ID NO: 261404 - DNA, 1419 bp, Klebsiella pneumoniae
atgaaacaagaagttatcctggtactcgactgtggcgcgaccaatgtcaggaccatcgcggttaatcggcagggaaaaattgttgcccgcgcctcaacgcctaatgccagcgatatcgcgatggaaaacaacacctggcaccagtggtctttagacgccattttgcaacgctttgctgattgctgtcggcaaatcaatagtaaactgactgaatgccacatccgcggtatcgccgtcaccacctttggtgtggatggcgctctggtagataagcaaggcaatctgctctatccgatcattagctggaaatgtccgcgaacagcagcggtaatggacaatattgaacggttgatctccgcacagcagttgcaggctatttctggcgtcggagcctttagtttcaatacgttatataagttggtgtggttgaaagaaaatcatccacaactgctggaacgcgcgcacgcctggctgtttatttcgtcgctgattaaccaccgtttaaccggcgaattcactactgatatcacgatggccggaaccagccagatgctggatatccagcaacgcgatttcagtccgcaaattttacaagccaccggtattccacgccgactcttccctcgtctggtggaagcgggtgaacagattggtacgttacagaacagcgccgcagcaatgctcggcttacccgttggcataccggtgatttccgcaggtcacgatacccagttcgccctttttggcgctggtgccgaacaaaatgaacccgtgctctcttccggtacatgggaaattttaatggtccgtagcgcccaggttgatacttcgctgttaagtcagtacgccggttcgacctgcgaactggatagtcaggcagggttgtataacccaggtatgcaatggctggcatccggcgtgctggaatgggtgagaaagctgttctggacggctgaaactccctggcaaatgttgattgaagaggctcgtctgatcgcgcctggcgcggatggcgtgaaaatgcagtgtgatttattgtcgtgtcagaacgctggctggcaaggagtgacgcttaataccacgcgggggcatttctatcgcgcggcgctggaagggttaaccgcgcaattacagcgcaatctacagatgctggaaaaaatcgggcactttaaagcctctgaattattgttagtaggtggaggaagtcgcaacacattgtggaatcagattaaagccaatatgcttgatattccggtaaaagttctcgacgacgccgaaacgaccgtcgcaggagctgcgctgttcggttggtatggcgtaggggaatttaacagcccggaagaagctcgcgcgcagattcattatcagtaccgttatttctacccgcaaactgaacctgaatttatagaggaagtgtga

SEQ ID NO: 261405 - DNA, 1149 bp, Klebsiella pneumoniae
atggctaacagaatgattctgaacgaaacggcatggtttggtcggggtgctgttggggctttaaccgatgaggtgaaacgccgtggttatcagaaggcgctgatcgtcaccgataaaacgctggtgcaatgcggcgtggtggcaaaagtgaccgataagatggatgctgcagggctggcatgggcgatttacgacggcgtagtgcccaacccaacaattactgtcgtcaaagaagggctcggtgtattccagaatagcggcgcggattacctgatcgctattggtggtggttctccacaggatacttgtaaagcgattggcattatcagcaacaacccggagtttgccgatgtgcgtagcctggaaggactttccccgaccaataaacccagtgtaccgattctggcaatccccaccacagcaggcactgcggcagaagtgaccattaactacgtgatcactgacgaagaaaaacggcgcaagtttgtttgcgttgatccgcatgatatcccgcaggtggcgtttattgacgctgacatgatggatggtatgcctccagcgctgaaagctgcgacgggtgtcgatgcgctcactcatgctattgaggggtatattacccgtggcgcgtgggcgctaaccgatgcactgcacattaaagcgattgaaatcattgctggggcgctgcgaggatcggttgctggtgataaggatgccggagaagaaatggcgctcgggcagtatgttgcgggtatgggcttctcgaatgttgggttagggttggtgcatggtatggcgcatccactgggcgcgttttataacactccacacggtgtcgcgaacgccatcctgttaccgcatgtcatgcgctataacgctgactttaccggtgagaagtaccgcgatatcgcgcgcgttatgggcgtgaaagtggaaggtatgagcctggaagaggcgcgtaatgccgctgttgaagctgtgtttgctctcaaccgtgatgtcggtattccgccacatttgcgtgatgttggggtacgcaaggaagacattccggcactggcgcaggcggcactggatgatgtttgtaccggtggcaacccgcgtgaagcaacgcttgaggatattgtagagctttaccataccgcctggtaa

SEQ ID NO: 261406 - DNA, 846 bp, Klebsiella pneumoniae
ttgcgaggcctcttcccgttttctcaaccagccatagcctgttccggcatcgaatgttacccttatcgcctgatctttaagggggttatcgtggctgttcatttgcttattgtcgatgcactgaatcttattcgtcgcattcatgccgttcagggttcgccctgtgtcgaaacctgccagcacgcgctcgatcagctcattatgcacagccaaccaacccacgcggtcgccgtttttgatgatgaaaaccgcaatagcggctggcgtcatcagcgtttaccagattacaaagcgggtcgaccgccaatgccggaagagttgcacgacgagatgcctgcactacgcaccgcctttgagcaacgcggcgtcccgtgctggtcagccagcggtaacgaagccgatgacttagccgccacgctggcggtcaaagtgacacaggccgggcatcaggcaacgattgtttcgacagataaaggctactgtcagttactttcaccgacattacgtattcgtgattacttccagaaacgttggctggatgcgccatttatcgataaagaatttggcgttcaaccgcagcagttgcccgattactgggggcttgcggggatcagcagttcaaaggtaccgggtgttgcggggatcggacccaaaagcgccacgcagctgctggtcgagtttcagagtctggaagggatatatgagaatctggatgcggttgccgaaaagtggcgcaaaaaattagaaacccataaagagatggcgtttctgtgccgcgatattgcccgcttacaaaccgatttgcatatcgacggcaatttacagcaattgcggttggtaaggtaa

SEQ ID NO: 261407 - DNA, 849 bp, Klebsiella pneumoniae
atgtcttcttatgcaaaccatcaggcacttgcgggcctgactcttggaaaatcaaccgattaccgggatacctatgacgccagcctactgcaaggcgttccgcgtagtctgaatcgcgatccgctgggtctgaaagcggataacctgccttttcacggtacggatatctggacgctatatgaactttcctggctgaatgcgaaaggtttgccgcaggtcgccgtcggtcatgttgaacttgattacaccagcgcaaatctgattgagtcgaagagttttaagctctatctcaacagttttaaccagacgcgttttaataactgggatgaggtgcgccagacgctggagcgcgacttaagcacctgcgctcagggtaaggttagcgtggcgttatatcgtcttgatgaactggaaggccaaccgataggtcatttcaatggcacttgcattgatgaccaggatatcactatcgataactatgaattcactactgactatctggagaatgccaccagtggtgaaaaagtagtggaagagacgcttgtcagccacctgctgaaatcaaactgcctgatcacccatcaaccagattggggttcgatccaaattcagtatcgtggacgccaaattgacagagaaaaactgctgcgttacctggtttctttccgccatcacaacgagttccacgaacagtgcgtggaacgcatctttaatgacctgttacgcttctgccagccagagaaattgagcgtttacgcacgttatacccgtcgtggcggtctggacattaacccgtggcgcagtaatagcgattttgtcccatcgaccacaagactggttcggcaataa

SEQ ID NO: 261408 - DNA, 546 bp, Klebsiella pneumoniae
gtggacgatttgaccgcacaagccctgaaagattttactgcacgctactgcgatgcgtggcatgaagagcataaaagctggccgttgagtgaggaactgtacggcgttccttcaccgtgcattatttcaaccaccgaagacgccgtatactggcaaccccagccgtttaccggggaacaaaatgtaaacgcggttgaacgcgcttttgatattgtgatacaacccacaattcataccttttatacgactcagtttgccggggatatgcacgcgcagtttggcgatattaaactgacattgctgcaaacctggagtgaagacgacttccgtcgggtgcaggaaaatctgattggtcatctggtgactcagaaaaggctaaaattgccgcccacgctatttatcgcgacgctggaagaagagttagaggtgatctcggtgtgtaatctctccggtgaagtgtgtaaagagacgctgggaacacgtaaacgggcgcatttagcctcaaatcttgcggaattccttaatcaacttaagcctcttctgtaa

SEQ ID NO: 261409 - DNA, 330 bp, Klebsiella pneumoniae
atgaccactcatgaccgcgttcgtctccagctgcaggcgcttgaagcattactgcgtgaacatcagcactggcaaaacgatgaaccccagccgcatcaatttaacagtacccaaccgttctttatggacaccatggaaccactggagtggttgcagtgggtgctgatcccgcgaatgcacgatttgttagaaaacaaccagccgttaccgggcgcttttgccgttgctccctattatgaaatggcgctggcgacggaccacccgcaacgcgcgcttattctggctgagctggaaaaactggatgctctttttgcggatgatgcgagctaa

SEQ ID NO: 261410 - DNA, 450 bp, Klebsiella pneumoniae
atggcggaaattggtatttttgtcggcactatgtacggaaattcgctgttagtggcggaagaagcggaagcaattctgaccgcgcagggccacaaagcaacggtatttgaagatcctgaattaagcgactggctgccctatcaggataagtatgttctggtggttacgtccacgaccgggcagggcgaccttcctgatagcattgtgccgctctttcagggaatcaaagataccctgggcttccagccgaatctgcgttatggcgtgattgcgctcggcgacagtagttatgtgaatttctgcaatggtggcaaacagttcgatgccttgttgcaggaacagagcgctcagcgggttggcgaaatgctgttgattgacgccagtgagaacccggaaccggaaacggaatcaaatccgtgggtcgaacattggggcacgctgctgtcctga

SEQ ID NO: 261411 - DNA, 1308 bp, Klebsiella pneumoniae
atgaaagtcattccggtcgccgggcacgatagcatgttgcttaatattggtggggcgcataacgcatatttcactcgcaatattgtggtactcaccgataacgccgggcataccggcattggtgaagcgccaggcggagaggtgatttatcagacgcttgtcgatgctattccgatggtgttgggccaggaagttgcgcgcctgaataaagtggttcagcaggtgcataaaggtaatcaggcagccgattttgataccttcggcaaaggtgcctggacttttgaattgcgcgttaatgccgtggcggcgctggaagccgccttgcttgacctgctaggtaaggcgctgaatgttccggtctgcgaactgttggggccaggcaagcaacgcgaggctattaccgtcctcggttatctgttttatatcggtgatcggaccaaaaccgatcttccttatctggaaaatacgccgggcaaccatgagtggtatcagttgcgccatcagaaagcgatgaacagcgaagccgttgtgcgtctggcggaagcttcacaggatcgttatggctttaaagatttcaaacttaagggcggagtgttacctggcgagcaagaaatcgacactgttcgtgcattgaagaaacgcttcccggatgcgcggattaccgttgatcccaacggtgcatggctgcttgatgaagccatttctttgtgcaaagggctgaatgatgttcttacctatgccgaagatccatgcggcgcagaacagggtttctccggtcgtgaagtgatggcggagtttcggcgggcgaccggcttgcccgtcgcgactaacatgatcgccaccaactggcgtgaaatgggtcatgcggtaatgctcaatgcagtagatattccacttgccgatccgcacttctggacgctttccggtgcagtccgcgtggcgcagctttgcgacgactgggggctgacctggggctgtcattccaacaaccactttgatatctctctggcgatgtttacccatgtgggtgcggcggcaccgggtaatcctaccgctatcgatacccactggatttggcaggagggagattgtcgcctgacccaaaatccgctggagattaaaaacggaaaaattgcagttcctgatgcgcccggtctgggcgtggaactggactgggaacaggtacaaaaggcacatgaggcctataaacgtctgcctggcggtgcgcgtaacgacgcaggtccgatgcagtacctgatccccggctggacctttgaccgtaaacgtcccgttttcggccgtcattga

SEQ ID NO: 261412 - DNA, 1302 bp, Klebsiella pneumoniae
atggcgcaattctactctgcaaaacgacgcacgacgacgcgtcagatcataactgtttcagtcaacgacctcgactcttttggtcagggcgtggcacgacataacggcaaagcgttatttattcctggattattgccacaggaaaacgcggaagttactgttactgaagataaaaaacaatacgcccgcgctaaagtcgtacgccggttaagcgatagcccggaacgcgaaacgccacgctgccctcattttggcgtatgcggcggctgtcagcaacaacacgccagcgaggatttacagcagcgaagcaaaagtgcggcactcgcccgattaatgaaacacgaggtctctgaagtgatcgccgatgttccctggggctatcgccgtcgcgcgcgtttaagtttgaactacttaccgaaaacacagcaacttcagatgggctttcgcaaagcgggctccagtgacattgtcgacgttaaacaatgccccattttagtgccccaacttgaagcattgctgcccaaagtcagggcatgcctgggcagcttacaagctatgcgccatcttggtcatgttgaactggtacaggcaaccagcggcacgctgatgattttgcgccataccgcaccgctaagttcggcagatcgcgaaaaactggaacgcttttcgcattctgaaggcctggatctgtatctcgcccccgatagtgagatactcgaaaccgtcgctggtgagatgccctggtatgactcaaacgggttgcgcttaacttttagcccgcgcgattttattcaggtcaatgcgggtgtgaaccaaaaaatggtagcgtgtgcgttggaatggctggatgtgcaacctgaagatcgcgtactggatctgttctgcggtatgggcaactttacactgccattggcgacacaagctgccagtgtggtgggtgtagaaggtgttccggcgctggtggaaaaaggccagcagaatgcgcgtcttaatgacttacacaatgtgacgttttatcacgaaaatcttgaagaagatgtcacaaagcagccgtgggcgaaaaacggcttcgataaagtgttgctggaccccgcgcgagcaggtgccgcaggtgttatgcagcaaattataaaactggaacctattcgtatagtttatgtatcctgtaaccctgcaacgctggctcgggatagcgaagcgttattaaaagcaggatataccattgcgcgactggcgatgctggatatgttcccacacacgggacatctggaatcgatggtacttttctcgcgcgttaaatag

SEQ ID NO: 261413 - DNA, 249 bp, Klebsiella pneumoniae
atgatccacagtagcgtaaagcgttggggaaattcaccggcggtgcggatcccggctacgttaatgcaggcgctcaatctgaatattgatgatgaagtgaagattgacctggtggatggcaaattaattattgagccagtgcgtaaagagcccgtatttacgcttgctgaactggtcaacgacatcacgccggaaaacctccacgagaatatcgactggggagagccgaaagataaggaagtctggtaa

SEQ ID NO: 261414 - DNA, 336 bp, Klebsiella pneumoniae
atggtaagccgatacgtacccgatatgggcgatctgatttgggttgattttgacccgacaaaaggtagcgagcaagccggacatcgtccggctgttgtcctgagtccgttcatgtacaacaacaaaacaggtatgtgtctgtgtgttccttgtacaacgcaatcaaaaggatatccgttcgaagttgttttatccggtcaggaacgtgatggcgtagcgttagctgatcaggtaaaaagtatcgcctggcgggcaagaggagcaacgaagaaaggaacggttgccccagaggaattacagctcattaaagccaaaattaacgtgctgattgggtag

SEQ ID NO: 261415 - DNA, 792 bp, Klebsiella pneumoniae
atgaatcaaatcgaccgtttgctcaccatcatgcagcgcctgcgcgatccggaaaacggctgcccgtgggataaagagcagacatttgccaccattgcgccttacacccttgaagaaacctacgaggtgctggacgccatcgcccgtgaagattttgacgatcttcgcggtgaactgggcgatctgctgttccaggtggtgttttacgcacaaatggctcaggaagaagggcgctttgactttaatgatatatgcgccgcgatcagcgataaattagaacgtcgccatccgcatgtttttgctgacagttctgccgaaaacagtagtgaagtgcttgcccgttgggagcaaatcaaaaccgaagagcgcgcgcagaaagcgcagcattcggcgctggacgatattcctcgtagtttaccggctttaatgcgtgcgcaaaaaatccagaaacgttgcgccaacgttggttttgactggacgacgcttggtccggtagtcgataaagtctacgaagagatcgacgaggtgatgtacgaggcacggcaggctgttatcgaccaggctaaactggaggaggaaatgggcgacctgctgtttgccacggtcaatctggctcgtcatttagggacaaaagcggaaatcgcattgcaaaaagcgaacgaaaaattcgagcgtcgttttcgcgaagtggagcgtattgttgccgcgcgtggactggaaatgacaggtgttgacctcgaaacaatggaagaagtctggcaacaggtaaaacggcaggaaattgatctctaa

SEQ ID NO: 261416 - DNA, 603 bp, Klebsiella pneumoniae
gtgctgagtcggtttggttttgacttcaccagacgctgccatgtacggcaccagcgtcaggtgcataaacagggtgtgctcacggccaatttcaacagccatctggcgaatcgcttcgaggaacggcagggattcgatatcacctactgtaccgccgatttcgaccagtactacgtcatgaccttcgccgccttccagcacgcgctctttgatagcgttagtgatgtgcggaataacctgtacggttgcgccgaggtagtcgccacggcgttctttacgcagaacgtcagagtagatacgacccgtggtgaagttgttgcggcggctcattttggtacgaatgaaacgctcgtagtgccccaggtccaggtcggtttcagcgccgtcttcagtaacgaacacttccccgtgttggattgggctcatagtacctggatcgacgttgatgtacggatccagtttcatgatggtcacattgaggccacgggcttcaagaatggctgcgagggaggctgcggcaatgcctttacccagagaggatacgaccccgccggtcacaaaaatatagttcgttgtcatgctgaacctgagaagttaggttga

SEQ ID NO: 261417 - DNA, 246 bp, Klebsiella pneumoniae
atgacgctcaacaattgtcggcgcattgtacagctggcgaaccaggctatcgtcaaccaactggcactgctgtgcgccgagacgcatggtaccgccgagatcgctcttctcgctacgaacttcaacgttgccgttttcatcgcgccactcggtaatcagcgccacaaccgggtacttacagtctggcacaaattccgtagagttggcgttctccatgttggcaacatggcgagcgtaatcaattaa

SEQ ID NO: 261418 - DNA, 399 bp, Klebsiella pneumoniae
atgagcaacgacacaccatttaatgcgttgtggcaacgaatgctggcgcgtggctggacgccgatcagtgaatgccgtctcgacgactggcttacgcaagcgccagacggcgtggtgttattaagcagtgacccgaaacgcacgccagaagtcagcgataacccggtcatgattggcgaattactgcgcgagtttcccgactatacatggcaggtagcgattgctgaccttgagcagagcgaagccatcggcgatcgctttggcgtctttcgctttcccgccacattagtatttaccggcggaaactatcgcggcgtgctgaatggtattcacccgtgggcggaactgataaacctgatgcgcggacttgtcgaaccgcagcaggagcgtgcctcatga

SEQ ID NO: 261419 - DNA, 588 bp, Klebsiella pneumoniae
atgagcgagcaacgcgtggtggtaatggggctgggcaacctgctgtgggccgatgaaggcttcggcgtgcgggtggcggaacggctgtatgcccattaccactggcccgagtatgtggagattgtcgatggcggtactcagggactgaacttgctggggtatgtcgaaagcgccagtcacttgttgatcctcgatgccattgactacgggctggaaccaggaacgctgcgaacctatgccggagaacgcattccggcttatctcagcgcgaagaaaataagcctgcaccagaacagcttctccgaagtgctggcgctggcggatatacgtggtcatttgccagcacatattgccctcgtcggtctgcaacccgcaatgctcgacgactacggcggtagcctgagcgaactggcgcgggagcaactgcccgctgcggaacaatcggcgctggcgcagctggctgcgtggggaattgtgccgcaaccggctaatgaatcgcgctgtctcaattatgactgtctgtcgatggaaaattacgaaggcgttcgcttgcgtcagtacaggatgaggctggaggaacagggatga

SEQ ID NO: 261420 - DNA, 708 bp, Klebsiella pneumoniae
atgcaacagaaaagcgacaacgttgtcagtcactatgtctttgaagcacccgtgcggatatggcactggctgacggtgttatgcatggcggtgttgatggtcaccggttactttatcggcaagccgctaccttccgtcagcggcgaggcgacgtatctgttctatatgggctacatcaggttaattcacttcagcgccgggatgatttttaccgtggtcttgctgatgcggatctactgggcttttgttggcaatcgttactcccgcgagctgtttatcgtgccggtatggcgtaaaagctggtggcagggcgtgtggtatgaaatccgctggtatctgtttctggcaaaacgtccgagtgccgatataggccataaccccatcgcccaggcggcgatgttcggctatttcctgatgtcagtttttatgatcatcaccggctttgcgctgtacagcgaacacagccagtacgctatttttgcgccgttccgttatgtggtggaatttttctactggacgggcggcaactcaatggacgttcacagctggcatcggctggggatgtggctgattggcgcgtttgtgatcggtcatgtctacatggcgctgcgtgaagatatcatgtccgacgacacggtgatctccaccatggtcaacggctaccgtagccacaaatttggcaaaataagtaacaaggagcgttcatga

SEQ ID NO: 261421 - DNA, 1794 bp, Klebsiella pneumoniae
atgagcactcagtacgaaactcagggatacaccatcaataatgccggacgccgcctggtggtcgacccgattacgcgcattgaaggccacatgcgctgcgaagtgaatattaacgatcagaatgtgatcaccaatgccgtctcctgcggcaccatgtttcgcgggctggagatcatcctgcaagggcgtgacccgcgcgatgcgtgggcgttcgttgaacgtatctgcggcgtctgtaccggcgtacacgctctggcttcggtctatgccatcgaagatgctatcggcattaaagtgccggacaacgctaatatcatccgcaacattatgctggcgacgctctggtgccatgaccatctggtgcacttttatcagcttgccgggatggactggatcgatgtgttagatgcgctgaaagccgacccgcggaaaacctccgaactggcgcaaagtctctcctcttggccgaaatcatcccctggctatttcttcgacgtacaaaatcgcctgaagaaattcgttgaaggcggccagttggggatcttccgcaatggctactgggggcacccgcagtacaaactgccgccagaagccaacctgatgggctttgcccactatctcgaagctctcgatttccagcgtgaaattgtcaaaatccacgctgtctttggcggtaaaaacccgcatccaaactggattgtcggcgggatgccttgcgccattaacattgacgaaagcggcgcggtcggggcggtcaatatggaacgcctgaacctggtgcagtcaatcattacccgcacggcggatttcattaacaacgtgatgatccccgacgccttagccattggtcagttcaacaaaccgtggagcgaaatcggcacgggtctttctgataaatgcgttctcagttacggcgcgttcccggatatcgccaacgactttggcgagaaaagtctgctgatgcctggcggcgcggtgattaacggcgacttcaacaatgtgctgccagtggatttggttgatccgcagcaggtgcaggagtttgtcgaccacgcctggtatcgatatcccaacgatcaggtcgggcgtcatccgttcgatggcatcaccgacccgtggtacaaccccggcgatgtcaaaggcagcgataccaacattcagcagctgaatgaacaggaacgctactcgtggattaaagcgccacgctggcgcggtaacgcgatggaagtggggccgctggcacgcacgttaatcgcttatcacaaaggcgatgctgcgaccgttgagtcggtcgatcgcatgatgtcggcgttgaaactgccgctttccggcatccagtcaacgttgggccgcattttgtgtcgcgcgcacgaagcgcagtgggccgcaggtaagttgcagtatttcttcgataagctgatgaccaatctgaaaaacggcaatctcgccactgcttccactgaaaaatgggaacctacaacctggccgacagagtgccgtggcgtcggctttaccgaagcgccgcgcggggcgttaggccactgggctgccattcgcgatggcaagattgatctctatcagtgcgtggtgccgaccacctggaacgccagcccgcgcgatcctaaagggcaaattggcgcttatgaagcggcgctgatgaacaccaaaatggcgatccccgagcaaccgctggagatcctgcgtactctgcacagctttgatccgtgcctcgcctgttcaacacacgtgctgggcgacgacggtagcgagctggtctccgtgcaggtgcgttaa

SEQ ID NO: 261422 - DNA, 1119 bp, Klebsiella pneumoniae
atgaataacgaggaaacattttaccaggccatgcggcgtcagggcgttacccggcgcagctttctcaaatattgtagtctggctgccacgtcgctgggcttaggcgcgggaatggcaccaaagattgcctgggcgctggagaacaaaccgcgcattccggtggtatggatccacggtctggaatgcacctgctgtaccgaatcttttatccgctccgctcacccgctggcgaaggacgtcatcctttccctgatttccctcgattatgacgatactttgatggctgccgccggaacccaggcggaagaagtctttgaagacatcatcacgcaatacaatggcaaatatatcctcgcagtagaaggtaatccgccgctgggcgagcaggggatgttctgtatcagcagcggacgaccgtttattgagaaactcaaacgtgccgctgccggagccagtgcgattatcgcctggggaacctgcgcgtcctggggctgcgtgcaggccgcgcgacccaatccgacgcaggcaacgcctatcgacaaagtcatcaccgacaaacctattatcaaagtacctggctgcccgccgatcccggatgtgatgagcgccatcattacttacatggtgacctttgatcgcttgccagatgtcgacagaatgggccgtccactgatgttttatggtcagcgtatccacgataaatgttatcgccgcgctcacttcgacgccggagagttcgtccagagttgggatgatgacgctgcccgcaaaggttactgcctgtacaaaatgggctgcaaagggcctaccacctataacgcctgttcctccacacgctggaacgatggcgtttccttcccgatccagtcaggtcacggctgcctgggttgtgcggaaaatggtttctgggatcgcggttcgttctacagccgcgtggtcgatattccacaaatgggtactcattccaccgccgacaccgtcggtttaaccgcgcttggcgtggtggcagcggctgttggtgtgcacgcagtcgccagcgccgttgaccagcgcagacgtcataaccagcaacctacagaaaccgaacatcagccaggcaatgaggataaacaggcatga

SEQ ID NO: 261423 - DNA, 387 bp, Klebsiella pneumoniae
atgcggggctttgttttttgttacactgccgccagtctgattaaggtagtaataattatgctgatcttcgaaggtaaagagatagaaacggataccgaaggctatctcaaagaaagcagccagtggagtgagccgctggcagtggtgattgcagagaacgaagggatttcgctgtcgccagaacactgggaagtggtgcgttttgtgcgtgatttctatctggaattcaatacttctccggcgattcgtatgctggtaaaagcgatggcgaataaatttggcgaagaaaaaggtaacagccgctatttataccgactgtttccgaaaggtccggctaagcaagccaccaaaattgctggcctgccaaaaccggttaaatgtatttaa

SEQ ID NO: 261424 - DNA, 279 bp, Klebsiella pneumoniae
atgtcgaaagtctgcataattgcctgggtttacgggcgagttcagggcgttggatttcgctataccacgcagtacgaagcgaaaaaactgggattagccgggtacgccaaaaatcttgacgatggcagcgtggaagtggttgcctgcggtgaagaagggcaggtagaaaaattaatgcagtggttaaagagtggcggcccgcgttctgcgcgtgtagaacgggtgctcagcgagccgcatcatccctcggaggaattaaccgattttcgtatccgttaa

SEQ ID NO: 261425 - DNA, 1191 bp, Klebsiella pneumoniae
atgagtgtacgtttagtgttagccaaagggcgcgaaaaatcattacttcgtcgccatccgtggatcttttccggggccgttgcccgcatggaaggtaaagccagcctcggggaaaccatcgatattgttgatcatcagggaaaatggttagcacgcggcgcttattcgccagcttcgcaaatccgggcgcgcgtctggacgtttgacccgaatgaatctatcgacattgcttttttttcccgccgtttgcaacaagcacaaaaatggcgtgactggctggcgcaaaaagatggcctcgacagctatcgtttaatcgccggtgaatctgatggcctgccgggtattactatcgatcgtttcggtaattttctggtgctgcaattgctgagtgctggcgcagaatatcagcgcgcagcattaattagtgccctgcaaacgctgtacccggaatgtgcgatttacgatcgcagcgacgttgcggtacgtaaaaaagaagggatggaactgacccagggccccgttaccggagagctaccgcctgccctgctgccgattgaagaacacggcatgaagctgctggtggacatacagcacgggcacaaaacgggctactacctggaccagcgtgacagccgcctggctacccgccgctacgttgaaaataaacgtgtgctgaactgtttctcctataccggtggtttcgccgtatcggcactgatgggcggttgcagccaggttgtcagcgttgatacctcccaggaagcgctggatattgcacggcagaacgttgagctgaacaaactggatctgagcaaggctgagtttgtccgtgatgatgtctttaaattgctgcgtacttatcgcgatcgcggtgaaaaatttgacgttatcgtgatggacccgccgaagtttgttgagaataaaagccagttgatgggcgcgtgtcgtggctataaagacatcaacatgctggcgattcagttgctgaatgaaggcggagttctcctgactttctcctgttctggcctgatgaccagcgatttatttcagaaaatcatcgcggatgccgcaattgatgccggtcgtgatgtacaatttatagagcagttccgtcaggcagccgatcatccggtgatcgctacctatccggaagggctatatctgaaagggtttgcctgtcgcgtcatgtaa

SEQ ID NO: 261426 - DNA, 318 bp, Klebsiella pneumoniae
atgattgccagcaaattcggtatcggccagcaggtccgccattccctgttaggttatctcggagtggtcgtggatatcgacccggtttattcgctctctgaaccgtcgcctgatgagctggcggtgaatgacgagcttcgcgccgctccgtggtatcacgtggtgatggaggacgataacggcctaccggttcatacctacctggctgaagcccagctaagtagcgaattgcaggatgaacatcctgaacagccatccatggatgagctggcgcagaccatccgcaaacaactccaggccccgcgtctgcgtaactaa

SEQ ID NO: 261427 - DNA, 414 bp, Klebsiella pneumoniae
atgaaagaaaccgatattgcaggcattttaacgtccactcacaccattgcgctggtgggggcaagcgacaaacccgatcgtcccagctatcgcgtgatgaaatatctactcgaccaggggtatcacgtcattccggtttcgccaaaagttgctggcaaaacactgctgggccagcaggggtatggcacgctggcagaagttcctgaaaaagtcgatatggtcgatgttttccggaattcagaagcagcgtggggcgtagcgcaggaagcgatcgccatcggcgcgaaaaccctctggatgcaactgggggtgattaatgagcaagcggcagtactggcacgggatgccggattaaatgtagtgatggatcgctgcccggctattgagatccctcgcctgggcctggccaaataa

SEQ ID NO: 261428 - DNA, 663 bp, Klebsiella pneumoniae
atgaaaaccggcatcgtgaccaccttgattgcattatgtttgccggtatccgtttttgccaccacgctgcggctttcaaccgatgtcgatcttctggtactcgacggtaaaaaggtttccagctctctgctgcgcggtgcggacagcattgaactggataacggaccgcatcagttagtgtttcgcgttgagaagacgattcatctttccaatagtgaagaacggctgtatatctccccaccgctggtggtcagttttaatacccagctcatcaaccaggtcaattttcgcctgcctcgtctggagaatgagcgggaagctaaccattttgatgctgcgccgcgccttgaattgttggatggcgatgcgacgccgattccggtaaagctggatattctcgccattacctcaacggcaaaaacgattgattatgaggtcgaggttgaacgctataacaaatccgcgaaacgcgcttcactaccgcaatttgccacgatgatggcagatgacagtacgctgctttcgggggtttccgagctggatgctattccaccgcagtctcaggtgctcacagaacaacggctgaagtattggtttaaactggctgacccacaaacgcgaaatactttcctgcaatgggcggaaaaacaaccatcttcctga

SEQ ID NO: 261429 - DNA, 459 bp, Klebsiella pneumoniae
atggaactgacgactcgcactttacctgcgcggaaacatattgcgctggtggcacacgatcactgcaaacaaatgctgatgagctgggtggaacggcatcaaccgttactggaacaacacgtactgtatgcaacaggcactaccggtaacttaatttcccgcgcgaccggcatgaacgtcaacgcgatgttgagtggcccaatggggggtgaccagcaggttggcgcattgatctcagaagggaaaattgatgtattgattttcttctgggatccactaaatgccgtgccgcacgatcctgacgtgaaagccttgctgcgtctggcgacggtatggaacattccggtcgccaccaacgtggcaacggcagacttcataatccagtcgccgcatttcaacgacgcggtcgatattctgatccccgattatcagcgttatctcgcggaccgtctgaagtaa

SEQ ID NO: 261430 - DNA, 2148 bp, Klebsiella pneumoniae
atgggcggcaattgtaacgtttttttgggctggagcacgttttctctgacggttacactgataagaaatcatttcgtgtggatctacagagtcatggaactgaaagcgacaacgcttggaaaacgtctggcacagcacccttacgatcgggcggtgatcctcaatgccgggattaaagtctccggcgatcgccacgaatacctcattcctttcaatcaattactggcgattcactgtaagcgcggtctggtgtggggcgagctggaatttgtactgccgggcgaaaaagtggtgcgtctgcacggtactgaatggggcgagacgcagcgtttttaccatcatcttgatgctcactggcggcggtggagtagcgagatgagcgaaattgcatctggtgttttacagcagcaactggatttaattgccacgcgcaccggagaaaataaatggctgacgcgtgagcaaacctctggcgtgcagcaacaaatccgccaggctttgtcggcgttgccgttgccggttaaccgactggaagaattcgataactgccgtgaggcgtggcgtaaatgtcaggcctggttgaaagatattgaaagcgctcggttgcagcataatcaggcatataccgaagccatgcttaccgagtatgcggattttttccgccaggtcgagtcttcaccgctgaatccggcgcaggcccgggcagtcgttaatggcgagcattctctgttagtgctggcagatgcaggaagcggaaaaacgtcggtgctggtagcccgtgcaggctggttgctggcgcgtggtgaagcgtcccctgagcaaattttattgctggcgtttggtcgcaaagccgctgaagagatggacgagcgtattcgagaacgactacataccgaagacattaccgcacgcacatttcatgcgctggcgctgcatattattcagcagggcagcaaaaaagttccgatagtcagcaaactggaaaatgataccgctgcccgtcatgaactttttattgctgagtggtgcaagcaatgcagcgaaaagaaagcgcaggcgaagggctggcggcaatggctgacggaagaaatgcagtggtcagtgccagaaggtaacttctgggatgatgaaaaattacagcgtcgtcttgcctcacgcctcgatcgttgggtaagtctgatgcggatgcacggtggtgcacaggcagaaatgattgccagtgcacccgaagagattcgcgatctgttcagtaaacgtatcaagttgatggctccgttattaaaagcctggaaaggtgcgctgaaggcagaaaacgctgtcgatttttcgggccttattcaccaggcgattgtgattctggagaaaggtcgctttatcagcccgtggaagcatattctggttgatgaatttcaggatatctcgccgcagcgcgcagcgttgttagcggcattacgcaagcaaaacagtcagacgacgttgttcgccgttggtgatgactggcaggcgatttatcgcttcagcggtgcgcaaatgtcgctcaccaccgctttccatgaaaactttggtgaaggtgatcgctgcgatttagagacgacttaccgttttaacagtcgtatcggtgaggtggcaaaccggtttattcagcagaacccaggccagctgaaaaagccgctaaacagcttaaccaatggagacaaaaaagccgtcacgttattggatgagagccatcttgacgctttgctggataagctctctggttatgccaaaccggaagagcgcattctgatcctggcgcgttaccatcacatgaggcctgccagcctggaaaaagcggcaacacgctggccgaagttgcaaatcgactttatgaccattcatgccagcaaagggcaacaggcggattacgtcatcatcgttggcttgcaggagggaagtgatggttttccggctgcggcgcgggagtcgattatggaagaggcgctactgccaccggttgaggatttcccggacgctgaagaacggcggttaatgtacgtggcgctgacccgggcacgccatcgggtatgggcactgtttaacaaagagaatccctctccctttgtggaaatactgaaaaatctggatgtgccggtggcgagaaaaccgtaa

SEQ ID NO: 261431 - DNA, 447 bp, Klebsiella pneumoniae
atgcgtaccgttttgaacattctgaactttgtgcttggcggatttgccaccactctgggctggctgttggcgactctggtcagtattgtgctgatttttaccttaccgctgacacgatcctgctgggagatcactaaactgtctctggtgccttatggcaatgaagctattcatgtcgatgaactgaacccggctggcaaaaatgtgctgctaaatactggcggtacggtattgaatattttctggctgattttctttggctggtggttatgcctgatgcacattgcaacgggcatcgcacaatgtatttccatcattggcattcctgtcggcattgcgaactttaaaattgccgctattgcactatggccggtcggtcgtcgcgtggtatcggtagaaacagcgcaagctgcgcgtgaagccaatgcacgtcgtcgttttgaataa

SEQ ID NO: 261432 - DNA, 2163 bp, Klebsiella pneumoniae
atggcctttatgctaagtcctttgctcaaacgctatacctggaacagcgcctggctgtattacgcgcgtatttttattgcgctttgtggaaccacagcgtttccgtggtggctgggtgatgtaaaactgacgattccgctaacgctggggatggtggcagcggcgctgaccgatctcgatgaccgactggcgggacgtttgcgtaacctcatcattacgctgttctgcttttttatcgcctcggcctcagtagaattgctgtttccctggccctggctatttgcgattggcttaacgctctctaccagcggcttcattttgctcggcggtctgggtcaacgctatgcaacaattgccttcggtgcattgctgatcgccatttacactatgttgggaacatcactgtatgagcactggtatcagcagccgatgtatctgctggccggtgccgtctggtacaacgtcctgacacttattggtcatctactgttcccggtccgcccgctgcaggacaacctggcgcgttgctatgaacaactggcgcgttaccttgagctcaagtcgcgcatgtttgatcctgatattgaagatgaaagccaggcaccgctgtacgatttggctctcgccaacggtcagctgatggcgacattgaatcagacgaaactctcgctgctgacccgcttacgtggcgatcgtggtcaacggggaacgcgtcgcacgctgcattattacttcgtcgcgcaggatattcacgagcgtgccagctcttctcatattcagtatcaaacattgcgtgaacattttcgccacagcgacgtgctgttccgttttcagcggctgatgtcgatgcagggccaggcgtgccagcaactgtcacgctgtattttgttgcgtcagccttatcaacatgatccgcatttcgagcgcgcttttacgcatattgatgctgcgctggagcggatgcgcgataacggcgcacctgccgatttactcaaaacactgggatttttgctgaacaatttacgcgccattgatgcccaactggcaacaattgaatcagaacaggcccaggcactgccccataataatgacgaaaatgagctcgctgatgacagcccgcacggattgagtgatatctggctgcgtcttagccgtcacttcacgccggaatccgccctcttccgtcatgcggtaagaatgtcgctggtgttgtgcttcggctacgccatcattcagataaccggaatgcatcacgggtattggatcttgctgacaagtttgtttgtctgccagccaaactataacgccacgcgccaccgcctgaagttaaggattattggtacgctggtaggtatcgccattggcattcctgtgctgtggtttgtaccgtcactggaagggcaactggtgctactggttatcaccggcgtgctcttttttgccttccgtaacgtgcaatacgcccatgcaacgatgttcatcacacttttggtgctactttgttttaacttgctgggtgaaggttttgaagtggcgttacctcgcgtaatcgatacgctgattggttgtgccattgcgtgggcggcggtgagctacatctggcctgactggaagtttcgcaatctgccgcgcatgctcgaacgtgccaccgaggccaactgtcgctatctcgatgccatactggagcaataccatcaggggcgtgataaccgtctggcgtatcgtattgcccgccgcgatgcacacaaccgtgatgctgaactggcgtcggtggtatcaaatatgtccagcgagccgaacgttaccccgcaaattcgcgaggccgcgtttcggttgctgtgccttaaccatacgtttaccagctatatctcagccctcggtgctcaccgggagcagttaactaatcctgaaattctgacgtttcttgatgacgcagtttgctatgttgatgacgcgctacatcatcaacctgctgatgaagaacgcgtcaatcaggcattagctggcctgaaacagcggatgcagcaacttgaaccgcgggcagacagcaaagaacctctggtcgtacaacaagttgggttattgattgcattactgccagagattggtcgtctgcaacgccagattactcaagttccgcaggaaactcctgtttcggcgtaa

SEQ ID NO: 261433 - DNA, 630 bp, Klebsiella pneumoniae
atgaaaagcctctcctataagcggatctataaatcacaagaatacctggcaacgttgggcacaattgaataccgatcattgtttggtagttacagcctgaccgttgacgacacggtgtttgcgatggtttctgatggtgagttgtatcttcgggcttgtgagcaaagtgcacagtactgtgtaaaacatccgcctgtttggctgacatataaaaagtgtggccgatccgttaccctcaattactatcgggttgatgaaagtctatggcgaaatcaactgaagctggtgcgtctgtcgaaatattctctcgatgcagcgctgaaagagaaaagcacgcgcaatacccgggaaagactgaaagatttgcccaatatgtcttttcatctggaagcgattctcggggaggtggggattaaggatgtacgggcgttacgtatacttggggcaaaaatgtgttggttgcgactgcggcagcaaaacagtctggtgacagaaaagattctgtttatgcttgaaggggccattatcggcattcatgaagctgcgctcccggtggcacgccgccaggagcttgcagaatgggctgactctcttacgccgaaacaggagtttcctgcggaacttgagtaa

SEQ ID NO: 261434 - DNA, 510 bp, Klebsiella pneumoniae
atgtacacttcaggctatgcacatcgttcttcgtcgttctcatccgcagcaagtaaaattgcgcgtgtctctacggaaaacactacagccgggcttatcagtgaagttgtctatcgcgaagatcagcccatgatgacgcaacttctactgttgccattgttacagcaactcggtcagcaatcgcgctggcaactctggttaacaccgcaacaaaaactgagtcgggaatgggttctggcatctgggctacccttaacgaaagtgatgcagattagccagctctccccttgccacaccgtggagtcaatggttcgcgctttacgcacgggcaattacagtgtggtgatcggttggttggcagatgatttgactgaagaagagcatgctgaacttgttgatgcggcaaatgaaggtaacgctatggggtttattatgcgtccggtaagcgcatcctctcacgcaacgagacaactttccgggctaaaaattcactctaatttgtatcattaa

SEQ ID NO: 261435 - DNA, 1053 bp, Klebsiella pneumoniae
atgaaaaagacagctatcgcgattgcagtggcactggctggtttcgctaccgtagcgcaggccgctccgaaagataacacctggtacactggtgctaaactgggctggtcccagtaccatgacactggttttattcctaacaatggtccgacccacgaaaaccaactgggtgcaggtgcttttggtggttaccaggttaacccgtatgttggctttgaaatgggttacgactggttaggtcgtatgccgtacaaaggcgacaacatcaacggcgcatacaaagctcagggcgttcagctgaccgctaaactgggttacccaatcactgacgatctggacatctacactcgtctgggtggtatggtatggcgtgcagacaccaaggctaacgtacctggtggcgcatcttttaaagaccacgataccggcgtttctccggtcttcgctggcggtgttgagtatgcgatcactcctgaaatcgctacccgtctggaataccagtggaccaacaacatcggtgacgcacacaccatcggtactcgtccggacaacggcatgctgagcctgggtgtttcctaccgtttcggtcagggcgaagcagctccagtagttgctccggctccagctccggcaccggaagtacagaccaagcacttcactctgaagtctgacgttctgttcaccttcaacaaagcaaccctgaaaccggaaggtcaggctgctctggatcagctgtacagccagctgagcaacctggatccgaaagacggttccgtagttgttctgggttacaccgaccgcatcggttctgacgcttacaaccagggtctgtccgagcgccgtgctcagtctgttgttgattacctgatctctaaaggtatcccggcagacaaaatctccgcacgtggtatgggcgaatccaacccggttactggcaacacctgtgacaacgtgaaacagcgtgctgcactgatcgactgcctggctccggatcgtcgcgtagagatcgaagttaaaggcatcaaagacgttgtaactcagccgcaggcttaa

SEQ ID NO: 261436 - DNA, 1761 bp, Klebsiella pneumoniae
ttgaccattacgaaacttgcatggcgtgacctggttcctgataccgatagctatcaggaaatatttgctcagccacatttgattgacgaaaacgatcctttattcagtgatactcaaccgcgactgcaatttgcgctggagcagttgctgcatacgcgagcatcctcctcttttatgctggcgaaggccccggaagagtctgagtatctgaatcttattgccgatgccgcgcgtgcgctacaaagcgatgcaggccaactggtgggcggtcactatgaggtttccgggcacaccatccgcttacgtaacgcagtgagtgcagatgataattttgcgactttaacgcaagttgtcgctgccgactgggtagaagcggaacaactctttggctgcctgcgccagtttaatggcgacattaccctgcagccaggtctggtgcatcaggcaaatggcggtattctcatcatctctttgcgtacactgctggcgcaacctctgctgtggatgcggctgaaaaatatcgttaaccgcgagcgttttgactgggttgcgtttgatgagtcgcgccctctccccgtctctgtgccttcgatgccattgaagctgaaagtcattctggtaggcgaacgcgaatcattggctgatttccaggagatggaaccagagctttcagagcaggctatttatagcgaatttgaagatactctgcagattgtcgatgcggagtcagtaagccagtggtgtcgctgggtaacattgaccgccagacataatcacttacctgcaccgggagcggatgcctggccggtgcttatccgcgaagcagcacgctacaccggtgaacaagaaacacttccgcttagcccgcagtggatcctccgccagtgtaaagaggtcgcctccctgtgcgatggcgacaccttctccggcgagcagctaaacttaatgctacagcagcgtgaatggcgcgaaggtttcctcgctgaacgcatgcaggatgagatccttcaggagcaaatcctgattgaaaccgaaggcgaacgcatcgggcaaattaacgccctttcggtcattgaatttccgggtcatccacgcgcttttggcgaaccttctcgcattagctgcgttgtgcatattggcgatggtgagttcaccgacatcgaacgcaaagcggagcttggcggcaatatccatgcgaaagggatgatgatcatgcaggcgttcctgatgtcggaactacagcttgagcaacagatccccttctcagcatcgctgacatttgagcagtcatacagtgaagtggatggcgatagtgcctcgatggctgaactctgcgccctgataagcgccctcgccgatgtgccggtgaatcagagtatcgctatcacaggttcagtcgatcagttcggtcgtgcccagccggtcggtggtttaaatgagaaaatcgaaggcttctttgctatttgccagcaacgtgagttaaccgggaaacaaggtgtcattatccccactgctaacgttcgccatttaagtcttcccagtgaactgttgaaagcggtagaggaaggcaaattcaccatctgggcagtagacgatgtgactgacgcactgccgttattattaaatctggtgtgggatggcgaaggccaaacgacgctgatgcaaaccatccaggaacgtatcgcgcaagcatcgcaacaggaaggacgtcaccgttttccatggccattacgttggctgaactggtttattccgaactga

SEQ ID NO: 261437 - DNA, 564 bp, Klebsiella pneumoniae
atgaaaaagtggctagtgacgattgcagcactgtggctggccggatgcagctccggcgaaattaataaaaactattaccagttacctgtggtgcagagcggtacacaaagtaccgccagccagggtaatcgcctgttatgggtagagcaggtcactgttcctgactatctggcgggaaatggtgtggtttatcaaaccagtgatgtgaagtatgtgattgccaacaacaacttgtgggccagcccattggatcaacagttgcgcaacaccctggttgccaacctgagcacgcaactgcccggctgggtggttgcctcccagcctctgggaagcgcccaggacacgctcaatgttaccgtaacggagtttaacggtcgctatgatggcaaggtcattgtcagtggggagtggctgttgaaccaccagggacaactgatcaaacgtccgttccgtctggaaggggtgcaaactcaggatggttacgatgaaatggttaaagtgctggccagtgtctggagtcaggaagccgcttctattgcgcaagagataaagcgtctaccttaa

SEQ ID NO: 261438 - DNA, 1254 bp, Klebsiella pneumoniae
atgtgcgaacatcatcatgccgcgaagcacatcctgtgctcgcagtgtgacatgctggtggcgttaccgcgccttgagcatggtcagaaagcggcatgtccccggtgtggcacaacgttaaccgtggcgtgggatgcccctcggcagcgtcccaccgcctatgcgttggctgcactgttcatgctgttgctgtccaacttgtttccttttgtgaatatgaacgttgcaggagttaccagtgaaattacattactggaaattcccggcgtgcttttttctgaggactacgccagcctcggcacctttttcctgttgtttgtgcaactggttcccgcgttttgtctgataaccattctgttactggtgaatcgcgcggaattaccggtccgtttaaaagagcaactggcacgggtgctttttcaactcaaaacctggggaatggcggagattttcctcgcgggtgtgctggtcagtttcgttaaactgatggcttacggcagcattggtgtaggcagcagctttctcccatggtgtttattttgtgtcctgcaactgcgcgcttttcagtgcgttgatcgtcgctggttatgggatgacatcgccccgatgccagaactgcgccagccgctaaaaccaggcgtcacggggatacgtcaggggctgcgttcatgctcctgttgtacggcaatccttcctgctgacgaacccgtatgcccgcgctgtagtaccaaagggtacgttcggcgtagaaacagcctgcaatggacactcgcgctgcttgttacgtccatcatgctgtatcttccggctaatattttgcccatcatggtgacggatttattaggctcgaagatgccgtcgacgattctcgctggggtcatcctgttatggagcgaaggatcttatcccgtcgctgcggttatctttctggccagtattatggtgccaacgttaaagatgatcgccatagcgtggttgtgttgggatgccaaagggcatggcaagcgcgacagtgaaagaatgcatttgatttatgaagttgttgagtttgtaggccgctggtcgatgattgacgttttcgttatcgcggtgctctcggcgctggtgcgtatgggaggtttaatgagtatttatccggcaatgggtgcattaatgtttgctttagtcgtcataatgacaatgttttctgctatgacgtttgacccacgtttgtcgtgggatcgtcaacctgaatcagagcatgaggagtcctga

SEQ ID NO: 261439 - DNA, 1908 bp, Klebsiella pneumoniae
atgtcattaatcagtatgcatggcgcatggctgtcgttcagcgacgcgccgcttctcgataacgcagaactgcatatcgaagataacgaacgtgtttgtctggtgggccgcaacggcgcaggcaaatcgacgttaatgaaaatcctcaaccgtgaacaagggctggatgacggtcgcattatttacgagcaagatttgattgtagctcgtctgcaacaggatccgccgcgtaacgttgaggggagtgtttatgatttcgttgccgaaggcattgaagaacaagcggaatacctgaaacgctatcacgatatttcgcgcctggtgatgaacgacccgagcgagaaaaatctcaacgaactggcgaaggttcaggaacagctggatcaccacaacctgtggcagctggaaaaccgcattaacgaagtgctggcgcaactggggttagatcctaacgttgcgctgtcgtcgctttccggcggctggttgcgtaaagcggcattaggacgcgcgctggtgagcaatccgcgcgtattgctgctcgacgaaccgactaaccacctggatatcgaaaccatcgactggctggaagggtttctcaaaaccttcaatgggacgattattttcatctcccacgaccgttcgtttatccgcaatatggcgacgcgtattgttgatctcgatcgcggcaagctggtgacctatccaggaaattacgaccagtacctgctggaaaaagaagaagccctgcgcgtggaagaactacaaaatgccgagttcgatcgcaaactggcgcaggaagaggtgtggatccgccaggggatcaaagcacgccgtacccgtaatgaaggccgcgtacgcgccctgaaagcaatgcgtcgcgagcgtggcgaacgtcgcgaagtgatgggtaccgcaaagatgcaggtggaagaggccagccgctccggtaagatcgttttcgaaatggaagacgtttgctaccaggtcgacggtaagcaactggtgaaagatttttctgcccaggttctacgtggcgacaaaattgccctgattggtccgaatggatgcggcaaaaccacgctgctgaaactgatgctcggtcagcttcaggcggacagcgggcgtattcacgttggcaccaaactggaagtggcttatttcgatcagcaccgtgcggaactggatcccgataaaacggtgatggataaccttgctgaaggtaagcaagaggtgatggttaacggcaagccacgccatgttttgggctatttgcaggacttcctgttccatccgaaacgggcgatgacgccggtacgtgcgctttctggcggtgagcgtaaccgcttgttgttggcgcgtttgttcctcaaaccaagcaacttattgattcttgacgaaccgaccaacgatcttgatgttgaaacgctggaactgctggaagaactgatcgacagctaccagggcacggtattgctggtgagccacgatcgtcagtttgtcgataacaccgttacagaatgctggatcttcgaaggcggcggtaaaattggtcgttatgtcggcggttatcatgatgcccgtggtcagcaagaacagtatgtggcgctcaaacagcctgcggtgaaaaaaatcgaagaagccgccgcgccaaaagcagaaactgtaaaacgcagcagtagcaaactaagctataaattgcagcgcgaactggagcagctaccgcaattgctcgaagatctggaggcgaagctggaagccctacagacgcaggtggcggatgcttccttcttcagtcagccgcatgagcagacgcaaaaagtgctcgccgatatggctgctgcagagcaggagctggagcaagcctttgaacgctgggagtatcttgaagcgttaaaaaatggtggctga

SEQ ID NO: 261440 - DNA, 1110 bp, Klebsiella pneumoniae
gtggcgacattaacccggctttttgttcatcctgttaaatcgatgcgcggcattggtcttacacatgccctggcagatatcagtggcctggccttcgatcgcatctttatgatcacggaacctgacggtacgtttattaccgctcgccagtttccccagatggtacggtttactccttcacctgtgcatgatggcttgcatctcaccgcaccagatggcagtagcgcatatgttcgttttgctgatttcgccacacaagacgcaccaaccgaagtttggggcacacattttaccgcgcgaattgcaccagacgcgatcaacaaatggctaagtggatttttctcccgcgaagtgcagttgcgctgggtggggccacaaatgacccggcgcgtgaaacgccacaacactgtacctctgtcatttgctgatggctatccttaccttcttgctaacgaagcctcgttacgtgatctccaacaacgttgtccggccagtgtaaaaatggagcaattccgccctaatctggtggtttccggcgcgtcagcctgggaagaagatcgctggaaagtgattcgcattggtgatgtggtatttgatgtggttaaaccttgtagccgctgtattttcaccaccgtcagcccagaaaaagggcaaaaacatccggcaggcgaaccattaaaaacattgcaatctttccgcactgcccaggataacggcgatgtcgattttggtcagaatttaattgcccgtaatagcggcgtgattcgcgttggcgatgaggtggaaattctggcaacggctccggcaaaaatttacggcgcagctgccgctgatgataccgccaacatcacgcaacaaccggacgcaaatgtagatattgactggcagggacaggcatttcgtggaaataaccaacaagtgttgctggagcaattagaaaatcagggaattcgtatcccttattcttgccgcgcgggcatttgtggaagttgccgtgttcagcttttagaaggcgaagtcacgccgctgaaaaaatcagcaatgggcgatgatggcaccattctttgctgtagctgtgtaccgaagactgcgcttaagctgacgcgttag

SEQ ID NO: 261441 - DNA, 738 bp, Klebsiella pneumoniae
atgccagcgcgacatttgtacttcattatgactaatacgtggaacagattgacgctctcgatttttgccgttttatcgctgctggtggcgggggaattgcaggcaggagtggtggttggcggaacgcgatttatcttcccggcagacagagaatcgatatctatttcactgactaataccagtcaggattcctggcttattaacagtaaaatcaatcgcccaacgcgttgggccgggggggaagcgtcgacagtgccagcaccattactggccgctccgccacttattctcctgaagcccggtactacaggcacgttgcgcttgctgagaacggaaagcgacatcttgcctgtggatcgcgaaacgctatttgagttaagcattgccagcgtaccatccggcaaagttgaaaatcagagcgtaaaagtggcgatgcgctcggtatttaaactgttctggcgacccgaaggtttgccgggcgacctgctggaagcttatcaacaattacgctggacacggaattcgcagggtgtacaactcactaacccaacgccttactacattaacctgattcaggtgagcgtaaatggtaaagcgttaagtaatgcgggagttgtgccacctaaaagccagcgtcagacaagctggtgtcaggcaatagcaccgtgtcatgtctcctggcggacgataaatgattacggcgggttgagtgcaaagaaggagcaaaatctgctctga

SEQ ID NO: 261442 - DNA, 513 bp, Klebsiella pneumoniae
ttgaaacggataatctggattctgtgcttactgggtttaacggggagttgtgagctatttgcccatgatggcacggtcaacatcagcggatcgtttcgccgtaatacatgcgtgctggcacaggatagcaagcaaatcaatgtgcagttaggcgatgtctcgctgacacgtttttctcatgggaactatggcccggagaaatctttcatcattaatttgcaggattgcggaacagatgtcagcacggttgacgttaccttttcaggaacacccgacggaatgcagagcgaaatgctgtccattgaaagtggtacggatgcagccagtgggctggcaattgctattctggatgatgtgaaaatattgattccgcttaaccaggcgagtaaagactacagcctacatagcggtaaggtgccattaactttttatgcgcaattgcgacctgttaatagcgatgtgcagtcgggtaaagtgaatgccagcgcgacatttgtacttcattatgactaa

SEQ ID NO: 261443 - DNA, 543 bp, Klebsiella pneumoniae
atgaagaaaaaaacaatatttcagtacgttatcttgttctttagctttcttaacacccatgtcgggatggctgggcctgaacaagtcagtatgcatatttatggtaatgtggtcgatcagggctgtgatgttgccaccaaaagcgcattacaaaatattcatattggcgattttaatatcagtgattttcaggctgcgaataccgtaagcacagctgctgatttgaatatcgatatcaccggttgtgccgctggtattactggcgcggacgtcctttttagcggcgaggctgacacccttgcgccgacactactcaaactaactgacacaggcggaagcggtggtatggcaacggggattgccgtgcaaattcttgatgcgcaaagtcagcaagaaatcccgctcaatcaggtccagcctcttacgcccttaaaagcgggggataacacactcaaatatcaacttcgttataagtccacaaaggcgggggctacgggcggtaatgcgacggcggttctctattttgatctggtttaccagtga

SEQ ID NO: 261444 - DNA, 1071 bp, Klebsiella pneumoniae
atgcagataatctatggagaaaaatgcgtgtcattactacgactattttttgccgccatcttaatgctatggtgcgctcaaactatggcttataccgggcagtgccataccgctcaggggaatccgtatattggcgtcaattttggcgttaaaaccctggatgaagaagaaaatacggccggagtagttaaagacaaattttatcagtggaacgaatcgaatgattactatgtttcttgtgattgcgataaagacaatgtcaggagtggcagatgggcattcgctgcggattcaccgttagtctatttaggcgacagctggtacaaaattaatgactatcttgccgccagggttttattacaggttaaaggtaattctcctacggcggttccattcgaaaacgtgggcaccgggggggatacccgatggcatatttgcgatcccggcggtcaacgtttaggcggccagggggctagcggtaatagcggtagcttttccctgaaaatattgcagccgttcattggctcggtcgtcattcctcctatgacgctggcacgattgtttgaatgctacaacatacccgcaggggattcctgtacgtcgtcaggcgacccggttttagtgtattacctgtctggcacgatcaattcacttggctcatgttccgtcaatgccggagagacaatcgaggtcgatctgggcgatgtatttgcggctaattttcgtgttgtagggcataagcctcttggggccagaacggctgaactcgcaatccctgtcaggtgtaacactggaaacgctgggttagttaaggtcaacctgagtctgacggcaacttcagaccccagctatccccaggcgattaagacttcacgtcctggcgtgggcattgtggtgaccgatagccagaacaacattatttccccggcgggtggaacactaccgctctctattcctgatgatgcagacagtatcgcgcgaatgaatgtctatccggttagcacgacaggcgtaccaccagaaaccgggcgatttgaagccacggcaacggtgagaataaattttgattaa

SEQ ID NO: 261445 - DNA, 2601 bp, Klebsiella pneumoniae
atgcctagaactcaccgacaacacagcctgttaacctctggtggagtgccatcgtttattggtgggctggtggtgtttgtgtcggcggcgttcaatgcacaagctgaaacctggttcgatcccgcctttttcaaagatgatccctcaatggtggccgatttgtcccgtttcgaaagagggcaaaaaataacgccaggcgtttatcgtgtcgatattgttctgaatcagacaatggtagatacgcgcaacgttaattttgttgagataacgccagagaaggggattgccgcctgcttgactactgaaagcctggatgcaatgggcgtgaatactgatgcgtttccggcttttaaacaactggacaaacaagcgtgtgcgccattggcagagattattccggatgccagcgtaacctttgatgtgaataaactccgtctggaaatttcagtaccgcaaattgctataaaaagtaacgcccgtggctatgttccccctgaacgctgggatgaagggatcaacgcactattactgggatattcttttagcggggccaacagtattcatagcagttcagatagtgattccacagatagctattttttgaatttaaacagtggcgtgaatttaggtccgtggcgattgcgcaataattccacgtggagtcgtagtagcggccaaaccgcagaatggaagaatctcagcagctatttgcagcgggcggttattcctctgaaaggcgaactgaccgtcggtgatgattataccgcaggcgattttttcgacagcgtcagctttcgtggcgtacagctggcgtcagatgacaacatgctgccagacagcctgaaagggtttgcgcctgtggtgcgtggtatcgccaaaagcaatgcccagataacgattaagcaaaacggctacaccatttaccaaacttatgtctcgccaggcgcttttgagattagtgatctctactccacgtcgtcgagcggtgatttgctggttgaaataaaagaagctgacggcagcatcaatagttacagcgtgcccttttccagtgtgccattactccagcgtcaggggcgaatcaaatacgcggtgacgctggcgaaatacagaaccaatagtaatgatcagcaagaaagtaaatttgctcaggccacgctgcaatggggcggaccgtggggaacgacctggtatggcggtggacaatatgctgaatattaccgtgccgctatgttggggctgggttttaacctcggcgatttcggagcgatttcgttcgacgcgacccaggcgaaaagtacactggcagaccaaagtgaacataaagggcagtcatatcgttttctgtatgccaaaacgctcaaccaattgggcactaactttcaattgatgggctatcgctattcgacgtcaggcttctacaccctttccgacaccatgtataaacacatggatggctacgaatttaatgacggtgatgatgaagatacgccgatgtggtcgcgttattacaatttgttttacaccaaacgtggcaaactgcaggtcaatatctcccagcaattaggcgattacggttcgttttatttaagtggtagccagcaaacatactggcataccgatcaacaggatcggctattacagtttggctacaacacgcaaattaaagatctctcactgggcgtttcctggaactacagtaagtcccgtggtcaacctgatgctgatcaagtatttgcacttaatttttccctgccgctcaatctgttgctccccagaagtaatgatagctataccaggaaaaaaaattacgcatggatgacctctaataccagtatcgataacgaagggcacactacacaaaatcttggtttaacggagacactgctcgatgacggtaacctgagctacagcgtgcaacagggatataacagcgaggggaaaacggcgaatggtagcgccagcatggactacaaaggggcgtttgcggatgcccgagtgggctacaactacagcgatagcggtagccaacaacaacttaactacgccctttcaggcagtttagttgcccattcacggggcattaccctggggcaatcactgggggaaaccaacgttctgattgcagcaccaggcgcggaaaatactcgtgtggcgaatagcaccgggctgaaaactgactggcgcggatataccgttgtcccctatgccacttcttatcgtgaaaatcgaatcgtacttgatgctgcatcgttaaaacgtaacgtggatcttgaaaatgcagtagtaaatgtagttcccaccaaaggggcgttggttctggcggagttcaatgcccatgcgggggcgagggtattaatgaaaacatcaaagcagggtataccgctgcgatttggcgcgatagcaacgctggatggggtacagaccaatagcggcataattgatgacgatggctcgctctatatgtccggtttgcccgctcagggagcgataactgtacgctggggtgaagctcccgatcaaatttgtcatatcagttaccagcttaccgaacaacaaattaacgctgcgattacgcgaatggatgccatatgcagataa

SEQ ID NO: 261446 - DNA, 702 bp, Klebsiella pneumoniae
atgaaaacttgcataacaaagggaattgtgaccgtaagtttaacggcaatattactcagctgttcgtccacatgggcggcaggtaaaggcggggttggacttgcagcaacacgtcttgtttattcggaaggtgaagagcaaatttcactgggtgtacgtaacaccagtccggatgttccttatctgattcagtcatgggtgatgacacctgataataaaaagtcagcggactttattattacaccaccgctatttgtgctgaatccggcaaacgagaatctgttacgcattatgtatattggtccgccgttggcgaaagacagagaaactcttttcttcaccagcgtacgggcagtcccttcaacaacgaagcgggaagaaggcaataccctgaagattgccacacaaagcgtcatcaaacttttctggcgaccaaaaggtttagcatatcccttagccgaggctccggcgaaactgcgttgcacttcgttagctgacatggttatggtcagtaacccaacaccttatttcattaccctgacagacctgaaaataggtggaaaagtagttaaaaatcaaatgatctccccctttgataaataccaattccctctgccaaagggtgctcaaaacagtagcgtaacgtaccgaaccatcaatgactacggggcggaaacgccgcaactcaactgtaaatcgtaa

SEQ ID NO: 261447 - DNA, 606 bp, Klebsiella pneumoniae
atgaaaaaattaatcttaccctgccttattgctaccgtattatcttccactgctgcatgggctgatcagactgtaacatcacaaaaagcgaataaaccttttacgatgggggtagtagtaaaagtcggtggcattccctggtttaatgtgatggaacaaggcattaaagatgaaggaaaactattgggggttgatgcatggcaggtcggccctacaacggcagatccagctgaacaggttcgggcgattgaagatttaattgcacgaaaagtggatgttattggggttgttcctaacgatgcaaaggttcttgaacctgtacttaagcgtgcacaagaagccggtattaaagttattacccacgaatcaccagatcaaaaaaatgcagattgggattttgagttgttaaatacccagacaatgggtgccaatcatatgaaagatatggcgaagtgcatgggcgaagaaggtaaatacgccatgtttgtcggcagtctgaccgtgcctttggtaaatgactgggccaatgccgcgattgcttatcaaaaagaacattatccaaatatgacgttggttgaagatcgggtgatgctgccaacttactga

SEQ ID NO: 261448 - DNA, 810 bp, Klebsiella pneumoniae; identical to SEQ ID NO: 9672

SEQ ID NO: 261449 - DNA, 693 bp, Klebsiella pneumoniae; identical to SEQ ID NO: 9673

SEQ ID NO: 261450 - DNA, 1005 bp, Klebsiella pneumoniae
atgttgaatacgctgattgtgggtgccagcggctacgctggcgcagagctagtgacctatgtaaatcgccatccgcatatgaacataaccgctttgactgtttcagcgcaaagcaatgatgcgggaaagttaatctccgatttgcatccgcagctaaaaggcatcgttgatctgccgttgcagccgatgtcggatatcagcgagtttagcccaggggtggacgtggtgtttctcgccaccgcccatgaagttagccacgatttagcgccgcaatttcttgaagcgggctgcgtggtgttcgacctttccggcgcgtttcgtgttaacgacgccaccttctatgaaaaatattacggctttacccatcaatacccggaactgttggaacaggcagcctacggtctggcggagtggtgcggtaataaattaaaagaagcgaacttgattgcggtgccgggctgttatccgacggcggcacagctggcgctgaaaccgttgattgatgccgatcttcttaacctcaatcagtggccggtgatcaacgccaccagcggcgtgagcggtgcgggacgtaaggcagcgatttcaaatagtttttgtgaagttagcctgcaaccgtatggcgtctttactcatcgccatcaaccagagatcgccacacacctcggtgctgacgttatcttcaccccacatctgggcaatttcccgcgcggcattctcgaaaccattacctgccgcctgaaatcgggtgtgacccaggcgcaagtcgcgcaagcgttacagcaggcgtatgcccataaaccgctggtgcggctgtatgacaaaggcgttccggcgctgaaaaatgtcgttgggctgccattttgcgatatcgggtttgccgttcagggcgagcatttgattattgtggcgaccgaagacaacttactgaaaggcgcggcggcacaagcggtacagtgcgccaatattcgtttcggctatgcggaaacgcagtctcttatttaa

SEQ ID NO: 261451 - DNA, 1734 bp, Klebsiella pneumoniae
atgcattccacagaagtccaggctaaacctctttttagctggaaagccctgggttgggcactgctctacttttggtttttctctactctgctacaggccattatttacatcagtggttatagtggcactaatggcattcgcgactcgctgttattcagttcgctgtggttgatcccggtattcctctttccgaagcggattaaaattattgccgcagtaatcggcgtggtgctatgggcggcctctctggcggcgctgtgctactacgtcatctacggtcaggagttctcgcagagcgttctgtttgtgatgttcgaaaccaacaccaacgaagccagcgagtatttaagccagtatttcagcctgaaaattgtgcttatcgcgctggcctatacggcagtggcagttctgctgtggacacgcctgcgcccggtctatattccaaagccgtggcgttatgttgtctcttttgccctactttatggcttgattctgcatccgatcgccatgaatacgtttatcaagaacaagccgtttgagaaaacgttggataacctggcatcgcgtatggagcctgccgcaccgtggcaattcctgaccggctattatcagtatcgtcagcaactaaactcgctaacaaagctactgaatgaaaataatgccttgccgccgctggcgaatttcaaagatgaatcgggtaacgaaccgcgcaccttagtgctggtgattggcgagtcgacccagcgtggccgcatgagtctgtacggttatccgcgtgaaaccacgccggagctggatgcgctgcataaaaccgatccgaatctgaccgtgtttaataacgtggtgacgtctcgtccgtacaccattgaaatcctgcaacaggcgctgacctttgccaatgaaaagaacccggacctgtacctgacacagccgtcgctgatgaacatgatgaaacaggcgggttataaaaccttctggatcaccaaccagcagacgatgaccgcccgcaataccatgctgacggtattttcgcgccagaccgacaagcagtactacatgaaccagcaacgtacgcagagtgcgcgtgaatacgacaccaacgtgctgaagccgttccaggaagtgctgaatgaccctgcgccgaagaaactgatcatcgttcatctgctgggtacgcatatcaaatacaaataccgctacccggaaaatcagggcaagtttgatggcaataccgatcatgttccgccgggattaaacgcggaagagctggagtcatataacgattatgacaacgctaacctgtataacgatcatgtggttgccagcctgattaaagactttaaagcagcagacccgaacggtttcctggtttacttctctgaccacggtgaagaggtttacgacacgccgccgcacaaaactcaggggcgtaacgaagacaacccgacgcgtcatatgtacaccattccgttcctgctgtggacgtcggaaaaatggcaagcgactcatccgcgtgatttctcgcaggatgttgatcgtaaatacagccttgcggaactgatccacacctggtcagatttggcgggcttatcttacgacggttacgatccaacccgttcagtggtgaatccgcagttcaaagaaactacccgctggattggtaacccgtacaagaaaaacgcgctgatcgattacgacacgctgccatatggcgaccaggtaggtaatcagtaa

SEQ ID NO: 261452 - DNA, 243 bp, Klebsiella pneumoniae
  misc_feature (207)..(216): n is a, c, g, or t
atgtatcacgacgtcagctatctgctctcccgcctgatcaacggcccgctgtccctgcgccagatttactttgccagcagcaacggtccggtccccgatctcgcgtatcaggtcgattttccacggctggaaattgtgctggaaggtgagtttgttgataccggcgctggagcaacgttagttcccggcgatgtgctgtacgttccnnnnnnnnnnatggcaagcccccgccactacctttag

SEQ ID NO: 261453 - DNA, 648 bp, Klebsiella pneumoniae
  misc_feature (17)..(26): n is a, c, g, or t
atgtgctgtacgttccnnnnnnnnnnatggcaagcccccgccactacctttagcgtgctgtttggcaaacagcaactcggcttcagcgtcgtgcaatgggatggcaaacaatatcaaaatctggcgaagcaacacgtcgcccggcgcggcccacgcataggttcttttctgctacaaacgctcaatgaaatgcaaatgcagccgcaggagcagcaaacggcaaggcttatcgtcgccagcctgcttagccactgccgcgatttgcttggcagccaaatccagaccgcctcacgcagtcaggcactatttgaagctattcgtgattatatcgacgaacgctatgcctccgcgcttacccgcgaatctgtcgcacaggcattctatatttcgccaaattacctctcgcacctgtttcaaaaaacgggggccattggttttaacgaatacctcaatcacacgcgactggagcacgctaagacgttattgaaaggctatgacctgaaggtaaaagaagtggcgcacgcctgcggctttgtcgacagcaactacttctgccgtctgtttcgtaaaaataccgaacgctcaccgtcggaatatcgtcggcagtaccacagccaactgacagaaaaaccgactactccagaatga

SEQ ID NO: 261454 - DNA, 342 bp, Klebsiella pneumoniae
atggcatacctggtggcagtaaccgcctgcgtaagcggcgtggcgcatacatatatggcggcggaacggctggaaaagttgtgccagttagagaagtggggcgtcagcattgaaacccagggcgcgttgggaacggagaatcgtttagcggacgaggatatccgccgggcggatgttgcgctgttgattacggatatcgagcttgccggtgctgagcgatttgaacattgccgctatgtgcaatgcagcatctacgctttcctgcgtgagccgcagcgggtgatgagcgcggtacgcaaagtgctttctgcgccgcagcaaacccatctcattctggagtag

SEQ ID NO: 261455 - DNA, 879 bp, Klebsiella pneumoniae
atgacatcatccgccggacagcgcatcagctgtaacgttgtggaaacgcgccgcaatgatgtggcgcgcattttcaacattcagcgttattcactgaatgacggcgagggcattcgtacggtggtcttttttaaaggctgtccacatctttgcccgtggtgtgctaatccggaatcgatctccggcaaaatccagactgtacgcagagaggcgaaatgtctgcactgtgcgaaatgtttgcgtgatgcggatgaatgcccctccggggcgtttgaacggattggtcgcgatatcagccttgacgcgctggaacgggaagtgatgaaagatgacattttctttcgcacgtccggcggcggcgtcacgctttctggcggcgaagtgttaatgcaggcggaatttgctacccgttttttacagcgactgcggctgtggggtgtgtcatgtgccattgaaactgccggagacgcgccagccagcaagctgttaccgctggcgaaattgtgcgatgaagtgttgttcgatttaaaaattatggacgcgactcaggcgcgggatgtggtgaagatgaacctgccacgcgtgctggagaatctgcgtttgctggtgagtgagggcgtcaacgtgatcccgcgtttaccgttgatccctggtttcacgctcagccgggagaatatgcagcaggcgctggacgtgctgatcccgctgaatatcaagcagatccatctgttaccgtttcatcagtacggcgagccgaaataccgcctgctggggaaaacatggtcgatgaaagaggttgctgcgccgtcgtcagccgatgtggcaacgatgcgtgaaatggcagaacgggccggatttcaggttaccgtgggaggttaa

SEQ ID NO: 261456 - DNA, 2502 bp, Klebsiella pneumoniae
atggccctgattgtggaatttatttgtgagctacctaacggcgtacatgcgcgcccggcaagccacgttgaaacgctgtgtaatactttttcatcacaaattgagtggcataacctgcgcactgaccgcaagggcaacgccaaaagcgcccttgcgctgattggcaccgatacgctggtgggcgataactgccagttactgatttccggggccgacgaacaggaagcgcaccagcgtttaagccaatggctgcgcgatgaattcccccactgcgacgcaccgctggcggaagtaaaatctgacgaactggaaccactgccggtttcactgaccaatctgaatccgcgaattatccgcgcccgcaccgtgtgcagcggtagcgcaggcggcattctgacgccgatctcttctttagatctcaatgcgctgggtaatcttcccgctgccaaaggcgttgatgccgaacaatccgcactggaaaacggcctgacgctggtactgaaaaacatagagtttcgtctgctggatagcgacggtgctaccagcgcgattctggaagcgcaccgatccctggctggcgatacttccctgcgcgaacatttactggcaggcgtcagcgagggattaagctgtgccgaagcgattgtcgccagtgcacaccacttctgcgaagagttcgcccgttccagcagcagctacctgcaagaacgcgccctggacgtacgcgacgtctgcttccagttactccagcaaatctacggtgagcaacgcttcccggcaccgggcaaactgacgcagcccgccatttgtatggctgatgaactaacccccagccagttcctcgaactggataaaaatcacctcaaaggattgttgctcaaaagcggcggcaccacctcacataccgtaattcttgcccgttcgttcaacattccgacgctggttggtgtggatattgatgcccttaccccgtggcaacatcaaacgatttatatcgacggcaacgccggagcgattgtggttgagccaggggaagccgtagcccgttattatcagcaagaagcccgcgtacaggatgccctgcgtgagcaacagcgtgtctggctgacccaacaagcccgtaccgctgatggtatccgcattgaaattgctgctaacatcgctcactccgtggaagcgcaggccgcattcggcaatggtgcggaaggagttggtttgttccgcactgaaatgctctatatggatcgcaccagcgcaccgggcgaaagcgagctgtacaacattttttgtcaggcgctggagtccgccaacggacgcagcattattgtgcgcactatggatattggcggtgacaaacccgttgattatctgaacattcccgcagaggcaaacccgttcctcggttatcgcgccgtgcgtatttatgaagagtacgcgtcgttatttaccacacaactacggtcgattctccgtgcctccgctcacggcagcctgaaaatcatgatcccgatgatctcttcaatggaagagatcttatgggtgaaagaaaaactggcggaagccaaacagcaactgcgcaatgaacatattccgtttgatgagaagatccagcttggcatcatgcttgaagtgccgtcggtgatgttcatcatcgatcaatgctgtgaagagattgatttctttagtattggtagtaatgacctgacgcaatatctgctggcagtagatcgcgataacgctaaggttactcgtcactacaacagcctgaatccggcattcttacgggcgctcgattacgccgtgcaggcggtgcatcgccagggcaaatggattggtctgtgcggtgaactgggagcgaaaggttccgtgctgccgttgctggtcggtttagggctggatgagctgagcatgagcgcaccatcaattccggcggcgaaagcgcggatggcgcaacttgatagccgcgaatgccgccagttgctcaaccaggcaatggcctgccgtacttcgctggaagtggaacacctgctggcgcaattccgcatgacccaacaggacgcgccgctggtcaccgccgagtgcatcacgctggaaagcgactggcgcagcaaagaagaagtgctgaaaggcatgaccgataacctgctactggcgggccgctgccgctatccgcgtaaactggaagccgacttgtgggcacgcgaggccgttttctctaccggtctgggctttagttttgccattccccacagcaaatcggaacatattgagcaatccaccatcagcgtagcgcgtctgcaagcgccggtgcgctggggcgatgatgaagcacaattcatcattatgttaaccctgaacaaacatgctgcgggcgatcagcacatgcgcattttctcgcgcctcgctcgccgcatcatgcacgaagaattccgtaacgcgctggttaacgccgcctctgccgacgctatcgccagcctgctgcaacatgaactggaactgtaa

SEQ ID NO: 261457 - DNA, 663 bp, Klebsiella pneumoniae
atggaactgtatctggacaccgctaacgtcgcagaagtcgaacgtctggcacgtatattcccgattgccggggtgacaactaacccgagcattatcgctgccagcaaggagtccatctgggaagtgctgccgcgcctgcaaaaagcgatcggtgatgagggcattctgtttgctcagaccatgagccgtgatgcgcagggaatggtggaagaagcgaagcgcctgcgcgacaccattccgggcattgtggttaaaatcccggtgacttccgaaggtctggcagcaattaaaatactgaaaaaagagggtattactatacttggcaccgctgtatatagcgccgcacaagggttattagccgcactggcaggggcaaaatacgttgctccgtatgttaaccgcgtagatgcccagggcggagacggcattcgtacggttcaggagctgcaagcgctgttagaaatgcacgcaccagaaagcatggtgctggcggccagctttaaaacgccgcgtcaggcgctggactgtttactggcaggatgtgaatccatcaccctgcccttagatgtagcgcaacaaatgctcaacacccctgcggtagagtcagctatagagaagttcgaacacgactggaatgccgcatttggcactactcatctctaa

SEQ ID NO: 261458 - DNA, 618 bp, Klebsiella pneumoniae
atgaaagcttcactggcgctggtcagcctgctaacggcgtttaccagcaactccttaaaatctccggccgttccaccaaccgtggtacaaatccaggccaacaccaaccttgccatcgcagacggtgccagacagcaaatcggcagcacgctattttacgatccggcgtatgtgcagcttacctatcctggcggtgatgtcccgcaagaacgcggcgtatgttccgatgtggtgatccgcgccttgcgcagccagaaggtcgatttgcagaaactggttcacgaagatatggcgaagaattttgctgagtacccgcaaaaatggcagttaaagcgcccggacagcaacatcgatcaccgtcgggtgcctaatctggaaacctggtttagccgccatgataaaacacgccccaccagcaagaaccccagtgactatcaagcgggcgatattgtctcctggcgactggataacgggctggcgcatattggggtggtgtcagatggctttgcccgcgacggtacgccgctggtgatacataacattggcgcaggcgcgcaggaagaagacgtgctgtttagctggcggatggtggggcactatcggtattttgttaaataa

SEQ ID NO: 261459 - DNA, 906 bp, Klebsiella pneumoniae
atgtctgccgcaggaaagagcaacccactggcaatcagtggcctggttgtgctcacacttatctggagttatagctggattttcatgaagcaagtcaccagctacatcggtgccttcgacttcaccgccttacgctgcattttcggcgctctcgttttattcattgtccttttattacgtggtcgcggaatgcgcccgacaccgtttaaatacaccttagccattgccctgttacaaacctgtgggatggttggcctggcgcagtgggcgctggttagcggaggagcggggaaggtggcgatcctgagctataccatgccgttctgggtggtgattttcgccgcgttgtttctcggtgaacgcctgcgacgtgggcaatatttcgcgatactgattgccgctttcggcttatttttggtgttgcagccgtggcaactcgatttctcttcgatgaaaagtgccctgctggcaatcctctccggtgttagttggggggcgagcgcgattgtcgcgaaacgcctatacgcccgccatccacgcgtggatttattgtcgttaacatcctggcagatgctttatgcggcgctggtgatgagtgcggtcgctttactggtgccacaacgtgaaattgactggcagcccaccgtgttctgggctctggcctacagtgcgattctggcgacggcgctggcgtggagcttatggttgtttgtattgaaaaacttgcctgccagtattgccagcttaagcacactggccgttcccgtttgcggcgtactcttttcctggtggttgctcggtgagaatccgggggccgttgaaggtagcggtattgtgctgattgtgctggcactggcgctggtgagccgtaagaaaaaagaagctgtcagtgtaaaaaacatctga

SEQ ID NO: 261460 - DNA, 2181 bp, Klebsiella pneumoniae
atgagcacgtcagacgatatccataacacgacagccaccggcaaatgcccgttccatcagggcggtcacgaccagagcgcaggtgggggcacaaccacgcgcgactggtggccaaatcaactccgtgttgacctgttaaaccaacattctaatcgttctaacccgctgggtgaggactttgactaccgcaaagaattcagcaaattagattactacggtctgaaaaaagatctgaaagccctgctgacagaatctcagccgtggtggcctgccgactggggcagctacgccggtctgtttattcgtatggcctggcacggcgcgggtacttaccgttccatcgacggacgcggcggcgcgggtcgtggtcagcaacgttttgcaccgctgaactcctggccggataacgtaagcctcgataaagcgcgtcgcctgttgtggccaatcaaacagaaatatggtcagaaaatctcctgggccgacctgtttatcctcgcgggtaacgtggcgctggaaaactccggcttccgtaccttcggttttggtgccggtcgtgaagacgtctgggaaccggatctggatgttaactggggtgatgaaaaagcctggctgacccaccgtcatccggaagcactggcgaaagcaccgctgggcgcaaccgagatgggcctgatttacgttaacccggaaggcccggatcacagcggcgaaccgctttctgcggcagcagctatccgcgcgaccttcggcaacatgggcatgaacgacgaagaaaccgtggcgctgattgcgggtggtcatacgctgggtaaaacccacggtgccggtccgacatcaaatgtaggtcctgatccagaagctgcaccgattgaagaacaaggtttaggctgggcgagcacttacggcagcggcgttggcgcagatgccattacctctggtctggaagtagtctggacccagacgccgacccagtggagcaactatttcttcgagaacctgttcaagtatgagtgggtacagacccgcagtccggctggcgcaatccagttcgaagcggtagacgcaccggaaattatcccggatccgttcgatccgtcgaagaaacgtaaaccgacaatgctggtgaccgacctgacgctgcgttttgatcctgagttcgagaagatttctcgtcgtttcctcaacgatccgcaggcgttcaacgaagcctttgcccgtgcctggttcaaactgacgcacagggatatggggccgaaatctcgctacatcgggccggaagtaccgaaagaagatctgatctggcaagatccgctgccgcagccgatctacaacccgaccgagcaggacattatcgatctgaaattcgcgattgcggattctggtctgtctgtcagcgaactggtatcggtggcctgggcgtctgcttctaccttccgtggtggcgacaaacgtggtggtgccaatggtgcacgtctggcattaatgccgcagcgcgactgggatgtgaacgccgcagccgttcgtgctctgccagttctggagaaaattcagaaagagtctggcaaagcttcgctggcggatatcatcgtgctggcaggtgtggttggcgttgagaaagccgcaagcgccgcaggtttgagcattcatgtaccgtttgcgccgggtcgcgttgatgcgcgtcaggatcagactgacattgaaatgttcgaactgctggagccaattgctgacggtttccgtaactaccgcgctcgtctggatgtttctaccaccgagtcactgctgattgataaagcacagcaactgacgctgaccgcgccggaaatgaccgcgctggtgggcgggatgcgtgtactgggtgccaacttcgatggcagcaaaaacggcgtcttcactgaccgcgttggtgtattgagtaatgacttcttcgtgaacttgctggatatgcgttacgagtggaaagcgaccgacgaatcgaaagagctgttcgaaggccgtgaccgcgaaaccggcgaagtgaaatacactgccagccgtgcggatctggtctttggttctaactctgtcctgcgtgcggtggcggaagtttacgccagcagcgatgcccacgagaagtttgttaaagacttcgtggcggcatgggtgaaagtgatgaacctcgaccgtttcgacctgctgtaa

SEQ ID NO: 261461 - DNA, 891 bp, Klebsiella pneumoniae
atgagcttttttcacgccagccagcgggatgccctgaatcagagtctggcagaagtccaggggcagattaacgtttcgttcgagtttttcccgccgcgcaccagtgaaatggagcagaccctgtggaactccatcgatcgccttagcagcctgaaaccgaagtttgtatcggtgacctatggcgcgaactccggcgagcgcgaccgtacgcacagcattattaaaggcattaaagatcgcactggtctggaagcggcaccgcatcttacttgcattgatgcgacgcccgacgagctgcgcaccattgcacgtgactactggaataacggtattcgtcatatcgtggcgctgcgtggcgatctgccgccgggaagcggtaagccagaaatgtatgcttctgacctggtgacgctgttaaaagaagtggcagatttcgatatatccgtggcggcgtatccggaagttcacccggaagcaaaaagcgctcaggcggatttgcttaatctgaaacgcaaagtggatgccggagccaaccgcgcgattactcagttcttctttgatgtcgaaagctacctgcgttttcgtgaccgctgcgtatcggcgggcattgatgtggaaatcattccgggaattttgccggtctcgaactttaaacaagcgaagaaatttgccgacatgaccaacgtgcgtattccggcgtggatggcgcaaatgtttgacgggctggatgacgatgccgaaacccgcaaactggtgggcgcgaatattgcgatggatatggtgaagattttaagccgtgaaggagtgaaagatttccacttctatacgcttaaccgtgctgaaatgagttacgcgatttgccatacgctgggtgttcgacctggtttataa

SEQ ID NO: 261462 - DNA, 1266 bp, Klebsiella pneumoniae
atgaatactatgccgtttgatgccgtcacgataggcaaccatgaatttgaccacggctgggacaacacattattacagttgagtcaggcaaaattccctattgtgcagggcaatgttttttatcagaacagcagtaaatcattctgggataagccatataccatcatcgaaaaagacggcgtgaaaataggcgttataggtttgcacggtgtatttgcctttaatgacacggtatctgcggcaacgcgagtggggattgaagcgcgtgatgaaattaaatggctacaacgttatatcgatgaacttaaaggcaaggttgatttgaccgtcgccctgatccatgaaggtgttccggcccgccagtccagtatgggaggcacagatgtgcgtcgcgcgctggataaagatattcagacggcaagtcaggtgaaagggctggatattttgatcaccggacatgcgcatgtgggtacgccggaaccgattaaagtcggcaatacgctcatcctctccactgacagcggcgggattgatgtgggcaaactggttctcgactacaaagagaagccgcatgattttacggtgaaaaacttcgagcttaaaaccatttacgccgacgagtggaagcccgatccgcaaacaaaacaggtgatcgacggctggaataaaaagcttgatgaagtggtgcaacaaacggtcgcgaaatcgccggttgaattaaaacgtgcctatggtgaatcggcttccctcgggaacctggcggctgatgctttactggtagcggcgggtaaaaacacccaattggcgttaaccaactctggcggcattcgcaatgagatccccgcaggggcgattacgatgggcggcgtcatcagtaccttcccgtttcccaacgaactggtgacgatggatctcacgggtaaacaattacgcagtttgatggaacacggcgcaagtttaagtaatggcgttttacaggtatcgaaaggcctggaaatgaagtacgacagcagtaagccggttggtcagcgggtaatcacgctgactctgaatggcaaacccattgaagatgcgacgatttaccacattgctactcagagtttccttgctgatggtggagatggttttaccgcctttaccgaagggaaagcgcgtaacacaacgggcggttattacgtttatcacgccgtggttgattacttcaaagcgggtaacaccatcacggatgaacagatcaacggtatgcgcgtgaaagatatcaagtaa

SEQ ID NO: 261463 - DNA, 186 bp, Klebsiella pneumoniae; identical to SEQ ID NO: 9674

SEQ ID NO: 261464 - DNA, 1131 bp, Klebsiella pneumoniae
atgtcgactctgtttacgattaatgcctgcaagtcgtttggttgtcgtaatttagggcaaccaacatcgacagattacagctggccagactatcgactgggttatccggcactgcactgtcgggcatgtggaagttacccgccgttgtttgacgaacagcaatttcgtgactggttgtcagttcacttatctacttttgcaactgagaaaggtcatttctgcccggtatgttatggcacaaagacgatttgttatggccacaatccacaggggtcgcaacgcattcaatgtcgtaactgcaaaaaagtctggacacctaaacaatatcagaaagaaataacgcctcctgaaataatcgaaacggttgctcttctggtgccatttcagggagccagcggcgggcagaaactgtatgttttaatcagttttgatgctcttcgcggtaatattcttcatctttctactaattacacgcagcatcaggctggagaaagtctgcattatcgatacagagggaatgcagaaccagagttacacgagagtaatattgtacaacgcgttgatatgcgcgaagcacaatttctacgccgcagtcagtttgatgagattcaatatggcagcgcagcgctcaaacgcaatgctaaaggtgttattctgcgtccggttatcactgcacacgggcatttcagagtactgaatattttattccctacagtaaaaacacatgtaatttcacacgagtgttttttaagaggtgccattattacggcatgggctgatctgtttcgccaacagcaaggtgagatttggtttattgaagaggaaatagctgacgataccgataatatgccctggcgttttcagggaacaacttatcacggctggtggaaaaatcagtggcaactctgggttcagggcaaaaatcgtaaaatggtatgtgcattaacgggcggaaataacagcaaagcagaaatgctctctttagcaaccagcagacattttatcgactggctacataaacaagcagtatttactcacagcgccccgctttccgcagggcgcgttacgcaaatactgctttctctggctcaggattacaacaactgcgccaggcggttaatatccgactga

SEQ ID NO: 261465 - DNA, 2433 bp, Klebsiella pneumoniae
atgagtgtgattgcgcaggcaggggcgaaaggtcgtcaactgcataaatttggtggcagtagtctggctgatgtgaagtgttatttgcgtgtcgcgggcattatggcggagtactctcagcctgacgatatgatggtggtttccgccgccggtagcaccactaaccagttgattaactggttgaaactaagccagaccgatcgtctctctgcgcatcaggttcaacaaacgctgcgtcgctatcagtgcgatctgattagcggcctgttacccgccgaagaagccgatagcctcattagcgcttttgtcagcgatctggaacgcctggcggcgctgctcgacagcggtattaacgacgcggtgtatgcggaagtggtgggccacggcgaagtgtggtcggcgcgcctgatgtctgcggtacttaatcaacaagggctgccagcggcctggcttgatgcccgcgagtttttacgcgctgaacgcgctgcgcaaccgcaggttgatgaagggctttcttacccgttgctgcaacagctactggtacaacatccgggtaaacgtctggtggtgaccgggtttatcagccgtaacaacgctggtgaaacggtgctgctggggcgtaacggttccgactattccgcgacacaaatcggtgcgctggcgggtgtttctcgtgtaaccatctggagcgacgtcgccggggtatacagtgccgatccgcgtaaagtgaaagatgcctgtctgctgccattgctgcgtctggatgaagctagcgaactggcgcgtctggcggctcccgttcttcacgcccgtactttacagccagtttctggcagcgaaatcgacctgcagctgcgctgtagctacacgccggatcaaggctccacgcgcattgaacgcgtgctggcctccggtactggtgcgcgtattgtcaccagccacgatgatgtctgtttgattgagtttcaggtgcccgccagccaggatttcaaactggcgcataaagagatcgaccagatcctgaaacgcgcgcaggtgcgtccactgtcagttggcgtgcataacgatcgccagttgctgcaattttgctacacctcagaagtggccgacagtgcgctgaaaatcctcgacgaagcgggattacctggcgaactgcgtctgcgccaggggctggcgctggtggcgatggtcggggcgggcgtcacccgtaacccgctgcattgtcaccgcttctggcagcaactgaaaggccaaccggtcgagtttacctggcagtccgatgacggcatcagcctggtggcagtactgcgcaccggaccgaccgaaagcctgattcaggggctgcatcagtccgtcttccgcgcagaaaaacgcatcggcctggtattgttcggcaagggcaatatcggttcccgctggctggaactgttcgcccgtgagcagagcacgctttcggcgcgtaccggctttgaatttgtgctggcaggcgtggtggacagccgccgcagcctgttgagctatgacgggctggacgccagccgcgcgttagccttcttcaacgatgaagcggtcgagcaggatgaagagtcgctgttcctgtggatgcgcgcccatccgtatgatgatttagtggtgttggacgttaccgccagccagcagcttgctgatcagtatctcgattttgccagccacggtttccacgtcatcagcgccaacaaactggcgggagccagcgacagcaataaatatcgccagatccacgacgccttcgaaaaaaccgggcgtcactggctgtacaacgccaccgtcggtgcgggattgccgatcaaccataccgtgcgcgatctgatcgacagcggcgatactattttgtcgatcagtgggatcttctccggcacgctctcctggctgttcctgcaattcgacggtagcgtgccgtttaccgagctggtggatcaggcgtggcagcagggcttaaccgagcctgatccgcgtgatgacctttccggcaaagacgtgatgcgcaagctggtgattctggcgcgtgaagcgggttacgacatcgaaccagatcaggtgcgcgtggaatcgctggtgcctgcccattgcgaaggcggtagcatcgaccatttctttgaaaacggcgatgaacttaacgagcagatggtgcaacgactggaagcggcccgcgaaatggggctggtgctgcgctatgtggcgcgtttcgatgccaatggcaaagcgcgtgtgggcgtggaagcggtgcgtgaagaccatccgctggcatcactgctgccgtgcgataacgtctttgccatcgaaagccgctggtatcgcgataaccctctggtgatccgtgggcctggcgcggggcgcgacgtcaccgcaggggcgattcagtcggatattaaccgcctggcgcagttgttgtaa

SEQ ID NO: 261466 - DNA, 1161 bp, Klebsiella pneumoniae
atgacgcgtaaacaggccaccatcgcagtgcgtagcgggttaaatgacgacgaacagtatggttgcgttgtccctcccatccatctttccagcacctataactttaccggatttaatgaaccgcgcgcgcatgattactcgcggcgcggcaacccaacgcgcgatgtggttcagcgtgcgctggcagaactggaaggcggtgctggtgcagtacttactaataccggcatgtccgcgattcacctggtaacgaccgtctttttgaaacctggcgatctgctggttgcgccgcacgactgctacggaggcagctatcgcctgttcgacagcctggcgaaacgcggttgctatcgcgtgttgtttgttgatcaaggcgatgaacaggcattacgggcagcgctggcagaaaaccccaaactggtactggtagaaagcccaagtaatccattgttacgcgtcgtggatattgcgaaaatctgccatctggcaagggaagtcggggcggtgagcgtggtggataacaccttcttaagcccggcattacaaaatccgctggcattaggtgccgatctggtgttgcattcatgcacgaaatatctgaacggtcactcagacgtggtggccggcgtggtgattgctaaagatccggacgttgtcaccgaactggcctggtgggcaaacaatattggcgtgacgggcggcgcgtttgacagctatctgctgctacgtggtttgcgaacgctggtgccgcgtatggagctggcccagcgcaacgcgcaggcgattgtgaaatatctgcaaacccagccgttggtgaaaaaactgtatcacccgtcgctgccggaaaatcaggggcatgaaattgccgcgcgccagcaaaaaggctttggcgcaatgttgagttttgaactggatggcgatgagcagacgctgcgtcgtttcctgggcgggctgtcgttgtttacgctggcggaatcattagggggagtggaaagtttaatctctcacgccgcaaccatgacacatgcaggcatggcaccagaagcgcgtgccgccgccgggatctccgagacgctgctgcgtatctccaccggtattgaagatggcgaagatttaattgccgacctggaaaatggcttccgggctgcaaacaaggggtaa

SEQ ID NO: 261467 - DNA, 318 bp, Klebsiella pneumoniae
atggctgaatggagcggcgaatatatcagcccatacgctgagcacggcaagaagagtgaacaagtcaaaaagattacggtttccattcctcttaaggtgttaaaaatcctcaccgatgaacgcacgcgtcgtcaggtgaacaacctgcgtcacgctaccaacagcgagctgctgtgcgaagcgtttctgcatgcctttaccgggcaacctttgccggatgatgccgatctgcgtaaagagcgcagcgacgaaatcccggaagcggcaaaagagatcatgcgtgagatggggattaacccggagacgtgggaatactaa

SEQ ID NO: 261468 - DNA, 609 bp, Klebsiella pneumoniae
atgaaaatcaggctactgatcctcagcctgctggtttctgtgcctgcatttgcctggcaaccacaaaccggcgacatcatctttcagatctctcgctcatcgcaaagtaaagcgatccaactggcgacccattccgattacagccacaccggtatgctggtgatacgcaacaaaaagccctacgtttttgaagcggtcggcccggtgaaatacaccccgctcaagcagtggattgcccatggtgaaaagggcaaatacgttgttcgccgcgttgaaggcggactgagtgttaaacaacagcaaaaactggcgcaaacggcaaaacgttatctcggcaaaccgtatgatttcagcttctcgtggagcgacgatcgccagtactgttcggaagtggtgtggaaggtttatcagaatgcgctgggaatgcgcgtgggcgaacagcagaagttgaaagagttcgacctgagcagcccacaagttcaggcaaagctcaaagaacgttacggcaagaatattccgcttgaggaaacggtggtctcgccacaagccgttttcgatgcgccacaactcaccactgttgccaaagaatggccgctgttttcgtggtaa

SEQ ID NO: 261469 - DNA, 273 bp, Klebsiella pneumoniae; identical to SEQ ID NO: 9675

SEQ ID NO: 261470 - DNA, 279 bp, Klebsiella pneumoniae; identical to SEQ ID NO: 9676

SEQ ID NO: 261471 - DNA, 357 bp, Klebsiella pneumoniae; identical to SEQ ID NO: 35783

SEQ ID NO: 261472 - DNA, 201 bp, Klebsiella pneumoniae; identical to SEQ ID NO: 35785

SEQ ID NO: 261473 - DNA, 699 bp, Klebsiella pneumoniae; identical to SEQ ID NO: 35786

SEQ ID NO: 261474 - DNA, 2016 bp, Klebsiella pneumoniae; identical to SEQ ID NO: 35787

SEQ ID NO: 261475 - DNA, 864 bp, Klebsiella pneumoniae; identical to SEQ ID NO: 35788

SEQ ID NO: 261476 - DNA, 879 bp, Klebsiella pneumoniae; identical to SEQ ID NO: 35791

SEQ ID NO: 261477 - DNA, 573 bp, Klebsiella pneumoniae; identical to SEQ ID NO: 35792

SEQ ID NO: 261478 - DNA, 618 bp, Klebsiella pneumoniae; identical to SEQ ID NO: 9477

SEQ ID NO: 261479 - DNA, 2019 bp, Klebsiella pneumoniae; identical to SEQ ID NO: 35795

SEQ ID NO: 261480 - DNA, 948 bp, Klebsiella pneumoniae; identical to SEQ ID NO: 35796

SEQ ID NO: 261481 - DNA, 1440 bp, Klebsiella pneumoniae; identical to SEQ ID NO: 35797

SEQ ID NO: 261482 - DNA, 651 bp, Klebsiella pneumoniae; identical to SEQ ID NO: 35798

SEQ ID NO: 261483 - DNA, 1566 bp, Klebsiella pneumoniae
atgttcgctttactcctgctcacgccgctgcttttttcgctgctctgttttgcctgccggaaacgggggcactctgcgactcgcacggtgacagtactacatggcttagggatcacactgctgctgattctggcactgtgggtggtccaaactgccgctgatgcgggagaaatattcgctgcgggactgtggcttcacattgatggtctgggcggtttgttcctcgccattcttggtgtgattggctttctcaccggtgtttactcgattggctacatgcgtcatgaagtggcacacggcgagctttcacccgttacgctgtgcgattactacggtttcttccatctgtttttgttcaccatgctgctggttgttaccagcaataacctgattgtgatgtgggcggcaattgaagccaccaccttaagctcggcgtttctggtaggcatttacggtcagcgttcatcgctggaagctgcatggaagtacatcattatttgtactgttggtgtcgcttttggtctgttcggtaccgtgctggtatacgccaacgccgccagcgttatgccgcaggcagaaatggcgatattctggagcgaggttcttaagcaatcgtccttgcttgacccaacattaatgctgttggcctttgtgtttgtgctaattggctttggcaccaaaaccgggctattccccatgcacgcctggctgccagatgctcacagtgaagcgccgagtccggtcagcgccctgctctccgccgtattgctgaactgcgcgctgttggtgcttattcgctattacatcattatttgccaggccatcggcagcgatttccccaaccggttgttgctcatcttcggcatgttgtcggttgccgtggcggcatttttcattctggtacagcgggacattaagcgtctgctggcgtactccagcgtggagaacatgggactggtcgcggtggcgttaggcattggcgggccgctgggaatttttgccgcgctgctgcacaccttaaaccacagtctggccaaaacgctgttgttctgcggttccggcaatgtactgctcaagtacggcacgcgcgatctcaacgtcgtctgtgggatgctcaaaatcatgccatttaccgccgtgttgtttggcggcggtgcgctggcgctggccgggatgccgcccttcaacatttttcttagcgaatttatgaccgttaccgccggactggcgcgtaatcatctgctgcttatcgtcctgctgttattgctgttaacgctggtgctggcgggcctggtacggatggctgcacgggtattaatggcgaaaccgccgcaggccgttaaccggggtgaacttggctggttgaccacctcgccaatggtgattctgctggtcatgatgctggcgatgggaacgcatattccacaacctgtcatcaggatcctggcgggcgcttccactatagtcctctcagggacgcacaacctgcctgcacaacgtagcacctggcatgattttttgccttcaggcaccgcatctgtttcggagaaacacagtgaacgttaa

SEQ ID NO: 261484 - DNA, 1716 bp, Klebsiella pneumoniae; identical to SEQ ID NO: 35800

SEQ ID NO: 261485 - DNA, 546 bp, Klebsiella pneumoniae; identical to SEQ ID NO: 35801

SEQ ID NO: 261486 - DNA, 759 bp, Klebsiella pneumoniae; identical to SEQ ID NO: 35802

SEQ ID NO: 261487 - DNA, 414 bp, Klebsiella pneumoniae; identical to SEQ ID NO: 35803

SEQ ID NO: 261488 - DNA, 2013 bp, Klebsiella pneumoniae
atggctatgtcagacgaggcgatgtttgccccgccgcaaggaataacaattgaagcggtaaacggaatgctcgcggagcggttagcgcagaaacacggcaaggcgtctttattacgcgccttcatcccgctgccgccgccgttcagcccggtacaacttattgaactgcatgttctcaaaagcaacttctattaccgctaccatgatgatggcagcgatgtgacggcaacaacagagtatcagggtgagatggtcgattattcgcgtcacgccgtccttctcggcagtagtggaatggcggagctacgctttattcgcactcacggcagccgttttactccccaggattgcacactgtttaactggctggcacacataatcactccggttctgcaatcatggctcaatgatgaagaacagcaggtggcgctgcgtttgctggagaaagatcgcgatcatcatcgggtactggtggatatcactaatgcagtgttgtcacatcttgatctcgacgttctgatcgctgacgtcgctcgtgagatccatcattttttcggtctggcttcagtcagtatggtactgggcgatcatcgaaagaacgagaagttcagcctgtggtgcagcgatctttctgcctcacattgtgcgtgtctgccacgctgtatgcctggcgaaagtgtattgctgacacaaacgctacaaacccgacaaccgaccttgacgcaccgtgcagacgatctgtttctctggcaacgcgacccgttattacacttacttgcatctaacggctgcgaatctgcgctcctgataccgctcacctttggcaaccatacaccgggcgcattgttgctggcgcatacctcttccactctctttagtgaggaaaactgccagctactacaacatattgccgatcgcatcgctattgccgttggcaatgccgatgcctggcgcagcatgaccgatttgcaggaaagcttgcagcaagaaaaccaccagcttagcgagcagctcctttcgaatctgggcgtcggtgacattatctatcaaagccaggcaatggaagatttgctccagcaggtagatattgtggcgaagagcgtcagtacggtgttgatttgtggtgaaaccggaaccggcaaagaggtgatcgccagagcgatccatcaacttagcccacgacgcgacaagccactggtcaaaatcaactgcgctgccatccccgccagtcttctggaaagtgagttattcggtcatgacaaaggggcatttactggtgcgattaatacccatcgtggtcgttttgaaattgccgatggcggcacgttgtttctcgatgaaattggcgatctgccgttagaacttcagcctaaactgctgcgcgtattgcaggaacgggagattgagcgtctcggcgggagtagaacgatcccggtgaatgtcagagtcattgccgccaccaaccgtgatttgtggcaaatggttgaagatcgccagtttcgcagcgatctcttttatcgcctgaatgtcttcccactggaattgccgccgctgcgcgaccgtccggaagatatccctcttttagcaaaacatttcacgcaaaaaatggcgcgccatatgaatcgcgcaattgacgccatcccgaccgaggcactacgccagttgatgtcgtgggattggccgggcaacgtgcgcgagctggaaaacgtgattgagcgagcggtactactgactcgcggtaacagtctgaatttacatcttaatgtccgacaaagccgtttactgccgacgctaaatgaagattcagcgcttcgcagttcaatggcacagttgctgcacccgacgacgccagagaatgacgaagaagaacgtcagcgcattgttcaggtattgcgagaaaccaatggcattgttgccgggccccgtggcgcggcgacgcgattagggatgaagcgcaccacgctgctgtcacgaatgcagcggctggggatctcggttcgcgaggtgttgtaa

SEQ ID NO: 261489 - DNA, 849 bp, Klebsiella pneumoniae; identical to SEQ ID NO: 35805

SEQ ID NO: 261490 - DNA, 1464 bp, Klebsiella pneumoniae; identical to SEQ ID NO: 35807

SEQ ID NO: 261491 - DNA, 360 bp, Klebsiella pneumoniae; identical to SEQ ID NO: 35808

SEQ ID NO: 261492 - DNA, 639 bp, Klebsiella pneumoniae; identical to SEQ ID NO: 35813

SEQ ID NO: 261493 - DNA, 1542 bp, Klebsiella pneumoniae; identical to SEQ ID NO: 35815

SEQ ID NO: 261494 - DNA, 2244 bp, Klebsiella pneumoniae; identical to SEQ ID NO: 35816

SEQ ID NO: 261495 - DNA, 399 bp, Klebsiella pneumoniae; identical to SEQ ID NO: 9798

SEQ ID NO: 261496 - DNA, 228 bp, Klebsiella pneumoniae; identical to SEQ ID NO: 9799

SEQ ID NO: 261497 - DNA, 258 bp, Klebsiella pneumoniae; identical to SEQ ID NO: 9804

SEQ ID NO: 261498 - DNA, 483 bp, Klebsiella pneumoniae; identical to SEQ ID NO: 9805

SEQ ID NO: 261499 - DNA, 249 bp, Klebsiella pneumoniae; identical to SEQ ID NO: 8681

SEQ ID NO: 261500 - DNA, 771 bp, Klebsiella pneumoniae; identical to SEQ ID NO: 8682

SEQ ID NO: 261501 - DNA, 600 bp, Klebsiella pneumoniae; identical to SEQ ID NO: 8683

SEQ ID NO: 261502 - DNA, 723 bp, Klebsiella pneumoniae; identical to SEQ ID NO: 8684

SEQ ID NO: 261503 - DNA, 1473 bp, Klebsiella pneumoniae; identical to SEQ ID NO: 8685

SEQ ID NO: 261504 - DNA, 1284 bp, Klebsiella pneumoniae; identical to SEQ ID NO: 9661

SEQ ID NO: 261505 - DNA, 291 bp, Klebsiella pneumoniae
atgcaaaacacaactcatgacaacgtgattctcgaactcaccgttcgcaaccatccgggcgtaatgacccacgtttgtggcctttttgcccgtcgcgcttttaacgtcgaaggcattctctgcctgccgattcaggacagcgacaaaagccatatctggctactggtcaatgacgaccagcgtctggagcagatgataagccaaatcgataagctggaagatgtggtgaaagtgcagcgtaatcagtccgatccgacaatgtttaacaagattgcggtgttttttcagtaa

SEQ ID NO: 261506 - DNA, 1689 bp, Klebsiella pneumoniae
atggcaagttcgggcacaacatcgacgcataagcgctttaccggcgcagaatttatcgttcatttcctggaacagcagggcattaagattgtgacgggcattccgggcggttctatcctccctgtttacgacgccttaagccaaagcacgcaaatccgccatattctggctcgccatgaacagggcgcggggtttatcgctcagggaatggcgcgcaccgacggtaaaccggcggtctgtatggcctgtagcggaccgggggcgactaacctggtgaccgccattgccgatgcgcggctggactccatcccgctgatttgcatcactggtcaggtacccgcctcaatgatcggcaccgacgccttccaggaagtggacacctacggcatctctatccccatcaccaaacacaactatctggtcagacatatcgaagaactcccgcaggtcatgagcgatgccttccgtattgcgcaatcaggccgccctggcccggtgtggatagacattcctaaggatgtgcaaacggccgtttttgagattgaagcacagcccgcggtggcagaaaaagccgtcgcgcccgcctttagcgaagaaagcattcatgacgcagcggcaatgattaatgctgccaaacgcccggtgctttatctgggcggtggtgtgatcaatgcgcctgcgcgagtgcgtgaactggcggagaaagcgcagctgcctaccaccatgactttaatggcgctgggtatgctgccaaaagcgcatccgctgtcgctgggtatgctggggatgcacggtgtgcgcagcaccaactatatcttgcaggaggcggatctgctgattgttctcggcgcgcgttttgatgaccgggcgattggcaaaaccgagcagttctgtccgaatgcgaaaattattcatgtcgatatcgatcgcgcagagctgggtaaaatcaagcagccgcacgtagcgattcaggcggatgttgatgacgtgctggcgcagctgatcccgcaggtggaagcgcaaccgcgtgcagagtggcaccagttggtagcggatttgcagcgcgaattcccgtgtccaatcccgaaagcgtgcgatccattaagccattacggcctgatcaacgccgttgccgcctgtgtcgatgacaatgcgattatcaccaccgatgtgggtcagcatcagatgtggacggcgcaggcttatccgctcaatcgcccacgccagtggctgacctccggcgggctgggcacgatgggctttggtctgcctgcggcgattggcgcggcgctggcgaacccggatcgcaaagtgttgtgcttctccggcgacggcagcctgatgatgaatattcaggagatggcgaccgccagtgaaaatcagctggatgtcaaaatcattctgatgaacaacgaagcgctggggctggtacatcagcaacagagtctgttctacaagcagggcgtttttgccgctacctatccgggaaaaatcaactttatgcagattgccgccggattcggcctcgaaacctgtgatttgaataacgaagccgatccgcaggctgcattgcaggaaatcatcaatcgccctggtccggcgctgatccatgtgcgcattgatgccgaagaaaaagtgtacccgatggtgccgccaggtgcggcgaatactgaaatggtgggggaataa

SEQ ID NO: 261507 - DNA, 1185 bp, Klebsiella pneumoniae
atgaaaaggcatagaaacgtcaatttgttattgatgttggtattactcgtggccgtcggtcagatggcgcaaaccatttatattccagctattgccgatatggcgcgcgatctcaacgtccgtgaaggggcggtgcagagcgtaatgggcgcttatctgctgacttacggtgtctcacagctgttttatggcccgatttccgaccgtgtgggtcgccgaccggtgatcctcgtcggaatgtccatttttatgctggcaacgctggtcgcggtcacgacctccagtttgacagtattgattgccgccagcgcgatgcaggggatgggcaccggcgttggcggcgtaatggcgcgtactttgccgcgtgatttatatgaacggacacaattgcgccatgctaatagcctgttaaacatgggaattcttgtcagtccgttgctcgcaccgctaatcggcggtctgctggatacgatgtggaactggcgcgcctgttatctctttttgttggtactttgtgccggtgtgaccttcagtatggcccgctggatgccggaaacgcgtccggtcgacgcaccgcgcacacgcctgcttaccagttataaaacgcttttcggtaacagcggttttaactgttatttgctgatgctgattggcggtctggccgggattgccgcctttgaagcctgctccggcgtgctgatgggcgcggtattagggctgagcagtatgacggtcagtattttgtttattctgccgattccggcggcattttttggggcatggtttgccggacgtcctaataaacgcttctcaacgttgatgtggcagtcggttatctgctgcctgctggctggcttgctgatgtggatccccgactggtttggcgtgatgaatgtctggacgctgctcgttcccgccgcgctgttctttttcggtgccgggatgctgtttccgctggcgaccagcggcgcaatggaaccgttccccttcctggcgggcaccgcgggcgcgctggtcggcggtctgcaaaacattggttccggcgtgctggcgtcgctctctgcgatgttgccgcaaaccggtcagggcagcctggggttgttgatgaccttaatgggattgttgatcgtgctgtgctggctaccgctggcgacgcggatgtcgcatcaggggcagcctgtttaa

SEQ ID NO: 261508 - DNA, 498 bp, Klebsiella pneumoniae
atgacaggaagtcaggtcattgatgctgaagaggacaggcataaactggttgtagagtataaggatgctctgcaacctgccgatttttatcacaatttcaaacagcggggcatccgctccgtacagctcattccccatcttgaatttgatgaccggggcgatctgacggccgcttcggtgacagcagagctgtgggggaaatttttaattgccctgtttgagtgttgggtgcgggcagatatcagtcgtatctcgattgagctttttgacgccacattacaaaaatggtgtggcagcgaaaacccgcactcgcgccgtggctgccaggcgtgcgactggcatcggctgtgcccgcacgctcgggaggagacgccagacagcgtgctatgtgcgggctatcaggcgttttattcttactccgcaccgcatatgcgggtgatgcgtgatctgataaagcagcatcgttctcccatggagctgatgacgatgctgcggtga

SEQ ID NO: 261509 - DNA, 363 bp, Klebsiella pneumoniae
atgccggatagccgcaaagccagacgcattgccgacccagggctgcagccggagcgcacatcactggcgtggtttcgtaccatgctgggctacggcgcgttgatggcgttggctatcaaacacaactggcaccaggcgggcatgttattctggatttcgattggcatcctcgccatcgtggcgctgatcctctggcactacactcgtaatcgcaatttaatggatgtcacgaatagcgatttttcccaatttcacgtagtccgtgacaaatttttgatctccctcgcggtgttatctctcgcaatactgtttgctgtaacgcatatacatcaacttatcgtatttattgagagagtcgcatga

SEQ ID NO: 261510 - DNA, 348 bp, Klebsiella pneumoniae
atgaaaatttcccgcctcggagaagcgcccgattaccgcttctcgctggctaatgagcgtacttttctggcgtggatccgtaccgcactaggatttctggctgcgggggttgggcttgaccaacttgcgccagatttcgccacgcccgtcattcgcgaactgctggcgttgttgttgtgtctgttttccggcgggttagcgatgtatggctacttgcgctggttacgcaatgaaaaagcgatgcgtctgaaagaggacctgccttacaccaacagcttattaatcatcagtttaatattgatgatcgtggcggtgatcgtcatgggactggtgttgtatgccggatag

SEQ ID NO: 261511 - DNA, 450 bp, Klebsiella pneumoniae
atgggtatcatagcgcaaaataaaatcagttcattgggcatgctgttcggtgccatcgctttaataatggggattatccacttttcattcggccctttttccgcaccaccgccaacgcttgaaagcatcgtggcggacaaaacggctgaaattaaaagaggtcttctcgccggaataaaaggcgaaaaaattaccaccgtggagaaaaaagaggacgtggatgtcgataaaatcctcgatcaaagcggtatcgcactggccattgctgcgctactttgcgcatttgttggcggtatgcgtaaggaaaatcgctggggcattcgcggcgcgctggttttcggcggcgggacgctggctttccataccttgctttttggtatcggcatcgtgtgcggccttctgctgatgttcctgattttttctttcctgaccggcggttcgctggcttaa

SEQ ID NO: 261512 - DNA, 1494 bp, Klebsiella pneumoniae
atgaaacgccccaattttctgttcatcatgaccgatacccaggccaccaatatggtcggttgctatagcggtaagccgctgaatacgcaaaatattgatagtctggcggcggaaagtattcgctttaattccgcctacacctgttcaccggtttgtacaccagcgcgcgccgggctgtttaccggtatctacgctaaccagtccggcccgtggaccaacaacgtcgcgccgggcaaaaacatctccactatggggcgctactttaaggatgccggctatcacacctgttacatcggcaaatggcatctcgacggtcatgactatttcggcactggcgagtgtccgccggagtgggacgctgattactggttcgatggggcgaactatcttagcgaactgacggaaaaagaaattagcctgtggcgcaatggcctaaacagcgtcgaagatttacaggcgaaccatattgacgaaaccttcacctgggcgcaccgcatcagcaatcgagcagtggattttctgcaacagcccgcgcgcgccgaggaacccttcctgatggtggtttcgtatgatgagccgcatcacccgttcacctgtccggtggagtatttagagaaatacgctgatttttactacgagctgggcgagaaagcacaggatgacctggcgaacaaaccggaacatcaccgcttatgggcgcaggcgatgccatcgccagtcggtgatgacgggctttatcaccatccgctctattttgcctgcaatgactttgttgatgaccaaatcggacgtgtcatcaatgccttaacgccagagcaacgtgaaaatacgtgggtcatttatacctccgatcacggtgaaatgatgggcgcacataagctgatcagtaaaggagcggcgatgtatgacgacatcacccgtattccgctgatcatccgttcgccgcaaggggagcggcgacaggtcgatacgccagtcagtcatatcgatttactgccgacaatgatggcgctggcaaatattgaaaaaccagagattctgccgggggaaaatatccttgccgcgaaagagccacgcggcgtaatggtggaatttaaccgctacgagattgagcatgacagctttggcggttttattccggtgcgttgctgggtgacggatgactttaaactggtactcaacctcttcaccagtgatgaactttacgatcgacgtaatgacctaaatgaaatgcataatctgatcgatgatatccgttttgccgacgttcgccgcaaaatgcatgacgccttattggattacatggacaaaattcgcgatccgttccgcagttatcaatggagcctgcgtccgtggcgtaaagatgcacagccgcgctggatgggggcatttcgtccacgcccacaagatggctattcgccagtggtacgcgactatgacaccggcctaccgacgcaaggagtgaaagtggaagagaaaaaacagaagttctga

SEQ ID NO: 261513 - DNA, 1716 bp, Klebsiella pneumoniae
atgaattcgttacaaatcttgagttttgtcggttttacgctgctggtggcgatcatcacctggtggaaggttcgcaaaacagataccggatcgcaacaaggctattttcttgccggacgttcactaaaagcgccggttattgccgcttcgttaatgttaaccaacctttccacggaacaactggttggactttccgggcaggcctacaaaagcggcatgtcggtgatgggctgggaagtgacttcagcggtgacgctgatcttcctcgcgctaatctttttaccgcgctatctgaagcgcggcattgccaccatccccgattttctggaggaacgttatgataaaacgacgcgtattatcatcgacttctgcttcctcattgccaccggcgtctgctttctgccgattgttctctactccggcgcgttggcgctcaacagcctgtttcacgtcggggaatcgctacagatttctcacggtgcggctatctggctattggtaattttgcttggtctggcgggaattttgtatgcggtgatcggcggactgcgcgcaatggcagtggcggactccatcaacggtattggtctggttatcggcgggttgatggtgccgatatttggcctgatcgcgatgggcaagggcagctttatgcagggcattgagcaactcaccaccgttcacgccgagaaattaaactcagtcggcggcccgaccgatcccttgccgattggcgcggcatttaccggtttaattctggtgaacaccttttactggtgtacaaatcagggcatcgtgcaacgcacgctggcgtcaaaaagcctggcggaagggcaaaagggggcgctgttaacggcggtgctgaaaatgctcgacccgctggtactggtgctgccagggttgattgcgtttcatctgtatcaggatctaccgaaagccgacatggcctacccgacgctggtcaataacgttctgccagtgccactggtgggtttcttcggcgcggtgttatttggtgcggtgatcagtaccttcaacggctttctgaatagcgccagtacgttattcagtatgggtatttaccgtcgcatcattaaccagaatgccgagccgcaacagctggtcaccgttgggcgcaaatttggtttctttatcgccatcgtttcggtgctggtcgcgccgtggattgccaacgcgccgcaggggttgtatagctggatgaaacagctcaacggtatttacaacgtgccgctggttaccatcatcattatgggctttttcttcccgcgcatcccggcgctggcggcaaaagtggcgatggggattggcataatcagctacatcaccatcaactatctggtgaagttcgacttccatttcctctatgtgctggcctgtacgttctgcatcaacgtggtcgtgatgctggtgatcggttttatcaaaccgcgcgccacgccgttcaccttcaaagatgcgttttcagtggacatgaaaccgtggaaaaacgtcaagatcgcgtcaattggcatcctgttcgcgatgattggcgtctatgccgggctggctgaattcggcggctacggtacgcgctggttagcgatgatcagttatttcattgccgccgtagtgattgtctacctgatttttgacagctggcggcatcgtcacgacccagccgtaacctttactcccgacgcgaaggatagcctatga

SEQ ID NO: 261514 - DNA, 894 bp, Klebsiella pneumoniae
atgaatggaaaattgcaaagttcagatgtaaaaaacgaaactccgtacaatattcccttattgattaacgaaaatgtgatctccagcggaatttctctgatctcgctctggcatacctacgccgacgagcattaccgggtgatctggccgcgggacaagaagaaaccgcttatcgccaactcatgggttgcggtgtataccgtacaaggatgtgggaaaattcttttaaagaatggtgaacaaataactctgcatggcaactgtattatatttttaaagccaatggatattcactcttatcactgtgaaggtttagtctgggaacagtactggatggaatttacccccaccagtatgatggatattcccgtcggtcagcaaagcgttatttataatggcgaaatttataatcaggaactcaccgaagttgctgagttaattacttcaccagaagcaataaaaaataatctggcagtcgcttttctgacgaaaattatttatcagtggatttgtcttatgtactcagacggtaaaaaagatccacaacggcggcaaattgaaaaactaattgccactttacatgccagtctgcaacaacgctggagcgtagctgatatggctgccacgatcccctgtagcgaagcctggttgcgtcgtctgtttttacgctataccggcaagacgccgaaagaatattacctcgatgcacgtctggatctggcgctatcgctattaaagcaacaagggaactcggttggcgaagtcgctgatacgctcaacttcttcgactcctttcatttcagcaaagcctttaaacataaatttggttatgcgccgtcagccgtgctaaagaatacggaccagcacccaacggatgccagtccacacaattaa

SEQ ID NO: 261515 - DNA, 1323 bp, Klebsiella pneumoniae
atgaccaaattctcagtggttgtcgcaggcggtggaagcacctttacgccaggcatcgtgttgatgctcctggcgaatcaggaccgtttcccgcttcgtgcactgaaattttatgataacgatggtgcgcggcaggaagtgattgctgaagcctgtaaagtcatccttaaagagagagcgccggacattgcgtttagttacaccaccgatcctgaagtggcgttcagcgacgttgattttgtcatggcgcacatccgcgtcggcaaatacccgatgcgcgaactggatgaaaaaatcccgctgcgccacggcgttgttggacaggaaacttgcggacccggcggaatagcgtacggcatgcgttccattggcggcgtcctggaactggtggattatatggaaaaatattcaccaaatgcctggatgctcaactactccaacccggcagccattgtcgcagaagccacgcgtcgtctgcgcccgaatgcgaaaatcctcaacatctgtgacatgccaatcggtattgaaagccggatggcgcaaattgttgggctgcaagatcgcaaacagatgcgcgtgcgctactacggcctgaaccactttggctggtggacatcaattgaagatttgcagggcaacgacctgatgccccagctgcggcaatatgtctcgaagcacggttatgttccaccgcagcaagatacacatactgaagcgagctggaacgacacctatgcaaaagcgcgggatgtccaggcactggacccggatacattgccgaacacctatctgaaatattatctcttcccggattatgtcgttcagcattccaaccctgaacatacccgcgcgaatgaggtgatggagcatcgcgagaaacaggttttcgatgcttgccgcgccattacggcggcaggaaattcagcggcgggcaagctggaaattgacgaacatgcgtcatacatcgtcgatctggcggcggcaattgccttcaacactcaggagcggatgttgctgattgtgcctaacaacggggcaatccataactttgatgatgaagcgatggtcgagatcccgtgtctggtcgggcacaacggaccagaaccactggtggtcggcgatatcccgcagtttcagaaagggttaatgagtcagcaagtggcggtggaaaaactggtcgtggacgcctgggaacagcgttcatatcagcacctgtggcaggcgattactttgtcgaaaacggtaccgagcgccgcggtcgccaaagctattctggatgatttgctggaggccaacaaagcgtactggccagagttacgttaa

SEQ ID NO: 261516 - DNA, 1617 bp, Klebsiella pneumoniae
atgctcagtcaaattcaacgctttggcggcgcgatgttcacgccagtgctgctgtttcccttcgccgggattgtggtgggtcttgccatcttgctgcaaaacccgatgtttgtcggggaatcactgaccgatccgaacagtttattcgcgcaaatcgtacacattattgaagagggcggttggacggtattccgtaatatgccgctgatttttgctgtcggtttacccattggccttgcgaagcaagcgcaggggcgtgcttgtctggcggtgatggtgagtttcctgacctggaactatttcatcaacgcgatgggaatgacctggggaagctacttcggcgtcgatttcactcaggacgcggtggcaggtagcgggctgacaatgatggcggggattaaaaccctcgataccagcattatcggcgcgattataatttccggcattgtgacggcgctgcataaccgtctgttcgataaaaaactgccggtgtttctcggcattttccaggggacatcttatgtggtgattatcgccttcctggtgatgatcccctgcgcctggctgacgttgctcggctggccaaaagtacaaatggggattgaatctctgcaagcgttcctgcgttcggcgggtgcgcttggggtctgggtttacaccttcctcgaacgtattctgatcccaaccggtttacaccacttcatctacggaccgtttatctttggtccggcagctgttgaaggcggcattcagatgtactgggcgcagcatctgcaagagttcagtctgagcgccgagccgctgaaatcgttgttcccggaaggcggttttgccctgcacggtaactcaaaaatctttggtgccgtgggcatttctttagcgatgtacttcactgccgcaccggaaaatcgggtaaaagtggcgggcttgctgattcccgcaaccttaaccgccatgctggtgggaattaccgaaccgctggaatttaccttcctgttcatttcaccgttgctgtttgcggtacacgctgtgcttgcggcctcaatgtcgaccgtgatgtacctctttggtgtggtgggcaacatgggcggtggtttgattgaccaggttttaccgcaaaactggatcccgatgttcagcaaccacgcggatatgatgctgacccaaatcgccattgggttgtgctttaccctgctgtacttcgtggttttccgcaccctgattctgcaattcaacatgtgcacgccgggacgtgaagatgcggaagtgaaactctactcaaaagccgaatacaaagcctcgcgaggccaaaccaccgcggcagagccaaaaaaagagctggatcaggctgccggtatcctgcaagccctgggcggggtcggcaatatctccagcattaacaattgcgcgacgcgtctacggattgcactgcatgacatgtcacaaacgctggatgacgaagtctttaaaaagctgggagcgcacggcgtcttccgtagtggcgatgccattcaggtgatcattggtctgcatgtatcccagctacgtgaacagctcgatagcttaattaattctcatcaatcagcagaaaatgttgccattacggaggcagtataa

SEQ ID NO: 261517 - DNA, 717 bp, Klebsiella pneumoniae
atgatctacaaaagcattgcggagcggttaagaattcgacttaactccgcggatttcacgctaaatagccttcttcccggtgaaaaaaagctggcggaagagtttgcggtatcgcggatgaccatccgtaaagccattgatctgctggtagcgtgggggctggtggtccgccgccacggcagcggtacttacctggtgcgtaaagatgtattgcatcaaaccgccagcctgaccgggctggtggaggtgttaaaacgccagggaaaaacggtcaccagccaggtgctgatttttgaaatcatgcctgcgcctccggccattgccagccagttacggattcaaatcaacgagcagatctacttctcccgtcgcgttcgttttgtggaagggaaaccgctgatgctggaagacagctatatgccggtaaaactgttccgtaacctttcgctgcaacatctggaagggtcgaagtttgaatatattgaacaagagtgcgggattctgattggcggtaattatgaaagcctgacgccggtgctcgccgatagactgctggcgcggcaaatgaaggtagcggaacacacgccactgctgcggatcacctcgttgtcatatagcgagagcggggagtttttgaattattcagtaatgttcagaaatgccaacgaataccaggtggagtaccatttacggcgactccacccggaaaagagttaa

SEQ ID NO: 261518 - DNA, 1662 bp, Klebsiella pneumoniae
atgagtgatatagcattaacggtcagtattctggctttggtggcagtcgtcggtttgtttatcggcaacgtcaaatttcgcggcataggattaggtattggcggcgtgctgtttggtgggatcatcgtcggccattttgtttctcaggcggggatgacattaagtagcgatatgctgcatgttattcaggaatttggcctgatcctgttcgtttataccatcgggattcaggtagggccgggcttctttgcctcattgcgcgtctccggattacgcctcaacctgtttgctgttctgatcgtcatcatcggtggtctggttaccgccatcctgcataaactgtttgatattccactgccggtagtgctggggattttctccggtgcggtaaccaatacgccagcactgggggcagggcagcagatcttgcgcgacctgggtacaccaatggaaatggtcgatcagatggggatgagttacgcgatggcgtatccattcggcatttgcgggattttgttcaccatgtggatgttgcgggttattttccgcgtcaatgtcgagacagaagcccagcagcacgagtcttcacgcaccaatggcggcgcgctgatcaggactatcaatattcgcgttgagaaccctaacctgcatgatttagccattaaagatgtaccgattctcaatggcgacaaaattatctgctcgcgtctgaaacgcgaagaaaccctaaaagtaccttcgccagataccattatccaactgggcgatttgctgcatctggtggggcagccagcggatttacataatgcgcaactggtgattggtcaggaggtcgatacctcgctgtctacgaaaggcactgatttgcgcgtcgagcgtgtggtggtcaccaatgaaaacgtgctcggaaaacgtattcgcgacctgcactttaaagaacgctatgacgttgttatctcgcgcctgaaccgtgccggggtcgaactggtcgccagtggtgatatcagcctgcagttcggcgatattctcaacctggtggggcgtccgtccgcaattgatgccgttgccaatgtgctggggaatgcgcagcaaaaactgcaacaggtacagatgctgccggtgtttattggtatcgggcttggcgtattgttaggttctattcccgtctttgtgccgggattcccggccgcgttgaaactggggctggcgggcggtccgctgattatggcgttgatcctcgggcgtatcggcagtatcggcaagctgtactggtttatgccgccaagtgccaacctcgcgctgcgggagctggggatcgtgctgttcctctcggtcgttggtctgaaatctggtggggattttgtgaataccctggtcaatggcgaagggctaagctggattggatatggtgccctgatcaccgccgttccgctgattactgttggtattctggcgcggatgttagccaaaatgaattacctgaccatgtgcgggatgctggctggctccatgaccgatccaccggcgctggcgtttgctaataatcttcatccaacgagcggtgcggcggcgctctcttacgccactgtctatccgttagtgatgttcctgcgcattatcaccccccaattactggcggtgctcttctggagtatcggttaa

SEQ ID NO: 261519 - DNA, 429 bp, Klebsiella pneumoniae
atgcgtaacttcgatttatccccactgatgcgtcaatggatcggttttgacaaactggccaacgcactgcaaaacgccggtgaaagccagagcttcccgccgtacaacattgagaaaagcgacgataaccactaccgcattacccttgcgctggcaggttttcgtcaggaagatttagagattcaactggaaggtacgcgcctgagcgtaaaaggcacgccggagcagccaaaagaagagaaaaaatggctgcatcaagggcttatgaatcagccatttagcctgagctttacgctggctgaaaatatggaagtctctggtgcaaccttcgtaaacggtttactgcatattgatttaattcgtaatgagcctgaacccatcgcagcgcagcgtatcgctatcagcgaacgtcccgcgttaaatagctaa

SEQ ID NO: 261520 - DNA, 261 bp, Klebsiella pneumoniae
atgtcccataccggggggaaagaaggaacgtatcccggcacccgcgccagcgccaccatgattggcgacgatgaaaccaactggggcactaagtcgctggcgattctcgatatgccgtttaccgctgtgatggacacgcttttactgccgtgggacgtgttccgcaaagacagctcggtgcgctcacgcgttgaaaaaagcgaagccaacgcgcaagccaccaatgcggttattccaccggccagaatgcctgataactga

SEQ ID NO: 261521 - DNA, 1215 bp, Klebsiella pneumoniae
atgaaacagataacctttgctccccgtaatcacctgctcaccaataccaatacctggacgcccgacagccagtggctggtatttgacgttcgtccttcaggggcgtcgtttaccggcgagaccattgagcgtgtgaatatccataccggcgaggtcgaggttatctatcgcgcgtcacagggcgcacacgtcggcgtggtgaccgttcatccgaagtcagagaagtatgtcttcatccacggcccggaaaatcctgatgaaacatggcattacgacttccatcatcggcgcggagtgattgttgaaggcggcaagatgagtaaccttgatgcgatggatattaccgcgccgtatacgccaggagcgctgcgcggcggcagccatgtgcatgtctttagcccgaacggtgaaagggtgagctttacctataacgaccatgtaatgcatcaactctgcccggcgctggatttgcgaaacgtcggtgttgctgcaccgtttggcccggtcaacgtacaaaagcagcatccgcgtgaatacagcggtagccactggtgcgtgctggtgagtaaaaccacgcccacgccgcagcctggcagcgatgaaatcaatcgtgcttatgaagaaggatgggtaggaaatcacgcgctggcgtttattggcgacacactttcgccaaagggcgagaaagtaccggagctatttatcgttgagttaccgcaagatgaagctggctggaaagcggcaggtgatgcgccgttaagtggaacggaaacaaccctgcccgcgccaccgcgcggcgtcgtgcagcgacgtttaacctttacccaccatcgggcttatccggggttagttaacgtcccgcgccactgggtgcgctgtaatccgcagggtacgcaaatcgcgtttttaatgcgtgatgataacggcattgtgcaactgtggcttatctcgccacaaggcggcgagccgcgccagttaacccataacaaaacggatattcagtctgcatttaactggcatccgtcaggagaatggttgggctttgtgctggataatcgaattgcttgcgcccatgcgcaaagcggcgaggttgagtatttaaccgaaaaccacgccaatccaccttctgcggacgccgtggtcttctcgccggatggtcagtggctggcgtggatggaaggcggccagctgtggatcaccgaaactgatcgctaa

SEQ ID NO: 261522 - DNA, 1065 bp, Klebsiella pneumoniae
atggaacatttcgacgtggcgattattggcctcggcccggcagggtcggcgttggcacgaaagttagcaggcaaaatgcaggtgatcgcgctggataaaaagcaccagtgtggtactgaaggtttcagcaaaccttgcggcggtctgctggcaccggacgcgcagcgatcttttattcgcgatggactgacgcttcctgtcgatgtgatcgccaatccacagattttcagcgtcaaaactgtcgacgttgccgcatcgttcacgcgtaactaccagcgaagctatatcaatattaatcgccatgctttcgacttgtggatgaaatcgctgatccccgccagcgttgaggtttaccacgacagcctgtgccgaaaaatctggcgtgaggatgataaatggcatgtcatttttcgtgcagacggttgggagcagcatattactgcccgctatctggtcggtgccgatggcgcaaactcgatggtgcggcgacatctctacccggatcatcaaattcgtaaatatgtcgctatccagcagtggttcgcagagaaacatccggtgccgttctactcctgcatctttgataatgcgataactgactgttactcatggagtatcagcaaagacggttattttatctttggcggtgcctatcccatgaaagacggtcagacgcgtttcacgacgctgaaagagaaaatgaacgcctttcagttccagtttggcaaagcggtgaaaagcgagaaatgtaccgtgctgtttccctcacgctggcaggattttgtctgcggtaaggacaacgcctttctgattggtgaagcggcgggatttatcagcgccagttcgctggaggggattagctatgcgctggatagcgcagagattctgcgttcggtgttactgaagcagccggagaagagcaacgccgcctactggcgcgccacccgcaaactgcgtttaaaactcttcggcaaaatagtaaaaagccgatgcctgaccgcaccggctttaagaaagtggattatgcgcagtggtgtggcgcatattccacagttgaaagattag

SEQ ID NO: 261523 - DNA, 879 bp, Klebsiella pneumoniae
atgacagctcgctacatcgcaattgactggggatcgaccaatctgcgcgcctggctttatcatggcgaccactgcctggagagcaggcaatcagaagcaggcgtcacgcgtctgaacggaaaatctccggctgcggtgttagcagaagtgacgaccgactggcgtgaagagaatacgccagtggtaatggcaggaatggtcggcagcaatgtcggctggaaagttgcaccgtatttatccgttcctgcccgtttttcgtctattggcgaacaattaacgtcggttggcgacaatatctggattattcccggattatgcgtctctcatgacgataaccataatgtgatgcgcggcgaagaaacacaattgatcggcgcgcgtgctctggctccttcctctctttatgtcatgcccggtacgcattgcaaatgggtgcaggccgatagccagcaaatcaacgattttcgcaccgtgatgaccggtgaattacatcatttactgttaaatcactcattgattggcgcaggtttgccgccgcaggaaaactctgccgatgccttcgcggctggtcttgagcgtggccttaatgctcccgccatattgccgcagatttttgaagttcgcgcctcgcatgtgctgggaacacttccccgagaacaggtcagcgaatttctctctggtttgttgattggcgcagaggttgccagtatgcgcgactatgtggcccatcaacacgccatcacccttgtcgccggaacatcgctgaccgcgcgctaccagcaagcctttcaggcgatgggttgcgatgtggcggcggtggcgggcgacacggcatttcaggctggtataaggagcatcgctcatgcagtggcaaactaa

SEQ ID NO: 261524 - DNA, 657 bp, Klebsiella pneumoniae
atgaagttgaattttaagggattttttaaggctgccggtttgtgttctttggcatttgcgttgaccggatgtatcacttggggattggtttccaatactgcaagccgtccacatgccgagcaatggcggtcagacacgattaagggtttatcgctggcagaagatagtaacggtacgaaaggctatgtttttgttggtgaatcgttggactatctgttgaccaccggcggcgataaggtggttaaaatgctgaacgatccggcaattcatggtgaaagaatcaccgtttctgataacgcgaaatttattttaagcagcagtaataaaaatttctctggtgctattacgctctattacgactggaacaacgaagaagataaggcactggcaacacaatatggttttatttgtgatacccggcgttgtacatggatgctggacggtttgacaggctcaatccaccagaaaaataaaaaagcggattactcaaacgtgatggttttccatcaaccctttacggtgggattttatgagtacaaagcaacagatggcgtcccgcgcggcctcgttaatgcgctgctgccagtcactcttacgctggatatagtaacgtcaccactccagttcctgattttatgcacgaccagaaattgttaa

SEQ ID NO: 261525 - DNA, 399 bp, Klebsiella pneumoniae
atggggctttttgatgaagttgtcggtgcctttctgaaaggcgatgcggggaaatatcaggccattttgagctgggttgaggagcagggcggcattcaggtgctgctggaaaaactgcaaagtggcggtttaggtgccattctctcaacctggctgagtaatcaacagggcaaccaaccagttagcggcgagcaactggaatcagcgctcggcacaaatgcggtgtccgatctcgggcaaaaactgggcgtggataccagtacagcttccagtttactggcagaacaattgccgaagattattgatgcactctcaccgcaaggtgaagtgacaacacaagccaataacgatctgctttccgcaggcatggaactgctgaaagggaaactcttccgctaa

SEQ ID NO: 261526 - DNA, 1335 bp, Klebsiella pneumoniae
atgtggatacgcccattgcaggcggaactgagcgataacacgctggccctgtacgcgccaaatcgttttgtcctcgattgggtacgggacaagtaccttaataatatcaatggactgctaaccagtttctgcggagcggatgccccacagctgcgttttgaagtcggcaccaaaccggtgacgcaaacgccacaagcggcagtgacgagcaacgtcgcggcccctgcacaggtggcgcaaacgcagccgcaacgtgctgcgccttctacgcgctcaggttgggataacgtcccggccccggcagaaccgacctatcgttctaacgtaaacgtcaaacacacgtttgataacttcgttgaaggtaaatctaaccaactggcgcgcgcggcggctcgccaggtggcagataaccctggcggtgcctataacccgttgttcctttatggcggcacgggtctgggtaaaactcacctgctgcatgcggtgggtaacggcattatggcgcgcaagccgaatgccaaagtggtttatatgcactccgagcgctttgttcaggacatggttaaagccctgcaaaacaacgcgatcgaagagtttaaacgctactaccgttccgtagatgcactgctgatcgacgatattcagttttttgctaataaagaacgatctcaggaagagtttttccacaccttcaacgccctgctggaaggtaatcaacagatcattctcacctcggatcgctatccgaaagagatcaacggcgttgaggatcgtttgaaatcccgcttcggctgggggctgactgtggcgatcgaaccgccagagctggaaacccgcgtggcgatcctgatgaaaaaggccgacgaaaacgacattcgtttgccgggcgaagtggcgttctttatcgccaagcgtctacgatctaacgtacgtgagctggaaggcgcgctgaaccgcgttattgctaacgccaactttaccggacgggcgatcaccatcgacttcgtgcgtgaggcgctgcgcgacttgctggcattgcaggaaaaactggtcaccatcgacaatattcagaagacggtggcggagtactacaagatcaaagtcgcggatctcctttccaagcgtcgatcccgctcggtggcgcgtccgcgccagatggcgatggcgctggcgaaagagctgactaaccacagtctgccggagattggcgatgcgtttggtggccgtgaccacacgacggtgcttcatgcctgccgtaagatcgagcagctgcgtgaagagagccacgatatcaaagaagatttttccaatttaatcagaacattgtcatcgtaa

SEQ ID NO: 261527 - DNA, 1386 bp, Klebsiella pneumoniae
atggcagataacaaaccagagctacagcgtgggctggaagctcgacatatcgaactcatcgccctggggggcaccattggcgtcggcctgtttatgggggccgccagtaccctgaaatgggccgggccatccgtattgttggcctatatcatcgccgggctgttcgtctttttcatcatgcgttcaatgggcgaaatgttattcctcgaaccggttaccggttcgttcgccgtttatgcgcatcgttatatgagcccgttctttggctatctcaccgcctggtcttactggtttatgtggatggcggtggggatctcagaaatcaccgccattggcgtttatgtccagttctggttcccggagatggcgcagtggatacccgcattgatcgcggtggcgctggtggcgttggcgaatctggcggcggtgcggttgtacggcgaaatcgagttctggttcgcgatgatcaaagtcaccacgattatcgtgatgattgtcattggcctgggcgtgattttctttggctttggcaatggcgggcagtcgattggttttagcaacctcacagagcatggcggtttctttgcggggggctggaaagggttcctgaccgcattgtgtattgtggtggcgtcctaccagggcgtggagctgattggcattaccgctggtgaagcgaagaatccgcaggtgacgctgcgcagtgcagtaggcaaagtgctgtggaggattctgattttctacgtaggcgcgattttcgttatcgttactatcttcccgtggaatgaaataggcagcaacggtagcccgttcgtactgactttcgccaaaatcggcattaccgcagcggcgggcattatcaactttgtggtgctgacggctgcgctctctggctgtaacagcggcatgtacagttgcggacgtatgctctacgcactggcgaaaaaccgtcagttaccgacggcgatggcgaaagtttcccgtaacggcgtaccggttgcgggtgtggcagtatctattgctatcctgttaattggctcatgcctgaactacatcattcccaatccgcagcgtgtgtttgtctacgtctacagtgccagcgtgcttccggggatggtgccatggtttgtgatattgataagccagctgcgttttcgtcgtgcgcataaagcggcgattgccagccatccgttccgctcaatcctgttcccgtgggccaactacgtaacaatggcattcctgatttgcgttttgatcggcatgtactttaatgaagatacgcgtatgtcgctgtttgtcggcatcatctttatgctggcggtgacggcgatttataaaatttttgggcttaatcgccacggtaaagcgcataaactggaggaataa

SEQ ID NO: 261528 - DNA, 741 bp, Klebsiella pneumoniae
atgaataacaacaccacggcaccgacctatacgctgcgtggcttacagttgatcggttggcgtgatatgcagcacgccctcgattatctgttcgctgacgggcagcttaagcagggaacgctggttgccattaatgctgaaaaaatgctgaccattgaagataacgccgaggtcagggagttaattaacgctgccgaatttaaatatgcggatggcatcagcgttgtacgttcagtacgtaaaaagtacccgcaggcgcaggtttcccgcgttgccggggccgatctctgggaagagctgatggcgcgcgcaggcaaagaagggacgccggtatttctggtgggcggtaaacctgaagtgctggcgcaaactgaagctaaactacgcaaccagtggaatgtgaatatcgttggcagtcaggatggttattttaaacccgagcagcgtcagatgctgtttgaacgcattcatgccagcggagcgcaaatcgtcaccgttgcgatgggatcgccaaagcaggagatcttcatgcgcgactgccgtctggtgcatccagatgcgctgtatatgggcgttggcgggacttatgatgttttcaccggtcacgtaaaacgtgcaccgaaaatctggcaaacgctggggctggagtggctctaccgcctgctttcgcagccgagccgcattaagcgtcagcttcgtttgctgcgttatttacgctggcattacaccggcaacctctga

SEQ ID NO: 261529 - DNA, 1353 bp, Klebsiella pneumoniae
atgagtctgctgcaattcagtggcttgtttgttgtctggctgctctgcacgctgtttattgccacgctgacctggtttgagtttcgccgtgtgcgttttaacttcaatgtcttcttttcattgctgtttttgctcacctttttcttcggcttcccgctgaccagcgtgctggtatttcgctttgatgttggtgtcgcgccgccagaaatcttgttgcaggcgttgctttctgcgggctgcttctacgcggtttactacgtcacctacaaaacccgcctacgcaaacgcgttgccgatgtaccgcgccgtccgctgtttaccatgaaccgcgtggagaccaatctcacgtgggtgatcctgatgggcatcgcgctggtaagcgtcggcatcttcttcatgcacaacggatttttgctgttccggcttaactcctacagtcagatcttctccagtgaagtctccggcgtggcgttaaaacgcttcttttactttttcatcccggcgatgctggtggtctactttctgcgccaggacagcaaagcgtggctgtttttcctcgtcagcacggtcgcttttggcttgctgacttatatgattgtcggcggcactcgcgccaatatcattatcgcattcgctatcttcctgtttattggcattattcacggctggatttcgttgtggatgctggcggcagcgggcgtgctggggattgttggcatgttctggctggcgctaaaacgctatggaatgaatgtgagcggtgatgaagcgttctatacgtttctctatctcacccgcgataccttttcgccgtgggagaatctggcattgctgttgcagaactacgacaacatcgacttccagggtctggctcccattgtccgcgatttctatgtctttatcccttcctggctgtggccgggtcgcccgagtatggtactgaactccgccaactactttacctgggaagtgctgaataaccactccgggctggcgatctcgcctacgcttataggctcactggtggtgatgggcggcgcgttgttcatcccgctcggggcgatcgtggttggtctgatcatcaaatggttcgactggctgtatgagctgggcaaccgcgagcctaatcgctataaagctgcgatattgcacagtttctgctttggggcgatcttcaatatgatcgtgctggcgcgtgaagggctggattcgtttgtctcacgcgtagtcttttttatcgtggtcttcggcgcatgtctgatgatcgcaaaactgctgtactggctttttgaaagcgccggactcattcataaacgtacaaaatcatcgctccggacgcaggttgaaggataa

SEQ ID NO: 261530 - DNA, 1080 bp, Klebsiella pneumoniae
atgactgtactgattcacgtactgggatcggatatccctcaccataaccgaaccgttttgcggtttttcaacgacgcgctggccgcgacgagcgatcacgcgcgcgagtttatggttgttggcaaggacgacggcttaagtgatagctgtccggcgctttctgtgcaatttttccctgggaaaaaatcgctggcggaagcggtcatcgcgaaagcaaaagctaaccgtcagcagcgattttttttccacggtcagttcaatcccacactgtggctggctctgctgagtggtggcattaagcccagccagtttttctggcatatctggggggcagacctgtatgagctttccagtggcttgagatataagcttttttacccactacgtcgcctggcgcaaaagcgagtcggctgtgtatttgccacccgcggtgatttgagcttttttgccaaaacgcacccaaaggtgcggggcgaactgctgtacttcccgacgcggatggatccttcgctcaatacgatggcgaacgatcggcaacgtgaagggaaaatgaccattctggtgggcaactccggcgaccgcagcaatgagcatattgctgccttgcgcgccgttcatcagcaatttggcgatacggtaaaagtggtggtgccgatgggatatccgcctaataacgaagcgtacatcgaggaagttcgtcaggcggggctagcgttattcagcgaagaaaatctgcaaattctgaacgaaaaactggaatttgacgcctatctggcgctacttcgtcagtgcgatcttggttactttatttttgcccgccagcagggcattggtacgctgtgcttactgattcaggcgggcattccttgtgtgcttaaccgggaaaatccgttctggcaggatatgacggaacagcatttgccggtgctgtttactaccgacgatctcaacgaggatattgtgcgtgaagcgcagcgccagttggcgtcggtggataaaaacaccattgccttctttagcccgaactatctgcaaggctggcagcgggcgttggcgattgccgccggggaggtcgcatga

SEQ ID NO: 261531 - DNA, 1251 bp, Klebsiella pneumoniae
atgtcgttggcaaaagcgtccttgtggacggcggccagtacactggtcaagattggtgccgggttactggtcggtaagttgctggcggtgtcatttggtccggcggggcttgggctggcggcaaatttccgccagttgattaccgtgctcggcgtgcttgccggggctggcatctttaatggcgtaaccaaatacgttgctcagtaccatgataatccccaacagctgcgccgcgtggtcggcacttcatcagcgatggtacttggcttctctacgctaatggcgctggtttttgtgctggcagcagcgccaatcagccagggattgtttggtaataccgactatcagggactggtgcgtttagtggcgctggtgcaaatggggattgcctggggcaacctgttactggcgttgatgaaaggctttcgcgatgccgcaggtaatgcgttatccctgattgtcggcagcctgattggcgttctcgcgtactacgtcagttaccgtttgggcggttatgaaggggcgttgctgggtctggcgctgattcccgcgctggtggtaattcctgccgccatcatgttgatcaaacgtggtgtcatcccgttaagctatctgaaacccagctgggataacggtctggcagggcagttgagcaaatttacgctcatggcgttgattacgtcggtgaccttgcctgttgcttacatcatgatgcgtaaactgctggcggcgcagtatagctgggatgaggtggggatctggcaaggggtgagcagtatttccgatgcctacctgcaatttattacggcatcgttcagcgtatatttgctgcccacgttgtcgcggctaacggaaaagcgcgatatcacccgggaagtggttaaatcgctaaaattcgtcttaccggcagtggcggcggcgagttttaccgtctggttgctgcgtgattttgctatctggctgctgttgtcgaataaatttaccgctatgcgcgatctctttgcctggcagttggtgggtgatgtgttaaaagtgggcgcttatgtctttggttatctggtgatcgccaaagcgtcactgcggttttatattctggcggaagtcagccagttcactttattgatggtatttgcccactggctaatccctgcgcatggtgcactgggcgcggcgcaggcctatatggcaacctatatcgtctatttttctctttgttgtggcgtgtttttactctggcgtaggcgggcatga

SEQ ID NO: 261532 - DNA, 675 bp, Klebsiella pneumoniae
gtgcccgtccgcgccagtattgagccactaacctgggaaaacgccttctttggtgttaacagcgccatcgtgcgcatcacgtctgaagcaccgctcctgacgccagacgcgttagcgccgtggtcacgggtgcaggccaaaattgcggcatcaaatacgggtgaactggatgccctgcaacagctgggattctccctggtagaaggtgaagttgatttggcgctacccgtgaacaatgtcggtgatagcggcgcagaagtggcacaagagacagatattcccgcattacgtcagttagccagcgccgcatttgcgcaaagccgttttcgtgcgccgtggtatgcgcctgacgccagcggtcgcttttatgcacagtggattgaaaatgccgtgcgcggcacctttgatcatcaatgtctgattttacgtgcggcgtccggcgctattcgcggctatgtctctttacgggaactcaatgcgacagatgcgcgaattggcctgctggctggacgcggtgcaggtgctgagctgatgcaaacggcgctaaactgggcgtatgctcgcggtaaaacaactttgcgggtggcgacccaaatgggcaacaccgccgcgctaaaacgatacatacaaagtggtgcgaatgtagaaagcaccgcgtactggttatacaggtga

SEQ ID NO: 261533 - DNA, 1068 bp, Klebsiella pneumoniae
atgagaaagattctgataacaggtggtgccgggtttattggctcggcgctggtgcgttatatcatcaacgaaacgagcgatgcggtggtagtggtcgataagctgacctacgccggaaacctgatgtcgctggcaccggtcgcgcaaagcgagcgctttgcctttgagaaagttgatatctgcgatcgggcagaactggcgcgcgtattcactgagcatcagccagcctgtgtcatgcatctggcagccgaaagccatgttgaccgttctattgacggcccggcagcgtttgttgaaaccaacattgtcgggacttatacattgcttgaagcggcgcgggcttactggaatgcgctgacggaagataaaaaatcagcgttccgttttcatcacatctccactgacgaagtatatggtgacctgcactcgacggatgatttcttcaccgaaaccacgccgtatgcgccgagcagcccctattccgcttcaaaagccagcagcgaccacctggtgcgcgcctggctgcggacctatggtctgccgacgcttatcaccaactgctcgaataactacggtccttaccactttccggaaaaactgatcccgctgatgatcctcaacgcgctggcgggtaaaccgctgccggtatatggcaacgggcagcaaatccgtgactggctgtatgtggaagatcacgcccgcgcgctgtattgcgtggcgaccaccgggaaagtcggtgaaacctataatattggtggtcacaacgagcgtaagaatctcgatgttgtggaaaccatttgcgagctgctggaagaactggctccgaacaagccgcacggcgtggcgcactatcatgacctgatcacctttgtcgctgaccgtccggggcatgatctgcgttatgccattgatgcttcgaaaattgcccgtgaacttggctggctgccgcaggaaacctttgaaagtggaatgcgtaaaacggtgcagtggtatctggctaatgaaagctggtggaagcaggtgcaggacggcagctatcagggcgagcgtttaggtctgaaaggctaa

SEQ ID NO: 261534 - DNA, 1263 bp, Klebsiella pneumoniae
atgagttttgcgaccatttctgttatcggactgggttacatcgggctgcctacagcagctgcgtttgcctcacggcaaaaacaggtgattggtgtcgatatcaaccaacacgcggttgataccatcaatcgtggcgaaatccatatcgtcgagcctgatttggcgagcgtcgtaaaaactgccgtagaaggcggttttttacgagcgagcacgacgccagttgaagcggatgcctggctgattgctgtacccacgccgtttaaaggcgatcatgagccagatatgacctacgttgaatcggctgctcgctccattgcgccagtgctgaaaaaaggcgcgttggtgatccttgaatccacctcgccggtggggtcaaccgagaagatggcagaatggttagcagagatgcgtccagatctcactttcccacagcaggtgggcgagcaggctgacgtcaatattgcctactgcccggaacgcgtgttgccgggacaggtaatggtcgagctgattaaaaacgatcgcgtgattggcggcatgacgccggtttgctcggaccgcgccagcgaactgtacaagattttcctcgaaggtgagtgtgtcgtcactaactcgcggacggcggaaatgtgtaagctcaccgaaaacagcttccgcgatgtgaatatcgcttttgctaatgaattgtcgctgatttgtgccgatcaggggattaacgtctgggaactgattcgcctggcgaatcgtcaccctcgcgtcaatattcttcagcctggccctggcgtgggcggtcactgcatcgctgttgatccgtggtttattgtggcacagaacccgcagcaggcgcggcttatccgtaccgcgcgcgaagtgaacgatcacaaaccgttctgggttatcgatcaggtgaaagcggcggtggctgattgtctggcggctaccgataaacgcgccagtgaactgaaaatcgcctgctttggtctggcgtttaaaccgaatattgatgacctgcgcgaaagcccggcgatggaaatcgctgaactgatcgcccagtggcacagcggcgaaacgctggttgttgagcctaacatccaccagttgccgaagaaactgaccgggctttgtactctggcgcagcttgacgaggcgctggcaacggcagatgtgctggtgatgctggtcgatcatagtcagttcaaagttatcaatggcgacaacgtccatcagcagtatgtcgtcgatgccaaaggagtctggcgctga

SEQ ID NO: 261535 - DNA, 1131 bp, Klebsiella pneumoniae
gtgaaagtactgactgtatttggtacgcgcccggaagccatcaagatggctccgttggtgcatgcgttggcaaaagatcctttttttgaggctaaagtttgcgtcactgcgcagcatcgggagatgctcgatcaggtgctgaaactcttttccattgtacctgactacgatctcaacataatgcagccaggacagggcctgacagagataacctgtcggattctggaagggctaaaaccaattctagccgagttcaaaccagacgtcgtgctggttcacggcgatactactacaacgctggcaaccagcctggcggcgttttatcagcgtattcctgttggtcacgttgaggctggtctgcgcacgggcgatctctattcgccgtggccggaagaggctaaccgtacattgaccgggcatctggcgatgtatcacttctctccaaccgaaacttcccggcaaaacttgctgcgtgaaaatgttgctgacagccgaatcttcattaccggtaatacagttattgatgcactgttatgggtgcgtgaccaggtgatgagcagcgacacgctgcgttcagaactggcggcaaattacccgtttatcgaccccaataaaaaaatgattctggtgaccggtcacaggcgtgagagcttcggtcgtggctttgaagaaatctgccatgcgctggcaaacatcgccaccacgcaccaggacatccagattgtctatccagtgcatctcaacccgaacgtcagagagccggtcaatcgcattctggggcatgtgaaaaatgtcattctgatcgatccccaggagtatttaccgtttgtctggctgatgaaccacgcctggctgattttgaccgactcaggcggcattcaggaagaagcgccttcgctggggaaaccggtgctggtaatgcgcgataccactgagcgtccggaagcggtgacggcgggtacggtacgtctggtcggcacggataagcagcgaatcgtcgaggaagtgacgcgtcttttaaaagacgaaaacgaatatcaagctatgagccgcgcccataacccgtatggtgatggtcaggcatgctctcgcattctggaagcgttaaaaaataatcggatatcactatga

SEQ ID NO: 261536 - DNA, 1104 bp, Klebsiella pneumoniae
gtgaatttactgacagtgagtactgatctcatcagtatttttttattcacgacactgtttctgttttttgcccgtaaggtggcaaaaaaagtcggtttagtggataaacctaacttccgcaaacgtcaccagggattgatacctctcgttggggggatttcggtttacgcagggatttgcttcacgttcggaattgtcgattactatattccgcatgcatctctctatctcgcttgtgccggtgtgcttgttttcattggcgcgctggatgaccgttttgatatcagcgtaaaaatccgtgccaccatacaggccgctgttggcattgttatgatggtgttcggcaaactttatctcagtagcctgggttatatctttggctcctgggagatggtgctcggaccgtttggctacttcctgacgctatttgccgtctgggcggccattaatgcgttcaacatggttgatggcattgatggcttgctgggcgggttgtcctgcgtctcgtttgcagcaatcggtatgattttgtggttcgacgggcaaaccagcctcgcaatctggtgcttcgcgatgatcgccgccatcctgccatacatcatgcttaaccttggtatcctgggtcgccgctacaaagtctttatgggtgatgcgggcagtacgctgattggttttaccgttatctggatcctgctcgaaacgacccagggcaaaacccatcccatcagcccggttaccgctttgtggataatcgccattccgctaatggatatggtggcgattatgtaccgtcgcctgcgtaaaggcatgagcccattctctcctgaccgtcagcatattcaccatttgatcatgcgtgccgggtttacttcccgccaggcgtttgtgctgattacccttgccgcagctctgctcgcctccattggggtgctggcagaatattctcattttgtcccggagtgggtcatgctggtgctctttttgctagcattcttcctctatggatattgcattaagcgtgcctggaaagttgctcgctttattaagcgcgtaaaacgcagactgcgtagaaatcgtggtggcagccccaatttaaccaaataa

SEQ ID NO: 261537 - DNA, 1485 bp, Klebsiella pneumoniae
atgggttccacctcgtcgctgtatgcagccattgatctcggttcgaatagttttcatatgctggttgtgcgcgaggtggctggaagcatccagacgctgacgcgaattaaacgcaaagtgcgtctggctgctggcctgaacagcgaaaatgccctgtctaatgaagcaatggagcgcggttggcaatgtttgcgcctgtttgctgaacgtctgcaagatatccctccctcgcaaattcgcgttgtcgctacggcgacattacgactagccgtcaatgcgggtgattttatcgccaaagcacaggaaatccttggctgcccggtacaagtcatcagcggtgaagaagaagcccgcctgatttatcagggggtggcccacacaacaggcggtgccgatcagcgcctggtggtggatataggcggtgccagtactgaactggtaaccggcacgggtgcacaaaccacctcgttgttcagcctgtcgatgggctgcgtcacctggctggaacgctattttgccgatcgtaatctggcgcaggaaaattttgatgctgcagaaaaagcggcacgcgaagtgttacgtccggttgccgatgaattacggtatcacggctggaaagtgtgcgttggcgcttccggcaccgtgcaggcgttacaggaaatcatgatggcacaggggatggatgaacgcattaccctggaaaagttgcagcaactgaaacaacgcgccattcattgcggtcggctggaagagctagagattgacgggctgacgctggaacgtgcgttagtgttcccgagtggtctggcgatcctgatagccatttttaccgaactgaatattcagtgtatgaccctggcgggcggtgcgctgcgtgaaggcctggtctacggtatgttgcatcttaccgtcgagcaggatattcgcagccgtacgctgcgtaatattcagcgccgctttatgatcgatattgatcaggcacagcgcgtagccaaagttgcggctaacttcttcgatcaggtggaaaatgaatggcatcttgaagcaataagccgcgatttgctcatcagcgcctgccagcttcatgaaatcggcctgagcgttgacttcaaacaagcgccgcaacacgctgcttatctggtacgtaatctggatcttcccggttttacccccgcacagaaaaaattgctggcgacgctactgctcaaccagacgaatccggtcgatctctcatcgctgcatcagcaaaatgccgtaccgccgcgcgtcgcagaacaactctgccgtttactccgcctggccatcatttttgccagccgtcgtcgtgacgatctcgtgccagagatgacattacaggctaaccatgaactgttgaccttgacgcttccgcaaggttggttaacccaacatccgctgggtaaagagattattgatcaggaaagccagtggcagagctatgtccactggccgctggaagtgcattaa

SEQ ID NO: 261538 - DNA, 450 bp, Klebsiella pneumoniae
gtggcgattaatttcagccccaaggttggtgaaatactggaatgcaactttggtaactatcctgttagccagaatggacagttcagcacgacgtattacgatggccgcattccacctgagatgataaaaaataggttggttgtcgtgctcaacggaaaaattaatggcaacgcatgtatcgtcgttccattatcaaccactcgcgaccatgacaagttaaatcgtggaatgcatgttgaaatagccagtaatgttatcaatgacctgcaattctttgatcagcagatacgttgggctaaagccgacctggtacaacaagtcagtcgaaaccgattaaacagagcaaggacttatcgggggtatcttaatcaatgtttgccacatgagttggttgcagacatacagagggcagtcatcaagtcaatcaatgccatatcgctcataaattga

SEQ ID NO: 261539 - DNA, 264 bp, Klebsiella pneumoniae
atgatgcaacatcaggtcaatgtatcggctcgcttcaatccggaaaccttagaacgtgttttacgcgtggtgcgtcatcgtggtttccacgtctgttcaatgaatatggccgccgccagcgatgcacaaaatataaatatcgaattgaccgttgccagcccacggtcggtcgacttactgtttagtcagttaaataaactggtggacgtcgcacacgttgccatctgccagagcacaaccacatcacaacaaatccgcgcctga

SEQ ID NO: 261540 - DNA, 1647 bp, Klebsiella pneumoniae
atgaatggcgcacagtgggtggtacatgcgttgcgggcacagggtgtgaacaccgttttcggttatccgggtggcgcaattatgccggtttacgatgcattgtatgacggtggcgtggaacacttgctgtgccgacacgagcaaggtgcagcaatggcggctatcggttatgcccgtgctaccggcaaaactggcgtatgtatcgccacgtctggtccaggtgcaaccaacctgataaccgggcttgcggacgcactgttagattccatccctgtcgttgccatcaccggtcaggtgtctgcaccgtttatcggcactgacgcatttcaggaagtggatgtactgggattgtcattagcctgtaccaagcacagctttctggtgcagtcgctggaagagttgccgcgcatcatggctgaagcattcgacgttgccagctcaggtcgtcctggtccggttctggtcgatatcccaaaagatatccagttagccagcggcgatctggaaccgtggttcaccaccgttgaaaacgaagtgactttcccccatgccgaagtcgagcaagcgcgccagatgctggcaaaagcgcaaaaaccgatgctgtacgttggcggtggcgttggcatggcgcaggcagttccggctttgcgtgaatttctcgctaccacaaaaatgcctgtcacctgcacgctgaaagggctgggcgcagttgaagcggattatccgtactatctgggcatgctgggaatgcacggcaccaaagcggcgaacttcgcagtgcaggagtgcgatctgctgatcgccgtgggtgcacgttttgatgaccgggtgactggcaaactgaacaccttcgcaccacacgccagcgttatccatatggatatcgatccggcagaaatgaacaagctgcgtcaggtacatgtggctttacagggtgatttaaatgctcttttaccagcattacagcagccgttaaatatcaatgactggcagcaatactgcgcgcagctgcgtgatgaacatacctggcgttacgaccatcccggtgacgctatctacgcgccgttgttgttaaaacaactgtcggatcgaaaacctgcggattgcgtcgtgaccacagatgtggggcagcaccagatgtgggctgcccagcacatcgcccacactcgcccggaaaatttcatcacctccagcggcttaggcaccatgggttttggtttacctgcggcggttggcgcacaagtcgcgcgaccgaacgataccgtcgtctgtatctccggtgacggctctttcatgatgaatgtgcaagagctgggcaccgtaaaacgcaagcagttaccgttgaaaatcgtcttactcgataaccaacggttagggatggttcgacaatggcagcaactgtttttccaggaacgatacagcgaaacaacccttactgataaccccgatttcctcatgttagccagcgccttcggcatccctggccaacacatcacccgtaaagaccaggttgaagcggcactcgacaccatgctgaacagtgatgggccatacctgcttcatgtctcaatcgacgaacttgagaacgtctggccgctggtgccgcctggtgccagtaattcagaaatgttggagaaattatcatga

SEQ ID NO: 261541 - DNA, 1521 bp, Klebsiella pneumoniae
atgtcactgtcaattgttcatacccgcgcagccctgggagtaaatgcgcccccaatcactgttgaggtacatatcagtaaaggtctacccggcttaacgatggtgggcttaccagaaacaacggtaaaagaagcccgcgatcgcgtgcgcagcgccattatcaatagcggatatgaatatccggcgaaaaaaatcaccatcaatctggctccagccgatctgccaaaagaagggggacgatatgatttacctatcgccattgcgttgctggcggcctcagaacagcttacagccaataaattagatgaatatgaattagtcggagaactggcgcttacaggcgctctgcgtggcgttcccggcgcaatctccagtgcaactgaagctattaagtcgggcagaaaaattatcgtcgcgaaagataacgaagatgaagtggggctaattaacggtgaaggatgcctgatagccgatcatctgcaggctgtctgtgcgtttctggagggtaagcacgctctcgaacgcccgaaaccaactgatgcagtatcccgggcgctacaacatgatctcagtgatgttgtcggtcaggagcaaggaaagcgaggactggaaattaccgccgctggcgggcacaaccttttactgattgggccgccgggaacaggtaaaacaatgctcgccagccgtattaatggcctgttgccagatttaagcaatgaagaggcactggagagcgctgcgatattaagtctggtaaatgctgaatcagtacaaaaacaatggcggcagcgcccgttccgctcacctcatcacagtgcgtcgttaactgcgatggtgggcggtggtgcaattccagggccaggtgaaatttcgctggcgcataacggcgtgctttttcttgatgagctacctgaatttgaacggcgtacactggatgccttgcgagagccgattgaatccgggcagatccatctttcacgcacacgagcaaaaataacctatccagcccgtttccaacttgttgcggcgatgaatcccagccctaccggacattatcagggaaaccataaccgctgcacaccagagcaaacgctgcgttatctcaaccgactctctggtccctttctcgaccgcttcgatctctcactggagatcccattaccgccacccggcattttgagtaaaacggtagtgccgggagaaagcagcgccaccgttaaacaacgcgtaatggccgccagaaagcgccaatttaagcggcagaataaactgaacgcctggctggataatccggaaatacgccaattctgcaagcttgagagcgaagatgcgcagtggttggaagaaacgctgatccatctggggttatcgattcgtgcctggcagcggttattgaaagttgcacgaaccattgctgatattgatcagtccgacattatcacacgtcagcatttgcaggaggcagttagctatcgtgccattgaccgtttgctcatccatctgcaaaaactactgacataa

SEQ ID NO: 261542 - DNA, 840 bp, Klebsiella pneumoniae
gtggatacggaattgttaaaaactttcctggaagttagccgaacgcgtcactttggtcgagcggctgaatcgctctatctgacccaatcagccgtgagctttcgaatcagacaactggaaaatcaactgggtgtgaatcttttcacccgccacagaaacaatatccgtttaaccgccgccggagaaaagcttctgccttatgcagaaacgctcatgagcacctggcaggccgcccgtaaggaggtggcgcatacctcacgacataacgagttttctatcggtgccagcgcctcattgtgggaatgtatgcttaatcagtggctgggacgtttgtataaaaatcaggatgcccatacaggcttacagttcgaagcgcgaattgcccaacggcagtctctggtaaaacagctgcatgaacgccagcttgatcttcttattactactgaagcgcccaaaatggacgaatttagcagtcagttgctcgggtatttcactttagcgctttataccagtgccccttccaaactaaagggagatcttaactatctgcgactggaatgggggccagattttcaacagcatgaggcaggtttgatcggtgctgacgaagttcccattctgacaaccagttctgctgaactggcacagcaacagattgcgacgcttaatggttgcacctggctacccgtcagttgggcgcgtaaaaagggcggcctgcataccgttgtcgatagcacaacactttcacggccgctttatgccatatggctgcaaaatagcgataaaaatgcgttgattcgcgatctattgaaaattaacgtgctggatgaagtgtattaa

SEQ ID NO: 261543 - DNA, 1176 bp, Klebsiella pneumoniae
atgacaaatcaaccaacggaaattgccattgtcggcggaggaatggtcggcggcgcactggcgctgggactggctcagcacggattttcggtaacggttatcgaacatgcccaatctgcgacgtttgttgttgatagccagccggacgtgcggatctcggcgatcagtgcggcttcggtatcattgcttaaaggtttaggcgtctgggacgcggtacaggctatgcgttgccatccttaccgcagactggaaacttgggagtgggaaacggcgcatgtggtgtttgatgcagccgaattaaagctgcctgtgcttggctacatggtggaaaacactgttctgcaacaggcgctgtggcaggcgctggaagcgcatccgaaagtaacgttacgtgtgccaggctcgctgattgcgctgcatcgccataatgatcttcaggagctggaactgaagggcggtgaaacgatccgcgcgaagctggtgattggtgccgacggcgcaaattcccaggtgcggcagatggcgggaattggcgttcatgcctggcagtatgcacagtcgtgtatgttaattagcgtacagtgtgagaacgatcccggcgacagcacctggcagcaatttaccccggatggacctcgtgcgtttctgccgttgtttgataactgggcatcgctggtgtggtatgactctccggcacgcattcgccagttgcagaatatgaatatggcgcagttacaggcggaaatcgcgaagcatttcccgtcgcgtcttgggtatgtaacaccgcttgccgctggcgcttttccgctgacgcgccgccatgcgttgcagtatgtgcagccggggcttgcgctggtgggcgatgccgcgcataccatccatccgctggcggggcagggggtgaatcttggttatcgtgatgtcgatgccctgattgacgttctggtcaacgctcgcagctatggcgaagcgtgggccagttatccgatcctcaagcgttaccagatgcggcgcatggcggataacttcattatgcagagcggtatggatctgttctatgccggattcagcaataatctgccaccactgcgttttgtgcgtaatcttggtttgatggcggcggagcgtgctggcatgttgaaacgtcaggcgctgaaatatgcgttagggttgtag

SEQ ID NO: 261544 - DNA, 468 bp, Klebsiella pneumoniae
atgagtcaggtgatcctcgatttacaactggcatgtgaagataattccgggttaccggaagagagccagtttcaaacatggctgaatgcggtgatcccgcagtttcaggaagagtcggaagtgactattcgcgtggtcgataccgccgaaagccacagtctgaatctgacctatcgcggtaaggataagccgaccaacgtgctctccttcccgtttgaagtgccgcctggaatggagatgtcgctactgggcgatctggttatctgccgtcaggtggttgagaaggaagcacaggagcaaggcaaaccactggaggcgcactgggcgcatatggtggtgcacggcagtctgcatttgttaggttacgatcacatcgaagatgacgaagcagaagaaatggaagccctcgaaacagagattatgcttgctctgggctatgaggatccgtacattgccgagaaagaataa

SEQ ID NO: 261545 - DNA, 1539 bp, Klebsiella pneumoniae
atggcttttgcctcattaattgaacgccagcgcattcgcctgctgctggcgttattattcggtgcctgcggaacgctggccttctctccttacgacgtctggcctgcggcgattatttcgctgatggggcttcaggcgttgacctttaaccgtcgtccactccagtctgccgctattggcttttgctggggatttggtctctttggcagcggtattaactgggtctatgtcagcatcgcgacctttggtggaatgcctggcccggttaacgtcttcctggtggtgctgctggcggcgtatttgtcgctgtataccggactgtttgctggcgtgctgtcgcgtctgtggccgaaaaccacctggctgcgcgtggcgattgccgcccctgctctctggcaagtgaccgagtttctgcgcggttgggtgctgactggcttcccgtggttacagttcggctatagccagattgatggcccgttaaaagggctggcaccgataatgggcgtggaagccattaacttcctgctgatgatggttagcggcctgctggcactggcgttggtcaaacgcaactggcgtccgctggcggtggccgtcgtgctgtttgcccttcccttcccgctgcgttacatccaatggtttaccccgcaaccggaaaaaactattcaggtttcgatggttcagggcgatattccgcaatcgctgaaatgggacggagaccagctacttaatacgctgaagatttactacaacgcaacggcaccgctgatgggcaaatcatcgttgattatctggccggagtcggcgataaccgatctggaaattaatcagcaaccgttcctcaaagcactggacggtgagttgcgcgataaagggagctcgctggtaaccgggattgttgacgcgcgtctcaataagcagaaccgctacgatacttacaacaccatcatcacgctggggaaaggtgcgccgtacagctacgaatcagccgatcgctataacaaaaaccatctggtgccgtttggcgagtttgtcccgctggagtcgattctgcgtccgttagcgccgttctttgatctgccgatgtcgtcgttcagccgtgggccatatatccagccaccgctgtcggtaaacggtattgagcttactgcggctatttgctacgagatcattctcggcgagcaagtgcgtgataacttccgcccggataccgattatctgctgactatctccaacgatgcatggtttggtaagtctattggtccatggcagcacttccagatggcgcgaatgcgtgcgctggagttggcgcgcccgctactgcgtagcaccaacaacggcattacggcggtgattggtccgcagggtgagattcaggcgatgatcccgcagttcacccgcgaagtgttgaccactaatgtgactccgaccaccggactcacaccgtacgcacgtaccggcaactggccgctgtgggtactgacggcattgtttggttttgctgctgtgctgatgagcctgcgtcaacgacgtaaataa

SEQ ID NO: 261546 - DNA, 741 bp, Klebsiella pneumoniae
atgtctatagactggaactggggtatttttttacaacaagccccgttcggcaacaccacctatcttggttggatctggagtggttttcaggtgacgatcgctttgtcgatctgcgcctggattatcgctttcctcgtcggttcatttttcggcattttacgtaccgttccaaaccgttttctctccggtctgggtacgttgtatgtcgaactgttccgcaacgtgccgttgattgtgcaattctttacctggtatctggtgatcccggagctgctgccggagaaaatcggcatgtggtttaaggccgagctggatcccaatattcagtttttcctttcatccatgctctgcctggggctgtttaccgccgcccgtgtttgcgaacaggtacgcgccgcgatccagtcgctgccgcgagggcaaaaaaatgccgcgctggcgatgggcctgacgctaccgcaggcttatcgatacgtactgttgcctaatgcttatcgcgttatcgtcccgccgatgacctccgagatgatgaacctggtgaaaaactctgccatcgcctcgactattggtctggtggatatggcggcgcaggcgggtaaattgcttgattactcagcccacgcctgggagtcgtttaccgccatcacgctggcgtatgtattgattaacgcttttatcatgctggtgatgacgctggttgaacgtaaagttcgcctgcctggcaacatggggggcaaataa

SEQ ID NO: 261547 - DNA, 936 bp, Klebsiella pneumoniae
atggcactgccaattctgttagattgcgacccaggtcatgacgacgctatcgcaatagttcttgccctcgcctcaccagagcttgatgtcaaagcaattacgtcttccgccggaaaccagactccagaaaaaaccttacgcaatgttctgcgtatgctgaccttgcttaatcgcaccgatattccggtagcaggcggcgcggtaaaaccgttaatgcgtgagttgattatcgcggacaatgtgcacggcgaaagcggtctcgacggcccggcattaccggaaccgacgttcgcaccgcaaaactgtacggcggtggagctgatggcgaaaacgctgcgtgaaagtgcggaacctgtcacgattgtgtctaccggaccgcaaactaacgttgccttgctgctcaatagccatccggaactgcatagcaaaattgcccgtatcgtgattatgggcggcgcaatggggcttggtaactggacgccagccgccgagtttaatatttatgttgacccggaagcggcagaaattgttttccagtcagggatcccggtggtgatggccggtctggatgttactcacaaagcacaaattcacgttgaggacaccgagcgtttccgcgcgattggcaaccctgtttcaaccattgttgccgaactgctggatttcttcctcgaatatcataaagacgaaaaatggggctttgtcggcgcaccgctgcatgacccatgcaccatcgcctggctgttaaacccggagttgtttaccactgttgagcgctgggttggcgtggaaacacaagggaaatatacccagggtatgacggttgttgattattattatctgaccggcaataaaccgaatgctactgtaatggtcgatgttgatcgtcagggccttgttgatttactggctgatcgtctgaaattttacgcttaa

SEQ ID NO: 261548 - DNA, 483 bp, Klebsiella pneumoniae
atgaacaaggttgctcaatattaccgtgaactggtcgcgtcactgagcgaacgcctgcgcaatggcgaacgtgatatcgacgcactggtggaacaggcgcgcgagcgcgtaataaaaacaggggagttaacgcgaaccgaagtcgatgagctgacgcgagctgtcagacgtgacctggaagagttcgccatgagctatgaagagagcctgaaagaagagtctgacagcgtctttatgcgggtgattaaagaaagcttgtggcaggagctggcagacatcaccgataaaacgcagcttgaatggcgcgaagttttccaggacctcaatcatcacggggtttatcacagcggagaagtggtagggctgggtaatctggtctgcgagaaatgtcatttccatctcccgatctacacaccggaagtgctgacgctatgcccgaaatgtggtcatgaccagttccagagacgcccgttcgagccttaa

SEQ ID NO: 261549 - DNA, 582 bp, Klebsiella pneumoniae
gtgcgatatctggcaacattgttgttatctctggcggtgttaatcaccgccgggtgtggctggcatctgcgtgataccacgcaggttccttccactatgaaggtcatgatcctggactcaggcgatccgaacgggccattaagccgtgcggtgcgtaaccagttacgtctgaatggtgtcgagttgcttgataaagaaaccacgcgtaaggacgttccatccctgcgtttgggtaaagtgagcatcgcgaaagataccgcatcggtattccgtaacggtcaaacagcagagtatcagatgatcatgacggtcaatgcgaccgtgttgatccccggccgtgacatctacccgattagcgccaaagtcttccgttcgttcttcgataacccgcaaatggcgttagcgaaagataacgaacaagacatgatcgtaaaagagatgtacgaccgtgctgccgaacagctgattcgtaagctgccaagcatccgtgctgcggatattcgttccgacgaagaacagacgtcgaccacaacggatactccggcaacgcctgcacgcgtctctaccacgctgggtaactga

SEQ ID NO: 261550 - DNA, 1032 bp, Klebsiella pneumoniae
atgattcggttgtacccggaacaactccgcgcgcagctcaatgaagggctgcgcgcggcgtatcttttacttggtaacgatcctctgttattgcaggaaagccaggacgctattcgtcaggtagctgcggtacaaggattcgaagaacaccacactttttccattgatcccaacactgactggaatgcgatcttttcgttatgccaggccatgagtctgtttgccagtcgacaaacgctattgctgttgttatcagaaaacggaccgaatgcggcgattaatgaacaacttctcacactcaccggacttctgcatgacgacctgctgttgatcgtccgcggcaataaattaagcaaagcgcaagaaaatgccgcctggtttactgctcttgcgaatcgcagcgtgcaggtgacctgtcagacaccggagcaggctcagcttccccgttgggttgctgcgcgtgcaaaacagctcaacttagaactggatgacgcggcgaatcaggtgctctgctactgttatgaaggtaacctgctggcgctggctcaggcactggagcgtttatcgctactctggccagacggcaaactgacattacctcgcgttgaacaggcggtgaatgatgccgcgcatttcaccccttttcattgggttgatgctttgttgatgggaaaaagtaagcgcgcgttgcatattcttcagcaactgcgtctggaaggcagcgaaccggttattttgttgcgcacattacaacgtgaactgttgttactggttaacctgaaacgccagtctgcccatacgccactgcgtgcgttgtttgataagcatcgggtatggcagaaccgccggggcatgatgggcgaggcgttaaatcgcttaagccagccgcagttacgtcaggccgtgcaactcctgacacgaacggaactcaccctcaaacaagattacggtcagtcagtgtgggcagagctggaagggttatctcttctgttgtgccataaacccctggcggacgtatttatcgacggttga

SEQ ID NO: 261551 - DNA, 642 bp, Klebsiella pneumoniae
atgaaatctttacaggctctgtttggtggcacctttgatccggtgcactatggtcatcttaaacccgtggaaacgctggcgaatttgattggtctgacgcgggtcacaatcatccctaataatgttcctccgcatcgtccccagccggaagcgaacagcgtacagcgtaaacacatgcttgaactggcgattgccgacaagccattatttactcttgatgaacgcgagctaaagcgcaatgccccctcttacactgcgcaaacactgaaagagtggcggcaggaacaagggccggacgtgccgctggcgtttattataggtcaggattcactgctgacctttccgacctggtacgaatacgaaacgatactcgacaatgcacatttgatcgtctgtcggcgtccaggttacccacttgaaatggcgcaaccgcaataccagcaatggctggaagatcatttgacacataacccggaagatcttcaccttcagcctgccggtaaaatttatctggctgaaacgccgtggtttaacatctcggcgaccattatccgcgaacgtttgcaaaacggtgaatcgtgtgaggatttattgccggaaccggtactgacttacattaaccaacaaggcttgtatcgctga

SEQ ID NO: 261552 - DNA, 612 bp, Klebsiella pneumoniae
atgcgactgtggttaattcgtcatggtgaaacgcaagcgaatatcgatggtctgtacagcggtcatgctcccacacccctgactgcgcgcggtattgagcaagcgcaaaatctgcatacgctgctacatggtgtttcctttgacctggttttatgcagtgaactggaacgtgcacagcataccgcgcgacgggttctcagtgatcgccagcttcccgtgcaaatcatccctgaactcaacgaaatgttttttggcgactgggagatgcgacatcatcgcgacctcatgcaagaagatgccgaaaactatagcgcgtggtgcaatgactggcagcatgctatccccacgaacggtgaaggatttcaggcattttcacaacgagtggaacggtttatcgcaaggcttagtgaatttcagcactatcagaatattttagtcgtcagccatcagggtgtactgagtctgttaatcgcccgtttaattggtatgcctgccgaagctatgtggcattttcgcgttgaccaggggtgttggagcgccattgatatcaaccaaaaattcgcgacgctacgcgtcctcaatagccgtgccatcggggtcgagaatgcatga

SEQ ID NO: 261553 - DNA, 468 bp, Klebsiella pneumoniae
gtgaagctgcaacttgtcgccgtgggaacgaaaatgccggactgggtacaaactggttttaccgagtacctgcgtcgttttccgaaagatatgcccttcgagctgattgaaattccggccggaaaacgcggcaagaatgcggacatcaagcgcatactcgacaaagagggtgagcagatgttggcggccgcaggcaaaaaccgcattgtcaccctcgatattccaggcaagccctgggatacgccgcagttagccgctgagctggaacgctggaagctggatggtcgcgacgtcagtctactgattggcgggcctgaagggttgtcgcctgcctgtaaagcggcggcggagcagagctggtcgctgtcggcgcttaccctcccccatccgttggttcgcgtgctggtcgcagagagtctgtaccgggcgtggagcatcaccaccaaccatccttatcaccgtgagtga

SEQ ID NO: 261554 - DNA, 1089 bp, Klebsiella pneumoniae
atgcgtaagcagtggctcgggatctgcatcgcggcaggaatgctcgcggcatgtacaagcgatgatggtcagcaacagacggtaagtgtaccgcagcctgcggtatgtaacggccccatagttgaaattagcggggcggacccgcgtttcgaaccactgaacgcgacggcaaatcaggattaccagcgcgacggtaaaagctacaaaatcgtgcaggatccgtctcgatttagccaggcgggactggcggcaatctatgatgccgaacccggcagtaacctgacggcctctggcgaagcattcgatccgacacagctgacagcggcccatccaacgcttccgatccccagctacgccagaatcactaacctggctaacgggcgaatgatcgtggtgcgcattaatgatcgcggtccttacggcaacgaccgcgttatttcgctttctcgcgcggcagctgaccgtcttaacacgtcaaacaacaccaaagttcgtatcgatccgattattgtcgcccaggatggttcgctttctggtcctggtatggcctgtaccacagttgccaaacagacttacgccctgcctgcacctcccgatttaagcggcggcgcgggaacaaattcagtgtctggcccgcagggtgacattcttccggtcagtaattcgacgctaaaaagcgaagatccgaccggcgcgccggtaaccagcagcggtttcctcggcgcaccaacgaccttagcgcctggtgttctggaaggcagcgaaccaacacctgcaccacagcccgttgttacagctccggcgacaacgcctgcaaccacgcctgcaatggtgacaccgcaagccacctcgcaaagcgccagcggcaactttatggtgcaagtcggagccgttagcgatcaggctcgtgcgcaacagtaccaacagcaactgggacagaagttcggcgtccccggtcgcgtaactcaaaatggcgcagtctggcggatccagcttggcccattcgccagcaaagccgaagccagtaccttgcagcaacgtttgcaaaccgaagcccaattacagtcatttattaccaccgcgcagtag

SEQ ID NO: 261555 - DNA, 642 bp, Klebsiella pneumoniae
ttgtatcaggataaaattcttgtccgccagctcggtcttcagccttacgagccaatctcccaggctatgcatgaattcaccgatacccgcgatgaaagtacccttgatgaaatctggctggtcgagcactatccggtatttacccaagggcaggcaggaaaagcggagcacattttaatgccgggtgatattccggtgattcagagcgatcgcggtgggcaggtgacttatcacgggccggggcaacaggtgatgtatgtgttgcttaacctgaaacgccgtaaactcggtgtgcgtgaactggtgaccttgcttgagcaaacagtggtgaataccctggctgaactgggtatagaagcgcatcctcgggctgacgcgcctggtgtctatgtcggggaaaagaaaatttgctcactgggtttacgtattcgacgcggttgttcattccacggtctggcattaaacgtcaatatggatctttcaccatttttacgtattaatccttgtgggtatgccggaatggaaatggctaaaatatcacaatggaaacccgaagcgacgactaataatattgcaccgcgtttactggaaaatattttagcgctactaaacaatcctgacttcgaatatattaccgcttaa

SEQ ID NO: 261556 - DNA, 954 bp, Klebsiella pneumoniae
gtggatagtaataatcaaattgaaacctgtttaagcagaaagtcgtcagaagataaaccacaaatatttacaaccttacgaaatattgatcttaaccttctgactatttttgaagctgtatatgtacataaagggatcgttaatgcagcgaaagtgcttaatctgacaccctcggcaatcagtcagtctattcagaaactgcgcgttatattccctgacccattgtttattcgcaaaggccagggtgtcactcctaccgcatttgcgatgcatctacatgagtatatcagtcagggccttgagtccattcttggcgcgctggatatcgaaggaagctatgataagcaacgaacgataaccattgcgaccaccccctcggtcggagccctggtccttcctgtcatctatcgggcgattaaatctcactatccgcagcttttactgcgcaacccccccatcagcgacgcggaaaaccaactcagtcagtttcaaaccgatctcatcatcgataacatgttttgcaccaatcgtacggtgcaacatcatgttctgttcaccgacaatatggtgttaatttgccgcgagggaaatccactactctctttagaagatgacagggagactatcgacaacgctgcgcatatactcctgttaccggaagggcaaaatttcagcggtctgcggcagagagttcaagagatgtttccagaccggcaaatcagtttcaccagctacaacattttgacaatcgctgcactggttgccaacagtgacatgttagcgattattcccagccgtttttataacctgtttagccgttgctggccgctggaaaaactgccttttccgtccttaaatgaggagcaaatagatttctctatccactacaacaaattcagcctgcgtgatcccatcctgcacggggtaatagatgttatccgtaatgcattttga

SEQ ID NO: 261557 - DNA, 204 bp, Klebsiella pneumoniae; identical to SEQ ID NO: 294

SEQ ID NO: 261558 - DNA, 789 bp, Klebsiella pneumoniae
atgctggttgccgcaggacagtttgctgttacatctgtgtgggaaaagaacgctgagatttgtgcctcgttgatggcgcaggcggcggaaaacgacgtatcgctgtttgtcctgccggaagcattgctggcgcgcgatgatcatgatgcagatctatcggttaaatcagcacagctgctggaaggcgaattcctcggacgtttacggcgagaaagtaaacgtaacatgatgacgacaattctgacgattcatgttccttcaacgccggggcgcgcatggaatatgctggtggcgctacaggcaggaaacatcgtcgcccgttatgccaaactgcatctctatgatgcatttgccattcaggaatcacgccatgttgatgctggtaatgaaatagctccgttactggaggtggaagggatgaaggtcggtctgatgacctgttatgacttacgctttccagagctggcgctggcacaggcattacagggagctgaaatcctggtacttcctgccgcctgggttcgtgggccgctcaaagagcatcactggtcaacgttgcttgccgctcgtgcgctggataccacctgttatatggtggcggcgggggagtgcgggaacaaaaatatcgggcaaagccggattatagatccctttggcgtcaccattgcggcagcgtcagaaatgcctgcactcattatggcggaagtgacgcccgaacgtgtgcgtcaggtgcgcgcgcaacttcccgttttaaacaaccgtcgctttgcgccgccgcaattattatga

SEQ ID NO: 261559 - DNA, 384 bp, Klebsiella pneumoniae; identical to SEQ ID NO: 26937

SEQ ID NO: 261560 - DNA, 561 bp, Klebsiella pneumoniae
atgaacgtgagtcaatatgtcgctatcttttcctttgtttttattcagttaatcagcgttggtaaagtttttgctaacgcagatgagtggatgacaacgtttagagaaaatattgcacaaacctggcaacagcctgaacattatgatttatatattcctgccatcacctggcatgcacgtttcgcttacgacaaagaaaaaaccgatcgctataacgagcgaccgtggggtggcggttttggtcagtcgcgttgggatgaaaaaggaaactggcatggcctgtatgccatggcatttaaggactcgtggaacaaatgggaaccgattgccggatacggatgggaaagtacctggcgaccgctggcggatgaaaattttcatttaggtctgggattcaccgctggcgtaacggcacgcgataactggaattacatccctctcccggttctactgccattggcctccgtgggttatggcccagtgacttttcagatgacctacattccgggtacctacaacaatggcaatgtgtactttgcctggatgcgctttcagttttga

SEQ ID NO: 261561 - DNA, 1386 bp, Klebsiella pneumoniae
atgctgacattcattgaactccttattggggttgtggttattgtgggtgtagctcgctacatcattaaagggtattccgccactggcgtgttatttgtcggtggcctgttattgctgattatcagtgccattatggggcacaaagtgttaccgtccagccaggcttcaacaggctacagcgccacggatatcgttgaatacgttaaaatattgctaatgagccgcggcggcgacctcggcatgatgattatgatgctgtgtggctttgccgcttacatgacccatatcggcgcgaatgatatggtggtcaagctggcgtcaaaaccattgcagtatattaactccccttacctgctgatgattgccgcctattttgtcgcctgtctgatgtctctggccgtctcttccgcgaccggtctgggtgttttgctgatggcaaccctgtttccggtgatggtaaacgttggtatcagccgtggtgcagctgctgctatttgtgcctccccggcggcgattattctcgcaccgacttcaggggatgtggtgctggcggcgcaggcttccgaaatgtcgctgattgacttcgccttcaaaacgacgctgcctatctcaattgctgcaattatcggcatggcgatcgcccacttcttctggcaacgttatctggataaaaaagagcacatctctcatgaaatgttagatgtcagtgaaatcaccaccactgctcctgcgttttatgccattttgccgttcacgccgatcatcggagtgctgatttttgacggcaaatggggtccgcaattacacatcatcactattctggtgatttgtatgctgattgcctccattctggagttcatccgcagctttaatacccagaaagttttctctggtctggaagtggcttatcgcgggatggcagatgcgtttgctaacgtggtgatgctgctggttgccgctggggtattcgctcaggggcttagcaccatcggctttattcaaagtctgatttctatcgccacctcgtttggttcggcgagtatcatcctgatgctggtattagtgatcctgacaatgctggcggcagtcacgaccggttcaggcaatgcgccgttttatgcgtttgttgagatgatcccgaaactggcgcactcttccggcattaacccggcgtatttgactatcccaatgctgcaggcgtcaaacctcggtcgtaccctgtcacccgtttctggcgtagtcgttgctgttgccgggatggcgaaaatctcaccatttgaagtcgtaaaacgcacctcggtgccggtgcttgttgggctggtgattgttatcgttgctacagagctgatggtgccaggaacggcagccgcggtcacaggcaagtaa

SEQ ID NO: 261562 - DNA, 681 bp, Klebsiella pneumoniae
atgacagctccattaaccctattgatcgttgaggacgaaacgccgctggcagagatgcatgcggaatatattcgtcacattcccggattcagtcagatattactggcgggaaacctggcgcaggcccgaatgatgatcgagcgttttaagccggggctaatcttgctcgataactatcttcctgacggtagagggattaatttactgcatgaactggtgcaggcgcattatcccggcgacgtggtgtttaccactgcagccagtgatatggaaacggtgtctgaagccgtacgttgtggtgtatttgattatctcattaagccaattgcctatgaacggctggggcaaacgctaacccgtttccgccagcgtaaacatatgctggaaagtattgatagcgccagccagaagcaaattgatgagatgtttaatgcctatgctcgcggtgaacccaaagacgaactgccgaccggcattgaccccttgacgctaaacgcggtgcgaaaactgtttaaagagcctggtgtgcaacatacggcagaaacggtggcgcaggcactgactatcagccgcaccactgccagacgttatcttgaatattgcgccagccgccatctgattattgctgaaattgttcacggcaaagttggcagaccgcaacgcatataccacagtgggtga

SEQ ID NO: 261563 - DNA, 1659 bp, Klebsiella pneumoniae
atgttgcagcttaacgagaataaacagtttgcatttttccaaagactggcatttccgctgcgtatctttttgctgattctggtgttctcaatatttgtcattgcagccctggcgcaatattttacggccagttttgaggactatttaacgcttcatgtgcgcgacatggcaatgaatcaggcaaaaattattgcttctaatgacagtatcatcagcgcagtgaaaacgcgtgactacaagaggctggcgaccatcgctgacaaattacaaagagatactgatttcgattatgtggtgattggcgatcggcactcgattcgtctttaccatcctaatccggagaaaattggttatcctatgcagttcaccaaaccgggcgcgctggagaaaggggagagctacttcatcaccgggaaagggtcaattggcatggcgatgcgtgccaaaacgccaatctttgatgacgatggaaaagtcatcggcgtggtgtcgattggctacctggtgagtaaaatcgatagctggcgtgctgagtttttattaccgatggcaggtgtgtttgtcgtgctgttagggattctgatgttgctatcgtggttcctggccgcgcatatccgtcggcagatgatgggcatggagccaaagcaaatcgcacgcgtggtccgtcagcaagaggcgctgtttagttcggtttatgaagggctcattgcggtggatccgcatggttacattaccgccatcaatcgtaacgcaagaaagatgctgggtctgagttcccccggacggcaatggttgggtaaacccattgctgaagtggtcaggcccgccgatttctttaccgaacagattgatgaaaaacgtcaggatgtggtggcgaactttaacggtctgagcgttattgccaaccgggaagctattcgttctggtgatgatttgctgggggccattatcagctttcgtagtaaagacgaaatatccaccctcaatgcgcaactgacgcaaattaaacaatacgtcgagagcctgcgcacattgcgacacgagcatctcaattggatgtcgacgctcaatggtctgttgcagatgaaagagtatgatcgcgtgttggcgatggtgcagggggagtctcaggcccagcaacagcttattgatagcctgcgcgaggcgtttgccgatcgccaggtggcggggctgctttttggtaaagtgcagcgcgcccgcgaactggggctaaaaatggtcatcgtccccggaagtcagctttcgcaactgccgccaggactggacagcaccgagtttgcagccattgttggcaatttacttgataacgccttcgaagccagcctgcgtagcgatgaaggaaacaagatcgttgaattattcctcagcgatgaaggcgatgatgtggtgattgaagtcgccgatcagggctgcggcgttccagagtctctacgagacaaaatatttgagcagggtgtcagtacgcgtgctgacgagcccggcgaacatggcattgggttgtacttgattgccagctacgtaacgcgctgcggtggtgttatcactctcgaagataatgatccctgcggtaccttattttcaatctatattccgaaagtgaaacctaatgacagctccattaaccctattgatcgttga

SEQ ID NO: 261564 - DNA, 1299 bp, Klebsiella pneumoniae; identical to SEQ ID NO: 35900

SEQ ID NO: 261565 - DNA, 273 bp, Klebsiella pneumoniae; identical to SEQ ID NO: 35899

SEQ ID NO: 261566 - DNA, 1356 bp, Klebsiella pneumoniae; identical to SEQ ID NO: 35898

SEQ ID NO: 261567 - DNA, 2661 bp, Klebsiella pneumoniae; identical to SEQ ID NO: 35897

SEQ ID NO: 261568 - DNA, 699 bp, Klebsiella pneumoniae; identical to SEQ ID NO: 35896

SEQ ID NO: 261569 - DNA, 420 bp, Klebsiella pneumoniae; identical to SEQ ID NO: 35895

SEQ ID NO: 261570 - DNA, 1038 bp, Klebsiella pneumoniae; identical to SEQ ID NO: 35894

SEQ ID NO: 261571 - DNA, 690 bp, Klebsiella pneumoniae; identical to SEQ ID NO: 35893

SEQ ID NO: 261572 - DNA, 588 bp, Klebsiella pneumoniae; identical to SEQ ID NO: 35891

SEQ ID NO: 261573 - DNA, 882 bp, Klebsiella pneumoniae; identical to SEQ ID NO: 35890

SEQ ID NO: 261574 - DNA, 738 bp, Klebsiella pneumoniae; identical to SEQ ID NO: 35888

SEQ ID NO: 261575 - DNA, 1623 bp, Klebsiella pneumoniae; identical to SEQ ID NO: 35887

SEQ ID NO: 261576 - DNA, 651 bp, Klebsiella pneumoniae; identical to SEQ ID NO: 35885

SEQ ID NO: 261577 - DNA, 957 bp, Klebsiella pneumoniae; identical to SEQ ID NO: 35884

SEQ ID NO: 261578 - DNA, 480 bp, Klebsiella pneumoniae; identical to SEQ ID NO: 35883

SEQ ID NO: 261579 - DNA, 381 bp, Klebsiella pneumoniae; identical to SEQ ID NO: 35876

SEQ ID NO: 261580 - DNA, 186 bp, Klebsiella pneumoniae
atgggcgatcatatctatgagattaacagcgataagtgtaccgaatgcgtagggcactacgagacaccaacctgccagaaggtgtgcccgatccccaatactattgtgaaggatccgcaacatgtcgagacggaagaacagttgtgggataaatttgtgctgatgcatcacgcggataaaatttaa

SEQ ID NO: 261581 - DNA, 918 bp, Klebsiella pneumoniae; identical to SEQ ID NO: 15977

SEQ ID NO: 261582 - DNA, 285 bp, Klebsiella pneumoniae
atggcctatgaacgtgaaaacctaatcgaaaagcacctcgtcgctgaagtaaaaaaggctggcggggttgcctttaagttcgtatctcccggtctccgctcggtaccagatcgcattgttctgctacccggcggtcgcatcgtctttgtcgaatgcaaagcaccaggcaaaccaccacgacctgatcagttgcgcgagcatgaacgtctgcgaaaactgggctttaccgtggtagtactggatagtaaggagctttcatgtatattaggcaaaaaattacaatag

SEQ ID NO: 261583 - DNA, 195 bp, Klebsiella pneumoniae; identical to SEQ ID NO: 15978

SEQ ID NO: 261584 - DNA, 762 bp, Klebsiella pneumoniae
atgcaggaactaactgaaatgccgatcaactatccatacccgagagaatcttttcctgactttttgagggagtgtgggttcaccaatttttcccacgaacagcgtgagacttatgactgctatcgtttaacgaatggcgtaattgttaacctttacaccacccggaccattcagtttcaagggagccctcaagaacgtcccaatgttgaaactgcaataatgtcccatttaggaacgccccccacggcaacaccactagccgtagaacagccatctgagcttcccaaaaagatattcattgttcacggccatgaccatactgcaaaggaacaacttgagctaatccttcataaacttggattaccagaccatttcattttgcagaatacgggagggactggactcaccattattgaagagcttgaacgtgaaattgggcaaggacaaactgctactcgtttcgggattgttcttttgacacctgatgatatgggatactcaaagcgcgccggtgaagcagaaatccaaccccgcgcaagacagaacgttgtactcgagatgggtatgcttctttcgtccttagggcgcagcaatgtagcaatccttcagaaacagcacctagaacagccttctgatgctaacgggattttgtatctgaatttcaacgaccatgtacgtgaaacagttcctcgtctagtgcaacggttacaaaattctggtttcgaatttacacaagctcaaatagctaacgcttcctcgtaa

SEQ ID NO: 261585 - DNA, 2064 bp, Klebsiella pneumoniae
atgtccaatatactatggggcgacctggaaacctattgcgaaatccctattacgaacggtacccatgcgtatgccgaaggcgttgaagtgatgcttttcgcatgggctatcaacgacgggccagtaaacgtgtgggatatcactgccggtggtggtattccacacggcttatacgaagcaatcgcagaccctgaaaccctgctttatttccataactctcacttcgaccgcaccgttctgcgttatgcaatgccgcgactggcaccgccagtcgaacgttggcgcgacacgatggtgcaggcgctggcgcacggtctcccggggtctctgggggaactctgcgaagtactaggcgtcccgcaagacaaagcgaaggacaaagaaggtaaagcgctgatccagctgttctgtaagccacgtccgaaaaacagcaaactgcgtcgggccaccagtaaaacccatccggaagaatggcggcgctttgttgcttacgccggactggatatcgaagcaatgcgtgaagtctataaacgtctgccgaagtggaattatcaggggacagagctggcgctctggcatcgtgatcagcagatcaacgaccggggcgtctgcatggacatgcaactcgcgcgcgctgcgatcgaagcggtagaccaggagcaaaagcgcctggcaaagcgtacacaggaaatgactgatggcgaagtgcaggcagccacacaacgggacgcgttgattaagcacatcgttgaatcctacggtgtggagctaccagacatgcaacgcagtaccctggaacgtcgtatggccgaccccgatttatcatctgccgtgaaagaactgctggctatccgcctgcaagccagtactaccagcaccagtaaatacaaggcactgatgaaaggcgtaagccacgacgggcgcttacgcggtacgctacagttctgcggggcgtcacgtaccggtcgttgggccggacggctattccagccccagaaccttccccgcccttcactaaaacaggaacaaatagacgaaggcatcgaagcactgaaagccggatgtgcagacctgctgtttgacaatatcatggaactaaccagttcagcgttacgtggctgcattatcgcgccaacaggcaaaaaactagtggtaagtgacttgtcaaacattgaaggccgtatgctggcatggctggcgggagaagaatggaaactgaatgcattcagagagtatgacgctggaacgggtccggacttatataaactggcgtatgcaaaagctttcgatattgcaccagatgatgttgataaacacatgcgtcagatcggtaaagtcatggaactcggtctgggttatggaggtggtgtatcggctttcatcacttttgctctggtttacggtctcgatctcgacgagctggcgaacgccgcactgccaaacattccccgcgatgttatccgcgaggcaaaaagctggtacgacgaatcggttaagcgtaagtcgacctttggcctgtccgagcgtgtattcatcgcatgtgactcgctcaagcgcctgtggcgcagggcgcacccggcgacctgcgatttctggtacgagctggagcgcactgtccgcacagcaatcgccacaccgcaaaaaacattgtattgcggctatcttaaaatccgacgtgatggcgcgtggctgcgcatacagctaccatccggacgcgctgtatgctacccgtctccggttatcgaacaagggaatatcacctacatgggtgttaactcttattcgcgtaaatggcaacgactcaaaacctacggcggaaagctggtggagaacgtcacccaggcggccgcccgcgacgttctagccagaaacatgccgctgatcgagggtgccggttacagcattgtgctaacggtacacgacgaggtgatcaccgaagcaccagacacagaagatttcaacgataaagcgctttccgcgcttctctccactaaccccgaatgggcacccgatattccgctgaacgctggcggctttgaggcgtaccactacaaaaaagattga

SEQ ID NO: 261586 - DNA, 435 bp, Klebsiella pneumoniae
atgaacagaacgattcttgtccctatcgatatttccgattcagaattaactcaacgcgtgattagccacgttgaggcagaggcaaagattgatgatgcagaggttcatttcctgacggtaataccttcactgccctactatgcctctctgggtttagcgtattccgcagaattaccggcaatggatgacctgaaagcggaagccaaatcgcaactggaagagatcattaaaaaatttaaactgccaaccgacagagtgcatgtccatgttgaggaaggctcgcccaaagaccgcattctggaattggcgaagaagatccccgctcatatgatcatcattgcttcccatcgaccggatatcaccacttatctgctcggttccaacgccgcagctgtcgtgcgtcacgcagagtgctccgtgctggttgtgcgctga

SEQ ID NO: 261587 - DNA, 1134 bp, Klebsiella pneumoniae
atgaaaagcaaagtactggcatttttaattcctaccctgctcgccgcaggtgctgcacatgcagccgaagtttataataaagacggcaacaaattagatctgtatggcaaagttgatggactacattatttttctgataattcagcgaaagatggcgaccagagctatgcgcgtctgggttttaaaggcgaaacccaaattaacgatcaacttactggctacggtcaatgggaatacaatattcaggcaaacaacactgaatcttcaaaaaaccagtcatggacccgtctggcatttgccggattgaaatttgcagattacggttctttcgattacggacgtaattatggcgtaatgtacgacatcgaaggctggaccgatatgctgcctgaatttggcggtgactcttataccaatgcagacaactttatgactggtcgtgccaatggcgtcgcgacttatcgtaatactgatttcttcggtctggtaaatggtctgaacttcgcggtgcagtatcaaggtaacaacgaaggtgccagtaatggtcaggaaggcaccaacaacggacgtgatgttcgccatgaaaacggtgacggctggggtctttccacaacatatgatttaggcatgggctttagcgctggtgcggcatacacctcttctgaccgcaccaatgaccaggttaaccatactgcggcgggtggtgataaagcagacgcgtggactgctgggctaaaatacgatgctaacaatatttacctggcaaccatgtattcagaaacgcgtaatatgaccccgtttggcgacagcgattatgctgttgctaacaaaacccagaactttgaagttactgcacagtaccagtttgattttggtctgcgtccggcagtctctttcctgatgtctaaaggccgtgacctgcacgctgccggtggtgcagacaacccggcaggtgttgatgataaagatctggttaaatacgccgatgttggcgcgacttactatttcaacaaaaatatgtccacctacgttgactataaaatcaacctgttggatgaagatgacagcttctacgctgccaacggcatctctaccgatgatattgtcgctttaggtctggtttatcagttctaa

SEQ ID NO: 261588 - DNA, 267 bp, Klebsiella pneumoniae
atgcgagcagcgttttgggtagggtgtgccgctttattgttgtcggcgtgtagtagtgaacctgttcagcaggcgactgcggcgcacgtagcgccaggtttaaaagcgtcgatgtccagtagtggagaagcaaattgtgcaatgatcggcggttcgctttctgttgcccgtcaactggatggtacggcgattgggatgtgtgcattacccaacggcaaacgctgtagcgaacagtcacttgccgccgggagctgtggcagctattaa

SEQ ID NO: 261589 - DNA, 423 bp, Klebsiella pneumoniae
atgaagaaagtagccgcgtttgttgcgctaagcctgctgatggcgggatgtgtaagtaatgacaaaattgctgtaaccccagaacagctacagcatcatcgctttgtgctggaaagcgtaaacggtaagcccgtgaccagcgataaaaatccgccagaaatcagctttggtgaaaaaatgatgatttccggcagcatgtgtaaccgctttagcggtgaaggcaaactgtctaatggtaaactgacagccaaagggctggcaatgacccgtatgatgtgcgctaacccgcagcttaatgaactcgataacaccattagcgaaatgctgaaagaaggtgcacaagtggatctgaccgcgaaccagttaacgctggcgaccgcgaaacagacattaacttataagctagcggatttaatgaattaa

SEQ ID NO: 261590 - DNA, 2640 bp, Klebsiella pneumoniae
atgctgggtaaatataaagccgttctcgcgctgttattactgattattcttgtgccgttgacgctgctgatgacgctcggcttgtgggttcccacgctggcgggcatctggctaccgctcgggacacgtattgcattagatgaaagcccacgcattacgcgtaaaggtttaatcattcccgatctccgttatctggtgggagattgtcagcttgcgcatatcaccaacgccagcctttcacatcccagccgctggttattgaacgtcggcacggtagaatttgattctgcttgtctggcgaaattgccgcagacggagcaatcgcttgccgctccaaaaaccctcgcgcagtggcaggccatgttgcctaacacctggatcaatatcgataaactgattttttctccctggcaggagtggcagggaaaactctctctcgcattaacctccgatatccagcaactgcgttatcagggcgaaaaagttaaatttcaaggccagctgaaagggcaacaacttacagtcagcgaactggatgtcgtcgcgtttgaaaatcagccgccggtaaaactggtgggggaatttactatgccgctagtgccggatggacttcctgtaagtggtcatgctactgcgacgttaaacttgtcgcaggagccttcactggtggatgccgagctggactggcaggaaaatagcgggcaattgattgtggtggcacgggataacggcgatccgttgctcgatctgccgtggcaaattactcgtcaacaattgaccgtaagcgatggtcgctggagctggccgtatgcaggttttcctttgagtggccgactgggtgttaaagtcgacaactggcaggcagggcttgagaacgctctggtcagcggacgactgagtgtgctgacccaggggcaagcgggtaagggcaacgcggtgcttaattttggcccaggaaaattaagcatggataacagccagctgcctctgcaactgaccggtgaagcgaaacaggcggacctcattttatatgcccgtttacctgcgcagctaagcggaagtctgactgacccaacgttggcctttgagccaggtgcgttattacgttcgaagggaagagtcatcgattcgctggacatcgatgaaatccgctggcctttagcgggtgtaaaagtcacccaacgtggtgttgacggacgtttgcaggccattttgcaggcgcatgaaaatgaactgggcgatttcgtgctgcatatggatggactggcgaatgattttctccctgacgctggccgctggcagtggcgctactggggaaaaggcagttttacaccgatgaatgccacctgggatgtcgcaggaaagggtgagtggcatgacagcacgattacgctgaccgatctctccaccggtttcgaccagttacaatacggtacgatgacggtagaaaagccgcgattaattctcgacaagcccgtcgtctgggtacgtgacgcacagcatccctccttcagcggcgcgctgtcactggacgccgggcaaacgctgttcactggcggcagtgtgttaccgccatcaacgttaaaatttagcgtcgatggacgcgatccgacgtatttcctctttaaaggcgatttacatgctggtgagattggcccggttcgggtaaatggtcgctgggacggtattcgtctgcgcggtaacgcctggtggcctaaacaatcactgaccgtattccagccgctggtgccacccgactggaagatgaacttacgcgatggcgaactgtatgctcaggtcgcattttctgctgcgcctgaacaaggattccgcgcgggagggcacggtgtgttgaaaggcggtagtgcctggatgccagataatcaggttaacggtgtcgattttgtcctgcctttccgttttgccgatggagcctggcatctggggactcgcggccccgttacgttgcgaattgccgaagtgattaatctggtgacagcgaaaaatattacggctgatttgcaagggcgctatccgtggacagaagaagaaccattgctgttgactgatgttagcgtcgatgtgttaggcggtaacgtggtgatgaaacaattacgtatgccgcaacatgacccggcgctgttgcggctgaataatctctcatccagcgaactggttagcgccgtcaatccgaaacaattcgccatgtccggggcatttagtggtgcattgccgttatggctaaacaacgaaaaatggatagtgaaagatggctggctggcaaatagcgggccaatgaccttgcggctggataaagacaccgcagatgcggtggtgaaagacaatatgactgcgggttcagcaattaactggttgcgctatatggaaattagccgttcatcgacaaatattaatttagataatctcggtttattaaccatgcaggccaacattacaggtaccagtcgcgttgatggtaaaagcggtacggtaaaccttaattaccatcatgaagagaatatttttacgctgtggcgcagtttacgctttggcgataatctccaggcatggttggagcagaacgcacgtctgccgggaaatgactgtccgcaaggaaaagagtgtgaggaaaaacaatga

SEQ ID NO: 261591 - DNA, 186 bp, Klebsiella pneumoniae
atgaaaattttactggctgcgttgacgtcatcttttatgctggttggctgtacgcctcgcattgaagtcgctgcacctaaggaaccgatcactatcaatatgaacgttaaaattgagcatgagatcatcatcaaggcagacaaagatgtcgaagagctgcttgaaactcgtagcgatcttttctga

SEQ ID NO: 261592 - DNA, 327 bp, Klebsiella pneumoniae
atgaagaaaacattacttctttgtgcgtttcttgttgggctggtaagcagcaatgtaatggcattgactctggatgaagccagaactcaggggcgggtaggtgaaacattttatggttatctggttgcgctgaaaacagatgctgaaacagagaaattagtaaacgacattaatgccgaacgtaaagcgagttaccaacaactggcaaagcaaaataatgtctcggtagatgatatcgcgaaactcgccgggcaaaagctcgtagctcgggctaaaccgggggaatatgtacaagggataaacggtaaatgggtgcgaaaattttaa

SEQ ID NO: 261593 - DNA, 906 bp, Klebsiella pneumoniae
atgaaccccgcagtggataatgagtttcagcaatggctttcccaaatcaatcaggtatgcggaaattttaccggacgcctgctgactgagcgttacacgggtgtactggacacgcattttgccaaaggactaaagctgagtaccgtgacaaccagcggggtgaatttatcccgcacctggcaggaagtaaaaggcagcgacgatgcctggttttacaccgtttttcagcttagtggtcaggcaataatggagcaggatgagcgtcaggtgcagattggcgctggcgatattacgttactcgatgcctcacgcccctgttcgctttactggcaggagtcttctaaacagatttcattacttttaccacgcactctgctggaacaatattttccccatcaaaaacctgtctgcgcagaaagactggacgctgacttacctatggtgcaactcagtcatcgcctgttgcaggagagcatgaataacccggcactttctgaaacagaaagtgaagctgcgctacaggcgatggtgtgtctgcttcgcccggtacttcatcagcgggaatctgttcaacctcgccgtgaacgtcagtttcaaaaagtggttacgttgatagacgataatattcgcgaagagatattacgcccggagtggatagccggagagacaggtatgtcagtacgtagtttgtaccgaatgtttgccgataaaggtttggtggtcgcgcaatatattcgtaaccgtcgtctcgatttttgtgctgatgcgattcgccatgccgcagatgatgaaaaactggcaggtattggctttcattggggattttccgatcagagtcatttttcaacggtatttaagcaacgctttgggatgacgccaggcgagtatcgacgtaaattccgctaa

SEQ ID NO: 261594 - DNA, 2274 bp, Klebsiella pneumoniae; identical to SEQ ID NO: 9702

SEQ ID NO: 261595 - DNA, 2046 bp, Klebsiella pneumoniae; identical to SEQ ID NO: 9701

SEQ ID NO: 261596 - DNA, 930 bp, Klebsiella pneumoniae; identical to SEQ ID NO: 9700

SEQ ID NO: 261597 - DNA, 288 bp, Klebsiella pneumoniae; identical to SEQ ID NO: 9699

SEQ ID NO: 261598 - DNA, 747 bp, Klebsiella pneumoniae; identical to SEQ ID NO: 9698

SEQ ID NO: 261599 - DNA, 498 bp, Klebsiella pneumoniae; identical to SEQ ID NO: 9697

SEQ ID NO: 261600 - DNA, 1071 bp, Klebsiella pneumoniae; identical to SEQ ID NO: 9696

SEQ ID NO: 261601 - DNA, 768 bp, Klebsiella pneumoniae; identical to SEQ ID NO: 9695

SEQ ID NO: 261602 - DNA, 789 bp, Klebsiella pneumoniae
atgatggaattcatcctcagtcatgtagaaaagggcgtgatgacactaacgctcaaccgcccggaacgcctgaacagttttaatgatgagatgcacgcacaactggcagagtgcctgaaacaggtcgagcgcgacgacactatccgttgcttgttaattacaggtgccggacgtggattttgtgctggtcaggatcttaacgatcgtaacgttgatcccacaggccccgcaccggatttaggtatgtcagtggagcgtttctataacccactggtacgtcgcctggcaaaactgccaaaaccggtgatctgtgcagttaatggcgtggctgcaggggcaggcgcaacactggcactggggtgcgatatcgttattgctgcccgttcagcaaaattcgtcatggcgtttagtaagttaggtttggtacccgattgcggtggtacctggttactgccacgcgttgccggacgagcgcgcgccatggggctggcactgctggggaatcaactgagtgctgaacaggcgcacgaatgggggatgatctggcaggttgttgatgatgaaacgctggcagataccgcgcaacagctggcacggcatctggcgacacaaccgacatttggtcttggacttatcaagcaagcgataaatagcgctgaaaccaatacgcttgatacgcaactggatctggaacgtgactatcagcgacttgccggacggagcgcagattatcgtgaaggtgtcagtgcgttcctggctaaacgctcaccgcagttcacggggaaatag

SEQ ID NO: 261603 - DNA, 1425 bp, Klebsiella pneumoniae
atgatgataaatgtgcaaactgtggcagtgattgggagcggcaccatgggggctggcattgctgaagttgccgccagtcatggacatcaggttttactgtatgacatttctgctgaagcgctgacccgcgcaatcgacgggatacacgcgcggctaaattcacgagtgacgcggggaaaactgactgctgaaacctgtgaacgcacattgaaacgcctgatcccggtgaccgatattcacgcgctggcagctgcggacctggtcattgaagcggcgtctgaacgtctggaagtcaaaaaagcgctctttgcacagctggcggaagtttgcccgccacaaacgctattgaccactaacacttcgtcaatctctataaccgcgattgctgcggaggtaaaaaatcctgaacgtgttgcggggctgcatttttttaacccggcaccggtgatgaagttggtggaggtggtcagtgggctggcaacggcagcggaagttgttgagcagttgtgtgaactaacgttgagttggggtaagcagcctgtgcgctgtcattcgactcctggatttatcgttaaccgtgttgcgcgtccttattattccgaggcctggcgggcactggaagagcaggttgctgcaccagaagtgattgacgctgcacttcgcgatggcgctggtttcccgatggggccgctggaattaaccgatctgattggtcaggacgtcaattttgctgtcacctgttcggtgtttaacgctttctggcaggagcgtcgttttttaccttcgctggtgcaacaggaactggtgattggtggacggttgggcaagaaaagtgggctgggcgtgtacgactggcgcgcggaacgtgaggcagttgttggcctggaagcggtaagcgacagttttagccccatgaaagtagaaaagaaaagtgacggtgtcacggaaattgacgatgttttattgattgagacacaaggcgagacggcacaggcgctggcaatacgactggcacgcccggtggtagtggtcgacaaaatggcgggcaaggtggtgaccattgctgcggcagcggtgaacccggactcagcgacccgcaaggccatttattacctgcaacagcagggcaaaacagtgctgcaaattgcagattacccaggaatgctgatttggcgaacggtagcaatgatcatcaatgaagcccttgatgcgcttcaaaaaggcgtggcctctgaacaggatatcgataccgccatgcgtcttggggtgaattatccatatggcccgcttgcctggggagcgcaacttggctggcagcgaatattaaggctcctggaaaatctacaacatcactatggcgaagaacgctatcgcccatgttcattgctgcgccaacgagcgcttctggagagcggttatgagtaa

SEQ ID NO: 261604 - DNA, 423 bp, Klebsiella pneumoniae; identical to SEQ ID NO: 9692

SEQ ID NO: 261605 - DNA, 1206 bp, Klebsiella pneumoniae; identical to SEQ ID NO: 9691

SEQ ID NO: 261606 - DNA, 1314 bp, Klebsiella pneumoniae
atgataaccaatacaaagcttgacccgattgaaaccgcgtctgttgatgagttacaggcgttgcaaacacagcgtctgaaatggacgctcaaacacgcgtatgaaaatgtgccgatgtatcggcgcaaattcgacgcagcaggcgtacatcctgatgatttcagggaactttcagacctgcgtaaatttccctgtaccaccaaacaggatctgcgcgacaactatccctttgacacctttgccgtgccaatggaacaagtggtgcgcattcatgcttcttcgggaaccacaggtaaaccgacagttgtcggctatacgcaaaacgatattgataactgggccaatattgtagcgcgttctttgcgtgcggcagggggctcgcccaaagacaaaattcatgtcgcctatggttacggcctgtttactggcgggctgggtgcgcactatggtgccgaacgtctgggcgctacggtgatcccgatgtctggcgggcagacggaaaaacaagcgcaactgatccgtgattttcaaccagatatgatcatggttacgccatcttattgccttaacctgattgaagagctggagcggcagttgggcggtgatgccagcggttgctcgctgcgggttggagtatttggtgctgagccgtggacacaggccatgcgtaaagaaattgagcgtcgcctggggatcaccgcactggatatttatggcctgtcagaagtgatggggccgggggtggcgatggagtgtctggaaactaccgacggcccaaccatttgggaagatcatttctatcctgaaattgttaatcctcaggacggcacaccgcttgccgatggtgaacatggcgaactgttattcaccacgctgaccaaagaagcattgccggtcattcgttaccgcacgcgtgatttaacccgactgttaccaggaacggcgcggactatgcgccgcatggatcgcatcagcggacgcagcgatgacatgttgattattcgcggtgtaaatgtctttccgtcacaactggaagaagagattgtcaaattcgaacatttatcgccgcattaccaactggaggtgaaccgccgggggcatcttgattcactttctgtgaaagtggagttgaaagaaagcagcctgacattgacgcatgagcagcgttgccaggtgtgccaccagctacgccatcggattaagtcgatggtggggatctctactgatgtaatgatcgtgaactgtggcagtatcccgcgttcagaaggcaaggcgtgtcgggtgtttgatctgcgcaatattgttggtgcctga

SEQ ID NO: 261607 - DNA, 951 bp, Klebsiella pneumoniae; identical to SEQ ID NO: 9689

SEQ ID NO: 261608 - DNA, 591 bp, Klebsiella pneumoniae; identical to SEQ ID NO: 9688

SEQ ID NO: 261609 - DNA, 1920 bp, Klebsiella pneumoniae
atgaataagtttatcgctgctgaagctgcggaatgtataggctgtcatgcttgtgaaattgcctgtgcggtggcacataatcaagaaaactggccgctgagtcacagtgactttcgaccacgtatccacgttgtagggaaaggccaggctgcgaatccggtggcctgccatcactgcaacaatgccccttgcgttacggcttgtccggttaatgctctgactttccagcccgatagcgtacaactggacgagcaaaaatgtattggttgtaaaagatgcgcaatcgcttgcccctttggcgtcgttgagatggtcgatacgattgcgcagaaatgcgacctttgtaaccagcgcagttccggcacgcaagcctgtattgacgtatgcccaacacaggcgttacggctgatggacgataaagggttgcagcagataaaggtggcccgccagcgcaaaacggcagcaggaaaagcgtcatcagatgctcagccatctcgcagtgcagcgttgctccccgttaactcgcgtaaaggcgcagataaaatttcagcgagtgaacggaaaacccactttggcgaaatctattgcgggttggatccacaacaagcgacttatgagagtgaccgctgtgtttattgtgccgaaaaagctaactgcaactggcattgcccgctgcataacgctattccggattacatccgtctggtgcaggaaggaaagattattgaagcggcagaactttgccaccagaccagttccttaccagaaatttgcggcagagtttgcccacaggaccgtctttgtgaaggcgcatgtactttgaaagatcactctggcgcagtcactatcggtaatctggaacgctacatcaccgataccgcgctggcgatgggctggcgtcccgatgtcagcaaagttgttccccgtagcgaaaaagtggcggtgattggcgctgggcctgcagggttagggtgtgctgatattctggcgcgcgcaggagttcaggttgatgtctttgatcgccatccagaaattggcggtatgctgacttttggcatacctcctttcaaactcgataaaacggtattaagccagcggcgagagatattcaccgcaatgggaatcgactttcatcttaactgtgaaattggccgcgatattacctttagcgatttaacttctgaatatgatgcagttttcatcggcgtggggacttacgggatgatgcgagcagatctgccgcatgaagatgcgcccggtgtcattcaggctctaccgttcctgactgcccatacccgccagctcatgggattgccggagtctgaagagtatccgctgacggatgtggaaggtaagcgagtcgtggtattgggcggtggcgatacgacaatggattgtttgcgaacttccatccgcctcaatgccgccagcgtgacctgcgcgtatcgtcgtgatgaagtcagtatgccgggctcgcgcaaagaggtggtcaatgcgcgcgaggaaggtgtcgagtttcaattcaatgttcagccgcaatatatcgcttgtgacgaagatgggcgtttaactgcggtgggcctgattcgtaccgccatgggtgagccggggccggatggtcgccgtcgtcctcgtccggtagcgggttcagagtttgaattgcccgccgatgttctcattatggcctttggtttccaggcgcatgccatgccgtggttgcagggcagcggaattaaactcgataaatggggcctgattcaaaccggtgacgtcgggtatttacctacccagacgcatctgaaaaaagtctttgctggtggtgatgcagttcatggcgcggatctggttgtcactgcaatggccgcaggaaggcaggcggcgcgcgatatgttaactctgtttgatacgaaggcatcgtga

SEQ ID NO: 261610 - DNA, 489 bp, Klebsiella pneumoniae
atgaaatcgttaattatcgttaatccggctgactgtattggctgccgtacttgtgaagtagcctgtgtggtcgctcacccttcagaacaggagttgaatgccgatgtctttttaccccggctgaaggtacagcgactggacagcatcagtgcgccggtgatgtgccatcagtgtgaaaacgccccttgtgttggcgcttgccccgtgggggcgctgacgatgggcgagcaggtggtgcagaccaattctgcccgttgtattggctgtcagagttgcgtcagtgcgtgcccatttgggatgataaccattcagtcgttgccgggggatacccggcaacaaattgtgaaatgcgatctctgtgaacagcgggaagaggggcctgcctgcgttgaatcttgcccgacagaggcgctgcagttgcttactgaaagagaactcaggcgagtccgccagcagcgtattgttgccagcggtgagaatcctctctga

SEQ ID NO: 261611 - DNA, 1368 bp, Klebsiella pneumoniae
atgtctggagacatcctacaaacaccggacgcaccaaagccacagggcgcgctggataattattttaaaattaccgctcgtggcagtaccgttcgtcaggaagtactggctggcttaacgacctttctggccatggtttattccgttatcgtcgttccgggaatgctgggcaaagcaggttttcctcccgcagctgtgtttgttgccacctgtctggtcgcgggcttcggctcgttgctgatgggattatgggccaatttgccaatggcgattggttgcgcgatttccttgacggcgtttaccgcattcagtctggttctcgggcaacaaattagcgttcctgtcgcactgggcgcggtctttctgatgggcgtcatcttcaccgccatttccgtaaccggtgtgcgtacctggatcttacgtaatttaccgatggggatagctcacggtacaggtatcggtatcggcctgtttctgctgctgattgctgctaacggtgtgggaatggttatcaaaaacccgattgaaggcttgccagtggcgctcggtgcgtttacctccttcccggtgatgatgagcttgctggggctggcggtcatcttcggtctggagaagtgtcgcgtacccggcgggatcttgttggtgattattgcaatttcgatcatcggcttaatctttgatccagcggtgaagtaccacggtctggtggcgatgccaagcctgactggcgaagatggtaagtctctgattttcagcctcgatattatgggcgcactccagccaactgtacttccgagtgtactggcattggtgatgaccgcagtgttcgacgccactggcaccatccgtgccgtcgccggtcaggcgaatttgttggataaagacaaccagatcatcaacggcggcaaagccctgaccagtgactcagtaagttcaatattctccggcctggtgggcgcagcgcccgcagcggtttatatcgaatcagcggcaggaaccgccgccgggggtaaaacagggttgaccgcaaccgtagtgggggcgttattcctgctgattttgttcttatcaccgctgtcatttttgatccctggttacgccactgcacccgctctgatgtacgtaggtttgctgatgttaagtaacgtctcgaagctggatttcaatgattttattgacgcaatggctggcctggtgtgtgccgtgttcatcgttctgacttgtaatatcgttaccggtattatgctgggctttgtgacactggtcgtaggccgcgtttttgcacgcgaatggcaaaagctgaatattggtacggtgatcattactgccgcactggtcgcattttacgcgggtggttgggcaatctaa

SEQ ID NO: 261612 - DNA, 1317 bp, Klebsiella pneumoniae
atgtcaggagaacacacgttaaaagcggtacgaggcagttttattgatgtcacccgtacggtcgataacccggaagagattgcctctgcgctgcggtttattgaggatggtttattactcattaaacagggaaaagtggaatggtttggtgaatgggaagacggaaagcatcaaattcctgacactattcgcgtgcgcgactatcgcggcaaactgatagtaccgggctttgtcgatacacatatccattatccgcaaagtgaaatggtgggggcctatggtgaacaattgctggagtggttgaataaacacaccttccctactgaacgtcgttatgaggatttagagtacgcccgcgaaatgtcggcgttcttcatcaagcagcttttacgtaacggaaccaccacggctctggtgtttggcactgttcatccgcaatccgttgatgcgctgtttgaagccgccagccatatcaatatgcgtatgattgccggtaaggtgatgatggaccgcaacgcaccggattatctgctcgacactgccgaaagcagctatcaccaaagcaaagaactgatcgagcgctggcacaaaaatggtcgtctgttgtatgcgattacgccacgcttcgcccctacctcatctcctgaacagatgacgatggcgaaacgcctgaaagaagaatatccggatacgtgggtacatacccatctctgtgaaaacaaagatgaaattgtctgggtgaaagaactttatcctgaacatgatggctatctggatgtttaccatcagtacggcctgaccggtaaaaactgtgtctttgctcactgcgtccatctcgaagaaaaagagtgggatcgtctcagcgaaaccaaatccagcattgctttctgtccgacctccaacctttacctcggcagcggcttattcaacttgaaaaaagcatggcagaagaaagtcaaagtgggcatgggaacagatatcggtgccggaacaacttttaacatgctgcaaacgctgaacgaagcctacaaggtattgcaattacaaggctatcgcctctcggcatatgaagcgttttacctggccacgctcggcggagcgaaatctctgggccttgacgatttgattggcaactttttacctggcaaagaggctgatttcgtggtgatggaacccaccgccactccgctacagcagctgcgctatgacaactctgtttctttagtcgacaaattattcgtgatgatgacgttgggcgatgaccgttcgatctaccgcacctacgttgatggtcgtctggtgtacgaacgcaactaa

SEQ ID NO: 261613 - DNA, 1401 bp, Klebsiella pneumoniae
atgtctgatataaaccatgcaggttctgaccttatatttgaactggaggatcgccctccctttcatcaggctctcgttggtgccattacccatctgttggcaattttcgttccgatggtaacccccgcgttaatcgtgggtgcggccttacagctttccgctgaaacaaccgcttatctggtttctatggcgatgatcgcctctggtattggtacctggttacaagtaaaccgctacggcatcgtcggttctggtcttctctcaattcagtcagtcaatttttcatttgttacggtcatgattgcgctgggcagcagcatgaaaagcgacggttttcacgaagagttaatcatgtcgtcgctcctcggcgtctccttcgttggcgcatttctggttgtcggctcttcttttatcctgccctatttacgtcgggttattacgcctactgtcagcggtattgtggtactgatgatcggcttaagcctgattaaagtcggcattatcgattttggtggaggatttgcagccaaaagcagcggtacgttcggcaattacgaacatctcggcgttggtttattggttttgattgtggtgatcggctttaactgctgtcgcagtccgttgctacgcatgggagggatcgccattgggctatgcgtcggttatatcgcgtcgttatgcctgggtatggtggatttcagcagtatgcgcaatttgccgttaatcaccatcccgcatccattcaaatacgggtttagtttcagcttccatcagttcctggtggttggcacgatttatttgcttagcgtgctggaagctgtcggcgatatcaccgccacggcaatggtttcccgccgacccattcagggagaagagtatcagtcccgactgaaaggcggcgtgctggcagacggtctggtttctgttatcgcctccgctgtcggttcattacccttaaccacgtttgcgcaaaataatggggttattcagatgactggcgtcgcttcacgttatgtcgggcgaaccatcgcggtaatgctggttatcctcggtttgtttccgatgattggcggcttcttcacgaccattccctcggcagttctgggaggcgcaatgacgttgatgttttccatgattgccatcgctgggattcgcatcatcatcaccaatggtttaaagcgccgtgaaacacttattgtcgccacttctttaggtttagggcttggcgtctcctacgatcccgaaatttttaaaatattgccagcctctatttatgtactagttgaaaaccctatttgtgctggcgggttaactgcgattttattaaatattatcctccctggtggctaccgacaggaaaacgttctgcctggtattacctcagcggaagagatggattaa

SEQ ID NO: 261614 - DNA, 2871 bp, Klebsiella pneumoniae
atgatcatccactttactttaaatggcgcgcctcaggagctaaccgttaatccaggcgaaaacgtgcaaaagctgttgtttaacatgggaatgcactctgtacgcaacagtgatgatggctttgggtttgccggttctgacgcaattatctttaacggtaatatcgttaacgcgtccttgcttatcgccgcacagttagagaaggcagatattcgtactgcagaatctctgggcaaatggaatgagttaagtctggttcaacaggccatggttgatgttggcgtggtgcagtctggttataacgatccagctgcagctctgattatcaccgatcttctcgatcgcatcgacgcacctacccgcgaagagatcgacgatgcactctcaggtctgtttagccgcgatgctggctggcagcaatactatcaggtcattgaactggcggttgcacgtaaaaataatccgcaggccaccattgatatcgctccgactttccgtgacgaccttgaagtcattggcaagcattatcctaaaactgatgccgcgaaaatggtgcaggcgaaaccctgctatgttgaagaccgcgtaacggctgacgcctgcgtcattaaaatgttacgtagcccacacgctcacgcactgattactcatctggatgtcagcaaagctgaagccttaccgggcgttgttcacgttattactcacctgaattgcccggatatctactataccccgggcggtcagagcgcaccggaaccgtcaccgcttgaccgccgtatgttcggcaagaaaatgcgtcacgtcggcgatcgcgttgctgcggtcgtcgcagaaagtgaagaaattgcgctcgaagcactgaagctcatcgacgttgaatatgaagtgcttaagccggtaatgtcgatcgacgaagcaatggcggaagatgcgcctgtcgtgcacgatgaaccggtggtgtatgttgctggtgcgccagatactctggaagacgataacagccatgcagcccagcgcggcgagcatatgatcatcaacttcccgatcggttctcgccctcgcaaaaatatcgccgccagtattcatggtcatattggcgatatggacaaaggctttgccgatgccgatgtgatcattgagcgaacctataactcaacgcaggcgcagcagtgcccgactgaaacacatatctgctttacccgtatggacggcgatcgtctggttatccacgcctccacccaggtaccatggcacttacgccgccaggtcgcgcgcctcgtgggcatgaaacaacataaagttcatgtcattaaagagcgagttggcggcggttttgggtctaaacaggacatcctgctggaagaagtgtgcgcctgggcaacctgcgtgaccgggcgtccggtactgttccgctacacccgtgaagaagagtttattgctaacacctctcgtcacgtcgcgaaagtcaccgtcaaactgggagcgaaaaaagatggtcgcctgacggcagtgaagatggatttccgcgccaacactggcccttacggcaaccactcactcaccgtaccgtgtaacggaccggcgctgtcgctgccgttatatccgtgcgataacgtcgatttccaggtcaccacctactacagcaacatttgcccaaatggtgcttatcagggttatggcgcaccgaaaggtaacttcgctatcaccatggcattagcggaactggctgaacagttacagatcgaccaactggaaattatcgaacgtaaccgggtacacgaagggcaagagctgaaaattctcggtgcaatcggtgaaggtaaagcgccgacctccgttccttccgccgccagctgcgcactggaagagatcctgcgtcagggtcgcgagatgatccaatggtcttcaccgaaaccgcaaaatggtgactggcacatcggtcgcggcgtcgccattatcatgcagaaatcgggtatcccggatatcgatcaggctaactgtatgatcaaactggaatcggacggcacctttatcgttcattctggcggtgcggatattggtactggtctggatactgtagtgacgaaactggcagcagaagtgctgcactgccctccgcaggacgtgcatgttatctccggtgataccgatcatgcgttgtttgataaaggcgcatatgcctcgtccggtacttgcttctcgggtaacgcggcgcgtttggcagcggaaaatctgcgggagaaaattctgttccacggcgcgcaaatgttgggtgagccagtggcagatgtccaactagcaacgccgggcgtcgtacgcggcaagaaaggcgaagttagtttcggggatattgcccataaaggcgaaaccggcacaggctttggttcactggtgggaactggcagttatatcacgcctgatttcgccttcccgtatggcgcaaactttgctgaagttgccgtcaacacgcgtacgggtgaaatccgcctggataaattctacgccttgctggattgcggtacaccggtcaatccagagttagcgttgggacaaatctacggtgccacccttcgtgcaatcggccacagtatgagcgaagaaatcatttatgacgccgaaggtcacccgttaacgcgtgatttacgcagttacggcgcaccgaaaataggcgatattccgcgtgatttccgcgctgtgctggtgccgagcgacgataaagtcggcccgttcggggcgaaatcgatctcggaaatcggtgtaaatggcgcagctccggcgattgctaccgcaattcacgatgcatgcggcatctggttacgcgaatggcatttcacaccggagaaaatactcaccgcgctggaaaaaatataa

SEQ ID NO: 261615 - DNA, 780 bp, Klebsiella pneumoniae
atgattgaacaatttttcaggcccgactctgtcgaacaggcgctggaactgaagcgccgctacaaggatgaagccgtctggttcgccgggggcagcaaactcaacgctacaccaacccgtaccgataaaaagattgccatttccttacaggatctggaactggactgggttgactgggataacggtgcactgcggattggtgcaatgtctcgcttgcagccactgcgtgatgcgcgatttattcctgcagcactgcgtgaagccctcggttttgtttactcacgccatgttcgtaatcagtcgaccattggtggtgaaatcgccgcccggcaggaagagtcggtgctgcttcccgtcctgctggcactggatgctgaactggtttttggcaacggcgaaacgctgtcaatcgaggactacctggcctgcccatgcgatcgcctgctaaccgaaattatcattaaagatccgtatcgcacctgtgcgacccgcaaaattagccgttctcaggcaggtttaaccgtcgtgacggcagccgttgcaatgacagaccacgacggtatgcgaattgcgctggatggcgtcgccagtaaagccctgcgtctgcacgatgtcgaaaaacaaaatctggaaggcaatgcacttgaacaggctgtcgccaacgccattttcccgcaggaagatttgcggggcagcgtggcctataaacgctatatcacgggagttctggtagccgacctgtatgccgactgccaacaggctggggaggaagccgtatga

SEQ ID NO: 261616 - DNA, 1329 bp, Klebsiella pneumoniae
atgttgattctgaagaatgtcaccgcagtgcagttacacccggcgaaagtgcaggaaggcgttgatatcgccatcgaaaatgatgtgattgtcgctatcggcgatgccctgacgcaacgctaccccgatgccagctacaaagagatgcatggtcggattgtgatgccgggaattgtctgctcgcacaaccatttttactcgggactgtcccgcggaattatggcaaacatcgccccctgcccggatttcatctcaacgctgaaaaatctctggtggcgactcgatcgcgcccttgatgaagagtcgctctattacagcggactgatttgttccctggaagcgattaagagcggatgtacatcggttatcgatcaccatgcctctccggcgtatatcggcgggtcgctctccacattgcgcaacgcatttttaaaagttggcctgcgcgcgatgacctgttttgaaactactgaccgtaacaacggcatcaaagagttgcaggaaggtgtagaagaaaacatccgcttcgcccgtcagattgatgaggcgaagaaagcagcaaccgagccgtatctggtggaagcacatatcggcgctcacgcgccgtttaccgtgccggatgccggtctggagatgctgcgtgaagccgtgaaagccacagatcgtggtttgcatattcacgctgcggaagacctttacgacgtttcctacagtcaccactggtacggcaaagacctgctggcacgactggcgcaattcgatctcatcgacagcaaaacgctggtcgctcatgggctgtacttgtcgaaagatgacatcgccctactcaatcagcgcgatgcgttcctggtgcataacgcccgttcaaacatgaacaaccatgtcggctacaaccatcaccttagcgacatccgcaatctggcgttgggaactgacggcattggttcggacatgtttgaagagatgaaatttgccttctttaaacatcgcgatgcgggtggtccgctgtggcctgacagttttgccaaagcactggctaacggcaacgaactgatgagccgcaactttggcgcgaaatttggccttctggaagccggttacaaagccgatttaaccatttgcgattacaactcgccgacaccgctgcttgcagacaatatcgccgggcatatcgctttcggtatgggctcaggcagcgttcatagcgtgatggtcaatggcgtgatggtctatgaagaccgtcagtttaacttcgattgcgattccatttatgcgcaagccagaaaagccgctgccagtatgtggcgtcggatggatgcgctggcataa

SEQ ID NO: 261617 - DNA, 3099 bp, Klebsiella pneumoniae
atgggggatattatgcgtcccattccgtttgaggaacttttgacgcgcatatttgatgaataccaacaacaacgctcaatctttggtattcccgagcaacagttttactcacccgtaaaaggtaaaactgttagcgtcttcggtgaaacctgtgccactcccgtcggccctgccgctggcccgcacacgcagctcgcgcaaaatattgttacttcctggctgactggcgggcgcttcatcgaactaaaaaccgtccaaattcttgaccgtctggagctggaaaagccctgtatcgatgccgaagacgagtgctttaacaccgaatggtctaccgaatttaccctgcttaaagcctgggatgaatacctcaaagcctggtttgccctgcaccttctcgaagcgatgttccagccttctgattccggtaaatcgttcatctttaatatgagcgtcggttataacctcgaaggtattaagcaaccgccgatgcaacagttcatcgacaatatgatggatgcatctgaccatccgaaattcgctcaatatcgcgatacgctgaataaattactccaggatgacgcatttttagcccgccacggattgcaggaaaaacgcgaatgcctgcaggccttaccggcacgcatccccaccagcatggtacaaggcgttaccctctccaccatgcacggctgtcctccgcatgaaatcgaagccatttgccgctacatgctggaagaaaaagggctcaatacctttgtgaaactcaacccgaccttactggggtacgcgcgtgttcgtgagatcctcgatgtctgcggtttcggttacataggcttaaaagaagagtcatttgatcacgacctcaagctgacgcaagcgctggaaatgctggaacgcctgatggtactggcaaaagaaaaatcactcggctttggcgtaaaactgactaacactctcggcaccatcaacaataaaggcgcactgcctggtgaagagatgtatatgtcaggccgtgcgctgttcccgctctccatcaatgttgcagcagttctctctcgcgcctttgacggcaaactgcccatttcttattccggtggtgccagtcagctgactatccgcgatatttttgatactggtattcgccctattactatggcaaccgacctgctgaaacctggcggctatctgcgcttaagtgcctgcatgcgcgagctggaaggctccgacgcctgggggcttgaccatgttgacgtcgaacgcctgaacaaactggcagcagacgcgttaaccatggaatacactcagaaacactggaagccagaagagcgtattgaagtggcagaagacctgccgctgaccgactgctacgttgcaccgtgcgttactgcttgcgccattaaacaggatattccggaatacatccgtctgcttggcgaacaccgctatgccgacgcactggaactcatctaccaacgcaacgccctgcccgccattaccggtcatatttgcgatcaccagtgccaatacaactgtacccgcctggattacgacagtgcgctgaatatccgcgaactgaaaaaagtcgcgctggaaaaaggttgggatgaatataagcaacgctggcacaaaccagccggttctggttcacgccatccggttgccgtgattggtgcaggtccggcgggtctggcagcaggttacttccttgccagagcgggccatccggttacgctgtttgaacgcgaagccaatgcgggcggcgtggtgaaaaatatcattcctcagttccgtattcctgcagagttaattcagcacgatatcgattttgttgccgctcacggcgtgaaatttgagtatggctgctcacccgatttgaccgttgaacagttaaaaaatcagggcttccactatgttctgattgccaccggcactgataaaaatagcggtgtgaaactggcgggcgacaaccaaaatgtctggaaatcactccccttcctgcgtgaatacaacaagggcacagcgctcaagctgggcaaacatgtggtcgttgtcggggcgggtaacacggcaatggactgcgctcgtgcggcgttacgcgttccaggcgtagaaaaagcaacggtcgtttaccgtcgttcactgcaagagatgccagcatggcgcgaagagtatgaagaagcgttgcacgacggcgtggagttccgtttcctgaataatccggaacgtttcgatgctgatggcaccttaaccttgcgcgttatgtcgcttggcgaacctgatgagaaaggtcgtcgccgtccggttgaaaccaacgaaacagtaacactgcatgtagacagcctgatcaccgccattggtgaacagcaggatactgaagccctgaatgcgatgggcgtgccgctggacaaaaacggctggccagacgtcgaccataatggcgaaactcgtctgactgacgtctttatgatcggcgacgtacagcgcggaccatcctccattgtcgctgctgtcggaaccgcgcgtcgggcgaccgatgtcatccttagtcgggaaaacatccgttcccaccagaacgataaatactggaacaacgtcaatccggcggaaatctatcaacgcaaaggcgatatctctatcaccctggtggatagcgacgatcgtgacgcgtttgtcgcccaggaagccgcacgctgccttgaatgtaactacgtttgcagcaagtgtgtggatgtctgcccgaaccgcgccaacgtatccattgcggtcccaggcttccagaaccgtttccagacgctgcacctcgacgcttactgtaacgaatgcggcaactgcgctcagttctgcccgtggaacggtaaaccgtacaaagacaaaatcaccgtcttcagcctgtcgcaagactttgataacagcagcaatcctggcttccttgtggaagattgccgggtacgagtacgtctgaataaccaaagctgggtgttaaacatcgacagcgaaggtcagttcaacaacgtaccaccggagctgaacgatatgtgccgcattattagccatgtccaccagcatcatcattatctgctgggccgcgtggaggtgtaa

SEQ ID NO: 261618 - DNA, 579 bp, Klebsiella pneumoniae
atgtcagccatcgactgtataattaccgctgccggattatcatcaagaatggggcaatggaaaatgatgttaccctggcaacagggaacaattcttgatacaagtatcaaaaatgcgttgcagttttgtagccgaattattttagtcaccggctatcgtggtaatgaactgcacgaacgttatgcgaaccagagcaatatcactattattcacaacccagattatgcgcagggtttactcacatcagtaaaggccgcagtacccgcggtaaaaacagaatattgttttctcacccacggtgacatgcctaccctcaccatcgatatttttagaaaaatctggtcgttacgaaatgatggcgcaatactgccactccataatggcattcccggccatccgattttagtgtcaaagccatgcctgatgcaggcaatccagcgtcccaatatcaccaatatgcgtcaggcactccttatgggagatcattattccgtcgaaatagaaaatgcagaaataattttagatattgatactccggacgactttattacagcgcaaaaaaggtatactaaaatttag

SEQ ID NO: 261619 - DNA, 771 bp, Klebsiella pneumoniae
gtgaaaagtatagttgacccatcggcattattcattgatttaggcgcgcagaaacgtcccactgtgatttctgttgttggggctggggggaaaaccagcttgcttttttggctggcagaactgctccaggctagcggcaggcgtgtgttaatcactacgacgacacatatgtttatgccaacgtctcactggcccgtggttttctgtcgtgatcccgccatgcttcctcatgcgtctcttacatcccccatttcattttgttttcacagctggaaagcgaaccagggaaaggtgcagggatttacgccagaagcgattgatgcactggtgcaacgaccagagtgtgacgtaattctcattgaggcagatggctcgcgtggaatgccgttaaaagcgcctgatgagcacgaaccttgcatacctaaaagcagttgctgcgtgattgctgtgatgggaggacatattttgggtgcaaaagtgagcacagaaaatgtccatcgctggtcgcagtttgctgatattactgggttaacacctgatgcacccttgcaactgagcgatctcgttgcgctggttcgccaccctcagggcgcgtttaaaaacgtaccgcaaggttgtcggcgagtctggttcattaaccgtttttctcaatgtgagaatgcgattgcgcaaagcgagctccttcaaccgctgcaacaacacaacgtagaggcaatctggctgggcgatatacaagaacatcctgcaatcgcgcgcagatttgtgaattag

SEQ ID NO: 261620 - DNA, 1626 bp, Klebsiella pneumoniae
atgaatattttcacagaggctgcaaaactcgaagagcaaaattgtccgtttgcgatggcgcaaattgtagatagccgaggctctactccccgccattctgcacaaatgttagtgcgcgccgatggttctatcgtcggtacaattggtggaggaatggttgagcggaaggtgattgaagagtcgcttcaggcattgcaggaacgtaagccgcgattattccatggacgtatggctcgtaacggtgcggatgctgtcgggtcagattgtggaggtgcaatgtcagtatttatcagcgtccatggtatgcgtccacgtctggtgttgattggcgcggggcatgtcaaccgggcgatagcccagagtgcggcgctattaggatttgatattgccgttgccgatatttatcgcgaaagccttaatcctgaattattcccaccatcaaccacgcttctccatgctgagtcgtttggtgcggcagtggaagcactggatattcgccctgataattttgtcctgattgccacgaataatcaggatcgtgaagccctcgacaaactcattgaacagcccattgcatggttggggttgctggcaagtcgtcgcaaggttcagcttttcctgcgtcaattgcgtgagaaaggcgtggctgaagaacatattgcccgtttacatgcgcctgttggttacaacataggtgcggaaacgccgcaggagatcgccatcagcgtgctggcagaaatattacaggtgaaaaataacgcgccgggtgggctgatgatgaaaccttctcatccttccggacaccagctggtggtgattcgcggtgcgggggatatcgccagtggtgtggcgctacgtctgtatcatgcgggttttaaagtgatcatgctggaagtggaaaaaccgacagtgattcgttgtaccgtggcgtttgcccaggccgtgttcgatggcgaaatgacggtcgaaggcgtcactgcccgcctggcaaccagctctgcggaagcgatgaaacttaccgaacgcggattcatccctgtgatggtagatcccgcctgttcattgcttgatgaactgaaaccgctttgcgtggtggacgctattctggcgaaacagaatttggggacgcgggcagatatggcaccagtaacaatcgcgcttgggccgggctttattgcagggaaggattgtcatgcggtaattgaaacaaatcgcgggcactggctcggtcaggtgatttactctggttgtgcgcaggagaataccggtgttcctggcaatattatggggcataccacccgacgggtgatccgtgctcctgctgcaggcattatgcgatccaacgtgaaattaggcgatctggtgaaagagggcgatgtgattgcctggattggtgagcatgaaattaaagcaccgttgacggggatggtgcgtggcttgttgaacgacggactagcagtggtcggtggttttaaaattggtgatatcgatcctcgtggtgaaacggctgatttcaccagcgtttctgataaagcccgggcgattggcggcggcgtacttgaggcgttaatgatgttgatgcatcagggtgttaaagcgacgaaagaagtgctggaagtggcttaa

SEQ ID NO: 261621 - DNA, 933 bp, Klebsiella pneumoniae
atgagtaagaaaattgttctcgccctgggcgggaatgcgctgggcgatgacctggccggacaaatgaaagcggtaaaaattacttctcaggcaattgttgatttaattgcccagggacatgaggtcatcgtcactcatggtaacgggccgcaggtgggcatgattaaccaggcctttgaagctgccgcaaaaactgaagcgcactcgccaatgctgccgatgtctgtctgtgttgccttaagccagggttatattggttacgatctacaaaatgccttaagagaagaactgctttctcgtggcattaataaacctgtagcaacgctggttacccaggtcgaagtcgacgctaacgatccggcattcctcaacccgaccaagccgatcggttcgttctttaccgagcaagaagcagagcaactgacaaaacagggttacactctgaaagaagatgctggtcgcggctatcgccgtgttgttgcctcgccaaaaccggttgatatcattgaaaaagaaacggttaaagcgttggtagatgcaggccaggtggtgatcaccgttggcggtggtggtatccctgttattcgtgaaggtaaccacctgcgtggtgccagtgcggttatcgataaagactgggccagcgcccgtttagcagaaatgattgatgccgatatgctgatcattctgactgcggtagaaaaagtggccattaacttcggtaaagagaatgaacagtggctcgatcgcctgtcattaagtgatgctgaacgctttatcgaagaaggtcattttgcgaaaggttctatgctgcctaaagtggaagctgccgcctcgtttgctcgctctcgcgcaggtcgtgaagcactgattaccgtattgagcaaagcgaaagaagggattgaaggcaaaaccggaacggtgatttgtcagtaa

SEQ ID NO: 261622 - DNA, 1386 bp, Klebsiella pneumoniae
atgcgcgtattgatcaaaaacggcactgtcgttaacgcagatggacaagccaaacaagatttgctgattgagagcgggattgttcgccaattgggcagcaatatttcgccgcagctcccgtatgaagaaattgatgccactggctgttacgttttccctggcggcgtggatgtccatacgcatttcaatattgatgtcggcatcgcgcgcagttgtgatgatttttttaccggtacccgcgcagctgcgtgtggcggtacaacaaccattattgaccatatgggatttggcccgaatggctgccgattacgccatcaactggaagtttatcgtggctatgccgcccataaggcggtcatcgactacagctttcacggtgtgatccagcacattaatcacgccatcctcgacgaaattccgatgatggtcgaagaaggactgagcagttttaaactctatttaacctatcaatacaaactcaacgatgacgaggttttgcaggcgttacgccgcttgcatgagtccggcgcgctgaccaccgtgcacccggaaaatgatgcggctatcgccagcaagcgggcggaatttatcgccgcagggttaaccgcgccgcgctatcacgccttgagtcgccctctggaatgcgaagcggaagccatcgcccgcatgattaacctggcacaaattgccggtaacgccccgctctatatcgtccacctgtctaacggcttaggtctggattatctgcgtcttgcccgtgcgaatcaccagccagtctgggttgaaacctgcccacaatatctcctgttggacgaacgcagttacgatacagaagatggcatgaagttcattcttagcccaccgctgcgtaacatacgcgagcaggacaaactgtggtgtggcatcagcgatggtgcgattgacgtggtggcaaccgatcactgcaccttctcgatggctcaacgcctgcaaatttctaaaggcgatttcagtcgctgcccaaatggcttacccggtgtggaaaaccgcatgcagttactgttttccagtggcgtgatgacgggacgtataacaccggaacgctttgttgaattaaccagcgcaatgcccgccaggctgtttggcctgtggccgcaaaaaggattattagcgcccggttccgatggcgacgtggtgattatcgacccacgtcagagccaacaaattcagcatcgccatctccacgacaacgccgactactcgccatgggagggttttacctgtcagggcgcgattgtcagaaccttatcccgtggtgaaacgattttctgtgacggcacctttacaggcaaagccgggcgaggtcgattcctgcgacgcaaaccgtttgtccctcccgtgctctaa

SEQ ID NO: 261623 - DNA, 1197 bp, Klebsiella pneumoniae
atgtccgttttctcattgaagattgatatcgccgataacaaatttttcaacggcgaaacatcaccgctcttttcgcaaagccaggccaaactggcgcgccagttccaccagaaaattgctggttatcgcccaacaccgctttgtgcgctgaacgatctcgcaaacctttttggtgtgaagaaaattctcgtcaaagacgaatcaaaacgattcggtctgaacgccttcaaaatgctcggcggtgcatacgccatcgctcaattattgtgcgaaaaatatcatcttgatatcgaaacgctgtcatttgagcacctgaaaaatgccatcggcgaaaaaatgactttcgcgaccaccaccgacggcaaccacgggcgcggtgtggcgtgggcagcacagcaactcggacagaatgcggtgatttacatgccgaaaggttctgctcaggaacgcgttgacgccattctgaacctcggtgccgagtgcatcgtcacggatatgaactatgacgataccgttcgcctgaccatgcaacacgcgcagcagcacggctgggaagtggtgcaagataccgcctgggaaggttacaccaaaatcccaacctggatcatgcaaggctacgcaacactggcagatgaagccgtcgagcaaatgcgtgaaatgggcgtaaccccgacgcacgttctgctgcaagccggtgtcggtgcaatggccggtggtgtgctgggttatctggtcgacgtctacagcccgcaaaatctgcacagcattattgttgaacctgacaaagctgactgtatttatcgctccggcgtcaaaggcgacatcgtcaacgttggcggtgatatggccaccatcatggcgggcctggcctgcggcgaacctaacccgctgggctgggaaatcctacgtaactgcgccacccaattcatctcctgccaggacagcgttgccgcattaggtatgcgtgtgctgggtaacccgtacggcaatgacccacgcatcatctccggtgaatccggcgctgtcggtttgggcgttctcgcagcggttcattatcacccgcaacgtcaaagcctgatggaaaaactggcgctgaacaaagatgccgtagtgctggttatcagcactgaaggcgacacagacgtgaagcactaccgcgaagttgtctgggaaggcaaacacgctgtagcaccttaa

SEQ ID NO: 261624 - DNA, 1779 bp, Klebsiella pneumoniae
atggagcttgctactacgcagtcagtactgatgcaaattcaaccgacaattcagcgttttgccagaatgcttgccagcgttttgcagcttgaggttgagatcgttgatgaaaacttgtgtcgcgtcgccggaacgggcgcgtatgggaagtttcttggccgccagttgagcggcaactcacgcctgctccgccacgtcctggaaacgaaaactgaaaaagttgtgacacagtctcgcttcgatcccctttgcgaaggttgcgatagtaaagaaaattgccgtgaaaaagcatttctgggtacgcctgtcattttacaggatcgttgtgttggggtgataagtttgattgccgttacccacgagcaacaagaacatatcagtgataatttacgcgaattttctgattacgttcgccatatatccaccatttttgtttcgaaacttctggaggatcaggggccaggagataacatcagtaaaatattcgcgaccatgatcgataatatggatcagggcgtattagttgttgatgatgaaagtcgggttcagtttgttaatcagactgccttaaaaacacttggtgttgtacaaaataatattattgggaaacctatccgtttcagaccattaacatttgagagtaattttacccatggacatatgcagcatattgtttcgtgggacgataaaagtgaattaatcattggtcaattgcataacattcagggccgacaattatttttaatggcgtttcaccaatcgcataccagtttttctgtagcaaatgcacctgatgaaccacatattgaacaattggttggcgagtgccgtgttatgcggcaattaaaacgactcattagccgtattgcacccagcccatccagcgttatggtggttggtgaaagcggcacgggtaaagaagttgtcgcccgtgcaatccataagttgagcggaagacggaataaaccctttattgctatcaactgtgccgcgattccggagcagcttctggagagcgaactgttcggttatgttaaaggcgcatttactggcgcttctgccaacggtaaaacagggttgattcaggcggcgaatacgggcacgctgtttctcgatgaaataggtgatatgccattaatgttgcaggctaaattactgcgcgctattgaggcgcgtgaaattctgccgattggtgccagtagcccaatacaagtcgacatccgcatcatttctgcaactaatcagaatttggcccagttcattgccgaaggtaaattccgcgaagatctcttctaccgacttaatgttatcccgataactcttccaccgctgcgtgaacgccaggaagatattgaactactggtgcattactttttacatctgcatacccgtcgtctgggatcggtttatcctggcattgctcctgatgtcgtcgaaatattgcgtaagcatcgttggcccggaaacctgcgcgagttaagcaatttgatggaatatctggttaacgttgttccttcaggtgaagttatcgatagcacgctattgccgccaaatctgctgaataatggcacaacggaacaaagtgatgtaacagaggtcagcgaggcgcacctggcactcgatgatgcgggcggcacggcgctggaggagatggaaaagcaaatgatccgcgaggcgctttcacgccataacagcaagaagcaagttgctgatgaactgggcatcggtattgctacgctctatcgcaagattaagaaatatgagttgttaaacacataa

SEQ ID NO: 261625 - DNA, 480 bp, Klebsiella pneumoniae
atgaatcacagtgaaacaattaccatcgaatgcaccattaacgggatgccttttcagcttcacgccgcaccaggcatgccgctctcggaattactccgcgatcaaggactgctaagtgtcaaacaagggtgctgcgtgggtgaatgtggtgcctgtacggtgctggtcgacggcacagcaatagacagttgcttataccttgccgcctgggctgaaggaaaagagatccgcacgctggaaggtgaagcgaaaggcggaaaactttctcatgttcagcaggcttatgcgaaatccggcgcggtgcagtgcgggttttgtacgcctggcctgattatggctaccacggcaatgctggcaaagccgcgcgagaagccattaaccattacggaaattcgtcgcggtctggcgggaaatctttgtcgctgcacggggtatcagatgattgtaaatacagttctggattgcgagaaaacgaagtaa

SEQ ID NO: 261626 - DNA, 879 bp, Klebsiella pneumoniae
atgtttgattttgcttcttaccatcgcgcagcaacccttgccgatgccatcaacctgctggctgacaacccgcaggccaaactgctcgccggtggcactgacgtactgattcagctccaccatcacaatgaccgttatcgccatattgttgatattcataatctggcggagctgcggggaattacgctggcggaagatggctcactacgtatcggctctgcaacgacatttacccagctaatagaagatcctataactcaacgtcttctcccggcgttatgtgctgcggcctcgtccattgctggaccgcagatccgtaacgtcgctacctacggtggaaatatttgcaacggtgccaccagcgcagattctgccacgccaacgctcatttatgacgcgaaactggagatccactccccacgcagtgttcgtttcgtcccgattaatggctttcacaccgggccgggcaaagtgtctcttgagcatgacgaaatccttgtcgcctttcattttccgccccagccgaaagaacacgtgggcagcgcgcattttaaatatgccatgcgcgacgcaatggatatttcaacgattggctgtgccgcacattgccgactggatagcggcaatttcagcgaattacgcctggcatttggtgttgccgcgccaacgccgattcgctgccaacatgccgaacagactgcacaaaatgcgccattaaacctgcaaacgctggaagctatcagcgaatctgtcctgcaagatgtcgccccgcgttcttcatggcgggccagtaaagagtttcgtctgcatctcatccagacaatgaccaaaaaagtgattagcgaagccgtcgccgcggcggggggaaaattgcaatga

SEQ ID NO: 261627 - DNA, 2298 bp, Klebsiella pneumoniae
atggaagcgcgggaagcaaccgctacaggtgaatcatgcatgcgcgtagatgccattgctaaggtcaccgggcgggcacgatatactgacgattatgttatggcgggcatgtgttacgcgaaatatgtacgtagccctatcgcacatggttatgccgtaagtattaatgatgaacaagccagaagtttaccgggcgtactggcgatttttacctgggaagatgtgcctgatatcccattcgctacagctgggcatgcctggacacttgacgaaaacaagcgcgataccgccgatcgcgcactgctaactcgccatgttcgtcaccatggtgacgccgttgccatcgtcgtggcccgtgatgaactcacggcagaaaaagcggcgcaattggtcagcattgagtggcaagaattacccgttatcaccaccccagaagcggcgctggctgatgacgctgaaccaatccataacggcggcaatttactaaaacaaagcacgatgacgacgggcaatgtccaacaaacaatcgatgccgccgactaccaggtacaggggcactatcagacgccggtcattcaacattgtcacatggaaagcgtgacatcgctggcatggatggaggatgactcgcgaattaccatcgtttccagcacccagatcccgcacattgttcgccgcgtggttggtcaggcgctggatatcccctggtcatgcgtacgagtcatcaaaccgtttgtcggtggcggttttggtaataaacaggatgtactggaagagccaatggcagcattcctgaccagcaagcttggcggcattccggtgaaagtttcccttagccgtgaagagtgtttcctcgcaacccgtacccgccacgcttttactattgacgggcaaatgggcgtgaaccgcgacggaacattgaaaggttatagtctggatgttctgtctaacaccggcgcttatgcatctcacgggcactccatcgcttctgcaggggggaataaagtcgcttacctttatcctcgttgtgcctacgcttacagttcaaagacctgctataccaacctcccctcggctggtgcgatgcgtggttatggcgcgccacaagtcgtatttgccgttgagtctatgcttgatgacgccgcgacagcgttaggtattgatcctgttgaaattcgtttacgcaacgccgcccgcgaaggagatgctaatccgctcacgggcaaacgtatttacagcgcagggttgccggagtgtcttgaaaaaggccggaaaatctttgaatgggaaaaacgccgtgcagagtgccagaaccagcaaggcaatttacgccgcggcgttggcgtcgcctgttttagctacacctcgaacacctggcctgtcggcgtagaaatagcaggcgcgcgccttctgatgaatcaggatggaaccatcaacgtgcaaagcggcgcgacggaaatcggtcagggtgccgacaccgtcttctcgcaaatggtggcagaaaccgtgggggttccggtcagcgacgttcgcgttatttcaacacaagataccgatgttacgccgttcgatcccggcgcatttgcctcacgccagagctatgttgccgcgcctgcgctgcgcagtgcggcactgttattaaaagagaaaatcatcgctcacgccgcagtcatgctacatcagtcagcgatgaatctgaccctgataaaaggccatatcgtgctggttgaacgaccggaagagccgttaatgtcgttaaaagatttggcgatggacgctttctaccaccctgaacgcggtgggcagctctctgccgaaagctccatcaaaaccaccactaacccaccagcgtttggctgtacctttgttgatctgacgatcgatattgcgctgtgcaaagtcaccatcaaccgcatcctcaacgttcatgattcgggccatattcttaatccgttgctggcagaaggtcaggtacacggcggaatgggaatgggcattggctgggcgctatttgaagagatgatcatcgatgcgaaaagcggcgtggtccgtaaccccaatctgctggattacaaaatgcccaccatgccggatctgccacaactggaaagcgcgttcatcgaaatcaatgagccgcaatccgcatacggacataagtcactaggtgagccaccaataattcctgttgccgctgctattcgtaacgcggtgaagatggctaccggtgttgcaatcaatacactgccgctgacgccaaaacggttatatgaagagttccatctggcaggattgatttga

SEQ ID NO: 261628 - DNA, 177 bp, Klebsiella pneumoniae
atgagtcaggaaattagatacatctacagtgaatattttgctgatgatacttccctttgccaaatgaaattaacctctttctctattaccgcgtttttccagaagcaagagattgggtatcaagaggctggctgctatgatatggcgtcttgttttttaagcgaggaaagattttga

SEQ ID NO: 261629 - DNA, 753 bp, Klebsiella pneumoniae
ttgagtgcgggacgcctgaataaaaaatctctgggtatcgtgatgttgttatcggttggactgcttttggcgggctgctcgggtagcaaatcatccgatacaggaacgtattccggctccgtttacaccgtgaaacggggggatacgctatatcgtatttcgcgcaccacgggaaccagcgtaaaagagctggcgcgactgaacggcatttcccccccttacaccattgaagttggtcagaaactaaaactgggtggggcgaaaagtagcagtacacgtaaatcaaccgccaaatcaacgaccaaaaccgcatcggttacaccgtcatcagcagtaccgaaatcttcctggccgccagtagggcaacgttgttggttatggccaacgacagggaaagttatcatgccgtattcgacagctgatggcggcaataaagggattgatatctcagctccacggggtacacctatttacgccgcgggtgcaggaaaggtggtgtatgtgggcaaccagctgcgtggctacggtaatctcatcatgattaaacacagtgaagattacattacggcttacgcccataatgacacgatgctggtaaataatgggcaaagcgtaaaggctgggcaaaaaatcgccactatggggagcactgatgcggcatcggttcgcctgcatttccagattcgttaccgtgcaacggcaattgatccgctacgttacttgccgcctcagggcagcaagccaaaatgctga

SEQ ID NO: 261630 - DNA, 1638 bp, Klebsiella pneumoniae; identical to SEQ ID NO: 15823

SEQ ID NO: 261631 - DNA, 810 bp, Klebsiella pneumoniae
atgttcttaattaacggtcataagcaggaatcgctggcagtaagcgatcgggcaacgcagtttggtgatggttgttttaccaccgccagagttatcgacggcaaagtcagtttgttatcggcgcatatccagcgactacaggatgcttgtcagcggttgatgatttcctgtgacttctggcctcagcttgaactagagatgaaaacgctggcagcagaacagcaaaatggtgtgctgaaagtggtgatcagtcgcggtagtggcgggcgaggatacagcatattgaacagcggaccggcaacgcggattctctccgttacggtttatcccgcacattacgaccgtttgcgtaacgaggggatgacgttggcgctaagcccggtgcggctggggcgcaatcctcatcttgcaggtattaaacatcttaatcggcttgagcaagtattgatccgctctcatcttgagcagacaaacgctgatgaggcgctggtccttgacagcgaagggtgggttacggaatgctgtgcggctaatttgttctggcggaagggcaacgtagtttatacgccgcgactggatcaggcaggtgttaacggcattatgcgacaattctgtatccgtttactggcacaatcctcttatcagcttgtcgaagtgcaagcctcgctggaggaggcgttgcaggcagatgagatggttatttgtaatgcgttaatgccagtgatacccgtacgtgcctgtggcgatgtctccttttcgtcagcaacgttatatgaatatttagccccactttgtgagcgcccgaattag

SEQ ID NO: 261632 - DNA, 1023 bp, Klebsiella pneumoniae
atgaaaaaagtgttattgattatcttgttattgctggtggtactgggtatcgccgctggtgtgggcgtctggaaggttcgccatcttgccgacagcaaattgcttatcaaagaagagacgatatttaccctgaagccagggaccggacgtctggcgctcggtgaacagctttatgccgataagatcatcaatcgcccacgggttttccaatggctgctgcgtatcgaaccggatctttctcactttaaagccgggacttaccgctttacaccgcagatgaccgtgcgcgagatgctgaaattgctggaaagcggtaaagaagcacagttccctctgcgactggtagaagggatgcgtctgagcgattacctcaagcaattgcgtgaggccccgtatatcaagcacacgctgagcgacgataagtacgccaccgtagcgcaggcacttgaactggaaaacccggagtggattgaaggttggttctggccagacacctggatgtataccgccaataccaccgatgtcgcgttactcaagcgagcgcacaagaaaatggtgaaagcggtcgatagcgcctgggaagggcgtgcggacggtctgccctataaagataaaaaccagctggtgacgatggcatcaattatcgaaaaagaaaccgccgtttccagcgaacgcgatcaggttgcctcggtatttatcaaccgtttacgcattggtatgcgcctgcagaccgacccgaccgtgatttacgggatgggagagcgttataatggcaaactttctcgtgcagacctggaaacgccgacagcgtataacacctataccattaccggtttgccgccaggtgcgatagcgacgccgggggcggattcgctgaaggctgctgcgcatccggcaaaaacgccgtatctctattttgtggccgatggtaaaggtggtcacacgtttaataccaatcttgccagtcataacaagtctgtgcaggattatctgaaagtgcttaaggaaaaaaatgcgcagtaa

SEQ ID NO: 261633 - DNA, 642 bp, Klebsiella pneumoniae
atgcgcagtaagtatatcgtcattgaggggctggaaggcgcaggcaaaactaccgcgcgtaacgtggtggttgagacgctcgagcaactgggtatccgcgacatggttttcactcgggaacctggcggtacgcaacttgccgaaaagttaagaagcctggtgctggatatcaaatcggtaggcgatgaagtcattaccgataaagccgaagttctgatgttttatgccgcgcgcgttcaactggtagaaacggtcatcaaacctgcgctggctaacggcacctgggtgattggcgatcgccacgatctctccactcaagcctatcagggtggaggacgtggtattgaccaacatatgctggcaacactgcgtgatgctgttctcggggattttcgccccgacttaacgctctatctcgatgttaccccggaggttggcttaaaacgcgcgcgtgcgcgcggcgagctggatcgtattgagcaagaatctttcgatttctttaatcgcacccgcgcccgctatctggaactggcagcacaagataaaagcattcataccattgatgccacccagccgctggaggccgtgatggatgcaatccgcactaccgtgaccaactgggtgaaggagttggacgcatga

SEQ ID NO: 261634 - DNA, 1005 bp, Klebsiella pneumoniae
atgagatggtatccatggttacgacctgatttcgaaaaactggtagccagctatcaggccggaagaggtcaccatgcgctgctcattcaggcgttaccgggcatgggcgatgatgctttaatctacgccctgagccgttatttactctgccaacaaccgcagggccacaaaagttgcggtcactgtcgtggatgtcagttgatgcaggctggcacgcatcccgattattacaccctggctcccgaaaaagggaaaaatgcgctgggcattgatgcggtacgtgaagtcaccgaaaagttaaatgagcacgcacgcttaggtggtgcgaaagttgtctgggtaaccgatgctgccttactgactgacgccgcggctaacgcattgctgaaaacgcttgaagagccaccagcagaaacttggtttttcctggctacccgcgagcctgaacgcttactggcaacattacgtagtcgttgtcggttacattaccttgcgccgccgccggaacagtacgccgtgacctggctttcacgcgaagtgacaatgtcacaggatgcactacttgccgcattgcgcttaagcgccggttcgcctggcgcggcactggcgttgtttcagggagataactggcaggctcgtgaaacattgtgtcaggcgctggcatatagcgtgcaatcgggcgactggtattcgctgctagcggcccttaatcatgaacaagctccggcgcgtttacactggctggcaacgttgctgatggatgcgctaaaacgccattatggcgctgcgcaggtgaccaatgttgatgtgccggggctggtcgtcgaactggcaaaccatctttctccctcgcgcctgcaggctatactgggggatgtttgccacattcgtgaacagttaatgtccgtcacaggcatcaaccgcgagcttctcatcaccgatcttttactgcgtattgagcattacctgcaaccgggcgttgtgctaccggttcctcatctttaa

SEQ ID NO: 261635 - DNA, 798 bp, Klebsiella pneumoniae
atgtttttagtcgactcacactgccatctcgatggtctggattatgaatctttgcataaggacgtggatgacgttctggcgaaagccgccgcacgcgatgtgaaattttgtctggcagtcgccacaacattaccgggttatttacacatgcgggatctggtaggcgaacgtgacaacgtcgtattttcttgtggcgtgcatccactcaaccagaatgatccctacgatgtagaagatttacgccgtctggtggcagaagagggcgttgttgcgctgggtgaaaccgggttggattattattacacgccggaaactaaagtacggcagcaagagtccttcatccatcatatccagattggtcgtgaactgaacaagccggttatcgtccatacccgtgacgcccgcgccgatacgctggcaattctgcgcgaagaaaaagtgacggattgcggtggcgtactacactgttttacagaggacagagaaacggcgggtaaattactggatctcggattttacatctccttttccggcattgtgaccttccgtaatgcggagcaactgcgcgatgctgcgcgttatgtccccctggatcggttactggtagaaactgactcaccttaccttgcgccggtgccgcatcgaggaaaagagaatcaacctgcgatggttcgtgacgttgcagaatacatggctgtgttgaaaggtgttgccgttgaagaactggcgcaggtaaccaccgataacttcgcccgtctgtttcacatcgacgcttcccgccttcaatccatccgttga

SEQ ID NO: 261636 - DNA, 2190 bp, Klebsiella pneumoniae
atgctttcaacacaatttaacagggataatcaatatcaagccatcaccaaaccgtcactacttgccggttgcattgtactggcactattaccttctgccgcttttgctgcaccagccactgaagaaacggtgattgttgagggttcagccacagctccagatgatggcgaaaatgattacagcgtaacgtctacctctgcaggtaccaaaatgcagatgactcaacgtgatattcctcagtcggtcactattgttagccagcagcggatggaagatcagcagttacaaacgctgggcgaagtgatggaaaacacgctggggatcagcaaaagtcaggcggattccgatcgtgctctttattattcccgcggattccagatcgataactatatggttgatggtatccccacctattttgaatcgcgctggaatctgggcgacgcactttctgatatggcactgtttgaacgcgtagaagtagtgcgtggcgcgacaggactcatgaccgggacgggtaatccatctgcggcaattaatatggttcgaaaacacgcgaccagtcgtgaatttaaaggcgatgtctcggcggaatacggtagctggaacaaagaacggtatgtggcggatttacaaagcccactcaccgaagatggtaaaatccgcgcgcgaattgtcggcggctaccagaataacgactcatggctggaccgctacaacagtgaaaagaccttcttctccggcattgtcgatgctgatttaggcgatcttacgacgctttcagccggttacgaatatcagcgcattgatgttaatagcccaacctggggcggtttaccgcgctggaatactgatggcagcagcaacagttacgatcgcgcacgcagtaccgcacctgactgggcgtataacgataaagagatcaacaaggtctttatgaccctcaagcagcggtttgctgatacctggcaagcgacactgaatgccacccactccgaagtcgaatttgacagtaaaatgatgtatgtcgatgcctatgtaaataaagcggatggtatgctggttgggccatacagtaattatggacctggctttgattatgtcggcggcaccggttggaacagcggcaaacgtaaagttgatgcgctggatttgtttgctgacggtagttatgaattgtttggtcgtcagcacaatctaatgtttggtggcagttacagcaaacaaaacaatcgttacttcagttcatgggcaaacatcttcccggatgaaattggcagtttctacaactttaatggcaatttcccacaaaccgactggtcaccacagagcctggcgcaggacgataccacacatatgaaatcgttatatgctgccactcgtgtcacccttgccgatccgctgcatctgatcctcggcgctcgttataccaactggcgggttgatacgctgacttacagcatggagaaaaaccacaccacgccttacgctggtctggtgtttgacatcaatgacaactggtcgacctacgccagctatacctctattttccagccgcaaaatgatcgtgacagttcaggcaaatatctggctccaatcaccggtaacaactacgagctgggtctgaaatcggactggatgaatagccgtctgaccaccacgttagccatcttccgtattgagcaggataatgtcgctcagtccaccggtacacctatccccggcagcaacggcgaaaccgcctataaagcggtggatgggacagtcagtaaaggtgtggaatttgaactcaacggcgcaattaccgacaactggcagctgacgtttggcgcaacgcgctatattgcagaggataacgaaggaaacgccgttaatcctaatctgccacgcaccacggttaaaatgttcaccagctatcggttgcctgtcatgccagagttgacggtcggcggtggtgttaactggcaaaatcgcgtgtataccgacaccgtgacgccgtatggcaccttccgcgccgagcaaggtagctacgcgctggtggatctcttcacccgctaccaggtgacgaaaaacttctcgttacaggggaacgtcaataacctgttcgacaaaacctacgataccaacgtggaaggttctatcgtctacggcgcaccgcgtaatttcagcattaccggcacgtatcaattctga

SEQ ID NO: 261637 - DNA, 360 bp, Klebsiella pneumoniae
gtggcagaagaaactatattcagcaaaattattcgtcgtgagatcccctccgatatcgtctaccaggatgatctggtaacggcgtttcgcgatatttcgccgcaagcgccaacgcatattctgatcattccgaatatcctcattccgactgtgaacgacgtgtctgctgagcatgagcaggcgctgggacgcatgatcaccgtagcggcaaaaattgctgagcaagaaggtattgccgaagatggctatcgtctgatcatgaacaccaaccgccacggcggacaagaggtttaccacatccatatgcacttgttgggtggccgtccgctgggaccaatgctggcgcataaaggtctgtaa

SEQ ID NO: 261638 - DNA, 378 bp, Klebsiella pneumoniae
atgagaaaaggatgctttgggctggtgtctctggcgttgttagtgctggtgggctgtcgttcacatccggaaattccggtgaatgatgagcaatcgctggtgatggagtcatctttattggctgcgggcatcagtgcagaaaagcccgtcctttcgacgtctgatattcaaccttcagcatcctcaacgctttataacgaaaggcaagaacccgttaccgttcattatcgtttttactggtatgacgccagagggctggagatgcatcctctggaaaggccacgcagcgttaccattcccgcacattcggcggtaacgctgtacggcagcgccaattttctgggggcgcacaaagtcagactttatctatatttgtaa

SEQ ID NO: 261639 - DNA, 642 bp, Klebsiella pneumoniae
atgacaaaaatgagtcgctacgccttgattaccgcgctggcgatgtttctcgccgggtgtgtggggcaacgtgaacctgcaccggtagaagaagtgaaaccagcgccggaacaaccagccgagccacaacagcctgtccccacagtgccctcggtgccgacgatcccgcagcagccaggcccaattgagcacgaagatcaaactgcaccgcctgcgccgcatattcgccattatgactggaatggtgcaatgcagccgatggtcagtaagatgcttggggctgacggcgtgactgcgggtagcgtcctgctggttgatagcgttaacaaccgtactaacggttcgctgaatgccgcagaagcgaccgaaacgctgcgaaatgcgctggctaataacggtaaatttaccctggtttccgcccagcagctgtcgatggcaaagcaacagttaggtttgtcgccgcaggacagtttaggcacccgtagtaaagccataggcattgcccgcaatgtcggcgctcattacgtgctatactccagtgcctctggcaacgttaacgctccgaccctacaaatgcagctgatgctggtgcagacgggcgaaattatctggtcaggtaaaggtgccgtttcgcagcaataa

SEQ ID NO: 261640 - DNA, 825 bp, Klebsiella pneumoniae
gtgccgtttcgcagcaataatcccatcacgcgcgacgaattgctgtcgcgctttttcccgcaatttcatcccgtcacgacgtttaatagtgggcttagtggcgggagttttctcattgaacatcagggccagcgttttgttgtgcgtcagccgcacgatcctgatgcgccgcagtccgcgttcttgcgccagtatcgggctttatcacaactacccgcatgcattgcaccgaagccgcatttatatctccgtgactggatggtggtcgactatctgcccggcgaggtaaaaacgtatttgccggataccaacgaactggcaggcttgctgtattatctacatcaacaaccgcgttttggctggcgaataacgctgttgccgttactggaactgtactggcagcaaagcgatccggcgcggcggacagtgggttggctgcgaaggttaaaacgtctgcgcaaagcgcgggaaccacggcctttacgcttaagtccattgcatatggatgtccacgccggaaatttagtgcatagcgcgtcagggttaaaactcatcgactgggagtatgcaggagatggtgatatcgcgctggaactggcggcggtgtgggtggaaaatactgaccagcaccggcaattggtcaatgactatgccactcgcgcgaagatttatccggcgcaattatggcgtcaggtcaggcgatggtttccctggctgctgatgctcaaagcagggtggtttgagtaccgttggcgacaaaccggcgatcaacaatttatcaggctggccgatgacacctggcggcagctattaataaaacaataa

SEQ ID NO: 261641 - DNA, 1026 bp, Klebsiella pneumoniae
gtgggtccagtaatgttggatgtcgaaggttacgaactggacgcggaagagcgtgaaatactggcgcatccgctggtgggagggctgattctctttacgcgtaactatcatgatcctgcccagttacgtgaactggtgtgccagatccgcgcagcttcgcgcaatcatctggtggtggcggttgatcaggaaggtggacgcgtgcagcgttttcgtgaaggttttacccgcttgccagcggcacaatcatttgctgcgctgttgggaatggaagaaggcggaaaactggcgcaagaggcaggttggttgatggccagcgaaatgattgctatggatattgatatcagctttgcgccagtgctggacgtcgggcatatcagcgcggcgattggcgagcgttcttatcatgccgatcccgaaaaagccctggcaattgccagccggtttattgatggtatgcatgaagccggaatgaaaactaccgggaaacacttcccaggacacggtgcagtaacggcagactcacacaaagaaacaccgtgtgacccacgtccgcaagcggagattcgcgctaaagatatgtcggtcttcagttccttaatccgcgaaaataaactcgacgccattatgcctgcgcatgtgatctacagtgatgtcgatccgcgtccggcgagcggttctccctattggctgaaaaccgttttgcgtcaggaactgggttttgatggcgtgattttctctgacgatttatcgatggaaggtgccgcgattatgggcagttatgccgaacgcgggcaggcatcactggacgcgggttgcgatatgatcctggtctgcaataatcgtaaaggggccgtcagcgtgttagataatctgtcaccgatcaaggcagaacgtgttacacgtttgtatcataaaggttcattttcgcgacaggaactgatggactcggctcgctggaaagcgatcagcgcccgtctgaatcagttacatgaacgctggcaggaagagaaagcaggtcactaa

SEQ ID NO: 261642 - DNA, 696 bp, Klebsiella pneumoniae
gtgaacggaggtgattatttttataataacctttcattcacagtcaccaggtacaacggcatcatggcaactgactcaacacaatgtgtaaaaaaaagccgtggccgcccaaaagtgttcgacagggatgccgcgcttgataaggccatgaaattgttctggcaacacggttatgaagcgacttctcttgcggacctcgtcgaagcgaccggagccaaagcgcccacgctatacgcggaatttaccaacaaagaggggttatttcgcgctgtactcgaccgctatatcgatcattttgccgctaagcatgaagcacagctgttttgtgaagagaaaagcgtggagactgcgctggctgactattttgctgccgtcgccaactgctttaccagcaaagacaccccggctggctgctttatgatcaacaactgcaccaccctctccccggattccggagatatcggcaatacgctgaaatcacgccatgcgatgcaagagcgcactttgcagcagtttttatgtcaacgacaagcgcgcggggaaatcccgacccactgtgacgtgacgcatctggcagaattccttaattgtattattcaggggatgtcgatcagcgcacgcgaaggtgcatcgctggaaaaactgatgcagattgcccgaacgactttgcgtttatggccggaactggtgaaataa

SEQ ID NO: 261643 - DNA, 258 bp, Klebsiella pneumoniae
atgaaaaacgtaaaaaccctcatcgctgcggcgattttaagctcaatgtcatttgccagctttgcggctgtcgaagttcagtcaacgccagaaggccaacaaaaagtcggtactatcagtgctaacgcggggacaaatctgggatcgctggaagagcagctggcgcaaaaagcggatgagatgggcgcaaaatcattccgtattacttctgtaaccggtccaaataccctccatggaacagcagtaatttataaataa

SEQ ID NO: 261644 - DNA, 960 bp, Klebsiella pneumoniae
atgatcaaaacgcatttttctcgctggctaacgttttttacgttcgccgctgccgtggcgctggcgctaccggcaaaagccaacacctggccactgccgccagcgggcagtcgtctggttggcgaaaacaaatttcatgtggtggaaaatgacggtggttctctggaagccatcgccaaaaaatataatgtcggctttctcgctctgttacaggctaaccccggcgttgatccttacgtgccgcgcgcgggtagcgtgttaacgatcccgttgcaaaccctacttccagatgcgccgcgcgaaggcattgtgatcaatattgcggaactgcgtctctattactacccgccgggtaaaaattcggtaaccgtgtatcccatcggcattggtcagttgggtggtgacacgctgacgccaacgatggtgactaccgtttcggacaagcgtgcaaacccaacctggacgccaacagcgaatattcgcgcccgttataaagctcaggggattgagctacctgcagtggttccggcaggaccggataacccaatgggccatcatgcgattcgtctggcggcctatggcggtgtttatttgcttcacggtacgaacgccgatttcggcattggcatgcgggtaagttctggctgtattcgtctgcgtgatgacgatatcaaaacactctttagccaggtcacccctggtaccaaagtgaatatcatcaacaccccgattaaagtctctgccgaaccaaacggtgcgcgtctggttgaagtacatcaaccgctgtcagagaagattgatgacgatccgcaactgctgccaattacactgaatagcgcaatgcaatcatttaaagatgcagcgcaaactgacgctgaagtgatgcagcatgtgatggatgtccgttccgggatgccggtggatgtccgccgtcatcaagtgagcccacaaactctgtaa

SEQ ID NO: 261645 - DNA, 1074 bp, Klebsiella pneumoniae
atgaaacaaaaagagctatggattaaccagatcaaaggattatgtatttgtctggtagtgatttatcactcggtgattaccttttatccgcatctgagcacttttcagcatccgttatcggaagtcctgagcaaatgctggatctatttcaatctttaccttgcaccctttcgtatgccggtttttttctttatatccggctatttgattcgccgctatatcgacagcgtaccgtggggaaattgtctcgataaacggatctggaacatcttctgggtgctggcgctttggggcgtggtgcagtggctggcgttaagtgcgctgaaccagtggctggcacctgagcgcgatttaagcaatgcctccaatgccgcttatgccgattccaccggtgagttcctgcacgggatgatcaccgccagcaccagcttgtggtatctgtatgcgttaattgtctatttcgtggtatgtaaaatttttagccgtctggcgctgccactattcgccttgtttgtactgctgagtgtggcggttaatttcgttcccacgccgtggtggggaatgaacagtgtgatccgcaatttgccttattacagccttggcgcatggtttggcgcaacattaatgacctacgttaaagaggtgccgttgcgccgccatctgctgatggcttctttgctgaccgttctggcggtcggtgcctggttgtttactatctcgctgctgttgtcgctggtatcgattgtggtgatcatgaagctgttttatcaatacgagcaacgtttcggtatgcgctccaccagcctgctgaatgtgattggcaccaacaccattgctatctacaccacccatcgcattctggtagagatattcagcttaactctgcttgcgccaatgaacgcggcacgctggtcgccgcaagtcgaactgacactcctgatggtttacccctttgtcagtttgttcatctgtactgttgcgggcttgctggtaagaaaactttcacagcgtgcattcagcgatctgttgttctccccgccttcactgcccgctgccgtcagttactcccgctaa

SEQ ID NO: 261646 - DNA, 1239 bp, Klebsiella pneumoniae
atgcctttatcgttattaattggcctgcgttttagtcgcggacggcggcgcggcggcatggtgtcgctgatctccgtcatttctaccattggcattgccctcggcgtggcggtattgatcgtcggcttaagcgcgatgaacggctttgaacgcgaactgaataaccgcattctggcggtggtgccgcatggtgaaatcgaagcggtggatcagccgtggactaactggcaggaagcactggataaagtgcagaaagtgccgggtattgccgccgctgcgccgtatatcaatttcaccgggctggtagaaagtggcgcgaatcttcgcgcaatccaggtaaagggcgttaacccgcaacaggaacagcgtctgagcgcattaccctcgtttgttcagggggatgcctggcgcaattttaaagcgggcgaacagcaaattatcatcggcaaaggcgtggcggatgcgctgaaagtgaagcagggcgattgggtgtcgattatgatccccaactcgaatcccgagcataaactgatgcagccaaaacgtgtgcgtttgcacattgccggtattttgcagttgagtggtcaactcgatcacagttttgccatgatcccgctggcagatgcccaacaatatcttgatatgggttccagcgtgtcaggtattgcccttaaaatgacggatgttttcaacgccaataagctggtacgcgatgcgggtgaagtgaccaacagctatgtttatattaaaagttggattggtacttacggctatatgtatcgcgatatccagatgatccgcgccattatgtatctggcgatggtactggtgattggcgtggcctgtttcaacatcgtctccaccttagtgatggcggtgaaagacaagagtggcgatatcgcagtattaagaacgctgggggcgaaagatggtttaattcgcgccatctttgtctggtatggattgctggcagggctattcggtagcctgtgtggtgtgattatcggcgtagttgtttcactgcaacttaccccgattattgagtggattgaaaagttgatcggtcatcagttcctctccagcgatatctattttattgacttcctgccatcggaattgcactggctggacgtcttctacgtactggtcacagcattgttgctgagtcttttggcaagttggtatccggcgcggcgcgccagtaatattgaccctgcgcgagtccttagcggccagtaa

SEQ ID NO: 261647 - DNA, 912 bp, Klebsiella pneumoniae
atgtattacgggtttgatattggtggaacgaaaattgcgcttggcgtgtttgatagcgttcggcagttgcagtgggaaaagcgggtgccgacaccgcgtgacagctatgacgcatttttagatgcagtgtgcgagctggtggctgaagccgataagcgttttggctgtaaaggttctgtcggcatcggtattccgggaatgccggaaacagaagatggtacgctgtatgctgccaatgtccccgctgctagcggtaaaccgctgcgtgccgacctgagcgcacgtcttgatcgcgatgtccgccttgataacgatgccaactgttttgccctttcagaagcctgggatgatgaatttactcaatatccactggtgatggggttgattctcggcaccggcgttggcggcgggctgattttcaacggtaaaccaattaccggtaaaagctatattaccggcgagtttggccatatgcgtctgccggttgatgcgttaaccatgatggggctggatttcccgttacgccgctgcggctgtggtcagcatggctgcattgaaaattatctgtctggtcgcggttttgcgtggctgtatcaacactattatcatcaaccgttgcaggctcccgaaattattgcgctttatgatcaaggtgatgagcaggcaagggcgcacgttgagcgttatctggatttattagcggtttgtctgggaaatatcctgaccattgttgaccctgacctggtcgtcattggtggtggcttatcgaatttcccggcaatcacaacgcaactggcggacaggctgcctcgtcatctcttacctgtagctcgtgttccgcgcattgaacgcgcgcgccacggtgatgcgggaggaatgcgtggtgcggccttcctacatctaaccgattaa

SEQ ID NO: 261648 - DNA, 822 bp, Klebsiella pneumoniae
atgctgtcgcgtcggggtcatcggttaagtcgttttcgtaaaaataaacgccgtctgcgcgagcgtttgcgtcagcgtatttttttcagagataaagtggtgccggaagcaatggaaaaaccaagagtactcgtactgacaggggcaggtatttctgcggaatcaggtattcgtacctttcgcgccgcagatggcctgtgggaagaacatcgggttgaagatgtggcaacgccggaaggtttcgatcgcgatcctgaactggtgcaagcgttttataacgcccgtcgtcgacagctacagcagccagaaattcagcctaacgccgcgcatcttgcgctggctaaactgcaagatgccctcggcgatcgctttttgctggtgacgcagaatatcgacaaccttcatgagcgtgccggtaacaccaatgttattcatatgcatggggaactgctgaaagttcgttgttcacaaagtggtcaggttctcgactggaccggagacgttacgccagaagataaatgccattgttgccagttcccggcacccttgcgcccgcacgtcgtttggtttggcgaaatgccactcggcatggatgaaatttatatggcgttgtcaatggccgatattttcattgccattggtacatcagggcatgtttatccggcggctgggtttgttcacgaagcgaaactgcatggcgcacacaccgtggaactgaatcttgaaccaagccaggtcggtaatgaatttgccgagaaatattacggcccggcaagccaggtggtgccagagtttgttgaaaagttgctgaagggcttataa

SEQ ID NO: 261649 - DNA, 786 bp, Klebsiella pneumoniae
atgaaaaaaatcataatattgctcagtttactgatactcctgcctctgacggcaaccagtaatccattgattccaataatgaagactctttttacagatgttacaggtactgtaccggatgctgaagagatcgcgcataaagccgagctttttcgccaacaaaccgggattgcgccgtttatcgtggttgtacctggcgttaatgaagcaagcttcaggcaaaatggcaaagcgatgctggcgcatgcgtcatcttcattgagtgatgtaaaaggcagcgtcctgttactttttaccacccgcgagccacggttaattatgataaccaacggccaggttgaaagcggtctggacgataaacatctcggccttctggtagaaaatcacactcaggcttatttacatgcggacctctggtatcagggaatcaataatgcattggctgttttacaagcacagatattaaaacaaccgacgccgccactgacatattatccgcatcccggacaacagcaggagaatgatcctcccggcagtaccacgatattaggtctttttgcctgggcagttgcattcatcgtctttactgcatttttttactacacgacgcgccttaattatgcattaaagtttgcagtggcgatgactattgccaatatgggttatcaggctttatgtttgtacatcgataatagcttggcgattaccagaatatcgccgctctgggcagggctgattggtgtctgtacgtttattgccgcgttgttattgacgagtaaacggtaa

SEQ ID NO: 261650 - DNA, 462 bp, Klebsiella pneumoniae
atgagtcaggacagtagagttttctttcatatattcctcggtatcggtctggtactaatcctcatttctgttgttgtcttttataaccagttcacctatagcaaagatgcgattcatactgaaggcgtcattgttgataccgtctggcactccagtcattctcatcgcacgggtaaaaatggttcgtggtatcccgtcgttgcctttcgaccgacgcctgattacacgctaattttcaattcgagtattggcagcgatttttatgaagacagcgaaggcgataaagttaatgtttattattctccaggacatcctgaaaaggctgagataaataacccgtgggttaatttttttaaatgggggtttatcggcattatgggcgttatttttatctccgtcggtttattaatcagtatgccctcctctaaaaagacacgcaggaaacggaagtcccgcccatga

SEQ ID NO: 261651 - DNA, 1119 bp, Klebsiella pneumoniae
atgtcaccgaggccacgaaaaaacagcactgacgtagccggtctttacgaaaagtttgatcgcagaactggcagagtttactaccagtataaaaatcctgtgactggaaaatttcacggactcggaacagacaaaggtaaggcagaaaaaatcgcttccacagccaatcagcgaatagctgcagcagaagctgaatatttcatgcgcaaaattgatgaaagtccgtcagcaacaaaacgtcggggtatcagattaaaggcatgggttgatcgatatctgaaaatacaggacacgcgactgaaaaatggagatattgcagctacaactcacaaagaaaaaactcgaatggctgcatacctggtttcccgtctgggaaaccacccattgaaagaactggaagtaagagactttgcattaatactggatgagtggctggataaagacatggtcagcacagcgagagtaaatcgtggattatgggttgatatttataaagaagcacagcatgcaggggaagttcctcctggatggaatcctccggaggctacccgtaaaccgatccctaaagtaaccagagccaggctcaccatggaagactggcaaaaaatttacaatgcaacgcctgaaaaacactttatccgtaacgcaatgcttcttgcgattgttactggtcagcgccgtgatgacatttgccacatgcgtttttcagatgtgtggaacgaacacttgcatatcacccagggaaaaaccggaatgcgtctggcgttaccgcttacactacgctgtgatgccattgggataacgttaaaagaagttattgatgggtgccgagacagaatattaagtccatatctaatccatagtcggcaccagaaacaaccgaagccgatgagtaaagacaacctgagcgactactttgccaaagcacgggatctggctgggataattccaccagcaggaaaaacttcgccaacatttcatgaacaacgctctctatcagaacggctgtaccgtgcacagggtatcgatacaaaaacattactaggacataaagtccaggcaaccaccgatcgctataacgatactcgaggtcaggaatgggttaagttggttatttga

SEQ ID NO: 261652 - DNA, 270 bp, Klebsiella pneumoniae
atgagcgaacagtacctgataacgctcgacgagtggaaaccaaaacggttcagtctcccaataacaaacactaccctggtgaaatacggaaaactaggatacatcgttccaaggccacaaaaaattcgtgggcgttggctgatagatcgccgagcagtatttgttgggcctggtgaaacgggaattgcgccggaaattcatactggcgatgatgatgcactgaaggagattttaactcatgtcaccgaggccacgaaaaaacagcactga

SEQ ID NO: 261653 - DNA, 567 bp, Klebsiella pneumoniae
atgtacgagcgttatgcaggtttaatttttgatatggatggcaccatcctggataccgagcctacgcaccgtaaagcgtggcgcgaagtattagggcactacggtcttcagtacgatgttcaggcgatgattgcgcttaatggctcgcccacctggcgtattgctcaggcgattattgagctgaatcaggccgatctcgacccgcatgcgttagcgcgtgaaaaaacagaagcagtaagaagtatgctgctggatagtgtcgagccgcttcctcttgttgaagtggtgaaaagctggcatggtcgtcgcccaatggctgtaggaacggggagtgaaagcgccatcgctgaggcattgctggcgcacctgggattacgccgttattttgacgccgtcgtcgctgctgatcacgtcaaacaccataaacccgcgccagacacatttttgttgtgcgcgcagcgtatgggcgtgcaaccgacacagtgtgtggtctttgaagatgccgatttcggtattcaggcggcccgtgcagcaggcatggacgctgtggatgttcgcttgctgtga

SEQ ID NO: 261654 - DNA, 429 bp, Klebsiella pneumoniae
gtgagtgaagcgttatcgcttttctcgttgtttgccagtagttttctcagcgctacactattacccggcaactccgaagtcgtgctggtggcaatgttgctttccgggatcagtcatccctgggttttagttttaacagcaacaatgggtaatagccttggagggttaactaacgttatccttgggcgtttctttccattgcgtaaaacatcgcgctggcaagagaaagctaccggctggctgaaacgctatggtgcagtcacgctattattaagctggatgcccgtggttggcgatttactgtgtctgttagcgggatggatgcgcatctcctgggggccggtaatcttttttttgtgccttggtaaagcgttacgctatgttgcagttgcagcagcgaccgttcagggcatgatgtggtggcactaa

SEQ ID NO: 261655 - DNA, 1557 bp, Klebsiella pneumoniae
ttgatcccggacgtatcacaggcgctggcctggctggaaaaacatcctcaggcgttaaaggggatacagcgtgggctggagcgcgaaactttgcgtgttaatgctgatggcacactggcaacaacaggtcatcctgaagcattaggttccgcactgacgcacaaatggattactaccgattttgcggaagcattgctggaattcattacaccagtggatggtgatattgaacatatgctgacctttatgcgcgatctgcatcgttatacggcgcgcaatatgggcgatgagcggatgtggccgttaagtatgccatgctacatcgcagaaggtcaggacatcgaactggcacagtacggcacttctaacaccggacgctttaaaacgctgtaccgtgaagggctgaaaaatcgctacggcgcgctgatgcaaaccatttccggcgtgcactacaatttctctttgccaatggcattctggcaagcgaagtgtggtgatatcgcgggcgctgatgccaaagagaaaatttctgcgggctatttccgcgttatccgcaattactatcgtttcggttgggtcattccttatctgtttggcgcgtctccggcgatttgttcttctttcctgcaaggaaaaccaacatcgctgccgtttgagaaaaccgagtgcggtatgtattacctgccgtatgcgacctctcttcgtttgagtgatctcggctataccaataaatcgcaaagcaatctaggtattaccttcaacgatctttacgagtacgtagcgggccttaaacaggcaatcaaaacgccatcggaagagtacgccaagattggcattgagaaagatggtaagaggctgcaaatcaacagcaacgtgctgcagattgaaaacgaactgtacgcgccgattcgtccaaaacgcgttacccgcagcggcgagtcgccttctgatgcgctgttacgtggcggcattgaatatattgaagtgcgttcgctggacatcaacccattctcgccgattggtgtagatgaacagcaggtgcgattcctcgacctgtttatggtctggtgtgcgctggctgatgcaccggaaatgagcagtaaagaacttgcctgtacacgcgttaactggaaccgggtgatcctcgaaggtcgcaaaccgggcctgacgctgggtatcggctgcgaaaccgcgcagttcccgttaccgcaggtgggtaaagatctgttccgcgatctgaaacgcgttgcgcaaacgctggatagcattaacggcggcgaagcgtatcagaaagtgtgtgatgaactggtcgcctgcttcgataatcccgatctgactttctctgcccgtatcttaaggtctatgattgatactggtattggcggaacaggcaaagcgtttgctgaagcgtaccgtaatctgctgcgtgaagagccgttggaaattctgcgcgaagaggattttgtagccgagcgcgaggcgtctgaacgccgtcagcaggaaatggaagccgctgataccgaaccgtttgcggtgtggctggaaaaacacgcctga

SEQ ID NO: 261656 - DNA, 516 bp, Klebsiella pneumoniae
atgccgttgttagatagcttcacagtcgatcatacccggatggaagcgcctgcagttcgggtggcgaaaacaatgaacaccccgcatggcgacgcaatcaccgtgttcgatctgcgcttctgcgtgccgaacaaagaagtgatgccagaaagagggatccataccctggagcacctgtttgctggttttatgcgtaaccatcttaacggtaatggtgtagagattatcgatatctcgccaatgggctgccgcaccggtttttatatgagtctgattggtacgccagatgagcagcgtgttgctgatgcctggaaagcggcaatggaagacgtgctgaaagtgcaggatcagaatcagatcccggaactgaacgtctaccagtgtggcacttaccagatgcactcgttgcaggaagcgcaggatattgcgcgtagcattctggaacgtgacgtgcgcatcaacagcaacgaagaactggcgctgccgaaagagaagttgcaggaactgcacatctag

SEQ ID NO: 261657 - DNA, 1539 bp, Klebsiella pneumoniae
atgcaacagcaaaaaccgctggaaggcgcgcaactggtcattatgacgattgcgctgtcactggcgacattcatgcaggtgctggactccaccattgctaacgtggcgatccccactatcgccgggaatctgggctcatcgctcagccagggaacgtgggtaatcacttctttcggggtggcgaatgccatctcgatcccgcttaccggctggctggcaaagcgcgtcggggaagtgaaactgttcctctggtccaccatcgcctttgctattgcgtcgtgggcgtgtggtgtctccagcagcctgaatatgctgattttcttccgcgtgattcaggggattgtcgccgggccgttaattccgctttcgcaaagtctattgctgaataactacccgccagccaaacgctcgatcgcgctggcgttgtggtcgatgacggtgattgttgcgccaatttgcggcccgatcctcggcgggtatatcagtgacaattaccactggggctggatattcttcatcaacgtaccgattggcgtggcggtggtgttgatgacactgcaaaccctgcgcggacgtgaaacccgcaccgaacggcggcggattgatgccgtggggctggcactgctggttattggtatcggtagcctgcagattatgctcgaccgcggtaaagagctggactggttttcatcacaggaaattatcatccttaccgtggtggcagtggtggctatctgcttcctgattgtctgggagctgaccgacgataacccgatagtcgatctgtcgttgtttaagtcgcgcaacttcaccatcggctgtttgtgtatcagcctcgcgtatatgctctacttcggcgctattgttctgctgccgcagttgttgcaggaggtctacggttacacggcaacgtgggcaggtctggcctctgcgccggtaggaattattccggtgatcctgtcgccgattatcggccgcttcgcgcataaactggatatgcggcggctggtaaccttcagctttattatgtatgccgtctgcttctactggcgtgcctatacctttgaaccgggtatggattttggcgcgtcggcctggccgcagtttatccaggggtttgcggtggcctgcttctttatgccgctgaccaccattacgctgtctggtttgccaccggaacgactggcggcggcatcgagcctctccaactttacgcgtacgctggcggggtctatcggcacgtcgataaccacaaccatgtggaccaaccgcgagtcgatgcaccatgcgcagttaaccgagtcggtaaacccgtttaacccaaacgcccaggcgatgtacagtcaactggaaggactgggaatgacgcaacagcaggcatcaggctggattgcccagcagatcaccaatcaggggctgattatttccgccaatgagatcttctggatgtcagccgggatattcctcgtcttgctggggctggtgtggtttgctaaaccgccatttggcgcaggtggcggcggaggtggtgcgcactaa

SEQ ID NO: 261658 - DNA, 1173 bp, Klebsiella pneumoniae
atgagcgcaaatgcggagactcaaaccccgcagcaaccggtaaagaagagcggcaaacgtaagcgtctgctcctccttctcaccttgctctttataattattgccgtagcgatagggatttattggtttttggtactgcgtcatttcgaagaaaccgatgacgcatacgtggcagggaatcagattcaaattatgtctcaggtgtctggcagcgtgacgaaagtctgggccgataacaccgactttgtaaaagaaggcgatgtgctggtcaccctcgacccgacagatgctcgccaggcgtttgaaaaagccaaaactgcactggcttccagcgttcgccaaacccaccagctgatgattaacagcaaacagttgcaggcgaatattgaggtgcaaaaaatcgcactcgcgaaagcacaaagcgactacaaccgccgtgtgccgctgggcaatgccaacctgattggtcgcgaagagctgcaacacgcccgcgacgccgttaccagtgcccaggcacaactggacgtcgcgattcaacaatacaatgccaatcaggcgatgattctggggactaaactggaagatcagcctgccgtgcaacaggctgccaccgaagtacgtaacgcctggctggcgctggagcgtactcgtattgtcagtccgatgaccggttatgtctcccgccgcgcggtacagcctggggcacaaattagcccaacgacgccgctgatggcggtcgttccagccaccaatatgtgggtggatgccaactttaaagagacgcagattgccaatatgcgcatcggtcagccggtcaccatcaccaccgatatttacggcgatgatgtgaaatacaccggtaaagtggttggtctggatatggggacaggtagcgcgttctcactgcttccggcgcaaaatgcgactggtaactggatcaaagtcgttcagcgtctgcctgttcgtattgaactggaccagaaacagctcgagcaatacccgctgcgtatcggtttgtccacgctggtgagcgtcaataccactaaccgtgacggtcaggtactggcaaataaagtacgttccacaccggtagcggtaagcaccgcgcgtgaaatcagcctggcacctgtcaataaactgatcgacgatatcgtaaaagctaacgctggctaa

SEQ ID NO: 261659 - DNA, 531 bp, Klebsiella pneumoniae
atggatagttcgtttacgcccattgaacaaatgctaaaatttcgcgccagccgccacgaagattttccttatcaggagatccttctgacccgtctttgcatgcacatgcaaagcaagctgctggagaaccgcaataaaatgctgaaggctcaggggattaacgagacgttgtttatggcgttgattacgctggagtctcaggaaaaccacagtattcagccttctgaattgagttgtgctcttggatcatcccgtaccaacgcgacgcgtattgccgatgaactggaaaaacgcggttggattgaacgtcgtgaaagcgataacgatcgccgctgcctgcatctgcaattaacggaaaaaggtcacgagtttttgcgcgaggttttaccaccgcagcataactgcctgcatcaactctggtccgcgctcagcacaacagaaaaagatcagctcgagcaaatcacccgcaaattgctctcccgtctcgaccagatggaacaagacggtgtggttctcgaagcgatgagctaa

SEQ ID NO: 261660 - DNA, 336 bp, Klebsiella pneumoniae
atgagctatgaggttctgctgcttgggttactggttggcgcggcgaattattgcttccgctatttgccgctgcgcctgcgtgtgggtaatgcccgcccaaccaaacgtggcgcgataggcatattgctcgacaccattggcatcgcctcgatatgcgctctgctggttgtctctaccgcaccagaagtgatgcacgatacacgccgtttcgtgcccacgctggtcggcttcgcggtactgggtgccagtttctataaaacacgcagcattatcatcccaacactgcttagtgcgctggcctacgggctcgcctggaaagtgatggcgattatataa

SEQ ID NO: 261661 - DNA, 738 bp, Klebsiella pneumoniae
atggaaagccctactccacagcctgctcctggttcggcgaccttcatggaaggatgcaaagacagtttaccgattgttattagttatattccggtggcctttgcgttcggtctgaatgcgacccgtctgggattctctcctctcgaaagcgtttttttctcctgcatcatttatgcaggcgcgagccagttcgtcattaccgcgatgctggcagccgggagtagtttgtgggttgctgcactgaccgtcatggcaatggatgttcgccatgttttgtatggcccgtcactgcgtagccgtattattcagcgtctgcaaaaatcgaaaaccgccctgtgggcatttggcctgacggatgaggtttttgccgccgcaaccgcaaaactggtacgcaataatcgccgctggagcgagaactggatgatcggcattgccttcagttcatggtcatcgtgggtatttggtacggtaataggggcattctccggcagcggcttgctgcaaggatatcccgccgttgaagcagcattaggttttatgcttccggcactctttatgagtttcctgctcgcctctttccagcgcaaacaatctctttgcgttaccgcagcgttagttggtgcccttgcaggcgtaacgctattttctattcccgtcgccattctggcaggcattgtctgtggctgcctcactgcgttaatccaggcattctggcaaggagcgcccgatgagctatga

SEQ ID NO: 261662 - DNA, 1185 bp, Klebsiella pneumoniae
atgactaaacctaatcatgagcttagcccggcactgatcgtactgatgtctatcgccaccggtctggcggtcgccagcaactattacgcccagccattgctcgacaccattgcgcgtaacttttccctttccgccagttcggcgggctttattgttaccgccgcgcagttgggctatgccgcaggtctgctgtttcttgttcccctcggtgatatgtttgaacgccgccgcctgattgtctcgatgaccttactggcagcgggcggtatgttaatcactgccagcagtcagtcactggcgatgatgatcctcggtacggcattaaccggtttattctcagtcgtggcacaaattctggttccgctggcagcgacgctggcttcaccggataaacgcggcaaagtggtcggcaccattatgagcgggctgctgttggggatcttgctggcacgaaccgttgccgggttgctggcaaacctcggcggctggcgcaccgtcttttgggttgcctcggtgttaatggcactgatggcgctggcattatggcgtggtctgccacaaatgaaatcagaaacccacctcaactacccacagttgcttggttccgttttcagcatgtttatcagcgataaaattctgcgcacccgcgcgttgctgggctgcctgacctttgccaacttcagcattctctggacctcaatggcctttttgcttgccgctccaccttttaactacagcgatggtgtaattggtctgtttggacttgcgggagctgccggagcgttgggtgctcgtccggcgggcggttttgccgataagggtaaatcgcaccacaccactactttcggtctgctgctgctattactttcatggctggcgatctggtttggccacacttccgtactggccttgattatcggcatcctggtgctggatctcaccgtgcagggcgtgcatatcactaaccagacggtaatttatcgaatacaccctgatgcgcgtaatcgcctgaccgcaggttacatgaccagctactttattggcggtgccgccggttcgctaatttcagcctcagcctggcaacatggcggttgggctggcgtttgtctggctggcgcgacgattgccctggttaacttactggtctggtggcgaggttttcatcgtcaggaagctgcaaattaa

SEQ ID NO: 261663 - DNA, 993 bp, Klebsiella pneumoniae
atgcgacatagcgtactttttgcgacagcgtttgccacgcttatctctacacaaacttttgctgccgatctgccgggcaaaggcattactgttaatccagttcagagcaccatcactgaagaaaccttccagacgctgctggtcagtcgtgcactggagaaattaggttataccgtcaataaacccagcgaagtggattacaacgttggctacacctcgcttgcttccggcgatgcaaccttcaccgccgtgaactggacgccgctgcatgacaacatgtacgaagctgccggtggcgataagaaattttatcgtgaaggagtatttgttaacggcgcggcacagggttacctgatcgataagaaaactgccgaccagtacaaaatcaccaacatcgcgcaactgaaagatccgaagatcgccaaactgttcgataccaacggcgacggtaaagcggatttgactggctgtaaccctggctggggctgcgaaggtgcgatcaaccaccagcttgccgcgtatggactgaccaataccgtgacgcataatcaggggaactacgcagcgatgatggctgacaccatcagtcgttacaaagagggtaagccggtgttttactacacctggacgccgtactgggtgagtaacgaactgaaaccggggaaagatgtggtctggttgcaggtgccgttctccgcactgccgggcgataaaaatgccgataccaaactgccgaatggcgcgaattacggcttcccggtcagtaccatgcatatcgttgccaacaaagcctgggccgagaaaaacccggcagcagcgaaactgtttgccattatgcagttaccagtggcagatattaacgcccagaacgccattatgcatgacggcaaagcctcagaaggcgatattcagggccacgttgatggctggatcaaagcccaccagcagcagttcgatggctgggtgaatgaggcgctggcagcgcagaagtaa

SEQ ID NO: 261664 - DNA, 1065 bp, Klebsiella pneumoniae
atggctgatcaaaataatccgtgggataccacgccagcggcggacagtgccgcacagtccgcagacgcctggggtacaccggcgactgcaccgactgacggcggtggtgctgactggctgaccagtacgccagcgccaaacgtcgagcattttaatattctcgatccgttccataaaacgctgatcccgctcgacagttgggtcactgaagggatcgactgggtcgttacccatttccgtcccgtcttccagggcgtgcgcgttccggttgattacatcctcaacggtttccagcaattgctgctgggtatgcccgctccggtggcgattatcgttttcgctctcatcgcctggcaaatttccggtgtcggaatgggcgtggcgacgctggtttcgctgattgccatcggcgcaatcggtgcctggtcacaggcaatggttactctggcgctggtgctaaccgccctgctgttctgtatcgtcatcggtttgccgttggggatctggctggcgagaagtccacgagcggcgaaaattattcgtccactgcttgatgccatgcagaccacgccagcgtttgtttatctggtaccaatcgtcatgctgtttggtatcggtaacgtgccgggcgtagtggtgacgatcatctttgctctgccgccgattatccgtctgacaattctggggattaaccaggttccggcggatctgattgaagcctcgcgctcattcggtgccagcccgcgccagatgctgttcaaagttcagttaccgctggcgatgccgaccattatggcgggcgttaaccagacgctgatgctggccctttctatggtggtcatcgcctcgatgattgcagtcggcgggctgggtcagatggtacttcgcggtatcggtcgtctggatatggggcttgccaccgttggcggcgtcgggattgtgatcctcgccattatcctcgaccgcctgacgcaggccgttgggcgcgactcacgcagtcgcggcaaccgtcgctggtacaccactggccctgttggtttgctgacccgcccattcattaagtaa

SEQ ID NO: 261665 - DNA, 1203 bp, Klebsiella pneumoniae
atggcaattaaattagaaattaaaaatctttataaaatatttggtgagcatccacagcgagctttcaaatatatcgaacaaggactttcaaaagaacaaattctggaaaaaactgggctatcgcttggcgtaaaagacgccagtctggccattgaagaaggcgagatatttgtcatcatgggattatccggttcgggtaaatccacaatggtacgccttctcaatcgcctgattgaacccacccgcgggcaagtgctgattgatggtgtggatattgccaaaatatccgacgccgaactccgtgaggtgcgcagaaaaaagattgcgatggtcttccagtcctttgccttaatgccgcatatgaccgtgctggacaatactgcgttcggtatggaattggccggaattaatgccgaagaacgccgggaaaaagcccttgatgcactgcgtcaggtcgggctggaaaattatgcccacagctacccggatgaactctctggcgggatgcgtcaacgtgtgggattagcccgcgcgttagcgattaatccggatatattattaatggacgaagccttctcggcgctcgatccattaattcgcaccgagatgcaggatgagctggtaaaattacaggcgaaacatcagcgcaccattgtctttatttcccacgatctcgatgaagctatgcgtattggcgaccgaattgccattatgcaaaatggtgaagtggtacaggtcggcacaccggatgaaattctcaataatccggcgaatgattatgtccgtaccttcttccgtggcgtcgatattagccaggtgttcagtgcgaaagatattgcccgtcgtacaccgaacggcttaattcgtaaaacccccggcttcggcccgcgttcggcactgaaattattgcaggatgaagatcgcgaatatggctacgtcatcgaacgcggtaataagtttgtcggcgctgtgtctatcgattcgcttaaagccgcgttaacgcagcagcaaggtcttgatgcggcgctgattgatgcgccgttagcggtcgatgcacaaacgcctcttagcgagttgctctctcatgtcggacaggccccctgtgcggtgcccgtggtcgacgaggaccaacagtatgtcggcatcatttcgaaaggaatgctgctgcgcgctttagatcgtgagggggtaaataatggctga

SEQ ID NO: 261666 - DNA, 960 bp, Klebsiella pneumoniae
atgaaactctctcgtatcagcgccatcaactggaacaagatatctgacgataaagatctggaggtgtggaatcgcctgaccagcaatttctggctaccagaaaaggtgccgctgtcgaacgatattcctgcatggcagacattaagtgtcgtagaacaacaactgacgatgcgcgtttttactggcctgacgctgctcgacacgctgcaaaatgttatcggcgcgccttcgctgttgcccgatgcactcacgcctcatgaagaagcggtattatcgaatatcagctttatggaagcggttcatgcccgctcttacagttcgattttctcgacgctgtgccagaccaaagatgtcgatgccgcctacgcctggagtgaagaaaacgcaccgttgcagcgaaaagctcagattattcagcaacattatcgcggggatgatccgctgaaaaagaaaatcgccagtgtgtttcttgaatcttttttgttctattccggtttctggctgccgatgtatttttccagccgcggaaagctaaccaataccgcagacctgatccgtctgattatccgcgatgaagcagtccacggttattacatcggctataaatatcagaaaaacatggaaaagatctcccaggcacaacgtgaagagttgaagagtttcgccttcgatttgttgctggaactttatgacaacgagttgcaatacaccgatgagctgtacgccgaaaccccgtgggctgacgatgtgaaagcgtttctctgttacaacgccaataaggcgttgatgaatctgggctacgaaccgttatttcccgcagaaatggcggaagtgaatccggcaatcctcgccgcgctttcgccgaatgccgatgaaaatcacgatttcttttccggttcaggctcttcatatgtgatgggaaaagcggtcgaaacagaagatgaagactggaatttctga

SEQ ID NO: 261667 - DNA, 2145 bp, Klebsiella pneumoniae
ttggcaacgacacccgcagaacgcctgacgcaggaaacgatggattaccacgcgctgaatgcgatgcttaacctttacgatagcgcaggtcgcattcagttcgataaagatcgccaggcagtagacgcctttataacgacgcatgtgcgtccgaacagtgtggccttcagtagccagcagcagcgcctgaactggctggttaacgaaggttactatgatgaaagcgtccttaatcgctactctcgcgattttgtcattacgctgtttgcccacgcgcacgccagcggttttcgtttccagacattcctcggagcatggaagttttacaccagctatacgttgaagacattcgacggtaagcgttatctggaagattttgccgatcgagtcacgatggtggcgctgacgctggcacaaggcgatgaaacactggcgacgcaactgaccgatgagatgctgtcaggacgctttcagccagccacgccgacattcctcaactgcggtaagcagcagcgcggcgaactggtttcctgttttctgctgcgtattgaagacaatatggagtcgattggccgggcggtaaattccgcactgcaactgtcgaaacgcggcggcggcgtagcatttttgctgtcgaatctgcgagaagcgggcgcgccaattaaacgtattgaaaatcaatcatctggcgtgattccggtgatgaaaatgctggaagacgcattttcctatgccaaccagctcggcgcgcgtcagggggcaggtgcagtctatttacatgctcatcatcccgatattctgcgttttctcgatacaaaacgggaaaatgccgacgaaaaaatccgcattaaaacactgtcgctgggcgtggtgatcccggatatcactttccatctggcaaaagagaatgcgcagatggcgctgttttcgccttatgacgtagagcgagtttatggcaagccgtttgccgatgtcgccattagcgaacactatgacgaactggttgccgatgaacgcattcgcaaaaaatacctcaacgcccgtgatttcttccagcgactggcagaaatccagtttgagtccggctatccctacatcatgtatgaagacacggttaaccgtgctaaccctatcgccgggcgcataaatatgagcaatctctgctcagaaattttgcaggttaacagcgcctcagagtatgacgagaatctcgactatgcccgcacaggccatgatatttcctgcaatttaggttcgttgaatattgcccacaccatggattcccccgactttgcccgcacggtagagactgccgtgcgcggtttaacggcggtgtcagatatgagtcatatccgcagcgtgccgtccatcgaagccggaaatgccgcctcacacgccatcggactggggcagatgaatttacacggctatctggcgcgagaaggcatcgcttatgggtcgccggaagcactggatttcaccaatctctatttctataccatcacctggcacgcactgcgtacctcgatgttgctggcgcgcgaacgcggtgaaaccttcgccgggttcaaacagtcacgctatgccagtggtgaatattttagccaatatctgcaagggaactggcagccgaaaacggcgaaagttggcgaactgtttacccgtagcggtattacgttacctacccgtgagatgtgggcgcagctgcgcgacgacgtgatgcgctacggcatttacaaccagaatcttcaggcggtgccgccaaccggttctatctcttatatcaaccatgctacgtcgagtattcatccgattgtggcgaaagtagagatacgcaaagagggcaaaacaggacgcgtttactaccctgccccgtttatgactaacgagaatctggcgctgtatcaggacgcttacgaaattggcgcagaaaagatcatcgacacttacgcggaagcgactcgccatgtcgatcaggggctgtcgctgacgctgtttttccccgataccgccaccactcgcgatatcaacaaagcgcagatttacgcctggcgcaaaggtatcaaaacgctctattacatccgcctgcgtcagatggcgctggaaggcactgaaattgaaggctgcgtctcgtgtgcactttaa

SEQ ID NO: 261668 - DNA, 411 bp, Klebsiella pneumoniae
atgagccagctcgtctacttttccagcagctccgaaaatacgcagcgttttatcgaacgtttaaggctgcccgcggtgcgcatcccgctcaatgagcgggaacggattcaggtagacgagccttacatcctgatcgtgccctcttacggcggcggcggtacggctggcgcggtgccacgacaggtcattcgctttttaaacgacgagcataaccgggcgttgctgcgcggcgttattgcttcgggtaatcgcaactttggtgaggcgtatggccgcgccggagatgtgattgctcagaaatgcggcgtgccgtggctgtaccgttttgaactcatgggtacgcaaagcgatatcgaaaacgttcgtaaaggagtaaccgaattttggcaacgacacccgcagaacgcctga

SEQ ID NO: 261669 - DNA, 246 bp, Klebsiella pneumoniae
atgcgcattactatttacactcgtaacgattgcgttcagtgccacgccaccaaacgggcgatggaaaaccggggctttgactttgaaatgattaatgtcgatcgcgttcctgaagcggcagaagcgctgcgtgctcagggctttcgtcagttgccggttgtgattgcaggcgatcttagctggtctggtttccgcccggacatgatcaatcgtctgcatccagcgccacacgctgccagtgcatga

SEQ ID NO: 261670 - DNA, 432 bp, Klebsiella pneumoniae; identical to SEQ ID NO: 4177

SEQ ID NO: 261671 - DNA, 1335 bp, Klebsiella pneumoniae; identical to SEQ ID NO: 15954

SEQ ID NO: 261672 - DNA, 330 bp, Klebsiella pneumoniae
atgtttaaccgaccgaaccgcaacgacgttgatgatggcgtgcaggatatccagaatgatgtcaatcaattagctgacagcctcgaatctgtattgaagtcctggggcagcgacgccaaaggggaagccgaagccgcacgcagtaaagcgcaggctctactgaaagaaaccagggcgcgaatgcatggtcgtactcgcgtccagcaagccgcgcgtgatgccgttggctgcgcggattcttttgttcgtgaaagaccctggtgtagcgtgggtacagcagctgcggtaggtatttttatcggcgcactgttaagcatgcgcaaatcgtag

SEQ ID NO: 261673 - DNA, 345 bp, Klebsiella pneumoniae
atgtatttacgaccagacgaggtggcgcgcgtacttgaaaaagtcggttttactgtcgatgtggtaacccagaaagcttatggttaccgccgtggggaaaattatgtctatgttaatcgcgaagcgcgaatgggacgtaccgccctggtgattcatccaacattaaaagaacgtagttcaacactggctgaacccgcttccgatattaaaacttgcgatcattaccagcaatttccgctctatttagcgggtgaacgtcatgagcattacggtatcccgcatggctttagttcgcgtgttgcgcttgaacgttatttgaatggtttatttggcgaagccagttaa

SEQ ID NO: 261674 - DNA, 450 bp, Klebsiella pneumoniae
atgttctcaccgcagtcacgcttgcgtcatgcagttgcagatacgttcgcgatggttgtttactgttctgtcgtgaacatgtgtattgaagttttcctctccggaatgagcttcgaacaatctttttattccagattggtagcgattccggtgaacatcttaattgcatggccatacggtatgtaccgcgatctgtttatgcgcgcagcacgcaaagttagcccgtcgggctggataaaaaatctggcggatatcatggcttatgtgacgttccagtcaccggtgtatgtggcgatcttgttagtggtgggcgcagactggcatcagattatggcggcggtcagttcaaacatcgttgtttcgatgttgatgggggcggtttatggctacttcctcgattattgccgccgactgtttaaagtcagccgttaccagcaggtaaaagcctga

SEQ ID NO: 261675 - DNA, 405 bp, Klebsiella pneumoniae
atgtccgtaatgttacaaagtttaaataacattcgcaccctccgtgcgatggctcgcgaattctccattgacgttcttgaagaaatgctcgaaaaattcagggttgtcactaaagaaagacgtgaagaagaagaacagcagcagcgtgaactggcagagcgccaggaaaaaattagcacctggctggagctgatgaaagctgacggaattaacccggaagagttattgggtaatagctccgcggccgccccacgcgctggtaaaaaacgccagccgcgtccggcgaaatataaattcaccgatgttaacggtgaaactaaaacctggaccggtcagggccgtacaccgaagccaatcgctcaggcgctggcagaaggtaaatctctcgacgatttcctgatctaa

SEQ ID NO: 261676 - DNA, 525 bp, Klebsiella pneumoniae
atggctttgacaaccatttcgccgcatgatgcacaagaattaatcgcacgcggcgcaaagttaatcgatattcgtgacgctgatgaatatcttcgtgagcatattcctgaagcagatctggctccattatccgtgctggaacagtcaggtcttccggctaaattacgtcacgagcaaattatattccactgccaggcaggtaaacgcaccagtaataacgccgataaattagcagcgattgccgcccccgcagaaatctttttactcgaagatgggattgatggctggaaaaaagcaggattaccagtagcggtaaataaatctcaacccttgccgttaatgcgccaggtgcagatcgctgcgggtggtttaatattaatcggcgttatactcggttataccgtaaatagcggtttcttcttattaagcggctttgttggtgccgggttactgtttgcaggaattagcggtttttgtgggatggcaaggttgttagataagatgccgtggaaccaacgagcttga

SEQ ID NO: 261677 - DNA, 300 bp, Klebsiella pneumoniae
atgactgaactcgcgcaattacaggccagtgccgaacaggcagcggccttattgaaagcaatgagccaccctaaacggttgctgattctgtgcatgcttagcggttctcccggcaccagtgcgggagagctgacgcgcattaccggactaagtgcctctgcaacatcacagcatctcgctcgtatgcgggacgaagggcttatcgacagccaacgggatgcccaacgcattctatattccattaaaaatgaggcggtaaatgccattatcgccaccctgaaaaatgtctattgtccgtaa

SEQ ID NO: 261678 - DNA, 159 bp, Klebsiella pneumoniae
atgggtttctggagaatcgtcatcaccatcattctgccgccgctcggcgtgctgctcggtaaagggttcggttgggcgttcattattaatattctgctgacactgcttgggtatatccccggtttgattcacgctttctgggtgcaaacccgcgattaa

SEQ ID NO: 261679 - DNA, 450 bp, Klebsiella pneumoniae
atgggtctgttcaattttgtgaaagatgccggagaaaaactctgggacgcggttacaggtcagcacgataaagacgatcaggcgaagaaggtgcaggagcatctgaacaaaaccggtatacctgatgccgataaagtgaacattcaaatcgccgacggcaaagcgacggtcacgggtgacggcttaagtcaggaggcgaaggagaaaatccttgttgcggtggggaatatttccggtattgccagtgtcgatgatcaggtgaaaacggcgacaccagccgctgccagccagttttataccgttaagtctggcgacactcttagcgccatttctaaacaggtctacggtaacgccaatctgtacaataaaatcttcgaagcgaataaaccgatgctgaaaagcccggataaaatttacccggggcaagtgttgcgtattcctgaagagtag

SEQ ID NO: 261680 - DNA, 663 bp, Klebsiella pneumoniae
atgaccattacgtctctggatggctatcgctggctgaagaacgatattattcgcggtaattttcaaccggatgaaaaattacggatgagtttgcttacatcgcgttatgcacttggcgttgggccgttacgggaagctctttcgcaactggtggcggaacggctggtcacggtggtgaatcaaaaagggtatcgggtggcgtctatgtcagagcaggagctgctcgatattttcgacgcccgcgccaatatggaagcgatgctggtcagtctggcgattgcccgcggtggcgatgaatgggaggcagacgttctcgcaaaagcgcatctgctcagtaagctggaggcctgtgacgccagtgagaaaatgcttgatgagtgggatctgcgtcatcaggcgtttcatacggcaattgtggcgggctgtggttctcactatttgctgcaaatgcgtgaacggttgtttgatctggcggcgcgctatcgatttatctggctgcggcgaacagtgctttcggtggagatgctggaggataaacacgatcagcaccagaccctgactgcggcggtactggcgcgagataccgcgcgcgccagtgagttaatgcgccagcatttactgacgccaattcccattatccagcaggcgatggctggcaattaa

SEQ ID NO: 261681 - DNA, 1401 bp, Klebsiella pneumoniae
atggggcaatcatcgcaaccacatgagttaggcggcgggctgaagtcacgccacgtcaccatgttgtctattgccggtgttatcggcgcaagtctgtttgtcggttccagcgtcgctatcgccgaagcgggcccggcggtattactggcctatctgttcgccggattactggtggttatgattatgcggatgttggcggaaatggcggttgccacgcccgacacgggttcgttttccacctatgcagataaagctattggtcgttgggcgggctataccatcggctggttgtactggtggttttgggtactggttatcccgctggaagccaacatcgccgccatgatcctgcactcgtgggttccaggcattcccatctggttattttccctcgtcattaccctcgccttaactggcagtaatttattaagcgttaaaaactacggcgaatttgagttctggctggcgctgtgcaaagtcatcgctatcctggcctttattttccttggtgcagtcgcaattagcggtttttacccttatgccgaagtgagcgggatctcaagattgtgggatagcggcggctttatgcccaacggcttcggcgcggtattaagcgcgatgttgatcaccatgttctcgtttatgggcgcagaaattgtcaccattgccgccgcggaatctgacacgccggaaaaacatattgtccgcgccaccaactcggttatctggcgtatttctatcttctatttgtgctctatttttgtcgtcgtggcattaataccgtggaatatgccggggctgaaagccgttggatcttatcgctcggttctggagttgctcaatattccccatgcgaaattaatcatggactgcgtgatattactttccgtaaccagttgcctgaactcggcgctgtataccgcttccagaatgctctactccttaagccgtcgcggtgatgctcccgcggtaatgggtaaaatcaaccgcagtaaaaccccgtatgtggcggtattactctcgaccggtgcggcatttttaacggtggtggtgaattattacgcgcctgcgaaagtgtttaaatttctgatcgacagctccggcgctatcgccctgctggtttatttagtcatcgccgtttcacaattgcggatgcgcaaaattctgcgagcagaaggaagcgaaattcgcctgcggatgtggctttatccgtggctcacctggctggtcatcggctttattacctttgtgttggtagtgatgctattccgcccggcgcaacagttagaagtgatctccaccggcttattagcgatagggattatctgtaccgtgccaattatggctcgctggaaaaagctggtattgtggcaaaaaacacccgttcataatacgcgctga

SEQ ID NO: 261682 - DNA, 1281 bp, Klebsiella pneumoniae
atgagcagcaataaagagttaatgcagcgccgtagtcaggcagttcctcgtggcgttgggcaaattcacccgattttcgctgaccgcgcggaaaactgccgggtgtgggacgttgaaggccgtgagtttcttgatttcgcgggcgggattgcggtgctcaataccgggcacctgcatccgaaagtggttgcggcggtggaagcgcagttgaaaaagctgtcgcacacctgcttccaggtgctggcttacgaaccgtatctggagctgtgcgagattatgaatcagaaggtgccgggagatttcgccaaaaaaacgctgctggtaacgaccggttctgaagcggtggagaacgcggtgaaaatcgcccgcgccgccaccaaacgcagcgggaccatcgcctttagcggtgcatatcacgggcgcacgcattacacgctggcgctgaccggcaaggtgaatccgtactctgcgggcatgggactgatgcctgggcacgtttatcgcgcgctttatccttgcccgctgcacggcatcagtgaagatgacgctatcgccagcattcaccgaatttttaaaaatgacgctgcaccggaagatatcgccgccatcgtgattgagccggttcagggcgaaggcggtttctacgccgcgacgccagcctttatgcagcgtttacgcgcgctgtgtgacgagcacgggatcatgctgattgccgatgaagtgcagagcggcgcggggcgtaccggcacgctgtttgcgatggagcagatgggcgttgcgccggatcttaccacctttgcgaaatcgatcgcgggcggcttcccgctggcgggcgtcaccgggcgcgcggaagtgatggatgccgtcgctccaggcggtctgggcggcacctatgccggtaacccgattgcctgcgtggctgcgctggaagtgttgaaggtgtttgagcaggaaaatctgctgcaaaaagccaacgatctggggcagaagttgaaagacggattgctggcgatagccgaaaaacacccggagatcggcgacgtacgcgggctgggagcgatgattgccatcgagctgtttgaagatggcgatcacagcaaaccggacgccaaactcaccgccgagatcgtggcgcgtgcccgcgataaaggcctgattcttctctcctgcggcccgtattacaacgtgctgcgcatccttgtaccgctcaccattgaagacgctcagatccgtcagggtctggaaatcatcagccagtgttttgctgaggcgaagcagtag

SEQ ID NO: 261683 - DNA, 1449 bp, Klebsiella pneumoniae
atgaaacttaacgacagtaacttattccgccagcaggcgttgattaacggggaatggctggacgccaacaatggcgaggtcatcgacgtcaccaatccggcgaacggcgacaagctgggtagcgtacccaaaatgggcgctgatgaaacccgcgccgctatcgacgccgccaaccgtgctctgcccgcctggcgtgcgctcaccgccaaagaacgcgccaccattctgcgcaactggttcaatttgatgatggagcatcaggacgatttagcgcgcctgatgaccctagaacagggcaaaccgctggctgaagcgaaaggcgaaattagctacgccgcctcctttattgagtggtttgccgaagaaggcaaacgcatttatggcgacaccattcctggtcatcaggccgataaacgcctgattgttatcaagcagccgattggcgtcaccgcggctatcacgccgtggaacttcccggcggcgatgattacccgcaaagccggtccggcgctggcggcaggctgcaccatggtgctgaagcccgccagtcagacgccgttctctgcgctggcgctggcggagctggcgattcgcgcaggcgttccggctggcgtatttaacgtggtcaccggttcggcgggcgcggtcggtaacgaactgaccagcaatccgctggtgcgcaagctgtcgtttaccggctcgaccgaaattggccgccagttaatggaacagtgcgcgaaagacatcaagaaagtgtcgctggagctgggcggcaacgcgccgtttatcgtctttgacgatgccgacctcgacaaagccgtggaaggcgcactggcctcgaaattccgcaacgccgggcaaacctgcgtctgcgccaaccgtttatacgtgcaggacggcgtgtatgaccgctttgccgaaaaattgcagcaggcggtgagcaaactgcacatcggcgacgggctggagaaaggcgtcactattgggccgctgattgatgaaaaagcggtagcaaaagtggaagagcatatcgccgatgccctggagaaaggcgcgcgcgtggtttgcggcggtaaagcacatgaacgcggcggcaacttcttccagccgaccattctggtagacgttccggccaacgccaaagtgtcgaaagaagagacgttcggccccctcgccccgctgttccgttttaaagatgaagccgatgtgattgcacaagccaatgacaccgagtttggtcttgccgcctatttctacgcccgtgatttaagccgcgtcttccgcgtgggcgaggcgctggaatacggcatcgtcggcatcaataccgggattatttccaatgaagtggccccgttcggcggcattaaagcctcgggtctgggtcgtgaaggttcgaagtatggcatcgaagattacttagaaatcaaatatatgtgcatcggtctttaa

SEQ ID NO: 261684 - DNA, 1269 bp, Klebsiella pneumoniae
atgtatgattttgtgattattggcggcggcatcatcggcatgtcgaccgccatgcaactgattgatgtttatccggatgcccgcattgcgttgctggaaaaagagtccggtccggcctgtcatcagacaggccacaacagcggcgtgatccatgccggggtctattacacgcccggcagcctgaaggcgcagttttgcctggcgggaaaccgcgccaccaaagccttttgcgatcaaaacggcattcgctatgacaactgcggcaagatgctggtcgccacctctgaacttgaaatggaacggatgcgcgcgttgtgggaacgcacggcggcgaacggtatcgagcgcgagtggttaaacgccgaggaactgcgcgagcgcgaaccgaatatcaccgggctcggcggcatttttgtgccgtccagcggcattgtcagctatcgcgaagtgacggcggcgatggcaaaaatcttccaggccagaggcggcgagattatttataacgccgaagtcagcgccctcagtgagcataaaaacggcgtggtgatacgtacccgtcagggcggtgaatatgaagcatcgacgctgattagctgttccgggctgatggctgaccggctggtgaaaatgctcggcctcgaaccgggctttattatctgcccgttccgtggcgagtatttccgccttgcgccggagcataaccagattgttaaccacctgatttaccccattcccgaccccgcgatgccatttttgggcgtgcatctcacccgcatgatcgatggcagcgtgaccgtcgggccaaacgcggtgctggcttttaaacgcgaaggctatcgcaagcgcgatttctcgtttagtgacacgctggagattttaggctcgtcggggattcgccgggtgctgcaaaaccatctacgctcaggattgggcgagatgaaaaactcgctgtgcaaaagcggctatctgcggctggtgcaaaagtattgtccccggctttcgttaagcgatctccagccctggccagcaggtgtgcgggcgcaggcggtatcgccggacggcaagctgattgacgattttctgtttgtcaccaccccgcgcacgatccacacctgcaatgcgccctccccggcagcgacatcagcaattcctattggtgcgcatattgtcagcaaggtacaaacgctgttggcaagccagagtaaccccggacgcacgctgcgagcggcacgtagtgtggatgccttacacgccgcatttaatcaataa

SEQ ID NO: 261685 - DNA, 978 bp, Klebsiella pneumoniae
atgaatgcactgaccgccgtacaaaataacgctgtcgattcaggccaggactatagcggattcactctcatcccgtcggcgcaatccccgcgtctgctggaactcaccttcaccgaacagacgaccaaacagtttctcgaacaggttgccgaatggcccgtgcaggcgctggagtacaaatcttttctgcgttttcgggtaggcaaaattcttgacgatctgtgtgcgaaccagctgcaaccattgctgttgaagaccctgctaaaccgtgctgaaggtgcgctgttgatcaatgcggtgggtgtcgatgatgtgaagcaagcggatgagatggtgaagctggcaacggcggtagcgcatctgattggtcgctcaaatttcgatgcgatgagcggtcagtattacgcgcgattcgtggtgaaaaatgtcgataactcagacagctatctgcgtcagccgcaccgcgtaatggagctgcacaacgacggcacctacgtcgaagagatcaccgactatgtgctgatgatgaaaatcgacgagcagaacatgcagggtggaaattcgttgctgctgcatctcgatgactgggaacatctggaccactatttccgccacccgctggcgcgtcgcccgatgcgctttgccgcgcctccgagcaaaaacgtcagcaaagatgttttccatccagtgttcgacgttgatcaacagggtcgcccggtgatgcgttatatcgaccagttcgtccagccaaaagacttcgaagaaggcgtgtggctgagcgagctttccgatgccattgaaaccagcaaaggcattctttctgtgcccgttcccgttggcaaattcctgttgattaacaatctattctggctgcacggtcgcgaccgctttactccgcacccggatctgcgccgtgaactgatgcgtcagcgtggctatttcgcttacgcctctaaccactaccagacgcatcagtaa

SEQ ID NO: 261686 - DNA, 1404 bp, Klebsiella pneumoniae
atgggagatttgcaggattttatcgcattggttaaagatgccaaaaaatttggtatcgatatcatccctgattatacatttaactttatgggaatcgggggtagtggtaaaaatgatctggattatccctctgccgatatacgagcgaagatcagtaaagatatagaaagtggtatccctggctattggcaaggtcaggtcttgattccctttattatagatccagtaacaaaagaacgtgaccaaatccatccagaagatatacatctcactgcaaaagacttcgaagcaagtaaagataatatttctaaggatgaatgggaaaacctccatgcattaaaagaaaagcgtttaaatggaatgcctaaaacaacacccaaaagtgaccaggttattatgttgcaaaatcaatacgttcgtgaaatgcgaaaatatggcgtacgaggtttacgttatgatgcagcaaaacactcaaaacatgaacaaatagagaggtcgataaccccaccgcttaaaaattataatgagcggttgcacaatacaaatttatttaatccaaaatatcaaaaaaaagctgttatgaattacatggaatacctggtaacttgtccgttagatgaacaacaaatgtcatcgctgctttatgaaagagatgatttaagcgccattgatttttcattgctcatgaagacgataaaagccttttcattcggtggagatctccaggcccttgcatcaaaaccgggctccacaatctcaagcatcccatcagaaagacggatattgattaacatcaaccacgatttccctaacaatggtaatcttttcaatgactttttatttaaccatcagcaagatgaacaattagcaatggcatatatggccgctctcccgttcagcaggcctttagtttactgggatggtcaggtattaaaatcaacgactgagattaaaaatgatgatgggtctactcgtgtcggcggtgaggcgtggcttaataaaggttgctctacctatcagcagctctacaatgaattccacgcattatatatagataaagcaggaatatggagcgcatttgagggtgtatttgcaactaaaaacgttctggcctttagtcgtggggattctgtgaacattaatcactctcctcatgatggactagttataataaataaaggaaacgaagaagttgaaggtacctggcctaacaaattgcaacctggaatatataaaaacatggggagtaatagcgttaacattattattaataatacccgaaaaattatcccccctggtaaagcatttacgcttagaggcggaactctaaatatcaatattcctgggcgtagcgctcttcttttagggaaaactggagaaccgccgaactatctctatttgtaa

SEQ ID NO: 261687 - DNA, 1683 bp, Klebsiella pneumoniae
atggttacctggacccaaatgtatatgccgatgggaggactggggctatccgctctggtcgccctgatcctgataatattcttcttcgttgcactcgcggtattacgtctgaaaggacatgtcgctggagcaataacccttatattatctatcctgattgcaatattcgcctttaaaatgccgattgatatggcttttgctgctgcgggctatggctttatttatggattatggcctattgcgtggattattgtcgcggcggtgttcctctataaattaaccgttgccagcggtcagttcgatattatccgcagctcggttatctccatcaccgacgatcagcgtttgcaggtgttactgattggtttctcctttggtgcgttgctggaaggagcggctggctttggtgcgccggtggcgattaccggtgcgctgctggtgggcctgggcttcaaaccgttatacgcggcggggctgtgtctgattgccaacactgcgccagtggcgtttggtgcgttgggcgtgccgattctggtcgccggtcaggtaacgggaatcgatccgttccacattggtgctatggcaggacgccagttgccgttcctgtcggtactggtgccgttctggctggtagcaatgatggacggctggaaaggggtgaaagagacgtggccagcggcgctggttgctgggggaagcttcgctgtcactcagttctttacctctaactatattggtccggaactgccggatattacttcggcgctggtgagtatcgtctcactcgctttattccttaaagtctggcggccgaaaaataccgaaacggcaatcagcatgggacaatccgcaggtgcgatggtggtgaataaaccatcttctggcggtcccgtgccttcagaatatcgtctggggcaaatcattcgtgcgtggtcaccgtttttaatcttaacggtgctggtcaccatctggaccatgaagccgtttaaagcgttatttgctccgggcggcgcgttttattcactggtgattaatttccagatccctcatttgcatcaacaagtgttgaaagcggcacccattgtcgcccaaccaacgccaatggatgcggtgtttaaattcgaccctctctcggctggcggcaccgctatttttattgcggcgattatctctatcttcatcctcggcgtgggcatcaagaaagggattggcgtctttgccgaaacgctaattagtctgaagtggccgatattgtcgattggcatggtgctggcgttcgccttcgtcaccaactattccggtatgtccaccacgctggcgctggtactggcaggtacaggcgtgatgttcccgtttttctcaccgtttctcggctggctgggcgtattccttaccggctcggacacctcctctaacgccctgtttggttcactgcaatcgaccacggcgcagcaaatcaacgtctctgacactctgctggtggcagcaaataccagcggcggcgtaactggcaagatgatctccccgcaatctatcgccgtggcctgcgccgcgacgggcatggtgggccgagaatctgaactgttccgctacaccgtgaagcacagtctgatttttgccagcgttatcggcattatcacgctgttgcaggcgtatgtgtttactgggatgttagtctcgtaa

SEQ ID NO: 261688 - DNA, 2172 bp, Klebsiella pneumoniae
atgagtcaaaccataacccagggccgtttacgcattgacgccaattttaaacgttttgtggatgaagaagttttaccgggaacagggctggacgctgcggcgttctggcgcaattttgatgaaatcgttcacgatctggcaccagaaaatcgtcagttgctggcagaacgcgatcgcattcaggcggcgcttgatgagtggcatcgcagcaatccggggccggtaaaagataaagcggcctataaatctttcctgcgtgaactgggctacctggtgccgcaaccggagcgcgtgacggtggaaaccacgggcattgacagcgaaatcaccagtcaggcggggccacagctggtggttccggcaatgaacgcccgctacgcgctgaacgcggcgaacgctcgctggggctcactgtacgatgcgttatacggcagcgacatcatcccgcaggaaggggcgatggtcagcggctacgatccgcaacgcggtgagcaggttatcgcctgggttcggcgtttcctcgatgaatctctaccgctggaaaacggcagctatcaggatgtggtggcgtttaaggtggtcgataaacaattacgcatccagttgaaaaatggtaaagaaaccacgttacgtaccccggcgcagtttgtcggttaccgtggcgatgccgctgcgccgacctgcattttgctgaaaaataacggcctgcatattgaactgcaaattgatgccaacgggcggattggcaaagacgatccggcgcacatcaacgatgttatcgtcgaagcggccatcagtaccattctcgactgcgaagattcggtcgcggcggttgatgcggaagataaaatcctgctgtaccgcaatctgctgggcctgatgcaggggactctgcaagagaaaatggagaaaaacggtcgacaaatcgtgcgtaaactgaatgacgatcgtcattacaccgccgccgatggctctgaaatttctctgcacggacgctcgctgctgtttatccgcaacgtgggtcatttgatgaccattcctgtgatttgggacagcgaaggcaatgaaatcccggaaggcattcttgatggcgtcatgactggcgcgattgccctctatgatttaaaagtgcagaaaaactcgcgcactggcagcgtctatattgtgaaaccgaaaatgcacggtccgcaggaagtggcgttcgccaacaaactgtttacccgcattgagacaatgctcggtatggcaccgaataccctgaaaatgggcattatggatgaagaacgtcggacctcgctgaacttgcgtagctgtatcgctcaggcgcgcaaccgcgtggcgttcatcaataccggtttcctcgaccgtaccggcgatgaaatgcattcggtgatggaagctggcccgatgctgcgtaaaaaccagatgaaatcgacgccttggatcaaagcctacgaacgtaataacgtgctttccggcctgttctgtgggctgcgcggtaaagcgcaaatcggtaaaggcatgtgggcaatgccggacctgatggcagacatgtacagccagaagggcgaccaactgcgtgccggggcaaacacagcctgggttccgtcgccaactgccgctacgctccatgcgatgcactaccaccaaaccaacgtacagagcgtgcaagccaacattgcccagaccgagttcaatgctgaatttgaaccgctgctggacgatctgctgactattccggtggctgaaaacgctaactggtcggtggaagagatccaacaagagctggataacaacgtgcaggggattctggggtacgtggtgcgctgggtggagcaggggattggttgttcaaaagtgccggatattcacaatgtggcgctgatggaagaccgcgcaacgctgcgtatctccagccagcatatcgccaactggttacgtcacggtattctgaccaaagaacaggtgcaggcgtcgctggagaatatggcgaaagtggttgatcagcaaaacgctgacgatccggcttatcgtccgatggcggggaatttcgctaactcgtgtgcttttaaagctgccagcgatttaatcttcctcggcgtgaaacagccaaacggctataccgaaccgttattacacgcctggcgtttacgcgaaaaagaaagtcattaa

SEQ ID NO: 261689 - DNA, 405 bp, Klebsiella pneumoniae
atgaaaactaaagtcattcttagccagcaaatggcgagtgcaattattgccgcaggtcaggaagaggcgcagaaaaataactggtctgtttccattgctgttgccgatgacggcggtcatctgctggcgttaagtcgcatggacgattgcgcgccgattgcggcttacatctcccaggagaaagcgcgtaccgccgcgctggggcgtcgtgaaactaagggctatgaagagatggtgaacaacggacgtaccgcgttcgtgactgcgccgttactgacgtcgctggaaggtggcgtaccggttgttgttgatgggcaaattattggtgccgtgggcgtttctggtttaaccggagcacaggatgcgcaggtcgcgaaagcggcagcagcggtgttggcgaaataa

SEQ ID NO: 261690 - DNA, 1224 bp, Klebsiella pneumoniae
atgcaaacccaattaactgaagagatgcggcagaacgcgcgcgcgctggaagccgacagcatcctgcgcgcctgtgttcactgcggattttgtaccgcaacctgcccaacctatcagcttctgggcgatgaactggacgggccgcgcgggcgcatctatctgattaaacaggtgctggaaggcaacgaagtcacgcttaaaacacaggagcatctcgatcgctgcctcacttgccgcaattgtgaaaccacctgtccttctggtgtgcgctatcacaatttgctggatatcgggcgtgatattgtcgagcagaaagtgaaacgcccactgccggagcgaatgctgcgcgaaggattgcgccaggtagtgccgcgtccggcggtcttccgtgcgctgacgcaggtagggctggtgctgcgaccgtttttaccggaacaggtcagagcaaaactgcctgctgaaacggtgaaagctaaaccgcgtccgccgctgcgccataagcgtcgggttttaatgctggaaggctgcgcccagcctacgctttcgcccaacaccaacgcggcaactgcgcgagtgctggatcgtctggggatcagcgtcatgtcagctaacgaagcaggctgttgtggcgcggtggactatcatcttaatgcgcaggagaaagggctggcacgggcgcgcaataatattgatgcctggtggcccgcgattgaagcaggtgccgaggcaattttgcaaaccgccagcggttgcggcgcgtttgtcaaagagtacgggcagatgctgaaaaacgatgcgttatatgccgataaagcgcgtcaagtcagtgaactggcggtcgatttagtcgagcttctgcgcgaggaaccgctggaaaaactggcagttcgcggcgataaaaaactggccttccactgcccgtgtaccctacaacatgcgcaaaagctgaacggcgaagtggaaaaagtgttgcttcgtcttggatttaccttaacggacgttcccgacagccatctgtgctgcggttcagcgggaacatatgcgttaacgcatcccgatctggcacgccagctgcgggataacaaaatgaatgcgctggaaagcggcaaaccggaaatgatcgtcaccgccaacattggttgccagacgcatctggcgagcgccggtcgtacttctgtgcgtcactggattgaaattgtagaacaagcccttgaaaaggaataa

SEQ ID NO: 261691 - DNA, 1053 bp, Klebsiella pneumoniae
atgctacgcgagtgtgattacagtcaggcgctgctggagcaggtgaatcaggcaattagcgataaaacgccgctggtgattcagggcagcaatagcaaagcctttttaggtcgccctgtcaccgggcaaacgctggatgtgcgttgtcatcgcggcattgttaattacgacccgaccgagctggtgataaccgcgcgtgccggaacgccgctggtggcgattgaagcggcgctggagagcgccgggcaaatgcttccctgcgagccgccgcattatggtgaagaagccacctggggcgggatggtcgcctgcgggctggcggggccgcgtcgcccgtggagcggttcggtccgcgattttgtcctcggcacgcgcatcattaccggcgctggaaaacatctgcgttttggtggcgaagtgatgaaaaacgttgccggatacgatctctcacggttaatggccggaagctacggttgtcttggcgtgctcactgaaatctcgatgaaagtgttaccgcgaccgcgcgcctccctgagcctgcgtcgggaaatcagcctgcaagaagccatgaacgaaatcgcccagtggcaactccagcctctacctattagtggcttatgttacttcgacaatgcgttgtggatccgccttgagggcggcgaaggatcggtaaaagcggcgcgtgaactgctggggggcgaagaggttgcgggtcagttctggcagcaattgcgtgaacaacaactgccgttcttctcgttaccaggtaccttatggcgcatttcattacccagcgatgcgccgatgatggatttacccggcgagcaactgatcgactggggcggagcgttacgctggctgaaatcgacagccgaggacaatcaaatccatcgcatcgcccgcaacgctggcggtcatgcgacccgctttagtgccggagatggtggctttgccccgctatcggctcgtttattccgctatcaccagcagcttaaacagcagctcgacccttgcggcgtgtttaaccccggtcgcatgtacgcggaactttga

SEQ ID NO: 261692 - DNA, 765 bp, Klebsiella pneumoniae
atgaaagatgaacgtcgccctatttgcgaagtggttgcagagagtatcgaacggttaattatcgacggcgtactgaaggtcggtcagccacttccctcggaacgtcgactgtgtgaaaagctcggcttctcacgctccgcactgcgtgaagggctgaccgtgctgcgcgggcgcgggattattgaaacggcacagggtcgcgattctcgtgtcgcacggcttaatcgggtgcaggacaccagcccgctgatccatctgttcagtacgcagccgcgaacgctgtacgatctgctcgacgttcgcgcattactggagggcgaatcggcaaggctggcggcaacgctgggaacgcaggctgattttgttgtgataacccgctgttatgaaaaaatgctcgccgccagtgagaacaacaaagagatttcgctgatcgaacatgcgcagttggatcacgctttccatctcgccatttgtcaggcttctcacaatcaggtgctggtgtttacgctgcaatcattgaccgatctgatgtttaattcagtgtttgccagcgtaaataatctctaccatcgaccacagcaaaaaaagcagatcgatcgccagcatgcgaggatctacaacgcggtgttgcagcggctgccgcacgtcgcccagcgcgcagcacgcgatcatgtgcggaccgtgaaaaagaatctccacgatatcgagctggaaggccaccatttgattcgctcggcggtgccgctggagatgaacctgagttag

SEQ ID NO: 261693 - DNA, 1143 bp, Klebsiella pneumoniae
atggaatgcgatctgctgatgattaaaattgaaaaagtaattaataaaaatgaccttaaggcatttatcgcttttccgtcatcactttatcccgacgatccaaactggataccccctttattcatagaacgcaacgagcatttgtctgcgaaaaatccggggacggaccatatcatctggcaggcgtgggtggcaaaaaaagcggggcagatagttgggcgtattaccgcgcaaatagataccttgcaccgtgagcgttacggtgaagataccggtcatttcggcatgattgacgccattgatgatccgcaggtttttgccgcgttgtttggcgcagcggaagcgtggttgaagtcacaaggtgcaagtaagatcagcgggcctttcagcctgaatatcaatcaggaaagcggattactgattgaaggttttgacacaccaccctgtgcgatgatgccacacggcaaaccgtggtatgccgcgcatattgaacaactgggttatcacaaaggcattgatttactggcgtggtggatgcagcgaaccgatctcactttctctccggcgctaaaaaaactgatggatcaggtgcgcaaaaaggtgaccattcgctgcatcaatcgtcagcggtttgccgaagagatgcagatcctgcgtgagattttcaactctggctggcagcataactggggatttgtgccgtttaccgaacatgaattcgcgaccatgggcgatcaacttaaatatctggtgccggacgatatgatctacatcgctgagattgattctgcaccctgcgcgtttattgtcggcttgccgaacatcaacgaggcgattgccgatctgaacggatcgctctttcccttcggctgggcaaaattgctgtggcgtttgaaagtcagcggtgtgcgaactgcgcgagtaccgctgatgggcgtgcgcgacgagtatcagttcagccgcatcggcccggtgattgcgctgttattgattgaagccttacgcgatccgtttgcccgccggaagatcgatgcgctggagatgtcatggatcctcgaaaccaatacaggcatgaataacatgctggaacgcattggggcggagccgtacaagcattaccgattgtatgaaaagcagatttaa

SEQ ID NO: 261694 - DNA, 1659 bp, Klebsiella pneumoniae
atgtctaataaaatctttacgcattccctacctatgcgctatgccgattttccaacgctggttgatgctttggactacgccgctctgagtagcgccggaatgaatttttatgacagacgttgccaacttgaagatcaactggaatatcagacgttaaaaacgcgtgccgaagctggtgcgaagcggttgttatcgctgaacctgaaaaaaggcgaacgcgtggcgctgattgccgaaacgagtagcgggtttgtagaggctttttttgcctgtcagtatgctggcttagtcgccgtcccgttggcgattccaatgggcgtcggtcagcgggattcctggagcgccaaactccagggtttactggcaagttgccagcccgcagccattatcactggtgatgagtggttgccactggtcaatgccgcgacgcataacaaccccgaattacatgttttaagccacgcctggtttaaggcattaccggaagccgatgttgcgctccagcgtccagttccgaacgatatcgcctacctccagtacacctccggcagcacccgttttccccgtggcgtcattatcacccatcgcgaagtgatggctaatctacgtgctataagccacgatggcattaaattacgccctggcgaccgctgcgtctcctggctgcctttctaccatgatatgggactggtcggctttctcctgacccccgtcgccacgcaactttcagtagattatttgcgcactcaggattttgccatgcgtcctctgcaatggcttaaattgatcagtaaaaatcgcggcaccgtttccgttgcgccgccgtttggctatgaattgtgccagcgccgcgtgaatgaaaaagatctcgctgaactggatctttcctgctggcgcgtcgctggtattggtgctgagccgatctccgcagaacaactccatcaattcgctgaatgtttccgtcaggttaactttgacgataaaacgttcatgccgtgctacggactggcagaaaatgcgctggctgtcagcttctctgatgaaggctctggggttgtggttaacgaagtggatcgcgacatcctagaatatcagggcaaagccgtcgcgccgggtgctgaaacacgcgccgtatcgactttcgtcaactgcggcaaagcgttgccggaacatggcattgaaatccgcaatgaagcaggtatgccggtcgcggaacgtgtggtaggccatatttgcatctccggccccagcctgatgagcggttactttggcgaccaggtttcgcaagacgagattgccgcgacgggctggttagacaccggcgacctcggttatctgctggacggttatctgtatgtcaccggacgtattaaagatctgattattattcgtggccgtaatatctggccgcaggatattgaatatattgcggaacaagaaccggaaattcattctggcgatgcgattgcttttgttaccgtccaggaaaaaatcattttgcagatccagtgtcggatcagcgacgaagaacgtcgcgggcagcttatccacgcgctggcggcacggatccaaagcgaatttggcgtaaccgcggctatcgatctgttgccgccccacagtattccccgaacgtcctccggcaagcctgcccgtgcgtaa

SEQ ID NO: 261695 - DNA, 915 bp, Klebsiella pneumoniae
atgaatcaaactgtcgcggtgacgggcgctaccgggtttatcggtaaatatattatcgataacctgctcgcccgcggctttcacgttcgcgcattgacgcgtactgcccgcgctcacgtcaatgataatctcacctgggtgcgcggttcgctggaagatactcattcacttagcaagctggttgccggagccagcgcagtggtccattgcgccgggcaagtgcgcgggcacaaagaagagattttcacccgctgtaacgttgacggcagcctgcgcctgatgcaagcagcaaaagagagctgcttttgccaacgttttctgtttatctcttcgctggcggcgcgccatcccgagctctcctggtacgcaaattccaaacacatcgccgaacaacggctgactgcaatggctgacgaaattacgctgggcgtttttcgcccgacagccgtgtatggtcccggcgataaagagttaaaaccgctgtttgactggatgctgcgcggcctgctgccacgacttggtgcgccagatacacagctctcttttctgcacgtcaccgatttcgcgcaagcagtgggtcagtggttaagcgccgaaactatacagacgcaaacctatgaattatgcgatggcgtcgctggcggctatgactggcaacgcatacagcaacttgccgccaacgtccgttgcggttccgtgcgaatggttggtattcctctgccggtactcacctgccttgcggatatcagtaccgcgttgagtcgcctggcaggtaaagaacctatgctgacccgctcgaaaattcgtgaattaacccacgccgactggtcggcaagtaataaccgtatttctgaagatattaattggtttcccgggattagcctggaacacgcattacgcaacgggctattttga

SEQ ID NO: 261696 - DNA, 249 bp, Klebsiella pneumoniae
atggtaaatcgtgaaatagtaatggattacatcctttcctgtttacaggatttggtcgaaaacggtgtggaaattaagcccgacagcgatctcgtcaacgatcttggcctggagtcgatcaaagtgatggatctcttaatgatgctggaagacagattcgatatttccattcctattaatattctgctggatgtcaaaacccctgcgcaattaatggaaactctacttccatggctggagaataaataa

SEQ ID NO: 261697 - DNA, 1173 bp, Klebsiella pneumoniae
atggggctatacgataaatatgcgcgccttgctggcgagcgactgcaatttagtgacaacgggttaacaccgtttggcacctgtattgatgaagtgtattccgccaccgaaggccggatcggcaataaaaaagtgattctggccgggaccaataattatctcggtttaacctttaatcatgatgccatcagcgaaggtcaggcagcgttagcggcccaaggcaccggcaccaccggttctcgtatggcaaacggcagttatgcgccgcacctggcgttagagaaagagattgccgagtttttcaatcgccctaccgctatcgttttttcaaccggttataccgctaatttaggcgtcatcagcgcacttgccgaccataacgccgtggtgttactggatgccgacagccacgccagtatttatgacgcctgttctctcggtggcgcggaaattattcgtttccgccataacgatgctaaagatctggaacggcgcatggttcgcctcggtgaacgggcgaaagaggcgattatcatcgttgagggcatctacagcatgctcggtgacgttgcgccgctggcggaaattgttgatatcaaacgtcgtctcggtggttatttgattgtcgatgaagcgcattcgtttggcgtgttaggcgcaacggggcgcggactggctgaagctgtcggcgttgaagatgatgtggatattatcgttggtactttcagtaaaagtctggcctcgattggcggttttgctgtcggttcggaagcgatggaagtgctgcgctacggcagccgcccgtatatttttaccgcctctccttctccgtcctgcattgcgaccgtgcgctcgtcgttaagaactattgccacacaaccagagctgcggcaaaagctgatggataacgccaaccatctgtatgacggtctgcaaaaactgggttatgagttaagttcacatattagcccggtagtgccagtaataatcggttcgaaagaggaaggtttacgcatctggcgcgagcttatctcgctgggcgtgtatgtgaatcttatcctgccgcctgccgcgcctgcaggcatcacgctgctgcgctgtagcgtaaatgctgcccacagtcgtgagcaaatcgatgccatcattcaggcatttgctactctgaagcagtaa

SEQ ID NO: 261698 - DNA, 1080 bp, Klebsiella pneumoniae
atgaatgttttcagtcgctatttaatccgtcatctctttctcggttttgccgccgccgcagggctattgctgccgctttttaccaccttcaacctgattaacgaactggatgatgtcagcccgggcggttatcgctggactcaggcggtgctggtggtgctaatgaccttaccgcgcacactggtcgaactttcgccgtttatcgccttattgggtgggattgttggcctggggcagttatcgaaaaacagtgagcttaccgccattcgcagcatggggttttctatcttccgtattgcactggtggcgctggttgcagggatattgtggactgtttcgttaggcgcgatagatgagtgggtggcgtcgccattgcagcaacaggcgttgcaaatcaaatcgaccgccaccgcgttgggggaggacgatgacattaccggcaatatgctgtgggccaggcgcggtaatgaatttgtgacggtgaaatcgctgaacgagcagggccagccggtgggcgtggagatatttcattatcgcgacgatctctcgctcgaatcttacatttatgcacgcagtgccaccattgaagacgacaaaacgtggatcctgcatggtgtgaatcataaaaaatggcttaacggtaaagaaacgctggaaacatcagataatcttgcctggcaatcggccttcaccagtatggatcttgatgagttatcgatgccggggaatactttttctgtccgtcagcttaatcattacatccattatttgcaggaaaccgggcaacccagcagcgaataccgccttgcactgtgggaaaaactggggcaaccgatcctgaccctggcgatgattttgctggctgtaccgtttacctttagcgccccgcgctcgccagggatgggtagccgtctcgctgtaggcgtcatcgtgggcttactcacctggatcagctatcaaatcatggttaatctgggattgctatttgcgttaagcgcacctgttaccgcgctcggtttaccggtagcgtttgtgttggtggcgttgagcctggtgtattggtatgacagacaacattaa

SEQ ID NO: 261699 - DNA, 1071 bp, Klebsiella pneumoniae
atgaagctggttgaacactacatcatgcgtggtacgcgccgtctggtgctgattatcgtcggttttctgatctttattttcgccagctactccgcacagcgttatctgaccgaagcggcaaatgggacattagctcttgatgttgtgctggatatcgttttctacaaagtgctgattgcactggagatgttgttacctgttggtctgtatgtgtcagttggcgtgacgctagggcagatgtataccgactcggaaattaccgctatctctgcggcggggggcagtccgggacgcttgtacaaagccgttctttatctggcgataccgctaagtatttttgtcacccttctgtcgatgtatggtcgtccgtgggcttatgcgcagatttatcaactggagcaacagtcacagtcggagctggatgttcgccagttgcgggcaaagaaatttaacactaacgataacggacgaatgatcctttcgcagacggttgatcaggataataatcgcctgactgacgcgctgatttatacttctactgccaatcgaacccgcattttccgcgcccgttcggttgatgtggttgacccatcacctgagaaaccgaccgttatgttgcataacgggaccgcctatcttctcgatcatcaggggtgtgacgacaacgaacagatctaccgtaatctgcaattacatctgaatccgctggatcaaagccctaacgtcaaacgcaaagcaaaatcggtcacggagctggcgcgctccgcctttcctgccgatcatgccgaactgcaatggcgacaaagccgtggcctgacagcgttgttgatggcgctgctggccatttcattaagtcgggtaaaaccgcggcaagggcgattttcaacgttattgccactgacgttgctgtttgttgccattttttatggcggcgacgtctgccgtacgctggtggctaacggcgcgattcccctcattcctggtttgtggttagtacccggactcatgctaatgggcctgctgatgctggtcgcacgcgacttctctttgctgcagaaattttcccgatga

SEQ ID NO: 261700 - DNA, 561 bp, Klebsiella pneumoniae
atgtcatctcgtttgattattgcgctgattatcatgctcttagccccgggtgtgcaggcgcacaatttcgtcactggtaaaacagttacccctgtttatatccaggaaggcggcgagctgcttctgaatagcgacgacgaaattcactaccaaaagtggaatagcacacagttggcgggaaaagtccgcattattcagtatatcgccgggcgtaagtcggcgaagaaaaagaactcactgttaattaaagcggttgaagcggcaaactttccgcaggatcgttttcagcccaccaccattgtgaacaccgatgatgccatctttggtaccggctattttgtcgttggcaaaatcgaaaaaaataaacgccgctatccatgggcgcaattcgttattgacggcaatggacagggacgtgttgcctggcgcttgccggagcagagttcaaccattctggtgctgaataaagacgggcaaattcagtgggcaaaggacggcagtctgacgccggaagaggtagatcatgtcattgcgctggcgcagaaactgatcaatgaataa

SEQ ID NO: 261701 - DNA, 825 bp, Klebsiella pneumoniae; identical to SEQ ID NO: 18977

SEQ ID NO: 261702 - DNA, 1350 bp, Klebsiella pneumoniae
ttggcgggttttaacatcaaacattggtttgcagatggcgcgtttcgcaccattattcgcaatagcgcctggttaggctccagtaatgtcgtgagcgctttactgggtctgttggcgctctcgtgtgccggtaaagggatgacgcccgccatgtttggcgtactggtgattgtacaatcgtacgccaagtcgatcagcgattttattaagtttcagacatggcagctggtggttcagtacggaacaccagcattaaccaacaataatccgcagcaattccgcaatgtcgtctcattttccttctcgctggatatcgtcagcggcgcggtggcgattgtcggcggcattgccttactcccttttctttcccattcattaggtctggatgaccaaagcttttggctggcagcgctgtattgcacgctcattccttcaatggcttcctccacgccgaccggcattctgcgtgcggtagatcgcttcgatctaattgctgtacagcaagcgacgaaaccttttctgcgcgcagcggggagcgtcgtagcctggtattttgactttggttttgcgggttttgttattgcctggtacgtgtcgaatctggttggcggcaccatgtactggtggtttgccgcgcgcgaattacgccgcagaaatatccataacgccttcaaattgaatctgtttgagtctgcccgacacattaaaggcgcgtggagttttgtctggtcaaccaacattgcccactccatctggtcggcgcgtaactcgtgcagcacagtgctggtggggatcgtgttaggacccgctgccgccgggttatttaaaatcgccatgacattcttcgacgccgccggaacgccagcgggtttactgggcaaaagtttttacccagaggtgatgcgtttagatccgcgcaccaccagaccgtggttgttaggcgtgaagtcaggtttactggcgggcggaattggtattctggtggcgctcgcggtgttgatcgtcggcaagccgcttatttcgctggtgtttggcgttaagtatctcgaagcgtatgacctgattcaggtgatgctgggcgcaattgtgatttcgatgctgggcttcccacaggagtcattgctattgatggcgggaaaacagcgcgcttttctcgtggcgcaaaccatcgcctcaatcggctacatcgtattgctgttcatgttctgtcatctgtttggcgtgctgggagcagcgtttgcttatttcggtgggcaatgtctggatgtggtgctctcgttaattccgaccttaaaggcattttttcagcgccattccttgctttataacgcagccggagagaaatcctga

SEQ ID NO: 261703 - DNA, 759 bp, Klebsiella pneumoniae
atggacgcactacaaacacaaactgttaatagtacaaccgcgccgcagcccaactacattccggggctgattgcggtggtcgggtgtgatggcaccggtaaatccacactgaccaccgacctcgtgaaatcgctgcaacaacactggcaaaccgagcggcgctatctggggctgctctcgggcgaagacggcgacaaaatcaaacgattgccgttggttggcgtctggctcgaaaggcgactggcggccaaatcatcgaaaacccaaagcatgaaaaccaaatctccagcgctatgggcggcggtgattatgtactgcttctcgctgcgaagaatggcgaatctacgcaaggttcagcgactggcgcaaagtggcgttctggtggtcagcgatcgcttcccgcaggctgaaatttcgggcttttattatgacggaccggggatcggcgtcgaacgtgcgaccgggaaaatcagcatgtttctggcgcagcgcgaacggcgtttataccaaaaaatggcgcaataccgtcctgaattaatcattcgtttggggattgatattgatactgccatctcccgcaagcctgaccatgactatgccgagctgcaggacaaaatcggcgtcatgtcgacgattggctataacggcacaaaaattcttgagattgattccagagcgccctacagcgaagtgctggaacaggcacagaaggcggtttctctggttgccatcgtttctgaccgccgaagtttaacttaa

SEQ ID NO: 261704 - DNA, 699 bp, Klebsiella pneumoniae
atgtcaataattaattccacgccagtgcgtgttattgccattgtaggatgtgatggttcaggtaaatcgaccctcacggcaagcctggtaaatgaactggcagcaagaatgccaacagaacacatttatctcgggcaatcgtccgggcgaattggcgaatggatttcacagctccctgttattggcgcaccttttgggcgttatctgcgaagtaaagcggcacatgtgcacgaaaagccctccacaccgcctggcaatatgactgcgctggttatctatctgctttcctgctggcgggcgtataagtttcgcaaaatgttgtgtaaaagccagcaaggctatctgctcatcaccgaccgctacccgcaggttgaagtgccgggttttcgctttgatggcccgcaattggcaaaaaccacgggcggtaacggttggataaaaatgttaaggcagcgcgagctgaagctgtaccaatggatggcatcttatttgcccgtattgttgattcgtcttggcattgatgaacaaaccgcgtttgcgcgtaaacctgaccaccaactggcggcgttacaggaaaaaatcgccgttacgccgcaactgacatttaatggcgccaggatccttgaactggatggtcggcaaccagccgatgaaattctgcaagcgtcactacgcgcaattcaagctgcgctttcctga

SEQ ID NO: 261705 - DNA, 693 bp, Klebsiella pneumoniae
atgcagtcaataacacctccattaattgccgttattggtagcgatggttcaggcaagtcaacggtgtgtgaacatctcattaccgttgtcgaaaaatatggtgctgccgaaagagttcatttaggaaaacaggccggaaatgtcggtcgttcagtgacaaaattaccgttgatgggaaaatccttacataaaacaattgaacgaaatcaggtgaaaacagcaaaaaaattgccaggaccagttccggcgctggtaattacagcgtttgtcgcccgtcgcttactgcgctttcgtcatatgcttgcctgtcgtcgtcgcgggttaattgttctaaccgaccgttatcctcaggaccaaattcctggcgcttacgatggtacagtgttcccacctaacattgaaggtggtcgttttgtctcatggctggcaagccaggaacgtaaagcgtttcactggatggcgagccataaacctgatctggtcatcaaactcaatgttgaccttgaagttgcctgcgcgcgtaaacccgaccataaacgggaatcgctggcgaggaagattgccataacgccacagttaacctttggcggtgcacaactggttgatatcgatgctaatcagccactggaaaaggtgctgattgatgcagaaaaagcgattacggattttatgaccgcgcgtggttatcactag

SEQ ID NO: 261706 - DNA, 1500 bp, Klebsiella pneumoniae
atgctaaatttatttgttggccttgatatatacacagggcttttgttattacttgctctggcatttgtgttgttctacgaagcaatcaatggttttcatgacacggcgaatgcggtggcaaccgttatttatactcgtgccatgcaaccacaacttgctgtggtgatggcggcattttttaatttttttggcgtgttattgggcggacttagcgttgcctatgccattgtccatatgttaccaaccgatttgttgctgaatatggggtcaactcacggcctggcgatggtcttttccatgctgctggcggcgattatctggaacctgggaacgtggttctttggtttaccggcctccagttcgcacaccttgattggtgcgattatcggcatcggtttaaccaacgcgctgttaaccggctcatcggtgatggatgcgttaaacctgcgtgaagtgaccaaaattttctcctcgctgattgtttcccctatcgtcggcctggtcattgcgggtggtctgattttcctgctgcgccgtttctggagcgggacgaaaaagcgtgaccgtattcaccgcattccggaagatcgcaaaaagaaaaaaggcaaacgtaagccgccattctggacgcgtattgcgctgattgtttccgctgcgggcgtggcgttttcgcacggcgctaacgacgggcagaaagggatcggcctggtaatgctggtactggtggggattgcccctgctggcttcgtcgtcaatatgaacgcgtccggctatgaaattacccgtacccgcgatgccgtcaccaacttcgaacactacctgcaacagcatcctgaactgccgcagaagttgattgcgatggaacctccattgcctgcggcatcgactgatggcgcgcaagtgacggagtttcactgtcatccggcaaatacctttgatgcgattgcgcgcgttaaaacgatgctgccaggcaatatggaaagctacgagccgttaagcgtgagtcagcgcagccagctgcgccgcattatgctgtgcatctctgatacttccgcgaagctggcgaaactgccaggcgtcagtaaagaagaccagaacctgctgaaaaaactgcgcagcgatatgttaagcaccattgagtacgcaccggtatggatcatcatggcagtagcactggcgctcggcattggcaccatgattggctggcgtcgtgtagcgatgaccatcggtgagaagattggtaagcgcggcatgacgtatgcgcaaggcatggcggcacaaatgacggcggcagtgtctatcggccttgccagttatattgggatgcccgtctccacaacacacgtactctcatctgccgtagcaggaacgatggtggtggacggcggtgggttacagcgtaaaacggtaaccagcatcctgatggcgtgggtgtttactttaccggcggcgatttttctttctggtgggttgtactggatagcattgcagttgatttaa

SEQ ID NO: 261707 - DNA, 1860 bp, Klebsiella pneumoniae
atgagcaaaggaacgaccagccaggatgccccgttcgggacattattgggctacgccccaggtggggtagcaatctactcttcagattacagttctctcgatccgcaggaatacgaagatgacgccgtattccgtagctatatcgacgacgaatatatgggccacaaatggcaatgcgttgaatttgctcgccgttttctctttctgaattacggtgtggtcttcactgacgtgggtatggcatgggagattttctcgctgcgcttcctgcgtgaagtggtcaatgacaacatcctgccattgcaggcatttcctaacggttcgccgcgtgcaccggtagcgggggcgcttcttatctgggataaaggcggtgaatttaaagacactggccatgtcgccatcattacccaattgcatggcaacaaagtccgtattgcggaacagaacgtgattcattccccgttaccgcaagggcaacagtggacacgcgagctggagatggtggtcgaaaacggcggctatacccttaaagacacgtttgatgacaccaccattctgggctggatgatccagacggaagataccgaatacagcttgccacagccggaaattgcaggcgaactgctgaaaatcagcggggcgcgtctggaaaacaaaggccagtttgacggtaaatggctggatgaaaaagatccgctacaaaatgcctacgtgcaggccaacggtcaggtgatcaatcaggatccgtatcattactacaccattaccgagagcgcagagcaggagctgattaaagccaccaacgagctgcacctgatgtatcttcacgccaccgacaaggtgctaaaagatgacaacctgctggcgctgttcgacattccgaaaatcctctggccacgtttgcgtctctcctggcagcgtcgccgtcaccatatgatcaccggtcgtatggatttctgcatggacgaacgtggcctgaaggtctacgaatacaacgccgattccgcctcctgtcataccgaagcgggcttgatcctcgaacgttgggcggagcagggctataaaggcaacggcttcaatcctgcggaagggctgattaacgaactggctggtgcttggaaacacagtcgtgcacgtccgtttgtccatatcatgcaggacaaagatatcgaggaaaactatcacgcgcagtttatggagcaggcgctgcaccaggcgggctttgaaacgcgtatcttgcgtgggttggatgaactgggctgggatgctgccgggcaactgattgatggggaagggcgactggttaactgcgtgtggaaaacctgggcgtgggaaaccgcgtttgatcagattcgtgaagttagcgaccgtgagtttgctgcggtgccgatccgtaccggtcatccgcaaaatgaagtgcgtcttatcgacgtattgctgcgcccggaagtgctggtctttgagccgctatggacggtgatccccggcaacaaagcgattctgccgatcctctggtcgctgttcccgcaccatcgttacctgctggatactgacttcaccgtgaatgatgaactggtaaaaacaggttacgcagtgaaaccgatcgccggtcgctgtggcagtaacatcgacctcgtcagccatcatgaagaggtgctggacaaaaccagcggtaaatttgccgagcagaaaaacatctatcagcaactgtggtgtttgccgaaagtggacggtaaatacattcaggtatgtaccttcaccgttggcggcaactacggtgggacgtgtttgcgcggtgatgaatcactggtcatcaaaaaagagagtgatattgaaccgttaattgtggtgaaaaagtaa

SEQ ID NO: 261708 - DNA, 249 bp, Klebsiella pneumoniae
atgtgtattggcgttccaggccaggtgctggctgtcggtgaagatattcaccagcttgcgcaggttgaagtatgtggtatcaagcgcgacgtgaatatcgccctgatttgtgaaggtaaccctgccgatctgctgggccagtgggtgctggtacacgtcggatttgccatgagcatcatcgacgaagatgaagccaaagccacattagacgcactgcgccaaatggattacgacattaccagcgcgtga

SEQ ID NO: 261709 - DNA, 342 bp, Klebsiella pneumoniae
atgcatgagttgtcgctttgccagagcgccgttgaaattatccaacggcaggcggagcagcacgatgttaagcgcgtcaccgccgtgtggctggaaattggcgcgctctcctgcgttgaggagagcgccgtccgttttagttttgaaattgtctgccacggaacggtggcgcaagggtgcgatttacatatcgtctataaacccgcccaggcctggtgctgggattgcagccaggtggtggagattcatcagcacgatgcgcagtgtccgctctgtcatggcgagcggttgcgtgtcgataccggcgattcgctgatcgtcaaaagtattgaagttgaataa

SEQ ID NO: 261710 - DNA, 489 bp, Klebsiella pneumoniae
atgactgaagagatagcaggtttccagacctccccgaaggcgcaagtacaggcagcgtttgaagaaattgcccggcgttcgatgcacgatctctcttttctgcatccctcaatgccggtgtatgtttctgactttacgctgttcgaaggtcagtggacggggtgtgtgatcaccccgtggatgctgagtgcagttatcttccccggcccggatcaactctggccgctgcgcaaagtgagtgaaaaaattggtctgcaactgccgtatggcactatgacctttaccgttggcgaactggacagtgtttctcaatatctctcctgttcgctgatgtcaccgctttcgcatagcatgtcgattgaagagggccaacgcctgacggatgactgcgcgcggatgatcctttcgctaccggtcgctaatccggatgtaccacacgcagggcgtcgcgccctgctgtttggtcgcaggagtggcgaaaatgcatga

SEQ ID NO: 261711 - DNA, 495 bp, Klebsiella pneumoniae
atgcgtattttagtcttaggggtcggcaatattttgctgaccgatgaagccatcggtgtgcggattgttgaagcgttagagcaacgatacattctgccggattatgttgagatcctcgatggcggcacggcgggaatggagctgcttggcgacatggcaaatcgcgatcatctgattattgcggatgccattgtgtcgaaaaagaacgcgccgggaacgatgatgatcctgcgggatgaagaagttccggcgttgtttaccaacaaaatctctccgcatcagcttggcctggccgacgtattgtcggccctgcgcttcaccggcgagtttccgaaaaagctgacgctggtcggtgtgatcccggaatcgctggagccgcacatcggcttaacgccgacggttgaagcaatgattgaacctgcgcttgagcaggttctggctgcgctgcgcgaatcaggcgtggaagctatcccacgggaggcgactcatgactga

SEQ ID NO: 261712 - DNA, 1704 bp, Klebsiella pneumoniae
atgagccagagaattactattgatccggtaacccgtattgaggggcatttacgcatcgattgcgaaatcgaaaatggcgtcgtttcgaaagcatgggcttccggtaccatgtggcgcggcatggaagagatcgtgaaaaaccgcgatccgcgcgatgcatggatgattgtgcaacgtatctgtggcgtatgtactaccactcacgcgctgtcttctgtccgtgcggcagagagcgcgctgaatatcgacgttccggttaacgcgcaatacatccgtaacatcattctggctgcgcacaccacgcatgaccatattgttcatttctatcagctttcggcgctggactgggtggacatcacttctgcactgcaagccgatccaaccaaagcctccgaaatgctgaaaggtgtttcgacctggcacctgaacagcccggaagagttcaccaaagttcagaacaagatcaaagatctggttgccagcggtcagttgggtattttcgccaatggctactggggtcacccggcgatgaaactgccgccggaagtgaacctgattgcggtagcgcactacctgcaggcgctggagtgccagcgtgacgctaaccgcgtcgtggcgctgctgggcggtaaaacgccgcacattcagaacctggcggtaggtggggtcgctaacccaatcaacctcgacggtctgggcgtgctgaaccttgagcgcctgatgtacatcaagtctttcatcgataaactgagcgactttgttgagcaggtttataaggttgataccgcggttatcgccgcgttctacccggaatggctgacgcgcggtaaaggtgcggtgaactacctgagcgtgccggaattcccgaccgacagcaaaaacggcagcttcctgttcccgggcggctacattgagaatgcggatctgtcctcgtatcgcccgatcacttcccactccgatgaatacctgattaaaggcattcaggagagcgcgaagcactcctggtataaagacgaagcgccgcaggcaccgtgggaaggtaccaccattccggcttatgatggttggtctgacgacggtaaatattcctgggtgaaatcaccgactttctacggcaaaacggtagaagtgggtccgctggctaacatgctggtgaaactggcggcaggacgcgagtctacccagaacaaactgaatgaaatcgttgcgatttatcagaaactgacgggcaacacgctggaagtggcgcagctgcactccacgctgggccgtattattggtcgtaccgttcactgctgtgaattgcaggatatcctgcaaaatcaatacagtgcactgatcaccaatatcggcaaaggcgatcacaccacctttgtgaagccgaacattccggcaacgggtgagttcaaaggcgtaggtttcctcgaagcaccgcgcggtatgctctctcactggatggttattaaagacggtatcatcagcaactaccaggcggttgttccatcaacctggaactctggtccgcgtaacttcaatgatgacgtcggtccttacgagcagtcgctggtgggtacgccggttgccgatccgaataaaccgctggaagtggtgcgtaccattcactccttcgacccgtgcatggcctgtgcggtacacgtagtggatgccgacggcaacgaagtggtttcagtgaaggttctgtaa

SEQ ID NO: 261713 - DNA, 1179 bp, Klebsiella pneumoniae
atgagtcatgatccacaaccgctgggcggcaaaatcatcagtaaaccggtcatgatttttggaccgttaatcgtcatctgtatgctcctgattgtgaagcgtctggtgttcggtctgggctctgtttctgacctgaacggcggcttcccgtggggcgtgtggatcgcgtttgacctgctgatcggtaccggctttgcctgtggcggctgggcgctggcgtgggcagtatacgtctttaaccgtgggcaataccatccgctggtgcgtccggcgctgttggcgagtctgttcggttactccttgggtggcttgtcgatcaccatcgacgtgggtcgctactggaacctgccgtacttctacattccgggtcacttcaacgtgaactcggtactgttcgagacggcggtctgtatgaccatctacatcggtgtgatggcactggagtttgctccggcattgtttgaacgtctgggctggaaggtgtcactcaaacgtctgaacaaggtgatgttcttcatcatcgcgcttggtgcgctgctgccaactatgcaccagtcttcaatggggtcgctgatgatctcggcgggctacaaggtgcatccgctgtggcagagctatgaaatgttgccgctgttctcgctgctgacggcgttcatcatgggcttctcgattgtcatctttgaaggttcgctggtgcaggcgggtctgcgtggcaacggtccggatgaaaagagtctgttcgttaagctgaccaacaccatcagtgtgttgctggcgattttcatcgtgctgcgctttggcgagcttatctatcgcgacaagctgtcgttagcgtttgccggtgacttctactccgtgatgttctggattgaagtcctgctgatgctcttcccgctggtcgttctgcgtgtggcgaagctgcgtaatgattcccgcatgctgttcctgtcagcactgagcgcgctgttaggttgtgcaacctggcgtctgacctattcgctggtggcattcaacccgggcggcggttacgcctacttcccgacctgggaagaactgttgatttctattggttttgtggctattgagatttgcgcttacatcgtactcattcgtctactgccgatacttcctcctttaaaacaaaacgatcataatcgtcatgaggcgagcaaagcatga

SEQ ID NO: 261714 - DNA, 723 bp, Klebsiella pneumoniae
gtgtggaccagcggcacgggcgtcaacaaagaccaggaggagaacggctacgcgtacattaagaaacagtgtatgcactgcgtcgatccgaactgtgtctctgtgtgcccggtctctgcactgaaaaaagatccgaaaaccggtattgtccattacgacaaagatgtgtgcaccggctgccgttactgcatggtcgcctgcccatacaacgtgccgaagtacgactacaacaacccgtttggtgcgctgcataagtgcgagttgtgcaaccagaaaggtgtggaacgtctcgataaaggcggtctgcctggctgcgtagaagtgtgcccggcgggcgcggtgatttttggtacgcgtgaagagctgatggcggaggcgaaaaaacgtctggcgctgaagccgggcagcgaataccactatccgcgtcagacgctgaaatctggcgacacttacctgcatacggtgccgaaatattatccgcatctgtacggcgagaaagagggcggcggtactcaggttctggtactgacgggtgtgccttatgaaaatctcgacctgccgaaactggacgatctttctaccggtgcgcgttccgaaaatattcaacacaccctgtataaaggcatgatgctaccactggctgtgctggcgggcttaaccgtgctggttcgtcgcaacaccaaaaacgaccatcacgacggaggagacgatcatgagtcatga

SEQ ID NO: 261715 - DNA, 747 bp, Klebsiella pneumoniae
atggcattactggaaatttgctgttacagcatggaatgtgcactaacggcgcagcaaaacggcgcagacagagttgaattatgcgcagccccaaaagaggggggcttaacgccgtcgttgggggtactgaaatccgtacgccagcgggtgacgatccctgtgcatccgattatccgcccacgcggtggtgatttttgctacagcgacggtgaatttgccgccattcttgaggatgtgcgcacagtccgcgaattaggttttcctggactggtgacgggcgttctcgatgttgacgggaatgtcgatatgccacgaatggaaaaaataatggctgctgccggtccgctggcagtgacttttcatcgcgccttcgatatgtgcgctaaccctttaaatacactcaataatcttgcggaattgggcgttgctcgggtactgacatcagggcaaaaatcagacgcactgcaaggtttatcaaaaattatggaacttattgcccatggtgatgctccaatcattatggccggagcaggagtccgtgcagaaaacctgcaccacttcctcgatgccggagtgctggaagtccatagctccgcgggagcgtggcaagcctcaccaatgcgttatcgtaatcaaggattgtccatgtcatcagatgcacacgcggacgagtattcgcgttatgtcgtagacggggcggcggttgctgaaatgaaaggaatcattgaacgccatcaggccaaatga

SEQ ID NO: 261716 - DNA, 567 bp, Klebsiella pneumoniae
atggcgaactggcaatctatcgacgagctgcaggatattgcatcggatttaccgcgatttacccacgcattagatgaactttcccgccgtttggggttggatatcactccgctgactgccgatcacatttctttgcgttgccatcaaaacgccaccgctgagcgctggcgtcgcgggtttgaacagtgcggcgagcttttgtcagaaaatatgatcaatggcaggccgatttgtctgtttaaattgcatgaaccggtacaggttgcgcactggcagttttccattgtggagctaccgtggcccggggaaaaacgttacccgcacgaaggttgggaacatattgaaatcgttctgccgggcgatccagaaacgctgaatgcccgtgcgctggcattgctttctgatgaaggactcagcctgccggggatctcagtgaaaaccagttcgccaaaaggtgagcatgagcgattaccgaatccgacgctggcggtcaccgatggcaaaacaactattaagtttcatccgtggtccattgaaaagatcgttgccagcgagcagtcggcgtaa

SEQ ID NO: 261717 - DNA, 396 bp, Klebsiella pneumoniae
atgatgagaaccttattagcaatattattgtttccgctgctggtgcaagccgccggggaggggatgtggcaggcgagtagtgtgggcgttacgctgaatcaccgtggtgagtcgatgtcgtcagcgcctctttctactcgacaacctgctgcaggattgatgacgctggtggcgtggcgttatcagcttatcggcccgacacctgcaggactgcgggttcgcttgtgttcacaatctcgttgtgtcgaattagaagggcagagtggaaccaccgtggccttttccggtataccggcgatagaaccgttgcgatttatctgggaagtgcctggcggtgggcggttaattccgccgctaaaggtacaacggaatgaagtgattgtgaattatcgttaa

SEQ ID NO: 261718 - DNA, 2079 bp, Klebsiella pneumoniae; identical to SEQ ID NO: 9627

SEQ ID NO: 261719 - DNA, 1149 bp, Klebsiella pneumoniae
gtgtctgacgagagcgacgacaaaacagaagcccccacacctcaccgactagaaaaagcgcgggaagaggggcaaatcccgcgttcccgtgaactgacttcactgctgattttgttagtgggcgttagtgttatctggtttggcggtgtgtcgctggcccgtcgattgtcgggcatgctctccgctgggctgcattttgatcacagtattatcaatgacccgaatctgatcctcgggcaaattattctgctgatcagagaagccatgctggcgctgctgccgctgattagcggcgtggtgctggtggcgctcatttctccggtcatgctgggagggctggtatttagcggaaaatccttgcagccgaagttttccaaactcaacccgctaccgggcattaaacggatattctcggctcagactggcgcggagttgcttaaggcaattttgaaaaccatcctggttggcagcgtgacgggattttttctctggcatcactggccgcagatgatgcgcttaatggccgagtctccgattaccgccatgggtaatgcgatggatctggtagggctatgcgcgctgctggtggtacttggtgttattccgatggtgggatttgacgtctttttccaaatcttcagccacctgaaaaagctgcgaatgtcgcggcaggatattcgtgatgagttcaaacaaagcgaaggcgacccccaagttaaagggcggatccgtcagatgcagcgagcggccgcacggcgtcggatgatggccgatgtgccgaaagcggacgttatcgtcaataacccaactcactactcagtggctttgcagtacgacgaaaacaaaatgagtgcgccaaaagtcgttgccaagggcgcggggctggtggcattacgcattcgtgaaattggcgctgaaaataacgtccctacgcttgaagcgccgccgctggcgcgagcgctgtatcgacatgcggagatcggtcaacaaatcccgggtcaactgtacgccgcggtggcggaagtgctggcctgggtctggcaactgaaacgctggcgtctggctggtggacagcgccctgtacaacctactcatcttccggtgccggaagccctggattttattaacgagaaaccgacccatgagtaa

SEQ ID NO: 261720 - DNA, 645 bp, Klebsiella pneumoniae
atgatgcaaccatcaatcaaacctgctgacgagcattcagctggcgatatcattgcgcgcatcggcagcctgacgcgtatgctgcgcgacagtttgcgggagctggggctggatcaggccattgccgaagcggcggaagccatccccgatgcgcgcgatcgtttgtactatgttgtgcagatgaccgcccaggctgcggagcgggcgctgaacagtgttgaggcgtcacaaccgcatcaggatcaaatggagaaatcagcaaaagcgttaacccaacgttgggatgactggtttgccgatccgattgaccttgccgacgcccgagaactggtaacagatacgcggcaatttctggcagatgtccccgcgcataccagctttactaacgcgcagctgctggaaatcatgatggcgcaggattttcaggatctcaccggacaggtcattaagcggatgatggatgtcattcaggagatcgaacgtcagttgctgatggtgctgttggaaaacatccccgaacaggagtcgcgtccaaaacgtgaaaaccagagtttgcttaatggacctcaggtcgataccagcaaagccggtgtggtagccagtcaggatcaggtggacgatttgttggatagtcttggattttga

SEQ ID NO: 261721 - DNA, 390 bp, Klebsiella pneumoniae
atggcggataaagaacttaaatttttggttgtggatgacttttccaccatgcgacgcatagtgcgtaacctgctgaaagagctaggattcaataatgttgaggaagcggaagatggtgtcgacgctctcaataagttgcaggcaggcggttatggatttgttatctccgactggaacatgcccaacatggatggcctggaattgctgaaaacgattcgtgcggatggtgcgatgtcagcattgccagtgttaatggtgactgcagaagcgaagaaagagaacattattgctgcggcgcaagcgggggccagtggctatgtggtgaagccatttaccgccgcgacgctggaggaaaaactcaacaaaatctttgagaaactgggcatgtga

SEQ ID NO: 261722 - DNA, 1050 bp, Klebsiella pneumoniae
atgagcaaaatcagggtgttatctgtcgatgattcggcactgatgcgccagatcatgacagaaatcatcaacagccatagcgacatggaaatggtggcgaccgcccctgatccgctggttgcgcgtgatttgattaagaaattcaatcccgatgtattgacgctggatgttgaaatgccgcggatggacggactggatttcctcgaaaaattaatgcgtttgcgtccaatgcccgtagtgatggtttcttccctgaccggcaaagggtcagaagtcacgctgcgcgcgctggagctgggggcgatagattttgtcaccaaaccgcaactgggtattcgcgaaggaatgctggcgtatagcgaaatgattgctgaaaaggtgcgtacagcagcaaaggcgagccttgcagcacataagccattgtcggcaccgacaacgctgaaggcagggccgttgttgagttctgaaaaactgattgcgattggtgcttcaacgggtggaactgaggcaattcgtcacgtactgcaaccgttgccgctttccagcccggcactgttaattacccagcatatgccgcccggtttcacccgctcttttgccgacagacttaataagctttgccagatcggggttaaagaagccgaagacggagaacgtgttttgccggggcatgcctatattgcgccgggcgatcggcatatggagctggcgcgtagtggcgcaaattatcaaatcaaaattcacgacggcccggcggttaaccgtcatcggccttcggtagatgtgttgttccattctgtcgccaaacaggcggggcgtaatgcggttggggtgatcctgaccggtatgggcaacgacggcgcggcgggaatgttggcgatgcgtcaggcgggggcatggacccttgcgcaaaacgaagcaagttgcgtggtgttcggcatgccgcgcgaggccatcaatatgggtggtgtctgcgaagtggtcgatcttagccaggtaagccagcaaatgttggcaaaaattagtgccggacaggcgatacgtatttaa

SEQ ID NO: 261723 - DNA, 861 bp, Klebsiella pneumoniae; identical to SEQ ID NO: 9626

SEQ ID NO: 261724 - DNA, 1602 bp, Klebsiella pneumoniae
atgtttaatcgtattcgaatttcgaccacgctgtttttaattttgattctctgcgggatcttgcagattggcagtaacggcatgtctttttgggcatttcgcgacgatttgcaacgactgaatcaggtcgagcagagcaatcagcaacgtgcggcattagcgcaaactcgggcggtaatgttacaggccagtaccgcgctgaacaaagcgggcactctgacggcacttagctatccggcggatgacattaaaacgttgatgacgacggcgcgcgccagtctgacgcaatccaccacgctgtttaaaagttttatggcgatgactgcgggcaacgagcacgtcagggcattgcaaaaagagacggagaaaagttttgcccgctggcacaacgatctcgaacatcaggcgacctggcttgaaagtaatcaactttcggatttcctcactgcgccggtgcagggatcacagaatgcgtttgacgttaactttgaggcctggcagctggagatcaaccatgtgctggaagccgccagtgcgcaaagccagcgtaactatcagatttcggcactggtgtttatcagcatgattattgttgcagcgctctacatcagcagtgcgctgtggtggacgcgcaagatgattgttcaaccactggccatcatcggtagccattttgacagcattgctgcgggtaatctggcgcgtccgattgcagtgtatggtcgcaatgagatcaccgccatttttgccagtctgaagaccatgcagcaggctttgcgtgggacggtaagtgatgtgcgtaagggaagccaggagatgcacattggtatcgcggagattgtcgcaggcaataacgatctctcaagtcgtaccgaacagcaggcggcatcgctggcacaaacggccgccagtatggagcaattaaccgccacggtagggcaaaacgccgataacgcacgacaggcgtcggaactggcaaaaaatgccgcgacaacggcgcaggcgggcggtgttcaggtcagtaccatgactcacaccatgcaggagatcgccaccagctcgcaaaaaattggcgacattatcagcgttatcgacggcattgctttccagaccaatattctggccctgaatgcggcagtggaagcggctcgcgccggagagcagggtcgtggttttgcggtagtggcaggtgaagtgcgcaatcttgccagccgtagcgcccaggcagcaaaagagatcaaagggctgatcgaagagtcagtcaatcgtgtccagcagggttcgaaactggtgaataacgccgccgcgaccatgactgatattgtcagttcggtgacccgcgtgaacgacattatgggagaaattgcttcggcctcggaagaacaacggcgggggattgagcaggttgcgcaggctgtcagccagatggatcaggtgacacagcagaacgcctcgctggtagaagaagcggcggcggcaacggaacaactggcgaaccaggctgaccatctttcgtcgcgtgtggcggtatttacccttgaagaacatgaagtagcacgacatgagtcggcgcagttacatattgcgccagtggtatcctga

SEQ ID NO: 261725 - DNA, 1662 bp, Klebsiella pneumoniae
atgattaaccgtatccgcgtagtcacgctgttggtaatggtgctgggggtattcgcactgttacagcttatttccggcagtctgtttttttcttcccttcaccatagccagaagagctttgtggtttccaatcaattacgggaacagcagggcgagctgacgtcaacctgggatttaatgctgcaaacgcgcattaacctgagtcgttcagcggtacggatgatgatggattcctccaatcaacaaagtaacgccaaagttgaattgctcgatagcgccaggaaaacattggcgcaggcagcgacgcattataaaaaattcaaaagcatggcaccgttacctgaaatggtcgctaccagtcgtaatattgatgaaaaatataaaaactattacacagcgttaactgaactgattgattatctagattatggcaatactggagcttatttcgctcagccaacccagggaatgcaaaatgcaatgggcgaagcgtttgctcagtacgccctcagcagtgaaaaactgtatcgcgatatcgtcactgacaacgcagatgattaccgatttgcccagtggcaactggcggttatcgcgctggtggtggtattgattctgctggtggcgtggtacggcattcgccgtatgttgcttactccgctggcaaaaattattgctcacattcgcgaaatcgccggtggtaacctggcgaataccctgaccattgacgggcgcagtgaaatgggcgacctggcgcagagcgtttcacatatgcaacgctctttgactgacaccgtcactcatgtccgcgaaggttcagatgccatctatgccggtacccgtgaaattgcggcgggcaacaccgatctttcctcccgtactgaacagcaggcatccgcgctggaagaaactgccgccagcatggagcagctcaccgcgacagtgaagcaaaacgccgataacgcccgccaggcctcgcaactggcgcgaagtgcctccgacaccgcccagcacggcggcaaagtggtggatggcgtagtgaaaacgatgcatgagatcgccgatagttcgaagaaaattgccgacattatcagcgttatcgacggtattgccttccagactaatatcctcgcgctgaatgccgcggttgaagccgcgcgtgcgggtgaacagggccgtggttttgccgtggtggcgggtgaagtgcgtaatcttgccagtcgcagcgcccaggcggcaaaagagatcaaagccctcattgaagactccgtcgcacgcgttgataccggttcggtgctggtcgaaagcgccggggaaacaatgaacaatatcgtcaatgctgtcactcgcgtgactgacattatgggcgagattgcatcggcatcggatgaacagagccgtggcatcgatcaagtcgcattggcggtttcggaaatggatcgcgtcacgcaacagaacgcatcgctggtgcaggaatcagctgccgccgccgctgcgctggaagaacaggcgagtcgtttaacgcaagcggtttccgcgttccgtctggcagccagcccactcaccaataaaccgcaaacaccatcccgtcctgccagtgagcaaccaccggctcagccacgactgcgaattgctgaacaagatccaaactgggaaacattttga

SEQ ID NO: 261726 - DNA, 504 bp, Klebsiella pneumoniae
atgaccggtatgacgaatgtaacaaagctggccagcgagccgtcaggccaggaatttctggtatttacccttggtgatgaagagtacggtattgatatcctgaaagtgcaggagatccgtggctacgatcaggtaacacggattgcgaacacgccagcgtttatcaaaggcgtcacgaatctgcgcggcgttattgtgccgattgttgacttacgaattaagttcagccaggtggatgtggactataacgacaacacggtagttatcgtcctgaatctcggacagcgggtggtcggcatcgtggttgacggcgtctcagacgtgctttcattgacggcggagcaaattcgtccggcaccggaatttgccgtgacgctttcaacagaatatctcactggactgggcgcactgggcgaccggatgttgattctggtgaacatcgaaaaactgctgaacagcgaagagatggcgctgttagatagcgcggcgtcagaagtggcgtaa

SEQ ID NO: 261727 - DNA, 1965 bp, Klebsiella pneumoniae
gtgagcatggatataagcgatttttatcagacattttttgatgaagcggacgaactgttggctgacatggagcagcatctgctggttttgcagccggaagcgccagatgccgaacaattgaatgccatctttcgggctgcccactcgatcaaaggaggggcaggaacctttggcttcagcgttttgcaggaaaccacgcatctgatggaaaacctgctcgacgaagccagacgaggtgagatgcaactcaacaccgacattatcaatctgtttttggaaacgaaggacatcatgcaagaacagctcgacgcttataaacagtcgcaagagccggatgccgccagcttcgattatatctgccaggccttgcgtcaactggcattagaagcgaaaggcgaaacgccatccgcagtgacccgattaagtgtggttgccaaaagtgaaccgcaagatgagcagagtcgcagtcagtcgccgcgacgaattatcctttcgcgcctgaaggccggggaagtcgacctgctggaagaagaactgggacatctgacaacgttaactgacgtggtgaaaggggcggattcgctctcggcaatattaccgggcgacatcgccgaagatgacatcacagcggtactctgttttgtgattgaagccgatcagattacctttgaaacagtagaagtctcgccaaaaatatccaccccaccagtgcttaaactggcagccgaacaagcgccaaccggccgcgtggagcgggaaaaaacgacgcgcagcaatgaatccaccagcatccgtgtagcggtagaaaaggttgatcaattaattaacctcgtcggcgagctggttatcacccagtccatgcttgcccagcgttccagcgaactggacccggttaatcatggtgatttgataaccagcatggggcagttacaacgtaacgcccgtgatttgcaggaatcagtgatgtcgattcgcatgatgccgatggaatatgtttttagtcgctatccccggctggtgcgtgatctggcgggaaaactcggcaagcaggtagaactgacgctggtgggcagttctactgaactcgacaaaagcctgatagaacgcattatcgacccgctgacccacctggtacgcaatagcctcgatcacggtattgaactgccagaaaaacggctcgccgcaggtaaaaacagcgtcggaaatttaattctgtctgccgaacatcagggcggtaacatttgcattgaagtgaccgacgatggggcggggctaaaccgtgagcgaattctggcaaaagcggcctcgcaaggtttgactgtcagcgaaaacatgagcgacgacgaagtcgcgatgctgatatttgcacctggcttctccacggcagagcaggtcaccgacgtctccgggcgcggcgtcggcatggacgtcgttaaacgtaatatccaggagatgggcggtcatgtcgaaatccagtcgaagcagggtactggcactacgatccgcattttactgccgctgacgctggccatcctcgacggcatgtccgtacgcgttgcggatgaagttttcattctgccgctgaatgctgttatggaatcactgcaaccccgtgaagccgatctccatccactggccggcggcgagcgggtgctggaagtgcggggtgaatatctgcccatcgtcgaactgtggaaagtgttcaacgtcgcgggcgcgaaaaccgaagccacccagggaattgtggtgatcttacaaagtggcggtcgccgctacgccttgctggtggatcaattaattggtcaacaccaggttgtggttaaaaaccttgaaagtaactatcgcaaagtccccggcatttctgctgcgaccattcttggcgacggcagcgtggcactgattgttgatgtctccgccttgcaggcgataaaccgcgaacaacgtatggcgaacaccgccgcctga

SEQ ID NO: 261728 - DNA, 927 bp, Klebsiella pneumoniae; identical to SEQ ID NO: 18362

SEQ ID NO: 261729 - DNA, 888 bp, Klebsiella pneumoniae
gtgcttatcttattaggttacctggttgttctcggtacagttttcggcggttatttgatgaccggtggaagccttggagcactctatcaacccgctgaactggtgattattgccggtgcagggattgggtcgtttatcgtcggcaataatggcaaagcgattaaaggcacgctgaaggcgctgccgttgctgtttcgtcgctccaaatacaccaaagcaatgtatatggatctgctggctctgctttatcggttgatggcgaaatcgcggcagatggggatgttttcgctggaacgtgatattgaaaatccccgtgagagcgagatcttcgccagctacccacgcatcctcgcggatagcgtcatgcttgattttatcgtcgattatctgcgtctgattatcagcggtcacatgaacaccttcgaaatcgaagccctgatggatgaagagattgagacgcacgaaagcgaggcagaagtcccggcgaacagtctggcgctggtcggggactcacttccggcgtttggtattgtcgctgctgtgatgggggtcgttcacgcgttaggttcagccgatcgtcctgccgccgagctgggggcgcttatcgcacatgcgatggtggggactttcctcggtattttattggcttacggatttatttccccattagcgagtgttttacgtcagaaaagcgccgaaaccagcaaaatgatgcagtgcgtcaaagtcacactgctttctaatctgaacggttacgcaccgcctatcgccgttgagtttggtcgcaaaacgctctattccagcgaacgtccgtcgtttattgaactggaagagcatgtgcgtgcggtgaaaaatccgcaacaacagacgacaaccgaggaagcatga

SEQ ID NO: 261730 - DNA, 579 bp, Klebsiella pneumoniae
atgagtgaaaaaagcattgttcaggaagcgcgggatattcagctggcaatggaattgatcaccctgggcgctcgtttgcagatgctggaaagcgaaacacagttaagtcgcggacgcctgataaaactttataaagaactgcgcggaagcccaccgccgaaaggcatgctgccattctcaaccgactggtttatgacctgggaacaaaacgttcatgcttcgatgttctgtaacgcatggcagtttttactgaaaaccggtttgtgtaatggcgtcgatgcggtgatcaaagcctaccgtttataccttgaacagtgcccgcaagcagaagacggaccgctgctggcattaacccgtgcctggacattggtgcggtttgttgaaagtggattactgcaactttccagctgcaactgctgcggcggcaattttattacccacgctcaccagcctgttggcagctttgcctgcagcttatgtcagccgccatcccgggcagtaaaaagacgtaaactttcccagaatcctgccgatattatcccacaactgctggatgaacagagagtacaggctgtttaa

SEQ ID NO: 261731 - DNA, 351 bp, Klebsiella pneumoniae
atgcatacctccgagttgctgaaacacatttatgacatcaacttgtcatatttactacttgcacagcgtctgattgttcaggacaaagcgtccgctatgtttcgtctcggcataaatgaagaaatggcgacaacattagcggcactgactcttccgcaaatggttaagctggcagaaaccaatcagctggtttgtcacttccgttttgacagccaccagacgattactcagttgacgcaagattcccgcgttgacgatctccagcaaattcataccggcatcatgctctcaacacgcttgctgaatgatgttaatcagcctgaagaagcgctgcgcaagaaaagggcctga

SEQ ID NO: 261732 - DNA, 429 bp, Klebsiella pneumoniae
atgagctatagcaatattcttgtcgctgttgcggttacaccggaaagtcagcaactgctggcaaaagcggtatctatcgccaggccagtaaagggacacatcagtttaattactctcgcttccgacccggaaatgtacaatcaattagccgcgccgatgcttgaagatttacgcagcgtgatgcaagaagaaacgcaaagctttcttgataagttaattcaggatacggggtatcccgttgacaagacgtttattgcctacggtgagttaagcgaacatattctggaagtatgtcacaaacatcatttcgatttggtgatttgcggtaatcacaatcacagtttcttttcgcgagcatcctgctcggcgaaaagagtgattgcctcaagtgaggtcgatgtgctgttagttccacttacgggtgattaa

SEQ ID NO: 261733 - DNA, 1425 bp, Klebsiella pneumoniae
atgagtcgtttagtcgtagtatctaaccggattgcaccaccagacgagcacgccgccagtgccggtggccttgccgttggcatactgggggcactgaaagccgcaggcggactgtggtttggctggagtggcgaaacagggaatgaggatcagccgctaaaaaaggtgaaaaaaggtaacattacgtgggcctcttttaacctcagcgaacaggaccttgacgaatactacaaccaattctccaatgccgttctctggcccgcttttcattatcggctcgatctggtgcaatttcagcgtcctgcctgggacggctatctacgcgtaaatgcgttgctggcagataaattactgccgctgttgcaagacgatgacattatctggatccacgattatcacctgttgccatttgcgcatgaattacgcaaacggggagtgaataatcgcattggtttctttctgcatattcctttcccgacaccggaaatcttcaacgcgctgccgacatatgacaccttgcttgaacagctttgtgattatgatttgctgggtttccagacagaaaacgatcgtctggcgttcctggattgtctttctaacctgacccgcgtcacgacacgtagcgcaaaaagccatacagcctggggcaaagcatttcgaacagaagtctacccgatcggcattgaaccgaaagaaatagccaaacaggctgccgggccactgccgccaaaactggcgcaacttaaagcggaactgaaaaacgtacaaaatatcttttctgtcgaacggctggattattccaaaggtttgccagagcgttttctcgcctatgaagcgttgctggaaaaatatccgcagcatcatggtaaaattcgttatacccagattgcaccaacgtcgcgtggtgatgtgcaagcctatcaggatattcgtcatcagctcgaaaatgaagctggacgaattaatggtaaatacgggcaattaggctggacgccgctttattatttgaatcagcattttgaccgtaaattactgatgaaaatattccgctactctgacgtgggcttagtgacgccactgcgtgacgggatgaacctggtagcaaaagagtatgttgctgctcaggacccagccaacccgggcgttcttgttctttcgcaatttgcgggagcggcaaacgagttaacgtcggcgttaattgttaacccctacgatcgtgacgaagttgcagctgcgctggatcgtgcattgactatgtcgctggcggaacgtatttcccgtcatgcagaaatgctggacgttatcgtgaaaaacgatattaaccactggcaggagtgcttcattagcgacctaaagcagatagttccgcgaagcgcggaaagccagcagcgcgataaagttgctacctttccaaagcttgcgtag

SEQ ID NO: 261734 - DNA, 801 bp, Klebsiella pneumoniae
gtgacagaaccgttaaccgaaacccctgaactatccgcgaaatatgcctggttttttgatctcgatggaacgctggcggaaatcaaaccgcatcccgatcaggtcgtcgtgcctgacaacattctgcaaggactacagctactggcaaccgcaagtgatggtgcattggcattgatatcagggcgctcaatggtggagcttgacgcactggcaaaaccttatcgcttcccgttagcgggcgtgcatggggcggagcgccgtgacatcaatggtaaaacacatatcgttcatctgccggatgcgattgcgcgtgatattagcgtgcaactgcatacggtcatcgcccagtatcccggtgcggagctggagacgaaagggatggcctttgcgctgcattatcgtcaggctccgcagcatgaagacgcattaatgacattagcgcaacgtattactcagatctggccacaaatggcgttacagcagggaaagtgtgttgtcgagatcaaaccgagaggtaccagtaaaggtgaggcgattgcagcttttatgcaggaagctccctttatcgggcgaacgcccgtatttctgggcgatgatttaaccgatgaatctggcttcgcagccgttaaccggctgggcggaatgtcagtaaaaattggcacaggtgcaactcaggcatcatggcgactggcgggtgtgccggatgtctggagctggcttgaaatgataaccaccgcattacaacaaaaaagagaaaataacaggagtgatgactatgagtcgtttagtcgtagtatctaa

SEQ ID NO: 261735 - DNA, 1515 bp, Klebsiella pneumoniae
atgcaacagtctaccccgtatctctcatttcgcggcatcggtaaaacgtttcccggcgttaaggcgctgacggatattagttttgactgctatgccggtcaggttcatgcgttgatgggtgaaaatggcgcaggaaaatcaactctcttaaaaatcctcagcggcaactatgcgccaaccacgggttctgtagtgattaatgggcaggaaatgtccttttccgacacgaccgcagcacttaacgcgggcgtggcgattatttaccaggaactgcatctcgtgccggaaatgaccgtcgcggaaaacatctatctcggccagctgccgcataaaggcggcattgtgaatcgctcattgctgaattatgaggcgggtttacaacttaaacatcttggtatggatattgacccggacacgccgctgaaatatctctccattggtcagtggcagatggttgaaatcgccaaagcgctggcgcgtaacgccaaaattatcgcctttgatgagccaaccagctccctctctgcccgtgaaatcgacaatcttttccgcgttattcgtgaactgcgaaaagaggggcgggtgatcttatacgtttctcaccgtatggaagaaatatttgccctcagcgatgccattactgtctttaaagatggacgttatgtcaaaacctttaccgatatgcagcaggttgaccacgacgcgctggtgcaggcgatggtcgggcgcgacattggcgatatctacggctggcaaccgcgtagttatggcgaggagcgcctacgtcttgatgctgtgaaagcaccaggcgtgcgtacgccaataagtctggcggttcgcagtggtgaaattgttgggctgtttggtctggtaggggcggggcgtagcgaattaatgaaaggcatgtttggcgggacgcaaatcaccgccggtcaggtttatatcgaccaacagccgatcgatattcgtaaaccgagccacgccattgccgcaggcatgatgctctgcccggaagatcgcaaagcggaaggcattattcccgtgcactccgttcgcgacaatatcaacatcagtgccagacgtaaacatgtgctcggcggttgtgtaatcaacaacggttgggaagaaaacaatgccgatcaccacattcgttcgctcaacatcaaaacgccgggcgcggagcaactgatcatgaatctctcaggcggaaatcagcaaaaagccattctgggccgctggttatcggaagagatgaaggtcattttgctggatgaacctacgcgcggcattgatgttggcgctaagcacgaaatatataacgtaatttatgcgctggcggcgcagggcgtggcggtgctgtttgcctccagcgacttacctgaagtcctcggcgttgccgaccggattgtggtgatgcgggaaggtgaaatcgccggtgaattgttacacgagcaggcagatgagcgtcaggcactgagccttgcgatgcctaaagtcagccaggctgttgcctga

SEQ ID NO: 261736 - DNA, 990 bp, Klebsiella pneumoniae
atgcacaaatttactaaagccctggcagccattggtctggcagccgttatgtcacaatccgctatggcggagaacctgaagctcggtttcctggtgaagcaaccggaagagccgtggttccagaccgaatggaagtttgccgataaagccgggaaggatttagggtttgaggttattaagattgccgtgccggatggcgaaaaaacattgaacgcgatcgacagcctggcagccagtggcgcaaaaggtttcgttatttgtactccggaccccaaactcggctctgccatcgtcgcgaaagcgcgtggctacgatatgaaagtcattgccgtggatgaccagtttgttaacgccaaaggtaagccaatggataccgttccgctggtgatgatggcggcgactaaaattggcgaacgtcagggccaggaactgtataaagagatgcagaaacggggttgggatgtcaaagaaagcgcggtgatggcgattaccgccaacgaactggataccgcccgccgccgtacaacgggttctatggacgcactgaaagcggccggattcccggaaaaacaaatttatcaggtacctaccaaatctaacgacatcccgggggcatttgacgctgccaactcaatgctggttcaacatccggaagttaaacattggctgatcgtcggtatgaacgacagcaccgtacttggcggcgtacgtgcaaccgaaggtcagggctttaaagcagccgatatcatcggtattggtattaacggtgtggatgccgtaagcgaactgtctaaagcacaggcaaccggcttctacggttccctgctgccaagcccggatgttcatggctataaatccagcgaaatgctttacaactgggtagcaaaagacgttgaaccgccaaaatttaccgaagttaccgacgtggtactgatcacgcgtgacaactttaaagaagaactggagaaaaaaggtttaggcggtaagtaa

SEQ ID NO: 261737 - DNA, 504 bp, Klebsiella pneumoniae
atggcaaccgctggaatgcttctcaaactcaactctcaaatgaaccgcgagttttacgcatccaatctctaccttcacctgagtaactggtgttctgaacagagtctgaacggcaccgccactttccttcgcgcccaggcacagagtaatgtgacccaaatgatgcgcatgtttaactttatgaagagtgtcggcgctacccccatcgttaaagccattgatgttcccggtgaaaaactgaactctctggaagaactgttccaaaaaacgatggaagaatacgagcaacgttctagtacgttggcacagttagccgatgaagcgaaagaactgaatgatgattcaaccgtcaatttcctgcgcgatctggaaaaagaacagcagcatgatggtctgttgctgcaaaccattcttgatgaagtgcgcagtgcgaaacttgcgggtatgtgccctgtgcagaccgaccaacatgttctgaatgtcgtgtcacaccagctgcattga

SEQ ID NO: 261738 - DNA, 252 bp, Klebsiella pneumoniae
atgtcccagccgctgaatgccgatcaggaactggtttctgatgtggttgcttgccagttggttatcaaacaaattctggatgttctcgatgtaatcgcgcccgttgaagttcgtgaaaaaatgtccagtcagctgaagaatatcgactttactaaccatcccgccgccgcagacccggtcaccatgcgggcaatccaaaaagccatcgcgttgattgaactcaagtttaccccacagggtgaatcccattaa

SEQ ID NO: 261739 - DNA, 324 bp, Klebsiella pneumoniae
atgagacttctgattctgactctttcattaataacgctggcggggtgtacggttactcgccaggcccatgtgagcgaagttgacgcggcaacaggtattgtacggttggtttatgaccaggcttttttgcagcatgcccgtaccgatcgttatgtcagtcgcgggatcgccgatcgcgcatgccagcaggaaggctatacccacgctatcccctttggtcagccagtaggcaactgtagcctttttgcgggttccttatgtttaaatacggaattcactttgtcatatcagtgccatcattccgccttccctgtctttctctaa

SEQ ID NO: 261740 - DNA, 498 bp, Klebsiella pneumoniae
atgctgaaaccagaaatgattgaaaaacttaatgagcagatgaacctggaactgtactcttcactgctttatcagcaaatgagcgcctggtgcagctatcataccttcgaaggtgctgccgcgttcctgcgccgccacgcccaggaagagatgacacatatgcagcgtctgtttgattacctgactgataccggaaacttaccacgtattaataccgttgaatctccgtttgctgaatattcttcacttgatgaattattccaggaaacctataaacacgaacaattaatcacgcagaaaattaacgaactggctcatgctgcaatgaccaatcaggactacccaacatttaatttcctgcaatggtatgtttctgagcagcatgaagaagagaaactgttcaaatcgattattgataaattaagcctggcaggcaaaagcggcgaaggtctgtattttatcgacaaagaactctctaccctcgacacacaaaactaa

SEQ ID NO: 261741 - DNA, 240 bp, Klebsiella pneumoniae
atggactctattcacggtcatgaagtgttaaatatgatgattgaatcaggcgagcaatatacgcatgccagtctggaagctgcgattaaagcgcgttttggtgaacaggcacgttttcacacctgctcggcagaagggatgacagcgggagagctggtggcgtttctggcagcaaaaggcaaatttattccttctgaagacggtttttcgaccgatcagagtaagatttgccgtcactga

SEQ ID NO: 261742 - DNA, 1212 bp, Klebsiella pneumoniae
gtgaaaaacagaaccctgggaagtgtttttatcgtggcgggaaccacaattggcgcaggcatgctggcaatgccgctggctgcggcaggtgttggttttagcgtcacgttaatcttgttgattgggctttgggcgttgatgtgctacacggcgctattactgctggaggtgtaccagcatgttccggcagataccggcttgggcacgctggcaaaacgctatctgggacgctacggtcaatggctgacgggcttcagtatgatgctcttaatgtatgctctgactgcggcatacatcagcggtgctggtgaattgttggcctccagcatcagcgactggacaggtatttcaatgtcggcaaccgctggcgtgctgttgttcacttttgttgccggtggcgtggtttgtgtcggaacttcgctggtcgatttgtttaaccgttttctgttcagcgccaagattatttttctggtggtaatgctggtactactgctaccgcatattcacaaagtgaatcttttaaccctgccgttgcaacaggggctggcactatctgcaatcccggtgatttttacgtcgtttggttttcacggtagcgtgccgagtattgtcagctatatggatggcaacattcgtaagctacgctgggtgtttataaccggtagtgcgatccccctggtggcatatattttctggcaggtggcgacgcttggcagcattgattcaacaacctttatgggattgctggctaatcatgccggattaaacgggctgttacaggcgttacgcgaaatggtggcctctccgcatgttgagctggcagtgcatttatttgctgatttagccctcgccacgtcatttctcggcgttgcgttaggcttatttgattatctggctgatttgtttcagcgttcaaataccgttggtggacgattgcaaactggtgcaattacctttctgccgccgttggcgtttgcactgttttatccacgaggatttgtgatggcgctgggttacgccggtgtggcgctggcggtattggcattgattatcccttcactattgacctggcaaagcagaaagcacaatcctcaggcgggttaccgggtgaaaggtggtcgtccggcgctggtggtggtgtttctctgtggtattgctgtgattggcgtgcaatttttgattgcggcagggttgttaccagaagtggggtga

SEQ ID NO: 261743 - DNA, 666 bp, Klebsiella pneumoniae
atgaaaacgggaccgttaaacgaaagtgagttggaatggctggacgatattctgaccaaatacaacactgaccacgccatccttgatgtggcggagctggacggtttattgacggcggtgttgagttctccgcaagagattgaaccggcacagtggctggttgccgtgtggggtggggctgactatgtgccgcgctgggcgtctgagaaagagatgacacgctttatgaacctggcctttcaacatatggccgataccgcagagcgtctgaacgaattcccggagcagtttgagccgctattcggcttgcgagaagttgatggcagcgagctgacgattgttgaggagtggtgctttggctatatgcggggcgtggcactttctgactggtcaacattgcccgattcgttaaaaccagcgctggaggcgatagcgctgcacggtactgaggacaacttcgagcgggtagagaagatgtcgccagaagcgtttgaagagagcgtagatgccattcgactggcggcgcttgatttacatgcatactggatggcgcatccgcaggaaaaagctgttcagcaaccgatcaaagcagaagagaaaccggggcgtaacgatccttgtccgtgcggcagtggtaagaaatttaagcagtgctgcctgcattaa

SEQ ID NO: 261744 - DNA, 420 bp, Klebsiella pneumoniae
atgaaaaaagtattagctctggtcgttgccgctgctatgggtctctcttccgccgctttcgctgctgacgcagtaagcaccactcaggcaccggctgccacccacagcacggctgccaagaccacccatcacaaaaaacaccacaaagccgcggcaaaaccggccgcagagcagaaagctcaggctgccaaaaaacacaaaaaagcagaagctaaaccagccgctgctcagaaagcccaggccgctaaaaaacacaaaaaagtagcagctaaaccagctgctccgcagaaagctcaggcggcgaaaaagcatcacaaagctgcggctaaaccggcagcccagaaagcgcaggcagcgaaaaaacaccacaaaaccactaaacaccaggccgctaaaccgactgcacagccggcagcataa

SEQ ID NO: 261745 - DNA, 1119 bp, Klebsiella pneumoniae
atggcccgctattatttttcgtgccccaaaatttattttggtgaagaggcaataacctctctatgccaatttaataataaacgagtcggtattgtcaccgatgattttatgatgtcatcaggtaaaactcgttatttaataagccatatgcctgaggcatcggtatgcattttcggcgaggttactccggatccagatattgatattctgacttccggcgcggcgcgttttaaagcctttaagcccgacgttattatcgccctcggcggcggctcgtcgctggacgctgcgaaaggaattaaagtcacattggaagagtattttggagatcatcaaatcgatctcattgctattcccacaaccagcggatccggctctgaagtgacgtcctacgcgatcatctctgatccgcaaaatggccgcaaatatccgttgatctccgggcaactggtgccggaaatcgccattctcgatcctaacctagtgttaaccgcgccgcgtcatgtcgcggtagataccggcatggacgtgctgacccatgccattgaagcctttgtctctactggctcaaatgactttagcgatgcgctggcggaaaaagccatcgcgttgacctggcgctatctgccgcaggtgtttaacgacgaaaaagacattgcggcgcgcacccacatgcacaatgcctcctgtatggcaggcatggcatttaactccgccgggctggggttggtacacggcatggcacacgccatcggcgggatgctgcatattcctcatggcaaaattaacgccatgctgctgccgattgtcatcgacttcaacagcaaacgggccagcactgaaacccgcgatcgctatcaccgttgcgcgcaaatcataggcattgaccatgcggtaccggagcaggccatcgcgctgatgactcaggagatccgccagatcaatcgccatttctgcatccccgtcactctcagcgaactgggtatcgaccgtgcaaaaatcatcgagttgcgcagcgcactggtgaattcgacgctggccgacggttgtaccgcgtcgaacccgcggcaggtgacgacgcatgatgtcgaagggttgatcgacctgattaccggctag

SEQ ID NO: 261746 - DNA, 687 bp, Klebsiella pneumoniae
atgaattacaccgaacaacaagccgagtggattacccaacaaattttgcaggaacttgccaccagtaaaaaaacggcagcgcctgctgccgcgcccgtcgcgctgaatattccggtgggcgtgtccaaccgccatgttcatctgtgccgtgaagatatggacattctgtttggctacggctctacgctaacccgttctaaagcgttgaaacagcccggtcagtatgccgccgaagagatggtgacgctgcgcgggccaaaaggcgagctcaacaaagtgcgcgtgttagggccactgcgtaatgccacgcaggtggaaatctctgtggccgacggctttgcgctgggcactaaagctccggtgcgcatgtcgggggatctgctggattcgccgggcattgaaatcatcggtccgaaagggcgggtggtgaaacacaacggcatgattgtcgcctggcgccatatccatatctcgcccgaagaagccgaattgcacggcctgcatgacggaatggaaatcgatgtgcaaacaaacggtccgcgcggtggtgtgctcagccatgtagtggtacgcgtcacggcggatgcagtgctggaactgcatattgatatggaagaagctaacggcgtcggtctgcgtaatggcgataccgttcgcggcataaaacaggctgcgcgccatggctaa

SEQ ID NO: 261747 - DNA, 759 bp, Klebsiella pneumoniae
atgtcggccctactccggcgcgttgaaggtgggggggatctcggtaccgccaatatcgcaatcgtggtgctggatgaagataaccagccggtggcaggggtaatgtatccctccaatgtggtgaaagacggcgtggtggtggattacctgaccgccagccgggtagtagcacgtctcaaacaaattcttgaacagaaacagggctgcacgctggagcgcgcggcgatcgcagtcccaccggggatctctgaaggcaacacaaaagtgatcgtcaacgtagtggagttggcgggttttatcgtgacccaagtactagatgaaccggtagccgctgccagcgcgctgaatattaaaaacggggcggtggtggatgtcggaggaggcaccaccggcatgagcattttgaaaagcggtaaagtgacgttcagtgccgatgagcccaccggtggaagccatatgaagttggtgatcgctggcgcgctgggcttgccttatgccgaggcggaagaaatgaaaaaaaacgggcaggaagcgcaggtctttaccctggtgctaccggtggcccagaaaatggccagcttggtgtcgggatggttcgctacccagcaggtaaaaaatatttatttggtaggtggcgcgagcagcttcagccagtttgccaacgtgttcagtaaacaaaccggtaaaaatgtgattccttcggcagagccactattggtcacaccattaggcatcgccatgaatgcggaccaggggtaa

SEQ ID NO: 261748 - DNA, 705 bp, Klebsiella pneumoniae
atggacaatcaaaccttatcgcaactgctggaccgggtcatcgctgaagtgttggcacaatccgtcgcgcagaaaaatgtctgcgtagtggtgactggtgaggatatctcctcgctgccggaaacgctgaactgccttgaggcgcttgagctggcgggctatcagttgtgggtaaatttttctcacagcgccagccagtcggcgctgaaatctgtctgcatggatgcgctaattcagcgtggttctcgtgctggatttgacagatcgccgcctcactatgaggtgctctatctgcctgcgctctctgtcaacagcatgagcaaaattgcgctgggcattcgcgataatctggcctgtgaaactgtatttcaggcgttacagcaccgtaaacagattatcgccacgctgcatcaacaatgcgtcgatagcgaattaccgatgccactgctgtcttgtctggaaggttacgctcaggtcctagagagctatggcattacgcttttcggtaaacgtgcagcccatgtcaagtcggtgcaaggaagccaatccaccctgacagtagccggtaaaaaacgtttaatcacccagagcgatatccgcctactgaccattggcacagtgctgcgcattgagagcgacacgctgattacccctgctgccagagatgaaatccagcggcgtaatctcactgttatccatggttaa

SEQ ID NO: 261749 - DNA, 270 bp, Klebsiella pneumoniae
atgtacctcgctaaagttactggcgcattggtttccaccaccaaacacgcctcgctgaatggctcaaaactgctgatagtggcgcggctcgatgaaaactatcagccgactgtccatgcccaggtggcagttgatactgtcggcgcgggcaatggagagattgtgatcatcaccaccggcagttcggcgcgtatgagcaacaacaaagatcactcggtgattgacgctgccgtggtgggtatcgtcgacacgctcgaacttaacggttaa

SEQ ID NO: 261750 - DNA, 498 bp, Klebsiella pneumoniae
atgtctgcgaatgaggcttcactcgacaactggattaatgaggctattgccacgcagttaccggaactccggatgtcgctgagcctggaggacagtgaactgctggcaaagttggcccgggaaatggcacagtccagcaatgtatcgatcgtttttagcctagtggatgcctgcggtcagcagcgttttttcttcagcatggataacgccctgctggtcagccataccttggcaccacaaaaggcctggaccgcggtagctctcaaaatgccaactcacgaactggcaacgctggtacagccgggtggtgatttgtacggccttgagaaagaaaaagatatctgctgcttcggcggtggttttccctgctggtcgggcaggcgcttactaggcggcatcggcatcagcggcggcagtgttgaggaagatatgctcatcgcccgccaggcgatggcgcagtttagcgttctgcgttatcccctcacaacaacccgttaa

SEQ ID NO: 261751 - DNA, 1197 bp, Klebsiella pneumoniae
atgtctttagcttgtgtattagtgattaattgtggttcctcatcaatgaaattctccgtcattcctcaggatgcagatcagccgttgctgtcgggcctagcggaacgactgggtattgatcatgctgtcataacgtttaaagaccgagacggccataaatccactgtcgcgctggatgacgccagccatcagcatgcgctcaaagtgctcttcgcgaagctcgacgaacagcaactgttggaagccatcaacgccgttgggcaccgcgtggctcatggcggcagcgacttcaaaagatcagtactggttaccgatgatgtgatcgaaaaagtccgcgcgctgtcggtgctggcccctttgcataaccctgccaacctgattggtattgaagcggctcgggctctgttgcccgcgttgccgcatattgcggtgttcgatactgcgttccaccagaccttgtctccggctgcttacacctatgcgatcccgctggagttccagcaagattatatggtgcgacgttacggctttcacggaacatctcaccgctatattgccgcagaagcgcttgcatcactagatctcgacccggcggatcatggcatcgtgattgcccacttgggcaacggttcatcgctatgtgcggtgcaaaacggcacgagcattgacacctcaatgggtatgaccccgctggaagggctggtaatgggcacgcgctgcggggatcttgattttggtgtcgtcgcatatctggcgaaacgcacaggtcaaacattcgacacgctgtacaaaatgctcaataaccagtccggcctaatggggatttccggcttatccagcgattgccgcacccttcagcaggcgcgtgatgagggccacgaacgggcagcgttagccatcgacgtgttagtacatcgtctcgcacgacatatcggcggccacgtgacctcgcttaaacgcttcgatgcgctgattttcaccggtggaattggcgaaaactcggcgttaattcgagaacttaccgtgcaacgccttcaggcgctgggattggaactggataaagaacgtaaccagcagctgttcggcggacgtagcggactgatttctaaaaccgacaccacgaagattgcggtcatcccaaccaatgaagaaaaaatgattgctatagatgcagcggagattgcccgcacggcataa

SEQ ID NO: 261752 - DNA, 282 bp, Klebsiella pneumoniae; identical to SEQ ID NO: 6593

SEQ ID NO: 261753 - DNA, 786 bp, Klebsiella pneumoniae
atgagagataatcttgttgagcagattatatctgacgtaatgaataaacaaaccgatatctcaccggaagctaaaacagcagcgaatttcgctggttgcggtattacggaatttgtcggcactgcgttgggccacactatcggcctagtgattgccaatgttgataatcaattgcatgaagtcatgaatatcgacaagaaatatcgctctatcggtattcttggcgcacgtactggcgcaggcccgcaaatttttgcggctgacgaagcgattaaagcaaccaacagcgaaattatttctattgagctggcccgcgataccgaaggaggtggcggacacggttgcttaattattttcggtgcgtctgatgtttccgacgtcaggcgtgcggttgaagtggcgctgtctgaaattgaacgcaccatgggtgacgtttatggctcgtcagccggacatcttgaattccagtacaccgctcgtgccagctacgcgctgaataaagcgctgggtgcgccgattggtaaatccttcgggatgacctgtgcctcgcctgcggcgattggcctggtgattgccgacgctgcggcgaaatccgccgtgattgatccggtgggttatgccagcccgtcgcaaggcaccagctttagtaacgaagtgatcttcaccttctccggtgattccggtgcagtacgtcaggcggtgattgccgcgcgtgaagtcggtctacaactgctctccacgttagatccggtggaaattaaatccaccacgacgccatatatctaa

SEQ ID NO: 261754 - DNA, 1518 bp, Klebsiella pneumoniae
atgaatgatattgaaatcgctcaggctgtctcgaccattctgagcaaattcaccaaagcaacaccggatgaagctcccgccacgtcagaagcagcgcgggtcgacgggttggatgaaattgtcgctaaggcgttggcgcagcactcttccgtgcgcgacgccagtgcgatctctcaggtagcgaaggtagcgaatgctagcactggagcattcgataccatggatgaggcgatttccgccgccgtcttggcacaagtgcagtatcgccactgttctatgcaagaccgcgcctcgtttatcaatggcattcgcgatgtcttcctgcaggaagatgtgctgtgtgccctttcccgtatggcggtggaagagaccggcatggggaattacgaggacaaactgatcaaaaaccgcgtcgcagcgctgaaaacgccaggtatcgaagatctgaccaccagcgcggtttccggagacgggggtttaacgttgatcgaatactctgcgttcggagtgattggttcgattacaccaacgactaacccgaccgaaaccattatcaacaacagcataggcatgctggcggcaggcaacactgtggtgttcagtccacatccgcgctcgcgcaaagtgtcgctgtacgcggttgagctgatcaacaacaagcttgcccagttgggcgcaccggctaacatggtggtaacggtgaccaaaccgtccatcgacaataccaacgtcctgatcaacgacccacgtatcaacatgctggtagcgactggcggtccagccatcgtgaaaaccgtgatgtcatcaggtaaaaaagcgattggtgcaggcgcaggtaacccgccagctgtggtagatgaaacggcggatatcgaaaaagcagcccgcgacatcattaagggctgtagcttcgacaacaacctgccgtgcgtggcggaaaaagaggtgattgttgtgaaccaggtagcggactatctgattcactgcatgaagaaaagcggtgcctatctgttgtgcgataagaagttaagtcaacaactgcaatcgttggtgcttaatgaaaaaggcactgggccgaataccgcctttgtcggcaaagatgcgcgctatatcctgcaacaactgggaatccaggttggcgacgatatcaaagtcatcttaattgaggctgagaaaacacatccgtttgtggtgcatgagctgatgatgccggtcctgccggtggtgcgcgtagacaatgttgatgaagccattgagctggcggtgaaagtggagcacggcaatcgtcataccgcggttatgcactccaccaacgtcgaaaagctgaccaaaatggcgcgcctgatccagaccaccatctttgttaaaaatggtccctcttatgcagggctgggggtgggcggtgaagggcatgccacctttacgattgccggaccgaccggcgagggacttacgtcagcgcgttcgtttgcacgccgtcgtcgctgtgtaatggttgaagcgctgaatattcgctaa

SEQ ID NO: 261755 - DNA, 255 bp, Klebsiella pneumoniae; identical to SEQ ID NO: 6590

SEQ ID NO: 261756 - DNA, 576 bp, Klebsiella pneumoniae; identical to SEQ ID NO: 6589

SEQ ID NO: 261757 - DNA, 2553 bp, Klebsiella pneumoniae
atgttagagaaaggcttttctaatccgacagaccgtgttgtaagactgagaaatatgatcctgacggcgaagccgtatgtggaatcagaacgcgcggtgttagcaaccgaagcatataaagaaacagaacaactgcccgcgattatgcgtcgtgctaaagtggtggaaaaaatctttaaccaattaccggtaacaattcgcccagacgaattaatcgttggagcggtaactattaatcctcgctcaactgaaatctgccctgagttctcctacgactgggtggaaaaagagtttgagactatggaacaccgtattgccgacccgtttgttatcccgaaaaagactgctcaggagcttcatgaagcatttaaatactggccgggtaaaactaccagtgctctggcggcatcttacatgtcagaaggcactaaagagagtatggcgagcggtgtattcactgttggtaactacttcttcgggggcgtcggtcatgtcagtgttgactacggtaaagtgctgaaaattggtttccgtggtatcattaatgaagttagccgtgccttggaatcattagatcgcactgaaccaggatatataaagaaagaacagttctataatgcggtgctgatcagttataacgcagcgatccgtttcgcccatcgttacgctgaagaagcatcccgtctggcgcagcaggagagcaatccgacccgtaaacgcgaactggagcagattgctcaaaactgtactcgcgtgccggaatacggtgctaccacattctgggaagcatgccagacattctggtttattcagagcatgttacagattgaatccagcggtcattctatctccccggggcgtttcgaccagtatatgtacccgtatctggagtcggacaaatctatctcgcgtgaattcgcgcaggaactggtggattgctgctggatcaagcttaacgacattaacaaaacgcgtgacgaagtctctgcccaggcgtttgccggttacgcagtgttccagaacctgtgctgtggcggccagacagaagacggtcgcgacgcaactaacgatctgagctacatgtgtatggaagcgactgcccatgtgcgtctgccgcagccatccttctcaatccgcgtatggcagggtactccggatgagtttctgtatcgcgcttgcgagctggtgcgtatgggcctgggcgttccggcaatgtacaacgatgaagtaatcatcccggcgctgcagaaccgtggcatttcgctgcgtgatgcgcgtgattactgtatcatcggctgcgtagagccgcaggcaccgcatcgcaccgagggctggcatgacgccgcgttctttaacgttgcaaaagtgctggaaatcaccctgaacaacggtcgcgttggcaataaacagctaggcccagtgactggcgaactgactcagttcaccagcatggaggacttctacaccgcgttccagaaacagatggcgcacttcgttcatcaactggttgaagcctgtaacagcgtggatattgcccacggcgaacgctgcccgctgccgttcctatcagcactggtcgacgactgtatcggccgtggtaaatctctccaggaaggcggggcgatttacaactttactgggccgcaagcattcggcgtagccgataccggcgactccgtctatgccatccagaaacaggtattcgaagatcgtaaactgtctttgagcgaactgaaaagcgcactggacgccaacttcggttatccggtgggtgcgaacccgcacactccagcggcgaaatcctcgctcaacgagcaggatatctacgatgtggtgaaacgcatcattgaacagcatggcgctctggatccggcagcgattaaaaacgaagtttatcgccagctgacttccggcagtgcagcaccggtgcaatccggcactatgtcccgtcacgaggagatccgtcgtattctggaaaacacaccgtgcttcggtaacgacatcgatgacgtggatttagtagcgcgtaaatgtgcgctgatctactgccaggaagttgagaaatataccaacccgcgcggtggccagttccaggctggtatctatccggtgtctgcgaacgtgctgtttggtaaagacgttgccgcactgccggatggccgtctggcgaaagagccgttggcggatggcgtatctccacgtcagggtaaagacacccttggcccaaccgccgcagccaactcagttgccaaactggatcactttatcgcctccaacggtacgctctataatcagaaattcctgccgtcttctttggctggcgagaacggtctgcgcaacttcagcggcctgatacgtcactacttcgataagaaagggatgcacgttcaatttaacgttatcgaccgcaacactttgatcgaagcccagaaaaatcctgagcaacatcaggatctggtggtacgcgttgcgggctatagcgcccagtgggtagttttagcgaaagaagttcaggacgacataatcagccgtactgagcaacaactgtcgtaa

SEQ ID NO: 261758 - DNA, 918 bp, Klebsiella pneumoniae
atgaataaagttgaatacgaaaccgaaggcgtcatatttaatattcaacgctattctttgcatgatggtccaggcattcgaaccattcctttttttaaaggctgcccgctgtcctgcaaatggtgtagtaatcctgaatcacaacgtcacagcccagagttattatttaaaaagaatgattgcatccgctgtggaaaatgtattgatgcttgcccacaacaggctctttccattactaatgcctggtttatcaatcgcgaccgctgtattcagtgtgggaaatgtactgagatttgccctacccgtgcgctggaaatgaagggcaagcgtatgtcggtaacggcagtgatgcgcgaactggaaaaagaagagaatttataccggcgttcaggcggcgggattaccctgtccggtggtgaaccgctggcgcagccggaatttgcccgcgagttgcttaaagcctgtaaagccaaaggctggcacaccgctattgaaacaagcggcttcaccaccaaagcggtgattgatgaggtatttccctatgtcgatcttgctctgaccgatattaaagccatcgatccggaaatccatgagcgcaacaccggcgtgaataacagagtgattctggagaatctgctgcgcatctcctttttaaccaaagtggttgtgcgtattcctgtgatcccaggagtgaatgacaattcgcaggaaatccataatattgcggagttcgcccgcctgatgcagaacgtcgataccattcacttattgccttatcacagcttcggtgaaaataaatataatctgcttggtcgccagtatccgatgggcgatacaaaaagtatcgaagaagcccaaatggcagagttaaaagcaatggttgaatccttaggttttaactgccatatcggcggttaa

SEQ ID NO: 261759 - DNA, 906 bp, Klebsiella pneumoniae
atgaatagcttagatattgtagttgccttcggcggcggcatatttggtgcggctgttggcgcgctggcggcgtttgaattcgttgggcttctggttatcgccatgacggtagtgcaaattattaccggagcatcatcggactttattacttttccgtttggactgtttggcccgcacaccggcggctttgccgctggggttgcggcgacggcgtatgcagcgaagaaaggcaagctgggttccgggcgtgatatcactgccgggttgagcggtctggcggcttacgatgtgctgctggtaggcggggtttttgggacggttggttacatcatcgcctgggggttgaaccagattccggccttcccgtccggcaatgcttggaccgataccgtggcactaaccgtggtgatttctggcgtggtctcgcgtctggttttcggtaaaactggcctgtttggaaaaccggagcagggaattcgtcactgctatccgccgcaggataagtgctggataccttaccatagccgcattccgcagctttccgtgctgggcttgggtattggcttgatggcaggctttttaggcctgaagtttggcggcaacggcgcgctgctggcgtttggtatttccgcgttctcactgattttcctgcatttcaatactcaggtaccggtgtcacatcatatttcgctgcctgccgcgttggtagcggtgccatcaggtagcctgatttgggctgctatcgttggcataatttgcgcgatattgggtgaactgatgtcgcgtatcttcctgatccacggcgatacacatattgacccgccggcgatggtcatcaccattatgaccacgatgattaatctgttggcgaccattggattatttaccttggttcccctgttttaa

SEQ ID NO: 261760 - DNA, 540 bp, Klebsiella pneumoniae
atgatgattaatgaagcacaagcgcaggcaactgcgaccagcggcagaggagacggacagtatccgtcagggctgcatgatggcgctgaaatcagcacggcggcgggtgggcaaacgaaagcggaagtgccgctgacgatggaagcggtgataacgagagaaaacctgatgctggcttatcagcgcgtgctggaaaacaaaggcacggcgggggtggataacctcagcgtggcggagttgaaaccgtggctgaagaagaactggcgcagcgtcaggcaggcattgattgacggaaactaccagccgcgggcaatacgccggatggatatcccgaagccggatggcggcgtgagaacctcaggcatcccgacggtggtggacaggcttatccagcaggcggtgcaacaggcacagcgttacatacggggtggcaaacggtgggtggtggatatggatctggagaagttcttcgaccgggtggatcacagactcctgatgacgcgtctggccagaacgataaaggacaggcgggtgctgtga

SEQ ID NO: 261761 - DNA, 483 bp, Klebsiella pneumoniae
atgctgcagggcggcccactgtcgccgttactgtcgaacatcctgctggatgaactggataaagaactagagcgtcgtggacacagcttctgccgctacgcagacgactgcaacatctacgtaagcagccggaaagcgggcgaccatctgctgaagaacatcagggcgttcgtggagaacaaactgaaggtgaatgagaagaagagcgcggtggcgcgcccgtgggatcggaagttcctcgggtacagtgtgacatggcacaaacaggcgaagctgaagatagccctgacgagcgtgaacaggctgaaggagaaagtccacagtctgacgacgggaaaccggagcaaatcagtgaaagcgacaatcaatgctctgacaccagtgctgtgtggatggataagctacttcaggctgacggaagtcagaggagtgctggaggagctggatggctggatcaaacggaaactgcgttgcttgttgtag

SEQ ID NO: 261762 - DNA, 189 bp, Klebsiella pneumoniae; identical to SEQ ID NO: 6583

SEQ ID NO: 261763 - DNA, 1230 bp, Klebsiella pneumoniae
atgaagaataaatacaaattaaatgagtttttggatgtaaaacgccttcagaccctgcaggacaacttttcaaaatcaatgatgatcgcgctcgtggttgtggatgagaatggtatcccagtcactaagcccagcggtttttcagacttctgcatgcgttcgcgtctcaacccgacactggcgcaccactgttatgaaagcgacaacgctggtggccgtgccgcgatgcacgctcgcaaaccggtggtttatcgctgccactgcggttttgtcgaattcgctgtcccaatcatgattaacgatcattatctcggtgcttttatttccggtcaggtaaaagtcgaagaagagaaagaacagagcatttcctatattctgaataataatgacgtctggaaagataatccttggttaattaatttgcaccagaatacacgtcgcatgccgtatgagcgttttgagtctactgcctcgacgttactacacgtatcgtcttatctggtcgaacaagcgcacaccaataatatccaacgcgaacttcgtaaaaaggatcttgcactggctaatgagttaagaaaacgtgtagagatagaacgctcactacatgaagctgaatttaaagcgctctcttatcagataaatccgcactttttatttaacgtattaaataccattggccggttagcttttcttgaagatgcgcagcgtaccgaaacaatggtgcacgatttctctgacatgatgcgctatttgttacgtaaaaatagtcacggcctgattactctgcgtaatgaaataaattacgtcaacaactatatgtcgatccaaaaagtgcgtatgagagaccgtttcgattacctgtgcgatatcccggaaaaatatctggatgtagtctgcccgtttttgatcctgcaaccgctggtggaaaacttctttaactacgtagtggagccaagggatagcaatagtcatctgctgatccgtgccacggacgatggcctgaacgtgattattgaagtcactgacaatggcgacggcatcgcaccagataccattaatcgcattttatcaggcgaccaaaaattgcaaaaaggcagtattggtattaacaacataaaaaatagattgaagttgttatttggcgagagctatggcttggaaataatgagccctaacaaacccaggatgggtacaaccattaaacttcggttcccaatgcaggaagcctga

SEQ ID NO: 261764 - DNA, 1056 bp, Klebsiella pneumoniae
atgtttaccattgttatcgttgaagatgagcccatcgaattagaatccctgcggcagattatctcccagtgtgtggaaaacgctgcgatccatgaagcctcaaccggtaaaaaagcgattcacttaattgaccaactgagtcaaatcaatatgatcttagtggatattaatattccgttgccgaacggtaaacaggtgattgaatatctgaagaaaaaaaacagcgatactaaaatcatcgtaatcacggccaatgatgactttgatatagtacgcagcatgtacaaccttaaagtggatgattatctgctcaaaccagtgaaaaaatgtatcttgaccgacaccatcaaaaaaaccctagcattcgacgaaggagaaaatgaaaaatcccgcgccctaaaacagaaagtgttcgccatgatagacgattgcgattacacccagtggcacaactttatttttgacacgatcaacggtgcctgtccggtggatatgatagaagaggataagcgcaaagacgtgatcgattttctggaaatagttagccagtatatgaccgccaaaggggaaaagttaatgccgactaaccgtaaagtcgccgcgctgatcaaagacatcaaccagtatggcatgatggaaagccgctatttccgcatcatgatcagcctgctgaccattagcgaagaactgtttgattacgcattaaaaggctatacaggcaatatcgattttatcgaacgagcgaaattccatattgagaaaaatattctcagaaacttgacgctcgatgacgtggcagcaaaatcgtttgtcagtgcctgctatttgagccgtacctttaagaaaattaccgggttcgggttttcgaactatattgccacgcgtaaaattactatcgccaaatcgttattgcggttcagtgacttacaagtaaataccattgcgctggaactggcataccaggattcaaactatttttgccgcatcttcaaaaaagatactggcatgaccccctctgattatcgaaaagtcgtgtccccgggaattacacggtga

SEQ ID NO: 261765 - DNA, 1152 bp, Klebsiella pneumoniae; identical to SEQ ID NO: 6580

SEQ ID NO: 261766 - DNA, 546 bp, Klebsiella pneumoniae
atgtctgggaaaagtttaggcttaatcgaaaccgtcgggatgtctgcggcggtagaagccgccgatgccgcaatgaaatccgctaacgttagtctggtaggctatgaattgacgaaaggcggcgggatggtgaccgtgaagctggaaggggaagtgggcgcaattaacgcggcggtagcggcagccatcagcgcggcaagccgggttggcgaggtgtatgcccataaggtgatcgcccgcaccgcgcagcatatcgagcagattattcactctaaagtgaccgccggcgtcgcagaacctcaacctgaagtgcctgctgcacaaccgacactgcaggctgaaaacgcgccttcacagacattcccggtggttaaccttgatacgtcaatcagcgcatcctgtatggatgtcactgatgaaacgctgaagtccatggagcagcatcaaccggttaaaccctcaatagaaaacactaaacctacaaaatctgatgtaccgcaggaggcagcaaagaaaggtcctcgttccagcggcaagaaaaaataa

SEQ ID NO: 261767 - DNA, 651 bp, Klebsiella pneumoniae
gtggtgcggcacacaaaatttgcagcggaagaaacccgcaaacaaatcctggatgcggcagagttctgcttttgtgagacgggcttttcgaagacgacactggagatgattgcggtgcgcgcaggttgtactcggggggccatatactggtatttcaacgaaaaaaaagatcttctgcgacaagtcatcgagcgggtaccactatcattatttgatgagcttacagccatcaaaaatgggagagtttctgaaccggttaaagcgatgtatcgttgcttatcacgtagcctgattaaattacaatataatgtacacttacggaatgtaatttatattgtgtttttttgtgaagaatgtccggatgatataagaataaatttcttacaaaaaatggtggatgtcaataattttgtgaaattactatgttatattttcgaaaaaggtaagttatatagagaaatatgttcggaaattcgtagtgaggctctggcgttcctgcttttttctttgtttacgggggtggtgcgaagttgcattctgcaacctgataataaatcccttttcagagagggttgcatagtactggagttgacccaatcaaccttcacaggcatcgataaaaatgaacgctactataaaaaacagcgctga

SEQ ID NO: 261768 - DNA, 759 bp, Klebsiella pneumoniae; identical to SEQ ID NO: 18448

SEQ ID NO: 261769 - DNA, 237 bp, Klebsiella pneumoniae; identical to SEQ ID NO: 9729

SEQ ID NO: 261770 - DNA, 297 bp, Klebsiella pneumoniae
atgttgggtggagcggacaatccaaatggtgaattaccgtcttatatcactggcgctgacacctgtagtttgtatacacaatccctggcattgaaacacacatatgaagtgtacttcggatatgaccgtacgctcaggaagtacggcagattccgtcaaaaattacctgtaaagacagacttcagaaaaaacagtgctcgccgcagaccggtgaccgggcgaagcccgcgaaccggcgaggaagcgcaatgtatctgtagttacagggagcaggtacgccctgaagccctttcataa

SEQ ID NO: 261771 - DNA, 246 bp, Klebsiella pneumoniae
atgcgaattgaagtcaccatagcgaaaacttctccattgccagctggggctattgacgccctggctggcgaactttcccgccgtattcagtatgcgtttcctgataatgaaggccacgtatcggtacgttatgccgcagcgaataatttatcggttattggcgcaacaaaagaagataaacagcgcattagcgaaattctccaggaaacgtgggaaagcgccgatgactggtttgtcagcgaataa

SEQ ID NO: 261772 - DNA, 1047 bp, Klebsiella pneumoniae
atgactgcaccatcccaggtattaaagatccgccgaccagacgactggcaccttcacctccgcgatggcggcatgttaaaaactgtcgtgccgtataccagcgaaatttatggacgggctatcgtaatgcccaatctggctccgcccgtgaccaccgttgaggctgccgtggcttatcgccagcgtattcttgacgccgtacctgccgggcacgatttcaccccgctgatgacctgttatttgacagattcactagaccctaatgagcttgagcgtggatttaacgaaggcgtgttcaccgctgccaaactttacccggcaaacgcaaccactaactccagtcacggcgtgacgtcagttgacgcaatcatgccggtacttgagcgcatggaaaaaatcggtatgccgttactggtgcatggtgaagtgacacatgcagatatcgacatttttgatcgtgaagcgcgctttattgaaagcgtgatggaaccgctgcgccagcgcctgactgcgctgaaagtcgtttttgagcacatcaccaccaaagatgctgccgactatgtccgtaacggaaatgaacggctggctgccaccatcactccgcagcatctgatgtttaaccgcaaccatatgctggttggtggcgtgcgtccacatctgtattgtctacccatcctcaaacgcaatattcaccaacaggcattgcgtgaactggtcgccagcggttttaatcgcgtattcctcggtacggattctgcgccgcatgcacgtcatcgcaaagagagtagctgcggctgcgcgggctgcttcaatgccccaaccgcgctgggcagttacgctaccgtctttgaagagatgaatgctctgcagcactttgaagcattctgttctgtaaacggcccacagttctatggcttgccggtcaacgacacattcatcgaactggtccgcgaagagcaacaggttgctgaaagcatcgcattgactgatgacacactggtgccattcctcgccggggaaacggtacgctggtccgttaaacaataa

SEQ ID NO: 261773 - DNA, 561 bp, Klebsiella pneumoniae
atgaacaagtttttatttgccgctgcattgatcgtcagtggcctgctcgttggctgtaatcaactcacccaatacaccatcaccgaacaagaaattaaccagtcgcttgcgaaacataataatttctcaaaagatatcggtttacccggcgtggctgacgcccatattgttctgacaaacctgaccagccaaattggtcgcgaagagccgaataaggttaccctaaccggagacgccaatctggacatgaactccctgttcggtagccagaaagcgaccatgaaactgaagctgaaagcgctgcccgtgtttgataaagaaaaaggtgcgatcttcctgaaagagatggaagtggtcgatgcgacggtacaaccggaaaaaatgcaaacggtgatgcaaacgttgctcccctatttgaaccaggcattacgcaattactttaaccagcaacctgcttacgtcctgcgcgaagatggcagccagggcgaagcaatggcgaagaaactggcgaaaggcattgaagtgaagccaggcgaaattgtcattccgtttactgattaa

SEQ ID NO: 261774 - DNA, 648 bp, Klebsiella pneumoniae
gtgaagctatacatttacgatcactgcccttactgcctcaaagcccgcatgattttcggcctgaaaaatatccccgtcgaattacatgttctgctcaacgacgacgcagaaacacccacccggatggtcggtcaaaaacaggttcccattctgcaaaaagatgacagccgctatatgccagaaagcatggacatcgttcactatgtcgataaactcgacggcaaaccgttactgaccggcaaacgttcccctgccattgaagagtggctgcgcaaggtcaatggctacgccaacaaactgctgttgccgcgttttgccaaatcggcatttgatgagttttctactcctgccgcgcgcaaatatttcgtcgacaagaaagaggccagcgcgggtaattttgccgacctgctggcccactctgacggtctgattaagaatatcagcgatgatttacgtgcgctggacaaactgatcgtcaaaccgaacgccgtgaatggcgaactttcggaagatgatattcagctatttccgctactgcgtaatctgacgctggtagccggaatcaactggccaagccgcgttgctgattaccgcgataatatggcgaaacagacacaaatcaatttgttatcatcaatggcgatttaa

SEQ ID NO: 261775 - DNA, 1209 bp, Klebsiella pneumoniae
atgtcccgcgtgtcgcaggccaggaacctgggtaaatatttcctgctcatcgataatatgctggtcgtgctggggttctttgttgtcttcccgctgatctctatccgcttcgttgatcaaatgggctgggccgccgtaatggtcggtattgccctcggcctacgccagtttattcagcaaggtctgggtattttcggcggagcaattgccgaccgctttggtgccaaaccgatgattgttaccggtatgctgatgcgtgccgccggattcgccacaatgggtatcgcccacgaaccgtggctactgtggttttcatgcctgctctcgggactcggcggcacgttgtttgatccgccgcgttcggcgctggtggtgaaactaatccgtccacaacagcgtggtcgttttttctcgctgttgatgatgcaggacagtgccggtgcggtcattggcgcattgttggggagctggctgttgcaatacgactttcgcctggtctgcgccacaggggcagttttgtttgtgctgtgtgcagcgttcaatgcgtggttgttaccggcatggaaactctccactgtacgcacgcccgttcgcgaaggcatgacccgcgtgatgcgtgacaagcgttttgtcacctatgtcctgacgctggcgggttactacatgctggctgtacaagtgatgctgatgctgccaattatggtcaacgacgtggcgggcgcgccctctgccgttaaatggatgtatgccattgaagcgtgtctgtcgttaacgttgctctatcctatcgcccgctggagtgaaaagcattttcgtctggaacatcggttgatggctgggctgttgataatgtcattaagcatgatgccagtgggcatggtcagcggcctgcaacaacttttcaccctgatttgtctgttttatatcgggtcgatcattgccgagcctgcgcgtgaaaccttaagtgcttcgctggcagacgcaagagctcgcggcagctatatgggatttagccgtctgggtctggcgattggcggcgctattggttatatcggtggcggctggctgtttgacctgggcaaatcggcgcaccagccagagcttccgtggatgatgctgggcattattggcatcttcactttccttgcgctgggttggcagtttagtcagaaacgcgccgcgcgtcgtttgctggaacgcgacgcctga

SEQ ID NO: 261776 - DNA, 585 bp, Klebsiella pneumoniae
atgtttggctatcgcagtaacgtgccaaaagtgcgcttaaccacagaccgactggtcgtgcgtctggtgcatgatcgtgatgcctggcgtcttgcggattattacgcagagaatcgccatttcctcaagccctgggagccagtgcgcgacgaaagccactgttatccatcaggctggcaggccaggctagggatgattaacgaatttcataaacaaggttcagctttctactttggcttattcgacccggacgaaaaagagattattggcgttgccaatttttccaatgttgttcgtggctcttttcatgcctgctatctcggttattcgattgggcaaaaatggcagggcaaaggactcatgtttgaagccctgaccgcagccattcgttatatgcagcgcacccaacatattcatcgcattatggctaattatatgccgcacaataaacgcagcggtgatttactggcgcgactgggttttgaaaaagaaggctatgcgaaagactatctgttgattgatggacaatggcgcgatcacgtactgacggcattaactaccccagactggacgcccggccgctaa

SEQ ID NO: 261777 - DNA, 648 bp, Klebsiella pneumoniae
atgaaatatcaacttactgcccttgaagctcgcgtgattggttgcttgctggaaaagcaggtgaccacgccggagcaatacccgctctcagtcaatggtgtagtcacggcctgtaatcagaaaacgaaccgtgaaccggtcatgaatctgagtgaatctgaagtgcaggaacagctggataatctggtcaaacgtcattatctacgcacggtgagcggttttggtaatcgggtcaccaaatatgagcaacgtttttgtaattcagaatttggcgatctgaaactgagcgccgcagaagtggcgttaatcaccacgttgttattgcgtggtgcccagacgccgggtgaactgcgcagccgcgccgcgcgaatgtatgaattcagcgatatggcggaagttgagtcgacgctggaacaactggcgaatcgcgaagatggtccttttgtggtgcgtctggcccgcgaaccgggtaaacgcgaaagccgctacatgcatcttttcagtggtgaggttgaagatcagccggtggtaacggctatgtcgaacgcggttgacggtgatttacaggcccgcgtcgaagctctggaaatcgaagtggcagaactgaaacagcgtcttgattcgttgctggcccatctgggagattaa

SEQ ID NO: 261778 - DNA, 924 bp, Klebsiella pneumoniae
gtgaaaaaattacgtatcggcgtagtggggttaggcggcatcgcgcaaaaggcgtggttaccggtgctggcggcagcgtctgactggacgttacaaggtgcgtggtcgcctacgcgcgcgaaagccctgccaatttgtgacagctggcgcattccttatgccgattcgttatccagccttgccgccagttgcgatgcggtttttgtgcattccagcaccgccagccactttgacgtggtcagtacgttactcaatgcgggggtacatgtctgtgtcgataaaccgctggcagaaaatctgcgcgatgctgaacggctggtggaactggcggcgcggaaaaaactgacgttgatggtcggttttaaccgtcgtttcgcaccactctacggtgagttaaaaaagcaactcgccaccgcagcctcgctaagaatggataaacatcgtagcaatagcgtcgggccacacgatctttatttcacgttgctggatgattatctgcatgtggtggataccgcgctgtggttgtcgggcggtaaagcctctctggatggcggtacgctactgactaatgacgctggcgaaatgctgtttgccgagcaccatttttcggccggtcctttgcagatcaccacctgtatgcatcgccgtgccggaagccagcgtgaaaccgtgcaggccgtgactgacggtgcgctcatcgacattacggatatgcgcgaatggcgtgaggagcgtgggcagggtgtagtgaataaaccgattcctggttggcagagtacgcttgagcaacgtggatttgtcggctgtgcgcggcacttcattgaatgcgtgcaaaatcagacagttccgcaaaccgccggcgaacaggcagtgctggcgcaacgtatcgttgacaagatctggcgcgatgcgatgagtgaataa

SEQ ID NO: 261779 - DNA, 1536 bp, Klebsiella pneumoniae
atgaatttattaaaatcgctggccgccgtcagctcgatgaccatgttttcgcgtgtgcttggcttcgcacgtgacgcaattgtcgccagaatctttggcgcagggatggcaaccgacgcctttttcgtcgcttttaaacttcctaacttgttacgccgtatctttgccgaaggggcattttcccaggcatttgtaccgattctggcggaatacaaaagcaagcagggtgaagacgccacgcgggtctttgtctcgtatgtttctggtctgttgacactcgcgctggcggttgtgacggtcgcaggcatgctcgctgcaccttgggtgatcatggtgaccgcgccaggcttcgctgacacagctgacaaatttgccctgaccagccagctactaaagattacctttccctatatcttgctgatctccctggcgtcgctggtgggagcgattctgaatacgtggaaccgcttctcgattccggcgtttgctccaacactgcttaacatcagcatgattggtttcgcgctgtttgccgcaccgtactttaacccaccggtgctggcgctggcgtgggctgttacggtcggcggcgtcctgcagctggtgtatcagctaccgcacctgaagaagatcggcatgctggtcctgccgcgcattaacttccacgatgccggagcaatgcgcgtggtgaaacagatgggaccggcgatccttggcgtctctgtgagtcagatctccttaatcatcaacaccatttttgcctcgtttcttgcttccggttcggtgtcttggatgtattacgccgaccgcttaatggagtttccgtccggtgtactgggcgtggcgcttggcacgattttgctgccgtcgctgtcgaaaagttttgccagtggcaatcatgatgaatacaaccgtttgatggactgggggctgcgtctttgtttcctgttggcgctgccgagtgcggttgcgttgggcattctttcaggtccgttaaccgtttcgctgttccagtacggtaaatttaccgcctttgatgcgctgatgacccagcgggcgttaattgcctactcggtgggtttgattggcctgattgtagtgaaagtgttggctcctggcttttattcccgccaggacattaaaacgccagtgaaaattgccatcgttacgctgattttaacgcaattgatgaaccttgcgtttatcggtccgttgaaacatgccgggctgtcactttctattggtctggcggcgtgtctgaatgcttcgctgctttactggcagttgcgtaagcagaaaatctttaccccgcaacctggctggatggcgtttctgttgcgtctggtggtggcggtactggtgatgtcgggcgtgcttttaggtatgttacatatcatgccggagtggtcattgggtaccatgccctggcgcttactgcgtttaatggcggtcgtgctggcggggattgctgcgtactttgctgcactggcggtactgggcttcaaagttaaagagtttgcccgccggacggtgtaa

SEQ ID NO: 261780 - DNA, 417 bp, Klebsiella pneumoniae
atgacgcgtcttgcagagatcctcgaccagatgtccgctgtgcttaacgatctcaaaacggtaatggatcaagagcagcaacatctctctatggggcagatcaacggcagccagttgcaatggattacagaacaaaaaagctctctgctggcgacgctggattacctcgaacagttacgcaggaaagaacccaatgcagcaaatagcgttgatattagtcaacgctggcaggaaattactgtgaaaacgcagcaactacgccaaatgaatcaacataacggctggttactggaaggacagattgagcgcaatcaacaggcgctggaaatgttgaaaccgcatcaggaaccgacgctatatggagcgaacggtcagacctcaacaacccatcgcggcagtaaaaagatttcgatctga

SEQ ID NO: 261781 - DNA, 294 bp, Klebsiella pneumoniae
atgagtattgatcgcacttcgcctctgaagcccgtaagcaccgttcaaccgcgcgaaaacactgacgcgccggtaacgaacacccgggcggcaaaaacaaccgcctccaccagcaccagtgtgacgttaagcgacgcgcaagcaaaactgatgcaacccggcagcagtgatatcaatcttgaacgtgtcgaagcgttaaaactggcgattcgtaacggtgaactaaaaatggacaccggcaaaattgccgatgcgctgatcaacgaagcgcagcaagacttgcagagtaactga

SEQ ID NO: 261782 - DNA, 660 bp, Klebsiella pneumoniae
atgctggcaataaaacgtagcgtggcgatcatcgcgatactgttcagtccgttaagtgcggcgagcaatctcacatcgcaattgcacaccttttttagcgcccagctcgcgggggtaagtgatgaggttcgtgtttctattcgtacagcgcccaatctactaccgccgtgcgagcagccattgctttcgatgagcaataattcccgcctgtggggcaatgtgaatgtgttggcacgctgcggtaacgacaaacgatatttacaggttaatgtgcaggccacaggaaattatgtggttgccgcaatgcccattgtgcggggaggaaagctggaagctggcaatgtcaaactgaaacgcggacggctggacaccttgccaccgcgtacggtgctggatatcaatcaacttgttgatgccgttagcctgcgcgatctatcacccgatcaacctatccagttaacccagtttcgccaggcatggcgggtaaaagcgggacaacgcgtcaacgtgatcgccagtggtgatgggtttagcgccaacgcagaaggtcaggcgctgaacaatgcagccgtcgcacagaatgcgcgggtgcgcatggtatcgggacaggtggtcagcggcgttgttgatgcagatgggaatattcttataaacctgtaa

SEQ ID NO: 261783 - DNA, 417 bp, Klebsiella pneumoniae
atgctcgataagctcgacgccgccttacgttttcaacaagaggcgctcaatctgcgcgcccagcgtcaggaagtgctggcagcaaacatcgccaatgccgatacccctggttatcaggcgcgcgatatcgattttgccagtgaacttaaaaaagtcatgcaacgtggacgggatgcaacaagcgtggttgcactgacgatgacctcaacgcaacacattccggcgcaggcgctgacacctcctaccgcagaactgcaataccgtattccggaccagccttcgcttgacggtaataccgtcgatatggatcgcgaacgcacccagtttgccgataacagcctgcaataccagatgagccttagcgcgttgagcgggcaaatcaaaggcatgatgaacgttttacagagcggaaattaa

SEQ ID NO: 261784 - DNA, 405 bp, Klebsiella pneumoniae
atggcactgctgaatatttttgatatcgccgggtcggcgttaactgctcagtcccagcgcctgaacgtggcggccagtaatctggcgaatgctgatagcgtgaccggtcccgatggacagccatatcgggcaaaacaggtggtatttcaggttaacgctgcgccaggtgctgcgacaggcggcgtaaaagttgccgatgttatagaaagtcaggccccggacaaactggtttatgaaccgggtaatccgctggcggatgcaaagggctacgtgaaaatgccaaacgttgatgtcgtcggggagatggttaacaccatgtcggcgtcacgcagctatcaggccaatgttgaagtgctcaacacggtgaaaagcatgatgctgaaaacccttacgctcggtcaataa

SEQ ID NO: 261785 - DNA, 696 bp, Klebsiella pneumoniae
atgtccattgcggtaaccaccaccgatccgacaaataccggcgtcagcaccaccagtagtagttcgctcacgggcagcaacgccgcagatttacaaagcagttttctgactttgttggtggcgcagctgaaaaaccaggacccgaccaatccaatggaaaacaacgagctgacgtcgcaactggcacaaatcagcacggtcagcgggattgaaaaactcaataccacgctcggatctatttccggacagattgataacagccagtcgttacaggccagtaacctgatcggtcacggcgtgatgatccccggcaccactgttcttgcgggaacaggcagtgaagaaggggctgtgaccacgaccacgccgtttggtgttgagctgcaacaggcggcagacaaagttacggccaccatcaccgataaaaacggtgcggttgtccgtaccattgatatcggtgaactgactgccggagtccacagtttcacctgggacggtacgttgactgacggcagcactgcgccgaacggttcttacaatgtagcgattagcgccagtaacggtggtacacaactggttgcccagccgctgcagtttgctctggtgcagggtgtgatccgcggcaacaacggtaatacgctggatctcggcacttacggcaccaccaccctcgacgaagtacggcagataatttaa

SEQ ID NO: 261786 - DNA, 1206 bp, Klebsiella pneumoniae
atggccttttctcaagcggttagcggattaaacgctgccgccaccaacctcgatgttattggcaacaatatcgccaactccgccacctacggctttaaatcaggcacggcctcttttgccgatatgtttgccggttcgaaagtgggactgggggtaaaagttgccggtatcactcaggactttaccgatggcacgaccaccaacaccgggcgaggtctggacgttgctatcagccagaacggttttttccgtctggtggacagcaacggttcggtgttctacagccgtaacggacaatttaagctggatgaaaaccgtaacctggtgaatatgcaaggtttacagctgacgggttacccggcaaccggtacgccgccgactattcagcaaggggcgaatccgaccaatatttcgattccgaataccctgatggcagcgaaaactaccaccacggcgtcgatgcagatcaacctgaattccagtgatccgcttccctctgttaacgcatttgatgccagcaatgcggatagctataacaaaaaaggttcggtgactgttttcgatagtcagggtaatgctcatgacatgagcgtctactttgtgaagaccggggataataactggcaggtctacacccaggatagtagtgatccaaacagcattgcgaagacagcgacaacattggtgtttaatgccaatggcgttctgacctcagatccaacagcgaatatttccactggcgcaattaacggcgcagatcccgccacgtttagcctgagtttcctcaactccatgcagcaaaataccggtgctaacaacattgtggcaaccacccagaacggctacaaaccgggcgatctggtgagttatcaaatcaatgatgacggtacggttgtcggcaactattccaacgaacaaacccaactgctggggcagattgtactggcgaactttgccaacaacgaaggtctggcatccgaaggcgacaacgtctggtctgcgacgcaatcttctggcgtggcgctgttggggacagccgggacgggcaactttggcaccctgaccaacggtgcgctggaagcgtccaacgtcgatctcagtaaagaactggtcaatatgatcgttgcccagcgtaactatcagtctaacgcccagaccatcaaaacccaggaccagatcctcaacacgctggttaacttacgctaa

SEQ ID NO: 261787 - DNA, 756 bp, Klebsiella pneumoniae
atggatcacgcaatttataccgcgatgggagcagccagccagacgttgaatcaacaggcggtaaccgccagtaatctggccaatgcctctacgcccggttttcgcgcgcagttaaacgccttgcgcgcagtgccggtggaagggctttcactgcccacgcgcacgctggtaacggcgtcaacgccgggtgcagacatgacgcccggcaagatggattacacctcgcgcccgctggacgttgcgttgcagcaggatggctggctggccgtgcagaccgctgacggcagcgaagggtatacgcgtaatggcagcattcaggttgatcccaccgggcaactgacaattcaggggcatccggtgataggcgaggcggggccaattgctgtgccggaaggggcggaaatcactattgctgccgatggcacaatctcggcgctgaatccgggcgatccggcaaatacggttgcgccagtggggcgtctgaaactggtgaaagccacgggcagcgaagtgcagcgcggtgacgacggcatttttcgtttaagcgcggaaagccaggccacgcgtgggccggtactgcaggaagatccaaccttgcgtgtgatgtcgggagttctggaaggcagtaacgtcaatgccgttgcggcaatgagcgacatgattgccagcgcgcggcgttttgaaatgcagatgaaggtgatcagcagcgtcgatgataacgcaggccgtgccaaccaactgttgtcgatgagttaa

SEQ ID NO: 261788 - DNA, 783 bp, Klebsiella pneumoniae
atgatcagttcattatggatcgccaaaacgggcctggatgcccagcaaaccaatatggacgtcattgccaacaacctggcaaacgttagtaccaacggttttaagcgtcagcgcgcggtgtttgaagatctgctttatcaaaccattcgccagccgggggcacagtcttccgaacaaaccaccttaccatccggattacaaatcggtacgggggtacgcccggtcgccactgaacgcttacacagccagggcaacctgtcgcaaaccaataacagcaaagatgtcgcgattaaagggcagggctttttccaggtgatgttgccagatggctcatcagcctatacccgtgacggctctttccaggtggatcagaacgggcagctggtgacggctggtggttttcaggtgcagccagcgatcaccattccggcgaatgcgttaagtatcaccatcggtcgtgatggcgtggtcagcgtaacccaacaaggccaggcagctccggttcaggttgggcagctcaatctcaccacctttatgaatgataccggactggagagtattggcgaaaacctctacaccgaaacgcaatcctccggtgcaccgaacgaaagcacgccgggcctgaacggcgcgggactgctgtatcaagggtatgttgaaacgtctaacgtcaacgtggcggaagaactggtcaatatgattcaggtgcaacgcgcttacgaaatcaacagtaaagcggtatccaccaccgatcagatgctgcaaaaactgacgcaactctaa

SEQ ID NO: 261789 - DNA, 699 bp, Klebsiella pneumoniae
atgcaaaaaaacgctgcgcatacttatgccatttccagcttgttggtgctttcactaaccggctgcgcctggataccctccacgccgctggtacagggggcgaccagtgcacaaccggttcccggtccgacgcccgtcgccaacggttctattttccagtctgctcagccgattaactatggctatcaaccgctgtttgaagatcgtcgaccacgcaatattggcgatacgctgaccatcgtgttgcaggagaacgtcagcgccagcaaaagctcctctgcgaatgccagccgtgacggtaaatctaattttggctttgatactgtgccgcgctatttgcaggggctgtttggtaacgctcgtgccgatgtcgaagcctccggtggtaacacgttcaacggaaaaggcggggccaatgccagcaatacctttagcggcacgttgacggtgacggttgaccaggtactggtcaacggcaacctgcatgtggtgggtgaaaaacagatcgccattaatcagggtaccgaatttattcgcttctctggtgtagttaatccacgcactatcagcggcagcaataccgtaccgtctactcaggtggcggatgcgcgcattgaatacgtaggcaatggctacattaacgaagcgcaaaatatgggctggttgcaacgtttcttccttaatctgtcgccaatgtaa

SEQ ID NO: 261790 - DNA, 1098 bp, Klebsiella pneumoniae
gtgattaaatttctctctgcattaattcttctactggttacgacggcggttcaggctgagcgtattcgcgatctcaccagtgttcagggggtaaggcaaaactcactgattggctatggcctggtggtggggcttgatggtacaggtgaccagacaactcagacgccgtttaccacacaaacgcttaataacatgctctcacaactgggaattaccgttccgacgggcaccaatatgcagctaaaaaacgtcgctgcggtaatggtgacggcgtcacttccaccgtttggacgtcaggggcaaaccattgacgtggtggtttcttccatgggaaatgccaaaagtctgcgtggcggtacgttattgatgacaccgcttaagggcgttgacagtcaggtgtatgcgctggcgcagggcaatattctggttggcggcgcaggggcctccgctggcggtagcagtgttcaggtgaaccaactgaacggtggacggatcaccaatggtgcggttattgaacgtgaattgcccagccagtttggcgtcgggaatacccttaatttgcaacttaacgacgaagatttcagtatggcgcagcaaatcgctgacaccatcaaccgcgtgcgtggatatggcagcgccaccgcgttagatgcgcggactattcaggtgcgcgtaccgagtggcaacagttcccaggtccgtttccttgccgatatccagaatatgcaggttaatgttaccccgcaggacgctaaagtagtgattaactcgcgcactggttcggtggtgatgaatcgcgaagtgaccctcgacagctgcgcggtagcgcaggggaatctctcagtaacagttaatcgtcaggccaatgtcagccagccagatacaccgtttggtggtgggcagactgtggttactccacaaacgcagatcgatttacgccagagcggcggttcgctgcaaagcgtacgttctagcgccagcctcaataacgtggtgcgtgcgctcaatgcgctgggcgctacgccgatggatctgatgtccatactgcaatcaatgcaaagtgcgggatgtctgcgggcaaaactggaaatcatctga

SEQ ID NO: 261791 - DNA, 942 bp, Klebsiella pneumoniae
atgatcagcgacagcaaactactggcaagtgcggcctgggatgcacaatcgctcaacgaacttaaggcgaaagcgggcgaagatccggcggcaaatatccgtccggtggcccgccaggtggaagggatgttcgtgcagatgatgttgaaaagcatgcgcgacgctttaccaaaagatggcctgttcagcagcgagcacactcgcctgtataccagtatgtatgaccagcagattgcccaacagatgacggcgggcaaaggtctggggctggcagagatgatggttaaacagatgacgccagaacaaccattgccagaggagcccacggcagcagcaccgatgaaattcccgctcgaaaccgtggtgcgttatcaaaatcagacgctttcgcagctggtgcaaaaggccgtaccacgtaactacgatgattcgctgccgggtgacagtaaagcattcctcgcgcaactctcgttgcccgcccaactggcaagccagcaaagcggtgtgccacatcatttgatcctcgctcaggcggcgctggaatctggctggggacaacggcaaatccgccgtgaaaacggcgagccgagctataacctgtttggcgtcaaagcctctggcaactggaaagggccagtcactgaaatcaccacgactgaatatgaaaatggcgaagcgaagaaagtaaaagcgaagtttcgggtctacagctcgtatctggaagcattgtcggattacgttgggctgttaacgcgtaacccgcgctacgccgccgtgacgaccgccgcgagtgcggagcagggggcgcaggccctacaggacgcgggctatgccaccgatcctcactatgcccgcaaactcaccaacatgattcagcagatgaaatcgataagcgacaaggtgagcaaaacctacagcatgaacattgataatctgttctga

SEQ ID NO: 261792 - DNA, 1644 bp, Klebsiella pneumoniae
atgtccagcttgatcaataacgccatgagcggactgaacgcggcccaggcggcgttaaatacggcaagtaataatatctccagctataacgttgccggatatacccgccaaaccactattatggcgcaggccaatagcacgttgggcgctggcggctgggttggcaatggcgtctacgtttctggtgtgcagcgtgagtatgatgcgtttattaccaaccagttacgtgctgcgcagacgcaaagtagcggcctgaccgcccgctatgagcagatgtcgaaaatcgacaatatgctctccaccagtacctcttcgctggcaacacagatgcaggatttcttcaccagcctgcaaacgctggtgagtaacgcggaagatccggcagcgcgccaggcgctgattgggaaatcagaaggattggtgaatcagtttaaaaccaccgatcaatatctgcgcgaccaggacaaacaggtcaatatcgcgataggtgccagcgttgatcagatcaacaattacgctaaacaaatcgccagcctgaacgatcagatctcccgcctgacaggcgtgggggcaggggcgtcacctaacaatctgctggatcaacgcgatcaactggtgagcgaattaaaccagattgttggcgtagaagtcagcgttcaggatggtggcacttataacatcacgatggccaatggctactcactggttcagggaagtacggcgcggcaacttgcggcagttccttccagcgccgacccttctcgtacgactgtcgcttatgttgatgggacggcaggcaatattgagatcccggagaaattactgaataccgggtcgctgggcggcattctgacattccgttctcaggatcttgaccagacgcgtaatacgcttggacaactggcgctggcatttgccgaggctttcaacacccaacacaaagccggatttgatgctaacggcgatgccggtgaagatttctttgctatcggtaagcccgcggttctgcaaaacacgaaaaacaaaggtgacgttgcgatcggtgcaacggtaactgatgcctccgcggtactggcgacagattacaaaatctcgttcgataataatcagtggcaggtcacccgccttgccagcaataccacttttacggtgacgccggatgccaacggtaaagtggcatttgatggtctggagttgacgtttacaggaacgcctgccgttaacgacagcttcacgctgaaaccggtaagtgacgccatcgtcaacatggatgtattaatcaccgacgaagcgaaaatcgccatggcgagcgcagaagatgcgggtgatagcgacaaccgcaacggtcaggccctgctcgatctgcaaagcaacagtaaaacggtgggcggtgcgaaatcctttaacgacgcttatgcctcgttagtgagtgatatcggtaataaaaccgcgacgttgaaaaccagtagcaccactcaaggtaatgtggtgacgcagctttccaatcagcagcagtcgatttccggtgtcaatctcgatgaggagtacggaaatctgcaacgttttcagcagtattacctcgcgaatgcgcaggttctgcagacggcaaacgcgatttttgatgcgctgattaacattcgctaa

SEQ ID NO: 261793 - DNA, 954 bp, Klebsiella pneumoniae
atgcgtttcagtacccagatgatgtaccagcaaaacatgcgcggcatcaccaattctcaggcagaatggatgaagtacggcgaacagatgtcgacgggtaagcgagtcgttaacccttcagatgatcccattgctgcatcacaagctgttgttctctcccaggcacaggcgcaaaacagccagtacacgctggcgcgtactttcgccactcaaaaagtgtcactggaagagagtgtacttagccaggtcaccaccgctatccagaatgctcaggaaaaaattgtctacgccagcaatggcaccttgagtgacgatgaccgtgcctcgctggctacggatattcaggggcttcgtgaccagttgctgaatctggcgaacaccactgacggtaacgggcgctacatttttgccggttataaaacagaaactgcgccgtttagtgaggcggatggcaaatacgaaggcggagcagaaagtattaaacaacaggtcgatgcttcgcgttcgatggtgatagggcacacgggtgacaaaattttcgacagtattaccagcaacgcggtagcggaaccagacggtagcgcttctgaaaccaatctttttgccatgctggatagcgccatcgcagccctaaaaacgccggtcgcggatagcgaagcggataaagaaaccgccgctgcggcactggataaaaccaaccgcggactgaaaaactcgctgaacaatgtgctgactgttcgcgcggaattaggcacgcagctgaacgaactggagtcgctggattcattaggtagcgatcgcgctttagggcaaacgcagcagatgagcgatctggttgatgtggactggaatgcaactatttcatcttacatcatgcagcaaacggcattgcaggcatcgtataaagcatttaccgatatgcagggattgtcgctgttccagctcaacaaataa

SEQ ID NO: 261794 - DNA, 495 bp, Klebsiella pneumoniae
atgattcaggcccccgagccactcatggcaaggcatcaattcacctctttttgctcgggagtagaaacgatggataactggctaaagcagagagccctaaaaaatcagcttgccggcgcatcacgtacatttgttagctgtgatacgtatagcaacgttttggcatattattcgcttgcttccagcgccgttgaaacgtatgtcgcgacaggacgatttcgccgaaatatgccagaaccgatccctgttgtagtacttggtcgtctggcaatagataaatcattacagggtcagggcatcggtcgtgcgatggtcagagatgccggtctacgagtactacaggcggctgaagtcattggtattcgcggaatgttggtccatgcgttatcagaccaggcccgtgagttttatctgcgagtggggtttgaaccatcgcctgtcgattctatgatactgatggcaacattggctgatttgcaggaatgtcttaaatag

SEQ ID NO: 261795 - DNA, 294 bp, Klebsiella pneumoniae
atgccagcagccaataacattccaaccaggcgcgaatctttaaatttgcgcataaaacccgcagaacgcgatcttattgaccgggccgctaaagcccgaggaaaaaatcgcaccgaatttgtccttgaggccgccagagccgcagctgaagaggcgctcattgagcagagaattttcaggatcgattctgatgattaccagctatttttgaatcgtctggatcagccccccgcgcccaatgctgcattacgcaaaaccatgcaaacacccgcgccgtgggagcaaaaaaaatga

SEQ ID NO: 261796 - DNA, 2139 bp, Klebsiella pneumoniae
atgacgccagtacgccaccagcgtgcggtagaaaaccgtctgcgtgaagcggtgcgtcaggaccgggcgcgtattcaaatcagccatatttctcgctttggcctgctggaaatgtcccgtcagcgtctgagcccatcactgggtgaatccagccatcacgtctgcccgcgctgctccggtaccggtaccgtgcgtgacaacgaatcgttgtcgctctctattctgcgtctgatcgaagaagaagcgctgaaagagaacactcaggaagttcacgccattgttcctgtgccaatcgcgtcttacctgctgaatgaaaaacgttctgcagtgaatgcgattgaaactcgtcaggacggcgtgcgctgtgtgattgtgccaaacgatcagatggaaaccccgcactaccatgtgctgcgcgtgcgtaaaggggaagaaactccaaccttaagctacatgctgccgaagctgcatgaagaagcgatggcgctgccgtctgaagaagagttcgctgaacgtaagcgtcctgaacaacctgcgctggcaacctttgccatgccggatgtgccgccagctccaaccccagctgaacctgccgcgcctgttgtagccccagcacctaaagctgcaacggcaacaccagcatctcctgcacaaccagggttgttgagccgcttcttcggcgcactgaaagcgctgttcagcggtggtgaagaaaccaaaccggccgagcaaccagcaccgaaagcagaagcgaaaccggaacgtcaacaggatcgtcgcaagcctcgtcagaacaaccgccgtgaccgtaatgagcgccgcgatacccgtagtgaacgtacagaaggcagcgataatcgcgaagaaaaccgtcgtaatcgtcgccaggcacagcagcagactgccgagacgcgtgagagccgtcagcaggctgaggtaacggaaaaagcacgtaccaccgacgagcagcaagcgccgcgtcgtgaacgtagccgccgccgtaacgatgataaacgtcaggcgcaacaagaagcaaaggcgctgaatgttgaagagcaatctgttcaggaaaccgaacaggaagaacgtgtacgtccggttcagccgcgtcgtaaacagcgtcagctcaatcagaaagtgcgttacgagcaaagcgtagccgaagaagcggtagtcgcaccagtggttgaagaaactgtcgctgccgaaccaattgttcaggaagcgccagctccacgcacagaactggtgaaagtcccgctgccagtcgtagcgcaaactgcaccagaacagcaagaagagaacaatgctgataaccgtgacaacggtggcatgccgcgtcgttctcgccgctcgcctcgtcacctgcgcgtgagtggtcagcgtcgtcgtcgctatcgtgacgagcgttatccaacccaatcgccaatgccgttgaccgtagcgtgcgcatctccggaactggcctctggcaaagtctggatccgctatccaattgtacgtccgcaagatgtacaggtcgaagagcagcgcgaacaggaagaagtacaagtgcagccgatggtgactgaggtccctgtcgccgccgctgtcgaacctgctgttagcgcaccggttgttgaagaagtggctgaagttgtagaagcccccgttcaggttgccgaaccgcaacctgaagtggttgaaacgacgcatcctgaagtgattgccgccgcggtaactgaacagccgcaggtgattaccgagtctgatgttgccgtagcccaggaagttgcagaacacgcagaaccggtggttgaaccgcaggaagagacggcagatattgaagaagttgccgaaactgctgaggttgtggttgctgaacctgaagttgttgctcaacctgccgcgccagtcgtcgccgaagtcgcagcagaagttgaaacggtagccgcggttaaacctgaggtcaccgttgagcataaccacgctaccgcgccaatgacgcgcgctccggcaccggaatatgttccggaggcaccgcgtcacagtgactggcagcgccctacttttgccttcgaaggtaaaggtgctgcaggtggtcatacggcaacgcatcatgcctctgccgctcctgcgcgtccgcaacctgttgagtaa

SEQ ID NO: 261797 - DNA, 915 bp, Klebsiella pneumoniae
  misc_feature (893)..(902): n is a, c, g, or t
atgaaaagaatgttaatcaacgcaactcagcaggaagagttgcgcgttgcccttgtagatgggcagcgtctgtatgacctggatatcgaaagtccagggcacgagcagaaaaaggcaaacatctacaaaggtaaaatcacccgcattgaaccgagtctggaagctgcttttgttgattacggcgctgaacgtcacggtttcctcccactaaaagaaattgcccgcgaatatttccctgctaactacagtgctcatggtcgtcccaacattaaagatgtgttgcgtgaaggtcaggaagtcattgttcagatcgataaagaagagcgcggcaacaaaggcgcggcattaaccacctttatcagtctggcgggtagctatctggttctgatgccgaacaacccgcgcgcgggtggcatttctcgtcgtatcgaaggcgacgaccgtaccgaattaaaagaagcactggcaagccttgaactgccggaaggcatggggcttatcgtgcgcaccgctggcgtcggcaaatctgctgaggcgctgcaatgggatttaagcttccgtctgaaacactgggaagccatcaaaaaagccgctgaaagccgcccagctccgttcctgattcatcaggagagcaacgtaatcgttcgcgcattccgcgattacttacgtcaggacatcggcgaaatccttatcgataacccgaaagtgctcgaactggcacgccagcatatcgctgcattaggtcgcccggatttcagcagcaaaatcaaactgtacaccggcgagatcccgctgttcagccactaccagatcgagtcacagattgagtccgccttccagcgtgaagttcgtctgccatccggtggttccattgttatcgacagcaccgaagnnnnnnnnnnaccgaagcgttaa

SEQ ID NO: 261798 - DNA, 960 bp, Klebsiella pneumoniae
atgaaaacagagactccatccgtaaaaattgttgctatcaccgctgacgaagcggggcaacgtatcgataactttttgcgtacccaattgaaaggcgtaccaaaaagtatgatttaccgtattttgcgtaaaggcgaagtgcgggtgaacaaaaaacgtattaagcctgaatataaactcgaagcgggtgatgaagtacgtatcccaccggttcgcgttgctgagcgggaagaagaggcggtttcgccacatctgcaaaaggtggcagcgctggcggacgtcatcttatatgaagatgaccatatcctggtgctgaataaaccttccggtacggcggtacatggcggcagtggtttaagcttcggcgttatcgaaggtttgcgggcgttgcgcccggaagcgcggttccttgaactggttcatcgtcttgaccgggacacctcaggtgtgttgctggtagcgaaaaaacgctcggcgttgcgttctctgcatgagcaattacgtgaaaaagggatgcaaaaagattacctggcgctggtgcgcggtcagtggcagtcgcatgtgaagagcgttcaagcgccgttactgaaaaatattctgcaaagcggcgaacgtatcgtgcgtgtcagtcaggaaggcaaaccgtcggaaacacgctttaaagtggaagaacgctatgcatttgccaccctggtgcgttgtagcccggtaacagggcgtactcatcagatccgtgtgcatacacagtatgcgggtcatccgattgcctttgacgatcgctacggtgaccgtgaatttgacagacagctcactgaagccggcacgggattaaatcgtctgttcctgcacgccgcagcgttgaagtttacccatccggggaccggtgaggtgatgcgtatcgaagcgccgatggatgatggtttgaagcgttgtttgcaaaagctgcgtaacgcgcgctaa

SEQ ID NO: 261799 - DNA, 624 bp, Klebsiella pneumoniae
atggctatcatcaatacgctatatctgatggaaaaaaatatgcctaaacttattttagcctccacttcgccctggcgtcgcgctcttctggaaaaactgcaaatctcttttgaatgtgcagcaccagaggtcgacgaaaccccacgcagcgacgaatcaccgcgacagttggtgcttcgactggcacaagaaaaagcacaatctctggcgtcacgttatccggatcatttaattattggttcagaccaggtatgtgttcttgatggcgaaatcaccggtaaaccgttaacggaagaaaatgcccgtctgcaattacgcaaagccagcggcaatatcgtcaccttctatactggactggcgttgtttaattcggcgaatgggcatctacaaacagaagtggagccttttgacgtccatttccgtcacctgagcgaggcggagattgataattacgtgcgtaaagagcatcccctgcactgcgcgggtagctttaagagtgaaggatttggcattactctgtttgagcgtttagaggggcgtgatcctaacacgctggttggtttaccgctaatcgcgctgtgtcagatgttacgtcgggaagggaaaaacccgctgatgggatag

SEQ ID NO: 261800 - DNA, 954 bp, Klebsiella pneumoniae
atgtatacgaagattattggtactggcagctatctgcccgaacaagtgcggacaaacgccgatttggaaaaaatggtggacacctctgacgagtggattgtcactcgtaccggtatccgcgaacgccacattgccgcgccaaacgaaaccgtttcaaccatgggctttgaagcggcgacacgcgcaattgagatggcgggcattgagaaagaccagattggcctgatcgttgtggcaacgacttctgctacgcacgctttcccgagcgcagcttgtcagattcaaagcatgctgggcattaaaggttgcccggcatttgacgttgcagcagcctgcgcaggtttcacctatgcattaagcgtagccgatcaatacgtgaaatctggggcggtgaagtatgctctggtcgtcggttccgatgtactggcgcgcacctgcgatccaacagatcgtgggactattattatttttggcgatggcgcgggcgctgcggtgctggctgcctctgaagagccgggaatcatctccacccatctgcatgccgacggtagctatggtgagttgctgacgctgcctaatgctgaccgtgtgaatccagagaattcaattcatctgacgatggcgggcaacgaagtcttcaaggttgcggtaacagaactggcgcacatcgttgatgagacgctgacggcgaataatcttgaccgttctcaactggactggctggttccgcatcaggctaacctgcgtattatcagtgcaacagcgaaaaaactcggcatgtcgatggacaatgtcgtggtgacgctggatcgccacggtaatacctctgcggcctctgtcccgtgcgcgctggatgaagctgtacgcgacgggcgcattaagccggggcagttggttctgcttgaagcctttggcggtggattcacctggggctccgcgctggttcgtttctag

SEQ ID NO: 261801 - DNA, 735 bp, Klebsiella pneumoniae
atgaattttgaaggaaaaatcgcactggtaaccggtgcaagccgcggaattggccgcgcaattgctgaaacgctcgcagcccgtggcgcgaaagttattggcactgcgaccagtgaaaatggcgctcaggcgatcagtgattatttaggtgccaacggcaaaggtctgatgttgaatgtgaccgacccggcatctatcgaatctgttctggaaaaaattcgcgcagaatttggtgaagtggatatcctggtcaataatgccggtatcactcgtgataacctgttaatgcgaatgaaagatgaagagtggaacgatattatcgaaactaacctttcatctgttttccgtctgtcaaaagcggtaatgcgcgctatgatgaaaaagcgtcatggtcgcattatcactatcggttctgtggttggtaccatgggaaatggcggtcaggccaactacgctgcggcgaaagcgggcttgatcggcttcagtaaatcactggcgcgcgaagttgcgtcacgcggtattactgtaaacgttgttgctccgggctttattgaaacggacatgacacgtgcgctgagcgatgaccagcgtgcgggtatcctggcgcaggttcctgcgggtcgcctcggcggcgcacaggaaatcgccaacgcggttgcattcctggcatccgacgaagcagcttacatcacgggtgaaactttgcatgtgaacggcgggatgtacatggtctga

SEQ ID NO: 261802 - DNA, 2256 bp, Klebsiella pneumoniae
gtggacgcctgcctgctcgatatgctccatgatgccgccaatcagcaccatttcgccatcgcagatggcatcgacatccacttcaatcgcatcgtcgaggaagcgatccagcagcaccggcgcgtcgttggagacgctgaccgcggtctggaagtagcggcgcagatcctgctcgtcatagacgatctccatcgcccggccgccgagcacataagacggacgcactaccagcgggtagccaatctctttcgctttctctaccgcctgctcaatggcggtgacggtggcgttcgccggctgcttcagcttcagacggtcaaccgcgtgctggaagcgctcacggtcttccgcccggtcgatagcgtccggactggtaccgataaccggcacgccggcagcttccagggcacgagccagcttcagcggggtctggccgccgtactggacgataacgccttttggcttctcgatgcgcacgatttccagcacgtcttccagggtcaccggctcaaaatacagacggtcggaggtgtcgtagtcggtagagacggtttccgggttacagttgaccatgatggtctcgtaaccgtcctcgcgcagcgccagcgaggcgtgtacgcagcagtagtcgaattcgataccctgaccgatacggttcgggccgccgccgaggaccatgattttatcgcggtcaacggacgggttggactcacactcttcttcataagtggagtacatgtaggcggtatcggtagcaaattccgcagcgcaggtgtccacgcgcttgtagaccgggtgcaggtcatactggtcgcgcagcttgcggatttccgcttcccgcacgcccgccagcttcgccagacgcgcatcggcaaagcctttacgcttcagggtgcgcaggaagtcagcgtcgaggccgttgatgcccacttccgccactttctcttccagacggaccagctcttcaatctgtaccaggaaccagcggtcgatgttggtcaggttgaagacgccgtcaaccgagaggcccgcgcggaacgcgtcagcgatataccagatacgctcagcgccggcatctttcagctcgcggcggattttggtcagcgcttccggatcgtcgaggctcactttcgggtcgaagccggtagcgcccacttccagaccgcgcagcgctttctgcaaggattcctgctgggtacggccaatcgccatcacttcgccgacagacttcatctgggtggtcagacggtcgttggcgccggcgaatttttcgaagttaaagcgtgggattttagtgaccacgtagtcgatggacggttcaaaggaagccggggtgcggccgccggtgatgtcgttcatcagctcgtcgagggtataacctaccgccagcttggctgccactttagcaatcgggaagccggtggccttagaggccagcgccgaggagcgggagacgcgcgggttcatttcgataacgatcaggcgaccgtttttcgggttgaccgcgaactgcacgttagagccgccggtttcgacgccgatttcacgcagcaccgccatcgaggcgttacgcatgatctggtactctttgtcggtcagggtctgcgccggggcaacggtgatggagtcaccggtgtggatccccatggcgtcgaagttttcgatggagcagacgatgatgcagttatcgttcttatcgcgcaccacttccatctcgtactctttccagccgatcagcgattcatcgatcagcagttcgttggtcggagagagatccaggccgcgttcgcagatttcttcgaactcttcgcggttataggcgataccgccgccggtgccgcccatggtgaaggacggacggatgatgcacgggaaaccaacgtcggcggcaaccgccagcgcctcttccatcgtgtgggcgataccagagcgcgcagtgtcgaggccgatttttttcattgcgatatcgaaacggcgacggtcttcggctttatcaatcgcatcggcggtggcaccaatcatggtcacgccgaattcagccagtaccccctgacgctccagctcgagcgcgcagttcagcgccgtctggccgcccatggtcggcagcaccgcatccgggcgctctttttcgatgattttacgcaccacttcccagtgaatcggctcgatgtaggtggcatcggccatttccgggtcggtcatgatggtcgccgggttagagttcaccaggataacgcggtagccctcttcgcgtag

SEQ ID NO: 261803 - DNA, 1044 bp, Klebsiella pneumoniae
atgagcgtgatgtttgatccagacacggcgatttatcctttccccccgaagccgacgccgttaagcattgatgaaaaagcgtattaccgcgagaagataaaacgtctgctaaaagaacgtaatgcggtgatggttgcccattactataccgatcccgaaattcaacaactggcagaagaaaccggtggctgtatttctgattctctggaaatggcgcgcttcggtgcaaagcatcccgcttctacgttgttagtcgctggggtgagatttatgggagaaaccgccaaaattctcagtccggaaaaaacaattctgatgccgacacttcaggctgaatgttcactggatctcggctgccctgttgaagaatttaacgcattttgcgatgcccatcccgatcatactgtcgttgtctacgccaacacttctgctgcggtaaaagcgcgggcagattgggtggtaacttcaagcattgccgtcgaacttattgatcatctggatagtttgggtgaaaaaatcatctgggctcccgacaaacatctggggcgttacgtgcaaaaacagacgggcgcagacattttatgctggcagggtgcctgcattgtgcatgatgaatttaagactcaggcgttaacccgcttgcaagaagaatacccggatgctgccatactggtgcatccagaatcaccacaagctattgtcgatatggcggatgcggtcggttccaccagtcaactgatcgctgctgcgaaaacattgccacatcagaggcttattgtggcaaccgatcggggtattttctacaaaatgcagcaggcggtgccagataaagagttactggaagcaccaaccgcaggtgagggtgcaacctgccgcagctgcgcgcattgtccgtggatggccatgaatggccttcaggccatcgcagaggcattagaacaggaaggaagcaatcacgaggttcatgttgatgaaaggctgcgagagagggcgctggtgccgctcaatcgtatgctggattttgcggctacactacgtggataa

SEQ ID NO: 261804 - DNA, 720 bp, Klebsiella pneumoniae
atggatttttttagtgtgcagaatatcctggtacatataccaataggagcaggcggttatgatctctcatggatcgaagcggtaggcacgatcgctgggttgctgtgtattggccttgccagtatggagaagatcagcaactacttctttggcctgatcaacgtcaccttgtttggcattattttctttcagattcagctgtatgccagcctgctattacaggtgtttttctttgccgcgaatatttacggttggtatgcgtggtcgcgacaaaccagtcagaacgaggcggagttgaaaattcgctggttgccattgccgaaggcgctcagctggttggcggtttgcgttgtttcgattggtctgatgacggtatttatcaatccggtgtttgcatttttgacccgcgtggcagtcatgatcatgcaagcattaggattacaggttgcgatgcctgaactacagccggacgctttcccgttctgggattcatgcatgatggtgttatccatcgtggcaatgattctgatgacgcgtaagtatgtggaaaactggctgttgtgggtgattattaacgtgattagcgtcgttatttttgcacttcagggcgtttacgccatgtctctggagtacatcatcctgacctttattgcgcttaacggcagccggatgtggatcaacagcgcacgcgaaagaggttcacgcgcgctgtcccattaa

SEQ ID NO: 261805 - DNA, 942 bp, Klebsiella pneumoniae
atggcgcactcacactcacacacttcctcacacctgccagaagataataatgctcgtcgcttgttgtatgctttcggcgtgactgccgggtttatgctcgtagaagtcattggtggttttctttccggttctctggcattgctggccgatgcgggtcatatgttgaccgatactgccgccctgcttttcgccctactcgcagtgcaattttcccgtcgtcctcccaccattcgccacactttcggttggctaagattgaccacgctcgcggcgtttgtgaatgccatcgccctggtggtgattactattttgattgtctgggaggcgatagaacgcttccgcactccgcgtccggtcgagggcggcatgatgatggcaattgccgtggctgggctgctggcaaatatactttctttctggttacttcatcacggcagcgaagagaaaaacctcaacgtgcgagcagcggcactgcatgtgctcggggacctgctgggttcggttggggctattattgccgcgttgattattatctggaccggctggacacctgctgaccccattctctcaatactggtgtcgcttctggttctgcgtagcgcgtggcgactgttgaaagatagcgtgaatgaattacttgaaggtgcaccggtatcgctggatatcgccgaactgaagcgtcgtatgtgccgggaaatctcggaagtccgcaatgtgcaccatgtacatgtatggatggtaggcgagaagccggtgatgacgctgcatgtgcaggtgatcccgccacacgatcacgatgccttgttagatcagatccaacactacctgatggatcactatcagattgagcacgccactattcagatggaatatcaaccttgtcatgggccagactgccacctgaatgaaggggtgtctggccattcacatcatcaccattaa

SEQ ID NO: 261806 - DNA, 381 bp, Klebsiella pneumoniae
atgaaaatgacaaaactggccacactatttttgactgccactctaagccttgccagcggtgccgcactggctgccgatagcggagcgcaaagcaataacggccaggcaaacgccgcagctgatgcgggccaggtagcccctgatgcccgtgaaaatgtcgcgccaaataacgtcgacaataacggggtaaataccggttctggcggcacaatgctgcatccggatggttcttcaatgaacaatgacggcatgaccaaagatgaagagcacaagaacaccatgtgcaaagatggtcgctgtccggatatcaataaaaaggtacaaactggtgatggcatcaacaatgatgtcgataccaaaaccgacggtaccacgcagtaa

SEQ ID NO: 261807 - DNA, 1041 bp, Klebsiella pneumoniae
gtgctgaacgaaactcccgcactggcacccgatggtcagccgtaccgactgttaactttgcgtaacaacgcagggatggtagtcacgctgatggactggggttcgactttactttccgcccgtattccgctttccgatggcagcgtccgagaggcgctgcttggctgcgccagcccggaatgctatcaggatcaggccgcatttctgggggcctctattggtcgttatgccaaccgcatcgccaatagccgttatacctttgacggtgaaaccgtgacgctttcaccaagtcagggcgttaaccagctgcacggcggcccggaagggttcgacaaacgtcgctggcagattgtgaaccagaatgatcgtcaggtgctgtttgccctgagttcagatgatggcgatcagggcttcccgggtaatctcggcgcgacggtgcaatatcgtctgaccgacgataaccgtatctccattacttatcgcgccacagttgataaaccttgcccggtgaatatgactaatcacgtctatttcaatcttgacggcgagcagtctgacgtgcgcaatcacaagttgcagattctggcggacgaatatctgccggttgatgaaggcggcattccgcacgacggcctgaaatctgtcgccggaacgtcttttgatttccgcagcgccaaaatcatcgccagtgagtttcttgccgacgacgatcagcgcaaagtgaaaggttacgatcacgcgttcttgttacaggccaaaggcgatggcaagaaagtggcggcgcatgtctggtcagcagatgaaaaattgcagctgaaggtctacaccaccgctccggctctgcaattctactccggcaacttcctcggcggcacaccgtcgcggggaaccgaaccttacgccgactggcaagggctggctctggaaagcgaatttctgccggacagcccgaaccaccctgaatggccgcaaccagactgcttcctgcgtcctggcgaagagtattccagcctgacggaatatcagtttattgctcagtaa

SEQ ID NO: 261808 - DNA, 1473 bp, Klebsiella pneumoniae
atgtcatcgttgcaaattttgcaaggcacgtttcgtcttagcgacacaaaaacgctgcaattgcctcagctaacgttaaacgcgggtgatagttgggcgtttgtcggttcgaatggaagcgggaaatcggccctggcccgcgcgctggcgggggaacttccgcttttgaaaggtgaacggcaaagccagttttcccacatcactcgtctctccttcgagcaattgcaaaagctcgtcagcgacgaatggcagcggaataacaccgatatgcttagtcctggcgaagatgacaccgggcgtaccacggctgagatcattcaggatgaagtaaaggatactccgcgttgcatgcaactggcgcagcagttcggtattaccgccctcctcgaccgacgctttaaatacctttccactggcgagacacgaaaaaccctgctgtgtcaggcgctgatgtcggagcctgacttgttgattcttgatgagccgttcgatggcctggatgttgcctcacgtcagcagctggctgagcgactcgcctcgttacatcagtccggtattactctggtactggtgctcaatcgcttcgatgagatcccggagtttgtccagtttgctggcgtgctggcggattgcacgttagcggaaactagcgctaaagaggaactgctccaacaagcactcgtcgcgcaactggcgcatagtgaacagcttgaaggtgtacaactgccggagccggatgaaccttcagcacgtcacgccttacccgccaacgaaccgcgcattgtgctgaacaacggcgtggtttcttataacgatcgccccattcttaataaccttagctggcaggtgaatccaggcgagcactggcaaattgtcgggccaaatggcgcgggaaaatcgacgttattaagcctgattactggcgatcatccgcaaggttacagcaacgatttgacgcttttcggacgacgtcgcggcagcggcgaaaccatctgggatatcaaaaagcatatcggttacgtcagcagtagtttgcatctggattaccgggtcagcactaccgtgcgtaatgtgatcctttctggctattttgattcgattggcatttatcaggccgtttcggatcgccagcaaaaactggtgcagcagtggctggatattctcggcattgataaacgcacggctgacgctccgttccatagtctttcctgggggcaacaacgcctggcgctgatcgtccgtgcactggtgaaacatccgacgttgcttattctcgatgaaccactacaggggcttgatccgctcaatcgccagcttatccgccgttttgttgatgtgctgattagcgaaggtgaaacgcaattgttgtttgtttcgcaccacgctgaagatgcgcctgcctgtattacccatcgtcttgagttcgtgccagacggcggactctatcgctatgtgctgacaaaaataaattga

SEQ ID NO: 261809 - DNA, 789 bp, Klebsiella pneumoniae
atgcaggccgaaatccttctcacccttaagctccaacaaaaattattcgccgacccgcgccgcatttcgctactaaaacacattgcgctttccggttccattagccagggagcgaaagatgccggtatcagctataaaagcgcctgggatgccattaacgagatgaatcagttaagtgagcatattctggttgagcgcgcaacaggcggtaaaggtggaggcggcgcagtactgacccgctatggtcagcgactgattcagctctatgacttactggcgcaaatccagcaaaaagcctttgatgtgttaagtgacgatgacgccctgccgctgaacagcctgctggccgcgatctcacgtttttcactgcaaaccagcgcccgtaaccagtggttcggtaccatcaccgcccgcgatcatgatgacgttcaacagcatgttgatgtcttactggctgatggaaaaacacgcctgaaagtcgcaattaccgcacaaagcggcgcacgtctggggctggatgaaggcaaagaagtgttgatattgctaaaagcgccgtgggtaggcattactcaggacgaagcggtcgcacaaaacgccgacaaccaattaccgggtattattagtcatattgagcgcggcgcagagcagtgcgaagtattaatggcgctacccgacgggcaaacactgtgcgccacagtgccggtaaatgaagcgacttctcttcagcaaggacagaatgtcacggcctactttaatgccgacagcgtgattatcgccacgctatgctaa

SEQ ID NO: 261810 - DNA, 150 bp, Klebsiella pneumoniae
atgttagagttattaaaaagtctggtattcgccgtaatcatggtacctgtcgtgatggccatcatcctgggtctgatttacggtcttggtgaagtattcaacatcttttctggtgttggtaaaaaagaccagcccggacaaaatcattga

SEQ ID NO: 261811 - DNA, 774 bp, Klebsiella pneumoniae
atggctcgtaaatggttgaacttgtttgccggggcggcactctctttcgctgttgctggcaatgcactggcagatgaagggaaaatcacggtgttcgccgccgcatcactgactaacgcaatgcaggacattgctacgcagtataaaaaagagaaaggcgtggatgtggtttcttctttcgcttcgtcatctactctcgcccgtcagattgaagcgggagcccctgcggatctgtttatttctgccgatcagaaatggatggattatgcggttgataaaaaagcgatcgatacagctacgcgtcagacactgctcggcaatagcctggtcgttgtagcaccgaaagccagtgagcagaaagatttcaccatcgacagcaaaaccaactggacttcactgctgaatggcggtcgcctggcggttggcgatccggaacatgtccctgctggcatttatgcaaaagaagcactgcaaaaactgggcgcatgggatacgctctccccgaaactggctccggcggaagatgttcgtggcgcgctggcgttggtcgaacgcaatgaagcgccgctgggtattgtttacggttctgacgcagttgccagcaaaggggtaaaagtggttgccaccttcccggaagattcacataaaaaagtggaatatccggttgctgttgtggaagggcataataatgcgacagtgatagcattttatgattatctgaaggggccgcaggctgcggaaatctttaaacgttacggatttacaaccaagtaa

SEQ ID NO: 261812 - DNA, 690 bp, Klebsiella pneumoniae
atgatactgaccgatccagaatggcaggcagttttattaagcctgaaagtttcttccctggctgtgctgtttagcctgccgtttgggatcttttttgcctggttactggtacgttgcacgtttccgggcaaagctctgctcgatagcgtactgcatctaccgctggtgttaccgcccgtggtcgtcggttacttattattagtttcgatgggacggcgcggatttatcggtgaacgtctgtatgactggtttggtctttctttcgcgtttagctggcgcggcgcggttctcgctgccgccgtcatgtcgtttccgctgatggtgcgggcaattcgtctggcgctggaaggggttgatgtcaaactggaacaggccgcaagaacactgggtgccgggcgctggcgcgttttctttactatcacgttaccgctgaccttaccgggcattattgttggtacggtactggcttttgctcgttctctcggtgagtttggtgcaaccatcacctttgtgtcgaacattcctggtgaaacgcgaaccattccttctgccatgtataccctgatccagactcccggcggggaaagtggcgcggcgagactgtgcattatttctattgcactggcgatgatctccctgttgatttcagaatggctggccagaatcagccgtgaacgggcggggcgctaa

SEQ ID NO: 261813 - DNA, 1059 bp, Klebsiella pneumoniae
atgctggaactgaatttttcccagacgttgggcaaccattgcctgaccattaatgaaacgctgcccgccaatggcatcactgctatctttggcgtctccggtgccggaaaaacttcgctgattaacgccatcagtggactgacgcgcccgcaaaaagggcggattgtcctcaatgggcgggtactaaatgatgccgaaaaaggtatctgcctgacgccagaaaagcgtcgcgttggctatgtttttcaggatgcacggctgttcccgcattacaaagtgcgtggcaatctgcgctacggcatgtcgaaaagtatggtcgatcagttcgataagctggtggcgcttttaggcattgaaccgttgcttgaccgtttaccaggcagcctgtccggaggcgaaaaacagcgcgtggcgattggtcgggctttgctgacagcaccggaattgctgttgctggatgaaccgctggcgtcactggatattccgcgtaaacgcgaactgttgccttatctgcaacggctgacacgggaaatcaacattccgatgttgtatgtcagccattcgctggatgagatcctccatctggcagacagagtgatggtactggaaaacggtcaggtgaaagcctttggcgcgctggaggaagtgtggggcagtagcgtgatgaatccgtggctgccgaaagagcaacaaagtagcattctgaaagtgacggtgcttgagcatcatccgcattacgcgatgaccgcgctggcgctgggcgatcagcatttgtgggtcaataagctggacgaaccgctgcaagctgcgctacgtatccgcattcaggcttccgatgtttctctggttttacaaccgccgcagcaaaccagcattcgtaacgtattgcgggcaaaagttgttaatagttatgacgacaacggccaggtggaagtggagctggaagtcggcggtaaaacgctgtgggcgcgtatcagcccgtgggccagggatgaactggcgatcaaaccaggcctgtggctgtacgcgcaaattaaaagtgtgtcgataaccgcctga

SEQ ID NO: 261814 - DNA, 996 bp, Klebsiella pneumoniae
atgaagcaaacagtttatatcgccagccctgagagccagcaaattcacgtctggaacctgaatcatgaaggcgcactgacgctgacacaggttgtcgatgtgccggggcaggtgcagccgatggtggtcagcccggacaaacgttatctctatgttggtgtgcgccctgagtttcgcgtcctggcgtatcgtatcgccccggacgatggcgcgctgacctttgctgcagagtctgcgctaccgggtagcccgacgcatatttccaccgatcaccaggggcagtttgtctttgtcggttcttacaatgcgggtaacgtgagcgtaacgcgtctggaagatggcctgccagtgggcgtcgtcgatgtggtcgaggggctggatggttgccattccgccaatatctcaccggacaaccgtacgctgtgggttccggcattaaagcaggatcgcatttgtctgtttacggtcagcgatgatggtcatctggtggcacaggaccctgcggaagtgactaccgttgaaggggccggcccgcgtcatatggtattccatccaaacgaacaatatgcgtattgcgtcaatgagttaaacagctcagtggatgtctgggaactgaaagatccgcacggcaatatcgaatgtgtccagacgctggatatgatgccggaaaacttctccgacacccgttgggcggctgatattcatatcaccccggatggtcgtcatttatacgcctgcgaccgtaccgccagcctgattaccgttttcagcgtttcggaagatggcagcgtgttgagtaaagaaggcttccagccaacggaaacccagccgcgcggcttcaatgttgatcacagcggcaagtatctgattgccgccgggcaaaaatctcaccacatctcggtatacgaaattgttggcgagcaggggctactgcatgaaaaaggccgctatgcggtcgggcagggaccaatgtgggtggtggttaacgcacactaa

SEQ ID NO: 261815 - DNA, 954 bp, Klebsiella pneumoniae
atgaagcatgaattatcaagtatgaaggcatttgtcatactggcagagtccagttcatttaacaatgccgctaaattactcaatattacgcaacctgcattaacgcgaagaataaaaaagatggaggaagatttacatatccaactatttgagcgtacaactcgcaaggttacgttaacaaaagtaggaaaaagattgctcccggaggcgcgggaattaataaagaaattcgatgaaacgctttttaatattcgtgatatgaatgcttatcatcgtggtatggtgacattagcgtgtattccgaccgcagtattttattttttaccgctggcaatcggtaaatttaatgagctgtatcccaatattaaagtgcggattctggaacaaggcacgaataattgcatggaatcggtgctgtgtaacgaatcagactttggcataaacatgaacaacgtcacaaattcatccatcgattttaccccactggtcaacgagccgttcgtgctggcctgtcggcgtgaccatccattggtcaaaaagcagcttgtagaatggcaggagttagtgggttacaaaatgattggcgtacgctcctccagcggcaaccgactgttgatagaacaacagctagccgacaagccctggaagctggactggttttacgaagtgcgtcatctttcgacgtcattaggactggtggaggcaggactggggatttcggcgcttcctggtctggcaatgccccatgcgccctattcttcgattattggtatcccactggtggaacccgttatacgtcggacattggggattattcgccgcaaagatgccgtgctttctccggcagctgaacgcttttttgccttgctgattaatttgtggactgacgataaagacaatttgtggaccaatatcgtcgaacgccagagacatgcgttacaggagataggttaa

SEQ ID NO: 261816 - DNA, 1053 bp, Klebsiella pneumoniae
atgaaaaaaataccctgcgtgatgatgcgaggtggaacctcgaggggcgcgttcctgttagcggaacatctacccgaagatcaaacgcagcgcgataaaatattgatggcaattatgggttccggtaacgatctggaaattgacggtattggcggcggtaatccgctgaccagtaaagtcgccattattagccgctccagcgatccgcgtgcagatgtcgattatctgtttgctcaagttatcgtccatgagcaacgtgtcgataccacgcctaactgcggcaatatgctgtctggcgttggggcattcgccattgaaaatggtttgattgcagcgacttcgccagttacccgcgtacgtatccgcaacgtcaatacgggtacgttcaccgaagctgatgtgcaaacgccaaatggtgttgtcgagtacgagggcagcgccagaattgacggcgtaccgggtactgccgcaccggttgcgctcactttcctgaatgccgccggaaccaaaaccggaaaagtcttcccgacggataatcagattgattattttgacgatgtcccggtgacctgtatcgatatggcgatgccagttgtcattattcctgctgaatatctgggaaaaacaggctatgaattaccgacggagttggatgccgacaaagcattattagctcgcattgaatctatccgtctacaagcgggtaaagcaatgggcttaggcgatgtcagtaatatggttatccctaaacctgtacttatttctccagcgcagaaaggcggggcaattaatgtgcgttattttatgccgcattcttgccatcgcgctttggcgataaccggtgctattgctatttccagtagttgtgcattggaaggcaccgtcacccgacaaatcgtcccttctgtaggatacggcaatatcaatattgaacaccccagtggtgcgctcgacgttcatttaagtaatgaaggtcaggatgccacgacgttacgcgcatctgttattcggacgaccagaaaaatattttccggtgaagtttatcttccctga

SEQ ID NO: 261817 - DNA, 1434 bp, Klebsiella pneumoniae; identical to SEQ ID NO: 9788

SEQ ID NO: 261818 - DNA, 2262 bp, Klebsiella pneumoniae; identical to SEQ ID NO: 9789

SEQ ID NO: 261819 - DNA, 1284 bp, Klebsiella pneumoniae
gtgaacacattttcagtttcccgtctggcgctggcattggcttttggcgtgacgctgaccgcctgtagctcaacaccgcccgatcaacgtccttctgatcaaaccgcgcctggtacctcttctcgcccgattctgtcggcaaaagaagcgcagaatttcgatgctcaacactattttgcatccctgacaccaggtgctgcagcgtggaatccttccccgattaccctgcctgcacaacctgactttgttgtcggcccggcgggtactcaaggtgtaacgcataccacgattcaggcggcggtagatgcggcaattatcaagcgtaccaacaagcgccagtatattgccgtgatgcctggtgagtatcagggaacggtgtatgtccctgccgctccgggtggaattactctgtacggtacaggtgaaaaaccgattgatgtgaaaattgggctttcccttgatgggggcatgagcccagccgactggcgtcacgacgtcaacccacgcggcaaatatatgccgggtaaaccagcgtggtatatgtacgatagctgccagagcaaacgcagcgacagcattggcgtgctctgttctgcggtcttctggtcacaaaacaatggcctgcaactgcaaaacctgaccatcgaaaacacactgggcgatagcgtagatgcgggtaaccatccggcggtggcactgcgtactgatggcgacaaagtgcagatcaataacgtcaatattctcggtcgccagaataccttctttgtcaccaacagaggtgtgcaaaaccgtctggaaagcaaccgtcagccgcgtaccctggtgactaacagctacattgaaggggatgtggatatcgtttctggtcgcggcgcagtggtgttcgataacaccgaattccgcgtggtgaactcccgtacccagcaagaagcgtatgtgtttgcaccggctacgctgtccaacatttactacggtttcctcgccgtaaacagccgtttcaatgcttccggggatggcgtggcgcaactgggccgctcgctggatgttgatgccaataccaacggtcaggtagtgatccgtgatagcgccatcaacgaaggttttaacacggcgaaaccgtgggccgatgcggtgatttccaatcgtccgtttgcgggtaatactggcaacgttgatgataacgacgaagtacagcgcaatctgaatgacactaactacaaccgcatgtgggaatacaataaccgcggcgtgggtagcaaagtggttgcagaggcgaagaagtaa

SEQ ID NO: 261820 - DNA, 1071 bp, Klebsiella pneumoniae; identical to SEQ ID NO: 9790

SEQ ID NO: 261821 - DNA, 603 bp, Klebsiella pneumoniae
atgagctattttctgcgcaaaaaatggatggtaaatttgtccgggtcaggaaaaattttatgggcgctaaacatgaaaaaagattcgtatccttatttgatttgcatgacagtttcagggctgatctttattttccttttcttctggtggcgggcagatatctacagggtcacgtttcttaatcagagtatatcccactattacattctgtttagcatgggaatagcttttctgttatctctgttttgggttaagaaggggatagtaaaacaaagaggctggaagagtctgtcagcataccttaaggtttatgcagggatgtgcatatttgcaggattttttctgattataccccttacgacactaacttattttttgcctggagagacatcgtcttatgttgcaccgtatcggtatacttccggtagttcaaaaagttgttctggagctgaggtggatgaccccgatctacatgagaatattcgcatttgctatccgtatggcaattatgagtacgataatattatctatgttgaaaagaaaattaatatattaggtgcggtagtgacatatgcacagaccgcgcgtgatgatactgaatga

SEQ ID NO: 261822 - DNA, 216 bp, Klebsiella pneumoniae
atgacacctcagcaggaaaacgcccttcgcagcattgcccgtcaggctaattctgaaatcaaaaaagccagacagcagtttccgaataaaaacgtcgatgacatttgccgtagcgtactgaagaagcaccgcgaaacggtaacgctgatgggattcacaccgactcatttaagcctggcaatcggcatgttaaacggcgtctttaaggaacgatga

SEQ ID NO: 261823 - DNA, 192 bp, Klebsiella pneumoniae
atgcacaaagcatctcccgttgagttaagaacgagtatcgagatggcacatagcctcgctcaaattggagtcaggtttgtgccaataccagtagaaacagacgaagaatttcatacgttagccgcatccctttcacaaaagctggaaatgatggtggcgaaagcagaagcagatgagagagaccaggtatga

SEQ ID NO: 261824 - DNA, 183 bp, Klebsiella pneumoniae; identical to SEQ ID NO: 9962

SEQ ID NO: 261825 - DNA, 681 bp, Klebsiella pneumoniae
atgacaccggacattatcctgcagcgtaccgggatcgacgtgagagctgtcgaacagggggatgatgcatggcacaaattacggctcggcgtcatcaccgcttcagaagttcacaacgtgatagccaagccccgctcaggaaagaagtggcctgacatgaaaatgtcctacttccacaccctgctggctgaggtttgcaccggtgtggctccggaagttaatgctaaggcgctggcatggggaaaacagtacgagaacgacgccagaactctgtttgagttcacttccggcgtaaatgttattgaatccccgatcatctatcgcgacgaaagtatgcgcaccgcctgctctcccgatggtttatgcagtgacggcaatggccttgagctgaaatgcccgtttacctcccgggatttcatgaaattccggctcggtggtttcgaggccataaagtcggcttacatggcccaggtgcagtacagcatgtgggtgacgcgaaaagatgcctggtactttgccaactatgacccgcgcatgaagcgtgaaggcctgcattatgtcgtgattgagcggaatgaaaagtatatagcgagttttgacgagatggtgccggagttcatcgaaaaaatggacgaggcactggctgaaattggttttgtatttggggagcaatggcgatga

SEQ ID NO: 261826 - DNA, 786 bp, Klebsiella pneumoniae
atgagtacagcactcgcaacgctggctgggaagctggctgaacgtgtcggcatggattctgtcgacccacaggaactgatcaccactcttcgccagacggcatttaaaggtgatgccagcgatgcgcagttcatcgcattgctgatcgtcgccaaccagtacggccttaatccgtggacgaaagaaatttacgccttccctgataagcagaacggcattgttccggtggtgggcgttgatggctggtcccgcatcatcaacgaaaaccagcagtttgacggcatggactttgaacaggacaacgaatcctgcacatgccggatttaccgcaaagaccgcaatcatccgatctgcgttaccgaatggatggatgaatgccgccgcgaaccattcaaaactcgcgaaggcagagaaatcacggggccgtggcagtcgcatcccaaacggatgttacggcataaagccatgattcagtgtgcccgtctggccttcggatttgctggtatctatgacaaggatgaagccgagcgcattgtcgaaaataccgcatacactgcagaacgtcagccggaacgcgacatcactccggttaacgatgaaaccatgcaggagattaacactctgctgatcgccctggataaaacatggaatgacgacttattgccgctctgttcccagatatttcgccgcgacattcgcgcatcgtcagaactgacacaggccgaagcagtgaaagctcttggattcctgaaacagaaagccactgagcagaaggtggcagcatga

SEQ ID NO: 261827 - DNA, 297 bp, Klebsiella pneumoniae; identical to SEQ ID NO: 10015

SEQ ID NO: 261828 - DNA, 1122 bp, Klebsiella pneumoniae
atgaagtatatagcaacatctgtagtggcaatgctgctcttatcgggttgtgataatacgcaaagtaacaattcatccccgtcagaaacagaagtcggcgttgttacagtcaaatctcaaccggtttcggtagtcagtgaattaaccggacgcaccagtgctgcgctcagtgctgaagtacgtccgcaggttgggggaattatccagaaacgcttatttaaggaaggtgatctggtcaaggctggacagccgctctaccagattgatgcggccagttatcaggctgcatggaatgaagctcgggcagcattacaacaagcacaggcactggtaaaagccgattgccagaaagcgcagcgttatgcccgactggtgaaagagaacggtgtttcacaacaggatgctgatgatgctcagtctacctgtgcacaagataaagccagtgtagaggcgaaaaaagccgcactggaaactgcgcgcattaatcttgactggaccacggtaaccgcaccgatttcagggcgcattggcatttcgtcggtaacccctggcgcactggtgaccgcgtcgcaagatacagcgttaacgactgttcgtggtctggatacaatgtatgtcgacctcactcgctccagtgtcgatttattacgtctgcgtaaacagtcactggcgaccaacagtgacaccatgagcgtctcacttattctggaagatggcacaacctacagcgaaaaagggcgtctggaactcaccgaagtcgctgtagatgagtctaccggttcggtgacattacgggcgattttccccaatccacaacagcagttattaccgggaatgtttgttcgcgctcgtgtcgatgaaggcgtgatggaagacgctattctcgcgccgcaacagggcgtcacgcgcgatgctaaaggcaatgcaactgcgctggtggtgaataaagacaataaagtagagcagcgaacgctcgaaacgggagaaacgtatggtgataaatggctggtgctgaacggcctgcacaacggcgaccgactgattgttgaaggttctgccaaagtcacttcagggcagaccgtcaaggctgttgaagttcaggctaatggaggcaacgcctga

SEQ ID NO: 261829 - DNA, 567 bp, Klebsiella pneumoniae
atgaccagcaaactggagatacgccacaaacagcgtcaggatgaaatcattaacgccgcccgtcggtgttttcgtcgctgcgggtttcatgccgccagtatgtcgcaaattgccagcgaagctcagcttagcgtgggtcagatatatcgttacttcgccaacaaagatgccattattgaagagatggttcgccgtatcatcgactttcgtattgcccaaatggacattgacgcgcgtaccgatcacttcccggaagtccttgccttgcgtaaatccttaaatgaggacgacgacgcgctgatgctggaagtggctgcagaagccacacgcaacccgcgggttatggcaatgcttgaagaagctgacgccagaatgttcgctaacggttgtgcacatatgaaaagaatgcatccccatcttagcgacgagcacattcgttgctgcgttgaagtgtttgctaccatgatggaaggtacggtttatcgtcgtttaacaccgcaaaaaagcgatccacaacatctgcaggaaatatatcaggatattgttagtatgttgataaataaataa

SEQ ID NO: 261830 - DNA, 1128 bp, Klebsiella pneumoniae
atggaacaacgccacatcaccggcaaaagccactggtatcatgaaacgcaatccagtactgcggaatatgacgttctgcctctggtcccggaagccgcaaaggtcagcgatccctttctgctcgacgtgatccttgatgaagaaacgctggcccccttcctttcatggctggtccctgcgcgcgttcttgcagtggagttgttccctgacccgcttaccgtgacccgttcacagaccttcaccgcttatgaacgcttgtcgacggccctgacggttgctcaggtttgcggcgtccaacggttatgtaactactattcggcgcgacttacgccgctccccgggcctgattcctccagggaaagtaatcatcggttggcacaaatcacgcaatatgcccgccaactggctagctcgccttctattatcgacaaccgatcgcgccagcatctgaatgacgtcggtcttactgtctgggactgtgtgatcattaatcaaatcattggttttattggctttcaggcgcggaccattgcgacatttcaggcttatctcgggcatccggtacgctggttacccggtctggagatacaaaactatgccgacgcgtcactgtttgctgatgaatcaatacgctggcgaagcagctatgaggtggaaaaactacctgaagagtacacaaaaagttcaactacagaactttgccaactggccgaaacactctctctccaccctatttcactttcccttctcgaaaagttgttaaacagcacacgggttaatacacagccggataatcagcttgcggcgttgatatgcgcgcggataaatggcagtcctgcttgttttgccgcctgtatggattcatcaaatgaatataaaaaaatcagcccccttctgcgcaagggcgaaaatgaaattaaccaatgggctgaccgtcattctgttgagcgcgctaccgttcaggcgatacaatggctgacccgagcacccgatcgctttagcgccgcccagttcagccctttactcgaacacgaaaaatcatcaacgcagattattaatctgctggtatggagcgggctgtgtggctggataaatcgcttaaaaatcgcgttgggtgagacatattaa

SEQ ID NO: 261831 - DNA, 1986 bp, Klebsiella pneumoniae
atgaaaaccgttagggagtccacaacgttgtacaactttctcggatcgcacaatccatactggcggttaacggaaagcagcgatgttttgcgcttttctaccaccgaaaccacagaacctgaacgtacgttgcagttatctgccgaacaggctgctcgcatcagggaaatgacagtcatcacttccagtctgatgatgagtctgaccgtcgatgaaagcgatctttctgtgcatctggtaggacgaaaaatcaataaacgggaatgggctggcaacgcgtcggcatggcatgacacaccggcggttgctcgtgatttatcacacgggctttcctttgctgagcaggtagtttctgaagcacattccgcaatagtgattctcgacagtcgggggaatatccagcgcttcaatcggttatgtgaagattacacagggttgaaagaacacgacgtcattgggcaaagcgtgtttaaactgtttatgagccgtcgtgaagctgcggcatccaggcgcaataaccgtgtattttttcgaagcggcaatgcatatgaagtcgaactgtggataccaacacgtaaaggccagcggctgtttctgtttcgcaataaatttgtccacagcggcagtggcaaaaacgagatttttttaatctgttccggcaccgacattaccgaagagcgccgcgctcaggagcgactgcgcattctggcaaataccgacagtatcaccggactgccgaatcgtaacgcaatgcaggagttaatcgatcacgctattaatcaggcagataacaataaagttggggttgtgtatcttgatttggataattttaaaaaggtcaacgacgcctatgggcatttgtttggtgaccagctattacgcgacgtgtcattggccattttaagctgtctggagcatgaccaggttttggcgcgtccaggtggcgatgagtttctggtactggcatccaatacctcacaaagcgcgctggaagcaatggcatcacgaattttgactcgcttacgactccccttccgcattggtttaattgaagtttataccagctgttcagtgggtatttcactctctcccgaacatggttcggacagcgcggctattattcgtcacgccgacacagcaatgtacacagcgaaggaaggcggacgaggacaattttgcgtttttactccagaaatgaatcagcgggtatttgaatatctctggctggataccaacttgcgtaaagcactggaaaacgatcagttggttattcactatcaaccgaaaatcacctggcgtggcgaagtgcgcagtctggaagctctagtacgttggcagtcacctgaacgtgggttgattccaccgttggacttcatttcctacgccgaagagtcagggctcattgtgcctttaggccgttgggtgattctcgatgtcgtacgccaggtggcaaagtggcgggataaaggtattaacctgcgagtggcggtaaacatttctgcacgtcagctcgccgatcaaaccattttcaccgccctgaaacaggttctccaggaactcaattttgaatactgccctattgatgttgaactgacggagagctgcctgattgagaatgatgaactggcactttctgttattcaacaatttagccaactaggtgcgcaagtgcatctggacgattttggtaccggctactcttcactttcgcaactggcgcgctttccgatcgatgcgattaaacttgaccaggtttttgttcgagatattcacaaacaacctgtatcgcagtcgctagtccgggcgatcgtcgctgtggcccaggcattgaatcttcaggtgatcgctgaaggtgtggagagtaaaaaggaagatgcttttttaaccaagaacgggatcaatgagcggcaaggatttttgtttgccaaaccgatgcccgccgtcgccttcgaacgttggtataaacgctatctgaagcgcgcataa

SEQ ID NO: 261832 - DNA, 174 bp, Klebsiella pneumoniae
atgtctgaatttgatgcccagcgcgttgccgaacgtattgatattgtgttagatatccttgtggcaggcgattaccactctgcgatccataatctcgagatacttaaagcagaactcttgcgccaggttgctgaatctacgccagacatcccgaaggcaccgtgggagatttaa

SEQ ID NO: 261833 - DNA, 750 bp, Klebsiella pneumoniae
atgaattcccgacaacaaacaattctacagatggtcattgaccagggtcaggttagcgtaaccgatctggcaaaagccactggagtttctgaagttaccattcgccaggatctcaacaccctcgaaaaactgagttacctccgccgtgcacatggctttgcagtatcgcttgatagtgatgacgtcgaaactcgtatgatgagcaactatacgctgaagcgtgaactcgccgagtttgccgcgtcactggttcaaccgggcgaaaccatctttatcgaaaatggcagcagcaatgccctgctcgcccggactctgggcgagcagaagaaaaatgtcactatcatcacggtcagcagctacatcgcgcatttgctgaaagacgcgccttgtgaagttattttgctcggtggcgtgtaccagaaaaaaagcgaaagtatggttggtcctttgacacgccagtgcatccaacaggtgcatttcagcaaagcatttattggtattgatggctggcaacctgaaactgggtttaccggtcgcgatatgatgcgtaccgatgtggtcaatgccgtgctggaaaaagagtgcgaagcgatagtcctgactgacagctcgaaatttggtgctgtacattcatactccatcggccccgttgagcgattcaatcgcgtgattaccgattcgaaaatacgcgccagcgatctgatgcatcttgagcacagtaaactcaccgttcacgtcgttgacatttaa

SEQ ID NO: 261834 - DNA, 327 bp, Klebsiella pneumoniae
atgagtgattccaacagccgtctggtctactcaacggaaaccggacgtattgatgagccaaaagcggcccctgtacgccctaaaggcgacggtgtggtgcgtattcagcgtcagaccagtggacgtaaaggtaagggcgtttgcttgattaccggtgtcgatctcgatgatgccgaactgacaaaacttgcagcggaactgaagaaaaaatgcggctgcggcggagcagttaaagatggagttattgaaatccagggcgataagcgtgatttattaaaatcactacttgaagcgaaagggatgaaggtaaaactcgcaggcggttaa

SEQ ID NO: 261835 - DNA, 798 bp, Klebsiella pneumoniae
atgctcgccgtttacctgtttcgcgccacttccggtgcccatcatcaagaaggtctggtcatgacgttaactgcttcatcttcttcccgcgctgttacgaattctcctgtggttgttgcccttgattatcataatcgtgatgacgcgctggcctttgtcgacaagatcgacccacgcgattgtcgtctgaaagtcggcaaagagatgtttacgctgtttggacctcaatttgtacgcgaacttcaacaacggggttttgatatcttcctcgacctgaaatttcacgatattcccaacactgcagcgcacgctgtcgctgctgcagctgacttaggcgtgtggatggtgaatgttcatgcctccggtggggcgcgtatgatgaccgcagcgcgtgaggcactggtgccgtttggcaaagatgcaccgcttttgattgctgtgacagtattgaccagcatggaagccagcgacctggccgatcttggcgtgacactgtcacctgcagattatgcagaacgtctggcagcactgacgcaaaaatgtggccttgatggtgtggtgtgttctgctcaggaagctgcgcgctttaaacaggtatttggtcaggagttcaaactggttacgccgggcattcgtccgcaggggagtgaagctggtgaccagcgccgcattatgacgccagaacaggcgtcggcggctggtgttgattatatggtgattggtcgcccgataacgcaatcggtagatccagcgcagacgctgaaagcgatcaacgcctctttacagcggagtgcatga

SEQ ID NO: 261836 - DNA, 1170 bp, Klebsiella pneumoniae
atgctggagttgttgtttctgcttttgcctgtagccgctgcctatggctggtatatgggccgcagaagtgcgcaacaaaacaagcaagatgaagccaaccgcttgtcgcgtgattacgtagcgggggttaactttctgcttagtaatcaacaggataaagcggtagacctgtttctcgatatgcttaaagaggatacgggtaccgttgaagcccaccttacgctcggaaacctgttccgttcgcgtggcgaagttgatcgcgctattcgcatccatcagaccctaatggaaagcgcctcgctgacctatgaacagcgtctgttggcgattcaacaactggggcgtgattacatggccgccgggttatacgaccgcgcggaagacatgttcaatcagctgaccgatgaaactgacttccgcattggcgcgctgcaacagttgctacaaatctaccaggctaccagcgagtggcagaaagcaattgatgttgccgaacgcctggtgaagctgggtaaagataaacagcgcgtcgaaattgcccatttctactgtgagttagccctgcagcatatggccagcgacgatctcgatcgtgccatggccttgttaaaaaaaggtgcggcggcagataaaaacagcgcccgcgtatccatcatgatgggacgcgtatttatggcgaaaggagaatacgccaaagccgtcgaaagtctgcaacgcgtgatatcccaggacagagaactggtcagcgaaacgctggaaatgctgcaaacctgctaccagcagttgggtaaaactgccgaatgggcagagttcctgcagcgcgcggtggaagagaacaccggtgccgatgctgaactgatgcttgcggacatcatcgaagcgcgcgacggtagtgaggccgcacaggtctatattacgcgtcagcttcagcgtcatccgaccatgcgtgtgttccataagcttatggattaccacttaaatgaagcggaagaagggcgtgccaaagagagtctgatggtgctgcgtgacatggttggcgagaaggtgcgtagtaagcctcgttatcgctgccagaaatgtggttttaccgcatacgctctctactggcattgtccgtcttgtcgggcctggtcaaccattaaaccgattcgcggtcttgatggcctgtaa

SEQ ID NO: 261837 - DNA, 309 bp, Klebsiella pneumoniae
gtgaaatatttactcattttcttactggtgttagcgatcttcgtgatttcggtcacgttaggtgcgcagaacgatcaacaggtgacgtttaattatctgttagcgcaaggggagtaccgtatttccacattgctggcggtattgtttgctgcggggtttgctatcggttggctgatttgcggtctgttctggctgcgagttcgtgtttccctggcgcgcgctgaacgtaaaataaagcgactggaaaaccagctttcacccgcgactgacgtggctgtagcgccgcattcgtcagcggcgaaggaataa

SEQ ID NO: 261838 - DNA, 765 bp, Klebsiella pneumoniae
atgcgttcgattgccagacgtaccgcagtgggagctgcactattgcttgttatgccagtagccgtatggatttctggctggcgttggcaacctggagaacaaagttggctactaaaagcggctttttgggttactgaaactgtcacccagccctggggcgtcattacacatttgattttattcggctggtttctctggtgtctgcgttttcgcattaaggctgccattatgttatttgccattctggcggcggcaatccttgtgggacaaggagttaaatcctggatcaaagacaaagtccaggaaccacgaccttttgttatctggctggaaaaaatacatcatattccggttgatgagttctacactttaaagcgagcagaacgcggaaatctagtgaaagaacagttggctgaagagaaaaatatcccacaatatttgcgttcacactggcaaaaagagacggggtttgcctttccttccggtcacacgatgtttgctgccagttgggctctgctggccgttggtttgctgtggccgcgtcgtcgaacgttaaccattgctatcttgttggtctgggcaacgggagtcatgggaagccgcctgctgctcgggatgcattggccacgcgatctggtggtagctacgttgatttcgtgggcgctggtggcggtggcaacgtggcttgcgcaacgaatttgtgggccattaacaccacctgtggaagaaaatcgcgaaattgcacaacgagaacaagaaagttaa

SEQ ID NO: 261839 - DNA, 168 bp, Klebsiella pneumoniae
atggtcggtcaggagcaactggagtcgtcaccattatgccagcatagtgacaatgaaacagaaacgaaacgggaatgttccgtcgttattccagacgactggcaactaacatcgcagcagcaagcctttatagaactgtttgctgaagatgatcagccgaaacaataa

SEQ ID NO: 261840 - DNA, 129 bp, Klebsiella pneumoniae
atgccttctggaaatcaggaaccccgccgcgatcctgaattaaaacgtaaagcctggctggcggtttttcttggttctgcacttttctgggtggttgtcgcactgctgatttggaaagtgtggggataa

SEQ ID NO: 261841 - DNA, 975 bp, Klebsiella pneumoniae
atgaaattacaacaacttcgctatattgttgaggtggtcaatcataacctgaatgtctcatcaacggcggaaggactttacacatcacaacccgggatcagtaaacaagtcagaatgctggaagacgagctaggcattcaaattttttcccgaagcggcaagcacctgacgcaggtaacgccagcaggacaagaaataattcgtatcgctcgtgaagtcctgtcgaaagttgatgccataaaatcggtcgccggagagcacacctggccggataaaggctcgctgtatatcgccaccacgcatacccaggcacgctacgcgttaccaaacgtcatcaaaggctttattgagcgttatccccgcgtttctttgcatatgcaccagggctcgccgacacaaattgctgatgctgtctctaaaggcaatgccgatttcgctatcgccacagaagcgttgcatctgtatgaagatctagtgatgttaccgtgctaccactggaatcgggctattgtagtcactccggatcacccgctggcaggcaaaaaagccattaccattgaagaactggcgcaatatccgttggtgacatataccttcggctttaccggacgttcagagctggatactgcctttaaccgcgcagggttaacgccgcgtatcgtcttcacggcaacggatgctgacgtcattaaaacttacgtccggttagggctgggggtaggggtcattgccagcatggcggtggatccggtcgccgatcccgacctggtgcgcgttgatgctcacgatatcttcagccacagtacaaccaaaattggttttcgccgtagtacttttttgcgcagttatatgtatgatttcattcagcgttttgcaccgcatttaacgcgtgatgtcgttgatgcggctgtcgcattgcgctctaatgaagaaattgaggtcatgtttaaagatataaaactgccggaaaaataa

SEQ ID NO: 261842 - DNA, 1185 bp, Klebsiella pneumoniae
  misc_feature (1121)..(1128): n is a, c, g, or t
atgggtaaagctcttgtcatcgttgagtccccggcaaaagccaaaacgatcaacaagtatctgggtagtgactacgtggtgaaatccagcgtcggtcacatccgcgatttgccgaccagtggctcagctgccaaaaagagtgccgactctacctccaccaagacggctaaaaagcctaaaaaggatgaacgtggcgctctcgtcaaccgtatgggggttgacccgtggcacaattgggaggcgcactatgaagtgttgcctggtaaagagaaggtcgtctctgaactgaaacaactggctgaaaaagccgaccacatctatctcgcaaccgaccttgaccgcgaaggggaagccattgcatggcacctgcgggaagtgattggtggtgatgatgcgcgctatagccgagtggtgtttaacgaaattactaaaaacgcgatccgccaggcatttaacaaaccaggtgagctgaatattgatcgtgttaatgcccagcaggcgcgtcgctttatggaccgcgtggtggggtatatggtttcgccgctgctgtggaaaaagatcgctcgtggtctgtctgccggtcgtgtgcagtcggtggcggtccgcctggtggtcgagcgtgagcgtgaaattaaagcgttcgtaccggaagagttctgggaagtcgatgccagcacgaccacgccatctggtgaagcgttggcgttgcaggtgactcatcagaacgacaaaccgttccgtccggtcaacaaagaacaaactcaggctgcggtaagtctgctggaaaaagcgcgctacagcgtgctggaacgtgaagacaaaccgacaaccagtaaacctggcgctccttttattacctctacgctgcaacaagctgccagcacccgtcttggttttggcgtgaaaaaaaccatgatgatggcgcagcgtttgtatgaagctggctatatcacatacatgcgtaccgactccaccaacctgagtcaggacgcggtaaatatggttcgcggttatatcagcgataattttggtaagaaatatctgccggaaagtccgaatcagtacgccagcaaagaaaactcacaggaagcgcacgaagcgattcgtccttctgacgtcannnnnnnngcaaagaaaactcacaggaagcgcacgaagcgattcgtccttctgacgtcaatgtga

SEQ ID NO: 261843 - DNA, 252 bp, Klebsiella pneumoniae
atgaacaaagagacacaacccatcgaccgcgagacgctgttgaaagaggccaacaaaatcattcgtgagcatgaggatacgctcgcagggattgaagccaccggcgtcacgcagcgtaatggcgtgctggtatttaccggcgactactttttagatgaacaaggattgccaacagccaaaagcaccgcggtgtttaatatgttcaaacacctggcccatgtgctttcagaaaaatatcacctggttgattaa

SEQ ID NO: 261844 - DNA, 1050 bp, Klebsiella pneumoniae
gtggaattgttgtctgaatatggtttgtttttggcgaaaatcgttaccgttgtgctagcgattgcggcgattgccgccattattgtcaatgttgctcaacgtaataaacgccagcgtggcgagttacgggtcaacaatatcagcgaacagtataaggagatgaaagaagaactggctgcggcgctgatggacactcatcagcaaaaacagtggcacaaaacgcagaagaaaaagcacaaacaagaagcgaaagcagcaaaagcgaaagccaaactgggcgaggtggcaactgacagtaaacctcgcgtctgggtgctggattttaaaggcagcatggacgcccatgaagtgaactcgctacgtgaagagataacggcggtactcgcagcattcaaaccgcaggatcaggttgtgctacgtctggaaagccctggtggtatggtgcatggttacgggctggcggcttcgcagctgcagcgtctgcgtgataaaaacattcctttaactgttacggtagacaaagttgctgccagtggcggttacatgatggcctgtgtggcagacaaaattgtttccgcaccgtttgctattgtgggttctattggcgtggtggcgcaaatgcccaactttaaccgcttcctgaaaagcaaagatattgatatcgaactgcacaccgccgggcagtataagcgcacgctgacgttgctgggtgaaaataccgaagaagggcgggagaaattccgcgaagagctgaacgaaacgcatcagttatttaaagattttgtgaagcgtatgcgtccgtctctggatattgaacaggtggcaacgggtgaacactggtacggacaacaggcggtagagaaaggcctggttgatgaaatcaacaccagtgatgaagttattcttagcctgatggaaggccgtgaagtggtcaatgtacgctatatgcagcgtaaacgactcattgaccgattcaccggcagcgcggcagagagcgccgatcgattgttgctacgctggtggcagcggggtcaaaagccattgatgtaa

SEQ ID NO: 261845 - DNA, 759 bp, Klebsiella pneumoniae
atgcattaccagccaaaacaagatttactcaatgatcgcattatcctggtgacgggagccagcgatggtattggccgtgaagccgcgatgacgtatgcacgctatggtgcgacagtgattctgttgggccgtaatgaagaaaaattacgtcaggtagccagccacataaacgaagaaactggacgtcagccacagtggtttattctcgatttgctgacctgcacgtccgaagattgccaacaactggcacagcgcattgccgttaattatccgcgtctggatggtgttttgcataatgccggattgctcggcgatgtttgcccaatgagcgaacaaaatccgcaggtctggcaggacgtcatgcaggtcaacgttaatgccacctttatgctcacccaggcactgcttcctttattactcaaatcggacgccggttcactggtctttacttcatcaagcgttggacgtcagggacgagccaactggggcgcatatgcagcgtcgaaatttgccaccgaagggatgatgcaggtactggccgatgaatatcagcagcgcctgcgcgtcaactgcattaacccaggcggtacgcgcaccgcaatgcgggccagcgccttcccgaccgaagatccacagaaacttaaaacacccgctgatatcatgccgctctacctctggctgatgggcgatgacagccgccgtaaaaccggcatgacctttgacgcccaaccgggccgtaaaccaggaatttcccaatga

SEQ ID NO: 261846 - DNA, 591 bp, Klebsiella pneumoniae
atgagtgatgaacgctaccaacagcgtcagcagcgagtgaaagaaaaagtcgatgctcgtgtggcccaggcccaggatgaacgcggtattatcatcgtttttaccggcaatggaaaaggcaaaaccaccgcggcatttggtacggcaactcgtgcagtaggccatggcaaaaaagtgggtatcgtgcagtttattaaaggcacctggcctaatggcgagcgcaatctactggagccacatggcgttgagtttcaggtgatggcaacgggctttacctgggatacacaaaatcgcgaatctgataccgcggcctgccgtgaagtctggcaacatgccaaacgaatgctggccgatccttcactggatatggttttgctcgatgagctgacttatatggtggcgtatgattatttgccacttgaagaagtggtgaaggcgttaaatgaacgtccacatcagcaaaccgtcattattacgggtcgtggttgtcatcgggatatacttgaactggcggatacggtaagtgaattacgccccgtgaaacatgcgtttgatgccggtgtaaaagcgcagatagggattgactactaa

SEQ ID NO: 261847 - DNA, 309 bp, Klebsiella pneumoniae
atgaacgatgtgcaaaaccgtagaatactggcattacttgatatgctgtataatactttgggtaataaaaccacatgtaatgtttgtcataaatattttatccatatcctcacagttatgaacaacctgacgattaactatggtactgaaacttcgccagagttagccgggataaattatgacgatgctaatgcgttaattactgaactgatattatttattgaagatgttgacgctgagaatcatgaagcatatccgggacatttgaatgagattacacgtattctgaatttcgctattgccgcttga

SEQ ID NO: 261848 - DNA, 399 bp, Klebsiella pneumoniae
atggcggttttgcgcaatgatatttatacaaaaagcaataagattgaaaattatacctttgcgaatgtgcatgataatatgttttattataatacagcatctaaaaactctaagaatacagagtttaacactctgaaaaacaggaaggagtttctaagttcagtaatcaatgtgaatgaaaccagactacaggcatcggcacctgccatgcctgcgattgaggctttaaatgcctttatagataagggtgattatctaaaaagcttatacgttaataaaacacgcacggcagctgaacaaaaaagattaaatgaaatattacgcgcacaggtcattagtgggttaaaggcgtctgaggggctggcaaaattacttattgccagcggaataatgttatag

SEQ ID NO: 261849 - DNA, 1647 bp, Klebsiella pneumoniae
atgaaagtgacattaacgtttaacgaacaacgtcgtgcggcgtatcgtcagcaagggctatggggcgatgcttcgctggccgattactggcagcagaccgctcgtgcgatgccagacaaaattgccgtggtcgataatcatggagcatcgtacacctatagcgcgctcgatcacgccgcgagctgtctggcaaactggatgttagcgaagggtattgaatcaggcgatcgcatcgcatttcaactgcctggctggtgtgaatttaccgttatctatcttgcctgcctgaaaatcggtgcggtttccgtaccgctgttgccttcctggcgggaagcagaactagtatgggtgctcaataagtgtcaggcaaaaatgttctttgctccgacgttgtttaaacaaacgcgtccggtagatttaatcctgccgctgcaaaatcagcttccacaactacaacaacttgtcggcgtggacaaactggctcccgccacctctgctctctcattaagtcagattatcgccgacaatactcctctaaccacggcgataacggtccacggcgatgaattagccgcggtgctgtttacctccggaaccgagggtctgccaaagggcgtgatgctaacgcataacaatattctcgccagtgagcgggcttattgcgcgcggttgaatctgacctggcaggatgtctttatgatgcctgcgccacttggtcatgcaacgggctttctgcatggcgtaacggcaccattcttaattggcgctcgcagcgtgttgttagatattttcactcctgatgcgtgtctcgcgctgcttgagcagcagcgttgcacctgtatgctcggcgcaacgccgtttgtctatgatcttttgaatttactggagaaacaacccgctgacctttcagcgctgcgcttctttctttgcggcgggaccacaatccccaaaaaagtggcgcgtgaatgccagcagcgcggcattaaattattaagtgtttatggttccacagaaagttcgccgcacgcagtggtgaatctcgacgatcctttgtcgcgctttatgcacaccgatggttacgctgccgcaggtgttgagattaaagtggtcgatgacgcacgcaagaccttaccgccaggttgcgaaggtgaagaagcctcgcgtggccccaatgtgtttatggggtattttgatgaacctgaattaaccgcccgtgccctggatgaagaaggctggtattacagcggcgatctctgctgcatggatgaggccggctatataaaaataaccgggcgcaagaaagatattattgtccgcggcggcgaaaatattagcagccgtgaagtagaagatattttattgcagcatcctaaaattcacgatgcctgtgtggttgcgatgcccgatgaacgtttaggtgaacgctcatgcgcttatgtcgtgctgaaagcaccgcatcattcattatcgctggaagaggtggtggctttttttagccgtaaacgggtcgcgaaatataaatatcctgaacatatcgtggtaatcgaaaaactaccgcgcactgcctcaggtaaaatacaaaagtttttgttaaggaaagatattatgcggagattaactcaggatgtctgtgaagagattgaataa

SEQ ID NO: 261850 - DNA, 294 bp, Klebsiella pneumoniae
atgagccagaacgctacggttaacgtcgacatcaaattaggcgtcaataaattccatgttgatgagggccacccgcatatcattttggcggcaaatcccgatatcaatgaattccgtaaattaatgaaagcctgccctgccggactttataagcaggatgacgccggcaacattcattttgattctgccggttgtctggagtgcggcacctgtcgggtgctgtgcggcaacactattctcgaacagtggcaatatcccgcaggcaccttcggtattgattttcgctacggctaa

SEQ ID NO: 261851 - DNA, 1290 bp, Klebsiella pneumoniae
atgtcggatgacaaatttgatgccattgtggtcggtgcgggcgttgccggtagcgttgccgcactggtcatggcgcgagccgggctggatgtcctggtgatagaacgcggcgacagtgccggatgtaaaaacatgaccggcgggcgtctttatgcccacacacttgaagcgattattccaggctttgcagcatcagcgccggtagaacgcaaggtcacacgcgagaaaatctccttcttaaccgaagaaagcgccgttaccctcgactttcaccgcgagcaaccagatgttccgcaacacgcgtcttataccgtattgcgtaatcgtctggacccgtggttgatggaacaagccgagcaggcgggcgcgcagtttatcccgggcgtacgcgtcgatgcgctggttcgtgaaggaaacaaggtcactggcgtgcaggccggggatgatgttcttgaagcgaatgtggtgattctggctgatggcgttaactcgatgcttggccgctcgctgggaatggtttccgcttccgatccgcatcattacgctgttggtgttaaagaggttattggcctcacaccagaacagatcaacgatcgctttaatattacgggcgaggaaggtgccgcctggctgtttgccggttccccttctgacggcctgatgggtggcggattcctctataccaataaggattccatatcgttggggctggtttgtggattgggtgatatcgcccatgcgcaaaaaagcgtgccgcaaatgctggaagattttaaacaacaccccgccattcgcccgctgattagcggcggcaaactgcttgaatattccgcgcatatggtgccggaaggcggtctggcaatggtgccgcagctggttaacgatggcgtgatgatcgttggtgacgccgcaggcttctgcctgaatttgggttttacagttcgcggcatggatttagccattgcatcagctcaggctgccgccacaacagtgattgccgccaaagaacgcgcggatttctccgccagcagtctggcgcaatacaaacgtgagctggaacaaagttgtgttatgcgcgatatgcagcatttccgcaagatcccggcgctgatggaaaatccgcgcctgtttagtcagtatccgcgcattgtcgccgacatcatgaacgatatgttcaccattgacggcaaaccaaaccagccggtacgcaaaatgatcatgggacacgcgaaaaaaattgggctgatcaacttgctgaaagatggcattaagggagcaaccgcgctatga

SEQ ID NO: 261852 - DNA, 939 bp, Klebsiella pneumoniae
atgagtcaattaaacagcgtctgggtctttagcgataatcctgaacgttatgctgaactgtttggcggcgcgcagcaatggggccaacaggtgtatgccattgtacaaaataccgaccaggcgcaggcagttatgccttatggtccaaaatgtatttatgttcttgagcaaaatgatgcgctgcaacgtactgaaaattacgccgaaagcattgctgccctgctgaaagataaacatccttctatgttgctgctggccgcgacgaaacgcggtaaagctctggcagcacggttaagtgtgcaactgaatgcggcgctggtgaacgatgccactgcggtggatattgtcgatggtcacatttgcgccgaacaccggatgtatggcgggttagcgttcgcacaggaaaagatcaacagcccgctggcgatcattacccttgcacccggtgttcaggaaccgtgcaccagtgataccgctcatcagtgcccgacagaaacggtaccttatgttgccccgcgtcatgaaattctctgtcgcgaacgccgtgcgaaagcggcaagcagcgtggacctgagcaaagcaaaacgtgtggttggcgtcggtcgtggtctggcagcgcaggatgacctgaaaatggtccacgaactggcggcggtgctgaatgctgaagtcggctgttcacgtccaattgccgaaggcgagaactggatggagcgtgaacgttatatcggtgtctccggcgtgttgctgaaatccgatctctacctgacgctggggatctccgggcagatccagcatatggttggcggcaacggcgcaaaagtgattgtcgccatcaataaagataaaaatgcgccaatcttcaactatgccgactacggtctggtgggcgatatctacaaagtcgtccctgccctgattagccagttgagccgctaa

SEQ ID NO: 261853 - DNA, 765 bp, Klebsiella pneumoniae
atgaaaataataacctgctttaagctggtgcctgaagaacaggacattgttgtcactccagaatataccctgaatttcgacaatgccgacgccaaaatcagccagttcgatctcaatgccattgaagctgcaagccagattgcaacagatgacgatgagatagccgcgctgaccgttggcggctcattgttgcagaactcgaaagtacgcaaagacgtgctatcccgcgggccgcatagcctgtatttggtgcaggatgcgcaacttgaacatgcactgcctctcgataccgcaaaagcactggcggcagcagttgaaaagatcggcttcgatttactgatctttggtgaaggttgcggtgacctttatgcccagcaggttggcttgctggtcggagaaattctgcaacttccggtgattaatgcagtgagtgctattcagcgtcagggcaatacactggtgattgaacgcacgcttgaagatgatgttgaagttattgagctctctgttccagccgtgctctgcgtcacctccgatattaacatgccacgcattccttcgatgaaagccattctcggcgcgggtaaaaaaccgataaatcagtggcaggcaagtgacattggctggagccagagcgcgccacttgctgagctgaccggcattcgcgtaccgccgcaaacagaacgtaagcacatcattctcgataacgattcgccggaggccattgccgagctggcggaatatctgaagaaagccctgaactga

SEQ ID NO: 261854 - DNA, 912 bp, Klebsiella pneumoniae
atgtatcaacgctgttttgataacgccagcgaaacgctgtttgtcgccggtaaaacgccacggctttcacgttttgcatttagcgatgatccaaaatgggagtccggacatcacgttcatgacaatgaaaccgagttgatttacgtcaagaaaggggtagcaaggtttaccatcgattcttcgttatatgtcgcgcacgccgatgacattgtggtgatagaacgtggcaggctgcatgcggtggcctctgacgttaacgatccggcaacgacgtgtacctgtgcgctgtacggctttcagtttcagggggctgaggaaaatcagctactgcaaccgcattcttgcccggtaattgccgcagggcagggaaaagaagttattaaaaccttatttaatgagctaagtgtgattttgccgcaaagtaaaaatagccaaacatcttcgttatgggacgcatttgcctatacgttagcaattctttactatgaaaactttaaaaatgcttatcgttcggagcagggatatattaaaaaagatgttctgataaaagatattcttttctatctgaataataactatcgcgaaaaaatcactttagagcagttatcgaaaaagtttcgtgccagcgtcagttatatttgccatgaatttaccaaagagtatcgtatttcccctattaactatgttattcaacggcgtatgacggaagcgaaatggtcactcactaatactgaattatcacaggcagagatctcctggcgtgtgggttatgaaaatgtcgatcactttgccaaactgtttttgcgccatgtcggctgttcgcccagcgattaccgcaggcaatttaaaaactgttttgcggaacaagaaatcttatctgaatttcctcaaccggtaagtcttgccggataa

SEQ ID NO: 261855 - DNA, 1152 bp, Klebsiella pneumoniae
atggatttttctttaactgaagaacaagaactgctgctggccagtattcgcgaactgattacgactaactttccggaagagtatttccgcacctgcgatcaaaacgggacatacccgcgtgaatttatgcgggcactggcggataacggtatttccatgcttggcgtgccggaagaatttggtggtatccctgcggattacgtcacccaaatgctggcgctgatggaagtgtcaaaatgcggtgccccggcatttttgatcaccaacggtcaatgtattcacagtatgcgccgtttcggttctgcagagcagctacgtaaaacggcagagagcaccctggaaacgggtgatcccgcctatgccctggcattgacggaaccaggcgcaggctcagataacaacagcgccaccaccacttacacgcgtaaaaacggcaaggtttacatcaacggccagaaaacctttattaccggcgcgaaagagtacccgtatatgctggtgctggcgcgcgatccagaaccgaaagatcccaaaaaagccttcaccctgtggtgggtcgactccagtaagcccggcattaagattaacccgctgcataaaatcggctggcatatgctcagcacctgcgaagtctatctcgacaacgtggaagttgaagagagcgacatggtgggcgaagaaggaatgggtttcctcaatgtgatgtacaactttgagatggagcgcctgatcaacgccgcgcgcagcaccggctttgccgagtgtgcctttgaagatgccgcccgctatgccaaccaacgtatcgcttttggtaagcccattggtcataaccagatgatccaggaaaaactggcgctgatggcgattaagatcgacaacatgcgcaacatggtgctgaaagtggcatggcaagccgatcagcatcagtcactgcgcaccagcgcggcgctggcaaaactgtactgcgcacgtaccgcaatggaagttattgatgatgcgattcaaatcatgggcggtctgggctataccgatgaggcgcgcgtctctcgcttctggcgtgatgtccgttgtgaacgtatcggcggcggtacagacgaaattatgatttacgtagcgggtcggcagatcctgaaagattatcagaacaaataa

SEQ ID NO: 261856 - DNA, 1596 bp, Klebsiella pneumoniae
atgaaacctgtaaaaccacctcgtattaatggacgagtgccggtcctgtcggcacaggaagcggtgaattatattcccgacgaagcaacactttgtgtgttaggcgctggcggcggtattctggaagccaccacgttaattactgctcttgctgataaatataaacagactcaaacaccacgtaatttatcgattattagtccaacagggcttggcgatcgcgccgaccgtggtattagtccgctggcacaagaaggtctggtgaaatgggcattatgcggtcactggggacaatcgccgcgtatttctgatctcgcagaacaaaataaaattattgcttataactatccacaaggtgtacttacacaaaccttacgcgccgccgcagcccaccagcctggtattattagtgatattggcatcgggacatttgttgatccacgccagcaaggcggcaaactgaatgaagtcactaaagaagacctgattaaactggtcgagtttgataaccaagaatatctctattacaaagcgattgcgccagatatcgccttcattcgcgctaccacctgcgacagcgaaggctacgccacttttgaagatgaggtgatgtatctcgacgcattggttattgcccaggcggtgcacaataacggcggtattgtgatgatgcaggtgcagaaaatggttaagaaagccacgctgcatcctaaatctgtccgtattccgggttatctggtggatattgtggtggtcgatccggatcaaacccaactgtatggcggtgcgccggttaaccgctttatttctggtgacttcacccttgatgacagcaccaaacttagcctgcccctaaaccaacgtaaattagttgcacggcgcgcattattcgaaatgcgtaaaggcgcggtggggaatgtcggcgtcggtattgctgacggcattggcctggtcgcccgagaagaaggttgtgctgatgactttattctgacggtagaaacaggtccgattggcggaattacttcacaggggatcgcctttggcgcgaacgtgaatacccgtgccattctggatatgacgtcccagtttgatttttatcacggtggcggtctggatgtttgttatttgagttttgctgaagtcgaccagcacggtaacgtcggcgtgcataaattcaatggtaaaatcatgggcaccggtggatttattgatatcagtgccacttcgaagaaaatcgttttctgcggcacattaactgcgggcagtttaaaaacagaaattaccgacggcaaattaaatatcgtccaggaaggacgggtgaagaaatttattcgggaactaccggaaattactttcagcggaaaaatcgctctcgagcgagggctggatgttcgttatatcactgagcgcgcagtattcacgctgaaagaagacggcctgcatttaatcgaaatcgcccctggcgtcgatttacaaaaagatattctcgacaaaatggatttcaccccagtgatttcgccagaactcaaactgatggacgaaagattatttatcgatgcggcgatgggttttgtcctgcctgaagcggctcattaa

SEQ ID NO: 261857 - DNA, 759 bp, Klebsiella pneumoniae
atgaaaaccgtaactgtaaaagatctcgtcattggtacgggcgcacctaaaatcatcgtctcgctgatggcgaaagatatcgccagcgtgaaatctgaagctctcgcctatcgtgaagcggactttgatattctggaatggcgtgttgaccactatgccgacctctccaatgtggattctgtcatggcggcggcaaaaattctccgtgaaaccatgccagaaaaaccgctgctgtttaccttccgcagtgccaaagaaggcggcgagcaggcgatttccaccgaggcttatattgcactcaatcgtgcagccatcgacagcggcctggttgatatgatcgatctggagttatttaccggcgatgatcaggttaaagaaaccgtcgcctacgcccacgcgcatgatgtgaaagttgtcatgtccaaccatgacttccataaaacgccggaagccgaagaaatcattgcccgtctgcgcaaaatgcagtccttcgacgccgatattcctaagattgcgctgatgccgcaaagtaccagcgatgtgctgacgttgcttgccgcgaccctggagatgcaggagcagtatgccgatcgtccaatcatcacgatgtcaatggcaaaaactggcgtaatttctcgtctggctggtgaagtatttggctcggcggcaacttttggtgcggtaaaaaaggcctctgcaccagggcaaatctcggtaaatgatttgcgcacagtattaactattttacatcaggcataa

SEQ ID NO: 261858 - DNA, 867 bp, Klebsiella pneumoniae
atggatgttaccgcaaaatacgaattgattgggctgatggcatatcccatccgccacagtttatcgcctgaaatgcagaataaagccttagaaaaagcgggattgccatttacctatatggcttttgaagtggataacgatagttttcccggagcaattgaaggattaaaagccctcaaaatgcgcggaactggtgtatcaatgccgaacaaacaactggcgtgtgaatatgttgatgaattaacgccagcggccaaactggtgggtgccatcaacaccatcgttaatgatgatggctatctgcgtggctataacaccgacggcacgggccatattcgcgccattaaagagagcggttttgatatcaaaggcaaaacgatggtgctgttaggggccggaggtgcctcaacggcgattggcgcgcagggggcaattgaaggtttaaaagaaattaaactctttaaccgtcgggatgagttcttcgataaagccctcgccttcgcgcagcgggttaacgaaaacaccgattgtgtcgtcacggttaccgatctcgccgatcagcaagcctttgctgaagccctggcttccgccgacattttaaccaatggcacaaaagtgggtatgaaaccccttgagaatgaatcattggttaatgatatcagtctgttacatccgggacttctggtcactgaatgcgtgtataacccgcatatgacgaagttattgcagcaggcgcaacaagctggttgcaaaacgattgatggatacggcatgttgttgtggcaaggggctgaacagttcacgttatggactggcaaagatttccctctggaatatgttaaacaggtcatggggttcggtgcctga

SEQ ID NO: 261859 - DNA, 1266 bp, Klebsiella pneumoniae
atgtctcaaaataaggctttcagcacgccatttatcctggctgttctttgtatttacttcagctatttcctgcacggcattagtgttattacgcttgcccaaaatatgtcatctctggcagaaaagttttccactgacaacgcgggcattgcctatttaatttccggtatcggtttggggcgattgatcagtattttattcttcggtgtgatctccgataagtttggtcgtcgggcggtgatattaatggcagtaataatgtatctgctattcttctttggtattcccgcttgcccgaatttaactctcgcctactgtctggcagtgtgcgtaggtatcgctaactcagcgctggatacgggtggctaccccgcgctcatggaatgctttccgaaagcctctggttcggcggtcatactggttaaagcgatggtgtcattcgggcaaatgttctacccaatgctggtgagctatatgttgctcaataacatctggtacggctatgggctgattattccgggtattctgtttgtactgatcacactgatgctgttgaaaagcaaactccccagccagttggtggacgccagcgtagctaatgaattaccgcaaatgaacagcaaaccgttagtctggctggaaggtgtttcatcagtactgttcggtgtagccgcattctcgaccttttatgtgattgtggtgtggatgcccaaatatgcgatggcttttgctggtatgtcagaagctgaggcattaaaaaccatctcttattacagtatgggctcgttggtctgtgtctttatttttgccgcactgctgaaaaaaatggtccggcccatctgggctaatgtatttaactctgcactggcaacaataacagctgccattatctacctgtacccttctccattggtgtgtaatgccggagcctttgttatcggtttctcagcagctggcggcattttacagctcggcgtttcggtcatgtcagagtttttcccaaaaagcaaagccaaagtcaccagtatatatatgatgatgggtggactggctaattttgttattccgctgattaccggttatctgtcgaacatcggcctgcaatatatcattgctctcgattttactttcgcgctgctggccctgattaccgcaattattgtctttatccgctattaccgcgttttcattattcctgaaaatgatgtgcggtttggcgagcgtaaatttagcacccggttaaacacaattaagcatagaggttaa

SEQ ID NO: 261860 - DNA, 1215 bp, Klebsiella pneumoniae
atgaaaaatccctattaccctaccgcactggggttgtattttaattacctggtgcatggtatgggcgtcattttgatgagcctgaatatggcctcgctggagacgctttggcagactaatgccgcaggcgtctcaatagttatctcatcgctgggtattggtcgattaagtgtcttgctttttgcaggattattatccgatcgctttggtcgccgcccttttatcatgctcgggatgtgttgctatatggccttcttttttggcatcctgcacaccaataacatcattatcgcttatgtttttggctttctggcgggaatggcaaacagttttctcgatgcaggcacctatcccagtttgatggaagcttttccacgctcaccgggtacagccaatattttaattaaagcatttgtttccagcgggcaatttttattaccgctaatcattagcctgttagtgtgggctgaactgtggttcggttggtcctttatgattgccgcaggcattatgtttattaacgctctgtttttataccgttgtacgttcccaccccatccgggtcgtcgcttacctgtcataaagaaaaccaccagctctacggaacatcgctgctcaataatcgatttagccagttataccttatatggctatatctcaatggcaacgttttatctggttagccagtggctggcacagtacggacaatttgttgcaggcatgtcatacactatgtcgatcaaactactcagtatctacaccgtgggttcgctgctttgtgtatttattaccgctccactcattcgtaataccgttcgagcaacaacattactcatgctgtacacctttatctcatttactgctctgtttaccgtctgcctgcatcccacattttatgtggtgataatatttgcttttgtcattggttttacctctgctggaggtgttgtgcaaattggcctgacattaatggctgaacgtttcccctacgctaaaggtaaagctacagggatctattacagtgcgggcagtattgcgacctttactattccgttgattacggctcatctgtcccaaagaagtattgccgatattatgtggttcgataccgccatcgctgccatcggctttttactggcactgtttatcggcttacgcagccgcaaagaaacgcggcatcactcgctaaaggaaaatgtcgctccgggtgggtaa

SEQ ID NO: 261861 - DNA, 357 bp, Klebsiella pneumoniae
atgaacgcttatgaactccaggcactccgccatatttttgctatgactattgatgaatgcgcgacctggattgcccagaccggtgacagtgaaagctggcgtcaatgggaaaatggcaaatacgccattcctgatcgtgtagtcgagcaactgttggctatgcgtcagcaaagaaaaaaacatcttcatgccatcatagagaaaataaataaccgcatcggcaacaacaccatgcgttttttccccgacttaaccgcgtttcaacaagtctaccctgatggcaattttattgactggaagatctatcaatcggtagccgctgaattatatgcacacgatctggagcgcctttgttaa

SEQ ID NO: 261862 - DNA, 1113 bp, Klebsiella pneumoniae
atggtaaatgttcgtcagcccagggatgtcgcacaaattctgctttcggtgctgtttttagccatcatgattgtggcatgtctgtggattgttcaaccctttattctcggctttgcatgggccggtacggtggttatcgccacctggccggtattgttacgtttgcaaaagatcatgtttggccgccgctctctcgccgttctggtgatgacgctgttattagtgatggtgtttatcatccctattgctttgctggttaacagtatcgtcgacggcagcggcccgctaattaaagccatttccagcggtgacatgacgttacccgatctggcgtggcttaataccattccggtgattggcgcgaagctgtatgcaggctggcacaacttgctggatatgggggggacggcgatcatggcaaaagtccgtccttatattggcaccaccaccacctggttcgttgggcaggcggcgcatatcgggcgctttatggtgcattgtgcgctgatgcttctcttcagcgccctgctgtactggcgcggtgaacaagtggggcaaggcattcgccattttgcaacccgtctggcaggcgttcgtggagatgccgccgtgctgctagcggcacaagctatccgcgcggtggcgctgggtgttgtggtgacagcgttagtacaggcagtgcttggcggtatcggcctcgccgtatccggcgtaccttatgcaacgttgctcacggtgttaatgatcctctcctgccttgtccagcttggaccgttgccggtactgattccggcgattatctggctctactggaccggtgataccacctggggaacggtattgttagtgtggagcggtgtggttggcacgctggataacgtcatccgcccaatgttaattcgcatgggtgccgatttaccgctgatcctgatcctctctggtgttattggtggtttgattgctttcgggatgatcggtctatttattggtccggttcttttagccgtttcctggcgtctgtttgccgcgtgggtggaagaggtcccaccgccgacggaccaaccggaagaaattctcgaagaacttggcgaaaccgagaaaccgaataagtaa

SEQ ID NO: 261863 - DNA, 1887 bp, Klebsiella pneumoniae
  misc_feature (1849)..(1858): n is a, c, g, or t
atgattccacagatttcccaggcacccggcgtcgttcaactggtgcttaattttttgcaagagctggagcaacaggggtttaccggcgatacggcgacaagttatgccgatcgtctgacaatgtcgaccgacaacagtatttaccaacttctccccgatgcggtggtatttccgcgttcaaccgcagatgtggcgctgatcgcccgtcttgccgcgcaggaacgctattcatcgctgatctttaccccccgcggcggcggcaccggcactaacggtcaggcgctcaaccaggggattattgttgatatgtcccgccatatgaaccgcatcatcgaaattaaccctgaagagggctgggtgcgcgttgaggccggggtgataaaagatcaactcaatcagtacctgaaaccgttcggctacttttttgcgccggaactttcgaccagcaaccgggcaacgctcggtgggatgatcaataccgatgcatccggtcagggatcgctggtctatggcaaaacgtcagatcacgtacttggcgtacgcgcggtgttgttggggggcgatattctcgatacgcaacctttacccgtcgagctggcggaaacgctgggtaaatccaataccacaatcgggcgaatttataacacggtttatcaacgttgccgtcagcaacgccagttaatcatcgacaacttccccaaacttaaccgctttcttaccggttacgatctgcgtcatgtctttaacgacgagatgaccgagtttgacctgacgcgcattctgacgggttcagaagggacgctggcctttattaccgaagcgcggctggatattacgcccttgcctaaagtgcgccgtctggtgaacgtcaaatatgactcttttgactccgcgctgcgtaacgcgccgtttatggttgaggcgcgggcgctttcggtagagacggtggactcaaaagtgctgaatctggcgcgggaagatattgtctggcattccgtcagcgagttgattaccgatgtgcctgacaaagaaatgctcgggctgaacattgtggaatttgctggtgatgatgagacgctgattgatgagcgagtaaatgcactctgtgcgcggctggatgaacttatcgccagtcagcaagcaggtgtgatcggctggcaggtatgcagtgagctggcaggtgttgagcgtatttatgcgatgcgcaaaaaagctgtcggcctgctcggtaatgccaaaggagcagccaagccaattccgtttgctgaggatacctgcgtaccgccggaacatctggcagattatattgctgaatttcgcgcgctgctcgacagccacggcttaagctacggtatgtttggtcacgtcgatgcaggtgtcctgcacgtccgtccggcactggatatgtgcgatccgcaacaagagattttgatgaagcaaatctctgatgatgtagtggcgcttaccgcgaaatacggtggtttgttgtggggcgagcacggcaaaggttttcgcgccgaatacagcccggcgtttttcggtgaggaactttttgcagaactgcgtaaagtgaaagcggcatttgacccgcataaccgactcaacccagggaagatttgcccgccagaaggtctcgatgcaccgatgatgaaagtggacgcggtgaagcgtggcacatatgatcgacagatccccattgcggtacgccagcagtggcgtggtgcgatggagtgtaacggcaacggtttatgcttcaactttgatgcccgcagtccgatgtgcccgtcgatgaagattacccagaaccggattcattcaccgaaagggcgcgcaacgctggtgcgtgaannnnnnnnnnccgaaagggggcgcaacgctggggcgtga

SEQ ID NO: 261864 - DNA, 1254 bp, Klebsiella pneumoniae
  misc_feature (6)..(15): n is a, c, g, or t
gtgaannnnnnnnnnccgaaagggggcgcaacgctggggcgtgaatggctgcgtttgttggcagatcgcggtgttgacccagtcaaactggaacaagagctgcctgaatcaggcgtcagtttgcggacgttaattgcccgcacgcgcaatagctggcatgcgaataaaggcgaatatgacttctcccacgaagtcaaagaggcgatgtcgggctgtctggcctgtaaagcttgttcgacccagtgcccaatcaaaattgacgtgcctgagtttcgttctcgctttctgcaactctatcacacccgttatttgcgcccgctgcgcgaccacctcgtcgccacggtcgagagctacgcaccgctgatggcacgcgcgccgaaaacctttaacttcttcattaaccagccgctggtgcgcaaactctcggaaaaacatatcggcatggttgatttgccgctgctgtcggtcccctcgctacaacaacaaatggtggggcatcgctcggcaaacatgacgctggaacagcttgaagctctcagtgcagagcagaaagcgcgcacggtgctggtggtgcaggacccctttaccagctattacgatgcgcaagtggtggcggattttgtccgtctggtcgaaaaattaggtttccagccggtgttactgccattttcgccaaatggcaaagcccagcatatcaaaggctttcttaatcgttttgcgaagacggcgaaaaagacggcggatttcctcaaccgtgtggcgaagctggggatgccaatggtgggagtcgatccggcgctggtactttgttatcgcgatgaatataaactggcgctgggcgaggaacgtggcgagtttaacgtcttactggcgaatgaatggctggcaagcgcacttgactcacagccagtggctacagtcagcggtgaatcatggtatttctttggtcactgtaccgaagttaccgctttgccgggcgcgccagcacaatgggccgcgatatttgcccgttttggcgcgaaactggaaaatgtcagcgtgggttgctgcggcatggcagggacttacggacatgaagcgaaaaaccataaaaattcgctcgggatctatgagttatcctggcatcaggcgatgcagcgactgccgcgtaatcgctgtctggcgaccggatattcctgccgtagccaggtaaaacgggtcgaaggcacgggggtacgccatcctgtgcaggctttactggagattattaaatga

SEQ ID NO: 261865 - DNA, 411 bp, Klebsiella pneumoniae
atgatatggaaacgaaaaatcaccctggaagcactgaatgccatgggtgaaggaaacatggtggggttgctggatattcgctttgaacatattggtgatgacacccttgaagcgacaatgccagtagactcgcggacaaagcagcctttcgggttgctgcatggaggggcatccgtggtactggccgaaagtatcggttccgttgccggttatttatgtaccgaaggtgagcaaaaggtggttggtctggaaatcaatgctaaccacgtccgctcggcacgagaagggcgggtgcgcggcgtatgcaaaccgttgcatctcggttcgcgtcaccaggtctggcagattgaaatcttcgatgagaaagggcgtttgtgctgttcgtcacgattgacgaccgccattttgtga

SEQ ID NO: 261866 - DNA, 189 bp, Klebsiella pneumoniae
atgtctactcaacttgatcccacccagctggccattgaatttttacgccgtgaccaaagcaatctttcacctgcccaatatctcaaacgtctgaaacaactagaacttgaatttgctgacctgcttactctctcttctgctgaattaaaagaagaaatctactttgcctggcgtctgggcgtgcattga

SEQ ID NO: 261867 - DNA, 369 bp, Klebsiella pneumoniae
atggacatgcattcaggaacctttaatccacaggatttcgcctggcagggcttaacgctgacacccgcagccgctgtccacatccgcgagctggtggcaaagcagccgggtatggtcggcgtgcgcttaggcgtgaagcaaacgggctgcgcgggctttggctatgtgctcgacagtgttagcgagccggacaaagacgatctgctgtttgaacacgacggcgcgaagctgtttgtcccgctgcaagcgatgccgtttattgatggcacggaagtcgattttgttcgtgaaggacttaatcagatattcaaatttcacaaccctaaagcccagaatgaatgtggctgtggcgaaagctttggggtatag

SEQ ID NO: 261868 - DNA, 1488 bp, Klebsiella pneumoniae
atgtctcgtaatactgaagcaactgacgatgtcaaaacctggaccggcggcccgctgaattataaagaaggattcttcacccagttagccaccgatgagctggcaaaggggataaacgaagaggtggtgcgcgcaatttcggcgaagcgtaatgagccggagtggatgctggagtttcgtctcaacgcctatcgcgcatggctggagatggaagaaccgcactggttgaaagcgcactacgacaagctgaattatcaggattacagctactactcagcaccatcgtgcggtaattgtgacgacacttgtgcgtctgaacccggcgtggtgcagcaaactggcgcgaacgcctttttaagtaaagaggtggaggcggcgtttgagcagttgggcgttcccgtgcgggaaggcaaagaggtggcggtggacgccattttcgactctgtttcggttgccaccacttatcgcgaaaaactggcggagcagggaattattttctgttcctttggcgaggcgatccacgatcacccggaactggtgcgtaaatatctcggcaccgtggtgccggggaatgacaacttctttgccgcacttaatgcggcggtagcctctgacggtacgtttatttatgtgcctaaaggcgtgcgctgcccgatggaactttccacctattttcgtattaacgcggaaaaaaccgggcagtttgagcgcaccattctggtggccgacgaagacagctacgttagctacattgaaggctgttccgctccggtgcgtgacagctatcagttacacgcggcggtggtggaagtcatcatccataaaaacgccgaggtgaaatattccacggtacaaaactggttccctggcgataacaacaccggcggtattctcaacttcgtcaccaagcgtgctttgtgcgaaggcgaaaacagcaaaatgtcatggacgcaatcagaaaccgggtcagcgattacgtggaaatatcccagctgtattttgcgcggcgataactccattggtgagttttactcagtggcgctgaccagcggtcatcagcaagcggataccggcaccaagatgatccacatcggtaaaaacactaaatcgaccattatctcgaaagggatctctgccggacatagtcagaacagttatcgcggcttagtgaaaatcatgccgacggcaaccaatgcgcgcaatttcactcagtgcgactcaatgctgattggcgctaattgtggggcgcataccttcccgtatgtcgaatgtcgcaataacagcgcacaactggagcacgaggcaacaacatcacgtattggtgaagatcaactgttttactgcctgcaacgcgggatcagcgaagaagacgccatctcgatgattgttaacggtttctgcaaagacgtgttctcagaactgccgctggaatttgccgttgaagcacaaaaactcctcgccatcagtcttgaacacagcgtcggataa

SEQ ID NO: 261869 - DNA, 1272 bp, Klebsiella pneumoniae
atggctggcttaccgaacagcagtaacgcgttgcaacagtggcatcacttgtttgaagctgaagggacaaaacgctcaccgcaagcacagcagcatttacaacaattgctgcgtaccggactgccgacacgtaaacatgaaaactggaaatatacgccgctggaagggctgaccaatagccagtttgtcagcattgcgggagagatatccccacagcagcgtgatgccttagcgttaacgtcagacgccgtgcggctggtgtttgttgatggacgttacgtgcccgcgctgagcgatgcaactgaaggcagcggatatgaagtgagcattaacgacgaccgtcaggggttacccgacgctattcaggcggaagtgtttctgcatttgacggaaagccttgcgcatagcgtgacgcatatcgccgtgaagcgcggtcaacggccggtaaagccattgctgttaatgcatatcacccagggcgtggcaggtgaagaggtgaacactgcccattaccgacatcatctggatctggcggaaggtgccgaagcaacggtgatcgaacattttgtcagccttaatgatgctcgtcattttaccggggcacggttcactatcaatgtcgcagcgaacgcccacttgcagcatatcaagctggcgtttgaaaacccgctcagtcaccactttgcccataacgatttgttgctggctgacgatgccaccgcatttagccacagtttcctgctgggtggcgcagtgttacgacacaacaccagtacgcaactcaatggcgaaaacagcacgctgcggatcaatagcctggcgatgccggtgaaaaacgaggtgtgtgatactcgtacctggctggaacacaataaaggtttttgtaacagccgacagttgcacaaaactatcgtcagcgacaaaggccgcgcggtatttaacggtttgatcaacgtcgcgcagcacgccatcaaaacggatggtcagatgaccaacaataatctgctgatgggcaaactggcggaagtggatacgaaaccgcagctggaaatctatgcagatgatgtgaaatgcagccacggcgcgacggtggggcgcattgatgacgaacagatgttttatctgcgctcgcgcgggatcaatcagcaagatgcccagcagatgatcatctacgcctttgctgctgaactgacggaagcactgcgtgatgaggggcttaaacagcaggtgctggcccgaatcggtcaacggctgccaggaggtgcaagatga

SEQ ID NO: 261870 - DNA, 1221 bp, Klebsiella pneumoniae
atgactttttccgtcgacaaagtgcgggccgactttccggtgctttcgcgtgaggtaaacggtttgccgctggcttatctcgacagcgccgccagtgcgcagaaaccgagccaggtgattgatgccgaggctgagttttatcgtcatggctacgcggcggtgcatcgcggtattcataccttaagcgcccaggcgaccgagaaaatggagaacgtgcgcaagcgggcatcgctgtttattaatgcccgttcggcggaagagctggtgttcgtccgcggcacgacggaagggatcaatctggtcgccaatagctggggtaacagcaatgtgcgggcgggcgataacatcatcatcagtcagatggagcaccacgctaacattgttccctggcagatgctttgcgcacgcgttggcgcagagctgcgtgtgatcccgctcaatcccgacggtacgttgcaactggagacgctacctacgctgtttgatgagaaaactcgcctgctggcaattactcatgtctccaacgtgctgggaacggaaaatccgctggcggaaatgatcacgcttgcgcatcagcatggcacaaaagtactggtggatggcgctcaggcggtgatgcatcatccggtggacgttcaggcgctggattgcgatttttacgtgttctccgggcataaactgtatggccccactgggattggcattctttatgtcaaagaagccttgttgcaggagatgccgccgtgggaagggggcggttctatgatcgccaccgtcagcctgagtgaaggcactacctggaccaaagcaccttggcggtttgaagccggtacacccaataccgggggcatcattggtcttggcgcggcgctggagtatgtgtcggcgctggggcttaataatatagccgagtatgaacagaatctgatgcactacgcgctatcacagctggaatctgtaccggatctcactctctatggtccccagaacagacttggcgttattgcttttaatcttggtaaacaccacgcctatgatgttggcagttttctcgataattacggcattgctgtgcgtaccggacatcactgcgctatgccattaatggcctattacaacgttcctgccatgtgtcgggcgtcgctggctatgtataacacccatgaagaagtggatcgtctggtgaccggcctgcaacgtattcaccgtctgctgggataa

SEQ ID NO: 261871 - DNA, 1005 bp, Klebsiella pneumoniae
atgaaacgcgcgtctttgcttacactcacgcttatcggcgcttttagcgccatccaggctgcctgggcggttgattatccgctacctccaaccggaagccgactggttgggcaaaatcaaacgtatacggtgcaagaaggggataaaaaccttcaggccatcgcccgacgttttgatactgcggcaatgttgatccttgaagccaataacactatcgccccggtgccaaaacctggtacgacgataactattccttcgcaactgttattacctgatgcgccgcgtcaggggattatcgttaacctggcagagctgcgcctttattattatccgccgggagaaaatatcgtgcaggtctatccgataggtattggtttgcaggggctggaaacgccagtgatggaaacgcgtgtggggcagaaaatccctaacccaacttggacgcctacggcgggcattcgtcagcgttcgctggagcgtggcattaaattaccgccagtcgttcctgccgggccaaataacccgctaggacgttacgcactgcgcctcgcgcatggtaatggcgaatacctcattcatggcaccagtgcgccggacagcgtcggtttgcgcgtcagttcgggctgtattcgcatgaatgcgccggatattaaagccttattctccagcgtgcggacgggaacgccggtgaaagtgatcaacgaaccggtgaaatattccgtggaaccgaacgggatgcgttatgttgaagtacatcgaccactatcagcagaagaacagcagaacgttcagacaatgccatacacactgccagcaggctttacgcaatttaaagacaataagggtgtagatcagaaattagtcgataaagcgttgtatcgtcgggcagggtatccggttgcggtgagcagtggagcaactcccgcagccagcaatgcgccttcagtagagtcagcgcagaatggtgaaccagagcaagggaatatgttacgcgcgacgcagtag

SEQ ID NO: 261872 - DNA, 816 bp, Klebsiella pneumoniae
atgctcgaattatccatgacgttaccgattaaagtgcaaaatggtggattatttatttcccgtggcgtagggaggcatccggcaaggcggctggagtcatgggaaattatctttgtcgaaaaaggtcgattagcgattcaggaagaagagcggatatttctggtcgatgcgggagagagtttattactctggccgaaccgacagcatgttggggtagaggattttcccgccgatctcaaattttactggctgcattttgaggttaaagcgccggatagcgacccgcgctggctcactcatcttagcgtgccgcaacaaacgaaggttgccgatccgcaggcgctggtggccctgtttcgccagttcttaagcgaacaggaaaagcatcaacgcactccggcgctggagtttattgtgctgctgattttgcagcaactcacccgtgacgcgcgtcttgatgaacaggccgatgccgcaggtaccacgcttgcctggaaagcgcagaaactgatccgcacgcaatatcatcgcccgctttctacggcgcttttagcccgcgagctgtactgcaatgccgattatcttgggcgtgtctatcggcgggtgtttcatctgacgttaacagaagcaatccatcgccagcgagtgcgcgaagccgaaaagctgttaattagcgaagcgcgatcgctcacggaagtggcggcgttgtgcgggtttaatgacgttggttatttccgacagatttttcgcaaacacaccggtttaacgccagctgcgtggaagcgacgttacagcaaggaacatatcaattcgtag

SEQ ID NO: 261873 - DNA, 861 bp, Klebsiella pneumoniae
gtgcgtaatcatccgttagggatttatgaaaaagcgctggcgaaagatctctcctggcctgagcggctggtgctggcaaaaagctgcggctttgattttgtcgaaatgtcggtggatgaaaccgacgaacgtttgtcacgccttgactggagcgccacacaaaggacttcgctggttgccgcgatgatcgaaacgggtgttgggatcccgtcgatgtgcctgtccgcacatcgtcgctttccttttggtagccgtgacgacgcggtacgccagcgagcacgggagatcatgagtaaagcgattcgtctggcgcgcgatctcggcattcgcaccattcaactggcgggttatgacgtctattacgaagaccacgacgaaggcacccagcaacgttttgcagaagggctggcgtgggcggtcgaacaggcggcggcatcacaagtcatgctggcagtggagattatggataccgcgtttatgaactccatcagcaaatggaaaaaatgggacgagatgctcgcctcgccgtggttcaccgtctacccggacgtcggcaacctcagcgcctggggcaatgatgttcccgccgaactgaaactgggcattgaccgtatcgccgcgatccacctgaaagacacccagccagtcaccgggcaaaatcccggacagttccgtgatgtgccgtttggcgaaggctgcgtcgatttcgttggcatcttcaaaacgctgcatgaactgaactatcgcggttctttcctgattgagatgtggaccgaaaaagccaaagagccggtgctggagattattcaggcgcggcgctggattgaagcgcgtatgcaggaggctggatttatatgttag

SEQ ID NO: 261874 - DNA, 663 bp, Klebsiella pneumoniae
atgagccgaccacttctgcaactggccctcgaccactcatcacttgaagccgcgcagcgcgacgtgacgctgttaaaagacagcgtcgatatcgtcgaagcgggcaccattctctgtttaaacgaagggcttggcgcagtgaaagccttacgcgaacaatgcccggacaaaatcatcgttgctgactggaaggtcgccgacgctggtgaaacgctcgcgcaacaggcgtttggcgcgggtgccaactggatgaccatcatctgcgccgcgccgctcgcgacggtggaaaaaggccacgcgatggcgcaacgctgcggtggtgaaattcagatcgagttgttcggtaactggacgctggacgacgcccgcgactggcatcgtattggcgtgcggcaggccatttatcatcgcggtcgtgacgcacaggccagcgggcaacagtggggcgaggccgatctggcacgcatgaaggcgctttccgatatcggccttgagctttccattaccggcgggattacccctgctgacctgccgctgtttaaagatatccacgtgaaagcgtttattgccggacgagcactggcaggcgcagcaaatccggcgcaggtggctggcgatttccatgcgcaaattgatgccatctggggaggcgcgcgtgcgtaa

SEQ ID NO: 261875 - DNA, 1497 bp, Klebsiella pneumoniae
atgacgcaatactggctggggttagattgtggcggtagctggctgaaagccgggctgtatgaccgcgaaggccgggaggcaggcgtgcagcgcctgcctctgtgcgcattaagcccgcagccaggctgggcagagcgcgatatggcagaactgtggcaatgctgcatggctgtcattcgcgccctgcttactcattctggtgtcagcggggagcaaatagtgggtatcggtatctccgcacagggaaagggcttgtttttgctggataaaaacgacaagccgctcgggaatgctattttgtcctcggaccgccgggcgatggaaatcgttcgtcgctggcaggaagatggcatcccggaaaaactttacccgctgacccgacaaaccttgtggaccgggcatccggtgtcgctgttacgctggctgaaagagcacaaaccagaacgctacgcgcaaattggctgcgtgatgatgacgcacgactacctgcgctggtgtttaaccggcgtcaaaggctgtgaagagagcaatatttccgagtccaacctctacaacatgagtcttggggaatatgacccgtgcctcaccgactggcttgggatcgctgaaatcaaccacgccctgccgcctgttgtcggatctgccgaaatctgcggggagatcaccgctcagacagccgcactgaccggtctgaaagcgggtacgcccgttgtcggcggcctgtttgatgtggtttctaccgcactctgcgccgggatcgaagacgaatttaccctcaatgcggtaatgggcacttgggcggtgaccagcggcataaccagcggtttgcgtgacggtgaagcgcatccgtatgtctatggtcgctacgttaacgatggtcaatttatcgttcacgaagccagccccacctcttccggcaacctcgaatggtttaccgcacagtggggagaaatctcgtttgatgagatcaaccaggccgttgccagcttgccgaaagccggtggcgatctctttttcctgccgttcctgtacggcagcaacgccggactcgagatgaccagcggtttctacgggatgcaggccattcacacccgcgcacacctgttgcaggccatttatgaaggggtggtattcagccatatgacccatctcaaccggatgcgcgaacgttttactgatgtgcacaccctgcgcgtcactggcggcccggcgcattccgatgtctggatgcaaatgctggcggacgtcagcggactgcgtatcgagctgccgcaggtggaagaaaccggctgttttggcgcggcgcttgccgcccgcgtcggcaccggggtttatcacaacttcagcgaagcccaacgtgatttacagcacccggtacgcaccctgctgccggatatgaccgcccatcagctttaccaacaaaaataccaacgctatcagcatctcattgccgcacttcagggctttcacgcccgcatcaaggagcacacattatga

SEQ ID NO: 261876 - DNA, 987 bp, Klebsiella pneumoniae
atgaaattacgctctgtaacctacgcattattcatttctggcctggctgcattcagtacatcttcactggcggcacaatctttacgtttcggttatgaaacctcacaaaccgactcgcaacatattgcagcgaaaaaattcaatgaattattacaggaaaaaaccaaaggcgaactgaaattaaaattgtttccggatagcaccctcggtaatgcacaggcgatgatcagcggcgtgcgtggcggcaccatcgatatggaaatgtccggctcgaataactttgccggattgtcacctgtgatgaacctgcttgatgtccctttcctgttccgcgataccgcccacgcgcataaaacgctcgacggcaaagtcggtgatgacctgaaagtctcccttgaaggtaagggactgaaagtactggcctattgggaaaacggctggcgcgatgtcaccaactcgcgtgcgccagtgaaaacacctgccgacctgaaagggctgaaaattcgcaccaacaatagtccgatgaatatcgccgcattcaaagtctttggcgctaacccgatcccgatgccgtttgccgaagtctataccgggctggaaacccgcactatcgacgctcaggaacaccctatcaacgtcgtctggtcagcaaaatttttcgaagtgcagaaatacctttctctgacccatcacgcctattccccgcttctggtggtgatcaacaaagcgaagtttgacggcttaaccccggagttccagcaggcgctgatctcatctgcgcaggaagcgggtaactaccagcgcaaactggttgccgaagatcagcaaaaaatcatcgacggcatgaaagaagcgggcgtggaagtcatcaccgatctcgaccgcaaagcctttagcgacgcactgggtactcaggtccgcgacatgtttgttaaagatgttccgcagggcgctgagctgctgaaagccgtggatgaggtgcaataa

SEQ ID NO: 261877 - DNA, 1278 bp, Klebsiella pneumoniae
atggctgtgctgatttttctgggctgtctgttgggtggtattgctatcggtttgcctattgcctgggcactgttgttgtgcggggcggcgttaatgttctggctggagatgtttgatgtccagatcatggcacaaacgctggtgaacggagccgacagcttctccctgctggcgattccgttctttgtgctggcgggtgaaatcatgaatgcgggcggcttgtcaaaacgcattgttgacctgccgatgaaactggtggggcataaaccaggcgggctgggctacgtcggcgtgctggcggctatgattatggcaagcctttctggttctgccgttgcggataccgccgccgttgccgctctactggtgccgatgatgcgcagcgccaactacccggtcaaccgggcggcggggctgattgcctctggcggcattatcgcgccaattattcccccttccattccgtttattattttcggcgtttccagcggattatccatcagtaagctgtttatggcgggcattgcccctggcatgatgatgggcgcaacgctgatgcttacctggtggtggcaggccagtcgccttaatttaccccgccagcaaaaagcaacgatgcaggaaatctggcactcttttgtctccggtatctgggcgctgtttcttccagtcatcattattggcgggtttcgctccggtctgtttacccctaccgaagccggggccgttgctgctttctatgcgttgtttgtcgccacagttatttaccgtgaaatgaccttcgccacactttggcatgtgcttattggcgcggcgaaaacgacctcagtggtgatgtttctggtggcctcggcacaagtttccgcctggctgatcaccattgctgaactgccgatgatggtttctgatttactgcaaccgctggtcgattcaccgcgtctgctgtttatcgtcattatggtggctatcctgattgtcggcatggtcatggatttaacgccgacggtattaattcttaccccggtattaatgcctttagttaaagaggcaggaatcgatccgatttatttcggtgtcatgtttatcattaactgctcaatcggcttaattacaccgcctatcggtaatgtgcttaacgttatttcaggggtggcaaaactcaaattcgatgatgcagtcagaggcgttttcccttacgtcctggttttatattcattattagtcgtatttgtttttattcccgatctcatcatcctccctttgaaatggattaattaa

SEQ ID NO: 261878 - DNA, 474 bp, Klebsiella pneumoniae
atgaaaaaaatacttgaagcaatactggcgattaatctcgccgtactttcctgtattgtgtttataaacattattttaagatatggttttcagacaagcattttatctgtagatgaattgtcacgttatttatttgtctggttaacatttattggcgcgattgtggcttttatggataacgcccacgttcaggtcacctttctggtggagaaactctcccccgcatggcagcgacgagtcgctctggttacccattccttaatcttatttatttgtggcgcactggcctggggcgcaacgctaaaaacaattcaggactggagcgattattcaccgatcctcggtttgcccatcggcctgatgtatgccgcttgtctgcccaccagcctcgttatcgcattctttgaactgcgtcatttatatcaactcatcacgcgtagcaattctctaacgacgccaccgcaaggagcttaa

SEQ ID NO: 261879 - DNA, 468 bp, Klebsiella pneumoniae
atgatttttggacatatcgcgcaacccaatccgtgccgtttgcctgccgccattgaaaaggcgctcgattttctgcgcgctaccgatttcaacgccctggagccgggtgttgtcgaaatcgacggcaagaatatttatgcgcaaattatcgatttaaccacacgcgaagcggcggaaaaccgtccggaagtgcatcgtcggtatatcgatattcagtttctggcgtggggtgaagagaaaatcggcattgctattgatacgggaaataataaagtcagcgaatcactattagagcagcgcgatattattttttatcacgatagtgaacatgaatcatttatagaaatgataccgggcagctacgctattttcttcccgcaggatgttcatcgaccaggttgtattctgcaaacagcctctgagatacgaaaaattgtggttaaagtcgcattaacagcgctgaattaa

SEQ ID NO: 261880 - DNA, 474 bp, Klebsiella pneumoniae
atgaaccggtttattattgcggatgcgacgaaatgtatcggttgccgtacctgtgaagtggcttgcgcagtgtcgcatcaggagaatcaggattgcgctgcgttgtcaccagatgagtttatttcccgtattcgtgtcattaaagaccacagctggaccacggcggtagcctgtcatcagtgtgaagatgcaccgtgcgcgaatgtctgccctgttgacgcgataagccgcgaacatgggcatattttcgttgaacaatcacgttgcattggctgtaaaagctgtatgctggcttgcccgtttggtgcgatggaggtcgtttcttcgcgcaaaaaggcgagggcgattaagtgcgatctgtgctggcatcgggagacggggccggcctgtgttgaagcctgcccgacaaaggcgttgcagtgcatggatgtcgagaaagtgcagcggcatcggctacggcagcagcctgtttga

SEQ ID NO: 261881 - DNA, 2031 bp, Klebsiella pneumoniae
atgaaactcgccgcctgttttctgacgctccttcctggcttcgccgttgccgccagctggacttctccggggtttcccgcctttagcgaacaggggacgggaacatttgtcagccacgcgcagttgcccaaaggtacgcgtccactaacgataaattttgaccaacagtgctggcagcctgcggatgcgataaaactcaatcagatgctttccctgcaaccttgtagcaacacgccacctcaatggcgattgttcagggacggcgaatatacgctgcaactagacacccgctccggtacaccaacattgatgatttccatccagaacgccgtcgaaccggtagcaagcctggtccgtgaatgcccgaaatgggatggattaccgctcacactggatgtcagcgccacttttccggagggagccgcagtccgggattattacagccagcaaattgcgatagtgaagaacggtcaaataacgttacaacccgctgccaccagcaacggtttactcctgctggaacgggcagaaactgacgcccctgcccctttcgactggcataacgccacggtttactttgtgctgacagatcgtttcgaaaacggcgatcccagtaatgaccagagttacggacgtcataaagacggtatggcagaaattggcacttttcacggcggcgatttacgcggcctgaccaacaaactggattacctccagcagctgggcgtcaatgctttatggataagtgccccatttgagcaaattcacggctgggtcggcggcggtacaaaaggcgatttcccgcattatgcctaccacggttattacacacaggactggacgaatcttgatgccaatatgggcagtgaagccgatctacggacactggttgatagcgcgcatcagcgcggtattcgtattctctttgatgtcgtgatgaaccacaccggctatgccacactggcggatatgcaggagtatcagtttggcgcgttatatctttctggtgacgaagtgaaaaaaacgttgggtgaacgctggagcgactggaaacctgccgccgggcaaacctggcatagctttaacgattacattaatttcagcgacaaaacaggctgggataaatggtggggaaaaaactggatcagaaccgatatcggcgattacgacaatccgggattcgacgatctcactatgtcgctggcctttttgccggatatcaaaaccgaatcaacgaccgcttctggtctgccggtgttctataaaaacaaaacggatacccacgctaaagtcatcgacggctttacccctcgcgattacttaacccactggttaagtcagtgggtccgcgactatgggattgatggttttcgggtcgacaccgccaaacatgttgagttgcccgcctggcagcaactgaaaaccgaagccagcgccgcgcttcgcgaatggaaaaaagctaaccccgacaaagcattagatgacaaacctttctggatgaccggtgaagcctggggccacggcgtgatgcaaagtgactactatcgccacggcttcgatgcgatgatcaatttcgattatcaggagcaggcggctaaagcagtcgattgtctggcgcagatggatacgacctggcagcaaatggcggagaaattgcaggatttcaacgtgttgagctacctctcgtcgcatgatacccgcctgttccgtgaagggggcgacaaagcagcagagttattattattagcgccaggcgcggtacaaatcttttatggtgatgaatcctcgcgtccgttcggccccaccggttcggatccgctgcaaggtacgcgttcggatatgaactggcaggatgttagcggtaaatctgccgccagcgtcgcgcactggcagaaaatcagccagttccgcgcccgccatcccgcaattggcgcgggcaaacaaacgacactttcgctgaagcagggctacggctttgttcgtgagcatggcgacgataaagtgctggtcatctgggctgggcaacagtga

SEQ ID NO: 261882 - DNA, 825 bp, Klebsiella pneumoniae
atgattttgactcccatacgacgatatggggcgatgattcttatgttactcactctggtgttttcgagtgaggtgttagcgaagacgcacacaacaacagcgagtcaaaagtcccacttaactaaagctagtaataaacaggtaagcagtaaacaagagtattctcgcaatagtgcaaagagtagttcacttcctgatttgcgaaaatacccttccggaacaccaaggaaaaaggcgtttctccggactgtaatgccttacattaccagccaaaatgcggccattactgcggaacgtaactggctcatttcaaaacagtatcagggccaatggtcacctgctgagcgtgcgcgtctgaaagacatcgccaaacgctacaaggtgaagtggtctggtaatacgcgcaaaatcccgtggaataccttgcttgaacgcgtagacattatccccactagtatggtggcgacgatggctgcagcagaaagcggttggggaacgtcgaagctggcgcgcaacaacaacaacctgttcggcatgaaatgcatgaaaggacgttgtactaatgcgccgggtaaagtgaaggggtactcacagtttagttctgtcaaagaatcggtgagcgcctatgtcactaacctgaatactcacccggcttactcttcgttccgtaaatcgcgtgcacagctgcgtaaagcggatcaggaagtgactgccacagcgatgattcacaaactgaagggctactcgaccaaagggaagagttataacaactacctgttcgcaatgtaccaggataaccaacggttaatcgcggcgcatatgtaa

SEQ ID NO: 261883 - DNA, 1179 bp, Klebsiella pneumoniae
atgtttactaaacgtcaccgcatcacattactgttcaatgccaataaagcctatgaccggcaggtagtagaaggcgtaggggaatatttacaggcgtcacaatcggaatgggatattttcattgaagaagatttccgcgcccgcattgataaaatcaaggactggttaggagatggcgtcattgccgacttcgacgacaaacaaatcgagcaagcgctggctgatgtcgacgtccccattgttggggttggtggctcgtatcaccttgccgaaagttacccacccgttcattacattgccaccgataactatgcgctggttgaaagcgcatttttgcatttaaaagagaaaggcgttaaccgctttgctttttatggtcttccggaatcaagcggtaaacgttgggccactgaacgcgaatatgcatttcgtcagcttgtcgccgaagaaaagtatcgcggagtggtttatcaggggttagaaaccgcgccagagaactggcaacacgcgcaaaatcggctggcagactggctacaaacgctgccaccgcaaaccgggattattgccgttactgacgcccgggcgcggcatattctgcaagtatgtgaacatctacatattcccgtaccggaaaaattatgcgtgattggcatcgataacgaagaactgacccgctatctgtcgcgtgtcgccctttcttcggtcgctcagggcgcgcggcaaatgggctatcaggcggcaaaactgttgcatcgattattagataaagaagaaatgccgctacagcggattttggtcccaccagttcgcgtcattgaacggcgctcaacagattaccgctcgctgaccgatcccgccgttattcaggccatgcattacattcgtaatcacgcctgtaaagggattaaagtggatcaggtactcgatgcggtcgggatctcgcgctccaatcttgagaagcgttttaaagaagaggtgggcgaaaccatccatgccatgattcatgccgagaagttggagaaagcgcgcagtctgctgatttcaaccaccttgtcaatcaatgagatatcgcaaatgtgcggttatccatcgctgcaatatttctactctgtttttaaaaaagcatatgacacgacgccaaaagagtatcgcgatgtaaatagcgaggtcatgttgtag

SEQ ID NO: 261884 - DNA, 1182 bp, Klebsiella pneumoniae
atgtcgaaaagcaatccgtctgaagtgaaattggccgtaccgacatccggtggcttttccgggttgaagtcactgaatttgcaggtcttcgtgatgattgcagctatcatcgcaatcatgctgttctttacctggaccaccgatggtgcctacttaagcgctcgtaacgtctccaacctgttacgccagaccgcgattaccggcatcctcgcggtaggaatggtgttcgtcataatttctgctgaaatcgacctttccgtcggctcaatgatggggctattaggtggcgtcgcggcgatttgtgacgtctggctaggctggcctttgccacttaccatcattgtgacgttggttctgggactgcttctcggtgcctggaacggatggtgggtcgcgtaccgcaaagtcccttcatttattgtcaccctcgcgggcatgttggcatttcgcggcatactcattggcatcaccaacggcacgactgtttcccccaccagcgccgcgatgtcacaaatcgggcaaagctatctacccgccagcaccggcttcatcattggcgcgcttggcttaatggcttttgttggctggcaatggcgcggaagaatgcgccgtcaggctttgggtttgcagtctccggcctctaccgcagttgtcggtcgccaggcattaacggcgattatcgtcttaggcgcaatctggctgttgaacgattaccgtggcgttcccactcctgttctgctgctgacgttgctgttactcggcggaatgtttatggcaacgcggacggcatttggacgacgcatttatgccatcggcggcaatctggaagcagcacgtctctccgggatcaacgttgaacgcaccaaacttgccgtattcgctattaacggattaatggtcgctatcgccggattaatcctcagttctcgacttggcgctggttcaccttctgcgggaaatatcgccgaactggacgcaattgccgcatgcgtgattggcggcaccagtctggctggcggtgtgggaagcgttgccggagcggtaatgggggcattcatcatggcttcactggataacggtatgagtatgatggatgtaccgaccttctggcagtatatcgttaaaggtgcgattctgttgctggcagtatggatggactccgcaaccaaacgccgttcttga

SEQ ID NO: 261885 - DNA, 1542 bp, Klebsiella pneumoniae
atgccttatctacttgaaatgaagaacattaccaaaaccttcggcagtgtgaaggcgattgataacgtcagcttgcggttgaatgctggcgaaatcgtctcactctgtggggaaaatgggtctggtaaatcaacgctgatgaaagtgctgtgtggtatttatccccatggctcctacgaaggcgaaattatttttgcgggagaagagattcaggcgagtcacatccgcgataccgaacgcaaaggtatcgccatcattcaccaggaattggccctggtgaaagaattgactgtgctggaaaatatcttcctgggtaacgaaataacccacaatggcattatggattatgacctgatgacactacgctgtcagaagctgctcgcacaggtcagtttatccatttcacccgatacccgcgttggcgatttagggcttgggcaacaacaactggttgaaattgccaaggcacttaataaacaggtgcgtttgttaattctcgatgaaccgacagcctcattaactgagcaggaaacgtcggttttactggatattattcgcgatctgcaacagcacggtatcgcctgtatttatatttcgcacaaactcaacgaagtcaaagcgatttccgatacgatttgcgttattcgcgacggtcagcacattggtacgcgtgatgctgccggaatgagtgaagacgatattatcaccatgatggtcgggcgagagttaaccgcgctttaccctaatgaaccacataccaccggagatgaaatattacgtattgaacatctgacggcatggcatccggttaatcgtcatattaaacgagttaatgatgtctcgttttccctgaaacgtggcgaaatactgggtattgccggactcgttggtgccggacgtaccgagaccattcagtgcctgtttggcgtgtggcccggacaatgggaaggaaaaatttatattgatggcaaacaggtagatattcgtaactgtcagcaagccatcgcccaggggattgcgatggtccccgaagacagaaagcgcgacggcatcgttccggtaatggcggttggtaaaaatattaccctcgccgcactcaataaatttaccggcggtattagccagcttgatgacgcggcagagcaaaaatgtattctggaatcaatccagcaactcaaagttaaaacgtcgtcccccgaccttgctattggacgtttgagcggcggcaatcagcaaaaagcgatcctcgctcgctgtctgttactcaacccgcgcattctcattcttgatgaacctaccaggggtatcgatattggcgcgaaatacgagatctacaaattaattaaccaactcgtccagcagggtattgccgttattgtcatctcttccgaattacctgaagtgctcggccttagcgatcgtgtactggtgatgcatgaagggaaactaaaagccaacctgataaatcataacctgactcaggagcaggtgatggaagccgcattgaggagcgaacatcatgtcgaaaagcaatccgtctga

SEQ ID NO: 261886 - DNA, 993 bp, Klebsiella pneumoniae
atgaaaataaagaacattctactcaccctttgcacctcacttctgcttaccaacgttgcggcacacgccaaagaagtcaaaataggtatggcgattgatgatctccgtcttgaacgctggcaaaaagatcgagatatttttgtgaaaaaggcagaatctctcggcgcgaaagtatttgtacagtctgcaaatggcaatgaagaaacacaaatgtcgcagattgaaaacatgattaaccggggcgtcgatgttcttgtcattattccgtataacggtcaggtattaagtaacgttgtaaaagaagccaaacaagaaggtattaaagtattagcttacgaccgtatgattaacgatgcggatatcgatttttatatttctttcgataacgaaaaagtcggtgaactgcaggcaaaagccctggtcgatattgttccgcaaggtaattacttcctgatgggcggctcgccggtagataacaacgccaagctgttccgcgccgggcaaatgaaagtgttaaaaccttacgttgattccggaaaaattaaagtcgttggtgaccaatgggttgatggctggttaccggaaaacgcattgaaaattatggaaaacgcgctaaccgccaataataacaaaattgatgctgtagttgcctcaaacgatgccaccgcaggtggggcaattcaggcattaagtgcgcaaggtttatcagggaaagtagcaatttccggccaggatgcggatctcgcaggtattaaacgtattgctgccggtacgcaaactatgacggtgtataaacctattacattgttggcaaatactgccgcagaaattgccgttgagttgggcaatggtcaggaaccaaaagcagataccactctgaataatggtctgaaagatgttccctcccgcctgctgacaccgatcgatgtgaataaaaacaacatcaaagaaacggtagttaaagacggattccacaaagagagcgagctgtaa

SEQ ID NO: 261887 - DNA, 1323 bp, Klebsiella pneumoniae
atgcaagcctattttgaccagctcgatcgcgttcgttatgaaggctcaaaatcctctaacccgttagcattccatcactataatcccgacgaactggtgttgggcaagcgtatggaagagcacttgcgttttgccgcctgctactggcacaccttctgctggaacggggcggacatgtttggtgtgggggcgtttaatcgtccgtggcagcagcctggtgaggcactggcgttggcgaagcgtaaagcagatgtcgcatttgagtttttccacaagttacatgtgccattttattgcttccacgacgtggatgtttcccctgagggcgcgtcgttaaaagagtacatcaataattttgcgcaaatggttgatgtcctggcaggcaagcaagaagagagcggcgtgaagctgctgtggggaaccgctaactgctttacaaaccctcgctacggcgcgggtgcggcgacgaacccagatccagaagtcttcagctgggcggcaacgcaagttgttacagcgatggaagcaacccataaattgggcggtgaaaactatgtcctgtggggcggtcgtgaaggttacgaaacgttgttaaataccgacttgcgtcaggagcgtgaacagctgggccgctttatgcaaatggtggttgagcataaacataaaatcggctttcagggtacgttgcttatcgaaccgaaaccgcaagaaccgaccaaacatcaatatgattacgatgctgcgacagtctatggcttcctgaaacagtttggtctggaaaaagagattaaactgaacattgaagctaaccacgcgacgctggcaggtcactctttccatcatgaaatagccaccgccattgcgcttggcctgttcggttctgtcgacgctaaccgtggcgatgcacaactgggctgggacaccgaccagttcccgaacagtgtggaagagaatgcgttggtgatgtatgaaattctcaaagcaggcggtttcaccaccggcggtctgaacttcgatgccaaagtacgtcgtcaaagtactgataaatatgatctgttttacggtcatatcggcgcgatggatacgatggcgttggcgctgaaaattgcagcacgcatgattgaagatggcgagctggataaacgcatcgcgcagcgttattccggctggaatagcgaattaggccagcaaatcctgaaaggccaaatgtcactggcagatttagccaaatatgctcaggaacacaatttgtctccggtgcatcagagtggtcgccaggagcaactggaaaatctggtaaaccattatctgttcgacaaataa

SEQ ID NO: 261888 - DNA, 1455 bp, Klebsiella pneumoniae
atgtatatcgggatagatcttggcacctcgggcgtaaaagttattttgctcaacgagcagggcgaggtggttgctgcgcaaacggaaaagctgaccgtttcgcgcccgcatccactctggtcggaacaagacccggaacagtggtggcaggcaactgatcgcgcaatgaaagccctgggcgatcagcattctctgcaggacgttaaagcattgggtattgccggccagatgcacggtgcaaccttactggatgcccagcaacggttattacgccctgccattttgtggaacgacgggcgctgtgcgcaagagtgcgctttgctggaagcgcgagttccgcaatcgcgggtgattaccggtaacctgatgatgcccggatttactgcgcctaaattgctatgggttcagcggcatgagccggagatattccgtcaaatcgacaaagtattgttaccgaaagattacttgcgtctgcgtatgacgggggagtttgccagcgatatgtctgacgcagctggcaccatgtggctggatgtcgcaaagcgtgactggagtgacgacatgctgcaggcttgccacttatctcgtgaccagatgcccgcattatacgaaggcagcgaaattactggtgctttgctacctgaagttgcgaaagcgtggggtatggcggcggtgccagttgtcgcaggcggtggtgataatgcagctggtgcggttggtgtaggaatggttgatgctaatcaggcaatgttatcgctggggacgtcgggagtctattttgctgtcagcgaagggttcttaagcaagccagaaagcgccgtacacagcttttgccatgcgctaccgcagcgttggcatttaatgtctgtgatgctgagtgcagcgtcgtgtctggattgggctgcgaaattaacgggcctgaacaatgtcccagctttaatcgcggctgctcaacaggctgatgaaagtgccgagccagtttggtttctgccttatctttccggcgagcgtacaccacacaataatccccaggcgaagggggttttctttggtttgactcatcaacatggccccaatgaactggcgcgagcagtgctggaaggcgtgggttatgcgctggcagatggcatggatgtcgtgcatgcctgcggcattaaaccgcaaagtgttacgttgattggtggcggggcgcgtagtgagtactggcgtcagatgctgacggatatcagcggtcagcaactcgattaccgcacggggggggatgtggggccagcactgggcgcagcaaggctggcgcagattgcggcgaatccagagaaatcgctcattgagttgttgccacaactgccgttagaacagtcgcatctaccagatgcgcagcgttatgccgcttatcagccacgacgagaaacgttccgtcgcctctatcagcaacttctgccattaatggcgtaa

SEQ ID NO: 261889 - DNA, 342 bp, Klebsiella pneumoniae
atgaaaacctcaaagactgttgcaaaactattatttgttgttggggcgctggtttatctggttgggctatggatctcatgcccattgttaagtggaaaaggctattttcttggcgtgttaatgacagcaacttttggtaactatgcatatcttcgcgcagaaaaactcgggcaactggatgatttttttatccatatctgccagttagttgcgttgatcactatcggtctcttgtttatcggtgttttaaacgcacctatcaatgcttatgaaatggtgatttatcccatcgccttttttgtctgcttgtttggtcaaatgcgtttgtttcgctcggcatga

SEQ ID NO: 261890 - DNA, 438 bp, Klebsiella pneumoniae; identical to SEQ ID NO: 28842

SEQ ID NO: 261891 - DNA, 996 bp, Klebsiella pneumoniae
atgcagcccaaaatttactggattgataacctgcgagggatagcgtgtttaatggtggtgatgattcacaccactacctggtatgtgaccaatgctcatagtgttagccccgtcacctgggatatcgccaatgttctgaattctgcctctcgtgtcagcgtgccgctatttttcatgatttccggctatctcttttttggcgaacgcagcgcccagccgcgccattttttacgtatcggcttatgtctgcttttttatagcgcaatcgcactgctctacattgcgctgtctacctccatcaatgtggagttagcgctgaaaaacctgctgcaaaagccagtgttttaccacttgtggtttttcttcgcgattgcggtgatttatctggtttcaccgctgattcaggtgaagaacgtcggcggaaaaatgttgctggtgctaatggtggtgattggtattatcgctaacccaaacacagtgccgcagaaaattgacggttttgaatggctgccaattaacttatatatcaatggcgatactttttactacatcctttatggcatgttgggccgcgctatagggatgatggacacacagcataaagcactgtcgtgggggagcgccgcactgtttgcgacgggggtttttattatctctcgcgggacattatatgaattgcagtggcgcggaaattttgccgatacctggtatctttactgtgggccgatggtttttatctgcgcaatcacgctattgactctggttaaaaacacgcttgatacgcgtaccgttcgcggacttggcttaatctcccgccattcgttgggtatatacggattccacgccttgattatccatgcactgcgcacccgggggattgagcttaaaaactggccaatactcgatattatttggatcttttgcgcgacgttggcagcgagtttgttactttctatgctggtacaacgaatcgacagaaacagactagtgagttaa

SEQ ID NO: 261892 - DNA, 309 bp, Klebsiella pneumoniae
atgatgatgaactctttctttccggcaatggcgcttatggtgcttatggcgctagtgggttgttctacaccgccacccgtgcagaaagcacaacgggtaaaggttgatcctctgcgttcgttgaatatggaagcgttatgcaaggatcaggcggcaaaacgttataacaccggcgagcaaaaaatcgacgtcactgcttttgaacaatttcaggtaagctatgaaatgcgcggttataccttccgtaaagagcagtttgtctgttcttttgacgcagatggccattttttgcatctttccatgcgttaa

SEQ ID NO: 261893 - DNA, 912 bp, Klebsiella pneumoniae
atgcaaaagtttgataccaggaccttccagggcttgatcctgaccttacaggattactgggctcgccagggctgcaccattgttcaaccattggacatggaagtcggcgcgggaacctctcacccaatgacctgtctgcgcgcgctggggccagaaccgatggcggctgcttatgttcagccttctcgtcgcccgaccgatggtcgctacggcgaaaaccccaaccgtttacagcactactatcagttccaggtggtcattaagccatcgccggacaatattcaggagctgtaccttggttctctgaaagagctgggcatggacccgaccatccacgacatccgtttcgtggaagataactgggaaaacccgacgctgggtgcctgggggctgggctgggaagtgtggctgaacggcatggaagtgacgcagttcacttacttccagcaggttggtggtctggagtgtaaaccggttaccggcgagatcacctacggtctggaacgtctggcaatgtacattcagggcgtagacagcgtttacgacctggtctggagcgacggcccgctgggtaaaaccacctacggcgacgtgttccatcagaacgaagtggagcagtccacttacaacttcgaatacgcggatgtggacttcctgttcacctgctttgagcagtacgagaaagaagcgcagcagctgctggcgctggaaaatccgctgccgctgccagcctacgagcgtattctgaaagccgcccacagcttcaacctgctggatgcgcgtaaagccatctccgtcaccgagcgtcagcgctacattctgcgaattcgcaccctgaccaaagcagtggctgaagcatactacgcttcccgtgaagccctcggcttcccgatgtgcaacaaagataagtaa

SEQ ID NO: 261894 - DNA, 966 bp, Klebsiella pneumoniae
atgaatactgtcggcacgccgttgctatggggcggattcgctgttgttgtcgccattatgctggctatcgacctgttgttgcaggggcgtcgtggggcacatgccatgaccatgaaacaggctgcggcctggtcgctggtctgggtgacgctgtcgttactgtttaacgccgctttctggtggtatctggtgcaaaccgaaggtcgcgccgttgccgatccacaggcactggcctttctcacaggttatctgattgagaaatcgctggcggtcgataacgtctttgtctggctgatgttgttcagctatttctctgttccggcggcattacaacgccgcgtgctggtgtatggcgtgctcggggcgattgttctgcgtaccatcatgatcttcactggcagctggctaatttcgcagttcgactggatcctgtatatcttcggtgccttcctgctgtttaccggcgtgaagatggcgctcgcccatgaagatgaatcaggcattggcgacaagccgctggtgcgctggctacgcggtcatttgcgcatgaccgacaccatcgacaacgagcatttctttgtgcgtaagaatggattgctgtacgccacaccgctgatgctggtactgattctggtggaattgagcgacgtgattttcgccgtggatagcattccggctatcttcgccgtgaccactgacccgttcattgtgctgacctcaaacctgtttgcgatcctcggcctgcgtgcgatgtatttcctgctggcgggcgtagcagagcgtttctcgatgctcaaatatggcctggcggtgattctggtgtttatcggtatcaagatgctgattgtcgacttctaccatattccaatcgccgtctcgctgggcgtggtgtttggcattctggtgatgacgtttattatcaacgcctgggtgaattatcggcatgataagcagcggggtggataa

SEQ ID NO: 261895 - DNA, 987 bp, Klebsiella pneumoniae
atgatacgtttcgctgtgattggtacgaactggatcactcgccagttcgtcgaggccgcccatgagagcggtaaatacaagttaaccgccgtatattcccgcagccttgaacaggcccagcacttcgccaatgatttttctgtcgagcatctgtttacctcgctggaagcgatggcggaaagcgatgccattgacgcggtgtatattgccagcccgaattccctgcatttttcccagacacaacttttccttagccataaaattaatgtgatttgcgagaaaccgctggcgtcgaatctggcggaagtggatgccgccattgcctgtgcgcgggaaaatcaggtggtgctgtttgaggcatttaaaaccgcctgcctgccgaactttcatttgttgcgccaggcgctgccgaaagtcggcaaactgcggaaagtctttttcaactattgccagtattcctcgcggtatcaacgttacctggatggtgagaatcccaacacctttaatccggcattctctaacggttcaattatggatatcggtttttactgtctggcgtcggcggtggcgttatttggtgagccgaaaagcgtgcaggcaaccgccagtttgctggcaagcggcgttgacgcccagggcgtggtggtgatggattacggtgatttcagcgtcaccttgcagcactcaaaagtcagtgattctgtcctggcgagcgagattcagggcgaagcaggatcgctggtgattgaaaaactgtctgaatgccagaaagtgtgcttcgtgccgcgtggcagccaaatgcaggatctcacccagccgcagcatattaataccatgctctacgaagcagagctgttcgctaccctggtggatgagcatctggtggatcatccagggctggcggtcagtcgcatcaccgccaaactgctgaccgagatccgccgccagactggggtgatttttccggcagatagcgtaaaactataa

SEQ ID NO: 261896 - DNA, 693 bp, Klebsiella pneumoniae
atgctgcgcgcatttgcccgccttcttctccgtatttgtttttctcgccggactctaaagattgcctgcttactgttacttgtggcaggagcgaccatccttatcgccgatcgcgtaatggtcaacgccagcaaacagctgacctggagcgatgtcaacgccgttccggcgcgtaacgtgggtttattgctgggggcgaggccgggtaatcgctactttacccgacgtattgataccgtagcagcgttgtaccacgccggaaaagtgaaatggctgctggtaagtggcgataacggacgtaaaaattacgatgaagcatcaggtatgcagcaggctttgatcgctaaaggcgtaccagcaaaagtgatcttctgcgactatgccggattctcaacgctggattcggtagtgcgtgccaaaaaggtttttggtgaaaaccatatcaccattatctcgcaagaatttcataatcaacgcgccatctggctggcaaaacagtacggcatcgacgctatcggttttaacgcgccagacctcaatatgaagcacggtttttatactcaactgcgggagaaactcgctcgtgtcagcgccgtgattgacgccaaaatcctccatcgccagccgaaatatctcgggccttcggtcatgattgggccgtttagtgagcatggctgtccggcgcagaaataa

SEQ ID NO: 261897 - DNA, 504 bp, Klebsiella pneumoniae
atgagcaatcttacttatcttcagggttatcccgagcagctactttcccaggtgcgaacactgattaacgaacagcgtctgggcgatgtgctggcaaaacgctatccgggaacacacgactacgccaccgataaagccctctggcaatatactcaggatctgaaaaatcagtttctgcgtaatgccccgccgatcaataaagtgatgtatgacaataagatccatgtgctaaaaaacgcgctcgggttacataccgctgtttctcgtgtgcagggcggcaagctgaaagcaaaggtggagatccgcgtcgctaccgtgtttcgcaacgcgccggaaccgtttttgcgcatgatcgtggtgcacgagctggcgcacctgaaggagaaagagcataacaaagcgttttaccagttgtgttgtcatatggaaccccagtaccaccagcttgagttcgacacccgactgtggctaacgcagttgtcgcttgggcagaacaaaatctga

SEQ ID NO: 261898 - DNA, 1137 bp, Klebsiella pneumoniae
atgagccacttagacaacggtttccgttcactgacactacaacgttttccggcgacggatgacgttaacccgctacaggcgtgggaagcggcggatgaatatttgctgcaacagttggacgacacagaaatccgcggcccggtgttgatcctgaatgatgcctttggtgcgttaagctgcgcactggcggaacataagccgtacagcattggcgactcatacatcagtgaactggcgacgcgcgagaatttacgcctcaacgggattgatgagtcgagcgtgaagtttctcgacagcaccgccgactacccgcaacagccgggtgtggtgctgatcaaagtgccgaaaacactggcattgctggaacagcaactgcgtgcgctgcgcaaagtggtcacgtcggatacacgtattattgccggtgccaaggcccgtgacattcacacttccacgctggaactgttcgaaaaagtgctcggcccaaccaccaccacgctggcatggaaaaaagcgcgcctgattaattgcactttcaatgaaccgcagctggccgatgcgccgcagaccgttagctggaagctggaaggtactgactggactatccacaaccatgcgaatgtcttctcccgcaccgggcttgatatcggcgcgcgcttctttatgcaacatctgccagagaatctcgaaggggagattgtcgatctcggttgcggtaatggcgttattggtctgacgctgcttgataaaaacccgcaggcgaaagtggtgtttgtcgatgaatcgccgatggcggttgcttccagccgtttgaacgttgaaaccaacatgccagaggcgttggatcgctgcgagtttatgatcaacaacgcgctctccggcgtggagcctttccgctttaatgctgtgctctgcaacccgccgtttcaccaacaacatgcgctgaccgataacgtcgcctgggagatgttccaccacgcccgccgctgcctgaaaatcaacggcgagctgtatatcgttgccaaccgtcacctggattacttccataaactgaagaagattttcggcaactgcaccactattgcgacgaataataaatttgtggtactgaaagcggtgaagctgggacgtcgtcggtaa

SEQ ID NO: 261899 - DNA, 315 bp, Klebsiella pneumoniae
atgcacctgataactcaaaaagcattgaaagatgctgcggaaaaatacccgcaacataaaacggagttggtggctctggggaacacgattgctaagggatatttcaaaaaacctgagtcattaaaagcagtattcccatctctggataacttcaaatatctggataagcattatgttttcaatgttgggggcaatgaattacgtgttgtagcaatggtcttttttgaatcgcaaaagtgctacatacgtgaagttatgacgcataaagaatacgatttctttaccgctgttcatcgtactaaggggaaaaaatga

SEQ ID NO: 261900 - DNA, 417 bp, Klebsiella pneumoniae
atgattgcgattgccgacatcttgcaagcaggagaaaagctaactgctgtggcaccttttctggcgggtattcagaacgaggaacaatacacccaggcgctggaactggtagatcatctgctgctcaacgatcctgaaaaccccttgctggatctggtgtgtgccaaaataaccgcgtgggaagaatcagcgcccgaatttgcggaattcaatgccatggctcaagccatgcctggcggtatagccgtgattcgtacccttatggatcaatatggtttaaccctttccgatctgccggaaattggcagtaaatctatggtgtcacgcgttttgagcgggaagaggaaattaacgctggaacacgctaaaaaattggcaacgcgattcggcatttctcccgccttgtttattgattaa

SEQ ID NO: 261901 - DNA, 2019 bp, Klebsiella pneumoniae
atgagctacccgtcgctgttcgccccgctggatttaggttttaccacgttaaaaaaccgcgtgttgatgggctcaatgcacaccgggctggaggaatacccggacggtgccgagcggctggcagcgttttatgccgaacgcgcccgtcacggcgtggcgctgattgtcagcggcggcattgcaccagatttaacaggcgttggcatggaaggtggcgcaatgctcaacgacgccagccagatcccacaccatcgcaccattaccgaagcggtacatcaggaaggcggcaaaatagccctgcaaattttgcataccgggcgctacagctaccaaccgcatctggtcgccccgtccgcattgcaggcccccatcaaccgtttcgtgccccatgagttaagccatgaagagatcctgcaactgatcgacaatttcgcccgctgcgcgcaactggcgcgggaggcaggatacgacggtgtagaggtgatgggttccgaagggtatttgatcaacgaatttctgacgctgcgcaccaatcagcgtagtgaccagtggggcggcgattaccgcaaccggatgcgatttgccgtagaagtagtgcgtgcggtgcgcgaacgcgtcggcaacgacttcattattatctaccgactgtcgatgctcgacctggtcgaagacggcgggacttttgccgaaacggtagagctggcgcaggccattgaagcggcgggcgcgaccattatcaacaccggcattggctggcatgaagcacgtattccgaccattgccacgcccgtgccgcgcggcgcatttagctgggtcacgcgcaaactgaaaggccacgtctcgctgccgctggtaaccaccaaccggattaacgatccgcaggttgccgacgatattctctcgcgcggcgatgccgatatggtatcgatggcgcgaccgtttcttgctgatgcggagctgctgtcaaaagcgcaatcgggacgagccgatgagatcaacacttgtattggctgcaatcaggcctgtctcgatcaaatcttcgttggcaaagtcacctcgtgcctggtgaatcctcgcgcctgccacgaaaccaaaatgccaatccttcccgccgtgcagaaaaaaaatctggcggtggtcggtgcgggacctgctgggctggcgtttgccattaacgcggcggcgcgtgggcatcaggtaacattgtttgacgctcatagcgagattggcgggcagtttaatatcgccaaacagatccccggcaaagaggagttttacgaaacgctgcgctattaccgccggatgatcgaagtgacgggcgtgacgctaaaactcaatcacaccgtgacggcggatcagttacaggctttcgatgaaacgatcctcgccagtgggatcgtgccgcgcactccgcccatcgacgggatcgatcatccgaatgtattgagttatctcgatgtactgcgcgacaaagcgccggttggcaacaaagttgccatcatcggttgtggcgggattggttttgatacggcgatgtatttaagtcagccgggcgaatccaccagccagaatatcgccgggttctgtaatgaatgggggatcgacagtagcctacaacaggctggtggcttaagcccgcagggaatgcagatcccccgtagcccacggcagattgtgatgctccagcgcaaagccagcaaaccaggacaggggttaggcaaaaccaccggctggatccatcgcaccaccctgctctcgcggggtgtgaaaatgatcccaggcgtaagttatcagaagattgacgatgacgggctgcatgtggtgatcaacggcgaaacgcaggtattagcagtggacaatgtggtgatctgcgcagggcaagagccaaaccgcgcgctggcgcaaccgctgattgatagcgggaaaacggtgcatttaattggcggctgcgatgtggctatggagctggacgcacgacgggcaattgcccagggaacacggctggcgctggagatttaa

SEQ ID NO: 261902 - DNA, 2352 bp, Klebsiella pneumoniae
atgaaaataaaaactattttaacgccagtaacctgcgctctgctgataagtttttccgcccatgccgctaacgccgacaattataaaaacgtgattaaccgtactggcgcgccgcagtacatgaaggattacgattacgacgatcaccagcgttttaatccgtttttcgatctcggagcctggcatggtcatctgttgccagacggccctaacaccatgggcggctttccgggcgttgcgctgctgacggaagagtacatcaactttatggccagcaatttcgaccgcctgaccgtctggcaggacggcaagaaagtcgactttacgctggaggcatacagtattcccggtgcgctggtgcaaaaactgacagcaaaagatgtgcaagtcgaaatgactctgcgcttcgccacgccgcgcacgtcactactggaaaccaaaatcaccagcaataaaccgctggatctggtgtgggacggcgaactgctggaaaaactggaagcgaaagaagggaaaccgctttccgataaaaccattgctggcgaataccctgactatcagcgcaaaatcagcgccacccgtgatggcctgaaagtcacctttggcaaagtgcgcgccacctgggatctgctgacctccggcgaatcggaatatcaggtgcataaatccctgccggtgcagactgaaatcaacggtaatcgctttaccagtaaggcgcatatcaacggttcgaccacgctctacaccacctattcccatctgctgaccgctcaggaagttagcaaagagcaaatgcagatccgcgatattctggcgcgtccggcgttttatctcaccgcctcgcagcaacgctgggaagaatacctgaagaaagggttaaccaatccggatgcgacgccggaacagacgcgcgtcgcggtgaaagcgatcgaaacgctcaacggtaactggcgctcaccgggcggtgcggtgaaatttaacaccgttacaccgtcggtgaccgggcgctggttctccggcaatcagacctggccgtgggatacctggaagcaggcgtttgcgatggcgcatttcaatccggacatcgccaaagagaatatccgcgcggtcttctcctggcagatccagcctggcgatagcgtgcgtccgcaggatgtgggctttgtccccgacctgatagcgtggaaccttagccccgagcgtggtggcgatggcggcaactggaacgaacgtaataccaaacccagccttgccgcctggtcggtgatggaagtgtataacgtcacccaagataaaacctgggtggcagagatgtacccgaaactggtggcctatcacgactggtggttacgtaaccgcgatcacaacggcaacggcgtgccggaatatggcgcgacccgcgacaaagcccacaacactgagagcggcgagatgctgtttacggtgaaaaaaggcgataaagaagagacgcagtctgggctgaacaactacgcccgcgtggtggagaaaggccagtacgacagtctggaaattccggcacaggttgctgcatcgtgggaatcggggcgtgatgatgccgccgtctttgggtttatcgacaaagaacagttggataaatatgtcgctaatggcggcaaacgtagcgactggacggtgaaattcgccgaaaaccgcagtcaggacggaacgttgctgggctactcgctattgcaggagtcggtggatcaggccagctatatgtacagcgataaccattatctggcggagatggcaaccatcctcggtaagccagaagaggccaaacgctatcgccagttggcacagcagctcgcggactacatcaacacctgtatgttcgacccgactacccagttctactatgacgtacgtattgaagataaaccactggcgaacggctgcgcgggcaaaccgattgttgagcgcggtaaagggccggaaggctggtcgccgctgtttaacggtgcggcaacgcaggccaatgccgacgcggtggtgaaggtgatgctcgatcctaaagagttcaacacctttgtcccgctgggaacggcggcgttaaccaatccggcttttggcgctgatatctactggcgtgggcgcgtatgggtggatcagttctggtttggtctgaaagggatggagcgttacggttatcgtgatgatgccctgaagctggcggatacgttcttccggcacgccaaagggttaaccgccgatggaccaattcaggaaaattacaacccgctgacaggcgcacagcaaggcgcaccaaatttctcctggagtgccgcgcatttgtatatgttgtataacgattttttccgtaagcaataa

SEQ ID NO: 261903 - DNA, 1071 bp, Klebsiella pneumoniae
atgaaattaatcactgcaccatgcagagcattacttgctctgccgttttgctacgccttttctgcggcaggagaagaagcacgtccggcagaacatgacgacacaaaaacacccgcaattacctcgacatcttctccttcatttcgtttttacggcgaattaggggttggtggatatatggatttagagggtgagaataaacataaatacagcgacggtacctatattgaaggtggcctggagatgaagtacggctcctggttcggcctgatttacggcgaaggctggaccgtgcaggccgaccacgacggcaatgcctgggtgccagaccatagctggggtggtttcgagggcggaattaaccgtttctatggcggttatcgtaccaatgatggcaccgaaatcatgctcagtctgcgtcaggattcctcgctggatgacctgcaatggtggggcgatttcacccccgatctgggctacgtcattcccaatacccgcgacattatgactgcgctgaaggtacagaacttaagcggcaactttcgttatagcgtcaccgcgactcctgccggacatcatgatgaaagcaaagcctggctacattttggcaaatacgatcgctatgacgacaaatacacctatccggcaatgatgaacggttacatccagtatgaccttgccgaaggcatcacctggatgaacggtctggaaatcaccgacggcacaggacagctctatctcacgggcctgctaactcctaactttgccgctcgcgcctggcaccataccggacgcgccgacgggctggacgtaccgggaagtgaaagtgggatgatggtgagcgccatgtatgaagcgttaaagggcgtttatctctccaccgcttacacctacgccaaacatcgccctgaccacgctgacgatgaaaccacctctttcatgcagtttggtatctggtacgaatacggcggcggacgtttcgccacggcttttgatagccgcttctacatgaaaaatgcctctcacgatcccagcgaccaaatcttcctgatgcaatatttctactggtaa

SEQ ID NO: 261904 - DNA, 450 bp, Klebsiella pneumoniae
atgaggatcatcgataacttagaacagttccgccagatttacgcctctggcaagaagtggcaacgctgcgttgaagcgattgaaaatatcgacaacattcagcctggcgtcgcccactccatcggtgactcattgacttaccgcgtggagacagactccgcgaccgatgcgctatttaccgggcatcgacgctattttgaagtgcattactacctgcaagggcagcaaaaaattgaatatgcgccgaaagagacattacaggtagtggaatattatcgtgatgaaactgaccgtgaatatttaaaaggctgcggagaaaccgttgaggtccacgaagggcaaatcgttatttgcgatatccatgaagcgtatcggtttatctgcaataacgcggtcaaaaaagtggttctcaaagtcaccatcgaagatggttatttccataacaaataa

SEQ ID NO: 261905 - DNA, 3093 bp, Klebsiella pneumoniae
atgaatcgctgggaaaacattcagctcacccacgaaaaccgacttgcgccgcgtgcgtactttttttcatatgattctgttgcgcaagcgcgtacctttgcccgcgaaaccagcagcctgtttctgcccttaagcggtcagtggaatttccacttttttgaccatccgctgcaagtaccagaagccttcacctctgagttaatggctgactgggggcatattaccgtccccgccatgtggcaaatggaaggtcacggcaaactgcaatataccgacgaaggttttccgttccccatcgatgtgccgtttgtccccagcgataacccaaccggtgcctatcaacgtattttcaccctcagcgacggctggcagggtaaacagacgctgattaaatttgacggcgtcgaaacctattttgaagtctatgttaacggtcagtatgtgggtttcagcaagggcagtcgcctgaccgcagagtttgacatcagcgcgatggttaaaaccggcgacaacctgttgtgtgtgcgcgtgatgcagtgggcggactctacctacgtggaagaccaggatatgtggtggtcagcggggatcttccgcgatgtttatctggtcggaaaacacctaacgcatattaacgatttcactgtgcgtaccgactttgacgaagcctattgcgatgccacgctttcctgcgaagtggtgctggaaaatctcgccgcctcccctgtcgtcacgacgctggaatataccctgtttgatggcgaacgcgtggtgcacagcagcgccattgatcatttggcaattgaaaaactgaccagcgccagctttgcttttactgtcgaacagccgcagcaatggtcagcagaatccccttatctttaccatctggtcatgacgctgaaagacgccaacggcaacgttctggaagtggtgccacaacgcgttggcttccgtgatatcaaagtgcgcgacggtctgttctggatcaataaccgttatgtgatgctgcacggcgtcaaccgtcacgacaacgatcatcgcaaaggccgcgccgttggaatggatcgcgtcgagaaagatctccagttgatgaagcagcacaatatcaactccgtgcgtaccgctcactacccgaacgatccgcgtttttacgaactgtgtgatatctacggcctgtttgtgatggcggaaaccgacgtcgaatcgcacggctttgctaatgtcggcgatattagccgtattaccgacgatccgcagtgggaaaaagtctacgtcgagcgcattgttcgccatatccacgcgcagaaaaaccatccgtcgatcatcatctggtcgctgggcaatgaatccggctatggctgtaacatccgcgcgatgtaccatgcggcgaaagcgctggatgacacgcgactggtgcattacgaagaagatcgcgatgctgaagtggtcgatattatttccaccatgtacacccgcgtgccgctgatgaatgagtttggtgaatacccgcatccgaagccgcgcatcatctgtgaatatgctcatgcgatggggaacggaccgggcgggctgacggagtaccagaacgtcttctataagcacgattgcattcagggtcattatgtctgggagtggtgcgaccacgggatccaggcacaggacgaccacggcaatgtctggtataaattcggcggcgactacggcgactatcccaacaactataacttctgtcttgatggtttgatctattccgatcagacgccgggaccgggcctgaaagagtacaaacaggttatcgcgccggtaaaaatccacgcgcgggatctgactcgcggcgagttgaaagtcgaaaataaactgtggtttaccacgcttgatgactacaccctgcacgcagaggtgcgcgccgaaggtgaaacgctcgcgacgcagcagattaaactgcgcgacgttgcgccgaacagcgaagcccccttgcagatcacgctgccgcagctggacgcccgcgaagcgttcctcaacattacggtgaccaaagattcccgcacccgctacagcgaagccggacaccctatcgccacttatcagttcccgctgaaggaaaacaccgcgcagccagtgcctttcgcaccaaataatgcgcgtccgctgacgctggaagacgatcgtttgagctgcaccgttcgcggctacaacttcgcgatcaccttctcaaaaatgagtggcaaaccgacatcctggcaggtgaatggcgaatcgctgctgactcgcgagccaaagatcaacttcttcaagccgatgatcgacaaccacaagcaggagtacgaagggctgtggcaaccgaatcatttgcagatcatgcaggaacatctgcgcgactttgccgtagaacagagcgatggtgaagtgctgatcatcagccgcacagttattgccccgccggtgtttgacttcgggatgcgctgcacctacatctggcgcatcgctgccgatggccaggttaacgtggcgctttccggcgagcgttacggcgactatccgcacatcattccgtgcatcggtttcaccatgggaattaacggcgaatacgatcaggtggcgtattacggtcgtggaccgggcgaaaactacgccgacagccagcaggctaacatcatcgatatctggcgcagcaccgtcgatgccatgttcgagaactatcccttcccgcagaacaacggtaaccgtcagcatgtccgctggacggcactgactaaccgccacggtaacggtctgctggtggttccgcagcgcccaattaacttcagcgcctggcactatacccaggaaaacatccacgctgcccagcactgtaacgagctgcagcgcagtgatgacatcaccctgaacctcgatcaccagctgcttggcctcggctccaactcctggggcagcgaggtgctggactcctggcgcgtctggttccgtgacttcagctacggctttacgttgctgccggtttctggcggagaagctaccgcgcaaagcctggcgtcgtatgagttcggcgcagggttcttttccacgaatttgcacagcgagaataagcaatga

SEQ ID NO: 261906 - DNA, 984 bp, Klebsiella pneumoniae
atggcaacactaaaagacatcgcaatcgaagctggcgtatccctggcgacagtatccagggtcttaaatgacgatccgacattgaatgtgaaagaagagacgaaacatcgcattctcgagatcgccgaaaagctggagtacaagaccagtagtgcccgtaaactccagacaggtgcagtcaaccaacaccatattctggctatctacagctaccagcaggagctggagatcaacgatccttactatctggcgatccgccacggcattgaaacccagtgcgaaaagctgggcatcgagctcaccaactgttatgaacacagcggcttaccagacattaaaaacgtcaccggtattttaattgtcggcaaacccacgcccgccctgcgcgccgctgccagcgcgttgaccgacaatatctgttttatcgactttcacgaacccggcagcggttacgatgcggtggatatcgatctggcacgcatcagtaaagaaatcatcgacttctatatcaaccagggcgttaatcgtattggttttattggcggtgaagatgagcctggcaaggcggatattcgtgaggtcgcctttgcggaatatggccgactgaaacaagtggtacgcgaagaggatatctggcgcggcggtttttccagttcgtcgggttatgaactggcaaaacaaatgctggcgcgggaagactatccgaaggcactgtttgttgcttccgattccattgctatcggcgtactgcgggcaattcatgaacgaggcctgaacatcccacaggatatttcgcttatcagcgttaacgatatccccaccgcgcgatttacctttccgccgctctccaccgtgcgcatccattccgagatgatgggaagtcagggcgttaacctggtgtatgaaaaagcccgcgatggtcgcgcgctgccgctgttagtcttcgttcccagcaaattaaaactgcgcggcacgacccgttaa

SEQ ID NO: 261907 - DNA, 333 bp, Klebsiella pneumoniae
atggaaaccgtggcttacgctgattttgcacgtctggaaatgcgcgtcggaaagattgtggaagtgaaacgccatgaaaacgccgacaagctgtacatcgtacaggttgatgtggggcaaaaaacgctgcaaaccgtgaccagcctggtgccgtactacagcgaagaagagctgatggggaaaacggtggtggtcttatgcaatctgcaaaaagcgaaaatgcgtggtgaaacgtcggaatgcatgctgttgtgtgcggaaaccgatgacggcagtgaaagcgtgctgttaacgccggagcggatgatgcctgcgggcgtacgcgtcgtataa

SEQ ID NO: 261908 - DNA, 1521 bp, Klebsiella pneumoniae
atgtcttctcatccgtatgtcacccagcaaaataccccgctggcggacgataccactctgatgtccactaccgatctgcaaagctatatcactcatgctaatgacacttttgtgcaggtgagcggctataccttgcaagagttacaagggcagccgcacaacatggtgcgtcacccggatatgccaaaagcggcgtttgcggatatgtggttcaccctgaaaaaaggggagccctggagcggcatcgtgaaaaatcgccgcaaaaatggtgaccattattgggtgcgggccaatgcggtaccgatggtgcgcgagggaaaaatcagtggctatatgtcgattcgtacccgggcgacggatgaagagatcgcggcggtggagccgctgtacaaagcgttgaacgccggacgtaccagtaagcgtattcataaaggcctggtggtgcgtaaaggctggctgggtaaactgccttcattaccgcttcgctggcgggcgcgtggagtgatgaccctgatgtttatcttgctggcggccatgctttggtttgttgctgccccggtggtgacgtatatcctctgtgcgttagtggtattgttggcaagcgcctgttttgaatggcagattgtgcgcccgatagaaaatgttgcccatcaggcactgaaggtggcgaccggagaacgtaatagtgttgagcatctgaatcgcagcgatgagctggggctgacattacgtgcggtagggcaacttggcctgatgtgccgttggctaattaacgatgtctcaagccaggtgtccagtgtcagaaatggcagtgagacgctggcgaaaggcaccgatgaactgaacgaacatacccagcagacagttgataacgttcagcaaacggtggcgaccatgaaccaaatggcggcgtcggtgaaacagaactctgccacggcgtcggctgccgataaactgtcaatcactgccagtaatgcggcagtgcagggtggggaggcgatgaccacggtgatcaagacaatggacgatatcgccgacagtacccagcgcattggcaccattacttcgctgattaacgatattgcgtttcagaccaatattctggccctgaatgcggcggtggaagcggcgcgtgccggcgaacagggcaaaggttttgcagtggtggcaggggaagtgcgtcatttagccagccgcagcgctaatgctgccaacgatattcgcaagctgattgatgccagtgctgataaggtgcaatccggttcgcagcaggtacacgccgccggacggacgatggaagatattgtggcacaggtgaaaaacgtcacccagttgatcgcccagattagccattcaacgctggaacaggccgatgggctttccagcctgacccgtgcagtggatgagcttaacctgatcacccagaaaaatgccgagctggtggaagagagtgcgcaggtgtcggcgatggtgaaacaccgcgccagccgactggaagacgcggtgacggtactgcattaa

SEQ ID NO: 261909 - DNA, 624 bp, Klebsiella pneumoniae
atgagccatcatcacgaagggtgttgtaaacatgaaggccagccacgccatgagggctgctgcaaaggtgagaagtcagaacacgagcactgcggacacggtcaccagcatgaacacggtcaatgctgcggtggtcgccacggtcgcggcggcggtcgtcggcaacgtttctttggtcacggtgaattacgtctggtgattctggatattctctcgcgcgatgacagccacggttacgaattgattaaagcgattgagaatctaacccaggggaattacaccccaagcccgggcgtcatctacccaacgctggattttctgcaggagcagtcgctgattaccatccgcgaagaggaaggaggtaagaagcagattgcgctgaccgaacaaggcgcgcagtggctggaagaaaaccgcgaacaggtggagatgattgaagaacgcatcaaagcgcgttgcgttggcgcggcgctgcgccagaacccgcaaatgaagcgggcgctggataattttaaagcggtgctggatttacgcgtcaaccagagcgatatcagtgatgcacaaataaaaaagatcattgcggtgatcgaccgcgccgcttttgatattacgcaactggattaa

SEQ ID NO: 261910 - DNA, 765 bp, Klebsiella pneumoniae
atgaataacaccccccgctacccgcagcgcgttcgcaatgatctgcgcttccgtgaactgactgtgttacgcgttgagcgcatcagcgccggttttcagcgcattgtcctcggcggcgaggcgctggacggttttacatcgcgtggctttgacgatcacagcaaactcttctttcctcaacctgacgctcactttgtgccgccaacggtaacggaagagggcatcgtctggccggaaggaccacgcccaccgtcgcgtgactatacgccgctgtatgacgaactacgccatgaactggcgattgatttctttattcacgacggtgggggcgccagcggctgggcgatgcaggcgcaaccgggcgataaacttacggtggcaggtccgcgcggttcgctggtggtgccggaagattacgcgtatcagctgtatgtctgcgatgaatccggaatgcccgcattgcgccgccgcctggaaacgttgagcaaacttgccgttaaaccgcaagttagtgcgctggttagcgtgcgggataacgcctgtcaggattatctcgcgcaccttgatggttttaatatcgaatggctggcacatgatgagcaggcggtagatgcgcgtctggcgcagatgcaaatccctgccgatgattacttcatctggataaccggcgaaggtaaagtcgttaagaatttaagccgccgctttgaagcggaacagtatgacccacagcgggtacgtgcagcggcttactggcacgcaaagtaa

SEQ ID NO: 261911 - DNA, 507 bp, Klebsiella pneumoniae
atggttgaggatattttggctccagggttacgggtcgtgttttgcggtatcaaccctgggctttcatccgccgggactggttttccctttgctcatccggcaaatcgcttctggaaggtgatatatcaggccgggtttaccgaccgtcagttgaagccgcaggaggcacagcatctgctggattatcgttgtggcgtcaccaaactggtagaccgtccaacggtgcaagccaatgaagtttcaaagcaggagctacacgcaggcgggcgtaagctgattgaaaaaattgaagattatcagccgcaggcgttggcgattctgggcaaacaagcatatgaacagggattcagccagcgcggtgcacagtgggggaaacaaacgctcaccattggttcgacgcagatttgggtgctgccaaatcccagcggtttaagtcgcgtttcactggagaaactggttgaagcgtatcgcgagctggaccaggcgctggtagtgcgtgggcgataa

SEQ ID NO: 261912 - DNA, 798 bp, Klebsiella pneumoniae; identical to SEQ ID NO: 9443

SEQ ID NO: 261913 - DNA, 417 bp, Klebsiella pneumoniae; identical to SEQ ID NO: 9444

SEQ ID NO: 261914 - DNA, 213 bp, Klebsiella pneumoniae; identical to SEQ ID NO: 9445

SEQ ID NO: 261915 - DNA, 1383 bp, Klebsiella pneumoniae
gtggcaaaagctccaaaacgcgcctttgtttgtaatgaatgcggggccgattatccgcgctggcaggggcagtgcagcgcctgtcatgcctggaacaccatcaccgaggtgcgtcttgcagcgtcgccaacggtggcgcgtaacgagcgtctcagtggctatgccggtagcgccggggtggcaaaagtccagaaactctccgatatcagccttgaagagctgccgcgtttttccaccggatttaaagagttcgaccgcgtactaggcggtggcgtggtgccgggaagtgccattctgattggcggtaacccaggtgccgggaaatccacattgctattgcaaacgctgtgcaaactggcccagcagatgaaaacgctgtatgtcactggcgaagagtcgctgcaacaggtggcaatgcgcgctcatcgccttggcctgccgaccgacaatctcaatatgttgtcggaaaccagcatcgagcagatctgcctgattgccgaagaagagcaaccgaagctgatggtaattgactccatccaggtgatgcatatggcggatgttcagtcatcgcctggcagtgtggcgcaggtgcgtgaaacggcggcttatctgacgcgcttcgccaaaacgcgcggcgtggcgattgtcatggttgggcacgtaaccaaagatggctcgctggctggccctaaagtgctggaacactgtatcgactgttcggtgcttctggatggcgatgccgactcccgttttcgcaccttacgcagccataaaaaccgcttcggcgcggtgaatgagctgggcgtcttcgcgatgaccgaacaggggctgcgtgaagtcagcaacccttctgccatctttttaagccgcggtgatgaagtgacctccggtagctcagtgatggtagtgtgggaaggaacgcgtccgctgctggtggagatccaggcgctggtcgatcactcgatgatggcgaatccacgccgcgtcgcagtagggctggagcaaaaccgtctggcaatcctgctggcggtgctgcaccgtcacggtgggttgcaaatggccgatcaggatgtatttgttaacgtggtcggcggcgtgaaggtgacggaaaccagcgccgacttagcgttactgctggcgatggtttccagcctgcgcgacagaccgctgccacaggatctggtggtgtttggtgaagtcgggctggcaggggagatccgcccggtgcccagcggccaggaacgaatctctgaagcggcgaaacacggttttcgccgggcgattgttccggcggctaatgtgccgaaaaaagcgccggaagggatgcagatttttggcgttaaaaaactctccgacgcgcttagcgtgttcgacgacttataa

SEQ ID NO: 261916 - DNA, 969 bp, Klebsiella pneumoniae
atgcctaacattacctggtgcgacctgcctgaagatgtctctttatggccgggtctgcctctttcattaagtggtgatgaagtgatgccactggattaccacgcaggtcgtagcggctggctgctgtatggtcgtgggctggataaacagcgtctgacccaataccagagcaaactgggcgcggcgatggtgattgttgccgcctggtgcgtggaagattatcaggtgattcgtctggcaggttcactcaccgcgcgggctacgcgcctggcccacgaagcgcagctggatgtcgcgccgctggggaaaatcccgcacctgcgcacgccgggtttgctggtgatggacatggattccaccgccatccagattgaatgtattgatgaaattgccaaactggccggaacgggcgagatggtggcggaggtaaccgaacgggcgatgcgcggcgaactcgattttaccgccagcctgcgcagccgcgtggcgacgctgaaaggcgctgatgccaatattctgcaacaggtgcgtgaaaatctgccgctgatgccaggcttaacgcaactggtgctcaagctggaaacgctgggctggaaagtggcgattgcttccggcggctttactttctttgctgaatatctgcgcgacaagctgcgcctgacagccgtggtagccaatgaactggagatcatggatggtaaatttaccggcaatgtgatcggcgacatcgttgacgcgcagtacaaagcgaaaactctgactcgcctcgcgcaggagtatgaaatcccgctggcgcagaccgtggcgattggtgatggagccaatgacctgccgatgatcaaagcggcagggctggggattgcctaccatgccaagccaaaagtgaatgaaaagacggaagtcaccatccgtcacgctgacctgatgggggtattctgcatcctctctggcagcctgaatcagaagtaa

SEQ ID NO: 261917 - DNA, 264 bp, Klebsiella pneumoniae
atgatcgatctggaaaaccaggaacgggagattatcaatttaatgttcagccagggtatatcctggataactgccgtgcgtatcaggcataaactatcacttgctgaagtaagtaaaatgttaggtatctccattaattctctaaaacagatcgaaaagacggaacggcttagttcaaacatcaaaagcaaaatggcaggaatttatggttgtccaccagagttgctgatatgcccttcctggatgacggctgaacataaatga

SEQ ID NO: 261918 - DNA, 1551 bp, Klebsiella pneumoniae
atgcccacttctcatgagattgcactgcaacaacgttgccagcaaattgtcaccagtccggtacttagcccggagcagaagcgccattttctggcgctggaagcagaaaacaatctgccttatccgcagcttcctgccgaagcccgccgcgcgctggatgagggtgtaatctgcgatatgtttgaaggtcatgcgccgtacaaaccgcgctatgtcttacccgattacgcccgttttctggcgaacggttccgaatggctggagctggaaggcgcgaaagatcttgatgatgcactctctctgctgaccattctttaccaccacgtaccgtcggtcacatcgatgccggtctacctggggcaactggatgcgttgttgcaaccgtatgttagaattctaacacaagacgagatcgatattcgaataaaacgtttctggcgttacctcgacagaaccctgccagacgcctttatgcacgccaatatcggcccgtctgattcgcccatcacccgtgcaatcttacgtgcagatgcagagctgaagcaggtttcaccgaacctgacctttatctacgatcctgaaatcacccctgatgacctgctgcaggaagtggcgaagaacatctgtgaatgtagcaaaccgcacatcgccaacggtccggtgcatgataaaattttcacaaaagggggctacgggattgtgagctgttacaactcactgccgctggcgggtggtggcagcacgctggtacgccttaacctgaaagccattgccgagcgcagcgaatcgctggatgacttctttgcgcgcactctaccgcactactgccagcagcagatcgccatcatcgatgcgcggtgtgaattcctctatcaacaatcacacttctttgagaatagcttcctggtgaaagaagggctgattaaccctgaacgttttgtgccaatgtttggcatgtatgggctggcggaagcggttaacttgctgtgtgagaaagaagggattgccgcgcgctacggtaaagaagccgccgcaaatgaagtgggttatcgcatcagcgcgcaactggcggagtttgtcgccaatacccccgtgaaatatggctggcaaaaacgcgccatgttacacgcacagtcagggataagttccgatatcggcaccacgccgggcgcacgtttgccgtatggtgatgagccagatccgatcacccatctgcaaaccgtcgccccgcatcatgcttattattattccggcatcagcgacattctgacgctcgacgaaaccatcaaacgtaatccgcaggcgctggtacagctttgcctcggtgcctttaaagccggaatgcgtgaatttaccgccaatgtcagcggtaacgatctggttcgcgttaccggttatatggtgcgtttgtcggatttagaaaaatatcgcgccgaaggttcacgtaccaacaccacctggctgggcgaagaggccgcacgtaacactcgtattctggaacgccagccgcgcgtgataagccatgaacagcagatgcgctttagtcagtaa

SEQ ID NO: 261919 - DNA, 864 bp, Klebsiella pneumoniae
atgaacagcagatgcgctttagtcagtaagattatccccttctcctgcgttgacgggccaggcagtcgtctggctctgtttttgcagggctgcaatctgcgctgcaaaaactgtcacaatccgtggacgatgggacgttgcaatgactgcggggagtgcgtgccacagtgtccgcatcaggcgttgcagattgttgacggcaaagtggtgtggaacgctgtggtctgcgagcaatgtgatacctgcctgaagatgtgtccgcaacatgccacgccaatggcgcagtccatgagcgtggatgaggtgcttagccatatccgcaaagcagtgctgtttatcgaagggataacggtaagcggcggcgaagccacgacccagctaccgtttgtggtggcgctgtttactgctatcaaaaatgatccgcaactgtgccatctcacctgtctggtggacagtaacggtatgttgagcgaaaccggctgggaaaaattgctcccggtgtgcgacggcgcgatgctcgatctcaaagcgtgggggagcgaatgtcatcaacagttaaccggacgcgataatcagcagattaagcgcagcatctatttgctggcagagcgcggcaagctggcggaactgcgtttgctggtaatccctggccaggtggattatttgcaacacatcgaagaactggcggcgtttatcaaggtacttggcgatgttccggtacgcctgaacgcgtttcatgcccacggcgtgtatggcgaagcgcaaagctggccgagcgccacaccggaagatgttgagcagttggctgatgcgttaaaggtgcgcggggtgagccggttgatatttccggcgctgtatttgtga

SEQ ID NO: 261920 - DNA, 780 bp, Klebsiella pneumoniae
ttgatttgccgttttatcgacacccactgccattttgatttcccgccgtttagtggcgatgaagaggccagcctgcaacgcgcggcacaagcgggcgtaggcaagatcattgttccggcgacagaggcggaaaattttgcccgcgtgcaggcgttagcggaaaaatatcaaccgctgtatgccgcattgggcttgcatcctggtatgttggaaaaacatagcgatgtgtctcttgatcagctacagcaggcgctggaaaggcgtccggcgaaggtggtggcggtgggggagatcggtctggatctcttcggcgacgatccgcaatttgagaggcagcagtggttactcgacgaacaactgaaactggcgaaacgctacgatctgccggtgatccttcattcacggcgcacgcacgacaaactcgcgatgcatcttaaacgccacgatttgccgcgtactggcgtggttcacggtttttccggcagcctgcaacaggctgaacggtttgtacagctgggctacaaaattggcgtaggcggcactatcacctatccacgcgccagtaaaacccgcgatgtcatcgcaaaactaccgctggcatcgttgttgctggaaaccgacgcgccggatatgccgctcaacggctttcaggggaagcctaatcgcccggaacaggccgcgcgggtgtttgccgtgctttgcgagttacgcccggaacccgcggatgaaattgccgaagtgttgcttaataacacgtatacgttgtttaacgtgccgtag

SEQ ID NO: 261921 - DNA, 1074 bp, Klebsiella pneumoniae
gtggggcagcgaatacctgtaacgcttggtaatattgcgccgttgtcgctaaggccgttccagcctggacgaatagctctggtgtgcgaaggcggcggacagcgtggaattttcacggctggcgtgctggatgagtttatgcgcgcgcagtttaatcctttcgatctttatctcggcacatctgccggggcgcagaacctctcggcgtatatctgcaatcagcccggttacgcgcgcaaagtcatcatgcgctataccacaaaacgcgaatttttcgatccattgcgctttgtccgtggaggaaatcttatcgatctcgactggctggtggaggccactgcaagccagatgccgttgcaaatggataccgccgcgcggttgtttgacagcggcaaatcgttttatatgtgcgcctgtcgtcaggatgactatgcgccgaattactttttaccaaccaaacaaaactggctggatgtgattcgcgcctccagtgcgatacctggcttttatcgtagcggagtgtcgctggaaggcattaactacctggatggcgggatcagtgatgcgattccggttaaagaggcggcaaggcagggagcaaaaaccttggtcgtcatccgcaccgtgccgtcgcaaatgtactacacgccgcagtggttcaaacgcatggaacgctggctgggtgacagtagcctgcagccgctggtcaatctggtgcagcatcatgaaaccagctattgtgatattcagcaatttattgagaaaccaccgggcaaactgcggatattcgaaatttatccgccgaagccattgcatagtatcgcgcttggcagtcggattccggcgctgcgtgaagactataaacttgggcgtttatgcggtcgttatttcctggcaacggttggcaagctattaactgaaaaagcgccgctaacccgccatctggtgccagtggtgacgccggaatcgattgtcattccgcctgcgccagtcgccaacgatacgctggttgccgaagtgagcgatgctccgcaggcgaacgacccgacatttaacaatgaggatctggcttga

SEQ ID NO: 261922 - DNA, 162 bp, Klebsiella pneumoniae
atgtttcgttggggcatcatatttctggttatcgcgttaatcgccgccgcacttgggtttggtggtctggccggtaccgctgcaggcgcagctaaaattgtctttgtcgtcgggattattctgttcctggtgagtttgttcatgggccgaaaacgaccctag

SEQ ID NO: 261923 - DNA, 606 bp, Klebsiella pneumoniae
atgactatgacaagactgaagatttcgaaaactctgctggctgtaatgttgacctctgccgtcgcgaccggctctgcctacgcggaaaacaacgcgcagactaccaatgaaagcgcagggcaaaaagtcgatagctctatgaataaagtcggtaatttcatggatgacagcgccatcaccgcgaaagtgaaggcggcgctggtggatcatgacaacattaagagcaccgatatctctgtcaaaaccgatcaaaaagtcgtgaccctgagcggtttcgttgaaagccaggctcaggccgaagaggcagtgaaagtggcgaaaggcgttgaaggggtgacctctgtcagcgacaaactgcacgttcgcgacgctaaagaaggctcggtgaagggctacgcgggtgacaccgccaccaccagtgaaatcaaagccaaactgctggcggacgatatcgtcccttcccgtcatgtgaaagttgaaaccaccgacggcgtggttcagctctccggtaccgtcgattcccaggcacagagcgaccgtgctgaaagtatcgccaaagcggtagatggtgtgaaaagcgttaaaaatgatctgaaaactaagtaa

SEQ ID NO: 261924 - DNA, 1035 bp, Klebsiella pneumoniae
atggaagatgcaattcagacctatgaaatcaatgatattgatgatataggaaatattttcgaccgagttatttcaggcgaagaaatccacattgaaaatttgaagttaaacttcttagaaagtattgatttcaaattttttggtgatgaagataagtataatggtactctgcctgcaggtttggcacagggtatttgtgaatttcaaactgagatgtacaaggtttttactctaatcaagtacaaaacctctaacttacagaagctcactgctgaggatagagaagctgcagagttggtttttactatcaaacctggctgtacagaaattatcacctcagttaaagaacttattgattcctttggtaacgcatttgagaaggtaacacaaggtatgagcccaagacagaaaacaatgtgtttcctgtttgctgtcttagttttaggcggcgcatgggtcggtacgtcctacttagatcatcagacacaagtcgaaacccaaactattgagttacaacaggaagaagcaaaacagcgagcagaatccgagcggatgacaattctacgcgatggtatgctgtctgcaataaaagcacatgaaggtattgatacgatagagcgcgccgaaggtatccaagagcacaccgctaaggcatacactggagttcttaaaggtgcatctgatgcagacaaagtgacgatccgcggggccagcaatattgaactttcgcaaggtcaggttcaagaaatcatcaagaacccaattgaaaaggctaagtcagagcagcaaacattggaggttgtcattgatagtataaaacgctcagccgataagctaacgttaagctgccatgagccaacaggtgatgattcattcccgatctatgttgataccagttttatcaatgaccctgatgaaataggcttaatttttgacgcgatgaaaaataataaaacggtcaacatccttggtagttacaagattaggtctggtgtgatagaacaaggtaacgcctctacaatctcacccccttga

SEQ ID NO: 261925 - DNA, 759 bp, Klebsiella pneumoniae; identical to SEQ ID NO: 14460

SEQ ID NO: 261926 - DNA, 294 bp, Klebsiella pneumoniae
atggatataacacctttccttcatgcactttgtgctgtggctgcgcaggtactggttggtctttttaccggaaactgggcttacggtgcgatagctggttgtacgttcttcatcgctcgtgaacatacccaggcagaatatcgctggattgaaatgttcgggcatggcaagcgtatgaatatgccgtggtggggcggttttgatcctcgtgcatgggatgtggcaagcctgatggatttttctgtgccggtggtggcgtgtctgctggtctggctgttggttaatcgtgggtga

SEQ ID NO: 261927 - DNA, 705 bp, Klebsiella pneumoniae
atggctacatcgacagtaattccaggagatatcaccacgctaaagggagatgtcagtaaaactaaggaagatatttcctcaattaacggaaaagtatcaacgcttcagactgatatgaccagtgcaaagcaggatatcagcaccagatacacaaaaactgaagttgataataagctgaaaaacaaagtggaagtgaacgatctggaaagtggtcgttatggcggagatttttatccactgacaggtcgtgaagcgttttatttatggaatttggccacgactacagcggcggcaaacctttatcttaatcctgaccccgcaatttcgtctgtgctgcggtcaacatcgtctatccgctataaacattcagtagagacaatagattcagagcacgctgatctcattttcaggatgcgccctgtgtggtacaggtcacaatgcgaaaatgacaggcgtgactggggattctacggattgattgccgaggaagtaggagaaattgcccctcagtttgtacactggcgaccagctaacgaagatgatgctcctgaagctatttccagcaatggccttgttgccgaaggtgtaatgtacgaacgtctggttgttccactgattcaccatatccagaagctgactgaaagagttgatgaacttgagtcagaattaaagttgttattaacttcccgaagcgatatcggataa

SEQ ID NO: 261928 - DNA, 282 bp, Klebsiella pneumoniae
atgaaagatttaacactcaaatttgcagacagggccgacttttcggcctttatggagagcactggctattatgacgacgagacgatgcaggatgatattcttattgacgtgataggtaacgtgtacaaagaaaccggagaactgactgaagatggcgaaccggtatgtgttaaggaagacggatattttgtaaacgtgcgcatcattaatgatgcaaaaaaatcgtcaatattcgataaacacgcggttgttgttgagcatcaactccgtagctggatgtga

SEQ ID NO: 261929 - DNA, 1275 bp, Klebsiella pneumoniae
atgattacggggttttcgccgtcatataaaaagattgttattggtgatgatgaaataacgatgcctggcgataaggttgtaaagtttaaacgcgcatcaactgccacatatatcaataaatcaggcgtatttagtgttgctaaaattgatgagccacgatttgaaaaagaaggtttattgattgaaggacagcgcactaactattttgttaaatccaatactcccgctgaatggacgagtaccagcaatatcgataaaactaataatggtgttgatgaatttggtttttcatatgccaaaatgcgaacaaaagataatatgacaggacaatcatctgcacttagtctgcatacatgcagtgcatcccgggggattgatgttagtggcgataataagtattgcactgtttcatgcagggttaaagctcctgatggtcttcgttgtcgtttgcgttttgaaaaatacgatgggtcggtttatacatttttaggagatgcttatttaactttcggaactctgacaatagaaaaaaatggcggagcagccaatagaatagcagctactgcaactaaagatccggttacagggtggattttctatgaggcaactatagaagctgttgaaggtgaaaccttaattggcgcaatgattcagtatgcgccgaaaaaaggtggtataactgaagcgggagattatatttaccttgcaacaccacaatttgaaaacggcggatgtgcttcatcttttgttattacgacaactgcacccgcaacccgcgccagtgatatggtgacgatcccaactgaaaataatatctataatagaccgcttacgtgtcttgtcgaggttaatagaaattggggcgatattcctcctaatgtagcaccgcgtatttttgatttttctggtgtgccacctattgagtcaattacatacgcttttaacacaactgagaaatattacggtcagctttatatgcaaacttataaagcgtcgacaagtacttacgtttctagtgtgtttgctggtcgaactgatgttcgaaaattcattggtggttttaatatttattctgatggtactaaacgagtagtttctaacggtgaggctactaaaactatgaaaacggagtggacgggcgtaaaaacacggacctttattcgaattggaggtcaagccacatcgggaactcgtcatctattcggccatttgagaaatcttcgtctctggcataaagaattaactgatgcgcaaatgggggagagtattaaatga

SEQ ID NO: 261930 - DNA, 1080 bp, Klebsiella pneumoniae
atgggaggcataccagtgacacaattagttttccatcataaacatcaccatttgccgccagcaagtgagaaagtgttacctgttcagctatatggattaagtggtcagaggcgcggagatatatctgttatcgggaatcctgcgattgatcggatcagacgtttgggagtacagcttccagctaaggtcatggattttctgagtgttgcattagcagtaactgcagcagatactttcgttcagcgtgaaagttccgaggatggttggacccgccaattgtcgttacgactcccccttcatgaaccatccagatggattagtctaaagaaagaacttgagagtgctttgcattttcttagtggagacatctgggatttcgaattttgtgacgatggttatgcaccgccagagccttatagccagcattcaaggcatcgtctgattaagctaaaagggcttgactgtgtcagcttattttcaggaggtctggattcagctattggtgcaatagatcttctggctgcagggcgcgctccacttttggttagtcatgcttataagggggataagtctcgtcaagatcagattgctgaaaaattaagtggccaattttcgcgctttgagattaatgctgacccacacatttatcaaggcgtgactgatattacgatgcgaactcgtagcctcaattttcttgcctttgcggccgtaggtgcttgtgccgtacaagagatatctcaacaagaaaagattgatttgttcgtacctgaaaatggatttatctcattaaatgcaccacttactccacggcggataggttcgctgagcacacgaacaacacatccacattttattacgagcatacaaaagatctttgatgcgctcggtatttcttgtcaaataatcaatccatatcagtttaagacaaaaggaaaaatgatctccgaatgttcaaataagcagctcttatctaaaattgtggaaagtacagtatcctgcagtcattggaaacgaatggggcagcaatgtggggtatgtataccgtgtatcattcgacgagcatcacttcatgctgattag

SEQ ID NO: 261931 - DNA, 753 bp, Klebsiella pneumoniae; identical to SEQ ID NO: 5152

SEQ ID NO: 261932 - DNA, 1785 bp, Klebsiella pneumoniae
atgtggtcagacaaagagtcatcagaagactacctaaattttggtgaagtatctcagttagccgtggatgtacttaccacgaaagatatgttaccagtatctatcggaatttttggaaactggggggcaggtaaatcctctctgttaaaactgatagagcaaaaacttgagcaagacgacaaagattggattgttatcaattttgactcttggctctatcaggggtacgacgacgcccgtgccgcacttcttgaagtcatcgctacagaattgacaaaagctgctgaaggtaattctacccttatatcaaaaactaagagactccttagtcgagttgatggttttagagctatgggattactagctgagggtacagctttaatggcaggattacctactggcggtttgctttctagggggattggtgcattaagaaatatcaccgatggcatccagagccaggaagagtatgaggctttaggcaatatagctaaagaaggtaaagaaactgcttgtggtttgattaaaccacaaacaaaaaaaagcccccctcagcagattgatgcctttcgtaaggaatatggggaaattctagaagaacttggaaagccactcattgtggtaatagataacctagaccgctgtctccctgccaatgctatccatacacttgaagctatcaggctattccttttcttgactaatacagcctttattattgcagcagatgaggacatgattcgctcttctgtggctgattacttcaaaggggcatcacagcgccatcaaatagattatctggataagctaatccaggttcctattcgggtgcctaaggctggggtccgtgagatccgttcgtatctgttcatgctttatgccattgaacatggcttagaaggcgaaaaaataactatgctccgtgagggcttagagaaggcgttacagcaatcctggaaagatgaaccaatctcacgtcaggaggccttaaaaatgactggtgaagcggatgatagcaacctcgcgctggcgtttgcgcgtgctgaccgtattgctcccattttagccaactctccaattattcatggtaatcccaggatcgttaaacgcttgttgaatgttgtgaaaatgcgatctcaaattgcgaagcgacgagcaatgcctttggatgaagcaattattactaagctagtaatttttgaacgctgtgttggagtggatggcaccgctgatttatatcatctcgtggatattgaacaaggtgttccccagatacttaaacagcttgacgataatggcggtcaaatacctactgatgcaccaaagacatggactgatagtccaacgactaaatctttcatcagtcaatgggcccaacttgaacctcgtcttggtgggattgacttaagggccgccatatatctgtcccgagaaactatgccaataggtgcatatgtggttggtttatcgccatctggacgggaagtactaaatgcactaattgaattgaaaaacactagttctcctacagcagaaaaccttttgaaagcacttcctcgtgaggagcaaatacctgtaatggaaggtttaattaaccagttacggcaggtatcagattgggatcgtaagcccagaggcttttccggcgcatgtctgttggcccgctactcaacagatgcagccagcatattaattcgttatctacaggaattacagttggggatgaaacgaccagcgtggatgactgcagcattaaaagatgaacaatggaataaggacgcttaa

SEQ ID NO: 261933 - DNA, 198 bp, Klebsiella pneumoniae; identical to SEQ ID NO: 32498

SEQ ID NO: 261934 - DNA, 351 bp, Klebsiella pneumoniae; identical to SEQ ID NO: 32497

SEQ ID NO: 261935 - DNA, 1257 bp, Klebsiella pneumoniae
atgcagggtaataatgttgctgccggtgcagcaggcgcagcaacgggagagctggcagccagagcgattgccggaatgatgtatccgggcgtgaaacagtcagacctcagtgaagagcagaagcagacgataagtacgctggcaaccgtgtcagcagggctggccggcggtaatctgagtgcagccctggcaggtggtgcagcaccgtatattgctgaaattatcaaacagaccaccccggaaggtgcgggacgtgtggccgcccatgccgtggtgaatgcagccctgtctctggcacagggtaagaatgctctagctggtgccgcaggcgcagccaccggcgaggtggtgggaatgatagccacacagatgtacggtaagccggtgagtgaactgagcgagacagagaagcagacggtctcgacactggcaacggttgctgccggtctggccggtggtctggtgggagactcagggggggcagcggtagccggagcacagtcaggtaagacgacggttgaaaacaatatgctgaacgtgatagccactgaaacagcggctaatacggcagcagcaatagctggtgctacaggtaatgccagtagggataccgggaatgataatagctgggatattggtggtggttgtgaaggctcacgggaacagtgtgctgtacgtgacccgagtcgcgatggtacccggggaccggggcatgtgctgaatggcgacaatacagacgaaaacaaacagccgaatctgggcaaagacgtagcgagcgctacggataaggataaagctgagcttggtggtgctggtgctggaacaccgggtgggtggggaccggataatgaagaaaaagcccgtcatcaggaggttcagcaacaacgatttgatgaactgagtaaaatatatgataaaagtcacccggtcggagagttaacagtggatgggcagactatcaggcagagttcggtaagtaaccgttatggtacgacgaaagtgtttgaaagccagaatctgacggataaacagatccacaattacgcacaacagctggcaggagatacaccgctgaaagaggttcggccggggatctatactgcaaagctgaataacggaacatcgatcacgttgcggaatttatcgtcgtcccaagaacaaacaggcgccagatggactattgatattagagggaatcagcaattggctgaaattgcacataaatacggacgtcaggttgaaattaaatttaggtga

SEQ ID NO: 261936 - DNA, 219 bp, Klebsiella pneumoniae
atgaatccgttttatcaaaaaataaatgcccctagccgcgaagtgctggagctcgttctaaaaatcgcagcaaaaattgaaaaccattcctcaaccatcgcggcgttcgtatgcgccgccaatgatgcgcccgaaaaacgcgtcaatatgagttccccggaagcttacaatgttattacccgatctcgatggaagttattgagtgatctcctttcatga

SEQ ID NO: 261937 - DNA, 813 bp, Klebsiella pneumoniae; identical to SEQ ID NO: 32481

SEQ ID NO: 261938 - DNA, 483 bp, Klebsiella pneumoniae; identical to SEQ ID NO: 32480

SEQ ID NO: 261939 - DNA, 387 bp, Klebsiella pneumoniae
atgattaccttacgtaaattgattggaaacatcaatatgacaaaagagcctgagcaacaatcacagcttgaactctggttcgaacgtatcatagatgtgcctcttgaaaagttaacagtggaagatctttgccgcgctatccgacaaaatttatgtattgatcagttgatgccaagagtgttggaagttctaactaaagagccgttagcgggtgaatattacgatggtgaactaattgcagctttatcaacgataaaaggagaagatctaaaagatcagaaaagtacctttacccaaataaggcaacttataaaccagctagaaccgtcagatattaacgatgatttaagaaaagatatattaaaaatcaatcagataattgtataa

SEQ ID NO: 261940 - DNA, 348 bp, Klebsiella pneumoniae
atggccgggcttgccggggcggcagtcaaggatatggccgacaggatgacctccgatgaactggagcatctgattaccctgcaaatgatgggtaatgatgagatcactactaagtatctcagttcgttgcatgataagtacggttccggggctgcctcgaatccgaatatcggtaaagatctgaccgatgcggaaaaagtagaactgggcggttccggctcaggaaccggtacaccaccaccatcggaaaatgatcctaagcagcaaaatgaaaaacctgtagataagcttaatcagaagcaagaaagtgcgattaagaagatcgataacactataaaaatgctctga

SEQ ID NO: 261941 - DNA, 246 bp, Klebsiella pneumoniae; identical to SEQ ID NO: 32478

SEQ ID NO: 261942 - DNA, 9741 bp, Klebsiella pneumoniae
atgcatcagcctcccgttcgcttcacttaccgcctgctgagttaccttatcagtacgattatcgccgggcagccgttgttaccggctgtgggggccgtcatcaccccacaaaacgggaccggaatggataaagcggcaaatggtgtgccggtcgtgaacattgccacgccgaacggggccgggatttcgcataaccggtttacggattacaacgtcgggaaggaagggctgattctcaataatgccaccggtaagcttaatccgacgcagcttggtggactgatacagaataacccgaacctgaaagcgggtggggaagcgaagggtatcatcaacgaagtgaccggcggtaaccgttcgctgctgcagggctatacggaagtggccggcaaagcggcgaatgtgatggtcgccaacccgtatggtatcacctgtgacggctgtggctttatcaacacgccgcacgcgacgctcaccacgggcagacctgtgatgaatgccgacggcagcctgcaggcgctggaggtgactgaaggcagtatcaccatcaatggcgcgggcctggacggcacccggagcgatgccgtatccattattgcccgtgcaacggaagtgaatgccgcgcttcatgcgaaggatttaactgtcactgcaggcgctaaccgtgtaactgcagatggtcgcgtcagtgccctgaagggcgaaggtgatgtgccgaaagttgccgttgataccggcgctctcggtggaatgtacgccaggcgtattcatctgacctccactgaaagtggtgtcggggttaatcttggtaacctttatgcccgcgatggcgatatcaccctggatgccagcggcagactgactgtcaacaacagtctcgccacgggggccgtcactgcaaaaggtcagggcgtcaccttaaccggcgaccataaagtgggaggtaacctgagcgtcagcagccggagcgatatcgttctcagcaatggaacgcttaacagcgacaagaacctcagcctgaccgccggcggcagaatcactcaacagaatgaaaaactgactgccggccgggatgtaacgcttgccgcgaaaaacatcacacaggataccgccagccagattaacgcggcccgcgatatcgtgactgtcgccagtgacacgctgacaacacagggacagataaccgccggacagaatctcacggccagcgccaccacgctgacgcaggacggaatattgctggcgaaaagtcatgcgggactcaatgccggtacgctgaataacagtggcgccgttcagggagctaccctgacgctcggcagtacaacgctcagcaacagtggctccctgctcagtggcggtcccctgaccgtgaatacccgcgactttacccagagcggccgcactggcgcgaagggcaaagtggatatcacggccagtgggaaactgaccagtacaggttcgctggtgagcgatgatgcactggtgctgaaggcgcaggatgtgacactgaacggtgtgctgtccggcggcaaagggctgacagtcagtgcgcagacgctgagctccggtaaaaaatcggtcacccacagcgatgctgcgatgacgctgaatgtgacaacagtggcgctggacggggaaaccagtgccggtgacaccctccgggttcaggcagacagactgagtaccgcagcgggcgcacaacttcagagcggcaaaaatctcagcatcaacgccagagatgcacgtcttgcaggtacgcaggcagcacaacagaccatggtggtgaacgccagtgaaaaactcacccacagcgggaaaagcagtgccccgtcgctcagcctcagtgcgccggaactgaccagcagcggcgtacttgttggttccgccctgaatacacagtcacagaccctgaccaacagcggtctgttgcaggggaaggcctcactcaccgttaacacacagaggcttgataatcagcagaacggcacgctgtacagtgctgcagacctgacgctggatataccggacatccgcaacagcgggcttatcaccggtgataatggtttaatgttaaatgctgtctccctcagcaatccgggaaaaatcatcgctgacacgctgaacgtcagggcgaccacgctggatggtgacggcctgttgcagggcgccggtgcactggcgcttgctggcgacaccctctcacagggtagtaacgggcgctggctgacggaggacgacctcaccctccggggtaaaatactgaataccgcagggaccacgcagggacagaatctcaccgtgcaggcggacagatgggcgaacagtggttccgtgctggcaaccggtaaccttactgcttcggcaaccggtcagttgaccagtaccggcgatatcatgagccagggtgacaccacgctgaaagcagccaccacggacaaccggggcagtctgctttcggccggcacgctctcccttgatggaaactcactggataacagcggcactgtccagggtaaccatgtcacgatttgccagaacagtgtcaccaacagtggcacgctcaccgggatcgccgcgctgacgcttgccgcccgtatggcatcccctcaacctgcgctgatgaataacggaggttcattgctgaccagcggcgatctgacaatcaccgcaggcagtattaccagttccggacactggcagggcaaacgggtgctgatcaccgcagacagtctggcaaacagcggggcgatccaggcggctgacagcctgactgcacgtctgacgggtgagcttgtcagcacagcaggcagcaaagtcacctcgaacggtgaaatggcgctcagtgcactgaatttaagcaacagcggacaatggattgcaaaaaatctgaccctgaaggcgaactcactgaccagtgcgggtgacatcaccggtgtggatgctctcacgctcacggtgaatcagacgctgaacaatcaggcgaacggaaaactgctcagtgcaggtgtgctgacgctgaaggcagacagtgtcacaaacgacgggcaattacagggaaatgccaccaccatcacggcaggacaactcacaaacggcgggcatctgcagggcgaaacgctgatgctggccgccgccggtggcgtgaacaaccgttccggtggtgttctgatgagccggaatgcactgaatgtcagtactgcgaccctgagtaaccagggcacgatacagggtggtggcggggtttccctgaacgccactgaccgtctgcagaacgacggcaaaatcctctccggcagtaacctcacgctgacggcgcaggtgctggcgaacaccggcagcggactggtacaggctgccaccctgctgctggatgtggtgaatactgtcaacggcggacgcgtacttgtcaccggcagtgccgacgttaaaggaaccacgctgaataataccggtacgcttcagggtgcggacctgctggtgaattaccacacattcagcaacagcggtaccctgctgggaaccgccgggcttggcgtcaagggcagttcactgctgcaaaatggtacagggcggctgtacagtgcaggcaacctgctgcttgacgctcaggacttcagtggtcagggccaggtggtggccaccggtgatgtcacactgaaactgattgctgccctcacgaatcatggtaccctggccgcagggaaaaccctttccgtcacgtcgcaaaatgccatcaccaacggcggtgtcatgcagggtgatgccatggtgctcggtgccggagaggcattcaccaacaatggaacgctgactgccggtaaaggcaacagtgttttcagcgcacagcgtcttttccttaacgcaccgggttcacttcaggccggtggcgatgtgagtctgaacagccggagtgatatcaccatcagtggttttaccggcacggcaggcagtctgacaatgaatgtggccggtaccctgctgaacagtgcgctgatttatgcggggaataacctgaagctgtttacagaccgtctgcataaccagcatggtgatatcctggccggcaacagtctgtgggtacagaaggatgcttccggcggtgcaaacacagagattatcaatacctccgggaatattgagacgcatcagggcgatattgctgtaagaaccgggcaccttctgaaccagcgggagggattttctgccacaacaacaacccggactaacccctcatccattcagggaatgggaaatgctctggttgatattcccctttcccttcttcctgacggcagctatggctatttcacccgtgaagttgaaaatcagcacggtacgccctgcaacgggcacggggcatgcaatatcacaatggatacgctttattattacgcgccgtttgctgacagtgccacacagcgctttctcagcagccagaacatcacaacagtaaccggtgctgataatccggcaggccgcattgcgtcagggcgtaatctttctgctgaggctgaacgactggaaaaccgggcgtcatttatcctggtgaatggggatatcgcactctcgggcagagagttaagcaatcagagctggcagacggggacagagaatgaatatctggtataccgctacgacccgaaaacgttttacggtagctatgccacaggctctctggataaactgcccctgctgtcaccggaatttgaaaacaataccatcagattttcactggatggccgggaaaaagattacacgcccggtaagacgtattattccgttattcaggcgggcggggatgttaagacccgttttaccagcagtatcaataacggaacaaccactgcacatgcaggtagtgtcagtccggtggtctctgcacctgtactgaatacgttaagtcagcagaccggcggagacagtctgacacagacagcgctgcagcagtatgagccggtggtggttggctctccgcaatggcacgatgaactggcaggtgccctgaaaaatattgccggaggttcgccactgaccggtcagaccggtatcagtgatgactggccactgccttccggcaacaatggatacctggttccgtccacggacccggacagtccgtatctgattacggtaaacccgaaactggatggtctcggacaggtggacagccatttgtttgccggactgtatgagcttcttggagcgaagccgggtcaggcgccacgtgaaacggctccgtcgtataccgatgaaaaacagtttctgggctcatcgtattttcttgaccgcctcgggctgaaaccggaaaaagattatcgtttcctgggggatgcggtctttgatacccggtatgtcagtaacgcggtgctgagccggacgggttcacgttatatcaacggactgggttcagacacggaacagatgcggtatctgatggataacgcggccagacaacagaaaggactgggattagagtttggtgtggcgctgacagctgaacagattgctcagcttgacggcagcatactgtggtgggagtcagtcaccatcaacggacagacagtcatggtcccgaaactgtatctgtcgccggaagatatcaccctgcataacggcagcgttatcagcgggaacaacgtgcagcttgcgggcggcaatatcaccaacagcggcggcagcatcaacgcacagaacgacctctcgctcgacagtaccggctatatcgacaacctgaatgcggggctgataagcgcgggcggtagcctggacctgagcgccatcggggatatcagcaatatcagctcagtcatcagcggtaaaaccgtacaactggaaagcgtgagtggcaacatcagcaatatcacccggcgtcagcaatggaatgcgggcagtgacagccgatatggtggtgtgcatctcagcggtacggacaccggtccggttgcgaccattaaaggcactgattcactttcgctggatgcagggaaaaacattgatattaccggggcaacggtctcgtccggtggaacccttggaatgtctgcgggtaatgatatcaacattgccgcaaccctgataagcgggagcaaaagtcagtccggtttctggcacactgatgacaacagttcatcatccaccacctcacagggcagcagcatcagcgccggcggtaacctggcgatggctgcaggccataatctggatgtcacggcatcctctgtttctgccgggcacagcgccctgctttctgcaggtaacgacctgagtctgaatgcagtcagggaaagcaaaaacagtcgcaacggcacgtcagaaagtcatgatagccacgcagcagtgtccacggtgacggcgggcgataacctcctccttgttgctggtcgtgatattgccagtcaggctgccggtgtggctgcggaaaataacgtgtccatccgggccgggcgtgatgtgaacctggtggcagagtctgccggcgcaggtgacagctatacgtcgaagaaaaagaaagagattaacgagacagtccgtcagcagggaacggaaatcgccagcggtggtgacaccaccgtcaccgcaggacgggatatcaccgctgttgcgtcatccgttaccgcaaccggcaatatcagcgtgaatgccggtcgtgatgttgccctgaccacggcgacagaaagtgactatcactatctggaaacgaagaaaaaaagcggaggttttctcagtaagaaaaccacccacaccatcagtgaggacagtgcctcccgtgaagcaggctccctgctgtcggggaaccgcgtgaccgttaacgccggtgataacctgacagtagagggttcggatgtggtggctgaccgggatgtgtcactggcggcgggtaaccatgttgatgttcttgctgccatcaatacagatacgtcctggcgctttaaggaaacgaagaaatccggtctgatgggtaccggcggtattggtttcaccattggcagcagtaagacaacgcacgaccggcgcgaggccgggacaacgcagagtcagagtgccagcaccatcggctccactgccggtaatgtcagtattaccgcgggcaaacaggctcatatcagcggttcggatgtgattgcgaaccgggatatcagcattaccggtgacagtgtagtggttgacccggggcatgaccgtcgtactgtggacgaaaaatttgagcagaagaaaagcgggctgacggttgccctttccggcacggtgggcagtgccatcaataatgcggtcaccagtgcacaggagacgaaggagagcagtgacagccgtctgaaagccctgcaggccacaaagacagcgctgtctggtgtgcaggccggacaggctgcggcaatggccaccgcaaccggtgacccgaatgcgacgggagtcagcctgtcgcttaccacccagaaatcgaaatcacaacaacattctgaaagtgacacagtatccggcagtacgctgaatgccgggaataatctgtctgttgtcgcaaccggcaaaaacaggggcgataaccgcggagatattgtgattgcaggaagccagcttaaggccggtggtaacacaagcctggatgccgcgaatgatgttctgttgagtggcgctgcaaacacacaaaaaacaacgggcaggaacagcagcagtggcggtggcgtgggtgtcagtatcggtgccggtggtaacggtgccggtatcagcgtctttgccagcgttaatgcggcaaaaggcagcgagaaaggtaacggtactgagtggactgaaaccacaatagatagcggtaaaaccgtcaccatcaacagtggtcgggatacggtactgaacggtgctcaggtcaacggcaacaggattatcgccgatgtgggccacgacctgctgataagcagccagcaggacaccagtaagtacgacagtaaacagaccagcgtggctgccggcggcagttttacctttggctccatgaccggctcaggttacatcgctgcctcccgggataagatgaagagccgctttgactccgttgctgaacaaaccggaatgtttgccggtgatggtggcttcgacattacagtgggcagacatacccaactggagggtgcggtgattgcctccactgccacaccggataaaaaccacctggataccggaacgctggggttcagtgaccttcacaacgaagcggattataaagtcagtcacagtggaatcagtctgagcggtggtggcagcttcggggataaatttcagggtaacatgccgggtggcatgatatccgccggaggtcacagcggacatgcggaaggaacgactcaggccgcagtggcagatggcacaatcaccatccgggacagggacaatcagaagcagaatctggcgaacctgagccgtgaccctgtgcacgctaatgacagtatcagcccgatatttgacaaggagaaggagcagaggcgtctgcagacagtggggcttatcagtgacataggcagtcaggtggcggatattgcgcgtacacagggagaactgaatgcgttgaaggctgcgcaggataaatatgggcctgttccggcggatgcgacggaagaacagcggcaggcatatctggcaaaactgcgtgatacgccggaatacaaaaaggaacaggaaaagtatggtaccggcagcgatatgcagcgcggtatccaggctgcaacggctgcatttcagggcctggcgggcggcaatatggcaggcgcgctggcaggtgcttcagcgccggagctggcgaacatcatcggtcatcacgcgggtattgatgacaatacagcggcaaaagccattgcccatgccattctcggtggtgtgacagcagcccttcagggcaacagtgcggcagcaggcgcaattggcgcgggtactggcgaagtgatcgcgtcagccattgcgaaaagcctctacccgggcgtagatccgtcgaaactgacagaagatcagaagcaaactgtaagcacgctggcaacgctgtcagcgggtatggccggcggcattgccagtggcgatgtggctggcgcggctgctggagctggtgccgggaagaacgttgttgagaataacctgctgggtggcagtgaatggctccagacggaaaaagccagagagcatggcgctgatgttctctcctgtagtgataatccttccggtgaagcctgtaagcgggggcaggctgaaaataaagcttatgctgccgcattagcgacaagtagtgtttcgctgttacctagaagcgcacaagccatgtgggctcttggcgcaggtgcaaatgcaggaattggttccatggtagatagttcagttgatcctgaaaatgcaatcattgcaggatgggtcaatgtaatcaccatggggcagggctggaaaggaactgttggatggaatgcagccggtggtgcatttggtaactggctggatgggaaggatccattatctggtgctgcgatgagtggtggtacatcggcaataggttatggtgtaggtaaggttgttcaagggccactggagaaagtaattaatcctaactggaaaaactgggaatggctcaatgttggtatggggatcagcaagcctctaccattaaatccaacgcctggaattgctgggaatataggttcttcaattggttcagaaggatcaggagctataatccaagaacagttaaaaaatcaacaggagaagaaataa

SEQ ID NO: 261943 - DNA, 1767 bp, Klebsiella pneumoniae
atgcagcaccggcaggataacttactggcgaacagaacgtcgtttcctggtatggtttccggtcagtacgcattcaggatccgtaccttatctcaggtggtacgctatttttccctcctcccctgcctttgcattctttcattttcgtctccggcagccatgctgtctccgggtgaccgcagtgcaattcagcagcaacagcagcagttgctggatgaaaaccagcgtcagcgtgatgcgctggagcgcagtgcgccgctgaccatcacgccgtctccggaaacgtctgccggtactgaaggtccctgctttacggtgtcacgcattgttgtcagtggggtcacccgactgacgtctgcagaaaccgacagactggtggcaccgtgggtgaatcagtgtctgaatatcacggggctgaccgcggtcacggatgccgtgacggacggctatatacgccggggatatatcaccagccgggcctttctgacagagcaggacctttcagggggcgtactgcacataacggtcatggaaggcaggctgcagcaaatccgggcggaaggcgctgaccttcctgcccgcaccctgaagatggttttcccgggaatggaggggaaagttctgaacctgcgggatattgagcaggggatggagcagattaatcgtctgcgtacggagccggtacagattgaaatatcgcccggtgaccgtgagggatggtcggtggtgacactgacggcatcgccggaatggcctgtcacagggagcgtgggcttcgacaacagtggacagaagaataccggtacggggcagttaaatggtgtcctttcctttaataatcctctggggctggctgacaactggtttgtcagcgggggacggagcagtgacttttcggtgtcacatgatgcgaggaattttgccgccggtgtcagtctgccgtatggctataccctggtggattacacgtattcatggagtgactacctcagcaccattgataaccggggctggcggtggcgttccacgggagacctgcagactcaccggctgggactgtcgcatgtcctgttccgtaacggggacatgaagacagcactgaccggaggtctgcagcaccgcattattcacaattatctggatgatgttctgcttcagggcagcagccgtaaactcacttcattttctgtcgggctgaatcacacacacaagtttctgggtggtgtcggaacactgaatccggtatttacacgggggatgccctggttcggcgcagaaagcgaccacgggaaaaggggagacctgcccgtaaatcagttccggaaatggtcattaagcgccagttttcagcgccccgtcacggacagtgtgtggtggctgaccagcgcttatgcccagtggtcaccggaccgtcttcatggtgtggaacaactgagcctcgggggtgagagttcagtgcgtggctttaaggagcagtatatctccggtaataacggcggttatctgcggaatgagctgtcctggtctctgttctccctgccatatgtgggaactgtccgtgcagtgactgcactggacggcggctggctgcactctgacagcgatgacccgtactcgtccggcacgctgtggggtgctgctgccgggctcagcaccaccagtggtcatgtttccggttcgttcatcgccggactgcctctgatttacccggactggcttgcccctgaccatctcacggtttactggcgcgttgccgtcgcgttttaa

SEQ ID NO: 261944 - DNA, 234 bp, Klebsiella pneumoniae; identical to SEQ ID NO: 32477

SEQ ID NO: 261945 - DNA, 939 bp, Klebsiella pneumoniae
atgagcactattcttcttccgaaaacgcagcacctggtagtctttcaggaagtcattagaagtggttctatcggctcggctgcaaaagaattagggttaactcaaccggccgtcagtaaaatcattaacgatattgaagattattttggtgtggaattagtggtgcggaaaaataccggtgtaacattaacacctgccggtcaattgttactctcccgttccgaatccattacccgtgaaatgaaaaatatggttaatgagataagcggtatgtcttctgaggcggtggtggaagtctcatttggttttccttcattgattggttttacttttatgtcagggatgatcaacaagttcaaagaggtgttcccgaaagcgcaggtttctatgtatgaagcgcaactgtcttcgttcttaccggcaatccgcgacggtcgactggattttgcgattggtacgttaagtgcagaaatgaagcttcaggatttacatgttgagccgctgttcgagtccgagtttgtgctggtagccagtaagtcccgaacatgcaccggcaccaccacgctggagtcgttgaagaacgaacagtgggtgttgccacaaactaatatggggtactacagcgaactgcttactacgttacaaagaaatggcatcagtattgaaaacatcgttaaaaccgactcagtcgtgacaatttataatcttgttctcaatgctgatttcttaactgtaattccttgtgatatgacgtcaccttttggttctaatcaatttattactattccggttgaagaaacattacctgtggcacaatatgccgcggtatggtcgaaaaattatcgtattaaaaaagcagcatcggttttggtggaattagccaaagagtattcatcttataatgggtgtagacgaaggcaattaatagaagttggttag

SEQ ID NO: 261946 - DNA, 990 bp, Klebsiella pneumoniae
atgcatattacatacgatctgccggttgctattgatgacattattgaagcgaaacaacgactggctgggcgaatttataaaacaggcatgcctcgctccaactattttagtgaacgttgcaaaggtgaaatattcctgaagtttgaaaatatgcagcgtacgggttcatttaaaattcgtggcgcatttaataaattaagttcactgaccgatgcggaaaaacgcaaaggcgtggtggcctgttctgcgggcaaccatgcgcaaggggtttccctctcctgcgcgatgctgggtatcgacggtaaagtggtgatgccaaaaggtgcgccaaaatccaaagtagcggcaacgtgcgactactccgcagaagtcgttctgcatggtgataacttcaacgacactatcgctaaagtgagcgaaattgtcgaaatggaaggccgtatttttatcccaccttacgatgatccgaaagtgattgctggccagggaacgattggtctggaaattatggaagatctctatgatgtcgataacgtgattgtgccaattggtggtggcggtttaattgctggtattgcggtggcaattaaatctattaacccgaccattcgtgttattggcgtacagtctgaaaacgttcacggcatggcggcttctttccactccggagaaataaccacgcaccgaactaccggcaccctggcggatggttgtgatgtctcccgcccgggtaatttaacttacgaaatcgttcgtgaattagtcgatgacatcgtgctggtcagcgaagacgaaatcagaaacagtatgattgccttaattcagcgcaataaagtcgtcaccgaaggcgcaggcgctctggcatgtgctgcattattaagcggtaaattagaccaatatattcaaaacagaaaaaccgtcagtattatttccggcggcaatatcgatctttctcgcgtctctcaaatcaccggtttcgttgacgcttaa

SEQ ID NO: 261947 - DNA, 1209 bp, Klebsiella pneumoniae
atgaatgaatttccggttgttttggttattaactgtggttcgtcttcgattaagttttccgtgctcgatgccagcgactgtgaagtattaatgtcaggtattgccgacggtattaactcggaaaatgcattcttatccgtaaatgggggagagccagcaccgctggctcaccacagctacgaaggtgcattgaaggcaattgcatttgaactggaaaaacggaatttaaatgacagtgtggccttaattggccaccgcatcgctcacggcggcagtatttttaccgagtccgccattattaccgatgaagtcattgataatatccgtcgcgtttctccactggcacccctgcataattacgccaatttaagtggtattgaatcggcgcagcaattatttccgggcgtaactcaggtggcggtatttgataccagtttccaccagacgatggctccggaagcttatttatacggcctgccgtggaaatattatgaagagttaggtgtacgccgttatggtttccacggcacgtcgcaccgctatgtttcccagcgcgcacattcgctgctgaatctggcggaagatgactccggcctggttgtggcgcatcttggcaatggcgcgtcaatctgcgcggttcgcaacggtcagagtgttgatacctcaatgggaatgacgccgctggaaggcttgatgatgggtacccgcagtggcgatgtcgactttggtgcgatgtcctgggtcgccagccaaaccaaccagagcctgggtgacctggaacgcgtagtgaataaagagtcgggattattaggtatttccggtctttcttcggatttacgtgttctggaaaaagcctggcatgaaggtcacgaacgcgcgcaactggcaattaaaacctttgttcaccgaattgcccgtcatattgccggacacgcagcttcattacgtcgcctggatggaattatattcaccggcggaataggagagaattcaagcttaattcgtcgtctggtcatggaacatttggctgtattaggcttagagattgatacagaaatgaataatcgctctaactcctgtggtgagcgaattgtttccagtgaaaatgcgcgtgtcatttgtgccgttattccgactaacgaagaaaaaatgattgctttggatgccattcatttaggcaaagttaacgcgcccgcagaatttgcataa

SEQ ID NO: 261948 - DNA, 2295 bp, Klebsiella pneumoniae
atgaaggtagatattgataccagcgataagctgtacgccgacgcatggcttggctttaaaggtacggactggaaaaacgaaattaatgtccgcgattttattcaacataactatacaccgtatgaaggcgatgaatctttcctcgccgaagcgacgcctgccaccacggaattgtgggaaaaagtaatggacggcatccgtatcgaaaatgcaacccacgcgccggttgatttcgataccaatattgccaccacaattaccgctcatgatgcgggatatattaaccagccgctggaaaaaattgttggcctgcaaacggatgcgccgttgaaacgtgcgctacacccgttcggtggcattaatatgattaaaagttcattccacgcctatggccgagaaatggacagtgaatttgaatatctgtttaccgatctgcgtaaaacccataaccagggcgtatttgatgtttactcaccggatatgctgcgctgccgtaaatctggcgtgctgaccggtttaccagatggctatggccgtgggcgcattatcggtgactatcgccgcgtagcgctgtatggcatcagttatctggtacgtgaacgcgaactgcaatttgccgatctccagtctcgtctggaaaaaggcgaggatctggaagccaccatccgtctgcgtgaggagctggcagagcatcgtcatgcgctgttgcagattcaggaaatggcggcgaaatatggctttgatatctctcgcccggcgcagaatgcgcaggaagcggtgcagtggctctacttcgcttatctggcggcagtgaaatcgcaaaatggcggcgcgatgtcgctgggccgcacggcatcgttcctcgatatctacattgagcgcgactttaaagctggcgtactcaatgagcagcaggcacaggaactgatcgatcacttcatcatgaagatccgtatggtacgcttcctgcgtacaccggaatttgattcgctgttctccggcgacccaatctgggcgacggaagtgatcggcgggatggggctggacggtcgtacgctggtgaccaaaaactccttccgctatttgcacaccctgcacactatggggccggcaccggaacctaacctgaccattctttggtcggaagaattaccgattgccttcaaaaaatatgccgcgcaggtgtcgatcgtcacctcttccttgcagtatgaaaatgacgatctgatgcgtactgacttcaacagcgacgattacgcgattgcctgctgcgtcagcccaatggtgattggtaagcaaatgcagttctttggtgcacgcgctaacctggcgaaaacgctgctctacgcaattaacggcggggtggacgagaagctgaagattcaggtcgggccgaaaacagcaccgctgatggacgacgtgctggattacgacaaagtgatggacagcctcgatcacttcatggactggctggcggtgcagtacatcagcgcgctgaatatcattcactacatgcacgacaagtacagctacgaagcttcgctgatggcgctgcacgatcgtgatgtctatcgcactatggcatgcggcatcgcgggcctgtcggtggcgacggactccctgtctgccatcaaatatgcccgcgtgaaaccaatccgtgacgaaaacggcctggcggtggactttgaaatcgacggtgaatatccgcagtacggcaacaacgacgagcgcgtagacagcattgcctgcgacctggttgaacgctttatgaagaaaattaaagcgctgccaacctatcgcaacgccgtccctacccagtcgattctgactatcacttctaacgtggtgtacggccagaaaaccggtaatacgccggacggtcgtcgcgccggaacaccgttcgcgccgggcgctaacccgatgcatggtcgtgaccgcaaaggtgccgtggcctcattgacgtcggtggcgaaactgccgttcacctacgccaaagatgggatctcgtacaccttctcaatcgttcctgcggcgctgggcaaagaagatccagtacgtaaaaccaaccttgtcggcctgctggatgggtatttccaccacgaagcggatgtcgaaggcggtcaacacctcaacgtcaacgtaatgaatcgggaaatgctgctggatgccatcgagcacccggaaaaatatcctaacctgacaatccgtgtctctggctacgccgtgcgcttcaacgcactgacccgtgaacagcaacaggatgttatttcacgtacctttacccaggcgctctga

SEQ ID NO: 261949 - DNA, 390 bp, Klebsiella pneumoniae
atgaaaaagattatcgaaacgcaacgtgccccaggcgcaatcggcccttatgttcagggcgttgatttaggcagcatggtcttcacctccgggcaaataccggtttgcccacagaccggtgagatcccggctgatgtgcaagatcaggcgcgtttaagcctcgaaaacgtcaaagcgatcgtggttgctgccgggctgagcgtgggcgatatcatcaagatgaccgtgtttatcaccgatctgaatgattttgccaccatcaacgaagtctataagcagttcttcgatgagcatcaggcgacctatccgacccggagctgtgtgcaggtcgcgcgtttgccgaaagatgtgaagctggaaattgaagccatcgcagtacgtagtgcgtaa

SEQ ID NO: 261950 - DNA, 1365 bp, Klebsiella pneumoniae
atgattagtgcattcgatattttcaaaattgggattggtccctccagttcgcataccgtggggccaatgaatgccggaaaaagttttattgatcggctggaaagtagcggcttattaaccgcgacgagccatattgtggtcgatctgtacgggtcgttgtcactgacgggcaaaggccatgccacggatgtcgccatcatcatgggactggcaggaaacagtccgcaggatgttgtcattgatgagatccctgcatttatagagttagtaacgcgcagcgggcggctgccagtggcatctggtgcgcatattgttgattttcctgtagcaaagaacattatcttccatcccgaaatgttgcctcgccatgagaacggaatgcggatcactgcctggaagggacaggaagagctattaagtaaaacctattactctgtcggcggcgggtttattgtcgaagaagaacacttcggcctgtcgcacgatgtcgaaacgtccgtaccttacgatttccactcagcaggtgaactgctgaaaatgtgtgattacaacggcctgtctatatctggtctgatgatgcacaacgagctagcgctgcgcagcaaagcggaaattgacgccggttttgcccgtatctggcaagtgatgcatgacggtattgaacgtgggatgaacactgaaggcgtgctgcctggtccgctcaatgtgccgcgccgtgccgtagcgctgcgtcgtcagctggtttccagcgataacatctctaacgatccgatgaatgtcatcgactggatcaacatgtacgcgctggcggttagtgaagaaaacgcagctggcgggcgcgtggtaacggcaccgactaacggtgcgtgcggcattattccggcagtactggcttattacgataagttccgtcgtccggtaaacgagcggtcaattgcccgctattttctggccgcgggggctattggcgcgctgtataaaatgaacgcctccatctctggcgcggaagtcggctgtcagggggagattggcgtggcctgttcaatggcggcggcagggttaactgaactactgggcggcagtccggcgcaggtatgcaatgcggcggaaatcgcgatggagcataaccttgggctgacctgcgatccggttgccggacaggtacaaatcccgtgcattgaacgtaatgccattaatgccgtgaaagcagtaaacgccgcgcggatggcgatgcgccgcacctcggcaccgcgtgtttcactcgataaagtgatcgagacgatgtatgaaaccggcaaagatatgaacgataaataccgcgaaacatcacgcggaggactggccattaaagtggtctgcggctga

SEQ ID NO: 261951 - DNA, 1332 bp, Klebsiella pneumoniae
atggaaattgcatcgaataaaggcgtcattgcagacgcttcgaccccggcgggtcgtgctggaatgagtgagagcgagtggcgagaagcgatcaaattcgacagtactgacaccggctgggtgattatgagtatcgggatggcgattggcgcggggattgtttttctcccggtgcaggtcggtttgatgggattgtgggtatttttgctctcatcggtgattggttacccggcaatgtatctgtttcagcgattgtttattaatacgctggcagaatcaccagaatgtaaagattacccgagcgtcattagcggttatttaggtaaaaactggggcatcctgttaggtgcgctctatttcgtaatgctggtgatttggatgttcgtctattccaccgccatcaccaacgatagtgcttcctacctgcataccttcggcgtgacggaagggttgctgtcagacagtcccttttatggtctggtactgatttgcattctggtggcgatctcctcacgcggcgagaaattgttattcaaaatttcgaccggcatggtgctgaccaagctgctggtggtcgcggcgctgggcgtgtcgatggtgggaatgtggcatctgtataacgtcggttcgctaccgccgctggggctgctggtgaaaaacgccattattacgctgccgtttaccctgacgtcgattctgtttatccagacgttaagtccgatggtgatctcttatcgctcgcgggaaaaatcaattgaagtggcgcggcataaagcattgcgggcaatgaatatcgcgtttggcattttgtttgtcaccgtctttttctacgccgtgtcgttcacgctggcgatgggacatgacgaagcggtaaaagcctatgagcagaatatttccgcgctggcgattgccgcacagtttattagcggtgacggcgcagcgtgggtgaaagtggtcagcgtcattctcaatatctttgctgtcatgactgcattctttggcgtctatttaggctttcgcgaagcaacgcaagggatcgtaatgaacatcctgcgtcgcaagatgcctgccgagaagattaacgaaaatctcgttcagcgcggcatcatgattttcgccattttgctggcctggagcgccatcgtactgaacgcaccggtgttgagcttcacctctatctgtagcccgattttcggcatggtagggtgcctgatcccggcgtggctggtttacaaagtaccagcattgcacaaatacaaagggatgtctctgtacctgattatcgtcactggtttgttgctgtgtgtttctccgttcctggcattttcttga

SEQ ID NO: 261952 - DNA, 1311 bp, Klebsiella pneumoniae
atgtttgattcgactttaaatccgttatggcagcgttacatcctcgccgttcaggaggaagtaaaaccggcgctgggatgtactgaaccgatttcactggcgctggcggcggcggttgctgcggcagaactggaaggtccggttgaacgtgtagaagcctgggtttcgccaaatctgatgaagaacggtctgggcgtcaccgttcccggcacgggaatggtggggctgccgattgcggcggcgctgggggcgttaggtggaaatgccaacgccgggctggaagtgctgaaagacgcaacagcgcaggcaattgccgatgccaaagcactgctggcggcggggaaagtctccgttaagatccaggaaccttgcgatgaaatcctcttctcacgcgccaaagtctggaacggtgagaagtgggcgtgtgtcaccatcgtcggcgggcataccaacattgtgcatatcgagacgcacgatggtgtggtgtttacccagcaggcgtgtgtggcagagggcgagcaagagtctccgctgacggtgctttccagaacgacgctggctgagatcctgaagttcgtcaatgaagtcccgtttgcggcgatccgctttattctcgattccgcgaagctaaattgtgcgttatcgcaggaaggtttgagcggtaagtgggggctgcatattggcgcgacgctggaaaaacagtgcgagcgcggtttgctggcgaaagatctctcttcatccattgtgattcgtaccagcgcggcatccgatgcgcgtatgggcggcgctacgcttccggctatgagtaactccggctcgggtaaccaggggattaccgcaacaatgcctgtggtggtggtagcagaacacttcggagcggatgatgaacggctggcgcgtgcgctgatgctttcgcatttgagcgcaatttacatccataaccagttaccgcgtttgtctgcgctgtgtgccgcaacgaccgcagcaatgggggccgccgccgggatggcatggctggtggatgggcgttatgaaaccatctcgatggcgatcagcagtatgatcggcgatgtcagcggcatgatttgcgatggtgcgtcgaacagctgcgcgatgaaggtttcgaccagtgcttcggctgcgtggaaagcggtgttaatggcgctggatgataccgccgtgaccggcaatgaagggattgtggcgcatgatgttgagcagtcgattgccaacctgtgtgcgttagcaagccattcgatgcagcaaacggatcggcagattatcgagattatggcgagcaaggccagataa

SEQ ID NO: 261953 - DNA, 165 bp, Klebsiella pneumoniae
atgagtaaaaaattggccaaaaagcgccagccggtgaagcccgtggtggcgaaagaacctgctcgcaccgccaaaaattttggctatgaagagatgttgagcgagctggaagctatcgtcgcggatgctgaaacgcgtttagccgaggatgaagctaccgcgtaa

SEQ ID NO: 261954 - DNA, 702 bp, Klebsiella pneumoniae
atgattactacccgaactgccaggcagtgtggacaagcagactacggatggttgcaggcccggtatactttttcctttggacactacttcgacccgaaattgttaggctatgcctccctgcgtgtgcttaaccaggaagtgctggccccaggtgccgcctttcagccgcgaacctatcccaaagtcgatattttaaatgtgattctggatggagaagcagagtatcgcgatagcgaaggcaatcatgttcaggccagcgccggagaggcgttgctgctctctacccagccgggtgtcagctatagcgaacacaatctcagcaaagacaaaccgttaacgcgaatgcagctttggctggacgcctgcccgcagcgagagaatccgctgattcaaaagctggcgcttaatatgggcaagcagcaattaatcgcctcgccagagggtgcgatgggaagcctgcaattacgccagcaagtgtggctgcaccatatcgtgctcgacaaaggcgaaagtgcgaatttccagttgcatgggccacgcgcgtatttgcaatcgattcacgggaaatttcatgcgcttacgcatcatgaagagaaagcggcgctgacctgcggtgatggggcgtttattcgtgacgaggctaacattacgctggttgccgattccccactgcgcgctttgctgatagatttgcctgtctag

SEQ ID NO: 261955 - DNA, 357 bp, Klebsiella pneumoniae
atgcagtggtatttgtccgtattaaaaaattatgttggtttctctggtcgcgcacgtcgtaaagagtactggatgtttactctgattaacgccatcgtcggcgctattatcaatgtcattcaattgattttaggtctggagcttccatatctgtctatgctttatttgctggcaaccttccttcccgtccttgcgcttgctatccgtcgcttacacgataccgaccgttcaggtgcctgggccttgctcttttttgttccgtttattggctggctcgtgcttctggtttttttctgcacagaaggtacttctggcagcaatcgttacggaaacgatccgaagtttggttcaaattaa

SEQ ID NO: 261956 - DNA, 366 bp, Klebsiella pneumoniae
atggactggtatctgaaagtactaaaaaattatgtcggtttccggggtcgtgcgcggcgcaaagagtactggatgtttattctggtcaacatcatctttacgttcgtgctggggctgctggataaaatgttaggctggcaacgcgctggtggcgaaggcatcctgacgacaatctacggtattctggtgtttttaccgtggtgggcggttcagttccgccgcctgcacgacaccgaccgctcggcgtggtgggcactgctattcttaatcccgtttatcggctggcttattatcatcgtctttaactgccaggcgggtacgccaggcgaaaaccgctttggaccagatccaaaactggaaccttaa

SEQ ID NO: 261957 - DNA, 987 bp, Klebsiella pneumoniae
atgggtcaactgattgacggcgtctggcatgacacctggtacgataccaaatctaccggcggtaaatttcaacgttcagcttccgcatttcgtaactggctcactgccgatggcgctcctggccccactggcacaggcggttttatcgcagagaaagatcgttatcatctctatgtttcactcgcctgcccgtgggcgcaccgcacgctgatcatgcgcaaactcaaaggactggaaccgtttatttccgtttccgtagtgaacccgctgatgctggaaaacggttggacctttgatgacagttttccgggagcaaccggagacacgctctatcaaaatgaatttctgtatcagctttatctccacgccgatccacactacagcggacgagttactgttcccgtgctgtgggacaaaaagaaccacaccatcgtcagcaacgaatcagcagaaatcatccgcatgttcaataccgcgtttgatgcgctgggcgcgaaagcgggtgattactaccctccagccctgcaaacaaaaattgacgaacttaacggctggatttatgacaccgttaacaacggcgtgtataaagctggttttgccaccagccaggaagcttacgacgaggcggtggcgaaagtgtttgaatcgctggcacgactggagcagattttaggccagcatcgttacctgaccggcaaccagctaaccgaagccgatattcgcctgtggactacgctggtgcgttttgatccggtgtatgtgacccacttcaagtgtgataagcaccgcatcagcgattacctgaatctgtacggttttctgcgcgatatctaccagatgccggggatcgccgaaacagtcaatttcgatcatatccgtaatcattacttccgcagccataagaccatcaaccctacggggattatttcaattggtccgtggcaggatctcgatgaaccgcatggacgagatgttcgcttcggttaa

SEQ ID NO: 261958 - DNA, 483 bp, Klebsiella pneumoniae
atgattctctccatcgacagcaacgacgctaataccgcgccattgcacaaaaaaacaatcagcagcctgagtggcgcagtggagagtatgatgaaaaaattagaagatgttggtgtactggtagcgcgcattttaatgccgattctgtttattaccgctggctggggaaaaattactggctacgcgggtacccaacaatatatggaagcaatgggcgtcccgggttttatgctgccgctggtgattctgcttgagtttggtggtggtctggcaatcctgttcggtttcctgactcgcaccacagccctgtttactgcgggctttacgctgctgacggcatttttatttcacagcaactttgctgaaggcgtcaactcgctgatgttcatgaaaaacctgacaatttctggcggattcctgctgctggcaattaccggtccgggcgcgtatagcatcgaccgcctgctgaataaaaagtggtaa

SEQ ID NO: 261959 - DNA, 300 bp, Klebsiella pneumoniae
gtgagcagtaaagtcgaacgtgaacgacgtaaggcgcaactgcttagccagatccagcaacaacggctggatctttccgccagtcgtcgtgaatggctggagacaacaggcgcttacgatcgtcgctggaatatgctgctaagtctgcgctcctgggcgctggttggcagtagcgtgatggcgatctggacgattcgccatcctaatatgctggtccgctgggccagacgcggttttggcgtatggagcgcctggcgtctggttaaaacgaccctcaagcagcaacagcttcgcggttaa

SEQ ID NO: 261960 - DNA, 405 bp, Klebsiella pneumoniae
atggcggacactcatcacgcacaagggcccggtaaaagcgttctgggcatcgggcagcgaattgtttctatcatggttgaaatggtagagacacgtctgcggctggcggtggtggagctggaagaggaaaaagcgaatctctttcaacttttactgatgctgggcctgacgatgcttttcgctgcatttggtcttatgagcctgatggtgctaattatttgggcggttgacccgcaatatcgcctgaatgcgatgattgccaccaccgtggtgttgctgctactggcactgattggcggtatctggacgctacgtaaatcgcgtaagtctacgttgctgcgccatacacgccatgagttagcaaacgatcggcagctgctcgaggaggagtcccgtgagcagtaa

SEQ ID NO: 261961 - DNA, 306 bp, Klebsiella pneumoniae
atgtcgaaagaacacactacggaacatctgcgtgctgagttgaaatccctttccgatacgctggaagaggtgcttagctcatctggcgagaagtcgaaagaagagttgagtaagattcgtagcaaagcggagcaggcactgaaacagagccgttatcgcctgggtgaaaccggtgatgccattgccaaacaaacccgtgtcgcggcggcgcgtgccgatgagtatgtgcgcgaaaatccgtggacgggcgtgggcattggcgctgcaatcggtgtagtgctcggcgttctgctgtcgcgtcgttaa

SEQ ID NO: 261962 - DNA, 369 bp, Klebsiella pneumoniae
atgaaataccgcatcgctttagctgtttctctctttgctcttagtgccggtagttatgccactaccctgtgtcaggaaaaggagcaaaatatccttaaggagatcagctatgccgaaaaacaccaaaaccagaatcgtattgacggtctgaataaagccctgagtgaagtccgggccaactgttcagatagccagctgcgtgccgatcatcagaagaaaatcgcaaagcagaaagatgaggtggcggaacgccagcaagatttagccgaggcgaagcaaaaaggcgatgccgataagattgccaaacgcgaacggaaactggcagaagcgcaggaagagctgaaaaagctggaagcgcgcgactactaa

SEQ ID NO: 261963 - DNA, 384 bp, Klebsiella pneumoniae
atgcaaatacctcgcatgtcgcttcgccagctagcctggtccggcgctgttttacttctggtcggcacgctgttgctggcctggtccgcggttcgccagcaagagtctacgctggcgattcgtgccgttcatcaaggcacaacgatgccagacggtttttcaatctggcatcaccttgacgctcatggcattcctttcaaaagtatcacccccaaaaacgacactctgttaattacatttgactccagcgaccagagcgccgccgcaaaagcggtcctcgacagaacattgccccatggctacatcattgcgcagcaggacaataacagtcaggctatgcagtggctgacccggttacgggataactctcatcgcttcggataa

SEQ ID NO: 261964 - DNA, 663 bp, Klebsiella pneumoniae
atggaacttttgacccaattgctgcaagccctgtgggcgcaggattttgaaaccctggccaatccatcgatgattggcatgttgtattttgtcttgtttgtaattttgttccttgaaaacggcttgcttccggcggcctttttaccgggcgacagtttactggtattggtcggcgtgttgattgcgaaaggcgcgatgggctatccgcaaacgattctgctgctgaccgttgccgccagcctcggctgctgggtcagctatattcaggggcgatggctgggcaatacccgcaccgtacaaaactggctatctcatttacccgcgcattatcatcaacgcgcacaccatctttttcataaacacggtttatcggcgctgttaattggtcgctttattgcgtttgtcagaacactgctgccgacgattgccgggttatcagggctgaataacgcgcgctttcagtttttcaactggatgagcggtctgctgtgggtattgatcctgacaactctgggttacatgctcggcaaaacgccggtatttttaaagtacgaggaccagctgatgtcatgcctgatgctgctcccggtggtgctgctggtgtttggcctggcaggttctctggtcgtgttatggaaaaagaaatatggaaatcgggggtaa

SEQ ID NO: 261965 - DNA, 132 bp, Klebsiella pneumoniae; identical to SEQ ID NO: 28176

SEQ ID NO: 261966 - DNA, 777 bp, Klebsiella pneumoniae
atggaaatcactgaaccacgccgtttgtatcaacaacttgccgctgacctgaaagagcgcatcgaacagggcgtctatctggtgggtgataaactgcctgcagaacgctttattgccgatgaaaagaacgtcagccgtacggtagttcgtgaagccatcatcatgctggaagttgaaggctatgtcgaagtgcgtaaaggttcaggtattcatgtggtttccaaccagccgcgccatcagcaggcggctgacaataatatggaattcgccaattacggtccgtttgagttgcttcaggctcgccagctcatcgaaagtaatattgccgaattcgcggcaactcaggtaacgaaacaggacatcatgaaactgatggccattcaggaacaggcgcgcggcgaacaatgcttccgtgattccgagtgggatttgcagttccacattcaggtcgctctggcgacgcagaactccgccctggcggctatcgtggaaaaaatgtggacccagcgtagtcataacccgtactggaaaaaactgcacgaacacattgattcccgtaccgtcgataactggtgtgatgaccacgatcaaatcctcaaggcgctgattcgcaaagatcctcatgctgctaagctggcaatgtggcagcatctggaaaacaccaagatcatgttatttaacgaaaccagcgacgacttcgagttcaatgccgaccgctatctattcgccgaaaacccggtggtgcatctcgatacagccaccagcggcagtaaatga

SEQ ID NO: 261967 - DNA, 1299 bp, Klebsiella pneumoniae
atgcgtaaaattaaagggttacgttggtatatgatcgcactggtgacgctcggcaccgtgcttggttacctgacgcgtaacactgtggcggcagctgcgccaactctgatggaagagttaaacatctccacccaacagtattcctatatcatcgcagcctattctgctgcttatacggtcatgcaaccggtagcaggttatgtactggatgtgctgggtacgaaaatcggttatgcaatgtttgctgtgctgtgggccgtgttctgtggtgcaaccgcgctggcaggtagctggggtggcctggctgttgctcgtggtgcggtcggtgccgcggaagcagcgatgatcccggcgggtctgaaagccagctccgaatggttcccggcgaaagagcgttccatcgcagtaggctactttaacgtaggttcttcgattggtgcgatgattgcgccgccgctggtggtatgggcaatcgtaatgcacagctggcagatggcatttatcatctccggtgcattgagctttatctgggcgatggcatggctgattttctataaacatccgcgcgaccagaagcatctgaccgatgaagaacgcgactatattattaatggtcaggaagcccagcaccaggtgagcacggcgaagaaaatgtccgttggtcagatcctgcgtaaccgtcagttctggggtatcgcgctgccgcgtttcctggcagaaccggcctggggtacttttaacgcgtggatcccgctgttcatgtttaaagtttacggctttaacctgaaagagatcgcgatgttcgcctggatgccgatgctgtttgctgacctcggttgtatcctcggtggttacctgccgccgctgttccagcgttggtttggtgtgaacctgatcgtttcccgtaagatggtcgtaacgctgggtgcagtgctgatgattggcccgggtatgatcggcctgttcaccaacccgtatgtcgcaattatgctgctgtgtatcggtggttttgcccaccaggcactgtctggcgcgctgattacgctctcttccgatgtgtttggtcgtaacgaagtggcaacggcaaacggtttaaccgggatgtccgcatggctggcaagtacgctgtttgcgctggttgtcggtgcactggctgacaccatcggcttcagcccgctgttcgcagttctggcagtgttcgacctgttaggtgcgctggttatctggaccgtgttgcagaacaaaccggcgattgaggtggcgcaggaaacacataacgatcccgcaccgcaacattaa

SEQ ID NO: 261968 - DNA, 1413 bp, Klebsiella pneumoniae
atgactccgtttatgactgaagatttcctgttagataccgaatttgcccgccgtctgtatcacgactacgcaaaagaccagccgattttcgattaccattgccatttgccgccgcagcagattgcggaagactatcgttttaaaaacctgtatgacatctggctgaaaggcgatcactacaaatggcgcgctatgcgtaccaacggtgtggccgagcgtctgtgtaccggtgatgcgtctgaccgtgaaaaatttgacgcctgggcggcgactgttccgcacactatcggcaacccgttataccactggacgcacctcgaactgcgccgtccgtttggtatcactggcaaattgctttctccgtcaactgccgatgaaatctggaacgaatgtaacgaactgctggcgcaggataacttctccgcgcgcggcatcatgcagcagatgaacgtgaaaatggtcggcaccaccgatgacccgatcgattctctggagcatcacgcagagatcgccaaagacggctctttcaccatcaaagtgctgccgagctggcgtccggacaaagccttcaacatcgaacaggcgacctttaacgactacatggcgaagctgggcgaagtttccgataccgacattcgccgctttgctgacctgcaaactgccctgaccaaacgtctggatcacttcgccgctcacggctgtaaagtgtctgaccacgcgctggatgtggtgatgtttgctgaagcgaacgaagcggaactggacagcattctggcgcgccgtctggctggcgaaaccctgagcgagcacgaagtggcgcagttcaaaactgcggtactggtgttccttggtgccgaatatgcacgtcgcggctgggtacagcagtaccacattggcgcgctgcgtaataacaacctgcgtcagttcaaactgctggggccggatgtaggctttgactccatcaacgaccgtccgatggcggaagagctgtctaagttgctgagcaagcagaatgaagaaaacctgctgccgaaaaccattctgtactgcctgaacccgcgcgataacgaagtgctgggcaccatgatcggtaacttccagggcgaaggtatgccgggcaaaatgcagttcggttccggctggtggtttaacgatcagaaagacggtatggaacgtcagatgacccaactggcgcagctcggtctgctgagccgctttgtcggtatgctgactgacagccgtagcttcctgtcatacacccgtcacgaatacttccgccgcattctgtgccagatgatcggtcgctgggtggaagcgggcgaagcaccggcggacatcaacctgctgggcgagatggtgaaaaatatttgctttaacaatgcgcgtgactacttcgccattgaactgaactaa

SEQ ID NO: 261969 - DNA, 1488 bp, Klebsiella pneumoniae
atgcaatacatcaagatccatgcgctggataacgtcgcggtcgctttagcagatttggctgaaggcacagaagtcagtgtcgataaccagactgttacgctgcgccaggatgttgctcgtggacataaatttgcgttaacggatatcgcaaaaggggccaatgtcatcaaatatggcctgccgattggttatgcattggcggatattgcggcaggtgttcacgttcacgcccacaatacgcgcacgaatctgagcgatctggatcagtatcgctatcaacctgattttcaggatctgcctgcgcaagcggcagatcgtgaagtgcagatctatcgtcgcgctaacggcgatgtcggggtgcgtaatgagctgtggatcctgccaaccgtgggctgtgtcaacggcatcgcgcggcagatccagaaccgttttctgaaagagaccaacaacgccgaaggtactgacggcgtgttcctcttcagccacacctacggctgctcacagctgggcgacgatcacattaatacccgcaccatgctgcaaaacatggtgcgccacccgaacgcaggcgcagtgctggtgattggtctgggctgtgaaaacaaccaggttgccgcattccgtgaaacgctgggcgatatcgatcctgaacgcgttcatttcatgatctgccaacagcaggatgatgagatcgaagccggaatcgagcatttgcatcagctgtataacgtgatgcgcaacgataaacgcgagccaggcaaactcagcgaactgaagtttggtctggagtgcggtggttctgacggtctttctggtattactgctaacccgatgctggggcgtttctctgactacgtgattgctaacggcggtactaccgtactgaccgaagtgccggagatgtttggcgcagagcagttgctgatggaccattgccgcgacgaagcaacgtttgaaaaactggtcaccatggtcaacgacttcaaacagtactttattgcccatgatcagccgatctatgaaaacccatcgccggggaacaaagcgggcggtatcaccacgctggaagacaaatcacttggctgtacccagaaagcgggttccagcgtcgtggttgacgtgctgcgttacggcgagcgtctgaaaacgccagggctgaacttgttaagtgcgccgggtaacgatgccgtagcgaccagcgccctggcgggtgcgggctgccatatggtgctgttcagtactggtcgtggcacgccgtatggtggatttgtgccgacggtgaaaatcgccaccaacagtgaactggcggcgaagaaaaaacactggatcgactttgacgcgggtcagttgatccacggtaaagcgatgccgcagttgctggaagaatttatcgacaccatcgttgagtttgccaacggtaagcaaacctgtaacgagcgtaacgacttccgcgaactggcgatcttcaaaagcggcgtaacgctataa

SEQ ID NO: 261970 - DNA, 552 bp, Klebsiella pneumoniae
atgaccgcgtattggctggcccagggcgtgggtgtcatcgcctttctgattggtatcacaacatttttcaatcgtgacgaacgtcgcttcaaaaagcagctttcggtctatagcgccgttattggcgtacatttttttcttctgggcacctatcccgctggtgccagtgccatccttaatgccattcgtacattgattaccttacgcacgcgcagcttatgggtaatggcgatttttattgtgctgactggcggaattggcctcgcgaagttccatcatcctgtcgaactattgccggttatcggcacgattgtcagtacctgggcgctattccgctgtaaagggctgaccatgcgctgcgtaatgtggttttcaacgtgttgctgggtgattcacaacttctgggcggggtcgataggcggcacgatgattgagggtagttttctgcttatgaatggcctgaatatcattcgtttctggcggatgcagaaaaggggaattgatccgtttaaagttgagaaaaccccttccgccgtagacgaaaggggttaa

SEQ ID NO: 261971 - DNA, 1245 bp, Klebsiella pneumoniae
atgactacgcaacgttcaccggggctattccggcgtctggctcatggcagcctggtaaaacaaatcctggtcggccttgttctggggattcttctggcatggatctcaaaacccgcggcggaagctgttggtctgttaggtactttgttcgtcggcgcactgaaagccgttgcccccatcctggtgttgatgctggtgatggcatctattgctaaccaccagcacgggcagaaaaccaatatccgccctattttgttcctctatctactgggcaccttctctgctgctctggccgcagtagtcttcagctttgccttcccttctaccctgcatttatccagtagcgcgggtgatatttcgccgccgtcaggcattgtcgaagtgatgcgcgggctggtaatgagcatggtttccaaccccatcgacgcgctgctgaaaggtaactacatcgggattctggtgtgggcgatcggcctcggcttcgcactgcgtcacggtaacgagaccaccaaaaacctggttaacgatatgtcgaatgccgttacctttatggtgaaactggtcattcgcttcgcaccgattggtatttttgggctggtttcttctaccctggcaaccaccggtttctccacactgtggggctacgcgcaactgctggtcgtgctggttggctgtatgttactggtggcgctggtggttaacccattgctggtgtggtggaaaattcgtcgtaacccgttcccgctggtgctgctgtgcctgcgcgaaagcggtgtgtatgccttcttcacccgcagctctgcagcgaacattccggtgaatatggcgctgtgtgaaaagctgaatctggatcgcgatacctattccgtttctattccgctgggagccaccatcaatatggcgggcgcagcaatcactattaccgtgttgacgctggctgcggttaatacgctgggtattccggtcgatctgcccacggcgctgctgttgagcgtggtggcttctctgtgtgcctgtggcgcatccggcgtggcgggggggtctctgctgctgatcccactggcctgtaatatgttcggtatttcgaacgatatcgccatgcaggtggttgccgtcggctttatcatcggcgtattgcaggactcttgcgaaaccgcgctgaactcttcaactgacgtgctgttcactgcggcagcttgccaggcagaagacgatcgtctggcaaatagcgccctgcgtaattaa

SEQ ID NO: 261972 - DNA, 834 bp, Klebsiella pneumoniae
atgatacaaatggattctcattatctgaacaatacgcagcacgtctatgacaaagggcgagttatgcaaactgagcaacagcgagccgtaacacggctttgtatccagtgtggattatttcttttgcaacatggtgcggaaagcgcgttggttgatgagctttcctcacgactgggtcgggcgttgggaatggacagcgtcgaaagttctatctcttcgaacgccatagtgctgacaaccattaaagatgggcaatgcctgacatcgacacgtaaaaatcaagatcgcggcattaatatgcatgtggtgactgaagtccagcacattgtgattctggcggagcaccatctgctggattacaaaggcgtagagaaacgatttagccaaattcagccattacgttacccaagatggctggtagccttaatggttggcctttcctgcgcctgtttctgtaaactcaataaaggtggctgggatggtgccgtcatcaccttctttgccagtacggccgcgatgtatatccgccagctgctggcacaacgtcatcttcatccacagatcaacttttgcctcaccgctttcgccgccaccaccatttccggattgcttttgcaacttcccactttcagcaatacccccaccattgcgatggccgccagcgttctgctgctggtgccgggctttccgttgataaatgccgtcgccgatatgtttaaaggccacatcaataccggactggcacgctgggcaatcgccagtctgctgacactggctacctgtgtcggcgtagtaatggcactgacgatttgggggctacgcggatgggtgtga

SEQ ID NO: 261973 - DNA, 474 bp, Klebsiella pneumoniae; identical to SEQ ID NO: 23453

SEQ ID NO: 261974 - DNA, 540 bp, Klebsiella pneumoniae; identical to SEQ ID NO: 2044

SEQ ID NO: 261975 - DNA, 495 bp, Klebsiella pneumoniae
atgatgaaaactattaaacatcttctgtgctgtgccattgccgccagcgcattaatttccaccggggtgcatgctgcgtcctggaaagatgcgctctccagcgccgccagcgaacttggcaaccaaaacaacacgacacaggaaggcggttggtcgctcgcgtcattaactaacttgcttagcagcgggaaccaggccttaagcgcagataacatgaacaacgtcgcaggcattctgcaatactgcgcgaagcaaaagctggcttcggtaaccgatgccgaaaacatcaagaatcaggtactggaaaaactgggcctgaacagtgaagagcaaaaagaagacaccaactatctggatggcattcagggtttgctgaaaaccaaagatggtcagcaactcaatctggataatattggaacgactccgctggcagaaaaggtgaaaaccaaagcctgcgatctggtgttaaagcaggggctgaacttcatttcctga

SEQ ID NO: 261976 - DNA, 2292 bp, Klebsiella pneumoniae
ttgtcagaactactctctttcgccctttttctcgcctctgtgctgatttacgcatggaaagcgggacgtaacacctggtggtttgcggccacattaacggtactggggctatttgtcgttttaaatatcaccctgtttgccagcgactattttactggcgatggtattaacgacgcggttctctataccttaaccaacagcctgaccggtgctggtgtcagcaaatacatcctgcctggtatcggcattgtgctggggctggcggcggtgttcggtgcgctgggctggatcctgcgccgtcgtcgccatcatccgcaccattttggttacagcctgctggcactcttactggcgctgggttcagtggatgccagcccggcatttcgtcagataacggaactggtgaaatcccagtcacgcgacggcgacccggactttgcggcttattataaagagccgtcgagaactatccctgacccgaaactcaacctggtttatatctacggcgaaagtctcgagcggacctattttgataacgaggctttcccggatctcacgcctgaactgggcgcgttgaaaaatgaaggcctggatttcagccacacgcagcagctgccgggaacggattacacgattgcgggcatggtagcttctcagtgcggcataccgctgtttgccccatttgaaggcaacgcctccgcctctgtctccagcttcttcccgcagaacatctgtctgggcgatattctgaaaaactcgggttatcagaactatttcgtgcagggcgcgaatctgcgttttgccggtaaagatgtgttcctgaaatcgcacggcttcgaccacttatacggctcagaagagctgaaaagtgtggtggccgacccgcactatcgcaacgactggggattctacgacgataccgttctcgatgaagcgtggaaaaaatttgaagagctttcccgctcaggtcagcgattctcactgtttaccctgacagtcgatacccatcacccggatggttttatctcgcgcacctgtaaccgcaaaaaatatgattttgacggtaagccgaatcagtcattcagcgcggtaagttgcagccaggagaatattgcgacgtttatcaacaaaatcaaagcgtcaccgtggtttaaagataccgtcatcgtcgtctcttctgaccatttagcgatgaacaatacggcgtggaaataccttaataagcaggatcgcaataacctgttttttgtcatccgtggcgacaagccgcagcaagagacgctggcagtgaagcgtaatacgatggataacggcgcgacggtgctggacattctcggtggcgataactatctcggacttggccgtagcagtttatccgggcagtcgatgtcggaaatcttcctcaatatcaaagagaaaacattggcgtggaagccggatatcatccgcctgtggaaattccctaaagagatgaaagagttcaccatcgaccagcagaaaaacatgattgccttctcaggtagccatttccgtttgccgctgctgttgcgggtttcagacaaacgcgtggaaccgctgccggaaagcgaatactcagcaccgctgcgtttccagctggccgatttcgctccacgcgacaatttcgtctgggttgaccgttgctacaagatggcacaactctgggctccggaactggcactctccaccgactggtgtgtctcgcaagggcagcttggcggtcagcaaattgtccagcatgttgacaaaacaacatggaagggcaaaacggcatttaaagatacggtcatcgacatggcgcgttacaaaggcaatgtcgatacgctgaagattgttgataacgatattcgctacaaagccgacagtttcatcttcaacgtcgccggtgcgccagaagaggtgaaacagtttagcgggatttcccgtccggagtcgtggggccgctggtccaacgctcagctgggcgatgaagtaaaaatcgagtacaagcatccgctgccgaagaaatttgacctggtgattaccgccaaagcatacggcaataacgccagccgtcctattccggtacgcgtaggcaatgaagaacaaacccttgtgctgggcaatgaagtgaccaccaccacactgcatttcgataacccaaccgatgcagacacactggtaattgtgccgccggaacctgtctcaaccaacgaagggaatatcctcggacactcgccgcgtaagctcgggatcggcatggtagaaattaaagtggtagaacgtgaaggataa

SEQ ID NO: 261977 - DNA, 1023 bp, Klebsiella pneumoniae
atgtctacgatgaatgttttaatttgccagcagccgaaagaattagtctggaaacaacgcgagatacctattccgggtgacaatgaagcattaataaaaattaagtcagtcggcatttgtggtaccgatattcatgcctggggtgggaatcaaccattttttagttatccacgcgttttaggccatgaaatatgtggggagattgttgggctgggtaaaaatattgcaaatcttaaaaatggacagcaagtagcggtgatcccttatgttgcctgtcagcaatgcccggcgtgtaaaagcgggcgtaccaattgctgtgaaaaaatttcagtcattggcgtgcatcaggatggcggttttagtgagtatttgagcgtgccggtggcgaacattttgcccgcagatggtattgacccgcaggcggcagcattgattgaacctttcgctattagcgctcatgcggtgcgtcgcgcagccattgctcccggcgagcaggtgctggtggtcggggcggggccaatcggtctgggcgcggcggcaatcgctaaagccgatggcgcacaggtggtggtggcggataccagtccggcgcgccgtgaacatgtggcaacgcgtctggaattacctgtactggacccgtcagccgaagattttgacgcgcagttgcgggcgcagtttggtggttcgctggcgcagaaagtgatcgacgcgacaggtaatcaacatgcgatgaataacaccgtgaatctgattcgtcacggcggcacggtggtatttgtcggtctgtttaaaggtgagttgcagttctccgatccggaattccataaaaaagaaacgacgatgatgggtagccgcaacgccacgccggaagatttcgctaaagtcggtcgactgatggcggaagggaaaatcactgccgacatgatgttaacccatcgctatccgttcgccacgctggcagaaacctacgagcgcgatgtgattaacaatcgtgagttgattaagggtgtaattactttctga

SEQ ID NO: 261978 - DNA, 915 bp, Klebsiella pneumoniae
atgagtcgttcacaaaatttacgccacaatgtgattaaccaggtcattgatgatatggcgcggggtcatatcccttccccacttccatcgcaaagtgcgctggcggaaatgtacaacatcagccgcactacagtgcgtcatattctcagccacttacgcgaatgcggcgtcttaacgcaggttggaaacgactatgttattgcgcgtaaacctgaccatgatgacggtttcgcctgtactaccgcttcaatgagtgaacaaaacaaagtgtttgagcaggcttttttcacgatgataaaccagcgccagttacgccctggggaaactttttctgaactgcaactggctcgggccgcgggtgtcagcccggttgtagtaagagaatatcttttaaaattcggccgttataatcttattcaaagcgaaaagcgcggccagtggagcatgaagcaattcgatcaatcctacgctgagcagctgtttgagctacgcgaaatgctcgaaactcattcacttcagcactttctcaacctgcctgatcatgatcctcgctggctgcaggcgaaaaccatgctcgaacgtcatcggctactgcgtgacaacatcggcaatagctttcgcatgttctcgcaacttgacagagattttcactccttactgctttcagctgccgacaatatcttttttgatcaatcgcttgagatcatctcagtcatctttcattttcactatcaatgggacgaaagcgatcttaaacagcgcaatatcattgccgtcgatgagcatatgaccattctcagcgctctgatttgccgcagtgaccttgatgccacccttgcgctccgtaaccatttgaattcagctaaacaatcaatgattcgatccattaatgagaacacgcgttatgctcattaa

SEQ ID NO: 261979 - DNA, 1665 bp, Klebsiella pneumoniae
atgttaaaacgtatcaaaattgtgaccagcttactgctggttttggccgtttttggccttttacaactgacttcaggcggtctgttctttaatgccttaaagaacgacaaagaaaatttcactgttttacaaaccattcgccagcagcaatccacgctgaatggcagctgggtcgcgttgttgcagacgcgtaacaccctcaaccgcgcgggtatccgctacatgatggatcagaacaatattggtagcggttcaaccgttgctgagctgatgcagagtgccagtatttcgctgaaacaggcggaaaaaaactgggcggattacgaagcgttgccgcgtgacccgcgtcagagcaccgccgcagcggcagagatcaaacgtaattacgatatttatcacaatgcgctggcggagctgatccaactgttaggtgcaggcaaaatcaacgagttctttgatcaaccgacccagggatatcaggacggtttcgagaagcagtatgtggcttacatggagcaaaacgatcggctctatgatatcgccgtcagcgataacaatgcctcctacagccaggcgatgtggattctggttggcgtgatgatcgtcgtactggcggtcatcttcgccgtctggttcggtattaaagcctcgttggtagcgccaatgaatcgcctgattgacagcattcgtcatattgcaggcggcgatctggtgaaaccgattgaggtggatggctctaatgagatggggcaactggcagagagtttgcgccatatgcagggagagctgatgcgtaccgtcggtgatgtgcgcaacggggccaatgccatctatagcggtgccagcgaaatcgctaccggcaataacgatctctcttcgcgcaccgagcaacaggccgcttcgctggaagagacggcagccagcatggagcaactgaccgcaacggtgaagcagaacgccgaaaatgcgcgccaggccagccacctggcgttaagtgcttctgaaacggcgcaacgcggcggcaaagtggtagataacgtggtgcagactatgcgcgatatctccaccagttcgcagaaaatcgccgatattatcagcgtaattgacggtattgccttccagaccaatattctggctttgaacgcggcggttgaagcagcgcgcgcgggtgagcaagggcgcggttttgcggtggtcgcgggtgaagtgcgtaatctggcccagcgcagcgctcaggcggctcgtgaaattaaaagcctgattgaagactcggtggggaaagtagatgttggctctacgctggtcgaaagcgcaggggaaacaatggcggagattgtcagtgccgtgacccgcgtgacggacattatgggcgaaattgcttctgcttctgatgagcagagccgtggtatcgatcaggttggcttagcggttgctgagatggaccgggtaactcaacagaacgccgcgctggtggaagaatctgccgccgccgctgccgcgctggaagagcaggccagtcgcctgaccgaagctgtggcagtgttccggattcagcaacagcagcaacagcagcgtgaaacatcggctgtggtaaaaaccgtgacgccagctgcgccgcgtaaaatggccgtggcagatagaggggagaactgggaaacgttttaa

SEQ ID NO: 261980 - DNA, 2151 bp, Klebsiella pneumoniae
atggatactaaaaagatattcaagcacataccttgggtgattctcggaatcatcggtgcattctgcctcgcggtagttgcattacgtcggggggagcacgtcagcgccctgtggatcgtggtcgcctctgtgtcggtgtatctggtggcttatcgctactacagtctgtacatcgcccagaaggtgatgaaactcgatcccacgcgcgcgacgcctgcggttattaacaacgacggtctgaactacgttccgaccaaccgttacgtgttgtttggtcaccacttcgccgctatcgccggtgctggtccgctggtgggtccggttctcgccgcgcagatgggctacctgcctggcacgctgtggctgctggcgggggtagtgctggccggtgcggttcaggactttatggtgctctttatctcctctcgccgtaatggcgcatctcttggtgagatgatcaaagaagagatggggccagtaccggggactatcgcgctgtttggctgtttcttaatcatgatcatcatcctcgccgtcctggcactgattgtggttaaagccctggccgaaagtccgtggggtgtcttcaccgtttgctcaaccgtaccgattgcgctgtttatgggtatctacatgcgctttattcgtccggggcgtgtgggtgaagtctctgtcattggtatcgtgctgctggttgcctctatctacttcggtggcgtgattgctcacgatccgtactggggtccggcactgacctttaaagacaccaccattaccttcgcgctgattggctatgcgtttgtttccgcactgctgccagtgtggctgatcctcgcaccgcgcgactatctggcaaccttcctgaaaatcggcgttatcgtcggcctggcgctgggtatcgtggtgctgaacccggaactgaaaatgcctgctatgacccagtacattgacggtactggcccgctgtggaaaggcgctctgttcccgttcctgttcatcaccatcgcctgtggtgcggtatctggcttccacgcgctgatctcttccggtacgacgccgaaactgctggctaacgaaaccgacgcgcgtttcatcggctacggcgcaatgctgatggagtccttcgtggcgattatggcgctggttgctgcgtccatcatcgaaccgggtctttacttcgcgatgaacaccccgcctgctggcctcggcatcaccatgcctaacctgcatgaaatgggtggcgagaacgcgccgatcatcatggcacagctgaaagacgttaccgcacacgcggcagcgaccgtcagctcctggggcttcgtgatttcgccagagcagatcctgcaaaccgcgaaagacattggtgagccttctgtcctgaaccgtgcaggtggtgcaccaacgctggcggtaggtatcgctcacgtgttccacaaagtgctgccgatggctgacatgggcttctggtatcacttcggtattctgttcgaagccctgttcatcctgaccgcgctggatgcgggtacccgttctggccgctttatgctgcaagacctgctgggtaacttcatcccgttcctgaaaaaaaccgactctctggttgctggtatcatcggtactgcgggctgtgtgggtctgtggggctacctgctgtatcagggcgtggtcgatccgctgggcggcgttaagagcctgtggccgctgttcggtatctccaaccagatgctggcagccgtagcgctggtactgggtaccgttgtactgattaagatgaagcgcacccaatacatctgggttaccgttatcccggcggtatggctgcttatctgcaccacctgggcgctgggcctgaaactgttcagtaccaacccgcagatggaaggcttcttctacatggcaagccagtacaaagagaagattgctaacggtactgacctgacggcgcagcagattgccaacatgaaccacatcgttgtgaacaactacaccaacgcaggcctgagtattctgttcctgattgtggtgtacagcatcatcttctacggtttcaaaacctggctgaaggtgcgtaacagcgacaaacgtactgacaaagaaacaccgtacgttccaatcccggaaggcggcgtgaagatctcttcgcaccactaa

SEQ ID NO: 261981 - DNA, 204 bp, Klebsiella pneumoniae
atgtttggtaacttaggacaggcaaaaaaatatctcggccaggcggcgaagatgttgattggcattccagactacgacaactacgtcgagcatatgaagaccaaccatcccgacaagccgtacatgagctatgaagaattcttccgcgaacgccagaacgcgcgctacggcggcgatggtaaaggcggtatacgctgttgttaa

SEQ ID NO: 261982 - DNA, 957 bp, Klebsiella pneumoniae
atgaacccgattgcagttaccctactcaccggttttttaggcgcaggaaaaaccaccctgctgcgccatattcttaacgaacaacacggctacaagattgccgtgattgaaaacgaattcggcgaagtctccgttgatgatcaactgattggcgatcgcgccacgcagatcaaaacgctgaccaacggctgcatctgctgttcgcgctccaacgagttggaagacgccctactcgacctgctggataatctcgacaagggcaatattcagttcgaccgtctggtcattgaatgcaccggcatggccgatcccggcccgattattcagacctttttctcccatgagattttatgccagcgttacctgctggacggcgtgattgcgctggtggatgcggtacatgccgatgagcagatgaaccagttcaccatcgcccagtcccaggttggctacgctgaccgtattctgctgactaaaaccgacgtcgcaggcgaagcagaaaaactgcgtgaacgtctggcacgcatcaacgcccgtgcaccggtctacaccgtcacccacggcgacatcgacctgggcctgctgttcaataccaacggttttatgctggaagaaaacgtcgtcagcaccaagccacgttttcactttatcgcggacaaacaaaacgatatttcgtcgattgtggtggaactggagtacccggtagatatcagcgaagtttcccgggtgatggaaaacctgctgctggaatcggcggataaactgctgcgttacaaagggatgctatggattgacggcgaacctaatcgcctgctgttccagggcgtccaacgcctctacagcgccgactgggaccgcccgtggggcgatgaaaaaccgcatagtacgatggtgtttatcgggattcagttgccggaggatgagattcgggcggcgtttgcggggttgaggaaataa

SEQ ID NO: 261983 - DNA, 303 bp, Klebsiella pneumoniae
atgagcatggttaaacataaacgagggacctcctctacactcgatgtgcagcatgaggccgaactgaaggtgctggcgaacaaattcgacgaggatattgattacagcgacatcccatcttccagcgatgagcaatggtctaacgcagaacgcggtaagttttatcggccattgaaaactcaggcttcggtgcgtattgatgctgatgtgatggaatggttgaagcgaccaggtaaaggctatcaaactcgcctgaacgcaattttacgtgaagcgatgctgcgcgatcagaacaaaaaataa

SEQ ID NO: 261984 - DNA, 1311 bp, Klebsiella pneumoniae; identical to SEQ ID NO: 9776

SEQ ID NO: 261985 - DNA, 339 bp, Klebsiella pneumoniae
atgactgacacgcattctattgcacaaccgttcgaagcagaagtctccccggcaaataaccgtcaattaaccgtgagttatgcgagtcgctacccggattacaaccgtattcccgccatcaccctgaaaggtcagtggctggaagccgccggttttgccaccggcacggcggtagatgtcaaagtgatggaaggctgtattgtcctcaccgcccaaccacccgccgccgaagagagcgaactgatgcagtcactgcgccaggtgtgcaagctgtcggcgcgtaaacaaaagcaggtgcaggattttattggggtgattagtagcaaaacgccacgctaa

SEQ ID NO: 261986 - DNA, 921 bp, Klebsiella pneumoniae
atgacaaactttacgaccagcacgccgcatgacgcattatttaaatcctttctcacacactctgacaccgcgcgggattttatggagatccacttacccaaagatttacgtgaactgtgcgatctcgatagcttaaaactggaatccgccagctttgtcgatgaaaaattgcgggcgctacattccgatattctgtggtcggtaaagacccgtgaaggcgatggctatatttatgtagtgattgaacatcagagccgtgaggatattcatatggcctttcgtctgatgcgatattccatggcggtgatgcagcgccatatcgaacatgataaacgccggcagctaccgctggtcatcccgatgctgttttatcacggtagccgtagtccttatccctggtctttgtgctggctggacgaatttgccgacccgactaccgcacggaagctttataccgccgcgttcccgctggtggatatcactgtcgtgccagacgacgagattgtgcagcatcgcagagtcgccctgttggagttgatccaaaagcatattcgccagcgcgatctgatggggcttattgaccaactggtagtattactggttacagagtgtgctaatgacagccagataactgcgctgttaaattacattttactgactggtgatgaagcgcgttttaatgagtttatcagtgaaattacccgtcgactgccacaacaaagggagcgaataatgacgattgcagagcgaattcataatgatggatatataaaaggggaacagcgcattcttcgattgtttttgcagaatggggcagatcctgaatggatacaaaagattaccggactttcggcagagcaaatgcaggcattagagcagcccttgcctgaccgtgagcacgattcatggctcgagagctaa

SEQ ID NO: 261987 - DNA, 1281 bp, Klebsiella pneumoniae; identical to SEQ ID NO: 9777

SEQ ID NO: 261988 - DNA, 1005 bp, Klebsiella pneumoniae
atgtccgggttttatcataagcatttcctgaaattactcgatttcacgccagctgaacttaacagcctgctgcagttagccgcgaagctgaaagccgataagaaaagcggtaaagaagaagccaaactcactggtaaaaacatcgcgctcatcttcgaaaaagactcgacccgtacccgatgctctttcgaagttgccgcatatgaccagggtgctcgcgttacttatctcggcccaagcggcagccaaattggtcataaagagtcgattaaagacactgcccgcgtgcttggtcgcatgtatgacggtattcagtatcgcggctatggtcaggagattgtcgaaacactggcggaatacgctggcgtgccggtatggaacggcctgaccaatgagtttcacccaacgcagctgctggcggatctcctcaccatgcgggagcatttgcccggcaaagcgttcaacgaaatgacgctggtctatgcaggtgacgcacgtaacaacatgggcaattcgatgctcgaagctgcagcgcttaccggtctggatttgcgtctggtcgcgccacaggcgtgctggccagaagctgcgctggttacggaatgccgcgccctggcacaacaaaatggcgggaatattacgctgacggaagatatagctaaaggagttgaaggtgctgactttatctataccgatgtatgggtgtcgatgggtgaagcaaaagaaaaatgggctgaacgcattgcattgctgcgtgattatcaggtgaacagcaagatgatgcagttgactggtaaccctgaggtcaaattcctccactgcctgcccgcgtttcatgacgaccaaacgacgcttggcaagaaaatggcggaagagtttggcctacatggcggaatggaagtgactgatgaggtcttcgaatctgccgccagcattgtatttgatcaggcggaaaaccgcatgcataccatcaaagcggtgatggtcgcgacgctcagtaaataa

SEQ ID NO: 261989 - DNA, 417 bp, Klebsiella pneumoniae
atggcaaacccggaacaactggaagaacagcgtgaagaaacacgtttgattattgaagaattactggaagatggcagcgatccggacgcgctgtacaccatcgaacaccatctttccgcagacgatctggaaactctggaaaaagcggcagttgaagcgtttaaactcggttacgaagtgaccgatccagaagagctggaagttgaagatggtgatatcgtgatttgctgcgacatcctcagcgagtgcgcgttgaatgccgatctgatcgatgcccaggttgaacaactgatgacgctggcggagaaatttgacgttgagtacgacggttggggcacttactttgaagatcctaacggcgaagatggcgacgatgaagattttgtcgatgaagacgatgacggggttcgccactaa

SEQ ID NO: 261990 - DNA, 504 bp, Klebsiella pneumoniae
atgaataacattgcgccgcaatcacctgtaatgcgtcgcctgacgctgcaggataatcctgctatcgcccgcgtcattcgtcaggtatccgccgaatacggtcttaccgctgataaaggctacaccgtcgccgatccgaatcttgacgagctgtatcaagtgtatagtcagcctggccatgcatattgggtggttgagtacgagggtgaagtggtcggcggcggtgggattgcgccattaaccgggagtgagtcggacatttgcgaactgcaaaagatgtattttcttccggctattcgcggtaaagggctagcgaaaaaactggccttaatggcgatggagcaggcacgagagatgggcttcaaacgctgctatctggaaacgaccgcttttttaaaggaagccattgcgctttatgagcatttgggctttgagcatatcgactatgcgcttggctgcacgggccatgtcgattgtgaagtgcggatgctacgcgaactctaa

SEQ ID NO: 261991 - DNA, 1197 bp, Klebsiella pneumoniae
atggctcaagttattaatgaaatggatgttccgtcccattcgtttgtttttcatggtacaggtgagagatattttcttatttgtgtggtgaatgtgttgttaacgattataacgctaggtatctatttaccatgggcattaatgaaatgtaagcgttatctttatgctaatatggaagttaacggacaacgattttcttatggaattaccggtgggaatgtttttgttagttgtcttgtttttgtttttttctatttcgcaatcttaatgacagtgtcagcagatatgccgcttgttggctgtgttttgactttgttactgttggttttgcttatatttatggcagcaaaaggactgcgtcatcaggccttaatgaccagtctcaacggcgtaagatttagttttaattgctctatgaaagggttctggtgggtgacctttttcttgccgattttaatggccattgggatggggactgttttctttatctcgacaaagatgctacatgccaatagttcaagtagtgttattatatctgtggttctgatggcaatagttggtattgtttccattggtatttttaatggtactttatatagtctggtaatgagttttctctggagtaataccagtttcggtatacatcgtttcaaggtgaaattagatactacatattgtataaaatatgccattctcgcatttttagctttattaccttttctcgctgttgctggttatattatcttcgatcaaatattaaatgagtatgatagttctgggtatgcaaatgatgatattgagaatttacagcaatttatggaaatgcaacgtaaaatgataatcgcgcagttaatttattattttgggattgctgttagcaccagttatttaacggtgtcgttgcgaaatcattttatgagcaacctgtcactgaatgatgggcgtattcgttttcgctcaactttaacgtaccacggtatgctttatcgcatgtgtgcgttggtggtgatatccgggattacgggtggtctggcttacccactgctgaaaatatggatgattgactggcaggcaaaaaatacgtatttgctgggcgatttggatgaccttcctttaatcaataaagaagaacaaccagataaaggcttcttagccagtatttcacggggagttatgccttctttaccatttctgtaa

SEQ ID NO: 261992 - DNA, 2856 bp, Klebsiella pneumoniae
atggaaaagacatataacccacaagatatcgaacagccgctttacgagcactgggaaaagcagggctactttaagcctaatggcgatgaaagccaggaaagtttctgcatcatgatcccgccgccgaacgtcaccggcagtttgcatatgggtcacgccttccagcaaaccatcatggataccatgatccgctatcagcgcatgcagggcaaaaacaccctgtggcaggtcggtactgaccacgccgggatcgctacccagatggtcgttgagcgcaagattgccgcagaagaaggtaaaacccgtcacgactacggccgcgaagctttcatcgacaaaatctgggaatggaaagcggagtccggcggcaccattacccgtcagatgcgccgtctcggcaactccgtcgactgggagcgtgaacgcttcaccatggacgaaggcctgtccaatgcggtgaaagaagttttcgttcgtctgtataaagaagacctgatttaccgtggcaagcgcctggtaaactgggacccgaaactgcgtaccgctatctctgacctggaagtggaaaatcgcgaatcgaaaggttcgatgtggcacatccgctatccgctggctgacggcgcgaaaaccgcagacggtaaagattatctggtggttgcgaccactcgcccggaaaccctactgggcgataccggcgtagccgttaacccggaagatccgcgttacaaagatttgattggcaaatatgtcattctgccgctggttaaccgtcgtattccgatcgttggcgacgaacacgccgacatggaaaaaggcaccggctgcgtgaaaatcaccccggcgcacgactttaacgactatgaagtcggtaaacgtcacgcgctgccgatgatcaacatcctgacctttgacggcgatatccgtgaaagcgcccaggtgttcgataccaaaggtaacgaatctgacgtttattccagcgaaatcccggcagagttccagaaactcgagcgttttgctgcacgtaaagcagtcgttgctgcggttgatgcactcggcctgctggaagaaattaaaccgcacgacctgaccgttccttacggcgaccgtggcggcgtggttatcgaaccgatgctgaccgaccagtggtacgtgcgtgccgatgtactggcgaaaccggcagttgaagcggttgagaacggcgacattcagttcgtaccgaagcagtacgaaaacatgtacttctcctggatgcgcgatattcaggactggtgtatctctcgtcagctgtggtggggtcaccgtatcccggcatggtatgacgaagcgggtaacgtttatgttggccgcaacgaagacgaagtgcgtaaagaaaataacctcggtgccgacgttgccctgcgtcaggacgaagacgttctcgacacctggttctcttctgcgctgtggaccttctctacccttggctggccggaaaacaccgacgccctgcgtcagttccacccaaccagcgtgatggtatctggtttcgacatcatcttcttctggattgcccgcatgatcatgatgaccatgcacttcatcaaagatgaaaatggcaaaccgcaggtgccgttccacaccgtttacatgaccggcctgattcgtgatgacgaaggccagaagatgtccaaatccaagggtaacgtgattgacccgctggatatggttgacggtatttcgctgccggaactgctggaaaaacgtaccggcaatatgatgcagccgcagctggcggacaaaatccgtaagcgcaccgagaaacagttcccgaacggcattgaaccgcacggcaccgatgccctgcgcttcaccctggcggcgctggcgtctaccggtcgtgacatcaactgggatatgaagcgcctggaaggttaccgtaacttctgtaacaagctgtggaacgccagccgctttgtgctgatgaacacagaaggtcaggattgcggcttcaacggcggcgaaatgacgctgtcgctggcggatcgctggattctggcggagttcaaccagaccatcaaagcgtaccgcgaagcgctggacagcttccgcttcgatatcgccgcaggcattctgtatgagttcacctggaaccagttctgtgactggtatctggagctgactaagccggtaatgaacggtggcaccgaggccgaactgcgcggtactcgccatacgctggtgaccgtgctggaaggtctgctgcgcctcgcgcatccgatcattccattcatcaccgaaaccatctggcagcgtgtgaaagtactttgcggtatcactgccgacaccatcatgctgcaaccgttcccgcagtacgatgcgtctcaggtggatgaagcggcactggccgacaccgagtggctgaaacaggcgatcgttgctgtacgtaacatccgtgcagaaatgaacatcgcgccgggcaaaccgctggagctgttgcttcgtggttgcagcgcggatgcagagcgtcgcgtaaatgaaaaccgtggcttcctgcaaaccctggcgcgtctggaaagcatcaccgtgctgcctgccgatgataaaggtccggtttccgttacgaagatcatcgacggtgcagagctgctgatcccgatggctggcctcatcaacaaagaagatgagctggcgcgtctggcgaaagaagtggcgaagattgaaggtgaaatcagccgtatcgagaacaaactggcgaacgaaggctttgtcgcccgtgcaccggaagcggtcatcgcgaaagagcgtgagaagctggaaggctatgcggaagcgaaagcgaagctgattgaacagcaggctgttatcgccgcgctgtaa

SEQ ID NO: 261993 - DNA, 483 bp, Klebsiella pneumoniae
atgcagcaatatttaaatccaccacaagaagccccatatatgaaaaacgcaacgttctaccttctggacaatgacaccaccgtcgatggcttaagcgccgttgagcaactggtgtgtgaaattgccgcagaacgttggcgcagcggtaagcgcgtgctcatcgcctgtgaagatgaaaagcaggcttaccggctggatgaagccctgtgggcgcgtccggcagaaagctttgttccgcataatttagcgggagaaggaccgcgcggcggtgcgccggtggagatcgcctggccgcaaaagcgtagcagcagcccgcgcgatatattgattagtctgcgaacaagctttgcagattttgccaccgctttcacagaagtggtagacttcgttccttatgaagattctctgaaacaactggcgcgcgaacgctataaagcctaccgcgtggctggtttcaacctgaatacggcaacctggaaataa

SEQ ID NO: 261994 - DNA, 1512 bp, Klebsiella pneumoniae
atggagtttagtgtaaaaagcggtagcccggagaaacagcggagtgcctgcatcgtcgtgggcgtcttcgaaccacgtcgcctttctccgattgcagaacagctcgataaaatcagcgatgggtacatcagcgccctgctacgtcggggcgaactggaaggaaaaccggggcagacactgttgctgcaccatgtgccaaacgtgctttctgaacgcatcctccttattggttgcggcaaagaacgtgagctggatgagcgtcagtacaagcaggttattcagaaaaccattaatacgctgaatgatactggctcgatggaagcggtctgctttctgactgaactgcacgttaaaggccgtaacaactactggaaagtgcgtcaggctgtcgagacagcaaaagagacgctctacagtttcgatcagttgaaaacgaataagagcgaaccgcgtcgcccgctgcgtaaaatggtgttcaacgtgccgacccgccgtgaactgaccagcggtgagcgcgcgatccagcacggtctggcgattgccgccgggataaaagcagcgaaagatctcggtaatatgccgccgaatatctgtaacgccgcttatctcgcctctcaggcgcgccagctggctgacagctacagcaagaatgtcatcacccgcgttatcggcgaacagcagatgaaagagctgggaatgcactcttatctggcggtcggtcagggttcacaaaacgaatcgctgatgtcggtgattgagtacaaaggcaacgcgtcggaagatgcacgcccaatcgtgctggtgggtaaaggtttaaccttcgactccggcggtatctcgatcaagccttcagaaggcatggatgagatgaagtacgatatgtgcggcgcggcggcggtttacggcgtgatgcgtatggtcgcggagctgcaactgccgattaacgttatcggcgtgctggcaggctgcgaaaacatgcctggcgggcgagcctatcgtccgggtgatgtgttaaccaccatgtccggtcaaaccgttgaagtactgaacactgacgccgaaggccgtctggtgctgtgcgacgtgttaacttacgttgagcgttttgagccggaagcggtgattgatgtggcgacgctgaccggtgcctgcgtgatcgcgctgggtcatcatattactggtctgatggcgaaccataatccgctggcccatgaactgattgccgcgtctgaacaatccggtgaccgcgcatggcgcttaccgctgggtgacgagtatcaggaacaactggagtccaattttgccgatatggcgaacattggcggtcgtcctggtggggcgattaccgcaggttgcttcctgtcacgctttacccgtaagtacaactgggcgcacctggatatcgccggtaccgcctggcgttctggtaaagcaaaaggcgcaaccggtcgcccggtggcgttgctggcacagttcctgttaaaccgcgctgggtttaacggcgaagagtaa

SEQ ID NO: 261995 - DNA, 1101 bp, Klebsiella pneumoniae
gtgataatcataagatatctggtgcgggagacgctcaaaagccagctggcgatactcttcatcttgcttttgatcttcttctgtcaaaagttagtgaggatcctcggcgcagcggttgacggcgatattccggcgaacctggtgctctcccttctcgggttgggcgtgccggaaatggcgcagcttatcctgccattaagcctgttcctcgggctgctgatgacgctgggcaaactgtataccgaaagtgaaattacggtaatgcatgcctgcggtctgagcaaagcggttctggtgaaagcagcaatgatccttgcggtgttcacggcaatcgtcgcggcggttaacgtgatgtgggcgggaccatggtcatcgcgtcatcaggatgaagtgttagcagaagcgaaagcgaaccctggcatggcggcgctggcgcaagggcaattccagcaagcgactaatggcagctcggtgctgttcatcgaaagcgttgacggcagcgatttcaaagatgtgttcctcgcgcaaattcgaccaaaaggtaatgcacgaccttctgtggtggtggccgattccggacatttaacccagctgcgcgacggctcccaggtcgtcactctcaaccagggaacgcgcttcgaaggcactgcactgttacgtgatttccgcattacggatttccaggattatcaggcgatcattggtcaccaggcggtggcgctcgacccgaacgataccgaccagatggacatgcgcacattgtggaacactgacaccgatcgtgctcgcgcagaactgaactggcgtatcacgttggtgttcaccgtgtttatgatggcacttatggtcgtaccgctgagcgtggttaacccgcgtcaggggcgcgtactatcgatgctgccagccatgctgctgtatctgttgttcttcctgatccagacctccctgaaatcgaacggcggtaaaggtaagctggacccgacgctgtggatgtggaccgttaacctgatttatctggctttggcgattgttctcaacctttgggacaccgtgccggtccgccgcctgcgcgccagtttttcgcgtaaaggagcggtgtga

SEQ ID NO: 261996 - DNA, 1083 bp, Klebsiella pneumoniae
atgcaaccttttggcgtacttgaccgctatatcggtaaaactattttcaccaccatcatgatgacgctgttcatgctggtgtcgctgtccggcattatcaagtttgtcgatcagctgaaaaaagccgggcaggggagttacgacgcgttaggcgcaggaatgtataccttgctgagcgtgccgaaagatgtgcaaatcttcttcccgatggcggctctgcttggggcgttgcttggtcttgggatgctggcgcagcgcagcgaactggtggtgatgcaggcttctggttttacccgtatgcaggtagcgctgtcggtgatgaaaaccgccattccactggtcttgctgacgatggcgattggtgaatggggcgcgccgcagggcgagcagatggcgcgtaactaccgtgcgcaggcgatgtacggcggctcgttgctctctacccagcaaggtttatgggcgaaagatggcaacaacttcgtctacattgagcgggttaaaggtgacgaagagttaggtggcatcagtatttatgcctttaacgagaatcgtcgtctgcaatccgtacgctatgccgctaccgcgaagtttgacccggaacataaagtctggcgtctgtcgcaggttgatgaatctgatttgaccaatccgaaacagatcaccggttcgcagacggtgagcggcacctggaaaaccaacctcacgccagacaaactgggcgtggtggcgctggacccggatgcactctctatcagcggtttgcacaactatgtgaagtatctgaagtcgagcggtcaggatgacggacgttatcagctcaacatgtggagcaaaatcttccagccgctatccgtggcggtgatgatgctgatggcgctgtcgttcatctttggcccactgcgtagcgtaccgatgggcgtgcgtgtggtcactggtattagcttcggttttgtcttctacgtactggaccagatcttcggcccgctgacgttggtttacggcatcccgccgatcatcggcgcactgttgccaagtgccagcttcttcttaatcagcctgtggctgttaatgagaaaatcgtaa

SEQ ID NO: 261997 - DNA, 1503 bp, Klebsiella pneumoniae
atgagcgaacccctgttaattgcccgcacgtcggacacagaactgtttttattgccgggaatggcgaatcgtcacgggctgattactggcgcaacggggacgggtaaaactgtcacgttgcaaaaactggcagagtcattgtcggaaatcggtgttccggtgtttatggccgatgtgaaaggtgatttaacgggagttgcggagggaggtacatcttcggaaaaactgctcgcaaggcttaaaaatatcggcgtaaatgactggcaacctcatgctaatccggtggtggtgtgggatatctttggcgagaaaggccacccggtgcgggcgacggtttcggatctggggccgctgttgctggcgcgactgttgaatctcaacgatgtgcaatctggcgtgctgaatattatctttcgtattgctgatgatcaggggctgttactgctcgactttaaagatctgcgggcgattacccagtacatcggcgataacgccaaatccttccagaatcagtacggaaatatcagtagcgcatcggttggtgccatccagcgcggattactgtcgctggagcaacaaggtgcggcgcatttctttggcgagccgatgctggatatcaaagactggatgcgcaccgatgctaacggtaaaggcgttatcaatatcctcagcgccgagaagctttatcagatgccgaaactgtacgccgccagcctgctgtggatgctttcagagttatatgaacaattgccggaagcgggcgatctggagaaaccaaaactggtgtttttcttcgacgaagcgcatctgctgtttaacgatgcaccgcaggtactgctggataagattgagcaggtgataaggcttattcgctcaaaaggcgtgggcgtctggttcgtttcgcaaaacccgtcagatatcccggataacgtgctcgggcagctcggtaatcgcgttcaacacgctttgcgtgcttttacgcctaaagatcagaaagcagtgaaggcagcggcgcaaaccatgcgggccaatccgacgtttgataccgaaaaggcaatccaggaactggggacgggcgaagcgttaatctcgtttctcgatgcgaaaggaagtccttctgtggtggaacgggcgatggtgattgcgccttgttcgcggatggggccggtgacggaagatgagcgcaatggcttgattaatcactccccggtgtatggcaagtatgaagatgacgtggaccgggaatccgcctatgagatgttgcaaaaaggctttcaggccagtatcgagcagcaaaataatactcccgcgaaaggaaaagaggtggcggtggatgacggtattctcggtggattgaaagatattttgttcggcactaccggaccacgcggcgggaagaaagatggtgtggtgcaaacaatggcaaaaagcgccgcccgccaggtgacgaatcagattgtgcgcgggatgttggggagtttgctgggggggagaagaaggtaa

SEQ ID NO: 261998 - DNA, 999 bp, Klebsiella pneumoniae
atgcgcaatcacagaatttctttacaggatatcgctacgctggctggcgtaacaaaaatgaccgtgagtcgttatatccgctcgccgaaaaaggtggcaaaggaaacaggcgagcgcatcgccaaaattatggaagagatcaattatatccctaatcgcgctcccggcatgttgttgaatgcacaaagttataccctcggtatcttgattccgtcatttcaaaatcaactcttcgctgacattctcgcgggaatagaatccgtcacctctgagcataattatcagacccttattgctaattacaattacgatcgcgattccgaagaagagtcggtgattaacctgctctcttataacattgacgggattatactttcggaaaaatatcacaccatcaggacggtgaaatttctgcgttcagccaccattccggtcgtggaattgatggatgtacagggagaacggctggatatggaggtcggttttgataatcggcaggccgcttttgacatggtgtgtaccatgctggagaagcgagtcaggcacaaaattctgtatctcggttccaaagatgacacccgcgatgaacagcgttatcaggggtattgcgatgcaatgatgctgcataatctttccccattacgcatgaatccacgcgccatctcatccattcatttaggaatgcagttaatgcgtgatgcccttagcgcaaacccggatttagacggtgtattttgcaccaatgacgatattgcgatgggtgcgcttctgctgtgccgcgagcgaaacctcgccgtgccagaacaaatttccattgcgggttttcatgggctggagattggcaggcaaatgatcccaagcctcgccagcgtaattactccccgttttgatattggtcggatggccgcccaaatgttgctgagcaaaattaagaataacgatcacaaccacaacactgttgacctcgggtatcagatttatcacggtaacacgctttag

SEQ ID NO: 261999 - DNA, 1320 bp, Klebsiella pneumoniae
atgccattaatcattattgcggcaggcgtcgcgctgcttcttatcctgatgatcggctttaaagttaacggctttattgccctcgttctggtcgctgccgtcgtcggatttgccgaagggatggatgcacaggccgtcctgcactctatacaaaatggtatcggcagcacgctcggcgggctggcaatgatcctcggtttcggggccatgttaggcaagctgatttctgatacgggcgcggcacaacgtatcgccactacgctgattgctacttttggtaaaaaacgcgtgcaatgggcgctagtgatcaccggtctggttgtgggcctcgccatgttttttgaagtgggttttgtcctgctgttgccgttggtatttaccatcgtagcatcatcaggattacccctgttgtatgttggcgtaccaatggtagcagcgctctctgtaacccactgttttctgccgccacatccagggcctactgccatcgcgactatctttgaggctaatctcggaacgactttactgtatggatttatcattaccattccgacagttattgtcgcaggaccgctgttttctaaactgctaactcgctttgagaaagcaccaccggaaggcttatttaatcctcatctgtttagcgaaaaggagatgccctccttctggaacagtattttcgctgccgtgatcccggtcatcctgatggctatcgccgccgtttgtgaaattacgttaccgaaaactaacaccgtgcgcctcttctttgaatttgtcggtaaccctgccgttgcgctgtttattgccattgttattgcgattttcacactgggccgacgtaatggacgcaccatcgagcaaatcatggatatcattggggattctataggcgctatcgcgatgattgtgtttattatcgctggcggcggcgcgtttaagcaggtattagtagatagcggtgtcgggcagtatatttcacacttaatgaccggaactacactttcgccgttattgatgtgctggactgttgcggcgctgttgcgtatcgctctgggctctgccaccgtcgcggccattaccaccgcgggtgtggtgttgccgattatcaacgttacccataccgatcccgctttaatggtactggcaaccggtgcgggcagcgtgatcgcgtcacacgtaaacgaccctggcttctggctatttaaagggtattttaatctgacggttggtgaaacgttgcgtacctggacggtgatggaaacccttatttctattatgggtttgctgggcgtgttagccattaacgccgtattgcactga

SEQ ID NO: 262000 - DNA, 1032 bp, Klebsiella pneumoniae
atgcaagtgaaaacacagtcctgcgttgttgcaggcaagaaaactgttgccgttaccgagcagacgatagattggaataataatggaacattagtacaaataacccgaggtggaatttgcggttccgatttacattattatcaggaaggaaaagtaggtaatttcatgataaaggcaccgatggtgttaggtcatgaagttatcggtaaagttattcatagcgactcatcagaattacatgaagggcaaacggtagccattaatccgtctaaaccgtgcggtcactgcaaatactgcattgaacataacgagaatcagtgtacagatatgcgtttttttggcagtgccatgtatttccctcatgttgatggtggttttacccgttataaaatggtcgaaacgtcgcaatgtgtcccttatccggccaaagctgacgaaaaggttatggcttttgccgaacctttagccgtcgcgattcatgccgcacatcaggccggcgagttacagggcaagcgagtatttatttctggtgttgggcccattggctgcctgattgtcagtgctgtgaaaacactgggggccgcggaaattgtctgtgccgatgtgagtccccgttccctttcgctgggcaaagagatgggggcggaggtgctcgtaaacccacaaaacgacgacatggatcactggaaagcggaaaaaggctatttcgatgtcagctttgaagtgtccggtcatccttcatcagtgaatacctgtctggaggtcactcgtgcacgcggcgtaatggtgcaggtaggtatgggaggcgcgatggcagaattcccaatgatgacattgattggtaaggagatttcactcaaaggctctttccgttttaccagcgaatttaataccgcagtgtcatggctggcgaatggcgttatcaatccactgcctttactgagtgctgaatatcccttcactgacctggaagaggcgctacgtttcgccggtgataaaacccaggcagcaaaagtccagcttgttttctaa

SEQ ID NO: 262001 - DNA, 564 bp, Klebsiella pneumoniae
atggcgggtgaaagctttattttgatgggcgtttcagggagtggtaaaacattaattggtagcaaggttgccgcgttattatctgctaaatttattgatggtgacgatcttcatccagccaaaaatatagataaaatgtcgcagggtattccattatctgatgaagatcgacttccctggctggaacgcttaaatgatgcttcatacagtctttataaaaagaatgaaacaggatttattgtctgttcatcattaaaaaaacagtatcgtgatattttacgcaagggtagcccccatgttcatttcctctggttagatggcgactatgaaactattctcgcgcgaatgcagcggcgggctgggcattttatgccggtagcgttactaaaaagtcagtttgaggcgctggagcgtccacaagcagatgaacaggatattgtgcgcattgatatcaaccatgatattgccaatgtcaccgaacaatgtcggcaggctgtgctggcgataagacaaaacagaatatgtgcgaaagagggcagcgcctcagatcagcgctgcgaatga

SEQ ID NO: 262002 - DNA, 1020 bp, Klebsiella pneumoniae
atgtcgatgataaaaagctatgccgcaaaagaagcgggtggcgaactggaagtttatgagtacgatcccggtgaactgaagccacaagatgttgaagtgcaggtggattactgcgggatctgtcattccgatctgtcaatgatcgataacgaatggggattttcacaatatccactggttgccgggcatgaggtgattggtcgcgtagtggcgctcgggagtgccgcgcaggataaaggtttgcaggtcggtcagcatgtcgggattggctggacggcacgcagctgcgggcattgcgatgcctgtattagcggtaatcagatcaactgcgagcaaggtgcggtgccgacgattatgaatcgcggtggctttgccgagaagttgcgtgcggactggcaatgggtgattccactgccagaaaatatcgacattgaatctgccggaccgctgttgtgcggcggtatcacggtctttaaaccgctgttgatgcaccatatcactgccaccagccgcgttggggtaattggtattggcgggctggggcatatagctataaaacttctgcacgcaatgggatgcgaggtgacagcctttagttctaatccggcgaaagagcaggaagtgctggcgatgggtgccgataaagtggtgaatagccgcgatccacaggcactgaaagcactggcggggcagtttgatctcattatcaacaccgtcaacgtcagcctagactggcagccctattttgaggcgctgacctatggcggtaatttccatacggtcggtgcggtcctcacgccgctgtctgttccggcctttacgttaattgcgggcgaccgcagcgtctctggttcagcaaccggtacaccttatgagttgcgtaagctgatgcgctttgccgcccgcagcaaggttgcgccgactaccgaactgttcccgatgtcgaaaattaacgacgccatccagcatgtgcgcgatggtaaagcgcgctaccgcgtggtgttgaaagcagatttttga

SEQ ID NO: 262003 - DNA, 546 bp, Klebsiella pneumoniae; identical to SEQ ID NO: 9925

SEQ ID NO: 262004 - DNA, 798 bp, Klebsiella pneumoniae
atgactgttaatatcggagatgaaaataaaacaacagcatataattcaattgaagataattactatcttactttacattcagagcaagtcaccgcctcttcagaatcaagtggggggacagcctctccatcagcacaaggaaagctaactttatttgatccattaacaaataatatattaaacaatgacattgaggcaactttacaactaatttatcgagttaaaaatagagacacaggaactatagttgcagacagacgtccttttattgactccagaggatatctgtcttcatcagtatccccatggtcagaggaccagggcaattatgagacaattgcagaatgtacgttagatcttggtaaatatacacattatgttggcgaattccaggtgtctggaacaataaaacactttgtaagatatactgggcaaaatcaatcaggtttatctacgaaagatatttcatgccaagttgaaggtaccatctcatttaatcagccagcatcaatcactttgtcaaaaaatattattaatgttcaatgcatacgaggaggaaactgtgttacagaacctattcagcatataatatctggcacaggagctttaagcttaattattgatggagatggccctcttgttattcaatcaaacggcaattcatttcaagttacacctgggcaacgtatcgaactaggaatggcacagtcaggaactattacatacataattcaagaaaagccaagtttaactttaccacaacaatatcgaatagtatatcaactagagtcaatatga

SEQ ID NO: 262005 - DNA, 390 bp, Klebsiella pneumoniae
atgcacagtctggtcatcggacagatcaggacggatgagaaatccaatgagattacagctatcccagaacttcttaacatgctggatattaaaggaaaaatcatcacaactgatgcgatgggttgccagaaagatattgcagagaagatacaaaaacagggcggtgattatgtattcgctgtaaaaggaaatcagggacgactaaataaagcctttgaggaaaaattcccactgaaagaattaaataatccagagcatgacagttacgcaatgagtgaaaagagtcacggcagagaagaaatccgtcttcatattgtttgcgatgtccctgatgaacttattgatttcacgtttgaatggaaagggcagccatggacagaaactacctga

SEQ ID NO: 262006 - DNA, 510 bp, Klebsiella pneumoniae
atgaatcagcaacgatttgatgacagcaccctaatccgtatcttcgcccttcatgagttacatcgactgaaagaacatggcttaacgcgcggggcactcaacgattatcacagccgctataaactcgtctttctggcccattcccagccggagtaccgcaaacttggcccgtttgtggctgatattcaccagtggcaaaatctggatgactattacaaccagtaccgccaacgcgtaattgttttgctttctcaccctgccaaccggcgtgatcatactaacgttttgatgcacgttcagggatattttcgcccacatattgattccacagaacgccagcagctggcggcgcttatcgacagttatcgccgtggcgagcaaccgcttcttgcgccgctgatgcgtatcaaacactatatggcgttttatcctgacgcctggctttcagagcagcgttatttcgaactttggccgcgtgtgattaacttgcgccatgcaggagttttatga

SEQ ID NO: 262007 - DNA, 1419 bp, Klebsiella pneumoniae
atgactacccatctggtctggtttcgccaggatttacgtcagcacgataatctcgcgctggctgccgcctgccgcaattcgtctgcacgcgtgctggcgttgtatatcgctacaccacgccagtgggcggcgcataatatgtcgccgcgtcaggctgaatttatcaatgcacaactgaacgggctacgaatagcgctggcggaaaaaggcattcctttattgttccgcgaagtggatgactttgccgccagtgtcgaaatagttaaacaggtgtgcgcggaaaacagcgttactcatcttttttataactatcagtatgaagtgaatgagcgggcgcgggatgtgcaggttgagagaacgctgcgtaacgtggtgtgtgaaggatttgacgacagcgtgatcctgccgccgggggcggtgatgactggcaatcatgagatgtacaaagtctttacgccatttaaaaacgcctggctgaaacggttgcgagaaggggtgccggagtgcgtcgctgcgccaaaagtacgtagtagtggatcgatagatcccgcgctatcaattacgctgaattaccctcgtcagtctttcgatactgcgcatttcccggtggaagaaaaagcggcgattgcgcaattacgccagttttgccagaacggtgccggagagtatgagcaacaacgagattttccggcagtggaaggcaccagtcgtttgtccgccagtctggcaacgggcgggttatcgcctcgccagtgtttgcatcgcctgttggcggaacagccgcaggcgctggacggtggggccggtagtgtctggcttaatgagctgatctggcgcgagttctaccgtcatctgatgacgtattacccttcgttgtgtaaacatcgtccatttattgcctggacggatcgtgtacagtggcaaagcaatcccacttatttaaaggcctggcaggaaggtaaaaccggatacccgattgtcgatgccgccatgcgtcagcttaacagcactggctggatgcataaccggctacggatgattacagccagttttttggtgaaagatttattgatcgactggcgcgaaggtgagcgatatttcatgtcgcagctgattgatggtgatttggcagccaataacggtggctggcagtgggccgcttcaaccggaaccgatgcagcgccgtattttcgtatttttaacccgacaacccagggcgaggaatttgaccgcgaaggcgagtttatccgccagtggctaccggaactgcgcgatgtgccagggaaagtggtgcatgagccgtggaagtgggcgcagaaagcaggtgtgacgctggattatccgcaaccgatagttgatcacaaagaggcaaggctgcgaacgctggcagcgtacgaagaagcgaggaaaggagcctga

SEQ ID NO: 262008 - DNA, 1482 bp, Klebsiella pneumoniae; identical to SEQ ID NO: 9719

SEQ ID NO: 262009 - DNA, 744 bp, Klebsiella pneumoniae
atgaaaaacaccgaactggaacaactgattaacgaaaaactgaacagcgcggcgattagtgattacgcgccgaatggtttgcaggtggaaggcaaagagacggtgcaaaaaattgttaccggtgtcactgccagccaggctttgctcgatgaggcagtgcgtctgggcgcggatgcggtcattgtgcatcatggctacttctggaaaggcgaatctccggtcattcgcggcatgaagcgtaaccgtttaaaaacgttgctggcaaatgatatcaacctgtatggctggcatttgccgcttgacgcacatcctgagctgggcaataacgcacagctggcggcgttactggggatctcggtcatgggcgaaattgagccgttggtgccgtggggcgaactgaccatgcctgtgccgggactggaactagcctcctggattgaagcgcgtctgggacgtaagccgttatggtgtggcgataccggacctgaggtggtccagcgcgttgcctggtgcacgggcggcgggcaaagttttatcgatagcgccgcgcgttttggcgtggatgcttttattactggcgaagtttctgaacagaccattcattcagcccgcgagcagggattgcatttttatgctgcgggtcaccatgccactgaacgtggtggtattcgcgcgttgagcgagtggctgaatgaaaataccgatcttgatgtgacctttattgatattcctaatcctgcataa

SEQ ID NO: 262010 - DNA, 657 bp, Klebsiella pneumoniae
gtgcaacgagcgcgttgttatctgataggtgaaacggcggtagtgctggaactggaaccgccggtgacgctggctagccagaaacggatctggcgactggcacagcgtctggtggatatgccgaatgtggttgaagccattcccggcatgaacaatatcacggtgattttacgtaatcctgagtcgctggcgctggatgccatagagcgtttgcaacgctggtgggaggagagtgaggcgctggagccggagtctcgttttattgaaattccggttgtttacggtggcgcaggcggaccggatttggcggtggtcgcggcgcattgtgggttgagcgaaaaacaggttgttgaattgcactcctccgtggaatacgtggtctggtttttaggttttcaaccgggcttcccgtatctcgggagtttgccggaacaactacacacgccacgtcgcgctgaaccgcgcttgctcgttccggcaggttctgtcgggatcggcgggccgcagactggtgtttatccgctggcaacgccgggtggctggcagttgattggtcatacctcactcagcctgtttgatccggcgcgtgacgaacccatcttattacgtccgggagacagcgtgcgctttgtaccgcagaaggagggagtatgctga

SEQ ID NO: 262011 - DNA, 933 bp, Klebsiella pneumoniae
atgctgaagattattcgtgcgggcatgtataccactgtgcaggatggcggtcgtcacggttttcgccagtcgggtatcagccactgcggcgcactggatatgcctgcgttacgcattgctaacctgctggtgggtaatgacgccaatgcccccgcgctggagatcacgctcggtcagttaacggtagagttcgaaactgatgggtggtttgccctgacgggggcaggttgcgaagcgcggctggatgataatgccgtctggactggctggcgattgccgatgaaagcaggccagcgtttaacgcttaaacgcccgcagcacgggatgcgcagttatctggcggtcgcgggtggtattgatgttccgccggtaatggggtcatgcagcaccgatctcaaagtggggattggcgggctggaaggccgtttactgaaggatggtgaccgactcccgattggcaaagcgaagcgtgattttatggaagcgcagggcgttaaacagctgctgtggggcaaccgcattcgcgccttgccggggccggaatatcatgagttcgatcgcgcctcgcaggatgcattctggcgttcgccctggcagcttagctcgcaaagtaaccgaatgggctatcgcttacaggggcaaattttaaaacgcaccaccgatcgcgaactgttatctcacggtttgttgccgggtgtggtgcaagtgccgcataacggccagccgattgtattgatgaacgacgcacagaccaccggtggttatccgcgtattgcctgtatcattgaggctgatatgtaccatctggcgcaaattccgctcggtcagccgattcattttgtccagtgttcactggaagaggcactgaaagcgcggcaagatcaacaacgttatttcgaacaattagcgtggcggctgcacaatgaaaattga

SEQ ID NO: 262012 - DNA, 735 bp, Klebsiella pneumoniae
atgaaaattgacctgaacgccgatctgggcgaaggctgcgccagcgacgcagagctattaacgctggtttcctctgccaatattgcttgtggatttcatgcaggcgatgcgcaaaccatgcaggcttgcgtgcgtgaagcaataaaaaatggtgttgcgattggcgctcatccgagttttcccgacagggaaaattttggtcgcagagccatgcagctgccgccagaaaccgtttacgcccagacgctgtatcaaattggcgcgctggcagcgattacccgtgcgcaaggcggcgtaatgtgtcatgtcaaaccgcacggcatgttatacaaccaggcggcgaaagaggcacaactggcagacgccatcgccagagcggtatacgcttgcgatccggcattgattctcgtcgggctggcaggaagcgagctgattcgtgcaggcaagcaatatggcctgacaacgcgcgaggaagtgtttgccgatcgcggttatcaggcagacggttcgctggtgccgcgaagccagccaggcgcgttgattgaaaacgaagaacaggcgctggagcaaacgttggagatggtgcaacacggcagagtcaaaagcatcaccggcgaatgggcaacggtcacggcgcaaacggtctgcctgcatggcgatggcgagcacgcactggcgttcgcccgccgactacgctctacatttgccgaaaaggggattgttgtcgcagcataa

SEQ ID NO: 262013 - DNA, 792 bp, Klebsiella pneumoniae
atgcctgaaggcccggagatccgccgtgcagcggataacctggaggcggcgatcaaaggcaaaccactaactgatgtctggtttgccttcccgcagttaaaatcttatcaatcacgacttatcggtcaacacgttacccatgtggaaacgcgtggtaaggcgttgttaactcatttttccaacgacttaacgctctacagccataatcagctttacggcgtctggcgcgtggttgaaaccggcgaagagccgcagaccacgcgagtattgcgggtaaaactgcaaacggctgacaaaaccattctgctttatagcgcctcggatattgagatgttgaccccggaacaactgaccacgcatccgtttttacaacgcgttggtcccgatgtgctggatccgaatctgacgccggaggtggtaaaggaacggttattgtcgccgcgctttcgtaaccgtcagtttgctggattactactcgatcaggcgtttctggctgggcttggcaattatttgcgggtggagatcctctggcaggttgggttaaccggcaatcataaagcgaaagatctcagtgcggcgcgactagatgcactcgcacacgcgttactggatattcctcgactttcttacgctacgcgggggcaggtggatgagaataaacatcatggggcgttgtttcgctttaaggtttttcatcgtgatggcgaaccgtgtgaacgctgtggcagcatcattgagaaaaccacgctgtcatctcgcccgttttactggtgcccaggctgtcagcactag

SEQ ID NO: 262014 - DNA, 1047 bp, Klebsiella pneumoniae
atgccaattttgcagtggggaatgttatgtgtgctctcacttctcctttctattggtttcctcgcggtacatctcccggcggcgctattacttggaccgatgatcgccgggatcatctttagtatgcgcggaattactttacaactcccccgctccgcttttctcgccgcgcaggccattcttggctgtatgattgcgcaaaacctcactggttcgattctcaccacgctggccgtcaactggccgatcgtgcttacaattttactggtgacgctgctttccagcgccattgttgggtggctactggtgcgctatagctcattaccaggaaatactggtgcctggggttcttctcctggcggcgcggcggcaatggtcgctatggcgcaagattacggcgcagatattcgcctggtggcgtttatgcaatatctgcgagtgctgttcgtcgcaggggccgctgttctggtcacccgcatgatgctgggcgataacgctgaagcggttaaccagcagatcgtctggtttccgccagtgagcattaatctcctgcttacgattttgctcgcggtcgttgctggtacggcgggatgcttgctacgtcttccttccggcacgatgctcatcccgatgctggcgggcgcagtgctccagtctggtcagctcatcaccatcgaactaccagaatggctgctggcgatggcgtatatggcaattggttggcggattggtcttggtttcgataaacaaatattactgcgggcattgcgcccactgccacaaatcctgctgtcgatttttgctctgctggctatttgtgcaggtatggcgtggggactgacccggtttatgcatattgattttatgactgcctacctcgccaccagccccggcgggcttgataccgtggcggtcatcgccgcagggagcaatgccgatatggcgcttattatggcgatgcaaaccctgcgcctgttcagtattttgctgacgggacctgccattgcgcggtttatttcaacctatgcgccgaaacgtacggcctag

SEQ ID NO: 262015 - DNA, 1062 bp, Klebsiella pneumoniae
atgagtgctggcaagggagtgttgctcgtcatctgtctggtatttctgccgttgaagtctgcgcttgccctgaactgctactttggttcatccggtggttcggtagaaaaatcagaagtgattcaaccttttgctgtgccaggtaatgccaaacccggcgataagatctgggaatctgacgatattaaaattcccgtctattgtgacaacaataccaacggcaactttgaaagcgaacatgtctacgcatgggtaaacccctacccgggggtacaggatcgttattatcaactcggcgtgacatacaatggtgtcgattacgatgccagtctggggaaaagccgcatcgacaccaaccagtgtatcgacagtaagaatattaacatttatacccctgagcagattatcgcgatgggctggcagaacaaaatatgctcgggtgaccccgctaatattcacatgtcgcgaacctttctcgctcgtatgcggttatacgttaagattcgcgaaatgccgccgcatgattatcaaagtacgcttagcgactacatcgtcgtgcaatttgatggtgccggtagcgttaacgaagaccctaccgcccaaaacctgaaataccatattactggtctggaaaacattcgtgtactggattgcagcgtcaatttttctatttcaccagaaacacaggtgattgattttggtaaatttaacctgctggatattcgccgccacacaatgtcgaaaacattcagtattaagacgacaaaatcacaaaatgaccagtgcaccgacggatttaaggtcagctcctccttttataccgaagaaacgttggttgaagaagataaagcattgttgattggtaatggtctgaagctacgtttgctggatgaaaacgcctcgccttataccttcaataaatatgctgaatacgccgatttcaccagcgatatgctgatctacgaaaaaacctatacggctgaactttcgtccattccaggtacccccatcgaggctggccccttcgatacagtggtgctttttaagattaactataactga

SEQ ID NO: 262016 - DNA, 732 bp, Klebsiella pneumoniae; identical to SEQ ID NO: 9720

SEQ ID NO: 262017 - DNA, 2412 bp, Klebsiella pneumoniae; identical to SEQ ID NO: 9721

SEQ ID NO: 262018 - DNA, 567 bp, Klebsiella pneumoniae; identical to SEQ ID NO: 9722

SEQ ID NO: 262019 - DNA, 348 bp, Klebsiella pneumoniae
atggtaagcaacgcctccgcattaggacgcaatggcgtacatgattttatcctcgttcgcgctaccgctatcgtcctgacgctctacatcatttatatggtcggttttttcgctaccagtggcgagctgacatatgaagtctggatcggtttcttcgcctctgcgttcaccaaagtgttcaccctgctggcgctgttttctatcttgatccatgcctggatcggcatgtggcaggtgttgaccgactacgttaaaccgctggctttgcgcctgatgctgcaactggtgattgtcgttgcactggtggtttacgtgatttatggattcgttgtggtgtggggtgtgtga

SEQ ID NO: 262020 - DNA, 1767 bp, Klebsiella pneumoniae
atgaaattgccagtcagagaatttgatgcagttgtgattggtgccggtggcgcaggtatgcgcgcggcgctgcaaatttcccagagcggtcagacctgtgcgctgctctctaaagtcttcccgacccgttcccataccgtttctgcgcaaggcggcattaccgttgcgctgggtaatacccatgaagataactgggaatggcatatgtacgacaccgtaaaaggttcggactatatcggtgaccaggacgcgattgaatatatgtgtaaaaccgggccggaagcgattctggagctcgaacacatgggcctgccgttctcgcgccttgatgatggtcgtatctatcaacgtccgtttggcggccagtcgaaaaacttcggcggcgagcaggcggcacgcactgcggcggcagctgaccgtaccggtcacgcactgttgcacaccctttatcagcagaacctgaaaaaccacaccactattttctccgaatggtatgcgctggatctggtgaaaaacgccgatggcgcggtggtcggttgtaccgcactgtgcatcgaaactggtgaagtggtttatttcaaagcccgcgctaccgtgctggcgactggcggggcagggcgtatttatcagtccaccaccaacgcccacattaacactggcgacggcgtcggcatggctatccgtgcaggcgtaccagtacaggatatggaaatgtggcagttccacccgaccggcattgcaggagcgggcgtactggtcaccgaaggttgccgtggtgaaggcggttatctgctgaacaaacatggcgaacgctttatggagcgttatgcgccgaacgccaaagacctggcgggccgtgacgtggtggcgcgttccatcatgatcgaaatccgtgaaggtcgcggctgtgatggtccgtgggggccacacgcaaaactgaaacttgaccacctgggtaaagaagttctcgaatcccgtctgccgggtatcctggaactctcccgtaccttcgctcacgttgatccggtgaaagagccgattccggttatcccaacctgtcactacatgatgggcggtattccgaccaaagtgaccggtcaggcgctgactgtgaacgagaaaggcgaagatgtggttgttccggggctgtttgccgttggtgaaatcgcttgtgtatcggtacacggcgctaaccgtctgggcggcaactcgctgctggacctggtggtctttggtcgtgcggcaggtctgcatctgcaagagtctatcgccgagcagggcgcactgcgcgatgccagcgagtctgatgttgaagcgtctctggatcgtctgaaccgctggaacaataatcgtaacggtgaagatccggtggcgattcgtaaagcgctgcaagaatgtatgcagcataacttctcggtcttccgtgaaggtgatgcgatggcgaaagggcttgagcagttgaaagtgatccgcgagcgtctgaaaaatgcccgtctggatgacacttccagcgagttcaacacccagcgcgttgagtgcctggaactggataacctgatggaaacggcgtatgcaacggctgtttctgccaacttccgtaccgaaagccgtggcgcgcatagccgcttcgacttcccggatcgtgatgatgaaaactggctgtgccactccctgtatctgccagagtcggaatccatgacgcgccgaagcgtcaacatggaaccgaaactgcgcccggcattcccgccgaagattcgtacttactaa

SEQ ID NO: 262021 - DNA, 1218 bp, Klebsiella pneumoniae; identical to SEQ ID NO: 9723

SEQ ID NO: 262022 - DNA, 1167 bp, Klebsiella pneumoniae
atgaacttacatgaatatcaggcaaaacaactttttgcccgctatggcttaccagcaccggtgggttatgcctgtactactccgcgcgaagcagaagaagccgcttcaaaaatcggtgccggtccgtgggtagtgaaatgtcaggttcacgctggtggccgcggtaaagcgggcggtgtgaaagtggtaaacagcaaagaagacatccgtgcttttgcagaaaactggctgggcaagcgtctggtaacgtatcaaacagatgccaatggccaaccggttaaccagattctggttgaagcagcgaccgatatcgctaaagagctgtatctcggtgccgttgttgaccgtagttcccgtcgtgtggtctttatggcctccaccgaaggcggcgtggaaatcgaaaaagtggcggaagaaactccgcacctgatccataaagttgcgcttgatccgctgactggcccgatgccgtatcagggacgcgagctggcgttcaaactgggtctggaaggtaaactggttcagcagttcaccaaaatcttcatgggcctggcgaccattttcctggagcgcgacctggcgctgatcgaaatcaacccgctggtcatcactaaacagggcgatctgatttgcctcgacggcaaactgggtgctgacggcaacgcactgttccgccagcctgatctgcgcgaaatgcgtgaccagtcacaggaagatccgcgtgaagcacaggctgcacagtgggaactgaactacgttgcgctggacggtaacatcggttgtatggttaacggcgcaggtctggcgatgggtacgatggacatcgttaaactgcacggcggcgaaccggctaacttcctggacgttggcggcggcgcaaccaaagaacgtgtaaccgaagcattcaaaatcatcctctctgacgacaaagtgaaagccgttctggttaacatcttcggcggtatcgttcgttgcgacctgatcgctgacggtatcatcggcgcggtagcggaagtgggtgttagcgtaccggtcgtggtacgtctggaaggtaacaacgccgaactcggcgctaagaaactggctgacagcggcctgaatattattgcagcaaaaggtctgacggatgcagctcagcaggttgttgccgcagtggaggggaaataa

SEQ ID NO: 262023 - DNA, 324 bp, Klebsiella pneumoniae
atgtcggcaccgattacgggacaaacgatcacgtttgaacaaatcagcgaaacattgcgcacacagtatagcgatgcggaaaaaagactgcaggacagcaacaaaacgcaagttgatcccatgcggcttaataaaaacccgaaatcccttgataatgatattcgcgctcgtcttgaaaacaaaccgatgcttgctccgcctgcaatgcaggtttcagattccgacaacgccactacagcaaagacgaacgatgcccgcctgacaatgattttgggtaatctaacaggcattgccgatcaggatctgtctcttatacacatctga

SEQ ID NO: 262024 - DNA, 183 bp, Klebsiella pneumoniae
atgaacataaacggaaaaaacgcttcttttacgcctgaagagttaatcaggaaatatcatgaggaagccccggttgatttaaaaaataaccatggcgataaaataaatgagaagaataacaataaacacattacttactttcccgttgatgccattttagatgggaataaacatctgccatga

SEQ ID NO: 262025 - DNA, 498 bp, Klebsiella pneumoniae
atggaaagcgcaaatctggatttagaagaaaataaagaaattgccagtaagttcgaacgtgcattaggtatgggagcaacacttgcagagctgcatggcattactccggatacccttgaaggcgtttatgcttacgcttataacttttatgaaaaaggaagacttgacgaagctgagctcttttttaaatttctctgtatttatgatttccaaaattataactatttaaaaggatatgccgccgtttgtcagttgaagaaagattatcaaaaggcattcgacatgtatcatatctgtttaatgctatctcccgataacgatttctctttggtttattatatgggccaatgccagatgggcttaaaaaacattaaaatggccactgagttatttaatacagtcgtaacctacagccaaaatgaaaaagttaaagagatggctactgcttatcttgaactcttgacagccaataccgaagaggaagttcaaacagagtga

SEQ ID NO: 262026 - DNA, 294 bp, Klebsiella pneumoniae
atgaagccaacgatgctactcatgattaccgtattcctgactttcccagccatttctcaggccgaatcgccattcagttctctacagtcggcaaaagaaaagaccacggtattgcaagatttacgtaaaatttgcacgccacaggcgtcattatcagacgaagcgtgggaaaaattaatgttgtctgatgagagtaacaaacaacatatccgcgaagctattgtggcgatggagcgtaataatcagaataactactgggaagcgctgggtaaggtggaatgcccggatatgtga

SEQ ID NO: 262027 - DNA, 819 bp, Klebsiella pneumoniae
gtgaaactgacaacacatcatctacgggcgggggccgcattattactggcaggaattctgctggcaggttgcgaccagagcagcagcgatgaaaagcacattaaagtgggcgttattaatggcgcagaacaagatgtcgcggaagtcgctaaaaaggtggcaaaagagaaatatggcctcgatgttgaattggtaggatttagcggttcgttgctaccgaacgatgcgacaaatcatggcgagcttgatgcgaacgtcttccagcatcgaccctttcttgaacaagataatcaggcgcatggttataaactggtagcggtgggaaatacgtttgtcttccccatggcgggttattccaaaaaaatcaaaaccgtggcgcaaataaaagaaggcgcgacagtggcgatccccaacgacccgaccaaccttggtcgcgcgcttttactgttgcaaaaagagaagctaattactctgaaagagggaaaagggttactacctaccgcgctggatataaccgagaatcctcgtcatttgcagattatggaactcgagggggcgcagctcccgcgcgtactggatgatcccaaagttgatgtggcgattatcagcaccacttacattcagcagaccgggctttctccggtgcacgacagcgtatttattgaagataagaattcgccgtatgtgaatattctggtagcacgggaagataataagaatgcagaaaacgtgaaggaatttctgcaatcttatcaatcatccgaagtcgctaaagcggcagaaaccatctttaacggtggcgcggtgcctggctggtaa

SEQ ID NO: 262028 - DNA, 924 bp, Klebsiella pneumoniae
atgggttccaccagaaaggggatgctgaacgttctgattgccgccgtgttgtggggaagttcaggggtctgcgcgcaatacatcatggagcaaagccagatgtcgtcgcagtttttgactatgacgcgtttgatattcgccggtttgattctgctgacgctgtcatttgttcatggcgataaaatcttttctattattaacaatcacaaagatgccattagtctgctgattttttccgtggttggcgcgctaaccgtacagctcacttttttgctaaccattgaaaaatcgaatgctgccacggcaacggtgctgcaattcctctcaccgacgattatcgtcgcctggttctcactggtgcgtaaatctcgcccgggcattctggttttctgcgctattttgacatcgctgatcgggacttttttattggtgacacacggtaatccgacgtcattatcgatctctcctgccgcgttattctggggcattgcctcggcatttgctgcggcattctataccacctatccctcaacgctaattgcccgctatggcacgttgcctgtcgtcggctggagtatgctgatcggcggtctaattctgttgcctttttatgccagacaagggacaaactttgtcgttaacggcagtttgattctggcgtttttttatttggtggtcattggtacgtccctgacatttagtctgtacctgaaaggagcacaattaattggcgggccaaaagccagcattttgagctgtgcagagccattaagtagcgcgctgctctctttgctgttgctggggatcacattcacattaccggactggctgggcacactgctgattctgtcatcggtgattttgatttcaatggattcccgtcgccgcgccagaaaaataaatcgtccggcgcgggatgagtga

SEQ ID NO: 262029 - DNA, 1185 bp, Klebsiella pneumoniae
atgcaaaaaacggctaccactccatcaaaaatacttgatctcactgccgcggcatttttacttgtcgcctttctgacgggtattgcgggcgctctccagactcctaccctaagtatattcctcgcagatgaactgaaagcccgtcctataatggtaggttttttcttcaccggtagcgctattatgggaattcttgtcagtcaatttctggcaagacactccgataaacaaggcgaccgtaaattactgatcctgctatgttgcttatttggagtgctggcctgcacgctttttgcgtggaatcgcaactacttcattctcctctctacgggcgtacttctgagtagttttgcttccaccgcaaacccgcaaatgttcgccctcgcccgtgaacacgccgacagaacaggccgtgagacggtaatgttcagtacatttttacgtgctcagatctcgcttgcctgggttatcgggccaccgctcgcttatgagctggcaatgggatttagttttaaagtgatgtatctcaccgcagccatcgcatttgttgtttgcgggctgatagtctggttgtttttgccatcaatacaaagaaatattcctgtcgttacccaacccgtagaaattttaccctccacccataggaagcgggatacacggctacttttcgtggtttgttcaatgatgtgggcggcgaataatctctacatgataaatatgccgctatttattattgatgaactgcatctaaccgataaactggctggagaaatgattggtattgctgccggtctggaaattccgatgatgttaatcgcaggctattacatgaaacgtattggcaagcggctattaatgctcattgctatcgtgagtggaatgtgtttttacgccagcgtactcatggcgacgactccggcagttgagctggaattgcaaattctaaatgccatcttccttggtattctctgtggtatcggcatgctttattttcaggacctgatgcctgaaaaaataggctctgcgacaacgttatatgcaaatacttcacgcgtcggctggattatcgccggctctgttgacggaattatggttgaaatctggagctaccacgcgttgttctggctggcgatagggatgttgggtattgcgatgatttgcctgctgtttattaaagatatttag

SEQ ID NO: 262030 - DNA, 1383 bp, Klebsiella pneumoniae
atgaagagtgaagtgttgtccgttaaagagaaaattggttatggcatgggagacgccgccagccacattattttcgataacgtaatgttatatatgatgttcttttataccgatatttttggcattcctgccggatttgtcggaactatgtttttggtcgctcgtgcactggatgcgatttccgatccttgcatggggttgttggccgatcgaacgcgctctcgctggggtaaatttcgtccgtgggtactgtttggcgcactgccatttgggatcgtctgtgtactggcctatagcacgccagatctcagtatgaacggaaaaatgatttatgcagcaattacttacaccctacttaccttactttataccatcgttaatatcccttactgcgcattgggtggtgtaatcaccaatgacccgactcagcgtatctcgctgcaatcctggcgttttgtgctggcgaccgcgggaggcatgctctctactgtgctgatgatgccgctggttaatttaattggtggtgataataaaccactcggtttcctgggcggtatcgcggtcctttccgtggtggcattcatgatgctggcattttgtttctttaccactaaagaacgcgttgaagcaccacctacaacgacgtctatgcgggaagatttacgtgatatctggcaaaacgatcagtggcggattgtcggtttactgaccattttcaatattctggcggtgtgcgtacgcggcggggcgatgatgtattacgtcacatggattttgggtacgccggaagtgtttgtcgcttttcttaccacttattgcgtgggtaacctgattggttccgcactggcgaaaccgctgaccgactggaaatgtaaagtcactatcttctggtggacgaacgccctgctggcagtgattagcctcgcgatgttctttgttcctatgcaggccagcatcactatgtttgtcttcatcttcgtgattggtgtgttgcatcaactggtgacacctatccagtgggtaatgatgtccgataccgtcgactacggcgagtggtgcaatggtaaacgcctgaccgggatcagttttgctggcacgctgtttgtgctcaagctggggttggccttcggcggcgctcttatcggctggatgctggcttatggcggatatgatgcggcagaaaaagcgcagaacagcgccacgattagcatcattatcgcgctattcacgattgttccggcgatctgttatttgctgagcgcgattatcgctaaacgctactactcactcacgacgcacaatctgaaaaccgttatggaacagctggctcagggcaaacgccgttgccagcaacaattcacctctcaaaatgtgcagaactaa

SEQ ID NO: 262031 - DNA, 2319 bp, Klebsiella pneumoniae
atgaaaattagcgacggaaactggttgattcaacctggcctcaatttgattcacccgcttcaggtgttcgaggttgaacagcagggtaatgaaatggtggtctatgctgcccctcgtgatgtgcgtgaacgtacctggcagcttgatacgcctttatttacgctgcgctttttctccccacaggaaggtattgtcggtgtacggattgagcattttcagggggcgctgaataacggtcctcattacccgctcaatattttgcaggacgtgaaggtcacaatcgaaaacacagaacgttacgctgagtttaaaagtggcaacttaagtgcgcgtgtcagcaaaggtgagttctggtcactggattttctgcgtaacggcgaacgtattaccggtagtcaggtgaaaaataatggctacgtgcaggacacgaataatcaacgaaattatatgtttgagcggctggatcttggcgttggcgaaacagtttacggtctgggagagcgctttactgcgctggtgcgcaatggccagacggtagagacctggaaccgggacggcggcacaagtactgaacaggcgtataaaaatatcccgttctatatgactaaccgtggctatggggtactggtcaatcatcctcaatgcgtctcttttgaagtgggatcggagaaagtctccaaagtgcagttcagcgttgagagtgaatatctcgaatactttgttatcgacggcccgacgccgaaagcggtacttgatcgttatacccgttttactggtcgtccggcgctgccgcccgcgtggtccttcggcctgtggctaaccacttcatttaccaccaactacgacgaagcgacggtaaacagttttatcgatggtatggcggaacgcaatctgccactgcatgttttccactttgactgtttctggatgaaagccttccagtggtgcgattttgagtgggacccgctgactttcccggacccggaagggatgatccgccgcctgaaagcgaaagggctaaaaatctgcgtctggattaacccctatatcgggcaaaaatcccctgtctttaaagagttacaagagaaaggctatttactcaaacgcccggacggttcgttatggcagtgggataaatggcagccaggtctggcgatttatgactttaccaatccggatgcctgcaaatggtacgccgacaaactgaaaggtctggtcgcgatgggcgttgattgctttaagaccgactttggcgaacgtattccaaccgatgttcagtggtttgacggttccgatccgcagaaaatgcataaccattatgcgtacatctacaacgaactggtgtggaaagtgctcaaggaaaccgttggcgaggaagaagccgtcttgtttgctcgctcggcctccgttggtgcgcagaaattcccggtacactggggtggtgactgttacgctaactacgaatcaatggcggaaagcctgcgcggtggtttgtctattggcctttcaggttttggtttctggagccacgatatcggcggctttgagaataccgcgccggcgcacgtttacaaacgctggtgcgcgtttggtttgctctccagccatagccgtttacacggcagcaaatcttatcgtgtgccgtgggcctacgatgatgagtcctgtgatgtggtgcgcttcttcacgcaactgaaatgccgcatgatgccgtatctgtatcgtgaagctgctcgtgcgaacgcgcggggtacgccgatgatgcgggccatgatgatggagtttccggacgatccggcttgtgattaccttgaccgtcaatacatgttaggcgacaacgtgatggttgcgcctgtgttcactgaatcgggcgatgtgcagttctacttgcctgaaggtcgctggacacacctgtggcacaacgatgaactcgatggtagtcgctggcataaacagcagcacagcttcctgagtctgcccgtttatgtgcgtgataacaccctactggcgctgggcaacaacgagcaacgtcccgattacgcgtggcacgaaggcacggcattccagctctttaatctacaagacgggcatgaagccatctgtgaagtgcccgctgctgacggttccgttcttttcaccctgaaagcggcgcgaactggcaacacgattactgtgactggtgcgggcgaggcgaagaactggacactgtgcttgcgcaatattgtgaaagtaaatggtctgcaaggcggttcgcaggctgaaagtgagcagggactggtggtgactcctcaagggaatgcgctgacaattacgttgtaa

SEQ ID NO: 262032 - DNA, 1554 bp, Klebsiella pneumoniae
atgcaaatgattacctcgcgacaaaacagattattacgattccttttaccacgaagggaatatacgactattgttacgattgccggctatttaaatgtttcggaaaaaaccattcaacgtgatttacgtttacttgagcaatggctggaacaatggcgaataaccgttgagaagcgtgctggcgcgggtgtgatgttagactcgaagaatattactgatttgctgcatcttgatcatttgttgggagcagaatgtgaagagattgatggtgtaatgaataatgccaggcgcgttaaaatagcgtcgcagttattaagtgaaacaccgaatgaaacgtcgatcagtaaattgtcagagcgctattttatcagtggagcctctattgttaatgacctgagagtgattgagtcctggcttgcgccgttggggttatcattgatccgcagcccaagtggtacgcatattgaaggtagtgaagggcaagtccgacaggcaatggcattactgattaacggcattattaaccataatgagccgcaaggtgtcgtgtattcacgtctggatcccggaagttataaagcattagtccattattttggagaagaagaggtgttatttgtccagtcattgttactggatatggaaaatgaattaagttggtctttgggagagccttattacgttaacatttttactcacatccttattatgatgtatcgcaacacgcacgggaatgcgttatccagagaagaagatcaaaccaggcaatatgatgaaaatatctttaatgttgccagtcagatgattcataagatagaacaacgaattgcacatacattgcccgatgatgaagtctggtttatttatcaatatatcatttcatcaggtgtggcgattgatggacaaaaagatgtgagcattatttcacatatgcaggccagcaatgaagcgcgtctgattacctggcgtttaattacggtattcagtgacatcgtggactgcgattttagtgaagacagcgcattatatgatggcttgttggttcatattaagccgctgattaaccgactaaattatcgcattcatatccgtaatccattgctggaagatattaaagcagaattagcggatgtctggcggttgacgcaatatgtggtgaatcaggtatttaaaacctggggtgagaatgcagtgagcgaggatgaagtaggttacctgaccgttcattttcaggctgcgatggagcggcaaattgcccgtaaacgtgtattactggtctgttcaaccggaatcggaacttcgcatctactgaaaagccgtattctgcgagcatttcctgaatggacgattgttgatgttatttcagcagcgaatttatcacaggttttgcctgacaatatcgaactgattatttcgaccattaatttgcctacagtcactatgccggtcgcttatgttaccgctttttttaatgatgccgatattaagcgggtcactgaaatggtgattacggaaaaattacatcatgcgacatctcgggtcgttgaaatttaa

SEQ ID NO: 262033 - DNA, 471 bp, Klebsiella pneumoniae
atggacataacaaaaatcctgaatacgaatcgcgttattttagatatgcaagcgacgaataaagcggaggcgattgaagaattaactaatcttctcaaaaaagatggtgcgatcgattgtcgggaaacctttattaaagatgtctggcagcgcgaagcggaaggctcgactggttttgaaaatcatattgcgatcccgcatggtaaatcttctgcggtaattaataccacgctggctatcgggcgtacccggcaggatattccctgggaaacactggatggcagtagcgtacgctgtattattttatttgcggtacgtcttgaagatcaaaataccactcatatccgtttactttcccaggtcgcgggcgcgcttgcagatgatgacatcatagcgcaattgctggttgagacgagcccgcaaaaaatcattgatctctttagtcagtatgcacaatccgatgtctactaa

SEQ ID NO: 262034 - DNA, 315 bp, Klebsiella pneumoniae; identical to SEQ ID NO: 28182

SEQ ID NO: 262035 - DNA, 852 bp, Klebsiella pneumoniae
atgtttgccgatatgaaaagtatggtgatgaaagcctggcatgaacattacgccttgctggcgatcaactgtatgaatctggaaagtgctcacgcagctatccgcgtggcggagaagaatcgcgctccgatcattctcaatctctatcaggggcatctggcgcattttcctgcacccgtcgcggcggcagtggttaaaacgctcgcggaatctgcctcagtaccggtcgctctggcgcttgatcatggcaaaaatccggactgtattcgtcaggcgtttcgtgctggtttcagcggattaatgattgatgcttctgcttttcccctggaggaaaacgtgcgccagaccagggcggtggtggaactcgccgccagcgcgcagctctgcgtggaaggcgaactgggccatctggcagatgcgccgcgttacgaccaggccgccaatgcagacctgatgacgcaacccactgatgtggaaccgtttatcgcgcagacaggcattgatctactggccgtctcggtaggcacggcgcacggcatgtacgcgcctggtgttgtacctgctattgattttcagcgtctggcggagattttccactgctcgagcgtgcctctggcattacatggcggtagcggtacgccgttcgatcagctccagctctgtacgacgctgggggtagcaaaaatcaacgtgggggcggccatttttgaacgggggaaatccgcgctcctgcataccctctgtcacgatatatccattgaactggtggacgcgctgaaagctatggaactggccttcgaagaagcgattacaccgtatttacaggcgagcggctctataggcaaagcctga

SEQ ID NO: 262036 - DNA, 933 bp, Klebsiella pneumoniae
atgcactatctggggttggatattggtgggaccaaaatcgccgccgtcgtcatggatgcgcatggctgggagattcgccgttaccgctgcccgacgcaaaagtcgacatatcaacaatttgtctcatgcgttgtggcgcttatcgagcagattaggcgggacgttcaacgaccgatgctgacaggggtcgccttacccggcagtatctcgccactcactggcctgattaaaaacgcgaatattcaggtgattaacggtcatgcgttacaggctgatttgcagcaattgcttgggcaaccggtggtgatagccaatgatggtaactgtttcgcgctatcagaagcttgcgacggtgccgggcaagattatgacgtagtatttggtattacgcttggtacaggctgcggcggtggcattgccatcaagcaacgaccgtttataggggcctggggaaatgctgccgaatgcggtcatatcacgttgccaggctatatggagcaggaagatggtccatcagtcagttgctattgcggcaaacacaactgcgtggagtcgtttgtttccggcagcggttttagtgaacgctatcaacagatgactggtaacttgctcactcctgcggcgattgtcaccctggcacaacgtggtgatgcttgtgccatgcagcaggtggcacgttttcgccaacagcttgcccgcacgctggcaaccatcgttaacgttgttgaccctggcgtgattgtcatcggcggcgggctttcgaatgtggaactgcttatcaccgatctgaacgcagaagtcgctccactggttttcaccgatcaattcaccactcccattgtaaaagcacagcacggcgacagtagcggaatgcgtggcgctgcctggcttgctatgcgcaacggagaagccaatgaaacgttcacaaattaa

SEQ ID NO: 262037 - DNA, 681 bp, Klebsiella pneumoniae
atgaaacgttcacaaattaattatgttattgataaagcacatgccattgcgcagaccttccgcgtttgtttgccagagttcgcctattttacggtggatgactggctgcagcgggaacgggataactggcaagaagtggtcgacttacagctcggttgggatatcaccgattttggtcgtggtgatttcaaccaaacgggactaacactgctaacgatgcgcaacggcgcgctgggggcggcggcatatccaaaaccgtatgctgagaaaatgttgcagatccaacaagatcagcagactccctggcattttcacacccacaaaatggaagatatcctcaatcggggcggtggagacttatgcatgcagttggcctgggccaacgaagccaatctctgtgatgatcagcgggttattaccgtgagtgttgatggtcagcggcgtgccgtgaaacctggtgaaacgctggtgctaaagccggggcagggcatttgcctgccgccgcgtctgtatcatcgcttctgggcggaaaaagcgtttgttctcggctgggaaatttcgatggtaaatgatgaccaacatgataaccattttcttgagccgggaggacgttttccggcgatagaagaagatgaaccggtgaaatggttattgtgtagtgagtatgctgttttgcggtaa

SEQ ID NO: 262038 - DNA, 1710 bp, Klebsiella pneumoniae
atgaaatttattgggaagctgcttctctacattttcatcgctctgttagtggtgatcgctggcctctattttcttctgcaaacccgctggggagcagaacatatcagcgcatgggtttccgagaatagcgactatcatctggccttcggggcgatggatcaccgtttttccgcgccatctcatatcgtgctggagaacgtcacgttcggccgtgatggccagcccgcgaccctggtggcaaaaagtgtcgacattgcgctaagcagtcggcaactgaccgaaccacgccatgtcgataccatcctgctggaaaacgggacgctgaatctcaccgaccagaccgcgccgctaccgttcaaagccgatcgtctgcaactgcgtgatatggcgtttaatagcccgaatagcgaatggaaactgagcgcgcagcgggtaaatggcggcgtggttccgtggtcaccagaagccggtaaagtgctgggtacgaaggcgcagattcagtttagtgccggatcgctttcgctcaatgatgttcctgccaccaatgtactgattgaaggcagtattgataacgatcgcgttacgctgactaacctgggtgccgacatcgcccgcgggacattaaccggaaacgcgcagcgtaacgccgacggcagctggcaagtggaaaatctgcgcatggcggatatccgtctacaaagcgaaaaatcgctaaccgacttctttgcgccattacgctctgtcccgtcgttgcagattggtcgcctggaagtgatcgatgctcgtttgcaaggtccggactgggcggtgaccgacctcgatctcagcttgcgcaacatgaccttcagtaaagatgactggcagacacaggaaggcaaactgtcgatgaacgccagcgagttcatttatggttcgctgcatttatttgacccgattataaacgcggaattttccccgcagggcgtagcgctgcgccagttcaccagccgctgggaagggggtatggtcagaacgtcaggaaactggcaacgcgacgggaaaacgctgatcctcgatgatgcggcaattgccggactggaatataccttgccaaaaaactggcaacagttgtggatggaaacaacacccggttggttaaacagcctgcaactgaagagatttagcgccagccgcaatctgatcattgatatcgaccctgacttcccgtggcagctcaccgcgctcgatggttacggtgccaacctgacgctggttaccgatcataaatggggcgtctggagtggttcggcgaatctgaatgccgccgccgcgacatttaatcgtgttgatgttcgtcgcccatcgctggcgctgaccgccaacagcagcacggtgaatatcagcgaactgagtgcatttactgaaaaaggcattctggaagccaccgccagtgtttcacaaacgccacaacgtcagacccatatcagcctgaatggacgcggtgtgccggtgaatattttgcaacagtggggatggcctgaattaccgttgactggcgacggcaatattcagcttaccgccagcggcgatattcaggccaatatcccgctgaaacctacggttagcgggcaattgcatgccgtgaacgccacaaagcagcaagtgactcaaaccatgaatgcaggcgtcgtttccagtggcgaagttacatcgacggagccggtgcagtaa

SEQ ID NO: 262039 - DNA, 1392 bp, Klebsiella pneumoniae
atgtctgtttccaccctcgagtcagaaaatgcgcaaccggttgcgcagactcaaaacagcgaactgatttaccgtcttgaagatcgtccgccgcttcctcaaactctgtttgccgcctgtcagcatctgctggcgatgttcgttgcggtgatcacgccagcgctattaatctgccaggcgctgggtttaccggcacaagacacgcaacacattattagtatgtcgctgtttgcctccggtgtggcatcgattattcaaattaaggcctggggtccggttggctccgggttgttgtctattcagggcaccagcttcaactttgttgccccgctgattatgggcggcacagcgctgaagaccggtggtgctgatgttcctaccatgatggcggctttgttcggcacgttgatgctggcaagttgcaccgagatggtgatctcccgcgttctgcatctggcgcgccgcattattacgccgctggtttctggcgttgtggtgatgattatcggcctgtcgctaattcaggttgggctgacttccattggcggcggttacgcagccatgagcgataacaccttcggcgcaccgaaaaatctgctgctggcaggcgtggtcttagccttaattatcctgcttaaccgtcaacgtaacccttacttacgcgtggcctcactggtgattgcgatggcggccggatatgcgctggcgtggtttatgggcatgttgccagaaagcaacgaaccgatgacgcaagaactgattatggtgccaacgccgctctattacggtcttggcattgaatggagtctgctgctgccgctgatgctggtctttatgatcacttcactggaaaccattggcgatatcacggcgacctctgacgtttccgaacagccagtgtccggtccactgtacatgaaacgcctgaaaggcggcgtgctggcaaacggcctgaactcgtttgtttcggcggtgtttaacaccttcccgaactcctgcttcgggcagaacaacggagtgatccagttgaccggggttgccagccgctatgtcggttttgtcgtcgcgctgatgttgatcgtgctgggtctgttcccggcagtgagcggttttgtacaacatattccagaaccggttctgggcggcgcaacacttgtaatgtttggcaccatcgccgcctccggtgtgcgcattgtgtctcgtgagccgctgaaccgtcgggcgattctgattatcgcgctgtcgctggcggttggtctgggcgtctctcagcagccgctgattttgcagtttgcccctgagtggctgaaaaacctgctctcctccgggatcgccgcgggcggtattactgccatcgtgctgaatctgattttcccaccagaaaaacagtaa

SEQ ID NO: 262040 - DNA, 1206 bp, Klebsiella pneumoniae
atgtttcatctcgatactttagcaacgcttgttgccgcaacgctgacgttgctgctcgggcgtaagttggtccattccgtctcctttttgaagaaatacaccataccggaacctgttgcgggtggtttgttggtggcgctggcgctactagtactgaaaaaaagcatgggctgggaagtcaactttgatatgtccctgcgcgatccgttaatgctggctttcttcgccaccattggcctgaacgccaacattgccagtttgcgtgccggtgggcgtgtggttggcatcttcttgattgtggttgttggtctgttggtgatgcaaaatgccattggcattggtatggctagcctgttagggcttgatccgctgatggggctgttggccggttctattacgctttccggcggtcacggtacgggcgctgcgtggagtaaattgttcattgaacgttatggcttcaccaatgcgacggaagtggcgatggcctgtgcaacgttcggtctggtgctgggcggcttgattggcggtccggtggcgcgctatctggtgaaacactccaccacgccgaacggtattccggatgaccaggaagtcccgacggcgtttgaaaagccggatgtgggacgcatgatcacctcgttggtgctgattgaaactatcgcgctgattgctatctgcctgacggtggggaaaattgttgcgcaacttttggctggcactgcttttgaactgccgaccttcgtctgtgtcctgtttgttggcgtgattctgagcaacggtctgtcaatgatgggcttttaccgcgtctttgagcgtgcggtatccgtgctgggtaacgtaagcctgtcgttgttcctggcgatggcgctgatggggctgaaactgtgggagctggcttcgctggcgctgccgatgctggcgattctggtggtacagaccatcttcatggcgttgtatgccatcttcgttacctggcgcatgatgggcaaaaactacgatgcggcagtgctggctgcgggtcattgtggttttggcctcggtgcaacgccaacggcaatcgccaacatgcaggcgatcactgaacgttttggcccgtcgcacatggcgttcctggtagtgccgatggtcggtgcgttctttattgatatcgttaacgcgctggtgattaagctgtatttaatgttgccgatttttgcgggctaa

SEQ ID NO: 262041 - DNA, 2082 bp, Klebsiella pneumoniae
atgaaaggtcgcctgttagatgctgtcccgctcagttccctaacgggcgttggtgcagcgcttagtaacaagctggcgaaaatcaacctgcataccgtgcaggatctactcttacaccttcccctgcgctacgaagatcgcacccatctctaccccatcggagaactactaccgggcgtttatgccacggtggaaggcgaagtgctgaactgcaatatctccttcggcggtcggcggatgatgacctgccagatcagcgacggttccggcattctcaccatgcgctttttcaacttcaacgcggcaatgaaaaatagcctggcgacgggccgccgcgtgctggcctatggagaagcaaagcgcggtaaatatggcgcggagatgatccacccggaataccgcgtgcagggcgatctcagtacgccagagttgcaggaaacgcttacgccggtttacccaacaaccgaaggcgtaaagcaggccacgctgcgtaaattaaccgaccaggcgctggatctgctcgacacctgcgccattgaagaactcctgccgccggaactgtcacaaggaatgatgacgctaccggaagcgttgcgcactttgcaccgcccgccgccgacgctacagcttagcgatctcgaaaccgggcagcatccagcacaacgccgtctgattctggaagaactgcttgcgcacaacctcagcatgttggcgttacgcgctggtgcacaacgtttccatgcccagccgcttagcgccaatgacgcgctgaaaaataaactcctcgcagccttaccgttcaagccaacgggcgcacaggcacgcgtggtggcggagatcgagcgcgatatggcgctggatgcgccgatgatgcgcctggtgcagggcgatgtaggttccggtaaaacgctggtcgccgccctcgccgcgttgcgtgcgattgcccacggcaaacaggtggcattgatggcaccaaccgaattactcgccgagcagcacgcgaataacttccgcaactggtttgcaccgctcggtatcgaagtgggctggctcgccggtaagcagaaaggtaaagcgcgactggcacagcaggaagccatcgccagcggtcaggtgcagatgattgtcggtacacacgccatcttccaggaacaggtgcagtttaacggtctggcgctggtgattatcgacgaacagcatcgttttggcgtgcatcagcgtctggcgttatgggagaaaggccagcagcagggcttccatccgcatcagttgatcatgaccgcgacgccgatcccccgcacgctggcgatgaccgcgtatgccgatctcgatacctcggtgatagatgagctgccgccaggccgcacgccagtgacgacagtggcaatcccggatacgcgtcgtaacgacattatcgaccgcgtgcgccacgcctgtatgactgaagggcgtcaggcgtactgggtgtgcacactcattgaagagtcagagttactggaagcgcaggcggcggaagctacctgggaagagttgaaactggcgctaccagagttgaatgttggtctggtacacggacggatgaaaccagccgagaagcaggccgtcatggcatcatttaaacaaggcgagttacacctgctggttgccactaccgttattgaagtcggcgttgatgtgcctaacgccagcctgatgattatcgaaaacccggagcgtctgggtctggcgcagttgcaccagcttcgcgggcgtgtaggtcgtggtgcggtggcttctcactgcgtgctgctctacaaaacgccgctctccaaaaccgcgcaaattcggctgcaagtgctgcgcgacagcaacgacggttttgtgattgcacagaaagacttagagattcgcggaccgggtgaactgttaggtacgcgtcagacgggtaatgctgagtttaaagtggcggatttactgcgcgatcaggcgatgatcccggaagttcagcgcctggcgcgacatattcacgaacgttacccacaacaagcaaaagccctgatagaacgctggatgccggagacggaacgttactcgaatgcgtaa

SEQ ID NO: 262042 - DNA, 657 bp, Klebsiella pneumoniae
atgctcgccaggcggcagcctgatctgaccgtctgcatggagcaggtccacaaacctcataacgtttctgcgattattcgtaccgcagatgccgttggtgtacatgaagttcatgctgtctggcctggtagccggatgcgcaccatggcttcggcagctgcgggtagtaacagctgggtacaggtgaaaacgcaccgcaccattggcgatgccgtcgctcatctgaaaggccagggcatgcagattctggcaacccatctttctgataacgctgtcgatttccgcgaaattgattacactcgcccgacctgtattttgatgggacaggagaaaacaggcatcacgcaggaagcgttggccctggcggatcgggacatcatcattccgatgattggcatggtgcaatcgctgaatgtttccgttgcctcagccctcattctttacgaagcccagcgccagcggcaaaatgcgggcatgtacctgcgtgaaaacagcatgttgccggaagcagagcaacaacgcctgctgtttgaaggcggctatccggtgctggcgaaagtcgcaaaacgcaaaggcctgccttacccccacgtcaatcagcagggcgaaattgaagccgatgccgactggtgggccactatgcaagctgcagggtaa

SEQ ID NO: 262043 - DNA, 1740 bp, Klebsiella pneumoniae
atggcgatggtgcaggatatccgcgtcattctcatcaaacttgccgaccgtacccacaacatgcgcacgctgggctcacttcgcccggacaaacgtcgccgcatcgcccgtgaaacactcgaaatttacagcccgctggcgcaccgtttaggtatccaccacattaaaaccgaactcgaagagctgggttttgaggcgctgtatcccaaccgttatcgcgtaatcaaagaagtggtgaaagccgcgcgcggcaaccgtaaagagatgatccagaagattctttctgaaatcgaagggcgtttgcaggaagcgggaataccgtgccgcgtcagtggtcgcgaaaagcatctttattcgatctactgcaaaatggtgctcaaagagcagcgttttcactcaatcatggacatctacgccttccgcgtgatcgtcaatgattccgacacctgttatcgcgtgctcgggcaaatgcatagcctgtacaagccgcgtccgggtcgcgtgaaagactacatcgccattccaaaagcgaacggctatcagtctttgcacacctcgatgattggcccgcacggcgtgccggttgaggtccagatccgtaccgaagatatggatcagatggcagagatgggtgttgccgcgcactgggcttataaagagcacggcgaaaccagtactaccgcacaaatccgcgcccagcgctggatgcaaagcctgctggagctgcaacagagtgccggtagctcgtttgaatttatcgagagcgttaaatccgatctcttcccggatgaaatttacgttttcacaccggaagggcgcattgtagagctgcctgccggtgcaacgcccgtcgacttcgcttatgcggtgcataccgatatcggtcatgcctgcgtgggcgcgcgtgtcgaccgccagccttacccgctgtcgcagccgctgaccagcggtcaaaccgttgaaattattaccgcaccgggcgctcgcccgaatgccgcgtggctgaactttgtcgttagctcgaaagcgcgcgccaaaattcgtcaattgctgaaaaacctcaagcgtgatgattctgtaagcctgggccgtcgtctgctcaaccatgcgttgggtggcagccgcaagctcaatgaaatcccgcaggaaaatattcagcgcgagctggaccgcatgaagctggcaacgcttgacgatctgctggctgaaatcggccttggtaacgcaatgagcgtggtggtcgcgaaaaatctgcaacatggggacgcctccattccaccggcaacccaaagtcacggacatctgcccattaaaggtgccgatggcgtgctgatcacctttgcgaaatgctgccgccctattcctggcgacccgattatcgcccacgtcagccccggtaaaggtctggtgatccaccatgaatcctgccgtaacatccgtggctaccagaaagagccagagaagtttatggctgtggaatgggataaagagacggcgcaggagttcatcaccgaaatcaaggtggagatgttcaatcatcagggcgcgctggcaaacctgacagcggcaattaacaccaccacctcgaatattcaaagtttgaatacggaagagaaagatggtcgcgtctacagcgcctttattcgtctgaccgcccgtgaccgtgtgcatctggcgaatatcatgcgcaaaatccgcgtgatgccagacgtgattaaagtcacccgaaaccgaaattaa

SEQ ID NO: 262044 - DNA, 1368 bp, Klebsiella pneumoniae
atggaaaaagactatttgagaattagtagtactgtattagtgagcttattgtttgggcttgctttggttttggtgaatagttggtttaatcagccaggcgttgaggaagttgttccacgatcaacctatctgatggtaatgattgctttattttttatcgatactgttgcatttatttttatgcagttgtatttcatttatgaccgtaggcaattttcaaactgtatacttagtttggcttttctgagttgtttgatttactttgttaaaaccgtcattatcattcagcaaattattgaggggcgtttgacaagcagtgttgttcaaaatgacattgcaatctattatttgtttcgtcagatgagtttgtgcatattaatatttctggcattggtgaataaagttagtgaaaacacaaaacagcgcaatttattttccaaaaaaatgactttgtgcataagtttgttttttgttgttgggggggcgatagttgctcacatactttctagtcattatgagagctacaatttacacattgccgagttaaccaatgaaaatgatcaggtggtttggaaaacatcatatgttaccataatgattttcatgtggttaaccttgctttcagttaatctatactttaatggtttacgctgtgatatctggaatggagtgacggtgattgctttttgtgccgtactgtacaatgtctctcttttatttatgagcaggtatagcgtgtccatttggtatattagtcgcactattgaagtagtcagtaagttaaccgttatggtaatatttatgtgccatatattcagtgcgctacgagtaacaaaggacattgcacatcgcgattccttaaccaatatatttaacagaaattatttttttaatgaactgacagttcaatcagcatcggccaaaaaaacgccttattgcgtcatgattatggatatcgaccacttcaaaaaagtcaacgacacctgggggcatccggttggcgatcaggtgataaaaacagtggtgagtatcattgggaaaagcatacggccagatgacctttttgcgcgcgtcggcggcgaagagtttggcgtcttgctgacggacatcgatactgaacgtgcgaaagctttagcggaaaggattcgggaaaatgttgagcgtttaactggtgataatcctgaatacgccataccacaaaaagtgacgattagtattggcgctgttgtaacgcagaaaaatgagttaaaccctaaggagatctatcaactggctgataacgcactttacgaggcgaaagagaccgggcgtaataaggtggtagtaaaagaggcagaaattcttatcaaccgcaaggatgatgaatga

SEQ ID NO: 262045 - DNA, 219 bp, Klebsiella pneumoniae; identical to SEQ ID NO: 848

SEQ ID NO: 262046 - DNA, 705 bp, Klebsiella pneumoniae
atgcgcctggttcagctttctcgccattcaatagccttcccttccccggaaggcgcattacgtgagcctaacggcctgctggcacttgggggcgatcttagccctgcacgcctgttaatggcttaccagcgtggtatttttccgtggttttctcccggcgaccccatcctctggtggtcgcccgatccccgcgcggtgctttggcctgaatcactgcatatcagccgtagtatgaagcgatttcataaacgctcgccctatcgtgtcacgatgaattacgcttttggtcaggtcattgaaggctgtgccagcgatcgcgaagaaggaacctggatcacgcgtggcgtggtcgaagcctaccatcgccttcacgaactcggtcatgcccactccattgaagtctggcgtgaagatgagcttgtcggcggtatgtacggcgtggcccagggaacgctattttgtggtgagtccatgttcagccggatggaaaatgcgtctaaaacggcgcttctggtattctgtgaggaatttattggtcatggcggtaagcttatcgactgccaggtacttaacgatcacacagcgtcgcttggtgcctgcgaaattccccgccgggattacctcaattatctcaatcaaatgcgcctcggacgattgccgaataatttctgggtaccacggtgcttgttttcaccacaagaatga

SEQ ID NO: 262047 - DNA, 1722 bp, Klebsiella pneumoniae
atgcgcgctttgctaccctatctggcactgtataaacgtcataaatggatgttaagtcttggtattgtgctggcaattgtcacgctgctcgccagtatcggtctgttgacactttccggctggttcctctcggcctcagcggtagcgggggttgccggactgtacagcttcaactatatgctacccgctgcgggcgtgcgtggtgcagcaatcacccgtactgccgggcgctattttgaacgtctggtaagtcacgacgcgactttccgcgtgttgcagcatctgcgcatttataccttcagcaaattgctgcccctctcccctgccggactggcgcgctatcgtcagggcgaattgctcaaccgcgtggtggcggatgttgatacgctcgatcatctttacctgcgcgttatctcgccgctggtgggcgcttttgtggtgattatggtggtgacaatcgggttaagtttccttgatttcaccctcgcctttacgctgggcggcattatgttactgacgcttttcctgatgccaccgctgttttatcgtgcgggaaaaagcaccgggcaaaatctgactcatcttcgcgggcagtatcgccaacaactgacggcctggctgcaagggcaagctgagctgaccatttttggtgccagcgatcgttatcgcacgcagttagagaataccgaaattcagtggctggaagcgcaacgacgtcaatctgaactcaccgcattgtcgcaagcgataatgctgctcattggcgcgttagcggtgatcctgatgctgtggatggcgtctggcggcgttggcggcaatgctcaacccggcgcgttaattgccctgtttgtcttctgcgcgttagccgcgtttgaagcactggcaccagtaacgggtgcatttcagcatctggggcaagtcattgcctctgccgttcggatcactgacttaacggatcaaaaaccggaagtcaccttccctgatacccaaactcgtgttgccgatcgcgtttcgttgacgttacgggatgttcagttcacttatccggagcaatcccaacaggcacttaaagggatttctcttcaggtaaacgccggagaacatatagcgattctcgggcgaaccggatgcggcaaatcaacactgttacaactgctgacccgcgcatgggacccgcaacagggcgagattttgcttaacggtagccccatagccagcctgaatgaagcgactctacgacagaccatcagcgttgttcctcagcgagtgcatctgtttagcgccacgctgcgtgataatctgttactcgcctcgcctggcagtagtgatgaggctctggcggagatcttacgtcgcgttggtctggagaagctgctcgaggatgcaggtctcaacagttggttaggtgaaggcggacgccagctctccggtggtgaactgcgccgtctggctatcgcccgtgcgctgttacatgatgcgccgctggtattgctggatgaacctacagaaggcttagatgccacaaccgaaagtcagatccttgaattgcttgcagaaatgatgcatgagaaaacggtgttaatggtcacccatcgacttcgcggactctctcgtttccaacaaataatagtgatggacaacgggcaaattattgagcaaggtactcacgcagaactgcttgccagacaggggcgttattaccagtttaagcagggtttgtaa

SEQ ID NO: 262048 - DNA, 1767 bp, Klebsiella pneumoniae
atgaataaatcccgtcaaaaagagttaacccgctggttaaaacagcaaagcgtcatctcccaacgttggctgaatatttctcgtctgctgggctttgtgagcggcatattgatcattgcccaggcctggttcatggcgcgaattctgcaacatatgattatggagaatattccccgtgaagccctgctgcttccctttacgttactggttctgacctttgtacttcgcgcatgggtggtctggttacgcgaacgggtgggttatcacgccgggcagcatatccgctttgccatccgccgtcaggttctcgaccgtctgcaacaagcagggccagcgtggattcagggtaaaccggcggggagctgggcgacgctggtactcgagcaaattgacgatatgcatgattactatgcacgctacctgccgcaaatggcgctggcagtgtcggtgccgttgctgattgtggtggctatcttcccctctaactgggctgcggcgctcattctgctgggcactgctccgttaattccgttgtttatggcgctggttggaatgggggctgccgatgctaaccgacgtaactttctcgctcttgctcgcttaagtgggcattttctcgatcgcctgcgcggcatggaaacattgcgtatttttggtcgtggtgaagctgaaattgaaagtattcgttctgcttcggaagatttccgccaacggacaatggaagtgctacggctggcgtttttatcctccggcattctcgaattttttacctcgctgtcaattgctctggtggcggtctactttggtttttcctatctcggcgagctggattttggtcactatgatactggcgtgacgctggctgcgggttttctggccctgatccttgcgccggagtttttccagccattacgcgatctcggtacgttttatcatgctaaagcccaggctgttggtgcagctgacagtttgaaaacgtttatggaaaccccgcttgcccatccgcagcgtggtgaggcggaattagcatcgaccgatccggtgaccattgaagccgaggagctgtttattacatcaccagaaggtaaaacgctggccggaccgctgaactttactttgccagcaggccaacgtgccgtgttggttggtcgcagcggttcaggtaaaagctcactgctgaacgcgctttctggttttctctcatatcagggatcgctacgaatcaacgggatagaattacgcgatttatcaccggaatcatggcgtaaacatctctcctgggttgggcaaaacccacaattaccggcagcaacactacgggataacgtactactggcacgacctgatgccagcgaacacgagttacaaacagcgctggataacgcctgggtcagtgagtttctaccgctcctgccacaaggcgttgatacgcctgttggcgaccaggctgcccgcctttccgtggggcaggcacagcgcgtggcggtggcccgagcattactaaatccctgttcgctattactgttggatgaacccgctgccagccttgatgctcacagtgaacagcgcgtaatggaggcgcttaatgccgcctctctgcgccagacaacgttaatggtcacccaccagttagaagatcttgctgactgggatgtcatttgggtaatgcaggatggtcagattattgagcaaggacgttacgcggaattaagcgtggctggtggtcctttctccacattgctggcccatcgtcaggaggagatttaa

SEQ ID NO: 262049 - DNA, 1344 bp, Klebsiella pneumoniae
gtgagcaatctgtcgctcgatttttcggataatacttttcaacctctggccgcgcgtatgcggccagaaaatttagcacagtatatcggccagcaacatttgttggctgcggggaagccgttgccgcgtgctatcgaagccgggcatttgcattctatgatcctctgggggccaccgggtaccggcaaaacaaccctcgctgaagtgattgcccgctatgcgaacgctgatgtggaacgtatttctgccgttacttctggcgtgaaagagattcgcgaggcgatcgagcgcgctcggcaaaaccgcaatgctggtcgccgcactattctttttgttgacgaagttcaccgattcaacaaaagccagcaggatgcatttctgccacatattgaagacggcaccatcacttttattggcgcaaccactgaaaacccgtcgtttgaacttaactcggcactgctttcccgtgcccgtgtctatctgctgaaatccctgagtacagaggatattgagcaggtgcttactcaggcgatggaagacaaaacccgtggctatggtggtcaggatatagttctgccagatgaaacgcgacgcgccattgctgaactggtgaatggcgacgcgcgccgggcgttaaatacgctggaaatgatggcggatatggccgaagtcgatgatagcggtaagcgggtcctgaagcctgaattactgaccgaaatcgccggtgaacgtagcgcccgctttgataacaaaggcgatcgcttttacgatctcatttccgcactgcataagtcggtacgtggtagcgcacccgatgcggcgctgtactggtatgcgcgaattattactgccggtggcgatccgttatatgtcgcgcgtcgctgtctggcgatagcgtcggaagatgtgggtaatgctgatccacgagcgatgcaggtggcaattgcggcctgggattgctttacccgagttggcccggcggaaggagaacgcgccattgctcaggcgattgtttacctggcctgcgcgccaaaaagcaacgctgtctacactgcgtttaaagccgcgctggcggatgctcgcgaacgtccggattatgacgtgccggttcatttgcgtaatgcgccgacgaaattaatgaaggaaatgggctacgggcaggaatatcgttacgctcatgatgaagcaaacgcttatgctgccggtgaggtttacttcccgccggaaatagcacaaacacgctattatttcccgacaaacaggggccttgaaggcaagattggcgaaaagctcgcctggctggctgaacaggatcaaaatagccccataaaacgctaccgttaa

SEQ ID NO: 262050 - DNA, 864 bp, Klebsiella pneumoniae
atgggaagtggatggcatgaatggccgctgatgatcttcacggtcttcgggcaatgtgtagcgggtggttttatcgttctggctttggcgctgctcaaaggcgacctgcgagcagaagcccagcagcgtgttattgcctgcatgtttggtttatgggtgctgatgggcattggctttatcgcctctatgcttcatcttggttcaccgatgcgcgcctttaactcgctcaaccgggtaggggcttcagcactcagtaacgaaatcgccagcggttcgatcttttttgctgttggtggcatcggctggttgctggcaatgctgaaaaagctgtcaccggcattgcgtacgctctggctgatagtgacgatggttcttggcgtcatctttgtctggatgatggtgcgtgtgtataacagcattgataccgttccgacctggtacagcatctggacgccgatgggcttcttcctgacgatgtttatgggcggcccgttactgggttacctgttgctgagtctggctggcgtcgatggctgggcgatgcgtctgctgccagccatttctgtactggccctggtagtgagtggcgtggtgtcagtgatgcagggcgcagagctggcgactattcatagctctgtgcagcaggccgcagcgctggtgccggactatggtgcgctgatgtcctggcggatcgtgcttttggctgttgccctgtgcttgtggattgcaccacagctaaaaggttatcagcctgcggttccgctactttccgtatcattcattctgcttctggcaggggaattaatcggtcgtggcgtattctatggtttgcatatgaccgtggggatggccgtcgcaagctaa

SEQ ID NO: 262051 - DNA, 1149 bp, Klebsiella pneumoniae
atgtccacgtatacccggcctgtcatgcttttgctgtctggcctgcttttgttgactctggcgatcgcagtgttaaatacactcgtgccgctttggctcgcccaggaacacatgtccacatggcaggtaggcgttgtcagctcatcctattttaccggcaacctggtcggtacattgctgacagggtatgtcattaagcgcattggctttaaccgcagctattatctggcctccttcatttttgccgctggctgtgccggccttggcctgatgattggattctggagctggttggcttggcgttttgtcgccggcgtcggctgtgccatgatttgggtggttgttgagagcgcgctgatgtgcagtgggacgtcacgtaaccgtgggcgtttgcttgctgcgtatatgatggtttattacgtgggaacgtttttaggccagttactggtcagcaaagtttcaaccgagctgatgtccgtattgccgtgggttacaggtttgacgttggcagggatcttaccgctgttgtttacgcgtgtgctgaatcagcaggctgaaaaccatgattcgacgtcaattacgtcaatgctaaaactccgtcaggcgcggcttggcgtgaatggctgcattatctcaggaatcgttctgggatctctatatggcctgatgccgctgtacctcaatcacaaaggggtgagcaatgccagcattggtttctggatggcggtactggtcagtgcgggtatccttggacaatggccgattggacgtctggcggataagtttggtcgactgctggtgttgcgtgttcaggtctttgtcgtcattctcggcagtatcgcgatgcttagccaggcggcgatggccccagcgttattcatcctcggtgccgctggctttacgctatatccggtggcgatggcctgggcttgcgagaaagttgaacatcatcaactggtggcgatgaaccaggccttactgttgagctataccgtgggaagtctgcttggcccgtcatttaccgctatgctaatgcagaatttctccgataatttattgtttatcatgatcgccagcgtatcgtttatctatttgctgatgctgcttcgcaacgccggtcatacgccgaaacccgttgctcacgtgtaa

SEQ ID NO: 262052 - DNA, 1431 bp, Klebsiella pneumoniae
atggctgggaatgttcaggaaaaacagctgcgatggtacaacattgcgctgatgtcttttatcactgtctggggttttggcaacgttgttaataactacgccaaccaggggctggtggttgttttttcatgggtgtttatctttgcgctctatttcacaccttatgcgctaattgttggtcagttaggctcgaccttcaaagatgggaagggcggggtcagtacctggattaaacacacgatgggacccggactggcttacctcgccgcgtggacctactgggtagtgcatattccctatctggcacaaaaaccccaggcaatactgattgcgctcggttgggcgatgaaaggcgacggttcgttaatcaaagaatattcagtcgtagcgttacaggggttaacgctggtgctgtttatcttctttatgtgggttgcttcacgcggtatgaaatcgctgaaaatcgtcggttctgtggcagggattgcgatgtttgttatgtcgctcctgtatgtggcgatggcggtaaccgcgcctgcgattactgaagtgcatattgcgaccacaaacattacctgggaaacgttcattcctcatatcgactttacctacattaccactatttcaatgctggttttcgcggttggcggagcagagaagatttctccttacgttaatcaaacgcgcaacccaggaaaagaatttccaaaagggatgttatgccttgcggtgatggttgcggtttgtgccattctgggctcactggcgatggggatgatgtttgactcgcgtaatatcccggatgacttaatgactaacggtcagtattacgcctttcagaagctgggcgagtattacaacatgggtaatactttaatggtgatttatgccattgcgaataccctgggacaagtagctgcgctggtattctcgattgatgcgccgcttaaagtgttattaggcgatgctgacagcaaatatattccagccagtttatgtcgtaccaacgcttctggtacgcccgttaatggctattttctgaccctggtgctggtggcgatcctgataatgctgccgactctcggcattggtgatatgaacaatctctataaatggctgttgaaccttaattcggtagtgatgccgctgcgttatttatgggtatttgttgcatttattgcagttgttcgcctggcgcagaaatataagccggaatatgtctttattcgtaataagccgctggcaatgaccgtcggaatttggtgttttgcctttaccgcttttgcctgcctgactggtattttcccgaaaatggaagccttcaccgcagagtggacattccagttggcgctgaatgttgcaacgccgtttgtgctggtgggattagggctgatattcccgctgctggcgcgtaaagcgaatagcaaataa

SEQ ID NO: 262053 - DNA, 741 bp, Klebsiella pneumoniae
atgtcagttattggtcgcattcactcctttgaatcctgtggaaccgtagacggcccgggtattcgctttatcacctttttccagggctgcctgatgcgctgcctgtattgtcataaccgcgacacctgggacacgcatggcggtaaagaagttaccgttgaagatttaatgaaagaggtggtgacctatcgccactttatgaacgcttccggcggcggcgttaccgcatccggcggtgaagcaatcctgcaagctgagtttgttcgtgactggttccgcgcctgcaaaaaagaaggcattcatacctgtctggacaccaacggttttgttcgtcgttacgatccggtgattgatgaactgctggaagtaaccgacctggtaatgctcgatctcaaacagatgaacgacgagatccaccaaaatctggttggagtttcaaaccaccgcacgctggagttcgccaaatatctggcgaacaaaaatgtgaaggtgtggatccgctacgttgttgtgccaggctggtctgacgatgacgattcagcgcatcgcctcggtgaatttacccgtgatatgggcaacgttgagaaaatcgagcttctcccctaccacgaactgggcaaacacaaatgggtggcgatgggtgaagaatacaaacttgatggtgttaaaccaccgaagaaagaaaccatggaacgcgtgaaaggcattcttgagcagtacggtcataaggtaatgttctaa

SEQ ID NO: 262054 - DNA, 1743 bp, Klebsiella pneumoniae
atgttaccattagaaaacagtgactcaccctttaaagatgttttttctaatgcgcatgaagtcacagcagaaacgaaagaaaatcgaacaatatacacacaggtatttgaaattgataatggcatcgagaaaagatgcattaaccactggcatacattatgcaatctgccagccagcgatcatgctgtttatatttgtggttggcaagatattaccgagacgcgtgatttaattcatgcactcgaggtagagagaaataaagcgatcaatgcaactgtcgcaaaaagccagtttctggcaacaatgagtcacgaaataagaacaccaataagctccattatgggcttcctggaacttctgtcgggttctggtcttagcaaggagcaacgggtggaggcgatttcacttgcctacgccaccggacaatcactcctcggcttaattggtgaaatccttgatgtcgacaaaattgaatcgggtaactatcaacttcaaccacaatgggtcgatatccctactttagtccagaacacttgtcattctttcggtgcgattgctgcaagcaaatccatcgcattaagttgcagcagtacgtttccagaacattaccaggttaagatcgaccctcaggcgtttaagcaggtcttatctaatttactgagcaatgctcttaaatttactaccgagggggcagtaaaaattacgacctccctgggtgacattgatgacaaccacgctgttatcaaaatgacgattatggattctggaagtggattatcgcaggaagaacaacaacaactgtttaaacgctatagccaaacaagtgcaggtcgtcagcaaacaggttctggtttaggcttaatgatctgcaaagaattaattaaaaacatgcagggcgatttgtcattagaaagtcatccaggcataggaacgacatttacgatcacaatcccggtagaaattacccaacaagtggcggctgtcgaggcaaaagcagaacaacccatgacactccctgaaaagttgagcatattaatcgcggatgatcatccgaccaacaggctattactcaaacgccagctaaacctattaggatatgatgttgatgaagcaactgatggtgtgcaagcgctacacaaagtcagtatgcaacattatgatctgcttattactgacgttaatatgccgaatatggatggttttgagttgactcgcaaactccgtgagcaaaattcttccttacccatctgggggcttacagccaacgcacaggctaacgaacgtgaaaaagggttaaattgcggcatgaacttatgtttgttcaaaccgttgaccctggatgtactgaaaacacatttaagtcagttacaccaggttgcgcctattgcacctcagtatcgccaccttgatatcgaggccctgaaaaataatacggcgaacgatctacaactgatgcaggagattctcatgactttccagcatgaaacgcataaagatctacccgctgcgtttcatgcactagaagctggcgacaacagaactttccatcagtgtattcatcgcatccacggtgcggctaacatcctcaatttgcaaaagttgattaatattagccatcagttagaaataacacctgtttcagatgacagtaagcctgaaattcttaagttgctgaactctgttaaagaacacattgcagagctggaccaggagatagctgttttctgtcaacaaaatgactaa

SEQ ID NO: 262055 - DNA, 1146 bp, Klebsiella pneumoniae
atgacaaataatgaatgcaaagggccgtttgaaggcttattagttatcgatatgacacatgtccttaatggacctttcggaactcaacttctttgtaatatgggcgcaagggtaattaaagttgagccgccgggtcatggtgatgatacccgcacatttggtccctatgtggatggacagtcactctattacagttttattaatcatggcaaagagagtgtggttcttgatttaaagaatgatcacgataaaagtatatttataaatatgcttaaacaagctgatgtattagctgagaattttcgcccaggtacaatggaaaaactggggttttcatgggaaacgctacaagaaatcaacccgcgtctcatatatgcttcatcgtcaggttttgggcataccggcccgctaaaagatgctccagcctacgataccatcattcaggcaatgagcgggataatgatggaaacagggtaccctgatgctccgccagtgcgcgtgggtacctctcttgcggatttatgtggcggtgtctatttattcagcggaatagtgagtgcactttatggccgcgaaaagagccagagaggggcgcatgtcgatatagcgatgtttgatgccacgctgagttttctggagcatggtctgatggcatatattgcgacagggaagtcaccacaacgcctgggaaatcgccatccctacatggcaccttttgatgtttttgatactcaggataagccgattacgatttgttgtggtaatgacaagcttttttctgcgttatgccaggcactggagcttacggaactggttaatgatccccgatttagcagcaatattttacgcgtacaaaaccaggctattcttaaacaatatattgagcgaacgttaaaaacgcaggcagctgaagtttggttagccaaaatacatgaagttggtgtgcccgtcgcgccgttattaagtgtggctgaggccattaatttgccacaaactcaggcgagaaatatgttgattgaagccgggggaataatgatgccaggtaatccgataaaaatcagcggctgcgcggacccgcatgttatgccgggagcggcaacgctcgaccaacatggggaacaaattcgccaggagttttcatcataa

SEQ ID NO: 262056 - DNA, 945 bp, Klebsiella pneumoniae
atgctaacattttttattggcgatttattgcctattatcgtaatcatgctgttgggttattttagcggcagacgagaaactttttcagaagatcaagcccgggcatttaataaactggtattaaactacgctcttcctgcggccctatttgtttctattacccgggcaaacagggaaatgatttttgcggacactcgcctgacccttgtatcacttgtggttattgtcggatgtttctttttctcctggtttggttgctacaaattttttaaacgtactcatgcagaagcagcagtatgtgcattaattgcaggttcacctaccatcggattcctgggatttgcagttctcgatcctatttatggcgattccgtatcaacaggtttagttgtagcaattatttctattattgttaacgcaattactattcctattggtctgtatttgctgaatccttcctcaggagcggatggtaagaagaatagtaatctgagcgcattaatttctgcggcaaaggagccagtagtatgggcacctgttctggcaacgatcctggtgttggttggggtaaaaattccggcagcatgggacccaacctttaatctgattgcgaaggctaactcaggggtagcggtattcgctgcggggttgactctggctgcacataaattcgaattcagtgccgaaattgcttataacaccttcctgaagctgattctgatgccactggcgctgcttctcgtgggtatggcatgtcatttgaacagcgaacatttgcagatgatggtactggcaggtgccttaccgccggcattctccggaatcattattgccagccggtttaatgtctacacccgcactggtacagcgtcactggctgtgagcgtactgggctttgtcgtcacggctcctttgtggatttatgtcagtcgactggtttcataa

SEQ ID NO: 262057 - DNA, 1695 bp, Klebsiella pneumoniae
atgtcagatcaacttcaaatgacagatggtatgcatatcatcgttgaagcattaaaacagaatgatattgacactatttatggtgttgtaggtattcctgtgacggatatggcgcgccatgcccaggcggaaggcattcgttatattggttttcgtcatgagcagtcggcaggctatgccgctgcggcaagcggttttcttacccaaaaaccggggatctgcctgacagtgtctgcgccaggattcctcaatggtttgaccgcattggccaacgcaacggtaaatggttttccgatgatcatgattagcggctccagcgaccgcgcgatcgtcgacctacagcaaggtgattatgaagagctggaccaaatgaatgcggcaaaaccgtatgccaaagcggcgtttcgcgttaatcagccgcaggatcttggcattgcattggcacgcgctatccgggtctcagtatcgggtcgccctggcggagtttatcttgatttgccagcaaatgtcctggccgcgacgatggaaaaagacgaagcgttaaccacgattgttaaagttgaaaatccgtcgccagcattattgccatgcccgaagtcagtcactagcgcaatttcgcttttagcaaaagctgaacgaccattaattatccttggcaaaggcgcggcgtattcacaagctgatgaacagcttcgtgaatttattgaaagtgcccagattccattcctgccaatgtctatggcgaaagggatcctcgaagatacgcatccactttctgcggcagctgcgcgttcgtttgccctggcaaatgctgacgttgtcatgcttgttggtgcacgactgaattggttactggcgcacggtaaaaaaggatgggcggcagatacacagtttattcaactggaaattgaaccgcaggaaattgacagcaaccgtcccattgctgtgccagtcgttggcgatattgcatccagtatgcaaggtatgctggcagaattgaaacaaaacacatttacgactccgctggtgtggcgcgatattttaaatatccacaagcagcaaaatgcgcaaaaaatgcatgaaaagttaagtacagatacccaaccattaaattactttaatgcattgagtgctgtgcgcgatgtattgcgtgagaaccaggatatttatttagttaatgaaggggcaaataccctggataatgcacgaaatattattgatatgtataaaccacgtcgtcgtctggattgtggcacctggggtgtcatgggcatcggtatgggctatgccatcggtgctagcgtgacctctggttctccggttgtcgccattgaaggtgatagtgcttttggtttcagtgggatggagattgaaacgatttgtcgatataacctgccggtgacgatcgttatttttaataatggcggcatctacagaggagacggtgttgatctcagtggcgctggtgcaccatcaccaacagatctattgcaccatgcaaggtatgacaaattaatggatgcgtttcgtggcgttggctataacgtcactacgacagatgaacttcgtcatgctttaaccaccggtattcagtcgcgcaaaccgaccattattaatgtggtcatcgaccctgcagcaggaactgaaagtggccatattaccaaacttaacccaaaacaagtcgctggtaattaa

SEQ ID NO: 262058 - DNA, 1251 bp, Klebsiella pneumoniae
atgtcaactccacttcaaggaattaaagttctcgatttcaccggtgtgcaatctggcccatcttgtactcaaatgctggcctggtttggcgctgacgtcattaaaattgaacgtcccggcgttggtgacgtaacgcgtcaccagctgcgagatattcctgatatcgatgcgctttacttcaccatgcttaacagtaacaaacgttctattgaattaaataccaaaacagcggaaggcaaagaggtaatggaaaagctgatccgcgaagctgatatcttagtcgagaactttcatcctggggccattgatcacatgggcttcacctgggagcatattcaagaaatcaatccacgtctgatttttggttcgatcaaagggtttgatgagtgttcgccttatgtgaatgtaaaagcctatgaaaacgttgctcaggcagcgggtggcgctgcatccactacgggtttttgggacggtccgccgctggtaagcgctgcagcgttgggtgacagcaacaccggaatgcatttactgatcggtttacttgctgctttgctgcatcgcgaaaaaacggggcgtgggcaacgagtcaccatgtcaatgcaggatgccgtattgaacctttgccgcgtgaaattacgcgaccagcagcgtctcgataaattgggttatctggaagaatacccgcagtatccgaatggcacatttggtgatgcagttccccgcggaggtaatgcgggggggggcggtcagcctggctggatcctgaaatgtaaaggctgggaaaccgatcctaacgcctatatttatttcactattcaggagcaaaactgggaaaatacctgtaaagccatcggcaaaccagattggattaccgatccggcatacagtacagcccatgcccgacagccacatattttcgatatttttgctgaaatcgaaaaatacactgtcactattgataaacatgaagcggtggcctatttgactcaatttgatattccttgtgcaccggttttaagtatgaaagaaatttcactcgatccctctttgcgccaaagtggcagtgtcgtcgaagtggaacaaccgttgcgtggaaaatatctgacagttggttgtccaatgaaattctctgcctttacgccggatattaaagctgcgccgctattaggtgaacataccgctgctgtattgcaggagctgggttatagcgacgatgaaattgctgcaatgaagcaaaaccacgccatctga

SEQ ID NO: 262059 - DNA, 633 bp, Klebsiella pneumoniae
atgaaacgtttaattatggctacgatggtcacagcagttctggcatcttcaactgtatgggctgctgataatgcaccggtagcggcacaacagcaaactcagcaagttaagcaaacccagaaaacggcagcagcagagcgtatctctgaacaaggtttatatgcgatgcgtgacgtgcaggtagcgcgcctggctctgtttcatggcgatccggaaaaggcaaaagaactgaccaatgaagcttcagctttgttgtcagatgacagtaccgaatgggcaaagttcgctaagccaggtaaaaagaccaatgtcaatgatgaccaatatattgtcattaatgcatctatcggaatttctgagagttatgtagcgacacccgaaaaagaagccgcgataaaaattgccaacgaaaaaatggcgaaaggggataaaaagggcgcaatggaagagcttcgcctggccggtgttggcgtaatggaaaaccaatatctgatgccgctcaaacagactcgtaatgcacttgctgatgcgcagaaactgcttgataaaaagcaatactacgaggcaaacctggcgcttaaaggtgcggaagatggaatcatcgtcgatagcgaagcactgtttgtgaactaa

SEQ ID NO: 262060 - DNA, 276 bp, Klebsiella pneumoniae
atgaaagtaaacttaatgctttttagcttatttttattggtctctattatggcatgcaatgtttttgcattttccatttctggtggtggaagtgagacgagctataaagagacagaaaaaacgtcaatgatgacgacaactcattctacaaaacttcagccatcacaggcgattttgtttaagatgagagaagatgcgccaccattaaatctcacagaagacattacgcccccttttccgacaaaggcgaattatcttattcatcctgtgcgatag

SEQ ID NO: 262061 - DNA, 243 bp, Klebsiella pneumoniae
atgatttatttatggatgtttctcgccctgtgtattgtctgcgtaagcggatacatcggtcaggtactgaacgtgatctcggcggtctcttctttcttcggcatggtgatcctcgctgcactcatttactacttcaccatgtggttaactggcggtaatgaactggtgacggggatatttatgtttcttgccccggcttgtggcttgatgattcgctttatggtggggtatggcaggcggtag

SEQ ID NO: 262062 - DNA, 921 bp, Klebsiella pneumoniae
atgtttccacaatgcaaattttcccgcgagtttctacatcctcgctactggctcacatggtttgggcttggtgtactctggctttgggtacagcttccttatcctgttctctgctttctcggcacgcgtattggcgcaatggcgcgaccattcctgaaacggcgtgaatctatcgcccgtaaaaacctggaactttgtttcccgcagcattctgcggaagaacgtgagaagatgattgccgaaaactttcgttcactcggcatggcgctggtagaaaccggcatggcgtggttctggcccgacagtcgcgtacgtaaatggtttgatgttgaagggttggataaccttaaacgcgcacaaatgcaaaatcgcggcgtaatggttgtcggcgtccattttatgtcgctggaactgggcggccgcgtgatgggactgtgccaaccaatgatggctacctatcgtccacataataatcagctgatggaatgggtgcagacccgtgggcgcatgcgctctaacaaagcgatgatcggcagaaataatctgcgcggcattgtcggtgcactgaagaaaagtgaagcggtatggtttgctcccgatcaggattatggtcgtaaaggcagctccttcgcgccgttctttgcggtggaaaatgttgccacaaccaatggtacgtatgtcctttcacgtctctctggcgcagccatgttaaccgtaacgatggtaagaaaagcggattacagcggatatcgtttgtacatcaccccagagatggaaggctacccggcagatgaaaatcaagccgctgcctatatgaacaagattatcgaaaaagagatcatgcgcgcaccggagcagtacctctggatccaccgtcgctttaaaacgcgcccggtgggagaatcgtcgctatacatttaa

SEQ ID NO: 262063 - DNA, 1239 bp, Klebsiella pneumoniae
atggctgacactcgccctgaacgtcgctttacgcgcattgatcgtctcccgccctacgtttttaatattaccgctgaactgaaaatggctgcgcgtcggcgcggcgaagatattatcgatttcagtatgggtaacccggacggtgcgactccgccgcacatcgtcgaaaaattatgtacggtggcccagcgcccggacacgcatggttactccacttcacgcggcattccgcggctacgtcgcgccatttcacactggtatcaggatcgctacgacgttgaaatcgacccggaatcagaagccatcgtcactattggttcgaaagagggactggcgcatctgatgctggcgacgctggatcatggtgacactgtactggtgcctaatccaagctacccgattcatatttacggcgcggtgattgccggggcgcaggtacgctcagtgccgctggtggaaggtgtcgatttcttcaacgaactggaacgcgccattcgcgaaagttatccgaaaccgaagatgatgatcctcggcttcccgtcgaatccaaccgcgcaatgtgtggagctggagtttttcgaaaaggttgtggcgctggcgaaacgctacgatgtgctggtggtccatgacctggcctatgccgatatcgtctacgatggctggaaagcgccgtcaatcatgcaggtgccgggtgcacgcgatgtggcggtcgagttctttacgctgtcgaaaagctacaacatggcgggctggcgtatcggctttatggttggcaacaaaacgctggtcagtgcgctggcacgtattaaaagctatcacgattacggcacctttacgccgttgcaggtggcagcgattgcggcgctggagggcgatcaacagtgcgtgcgcgacattgctgaacagtacaaacgccgccgtgatgtactggtaaaagggctgcatgaagcgggctggatggtcgaaatgccgaaggcttcgatgtatgtctgggcgaaaatcccggaaccgtatgctgccatgggctcgctggaatttgccaagaagctgctgaacgaagcgaaggtttgtgtctctccggggatcggctttggcgactacggcgacacgcatgtgcgctttgcactgattgaaaaccgcgaccgtattcgtcaggcgattcgtgggattaaagcgatgttccgtgccgacggtttactacccgtcagcagcaaacatattcacgaaaacgcggaataa

SEQ ID NO: 262064 - DNA, 1698 bp, Klebsiella pneumoniae
gtgcacgaaatattcaacatgctgctggcggtcttcgatcgggcagcgttaatgcttatctgcctgttctttctcatccgtatccgcctgtttcgcgaactgttgcacaagtcggcgcactccccaaaagagctgctcgctgttaccgccattttctcgctgttcgccctgttcagcacctggtccggcgttcccgtagaaggctcgctagtgaacgttcgtattatcgcggtgatgtcaggcgggattctgtttggcccgtgggtaggcatcattaccggcgtgattgcgggtattcaccggtatttaattgatatcggcggcgtgacggcgatcccctgctttatcaccagcattctggcgggttgtatatcgggctggatcaacctgaaaatccccaaagcacagcgctggcgcgtcggtattctcggcggcatgttatgtgaaacgttgaccatgattctggtgattgtctgggcaccaactaccgcgttggggatcgatatcgtctctaaaatcgggattccgatgatcctcggtagcgtctgtatcggctttattgtgctgctggtgcaaagcgttgagggcgaaaaagaggccagcgccgcgcggcaggccaagctggcgctggatatcgccaacaaaacgctgccgctgtttcgccatgtcaatagcgagtcattacgcaaagtttgtgaaattatccgcgatgatattcatgccgatgcggtggcgattaccaataccgatcatgtgctggcctatgttggcgtgggtgaacacaactatcagaatggcgatgacttcattagcccgactacccgacaggcgatgaattacggaaaaatcatcattaaaaacaatgatgaagcccaccgcacaccagagattcattccatgctggtgatcccattgtgggagaaaggcgttgtgaccggaacactgaaaatttactactgccacgcgcatcagattacgtcatcattacaggaaatggcggtcggtctgtcgcaaatcatctccacgcaactggaggtttcacgcgccgagcagctacgtgaaatggcaaataaggcagagcttcgcgccctgcaaagcaaaattaatccccatttcctgtttaacgctttgaacgctatttcatcgtcaatccgtctgaatccggataccgctcgccagctgatctttaatctgtcgcgttatctgcgctataacattgaattaaaagacgatgagcaaatcgatatcaaaaaagagctgtatcaaattaaagactatattgccattgagcaggcccgctttggcgacaagctgacggttatctatgatattgatgaagaggtgaattgctgcattcccagcctgctgatccagccgttggtggaaaacgccattgtccacggtatccagccttgcaaaggtaaaggcgttgtcaccatcagcgttgcagagtgcggtaatcgggtacgcattgcggtgcgagacaccgggcacggcatcgatccaaaagtcattgagcgggtcgaagcgaacgaaatgccgggcaataaaattggtctgctgaatgtccatcatcgcgtgaagttattgtatggcgaggggctgcatatccgccgcctggaaccaggaacggaaattgcgttttacattcctaaccaacgcaccccagtcgcctcacaggctacgttattgctttga

SEQ ID NO: 262065 - DNA, 735 bp, Klebsiella pneumoniae
gtgaaagtcatcattgttgaagacgaattcctggcacaacaggaactgagctggctaattaaagagcacagccagatggagattgtcggcacctttgacgacggtctggacgtgttgaagtttttgcagcataaccgcgtcgacgccatttttctggatatcaatattccgtcgctggatggcgtgttgctggcgcaaaacatcagccagttcgcccataaaccgtttattgtgtttatcaccgcatggaaagaacatgcggtagaagcgtttgaactggaggcgtttgactacattctcaaaccgtatcaggagtcacgcattaccgggatgctgcaaaaactggaagcagcctggcaacaacagcagaccagcagtacgcctgccgcgacggtaacgcgtgagaatgacaccattaatctggtgaaagatgagcgaatcattgtcacgccaattaacgatatctattacgccgaagcgcacgagaaaatgacctttgtctatacgcggcgtgaatcctacgtaatgccgatgaacattaccgagttttgcagcaagctgccgccgtcgcattttttccgctgccatcgctcattttgtgtcaatctgaacaaaatccgcgagatcgaaccgtggtttaataacacctatattctgcggctgaaagatctggattttgaagtgccggtcagccgcagcaaagttaaagaattccgccagttaatgcatctttaa

SEQ ID NO: 262066 - DNA, 858 bp, Klebsiella pneumoniae
atgaaagcaccaggcttgcccgccgatcaacaatttttcgccgatctgttcagcggcctggtgcttaacccgcaactactggggcgcgtctggtttgccagccagcctgcctcattgccagtgggcagtttatgtattgattttccccgtctggatatcgtgctacgcggcgaatacggcaatctgctggaagcaaagcagcaacgtatggtggaaggagaaatgctgtttattccggcacgcgcggctaatttaccggtcaacaacaaaccggtgatgctgttaagcctggtgttcgcaccgacctggcttggcttatcattttacgatagccgcaccacgtcgttgttacatcctgctcgccagatccaacttcccagcctgcaacgcggcgaaggtgaagcaatgcttactgccctcacccatcttagccgttcgccgctggagcagaatatcattcagccgctggtgttaagtttgctgcatctttgccgtaacgtggtgaatatgccgccgggcaattcgcagccgcgcggcgattttctctatcacagcatttgtaactgggttcaggataattatgcccagccgctcacccgtgagagcgtggcgcagttttttaatatcacgcccaatcatctgtcaaaactgtttgcgcagcatggaacaatgcgttttatcgaatatgtgcgttgggtgcgaatggcgaaggcgaggatgattttgcagaaatatcatctgtcgattcatgaagtggcacagcgttgcggttttccggacagcgactatttttgtcgcgttttccggcgtcagtttggcctgacgccgggagagtacagcgcccgttttcagggctaa

SEQ ID NO: 262067 - DNA, 2496 bp, Klebsiella pneumoniae
atgttaacgattcaatttctctgtcctttgcctaacggtattcatgctcgtccggcgtgggaacttaaagaacagtgcagccagtggcaaagcgaaatcacttttattaaccatcgccagaacgcaaaggccgatgcgaaaagttcgctggcgctgattggtaccggcactttatttaatgacagttgcagcctgaacattagcggcagcgatgaagagcaggcgcggcgcgtgctggaagagtacatccaggtgcgctttatcgacagcgacagcgtccagccaacgcaggcagaactgacggcgcatccgctgccgcgttcattaagccgtctgaatcctgatttattgtacggcaatgtgctggcaagcggcgtcggcgtgggtacgctgatcctgttacagagcgacagcctcgacagttaccgggcgatccccgccagtgcgcaagattccacccggctggagcacagcctggcaacgcttgccgagcaactgaaccagcagctgcgtgagcgtgacggcgaaagcaaaactatcctcagcgcccatttgtcgctgattcaggatgatgaatttgcaggcaatatccgtcgccttatggcagaacagcatcaggggctgggggcggcgatcatcagcaatatggagcaggtttgcgccaaactatctgcttctgccagcgattatctgcgcgagcgggtcagcgacattcgcgatatcagcgaacagttgctgcatatcacctggccggaactgaagccgcgcaacaatctggtgctggaaaaaccgactattctggtggccgaggatttaaccccaagccagtttttgagcctcgatttaaaaaatcttgcgggcatgattctggagaaaaccgggcgcacctcgcataccctgattctggcccgtgcctcggcgatcccggtactgagtggcttgccgctggatgcgatcgcgcgctatgccgggcaaccggcagtgcttgacgcccagtgcggcgtgctggcgattaaccctgatgacgcggtgagcggttattatcaggtcgcgcagacgctggcggataaacgccaaaaacaacaggcgcaggccgccgcgcagctggcctattcccgtgataacaagcgtattgatattgcggcgaatatcggcaccgctctggaagcgccaggcgcgtttgccaacggcgcggaaggtgttgggctgttccgtactgaaatgctctatatggatcgcgacagcgcgccggacgagcaggagcaatttgaagcctaccagcaggtgctactggcggcgggcgacaagccgattatcttccgcacgatggacatcggcggcgataaaagcattccttatctgaatattccccaggaagagaacccgttcctcggctatcgcgcggtacgtatttacccggaatttgcgggcctgttccgcactcaactgcgggccattttgcgcgccgccagtttcggcaacgcccagttgatgatcccaatggttcacagcctcgatcagatcttatgggtgaagggcgagatccaaaaagcgatcgttgagcttaagcgcgatggcctgcgtcatgcagagacgattacgctgggtatcatggtggaagtgccgtcggtgtgctacatcatcgatcacttctgcgatgaggtagatttcttcagtatcggctccaacgatatgacccagtatctgtatgcggtcgatcgtaataacccgcgcgtatcgccgctgtataacccgattacgccatcgttcctgcgcatgttgcagcagattattaccactgcgcatcagcggggtaaatgggtaggcatttgcggtgaactgggcggtgaaagccgttatctgccgctactgcttgggctgggcctggacgagttaagtatgagtagcccgcgcattccggcggtgaaaagccagcttcgtcaactggatagcgaggcgtgtcgggaactggcgcgtcaggcatgtgaatgccgcagcgcgcaggaaattgaagcgttactcaccgcctttacgccggaagaagacgttcgcccactgctggcgctggagaatatctttgttgatcagtcctttagcaataaagagcaggcgatccagttcctgtgcggtaacctcggcgttaacgggcgcactgaacatccgttcgagctggaagaggatgtctggcagcgggaagagattgttaccaccggcgttggttttggcgtagcgatcccgcacaccaaatctcagtggatccgtcattccagtatcagcattgcccggctggtgaaaccggttgactggcagtcagaaatgggcgaagtcgaactggtgatcatgctgacactgggcgctaacgaagggatgaatcatgtgaaagtcttctcgcagctggcgcgtaaactggtgaataaaaacttccgccagtcgctgttcgccgcgcaagatgcgcaaagcatcctgacgctgctggaaacggaattaaccttctga

SEQ ID NO: 262068 - DNA, 1038 bp, Klebsiella pneumoniae
atggatttatcgttattaaaagcgttgagcgaggcagatgcgatcgcctcctcggaacaggaagtgcggcagatcctgctggaagaagcggatcgcctgcaaaaagaagtgcgatttgacggcctgggatcggtgctgatccgcctcaatgaatcgacaggtccgaaggtgatgatctgtgcgcatatggatgaagtgggatttatggtgcgcagcatctcccgcgaaggggcgatcgatgtgttgccggttggcaatgtacgcatggctgcccgccagcttcagtcggtgcgtatcactacccgtgaagagtgcaaaattccaggcctgcttgacggcgaccggcaggggaatgacgtcagcgccatgcgcgtggacattggtgcgcgctcgtatgacgaagtgatgcaggcgggaattcgtccaggcgatcgcgtcacctttgatacaacttttcaggttctccctcaccagcgggtgatggggaaagcctttgatgatcgcctcggttgctatctgctggtgacgttactacgtgagctgcacgacgccgaactgcctgcggaggtgtggctggtggccagctccagcgaagaggtgggattacgcggcgggcaaaccgctacccgtgcggtttcaccggacgttgcgattgtgctggataccgcctgctgggcgaaaaactttgattatggcgcggctaaccatcgccagattggtaacggcccgatgctggtattaagcgacaagtcgctgattgcgccgccaaaacttaccgcgtggattgaaaccgtggcggcagaaattggcgtgccgttacaggcagatatgttcagcaacggcggcacggacggtggagcggtgcatttaactgacaccggcgtacccacggtggtgatggggccagcgacgcgccacggacattgtgcggcatcgattgccgattgccgcgacattttgcagatgcagcaacttttatctgcccttattcaacgtcttacccgtgagacggttgttcaactgacggatttcagatga

SEQ ID NO: 262069 - DNA, 1086 bp, Klebsiella pneumoniae
atgacattactcgcttcgctgcgcgactggcttaaggcgcaacaactggatgcggtgcttctctcctcacggcagaacaaacagccgcatctggggatctccaccggatcaggctatgtggtgattagccgtgaaagtgcgcacattctggtggactcgcgctattacgcggatgtagaagcccgcacgcaaggttaccagctgcatttgcttgacgcgacgcacaagcttacaaccatcgccaggcaaatcattgccgatgagcagttgcaaacgctcggttttgagggccagcaggtgagttgggaaaccgcgcaccgctggcagtctgaactcaatgcgaaactggtaagcgccacgccggatgtgctgcggcaaatcaaaacgccagaggaggtggagaaaatccgcctcgcctgtgggattgccgatcgcggtgcagagcatattcgccgctttattcaggcgggaatgagcgagtgcgagatagccgctgaactggagtggtttatgcgccagcagggcgcagaaaaagcctcttttgacaccattgtcgccagcggctggcgtggggcgctgccgcacggcaaagccagcgacaagattgttacagcgggcgagtttgtcactctcgatttcggtgcgctctatcaggggtactgctctgatatgacgcgcaccttgctggtgaatggcgaaggggtgagcgccgaatctcacccgctgtttaacgtctatcaaattgtcctgcaggcacagctcgcagcaatctccgcgattcgccccggcgtgcgctgccagcaggttgacgacgccgcgcgccgggtgattaccgaggctggatttggtgacaatttcggtcataacaccggtcatgctatcggtattgaagtccatgaggatccgcgtttttcaccgcgggacaccacgacgctacagccaggcatgttactgaccgtggagccggggatttatttgccagggcaagggggcgtgcgcatcgaggatgttgtgctggtcaccccgcaaggcgcagaagtgctctacgccatgccgaaaacagtgttgctcacgggagaggcataa

SEQ ID NO: 262070 - DNA, 1248 bp, Klebsiella pneumoniae
atggccattaaaaaacgcagtgcaaccgttgtgcctggcgcatccggtgcggcagcggcaattaagaatccgcaggcctctaaaaccagcttctggggtgaactcccgcagcatgtgatgtcagggatttcacgcatggtgccgaccttaattatgggcggtgtgatcctcgctttcagccagctgattgcttatagctggcttaaaattcctgctgatatcggcatcatggatgctcttaatagcgggaaattctccggtttcgacctctccttacttaaatttgcctggctgtcgcagtccttcggcggcgtgttgtttggttttgccattccgatgtttgctgcttttgtggcaaactctatcggtggcaaactggcgttcccggcgggttttatcggcggcttgatgtctacccagccgacgcaactgctgaacttcgatcccagcactatgcaatgggcgacctcttcgccggtgccgtccaccttcattggtgcgctgataatatctatcgttgcgggttacctcgtgaaatggatgaaccagaaaatccagttaccggatttcctgttagcgttcaaaaccacatttttgctaccgattctttccgccatttttgtcatgctggcgatgtactacgtcatcaccccctttggtggctggatcaacggcggtatccgtaccgtgctgaccgctgcaggtgagaagggcgcgctgatgtacgcgatggggatcgccgcggcgacagcaatcgaccttggtggcccgatcaacaaagccgcaggtttcgttgccttcagctttaccacggaccacgtattaccggtcaccgcacgttctatcgctatcgttattccgccgattggtctgggtctggcgaccattattgaccgtcgtttaaccggcaaacgcctgttcaacgctcagctttatccgcagggtaaaaccgccatgttccttgcctttatggggatcagtgaaggtgcgattccgtttgcgctggaaagccccatcaccgccattccgtcctatatggttggcgcgattgtcggctcaaccgctgcagtctggctgggcgcagtgcaatggttcccggaatccgctatctgggcatggccactggtcactaacctcggcgtctacatggcggggatcgcgctgggagcagtcattactgcgctgatggtggtgttcctgcgtctgatgatgttccgtaaaggcaaattgttaatcgatagcctgtaa

SEQ ID NO: 262071 - DNA, 327 bp, Klebsiella pneumoniae
atgagtaagaaactgattgccttatgtgcctgcccaatgggcctggctcacacctttatggccgctcaggcgctggaagaagcggcggtagaagccggttatgaagtgaaaattgaaacccagggtgcggacggtatccagaatcgtctgaccgcgcaggatatcgccgaagcgaccatcatcatccactccgtggcggttaccccggaagataacgaacgtttcgaatcacgcgacgtttatgaaatcactttgcaggacgcaattaaaaacgctgcgggcatcatcaaagaaatcgaagagatgattgcctctgaacaacagtaa

SEQ ID NO: 262072 - DNA, 966 bp, Klebsiella pneumoniae
atgacaaagtatgcattagtcggtgatgtgggcggcaccaacgcacgtcttgctctgtgtgatattgccagtggtgaaatctcgcaggctaagacctattcagggcttgattaccccagcctcgaagcggtcattcgcgtttatcttgaagaacataaggtcgaggtgaaagacggctgtattgccatcgcttgcccaattaccggtgactgggtggcaatgaccaaccatacctgggcgttctcaattgccgaaatgaaaaagaatctcggttttagccatctggaaattattaacgattttaccgctgtatcgatggcgatcccgatgctgaaaaaagagcatctgattcagtttggtggcgcagaaccggtagaaggtaagcctattgcggtttacggtgccggaacggggctaggggttgcgcatctggtccatgtcgataagcgttggataagcttgccaggcgaaggcggtcacgttgattttgcgccgaatagtgaagaagaggccattatcctcgaaatattgcgtgcggaaattggccatgtttcggcggaacgtgtgctttctggccctgggctggtgaatttgtatcgcgcaattgtgaaagccgacaaccgcctgccagaaaatctcaagccaaaagatattaccgaacgcgcgctggctgacagctgcaccgattgccgccgcgcgttgtcgctgttttgcgtcattatgggccgttttggcggcaatctggcgctcaatctcgggacatttggcggcgtgtttattgcgggcggtatcgtgccgcgcttccttgagttcttcaaagcctccggtttccgtgccgcatttgaagataaagggcgctttaaagaatatgtccatgatattccggtgtatctcatcgtccatgacaatccgggccttctcggttccggcgcacatttacgccagaccttaggccacattctgtaa

SEQ ID NO: 262073 - DNA, 1170 bp, Klebsiella pneumoniae
atgctccatccgcgagccagaaccatgttgttattatcgctccccgccgtggcaattgggattgcgtccagtcttattctgattgtggtgatgaaaatcgcctcggtattacagaatttgctctggcaacgactgccgggaactctggggatagcccaggattcacctttctggatcatcgccatattaacgctaacaggtattgcggtggggttggttatccgtttcagccaggggcatgccggaccagaccccgcctgtgaaccgctgatcggcgcaccagttccgccctctgcgctaccaggacttatcgtagcattaattcttggtcttgctggtggcgtcagcctggggccagaacatccgatcatgaccgtcaatatcgcccttgcggttgccattggcgctcgtctgttaccgcgtgtcaaccgaatggagtggactattttagcctctgccggaaccatcggcgcgctgtttggcacacctgttgcggcggcgttgatattttcgcaaaccttaaatggtagtagtgaagttccgctatgggatcgtctttttgcgccgttaatggcggcagcagctggtgcacttactaccggattatttttccatccccatttttcactgcccattgcgcattacggacaaatggaaatgaccgatattctcagcggtgcaattgtcgcggcgattgccatcgcagcagggatggtcgccgtatggtgcttaccacggttgcacgcgatgatgcatcaaatgaaaaatccggtgctcgtgctgggtattggcggatttattctcggtattctgggggttatgggtggaccagtttctctgtttaaagggctggatgagatgcagcagatggtggcaaatcaggctttcagcaccagcgattactttttgctggcggtaattaaacttgccgccctggtcgttgctgccgccagtggctttcgcggtgggcgaatcttcccggcagtgtttgcacgtccccgccgttccagcggcaataaccgtttcctgcgctattctcggcatcgtgctggtggtaacacgcgatggctggttaagtctttttatggcggcagtcgttgtacccaataccacattgctaccgctgctctgtatcgtcatgcttccggcatggctgttattagcaggtaa

SEQ ID NO: 262074 - DNA, 327 bp, Klebsiella pneumoniae
atgttcaggtcactgtttctggcggccgccctgatggcatttaccccgcttgcggcaaacgcaggtgaaatcaccctactgccatcaatcaaattacaaattggcgatcgcgatcattacggtaattactgggacggtggtcactggcgcgaccgtgactactggcatcgcaattatgaatggcgtaagaaccgctggtggcgtcatgataatggctaccatcgtggctgggataagcgtaaagcgtatgagcgtggctatcgtgaaggctggcgcgatcgtgacgatcatcgcggaaaaggccgcggacatggacaccgccattaa

SEQ ID NO: 262075 - DNA, 246 bp, Klebsiella pneumoniae
atgctgccgtcatttattgtcattctgatgggattagatccgacacggattctggttatgagtcaggtgctgttaagttttggtatcgctctggcgctggttccactgctgatttttaccagtgacagtaagttgatgggcgatctggtgaacagtaaacgcgtaaaacagacaggctgggtgattgtggtgctggtagtggcgctgaatatctggttgttggtggggacggcgctggggctatag

SEQ ID NO: 262076 - DNA, 708 bp, Klebsiella pneumoniae
gtggtcatcggtccttttatcaacgcaagtgcagtcttactgggtggcgttctcggtgcactccttagtcaacgcttaccggaacgtatccgcgtctccatgacatcaatttttggtctggcatcgctggggattggtattttactggtggtgaaatgcgccaaccttccggcgatggttttagcaaccttactcggtgcattaatcggcgaaatgtgtctgctggaaaaaggcgtcaataccgcggtcaccaaagcacaaaatctgtttcgccactcacgtaagaagccagcgcatgaatcttttattcagaattatgtcgcgattattgtcctgttttgcgccagcggcaccgggatcttcggggcgatgaacgaagggatgaccggcgatccgagtattttaatcgccaagtcatttctcgatttctttacggcgatgatcttcgcctgctcgttgggtattgcggtgtcggtgattagcattccattactgatcatccagttaacgctggcgtgggctgccgcgctgatattaccgctgaccacaccgtcgatgatggcagacttcagcgctgtaggcggtttattgctgctggcaaccggattacgcatctgcggcattaaaatgttcccggtggtcaacatgcttccagcactccttctggcaatgccgctttccgccgcctggaccgcctggtttgcctga

SEQ ID NO: 262077 - DNA, 2136 bp, Klebsiella pneumoniae
atgaaatcaatgaatattgccgccagtagtgaactggtatcccgactttctactcatcgccgcgtggtggcgttgggagatactgattttacggacgtcgcggcagtcgtcattaccgctgcggatagtcgcagtggcattcttgcgttgcttaagcgcaccggttttcatctaccggtgtttttgtattccgaacatgctgttgaattacctgcgggcgttacggcggtaatcaacggcaacgcgcagcagtggctggagctggaatccgcagcctgtcagtatgaagagaatttgctgccaccgttttatgacacgctgacgcagtacgttgagatgggcaacagcacctttgcttgccctggacatcaacatggtgcgttctttaaaaagcatcctgccggacgccatttttacgatttctttggcgagaacatctttcgcgccgatatgtgtaacgctgacgtaaaattgggcgatctgcttattcatgaaggttcggcgaaggatgcacagaaattcgcagccaaagtctttcatgccgataaaacctattttgtgctgaacggcacatcggcagcgaataaagtggtgacgaatgcgctgttaacgcgtggcgatctggtgctcttcgaccgtaacaaccataagtcgaatcatcacggcgcgctgattcaggcgggggcgacgccggtctatctggaagcttcacgtaacccgtttggtttcattggcggtattgatgcgcactgttttaatgaagagtatctgcgccagcaaattcgcgacgttgcgccagaaaaagccgacctgccgcgcccgtttcgcctggcgattattcagctgggaacctatgacggcactgtctataacgcccgtcaggtgatcgataccgttgggcatctgtgtgattacattctgtttgattccgcgtgggtcggttacgaacagtttatcccgatgatggcggatagctcgccgctgctgttagaacttaacgaaaacgatccggggatctttgtgacccagtcggtgcacaaacagcaggcgggattctcacagacgtcacagatccataaaaaagataatcatatccgcggacaggcgcgtttttgcccgcataagcggttgaataatgcctttatgctccatgcttctaccagcccgttctatccgctgtttgctgcactggacgttaacgccaaaattcatgaaggggagagtgggcgtcggctgtgggcggagtgtgttgagatagggattgaagcccggaaggcgattcttgcgcgctgtaagctgttccgcccgtttattccacccgttgttgatggcaaattgtggcaggattatccgacgtcagtgttagccagcgaccgtcgttttttcagttttgagccgggggcgaagtggcacggctttgaaggatatgccgcggatcagtattttgttgatccgtgcaagctgttactcactacaccaggtatcaatgccgaaaccggcgaatatagcgactttggcgttccggcgacgattctggcgcactatctgcgtgagaacggcattgtgccggagaagtgcgatctcaactccattctgttcttattaactccggcggaaagccacgagaagctggcacaactggtggcgatgctggcgcaatttgaacagcatattgaggatgacttaccgctggctgaggtgttgccgagcgtttataacaagtatccggtgcgctatcgcgactacaccctgcgcaagttgtgtcaggagatgcacgatctgtatgtcagtttcgacgtcaaagacctacaaaaagcgatgttccgccagcagagtttcccgtcagtggtgatgaacccccaggatgcgcatagcgcttatattcgcggtgaagtggagttggtgcggattcgtgatgccgaagggcgaattgcggcagaaggggcgttgccttatccaccaggcgtgctttgcgtggtacccggagaagtctggggtggggcggttcaacgttatttccttgcactggaagaaggggtgaatttgttgccgggattttcgccggagctgcaaggtgtctatagcgaaaccgatgcggatggcatgaaacggttgtacggttatgtgttgaagtaa

SEQ ID NO: 262078 - DNA, 1257 bp, Klebsiella pneumoniae
atgaatcttaagctgcagctgaaaatcctctcttttctgcagttctgtctgtggggaagttggctgacgaccctcggctcctatatgtttgttaccctgaagtttgacggtgcttctattggcgcagtttatagttcactgggtatcgccgcggtctttatgcctgcgctgctggggattgtggccgacaaatggttaagtgcgaaatgggtatatgccatttgccacaccattggcgctatcacgctgttcatggcggcacaggtcacgacgccggaagcgatgttccttgtgatattgattaactcgtttgcttatatgccaacgcttgggttaatcaacaccatctcttactatcgcctgcaaaatgccgggatggatatcgttactgacttcccgccaatccgtatctggggcaccatcggctttatcatggcaatgtgggtggtgagcctgtctggcttcgaattaagccacatgcagctgtatattggcgcagcactttccgccattctggttctgtttaccctgactctgccgcatattccggttgctaaacagcaagcgaatcaaagctggacaaccctgctgggcctcgatgcattcgcgctgtttaaaaacaagcgtatggcaatcttcttcatcttctcaatgctgctgggcgcggaactgcagattaccaacatgttcggtaacaccttcctgcacagcttcgacaaagatccgatgtttgccagcagcttcatcgtgcagcatgcgtcaatcatcatgtcgatttcgcagatctctgaaaccctgttcattctgaccatcccgttcttcttaagccgctacggcattaagaacgtaatgatgatcagtatcgtggcgtggatcctgcgttttgcgctgtttgcttacggtgacccgacgccgttcggcaccgtactgctggttctgtcgatgattgtttacggctgcgcattcgacttcttcaacatctctggttcggtgtttgtcgaaaaagaagttagcccggcaattcgcgccagcgcgcaggggatgttcctgatgatgaccaacggcttcggctgtatcctcggcggcatcgtgagcggtaaagtggttgagatgtacacccaaaacggcattaccgactggcagaccgtatggctgattttcgcaggttactccgtggttctggccttcgcgttcatggcgatgttcaaatataaacacgttcgtgtcccgacaggtacacagacggttagccactaa

SEQ ID NO: 262079 - DNA, 276 bp, Klebsiella pneumoniae
atgagcagaacgattttttgtactttcctgcaacgtgaagcagaaggtcaggattttcagctgtaccccggcgagctgggaaaacgcatctataacgagatctccaaagaagcctgggcgcagtggcagcacaaacaaaccatgctgattaatgaaaagaaactcaacatgatgaatgccgagcaccgcaagctgctggaacaggagatggtcaacttcctgttcgagggtaaagaggtgcatatcgagggctatacgccggaagataaaaaataa

SEQ ID NO: 262080 - DNA, 1053 bp, Klebsiella pneumoniae
atgcaagcgtcgcaattttcagcccaggttctggactggtacgataaatacgggcggaaaacgctgccctggcaaattgacaagacgccctacaaagtatggctctcagaagtgatgttgcaacaaactcaggttgcgaccgttatcccctattttgaacgctttatggcgcgcttcccaacggtgaccgatctcgccaatgcgccgctcgacgaagttctccacttgtggaccgggcttggctattacgcccgcgcgcgcaacctacataaagcggcacaacaagtggcggccttacacggcggtaaattcccggaaacctttgaggaagttgcagcactgccaggcgtcgggcgttccaccgcaggcgcgattctctcgctttctctgggtaagcactttccgattctcgacggtaacgtcaaacgcgtgctggcgcgctgctatgctgtaagcggctggcctgggaaaaaagaggtcgagaataaactatggagtttgagcgagcaggtgacgcccgcggttggcgtggaacggtttaaccaggcgatgatggatttgggcgcgatgatttgtacgcgctctaagccgaaatgttcgctctgtccgctacaaaacggatgtattgccgccgccaacaatagctggtcgctttatccgggcaaaaaaccgaaacagacgctgccagagcgcaccggctactttttgctgttacagcacgaagatgaagtattgctggcgcagcgtccgccgagcggattgtggggcggtttatactgtttcccgcagtttgccgatgaagaaagtttgcgactatggctggcgcaacggcagattgctgccgataacctgacgcaactgaccgcgtttcggcataccttcagccatttccacttagatattgtgcctatgtggcttcccgtgtcgtcattcaccggctgcatggatgaagacaatgcgctctggtataacttagcgcaaccgccgtcagttggcctggcggctcccgtggagcgtttgttacagcagttacgcactggcgcgccggtttag

SEQ ID NO: 262081 - DNA, 720 bp, Klebsiella pneumoniae
atgaaaaacgacgtcatctcaccggaatttgatgaaaacggccgcccgctgcgccgtatccgtagttttgtgcgccgccaggggcgactgaccaaaggccaggaacatgcgctggaaaactactggccggtgatgggcgttgagttcagcgaagatatgctggatttccctgcgctttttggccgtgaagcgccagtgacgcttgagattggtttcggcatgggggcgtcgctggtggcaatggctaaagatcgccctgagcaggacttcctcggcattgaagtgcattcaccgggcgttggtgcgtgcctggcttctgcgcatgaagagggcttaagcaacctgcgcgtgatgtgtcacgatgcggttgaagtgctacacaaaatgattcctgacaattcattgcgcatggtacagctctttttccctgacccgtggcacaaagcgcgccataataaacgccgtatcgttcaggtgccgtttgccgaactggtaaaaagcaaactgcaactggggggcgtattccatatggcgaccgactgggaaccttatgcggaacatatgcttgaagtgatgtcttctattgacggttataaaaacctgtcagagagcaatgattacgtaccgcgtccggcatcacgtccggtgacgaaatttgaacaacgtggtcatcgtcttggtcacggagtatgggacttaatgttcgagagggtgaaataa

SEQ ID NO: 262082 - DNA, 720 bp, Klebsiella pneumoniae
atgatgcgcaaaatgctgctggcggcagcactttcagtgacggcaatgaccgctcacgccgactaccagtgcagcgtcacgccgcgtgacgatgtgattgtcagcccgcaaaccgtgcaggtgaagggcgaaaacggcaatctggtgatcacgccagacggcaacgtgatgtataacggtaagcaatattccctgaatgccgcccagcgcgagcaggcgaaggattatcaggctgaactccgtagcaccctgccgtggattgatgaaggcgcgaaaagccgcgtcgaaaaagcccgtattgcgctggataaaattatcgttcaggagatgggcgaaagcagcaaaatgcgcagccgtctgaccaaacttgatgcgcagctgaaagagcagatgaaccgcattatcgaaacgcgcagcgatggcctgacgttccactataaagccattgatcaggttcgcgccgaaggccagcaattagtgaatcaggcaatgggcggaattttacaggacagcattaatgaaatgggcgcgaaagcggtgctgaaaagcggtggtaacccattacagaatgtgctgggaagcctgggcggtctgcaatcctcaatccaaaccgaatggaaaaagcaggaaaaagatttccaacagtttggcaaagatgtttgtagccgcgttgtgactctggaagatagtcgcaaagccctggtcgggaatttaaaataa

SEQ ID NO: 262083 - DNA, 1047 bp, Klebsiella pneumoniae
atggagtttttcaaaaagacggcacttgccgcactggttatgggttttagtggtgcagcattggcattacccaatatcaccattttagcaaccggcgggaccattgccggtggtggtgactccgcaaccaaatctaactacacagcgggtaaagttggcgtagaaaatctggttaatgcggtgccgcaactgaaggacattgcgaacgttaaaggcgagcaggtagtgaatatcggctcccaggacatgaacgataatgtctggctgacactggcgaaaaaaattaacaccgactgcgataaaaccgacggcttcgtcattacccacggtaccgacacgatggaagaaactgcttacttcctcgacctgacggtaaaatgcgacaaaccggtggtgatggtcggtgcaatgcgcccgtccacgtccatgagcgcagacggtccattcaacctgtataacgcggtagtgaccgcagctgataaagcctccgctaatcgtggcgtactggtagtgatgaacgacaccgtgcttgatggccgtgatgtcaccaaaaccaacaccaccgacgtagcgaccttcaagtctgttaactacggtcctctgggatacattcacaacggtaagattgactaccaacgtaccccggcacgtaagcacaccagcgacacgccgttcgatgtatctaagctgaatgaactgccgaaagtcggcattgtttataactacgctaacgcatccgatcttccggctaaagcactggtagatgcgggctatgatggcatcgttagcgctggtgtgggtaatggtaacctgtataaatccgtgttcgacactctggcgaccgccgcgaaaaacggcactgcagtagtgcgttcttcccgcgtaccgacgggcgctaccactcaggatgccgaagtggatgatgcgaaatacggcttcgtcgcctctggcacgttgaacccgcaaaaagcgcgcgttctgctgcaactggctctgacgcaaaccaaagatccgcagcagatccagcagatcttcaatcagtactaa

SEQ ID NO: 262084 - DNA, 1008 bp, Klebsiella pneumoniae
gtgaaaaagcaatggattgttggcacggcgctgtttatgttgatgactggtaatgtctgggcagatggcgaatcgccaactgaaaatatcttaaaagatcaattcaaaaagcagtatcacggcattctcaagcttgatgccatcaccttaaaaaatcttgatgctaagggtaatcaggccacctggtcagcggaaggcgatgtctcttccagtgacgatctctatacctgggtcggtcagttggcagattacgaactgctcgaacagacctggacgaaagataaaccggtaaaattctcggcgatgttaaccagtaaaggaacgcccgcgtctggctggtcggtgaacttttactcttttcaggcggcagccagcgatcgtgggcgggtggtcgacgatatcaaaacgaataataaatatctgatcgtgaatagcgaagatttcaattatcgctttagtcagcttgagactgcgttgaatacccagaagaactcgattcctgcgctggaaaaggaagtgaaagcgcttgataagcaaatggtggcggcgcagaaagcagcggatgcatattggggaaaagatgcaaatggtaagcaaatgacccgcgaagacgcctttaaaaaaattcaccaacagcgtgatgagtttaataaacagaacgatagcgaggcgttcgcggttaaatatgacaaagaggtttatcaaccggcgattgcggcatgtcataaacagagtgaagagtgttatgaagtgccgattcagcagaagcgagatttcgatatcaacgaacaacggcgacagacttttctgcaatcacaaaaacttacccgtaaattgcaggatgactggataacgctcgaaaaagggcaatatccgttaacgatgaaagtttcagaaataaacagtaaaaaagtcgcgattttgatgaaaattgacgatatcaaccaggctaatgaacgctggaaaaaagataccgaacaactgcggcgcaatggggtgattaagtaa

SEQ ID NO: 262085 - DNA, 411 bp, Klebsiella pneumoniae
atgaccaatgctgatattccttatatgatcagcgacgcgttgatggggatttctgataacccactggtcatattgctgctgattaatatcgtcttattaattgtcggcatctttatggacatgacaccggctgtactaatcttcacaccaatcttcttgccgattgcacaagagctgggaatggatccggtacatttcggtattatgatggtggctaacctttgtattgggctgttaacaccgccggtgggtagtgcgctatttgttggttgttctatttcaggtgtgaagattcaacatttgatcaaatcattgctgccattttatgccgcattgttaatcgcgttgatgatgatcacttacatcccgcaaatatccttgttcattccacagctactagggctaatgtaa

SEQ ID NO: 262086 - DNA, 504 bp, Klebsiella pneumoniae; identical to SEQ ID NO: 9589

SEQ ID NO: 262087 - DNA, 1137 bp, Klebsiella pneumoniae
atggttaaattaccgccgctgagtctctacattcacatcccgtggtgcgtgcagaaatgcccgtactgcgatttcaactctcacgcgttgaaaggagaagtgccgcacgacgattatgttcagcatctgcttagcgatctggacaacgatgtggcttacgctcagggccgtgaagtaaagacaatctttattggcggtggtacgccgagcctgctttccggcccggcgatgcaaacgctgctggacggcgtgcgtgcgcgtttgccgctggcagcggatgcagaaattactatggaagcgaaccctggtacggtagaagccgatcgctttgtcgattatcagcgtgctggtgtgaaccgcatctctattggtgtgcaaagttttagcgaagaaaagctgaaacgacttgggcgcattcatggcccgcaagaagcgaaacgagctgcgaagctggcgagcggtttagggttacgtagctttaaccttgatttgatgcatgggctgccggatcaatcactggaagaggcgctaggcgatctgcgccaggctattgaactgaatccgccgcatctttcctggtatcaactgaccatcgaacccaatacgctgtttggctctcgcccgccggtgctgccggacgacgatgcgttgtgggatatattcgaacaggggcatcagttattaaccgcagcgggctatcagcagtatgaaacatccgcttacgccaaaccaggttatcagtgccagcacaatctcaactactggcgttttggcgactacatcggtattggctgcggcgcgcacggcaaagtgaccttcccggatgggcgcattctgcgtaccaccaaaacgcgtcatccgcgtggttttatgcagggaagatatctggaaagccagcgtgatgtcgaagctgcagataagccgtttgagttctttatgaatcgcttccgtctgctggaagccgcgccgcgcgtggagtttagccagtatactggcctttctgaagaagttattcgctctcagttagacgaggccatcgctcagggttatctcacagaatgtgcggattactggcagataacggaacatggtaaattattcttaaactcacttcttgaattattcctcgctgagtaa

SEQ ID NO: 262088 - DNA, 291 bp, Klebsiella pneumoniae; identical to SEQ ID NO: 29313

SEQ ID NO: 262089 - DNA, 567 bp, Klebsiella pneumoniae
atgaatacgttgactttcctgctttcaacggtcattgagctgtataccatggtgctgttattacgcatctggatgcagtgggctcattgtgatttttacaaccccttctcacagtttgtggtgaaggtgacgcagccgattatcggaccactgcgccgcgttattccggcaatgggaccgattgacagcgcctcgctgctggttgcctatattctcagttttatcaaagccatcgtgctgtttaaagtggtgaccttcctgccaatcatctggattgccggtttattgattctgctgaaaaccatcggcctgctgattttctgggtcctgctggtgatggcgattatgagctgggtaagccagggtcgtagtccgattgaatacgtgctgattcagctggccgatccgctgctgcgcccgattcgccgcctgctaccggcaatgggtgggattgatttctcgccgatgatcctcgttctgctgctgtatgtcatcaatatgggtgtcgcagaagtattacaggcaaccggaaacatgctgctgccggggctgtggatggcgttatga

SEQ ID NO: 262090 - DNA, 705 bp, Klebsiella pneumoniae
atgaacgatattgcgcataacctggcacaggtccgggacaaaatctcagcggctgcaacgcgttgcggccgttctccagaagaaattacgctgcttgcagtcagtaaaacaaaacctgcgagcgccatcgcagaagccattgatgccgggcagcgtcaatttggtgaaaactacgttcaggaaggggtagataaaattcgccactttcaggaactgggcataacaggattagaatggcattttattggcccgttgcagtctaataaaagccgcctggtggcagagcatttcgactggtgtcataccatcgaccgtttgcgcattgctacccgcctcaacgatcagcgcccggcagaacttccccctcttaacgtactgattcaaattaatattagtgatgaaaacagtaagtccgggattcaactggcagaactggacgagctggcagctgcggtcgctgaactaccgcgtttacgtctgcgcgggctgatggcaatccctgcgcctgagtcagaatatgtaaggcagtttgaagttgcacgccaaatggctgtagcatttgccggactgaaaacgcgctacccgcatatcgacacgctctctctgggaatgtcggacgatatggaagccgctattgcggcaggtagcacgatggttcgtatcggcactgcaatttttggtgcgcgtgattactctaaaaaataa

SEQ ID NO: 262091 - DNA, 981 bp, Klebsiella pneumoniae
atgaatatggaagaaattgtggcccttagtgtaaagcataacgtctcggatctacacctgtgcagcgcctggcccgcacgatggcgtattcgcgggcgaatggaagctgtgccgtttgatgcgccggacgtcgaagagctactgcgggagtggctggatgacgatcagcgggcaatattgctggagaatggtcagctggattttgctgtgtcgctggcggaaaaccagcggttgcgtggcagtgcgttcgcgcaacggcaaggtatttctctggcattacggttgttaccttcgcactgtccacagctcgaacagcttggtgcgccaccggtattgccggaattactcaagagcgagaatggcctgattctggtgacgggggcgacggggagcggcaaatctaccacgctggcggcgatggttggctatctcaatcaacatgccgatgcgcatattctgacgctggaagatcctgttgaatatctctatgccagccagcgatgtttgatccagcagcgggagattggtttgcactgtatgacgttcgcatcgggattgcgtgccgcattgcgggaagatcccgatgtgattttgctcggagagctacgtgacagcgagacaatccgtctggcgcttacggcggcagaaaccgggcatttggtgctggcaacattacatacacgtggtgccgcgcaggcagttgagcgactggtggattcatttccggcgcaggaaaaagatcccgtacgtaatcaactggcgggtagtttacgggcagtgctgtcacaaaagctggaagtggataaacaggaaggacgcgtggcgctgtttgaattactgattaacactcccgcggtggggaatttgattcgcgaagggaaaacccaccagttgccgcatgttattcaaaccgggcagcaggtggggatgttaacgtttcagcagagttatcagcagcgggtgggggaaggacgtttgtga

SEQ ID NO: 262092 - DNA, 417 bp, Klebsiella pneumoniae
atgagtggaaccttactcgccttcgacttcggtaccaaaagcattggtgtagcggtcggccaacgcattaccggcaccgctcgcccattgcctgcaattaaagcacaggacggtacgccggactggaacattatcgagcgtttactgaaagagtggcagccggacgaaatcatcgtcggtttgccgctgaatatggacggcaccgaacagccgttaaccgccagagcgcgtaaatttgccaaccgtattcatggtcgtttcggtgttgaagtaaagctccatgacgagcgtcttagcaccgtggaggcacgttccggtctgtttgaacagggcggctatcgggcgctcaacaaaggcaaagttgactctgcctctgcggttattattctcgaaagctatttcgagcagggatattaa

SEQ ID NO: 262093 - DNA, 564 bp, Klebsiella pneumoniae
atgaatttacagcatcactttcttattgccatgcctgctctccaggatccgattttccgtcgttccgtggtctacatttgcgaacataataccaatggtgcaatggggatcatcgtcaacaagccgctggaaaatctcaaaattgaagggattctggaaaagctgaagatcacgccggagccgcgtgatgaatcaatccgtctggataaaccggttatgctcggtggtccgctggctgaagatcgcgggtttattttgcatactccgccctctaattttgcttccagcattcgcatttcagacaacacggtgatgaccacttcccgcgatgtgctggaaacgctcggcaccgataaacaaccgtctgacgtattggtggctctgggctatgcctcctgggagaaaggtcaactggaacaagaaattctcgataacgcgtggctaacggccccggcagatctgaatattctgttcaaaacgccgattgccgaccgctggcgcgatgcggcaaaactgattggtgtggatattctcaccatgcctggtgtggcaggacacgcctga

SEQ ID NO: 262094 - DNA, 732 bp, Klebsiella pneumoniae
atgcgtatcccccgcatttatcatcctgaaccactgaccagccattctcacatcgcgctttgcgaagatgccgccaaccatatcgggcgcgtactgcgcatggggccggggcaggcgttgcaattgtttgacggcagcaaccaggtctttgacgccgaaattaccagcgccagcaaaaaaagcgtggaagtgaaggtgctggaaggccagatcgacgatcgcgaatctccgctgcatattcacctcggtcaggtgatgtcgcgtggtgaaaaaatggaatttactatccagaaatcgatcgaactcggtgtaagcctcattacgccacttttttctgagcgctgcggcgttaaactggatagtgaacgtctgaacaagaagctccagcagtggcagaagattgcaattgctgcctgtgagcagtgtggtcgtaaccgggtgccggaaatccgtccagcgatggatctggaagcctggtgtgcagagcaggatgaaggactgaaactgaatcttcacccgcgcgccagtaacagcatcaatacgttgccgttaccggttgaacgcgtccgcctgctgattggcccggaaggcggtttatcggcagatgaaattgccatgactgcccgctatcaatttactgatatcctgttgggacctcgcgttttgcgtacagagacaactgcgctcaccgccattaccgcgctacaagtacgatttggcgatttgggctaa

SEQ ID NO: 262095 - DNA, 708 bp, Klebsiella pneumoniae
atgtaccgttatttgtctattgctgcggtggtactgagcgcagcattttccggtccggcgttggccgaaggtatcaatagtttttctcaggcgaaagccgcggcggtaaaagtccacgctgatgcgcccggtacgttttattgcggatgtaaaattaactggcagggcaaaaaaggcgttgttgatctgcaatcgtgcggctatcaggtgcgcaaaaatgaaaaccgcgccagccgcgtagagtgggaacacgtcgttcccgcctggcaattcggtcaccagcgccagtgctggcaggacggtggacgtaaaaactgcgctaaagatccggtctatcgcaagatggaaagcgatatgcataacctgcaaccgtcagtcggcgaggtgaatggcgatcgcggcaactttatgtacagccagtggaatggcggcgaaggccagtacggtcaatgcgccatgaaggtcgatttcaaagaaaaagctgccgaaccaccagcgcgtgcacgcggtgccattgcgcgcacctacttctatatgcgcgaccaatacaacctgacactctcccgccagcaaacgcagctgttcaacgcatggaacaagatgtatccggttaccgactgggagtgcgagcgtgatgaacgcatcgcgaaggtgcagggcaatcataacccgtatgtgcaacgcgcttgccaggcgcgaaagagctaa

SEQ ID NO: 262096 - DNA, 456 bp, Klebsiella pneumoniae
atgcgtcgcctgcgggaaaaactcgcccaggccaacctgaagctaggacgtaactacccggagccaaaactctcttacacccagcgcggcacctccgccggaacagcctggctggaaggctatgaaattcgcctcaatcccgttttgctgttggaaaacagtgaagcctttattgaagaagtggtgccgcacgaactggcacatttgctggtatggaaacatttcggccgcgtagcaccacatggcaaagagtggaagtggatgatggaaagcgtgctgggcgttcccgcccgtcgtacgcatcagtttgaactgcaatccgtgcgccgcaacaccttcccctaccgctgtaagtgccaggagcatcagcttaccgtacgccgccataatcgcgtagttcgtggcgaagccgtctatcgctgtgttcactgcggcgaacaactggttgcgaaataa

SEQ ID NO: 262097 - DNA, 1395 bp, Klebsiella pneumoniae
atgcctgacgctaaaaaacaggggcggtcaaacaaggcaatgacgtttttcgtctgcttccttgctgctctggcgggattactctttggcctggatatcggtgtaattgctggcgcactgccgtttattgcagatgaattccagattacttcgcacacgcaagaatgggtcgtaagctccatgatgttcggtgcggcagtcggtgcggtgggcagcggctggctctcctttaaactcgggcgcaaaaagagcctgatgatcggcgcaattttgtttgttgccggttcactgttctctgcggctgcgccaaacgttgaagtactgattctttcccgcgttctgctggggctggcggtgggtgtggcctcttataccgcaccactgtacctgtcagaaattgcgccggaaaaaattcgcggcagtatgatctcgatgtatcagttgatgatcactatcgggatcctcggtgcttatctttctgataccgccttcagctacaccggtgcatggcgctggatgctgggtgtgattatcatcccggcaattttgctgctgattggtgtcttcttcctgccagacagccctcgttggtttgccgccaaacgccgttttgttgatgccgaacgcgtgctgctgcgcctgcgtgacaccagcgcggaagcgaaacgtgaactggatgaaatccgtgaaagtttgcaggttaaacagagtggctgggcgctgtttaaagagaacagcaacttccgccgcgcggtgttccttggcgtactgttgcaggtaatgcagcaattcaccgggatgaacgtcatcatgtattacgcgccgaaaatcttcgaactggcgggttataccaacactaccgagcaaatgtgggggacggtgatcgtcggcctgactaacgtactcgccacctttatcgcaatcggccttgttgaccgctggggacgtaaaccaacgctaacgctgggcttcctggtgatggctgctggcatgggcgtactcggtacaatgatgcatatcggtatccactctccgtcggcgcagtatttcgctatcgccatgctgctgatgtttattgtcggttttgccatgagtgccggtccgctgatttgggtactgtgctccgaaattcagccgctgaaaggccgcgattttggcatcacctgctccaccgccaccaactggattgccaacatgatcgttggcgcaacgttcctgaccatgctcaacacgctgggtaacgccaacaccttctgggtgtatgcggctctgaacgtactgtttatcttgctgacattgtggctggtaccggaaaccaaacacgtttcgctggaacatattgaacgtaatctgatgaaaggtcgtaaactgcgcgaaatcggcgctcacgattaa

SEQ ID NO: 262098 - DNA, 942 bp, Klebsiella pneumoniae
atgacgttgacctccggctctaccggtttgccgaaagccgctgttcatacttatcaggcccatcttgccagtgcgcaaggtgtgttatcgctgataccgtttggcgagcacgatgactggttgctctctttaccgctgtttcacgtctccggtcagggaattatgtggcgctggttatacgctggtgcgcggatgacggtacgagataaacagccattggagcaaatgctggcaggctgtactcacgcttcactggtgccaacacaactctggcgtttgctggttaaccgtagttccgtttccctgaaagcggtgctacttggcggcgcggctatcccggtcgagttgacggaacaggcgcgcgagcaggggattcgttgcttttgcggctatggtctgaccgagtttgcctccacggtgtgtgcgaaagaagccgacggtctggcagacgttggttcgccgctgccgggtcgggaagtgaaaatcgttaatgatgaagtgtggctgcgggctgccagtatggctgaaggttactggcgtaacgggcaactggtggcactggttaatgacgaaggctggtacgctacgcgcgaccgcggtgagctgcataatggcaagctgaccattgtcgggcgtttagacaatctgttcttcagtggcggtgagggtattcagccggaagaagtcgagcgcgttattgctgcacatcctgcggttttgcaggtgtttatcgtccccgttgccgacaaggagtttggtcatcggccggtagcggtggtggagtatgaccagcaaaccgttgatcttagtgaatgggtgaaagataagctggcccgttttcagcaaccggtgcgttggttaacgctgccgcctgaactgaaaaacggcggcattaagatttcacgtcaggcgctaaaagagtgggtgcaacgccaggattaa

SEQ ID NO: 262099 - DNA, 267 bp, Klebsiella pneumoniae
atggaatggctggttaaaaagtcatgctgtgataaacaagataacagacatgtacttaagctttgtgatgctggtggcacgataaaaatgatcgccgaagtgaagagtgacttcgccgtgaaagtgggggatttactctcgcctttgcagaatgcgctttattgtattaatcgtgaaaagctgcatacggtgaaagtcctctcggcaagcagttatagccccgatgagtgggaacggcagtgtaaagtggcagggaaaactcagtaa

SEQ ID NO: 262100 - DNA, 387 bp, Klebsiella pneumoniae
atgggcctgatgtggggattattcagcgtcattatcgcctccgctgcgcaattaagcctgggttttgcggcgagtcatctgccgccgatgacgcacttatgggattttatcgcggcgctgttagcttttggcctggatgcccggatactgttactcgggctgctgggttatctgctttccgttttttgttggtataaaacactacataaacttgcactaagcaaagcctatgccttgctcagtatgagttatgtgctggtatggattgcttcaatggtacttcccggctgggaagggactttttcgctgaaagcactactgggagtagcctgtattatgagcgggttgatgctgattttcctgcccacgacaaaacaacgttactga

SEQ ID NO: 262101 - DNA, 336 bp, Klebsiella pneumoniae
atgatctggctaacattagtctttgccagcttacttagcgttgccgggcagttgtgtcagaaacaggcaacctgctttgtggcgataaacaaacggcgcaaacatatcgtgctgtggctgggactggcgctggcttgtcttggtcttgccatggtgctctggctgctggtcttgcagaacgtaccggtaggcattgcctacccgatgttaagtctgaattttgtctgggtgacgctggctgcagtaaaactgtggcacgaaccggtatcgccgcgtcactggtgtggggtggcgttcattattggtggcattgtgatcctcgggagtaccgtgtaa

SEQ ID NO: 262102 - DNA, 912 bp, Klebsiella pneumoniae
atggatgatgctcagcatagagctccgttctggtactacttgccggtcatcattgccggtagcctgccgtggctgggattactccccggagcactgtacgcaggctggaaaaaccgcaagcattccgcaaccgtctatttgttgagctggacgataatgccgctgctgtttttctccgtcgctaaaggcaaattgcccacctatattctttcctgctttgcacctctggcaatgctgatggcgcattacgctttgctggcagcaaaaaataatcctctggcgctgcggattaatggctggattaacatcgcttttggtgtcactggcattattgccacatttgtggtctccccatggggaccaatgaacacgccagtgtggcaaaccttcgagagctataaagtcttttgtgcctggtcgattttttcgctatgggcatttttcggctggtacaccttaacaaacgtcgaaaagacctggtcttttgccgcgctttgcccgctggggctggcgttgctggtaggattttcaattcctgacagagtcatggaaggaaaacatccgcaattttttgtcgagatgacacaagaatcacttcagccaagccgctatattcttactgatagcgtcggtgttgccgcaggtctggcatggagcctgcaacgcgatgacatcatcatgtatcgccagacaggtgagttgaaatacggccttaattatccggatgcgaaagggagatttgtcagcggtgatgagttcgcaaactggcttaatcaacatcgtcaggaggggattattacactcgtgctttcggttgaccgcaatgaagatatcaacagtctcgccattccgcccgcagatgccatcgatcgtcaggagcgtctggtgctgattcagtatcgtcccaaatga

SEQ ID NO: 262103 - DNA, 696 bp, Klebsiella pneumoniae
  misc_feature (546)..(555): n is a, c, g, or t
atgaaatcggtacgttaccttatcggcctcttcgcgtttattgcctgctattacctgttaccgatcagcacgcgtctgctatggcaacccgatgaaacgcgttatgcggaaatcagtcgggaaatgctggcatccggcgactggattgtgccccatctgttagggctacgttatttcgaaaaacccattgccggatactggattaacagcattgggcaatggctatttggcgcgaataactttggtgtgcgggcaggcgttatctttgcgaccctgttaactgccgcgctggtgacctggtttactctgcgcttatggcgcgataaacgtctggctctactcgccgcagtgatttatctctcattgtttattgtctatgccattggcacttatgccgtgctcgatccgtttattgcattctggctggtagcgggaatgtgcagcttctggctggcaatgcaggcacagacgtggaaaggcaaaagcgcgggatttttactgctgggaatcacttgcggcatgggggtgatgaccaaaggttttctnnnnnnnnnncgtgccggtattaagcgtgcttccatgggttgcatcgcaaaaacgctggaaagatctctttatttacggctggctggcggttatcagttgcgtactgacggttctcccctggggactggcgatagcgcagcgggagcctga

SEQ ID NO: 262104 - DNA, 891 bp, Klebsiella pneumoniae
atgaccaaagtcggcttacgcattgatgtcgatacctttcgtggcacccgtgaaggcgtgccgcgtctgctggaaatcttgagtaagcataatattcaggccagcatttttttcagcgtcggcccggacaatatgggccgccatctctggcgactggtgaagccacagtttttgtggaagatgctgcgctcaaacgcggcatcgctttatggctgggatattttactggcaggtacggcctggccgggtaaagagattggtcatgccaatgccgatatcattcgtgaagcagctaaacatcacgaagtcggcctgcacgcctgggatcaccatgcctggcaagcccatagcggtaactgggatcggcaaacattggtcgacgatattgcacgcggccttcgcaccctggaagagatcataggtcaaccggtaacctgttctgccgctgcgggctggcgtgccgaccagcaggtgatcgaagcaaaagaagcgttccatttgcgctacaacagcgattgtcgtggggccatgccgtttcggccactgctcgaatcaggaaaccctggcactgcgcaaattccggtgaccttacccacctgggatgaagtgattggtcgggatgtgaaagcagaagattttaacggttggttactcaaccgcatcctgcgagataaaggcatgccggtttataccattcatgcagaagttgaaggctgcgcttatcagcataattttgtggatctcctgaaacgggcagcccaggaaggcgtgacattttgccctttaagcgaactgttatcagggacgttgccgctcggacaagttgttcgcggaaatattgccggacgtgaaggctggctgggttgccaacaaattgcgggtagtcgttga

SEQ ID NO: 262105 - DNA, 1983 bp, Klebsiella pneumoniae
atgaaaaccgtcgtttttgcctaccacgatatgggatgcctcggtattgaagccctgctgtctgccggttacgaaattagcgccatttttacccataccgataatcccggtgaaaaagccttttatggttcggtggctcgtctggcggcggaaagaggcattccggtttatgcgccggataacgttaatcatccgctgtgggtggaacgtattgcccaactctcaccagaggtgattttctctttttattatcgccatcttatttgcgacgagattttgcagctcgctcccgcaggtgcatttaatctgcatggttcgctgttaccaaaatatcgtggtcgcgcgccgctgaactgggtgctggtgaacggtgaaacggaaactggcgttacattgcaccgaatggtgaaacgtgccgatgccggggccattgtggcgcaactgcgcattgccattgcgccagacgatatcgctattacgctgcatcataaattgtgccatgccgcgcgccagctactggaacagacattacccgccattaaacacggtaatattctggaaatcgcccagcgcgaaaacgaagccacctgttttggtcgcagaacaccggaagacagtttcctcgaatggcataaaccggcatccgtgctgcacaacatggtgcgtgccgttgccgatccgtggccgggtgccttcagctatgttggtaatcagaaatttaccgtctggtcgtcacgcgtgcattctcatgcgcccgcagcacaaccggggagcgtgatttctgttgcgccactgctgattgcctgtggcgatggcgcgctggaaatcgtcaccggacaggcgggcgacggcattactatgcagggctcgcaattagcgcagacgctgggcctggtgcaaggttcacgcttgaatagccagcctgcctgtgccgcccgacgccgtacccgggtactcatcctcggggtgaatggctttattggcaaccatctgacagaacgcctgctgcgcgaagatcattatgaagtttacggtctggatatcggcagcgatgcgataagccgttttctgaatcatccgcattttcactttgtcgaaggcgatatcagtattcattccgaatggattgagtatcacgtcaaaaaatgtgatgtcgtcttgccgctggtggcgatagccacgccgattgaatatacccgcaacccactgcgcgtatttgaactcgattttgaagagaatctgcgcattatccgctactgcgtgaagtaccgtaagcgaatcatcttcccgtcgacttcagaagtttatgggatgtgtagcgataaatacttcgatgaggatcattctaatttaatcgtcggcccggtgaataaaccacgctggatttattcggtgtctaaacaattacttgatcgggttatctgggcctatggcgaaaaagagggtttacagtttaccctcttccgcccgtttaactggatgggaccacgactggataaccttaatgcggcacgaatcggcagctcccgcgctattacgcaactcattctcaatctggtagaaggttcaccaattaagctaattgatggcggaaaacaaaaacgctgctttactgatatccgggatggtatcgaggcgttgtaccgcattatcgaaaatgcgggaaatcgctgcgacggcgaaattatcaacattggcaatcctgagaacgaagcgagcattgaggaactgggcgagatgctgctggcgagcttcgaaaaacatccgctgcgccatcacttcccaccgtttgcgggctttcgtgttgtcgaaagtagcagctactacggcaaaggatatcaggacgtagagcatcgtaaaccgagcatccgcaatgcccgccgctgccttgactgggaacccaaaattgatatgcatgaaaccatcgacgaaacgctagatttcttcctgcgcaccgttgatcttacggataaaccatcatga

SEQ ID NO: 262106 - DNA, 969 bp, Klebsiella pneumoniae
atgtttgaaatccaccctgttaagaaagtctcggtggttattcccgtttataacgagcaggaaagcttaccggaattaatcaggcgcaccacaaaagcctgtgaatcactggggaaagagtatgagatcctgctgattgatgacggcagtagcgataattccgcgcatatgctggtcgaagcctcacaagcggagaacagccatattgtgtctattttgcttaaccgcaattacgggcaacattcagcgattatggcgggattcagtcacgttactggcgacttaattattacccttgatgccgatctccagaatccgccagaggagatcccccgcctggtggcaaaagccgatgaaggctacgacgtggtaggaactgtgcgtcagaaccgccaggacagctggtttcgtaaaacggcatcgaagatgattaaccggcttattcagcgcaccaccggcaaagcgatgggtgactacggttgtatgctgcgcgcctatcgccgtcatattgtcgatgcgatgttgcactgccatgaacgcagcacctttatcccgattctggcgaatatcttcgcccgccgtgccattgaaattccagtgcaccatgccgagcgtgagtttggtgaatccaaatacagttttatgcgcctgattaatttgatgtacgacctggtgacctgccttaccacaacgccgctacgtatgctgagtctgcttggcagcattattgcgattggaggttttagcattgcggtgctgctggtgattttacgcctgaccttcggaccacaatgggcggcagaaggcgtctttatgctatttgccgtgctgtttacttttattggcgctcagtttatcggcatgggattgctcggtgaatatatcggcaggatctacaccgatgtccgcgcccgcccccgctattttgttcagcaagttatccgtccatccagcaaggaaaatgaataa

SEQ ID NO: 262107 - DNA, 1140 bp, Klebsiella pneumoniae
atgtcagaatttttgcctttttcgcgaccagcaatgggcgtggaggaactcgctgcagttaaagaggttctcgaatccggttggatcacaaccggtccgaagaatcaggcgcttgaacaagccttttgccagttgacgggaaatcagcatgccatcgcggtcagttcagccaccgccggaatgcatatcacgctaatggcgttggaaattggcaagggcgatgaagtgattacgccttccctgacctgggtttcaaccctcaatatgatttccttgttgggtgcaacgccggtaatggtggatgtcgaccgcgatacgctgatggtcacgcctgaagcgatcgagtcagccattacgccacgcactaaagccatcattccggtgcattatgccggtgcgccagcagatattgacgccattcgcgccattggcgaacgttacggcatcgcagttatcgaagatgctgcccatgccgtcggtacgtattacaaagggcgacatattggcgcaaaaggtaccgctattttttcgtttcacgccatcaaaaatattacctgtgcggaaggtggcctgattgttacagataatgaaaaccttgcccgcctgctacggatgctgaaatttcacggtctgggtgtcgatgcctatgacagacaaacctggggccgtgcaccgcaagctgaagtcttaacgccgggctataagtataatctgaccgatattaacgccgcgattgccctgacccagttagccaaattagagcacctcaacacccgtcggcgcgaaattgctctgcaatatcagcaagcactggcagctctcccctttcagccattaagccttcccgcctggccgcacgttcacgcctggcatctgtttattattcgtgtcaatgaacaacgttgtggtatcagtcgcgatgcgttgatggaagcgttaaaagaaagaggcattggtaccgggttacatttccgcgccgctcacacacaaaaatattatcgcgagcgttttcccacgctgtcgttaccgaataccgaatggaatagcgaacgcatctgttcgttgccgctgttcccggatatgaccaccgccgatgccgaccgcgtcatcacagcccttcagcaactcgcaggacaataa

SEQ ID NO: 262108 - DNA, 603 bp, Klebsiella pneumoniae
gtgttagctttttgccgctcttcgttgaagtcaaaaaaatatttcatcattttactggcgctcgctgcaattgccggactgggtactcatgccgcctggagtagcaatggtttgccacgtatcgacaataaaacgctggccagactggcacagcagcatccggttgtcgttttgtttcgccatgctgaacgttgcgatcgttcaaccaatcaatgcttgtcagataaaacaggtattacggtcaaaggtacccaggatgcccgtgaactgggcaacgcttttagtgctgatatccctgatttcgatctttattccagtaataccgtccggaccattcagtcggcgacctggttttcagcgggtaaaaagctgacggtagataaacgacttcttcagtgcggtaatgagatttatagtgcaattaaggacttacaaagcaaagcgcctgataaaaatatcgttattttcacccataatcattgcctgacatatattgctaaagataagcgtgatgcgacatttaaacctgattatctggatggtttagtcatgcatgtggaaaaaggcaaagtttatctggatggggaattcgttaaccactaa

SEQ ID NO: 262109 - DNA, 426 bp, Klebsiella pneumoniae
gtgcgacaacggactattgtatgccctttgattcaaaatgatggtgcttatttgctgtgtaaaatggccgacgatcgcggcgttttccccggtcaatgggcgctttcgggtggcggcgtggagcctggcgaacgaattgaagaggcactacgccgcgaaattcgcgaagaactgggagaacagctgcttttgacagaaatcacgccgtggaccttcagcgatgatattcgcaccaagacgtatgcagatggtcgcaaggaagagatttatatgatttacctgatttttgactgcgtttctgccaaccgagaagtgaaaataaacgaagagtttcaggactacgcgtgggtaaaacctgaagatctggcgcactatgatttgaatgtcgccacccgaaaaacgttacgtttgaaaggtcttctgtaa

SEQ ID NO: 262110 - DNA, 543 bp, Klebsiella pneumoniae
atgaaaaaaattgcgctagcaggtctggccggaatgctgttggtttctgcatcggtcaatgcaatgagcatcagcggccaggcgggtaaagaatacaccaatattggtgtcggttttgggactgaatcgacgggcctggcgttaagcggtaactggacacataacgacgacgacggtgatgccgcgggcgtggggctggggttgaatctgcctctcgggccattaatggcgaccgttggcggaaaaggcgtttacaccaacccgaattacggtgatgaaggttatgcagcggcagttggcggtggtttgcagtggcaaattggtgacagcttccgcttgtttggtgagtattactactctccggattcgctctccagcggtattcaaagttatgaggaagcgaatgctggcgcgcgttacaccattatgcgtccagtcagcattgaggcgggttatcgctacctgaatctgtcgggtaaagatggtaaccgcgacaacgccgtggctgacggcccgtatgttggggttaacgccagtttctga

SEQ ID NO: 262111 - DNA, 1203 bp, Klebsiella pneumoniae
atgttaaaagtggaaatgctatccaccggggatgaagtgttacacgggcaaatcgttgacactaacgctgcctggctggccgattttttctttcatcaggggttgccattatctcgccgcaatacggtgggggataaccttgatgacttagtgaccattcttcgcgaacggagtcagcacgccgatgtgctgatcgttaacggcgggctggggccgaccagtgatgatttaagcgcactcgccgctgcgacagcaagaggtgaaggcctggtgttgcatgaagcctggctcaaagagatggaacgctatttccacgaacgtggacgagtaatggcaccgagcaaccgtaaacaagcggagctacctgccagtgctgaatttatcaataacccggtaggcaccgcctgtggttttgccgtgcagcttaatcgttgcctgatgttctttacccccggcgtaccgtcagaatttaaggtgatggtcgagcacgaaatcctgccgcgtctgcgcgagcgtttttctttaccacagccgccggtttgtctgcgtttaactacctttggtcgttcggaaagcgatctggcacaaagcctggacactctacaactgccgccgggcgtaacaatgggctatcgctcctcaatgcctatcatcgaactgaaactcaccggaccggcaagcgagcaacaggcgatggaaaaactgtggctggacgttaaacgtgttgccggacagagcgtgattttcgaaggcaccgaaggactgcccgcgcagatcagtcgcgaattgcaaaaccgccagttcagcctgacgttgagcgagcaattcaccagcggtttattggctttgcaactttctcgcgcaggtgctccattgctggcgtgtgaagtggttccttcacaggaagaaaccctggcgcaaactgcgcactggattacagaacggcgggccaaccattttgccgggctggcactggctgtttcgggtttcgagaacgagcatctcaactttgcgctagccacgccagatggcactttcgctctgcgtgtgcgtttcagcactacgcgctacagcctggctatccgtcaggaagtgtgcgcaatgatggcactgaatatgctgcgccgttggttaaacggccaggacattgccagtgagcatggctggattgaggttgttgagtccatgaccttatccgtctga

SEQ ID NO: 262112 - DNA, 783 bp, Klebsiella pneumoniae
atgttggaatcaagcaaagttcccgccctaacacgggctattgatattctcaatttgattgcccgcattggcccctgtagtgctgcgacgatcattgacacattggggatccctaaaagcacggcctatttgctgcttaatgaactcaggcgtcagcgttttcttagccttgatcaccaggaaaatttttgtttgtggaccaagctggtggagctttccggtcatgcgttaagcaagatggatctccgggaactggctcgaccgcgtttgacgcaactgatggataccaccgggctgttatgtcacctggggattattgataacggcagcgcttattacattttgaaagtggagtcatcagccactatcagcgtgcgttcccatgaaggaaaaagcctttcgctttatcgctccggaataggtaaatgcctgcttgcctggcaacctgcagctgtacagcaaagtattatcgaagagctggtctgggagcagatgacacccaccaccattacccatccacaacggctctacgaggaactggcgcgtattcgccgtcagggctggagttatgacaacggcgaagattatgctgatgtccgttgtgtcgctgcgccggtgtttaacgccaataacgagcttaccgctgcgatttcggtggtcggtacccgcttacaaatcaatgaagaataccgtgattatctggcgggcaaggccattgcctgcgccagggatatttcacgtctgttgggatggaaaagtccctttgacttacaggcctcataa

SEQ ID NO: 262113 - DNA, 1206 bp, Klebsiella pneumoniae
atgaccctaccaaaaatcaaacaggttcgcgcctggtttactggcggtgcgacagcagaaaaaggcgctggcggcggtgattatcacgaccagggggcaaatcactggattgatgatcatattgccaccccgatgagtaaataccgcgattacgagcagtcacgccagtcatttggcattaacgttcttggcacgttgattgttgaagtcgaagcagaaaacggccagaccggattcgccgtttcgacagccggtgaaatgggctgttttattgtcgaaaaacatcttaaccgtttcattgagggtaaatgtgtcagtgatatcaaactgatccacgatcaaatgctcaatgccaccctgtattactccggctctggtggcctggtgatgaacacgatttcctgtgtcgatctggctctgtgggatctgttcggcaaagtggtcgggcttccggtttataaacttttaggcggcgcagttcgtgatgagattcagttctacgccacaggtgcgcgtccggatctggcaaaagagatgggctttatcggtggcaaaatgccgacgcactgggggccacatgatggcgatgcggggatccacaaagatgccgctatggtcgcggatatgcgtgaaaaatgcggtgaggatttctggttaatgctcgactgctggatgagtcaggacgtgaactatgccaccaaactggcccacgcttgcgcgccctataacctgaaatggatcgaagagtgcctgccgccacagcagtatgaaggttatcgcgaactgaaacgcaacgcgccagtcggaatgatggtcaccagcggtgagcatcacggcacactgcaatctttccgtacgctttcagaaaccggtatcgacattatgcagccggatgttggctggtgcggtggcttaaccacgctggtggaaattgccgcaatcgccaaatccagagggcaactggtggtgccgcacggttcgtctgtttactctcaccatgcggtgatcaccttcaccaatacgccattcagcgaattcctgatgaccagcccggattgttcaacgatgcgtccgcaatttgatccgattctgcttaatgagccagtgccggtgaatggtcgtattcataaatcagtgcttgataaacccggtttcggcgtcgaactcaatcgtgactgcaatttgaaacgcccctacagccactaa

SEQ ID NO: 262114 - DNA, 804 bp, Klebsiella pneumoniae
atgaacgcattattaaccaatccctttaaagaacgtttacgcaaaggcgaagtgcaaattggtctgtggttaagctcgactacttcttatatggcagaaattgccgccacctccggttatgactggttgctgattgacggggagcacgcgccaaacaccattcaggatctttatcaccagctacaggcggtagcgccctatgccagccaacccgtgatccgtccggtggaaggcagtaagtcgctgattaaacaagtcctggatattggcgcgcaaactctactaatcccgatggtcgatactgccgatcaggcacgtcaggtggtgtctgccacgcgctatcctccctacggtgagcgtggtgtcggggccagtgtggcacgggctgcgcgctggggacgcattgagaattacatggcgcaagtcaacgattcgctttgtctgttggtgcaggtggaaagtaaaacagcactggataacctggacgaaatcctcgacgtcgaagggattgacggcgtgtttattggacctgcggatctttctgcctcgttgggctacccggataacgccgggcacccggaagtgcagcgaattattgaaaccagcattcggcggatccgtgctgcgggtaaagcggctggttttctggctgtggctcctgatatggcgcagcaatgcctggcgtggggagcgaactttgtcgctgttggtgttgacacgatgctctacagcgatgccctggatcaacgactggcgatgtttaaatcaggcaaaaatgggccacgcataaaaggtagttattga

SEQ ID NO: 262115 - DNA, 903 bp, Klebsiella pneumoniae
atgaccgaatcaacaacctcctccccgcatgatgcggtgtttaaaacctttatgttcacacccgaaaccgcacgggattttctggaaatacatctaccagagccgctgcgcaagctttgcaacctgcaaaccttacgcctggaacccaccagttttattgaaaaaagtttacgcgcttactactcggatgttttgtggtccgtggaaaccagcgacggtgacggttatatctactgcgtgattgaacatcaaagctctgcagaaaagaatatggcttttcggctaatgcgctatgccactgccgccatgcagcgtcacctggataaaggctatgacagagttccgctggtggtgccattgctgttttatcatggcgaaacctcgccctacccgtactcactcaactggctggatgagtttgacgatccgcaacttgcccggcagttgtacaccgaagcttttccgttggtggatatcaccatcgtacctgacgatgagattatgcaacatcggcgtatagctctgcttgaactgattcaaaagcatattcgcgaccgcgatttaatcggtatggtcgacaggatcaccacgcttttggttagaggcttcactaatgacagccagctacaaacgctgtttaattatctgctgcaatgcggcgatacctcccgtttcacccgttttattgaggagattgccgaacgttcaccactacaaaaggagagattaatgactattgctgaacggctacggcaggaaggacaccaaattggctggcaggaaggtatgcgtgaacaagccattaaaattgccttgcgcatgctggaacagggcattgatcgtgacctggtgctcgcggccacccagctaagcgaagccgatctggcagcgaataaccactaa

SEQ ID NO: 262116 - DNA, 1260 bp, Klebsiella pneumoniae
atgcgctttgatactgtcattatgggcggcggcctcgccggcttactctgtggcctgcaactgcaaaaacacggcctgcgctgtgccattgtcacgcgtggtcaaagcgcgctgcatttctcatccggttcgctggatttgctgagccatctgccagatagtcaagctgtgacagacattcaccacgggctggaatcgttatgtcagcaggcccctgcccatccttactctcttctcgggccacaacgcgtactcgatctcgcttgccaggcgcaggcattaatcgctgaaagcggtgcgcaattgcagggcagcgtagaactggctcaccagcggattacgccgctcggcactctgcgttctacctggctaagttcgccagaagtccccgtctggccactgcccgcgaagaaaatatgtgtagtgggaattagcggcctgatggattttcaggctcaccttgcggcagcttcgttgcgtgaactcggccttgccgttgaaaccgcagaaatagagctgccggaactggatgtcctgcgcaataacgccaccgagttccgcgcggtgaatatcgcccgtttccttgataatgaagaaaactggccgctgttacttgatgcgcttattcctgtcgccaatacctgcgaaatgatcctgatgcccgcctgcttcggcctggccgatgacaaactgtggcgttggttgaatgaaaaactaccttgttcactgatgcttttgccaacgctgccgccttccgtgctgggcattcgtctgcaaaaccagttacagcgccagtttgtgcgccagggtggcgtgtggatgccaggcgatgaagtgaaaaaagtgacctgtaaaaatggcgtagtgaatgaaatctggacgcgcaatcacgccgatatcccgctgcgcccacgatttgcggtgcttgcgagcggcagtttctttagcggcggactggtggcagaacgtgacggcattcgcgagccgattctcggccttgatgtgctacaaaccgccacgcggggtgaatggtataagggcgatttttttgcgccgcaaccgtggcagctgttcggtgtaaccactgatgaggcactacgcccgtcgcaggcagggcaaaccattgagaacctgtttgccatcggttcggtgctgggcggatttgatcccatcgcccagggatgcggcggcggtgtttgtgccgtcagtgctttacatgccgctcaacagattgcccaacgcgcaggaggtcaacaatga

SEQ ID NO: 262117 - DNA, 1629 bp, Klebsiella pneumoniae
atgaaaactcgcgactcgcaatcaagtgacgtgattatcattggcggcggcgcaacgggagccgggattgcccgcgactgtgccctgcgcgggctgcgcgtgattttggttgagcgccacgacatcgcaaccggtgccaccgggcgtaaccacggcctgctgcacagtggtgcgcgctatgcggtaaccgatgcggaatcggcccgcgaatgtattagtgaaaaccagatcctgaaacgcattgcacgtcactgcgttgaaccgaccaacggcctgtttatcaccctgccggaagatgacctctccttccaggccacttttattcgcgcctgcgaagaagcagggatcagcgcagaagctatagacccgcagcaagcgcgcattatcgaacctgccgttaacccggcactgattggcgcggtgaaagttccggatggcaccgttgatccatttcgtctgaccgcagcgaacatgctcgatgccaaagaacacggtgcggttatccttaccgctcatgaagtcacggggctgattcgtgaaggcgcgacggtgtgcggtgttcgtgtacgtaaccatctcaccggcgaaattcaggcacttcatgcgcctgtcgtagttaatgccgccgggatttgggggcaacacattgccgaatatgccgatctgcgcattcgcatgttcccggcgaaaggatcgctgctgattatggatcaccgcattaatcagcatgtgatcaaccgctgccgcaaaccttccgacgccgatattctggtgcctggcgataccatttcgctgattggcaccacctctttacgtattgattacagcgagattgacgataatcgagtgacggcagaagaagttgatattctgctgcgtgaaggggaaaaactggcccccgtgatggcgaaaacacgcattttgcgggcctattctggcgtgcgtccgctggttgccagcgatgacgacccgagcggacgtaacgtcagccgtggcatcgtgctgctcgaccatgctgaacgcgatggtctcgacggatttatcaccatcaccggtggcaaactgatgacctatcggctgatggcggaatgggctactgacgcggtgtgtcgcaagctgggcaacacgcgcccctgtaccactgccgacacgccgttgcctggctcacaggaaccggcagaagtcacgctgcgcaaagtgatctccctgcccgctccgctgcgcggttccgcagtttaccggcacggcgatcgcacaccagcctggctgagcgaaggccgcctgcaccgcagcctggtatgtgagtgcgaagcggtaactgcgggtgaagtgcagtacgcagtagaaaatttaaacgttaacagcctgctggatttacgccgtcgtacccgtgtagggatgggtacctgccagggcgaactctgcgcctgccgggctgccggactgctgcaacgttttaacgtcacgacgtccgcgcaatctatcgagcaactttccaccttccttaacgaacgctggaaaggcgtgcaacccatagcatggggagacgcactgcgcgaaagcgaatttacccgctgggtttatcagggactgtgtggtctggagaaggagcagaaagatgcgctttga

SEQ ID NO: 262118 - DNA, 1359 bp, Klebsiella pneumoniae
atgttgagtatttttaaaccagcgccacataaagcgcgcttacctgccgcggagatcgatccgacttatcgtcgattgcgctggcaaattttcctggggatattctttggctatgctgcttactatttggttcgtaagaactttgcgctcgctatgccttatctggttgagcagggattctcacgcggtgatttaggttttgccctttcggggatctcgattgcttatggattttcgaaattcatcatgggttcggtatcggatcgctcgaatccgcgcgttttcctgcccgcaggtttgattctggcggcggcagtgatgttgtttatgggctttgtgccatgggcgacgtcgagcattgcggtgatgtttgtgctgctgttcctctgcggttggttccaggggatgggatggccgccgtgcggtcgtactatggtgcactggtggtcgcagaaagaacgtggcggcattgtgtcagtgtggaactgtgcgcacaacgtcggtggtggtattccgccgctgctgttcctgctggggatggcctggttcaatgactggcacgcggcgctctatatgcccgctttctgcgccattctggtggcactgttcgcctttgcgatgatgcgcgataccccgcaatcctgtggcctgccgccgatcgaagagtacaaaaatgattatccggacgactataacgaaaaagcggaacaggagctgacggcgaagcaaatcttcatgcagtacgtgctgccgaacaaactgctgtggtacatcgctatcgccaacgtgttcgtttatctgctgcgttacggcatcctcgactggtcaccgacttatctgaaagaggtgaaacacttcgcgctggataaatcctcctgggcctacttcttctatgagtatgcgggcattccgggcaccctgctgtgcggctggatgtcggataaagtcttccgtggcaaccgtggggccaccggcgtcttctttatgacactggtgaccatcgcgactatcgtttactggatgaacccggcaggtaacccaaccgtagatatgatttgtatgattgttatcggcttcctgatctacggccctgtgatgctgatcggtctgcatgcgctggaactggcaccgaaaaaagcggcaggtacggcagcgggctttaccgggctgtttggttacctgggcggttcggtggcggcgagcgcgattgttggctacaccgtggacttcttcggctgggatggcggctttatggtaatgattggcggcagcattctcgcggttatcttgttgattgttgtgatgattggcgaaaaacgtcgccatcaggaattactgcaaaaacgcaacggaggctaa

SEQ ID NO: 262119 - DNA, 1077 bp, Klebsiella pneumoniae
atgaaattgacgctaaaaaaccttagcatggcgatcatgatgagtggaatgatcatgggaagcagtgcaatggcggcggatagcaacgaaaaaatagtcatcgcccatcgcggtgccagtggatatttgccggagcatacgctgccagcaaaagcgatggcgtatgcgcagggagcggattatctggaacaggatttggtgatgacgaaggacgaccatctggttgtcctgcatgaccattatctcgatcgtgttactgatgttgccgatcgtttcccggatcgggcgcgcaaagacggtcgttactacgcgatagatttcacgctcgatgaaattaagtcgctgaaatttaccgaaggtttcgatattgaaaacggtaagaaagtacagacttatccggggcgtttcccgatgggtaaatctgacttccgggtacacactttcgaagaagagattgaatttgttcaggggttaaatcactctaccgggaaaaatatcggtatctatccagaaattaaagcgccgtggttccatcatcaggaagggaaggatattgcggctaaaacgctggaagtgctgaagaaatatggttacagcggtaaggacgacaaagtttatttgcaatgttttgatgccgatgaactgaagcgtattaagaatgagctggaacctaaaatgggcatggacctcaatctggtacagctgattgcctataccgactggaacgaaactcagcagaaacagccggacggaagctgggttaattacaactacgactggatgtttaagccgggggccatgaaacaggtggcggaatatgctgatggtattggtccggattatcatatgttgattgaggagacatcgcagccaggtaatatcaaactcactggcatggtgcaagatgctcagcagaacaagctggtagtgcatccttacaccgtgcggtcagataagctgcctgaatacactactgatgtgaatcagttatatgatgctctgtataacaaagcgggtgtaaatgggctgtttactgatttccctgataaggcagtaaaattccttaataaagagtaa

SEQ ID NO: 262120 - DNA, 411 bp, Klebsiella pneumoniae
gtggaacgctatgataaattcaagaattcttctaaggaaattaaaaatacccacaagcaaattgtacaagcgcagaaaaaattgaaccaaatgaaatacatcaataaattaagtggtgagcttatcgatatcgccgacaaaaagttagcaccattaataaatgatagtttcagctatacacgagatttctttgcttactcaaaacaggaaaataacatcttcacgtttgataattctaagtttgaagatccaaaggaaaaaaaaggtttaatggtacaacacagcaatggacaactggttattactggtgaatattatcctgaaggtgtgcaaatagcattcactcaagaacaatataataaattaataagatacattaatattttctttacttttccgaaatgcgaataa

SEQ ID NO: 262121 - DNA, 459 bp, Klebsiella pneumoniae
atgttagataaaattgaccgtaagctgctggccttactacagcaggattgcaccctctctttgcaggcactggctgaagccgttaatctgacaactaccccctgctggaagcgtctgaaacggctggaggacgacggtattcttatcggcaaagtcgccctgctggatccggaaaaaataggcctcggcctgaccgcctttgtgctgataaaaacgcaacatcacagcagcgaatggtattgccgctttgtcacggtggttaccgaaatgccagaagtgctggggttctggcgcatggctggtgaatacgattatctgatgcgcgtccaggttgccgacatgaaacgctacgacgagttttataagcgcctggtaaacagcgtgccggggctgtcggacgtcacttccagcttcgcgatggaacagattaaatacaccacttctttacccatcgaataa

SEQ ID NO: 262122 - DNA, 1773 bp, Klebsiella pneumoniae
gtgcgattatttgctcaattaagctggtatttccgtcgggaatggcgtcgctatctcggggctgtcgccttgcttgtcattatcgcgatgctgcaactggttccgccaaaagtggttggtattgttgtcgatggcgtgacagaacaacactttactaccgggcagatcctgatgtggatcgccaccatggtgctgattgccgttgtggtttatctcctgcgttacgtctggcgcgtattgctgtttggtgcgtcttatcaactggctgttgaactgcgtgaagattattaccgtcagctaagccggcagcatcctgagttttacctgcgtcatcgcacgggtgacctcatggctcgtgcgaccaatgacgtcgatcgcgtcgtgtttgccgccggagaaggggtgctgacgctggtggattcactggtgatgggctgcgctgtgttgattatgatgtctacgcaaattagctggcagttgaccttatttgccctgttgccgatgccagtgatggcgatcatgatcaagcgcaacggcgatgccttgcatgaacgctttaagctggcacaggcggcgttttctagtcttaatgaccgcacccaggaaagcctcaccagtatccgcatgatcaaagcttttggtctggaagatcgccagtcggcgttatttgccgaggatgccgaagataccggcaagaaaaacatgcgtgtggcacgtattgatgcccgttttgatccgaccatttacatcgccatcggcacggcgaacttgctggcgattggcggcggtagttggatggtggtgcagggtagtttaacgctgggccagctcaccagttttatgatgtatttaggtctgatgatttggccaatgctggcgctggcatggatgtttaacatagtggaacgtggtagtgctgcgtacagccgcattcgcgcgatgctggcggaagcgccggtggtgaatgatggtagcgaacccgtgccggaaggtcgtggcgaactggatgtaaatattcgccagttcacgtatccgcagactgaccatcctgcgctggaaaacgtcaatttcgccctgaaacccggtcagatgctgggtatttgcgggccgactggttccggcaaaagtaccctgttgtcgctcattcagcgtcatttcgacgtcagcgagggggatatccgctttcatgatattcctctgacgaagttacaactcgatagctggcgtagccgcctggcggtagttagccagacaccgttccttttttccgacaccgtagcgaacaacatcgcgttgggttgcccgaatgccacccagcaagagattgagcatgtcgcgcggttagccagcgtgcatgacgatattttgcgtttaccgcaaggttacgatacagaagtgggcgagcgcggcgtgatgctttccggtgggcaaaaacagcgtatctccattgctcgtgcgttattagtcaacgcggaaatcctcatccttgatgatgcgctttcggcagtagacggacgcacagagcaccagatcctgcataacctgcgtcaatgggggcagggaagaacggtaatcatcagtgcccatcgcctttcggcactgacggaagccagtgaaattattgtgatgcagcacggacatatcgctcagcgtggcaatcatgatgagctggcgcaacaaagcggctggtatcgcgatatgtatcgctatcaacaactggaggcggcgctcgacgacgctccggaaattcgcgaggaggccgttgatgcgtag

SEQ ID NO: 262123 - DNA, 1782 bp, Klebsiella pneumoniae
atgcgtagttttagccaactgtggccgactctcaagcgtctgttagcgtacggttcgccgtggcgtaaaccgctggggattgcggtcctgatgatgtgggttgcggcagcggcagaagtcagtgggccgctgcttatcagctattttatcgacaatatggtagcgaaaaataacctgccgttgaaagtggttgcagggctggctgcggcgtatgttgggctgcaactgtttgccgccgggctacattacgcgcagtcgctgctgtttaatcgggcggcagtaggcgtagtgcaacagttgcgtaccgacgtgatggatgctgcgttacgccagccattaagcgagtttgatacccaacccgtcgggcaggtgatttcccgcgtcactaatgacactgaagtgatccgcgacctctacgttaccgtagtggcaactgtcctgcgtagcgccgcactggtgggcgcgatgctggtgtcgatgttcagcctcgactggcgaatggcgctggtggcgataatgattttcccggtggtgctggtggtaatggtgatatatcagcgttacagcacgccgatcgtccgccgtgtacgcgcttatctggcagatatcaacgacggctttaacgaaatcatcaatggcatgagcgttatccagcagttccgtcagcagtcgcgatttggcgaacgtatgggtgaggccagtcgttcacactatatggcgaggatgcaaaccctgcgcctcgacggttttctgctgcgtccgctgctgagtctgttttcatcgctcattctttgtgggttgttgatgctgtttggcttctccgccagcggcaccattgaagtgggcgtgttgtatgcatttatcagctatcttgggcgacttaacgaaccattaatcgaactgaccacgcagcaggcgatgctgcaacaggctgtagttgctggtgagcgtgtgtttgaactgatggacggaccgcgccagcaatatggcaatgatgatcgcccgttacagagcggcaccatcgaagtcgataacgtgtcatttgcttatcgcgatgacaatctggtgctaaagaacattaatctctctgtgccttcgcgtaactttgtggcactggtcgggcataccggcagtggcaaaagcaccctcgccagtttattgatgggctattacccgctaacggaaggtgagattcgccttgatggtcgtccattaagttcgctaagtcacagcgcgctgcgccagggcgtggcaatggtgcagcaagatccggtggtgctggcggataccttcctcgccaacgtgacgctggggcgtgatatctccgaagaacgcgtctggcaggcgctggaaaccgtgcaactggcggagctggcgcgtagcatgagcgacggtatttacacgccgcttggcgagcaggggaataatctctcagtcgggcaaaagcaactgctggcactggcacgcgtgttggtggagacgccgcaaatcctgatccttgatgaggcaaccgccagcattgactccggtactgaacaggcgattcaacatgctctggcggcggtgcgtgaacataccacgctggtggtgattgctcaccgcttatcgaccattgttgatgccgacaccattctggtgcttcatcgtgggcaagccgtggagcagggtactcaccagcaactgctggcggcccagggacgctactggcagatgtatcaactgcaacttgcgggcgaagagctggcagccagcgtgcgtgaagaggaatcattgagcgcctga

SEQ ID NO: 262124 - DNA, 573 bp, Klebsiella pneumoniae
atgaaactcgtgcacatggccagtggtttagcggttgcgattgcgttggcggcttgcgcagataaaagcgcggatattcagacgccagcaccggctgcaaatacgtctatttcagcaacacaacaacctgctatccagcaaccgaatgtctccggtaccgtctggatccgtcagaaagtcgcactgccgcctgatgctgtgctgaccgtgacactttctgacgcgtcgttagccgatgcaccgtcaaaagtactggcgcagaaagcggtgcgtaccgaaggcaaacagtcaccattcagctttgttctgccatttaacccggcagatgttcagccgaatgcgcgtattctgttgagtgcggcgattaccgtgaatgacaaactggtatttattaccgataccgttcagccggtgatcaaccagggcggaactaaagccgacctgacattggtgccggtgcagcaaaccgccgtgccggttcaggccagcggtggcgcaacgactaccgtaccttcgacttcaccaactcaggtgaatccgtcttcggcagttccagctcctacgcaatattaa

SEQ ID NO: 262125 - DNA, 312 bp, Klebsiella pneumoniae
atggaaaaagaagattcatttccccaacgcgtctggcaaatcgtcgccgctattcccgaaggctatgtcaccacttacggtgatgtggcgaaactggcaggatcgccccgcgccgcgcgccaggtgggcggtgtgttaaagcgtctccccgaaggcagcaccttaccctggcaccgggtggttaatcgccacggcacaatttcgctaaccggaccggatttacagcgtcaacgacaggcattactggcagaaggtgtgatggtatcgggaagcgggcaaatcgacttgcagcgttatcgctggaactactaa

SEQ ID NO: 262126 - DNA, 354 bp, Klebsiella pneumoniae
atgaagtatgttgatggttttgtggttgccgttcctgtcgataaaaaggatgcctatcgggaaatggctgctaaggctgcgccattgtttaaagagtttggcgcgcttcgtattgtcgaatgctgggccagcgatgtaccggatggcaaagtgaccgattttcgtatggcggtaaaagctgaagagaatgaagaggttgtctttagctggattgaatacccttcaaaagaggtccgcgacgctgctaatcaaaagatgatgtcggacccacggatgaaagagttcggcgagtccatgccgtttgatggtaagcgaatgatctatggcggattcgagtcaatcatcgacgaatag

SEQ ID NO: 262127 - DNA, 1551 bp, Klebsiella pneumoniae
gtgagaacacgacatctggtcggccttatttcgggagtactgattctttcagtattgctgcctgtcggcttaagcatctggctggcccatcagcaggtagaaacatcatttattgaagagctgaatacgtattcctcccgcgtcgctattcgggccaataaggtggcgacacaagggaaagatgcgctgcaagagctggaaagatggcaaggcgctgcctgtagcgaagcccatctcatggaaatgcgtcgggtatcttacagttatcgctatattcaggaagtggtttatatcgataacaacgttccccagtgttcgtctctggagcatgaaagcccgcccgataccttccccgagccaggtaaaatttcgaaagatggttatcgtgtctggttaacatcgcataacgatttaggcattatccgttacatggttgccatgggaacggcacattatgtcgtcatgatcgaccccgcttcctttattgatgtcattccctatagctcatggcaaattgatgccgccattattggcaatgcccataacgttgtgataaccagcagcgatgaaattgctcagggaattattaccagactacaaaaaacacccggtgagcatatcgaaaataatggaatcatttacgatatcctgcccttcccggaaatgaatatttcgatcatcacctgggcttcaacgaaaatgttgcagaaaggctggcatcggcaagtctttatttggttaccgctcgggttggtgattggcctgctggcagcgatgtttgtgctgcgtattttgcgccgtatccagtcaccgcatcatcggctgcaggatgctatcgaaaatcgtgatatttgcgtgcactatcagccgattgtctccttagccaatggcaaaattgtcggtgctgaggcactggcgcgctggccgcagacagacggtagttggttgtcaccagatagttttattccgctggcacagcaaacgggcctttctgagccattgacgctactgattataagaagcgtctttgaagatatgggcgactggctgcgtcagcatccgcagcagcatatttcgatcaatcttgaatccaccgtgctcacctcggaaaaaatcccgcaattgctgcgtgaaatgatcaatcactatcaggttaatcccagacagatcgcgcttgaactcactgaacgcgagtttgccgatccgaaaaccagcgccccgataatttctcgctaccgggaggcgggccatgaaatttatcttgatgattttggtacggggtattcaagtttaagttatttacaggatctggatgtcgacattctgaagatcgataaatctttcgttgatgcgctggaatataaaaatgtcacgccgcatatcatcgaaatggcaaaaacactgaaactgaaaatggtagcggagggaatcgaaaccagtaaacaagaagagtggttacgccagcatggcgtgcactacggtcagggctggctctacagcaaggcattaccgaaagaagatttcttacgctgggccgagcaacatttgtga

SEQ ID NO: 262128 - DNA, 471 bp, Klebsiella pneumoniae
atgaccgaaatacaacgcctgctgaccgaaacaattgagtctctaaatacccgcgaaaaacgcgacaacaaaccccgctttagtatcagttttatccgtaaacatccggggctgtttatcggtatgtatgttgctttttttgccaccctggcggtgatgttgcagtccgaaacgctttcaggctctgtctggctactggttgtattatttatcctgcttaatggtttcttctttttcgatgtctacccacgctaccgctatgaagatatcgacgtgctggatttccgcgtttgctataacggcgaatggtacaacacgcgctttgtacctgccgcgctggttgaagccatcttgaactctccgcgtgtcgcggatgttcataaagaacaactgcaaaaaatgatcgtccgtaaaggtgaactgtctttttacgatatttttaccctcgctcgcgccgaatcaacatcttaa

SEQ ID NO: 262129 - DNA, 552 bp, Klebsiella pneumoniae
atgagcacagaaaaagaaaagatgattgctggtgagttgtatcgctcggcagatgagacgttatctcgcgatcgcctgcgcgctcgtcagcttattcaccgatacaatcattccctggcggaagagcacacattacgccagcaaattctcgctgatttattcggtcaggtgacagaggcttatattgagccaacgtttcgctgtgattatggctataacatttttctcggcaataattttttcgccaacttcgattgcgtgatgcttgatgtctgccctattcgcatcggtgataactgtatgttggcaccaggcgttcatatctacacggcaacacatcccatcgaccctgtagcacgtaatagcggtgctgaactggggaaacccgtcaccatcggtaataacgtctggattggcggacgcgcggtcattaaccctggtgtgaccattggtgataacgtcgtggtagcctcaggtgcagttgtcacaaaagatgtcccggacaacgttgtcgtgggcggtaatccagccagaataattaaaaaattgtaa

SEQ ID NO: 262130 - DNA, 1194 bp, Klebsiella pneumoniae
atgaacaaaaacagagggtttacgcctctggcggtcgttctgatgctctcaggcagcttagccctaacaggatgtgacgacaaacaggcccaacaaggtggccagcagatgcccgccgttggcgtagtaacagtcaaaactgaacctctgcagatcacaaccgagcttccgggtcgcaccagtgcctaccggatcgcagaagttcgtcctcaagttagcgggattatcctgaagcgtaatttcaaagaaggtagcgacatcgaagcaggtgtctctctctatcagattgatcctgcgacctatcaggcggcatatgacagcgcgaaaggcgatctggcgaaagcccaggctgcagccaatatcgcgcaattgacggtgaatcgttatcagaaattgctcggtactcagtacatcagtaagcaagagtacgatcaggctctggctgatgcgcaacaggcgaatgctgcggtaactgcggcgaaagctgccgttgaaactgcgcggatcaatctggcttacaccaaagttacctctccgattagcggtcgcattggtaagtcgaacgtgacggaaggcgcattggtacagaacggtcaggcgactgcgctggcaaccgtgcagcaacttgatccgatctacgttgatgtgacccagtccagcaacgacttcctgcgcctgaaacaggaactggcgaatggcacgctgaaacaagagaacggcaaagccaaagtgtcgctgatcaccagtgacggcattaagttcccgcaggacggtacgctggaattctctgacgttaccgttgatcagaccaccgggtctatcaccctacgcgctatcttcccgaacccggatcacactctgctgccgggtatgttcgtgcgcgcacgtctggaagaagggcttaatccaaacgctattttagtcccgcaacagggcgtaacccgtacgccgcgtggcgatgccaccgtactggtggttggcgcggatgacaaagtggaaacccgtccgatcgttgcaagccaggctattggcgataagtggctggtgacagaaggtctgaaagcaggcgatcgcgtagtaataagtgggctgcagaaagtgcgtcctggtgtccaggtaaaagcacaagaagttaccgctgataataaccagcaagccgcaagcggtgctcagcctgaacagtccaagtcttaa

SEQ ID NO: 262131 - DNA, 648 bp, Klebsiella pneumoniae
atggcacgaaaaaccaaacaagaagcgcaagaaacgcgccaacacatcctcgatgtggctctacgtcttttctcacagcagggggtatcatccacctcgctgggtgagattgcaaaagcagctggcgttacgcgcggtgcaatctactggcattttaaagacaagtcggatttgttcagtgagatctgggaactgtcagaatccaatattggtgaactagagcttgagtatcaggcaaaattccctggcgatccactctcagtattaagagagatattaattcatgttcttgaatccacggtgacagaagaacggcgtcgattattgatggagattatattccacaaatgcgaatttgtcggagaaatggctgttgtgcaacaggcacaacgtaatctctgtctggaaagttatgaccgtatagaacaaacgttaaaacattgtattgaagcgaaaatgttgcctgcggatttaatgacgcgtcgggcagcaattattatgcgcggctatatttccggcctgatggaaaactggctctttgccccgcaatcttttgatcttaaaaaagaagcccgcgattacgtcgccatcttactggagatgtatctcctgtgccccacgcttcgtaatcctgccactaacgaataa

SEQ ID NO: 262132 - DNA, 3363 bp, Klebsiella pneumoniae
atgactatgttccagtattacaaacgatcacggcattttgttttttcagcatttattgcttttgtttttgtcttgttatgccagaacacggcgtttgcgcgggcgtcatcgaatggtgatctgccgacaaaagcggacctgcaggcacaacttgactcactgaataaacaaaaagatctttctgctcaggacaaactggtgcagcaggatctgacagatacattagccaccctcgataaaatcgatcgcgtaaaagaagagacagttcagctacggcaaaaagtcgctgaagcgccggaaaaaatgcgccaggcgaccgcggcgttaactgcacttagcgatgtcgataatgacgaagaaacgcgcaaaattctgagtacgctttcgttgcgccagctggaaactcgcgttgcccaggcgctggacgatttgcagaacgcacaaaacgatctggcgtcttataacagccagttggtttcgttacagacgcagcccgaacgcgtgcaaaatgcgatgtataacgcttcgcagcagctgcaacaaattcgcagtcgtctggatgggactgatgtcggcgagactgccttacgtcccagccagaaagtgttaatgcaggctcagcaggctttgctgaatgccgagattgaccagcagcgtaaaagcctggaagggaacacagtcttacaggataccttgcaaaagcaacgggattacgtgacggcgaacagcgcccgtctggagcaccagttgcagctgttgcaagaagcagtaaacagcaagcgcctgactttaaccgaaaaaacggcgcaggaagccgtctccccggatgaagccgcgcgtattcaggctaatccgctggtgaagcaggaactggaaattaaccagcagttaagtcagcgtctgattaccgcgactgaaaacggtaatcagttgatgcagcaaaacattaaagtcaaaaactggctggagcgggcgctgcaatcggaacgcaatattaaagagcagattgccgtcctgaagggcagcctgctgttgtctcgtatcctttaccagcaacaacaaacgctgccctcggcggatgagctggaaaacatgaccaaccgcatcgcggatttgcgtctcgaacagtttgaagttaaccagcagcgtgatgcactcttccagagcgatgcgttcgtcaacaaactggaagaaggtcacaccaacgaagtcaacagcgaagttcacgatgcgttattgcaagtagttgatatgcgtcgcgaattgctggatcagcttaacaaacagttgggtaaccagctgatgatggccattaacctgcaaatcaaccagcagcagttaatgagtgtgtcgaaaaacctgaaatccatcctgactcagcaaatcttttgggtgaacagtaaccgtccaatggactgggactggatcaaagcgttcccgcaaagcctgaaagatgaatttaagtcgatgaaaatcacagtgaactgggaaaaagcatggcctgccgtttttatcgctttcctcgccggtttgccgctgctgttgattgccgggctgatccactggcgtctgggctggctgaaagcgtatcaacagaaactggcttccgctgtgggttccctgcgtaacgacagccagctcaacacaccaaaagcgatccttatcgacctgatccgtgcgctgccggtgtgcctgattattctcgcggttggcctgattctgttgaccatgcaactcaacatcagcgaactgctatggtcgttcagtaaaaaactggcgattttctggctggtgtttggcctgtgctggaaggtactggagaaaaacggcgttgccgtgcgtcactttggtatgccggaacagcagaccagccactggcgtcggcaaattgtccgcatcagtctcgcattgctgcctatccatttctggtctgtggtggcagaactttccccgctgcatctgatggatgatgtgctggggcaggcgatgattttcttcaacctgctgctgattgccttcctggtatggccgatgtgccgcgaaagctggcgtgataaagagtcgcacaccatgcgactggtcaccattaccgtgctgtcgattatcccgattgcgttgatggtgctgaccgccacgggttatttctacaccacgctgcgcctctccgggcgttggattgaaaccgtttatttggtgatcatctggaacctgctgtaccagacggtattgcgcggcttaagcgtagcggcgcggcgtatcgcctggcgtcgtgcgctggcgcgtcggcagaatctggtgaaagagggcgcggaaggtgctgaaccgccggaagaacccaccattgcactggagcaggttaaccagcagacgctgcgtattaccatgttgctgatgtttgcgctgttcggtgtcatgttctgggcaatttggtccgatttgatcaccgtgttcagctatctggacagcatcacgctctggcattacaacggcactgaagctggcgctgcggtggtgaaaaacgtcaccatgggcagtctgttgtttgcgattatcgcctcaatggtagcctgggcgttgattcgcaacctgcctggtctgttggaagtgttggtgctctcgcgcctgaacatgcggcagggcgcgtcgtatgccattactaccatccttaactacatcattattgccgttggtgcgatgacggtgttcggatcgctgggcgtctcgtgggataaactccagtggctggcggcagcattatccgtaggtcttggttttggtttacaagagatcttcggtaacttcgtctccggtttgatcattctgttcgaacgtccggtgcgcattggcgatacggtaaccattggtagcttctcggggacggtaagtaagatccgtattcgtgcgacaacgattaccgatttcgatcgcaaagaagtgatcatcccgaacaaagcgtttgttaccgagcgtctgatcaactggtcgttgactgacactactacgcgtctggtgatccgtctcggcgtggcctatggctccgatctggaaaaagtgcgtaaagtgttactgaaggcggcgactgagcacccaagggtgatgcacgaaccaatgccggaagtcttctttacggcgtttggtgccagcacgttggatcatgagctgcgtctgtatgtgcgtgaactgcgtgaccgtagccgtactgtcgatgagctgaaccgtactatcgatcagctgtgccgtgaaaacgatatcaacattgcctttaaccagcttgaagtgcatctgcacaacgagaagggcgatgaggtgacggaagtcaaacgcgactacaaaggcgacgatccgacaccagcggtagggtaa

SEQ ID NO: 262133 - DNA, 165 bp, Klebsiella pneumoniae
atgtcactggaaaatgcccctgacgatgtcaaactggctgtcgatttgattgtgctgctggaagaaaatcagatcccagcccgcaccgtgctgcgcgcgctggatattgtgaagcgtgattatgaaaagaagttacagagcgatgaggcttcgcaaagcgagtaa

SEQ ID NO: 262134 - DNA, 528 bp, Klebsiella pneumoniae
atgaaaaccgccctgctgctggaaaaactggaaggacagctcgccacgctgcgccagcgttgtgccccggtagcgcaatttgccacgctaagtgcccgctttgacaggcacctttttcagacccgtgcgacaacactgcaggcttgtctcgatgaggcgggcgataacatggctgcgcttcgtcatgcggttgagcagcaacagctgccgcaagtggcctggctggcagaacatctggcggcgcaactggaggctatagcgcgtgaagccacagcctggtcgctacgcgagtgggacagtgcgccaccgaaaattgcccgctggcagcgtaaacgtattcagcatcaggattttgagcggcggctacgtgagatggtagccgaacgtcgagcccgcctggcgcgggtgaccgatctcgtggaacagcaaacgctgcatcgtgaagtggaagcctatgaagcgcgcctggcacgctgccgccatgcgctggaaaaaatcgaaaacaggctagcgcgcttaacccgctag

SEQ ID NO: 262135 - DNA, 378 bp, Klebsiella pneumoniae
atgcaacgaatcattttaatcatcattggctggctggcggtagtgctgggtacgctgggcgtggtattaccggtattaccgacgacgccgtttatcctgctggcggcctggtgctttgcccgttcttccccgcgctttcacgcctggttgctgtaccgctcatggtttggcagctatctacgtttctggcagaaacatcatgcgatgccgcgcggcgtcaaaccgcgggcgattttgcttattttgctcacgtttgcaatttctctgtggttcgtccagatgccatgggtgcgcatcatgttgctggtaattctcgcctgtttgcttttttatatgtggcgaattccggtgattgatgaaaagcaagaaaagcactga

SEQ ID NO: 262136 - DNA, 552 bp, Klebsiella pneumoniae
atgaccgcgactgcacagcagcttgagtatctcaaaaatagcatcaaaagcattcaggactacccaaaacccggcattcttttccgtgatgtcaccagcttactggaagacccgaaagcttacgctctcagcatcgacttgctggttgagcgttacaaaaatgcgggcattaccaaagttgtcggcaccgaagcgcgtggcttcttgtttggcgctccggtagctctgggtctgggcgttggctttgtaccggtccgtaaaccgggcaaactgccgcgtgaaaccatcagtgaaacttacgatctggaatacggcaccgatcagctggaaatccacgttgatgccatcaaaccgggcgacaaagttctggtggtggacgatctgctggcaaccggcggcactatcgaagcgaccgttaaactgatccgtcgtctgggtggtgaagtggctgatgctgcgttcattatcaatctgttcgatctcggcggcgaacagcgtctcgaaaaacagggcattaccagctacagccttgttccgttcccgggccattaa

SEQ ID NO: 262137 - DNA, 204 bp, Klebsiella pneumoniae
atgcacttcgtcgatcagataaactttgaaacgaccacgcgccggagcgtactggacgttatccagcaggtcgcgagtgtcttcaactttagtgcgcgaggcggcatcgatttcaatcagatcgacaaagcgcccctgctcgatttcacgacagttatcgcacacgccgcacggcgtcgcggtaatgccggtttcgcagtttag

SEQ ID NO: 262138 - DNA, 675 bp, Klebsiella pneumoniae
atgcgatatccggttgatgtatacacaggcaagattcaggcttatcccgaaggcaaacccagcgcaattgccaaaatccaggttgatggtgagttgatgctgacggagctggggctggaaggtgacgagcaggcggagaaaaaggttcacggcgggccagacagagcgctgtgtcattatcctcgtgagcattatctttactgggcgcgggaatttccggaacaggcggagttgtttgttgcgcctgcgtttggcgaaaatctctcaaccgacggtctgacggaaagtaatgtttatattggcgatattttccgctggggagaggcattaattcaggtcagccagccacgctcaccttgctataaactcaattaccattttgatatcagcgatatagcgcagttgatgcaaaacacgggtaaagtggggtggttgtatagcgtgattgcgccagggttggtatctgctgatgctccgctggagttggtttcccgtgtcagtgatgtgaccgtgcaggaggctgccgccatcgcatggcatatgccgtttgatgacgagcagtatcaccgtttactctccgctgccgggttatcgaaaagctggacgcggacgatgcaaaagcgccgactgagcggcaagatcgaagatttttcccgccggttgtggggaaaataa

SEQ ID NO: 262139 - DNA, 984 bp, Klebsiella pneumoniae
atgcagataaaacgctcgattgagaaaatcccgggggggatgatgctcgtcccgctattccttggcgcactgtgccacaccttctcgccggaggcggggaaatattttggatcattcaccaacgggatgattaccggtacggtgcccattctggcggtgtggtttttttgcatgggggcgtcaataaaattaagcgcgacgggaacggtattgcgtaaatccggtacgctggtggtaactaaaattgccgtcgcgtgggtggttgcggcaattgcctcgcgcattattccggaacatggtgttgaagttggattctttgccggactttcaacgctggcgctggtggcggcgatggatatgaccaacggcggactttacgcttccatcatgcagcagtacggcacaaaagaagaagctggggcatttgtgttgatgtcattggagtccgggccgctcatgacgatgattattctgggcactgccgggattgcctcgtttgaaccgcatgttttcgtcggcgcagtattaccgtttctggtgggctttgcccttgggaaccttgaccctgaattacgagaatttttcagcaaagcggtgcagacgctgattccattctttgccttcgcactgggtaataccattgatttgactgtaattgcccagacaggtttgctggggatcctgttgggtgtggcagtaattatcgtgaccggtattccgttgattatcgctgataaattgattggcggtggcgatggcactgccggaattgccgcttccagttccgcaggggccgcggtagcgacacctgtgctgattgcagaaatggtgcctgcgtttaaaccgatggctccggcagcaacttcgctggtcgcgacggcggtcattgtgacttcgattctggtgccaattcttacctctatctggtcacgtaaagtcaaagccagagcagcgaaaatcgaaattttaggtacggtgaaataa

SEQ ID NO: 262140 - DNA, 939 bp, Klebsiella pneumoniae
atggctttttgcaataacgcgaatctactcaccgtatttgtacgccatattgcgaataatcaacttcgttctctggccgaggtagccacggtggcgcatcagataaaacttctcaaagatgatttttttgccagcgaccagcaggcagtcgctgtggctgaccgttatccgcaagatgtctttgctgaacatacacatgatttttgtgagctggtaattgtctggcgcggcaatggtctgcatgtactcaacgatcgcccttatcgcattacccgtggcgatctcttttacattcatgctgacgataaacactcctacgcttccgttaacgatctggttttgcagaatattatttattgcccggagcggctgaagctgaatcttgactggcagggggcgattccgggatttagtgccagcgcagggcaaccacactggcgcttaggtagcgtggggatggcgcaggcgcggcaggttatcggtcaacttgagcatgaaagtagtcagcatgtgccgtttgctaacgaaatggcagagttgctgttcgggcagttggtgatgttgctgaatcgccatcgttacaccagcgattcgttgccgccaacatccagcgaaacattgctggataagctgattacccggctggcggccagcctgaaaagtccctttgcgctggataaattttgtgatgaggcatcgtgcagtgagcgcgttttgcgtcagcaatttcgccagcagactggcatgaccatcaatcaatatctgcggcagatcagagtgtgtcatgcgcaatatcttctccagcatagccgcctgttaatcagtgatatttcaaccgaatgtggctttgaagatagtaactatttttcggtggtgtttacccgggaaaccgggatgacgcccagccactggcgtcatctcaattcgcagaaagattaa

SEQ ID NO: 262141 - DNA, 837 bp, Klebsiella pneumoniae
atgaccgtattacatagtgtggatttttttccgtctggtaacgcgtccgtggcgatagaaccccggctcccgcaggcggattttcctgaacatcatcatgattttcatgaaattgtgattgtcgaacatggcacgggtattcatgtgtttaatgggcagccctataccatcaccggtggcacggtctgtttcgtacgcgatcatgatcggcatctgtatgaacataccgataatctgtgtctgaccaatgtgctgtatcgctcgccggatcgatttcagtttctcgccgggctgaatcagttgctgccacaagagctggatgggcagtatccgtctcactggcgcgttaaccacagcgtattgcagcaggtgcgacagctggttgcacagatggaacagcaggaaggggaaaatgatttaccctcgaccgccagtcgcgagatcttgtttatgcaattactgctcttgctgcgtaaaagcagtttgcaggagaacctggaaaacagcgcatcacgtctcaacttgcttctggcctggctggaggaccattttgccgatgaggtgaattgggatgccgtggcggatcaattttctctttcactgcgtacgctacatcggcagcttaagcagcaaacgggactgacgcctcagcgttacctgaaccgcctgcgactgatgaaagcccgacatctgctacgccacagcgaggccagcgttactgacatcgcctatcgctgcggattcagcgacagtaaccacttttcgacgctttttcgccgagagtttaactggtcaccgcgtgatattcgtcagggacgggatggctttttgcaataa

SEQ ID NO: 262142 - DNA, 1470 bp, Klebsiella pneumoniae
atgacctttcgcaattgtgtcgccgtcgatctcggcgcatccagtggacgcgtgatgctggcgcgttacgagcgtgaatgccgcagcctgacgctgcgcgaaatccatcgttttaacaatgggctgcatagccagaacggttatgtcacctgggatgtgggtagcctggaaagtgccattcgccttggattaaacaaggtgtgcgaggaagggattcgtatcgatagcattgggattgatacctggggcgtggactttgtgctgctcgaccaacagggtcagcgtgtgggcctgcccgttgcttatcgcgatagccgcaccaatggcctgatggcgcaggcacaacaacaactcggcaaacgcaatatttatcaacgtagcggcatccagtttctgcccttcaatacgctttatcagttgcatgcactgacagagcaacaacctgagcttattccacacattgctcacgctctgctgatgccggattacttcagttatcgcctgaccggcgagatgaactgggagtacaccaacgccacgaccacgcaactggtcaatatcaatagcgacgactgggacgagtcgctactggcgtggagcggtgccaacaaagcctggtttggtcgcccgacgcatccgggtaatgtcataggtcactggatttgcccgcagggtaatgagattccggtggtcgccgttgccagccatgataccgccagcgcggttatcgcctcgccgttaaacggttcacgcgccgcttatctctcttctggcacctggtcattgatgggcttcgaaagccagacgccatttaccaatgacacggcgctggccgccaatatcaccaatgaaggtggggcggaaggtcgctatcgggtgctgaaaaatattatgggcttatggctgcttcagcgggtgcttcaggagcggcaaatcaacgatctcccggcgcttatcgccgcgacacaggcactgccggcttgccgcttcaccatcaatcccaatgacgatcgctttattaatcctgaggcgatgtgcagcgaaattcaggctgcgtgtcgggaaacggcgcaaccaatcccggaaagtgatgctgaactggcgcgctgtattttcgacagtctggcgttgctgtatgccgatgtgttgcatgagctggcgcagctgcgcggtgaagatttctcgcaactgcatattgtcggcggtggctgccagaacgcgctgctcaaccagttatgtgctgatgcctgcggtattcgggtgatcgccgggcctgttgaagcctcgacgctcggcaatatcggcatccagttaatgacgctggatgaactcaacaatgtggatgatttccgtcaggtcgtcagcaccaccgcgaatctgaccacctttacccctaatcctgacagtgaaattgcccactatgtggcgcagattcactctacacgacagacaaaggagctttgcgcatga

SEQ ID NO: 262143 - DNA, 825 bp, Klebsiella pneumoniae
atgcaaaacattacccagtcctggtttgtccagggaatgatcaaagccaccaccgacgcctggctgaaaggctgggacgagcgcaatggtggtaacctgacactgcgcctggatgacgccgatatcgcaccgtatcacgacaacttccaccaacaaccgcgctatatcccgctcagccagcccatgcctttactggcaaatacaccgtttattgtcaccggctccggcaaattcttccgcaacgtccagcttgatcctgcggctaacttaggcgtcgtaaaagtcgacagcgacggcgcgggctaccacattctctgggggctaactcacgaagccgttccaacctctgaactcccggcgcacttcctctcccactgcgaacgcattaaagccaccaacggtaaagatcgggtgatcatgcactgccatgccaccaacctgatcgcccttacctacgtactggaaaacgacaccgcggtcttcactcgccaactgtgggaaggcagcaccgaatgtctggtagtgttcccggatggcgtcggcattttgccgtggatggtgcccggcacggacgaaatcggccaggcgaccgcacaggaaatgcaaaaacattcgctggtgttgtggcccttccacggcgtcttcggcagcggtccgacactggatgaaacattcggtttaatcgacaccgcagaaaaatcagcacaagtattagtgaaggtttattcgatgggcggcatgaaacagaccatcagtcgtgaagagctgatagcgctcggccagcgtttcggcgttacaccactcgccagtgcgctggcgctgtaa

SEQ ID NO: 262144 - DNA, 315 bp, Klebsiella pneumoniae
atgatccgcaaagcctttgtaatgcaggttaaccccgacgcccacgaagagtatcagcgtcggcataaccccatctggccggaactggaagcagtgttgaaatctcacggtgcgcataactacgccatttacctcgacaaagcgcgtaatctgctgtttgccacggtagagattgaatctgaagaacggtggaatgcggtagccagcactgatgtttgccaacgttggtggaaatatatgaccgacgttatgccagctaacccggataacagcccagtcagtagcgagctgcaagaagtgttttacctgccctaa

SEQ ID NO: 262145 - DNA, 1395 bp, Klebsiella pneumoniae
atgaaaaaatcgacattatctttagccatcggtttattattggcatgtagtaccggaatggcaaaaacacagcatttaacgctggaacaacgcatggcattgctggaagaacgcctggaagcggcagaaatgcgggcagcaaaagcagagagccaggttaaacagctgcagacacaacaagccgctgagatccgcgaaattaaggctgcccagggcaatacgccggtaaatggacaggcaacggcggaatctgcaaagaaaaattccacctcacctaatcttttgctctcaggttatggcgatttaaaaatctacggcgatgtagaatttaatatggatgcggaaagtaatcatggcctgctggcaatgaccaacgctgatgtgaatagcgatcccactaatgaacagtggaatctcaatggtcgtattctgttaggttttgatggtatgcgaaaactggataatggctatttcgccgggttctccgcacaaccgctgggggacatgcacggttcagtaaatatcgatgatgcggtattcttctttggcaaacaaaacgactggaaggtcaaagtaggccgttttgaagcctacgatatgttcccgctgaatcaggatacctttgttgaacattccggtaatactgcgaacgatctttatgacgatggcagcggttatatctatatgatgaaagagggccgcgggcgctctaacgctggcggtaatttcctcgtcagcaaacaacttgataacttgtattttgaattaaacacgttacttgaagacggaacatctttatataatgacggtaattatcatggacgcgatgtggagcagcagaaaaatgttgcttatctgcgtccggtaattgcctggtcgccgacggaagaatttaccgtttccgcagcgatggaagcgaacgtggtaaataatgcttatggttataccgatagcaagggtaattttgtcgatcagtccgatcgtaccggctatggtatgagcatgacctggaatggcctgaaaacggatccggaaaatggcgtcgttgttaatcttaataccgcctatttagatgctaataatgagaaagatttcactgccgggattaacgcgctgtggaaacgtttcgagctgggttatatctacgcgcacaataagattgatgaattcagcggtgtagtttgtgataacgactgctggattgatgatgaagggacgtacaccattcacaccattcatgcgtcttatcagttcgctaatgtgatggatatggagaactttaatatttacctcgggacgtattactccattctggatagcgacggtgataaaaaacacggtgatgatactgatgaccgttacggcgcacgcgttcgctttaaatacttcttctga

SEQ ID NO: 262146 - DNA, 447 bp, Klebsiella pneumoniae
atggcagcacttactgcaagctgtattgacctgaatattcagggcaatggcacttattccgttctgaagcagttggcgacaatggcgttacaaaacggttttatcaccgactcacaccagttcctgcaaactctgctgctgcgcgaaaaaatgcactccaccggttttggttccggcatcgccgtgccgcacggtaaaagcgcctgcgttaaacaaccgttcgtgttattcgcccgcaaagcgcaggccattgactggaaagccagcgacggcgaagacgtcaattgctggatctgcctcggcgtgccgcaaagtggcgaagaggatcaggtcaaaatcatcggcacactgtgtcgcaaaattatccaccaggattttatcaaccaactgcgacagggcgacgccgaccaggtgcttgctttgttaaatcaaaccctcagctcataa

SEQ ID NO: 262147 - DNA, 1452 bp, Klebsiella pneumoniae
atggagtcatccttacgtattgtcgcgatcaccaactgccccgccgggatcgctcacacctacatggtggcggaagccctggaacagaaagcccgttctctcggtcataccattaaagttgaaactcaaggatcaagcggcatcgaaaaccgcttatccagcgaagagattgccgctgccgattacgtgattctcgctaccgggcgtggcctgagcggtgatgatcgcgcgcgatttgccgggaaaaaggtttatgaaattgccatctcccaggcgctgaaaaatatcgaccatattttcagtgaattaccgacaaactcacaattttttgccgcagatagcggcgtgaagctcggcaaacaggaagtgcaaagtggcagcgtaatgagccacctgatggcgggcgtctctgcggcgctgccgtttgtcatcggtggcggtattctggtggcgcttgccaacatgctggtgcagttcggtttgccgtataccgatatgtcgaaaggcgcgccgtcgtttacctgggtggttgaatccatcggttatctcggcttcacctttatgatccccatcatgggcgcttatattgcctcgtcgattgccgataaacccgctttcgctccggcgtttctggtttgctatctggcgaacgacaaagccctgctcggcacccagtctggcgcgggcttcctcggtgcggtggtgcttgggctggcgattggctatttcgtcttctggttccgtaaagtgcgccttggcaaagcattacaaccgctgctcggttccatgctgatcccgttcgttactctgctggtttttggcgtactgacttactacgttatcggaccggtgatgtccgacctcatgggcgggttgctgcacttcctgaacaccattcctccgtcaatgaagtttgcggcggcgtttctggtcggtgcaatgctggcgttcgatatgggcggccctatcaataaaaccgcctggttcttctgcttctcactgctggaaaaacacatttacgactggtacgccatcgtcggcgttgtcgcgctgatgccgcctgtcgcggcgggtcttgcgacgttcattgcgcccaagctgtttactcaacaggaaaaagaagccgccagtagcgccattgtggtcggtgccacggtcgcgaccgaaccggctattccttacgctctggcggcaccactgccaatgattaccgccaatacgctggcgggcggcattaccggcgtgctggtgatcgctttcggaatcaaacgactggcacctggtttgggtatctttgacccgctgatcggcctgatgtcgccggtgggttcgttttatctggtgctggcgattggtctcgcgctgaacatttcattcattatcgtcctgaaaggattatggttacgccgcaaagcgaaagccgcgcaacaggagcttgcccatgaacattga

SEQ ID NO: 262148 - DNA, 1071 bp, Klebsiella pneumoniae
atgaacattgagttactgcaacagttgtgcgaagccagcgccgttagcggcgatgaacaggaagttcgcgacattctgatcaacacgctggaaccttgcgttaatgagatcacctttgatggtctgggcagctttgttgcccgtaaggggaataaaggtccaaaagttgccgttgtcgggcatatggatgaagtcggctttatggtcacccacatcgacgagagcggttttctgcgttttaccaccattggcggctggtggaatcagtcgatactcaaccaccgggtaaccatacgcacacacaagggatttaaaatccctggtgtgattggttccgtcgcgcctcatgcgttaacggaaaagcaaaagcaacaaccgctgtcatttgatgagatgttcattgatattggcgcgaacagtcgcgaagaagcggaaaaacgcggcgtggaaattggtaattttattagcccggaagccaattttgcctgctggggcgaagataaagtggtcggcaaggcgttggataaccgcatcggctgcgcaatgatggctgagctattgcagacggtgaataatcccgaaattacgctgtatggcgttggcagtgtggaagaagaagttggcctgcgcggggcgcaaacctcggctgaacacattaaaccggatgttgtgatcgtgctggataccgccgtcgcaggcgatgttccgggcattgataacattaaatacccgctaaaactgggccaggggccggggctgatgctgtttgataaacgctacttccccaaccagaagctggtggtggcgttaaaaagctgtgccacacataacgatttaccgctgcaattttccaccatgaaaaccggtgcgacggatggcgggcgctacaacgtgatgggcggcgggcgtccggttgtcgcgctgtgcctgccaacgcgttatctgcacgccaacagcggcatgatttcaaaagccgattacgatgctctgctcacgctgatacggggttttctgacgaccttaactgcggagaaaatcaacgcgtttagccagttccgtcaggtggattaa

SEQ ID NO: 262149 - DNA, 1749 bp, Klebsiella pneumoniae
atgctaaacgaacgccagttaaagattgtcgatctgctggagcaacagccgcgcacgcctggcgagctggcacaacagactggcgtttcgggcaggaccatcctgcgcgacattgactatctcaactttacccttaacggcaaagcccgcatttccgccagtggcaacgcgggctatcagctggaaatcttcgagcgccgcagcttttttcagttgctgcaaaagcacgataacgacgatcggctgctggcgctgctattactgaataccttcactccccgtgcgcaactcgcctcggcgcttaatttgccagaaacgtgggtagcagagcgcctgccccgcctgaaacagcgctatgaacgcggtttttgtctcgctagtcgccctggtttgggccatttcattgatgagacagaagagaaacgcattattttgctggcgaatcttttacgcaaagatccgtttttaattcctctggcgggcgtaacacgagacaaccttcagcaattatccacggtctgcgacaaccaacaccgctggccgctgatgcagggtgattatctctccagcctgattctggcgatttacgccctgcgtaatcaactgaccgatgagtggccgcaatatcccggtagcgagataaaacagatcgttgaatatagcggcctgtttcttggtgataacgctgtaagaacgttgacggggttgatagaaaaacagcatcaacaggcgcaggttatttgtgtcgataatgtgctggcattgctgcaaagggtgccgggcattgcgtcattgaatattattgatacgcaactggttgagaatattaccgggcatttattacgttgccttgccgcaccagtatggattgctgagcaccgccaaagcagcatgaataacctgaaagccgcctggcctgcggcctttgatatgagtctgcactttattacgctactgcgtgaacagctcgatattccccttttcgacagcgatctgatcggtttgtattttgcctgtgcgctggaacgacatcaaaacgaacgccagccgatcattttgctctcggaccagaacgcgattgccactattaatcagctcgccattgagcgcgatgtcctgaattgtcgggtgattattgcccgcagcctgagcgatattaccgccattagccaggagattacgccgttattgatcgtcaataacagccactatttgctggatgacgcggtaaaaaatagtattaccatcaaaaatatcattaccgccgccgggattgagcaaattaaacattttcttgccacggcatttattcgccagcagccggagcgttttttctctgcccccggaagttttcatttttcgaatgtacgcggtgaaaactggcaacatattacccagcaaatatgtgcacaattagtgacgcaacaccacattaccgccgatgaagcacaacggatcatcgcccgcgaaggcgaaggtgaaaacctgattgttaatcgtctcgccatcccacattgctggagcgaacaggaacgccgttttcgtggattttttattaccctcgcccaaccggttgaggtgaataacgaagtagttaaccatgtgctgatcgcctgtgccgccgccgatgcgcgtcatgagctaaaaatatttagctatctggcaagcgtattgtgtcagcatccggcagaggttattgccgggttaaaaggatatgaggcatttatggagttacttcacaaggggtga

SEQ ID NO: 262150 - DNA, 681 bp, Klebsiella pneumoniae
gtgaattttattattttatttataaacaaaatgcgtgtagtggcgttaacgcctgcgctgcaacctattgatggcgtggcggtgagttatattgatgctgccgtggcgttgggtaataccattaacgaaatggataaatattacacccaggaaaattataaagacgatgcgtttgcgaaagggaaaacgctgcaccagacattcttaaaaaatcttgaagcctttgaacctgtagcagaatcttatcatgcggcgattcaggaaattaacgataagcgccagcttgcggaactgaaaaatattgaacaaagagaagggaaaacattccactactactctctggcagtcatgatttcagcgaaacaaattaataacctgatttcgcaagagaagtttgatgttgatgcggcaatgaagaaagtctctgaactggaaacgctggtggcgcaggccaaagaagcggataaaggcggtatgaatttctcgttcattaattcggcagaccagtatcaactcgaggctaaaaaatatgttcgccgcgtcagagataaagttccgtactctgactgggataaagagcaacttcaggatgcaaacaccagctggatggtcgacgactcatttccgcgagcgttacgcgagtacaacgaaatggtcgatgactataatagcctgcgttaa

SEQ ID NO: 262151 - DNA, 834 bp, Klebsiella pneumoniae
gtgaaaaaaacacagcaaaaagaaatcgaaaatgtgacaaatatcacaggtgttcgtcaaattgagttatggcggcgtgatgatttacaacacccacggttagatgaggtcgcggaagaagttcccgttgcgctggtctacaacggcatttcgcatgtggtgatgatggcgtcgcccaaagaccttgagtactttgcgctcggtttttcgctttccgaggggataatcgaaagtccgcgcgatatctttggcatggatgtcgttccttcctgtaatggtcttgaagttcaaattgagctttccagccgccgctttatggggttgaaggaacgccgccgggcgctggcgggacgtacgggctgtggcgtatgcggtgtagaacagcttaacgatatcgggaaaccggtgcagccgctgccgttcacccagacgtttgatctcaacaaactggatgatgcattacgtcatctcaatgatttccagccagtggggcaactgactggttgtactcacgccgctgcatggatgttgccatctggcgaactggtcggcgggcatgaagacgtgggtcgccatgtggcgctggacaaactgttaggccgccggtcacaagaaggggaaagctggcagcaaggtgcggtgctggtttccagtcgtgccagttatgaaatggtgcaaaagtcggcgatgtgtggcgtagagattttgtttgcggtgtctgccgcgaccacacttgctgtagaagtggctgaacgctgtaatttgacgctggtgggcttttgtaaaccgggtcgggcaacggtttatacccatccgcagcgtttgagcaattaa

SEQ ID NO: 262152 - DNA, 2415 bp, Klebsiella pneumoniae
atgaccaaccactgggtcgacatcaagaacgccaacctcgtcgtggtgatgggcggtaacgccgctgaagctcacccggtcgggttccgctgggcgatggaagccaaaattcacaacggcgcgaagctgattgtgatcgatcctcgctttacgcgtacggcggcggtggctgactactatgcccctattcgttccggtactgacattgctttcctgtcaggcgtattgctgtacctgctgaacaatgaaaaattcaaccgcgaatacaccgaagcctataccaacgccagcctgatcgtgcgtgaggattacggctttgaagatggcctgttcaccggctatgacgcggaaaaacgcaagtacgataaatcctcctggacttacgaactggacgaaaacggcttcgccaaacgcgataccacgctgcaacatccgcgctgcgtgtggaacttgctgaaacagcacgtttcccgctacacgccagatgtggttgaaaacatctgtggtacgccaaaagacgcgttcctgaaagtctgcgaatacatcgcagaaaccagtgctcacgataaaactgcctcgttcctgtatgccctcggctggacgcaacactccgttggtgcgcaaaacattcgtacgatggcgatgatccagctgctgctcggcaacatggggatggcaggcggcggcgttaacgccctgcgcggtcactctaatattcaggggctgacggacctggggctgctgtcgcagagcctgccaggttacatgacgctgccaagcgagaagcagaccgatctgcaaacctaccttaccgccaacacgccaaaaccgctgctggaaggccaggtaaactactggggcaactacccgaaattcttcgtctctatgatgaaggccttctttggtgataaagcgacggcggaaaatagctggggctttgactggttgccgaagtgggataaaggctacgacgtcctgcaatacttcgagatgatgaaagaaggcaaggtcaatggctatatctgccagggctttaaccctgttgcctcattcccgaacaaaaacaaagtgatcagttgtctgtcgaaactgaagttcctcgtcactatcgacccgctgaacactgaaacctctaacttctggcagaaccacggtgagctgaacgaagttgactcgtcgaagatccagaccgaagtgttccgtctgccatcgacctgcttcgcggaagagaacggttcaatcgttaactcaggtcgctggttgcagtggcactggaaaggtgcggacgcccctgggattgcgctgactgacggcgagatcctctccggtatcttcctgcgcttgcgcaagatgtatgccgaacagggtggcgcgaacccggaccaggtgctgaacatgacctggaactacgccatcccgcatgagccgaagtcggaagaagtggcgatggagagcaacggtaaggcgctggccgatattaccgatccggcaaccggtgcggttatcgtcaagaaaggccaacaacttagctcgttcgcccaactgcgcgatgacggtaccacctcctgtggctgctggattttcgccggtagctggacgccagagggcaaccagatggcgcgtcgtgataacgccgatccgtctggcctcggtaacacgctgggctgggcatgggcatggccgcttaaccgccgcattctgtataaccgcgcctccgcagatccgcagggtaacccgtgggatccgaagcgtcagttgctgaaatgggacggcactaagtggaccggctgggatattccggactacagcgcagcgcctccgggcagtggcgttgggccgtttatcatgcagcaggaaggcatggggcgtctgtttgccctcgataagatggcggaaggtccgttcccggaacactacgagccgtttgaaacgccgctgggaactaacccgctgcatccaaacgttatctcgaacccggctgcacgtatctttaaagacgacgccgaagcattgggtaaagccgataagttcccgtatgtcggaaccacctatcgtctgaccgagcacttccactactggaccaaacacgcgctgttgaacgcgattttgcaaccagagcagtttgtggaaatcggtgagtcgctggcgaataaacttggcattgcccagggcgatacagtgaaagtctcctccaaccgtggctatataaaagccaaagcggtggtgaccaaacgtattcgcacgctgaaagcgaacggcaaagatatcgataccatcggtatcccgattcactggggctatgaaggtgttgcgaaaaaaggctttattgccaatacgttaacgccattcgttggtgatgcgaacacgcagacgccagagtttaagtccttccttgtgaatgtggaaaaggtgtaa

SEQ ID NO: 262153 - DNA, 186 bp, Klebsiella pneumoniae
atgatgatgaacgaggcaaacataaccacgccgacaaacgggtgcagaattcgcgccagctgcggtgtgcccatgatttgcatcaaccagttgaaggacgggaacaaaaagcccagcccgctcaccgccgccaggatgaagcagaaggcggtgatccagtggttgatacgttccggcgcggtgtag

SEQ ID NO: 262154 - DNA, 189 bp, Klebsiella pneumoniae; identical to SEQ ID NO: 9782

SEQ ID NO: 262155 - DNA, 276 bp, Klebsiella pneumoniae; identical to SEQ ID NO: 9785

SEQ ID NO: 262156 - DNA, 228 bp, Klebsiella pneumoniae
gtgaggaggcgtaacgcgagaggcggtataagcagaacggtctcggtgtatctcgatgaagatacaaataaccgacttattaaggccaaagatcgtagtggaagaagtaaaacgatagaagtccagatccgtctcagagatcatctgaaacggtttcctgatttctataacgaagaaatattcagggaggtgaccgaagagagcgagtcaacatttaaagaactttag

SEQ ID NO: 262157 - DNA, 294 bp, Klebsiella pneumoniae; identical to SEQ ID NO: 9787

SEQ ID NO: 262158 - DNA, 804 bp, Klebsiella pneumoniae
atgaccgactccaacgttatcgataaagtatccctggtgtacggccagatgaacgagccgccgggaaaccgtctgcgcgttgcgctgaccggcctgaccatggctgagaaattccgtgacgaaggtcgtgacgtactgctgttcgtcgataacatctatcgttacaccctggccggtactgaagtatccgcgctgctgggtcgtatgccttcagcggtaggttatcagccgaccttggcggaagagatgggcgttctgcaggaacgtatcacctccaccaaaaccggttctatcacctccgtacaggcggtatacgtaccggcggatgacttaactgacccatccccagccactacctttgctcacttagatgcaaccgtagtactgagccgtcagatcgcatccctgggtatctacccggccgttgacccgctggattccaccagccgtcagctggatccgctggttgttggtcaggaacactacgacaccgcgcgtggcgttcagtccatcctgcagcgttatcaggaactgaaagacattatcgccatcctcggtatggacgaactgtctgaagaagacaaactggtggtagctcgcgcgcgtaagatccagcgcttcctgtcccagccgttcttcgtggcagaagtctttaccggttctccgggcaaatacgtggcgctgaaagacaccatccgtggctttaaaggcatcatggaaggcgaatacgatcacctgccagagcaggcgttctacatggtcggttccatcgacgaagccgtggaaaaagccaaaaaactttaa

SEQ ID NO: 262159 - DNA, 1260 bp, Klebsiella pneumoniae
atggcgtggaatcagcccggtaataacggacaagaccgcgacccgtggggaagcagcaaacctggcggcaactctgagggaaatggaaacaaaggcggtcgcgatcaagggccacctgatttagatgatatcttccgcaaactgagcaaaaagctcggtggtctgggcggcggtaaaggcaccggatctggcggtggcagttcatcgcaaggcccgcgcccgcagcttggcggtcgtgtcgttaccatcgcagcggcagcgattgtcattatctgggcggccagtggtttctataccattaaagaagccgaacgtggcgtggtaacacgctttggtaaattcagccatctggttgagccgggtctgaactggaaaccgacgtttatcgacgaagtcaaaccggtgaacgtggaagccgtgcgtgaactggccgcttctggtgtgatgctgacgtcggacgagaacgtagtgcgcgttgagatgaacgtgcagtaccgcgtcaccaatccggaaaaatatctgtatagcgtgaccagcccggatgacagcctgcgtcaggctaccgacagcgccctacgcggggttatcggtaaatacaccatggaccgcattctgacggaaggtcgtaccgtgattcgtagcgatactcagcgcgaactggaagagacgattcgtccgtatgacatgggtatcactctgctggacgtcaacttccaggcagctcgtccgccagaagaagtaaaagcggcgtttgacgatgcgattgccgcgcgtgaaaacgaacagcaatatattcgtgaagcagaagcgtataccaacgaagttcagccgcgtgcgaacggtcaggcgcaacgtatcctcgaagaggcgcgtgcgtacaaggcccagaccatcctggaagctcagggtgaagtggcgcgctttgctaaacttctgccggaatataaagccgcgccggaaattactcgcgagcgtctgtatatcgagacgatggaaaaagtgttgggcaacacccgcaaagtgctggttaacgataaaggtggcaacctgatggttctgccgttagaccagatgctgaaaggtggtaacgcccctgcggcgaagagcgataacggtgccagcaatctgctgcgtctgccgccagcctcttcctccacaaccagtggagcaagcaacacgtcgtccaccagtcagggcgatattatggaccaacgccgcgccaacgcgcagcgtaacgactaccagcgtcagggggaataa

SEQ ID NO: 262160 - DNA, 198 bp, Klebsiella pneumoniae
atgaattcgacaatctggctggcgcttgccctggttttggtgctcgaaggtttagggccgatgctttacccgaaggcatggaagaagatgatctctgcgatgaccaatttgcctgataatattttacgtcgttttggcggtggacttgtggttgcgggcgttgtggtctactacatgttgaggaaaacgattggctga

SEQ ID NO: 262161 - DNA, 402 bp, Klebsiella pneumoniae
atgacatggaatccgttggcgctggcgacggcgctgcaaactgtacctgaacaaaatattgatgtaacaaatagcgagaacgcattaattattaaaatgaatgattatggcgatttgcaaatcaatattctttttacttcccgccaaatgattatcgaaacctttatttgtccggtgagtagtatcagcaatccagatgaatttaataccttcttattaagaaatcagaagatgatgccgttgtcatcggtagggatctccagcgtgcaacatgaagagtattacattgttttcggggcgttatcgcttaaatcttctcttgaagatatcctgcttgagataacctcgctggtagataacgcattggatctggctgaaattacagaagaatattcactctaa

SEQ ID NO: 262162 - DNA, 699 bp, Klebsiella pneumoniae
atgggaattttaaaaagtttatttacgctggggaaatcgtttatctcccaggcggaagaatccattgaagaaacccagggcgtgcgcatgctggaacagcatatccgtgacgctaaagctgaactcgataaagccggaaaatctcgcgttgatctgctggcgcgggtgaaattaagtcacgataagctgaaagatttacgtgagcgcaaagccagtctggaagctcgtgcgctgaaagcgttaagcaagaacgttaatccgtcgttgattaacgaagttgctgaagaaatcgcgcgccttgagaatctcattaccgctgaagagcaagtgttgtcgaatctggaagtctctcgtgatggcgtggaaaaagcagttacagcgacagcgcagcgtatcgctcagtttgagcagcaaatggaagtcgttaaagccactgaagccatgcagcgtgcacaacaggctgtaacgacctctaccgttggcgcatcttccagcgtttcgacagcggcagaatccttaaaacgcctgcaaacgcgtcaggccgaacgtcaggctcgtctggatgctgctgcacagttggaaaaagtcgcagacggtcgcgatcttgatgaaaagctggcggaagccggaataggcggtagcaataaaagtagcgcccaggatgtattagcaagactgcaacgccaacagggcgagtaa

SEQ ID NO: 262163 - DNA, 660 bp, Klebsiella pneumoniae
atgtctggttttttccagcgtctgtttggcaaggataataagcctgctatcgctcgcggtccgctgggtctgcatctcaatagtggttttacgctcgacacgttagcgtttcgtttgctggaagatgaattgctgattgcgctgccgggtgaggaatttacggtagccgccgtcagccgcatcgatctgggcggcggtagccagattttccgctactacacttcaggcgatgagtttctgcaaatcaataccaccggcggcgaaaatattgatgacattgatgatatcaagctctttgtctatgaagagagctacggtatcagtaaagagagtcactggcgcgagacgatcaatgccaaagcgatgggggcaatgaccttaaactggcaggaaaaacgctggctgcgattttttaacagcgaagaaccgggaaatatcgaacccgtctacatgctggaaaaagtagaaaatcaaaaccatgccaaatgggaagtacataattttaccatgggctaccaacggcaagtaaccgaagatacttacgaatatttgctgctaaatggtgaggaatcttttaacgatctcggcgagccagagtggttattttcgcgcgcgttgggtgtcgatatcccgctgacatcacttcatattattggttaa

SEQ ID NO: 262164 - DNA, 399 bp, Klebsiella pneumoniae
atgcatatactggattctcttcttgcctttagtgcctatttttttattggcgtggctatggtgattatttttctgtttatctattctaaaattacaccgcacaacgaatggcagttaatcaaaaacaataataccgcggcgtcactggcgttcagcggtacattgttgggttacgtgatccccttatccagtgcggcaatcaatgcggtgagtattccagactatttcgcctggggcgggattgctctggtgattcaattactcgtttttgctggcgtcaggctttatatgcccgcattaagcgaaaaaattattaatcacaataccgcagcaggaatgtttatgggaaccgccgcactggctggtggtatttttaacgcagcttgtatgacatggtaa

SEQ ID NO: 262165 - DNA, 639 bp, Klebsiella pneumoniae
atggccagaaaacgcaaatcaagaaataacagtaaaattggtcacggagcgatcagtcgcattggcagaccgaataatccttttgaaccgcgtcgcaatcgctacgcacaaaaatacttaacgttggcgctaatgggcggtgccgcttttttcgtattgaaaggttgtggcgatagtggcgatgtcgataacgacggcgacggaacgttttactcgactgtgcaggattgtattgatgacggtaataattcagatatctgtgctcatggctggaacaacgccaaagcggcgttttatgccgatgttccgaagaatatgactcagcagaattgtcagtctaagtatgaaaattgttactacgacaacgttgaacagagttggatcccggtcgtttctggatttttgttaagccgggttattcgtaaagatcgcgatgagcagtttgtgtataacagcggtggttcctcttttgcttcgcgccccgtctggcgcaacacttctggtgattactcctggcgctccggttctggcaaaaaagagtcttactcttcgggcggctttaccaccaaaaaagcgtcaaccgtttctcgcggcggctatggtcgttcttccagcgcccgtgggcattggggaggctaa

SEQ ID NO: 262166 - DNA, 1164 bp, Klebsiella pneumoniae
atgctgagacacaacgttcctgtgcggcgggatctggaccagatcgccgctgacaacggtttcgactttcatatcatcgacaatgaaatctattgggacgagagtcgggcttaccgttttactctgcgccagattgaagagcagatcgaaaaaccgactgcggaactgcatcagatgtgccttgaggtggtggatcgcgcggttaaagacgaagagatcctgacgcaactggcgatccctccgttgtactgggatgtgatcgctgaaagctggcgcgcacgcgatccttcgctgtatggccggatggattttgcctggtgtggcaatgcgccggtgaagctgctggagtacaacgccgatacgccaacctcgttgtatgaatcggcttattttcagtggctgtggctggaggatgcccggcgcagcggcgttattccgcgtgataccgatcagtacaatgccattcaggaacgcctgatttcgcgctttagcgagctttatagtcgggagccgttttatttttgctgttgtcaggacactgacgaagacaggagtaccgtgctgtacttgcaggactgcgcccagcaggcagggcaggagtcgcggtttatctacattgaagatctcggtttgggcgtcggcggtgtactgaccgatcttgatgataatgtcatccagcgtgcatttaagctgtacccgctggagtggatgatgcgtgacgataacggtccgctgctgcgcaagcgccgcgagcaatgggtggagccgttatggaaaagtatcttgagtaacaaagggctaatgccgctgctttggcgcttctttcctggtcatcctaatcttctggcgtcctggtttgagggcgaaaaactgcagatcgccgctggcgaaagctatgtgcgtaaaccgatctactcgcgcgagggcggtaacgtcaccattttcgacggtcagaataacgtcgttgaccacgctgacggtgattacgccgatgaaccgatgatctatcaggcgtttcaacctctaccgcgatttggcgatagttacacgctgattggtagctggattgtcgatgatgaagcgtgcggtatgggtatccgcgaagataacacgctgatcactaaagacacttcgcgttttgttccgcactacattgcgggttaa

SEQ ID NO: 262167 - DNA, 1626 bp, Klebsiella pneumoniae
gtgcactggcaaactcacactgtttttaatcaacctatacccttaaataacagcaatttatacttatctgatggcgcgctctgcgaagcggtaacacgcgaaggcgctggctgggatagcgattttctcgccagtattggtcagcaactcggaacggctgaatcccttgaactggggcgactggcgaatgtaaacccacctgaactattgcgctacgatgcccaggggcggcgtctggacgatgtccgtttccatcccgcatggcacctgctgatgcaggcgttatgtaccaatcgggtacacaacctggcctgggaagaagacgctcgctccggcgcatttgtggcgcgcgcggcgcgttttatgttacatgcgcaggttgaggctgggtcgttatgtccgataaccatgacctttgccgccacgccattgctgttacagatgttacccacgccgtttcaggactggaccacgccgctgttgagcgatcgctacgattctcacttattgccaggtgggcaaaaacgcggtttgttgattggcatgggaatgacggaaaagcagggcggttccgatgtgatgagcaacaccacccgcgcagagcgtctggaagatggctcttatcggctggtggggcataaatggtttttctcagtgccacaaagcgatgcgcatctggtgctggcgcagaccgcgggcggtctgtcctgcttttttgtgccgcgctttttgcctgacgggcaacgcaacgcgattcgcctcgagcggctgaaagacaagctgggtaatcgttccaatgccagttgcgaagtggagtttcaggatgccattggctggttgttgggtcaggaaggggaagggattcgtctgatcctgaaaatgggtgggatgacgcgttttgattgcgccctgggtagccatgccatgatgcgccgtgcgttctcgctggcgatatatcacgctcatcaacgccatgtatttggtaatccgttaatagaacagccccttatgcgccatgtcttaagtcgcatggcgcttcagcttgaagggcaaacggcgttgctgtttcgtcttgcgcgagcgtgggatcggcgtgccgatgccaaagaagccctgtgggcgcgcttatttacgcctgcggcgaaatttgtgatctgcaaacgtggcattccgtttgtggctgaggcgatggaggtgctgggcggtattggctattgcgaagagagcgagctgccgcggctttaccgggagatgccggtaaacagtatttgggaaggttccggcaatattatgtgcctggatgtgctgcgcgttcttaataagcaagcgggagtatacgacttgctgtcggaagcgtttatggaagtgaaagggcaagatcgttattttgatcgcgcggttcgtcgtttacagcagcagttgcgtaagccagctgaagaactggggcgagagattactcatcagctattcctgctgggctgcggtgcgcaaatgttgaaatatgcttctccgccaatggcacaggcgtggtgtcaggtgatgttaaatacgcgcggtggcgtgcggttgtcagagcagatccagaatgatttattgctgcgggcgacggggggagtgtgtttgtaa

SEQ ID NO: 262168 - DNA, 276 bp, Klebsiella pneumoniae
atgaaacaattacttgcctcaccctcgctgcaattagtgacttatcctgcgagcgccacggcacagtctgcagaattcgccagtgctgactgcgtgacgggcctgaatgaaataggtcagatctcagttagcaatatttcaggggatccgcaggacgtggaacgtatcgtggcgttaaaggccgatgaacaaggtgcgtcatggtaccgcattattaccatgtacgaagaccaacagcctgataactggcgtgtacaggcgatactgtatgcgtga

SEQ ID NO: 262169 - DNA, 330 bp, Klebsiella pneumoniae
atggttagcaggaaacgtaatagcgttatttaccggtttgccagtttattattggtgttaatgttaagtgcctgtagcgcactgcaaggtacgccacagccagcaccgccagtaacggaccatccgcaagagattcgccgcgaccagacgcaagggttacagcgaataggtagcgtaagcacgatggttcggggttctccggatgacgcattagcagaaatcagagcgaaagctgtcgctgcaaaagctgattattacgttgtcgtcatggtggacgaaaccatcgtgacaggacagtggtattcacaagccattttgtaccgtaaataa

SEQ ID NO: 262170 - DNA, 750 bp, Klebsiella pneumoniae
atgattgaaatagaatcacgcgagctggcagatattcccgttcttcatgcttatcctgtcgggcaaaaagataccccgttaccgtgcgcgattttttatcacggctttacttcgtccagtctggtgtatagctattttgccgttgcgctggcgcaggctggtttgcgggtgatcatgccggatgcgcccgatcacggtagccgttttaggggcgacgcagcgcggcggttaaatcaattttggcaaattttgctacaaagtatgcaggaattcactacgttacgtgcggcaatagccgaagaaaactggctgcttgctgaccgtctggcagtcggtggcgcgtcgatgggcgcgatgacggcactgggaattaccgctcgccaccccacggtgaaatgtaccgccagcatgatgggatcgggctattttacatcgctcgcccgttcactgtttccaccgctgatacctgaaacggcagcacagcagaatgaattcaataacattgtcgcgccgctggcagagtgggaagcgacaaaccacctggaacaacttggtgacagacctctactgctgtggcatggccttgacgatgacgtcgtgcctgccgacgaatcactacgtttgcagcaggccttaagcgagacgggacgggataaactgctaacctgttcatggcagccaggcgtgcgtcaccgcattacgcctgaggcgttagatgctgccgtgacatttttccgccagcatctttaa

SEQ ID NO: 262171 - DNA, 756 bp, Klebsiella pneumoniae
atgactgaagcacaaagacatcaaatcctcctggaaatgctcgcacaattgggctttgtgaccgttgagaaagtcgttgagcgtctgggaatttcgcctgccactgcgcgacgcgatatcaataaacttgacgaaagcggcaaactgaaaaaagtgcgcaatggcgcagaagctattacccagcagcgcccacgctggacgccgatgaatctgcatcaggcgcagaatcacgatgaaaaagtacgtattgctaaagcggcctcgcagctggttaatccgggcgaaagcgtagtcatcaactgcggctccaccgcgtttctgcttgggcgggaaatgtgtggcaagcctgtgcaaatcatcactaattatctaccgctggcaaattacctgatcgatcaggagcatgacagcgtgatcattatgggcggacaatacaacaaaagtcagtccatcactttaagcccgcaaggcagcgaaaacagtctctatgccgggcactggatgtttaccagcggcaaagggctgacagcagaagggttgtataaaaccgatatgctgacggcaatggcagagcagaagatgctaagcgtggtagggaaactggtggtactggttgatagcagtaagatcggcgaacgcgcgggaatgctttttagccgtgccgatcaaatcgatatgctgatcaccggcaaaaatgctaacccggaaatcctgcaacaactggaagcgcaaggggtcagcattctgcgtgtttaa

SEQ ID NO: 262172 - DNA, 1065 bp, Klebsiella pneumoniae
atgagtaaagtgaaaagtatcacccgtgaatcctggatcctgagcactttcccggagtggggtagctggctgaatgaagaaattgaacaagagcaggtcgcccctggcacatttgcgatgtggtggctaggctgcaccgggatctggctgaaatcagaaggtggcaccaacgtttgcgttgatttctggtgcggcactggcaaacaaagtcacggtaacccgttaatgaaacagggtcaccagatgcagcgcatggctggcgtgaaaaaactgcagccaaacctgcgcaccaccccgtttgttcttgatccgtttgcgattcgccagatcgacgcggtactggcgactcacgatcacaacgatcatatcgacgttaacgtcgctgctgccgtgatgcagaactgtgctgatgacgtaccgttcattggaccgaaaacctgcgttgatttgtggattggctggggcgtaccgaaagagcgttgcatcgtggtcaaacctggcgatgttgtaaaagtgaaagacattgaaattcatgcgcttgacgctttcgaccgtactgcactgatcaccctgcctgccgatcaaaaagcggctggcgtactgccagatggcatggacgatcgcgcagtaaactacctgttcaaaacccctggcggttccctgtatcacagtggcgattcccactactctaactattatgcgaagcacggtaacgaacatcagatcgatgtggcgttaggatcgtatggtgagaacccgcgcggtattaccgacaaaatgaccagcgccgatatgctgcgtatgggtgaagccctgaatgcgaaagtggttatcccgttccaccacgacatctggtcaaacttccaggccgatccgcaagaaatccgcgtgctgtgggagatgaaaaaagatcgtctgaagtatggcttcaagccgtttatctggcaggtgggcggcaaatttacctggccgttggataaagacaacttcgagtaccactatccgcgtggtttcgatgattgcttcactattgaaccggatctgccgttcaagtcattcctgtaa

SEQ ID NO: 262173 - DNA, 306 bp, Klebsiella pneumoniae
atgaccgtacgtattctggctgtgtgtggcaacggacaaggcagttccatgatcatgaagatgaaagtggaccagtttttaacccaatcaaacattgaccacacggtaaacagctgcgcggttggcgaatacaaaagcgagttgagcggcgcggatatcatcatcgcttctacgcacattgcgggcgaaatcaccgtgaccggcaacaaatacgtggttggcgtgcgcaacatgctctctcctgctgactttggcccgaaactgctggaagtgatcaaagcgcatttcccgcaggatgtgaagtaa

SEQ ID NO: 262174 - DNA, 465 bp, Klebsiella pneumoniae
atgaaattacgtgattcgctggcggaaaataaatccatccgcctgcaggctgaagctgagacatggcaggacgcagtaaaaatcggcgttgacctgctggtagcggcggatgttgtcgagccgcgttactaccaggcgattctggatgcggttgaacagcacggtccgtactttgtgctcgcaccaggcctggcaatgccgcacggtcgcccggaagagggcgttaagaaaaccggttttgcgctagtgacgctgaaaaagccgctggagttcaaccacgaagataacgatccggtggatatcctcatcaccatggcggcggtcgatgccaacactcaccaggaagtgggcatcatgcagatcgtcaatctgtttgaagatgaagagaatttcgaccgtttacgtgcctgccgtaccgagcaggaagtactggatttaattgaccgcaccaacgcggcagcttaa

SEQ ID NO: 262175 - DNA, 855 bp, Klebsiella pneumoniae
atgttgtccaaacaaatcccgcttggcatctatgaaaaagcgctccccgccggggagtgctggctggaacggctgcaactggcaaaaacgttaggcttcgattttgtcgagatgtcggtagatgaaacagacgatcgcctgtcgcgcctcgactggagccgcgagcagcgtctggcgctggtgaatgcgattgttgaaaccggcgtgcgtgtaccgtctatgtgcctttctgctcatcgtcgtttcccgctgggcagcgaagatgacgcggtacgggcgcaggggctggagattatgcgtaaagctatccagttcgcccaggacgttggcattcgcgtaatccaactggcgggctatgacgtttactatcaggaagccaataacgaaacgcgtcgtcgtttccgtgacggcctgaaagagagcgttgagatggcaagccgcgcgcaggtgacgctggcgatggagatcatggattacccgttgatgaactccatcagtaaggcgttgggttacgcgcactatctcaacaacccgtggttccagctctacccggatatcggcaacctgtcggcgtgggacaacgacgtgcagatggaattgcaggccggaattgggcatatcgtcgcggtgcatgtgaaagacaccaaaccaggcgtcttcaaaaacgtgccgtttggcgaaggtgtggtggatttcgaacgttgcttcgaaacgctcaaacagagtggctattgcgggccgtacctgattgagatgtggagcgaaacggcggaagacccggcggcagaagtggcgaaagcgcgtgattgggtgaaagcgcgcatggcgaaagcgggcatggtggaggcggcataa

SEQ ID NO: 262176 - DNA, 687 bp, Klebsiella pneumoniae
atgcaaaagctaaaacagcaggtatttgaagccaacatggatctgccgcgctacgggctggtgacctttacctggggcaacgtcagcgccattgaccgcgaacgcgggctggtggtgatcaagcccagcggcgttgcctacgaaaccatgaaagcggccgatatggtggtggttgatatgagcggcaaggtggtggaaggggaatatcgcccgtcttccgacaccgcgacgcatctcgaactctaccgtcgttatccgtcgcttggcggcattgtccatacccactccactcatgctaccgcatgggcgcaggcggggctggcgatcccggcgttaggcactacgcacgccgactacttctttggtgatatcccgtgtacgcgcggattaagcgaagaagaggtgcagggtgagtacgaactgaacaccggcaaagtgattatcgaaacgctgggcaacgccgagcctctgcatacaccggggattgtggtgtaccagcacgggccgttcgcctgggggaaagatgctcacgatgcggtgcataacgcggtggtgatggaagaagtggcaaaaatggcgtggattgcccgcggcattaacccacaattgaatcacatcgacagctacctcatgaataaacacttcatgcgtaagcacggtcccaacgcttattacgggcagaagtaa

SEQ ID NO: 262177 - DNA, 276 bp, Klebsiella pneumoniae
atgttcagtcgtgttttagcccttctggctgtgcttttgctaagtgcaaatacatgggcagccattgaaattaataaccaccaggccagaaatatggacgatgtgcaaagcttaggcgtgatttatatcaaccataacttcgccactgaaagtgaagcacgtcaggcattaaatgaagagacagatgcgcagggcgcaacgtactaccatccgatcctgatacgggaaccgggaagtaacggcaatatgcacgccagcgcggatatttatcgctag

SEQ ID NO: 262178 - DNA, 798 bp, Klebsiella pneumoniae
atgctggcaaaagataagactaacctaaagattgaagaaatacggatgcataaacatcatgagattcacagggttaagcctcttatgccagctttatgtcgtatccgtcagggaaaaaaagttatcaattgggagacgcatagtctaactgttgataataatcagataatattatttccctgtggatatgaattttatattgcgaattatccagaagcaggtctttatcttgcagaaatgctttgttatcccattgatctaattgaaaagtttcaaaaattttatgcgataactgatcaaattcgtaacacgacaggtttctgcttacctcagaaccccgagttaatatattgttgggagcaactaaaaacatctatttcccgaggcttctcaacgcaaattcaggaacacttagcaatgggcgttctactttcattaggagcacatcatgttaattgtttacttttatcagatagtaaacaatcattaataagtcgttgttataacctaatgctatccgaacctggaacaaaatggacagcaaacaaggtagcgagatatctctacatttctgtttccacattgcatcgccgtctggcaagcgagggagtaagttttcaaagtatattggacgacgtgaggttaaataatgcgttgtctgctatacaaacgacagtaaaacccatcagcgagattgccagggaaaatggttacaagtgtccttctcgttttactgaaaggttccataatcgttttaagataacaccaagagagctaagaaaagcgtccagagagtaa

SEQ ID NO: 262179 - DNA, 552 bp, Klebsiella pneumoniae
atgaaaaaacttatcgtttcaagtgtattggcattcataacattttctgcgcaggccgcagcatttcaggtcactagtaatgaaataaaaacaggagagcaacttacaacgtctcatgtattttctggatttgggtgtgaaggtggtaatacatcgccctcattaacctggtctggtgctcctgaaggcaccaaaagctttgccgtaactgtgtatgatccagatgctcctacaggcagtggatggtggcactggactgttgctaatattccagcaactgtaacatatttgcccgctgatgcaggaagacgtgatggtacaaaacttccgactggtgctgttcaaggccgaaatgattttggttatgcaggatttggtggagcatgtcctcccaaaggagataaaccccatcattaccagtttaaagtatgggctctaaaaactgataaaattcctgtggattctaattccagcggagcgttagttggttatatgcttaatgccaataaaattgcaaccgctgagataacaccagtttatgagataaagtag

SEQ ID NO: 262180 - DNA, 315 bp, Klebsiella pneumoniae
atgtcagcgatacaggggattgaaggggttatcagccagttacaggctacggcgatgagtgcgcgtgcgcaggaatcactgccgcaaccgaccattagttttgccgggcagctgcacgccgcgctcgatcgcataagcgatacacaaacagccgcccgcacgcaggcagaaaaattcaccctcggtgaacccggcgtggcgctaaacgatgtgatgaccgatatgcaaaaagcctcagtttctatgcaaatggggattcaggtgcgtaataagctggtggcggcgtatcaggaagtgatgtccatgcaggtgtag

SEQ ID NO: 262181 - DNA, 1659 bp, Klebsiella pneumoniae
atgaatgcgactgcagcccagacaaaatctcttgagtggcttaatcgcctgcgtgcgaatccgaaaattccattgattgttgccggttccgcagcagtggcggtcatggtcgcactgatcctgtgggcgaaagcccccgactaccgcacattattcagcaatctttccgatcaggatggtggcgcaattgtcagccaactgacgcaaatgaatattccttaccgcttcagcgaagccagcggcgctattgaggttccggcagataaagttcacgaactgcgcctgcgcctggcgcaacaaggtttgcccaaaggcggcgcggtcggtttcgaactgctcgatcaggaaaagtttggtatcagccagttcagcgaacaggtgaattatcagcgggcgctggaaggcgagctttctcgtaccatcgaaactatcggcccggtaaaaggggcgcgcgtacatctggcaatgccgaaaccgtctttattcgtccgtgaacaaaaatccccttctgcatcggtgacggtaaatctgttacccggccgcgcactcgatgaagggcaaattagcgctattgtacatctggtttccagcgcggttgctggtctgccgccaggaaacgtcacgctggtggatcagggcgggcatctgttaacccagtccaataccagcgggcgcgatcttaatgacgctcagttgaaatatgccagcgatgtcgaaggccgtattcagcggcgtattgaagcgatcctgtcgcctattgttggtaacggtaatattcacgcccaggtcacggcgcaactggacttcgccagtaaagaacaaacggaagaacagtatcgccctaacggtgatgaatctcatgcggcgcttcgttcacgccagcttaatgagagcgagcaaagcggttccggttatccgggcggcgtaccgggggcgttgtcgaatcaaccggcacctgcgaataacgcaccaatcagcacgcctccggcaaatcaaaataaccgccagcagcaggcgagcaccaccagcaatagtgggccgcgtagcacacagcggaatgaaaccagtaactacgaagtcgatcgcaccattcgtcataccaaaatgaacgtgggcgatgtgcaacgtctgtcagtcgcggtagtggtgaattacaaaaccttgccagacggtaaaccattgcctctcagcaacgaacagatgaagcaaattgaagctctgacccgcgaggcgatgggcttttctgaaaaacgcggtgattcgctcaatgttgttaactcgccgttcaatagcagtgacgaaagcggcggagcactgccgttctggcaacagcaagtgtttatcgatcagttgctggctgccggtcgctggttgctggtactgctggtggcgtggttgctgtggcggaaagcggtacgcccgcagctaacacgtcgcgccgaggcggtgaagactgtgcagcaacaagcgctggcccgcgaggaaatggaagatgcggtggaagtccgtctgagcaaagacgaacaactccaacaacggcgcgctaaccaacgactgggggcagaagtcatgagccagcgtatccgtgaaatgtctgataacgatccgcgcgtggtggcgctggtcattcgccagtggataaataacgatcatgagtaa

SEQ ID NO: 262182 - DNA, 996 bp, Klebsiella pneumoniae
atgagtaacctgacaggcaccgataaaagcgtcatcctgctgatgaccattggcgaagaccgggcggcagaggtgttcaagcacctctcccagcgcgaagtgcaaacccttagcgctgcaatggcgaacgtcacgcagatctccaacaagcagctaaccgatgtgctggcggagtttgagcaagaagctgaacagtttgccgcactgaatatcaacgccaacgattatctgcgttcggtattggtcaaagctctgggtgaagaacgtgccgccagcctgctggaagatattctcgaaacccgcgataccgccagcggtattgaaacgctcaactttatggagccgcagagcgccgccgatctgattcgcgatgagcatccgcaaattatcgccaccattctggtgcatctgaagcgcgcccaggccgccgatattctggcgttgttcgatgaacgtctgcgccacgacgtgatgttgcgtatcgccacctttggcggcgtgcagccagccgcgctggcggaactgaccgaagtactgaatggcttgctcgacggtcagaatctcaagcgcagcaaaatgggcggcgtgagaacggcagccgaaattatcaacctgatgaaaacgcagcaggaagaagccgttattaccgccgtgcgtgaattcgacggcgagctggcgcagaaaatcatcgacgagatgttcctgttcgagaatctggtggatgtcgatgatcgcagcattcagcgtctgttgcaggaagtggattccgaatcgctgctgatcgcgctgaaaggggccgagcagccactgcgcgagaaattcttgcgcaatatgtcgcagcgtgccgccgatattctgcgcgacgatctcgccaaccgtggtccggtgcgtctgtcgcaggtggaaaacgaacagaaagcgattctgctgattgtgcgccgtcttgccgaaactggcgagatggtgattggcagcggcgaggatacctatgtctga

SEQ ID NO: 262183 - DNA, 687 bp, Klebsiella pneumoniae
atgtctgataatctgccgtggaaaacctggacgccggacgatctcgcgccaccaccggcagagtttgtgccaatggtcgagtcggaagaaaccattattgaagaggccgaacccagccttgagcagcaactggcgcaactgcaaatgcaggcccacgagcagggttatcaggcagggattgccgaaggtcgccagcaaggtcatgaacagggctatcaggaaggactggcccaggggctggaacaaggtctggcagaggcgaaggctcaacaagcgccaattcatgcccggatgcagcaactggtcagcgaatttcaaactacccttgatgcgcttgatagtgtgatagcttcgcgcctgatgcagatggcgctggaggcagcacgtcaggtcataggtcagacgccaacggtggataactcggcactgatcaaacagatccaacagttgttgcagcaagaaccgttattcagcggtaaaccacagctgcgcgtacacccggatgatctgcaacgtgttgatgatatgctcggcgcaactttaagtttgcatggctggcgcttgcggggcgatcccaccctccatcctggcggttgcaaagtctccgccgatgaaggcgatctcgacgccagtgtcgccactcgctggcaagaactctgccgtctggcagcaccaggagtggtgtaa

SEQ ID NO: 262184 - DNA, 1374 bp, Klebsiella pneumoniae
atgaccacgcgcctgactcgctggctaaccacgctagataactttgaagccaaaatggcgcagttgcctgcggtacgtcgctacgggcgattaacccgcgctaccgggctggtgctggaagccaccggattacaattgccgctcggcgcaacctgtgtcattgagcgccagaacggcagcaaaacgcacgaagtagaaagcgaagtcgtcggctttaacggtcaacggctgtttttaatgccgctggaggaagtggaaggtgtcctgcccggcgcgcgtgtatatgccaaaaacatttcggcagaagggctgcaaagcggcaagcagttgccgctcggtccggcgttattaggtcgtgttctggacggcagcggtaaaccgctcgatggcctcccctcccccgatacgacggaaaccggtgcgctgattaccccgccatttaacccattgcaacgtacaccgattgaacatgtgctggacaccggcgtgcgcccaatcaatgccctgcttaccgtcgggcgcgggcagcgtatggggctgtttgccgggtccggcgttggtaaaagtgtgctgttggggatgatggcacgttacacccgcgccgatgtcattgtcgtgggtttgattggtgaacgtgggcgcgaagtaaaagattttattgagaatatcctcggtgccgaaggacgtgcacgctcagtggtgattgccgctccggcggatgtttctccgctcctgcgaatgcaaggtgccgcctatgccacgcgcattgccgaagattttcgcgatcgtggtcagcatgtgttgctgattatggactccctcacccgctacgcgatggcccagcgtgaaattgcgctggcgattggcgaaccacctgctactaaaggttatccaccgtcggtgtttgccaaattaccggcactggtcgagcgtgccggaaatggcattagcggcggcggctcgattaccgcgttttataccgtgctcaccgagggcgatgaccagcaggaccccattgccgactccgcgcgggccatcctcgacggtcacattgtgctgtctcgccgactggcggaagccgggcactatccggctatcgatattgaagcgtcgatcagccgcgcaatgacggcgttgatcagtgagcaacattacgcacgagtgcgcaccttcaaacagctgttgtcgagttttcagcgtaaccgagatctggttagcgtcggcgcgtatgccaaaggcagcgatccgatgctcgacaaagccatcgccctgtggccgcagctggagggctatttgcaacaaggcatttttgaacgcgcggactgggaagcgtctctccaggggctggagcgtattttcccgacagtgtcataa

SEQ ID NO: 262185 - DNA, 444 bp, Klebsiella pneumoniae
atggcagaacatggcgcgctggcgaccctgaaagatctggcagaaaaagaggtagaggatgccgcgcgcctgctgggtgaaatgcgtcgcggatgtcagcaggcggaagaacagctcaaaatgctgatcgattatcagaatgaatatcgcaataacctcaatagcgatatgagtgccgggatgaccagcaaccgctggatcaactatcagcagtttatccagacgctggaaaaagccattactcagcatcgccagcaacttaatcagtggacgcagaaagttgacattgccctgaacagctggcgagaaaagaaacaacgtttgcaggcctggcagacactgcaggaacggcaatccacggcggcactgcttgcagaaaaccgcctcgatcagaaaaagatggatgagttcgcccagcgcgccgccatgaggaaacctgaatga

SEQ ID NO: 262186 - DNA, 1128 bp, Klebsiella pneumoniae
atgattcgcttagcgcccttaattaccgccgacgttgacaccaccacattgcctggcggcaaagccagcgatgctgcacaagattttctcgcgttgttgagcgaagcattagcaggcgagacaactaccgacaaagcggccccccagttgctggtggcaacagataagcccacgacaaaaggcgagccgctgatcagcgatattgtttccgacgcgcaacaagcggatttactgatccccgtggatgaaacactgcctgtcatcaacgacgaacaatccacatcaacaccgttaaccaccgctcagacgatgacgttggctgcggtggctgacaaaaatacgacaaaagacgaaaaagcggatgatcttaatgaagacgtcaccgcaagcctgagcgccctttttgcgatgttgccgggttttgacaatacgcccaaagtgactgatgcaccgtcaaccgtgttaccggcagagaaaccaacgcttttcacaaaactgacttctgcgcaactcacaacagcacagcctgatgacgcccccggcacaccagctcagccattaacaccgctggtagcagaagcccagagtaaagcggaagtcatcagcacaccttcgccggtgactgctgccgccagcccgctaatcactccacaccagacacagccactgcccaccgtcgccgcgcctgttttgagtgcaccgctgggttctcacgaatggcaacaatcattaagccagcatatttcgctgttcacccgccaggggcaacaaagtgcagagttgcgtctgcacccacaggatttaggtgaagtgcaaatttccctcaaagtggatgataaccaggcgcagatccagatgatttcaccgcatcagcacgtacgcgcagccctggaagcagcgctgccggtactgcgtacgcagctggccgaaagtggcattcagttagggcaaagcaacattagtggcgaaagctttagtggtcagcagcaggccgcttcccagcaacagcaaagccaacgcacagcaaaccatgaacctctgacgggggaagacgacgatacgcttccggttcccgtctctttacaagggcgtgtaacaggcaacagcggcgttgatattttcgcctaa

SEQ ID NO: 262187 - DNA, 465 bp, Klebsiella pneumoniae
atgactgattacgcgataagcaagaaaagcaagcgatcgctttggatcccgattctggtattcattaccctcgcggcctgtgccagcgcaggttacagctactggcattcgcatcaggttgccgctgacgacaaagcgcagcaacgcgtcgtgccctccccggtcttctatgcgctggatacctttacggtcaatttgggcgatgcggatcgcgtgctttatatcggcataaccctgcgactgaaagatgaagcaacccgctcgcggctgagtgagtatttgccggaagtccgtagtcgcttgctgttactgttttcacgtcaggatgctgccgtactggcgacagaagaaggcaagaaaaacctgattgccgagattaaaaccacactttccaccccgcttgttgccgggcaaccgaaacaggatgtcaccgacgtgctgtataccgcttttattctgcgataa

SEQ ID NO: 262188 - DNA, 1005 bp, Klebsiella pneumoniae
atgggcgatagtattctttctcaagctgaaattgatgcgctgttgaatggtgacagcgaagtcaaagacgaaccgacagccagtgttagcggcgaaagtgacattcgtccgtacgatccgaatacccaacgacgggttgtgcgcgaacgtttgcaggcgctggaaatcattaatgagcgctttgcccgccattttcgtatggggctgttcaacctgctgcgccgtagcccggacattaccgtcggggccatccgcattcagccgtaccatgaatttgcccgcaacttgccggtgccgaccaacctgaaccttatccaccttaaaccgctgcgcggcacagggctggtggtgttctcgccgagcctggtgtttatcgccgtggataacctgtttggcggcgatggacgcttcccgaccaaagtggaaggtcgcgagtttactcataccgaacagcgcgtcatcaaccgcatgttaaagctggcgcttgaaggctatagcgacgcctggaaagcgattaatccgctggaagttgagtacgtgcgttcggaaatgcaggtgaaatttaccaatatcaccacctcgccgaacgacattgtggttaacacgccgttccatgtggagattggcaacctgaccggcgaatttaatatctgcctgccattcagcatgatcgagccgctacgggaattgttggttaacccgccgctggaaaactcgcgtaatgaagatcagaactggcgcgataacctggtgcgccaggtgcagcattcacagctggaactggtggccaactttgccgatatctcgctacgcctgtcgcagattttaaaactgaaacccggcgacgtcctgccgatagaaaaacccgatcgcatcatcgcccatgttgacggcgtcccggttctgaccagtcagtacggcactctcaacggtcagtatgcgttacggatagaacatttgattaacccgattttaaattctctgaacgaggaacagcccaaatga

SEQ ID NO: 262189 - DNA, 414 bp, Klebsiella pneumoniae
atgagtgacatgaataatccggccgatgacaacaacggcgcaatggacgatatgtgggctgaagcgttgagcgagcaaaaatcaaccagcggaaaaagcgctgccgacgcaatgttccagcaatttggcggcggagatgtcagcggaacgttgcaggatatcgacctgattatggatattccggtcaagctgaccgtcgagctgggccgtacgcggatgaccatcaaagagctgttgcgtctgacgcaaggatcagtcgtggcgctggacggtctggcgggcgaaccgctggatattctgatcaacggttatttaatcgcccagggcgaagtggtggttgttgccgataaatatggcgtgcggatcaccgatatcattaccccgtccgagcggatgcgccgcctgagccgttag

SEQ ID NO: 262190 - DNA, 366 bp, Klebsiella pneumoniae
atgaataaccatgctactgtgcaatcttccgcgccggtttctgctgcgccactgctgcaggtgagcggcgcactcatcgccattattgccctgatcctcgctgccgcctggctggtaaaacggctgggatttgcccctaaacgcactggcgttaacggtctgaaaattagcgccagtgcttcgctgggcgcgcgtgaacgggtcgtggtggtcgatgtggaagatgcacggctggtgctcggcgttaccgcagggcaaatcaatctgctacataaacttcccccttcagcaccaacggaggagataccgcagaccgattttcagtcggtcatgaaaaatttgcttaagcgtggcgggagatcctga

SEQ ID NO: 262191 - DNA, 738 bp, Klebsiella pneumoniae
atgcgtcgtttgttttctgtcgcaccggtccttctctggctgattacgcccctcgccttcgcgcaactgccgggtatcaccagccagccgctacctggcggtggacaaagctggtcgctcccggtgcagacgctggtgttcatcacctcgttgacgttcattccagcgattttactgatgatgaccagtttcacccgcatcattattgtttttggtttattgcgtaacgcgctgggaacgccctccgcgccacctaaccaggtattgctgggactggcactgtttttgaccttttttattatgtcgccagtgatcgacaaaatttatgtcgatgcgtaccagccattcagcgaagagaaaatctcaatgcaggaggcgctggaaaaaggggcgcagccgctgcgtgagtttatgctgcgtcagacccgcgaggcggatttagggttgtttgccagactggcgaataccggcccgttgcaggggcctgaagctgtgccgatgcgcattttgctcccggcctacgtgaccagcgagttgaaaaccgcatttcagataggcttcacgattttcatcccttttttgattatcgacctggtgattgccagcgtgttgatggcattggggatgatgatggttcccccagccaccattgctctgccctttaaactgatgctgtttgtactggtggatggctggcaattgctggtcggttcgctggcgcagagcttttacagctag

SEQ ID NO: 262192 - DNA, 270 bp, Klebsiella pneumoniae
atgacacctgaatcggtcatgatgatggggactgaagcgatgaaagtcgcgctggcactggctgccccactgttgctggtggcgctggtcacgggtcttatcatcagtattttgcaggccgccacgcagatcaacgaaatgacgctgtcgtttattccaaaaatcatcgccgtatttatcgccattattattgccggaccgtggatgctcaatctgttgctggattacgtccgcaccttgttcactaacctgccgtatatcatcgggtag

SEQ ID NO: 262193 - DNA, 786 bp, Klebsiella pneumoniae
atgatgcaggtaacaagcgatcaatggctttcctggttaagcctgtacttctggccgttactgcgcgtgctggcgctcatttctaccgcgccaattctgagcgaacgcagcgtgccgaaacgggtaaaactgggtctggcaatgatgatcacgttcgccattgccccatcattacctgccaacgatgttcctgttttttcgttctttgctctgtggctggccgtgcagcagatcctgatcggcattgcgcttggttttaccatgcaatttgcctttgccgctgtgcgaaccgctggcgaaattatcggtctgcaaatggggctgtcatttgcgacatttgtcgatcctggcagccatctcaatatgcccgttttagcgcgcatcatggatatgctggcattactgctgttcctgacatttaacggtcatttatggttgatttcactgctggtcgatacctttcacaccctgccgattggtagcgaaccgttgaacagcaatgcgtttctggcactcaccaaagcagggagtttgattttccttaacgggctgatgctggcgttaccgctcattactctgttgctgaccctgaatctggcattaggtttactgaatcgtatggccccgcaattatccatttttgttattggatttccattaactctgactgtcggcatctctttaatggcggcattaatgccgttaattgcgcctttttgcgaacatttattcagtgaaatttttaatttgctggctgatattattagtgaattaccattaatataa

SEQ ID NO: 262194 - DNA, 624 bp, Klebsiella pneumoniae
atgtcaacgattattatggatttatgtagttacacccgactaggtttaaccgggtatctgttgagtagaggggttaaaaaaagagaaatcaacgacattgaaaccgttgatgaccttgccatagcttgtgattcacagcgcccttcagtggtgtttattaatgaggactgtttcatccacgatgcttctaacagtcagcgcatcaagcacatcattaatcaacatcccaatacgttatttatcgtttttatggcaattgccaatgttcattttgatgaatatctattggtcagaaaaaatttattgatcagctctaaatcgattaaaccggaatctctcgacgatatccttggcgatattctgaaaaaagatacaacgataacctcgtttttaaatatgccgactttatcattgagccgaaccgaatcgagtatgttgcgaatgtggatggcaggtcagggaaccattcaaatctccgaccaaatgaatatcaaagccaagaccgtttcatcgcataaaggtaatattaaacgtaagatcaaaacgcataataaacaggttatctaccatgtcgtccgactgacggataatgtgactaatggtatttttgtcaacatgcgctaa

SEQ ID NO: 262195 - DNA, 189 bp, Klebsiella pneumoniae
atgaaggtgaatgatcgggtaacagtcaaaacggatggcggtccgcgtcgtcctggcgtggtactggcagttgaggagtttagtgaaggcacaatgtacctggtttcgctggaagactacccgctcggcatctggttctttaatgaagcagggcatcaggacggtatctttgttgagaaagcagagtaa

SEQ ID NO: 262196 - DNA, 228 bp, Klebsiella pneumoniae; identical to SEQ ID NO: 1612

SEQ ID NO: 262197 - DNA, 816 bp, Klebsiella pneumoniae
atgttttcaattcaacaaccactactggtttttagcgatcttgatagcaccctgctggacagtcatagttatgactggcaaccggcagccccctggctcagccgtttacacgaagccaatattcccgtcattctctgtagcagtaaaacttcagcggaaatgctgtacttgcaaaaaatgttggggctacaaggcttaccgctgattgcagagaatggcgcagtgatccagcttgctgaacaatggcaggatatagacggttttccacgcatcatctcaggtattagccatggcgaaatctgccaggttttaaatacgctacgcgagaaagaacattttaaattcacgacttttgatgatgtcgacgatgcaaccattgccgaatggacgggattaagccgtagccaggcggcgctgacgcagctgcatgaggcgtcggtaacgctaatctggcgcgacagtgacgagcgtatggcacaatttatcgctcgtctgaacgaactgggcttgcagtttatgcagggtgcgcgcttctggcacgtactggatgcctctgccggaaaagatcaggctgccaactggattaccgcgacctatcaacaattgtcaggcagacgcccaaccacacttggcctgggcgatgggccaaacgatgcgcctttactggaggtaatggattacgcggtgattgtgaaagggctaaaccgtgaaggggtccatctgcatgatgaggatccggcccgcgtctggcgaacgcagcgtgaaggaccggaaggctggcgtgaagggctggaccattttttctccgcccgttaa

SEQ ID NO: 262198 - DNA, 1695 bp, Klebsiella pneumoniae
gtgcagcacgagacaaaaatggaaaaccagagctggttgaaaaaactcgcacgccgcctggggcccggtcatgtcgttaatctctgctttatcgtggtattgcttttttccaccttgctcacctggcgtgaagtggtggtgctggaagatgcctatatctccagccagcgtaatcatctggaaaacgtagccaacgcgctcgataagcatttgcagtataacgtcgacaaactgatctttttgcgtaatggcatgcgcgaagctctcgtggcgccactggatttcacctctctgcgtaatgccgtaaccgagttcgaacagcatcgcgacgagcacgcctggcaaatcgaactcaaccgacggcgcaccctgccagtcaatggcgtatcggatgcattagtcagcgaggggaatctcctgtctcgcgaaaatgaaagcctcgacaatgaaattaccgctgcactggaagttggttacttgctgcgactggcgcacaactcctcgtcgatggttgaacaggcggtgtatgtctcgcgtgctggattttacgtttcgacgctgccgaccttgtttacgcgcaatgtaccaacgcgttattacggctatgtcacccaaccctggtttatcggccattcacaacgagaaaatcgtcaccgcgcggtacgctggttcacttcgcaaccggaacacgccagcaatactgaaccgcaggttaccgtcagtgttccggtagacagtaataactactggtatggcgtgctggggatgagtattcccgtgcgtactatgcagcaatttttaaaaaacgccatcgataaaaacctcgatggtgagtatcagctctatgacagtaagctgagatttttgacctcttcaaatcctgaccatccaacagggaatatttttgatcctcgtgaactggccttgctggcgcaggcaatggaacatgacacgcggggcggcattcgtatggacagtcgctatgttagctgggaacgtctggaccatttcgacggtgtgctggtgcgcgtccatacgctaagcgaaggcgtgcgcggcgatttcggcagtatcagcattgcattaaccctgctgtgggcgctctttaccaccatgttactcatctcctggtatgtgattcgccggatggtcagcaacatgtatgttctgcaaagctcgttgcagtggcaggcgtggcacgacaccttaacgcgtttatataaccgtggcgcattgttcgaaaaagcccgtccgctcgctaaattgtgtcagacgcaccaacatcctttttctgtcattcaggtcgatcttgaccattttaaagcgattaatgaccgctttggtcatcaggcgggcgaccgtgttctttctcatgctgccggattaattagcagttccttgcgtgcgcaggacgttgccgggcgggtcggtggtgaggagttttgtgtgattctgccaggcgcgaatctgacgcaggctgcggaggtcgcagaacgtattcgcctgaagttaaatgaaaaagagatgctgatcgccaagagtacaacgatacgcatcagtgcctcgctgggggtaagtagcagcgaggaaaccggtgattatgattttgaacaactccagtcattggccgaccgtcggctttacctcgcaaaacaggccgggcgtaatcgggtattcgcgagcgataacgcttaa

SEQ ID NO: 262199 - DNA, 183 bp, Klebsiella pneumoniae
atgagctttatggttagtgaggaagttacggttaaagagggcggcccgcggatgattgtcactggatactccagcggtatggttgagtgtcgttggtatgacgggtacggggtcaagcgggaagcttttcatgaaaccgagcttgttccgggggaggggagtcgttctgcggaagaagtttga

SEQ ID NO: 262200 - DNA, 918 bp, Klebsiella pneumoniae
atgcttttggccgggagtagtttactgacgttgctcgatgatatcgccacactgctggacgatatctccgtgatgggcaaactggcggcgaagaaaaccgccggtgtattaggggatgacttatcgctcaatgcgcaacaagtttcaggcgtgcgggccaaccgggaacttcccgtggtctggggcgtggcgaaaggttcgctgatcaataaagtgattctggtgccgctggcgctgatcatcagtgcgtttatcccgtgggcgattacgccactgttgatgattggcggcgcgtttctctgctttgaaggggtagagaaagtgctgcatatgctggaggcgcgtaaacataaagaagatccggcgcagagtcagcagcgtctggagaagctggcggcgcaggatccgctgaagtttgaaaaggacaaaataaaaggggcgattcgtaccgattttatattgtctgcggaaatcgtcgccatcacgctggggattgtggcagaagcgccgttgcttaatcaggtgctggtgctttcaggcatcgcgctggtagtgaccgtgggcgtctacggtctggtaggggttatcgttaagattgatgacctggggtattggctggcggaaaaatccagcgcgctgatgcaggcattaggtaaagggttattgatcattgcgccctggttgatgaaagcgttatcgattgtcggcacgctggcgatgttcctcgtcggcggcgggattgtggtacatggtattgcgccgttgcatcacgccattgaacatttcgccgggcagcaaagtgcagtggtggcgatgatattaccgactgttttaaatctgattcttggatttatcatcggcggcatcgtggtgctgggagtgaaagccgtagcgaaaatgcgcggtcaggcacattaa

SEQ ID NO: 262201 - DNA, 921 bp, Klebsiella pneumoniae
atgcgtttccgccagttgttaccgctttttggcgcgctgtttgcgttgtatatcatttggggctcaacctattttgtcattcggattggcgtggaaagctggcctccgttaatgatggcgggcgttcgattcctggcagccggtattttattgctggcatttttgctactgcgcggacacaaacttcccccgctacgtccgctgctcaatgccgcgctgattggcctgttattgctggctgtcggtaatggcatggtgacggttgccgaacatcaaaatgttccttccggcatcgccgccgtagtggttgcaaccgtgcccctttttaccctgtgcttcagccgcctgtttggcattaaaacgcgcaaactggaatgggtgggtatcgccattgggcttgccggaatcatcatgctcaatagcggtggaaacttaagcggcaatccatggggcgcgattctgattttaatcggctcgattagctgggcgtttggctcggtttatggctcgcgcattaccttacctgtagggatgatggcgggtgcgattgagatgctggcggctggcgtggtgttaatgattgcgtcgatgattgcgggtgaaaaactgacggcgctcccttccctttcaggcttccttgcggtcggctatctggcgctgtttggttcgattatcgccattaacgcttatatgtatttaatccgcaacgtcagtccggctctcgccaccagctacgcctacgttaacccggtggtcgcggtcttgctgggtacgggactgggtggcgaaacgctgtcgaagattgaatggctggcgctcggcgtaattgtcttcgcggtggtactggtcacgttgggaaaatatctcttcccggccaaacccgttgtcgcgccagttattcaggatgcatcaagcgagtaa

SEQ ID NO: 262202 - DNA, 471 bp, Klebsiella pneumoniae
atggtcgacgttcacgataaggccacccgcagcaaaaatatgcgcgcgattgccacgcgtgatacggcgattgagaagcgcctcgccagtttgttaaccgggcagggccttgcgtttcgcgttcaggacgccagtctgcccggacgcccggattttgtcgttgatgaatatcgctgcgtgatatttacccacggctgcttctggcatcatcatcactgctatctgtttaaagtgcctgcgactcgaaccgagttctggctggagaagataggtaaaaatgttgaacgcgatcgccgcgatatcagtcgcttgcaggaactcggctggcgcgtactgattgtctgggagtgtgcgttacgtgggcgcgagaagcttacggatgcggcgcttaccgagcgtctggaagagtggatctgcggcgaaggtgccagcgcgcagatcgacacgcaggggattcatttactcgcttga

SEQ ID NO: 262203 - DNA, 1419 bp, Klebsiella pneumoniae
atgcaggaaaatatatcagtaaccgattcatacagcaccgggaatgccgcacaggcaatgctggagaaactgctgcaaatttatgatgttaaaacgctggtggcgcagcttaatggtgtgggtgagaatcactggagcgcggcaattttaaaacgtgcgctggcgaatgactcggcatggcaccgtttaagtgagaaagagtttgcccatctgcaaacgttgttacccaaaccaccggaacatcatccgcattatgcgtttcgctttatcgatctatttgccggaattggcggcatccgtcgcggttttgaatcgattggcggacagtgcgtgtttaccagcgaatggaacaaacatgctgtacgcacttataaagccaaccattattgcgacccggcgacgcatcattttaatgaagatatccgcgacatcaccctcagtcatcaagaaggcgtgagtgatgaggcggcggcggaacatattcgtcaacacattcctgaacacgatgttttactggccggtttcccttgtcagccattttcgctggctggcgtatcgaaaaagaactcgctcgggcgggcgcacggttttgcctgcgatacccagggtacgctgttctttgatgtggtgcgcattatcgacgcgcgtcgtccggcgatgtttgtgctcgaaaatgtcaaaaacctgaagagtcacgataagggaaaaacgttccgcatcatcatgcagacgctggacgaactgggctatgacgttgccgacgcagcagataacgggccggacgatccgaaaatcatcgacggtaaacatttcctgccgcagcaccgtgaacgcatcgtgctggtgggttttcgtcgcgatctgaatctgaaagccgattttactctgcgtgatatcagcgaatgtttccctgcacagcgagtgacgctggcgcagctgctggacccgatggttgaggcgaaatatatcctgacgccggtgctgtggaagtacctctatcgatatgcgaaaaaacatcaggcgcgcggtaacggcttcggttatggaatggtttatccgaacaatccgcaaagcgtcacccgtacgctgtctgctcgttattacaaggatggcgcggaaattttaatcgaccgcggctgggatatggccacgggtgagaaagactttgacgatccgctgaatcagcaacatcgtccacgtcggttaacacctcgtgaatgcgcgcgcttaatgggttttgaagcgccgggagaagcgaaattccgcattccggtttcggacactcaggcctatcgccagttcggtaactcggtggtcgtgccggtctttgccgcggtggcaaaactgcttgagccaaaaatcaaacaggcggtggcgttgcgtcagcaagaggcacaacatggtcgacgttcacgataa

SEQ ID NO: 262204 - DNA, 696 bp, Klebsiella pneumoniae
atggagttacaacactggcaggcacagttcgataactggttgaaaaaccatcatcaacatcaggacgcggcgcatgacttgtgtcattttcgccgtgtctgggctacggcacagaaactggcggcagatgacgatgtcgatatgctggtgattttaaccgcctgttattttcacgatatcgtgaccctggcgaaaaatcatccgcaacggcagcgttcttcaatcctggcggcagaagagacgcgtcgcctgctccgtgaagagttcgcgcaatttccggcggagaaaattgaggccgtttgtcatgccattgccgctcacagtttcagcgcgcaaatcgcccccttaacaacggaagctaaaatcgtccaggatgcggatcggctggaagccctgggggcgattggcctggcgcgcgtatttgccgtttcaggggcattgggcttggcgctgtttgatggcgaagatccgttcgcacagcatcgcccgcttgatgataaacgctacgcgctggatcatttccagacaaagttactgaaattaccgcaaaccatgcaaaccgcaagaggcaagcagctggcacagcacaacgcgcaatttttagtcgagtttatggcgaagctcggtgccgaactggcgggggagaatgaaggtatcgatcacaaggtgatagatgcgttttcacccgctggctga

SEQ ID NO: 262205 - DNA, 990 bp, Klebsiella pneumoniae
atgaacaagtggggcgtagggttaacatttttgctggcggcaaccagcgttatggcaaaggatattcagcttcttaacgtttcatatgatccaacgcgcgaattgtacgaacagtacaacaaggcattcagcgcccactggaaacagcaaactggcgataacgtggtgattcgtcagtcacacggtggttcaggcaaacaagcgacgtcggtaatcaatggtattgaagctgatgttgtcactctggctctggcctatgacgtggacgcgattgcggaacgcgggcggattgataaagagtggatcaaacgtctgccggataactccgcaccgtacacttccaccattgttttcctggtgcgtaagggcaatccgaagcagatccatgactggaacgatctgattaaaccgggtgtttcggtgatcacgcctaatccgaaaagctctggtggcgcgcgctggaactacctggcagcctggggctacgcgctgcatcacaacaacaacgatcaggcaaaagcacaggattttgttcgggcactgtataaaaacgtcgaagttctggattctggcgcgcgcggctccactaatacctttgtcgagcgcgggattggcgatgtactgatcgcctgggaaaacgaagctctgctggcagcgaatgagctggggaaagataaattcgaaatcgttacgccgagtgagtctatcctcgcagagccaaccgtgtcggtggtcgataaagtggtcgagaaaaaaggcaccaaagaggtggcggaagcctatctgaaatatctctactcgccagaaggtcaggaaattgccgcgaaaaactactaccgtccgcgcgatgctgaggtggcgaaaaagtacgaaaatgcgtttccaaagctgaagttattcaccattgatgaagagttcggcggctggacgaaagcgcaaaaagagcattttgctaacggcggtacgttcgatcagatcagcaaacgctga

SEQ ID NO: 262206 - DNA, 756 bp, Klebsiella pneumoniae
atgaaaaaagcgggtcttctttttttggtgatgatagttatcgccgttgtggctgccggtattggttactggaaattaaccggtgaagagtcggatacactacgtaagattgtccttgaggaatgtttgcccaatcaacagcaaaatcaaaatccttcgccatgtgcggaagtcaaacccaatgccggatacgtggttttaaaagatcttaatggcccactgcaatatctgttgatgccaacgtatcgtattaacggcacggaaagtcctttgttgaccgatccttcaacgccgaacttcttttggttggcctggcaggcgcgtgattttatgagcaaaaaatacggccagccggttcccgatcgcgcggtttctttggcgatcaactctcgcaccgggcgtacgcaaaaccattttcatattcatatctcttgtattcgtcatgatgtgcgcgaacagctggataacaatctggctaacatcagcagccgctggttgccactgccaggtggtttgcgtgggcatgagtacctggcgcgtcgggtaacggaaagcgaactggtacaacgcagcccatttatgatgcttgcagaggaagtgcctgaggcgcgggaacatatgggaagctacgggctggcgatggtgcggcagagtgataattcgtttgttttgctggcgacacaacgaaatctactgacgctgaaccgtgcttcagccgaggaaatccaggatcatcagtgtgagattttgcgttaa

SEQ ID NO: 262207 - DNA, 600 bp, Klebsiella pneumoniae
atgaagccagggtgtacgctgttttttctcttatgttctgcattaaccgttacaacaacggcgcatgcacaaacaccagatacggcaacgaccgcgccttatctgctggctggagcccctactttcgatctctccatcagccagtttagagaagactttaacagccagaatcccagcctgccactgaacgaatttcgtgccatcgacagcagtcccgacaaagccaatctcactcgtgctgccagtaaaattaatgagaacttgtatgcttctacagcgctggagcgcggtaccttaaaaatcaaaagcattcaaatgacctggctacccatccaggggccagagcaaaaagccgcgaaagcgaaagctcaggaatacatggcagcggtgatccgcacactcaccccattaatgaccaaaacacaaagccagaaaaaactgcagtcgctactaacggcggggaaaaacaaacgttattacaccgagacagaaggtgcactgcgttatgttgtcgcggacaacggcgaaaaggggctgaccttcgctgttgaaccgattaagctggcgctatctgaatcgcttgaaggtttgaataaatga

SEQ ID NO: 262208 - DNA, 441 bp, Klebsiella pneumoniae
atgaccatacagcaatggttattctcatttaaagggcgtattggacgccgtgatttctggatttggataggcctgtggttcgcaggcatgctggtgcttttctcactggcgggtaaaaatttactcgatattcagactgcggcgttttgccttgtgtgcttgctctggccaacagcggcagtaaccgttaagcgcttgcatgatcgcgggcgttccggcgcatgggcatttctgatgattgtggcgtggatgctgctggcgggtaactgggcgattttaccgggtgtctggcaatgggcggtggggcgttttgtcccgacgttgattctggtgatgatgcttatcgatcttggtgcgtttgttggcacacaaggcgaaaataaatatggtaaagataccgaggatgtgaagtataaagccgacaataaatcaagtaattaa

SEQ ID NO: 262209 - DNA, 300 bp, Klebsiella pneumoniae
atgaaagatgtcgtagataaatgcagtactaaaggatgtgcgattgatatcggtacggtgattgataacgacaactgtaccagtaagttttcgcgcttttttgccacccgcgaagaagcagagtcctttatgaccaaactgaaagagcttgccgccgctgcatcctctgcagatgaaggggccagcgtggcctataagattaaggatctggaggggcaagttgagcttgatgcggccttcaccttctcatgccaggccgagatgattatttttgagttatcactgcgttcgttagcttga

SEQ ID NO: 262210 - DNA, 429 bp, Klebsiella pneumoniae
atggcttataaacacattggcgtggcaatttccgggaatgaagaagatgccttactggtgaataaagccctggagctcgccagacataatgacgctcacctgacgttaattcatattgatgatggcttaagcgagttgtatccgggtatctacttccctgcaacagaagatattcttcaattgttgaagaataagtcggataacaagctgtataaactgacgaaaaatattcaatggccgaagacaaaactgcgtattgaacgcggagaaatgccggaaacactgctggaaattatgcaaaaagagcagtgcgacctccttgtctgtggtcatcaccactcatttatcaaccgtttgatgccggcatatcgcgggatgatcaataagttgagtgcggatttgctcatcgtgccgtttatcgataagtaa

SEQ ID NO: 262211 - DNA, 747 bp, Klebsiella pneumoniae
atggctgattgggtaacaggcaaagtcactaaagtgcagaactggaccgacgccctgtttagtctcaccgttcacgcccccgtgcttccgtttaccgccgggcaatttaccaagcttggccttgaaatcgacggtgaacgcgtccagcgcgcctactcctatgttaactcgcccgataatcccgatctggagttttacctggtcaccgtccccgatggcaaattaagcccacgattggcggcactgaaaccaggcgatgaagtgcaggtggttagcgaagcagctggcttctttgttctggatgaagtaccagattgcgaaacgctatggatgctggcaaccggtacagcgattggcccttatttatcgattctgcaactgggcaaagatttagatcgcttcaaaaatctggtcctggttcacgccgcacgttatgccgccgacttaagctatttgccactgatgcaagaactggaaaaacgctacgaaggcaaactgcgcattcagacggtggtcagtcgggaaacggcagcggggtcgctcaccggacggataccagcgttaattgaaagtggtgaactggaaagcgcggttggcctgccgatgaataaagaaaccagccatgtgatgctgtgcggcaatccacagatggtgcgcgatacgcaacagttgctgaaagagacccggcagatgacgaaacatttacgtcgccgaccgggccatatgacagcggagcattactggtaa

SEQ ID NO: 262212 - DNA, 1140 bp, Klebsiella pneumoniae
atgccggatgaagcgtttatgccgcatccggtagtcctgaatcgtgcgggggcaaccccgcacacatcaataatcccgcccttcccctgtgctacacttcgcgccattccttactgcttagagtttgctatgagacgagaacttgccatcgaattttcccgcgtcaccgaatcagcggcgctggctggctacaaatggttaggacgcggcgataaaaacaccgcggacggcgcggcggtaaacgccatgcgtattatgctcaaccaggtcaacattgacggcaccatcgttattggtgaaggtgaaatcgacgaagcaccgatgctctacattggtgaaaaagtcggtactgggcgcggcgacgcggtagatattgctgttgatccgattgaaggcacgcgcatgacggcgatgggccaggctaacgcgctggcggtgctggcagtaggcgataaaggctgtttcctcaacgcgccagatatgtatatggagaagctgatcgtcggaccgggagccaaaggcaccattgatctgaacctgccgctggcggataatctgcgcaatgtagcggcggcgctcggcaaaccgttgagcgaactgacggtaacgattctggctaaaccacgccacgatgccgttatcgctgaaatgcagcaactcggcgtacgcgtatttgctattccggatggcgacgttgcggcctcaattctcacctgtatgccagacagcgaagttgacgtgctgtacggtattggtggcgcgccggaaggcgtggtttctgcggcggtgatccgcgcattagatggtgacatgaacggtcgtctgctggcgcgtcatgacgtcaaaggcgacaacgaagagaatcgtcgcattggcgagcaggagctggcacgctgcaaagcgatgggcatcgaagccggtaaagtattgcgtctgggcgatatggcgcgcagcgataacgtcatcttctctgccaccggtattaccaaaggcgatctgctggaaggcattagccgcaaaggcaatatcgcgactaccgaaacgctgctgatccgcggcaagtcacgcactattcgccgcattcagtccatccactatctggatcgcaaagacccagaaatgcaggtgcacatcctctga

SEQ ID NO: 262213 - DNA, 1509 bp, Klebsiella pneumoniae
atgactgaaaaaaaatatatcgttgcgctcgaccagggcaccaccagctcccgcgcggtcgtaatggatcacgatgccaatatcattagcgtgtcgcagcgcgaatttgagcaaatctacccaaaaccaggctgggtagaacacgacccaatggaaatctgggccacccaaagctccacgctggtagaagtgctggcgaaagccgatatcagttccgatcaaattgcagctatcggtattacgaaccagcgtgaaaccactattgtctgggaaaaagaaaccggcaagcctatctataacgccattgtctggcagtgccgtcgtaccgcagaaatctgcgagcatttaaaacgtgacggtttagaagattatatccgcagcaataccggtctggtgattgacccgtacttctctggtaccaaagtgaagtggatcctcgaccatgtggaaggctctcgcgaacgtgcgcgtcgtggtgaattgctgtttggtacggttgatacgtggcttatctggaaaatgactcagggccgtgtccatgtgaccgattacaccaacgcctctcgtaccatgttgttcaacatccataccctggactgggacgacaaaatgctggaagtgctggatattccgcgcgagatgctgccagaagtgcgtcgttcttccgaagtgtacggtcagactaacattggcggcaaaggcggcacgcgtattccaatctccgggatcgccggtgaccagcaggccgcgctgtttggtcagttgtgcgtgaaagaagggatggcgaaaaatacctacggcactggctgctttatgctgatgaacaccggcgagaaagcggtgaaatcagaaaacggcctgctgaccaccatcgcctgtggcccaactggcgaagtaaactatgcgctggaaggtgcggtgtttatggcgggcgcatccattcagtggctgcgcgatgagatgaagttgattaacgacgcgtacgattccgaatatttcgccacgaaagtgcaaaacaccaatggtgtatatgtggttccggcatttaccgggctgggtgcgccatactgggatccgtatgcgcgcggggcgattttcggtctgactcgtggagtgaacgctaaccacattatccgcgcgacgctggagtctattgcttatcaaacgcgtgacgtgctggaagcgatgcaggccgattctggtattcgtctgcacgccctgcgcgtggatggcggcgcagtggcgaacaatttcctgatgcagttccagtccgatattctcggtacgcgcgttgagcgcccggaagtgcgcgaagtcaccgcattgggtgcggcctatcttgctggtctggcggttggcttctggcagaacctcgacgagctgcaagagaaagcggtgattgaacgcgagttccgtccaggcatcgaaaccactgagcgtaattaccgttacgcaggctggaaaaaagcggtgaaacgcgcgatggcgtgggaagaacacgacgagtaa

SEQ ID NO: 262214 - DNA, 846 bp, Klebsiella pneumoniae
atgagtcaaacatcaaccttgaaaggccagtgcattgctgaattcctcggtaccgggttgttgatttttttcggggtgggttgcgttgcagcactaaaagtcgctggtgcgtcttttggtcagtgggaaatcagtgtcatttggggactgggagtggcaatggccatctacctgaccgcaggggtttccggcgcgcatcttaatcccgctgttaccattgcattgtggctgtttgcctgtttcgacaagcgtaaagttattccttttatcgtttcacaagttgccggcgctttctgcgctgcggctttagtttacgggctttactacaatttatttttcgacttcgagcagactcatcacattgttcgcggcagcgttgaaagtgttgatctggctggcactttctctacttaccctaatcctcatatcaattttgtgcaggctttcgcagttgagatggtgattaccgctattctgatggggctgatcctggcgttaacggacgatggcaacggtgtaccacgcggccctttggctcccttgctgattggtctactgattgcggtcattggcgcatctatgggcccattgacgggttttgccatgaacccagcgcgtgacttcggtccgaaagtctttgcctggctggcgggctggggcaatgtcgcctttactggcggcagagacattccttacttcctggtgccgctttttggccctatcgttggcgcgattgtaggtgcatttgcctaccgcaaactgattggtcgccatttgccttgcgatatctgtgttgtggaagaaaaggagaccacaactccttcagaacaaaaagcttcgctgtaa

SEQ ID NO: 262215 - DNA, 240 bp, Klebsiella pneumoniae; identical to SEQ ID NO: 3072

SEQ ID NO: 262216 - DNA, 927 bp, Klebsiella pneumoniae
atgactgaacaacaaattagccgaactcaggcgtggctggaaagtttacgacctaaaaccctccccctcgcctttgctgcaattatcgtcgggacggcgctggcatggtggcaaggtcacttcgatccgctggtcgccctgctggcactgattaccgccgggctattacagatcctttctaacctcgccaatgattacggcgatgcggtaaaaggcagcgataaacctgaccgtatcggaccgctacgcggcatgcaaaaaggggtcattacccagcaagagatgaaacgggcgctcattattaccgtcgtgctcatctgtctctccgggctggcactggttgcagtggcgtgccatacgctggccgattttgtcggcttcctgattcttggcgggttgtcgatcattgccgctatcacctacaccgtgggcaatcgtccttatggttatatcggtctgggtgatatttccgtactggttttctttggctggttgagcgtcatgggcagctggtatttacaggctcatacattgattccggcactgatccttccggcgaccgcatgcggcctgctggcaacggcagtactgaacattaataacctgcgtgatatcaatagcgaccgcgaaaatggcaaaaacacgctggtggtgcgcttaggtgaagtgaacgcgcgtcgttatcatgcctgcctgctgatgggctctctggtgtgcctggcgctgtttaatctcttttcgctgcatagcctgtggggctggctgttcctgctggcggcaccattactggtgaagcaagcccgttatgtgatgcgggaaatggacccggtggcgatgcgaccgatgctggaacgcactgtcaagggagcgttactgactaacctgctgtttgttttagggatattcctaagccagtgggcagcataa

SEQ ID NO: 262217 - DNA, 855 bp, Klebsiella pneumoniae
atggtcgctattgctgccgccgttcttgtgacctttatcggtggtctgtacttcattacgcatcacaagaaagaagagtccgagacgctgcaaagccagaaagtgaccggaaacggactaccaccaaaaccagaagaacgctggcgctacattaaagagctggaaagtcgccagccgggtgtgcgtgcgcccacagaaccttctgccggtggtgaagtgaaaacgccggagcaactgacaccagaacaacgccagcttcttgaacaaatgcaggctgatatgcgccagcagccaacgcagctggttgaagttccgtggaatgagcagacgccggaacagcgtcagcaaacgctacagcgccagcgtcaggcgcagcaattagcggagcagcaacgcctggctcagcagtcgcgtacgactgaacaaagctggcagcagcagacgcgtacgtcgcaagccgcaccggtacaggcgcaaccgcgccagtctaaaccggcttctactcagcagccgtaccaggatctgctgcaaactcctgcgcacacgaccgcgcagtcgaagccgcagcaagctgcgccggttgctcgtgccgctgacgcgccaaaaccgacggcggagaaaaaagacgaacgccgctggatggtgcagtgcggttcgttcagaggcgcggaacaggcagagacggtacgtgctcagctggcgtttgaaggctttgactcgaagatcaccaccaacaatggctggaatcgtgtggtcattggcccggtgaaaggcaaagagaacgcagacagcaccctcaatcgcttgaagatggcgggtcatacaaactgcattcggctcgccgccgggggttga

SEQ ID NO: 262218 - DNA, 1026 bp, Klebsiella pneumoniae
gtgaaagcgaagaagcaggaaactgccgcgaccatgaaagacgttgccctcaaggcaaaagtctctacagcgactgtctcccgagcattaatgaatcccgataaagtctcccaggccacccgtaatcgggttgaaaaagcggcccgggaagtgggttatttaccgcagcctatggggcgcaacgtcaagcgtaatgaatcccgcaccattctggtgattgtcccggatatctgcgatcccttctttagcgaaattattcgcggtatcgaagttacggcggcaaatcacggatatctggtgctgattggcgactgtgcgcatcaaaatcagcaggaaaaaacctttatcgatttgatcatcaccaagcaaattgatggcatgttgttgctgggttcaaggctgccgtttgatgccagcattgaggaacagcgtaatctgccgccgatggtgatggcgaacgaatttgcaccggaactggagctgcctaccgttcatatcgacaatctgaccgccgcatttgatgcagtaaattatttatatgagcaagggcataaacggattggctgtatagccggtcccgaagagatgccgctgtgtcactaccgcctgcaaggctatgttcaggcgctgcgtcgctgcggcattatggttgatccgcaatacatcgcccgtggcgacttcaccttcgaagccggaagcagagcaatgcaacagctgcttgatcttccacaaccgcctactgctgtcttctgccatagcgatgtgatggcgctcggcgcactttctcaggcaaaacgtcaggggctgaaagtcccggaagacctttccataatcggttttgataacatcgacctgacgcaattttgtgatccgccgctgacaaccatcgcgcagccgcgttacgaaatcggtcgggaagctatgctgttattgcttgatcaaatgcaggggcaacacgttggcagtggctctcgtttaatggactgcgaacttatcatccggggatcaacacgcgcgttaccttaa

SEQ ID NO: 262219 - DNA, 2199 bp, Klebsiella pneumoniae
atgcccgttgcccacgttgccttgcccgttccgcttccccgtacctttgactatctgctgccagaaggcatgacggtcaaagccgggtgtcgcgtgcgcgtgccgtttggcaaacagcaggagcgcatcggggttgtggtgtcagttagcaatgtcagcgagctgccgcttaacgagctgaaagcggtagttgaagtgctggacgttgagccggtatttactcactccgtctggcgattactgctctgggcggcagattactatcatcatccgattggcgatgtgctgtttcatgccttgccgattttactacgccaggggcggcctgcggcgaacgcgccgatgtggtactggtttgccactgaacaaggtcaggcggtggatctgaacagcctgaaacgctcacccaagcaacaacaggcgctggcagcgttacggcaaggcaaaatctggcgcgaccaggttgccatgctcgaatttaatgatgccgcgttgcaggcgctgcgcaaaaaaggtctgtgtgatttagcaagtgaaacaccagagtttagtgactggcgaaagaattatgccgtttctggtgagcggttgcgattgaatactgaacaggccaccgccgttggcgcaattcatagtgcggcggataccttctctgcctggctgctggcgggcgttaccggttccggtaaaacggaggtttatctcagtgtactggaaaacgtgctcgctcagggcaaacaggcgctggtgatggtgccggaaatcggcctgacgccgcaaactatcgcccgttttcgtgaacgttttaatgcccccgtggaagttctgcattccggcctgaacgacagcgagcgtctttcggcgtggttgaaagcgaaaaatggcgaggcggcgattgtcatcggcacccgctccgcgctgtttacgccgtttaaaaatctcggcgtgattgttattgatgaagagcacgacagttcctacaaacagcaggaaggctggcgctatcatgcccgcgacctggcggtgtatcgcgcgcatagcgagcaaatcccaattattcttggctccgcaacgcccgcactggaaacgttatgcaacgtgcagcagaaaaaataccgcctgctgcgcctgacgcatcgggcggggaatgcgcgtccggcaattcaacacgtgctggatttaaaaggtcagaaggtgcaggctggtctggctccggcgttaatcacccgtatgcgccagcatttacaggcaaacaatcaggttatcctctttcttaaccgccgtggctttgcgcctgccttgctgtgccacgactgcggctggattgccgaatgtccacgttgcgatcactactacacgctgcatcaggcgcaacagcatttgcgctgccaccattgcgacagtcagcgtccggtgccgcgccagtgcccttcctgcggttccacgcacctggtacccgtggggctgggcaccgaacagcttgaacagacactcgcgccgttgttccctggtgtccccatttctcgtatcgaccgcgataccaccagccgcaaaggcgcactggaacaacaactggcggaagtacatcgcggtggcgcgaggattttgatcggcacgcaaatgctggcgaaaggtcaccactttccggatgtgacgctggtggcgttactggacgtagacggcgcgctgttttctgccgattttcgctcggcagagcgtttcgcccagctttacacccaggtcgccggtcgtgccgggcgtgcgggtaaacagggcgaagtggtgctgcaaacgcaccatccggaacatcctctcttgcaaacattgctctataaaggctacgacgcctttgccgaacaggcgctggctgaacgacgcatgatgcaactgccgccgtggaccagccatgtgattgtgcgtgcggaagatcataacaatcagcacgcgccgctgttcctgcaacaactgcgtaatctgatcctctccagcccgctggcagacgacaaactgtgggttctcggtcccgttccggcactggcacctaaacgtggcggccgctggcgctggcaaattttgttgcagcacccttcccgcgtgcgattacagcacatcatcaatggtacgctggcgcttattaatacaataccggattcccgtaaggtgaaatgggtgctggatgtcgatcccatcgagggctaa

SEQ ID NO: 262220 - DNA, 567 bp, Klebsiella pneumoniae
atgctgccagagcagtgcttccgtctgcgggtgatgcaccgtctggcgctcaccggtcaggcggcctttctcatcatacccgtaatgcaccgtcacccggtggccttcgctgagatggctgatgcctgtcagccagccgcgttcgtcatactgccactgctctgccggttcaccattcaccgttcgctgtgtgatgcggtctgcttcgtcatagtgccagtgggtgaccagcccctcatcctcgctgcggataagtttaccggtcaggtcgtggtgataacgctgtgtgcggccgtcaaagccggtttcctgtatcagccggtcaagtacatcgtaacggaaggtggtgtggctgccgttttcactggtcaggcggatgacccgcccggcagcatcgtattccatactgcgcgtcagaccgccctgcgtggtacgaacgggctttccccacgcatcgtactgtgtcccgtttctgctgccgtccggggcaatgacggcggtcaggtcaccggcggcgttgtattcataccgcgtttcatggccctgcgtgtctttcaccgcaattaa

SEQ ID NO: 262221 - DNA, 1074 bp, Klebsiella pneumoniae
atgatgaagcgcaatattctggcagtgatcgtccctgctctgttagtagcaggtactgcaaacgctgcagaaatctataacaaagatggcaacaaagtagatctgtacggtaaagctgtcggtctgcattatttttctaaagacaatggtgtaaacagttacggcggaaacggcgacaaaacttatgcccgtcttggttttaaaggggaaacacaaatcaattccgatctgaccggctacggtcagtgggaatataacttccagggtaacaactctgaaggcgctgatgcccagaaaggtaacaaaactcgtctggcattcgcaggtctgaaattcgctgatgcgggttctatcgactacggtcgtaactacggtgtggtttacgacgcactgggttacaccgatatgctgcctgagtttggcggtgacacggcatacagcgatgacttcttcgttggtcgtgtaggcggcgttgctacctatcgtaactccaacttcttcggtctggttgacggcctgaactttgccgttcagtacctgggcaaaaacgaacgtgctggtattcctgagcgttccaacggcgacggcgtcggtggctctatcagctacgaattcgaaggctttggtatcgtaggtgcttacggtgcagcagaccgtaccgacgcccaggaagccgaattccgcggtcaaggtaaaaaagctgaacagtgggcaactggtctgaagtatgacgcgaacaacatctacctggcagcgaactacggtgaaacccgtaacgctacgccaattgaaggcggcttcgccaacaaaacgcaagacgttctgttagttgcgcaataccagttcgatttcggtctgcgtccgtccatcgcttacaccaaatctaaagcgaaagacgtagaaggtatcggtgatgttgatctggtgaactactttgaagtgggcgcaacctactacttcaacaaaaacatgtccacctatgttgactacatcatcaaccagatcgattctgacaacaaactgggcgtaggttctgacgacaccgttgcagtgggtatcgtttaccagttctaa

SEQ ID NO: 262222 - DNA, 648 bp, Klebsiella pneumoniae
atgaactatcgtattattccggtcaccgcattctcccagaactgttcattgatctggtgtgaacaaacccgtctggccgcactggtcgatcctggcggcgatgcggaaaaaatcaaacaggaagttgacgccagcggcctgacactgatgcagatcctgctgacgcatggtcatctggaccacgttggcgcagcggcggaactggcgcaacattacggcgtgccggtttttggcccggaaaaagaagatgagttctggctgcaaggcttgcctgcgcaaagtcgtatgtttggtctggaagagtgccagccgctgacgccagatcgttggctgaacgaaggcgataccatcagcatagggaatgtggctttacaggtgttacattgccctgggcatacgccgggtcatgtcgtgttttttgatgatcgggcaaagctgctgatttctggcgacgttattttcaaaggcggagtagggcgcagtgacttcccgcgtggcgatcataatcaactgatttcttcaatcaaagataagttgctgccactgggggatgacgtgacatttattccgggtcacggaccattatccacacttggttatgagcgcctgcataatccattcctgcaagacgaaatgcccgtctggtaa

SEQ ID NO: 262223 - DNA, 1848 bp, Klebsiella pneumoniae
atgttgcttaatatgatgtgtggtcgtcggctgtcggcaatcagtttgtgcctggccgtaacattcgctccactgttcaatgcgcaggccgatgagcctgaagtaatccctggcgacagcccggtggctgtcagtgaacagggcgaggcactgccgcaggcgcaagccacggcaataatggcggggatccagccattgcctgaaggtgcggcagaaaaagcccgcacgcaaatcgaatctcaattacccgcaggttacaagccggtttatcttaaccagcttcaactgttgtatgccgcacgcgatatgcaacccatgtgggaaaaccgtgatgctgttaaagccttccagcaacagctggccgaggtggcgattgccggtttccagccgcagtttaataaatgggtagagttactgaccgatcctggtgttaacggaatggcacgcgacgtcgtgctctctgatgcgatgatgggctatctccatttcattgcaaatattccggtcaaaggcactcgctggctatatagcagtaaaccttatgcgcttgcaacgccgccgctttcggtgattaaccaatggcagctggcgctggataaaggtcaattgccgacgtttgttgcaggactggcaccgcagcatccgcaatatgcggcgatgcatgaatcgttactggccttactcagtgacaccaaaccgtggcctcaactgaccggtaaagcaacgttgcgcccagggcagtggagtaacgacgtaccggcgttgcgcgaaatattgcaacgcacaggcatgttggacggggggccaaaaattactctccctggcgatgacacgccaactgacgcagtagtcagcccatccgctgttactgttgaaacagcagaaactaagccgatggacaagcaaacgacgtctcgtagtaaacctgcgcctgccgttcgtgccgcctacgataatgaactggtggaggccgttaaacgttttcaggcatggcaaggattgggagcagatggcgctattggcccggcaacgcgtgactggttaaacgtaacgcccgcccagcgtgctggcgtgttggcactcaacatccagcgattgcgcttgctaccaacagagctttctaccgggatcatggttaacattccagcctattcgctggtctactatcagaacggcaatcaggtactggattcgcgagtcattgtcggtcgccccgatcgcaaaacgccgatgatgagcagtgcacttaacaacgtagtggtaaacccgccgtggaacgtaccaccaactctggcacgcaaagatattctgccgaaagtgcgcaacgatccgggatacctcgaaagccatggctatacggtgatgcgcggctggaacagcagagaagcgattgacccatggcaggttgactggtctacaatcacggcctcgaatttaccgtttcgcttccagcaggctccaggcccacggaactcgctggggcgctataaattcaatatgccgagttcagaggccatttatttgcatgacacgccgaaccacaatctgttcaagcgtgatacacgcgcattgagctcaggctgtgtacgagtgaataaagcttccgatctggcgaatatgctgttgcaggatgcaggatggaatgacaaacgtatttctgatgcgctgaagcagggcgatacgcgttacgtcaatattcggcagtcgattccggtgaatctctactacctgacggcctttgttggtgcagatggtcgtacccagtatcgtacagatatttacaattatgatctgcctgcgcgatccagctcgcaaatcgtatcgaaagcggaacaattaatcaggtaa

SEQ ID NO: 262224 - DNA, 786 bp, Klebsiella pneumoniae
atgcaggatcgcaattttgatgatattgcggaaaagttttcccgtaacatttacggcaccaccaaagggcagcttcgacaggctattctgtggcaggatctcgatcgcgtgctggcggaaatgggcccgcaaaaactgcgtgtgctggatgctggcggtggagaagggcagaccgcaatcaaaatggccgagcgtgggcatcaggtcattttatgcgatctttctgcgcagatgatcgaccgcgcaaaacaggcggcagaagcaaaaggtgtgagcgacaacatgcaatttatacattgcgccgctcaggatgttgcttcgcatttggaaacgcccgttgatctgatattgttccatgcggtgctcgagtgggtggccgatccccgcagcgtattacagaccctgtggtcagtgttgcgtccaggcggtgtgttgtcgttaatgttctacaatgcgcacggcttgctgatgcataacatggtcgccgggaattttgattacgtgcaggcgggaatgccgaaaaagaaaaaacggacgctttcgccagattatccacgcgacccggcgcaggtttatctgtggctggaagaagctggttggcaaattatgggtaagacaggcgttcgcgtgtttcatgattatctgcgcgagaagcaccagcagcgcgactgctatgaagcattacttgaattagaaacgcgttattgccgtcaggaaccgtatattaccctggggcgttatattcatgtcaccgcgcgcaaaccgcagagcaaggataaagtatga

SEQ ID NO: 262225 - DNA, 780 bp, Klebsiella pneumoniae
atgctttttacactgaaaaaagtgattggcaatatgttgctgccacttccgctgatgttgttgattattggcgctggcctggcgctgctgtggtttagccgttttcaaaaaaccgggaagatttttattagcattgggtggctggcgctcttgttattgagtttgcaaccggtagccgaccgcctgctgcgtcccatcgaaagcacctatccgacatggaataattcgcaaaaagtggactatatcgtggtgctcggaggtggttatacctggaacccgcagtgggcaccaagctcgaatttaatcaataacagtctgcctcgcctgaatgaaggtattcgcttatggcgcgaaaatccgggatcaaaactgatcttcacgggaggcgtagcaaaaaccaatacggtgagtacagcggaagtaggtgccagagttgcgcaatcgctgggcgtgccgcgcgagcaaattatcactctggatttgccaaaagataccgaagaagaagctgcggcagtgaaacaggcgattggtgacgcccctttcctgctggtgacctccgcatcacatctgccgcgggcgatgatcttttttcagcaggaagggttaaatccgctaccagccccagcgaatcagttggccatcgactcgccgcttaatccgtgggaacgggcaatcccttctccggtttggttgatgcatagcgatcgtgttggctatgaaacgcttggccgcatctggcagtggctgaaaggtccgtcaggcgagccacggcaagagtga

SEQ ID NO: 262226 - DNA, 894 bp, Klebsiella pneumoniae
atggaacagctgcgtgccgaattaagccatttactgggcgaaaaactcagtcgtattgagtgcgtcaatgaaaaagcggatacggcgttgtgggctttgtatgacagccagggaaacccaatgccgttaatggcaagaagctttagtacgcccggaaaagcccgacaactggcatggaaaaccaccatgctggcaagaagtggaactgtccgtatgccgactatttatggtgtgatgacgcatgaagaacaccccggccccgatgtcctgctactggagcggatgcgtggtgtttcggtggaggcaccagcccgaacaccagaacgctgggaacagctcaaagatcaaatcgttgaagccttactggcctggcaccgtcaggacagtcgcggttgcgtcggcgcggtcgacaatactcaggaaaatttctggccctcatggtaccggcaacatgttgaagtgctatggaccacgctcaatcagttcaataacaccggtctaacgatgcaggataagcggatcctgtttcgtactcgcgaatgtcttccggcattatttgaaggctttaacgacaattgtgtgctgattcacggtaacttctgtttacgcagcatgctgaaagattcgcgcagcgatcagttactggcgatggtcgggccgggactaatgctttgggcaccgcgagaatacgaactgttccgactaatggataattctctggcggaagatttgctctggagttacctgcaacgcgcgccagtggcggagtcgttcatctggcggcgttggttgtatgtgttatgggatgaagttgcgcaactggttaataccggacgatttagtcggcgcaacttcgatctggcatcaaaatcactcttgccgtggctcgcctga

SEQ ID NO: 262227 - DNA, 747 bp, Klebsiella pneumoniae
atgagttttgtggtcattattcccgcgcgctacgcgtccacgcgtctgcccggtaaaccattggttgatattaacggcaaacccatgattgttcatgttcttgaacgcgcgcgcgaatcaggtgccgagcgcatcatcgtggcaaccgatcatgaggatgttgctcgcgctgttgaagccgctggcggtgaagtatgtatgacgcgcgccgatcatcagtcaggaacagaacgtctggcggaagttgtcgaaaaatgcgcattcagcgacgacacggtgatcgttaatgtgcagggggatgaaccgatgatccctgcgacaatcattcgtcaggttgctgataatctcgcccagcgtcaggtgggtatggcgactctggcggtgccaatccacaatgcggaggaagcgtttaacccgaatgcggtgaaagtggtcctcgacgctgaagggtatgcactgtacttctctcgcgctaccattccttgggatcgtgatcgttttgcaaaaggccttgaaaccgttggcgataacttcctgcgtcatcttggtatttatggctaccgtgcaggctttatccgtcgttacgtcaactggcagccaagtccgttagaacacatcgaaatgttagagcagcttcgtgttctgtggtacggcgaaaaaatccatgttgctgtcgcccaggaagttcctggcacaggtgtggatacccctgaagatctcgagcgcgttcgcgctgaaatgcgctaa

SEQ ID NO: 262228 - DNA, 183 bp, Klebsiella pneumoniae
atggatcatcgtctgcttgaaatcattgcctgcccggtttgcaacggaaaactttggtataaccaggaaaaacaagaacttatttgcaaactggacaacctggctttcccgctgcgcgatggcattccagtgttgctggaaacggaagcccgcgtgctgactgctgatgagagtaaatcatga

SEQ ID NO: 262229 - DNA, 1233 bp, Klebsiella pneumoniae
atgtcgctgccgcacctctctcttgctgatgcgcgtaatcttcacctcgccgcgcaaggcctgttaaacaaaccccgccgtcgagcatcgttggaggatattccggcaacgatctcccgcatgtccttgctgcaaatcgataccattaatattgttgcccgtagtccatatctggtgcttttcagtcgtctgggaaattatcctgcccagtggctggatgagtctctggcgcgtggcgaattaatggaatactgggcgcatgaagcctgctttatgccgcgtagcaactttcgtcttattcgccaccgcatgctggcacctgaaaaaatgggctggaaatacaaaaacgcctggatgcaggaacatgaggcggaaattgcacagttaattcagcatattcatgataaggggccggtacgttcagccgatttcgagcattctcgtaaaggtgcaagcggctggtgggaatggaagccgcataaacggcatctggaaggtttatttactgccggaaaggtgatggtgattgaacggcgcaacttccagcgcgtttatgatttaacccaccgagtcatgcctgactgggatgatgagcgcgatctcgtttcgcaaacagaagcagaaatcatcatgctggataacagtgcgcgtagcctgggaatattccgcgaacagtggctggcagattactatcggctgaaacgtccggcactggcggcgtggcgcgaagcgagggctgaacagcagcaaatcattgctgtgcatgttgaaaaattgggcaatctttggctgcatgctgatttgctgccgctactcgagcgtgcgctggccggaaagctcactgcaacgcacagcgcggtactttcgccttttgatcctgttgtctgggatcgcaaacgcgcagagcagctttttgattttagctaccggctggagtgctataccccagcgccgaaacgccagtatggctattttgttctgccgttattacatcgtgggcaattagttgggcgaatggatgccaaaatgcatcgccagacaggcatccttgaagttatctctctgtggttacaagaaggcattaaaccaacgacaacgctgcaaaaagggttacgtcaggcgattactgatttcgctaactggcagcaggcaacgcgggtgacattagaacgctgcccgcaaggcctctttactgattgccgcaccggctgggaaatagaccccgtcgcataa

SEQ ID NO: 262230 - DNA, 987 bp, Klebsiella pneumoniae
atgatcgaaaaaatctggtctggtgaatcccctttgtggcggctattgctgccactctcctggttgtatggcctggtgagtggcgcgatccgtctttgctataaactaaaactgaagcgcgcctggcgtgcccccgtaccggttgtcgtggttggtaatctcaccgcaggcggcaacggaaaaaccccggtcgttatctggctggtggaacagctgcaacagcgcggtattcgcgtgggggtcgtatcgcggggatatggtggtaaggctgaatcttatccgctgttattgtcggcagataccaccacagcacaggcgggtgatgaacctgtgttgatttatcaacgcactggcgcgcccgttgcggtttctcccgtgcgttctgatgcggtaaaagccattctggcgcaacaccctgatgtgcagatcatcgtaaccgacgacggtttacagcattaccgtctggcgcgtgatgtggaaattgtcgttattgatggtgtgcgtcgctttggcaatggttggtggttgccggcggggccaatgcgtgagcgagcggggcgcttaaagtcggttgatgcggtaatcgtcaacggcggtgtcccccgcagcggtgaaatccccatgcatctgctgccgggtcaggcggtgaatttacgtaccggtacgcgttgtgacgttgctcagcttgaacatgtagtggcgatggcggggattggacatccgccgcgcttttttgccacgctgaagatgtgcggcgtacaaccggaaaaatgtgtaccactggccgatcatcagtctttgaaccatgcggatgttagtgcgttggtaagcgccgggcaaacgctggtaatgactgaaaaagatgcggtgaaatgcctgccctttgccgaaggaaattggtggtatttgcctgttgacgcacagctttcaggtgatgaaccagcgaaactgcttgcgcaactaacctcgctggcttctggcaactag

SEQ ID NO: 262231 - DNA, 1749 bp, Klebsiella pneumoniae
atgcataacgacaaagatctctctacgtggcagacattccgccgactgtggccaaccattgcgcctttcaaagcgggtctgatcgtggcgggcgtagcgttaatcctcaacgcagccagcgataccttcatgttatcgctccttaagccacttcttgatgatggctttggtaaaacagatcgctccgtgctggtgtggatgccgctggtggtgatcgggctaatgattttacgtggtatcaccagctatgtctccagctactgtatctcctgggtatcaggaaaggtggtaatgaccatgcgtcgccgcctgtttggtcacatgatgggaatgccagtttcattctttgacaaacagtcaacgggtacgctgttgtcacgtatcacctacgattccgaacaggttgcttcttcttcttccggcgcactgattactgttgtgcgtgaaggtgcgtcgatcatcggcctgttcatcatgatgttctattacagctggcaactgtcgatcattttgattgtgctggcaccgattgtttcgattgcgattcgcgttgtatcgaagcgttttcgtaacatcagtaaaaacatgcagaacaccatggggcaggtgaccaccagcgcagaacaaatgctgaagggccacaaagaagtattgattttcggtggtcaggaagtggaaacgaaacgcttcgataaagtcagtaaccgaatgcgtcttcaggggatgaaaatggtttcagcctcttccatctctgatccgatcattcagctgatcgcctctttggcgctggcgtttgttctgtatgcggcgagcttcccaagtgtcatggatagcctgactgccggtacgattaccgttgttttctcttcaatgattgcactgatgcgtccgctgaaatcgctgaccaacgttaacgcccagttccagcgcggtatggcggcttgtcagacgctgtttaccattctggacagtgagcaggagaaagacgaaggtaagcgcgtgatcgagcgtgcgactggcgacgtggaattccgcaatgtcacctttacttatccgggacgtgacgtgcccgcattgcgtaacatcaacctgaaaattccggcagggaagacggttgctctggttggacgctctggttcaggtaaatcaaccatcgccagcctaatcacacgtttttacgatattgatgaaggcgaaatcctgatggatggtcacgatctgcgcgagtataccctggcgtcgttacgtaaccaggttgctctggtgtcgcagaatgtccatctgtttaacgatacggttgccaacaacattgcttacgcacggactgaacagtacagccgtgagcaaattgaagaagcggcgcgtatggcctacgccatggacttcatcaataagatggataacggtctcgatacagtgattggtgaaaacggcgtgctgctctctggcggtcagcgtcagcgtattgccatcgctcgagccttgttgcgtgatagcccgattctgattctggacgaagctacctcggcgttggataccgaatccgaacgtgcgattcaggcggcactggatgagttgcagaaaaaccgtacctctctggtgattgcccaccgcttgtctaccattgaaaaggcagacgaaatcgtggtcgtcgaggatggtgtcattgtggaacgcggtacgcataacgatttgcttgagcaccgtggcgtttacgcgcaacttcacaaaatgcagtttggtcaatga

SEQ ID NO: 262232 - DNA, 2265 bp, Klebsiella pneumoniae
atgaaaataacgacagtcggcgtatgcataatttgcggaatttttccgttgctggttttgccccaattgcctgggacattaacccttgcgtttctgactgtcttcgcctgcgtactggcatttattcctgttaaagccgtccgttatatcgcgctgacgttgctgttttttctttggggcatatcagcggcaaagcaaattttgtgggcaggagaaaccttaactggcgcgacgcaggatgcaatagttgagatcactgctactgacggcatgaccactcattacggtcaagtcactcatctacaaggtcgacgtatattccctgcgccaggcctcgtgctgtatggcgaatatctcccgcaagcggtttgtgccggacaactatggtcaatgaaactcaaagttcgtgcagttcatggccaacttaatgatggcagctttgatagccagcgttatgccattgcccagcatcagccgctgaccggccgctttctgcaggcaagtgtcattgaaccggattgtagcttgcgtgcacagtatctggcgtcattacaaacaacgctgcaaccctatccgtggaatgcggttattcttggtttaggtatgggggaacggttatccgttcccaaagaaatcaaaaatatcatgcgcgatactggaacggcgcatttaatggcgatatcgggattgcatatcgcttttgcggcgttgctggctgccggactcattcgcagtggacaaatttttctgcctgggcgctggatccactggcaaatgccattaattggcggaatctgctgtgctgctttttatgcctggctgacgggaatgcaacctcctgcatttcgtaccgtggtggcgcttgccatgtggggaatgcttaagttaagtgggcgacaatggagtggctgggatgtatggatatgttgtctggcggcaattttgctgatggatcctgttgccattctctcgcaaagtttatggctctctgccgctgcggtcgcggcactgattttttggtatcagtggtttccctgtcctgagtggcagctgccgccggtattgcgtgcggttgtttccctcatccatctgcaactgggaatcaccctcctgcttatgcccgtgcaaatcgtcatatttcatggcattagtctgacctcgtttattgcaaatctatttgcaattcccctggtgacatttatcacggttccattgatcctcgccgcgatggttgtgcatttaagcgggccgttaatcctggaacaggggttatggtttcttgccgaccggtctttggctttacttttctgggggttaaagagtttgccggaagggtggatcaacattgctgaacgttggcaatggctaacattttccccatggttcttactggtggtatggcgattaaacgcctggcgaacgttgccagcaatgtgtgtggctggaggcttgctgatgtgctggccgctgtggcaaaaacctcgacctgacgagtggcaagtgtacatgcttgatgtcgggcaagggctggcaatggtcattgcgcgaaacggcaaagcgattctctatgacacgggactggcctggcccgaaggggatagtgggcaacaactgattatcccctggctccactggcataatcttgaaccggaaggcgttattctgagtcatgaacatctggatcaccggggagggctggactcaatattgcacacatggccgatgttatggatcagaagtccgttaaactgggaacatcatcagccctgtgtgcgtggcgaagcgtggcaatggcaaggattgcgtttcagcgcgcactggcctttacaagctagcaacgataaaggaaataaccattcctgtgtggttaaggttgatgacgggacgaatagcattcttctaaccggtgatattgaagcccccgctgaacaaaagatgctaagccgttactggcagcaagtgcaggcaacattgcttcaggtacctcaccatggcagtaatacctcatcatcgttgccattaattcagcgagtgaatggaaaagtggcactcgcatcggcatcgcgctataacgcatggcgattgccctccaacaaagttaagcatcgctatcaacaacaaggttataagtggcttgatactccacatcagggtcaagtgacggtcaatttttcagcgcaaggctggcggattagcagcctcagggagcaaattttacctcgttggtatcatcagtggtttggcgtgccagtggataacgggtag

SEQ ID NO: 262233 - DNA, 285 bp, Klebsiella pneumoniae; identical to SEQ ID NO: 873

SEQ ID NO: 262234 - DNA, 1164 bp, Klebsiella pneumoniae
atgataacgggaatgactattcaggccggggcgcgcattgctcctgattttatgctcacgctcggtggcgcagatatcacacagaatttcagcgaccggcttatcgggctgaccatgaccgacaatcgcggattcgaggctgaccagcttgatatcgagctcgatgataccgatggactggtcgagttgccgccgcgcggggcatcgctgaccctgtggctgggctggcagggctcggcgctgattaacaaagggagttttacggttgacgaaatcgagcaccggggcgcgcctgacaggctgactatccggggacgcagtgcggattttcgcgggacgctgaactcgcgccgcgagcagtcatggcacgacaccacgctcggggtgattgtcgagactatcgcgcagcgtaacaaactgacggccagcgtggctgataccctgaaagctgttgctgtgccgcatattgaccagtctcaggaatccgacgcggcgtttttgtcccgactggcggatcgcaacggggcaacggtttcggtcaaggccgggaaattgttattcctgaaagccggtagcgcgatgacggccagtggtaaggccatcccgcaaatgaccgtcgaacgcggcgacggcgaccggcatcagtttgccatagccgaccgcgaggcatactccggcgtaaccgctaaatggctgcacaccagagacccgaaaccgcaaaagcaaaaggtgaagctcaagcgcaaacccaaagagcagcacctgcgtgcgctgcagcacccgaaggttgctaaaacatcggcaaaggctaaaaagaagaaggtgcaggaagcgcgggaaggtgagtatatggccggtgagtccgacaatgttctggaactcacgaccatctacgcgacaaaggcgcaggccatgcgcgcagctcaggcaaagtgggacaggatacagcgtggggtggcggagttttcgatcacgctcgccactggccgcgctgatttatttcctgaaacgccggtggcagtgaaaggctttaagcgcgttatagacgagcaggcgtggataatcagtcgtgtggtacacagcctcaacgggagcggcttcacgacgggcttagagcttgaggttaaggtttctgatgtggagtatgaaagcgaggaagtttaa

SEQ ID NO: 262235 - DNA, 465 bp, Klebsiella pneumoniae; identical to SEQ ID NO: 32163

SEQ ID NO: 262236 - DNA, 2442 bp, Klebsiella pneumoniae
atgagcaataacgtcagaatcgaggtgctgctgaacgcagttgaccgggcaagccgcccgcttaaagcgattcagaacgccagcaaatccctgtctggtgatatccgcaattcacaaaaaagcctgtgcgaacttaatgtgcaggcgtcccgtattgacggattccgcaaagccagcgcccagcttgccgtgaccggtcattcgcttgagaaagcgaaacaggaagcgcaagcccttgccacacaatttaaaaacaccgagcgcccgacgcgcgcgcaggcgcaggtgcttgaatcggcaaagcgtgccgccaacgggctgcagacgaaatacaacagcctcactgagtctgttaagcgccagcaacgtgaactcggtgcagtcggtattaatacccgtaatctggcaaatgatgagcgggggcttaaatcgcgcatcagtgagactaccgcgcagcttaatcggcagcgtgaggcactggcgaaagtcagcgcacagcaggcgaagttaagccgggtgaaagcgcggtatcaggccggtaaatcactggccggaaacgcggcggcggctggcgcagccggtgttggtattgcgacggcgggaaccctcgccggggttaagctgctgacgcttggttatgaatttgcacagaaaaactcagagctgcaggccgtgctcggtgtcgacaaacagtcgcctgaaatgcaggcgctgcgtaaacaggcgcgccagctcggtgataataccgctgcctctgccgatgatgcggcgggtgcgcagattatcattgccaaaagcggcggcgatgcggcggccattcaggcggcgacgccggtcacactgaatatggcgctgtcgaacaagcgcacgatggaagaaaacgctgcgctgctgacaggcatgaaatctgcttttcagctctctaacgataaagtcgcgcatattggtgatgttctctcgatgacgatgaacaaaaccgccgccgactttgatggaatgagtgatgcgctgacctatgccgcgccagtggcgaaaaatgccggggtaagtatcgaagaaaccgccgcaatggtgggggcgctgcacgattccaaaatcaccggctcgatggcgggtacagggagtcgtgccgttctgagtcgcctgcaggcgccaaccggtaaagcgtacgacgccatcaaagagctcggtattaaaacgtcagatagcaaaggcaatacgcgcccgatattttccatcctgaaagaaatgcagcgcagttttgagaaaaacaatctcggaacgggtcagaaatccgaatacatgaaaaccattttcggtgaagaggccagctcggcggccgccgtgctgatggccgccgcatcaagcggcaagctcgaccagctcaccgccgcgtttaaagcctcagacggtaagactgaggaactggttaaggttatgcaggataacctcggcggcgactttaaagagtttcagtcagcctatgaggcggtcggcactgacctgtttgatcagcaggagggctcactgcgtaagctgacgcagacggccacgcaatatgtgctcaggctcgacggctggatccagaaaaataaagggctggcgaccaccctcggcgtggtggttggtggtgcgctggcgctgatcggtgtgatgggcgggattggccttgtcgcatggccggtggtgatggggattaatgccatcattgcggcggctggcgtgctcggtgtggttttcagtacggtcggcggcgcgattgtcacggccattggcgcaatcagcctgccggtgctggcggtagccggtgcagtggtggccggtgcattgctgatccgcaaatactgggagccgctcggtgcattcttctcgggcgtggtggagggactgaaagccgcctttgcaccggtgggggacatgtttaccccgctcgcgccggtgtttgacgccatcgctgaaaagctgggtgtcgtctgccagtggtttaaagacctgcttgcgccggtgaaagccacgcaggacacgctctccagttgcaaaaatgtcggcgttacttttggccaggcgctggctgatgcgctgatgatgccgctcaagatgtttaacagcctgagcggcaaggtcggctggctgctggagaaactcggcgttatcaaaaaagaatccagcgacctcgaccagaccgcagcgaaagcgaataaggcgtccccgaatggcgggtatatccctgcgaccgcaggttatggcgggtatcaggcgtatcagccggtcacagcgcccgcaggcctgtcttatatcgaccagagcaaaagcgaatacaacatcaacctgcagggcggagtcgcaccgggcagtgaccttgaccgccagctccgtgacgcggtcgacaaacttgaccgcgagaaacgtgcgcgtcagcgatccagtatgagactcgactga

SEQ ID NO: 262237 - DNA, 315 bp, Klebsiella pneumoniae; identical to SEQ ID NO: 32165

SEQ ID NO: 262238 - DNA, 519 bp, Klebsiella pneumoniae
atggcgttaccccgcaaactgaaatacctgaatatgttcaacgatggcctcagctatatgggcgttgttgaatccgtcaccctgccaaaactgacccgcaagctggagaaatatcgcggcggcgggatgccgggggcggtgtcggttgaccttggcctcgatgacgatgcgctgtcgcttgagtggacgctcggcggtctgcctgacattgaattgtgggcgcagtacgcctcaccgggtgctgacagcgtgccgctgcgttttaccggctcttatcagcgtgacgacaccggcgcgatttctgccgtcgaggtggtgatgcgtggccgtcataaagaatacgacggcggtgaaaacaagcagggcgaaagcggtacaaccaaaatggcgaccgagtgcgcctattaccagctcacgatcgacggcaaagaagtcatcgagattgacgtgatcaacatggtgctgaaagtcgacggtgtcgaccgtatggcagagcaccgcaaggcgattggcctgtaa

SEQ ID NO: 262239 - DNA, 1194 bp, Klebsiella pneumoniae
atgagtgactatcatcacggcgtgcaggtcatcgagattaacgatggcgtgcgcaccatttccaccgtttcgacggccatcatcggcatggtctgcacggccagcgatgctgacgaaaaaacatttcccctcaatgagccggtgctcattacgaacgtgcagagcgctatcggtaaggccggtaaacagggctcgctgtcggcgtccctgcaggctatcgctgaccagtgcaagccggtcatcgtggccgtgcgtgtggccgaaggtattgaagatccggagaaccccgaggcggcgcacaaacagaccatttctaatatcatcggcaccaccgacgaaaacggcaaatataccgggctgaaagccctgctgacggcgaaaaccgtcaccggcgttaagccacggattctcggcgtgccggggctggattcacaggaggtggcgaccgcactcgcgtccacctgtcagagcctgcgcgcctttggctatgtcagcgcatggggctgtaaaaccatttccgaggccatcgactaccgcgagaatttcagccagcgtgagctgatggtcatcttccctgattttctggcatgggacaccacggcgaacgcgaccgcgacagcttgggcgacggcgcgcgcgctcggcctgcgtgccaaaattgaccagacggtcggctggcataaaaccctgtctaacgttggcgttaacggtgtgaccggcgtcagtgcctcagtatcgtgggatttgcaggaaccggcgaccgacgccaacctgctgaatcaggccggtgtcaccacgcttatccgcaatgatggtttcaagttttggggaaaccgtacctgctcggatgatccgcttttcctgtttgagaactacacccgcaccgcgcaggtactggccgacacgatggcggaggcgcacgcgtgggcgatggataaacccattaccccgaccctcattcgcgacatcgtttccggtatcaatgccaaattccgcgagctgaaaaccagtggttatatcgttgacggcttctgctggtacgacccggagtcgaacgacaccgcgaccctgaaagtggggaaactgtatatcgattacgactatacccccgtcccgccgctggaaaacctgagcctgcgccagcgcatcaccgatacctatctggcgaacctgtcggactcggtcaacagctaa

SEQ ID NO: 262240 - DNA, 579 bp, Klebsiella pneumoniae; identical to SEQ ID NO: 32168

SEQ ID NO: 262241 - DNA, 1686 bp, Klebsiella pneumoniae
atgacagtgaaatataaaaccgttatcacccgagccggtgcggaaaaactggcggcggcgacgctcccgaacgggaaaaaagtcaattttgcggtgatggccgtcggggacggtggcggtaagctgcccgaaccagacgccagtcagacaaaactcgtcaatgaggtctggcgccatgcgctgaacaaaatcagcctggacaaaaaacataaaaattatgtcgtggcggagctggtgatccccccggagaccggcggtttctggctgcgtgaaatggggctttacgatgacaccggcacgctgattgcggtcggcaatatggccgaaagttataagcccgaactggcggaagggtcaggccgcgcacagacgctgcgcatggtgatcatggtgagcgatatcgacaccgtcgagctgtccatcgatacgacactggtgatggcgacgcaggattatgtcgacgataaactcgcagagcatgagcagtcccgtcgccatcctgacgccacgctgaaagaaaaagggttcacgcagttaagcagtgcgaccgacagcacgtctgaggcgctcgccgcaacgccgaaagcggtcaaggtggcgtatgaccttgcgaaaggtaaatatacggctcaggacgcgaccacggcacagaaggggattgtccagctcagtagcgccaccgacagcgtgtctgaggtgcttgctgcgacaccgaaagcggtcaaagtggcgaatgataatgctaatggccgcgttccctccacgcgtaaaattaacggacattccctgaatgctgacaccagtgtcacctcgaaggatattttcgacggtcaggctattgggctggtaacggaggatttagacacccttaaaacgccgggtatttactttcagccagcgaattctaatacctcagccgccagacattaccctgaaaataacgccgggacgctggtcatttataaaaatgccggagtgactcaggtataccgggtttataacagctcccggagctactcgcgcagtcagtattcaacaggcgcatggacaccgtggacgcctgatgatgtttttccggtaggcgctcccgttgcgtggccgtctgacagtgttcctgctggctatgccgtcatgcagggacaaacttttgataaagccgcgtatccgctgcttgctgtggtgtacccatcgggtgttattcctgatatgcggggctggacaatcaaaggtaaacccgcaagtgggcgcgctattttgtctcaggagcaggacggcattaaatcgcacgcccacggtgccagcgcatcgagcaccgatttagggacgaaaaccaccagtgcttttgaccacggaacgaaaaccaccacgacctttgactacgggacaaaaaccactaatgcaactggcaaccatgcgcacacttttaccgtacaccggggagatcaggccgggggacaggccgccgacggtaacgaaatagcgacgggaacgaaaacaacatcaactgcaggtaatcacgcgcataccgtggcgattggtgcccacaatcataatgtcgggattggcgcacactcgcactccgttgctattggcgcacacggtcacaccattacgatcgccgcgtcgggtaatgcagaaaacaccatcaaaaacatcgcatttaactatatcgtgagactcgcataa

SEQ ID NO: 262242 - DNA, 531 bp, Klebsiella pneumoniae
atgagtgataaccgtttgctgccggtgggctcgtcgccgcttgaggtggcggcggcgcgcgcctgcgcggatatcgaaaatacccctgtcccgctgcgtcacctctggaaccctgacaactgccccgcaaatctgctgccgtggctggcctgggcgttttcggttgatcgctgggatgagagctggccggaagaaaccaaacgcgaggttatccgcagcgcgtggtttatccatgcgcataaagggacgataggcgcggtgcgtcgtgtggtcgagccgctcgggtatctgattaacgtgacggagtggtgggagacgaacgacccgccgggcacgtttcgccttgatatcggcgtgctgaagaccggcatcaccgaggaaatgtattacgaaatggaaaggctgattgccgatgcaaagccagccagtcgccatcttatcggcctgaatattattcaggacatcccgggttatctcttcaccggagccctgacctacgacggcgacatcatcacggtttaccccggataa

SEQ ID NO: 262243 - DNA, 909 bp, Klebsiella pneumoniae
atggctattgttgacctgagccagctcgccgcacctgatgttgtggaagagctggattatgaaaccatcctgacagagcgaaaagcgacgcttgtctcgctgtatcccgaagagcaacaggacgcggtcgcgcgcacgctgacgcttgaatctgagccgattgttaagctgctgcaggaaaatgcgtatcgggaggttatctggcgtcagcgggtgaatgagtcggcacgggcggtgatgctggcctgtgctgccgcaaacgacctcgacaatatcggcgcaaattacaacgttgaacgtctcgttattacgcctgctgatgaaaccacgctgccgccgacacctgctgtgatggagtcggacaccgattaccgtctgcgtattcaacaggcctttgaaggaatgagcgtggccgggtcgaccggtgcgtatcagtttcatggccgcagcgctgacgggcgggtcgccgatatttctgttatcagcccggaacctgcctgcgtgaccgtgtcggtactgtcccgggagaataacggcgcggcatccggggagctgctcgccgtggtgcgtaatgcgctgaacgatgaggatgtgaggccggttgctgaccgcgtgaccgtgcagtcggcggtcattgtcgactacaccatcgatgccgcgctttatctttatcccggccccgaaagcgagccggtgctcagtgcggcaaaagcgaagctgcagacctatatcagcgcgcagcaccggctcgggcgtgacatccgcaagtctgccatctatgccgcgcttcacgtcgagggcgtgcagcgtgtcgaacttgtcgcgccggtcgctgacatcgtactcaatgagacgcaggcgtcatattgcactgcgtacagcgtaaatatcgggggcaacgatgagtga

SEQ ID NO: 262244 - DNA, 351 bp, Klebsiella pneumoniae
atgacggtgcgttatctgggaatgaacagccagaccggcctcagtatttctgaggttgagcacatcaggcaaagcgtgcgcgacattctggtcacgccggtgggatcgcgggtcatgcgccgcgaatatggctcgctgttgtctgcactgattgaccagccgcagaccccggcgctgcgtctgcagattatggccgcgtgctactccgcgatccagaagtgggaaccgcgcgtcagtttgtcgaccatcacctttgaacgcggagaggatgacggcgcgatgtacgtcgatatgaccggcacgcgttcggcatcaggccagcctttttctatcacccttccactgagttaa

SEQ ID NO: 262245 - DNA, 642 bp, Klebsiella pneumoniae
atgaacaatttaacttctctgcaggaaatcgctcgtgcgatccgcaaccttatccgcaccggcgttgtgacagacgttgaacccgttgaggggctttgtcgtgtgcagaccggagggatgcaaaccacgtggcttaactggctgacctgtcgcgccggtcgctcacgggtgtggtgggctccttccgttggcgagcaggtgctcattcttgccattgggggcgaactcgacactgcctttgtgctgcctggtattttctctgatgaccatcccgcgccgtctgcctcacccgatgccctgcatgtctcgtttcctgacggggcggttattgagtacgaacccgaaaacggggcgctcaccgtgtccggtattaaaactgccgacgtcattgcatcagagtccattactgccaccgtgccgctggtactggttaaggcatccacccgcatcaccctcgatacacccgaggtggtgtgtaccaacaagctgacaaccggcacgctcgaagtgaaaaaaggcgggacgatgtcggggaacatcgagcacaccggcgggaaatttacctcaaatggcgtgcaggtcgatgaccacgatcatggtggcgtggagccaggcggaaactggacgaagggggtcaaatga

SEQ ID NO: 262246 - DNA, 987 bp, Klebsiella pneumoniae
atgagtgaaatctctttcgtatttgcgcgatcatttattgatgcttcaccattcattcttgcaatggcaatagctatagctattctgcgtggtcctgtggtgaaattcatttcacggaacttacttgattcaggcaaggacaggtataatgcggaaactaaagataataacacaaagaagaatggtaacactgaaagccaaccaatggcagatgagaaaataaaatttcatattcgtaaaatattgctaaacgagagtggtcaaaaatattttgatgcgtacagagaaaatgtcgaaagtttaatcgagaaaagacaaaaggaattagccaattacgctttaacaagcgtgttttctgaaaataaaattgaagaggcgatcactgaatcattgcatgatacagtggaggacactaccaaaaaattaattagagagagtgagcaattcaagattttagagaaggaaacaattgaaaagttaaatttaataaaaatatcatcatttttggagcatctggagaaagaatatgatgcaactcgaagtacaaaggctctgatgagtaacatgtttattttggtgaatgttttttatttttttggcctgctgggttttcttatatttgggcaaaacataataaccacaccgtctatttatttagcattatcgttttcctatattgggttaggtgcgtttgttgtttacatgataaagttttgtaacgcacgaagtttaacgttactttctctccgggaagattttttaaaacgagaacagataagcaacatggctaccaaaatggtagagttaggggcgagtgaacatcatgtggctttgttgcaattgatgaattccagtatcgctacaaaagaacaaaaaattaaccatccttatgaaatgcttttgtatggaatcaaagattcgaatatcatgttcaagggtgggaaatttgaaataaaaaaagagacttcagggaagtcaaatccataa

SEQ ID NO: 262247 - DNA, 441 bp, Klebsiella pneumoniae
atgaatgaatttaaaccttttgatgacaaacttgcgggactgattgcggcaatatcaccggtgggtcggcgcaagctggccgctgagattgcgaaggaactgcgcagatcgcaacagcaacgaatcaaacagcaaaaagcacctgatggcacgccgtatcaggcacgaaaacgccagccgctgagggcaaaaaaaggacgcattaaacgggcgatgtttcagaagttgcgaaccagtcgctacatgaaagccagtggccgcaatgatactgccgtggtggaattcactggcaaggtgcaacgcatcgcgcagattcatcagttcggactcaaagaccggccaaaccctcatgctcaggacgtgcaatatccagaacgccagttactcggatttagcaggaacgatatacaattaattgaggatctttttttactcatctga

SEQ ID NO: 262248 - DNA, 468 bp, Klebsiella pneumoniae
atgcagaaaatgaaaagcctgcgccaggcgcttactgacgctgtaccgcagttaaaaaacaatcccgaaatgatgcgtatctttgccgatgaggggaatatcgatgcgcgtcttgcggcctcgctgtctcatgaaaagaattacaccctgaatgtgattgtctgcgattttgtcggcgaccctgacctgattttcgtgccggtagccgcgtggctgcgtgagaaccagccggacatctgcacgctggatgaggggcgcaaaaagggttatcgattccagatggatttaaatgacggggataatgttgatatcagtatcagcctgcagcttaccgagcgcaccctcgtcagggatgaaaacggggcgctgcatgtcagctatgcacctgagccaccattacccgagccggtgacgcgaccgactgagctgtatatcaatggcgaactggtgagcaaatgggatgaatga

SEQ ID NO: 262249 - DNA, 159 bp, Klebsiella pneumoniae
atgccgggaagcgagcccacaactaacggcgacctgagtgccgatattcgcaggcttgagcacgcgctcaccgcctgcgcgataaaggtcgaaaccatcaaagactgtcaggataaaatcgatgcagaaaatgaaaagcctgcgccaggcgcttactga

SEQ ID NO: 262250 - DNA, 426 bp, Klebsiella pneumoniae
atgaaagtgctgattattctgctggccgggctgctcgccgtggtgctgtggctgcgccacgataacgcgaatttatcccgctcctttgaaaaggcgaaccgggtcaccaatgagcaaaagacgacgattggtatgctgaaaaatcagtttgccgtatcgcagcgcatcgccaggacgaatgaagccgcgcaggtcaggctcagcgacgagctgaacgccgccggagagctggcggtaagacgtgaacaaaccataacgaggctgctgaatgaaaacgaggatttgcgccgctggtatagcgctgacttgcctgatgctgtgcgccggttgcacacccgcaccggctgcgcctccgccggtcattgtttacaacgcctgccagaaggtgagcctctgcccgatgccgggaagcgagcccacaactaa

SEQ ID NO: 262251 - DNA, 510 bp, Klebsiella pneumoniae
gtgagctcaatcattaaacgctgcagtgtggccgccgtgctggcgctggcggcactggtgcctgattttcgtctgcttaacacctcgcccgaggggctggcactgattgccgacctcgaaggatgtcgcctgacaccttaccagtgcagcgcgggagtgtggacgtcgggcatcggccacactgccggggtggtcccgaaaggggatattaccgaacagcgcgcggcggagaatctcattgccgatgtgctcaacgtcgagcaacggctcgcggtctgtgtgccggtggatatgccaccgcgcgtctatgacacgctggtcagttttgcctttaacgtgggaacgggcgctgcctgccgttcgacgctggtctcgtatataaagcgtcatcagtggtggcaggcgtgcgaccagctcacccgctgggtgtacgtgaatggtgtccgaaaccgggggctggaaaaccgacgcgatcgggagtgggcttactgcgtgaaggggatgcaatga

SEQ ID NO: 262252 - DNA, 222 bp, Klebsiella pneumoniae; identical to SEQ ID NO: 32181

SEQ ID NO: 262253 - DNA, 204 bp, Klebsiella pneumoniae
atgaaggtttatgcgatgcagggtgacacccttgatgtgatttgcgcccggtattacgggcgcactgagggcgtcgttgaaacggtgctgtgggcgaatccggggctgtcggagctgggcgttattctgccgcacggcacgacaatagaactgcccgaaaccgacagcgccccgaaaactgaaacggtgaatttatgggactga

SEQ ID NO: 262254 - DNA, 507 bp, Klebsiella pneumoniae
atgacgacagtgattattgagccaaaaaaagagccgcaggacgtgccgggcgtggtgataccgccaccgggcgtgagcgagccggtaattaaaaacaccttcttttttcctgatgttgatccgaagcgcgtgcgtgagttgatgcgtctggagcagaccgtttccccgctgcgcctgaatgatgcgattaaagccggtatggccgaaaccaatgcggagcttgccctgtggcgggctgaccagatggctgcaggtcatcagacgctggcggatgtgcctgccgatgatatcgacggtgaaagcgtgcgctgtttccactatttccgcgccgtttgcgccatgaccagtgccaccctgtttgaacgctatcgcggcatcgatgcgacggcgaaaggtgaccgcaaggcggaaagcgccgaggcggttatcgatgaactgtggcgggatatgcgctggtcggtggcgcgtattcaggacaagccgcgctgtattgtcggccaaatctga

SEQ ID NO: 262255 - DNA, 756 bp, Klebsiella pneumoniae
atgacgagtcccgcagcgcgtcacatgatgcgggtctcggcctctgaaactgcgcggcgggctgctgctccgctgcgtaatgcaactgcctatgagcagatgctcgtcaagctggccgcagactgtcgcacgttaaaacaaatccgctccaacgagcgcaaggcagacaaaaagcgcgagctgttgccgttttatctgccgtgggtgggtggtgttctcagctccggcaaaggggcgcaggatgacattgtcatgaccgtcatgctctggcgtcttgatgctgatgatatcgccggtgcgctggagatcgcccgttacgcgatgacgtatggcctgaccatgccgaccggcggccaccgccgcacaacgccgtatttactggccgaagaggtcgcactgtcagcacagcgcctgcttgatgcaaaacagcctgtcgggctgtcgctcctgctcgacaccatcactctgaccgaacgcgcagacatgcccgatatcgtgcgtgcgaagctgcacaaaatcaccggctacgtgctgcgtgatgctggcaacctgactgacgcgctggcgcacctgcagcgtgcgatccagttagagcgggctatcggtgtgaaaaaggatattgagcagcttgaacgcgcgctgaaacccaaaccagaacccgcaccaaaacagaataaaccgcgcacgcgcaaacctgtcgctaaaccggcggcacggcgcgggcgtcccccgaaagcggcaaaagccgcaggttaa

SEQ ID NO: 262256 - DNA, 1068 bp, Klebsiella pneumoniae
atgcgtaaagatacccgctttaaatttaatgcttacctgtcccgcgtggcggagctgaacggcgtcgacaccgacgatgtggcaaagaaattcaccgtcgagccgtcggtgacgcaaaccctgatgaccaccctgcaggcgtcatccgcgtttctgaccaaagtgaatatcgtgccggtcgacgagctgaaaggcgaaaaagtcggggtgggtgttaacggtacgattgcgagcaccaccgataccgccgctgatgatgagcgtaagaccgctgattttaccgcgctcgaatccaacaaatacgaatgcgcgcaaatcaacttcgatttccatattcgttacaaacagctcgacctgtgggcgcgattccaggactttcagacccgtatccgtgacgcaattatcaagcgccagtcgctcgatttcatcatggccggtttcaacggtattacccgtgcggcgacctccaaccgtaagcagaacccgctgctgcaggatgtcgcggtgggctggctgcaaaagtaccgcaatgaagctgcagcgcgcgtgatgtcaaaaatcaccgacgaagacggcaaggttatttccgatgtgatccgcgtggggaaaaacggtgactatgaaaacctcgatgcgctggtcatggatgcgaccaccaacctgattgatgagatttatcaggatgacccggagctcgtcgttatcacaggccgtaagcttatggcggataaatatttcccgctggtcaacaaggcgcaggaaaacagcgaaacgctggccgctgacatcatcatcagccagaagcggatcggcaacctgcctgccgtgcgcgtgccgtacttcccggcgaatgccctgatggtgacgcgtcttgataacctgtcgatttacttcatggatgatgcgcaccgccgcgccatcattgaagagccgaaaaaagaccgtatcgaaaactacgagtcaatgaatattgactatgtgatcgaggcttacgcagccggttgcctgattgaaaacatcaaccttggtgacttcaccgcacctgccgcaccggaaagcggggaataa

SEQ ID NO: 262257 - DNA, 855 bp, Klebsiella pneumoniae
atggcaaagaaagtttctaaatggtttcgcatcggcgtcgagggtgacacctgcgatggccgtgtcatcagcggtgatgacattcaggaaatggcggattccttcgacccgcgcgtctacggttgccgcatcaacctcgaacacctgcgcggcattctgcccgacagtgtgctcaaacgttatggcgacgtgaccgaagtgaaagcggaaatcatcagcgatgactctgccctgaatggcaaaaaggcgctgtttggcaaaatcgcaccgctggacgaactggtcagcatggtgcgcagcggtcagaaagtttacacctcgatggagatccgccctaacttcgccaacagcggcaaatgttatctcgttggcctggcggtgaccgatgacccggcaagcctcggcaccgaatacctcgaattctgcagccgtgcgacccagaacccgttggccggtaaaaaagctcaccctgacgacctgttttccgttgccacgctggctgagctggaattcgaggacgtccccgatactgtcctcaacagcctgaccgacaaggtcaaagccattttcagccgcaagcaggcgagcgatgacgggcgtctggcagatgtgcatgaggcggtcactacagtcactgagcaggtgcagaccagcctgagcaatagcgaaaaacgtttaaccgaactcgaaaccgcatttgcgcagtttaagcaggatgtgacccgccagaccgaagaaaacgcgcaggcgtttaccacgctgaaaagttccctcgataacaccgaaagccatcgccagccgcgccgcgagaagtcgaaaggcggaacgggcgacgagctgctgaccaactgctga

SEQ ID NO: 262258 - DNA, 1770 bp, Klebsiella pneumoniae
atgaccatttcgactgacctctcccttttgcatgacccgcgacgacaggcgcggctgttgttctggcagggattttccgtaccacaaatcgccgacacactgcaggtaaagcgcccgaccgtgcagagctggaaacagcgcgacgggtgggaggaaaccgccccgcttaatcgcgtggaaacgacgctcgaggcgcgcctgatccagctttatgcaaagcctgacctgacgccgcatgacttcaaggtcgctgattttctgtcacgccagatggagcgattcgcacgcatcaaccgctacggccagaccggtaatgaagtggatttaaaccccaacattgcgagccgcaataaaggggatcgcaaaaagccgaaacgcaattatttcagcgacgaggccatcgaaaagctggaagagattttcttcgatcagtcctttgagtatcagctcaactggcacaaggccggtatcgcgcaccgtattcgccacatcctcaaatcacgccagattggcgcgacgttctactttgcgcgtgagtccctcctgcgtgcgcttaagaccgggcaaaaccagatatttttgtcagccagtaagacgcaggcttacgtgttccgaaagtacatcatcgcctttgcgcgcatggtcgacgtcgacctgtcaggagacccgattgtcatcggcaacaacggcgcagagctgatttttctcgggacaaactcaaacactgcgcagagccataacggcgacctgtatgtcgatgaaatcttctggatccccaactttcagaagctgcgcaaagtcgcctcggggatggcgtcgcagtcccacctgcgcaccacctacttttcaacaccctcaacgctggcacatggcgcgtatccgttctggtcaggtgaactgtttaaccggggacgcagcaacgcgagcgagcgcgtcgacatcgatatcagccacaaagcgctcgccggtggcgtgctgtgcccggacggccagtggcggcagattgtcaccatcgaggacgcactcgccgggggatgcaccctgtttaatctggatcagctgaaacaggaaaacagcgccgacgattttcgcaacctcttcatgtgcgagtttgttgacgataaagcgtcggtattcccgttcgaggagctacagcgctgcatggtcgatgcgatggaagaatgggaggactttgcgccgttctctgaccgtccgtttaactggcgcccggtctggattggctatgacccgtcgcacaccggcgacagcgctggctgtgcggtactggctccaccactggttcccggtggcaagttccgcatccttgagcgtcaccagtggaaagggatggattttgcgacgcaggccgaggctatccgcgagctgaccgggaaatattgcgtcgagtacatcggcatcgatgcgaccggcatcggccagggggtttaccagctcgtgcgctccttcttcccggcggcgcgtgccattcgctacacgccggaaatgaaaactgcgatggtgctgaaagcgaaagacaccatccgtcgcggatgtctggaatatgacgccggtgcgaccgacatcacacagtcatttatggctatccgtaaaaccatgaccagcagcgggcgcagctccacctatgaggccagccgcagcgaagaggccagccacgcggatattgcgtgggcgaccatgcacgccctgttaaacgaaccgctttccgccggtagcggcatgcaatcaacctcaattctggatattaactaa

SEQ ID NO: 262259 - DNA, 1008 bp, Klebsiella pneumoniae
atgaaaaaacgacaaaagaaacccgccaacatgaccgccagcacaccgcaaaaaatggaggcgttcacctttggtgtgccttccccggttctggatcgccgcgacattctcgactacgtagagtgtatcaataacgggaaatggtacgagccgccggtcaacttctcggggctggcaaaaagcctgcgcgcctccgttcatcacagctcgccgatttacgtgaaacgtaacattctggcgagcacctacattccgcacccgttgctgtcacgtcaggacttcagccgcctggtgctcgattatctggtctttgccaacggctatcttgagaagcgcatgagcgtcaccggccagctcttaaaactggaaacctcaccggctaaatacacccgccggggtgtcgaagatggcgtttactggtacgtgtcgaactacacccagccgcacccgttcgcacccgattccgttttccatctgcttgagcccgatatcaatcaggagttgtacgggatgccggaatacctgagcgcacttaattctgcctggctgaatgagtccgctacgctgtttcgccgcaagtattaccagaacggcgcgcacgcggggtacatcatgtacgtcaccgacgccgcgcaaagcagtaccgacgtcgagtcgctccgcaacgcgatgcgtgactcgaaaggactcgggaatttcaaaaacttgtttttctacgcgcccaacggcaaaccggatggcatcaagattgtgccgttgagtgaagtcgccacgaaagatgattttttcaatatcaaaaaggttagtgcagaagatttgttgagtgctcatagggtaccaccacaaatgatgggaattatgcctaacaatgttggcggttttggtgatgttgtaaaagctgcacaagtgtttgtccgaaatgagttaactcctttacaggaacggttcaaagaactaaacaactggttagaaatggaagttataagatttaaaaaatattcactttga

SEQ ID NO: 262260 - DNA, 1113 bp, Klebsiella pneumoniae; identical to SEQ ID NO: 32189

SEQ ID NO: 262261 - DNA, 561 bp, Klebsiella pneumoniae
atgcttttgaattcattaagaccggctgataaatcaaaatttgaagattggacaaagttaaattttgatttcattatcaaggttgaacaaagtggctctcactttgcaattttaataaacaccggtgaaaatagtgagaactataatgttagtgatatggggtttggttattctcaggttttgccgatagttacagccatttggcttgagacagaacgtcgtgctaccacggttagaaaacctataacatttatcattgagcagccagaattgcatttacatccgtcatatcagcataatttagcaagtatttttgcaaaagtagtaactaaagcaaaagaaaataatgtagatttgaagataatttttgagacacatagccagaccatgattgaagcacttggtgaatatattgaggaaaatgaaagtctttcacaggatgatatttcaatactggtatttgaaaaagatgataagcagcagactatagttaagaaatcttattttgacgagaatggtttcctaaaaaattggccggttggctttttctcgggtaagtag

SEQ ID NO: 262262 - DNA, 597 bp, Klebsiella pneumoniae
atgactggtgtcactcgtcaggtcggtacggtcagtgccgttgatgccgacagggttcaggcccgcgttcgtctgcctgaatgcgataacctgcgcacaaactggcttaacgtgctgcagcgcaatacccaggataacaaagattactggctccctgacgtgggggagcaggttgaggtgctgctcgatgccaacggcgaggatggtgttattctgggcgcggtgtattcagacgtcgataaaccaccgttcagtgacaaaaatatccggggaacccggtttgctgatggtgcagagtacagctacaaccggaagacgcacactctgatcatccggggcggcattgagcatattgtcattgagtgtggtgctgatgtggtattgaaaacacagaaagccacgattgacgcaccggaaaccgaacttaccggagatctgcgtgtcaggggtaagctgatttacgaaggaggcatggcgggttctggtggtgaaggtgttaccgcgaccatccatggcaatatcgagattaaagggaatgcccatgccacgggcagtatgttgtctgatggcgaaaactccagccaccactcccactga

SEQ ID NO: 262263 - DNA, 885 bp, Klebsiella pneumoniae
atgtttgccgtactgggtgatattgagtttgagctgattacctactgggacggcttcgaggccacgttcggcgtcgattatgcggagcatgcccgcatcgggggtaagcctggtctgcagttcgtcggcgacaggctggacgaaatccagataactctggttttccatcagcattattgtgtacccgatgtggagctggcgagactgcgaacagccatgaaagcccatcaggcactggcgctggtcttcggcaacggtgactatcgcggctggttcgtgatcaccgatgtgactgcaaccagcgagcagactgacagtaccggcaacgtgctggctgtcagtgccaccgtgtctctccgggaatacaccggtgacccgaaaaatcctctgcaaccaccggcaatacgcacgaagctcccgggtgtcggggcggtctccggtgccataccttcaccttcaggggtggcgcagttcatccgcaacggcgtcaactatgcgaaacaggcgcagtctgtactccagaccactatcagcgccgttcgggtgacacagaaaatgaaggataaccccgttgtcgcactgacccgtgtgccggggctgatgagcggactgggtaatatctccggggctctggggaaaagtgttccggcgtttaacgcactctctgaatccatgcccgatgccatcagtctggccagaacagccagcgaagcagccacgtatgtacagcaggcacagtctgcgctgagtggtgtggacaaaagaaatattgcaggtgctctggataccgtttccgggcagcttaacgccgtcggcacagcattcaaccgcatgtctccgggattaagtgcaatggccgccagaatactgacgaggagtgtgtga

SEQ ID NO: 262264 - DNA, 2952 bp, Klebsiella pneumoniae
atgtcgggacagttttcagtcggcgttgttatcggcgggatgattggcagcacattccgttctgcaatgagcggtacccgccgtgcgcttgattccctgagcgatacctcacgccgcctgcaggaacgtcagaacgctttaacccgtgcaacagaacgttatggtcaactgggttcttcccggatgcagcatctcaacagcgagctgctgcgggtaagccgcaccatggagcaaattgagcgccagcagcgccgtctgtcagcggcatccgctaccagtgatgcgctgaaagctaaccgcatggcgctgtatggtcaggggattgaagcgtatggcatggcacagactgtttatcatacggtttcccctgccgttcagcagtccatgtcttttcaggacaaaatgattgatatgtcgatcaccgcaaaatatgacaataaaacgcgggatgcacttgccggacagataaaaggctgggcgcttaaatacaatcagtatcaggatgagctgcaggaggcggtgggttcactcatcagcgacaatattgataatgtgtcagatatcggttttctgatgccggatattgcccgcgcggcaacggcaacacgcacgtctgctcaggactgggcaaaagtggccgcagtctggcaaaactccctgaaaggtgcggccagagattttggtgccgttcagaatattatggcttatgccggtgaccaggggtcatttgaaatcccggatcaggtcaagtggatgcagtccctggccccaatgatggcgggtcttgccagtggaaaagaggctgttgctgaaatcggggccagtctccagatagcaaaaatcggtgcaggttccaccgacgaagcagccaataattttaaaaactttcttaccaaaatttttgcccgcgatactcagaaacagtttgctgatctgggtattgatttgcagggatctattgcgagttataaagctgcggggatctctccgattgaagggatgttgagtgttatagaacgttacctcaatgccaaaagccccgaagcgctggccggcttcaaatcagccatgaaaataaagaatgatacggcaagagatgaggcacttcaggctctggcgaaaaactttggtctgggcgatatgttcgcggatatgcaggtcatggcatttatccgcccgatgctggccaacatggacagatatcgagagatccgtgccggtgctctcagggctgcggataacgatttgcttgccagtgcttatgatcagcggctgaaatctccccttgaagccactaaaacacttatggtcagcagtcgcgatctggcaattacgctgggcgatcaattagctccatcttttatttctctgactcaggaactgctcccactcattcaggggacaaaacactgggtagcgactcacccgcaatttgtcagtggggcttttaagctcatcagtgcgctccttgcgattaagatagcgactattggtctcaaactggggctgaatctccttatttccccctttgtgaacgtctggaaaactactgttttactccggaccaactggcatcgactgactaccgcactcggagaaggtggcaaattacgctggcttgtcactggattcagccgactgaccagcggaggactgaaactcagcaaagttctggcgggcagcctcgttcgcggttttatgagcgctgcacgtgccgttctctggattgggcgagcgctgatgatgaatcccatcggtctcgttatcaccgctgtcgcgacagcagcttaccttatctaccgcaactggggggctgtcagtggttggtttaaacagcgctgggctgacattcaggaagcctttaacggcggcattgtgggaactggtaagttgctgattaactggtcgccggcaggcctgctctataaagcctttgcggctgcgctgaaatatttcggcgttactctgccggcaaagttcaccgacttcggtggccatcttatcgacggtttgattaacggtatcaaaagcaaatgggggtcgctcaaatccagtgtaaccggaatgggtgacagcatcagtagctggtttaaacagtgctgggctgacattcaggaagcctttaacggcggtatcgcgggaactggtaagctgctgattaactggtcgccggcaggtctgctctataaagcctttgcagctgcgctgaaatatcttggtgttgatctgccggcaaagttcaccgacttcggtggccatcttgtcgacggtctgattaacggtatcaaaaacaaatgggagtcgctcaaatccagtgtaaccggaatgggtgacagcatcagtggctggttcagcgaaaagctgggcattcattcgccgagccgcgtgtttatgggctttggtgacaatatcgcgcagggggccgccattggcctgcagcggaccactccgcttgcagctctggccgggcagcgaatggccagtgaactgctccccagaatgcccgtgagcattcaggggccagaaatacgggataacacttcaggtgttcgcttcagtatgccgttgcccgatatcaatgggtttatgtcgtctgctaaaaatgcgatcggagccgtaatcaatagtttgtcttccatgcccgttattccgctctccacccgggcatcgattttaccagggcaacgtctggcaaatgagatgacaccggatgttccccgtatcccctcgcctgaaatcctggctgccggatattcaggccgtggtgcagctgcaaccggcggtggaacgtctggtggtatccaggtcagctttaatcctcagtttttcctcaatggcagggaaaccacagcgcctgcaggactgactggtgccctgaatatgagtctgcatgagctggaaaaaatgctggagcgtctgctggctcagaaacaacgtaaggagtaccgctga

SEQ ID NO: 262265 - DNA, 336 bp, Klebsiella pneumoniae; identical to SEQ ID NO: 5798

SEQ ID NO: 262266 - DNA, 282 bp, Klebsiella pneumoniae; identical to SEQ ID NO: 5799

SEQ ID NO: 262267 - DNA, 1428 bp, Klebsiella pneumoniae; identical to SEQ ID NO: 19745

SEQ ID NO: 262268 - DNA, 252 bp, Klebsiella pneumoniae
atgaaagaataccgctattccggcccggccagcggcgtcacgctgtcggacggaaccgaaatcctgctctggccggggaagacggtttccctgccggaggagcatgactacgtgaaggtactggtggcgctgaagcatctgacgccggtaccagaagatactaaacccgccgtcacaccggctgtgcagtcaccaaagcgcagaagcagcagtgacagcgaagtgaaaacggaggacgcccatggcagctaa

SEQ ID NO: 262269 - DNA, 447 bp, Klebsiella pneumoniae
atgtactgcaccctggaggatttgcttgcgcaggtgccggagcggacgcttatcgaactcaccagtgaagagatggacttcgactcgcctgcaacagtgaatacccgtgtggtggacagctgtatccgctatgccgacgagctgattgatgcccatctgcgcggacgctatatcctgccactggcagagataccgactgttctgcgggacattgccatcacgctggtccgttaccggctctacgcccgccgcccggaaggtgacctcccggatacggtaaaggatgaccacaaagaagcgctgcggcaactcagggagttacgtgataacaggctcacgctggggctgccgtccactcagaaagatgtgcctgagcctggcgagtttcgtgtacgcagtcgcccggccactttcggcggtcgtgacggtttactggagaaatactga

SEQ ID NO: 262270 - DNA, 339 bp, Klebsiella pneumoniae; identical to SEQ ID NO: 5805

SEQ ID NO: 262271 - DNA, 954 bp, Klebsiella pneumoniae
atgtctgattacttaaaaggtaaacgtgtcgttgatccggtactgaccagtatcgcccgtggctataaaaatgccgcattcatcggcgaacgtattttccccgtcgtgctgacggacaaggaaggcgtgcgtgtaccgaccttcgggaaaaccgcctttgtggaatatgacaccgagcgtgccgtcggggcggacagcaatgttctggtccgtgaaaaaacaggcacgctggacctggtgctgggtgaacacgatctggctgcgccggtggactatcgcgagcaggcggagtccatgtttaacgaagagagcaaggccatccgtcgcgccacgaatggcgtgaacctgcgccgtgaacttatcgctgcccgtctggctcaggatgaaaaggtctaccgtaccgggcacgtcaaaaaactgacagccagtgatcgctgggccggtggtaagggggaccccatcggggtgattgaagccggtatggaagcggtccgtacggccacggggctgcgtcctaacctgatgaccatgggggccggcgtgatggcgctgctgaagttccacccggcgattcaggccgccatcggagccaacgaacgcaagcgcatcaccacagaaatcctgcaggacctctttcagatcgaagagatcgtcatcggtgccccggtctccttgccgtccatgaaagcggcaatggataagaacagcgtgccggcggatatctggggagacaatctgatgctgcactatgtcggcaaaccgcagccgggggcggacagcgcggacgagaacgagccgtccttcggctacaccctgcgtcgtaaggggatgcctgttgccgacaaatacgacggagccggtggcaaggtgaagtactgccgttataccgatatctacaaagtcgccgtggttggtggcgatgccgggtatctcattaccggtatcagtaaataa

SEQ ID NO: 262272 - DNA, 1116 bp, Klebsiella pneumoniae; identical to SEQ ID NO: 5807

SEQ ID NO: 262273 - DNA, 1497 bp, Klebsiella pneumoniae
atggcgaggggtatctgggtttcacccgatgaatttgttgctttttctgagcctcagaaatcactgaccgcgcagattgcctcccgcagccgcgcgatcgacttttacggactgggcatgtatctgcccaatcctgatcccattctcaaggctcagggacgggatatccgtatctaccgcgaactgcgcaccgacccgctggtcgggggctgtatccgcagacgtaaagcagcgctcaaatcgctggagcgtggactggagcgtggtcacgcctctgcccgggtcttccgtttcatccgcgacatgctcgacgatctggatctgtcccgcatcatcggtgaaatgagcgatgccgtgctctacgggtatcagccctgtgaaatcatgtggggccgttcggtcaggtcgtgggcagtgacggatattgtcggcaaaccgcctgagtggtttcagtttgatacggacaactgcctgcgcttccgggcgcgtgatgcgggtgtggagggtgagctgctgtcaccgtcaaaattcgtggtgccggcacaggatgcctcgtatgacaatccttacggtttcccggacctgtccatgtgcttctggccggtcgccttcaagaaaggcgggatgaaattctggctccgctttgccgaaaagtttggctccccgtgggtgatcggtaagcacccgaggggcgcaaatgatgcagagattgaaaaactgctggactccatggagcagatggtggaggacgcggtggccgccatccccgatgacagcagtattgagctcagggcagcggatggcaaggcagacagcagcgaggtatttcgcgagctgatcacactgtcacgcagtgagatctccattgcattacttggtcagaatcagaccacggaagcgaacagtaacaaggcctctgcacaggccgggctggaggtaacggctgatatccgcgatgcggatgcggacatcattcaggcggcagtgaatcaggtcatcagaacggtggtcaccctgaacttcggcgatgtgccgtgtccggtctgggccatgtgggaacaggagaccattgatgacacccgcgccacccgcgacgaaaaactcacccgggcgggtctgcgtctgaccccgcaatactttaagcgtgagtaccaactgcaggacggcgatattgacgagacatcaccgtcggaacgccagaataacatgctgccgctgtcatttgccgaggcgattgatgccgatattcaggctcagcagcagcttgacgacgcgctggacattctgatgaacggaggcgcgttaaatggcacgctggaacccgtcctggcacctctgttcaggcgggtcgaaaatggggttaacccgtctgagctgctgggcgaactggcggagctctaccctcagatgaacacggacgatctgcaggaacggctggcccgtattctctttgtggcaaatatctggggacgtctgcatgagcgtgacaacggctga

SEQ ID NO: 262274 - DNA, 651 bp, Klebsiella pneumoniae
gtgtggcatctgattaaaaagctgccgtggcgcggcattctgctggccattcttatcaatgcctttctggtcggcctgtatgccatgggatacagaagtggtcatgactctgcaaagcgtgacggtgataccgcgctcagtcagttgcagtcagcatttgacgcgtacaaaacggagcaggcaacgcttgagaatgctgcgctgcgggcctgggccagacggtatcaggagcaggtggccgccgggcagcgggctgaagccggttatcttgagcagattgctcaactggagagccggaataaacaactacaggggcaaattaacgatgtcacacagcgctggattgatgaaaaaggtaagagccatcccattgagtgcgtgtttactcgcggtttcgtgcgccagtacaacgccgcactcggatatgacaacgcatccgtcgacaccggtcattcagactcagttgccgccgctggcacccgctctggcacagcgaccgggcaacctgaaaccactgacacccggttacgcgattcgggtgtctcccagcgtgacgttctcgccaacatcatcgacaacgcaggacaatgtcgtcgctggcggaaccagataaacgcgttactggatgaacgggaaggattacagaaatga

SEQ ID NO: 262275 - DNA, 708 bp, Klebsiella pneumoniae
atgtccctgaaactggctttcgaagcctttcgggtcttcatcagaaccgaacgcctgtcagtccgcgccgggacctttctggttcatatggcatgggtattctttgtcgcaatgttgctctggtgtggcggctttttcagccaggcatgcgcagcacaacctccgcaggctgcgctgcagtatcgcgatgatgtgatccgtaatgcccggcttgaatggggactgtctgcgccggtggccgatttcgccgcgcaactgcatcaggaaagcggctggcgacctgatgcgatctcgccggctggcgctcagggactggcgcagttcatgcctgccactgccgactggataagccagttgataccgatgctgagcagtcgtgagccgtttaatccggcatgggctatccgggcgctggtcagctatgaccgctggctgtggcagcgtgtcagcgccgccagtgactgcgagcgtatggccatgacactgtcgggctataacggtggtctgggctgggtacaacgggacaggcggcttgcatcacagaaaggtctggacagcacccgctggttcggacatgtcgccacggtgaatgccggacgcaatgcggccagctggcgggagaaccgccattatccgcagcgcatcctgcgcgaactggcaccgcgatatctcacatggggaggcagcagttgtgtggcatctgattaa

SEQ ID NO: 262276 - DNA, 285 bp, Klebsiella pneumoniae
atgattacttatcacgacgcattcgcgaaagcgaaccattaccttgatgatgcagatctccctgccgtcatcactctgcatggacgttttagccagggctggtatttctgtttcgaatcacaagaatttcttgaatctggagatgaggccgcgcgtttagccggtaacgcaccttttattattgataaagacagtggtgaaattcattcccttggaacggcaaagccgctggaagaatatctacaggtttatgaaataaaaaaggctaccttcggcttgccctga

SEQ ID NO: 262277 - DNA, 441 bp, Klebsiella pneumoniae; identical to SEQ ID NO: 23185

SEQ ID NO: 262278 - DNA, 744 bp, Klebsiella pneumoniae
atgagtaactggccttatccccgcatcgtcgcccatcgtggcggcggtaaactggccccggagaacaccctggcagcaatcgacgtcggggcaaaatacggtcataagatgatcgaatttgacgcgaagttatcgaaagatggcgagatcttcctgctccatgacgacaatcttgaacgcaccagcaacggctggggcgtcgcgggcgatctgaactggcaggatttactgcgcgtggatgcaggcagttggtacagcaaagcgtttaaaggtgagccgctaccgttgctttcgcaggtggcggaacgctgtcgcgaacacgggatgatggcgaatatcgaaatcaaacccaccactggcaccgggccattaacgggcaaaatggtggcgctggcggcacgcgaactgtgggccgatatgacgccgccgctgctgtcatcgtttgagattgatgctttagaagctgcacaacaggctgcaccggaactgccgcgcggtttgttgttggatgagtggcgcgacgactggcgagaactgaccgcgcgactgggctgcgtctctattcatctcaatcataagttgcttgataaagcgcgagtgatgcagttgaaagacgccggattacggattctggtttataccgtcaataaaccccagcgcgcggcagagttgctgcgctggggcgtggattgcatctgcaccgatgcgattgacgtgattggtccgaactttacggcccaatag

SEQ ID NO: 262279 - DNA, 1071 bp, Klebsiella pneumoniae
atggcaggactgaaattacaggcagtaaccaaaagctgggatggcaaaacccaggtcattaaaccgctgacccttgatgtggcggatggcgaatttatcgtgatggtcgggccgtctggctgcgggaaatcgacgttattgcgaatggtggccggactggagcgggtaacgacgggcgatatctggatcgaccgcaagcgtgtcaccgaaatggagccgaaagatcgcgggattgcgatggtgttccagaactacgcgctctatccgcatatgagcgtagaggagaatatggcgtgggggctgaaaattcgcggcatgggcaagcaacaaattgccgaacgtgttaaagaagcggcgcgcattctggagctggacggcctgcttaagcgccgcccgcgtgagttatctggcggtcagcgtcagcgtgtggcgatggggcgtgcgattgtgcgtgagccggcagtgttcctgtttgatgagccgctctctaacctcgatgccaagttgcgtgtgcagatgcgtcttgaactgcaacagctgcaccgtcgcctgaaaacgacttcactctacgttacccacgatcaggttgaggcgatgacgctcgcccagcgagtaatggtgatgaacggcggcgttgccgaacagattggcacgccagttgaagtgtacgaaaagcccgccagcctgtttgtggcgagttttatcggcagtccggcgatgaatctgctggcagggcgtgtgaataacgaaggtacgcatttcgaactggacggcggtatcgcgctgccgctaaacggtggctaccgtcagtatgctggacgtaaaatgactctcggcattcgcccggaacatattacgctacgttcgcaggctgaaggtggcgtgccgctggtgatggacacgctggagatcctcggcgcagataacctggcgcacggacgctggggcgaacagaagctggtggtgcgactggcgcatcaggagcgcccgacggcaggcagcacgctgtggctgcatctgccggaaaatcagctgcatctttttgatggtgaaacaggacaacgagtatga

SEQ ID NO: 262280 - DNA, 888 bp, Klebsiella pneumoniae
atgtcatcatcccgtccggtgttccgctcgcgctggctgccctatttgctggtcgcgccgcagctcattatcaccgttatcttttttatctggcctgcgggcgaagcgttgtggtactcgctgcaaagcgtcgatccgtttggtttctccagccagtttgtcggcctggataacttcgtcgcgctgtttcatgacagctactatctcgactccttctggacgacgataaaattcagcacctttgtcaccgtcagcggtttgctggtgtcgctgttctttgcggcgctggtggagtacatcgtgcgcggcagccgtttctatcaaaccttaatgctgctgccttacgccgtggcacccgccgttgccgccgtattgtggatcttcctgtttaaccctggtcgcgggctgatcacccattttctcgctgagttcggctacgactggaaccacgcgcaaaacagcggtcaggcgatgtttctggtggtgtttgcctcggtgtggaagcaaattagctacaactttctgttcttctatgccgcgctgcaatccattccccgttcgtttatcgaagccgcagccatcgacggtgcaggcccgattcgccgcttctttaagattgcgctgccgcttatcgctccggtgagtttcttcctgctggtggtgaacctggtgtacgccttcttcgacaccttcccggtgatcgacgccgccacgtccggcgggccggttcaggccaccacgacgctgatttataagatttaccgcgaaggctttaccggactggatctggcttcgtctgccgcgcagtcggtggtgttgatgttcctcgtcatcgtgctgacggtggtgcagttccgctatgttgaaagcaaggtgcgttaccaatga

SEQ ID NO: 262281 - DNA, 1317 bp, Klebsiella pneumoniae
atgaaaccgttacattatacagcttcagcactggcgctcggactggcgttaatggggaatgcacaggcagtgacgaccattccgttctggcattctatggaaggggaactgggtaaagaggtggattctctggcccaacgttttaacgccgaaaacccggattacaaaattgtaccgacctataaaggcaactacgaacagaatttaagcgcggggattgccgcatttcgtaccggcaacgcgcctgctattttgcaggtttatgaagttggcaccgccaccatgatggcgtcgaaagccattaaaccggtatatgacgtgtttaaagaggcggggattcagttcgatgagtcgcagtttgtgccgacggtttcaggctactactccgacagcaaaaccggccacttactctcccagccgttcaacagctcgactcccgttctctattacaacaaagacgccttcaagaaagccggtttagacccggaacagccgccgaaaacctggcaggatctggcggactatgccgcaaaactgaaagcctccggtatgaagtgcggctacgccagcggctggcagggctggatccaactggaaaactttagcgcctggaacggtctgccgtttgccagcaaaaacaacggctttgacggcacagacgcggtgctggagttcaacaagccggagcaggtgaaacacatcgctatgctcgaagagatgaacaagaagggcgatttcagctacgtcgggcgtaaggatgaatccactgagaagttctataacggtgattgcgcgatgaccaccgcctcttccggttctctcgccaacattcgcgagtacgccaaatttaactacggcgtaggcatgatgccttacgacgccgatgcgaaagatgcgccacaaaacgccattatcggcggagccagcttgtgggtaatgcagggtaaagataaagaaacttatacgggtgtggcgaagttcctcgacttcctcgcgaagccagaaaacgctgccgagtggcatcagaaaactggttatctgccaatcaccaaagcggcgtatgacctgacccgtgagcagggtttttatgagaaaaacccaggggcggataccgcgacgcgtcagatgctgaataagccgccgttaccgttcaccaaagggctgcgtctgggcaacatgccgcagatccgcgtgattgtggatgaagagctggagagcgtgtggaccggtaagaagacaccacagcaggcgctggataccgccgttgagcgtgggaaccagttactgcgccgctttgagcagtctacgaagtcttaa

SEQ ID NO: 262282 - DNA, 747 bp, Klebsiella pneumoniae
atgcattatgccgttgttgtcatgcttgaactgctttgctgtattcacgcttaccgtaccggacaagagcggtactggatttttatcattttctgttttccggtgattggctgcgtggcgtatttcgtcatagtgatgctgcctgaaacgggcgctgaccgtcacgggcatactttgctgatgcgcctgcaggacaaactcaaccctgagcgccacctgcgcaaattaaccgaagaactggcgattgccgagaccaatcaaaaccattatgcgttggctaatgaactggcgcgtctggggcgttatcacgaagctgttccccattatcagcaggcgttaagcgggatattcgcccatgaagcggcaatgatgctaagcctggcgcaggcacagtttgctattcaggagttcgccgcctgtcagcagacgctggaagatgtgatgcgttataaccctgattttcagtcggcagacgggcatttgttatttgccagaacgttagccgcacaagaaaaatacgctgatgcggaaagcgagtttgaagtattgatttcttattaccccggcccgcaggcgcgtatttactatgcggaaatgttggcgaaaatgagtcggttacgtgaagccaacgagcagtatgttgccgtggttgatacggctaaacgctcaagacctcattatagaaaacaccaccgggaatggattaagaccgccaatgagcggctgaagcagagtgtggtgcaatga

SEQ ID NO: 262283 - DNA, 1110 bp, Klebsiella pneumoniae
atgaaacggaatgcgaaaactatcatcgcagggatgattgcactggcaatttcacacaccgctatggctgacgatattaaagtcgccgttgtcggcgcgatgtctggcccgattgcccagtggggcgatatggaatttaacggcgcgcgtcaggcgattaaagacattaatgccaaagggggaattaaaggcgataagctggttggcgtggaatatgacgacgcctgcgacccgaaacaagccgttgcggtcgccaacaaaatcgttaacgacggcattaaatacgttattggtcatctgtgttcttcctctacccagccagcgtcggatatctacgaagacgaaggtattctgatgatctcaccgggagcgaccaacccggaactgacccaacgcggttatcaacacatcatgcgtactgccgggctggactcttcccaggggccaacggcggcaaaatacattcttgagacggtgaagccccagcgcatcgccatcattcacgacaaacaacagtatggcgaagggctggcacgttcggtgcaggacgggctgaaagcggctaacgccaacgttgtcttcttcgacggtattaccgcgggtgagaaagatttctccgcgctgatcgcccgcctgaaaaaagaaaatatcgacttcgtttactacggcggttactacccggaaatggggcagatgctgcgccaggcccgttccgttggcctgaaaactcagtttatggggccggaaggtgtgggtaatgcgtcgttgtcgaatattgctggcgatgctgccgaaggcatgttggtcaccatgccaaaacgctatgaccaggacccggcaaacaaaggcatcgttgatgcgctgaaagcagacaagaaagatccatccgggccatatgtctggatcacctacgcggcggtgcaatctctggcaactgcccttgagcgtaccggcagcgatgagccgctggcgctggtgaaagatttaaaagctaacggtgcaaataccgtgattgggccgctgaactgggatgaaaaaggcgatcttaagggatttgattttggtgtcttccagtggcacgccgacggttcatccacggcagccaagtga

SEQ ID NO: 262284 - DNA, 384 bp, Klebsiella pneumoniae
atgaagctgaccatcattcgattagaaaactttagcgaccaggaccggattgacctgcaaaagatctggccggagtattccccttcctctttacaggttgacgataaccaccgtatctacgccgcgcgttttaacgagcgccttctcgcggccgtgcgggtaaccttaagcggcaccgagggggcactggattccctgcgtgttagggaagtcacccgccgtcgcggtgtggggcaatatctgctggaagaggttttgcgtaacaatcctggcgtttcatgctggtggatggcggatgcaggcgtggaagatcgcggcgtgatgacagcgtttatgcaggcactgggatttacggcacaacagggcggctgggagaagcgttaa

SEQ ID NO: 262285 - DNA, 1098 bp, Klebsiella pneumoniae
atgaagggtaaagcgttactggcaggatgtatcgcgctggcattcagcaatatggctctggcagaagatattaaagtcgcggtcgtgggcgcaatgtccggtccggtggcccagtacggtgaccaggagtttactggtgctgagcaggcggttgcggatatcaatgctaaaggtggtatcaaaggcaacaaactgcaaatcgtgaaatatgacgatgcctgtgacccgaaacaggcggttgcggtggcgaacaaagtcgttaacgacggcattaaatatgtgattggtcacctctgttcttcatcaacgcagccagcgtcagacatctatgaagatgaaggcattttaatgatcaccccagcggcaaccgcgccagagctgaccgctcgtggctatcagctgatcctgcgcactaccggcctggactccgaccaggggccgacggcggcgaaatatattcttgagaaagtgaaaccgcagcgtattgctatcgtccacgacaaacagcagtacggtgaaggtctggcgcgtgcggtgcaggacggcctgaagaaaggcaatgctaacgtggtgttctttgatggtatcaccgccggggaaaaagatttctctacgctggtggcgcgtctgaaaaaagagaatatcgacttcgtttactacggcggttatcacccggaaatggggcaaatcctgcgtcaggcacgcgcggcggggctgaaaactcagtttatggggccggaaggcgtggctaacgtctcgctgtctaacattgcgggcgaatcagcggaagggctgctggtgaccaagccgaagaactacgatcaggttccggcgaacaaacccattgttgacgcgatcaaagcgaagaaacaggacccaagcggcgcgttcgtctggaccacctacgccgcgctgcaatctttgcaggcgggtctgaatcagtctgacgatccggctgaaatcgccaaatacctgaaagcgaactccgtggatacggtgatggggccgctgacctgggatgagaaaggcgatctgaaaggctttgagttcggcgtatttgactggcacgccaacggcacggcgaccgatgcgaagtaa

SEQ ID NO: 262286 - DNA, 855 bp, Klebsiella pneumoniae
atgactgacaaaatgcaaagtttagctttagccccagttggcaacctggattcctacatccgggcagctaacgcgtggccgatgttgtcggctgacgaggagcgggcgctggctgaaaagctgcattaccatggcgatctggaagcagctaaaacgctgatcctgtctcacctgcggtttgttgttcatattgctcgtaattatgcgggctatggcctgccacaggcggatttgattcaggaaggtaacatcggcctgatgaaagcagtgcgccgttttaacccggaagtgggtgtgcgcctggtctccttcgccgtccactggatcaaagcagagatccacgaatacgttctgcgtaactggcgtatcgtcaaagttgcgaccaccaaagcgcagcgcaaactgttcttcaacctgcgtaaaaccaagcagcgtctgggctggtttaaccaggatgaagttgaaatggtggcccgtgaactgggcgtaaccagcaaagacgtacgtgagatggagtcgcgtatggcggcacaggacatgacctttgacctgtcttccgacgacgattcggatagccagccgatggctccggtgctctatctgcaggataaatcatctaactttgctgacggcatcgaagatgataactgggaagagcaggcggcaaaccgtctgaccgacgcgatgcaaggtctggacgagcgtagccaggatatcatccgcgcgcgctggctggacgaagacaacaagtccacgttgcaggagctggctgaccgttacggtgtttccgctgagcgtgtgcgccagctggaaaagaacgcgatgaaaaaacttcgcgctgccattgaagcgtaa

SEQ ID NO: 262287 - DNA, 1059 bp, Klebsiella pneumoniae
atgaataagcgcgatgcaatcaatcatattcggcagtttggcgggcgtctggatcgcttccgtaaatcggtcggcggctcaggcgacggcggtcgtaacgcgccaaaacgcgcgaaatcctcgccaaaaccggtaaatcgcaaaaccaacgttttcaacgaacaggtgcgctatgccttccacggcgcattgcaggatctgaaaagcaaaccgttcgccacgtttttaacggtgatggttatcgccatctccctgacgctgcccagcgtctgttatatggtgtacaaaaacgttaaccaggcggcgacgcaatattatccgtcaccgcaaatcactgtttatctgcaaaaaacgctggacgatgacgccgctgcgggtgtggtggcacagttgcaggccgagcaaggcgtggagaaagtgaactatctttctcgtgaagacgcgctgggcgagttccgtaactggtctggttttggtggtgcgctggatatgctggaagaaaacccgcttccggcagtggcggtggtgatcccgaaactcgattttcaggggacagaatcactgaatacgctgcgtgatcgtatcacccagatcaacggcattgacgaagtgcggatggatgacagctggtttgcccgtctggcggcgttaaccgggctggtcgggcgcgtttccgcgatgatcggcgtgttgatggtggcagcagtgtttctcgtcatcggcaacagtgtgcgtctgagcatctttgctcgccgtgactccattaacgtgcagaaactgattggtgcgacggatggtttcatcctgcgcccgttcctgtacggtggcgcactgctgggattttctggcgcattgctgtcattaattttgtcagaaattctggtactgcgtttgtcatcggcggttgcggaagtggcacaggttttcggaacaaagtttgatatcaatggcttatcgttcgatgaatgcctgctgttgctgctggtatgctcgatgattggctgggtggcagcgtggcttgccacggtacaacatttacgccactttacgcctgaataa

SEQ ID NO: 262288 - DNA, 597 bp, Klebsiella pneumoniae
atgaaaaaaccgaatcattccggcagcggccaaatccgcattattggcgggcagtggcgaggccgtaaactcccggttcctgatagcccaggtctgcgccccaccaccgaccgcgtacgcgaaacgttgtttaactggctggctccggtcattgttgacgcccaatgtctggattgcttcgccgggagcggcgcgctggggctggaagcgttatcgcgctacgctgcgggggccacgttgattgagatggatcgcgcggtttctcagcagttaattaagaatctggcgacactaaaagcaggcaatgcacgcgtggtgaacagcaacgcgatgtcattcctggcgcaaaaaggcacaccgcataatatcgtgtttgtcgatccgccgttccgccgtggcttgttagaagagacgataaatttactggaagataacggctggctggctgacgaagccctgatttatgtcgaaagcgaagtcgaaaacggtctgcccactgttccggcaaactggtcattacatcgggaaaaagtggcgggtcaggtggcttatcggctgtatcaacgcgaagcacaaggagaaagtgatgctgattaa

SEQ ID NO: 262289 - DNA, 270 bp, Klebsiella pneumoniae
atgctgattaatattggtcgtttgttaatgctctgcgtttggggatttttaatcctcaacctggtgcatcccttcccacgcccgctgaatatttttgttaacgtggcgctgatttttaccgtgctgatgcatggtatgcagctggcgctattgaaatcgaccttgccgaaagatggcccgcagatgaccaccgccgaaaaggtacggattttccttttcggcgtgtttgaactgctggtctggcagaagaaatttaaagttaaaaaataa

SEQ ID NO: 262290 - DNA, 360 bp, Klebsiella pneumoniae
atgagcaaaccacctcttttctttattgttatcattggcttaatcatcgtcgccgcatcgtttcgttttatgcaacaacgacgggaaaaagctgataatgatatggcaccgctccagcaaaagttggtggtggtgagcaacaagcgggaaaaaccgattaacgatcgccgttcgcgccagcaggaagtgactccggcaggcaccagtatgcgctatgaggcaagcttcaaaccgcaaagcggaggaatggagcagacgtttcgcctcgacgcccagcagtaccacgccctgacagtgggcgataaaggtacgctgagctataaaggaacgcgctttgtcagctttgttggcgaacaataa

SEQ ID NO: 262291 - DNA, 627 bp, Klebsiella pneumoniae
atgctttggtcgtttatcgctgtctgtctttccgcatggctatctgtggatgcatcgtatcgtgggccaacctggcaacgctgggtgtttaaaccgttaacccttcttctcctgctgttactggcctggcaagcgccgatgttcgacgccattagctatctggtgctggcggggctgtgcgcctcactgctgggcgatgcgctaaccctgttgccacgtcaacgtctgatgtacgccatcggcgcgtttttcctctcgcacctgctgtacaccatctatttcgccagtcagatgacgctctctttcttctggcctctgccactggtgttgctggttctgggggcgctgttactggcgattatctggacgcggctggaagagtaccgttggcctatctgcacgtttatcggcatgacgctggtgatggtgtggctggcaggtgaactgtggttcttccgtccgaccgctccggcgctctctgcgtttgttggcgcttcgttgctatttatcagtaactttgtctggctggggagccactatcgccgacgcttccgtgcggataacgcgattgctgcggcctgctactttgccggtcacttcctgatcgtccgctcgctgtatctctga

SEQ ID NO: 262292 - DNA, 1152 bp, Klebsiella pneumoniae
atggcgcgttctctggaactgcctgctatcgtgggtaccggtagcgtcacctctcaggtgaaaaatgacgactatctgattctggatgccgtaaataatcaggtttacgtcaatccaaccaacgaagttattgataaaatgcgcgctgttcaggagcaagtggcttctgaaaaagcagagcttgctaaactgaaagatctgccagctattacgctggacggtcaccaggtagaagtgtgcgctaacattggtacggttcgtgacgttgaaggtgcagagcgtaacggcgctgaaggcgttggtctgtatcgtactgagtttctgttcatggaccgcgacgcgctgcccactgaagaagaacagtttgctgcttacaaagcagtggctgaagcgtgtggctcgcaggcggttatcgttcgtaccatggacatcggcggcgacaaagagctgccatacatgaacttcccgaaagaagagaacccgttcctcggctggcgcgctatccgtatcgcgatggatcgtaaagagatcctgcgcgatcagctccgcgctatcctgcgtgcctcagctttcggtaaattgcgcattatgttcccgatgatcatctctgttgaagaagtacgtgcactgcgcaaagagatcgaaatctacaaacaggaactgcgcgacgaaggtaaagcgtttgacgagtcaattgaaatcggcgtaatggtggaaacaccggctgccgcaacaattgcacgtcatttagccaaagaagttgatttctttagtatcggcaccaatgatttaacgcagtacactctggcagttgaccgtggtaatgatatgatttcacacctttaccagccaatgtcaccgtccgtgctgaacttgatcaagcaagttattgatgcttctcatgctgaaggcaaatggactggcatgtgtggtgagcttgctggcgatgaacgtgctacacttctgttgctggggatgggtctggacgaattctctatgagcgccatttctatcccgcgcattaagaagattatccgtaacacgaacttcgaagatgcgaaggtgttagcagagcaggctcttgctcaaccgacaacggacgagttaatgacgctggttaacaagttcattgaagaaaaaacaatctgctaa

SEQ ID NO: 262293 - DNA, 852 bp, Klebsiella pneumoniae
atgagtagtttgttgttgtttaacgataagagcagggcattgcaggcagatatcgtcgccgtgcagtcgcaggtagtgtacggcagcgtaggcaacagcattgccgtgcctgctatcaaacagaacggcctgaatgtctttgccgtgccgacggtattgctgagcaatacaccgcattatgacactttctacggtggtgcgattccggacgaatggtttagcggctatttgcgtgcgcttcaggagcgtgatgcgttgcgccaacttcgtgctgtaaccacgggctatatgggaacggcatcgcaaatcaaaatccttgccgagtggctgactgcgctacgcaaagatcatcctgacctattgatcatggtcgatccagtgattggcgatattgatagcggaatttatgtcaaacctgaccttcccgaggcgtatcgacaatatttactgccgctggcgcagggaattacccccaatatctttgagctggaaatcctgaccggtaaaaattgccgcgatctcgacagtgccattgctgccgcaaaaagtctgctttcagacacattaaaatgggtggtgattaccagcgcctccggtaatgaagaaaatcaggagatgcaggtggtggtggtcagtgccgacagcgtgaatgtcatttcccattcacgggtaaaaaccgacctgaaagggactggcgacctgttttgtgctcagcttatcagtggtttgctgaaagggaaggcgttaaacgatgcggtgcaccgtgcggggttgcgcgtactggaagtgatgcgctacacccagcagcatgagagcgatgaattgattttgccgccgctggcggaagcataa

SEQ ID NO: 262294 - DNA, 369 bp, Klebsiella pneumoniae
atgaagaaaatcatttgtctggtcattacgctgctaatgacactccccgtttacgcgaagttaactgcccatgaagaagcccgtatcaacgccatgctggagggattagcacagaaaaaggatttgatatttgtgcgtaacggcgatgaacacacctgtgatgaagcggtttcccacctgcgtctgaagctcggcaatacccgtaaccgcattgacactgccgaacaatttattgataaggttgcttcgtcatcatcgattaccgggaagccgtatatcgtgaagatgcccggtaagagcgatgaaaatgcgcaaccttttttacatgcgctgattgcgcagacggataaaacggtgtctgcgcaataa

SEQ ID NO: 262295 - DNA, 792 bp, Klebsiella pneumoniae
atgggtaaactcacgggcaagacagcactgattacgggcgcattgcagggaattggcgaaggaattgccagaacttttgcgcgtcatggcgcaaacctaatcttgctggatatctcccctgagatcgaaaagctggcggacgaactgtgtggtcgtggtcatcgctgtacggcggttgtcgccgatgtgcgtgacccggcgtcggtcgccgcagctatcaagcgcgcgaaggaaaaagaagggcgcattgatatcctggtgaataacgcaggcgtttgtcgtctgggcagtttcctcgatatgagcgatgaagatcgcgatttccatattgatatcaatattaaaggcgtatggaacgtcacgaaggcggtgctgccggagatgattgcccgcaaagatggtcgcattgtgatgatgtcttcagtcactggcgatatggtggccgatccgggtgaaacggcgtatgccttaacgaaagcggcgattgttggcctgactaaatcgctggcggtggagtacgcgcagtctggtattcgcgttaacgccatctgcccgggatacgtacgcacgccaatggcggaaagcattgcccgccagtcgaacccggaagatccagaatcggtgctgactgaaatggcaaaagcaatcccgatgcgtcgcctcgccgatccgctggaagtcggcgaactggcagccttcctcgcatcggatgaatcaagttatttaaccggtacacagaatgtgattgatggcggcagcacactgccggagacggttagcgtcggcatctga

SEQ ID NO: 262296 - DNA, 858 bp, Klebsiella pneumoniae
atgttgtacctgacgaaaatacgcaatgcggaaagtgaatttaccgggaacgagcaaaaaattgctgactttctgcgggccaacgtgagtgagctgaaatccgtctcttcgcgcaagatggcgaaacagctcggcatcagccagtcgagtattgtgaagtttgcccagaagctcggtgcgcaaggatttactgaattgcgtatggcgttaattggcgaatacagtgctagccgggagaaaacgaatgccacggcgctgcacctgcacagttcgattaccagtgatgattcgctggaagtgattgcccgcaaattgaatcgcgaaaaagagctggcgctggagcaaacctgtgcgttgttcgactacgcgcggttgcaaaaaatcattgaggtcatcagtaaagcaccgtttatccagataacgggcctgggtgggtcggcgctggtggggcgcgatctttcattcaaactgatgaaaattggttatcgtgtggcctgtgaagctgacacgcatgtacaagccaccgtttcccaggcgctgaaaaaaggcgatgtacaaatcgctatctcttacagcggcagtaaaaaagagattgtcttgtgcgccgaggcagcacgaaagcagggggcaacggtgattgccattacctcgttaaccgattccccgctgcggcggctggcgcattacaccctcgataccgtttctggcgaaaccgaatggcgcagctcgtcgatgtccacccgcacggcgcaaaattctgttaccgatttactgtttgttggccttgtgcaactcaatgatgtggagtcattgaaaatgattgagcgcagcagtgagctaacgcaacgcctgaaatga

SEQ ID NO: 262297 - DNA, 897 bp, Klebsiella pneumoniae
atgcaacttgaaaagatgattaccgaaggctcgaacgccgcctcggctgaaattgaccgcgtatcaacgctggaaatgtgccggattatcaacgatgaagataaaaccgtaccactcgccgttgagcgcgtactgccggatatcgccgcggcgatcgatgttatccacgcccaggtaagcggcggcgggcgtctgatatatctcggtgcgggaacatccggtcgtctggggattctggatgccagcgaatgtccgcccacctacggcgttaaaccgggtctggtggttggtttgattgctggaggcgaatatgccattcagcacgcggtggaaggcgctgaagatagccgggaaggtggtgttaacgatctgaaaaacatcggcttaaccgcgcaggatgtggtggttggcattgcggccagtggtcgcacgccgtatgtaattgccggactggaatacgcacgccagctcggctgccgcacagtgggaatttcctgtaatcccgggagcgccgtttcaaccaccgctgagtttgccattacgccagttgttggggccgaagtggtcacaggttcttcgcgaatgaaagcaggtacggcgcagaaactggtgctcaatatgctctccaccgggctgatgattaaatccggcaaagtgttcggcaacctgatggtcgatgtggtcgccaccaacgaaaaattgcatgtgcgccaggtcaatatcgtcaaaaacgctaccggatgtagcgcagagcaagcggaagcggcattggttgcctgcgagcgcaactgtaaaacggccattgtgatggtgctgaaaaatctcgatgccgcagaagctaaaaaacgtcttgatcaacacggcggctttattcgtcaggttttagacaaggaataa

SEQ ID NO: 262298 - DNA, 1425 bp, Klebsiella pneumoniae
atggccaaagagatcagcagtgaacttctgaacaccattcttacccgtgtcggcggaccgggaaatatcgccagttgtggtaactgtatgacgcgcctgcgtctgggtgtacatgacagttcactggttgatcccaatatcaaaacgctggaaggcgtgaagggcgtcattttgaccagcgatcaggtgcaggtggtttttgggccgggcaaagcgcatcgtgccgcaaaagccatgagcgagctgctgggagaagcaccggtacaggatgccgcagaaatcgccgcccagaacaaacgtcagttaaaagccaaacaaacctccggcgtgcaacaatttctcgccaaattcgccaccatcttcacgccgctgatccccggttttattgccgccggtctgctgctggggatagcgacgttaattgccacggtgatgcacgttccggcagatgctcagggcacgctacccgacgcgctgaattttatgaaggtgttcagcaaaggtttgttcaccttcctggtgattctggtgggctataacgccgcccaggcatttggcggcacgggcgtaaatggcgcgattatcgccgcgctctttttgctcggttataacccaactgcaaccaccggttactacgccggttttcacgatttctttggtctgcccatcgatccgcgcggcaatattatcggcgtgttgattgccgcgtgggcctgcgcccgcatcgaaggcatggtgcgccgctttatgccggacgatctcgacatgctgttgacctcgttaatcaccctgctgatcaccgctacgctggcctacctgatcattatgccgctgggcggctggctgtttgaaggcatgtcgtggctgtttatgcacctgaacagtaatccgctcggttgtgcggttttagccgggctgttcctgatcgccgtggtgtttggcgtgcatcagggctttattcctgtttacctcgcgttaatggacagtcagggattcaacagcttatttcccatcctttcgatggcaggcgcgggccaggtgggcgcggcgctggcactctactggcgggcgcaaccgcacagtgcattacgcagtcaggtacgcggggcgattattcccggcctgctgggcgttggcgaaccgttgatttatggcgtcaccctgccccgcatgaaaccgtttattaccgcctgtttaggcggcgcggcgggcggtttgtttatcggattgatagcctggtggggtctgccgatgggcttaaacagcgcctttgggccgtctggtctggtggcgctgccgctgatgacttccgcacaaggcatccttccggcaatggcggtttatgcaggcgggattctggtggcatgggtttgcgggtttattttcaccacgctctttggctgccgtaacgtcaatctggactga

SEQ ID NO: 262299 - DNA, 1302 bp, Klebsiella pneumoniae
atgaaacggacaatgctctatctttctctgctggctgtcagctgtagcgtcagcgccgcaaaataccctgttctgacagaaagttcgccagagaaagcagggttcaacgtcgaacggcttaaccagatggatcgctggataagccagcaggtggatgccggttatcccggcgtaaacctgctgattattaaagataatcagattgtgtatcgcaaagcctggggagcggcgaaaaagtacgatggcagcgtattgatggaacagcctgtcaaagccaccaccgggacgctgtatgacctggcttccaataccaagatgtacgccactaactttgctctgcaaaagctaatgagcgaaggcaagctgcatcctgacgatcggattgcgaaatatattccgggatttgccgatagtccaaatgacaccatcaaaggcaaaaacacgctgcggatttctgacctgctgcatcacagcggcggtttcccggcggacccacaatatccgaataaagcggtcgcgggcgcgttatattcccaggataaaggccagacgctggagatgatcaagcgcacgccgctggagtatcagcccggcagcaagcatatctacagcgatgtcgattatatgctgcttggatttatcgtcgagtcggttaccggtcagccacttgaccgctatgttgaagagtcgatttatcgcccgctcggcctgacgcatacggtgtttaatccgctactgaaaggctttaaaccgcaacaaattgccgccacggaactcaacggcaatacccgcgatggcgtgatccatttcccgaatatccgcacctccactctctggggtcaggtgcacgatgaaaaagccttttattcgatgggcggcgtttccgggcatgcagggttgttttccaataccggcgatattgcggtgttaatgcaaacgatgctgaacggcggcggctatggcgatgtgcagttgttcaatgcagaaacggtgaagatgttcaccaccagctctaaggaagatgccacttttggccttggctggcgcgtgaatggtaatgccaccatgacgccgacgtttggcacgctggcaagcccgcaaacctacggtcacactggctggaccgggacggtgaccgttatcgatccggtgaatcatatggcgattgtgatgttaagcaacaagccacattcgccagttgccgatccacaaaaaaatcccaatatgttcgaaagcggtcagctaccgattgcaacttatggttgggtagttgatcaggtgtatgcggcgttaaagcagtaa

SEQ ID NO: 262300 - DNA, 576 bp, Klebsiella pneumoniae
atgaaatcgctgcgtttaatgttatgcgctatgccgttgatgctgaccggctgttccacgatgtcgtcagttaactggtctgccgctaacccgtggaactggtttgggtcgtccaccaaagtgagcgagcagggcgttggtgaattaacggcgtccacaccactgcaagaacaagccattgccgatgcgcttgatggcgattatcgcctgcgcagcggaatgaaaaccgcgaacggcaacgtggtgcgcttttttgaagtgatgaaaggcgacaacgtggcgatggtgattaacggcgatcagggtacgatcagccgcattgatgtgctggatagcgatattcctgctgacaccggtgttaaaatcggtacaccgtttagcgacctttacagcaaagcatttggcaattgccaaaaagctgatggtgatgataatcgtgccgtcgaatgtaaagccgaaggcagtcaacatattagctaccagttcagcggggaatggagtggtcctgaagggttaatgccttcggacgataccctgaaaaactggaaagtcagtaaaattatctggcggcgttaa

SEQ ID NO: 262301 - DNA, 450 bp, Klebsiella pneumoniae
atgaagagtactgagtttcatcctgtccattatgatgcgcacggtcgcctgcgtttacccttgctcttctggcttgtgctattgcttcaggcgcgaacctgggtgctgtttgtcattgctggtgcgtcgcgcgagcagggtactgcgctgctaaatctgttttatcccgatcacgataatttctggctggggttgattcccggcattccggcggtgctggcgtttttgctgagtggtcggcgggcttcatttccccgtatctggcatgtgctctattttctgttgctgttggcgcaggtggttttactttgctggcaaccgtggctgtggctgaacggtgaatccgttagcggtatcgggctggcgctggtagtggcggatattgtggcgttaatctggctgctgaccaatcgacgtttacgcgcttgttttaatgaagaaaaagaataa

SEQ ID NO: 262302 - DNA, 903 bp, Klebsiella pneumoniae
gtgatgaaacccgacgcacaccaggttaaacagttcctgctcaaccttcaggatacaatttgtcagcagctgagcgccgtcgatggcgcagagtttgtcgaagatagctggcagcgcgaagctggcggcggcggacgtagccgggtgttgcgtaatggtggtgttttcgaacaggcgggtgtcaacttttcacatgtccacggtgaggcgatgcctgcttccgccaccgctcatcgcccggaacttgccgggcgcagtttcgaggcgatgggcgtttcactggtagtgcatccgcataatccgtatgttcccaccagccacgcgaatgtgcgcttttttattgccgaaaaaccgggtgccgaacccgtctggtggtttggcggcggcttcgacttaacccctttctatggctttgaagacgatgctattcactggcaccgcaccgcccgtgacctgtgcctgccatttggcgaagacgtttatccgcgttacaaaaagtggtgcgacgaatacttctacctcaaacatcgtaacgaacaacgcggcattggcggcctgttctttgatgacctgaacacgccagacttcgaccactgttttgcctttatgcaggcggtaggcaaaggctacaccaacgcttatttaccaattgtagagcgacgtaaaacgatggcctacggcgagcgcgagcgcaatttccagttatatcgtcgcggtcgttatgtcgagttcaatctggtctgggatcgtggcacgctgtttggtttgcaaactggcgggcgcaccgagtctatcctgatgtcaatgccgccgctggtacgctgggagtacgattatcatccagaagatggcagcccggaagcggcgttgagtgagtttattaaggtcagggattgggtgtaa

SEQ ID NO: 262303 - DNA, 888 bp, Klebsiella pneumoniae
atggatcaaaaacagattgaagaaattgtacgcagcgtgatggcgtcaatgggacaagcggcccccgcgccgtcagaagcaaagtgcgccaccaccacctgtgcggcaccggtgacctcggaaagctgcgcgctggatttaggctctgcggaagcaaaagcgtggattggcgttgaaaacccgcatcgcgcagacgtattaacagaactgcgtcgcagcaccgtggcccgcgtttgtaccggtcgtgccggtccgcgtccgcgtacccaggcgttgctgcgtttcctggccgatcactctcgttcgaaagataccgtactgaaagaagtgccggaagagtgggtgaaagcgcagggcttgctggaagtccgctctgaaattagcgacaaaaatctctacctgactcgtccggatatgggccgccgcctgtgtgcagaagctgttgaagcgctgaaagcgcagtgtgttgccaatccggacgtgcaggtcgttatttctgatggcctgtcaactgatgcgatcaccgtgaactacgaagagatcctgccaccgctgatggcgggcctgaaacaggccgggctgaaagtcggtacgccattctttgttcgttatggtcgcgtgaagattgaagatcagatcggtgagatcctcggcgcgaaagtagtgatcctactggtgggggaacgcccgggattagggcagtcagaaagcctctcctgctacgccgtttactcgccgcgtatggcaaccaccgttgaggccgaccgtacctgtatctctaacattcaccagggcggcacgccgccggttgaagccgcagccgtcattgtggatttggcgaaacgtatgctggagcagaaagcatccggcatcaacatgacccgataa

SEQ ID NO: 262304 - DNA, 285 bp, Klebsiella pneumoniae
atgagtttacgcatatggattcatctggcaaataaaaacgcgggaaaagcactggtcagcgtcgggggcgggggtataatgaccattctgttattgcatagagtagttaacatgaagcggagtagaacggaagtggggcgctggcgcatgcagcgtcaggctagccgacgtaaatcgcgttggcttgaggggcaatcgcgccgaaatatgcgtatccacagcatcaggaagtgcattctaaacaaacagcgtaactcgttattgtttgcgatctacaatatctaa

SEQ ID NO: 262305 - DNA, 1254 bp, Klebsiella pneumoniae
gtgagtcactgggctacattcaaacaaacagcaactaatttatgggtgaccctacggcacgacattctcgcgctggccgtctttttaaatggattgcttatttttaaaacaatctatggtatgtcggtcaatttgctagatattttccatatcaaagcattttcagagttggatctctccttgctggcaaacgccccactctttatgctcggcgtctttcttgtcctgaactccattggcttactgttccgggcaaagctcgcatgggcaatcagtatcattttgttgttgatagcgctaatttacaccctgcatttttatccctggctgaaatttagtattggattttgcatttttacgctggtgtttttgctgatactgcgcaaagacttctcccacagtagcgccgcagccgggacaattttcgcatttattagtttcacgacgttactgttttactccacctacggtgcgctttatttaagcgaaggttttaatccgcgaatagaaagtttgatgaccgcgttctatttttcgatagaaaccatgtcaaccgtcggctatggcgatattgtccctgtttctgaatcagcacgattgttcactatttcggtcattatttccggcattaccgtttttgccacctctatgacctcaatttttggtccgcttatccgcgggggattcaacaaacttgtaaaaggaaacaatcatacaatgcatcgtaaagatcattttattgtttgcggacattcgattctcgccatcaatacgatcctgcaactgaatcaacgcggacaaaacgtaacggttatcagcaacttgcctgaagatgatatcaagcaacttgagcaacgcttaggcgataacgctgatgttatccccggtgacagtaatgacagttcagtcttgaagaaagcgggaatcgatcgttgccgggccattctggcgctgagtgataacgatgcagataacgcgtttgttgtactctcggcaaaagatatgagcagtgatgtcaaaacagttctcgccgtcagtgatagcaaaaacctgaataagattaagatggtacatccggatatcattctctcgccgcaactgtttggcagcgaaattctggcgcgagttttaaatggtgaagagattaataatgatatgctcgtttcaatgttgttgaactccggtcatggcattttcagcgataacgatgaacaagaaacgaaagctgacagtaaagaatcggcgcaaaaatag

SEQ ID NO: 262306 - DNA, 720 bp, Klebsiella pneumoniae
atgacccttgatttacctcgccgcttcccctggccgacgttactttcggtctgcattcatggtgctgttgtggcgggtctgctctatacctcggtacatcaggttattgaactacctgcgcctgcgcagccaatttctgtcacgatggttgcgcctgcggatctcgaaccgccacaagccgttcagccgccaccggagccggtggtagagccagaaccggaacctgagccgatccccgaaccgccaaaagaagcaccggtggtcattgaaaagccgaagccgaaacctaagccaaaaccgaagccggtgaaaaaggtacaggaacagccaaaacgcgatgtcaaacccgtagagtcgcgtccggcatcaccgtttgaaaatacggcgcccgcgcgcccgacatcaagtacggcgacggctgcaaccagcaagccggttaccagtgtggcttcaggaccacgcgcattaagccgtaatcagccgcagtatccggcacgagcacaggcattgcgcattgaagggcaggttaaagttaaatttgacgtcacgccggatggtcgcgtggataacgtacaaatcctctcagccaagcctgcgaatatgtttgagcgtgaggtgaaaaatgcgatgcgcagatggcgttatgagccgggtaagccaggcagtgggattgtggtgaatatcctgtttaaaattaacggcaccaccgaaattcagtaa

SEQ ID NO: 262307 - DNA, 399 bp, Klebsiella pneumoniae
atgtctacaacacataacgtccctcagggcgatcttgttttacgtactttagccatgcccgccgataccaatgccaatggtgacatctttggtggttggttaatgtcacaaatggatattggcggcgctattctggcgaaagaaattgcccacggtcgcgtagtgaccgtgcgggttgaaggaatgactttcttacgaccggttgcggtcggcgatgtggtgtgctgctatgcacgctgtgtccagaaagggacgacatcggttagcattaatattgaagtgtgggtgaaaaaagtcgcgtctgaacccattgggcaacgctataaagcgacagaagcattatttaagtatgtcgcggttgatcctgaaggaaaacctcgcgccttacctgttgagtaa

SEQ ID NO: 262308 - DNA, 540 bp, Klebsiella pneumoniae
atgaagcagtttcttgattttttaccgctggttgtctttttcgcgttttacaagatttatgacatctatgcggctactgcggcgctgatcgtcgccacggcgcttgtgcttatatatagctgggttcgctttcgtaaggttgagaagatggccctgatcacttttgttctggtggtcgtcttcggtggcttgaccctgttcttccacaatgatgagtttattaaatggaaggttactgtcatttatgccctgtttgcgggtgccctgttagtcagccaatgggtgatgaaaaagccgctaattcagcggatgctgggtaaagaactcacgctgccgcaaccggtatggtcgaagctgaatctggcctgggctgttttctttatcctttgcggtctggcaaacatctacatcgcattctggctgccgcaaaatatttgggtcaactttaaagtctttggcctgaccgcccttaccttaatcttcacattgttaagcggtatctatatctaccgccacatgccgcaggaagataaatcctaa

SEQ ID NO: 262309 - DNA, 744 bp, Klebsiella pneumoniae
atgtctatcacggcgcagtccgtataccgtgacaccggaaatttcttccgtaatcaatttatgaccattctgttggtatcgttgctatgtgcgtttatcacagtggtgttagggcatgttttctcacccagtgatgcacagcttgcgcagctcaatgacggcgtgcccgttagcggcagtagtgggttgttcgacctggttcagaatatgtcaccggaacagcaacaaattttgctgcaggcttcagcggcgtccactttttcaggattaatcggtaacgccattctcgccggaggcgtaatattaattatccagctggtgtctgcgggtcagagagtcagtacgctgcgagctattggtgccagtgcgccgatattgccaaagttatttattctgatttttctgactacccttttagtacagattggcatcatgctggtggtcgttccgggaattatcatggccattttactggccctggcaccggtgatgttggtacaggacaaaatgggcgtttttgcctcgatgcgtagcagtatgcggctgacttgggcgaatatgcgtctggtggcacccgcagtactgagctggttgctggcaaaaacactgttgctgctttttgcctcttcttttgccgcattaaccccggaaattggtgccgtacttgcgaacaccttgagcaacctgatttcagccatactgctcatctatctgttccgcctgtatatgttgattcgccaataa

SEQ ID NO: 262310 - DNA, 639 bp, Klebsiella pneumoniae
atgaaaaagttaacagtggcggctttggcagtaacaactcttctctctggcagtgcctatgcgcatgaagcaggcgaattttttatgcgtgcagggtctgcaaccgtacgtccaacagaaggtgctggtggtacgttaggaagtctgggtggattcagcgtgaccaataacacgcaactgggcctgacgtttacttatatggcgaccgataacattggtgtggaattgctggcagcgacgccgttccgccataaaatcggcacccgggcgaccggcgatattgcaaccgttcatcatctgccgccaacactgatggcgcagtggtattttggtgatgccagcagcaaattccgtccttacgttggtgcaggtattaactacaccaccttctttgataatggatttaacgatcatggcaaagaggcggggctttccgatctcagtcttaaagactcctggggagctgccgggcaggtgggggttgattatctgattaaccgtgactggttggttaacatgtcagtgtggtacatggatattgataccaccgccaattataaactgggcggtgcacagcaacacgatagcgtacgcctcgatccgtgggtgtttatgttctcagcaggatatcgtttttaa

SEQ ID NO: 262311 - DNA, 507 bp, Klebsiella pneumoniae
atgaatcgtattgaacattatcatgactggttacgtgacgcccacgcaatggaaaagcaagccgaatctatgcttgaatccatggctagtcgtatagataattatcctgaactacgcgctcgtattgaacaacatcttagtgaaaccaaaaaccagattgttcaactggaaactattcttgatcgtaatgacatttcacgttcagtcattaaagattccatgagtaaaatggctgcgcttgggcagtcaatcggtggtatattcccttctgatgaaatagtcaaaggctctattagcggatatgtcttcgagcaatttgaaatcgcctgttacacctcactattagcagcagcaaaaaatgccggtgatacagcttcaattccaaccatcgaagcgattttaaatgaggaaaaagaaatggccgactggctgattcagcatattccgcaaacaactgagaaatttttaattcgctctgaaactgatggcgtagaagcgaagaaataa

SEQ ID NO: 262312 - DNA, 501 bp, Klebsiella pneumoniae
atgaatatgaagaccattgaagatgtatttattcacctgctttcagatacctacagcgcagaaaaacaattaacccgggcactggcaaaactcgcaagagcaacatcaaacgaaaaattaagtcaggcttttcatgcgcacctcgaggaaactcatggacagattgaacgtattgatcaagttgtggaatctgaatcgaacctgaaaattaagcgcatgaaatgtgtggcaatggaaggtctcattgaagaagctaatgaggttatcgaaagcaccgagaaaaacgaagtgcgtgatgccgcactgattgccgcagcgcagaaagtcgagcactatgagatcgccagttacgggacattagcgacgctggctgaacaattaggttaccgtaaagcagcgaagcttctgaaagaaactcttgaagaagaaaaggccaccgacatcaaactgactgatctggcacttaataacgtaaataagaaagccgaaaataaagcctga

SEQ ID NO: 262313 - DNA, 180 bp, Klebsiella pneumoniae
atggccgaacatcgtggtggttcaggaaatttcgccgaagaccgtgaaaaggcatccgacgctggccgtaaaggcggtcagcatagcggcggtaattttaaaaatgatccgcaacgcgcatctgaagcgggtaaaaaaggcggtcaacaaagcggtggtaataaatcaggcaaatcctga

SEQ ID NO: 262314 - DNA, 807 bp, Klebsiella pneumoniae
atggaacgctacgaatctctgtttgcccagttgaaggagcgcaaagaaggcgcattcgttcctttcgtcacgctcggtgatccgggcattgagcagtcgctgaaaattatcgacacgctaattgaagccggtgctgacgcgctggagttaggtatccccttctccgacccactggcggatggcccgacgattcaaaacgccacactgcgtgcctttgcggcaggtgtgaccccggcacagtgctttgagatgctggcactgattcgccagaagcacccgaccattcccatcggccttttgatgtatgccaacctggtgtttaacaaaggcattgatgagttttatgcccagtgcgagaaagtcggcgtcgattcggtgctggttgccgatgtgccagtggaagagtccgcgcccttccgccaggccgcgttgcgtcataatgtcgcacctatctttatttgcccgccgaatgccgacgatgatttgctgcgccagatagcctcctacggtcgtggatacacctatttattgtcacgtgcgggcgtgaccggcgcagaaaaccgcgccgcgttacccctcaatcatctggtcacgaagctgaaagaatacaatgctgcgcctccattgcagggctttggtatttccgccccggatcaggtaaaagcagcgattgatgcaggagctgcgggcgcgatttctggttcggccatcgttaaaatcatcgagcaacatattaatgagccagagaaaatgctggcggcactgaaagcttttgtacaaccgatgaaagcggcgacgcgcagctaa

SEQ ID NO: 262315 - DNA, 1359 bp, Klebsiella pneumoniae
atgcaaaccgttttagcgaaaatcgtcgcagacaaggcgatttgggtagaaacccgcaaacagcagcaaccgctggccagttttcagaatgagattcagccgagcacgcgacatttttatgatgcgctacagggtgcacgcacggcgtttattcttgagtgcaagaaagcctcgccgtcaaaaggcgtgatccgtgatgatttcgatccggcacgcattgccgccatttataaacattacgcttcggcaatttcggtgctgactgatgagaaatattttcaggggagctttgatttcctcccaatcgtcagccaaatcgccccgcagccgattttatgtaaagacttcattatcgacccttaccagatctatctggcgcgctattaccaggccgatgcctgcttattaatgctttcagtactggatgacgaacaatatcgccaccttgccgccgtcgcccacagtctggagatgggcgtgcttaccgaagtcagtaatgaagaggaactggagcgcgccattgcattgggggcaaaggtcgttggcatcaacaaccgcgatctacgtgatttgtcgattgatctcaaccgtacccgcgagcttgcgccgaaactggggcacaacgtgacggtaatcagcgaatccggcatcaatacttacgctcaggtgcgcgagttaagccacttcgctaacggttttctgattggttcggcgttgatggcccatgacgatttgaacgccgccgtgcgccgggtgttgctgggtgagaataaagtatgtggcctgacgcgtgggcaagatgctagagccgcttatgacgcgggcgcgatttacggtgggttgatttttgttacaacgtcaccgcgttgcgtcaacgttgaacaggcgcaggaagtgatggctgcggcaccgttgcagtatgttggcgtgttccgcaatcacgatattgccgatgtggtggacaaagctaaggtgttatcgctggcggcagtgcaactgcatggtaatgaagatcagctgtatatcgatacgctgcgtgaagctctgccagcacacgttgccatctggaaagcattaagcgtcggtgaaaccctgcccgcccgcgagcttcagcacgttgataaatatgttttagacaacggccagggtggaagcggtcaacgtttcgactggtcactgttaaacggtcaatcgcttggcaacgttctgctggcggggggcttaggcgcagataactgcgtggaagcggcacaaaccggctgcgccggacttgattttaattctgctgtagagtcgcaaccgggcatcaaagacgcacgtcttttggcctcggttttccagacgctgcgcgcatattaa

SEQ ID NO: 262316 - DNA, 1596 bp, Klebsiella pneumoniae
atggctgacattctgctgctcgataatatcgactcttttacttacaacctggcagatcagttgcgcagcaatggtcataacgtggtgatttaccgcaaccatattccggcgcagaccttaattgaacgcctggcgacaatgagcaatccggtgctgatgctttctcctggccccggtgtgccaagtgaagccggttgtatgccggaactcctcacccgcctgcgcggcaagctgccaattattggcatttgcctcggtcatcaggcgattgtcgaagcttatggggggtatgtcggtcaagcgggcgaaattcttcacggtaaagcctccagcattgaacatgacggtcaggcgatgtttgccggattaacaaacccgctgccagtggcgcgttatcactcgctggttggcagtaacattccggccggtttaaccatcaacgcccattttaatggcatggtgatggcggtgcgtcacgatgcagatcgcgtttgtggattccagttccatccggaatccattcttactacccagggcgctcgcctgctggaacaaacattggcctgggcgcagcagaaactggaaccgactaacacgctgcaaccgattctggaaaaactgtatcaggcgcagacgcttagccagcaagaaagccaccagctgttttcagcggtggtgcgtggcgagctgaagccagaacagctcgcggcggcgctggtgagcatgaaaattcgcggcgagcacccgaacgaaatcgccggggcagcaactgcccttctggaaaatgctgcgccattcccgcgcccggattatctgtttgccgatatcgtcggcaccggtggtgacggcagcaacagtatcaatatttctaccgccagtgcgtttgtcgccgcggcctgtgggctgaaagtggcgaaacacggcaaccgtagtgtctccagtaaatccggttcgtcggatctgctggcggcattcggtattaatcttgatatgaacgccgataaatcgcgccaggcgctggatgagttaggcgtctgtttcctctttgcgccgaaatatcacaccggatttcgccacgcgatgccggttcgccagcaactgaaaacccgcaccctgttcaacgtgctggggccactgattaacccggcgcatcctccgctggcgttaattggtgtttatagtccggaactggtgctaccgattgccgaaaccttgcgcgtgctggggtatcaacgcgcggcagtggtgcacagcggcgggatggatgaagtttcattacacgcgccgacaatcgttgccgaactgcatgacggcgaaattaagagctatcaattgaccgctgaagattttggcctgaccccctaccaccaggagcaactggcaggtggaacaccggaagaaaaccgtgacattttaacacgcttgttacaaggtaaaggcgacgccgcccatgaagcagccgtcgcggcgaatgtcgccatgttaatgcgcctgcatggccatgaagatctgcaagccaatgcgcaaactgttcttgaggtactgcgcagtggttccgcttacgacagagtcaccgcactggcggcacgagggtaa

SEQ ID NO: 262317 - DNA, 1563 bp, Klebsiella pneumoniae
atgcaaacacaaaaaccgactctcgaactgctaacctgcgaaggcacttatcgcgacaacccgactgcgctttttcaccagttgtgtgggaatcgtccagcaacgctgctgctggaatccgcagatatcgacagcaaagatgatttaaaaagcctgctgctgatagacagtgcgctgcgcattacagcattaggtgacactgtcacaattcaggcactttccggcaatggcgaagccctgctggcactactggataacgccctgcctgcgggtgtggaaagtgaacaatcaccaaactgccgtgtgctgcgcttcccccctgtcagtccactgctggatgaagacgcccgcttatgctccctttctgtttttgacgctttccgtttattgcagaatctgttgaatgtaccgaaggaagaacgagaagccatgttcttcggcggcctgttctcttatgaccttgtggcgggatttgaagatttaccgcaactggcagcggaaaataactgtcctgatttctgcttttatctcgcagaaacgctgatggtgattgaccatcagaaaaaaagcacccgcattcaggccagcctgtttgctccgaatgaagaagaaaaacaacgtctcactgctcgcctgaacgatcttcgccagcagctgaccgaagccgcgccaccgctgccggtggtttccgtgccgcatatgcgttgtgaatgtaatcagagcgatgaagagttcggtggcgtagtgcgtttgttgcaaaaagcgattcgcgctggagaaattttccaggtggtgccatctcgccgtttctctctgccctgcccgtcaccgctggcggcctattacgtgctgaaaaagagtaatcccagcccgtacatgttttttatgcaggataatgatttcaccctgtttggcgcgtcgccggaaagttcgctcaagtatgacgccaccagccgccagattgagatctacccgattgccggaacacgcccgcgcggtcgtcgcgccgatggctcgctggacagagacctcgacagccgcatcgaactggaaatgcgtaccgatcataaagagctttctgaacatctgatgctggtggatctcgcccgtaatgatctggcacgcatttgcacccccggcagccgctacgtcgccgatctcaccaaagttgaccgttactcttacgtgatgcacctggtctcccgcgtggtcggtgagctgcgccacgatctcgacgccctgcacgcttaccgcgcctgtatgaatatggggacgttaagcggtgcgccgaaagtacgcgctatgcagttaattgccgaggcggaaggtcgtcgccgcggcagctacggcggcgcggtaggttatttcaccgcgcatggcgatctcgacacctgcattgtgatccgctcggcgctggtggaaaacggtatcgccaccgtgcaagccggtgctggcgtggtacttgattctgttccgcagtcggaagccgacgaaacccgtaataaagcccgcgctgtactgcgcgctattgccaccgcgcatcatgcacaggagacgttctga

SEQ ID NO: 262318 - DNA, 882 bp, Klebsiella pneumoniae
ttgagcgacacgaattacgcagtgatttacgacctgcacagccataccacagcttccgatggctgcctgacgccagaagcattggtgcaccgtgcagtcgagatgcgcgtcggcaccctggcgatcaccgaccatgacaccacagctgcaatctcaccagcaagagaggaaatttcacgttcgggactggcgctgaatcttattcccggcgtggaaatttccacggtctgggaaaatcatgaaattcatattgtcgggctgaatattgatattactcatccgctaatgtgtgagttcctcgcgcagcagacagaacggcgcaatcagcgggcgcagctgattgctgaaagacttgaaaaagcgcaaatacctggggcgctggaaggcgcgcaacgactggcgcagggcggtgcggtgacgcgcggtcattttgcgcgtttccttgtggagtgcggcaaagccagttcaatggcggatgtctttaaaaaatatctggcgcgcgggaaaaccggatacgttccgccacagtggtgtacaatagaacaagctattgatgtcattcatcattctggcggtaaggcggtgctagctcatcctgggcggtacaatcttagtgctaaatggctgaaaagattggttgcgcattttgccgaacaccacggcgacgcgatggaagtcgcgcagtgccagcaatcgcccaatgaacgcacccagctggccacacttgcgcgtcagcatcatttatgggcatcacaaggatctgattttcatcagccgtgcccgtggattgaactgggtcgtaaactctggctgcctgcaggcgttgaaggcgtctggcagctatgggaacagccgcagaacaccacagagagggaattatga

SEQ ID NO: 262319 - DNA, 1896 bp, Klebsiella pneumoniae
atggcagggaagtttcgctgcattttgctgttgatagcagggctgtttgtatcatctctaagttatgcagaaaacacggagatcccttcttatgaagaagggatctcgctctttgatgttgaagccaccctgcaactggatggggtgctcgacatcaaagagaacattcattttcaggcgcgaaatcagcagattaagcacggattttatcgtgatttaccacgactatggatgcagcctgatggtgacgctgcactgctgaactatcatattgttggcgtcacccgtgatggtgttcctgaaccctggcatcttgactggcatatcggtttaatgagtattgtcgtgggcgataaacaacgtttcttgcctcaaggtgactatcattatcaaattcattatcaggttaaaaatgctttcctgcgtgagggagattctgatctgttaatctggaacgtgaccggtaacaagtggccgtttgaaatttataagacccgattttctctccagatctctaatattgcgggtaatccatttagcgaaattgatctctttaccggagaagagggcgacacatatcgaaatggccgcatccttgaggacggaagaattgaatcccgcgatccgttttatcgtgaagacttcacggtcctctatcgctggcctcacgctttacttagcaatgccccggctctacaaacgacgaatattttcagccatcttcttttaccctccacgtcatcgttgttaatttggtttccgtgtctgctcatggtttgtggatggttatatctctggaagcgcaggccgcaatttacgccggtagatgtgattgaaaccgatgtcattccgccagattacacgcccggcatgttacgtctcgatgcgaagctggtttacgacgataaaggtttttgtgccgatatcgtaaatctgattgtgaaaggcaaaattcatctggaagatcagtatgacaagaaccagcaaatcctgattcgtgttaatgaaggcgcgaccagaaataatgcggtattactgcccgcagagcagttattactggaagcgttatttcgtaaaggcgataaggtcgttcttacggggagacgcaacagagtgttacgcagggcatttttacggatgcagaaattttatctgccgcgtaaaaagtcttcgttttaccgacctgatgcgtttttgcaatggggcggaatggcaatattggcggtcattctctacggtaacctgagtcccgtaggctgggcaggaatgagtctggtgggcgatatgtttattatgatctgctggcttcttccttttttattttgttcccttgagcttttgtttgcccgcgatgatgacaagccttgcgttaatcgtgtaatcatcactttgtttttaccactgatttgttcaggtgtggccttctattctctctatatcaatgtcggagatgtattcttttactggtatatgccagcgggttattttagcgctgttgtcctgaccggttatctcactggcatggggtatatttttctgccaaagtttacccaaactgggcagcaacgttatgcccacggtgaagctatcgttaactatcttgcgcgtaaagaggcggcaacacacagtgggcggcggcggaaaggggaaacacggaaactggattacgcgttgttaggttgggcggtctcggcaaaccttggtagagaatgggcagaacgtatcaccccatcactcacagcggctgttagcgccccggaaattgcccgtagtggcgttttattctcattgcagacgcacctgagttgcggggcctataccagtttgttggggcgaagctattccggtggtggtgctggcggcggtgcgggtggcggaggcggtggtggttggtaa

SEQ ID NO: 262320 - DNA, 123 bp, Klebsiella pneumoniae
atgtatcgtgatttatattcggcgataatgtgcaggcctctgctcagcgcggagaggcagggcgaaaatgaggaagaaaaggttcgccctggtcagcgtccgctgctgacccgggcagaatag

SEQ ID NO: 262321 - DNA, 915 bp, Klebsiella pneumoniae; identical to SEQ ID NO: 9808

SEQ ID NO: 262322 - DNA, 483 bp, Klebsiella pneumoniae; identical to SEQ ID NO: 9809

SEQ ID NO: 262323 - DNA, 1353 bp, Klebsiella pneumoniae; identical to SEQ ID NO: 9810

SEQ ID NO: 262324 - DNA, 3525 bp, Klebsiella pneumoniae; identical to SEQ ID NO: 9811

SEQ ID NO: 262325 - DNA, 1413 bp, Klebsiella pneumoniae; identical to SEQ ID NO: 9812

SEQ ID NO: 262326 - DNA, 744 bp, Klebsiella pneumoniae
atgagcaggttgcgcgttttccggcagacaggatggtttatcgcgggcctgatgacgggcttacccgccactgccgcgcccgcagaaacatcgtcaatggccggtgtggcggtcgccgtcgccaccacgaccccgccggatgcgacagccacgtcacaggccatgcagtcctgtcggcgggagtccgcggcgctggagcggcttgactgctatgaccgcctgctggcaccgctgtccccgtcagggtttgacggggcgctggtcaaagccggttttgtgggcgaggcctggacccgcgccacagagctggaaaaacgccgcgagggcaacaccacagaactgctggtgacgcaggtgccgggggagcgcccgacggtggtgataaccaccccggctatcggccatgttccgccgcgcccggtgctgatgttcagttgcgtggacaatatcacccggatgcaggtggcgctgatgcaccctctggatgtccatgatatcgccgtcactctgaatgccgacagccgggcattgcgtagccactggtttgtgcgcgagaacggcaccctgctggagtccagccgggggctgtccgggattgatgaaattaagcaactgttcggcgcaaaaacgctgacagtggataccggcgcagataacgccgcaggaaagctgacctttaacattgacgggctggcaagggcgattgcccccctgcgcgttgcctgccactgggcgggagaataa

SEQ ID NO: 262327 - DNA, 2832 bp, Klebsiella pneumoniae
atgatccagattgatcttcccacgctggtaaaacggctgaacctgttctcccgccaggcgctggagatggccgcctctgaatgtatgagtcagcaggcagcggaaattaccgtcagccatgtgcttattcagatgctcgccatgccacgcagcgacctgcgggttattacccgccagggcgatattggcatggaagagttgcgccaggcgctgacggtggagaactacacaactgcccgttctgcggacagctacccggcattttccccgatgctggttgagtggctgaaagagggctggctgctggcgtcggctgagatgcagcacagcgaattgcgtggcggcgtgttgctgctggccctgctgcattcgccgctgcgttatataccgcctgctgccgcccggttgttgaccggcattaaccgtgaccgtctgcaacaggactttgtacagtggacacaggagtcggcggaatcagtcgtgccggatgcagacggtaaagtcgcaggcacactgacggacgctgctgacaccctgcttgcccgctacgccaaaaacatgaccgcagacgcccgtaacggcaggcttgacccggtactgtgccgcgaccacgaaatcgacctgatgatcgacattctctgccgccgccgcaagaacaacccggtggtggtgggcgaagcaggcgtgggtaaaagtgccttaatcgaagggctggcgctgcgcatcgtggcaggccaggtgccggacaaactgaaaaacaccgatatcatgacccttgacctaggcgcattgcaggccggggcgtcggtgaagggcgaattcgaaaaacgcttcaaggggctgatggcggaggtcatttcctctccggtgccggtcattctgtttattgacgaagcacataccctgattggcgcgggcaaccagcagggcgggctggatatctccaacctgctcaaaccggcgctggcgcgcggcgaactgaaaaccatcgccgccaccacctggagcgaatacaaaaaatacttcgagaaagatgccgccctgtcgcgccgcttccagctggtgaaggtcagcgaacccaacgccgccgaagccaccattattctgcgtggtctgtcggcggtctatgaacagtctcacggcgtgctgattgatgatgacgccttgcaggccgcagcaacgctgagcgaacgttatctctccgggcgtcagttgccggacaaagccattgatgtgctggataccgcctgcgcccgcgtcgccattaacctttcctcgccgccgaagcaaatctcggcgctgaccactctgagccaccagcaggaggcggaaattcgccagcttgagcgcgagcttcgcatcgggctgcgtaccaacacctcacggatgaccgaggtgctggtgcagtacgatgaaacgctgacggcgctggatgaactggaagcggcctggcatcagcagcaggcgctggtccgggagattatcgcgctgcgccagcagttgctgggcgtggcagaagacgatgcggcgtcgttgccggacgcagatgccgcggaggatacgccgccagagtcagagtcagagtcagagtcagagtcagagtcagagtcagagtcagagtcagagtcagagtcagagtcagagtcagaacaggataataccggtgccgtaccggctgatgaggccgacagagaacagccggaagagaccgctgaaacagtttccccggtacagcggctggcccagctcactgccgaactggacgccctgcataacgaccggttgctggtctccccgcacgtcgataaaaaacagattgcggcggtgattgccgaatggaccggcgtgccgctcaaccgcctgtcgcagaatgaaatgtcggtcatcaccgacctgccgaaattgctgggcgacaccatcaaaggccaagacctggcgattgccagcctgcataagcatctactgaccgcacgcgccgacctgcgtcttccgggacgcccgctcggtgcgttcctgctggctggccccagcggtgtgggtaaaaccgaaaccgtcctgcaactggcagagctgctctacggcggtcgccagtacctgaccaccatcaatatgtccgaattccaggagaaacacaccgtctcgcggctgattggttcgcctccgggctacgttggctacggtgaaggcggcgtactgaccgaagcgattcgccagaaaccctactcggtagtactgcttgatgaagtggaaaaagcgcacccggatgtgctcaacctgttctaccagtcgttcgataagggcgaaatggcagacggtgaaggccgcctgattgactgcaaaaatatcgtcttcttcctgacgtccaacctcggctaccaggtaatagtcgagcacgccgatgacccggaaaccatgcaggaagaactgtatccggtgctggccgacttcttcaaacctgccctgctggcgcgtatggaagtggtgccgtatctgccgctgtcgaaagagacgctcgccaccattatcgccggaaaactggcccgtctggataacgtgctgcgcagtcgctttggtgcagaagtggtcattgaaccggaagtgacggacgaaatcatgagccgcgtcacccgcgcggaaaacggcgcgaggatgctggaatcggtcatcgatggcgacatgctaccgccgctctcgctgctgctgttgcagaaaatggcggctaacacggcgattgcccggattcggttgtcggcggtggacgacgcatttacggcagacatggaagatgctcagaacgacgagtccgtcacaaaggatgaaacggttttatga

SEQ ID NO: 262328 - DNA, 762 bp, Klebsiella pneumoniae; identical to SEQ ID NO: 9813

SEQ ID NO: 262329 - DNA, 1332 bp, Klebsiella pneumoniae; identical to SEQ ID NO: 9814

SEQ ID NO: 262330 - DNA, 525 bp, Klebsiella pneumoniae; identical to SEQ ID NO: 9815

SEQ ID NO: 262331 - DNA, 1281 bp, Klebsiella pneumoniae; identical to SEQ ID NO: 9816

SEQ ID NO: 262332 - DNA, 1083 bp, Klebsiella pneumoniae; identical to SEQ ID NO: 9817

SEQ ID NO: 262333 - DNA, 1851 bp, Klebsiella pneumoniae; identical to SEQ ID NO: 9818

SEQ ID NO: 262334 - DNA, 414 bp, Klebsiella pneumoniae; identical to SEQ ID NO: 9819

SEQ ID NO: 262335 - DNA, 1476 bp, Klebsiella pneumoniae; identical to SEQ ID NO: 9820

SEQ ID NO: 262336 - DNA, 225 bp, Klebsiella pneumoniae; identical to SEQ ID NO: 9821

SEQ ID NO: 262337 - DNA, 501 bp, Klebsiella pneumoniae; identical to SEQ ID NO: 9822

SEQ ID NO: 262338 - DNA, 519 bp, Klebsiella pneumoniae; identical to SEQ ID NO: 9823

SEQ ID NO: 262339 - DNA, 2199 bp, Klebsiella pneumoniae
atgtcagaattaaaaattgccgttagtcgttcttgcccggattgtttttcaactcatcgcacatgcgtgaatattgacgaaagtaattatattgacgttgccgccattattttatcggtcaatgatgtggaacgtggaaaactcgatgaaatagacgctactggctatggcattcctgtttttattgcaacggaaaatgaagaacgtgtacccgcagaatatctgccacgtatttctggtgtcttcgaacattgcgaatcacgtaaagagttttatggacgtcagttagaaaccgctgcaagccattatgaaacgcaactgcgcccgcccttcttccgcgcactggtcgattatgttaatcagggcaatagtgcttttgactgccctggtcatcaggggggtgagtttttccgtcgccatccggcaggcaatcagttcgtggaatactttggtgaggcgctgttccgtgctgacttgtgcaacgccgacgtagcgatgggcgatctgctgattcacgaaggcgcgccatgcattgcacagcaacatgcggctaaagtctttaatgccgataaaacctatttcgttttaaacggtacttcatcttctaataaagtggtcttaaacgcattgctgacgccgggcgatctggtgttgtttgaccgcaataaccataaatctaaccaccacggtgcgttgctacaggctggcgcgacaccggtttatctggaaaccgcacgtaacccgtatggttttatcggtggtattgacgctcactgttttgaagaaagttacctgcgtgagctgattatagaagttgcaccgcagcgggcaaaagaggctcgtcctttccgcctcgccgttattcagctaggcacttacgacggtacgatttataacgcccgtcaggtggtggataaaattggtcatctgtgtgactacatcctctttgactccgcatgggtcggctatgagcagtttatcccgatgatggcggactgttcaccactgttgctggatcttaatgagaacggtccgggtattctggttacgcaatccgtacataaacagcaggctggtttttctcaaacttcacaaatccataaaaaagacaaccacatcaaagggcaacagcgttatgtaccgcacaaacgcatgaacaacgcctttatgatgcacgcctccaccagcccgttctatccgctgtttgccgcactggatatcaacgccaaaatgcatgaaggtgtcagcggtcgtaatatgtggatggattgtgtggtaaatggcattaatgcccgcaaactgatcctcgataactgtcagcatattcgtccgttcgtacctgaactggtggatggtaaaccctggcagtcgtatgaaacagcgcaaattgcggttgatctgcgcttcttccagtttgtaccaggggaacactggcattcttttgaaggctatgcagagaatcaatactttgttgatccgtgcaaactgttgctgacaaccccaggtattgatgcacgtaacggcgaatatgaagcgttcggtgtacccgcgacgattcttgctaatttcctgcgcgaaaatggcgtagtgccggaaaaatgcgatcttaactccatcctcttcctgctgactccagcagaagatatggccaaacttcagcaacttgttgccctgctggtacgcttcgaaaaactgctggaatctgatgcgccgctggcggaagtgctaccttccatctacaaacagcatgaagagcgctacgccggttatacgcttcgtcagttgtgccaggaaatgcatgatttgtatgcccgccacaacgtgaaacaactgcaaaaagagatgttccgtaaggaacacttcccacgcgtcagcatgaatccgcaagaagctaactacgcctatttacgcggtgaagtggagctggttcgtctgccggatgcagaaggccgtatcgctgcagaaggtgcgcttccttatcctccgggtgtgctgtgtgttgttccgggtgaaatctggggtggtgctgttttgcgttacttcagcgctctggaagaagggatcaacctgctgccaggttttgcaccggagctgcagggtgtctatatcgaagaacatgatggtcgtaagcaagtttggtgctatgtcatcaagcctcgtgatgcgcaaagcaccctgttgaaaggggaaaaattatga

SEQ ID NO: 262340 - DNA, 546 bp, Klebsiella pneumoniae; identical to SEQ ID NO: 26982

SEQ ID NO: 262341 - DNA, 765 bp, Klebsiella pneumoniae
atgaaattgaatatccgcgcgcaaactgcacaaaaccagcacaataattctcccatcgttcttgtccatggtctgtttggcagcctcgacaaccttggcgtactagctcgcgatctggtaaacgatcacaatatcatccaggttgatatgcgtaaccacggtctttcaccgagagatccggtaatgaattacccggcgatggcgcaggatcttgttgataccctggatgcactgcagatcgataaagcaacatttatcggtcactccatgggcggtaaagcggtaatggcacttactgcactggcccccgatcgcatcgataaactggtggcgattgacatcgcgccggtcgactatcacgtacgccgtcatgatgagattttcgcggctatcaacgcagtcagtgaatcggacgcacaaactcgccagcaagcagcagcaataatgcgccagcatcttaatgaagaaggggtgattcagtttctgttgaaatcttttgttgacggggagtggcgctttaacgtgccggtattgtgggaacagtatccgcatattgtgggttgggagaaaatcccggcatgggatcaccctgccctgtttatcccaggcggcaattctccgtatgttagcgagcagtatcgtgatgatttactggcgcaatttccacaggcgcgggcgcatgtgattgctggcgcgggtcactgggtccatgctgaaaaaccggatgcggtattacgcgctatccgtcgctatctcaatgattaa

SEQ ID NO: 262342 - DNA, 327 bp, Klebsiella pneumoniae
atgaaaaaactgattctcatcgccatgatggcatcggggctggtggcttgtgcgcaatcaaccgcgccacaggaagacagccgtctgaaagaggcatacagcgcctgtatcaacaccgcacaaggttcgccagaaaaaattgaagcctgccagagcgtgttaaacgtgctgaagaaagagaaacaacatcagcagtttgccgaccaggaaagtgtacgcgtactggattatcagcagtgtctgcgtgcaacgcaaaccggaaatgatcaggcggtgaaagccgattgtgataaagtttggcaggaaattcgcagtaataacaaataa

SEQ ID NO: 262343 - DNA, 1149 bp, Klebsiella pneumoniae
atgtatgcattaacccagggccggatctttaccggccacgaatttcttgatgaccacgcggttgttatcgctgatggcctgattaaaagcgtctgtccggtagcggaactgccgccagagatcgaacaacgttcactgaacggggccattctctcccccggttttatcgatgtgcagttaaacggctgcggcggcgtgcagtttaacgatactgctgaagcggtcagcgtggaaacgctggaaatcatgcagaaagccaatgagaaatcaggctgtactaactatttgccgacgcttatcactaccagcgacgagctgatgaaacagggcgtgcgcgttatgcgcgagtacctggcaaaacatccgaatcaggcgttaggtctgcatctggaaggtccgtggctgaatctggtaaaaaaaggcacccataatccgaattttgtgcgtaagcctgatgccgcgctggtcgatttcctgtgcgaaaatgccgatgtcattaccaaagtgaccctggcaccggaaatggttcctgcagaagtcatcagcaaactggcaaatgccgggattgtggtttctgccggtcactccaacgcgacgttgaaagaagcaaaagccggtttccgcgcggggattacctttgccactcatctgtacaacgcgatgccgtatattaccggtcgtgaaccgggcctggcgggcgcgatcctcgacgaagctgacatttattgcggtattattgctgacggcctgcatgttgattacgccaacattcgtaacgctaaacgtctgaaaggcgacaaactgtgtctggttaccgacgccaccgcgccagcaggtgccaacattgaacagttcatttttgcgggtaaaacaatatactaccgtaacggactttgtgtggatgagaacggtacgttaagcggttcatccttaaccatgattgaaggcgtgcgtaatctggtcgaacattgcggtatcgcactggatgaagtgctacgtatggcgacgctctatccggcgcgtgcgattggcgttgagaaacgtctcggcacactcgccgcaggtaaagtagccaacctgactgcattcacacctgattttaaaatcaccaggaccatcgttaacggtaacgaggtcgtaactcaataa

SEQ ID NO: 262344 - DNA, 1221 bp, Klebsiella pneumoniae
atgacaccaggcggacaagctcagataggtaatgttgatctcgtaaaacagcttaacagcgcggcggtttatcgcctgattgaccagtacgggccaatctcgcggattcagattgccgagcaaagccagcttgcccccgccagcgtaaccaaaattacgcgtcagcttatcgaacgcgggctgattaaagaagttgatcagcaggcctccaccgggggccgccgcgctatctccatcgtcaccgaaacccgcaatttccacgcaatcggcgtacggcttggtcgtcacgacgccaccatcactctgtttgatctcagtagcaaagtgctggcagaagaacattacccgctgccggaacgtacccagcagacgctggaacatgccctgctgaatgccattgctcagtttattgatagctaccagcgcaagctgcgcgagctgatcgccatttccgtgatcctgccagggcttgttgacccggacagcggcaaaattcattacatgccgcatattcaggtagaaaactgggggctggtagaagcactggaagaacgttttaaagtgacctgtttcgtcggtcacgatatccgtagtctggcgctggcggagcactacttcggtgcaagtcaggattgcgaagactccattctggtgcgtgtacatcgcggaaccggggccgggattatctctaacgggcgcatttttattggccgcaacggtaacgtcggtgaaattggccatattcaggtcgaaccgctgggtgaacgctgccactgcggcaactttggctgcctggaaactatcgctgccaacgccgctattgaacaacgggtgttgaatctgttaaagcagggctaccagagccgcgtgccgctggacgactgcaccataaaaactatctgcaaagctgcgaacaaaggcgatagcctggcgtcggaagtgattgagtatgtcggtcgtcatctgggcaaaaccatcgccattgccatcaacctgtttaacccgcaaaaaattgttattgccggagaaatcaccgaagccgataaagtgctgctccctgctattgaaagctgcattaatacccaggcgctgaaggcgtttcgcactaatctgccggtggtacgttctgagctggatcaccgctcggcaatcggcgcttttgcgctggtaaaacgcgccatgctcaacggtattttgctccagcatttgctggaaaattaa

SEQ ID NO: 262345 - DNA, 1611 bp, Klebsiella pneumoniae
atgatgagcaatgttaagaaaaaagatgtgccgctgataagcatcagcctggtggccattcttttcatcgcagctgcattaagccttttcccacaacaatcggccgacgcggccaacgcaatatacacttttgttacgcgtacgttaggttccgccgtacaggtattggttttgctggcaatgggactggtgatttatttagccaccagtaaatacggcaatattcgtcttggagaaggaaaaccggaatacagcacgctctcctggctgtttatgtttatttgtgccggtttaggttcttctacgctttattggggggttgctgaatgggcctattattatcaaacacctggattaaatatcgcaccgcgttcacaacaggcactcgaatttagcgtcccttactccttcttccactggggcatcagcgcctgggcaacttatacgctggcctcattaatcatggcttatcactttcatgtgcggaaaaacaaaggtctgagcctttccggcattattgccgcgattaccggcgttcgcccgcaaggcccgtggggaaaactggtcgatttgatgttcctgatcgccactgtcggtgcgctgaccatttcccttgttgttaccgcagcaacctttactcgtgggctttccgcgctgaccggtttacccgataacttcaccgtgcaggcatttgtgatcctgctttccggcggcattttttgcctaagctcgtggattggtatcaacaacggtttgcaacgtctgagcaaaatggttggctggggcgcgttcctgctgccattactggtgctgattgtcggtccaaccgaatttattaccaacagcatcatcaatgccatcggcctgaccacgcaaaacttcctgcaaatgagcttattcaccgatccgcttggcgatggttcatttacccgcaactggaccgttttctactggctgtggtggatttcatacacccctggcgtagcaatgtttgtcacacgcgtttcacgcggtcgtaagattaaagaagttatctggggactgatcctcggcagcaccgtcggttgctggttcttcttcggcgtaatggaaagctatgccattcaccagtttatcaatggcgtaatcaacgtcccacaggtgctggaaacactgggcggcgagacagctgtgcagcaagttctgatgtcgttgccagccggtaaattgttcctcgccgcatacctgggcgtgatgattattttccttgcctcgcatatggatgcggtggcctacaccatggcggcgaccagtacgcgaaatcttaaggaaggtgacgaccctgaccgtgctcttcgcctgttctggtgcgtggttatcaccctgattccactgtctatcttatttactggcgcgtcgctggaaaccatgaaaaccactgtggtacttacagccctgcccttcctcgttattttactggtgaaagtcggtggctttattcgctggctgaaacaggattacgccgacattccggctcatcaagttgaacattatctcccgcagacaccggttgaagccccggaaaaaacgccagtgctccctgcgggaaccgtattcaaaggcgacaactga

SEQ ID NO: 262346 - DNA, 1125 bp, Klebsiella pneumoniae
atgagcaatctgagccctgactttgtactacccgaaaatttttgcgctaacccgcaagaggcgtggaccattcctgcccgtttttataccgatcagaacgcctttgaacacgaaaaagagaacgtcttcgccaaaagctggatttgcgtcgctcacagcagcgaactggcgaatgccaatgattatgtgacgcgtgagatcattggcgaaagcatcgtgctggtacgtggtcgtgataaggttttgcgcgcgttctataacgtttgcccgcaccgtggtcatcagttattgagcggcgaagggaaagcgaaaaatgtgattacctgcccgtatcacgcctgggcattcaaactcgatggtaatctggcccatgcgcgtaactgcgaaaacgtcgccaatttcgatagcgacaaagcgcaactggttccggtgcgtctggaagaatatgccggattcgtcttcatcaacatggaccccaacgccaccagcgtagaagatcagttacccggtctgggggcgaaagtgctggaagcctgcccggaagtccacgatctgaaactggcggcccgctttaccacccgcacgcctgccaactggaagaacattgtcgataactatctcgagtgctatcactgtggtccggcgcatccaggtttctccgactccgtacaggttgatcgttactggcacaccatgcacggtaactggacgctgcagtacggtttcgccaaaccgtccgaacagtctttcaaattcgaagagggcacggatgcggcattccacggtttctggctgtggccgtgcacgatgctgaacgtcaccccgatcaaagggatgatgacggtcatttatgaattcccggtggattctgaaactaccctgcaaaactacgatatttacttcaccaatgaagagttaaccgacgagcaaaaatcgctgattgagtggtatcgcgatgtgttccgtccggaagatttacgtctggttgaaagcgtacagaaagggctgaaatcgcgtggctatcgtggccaggggcgcatcatggccgacagtagcggtagcggaatttccgaacatggtatcgcccacttccataatctgctggcgcaggtgtttaaggactaa

SEQ ID NO: 262347 - DNA, 966 bp, Klebsiella pneumoniae
atgtcagactatcaaatgtttgaagtacaggtgagccaggttgaaccgcttaccgaacaggtgaaacgcttcatgctggtggcaaccgatggcaaaccattacctgcgtttaccggaggaagtcacgtcattgtgcagatgagcgatggtgataacgagtacagcaatgcgtattcactactgagttcgccgcatgacacctcttgttatcagattgccgttcgactggaggaaaactcgcgcggcggttcccgctttttgcatcagcaggtaaaagtgggcgatcggttaacgatttcaacgcctaataacctgtttgcgctaattccctcggccagaaagcatctgtttatcgcgggcggtattggtatcacccctttcctgtcacacctggcagagttgcaatacagcgacgtcgactggcagttacattactgctcgcgaaatccagaaagttgcgcatttcgtgatgagctagtccagcatccgcaggctgagaaagttcattttcatcattcatcaaccggaacacgactggaattagcgcgattattggcggatatcgaacctggcacacatgtttatacctgcggccccgaggcgctaattgaagctgtaagaagtgaagctgcgcatctggacatcgccgccgatacgctgcactttgagcaatttgcgattgaagacaaaaccggcgatgcatttaccctggtgcttgcccgttccggtaaagagtttgtggtgccggaagagatgactattttgcaggttattgaaaataataaagccgcgaaagtggaatgtttatgtcgtgaaggggtatgcggaacctgcgaaacggcaatactggaaggtgaagctgaccatcgggatcagtattttagcgatgaagagcgtgccagccagcaaagtatgttgatctgttgttcgcgcgcgaagggtaaacgcctggtgttggatttgtag

SEQ ID NO: 262348 - DNA, 1116 bp, Klebsiella pneumoniae
atgattaccacggacgatgcgctggcttctttgtgtgaagccgtccgtgcctttccggcgatagccctggatactgaatttgttcgtacgcgcacctattacccgcaactgggtctaattcaacttttcgatggcgagcatctggcgctaattgatcctctcgggatcaccgactggtcaccgctgaaagcgatcctgcgcgatccgtccatcacaaaatttctccatgcaggcagtgaagatctggaagtgttcctcaatgtctttggcgaattaccacaacccctgattgacacgcaaatccttgctgccttctgcggacgcccgatatcatggggtttcgcttccatggtggaagagtattccggcgttacgctggacaagagtgaatcgcgcaccgactggctggccagaccgctgaccgaacgtcagtgtgaatacgcagcggcggatgtctggtatctgttaccgatcaccgcaaagcttatggtagaaacggaggcctccggctggctacctgcggcgctggatgaatgccgcctgatgcaaatgcgtcgtcaggaagtcgttgcaccggaagatgcctggcgtgatatcaccaatgcctggcagttacgcacacgccaactggcctgtctgcaactgttagccgactggcgactgcgcaaggcgcgggagcgcgatctggcggtgaactttgtcgtgcgcgaagagcatttgtggtcggtagcgcgttatatgccgggaagtttaggcgaactggacagcctgggcttatccggtagcgaaatccgctttcacggtaaaacgctgctggcgctggtggaaaaagcgcagacattgccggaagaggccttaccgcagccgatgcttaacctgatggacatgccgggttatcgtaaagcgtttaaagcgattaagtcgctgattactgacgtgagcgaaacgcacaagatcagcgccgaattgctggcatcgcgtcggcaaatcaaccaactgctgaactggcactggaaactgaaaccgcagaacaatttgccggagctgatttccggctggcgtggtgagctgatggcggaagcattacacaatttattgcaggaatatccgcagtaa

SEQ ID NO: 262349 - DNA, 582 bp, Klebsiella pneumoniae
atggcggttcaaaagaatgttatcaaaggcatactggcaggtacgtttgcgctaatgctgagcggttgtgttactgtgccggacgccattaaaggcagcagtcccacgccgcaacaagatttagttcgggtgatgagtgcgccgcagctgtacgttggtcaggaggctcgctttggtggcaaagtggttgcggtacaaaaccagcaagggaaaacccgcctggaaattgccaccgtaccactggacagcggagccagaccgacgctgggagaaccttcacgcggtcgcatttatgctgatgtgaacggttttctggacccggtagatttccgtggacaactggttacggtagtcgggccaatcaccggtgcggttgacggcaaaatcggcaacacgccctataaatttatggtgatgcaggtaacgggttacaaacgttggcatttaacccagcaggtgattatgccgcctcagccgattgatccatggttttatggcggtcgtggctggccctatggctacggcggatggggctggtataatcccggccccgcgagagtacaaacagttgtaactgaataa

SEQ ID NO: 262350 - DNA, 696 bp, Klebsiella pneumoniae
atgcgaattctggctatcgataccgcgacagaggcctgctctgtcgccctgtggaacgacggtactgtcaacgctcattttgagctttgccctcgtgaacatactcaacgaattttaccgatggtgcaggatatcctgaccaccagcggaacttccttgactgacataaatgctctggcatacgggcgcggccccggtagctttaccggcgtgcgcattggtattggcattgcgcaagggctggcacttggcgcggaattaccgatgattggcgtctccacgctaatgacaatggcgcaaggggcgtggcgcaaaaacggcgcaacccgcgtgctggctgctattgatgcgcggatgggcgaagtttactgggccgaatatcagcgtgatgaaaacggtatctggcacggtgaagaaaccgaagccgtactcaaacccgaactcgttcatgaacggatgcaacagctttccggggaatgggtgacggtaggtacaggctggcaagcctggccggatctcggtaaagagagcgggctggttttgcgcgacggagaagttttactgccagcggcggaagatatgcttccgattgcgtgtcagatgtttgccgagggtaaaacggtggcggtggaacatgccgaaccggtttatttacgtaacaacgtcgcatggaagaaacttccgggcaaagaatga

SEQ ID NO: 262351 - DNA, 348 bp, Klebsiella pneumoniae
atgatgactatcgttcgtatcgatgctgaagcccgctggtctgatgtagtaatccacaacaacacgctctactacactggtgtaccggaaaacctcgacgccgatgcctttgagcaaaccgccaacacgctggcgcagattgacgccgtgctggaaaaacagggcagcaataaatcgagcattctggatgccaccattttcctggccgataaaaacgacttcgcggcgatgaataaagcgtgggatgcctgggttgtcgcgggtcatgcgccggtgcgctgcacggtacaagcgggtttgatgaacccgaagtataaagttgaaattaagattgtggctgcggtgtaa

SEQ ID NO: 262352 - DNA, 300 bp, Klebsiella pneumoniae
atgcctgctgtaatagataaagccctggatttcattggtgccatggatgtatcagcaccaacaccaagttcgatgaatgaaagcacggcgaagggaatctttaaatatttaaaagaactgggagtacccgcgagcgcagccgatattacggcgcgagctgaccaggaaggctggaacccggggttcacggaaaaaatggttggatgggcaaaaaaaatggagtctggtgaacgcattgtgattaaaaatcctgaatacttttcaacatatatgcaggaagaactaaaagcactggtctaa

SEQ ID NO: 262353 - DNA, 180 bp, Klebsiella pneumoniae
atgtttgcaggtttaccttcactcacccatgaacagcagcaaaaagccgtcgagcggatccaggaactgatggcacaagggatgagcagcggccaggcaatcgcgttggtggcagaagagctgcgtgccaaccattccggcgagcgaatcgtggcgcgttttgaggatgaagacgagtaa

SEQ ID NO: 262354 - DNA, 1362 bp, Klebsiella pneumoniae
atgaagacgttatctcccgctgtgattactttaccctggcgtcaggacgccgctgaattttatttctcacgcttaagccacctgccgtgggcgatgcttttacactccggctatgccgatcatccgtatagccgctttgatattgtggtcgccgagccgatttgcactttaaccactttcggtaaagaaaccgttgttagtgaaagcgaaaaacgcacaacgaccactgatgacccgctacaggtgctccagcaggtgctggatcgcgcagacattcgcccagcgcataacgaagatttgccatttcagggcggcgcgctggggttgtttggctacgatctgggccgccgttttgagtcactgccagaaattgcgcagcaagatatcgttctgccggatatggctgtgggtatctacgactgggcgctggttgttgaccaccagcatcaaacagtttctttgctgagtcataatgatgtcaatgctcgtcgggcctggctggaaagccagcaattctcgccgcaggaagatttcacgctcacttccgactggcaatccaatatgacccgcgagcagtacggcgaaaaatttcgccaggtacaggaatatctgcacagcggtgattgctatcaggtgaatctcgcccagcgttttcatgcgacctattctggcgatgaatggcaggcattccttcagcttaatcaggccaaccgcgcgccgtttagcgcttttttacgccttgaacagggcgcgattttaagcctttcaccagagcggtttatcctttgtgataatagtgaaatccagacccgcccgattaaaggcacgctaccacgcctgcccgatcctcaggaagatagcaaacaagcagagaaactggcgaactcagtgaaagatcgtgccgaaaatctgatgattgtcgatttaatgcgtaatgatatcggtcgtgttgccgtagcaggttcggtaaaagtaccagagctgttcgtggtcgaacccttccctgccgtgcatcatctggtcagcaccataacggcgcggctaccagaacagttacacgccagcgatctgctgcgcgcagcttttcctggtggctcaataaccggggctccgaaagtacgggctatggaaattatcgacgaactggaaccgcagcgacgcaatgcctggtgcggcagcattggctatttgagcttttgcggcaacatggataccagcattactatccgcacgctgactgccattaacgggcaaatatactgctctgcgggcggtggaattgtcgccgatagccaggaagaagcggaatatcaggaaacttttgataaagttaataagatattacgccaactggagaagtaa

SEQ ID NO: 262355 - DNA, 579 bp, Klebsiella pneumoniae
gtggaataccgtagcctgacgcttgatgattttttatcgcgctttcaacttttgcgcccgcaaattaaccgggaaaccctaaatcatcgtcaggctgccgtgttaatccccatcgtccgtcgaccgcaaccggggttgttgctgactcagcgttcgattcatctgcgtaaacacgctggacaagtggcattccctggaggcgcagtcgatgacacggacgcatcagttatcgccgccgcgctgcgcgaagctgaagaagaggtcgctataccgccttctgccgttgaagttattggcgtgctgccgcccgtcgatagcgtaactggctaccaggtaaccccggtggtcggcattatcccgcccgatctgccgtatcgcgccagtgaagatgaagtctcggcggtgtttgaaatgccgctcgcccaggcattacatctgggtcgttatcaccctttagatatctaccgccgtggcgattcacatcgggtatggctgtcctggtatgaacagtattttgtatggggaatgaccgcaggcataattcgtgagctggcgctgcaaattggtgtgaaaccctga

SEQ ID NO: 262356 - DNA, 1365 bp, Klebsiella pneumoniae
gtgattagtctattcgacatgtttaaggtggggattggtccctcatcttcccataccgtagggcctatgaaggcgggtaaacagttcgtcgatgatctggtcgaaaaaggcttactggatagcgttactcgcgttgccgtggacgtttatggttcactgtcgctgacgggtaaaggccaccacaccgatatcgccattattatgggtcttgcaggtaacgaacctgccaccgtggatatcgacagtattcccggttttattcgcgacgtagaagagcgcgaacgtctgctgctggcacagggacggcatgaagtggatttcccgcgcgacaacgggatgcgttttcataacggcaacctgccgctgcatgaaaacggtatgcaaatccacgcctataacggcgatgaagtcgtctacagcaaaacttattattccatcggcggcggttttatcgtcgatgaagaacactttggtcaggatgccgccaacgaagtgagcgtgccgtatccgttcaaatctgccaccgaactgctcgcgtactgcaatgaaaccggctattcgctgtctggtctcgctatgcagaatgaactggcgctgcacagcaagaaagagatcgacgagtatttcgcgcatgtctggcaaaccatgcaggcatgtatcgatcgcgggatgaacaccgaaggcgtactgccaggcccgctgcgcgtgccgcgtcgtgcgtctgccctgcgccggatgctggtttccagcgataaactgtctaacgatccgatgaatgtcattgactgggtaaacatgtttgcgctggcagttaacgaagagaacgccgccggtggtcgcgtggtaactgcgccaaccaacggtgcttgtggcattgttccggcagtgctggcttactatgaccactttattgagtccgtcagcccggacatctatacccgctactttatggcagcgggtgcgattggtgcactgtataaaatgaacgcctctatttccggtgcggaagtcggttgccagggcgaagtgggtgttgcctgttcaatggctgctgcgggtcttgcagaactgctgggcggtagcccggaacaggtttgcgtggcggcggaaattggcatggaacacaaccttggtttaacctgcgacccggttgcagggcaggttcaggtgccgtgcattgagcgtaatgccattgcctctgtgaaagcgatcaacgccgcacgcatggccttacgccgcaccagtgcaccgcgcgtctcgctggataaggtcatcgaaacgatgtacgaaaccggtaaggacatgaacgctaaataccgcgaaacctcacgcggtggtctggcaatcaaagtccagtgtgactaa

SEQ ID NO: 262357 - DNA, 1599 bp, Klebsiella pneumoniae
atgcaaaaagcacaacggatcattaaaacctatcgccgtaatcgaatgattgtttgtacgatttgcgcactcgttacgctcgcttcgaccctgagcgtgcgatttatttcacagcgtaacttaaatcaacaacgggtagtacaattcgccaatcacgctgtagaggaattagataaagtactgcttcccctacaggcaggtagcgaagtcttgcttccgctgattggtctgccctgctctgtcgcccatttgccattacgtaaacaggcggcaaaactccaaactgtgcgatccattggcctggtgcaagacggcacactttattgctccagcatttttggttatcgcaatgtgcccgtcgtggacattctggctgaacttcctgcaccgcaaccacttttacgcctgacgaccgaccgtgtcctgattaaaggcagtccggttttgattcaatggacgccagcagcgggcagtagcaaagctggggtcatggagatgattaacatcgacttactggcggcaatgctgcttgagccacaactgccgcaaatcagtagcgccagcctgacggtggacgatcggcatttgctctatggtaatgggctggtagattcccttccgcaacctgaaaacaatgaaaactatcaggtttcttcgcaacgctttccttttaccattaacgttaatggtccgggggctacggcgctggcatggcactatcttccaacacaattaccgctggcggtgctgctaagtttacttgtgggctatatcgcctggctggcgaccgcttaccggatgagtttttcccgtgaaatcaatctgggcctggcgcaacatgagttcgaattgttctgccagcctttgcttaatgcgcgcagccagcaatgtattggcgtagagattttgctgcgctggaacaatccacgtcagggctggatttcaccggatgtgtttattcctatcgcggaagaacatcatttaattgtgccactgacccgctatgtgatggcagaaaccattcgtcagcgccatgttttcccgatgagtagtcagtttcatgttggcattaacgtcgcacccagccattttcgccgtggtgtgctgataaaagatctcaatcagtactggtttagcgctcacccgattcagcaactgatcctcgaaatcaccgaacgcgatgccttactggatgttgattatcggattgcccgcgagctacatcgtaaaaacgtcaaactggcgattgatgacttcggcaccggcaacagttcattttcctggcttgaaacattacgtcctgacgtgctgaaaattgataagtcatttaccgcagctataggttctgacgcggttaactcgacggtgaccgatatcatcatcgcactggggcaaagactgaatattgaactggtggcggagggtgtggaaacgcaagaacaggcgaaatatttgcgccgtcatggcgtgcatattttgcaagggtatttgtacgcacagccaatgccgctacgtgattttcccaaatggctggcgggcagccaaccgccgcccgcccggcataatggacatatcacacccattatgccgttacgttaa

SEQ ID NO: 262358 - DNA, 1557 bp, Klebsiella pneumoniae
atggaattcttaatggacccctcaatttgggcggggctactcacgcttgttgttctcgaaattgtgctgggtatcgataacctggtcttcatcgccattcttgctgacaaactgccgccaaaacaacgcgataaagcgcgtttgctgggattatcactggcgctgattatgcgtctggggctgctgtcgctgatttcatggatggtcacgctgaccaaaccgctatttaccgttatggatttttccttctccggacgcgacctgattatgttgttcggggggatattcttgctgtttaaagcaacaaccgaactgcatgaacggctggaaaaccgcgatcatgattccggccacggtaaaggctacgccagtttctgggtggtcgtcacacagatcgtcatccttgacgccgtcttctcgttggatgcggtaattacggcagtagggatggttaaccatctgccggtgatgatggcggcggtagtgattgcgatggcggttatgttgctggcatcgaaaccgctgacgcgattcgttaaccagcaccccacggtggtggtgctctgtctgagcttcctgttaatgattggtctgagtctggtggcagaaggtttcggtttccacattccgaaaggttacctgtatgccgcgattggcttctcgatcatcatcgaagtgtttaaccaaattgcgcgtcgcaactttattcgtcaccagtcgactttgccgctgcgagcgcgtactgccgatgccatcctgcgtttgatgggcgggaaacgtcaggccaatgttcagcacgatgccgataacccgatgccgatgccgatcccggaaggtgcatttgccgaagaagaacgttacatgattaacggcgtactgacgctggcgtcgcgttctctgcgcgggatcatgacgccgcgcggtgaaattagctgggttgacgctaatctcggggtcgatgaaatccgcgagcagctgctctcctcaccgcacagcctgttcccggtatgtcgcggtgagctggatgaaatcatcggaatcgtacgtgctaaagaactgctggtggcgctggaagagggcgttgatgtggcggcgattgcttcggcgtctccggcgattatcgtccctgaaaccctcgatccgatcaacctgctgggcgtgctgcgtcgtgctcgcgggagctttgttatcgtgaccaacgagtttggtgtggtacaaggtctggtcacgccgctggatgtgctggaagccattgcgggtgaattcccggacgcagacgaaacgccggaaatcattaccgatggtgacggctggctggtaaaaggcggtacagatttgcatgccttgcagcaggcgcttgatgttgagcaccttgccgatgacgatgatatcgcgacggtcgcgggcctcgtgatctcggcaaatggtcacattccccgtgtgggcgatgtgattgatgtagggccactgcatatcaccatcattgaagccaatgattatcgtgttgatctggttcgcattgttaaagagcaaccggtgcacgatgaagatgagtaa

SEQ ID NO: 262359 - DNA, 210 bp, Klebsiella pneumoniae; identical to SEQ ID NO: 9515

SEQ ID NO: 262360 - DNA, 972 bp, Klebsiella pneumoniae
gtgaccattgctattgttataggcacacatggttgggctgcagagcagttgcttaaaacggcagaaatgctgttaggcgagcaggaaaacgtcggctggatcgatttcgttccaggtgaaaatgccgaaacgctgattgaaaagtacaacgctcagttggcaaaactcgacaccactaaaggcgtgctgtttctcgttgatacatggggaggcagcccgttcaatgctgccagccgcattgtcgtcgacaaagagcattatgaagtcattgcaggcgttaacattccaatgctcgtggaaacgttaatggcccgtgatgatgacccaagctttgatgaactggtggcgctggcagtagaaacaggccgtgaaggcgtgaaagcactgaaagccaaaccggttgaaaaagccgcgccagcacccgctgccgcagcaccaaaagcagctccaactccggcaaaaccaatgggaccaaacgactacatggttattggccttgcgcgtatcgacgaccgtctgattcacggtcaggtcgccacccgctggaccaaagaaaccaatgtctcccgtattattgttgttagtgatgaagtggctgcggataccgttcgtaagacactgctcacccaggttgcacctccgggcgtaacagcacacgtagttgatgttgccaaaatgattcgcgtctacaacaacccgaaatatgctggcgaacgcgtaatgctgttatttaccaacccaacagatgttgagcgtctcgttgaaggcggcgtgaaaatcacctctgttaacgtcggtggtatggcattccgtcagggtaaaacccaggtgaataacgcggtttcggttgatgaaaaagatatcgaggcgttcaagaaactgaatgcgcgcggtattgagctggaagtccgtaaggtttccaccgatccgaaactgaaaatgatggatctgatcagcaaaatcgataagtaa

SEQ ID NO: 262361 - DNA, 801 bp, Klebsiella pneumoniae; identical to SEQ ID NO: 9516

SEQ ID NO: 262362 - DNA, 852 bp, Klebsiella pneumoniae
atggttgatacaactcaaactaccaccgagaaaaaactcactcaaagtgatattcgtggcgtcttcctgcgttctaacctcttccagggttcatggaacttcgaacgtatgcaggcactgggtttctgcttctctatggtaccggcaattcgtcgcctctaccctgagaacaacgaagctcgtaaacaagctattcgccgtcacctggagttctttaacacccagccgttcgtggctgcgccgattctcggcgtaaccctggcgctggaagaacagcgtgctaatggcgcagagatcgatgacggtgctatcaacggtatcaaagtcggtttgatggggccgctggctggtgtaggcgacccgatcttctggggaaccgtacgtccggtatttgcagcgctgggtgccggtatcgcaatgagcggcagcctgttaggtccgctgctgttcttcatcttgtttaacctggtgcgtctggcaacccgttactacggcgtagcgtatggttactccaaaggtatcgatatcgttaaagatatgggtggtggcttcctgcaaaaactgacggaaggggcgtctatcctcggcctgtttgtcatgggggcattagttaacaagtggacgcatgtcaacatcccgctggttgtctctcgcattactgaccagacgggcaaagaacacgttaccactgtccagactattctggaccagttaatgccaggcctggtaccactgctgctgacctttgcttgtatgtggctactgcgcaaaaaagttaacccgctgtggatcatcgttggcttcttcgtcatcggtatcgctggttacgcttgcggcctgctgggactgtaa

SEQ ID NO: 262363 - DNA, 459 bp, Klebsiella pneumoniae
atgacaatcacggacctggtactgattcttttcatcgccgcactcctggccttcgcgatctacgatcagttcatcatgccccgccgtaacggccccaccctgctggcaattcctttgctccggcgtggtcgcatcgatagcgttatcttcgtcggattgattgtcattcttatctataacaacgtcacgaatcatggcgcgctaataacaacatggttattaagtgcactggctctgatgggtttttatatattctggatccgcgttccgaagatcatttttaaacaaaaaggttttttcttcgccaatgtctggattgaatatagccgaatcaaagcgatgaacttgtcggaagatggcgtgttggtgatgcaattagaacagcgtcggctgttaatccgcgttcgaaatatcgacgatctggaaaaaatttataagcttctcgtttcaactcaataa

SEQ ID NO: 262364 - DNA, 756 bp, Klebsiella pneumoniae
atgaagcttcgcctgtcggcgcttgctctgggaactacgcttctggtggggtgtgcgagttccggtacagatcagcaagggcgttctgacccgttagaagggttcaaccgcaccatgtacaacttcaacttcaatgtattagacccgtatattgttcgaccagtcgctgtcgcctggcgtgattatgttccgcaaccggcgcgtaacggtttgagcaactttactggcaaccttgaagaacctgcggtgatggttaactacttcttgcagggcgacccttatcaggggatggtccactttacccgctttttcctgaacaccattttggggatgggcggctttattgatgttgcagggatggcgaacccgaaactgcaacggactgaacctcaccgcttcggtagtacgcttggtcattatggtgtgggttatgggccatacgttcagttaccgttctacggtagcttcacgctgcgtgatgacggtggtgatatggcggatggtctttacccggttctttcctggttgacctggccgatgtctgtgggtaaatggacgcttgaaggtatcgaaacccgcgcacagctgctggattccgacggtctgctgcgtcagtcgtccgatccttacattatggtgcgcgaagcgtacttccagcgtcatgatttcatcgctaatggcggcgaactcaaaccgcaggaaaatccgaacgcgcaagcgattcaggatgatttaaaagatatcgattctgaataa

SEQ ID NO: 262365 - DNA, 933 bp, Klebsiella pneumoniae; identical to SEQ ID NO: 9634

SEQ ID NO: 262366 - DNA, 1248 bp, Klebsiella pneumoniae; identical to SEQ ID NO: 9633

SEQ ID NO: 262367 - DNA, 924 bp, Klebsiella pneumoniae; identical to SEQ ID NO: 9632

SEQ ID NO: 262368 - DNA, 1434 bp, Klebsiella pneumoniae; identical to SEQ ID NO: 9631

SEQ ID NO: 262369 - DNA, 954 bp, Klebsiella pneumoniae; identical to SEQ ID NO: 9630

SEQ ID NO: 262370 - DNA, 219 bp, Klebsiella pneumoniae
gtgctgccgctgtatcccgacatcagcccggaaattattgcgattgctatcggttcaggtgcgattggctgcacgatcgttacggactcgcttttctggctggcgaagcaatattgcggcgctacgctcaatgaaacatttaaatactatacgacagcgacatttatcgcttcagtcgtcgctctggcgggcacattcctgctgtcatttatcatctaa

SEQ ID NO: 262371 - DNA, 1329 bp, Klebsiella pneumoniae
atggaaaacgctaaaatgaattcgctcatcgcccagtatccattggtaaaggatctggttgctcttaaagaaaccacctggtttaatcctggcacgacctcattggctgaaggtttaccttatgttggcctgaccgaacaggatgttcaggacgcccatgcgcgcttatcccgttttgcaccctatctggcaaaagcatttcctgaaactgctgctactggggggattattgaatcagaactggttgccattccggctatgcaaaaacggctggaaaaggaatatcaacaaccgatcagcgggcaactgctactgaaaaaagatagccatttgcccatttccggctccataaaagcacgcggcgggatttatgaagtcctggcacatgcagaaaaactggctctggaagcggggttgctgacgcttgaagatgactacagcaaactgctttctccggagtttaaacagttctttagccaatacagcattgctgtgggctcaaccggaaatctggggttatcaatcggcattatgagcgcccgcattggctttaaggtgacagtacatatgtctgctgatgcccgggcatggaaaaaagcgaaactgcgcagccatggcgttacggtcgtggaatatgagcaagattatggtgttgcagtcgaggaaggacgtaacgcagcgcagtctgacccgaactgtttctttattgatgacgagaattcccgcacgttgttccttgggtattccgtcgcaggccagcgtcttaaagcgcaatttgccgagcaaggtcgtatcgtcgatgctgataaccctctgtttgtctatctgccgtgtggtgttggcggtggtcctggtggcgtcgcattcgggcttaaactggcatttggcgatcatgttcactgcttttttgccgaaccaacgcactccccttgtatgctgttaggcgtccatacaggattacacgatcagatttctgttcaggatattggtatcgacaaccttaccgcagcggatggccttgcagttggtcgcgcatcaggctttgtcgggcgggcaatggagcgtctactggatggcttctatacccttagcgatcaaaccatgtatgacatgcttggctggctggcgcaggaagaaggcattcgtcttgaaccttcggcactggcgggtatggccgggcctcagcgcgtgtgcgcatcagtaagttaccaacagatgcacggtttcagcgcagaacaactgcgtaatgccactcatctggtgtgggcgacgggaggtggaatggtgccggaagaagagatggagcaatatctggcaaaaggccgctaa

SEQ ID NO: 262372 - DNA, 1539 bp, Klebsiella pneumoniae
atggcaatcactaaatcaactccggcaccattaaccggtgggacgttatggtgcgtcactattgcattgtcattagcgacgtttatgcaaatgttggattccactatttctaacgtcgcaataccgacaatatctggctttctgggagcatcaacagacgaaggcacctgggttatcacttcgtttggcgtagcaaatgccattgcgatccctgttaccggcaggctggcacaaagaataggcgaattaagattatttttactttcagtcacttttttttcgctgtcttccttaatgtgtagtttatcgaccaatcttgatgtgctgatattttttagagtcgttcagggattaatggcggggccgttaattccactgtcacagagtttattattaaggaattatccaccagaaaaaagaacatttgctctggcattatggtctatgaccgtgattatcgcgccgatatgtgggccgatattgggcggttatatttgtgataactttagctggggttggatatttttaatcaatgtccctatggggattatcgttctgacattatgcttaaccttacttaaaggaagagaaactgagacttcaccggtcaaaatgaatctaccaggactgaccctgttagtgctcggtgttggtggcttgcagataatgcttgataaagggcgcgatctggattggttcaactcgagtacaataataatactaacagtaatgtcagttatttctctgatttctttagtcatttgggagtcgacctcagagaacccgattcttgatctcagtttgtttaagtcccgtaatttcaccattggtattgtgagtatcacatgcgcatatttattttactctggggcgatagtccttatgccgcagttactccaggaaacgatggggtataatgcgatatgggccggacttgcctatgcgcccatcggcatcatgccgctattaatatcacctttgataggacgttatggcaacaaaattgatatgcggttgttggtgacatttagttttttaatgtatgcggtttgctattactggcgttctgtgacatttatgccaacgattgattttacaggcatcattttgccacagttttttcagggattcgccgtcgcctgtttctttttacccttaacaacgatttcgttttcaggtttgccagataataaatttgccaatgcctcgagtatgagtaatttttttcgtaccttgtcaggatcagttggtacgtcgttgacaatgacgctgtggggacgacgcgaatcgttacaccatagtcagttgacagcaaccatcgatcaatttaaccccgtgtttaattcatcgtcacaaattatggataaatactatggttcgctttcaggggttcttaatgaaattaataatgaaataactcagcagtcactttcaatttctgcaaatgagattttccgtatggcggctattgcttttatcttacttacagttttggtttggtttgcgaaaccgccgtttacagcgaaaggcgttgggtga

SEQ ID NO: 262373 - DNA, 1164 bp, Klebsiella pneumoniae
gtggaacagattaattcaaataaaaaacattctaacagaagaaaatacttttctttattggcggtagttttatttattgcgttttcaggtgcctatgcctattggtcaatggaattagaagacatgattagtacagatgatgcctatgtcacggggaatgcagatccaatttctgcacaagtttcaggcagcgtcactgtcgttaatcataaagatacgaactacgttcgacagggtgacattttagtctcactggataagactgatgccactatcgcactcaataaagctaaaaataatctggcaaatattgttcggcaaacgaataaactgtacttacaggataaacaatacagtgccgaagtcgcttcagcacgtattcagtatcaacaatctttagaagattataaccgtcgtgtacctttagcgaagcagggggttatttcaaaagaaacgctggagcataccaaagatacgttaataagtagcaaagcggcattgaatgctgctattcaggcttataaagcgaataaagctttagtaatgaacacaccattaaaccgtcagccacaagtcgttgaagctgcggatgcaaccaaagaagcctggttggcgcttaaacgtacggatattaagagtccggttaccggctacattgcccagcgaagtgttcaggtcggcgaaacagtgagtcccggacaatcgttaatggctgtcgtaccggcacgtcaaatgtgggttaatgctaactttaaagaaacacaactcacggatgtacggattggtcaatcggtcaatattatcagcgatctttatggtgaaaatgttgtgtttcatggtcgggtgacagggatcaatatgggaaccggcaatgcgttctccttattacctgcacaaaatgcgacagggaactggatcaaaatcgttcagcgtgtaccggttgaagtttctcttgatccaaaagaactcatggaacatcccttacgtattggtttatcgatgacagcaactattgatacgaagaacgaagacattgccgagatgcctgagctggcttcaaccgtgacgtccatgcctgcttataccagtaaggctttagttatcgataccagtccgatagaaaaagaaattagcaacattatttcgcataatggacaactttaa

SEQ ID NO: 262374 - DNA, 615 bp, Klebsiella pneumoniae
atgaacgcaataattattgatgaccatcctcttgctatcgcagcaattcgtaatttattgatcaaaaacgatattgaaatcttagcggagttgactgaagggggaagtgccgttcagcgggtggaaacacttaaacctgatatcgtcatcattgatgtcgatatccccggagttaacggtatccaggtgttagaaacgctgaggaagcgccaatatagcggaattattattatcgtctccgctaaaaatgaccatttttacgggaaacattgtgctgatgctggcgctaatggattcgtgagtaaaaaagaaggcatgaacaatatcattgcggctattgaagctgcaaaaaatggctactgctatttccccttctctctcaaccggtttgttggaagtttaacgtccgaccagcaaaaactcgactccttatcgaaacaagaaattagtgtcatgcgatatattcttgatggcaaggataataatgacattgcggaaaaaatgttcatcagcaacaaaactgtcagcacttataaaagtcgcctgatggaaaaattagaatgtaaatcactgatggatctttacacattcgcacaacgtaacaaaatcggctaa

SEQ ID NO: 262375 - DNA, 1236 bp, Klebsiella pneumoniae
atgctgcaacaggttccaacgcgtgcttttcatgtgatggcgaaaccgagcggttccgattgtaatctgaactgtgactactgtttttatctcgaaaaacaatccctttaccgcgaaaagccagtcacgcatatggacgatgacacgctggaagcgtatgtccgtcactatatcgctgccagcgaaacccaaaacgaagtggcttttacctggcagggcggcgaaccaacgttactcgggctggatttttaccgccgtgccgtggcgctacaggcgaaatatggtgctggcaggaagataagtaacagcttccagactaacggcgttctgcttgatgacgaatggtgtgcatttctggcagaaaatcattttcttgtagggttatcgctggatggtccggctgagatccacaatcaatatcgcgtgaccaaaggcggcagaccaacgcataagctggtgatgcgtgccctgacgctcctgcaaaaacatcatgtcgactataacgtgctggtctgcgttaatcgcaccagtgcgttacaacctttgcaagtctatgattttctgtgtgatgcaggcgctgagttcatccagtttattccggtggtcgagcgcctggctgatgaaacggctgctcatgctggacttaagctacatgctcccggcgatattcagggcgaactgacggaatggtcggtacgccccgatgagttcggtgaatttttggtggcgatattcgaccactggatcaaacgcgacgtcggcaagattttcgtgatgaatatcgaatgggcgtttgccaattttgttggtgcgccaggtgcggtttgccatcatcagccaacctgtgggcgctcggtgattgttgaacacaacggcgacgtttacgcctgcgatcactatgtttatccgcaatatcgactggggaatatgcaccagcaaacaattgcagaaatggtagattccccgcaacagcaggtgtttggtgaagataaatttaagcagttaccggcgcagtgtcgcagttgcaacgtgttaaaagcgtgctggggaggctgtccgaaacaccgctttatgctcgatgccagcggcaaacccgggctgaattatttgtgtgccgggtatcagcgttatttccgccatctaccgccatatcttaaagcaatggctgatttgctggcgcacggtcgtccggccagcgacattatgcaggcgcatttgatggtggtgaataagtaa

SEQ ID NO: 262376 - DNA, 1656 bp, Klebsiella pneumoniae
atggaattttcgttttcacccaaacttcttgttgtggctgtcgccgccgctcttccactcatggccaacgcagcagataccccgtcaaccgccaccgcacgcaaaggctttgccggatacgatcacccaaaccagtatctggttaaaccggcgaccactattgccgacaacatgatgccggtgatgcagcatcctgcacaagacaaagaaacccagcagaagctggcagaacttgagaaaaaaaccggtaagaaaccgaacgtggttgttttcttgctggatgatgtgggctggatggatgttggctttaacggcggcggcgtggcggtgggtaatcctacaccagatatcgacgccgttgccagccaggggctgattttaacttcggcgtattctcaaccgagttcttccccaacccgcgccacgattcttaccggacaatactccatccaccacggcattctgatgccgccaatgtacgggcaaccgggcggtctgcaagggttaaccactctgccgcagttgctgcacgatcagggctacgtcactcaggccatcgggaaatggcatatgggggaaaacaaagagtcgcagccgcagaacgttggctttgatgatttccgcggctttaactcggtatccgatatgtataccgaatggcgtgatgttcacgtcaacccggaagtcgccctgagcccggatcgttctgaatacatccaaaaactgccgttcagcaaagatgacgttcatgccgtgcgcggcggtgaacaggaagccattgccgacattacgccgaaatatatggaagacctggatcaacgctggatggaatatggcgttaagttcctcgacaagatggcgaagagcgataagcctttcttcctctactacggcactcgcggctgtcacttcgataactacccaaatgcgaaatatgcgggtagctctccggcgcgcacctcttacggcgactgcatggtggagatgaacgatatcttcgccaatctgtataaagcactggagaaaaacggtcagcttgataacacgctgattgtgttcacctctgataacggtccggaagccgaagttccgccacacggtcgcacgccgttccgcggtgcgaaaggttctacatgggaaggcggcgttcgtgtgccaaccttcgtttactggaaaggcatgatccaaccgcgtaaatctgacggcattgtcgatctggcggatctcttccctacggcgctggatctggcggggcatcctggggcgaaagtagcgaatttagtaccgaaaaccacctttatcgatggtgtggaccagacatctttcttcctgggaacaaatggtcagtctaaccgtaaggccgagcactacttcctcaacggtaaactttctgctgtgcgtatggatgagttcaagtatcacgtcctgatccagcaaccgtacgcgtatacccagagcgggtatcagggtggattcaccggcacagtaatgcaaacggcgggatcgtcggtgtttaacctgtacaccgatccgcaggaaagcgactccatcggcgtgcgccatatcccaatgggtgtaccgctacagaccgaaatgcacgcgtatatggagatcctgaaaaaatatccaccacgcgcgcagattaaatctgattaa

SEQ ID NO: 262377 - DNA, 1197 bp, Klebsiella pneumoniae
atgctaaaagtgttattgctctttgttttgctgattgcggggatagtggttggcccgatgattgccggtcatcagggttacgtgctgatccagaccgacaactacaatatcgaaaccagcgtcactggcctggcgattattttgattctggcgatggtagtgctgtttgccattgagtggctactgcggcggatcttccgcacaggcgcacacacccgtgggtggtttgtcggacgtaagcgtcgccgtgcccgtaagcagaccgagcaggcgctgctgaaactagcggaaggcgattatcagcaagttgaaaagctgatggcgaaaaatgccgatcacgctgaacaaccggtggtgaactatctactggctgccgaagccgcgcaacaacgtggtgatgaagcacgcgccaaccaacatctggaacgtgcagcggagctggccggcaacgacaccattccggtagaaatcacccgtgtacgtcttcaactggcccgtaatgaaaaccatgctgcacgccacggcgtggataagctgctggaagttacgccacgccatccggaagtattacgtctggcggaacaggcgtatatccgcacaggtgcatggagttcgctgctggatatcatcccatcaatggcgaaagcccacgttggcgatgaagaacatcgtgcaatgctggaacaacaggcatggattggcctgatggatcaggcgcgcgccgatgacggtagcgaaggtttgcgaaactggtggaaaaaccaaagccggaaaacgcgtcatcaggtggcgttacaggtggcaatggcggaacatcttattgaatgtgacgatcatgatactgctcagcaaattatcatcgacggcctgaaacgccagtatgatgatcgtctgctgctgccgatcccgcgtctgaaaaccaataacccggaacagctggaaaaagtgctacgccagcaaatcaaaaacgtcggtgatcgcccgctgttgtggagcacattgggtcagtcactgatgaagcacggtgaatggcaggaagcatcgctcgccttccgcgcggcgctgaaacaacgtccggacgcctacgattacgcatggctcgccgacgcgctggacagactgcacaaaccagaagaagctgcagcgatgcgccgcgacggtttgatgttaacgttgcagaacaacccgccacagtag

SEQ ID NO: 262378 - DNA, 1224 bp, Klebsiella pneumoniae
atgacggaacaagaaaaaacctccgccgtggttgaagagaccagggaggccgtggacaccacgtcacaacctgtcgcaacagaaaaaaagagtaagaacaataccgcattgattctcagcgcggtggctatcgctattgctctggcggcgggcgtcggtttgtatggctggggtaaacaacaggccgtcaatcagaccgccaccagcgatgccctggctaaccaactgacggcattgcaaaaagcccaggagagccaaaaagccgagctggaaggcattatcaagcaacaggctacgcagcttgaacaggcgaatcgtcagcaagaaacgctggcaaaacagttggatgaagtccaacaaaaggtcgccaccatttccggcagcgatgctaaaacctggctgctggctcaggccgattttctggtgaaactcgcaggacggaagctgtggagcgatcaagacgtcacgaccgctgcagcgttgctgaaaagtgcagatgccagcctggcggatatgaatgacccgagtctgattaccgttcgtcgggcaattaccgatgatatcgccagcctttctgcggtatcgcaggtggattatgacggcatcatccttaagcttaatcagctttcaaatcaggtagataacctgcgtctggccgataatgacagcgatggttcgccgatggattccgacggtgaagagctttccagttccatcagcgaatggcgtatcaatctacaaaaaagctggcagaattttatggacaacttcattacgattcgccgtcgtgatgacaccgccgtaccgctgttagcgccaaatcaggatatctatctgcgcgaaaatattcgctctcgcctgctggtcgcagcacaagctgtaccgcgtcaccagcaagagacttatcgccaggcgctggagaacgtctccacctgggtacgtgcttactacgatactgatgatgccaccaccaaagcgttcctcgacgaggtggaccagttaagccagcaaaatatctcgatggatcttccggaaaccctgcaaagccaggcgatgctggaaaaactgatgcagactcgcgtgcgtaacctgctggcacaaccggcagcggggacaacggaagctaaacctgcacctgcacctgcacctgcacctgcacctgcacctgcacctgcacctgcaccgcaagctgatactccggcagccgcgccgcaaggagaataa

SEQ ID NO: 262379 - DNA, 741 bp, Klebsiella pneumoniae
atgagtatcctggtcacccgcccgtctcccgctggagaagagttagtgagccgtctgcgcacactggggcaggtggcctggcattttccgctgattgagttttctccgggtcgacaattaccgcaacttgctgatcaacttgcagcgctgggggagagcgatctgttgtttgccctctcgcaacacgcggttgcttttgcccaatcacagctgcatcagcaagatcgtaaatggccccgactacctgattatttcgccattggacgcaccaccgcactggcgctacatactgtaagcggacagaagattctctacccgcaggatcgggaaatcagcgaagtcttgctacaattacctgaattacaaaatattgcgggcaaacgtgcgctgatattacgtggcaatggcggtcgtgagctaattggggataccctgacggcgcgcggtgctgaggtcactttttgtgaatgttatcaacgatgcgcaatccattacgatggtgcagaagaagcgatgcgctggcaatcccgcgaggtgacgacggtcgttgttaccagcggtgaaatgttgcagcaactctggtcgctgatcccacaatggtatcgtgagcactggttactacactgtcgactattggtcgtcagtgagcgtttggcgaaactcgcccgggaactgggctggcaagacattaagatcgccgataacgctgacaacgatgcgcttttacgggcattacaataa

SEQ ID NO: 262380 - DNA, 963 bp, Klebsiella pneumoniae
atgataatgacggtaacaagcatgttagacaatgttttaagaattgccacacgccaaagcccacttgcactctggcaggcacactatgtcaaagacaagttgatggcgagccatccgggcctggtcgttgaactggtaccgatggtgacgcgcggcgatgtgattcttgatacgccgctggcgaaagtaggcggaaaaggcttatttgtaaaagagctggaagtcgcgctcctcgaaaatcgcgccgatatcgccgtacattcaatgaaagatgtgccggttgaattcccgcaaggtctgggactggtcactatttgtgagcgtgaagatcctcgcgatgcctttgtgtccaataactatgacagtctggatgcgttaccggcaggcagtatcgtcgggacgtccagtttacgtcgccagtgccaactggctgaacgccgcccggatctgattatccgctccctgcgcggcaacgtcggcactcgcctgagcaaactggataacggcgaatacgatgccatcattcttgccgtagccggactaaaacgtttaggtctggagtcacgcattcgcgccgcgttgccacccgagatttctcttccggcggtaggacaaggtgcggtcggtattgaatgccgccttgatgatacacgcactcgcgagctgcttgccgcgctgaatcaccacgaaactgcactgcgcgttaccgcagaacgcgccatgaatacccgtctcgaaggcggatgtcaggtaccaattggtagctacgccgagcttattgatggcgaaatctggctgcgtgcgctggtcggcgcgccggacggttcgcagattattcgcggtgaacgccgcggtgcgccgcaagatgccgaacaaatggggatttcgctggcagaagagctactgaataacggcgcgcgcgagatccttgctgaagtctataacggagacgccccggcatga

SEQ ID NO: 262381 - DNA, 2547 bp, Klebsiella pneumoniae
ttgtacctctatattgagactctgaaacagagactggatgccataaatcaattgcgtgtggatcgcgcgcttgctgctatggggcctgcattccaacaggtctacagtctactgccgacattgttgcactatcaccatccgctaatgccgggttaccttgatggtaacgttcccaaaggcatttgcctttacacgcctgatgaaactcaacgccactacctgaacgagcttgaactgtatcgtggaatgtcagtacaggatccgccgaaaggtgagcttccaattactggtgtatacaccatgggcagcacctcgtccgtagggcaaagttgttcctctgacctggatatctgggtctgtcatcaatcctggcttgatagcgaagagcgccagttactacaacgtaaatgcagcctgctggaaagctgggccgcctcgctgggcgtggaagttagcttcttcctgattgatgaaaatcgcttccgtcataatgaaagcggcagcctggggggcgaagattgtggctccacccagcatatactgctgcttgacgaattttaccgtaccgccgtgcgtctcgctggtaagcgtattctgtggaatatggtgccgtgcgacgaagaagagcattacgacgactatgtgatgacgctttacgcgcagggcgtgctgacgccaaatgaatggctggatctcggtggcttaagctcgctttctgctgaagagtactttggtgccagcctttggcagctctacaagagtattgattccccatacaaagcggtgctgaaaacactgctgctggaagcctattcctgggaatacccgaacccacgtctgctggcgaaagatatcaaacagcgtttgcacgacggcgagattgtgtcgtttggcctcgatccttactgcatgatgctggagcgtgttactgaatacctgacggcgattgaagatttcactcgtctggatttagtacgccgctgcttctatttaaaagtgtgcgaaaaactcagccgtgaacgcgcctgcgtaggctggcgtcgtgaagtgctaacccagttagtgaaagagtgggaatgggacgatgctcgtctggcaatgctcgataaccgcgctaactggaagattgatcaggtacgtgaggcgcacaacgagttgctcgacgcgatgatgcagagctaccgtaatctgattcgctttgcgcgccgcaataaccttagcgtctccgccagtccgcaggatatcggcgtgctgacgcgtaagctgtatgccgcgtttgaagcattgccgggtaaagtgacgctggtaaacccgcagatttcacccgatctctcggaaccgaatctgacctttatttatgtgccgccgggccgggctaaccgttcaggttggtatctgtataaccgcgcgccaaatattgagtcgatcatcagccatcagccgctggaatataaccgttacctgaataaactggtggcgtgggcatggtttaacggcctgctgacctcgcgtacccgcttgtatattaaaggcaacggcattgtcgatttgcctaagttgcaggagatggtcgccgatgtgtcacaccatttcccgctgcgcctgcctgcaccgacgccaaaagcgctctacagcccgtgtgaaattcgccatctggcgattatcgttaacctggaatatgacccgacagctgcgttccgcaatcaggtggtgcattttgatttccgtaagctggacgtcttcagctttggcgagaatcaaaattgcctggtaggtagcgtggacctgctgtaccgcaactcgtggaacgaagtgcgtacgttgcacttcaacggcgagcagtcgatgatcgaagccctgaaaaccattctcggtaaaatgcatcaggacgccgcaccgccagatagcgtggaagtcttctgctacagccagcatctgcgcggattaatccgtactcgcgtgcagcaactggtttctgagtgcattgaactgcgtctttccagcacccgccaggaaaccgggcgcttcaaggcgctgcgcgtttctggtcaaacctggggcttattcttcgagcgcctgaatgtatcggtacagaaactagaaaatgccatcgagttttatggcgctatttcgcataacaaactgcacggcctgtcagtgcaggttgaaaccaatcacgtcaaattaccggcggtggtggacggctttgccagcgaagggatcatccagttcttcttcgaagaaacgcaagacgagaatggctttaatatctacattctcgacgaaagcaaccgggttgaggtgtatcaccactgcgaaggcagcaaagaggagctggtgcgtgacgtcagtcgcttctactcgtcatcgcacgaccgttttacctacggctcaagcttcatcaacttcaacctgccgcagttctatcagattgtgaaggttgatggtcgtgaacaggtgattccgttccgcaccaaatcgattggcaacatgccgcctgccaatcaggatcacgatacgccgctattacagcagtatttttcgtga

SEQ ID NO: 262382 - DNA, 321 bp, Klebsiella pneumoniae
atgaacgacagtgaatttcatcgcctggctgatcaactgtggctgaccattgaagagcgtctggacgactgggatggcgacagcgatatcgactgtgaaatcaacggcggtgtactgaccattacctttgaaaacggcagcaaaatcattatcaaccgccaggagccgctgcaccaggtatggctggcaaccaaacaaggcggctaccattttgatctgaaaggcgatgagtggatttgcgatcgtagcggcgaaaccttctgggatttgctggaacaggcggcgacgcagcaggcgggtgaaacagtcagtttccgctaa

SEQ ID NO: 262383 - DNA, 231 bp, Klebsiella pneumoniae
atgcactatcgcaatgtggtttgtttgttggcttgttcgttgtttttatcgtcggcatggggatgtcggcttgatgagccggaacataatatttaccagaaacagggaaaaggcgtggtgtatttgcgcccttatgaaaagaccaatctttcgctatatagagacattattattccgttgacggatgattcatgccagaacgcagaagacgagcaaactttgaagccctga

SEQ ID NO: 262384 - DNA, 204 bp, Klebsiella pneumoniae
atgaaaaacgtgtttaaggcactcactgtattacttactctcttcagcctgacgggctgcggtctgaaaggtccgctctatttcccgcctgcagataaaaacgcaccgccgccgaccaaaccggtagagacgcaaacgcaatccacagtgccggataaaaacgaccgcgccactggcgatggtccatcccaggtgaattactaa

SEQ ID NO: 262385 - DNA, 708 bp, Klebsiella pneumoniae
atgaagcaaccaggggaagaactgcaggaaacactcacggagcttgatgaccgggcggttgtcgattatctgattaaaaatcctgagttttttatccgcaatgcgcgcgcagttgaagcgatacgtgtgccgcatccggtacgcggcaccgtttcgttggtcgaatggcacatggcccgcgcacgtaatcatattcatgttctggaagagaacatggcgctgttgatggaacaggctatcgccaacgaaggcctgttttatcgcttactctacctgcagcgtagtctcaccgccgccagcagtctcgacgatatgctgatgcgctttcaccgctgggcgcgcgatctcggcctggcaggtgcgagtctgcgcctgtttccagatcgctggcgcttaggtgcgccgtcgaaccacactcatctggcattaagccgtcagtctttcgaaccgctgcgtattcagcgtctggggcaggaacagcactatctggggccgcttaacggaccggagcttctggtggtgctaccggaagcgaaagcggtgggatcggtggcgatgtcgatgctgggaagcgatgctgatttgggtgttgtgctgtttaccagtcgcgatgccagtcactatcaacaagggcagggaacgcagttacttcatgaaattgcgctgatgttgccggagcttctggagcgttggattgaacgcgtatga

SEQ ID NO: 262386 - DNA, 717 bp, Klebsiella pneumoniae
atgcgtttttaccggcctttggggcgcatctcggcgctcacctttgacctggatgataccctttacgataaccgtccggtgattttgcgcaccgagcgagaggcgcttacctttgtgcaaaattatcatccggcgctgcgcagcttccagaatgaagatctgcaacgcctgcgccaggcggtacgggaagcggaacccgagatttatcacgacgtgacgcgctggcgttttcgttcgattgaacaagccatgctcgacgccgggctgagtgccgaagaagccagtgcaggcgcacacgcagcaatgatcaactttgccaaatggcgcagccgaatcgatgttccgcagcaaacccacgacaccttaaaacagctggcgaagaaatggccgctggtggcgatcaccaacggtaacgcccagccggagctgtttggtttaggggattattttgagtttgtgctgcgcgctggcccgcacgggcgctcaaaaccgttcagcgatatgtactttctggctgcggaaaaactcaacgtgccgatcggcgagatcttacatgttggggacgatctcaccactgacgtgggtggggcaattcgcagcggaatgcaggcttgttggatcagaccggaaaatggcgatctgatgcaaacctgggacagccgtttactcccgcatctggaaatttcccggttggcatctctgacctcgctgatataa

SEQ ID NO: 262387 - DNA, 903 bp, Klebsiella pneumoniae
atgaaaaaaacgctcgcaacgttatttttattaacgtgtctgggatcatcatccgcctatgcggataacgctttgattttacaaactgattttagcctgaaagatggtgccgtctcggcgatgaaaggggtcgcattcggcgttgaccataatcttaaaatctttgatttaacacacgaaattccaccgtataacatctgggaaggcgcttatcgcctgtatcagactgccagttactggccgcaaggttcggtgtttgttagcgtggtcgatccgggcgtaggcactgaccgtaaatcggtagtgctgaaaaccaaaaacggtcaatacttcgtttcaccagataacggtacgctcactttggtggcacaaactctgggtattgatagcgtccgggaaatcgacgaaaaagctaaccgcctgaaaggttctgaaaagtcatataccttccatggtcgcgatgtatatgcctacactggtgcgcgtctggcttccggagcgattacgttcgaacaggtggggccagagcttcctgcaaaagttgtcgaactttcttatcagaaagcaaaagcaacaaaaggtgaagtgaagggcaatatcccgattctcgatattcagtacggcaacgtctggagcaatatcagcgacgagttgctgaatcaggcaggaatcaaactcaacgacacgttgtgtgtgaccatttccgaaggttcccagcaaaaatacgcagggaaaatgccgtatgtcgcaagcttcggcgatgtgccggaaggccagccgatggtgtatctgaacagcttattgaatgtttccgtggcgctgaatatggataattttgcgcagaaacatcaggttgcgtctggtgctgactggaatattgatgtgaagaagtgcgctaagtaa

SEQ ID NO: 262388 - DNA, 186 bp, Klebsiella pneumoniae
gtgtttttgttgagccagcaggcgacaaatttttatgattttgcctgttatgccaaagcgaaactgaacgttgagcagttgctttatcttgatggcacaatttcacatatgtatatgaaaggcggggcaatcccgtggcaacgctatccttttgtcaccatgatttccgtcgagcggaaaggttaa

SEQ ID NO: 262389 - DNA, 591 bp, Klebsiella pneumoniae
atggcgcatcggctactcattggtaaaggaatgatcaccttgaatctcaaacggatttttctcgccctcaccttacttcccttgtttgctgttgccgctgatgattgcgcactctcagatccgacgctgaccgtacaggcgtataccgttaatcctcaaacagagcgggtgaaaatgtactggcaaaaagccaatggcgaagcgtggggaacgttacatgctctgctggcggatatgaatagtcagggtcaggtgcagatggcgatgaacggcggcatctatgatgaaagctatgcgccgctcggtttgtacatcgaaaacggtcagcagaaggtggcgttaaatctcgcttcaggtgaagggaatttctttattcgtcctggcggcgtgttttatgtcgcgggagataaagtcggcatcgttcgtctggatgcctttaaaaccagtaaagagattcagtttgcggtgcagtcagggccaatgttattagaaaacggcgtaattaatccacgcattcacccgaatgttgcctcgcgtaaaattcgtaacggtgtaggattaataaacaagggaacgccgtgtttttgttga

SEQ ID NO: 262390 - DNA, 951 bp, Klebsiella pneumoniae
atgctgagcgcatttcaactggaaaataaccgactgacccggctggaagtcgaagagtcacaaccccttgtaaatgcagtatggattgatcttgtcgaaccggacgacgacgagcgactgcgcgtacaatctgaacttggtcagagcctggcaacccgcccggaactggaagacatcgaagcatcggcacgtttctttgaagacgatgacggcctgcatattcactccttcttcttctttgaagatgcggaagatcacgccggtaactccactgtggcatttaccatccgtgatggtcgtctgtttactctgcgtgagcgtgaactgcctgcattccgtctgtatcgtatgcgtgcccgtagccagtcgatggtagacggtaatgcctacgagctgctgctggatctgttcgaaaccaaaatcgaacagttggcagatgaaattgaaaatatctacagcgacctggagcagttgagccgggtaattatggaagggcatcagggcgatgagtacgacgaggcgctctccacgctggcggaactggaagatatcggctggaaagttcgcctgtgtctgatggatacccagcgtgcgctcaacttcctggtgcgtaaggcgcgtttaccgggcgggcaactagagcaggcgcgtgaaatcctgcgagatatcgaatccctgctgccgcataacgaatctctgttccagaaggtgaacttcctgatgcaggcggcgatgggctttatcaacatcgagcagaaccgcatcatcaaaatcttctcggtggtatccgtcgtgttcctgccgccaacactggttgcttccagctacgggatgaactttgagtttatgccagaactgaagtggagtttcggctacccaggcgcgattatctttatgatcctcgcgggcctggcaccgtatctgtactttaagcggaagaactggttgtaa

SEQ ID NO: 262391 - DNA, 492 bp, Klebsiella pneumoniae
atgaaaagtaaactccagaaaattatattatgtttatttcttctatgctgcatctataatttatggacattgcgtcctgtacagatgttgtatacatactctgatgctggcaattcagtctttctggtcgttgatcatctgccatggactgacagcgataaaataaattggtatctgaagcatcagaatgaaattaaaaatcaacatcccctaccagaaggtagttggcatacctggtatgtcattgatatcggtaatggcttcactgactataaaaaatatatcgaagggccgtatgaagatctctactgtttcccgacaattaagagcaatgataattgcatcgtgaaaaattacttaatggttattaatgaatacccttatcgtaacactcatattggtattaacgattttactgagtatcaattaacacaagaaaataaaatagagcgagttttcaatccgcatgactttaaaaaagacaatttttag

SEQ ID NO: 262392 - DNA, 849 bp, Klebsiella pneumoniae
atgaacaacatattaggctcatcaattaatatgccctgtacacttttcgaaactattactttattcgatgatttttctgctgatgatatgcaatatggggatatggaagaacaagattttctctcactcggcttaagcgacatctctgcaaaagttgatccttaccgcctcattaaataccattttcctgggccgaattctacttatggtgcttttagtgttccaacttccggaacaaaaatatcacaaagtgaatgtattgatattttatttgcagaaatgaaagatctggcaaaaatgttttccttttttggacaatacaaaacactcatccaggatctgattgatcattttagatatggaaatggcaacagtttccatagccaggaattgaacttatcttttcatgaacgaataaacaaatatgattataatagcccaatacgtgtaatcaaagaatgtatcgaaaatgatatttcttcaacacctacgacaggataccggcctcttctcctacaaaagattaagatcgaattactttcatcaagactaaataaattcaatgattttaaagataattttaatggcctgggaatcagcattcatgatatctcagctcaaaaaatatctcttttaaattttcaaaaatatcctatgggctggagcgctaccattcatttcatagcacaagaccactttggttttgatgtaactgatataaaaaacaagacttacagcaaatatagattttttcgcatatggttctttttacaacggcataaagactttgctttcaaaccttttttcaccaattttaacactatcgaaagaatcaaaaattatctatga

SEQ ID NO: 262393 - DNA, 1539 bp, Klebsiella pneumoniae
atgcaacaacctgtagttcgcgttggcgaatggcttgttactccgtccataaaccaaattagccgcaatgggcgtcaacttacccttgagccgagattaatcgatcttctggttttctttgctcaacacagtggcgaagtacttagcagggatgaacttatcgataatgtctggaagagaagtattgtcaccaatcacgttgtgacgcagagtatctcagaactacgtaagtcattaaaagataatgatgaagatagtcctgtctatatcgctactgtaccaaagcgcggctataaattaatggtgccggttatctggtacagcgaagaagagggagaggaaataatgctatcttcgcctccccctataccagaggcggttcctgccacagattctccctcccacagtcttaacattcaaaacaccgcaacgccacctgaacaatccccagttaaaagcaaacgattcactaccttttgggtatggttttttttcctgttgtcgttaggtatctgtgtagcactggtagcgttttcaagtcttgatacacgtcttccgatgagcaaatcgcgtattttgctcaatccacgcgatattgacattaatatggtaaataaaagttgtaacagctggagttccccgtatcagctctcttacgcgataggcgtgggtgatttggtggcgacatcacttaacaccttctccacctttatggtgcatgacaaaatcaactacaacattgatgaaccgagcagttccggtaaaacattatctattgcgtttgttaatcagcgccaataccgtgctcaacaatgctttatgtcggtaaaattggtagacaatgcagatggttcaaccatgctggataaacgttatgtcatcactaacggtaatcagctggcgattcaaaatgatttactggagagtttatcaaaagcgttaaaccaaccgtggccacaacgaatgcaggagatgctccagcaaattttgcctcatcgtggtgcgttattaactaatttttatcaggcacatgattatttactgcatggcgatgataaatcattgaaccgtgccagtgaattattgggtgagattgttcaatcatccccagaatttacctacgcgagagcagaaaaagcattagttgatatcgtgcgccattctcaacatcctttagatgaaaaacaattagcagcactgaatacagaaatagataacattgttacactgccggaattgaataacctgtccattatatatcaaataaaagcggtcagtgctctggtaaaaggtaaaacagatgagtcttaccaggcgataaatactggcattgatcttgaaatgtcctggctaaattatgtgttgcttggcaaggtttatgaaatgaaggggatgaaccgggaagcagctgatgcatatctcaccgcttttaatttacgcccaggggcaaacaccctttactggattgaaaatggtatattccagacttctgttccttatgttgtaccttatctcgacaaatttctcgcttcagaataa

SEQ ID NO: 262394 - DNA, 1335 bp, Klebsiella pneumoniae
atgagttctgccaagaagatcgggctatttgcctgtaccggtgttgttgccggtaatatgatggggagcggtattgcattattacctgcgaacctagcaagtatcggtggtattgctatctggggttggattatctctattattggtgcaatgtcgctggcgtatgtatatgcccgactggcaacaaaaaacccgcaacaaggtggcccaattgcttatgccggagaaatttcccctgcatttggttttcagacaggtgttctttattaccatgctaactggattggtaacctggcgattggtattaccgctgtatcttatctttccaccttcttcccagtattaaatgatcctgttccggcgggtatcgcctgtattgctatcgtctgggtatttacctttgtaaatatgctcggcggtacctgggtaagccgtttaaccactattggtctggtgctggttcttattcctgtggtaatgacagctattgttggctggcattggtttgatgcggcaacttatgctgctaactggaatactgcggataccactgatggtcatgcgatcattaaaagtattctgctctgcctgtgggccttcgtgggtgttgaatccgcagctgtaagtactggtatggttaaaaacccgaaacgtaccgttccgctggcaaccatgctgggtactggtttagcaggtattgtttacatcgctgcgactcaggtgctttccggtatgtatccgtcttctgtaatggcggcttccggtgctccgtttgcaatcagtgcttcaactatcctcggtaactgggctgcgccgctggtttctgcattcaccgcctttgcgtgcctgacttctctgggctcctggatgatgttggtaggccaggcaggtgtacgtgccgctaacgacggtaacttcccgaaagtttatggtgaagtcgacagcaacggtattccgaaaaaaggtctgctgttggctgcagtgaaaatgactgccctgatgatcctcatcactctgatgaactctgccggtggtaaagcatctgacctgttcggtgaactgaccggtatcgcagtactgctgactatgctgccgtacttctactcttgcgttgacctgattcgttttgaaggcgttaacatccgcaactttgtcagcctgatctgctctgtactgggttgcgtgttctgcttcatcgcgctgatgggcgcaagctccttcgagctggcaggtaccttcatcgtcagcctgattatcctgatgttctacgctcgcaaaatgcatgagcgccagagccactcaatggataaccacacagcgtctaacgcacattaa

SEQ ID NO: 262395 - DNA, 1458 bp, Klebsiella pneumoniae
atgaaaacaccctcacagccgcgcgcgatatactatatcgtggcgatccaaatctgggagtacttcagtttttacggcatgcgtgccttactcattctctatctcacccatcagcttggttttgatgataaccatgccatcagcctgttcagcgcatatgcttctctggtttacgttacccctattctcggcggctggcttgccgaccgcctgctcggcaaccgcactgcagtgattgccggcgcgctgttaatgacccttggccatgtggtgctgggcattgatacaaattcaacttttagcctgtatctggcgctggcaatcattatttgtggctacggtttattcaaatcaaacatcagctgtttgcttggcgagctctacgacgagaacgatcatcgacgtgatggcggtttttcgctgctgtatgctgcgggcaatatcggttctatcgccgctcccatcgcctgcggcctggctgctcagtggtatggatggcatgttggctttgcccttgcgggtggcggcatgtttatcggtttgttgattttcttaagtggtcatcgtcatttccagtccacgcgtagtatggataaaaaagcgctcactagcgttaaatttgccttaccagtatggagctggttagtggtgatgctctgtttagcccctgtattttttaccctgctgctggagaacgactggtcaggatatttgctggcgatcgtttgcctcattgccgcacaaatcattgcccgcatgatgatcaaattccccgaacaccgccgtgctctttggcaaattgtattgttgatgtttgtcgggacattgttctgggtactggcacaacagggcggcagtaccatcagcttgtttatcgatcgctttgtgaatcgtcaggcattcaatattgaagtacctactgcactattccagtcagtgaacgcaattgcggtgatgctcgctggggttgttctggcctggctggcgtcgccagaaagccacggcaactcaacattgcgcgtctggctgaagtttgcctttggcttattgctgatggcttgtggctttatgttgctggcatttgatgcccgacatgcagcggctgacggtcaagcgtcaatgggcgtgatgatatccgggctggcgctaatgggctttgccgaactctttattgacccggtggcgattgcgcaaatcacgcgtctgaaaatgtctggcgtattaaccggtatttatatgctggcaacaggcgcggtcgccaactggctggcaggcgtcgtggcacagcagaccacagagtcgcaaattagcggtatggcaattgccgcttaccagcgattcttttctcaaatgggagagtggacgttggcttgtgtcgcgatcatcgtcgtattggcctttgctgcccgttttctgtttagcacgccaacgaatatgatacaggagagcaacgattaa

SEQ ID NO: 262396 - DNA, 1575 bp, Klebsiella pneumoniae
  misc_feature (1255)..(1264): n is a, c, g, or t
atgtctgaacgagaaacacggggagccaatgaggctattgattttaacgatgaactgagaaatcgccgcgaaaaactggcggcactgcgtcagcaaggtgtggcgtttcctaatgattttcgccgcgaccatacctctgaccagttgcacgaagagtttgatgcgaaggataaccaggaactggaatccttaaacattgaagtctcggttgctggccgaatgatgacccgtcgtatcatggggaaagcctcctttgtaacgttgcaggatgtcggtggccgtattcaactgtacgttgcaagagatagcctgccagaaggtgtttataacgatcagtttaaaaaatgggatctgggtgacattatcggtgcccgcggtacgctgtttaagacgcaaaccggtgagctttccattcactgtactgagctgcgcctgctgactaaagcactacgtcctttaccagataaattccatggtctgcaggatcaggaagtccgttatcgtcaacgttatctggacctcatcgctaacgataaatcccgtcaaacgtttgttgtccgttcaaaaattctggccgctatccgtcagttcatggtcgcgcgcggctttatggaagtagaaaccccgatgatgcaggtaattccaggtggggcatctgctcgcccgtttattacccatcataacgctctggatttagatatgtacctgcgtatcgcgccggagctgtatctgaaacgtctggttgtaggcggttttgaacggatattcgaaatcaaccgtaacttccgtaatgaaggtatttctgttcgccataatcctgagttcacaatgatggaactctacatggcgtatgcggattaccacgatttgattgaactgacggagtccctgttccgcaccctggcacaagaagttctgggtaccactaaagtcacttatggcgagcatgtgtttgatttcggcaaaccgtttgaaaaactcaccatgcgcgaagcaatcaaaaaatatcgtccagaaaccgatatggccgacctggataattttgatgccgctaaagcattagctgaatctatcggaattacggtagagaaaagctgggggctgggacgtattgtgacggagatctttgatgaagtggcagaagcacatctgattcagccaacctttattacggaatatccggcagaagtgtccccgctggcgcgccgtaatgatgttaacccggaaatcaccgaccgttttgaattcttcatcnnnnnnnnnngtaatgatgttaacccggaaatcaccgaccgttttgaattcttcatcggtggtcgtgaaatcggtaatggttttagcgaattaaacgacgcagaagatcaggctgaacgtttccaggaacaggttaacgctaaagctgcaggtgacgacgaagccatgttctatgacgaagattacgtgactgcgctggaatatggtctgccgccaaccgctggtctgggtattggtatcgaccgaatgattatgctgtttacaaacagccatactattcgcgacgttattctcttcccggcgatgcgcccacagaaataa

SEQ ID NO: 262397 - DNA, 174 bp, Klebsiella pneumoniae
atggcactattctctaaaatattaattttttatgtgattggtgtgaacatatcctttgtcattatctggtttatctcacatgagaaaacacatattcgtttacttagtgcattcctggtcggaataacctggccaatgagtctgcctgtggcattacttttttctctcttttag

SEQ ID NO: 262398 - DNA, 297 bp, Klebsiella pneumoniae
atggaaggtaaaaacaagttcaatacttatgttgtttcttttgattatccatcatcttattcctcagtgttcttaaggttaagatcattgatgtatgatatgaatttctcctctatcgtggctgatgaatatgggataccacgacaattgaatgaaaattccttcgcaataacgacatcattagccgcaagtgaaatcgaagatttaatcaggctcaaatgcttagacttaccggatattgattttgacctcaacattatgacagttgatgactatttccgtcagttttacaagtag

SEQ ID NO: 262399 - DNA, 273 bp, Klebsiella pneumoniae
atggaaatacgcgaaggccacaataaattttacattaatgacgaacaaggcaagcaaatcgctgaaattgtctttgtgccgaccggagagaatttagcgattatcgaacataccgatgtcgatgaaagcctgaaagggcaggggattggtaaacagctggttgcgaaagtcgtggaaaaaatgcgtcgggaaaaacgaaaaattatcccactatgcccatttgcgaaacacgaatttgataaaacgcgggagtatgatgatattcgcagttga

SEQ ID NO: 262400 - DNA, 231 bp, Klebsiella pneumoniae
atggatcaggatctactggacggtggttatcgctgctataccggcgaaaagatcgatgtctggttcaacactgcgatatgtcagcattctggcaattgcgtacgtggcaacggcaagttatttaatctcaaacgaaagccgtggatcatgccggatgaagttgacgtcaccactgtggttaaagtgattgatacgtgcccgagcggcgcgctgaaataccgtcataaataa

SEQ ID NO: 262401 - DNA, 1632 bp, Klebsiella pneumoniae
atgagacattcattgccctaccgcatgttacgcaaacgtccgatgaaattgagtaccacagtgatcttaatggtcagcgcggtactgttctcggtgctattggtggtgcatctgatttacttctcgcaaatcagtgatatgacgcgagacgggctagccaacaaggcactggcggtggcgcgtaccctcgccgactcgccggaaatccgtcagggcttgcagaaaaaaccgcaggagagcggcatccaggccatcgcggaagccgtgcgcaaacgcaacgatctgctgtttattgtcgttaccgatatgcaaagtcttcgctactcgcatcctgaagcccagcgtattggtcagccatttaaaggtgatgacatccttaaagcgctgaatggcgaagaaaatgtcgctatcaatcgcggttttctggcgcaggctttacgcgtatttacccccatctacgatgaaaatcataaacaaattggcgtggtggcgatcggccttgagttaagtcgcgtgacccaacagatcaatgacagtcgctggagcattatctggtcggtattatttggcatgctggtcggactgatcggcacctgcattctggttaaagtactgaaaaaaattctttttggcctggaaccctacgaaatctccacgctgtttgagcaacgccaggccatgttgcagtctatcaaagaaggcgtcgttgccgtggacgatcgcggcgaagtcacgctgatcaacgatgccgcacaagaattgctgaattaccgtaagtcgcaggacgatgagaaactgtcgacgctaagccactcgtggtcacaggtagtagatgtctcggaagtgttacgcgacggtaccccgcgccgcgacgaagagattacgattaaagaccggctattactgatcaacaccgttccggtgcgcagtaatggcgttatcatcggtgccatttcaaccttcagagacaaaactgaagtacgtaaactgatgcagcgactcgacggtctggtcaactatgctgacgcacttcgtgaacgatcccacgaatttatgaataaattgcacgtgattctcggattattgcatctgaagagttataagcagttggaagattacattctcaaaacagccaataactatcaggaagagattggctctctgctgggtaagatcaaatctccggttatagctggttttttaatcagcaagattaaccgcgcgaccgatttaggccatacgctgattttaaacagtgaaagccagctgccagacagcggcagtgaagaccaggtcgcgacgctgattaccacgttgggaaatctgatagaaaacgcgctggaagcattagggccggaacccggaggcgaaattagcgtaacattgcactaccgtcacggctggctgcactgtgaagttaatgatgatggaccggggatcgcacccgataaaatcgatcacatttttgacaaaggtgtctcgacaaaaggaagcgagcgaggcgtcggtttagcacttgtcaaacaacaggtagaaaatctcggcggcagcatcgccgtggaatcggaacccgggattttcacacaattttttgtccagataccctgggacggggagaggtcgaacagatga

SEQ ID NO: 262402 - DNA, 720 bp, Klebsiella pneumoniae
atgatcaatgtattaattatcgatgacgacgcaatggtcgcggagctgaatcgccgatacgtagcacaaatcccaggctttcaatgctgtggaacagcctcgacgctggagaaagccaaagagattatcttcaatagcgatacgcctatcgacctgatattgctcgatatctatatgcaaaaagagaacgggctcgatttactgcctgtcctgcataacgcgcgttgcaaaagtgatgtgattgtcatctcctccgcagccgatgcggcaaccattaaagattcgctgcattacggtgtcgtggattacctgatcaaacccttccaggcttcccgctttgaagaggcgctcaccggctggcggcaaaagaaaatggcgctggaaaaacatcagtattatgaccaggccgagcttgatcagctaatccacggcagcagctccaacgagcaggatcctcgtcgcttgccaaaaggcttaacgccgcagacgttacgcacgctgtgccagtggattgacgcgcatcaggactatgagttttcaaccgacgagctggctaacgaggttaacatttcgcgtgtttcctgccgtaaatacctcatctggctggtcaactgccacatcttgttcaccagtatccattatggcgtcacggggcgtccggtttaccgttaccgtattcaggcagaacactactcactgctgaaacaatattgccaataa

SEQ ID NO: 262403 - DNA, 1341 bp, Klebsiella pneumoniae
atgttatttactatccaacttatcataatactgatatgtctgttttatggtgccagaaagggtggtatcgcgctgggtttattaggcggtatcggtctggtcattctggtcttcgtcttccaccttcagccaggtaaaccaccggttgatgtcatgctggttatcattgcggtggtggcggcatcggcgaccttgcaagcttcgggcggtcttgatgtcatgctgcaaattgccgagaagctgctgcgccgcaacccgaaatatgtctcaattgtcgcgccgtttgtgacctgtacgctgaccattctttgcggtacgggtcatgtggtttacaccattctgccgatcatctacgacgtcgccattaagaacaacatccgtccggaacgcccgatggcggcaagttctatcggtgcacagatggggattatcgccagtccggtgtcggttgcagtcgtgtctctggttgcgatgctgggtaatgtcacctttgatggtcgccatcttgagttcctcgacctgctggcaatcaccattccatcgacgttaatcggtatcctggcgatcggtatcttcagctggttccgcggtaaagatctggataaagacgaagagttccagaaattcatctccgtaccggaaaaccgtgagtatgtttacggtgataccgcgacgctgctcgataaaaaactgccgaaaagcaactggcttgcaatgtggatcttcctcggggcaatcgctgtagtcgcacttcttggtgctgattcggacctgcgtccatccttcggtggcaaaccgctgtcgatggtactggttattcagatgtttatgctgcttaccggggcgctgattattatcctgaccaaaaccaatcccgcgtctatctcaaaaaacgaagtcttccgttccggtatgatcgccatcgtggcggtgtacggtatcgcatggatggctgaaaccatgttcggtgcgcatatgtctgaaattcagggcgtactgggtgaaatggtgaaagagtatccgtgggcctatgccattgttctgctgctggtttccaagtttgtaaactctcaggctgcggcgctggcggcgattgttccggtcgcgctggcgatcggcgttgatccggcatacatcgtggcttcagcaccggcttgctacggttattacatcctgccgacttatccgagcgatctggcagcgattcagtttgaccgttccggcaccacccacatcggtcgcttcgtcatcaaccacagctttattctgccggggttgattggtgtgagcgtatcgtgcgtcttcggctggatcttcgccgcgatgtacgggttcttataa

SEQ ID NO: 262404 - DNA, 696 bp, Klebsiella pneumoniae
atgtcaaacaaaccctttatctaccaggcacctttcccgatggggaaagacaataccgaatactatctactcacttccgattacgttagcgttgccgacttcgacggcgaaacaatcctgaaagtggaaccagaagccctgactctgctggcgcagcaagcctttcacgacgcttctttcatgctccgcccggcacaccagaaacaggtcgcggctattcttcaagatccagaagccagcgaaaacgacaagtacgtggcgctgcaattcttaagaaactccgaaatcgccgccaaaggcgtgctgccgacctgccaggacaccggcactgcgatcatcgtcggtaaaaaaggccagcgcgtgtggaccggtggcggtgatgaagaagcgctgtcgaaaggcgtctataacacctatatcgaagacaacctgcgctattcacagaatgcggcgctggacatgtacaaagaggtcaacaccggcactaacctgcctgcgcaaatcgacctgtacgcggtagatggcgatgagtacaaattcctctgtgtcgctaaaggcggcggctctgccaacaaaacctatctctaccaggaaaccaaagccctgctgactcccggcaaactgaaaaacttcctcgttgagaaaatgcgtaccctcggtactgcagcctgcccgccgaccatatcgcgtttgtga

SEQ ID NO: 262405 - DNA, 954 bp, Klebsiella pneumoniae
gtgattggcggtacgtctgcggaaaccaacctgaaaaccgtcaagttagcaagcgctcactattacgatgaactgccgacggaagggaacgaacatggtcaggcgttccgcgatgtccagctggaacaggaactgctggaagaggcccagaaactcggtcttggcgcgcagtttggtggtaaatacttcgcgcacgacattcgcgttatccgtctgccacgtcacggtgcatcctgcccggtaggcatgggcgtctcctgctccgctgaccgtaacattaaagcgaaaatcaaccgcgaaggtatctggatcgaaaaactggaacacaacccaggccagtacattccggaagaactgcgccaggccggtgaaggcgaagcggtgaaagttgaccttaaccgcccgatgaaagagatcctcgcccagctttcgcaatacccggtatccacccgcttgtcgctcaccggcaccattattgtgggtcgagatattgcacacgccaagctgaaagagctgattgacgccggtaaagaactgccgcagtacatcaaagatcacccgatctactacgcgggtccggcgaaaacccctgccggttatccatcaggttcacttggcccaaccaccgcaggtcgtatggactcctacgtggatctgctgcaatcccacggcggcagcatgatcatgctggcgaaaggcaaccgcagccagcaggttaccgacgcgtgtcataaacacggcggcttctacctcggtagcatcggcggtccggcggcggtactggcgcagcagagcatcaagcatctggaatgcgtcgcttatccggagctgggtatggaagctatctggaaaatcgaagtagaagatttcccggcgtttatcctggtcgatgacaaaggtaacgacttcttccagcaaatcgtcaacaaacagtgcgcgaactgcactaagtaa

SEQ ID NO: 262406 - DNA, 630 bp, Klebsiella pneumoniae
atgacccgcacactcaagccgttaattcttaacaccggcgcactggcgctaacgttaatcctgatttataccggcatttcggcccatgacaaactcacctggctgatggaagtgacaccggtgattattgtcgtgccgctactgcttgccaccgccagacgttatccgttaacgccgctgctctatacgctcattttctttcacgccatcatcctgatggtcggcggacaatacacctacgcgaaagtccccgttggttttgaggtgcaggaatggctggggttgagccgtaatccgtatgacaaactggggcattttttccaggggctggtgcctgcactggtggcacgagagatccttgtgcgcggtatgtacgttcgcggacataagatggtggcgtttctggtctgctgcgtggcgctggcgataagcgcgatgtatgaattaatcgagtggtgggcggcgctggcaatgggccagggagcggatgattttctcggcacccagggcgaccagtgggacacgcaatccgatatgttctgcgcgctgcttggcgcattaacgacggtgatatttctcgctcgctttcattgccgccagctacggcgctttggcttgataaccggataa

SEQ ID NO: 262407 - DNA, 1410 bp, Klebsiella pneumoniae; identical to SEQ ID NO: 9575

SEQ ID NO: 262408 - DNA, 1356 bp, Klebsiella pneumoniae; identical to SEQ ID NO: 9574

SEQ ID NO: 262409 - DNA, 909 bp, Klebsiella pneumoniae
atgaatacagatacgtttatgtgcagcagcgacgaaaaacagacccgcagcccgctgtcgctgtattcggaataccagcggatggagattgagtttcgcgcaccgcatatcatgcccaccagccactggcatggtcaggtcgaagtgaatgtgcctttcgatggcgatgtggaatacctgatcaacaatgaaaaagtgaatatcaatcagggtcatatcacgctgttctgggcctgtacaccgcaccaactaacagataccggaacctgtcagagcatggcgatttttaatctgccgatgcatctgtttctctcctggccgctggataaagacctgattaaccacgtcactcacggcatggtgatcaaatcactggccacacagcaacttagcccgtttgaagtgcgccgctggcagcaggaattgaacagtccgaacgagcaaattcgccagctcgccattgatgaaattggcctgatgctcaagcgatttagcctctctggctgggaaccgattctggtcaataaaacctcgcgcacacacaaaaacagcgtctcgcgccatgcgcaattttatgttagccagatgctgggctttattgccgaaaactatgatcaggcgctgaccatcaacgatgtggctgagcacgtcaaacttaacgccaactatgcaatggggatattccagcgggtcatgcaattgacgatgaaacagtacataaccgcgatgcgcatcaaccacgttcgcgcgttactgagcgataccgataaaagtattctcgatattgccctgacggcaggctttcgttcaagtagtcgtttttacagcacgttcggcaaatatgtcggcatgtcaccgcaacaataccgcaaacttagccaacagcgccgccagacgtttcccggctaa

SEQ ID NO: 262410 - DNA, 1350 bp, Klebsiella pneumoniae
atgccactaattatcgttgtggcagggattgctttactcctgcttttaaccataaaaattaagcttaatacgtttgtttcgttaattattgtctcgattgctgtcgccatcgccagtggtatggatttgagtaaagtcgtcacctcagtcgaatccggacttggcggtacgctgggccatattggtttgatatttggcttcggtgttatgctcggtcgcttgctggccgatgcgggtggtgcgcagcgaatagcgctgaccatgctgaattatttcgggaaaaataaacttgactgggcagtggtctgttcggcgtttattgtcggtatcgcactttttttcgaagtcggtttaattcttctggtacctattttattcgctattgcccgtgaagcaaaaatatcaccgatgtttatgtgtgtgccgatgctttctggtttgctggtcgcacacggttttttgccgccgcaccccggcccgactgttatcgccagggaatatggcgctgatgtaggattggtactgatatacggtatcattgtcggcattccaacctttattctttgcggcccggtattgaataaattctgccagcgcattattccggacgcctttaaaaaagaggggaatatagcctctctcggcgcgacccgccgattcagcgaaagcgaaatgccaggctttgggatcagttttctcacggcaatgctgccggtgatcctgatggcggttgtcaccatcatccagatgactcatgccaaaagtgccgcggattcaggcttattttacaacgtgatactgttcttaggtaattcgacgatcgccatgctgatttcactgctgttcgcgatctataccatgggcctggggcgcgggaaaacaatccctgacctgatggattcttgcggaaaagctatcgcgggtattgccggtctgctgctgattatcggtggtggtggtgcattcaagcaagttctcatcgactctggcgttggtcagtatatttccaccctggtttcgggtatggatattaacccgatcctgatggcctggggcgtggccgcattcctgcgtatttgtctgggttcagccaccgtcgcggcgatctctaccgccggtctggtcatcccattgttggcagtacatcccaataccaacctggccttgattacgctggctaccggtgccggatcctgtatttgttctcacgttaacgatgccagtttctggatgattaaagacttttttggcctgaccaccaaagaaacgctgttatcctggacgctgatgtccacactcttatccatcagtgggctgatttttattctgctcgccagcttagttttataa

SEQ ID NO: 262411 - DNA, 1968 bp, Klebsiella pneumoniae
atgtctgttcgcaatatttttgctgacgagagccacgatatttacaccgtcagaacgcacgccgatggcccggacggcgaactcccattaaccgcagagatgcttatcaaccgcccgagcggggatctgttcggtatgaccatgaatgccggaatgggttggtctccggacgagctggatcgggacggtattttactgctcagtacactcggtggcttacgcggcgcagacggtaaacccgtggcgctggcgctgcaccaggggcattacgaactggacatccagatgaaagcggcggccgaggttattaaagccaaccatgccctgccctatgccgtgtacgtctccgatccttgtgacgggcgtactcagggtacaacggggatgtttgattcgctaccataccgaaatgacgcatcgatggtaatgcgccgccttattcgctctctgcccgacgcgaaagcagttattggtgtggcgagttgcgataaggggcttccggccaccatgatggcactcgccgcgcagcacaacatcgcaaccgtgctggtccccggcggcgcgacgctgcccgcaaaggatggagaagacaacggcaaggtgcaaaccattggcgcacgcttcgccaatggcgaattatctctacaggacgcacgccgtgctggctgtaaagcctgtgcctcttccggcggcggctgtcaatttttgggcactgccgggacatctcaggtggtggccgaaggattggggctggcaatcccacattcagccctggccccttccggtgagcctgtgtggcgggagatcgccagagcttccgcgcgagctgcgctgaacctgagtcaaaaaggcatcaccacccgggaaattctcaccgataaagcgatagagaatgcgatgacggtccatgccgcgttcggtggttcaacaaacctgctgttacacatcccggcaattgctcaccaggcaggttgccatatcccgaccgttgatgactggatccgcatcaacaagcgcgtgccccgactggtgagcgtactgcctaatggcccggtttatcatccaacggtcaatgcctttatggcaggtggtgtgccggaagtcatgttgcatctgcgcagcctcggattgttgcatgaagacgttatgacggttaccggcagcacgctgaaagaaaacctcgactggtgggagcactccgaacggcgtcagcggttcaagcaactcctgctcgatcaggaacaaatcaacgctgacgaagtgatcatgtctccgcagcaagcaaaagcgcgcggattaacctcaactatcaccttcccggtgggcaatattgcgccagaaggttcggtgatcaaatccaccgccattgacccctcgatgattgatgagcaaggtatctattaccataaaggtgtggcgaaggtttatctgtccgagaaaagtgcgatttacgatatcaaacatgacaagatcaaggcgggcgatattctggtcattattggcgttggaccttcaggtacagggatggaagaaacctaccaggttaccagtgccctgaagcatctgtcatacggtaagcatgtttcgttaatcaccgatgcacgtttctcgggcgtttctactggcgcgtgcatcggccatgtggggccagaagcgctggccggaggccccatcggtaaattacgcaccggggatgtaattgaaattaaaattgattgtcgcgagcttcacggcgaagtcaatttcctcggaacccgtagcgatgaacaattaccttcacaggaggaggcaactgcaatattaaatgccagacccagccatcaggatttacttcccgatcctgaattgccagatgatacccagctatgggcaatgcttcaggccgtgagtggcgggacatggaccggttgtatttatgatgtaaacaaaattggcgcggctttgcgcgattttatgaataaaaactga

SEQ ID NO: 262412 - DNA, 960 bp, Klebsiella pneumoniae
atgggctgggatacagaaacgaaaatgagcatttacgaaaaggaaactgaggtaatgaaaaaattcagcggcattattccaccggtatccagcacgtttcatcgtgacggaacccttgataaaaaggcaatgcgcgaagttgccgacttcctgattaataaaggggtcgacgggctgttttatctgggtaccggtggtgaatttagccaaatgaatacagcccagcgcatggcgctcgccgaagaagctgtaaccattgtcgacgggcgagtgccggtattgattggcgtcggttccccttccactgacgaagcggtcaaactggcgcagcatgcgcaagcctacggcgctgatggtatcgtcgccatcaacccctactactggaaagtcgcaccacgaaatcttgacgactattaccagcagatcgcccgtagcgtcaccctaccggtgatcctgtacaactttccggatctgacgggtcaggacttaaccccggaaaccgtgacgcgtttggctctgcaaaacgagaatatcgttggcatcaaagacaccatcgacagcgttggtcacttgcgtacgatgatcaacacagttaagtcggtacgcccgtcgttttcggtattctgcggttacgatgatcatttgctgaatacgatgctgctgggcggcgacggtgcgataaccgccagcgctaactttgctccggaactctccgtcggcatctaccgcgcctggcgtgaaggcgatctggcgaccgctgcgacgctgaataaaaaactactacaactgcccgctatttacgccctcgaaacaccgtttgtctcactgatcaaatacagcatgcagtgtgtcgggctgcctgtagagacatattgcttaccaccgattcttgaagcatcagaagaagcaaaagataaagtccacgtgctgcttaccgcgcagggcattttaccagtctga

SEQ ID NO: 262413 - DNA, 789 bp, Klebsiella pneumoniae
atggttcgcaaagggtgtaattcattagtccgtgctgaaaaaatattaacccacattgcatgggttggtatggcaagttatatggagttattaaataaattccagtaccccaaaagcagcctgcttaatttattgaatgtaatggtggagtgtggtttcttaattaaaaacaaaaacggctactattcactgggaataaaaaactacgaattgggttgtcaggcgttacaccgtcaaaatatatttgaggtgactaagcggccaatgcaggagttgtcgctgaaaagtggactggtttgtcatcttggggcgatggagagcatttcggctatctatctcgacaagatcgaaagtccggactctgtaccgacgagcaaaagctggattggcaaaaaacttgagttgcatattaccgcgttgggtaaggcattattagcctggaagacacgagaagaactggattattttttagaagcactcacgttaactccacatacgcgcaatacatttaccgataaaaaattgtttctggaagaattacaaaaaacacgccttcggggatgggccatagacaacgaagaatcaacctatggggcggtatgtttaagtatgccggtattcaatatgtataacagagttaactatgcaatctcactttctggcgatccggtagtttattcaggaaataagatagacagctatctggaattgctccggaaatgcgctgagcaaatatcatatgggctgggatacagaaacgaaaatgagcatttacgaaaaggaaactga

SEQ ID NO: 262414 - DNA, 783 bp, Klebsiella pneumoniae
atgagccaacagagacctgaccgtatcaaacagatgctgcactacctgtggcaacatcgtcacctctccacacagcaggccatggagctttttggctatgcggaagcgactgtccgtcgtgatttccagtatattgccaaccagtatccaggcatgatccgcggtcacggttgcctggacttcgacgacagtacagacgacaaagagtacgtcttcgacgtgaaacgtacattgcaatctgtggcgaaaagagaaatagctgcccttgcccgaacaatgatcaaagatggcgactgcttttttctcgactccggctcaacctgcctcgaactggcgaaatgcctggccgatgcgcgggtaaaggtcatctgcaacgacattaaaatcgccaatgaactgggctgttttccccatgtggaaagttacattatcggaggactgattcgcccaggttatttttcggtaggagagagtctggcgctggagatgatcaatgccttttccgtagaacgtgcgtttatctcctgcgatgcgctgtcgctggagacggggatcaccaatgccaccatgtttgaggtcggggtgaaaacacggattattcaacgctcgcgtgaagttattctcatggccgatcactcaaaatttgatgccgttgagccgcatgctgtagcaacactatcatgtattaaaacgatcatcagtgacagcgggttacctgagactattgcacagcgttatcagcgagccggatgtcagttgtttttacctcattcaataaagtga

SEQ ID NO: 262415 - DNA, 633 bp, Klebsiella pneumoniae
atgatcctgcacccttctctcgccagcgcaaatcctctgcactatggtcgtgagctgacggcattggacaatctggattttggaagcctgcatctggatattgaggacagcagcttcattaacaacattacgtttgggatgaaaacggtgcaggccgtcgccagacagacgcctcatcccttgtcctttcatttcatggttgcccggccacagcgctggtttaacgcgctggctgaaatcagacccgcgtggatcttcgttcatgcagaaacgctggactatccttcggaaacgttaactgagatccgccataccggcgcacgagccggactggtatttaatccggcaaccccgatcgacgcctggcgatatctggcgtctgagctggacggagtgatggtgatgaccagtgagcccgatgggcagggacagcggtttattccctccatgtgcgagaaaatccaaaaagtacgcacggcttttcctcagaccgagtgctgggccgacggtggaattacgttggcagctgcacagcaactggcagcagccggggcgcaacatatggtgattgggcgcgccctgttctcttcatctgactatcgcgcgaccttagctcaattcgccaccctgtaa

SEQ ID NO: 262416 - DNA, 432 bp, Klebsiella pneumoniae
atgattaacgatattaaatgggtacaggcacaacgtgaagccaccgactggcgtcaggccgtggaaatcgccacccgcccgctggtagcctatggtgccgcgcagccatgctacgttaatgggatcatcgaaaatacccttaactgggggccttattatctgatagccccaggaatcgccttgcctcacgcccgaccagagcaaggcgcaaactataatcaggtcagtatcaccacgctacgcaccccggtcgcctttggtaacgaggagtgcgaccccgtctggctacttctctgcgtcagcgccacggatgccaacgcacatattttgaccattcagcgcatcagccagtttattgattcgccacaacgcttagcggcagtgggaaatgccagcacagacgatgcactgtttgcgctggtatcaggttaa

SEQ ID NO: 262417 - DNA, 807 bp, Klebsiella pneumoniae
atgagttggctgaaagaggttattgggacggaaaaagcggtcatcgccatgtgccatctacgtgcattgcccggcgacccgagttttgatgcgcagttggggatgaactgggttatcgacaaagcctgggacgatctgatggcgctccaaaatggtggggtggatgcagtcatgttctccaacgagtttagtcttccctatctcacgaaggtgcgtccggaaaccactgcggcaatggcacgaatcatcgggcaattaatgagcgatatccgcatcccgtttggcgtgaatgttctgtgggatccggtcgcctcattcgacctggcgatggctaccggcgctaagtttatccgcgagatatttaccggtgcctatgccagcgactttggcgtctgggacactaacgtcggtgagaccatccgtcatcaacaccggattggtgcaggcgaagtgaaaaccttgttcaatatcgtcccagaggccgccgtgtatctgggcaatcgcgatatctgttctattgctaaatcgacagtatttaacaaccatcctgatgcgctctgtgtttctggcctgaccgccgggacgcgtacagacagcgcgctgttaaaacgggtcaaagaaacggtgcctgacaccgtcgtgttggccaacacgggcgtctgcctggaaaacgtggaggaacaactcagtatcgccgatggctgtgtgaccgcaaccacctttaaaaaggacggcgtttttgccaatttcgttgaccaggcgcgagtcagtcagtttatggagaaagtgcatcatatacgccgataa

SEQ ID NO: 262418 - DNA, 1314 bp, Klebsiella pneumoniae
atgtttgattacatcctgtctctcggcggtaccgttttcgtccctatcatcatgatcgtgattggccttatcttccgcatcccctggctgcaggcgattaaggcaggggtaacggttgggattggttttgtcggtatgggactggtgatcgtcatggcgatcgacagcctcagtccccctatcaaagtgatgattgagcgtttcggcctggccctgcatgtctttgacgttggcgcaggccctgcctccggcgttggttatgcgacagccattggcgccatgattatcccagttatttttcttctcaatgtcaccatgctggtcacccgtctgaccaaaacgatgaacgtcgatatttacaattactggcactacgccattacgggtacggtggtccagcttatgaccggtagcctgatttatggtgtgctgggggcaatctgccatgcggcgctatcgttaaaaatggccgactggacggcaaaacgggtacagaacatcgtcgggctggaaggtatttcgataccgcaaggctacggttccagttcagtaccgcttttcgttctacttgatgctatctatgaaaaaatccctttcatgaagggacgcaatatcgatgctcaggagatccagaaacgctacggcatggtcggcgatccggtgattatcggcgtagtgctcggtctgatttttggcctggcggctggtgaaggctttaaaggttgcgccagtctgatgattaccgttgcggcaatcatggtgctgttcccgcgcatgatccgcctgattgttgagggcctgatgcccatctccgacggtgcaagaaagttcttccagaaatatttcaaaggacgtgaagtgtatatcggtctggatactgctgtgacgctggggcatccaaccaccattgctgtcggtctgctactgatacccattatgttaattctggccagcattttaccgggcaacaaagtgttacccctcgcagacctgccggtagcaccgttctttatctgtatggctacggttatccaccgcggagacctggtcaggacgttgataagcggggtcatcgtgatgattaccgtcctgctgatcgccacccagttcgcgccttacttcactgaaatggcgctcaaaggcggtttcagttttgccggtgaaagtgcgcaaatctcagcgttgtccgtgggcaatatgttcggttggtcgatttctgaattgatgtcgcttgggattattggcgttgtcgtggcggtcggtattgtcgccagcgtcgtgctgttcttacgtaaacgtgaattatcggaataa

SEQ ID NO: 262419 - DNA, 279 bp, Klebsiella pneumoniae; identical to SEQ ID NO: 4856

SEQ ID NO: 262420 - DNA, 1122 bp, Klebsiella pneumoniae
atgtcattttctgtgcaggaaaccctgttctcgcttttgcagcacaatgcgatttcaggacacgaaaacgctgtcgctgacgtcatgctgtgcgaattcaggcgtcaggcaaaagaggtctggcgagacaggcttgggaatgtcgtcgcgcgctacggtagtgataaacccgatgcgctgcgactgatgatttttgcgcatatggatgaagtcggttttatggtgcgcaaaatagagccgtctggatttttacgctttgaacgcgtaggcggtcctgcgcaggtcactatggcaggttccatcgtcaccctcaccggggacaaagggccagtcatggggtgtatcggcattaagtcctaccactttgccaaaggcgacgagcgcacgcagtcaccttctgtcgacaaactgtggattgatattggtgccaaagacaaagacgacgctatacggatgggcattcaggtcggtacgcctgtcactctgtataacccgccgcaactcctggcaaacgatctggtgtgcagtaaagcactagacgatcgtctgggctgtactgccctgctcggtgtagcggatgctatcagtactacggagcttgatatcgccgtttatctggtggcttcggtacaggaagaatttaatatccgcggcattgttcccgtattacgccgtgtaaaacctgacctggcgattggtattgatatcactccatcgtgtgacacccctgatttacacgattattccgaggtcaggattaatcagggcgttgggatcacctgcctgaactaccatggtcggggaacgctggccggattaatcacgcctcctcgcctgatacggatgttggaacagacggctcttgaacacaacattccggtgcagcgagaagtggctcccggcgtgataacagaaaccggttatatccaggttgagcaggatggtattccctgcgccagtctctctattccttgtcgctatacccattctccggcggaggttgccagcctgcgtgatttgactgattgcatccgcctattgaccgctctggcaggtatgtcagcagcacatttccccgttgagcctgattcaggcactacacaagaggcacatccattatga

SEQ ID NO: 262421 - DNA, 162 bp, Klebsiella pneumoniae; identical to SEQ ID NO: 9807

SEQ ID NO: 262422 - DNA, 552 bp, Klebsiella pneumoniae
atgacagtacaccacttcacttttcatatcacagataaaagtgatgccagtgatatccgggaagtcgaaacccgcgcatttggcttcagcaaagaagccgatttagtggcctctttacttgaggatgaaagcgcgcgccccgcgttatcgctgctagcccggtatgaaggcaaagccgtcgggcatattttatttacccgggcgaccttcaaaggagaaatggattcaccgctgatgcacatcctcgctcccctggcggtcataccggaataccaagggatgggcgtgggaggacggttgatacgcactggcatcgagcacctgaggttgatgggctgccagacggtttttgttctcggccacgccacctattacccccgacatgggttcgaaccctgtgccggagacaaaggctatccggcaccttatcccatcccggaggagcacaaagcctgctggatgatgcaatcactcaccgctcagcccatgaccctgaccggccacatccggtgcgcgcaggccctgatgaaaccggagcactggcgtgaataa

SEQ ID NO: 262423 - DNA, 300 bp, Klebsiella pneumoniae
ttgctgggagttcttacacttgctcgcgatattcaattggccattgtcaacaagatgacgcaggttttgattggtgatatctatttacgtcagcaatgcgatgtgttttggctcggctataccatcagtcccgcttatactcgccagggatatgcaattgaagcaattaccgccacgattgactggataaaagagaacggtttttcactcaccaaagccggtgtgaatccggaaaataccctttcaaaaaaattacttatcaggattggcttcaatttttcgagcatcgaagatgagtga

SEQ ID NO: 262424 - DNA, 1137 bp, Klebsiella pneumoniae
atgtatctgtatgagcatcgtcgctgtttcaataacatcatcggctactgtaactcactttgctatcacggtaagttgcagcctaaaagagggatggaaaaagggacgattttccccgcaatgggatatttacaaattgatggtagaggcatgaagccaaatggagggagccgttataaccctcttgaagctgaaacaatagcagcatggctggtggcacataaggatgatatagagcgccattacggggaaccactgtacaaagttgttggtgttgtgacgccattttcggcgcaggttaatgctatcaaaacgtcattgcgtaagctggaaattaatggcaaagacgagcagggttcactgacagtggggactgtgcactccttgcagggggcggaaagggcgattgttctcttttctcctgtctactcaaaacatgaagatggcaggtttcttgatagcaacagcagtatcctcaatgttgctgtctcacgcgctaaagatagttttctggtatttggcgatatggaccttatcgagatgcagcccgcattttcgccgcgagggttattggcaaaatatctcttttcttcagataataatgcgttgcaatttgagtttcagaaacgacaggatttaatttccgcacatacacaaatttcaacgctgcatggtgtggagcagcatgatggatttttgaacaagactcttgccggagctcaaaagaaaataacgattatttccccttggttatcttggcaaaaagtggagcaaacgggatttctggcatcaatggctttggcccgttcccggggcattgatattaccgtggtgacggataaaaactgcaatatagcgcatgtcgatgatgataagcgtcaggagaaacaacatctgctgaatgatgctgttgaaaagctcaataagatgggtatcgctacgaaattggttaatcgtgtccacagcaaaattgtgattgaggatgaagaactgctgtgtgtcggatcttttaactggttcagtgctgcacgggaagataagtatcaacgatacgatacgtctttggtgtaccgtggcgaaggcgtaaaaaatgaaataaaggcaatatatggtagtctggatcaacgtcagctttaa

SEQ ID NO: 262425 - DNA, 981 bp, Klebsiella pneumoniae
atgaacgcaataatatcgcccaattattactatgttcttaccgttgctggtcagtctaatgccatggcgtatggcgaaggactgccattaccggacagggaagatgcgcctcatcccagaatcaaacaattagcgagatttgcgcatacgcatcccggaggcccgccatgtcactttaacgacattattccactgactcactgcccacacgatgttcaggatatgcagggttatcaccatcctctggcaacgaatcatcaaacacagtacggcaccgttggccaggcactgcatattgcacggaaattactgcccttcattcctgataatgcagggattctcatcgttccgtgttgccgtggcggatcggcttttaccgcgggcagcgaggggacatattcagaacggcacggagccagccatgatgcttgtcgttggggaacggataccccgctctaccaggatttagtcagcagaacgcgagccgcactggcaaaaaatccgtataacaaattcctcggcgtatgctggatgcaaggcgaatttgacttaatgaccagtgactacgcgtcacaccctcaacactttaatcatatggttgaagcctttcgtagggatctaaaacaattccattctcagcttaataatattactgccgcgccgtggttttgcggcgataccacctggtactggaaagaaaatttccctcatgcgtatgaagctatttatggcaattatcaaaataatgttttagccaatattattttcgtcgacttccagcaacaaggtgaaagaggactgacgaacgcgcctgatgaagatccggacgatttaagcacgggatatttcggttcagcgtaccggtcagcggagaactggacgacgtcactgcgaagcagtcatttcagcgcggcagcccgtcgggggattatttctgacagatttgtagaagcaattttgcagttttggcgcgaaaggtga

SEQ ID NO: 262426 - DNA, 1107 bp, Klebsiella pneumoniae
atgaataaaacaataacggcgcttgcgatcatgatggcttcatttgccgcaaacgcgtctgtattaccggaaactcctgtgccatttaaaagtggtaccggagcaattgataacgacactgtctacattggtttaggtagcgcaggtacggcatggtacaagctggatacacaggccaaagataaaaaatggacagcgttagctgcattccctggtggaccaagagatcaagcaacctcggcatttattgatggcaatctttatgtgtttggcggcattggcaaaaacagcgagggcttgactcaggtatttaatgacgtacacaaatacaaccccaaaaccaatagctgggttaaattgatgtcgcacgccccgatgggcatggcgggccatgtgacttttgtacacaacggcaaggcttatgttactggcggtgttaaccagaatatcttcaatggctattttgaagatctcaaccaggctggaaaagattcaaccgctatagataaaatcaacacccactattttgacaaaaaagcagaagattatttcttcaataaatttctgttgtcttttgatccctcaacacagcaatggagttacgctggcgaatctccctggtacggaacggctggtgcggcggttgtgaataaaggtgataaaacctggcttattaatggcgaagccaaacccggattgcgaacggatgccgtatttgaacttgacttcaccggtaataatttaaaatggaataagctagctcccgtctcatcaccagatggcgtcgctggcggctttgcaggcatgagcaatgactcactgatatttgccggaggggccggattcaaaggttcacgagaaaattaccagaacggtaagaactatgcgcatgaaggcctgaaaaaatcatatagcactgatattcatctttggcataacgggaaatgggataaatcgggtgagttatcgcaaggtcgggcctacggagtatcattgccctggaataatagtctattgattattggcggtgaaactgcaggcggcaaagcggtgacggattcagttttgatctctgtgaaggataataaagtcacagtacaaaactaa

SEQ ID NO: 262427 - DNA, 717 bp, Klebsiella pneumoniae
atgaaaaaggctaaaatactttctggcgcattattactgtgcttttcgtcaccactgatttctcaggctgcgacactggacgtacgtggtggatatcgtagtggaagccacgcctatgagactcgactcaaagtcagtgagggatggcaaaatggatggtgggcaagtatggaaagtaatacctggaataccattcatgataataaaaaggaaaatgccgcactcaatgatgttcaggtggaagttaattacgcgattaaacttgatgatcaatggacggtgcgcccgggaatgttaacgcattttagcagcaacggcacacgctacggaccctacgtaaaactgtcctgggacgcgacaaaagatcttaattttggcattcgctatcgttacgactggaaagcttaccgacaacaagacttatccggtgatatgtctcgtgataacgttcatcgttgggatggatatgtcacttaccatattaatagtgatttcaccttcgcatggcaaacgacgctatacagcaaacagaacgattatcgctatgcaaaccataagaaatgggcgacggaaaatgcatttgttctacaataccatataacgcccgatattacgccatacatagaatatgactacctggaccgtcagggtgtttacaacggcagagataatttatcggaaaacagttatcgcattggtgtgtcatttaaactgtag

SEQ ID NO: 262428 - DNA, 1050 bp, Klebsiella pneumoniae
atgacgaatatcaccttacagaaacaacatcgtacactgtggcattttattccggggttagccctgagtgcagttatcaccggggtcgccctgtggggtggttccattcccgcggttgcgggtgccgggtttagtgccctcaccctcgcaattttgttggggatggttttaggcaacaccatctatccgcacatctggaaaagctgtgacggtggtgtgctgtttgccaagcaatatttattacgtctgggtatcattctttatggcttccgtctgacgttctcgcaaattgccgatgtcggtatcagtgggatcatcattgacgtgctgacgctgtccagtaccttcctgctggcttgcttcctggggcagaaagtgtttggtctggataagcacaccagctggttgatcggtgccggtagcagtatttgtggtgctgccgcggtactggcgactgagccggtagtgaaagcggaagccagtaaagtaaccgtggctgttgcaaccgttgttatcttcgggaccgtcgcgattttcctctacccggcgatatatccgctgatgtctcaatggtttagtccggaaactttcggtatctacattggttctactgtgcacgaagtggcgcaggtggtggcggcaggtcatgccatcagcccggatgcagaaaacgcagcagttatttccaaaatgctgcgcgtgatgatgctggctccgttcctcatcctgctggcggcgcgtgttaaacagctgtctggggcgaacagcggcgagaaaagcaaaatcactattccgtggtttgccatcttgttcatcgtagttgccatctttaactcgttccacctgttaccgcagagcgtggtgaacatgctggtaacgctggataccttcctgctggcaatggcgatggcggcgctgggtctgaccactcacgtcagcgcgctgaaaaaagccggggcgaaacctctgctgatggcactggtactgtttgcctggctgattgttggtggtggtgcgattaactatgtgattcaaagcgtcatcgcataa

SEQ ID NO: 262429 - DNA, 882 bp, Klebsiella pneumoniae
atgcacatcaccctccggcagttggaagtttttgcagaagtattgaaaagtggatcaaccacccaggcgtcggtgatgctggcgttgtcgcaatcagcagtgagcgcagccttgaccgacctggaagggcagcttggcgttcaactgtttgatcgcgtggggaaaagactggtagttaatgaacacgggcgactgctctatccgcgcgcgttggcactgcttgaacaggcgatcgaaatcgaacaactgtttcgcgaagacaacggtgcgattcgtatctatgccagtagtaccatcggtaactacattctgcctgcagttatcgcccgttatcgccatgattatccgcagttgccgattgaacttagcgttgggaacagccaggacgtgatgcaagcggtgctggatttccgcgttgatattggctttattgaaggaccgtgccacagcactgaaatcatctcagaaccgtggctggaagacgagctggtggttttcgccgcgccgacttcaccattggctcgtggacctgtcaccttagaacagctggccgctgcgccgtggatcctgcgtgaacgcggctccggcacgcgggagattgtcgattatctgttgctgtcacatttaccgaagtttgagatggcgatggaattaggtaactccgaggcaatcaaacatgcggtgcgtcatgggttgggaattagttgcctgtcgcggcgggtgattgaagatcaattgcaggcaggcacattaagtgaagttgcggtccctctgccgcgcctgatgcgtacgttgtggcgtatacatcatcggcaaaaacacctttccaacgcgctacggcgctttctggactattgcgatcccgcgaatgtaccgcgttaa

SEQ ID NO: 262430 - DNA, 1470 bp, Klebsiella pneumoniae; identical to SEQ ID NO: 9533

SEQ ID NO: 262431 - DNA, 1980 bp, Klebsiella pneumoniae
atgtttaggttgaaccctttcgtacgggtcgggctgtgtttgtccgctatttcttgtgcatggcctgtgttagcggtcgatgatgatggcgaaacgatggttgtcactgcatcttccgttgagcaaaaccttaaagatgcacccgccagtatcagcgtcattacccaggaagacctgcagcgaaaaccggtacagaatctgaaggatgtcctcaaagaagtgcctggcgtacaactgacgaacgaaggggataaccgtaagggcgttagtattcgtggtctggacagcagctacaccctgattctcgtcgacggtaaacgcgttaactcccgcaatgccgtcttccgccacaatgatttcgatctgaactggatcccggtcgattccatcgaacgtattgaagtggtccgtggcccgatgtcgtcgctgtacggttccgatgcgctcggcggtgtagtgaatatcatcaccaaaaaaatcggtcagaaatggtcgggtaccgttaccgtcgataccaccattcaggaacatcgcgatcgcggtgatacctataacggtcagttctttaccagcggaccattaattgacggcgtgctgggaatgaaagcttacggcagcctggcaaaacgtgaaaaggatgacccgcaaaactcaacgaccaccgataccggagaaacgccgcgtattgaaggattctccagccgcgacggcaatgtggaatttgcctggacaccgaatcaaaatcacgattttactgccggatacggtttcgaccgtcaggatcgtgattccgactcgctggacaaaaaccgcctggaacgccagaactactccgtcagccataatgggcgttgggattacggcaccagcgaactgaaatactacggtgagaaagtcgagaacaaaaaccctggcaacagcagcccgataacttccgaaagcaatacggtcgacggcaaatacacgttgccgctgacggcgattaatcagtttctcacggttggcggtgaatggcgtcacgacaaacttagcgatgcggtgaacctgaccgggggaaccagttccaaaacgtctgccagccagtacgcgctgtttgtggaagatgaatggcggatcttcgagccgctggcgctgacgaccggcgtacgtatggacgatcatgaaacctacggtgaacactggagtccgcgtgcctacctggtttataacgccaccgacaccgtaacggtgaaagggggctgggcgacggcatttaaagcaccttctctgttgcaacttagccctgactggacgagcaattcctgccgtggcgcatgtaagattgtgggtagcccggatctgaaaccagaaaccagcgaaagttgggaactggggctttactacatgggcgaagacggctggctggaaggggtagagtccagcgttaccgttttccgtaacgatgtgaaagatcgcatcagcatcagccgtacgtctgacgtcaatgctgcaccgggctaccaaaactttgttggttttacagcgaacggtgtgccggtatttagctactacaacgttaacaaagctcgtattcagggcgtggaaaccgaactgaaaattccgttcaacgatgaatggaaactgtcgatcaactacacctacaacgatggtcgtgatgtcagcaacggcgaaaacaaaccgctatccgatctgccgttccatactgctaacggtacgctggactggaaaccgctggcgctggaagactggtcattctatgtttctggtcactataccgggcagaaacgagccgacagcgcgacggctaaaacaccgggcggttataccatctggaataccggcgcggcctggcaggtgactaaagacgtcaaactgcgcgcaggcgtgctgaaccttggcgacaaggatctcagtcgtgacgactacagctataacgaagacggacgtcgttactttatggcagtggattatcgcttctga

SEQ ID NO: 262432 - DNA, 837 bp, Klebsiella pneumoniae
atggaaatgctcgaagagcaccgctgttttgaaggctggcagcaacgctggcgacacgactccagtaccttaaactgcccgatgacgttcagtatctttctcccaccacctcgtgatcacaccccgcctccagtgctgtactggctttccggattaacctgcaatgacgagaacttcaccaccaaggcgggtgcccagcgcgtggcggcagaactggggattgtactggtaatgccagacaccagcccgcgcggcgaacaggttgccaacgacgatggctacgatttaggccagggcgcaggcttttatcttaatgccacgcaaccgccttgggcgacgcattaccggatgtatgattatctgcgcgatgaattaccggcgctgattcagtcgcaatttaatgtcagcgaccgctgcgctattagcggtcattcaatgggtggtcacggtgcgctaattatggcgctgaaaaatccgggtaaatacactagcgtttcggcctttgcgccaattgtgaatccgtgcagcgtcccgtggggaatcaaagcgtttagcacctatttaggtgaggacaaaaatgcatggctggaatgggacagttgcgcgctgatgtatgccagtaacgcgcaggatgcgatcccgacgcttatcgatcagggtgataatgatcagtttcttgccgaccagctgcaacccgcagtgctggcagaagccgcgcgccagaaagcgtggccgatgacgctgcgtattcagccgggatatgatcacagttactacttcatcgcctcttttatagaggatcatttgcgcttccatgcgcaatatttactgaagtga

SEQ ID NO: 262433 - DNA, 1158 bp, Klebsiella pneumoniae
atggagcgcaacgtcacgctcgattttgttcgcggcgtcgccattctggggatcctgctattaaacatcagcgcctttgggctaccaaaggcggcttatctcaatcccgcctggtacggcgctattacgccgcaggatgcatggacctgggcatttctcgatctcatcggccaggtgaaattcctcacgctttttgcgctgctgtttggtgctggcctgcaaatgttgctgccccgtggcagacgctggatccagtcgcggttaacgctgttagtcttgctgggctttattcacggtttattgttctgggacggcgatattctgctggcttacgggctggtgggcttaatctgctggcggctggtgcgcgatgcgccatcagtaaaaagcctgtttaatacaggcgtcatgctttatctggtggggcttggcgttttgatgttattggggctgatttccgacagccagaccagccgcgcctggacgccggatgcatcggctattttgtatgaaaaatactggaagcttcacggcggcgttgaagcgatcagtaatcgtgccgacggtgttggcaacagtttactggcactgggcgcacagtatggctggcaactggcagggatgatgctcattggtgcggcgctgatgcgcagcggctggctgaaagggcagttcagcttacgtcactatcgtcgtactggttttgtgctggtggcgattggggtgaccattaaccttcctgccatcgccctgcaatggcagctggactgggcgtatcgctggtgtgccttcttacttcaaatgccgcgggaactgagtgcgccgtttcaggcgattggctatgcgtcgctgttttatggtttctggccgcaattaagccgctttaagctggtgcttgcgatcgcctgcgtcggacggatggcgctgaccaactatctattgcaaacgctgatttgtaccacgcttttttaccacctcggtttgtttatgcattttgaccgcctggagctgctggcgtttgttattccggtatggctggcgaatatcctcttctctgttatctggctgcgttacttccgccaggggccggtggaatggctctggcgtcagttaactttgcgtgctgccggaccggcaatatctaaaacatcaagataa

SEQ ID NO: 262434 - DNA, 1041 bp, Klebsiella pneumoniae
atgatcaccattcgtgatgtagcgcgtcaggctggcgtctctgtggcaacggtttcccgagtgctcaataacagtacgctggtcagtgccgacacgcgtgaagcagtaatgaaagccgttagtgagctggattatcgaccaaatgccaatgcccaggcgctggcaactcaggttagcgacaccattggcgtggtggtgatggacgtttctgatgcgtttttcggcgcgctggtaaaagcggtggatctggtcgcccagcagcatcagaaatacgtgctaatcggcaatagctatcatgaagcggaaaaagagcgtcacgccattgaggtgttaattcgccagcgttgtaatgcattgattgttcactcaaaagcattgagtgacgatgaactggcacaatttatggataacattcccggtatggtgttaatcaaccgcgttgtgccggggtacgcccatcgttgcgtttgcctggataatctcagcggtgcccgaatggcgacgcgcatgttgctgaataacggtcatcaacgtattggttatctttcttccagtcacggcattgaagatgacgccatgcgtaaagcaggctggatgagtgcgttgaaagagcaggatattattccgccggaaagctggattggcactggcacgccggacatgccgggcggtgaggcggcgatggttgaactgctggggcgcaatctacaacttaccgctgtatttgcttataacgacaatatggccgctggcgcactgacagcattaaaagataatggcattgcgattccgttacatctctcaatcatcggtttcgatgatattcccatcgcccgttacaccgacccgcaattaacgactgtgcgttatcccattgcttcaatggcgaaattagccaccgaactggccttgcagggggcagcaggcaatattgatccgcgtgccagccactgttttatgccgacgttagtgcgtcgccattctgtcgcaacgcgccagaatgcggcggcgatcactaactcaacaaatcaggcgatgtaa

SEQ ID NO: 262435 - DNA, 1521 bp, Klebsiella pneumoniae
atggtcagctcaacgactccgtcttccggggaatacttgttggaaatgagcggtatcaacaagtcttttcctggtgttaaggcacttgataacgttaatttaaaagtccggccacattctatccatgcattaatgggggaaaacggcgcaggaaaatcaacattattaaaatgcctgtttggtatttatcaaaaagactccggcaccattttattccagggtaaagagatcgatttccattctgccaaagaagcgctggaaaatggtatttcgatggtacaccaggagttaaacctggtattacaacgttcggtgatggataacatgtggctggggcgatatcccaccaaaggcatgtttgtcgatcaggacaaaatgtaccgcgaaaccaaagcgatttttgatgaactggatattgatatcgatccgcgtgcgcgcgtcggcacattatccgtttcgcaaatgcagatgatcgaaatcgccaaagcgttttcctataacgcgaaaattgtgattatggatgaaccgacttcttcgttaaccgaaaaagaggtcaatcatctgttcactattattcgtaaattaaaagagcgcggctgcggtattgtttatatctcacataaaatggaagaaatcttccagttatgtgatgaagttaccgtattgcgcgacggtcagtggatcgccactgaaccgctggcaggactgacgatggacaagatcatcgccatgatggttgggcgttctcttaaccagcgtttccctgacaaagaaaacaagccgggcgaagtgattcttgaagtgcgtaacctgacgtcgctgcgccagccgtcgattcgcgatgtctcgtttgatctgcataaaggggagatcctcggtattgccggtctggtgggggcgaaacgtaccgatattgttgagacgttatttggtattcgcgagaaatcggctggcaccattacgttgcacggcaaaaagatcaataaccataatgccaacgaagccataaaccacggatttgcactggtaactgaagagcgccgctcaacgggaatttatgcctatctggatatcggttttaactcgttaatttccaatattcgcaactacaaaaataaagttggtttactggataactcgcggatgaaaagtgatacccagtgggtgattgattcgatgcgggtaaaaacaccggggcatcggacgcaaattggttcgctctccggtggtaatcagcaaaaggtgattattggtcgctggctgttaacgcaaccagaaatattaatgctcgatgaaccgacgcgcggtattgatgtcggggcgaagtttgagatctatcagttaattgccgagctggcgaagaaaggcaaggggattattattatctcctccgaaatgccagagttgttagggataacagaccgtattctggtcatgagtaatggtctcgtttccggaattgtcgatacaaaaacaacaacgcaaaacgaaattctgcgtcttgcgtctttgcacctttaa

SEQ ID NO: 262436 - DNA, 1236 bp, Klebsiella pneumoniae
atgttaacgaaagatctttcgattactttttgcggcgtgaagtttcccaacccgttctgcctctcttcttcgccggtaggcaactgctatgagatgtgtgccaaagcctacgacactggctggggcggcgtggtgtttaaaacgatcggcttttttatcgccaacgaagtctcgccgcgttttgatcatctggtgaaagaagataccggttttatcggcttcaaaaatatggagcagattgctgaacatccgttggaagataatctggccgccctgcgtcggctgaaagaagattacccggacaaagtattgatcgcttcaatcatgggcgaaaatgagcagcaatgggaagagctggcgcgtctggtgcaagaagctggcgcggatatgatcgagtgtaacttctcctgtccgcaaatgacttctcatgcgatgggtagcgatgtcgggcaaagcccggagctggtagaaaaatattgtcgggcagtaaaacgtggttccacgctgccaatgctggcgaagatgacgccgaatatcggtgatatgtgcgaagtggcgctggcggcgaagcgcggcggcgcagatggcattgcggcgattaacaccgttaaatccatcaccaatatcgatcttaatcagaaaatcggtatgccgatcgttaacggtaaatcgagtatttccggatattccggtaaagcggtaaaaccgatcgccctgcgcttcattcagcaaatacgtacccatccagagctgcgcgatttcccgatcagcggtatcggcggcattgaaacctgggaggatgcggcggagtttttattgctcggcgcagcaacgttacaggtgaccaccggcattatgcagtacgggtatcggatagtggaagatatggcgagcgggttgtcgcattatctcgccgatcagggatttgattcgttgcaggagatggtaggtctggcgaataacaatattgttccggcggaagatttagaccgcagttatattgtctatccccgtatcaatctcgataaatgtgttggctgtggacgctgttatatttcctgttacgacggcggtcaccaggcgatggaatggagcgagaaaacacgcacgccgcattgtaataccgagaaatgcgtgggttgtctgctttgtggtcacgtctgcccggtgggttgtattgagcttggggaagtgaagtttaagaagggagagaaagaacactctgtaacattgtaa

SEQ ID NO: 262437 - DNA, 1239 bp, Klebsiella pneumoniae
atgccgcaacaaaattatctggatgaactcactccggcttttacaccgttactggcgattaaagaagcctctcgctgtttattatgccatgacgccccctgtagtcaggcttgcccggcacagaccgatccggggaaatttattcgctcaatctactttcgtaattttaaaggcgctgccgagacaattcgcgaaaataatgccctcggtgccgtttgtgccagagtgtgcccgacggagaaattatgccaaagcggttgtacccgtgccggtgttgatactcccattgatatcggtcgcttacagcgttttgttactgattttgaacaacaaactgggatggaaatttatcagcccggtactaaaacgctcggcaaagtcgccattattggcgcaggtcctgccggattgcaggccagtgtgacgctgacaaaccagggttatgacgtcacgatctatgagaaagaagcacaacccggtggctggttgcgtaacggcattccgcaattccggttaccgcaatcagtactggatgcagaaatcgcccgtattgaaaaaatgggcgtgaccattaagtgcaataacgaaatcggtaacacatttaccctggatcagctgaaagcggaaaaccgcgcggtactggtcaccgtggggttatcgagcggttcggggctaccactgtttgagcatagcgacgttgagattgccgtcgacttcttgcaacgtgcacgacaggcgcaaggcgatatcagcattccacaaagcgcattaattatcggcggcggtgatgtcgcgatggacgtagccagcacgctgaaagttctcggctgtcaggcggtaacttgcgtagcgcgtgaagagttagatgagtttccggcaagcgaaaaagagtttgccagcgctcgggagctgggcgtttcgatcatcgatggattcacgccagtagccgtggaaggcaataaagtcacgtttaagcatgtacggttaccgggcgaactgacgatggcggcagataaaattattctcgccgtcggtcagcatgccagactggatgcctttgcggagttagagccgcagcgtaacaccatcaatacacaaaattaccagacccgcgatccgcaagtctttgctgctggcgatattgttgagggggacaaaaccgtggtctatgccgtgaaaaccgggaaagaagccgccgaggcgattcatcactatttagagggagcttgctcatgttaa

SEQ ID NO: 262438 - DNA, 240 bp, Klebsiella pneumoniae
atggatgtacagcatttttttgtcgttgccgtttttttcctcattccgatattttgtttccgcgaagcatggaaaggctggcgcgcaggcgcgattgataaacgggttaaaaatgcaccggaaccggtgtatgtctggcgagcaaaaaatcccggactcttcttcgcttatatggtggcatatatcggcttcggaattttatctatcggcatgattgtttatcttattttctatcgttaa

SEQ ID NO: 262439 - DNA, 720 bp, Klebsiella pneumoniae
atgttaaagcgcgtgttcctcagcctgttagtcctgatcggcttgctgctgttgactgtgctcggcctcgatcgctggatgagctggaaaaccgcgccttatatctacgacgaattgcaggatctcccctaccgccaggtcggtgtggtgctcggcacagcaaaatattatcgtactggcgtaattaatcagtattatcgctaccgcattcaaggagcgattaatgcctataacagcggtaaggtaaattatctattactgagcggcgataacgcattgcaaagttataatgagccgatgaccatgcgcaaagatttaatcgctgctggtgtcgacccatcagatattgttctcgattacgcaggctttcgtacgctggattccatcgtgcgtacacgcaaagttttcgatactaatgatttcattattatcacccaacgtttccactgtgagcgggcattatttattgcgctgcatatggggattcaggctcagtgttatgccgtaccgtcaccgaaggatatgctgtcagtacgtattcgcgaatttgccgcccgtttcggtgcgctggctgacctttatatttttaaacgtgaaccgcgttttttagggccgctggtccctattccggctatgcaccaggtgccggaagatgcgcaggggtatcccgccgtcacgcccgaacagttacttgaattgcaaaagaaacaaggaaagtag

SEQ ID NO: 262440 - DNA, 885 bp, Klebsiella pneumoniae
atgcatccacgttttcaaaccgcttttgcccaacttgcggataacttgcaatctgcactggaacctattctggcagacaagtacttccccgctttgttgaccggggagcaagtctcatcgctgaagagcgcaacggggctggacgaagacgcgctggcattcgcactacttccgctggcggcggcctgtgcgcgtacgccattgtcgaattttaatgttggcgcaattgcgcgcggtgtgagcggaacctggtattttggtgccaatatggaatttattggtgcgacaatgcagcaaaccgttcatgccgaacaaagcgcgatcagccacgcctggttgagtggtgaaaaagcgcttgcagcgatcaccgttaactacacgccttgtggtcactgccgtcagtttatgaatgaactgaacagcggtctggatctgcgtattcatcttccgggacgcgaggcacacgcgctgcgtgactatctaccggatgcctttgggccgaaagatctggagattaaaacgctgctgatggacgagcaggatcacggctatgcgctgacgggtgatgcgctttctcaggcggcgattgcggcggcaaaccgttcgcacatgccttacagtaagtcgccaagcggtgtcgcgctggaatgtaaagacggtcgtattttcagcggcagctacgctgaaaacgccgcattcaacccgactctgccaccgttgcagggggcgttaattctgttgaatctcaagggttatgattacccggatatccagcgcgcggttctggcagaaaaagccgatgcgccgttgattcagtgggatgccacctccgcaacgctgaaagctctcggctgtcacaatatcgaccgcgtgcttctcgcttaa

SEQ ID NO: 262441 - DNA, 696 bp, Klebsiella pneumoniae
atgatggcgaatatctggtggtcattaccgctgacgttgattgtcttttttgccgcccgcaaactggcggcacggtataagtttcccttgcttaacccgttgctggtagcaatggtggtgatcattccttttttaatgctgaccggcatctcttacgacagctactttaaaggtagcgaagtgctaaacgatctgctgcaaccggcggtcgtcgcgctggcctatcctttatatgagcagctacaccagatccgcgcgcgctggaaatcgatcatcaccatctgttttatcggcagcgtggttgcgatggtgacggggacttctgtggcattgttgatgggcgcttcaccggaaatcgccgcgtcaatcctgccgaaatcagtcaccacgcctattgcaatggcggttggcggcagtattggcggtattccggcaatcagcgcagtttgcgtcattttcgtcggcatcctcggcgctgtgtttggccatacattgcttaatgcgatgcgtattcgtaccaaagctgcgcgcggtctggcgatggggacagcctcgcacgccctcggtacggcgcgctgcgccgagctggattatcaggaaggtgcgtttagttcgctggcactggtgttatgcgggataattacttcgctgatcgcaccgttccttttcccgattattctggcagtaatgggctaa

SEQ ID NO: 262442 - DNA, 399 bp, Klebsiella pneumoniae
atgagtaagacactgaacattatctggcaatatttacgtgcttttgtcctgatttatgcctgcctgtatgcaggcattttcattgcttcactgctaccggtaaccattccgggcagcatcatcgggatgctgatcctgtttgtcctgctggccttgcaaattcttccggcaaaatgggtcaatccggggtgctacgtactgattcgctatatggcgctattgtttgtgccgattggcgtaggcgtcatgcaatattttgatttgctccgcgcacagtttggcccggtagtggtttcctgtgcagtcagtacgctggtggtttttctggtggtgagctggagttcgcaactggtgcacggtgaacgtaaagtcgtaggtcagaaaggatcagaagaatga

SEQ ID NO: 262443 - DNA, 948 bp, Klebsiella pneumoniae; identical to SEQ ID NO: 9535

SEQ ID NO: 262444 - DNA, 501 bp, Klebsiella pneumoniae
atgacagaatcaacgtcccgtcgcccggcatatgctcgcctgttggatcgtgcggtacgcattctggcggtgcgcgatcacagtgagcaagaactgcgacgtaaactcgcggcaccgattatgggcaaaaatggcccggaagagattgatgccacggcagaagattacgagcgcgttatcgcctggtgccatgaacatggctatctcgatgacagccgatttgttgcgcgctttatcgccagccgtagccgcaaaggttatggacctgcgcgtattcgtcaggaactgaatcagaaaggtatttcccgcgaagcgacagaaaaagcgatgcgtgaatgtgacatcgactggtgcgcactggcgcgcgatcaggcgacgcgaaaatatggcgaacctttgccaactgtcttttcagaaaaagttaagatccagcgttttctgctctatcgtggctatctgatggaagatatccaggatatttggcgaaattttgccgactga

SEQ ID NO: 262445 - DNA, 498 bp, Klebsiella pneumoniae
atgactgacagtgaactgatgcagttaagcgaacaggttgggcaggcgctgaaagcccgtggcgcaaccgtaacaactgctgagtcttgtaccggtggttgggtagcgaaagtgattaccgatattgccggcagttccgcctggtttgaacgcggatttgtcacctacagtaacgaagcgaaagcgcaaatgatcggtgtacgcgaagagacgctggcgcagcatggcgcggtgagcgaacctgtcgtggtggaaatggcgataggcgcactgaaagcggctcgtgctgattatgctgtgtctattagtggtatcgccgggccggatggcggcagtgaagagaagcctgtcggcaccgtctggtttgcttttgccaccgcccgcggcgaaggtattacccggcgggaatgcttcagcggtgaccgtgatgcggtgcgtcgtcaggctactgcgtatgcattgcagaccttgtggcaacaatttctacaaaacacttga

SEQ ID NO: 262446 - DNA, 564 bp, Klebsiella pneumoniae
atgatagaaaccattactcatggtgcagagtggtttatcgggctgttccaaaagggcggagaggtgtttaccgggatggtgaccggcattcttccgctgttgattagcctgctggttatcatgaacgcactgattaattttatcggtcagcatcgtattgaacgttttgctcaacgttgcgccggtaaccctgtttcccgttacctgctgctaccgtgcattggcacgtttgtcttttgcaatccgatgaccttaagcctgggtcgctttatgccggaaaaatacaaacccagctactacgcggccgcctcttatagctgccactcaatgaatggcctcttcccccatatcaacccaggcgaactgtttgtttatcttggcattgccagcggtctgacaacactgaacctgccacttggcccactggcggtgagttatctgctggttggtctggtcaccaacttcttccgcggctgggtgaccgatctgaccaccgccatttttgagaaaaagatgggcattcaacttgaacaaaaagttcacctggcaggagcaacatcatga

SEQ ID NO: 262447 - DNA, 960 bp, Klebsiella pneumoniae
atgacgcgtattcggatcgaaaaaggaacgggtggctggggcggcccgcttgagctggaagccacgccgggcaaaaaaatcgtctatatcaccgccggtacccggcctgcgattgttgacaaactggcacagcttactggctggcaggctattgacggatttaaagaaggtgaacccgcggaggcggaaattggtgtcgcggtaatcgactgtggcggcacattacgctgcggcatttatccgaaacggcgtattcccaccattaatatccattcgacgggcaagtccggtccgctggcgcagtatattgtggaagatatttatgtctctggcgtgaaagaagaaaacatcactgtagtgggtgatgcgacaccacaaccctcttccgtgggccgtgactatgacaccagcaagaaaatcaccgaacaaagcgatggtttactggcgaaggtgggaatgggtatgggttctgccgttgccgtgttgtttcaatctggtcgtgacaccatcgacactgtattaaaaaccattctgccgtttatggcgttcgtctcggcgcttatcggcatcattatggcttccggtcttggcgactggattgcccacggtcttgctccgctggcgagccatccactggggctggtcatgctggcgctcatctgctccttcccgctgctttcacctttcctcggcccaggcgcagttatcgcacaggttatcggcgtattgattggcgtgcagattggcctcggcaatattccgccgcatctggctttacctgcactgtttgccatcaacgcgcaggcggcctgcgacttcatcccggtcggtttgtcgctggcggaagcccgtcaggacacggttcgcgtcggtgtcccttctgttctggtgagccgctttttaaccggcgcgccaactgtactgatcgcctggtttgtctccggttttatctatcaatag

SEQ ID NO: 262448 - DNA, 372 bp, Klebsiella pneumoniae
atgaccgttatttatcagaccaccatcacccgtatcggcgcgagtgccactgacgccctcagcgaccagatgctcatcacctttcgtgaaggcgcgcctgcggatctcgaagaatattgcttcattcattgccacggcgagttgaaaggtgcactccatcccggtttgcaattttcgctcgggcagcatcgctatccggtgaccgccgttggcagcgtggcggaagacaaccttcgcgaactgggtcatgtcaccctgcgcttcgatggtttaaacgaagcggaatttccgggcactgtccatgtggcaggccctgtccccgacgatatcgcgccgggatcggttttgaagtttgaatctgttaaggagtaa

SEQ ID NO: 262449 - DNA, 780 bp, Klebsiella pneumoniae
atgaatcaggttgccgttgtcatcggtggtgggcaaaccttaggcgcgttcctgtgccacggtctggctgccgaggggtatcgcgtcgcggttgtcgatattcagagcgacaaagccgcaaatgtggcacaagaaattaacgccgaatatggtgaaggaacagcgtatggttttggtgctgacgccaccagcgagcaaagcgttctggcgctctctcgtggggtagatgaaatctttggtcgcgtggatttgctggtctacagcgccggaattgcaaaagcagcctttatcagcgacttccagctcggcgattttgaccgttcgctacaagtgaatctggtgggttatttcctgtgtgcccgtgaattttcgcgtttgatgatccgcgacgggattcaggggcgcattattcagatcaactcgaaatccggcaaagtgggcagcaaacacaactctggttatagcgccgcgaaatttggtggcgtcgggctgactcaatcactggcgctggatctggcggagtacggcattacggtgcattcactgatgctcggtaatctgctgaaatcgccgatgtttcagtcgctattgccacaatatgcgaccaagctgggtatcaaaccggatcaagtcgagcagtattacatcgacaaagtaccgctcaaacgcggctgcgattatcaggatgtgctgaatatgcttctgttctacgccagtcctaaggcgtcgtactgcaccggacagtcgatcaatgtcaccggcggtcaggtgatgttctga

SEQ ID NO: 262450 - DNA, 360 bp, Klebsiella pneumoniae
atggtatccgcactcatcaccgtcgccgttatcgcctggtgtgcgcaactggccttaggcggttggcaaatttctcgttttaaccgtgctttcgacacactatgccagcaagggcgggttggcgtgggccgttccagcgggcgctttaaaccgcgggtcgtggtcgccatcgcgctagacgatcagcaacgcatcgtcgacaccttgtttatgaaaggactgaccgtcttcgcccgaccgcaaaaaattcccgcaattaccggtatgcatgcgggtgatttacagcccgatgtgatctttccccatgatccactatcacagaatgctctatcattggcgcttaaactgaaacgtggataa

SEQ ID NO: 262451 - DNA, 774 bp, Klebsiella pneumoniae
atgaaacctcgtcagcgtcaggccgccattctggagtatctgcaaaagcagggtaaatgctcggttgaagaattggcgcaatactttgacaccacaggcacaaccatccgcaaagatctggtcattctggaacatgccggaaccgtcattcgtacttatggcggagtggtgttgaataaagaggaatccgatccgcctatcgatcataaaactctcatcaacacccacaagaaagagctgattgcagaagctgccgttagttttatccatgatggcgattcgatcattcttgatgctggcagtaccgttttgcagatggttcccctgctctcgcgctttaataacatcacagtgatgaccaacagcctgcatatcgtcaatgcgctatccgaactggataacgaacaaactatcctgatgccaggcggaacatttcgtaaaaaatcggcctcatttcacgggcaactggcagagaatgccttcgagcatttcaccttcgataaattgtttatgggcaccgacggcatcgatctcaatgcgggcgtaaccacgttcaacgaggtttataccgtcagtaaggcaatgtgcaatgccgcgcgcgaagtgattttgatggcagactcatcaaagtttggccgtaaaagccccaacgtagtttgcagtcttgaaagcgtcgataagctaattaccgacgcaggtatcgatccggcgtttcgtcaggcgctggaaaagaaagggatcgatgtgatcataaccggagagagcaatgagtga

SEQ ID NO: 262452 - DNA, 966 bp, Klebsiella pneumoniae
atgagtgaagcactactgaacgcgggacgtcagacgttaatgctggagttacaggaagcaagccgtttaccggaacgtctgggcgatgattttgttcgcgccgccaatatcatcctgcactgcgaaggtaaagtggtggtttcgggaattggcaaatcgggccacattggtaagaaaatcgccgcaacgcttgccagcaccggcactcctgccttttttgtccatccggcagaggcattgcacggcgacctggggatgatcgaaagccgcgatgtgatgctgtttatctcttactccggtggcgcgaaggaactggatctgattattccgcgtctggaagataaatctatcgcgctgctggcgatgaccggcaaaccgacgtcaccgctgggcctggcggcgaaagcggtgctggatatttccgtagaacgcgaagcctgcccgatgcaccttgcgccgacttccagcactgtaaataccctgatgatgggcgacgcgctggcgatggcagtcatgcaggcgcgcggttttaatgaagaagattttgcccgttcacatccagccggtgcgctgggcgctcgcttgctgaacaaagtgcatcatcttatgcgtcgtgacgatgccatcccgcaggtggcgttaaccgccagcgtgatggacgcgatgctggaacttagccgcactggtctggggctggtggcggtatgtgacgctcaacaacaggtacaaggcgtctttaccgacggtgatttacgtcgctggctggttggcggcggcgcactcaccacgccagttaatgaagctatgacgacaggcggcaccacattacaggcgcaaagccgtgccatcgacgccaaagagatcctgatgaagcgcaaaatcactgccgcaccggtggtggatgaaaacggcaaactcaccggcgcaattaacctgcaggatttctatcaggccgggattatttaa

SEQ ID NO: 262453 - DNA, 1515 bp, Klebsiella pneumoniae
atgagtttttccgttgatgtgctggcgaatatcgccatcgaattgcagcgtgggattggtcatcaggatcgttttcagcgcctgatcaccacgctgcgtcaggtgctggagtgtgatgcctctgcgttgctacgttatgactcgcggcagtttattccgcttgccatcgacgggctggcgaaggatgtactcggtagacgctttgcgctggaagggcatccacggctggaagcgattgcccgcgccggggacgtggtgcgctttcccgcagacagcgaattgcccgatccctatgacggtttgattcccgggcaggagagtctgaaggttcacgcctgcgttggtctgccattgtttgccggacaaaacctgatcggcgcattgacgctcgacgggatgcagcccgatcagttcgatgttttcagtgacgaagagttacggctgattgccgcgctggcggcgggagcgttaagcaatgcgttgctgattgaacaactggaaagtcagaatatgctgccaggcgatgccgcgccgtttgaagcagtgaaacagacgcagatgatcggtctgtcgccaggtatgacgcaattgaaaaaagagattgagattgtggcggcgtccgatctcaacgtcctgatcagcggtgagacgggaaccggtaaggagctggtggcgaaagcgattcatgaagcctcgccacgggcggtgaatccgctggtctatctcaactgtgccgcactgccggaaagtgtggcggaaagtgaactgttcgggcatgtgaaaggagcgtttactggcgctatcagtaaccgcagcgggaagtttgaaatggcggataacggcacgctgtttctcgatgagatcggcgagttgtcgttggcattgcaggccaagctgctgcgggtgttgcagtatggcgatattcagcgcgttggcgatgaccgcagtttgcgggtcgatgtgcgcgtgctggcggcgactaaccgtgacttacgcgaagaggtactggcagggcgatttcgcgctgacttgttccaccgcctgagcgtgtttccactttcagtgccgccgctgcgtgagcggggcgatgatgtcattctgctggcggggtatttctgcgagcagtgtcgtttgcggctggggctctcccgcgtggtattaagtgccggagcgcgaaatttactgcaacactacaattttccggggaacgttcgtgaactggaacatgctattcatcgggcggtagtgctggcgagagcaacccgcagcggcgatgaagtgattcttgaggcgcaacattttgcttttcctgaggtgacgttgccgccgccagaagtggcggcggtgcccgttgttaagcaaaacctgcgtgaagcgacagaagcgttccagcgtgaaaccattcgtcaggcgctggcgcaaaatcatcacaactgggccgcctgtgcgcggatgctggaaaccgacgtcgccaacctgcatcggctggcgaaacgtctggggctgaaggattaa

SEQ ID NO: 262454 - DNA, 1440 bp, Klebsiella pneumoniae
atgtctattgtggtgaaaaataacattcattgggttggtcaacgtgactgggaagtgcgtgattttcacggcacggaatataaaacgctgcgcggcagcagctacaacagctacctcatccgcgaagaaaaaaacgtgctgatcgacaccgttgaccataaattcagccgcgaatttgtgcagaacctgcgtaatgaaatcgatctggcggatatcgattacatcgtgattaaccatgctgaagaggaccacgccggggcgctgaccgaactgatggcgcaaattcccgatacgccgatttactgtactgccaacgctatcgactcgataaatggtcatcaccatcatccggagtggaattttaatgtggtgaaaactggcgacacactggatatcggcaacggcaaacagctcatttttgtcgaaacgccaatgctgcactggccggacagcatgatgacttacctgacaggcgacgcggtgctattcagtaacgatgctttcggtcagcactactgcgacgagcatctgttcaacgatgaagtggatcagacggagcttttcgagcagtgccagcgttactacgccaatatcctgacgccgttcagccgcctggtaacgccgaaaattaccgagatcctgggctttaacttaccagtcgatatgatagcgacctctcacggcgtggtatggcgcgataacccgacgcaaattgtcgagctgtacctgaaatgggcggcggattatcaggaagacagaatcaccattttctacgacaccatgtcgaataatacccgcatgatggccgatgctatcgcccagggtattgcggaaaccgacccacgcgtggcggtgaaaattttcaacgtcgcccgaagcgataaaaacgaaatcctgaccaatgtcttccgctcaaaaggcgtgctggtcggcacttctacgatgaataatgtgatgatgccgaaaatcgccgggctggtggaggagatgactggtttacgcttccgtaacaaacgcgccagtgctttcggctctcacggctggagcggcggtgcggtggatcgtctttccacacgcctgcaggatgcaggtttcgaaatgtcgcttagcctgaaagccaaatggcgaccggaccaggacgctctggagttatgccgtgaacacggtcgcgaaatcgcccgtcagtgggcgctcgcgccgctgccgcagagcacggtgaatacggtggttaaagaagaaacctctgccaacacgacggctgacctcggcccacggatgcagtgcagcgtctgccagtggatttacgatccggcaaaaggcgagccaatgcaggacgttgcgccaggaacgccgtggagtgaagtcccggataacttcctgtgcccggaatgctctctcggcaaagacgtctttgacgaactggcatcggaggcaaaatga

SEQ ID NO: 262455 - DNA, 1134 bp, Klebsiella pneumoniae
atgagcaacggcattgtgatcattggttcgggcttcgccgcccgccaactggtgaaaaatattcgcaaacaggacgccagtattccattaactctgattgccgccgacagcatggatgagtacaacaaaccggatctcagccatgttatcagccaggggcaacgtgccgatgaccttacccgccagacggcgggtgaatttgccgagcagtttaatctgcacctgtttccgcacacctgggtgacggatatcgatgccgaagcccatgtggtgaaaagtcagaataatcagtggcaatacgacaagttagtgctggcaaccggagccagcgcctttgtcccgccagtgcctgggcgtgagttaatgctgacattaaatagtcagcaagagtatcgcgcctgtgaaacgcaactgcgggatgcccgacgcgtattgattgttggcggtggcttgattggtagcgaactggcgatggatttttgtcgtgcaggcaaagcggtcacgctaatcgacaacgctgccagtattctggcatcgttaatgccaccggaagtaagcagccgcttgcagcatcggttgacggagattggcgttcatctgctgttaaaatctcagttgcaggggctggaaaaaacggattctggcattctggcaacgctggaccgccagcgcagcatcgaagtggatgcggtaattgccgccaccggactgcgcccggaaaccgccctggcacgacgcgccgggctgacgattaatcgcggcgtttgcgtcgatagttatctgcaaaccagtaatgccgatatttatgcgctgggcgattgcacggaaattaacggtcaggtattgccgttcctccagccgattcaacttagcgcgatggtgctggcaaaaaatcttctcggcaataacacgccgctgaaactccctgcgatgctggtgaaaatcaaaacgccagaattaccgctgcatctggcaggcgaaacccagcgtcaggatttacgctggcaaattaataccgaacgccagggaatggtggcgcgcggtgttgatgatgccgaccagcttcgcgcctttgtggtcagtgaggatcggatgaaagaggcgtttggattgttgaaaacgttgccggtgtag

SEQ ID NO: 262456 - DNA, 2241 bp, Klebsiella pneumoniae
atggcaaaaaacacatcttgcggtgtccaactgcgtattcgtggcaaagtgcagggcgtcggttttcgtccgtttgtctggcagctggcacagcaattaaatcttcacggcgatgtctgtaatgacggcgatggcgtagaagtccggctgctggaagacccggaaacgtttcttgtgcagttgcatcagcactgcccgccgctggcgcgtattgatagcgtcgagcgtgagccgtttatctggtcacaactgcccaccgagttcactatacgccagagcacaggcggcaccatgaatacgcaaattgttcccgatgccgctacttgccctgcctgtcttgccgaaatgaataccccaggcgagcggcgttatcgttatccgtttatcaactgtactcactgtggcccgcgtttcaccattattcgcgccatgccttacgaccgcccgtttaccgtgatggcggcgtttccgttgtgtccggcttgtgacaaagagtaccgcgacccgctcgatcgtcgcttccacgcccagccggtggcctgcccggagtgtggcccacatcttgaatgggtaagtcatggtgaacatgcggaacaagaggcggcattacaggcagctatcgcacagttaaaaatgggcaacattgtcgccatcaaagggattggcggatttcatcttgcctgcgatgcacgtaacagtaacgcggtggcgacacttcgggcgcgcaaacatcgcccggcgaaaccgctggcggtcatgttgccagtggcagaaggtttaccagacgctgcgcgccagttgctcaccacacccgccgcgccgattgtgctggtggataaaaaatacgttcctgagctttgtgatgatatcgcccctggccttaacgaagttggggtgatgttgcctgcgaatccgcttcagcatttgctgttacaggaactgcaatgtccgctggtgatgacctccggcaacctgagcggtaaaccaccggctatcagcaacgaacaggcgctggcggatttgcagggcattgccgacggattcttgctacataaccgcgacatcgtgcagcggatggatgattcggtggtgcgcgaaagcggcgaaatgctgcgccgttcgcgggggtatgtgccggatgcgctggctttgcctccgggctttaaaaatgttccgcctgtgctgtgtctcggcgcggatctgaaaaacaccttctgcctggtgcgcggtgaacaagcggtgttgagtcagcatctgggcgatttaagtgacgatggcatccagatgcagtggcgcgaagcgttacgcctgatgcaaaacatctacgatttcactccgcaatacgttgtgcatgacgcgcatccgggctatgtctccagccagtgggcacgcgaaatgaatctgccgacgcaaacggtgctgcatcatcatgctcatgcggcggcgagtctggcagagcatcagtggccgctggatggcggtgatgtcattgcgttgacgctcgacggtatcggtatgggggagaacggcgctttgtggggcggcgaatgcctgcgggtgaactatcgcgaatgtgagcacctgggcggcttgcctgcggtggcgcttccggggggcgatttggctgcaaagcagccgtggcgtaacctgctggcgcagtgcctgcgctttgtgccggagtggcagaattaccctgaaacgacaagtgtgcaacagcaaaactggagcgtgctggcgcgggccattgagcgtggaattaacgcgccgctggcgtcatcgtgtgggcgtttgttcgatgctgtggcggcggcactgggctgtgcgccagccacgttaagttatgaaggtgaagcggcttgtgctctggaggcgctcgcagcctcatgcgacggagtgacgcatccggtgacgatgccgctggtggacaatcaactggatctcgccactttctggcagcagtggctgaactggcaggcaccggttaatcaacgcgcgtgggcgtttcatgatgcgctggcgcagggttttgccgcgttgatgcgtgagcaggccacgatgcgcggtatcactacgctggtatttagcggtggggttattcataaccgattgctgcgtacacgcctggcgcattatctcgctgatttcacattactctttccgcagagtttaccggcgggtgatggcggcttgtctctggggcagggggttattgctgcggcgcgcatcctgcatgctgcatag

SEQ ID NO: 262457 - DNA, 528 bp, Klebsiella pneumoniae
atgaaccgtttcatcattgctgacgcgagtaaatgtattggttgccgtacctgtgaagtggcgtgcgtggtttctcatcaggagaatcaggactgtgcatcgctgaccccggaaacttttttaccgcgaatccatgtcattaaaggtgtgaacatttctacggcaacagtctgccgtcagtgtgaagatgcaccgtgcgctaacgtctgcccaaatggtgctatcagccgtgataaagggtttgttcatgtgatgcaggaacgttgcattggttgcaaaacctgcgttgtggcttgcccgtatggcgcgatggaagtggtggtacgtccggtgattcgcaacagcggcgcagggctgaatgtacgggctgacaaagccgaagccaataaatgcgacctctgtaaccatcgtgaagacggcccggcgtgtatggcggcttgcccgacccatgcgctgatttgtgtcgatcgtaataaacttgaacaactgagcgcagaaaaacgccgccgtacggcgctgatgttctaa

SEQ ID NO: 262458 - DNA, 1014 bp, Klebsiella pneumoniae
atgatgacgacgatgctggaagtggcgaagcgcgccggggtttcaaaagcgaccgtttcccgcgtgctttcaggtaatggctacgtcagccaggagactaaagatcgcgtgtttcaggcggtagaagagagcggttaccgcccaaacttgctggcgcgcaatctgtcggcgaagagtactcagacgctggggctggtcgtgaccaacacgctttaccacggcatttattttagtgaattactctttcatgccgcgcgaatggcggaagagaaagggcgactgttgctattggcagatggtaaacacagcgccgaagaagagcgccaggcgattcagtatctgctggatttgcgctgcgacgccattatgatttacccgcgttttttaagcgtggatgagattgatgacatcattgacgcacacagtcagccgataatggtgcttaatcgccgcctgcgcaaaaacagcagccatagcgtctggtgcgatcataaacagaccagctttaacgccgtggcagagttgataaacgccggacatcaggagattgctttccttaccggctcgatggattctcccaccagcattgaacgtcttgccgggtataaagacgcgctggcgcagcatagtattgcgctcaatgaaaaacttatcgctaacggtaaatggacgcctgccagcggggccgaaggggtagaaacgttgctcgaacgtggggctaaatttagcgcgttagttgccagtaacgacgatatggcgataggtgcgatgaaagcgttacacgagcgcggcgtagcggtgccagagcaggtgtcagttatcggattcgatgatatcgccattgccccctatatcgttccggcgctctccagcgtaaaaattccggtgactgagatgattcaggaaattattggacggctgatttttatgctcgatggtggggatttctcaccgccgaaaaccttcagcggaaaactgatccgccgcggctccctcattgctctttcgcaataa

SEQ ID NO: 262459 - DNA, 1296 bp, Klebsiella pneumoniae
gtgctggaacggctgtcgtggaaaaggctggtgctggagctgctactttgctgcctcccggctttcatcctgggtgcattttttggttacctgccctggtttttgctggcatcggtaacaggactgcttatctggcatttctggaatttattgcgcctttcatggtggctgtgggtggatcgtagtatgaccccgccaccgggacgtggtagctgggaaccgctgctatacggattacaccagatgcagttgcgaaataaaaaacgccgccgcgaactgggcaatctgattaaacgctttcgtagcggcgcggagtcgctgcccgacgcggtggtgctgaccacggaagagggcggtattttctggtgcaacggtctggcgcaacagattcttggcttgcgctggccggaagataacgggcagaacatccttaacttgctgcgttacccggagtttacgcaatatctgaaaacgcgtgatttttctcgcccgcttaatctggtgctcaacaccgggcggcatctggaaattcgcgtcatgccttatacccacaaacagttgctgatggtggcgcgtgatgtcacgcaaatgcatcaactggaaggggcgcggcgtaacttttttgccaacgtgagccatgagttacgtacgccattgactgtgttacagggttacctggagatgatggatgagcaaccgctggaaggcgcggtacgtgaaaaagcgttgcacaccatgcgcgagcagacccagcggatggaagggctggtgaagcaattgctgacgctgtcgaaaatagaagccgcaccgacgcatttgctcaatgaaaaggttgatgtgccaatgatgctgcgcgttgttgagcgcgaggctcagactctgagtcagaaaaaacagacatttacctttgagatagataacggcctcaaggtgtctggcaacgaagatcagctacgcagtgcgatttcgaacctggtctataacgccgtaaatcatacgccggaaggcacgcatatcaccgtacgctggcagcgagtgccgcacggtgccgaatttagcgttgaagataacggaccgggcattgcaccggagcatattccgcgcctgaccgagcgtttttatcgcgttgataaagcgcgttcccggcaaaccggcggtagcggattagggttagcgatcgtgaaacatgcggtgaatcatcacgaaagtcgcctgaatattgagagtacagtaggaaaaggaacacgtttcagttttgttatcccggaacgtttaattgccaaaaacagcgattaa

SEQ ID NO: 262460 - DNA, 1203 bp, Klebsiella pneumoniae; identical to SEQ ID NO: 9493

SEQ ID NO: 262461 - DNA, 3144 bp, Klebsiella pneumoniae
atgaaaattctcagcctgcgcctgaaaaacctgaactcattaaaaggcgaatggaagattgatttcacccgcgagccgttcgccagcaacgggctgtttgccattaccggcccaaccggtgcggggaaaaccaccctgctggacgccatttgtctggcgctgtatcacgaaactccgcgcctttctaacgtttcacaatcgcaaaatgatctcatgacccgcgataccgccgaatgtctggcggaggtggagtttgaagtgaaaggtgaagcgtatcgcgcgttctggagccagaatcgggcgcgtaaccagccggacggtaatttgcaggtgccacgcgtagagctggcgcgctgcgccgatggcaaaattctcgccgacaaagtgaaagataagctggaactgacggcgacgttaaccggactggattacgggcgcttcacccgttcgatgctgctttcgcaggggcaatttgctgccttcctgaatgccaaacccaaagaacgcgcggaattgctcgaggagttaactggcactgaaatctacgggcaaatctcggcgatggtttttgagcagcacaaatcagcccgcacagagctggagaagctgcaagcgcaggccagcggcgtcgcgttgctcacgccagaacaagtgcaatcgctgacagcgagtttgcaggtacttactgacgaagaaaaacagttacttaccgcgcagcagcaagaacaacaatcactaaactggttaacgcgtctggacgaattgcagcaagaagccagccgccgtcaacaggccttgcaacaggcgttagccgtagaagaaaaagcgcaacctcaactggcggcgctcagtctggcacaaccggcacgaaatcttcgtccgcactgggaacgcatcgcagaacacagcgcggcgctggcgcatactcgccagcagattgaagaagtaaatactcgcttacagagcacaatggcgcttcgcgcgagcattcgccaccacgcggcgaagcagtcagcagaattacagcagcagcaacaaagtctgaatgcctggttacaggaacacgaccgcttccgtcagtggaacaacgaactggcgggttggcgtgcgcagttctcccaacaaaccagcgatcgcgagcatctgcggcaatggcagcaacagttaacccatgcagagcaaaaacttaatgcgcttgcggcgatcacgttgacgttaaccgccgatgaagttgctagcgccctggcgcaacatgctgagcaacgcccactgcgtcagcgcctggtcgcgctgcatggacagattgttccccaacaaaaacgcctggcgcaattacaggtcgctatccagaatgtcacgcaagaacagacgcaacgtaacgccgcacttaacgaaatgcgccagcgttataaagaaaagacgcagcaacttgccgatgtgaaaaccatttgcgagcaggaagcgcgcatcaaaacgctggaagctcaacgtgcacagttacaggcgggtcagccttgtccactttgtggttccaccagccacccggcggtcgaggcgtatcaggcgctggagcctggcgttaatcagtctcgattactggcgctggaaaacgaagttaaaaagctcggtgaagaaggtgcgacgctacgtgggcaactggacgccttaacaaagcaacttcagcgtgatgaaaacgaagcgcaaagcctccgacaagatgagcaagcacttactcaacaatggcaagccgtcacggccagcctcaatatcaccttgcagccacaggacgatattcaaccgtggctggatgcacaagatgagcacgaacgccagctgcggttactcagccaacggcatgaattacaagggcagattgccgcgcataatcagcaaattatccattatcaacagcaaattgaacaacgccagcagcagctcttaacggcattggcgggttatgcactgacattgccacaggaagatgaagaagagagctggttggcgacgcgtcagcaagaagcgcagagctggcagcaacgccagaacgaattaaccgcgctgcaaaaccgtatgcagcaactgacgccgattctggaaacgttgccgcaaagtgatgaactcccgcacagcgaagaaactgtagcgctggaaaactggcggcaagttcacgaacaatgcctcgcgttgcaaagccagcagcaaacgttgcagcaacaggaggctctggcagcgcaaagtctgcaaaaagcccaggcgcagtttgacaccgcgctacaggacagcatttttgacgatcagcaggcatttcttgcggcgttaatggatgagcagacgctaacgcagctggaacagctgaaacagaatctggaaaaccagcgccgtcaggcgcaaacgctggtcactcagacagctgaaacgctggcacagcatcagcaacaccgacctgacgggttggctctcactgtgacggtggagcagattcagcaagagttagcgcaaactcagcaaaagttgcgtgaaaacaccaccagtcagggcgagattcgccagcagctgaagcaggatgcagacaaccgtcagcaacaacaaaccttaatgcagcaaattgctcaaatgacgcagcaggttgaggactggggatatctgaattcgctaataggttccaaagagggcgataaattccgcaagtttgcccaggggctgacgctggataatttagtccatctcgctaatcagcaacttacccggctgcacgggcgctatctgttacagcgcaaagccagcgaggcgctggaagtcgaggttgttgatacctggcaggcagatgcggtacgcgacacccgtaccctttctggcggcgaaagtttcctcgtcagtctggcgctggcactggcgctttcagatctggtcagccataaaacgcgtattgactcgctgttccttgatgaaggttttggcacgctggatagcgaaacgctggataccgcccttgatgcgctggatgccctgaacgccagcggcaaaaccatcggtgtgattagccacgtagaagcgatgaaagagcgtattccggtgcagatcaaagtgaaaaagatcaacggcctgggctacagcaaactggaaagtatgtttgcagtgaaataa

SEQ ID NO: 262462 - DNA, 1269 bp, Klebsiella pneumoniae
ttggccttgctggtcgttatcctgcaagctatcactttattggctacggtgattggtagccgttctggtggttgtgatggtggtatgaaaaaagtcattttatctttggctctgggcacgtttggtttggggatggccgaatttggcattatgggcgtgctcacggagctggcgcataacgtaggaatttcgattcctgctgccgggcatatgatctcgtattatgcgctgggggtggtggtcggtgcgccaatcatcgcactcttttccagccgctactcactcaaacatatcttattgtttctggtggcgttgtgcgtcattggcaacgccatgttcacgctctcttcgtcttacctgatgctcgccattggtcgactggtatccggctttccgcatggcgcattttttggcgtcggcgcgatcgtgttatcaaaaattatcaaacccggcaaagtcaccgccgccgtggcggggatggtttccgggatgacagtcgccaatttgctgggcattccgctgggaacgtatttaagtcaggaatttagctggcgttacacctttttattgatcgctgtttttaatattgcggtgatggcatcggtctatttttgggtgccggatattcgcgacgaggcgaaagggaagctacgcgaacaatttcactttttgcgcagcccggccccgtggttaattttcgccgccaccatgtttggcaacgcaggtgtatttgcctggttcagctacgtaaagccatacatgatgtttatttccggtttttcggaaacggcgatgacttttattatgatgttagttgggctagggatggtgctggggaatgtgctaagtggccggatttcaggacgttattcaccactgcgcattgcggcagtaactgactttattattgtgctggcactgctgatgctctttttcttcggcggcatgaaaacaacgtcgcttatttttgcatttatttgttgcgcgggattatttgccctttcagcaccactgcaaatattgttactgcaaaatgccaaaggcggagagttattaggtgccgcaggtgggcaaatagcgtttaacctcggtagcgccgtcggcgcatattgcggtggtatgatgctgacgctggggctggcatataattacgtggcgctacctgccgccctgctttcgtttgctgcgatgtcgtcgttgctgctgtatggtcgctataagcgccagcaagcggcggatagtccggtgctggcgaaaccagtggggtag

SEQ ID NO: 262463 - DNA, 180 bp, Klebsiella pneumoniae
atgtcgttaacaacatcggggtatgtgcgttgcgcaatgccgtttggcgcaaatgatcattgcgactttgcagcaatgcacgccaccattcatcatctgatttatcttttatcgtcgccagttccgcaacaatatctggagatcttcgctgatatttatatcaaccttgatgaattatga

SEQ ID NO: 262464 - DNA, 285 bp, Klebsiella pneumoniae
atgcttcaaagtaatgagtacttttccggcaaagtgaaatcgatcggcttttccagcagcagcactggtcgcgccagcgtgggtgttatggttgaaggtgaatacaccttcagcaccgctgagcctgaagagatgacggtaatcagtggcgcgctgaatgtgttactgcctgacgcgaccgactggcaagtgtatgaagccggttcggtgtttaatgttcccggtcacagcgagtttcatctgcaagttgccgaacccacctcttatctgtgccgctatctgtaa

SEQ ID NO: 262465 - DNA, 678 bp, Klebsiella pneumoniae
atgagtgcgtcgttggcgatcctgaccatcggcattgtacctatgcaggaagttttgccgctcctgacagaatacattgacgaagataatatttcccatcatagcctgctggggaagttaagccgcgaagaagtgatggcggagtacgcgccagaagcaggcgaagacacaattctcacattattaaatgacaaccagctggcccatgtttcgcgtcgcaaagtggagcgtgacctgcaaggtgtggttgaagtgctcgataatcagggttatgacgtcattttattaatgagtacagcaaacattagtagtatgactgcgcgtaatacgatctttcttgagccgtcgcgaatattgcctccgctggtttcttctattgttgaagatcatcaggtgggggttatcgttccggttgaggagttgctgaccgttcaggcgcaaaaatggcaaattttgcagaaaccgccagtattttcattgggtaaccccattcatgattcggaacaaaaaatcattgatgccggaaaagaattactggaaaaaggtgcagatgtcatcatgctggattgtttgggatttaaccagcgtcatcgcgatttactgcaaaaacagctcgatgttcctgttttgctctctaacgtattgattgcacggctggctgcggaattactgatgtaa

SEQ ID NO: 262466 - DNA, 192 bp, Klebsiella pneumoniae
atgccaacgaaaccgccttatcctcgtgaagcatatatagtgacgattgaaaaaggaaaaccaggacagacggtaacctggtaccaactcagagccgatcatcctaaaccagactcgttgatcagtgaacatccgaccgctcaggaagcgatggatgcgaaaaaacgctatgaggaccctgacaaagagtga

SEQ ID NO: 262467 - DNA, 525 bp, Klebsiella pneumoniae
atgacacaacctctttttctgatcgggcctcggggctgtggtaaaacaacggtcggaatggcccttgccgattcgcttaaccgtcgatttgtcgataccgaccagtggttgcaatcacagctcaatatgacggtcgcggagatcgtcgaaagggaagagtgggcgggattccgcgccagagaaacggcggcgctggaagcggtaactgcgccatccaccgttatcgccacgggcggcggcattatcctgacggaatttaatcgtcactttatgcaaaataacgggatcgtggtttatttgtgtgcgccagtatcagtcctggttaaccgactgcaagctgcaccggaagaagatttacggccaaccttaacggggaaaccgctgagcgaagaagttcaggaagtgctggaagaacgcgatgcgctttatcgcgaagttgcgcatattatcatcgacgcaacaaacgaacccagccaggtgatttctgaaattcgcagtgccctggcacagacgatcaattgttga

SEQ ID NO: 262468 - DNA, 459 bp, Klebsiella pneumoniae
atgacaatttgggtggatgccgacgcgtgtcccaatgtaattaaagagattttgtatcgcgcggcggaacgtatgcagatgccgctggtactggtagcaaatcagagtttacgcgtgccgccatcgcgatttattcgtacgctgcgcgtcgcggcaggtttcgacgttgccgataacgaaattgtccggcagtgtgaagcgggcgatttggtgatcaccgcagatatacctttggctgctgaagccatcgagaaaggcgctgcggcgcttaatccgcgcggcgaacgttacacgccagcgaccattcgtgagcgcctgacgatgcgcgattttatggataccttacgtgccagtgggatccagaccggcggaccagatagcctttcacaacgtgaccgccaggcctttgccgcggagctggagaagtggtggctggaagtgcaacgtagtcgtggctga

SEQ ID NO: 262469 - DNA, 1116 bp, Klebsiella pneumoniae
atgttcccaaaaataatgaatgatgaaaactttttcaaaaaagcggcggcgcatggggaggaacctcctttaactcctcaaaacgaacatcagcgatccgggctgcgcttcgcccgtcgcgtcagactaccccgcgcggttggcctggctggcatgttcttaccgattgcttcaacgctggtttcgcacccgccgccgggctggtggtggctggtgttggtcggctgggcgttcgtctggccgcatttagcctggcagatagcgagcagggccgtcgatccgcttagccgggaaatttacaacttaaaaaccgatgcagtattagcgggaatgtgggtaggcgtaatgggcgtaaacgtgctgccttccaccgcgatgttgatgattatgtgtctgaatttgatgggggcaggcggcccccgtctgtttgtcgcgggtctggtattgatggtggtttcctgtcttgtcacccttgaactgacgggcatcaccgtgtcgttcaatagtgcgccgctggaatggtggctctcccttcccattatcgtcatttatcctctgctgtttggctgggtcagctaccagacggcgactaaactggcggaacataaacgcaggttgcaggtcatgagtacccgcgacggtatgacgggcgtgtataaccgacgtcattgggaaactatgttacgcaatgaatttgataactgtcggcggcataaccgcgatgcgacattactgattatcgatatcgaccatttcaagagcatcaacgatacctggggccatgatgtgggcgatgaagcgattgtggcgcttacccgacaattacaaataaccctgcgcggtagcgatgtgattggtcggtttggcggcgatgagtttgcggtaatcatgtccggtacgccagctgagagcgccattaccgccatgttacgagtgcatgaaggattaaatacgttacgcctgccgaatacgccgcaggtgatgttacggattagtgtgggggttgcgccgctgaacccacaaatgagtcactatcgcgagtggttgaaatcggcagatttggcgctctacaaagcaaagaaagccggacgtaaccgcaccgaagtggcggcctga

SEQ ID NO: 262470 - DNA, 321 bp, Klebsiella pneumoniae
atgaaaataacattactggttaccttgcttttcggtctggtttttttaaccaccgtcggcgctgccgagagaaccttaaccccgcaacaacagcgtatgacctcctgtaatcagcaggcgacggcgcaggcgttgaaaggggatgctcgtaagacctacatgagtgattgcctgaagaacagcaagtctgcgcctggtgaaaaaagtttgacgccacagcagcaaaagatgcgcgaatgtaataatcaagcaacgcaacaatctctgaaaggtgatgatcgtaataagtttatgagcgcctgcctcaagaaagccgcctga

SEQ ID NO: 262471 - DNA, 1416 bp, Klebsiella pneumoniae
gtgaaacaaagcactattgcactggcactcttaccgttactgtttacccctgtgacaaaagcccggacaccagaaatgcctgttctggaaaaccgggctgctcagggagatattactgcacccggcggtgctcgccgcttaacgggtgatcagaccgccgctctgcgtgattctcttagcgataaacctgccaaaaatattattttgctgattggcgatgggatgggggactcggaaattactgctgcacgcaattatgccgaaggtgcgggcggcttttttaaaggtatcgatgccttaccgcttaccggacaatacacacactatgcgctgaataaaaaaaccggcaaaccggactacgttaccgactcggctgcatcagcaaccgcctggtcaactggtgtcaaaacctataacggtgcgctgggcgtcgatattcacgaaaaagatcacccaacgattctggaaatggcaaaagccgcaggtctggcgaccggtaacgtttctaccgcagagttgcaggatgccacgcccgccgcgctggtggcgcatgtgacctcgcgcaaatgctacggtccgagcgcgaccagtgaaaaatgtccggataacgctctggaaaaaggcgggagaggatcgattaccgaacagctgcttaacgcccgtgccgatgttacgcttggcggcggcgcaaaaacctttgctgaaacggcaaccgctggcgaatggcagggaaaaacgctgcgtgaacaggcacaggcgcgtggttatcagctggtgagtgatgctgcatcgctaaatgcggtgacggaagcgaatcagcaaaaacccctgcttggcctgtttgctgacggcaatatgccagtgcgctggctaggaccgaaagcaacgtaccacggcaatatcgacaagcccgcagttacctgtacgcctaatccgcaacgtaatgacagcgtaccgaccctggcgcagatgaccgacaaagccattgaattgttgagtaaaaatgagaaaggctttttcctgcaagttgaaggtgcatccatcgataaacaggatcacgctgcgaatccttgtgggcaaattggcgagacggtcgatctcgatgaagccgtacaacgtgcgctggaattcgctaaaaaggatggcaacacgctggtcatagtcaccgctgatcacgcccacgccagccagattgtcgcgccggacaccaaagcgccgggcctcacccaggcactaaataccaaagatggcgcagtgatggtgatgagttacgggaactccgaagaggattcacaagaacataccggcagtcagttgcgtattgcggcgtatggcccgcatgccgccaatgttgttggactaaccgaccagaccgatctcttctacaccatgaaagccgccctggggctgaaataa

SEQ ID NO: 262472 - DNA, 261 bp, Klebsiella pneumoniae
atgaaaaatctcattgctgagttgttatttaagcttgcccaaaaagaagaagagtcgaaagaactgtgcgcgcaggtagaagctttggagattatcgtcactgcaatgcttcgcaatatggcgcaaaatgaccaacaaaggttgattgatcaggtagagggggcgctgtacgaggtaaagcccgatgccagcattcctgacgacgatacggagctgctgcgcaattatgtaaagaagttattgaagcatcctcgtcagtaa

SEQ ID NO: 262473 - DNA, 1095 bp, Klebsiella pneumoniae
atggaaaaactgcgggtaggaatcgtttttggtggtaaatcagcggaacatgaagtgtctctgcaatcggcaaaaaacattgtcgatgccattgataaaagtcgcttcgacgttgtgctgctgggcattgataaacaagggcaatggcacgtcagcgatgccagcaattatctgctaaatgcagacgatcctgcccatattgcgttgcgcccttcggcgaccagccttgcgcaggtgcctggtaaacatgaacatcagcttatcgacgcgcaaaacggtcagccgttgccgacggtggatgtcattttcccgattgtccacggtacgctgggcgaagatggttccttgcagggaatgctgcgggtcgccaatttaccgtttgtaggttctgatgttctggcttcagcggcctgtatggataaagatgtcaccaaacgtctgctgcgcgatgccgggctgaacattgcgccatttattaccctgacgcgcgctaatcgtcacaacatcagttttgccgaagtggagtctaaactggggttaccgctgtttgtaaaaccggctaatcagggctcttctgttggtgtcagcaaagtaaccagtgaagaacagtacgcaattgccgtcgatctggcgttcgagttcgaccataaagtgatcgttgagcaagggatcaaaggtcgtgagatcgaatgcgcagttctgggcaacgacaatccgcaagccagcacctgtggcgagatcgtactcaccagcgatttttatgcctacgacaccaagtacattgacgaagatggcgcgaaagtggtagttccggcagccattgcgccagaaatcaacgataagatccgggcgattgccgttcaggcttatcagacgttgggatgcgcaggcatggcgcgtgtagacgtgtttttaaccccagagaacgaagtggtgatcaacgagatcaacacactgcctggcttcaccaacatcagtatgtatccgaagctgtggcaagccagcggtctgggttacaccgacctgatcacccgtttgattgagctggcgctggagcgtcacgctgcggataacgcattgaaaaccacaatgtaa

SEQ ID NO: 262474 - DNA, 213 bp, Klebsiella pneumoniae
atgaacttgcctgtaaaaatccgccgtgactggcactactatgcgttcgccattggccttatattcattcttaatggcgtggtggggttactgggatttgaagcaaaaggttggcagacctatgccgtcggtctggtgacgtgggtgattagtttctggctggcggggctgattattcgtcgtcgcgatgaagaaactgaaaacgcccaataa

SEQ ID NO: 262475 - DNA, 330 bp, Klebsiella pneumoniae
gtggatatcgaaaactcggttatcaccaccaccttaaccgagggtgctattggctacgccaaacttgatacccgcaagggctaccaaatcataggggttattcgcctggcagatggtagtcatccaccactggggattagcgtaaaagatgaaaccagccacaaagaattaggactggttgctgatggcggctttgtatacctcaacggcattcaggatgataacaaacttgctttacgctggggtgacaaatcttgttttattcaaccacccaatagcagcaacttaaccaccggaacggctattttaccgtgtattagccaaaattaa

SEQ ID NO: 262476 - DNA, 750 bp, Klebsiella pneumoniae
atgcgctacttaaatacaaagaatatcattgcagcaggagtattactctcctgtatgagcagcattgcctggggtgccatcatcccggatcgtacccgtatcataatgaatgagtcagataaaggcgaagcattaaaacttactaatcaaagtaaaaacctgccctatctggcccaaacatggatagaagatacgaaaggcaataaatcgcgtgactttattgtcactgttcctccaatggtgcgtttaaatcccagtgagcaaattcaaataagaatgataactcaggaaaaaattgctcaacttcctaaagacagagaaacgctcttctattttaacgtgcgagaaatatcgcccaaaacagataaaaaaaatgtgatgcaagtcactatgcagcacgcattgaaactattctggcggccaaaagccattgaattagaagacgatggggtaatgacttacgaaaaagttgaaatcattcgtagaaatgacggttcgatccgctttaacaataagatgccttatcacgttacgctgggttatatcggaacaaatggggtaacgatgttaccacaaacgcaaagcttaatggtaaccccttttagctatgcaaatacgcagtttaaaaatgttccgtcaacttttcaggtgggttatatcaatgactttggtggattaagtttttatgaaataaactgccctgtagtaaataacatttgtaatatttctgtagccaaccgagatcaataa

SEQ ID NO: 262477 - DNA, 1065 bp, Klebsiella pneumoniae
atgcgctacttgttaattgttattactttttttatgggttttagttcattacctgcatgggcaatggactgctatgctgaacatgaaggtggaaataccgttgtcattggttacgtaccaagaatctctatccccagcgatggtaaaaaaggtgataaaatctggcaaagcagtgaatattttatgaatgttttctgtaataatgcactaccaggcccatctccaggagaagaatacccatctgcatgggcaaatataatgatgttgttagcatcaggtcaagacttttataatcaaaactcttatactttcggtgtaacttataatggggttgattatgattctacatctccactacctattgcagcacctgtatgtattgatataaaaggagccggaaccttcgggaatggctacaaaaagcccgcagtctgtagtggcggtcctgaaccgcaattatcagtaacttttccagtacgagtgcagctatatattaagctagctaaaaatgccaataaagtaaataaaaaacttgtattacctgacgaatatatagcacttgaatttaaaggtatgagcggagcaggtgctatagaagtagataaaaatctgaccttcaggattcgcggattaaataacattcatgtccttgactgctttgttaatgttgatctggaaccagctgatggcgttgtcgactttggtaaaataaattcccgaacaattaaaaataccagcgtgagtgagacgtttagcgtagtcatgaccaaagatccgggtgcggcctgtactgagcagtttaatattttagggagttttttcactacggatattttgagtgattatagccatctggatataggtaatggtctgctattgaagatatttcataacgatggaacagcaacggaatttaaccgcttctcacaatttgcttctttttcatcgtctagtgcgccttcggtcaccgcaccattcagggcagaactgagtgcgaacccggcagaaacggttgttgagggaccgtttagtaaagacgtaatcctgaaaatcacctataactag

SEQ ID NO: 262478 - DNA, 201 bp, Klebsiella pneumoniae; identical to SEQ ID NO: 127383

SEQ ID NO: 262479 - DNA, 630 bp, Klebsiella pneumoniae
atgattttattcgccgactataacaccccttatcttttcgctatttcctttgtactgttgatcggcctgttagaaatttttgcgcttatctgcggtcacatgctctccggtgctcttgatgcacatcttgaccattatgattctataaccacaggtcatattagccaggcacttcattatctcaatattggaagattgccagctctcgtcgttctctgcttactggctggtttttttggtcttattggcatcctgttgcagcatgcctgcatcatggtctggcaatcaccactgtcgaacctgttcgtggttcctgtcagtttactgtttacgattattgcggtgcattataccggtaaaatagttgcgccctggattccacgcgaccatagttcagctattacagaagaagaatatattggtagcatggcgttaattaccggtcatcaagccacttcaggtaatccctgcgaaggaaaactcaccgatcaatttggccaaatacattatttactactggagcctgaagaaggaaaaattttcactaaaggagacaaagtgttaattatttgccgactttctgcaacgcgatatttggcggaaaataatccctggccccaaatattgtaa

SEQ ID NO: 262480 - DNA, 1662 bp, Klebsiella pneumoniae
atggatgatattgttaattctgtgccctcctggatgtttaccgcaattattgccgtatgcattctgtttattattggaattattttcgccaggctctatcgtcgcgcttcggcagagcaagcttttgttcgtactggtttaggtgggcaaaaagtggtaatgagcggtggcgcaatcgtgatgccgatctttcatgaaataatccccatcaatatgaatactctgaagctggaagtcagccgctcaaccattgatagcctgattacgaaagatcgtatgcacgtcgatgtagtagtcgctttctttgtgcgggtaaaaccttcagtagaagggattgccaccgctgcccagacgctggggcaacgcaccctgtcgcctgaagacttacgtatgttggttgaagataaatttgtcgatgccctccgtgcaacagctgcgcaaatgaccatgcatgagttacaggatacccgcgagaactttgtgcagggggtgcaaaatacagtggcagaagacctgtcgaaaaacggtctggaactggagagcgtttcacttaccaactttaaccagacctcgaaagaacatttcaatccgaacaatgcctttgacgccgaaggtttaaccaaactgactcaggaaacagagcgccgtcgccgcgaacgtaacgaagttgaacaggatgtagaagttgcggtgcgtgaaaaaaatcgcgatgcgctatcgcgcaagctggagattgaacagcaagaagcgtttatgacgcttgagcaggagcagcaggttaaaacccgtactgccgaacagaatgcacgtattgcggcttttgaagctgaacgtcgtcgtgaagcagagcagacacgaattctggctgaacgacagattcaggaaacagaaatcgaccgcgaacaggccgtccgctcaagaaaggttgaagctgaacgtgaagttcgcattaaagagatcgaacagcagcaggtcaccgaaatcgctaaccagacgaaatcgatcgctattgccgccaaatcggaacaacagtcccaggcagaagcgcgtgctaatctcgcacttgcagaagcggtaagcgcccaacaaaacgtagaaaccactcgccagactgccgaagccgatcgtgctaaacaagttgccctaatcgctgccgcgcaggatgcagaaaccaaagcggttgaactgaccgtgcgggcgaaagcagaaaaagaagccgcagagatgcaggcggcggctatcgttgagttagccgaagctacacgtaaaaagggtctggcggaagcagaagcacaacgtgcgctgaacgatgctatcaacgtactttctgatgaacaaaccagccttaaattcaaactggccttgttgcaggcgctgcctgcggtaatagagaaatccgttgagccgatgaagtcaatcgacggtatcaagattattcaggtcgatggtctgaatcgtggcggcgctgcgggtgatgcaaacacgggtaatgtggggggcggaaacctggcggaacaagcattatcagccgctctctcttaccgcacgcaggcaccgctgattgactccttgctcaatgaaattggcgtttcaggcggctcactggcggcattgacttcacccttaacctcaacaactcccgtcgaagaaaaagcagagtaa

SEQ ID NO: 262481 - DNA, 2841 bp, Klebsiella pneumoniae
atgaagccgctctcttcaccgttacagcagtactggcagaccgttgttgagcggctgccagagcctttagccgaggaatcacttagcgcacaggcgaagtcagtacttacttttagtgattttgtgcaggacagcgtgattgcgcatccagagtggctgacggaactggaaagccaaccgccgcaggccgacgaatggcagcattacgcggcatggttgcaggaggcgctctgtaatgtgagtgacgaagccgggttaatgcgcgagctgcggctattccggcggcgcattatggtgcgcatcgcctgggcgcaaacgctggcactggttactgaagagagcatattgcagcagctcagctatctggcggagacgctgattgttgcggcgcgtgactggctgtatgacgcctgctgccgcgagtggggaacgccgtgcaatgcgcagggcgaagcgcaaccgctgctgattttaggcatgggtaagctgggcggtggggagctgaatttctcctctgatatcgatctgatttttgcctggccggaacatggttgtacgcagggtggacgccgggaactggataacgcgcagttttttacccgcatggggcagcggctgattaaagtgctggatcaaccaacgcaggatggcttcgtctatcgcgtggatatgcggctgcgtccgtttggcgaaagtggcccgctggtgctgagctttgccgcgttggaagattattaccaggagcaggggcgcgactgggagcgttacgcgatggtcaaggcgcggattatgggcgatagcgaaggcgtctatgctaacgagttgcgtgcgatgctgcgcccgtttgttttccgtcgttacatcgatttcagcgtgattcagtcgctgcgcaacatgaaagggatgattgcccgtgaagtgcgtcgacgtggtttgaccgacaatatcaaactcggcgcaggcggcattcgcgaaattgaatttatcgttcaggtgttccagctcattcgcggcggacgcgaaccgtcgctgcaatcgcgctctttactgccaacgctcagcgccattgccgagctgcatctgctttctgaaaacgatgctgaacaattgcgagtggcgtatctgttcctgcggcgtctggaaaacctgctgcaaagcattaacgacgaacaaacccagacgcttccttctgatgagcttaatcgtgcgcggctggcgtgggcgatggactttgctgactggccgcaactgaccggggcgctgaccgcacatatgaccaatgtgcgccgggtgtttaatgaattgattggcgacgatgaaagtgaaactcaggaagagtcgctgtcggaacagtggcgtgagctgtggcaggatgcgttgcaggaagatgacactacgccagtgctggcgcatcttagcgaggatgatcgcaaacaggtgctaacgctgattgccgatttccgcaaagagctggataagcgcaccatcgggccgcgaggacgtcaggtgctcgaccatctgatgccgcatctgctaagtgatgtctgtgcgcgtgaagacgctgccgttacgctgtcgcgcattaccgccttgctggtggggattgttacccgcaccacctatttagaattgctcagtgaattccccgcggcgcttaaacatttgatttctctgtgtgccgcgtcgccgatgattgccagccagctggcgcgttatccattattgctggatgaattgctcgatccaaacaccctttaccagccgacggcgaccgatgcctaccgcgatgagttgcgccagtatttgctgcgcgtgccggaagatgacgaagagcaacagcttgaggcgctgcgtcagttcaaacaggcgcagctgttacgcatcgccgcagcggatatcgccggtacgctaccggtgatgaaagtgagcgatcacttaacctggctggcggaagccatgatagatgccgtcgttcagcaggcgtgggttcaaatggttgcccgctacggtaagccgaatcacctgaacgaacgcgaagggcgtggttttgcggtggtcggctacggcaagctgggcggctgggagttaggctacagttccgatcttgaccttatcttcctccatgattgcccaatggatgcgatgactgacggtgagcgggaaatcgacgggcggcagttttatctgcgtctggcgcaacgcattatgcatctgttcagtacgcgtacctcttccggcattttgtatgaagtggatgctcgactgcgtccgtccggggcggcgggaatgctggtgacatccgcagaagcatttgccgattatcagaaaaacgaggcctggacgtgggaacatcaggcgctggtgcgtgcgcgtgtagtgtacggcgatccgcagctcaccgcgcactttgacgcagtgcgtcgcgagattatgacgctgccgcgtgaaggtaaaactctgcaaacggaagtgcgggaaatgcgcgagaaaatgcgcgctcatctcggcaataaacatcgcgatcgctttgatatcaaagctgatgaagggggaattaccgatatcgaatttattacccaatatctggtgttgcgctacgctcatgaaaaaccgaagttaacgcgctggtcagacaacgtgcgtattctggaactactggcgcaaaacgacattatggaagagcaggaagcgatggcgctgacccgtgcttacactacgcttcgcgatgaacttcatcatctggcattacaggaattgccgggccatgtgtcggaggattgcttcaccgcagagcgtgaactggtgcgggcaagctggcagaagtggctggtggaagaatga

SEQ ID NO: 262482 - DNA, 1302 bp, Klebsiella pneumoniae
atggctcaggaaatcgaattaaagtttattgttaatcacagtgccgttgaggcgttgcgtgaccatctcaatacgctgggcggcgagcaccatgaccccgtgcagttgctgaatatttactacgaaacgccggataactggctgcgtgggcacgatatgggcttacgtattcgtggcgaaaacggtcgctatgagatgaccatgaaagttgcaggaagagtgacaggcggcttacatcagcgcccggaatataacgtggcgttgagcgaaccgacgctcgacctggcgcagttaccgacggaagtctggccgaacggcgaattgcccgccgatctcgcctcccgcgtgcagccgctgttcagcaccgatttttatcgcgaaaaatggctggtggcggtcgatggtagccaaattgaaatcgccctcgaccagggggaagtgaaagcgggtgaatttgctgaacctatctgtgagctggaactggaactgcttagcggcgacacgcgcgcggtgctgaaactggcgaaccaactggtatcgcaaaccggattacgccagggcagcctgagcaaagcggcgcgtggctatcatctggcgcagggcaatccggcgcgtgaaatcaaaccgaccaccattttgcatgttgcggcaaaagccgatgtggaacaggggctggaagcggcgctcgagctggcgttagcgcaatggcagtatcatgaagaactgtgggtacgcggcaacgatgcggcgaaagaacaggtgctggcagccattagcctggtccgtcatacgctgatgctgttcggtggtattgtgccgcgtaaagcgagcactcacttacgtgatctgctgactcaatgcgaggcgaccattgcttctgcggtgtctgccgtgacggcggtctactctaccgaaacggcaatggcgaagctggcgttgaccgaatggttggtaagcaaagcatggcagccatttttagatgccaaagcgcagggcaaaatcagcgactccttcaaacgctttgccgatatccatctttcccgccatgccgctgaactgaaaagcgttttctgccagccgttaggcgatcgctaccgtgaccagttgccacgcctgacgcgtgatattgactcaatactgttgctggcgggttactatgatcctgtcgtcgcgcaagcctggctggagaactggcaggggctgcatcacgctattgcgaccgggcaacgcatcgaaattgaacatttccgtaatgaggcaaacaatcaggaaccgttctggttgcacagcggaaaacgttaa

SEQ ID NO: 262483 - DNA, 621 bp, Klebsiella pneumoniae
atgccaaaattacgcctgatcggattaactttactcgcacttagcgcgactgccgtctcacacgctgaagaaacgcgctatgtttccgacgaactgaatacctgggtccgcagcggtccgggagatcattatcgcctcgtgggcacggttaacgccggcgaggaagtgaccttattacaaactgacgccaacaccaattatgcccaggtgaaagacagctctggccgtaccgcctggatcccgttgaaacaacttagcactgagccaagcctgcgctcccgtgtgccagatctggaaaatcaggtcaaaaccctgaccgataaactcaccaatatcgataacacctggaatcagcgcaccgcagaaatgcagcaaaaagtggcgcagagcgacagcgtgatcaacgggttaaaagaagaaaatcagaaactgaaaaacgagctgattgtcgcgcagaaaaaggtcgatgccgccagcgtacagctggatgacaaacagcgcaccatcatcatgcaatggtttatgtatggcggtggcgtgctggggcttggcttgctgctcggtctggtactgccgcacctgatcccaagccgcaaacgcaaagatcgctggatgaactaa

SEQ ID NO: 262484 - DNA, 1239 bp, Klebsiella pneumoniae
gtgaagatttatctggtcggtggtgctgttcgggatgcattgttagggctaccggtcaaagacagagattgggtggtggtcggcagtacgccacaggagatgctcgacgcgggctaccagcaggtaggccgcgattttcctgtgtttctgcatccgcaaacgcatgaagagtatgcgctggcacgtaccgaacggaaatccggttccggttacaccggttttacttgctatgccgcaccggatgtcacgctggaagatgatcttaagcgtcgcgatctgaccattaatgcgctggcccaggacgataacggcgagattatcgacccgtacaacggtctgggcgatctgcaaaatcgtctgttgcgccatgtttcccccgcttttggcgaagatccgttacgcgtattgcgcgtggcgcgttttgctgcgcgttatgcccacctcggttttcgtattgccgatgaaactctggcgttgatgcgcgagatgacccatgcgggtgaactggaacacctgacgcctgaacgggtatggaaagagacggaaagcgccctcaccacccgcaatccacaggtgttcttccaggtactgcgcgattgcggcgcactgcgcgttttattcccggaaattgacgcactgtttggcgttccggcccctgccaagtggcatccggaaatcgatacgggtattcataccttaatgacgctctcaatggcggcgatgctgagtccgcaggtcgatgtccgtttcgcaactttatgccacgatctcggtaaagggctgacgccgccagaactctggccgcgtcatcatggtcatggcccggcgggtgttaagttagtggaacaactatgccagcgtctgcgcgtgccaaatgaaattcgcgatttagccagactggtggctgagtttcacgatctcatccacaccttcccaatgctgaacccaaaaaccatcgtcaaattatttgattccatcgatgcctggcgtaaaccgcagcgtgtcgagcaactggcgctgaccagcgaggctgacgtgcgcggcagaaccggttttgaatcagcggactacccgcaaggccgctggttgcgcgaagcctgggaagtggcgcagtcagtgccgacaaaagccgtcgttgaagcgggatttaaaggtgtggagattcgcgaggagctgacccgacggcggattgcggcggtagccagctggaaggaacaacgttgcccaaagcctgaatga

SEQ ID NO: 262485 - DNA, 369 bp, Klebsiella pneumoniae
atggatattgtatttatagagcaactttcggtaatcaccactattggtgtttacgactgggaacagaccatcgaacagaagttagtgttcgatatcgaaatggcgtgggataaccgtaaagcggcgaaaagtgatgatgtggcggattgcctcagttacgctgacattgcagaaacggtggtcagccacgtcgagggggcgcgttttgcgctggtggaacgcgtggctgaagaggtggcggagctgctgttagcacgcttcaactcgccgtgggtgcgtatcaaactcagcaagccaggcgcagtggcgcgggcggcgaatgttggcgtaatcattgagcgtggcaataatctgaaagaaaataattaa

SEQ ID NO: 262486 - DNA, 933 bp, Klebsiella pneumoniae
atgctgaatagctggcctttagccaaagacttgcaggtactggtagaaatcgttcacagcgggagttttagcgccgcagcggcgacgcttgggcagacgcctgcatttgtcaccaagcggatccaaatccttgaaaatacgctggcaacaacgctgctgaaccgctccgctcgcggcgtggcgctgactgaaagtggccaacgttgttacgaacatgcgttggaaatcctcacccaatatcagcgactggtcgatgacgtcacgcaaatcaaaacgcgcccggaggggatgattcgtattggttgcagttttggttttgggcgcagccatattgcgccagctattaccgaactgatgcgcaattatcctgagttacaggtgcattttgaattgttcgatcggcaaattgatttagtgcaggataatattgatctggatattcgtattaatgacgaaattcctgattattatattgcgcatcttttgacaaaaaataaaagaatattatgcgcagcacctgagtatctgcaaaaatatccgcagccacaatccctacaggaattaagtcgtcatgactgtctggtgaccaaagagcgcgatatgacccatggaatatgggagttggggaacggtcaggagaaaaaatcggtgaaggtaagcgggcatctttcctccaatagcggcgagattgtgctgcaatgggcgctggagggcaaagggattatgctgcgttccgagtgggatgtgttgccgtttctggagagtggcaaactggtgcaagtattgccagagtatgcacaaagcgccaatatctgggctgtttaccgggagccgctctatcgcagcatgaaattacgtgtctgcgtggaatttctggcggcatggtgccagcaacggctgggcaagcccgatgaaggctatcaggtcatgtag

SEQ ID NO: 262487 - DNA, 912 bp, Klebsiella pneumoniae
atgatgagcgaaagtaataagcaacaggcagtgaataagttgacagagattgtcgctaactttaccgccatgatttctacccgaatgcctgatgacgtggtggataaactaaaacagctaaaggatgccgaaacgtcgtcgatggggaaaattatctaccatacgatgttcgacaacatgcaaaaagcgattgacctgaatcgtcctgcctgtcaggacaccggggagattatgttcttcgttaaagtcggttcccgcttcccactgcttggcgagctgcaaagcatactcaaacaagccgtggaagaggcaaccgtcaaagcgccactacgtcacaatgcggtagaaatttttgacgaagtaaacaccggcaaaaataccggtagcggcgtaccgtgggtcacctgggacatcatccccgacaatgacgatgcggaaatcgaagtttacatggcaggcggcggctgcacgctacctggccgctcgaaagtgttaatgccgtcagaaggctacgaaggcgtggtgaaattcgtcttcgaaaatatctccaccctcgccgtaaacgcctgtccaccggtactggtgggcgtgggcatcgccacctcggtggaaaccgccgccgtactctcgcgtaaagccattttgcgcccgattggcagccgccatcccaatccaaaagcggcagaactggagctacgcctggaagaaggactcaaccgtctggggattggtccacaagggctgaccggcaacagttcagtgatgggcgtacatatcgaatctgccgcccgccatccgtcaaccatcggcgttgctgtctctaccggctgctgggcgcatcgtcgcggcacgctgctggttcatgccgatctcacctttgaaaatctgtctcacacccggagcgcgttatga

SEQ ID NO: 262488 - DNA, 606 bp, Klebsiella pneumoniae
atgaaaaagatcctgacaaccccgatcaaagctgaagatctgcaagatattcgcgtcggcgatgtgatctacctgaccggtacgctggtgacctgccgcgacgtttgtcaccgccgtttgatcgaactgaaacgtccgatcccttacgatctcaacggcaaagcgattttccacgctggccccatcgtgcgcaaaaacggcgacaaatgggagatggtctccgtcggcccgacaaccagtatgcgtatggaaagttttgaacgtgaatttattgagcagaccggcgtgaaactggtggttggcaaaggtggtatggggccgctgaccgaagaaggctgccagaaattcaaggcgctacatgtgattttcccggcaggctgcgcggtgctggcggcaacccaggtggaagagattgaagaagtgcactggacagagctcggaatgccggagtcactgtgggtctgccgggtcaaagagttcggcccgctgattgtctctattgatacccacggcaacaacctgatagccgaaaacaaaaagctgttcgccgaacgccgcgatcccatcgtggaagagatctgcgagcacgtccattacatcaaataa

SEQ ID NO: 262489 - DNA, 1464 bp, Klebsiella pneumoniae
atgaaaccttccactgaatggtggcgatatcttgcgccgctggcggtcatcgccattattgctctacttccggttcccgcagggctggagaaccatacctggctctactttgccgtttttactggcgtgatcgttggactgatcctcgaacccgtgccgggtgccgtggtggcgatggtgggtatatccatcatcgccatactctctccctggctgctgttcagcccggagcagctcgctcagccaggctttaaattcactgcaaaatccctctcgtgggccgtttccggtttttctaattcggttatctggctgattttcgccgcctttatgtttggcacaggctatgaaaaaaccgggcttggacgccgcattgcgctgattctggtgaaaaagatgggacatcgcacgctgtttctcggctatgcggtgatgttctccgagctgatcctcgcacctgtaacaccgtccaactcggcgcgtggtgcggggattatctatcccatcatccgtaacctgccaccgctctatcaatcacaaccaaacgacagcagttcgcgcagcattggctcgtacatcatgtggatggggattgttgccgactgcgtgaccagcgccattttcttgacggcgatggcaccaaacttgctgttaattggactgatgaaaagcgcatctcacgccacgctgagttggggcgactggttcctcgggatgttgccgctcagcattttactggttctgctggttccctggctggcttacgtgctgtacccgccggtactgaagtctggcgatcaggtgccgcgctgggcagagacggaactgcaggcaatgggcccgctctgttcgcgtgaaaaacggatgctggggctgatggtaggcgcgctggtgctgtggattttcggcggtgattatatcgatgccgcgatggtcggttacagcgtggtggcactgatgctgcttctgcgcattatcagttgggacgacattgtcagtaataaagcggcgtggaacgttttcttctggctggcctcgcttatcaccctcgccaccggactcaacaacaccggttttattagctggtttggcaaactgttagcaggcagcttaagcggttattcgccaacgatggtgatggtggcgttgattgtggtgttttatctactgcgctactttttcgccagcgccacggcgtatacctccgctctcgcaccgatgatgattgccgctgcgctggcgatgccggaaatcccgctgccggtgttctgcctgatggttggtgcggcaattggtctggggagcattcttacaccatacgccaccggccccagtccgatttactacggcagtggttatctgccaacggcggattactggcgactgggggcgatttttgggctgatattcctcgtattgctggtgattaccggcttactgtggatgcccgtggtgttgctttaa

SEQ ID NO: 262490 - DNA, 516 bp, Klebsiella pneumoniae
atgcgctaccgttcactatctctacttattccatgtgcactgctgctgagtgcctgtaccaccgtcacgccagcttataaagataacggcccccgcaccggttcctgtgtccagggtggccctgacagcgtggctcaacaattctatgactaccgcattcaacatcgcagcaatgacattaccgccctgcgcccctatttgagtgacaaactggcaaccctacttagcgatgccagccgcgataatagtcatcgtgaattgttaagcagcgatccgttctccagtcgaaccaccttgccagacagcgcccacgttgccagtgcatcgactatccctaatcgtgatgcccgtaacattccattgcgcgtggatctcgaacagggtgaccagggatggcaggatgaagtgttaatgattcaggaaggccagtgttgggtcatcgacgatgtgcgctacttaggcggtagcgttcacgccacagcgggtacgctccgtcagtccatcgagaatcgctaa

SEQ ID NO: 262491 - DNA, 732 bp, Klebsiella pneumoniae
atgaaaaagttagttcttgccgctttacttgcttcctttactttcggtgcttctgccgcagagaaaatcaattttggcgtttcagccacctatccaccctttgaatctataggtgctaataatgagattgtcggctttgatatcgatctggcaaaagccttgtgcaaacaaatgcaggcagaatgtacttttacgaatcacgcgttcgacagcctgatcccgtcactgaaattcagaaaatatgacgccgtaatctccggtatggatatcaccccggagcgtagcaaacaggtatcgtttaccacgccctactatgaaaactcagccgtcgtgattgccaaaaaagatacctacaaaacgtttgccgatctgaaaggcaaacgtattgggatggaaaacggcaccacgcaccagaaatatattcaggagcagcacccggaagtgaaaactgtctcctatgacagttatcagaatgcctttatcgacctgaaaaatggtcgtattgatggggtatttggtgacacagcggtggtaaacgaatggctgaaaaccaatccacaactgggcgttgcgactgagaaagtgacagatccgcagtacttcggcaccggcctgggtatcgctgtacgtccggataacaaagctctgctggagaaactgaataacgcgctggcggcaattaaagctgacggtacatatcagaaaatcaatgaccagtggttcccacagtaa

SEQ ID NO: 262492 - DNA, 1128 bp, Klebsiella pneumoniae
atgcagtgcgcactttacgacgcgggtcgctgtcgttcctgtcagtggataacgcagccgattccagagcaactctccgctaaaaccgccgatcttaaaaatctgctcgccgactttccggttgaggaatggtgtgcgccagtgtcaggcccggaacaagggtttcgtaataaagccaaaatggtggtgagtggtagcgttgaaaaaccactgctcggtatgctgcatcgagacggcacaccggaagacctttgtgactgcccgctttatcctgcctcatttgcgcccgtttttgcggcgctaaaaccgtttatcgcccgagcggggttaacgccctacaacgtggcgcgtaagcgtggcgaactgaaatacattctgctgactgaaagccagagcgatggcggcatgatgctgcgctttgtactgcgttctgataccaagctggcgcaactgcgtaaggcgctgccgtggttacaggaacaactaccgcagctgaaagttattaccgtcaatattcagccggtacatatggcgattatggaaggggagacggagatctacctgactgaacaacaggcgctggcagagcgttttaatgacgtaccgctgtggatccgtccgcaaagtttcttccagactaatccggcggtcgccagccagctgtacgctaccgcgcgcgactgggtacggcagctgccagttaaacatatgtgggatctgttctgtggcgtggggggctttggtttacactgcgcgacgcctgacatgcagttaaccgggatcgaaattgcaccagaggccattgcctgtgcgaagcagtcagccgctgaactgggcttaacgcgtttgcaatttcaggcgctggactccactcagtttgccaccgcccagggggaagtgcctgagctggtgctggttaacccgccgcgacgtggcattggtaaaccgctgtgtgattatctctcaacgatggcaccgcgttttattatctactccagctgtaacgcccaaaccatggcgaaagatatccgcgaactgccaggttaccgtattgaacgggtacagctttttgatatgttcccgcacaccgcgcactatgaagtgctgacgctgctggcgaagcaataa

SEQ ID NO: 262493 - DNA, 489 bp, Klebsiella pneumoniae
atggaagacgaaacgttgggattttttaagaaaacatcttcatctcatgctcgcctgaatgtgcctgcgctggtgcaggtggcggcgctcgccattattatgatccgtggcctcgacgtgctgatgattttcaatacgctgggcgtgcgcggtattggcgagttcattcatcgcagcgtacaaacctggagtttaacgctggtctttttgagcagtctggtgctggttttcattgagatctggtgtgcgttttcgctggttaaagggcgtcgctgggcgcgctggctgtatctgttgacacaaatcacagccgcaagttacttgtgggcagcttcgctggggtatggttatccggagctgttcagcattcccggtgaatcaaaacgtgaaatcttccatagcctgatgctgcagaagttgccggatatgctcatcctgttgctactgttcgttccctcgaccagtcggcggttcttccagttgcaataa

SEQ ID NO: 262494 - DNA, 846 bp, Klebsiella pneumoniae
atgaataatttaccggtagttcgttcgccctggcggattgtgattttgctgctgggcttcacctttctctacgcgccaatgctgatgctggtgatctattcattcaacagctcgaagctggtgacggtgtgggccggctggtcaacacgctggtatggtgagttattgcgcgatgacgcaatgatgagtgcggttggtttaagcctgacaattgcggcctgtgcggcgacggcggcggcgatcctcgggacgattgcggcggtcgtgctggtgcgctttggcaggtttcgcggatcaaatggttttgcctttatgatcaccgcgccgctggtgatgccagatgtcatcacgggcttgtcgctattgttgttattcgtcgcgcttgctcatgccattggctggcctgcggaccgcggtatgctcaccatctggctggcgcatgtcactttctgtacggcttatgtggcagtcgttatttcgtcgcgtctgcgggaactggatcgctcgatagaagaagcagcgatggatctcggtgcgacgccgttgaaagtgtttttcgtcattacgctaccgatgatcatgcccgcgatcatttctggctggttactggcttttactttgtcgcttgatgatctggtgatcgccagctttgtttccgggccgggagccaccacgttaccgatgctggtcttttccagcgtgcggatgggggtgaatccggaaatcaacgccctggcaacattgatcctcggcgcggtcggaattgtcggatttatcgcctggtatctgatggcgcgcgcagaaaaacagcggatacgcgacatccagcgtgcaagacgtggctga

SEQ ID NO: 262495 - DNA, 945 bp, Klebsiella pneumoniae
atgagtacacttgaacctgctgcccagccaaaaccctttaagctgtggctgtcgcagttgcaaatgaagcatgggcgcaaactggtgattgcgctgccgtatatctggctaatcctgctgtttctgctgccatttctgattgtctttaaaataagcctggcggagatggcgcgcgccattccaccttataccgaactgatggagtgggctgacgggcaactttccatcactcttaatctcggtaatttcctgcaactgaccgacgatccgctctatttcgatgcttatctccagtcgctacaggtggcggcgatttcgactatttgctgtttactgatcggctatccgctggcgtgggcggtggcgcacagtaagccttcgacccgtaatatcttattgctactggtgatcctgccgtcgtggacctcgtttctgattcgcgtttatgcctggatgggaatattaaaaaataacggcgtgctgaataattttctgctgtggctgggggttatcgaccagccgctgaccattctgcataccaatctggccgtttatatcggcattgtttatgcctacgtgccgtttatggttctgccgatctacaccgccttgattcgtattgattattcgctggtggaagcggcactggatctcggtgcacgaccgctgaaaacgttctttactgtgatcgtgccgctgaccaaaggcgggattattgccggatcgatgctggtgtttatcccggctgtgggcgagtttgtgatccctgaactgctcggtggcccggacagcatcatgatcgggcgcgtgctgtggcaggagttctttaacaaccgcgactggccggtggcctcggcggtagcgatcatcatgttgctgctgctaattgtgccgataatgtggttccacaagcatcagcaaaaaagcgtgggagaacacggatga

SEQ ID NO: 262496 - DNA, 1134 bp, Klebsiella pneumoniae
gtgaatgacgctatccctcgcccgcaggcgaaaacccgtaaggcgctgacgccgctattagaaatccgcaacctcaccaaatcctacgatggtcagcatgcggtcgatgatgtcagcctgaccatctataaaggcgaaatcttcgcgctgctgggcgcatccggctgtggcaagtccacgctgctgcgtatgctggcaggtttcgaacaaccttctgccgggcagattatgctcgatggcgtcgatttgtcacaggttccgccttacctgcgccccatcaatatgatgtttcagtcttacgcgctgtttccgcatatgaccgtggaacagaatatcgcttttggcctgaaacaggacaaattgccgaaagcggaaattgccagccgggtcaatgagatgctcggcctggtgcatatgcaggagttcgccaaacgcaaaccgcatcagctttccggtggtcagcgacagcgtgtggccctggcccgaagccttgccaaacgcccgaaactattactgctcgatgagcctatgggcgcgctggataaaaagctgcgtgaccggatgcagcttgaagtggtggatattctggagcgtgtcggtgtgacttgtgtgatggtcacccacgatcaggaagaggcgatgaccatggcggggcgcatcgccattatgaatcgtgggaaatttgtccagattggcgaaccggaagagatctatgagcatccgaccacccgctacagcgccgaatttattggctcggttaatgtctttgaatgtgtactcaaagagcgccaggaagatggtctggtgctttattcgccggggctggtgcatccactgaaagtcgatgtagatgcttcggtggtcgataacgtgccggtacacgtagcgctgcgtccggaaaaaatcatgctttgcgaagagccgcccgccaatggttgtaacttcgcggtgggggaggtgatacacattgcctatctcggcgatctttcggtgtatcacgttcgtctgaaaagtgggcagatgattagcgcccagctacaaaacgcccatcgtcatcgtaaagggttaccgacctggggcgatgaagtgcgtttgtgctgggaagtggacagctgtgtggtgctgacggtttaa

SEQ ID NO: 262497 - DNA, 1113 bp, Klebsiella pneumoniae
atgaccgccttaaataaaaaatggctatcgggtctggttgcgggtgctctgatggccgtctctgtcggcacgctcgcggctgaacaaaaaacactccacatttataactggtctgattatatcgccccggacacggtggccaattttgaaaaagaaaccggtattaaagtcgtctacgatgttttcgactctaacgaagtactggaaggcaaattaatggcgggtagcaccggctttgacctggtggtgccgtcagcaagctttcttgaacgccagttgactgcgggagttttccagccgctggataaaagtaaattgccggagtggaagaatctcgacccggaactgctgaagttggttgccaaacacgacccggataataaatttgctatgccctatatgtgggcgacgaccgggattggctataacgttgataaagttaaagcggtgctgggcgaaaacgcgcccgtcgatagctgggacttgatcctcaagcctgaaaatctggaaaaactgaaaagctgcggcgtctctttccttgatgcaccggaagaagtgtttgctaccgtgctgaattatctcggtaaagatcccaacagcactaaagcagatgattacaccggaccggcaaccgatctgctgttaaagctgcgcccgaacattcgttatttccattcatcgcaatacattaacgacctggcaaacggcgatatctgcgtcgctattggctgggcgggcgatgtctggcaggcgtcaaaccgcgcgaaggaagcgaagaatggcgttaatgtctcgttctcgattccgaaagaaggggcgatggcgttctttgatgtcttcgccatgcctgcggatgccaaaaataaagacgaagcctatcagttcctgaattacctgctgcgcccggatgtggtggcgcatatttccgaccatgtgttctatgctaacgccaataaagcagctacgccgctggtgagtgcggaagtccgtgataacccgggtatttacccgcctgcggatgttcgtgcgaagctgttcactctgaaagtacaggatccgaaaatcgaccgtgtgcgcacccgcgcgtggaccaaagtgaagagcggaaaataa

SEQ ID NO: 262498 - DNA, 477 bp, Klebsiella pneumoniae
atgacatcgctggtcgttcctggtctggatacgctgcgtcaatggctcgatgacctggggatgagtttttttgaatgtgataactgtcaggctctgcatctgccccatatgcagaatttcgacggtgtctttgatgccaaaatcgatctgatcgataacacgatcctgttttctgccatggcggaagtccgaccttcagccgtattgcccctggcggcagatttatctgccatcaatgccagttcgctgaccgtgaaagcatttcttgatatgcaggatgataatctgccaaagctggtggtttgccagtctttatccgttatgcagggcgtaacctatgagcagtttgcatggttcgtgcgtcagagcgaagagcagatttcgatggtcattcttgaagctaatgcccatcaactgctgttaccgactgacgatgaagggcaaaacaacgttaccgaaaactatttcctccactga

SEQ ID NO: 262499 - DNA, 903 bp, Klebsiella pneumoniae
gtgaaaattgccatattgtcccgggatggaacgctctattcgtgtaagcggctgcgtgaagccgctatacagcgcggtcacctggttgaaattcttgatccgctttcttgctacatgaacataaatcctgcggcgtcttctattcactacaaaggccgcaagttaccccattttgacgcagtgatcccgcgtattggcaccgccattaccttttatgggacggcggcactgcgccagttcgagatgctggggagctatccgctcaatgagtcggtcgccattgcccgggcgcgtgacaaattgcgttccatgcaactgctggcgcgtcagggcatcgacctgcctgtcacgggcattgcgcattcgccggatgataccagcgatttaatcgacatggtcggtggtgcgccgctggtggtcaagttggttgaaggcacgcagggaattggcgtcgtgctggcggagacgcgtcaggcggccgaaagcgtgattgacgctttccgcggtctgaacgcgcatattctggtgcaggaatatatcaaagaggcgcaagggtgcgatatccgctgtctggttgttggcgatgaagtggtcgctgcgattgaacggcgggcgaaagagggcgattttcgttccaatttgcatcgtggcggcgcggcaagcgtcgccagtatcacaccacaggagcgtgaaatcgcgataaaagccgcgcgaacgatggcgctggacgttgctggtgtggatattctgcgtgctaatcgcgggccgttggtgatggaagtgaatgcgtcgccggggctggaaggaatagaaaaaaccaccggtatcgacatcgcgggtaaaatgatccgctggatcgaacgccacgctacgacagaatattgcctgaaaacgggtggttag

SEQ ID NO: 262500 - DNA, 723 bp, Klebsiella pneumoniae
atgacgccaaccattgaacttatttgtggccatcgctccattcgccatttcactgatgaacccatttccgaagcgcagcgtgaggcgattattaacagcgcccgtgcgacgtccagttccagttttttgcagtgcagtagcattattcgcattaccgacaaagcgttacgtgatgaactggtgacgctgaccggcgggcaaaaacacgtagcgcaagcggcggagttctgggtgttctgtgccgactttaaccgccatttacagatctgtccggatgctcagctcggcctggcggaacaattgctgctcggtgtcgttgatacggcaatgatggcgcagaatgcgttaaccgcagcggaatcgctgggattgggcggggtatatatcggcggcctgcgcaataatattgaagcggtgacggaactgctgaaattaccgcagcatgttctgccgctgtttgggctgtgccttggctggcctgcggataatccggatcttaagccgcgtttaccggcctccattttggtgcatgaaaacaactatcaaccgctggataaagacgcactggcgcagtatgacgaacaactggcggaatattacctcacccgtggcagcaataatcgccgggatacctggagcgatcatatccgccgaacaatcattaaagaaagccgcccatttatactggattatttgcacaaacagggttgggctacgcgctaa

SEQ ID NO: 262501 - DNA, 288 bp, Klebsiella pneumoniae
atgcgcgcgatcggtaaattgcctaaaagcgtgttgatactggaatttatcggaatgatgttgctggcggtggcgctgctgtcggtaagcggctccctgtcgctgcctgagccattttctcggccagaagtgcagattctgatgatttttctcggtgttttgctcatgcttcccacagcggtggtggttattcttcaggtggcaaaacgtcttgccccacagctgatgaaccgtccaccgcaatattcacgttcagaaagagaaaaagataatgacgccaaccattga

SEQ ID NO: 262502 - DNA, 258 bp, Klebsiella pneumoniae
atgcaaaccgttatttttggtcgtccgggttgcccttactgtgtgcgtgcaaaagatctggctgagaaattgagcaatgaacgcgatgattttcagtatcagtatgttgatattcgtgcggaagggatcactaaagaagatctacaacaaaaggcaggtaaacccgtagaaaccgtgccgcagatttttgtcgatcagcaacatatcggcggctataccgattttgctgcatgggtgaaagagaatctggacgcctga

SEQ ID NO: 262503 - DNA, 378 bp, Klebsiella pneumoniae
gtgaaacataaacaacgttgggcgggggcaatctgctgttttgtcctcttcattgtggtgtgcctttttctggcgacgcatatgaaaggcgcttttcgggctgccgggcatcctgaaatcggcttgctgtttttcattcttcctggagcagttgccagcttcttttcacagcgtagagaagtcctgaaacctctgtttggcgcaatgctggcggcaccctgttcaatgcttattatgcggctgtttttttcaccgacgcgctcattctggcaagagctggcatggttattaagtgcggtgttctggtgtgcgctgggggcactgtgtttcttatttatcagtagtttgtttaaaccacagcacagaaaaaatcaataa

SEQ ID NO: 262504 - DNA, 1686 bp, Klebsiella pneumoniae
gtgaatataaacgtcgccgaattgttaaatgggaattacattctgttattatttgtggtcctcgcgcttgggctatgtctcgggaaattacgacttggttcgatccaactgggtaattccattggcgttttagtcgtatcgctgttattaggccaacaacatttcagcattaacaccgacgcgcttaatcttggctttatgctgtttattttctgcgtcggggtcgaagccggaccgaactttttttccattttttttcgcgatgggaaaaattacctaatgttagcactggtgatggttggcagtgcgctggtgatcgccttagggttaggtaagctgtttggctgggatattggcctgacggccggtatgttagcaggctctatgacgtcgacaccggttctggtcggtgctggcgatacactgcgtcattccggcatggaaagcaggcagctctcactggcactggataatctgagcctcgggtatgccttaacctatttaatcggtctggtgagtttgattgttggtgcgcgttacttgccgaaattgcagcatcaggacttacagaccagcgcccagcaaatcgcccgcgaacgtggcctggacacagatgccaaccgtaaggtttatttgccggtgatccgcgcctaccgcgtcggcccggagctggtagcctggaccgacggcaaaaatctgcgtgaactgggtatttatcgacaaaccggctgctacattgaacgtattcggcgtaacgggattctggcaaatccagacggtgatgccgtactacaaatgggcgatgaaatagcgttggtaggctatcctgacgcccacgcccgactcgatcccagtttccgtaatggcaaagaagttttcgatcgtgaccttctcgacatgcgtatcgtcactgaagaagtggtcgttaaaaaccataacgctgttggcaaacgcctggcacaactgaagttgaccgatcacggttgcttccttaaccgcgtcattcgtagccagattgagatgccgattgatgacaacgtcgtgcttaacaaaggtgacgttttacaagtcagcggcgatgcccgccgggtaaaaaccatcgccgatcgcatcggctttatctcgattcacagccaggtcactgacttgctggcattctgcgccttctttgttattgggctgatgatcgggatgatcaccttccagttcagcacattcagtttcggcatggggaacgctgccgggttgttattcgccggaattatgctgggctttatgcgtgctaaccacccgaccttcggttacattccgcagggtgcattaagcatggtgaaggagttcggcttgatggtgtttatggcaggcgttggtctgagcgctggtagcggtattaataacggcctgggcgcgattggcggtcagatgttgattgccggattgattgtcagtctggtgccagtggttatctgcttcttgttcggtgcttatgtattgcgaatgaaccgcgcactgttgttcggcgcaatgatgggcgcacgcacctgcgcgccggcaatggagatcatcagtgatacagctcgcagtaatatcccggcgctgggctatgcgggcacttacgcaatcgccaacgtcctgctgacgctggcagggacaatcatcgtcatggtatggccaggattaggataa

SEQ ID NO: 262505 - DNA, 537 bp, Klebsiella pneumoniae
atgcgtcgcgctaacgatccgcaacggcgagaaaaaattatccaggccacgctggaggcggtgaaactttacggaatacatgctgttacgcaccgcaaaattgctacccttgccggggtaccgttggggtcgatgacctactatttttcaggaattgatgagttgttgctggaggcgttcagcagttttactgagatcatgtcccggcaatatcaggcattttttagcgatgttagtgatgctccgggcgcatgccaggctatcaccgatatgatctacagctcacaggttgcaacgccagataatatggagctgatgtaccagctctacgcgctggctagccgaaaaccgctattaaaaacggtaatgcaaaactggatgcagcgcagtcagcaaacgctcgaacaatggtttgaacccggaaccgcccgcgcgcttgatgcgtttattgaggggatgacgctgcattttgtcaccgaccgtaagccgctatcgcgcgaggagattttgaggatggttgagagggttgcagggtag

SEQ ID NO: 262506 - DNA, 1209 bp, Klebsiella pneumoniae
atgaccgtaaattcttcacgtaatgcattgaaacgccgaacctgggcgctgtttatgttcttctttttgccgggcctgttaatggcgtcctgggcaacccgtacgcctgctatccgcgatattctttctgtttcgatcgctgaaatgggcggagtcctctttggtctgtcgatcggttcaatgagcggtattctctgctcggcgtggttagtgaaacgctttgggacgcgtaatgtcatcttggtcacgatgtcctgcgcattgatcgggatgatgatactaagtctggcactctggctgacatcgcccctgctcttcgcggttggtctcggcgtctttggggcaagttttggttctgcggaagtggcgataaacgttgaaggtgctgccgttgagcgagaaatgaataagacggttttgccgatgatgcacggtttttatagcctgggcacgctggcaggcgctggtgtcgggatggcactaacggcctttggcgttccggcaacggtgcacattttattggcggcgctggtaggcatcgcgcctatttatatcgccattcaggcaatccctgatggtacgggcaaaaatgctgccgatggcacccagcatggtgaaaaaggcgtacctttttatcgcgatatccagttgctactgattggtgttgtggtgctggcgatggcctttgccgaaggttctgccaacgactggttacccttattaatggttgacggtcacggttttagccctacttccggctcgctgatttatgccggttttaccctggggatgaccgttggacgcttcactggcggttggttcatcgaccgttacagtcgcgttgccgtggttcgggccagtgcactaatgggggcgttaggtattgggctgattatttttgtcgatagcgcctgggtcgctggggtgtctgttgtactctggggactgggtgcctcgctgggcttcccactgaccatttctgccgccagcgataccggccccgatgcaccaacccgcgtcagtgtggtagcaacgaccggttatctggctttcctcgtcgggccgccgctgctgggctatctcggcgaacattatggattacgtagtgcaatgctggttgtactggcgctggttattctcgcggctattgtcgcgaaagccgtcgccaaacccgataccaaaacgcagacggcgatggagaatagttga

SEQ ID NO: 262507 - DNA, 816 bp, Klebsiella pneumoniae
atgagcattaaattaattgcggtagacatggatggtactttcttaagcgatcaaaaaacctataaccgtgagcggtttatggctcagtatcagcaaatgaaagcacaaggcattcgctttgtggtcgccagcgggaatcaatattatcagttgatctctttcttccctgaaattgctaatgaaattgcctttgtggctgaaaacggcggctgggtagtgagcgaaggcaaagatgtttttaatggcgagctgtcgaaggatgcgtttgctactgtcgtggaacatttgctgacgcgcccggaagtggaaattattgcctgcggaaaaaatagcgcctataccctcaaaaaatatgacgatgccatgaaaacggtggcggaaatgtattatcaccgtctggaatacgtcgataactttgacaacttagaagatatcttctttaagtttggtctgaatctttccgatgaactgattccacaagtacaaaaagcattacatgaggccatcggcgatattatggtgccggtccacaccggcaacggcagcatagatctgattatccccggcgtacataaagccaatggccttcgccaactgcagaaattatggggaatagacgacagcgaagtagtggtctttggcgatggcggtaacgatattgagatgctgcgtcaggcaggctttagttttgcaatggaaaatgccggcagcgcggtcgtcgcagcggcaaaataccgggcaggctccaataaccgtgaaggcgtactggatgtgatcgataaagtgcttaaacacgaagcgccatttaaccaataa

SEQ ID NO: 262508 - DNA, 279 bp, Klebsiella pneumoniae; identical to SEQ ID NO: 801

SEQ ID NO: 262509 - DNA, 531 bp, Klebsiella pneumoniae
ttgctggcgtggatcgcccagtcgccgattatcatcattaccggtgagcagttgagcagctatgaatatggcttgctgcaagtgcctattttcggggcgttaattgcgggtaacttgctgctagcgcgtctgacctcgcgccgcaccgtacgttcgctgattattatgggcggctggccgattatgattggtctgtttgtcgctgctgcggcaacggttatctcatcgcacgcgtatttatggatgaccgccgggttaagtatttatgctttcggtattggtctggcgaatgcgggactggtgcgattaactctgtttgccagcgatatgagtaaaggtacggtttctgcggcgatggggatgctgcaaatgctgatctttaccgtcggtattgaaatcagcaaacatgcctggctgaacgggggcaacggactgtttaatctcttcaaccttgtcaacggaattttgtggctgttgctgatggttatctttttaaaagataaacagatgggaaattcgcacgaagggtaa

SEQ ID NO: 262510 - DNA, 294 bp, Klebsiella pneumoniae
atgaaaaaaatgttgttttctgccgctctggcaatgcttattacaggatgtgctcaacagacgtttactgttggaaacaaaccgacagcagtaacaccaaaggaaaccatcacccatcatttcttcgtttcgggaattggacaggagaaaactgttgatgcagccaaaatttgtggcggcgcagaaaatgttgttaaaacagaaacccagcaaacattcgtaaatggatttctcggttttattactttaggcatttatactccgctggaagcgcgtgtgtattgctcacaataa

SEQ ID NO: 262511 - DNA, 546 bp, Klebsiella pneumoniae
atgaaggttaataaaaagaaacttgccgaaattttcaacgtggatccgcgaacgattgaacgctggcagtctcagggactcccttgcgtctccggaggtggtaagggcgttgaatctgtatttgataccgccatggcaattcagtggtatgcgcagagggaagctgatatcgaaaatgaaaaactccgtaaagaggttgaggattacagggctgccagtgaggcagatctccagcctgggactattgagtacgaacgccatcgacttacgcgtgcgcaggccgacgcacaggagctgaagaatgccagagactccgcagaggtggtggaaaccgcattctgtactttcgtgctgtcacggatcgcaggtgaaattgccagtattcttgacgggatccctctctcggtacagcggcgttttccggaactggaaaaccgacatgttgatttcctgaaacgggatatcatcaaagccatgaacaaagcagccgcgctggatgaactgataccggggttgctgagtgaatatatcgaacagtcagattga

SEQ ID NO: 262512 - DNA, 1926 bp, Klebsiella pneumoniae
gtgaatatatcgaacagtcagattgatattctgcggcgtgatgtacgcgccgggctgcgagccctgttcaggccggagccacagactgccgttgaatgggcggatgccagttactatctcccgaaagaatccgcataccaggaagggcgctgggaaacactgccctttcagcgggccatcatgaatgcgatgggcagcgactacatccgtgaggtgaatgtggtgaagtctgcccgtgtcggttattccaaaatgctgctgggtgtttatgcctacttcatagagcataagcagcgcaacacccttatctggttgccgacggatggtgatgccgagaactttatgaaaacccacgttgagccgactattcgtgatattccgtcgctgctggcgctggccccgtggtatggcaaaaagcaccgggataacacgctcaccatgaagcgtttcaccaatgggcgtggtttctggtgcctgggcggtaaagcggcaaaaaactaccgtgaaaagtcagtggatgtggcgggttatgatgaacttgctgcctttgatgatgatattgaacaggaaggctctccgacgttcctgggcgataagcgtattgaaggctcggtctggccaaagtccatccgtggctccacgcccaaagtgagaggcacctgtcagattgagcgtgcagccagtgaatccccgcattttatgcgttttcatgttgcctgcccgcactgtggggaggagcagtaccttaaatttggcgataaagagacgccgtttggcctcaaatggacgccggatgatccctccagcgtgttttatctctgcgagcataatgcctgcgtcatccgtcagcaggagctggactttactgatgcccgttatatctgcgaaaagaccgggatctggacccgtgatggcattctctggttttcgtcatccggtgaagagattgagccaccggacagtgtgacctttcacatctggacggcgtacagcccgttcaccacctgggttcagattgtcaaagactggatgaagacgaaaggggatacgggaaaacgtaaaaccttcgtgaacaccacgctcggtgagacatgggaagcgaaaatcggcgaacgtccggatgctgaagtgatggcagagcggaaagagcattattcagcgtccgttcctgaccgtgtggcttacctgaccgccggtatcgactcccagctggatcgctacgaaatgcgcgtatggggatgggggccgggtgaggaaagctggctgattgaccggcagattattatgggccgccacgacgatgaacagacgctgctgcgtgtggatgaggccatcaataaaacctatacccgccggaatggtgcagagatgtcggtatcccgtatctgctgggatactggcgggattgacccgaccattgtgtatgaacgctcgaaaaaacatgggctgttccgggtgatccctattaaaggggcatccgtctacggaaagccggtggccagcatgccacgtaagcgaaacaaaaacggggtttaccttaccgaaatcggtacggataccgcgaaagagcagatttataaccgcttcacactgacgccggaaggggatgaaccgcttcccggtgccgttcacttcccgaataacccggatatttttgatctgaccgaagcgcagcagctgacggctgaagagcaggtcgaaaaatgggtggatggcaggaaaaaaatactgtgggacagcaaaaagcgacgcaatgaggcactcgactgcttcgtttatgcgctggcggcgctgcgcatcagtatttcccgctggcagctggatcttagtgcactgctggcgagcctgcaggaagaggatggtgcagcaaccaacaagaaaacactggcagattacgcccgtgccttatccggagaggatgaatga

SEQ ID NO: 262513 - DNA, 207 bp, Klebsiella pneumoniae; identical to SEQ ID NO: 9903

SEQ ID NO: 262514 - DNA, 1602 bp, Klebsiella pneumoniae
atgaaaacgtccaccattcccacccttctggggccggacggcatgacatcactgcgcgaatatgccagttatcacggcggtggcagcggatttggtgggcagttgcgggcgtggaatccaccgagtgaaagtgtggatgcagccctgctgcccaactttacccgtggcaatgcccgcgcggacgatctggtacgcaataacggctatgccgccaacgccatccagctgcatcaggatcatatcgtcggatcttttttccggctcagtcatcgcccaagctggcgatatctgggcatcggggaggaagaagcccgtgccttttcccgcgaggttgaagcggcatggaaagagtttgccgaggatgactgctgctgcattgacgttgagcgaaaacgcacgtttaccatgatgattcgggaaggtgtggccatgcatgcctttaacggtgaactgttcgttcaggccacctgggataccagcccgtcgcgactgttccggacacagttccggatggtcagcccgaagcgtatcagcaacccgaacaataccggcgacagccggaactgccgtgccggtgtgcagattaatgacagcggcgcggcgctgggatattacgtcagcgaggacgggtatcctggctggatgccgcagaaatggacatggatgccccgtgagttacccggcgggcgcgcctcgttcattcacgtttttgaacccgtggaggacgggcagacccgcggtgcaaatgtgttttacagcgtgatggagcagatgaagatgctcgacacgttacagaacacgcagctgcagagcgccattgtgaaggcgatgtatgccgccaccattgagagtgagctggatacgcagtcagcgatggattttattctgggtgcgaacagtcaggagcagcgggaaaggctgacgggctggattggtgaaattgccgcgtattacgccgcagcaccggtccgtctgggaggcgcaaaagtgccgcacctgatgccgggtgactcactgaacctgcagacggctcaggacacggataacggctactccgtgtttgagcagtcactgctgcggtatatcgctgccggactgggtgtctcgtatgagcagctttcccggaattacgcccagatgagctactccacggcacgggccagcgcgaacgagtcgtgggcgcactttatggggcggcgaaaattcgtcgcatcccgtcaggcgagccagatgtttctgtgctggctggaagaggccatcgttcgccgcgtggtgacgttaccttcaaaagcgcgcttcagttttcaggaagcccgcagtgcctgggggaactgcgactggataggctccggtcgtatggccatcgatggtctgaaagaagttcaggaagcggtgatgctgatagaagccggactgagcacctacgagaaagagtgcgcaaaacgtggtgacgactatcaggaaatttttgcccagcaggtccgtgaaacgatggagcgccgtgcagccggtcttaaaccgcccgcctgggcggctgcggcatttgaatccggactgcgacaatcaacagaggaggagaagagtgacagcagagctgcgtaa

SEQ ID NO: 262515 - DNA, 1320 bp, Klebsiella pneumoniae
gtgacagcagagctgcgtaatctcccgcatattgccagcatggcttttaatgagccgctgatgcttgaacccgcctatgcgcgggttttcttttgtgcgcttgcaggccagcttgggatcagtcgcctgacggatgcggtgtccggcgacagcctgactgccggagaggcacccgcggcactggcgttatccggtgatgatgacggaccacgacaggcccgcagttatcaggtcatgaacggcatcgccgtgctgccggtgtccggtacgctggtcagccggacacgggcgctgcagccgtattcgggaatgaccggttacaacggcattatcgcccgtctgcaacaggctgccagcgatccgatggtggacggcattctgctcgatatggatacgccaggcgggatggtggcgggagcatttgactgtgctgacatcatcgcccgtgtgcgagacataaaaccggtatgggcgctggccaacgacataaactgcagtgcaggtcagctgcttgccagcgccgcctcccggcgtctggtcacgcagaccgcccggacaggctccatcggcgtcatgatggctcacagcaattacggtgctgcgctggagaaacagggcgtggaaatcacgctgatttacagcggcagccataaggtggatggcaacccctacagccatcttccggatgacgtccgggagacactgcagtcccggatggatgcaacccgccggatgtttgcgcagaaggtgtcggcatataccggcctgtccgtgcaggctgtgctggataccgaggctgcagtgtacagcggtcaggaggccattgatgccggactggctgatgaacttgtcaacagcaccgatgcgatcaccgttatgcgtgatgcactggatgcacgtaaatcccgtctctcaggagggcgaatgaccaaagagactcaatcaacaactgtttcagccactgcttcgcaggctgacgttactgacgtggtgccagcgacggagggcgaaaacgccagcgcggcgcagccggacgtgaacgcgcagatcacctctgcggttgcggcagaaaacagccgcattatggggatcctcaactgtgaggaggctcacggacgcgaagaacaggcccgcgtgctggcagaaacccccggtatgaccgtggaaacggcccgccgcattctggccgcagcaccacagagtgcacaggcgcgcagtgacactgcgctggatcgtctgatgcagggggcaccggcaccgctggctgcaggtaacccggcatctgatgccgttaacgatttgctgaacacaccagtgtaa

SEQ ID NO: 262516 - DNA, 333 bp, Klebsiella pneumoniae; identical to SEQ ID NO: 31380

SEQ ID NO: 262517 - DNA, 1026 bp, Klebsiella pneumoniae
atgtcgatgtacacaaccgcccagctgctggcggcaaatgagcagaaatttaagtttgatccgctgtttctgcgtctctttttccgtgagagctatcccttcactacggagaaagtctatctctcacaaattccgggactggtaaacatggcgctgtacgtttcgccgattgtttccggtgaggttatccgctcccgtggcggctccacctctgaatttacgccgggatatgtcaagccgaagcatgaggtgaatccgcagatgaccctgcgtcgcctgccggatgaagatccgcagaatctggcggacccggcttaccgccgccgtcgcatcatcatgcagaacatgcgtgacgaagagctgaccattgctcaggtcgaagagatgcaggccgtttctgccgtgctcaagggcaaatacaccatgaccggtgaagccttcgatccggttgaggtggatatgggccgcagtgcggccaacaacatcacgcagtccggcggcacggagtggagcaagcgtgacaagtccacgtatgatccgaccgacgatatcgaagcctacgcgctgaacgccagcggcgtggtgaatatcatcgtgtttgatccgaaaggctgggcgctgttccgttccttcaaagccgtcaaggagaagctggatacccgtcgtggctctcattccgagctggagacagcggtaaaagacctgggcaaagcggtgtcctataaggggatgtatggcgatgtggccatcgtcgtgtattccggacagtacgtggaaaacggcgtcaaaaagaacttcctgccggacaacacgatggtgctgggtaacactcatgcacgcggtctgcgcacctatggctgtattcaggatgcggatgcattgagtgagggtattaatgcgtctccccgttatccgaaaaactggaagacatccggcgatccggcgcgagagttcaccatgattcagtcagcaccgctgatgctgctggctgatcctgatgagttcgtgtccgttcaactggcgtaa

SEQ ID NO: 262518 - DNA, 399 bp, Klebsiella pneumoniae
atgacgaaagatgaactgattgcccgtctccggtcgctgggtgagcaactgaaccgtgatgtcagcctgacggggacgaaagaagaactggcgcttcgtgtggcagagctggaagaagagcttgatgacacggatgacgcagccggtcaggacacgtctgtcagcccggaaaatgcgctgaccggacatgaaaatgaggtggtatcagcacagacggataccgtgactcaggatacggctgctctggtcacggttgtggcactggtgacgctgcataccgatgcacttcacgccacgcgggatgaggctgtggcatttgtgctgccgggaacggcgtttcgtgtctctgccggtgtggcagccgaaatgacagaacgtggcctggccagaatgcaataa

SEQ ID NO: 262519 - DNA, 354 bp, Klebsiella pneumoniae
gtggctgatttcgataacctgttcgatgctgccattgcccgcgccgatgaaacgatacgcgggtacatgggaacatcagccaccatgacatccggtgagcagtccggcgcagtaatacgtggtgtttttgatgaccctgaaaatatcagctatgccggacagggcgtgcgcgttgaaggctccagcccgtccctgtttgtccggactgatgatgtgcggcagctgcggcgtggagacacgctgatcatcggtgaggaaaacttctggatagaccgggtttcgccggatgatggcggaagctgtcatctctggcttgggcggggcgtaccgcctgccgttaaccgtcgccgctga

SEQ ID NO: 262520 - DNA, 579 bp, Klebsiella pneumoniae
atggccataaaaggtcttgagcaggccgttgaaaacctcagccgtatcagcaaaacggcggtgcctggtgccgccgcaatggccattaaccgcgttgcttcatccgcgatatcgcagtcggcgtcacaggttgcccgtgagacaaaggtacgccggaaactggtaaaggaaagggccaggctgaaaagggccacggtcaaaaatccgcaggccagaatcagggttaaccggggggatttgcccgtaatcaggctgggtaatgcgcgggttgtcctgtcccgccgcaggcgtcgtaaaaaggggcagcgttcatccctgaaaggtggcggcagcgtgcttgtggtgggaaaccgtcgtattcccggcgcgtttattcagcaactgaaaaatggccggtggcatgtcatgcagcgtgtggccgggaaaaaccgttaccccattgatgtggtgaaaatcccgatggcggtgccgctgaccacggcgtttaaacagaatattgagcggatacggcgtgagcgtcttccgaaagagctgggctatgcgctgcagcatcaactgagaatggtaataaagcgatga

SEQ ID NO: 262521 - DNA, 396 bp, Klebsiella pneumoniae; identical to SEQ ID NO: 9971

SEQ ID NO: 262522 - DNA, 741 bp, Klebsiella pneumoniae
atgccaacaccaaatcctgcaatgccggtgaaaggggccgggaccacactgtgggtttataaggggaacggtgacccttatgcgaacccgctttcagacgttgactggtcgcgtctggcaaaagttaaagacctgacacccggcgaactgaccgctgagtcctatgacgacagctatctcgatgatgaagatgcggactggactgcgaccgggcaggggcagaaatctgccggagataccagcttcacgctggcgtggatgcccggagagcaggggcagcaggcgctgctggcgtggtttaatgaaggtgatacccgtgcctataaaatccgcttcccgaacggcacggtcgatgtgttccgtggctgggtcagcagtatcggtaaggcggtgacggcgaaggaagtgattacccgcacggtgaagatcaccaatgtgggacgtccgtcgatggcagaagatcgcagcacggtgacggcgacaaccggcatgacggtgacacccgccagtgcttccgtagtgaaagggcagagcaccacgctgaccgtggcattccagccggagggcgcaaccgacaagagcttccgtgcggtgtctgcggataaaacaaaagccaccgtgtcggtcagtggtatgaccatcaccgtgaacggcgttgctgcaggcaaggtcaacattccggtcgtatccggtaatggtgagtttgctgcggttgcagaaatcaccgtcaccgccagttaa

SEQ ID NO: 262523 - DNA, 414 bp, Klebsiella pneumoniae
atgttcctgaaaaccgaatcatttgaacataacggtgtgaccgtcacgctttctgaactgtcagccctgcagcgtattgagcatctcgccctgatgaaacggcaggcagaatcagacagcaaccggaagtttactgtggaagacgccatcagaaccggcgcgtttctggtggcgatgtccctgtggcataaccatccgaagaagacaaagctgccttccatgaatgaagccgttaaacagattgagcaggaagtgcttaccacctggcccacagaggcaatttctcatgctgaaaacgtggtgtaccggctgtccggtatgtatgagtttgttgtgaataatacccctgaacaggcagaggacgccgggcctgcagagcctgtttctgcgggaaagtgttcgacggtgagctga

SEQ ID NO: 262524 - DNA, 435 bp, Klebsiella pneumoniae
gtgttcgacggtgagctgagttttgccctgaaactggcgcgtgagatggggcgacccgactggcgcgccatgcttgccgggatgtcatccacggagtatgccgactggcaccgcttttacagtacccattattttcatgatgttctgctggatatgcacttttccgggctgacgtacaccgtgctcagcctgtttttcagcgatccggatatgcatccgctggatttcagtctgctgaaccggcgcgaggctgacgaagagcctgaagatgatgtgctgatgcagaaagcggcagggcttgccggaggcgttcgttttgtcccggacgggaatgaagttatccccgcttccccggatgtggcggacatgacggaggatgacgtaatgctgatgacagtatcagaagggatcgcaggaggagtccggtatggctga

SEQ ID NO: 262525 - DNA, 2562 bp, Klebsiella pneumoniae
atggctgaaccggtaggcgatctggtcgttgatttgagtctggatgcggccagatttgacgagcagatggccagagtcaggcgtcatttttccggtacggaaagtgatgcgaaaaaaacagcggcagtcgttgaacagtcgctgagccgacaggcgctggctgcacagaaagcggggatttccgtcgggcagtataaagccgccatgcgtatgctgcctgcacagttcaccgacgtggccacgcagcttgcaggggggcagagtccgtggctcatcctgctgcaacaggggggtcaggttaaggactccttcggcgggatgatccccatgttccgggggcttgccggtgcgatcaccctgccgatggtgggggtcacctcgctggcggtggcgaccggtgcgctggcgtatgcctggtatcagggcaactcaaccctgtccgatttcaacaaaacgctggtcctttccggcaatcaggcgggactgacggcagatcgtatgctggtcctctccagagccggacaggccgcagggctgacgtttaaccagaccagcgagtcactcagcgcactggtcaaggcgggggtaagcggtgaggctcagattgcgtccatcaaccagagtgtcgcgcgttttgcttctgcatccggtgtggaggtggacaaggttgcagaggctttcggaaaactgaccacagacccgacgtcggggctgattgcgatggcacagcagttccataacgtgacggcggagcagattgcgtatgttgctcagttgcagcgttccggcgatgaagccggagcattgcaggcggcgaacgaggccgcaacgaaagggtttgatgaccagacccgccgcctgaaagagaacatgggcacgctggagacctgggcagagaggacagcgcgggcattcaaatccatgtgggatgcggtgctggatattggtcgtcctgataccgcgcaggagatgctgattaaggcagaggctgcgtttaagaaagcagacgacatctggaatctgcgcaaggatgattattttgttaacgatgaagcgcgggcgcgttactgggatgatcgtgaaaaggcccgtcttgcgcttgaagccgcccgaaagaaggctgagcagcagactcaacaggacaaaaatgcgcagcagcagagcgataccgaagcgtcacggctgaaatataccgaagaggcgcagaaggcttacgaacggctgcagacgccgctggagaaatataccgcccgtcaggaagaactgaacaaggcactgaaagacgggaaaatcctgcaggcagattacaacacgctgatggcggcggcgaaaaaggattatgaagcgacgctgaaaaagccgaaacagtccggcgtgaaggtgtctgcgggcgatcgtcaggaagacagtgctcatgctgccctgctgacgcttcaggctgaactccggacgctggagaagcatgccggagcaaatgagaaaatcagccagcagcgccgggatttgtggaaggcggagagtcagttcgcggtactggaggaggcggcgcaacgtcgccagctgtctgcacaggagaaatccctgctggcgcataaagacgagacgctggagtacaaacgccagctggctgcacttggcgacaaggtcacctatcaggagcgcctgaacgcgctggcgcagcaggcggataaattcgcacagcagcaacgggcaaaacgggccgccattgatgcgaaaagccgggggctgactgaccggcaggcagaacgggaagccacagaacagcgcctgaaggaacagtatggcgataatccgctggcgctgaataacgtcatgtcagagcagaaaaagacctgggcggctgaagaccagcttcgcgggaactggatggcaggcctgaagtccggctggagtgagtgggaagagagcgccacggacagtatgtcgcaggttaaaagtgcagccacgcagacctttgatggtattgcacagaatatggcggcgatgctgaccggcagtgaacagaactggcgcagcttcacccgatccgtgctgtccatgatgacagaaattttgcttaagcaggcaatggtggggattgtcgggagtatcggcagcgccattggcggtgctttcggtggtggtgcgtctgcctccacgggtacggccattcaggccgctgcggcgaaattccattttgcaaccggaggattcacaggaaccggcggcaaatatgagccagcggggattgttcatcgcggggagtttgtcttcacgaaggaggcgaccagccggattggtgtcggcaatctgtaccgcctgatgcggggctatgcggaaggtggttatgtcggcggtgccggaagtccggcgcagatgcggcgggcggaaggcattaattttaatcagaacaatcacgtggtgattcagaacgacggccccaacgggcgggcagggccgcagctgatgaaagcggtgtatgagatggcccgcaagggggcacaggatgaactccggctgcagttgcgtgatggcggtatgttatcagggagcggtggatga

SEQ ID NO: 262526 - DNA, 330 bp, Klebsiella pneumoniae; identical to SEQ ID NO: 8147

SEQ ID NO: 262527 - DNA, 699 bp, Klebsiella pneumoniae; identical to SEQ ID NO: 25992

SEQ ID NO: 262528 - DNA, 744 bp, Klebsiella pneumoniae
atgacacagactgaatcagcgattctggcacatgcccggcggtgtgcgcctgcggagtcgtgcggcttcgtgataagcacgccggagggggagcggtatatcccttgtgtgaatatttccgcggagccggaggcgtattttcgtatcgcaccggaagactggctgcgggcagagatgcagggggagattgtggcactggtccacagtcatcccggtgggctgccctggctgagcgaggctgaccggcggctgcagataaaaagcgcactgccctggtggctggtctgccggggtgacattcacaaattccgctgtgtgccacatctgacgggacggcgctttgagcacggggtgacggactgttacacgctgttccgggatgcttatcatctggcggggactgaaatgccggattttcatcgcgaggatgactggtggcgcaacggccagaacctgtacctggacaacctggcggaaaacggcttttgccgggtgtctccgtcctctgcacaggcaggcgatgtgctgctgtgctgctttggttcatcggtgccgaatcatgccgccgtttactgtggtgacggcgagctgctgcaccatattcctgaacaactgagtaaacgggagaggtattccgaaaaatggcaacgacgaacgcattcagtctggcgtcaccgccactggcacgcatccgcctttacggggatttacaacgatttggccgccgcctcagcctgtatgtga

SEQ ID NO: 262529 - DNA, 582 bp, Klebsiella pneumoniae
gtgaacacggcagcggaagccattcgcgccctgtcgatgcagatgccgggctttcgccgtcagatgaacgaaggctggtaccagatacgtattgccggtgatgacacggcaccggaggcggtgtacgcccgtcttcacgaacagctgggtgagggaacggtcatccacattgtgccgcgactggccggggccggaaagggtggactgcagattgtgctgggggcggcagccatcgtgggctctttcttcacggccggtgcctcgatggcgttatggggtacagccctgagtgccggcggtttttctgccaccacgatgctgttttcactgggggccagcatgatactgggcggtgtggcccagatgctggccccgaaggcaaaaacaccggattaccgcgcaacggataacggcagacagaacacgtacttttcctcactggataacatgattgcccaggggaacccgatgccggtgccttacggggaaatgctggttggctcccgccgtatatcccaggacatcagcacccgtgatgaaggcgggggcggaaaggtcgtggttatcgggcggcaggggtaa

SEQ ID NO: 262530 - DNA, 3693 bp, Klebsiella pneumoniae
atgggaaaaggtggcggtaaggcacacacgcctcgtgaggcgaaggataatctcaaatccacgcagatgatgagtgtgattgatgcgattggtgagggaccgatagaaggtccggtgaagggactgcagagtattctggtgaacaaaaccccgctgacggacacggacggtaatcccgtgatacacggtgtgactgcggtctggcgtgccggggagcaggagcagacaccaccggaaggctttgagtcctccggagctgaaaccggactgggcgtggaagtgacgaaggcaaaaccggtgacgcgcaccattacgtccgcgaacattgaccgcctgcgggttaccttcggggtgcagtcactggtgcagaccacgtcaaagggcgaccgtaacccggcatccgtccgcctgctgattcagttacagcgtaatggccgctgggtgacggaaaaggatgtcaccattaacggcaagaccacctcgcagttcctggcctcggtgattctggataatctgcctccccggccctttaacatccggatggtcagggagacggcggacagcaccacggaccagctgcagaataagacgctgtggtcgtcatacaccgaaatcatcgatgtgaaacagtgctacccgaacacggccattgtggggctgcaggtggatgcggagcagttcggcggccagcagatgacggtgaactaccatatccgcggtcgcatcatccaggtgccgtcaaactatgacccggaaaaacgcacgtacagtggtatctgggacggcagcctgaaaccggcatacagcaacaacccggcctggtgtctgtgggacatgctgactcacccgcgctacggcatgggaaaacgtctgggggcggcggatgtggacaagtgggcgctgtatgccatcgggcagtactgcgaccagacggtcccggatggtttcggggggaccgagccgcggatgacctttaatgcgtacctggcacaacagcgtaaggcgtgggacgttctcagtgatttctgctctgcgatgcgctgtatgccggtatggaacggccagacgctgacgttcgttcaggaccgtccgtcggatgtggtgtggccgtacaccaacagcgatgtggtggtggatgataacggcgtgggtttccgctacagcttcagtgccctgaaggaccggcacacggcagtggaggtgaattacaccgacccgcagaacggctggcagacctccacggaactggtggaagacccggaagccatactgcgctacggacgcaacctgctgaagatggacgcgttcggctgtaccagccgcggtcaggcccaccgtgccgggctgtgggtgataaagaccgaactgctggaaacgcagacggtggatttcacgcttgggtcacaggggctgcgtcacacacccggtgacatcattgaaatctgtgataacgactatgccgggaccatgaccggcggacgtgtcctgtccatcgatgccgccagccgtaccctgacgctggaccgggaggtgacactgccggagaccggcacggccactgttaatctgattaacggcagcggtaagccggcgagcgtggccatcaccgcacaccccgcgcctgaccggatacaggtcagcaccctgccggatggtgtggagacatacggggtgtggggactctccctgccgtcactgcgtcgtcgcctgttccgctgtgtctccatccgggaaaacacggacggcacgttcgccatcacggcggtgcagcacgtaccggaaaaagaagccattgtggataacggggccagctttgagccgcagtcaggcagcctgaacagcgttatcccaccggcagtgcagcacctgacggtggaggtgagtgcagctgacggtcagtatctggcacaggcgaaatgggacacgccgcgggtggtgaagggtgtgcgcttcagtctgcgcctgaccagtggtaagggagcggatgccagactggtgaccaccgccatcactgccgatacggagcaccgtttcagtggcctgccactgggggaatacaccctgacggtcagggcgattaacagttatggccagcagggcgaaccggccaccaccaccttccggattaacgcgccagcaaaacccgccaccattgaactgacgccggggtattttcagataacggcggtcccgcgtcttgcggtgtatgacccgacggtacagtttgaattctggttctcagaaaaacgcatcacgaacacagcacaggtggaaaaatctgcccgttatctggggaccggcagtcagtggactgtccaggggagccggattaagccggggacggatttctggttttacgtgcgaagcgtcaacctggtgggaaaatctgcttttgtggaagccagcgggcagcccagcaatgatggtgaagggtatctggaaattttccgggggctgatagatgagacgcttctgggccaggcactgaaagagcgcattgatgcttcagcgctgcgtacggaggtcacgcaactggaagaagatatccgtcagcggatggacacggatatcgcagaagtgacccggaaaatcgggaaggcggaaaacagcctcacgcagctggttgcgaaaaagaatgaggaccagacactggccatcgcgcaggtgagccagaaagtggaccgggtgagcagtgaaatctcacagactgtcagccaggggcagtcagaaaacgcccgacagatagcacaggtccgccagtacgtggataaaaaagggagtgaaattacctcgaccacggataaaaagctgggtgaccaggccgtgaccatacagcaaatccagcgggttcagtcagacacgcgcaatgagctgaatgccatgtatatgctgaaggtgcagaaaacaaaaaacggtattccctatgtggccgggattggcgcggggattgaggatgttgatggtcagaccctgagtaacattctgctgcaggccgatcgcattgcgatgattaccccggagaacggcaacaccacgccgctgtttgtggcgcaggggaatcagctgttcatgaacgacgtgttcctgaagcgactgtttgcggtgagcatcacgtcatccggcaatcctccgacgttttccctgacgccggatggcaggctgacagcccgcaatgcggatatcagtggagccatcacggcgaataccggcacgctcaataatgtcaccattaacgagaactgtgtcatcagagggaaactgtctgcaaaccagattgaaggcgatctcgttaaaacagtgggtaaggctttcccccgtgactcccgtgcaccggagcggtggccatcagggaccattaccgtcagggtttatgacgatcagccgtttgaccggcaaattgttattccagcggtggctttcagcggtgccagacatgaacgggagaatagcgatacttattcgtcatgccgcctgatagtgaagaaaaacggggctgaaatttataaccgaacggctatggataatactctggtttacacgggtgttattgatatgcctgctggtcgcggccacatgacgctggagttttctgtatcagcatggtgggtaaatggctggtatcccacagcaagtatcagcgatttgctggttgttgtgatgaagaaagccactgcaggcatcacgattagctga

SEQ ID NO: 262531 - DNA, 333 bp, Klebsiella pneumoniae
gtggccgataccgcccatggcgaccagtttttctgctttggctaccgcgtcttcgaaatcttttgcacggtacatagccagcgtcggagacagtttttcgtgagcaaacggctcgctctcgtcaacgttggtcacttcaccaatcagaattttggtggtggccggcacggtgaagcctgccagttcagcgattttggccgctggctgaccaacgatagccgcgttcagcgcgccatttttcaggataatgtcctgaacggctttcagctctttaccctgcagcagatagccgccgtggctggcgaaacgttcgcgaaccgcgtcatagactga

SEQ ID NO: 262532 - DNA, 168 bp, Klebsiella pneumoniae
atgatggcgttacgcgttttcagactgatgagcgatttgaaaatggctgttgaagtcgggttagtggtcggtacgataccgcagatgatgccgataggctcagcaatagtgatggtgccaaaggtgtcgtcttctgacagaacgccacaggttttttcgtctttataa

SEQ ID NO: 262533 - DNA, 297 bp, Klebsiella pneumoniae; identical to SEQ ID NO: 139456

SEQ ID NO: 262534 - DNA, 1131 bp, Klebsiella pneumoniae
ttgatattcaaatgggatgttattttcttccagcgccaccgccagatccgcttccgcgcgatcccaggtctcgtcgctaccgatacgtttttccgggcgagtcgacagtttgacgacgatcttctcgaagccaaaggtgctatacatatcgtagaccatacgaatacaggcgttcacttcatcgcgaacctgatcttcagtacagaagatatgcgcatcatcctgggtaaagccgcgaacgcgcatcagaccatgcagcgcgccagacggttcgttacggtggcagctaccgaattccgccatacgcagcggcaggtcgcggtaggatttcagcccctggttgaagatctgcacgtgacccgggcagttcatcggcttgatacagtattcacggttctcagaagaggtggtgaacatcgcatctttgtagttgtcccagtggccggttttttcccacagcacacggtccatcatgaacggaccttttacttcctgatactggtactctttcagtttagaacgaacaaacgtttccagttcacggaagatggtccagccgtcattgtgccagaacaccatccccggcgcctcttcctgcatgtgatacaggtcgagctgcttaccgattttacggtggtcacgcttggcggcttcttccagacgctgcaggtaggcattcagcgcttttttatctgcccacgcggtgccgtagatacgctgcaacattttattgttgctgtcgccgcgccagtaggctccggcggttttcatcagcttaaagtgatggcagaagcgcatgttcggtacgtgcggaccgcggcacatatcgatatattcttcatgatgatacaggccaggcttgtcatcatgggcaatgttttcatcaagaatagaaactttatagctttcgccgcgtttcacgaaggtttcacgcgcttcatgccagctcactttcttcttgataacgtcgtagtttttctcggcgagctcatgcatacgtttttcgagcgcgtcgatatcttcctgggtcagggtgtggtcgaggtctacgtcatagtagaaaccattatcgacaaccggaccgatagccattttggtgttgggccacagctgtttgatggcatggcctaa

SEQ ID NO: 262535 - DNA, 654 bp, Klebsiella pneumoniae
atgaagaaaattggcgtaattctgagcggatgcggcgtctatgacggttctgaaattcatgaagcggtgttgacgttgttagctatttcacgcagcggtgcgcaggcggtctgctttgcaccggataagcagcaggttgatgttatcaaccatttaacgggcgaagcgatgacggaaacgcgcaatgtgctgattgaagcggcacgaataacgcgcggtgaaatccgtcctctggcccaggccgatgccgctgaactggatgcgttgattgtgccggggggttttggcgcggcgaagaatttaagcaattttgccagtcttggtagcgaatgcaccgttgaccgtgaattaaaggcgctggcacaagcgatgcatcaggccggaaaaccgcttggttttatgtgtattgccccggcgatgctgccgaaaattttcgatttcccgctgcgtttgaccatcggtactgatatcgataccgcagaagtgctggaagagatgggcgcggagcatgtgccgtgtcctgtcgatgatatcgtggttgatgaagacaataagattgtcaccaccccggcatatatgctggcgcagaacattgcagaagcggcgagcggcattgataagctggtttcccgcgtgctggtcctggcggaatga

SEQ ID NO: 262536 - DNA, 729 bp, Klebsiella pneumoniae
atgagtaaaagccgcttaacggtgtttagtttcattcgccgttttcttctgcggttaatggttgtcctcgccgttttctggggtgggggcattgcgttgtttagcgttgcgcctgttcctttctctgcggtaatggtcgagcggcaagtcagcgcctggctgcatggcaattttcgttacgtggcacattctgactgggtcaacatggatcaaatctcgccgtggatgggactggcggtgattgccgcagaagatcagaagtttcctgagcactggggctttgatgtcgcttccattgagcaagccctggcgcacaacgaacgcaatgaaaaccgtattcgcggtgcatcaacgatttctcagcagacggccaaaaatctctttttatgggatgggcgtagctgggttcgaaaagggctggaagccggattaacgctggggatagaaacggtctggagcaaaaagcgtatcctgacggtttacctgaatatcgccgaatttggcgacggtgtgtttggcgtcgaagctgcggcacaacgttatttccacaaacccgcgagcaagcttacccggtcggaagctgcattactggcagctgtattacctaatccacttcgtttcaaagtctccgcgccatcgggctacgtgcgtagccgtcaggcgtggattttacggcagatgtatcagttaggcggtgagtcgtttatgcaacaacaccagctggattaa

SEQ ID NO: 262537 - DNA, 633 bp, Klebsiella pneumoniae
atgattcgcttatctgaacaaagtcccctgggcaccggaagacatcggaaatgttatgcgcatccggaagatgcccaacgctgtatcaagattgtctaccatcgtggcgatggtggcgataaagagatccgccgtgagttaaagtactacgcgcatcttggtcgccggttaaaagactggagtggaataccgcgctatcacggtaccgttgagacggattgcggaaccggttatgtctacgatgtgattgcagattttgacggcaaaccctccattacgctgaccgaatttgctgcacaatgccgttacgaagaagacattgcacaactgcgccagctactgaaacagctgaagcgttatttgcaggataaccgtatcgtgacgatgtcgctgaagccgcagaatatcctctgtcaccgcatcagtgagtcagaggttatccccgtcgtctgcgacaacattggtgaaagcacattgattccactggcgacctggtcgaagtggtgttgtctgcgtaagcaagagcggttatggaaacgatttatcgcccaaccggcgctgactattgccctgcagaaagatctgcaacctcgtgaaagcaaaacgctgaccctcacttcgcgcgaagcttaa

SEQ ID NO: 262538 - DNA, 288 bp, Klebsiella pneumoniae
atgcagctcaacattaccggaaataacgtcgagatcaccgaggcactgcgcgaatttgttacagccaaatttgccaaacttgagcaatattttgaccgaatcaaccaggtctatgttgttctgaaagtggagaaagtcacccacacctcagatgcaacactgcatgtaaacggtggtgaaattcatgccagcgcggaaggtcaggacatgtacgctgccattgatggcttaattgataagctggcacgccagttgaccaaacataaagataaactgaaacaacactaa

SEQ ID NO: 262539 - DNA, 1434 bp, Klebsiella pneumoniae
atgaagcaaggtttgcaactcaggcttagccaacaactggcgatgacgccacagctccaacaggcaattcgtctgttgcagttgtcgacgctggaacttcagcaggagctacagcaggcgctggagagtaatccgctgcttgagcaaatcgacactcatgaagaaatcgacacccgcgaaacgcaagacagtgaaacgctggacaccgccgacgcgctcgaacaaaaagagatgccggaagagctgccgctcgatgccagttgggacaccatttacaccgctggtacaccatccggcaccagcggtgactacattgacgacgagctgccggtctatcagggcgaaacgacgcagaccttgcaggattacctgatgtggcaggtcgagttgacaccgttttctgacactgaccgcgctattgctacctctatcgtcgatgccgttgatgacaccggttatctgactgtcccactggaagatattctcgaaagtatgggcgatgaagagattgacatcgacgaagttgaagccgtccttaagcggatccaacggtttgatccggtcggtgtggcagcaaaagatctgcgtgactgtctgctgatccaactctcccaattcgataaaaccacgccatggctggaagaggccagactgatcattagcgatcatctcgatctgttagccaatcacgacttccgcactttaatgcgcgtcacgcgtctgaaagaagatgtgctgaaagaagccgtcaatctgatccagtcgctcgatccgcgccccgggcagtcgatccagacgggcgaacctgagtatgtcattccagatgtgctggtgcgtaagcataacggtcactggacggtagaactcaacagtgacagcattccgcgtctgcaaatcaaccagcactacgcctcgatgtgcaataacgcgcgcaacgatggtgacagccagtttatccgcagcaatctgcaggatgccaaatggttgatcaagagtctggaaagccgtaacgatacgctactgcgcgtgagtcgctgtatcgttgaacagcagcaagccttctttgagcaaggcgaagaatatatgaaaccgatggtactggccgatatcgcccaggctgtcgaaatgcatgaatcgacgatatctcgcgtgaccacgcaaaaatacctgcatagtccacgaggcatttttgaactgaagtatttcttttccagtcacgtcaataccgagggcggcggcgaagcttcctccacggcgattcgtgcgctggttaagaaattaatcgcggcggaaaacccagcgaaaccgttgagcgacagcaagttaacctctttgctgtcggaacaaggtatcatggtggcacgccgcactgttgcgaagtaccgagagtctttatccattccgccgtcaaaccagcgtaaacagctcgtttga

SEQ ID NO: 262540 - DNA, 558 bp, Klebsiella pneumoniae
atgaaattcaaaacaaacaaactcagccttaatcttgtgcttgccagctcacttctggccgccagcattccggcatttgccgtaaccggagacactgatcagccgatccacattgaatcggaccagcaatctcttgatatgcaaggcaacgtggttacctttaccggtaatgtcatcgtcacccagggcaccatcaaaattaatgccgacaaagtggtcgttacccgtccgggcggcgaacaaggtaaagaagtgattgacggctacggtaaaccggcaacgttctaccagatgcaggacaatggtaaacccgttgaaggtcacgcttcccagatgcactacgaactggcaaaagattttgtcgttctgacgggtaatgcttatctgcagcaggtcgatagcaacattaagggcgataagatcacttacctggtgaaagagcagaaaatgcaggctttcagcgacaaaggtaagcgcgtaaccaccgttctggtgccgtcgcagctgcaggacaaaaacaacaaaggccagaccccggcacagaagaagggtaattaa

SEQ ID NO: 262541 - DNA, 576 bp, Klebsiella pneumoniae
atgagtaaagccagacgttgggttatcattgtgctatcactggcggttctggtgatgatcggcattaatatggccgaaaaagacgataccgcccaggtggtcgtcaacaacaatgatcccacctataaaagcgagcatacggacacgctcgtctataacccagaaggggcactaagctatcgattgattgctcaacacgttgaatattattccgatcaggccgtttcgtggtttacgcagccggtacttaccacgtttgataaggataaaatcccgacatggtccgtaaaagcagataaagccaagctgaccaatgaccggatgctctatttatatggacacgttgaagtcaacgcacttgtgccggactctcaacttcgcagaatcacgacggataacgcgcagatcaatctggtgacgcaggatgttacctctgaagacctcgtcacgttatacggaacaacatttaactccagcggtctgaaaatgcgcggcaacttacgcagcaagaacgccgagctgattgaaaaggttagaacatcctatgaaattcaaaacaaacaaactcagccttaa

SEQ ID NO: 262542 - DNA, 567 bp, Klebsiella pneumoniae
atgagcaaagcaggtgcgtcgcttgcgacctgttacggccctgtcagcgccgacgttatagcaaaagcagagaacattcgtctgctgatcctcgatgtcgatggcgtactgtcagatggcctgatttatatgggcaataatggcgaagagctgaaagcgttcaatgttcgtgacggttatggcattcgttgtgcgctcacctctgatattgaagtcgctatcattaccgggcgaaaggctaaactggtagaagatcgttgtgccacattggggatcactcacttgtatcaggggcagtcaaacaaactgatcgcctttagcgatttgctggaaaaactggcgattgccccggaaaatgtggcttatgtcggcgatgatctcatcgactggccggtaatggaaaaagtgggtttaagcgtcgccgtggccgatgcgcatccactgttgctcccgcgcgccgattacgtgacgcgcattgctggcggtcgtggtgcagtgcgtgaagtttgcgacttattactcctggcgcagggcaaactggatgaagccaaagggcaatcgatatga

SEQ ID NO: 262543 - DNA, 987 bp, Klebsiella pneumoniae
atgtcgcacgtagagttacaaccgggttttgactttcagcaagcaggtaaagaagtcctggcgattgaacgtgaatgcctggcggagcttgatcaatacatcaatcagaatttcacgcttgcctgtgaaaagatgttctggtgtaaagggaaagttgtcgtcatggggatggggaaatcggggcatattgggcgcaaaatggcggcaacgtttgccagcaccggtacaccttcatttttcgtccatcctggtgaagccgcgcatggtgatttaggcatggtcaccccacaggatgtggtgattgctatctctaactcaggtgaatccagcgaaatcacggccttaattccagtgcttaagcgtcttcacgtaccgttaatctgcatcaccggtcgcccggagagcagcatggcgcgcgccgcagatgttcatctgtgtgttaaagtagcgaaagaagcctgtccgttagggctggcaccgaccagcagcaccaccgccacgctggttatgggcgatgccctcgctgtcgcgctgttaaaagcacgcggctttactgccgaagattttgcgctctcacatccaggcggcgcactgggtcgtaaacttctgctgcgcgtaaacgatattatgcatacgggcgatgagatcccgcatgttaagaaaacggccagtctgcgtgacgcattgctggaagttacccgcaaaaatcttggtatgactgtcatttgcgatgacaatatgatgattgaaggcatctttaccgacggtgatttacgccgtgtcttcgatatgggcgtggatgttcgtcagttaagtattgccgatgttatgacgccggggggaatacgcgtgcgccctggcattctggccgttgaggcactgaacttaatgcagtcccgccatatcacctccgtgatggttgccgatggcgaccatttactcggtgtgttacatatgcatgatttactgcgtgcaggcgtagtgtaa

SEQ ID NO: 262544 - DNA, 978 bp, Klebsiella pneumoniae
atgcttttagctacggcactgttaattgttggtttacttttggtcgtttacagtgccgaccgcctggtttttgccgcgtctattctttgccgaacctttggcatcccgccgctgatcatcggcatgacggtggtcagtattggtacatcgttaccagaaatcatcgtctcgcttgccgcgtctttgcacgaacaacgcgatttagccgttggtacagccctcggctcaaacattatcaatatattgctgatcctcggtctggctgcgctggttcgtccttttaccgtccattctgatgttctacgccgtgaattacccttaatgttgttggtcagcgtggtggccggttccgtactctatgacggacaacttagtcgcagcgatggtatctttctcctctttctggctgtgctatggctgctgttcattgttaaacttgcacgtcaggctgaacgtcaggggactgacagcctgaccagagagcagcttgcagagttgccgcctgacggtggattgcccgtcgcgtttttatggctcggcattgcgcttatcatcatgccagtggccacgcggatggtggttgataacgccacggtgctggcgaattactttgccatcagcgagttgacgatgggtctgacggcaattgctatcggaaccagcctgccggaactggcaaccgcaatagcgggggttcgcaaaggtgaaaacgacattgctgtcggaaatatcattggcgcaaacatttttaatattgtcatcgtgttgggtttacccgcgctgataacgccaggagagattgatccactggcgtacagtcgtgactacagcgtgatgttgctggtgagcattatttttgcgttgctatgctggcggcgctccccgcaaccgggccgtggtgtaggggtattattaactggcggatttatcgtatggctggcgatgttgtactggttatcgccaatactcgttgaataa

SEQ ID NO: 262545 - DNA, 810 bp, Klebsiella pneumoniae
atggagcagtctgtggcgaatttagtcgatatgcgcgatgtcagttttacgcgtggcaatcgctgcatcttcgataatatttccctgaccgtgccgcgagggaagatcacggcgatcatggggccatcgggcatcggtaaaacgacgctactccgtctgattggcgggcaaatcgcaccagatcatggtgagattcttttcgatggtgagaatattccggcgatgtctcgttcgcgcctgtatacagtgcgcaaacggatgagcatgttatttcagtccggggcgttgttcactgatatgaacgtatttgacaacgtcgcctatccactgcgcgaacatacccaacttcccgcgccattgttgcatagtacggtgatgatgaagctggaggccgtggggctgcgtggagcggctaaactaatgccttctgaactttccggtgggatggcgcggcgtgcagcgctggcgcgtgcgattgcgctggagccggatctcatcatgtttgatgaaccctttgttgggcaagatcccatcaccatgggcgtactggtgaagctgatttctgagctgaacagcgcgttgggtgtgacttgtgtggtggtttctcacgatgtgccggaagtgttaagtattgccgatcacgcctggatcctggcggacaaaaaaattgtcgctcatggtagtgcccaggcgttgcaggcgaatcctgatccgcgcgtacgtcagtttctggacgggatagctgacgggcctgttccgttccgctatcctgccggcgattatcacgctgatcttttaccagggagttaa

SEQ ID NO: 262546 - DNA, 552 bp, Klebsiella pneumoniae
atgcaaacgaaaaaaaatgaaatttgggtgggtatctttttattagcagcactactggcggcgctgtttgtttgcctgaaggcggcgaacgtgacgtccatacgtactgaaccgacctacacgctttatgcgacgttcgataacattggcggcctgaaagcgcgctctccggtcagcattggtggtgttgttgtgggccgggtggcggatattacgctggacccgaaaacctatctgccgcgcgtaacgctggaaattgaacaacgttataaccacattcctgataccagttcgctgagcattcgtacttccggcctgctgggggaacaatatctggcattaaacgtcggttttgaagacccggaactggggactgctatcctgaaggatggcgatacaattcaggacaccaagtctgcgatggtgctggaagatcttattggtcagttcctttacggtagtaaaggcgatgacaataagaatagtggcgatgcgccagctgctgcgccaggtaataatgaaaccactgaacctgtgggtacaacgaaataa

SEQ ID NO: 262547 - DNA, 636 bp, Klebsiella pneumoniae
atgtttaaacgtttaatgatggtcgctttgctggtgattgcaccgctgagtgcggcaaccgcggcagaccagaccaatccgtataagctgatggacgaggcggcgcagaaaacgttcgatcgcctgaagaatgagcaaccgcaaattcgggccaacccggattatctgcgtaccattgtcgatcaggaactgttgccatacgtacaggtgaaatacgccggtgcgctggtgctgggccagtattacaagagtgcgacccctgctcaacgtgatgcttactttgccgctttccgtgagtacctgaagcaggcttacggtcaggcgctggcgatgtatcacggtcaaacctatcagattgcgccagaacagccgctgggcgataaaaccattgtgcctattcgcgttaccattattgacccgaatggccgcccgccggtgcgtctggacttccagtggcgtaaaaactcccagacgggcaactggcaggcttacgacatgattgctgaaggcgtcagtatgatcaccaccaaacaaaacgagtggggaacgctgctgcgtaccaaaggtatcgacggcctgactgcacaactgaaatcgatttctcaacagaaaatcactctggaagagaaaaaataa

SEQ ID NO: 262548 - DNA, 294 bp, Klebsiella pneumoniae
atgagcgagtcactgagctggatgcagacgggtgacacgctggcgttatccggagagctggatcaggacgttctgctaccgctttgggaaatgcgtgaggaagcggtgaaggggattacctgcatcgatcttagccgtgtgtcccgcgtggatacgggtggactggcactgctgctccatcttatcgatctggcgaaaaagcagggcaacaacgtgacgcttcagggggtaaacgacaaagtgtataccctggcgaaattgtataatttgcctgctgatgttctgcctcgttaa

SEQ ID NO: 262549 - DNA, 279 bp, Klebsiella pneumoniae
atggaaagtaatttcattgactggcatcccgctgacatcattgcgggtttgcgcaagaagggaacgtcaatggcggcggaatctcgcagaaatggtttgagttcctcaacgctggcgaacgcattatcgcgcccctggccgaaaggagagatgattattgcgaaagccctgggaactgacccctggattatctggccatctcgctaccatgatccgcagacccatgagtttatcgacagaacgcagttgatgcgtagctacactaaaccgaaaaaataa

SEQ ID NO: 262550 - DNA, 474 bp, Klebsiella pneumoniae
atgctcgacccgcgcgaatgcggtctgaaaagcgtcgctgaagcggcaaataccccggtggcgctggtttttggtcgcgagcgcgtcggcttgaccaatgaagagttgcagaaatgccattatcatgtcgcgattgccgctaacccggaatacagttcgctgaatctggcgatggcggttcaggttattgcctatgaagtgcgcatggcctggctggcaactcaggaaaatggcgaacaagtcgagcatgaagagacgccgtatccgctggtcgatgatctggagcgtttttatggtcatctggaacaaacgctgctggcaaccggttttattcgtgaaaaccatccggggcaggtgatgaataaattgcgtcgtttgtttacccgtgcgcgcccggaaagccaggaattgaatatcctgcgcgggattctggcttctatagagcagcagaataaaggtaataaggccgaataa

SEQ ID NO: 262551 - DNA, 489 bp, Klebsiella pneumoniae; identical to SEQ ID NO: 2622

SEQ ID NO: 262552 - DNA, 1215 bp, Klebsiella pneumoniae; identical to SEQ ID NO: 35844

SEQ ID NO: 262553 - DNA, 324 bp, Klebsiella pneumoniae; identical to SEQ ID NO: 35842

SEQ ID NO: 262554 - DNA, 516 bp, Klebsiella pneumoniae; identical to SEQ ID NO: 35841

SEQ ID NO: 262555 - DNA, 777 bp, Klebsiella pneumoniae; identical to SEQ ID NO: 35836

SEQ ID NO: 262556 - DNA, 846 bp, Klebsiella pneumoniae; identical to SEQ ID NO: 35835

SEQ ID NO: 262557 - DNA, 4962 bp, Klebsiella pneumoniae; identical to SEQ ID NO: 35834

SEQ ID NO: 262558 - DNA, 2178 bp, Klebsiella pneumoniae
gtggcgcaggatgggacgccgctctggcgctttgccgatgcggaaggcatctggcgttatccggtaacaatcgaagatgtttctccacgttaccttgaagcgctgatcaattatgaagatcgctggttctggaagcatccgggggtgaatccattctcggtggcgcgcgcagcatggcaagatctcacttcgggacgggttatttccggtggcagcacgctcactatgcaggttgctcgtctgcttgatcctcaccccaaaacatttggcggcaaaattcgccagctctggcgcgcgttgcaactggagtggcatctgtctaagcgtgaaattctgaccttgtatcttaaccgtgccccgtttggcggtacgttgcaggggatcggtgcggcaagttgggcttatctcggaaaatcgcctacgaatttaagctattccgaggcggcaatgctggcggttttgccgcaagctcccagccgtcttcgcccggatcgctggccggaacgtgccgaagccgcgcgtaataaagtgctcgaacggatggctgcgcaaggtgtgtggtcccgtgagcaggtaaaagaatcaagggaagaacccatctggctggcaccccgacaaatgccgcaactggcaccgctgttttcgcgcatgatgctcggtaaaagcaaaagcgacaaaatcgttactacgctggatgccggtcttcaacgacgtctggaagaactggcgcaaaactggaaaggacgattaccaccgcgcagctcactggcgatgatcgtggttgatcataccgatatgcgtgttcgcggctgggtgggttctgttgatctcaacgatgattcacgctttggtcatgttgatatggtcaatgcgatccgatcgccaggatcggtgctcaaaccgtttgtttatggtctggcgctggatgaaggcttgatccacccggcatcactgctgcaagacgttccccggcgcaccggtgattatcgaccaggtaactttgatagcggttttcatggcccgatcagcatgagcgaggcgctggtgcgctcgctgaatttacctgctgtgcaggtgctggaagcctatggaccgaaacggtttgcggcaaaattacgcaatgttggattgccgttgtatctgcccaacggcgctgcgccgaatctttcgctcattctcggcggcgctggtgcaaaactggaagatatggcggcagcgtataccgcgtttgctcgccacggcaaggcaggtaaattgcgcttacagcctgacgatccgctgcttgaacggcctttaatgtcgtcgggggctgcgtggatcattcgccggattatggctgatgaagcgcaacccttgccggatggtgccttgccgcgcgtcgccccactggcatggaaaacgggcaccagctatggctatcgtgatgcctgggcgattggggttaacgctcgctatgtcattgggatctggactggcagaccggacggcacgcccgttgttggtcagtttggctttgccagcgccgtaccattgttgaatcaggttaataatatcttactgtcgcgcagtgcgaatctgccggaagacccacgtcctgactctgtaagtcgtggcgttatctgctggccgggcggacagtctttgccggaaggtgacggtaactgccgccgccgcctggcaacctggctgctggacgggagtcagccaccaactctattactgccggagcaggaaggcattaatggcattcgtttccccatctggctggatgaaaacggcaaacgtgttgccgctgattgccctcaggcgcgacaagaaatgataaatgtctggccgctaccgctggaaccctggttgcccgcatcagaacgccgcgctgtgcgcttaccaccggcctcgacaatttgcccgccatacggtcacgatgcacaactcccactgcagctgacaggtgttcgcgatggcgcgattattaaacgtttaccgggcgcagcggaagcgactttgccgttgcaatcaagtggaggggcaggtgaacgctggtggtttctgaatggcgaaccgttaactgaacgcgggcgcaacgtgaccctgcatttgatggataagggcgattatcaattgctggtgatggatgaggtggggcaaatcgcgacagtgaaatttgtcatgcaatag

SEQ ID NO: 262559 - DNA, 711 bp, Klebsiella pneumoniae
atgcaaactaggcgtaccccctactctatttcctttatggcgacagtgttacttttattgctctttgcttgccatagcaccgttgccaacgcagctgtcgcactgggtgcgacgcgggtaatttatccggcaaaccagaaacaggttttattgcctgtcacgaataatgatcctgccagtgtctatctcattcagtcatggatagaaaatgagggtgaccaaaaagacacccagtttgtcattacgccaccgcttttttccatgcaaggtaaaaaagagaatacgctgcggataatcaacgccactaatcatcagttaccaggcgaccgtgaaagcctgttctgggttaatgttaaagctattcctgctatggaaaaagatcagaagaatgagaatacattacagctggcaattattagccgcataaaaatgttttatcgccccacgaacctggcaatggcacctgaagaagcgcctgcaatgcttcggtttcgtcgcagcggcagcaaactcactcttattaatccaacgccctacttcattaccgtaacaaatatgaaagcaggaaatagcaatctcccaaacaccatggtgccgccaaaaggtgaagtatcggtggatatcccgcatgctgcaaccggggatatcagttttcagacgatcaatgattacggtgcattaactccgcgtattaaggcaaccatgcaataa

SEQ ID NO: 262560 - DNA, 564 bp, Klebsiella pneumoniae; identical to SEQ ID NO: 9479

SEQ ID NO: 262561 - DNA, 1323 bp, Klebsiella pneumoniae
atgcctaaacttgtcacttggatgaacaaccagcgggtaggcgagttaacgaagttagccaatggcgcgcacacctttaagtatgcaccggagtggttagccaaccgttatgccagaccgttatcactttcgctgccattgcagagggggaatatcacctctgatgccgtatttaacttcttcgataacctgttacccgatagcccgattgtacgtgaccggatcgttaaacgttatcatgccaaatccagacaaccgtttgatttattgtcagaaatagggcgagacagcgttggtgccgtgacgttaatacccgaagatgaaaccgtaacgcatccgataatggcatgggaaaagcttactgaagccagacttgaagaagtattaacggcttataaagcagatatccctctgggcatgattagagaagaaaatgactttcgcatctcggttgctggcgcgcaggagaagacagcgctgctcagaataggcaatgactggtgcattccgaaaggaataacgccgacgacgcacatcattaaattaccgattggcgaaatcaggcagcccaatgcgacgctcgatctcagccaaagcgttgataatgagtattactgtctgctgctggcgaaagaacttgggttgaatgtgccggacgcagaaatcattaaagcggggaatgtgcgcgcgttagcggtcgaacgttttgacaggcgttggaatgctgagcgaacggttttacttcgcttgccacaggaggatatgtgtcagacattcggtttaccttcatcggtgaaatatgaatcagatggaggcccaggcatcgcgcggatcatggcttttttgatggggtccagcgaggcgctgaaagatcgctatgattttatgaagtttcaggtgttccagtggttgattggcgcaacggatggccatgcaaaaaacttctccgtatttattcaggctggcggcagttatcgactcacgccattttacgacatcatttcagcatttccggtattgggtggcgcaggaatacacatcagcgatctcaaactggcaatgggggttaacgcatccaaaggcaaaaaaacggcaatcgataaaatttatccgcgacattttctggcgacagcaaaggtgctgaaatttccggaagtgcagatgcatgaaatcctgagtgactttgccagaatgattccggcagcactggataacgtgaagacttcattaccgacagattttccggagaacgtggtgacggcagttgaaaccaatgtgttgaggttgcacggccggttaagccgagaatacggtattaagtaa

SEQ ID NO: 262562 - DNA, 285 bp, Klebsiella pneumoniae
atgctgtggacgtatgacatgatgagctttcagaagatctatagcccaacgcaattagcgaatgcaatgaaactggttcgtcagcaaaatggctggacgcagagcgagctggcgaaaaaaatcggcattaagcaggcgacaatttccaatttcgaaaacaaccctgacaataccacgctgacgacattttttaagattttacagtcgcttgaactctcaatgacgctatgcgacacgaaaaatgcctcgccagaatcaacagaacagcaagatctggagtggtaa

SEQ ID NO: 262563 - DNA, 4581 bp, Klebsiella pneumoniae
gtgcaggatcaagactctgtcatcacggtacgcagactctataatggatatttcggtaatggcaaagtcaatatttccaataatggactgattaataacaaagaatattcattggtgggcgttcaggacggttcccacggtgtcgtcaacgtgactgataaagggcattggaatttcctcggaacgggcgaagctttccgctatatctatatcggtgatgctggcgatggtgaacttaatgtctcgagtgaaggcaaagtagattcgggaattatcactgcggggatgaaagaaacaggcacaggcaacattactgttaaggataagaactccgttatcactaatctcggaactaatcttggttatgacggccacggcgaaatgaatatcagtaatgaggggcttgttgtcagcaacggaggaagctcactcggttatggagaaaccggcgtcgggaaggttagcatcaccacgggggggatgtgggaggtcaataagaatgtctataccactattggtgttgcgggcgtcggaaacctcaatatcagcgatggcggtaagttcgtatcgcaaaatattacttttttgggcgataaagcaagcggtatcggcacactgaacctgatggatgcgacatcattgttcgatactgtaggtatcaatgtcggtaattttggtagcggcatcgtaaatgtcagtaatggtgccactcttaattcaacgggctatggatttatcggaggaaatgcctccggtaaggggatagttaatatttcaacggatagtctctggaatttaaaaacgtcatctactaacgcccaattgctacaggtcggtgtattaggcgcgggtgaactgaatattaccaccggaggtatagttaaagcgcgtgatacacaaatagctctcaatgacaaaagtaagggcgacgtgcgggtggatgggcagaactctcttcttgaaacattcaatatgaacgtagggacgactggcacaggtacgttaaccctgacgaataacggtacgctgaatgtcgaaggtggagaagtttacttaggtgtttttgcgcctgctgtaggaacgctaaacattggtactgctcacggtgaggcggcggcagatgccggatttatcaccaatgcgacgaaagtggagtttggtcttggcgaaggcgtttttgtctttaatcataccaataacagtgatgccggctaccaggtcgatatgctgattacgggtgacgataaagacggaaaagtgatgcatgatgcaggccatacggtgttcaatgcagggaatacttatagcggtaaaacgttggtcaatggcggcctcctgaccattgcgtcacatacggcagatggggtaactggcatgggttcgagtgaagtaaccattgcaagccccggtacgctcgacattctcgcatcaacgaacagtgcgggagattacacgctgaccaatgcgctcaaaggcgatggcttgatgcgagtgcagctgtcatcctccgacaaaatgtttggctttacccatgcagcagggactgaattcgccggtgttgcccaactgaaagacagtaccttcgcactggaacgcgacaacaccgctgcgcttactcacgcgatgctgcagtctgacagtgaaaataccacatcggtaaaagtgggagagcaatccattggtggactagccatgaatggcggtacgctcactttcgatacggatatacctgctgcgacgcttgcggagggatatatcagcgtcgatacactggttgtcggcgcgggtgactacacctggaaaggccgtaactatcaggtaaacgggacgggcgacgtgcttatcgacgtgcctaaaccgtggaatgatcccatggcgaataaccctctgacgacgctcaatttgctggaacacgatgatagtcatgtcggcgttcaactggtgaaggcgcaaacggttattgggtcgggtggctcattaacgttacgtgatttacagggcgacgaggtggaagcggacaaaacgttacatattgcgcaaaacggaacggtggtcgccgagggtgattatggattccgcctcacgaccgcaccaggtgatggtttgtacgttaactatgggctgaaagcgctgaacatccatggtgggcaaaagctgacgttagccgaacatggcggagcctatggcgcaacggccgatatgtcggcaaaaatcggtggtgaaggggatctggcaatcaatacggtgcgacaggtttcgctttccaacggtcagaacgactatcagggggcaacctacgttcagatggggacattacgtaccgatgcggatggtgcacttggcaacacccgggaactgaacatcagcaacgcggccatcgtcgatcttaatggatcggagcagacggtagaggcattcaccggactgataggttcgactgttttgttcaaagagggttcgctgacggtgaataaaggtgggatcagtcagggcgaactgacaggtggcggaaacctgaatgttacaggtggaacactggctatcgaggggcttaatgcacgctacaatgcgttaaccagcgttagcccaaatgcggaagtcagcctcgataatacgcaggggttaggcagaggaaatattgccaatgacggtctgttaacgctaaaaaacgtgactggcgaactgcgtaatagcataagcgggaagggtatcgtgagcgcaacagccaggacagacgtagagctggatggcgataatagccgctttgtggggcaattcaacattgatacaggcagcgcgctcagcgtcaacgagcagaaaaacctgggtgatgcttccgttatcaataatggcctgctcaccatctccactgagcgtagctgggcgatgacgcacagtatcagcggtagcggtgatgtgacaaaactgggtaccgggatcctgactcttaacaaagattccgcggcgtatcagggtacgacggatatcgtgggtggtgaaattgctttcggttccgactctgccattaatatggcaagtcagcacattaatatccataacagcggtgtgatgtcgggaaatgtcaccactgcaggtgatgtgaacgttatgccaggggggacactgcgtgtcgctaaaaccactgtcggcggtaacctggagaatggtggcacggttcaaatgaacagcgaaggggggaaaccggggaatgtactgaccgttaacggtaactataccggaaacaatggcctgatgacgttcaacgcgacgctgggcggcgataattcgcccaccgataagatgaacgtgaaaggcgatacccaagggaatactcgcgttcgggttgataacattggcggcgtcggtgcacaaacggtcaacggtattgaactcattgaggtcggcggtaattctgcaggtaacttcgcgctgaccaccggaactgtcgaagctggggcttacgtctacacgctggctaaagggaaggggaatgacgagaaaaactggtatctgaccagtaaatgggatggcgtaacgccagcggatacacccgatcccatcaataatccccctgttgtggatccggaaggcccatcagtttatcgcccggaggccggaagctatatcagcaacattgccgcagccaactcgctgtttagccatcgcttacacgaccgtctgggtgagccgcagtatacagattcactgcattctcagggttcggcaagcagtatgtggatgcgtcatgtcggggggcacgaacgtttcaggaccggtgacggccagctaaatactcaggctaaccgctatgtattgcagctaggcggcgatttggcgcagtggagtagcaacgcgcaggatcgctggcatcttggcgtgatggcaggctacgccaatcagcacagtaatactcagagtaatcgtgtgggttataaatcggatgggcgcatcagcggttacagcgcaggactgtacgcgacctggtatcagaacgatgcgaataagaccggcgcttatgttgacagctgggcgctgtataactggtttgataacagcgtcagttccgataaccgttctgctgacgactatgattctcgcggtgtgacggcctctgttgagggtgggtatacctttgaagcgggaacttttagcggcagcgaagggacgctgaatacctggtacgtccagccacaggtacaaatcacctggatgggtgtgaaagattctgaccatacccggaaagacggaacacgcattgaaacggaaggcgacggaaacgtgcaaacgcgacttggggtgaaaacctacctgaacagccatcaccagcgtgacgatggtaaacagcgtgagttccagccttacattgaagcgaactggatcaacaacagcaaagtctacgcagtgaagatgaatggtcaaaccgtaagccgtgatggtgcgcgtaatctcggtgaagtacgtaccggggttgaggcgaaagtaaataacaaccttagcctgtgggggaatgtcggtgtgcaactaggtgataaaggctatagcgatactcagggcatgctgggagtgaaatatagctggtaa

SEQ ID NO: 262564 - DNA, 873 bp, Klebsiella pneumoniae
atgctaaaaaccattcaggacaaagccaggcaccgtacccgtccactatgggcctggctaaaactactctggcaacgcattgatgaggacaacatgacaaccctggcaggtaaccttgcctatgtttcgttgctctcattagtgccgcttgttgccgttgtttttgcgcttttcgccgcttttcccatgttttccgacgtcagcatgcagttgcgtcactttatttttgccaactttctgcctgctactggcgatgttattcagcggtatatcgaacaatttgttgccaattccaacaagatgaccgccgttggggcgtgcgggctgatcgtcaccgcgttattgttgatgtactccatcgatagcgcgttgaataccatctggcgcagtaaacgagcgcgaccaaaaatttactcgtttgccgtgtactggatgattttaacgctggggccgctgctggcaggggccagtctggcgatcagttcctatttgctctccctgcgctgggcgagcgatctcaatactgtcatcgacaacgtgctgcgtatttttccgctgctgttgtcgtggatctccttctggttgctgtacagcattgttcctactatccgcgtacctaatcgcgacgcgattgtcggcgcgtttgtcgccgcactcctgttcgaagcaggaaagaaaggtttcgcgctttatatcaccatgttcccctcatatcagctcatttacggtgtgctggcggtgatccccattctctttgtttgggtctactggacatggtgtatcgtcttgcttggtgcggaaattactgtcactctcggggaataccgcaaactaaaacaagcagctgaacaagaagaagacgacgaaccatga

SEQ ID NO: 262565 - DNA, 600 bp, Klebsiella pneumoniae
atgctctatatctttgatttaggtaatgtgattgtcgatatcgactttaaccgtgtgctgggagcctggagcgatttaacgcgtgttccactggctacgcttaagaagagtttccacatgggcgaggcgtttcatcagcatgagcgtggggaaattagcgacgaagcgttcgcagaggcgctgtgtcatgagatggccctgccgctaagctatgagcagttctcccacggctggcaggcggtgtttgttgcgctgcgcccggaagtgatcgccatcatgcataaactgcgtgagcaggggcatcgcgtggtggtgctttccaatactaaccgcctgcatactaccttctggccggaggaatacccggaaatccgtgatgctgctgaccatatctatctgtcgcaagatctggggatgcgcaaacctgaagcacgaatttatcagcatgttttgcaggcggaaggtttttcacccagcgatacggtctttttcgacgataacgccgataatatagaaggagcgaatcagctaggcattaccagtattctggtgaaagataaaaccaccatcccggactatttcgcgaaggtgttatgctaa

SEQ ID NO: 262566 - DNA, 786 bp, Klebsiella pneumoniae
atgagccttaccgaactaaccggtaacccgcggcacgaccaactcctcatgctgatcgccgagcgtgggtatatgaatattgatgagctggcaaatctgctggatgtctccacgcagacggtccgccgggatattcgtaaattaagcgagcaaggactgattacgcgccatcacggtggcgcgggtcgggcttccagcgtcgttaatacggcgttcgagcagcgtgaggtttcgcaaaccgaggaaaaaaaagcgattgccgaagcggtggcagactatattcctgatggatcgacaatatttatcaccatcggtacgactgttgaacatgttgcccgggcgttacttaaccacaatcatttgcggataatcaccaacagcctgcgtgtggcgcatattctttaccacaacccgcgctttgaagtgatggtgcccggcggtacgttgcgctctcataatagcgggatcattggcccttcagcggcgtcctttgtggctgattttcgtgctgattatctggtaacaagcgttggggcgattgagagcgatggcgcgttgatggagtttgatgttaacgaagctaacgtggtgaaaacgatgatggcgcacgcgagaaatatcctgctggtcgccgatcacactaagtatcatgcttcggcggcggttgaaattggtaacgtggcacaggttaccgcgctctttaccgacgagctgccgcccgctgcgctaaaatcacgcttacaagacagccaaattgaaatcatccttccccaggaagacgcgtag

SEQ ID NO: 262567 - DNA, 897 bp, Klebsiella pneumoniae
atgattcgtgttgcttgtgtaggtattaccgtgatggatcgtatttattacgtggaaggattaccgacggagagcggtaaatacgtggcgagaaattatacggaagttggtggcgggccagcggcgacggcagcggttgcggcggcaaggctgggggcgcaggtcgattttattggtcgcgtcggtgatgacgacacgggcaacagcctgctggcagagctggaatcctggggcgttaacacccgttacaccaaacggtataaccaggcgaaatcttcgcaatccgccatcatggtggatgccaaaggcgagcggataatcattaactaccccagcccggatctgctgcctgacgcagagtggttggaggaaattgatttctctcagtgggatgttgtgctggcagatgtacgctggcacgacggtgctaaaaaagccttcactctggcccggcaggcgggcgtgatgaccgttctggacggggacattacgccgcaggatatcagcgagctggtggcattaagcgatcacgcggccttttcagaaccgggtctggcgcgcttaacgggcgtgaaagagatggccagtgcgctaaaacaggcacaaacgctcacaaatggtcatgtctatgtgacccaggggagtgccggctgcgactggctggaaaatggcgggcgtcaacatcaaccggctttcaaagttgatgtggtagataccaccggtgcgggtgatgtttttcacggtgcgctggcggtggcattggcaaccggtgggaatttagcggagtcagttcgcttcgccagcggtgtggcggcgttaaaatgcacgcgtcccggtggacgagccgggatccctgactgtgatcaaacccgatcttttttgtcactttttgtataa

SEQ ID NO: 262568 - DNA, 897 bp, Klebsiella pneumoniae
atggcagcaatcgcgtttatcggtttaggacaaatgggttcgccaatggcgagcaatttattgcagcaagggcatcaacttcgcgtctttgatgtgaacgccgaagctgtgcggcatctggtagacaaaggtgcgactcccgccgccaacccggcgcaggccgctaaagatgccgaatttatcattaccatgttgccgaatggcgatctggtgcgcagcgtgttgttcggtgaaaacggcgtttgcgaaagcttatctaccgatgcgctggtcatcgatatgtcgaccatccacccgctgcaaaccgataaattgattgccgatatgcaagccaaaggcttcagcatgatggatgttccggtaggccgtacttctgcaaatgccattaccggtactctgttactgctggctggcggcaccgctgaacaagttgaacgcgccacaccgatcctgatggcgatgggcagtgagttgatcaacgcgggcggtccgggcatggggatccgcgttaagctcatcaacaactacatgagcatcgcgctcaatgcgctttcggcagaagccgctgttttgtgcgaagccctgaatcttcccttcgatgttgccgtcaaggtgatgagcggcaccgccgccggtaaaggccacttcaccacttcctggccaaacaaagtcctcagcggggatctttctcccgccttcatgatcgatcttgcccataaggatcttggtatcgcccttgatgtcgccaaccagctgcatgtgccaatgccgctgggggccgcctcacgggaggtttatagccaggcgcgcgcagcgggtcgcggtcgccaggactggtccgccattctggaacaggtccgtgtcagtgccgggatgactgccaaagtaaaaatgtaa

SEQ ID NO: 262569 - DNA, 879 bp, Klebsiella pneumoniae
atgaataagtacaccatcaacgacattacacgcgcatcgggcggttttgccatgctggcggtcgatcaacgcgaagccatgcgcatgatgtttgccgcggctggggcacccgctccagtagccgatagcgttttaactgatttcaaagttaacgctgcaaaggccctctcgccttatgcctcggcgattctggtggatcagcaattctgttaccgccaggtggttgagcaaaacgcgattgccaaaagttgcgccatgattgtcgccgccgatgagttcattcctggcaacggtattccggtagatagcgtggtcattgaccgcagaatcaatccgctacaaatcaaacaagacggtggcaaagccttaaaactgctggtgctgtggcgtagtgatgaagatgcgcagcaacgtctggatatggtgaaagagtttaacgaactgtgccactcacacggcctggtaagcattattgagccagtcgtccgcccaccacgtcgtggcgataaattcgatcgcgaacaagcgatcatcgatgccgccaaagaactgggcgacagtggcgctgacctctacaaagttgaaatgccgctttatggcaaaggtccgcaacaagagcttctcagtgcttcacaacgtctgaatgaccatatcaatatgccgtgggtgatcctctcatccggtgtcgacgaaaaactgttcccgcgtgccgtacgcgtggcaatgacagcgggtgcatcgggcttcctggctggtcgtgccgtctgggcatcggttgtcggtttaccagacaacgagctgatgctgcgtgacgtttgcgcacctaaattacaacaacttggcgatatcgtcgacgaaatgatggctaaacgccgttaa

SEQ ID NO: 262570 - DNA, 1242 bp, Klebsiella pneumoniae
atgaaatggtttaacaccttaagtcacaaccgttggctggaacaggaaaccgaccgcatctttgattttggtaaaaattccgtagtaccgaccggatttggctggttaggcaataaagggcaaatcaaagaagagatgggcacccatctgtggatcaccgctcgtatgttgcacgtttattccgttgctgcggcgatgggtcgacctggcgcttactcgttggttgatcacggtatcaaagccatgaacggcgcactgcgcgataaaaaatatggcggttggtatgcctgcgtgaatgacgagggcgtggtggatgcctccaaacagggctatcaacacttctttgctctgctgggtgctgccagcgccgtcactaccggtcacccggaagcccgtaaacttctcgattacgccattgaaattattgagaaatacttctggagcgaagaagagcagatgtgcctggagtcctgggacgaagccttcagcaaaaccgaagagtaccgcggcggcaatgccaacatgcacgcggtggaagccttcctgattgtctatgacgtcacccatgacaaaaaatggctggatcgcgcgattcgcgtggcttccgtgattatccacgacgtcgccagaaataatcattatcgcgttaacgagcacttcgatacccagtggaatccgctgccggattacaacaaagataacccggcgcaccgcttccgcgcattcggtggcacgccgggccactggatcgaatggggccgtttaatgctgcacatccacgcggccctggaagcccgttgtgaacagccgcctgcctggctgctagaagatgccaaaggtctatttaacgccaccgtgcgcgatgcctgggcacccgatggcgcggacgggattgtttataccgttgactgggaaggcaaaccggtggttcgcgaacgtgtgcgttggcctatcgtcgaagcgatgggtacggcttacgcgctctacaccgtcaccggcgatcgccagtatgaaacctggtatcagacatggtgggactactgcattaagtacctgatggactatgaaaatggttcctggtggcaggagctggatgcggacaataaagtcaccacgaaagtctgggacggcaaacaggatatttatcacctgctgcattgcctggtgatcccgcgtatcccgttagcccctggtctggcaccggctgttgccgcaggcctgctggacattaacgcgaaataa

SEQ ID NO: 262571 - DNA, 903 bp, Klebsiella pneumoniae
atgcaaatcaccaacatgcattgcagtggacaaaccgtttcacttgccgcgggggattatcacgcgactatcgtgacggttggtgctggtctggctgaattaacctttcagggttgtcatttagtcatcccgcacaaacccgaagagatgccgctggcgcatctgggtaaagtgcttattccgtggccgaaccggatcgccaacggctgttaccgctatcaggggcaggactatcagttacccattaatgaacatagttcaaaagccgctattcacgggctgcttgcctggcgtgactggcaaattagcgaattaaccgccaccagcgttaccctgacagcttttctgccgcccagttacggctatccgtttatgctggcttcgcaggttgtttattcgctcaacgctcgcacgggcctttccgttgagatcgcaagccagaatattggtactgtgaccgcaccttatggtgtgggtattcatccttatttaacctgcaacttaacatctgttgatgactatcttttccagcttccggcagaacaggtttatgccgtcgatgagcacgcaaatccgacaacgcttcaccacgttgatgagctgaatttaaatttcacgcgggcgacaaaaatagccgcgacaaaaatagaccatacctttaaaaccgctaatgatctgtgggaaataaccattacccatccacaacaggcgctttcggtgagcctctgttccgatcaaccctgggtgcaggtttatagcggtgaaaaattacagcgtcagggactggcagttgaacctatgagttgcccgcctaacgcctttaattcaggtatcgacttattattactggaaccaggaaaaacgcaccgcctgttttttaatattcacgggcagcacaattaa

SEQ ID NO: 262572 - DNA, 876 bp, Klebsiella pneumoniae
atggacttttttacgttattttcgccggatggggccatggtggaaacaagcgtggtatgtatcgttatcgcgttaatgtttctttatacctttgtggggatatgcgcgggatttggcggtggtttaaccactatgccgctcgtcacgttaatgctccccgtaaaaatggcaactccgctctcggtgattgtcggcaccgcgaccgccttgtacgccacctggctgtcacgtaaagaaacggattggcgatcggcaatggtactgattattttctcgtttctgggaatacccgtcggtttatatgcgctgtcgtatttacccgaccattttatgaaagtgggcttaggcggattccttatcctttactcgttttacagcatgtttattcctcgcctgccgatttatgaccgtaactggatcgccgcacctatcggcgcagtagctggcgcattaggcgcggcgttctcaaccaacggaccgccgatggttatctacggtatgctgcgtaacttaggcccggcggcatttcgtggcactctgaacgctttcttcaccgcaaacaacatcgcggtgatcggcgggctggcgaccagcggaattttgactgtttctatctttaaactggtgctgttttgtattcccaccatgatcctcggttcactggttggacaatatgtgcataaacgcatttcagtcaaagtgttccgtgtgatggtctttttgttgctgattgcctccggttctatgttgataaaaggcgcactgggaattcccgccgctgccgcacttctgcctccgtttaccttgttagttatactgcaactggcatttggtaaaaaagtggcggcaatccgccgggctgaagaaagtaaataa

SEQ ID NO: 262573 - DNA, 2037 bp, Klebsiella pneumoniae
atggatacgccacgcccacaattaccagattttcagtttcatcagaataacgacagttttaccctacattttcaacagcgtcttattttaacccatagcaaagataatccttgtttatggattggttcaggtattgcggatatcgatatgttccgcggcaatttcagcattaaagataaactacaggagaaaattgcgcttaccgacgccatcgtcagccagtcaccggatggttggttaatccatttcagccgtggttctgacattagcgccacgctgcgtatctctgctgacgatcagggccgtttattgctggaactacaaaacgacaaccttaaccacaaccgcatctggctgcgccttgccgctcaaccagaggaccatatctacggctgcggcgaacagttttcctacttcgatctgcgcggcaaaccgttcccgctatggaccagtgaacaaggcgttggtcgcaacaaacaaacctatgtcacctggcaggccgactgcaaagaaaatgcgggcggcgactattactggactttcttcccacagcctacgtttgtcagcacgcagaagtattactgccatgttgataacagttgctacatgaacttcgactttagcgccccggaataccatgaactggcgctgtgggaagacaaagctacgctacgttttgaatgtgctgacacatacatctccctgctggaaaaattaactgccctgctgggacgccagccagaactgcccgactggatttatgacggggtaacgctcggcattcagggtgggacggaagtgtgtcagaagaaactggacaccatgcgtaacgcgggtgtgaaggttaacggtatctgggcgcaggactggtccgggatccgtatgacctcttttggcaaacgcgtaatgtggaactggaagtggaacagcgaaaactatccgcaactggactcacgtattaagcagtggaacaaagagggcgttcagttcctggcctatatcaacccatatgtcgccagcgataaagatctctgcgaagaagcggcacaacacggctatctggcaaaagatgcctctggcggtgactatctggtggagtttggcgagttttacggcggcgttgtcgatctcactaatccggaagcctacgcctggttcaaggaagtgatcaaaaagaacatgattgaactcggctgcggcggctggatggctgacttcggcgagtatctgcccaccgacacttacctgcataacggcgtcagcgcggaaattatgcataacgcctggcccgcactgtgggcgaaatgtaactacgaagcccttgaagaaacgggcaagcttggcgagatccttttctttatgcgcgccggttctaccgatagccagaaatactccactatgatgtgggcgggcgaccagaacgtcgactggagtctcgacgatggcctggcgtcggtcgtcccggcagcgctgtcgctggcaatgaccggacatggtttgcatcacagtgacattggcggttataccaccctgtttgagatgaagcgtagcaaagagctgctgctgcgctggtgtgatttcagcgccttcacgccgatgatgcgcacccacgaaggcaaccgcccgggcgacaactggcagtttgacggcgacgcggaaactattgcccattttgcccgtatgaccaccgtcttcaccaccctgaaaccttacctgaaagaggccgtcgcgctgaatgcgaagtccggcctgccggttatgcgcccgctgttcctgcattacgaagacgatgcgcagacctacaccctgaaatatcagtacctgttaggccgcgacattctggtcgctccggtgcatgaacaaggccgtagcgactggacgctctatcttccggaggataactgggtccacgcctggacaggtgaagcgttccggggcggggaagtgaccgttaatgcgcccatcggtaaaccgccggtcttttatcgcgccgatagcgaatgggcggcactgttcgcgtcgttaaaaagcatctaa

SEQ ID NO: 262574 - DNA, 1386 bp, Klebsiella pneumoniae
atgagtcacatcacaacggaagatccggctactttacgtctgccctttaaagagaaactctcttacggtatcggcgatctggcctctaacatcctgctggatatcggcacgctttatcttttgaagttttataccgacgttctggggctgcccggcacctatggcggcattatctttttgatctcgaaattctttaccgcctttaccgatatgggtaccggcatcatgctcgattcccggcgcaagatcggtccaaaaggcaaattccgcccttttattctgtatgcatcattcccggtcactctgctggcgatcgccaactttgtcggcacaccgtttgatgtcaccggtaaaacggtgatggccactattctgtttatgctctacgggctgtttttcagcatgatgaactgctcctacggcgcaatggtccccgctattaccaaaaaccccaacgaacgcgcatcgctggcagcatggcgtcagggtggcgctacattgggcttactgctgtgtacggtgggattcgtgccggttatgaatcttatcgaaggtaatcagcaaattggctatatcttcgctgccacgctgttttcactgttcggcctgctgtttatgtggatctgctactcgggcgtgaaagagcgttatgtcgaaacccaacctaccaatccggcgcaaaagccaggcctgttgcaatctttccgcgcaattgccggtaaccgcccgctgttcattctgtgcattgccaacctctgcactttaggggcgtttaacgtcaagctcgccatccaggtctattacacccagtacgtacttaacgatcccatcctgttgtcgtatatgggatttttcagcatgggctgtattttcatcggcgtgttcctgatgcctggcgcagtcagacgttttggtaagaagaaggtctatatcggcggcctgctgatttgggtgctgggcgatctgctcaactatttcttcggcggcggctcggtcagctttgtggcgttctcctgcctggcattcttcggctcggcgtttgttaacagcctgaactgggcgctggtttccgacaccgtcgagtacggcgagtggcgcaccggtgtgcgttcggaaggtacggtctacaccggcttcaccttctttcgcaaagtatctcaggcgctggcaggtttcttcccaggctggatgctgacgcaaatcggctatgtgccaaacgtcgcccaggctgaccataccatcgaaggtttacgccagctgatcttcatctacccaagcgcactggcggtagtcaccattgttgcgatgggttgtttctacagtctgaacgagaaaatgtacgtccgcattgttgaagaaatagaagcccgtaaacgcacggaataa

SEQ ID NO: 262575 - DNA, 1404 bp, Klebsiella pneumoniae
atgtctgaccataatccactgacattaaaactgaatctgcgggaaaaaatcgcctatggcatgggcgacgtcggttcgaatttaatgcttagcatcggcactctgtatctcctcaaattttataccgatgaattagggatgcctgcttactatggcgggattatctttctggtagcgaagttttttaccgcgtttaccgatatgctcaccggatttttactcgactcgcggaaaaatattgggcctaaaggcaaatttcgtccctttattttatatgcagcggttccggcggcgttaattgcaacgctccagtttatcgccaccacctttagtttgccggttaaaacgacgattgccacagcactgtttatgatgtttggactttcatacagtctgatgaactgctcgtatggtgcgatgatcccggcaattaccaaaaaccccaatgagcgcgcgcagctcgcagcttaccgccagggtggtgcaaccatagggctattgatttgtaccgtggcgtttattccgttgcagtcgcttttttctgactccaccgtcggttatgcctgcgcggcactgatgttctccattggtggctttatttttatgatgctgtgctacagaggcgtcaaagagcattatgtggacacgacgccaagcggacataaagccagtattctcaaatctttttgcgcgatatttcgtaatccgccattactggttttgtgcattgctaacctgtgtaccctggcggcatttaatatcaaactggcgattcaggtctattacacccagtatgtgctgaatgatattaatttattgtcgtggatgggatttttcagtatgggatgtatcctcgtcggcgtattactggtgccattaactgtaaaatgttttggtaaaaaacaggtttatttagctggcatggtgctatgggcggttggtgatatcctgaattatttctggggaagtaactctttcactttcgtcatgttctcttgtgtcgccttttttggcacggcctttgtaaacagcctgaactgggcactggtgccagataccgtagattacggtgaatggaaaaccggtattcgtgccgaaggttctgtttataccggttataccttctttcgtaaaatttctgccgcacttgctggcttcttgccaggcattatgctgacgcaaatcggttatgttcccaacatcgcgcaaagtgatgcgacattacagggtttgcgtcagctcatttttatctggccttgtgcgctggcaattattgctgcattaacgatgggattcttttacacactcaatgaaaaacggtttgcattgattattgaggaaatcaaccaacgcaaaaataaagagatggcgacagaagaaaaaacagcttccgtaacgttataa

SEQ ID NO: 262576 - DNA, 693 bp, Klebsiella pneumoniae
atgaaaaagattaatgcaataattctattatcctctctgacctctgcctcggtatttgctggcgcatacgtcgaaaacagggaggcatataatctcgcctccgatcagggcgaagttatgctacgcgtgggttataacttcgatatgggcgcgggtattatgttaaccaatacctacacctttcagcgagaagatgaactcaaacatggctataatgaaattgaaggttggtatcctttatttaaaccaaccgataaattaaccatccagcccggtggcttaattaatgacaagagtatcggttcgggtggtgccgtttatctggatgttaactacaaatttactccgtggtttaacctgacggtgcgtaatcgctataaccataataattacagctctacagatttgaacggcgaattggataataacgacacctatgaagttggcacctactggaattttaaaatcaccgagaaattctcctatacatttgaaccacattacttcatgcgagtaaatgactttaatagcagcaatggaaaagatcatcactgggaaatcactaacaccttccgttatcgcattaatgaacactggctcccttatttcgaattacgctggttagatcgtaatgtcgaaccgtaccaccgcgagcaaaaccagattcgtatcgggacgaagtatttcttctga

SEQ ID NO: 262577 - DNA, 1266 bp, Klebsiella pneumoniae; identical to SEQ ID NO: 9604

SEQ ID NO: 262578 - DNA, 981 bp, Klebsiella pneumoniae; identical to SEQ ID NO: 9603

SEQ ID NO: 262579 - DNA, 711 bp, Klebsiella pneumoniae
atggcggagaatcaatccaccgtagaaaatgcaaaagagaaactggatcggtggttgaaagatggcatcaccacgccgggtggaaaactcccttcagaaagagagctgggagaactgctgggcattaaacgtatgacgctgcgccaggcgttgttgaacctcgaggcagaatccaaaatcttccgtaaggatcgtaaggggtggttcgtgacccagccgcgatttaattacagtccggagctgtcagcgagctttcagcgggccgcaattgagcaaggacgagagccttcctgggggtttaccgagaaaaaacgtaccagcgatattcccgagacgctcgcgccactgattgcagtgacaccatcaactgaactctatcgcatcaccggctggggggcgctggaaggacataaagttttctatcacgaaacatatattaatcctgaagttgctccgggttttattgaacaacttgaaaaccactcattttctgcagtctgggaaaagtgctaccaaaaagagacggtagtaaaaaaattgattttcaaacccgtcagaatgccgggcgatatcagcaagtatcttggcggttctgcgggtatgccagcgatcttaattgaaaagcatcgcgccgaccagcaaggcaatattgtccagatagatattgaatattggcgatttgaggccgtagacctcatcattaatctgtag

SEQ ID NO: 262580 - DNA, 1134 bp, Klebsiella pneumoniae
gtgaagccgaaccagcaggtcactatcatcgatagcgaaggcaaaacccgtaacgcgaaagtcggtaaagtgctgggccacctcggtctggaacgtattgaaaccgatctggcggaagctggcgatatcgttgcgatcacgggcctgggcgaactgaacatttctgacaccgtttgcgacacgcaaaacgttgaagcgctgccggcactctccgttgatgagccgaccgtttctatgttcttctgcgttaacacctcgccgttctgcggtaaagaaggtaagttcgtaacgtctcgtcagatcctggatcgtctgaacaaagaactggtacacaacgttgcgctgcgcgtagaagaaaccgaagacgccgatgcgttccgcgtttctggtcgtggcgaactgcacctgtctgttcttatcgaaaacatgcgtcgtgaaggtttcgaactggcggtatcccgtccgaaagtaatcttccgtgaaatcgacggtcgtaaacaagagccgtatgaaaacgtgacgctggacgttgaagaacagcatcagggttctgtgatgcaggcgctgggcgaacgtaaaggcgacctgaaaaacatgaatccagacggtaaaggccgcgtacgtctcgactacgtgatcccaagccgtggtctgattggcttccgttctgagttcatgaccatgacttccggtacgggtctgctgtactccaccttcagccactacgacgacgtacgtccgggtgaagtgggtcagcgtcagaacggcgtactgatctctaacggtcagggtaaagcggtagcgttcgcgttgttcggtctgcaggatcgcggtaagctgttcctcggtcacggtgcagaagtttacgaaggtcagattatcggtattcatagccgctctaacgacctgactgtaaactgcctgaccggtaagaaactgaccaacatgcgtgcttccggtactgacgaagccgttgttctggttccgcctatccgcatgactctggaacaagctctggagtttatcgatgatgacgaactggtagaagtgactccgacctctatccgtattcgtaaacgtcacctgacggaaaacgatcgtcgccgcgccaaccgcgcaccgaaagacgattaa

SEQ ID NO: 262581 - DNA, 693 bp, Klebsiella pneumoniae
atgcctttaagcgcacaacagttagctgcacagaaaaacctttcgtatgttctggctgagaagctggcgcaacgcatcttaaaaggtgaatatgaacccggcaccattttgcctggtgagattgagctgggcgagcaatttggagtgagtcgtacagcggtacgcgaagcggtcaaaacgttaacggcaaaagggatggttttaccgcgaccgcgaattggtacccgggtcatgccacaatcaaactggaattttcttgatcaggaattgcttacctggtggatgacagaagagaactttcatcaggtcatcgatcactttctggttatgcgtatctgtctggagccgcaagcttgcctactggctgcaacggttggcaccgcggaacagaaggcgcatctcaatacgttaatggccgaaatggtggcattaaaagagaactttcgccgtgaacgctggattgaggtcgatatggcttggcatgagcatatctatgaaatgagcgccaatccgtttttgacctcattcgcctcgctattccattcggtttatcacacttacttcacgtcaattaccagcgacacagtgataaagctggatctgcaccaggcgattgtcgatgcgattgtccaaagcgatggcgacgcggcatttaaagcttgtcaggcgctgctacgctcacctgataagtga

SEQ ID NO: 262582 - DNA, 993 bp, Klebsiella pneumoniae
ttggctacaatgaaagatgttgcccgcctggcgggcgtttctacctcaacagtttctcacgttatcaataaagatcgcttcgtcagtgaagcgattaccgccaaagttgaagcggcgattaaagaactcaattacgcgccatcagccctggcgcgtagcctcaaactcaatcaaacacataccattggcatgttgatcactgccagtaccaatcctttctattcagaactggtgcgtggcgttgaacgcagctgcttcgaacgcggttatagtctcgtcctttgcaataccgaaggcgatgaacagcggatgaatcgcaatctggaaacgctgatgcaaaaacgcgttgatggcttgctgttactgtgcaccgaaacgcatcaaccttcgcgtgaaatcatgcaacgttatccgacagtgcctactgtgatgatggactgggctccgttcgatggcgacagcgatcttattcaggataactcgttgctgggcggagacttagcaacgcaatatctgatcgataaaggtcatacccgtatcgcctgtattaccggcccgctggataaaactccggcgcgcctgaggttggaaggttatcgggcggcgatgaaacgtgcgggtctcaacattcctgatggctatgaagtcactggtgattttgaatttaacggcgggtttgacgctatgcgccaactgttatcacacccgctgcgtcctcaggccgtctttaccggaaatgacgctatggctgttggcgtttaccaggcgctgtatcaggcagagttacaggttccgcaggatatcgcggtgattggctatgacgatatcgaactggcaagctttatgacgccaccattaaccactatccaccaaccgaaagatgaactgggggagctggcgattgatgtactcatccatcggataacccaaccgacccttcagcaacaacgattacaacttactccgattctgatggaacgcggttcggcttag

SEQ ID NO: 262583 - DNA, 930 bp, Klebsiella pneumoniae
atgcaaaacgcaggcagcctcgttgttcttggcagcattaatgctgaccacattctgaatcttcaatcttttcctactccaggcgaaaccgtaaccggtaaccactatcaggttgcatttggcggcaaaggcgcgaatcaggctgtggctgctgggcgtagcggtgcgaatatcgcgtttattgcctgcactggcgatgacagcattggtgagagcgttcgccagcagctcgccactgataacatcgatatttctccggtcagcgtgatcaaaggcgaatcaacaggtgtggcgctgatttttgttaatggcgaaggtgagaatgtcatcggtattcatgccggcgctaatgctgccctttccccggcgctggtggaagcgcaacgtgagcgtattgccaacgcgtcagcattattaatgcagctggaatcaccactcgaaagtgtgatggcagcggcgaaaatcgcccatcaaaataagactatcgttgcgcttaacccggctccggctcgcgaacttcctgacgaactgctggcgctggtggacattattacgccaaacgaaacggaagcagaaaagctcaccggtattcgtgttgaaaatgatgaagatgcagcgaaggcggcgcaggtactgcatgaaaaaggtatccgtactgtactgattactttaggaagtcgtggtgtatgggttagcgtgaatggtgaaggtcagcgcgttcctggattccgggtgcaggctgtcgataccattgctgccggagatacctttaacggcgcgttaatcacggcgttgctggaagaaaaaccattgccagaggcgattcggtttgcccatgccgccgctgcgattgccgtaacacgtaaaggcgcacaaccttccgtaccgtggcgtgaagagatcgacgcatttttagacaggcagaggtga

SEQ ID NO: 262584 - DNA, 420 bp, Klebsiella pneumoniae
atgaaaaaaggcaccgttcttaattctgatatttcatcggtgatctcccgactgggacataccgatacgctggtggtgtgtgatgcaggtttacccatccccaaaagtacaacgcgtatcgatatggcattaacccagggtgtaccttcttttatgcaggtgctgggcgtcgtcacaaatgaaatgcaggtcgaggcagccattatcgcggaagagatcaaacaacataatccgcaactccacgaaacgttgctcactcaccttgagcagctgcaaaaacaccagggaaataccattgaaattcgttacaccacgcatgaacaattcaaacaacaaaccgcagaaagtcaggcggtaattcgcagcggagaatgttctccgtatgcgaatatcattctctgtgctggcgtgacgttctga

SEQ ID NO: 262585 - DNA, 1452 bp, Klebsiella pneumoniae
atgctaacgctggatacgcttaatgtgatgctggccgtcagcgaagagggattgatcgaagagatgatcatcgcgctgctggcctcaccgcagctggcagtcttctttgaaaaattcccacgactgaaggcggcaatcactgatgatgttccccgctggcgtgaggcgctgcgcagtcggctgaaagatgcccgagtcccgccggaactcaccgaagaggtgatgtgctatcagcaaagccagctcctctccacgccgcagtttattgtgcagctaccacagatcctggacttactgcatcgtctgaattccccatgggcagaacaagcccgacagttggttgatgctaacagcacgatcacttcagcgttacacacgctttttctccagcgttggcgtttaagtctgatcgtgcaagcaacgacgttaaatcaacagctattagaagaagaacgcgaacaactgttgagtgaagttcaggaacgcatgacgctgagcggacaacttgaaccgattctcgcagataacaataccgcagctggtcgtctgtgggatatgagcgccggtcagcttaaacgtggcgactatcagttgattgtgaaatacggtgaatttcttaacgaacagccggaactgaaacgcctggcagaacagctggggcgttcccgggaagccaaatcaataccgcgcaacgatgcgcagatggaaaccttccgcaccctggtgcgcgaaccggcgacggttcctgagcaggttgatggtctgcaacaaagcgatgatattttacgtctcctgccgccagaactggcgacactagggataacagaactggagtatgagttttaccgtcggctggtggaaaaacagttgctcacctatcgcctgcacggtgagtcgtggcgagaaaaagtgatcgaacgtccggtggtacataaagattacgacgaacagccgcgcggaccgtttattgtctgtgtggatacttccggctcaatgggcggctttaatgaacagtgtgcgaaagcgttctgcctggccttgatgcgcattgctctcgctgaaaaccggcgctgctatattatgttattttccaccgagatcgtccgttatgagctttcaggcccacaaggcatcgaacaagcaatccgttttttaagccagcagtttcgtggcggcaccgatctggccagttgttttcgcgccattatggaacgcttgcaaagccgggaatggtttgatgccgatgcggtggtgatttctgattttatcgcccagcggttgcctgacgacgtgacgagtaaagtgaaagagctacagcgggtacatcagcatcgctttcatgccgtggcgatgtcggcacatggcaaacccggcatcatgcgcattttcgatcatatctggcgctttgataccgggatgcgaagccgcctgctcagacgctggcggcgataa

SEQ ID NO: 262586 - DNA, 444 bp, Klebsiella pneumoniae
atggcagatatcactcttatcagcggcagcaccctcggcggtgccgaatatgtagcagaacacctggctgaaaagctggaagaggcgggttttaccaccgaaacgctgcacggtccgctgttggaagatttatctgcctcggggatctggctggttatcagctcaacccacggtgccggagatattccggacaacctttctcctttctatgaagcattgcaggaacagaagcccgatctttctgcggtccgctttggcgctatcggtattggcagtcgtgaatatgacaccttttgtggggctatcgataaactcgaggcagaactcaaaaattccggtgcaaaacagacaggcgaaactctgaagatcaacatccttgatcacgacattcctgaagatccggcagaagaatggctgggatcgtggattaatttactcaaataa

SEQ ID NO: 262587 - DNA, 624 bp, Klebsiella pneumoniae
gtgctcaacaaactctccttactgctgaaagacgcaggtatttcgcttaccgatcaccagaaaaaccagcttattgcctatgtgaatatgctgcataaatggaataaagcgtacaacctgacttcggtccgcgatcctaatgagatgctggtacgccatattctcgatagcattgtggtggcaccgtatctgcaaggtgaacggtttatcgatgtcggcaccggaccaggactgcctggcattccactctctatcgtgcgtcctgaagcccacttcacgttgttggatagccttggtaaacgcgtgcgtttccttcgtcaggtgcaacatgagcttaaactggagaatattgagccagtacagagcagggtagaagagtttccttcagagccgccatttgatggcgtaattagccgcgcttttgcctctctgaacgatatggtgagctggtgccaccatcttcctggtgagcaaggccgtttctacgcgctgaaagggcaaatgccggaagatgaaatcgctttgttgcccgaagaatatcaggtcgaatcagtggttaaacttcaggttccagccctggatggcgaacgtcatctggtggtgattaaagcaaataaaatttaa

SEQ ID NO: 262588 - DNA, 384 bp, Klebsiella pneumoniae
gtgatgtctgtgtcgctcgtgagtcgaaacgttgctcggaagcttctgctcgttcagttactggtggtgatagcaagtggattgctgttcagcctcaaagaccccttctggggcgtctctgcaataagcgggggcctggcagtctttctgcctaacgttttgtttatgatatttgcctggcgtcaccaggcgcatacaccagcgaaaggccgggtggcctggacattcgcatttggcgaagctttcaaagttctggcgatgttggtgttactggtggtggcgttggcggttttaaaggcggtattcttgccgctgatcgttacgtgggttttggtgctggtggttcagatactggcaccggctgtaattaacaacaaagggtaa

SEQ ID NO: 262589 - DNA, 198 bp, Klebsiella pneumoniae
gtgattgaacggctgcagcgtcaactctttcgtgaagccgccgatgcctttcattttgatgctgtagaacagaatcaggataaatacacccagtgccatagacagcgttacgttcacgtccgcagacggaaccacacgcagtgcaggcagacccagtacatgttcagcaatgtacggcagcaggtcgataggcagtaa

SEQ ID NO: 262590 - DNA, 546 bp, Klebsiella pneumoniae
gtgaaaacattaattcttttctcaacaagggacggacaaacgcgcgagattgcctcctacctggcttcggaactgaaagaactggggatccaggcggatgtcgccaatgtgcaccgcattgaagaaccacaatgggaaaactatgaccgtgtggtcattggtgcttctattcgctatggtcactaccactctgcgttccaggagtttgtcaaaaagcatgcgacgcggctgaattcgatgccgagcgccttttactccgtaaacctggtggcgcgtaaaccggagaagcgtactccacagaccaacagctacgcgcggaagtttctgatgagttcacaatggcgtcccgatcgctgtgccgtcattgccggggcgctgcgttatccacgttaccgctggtacgaccgttttatgatcaagctaattatgaagatgtcaggcggtgaaacggatacgcgtaaagaagttgtctataccgattgggagcaggtggcgaatttcgcccgagaaatcgcccatttaaccgacaaatcgacgctgaaataa

SEQ ID NO: 262591 - DNA, 615 bp, Klebsiella pneumoniae
atggaaagctggttaattcctgcggcaccagtcacggtcgttgaagagatcaaaaagagccgcttcataacgatgttggcgcataccgatggcgttgaggcggcgaaagcgtttgttgaatcggtgcgggcagaacaccccgatgcccgccaccattgcgtggcgtgggtggcgggtgcgccggatgattctcaacagctcggtttctctgacgacggggaaccggcgggaacggccggtaaaccgatgctcgcccaactaatgggcagcggcgtcggggaaattaccgctgtggtggtgcgctactacggcggcatattgcttggtaccggtgggttagtgaaagcgtatggcggcggagtgaatcaggcgctgcgccagctaacgacccaacgcaagacgccattaaccgaatatactttgcaatgtgaatatagtcagttaaccggcattgaagcgttgctggggcagtgtgacggcaaaattatcaacagtgattatcaggcattcgttctgctgcgggtggcgcttccggcggcgaaagtggctgaattttccgcaaaactggcggattttagccgtggttcattgcaattgttagcgattgaagaataa

SEQ ID NO: 262592 - DNA, 702 bp, Klebsiella pneumoniae
atgacaaccttaagctgtaaagtgacctcggtagaagctatcacggataccgtatatcgtgtccgcatcgtgccagacgcggccttttcttttcgtgctggtcagtatttgatggtagtgatggatgagcgcgacaaacgtccgttctcaatggcctcgacgccggatgaaaaagggtttatcgagctgcatattggcgcttctgaaatcaacctttacgcgaaagcagtcatggaccgcattcttaaagatcatcaaatcgtggtcgatattccgcacggtgaggcatggctgcgcgatgatgaagaacgtccaatgattctcatcgcgggcggcaccgggttctcttatgcgcgctcgattttgctgacggcgctggcgcgtaacccaaaccgtgatatcaccatttactggggcgggcgtgaagagcagcatctttatgatctctccgagcttgaggcgctttcgcttaagcatccaggtttgcaagtggtgccggtggttgaacaaccggaagcgggctggcgtgggcgtactggcaccgtgttaacggcggtattgcaggatcatggtacgctggcagagcatgatatctatattgccggacgttttgagatggcgaaaattgcccgtgacctgttttgcagtgagcgtaatgcgcgggaagatcgcctgtttggcgatgcgtttgcatttatctga

SEQ ID NO: 262593 - DNA, 489 bp, Klebsiella pneumoniae
atgcaatcctggtatttactgtactgcaagcgcgggcaacttcaacgtgcccaggaacacctcgaaagacaggctgtgaattgcctggcaccgatgatcaccctggaaaaaatggtgcgtggcaaacgtactgcagtcagtgaaccattgttccccaactacctgtttgtggaatttgatccagaagtgattcataccacgactatcaacgcgacccgcggtgtcagccacttcgtgcgctttggcgcatcgccagcgatagtcccatcggcggtgattcatcagctatcggtatataaaccgaaagacattgtcgatccggcaaccccttatccgggtgataaggtgattattaccgaaggcgcgttcgaaggttttcaggccattttcaccgaacccgacggcgaggctcgctccatgctgttacttaatcttatcaataaagagattaagcacagtgtgaagaacaccgagttccgcaaactctaa

SEQ ID NO: 262594 - DNA, 783 bp, Klebsiella pneumoniae
atgtttgatatcggcgttaatttgaccagttcgcaatttgcgaaagaccgtgatgatgttgtagcacgcgctcttgacgcgggagttaatgggctactcatcaccggtactaacctgcgtgaaagccagcaggcgcaaaagctggcgcgtcagtattcatcctgttggtcaacggcgggcgtacatcctcacgacagcagccagtggcaagctgcgactgaagaagcgattattgagctggccgcgcagccagaagtggtggcgattggtgaatgtggtctcgactttaaccgcaacttttcgacgccggaagagcaggaacgcgcttttgttgcccagctacgcattgccgcagaattaaacatgccggtatttatgcactgtcgcgatgcccacgagcggtttatgacattgctggagccgtggctggataaactgcctggtgcggttcttcattgctttaccggcacacgcgaagagatgcaggcgtgcgtggcgcatggaatttatatcggcattaccggttgggtttgcgatgaacgacgcggactggagctgcgggaacttttgccgttgattccggcggaaaaattgctgatcgagactgatgcgccgtatctgttccctcgcgatctcacgccaaagccatcatcccggcgcaacgagccagcccatctgccccatattttgcaacgaattgcgcactggcgtggagaagatgccgcatggctggctgccatcacggatgccaatgttaagacactgtttgggattgcgttttag

SEQ ID NO: 262595 - DNA, 777 bp, Klebsiella pneumoniae
atgtctgtagaagatactcaaccgcttatcacgcatctgattgagctgcgtaagcgtctgctgaactgcattatcgcggtgatcgtgatattcctgtgtctggtctatttcgccaatgacatctatcacctggtatccgcgccattgatcaagcagttgccgcaaggttcaacgatgatcgccaccgacgtggcctcgccgttctttacgccgatcaagctgacctttatggtgtcgctgattctgtcagcgccggtgattctctatcaggtgtgggcgtttatcgccccagcgctgtataagcatgaacgtcgcctggtggtgccgctgctggtttccagctctctgttgttttatatcggcatggcgttcgcctactttgtggtctttccgctggcatttggcttccttgccaataccgcgccggaaggggtacaggtatccaccgacatcgccagttatttaagcttcgttatggcgttgtttatggcgtttggtgtctcctttgaagtgcctgtggcaatagtgctgctgtgctggatggggattacctcgccagaagacttacgcaaaaaacgcccgtatgtgctggttggtgcattcgttgtcgggatgctgctgacaccgccggatgtcttctcgcaaacgctgttggcgatcccgatgtactgtctgtttgaaatcggtgtcttcttctcacgcttttacgttggtaaagggcgaaatcgggaagaggaaaacgacgctgaagcagaaagcgaaaaaactgaagaataa

SEQ ID NO: 262596 - DNA, 516 bp, Klebsiella pneumoniae
gtgtttgatatcggttttagcgaactgctattggtgttcatcatcggcctcgttgttctggggccgcaacgactgcctgtggcggtaaaaacggtcgcgggctggattcgcgcgttgcgttcactggcgacaacggtgcagaacgaactgacccaggagttaaaactccaggagtttcaggacagtctgaaaaaggttgaaaaggcgagcctcactaacctgacgcccgaactgaaagcgtcgatggatgaactacgccaggccgcggagtcgatgaagcgttcctacgttgcaaacgatcctgaaaaggcgagcgatgaagcgcacaccatccacaacccggtggtgaaagacaatgaagctgcgcatgaaggcgtaacgcctgctgctgcacaaacgcaggccagttcgccggaacagaagccagaaaccacgccagagccggtggtaaaacctgctgcggacgctgaaccgaaaaccgctgcaccttccccttcgtcgagtgataaaccgtaa

SEQ ID NO: 262597 - DNA, 270 bp, Klebsiella pneumoniae
atgggtggtatcagtatttggcagttattgattattgccgtcatcgttgtactgctttttggcaccaaaaagctcggctccatcggttccgatcttggtgcgtcgatcaaaggctttaaaaaagcaatgagcgatgatgaaccaaagcaggataaaaccagtcaggatgctgattttactgcgaaaactatcgccgataagcaggcggatacgaatcaggaacaggctaaaacagaagacgcgaagcgccacgataaagagcaggtgtaa

SEQ ID NO: 262598 - DNA, 1641 bp, Klebsiella pneumoniae
atgacgccaggtgaagtacggcgcctatatttcatcattcgcacttttttaagctacggacttgatgaactgatccccaaaatgcgtatcaccctgccactacggctatggcgatactcattattctggatgccaaatcggcataaagacaaacctttaggtgagcgactacgactggccctgcaagaactggggccggtatggatcaagttcgggcaaatgttatcaacccgccgcgatctttttccgccgcatattgccgatcagctggcgttattgcaggacaaagtcgctccgtttgatggcaagctggcgaagcagcagattgaagctgcaatgggcggcttgccggtagaagcgtggtttgacgattttgaaatcaagccgctggcttctgcttctatcgcccaggttcataccgcgcgattgaaatcgaatggtaaagaggtggtgattaaagtcatccgcccggatattttgccggttattaaagcggatctgaaacttatctaccgtctggctcgctgggtgccgcgtttgctgccggatggtcgccgtctgcgcccaaccgaagtggtgcgcgagtacgaaaagaccttgattgatgaactgaatttgctgcgggaatctgccaacgccattcagcttcggcgcaattttgaagacagcccgatgctctacatcccggaagtttaccctgactattgtagtgaagggatgatggtgatggagcgcatttacggcattccggtgtctgatgttgcagcgctggagaaaaacggcactaacatgaaattgctggcggaacgcggcgtgcaggtgttcttcactcaggtctttcgcgacagctttttccatgccgatatgcaccctggcaacatcttcgtaagctatgaacacccggaaaacccgaaatatatcggcattgattgcgggattgttggctcgctaaacaaagaagataaacgctatctggcagaaaactttatcgccttctttaatcgcgactatcgcaaagtggcagagctacacgtcgattctggctgggtgccaccagataccaacgttgaagagttcgaatttgccattcgtacggtctgtgaacctatctttgagaaaccgctggccgaaatttcgtttggacatgtactgttaaatctgtttaatacggcgcgtcgcttcaatatggaagtgcagccgcaactggtgttactccagaaaaccctgctctacgtcgaaggggtaggacgccagctttatccgcaactcgatttatggaaaacggcgaagcctttcctggagtcgtggattaaagatcaggtcggtattcctgcgctggtgagagcatttaaagaaaaagcgccgttctgggtcgaaaaaatgccagaactgcctgaactggtttacgacagtttgcgccagggcaagtatttacagcacagtgttgataagattgcccgcgagcttcagtcaaatcatgtacgtcagggacaatcgcgttattttctcggaattggcgctacgttagtattaagtggcacattcttgttggtcagccgacctgaatgggggctgatgcccggctggttaatggcaggtggtctgatcgcctggtttgtcggttggcgcaaaacacgctga

SEQ ID NO: 262599 - DNA, 606 bp, Klebsiella pneumoniae
atgccttttaaacctttagtgacggcaggaattgaaagtctgctcaacaccttcctgtatcgctcacccgcgctgaaaacggcccgctcgcgtctgttgggcaaagtgctgcgcgtggaggtaaaaggcttttcgacatcattgattctggtgttcagcgaacgccaggttgatgtactgggcgaatgggcaggcgatgctgactgcaccgttatcgcctacgccagcgtgttgccgaaacttcgcgatcgccagcagcttgccgcactgattcgcagtggtgagctggaagtacagggcgatattcaggtggtgcaaaacttcgttgcgctggcagatctggcagagttcgaccctgcggaactgctggccccttataccggtgatatcgccgctgaaggtatcagcaaagccatgcgcggaggcgcaaagttcctgcatcacggcattaagcgccagcaacgttatgtggcagaagccattactgaagagtggcgtatggcacctggtccgcttgaagtggcctggtttgcggaagagacggctgccgtcgagcgtgctgttgatgccctgaccaaacggctggaaaaactggaggctaaatga

SEQ ID NO: 262600 - DNA, 1428 bp, Klebsiella pneumoniae
gtggatttctcaatcatggtttacgcagttattgcgttggtgggtgtggcaattggctggctgtttgccagttatcaacatgcgcagcaaaaagccgagcaattagctgaacgtgaagagatggtcgcggagttaagcgcggcaaaacaacaaattacccaaagcgagcactggcgcgctgagtgcgagttactcaataacgaagtgcgcagcctgcaaagtattaacacctctctggaggccgatctgcgtgaagtaaccacgcggatggaagccgcacagcaacatgctgacgataaaattcgccagatgattaacagcgagcagcgcctcagtgagcagtttgaaaacctcgccaaccgtatttttgagcacagcaatcgccgggttgatgagcaaaaccgtcagagtctgaacagcctgttgtcgccgctacgtgaacaactggacggtttccgccgtcaggttcaggacagctttggtaaagaagcacaagaacgccataccctgacccacgaaattcgcaatctccagcagctcaacgcgcaaatggcccaggaagcgatcaacctgacgcgcgcgctgaaaggcgacaataaaacccagggcaactggggcgaggtagtattgacgcgggtgctggaggcttccggtctgcgtgaagggtatgaatatgaaacccaggtcagcatcgaaaatgacgcccgctcgcggatgcagccggatgtcatcgtgcggttgccgcagggaaaagatgtggtgatcgacgccaaaatgacgctggtcgcctatgaacgctatttcaacgccgaagatgactacacccgcgaaagcgcgctacaggaacatatcgcgtcggtgcgtaaccatatccgtttgctgggacgcaaagattatcaacagctgccggggctgcgaaccctggattacgtgctgatgtttattcccgttgaacccgcttttttactggcgcttgaccgccagccggagctgatcaccgaagcgttgaaaaacaatatcatgctggttagcccgaccacgctgctggtggcgctgcgcactatcgccaacctctggcgctatgagcatcaaagtcgtaacgcccagaaaatagccgatcgcgccagcaagctgtacgacaagatgcgtttgttcgtcgatgacatgtcagcgattggtcaaagtctcgacaaagcgcaggataactatcgccaggcaatgaaaaaactctcttcaggtcgcggaaatgtgctggcgcaggcagaagcgtttcgcggtttaggggtagaaattaaacgcgagattaatccggatttggctgaacaagcggtgagccaggatgaagagtatcgactgcggtcggttccggagcagccgaatgatgaagcttatcaacgcgatgatgaatataatcagcagtcgcgctag

SEQ ID NO: 262601 - DNA, 762 bp, Klebsiella pneumoniae
atgtccaagtctgatgtttttcatctcggcctcactaaaaacgatttacaaggggctacgcttgccatcgtccctggcgacccggatcgtgtggaaaagatcgccgcgctgatggataagccggttaagctggcatctcaccgcgaattcaccacctggcgtgcagagctggatggtaaacctgttatcgtctgctctaccggtatcggcggcccgtctacctctattgctgttgaagagctggcacagctgggcattcgcaccttcctgcgtatcggtacaacgggcgctattcagccgcatattaatgtgggtgatgtcctggttaccacggcgtctgttcgtctggatggcgcgagcctgcacttcgcaccgctggaattcccggctgtcgctgatttcgaatgtacgactgcgctggttgaggctgcgaaatccatcggcgcgacgactcacgttggcgtgacggcttcttctgataccttctacccaggtcaggaacgttacgatacttactctggtcgcgtagttcgtcactttaaaggttctatggaagagtggcaggcgatgggcgtaatgaactatgaaatggaatctgcaaccctgctgaccatgtgtgcaagtcagggcctacgtgccggtatggtagcgggtgttatcgttaaccgcacccagcaagagatcccgaatgctgagacgatgaaacaaactgaaagccaagcggtgaaaatcgtggtggaagcggcgcgtcgtctgctgtaa

SEQ ID NO: 262602 - DNA, 813 bp, Klebsiella pneumoniae
atggcaacaacacaacaatctggatttgcacctgctgcatcgcctctagcttcgaccatcgttcagaccctggacgacgcgattgtggcgggcttcacctctatcccttcacaaggggataacatgcctgcttaccatgccagaccaaagcaaagcgatggcccactgccagtggtcattgtagtgcaggaaatttttggcgtgcatgaacatatccgcgacatttgtcgccgtctggcgctggaggggtatctggctatcgcacctgaactttacttccgcgaaggcgatccgaatgattttgccgatatccccacgttacttagcggtctggtagcaaaagtgcctgactcgcaggtgctggccgatctcgatcatgtcgccagttgggcttcccgcaacggcggcgatgttcatcgtttaatgatcaccggattctgctggggtggacgtatcacctggctgtatgctgcgcataacccgcaactgaaagcggcggtggcatggtacggcaaactgacaggcgataagtcgctgaattcaccgaaacaacctgttgatatcgcaaccgatcttaacgcgccggttctcggcttatatggtggtcaggataacagcattccgcaggagagcgttgaaaccatgcgccaggcgctgcgggctgctaatgcgaaagcagagattatcgtctacccggatgccgggcatgcattcaacgccgattatcgcccgagctatcatgccgaatctgcgaaagatggctggcagcgtatgctggagtggtttaagcagtatggtgggaagcggaattag

SEQ ID NO: 262603 - DNA, 1254 bp, Klebsiella pneumoniae
atgtcaggatccaacactgcaatcagccgtcgtcgtttactgcaaggcgcgggtgccatgtggctattgagcgtaagtcaggtcagtctggctgcggtcagccaggtcgtggcggtgcgcgtctggcctgcgtccagctacacccgcgtgacggtagaatcaaatcgtcagctgaaatataagcagttcgcgttgagtaacccggaacgcgtggtggtggatatcgaagatgtaaacctgaactcggtactcaaggggatggcggcacaaattcgtgcagacgacccgttcatcaagtcggcgcgcgtcgggcaatttgacccgcaaaccgtacgcatggtttttgaattaaagcaaaacgtaaaaccgcagctgtttgcccttgcgccggtcgccgggtttaaagagcgtctggtgatggacctctatccggccaatgcacaggatatgcaggacccgctgctggcgctgctggaggattacaacaaaggcgacctcgaaaagcaggtgccgccagcgcaaagtggtccacaaccaggtaaagcagggcgcgatcgtccgattgtcattatgcttgaccctggccacggtggcgaagactccggtgcggtggggaaatacaaaacgcgcgaaaaagacgtggtattgcaaatagctcgccgtttgcgctctctgatcgagaaagagggcaatatgaaggtgtacatgacgcgcaatgaagacatcttcattccgttgcaagtgcgcgtagcaaaagcccagaaacagcgtgctgacctgtttgtctctatccatgccgacgcctttaccagtcgtcagccgagcggttcctctgtgtttgcgctctcaaccaaaggtgcaaccagtactgcggcaaaatatctggcacaaacccagaacgcctcggacttgattggtggcgtgagcaaaagcggtgaccgctatgtcgaccacaccatgttcgatatggtgcagtcgctgaccattgccgacagcctgaagtttggtaaagcggtgctgaataagctcgggaaaatcaacaagctgcataaaaatcaagttgaacaggccgggtttgccgtactaaaggcaccagatattccctccattctggtcgaaacggcgtttatcagtaacgttgaggaagaacgtaaactgaaaacggcgactttccagcaggaagttgcggagtctattcttgcggggattaaagcgtattttgccgatggggcgacgctggcgagaaggggatga

SEQ ID NO: 262604 - DNA, 1827 bp, Klebsiella pneumoniae
atgaaattgcaaaagcaattactggaagctgtggagcacaaacagctacgcccgctggatgtgcaatttgccctgaccgtggcgggagatgaacatcctgccgtcaccctcgcggcagccctgttaagccacgacgccggagaagggcatgtctgtttaccgctctcacgactggaaaataacgaggcgtcgcatccgctgttggcgacctgtgtcagtgaaatcggtgagttacaaaattgggaagaatgcttgctggcttcacaagcggtcagccggggagatgaaccaacgccgatgatcctctgtggcgatcgtctttatttgaatcgcatgtggtgtaacgagcgcacagtggcacgctttttcaacgaagtgaatcatgccattgaggttgatgaagctctactggcgcaaaccctggacaaactttttccagtaagcgatgaaattaactggcaaaaagttgcggcggcagtggcgctgacgcggcggatctcggtgatttccggcggccctggcaccggtaaaacgaccaccgtagcgaagttgctggcagcgttaattcaaatggccgacggcgaacgctgccgtatccgtttggctgcaccaacgggtaaagctgccgcgcgcttaaccgaatctctcggcaaggctttgcgacagttaccgctgaccgatgaacaaaagaaacgcattccggaagatgccagtactttgcatcgattgctgggtgcacagccgggtagccagcgtttacgtcatcatgccggtaacccgctgcatcttgatgtgctggtggtagatgaagcgtcaatgatcgatctgcctatgatgtcgagactgatcgacgccttgcccgatcatgcgcgagtgatctttctcggcgatcgtgatcaactggcctcggttgaggctggggctgtgctgggcgatatttgtgcttatgccaatgccggctttaccgccgagcgtgccgggcagctaagccgcctgacgggaactcacgttccggcaggaactggcacagaagcggcatctttgcgcgacagtctctgcctgctgcaaaaaagctatcgtttcggcagcgattctggcattggtcagttagctgcggcgatcaaccgtggtgataaaacggcagtgaaaaccgtttttcagcaggatttttctgatatcgaaaaacggcttttacagagcggcgaagattatattgcgatgcttgaggaagctcttgcgggttatggacgttatctggatctgctgcaagcgcgtgccgagccggatttaatcattcaggcgttcaatgagtaccaacttttgtgcgccctgcgggaagggccatttggcgtggctggactgaatgagcgaattgagcagtttatgcaacagaagcgcaaaattcatcgtaatccgcactctcgttggtacgaaggccgaccggtgatgattgcccgtaatgacagcgcgcttgggttgtttaatggcgatatcggtatcgctctggatcgtgggcaggggacgcgcgtctggtttgcgatgccggacggcaatattaagtctgtgcaaccgagtcgcttgccagagcacgaaactacgtgggcgatgacggtacataaatcgcagggatcggagttcgaccatgcggcgttgattttaccgagccaacgcacgccggtagtaacacgagagctggtttacactgcggtaacccgcgcgcgtcgacgtttgtcgctgtatgccgatgagcgtattttgagtgcggcaatcgccacgcgcactgagcggcgcagtggtctggcggcattgtttagttcgcgggaataa

SEQ ID NO: 262605 - DNA, 3543 bp, Klebsiella pneumoniae
atgagtgatgtcgccgagacactagatcctttgcgcttgcccttacagggcgagcgcctgattgaagcctctgccggcacaggcaaaacctttacgattgcggcgctctatttgcgcctgttacttggactaggcggttctgccgcctttccccgcccgctgaccgttgaagaactgctggtggtcacctttaccgaggctgccacggcagaattgcgcggtcgtatccgtagcaatatccatgagttgcgcatcgcctgtctgcgtgaaaccaccgacaatccactgtacgaacgcctgctggaagagatcgacgataaagcgcaagccgcgcagtggttgttgttagccgaacggcagatggatgaagcggcagtctttactattcacggtttttgccagcgcatgctcaacctgaatgcctttgaatccggcatgctgtttgagcagcagctgattgaagatgagtctctgctacgctaccaggcctgcgccgatttctggcgtcgccactgctacccgctgccgcgtgaaattgcccaggtggtctttgaaacctggaaagggccgcaggcgttgctgcgcgatattaatcgttatctgcaaggcgaagcaccggttatcaaagcaccgccgcccgatgatgaaacgctggcttcccgccacgcgcaaattgtggcgcgtatcgacgccgtaaaacagcagtggcgcgacgcggtgggtgaactggatgcgctgatcgaatcttctggtattgatcgacgcaagtttaaccgtagcaatcaggctaaatggatcgacaagatcagcgcctgggcagaagaagagaccaacagttatcagttaccggagtcgctggaaaaattctctcagcgtttcttagaagatcgcacgaaagccgggggggaaaccccgcgacatccactgtttgaggcgatcgatcaactgcttgcagaaccattgtcgatccgcgatctgctgataacccgcgcattggctgagatccgcgaaacagtagcgcgtgaaaaacgccgccgtggcgaattgggttttgatgacatgttaagtcggctcgattccgcgctgcgtagcgaaagcggcgaggtgttggcagcggcgatccgtacgcgattcccggtggcaatgatcgatgaatttcaggataccgacccccagcagtaccgaatttttcgccgtatctggcaccatcagccggaaaccgcattgttgctgattggcgacccgaaacaggccatatatgcattccggggtgcggatatcttcacttatatgaaggcgcgtagcgaagttcacgcccactacactttagataccaactggcgctccgcaccaggaatggtgaacagcgtgaataagcttttcagtcagactgatgacgcgttcatgtttcgcgaaattccttttattccagtgaaatcagccgggaaaaatcaggcgttacgttttgtgtttaaaggtgaaacgcagcctgcgatgaaaatgtggctgatggaaggcgaaagctgcggcgttggcgactatcaaagtaccatggcgcaggtatgtgctgcgcaaatccgcgactggctacaagccggacagcggggcgaagcgttgctgatgaacggcgacgacgcgcgtccggtgcgtgcttcggacatcagtgtgctggtgcgcagccgccaggaggccgcccaggtgcgcgacgccttaacgttgctggaaatcccttccgtttacctttcgaaccgcgacagtgtttttgaaactctggaagcgcaggaaatgctttggttgttgcaggcggtgatgacgcccgaacgtgagaacaccctgcgtagtgcgctggcaacgtcaatgatggggctgaacgcgctggatatcgaaacgctgaacaatgacgaacatgcgtgggatgcggtagtcgaagagttcgatggttatcggcaaatctggcgcaaacgtggcgttatgccgatgctgcgggcgctgatgtcggcgcgtaacattgctgaaaacttgctggcaacggcaggcggtgagcggcgtcttaccgatatcttgcatatcagcgaactgctacaagaagccggaacgcagctggaaagtgaacatgcgctggtacgctggttatcgcaacatatcctcgagccagacagtaatgcctccagccaacaaatgcgcctcgaaagtgataaacatctggtgcagattgtcacgatccataaatcaaaagggctggaatatccgctggtctggttgccatttattaccaatttccgcgtccaggatcaggcgttctatcacgatcgccactcgtttgaggctgttctggatcttaatgctgcgccagaaagcgtcgacctcgcggaggccgaacgtctggcggaagatctgcgtttgctttacgtggcgctgacgcgttcggtttggcattgcagtctcggcgttgcaccgctggtgcgccgtcgtggcgataaaaaaggtgacaccgacgtccaccaaagtgcgctcgggcgtttgctgcaaaaaggggaaccgcaagatgcggcagggcttcgcacctgtattgaagcgttatgcgatgatgatattgcctggcaaacggcacaaacgggtgataaccagccctggcaggttaatgatgctataactgcagaactgaatgcgaggacactacaacgattgcccggcgataactggcgtgtcaccagctactccggtttgcagcagcgtggtcacggtatcgctcaggatctgatgccacggctggatgttgatgccgcaggtgtggtcagcgtcgttgaagaaccgacgttaacaccgcatcagttcccgcgcggtgcgtcaccggggacattcttgcacagtttgtttgaagacctcgattttacccagccggttgacccgaactgggtacaggaaaaactggaactcggcggctttgaatcgcagtgggaaccggtgttgaccgagtggatcacggctgtcctccaggcacctctcaatgaaacgggtgttagcctgagtcagctttccgaccgcgataaacaggtggagatggagttttacctgccgattagtgaaccgctcatcgccagccagcttgatgcactaattcgccagtttgatccgctatccgctggctgcccgccgctggagttcatgcaggtacgcggcatgttaaaaggctttatcgacctggtattccgccacgaagggcgttattacctgctcgactataaatccaactggctgggtgaagacagttcggcttacacccaacaggctatggcagcggcgatgcaggcacaccgctatgatctgcaatatcagctttataccctggcgctgcaccgttatctgcgccatcgcattgctgattacgactatgatcgtcactttggcggcgttatctatctgttcctgcgtggcgttgataaagaacatccgcaacaagggatttacacaacccgacccaacgccgggttgattgacctgatggatgagatgtttgccggtatgaccctggaggaggcgtaa

SEQ ID NO: 262606 - DNA, 2889 bp, Klebsiella pneumoniae
atgccccgcagcacctggttcaaagcattattgttgtttgttgccctttgggcacccttaagtcaggcagaaacgggatggcagccgattcaggaaaccatccgtaaaagtgataaagataaccgccagtatcaggctatacgtctggataacggtatggtggtcttgctggtttctgatccgcaggcggttaaatcgctctcggcgctggtagtgcccgttgggtcgctggaagatcccgaggcgtaccaggggctggcacattaccttgaacatatgagtctgatggggtcgaaaaagtacccgcaggctgacagtctggccgaatatctcaaaatgcacggcggcagtcacaatgccagcacggcaccgtatcgcacggctttctatctggaagttgagaacgacgccttgcccggtgcggtagaccgcctggcggacgctattgcagaacccttgctcgacaagaaatacgccgaacgtgaacgtaatgcagtgaatgccgaattaaccatggcgcgtacgcgtgacgggatgcgcatggcacaggtcagcgcagaaaccattaacccggcacaccccggttcaaagttttctggtggtaacctcgaaactttaagcgacaaacccggaaatccggtacagcaggcgctgaaagatttccacgagaagtactattccgccaatctgatgaaggcggttatttacagcaataaaccgctgccggagttggcaaaaatggcggcggacacctttggtcgcgtgccgaacaaagagagcaaaaaaccggaaatcaccgtgccggtagtcaccgacgcgcaaaagggcattatcattcattacgtcccggcgctgccgcgtaaagttctgcgcgttgagtttcgcatcgataacaattcagcgaagttccgtagtaaaacggatgaattgattacctatctgatcggtaatcgcagcccaggtacactttctgactggctgcaaaagcagggattagttgagggcattagcgccaattccgatcctatcgtcaacggcaacagcggcgtattagcgatctctgcgtctttaaccgataaaggtctggcgaatcgcgatcaggttgtggcggccatttttagctacctcaatctgttacgcgaaaaagggattgataaacaatacttcgatgaactggcgaatgtgctggatatcgacttccgttatccgtcaatcacccgtgatatggattacgtcgaatggctggcagataccatgattcgcgttcctgttgagcatacgctggatgcagtcaatattgccgatcggtacgacgctaaagcagtaaaagaacgcctggcgatgatgacgccgcagaatgcgcgtatctggtatatcagcccgaaagagccgcacaacaaaacggcttactttgtcgatgcgccgtatcaggtcgataaaattagcgcacaaactttcgctgactggcagaaaaaagccgccgacattgcgctctctttgccagagcttaacccctatattcctgacgatttctcgctgattaagtcagagaagaaatatgaccatccagagctgattgttgatgagtcgaatctgcgtgtggtgtatgcgccaagccgttatttttccagcgaacccaaagctgatgtcagcctgattttgcgtaacccgaaagccatggacagcgcccgcaatcaggtgatgtttgcgctcaatgattatctcgcagggctggcgcttgatcagttaagcaaccaggcgtcggttggtggcataagtttttccaccaatgctaacaacggccttatggttaatgccaatggttacacccagcgcctgccgcagctgttccaggcattgctcgaggggtactttagctataccgctacggaagatcagcttgagcaggcgaagtcctggtataaccagatgatggattctgcagaaaagggcaaagcgttcgagcaggcgattatgcccgcccagatgctctcgcaagtgccgtacttctcgcgagatgaacggcgcaaaattttgccctccattactttgaaagaggtgctggcctatcgcgacgccttaaaatcaggggctcgaccagagtttatggttattggcaacatgaccgaagcccaggcaacaacgctggcacgcgatgtgcaaaaacagttgggcgctgatggttcggagtggtgtcgtaacaaagatgtcgtggtcgataaaaaacaatccgtcatctttgaaaaagccggtaacagcaccgactccgcactggcagcggtatttgtaccgactggctacgatgaatacaccagctcagcctatagctctctgttggggcagatcgtacagccgtggttctacaatcagttgcgtaccgaagaacagttgggctatgccgtgtttgcgtttccaatgagcgtggggcgtcagtggggcatgggcttcctgttgcaaagcaatgataaacagccttcattcttgtgggagcgttacaaggcgtttttcccaaccgcagaggcaaaattgcggacgatgaagccagaagagtttgcgcaaatccagcaggcggtaataacccagatgctgcaggcaccgcaaacgctcggcgaagaagcatcgaagttaagtaaagatttcgatcgcggcaatatgcgcttcgattcgcgtgataaaatcgtggcccagataaaactgctgacgccgcaaaaacttgctgatttcttccatcaggcggtggtcgagccgcaaggcatggctattctgtcgcagatttctggcagccagaacgggaaagccgaatatgtgcatcctgaaggctggaaagtgtgggagaacgtcagcgcgttgcagcaaacaatgcccctgatgagtgaaaagaatgagtga

SEQ ID NO: 262607 - DNA, 3369 bp, Klebsiella pneumoniae
atgttaagggtctaccattccaatcgtctggacgtgctggaagcgttgatggagtttattgtcgaacgcgaacggctggacgatcctttcgaaccagagatgattctggtgcaaagtaccggtatggcgcagtggctgcaaatgaccctgtcgcaaaagtttggtattgcggcaaatattgattttccgctgccagcgagctttatatgggatatgttcgtccgggtgttaccggagatccccaaagagagtgcctttaacaaacagagcatgagctggaaactgatgactctgctgccgcaactgttggagcgcgaagactttaccctgttgcggcattatctgactgacgatagcgacaagcgaaaactgttccagctttcttcaaaagcggcggacctgtttgaccagtatctggtctatcgtccggactggctggcacagtgggaaacaggacatttggttgaagggctgggagaagcacaggcttggcaagcgccgttgtggaaggcgttggtggaatatacccatcaactcgggcaaccgcgctggcaccgcgccaatctctatcagcgctttatcgaaacgctggagtccgcgacgacctgccccccggggctaccttcgcgcgtctttatatgcggtatttccgcgttaccgcctgtttatctccaggcgctacaggcgctgggtaaacatattgaaatccatctcctgtttaccaacccctgccgttattactggggcgacattaaagatcctgcttatctggcgaaactgctgactcgtcagcgtcgacacagttttgaagatcgcgaattaccgctatttcgcgacagcgaaaatgccgggcagctctttaacagcgatggtgaacaggatgtcggcaacccgctgctggcctcatggggcaagcttgggcgcgactacatttatctcctttctgatctggagggcagccaggagctggacgcctttgtcgatgtcacgccagataacctgctgcataacattcagtctgacattctggaacttgaaaactgcgctgttgcgggtgtgaatatcgaagagttttcccgtagcgataacaaacgcctgcttgatccactggataacagtatcaccttccacgtttgccatagcccgcagcgtgaagttgaagttttacacgatcgcctgctggcaatgctggaggaagacccgacattgactccgcgcgacatcatcgtgatggtggccgacatcgacagctacagtccgtttattcaggcagtgtttggtagcgcacctgcggatcgttacctaccttacgccatttccgaccgtcgggcgcggcagtcgcatcctgtacttgaagcgtttatcagcctgttatcgttgccagacagccgctttgtgtcggaggacgttctggcattactggatgtgccggtgctggcggcgcggtttgacatcaccgaagaagggctgcgttatttacgccagtgggtcaacgaatccggcattcgttgggggatagatgacgacaacgttcgcgagctggaactccccgctaccggtcaacacacctggcggtttggcctgacgcgcatgttgctgggctacgcgatggagagtgcgcagggcgagtggcaatcggttctaccttatgatgaatcgagcggcttaattgcagaactggtggggcatctggcttcactgctaatgcagctaaacatctggcgtcgcgggctggcgcaggagcgtccgctggaagagtggttgccggtttgtcgcgatatgctcaacgccttcttcctgccggatgcggaaaccgaagcggcgatgacgctgatcgaacaacaatggcaggcgattatcgccgaaggtttaggtgcgcagtatggcgacgcggtgccgctgtcactattgcgtgatgaactggcacagcgcctggatcaggaacgtatcagccagcgttttctcgccgggccggttaacatttgtactctgatgccaatgcgttccatcccattcaaagtggtttgcctgctgggaatgaacgacggcgtttatccacgccagcttgcgccattgggctttgacctgatgagccagaaaccgaagcgtggcgaccgtagtcgtcgcgatgacgaccgctatctgttcctggaagcgttaatttccgcgcagcaaaaactctatatcagctatatcgggcgttctattcaggataacagtgaacgtttcccgtcggtactggtgcaggaactgatcgactacatcgggcaaagccattatctaccgggcgatgaagcgctcaactgtgatgaaagcgaggcaagggtaaaagcgcatcttacttgcctccatacccggatgccgtttgatccgcaaaactaccagccaggcgaacgacaaagctatgctcgtgaatggctacctgcggccagccaggctggtaaagcacattctgaatttgttcagccgctgccgtttaccttaccggaaaccgtgccgctggaaacgctacaacgattctgggcacatccggtacgggcgttcttccagatgcgtttgcaggtgaacttccgtactgaagacagcgaaatccccgacaccgagccatttattctggaagggcttagccgttatcaaatcaatcagcagttattgaatgcactggttgagcaggatgatgccgaacgcttgttccgccgcttccgggcggcaggggatttaccgtatggcgcttttggtgaaattttctgggaaacacagtgccaggagatgcagcagcttgccgacagagttattgcctgtcgccagccggggcagagtatggaaattgatctcgcctgcaacggtgtgcagataactggctggttgccgcaggtgcagccggatggcctgttgcgctggcgtccctctttattaagtgtggcgcagggaatgcaactttggctggaacaccttgtctactgtgccagcggtggtaatggtgaaagtcgcctttttctacgcaaagacggcgagtggcgttttccgccgcttgcagccgaacaggctttgcattacctctcacaactgattgaggggtatcgtgaaggaatgtccgcgccattgctggtgttacctgaaagtggcggcgcgtggctaaaaacctgttatgacgcgcaaaacgatgccatgctggatgacgattccacgttacaaaaagcccgtacgaaattccttcaggcttacgaaggcaacatgatggtgcgtagcgaaggtgatgatatctggtatcaacggctctggcggcaattaacaccagagacaatggaggccatcgttgaacagtcgcaacgtttcctgttaccgctgtttcgctttaatcagtcatga

SEQ ID NO: 262608 - DNA, 324 bp, Klebsiella pneumoniae
atgtcagcttccttgaagaatcaacaaggctttagcctcccggaggtgatgttggcaatggtgctgatggtgatgattgtcactgcgttatcgggtttccagcgaacattaatgaacagtcttgccagtagaaaccagtaccaacagctctggcggcatggctggcagcaaacgcaactgcgtgcgatttcgccacctgcccactggcaggtcaaccgaatgcagacatcgcaagcgggatgtgtcagcatcagcgttacgctagtttcacccgggggcagagaaggcgagatgacccgcctgcattgcccgaatcgtcagtag

SEQ ID NO: 262609 - DNA, 408 bp, Klebsiella pneumoniae
gtgaaccgcgaaaagggtgtttcgtcactggctctggtcctgatgctgctggttttgggtagcttgctattacaaggaatgagtcagcaggatcgcagttttgcctctcgcgtgagcatggaaagtcagtcattgcgccgccaggccattgttcagtcggcgctggagtggggaaaaatgcactcctggcagacgcagcccgcagttcagtgcttactgtacgctgccaccggtgcccgggtttgtctgcgtttattggcagataatgaggccttattgattgccggttatgaaggcgtttcgttgtggcgaacaggcgaagtcatcgatggaaacattgttttttcgccacgcggctggagcgatttttgtccgctgaaagagagggcgttatgtcagcttccttga

SEQ ID NO: 262610 - DNA, 564 bp, Klebsiella pneumoniae
atgcctgtaaaagagctaggtttttctctgctggaagtgttgattgctatggcgatcagtagcgtattgttgctgggggcagcacgctttctgcctgcgttacagcgtgaaagtttaacgagcacccgtaagctggcgctggaagatgaaatctggctgcgggtatttaccgttgcgaagcatctccagagggcgggttattgtcatggcagctgtaccggcgaagggctggaaattgtcggacagggtgactgtgtcattgtgcagtgggatgcgaacagtaacggtatctgggatcgcgaaccggtaaaagagtccgaccagattggatttcgtctgaaggagcatgtgctggaaacgctacgcggtgcgacatcctgtgaaggtaagggctgggataaagtcactaatccggatgccatcattatcgacacttttcaggtcgtacgtcaggatgtcagcggcttctcgccggtgttgacggttaatatgcgtgctgccagtaagtctgaaccgcaaaccgtggtggatgccagctatagcgtgacaggattcaacctgtga

SEQ ID NO: 262611 - DNA, 471 bp, Klebsiella pneumoniae
atgaaaacacaacgtggttatacgctgattgaaacgctggtcgcgatgctgattctggtcatgctaagcgcaagtggactctatggctggcaatactggcagcagtcgcaacggctatggcaaaccgccagccaggcgcgggactatttgctctatttacgtgaagatgccaactggcataaccgcgaccacagtatcagtgttatcagggaggggacgttatggtgccttgtgagttccgctgctggggccaatacctgccatggcagttcaccattggtctttgtgccacgctggcccgaagtcgaaatgagcgacctgacaccttcgcttgctttctttggcctacgcaataccgcatgggccgggcatattcgcttcaaaaactcaacgggcgagtggtggctggtggtttcgccgtggggaagactccggctttgtcagcaaggagaaacagaaggatgcctgtaa

SEQ ID NO: 262612 - DNA, 876 bp, Klebsiella pneumoniae
atgaccagtagctatctgcattttccggagtttgatccggtcattttctcaataggacccgtagcgcttcactggtacggcctgatgtatctggtgggtttcatttttgcaatgtggctggcaacacgtcgggcgaatcgtccgggcagcggctggaccaaaaatgaagttgaaaacttactctatgcgggcttcctcggcgtcttcctcggtggacgtattggttatgttctgttctacaatttcccgcagtttatggccgatccgctgtatctgttccgtgtctgggacggcggcatgtctttccacggtggcctgattggcgttatcgtggtgatgattatcttcgcccgccgtactaaacgttccttcttccaggtctctgattttatcgcaccactcattccgtttggtcttggcgccgggcgtctgggcaattttattaacggtgaattgtggggccgcgttgacccgaacttcccgtttgccatgctgttccctggctcccgtacagaagatattttgctgctgcaaaccaacccgcagtggcaatccattttcgacacttacggtgtgctgccgcgccacccatcacagctttacgagctgctgctggaaggtgtggtgctgtttattatcctcaacctgtatattcgtaaaccgcgcccaatgggagcagtctcaggcttgttcctgattggctacggcgcgtttcgcatcattgttgagtttttccgccagcccgacgcgcagtttaccggtgcctgggtgcagtacatcagcatggggcaaattctttccatcccgatgattgtcgcgggtgtgatcatgatggtctgggcatatcgtcgcagcccacagcaacacgtttcctga

SEQ ID NO: 262613 - DNA, 1647 bp, Klebsiella pneumoniae
ttgcttgctccactggttgtggaacgcgaacgactgaccggggcgctggaagaagcggcaaacgagtttcgccgctacagcaaacgctttgccgccggtgcacaaaaagaaacggcggctattttcgatctttactcgcacctgctttcggacacccggctgcggcgcgaattgtttgccgaggttgataaaggctcggtggcagagtgggcggtaaaaacggtcattgaaaaatttgccgaacagtttgccgcgctaagcgataactatctcaaagagcgggctggcgatttacgtgcgctggggcagcgattgctgtttcatcttgatgacgctaatcaagggccgaacgcctggccggaacgtttcattctggtggcagatgaactgtcagcgacaacgcttgctgagctgccccaggatcgcttagtcggtgttgtcgtgcgcgatggcgcagccaactcccatgctgcgatcatggtacgtgcgctggggatccctaccgtgatgggcgcggatattcagccttcggtgctgcatcgtcggacgctgattgtcgatggttatcgcggtgaattgctggtcgatccggagccggtactgctgcaagaatatcagcggctaattagtgaagagattgagcttagccgtctggcggaagatgacgtcaatttacccgcgcagttaaaaagtggcgagcgtataaaagtcatgctcaatgccggtttaagcccggaacatgaagaaaaactgggcagccgtattgatggcataggactttatcgcactgaaatcccattcatgctgcaaagtggttttccgtcggaagaagaacaggtggcgcagtatcaggggatgctgcaaatgttcaatgataaacccgtcaccttgcgtacgctggatgtcggagcagataagcagctgccttacatgccgatcagcgaagagaatccatgcctgggttggcgtgggattcgcattacgctcgatcagccggagatcttcttgatccaggtgcgggcgatgctgcgtgctaatgccgctacgggcaacctgaatattctgttgccgatggtcaccagcctcgatgaagttgacgaagcacgccgcctgattgaacgtgccggacgtgaagtcgaggagatgatcggttacgaaattcccaaaccacgtatcggcatcatgctggaagtgccgtcaatggtatttatgctgccgcatctggcaaagcgggtcgatttcatctctgttggcaccaacgatctgactcaatacatcctggccgttgatcgcaacaatacccgggtggcgaacatttatgacagtcttcatcctgcaatgttacgagctctggcgatgatcgcccgggaagcggaaatacatggtatcgatctccgtttgtgcggtgaaatggcgggcgatcccatgtgcgtggcaatcctcattgggcttgggtatcgccatctgtctatgaacggacgttctgtagcgcgcgtaaaatacctactgcggcgcattgattatgccgaagcagaaaatcttgcgcagcgtagtctggaagcgcaactggcgaccgaagttcgccatcaggttgcagcctttatggagcgtcgcggcatgggcgggttgattcgcggagggttatag

SEQ ID NO: 262614 - DNA, 2355 bp, Klebsiella pneumoniae
atgaaaaaacgtatccccactctcctggccaccatgattgccaccgccctttatagtcaacagggactggcagccgacctcgcctcacagtgcatgttgggcgtgccaagctatgaccgtcctctggtacagggcgataccaatgacttacccgtgactatcaatgctgaccacgcgaaaggggactacccggatgacgccgtgtttactggcagcgtggatatcatgcagggtaacagccgtctgcaggccgacgaagtgcagctccatcaaaaagaggcaccaggacaaccggagccggtacgtaccgttgatgcgctcggtaatgtccattacgacgataaccaggtgatcctcaaagggccgaaaggctgggcgaatctgaacaccaaagataccaatgtctgggaaggtgattaccagatggtgggtcgtcagggccgcggtaaagcggacctgatgaaacaacgtggcgaaaaccgctataccattctggataacggtagctttacctcctgtctgccgggttctgacacctggagcgtggtaggtagcgaaattattcatgaccgcgaagaacaagttgcggagatctggaacgcccgctttaaggtgggtccggtaccgatcttttatagcccctatttgcagttgccggtgggtgacaaacgtcgctctggtttcttgatcccgaacgccaagtacaccaccaccaactactttgagttctaccttccatattactggaacatcgcgccaaatatggatgccaccatcacgccgcattatatgcatcgtcgtggcaatatcatgtgggagaacgaattccgctacctctcccaggcgggcgctggcttgatggaactggactatctgccttcagataaagtctatgaagatgaacacccgaacgatgacagttcacgtcgttggttattctactggaaccactccggggtcatggatcaggtgtggcgtttcaacgtcgactacaccaaggtcagcgatcctagctacttcaatgatttcgataacaagtacggttccagtactgacggctacgcaacgcaaaaattcagcgttggctatgcggtgcaaaacttcaatgccaccgtttcaaccaagcagttccaggtcttcagcgagcagaacaccagtagctactcggcagagccgcagttagacgttaactactaccagaatgatgttggtccgtttgatacacgtatttacggccaggcagtgcactttgtaaacaccagagacgacatgcctgaagcaacccgagttcacctggaaccgaccatcaatttgccgctctctaataactggggcagcatcaataccgaagcgaagttgctggcaactcattatcagcaaactaatcttgactggtataactccagaaacacaaccaagctggacgaatccgttaaccgcgtaatgccgcaattcaaagttgacggcaaaatggtctttgaacgcgatatggaaatgctggctccgggttatacccaaacgctggaaccgcgcgcgcagtatttatacgtgccgtatcgcgatcagagcgacatctataactacgactcgtctctgctgcaatctgactactctggcctgttccgggaccggacttacggcggtcttgaccgtattgcctccgctaaccaggtgacgaccggtgtcacatctcgcatatatgatgatgctgccgttgaacgttttaatatttccgttggtcaaatctactatttcacggagtctcgcactggcgatgacaacataacatgggagaatgacgacaaaacgggctcactggtgtgggcagccgatacttactggcgtatctccgagcgttggggattgcgtggcgggattcagtacgatacacgtctggataacgtagcgaccagtaactccagcattgaataccgtcgggatgaagaccgtctggtacagctgaattaccgttacgccagcccggaatatattcaggctacgctgcctaagtactattccacagctgagcaatataagaatggtatttcgcaggtaggtgccgtcgccagctggccaattgccgatcgttggtcaattgttggggcctactactacgacaccaatgcgaacaagcaagccgactctatgttaggtgtgcaatacagctcctgctgctatgcaattcgcgtcggttacgagcggaagctgaacggttgggataacgataaacaacatgcggtatatgacaacgcaatcggctttaacatcgaacttcgcggcctgagctccaactacggtctgggtacgcaagagatgctgcgttcgaacattctgccgtatcaaaacactttgtga

SEQ ID NO: 262615 - DNA, 816 bp, Klebsiella pneumoniae
atgcagtattggggaaaaatcattggcgtggccgtggccttactgatgggcggcggcttttggggcgtagtgttaggcctgttaattggccatatgtttgataaagcccgtagccgtaaaatggcgtggtttgccaaccagcgtgagcgtcaggcgctgttttttgccaccacttttgaagtgatgggccatttaaccaaatccaaaggtcgtgtcacggaggctgatattcatatcgccagccagttgatggaccgaatgaaccttcatggcgcttcccgtactgcggcgcaaaatgcgttccgggtgggaaaatcagacaattacccgctgcgcgaaaagatgcgccagtttcgcagtgtttgctttggtcgttttgacttaattcgtatgtttctggagatccagattcaggcggcgtttgctgatggttcactgcacccgaatgaacgggcggtgctgtatgttattgctgaagaattaggcatctcccgcgcccagtttgaccagtttttgcgcatgatgcagggcggtgcacagtttggcggcggttatcagcagcaatctggcggtggtaactggcagcaagcgcagcgtggcccgacgctggaagatgcctgtaatgtgctgggcgtgaagccgacggatgatgcgaccaccatcaaacgtgcctaccgtaagctgatgagtgaacaccatcccgataagctggtggcgaaaggtttgccgcctgagatgatggagatggcgaagcagaaagcgcaggaaattcagcaggcctatgagctgataaaacagcagaaagggtttaaatga

SEQ ID NO: 262616 - DNA, 759 bp, Klebsiella pneumoniae; identical to SEQ ID NO: 9436

SEQ ID NO: 262617 - DNA, 660 bp, Klebsiella pneumoniae
atggggatggaaaactacaatccaccgcaggaaccctggttggttatcctgtatcaggatgaccatattatggtggtcaacaagccgagcggtttgttgtctgtgccgggtcgtctggaagagcacaaagacagcgtgatgacgcgcattcagcgtgattatccgcaggcagaatcggtgcatcgtctggatatggctaccagcggcgtgattgtagtggcgctgaccaaagccgcggagcgggagttaaaacgccagttccgcgagcgcgagccgaaaaagcagtatgtggcccgcgtctgggggcatccatcccccgcagaaggtctggtggatctgccgctgatttgcgactggccaaaccgcccgaaacagaaagtctgttacgaaacaggtaaacctgcgcagacggagtatgaagtggtggaatatgcggcggataacacggcaagagtggtgttaaaaccgattaccgggcgttcgcatcagctgcgtgtgcatatgctggcgctgggtcatccgattctcggcgatcgtttttatgcatcaccagaagcgagagcaatggcaccgcgtttgttgctacatgcagagatgctgacgattacccatccggcgtatggcaatagtatgacgtttaaagcgccagcggatttttaa

SEQ ID NO: 262618 - DNA, 2907 bp, Klebsiella pneumoniae
atgccttttacacttggtcaacgctggatcagcgatacagaaagcgaattgggacttggaaccgttgtcgcggtggatgcgcgaactgtcactttacttttcccatctactggtgaaaaccgtctgtacgcacgcagtgattcccccgtgacccgcgtgatgttcaaccctggtgatactattaccagccatgacggctggcagatgcaagtcgaagaagtaaaagaagaaaatggcttgctgacctatatcggtactcgcctggatactgaagagtccggcgtagccctgcgtgaagttttccttgatagcaaactggtgttcagcaaaccgcaagaccgtctgtttgccgggcagattgaccgtatggaccgctttgcgctgcgttatcgcgcgcgtaagtattccagcgaacagttccgtatgccgtacagcggcctgcgcggtcagcgtaccagcctgatcccgcaccagctcaacatcgctcatgatgttggtcgccgccacgcgccgcgcgtcctgctcgctgacgaagtcggtttagggaaaaccattgaagccgggatgatcctgcatcagcaactgctctctggcgctgctgaacgtgtgctgattatcgtcccggaaaccttacagcatcagtggctggtagaaatgctgcgccgtttcaacctgcgctttgctctgtttgatgatgagcgttatgccgaagctcagcacgatgcttacaacccgttcgacaccgaacagctggtgatttgctcgctggattttgcccgtcgtagcaaacagcgtctggaacatctctgtgaagccgaatgggatctgctggtggtcgatgaagcccatcacctggtgtggagcgaagatgcgccgagccgcgaatatcaggccattgaacaactggcagagcacgtgcccggcgttctgctgctgaccgcaaccccggaacaactggggatggaaagccacttcgcccgtctgcgtctgctggacccgaaccgtttccacgattttgcgcaattcgttgaagaacagaaaaattatcgtccggttgcggacgccgttgccatgctgctggcaggtaacaaactgagcaatgatgaactgaacatgctcggtgagatgatcggcgagcaggatatcgagccgctgttgcaagcagcaaacagcgacagcgaagatgcaaagagcgcccgtcaggaactggtttccatgctgatggatcgccacggcaccagccgcgtgctgttccgtaacacgcgtaacggtgtgaaaggcttcccgaaacgcgagctgcacaccatcaagctgccgctgccgacgcagtatcagacggctattaaagtctccggcattatgggcgcacgcaaaagtgcggaagatcgcgctcgcgatatgctctacccggagcgtatttatcaggaatttgaaggtgataacgccacctggtggaacttcgatccgcgcgttgagtggctgatgggctacctgaccagccatcgctctcagaaagtgctggtgatctgcgccaaagctgccactgcgctgcaactggagcaagtactgcgcgaacgtgaaggtatccgcgctgcggtgttccacgaaggcatgtcgattattgagcgtgaccgcgctgccgcctggtttgctgaagaagacaccggcgcacaggtactgctgtgctcggaaatcggttctgaaggacgtaacttccagttcgccagccacatggtgatgtttgacctgccattcaacccggatctgctggagcagcgtattggtcgtctggatcgtatcggccaggcgcacgatattcagatccatgtgccttatctggagaaaaccgctcagtcggtgctggtgcgctggtatcacgaaggtctggatgcattcgagcacacctgcccgaccggacgcactatttacgatagtgtatacaacgatctgattaactatctggcttcaccggatcaaaccgaaggctttgacgatctgatcaaaaactgccgcgagcaacatgaagcgctgaaagcacagctggaacagggtcgtgaccgcctgctggaaatccattccaacggtggcgaaaaagcccaggcactggcagaaagcattgaagagcaggatgacgataccaacctgatcgccttcgccatgaatctgttcgatattatcggtatcaatcaggacgatcgcggcgacaacatgatcgtgctgaccccgtccgatcatatgctggtgccggacttcccaggcttgtcggaagatggcatcaccatcaccttcgaccgtgaagtggcgctggcgcgtgaagatgcgcagtttattacctgggagcatccgctgatccgcaacggtctggatctgatcctttctggcgataccggtagcagcacgatttcactgttgaaaaacaaagcgttgccggtaggtacgctgttggtggaactgatttacgtggtcgaagcccaggctccgaagcagttgcagctcaaccgcttcctgccaccgacgccggtacgtatgctgctggataaaaacggcaacaacctggcggcgcaggtggagtttgaaacctttaaccgtcagcttaacgcggttaaccgtcacaccggcagcaaactggttaacgccgtgcagcaggatgttcacgctatccttcagctgggggaagcacagatcgagaaatctgcccgtgcactgattgatgccgcacgtaacgaagccgacgaaaaactgtctgccgagctgtctcgtctggaagctctgcgtgcagtgaacccgaacattcgtgacgacgaactgaccgccattgagagcaaccgtcagcaggtaatggaaagcctggatcaggcaggctggcgtctggatgccctgcgtttgatcgttgtaacgcatcagtaa

SEQ ID NO: 262619 - DNA, 2352 bp, Klebsiella pneumoniae; identical to SEQ ID NO: 9435

SEQ ID NO: 262620 - DNA, 696 bp, Klebsiella pneumoniae
atgttagaagatctcaaacgccaggtattagaagccaatttggcgctgccaaaacataacctggtcacgctcacatggggcaacgtcagcgccgttgatcgcgagcgcggcgtctttgtgatcaaaccttccggcgtcgattacaacgtcatgaccgctgacgatatggtcgtggtcagcatcgaaaccggtgaagtggttgaaggaacgaaaaagccctcctccgacacgccaactcaccggctgctctatcaggcattcccgtccattggcggcattgtgcacacacactcgcgccacgccaccatctgggcgcaggcgggccagtcaattccggcaaccggtaccacccacgccgactatttctacggcaccattccctgcacccgcaaaatgaccgatgcggaaatcaacggcgaatatgaatgggaaacaggaaaagtgatcgtcgaaaccttcgaaaaacaggggatcgacgcagcacaaatgcccggcgttctggtccattctcacggcccgtttgcatggggcaaaaatgccgaagatgcggtgcacaacgccatcgtgctggaagaagtcgcttatatggggattttctgccgccagcttgctccgcagttaccggatatgcagcaaacgttgctggataaacattatttacgtaagcatggtgcgaaggcatattacgggcagtaa

SEQ ID NO: 262621 - DNA, 1503 bp, Klebsiella pneumoniae
atgacgatttttgataattatgaagtgtggtttgtaattggcagccagcatctgtatggcccggaaaccctgcgtcaggtcacccaacatgccgagcacgtcgttaatgcgctgaatacggaagcgaaactgccctgcaaactggtgctgaaaccgctgggcaccacgccggatgaaatcaccgctatttgccgtgacgcgaattacgacgatcgttgcgccggcttggtagtgtggctacacactttctccccggccaaaatgtggatcaacggcctgaccatgctcaacaaaccgttgctgcaattccacacccagttcaacgcggcgctgccgtgggatagcatcgatatggactttatgaacctgaaccagactgcacatggcggtcgcgagttcggcttcattggcgcgcgtatgcgtcagcaacatgccgtggttaccggtcactggcaggataaacaagcccatgagcgtatcggctcctggatgcgtcaggcggtatctaaacaggatacccgtcatctgaaagtctgccgttttggcgataacatgcgtgaagtagcggtcaccgatggtgataaagttgccgcacagatcaagttcggtttctccgtcaatacctgggcggttggcgatctggtgcaggtggtgaactccatcagcgatggcgatgttaacgcgctggtcgatgagtatgaaagcagctacaccatgacgcctgccacacaaatccacggcgaaaaacgccagaacgtgctggaagcggcgcgtattgagctggggatgaagcgtttcctggaacaaggtggcttccacgcgttcaccaccacctttgaagatttgcacggtctgaaacagcttcctggtctggccgtacagcgtctgatgcagcagggttacggctttgcgggcgaaggcgactggaaaactgccgccctgcttcgcatcatgaaggtgatgtcaaccggtctgcagggcggcacctcctttatggaggactacacctatcacttcgagaaaggtaatgatctggtgctcggctcccatatgctggaagtctgtccgtcgatcgccgtagaagagaaaccgatcctcgacgttcaacacctcggtattggcggtaaagacgatcctgcccgcctgatcttcaatacccaaactggtccggcgattgtcgccagcctgattgatctcggcgatcgttaccgtctgctggttaactgcatcgacactgtgaaaacaccgcactccctgccgaaactgccggtggcgaatgcgctgtggaaagcgcaaccggatctgccaactgcttccgaagcatggatccttgctggtggcgcgcaccatactgttttcagccatgcgctgaacctcaacgatatgcgccagtttgccgagatgcacgacattgaaatcacggtgattgataacgacacccgcctgcccgcgtttaaagacgcgctgcgctggaacgaagtgtattacggatttcgtcgctaa

SEQ ID NO: 262622 - DNA, 1701 bp, Klebsiella pneumoniae
atggcgattgcaattggcctcgattttggcagtgattctgtgcgagctttggcggtggactgcgccaccggtgaagagatcgccaccagcgtagagtggtatccccgttggcagaaagggcaattttgtgatgccccaaataaccagttccgtcatcatccgcgtgactacattgagtcaatggaagcggcgctgaaaaccgtgcttgcagagcttagcgccgagcagcgcgcagctgtggtcgggattggcgttgacacaaccggctcgacgcccgcaccgattgacgcggacggtaacgtcctggcgctgcgcccggagtttgccgaaaacccgaacgcgatgttcgtattgtggaaagaccacaccgcggttgaagaagcggaagagattacccgcttatgtcacacgccgggcaacgttgactactcccgctatattggcggtatttattccagcgaatggttctgggcaaaaatactgcatgtaactcgccaggacagcgccgtggcgcaatctgccgcatcgtggattgagctgtgcgactgggtgccagctctgctttccggtaccacgcgcccgcaggatattcgtcgcggacgttgcagcgccgggcataagtcgctatggcacgaaagctggggcggcctgccgccagccagtttctttgatgagctggacccgatcctcaatcgccatttgccttccccgctgttcactgatacctggactgccgatattccggtgggcaccttatgcccggaatgggcgcagcgtctcggcctgcctgaaagcgtggtgatttccggcggcgcgtttgactgccatatgggcgcagttggtgcaggcgcacagcctaacgctctggtaaaagttatcggtacttccacctgcgacattctgattgccgacaaacagagcgttggcgagcgggcagtgaaaggtatttgcggtcaggttgatggcagcgtggtgcctggatttatcggtctggaagcaggccaatcggcgtttggtgatatctacgcctggtttggtcgcgtactcggctggccgctggaacagcttgccgcccagcatccggaactgaaagagcaaatcaacgccagccagaaacaactgcttccggcgctgaccgaagcatgggctcaaaatccgtctctggatcacctgccggtggtgctcgactggtttaacggccgccgcacgccaaacgctaaccaacgcctgaaaggggtgattaccgatctgaacctcgctaccgacgctccgctgctgttcggcggtttgattgctgccaccgcctttggcgcacgcgcaatcatggagtgctttaccgatcaggggatcgccgtcaataacgtgatggcgctgggcggcatcgcgcggaaaaaccaggtcattatgcaggcctgctgcgacgtgctgaatcgcccgctgcaaattgttgcctctgaccaatgctgtgcgctcggtgcggcgatttttgctgccgtcgccgcgaaagtgcacgcagacatcccctcagcccagcaaaaaatggccagtgcggtagagaaaaccctgcaaccgcgcagcgaacaggcacaacgctttgaacagctttatcgccgctatcagcaatgggcgatgagcgccgaacaacactatcttccaacttccgccccggcacaggctgcccaggccgttccgactctataa

SEQ ID NO: 262623 - DNA, 879 bp, Klebsiella pneumoniae
atggctgaagcgcaaaatgatcccctgctgccgggatactcgtttaacgcccatctggtggcgggtttaacgccgattgaggccaacggttatctcgatttttttatcgaccgaccactgggaatgaagggttatattctcaatctcaccatacgcggccagggggtggtgaaaaatcagggacgagaatttgtctgccgaccgggtgatattttgctgttcccgccaggagagattcatcactacggtcgtcatccggaggctcgcgaatggtatcaccagtgggtttactttcgtccgcgcgcctactggcatgaatggcttaactggccgtcaatatttgccaatacgggtttctttcgcccggatgaagcgcaccagccgcatttcagcgacctgtttgggcaaatcattaacgccgggcaaggggaagggcgctattcggagctgctggcgataaatctgcttgagcaattgttactgcggcgcatggaagcgattaacgagtcgctccatccaccgatggataatcgggtacgcgaggcttgtcagtacatcagcgatcacctagcagacagcaattttgatatcgccagcgtcgcacagcatgtttgcctgtcgccgtcgcgtctgtcgcatctgttccgccagcagttaggaattagcgtcttaagctggcgcgaggaccaacgcattagtcaggcgaagctgcttttgagcaccacccggatgcctattgctaccgtcggtcgcaatgttggttttgacgatcaactctatttctcgcgagtatttaaaaaatgcaccggggccagtccgagcgagttccgtgccggttgtgaagaaaaagtgaatgatgtagccgtcaagttgtcataa

SEQ ID NO: 262624 - DNA, 765 bp, Klebsiella pneumoniae
atgcaagcattgctggaacactttattacccaatccaccgtgtattcattgatggcggtggtgttggtggcctttctggagtcgctggcgctggtcggtttgattctacccggtacggtgctgatggcggggctgggggcgctgattggcagcggcgagttaagtttctggcacgcctggctggcagggatcgtcggttgcctgctgggcgactggatctccttctggctgggctggcgttttaaaaagccattgcatcgctggtcatttctgaagaaaaacaaagcactacttgataaaactgaacatgcgttgcatcaacacagcatgttcaccattctggtcggtcgttttgttggcccgacgcgtccgctggtgccaatggtggcgggaatgctggatctcccggtggcaaaatttattacgccgaatattatcggctgcctgctgtggccaccgttttacttcctgccggggattctggcgggtgcggcgatcgatattccagccggaatgcagagcggcgagtttaaatggttgctgctggcgacggcggtatttttgtgggttggtggctggctgtgctggcggttatggcgcagcggtaaagcaaccgatcgtttaagtcattatttgtcgcgcggtcgtttgttgtggctgacgccgttgatttctgccgtcggtgtagtggcgctggtggtgttaattcgccacccgttgatgccgatgtatatcgatattttgcgtaaagtggttgggggttag

SEQ ID NO: 262625 - DNA, 699 bp, Klebsiella pneumoniae
atgttaaaactgactgatatcacctggctttaccaccatttgccgatgcgttttagcttaacggtggaacgcggcgagcaggtggcgatcctcgggccaagcggcgcgggtaaaagtaccctgctgaatttgatcgccggttttctgacgccagccagcggttcgctgactatcgacggcgttgatcacaccactacgccgccgtcacgccgtccggtgtcgatgctgtttcaggagaacaacctgttcagtcacctgacggtcgcgcagaacatcgggttggggcttaatccaggattgaagctgaacacggcacagcaggagaaaatgcacgctatcgcccgccagatggggattgataatttaatggcgcgattaccgggcgagctttctggcggtcaacgacagcgcgtggcgttagcgcgttgtctggtgcgcgaacagccgattttattgctcgatgaaccgttctctgcgctcgatccggcgttacgtcaggagatgttgacgctggtgagcacgagctgccagcagcaaaaaatgacgttattgatggtgtcgcacagtgtggaagatgcggcgcggatcgccacacgctcggtggtggtcgccgacgggcgcatcgcctggcagggtatgaccgatgagttgttgagcggtaaggcgagtgcttcggcactattggggattacgggttag

SEQ ID NO: 262626 - DNA, 1611 bp, Klebsiella pneumoniae
atggcaacgcgccgtcagccattaattcccggctggttaattccaggtgtaagcgccgctacgcttgtggtggcggttgcactggcggcgtttctcgccctgtggtggaacgcgccgcagggtgactgggtggcagtctggcaggacagctatctgtggcatgtggtgcgcttctccttctggcaggcgtttctctcggcgctgctctctgtcgtgcccgcgatattccttgcccgcgccctctaccgcaggcgctttccaggacggctggcgctgttgcgtctgtgtgccatgaccttgatcctcccggtgctggttgctgttttcggcattcttagcgtctatggtcgccagggctggctggcatcgctctgccaatcgctcggtctggagtggaccttttcgccctacggcctgcaaggcattttgctggcccatgtgttttttaatctgccgatggcgagccgcttattactccaggcactggaaaacattcccggcgaacaacgtcagcttgccgcccagcttgggatgcgcggctggcattttttccgcttcgtcgaatggccgtggttacggcgacaaatcccgccagttgctgcgcttatctttatgctctgtttcgccagcttcgccaccgtgctgtcgctgggcggcggtccgcaggcgaccactatcgagctggctatttatcaggcgctgagttacgactacgatcctgcccgcgcggcgatgctggcgttgatccagatggtgtgttgcctcgggctagtgctgttgagtcagcgattgagtaaggccattgcgcccggcactactctgctgcaaggctggcgcgacccggacgatcgtctgcatagccgcatttgcgacacggtgttaattgtgctggcgctgctgctgttgctaccaccgttactggcggtgatcgtcgatggggtaaatcgccagttgccggaagtgctggcacaaccggtgctgtggcaggcgctgtggacctcgttgcgtattgcgctggcggcaggcgtattatgcgtagtgctgaccatgatgctgctatggagcagtcgcgaactgcgggtgcggcaaaaaatgctggcgggtcaggcgctggagatgagcggcatgttgatcctcgccatgccggggattgtgctggctacgggcttctttttactgctcaacaacactatcggcctgccgcaatctgctgacggcattgtgattttcaccaatgcgttaatggcgatcccttatgcgctgaaggtgctggaaaacccgatgcgcgatatcaccgcgcgttacagtatgttgtgtcagtcgctgggcattgaaggctggtcacgcttaaaagtggtggagctgcgcgccctgaaacgcccactggcgcaggcactggcctttgcttgtgtgctatcgattggtgattttggcgtggtggcgttgttcggtaacgatgatttccgtaccctgccgttttatctctaccagcaaattggctcctatcgcagccaggacggcgcggtcaccgcgttaattctgctgctactctgttttctgctgtttactgtgattgaaaaactaccggggcgaaatgttaaaactgactga

SEQ ID NO: 262627 - DNA, 1047 bp, Klebsiella pneumoniae
atggcttcctggctggttgagtggaaaaatgccactgaaacgcaatggcttaaagatgccccgtcacagccattgcaacagtcactgaaagaccttgagcgggcttacaaaaacttcttccagaagcgggctgcttttccccgattcaaaaagcggggacagaatgatgcattccgctacccgcagggcgttaagctcgatcaggaaaacagccgtatttttctgccgaaactgggctggatgcgctaccggaatagccgtcaggtcacgggtgttgtgaaaaatgtcacggtcagccagtcctgcggtaagtggtacatcagtattcagacagaaagtgaagtatcaactccggttcacccttcagcatcaatggtcgggctggatgctggcgtggctaaactcgccacgctgtcagatggcacagtctttgagcctgtaaacagttttcagaaaaaccagaagacgctggcgagacttcagcgacagttaagccgcaaggtcaaattcagcaacaactggcagaagcagaaacgcaaaatacagcgactgcattcccgtatcgcaaatatccgcagggactaccttcacaaagtcacaacgaccgtcagcaaaaaccacgcaatgatagtcattgaggatttgaaggtcagcaacatgtcaaagtcagcagcgggtacggtcagccagccggggcgcaatgtccgggcaaaatcaggtttaaaccgttcgatactggatcagggctggtatgaaatgcgccgccagcttgagtacaagcagctctggcgtggcggtcaggtgcttgctgtttcgccagcgtacacaagccagcgttgcacgtgctgtggtcatacagcgaaagaaaatcgcctgtcacaaagtaaattcagatgccaggtatgtggatatacagcgaacgccgatgtaaatggcgctcgtaacattttagcggcggggcacgccgttcttgcctgtggagggatggtgcagtcaggccgcccgttgaagcaggaacccaccgaaatgattcaggcgacagcctga

SEQ ID NO: 262628 - DNA, 189 bp, Klebsiella pneumoniae; identical to SEQ ID NO: 35902

SEQ ID NO: 262629 - DNA, 1104 bp, Klebsiella pneumoniae
gtgcaggacgagtattacatggcgcgggcgctaaagctggcgcaacgaggacgttttaccacgcatcccaacccgaatgtcgggtgcgtcattgtcaaagatggcgaaattgtcggtgaaggttaccaccaacgagcgggtgaaccgcatgccgaggtacacgcgttgcgcatggctggcgaaaaagccaaaggcgcaacggcgtatgtcacactcgaaccctgtagccatcatggtcgtacgccaccgtgttgtgatgcattaattgctgcgggcgtggcgcgcgtggttgcctcgatgcaagatcctaacccgcaggtagctgggcgagggctatatcgcctgcaacaggctggtattgacgtcagccacggcctgatgatgagtgaagccgagcaattgaataaaggctttctcaagcggatgcgcaccggctttccttatattcagttaaaacttggcgcatcgcttgatggtcgcacggcgatggagagtggcgaaagccagtggatcacttcgcctcaggcgcgactcgatgtacaacgactgcgcgcacaaagtcatgccattttaaccagcagtgccacggtgctggcggatgatccggccttaacggtgcgttggtctgaactggatgaacaaactcaggggctctacccgcaacacaatctccgccagccggtacgtattgtgattgatagccaaaatcgcgtgacgccggaacatcgcattgtgcagcagcccggcgaaacctggttcgcgcgtacgcaggaagattctcgtgagtggccggaaacggtgcgtaccttgctgattccagagcataaaggtcatctggatctggttgtactaatgatgcaactgggtaaacagcagattaacagcatctgggtggaagcggggccaacgctcgctggcgcattgctgcaggcgggtttagtcgatgagctgattgtctatatcgcacctaaactattaggcagcgacgcccgtggattatgcatactaccagggcttgagaaattagctgacgccctccaatttaaattcaaagagatacgtcatgtaggcccggatgtttgcctgcatttagtgggtgcatga

SEQ ID NO: 262630 - DNA, 471 bp, Klebsiella pneumoniae
atgaacattattgaagctaacgttgctaccccggacgctcgcgtcgccatcaccatcgcgcgtttcaacaactttatcaatgacagcctgctggaaggtgcaattgatgcactgaaacgtatcggtcaggtaaaagatgaaaacattaccgttgtttgggtgcctggtgcctatgagctgccgctggcggcgggtgcactggctaaaaccggtaaatacgacgcggtgattgcgctgggtacggttattcgtggtggcactgcccactttgaatatgtcgctggtggtgcaagcaacggcctggcgcatgttgcccaggacagcgaaattccggttgcttttggggttctgaccactgaaagcattgaacaagcgatcgaacgtgctggcaccaaagctggcaacaaaggtgcagaagctgcactgaccgcgcttgaaatgattaatgtattgaaagccatcaaggcctga

SEQ ID NO: 262631 - DNA, 978 bp, Klebsiella pneumoniae
atggcatgtggcgagttctccctgattgcccgttattttgaccgtgtaagaagttctcgtcttgatgtcgaactgggcattggcgacgattgcgcacttctcaatatccccgagaaacagaccctggcgatcagcactgatacgctggtggcgggcaaccacttcctccctgatatcgatcctgctgatctggcttataaagcactggcggtgaacctaagcgatctggctgcgatgggggccgatccggcctggctgacgctggcattaaccttaccggacgtcgacgaagcgtggcttgagtccttcagcgacagtttgtttgatcttctcaattattacgatatgcaactcattggcggcgataccacgcgtgggccattatcaatgacgctgggtatccacggctttgttccgatgggacgagccttaacgcgcgctggggcgaaaccgggtgactggatctatgtgaccggtacaccgggcgatagcgccgccgggctggcgattttgcaaaaccgtttgcaggttgccgatgttaaagatgcggactacttgatcaaacgtcatctccgtccatctccgcgtattttacagggacaggcactgcgcgatctggcaaattcagctatcgatctctctgacggtctgatttccgatctcgggcatatcgtgaaagccagcgactgcggcgcaagtattgacctggcattgctgccgttttctgatgcgctttctcgccatgttgaaccggaacaggcgctgcgctgggcgctctctggcggtgaagattacgagttgtgtttcacggtgccggaactgaaccgtggcgcgctggatgtggctctcggacatctgggcgtaccgtttacctgtatcgggcaaatgaccgccgatatcgaagggctttgttttattcgtgacggcgaacctgtcacgttcgactggaaaggatatgaccattttgccacgccataa

SEQ ID NO: 262632 - DNA, 516 bp, Klebsiella pneumoniae
atgaccattttgccacgccataaagatgtcgcgaaaagtcgcctgaagatgagtaatccgtggcatctgcttgctgtcggattcggaagtggattaagcccaatcgttcctggcacgatgggatcgctggcggcgattccgttctggtatctgatgacctttttgccctggcagctctattcgctggtggtgatgctggggatctgtatcggcgtctatctttgtcatcaaacggcgaaagacatgggcgtgcacgatcacggcagcattgtctgggacgaatttattggtatgtggatcacgctcatggcgctgccgaccaatgactggcagtgggtcgccgccgggtttgtgattttccgtatcctggatatgtggaaaccgtggccgatccgctggtttgaccgcaatgtacatggcggcatggggatcatgatcgacgatattgtcgccggggtaatttccgcaggcatcctgtactttatcggtcatcactggccgctgggtattctttaa

SEQ ID NO: 262633 - DNA, 1572 bp, Klebsiella pneumoniae
atgatgaaaactatcaccaaacaaccgatcctgtttactgatgtaccggttgcagatttaagaaactcaatgaagcacgatttaaatcaaaatcttatcgaaaggctatggaacaaaattcgtgatttttttctgggcagtgataaacaaaaagcatttaaatcgattcataaatacatcaatacattgtcagttctaaattataattcagcgtcatctccagatcccaattttaatatagatgcatcgtcagatttagactcatatttaaacctgaaatttgataacctctcgcccaaacaaaagcagaccacgctttgttgtttctggaataaaattgcatcctcattgccagagccatacaacagcaccatcaaacataacattattttttataaagtcggagaaaatctgatgatacgtggaactatctctattgttaacgaggtagtaaagacttattcactcccaatagaaaaggatgacaatggatattacgatttcagcggtctatatctagcacacagcaatatttccggtaaagatcccaataaagatcccgatatagatttcggtatagatctgggaaactgtaactgctcaaatgtcaacttcgaacatacttattttgatagcgtcaagtttacaaatacgaattgtacaaatgcgaattttaacagttgtagatttatcaaatgcgatctaacaaatatgaattgcactggcgcaattcttgataatgcggtgatatatggtaaagaaaaagaacctgagatgcaatatccagaagcagatcaaataatacaaaggataacttatcagaaatcacatgggaatgaaacgaaagggatgattctaactaactgctcctgtgttaaaaccactttcaattgggcagatttatcagaaagtgattgccaaaatgtggactttagcgaggctaatctttcaaacactattcttcctgacatcgtcaggatgaaaggcacgaaactttaccgtaccgacctttttaatccgatattaaaagcagaagcagaatcaacagaagaaaaagatattagcccattagcaaaaattattcttgactatattgaatcagataaaaaccctgagtcattaaaatttgatgaaaaatcaacaaccactaaaataatacaagatattgataattttattttctataatcagcatttaaagagcatattcaatcaagcaatgaatcttgaaggaaaaataagcagaaaaaaatacaatgagatttttaactataaacaagaacaagccagacaatattttatcgaccagtataaaataacaaaaaatgattatttaaagaaaatacctttaactgcacaattaattgcaaaatacaaaatggatgatcaattggaccaacttttggttacccgtgaaattcaagatgaaataaaaccaaagattcaagacaaaatagatgaactttctaaaaatttattcaacactataaaccaaaccattaaggataactttgatgatatttttcggcaacagtcagagaatatgagcaattattatgagttcgtcgactga

SEQ ID NO: 262634 - DNA, 975 bp, Klebsiella pneumoniae; identical to SEQ ID NO: 9743

SEQ ID NO: 262635 - DNA, 900 bp, Klebsiella pneumoniae
atggactttccgcagcaactcgaagcctgcgttaagcaggccaaccaggcgctgagccgttttatcgccccactgccctttcagaacactcccgtggtcgaaaccatgcagtatggcgcattattaggtggtaagcgcctgcgacctttcctggtttatgccaccggtcatatgttcggcgttagcacaaacacgctggacgcgcccgctgccgccgtagagtgtatccacgcttactcattaattcatgatgatttaccggcaatggatgatgacgatctgcgtcgcggtttgccaacctgccatgtgaagtttggcgaagcaaacgcgattctcgctggtgacgctttacaaacgctggcgttctcgattttaagcgatgccgatatgccggaagtgtcggatcgcgacagaatttcgatgatttcagaactggcgagcgccagcggtattgccggaatgtgcggtggtcaggcattagatttagacgcggaaggcaaacacgtacctctggacgcgcttgagcgtattcatcgtcataaaaccggcgcattgattcgcgccgccgttcgccttggtgcattaagcgccggagataaaggacgtcgtgctctgccagtactcgacaagtacgcagagagcatcggccttgccttccaggttcaggatgacatcctggatgtggtaggagatactgcaacgttgggaaaacgccagggtgccgaccagcaacttggtaaaagtacctaccctgcacttctgggtcttgagcaagcccggaagaaagcccgggatctgatcgacgatgcccgtcagtcgctgaaacaactggctgagcagtcactcgatacctcggcactggaagcgctagcggactacatcatccagcgtaataaataa

SEQ ID NO: 262636 - DNA, 243 bp, Klebsiella pneumoniae
atgccgaagaaaaatgaggcgcccgccagctttgaaaaggcgctgagcgagctggaacagattgtaacccgtctggaaagtggtgacctgccgctggaagaggcgctgaacgagttcgaacgcggcgtgcagctggcacgtcaggggcaggccaaattacaacaagccgaacagcgcgtacaaattctgctgtctgacaatgaagacgcctctctaaccccttttacaccggacaatgagtaa

SEQ ID NO: 262637 - DNA, 591 bp, Klebsiella pneumoniae
atgagcgcatcggcactggtttgcctcgcccctggtagtgaagagactgaagccgtcaccactatcgatctgctggttcgcggcggtatcaaagtcaccactgccagcgtcgccagcgatggtaacctggcgattacctgctcgcgcggcgtgaagctgctggcggatgcgccgctggtcgaagtagctgatggcgaatatgacgtgatcgtgctgcctggaggcattaaaggcgcagagtgttttcgcgatagcaccctgctggttgaaaccattaaacagttccaccgttccgggcgtatcgtcgcggctatttgcgccgcaccagccaccgtgctggtcccgcacgatatcttcccgattggcaatatgaccggcttcccgacgctgaaagacaaaatacccgccgaacaatggcaggacaagcgcgtcgtctgggatgcacgggtaaaattgctgaccagtcaggggccgggtacagctatcgactttggtctgaaaattatcgacctgctggttgggcgtgaaaaagcccatgaagtggcatcacaactggtgatggcggcagggatttataattattacgagtag

SEQ ID NO: 262638 - DNA, 912 bp, Klebsiella pneumoniae
atgaaaattaccgtattgggatgcggtgccttagggcaattatggcttacagcactttgtaaacagggtcacgaggttcagggctggctgcgcgtaccacaaccttattgtagtgtgaatctggttgagacagatggttcgatatttaacgaatcgctgaccgccaacgatcccgattttctcgccaccagcgatctgctcctggtgacgctgaaagcatggcaggtttccgatgccgtcaaaagcctcgcgtccacactgcctgtaactacgccaatactgttaattcacaacggcatgggcaccatcgaagagttgcaaaacattcagcagccattactgatgggcaccaccacccatgccgcccgccgcgacggcaatgtcattattcatgtggcaaacggaatcacgcatattggtccggcacggcaacaggacggcgattacagttatctggcggatattttgcaaaccgtgttacctgacgtcgcgtggcataacaatattcgcgccgagctgtggcgcaagctggcagtcaactgtgtgattaatccactgaccgccatctggaattgcccgaatggtgaattacgtcatcatccgcaagaaattatgcagatatgcgaagaagtcgcggcagtaatcgaacgcgaagggcatcatacttcagcagaagatttgcgtgattacgtgatgcaggtgattgatgccacagcggaaaatatctcgtcgatgttgcaggatatccgcgcgctgcgccacaccgaaatcgactatatcaatggttttctcttacgccgcgcccgcgcgcatgggattgccgtaccggaaaacacccgcctgtttgaaatggtaaaaagaaaggagagtgaatatgagcgcatcggcactggtttgcctcgcccctggtag

SEQ ID NO: 262639 - DNA, 492 bp, Klebsiella pneumoniae
atgccatctttcgatattgtctctgaagttgatcttcaggaagcacgtaacgcggtcgataacgcgagccgcgaagtggagtcccgttttgacttccgtaatgttgaagcctcatttgagctgaacgacgccagcaaaaccatcaaagtgttgagcgagtccgatttccaggtcaatcagttgctggatattctgcgtgccaagctgctgaagcgcggcattgaaggcagttcactggatgtaccggaaaatatcgttcatagcggtaaaacctggtttgtggaagcgaaactgaaacagggcattgagagcgcgacccagaagaaaatcgtcaagatgatcaaagacagcaaactgaaagtgcaggcgcaaattcagggtgatgagatccgcgtaacgggtaaatctcgtgatgatttgcaggctgtcatggcgatggtacgtggtggcgatctcggtcagccgttccagttcaaaaacttccgcgattaa

SEQ ID NO: 262640 - DNA, 1365 bp, Klebsiella pneumoniae
atgaacgattataaaatgacgccaggtgagcggcgcgcgacctggggtttagggaccgtattctcgttgcgcatgctgggcatgtttatggttctgccggttctgaccacgtacggcatggctctgcaaggtgccagcgaagcattaatcggtattgccattggtatttatggtctgactcaggccgtttttcagattccgtttggcctgctttccgaccgcattggtcgcaaaccattaattgtcggtgggctggcagtgtttgccgccggtagcgttatcgctgcgctctctgactccatctggggaattattctgggccgggcgctacaaggctccggtgcgattgccgctgccgttatggcgctgctttccgatctcacgcgcgaacaaaaccgcaccaaagcaatggcgtttatcggcgtgagctttggcattacctttgccattgcgatggtgcttggcccgatcatcactcacaaacttgggctgcacgcgctgttctggatgatcgctattctggcaacgaccggcattgcgttgaccatttgggttgtgcccaacagtagcactcacgtacttaatcgtgagtccggaatggtgaaaggcagtttcagtaaagtgctggcggaaccgcggctgctgaaactcaactttggcattatgtgtctgcatattttgctgatgtcgacgtttgttgccctgcccggacaactggctgatgcggggttcccggcggctgaacactggaaggtctatctggcgacaatgctaatcgcctttggctcggtcgtgcctttcattatctacgctgaagttaagcgcaaaatgaagcaagtctttgtcttctgcgttgggttgatcgtggttgcggaaattgtgttgtggaacgcacaaacgcagttctggcaactggtggtcggcgtgcagcttttctttgtagcgtttaatttgatggaagcccttctgccttcacttatcagtaaagagtcgccagcaggttacaaaggtacggcgatgggtgtttactccaccagccagtttcttggcgtggcgattggcggttcgctgggcggctggattgacggcatgtttgacggtcagggagtatttctcgctggcgcaatgctggccgcagtgtggctggcagtcgccagtaccatgaaagaaccgccgtatgtcagcagcttgcgcattgaaatcccggcggacattgccgcaaacgaggcgttaaaagtgcgtttgctggaaaccgcgggcgtcaaagaagtgttgattgcagaagaagaacattcagcttatgtgaaaatcgacagcaaagtgacgaatcgctttgaggttgaacaggcaattcgtcaggcataa

SEQ ID NO: 262641 - DNA, 330 bp, Klebsiella pneumoniae
atgagtcattctaccgatcacagcggcgcgtcccatggcagcgtaaaaacctacatgacaggctttatcctgtcgatcattctgacggtgattccgttctggatggtgatgacaggggctgcctctccggccgtaattctgggaacaatcctggcaatggcagtggtacaggttctggtgcatctggtgtgcttcctgcacatgaataccaaatcagatgaaggctggaacatgacggcgtttgtcttcaccgtgctaatcatcgctatcctggttgtaggctccatctggattatgtggaaccttaactacaacatgatgatgcactaa

SEQ ID NO: 262642 - DNA, 726 bp, Klebsiella pneumoniae
gtgatcatcggcggcgtggtcttcggctgcttcgcagggatgacctactggtggcctaaagcgttcggtttcaaactgaacgaaacctggggtaaacgcgcgttctggttctggatcatcggcttcttcgttgcctttatgccgctgtatgcgctgggcttcatgggcatgacccgtcgtttgagccagcagattgacccgcagttccacaccatgctgatgattgcagccagcggtgcagtactgattgcgctgggtattctctgcctcgttattcagatgtacgtttctattcgtgaccgcgaccagaaccgtgacctgactggcgacccgtggggtggccgtacgctggagtgggcaacctcttccccgcctccgttctataactttgccgttgtgccgcacgttcacgagcgtgatgcattctgggaaatgaaagagaaaggcgaagcgtacaaaaagcctgaccactatgaagaaattcatatgccgaaaaacagcggtgcaggtatcgtcattgcagctttctccaccatcttcggtttcgccatgatctggcatatctggtggctggcgattgttggcttcgcaggcatgatcatcacctggatcgtgaaaagcttcgacgaggacgtggattactacgtgccggtggcagaaatcgaaaaactggaaaaccagcatttcgatgagattactaaggcagggctgaaaaatggcaactga

SEQ ID NO: 262643 - DNA, 1326 bp, Klebsiella pneumoniae
atgacgcacgataatatcgatattctggtggtagatgatgacattagccactgcactattttgcaggcattgctgcgcggctggggctataacgtcgcgctggcgaatagtgggcaacaggcgctggcgcaggtgcgggaacaggtttttgatcttgtgctttgcgatgtgcgaatggcagagatggacggcatcgccacactaaaagaaatcaaagcgttaaacccggcaattccggtactgattatgactgcgtactccagcgttgagacggcagtagaggcgctgaaaaccggggcgctggattatctcatcaagccgctggatttcgataacctgcaggcgacgctggaaaaggcgctcgcacatatgcacagtattgacgctgaaacgcctgcggtgtctgccagccagttcgggatggtcggtaaaagtccggcgatgcaacacctgctcagtgaaatcgccctcgtcgcgccatcggaagccacggtgctgatccacggcgattccggcaccggtaaagagctggtcgccagggcgattcacgccagtagcgcacggagtgaaaaaccactggtaacgctcaactgtgcggcactcaacgaatccttgctggaatctgaattgttcggtcacgaaaaaggggcgtttaccggagccgacaaacggcgggaagggcgctttgttgaggcggacggcggcacgctgtttctcgatgaaattggcgatatctcgccgatgatgcaggttcgtctgctgcgtgcgattcaggagcgcgaagttcagcgtgtcggcagcaaccagaccatctcggttgatgtccggctgattgcggcgactcatcgcgatcttgccgcagaggtgaatgccggacgttttcgccaggatctctactatcgcctgaacgtggtggcgattgaagttccgtcgctgcgtcagcggcgggaagatatccctctgctggctggccattttctgcagcgctttgccgagcgtaatcgcaaggcggtaaaaggttttacgccccaggcgatggatctgctgattcactacgactggccgggaaatattcgcgagctggaaaacgcggtggaacgggctgtggtgctactgaccggggaatatatttccgaacgcgagctgccgctggcgattgcgagtacgccgatcccgctggcgcaaagtcaggatattcagccgctggtggaagtcgaaaaagaggtgattctggcggcactggagaaaacgggcggcaacaaaaccgaagccgcccgtcagttagggatcacgcgtaaaacgctattggcaaaactgtcgcgttag

SEQ ID NO: 262644 - DNA, 1389 bp, Klebsiella pneumoniae
atgcaacgttcaaaagacaccttagccaaatggttaagcgcgatcctccccgtggtcattgttgggctggtgggattgtttgcggtaacggtgattcgtgattatgggcgggcaagtgaggctgaccgtcaggcattactggaaaaaggtaatgtgctcattcgcgctctggagtcaggaagccgcgtagggatggggatgcgaatgcaccatgtgcagcaacaggcgcttctggaagagatggcaggccagcctggggtgttgtggtttgcggtcaccgatgcgcagggcatcatcattcttcacagtaaccccgaaatggtcgggcgtgcactctattctcctgatgaaatgcagcagttaaagccagaggaaaactcccgctggagactgcttgaggatgcagaaaaaacgcctgcgcttgaggtctatcgtttgttccagccaatgtcattgccttggcggcatggtatgcacaatatgccgcgctgtaacggcaaagctgtgccacaggcagaagcacaacaggctattttcatcgccgttgacgccagcgatctggttgcaacccagagtggggaaaagcgcaataccctgattatcctcttcgccctggcgacggtcttgctggcaagcgtgttgtcattcttctggtatcgccggtatctgcgctcgcgccagcttctacaagatgaaatgaagcgcaaagagaagctggtggcactggggcatctggcggcaggcgttgcccacgaaatccgtaacccactttcctcgattaaagggctggcgaaatactttgccgaacgcgcgcctgcagggggagaagcgcatcaactggcgcaagtgatggcgaaagaggctgaccgtttaaaccgcgtggtaagtgagttgctggaactggttaagccaacgcatctggctttgcaggcggtggatctcaacactctgattaaccactcattacagctggtaagccaggatgcaaacagccgggagatccagttacgctttaccgccaacgacatgttgccggaaattcaggccgatccggacaggctgactcaggtcctgttgaatctctatctcaatgctattcaggcgattggtcagcatggcgtgattagcgtgacggccagcgaaagcggcgcaggcgtgaaaattagcgttactgatagcggtaagggaattgcggcggatcagcttgaagctatcttcaccccgtacttcaccaccaaagccgacggcaccgggttggggctagcggtcgtgcataatattgttgaacaacacggtggtacaattcaggtcgcaagccaggagggagaaggcgcaacgttcaccctctggcttccggtcaatattacgcgtaaggacccacaaggatga

SEQ ID NO: 262645 - DNA, 426 bp, Klebsiella pneumoniae
atgaaacggaacacgaaaattgccctggtgatgatggcgctttcagcaatggcgatgggatcgacatctgcatttgctcacggcggacacggtatgtggcagcaaaatgccgcgcctttgaccagcgaacaacagacagcgtggcagaaaatccataatgacttttacgctcaaagcagcgcactgcaacagcaactggtgacgaagcgttatgaatacaatgccctgttagccgcgaacccaccggatagcagcaaaattaacgcggtcgccaaagagatggagaatttgcgtcagtcgttagatgagttacgggtgaaacgggatattgcgatggctgaagcgggtattccgcgcggagccggaatgggcatgggctacggcggctgcggtggtggcggtcatatgggtatgggccactggtaa

SEQ ID NO: 262646 - DNA, 636 bp, Klebsiella pneumoniae
atgctggcaggcgctctgtttctcactgcctgtagtcacaactcttcacttcctccctttaccgccagtggatttgctgaagaccagggcgcggtacgcatctggcgaaaagacagcggcgataatgtgcatctgcttgccgtgtttagcccgtggcgcagtggcgataccaccacgcgagagtatcgctggcagggcgataaccttacgctcatcaatatcaatgtttacagcaaaccgccggtgaacattcgcgcgcgttttgacgatcgcggcgatctgagctttatgcaacgtgaatccgatggggaaaagcagcagctttctaacgaccaaatcgatttataccgttatcgtgctgatcagatccgccagattagcgatgctttacgtcaggggagagtcgtgctgcgccaggggcgctggcatgcgatggaacagaccgtgaccacctgcgaaggacaaaccattaaacctgatttagattcgcaggcgatagcgcatatcgagcgccgccagagccgctcttctgttgatgtcagcgtggcatggctggaagcgcccgaaggttcgcaattactgttagtggcaaactctgatttctgtcgctggcaacccaacgagaaaacgttctga

SEQ ID NO: 262647 - DNA, 273 bp, Klebsiella pneumoniae; identical to SEQ ID NO: 4387

SEQ ID NO: 262648 - DNA, 672 bp, Klebsiella pneumoniae
atggatctcgcgtcattacgcgctcaacaaattgaactggcttcttctgtgatccgcgaggatcgactcgataaagatccgccggatctgatcgccggagccgatgtcggatttgagcagggcggagaagtgacgcgagcggcgatggtgctgctgaaatacccctcgcttgagctggtggagtataaagtggcccgcatcgccaccaccatgccttacattccaggttttctttccttccgcgaatatcctgcgctgctggcagcgtgggagatgctgtcgcaaaagccggatttagtgtttgtcgatggtcacgggatctcgcatcctcgccgtcttggcgtcgccagccactttggtttgctggtggatgtgccgaccattggcgtggcgaaaaaacggctctgcggtaaattcgaaccgctctccagcgaaccgggcgcgctggccccgctgatggataaaggcgagcagctggcctgggtctggcgcagcaaagcgcgctgtaacccgttgtttatcgctaccggccatcgggtcagcgtagacagcgcgctggcgtgggtacaacgctgcatgaaaggctatcgtctgccggagccaacgcgctgggcggacgcggtggcctcggaacgtccggcgttcgtgcgctatacagcaaatcagccctaa

SEQ ID NO: 262649 - DNA, 477 bp, Klebsiella pneumoniae
atgcttaaccagctcgataacctgacggaacgcgtcagaggaagtaacaaactggttgatcgctggctacatgtacgtaagcatctgctcgtggcttactacaatctggttggcattaagcctggcaaagaatcgtacatgaggctaaacgaaaaagcccttgatgatttttgtcagagcctggtcgattacttgtctgccggacatttcagtatttatgagcgcattcttcataagctggaaggcaacgggcaactcgtgcgcgccgcgaagatttggccgcaactcgaagccaatacccaacagattatggattactacgattccagcctggaaaccgccatcgatcatgataattaccttgagtttcaacaggttttatctgacatcggcgaggcgctggaagcgcgctttgtgctggaagataagctgattctgctggtgcttgacgccgcccgcgtcaaacatcctgcttga

SEQ ID NO: 262650 - DNA, 1896 bp, Klebsiella pneumoniae
atgtctgcaacaaaactgacccgccgcgaacaacgcgcccaggcccaacattttatcgacaccctggaaggcaccgcctttcccaactcaaaacgcatttatatcactggcacacaacccggcgtgcgcgtgccgatgcgtgagatccagcttagcccgacgctaattggcggtagcaaagaacagccgcagtttgaagaaaacgaagcgattccggtctacgacacctccggcccgtatggtgatccgcagatcgccattaacgtgcagcaaggactggcaaaactacgccagccgtggatcgatgcgcgcggcgataccgaagaacttaccgtgcgcagttccgattacactaaagcgcgactggcagatgatggcctcgacgagctacgttttagcggcttattagcgccaaaacgcgccaaagcaggacgccgcgtcacccaactgcactacgcccgccagggcatcatcacaccggaaatggaattcatcgccatccgcgagaatatgggccgcgagcgcatacgtagcgaagttttacgccaccagcatccgggaatgagctttggcgcacgtctgccggaaaatatcactgcggaatttgtccgtgatgaagttgctgccggacgcgcgattatcccggccaacattaatcatccggaatcggagccgatgattattggtcgcaatttcctggtaaaagttaacgccaatatcggcaactcggcggtcacctcttccatcgaagaagaagtggaaaagctggtatggtccacgcgctggggagcggatacggtgatggatctctccaccggtcgctatattcacgaaacccgcgagtggattttgcgtaacagcccggtgccgatcggtacagtgccgatctaccaggcgctggagaaggttaacgggatcgccgaagatcttacctgggaagcgttccgcgacacgctgctggaacaggccgagcaaggtgtggattacttcactatccatgcgggcgtactgctgcgctatgtgccgatgaccgcgaaacgcctgactggtatcgtctctcgcggcggttcgattatggcgaaatggtgcctctcccatcatcaggaaaatttcctctatcaacacttccgcgaaatttgtgaaatctgtgccgcttatgacgtttcgctgtcgctgggcgacggtctgcgccccggttctgttcaggacgccaacgatgaagcgcaatttgccgagctgcatacgctgggtgaactgaccaaaatcgcctgggaatatgacgtacaggtgatgattgaaggcccaggccacgtgccgatgcagatgatccgccgcaatatgaccgaggagttagagcactgccacgaagcgccgttttacactctggggccgctaactaccgatatcgcgccgggttatgaccacttcacgtcggggattggtgcggcgatgattggctggtttggctgcgcgatgctctgttacgtaacgccaaaagagcatctgggtctgcctaataaagaagatgttaagcaggggcttatcacctataagattgccgcgcacgccgctgacctggcgaaagggcatccgggcgcgcaaattcgcgataacgccatgtcgaaagcccgcttcgaatttcgctgggaagaccagtttaatctggccctcgacccgtttactgcccgcgcttatcacgatgaaaccctgccgcaagagtccggtaaagtcgcccatttttgctccatgtgtgggccgaaattctgctcgatgaaaatcagccaggaagtgcgtgattacgccgccgcgcaaaccattgaagtgggaatggcggatatgtcggagaacttccgcgccagaggcggagaaatctacctgcgtaaggaggaagcgtga

SEQ ID NO: 262651 - DNA, 636 bp, Klebsiella pneumoniae
atgtatcagcctgattttcctcctgtaccttttcgtttaggactgtacccggtggtggacagcgcacagtggatcgaacgtctgttggatgcaggcgtgcgtactctccagctacgcatcaaagatcggcgcgatgaagaggtggaagccgatgtcgtggcggcaattacgctgggccgccgctataacgcgcgattgtttatcaacgattactggcggctggcgatcaagcatcaggcgtatggcgtccatctggggcaggaagatttgcaagccaccgatctcagcgccatccgcgcggcaggtctgcgactgggcgtttcgacccatgacgatatggagatcgacgtcgcgctggcagcacgcccctcttatatcgcgctgggacatgtgttcccgacgcaaaccaaacagatgccttctgcaccgcaggggctggaacagctggcacggcatgttgagcgcctggcggattatcccaccgtggcgattggcggtatcagtctggcgcgcgcgcctgcggtaatggcgacgggtgtcggcagtatcgccgttgtcagcgccattactcaagccgcagactggcgtttggcaacggcacagttgctggaaattgcaggagttggcgatgaatga

SEQ ID NO: 262652 - DNA, 756 bp, Klebsiella pneumoniae
atgaatgaccgtgactttatgcgttatagccgccaaatcctgctcgacgatatcgctcttgacgggcagcaaaaactgctcgacagccaggtgctgattattggtcttggcgggctgggtacacctgctgcgctatacctggcgggcgctggcgtcgggacgctggtactggcagatgacgacgatgtgcatttaagcaatctgcaacgacaaatcctctttaccactgaagatatcgatcgcccgaaatcgcaggtcagccatcagcgactgacacagttgaatcccgatattcaactgacagcattacaacaacggttaacgggtgaggcgttaaaagatgcggtagcacgggccgatgtggtgctcgactgtaccgacaatatggcgactcgtcaggagattaataccgcctgcgtggcactcaacacgccgcttatcaccgccagcgcggccggatttggcggtcagttgatggtactgacgccgccctgggagcaggggtgttaccgctgcctgtggccagatacccaggatccagaacgcaactgccgcacggcgggcgtggttggcccggtggtcggggttatgggcactttgcaggcactggaagccattaagttgttaagcggtatagagacgcctgcgggagaactccgactgttcgacggtaagtctagccagtggcgcagcctggcgctgcgccgcgctacaggttgcccggtatgcggaggaagcaatgcagatcctgtttaa

SEQ ID NO: 262653 - DNA, 201 bp, Klebsiella pneumoniae
atgcagatcctgtttaacgatcaaccgatgcagtgcgccgccgggcaaacggttcacgaactactggagcaactcgaccaacgacaagcgggcgcggctctggcgattaatcagcaaatcgtcccgcgtgagcagtgggcgcaacatatcgtgcaggatggcgaccagatcctgctttttcaggttattgcagggggttga

SEQ ID NO: 262654 - DNA, 771 bp, Klebsiella pneumoniae
atgttacgtattgcggacaaaacgtttgattcacatctgtttaccggcaccgggaaattcgcctcatcacaactgatggtggagtctattcgcgcttccggcagccaactggtgacgctggcgatgaaacgtgtcgacttgcgccagcacaacgacgctatcctcgaaccgcttatcgcggcgggtgtgaccctgctaccgaatacatccggggcgaaaacagcggaagaagccattttcgccgcccatctggcacgtgaagcattaggcacaaactggctaaaattagagattcaccctgacgcccgctggctgttgcccgatcccatcgaaaccctgaaagccgccgaaacgctggtacaacagggatttgtcgtgctgccttactgcggggccgatccggtattgtgtaaacgtctggaagaagtcggctgtgcagcggtgatgccgctcggcgcgccgattggctcgaatcagggactggaaacccgtgccatgctggagattattatccagcaagccacggttccggtggttgtcgacgctggcatcggcgttcccagccatgccgcgcaggcgctggaaatgggggccgacgcggtgttagtgaatacggcgattgccatcgcggacgatcccgtcaacatggcgaaggcatttcgtctggcagtagaagcaggcctgctggcacgtcagtccggaccgggcagccgcagtcattttgctcatgccaccagcccgctgaccggatttctggaggcatcggcatga

SEQ ID NO: 262655 - DNA, 1134 bp, Klebsiella pneumoniae
atgaaaaccttcagcgatcgctggcgacaactggactgggacgacatccgcctgcgtatcaacagcaaaacggctgctgacgtagagcgggcgctaaatgcctcgcaactcacccgcgacgatatgatggcgctgttatcgccagccgccagtggctatctggaaccactggcccaacgggcgcagcgtctgacccgtcaacgatttggcaacactgttagcttctacgtcccgctttatctttccaatctttgcgctaacgactgcacgtactgcggattctctatgagcaaccgcatcaagcgcaaaacgctggatgaagcggatattgccagggaaagcgccgctatacgggagatgggctttgaacatctgcttttagtcactggtgaacatcaggcgaaagtggggatggattactttcgtcgtcatctccctgccctgcgtgaacagttctcttcactacagatggaagtacagccgctggcggagacggaatacgccgagttaaagcaacttggtctggatggcgtgatggtttatcaggagacatatcacgaggcgacttatgcccgccaccatctgaaaggcaaaaaacaggacttcttctggcggctggaaacgccggatcggctgggccgtgcggggattgataagataggcctcggcgcgctaattggcctttccgacagctggcgcgttgactgctatatggttgcagaacatttgctatggctgcaacagcattactggcaaagccgctactctgtctccttcccacgcctgcgtccatgtactggcggcattgagcctgcgtcgattatggatgaacgccagttagtgcaaaccatctgcgccttccggctgcttgcaccggagattgaactgtcactctccacgcgggaatcaccgtggtttcgcgatcgcgtgattccgctggcaattaataacgtcagcgctttctcgaaaacgcagccaggtggctatgccgacaatcaccccgagctggaacagttctcaccacacgacgatcgcagaccggaagcggttgctgccgcgttaaccgctcagggtttgcagccggtatggaaagactgggacagctatctgggacgcgcctcgcaaaggccatga

SEQ ID NO: 262656 - DNA, 540 bp, Klebsiella pneumoniae; identical to SEQ ID NO: 9752

SEQ ID NO: 262657 - DNA, 975 bp, Klebsiella pneumoniae
atgcaggcgttacttttagaacagcaggacggcaaaactctcgcatcggtacagactctggacgaaagttgcctgccggagggcgatgtcacggttgatgttcactggtcgagcctgaactacaaagatgcgctggcgattaccggtaagggaaaaatcatccgtaattttccgatgattcctgggatcgattttgccggaactgtacgcaccagcgaagatccgcgttttcatgccggtcaggaggtgttactcactggctggggcgttggtgaaaaccactggggggggctggcggaacaggcgcgagtgaaaggtgactggctggttgccatgccgcaagggctggacgcgcgtaaagcaatgattatcggtactgccggttttaccgccatgctgtgtgtgatggcgctggaagatgccggtgttcgcccgcaggatggggagattgtcgtgacgggtgccagtggtggcgtcggcagtaccgccgtggcgctgctgcataagttgggttatcaggtcgttgccgtttctggtcgcgaaagcacccatgaatatctgaaaagtttaggagccagccgtattctccctcgcgatgagtttgccgaatcccgtcctctggaaaaacaagtctgggctggggcaattgacaccgttggcgacaaagtgctggcaaaagtgctggcgcaaatgaattacggcggctgcgtggcggcctgtggtctggcgggtggttttactctgccaaccacggtcatgccatttattctgcgtaatgtccgtttacagggggtggattcagtgatgactccaccagaacgccgcgcacaagcctggcagcgactggtcgccgatttaccggaatcattctatacccaggcggcaaaagagatatctctggcagaggcaccgaaatttgccggggccatcattaataaccagatccagggtcgcacgctggtgaaggttaactaa

SEQ ID NO: 262658 - DNA, 1941 bp, Klebsiella pneumoniae
atgagattaacgacgaaattttcggcctttgttacgctgctcaccgggttaacaatttttgtgactttgctgggctgttcgctaagtttctacaacgccattcagtataagtttagtcatcgcgttcaggcggtggcgacggcgattgatacccatcttgtgtcgaatgacttcagcgcattaaggccacaaattaccgaattaatgatgtcggcagatatcgttcgtgtagacctgctgcatggtgataaacaggtttataccctcgccagaaatggtagttatcgtccggttggcaccagcgatctgtttcgcgaactgagcgttccgttgataaagcatccggggatgtcgctgcgtctggtttatcaggatccgatgggcaactatttccattcgttgatgaccaccgcgccgctcacgggggcgattggctttatcattcttatgctcttcctggcggtacgctggttacaacggcaacttgccgggcaagaattgctggaaacccgggctactcgtatcttaaacggtgagcgtggctctaatgtgttgggaaccatctatgaatggccgcccagaaccagcagtgcgctggatacgctgcttcgtgaaattcagaacgcacgtgaacaacacagccgtcttgatacgctgatccgctcttatgccgcccaggacatgaaaaccggcctcaataaccgactcttcttcgataatcagttagcaacgttactggaagatcaggagaaagtaggtacccacgggatcgtgatgatgattcgtctgccggatttcaatatgttgagtgatacctgggggcacagccaggttgaagaacagttcttctctctgacgaatctgctgtcgacatttatgatgcgctaccctggcgcactgctggcgcgttaccaccgcagtgattttgctgcgctgttgccgcaccggacgttaaaagaggctgagagcatagccagtcagttaatcaaagccgtcgataccttgccgaataataaaatgctcgatcgcgacgatatgatccacattggtatctgtgcctggcgtagtggtcaggataccgagcaggtaatggaacatgcagagtctgccacgcgtaatgcgggattgcagggcggcaatagctgggctatttacgatgactcgttgcctgaaaaaggacgcggtaatgttcgctggcgtacgcttatcgagcaaatgctgagtcgcggcggcccgcgcctttatcaaaaaccggcggttactcgcgaaggtcaggttcatcatcgcgaactcatgtgccgcatcttcgatggtaatgaagaggttagctcggcggagtatatgccgatggtcttgcagtttggcttatcggaagagtatgaccgtctgcaaatcagccgtcttattccactattacgttactggccggaggaaaatctggcgattcaggttaccgttgagtcgctgattcgcccgcgttttcagcgttggctgcgcgatacgttaatgcaatgtgaaaaatcacaacgaaaacgcataattattgaacttgcagaggccgatgtaggtcaacatatcagtcgtttacaacctgttattcgtttagtgaatgctttaggggtacgggtagccgtcaaccaggctggtttgacgctggttagcaccagttggatcaaagaacttaatgttgagttactcaagctccatccggggctggtcagaaacattgagaagcgaacggagaaccagctgctggttcaaagcctggtggaagcctgctccgggaccagcacccaggtttacgccaccggcgtgcgttcgcgaagcgagtggcagaccctgattcagcgcggtgttacaggtgggcaaggggattttttcgcgtcctcacagccacttgatactaacgtgaaaaaatattcacaaagatactcggtttaa

SEQ ID NO: 262659 - DNA, 594 bp, Klebsiella pneumoniae
atgacttctctgtatttagcttccggttctccgcgtcgtcaggagttacttgcgcaacttggcgtaacctttgaacgtattgttacgggcattgaggagcagcgtcagccgcaggagagcgcgcagcagtatgttgtgcgtctggcgcgcgagaaagcacaggcgggtgtcgcgcaaacggcgcaggatctcccggtgctgggtgcggatactatcgttatcctgaacggagaagtgctggagaaaccgcgcgacgcagagcatgcggtgcagatgttgcgcaaattatcgggccagacccatcaggtaatgacggcagtggcgttggccgacagccagcacattctcgattgcctggtggtcaccgatgtgactttcagaacgttaacagacgaagacatcgcgggctatgtcgccagcggtgaaccgttagataaagcaggtgcatacggtattcaggggctgggtggctgttttgtcaggaagataaatggcagctatcacgccgtagtcggcttaccgctggttgaaacgtatgaattattaagtaattttaacgcactgcgtgagaaaagggataaacatgacggctga

SEQ ID NO: 262660 - DNA, 3801 bp, Klebsiella pneumoniae
gtgaggcgattgccggggatattactgcttactggagccgcgctcgttgtgatcgctgccctgctggttagcggcctgcgtattgctttaccgcatcttgatgcctggcgtccggaaatcctcaacaaaatagaatccgcgactggcatgccggtagaagccagtcagctctcagccagctggcagaattttggcccgacgcttgaagcacacgacatccgtgcagaactaaaggatggcggcgaattttcggttaaacgcgttactcttgcgctagatgtctggcagagcctgttacatatgcgctggcagtttcgcgacctcactttctggcagctgcgctttcgcaccaacactcctatcaccagcggcggtggtaatgatagcctggaagccagtcacatcagcgatctgtttcttcgtcagttcgaccattttgatctccgcgacagtgaagtcagtttcctgacgccatccggtcagcgcgccgagctggcgatcccacaactcacctggctgaacgatccacgtcgacaccgtgcagaaggcctggtaagcctctccagccttaccggacagcacggcgtgatgcaggtgcgcatggatttgcgcgatgatgaggggttgttaagcaatggtcgcgtctggctccaggcggatgacatcgacctgaagccgtggctcggtaaatggatgcaggacaatattgcgctggaaacggcacagttctcccttgaaggctggatgacgatcgacaaaggcgatgtaaccggcggtgacgtctggctgaaacagggcggtgccagctggttgggcgagaagcaaacgcatacgctgtcggtggataatctgaccgcgcatattacgcgtgaaaatccaggctggcagttctctattcccgatacacggatcacgatggacggcaaaccctggccgagcggagcattgacgctggcctggataccggaacaggacgttggcggcaaagacaataaacgcagtgacgaactccggattcgcgccagtaatctggagctggcaggcctggagggcatacgcccgctggccgcgaaactttcacctgcactgggtgatgtttggcgctccacacaaccgagcggcaagattaacactctggcgctggatatcccgcttcaggcggcagacaagacccgttttcaggcatcgtggagcgatctggcctggaatcaatggaaattattaccgggtacggaacacttctccgggacgctttccggcagcgtagaaaatggtttgcttaccgcgtcgatgaagcaggcaaagatgccttacgaaacggtattccgtgcgccactggaaatcgccgacggccaggcaacgataagctggctgaacaatgacaaaggtttccagctggatgggcgtaatattgacgttaaagccaaagccgtccatgcgcgcggcggttttcgttacctgcaacctgctaacgatgaaccctggctgggtattctggctggcatcagtaccgatgatggttcacaagcctggcgctatttcccggaaaacttgatgggtaaagacctggttgattacttaagtggcgcgattcagggcggtgtagcggataacgcgacgctggtttatggtggcaatccgcaactcttcccctataaacacaacgaaggtcagtttgaagtgctggtgccgctgcgcaacgcgaagtttgccttccagccggactggcctgcattaactaaccttgatattgaactggactttattaacgacggtttatggatgaaaaccgatggcgttaatctgggcggcgtgcgcgcgagtaatctcaccgcagtgatccctgactactcgaaagaaaaactgctgattgacgctgacattaaaggtccgggtaaagccgtcggcccttactttgatgagacaccgctgaaagattctctgggtgcaaccctgcaagaactccagctcgacggcgatgtgaatgctcgcttacatctcgatattccgctgaacggcgaactggtaaccgcgaaaggtgaagtgacgctgcgtaataacagtctgtttatcaaaccactcgacagcaccctgaaaaatttgagcggtaaattcagctttatcaatggcgatttgcaaagtgaaccactgacagcaagctggtttaatcagccgttgaacgtggatttttccaccaaagaaggggcaaaagcctaccaggttgcggtgaatctcaacggtaactggcaaccagcgaaaaccggcgttctgcctgcagcggtgaacgaagcattaagtggcagcgtggcgtgggatggtaaagcgggcattgatctgccttatcatgctggcgcgacctataacgtagagctgaacggcgacctgaagaatgtgagcagtcacttaccttcaccgttagccaaacctgcgggtgaaccactagcggtaaacgttaaggttgatggcaatctcaacagctttgaattaaccggacaggcaggtgcggataaccatttcaatagccgctggttgctcggtcaaaagttgacgctcgatcgtgctatttgggcggcagacagtaaaacgctcccgccgttgccggaacaaagtggcgttgaactcaatatgccgccgatgaatggtgccgagtggctggccctgttccagaaaggcgcggcggagagtgtcggtggtgcagcgagtttcccacaacacataacgttacgtacgcctatgttgtcgctgggaaatcagcaatggaataacctgagtattgtttcgcaaccgacggcaaatggcacccaggttgaggcgcaagggcgtgaaatcaacgccacgctggcgatgcgtaataacgcgccgtggctggcgaatatcaaatatctttattacaacccgagcgtggcgaaaactcgtggtgattcaacacagtcatcacctttcccgacaacggagcgcattaacttccgtggctggccggacgcccaaatacgatgcgcagagtgctggttctgggggcaaaaattcgggcgcattgacagtgatatcaccatttctggcaatacattaacgctgactaatggactgattgatactggtttttcgcggctcactgccgatggtgaatgggttaacaatccgggaaatgaacgcacctcgctgaaaggaaaactgcgtgggcagaaaattgatgccgccgcagaattttttggtgtcacgacgcccatacgccagtcgtcatttaatgtggattacgatttacactggcgcaaagcaccctggcaaccagatgaggcgacgttgaatggcatcattcatactcaactgggcaaaggcgaaattaccgaaatcaataccggacatgccgggcaattgctgcgcttattgagcgttgatgccctgatgcgtaagctgcgttttgatttcagagacacctttggtgaagggttctattttgactccattcgcagcaccgcgtggattaaagacggcgttatgcacaccgacgacacgctggtggatggcctggaagcggacattgccatgaaagggtcggtaaatctggtgcgtcgcgacctgaatatggaagcggttgtcgcaccagagatttctgcgacggtgggcgtggctgcggcttttgcggttaaccccattgttggcgcggcagtgtttgcagccagtaaagtgctggggccgctgtggagcaaagtctccattttgcgctatcacatttcgggtccgctggacgatccgcaaatcaacgaagtgttgcgccaaccgcgtaaagaaaaagcgcaatga

SEQ ID NO: 262661 - DNA, 930 bp, Klebsiella pneumoniae
atggaacgactaaaacgcatgtcggtgtttgccaaagtagttgaatttggctcttttaccgccgccgccagacagctacagatgagcgtttcgtccatcagtcagacggtgtcaaaactggaagatgagttgcaggtaaagctgttaaaccgtagcacacgcagcattggcctgaccgaagccggtagaatttactaccagggctgccgtcggatgctccatgaagtgcaggatgttcatgagcaactgtatgccttcaataacacccccatcgggacgctgcgcattggctgttcttcaactatggcacaaaatgttctcgccgggctgacagcaaaaatgctgaaagaatacccaggtttgagcgtcaatctggttaccggaattcctgcccccgacctgattgccgacggtctggatgtggtgatccgcgtcggcgcgttgcaggattccagcctgttttcccgccgtctgggcgcgatgccaatggtggtgtgcgccgcgaaaagctatctcacacaatacggcataccggaaaaacccgccgatttaagtagtcattcatggcttgaatacagcgtgcgacccgacaatgaatttgaactgatcgcaccggaagggatctcgactcgcctgatcccgcaagggagatttgtgactaatgatccgatgacgctggtgcgctggctgactgcaggcgctgggatcgcctatgtgccgctgatgtgggtgatcaacgagatcaatcgcggggagctggagatcctgctgccgcgttaccagtcagatccacgcccggtttatgcgttgtataccgaaaaagataagctgccgctgaaggtacaggtcgtgatcaactcactgacggattattttgttgaggtcggtaaattgtttcaggaaatgcacgggcgcgggaaagagaagtaa

SEQ ID NO: 262662 - DNA, 933 bp, Klebsiella pneumoniae
gtgaaaacactaataagaaaattctcccgtacggccatcacggtcgtattagtcattctggccttcatcgcaatttttaatgcctgggtctattacaccgaatccccgtggacgcgtgacgcgcgctttagcgctgacgtcgttgcgatcgcgccggacgtttctggacttatcacccaggtgaatgttcatgataaccagctggtgaaaaaaggacaggtactgttcaccatcgaccagccgcgctatcaaaaggcgcttgaggaagcgcaagccgatgttgcttattatcaggtactggcacaggagaaacgccaggaggcaggacgtcgtaaccgtctcggtgtgcaggcgatgtcccgcgaagagatcgaccaggccaacaacgtactacaaacagttctgcatcagttagcgaaagcgcaggcgacccgcgatctggcaaaactggatcttgaacgcacggtgatccgcgcgccagcagatggctgggtgaccaacctcaacgtctataccggtgagtttattacccgtggatcaacggcggttgcgctggtgaaacagaactccttctatgtactggcctatatggaagaaactaagctggaaggggtgcgccctgggtatcgtgcagagatcacgccgcttggcagtaacaaagtgctaaaagggactgttgatagtgttgccgcaggggtcaccaacgccagcagcacgcgtgacgacaaagggatggcgaccatcgactctaaccttgaatgggtgcgtttggcgcaacgtgttccggttcgtattcgtctcgacaaccagcaagagaacatctggcctgcgggcaccactgctacagtggtggtcactggcaaacaagatcgcgacgaaagccaggattcgttcttccgtaaaatggcccatcgcctgcgtgagtttggttaa

SEQ ID NO: 262663 - DNA, 1968 bp, Klebsiella pneumoniae
atgggtattttctccattgctaaccaacatattcgctttgcggtaaaactggcgaccgccattgtactggcgctgtttgttggctttcacttccagctggaaacgccacgctgggcagtactgacagcggcgattgttgccgccggtccggcctttgctgcgggaggtgaaccgtattctggcgctattcgctatcgtggctttttgcgcatcatcggcacatttattggctgtattgccggactggtgatcattattgcgatgatccgtgcaccattattgatgattctggtgtgctgtatctgggccggtttttgtacctggatatcctcgctggtacgaatagaaaactcgtatgcgtgggggctggccggttataccgcgctgatcattgtgatcaccattcagccggaaccattgcttacgccgcagtttgccgtcgaacgttgtagcgagatcgttatcggtattgtgtgtgccattatggcggatttgctcttttctccgcgatcgatcaaacaagaagtggatcgagagctggaaagtttgctggtcgcgcaatatcaattaatgcaactctgtatcaagcatggcgatggtgaagttgtcgataaagcctggggcgatctggtgcgacgcaccacggcgttacaaggtatgcgcagcaacctgaatatggaatcttcccgctgggcgcgggccaatcgacgtttaaaagcgattaatacgctatcgctgacgctgattacacaatcctgcgaaacttatcttattcagaatacgcgcccggaattgatcactgatactttccgcgaattttttgacacgccggtagaaaccgcgcaggacgtccacaagcagctcaaacgcctgcggagagttatcgcctggactggggaacgggaaacgcctgtcaccatttatagctgggtcgcggcggcaacgcgttatcagcttctcaagcgcggcgttatcagtaacacaaaaatcaacgccaccgaagaagagatcctgcaaggcgaaccggaagtcaaagtagagtcagccgaacgtcatcatgcgatggttaacttctggcgaaccacactttcctgcattctggggacgcttttctggctgtggacgggctggacttccggcagtggtgcaatggtgatgattgcggtagtgacgtcactggcaatgcgtttgccgaatccacgcatggtggcgatcgactttatctacgggacgctggcagcgctgccgttagggctgctctactttttggtgattatccctaatactcaacagagcatgttgctgctgtgtattagcctggcagtgctgggattcttcctcggtatagaagtacagaaacggcgactgggctcgatgggggcgctggccagcaccataaatattatcgtgctggataacccgatgactttccatttcagtcagtttctcgacagcgcattagggcaaatcgtcggctgtgtgctcgcgttcaccgttattttgctggtgcgggataaatcgcgcgacaggactggacgtgtactgcttaatcagttcgtttctgctgctgtttccgcgatgactaccaatgtggcacgtcgtaaagagaaccacctcccggcactttatcagcagctgtttttgctgatgaataagttcccaggggatttgccgaaatttcgcctggcgctgacgatgattatcgcgcaccagcgcctgcgtgatgcgccgatcccggttaacgaggatttatcggcgtttcaccgacaaatgcgccgcacagcagaccatgtgatatctgcccgtagcgatgataaacgtcgtcggtactttggccagttgctggaagaacttgaaatctatcaggaaaagctacgcatctggcaagcgccaccgcaggtgacggaaccggttcatcggctggcggggatgctccataagtatcaacatgcgttgaccgatagttaa

SEQ ID NO: 262664 - DNA, 273 bp, Klebsiella pneumoniae
atgaatatttatacctttgattttgatgagattgagagtcaggaggatttttatcgcgacttcagccaagcctttggtctggcgaaagataaggtacgcgatctcgactcactatgggatgtgttaatgaacgatgtcctgccgctaccacttgagattgaatttgttcatctgggagagaaaacgcgtcgccgttttggcgcgttaatattgctgtttgatgaggcagaggaagagctggaagggcatttgcgttttaatgttcgtcattag

SEQ ID NO: 262665 - DNA, 264 bp, Klebsiella pneumoniae
atgaaaatcaaaaccactgttgctgcattaagcgtactttctgttctctctttcggtgcattcgctgccgactccattgatgctgcacaagcacaaaatcgtgaagcaatcgggaccgtatccgtaagtggtgtggcgtcttcgccaatggatatgcgtgaaatgctgaacaaaaaagcggaagagaaaggcgcaacggcctaccagattactgaagctcgtagcggtgacacctggcacgctacggctgaactgtacaaataa

SEQ ID NO: 262666 - DNA, 2664 bp, Klebsiella pneumoniae
atgaaactgaaaaaactccccgggtttagtttaggacttattgctttggcggtgggtaatgcatatgcaacacaattgttggatgattatagtatactttcctatataactgatgaagaatcgccgattgaaatcaaagataataattcgataagtaatggagagtatctaaccactaaagacgaaagccatgctgtgaaagtggatgacggtgtaactggatatataaataatgccagtgtgatgactagtggtgatggatcttatggtatttctgttgatagtcataacaaagtattatatataagcgatagcgatattaagacctctggaagcgtatctgacaaaggaaataaccaagatgttaatggagggataacagccagcgcagtagtcagtgaatttggtggcaccatcgttatgaatggtgataattcagtcgagacgaggggggcatattcagcgggacttttaagtcaggttaatgattctgggattgtggaaaataacacccgtcttgaaaccacagataaaacgaacattgttacctatggggaaaatgcagtaggtgttcttgcatgttcaagtcctggagagtctcgaacatgtgtcgatgctgtagatgatgaagttagtgattctaacagttacgaagttattagccgtgctgatttaaaaatgaatggtggttccataacaactaatggcactaatagctatggtgcttatgctaatggggaaaaagcatatattaatttagattatgtggcacttgaaaccggggagcatggaagttatgcagttgctattcgacaaggtaacattgatataaaaaatagttctattacaacaaaaggcactaaagcccccattgcaaaaatatacaatggtggagagttatttttttccaatgtcaccgcggtatcagaacaagataaaggaatatcaattgatgcatcaaatatcgattctcaagccaaaatagcactatcaagtgtcgaactttcaagtgctttggatagtattgatgttaacaaaactacaacggatgtaagcatccttaatcgaagtattatcacgcctggtaataatattctggttaataatactggaggtggcttaaacataatttcgtccgactctactctaaatggagcgactaaactcgttagcggcacaactacactgaagctttcagaaaacacaatctggaatatgaaagatgactccgttgttatccatctgactaattcagacagtattatcaatctttcgtatgatgatggtcaaacatttacccagggaaaaacgttaaccgtaaaaggtaattatgtcggtaataatggtcagcttaatatccgcaccgtattaggtgatgataaatcggctactgacagacttattgttgagggtaatacttcggggtcaactaccgtctatgtgaaaaatgctggaggaagcggcgcggccacgctaaatgggatcgaactcataactgtgaatggcgatgaatctccagcagatgccttcagacaaggtgatgcaaggattgcagctggagctttcgaatatcaactaaaacaacaaggcaaaaactggtatttgacaagttatcagtcagtgaatgaggaggataacagctcagagggaaattcagaatcaacagaaacgcctacccccgtcctgcgccccgaagctggaagttacgtcgccaacctggcagccgctaacactctttttgttatgcgtctgaacgatcgtgcaggtgaaacgcgttacatcgatcctgtaactgaacaggagcgttcaagccggctttggctacgtcaagttggcgggcataatgcctggcgtgacagcaacggacagttgagaacgacctcgcatcgctacgtctcgcagttaggggccgatctgttaaccggtggttttaccgacagtgacagttggcgtttgggagtgatggctggttatgcccgcgactacaactcaactcattccagcgtgtcggattatcgttcgaaagggagtgtcagaggctatagcgcagggctgtatgccacctggtttgccgatgacatcagtaaaaaaggcgcatacattgacgcctgggcgcaatatagctggtttaaaaactcggtgaaaggggatgagttagcctatgaatcctatagcgcgaaaggtgcaaccgtctcgctggaagcgggttacggttttgccctgaataaatcctttggtctggaagcggcgaaatatacgtggatcttccagccacaggcacaggctatctggatgggcgtcgatcataatgcgcacacggaagccaatggctcacgtattgagaatgacgcaaataacaacatccagacccgactcggcttccgcacctttattcgtactcaggagaaaaacagcggtccgcacggtgacgactttgaaccttttgttgaaatgaactggatccataacagtaaagattttgctgtctcaatgaacggtgtgaaagttgaacaagacggggcgcgtaatctgggggaaattaaacttggcgtaaatggcaatctgaattcggcggccagcgtctggggtaatgtgggcgtgcagctgggtgataatggctacaatgacaccgcaatgatggtgggcctgaaatataagttctga

SEQ ID NO: 262667 - DNA, 330 bp, Klebsiella pneumoniae
atgaaaaaatttgctttactggcgggtctgtttgttttcgcaccaatgacctgggcgcaggactacaatattaaaaacggtttgccgtcagaaacctatattacttgcgcagaagccaacgaaatggcaaaaactgacagcgcacaggttgcagaaattgttgcggtaatgggtaatgccagcgttgccagccgtgatttaaaaattgagcaatctccggaactaagcgccaaagtggtagaaaaactgaatcaggtttgcgctaaagacccgcaaatgctgttgatcacggcaattgatgacactatgcgtgctatcggcaaaaaataa

SEQ ID NO: 262668 - DNA, 285 bp, Klebsiella pneumoniae
atggcggatatgaaccgcaccacgaaaggtgcattgctaggcgcaggcgttggtttacttactggcaatggtgttaatggcgtactgaaaggtgcagctgttggcgctggtgttggtgcagtaacagaaaaaggccgcgacggtaaaaatgcgcgtaaaggtgcaaaagtgggtgccgccgttggtgctgtcactggcgttctgaccggcaatggcctcgaaggggcgattaaaggtgccgtgattggcggtacgggtggtgcaattctgggtaaaatgaaataa

SEQ ID NO: 262669 - DNA, 3327 bp, Klebsiella pneumoniae
atgaacagaatcagtcgctattattttcaccgctcagtactttccttattgatagctgccatgatatatgccccgcctgggatgacggccttcacttctaatgttattggcgttgtaaatgatgagactgtagacggcagccaaagagtagatgaacgaggtgcaacaaataatgctcatatcatcaatcacggcaatcaggaggtatatggcgggatttctaatggaagtgttattgatactggtggacatcaagaggtatctggtcatggctcttatcaggggcaggctaataatacagtcattaacggtggcagccagacaattagtgagggaggaatttctacagggacgataattaacgataaaggaacaatgtcagttttaacgaatgctaaagctgatgcgacccgaatagataacggcggggccatggatgttgccgggaacgcgactaataccataattaatggcggtacacagaatatttataatcatggtattgctacgggaactaatatcaacagtggcacgcaaaatatcaagagcggcgggaaagctgacacaacaaatatctcttccgggagcaagcaggttgttgagaaaggaggtacggcaactggcagcaatattcgtgccggaggcacgctgattgtcgataccggcggtatcgcacatggggtttacctggacacggggagtgctttagttgccaacacgggcgcggggactgatattgatggataccagaggtcatctcacttcactattaccggaggcagggctgagcatgttgtgctggaaaataccggccaactgacggtcgtagctcaaacctcggcggtagataccatcgttgatgctggcggtaagctgattgtccacgaggaggccgtagcatataccaccagacttaacaatggcggcatactcgatgtgcgggagaaaggcagcgcaacggggatacagcagagtagtcagggcgcgttggttgcaaccaccagggcgacgcgggtcacagggacacgcgctgatggcgtcgcgttcagcatcgagcagggtgcggcgaacaatatcctgctgacaaatggcggcgtgttaaccgtggagtcagacaccacttccgccaaaacacaggtcaatgcgggcggtcgggagatcgtcaaaacaaaagccactgcgacaggcacgacgctcactggcggtgaacaaatcgtcgagggtgtggcaaatgagacaacaattaacgacggcggaatacaaacagtttcagctaacggagaggcaataaaaacaacgatcaatgaaggcggaacgctgacagtcaacgataatggcaaagcgacagatatcgtccagaacagcggtgccgctctccagacgagcacggctaacggtattgaaatcagcggtacgcaccagtacggcaccttttccattgccggaaatttagcgaccaatgtgctgctggaaaatggcggtaatttattggtattagcaggtaccgaagctcgcgattccacggttggcaacggtggggcaatgcaaaacctgggtcaggacttcgccacaaaggttaattccggtgggcaatatacccttggtcggtcaaaagatgagtttcaggctctggcccgggcagaagatctactgatcgctggcgggacggcaatcgtctacgcaggtacgctggcggatgcatcggtcagtggcgcgacaggaagcctgtcgttaatgacgccacgggataatgttacgccagttaaacttgaaggggtggtccggattaccgatagcgcgacattaactatcggaaatggcgtcgatacgacgcttgccgacctgacggctgccagtcggggcagtgtctggcttaacagcaataattcctgtgcaggcaccagcaactgcgaatatagagtaaacagtttactcctcaacgacggtgatgtttatttatcagcacaaacagcagcgcctgccacaactaacggtatctacaatacgctgaccaccagtgaactttccggcagcggtaatttctacctgcataccaacattgcaggctcccggggcgatcaactggtcgtcaacaacaacgccactggcaattttaaaatctttgttcaggataccggcgtcagccctcagtctgacgatgcgatgacgctggtgaaaacagggggaggggatgcgtcgtttacgctgggcaataccggtggtttcgttgatcttgggacctatgagtatgtcctgaaaagcgacggcaacagcaactggaacctgactaatgatgtcaaacccaacccggaccccaacccaaatccgaaaccggatccaaaaccagacccaaaaccggatccgaaaccagacccgactcccgatccaacgccgacacccgttccggagaaacgcatcacgccttctacagcagccgtactcaatatggcagcaacattaccgttggtctttgatgctgagctaaacagtattcgcgagcggttgaacataatgaaagcgagtccacacaacaataatgtctggggggcgacgtataacacccgtaataatgtcaccaccgatgcgggtgccgggtttgagcagacgctgaccggaatgacggtggggatcgatagccgtaatgatattccagaaggaattgccacgctgggcgcttttatgggttattcccattcacatatcggttttgatcgcggaggtcatggcagtgtgggcagttattctctgggcggctatgccagttgggaacatgaaagtggtttctatctggacggtatcgtgaagctgaaccgctttgaaagtaacgtagccggtaaaatgagcagcggtggagccgccaacggcagttatcgcagcaacgggctgggcggtcacattgaaaccgggatgcgatttaccgatggtaactggaacctgacgccgtatgcatcgttaacggggttcaccgctgataaccccgaatatcatttatccaatggtatggaatcgaaatcagtcgatacccgcagtatatatcgtgaactgggcgcaacgctgagttacaacatgcgtctggggaacggcatggaagttgagccgtggctgaaggcggctgtgcgcaaagaatttgtcgatgataaccgggtgaaagtgaataatgacggtaattttgtcaatgatttgtcgggcagacgtggaatatatcaggcaggtattaaagcctcattcagcagttcgttaagcgggcatctcggggtggggtatagccatggtgccggtgtggaatccccgtggaacgcggtggctggtgcgaactggtcgttctga

SEQ ID NO: 262670 - DNA, 696 bp, Klebsiella pneumoniae
atgtcaaacacgccaatcgagcttaaaggcagtagcttcactttatctgtggttcatctgcatgaggcagaacctaaggttatccatcaggcgctggaagacaaaatcgctcaggcccccgcatttttaaaacatgcccccgttgtactcaacgtcagtgcactggaagacccggtaaactggtcagcgatgcataaggcggtttcggcaaccggtttgcgggttattggcgtaagtggctgcaaagatgcgcaacttaaagccgaaattgaaaaaatggggctgcctatcctgacggaaggaaaggaaaaagcgccgcgtccagctcccgcaccgcaggctccagcgcaaaatacaacgccggtcacaaaaacgcgtttaatagataccccggtgcgttccggtcagcgtatttatgctccacaatgtgatctgattgttacaagccacgttagcgctggggccgaattgattgccgatgggaacattcatgtctatggcatgatgcgcggtcgtgcgctggcaggggcaagtggtgaccgggaaacgcaaatattttgtacgaacctgatggcggaattggtgtccatcgcaggtgaatactggctgagtgatcaaatcccagcagaattttatggcaaagcggcgcgactgcagttagtcgaaaacgctttgaccgttcaaccgttaaattga

SEQ ID NO: 262671 - DNA, 369 bp, Klebsiella pneumoniae
atgaatatgatgcgtattatttatatcggattgtcaggtgtggggatgatgttctcatcaatggcgtctggacatgacgctggcggacttcaatctcctgcgtgtggcgttgtttgcgacccgtatatttgtgttaactcagatggcatttccccagagttaacaaggaaatatctcggcgaaaaagccgctgaaaacttacaatcagtacaaggctacgatcccagcgaatttacattcgctaacggtgtattttgcgatgttaaagaaaaattatgtcgtgatgatcgttattttggtgtggatggtaagcggagtggaaaaatcaatcaaaccaccacaaagatgttatttatgtgtcgtgagtga

SEQ ID NO: 262672 - DNA, 402 bp, Klebsiella pneumoniae
atgaaaatcaagagcatcagtaaggctgtattattgcttgcactgctaacctccacgagctttgctgcgggtaagaatgtcaatgttgagttcagaaaaggccatagcagcgctcagtactccggcgaaataaagggatacgattacgatacatataccttttatgccaaaaaaggtcagaaagtgcatgtgagtatctctaatgaaggcgctgatacttacctcttcgggccaggaatcgatgattctgttgatttatccagatattccccagaactcgatagtcacggacaatactcactccctgcttctggcaaatatgagctgcgagtgctgcaaactcgaaacgacgcccgtaaaaacaaaactaaaaaatataacgtcgatattcaaattaagtaa

SEQ ID NO: 262673 - DNA, 294 bp, Klebsiella pneumoniae
atgttttgtgtgatttatcgaagcagcaagcgtgaccagacctatttatatgtcgaaaaaaaagacgatttttcgcgtgtacctgaggaactgatgaaaggttttggtcagcctcagttagcgatgattctgccgctggatgggcggaagaaactggtcaatgccgatattgaaaaggttaaacaggcattaaccgagcaaggttactatttgcagttaccgccaccacccgaagatttgctgaagcaacatctttccgtcatggggcagaaaacagacgacacgaacaaataa

SEQ ID NO: 262674 - DNA, 660 bp, Klebsiella pneumoniae
atgtatcaacatcacaactggcaaggtgcgctgctggattatccggtgagtaaagtagtctgtgttggcagtaactatgccaaacatattaaagagatgggcagcgcagtgcccgaagagccagtgctgtttattaaaccagaaacggcactgtgcgatctgcggcagccattggcgatcccatccgatttcggttcagttcatcatgaagtcgaactggcggtattgattggcgcgacgctgcgtcaggctacggaagagcatgtccgtaaagccattgccggttacggcgtggcgctcgatttgacattgcgtgatgttcagggaaaaatgaagaaagccgggcagccgtgggaaaaggccaaagcgtttgataactcttgtccgctttccgggtttattcccgcggcggaattcaccggcgatccgcaaaatacaacgctgggcctgagcgtaaacggcgaacaacgccagcaaggtacgactgcggacatgatccataaaatcgttccgctgatcgcttatatgagcaagttctttaccctcaaggccggtgacgttgtgctgacaggcacgcctgatggcgtcggcccgttgcaaagtggtgatgagctgacagtcactttcgatgggcattctttgacaactcgcgttttgtaa

SEQ ID NO: 262675 - DNA, 447 bp, Klebsiella pneumoniae
atgagcgatgtacctttctggcaaagtaaaaccctggacgaaatgagcgatgcggaatgggagtcgttgtgtgatggttgcggtcagtgttgcctgcataaactgatggatgaagacaccgacgaaatctacttcactaacgtcgcctgtcgccagctcaatattaaaacctgtcaatgtcggaactacgaacgtcgtttcgagtttgaacctgactgcattaaattaacccgtgaaaatctgccaacattcgaatggctgccaatgacctgcgcttatcgcttgctggcggaaggtaaagatttacctgcgtggcatccgctgcttactggttcgaaagcggcaatgcatggcgaacgtatctctgtgcgtcatatcgcagtgaaagaatcagaagtgattgactggcaggatcatatcttaaataaacctgactgggcgcagtga

SEQ ID NO: 262676 - DNA, 912 bp, Klebsiella pneumoniae
atgactgaaatcgttgcagataaaacggtagaggtagttaaaaacgcaatcgaaaccgcagatggagcattagacctttataataaatatctcgatcaggtcatcccctggcagaccttcgatgaaaccataaaagagttaagtcgctttaaacaggagtattcacaggcagcctccgttttagttggcgatattaaaaccttacttatggatagccaggataagtattttgaagcaacccaaacggtgtatgaatggtgtggtgttgcgacgcaattgctcgcagcgtatattttgctatttgatgagtacaatgagaagaaagcatccgcccagaaagacattctcattaaggtactggatgacggcatcacgaagctgaatgaagcgcaaaaatccctgctggtaagctcacaaagtttcaacaacgcttccgggaaactgctggcgttagatagccagttaaccaatgatttttcagaaaaaagcagctatttccagtcacaggtagataaaatcaggaaggaagcgtatgccggtgccgcagccggtgtcgtcgccggtccatttggattaatcatttcctattctattgctgcgggcgtagttgaagggaaactgatcccagaattgaagaacaagttaaaatctgtgcagagtttctttaccaccctgtctaacacggttaaacaagcgaataaagatatcgatgccgccaaattgaaattaaccaccgaaatagccgccatcggggagataaaaacggaaactgaaacaaccagattctacgttgattatgatgatttaatgctttctttgctaaaagaagcggccaaaaaaatgattaacacctgtaatgagtatcagaaaagacacggtaaaaagacactctttgaggtacctgaagtctga

SEQ ID NO: 262677 - DNA, 420 bp, Klebsiella pneumoniae; identical to SEQ ID NO: 28207

SEQ ID NO: 262678 - DNA, 1269 bp, Klebsiella pneumoniae
atgtttgccctctgtgatgtaaacgcgttttatgccagctgtgagacggtgtttcgccctgatttatggggtaaaccggtggttgtgctatcgaataatgacggttgcgttatcgcccgaaacgctgaggcaaaggcgttgggcgttaaaatgggcgatccctggttcaaacaaaaagatctgtttcgccgctgtggcgtggtttgctttagcagtaactatgagctttacgccgatatgagcaatcgggtgatgtcgacgctggaagaattatcgccccgcgtcgagatttacagtattgatgaggcattctgcgatctgaccggtgtgcgtaattgtcgcgatctgactgattttggccgagaaattcgcgcaacggtgctacaacgtacccatcttactgttggcgtggggatcgcccagaccaaaacgctggctaagcttgccaatcatgcggcaaaaaaatggcagcggcagacgggtggggtggtggatttatcaaatctggaacgccagcgtaaattaatgtctgctctccccgtggatgaagtctgggggattggacggcggatcagcaaaaaactggacgcgatggggatcaaaaccgttctcgatttggcgggtacagatatccggtttatccgtaaacattttaatgtcgtgctcgaaagaacggtgcgtgaactgcacggtgaaccctgtttgcaactggaagagtttgcaccgacgaagcaggaaattatctgttcccgttcgtttggtgaacgcatcacggattatacgtcgatgcggcaggccatttgtagttacgctgcccgggcggcggaaaaacttcgcagtgagcatcaatattgtcggtttatttccacgtttattaagacgtcaccatttgcgctcaatgaaccttattacggcaatagcgcgtcggtaaaactgctgacgcccactcaggacagcagggatatcattaacgccgctacgcgatctctggatgccatctggcaagcgggccatcgctaccaaaaagcgggcgtgatgctgggagatttcttcagtcagggagtcgcgcagctcaatttattcgatgacaacgcaccgccccccgggagtgagcaattgatggcggtaatggatactctgaatgctaaagagggcagaggaacactctattttgccgggcaggggatccaacaacaatggcagatgaagcgagctatgctttcaccacgttatacaacgcgaagttctgatttactgcgggtcaaataa

SEQ ID NO: 262679 - DNA, 531 bp, Klebsiella pneumoniae
atgttgcgatttttgaaccaatgttcacaaggccggggcgcgtggctgttgatggcgtttaccgctctggcactggaactgacggcactgtggttccagcatgtgatgttactgaaaccttgcgtgctctgtatttatgaacgctgcgcattattcggcgttctgggtgctgcgctgattggcgcgatcgccccgaaaactccgctgcgttatgtagcgatggttatctggttgtatagtgcgttccgcggtgtgcagttaacttacgagcacaccatgcttcagctctatccttcgccgtttgcgacctgtgattttatggttcgtttcccggaatggctgccgctggataaatgggtgccgcaagtgtttgtcgcctctggcgattgcgccgagcgtcagtgggattttttaggtctggaaatgccgcagtggttgctcggtatttttatcgcttacctgcttgtcgcggtgctggtggtgatttcccagccgtttaaagcgaaaaaacgtgacctgttcggtcgctaa

SEQ ID NO: 262680 - DNA, 1542 bp, Klebsiella pneumoniae
atggagatctcctggggccgcgcgttatggcgcaattttttgggccagtcccccgactggtacaaactcgccctcatcattttcttaatcgtaaatccgttaattttcctcatcagccctttcgtcgctggctggttgctggtagcggaatttattttcactctggcgatggccctgaaatgctacccgctactccccggtggcctgttggctatcgaagcggtattcatcggcatgaccagcgcggaacacgtccgtgaagaggtggcggcaaatcttgaagtcttgctgttactgatgtttatggtggcgggtatctattttatgaaacagctgttgctgttcatatttacccgtttgctgttaagcattcgctccaaaatgctgctgtcgctctctttttgcgtggcggcggcgttcctctccgcgttcctcgatgccttaaccgtcgtggcggtggtgatcagcgttgcagtcggtttttatgggatttatcaccgcgtagcctcttcccgtaccgaagataccgacctgcaagacgatagtcatatcgacaagcattacaaagtggttctggaacagttccgtggctttctgcgtagcctgatgatgcatgccggtgtcggcaccgcattaggcggcgtaatgaccatggtgggcgaaccacagaacctgatcatcgctaaagcggctggctggcattttggcgatttcttcctgcgcatgtcgccagtgaccgttccggttctgatttgtggcctgttaacctgcctgctggtagagaagctgcgttggtttggctatggtgaaacgctgccggagaaagtccgcgaagtactgcaacagtttgacgatcaaagccgccaccagcgtacccgtcaggataaaatccgtctgattgtccaggcgattattggcgtctggctggtgactgcgctggcgttgcatctggcggaagttggcttgattggtttgtcagtcattattctggcgacatcattgaccggtgtcaccgatgaacatgctatcggtaaagccttcaccgaatctctgccattcaccgcactgttgacggtgtttttctcggtagtcgcggtgattatcgaccaacaactgttttcgccgattattcagtttgtgttgcaggcatcggaacatgctcagctgtcgctgttctatattttcaacggtctgctgtcatccatttcggataacgtcttcgtggggacgatttatatcaacgaagcgaaagcggcaatggaaagtggcgctatcacgttgaagcaatacgagctgctggcggtcgccattaataccggtaccaatctgccctctgtcgctacgccgaacggtcaggctgcgttcctgttcctgctgacctctgcactcgcgccattgattcgcctctcttatggccgcatggtgtggatggccctgccttacaccctcgtcctgacactcgtcggactactttgcgtcgagtttacgcttgcccctgtaaccgaatggtttatgcaaatgggctggatagcaacgctttga

SEQ ID NO: 262681 - DNA, 720 bp, Klebsiella pneumoniae
atggtcattaaggcgcaaagcccggcgggtttcgcggaagagtacattattgaaagtatctggaataaccgcttccctcccgggactattttgcccgcagaacgtgaactttcagaattaattggcgtaacgcgtactacgttacgtgaagtgttacaacgtctggcacgagatggctggttgaccattcaacacggcaagccgacgaaggtgaataatttctgggaaacctccggtttaaatatccttgaaacactggcacgactggatcacgaaagtgtgccgcagcttattgataatttgctgtcggtgcgtaccaatatttcaacgatttttattcgcaccgcgtttcgtcagcatcctgataaagcgcaggaagtactggcaaccgctaatgaagtggccgatcacgccgatgcctttgccgagctggattacaacatattccgcggtctggcgtttgcttccggcaacccgatttacggtctgatccttaacgggatgaaagggctgtatacgcgcattggtcgtcactatttcgccaatccggaagcgcgcagtctggcgctgggtttctaccacaaactgtcggcattgtgcagtgaaggcgcacacgatcaggtatacgaaacagtgcgtcgctatgggcatgagagcggcgagatttggcaccggatgcagaaaaatctgccgggtgatttagccattcaggggcgataa

SEQ ID NO: 262682 - DNA, 1350 bp, Klebsiella pneumoniae
atgtctgaaattgttgtctccaaatttggcggtaccagcgtagctgattttgacgccatgaaccgcagcgctgatattgtgctttctgatgccaacgtgcgtttagtagtcctctcggcttctgctggtatcactaatctgctggtcgctttagcggaagggctggaacctggcgagcgattcgaaaaactcgacgctattcgcaacatccagtttgccattctggaacgtctgcgttacccgaacgttatccgtgaagagattgaacgtctgctggagaacattactgttctggcagaagcggcggcgctggcaacgtctccggcgctgacagatgagctggtcagccacggcgagctgatgtcgaccctgctgtttgtcgaaatcctgcgcgaacgcgatgttcaggcacagtggtttgatgtacgtaaagtgatgcgtaccaacgaccgatttggtcgtgcagagccagatgtagccgcgctggcggaactggccgcgctgcagctgctcccacgcctcaatgacggcttagtgatcacccagggatttatcggtagcgaaaataaaggtcgtacaacgacgcttggccgtggaggcagcgattatacggcagccttgctggcggaggctttacacgcatctcgtgttgatatctggaccgacgtcccgggcatctacaccaccgatccacgcgtagtttccgcagcaaaacgcattgatgaaatcgcgtttgccgaagcggcagagatggcaacttttggtgcaaaagtactgcatccggcaacgttgctacccgcagtacgcagcgatatcccggtctttgtcggctccagcaaagacccacgcgcaggtggtacgctggtgtgcaataaaactgaaaatccgccgctgttccgcgcgctggcgcttcgtcgcaatcagactctgctcactttgcacagcctgaatatgctgcattctcgcggcttcctcgcggaagttttcggcatcctcgcgcggcataatatttcggtagacttaatcaccacgtcagaagtgagcgtggcattaacccttgataccaccggttcaacctccactggcgatacgttgctgacgcaatctctgctgatggagctttccgcactgtgccgggtggaagtagaagaaggtctggcgctggtcgcgttgattggcaatgacctgtcaaaagcctgcggcgttggcaaagaggtattcggcgtactggaaccgttcaacattcgcatgatttgttacggcgcatccagccataacctgtgcttcctggtgcccggcgaagatgccgagcaggtggtgcaaaaactgcatagtaatttgtttgagtaa

SEQ ID NO: 262683 - DNA, 273 bp, Klebsiella pneumoniae
atggcactcccccgtattacccaaaaagagatgactgaacgcgagcagcgtgaacttaaaacactgctggatcgggcgcggattgcgcatggtcgcgtactgaccaactccgaaaccaacagcattaagaaagagtacatcgataaattaatggtcgagcgtgaggctgaagcgaaaaaagcccgccagttaaagaaaaagcaggcttataaaccggatcctgaagcgtcatttagctggtcagcaaatacgtcgacgcgcggcaggcgctga

SEQ ID NO: 262684 - DNA, 873 bp, Klebsiella pneumoniae
atgctgcccgactcatcagtccgtttaaataaatacatcagcgaaagcggaatttgctcacgccgcgaagcggatcgctatatcgagcaaggcaatgtgttccttaatggcaagcgagccaccattggcgatcaggtgaaacccggcgacgttgtgaaagtaaacggtcagttgattgagcctcgggaagccgaagatttggtacttatcgccctgaacaagcccgtcggtattgtcagcaccaccgaagatggcgagcgcgataacattgtcgatttcgttaaccacagcaaacgcgtgttcccgattggccgcctggataaagactcccaggggctgattttcctcaccaatcacggcgatctggtgaataagatcctccgtgcgggtaacgatcatgagaaagagtatctggtgacggtcgataaaccgattaccgatgaatttattcgtggtatgggggcgggagtgccgatcctcgggacggtgacgaaaaagtgtaaagtcaaaaaagaagcgccgtttgtcttccgcattaccctggtgcaggggctgaaccgtcagatccgtcgcatgtgcgagcactttggttacgaagtgaaaaagctggaacgtacgcgcatcatgaacgttagtttaagcggcattccgctgggggaatggcgtgatttaactgacgatgagttaatcgacctctttaagctcattgaaaattcctcttccgaggcaaaacctaaagcgaaggccaaaccgaaaactgtaggcattaaacgtccagtcgttaagatggaaaaaacggcggaaaaaggcggtcgcccggcgtccaacggtaagcgttttacctcgccggggcgtaaaaagaaggggcgctaa

SEQ ID NO: 262685 - DNA, 948 bp, Klebsiella pneumoniae
atggaaaacagtgacgatatccgtttgattgtgaagattgcccaactctattacgaacaggatatgacgcaggtgcaaatcgcgcgcgaactgggtatttaccgcaccaccatcagccgcttgcttaaacgaggccgcgatcagggaattgtcaccatcgccatcaactatgactacaacgaaaatctctggctggagcagcaactgaagcaaaagtttggcctgaaagacgttgtggtggtgtcgggaaatgatgaggatgaagagactcaactggcgatgatggggttacacggcgcgcaactgctggatcgcttgctggagcctggcgatattgtcggtttttcctggggtcgcgcggtgagcgcactggttgaaaacttgccgcaggcggggcaatcgcggcagttaatctgcgtaccaattattggcggaccgtccggtaaactcgaaagccgctatcacgtaaacacattaacctacagcgcggcagcgaagctgaaaggggaatcgcatctcgcagattttccggctctgctggataaccccttaattcgtaatgggatcatgcagtctcagcactttaaaaccatctctgcctactgggataatctggatgtcgccctggtgggaattggctcaccggccattcgcgacggcgctaactggcatgcgttttatggtggtgaagagagtgacgacctgaatgcccgccaggttgctggcgatatttgctcgcgcttttttgatattcacggcgcaatggttgaaacgaatatgagcgaaaaaacactctctatcgaaatgaataaattaaagcaggcacgatattccattggcattgccatgagtgaagaaaaatacagcggaattgttggtgcactgcgtggaaaatatattaattgtctggtaacgaatagcagcacagctgaactattactgaaataa

SEQ ID NO: 262686 - DNA, 807 bp, Klebsiella pneumoniae
atgcaaacgtggttaaatttgcaggataaaatcattatcgtcaccggcggcgcatccggtataggtctggcgattgtagaggaattattagcacaaggcgcgaatgtacagatggtcgatattcacggtggcgatggacaatatgaaggtcataaaggctatcagttttggccgaccgatatttccagcgccaaagaggtaaatcatacggtagcagaaattatccagcgttttggtcgcatcgacggtctggttaataacgccggggtcaatttcccacgtctgctggtcgatgagaaagcgcctgccgggcagtatgaactcaacgaagctgcattcgaaaaaatggtcaatatcaaccagaaaggcgtttttctgatgtcgcaggcggtggcgcgacagatggtcaaacaacacgatggcgtgattgtgaatgtttcctcagaaagtgggctggaaggctcagaaggccagagctgctacgccgccactaaagctgcgctcaatagcttcactcgttcctggtcgaaagagctgggtaagcacggtatccgtgtggtcggtatcgcgccggggattctggaaaaaacaggactgcgcacgccggaatatgaagaagcgctggcgtggacgcgcaatatcaccgtcgagcagctgcgtgaaggctataccaaaaacgccattcctattgggcgcgccggaagattagcagaagtcgctgattttgtttgttatctgctgtctgaacgcgccagctacatcaccggagtaaccactaacattgcgggcggcaaaacgcgcggataa

SEQ ID NO: 262687 - DNA, 408 bp, Klebsiella pneumoniae
atggtcaacgccattttttgtgcccacggcaaattagcctgcgccatgctggaatcggttcagatggtttacggcaacgccaatgttgaagccgttgaatttgtacccgacgagaacgccggagacattgtggcaaagctggagaagttagtgagcattcacaatcatgacgagtggctaatcgccgtggatttacagtgcggcagcccgtggaatgcggcagcgatgcttgcgatgcgcaatcctcgcctgcgggtaatcagcggcctttctctgccgctggcgctcgaactggttgataaccaggacagcatgaatgttgatgaactgtgtgaacacctgacgcaaatcgcaaagcaatcctgcgtcgtctggagacaggtggcaacggcagaggaggatttctga

SEQ ID NO: 262688 - DNA, 495 bp, Klebsiella pneumoniae
atgaacattacgctcgcccgcattgatgaccgcctgatccacggccaggtcactaccgtctggtctaaagtggctaacgcccagcgcattattatctgcaatgacgaagtttataacgatgaagttcgccggacattattgcgtcaggctgcgccaccgggaatgaaggttaacgtggtcaatattgaaaaagccgtcgcggtttatcacaacccgcaatatcaggacgaaaccgttttttatcttttcactcgcccacaggatgccttagcgatggttcgccagggggtaaaaataggcaccctgaatattggcggcatggcctggcggcccggtaaaaaacagttaaccaaagcggtttcattagatgatgatgatattaacgcgtttcatgagttaaataatcttggcgtcatactggatttacgcgtcgtagcgtcagatccctcaatcaatattatcgacaaaataaacgaacagttaatcgcaaattaa

SEQ ID NO: 262689 - DNA, 798 bp, Klebsiella pneumoniae
atggaaataagtaccctacaaatcattgctatatttcttttttcctgtattgccggaatgggcagcgtgctggatgaatttcagactcatcgcccattaattgcctgtacggtgattggtttaattctcggtgatttaaaaaccggaataatactcggtggtacgctggaattgatagctctcggctggatgaacgtcggcgcggcgcaatctccggattctgcactcgccagcataatctccgccattctggttatcgttggtcagcaaagcatcgccaccggaatcgccatcgcgttgcctgtggctgcggcaggccaggtgctgacggtgtttgcccgtaccatcaccgtagtgttccagcacgcggcggataaagcagcggaagaggcgcggtttcgcactctcgatattctgcatgtctccgcgcttggcgtgcaggcgctgcgcgttgctattccggcactgattgtctcgctgttcgtcagcgccgatatggtcagcaatatgttaaacgccattcccgaatttgtgacccaaggactacagattgctggcggttttatcgtggtggtcggttacgccatggtgctacgtatgatgggtgtgaaatatttgatgcctttctttttcctcggtttcctcgcaggtggctacctcgatctcagtctgctggcgttcggtggcgtcggcgtgatcatggccctgctctacatccagctaaatccacagtggcgtaaagctgaacctcaactccaggccaccacctccaccgcccttgaccaacttgacgattaa

SEQ ID NO: 262690 - DNA, 1230 bp, Klebsiella pneumoniae
atgaaaacaacagctctgcgtctttatggtaaacgtgatttacgcctggaaacctttgatcttcctgaaatgcaggaggatgaaatcctcgcgacggtggtcaccgacagcctgtgcctctcttcctggaaagaggccaatctgggtgaaaaccataaaaaagtacccgacgatgtggcgaccaaccccatcatcatcggccacgagttttgcggcgatattctggccgtgggtaaaaagtggcagcacaaattccagccgggtcagcgttatgtgattcaggccaacctgcaactccccgaccgcccggactgccccggctactccttcccgtgggtaggcggcgaagccacgcatgtggttattcccaacgaggtcatggaacaagattgcctgctggcatacgacggcgaaacctattttgaaggctcgctggttgaaccgctttcctgcgtgattggcgcgttcaacgccaactatcatcttcaggaaggtagttataaccacacgatggggattcgcccgcaagggcgcacgctgatcctcggcggcaccggaccaatgggactgttggcgattgattatgcgctacatggacccgttaacccgtcgctgctcgtcattaccgataccgacaacgacaaattgagttatgcgcgcaagcactatccatcagaaccgcaaacactgattcattatctcaatgccgccgatgcagcatttgatacgttaatggcactgagtggcggtcacggcttcgatgatattttcgtctttgtgcctaatgaaggactggtgactctcgcctcttccttgctggcgacagatggttgcctgaatttcttcgccggaccgcaggataaacatttcagcgcgccaattaatttctacgatgtgcattatgcatttacccactacgtgggcacgtcaggcggcaataccgatgacatgcgcgcagcagtcaaattgattgaagagaaaaaagtgcaggccgcaaaagtggtaacacatattcttgggctgaatgccgcgggcgaaaccacgcttgaattgcctgccgtcggcggcggcaaaaagctggtgtataccgggaaatacctgccgcttatgtcactcacgcagattcaggatcaagcactggcggcaattctggcgcgtcatcaggggatctggtccggtgaggcggagcaatatctgctcactcatgcagaggcaatttcccatgattaa

SEQ ID NO: 262691 - DNA, 690 bp, Klebsiella pneumoniae
atggaactgcttttattgagtaactcgacgctgccgggtaaagcctggctggaacatgcactgccgctaattgctgaacagttgcagggtcgccgttcagcggtgtttatccctttcgctggcgtaacgcagacctgggatgattacacagcgaaaacggctgcggttctcgctccgctgggtgtttctgtcaccggtattcatagcgttgtcgatcccgttgccgcgattgaaaatgctgagatcgtgattgtcggcggcgggaatactttccagttgctgaaacagtgccgcgagcgcgggctgctggcaccaattactgacgtggttaaacgtggcgcgctgtatattggctggagcgcaggcgctaaccttgcttgcccaaccattcgtaccaccaacgatatgccgattgtcgatccacaaggtttcgatgcgctgaatctgttcccgttgcaaatcaacccgcacttcaccaacgcgctgccggaaggccataaaggtgaaacccgtgaacagcgtattcgcgaactgctggtcgtcgcgccagaactcacaattattggtctaccggaaggtaactggatcacagtgagtaaaggtcacgcaacgctgggtggcccgaacaccacttatgtgtttaaggctggtgaagaagcggtgccgctggaagcgggtcaccgtttttaa

SEQ ID NO: 262692 - DNA, 303 bp, Klebsiella pneumoniae
gtgcgcggtgaagatctgatcgtagtggtgaggtggcaggaagcccgcttcgcccgccgaggcaagagcctgctggctacgcatcataatggcgtcagcaaaaccacgcagcaacatcacaatcgccacgatgatatacatgataccgaggcgtttatggtcgacggaggtcagccactctttccacaggtaggtccacttaccgaagtaagtgatcaggccaacgagcgccagacctcccaaaataatgccagcgatcgtaaccatgacgataggttcatggaacgggactgcatcaagtga

SEQ ID NO: 262693 - DNA, 948 bp, Klebsiella pneumoniae
atgagactcaggaaatacaataaaagtttgggatggttgtcattatttgcaggcactgtattgctcagtggctgtaattctgcgctgttagatcccaaaggacagattggtctggagcaacgttcactgatactgacggcatttggcctgatgttgattgtcgttattcccgcaatcttgatggctgttggtttcgcctggaagtaccgtgcgagcaataaagatgctaagtacagcccgaactggtcacactccaataaagtggaagctgtggtctggacggtacctatcttaatcatcatcttccttgcggtactgacctggaaaaccactcacgctcttgagcctagcaagccgctggcacacgacgagaagcccattaccatcgaagtggtttccatggactggaaatggttcttcatctacccggaacagggcattgctaccgtgaatgaaatcgctttcccggcgaacactccggtgtacttcaaagtgacctccaactccgtgatgaactccttcttcattccgcgtttgggtagccagatttatgccatggccggtatgcagactcgcctgcatctgatcgccaacgaacccggtacttatgacggtatctccgccagctacagcggcccgggcttctcaggcatgaagttcaaagctattgcaacaccggatcgcgccgcattcgaccagtgggtcgcaaaagcgaaacagtcgccgaacaccatgtctgacatggcagcgttcgaaaaactggccgcgcctagcgaatacaaccaggtggaatatttctccaacgtgaaaccagacttgtttgccgatgtgattaacaagtttatggctcacggtaagagcatgaacatgacccagccagaaggtgagcacagcgcacacgaaggtatggaaggcatggacatgagccacgcggaatccgcccattaa

SEQ ID NO: 262694 - DNA, 1476 bp, Klebsiella pneumoniae
atgtccagtcaatatttacgtatttttcaacagccgcgttcagccatattgctgatcctgggttttgcttccgggctaccgctcgccctgacatccggcaccttacaggcctggatgacggtcgagaatatcgacctcaaaaccattggtttcttctcgctggtaggccaggcttacgtttttaaattcctctggtcaccgctgatggaccgctacacgcccccattttttgggcggcggcgcggttggctgctcgccacgcaaatcctgttattagtcgccattgcggcgatgggttttctcgaacctggcacccaactccgctggatggcggcactggcagtggtgatcgctttttgctctgcctcccaggatattgtcttcgatgcgtggaaaaccgatgtgctcccggcagaagaacgtggcgcgggcgcggcaatcagcgtgctgggttaccgtttagggatgctggtttccggcggcttagccctatggctggcagataaatggctgggctggcagggcatgtactggttgatggcggcgctgttgatcccctgtattatcgcgacgttgcttgcaccagaaccaaccgacaccattcctgtgccaaaaacgctggaacaagcggttgttgcacctctgcgagatttctttggtcgcaataatgcctggcttattttgcttcttatcgtgctgtataagctgggcgacgcattcgccatgagcctgacaaccacgtttttgattcgtggcgtcgggtttgatgcgggtgaagtaggcgtggttaacaaaacgcttggcttactggcgaccattgttggcgcattgtacggtgggattttgatgcagcgcctgtcactgttccgggcgctgctaattttcggtattttacaaggtgcgtctaacgccggttactggctgctgtcgattactgataagcatctctacagcatgggcgcagccgtctttttcgaaaacctctgtggcgggatgggtacatcagcctttgtcgcgctgttaatgacgctgtgtaataagtcattttccgctactcaatttgccctgctctcagcgctttctgctgtagggcgagtttatgtcggccccgtggcgggttggtttgttgaagcacacggctggtcgacattctatctgttctccgtcgccgctgccgtaccagggcttattttgctgctggtttgccgccagacgcttgaatatacacgagtaaatgacaactttatctcccgtaccgaatatcctgcaggttatgcctttgccatgtggacactggcggcgggcgtcagcctgttggccgtgtggttactgctgttgacgatggacgcgctggatttgacgcacttctctttcctgcctgctctgctggaagtcggggttttagtcgccctttctggcgtcgtgcttggtggtttactggattatctggcgctacgaaaaacgcatctgacgtaa

SEQ ID NO: 262695 - DNA, 579 bp, Klebsiella pneumoniae
atgttcaaaaaaatcctcttcccgttagttgctctgtttatgcttgcaggatgcgcaaaaccgccaacaactattgaagtttccccgacgatgacactgccacagcaggatccaagcctgatgggcgtcaccgtaagcattaatggtgccgatcagcgtaccgatcaggcgctggcaaaagtcacccgcgataatcaaatcgttaccctgaccgcctcccgcgatctgcgtttcctgctgcaagaagtgctggaaaaacagatgaccgcgcgtggttacatggtcggtccgaatggcccggttaatctgcaaatcatcgttagccaactgtatgctgatgtgtcccagggcaacgtgcgctataacatcgcgaccaaagcggatatcgccatcatcgctaccgcgcagaatggcaacaaaatgaccaagaactatcgtgccagctacaacattgaaggtgcgttccaggcctccaacaaaaatatcgccgatgcggttaacagtgtgctgaccgataccatcgctgatatgtctcaggacaccagcatccacgaattcatcaagcagaacgcgcgttaa

SEQ ID NO: 262696 - DNA, 624 bp, Klebsiella pneumoniae
atgtcatacagcggcgaacgagataactttgcaccccatatggcgctggtgccgatggtcattgaacagacctcacgtggtgagcgctcttttgatatctattctcgtctacttaaggaacgcgtcatttttctgactggccaggttgaagaccacatggctaacctgattgtggcgcagatgctgttcctggaagcagaaaacccagaaaaagatatctatctgtacatcaactccccaggcggggtgattactgccgggatgtctatctatgacaccatgcagtttatcaagcctgatgtcagcaccatctgtatgggccaggcggcttcgatgggcgctttcttgctgactgcaggggcaaaaggtaaacgtttctgcctgccgaattcgcgcgtgatgattcaccagccgttgggcggctaccagggccaggcgaccgatatcgaaattcatgcccgtgaaattctgaaagttaaaggacgcatgaatgaacttatggcgcttcatacgggtcaatcattagaacagattgaacgtgataccgagcgcgatcgcttcctttccgcccctgaagcggtggaatacggtctggtcgattcgattctgacccatcgtaattga

SEQ ID NO: 262697 - DNA, 1872 bp, Klebsiella pneumoniae
atgatggacagcttacgcacggctgcaaacagtctcgtgctcaagattattttcggtatcattatcgtgtcgttcatattgaccggcgtgagtggttacctgattggcggaggcaataactacgccgcaaaagtgaatgaccaggaaatcagccgtgggcaattcgagaacgccttcaacagcgagcgtaatcgcatgcagcaacagctgggcgatcaatactctgagcttgcagcgaacgaaggctatatgaaaaccctgcgtcaacaggtgctgaatcgtctgatcgacgaggcgctgctggagcagtacgctcgtgagctgaaactgggtatcagcgatgagcaggttaaacaggcgattttcgcgaccccagccttccaggttgacggcaaatttgataacagccgctataacggtatcctcaaccagatggggatgaccgccgatcagtacgcccaggcgctgcgtaaccagctcactacccaacagctgattaacggcgttgccggtaccgattttatgctgaaaggtgaaaccgacgagctggcggcactggtagctcaacaacgcgtggtgcgtgaagcgactatcgatgttaacgcgctggcggcgaagcagcctgtgaccgaacaggaaattgccagctactacgaacaaaacaaaaacaatttcatgacgccggaacaattccgcgtgagttacatcaagctggatgccgcaacgatgcagcaaccggttagcgatgcggatatccagagctactacgatcagcatcaggatcaattcacccagccgcagcgtacccgctacagcatcatccagaccaaaactgaagatgaagcgaaagcggtacttgatgagctgaataaaggcggtgattttgctgcgttagccaaagaaaaatctgccgatattatctctgcccgtaacggcggcgatatgggttggttagaagatgccactatcccggacgaactaaaaaatgctggcctgaaagaaaaaggccaactgtctggtgtcatcaaatcttcggtcggtttcctgattgtacgtctggacgacattcagccagcgaaagtgaagtcgttagacgaagtgcgtgacgatgtcgcggcgaaagtgaaacacgaaaaagccctcgatgcgtactacgcactgcaacagaaagtgagcgatgcggcaagcaacgacaccgagtctctggccggtgcagagcaagcagccggcgttaaagccactcagacgggttggttcagcaaagataacctgccggaagagttgaacttcaagccggttgctgacgctatcttcaacggcggtctggtaggtgaaaacggcgcgccgggcatcaactctgacatcatcaccgtcgatggcgaccgcgcattcgtgctgcgcatcagcgagcacaaaccggaagcggtgaaaccgttggcagatgttcaggaacaagttaaggcactggttcagcataacaaagctgaacaacaggcgaaagtggatgctgagaaactgctggttgatttgaaagccggcaaaggtgcggaagctatgcaggctgccggtctgaaatttggcgagccgaaaaccttaagccgttccggtcgtgacccgattagccaggcggcgtttgcactgccactgccagcgaaagacaaaccgagctacggtatggcgaccgatatgcaaggtaatgtggttctgctggcgctggatgaagtgaaacaaggttcaatgccggaagaacagaaaaaagcgatggtgcagggtatcacccagaacaacgcacaaatcgtctttgaagctctgatgagtaacctgcgtaaagaggcgaaaatcaaaattggcgatgcgctggaacagcaataa

SEQ ID NO: 262698 - DNA, 372 bp, Klebsiella pneumoniae
atgaaacacggaattaaagcactgatcattaccctgtctctggcctgtgccggaatgtctcatagcgcgctggcggcagctcctgcggcgaaaccgacaacggtagaaaccaaagcggaagctcctgcagcacaaagtaaagcagcagtaccggcgaaagccagtgacgaagaaggcactcgggtcagcattaataatgccagcgcggaagagctagcccgcgcgatgaatggcgttggcctgaagaaagcgcaggcgattgtcagttatcgcgaagagtacggtccgtttaaaacggtggaggatctcaagcaggtgccagggatgggcaattcgctggtggaacgtaatctggcggtattaaccctgtaa

SEQ ID NO: 262699 - DNA, 399 bp, Klebsiella pneumoniae
atgcaaacacaaatcaaagttcgtggatatcatctcgacgtttaccagcacgtaaacaacgctcgctatctggagtttctcgaagaagcccgctgggatgggttggaaaatagcgacagttttcagtggatgacggcccataacatcgccttcgtcgtggtcaatatcaatattaactatcgtcgcccggcggtattaagcgacctgttaaccattaccagtcagttgcagcaattaaacggtaaaagcggcatcttaagccaggtcattacactggagccggaagggcaggtggtagcggatgcgcttattacgtttgtttgtattgatcttaaaacgcagaaagcgttagctctggaaggggaattgcgcgaaaagctcgagcagatggttaagtaa

SEQ ID NO: 262700 - DNA, 1701 bp, Klebsiella pneumoniae
atgcgactgctcaaccgtcttaaccagtatcaacgtctgtggcaaccttccgccggaaagccgcaaaccgtcaccgtcagcgaactggccgaacgctgtttttgcagcgaacgccatgttcgtacgctgttacgccaggcacaggaggcgggatggctggagtggcaggcgcagtcaggacgcggaaagcgcgggcaactacgctttctggtcacgccagaatcgctacgcaatgcgatgatggaacaggcgctggaaaccggaaagcagcaagatgtgctggagctggcgcaactggccccaggtgagctgcgcactctgttacagccgtttatgggcggacaatggcaaaacgatacgcccacgttgcgtattccctactatcgcccgctcgaaccgctacaaccgggctttttgcccggccgtgccgagcagcatctcgccggacagatattttccggcctgacccgcttcgataataatacccagcgcccgattggcgatttagcgcatcactgggaaacctctgctgacgggttacgctgggacttttatcttcgttcaaccctacactggcataacggcgatgcagtaaaagcctcacacttacaccagcgattattgatgctgttacaactgccagcactggatcaattatttattagcgtgaagcgtattgaagtcacccatccgcagtgtctgaccttctttttacatcgccccgattactggcttgcgcaccggctggcgagctattgcagccatctggcgcatccgcaattccccctgatcggcactggtccttttcgcttaacacaattcacagtggaactggtgcgcctggagagtcatgattattaccatttacgtcatccgctgcttaaagcggttgagtactggataactccgccgcttttcgaaaaagatttgggaaccagttgtcggcatcccgtgcaaatcactatcggcaaaccggaggagttgcaacgggtcagccaggtcagtagtggcatcagtttaggtttttgctatttaacgttgcgcaaaagtccccgactgtccctctggcaggcgcgaaaagtgatctccattattcatcaatccggtttattacaaacgttagaagtcggagaaaacctgatcaccgccagtcatgcattactgccaggctggactattccgcaatggcaagtaccggatgaggtcaaactaccgaaaaccttgacactggtttatcacctaccgatagaacttcataccatggcagaacgtctacaggcgacactggcagcggaaggctgtgaactcacaattatttttcataacgcaaaaaactgggacgacacgaccctactggcacacgcagacctcatgatgggcgacagattaattggcgaagcaccggaatataccctggagcaatggctgcgttgcgatccactatggccacatgttttcgacgctccagcatatgcacatttgcaatcgacactggacgcggtgcaagtaatgcctgatgaggaaaaccgatttaatgccctaaaagcggtttttagccagttaatggcagacgcgacgctgacgccgctattcaactatcactatcgcattagtgcccctcccggcgtgaacggtgtgcgactgacaccgcgcggctggtttgaatttaccgaagcctggcttcccgcgccgtcgcaatga

SEQ ID NO: 262701 - DNA, 819 bp, Klebsiella pneumoniae
atggctcgtctggcagcatttgatatggatggcactttattgatgcctgaccatcatttaggtgagaaaaccctctctactttggcgcgactgcgtgaacgcgacattaccctcacttttgccacggggcgtcatgcgctggagatgcagcatattctcggggcgctatcgctggatgcatatttgattaccggcaacggaacgcgcgtgcattctctggaaggtgaacttttacatcgtgatgatttacctgcggatgtcgcggagctggtgctgtatcagcaatgggatacccgagccagcatgcatatcttcaatgacgacggttggtttaccgggaaagagatccctgcgttgttgcaggcatttgtctatagcggttttcgttatcagataatcgatgtcaaaaaaatgccactcggcagcgtcaccaagatctgcttctgtggcgatcacgacgatcttacacgcttgcagatccagctatacgaagcattaggcgagcgtgcacatttgtgtttttccgctacggattgcctcgaagtgctgccggtgggctgcaataaaggcgctgcattgacggtgctgacccaacatttaggtttatcgttgcgcgattgcatggcctttggtgatgcgatgaacgatcgcgaaatgttaggctgcgtcggtagcggatttattatgggcaatgcgatgccgcaattgcgcgcggagctcccgcatttaccggtgattggacattgccgaaatcaggctgtctctcactatttgacgcactggctggactatccacatctaccttattcccccgaataa

SEQ ID NO: 262702 - DNA, 285 bp, Klebsiella pneumoniae
atgaaaatggccaatcatccccgcccgggggacattattcaggaatcactggacgaacttaatgtcagcctgcgcgagtttgccagagcaatggaaattgcgccctcaacggcaagccgattgctgaccggaaaagcagctttgacaccagaaatggcgattaaactttccgtggtgatcggcagttcgccgcaaatgtggctgaatctgcaaaacgcctggagtctggcagaggcagaaaaaacggtggatgtgtcgcgattacgccgtctggttacgcaataa

SEQ ID NO: 262703 - DNA, 1698 bp, Klebsiella pneumoniae
atggaaccaaaaacaaaaaaacagcgttcgctttatattccttacgctggccctgtactgctggaatttccgttgttgaataaaggcagtgccttcagcatggaagaacgccgtaacttcaacctgctggggttactgccggaagtggtcgaaaccatcgaagagcaagcggaacgagcatggatccagtatcagggattcaaaaccgaaatcgacaaacacatctacctgcgtaacatccaggacactaacgaaaccctcttctaccgtctggtaaacaatcatcttgatgagatgatgcctgttatttataccccaaccgttggcgcagcctgtgagcgtttttctgagatctaccgccgttcacgcggcgtgtttatctcttaccagaaccgccacaatatggacgatattctgcaaaacgtgccgaaccataatattaaagtgattgtggtgactgacggcgaacgtattctggggcttggtgaccagggcatcggcgggatgggcattccgatcggtaaactgtcgctctataccgcttgtggcggcatcagcccagcgtatacccttccggtggtgctggatgtcgggacgaataaccaacagctgcttaacgatccgctgtatatgggctggcgtaatccgcgtatcactgacgacgaatactatgaattcgttgatgaatttatccaggctgtgaaacaacgctggccggacgtactgttgcagtttgaagacttcgcacaaaaaaatgcgatgccgttacttaaccgctatcgcaatgaaatttgttcttttaacgatgacattcagggcaccgcggcggtaacggtcggcacactgatcgcagccagccgcgcggcaggtggtcagttaagcgagaaaaaaatcgtcttccttggcgcaggttcagcgggatgcggcattgccgaaatgatcattgcccagactcagcgcgaaggattaagcgaggaaacggcgcggcagaaagtctttatggtcgatcgctttggcctgctgaccgacaagatgccgaacctgctgcctttccagaccaaactggtgcagaaacgcgaaaacctcagtgactgggataccgacagcgatgtgctgtcactgctggatgtggtgcgtaatgtaaaaccagatattctgattggcgtctcaggacagaccgggctgtttacggaagagatcatccgtgagatgcataaacactgtccgcgtccgatcgtgatgccgttgtctaacccgacttcacgcgtggaagccacaccgcaggacattatcgcctggactgaaggtaacgcgctggtcgccactggcagtccgtttaacccagtggtatggaaagataaaatctaccctatcgcccagtgtaacaacgcctttattttcccgggcatcgggctgggcgttattgcttccggcgcgtcacgtatcaccgatgagatgctgatgtcggcaagtgaaacgcttgctcagtattcgccactggtgctgaacggcgaaggtctggtactgccggaactgaaagatattcagaaagtctcccgcgcaattgcctttgcggttggcaaaatggcgcagcagcaaggcgtggcggtgaaaacctccgccgaagctctgcaacaggccattgatgataatttctggcaagccgaataccgcgactaccgccgtacctccatctaa

SEQ ID NO: 262704 - DNA, 138 bp, Klebsiella pneumoniae
atgaaatcgaaccgtcaggcacgtcatattcttggactggaccataaaatttctaaccagcgcaaaatagttaccgaaggtgacaaatccagcgtggtaaataacccaaccggcagaaaacgccccgctgaaaagtaa

SEQ ID NO: 262705 - DNA, 216 bp, Klebsiella pneumoniae
atgtttacttattatcaggcagaaaattcaacagcagaacccgctctggttaatgccattgagcaaggccttcgggcagagcacggtgttgtcactgaagatgacattctcatggagctgaccaaatgggtggaagcttctgataacgacatcctcagtgatatctaccagcaaacgatcaattatgtggtcagtggccagcaccctacgctttaa

SEQ ID NO: 262706 - DNA, 432 bp, Klebsiella pneumoniae
atgacaatccataagaaaggtcaggcacactgggaaggcgatatcaaacgcgggaagggaactgtatccaccgagagcggcgtgctgaaccaacagccgtatggatttaacacgcgttttgaaggcgaaaaaggaaccaaccctgaagaactgattggcgcagcgcatgccgcatgtttctcaatggcgctttcattaatgctgggggaagcgggattcacgccaacatcgattgataccaccgccgatgtgtcgctggataaagtggatgcaggttttgcgattactaaaatcgcactgaagagcgaagttgcggtgccgggtattgatgcctctacttttgacggcattatccagaaagcaaaagcaggatgcccggtttctcaggtactgaaagctgaaattacgcttgattaccagttgaaatcgtaa

SEQ ID NO: 262707 - DNA, 741 bp, Klebsiella pneumoniae
atgggtatgctgcaacctagccacgggcagtacatccgttcaggctcacaacgcattatgcagatggtgtttcaggacccgctctcttcgctcaatccgcgcttaccggtgtggcgcatcatcacagaaccgctctggatagctaagcgtagtagtgaacaacagcggcgagcgttggcagaggagctggctgtgcaggtgggtattcgtccggagtatctcgaccgcttgcctcatgcgttctcaggcgggcagcggcaacgtatcgccattgccagagcactctcttcgcagcctgacgtgattgtgcttgatgaaccaacctcggcgctggatatctccgtgcaggcgcagatcctcaatttactggtaacgctacaggaaaatcgcgagctgacttatgtgctgatttcacacaatgtttcggtgatacgtcatatgagcgatcgggtggcggtgatgtatctcggacagattgtggaactaggagacgtgcaacaggtgctgacagctccggcacatccatacacccgattattgctggattccctccccgccattaataaaccgctggaggaagaatgggcattacgtaaaacggatctaccaggaaaccgcacgttgccacaaggctgttttttccgcgaacgctgccctctggcaacccacggatgtgaagtccggcaatcattaacaataagggaggacggacgtgagatccggtgctggcgggcgctgtag

SEQ ID NO: 262708 - DNA, 180 bp, Klebsiella pneumoniae
gtgtctgacacgttattaacgttacgcgacgtccatatcaatttccctgcccgaaaaaactggcttggtaaaactacggaacatgttcatgccatcaatggtattgatttacagatccgtcgtggtgaaaccttagggatcgtcggtgagtcaggctgcggcaaaagcaccctcgcatag

SEQ ID NO: 262709 - DNA, 987 bp, Klebsiella pneumoniae
atgacccaacccgttctggacattcaacagctgcatttgagtttccccggttttaacggtgatgttcacgcgctcaacaatgtgtccttgcagattaaccgcggtgaaattgtcggtctggtgggagaatccggctcaggtaaatcagtcaccgcaatgctgattatgcgtctgctaccgacgggcagttattgcgtacatcgggggcagatttcactgctgggagacgatgttcttaacgctcgggaaaaacagcttcgtcagtggcgcggcgcacgagtggcgatgatctttcaggaaccgatgaccgcccttaatccgacacgtcgaataggtcttcagatgatggacgtgatccgccatcatcaaccaataagtcgtcgggaagccagagctaaagcgattgccctgctggaagagatgcaaatcccggatgccgtggaagttatgtcgcgctatccgtttgagctttcaggtggtatgcgccagcgggtaatgattgcgctggcattctcctgcgagccgcaattgattattgccgacgaaccgactacggcgctggacgtcacggtacaattgcaggtactgcgtctgcttaaacataaagcccgcgccagtggaactgcggtactgttcatcagccatgatatggccgtggtgtcgcaactgtgcgatagcgtttacgtgatgtatgccggaagcgtaattgaaagcggcgtgacggcagacgttatccatcatccccggcatccgtataccattggtttgctgcaatgcgcaccagaacatggagtaccacgccagccattacccgccattccagggacggtaccaaacctcacccatttgcctgacggctgcgcttttcgcgatcgttgctatgcggcaggtgcacagtgtgaaaacgtcccggcgctaacagcgtgtggtgacaacaaccaccgctgcgcctgttggtatcctcagcaggaggtcattagtgtctga

SEQ ID NO: 262710 - DNA, 897 bp, Klebsiella pneumoniae
atgatgctaagcgaggaaacgtcagccgtgcgcccaccaaaacaaacgcgatttaacggtgcaaaactggtatggatgctgaaaggcagcccgcttaccgtgaccggcgcagtcatcattgtattaatgctactgatgatgattttttcaccgtggctggcgacgcatgatcccaacgccattgatttaaccgcccgccttttgccgccttctgcggcgcactggtttggcaccgatgaagtgggacgcgatctgtttagccgcgtactggtcggcagtcagcaatcaattctcgccggattagtggtggtcgccattgcaggtatgatggggtcgctactcgggtgtctatccggtgtgcttggcggacgcgcagacgcgattatcatgcgcatcatggacattatgctgtcgattccttcgctggtgctgacaatggcactggcagccgctctcgggccgagtttgtttaacgccatgctggcgattgctattgtgcgaattcccttttatgtgcgcctggcgcgggggcaaacattagttgttcgccagtatacctatgttcaggcggcgaaaacctttggtgcgtcgcgttggcatctgatcaactggcatattttacgtaactccctgccgccgctgattgtgcaggcatcgctggatatcggtagcgcgattttaatggccgccacgttgggatttattggcctgggtgctcaacaaccgagtgctgaatggggcgcgatggtagcgaatggtcgcaactatgtactcgatcagtggtggtattgcgcatttccgggggcagcgattttgcttaccgccgtcgggtttaatctctttggtgatggtattcgcgatctgcttgacccgaaagcaggaggaaagcagtcatga

SEQ ID NO: 262711 - DNA, 1023 bp, Klebsiella pneumoniae
gtgaccttctggagtattttacgccaacgctgctgggggctggtgctcgtggtggcgggcgtctgtgtgataacgtttattatctcgcacctgatccccggcgatccggcgcggttactggcgggtgaccgcgccagcgatgctatcgtggataatattcgccagcaactgggactggaccagccactgtacgtacagttttaccgctacgtcagcgacctgtttcagggtgacctgggaacatccattcgtaccgggcgtccggtgctggaagagttgcgcatatttttcccggcgacgctggaactggctttttgtgccctgctgctggcactcctgattggcatcccgctgggcatactctctgcagtctggcgaaatcgctggctggatcatctggtgcgaataatggccattaccggaatctccacacctgcgttctggcttgggctgggcgtcattgtgctgttttatggtcatctgcaaattcttcccggcggcggaaggcttgatgactggctggatccacctacgcacgttaccggcttttatctgctcgatgcgctgcttgaaggcaacggtgaagtcttcttcaatgcgctgcaacatctcatcttaccggcattaacgctggcgttcgttcacctgggaattgtcgctcgccagatccgctcagctatgctggaacaattgagtgaagattacattcgtaccgcccgggccagcggcttgcccggctggtatatcgttttatgttatgcgctacccaatgcgttgatcccctcgattaccgtattggggctggcgctgggcgatttgttgtatggcgcagtgctcaccgaaaccgtttttgcctggcccggaatgggtgcatgggtagtaacatcaatacaggcgctcgacttcccggcagtgatgggctttgccgtcgtggtttcgtttgcttatgtgctggtgaacctggtggtggatttgctctatttgtggattgatccgcgtatcggacgtggaggtggtgaatga

SEQ ID NO: 262712 - DNA, 1551 bp, Klebsiella pneumoniae
atgaagagatcgatttcgtttcgtcctacattgctcgcgatcgtccttgccacaacaatgccggttgcgcacgccgccgtaccgaaagatatgctggtgatcggtaaagctgccgacccacaaaccctcgacccagcggtgacaattgataataacgactggacagtgacctacccgtcttatcagcgactggttcagtacaaaacggacggtgataaaggctcaaccgacgttgaaggcgatctggcgagtagctggaaagcgtctgacgatcaaaaagagtggacgttcaccctgaaggacaatgctaaatttgccgatggcacacctgtcactgccgaagcagtaaaactctcttttgagcggttactaaaaatcggccaggggccagcagaagcatttcccaaagatttaaagattgatgctcccgacgaacatacagtgaggtttacccttagccagccattcgcaccgttcctctacacgctggcgaatgacggtgcatccattatcaatccggcggtcttaaaggagcatgcggcggatgatgcccgtggtttcctcgcgcaaaataccgctggctccggaccgtttatgctgaaaagctggcaaaaaggtcagcaattagttctggtgccaaatccgcattaccccggcaataaaccgaatttcaaacgggtatcggtaaaaattatcggtgaaagtgcctcccgtcgcctgcaactctcccgtggcgacattgacattgccgatgcgctgccggtggatcaactcaacgcactgaagcaggaaaacaaagtcaatgtggcagagtatccgtcactgcgcgtcacctatctgtatctgaataacagcaaagcgccacttaatcaggcggatctgcgtcgggccatttcctggtctaccgattatcagggtatggttaacggcattctgagtggtaacggaaaacaaatgcgcggcccgattccggaaggcatgtggggatacgatgcgacggcaatgcaatacaaccatgacgaaacgaaagccaaagccgaatgggataaagtgacgagcaaacccaccagcctgacgtttctctattctgataatgatccgaactgggagcctattgctctggcgacacaatccagtctcaacaagctgggcatcaacgtgaagctggaaaagctggcgaacgccaccatgcgcgacagagtgggtaaaggtgattacgacattgcgattggcaactggagcccggattttgccgacccgtatatgtttatgaattactggtttgagtccgacaaaaaaggtctgccgggtaaccgctcgttctatgaaaacagtgaggtcgataagctactgcgcaatgcgctagcgaccaccgaccagacgcagcgtacccgggactaccagcaggcacagaaaatcgtcattgatgacgctgcttatgtgtacctgttccagaaaaactaccaactggcgatgaacaaagaggtgaaaggctttgtgttcaatcccatgctggaacaggtcttcaatatcaataccatgagtaaataa

SEQ ID NO: 262713 - DNA, 582 bp, Klebsiella pneumoniae
atgtcggataccaccgtactggttgatttagccgtgatcttccctgatctggagatcgaactgaaatacgcctgcgctgataacatcacaggcaaagctatttatcagcaagcgcgttgtctgttacacaaggatgcgattactgcgctggcgaaaagtatcagtatcgcccagctgtcaggcttacaactggtgatttacgatgcgtatcgcccacaacaagcacaggcgatgttgtggcaagcctgcccagacccgcaatatgttgttgatgtggcggtcggttctaatcacagccgtggcacggcgatcgacctgacgcttcgtgatgagcacgggaacatcctggatatgggggcagagttcgatgaaatgcacgaacgttcccatgcttatcacccttccgtcccgccagccgctcagcgcaatcgcctgttgctgaatgcgattatgactggtggcggttttgtcggtatcccgagcgaatggtggcacttcgaattaccccaggcagcgagttacccacttctcgctgatcaattcacctgttttatatcccctggcacacagcacgccagttaa

SEQ ID NO: 262714 - DNA, 2400 bp, Klebsiella pneumoniae; identical to SEQ ID NO: 9831

SEQ ID NO: 262715 - DNA, 1383 bp, Klebsiella pneumoniae
atggagatgtattttaaaagaatgaaagatgagtggaccgggcttgtcgaacaagcagatccgctcattcgtgctaaagccgcggaaattgccgttgcgcatgcccattatctgagtattgagttttaccgaattgtccgtatcgacccgcatgccgaagaattcttgagtaatgaacaagttgagcggcagttgaaaagtgcgatggaacgctggattattaacgtgctttctgcccaggtggacgatgtcgaaaggctaatacaaatccagcataccgttgcggaagtgcatgcccgcataggaattccggtagaaattgtcgagatggggtttcgggtgctgaaaaaaatcctctatccagtcatcttctcttcggattattccgccgcagaaaaacttcaggtctaccatttctctattaacagtattgatatcgctatggaagtgatgacccgcgcgtttacctttagtgacagtagtgcctcaaaggaagatgaaaactatcgtatcttctcgttactggaaaacgccgaagaagaaaaagaacggcaaatagcctcaatactttcatgggaaatagatattatctataaagtcctgctggattctgatttaggcagtagtttgcctttaagccaggctgattttggcctgtggtttaaccataaaggtcgacattattttagcggcatagccgaagtgggccatatctcccgtctgattcaggatttcgacggtattttcaatcaaaccatgcgtaacaccaggaatttgaataacagaagtttacgggtgaaatttttattacagataagaaataccgtatcgcaaattattaccttgttgcgtgaattgtttgaagaagtatcgcgccacgaagtcggtatggatgtactgacgaaattacttaaccgccgtttcctgccgacgatcttcaaacgcgaaattgcccatgccaaccggaccggtacaccgctgtcagtgctgattattgacgttgataaattcaaagagatcaacgatacgtggggccataacactggcgatgaaattctgcgtaaagtctctcaggccttttatgacaacgtccgcagtagtgattatgttttccgctacgggggcgatgaatttatcattgttttgactgaagcatctgaaaacgaaacgttacgtaccgcagaacgtattcgcagtcgggtagagaaaaccaaactgaaagccgcgaacggcgaagatattgccctctcactttccatcggtgccgccatgtttaatggtcatcctgactatgagcgcctcattcaaatagccgatgaagctctgtatatcgccaaaagacgaggtagaaaccgtgttgaactctggaaagccagtctttag

SEQ ID NO: 262716 - DNA, 1320 bp, Klebsiella pneumoniae; identical to SEQ ID NO: 9832

SEQ ID NO: 262717 - DNA, 1536 bp, Klebsiella pneumoniae
atggctacatcagtacagacaggtaaagctaagcagctcacattactcggattttttgccataacggcatcgatggtaatggctgtttatgaataccctaccttcgcaacatcgggcttttcattagtcttcttcctgctattaggcgggattttatggtttattcccgtgggactttgtgctgcggaaatggctaccgtcgacggctgggaagaaggtggtgtcttcgcctgggtatcaaatactctggggccgagatggggatttgcagcgatctcatttggctatctgcaaatcgccattggttttattccgatgctctatttcgtgttaggggcactctcctacatcctgaaatggccagcgctgaatgaagaccccattaccaaaactattgcagcactcatcattctttgggcgctggcattaacgcagtttggtggcacgaaatacacggcgcgaattgctaaagttggcttcttcgccggtatcctgttacctgcatttattttgatcgcattagcggctatttatctgcactccggtgcccccgttgctatcgaaatggattcgaagaccttcttccctgacttctctaaagtgggcaccctggttgtatttgttgccttcattttgagttatatgggggtagaagcatctgcaacccacgtcaatgaaatgagcaacccagggcgcgactatccgttggctatgttattgctgatggtggcggcaatctgcttaagctctgttggcggtttgtctattgcgatggtcattccgggtaatgaaatcaacctctccgcaggggtaatgcaaacctttaccgttctgatgtcccatgtggcaccggaaattgagtggacggttcgcgtgatctccgcactgctgttgctgggtgttctggcggaaatcgcttcctggattgttggtccttctcgcgggatgtatgtcacagcgcagaaaaacctgctgccagcagcattcgctaaaatgaacaaaaatggcgtaccggtaacgctggtcatttcgcagctggtgattacttctatcgcgttgatcatcctcaccaataccggtggcggtaacaacatgtccttcctgatcgcactggcgctgacggtggtgatttatctgtgtgcttatttcatgctgtttattggctacattgtgttggttcttaaacatcctgacttaaaacgcacatttaatatccctggtggtaaaggggtgaaactggtcgtggctgttgtcggtctgctgacttcaattatggcgtttattgtttccttcctgccgccggataacatccagggtgactctaccgatatgtatgttgaattactggtcgtgagtttcctggtggtacttgccctgccctttattctctatgctgttcatgatcgtaaaggcaaagggaataccggcgtcactctggagccaatcaacagtcagaacgcaccaaaaggtcacttcttcctgcacccgcgtgcacgttcaccacactatattgtgatgaatgacaagaaacactaa

SEQ ID NO: 262718 - DNA, 1425 bp, Klebsiella pneumoniae; identical to SEQ ID NO: 9833

SEQ ID NO: 262719 - DNA, 933 bp, Klebsiella pneumoniae; identical to SEQ ID NO: 9835

SEQ ID NO: 262720 - DNA, 1095 bp, Klebsiella pneumoniae; identical to SEQ ID NO: 9837

SEQ ID NO: 262721 - DNA, 1302 bp, Klebsiella pneumoniae; identical to SEQ ID NO: 9838

SEQ ID NO: 262722 - DNA, 1407 bp, Klebsiella pneumoniae; identical to SEQ ID NO: 9839

SEQ ID NO: 262723 - DNA, 1116 bp, Klebsiella pneumoniae; identical to SEQ ID NO: 9840

SEQ ID NO: 262724 - DNA, 765 bp, Klebsiella pneumoniae; identical to SEQ ID NO: 9841

SEQ ID NO: 262725 - DNA, 1140 bp, Klebsiella pneumoniae; identical to SEQ ID NO: 9842

SEQ ID NO: 262726 - DNA, 177 bp, Klebsiella pneumoniae; identical to SEQ ID NO: 9843

SEQ ID NO: 262727 - DNA, 396 bp, Klebsiella pneumoniae; identical to SEQ ID NO: 9844

SEQ ID NO: 262728 - DNA, 384 bp, Klebsiella pneumoniae; identical to SEQ ID NO: 9845

SEQ ID NO: 262729 - DNA, 381 bp, Klebsiella pneumoniae; identical to SEQ ID NO: 9846

SEQ ID NO: 262730 - DNA, 393 bp, Klebsiella pneumoniae; identical to SEQ ID NO: 9847

SEQ ID NO: 262731 - DNA, 963 bp, Klebsiella pneumoniae; identical to SEQ ID NO: 9848

SEQ ID NO: 262732 - DNA, 552 bp, Klebsiella pneumoniae
atgtttattcttaatcagaaaattatcatcggtggagaacgctggtttacgccaatgaaggacttaaaacctgtagacgggttaaaactgttggtggcaagcagcgataacgatcagtatcgctcccgtaatgcattaatccgtcgtcacattgagaaaatggatgccagtttgcacgtcggaacgaaggagtttgatatttcaaaggtttccgaggtagattctgttgatgatttactcattgataatgctgctcgttatctgctgaaagactggaaaggggttggtgaactggttaatggtgctgaggttgcactggaatatacgccagaacgagggatcgcgctgcttaagcagaatccagagttgtactggcagatccttgcagaagcagccagcatcgcccagggtaaagagcagcagaagcaggatacgataaaaaagccatatccgcccagcggtggttatcggagttcgggggagaaaggggggaaaaggcaagatggaagcgagaaaaactcaggttgccaccgataccggaaccagaaatag

SEQ ID NO: 262733 - DNA, 2280 bp, Klebsiella pneumoniae
  misc_feature (2253)..(2262): n is a, c, g, or t
atggcagagcaaacctcgcgtctcgcaataattattgatagcactggagcaaaaaataatgctgacaatctgacctcctcattagtcaaaatgacgcaggccggggaaactgctgcaaatagcgcagggaaagtgactaaggcaacagaagatgagaagaacgcgctcgcaaaattaaaagcagctattgatccagttggtgccgcaattgatactgtcggtcgacgctattctgaattaaagaaatttttcgataaagggcttattgataaagaagaatatgaatttcttgtccgtaaacttaatgaaaccacagaggaattgagcggggttgcgcaagcgcagagagaagccgagaaggccggaaaacttgctgccgcccagcaggaagcgcaggctcaggcctttcaaagaatgctggacaagatcgaccctctggctgcggcgctaagaaatcttgaacaacagcaggatgaacttaatgctgcgtttgcatccgggaaaataaatggttctcagtttgagaattatagccgaaaaatacaggaaacacggcgagagcttaccggagaggctcaggcagagcgagaagcagcaaaagcgcatgatgaacaggttgctgctttgcaacgtctgattgctcaacttgaccctgtcggaactgcttttaatcgtctggtagaacaacagaaacagctcaatgaagcaaaagctaaggggatgctctctcctgaaatgtatgaggaactttctggaaaacttcgtgctatgcggagtgagcttgaggttactcaatctcaattaagcaaaaccggaatgtcggcaaaacaaacggcttttgctatgcgcatgttgcctgcacaaatgacggatattgttgttgggttgtccactggtcagtcgccttttatggtgttaatgcagcagggcggccagctaaaagatatgttcggtgggattggcccggcgatcaaaggtgttggttcttatgtgctgggattaattaatccttttaccctggccgcagcagccgttggcgtcttagggctggcttactataaaggctctcaggagcaggacgaatttaataaatctcttattcttaccggaaatcagttggggacaaccagcgggcaattggccgatatagctcaacgtgccgggaatgcggctgattcgacaactggcgctgcggcggcagtattaaaccagcttgtgcgttcgggaaaggtagcgagcagttcgctggagcaagtgacgacagcgatagtaaaaacgagcgaagtaacaggaatatcaaccgaacaactggttaatgacttcaatgaaattgcaaaggatcctgtcagtgccatatcaaaacttaatgatcagtaccattttctgacaattgcgacttataaccagattaaggcgctacaggatgaagggaaccagcaggaggccgcccgcattgcgacagaagcatactcatcctcaatgatccagcgcaccaaccagattaaagaaaatcttggttatcttgagactgcatggaaagctgtcgcagactccgcaaaatgggcatgggattccatgctggacattggccgtgaggcctcccttgatcaaaaaatctcagatgttctccgtcaaattgatgaaatagaaaaaaatacccgacccggagttttcgggttaggtggcattggagatggcggagctcaaaataaaaggctggcacgattaaagcagcaattgggcgtacttcaagcagaaaaaattgctcaggacgtcctaaattcatcaataaacgattacaacaagcgacaacaggaaggaattgaactcagacagagagcagatgccttttcaaaacaatatcagacccgggagcagcagagagctagtgaacttgcaaaactggaaaagctaaagagtcagtattcaaaggaagaatataataattttatcgctcaaataaatgagcgttataaagatccaaagcaaccaaaggcgaaaggttattcggatgatgctgcccaacgaatgattgatcatctgaatcaacagaatgcgttactaagttcacaaactgaattaaccgttaaattaagttcctctgaacaggaactggttaagtggcgtcagcagattgccgacctggagtcacgaccgtcatcgaaattaacccaggatcagaaatcgcttctcttacaccgggaagaaataaccgcgttgatggagaaaaatgttgcgattgaaaaaaaaaannnnnnnnnngaaagatgttgcgattga

SEQ ID NO: 262734 - DNA, 306 bp, Klebsiella pneumoniae
  misc_feature (23)..(32): n is a, c, g, or t
atgttgcgattgaaaaaaaaaannnnnnnnnngaaagatgttgcgattgaaaaaaataacaggctaatcaaggaatccgccgaaatagctgcatggcgtgatttattgcaggcttcgattgataatcgtcaacaggggtatgatattcagattgctggttatggggttggcgataaaaatcagcaacgccagcaggaattactgcggattgaacgtgaatataacaatcagcgtctgcaacttgaacgtgactatgcagataaatcccgtgggatgtcaaatcatgtttttcaggagaaaatgtag

SEQ ID NO: 262735 - DNA, 570 bp, Klebsiella pneumoniae; identical to SEQ ID NO: 9851

SEQ ID NO: 262736 - DNA, 297 bp, Klebsiella pneumoniae; identical to SEQ ID NO: 9852

SEQ ID NO: 262737 - DNA, 195 bp, Klebsiella pneumoniae
atgaatgaaatagatcgcagggacgacctgatcgcccttaggattgcgatcacgcagaaatcgactttgaaaataggtacatggattgccaaaagtggccctttgcctacggcagaatttgataatttcaagcaagtatttaaggatggcctggatgaggttgaaagctatttactgagtgagaacatagtatga

SEQ ID NO: 262738 - DNA, 714 bp, Klebsiella pneumoniae
atgcactgtcatctagacttatatcctcggccagacctcgtggctgaagaaagtaaacgtcgagggacttatattctgtcggtgacaacaacacctaaagcatggcatggtacttctttattggctaaagaaagtcaacgaatccgaactgctcttgggctacatcctcaaatcgcgcatcaaagatcgcatgagttagacctgtttgattcattgctttcggaaactaagtatgtaggggaaatagggcttgatggtggacagggatttaaagaacattgggatattcaattgaaagtgttccgacacattctcaacagtgtaaatcgggctggtggcaagattatgactatccatagtcggggaagtgcatcagcggtgcttgatgagattgaaaatatcgatggggtggcaatattgcattggttcactggaacacctaagcagcttgaaagggcaattgatttaggatgctggttctcagtggggcctgctatgctcgatacaataaagggtaaggccttagttttgaaaatacccaaatcacgcattcttacagaaacagatgggccatttgctaagtttcgtaatgacccactaatgccatgggatagtgggattgcagagaaacagttagccgcattatgggggattagtcagatggaggttaatgctcagctagttgataattttaaggtattatgtacatcataa

SEQ ID NO: 262739 - DNA, 306 bp, Klebsiella pneumoniae
atggaataccggacctggatcactgaagctttacgtcttcactttgaagaacatttaccacggattgtggccggacgtcgcctgggcgtaccaaaatcaacagtttgtggtatgttcgtgcgcttccgaaaagctggcctttcatggcctctgcccgcaggtatgtcggagcgggaacttgatgcccgtctttacgggagtgcctccacagtacctgtcgtacttactgaaaacaccgttatgtccgaagtcccggtggtaaaaaaacgcccccggcggcctaatgccagtcagttaagcaactga

SEQ ID NO: 262740 - DNA, 360 bp, Klebsiella pneumoniae
atgcaactgagcaggctgacgctgagaagtaaaaagccggagcttgtggagcaagagctgtggggtgtcttactggcttataatctggtgagatatcagatgattaaaatggcggaacatctgaaaggttactggccgaatcaactgagtttctcagaatcatgcggaatggtgatgagaatgctgatgacattgcagggcgcttcaccgggacatataccggagctgatgcgcgatcttgcaagtatgggacaacttgtgaaattaccgacaataagggaaagggccttcccgagagtggtaaaggagaggccctggaaataccccacagccccgaaaaagagccagtcagttgcttaa

SEQ ID NO: 262741 - DNA, 186 bp, Klebsiella pneumoniae
atgctgcaggttccgacagcggcggcaaatatgcagcacatattgtgctcactgatcggcacctgccgtctgaacaatgcggagtcagaaaaattgctgcattacgtcacagatcatatgcaggactggtcggcaaaccgggtacgcgatctgttgccctggaaagttgatctgacctctcagtaa

SEQ ID NO: 262742 - DNA, 1263 bp, Klebsiella pneumoniae
atggcactgactgacgcaaaaatccgggctgcaaagcccactgacaaggcttataaactcactgacggggccggcatgttcctgctggttcatcctaatggttcccgttactggcgtctccgctatcgtattctgggtaaggagaagactctggcacttggtgtgtatccagaagtttctctctccgaagctcgtacaaaacgggatgaggcccgaaaactgatttcagagggggttgacccttgcgaacagaaaagagctaaaaaagttgtccctgatttacagctctcttttgaacatattgcacgacgctggcatgccagtaataaacaatgggcacaatcacacagcgataaagtactcaaaagcctcgagacacacgttttcccctttatcggcaaccgggatatcacaacactcagtaccccggacctgcttatccctgttcgtgctgcagaagctaaacaaatttatgaaatcgccagtcgtctgcagcaaagaatatctgctgtaatgcgttatgccgtacagtctggcatcatcagatataacccggctctggatatggctggtgcattgaccacggtaaaacgccagcatcgccctgcactggatctttcacgcctgcctgaacttctgtcgcgtattgacggttataaaggccagcctgtcacccgactggcagttatgctgaatttactggtttttattcgttccagtgaactcagatacgcccgctggtctgaaattgatattgacaatgccatgtggactattccagccgaacgcgaacctctgcctggcgtaaaattctcacaccggggctccaagatgcgaacaccacatcttgtgccactcagcaaacaggctgtagccatactggcagaactacagacatgggctggtgaaaatggtctgatctttacgggagcacatgacccgcgtaaaccaatcagtgaaaatactgtaaataaagccctgagggtgatggggtatgacacaacccaggatgtctgtggccatggattccgtgcgatggcatgtagtgcgctgatcgaatcaggtttgtggtcccgcgatgctgttgaacgtcagatgagccatcaggaacgtaacggtgtacgcgctgcgtatatccataaagccgaacatctggaagaacgccggctgatgctacagtggtgggcagattttctgaatgcgaacagagagaaatgtatcagtccgtttgattatgcaaagatcaacaatccattaaaatag

SEQ ID NO: 262743 - DNA, 576 bp, Klebsiella pneumoniae
gtgcaacgtgaagatgtactgggagaagccctgaaattattagaattacaagggattgccaacaccacgctggagatggttgctgaacgtgtggattatccactggacgagctacgccgcttctggccagacaaagaggcaatcctctacgatgcgctgcgttatcttagccaacagatagatgtctggcgtcgtcagctgatgctggacgaaacgcaaaccgccgaacaaaagttgctggcacgttatcaggcgttatcggagtgcgttaaaaacaaccgctatccgggctgtctgtttatcgctgcctgtacgttttatcccgatcctggccaccctattcatcaactggccgatcagcaaaaaagcgcggcctacgatttcacccacgaactattaaccacactggaagttgacgatccggcgatggttgcaaagcagatggaactggtgctggaaggctgtttaagccgaatgctggtgaatcgtagccaggcggatgtcgacaccgcacatcggctggcggaagatatcctgcgcttcgcccgctgccgccagggtggtgctttgacctga

SEQ ID NO: 262744 - DNA, 1698 bp, Klebsiella pneumoniae
atggctcaacgcatctttacgctgatcctgctactttgcagcacttccgtttttgccggattattcgacgcgccgggacgttcacaatttgtcctcgcggatcaagcctttgcttttgattttcagcaaaaccaacatgacctgaatctgacctggcagatcaaagacggttactacctctaccgtaaacaggtccgcattacgccggaacacgcgaaaattgccgacgtgcagctgccgcaaggcgtctggcatgaagatgagttttacggcaaaagcgagatttaccgcgatcggctgacgcttcccgtaaccatcaaccaggcgagtgcgggagcgacgttaactgtcacctaccagggctgtgctgatgccggtttctgttatccgccagaaaccaaaaccgttccgttaagcgaagtggtcgccaacaacgcagcgtcacagcctgtgtctgttccgcagcaagagcagcccaccgcgcaattgcccttttccgcgctctgggcgttgttgatcggtattggtatcgcctttacgccatgcgtgctgccaatgtacccactgatttctggcatcgtgctgggcggtaaacagcggctttccactgccagagcattgttgctgacctttatttatgtgcaggggatggcgctgacttacacggcactgggtctggtggttgccgccgcagggttacagttccaggcggcgctacagcacccatacgtgctcattggcctcgctatcgtctttaccttgctggcgatgtcaatgtttggcttgtttaccctgcaactcccctcttcgctgcaaacgcgcctcacgctgatgagcaatcgccaacagggcggctcacctggcggtgtgtttgttatgggggcgattgccggactgatctgttcaccatgcaccaccgcaccgcttagcgcgattctgctgtatatcgcccaaagcgggaacatgttgctggggggcggcacgctttatctctatgcgttgggcatgggcctgccgctgatgctaataaccgtctttggtaaccgcctgctgccgaaaagcggcccgtggatggaacaagtcaaaaccgcgtttggttttgtgatcctcgcactgccggtcttcctgctggagcgagtgattggtgatatatggggattacgcttgtggtcggcgcttggtgtcgcattctttggctgggcctttatcaccagcctacaggccaaacgcggctggatgcgcgtggtgcaaataatcctgctggcagcggcattggttagcgtgcgcccacttcaggattgggcatttggtgcgacgcataccgcgcaaactcagacgcatctcaactttacacaaatcaaaacggtagatgagttaaatcaggcgctcgttgaagccaaaggcaaaccggtgatgttagatctctatgccgactggtgcgtcgcctgtaaagagtttgagaaatacaccttcagcgacccgcaggtgcaaaaagcgttagcagacacggtattacttcaggccaacgtcactgccaacgacgcacaagatgtggcgctgttaaagcatcttaatgtccttggcctaccgacaattctcttttttgacggacaaggccaggagcatccacaagcacgcgtcacgggctttatggatgctgaaaccttcagcgcacatttgcgcgatcgccaaccgtga

SEQ ID NO: 262745 - DNA, 339 bp, Klebsiella pneumoniae
atgcttgatgaaaaaagttcgaataccgcgtctgtcgtggtgctatgtacggcaccggatgaagcgacagcccaggatttagccgccaaagtgctggcggaaaaactggcggcctgcgcgaccttgatccccggcgctacctctctctattactgggaaggtaagctggagcaagaatacgaagtgcagatgattttaaaaactaccgtatctcaccagcaggcactgctggaatgcctgaagtctcatcatccatatcaaaccccggaacttctggttttacctgttacacacggagacacagattacctctcatggctcaacgcatctttacgctga

SEQ ID NO: 262746 - DNA, 1302 bp, Klebsiella pneumoniae
atgctagttgtagaactcatcatagttttgctggcgatcttcttgggcgccagattggggggaataggtattggttttgcaggcggattgggggtgctggttcttgccgctattggcgttaaacccggtaacatcccgttcgatgtcatttccattatcatggcggttatcgccgctatttctgccatgcaggttgctggcggtctggactatctggttcatcagacagaaaagctgctgcgccgtaacccgaaatacatcacgatcctcgcaccgatcgtgacctatttcctgacaatctttgctggtactggcaacatctctctggcgacactgccagttatcgctgaagttgcgaaggaacaaggcgttaaaccttgccgtccgctgtctactgcagtggtatccgcgcagattgcgatcaccgcatcgccaatctcagcggcagtggtttacatgtcttccgtaatggaaggtcatggcatcagctacctccatctgctctccgtggtcatcccgtccaccctgctggcggttctggtgatgtccttcctggtcactatgctgttcaactccaaactctctgacgatccgatttatcgcaagcgtctggaagagggcctggttgaactgcgcggtgaaaagcagattgaaatcaaatccggtgcaaaaacgtccgtctggctgttcctgctgggcgtagttggcgttgttatctatgcaatcatcaacagcccaagcatgggtctggttgaaaaaccgctgatgaacaccaccaacgcaatcctgatcatcatgctcagcgttgcaactctgaccaccgttatctgtaaagtcgataccgacaacatcctcaactccagcaccttcaaagcaggtatgagcgcctgtatttgtatcctgggtgttgcatggctgggcgatactttcgtttccaacaacatcgactggatcaaagataccgctggtgaagtgattcagggtcatccgtggctgctggccgtcatcttcttctttgcgtctgctctgctgtactctcaggctgcaaccgcaaaagcactgatgccgatggctctggcactgaacgtttctccgctgaccgctgttgcttctttcgctgcggtgtctggtctgttcattctgccgacctacccgacgctggttgctgcggtacagatggatgacacgggtactacccgtatcggtaaattcgtcttcaaccatccgttcttcatcccgggtactctgggtgttgccctggccgtttgcttcggcttcgtgctgggtagcttcatgctgtaa

SEQ ID NO: 262747 - DNA, 477 bp, Klebsiella pneumoniae
ttgcgctggttaccttttattgccattttcctttatgtctatattgagatttcaatctttattcaggttgcccatgtattgggggtattgctgaccctcgtgctggttatattcacgtcagttatcggtatgtcactggtacgtaaccagggctttaagaatttcgtgctgatgcagcaaaaaatggcggcgggtgaaaacccagcggcggagatgattaaaagtgtttcgctgatcattgccggtttgctgcttttattaccgggctttttcaccgacttcctcggtcttctgcttttattaccgccggtgcaaaagcatctgacagtgaagttgatgccgcatttgcgcttttctcgcatgccaggcggcggttttagcgccgggaccggtggcggtaatacttttgatggtgagtaccagcgaaaggatgatgaccgcgaccgccttgatcataaagacgatcgccaggattaa

SEQ ID NO: 262748 - DNA, 1257 bp, Klebsiella pneumoniae
atgagtggactcaaacaagaactgggactggcccagggcattggcctgctatcgacgtcattattaggcactggcgtgtttgccgttcctgcgttagctgcgctggtagcgggcaataacagcctgtgggcgtggcccgttttgattatcttagtgttcccgattgcgattgtgtttgcgattctgggtcgccactatcccagcgcaggcggcgtcgcgcacttcgtcggtatggcgtttggttcgcggcttgagcgagtcaccggctggctgtttttatcagtcattcccgtgggtttgcctgccgcactacaaattgcagccggattcggccaggcaatgtttggctggcatagctggcaactgttgttggcagaactcggtacgctggcgctggtgtggtatatcggtactcgcggtgccagttccagtgctaatctacaaacagttattgccggacttatcgtcgcgctgattgtcgctatctggtgggcgggcgatatcaaacctgcgaatatccccttccctgcacctggtaatatcgaacttaccgggttatttgctgcgttatcagtgatgttctggtgctttgtcggtctggaagcatttgcccatcttgcctcggaatttaaaaatccagagcgtgattttcctcgtgctttgatgattggtctgctgctggcaggattagtctactggggctgtacggtagtcgtcttacacttcgacgcctatggtgaacaaatggcggcagcagcatcgcttccaaaaattgtagtgcaactgttcggtgtaggagcgttatggattgcctgcgtgattggctatctggcctgctttgccagtctcaacatttatatacagagcttcgcccgcctggtctggtcgcaggcgcaacataatcctgaccactacctggcacgcctctcttctcgtcatatcccgaataatgccctcaatgcggtgctcggctgctgcgtggtgagcacgttggtgattcatgctttagggatcaatctggacgcacttatcatctatgccaatggcatctttattatgatttatctgttatgcatgctggcaggctgtaaattattgcaaggacgttatcgactactggcggtggttggcgggctgttatgcgttctgttactggcaatggtcggctggaaaagtctctatgcgctgatcatgctggcggggttatggctgtttctgccaaaacgaaaaacgccggaaaatggcataaccacataa

SEQ ID NO: 262749 - DNA, 294 bp, Klebsiella pneumoniae; identical to SEQ ID NO: 2204

SEQ ID NO: 262750 - DNA, 354 bp, Klebsiella pneumoniae
atgcacgtaaaatacttagcagggattgtcggtgccgcgctactgatggcgggttgtagctccagcaacgaattgagtgctgccggtcagagtgtacgcattgtggacgagcagccaggcgcagagtgccagctgattggtactgcgacaggtaagcaaagcaactggctttccgggcaacacggtgaagagggcggttctatgcgcggcgcagcaaacgatctgcgcaaccaggcggctgcaatgggcggtaacgtgatttatggcatcagcagcccgtcgcaggggatgttgtccagttttgtcccgacggatagccagattatcggccaggtatataagtgcccgaactga

SEQ ID NO: 262751 - DNA, 870 bp, Klebsiella pneumoniae
atggccataagcatcaagggtgttaataccggtgttattcgcaagagtaataatttcattgcactggcgctgaaaattaaagagcctcgcaataaagaatcgttgttctttctgtctgtcatggaactgcgcgaccttctgattgcgctggaaagccgtctgcatcaaaagcataaactggatgctgctgcacgccttcagtatgagcaagctcgcgataaagtcattaagaaaatggcagaaaatatcccagaaattctggttgatgagcttaaaaatgccgatattaatcgtcgggttaacacgctggaacttaccgataatcagggtgaaaatcttaccttcgtattaacgctacatgacggtagcaaatgtgagttagtcatcaatgaattgcagattgaaatgctggcgcgagcaatcattcatgcaattaataatgcggaaatgcgtgaactggcattacgtattacctcactgttagatttcctgccgttatacgacgttgactgccaggacaatggcaatctggaatatgacacctattcccaaccggaatggaaacataacttgttcaaccattatctggcggtgctttaccgctttaaagatgaaagtggcaaagaacaatttagcggcgcagtggtgaaaacgcgtgaagcaacgccgggtaaagaagtggaggcgatcactcgccgaatgcttgatttcagcccccgactgaaaaaactcgcgggtgtgccatgtcaggtctatgttcgcaccgtagcggcaaataacgcccaaccgctaacccaggatcaatgcttacgcgcgctgcatcacttacgtgttcaatccaccagcaaaactgcaccacaggcgaaataa

SEQ ID NO: 262752 - DNA, 4617 bp, Klebsiella pneumoniae; identical to SEQ ID NO: 9491

SEQ ID NO: 262753 - DNA, 648 bp, Klebsiella pneumoniae
atgtccgataacgctcaacttaccggtctgtgcgaccgttttcgtggtttttatcctgttgtgatcgatgttgaaacagccggatttaacgccaaaaccgatgcgctgcttgagattgccgccatcaccctgaaaatggatgaacaaggctggctgatgccggacaccacattacatttccacgtcgaaccatttgtcggcgcaaatttgcagccagaggccctcgccttcaacggcattgacccgaacgatcccgatcgcggcgcggtcagcgaatacgaggcgctgcacgaaatttttaaagttgtacgtaaaggcattaaagcgagcggctgtaaccgcgccattatggtggcgcacaacgccaatttcgatcacagctttatgatggccgccgcagaacgcgcctcactgaaacgtaacccgttccaccctttcgccacttttgacactgctgcacttgccgggctggcactcggacaaaccgtattgtcaaaggcttgccagaccgctggcatggacttcgacagcacccaggcgcactccgcgctgtacgacaccgaacgcactgctgtgctgttttgtgaaatcgtcaaccgctggaaacgtctgggaggctggccgctacctgccgccgaagaggtgtaa

SEQ ID NO: 262754 - DNA, 1098 bp, Klebsiella pneumoniae
atgtcatctgaaaaactgtattccccactgaaagtgggcgcgatcacggcggcaaaccgtatttttatggcaccgctgacgcgtctgcgcagtattgaaccgggtgacatccctaccccgttgatggcggaatactatcgccaacgtgccagtgccggtttgattattagcgaagccacgcaaatttctgcccaggcaaaagggtatgctggtgcacctggcatccatagtccggaacaaattgccgcatggaaaaaaattaccgctggcgttcatgctgaaaatggtcatatggccgtacagctgtggcacaccggacgcatttctcacgccagcctgcaacctggcggtcaggcaccggtagcgccttccgcacttagcgcgggaacacgtacttctctgcgcgatgaaaatggtcaggcgatccgtgttgaaacatccatgccgcgtgcgcttgaactggaagagattccgggtatcgtcaatgatttccgtcaggccattgctaacgcgcgtgaagccggttttgatctggtagagctccactctgctcatggttatttgctgcatcagttcctttctccttcttcaaaccatcgtaccgatcagtacggcggcagcgtggaaaatcgcgcacgtctggtgctggaagtggtcgatgcagggattgaagaatggggggccgatcgcattggcattcgcgtttcgccaatcggtactttccagaacacggataacggcccgaatgaagaagccgatgcactgtatctgattgaacaactgggtaaacgcggcattgcttatctgcatatgtcagaaccagattgggcgggaggtgaaccgtatactgatgcgttccgcgaaaaagtacgcgcccgtttccacggtccgattatcggcgcaggtgcatacacggtagaaaaagccgaaacgctgattggcaaagggttaattgatgcggtggcatttggtcgtgactggattgcgaacccggatctggtcgcccgcttgcagcgcaaagctgagcttaatccacagcgtgctgaaagtttctatggcggcggtgcggaaggctacacggattacccgacgctgtaa

SEQ ID NO: 262755 - DNA, 600 bp, Klebsiella pneumoniae
atgaacaaacacaccgaacatgatactcgcgaacatctcctggcgacgggcgagcaactttgcctgcaacgtggattcaccgggatggggctaagcgaattactaaaaactgctgaagtgccgaaagggtccttctatcactactttcgctctaaagaagcgtttggcgttgccatgcttgagcgccattacgccgcatatcaccagcgactgactgagttgctgcaatccggcgaaggtaactaccgcgaccgcatactggcttattaccagcaaacactgaaccagttttgccaacatggaaccatcagtggttgcctgacagtaaaactctctgccgaagtgtgcgatctgtcagaagatatgcgtagcgcgatggataaaggcgctcgcggcgtgatcgttctgctctcgcaggcgctggaaaatggccgtgatagccattgtttaaccttttgtggcgaaccgctgcaacaggcacaagtgctttacgcactatggctgggtgcgaatctgcaggccaaaatttcgcgcaattccgagccactggaaaacgcgctggcacatgtaaaaaccattattgcgacgcctgccgtttag

SEQ ID NO: 262756 - DNA, 897 bp, Klebsiella pneumoniae
atggttcagcgtattactattgcgccgcaaggcccggagttttcccgttttgtgatgggctactggcgattgatggactggaatatgtccgcccgccagctggtcagttttattgaagagcatctggatctcggcgtgaccaccgtggaccatgctgatatttatggtggctatcagtgcgaagcggcgtttggcgaggcactgaaactggcacctcacctgcgtgaacggatggaaatcgtcagtaaatgcggtatcgcgacgaccgcgcgtgaagaaaacgtcattggtcattacatcactgaccgcgatcacatcattaagagcgccgaacagtcgctaattaatctcgcgaccgatcatctggatctgctgttaatccaccgaccagacccgttaatggatgccgatgaagtggcggacgcgtttaaacatctgcatcagagcggcaaagtgcgtcattttggcgtatcgaactttacgcctgcgcaatttgcgcttttgcaatcacgcctgccgtttacccttgccactaatcaggtggaaatatccccggtacatcagccgttactgttggatggcacgctcgaccaactgcaacaactgcgtgttcgtccgatggcgtggtcctgccttggtggtggtcgtctgtttaatgatgattatttccagccgctgcgtgatgaactggctgtggtggcggaggagttaaacgcgggctcgattgaacaggtggtttacgcctgggtattacgtttaccgtcgcagccgctgccaattatcggctcaggtaaaattgagcgcgtacgggcagctgtcgaagctgaaacactgaaaatgacccgtcaacaatggttccgtatccgtaaagcggcattgggttacgacgtaccgtaa

SEQ ID NO: 262757 - DNA, 522 bp, Klebsiella pneumoniae
atgaaacgttttagtctggccattctggcgctggttgttgcgaccggcgcacaagctgccagtgaaaaagtcgagatgaacctcgtcacgtcgcaaggggttgggcagtcaattggtagcgtcaccattactgaaaccgataaaggtctggagttttcgcccgatctgaaagcattaccccccggtgaacatggcttccatattcatgccaaaggaagctgccagccagccaccaaagatggcaaagccagcgccgcggaatccgcaggcgggcatcttgatccacaaaataccggtaaacatgaagggccagaaggtgccgggcatttaggcgatctgcctgcactggtcgtcaataatgacggcaaagctaccgatgccgtcatcgcacctcgtctgaaatcactggatgaagtcaaagacaaagcactgatggtccatgttggcggcgataatatgtccgatcaacctaaaccgctgggcggtggcggtgaacgctatgcctgtggtgtaattaagtaa

SEQ ID NO: 262758 - DNA, 2013 bp, Klebsiella pneumoniae
atgaacgcatcgtcatggtccttgcgcaatttgccctggttcagggccacgctggcgcaatggcgttatgcgttacgcaataccattgccatgtgtctggcgctgacggttgcctattatttaaatctggatgaaccctattgggcgatgacctcggctgccgtggttagctttcccaccgttggcggtgtcatcagcaaaagcctcggacgcatcgctggcagtttgctcggagccattgcggcactgcttcttgccggacatacgctcaatgagccgtggttttttcttttgagcatggcggcgtggcttggcttttgtacctgggcctgtgcgcacttcacgaataatgtcgcgtatgcatttcaactggcgggctacacggctgccatcatcgcctttccgatggttaatattactgaggccagccagctgtgggatatcgctcaggcgcgcgtttgcgaggtgattgtcggtattttgtgcggcggcatgatgatgatgatcctgccgagcagttccgatgctactgcccttttaaccgcattgaaaaacatgcacgcccgattactggaacatgccagtttactctggcagcctgaaacaaccgatgccattcgtgcagcacatgagggggtgattggacagatactgaccatgaatttgctccgtatccaggctttctggagccactatcgttttcgccagcaaaacgcacgccttaatgcgctgctccaccagcaattacgtatgaccagtgtcatctccagcctgcgacgtatgttgctcaactggccctcaccgccatgtgccacacgagaaattctcgaacagctgctgacggcgctcgccagttcgcaaacagatgtttacaccgtcgcacgtattatcgccccgctacgcccgaccaacgtcgccgactaccggcacgtcgccttctggcagcgactacgttatttttgccgcctttatctgcaaagtagtcaggaattacatcgtctgcaaagcggtgtggatgatcataccagactcccacggacatccggcctggctcgtcataccgataacgccgaagctatgtggagcggactgcgtacattttgtacgttgatgatgattggcgcatggagtattgcttcgcaatgggatgccggtgccaatgcattaacgctggcagcaattagctgcgtactctactccgccgtcgcagcaccgtttaagtcgttgtcactactgatgcgcactctggtgttactttcgctattcagctttgtggtcaaatttggcctgatggtccagattagcgatctgtggcaatttttactgtttctctttccactgctggcgacaatgcagcttcttaaattgcagatgcccaaatttgccgcactgtgggggcaactgattgtttttatgggttcgtttatcgctgtcactaatcccccggtgtatgattttgctgattttcttaacgataatctggcaaaaatcgttggcgttgcgctggcgtggttagcgttcgccattttgcgtccagggtcgggtgctcgtaaaagccgtcgtcatattcgcgcgctgcgccgggattttgtcgatcagctaagccgccatccaacactgagtgaaagcgaatttgaatcgctcacttatcatcacgtcagtcagttgagtaacagccaggatgcgctggctcgccgttggttattacgctggggtgtagtgctgctgaactgttctcatgttgtctggcaattacgcgactgggaatcgcgttccgatccgttatcacgagtacgggataactgtatttcactgttgcgcggagtgatgagtgagcgtggcgttcagcaaaaatcactggcggccacacttgaagaattacagcggatttgcgacagccttgcccgccatcatcaacctgccgcccgtgagctggcggcaattgtctggcggctgtactgctcgctttcgcaacttgagcaagcaccaccgcaaggtacgctggcctcttaa

SEQ ID NO: 262759 - DNA, 858 bp, Klebsiella pneumoniae
atgtcaattaaaacaattaagtatttctcaacaatcattgtagcggtagttgcggttcttgccggatggtggctgtggaattattacatgcaatctccgtggacacgcgacgggaaaatacgcgctgaacaggtttctatcacccctcaggtgtcgggacgtattgttgagctgaatataaaagacaaccaactggttaacgcgggggatcttctgctcacgatcgataaaacgccctttcagatcgccgagctgaacgcacaggctcagctggcgaaagcgcaatctgacctcgcaaaagccaataacgaagcgaatcgtcgtcgtcatctctcacaaaattttatttctgccgaagaactcgataccgctaacctcaatgttaaagcgatgcaggccagtgttgatgccgcacaggcgacgctgaaacaggcacaatggcaactggcgcaaacggaaattcgcgccccggtgagtggatgggtgactaacctcactacccgcatcggcgattacgctgacaccgggaaaccgctgtttgcccttgtcgacagccactcgttttacgtcattggttattttgaagaaaccaagttgcgccatatccgcgaaggtgcaccagcacaaattaccctctatagtgataacaaaacgttacagggtcacgtttccagtatcggtcgggcgatttatgatcagagcgttgaaagtgactcaagccttattccggatgtgaaacctaacgtcccctgggttcgacttgcccaacgcgttcccgtccgctttgcgctggataaagtcccaggcgatgtcacgctggtgtcgggcaccacctgtagcattgccgtaggtcaataa

SEQ ID NO: 262760 - DNA, 237 bp, Klebsiella pneumoniae
gtgaagtttatgctcaatgcaacaggattgcccttacaagatctggtgttcggtgcgtccgtctactttcctccgtttttcaaagccttcgcgtttggattcgtcatctggcttgtcgtacaccgcctgcttcgtggctggatctacgccggtgacatctggcatcccttgttaatggatttatcgctgtttgcgatttgcgtttgccttgccctggcaatactgattgcgtggtaa

SEQ ID NO: 262761 - DNA, 435 bp, Klebsiella pneumoniae
ttggaatcgccactaggttctgatctggcacggttggtgcgcatatggcgtgctctgatagaccatcgcctgaaaccgctggagttaacacaaacccattgggttacgttacacaatatccatcagttacctccagaccagtcgcaaattcaactggcaaaagcgattggcatcgagcagccatcactggtccgtactctggaccaactggaagaaaaagggttaatttcgcgtcaaacttgtgccagcgatcgtcgggctaaacgtattaaactgacggaaaaggcagagccgctgatcagcgaaatggaagctgttattaacaaaacccgcgcggaaattttacatggcatctccgcagaggaactggaacaactgattaagctcatcgcaaaacttgagcataatatcattgagttacaggccaaagggtga

SEQ ID NO: 262762 - DNA, 468 bp, Klebsiella pneumoniae
atgattaaacgcgtattggttgtttcaatggtaggtctgtctcttgtcggttgtgttaataacgacaccctgtcaggggatgtttataccgcttctgaagcgaaacaagtacagaatgtcagctatggcaccatcgttaacgtacgtccggtacagattcagggcggtgatgattccaacgttatcggcgcaattggcggtgctgttcttggtggtttcctggggaatactgttggtggcggaaccgggcgttctctggctactgcagcaggtgctgttgcaggtggcgtagccggtcagggcgtacagagtgcaatgaacaaaacgcagggtgtcgagctggaaattcgtaaagacgatggtaataccatcatggtggtacagaaacaaggcaacactcgtttctctccgggccaacgtgtcgtactggccagcaatggcagtcaggtgaccgtttccccgcgctaa

SEQ ID NO: 262763 - DNA, 324 bp, Klebsiella pneumoniae
atgaaaaaactgttactgatctgtttgccggtccttctcaccggctgtagcgcgttcaatcaactggttgagcgcatgcaaaccgatacgctggaataccagtgtgatgaaaaaccgttgacggtcaaactgaataatccgcgccaggaagtcagttttgtttacgataatcaactactgcatctcaaacagggcatttctgcgtctggtgcacgttacaccgacgggatctatgttttctggtcgaaaggcgaggaagcgactgtctataaacgcgaccgcatcgtcttgaataactgtcagttacaaaatccacagcgttga

SEQ ID NO: 262764 - DNA, 549 bp, Klebsiella pneumoniae
atgcaatttaatatccctacgttgcttacactgttccgtgtcatccttatcccattctttgtattggtcttttatttgcctgtcacctggtcgccgtttgccgccgcgctcattttctgcgtcgcggcggtgactgactggttcgatggttttctggcacgccgctggaatcagagtacccggtttggtgctttccttgaccctgtcgcagataaagttctcgtggctatcgccatggtgctggtaaccgagcattaccacagctggtgggtgaccttaccggcagcaacgatgatcgcccgtgaaattattatttctgcgctacgcgaatggatggcggagttgggtaaacgcagtagcgtggctgtctcctggattggaaaagtgaaaaccactgcccagatggtggcgttggcatggctgctgtggcgtccgaatatttgggttgagtacgccggtattgcacttttctttgtggctgcggtactgactctgtggtcaatgttgcaatatttgagcgctgcgcgtgcagatttgcttgatcagtga

SEQ ID NO: 262765 - DNA, 1767 bp, Klebsiella pneumoniae
atgtatgatgctggtggtacggttatctatgtcggcaaagcgaaagacctgaaaaaacggctttccagctatttccgtagcaacctcgcttcgcgcaaaaccgaagcgctggtcgcccagatccagcaaattgatgtaacggttactcatacagaaaccgaagcgctgttactggaacacaactacatcaaactttatcagccgcgttacaacgttttgctacgcgatgataaatcatatccttttatcttcctgagtggcgatacccacccgcgtctggcgatgcatcgtggagcgaagcatgccaaaggtgaatatttcggcccgttcccgaatggctatgccgtacgtgaaacactggcgctactgcaaaagattttccccattcgccagtgcgaaaacagtgtttatcgcaaccgctcgcgtccgtgtctgcaatatcagatagggcgctgtctggggccgtgcgttgaaggactggtgagtgaagaagaatacgctcagcaggtcgagtatgtgcgcctgtttttgtctggcaaagatgatcaggtgcttacgcaactcattagtcgtatggaaactgccagccagaatctggagtttgaagaagcggcgcggattcgcgaccaaattcaggcggtgcgacgtgtcaccgaaaaacagtttgtttccaataccggcgacgaccttgacgttattggagtggcgttcgatgcgggtatggcttgtgtccacgtattgttcattcgtcagggcaaagtgctcggcagccgcagctatttcccgaaagtgcctggcggtacggaactgagcgaggtggtggaaaccttcgtaggtcagttctatttacaaggcagccagatgcgcaccttaccgggtgagatcctgctcgattttaatcttagcgataaaacgctgctcgccgattccctttcagaactggcgggacgcaagattaatgttcaaaccaaacctcgtggcgatagagcgcgttatctgaaactcgcgcgtaccaatgcggcgacggccttaaccagcaaactttcgcagcaatctaccgttcaccagcggctgaccgcgcttgccagcgtgttgaaattgccggaagtgaagcggatggagtgctttgacatcagccataccatgggtgaacaaaccgtcgcttcctgtgtggtgtttgatgccaacggcccgctgcgtgcggagtatcggcgctataacattactggcatcacgccgggcgatgattacgcggcgatgaatcaggtgctgcgtcggcgttatggtaaagctatcgacgacagtaagatcccggatgtgatccttattgacggcggcaaaggccagcttgcgcaggcgaaaaatgttttcgccgaactggatgtctcatgggataaaaatcatccgctgctacttggcgttgccaaaggagcagatcgtaaggctgggctggaaacgctgttctttgagccggaaggtgagggatttagtttgccgccagattctcccgcgctgcatgttatccagcatattcgcgatgaatcacacgatcacgcgattggcgggcaccgtaaaaaacgggcgaaggtcaaaaataccagttccctggaaaccattgaaggcgtcgggccaaaacgtcggcaaatgttgttgaaatatatgggcggtttgcaaggtttacgtaacgccagcgtcgaggaaattgcaaaagtgccgggtatttcgcaaggtctggcagaaaagatcttctggtcgttgaaacattga

SEQ ID NO: 262766 - DNA, 225 bp, Klebsiella pneumoniae; identical to SEQ ID NO: 1574

SEQ ID NO: 262767 - DNA, 723 bp, Klebsiella pneumoniae
atgcaggatacggattttttcagctggcgtcgcacgatgctgttgcgttttcagaggatggaggccgcagaagaggtctaccatgaaatagagcttcaggctcagcagctggagtacgattactattcgttatgtgttcgccacccggtaccattcacgcgacctaaagtggctttctacaccaattaccctgaggcgtgggttagttattatcaggcaaaaaactttctcgcaattgatccggtgctgaaccctgaaaactttagtcagggccatctaatgtggaatgatgacttattcaacgaagcacagccgttatgggaagccgcgcgcgcacatggtttacgccgcggtgtcactcagtatttaatgctgccaaaccgggcgctgggctttttgtccttttcccgttgcagcgcgcgcgaaatacccattcttagtgatgaactgcaattaaaaatgcagttactggtgcgcgaaagtctgatggctctgatgcgtttaaatgatgaaatagtgatgacgccagagatgaatttcagcaagcgcgaaaaagaaattctgaggtggacggcggaagggaagacatcagcagagatagcgatgattttgtcaatctctgagaatacggtcaatttccatcagaaaaacatgcagaaaaaaatcaatgcaccgaataagacccaggttgcctgttacgcggccgctactggcttaatttga

SEQ ID NO: 262768 - DNA, 987 bp, Klebsiella pneumoniae
atgccactgcataatttaacccgttttccacggctggagtttattggcgcgccaacgccgctcgaatatctgccgcgcttttctgattatcttggacgggaaattttcatcaaacgggatgacgtcactcccatggcaatgggcggcaataaattacgtaagctggaatttctcgcggcagatgctctgcgtgaaggtgccgatacgctgattactgccggggcgatccagtctaaccatgtgcgccagactgccgcagtcgctgcgaaactcggtctgcactgcgtggcgctgctggaaaatcctattggtacaaccgcggaaaactatttaaccaacggcaatcgtttgttgctggatctgttcaatacccagattgaaatgtgcgacgcactgaccgatcccaatgcccaactggaagagctggcgacgcgagtcgaagcacaaggctttcgcccgtatgtcattccggttggcggttctaatgctttgggcgcgctgggttatgtggagagtgcgctggaaatcgcgcaacattgtgaagtggcggttaatatttcgtcggtggtggtcgcatcgggcagtgccggaactcacgccggactggctgttgggctggaacagctgatgcctgaaagcgaactgattggcgtgactgtgtcgcgttcagttgccgatcaattgccgaaagtggttaacctccaacaggcgattgcgaaagaactggagctgaccgcatcagcggaaattttactctgggatgactattttgcacctggctacggcgtgccgaacgacgaaggcatggaagcagtgaaattgctggcgaggctggaaggcattctgcttgatcctgtgtataccggaaaagcgatggcggggctgattgacggtatcagtcagaaacgcttcaaagatgaagggccgattttgtttattcataccggcggtgcgcctgcgctgttcgcctatcatccccacgtttag

SEQ ID NO: 262769 - DNA, 858 bp, Klebsiella pneumoniae
gtgtttacaaacaatggctctacactgcaaacagacataacaacattcggggtgaatatgaaattagcacatctgggacgtcaggcattgatgggtgtgatggccgtggcgctggttgcgggtatgagcgttaaaagttttgcagatgaaggtctgcttaataaagtcaaagagcgcggcacgctgctggtagggctggaaggaacttatccgccgttcagttttcagggggatgacggcaaattaaccggttttgaagtggaatttgcccaacaactggcaaaacatcttggcgttgaggcgtcactaaaaccgaccaaatgggacggtatgctggcgtcgctggactctaaacgcattgatgtggtgattaaccaggtcaccatttctgacgagcgcaagaaaaaatacgatttctctaccccgtacaccatttctggtattcaggcgctggtgaaaaaaggcaacgaaggcaccattaaaacggctgatgatctgaaaggcaaaaaagtgggtgtcggtctgggcaccaactatgaagagtggctgcgtcagaatgttcagggcgtcgatgtgcgtacctatgatgatgacccgaccaaatatcaggatctgcgcgtaggccgtatcgatgcgatcctcgttgatcgtctggcggcgctggatctggtgaagaaaaccaacgatacgctggcagtaaccggtgaagcattctctcgtcaggagtctggcgtggcgctgcgtaaaggaaatgaagacctgctgaaagcggtgaatgatgcaattgcggaaatgcaaaaagatggcactttgcaagccctttccgaaaaatggtttggtgctgatgtgaccaaataa

SEQ ID NO: 262770 - DNA, 552 bp, Klebsiella pneumoniae; identical to SEQ ID NO: 7501

SEQ ID NO: 262771 - DNA, 720 bp, Klebsiella pneumoniae
gtgaattcactctataccgctgaaggtgtaatggataaacactcgctgtggcagcgttatgtcccgctggtgcgtcacgaagcattgcgcctgcaggttcgactgcccgcgagcgtggaacttgacgatctgctacaggcgggcggcattgggttacttaatgccgtcgaacgctatgacgccctacaaggaacggcatttacaacttacgcagtgcagcgtatccgtggcgctatgctggatgaacttcgcagccgtgactgggtgccgcgcagcgtgcgacgcaacgcgcgtgaagtggcacaggcaatagggcaactggagcaggaacttggccgcaacgccacggaaactgaggtagcggaacgtttagggatcgatattgccgattatcgccaaatgttgctcgacaccaataacagccagctcttctcctacgatgagtggcgcgaagagcacggcgatagcatcgaactggttactgatgatcatcagcgagaaaacccgctacaacaactgctggacaataatctgcgccagcgggtgatggaagccatcgaaacgttgccggagcgcgaaaaactggtattaaccctctattatcaggaagagctgaatctcaaagagattggtgcggtgctggaggtcggggaatcgcgggtcagtcagttacacagccaggctattaaacggttacgcactaaactgggtaagttataa

SEQ ID NO: 262772 - DNA, 1050 bp, Klebsiella pneumoniae
atggcacaagtcattaataccaacagcctctcgctgatcactcagaacaacatcaacaaaaaccagtctgcgctgtcgacttctatcgagcgcctctcttctggtctgcgtattaacagcgctaaagatgacgccgcgggccaggcgattgctaaccgctttacttctaacatcaaaggtctgactcaggccgcacgtaacgccaacgacggtatttctctggcgcagacggctgaaggcgcgctgtcagagattaacaacaacttgcagcgtattcgtgaactgaccgttcaggcctctaccggcacgaactctgattccgacctgtcttctattcaggacgaaatcaaatcccgtcttgatgaaattgaccgtgtatctggtcagacccagttcaacggtgtgaacgtgctgtcgaaaaacgattcgatgaagattcagattggtgccaatgataaccagacgatcagcattggcttgcaacaaatcgacagtaccactttgaatctgaaaggatttaccgtgtccggcatggcggatttcagcgcggcgaaactgacggctgctgatggtacagcaattgctgctgcggatgtcaaggatgctgggggtaaacaagtcaatttactgtcttacactgacaccgcgtctaacagtactaaatatgcggtcgttgattctgcaaccggtaaatacatggaagccactgtagtcattaccggtacggcggcggcggtaactgttggtgcagcggaagtggcgggagccgctacagccgatccgttaaaagcactggatgccgcaatcgctaaagtcgacaaattccgctcctccctcggtgccgttcaaaaccgtctggattctgcggtcaccaacctgaacaacaccaccaccaacctgtctgaagcgcagtcccgtattcaggacgccgactatgcgaccgaagtgtccaacatgtcgaaagcgcagattatccagcaggcgggcaactccgtgctgtctaaagccaaccaggtaccgcagcaagttctgtctctgttacaaggctaa

SEQ ID NO: 262773 - DNA, 1416 bp, Klebsiella pneumoniae
atggctagtatttcaacgcttggggttgggtcggggctggacttaagcagcatccttgacagtctggaggcggcagaaaaatctaccctgacgccgatatcaaaacagcaaagctcttacaccgcgaaactgagcgcctacgggacgctgaaaagtgcactagagagtttccagacagccaacacagcactgaataaagccgatttatttaccgccacctcaaccaccagcagttcatcggctttcagcgccaccaccacgggcagcgcgattgctgggaaatacaccattagcgttagccaactggcgcaggcacagacgctgacaacaaaaaatagtcaaaaagacagtaaagccgccatcgccaccagcgatagcgtactgaccatccaacaaggcggcggtaaagatccggtcacgattgatatcagcgcgggtaactcgtcactttccggcattcgcgatgccattaacaacgccaaagctggtgtcagcgccagtatcatcaatgtgggaaacggcgaatatcgtctgtccatcaccgctaacgatacgggcagcaataacgctatgaaacttagcgtcagcggcgacagcgccctggaaagttttatgggttacaacggaacgccgggtgatagcagcaatggcatgattgaaagcgtcaccgcgcaaaacgccaaactgacagtcaataacgttgagattgaaaacagcagtaacactatcagcgactcactggaagatatcaccctcaacctgaatgacgtcaccaccggtaatcagacactgaccatcagtaaagacacatccaaagctgaaaattcggttaaagcgtgggtggatgcctataacacattgcaggatacattcagcagcttaaccaaatacaccgctgtcgatgccggagctgaaagtcaggactccagtaatggcgcattactcggtgactccacactgcgtaccatccagactcagcttaaaaccttgctcgccaatactcacagcagttcaaactataaaacgctggcacagattggcattaccagcgatgccagtaccggcaagctggaaatcgcgaccgacaaactgcaaacggcgctaaaaaatgatgccgctggtatcggtgaaatgtttataggtgacggcaaaagtactggggtaaccaccggcattagtagcaacctgaccagttggctctcttccaccgggataatccaggcagcaaaagatggcgtcagcaaaacgctgaataatttgaccgaccagtacaacgcagccagtgaacgtatcgataccttaatgacgcgctataaagcccagttcacccaattagatgtgttaatgaactcgctgaactccactagtagctatctgacacagcagttcgacacctcaaatagcaactcgaaataa

SEQ ID NO: 262774 - DNA, 411 bp, Klebsiella pneumoniae
atgtacgcggcaaaaggcacccaggcctatgcacaaattggcgtcgaaagcgccgtaatgagcgccagccaacagcagttggtcaccatgctatttgatggagtgttgagcgcactggttagagcgcgcctgtttatgcaggacaacaatcagcaaggcaaaggcgtctctttgtcaaaagcgatcaacatcattgagaacggactgcgggtgagtcttgatgaagagagcaaagacgaactaacccaaaacttgattgctctttatagctatatggtcaggcgtttgctgcaagccaatttacgcaacgatgtctccgcagtcgaagaagtggaagcattaatgcgcaatattgccgatgcctggaaagagtctttactctccccttctttgattcaggacccagtctga

SEQ ID NO: 262775 - DNA, 366 bp, Klebsiella pneumoniae
atgaacaatgcaccgcatttgtatttcgcctggcaacaactcgtcgaaaaaagccagctcatgttacgcctggcaacggaagaacaatgggacgaactcatcgccagcgaaatggcgtatgtgaatgcggtgcaggagatcgcacacctgactgaagaggttgccccgtccactacgatgcaggagcagctccgcccgatgctgcgcctgattctcgacaacgaaagcaagataaagcagttattacagattcggatggatgaactggcgaaactggtcggtcagtcatcggtgcaaaaatcggtgttaagtgcctatggcgatcagggcggctttgtgctggctccgcaggataacctcttttga

SEQ ID NO: 262776 - DNA, 1488 bp, Klebsiella pneumoniae
atgcgtaatcccacgctgttacaatgttttcactggtattacccggaaggcggtaagctctggcctgaactggccgagcgcgcagacggttttaatgatattggtatcaatatggtctggttgccgcccgcctataaaggcgcatcgggcggctattcggtcggctacgactcctatgatttatttgatctaggtgagtttgatcagaaaggcagcatccctactaaatatggtgataaagcacaactgctggccgccattgacgccctgaaacgtaatgacattgcggtgctgctggacgtggtagtcaaccacaaaatgggcgcggatgaaaaagaagctattcgcgtgcagcgtgtaaatgctgatgaccgtacgcaaattgacgaagaaatcattgagtgtgaaggctggacgcgttacaccttccccgctcgtgccgggcaatactcgcagtttatctgggatttcaaatgttttagcggtatcgaccatatcgaaaaccctgatgaagatggcatttttaaaattgttaacgactataccggagaaggctggaacgatcaggttgatgatgaactcggtaatttcgattatctgatgggggagaatatcgattttcgcaatcatgccgtgacggaagagattaaatactgggcgcgctgggtgatggaacaaacgcaatgcgacggctttcgtcttgatgcggtcaaacatattccggcatggttttataaagagtggatcgaacacgtacaggaagttgcgccaaagccgttgtttattgtggctgaatactggtcgcatgaagtcgataaactgcaaacgtatattgatcaggtggaaggcaaaaccatgctgtttgatgcgccgctgcagatgaaattccatgaagcatcgcgcatgggtcgcgactacgacatgacgcagatcttcactgggacgctggtggaagccgatccttttcacgccgtaaccctcgttgccaaccacgacacccaaccgttgcaagccctcgaagcccccgtcgaaccgtggtttaaaccgctggcgtatgccttaattttgttgcgggaaaatggcgttccttcggtgttctatccggacctctacggtgcacattacgaagatgtcggtggtgacgggcaaacctatccgatagatatgccaataatcgaacagcttgatgagttaattctcgcccgtcagcgtttcgcccacggtgtacagacgttatttttcgaccatccgaactgcattgcctttagccgcagtggcaccgacgaatatcccggctgcgtggtggtcatgtcgaacggagatgatggcgaaaaaaccattcatctgggagagaattacggcaataaaacctggcgcgattttctggggaaccggcaagagagcgtagtgacagacgaaaacggcgaagcgaccttcttttgcaacggcggcagcgtcagcgtgtgggttatcgaagaggtgatttaa

SEQ ID NO: 262777 - DNA, 414 bp, Klebsiella pneumoniae
atgaaaaaactcgcaattgcaggtgcgctcatgttgctggcgggctgtgccgaagtcgaaaactataacaatgtcgtgaaaacccccgcgccggactggctgacgggttactggcagaccacagggccgcaacgtgcgttggtcagtccggaagcgataggcagcctcattgtcactaaagagggcgataccctggattgccgtcagtggcagcgggtgattgccgtgccgggtaagttgacattgatgtctgatgatctcactaacgttaccgtaaaacgtgagctgtacgaggttgagcgtgacggtaacaccattgagtacgatggtatgacgatggagcgtgtggatcgcccgacggcagagtgtgccgccgcgctggataaagcgccgttaccgacgccactgccgtaa

SEQ ID NO: 262778 - DNA, 1206 bp, Klebsiella pneumoniae
atgtcatggcagcaattcaaacacgcctggttgattaaattctgggcgcccatccccgcggtcatcgcggcgggtattctctccacttactattttggcatcactggcaccttttgggcagtcacgggtgaatttacccgttggggcggtcagctcctgcagttgttcggcgtccatgctgaagagtggggttattttaaaattatccatctggaaggatcgccattaacccgcatcgacggaatgatgatcctcggtatgtttggcggctgttttgccgcagcgctgtgggccaacaatgtcaaactgcgcatgccgcgcagccgtatccgcattatgcaggccatcattggcggtattatcgccggttttggcgcacgtctggcaatgggctgtaacctggcggcgttctttaccggaattccacagttctcgctgcacgcctggttctttgccatcgccactgccattggttcatggtttggcgcgcgctttacccttctgcccatcttccgtattcccgtgaaaatgcagaaagtttctgctgcctcaccgttgacgcaaaaaccggatcaggcgcggcgtcgttttcgtctcgggatgctggtctttttcggcatgctgggctgggcgctgctgacggcgatgaaccagcccaaactggggctggcaatgctgtttggcgtcggctttggtttactgattgaacgtgcgcaaatctgctttacttcggcgttccgcgatatgtggatcaccggacgtacccatatggcgaaagcaatcattatcggtatggcggtaagtgccatcgggatcttcagttacgtacagttaggcgttgaacccaaaatcatgtgggcgggaccaaacgcggtaattggtggtttactgtttggttttggcatcgtgctggcaggcggctgcgaaaccggctggatgtaccgcgcggtagaaggccaggtgcactactggtgggtcggtctgggcaacgtgatcggctcaacgattctggcgtactactgggatgatttcgctccggcgctggccaccgactgggacaaaatcaacctgctgaaaacctttggcccgatgggcggcctgctggtgacatatttgctgttgtttgctgctctaatgttgattattggctgggaaaaacgcttcttccgccgtgcggcaccgcagactgctaaggagatcgcatga

SEQ ID NO: 262779 - DNA, 234 bp, Klebsiella pneumoniae
atgaaaaatatcgttcctgattaccgtcttgatatggtgggtgaaccctgcccttatccggcagtcgcaacccttgaggcgatgccgcagttaaaaaaaggggagatcctggaagtggtgagcgactgtccgcagtcgatcaataatattccactggatgcgcgtaatcacggctatacggtgctggatattcagcaagacgggccgaccattcgttatttaattcagaagtaa

SEQ ID NO: 262780 - DNA, 528 bp, Klebsiella pneumoniae
atggcaggaaaaacgatgataccgttactcgcctttgccgcgtggagcggcactggaaaaactacgcttttgaaaaaactgatcccggcattatgcgccagagggatccgtccagggctgattaagcatacgcaccatgatatggatgttgataaaccgggcaaagatagctatgagctgcgaaaggctggcgcggcacaaaccatcgttgccagccagcagcgatgggccttgatgacggaaacaccagacgaagaagagctggatctacattttctcgcaagtcgaatggatacctcaaagctggatttgattctggtcgaagggtttaagcatgaagagatcgcaaagattgtgctgtttcgcgatggagccggacatcgaccggaagaattagtgatagacagacatgttattgctgtagccagtgatgtgtcacttaatcttgatgtcgcgttactggatattaatgatgttggggggctggctgattttgtggtggagtggatgcaaaagcagaacggataa

SEQ ID NO: 262781 - DNA, 585 bp, Klebsiella pneumoniae
gtgaatctgatgacgacgataacaggcgttgtgctggcgggcggtaaagccagacgaatgggcggcgtagataaaggattgcttgaattaaacggcaaaccgctgtggcaacatgtcgctgacgcgcttatgacgcagctctcgcacgtcgtggttaatgccaatcgtcatcaggaaatctatcaggcaagcggtctgaaagtgattgaagattcactggcggattacccaggccctctggcaggaatgctttcagtaatgcagcaggaaacgggggagtggtttttgttttgtccgtgcgatacgccttacattccccctgatttagcagcccggcttaaccatcagcgcaaagaggcacctgtcgtgtgggtccacgacggtgaacgcgatcacccgacgattgctctggtaaaccgcgcaattgagcctttattactggaatatctgcaagcaggagaacgccgagtaatggcatttatgcgtctggctggcggtcatgcggttgatttcagcgataataaagatgcatttattaacgtgaatacgccagaggagcttgcccgatggcaggaaaaacgatga

SEQ ID NO: 262782 - DNA, 270 bp, Klebsiella pneumoniae
atgaaatgtaaacgtctgaatgaagttattgaactcctccagccagcctggcaaaaagagccagaccttaacctgctgcaatttttgcagaaactggcgaaagagtcaggttttgacggcgaactggcggatttgacggatgacattctgatctatcatctgaaaatgcgtgattccgcgaaagatgcggttatcccgggtttgcaaaaagattatgaagaagatttcaaaacggcgctgttacgcgctcgcggcgtaattaaagagtaa

SEQ ID NO: 262783 - DNA, 987 bp, Klebsiella pneumoniae
atgaacaacagcgcttttactttccagacactacacccggataccatcatggatgctctatttgagcaagggatccgggtggattccggtcttaccccgcttaacagctatgaaaaccgtgtctatcaatttcaggacgaagatcgtcgacgttttgtcgtcaaattttatcgccctgaacgttggacagccgaccaaatcctcgaagaacatcagtttgcgttgcagctggtaaatgatgaagttccggtcgcagcacctgtggcctttaacggtcagactttattgaatcatcagggattttatttcgctgtttttccaagcgtcggtggtcgccagttcgaagctgataatatcgatcagatggaagcggttgggcgttatttagggcgtatgcaccagacggggcgcaaacagctttttatccatcgcccgaccatcggtctgaatgaatatctcattgagcctcgcaagctgtttgaggacgctacactgataccttccgggttgaaagcggcatttctgaaagcgacagatgagctgatcgccgccgttacagcacactggcgggaagatttcaccgttctgcggctacatggagactgccacgctgggaatattctctggcgcgatggtccaatgtttgttgatctggatgatgcacgtaatggtccagccgttcaggatttgtggatgttgctcaatggcgataaagccgagcagcggatgcaactggaaactattattgaagcttatgaagaatttagcgagttcgacaccgctgaaatcggactgattgaacctttacgcgccatgcgtttggtttattatcttgcctggctaatgcggcgttgggctgatcccgcgttcccgaaaaatttcccgtggttaaccggggaagattactggctgcgacagacggcgacttttatagaacaggcaaaagttctacaagaaccccctttgcaattaacacctatgtattaa

SEQ ID NO: 262784 - DNA, 627 bp, Klebsiella pneumoniae
atgaaaaagatttggctggcgctggctggtttagttttagcgtttagcgcatcggcggcgcagtatgaagatggtaaacagtacactaccctggaaaaaccggtagctggcgcgccgcaagtgctggagtttttctctttcttctgcccgcactgctatcagtttgaagaagttctgcatatttctgataacgtgaagaaaaaactgccggaaggcgtgaagatgactaaataccacgtcaacttcatgggtggtgatctgggcaaagatctgactcaggcatgggcagtggcgatggcactgggcgtggaagacaaagtcactgttccgctgtttgaaggcgtacagaaaacccagactattcgttcagcatctgatatccgcgatgtatttatcaacgcaggtattaaaggtgaagagtacgacgcggcatggaacagcttcgtggtgaaatccctggtcgctcagcaggaaaaagctgcagctgacgtgcaattgcgtggcgttccggcgatgtttgttaacggtaaatatcagctgaatccgcagggtatggataccagcaatatggatgtttttgttcagcagtatgctgatactgtgaaatatctgtccgagaaaaaataa

SEQ ID NO: 262785 - DNA, 1431 bp, Klebsiella pneumoniae
atgatacgtaagtcagctacaggtgttattgttgcgtttgccgtaatctggggtggtggcacatggtacacaggtacgcaaattcagcctggtgtcgaaaagttcattaaagattttaacgatgctaaaaagaaaggtgaacatgcctacgatatgacgttaagttataaaaactttgacaaaggcttttttaattctcattttcaaatgcaaataacatttgataacggtgcacccgatctcaatatcaagccaggccagaaagttgcatttgatgtggatgttgagcacggtccgttgcccatcacaatgttaatgcgtggtaatgtcatccccgcactggcagcggcaaaagtgaacttagtgaataatgaactgacacaaccgctatttatcgccgcgaaaaataaatcgcccgtggaagcgacattgaggttcgcgtttggtagctcattctccacgacattagatgttgcccctgcagagtatggaaagttttcctttggtaagggccagtttacttttaatggtgatggtagttcattgtctaacctggatattgaaggcaaagtcgaagatattgttctgcaattatcaccaatgaacaaagtaacggcgaaaagctttaccattgattctctggcgcgattagaagaaaagaaatttccggttggtgaaagcgagtcgaaatttaatcagattaacattatcaatcacggggaagacgttgcccaaatcgatactttcgttgcaaaaaccaggctggatcgcgttaaagacaaagattatatcaatgtcaatctgacctacgaacttgataagttaacaaaagggaatcagcaactcggtagtggtgagtggtcattgattgctgaatctattgatccttcagcggtgcgccaatttatcatccagtataacattgcgatgcagaagcagcttgctgcacaccctgagttagcaaacgatgaagttgctctgcaagaagtgaatgctgcattgttcaaagagtatttaccgttattacaaaaaagtgagccgaccattaaacaaccggtaagatggaagaacgcactcggcgaactaaatgccaatctggatatcagtattgccgacccagccaaatcctcatcatccacaaacaaagatattaaatcgctcaattttgatgtgaagttaccgcttaatgtcgtcacagaaaccgcaaaacagcttaatttatctgaaggaatggatgctgaaaaagcgcaaaagcgggctgataaacaaatcagcgggatgatgacattaggtcagatgtttcagttaatcacgattgacaacaataccgcctcgctgcaactgcgttatacaccgggtaaagttgtttttaacggacaggaaatgagcgaagaagaatttatgtctcgtgccggacgttttgttcattaa

SEQ ID NO: 262786 - DNA, 933 bp, Klebsiella pneumoniae
atggctaactttttgaataaattcattatgacgagaatactcgctgcgataacccttttgctgagtatcgtattgaccattttggtcactattttttgctccgtcccgatcatcattgccgggattgtaaaactattgcttcctgtgccagtcatttggcgaaaggtttcgcgtttttgtgattttatgatgtattgctggtgcgaaggtctggcggtattactgcatctgaacccacacctgcaatgggaagttcacgggctggaagggttaagtaagaagaactggtatctgcttatttgtaaccaccgtagttgggcagatattgtcgtactgtgcgtgctgtttcgtaagcacattccgatgaataaatatttcctcaagcagcagctggcctgggtgccttttcttggcctggcgtgctgggcgctggatatgccgtttatgaagcgttattcccgcgcttatttattacgtcatccggagcgacgtggtaaagatgtcgaaaccactcggcgttcttgtgaaaagtttcgcctgcatcccaccaccattgtcaatttcgttgaaggctcccgtttcacgcaagaaaaacatctgcaaacccactccacttttcaaaacttgttgccaccaaaggcggcaggcattgcgatggcgctaaatgtactgggtaaacaattcgataaactgcttaatgttacgctgtgttatccggacaataaccgtcagccgttcttcgatatgttaagcggtaaactgacgcgaattgtcgtacatgtggatttgcagcctatttccgatgagttacatggcgactacatcaatgacaaaagctttaagcgccattttcagcaatggctgaactcactgtggcaggaaaaagaccgacttctgacgtcgttgatgtcatcacagcgtcagaataagtaa

SEQ ID NO: 262787 - DNA, 186 bp, Klebsiella pneumoniae
atgagtttttcaccgcttttcgtgaaaatcttttgtagatcttctggatcgctcgcaaatcgtcatgtggataactttgtgcataaattatttacatcgcttttaatttattatcatgctttttacagcatgatgtttgtctttgtttttcatgaagttaaaaataagaccatccctaataattga

SEQ ID NO: 262788 - DNA, 633 bp, Klebsiella pneumoniae
ttgactaatttgaattatcaacagacgcattttgtgatgagtgcgcctgatattcgccacctaccttccgataccggaattgaagtggcttttgcaggccgttccaacgcaggtaaatccagcgcgctgaacacgctgactaaccagaaaagcctggctcgtacctcaaaaaccccagggcgcacccagcttatcaacctgtttgaagtggctgacggcaagcgtctggttgacctgcccggctatggctacgcggaagtcccggaagagatgaagcgcaaatggcaacgcgcgctcggcgaatacctcgaaaaacgtcagagcctgcaaggtctggtggtgctaatggatattcgccatccgctgaaagatttggatcaacagatgattgagtgggcggtagacagcaatatcgccgtgctggtgctgctgaccaaagcggacaaactggcaagcggcgcacgtaaagcgcaattgaatatggtgcgtgaagcggtgctggcgtttaacggtgatgtgcaggttgaaacgttctcttcactgaagaaacaaggcgtggacaagctgcggcagaaactggatacctggtttagcgagatgcagcctgtagaagaaacgcaggacggcgaataa

SEQ ID NO: 262789 - DNA, 510 bp, Klebsiella pneumoniae
atgaaaccatcatcttcaaactcacgcagcaaaggtcatgcaaaagcgcgtcgaaaaacacgcgaggagctggatcaggaagctcgtgaccgtaagcgtcagaaaaaacgtcgtggtcatgcgccgggcagccgcgcagcgggcggtaacaccacgtcaggcagtaaaggccagaacgcaccgaaagatccacgtattggcagtaaaacccctattccattgggcgtgactgaaaaagtcaccaaacagcacaaaccgaagagtgagaaacctatgctttcaccgcaggcggagttggagttactggaaacggatgagcgtctggatgcgctgctggaacgtctggaagcaggcgaaaccctgagcgccgaagagcaatcctgggtggatgccaaactggatcgtattgatgagttgatgcagaaactcggcctctcttatgacgatgacgaagaagaggaagaagacgagaagcaagaagacatgatgcgtctgctgcggggcaactaa

SEQ ID NO: 262790 - DNA, 804 bp, Klebsiella pneumoniae
atgcatgaaataaccctacttcagggattatccctggcggcgttagttttctttctggggattgatttttggctggaagccttatttttattccgcccgataatcgtttgtaccctaactggcgctattctcggtgatattcagactggcttaattaccggtggcctgacagagttggctttcgccggattaacccctgcaggtggtgttcagccgcccaacccgattatggcgggtctgatgaccactgtcattgcatggtctacgggcgttgatgccaaaacggcaattggtcttggcctgccgtttagtttgttaatgcagtacgtcattctgttcttctattccgctttctcattatttatgaccaaagccgataaatgcgcaaaagaggcggatacggcagcgttttcccgacttaactggacaacgatgctcatcgtcgcttcagcgtatgcggtgattgctttcctctgtacttacctggcacaaggggcgatgcaggcgctggtgaaagcgatgcccgcctggctgacccacggctttgaagtggctggcggtattctgcctgccgttggttttggcttgctgctgcgcgtgatgttcaaagcgcaatatatcccttacctgatcgccggtttcctgtttgtttgctacatccaggtcagcaacctgttgccggttgccgtactgggcgcaggctttgcggtgtatgagtttttcaatgcgaaatcccggcagcaagcgcaaccgcagcccgttgccagtaaaaatgaagaagaggactacagcaatgggatctga

SEQ ID NO: 262791 - DNA, 477 bp, Klebsiella pneumoniae
atgagcagtccaaatattctcttaacccgtattgataaccgtctggttcacggtcaggttggcgtgacctggacatccaccatcggtgcaaatctgctggtagtcgtggatgatgttgtcgctaacgatgatattcaacagaaattaatgggtattaccgcggaaacctacggctttggcattcgtttctttactatcgaaaaaaccattaacgtcatcggcaaagctgcaccgcatcagaagatcttcctgatttgccgtacgccacaaacggtacgtaaattggtagaaggtggtattgacctgaaagatgtcaacgtcggcaatatgcatttctcggaagggaaaaagcaaatcagcagtaaagtttatgtcgatgaccaggatctcacggacttacgttttattaaacaacgtggcgtgaatgttttcattcaggacgtccctggcgatcaaaaagaacaaatccctgactaa

SEQ ID NO: 262792 - DNA, 1155 bp, Klebsiella pneumoniae
atgccagaaaattacacccctgctgctgccgcaaccggtacatggactgaagaagagatccgccatcagcctcgcgcatggatccgttcactcaccaacatcgacgcgctacgttccgcgctcaataacttccttgaaccgttactgcgcaaagagaatctgcgggtaatcctgaccggagccggaacctcggcatttatcggtgacatcatcgcgccgtggctcgccagccatacaggtaaaaacttcagcgccgtaccgaccaccgatctggtcaccaatccgatggactacctgaatccagctcatccactgctgttgatctccttcggtcgatccggcaacagcccggaaagcgtcgccgccgtggaactggcaaatcaatttgtacccgagtgctatcacctgccgatcacctgcaacgaagcgggcgctctttaccaaaacgcgatcaacagcgacaacgcgtttgccctgctgatgcccgcagaaacgcacgaccgcggctttgcgatgaccagcagcattaccaccatgatggtcagctgcctcgcggttttcgcacctgagacgatcaacagccagagcttccgcgacgtggcggatcgttgccaggcgatcctgacctcactgggcgatttcagcgaaggtgtgtttggttacgcaccgtggaaacggatcgtttatctcggcagcggtggcttacagggcgcagcacgcgagtcggcgctgaaagtactggaactgacggcgggtaaactggcggccttttatgattccccgaccggattccgtcatggcccgaaatcgctggtcgataacgaaacgctggtggtggtatttgtctccagccacccttacacccgtcagtatgatcttgatctgctggctgaacttcgccgcgataaccaggcgatgcgcgtaatcgctatcgccgcggaaagcaacgacgttattaccgccggtccacatatcatcctgccgccgtcccgtcactttatcgacgttgagcaggcattttgcttcctgatgtacgcccagacgtttgcactgatgcagtcgctgcacatgggcaatacgccggataccccatcagccagcggcaccgttaaccgcgtggtgcaaggcgtaatcattcatccgtggcaggcataa

SEQ ID NO: 262793 - DNA, 1134 bp, Klebsiella pneumoniae
atgacacacgttctgcgcgccagaaggctgctgactgaagagggatggctcgatgaccatcagttgcgtattgctgacggtgtaatcgcagcaatcgaaccgattccagtgggcgtgactgaacgcgatgcggaactgctctgccccgcttacatcgacacccatgtacacggtggtgcgggcgttgatgtaatggatgacgcgccggatgtgctcgacaagctggcaatgcacaaagcacgcgaaggtgtcggcagttggttaccgaccaccgtaaccgcgccgcttaataccattcatgcggcgctgaaacgtattgctcaacgttgccaacgcgacggacctggtgcgcaagtgctggggagttatctcgaaggaccatacttcacgccgcagaataaaggcgcgcatccgccggagctgtttcgcgagctggaaattgccgagctggatcaattgattgccgtttctcagcacaccttgcgcgtggtagcgctggcaccggaaaaagaaggggcattgcaggccatccgccatcttaaacagcaaaacgtacgggtgatgctggggcatagcgcggcgacctggcaacaaacccgtgccgcgtttgacgctggtgccgacggcctggtgcattgctataacgggatgacaggtttacatcaccgcgaaccgggaatggttggcgcgggattaacggacaagcgcgcctggctggaactgatagccgatggtcatcatgtgcatccggcggcgatgtcgctgtgttgttgctgtgcgaaagagagaatcgtgctcatcaccgacgcgatgcaggcagccgggatgccggatggtcgctatacgttatgtggcgaagaagtgcagatgcacggtggcgttgtccgtaccgcgtccggtggactggcgggcagtacgctgtctgttgatgcggcagtgcgcaatatggtcgagttgacggacgtaacgcctgcggaagccatccatatggcgtcgctgcatccggcgcgtatgctgggtgttgatgatgttctgggatcgcttaaaccgggcaaacgcgccagcgtcgttgcgctggatagcgggctgcatgtgcaacaaatctggattcagggtcaattagcttcgttttga

SEQ ID NO: 262794 - DNA, 435 bp, Klebsiella pneumoniae
atgttaagtattattttgacagggcatggcggatttgccagcggcatggaaaaagcaatgaagcaaatcctcggcgagcaatcgcagtttattgccatcgattttcccgaaacctcaagcaccgcgcagcttacatcgcagcttgaagaggccatcgcccaactcgattgtgaagacggcattgtttttctgacggatttgctgggcggcacgccgtttcgcgtagcttcaacgctggcgatgcaaaaaccgggctgtgaagtgatcaccggcaccaatttgcaactgctactggagatggtgctggagcgcgaagggttaagcggtgaagagttccgtgtgcaggcgctggagtgtggacaccgtgggctgaccagtttggtggacgagttaggccgctgccatgaagaatgtccggtcgaggaaggaatatga

SEQ ID NO: 262795 - DNA, 1281 bp, Klebsiella pneumoniae
gtgaaacatctgacagaaatggtgagacagcacaaagcgggcaaaacaaatggaatttatgccgtttgttccgcacatccgctggtgctggaggctgcaatccgctacgccagtgcaaaccaaacgccgttactgattgaagcaacctccaatcaggtagaccagttcggcggctataccggaatgacgcccgccgattttcgcggctttgtttgtcagctcgccgactcgttgaatttcccgcaggatgcgttgattctgggtggtgaccatctgggtccaaaccgctggcaaaacctgccagccgctcaggcaatggccaatgccgatgatttgattaaaagctacgttgcggcaggattcaaaaaaatccaccttgattgcagcatgtcctgtcaggacgatccaattcccttaactgatgacatcgtggctgaacgcgccgcccgtctggcgaaagtggcggaagaaacctgtcgcgaacactttggcgaagccgatctggagtatgtcattggtaccgaagtgccggtacctggcggcgcgcatgaaaccttaagcgagctggcggtcaccacgccggatgccgcccgcgccacgctggaagcccatcgtcacgcctttgaaaagcagggtctgagtgccatctggccacgcatcattgctctggtggttcaacccggcgtcgaattcgatcacaccaacgttattgattatcagcccgtcaaagcgaccgccttaagccagatggtcgaaaactacgaaacgctgattttcgaagcgcactctaccgattatcaaacgccacaatcgttgcgccagctggtgattgaccactttgccatcctgaaagttggcccggcgctgaccttcgccctgcgtgaagctctgttctctctggcggcgattgaagaagaactggtaccagcaaaagcctgttctggtctgcgtcaggtgctggaaaacgtgatgctcgaccgcccggaatactggcaaagccactaccacggtgacggcaacgcacgtcgcctggcgcgtggttacagctactcagatcgcgtgcgctattactggccggacagccagattgatgacgctttcgctcatctggttcgtaatctggcggattcaccaattccgctaccgctcatcagccagtatttgccgctgcaatacgtgaaagttcgctccggcgagctgcagccaacaccacgggaactcattatcaaccatattcaggacatcctggcgcagtaccacacagcctgtgaaggccaataa

SEQ ID NO: 262796 - DNA, 810 bp, Klebsiella pneumoniae
atgagtaataccgacgcttcaggcgagaagcgagtgacaggcaccagtgagcgacgagagcagatcattcaacgcctgcgccagcaaggaagtgtgcaggttaacgatctgtcggcattgtatggcgtatctactgtgacgatccgcaacgatctggcgtttctggaaaagcaggggatcgctgtgcgtgcctatggcggcgcgttgatctgcgatagcacgacgccgtcagtcgagccatcagtggaagataaaagcgcgctgaacaccgcaatgaaacgcagcgttgcgaaagctgccgttgagttgattcagccaggtcatcgggtgatcctcgattccgggaccaccacttttgagattgctcgtctgatgcgcaagcacactgacgtaattgcgatgaccaacggtatgaacgtggctaatgcgttgctggaagcggaaggcgttgagctgctgatgaccggcgggcatttgcgccgtcagtcgcaatctttttacggcgatcaggctgaacaatcgctgcaaaattaccacttcgatatgctgtttcttggcgtagatgcgatcgatctggagcgcggcgtcagcacgcataatgaagatgaagcccgtttaaaccgtcggatgtgcgaagttgcggaacggatcatcgtggtcaccgattccagtaagttcaatcgttccagtttacataagatcattgatactcaacgtatcgacatgatcattgttgatgaaggcattcctgcggatagcctggaaggactgcgaaaggctggggttgaagtgattctggtcggggagtga

SEQ ID NO: 262797 - DNA, 465 bp, Klebsiella pneumoniae
atggattttccacaaagggttaatggttgggcgctatatgctcatccctgttttcaggaaacctacgacgctttagttgccgaagtcgagacattaaagggaaaagttcctgaaaattatcagagaaaagccgccacaaagttattggcggtagtccataaagtgattgaggagcatatcacggtcaatccatcatcaccggcattccgtcatggcaagtcgttaggctctgggaaaaataaagactggtcacgggtaaaatttggtgctggtcgttatcgtctcttctttcgttatagtgaaaaagagaaagtcatcattctgggatggatgaacgatgaaaacactctgcgcacctacggtaaaaaaacagatgcctataccgtattcagcaaaatgttaaaaagaggacatcctcctgccgactgggaaaccctcacccgagaaacagaagaaacccattga

SEQ ID NO: 262798 - DNA, 336 bp, Klebsiella pneumoniae
atgcccgctaatgctcgctctcacgctgtactgaccactgaatcaaaggtcacgatacgcggacaaacaactatccccgcgccagtgcgtgaggccttaaaactgaagccaggccaggacagcattcattacgaaattctgcctggtgggcaagtatttatgtgccgactgggagatgaacaggaggatcatactatgaatgcatttttgcgttttctggatgcagatatccagaacaacccgcaaaaaactcgtccattcaacattcaacaaggaaagaaacttgtcgctggcatggacgtcaacattgatgatgagattggcgacgacgaataa

SEQ ID NO: 262799 - DNA, 1146 bp, Klebsiella pneumoniae
atgaaaatcgtaatcgccccagactcttataaagaaagtttatctgccagcgaggttgcgcaggcgatagaaaaaggatttcgggaaatttttcctgatgcacagtacgtttctgttccggttgccgacggtggcgaaggaacggtggaagcgatgattgcagccacccagggggctgaacgtcacgcctgggttacagggccgctgggcgagaaagtgaatgccagttgggggatctccggcgatggcaaaaccgcgtttattgaaatggcggcggccagtgggctggagctggtacctgcggaaaaacgcgatccactcgtgaccacttcacgcggcacaggcgagttaatcctgcaggcgctggagagcggtgcgacaaacattattatcggcattggcggcagcgctacaaatgatggcggcgcaggcatggtacaggcgctgggggcgaaattatgcgacgccaacggcaatgaaattggttttggcggcggtagtcttaatactctgaatgatattgatatttccggcctcgatccgcgcttaaaagattgcgtcattcgcgtcgcttgtgatgtcaccaatccgctggtgggcgataacggcgcatcgcgcatctttggcccacaaaagggagccagtgaagcgatgattgttgagctggacaataacctctctcactatgccgaggtcattaaaaaagcgctgcatgttgatgtgaaagatgtccccggtgcaggagctgcgggtggtatgggcgcggcgctaatggcgtttcttggtgcggaactgaaaagtggtattgaaatcgtcactacggcgctgaatctggaggaacatattcacgattgtacgctggtgatcaccggtgaagggcgtattgacagccagagtattcacgggaaggtaccgattggtgtcgcaaacgtggcgaagaagtaccataaaccggtgattggcattgcgggtagcctgaccgatgatgttggcgttgtacatcagcatggcattgatgcggtcttcagcgtattgaccagcataggtacgttggacgaagcattccgcggggcttatgacaatatctgccgtgcttcacgtaatatcgccgcgacactggcgattggaatgcgcaacgcggggtga

SEQ ID NO: 262800 - DNA, 594 bp, Klebsiella pneumoniae
atggctttgtctggtcatggaggtgttagaaaatataaagatttcgaaaaactttttagtgaaattgtatttacgccagatgaatgtaatattgtgagaaactctctacagaaagatggtgttgagaaaaaaaccagagaaaatattatttcttgcctctccagtatttcaggaataggtaacctgtattatgcttgttcacaggcatttcctgtcgcgcttgataggggggatattaatgcaatacaggcaagtaattctatttctgccgggtttaatagtaacccagggttttgtgctttgatgggaaaaacaaattttctttttgctgacttttcactgcatacatttacacaaactcattatattgtaaaagccgaaataaatgaagctggtaacgattttaatattgctaatttcatttatcgaacatacggtgaggattatattcataacgactcagtggatgactctcttaatgagcgttccactgaagattataggtttctggatgactctttgttacctgaaaacgatttccgcaacaggaggagaaatttttcaggcaatattgcaatcgcaacctacaaataa

SEQ ID NO: 262801 - DNA, 591 bp, Klebsiella pneumoniae
atgatcaccgttgcccttatagacgatcacctcatcgtccgctccggctttgcgcagttgctggggctggaacctgatttgcaagtagttgccgagtttggttcggggcgcgaggcgctggcggggttgccggggcgcggtgtgcaggtgtgtatttgcgatatctccatgcctgatatctccggtctggagctgctaagccagctgccgaaaggtatggcgacgattatgctctctgttcatgacagtccggcgctggttgagcaggcgcttaacgcgggggcgcgcggctttctctccaaacgctgtagcccggatgaactgattgctgcggtgcatacggttgccacgggcggctgttatctgacgccggatattgccattaaactggcatccggtcgccaggacccgctaaccaaacgtgaacgccaggtggcggaaaaactggcgcaaggaatggcggtgaaagagattgccgccgaactgggcttgtcaccgaaaacggtacacgtccatcgcgccaatctgatggaaaaactgggcgtcagtaacgacgttgaactggcgcgccgcatgtttgatggctggtga

SEQ ID NO: 262802 - DNA, 1503 bp, Klebsiella pneumoniae
atgaagacgttgttctcccgcttaattaccgttattgcctgcttttttatcttctctgccgcatggttttgcctgtggagtatcagcctgcacctggttgagcgccctgatatggcggtgctgttatttccgtttggtctgcgtctggggctaatgctgcaatgcccgcgcggatactggcccgtattgctgggcgcggaatggctgctgatttactggctaacgcaggcggtcggtttaacccatttctccttattgatgatcggtagtttactgacgttattgcccgtggcgctgatctcgcgctatcgccatcaacgtgactggcgcaccttgctgttacagggtgcggcgctgacggcggcggcgttgttgcagtcgctgccctggctttggcacggcaaagagtcgtggaatgcgctgttgctgactttaactggcggcttgacgctggccccgatatgtctggtgttctggcactatctcgccaataacatctggctgccgctcgggccgtcgttagtttctcaaccgatcaactggcgcgggcggcatctggtctggtacttgctgctgtttgttattagtctctggctccagttgggattgccggacgaactgtcgcgctttacgccattctgcctggcgctgccgattatcgcgctggcctggcactatggctggcaaggggcgctgattgcgacgttgatgaacgccatcgcgctgatcgccagtcaaacctggcgcgatcattcggtggatttattgctctcgctgctggtgcaaagtctgacagggttgttactgggcgcaggcatccagcggttgcgtgaacttaaccagtcgctgcaaaaggaactggcgcgcaatcagcatctggctgaacgtttgttagaaactgaagagagcgtgcgccgcgacgtggcgcgtgagctgcacgatgatatcggtcagaccatcactgctattcgtactcaagcgggcattgtccagcgacttgcggcagataacgccagtgtgaagcagagcgggcagctcatcgaacaactgtcgctgggcgtttacgatgcggtgcgccgtttgttaggtcggttacgtccgcgccagttggatgatctcaccctggagcaggccatccgctcactgatgcgggaaatggagctggaagggcgcggcattgtcagccatctcgaatggcgaatcgatgaatcagcgttaagtgaaaaccagcgagtgacgctgtttcgcgtctgccaggaagggctgaacaacattgtgaaacatgccgatgccagcgcggtcaccctgcaaggctggcagcaggatgaacggttgatgctggtgattgaagacgatggcagcggtttgccgccgggttccgggcaacaaggttttggcctcaccggaatgcgcgagcgcgtaacggcgctgggcggcaccttgaccatttcctgtctgcacggcacgcgtgtcagcgtttctctacctcaacgctatgtctaa

SEQ ID NO: 262803 - DNA, 1320 bp, Klebsiella pneumoniae
atgttgccgtttctgaaagcgcctgccgatgcgccattaatgactgataaacatgaaattgatgcccgttatcgctactggcgtcggcatattctgctgaccatctggctgggttacgcgctgttttacttcacgcggaaaagttttaacgccgccgtaccagaaatccttgctaatggcgtgctcagccgtagcgatatcggcctgttagcgaccctgttttacattacctacggcgtgtcgaagtttgtctccggcattgtcagcgatcgctcaaatgcccgttattttatggggatagggcttatcgccacgggcatcatcaacattctgtttggcttctcgacgtcgctatgggcgtttgccgtgctctgggtgctgaacgcctttttccagggctggggttcaccggtgtgtgcgcgtctgttaacggcctggtattctcgtaccgagcgcggtggttggtgggcattatggaacacggcgcataacgttggtggtgcgctcattcccattgtgatggcagctgctgcgctgcattacggctggcgtgccgggatgatgattgctggttgtatggcgatcgtcgtggggatttttctctgctggcggctgcgcgatcgcccgcaggcgttaggtttacctgcggttggtgaatggcgacacgacgcgctggagattgctcaacaacaagaaggggcagggctgacgcgtaaagagatcctcaccaagtatgtgttgttgaatccgtatatctggctgctttcgttttgctatgtgctggtctatgtggtccgggcggcaatcaacgactggggcaatttgtatatgtccgagacgctgggcgtcgatctggtcacggcgaatacggcagtgacaatgtttgaactgggcggatttatcggtgcgctggtagcgggttggggctcggacaaattgtttaacggcaaccgcgggccgatgaatttgattttcgccgccggaattttgctttcagtcggctcgctgtggctgatgccatttgccagctacgtgatgcaggcaacctgcttcttcaccattggtttttttgtttttggcccgcagatgttaatcggcatggcggcggcagaatgttcccacaaagaggcggcaggggcggcgacggggtttgtcggcttgtttgcttatctgggggcgtcgcttgctggttggccactggcgaaagtactcgatacctggcactggagcggattttttgtggttatctctatcgccgccgggatttccgcactgctgttactgccctttttgaacgcccagacaccgcgagaagcgtga

SEQ ID NO: 262804 - DNA, 1392 bp, Klebsiella pneumoniae
atgctggctttcttaaaccaggtccgcaagccgaccctggaccttccgctcgaagtgcggcgcaaaatgtggttcaaaccgttcatgcaatcctacctggtggtctttatcggctacctgacgatgtacctgattcgcaagaactttaacatcgcgcagaacgatatgatttcgacctacgggttgagcatgacgcagctggggatgatcggcctgggtttctccatcacttatggcgtgggtaaaacgctggtttcctactacgccgacggcaaaaacaccaaacaattcctgccgttcatgctgatcctgtctgccatttgtatgctgggctttagcgccagtatgggcagcggctcggttagcctgttcctgatgattgccttctacgccttaagtggctttttccagagtaccgggggttcgtgcagttactccaccatcaccaaatggacgccgcgtcgtaaacgcgggacgttcctcggtttctggaacatttctcacaaccttggcggtgcaggcgcagcaggtgtggcgctgttcggcgcaaattacctgttcgatggtcatgttatcggcatgtttatcttcccgtcgattatcgcgctgattgttggttttatcggcctgcgttacggcagcgactccccggaatcttatggcctcggcaaagctgaagagctgtttggcgaggagatcagtgaagaggataaagagacagaatctaccgatatgaccaagtggcagatctttgttgagtatgtgctgaaaaacaaagtgatctggctgctgtgcttcgccaacattttcctctatgtggtgcgtattggtatcgaccagtggtcaaccgtgtatgcgttccaggaactgaaactctctaaagcggtggcgattcagggctttacgctgtttgaagctggtgcgctggtcggtacgctgctgtggggctggctctctgacctggcgaacggtcgccgtggcctggtggcctgcatcgcgctggcgctgattatcgccacgctcggtgtgtatcaacatgccagcaacgaatatatctacctggcttctctctttgcgttgggtttcctggtctttggcccgcaattgttgattggtgtggctgctgttggctttgtacctaaaaaagcgattggcgctgccgatggtattaaaggcaccttcgcttacctgattggtgacagctttgccaagttaggtctgggaatgattgccgatgggacgccggtattcggccttaccggctgggcaggcaccttcgccgcacttgatatcgccgcgattggttgtatctgcctgatggcgatagtggcggtgatggaagaacgcaaaatccgccgcgagaaaaaaattcagcagttgacagtggcataa

SEQ ID NO: 262805 - DNA, 1767 bp, Klebsiella pneumoniae
atgaataattctattaaccataaatttcatcacattagccgggcggaataccaggaattgttagccgtttcccgtggcgacgctgttgccgattatattattgataatgtctctattctcgacctgatcaatggcggagaaatttccggcccaattgtgattaaaggacgttacattgctggtgttggcgcagaatacactgatgctccggctttgcagcggattgatgcccgcggcgcaacggcggtgccagggtttattgatgctcacctgcatattgaatccagcatgatgacgccggtcacctttgaaaccgctaccctgccgcgcggcctgacaactgttatttgcgaccctcatgaaatcgtcaacgtgatgggcgaagccggattcgcctggtttgcccgctgtgccgaacaggcaaggcaaaaccagtacttacaggtcagctcttgcgtacccgccctggaaggctgcgatgttaacggtgccagttttacccttgaacagatgctcgcctggcgggaccatccgcaggttaccggccttgcagaaatgatggactaccctggcgtaattagcgggcagaatgcgctgctcgataaactggatgcatttcgccacctgacgctggacggtcactgcccgggtttgggtggtaaagaacttaacgcctatattgctgcgggtattgaaaactgccacgaaagttatcagctggaagaaggacgccggaaattacaactcggcatgtcgttgatgatccgcgaagggtccgctgcccgcaatctcaacgcactggcaccgttgatcaacgaatttaacagcccgcaatgcatgctctgtactgatgaccgtaacccgtgggagatcgcccatgaaggacacatcgatgccttaattcgccgcctgatcgaacaacacaatgtgccgctgcatgtggcatatcgcgtcgccagctggtcgacggcgcgccactttggtctgaatcacctgggcttactggcacccggcaagcaggccgatatcgtcctgttgagcgatgcgcgtaaggtcacggtgcagcaggtactggtgaaaggcgaaccgattgatgcgcaaaccttacaagcggaagagtcggcgagactggcacaatccgctccgccatatggcaataccattgcccgccagccagtttccgccagcgactttgccctgcaattcacgcccggaaaacgctatcgggtaattgacgtcatccataacgaattgattacccactcccgctccagcgtctacagcgaaaatggttttgatcgcgatgatgtgtgctttattgccgtacttgagcgttacgggcaacggctggctccggcctgtggtttgctcggcggctttggcctgaatgaaggtgcgctggctgcgacggtcagccatgacagccataatattgtggtgatcggtcgcagtgccgaagagatggcgctggcggtcaatcaggtgattcaggatggcggcgggttgtgcgtggtacgtaactgccaggtccaaagccatctgccgttacccattgccgggctgatgagcaccgacacggcgcagtcgctggcggaacaaattgacgccttgaaagctgccgcccgtgaatgcggtccgttacccgatgagccgtttattcagatggcgtttctttctctgccagtgatccccgcgctgaaactaaccagtcaggggctatttgatggcgagaagtttgccttcaccacgctggaagtcactgaataa

SEQ ID NO: 262806 - DNA, 1335 bp, Klebsiella pneumoniae
atgaataatgacaataccgattacttgagtaatgaatcagggacgctttcgcgattatttaaactacctcagcatgggaccaccgtccgcacagaattgattgcggggatgaccacttttttaaccatggtgtacatcgtttttgtgaacccgcaaatcctcggcgcggcacaaatggacccgaaagtggtgtttgttaccacctgtttgattgccggtatcggcagtattgcgatggggatatttgctaacttacccgtggcgctggctccggcaatggggctgaacgccttctttgcgttcgtggtcgtgggggcgatgggtatctcctggcagaccgggatgggcgcgatattctggggcgcaattgggctatttttgctcacgctgtttcgtatccgttactggatgatctccaacattccattaagtttacgtattggcatcaccagcggaatcggattatttattgccttaatgggattaaaaaacactggcgttattgtcgccaataaagacaccctggtgatgattggcgatttaagttctcacggcgtgttgttaggtattttagggttttttattataaccgtgttgtcatcacgtcattttcatgccgcggtgcttgtttctattgtggtgacgtcttgctgtggattatttttcggtgatgttcattttagcggtgtctattccattccgcctgatattagcggcgtcattggtgaagtagatttgagcggcgcgttaacacttgaactcgccggtatcattttctcctttatgctgatcaacctatttgattcatcaggaacattaattggtgtaactgataaagctggcttaatagatagtaacggtcaattccccaatatgaataaagcgctgtatgttgatagcgtcagttcggtggcaggcgcatttattggtacctcatctgttactgcctatattgaaagtacttctggtgtggcggtcggtggtcgcacggggctgacggctgtcgtggtcggcgttatgttcctgttagttatgttcttctcaccgctggtggcgatggttcctccttacgcaaccgccggagcgttaatctttgttggcgtgctgatgacttcgagcctggcgcgcgttaactgggatgattttaccgaatcggtgcctgcgtttattaccacggtgatgatgccctttactttctcgatcaccgaagggattgcacttggctttatgtcgtactgcatcatgaaagtatgcaccgggcgctggcgcgatctgaacctgtgtgtggtggtggtcgcagctctgtttgcactgaagattattttggtggattag

SEQ ID NO: 262807 - DNA, 453 bp, Klebsiella pneumoniae
atgatctggataatgctcgccacgctggcggtagtgtttgtggttggttttcgggtgctgacatccggggccagaaaagcgattcgccgtctcagcgatcggctgaatatcgatgtcgtacccgtggagtcgatggtcgatcaaatgggaaagtcagccggtgacgaatttttacgttatttgcatcgcccggatgagtcgcacctgcaaaacgccgcgcaggtattgctcatctggcaaattgtcattgtcgatggtagcgaacagaacctgctgcaatggcatcggattttacaaaaagcccgccttgccgcgccgattaccgatgctcaggtcaggctggcgctgggttttctgcgcgaaaccgaacctgaaatgcaggatattaatgcttttcagatgcgctataacgcgttctttcagcctgccgagggcgttcactggctgcattaa

SEQ ID NO: 262808 - DNA, 324 bp, Klebsiella pneumoniae
atgactgcaaaaactaaatttaaaagtcctgcatttgaggctattcacagcgcagcggctggattgtccagcgtcgatgcgatttctgccgaaacgatgcgtacttttgacaaagcctgcctgaccagcgtgcaagacttacaacctgttgagataaaagcactgcgggaaaaattaaaagtgagtcagcccgtcttcgctcactatctcaataccagcgtttcaactgtacaaaaatgggaaagtggcgctaaacgccccaatggcatttcattaaaactgctcagcattgtgcaaaaacacgggctggaggtgctgctgtaa

SEQ ID NO: 262809 - DNA, 360 bp, Klebsiella pneumoniae
atgcgcgtgtttaaaaccaaatggtttgcaagggaagccaggtctcatgcaataacagatgaagagttgtgccgggccattttagaaacggaacaaggtaaagctgatgcacttggcggtggcgtttttaaaaagcgccttcaccaaaatcgtgagcgtgcaattattctggcgaaagggggaatcaattggttttacacgtttttatatgcaaaacaggatatgtcgaacattaatagtcaggaactggctgggtttcgtgaacttgcaaagcattatgccttcctgacgaaagcccaactgacagcaatgattaacactaaagaactgacagagatctgctatgactgcaaaaactaa

SEQ ID NO: 262810 - DNA, 1317 bp, Klebsiella pneumoniae
atgatttttatttcttcgagcagcctcgaactttcccacaacaccgtaaaagttgcaaaaacgttaaatgcgtcacacatttcaatgttaaagtggtcggcttttcccctgaaacatgccacgggtaacaccatgagtgaatttattgccgaaaaccgcggcgcggatgtcatcacccgaccgaactggtcagccgttttctcggtggcgttttgcgtcgcctgtctgattatcgttgagtttttgcccgtcagtttgttgacgccaatggcccaggatttaggcatttcggagggggttgccgggcaatcggtgaccgtgaccgcctttgtggcaatgtttgccagtttgtttattacccagacaattcaggccactgaccgccgctacgttgttattttgtttgccgttttgctgacgctctcctgtttgctggtttcctttgccaactcattcagtttgcttttaatcggtcgtgcctgtctggggctggcgctgggcgggttctgggcgatgtcggcgtcgctgaccatgcgtctggtaccgccgcgtacggtgccgaaggcgctgtcggtgatcttcggcgcggtttctattgcgctggtgattgccgcgccgttgggcagttttttaggcgagcttatcggttggcgcaatgtctttaatgcggcggcggtgatgggcgtgctgtgtattttctggattatcaaatcattgccttcactgccaggcgaaccctcgcatcagaaacaaaatactttccgcttattacaacgtccgggtgtgatggcagggatgatcgccatcttcatgtctttcgccgggcagtttgctttcttcacgtatattcgcccggtgtatatgaacctggcgggattcggcgtggatggcttaacgctggtgctgttgagttttggcattgccagctttattggtacgtcgctttcgtcgttcattcttaaacgttcggtaaaactggccttagcaggcgcgccgttaatactggctgtgagtgcgttggtgctgacgttgtggggaagcgataaaatcgttgctaccggcgtggcaattatctgggggctaacttttgcattggttccggtcggctggtcaacgtggatcacccgctcactggccgatcaggcagaaaaagccgggtcaattcaggtggcggttattcagcttgctaatacctgtggcgcggcaatcggcggttatgcgctggataatattggtctgacttcgccgttgatgttgtccggcacattgatgttgctgacggcgttattggtcaccgcaaaggtgaaaatgaagtaa

SEQ ID NO: 262811 - DNA, 306 bp, Klebsiella pneumoniae
ttgattgatcttagcctcaacagtgctggcatccgctacggtactgctcagatcaacctctgccatgccatgcgcatccgtcctgatacctgcgctctgccctgcattggcaaatacagccgcccccttcgtcaccgtaaaggtgacggtctgctccggcagcacattgccaaactgatcttccacccggacattcactgtatgtcgatcgctgccattcgccagcacatccgggttacccgttgtcacttgcatcgcgacaatttgtgcgctggcggcatcgccactaatactgtaatcatttga

SEQ ID NO: 262812 - DNA, 288 bp, Klebsiella pneumoniae
atgctggcagtgactgtactggttcctgccgtctggctggtgacactgaactccaccgtaccgtccgactgcgtggtgaccgtcggagtgaccgttgcgctgttgcctgccaacacgctgaccgtctgcccggcaagcgtattaccgaacgcatcggtgaccttcacccgcagcgtgttcgccgtcgaaccgtccgcctctgaaccatccttaatgaccaccagctccgcgacctgcgccgtgctaacatcagcaacaaagttcaccgttttactatcgctgctttga

SEQ ID NO: 262813 - DNA, 498 bp, Klebsiella pneumoniae
atggttgcagtgacagtactggttccggcggtctggctggtgactgagatctccaccgtaccgtccggctctgtgatgaccgtcggggcagtcgttgcgccgttgtccgccaacacgctgaccgtctgcccggctagcgtattaccgttagcatcggtaaccttcacttgcagcgtgttcgccattgcgccgtcagccactgagttatcccgggtgaccaccagatccgcgatcttcgccgtcctgacatcggcgataaacatcacgttctggctcgcggtgctgttgttgatggttgcagtgactgcactgactcccgccgtctggctggtgacactgatttccaccgtgccgtccggccctgtgatgaccgtcggagacaccgttgcgccgttgcctgccatcacgctgaccgtctgcccggcaagtgcattcccgaacgcatcggtcaccctcgcccgcagcgtgttcgccgtcgaaccatctgccacggcgtaa

SEQ ID NO: 262814 - DNA, 273 bp, Klebsiella pneumoniae
atggttgcagtgactgcactgactcccgccgtctggctggtgacactgatttccaccgtgccgtccggctcggtgatcaccgttggggcagtcgttacgccgttgtccgccaacacgctgaccgtctggccgccaagcgcattaccgaacgcatccgtcaccctcacccgcagcatgttcgccgtcgaaccgtctgccactgagccgtccttaatgaccaccagatcagcgatctgcgccgtcctgatatcggcgataaacgtcacgttctga

SEQ ID NO: 262815 - DNA, 273 bp, Klebsiella pneumoniae
atgctggcggtgactgtactggttcctgccgtctggctggtgacactgaactccaccgtaccgtccggctgcgtggtgaccgtcggagtgaccgttgcgctgttgcctgccatcacgctgaccgtctgcccggcaagtgcattcccgaacgcatcggtcaccctcacccgcagcgtgttcgccgtcgaaccgtccgcctctgaaccatccttaataaccaccagatcagcgatcttcgccgtgctgacatcggcgataaatgtcacgttctga

SEQ ID NO: 262816 - DNA, 537 bp, Klebsiella pneumoniae
atgttacgcgataaatttattcactattttcagcaatggcgtgaacgccagttaagccgtggcgaacactggctggcacagcacctggcggggcgttcgccgcgtgaaaaaggcatgttactggccgcggccgtgttcctgttttgcgccgtatattacgtcctcatctggcagccgttgagcgagcggatagaacaacaggagacgatgttgcagcagctggtggcgatgaacgcgcgactgaagagcactgcgccggatattattgcggcgcgaaaatccggcacgacaacgcaagcacaggtatcgcgggtcatcagtgacagcgcttccgcgcactcggtggtcatcaagcggatagccgagcgtggggagaatattcaggtctggatagaacctgtggtgtttaatgaccttctgaaatggttaaacgcactggatgaaaaatatgcgctgcgggtgacacaaattgatgtcagtgctgctgagaagccagggatggtaaatgtgctgcgactggagtttggacgggggtag

SEQ ID NO: 262817 - DNA, 1179 bp, Klebsiella pneumoniae; identical to SEQ ID NO: 12934

SEQ ID NO: 262818 - DNA, 978 bp, Klebsiella pneumoniae
atgatcacctcaccaccaaaacgcggaatggcactggtcgtggtgctggtattgctggcggttatgacgctggtgaccatcacgctttccgggcggatgcagcaacaacttgggcgaacgcgcagccagcaggagtaccagcaggcgctgtggtacagcgccagtgcggaaagcctggcgttgagcgcactcagtctgagcctgaaaaatgaaaagcgtgtgcatcaggcacagccgtgggcttctggccctcgttttttcccactgccgcaggggcaaatcgccgtcactctgcgtgacgcacaggcctgctttaacctgaatgccctcgctcagccgacgacggcgtcgcgtccgctcgcggtacaacaactgattgccctgatctcgcgcctcgatgtgcctgcttatcgtgccgaactgatagccgaaagcctgtgggagtttattgacgaagaccgcagcgtgcagacgcgtctgggtcgtgaagacagcgagtatctcgcccgttcggtgccgttttacgccgctaatcaaccgctggccgatatcagtgagatgcgcgtggtgcagggaatggacgccggactttatcaaaaactgaaaccgctggtctgtgcgctgccgatgacccgccagcaaatcaacatcaacaccctggatgtcacgcaaagtgtgattcttgaggcgctgtttgacccgtggttaagccctgtacaggcgcgggcgttattacaacaacgtccggcgaagggctgggaagatgtcgatcagtttcttgcacagccgctactcgcagacgtcgatgagcgtactaaaaaacagctaaaaaccgtcctgagcgtggacagcaattacttctggctgcgttcagatatcaccgtgaatgagattgaactgacgatgaactcgttaattgtccgcatgggcccacaacacttttctgttctctggcatcagacaggagaaagtgagtga

SEQ ID NO: 262819 - DNA, 606 bp, Klebsiella pneumoniae
gtgagaaggacttgcgctggtttcacgttactggaaatgctggtggcaattgccatttttgcctcactggcactgatggcgctgcaggtgacaaacggcgttacacgcgtgaatagcgccgtcgccggacacgatcaaaaactaaacctcatgcagcaaacgatgagttttttgaaccacgatctgacacaaatgatgccgcgtccggtaagaggcgatcagggccagcgtgaaccagcgttactggcgggcgctggcgtgctggcgtctgagagtgaaggggtgcgttttgtacgtggcggcgtggtcaatccgttgatgcgtctgccgcgcagtaatctgctcaccgtcggttaccgcattcatggtggttatctcgaacggttagcctggccactgaccgatgcggcaggcagcgtgaagccaacaacgcaaaaattaatcccggcggattcgctccgtttgcagttctacgacggcacgcgctggcaggagagctggtcatcagtgcaggcgattcctgtggcagtacgcataaccctgcattcgccgcaatggggcgaaattgaacgcatctggttgttacgcgggccgcaattatcatga

SEQ ID NO: 262820 - DNA, 372 bp, Klebsiella pneumoniae
atgaagcgtggatttaccttgctggaagtaatgctcgcgctggcgatttttgcgttggccgccatggcggtgttacagatcgccagcggcgcgctgagtaatcagcaaatccttgaagaaaaaacggtagcgggctgggtagctgaaaaccagaccgcactgctttacctgatgacccgtgaacaacgagcggtcaggcaccagggcgagagtgatatggcaggaagccgctggtactggcgaaccacaccgctgagtacaggcaacgcgctgctccaggcagtggatattgaagtcagccgtcacgaagacttttcgtcggtgattcagtcacgacgcgcctggtttagcgccgtgggaggccaacagtga

SEQ ID NO: 262821 - DNA, 564 bp, Klebsiella pneumoniae
gtgcctgaacgcggattcacacttctggaaatcatgctggtgattttccttatcggccttgccagtgcgggcgtggtacagacgtttgcgaccgcttcagagccgcctgcgaaaaaagcggcgcaggattttctgactcgctttgcgcagtttaaggacagggcagtgatcgaagggcaaacactcggtgtgctaatcgacccgccaggttaccagtttatgcagcgtcgtcacgggcaatggttgcccgtttctgcgacccggttatcggcacaggttacggtgccgaaacaggtgcagatgctgttacaacccggaagtgatatctggcagaaggaatatgcgctggagctgcagcgtcgtcgcctgacgctgcacgatattgaactggagctgcaaaaagaggcgaaaaagaagacaccgcagatccgtttttcgccttttgaacccgccacgccgtttacactgcgtttttacgcgtcggcacaaaacgcgtgttgggcggtaaagctggcgcacgatggcgtgttatccctcaatcaatgtgatgaggggatgccatga

SEQ ID NO: 262822 - DNA, 456 bp, Klebsiella pneumoniae
atgaattcgttatcccgcacacaaaaaccacgggcaggttttaccctgctggaagtgatggtggtgattgttattcttggcgtcctggcaagtctggtggtgcctaacctgttgggcaacaaagagaaagccgatcggcaaaaagccatcagcgatatcgtggcgctggagaatgcgctggatatgtaccgactggataacgggcgttatccgactaccgaacaggggctggaggcgctgatccagcaaccggccaatatggcggattcccgtaactaccgtaccggtggatacattaaacgactgccaaaggatccgtggggcaatgattatcagtatctcagcccgggtgaaaaagggctgtttgatgtttataccctgggagcagatggtcaggaaaacggggagggcgctggcgcagatatcggtaactggaatttgcaggagtttcagtaa

SEQ ID NO: 262823 - DNA, 1224 bp, Klebsiella pneumoniae
atggcactgttttactatcaggcgctggagcgtaatggtcgcaaaaccaaaggcatgattgaggcggattccgcgcgtcatgcccgtcaattgttacgcggtaaagacctcattcccgtgcacattgaagcccggatgaatgcatcggcagggggattgttgcagcgtcggcggcacgcacatcgtcgtgtggcggcggcagatctggcgctgttcactcgtcaactggcaacgctggtgcaggcagcaatgccgctggaaacctgcttacaggcggtcagtgagcaaagcgaaaaactgcatgtaaaaagcctcggaatggcgctgcgcagccggattcaggaaggttataccctgtcggacagcctgcgcgaacatccccgcgtctttgactccctgttttgttcgatggtcgctgccggagaaaaatccggacatctcgacgtggtgctcaatcgcctggcggattacaccgaacagcggcagcgtctgaaatcacgcctgctgcaggccatgctctacccgctggttctgctggtggtggcaacgggcgtggtcactattttgctgacggcagtagtgccgaaaattatcgaacagtttgatcatctcggacacgcgctacccgcctccacccgaatgctcatcgccatgagcgacgcgttacaggccagcggcgtgtactggctggcgggttttctggggcttctggtgctggggcaacggctactcaaaaatcctgcgatgcgcctgcgctgggataaaaccttgctgcgtttgcccgtgacggggcgtgttgcgcgcggactgaatacggcgcgtttttcccgcacattaagcattctcaccgccagcagtgttccgctgctggaaggcattcagaccgccgccgccgtgtcggcaaatcgttatgtcgagcaacaactgctgctggcggcagatcgcatccgcgaaggaagcagcctgcgcgccgcgctggcggatctgcgcctgttcccgccgatgatgttgtacatgatcgtctccggcgaacagagcggcgagctggaaaccatgcttgaacaggccgcggtcaaccaggaacgggaatttgatacccaggtggggctggcgttagggctgtttgagccggcgctggtggtgatgatggcgggcgtggtgctgtttatcgtcatcgccatcctcgaaccgatgctgcaactgaacaatatggttggaatgtaa

SEQ ID NO: 262824 - DNA, 1494 bp, Klebsiella pneumoniae
atggtgcctgtagcacaggaaaccaccgctaacaccgtgcgtctgccctacagtttcagccgtcggtttagcctggtggcatggtgcgaagcgtcgctggagatcctccacgttcatccgttgtcgctctctgttttgcaggagctgcagcgggggctgaacgcgccctttacgctgcggcaaatcgacgaggccgaatttgaacagcagctgaatgcggtctggcagcgggactcttccgaggcccgccagctgatggaagatctcggttctgctgaggacttttttactctcgctgaagaactgccggaaacggaagatctgctggaaagcgacgacgacgcgccaatcatcaaactgatcaacgccatgctggcagaggcgattaaagaaggcgcttcggatattcacatcgagacatttgaaaagagtctggtgatccgttttcgtgttgacggtacattacatgaaatgctgcgcccggggcgcaaactggcctcgctgctggtatcgcgtattaaggtgatggcgcggctggatattgccgaaaagcgcgtaccgcaggatgggcgtattgcgctgctgctgggcggtcgggcgattgacgtgcgtgtctccaccatgccttctgcctggggcgagcgcgtggtgctgcgactgctggacaaaaaccaggcccgcctgacgctggagcgtctggggctgagtcatgaactgaccgcgcagttgcgccagctactgcacaaaccgcacggtatctttctggtgacggggccgaccggttccggcaaaagcaccacgctgtacgctggattgcaggagctgaacaaccactcgcgtaacattctcacggttgaagaccctatcgaatacatgattgaagggatcggtcagacgcaggttaacacccgcgtcggcatgaccttcgcccgtggcctgcgcgcgattttgcgtcaggacccggatgtggtgatggtcggtgaaatccgcgataccgaaaccgcagaaatcgctgttcaggcttcactgaccggacacctggtactttccaccctgcataccaacacagcggtgggggcgatcacgcgtttgcaggatatgggcgtggagcctttcctgctctcttccagtctgacgggcgtgatggcgcagcgactggttcgcacgctgtgtcccgactgctgccagtccgcgcctgccactgacgaagaaaaacgcctgctggggattaccgatgcgcatgctgtcacgctgtaccatccgcagggctgccccgcctgtaatcacaaaggttttcgcggacgtactgccatccatgaactgattgtggtggacgccacattgcgtgatttgatccaccgtcaggccggggaactggagctggaacgttatgtccggcaacactctgcgggtatccgcagtaacggcattgagaaagtgctcgccggagaaacctctctcgatgaagttctgcgggtaaccatggaggcgtaa

SEQ ID NO: 262825 - DNA, 2061 bp, Klebsiella pneumoniae
gtgttttggcgtgatatgacgttgtcggtctggcgtaagaagacaactggcctcaaaacaaaaaagcgtttactgccgctggtgctggcagcggcattatgcagttcaccggtctgggcggaagaagccactttcaccgctaattttaaagataccgacctgaaatcgttcatcgaaaccgtcggcgctaaccttaataaaaccatcattatggggccgggcgttcaggggaaagtgagtattcgcaccatgaccccgctcaatgaacgccagtattaccagctattccttaacctgctggaagcacaggggtatgccgtcgtaccgatggaaaacgacgtgctgaaggtggtgaaatccagtgccgcgaaagtcgagccgctgccgctggttggtgaaggcagcgacaactacgcgggcgatgaaatggtcaccaaagtcgtgccggtacgtaatgtgtcggtacgcgagctggcaccgattctgcgccagatgatcgacagcgcaggctcaggcaacgttgttaattacgatccctccaacgtgattatgcttaccggacgcgcctcagttgtggagcgcctgacggaagtgatccagcgcgtggatcatgcgggtaatcgcaccgaagaggtgatcccgctggataacgcctcggcttcggaaatcgcccgcgtgctggaaagcctgacgaaaaacagcggcgagaaccagcctgcgacgctgaaatctcaaattgtcgccgacgaacgcaccaacagtgtgattgtcagtggtgacccggccacgcgggacaaaatgcgccgcctgatccgtcggctggactcagaaatggaacgcagcggcaacagccaggttttctatctcaaatacagcaaagccgaagatctggtcgatgtactgaagcaggtcagcggcacgctcacggcggctaaagaagagacggaaggcaccgtcggtagcgggcgtgaggttgtctccatcgccgccagcaaacacagtaatgccctgattgttaccgcgccgcaggacatcatgcagtcgctgcaaagcgtgattgaacaactggatattcgccgtgctcaggtgcacgtcgaggcgttgatcgtggaagttgccgaaggtagcaatatcaatttcggcgtgcagtgggcgtcgaaagatgccggattaatgcagtttgctaacggtacgcagatccctattggcacgctgggggcagcgatttctgcagccaagccgcagaaaggttccacggtgatcagcgaaaacggtgctaccaccataaatccggatactaacggcgatctctccacgctcgctcagctcctttctggctttagcggtacggcggttggcgtggtgaaaggcgactggatggcactggtacaggcggttaaaaacgactccagctcgaacgtgctctccacgccgagcatcaccacgctggacaaccaggaagccttcttcatggtgggccaggacgttccggtattaactggatctaccgttggctccaataacagcaatcctttcaacacggtagagaggaaaaaagtcggcatcatgctgaaagtcacgccgcagattaacgaaggtaacgcggtacagatggtgattgagcaggaagtctcgaaagtggaagggcagaccagtctcgatgtcgtgtttggcgagcgcaaactgaaaaccaccgtgctggctaacgatggtgagctgatcgtgcttggcggtctgatggacgaccaggcgggagaaagcgtggcgaaagtgccgctgctgggcgatatcccgttgattggtaacctgtttaaatcgacggcggataaaaaagaaaaacgtaacctgatggtgtttatccgcccgaccattctgcgtgacggtatggcggcagacggtgtgtcgcagcgcaaatataactacatgcgcgccgagcaaatctaccgcgatgagcagggcttaagcctgatgccgcacaccgcgcagccgatattgcctgcgcaaaatcaggccttaccgccagaagttcgtgcgttcctcaatgccgggagaacgcgttaa

SEQ ID NO: 262826 - DNA, 819 bp, Klebsiella pneumoniae
atgctgcttattatttctgcaaaagtggcgcattcactctggcgctatttctccttttctgcggaatatacggcggtttccccatcggcgaataaaccgctccgtgcggatgcaaaaccgttcgataaaaatgacgtgcaattagtcagccaacaaaactggtttggcaaatatcaacccgtcgccgcaccggtaaaacaacctgaatctgcgcctgtggcagaaacgcgtcttaatgtggtgctgcgcgggatcgcctttggtgccagacccggcgcggttattgaagaaggcggcaaacagcaggtctatttgcagggtgaacggcttggctctcacaacgcagtgattgaggaaatcaaccgcgaccatgtgatgctgcgctatcaggggaaaatggaacgtctgagtctggcagaagagaagcgtcccaccatagccgtgaccagcaaaaaagccgtcagcgacgaagcaaagcaagctgttgctgagcctgctgccagtgcgccagtggagatcccggctgccgtgcgtcaggcactggcgaaagatccgcagaaaatttttaactatatccagcttacgcctgtgcgtaaggaagggattgtcggttatgcagtgaaaccgggggcagatcgttctctgttcgatgccagcggttttaaggaaggcgatatcgccattgcgctaaatcagcaggatttcactgatccacgagcaatgattgctctgatgcggcagttaccttcaatggattccattcaacttacggttttacgcaagggtgcgcgctacgacatttccatcgcgctgcgctaa

SEQ ID NO: 262827 - DNA, 411 bp, Klebsiella pneumoniae
atgtcgataaaacagatgccagggagggtattaatatcgctattgttgagcgttacaggattattaagtggctgcgccagccataatgaaaacgccagtttactggcgaaaaaacaggcgcaaaatatcagccaaaacctgccgattaaatctgcgggatataccttagtgctggcacaaagtagcggcacgacggtaaaaatgaccattatcagcgaagcgggtactcagaccacgcagacacctgacgcctttttaaccagctatcaacgacaaatgtgcgctgacccgacggtgaaattaatgatcactgagggaattaattacagcataacgattaatgatacacgtacaggtaaccagtatcagcggaaactggatcgtaccacctgtggtatagtcaaagcataa

SEQ ID NO: 262828 - DNA, 810 bp, Klebsiella pneumoniae
atgctttttgatgtttttcagcaataccctgcggcgatgcccatactggcaaccgtcggaggattgatcatcggcagttttttgaatgtggtgatttggcgttaccccatcatgctgcgccaacaaatggcggagtttcacggtgaaatgtcgagtgcgcagtcaaaaataagccttgcgctgccgcgttcgcactgtccgcattgccagcagactatccgcgttcgtgacaatattccgctgctctcctggttgatgctcaaagggcgctgccgtgattgtcaggcgaaaatcagcaagcgttatccgttggtggagttattgacggcactcgcttttttgctggcgagtctggtgtggccagaaagtggatgggggctggcggtgatgatattatccgcctggctgattgccgcgagcgtcattgacctcgataaccaatggctgcccgatgtttttactcagggcgtattgtggaccgggctgattgcggcatgggcgcaacagagtccgttaacgctacaagacgcagttaccggcgtcctggtggggtttatcactttttactccctgcgctggatagccggaatagttctgcgtaaagaagcattaggcatgggcgatgtattacttttcgccgctttaggtggctgggtggggccgttgtcgctacccaatgttgctttaatcgcatcatgctgcggtctgatatatgccgttattacaaaaagaggatcaaccacactgccttttggaccgtgtttaagtctgggcggtatagcaacactttatctacaggcattgttttaa

SEQ ID NO: 262829 - DNA, 4428 bp, Klebsiella pneumoniae
ttgccggaagtgaaacctgatccaacaccaaacccggagccgacgcctgagccaacgccggacccagaacctacgccggaaccgacacctgatcctgagccaacaccagaaccggagccagaacctgttcctacgaaaacgggttatctgaccctgggcggaagccagcggataactggtgctacttgtaatggtgaatccagcgatggctttacctttacgccaggcgacaaagtcacctgtgtggcagggaacaacacgacaattgctaccttcgacacccagtcagaagctgcgcgtagcctgcgtgcggttgaaaaagtgtcgtttagtcttgaggacgcgcaagaactggcagcttccgacaataagaaaagcaatgcggtttcgctggtaacgtccagtaacagctgtccggcggatacagaacaggtttgcctgacgttctcctcggtgatcgagagtaaacgtttcgactcgctgtataagcaaatcgatctggcaccggaagagttcaaaaagctggtcaatgaagaggtggaaaacaatgctgcgaccgataaagcgccatccactcatacctcaccggtcgtgcctgtcaccacgccgggaacaaaaccggatctgaacgcgtccttcgtgtcggctaacgcggaacagttttatcagtatcaacccactgaaatcattctttccgaaggccgactggtggatagcatgggcaatggtgtggttggcgtaaattactacaccagctcaggccgtggcgtaactggcgaaaacggcaaattcaacttcagctggggcgaaaccatctcctttggtatcgacacctttgaactgggctcagtgcgcggcaataagtcgaccattgcgttgactgaactgggtgacgaagttcgcggcgcgaatattgatcagcttattcatcgttactcccaggccggaaaaaatgatgagcgtgaagtgccggacgtagtgcgcaaggtctttgccgagtatcccaacgtaatcaacgagattatcaatctctcgttatccaatggcgaggcgttgagcgaaggcgatcaaacctttgagcggaaaaacgaatttcttgagcagtttgaatccgggcaggctaaagagattgatacggcgatttgtgactcccttgggggctgcaactctcagcgttggttctcgttgacagcacgcaatgttaacgaaggtcagattcagggcgttatcaacaagctgtggggtgtggataaagattacaaatcagtgacgaaattccacgtcttccatgactctaccaacttctatggtagcaccggtaatgcgcgcggtcaggcggtggtgaatatctctaacgcggccttcccgattctgatggcgcgtaatgataaaaactactggctggccttcggcgagaaacgtgcctgggataaaaatgagctggcgtacattactgaagcgccttccattgtgcgaccagagaacgtgacacgcgataccgccaccttcaacctgccgtttatttcgctggggcaagtcggtgagggcaaactgatggttatcggtaacccgcactacaacagcattttgcgttgtccgaacggttacagctgggaaggcggtattgataaaaacggtcagtgtacgcgtaacagtgattctaatgatatgaagcactttatgcagaacgtgttgcgctatctgtccgacgataaatggacgccggacgcgaaagccagcatgaccgtaggtaccaacctggatactgtctatttcaaacgtcatggtcaggttacaggaaacagcgctgagttcggctttcatccggattttgcgggtatctctgttgagcatttaagtagctatggcgatctcgacccgcaggaaatgccgctgctgatcctcaacggctttgagtatgtgactcaggttggtaacgatccttatgcaatcccgctgcgagcagataccagcaaaccgaagctgactcagcaggatgtgaccgatctgatcgcctatctgaacaaaggtggatcggtgctgatcatggaaaacgtgatgagcaatcttaaggaagagagcgcgtctggctttgtgcgtctgctggatgccgcaggcctgtcaatggcactgaacaagtcggtggtgaataacgatcctcaggggtatccggatcgcgttcgtcagcagcgcgaaaaaggtatctgggtatatgaacgttatccgtttgttgatggaaaaccgccgtataccattgatgaaacaacgaaagaagttatctggaaataccagcaagacaacaagccagatgacaagccgaaactggaagtggccagctggctggaagatgtcgatggcaaacaggtcaagcgttatgcctttatcgatgaggcggagcatgaaacaaacgagtccttggaggcggcaaaggcaaaaatcattaaggcatttcctggattagaggagtgtaaggacccgacataccactacgaggtcaactgtctggaataccgtcctggcaccaatgttccggtaaccgggggaatgtatgttccgcgctatacgcaactgaatctcagcgccgacactgcgaaagcgatggtgcaggctgcggatttaggcaccaacattcagcgtctgtatcagcatgagctctacttccgaaccaatggtcgcaaaggtgagcgtctgagcagcgtcgatctggaacgtctgtaccagaacatgtcggtctggctgtggaatgaaattgaatacagctatgacagcagcaaggaagacgagctgggctttaaaacgttcaccgagttcctgaactgctacgccaacgatgcttacaccaaaggtacgctgtgctccgcagagctgaaacaatcgctgatcgataacaagatgatctacggtgaaggcagcaaagcgggcatgatgaacccgagctatccactcaactatatggaaaaaccgctgacgcgcctgatgctgggccgttcctggtgggatctgaacattaaggttgatgtggagaagtaccctggagcggtatctgtagggggagaagaggttactgaaaccatcagcctgtactcgaatccgaccaaatggtttgcaggtaacatgcagtcaactggcctgtgggcaccggctcagaaagaggtcaccattaagtccaatgcgaacgttcctgtgactgtcaccgtggcgctggccgacgacctgaccggacgtgagaagcatgaagttgctctgaaccgtccgccaaaagtgacgaaaacctatgagctgaaagccaatggtgaggtgaagtttacggttccttacggtggtctgatttatatcaagggcaacagcccaaagaatgagtcagccaaattcacctttactggtgtggtgaaagcgccgttctataaagatggcgcatggaaaaacgctctgaactcccctgcgccgctgggcgagctggaatcagacgctttcgtctatactacgccgaagaagaaccttgaggccagcaattacaagggcggtcaggaacaattcgctgaggaactggatacctttgccagctcgatgaatgacttctacggacgtgatggcgaaaacggtaagcaccggatgtttacctataaaaacttgacggggcacaagcatcgtttcaccaacgatgtgcagatctccatcggtgatgcgcactctggttatccggtaatgaacagcagcttctcgacgaacagcaccacgctgccgacgacgccgctgaacgactggctgatctggcacgaagttggtcacaacgccgccgaaacgccgctgactgttcctggcgcaactgaagtagcgaacaacgtgctggcgctgtacatgcaggatcgctatctcggcaagatgaaccgtgtcgctgacgacattaccgtcgcgccggaatatctggaagagagcaacggtcaggcatgggcgcgcggcggtgcgggtgaccgtctgctgatgtacgcgcagctgaaggaatgggcagagaaaaactttgatatcaaacagtggtatccagaaggctctctgccagagttctacagcgagcgtgaagggatgaaaggctggaacctgttccagttgatgcaccgtaaagcgcgcggcgatgaggttggcaaaaccaagtttggagaaagaaattactgtgccgaatccaacggtaacgctgccgacacgctgatgctgtgtgcctcctgggtcgcccagacggatctttcggagttctttaagaaatggaatccgggcgcgaatgcttaccagttgccgggagcgacagagatgagcttcgagggcggtgtgagccagtcggcatacaacacgctggcgtcgctcaagctgccgaaaccggaacaggggccggaaaccattaataaggttaccgaatattctatgcctgctgaataa

SEQ ID NO: 262830 - DNA, 483 bp, Klebsiella pneumoniae
atgcagcgtcggcccgcgaactggccagaatgcctgaccacgcggcgcacccaggccaccagttcgggacatcagcgatttttcgctttcggtcggtttgtaggtggtgcctttgcgcgtcgcttctttctggcggtcgcgaaccgcctgggcctcacgcgcttctcgttcagcacgcgctttcgccgcggcttccgcacgggcaatgctgttacgcagacgggattcgttggcgcgcagctcgctcaactgttgctgaccttgctggatggaagactccagccctgccagcgtctttttacgttcgttcagcgcctgggtcagcttcgcctgttgggcgcgctgctcatacaacagcgtttgttgctcgctctgtttctcttccagctcggcgcgttgcatagcgacttcttcacgcgtttgtttcaactgagcaatggtttcttgtcgcgcctggttgagatagccgaaataagcctgtaa

SEQ ID NO: 262831 - DNA, 1545 bp, Klebsiella pneumoniae
atgtcggtttctaaaaaacctatggtactggtgattctggatggctatggctatcgtgaagaacagcaggataacgccatttttagtgctaaaaccccggtaatggatgcactgtgggccaatcgtccgcataccctgatcgacgcttccggtctggaagtcggtctgcctgaccgtcagatgggtaactccgaagtaggtcacgttaacctgggtgccggccgcatcgtgtatcaggacctgactcgtctggacgttgaaatcaaagatcgcgctttcttcgctaacccggtactgactggcgcggtagataaagcgaaaaacgcaggcaaagcagttcacattatgggtctgctgtccgcaggcggcgtacacagccacgaagatcacatcatggcgatggtagaactggcagctgaacgcggcgcagaaaaaatctacctgcacgcattccttgacggtcgcgacactccgccgcgcagtgctgaatcctcgctgaaaaaattcgaagagaaatttgccgcgctgggtaaaggccgcgtagcgtccatcattggtcgttactacgccatggaccgcgataaccgttgggatcgcgttgaaaaagcttatgacctgctaactctggcgcagggtgagttccaggccgataccgccgttgctggtttgcaggctgcttatgctcgcgacgaaaacgacgaattcgtgaaagcgaccgttatccgtgcagaaggtcagccagacgcggcaatggaagacggcgatgcgctgattttcatgaacttccgtgctgaccgcgcacgtgaaatcactcgtgcattcgtgaacgctgatttcgatggcttcgcgcgtaagaaagtggttaacgtcgatttcgtgatgctgaccgaatacgccgctgacatcaaaactgcggttgcttacccaccagcttccctggttaacaccttcggcgagtggatggcgaaaaacgacaaaactcagttgcgtatttccgaaaccgaaaaatatgcccacgttactttcttcttcaacggtggcgtagaagagtcgttcaaaggcgaagatcgcattctgatcaactcaccgaaagtggctacctacgatctgcaaccggaaatgagctccgcagagctgaccgaaaaactggttgcggcaatcaagagtggcaaatacgacaccattatctgtaactatccgaacggcgacatggtaggtcacaccggggtgatggaagcggcggttaaagcggttgaagcgctggatcactgcgtggaagaagtcgcgaaagcggttgagtccgtgggtggacaactgctgatcaccgctgaccacggtaacgctgaacagatgcgcgatccggcaacgggtcaggcacacacggcacacaccaacctgccagttccgctgatttacgttggtgataagaacgtgaaagcggttgaaggcggcaaactttctgacatcgcgccgaccatgttgtcgctgatgggtatggaaatcccgcaagagatgactggtaagccgctgttcatcgtggaataa

SEQ ID NO: 262832 - DNA, 432 bp, Klebsiella pneumoniae
atgcaagaaattatgcaatttgttggccgtcatcccatactgagtatcgcctggatcgcgttactggtggcggttattgtgactacgtttaagagcctgacctcgaaagtgaaggtgattactcgtggtgaagctacgcgtctgatcaacaaagaagatgctgtggttgtggatttacgtcagcgtgatgacttccgtaaaggccatatcgcaggttctatcaacctgttgccgagcgaaatcaaagccaacaatgttggtgagcttgagaagcacaaagacaaaccggttatcgtggtagacggttctggcatgcagtgccaggagcctgcaaacgcgctgacgaaagctggttttgcgcaagtattcgtgctgaaagagggcgttgctggctgggctggcgaaaacttacctctggtgcgcggcaaataa

SEQ ID NO: 262833 - DNA, 252 bp, Klebsiella pneumoniae
atggccaatgttgaaatctataccaaagaaacctgcccgtattgccatcgtgcgaaagcactgctgagcagcaagggcgtgagttttcaggagttgccgatcgatggcaacgccgctaagcgtgaagagatgatcaaacgcagcggtcgcaccacggttccccagatttttattgacgcacagcacattggcggctgtgatgacttgtatgcattggatgcacgtggtggactggatcccctgctgaaataa

SEQ ID NO: 262834 - DNA, 777 bp, Klebsiella pneumoniae
atgattgttttacccagacgcctgtcagacgaggttgccgatcgtgtgcgggcgctgattgatgaaaaaaacctggaggcgggcatgaagttgcccgctgaacgtcaactggcgatgcaactcggcgtatcgcgtaattcactgcgcgaggcgctggcaaaactggtgagcgaaggcgtgctgcttagtcgacgcggcggcgggacgtttattcgctggcgtcatgacacatggtcggagcaaaacatcgtccagccgctgaaaacgctgatggccgatgatccggattacagtttcgatattctggaagcccgctacgccattgaagccagcaccgcatggcatgcagcaatgcgcgccacaccaggcgaaaaagagaaaattcagctttgctttgaagcaacgctaagtgaagacccggatctcgcctcacaagcggacgttcgttttcatctggcgattgccgaagcctcacataacatcgtgctgctgcaaaccatgcgcggtttcttcgatgtcctgcaatcctctgtgaagcatagccgccagcggatgtatctggtacccccggttttttcacagctgaccgaacaacatcaggcagtcattgacgccatttttgccggtgatgctgacggggcgcgtaaagcaatgatggcgcaccttagctttgttcacaccaccatgaaacgattcgatgaagatcaagctcgccatgcacgcattacccgcctgcctggtgaccataatgagcattcgagggagaaaaacgcatga

SEQ ID NO: 262835 - DNA, 4557 bp, Klebsiella pneumoniae
atgaacaaaatttttaaagttatctggaatccggcaacaggcagttacaccgttgccagtgaaacggcaaaaagccgtggcaagaaatccgggcgcagtaagctgttaatttctgccctggttgctgggggaatgttgtcgtcgtttggggtacaggctcaggcaggaagggacaacggtcagggcgtcaattatggccagggaacaggaacaggctgggttgctatcggtgaagatgcaaaagcaaatagttttacagacaccgggggtggctccagcaccgcagtaggttatcactcaactgctgacggaaggtggtcaacagccctcggtgctaagacccattcgcttggcgaagcatcagtggcgttagggattaacactacctcagcaggtgagcgaagcctcgctataggtgcatcggcaacgtcaacgggtggattttcaatcgcacttggtcgttatgcgaactcagtaggtgaattttctattgcacaaggggatcacgcagagactggtgctgatgacgccatcgcatttggacgtgaaagcaaggccttaggaattatgagtatcgccctcggagccacggctaatgcgtcgaaagaatatgcaatggcgctgggtgcaagtagcgccgcatctgcagctaacgcgattgcagtaggccgcaacagtgctgcagctggcgtagacagcctcgcattcggtagactatccgccgccaacgccgcaaacgcgattgctatgggtgcagagagcaaagctgctgaaaatgcgacggcagttggtactaacgcggaggcaaatggacttaatagtatcgcgttgggctccggcagtattgcagatgtcgacaacacgattgctctgggcaatcaaagtcaggcagtagcggctggcgcaattgccatcggtcaagggaataaagctgacggcgcaaatgctatcgcgctgggtaatggtagtattacaggtggtgtaaatgctattgctcttggacaaggcagttatgccggtttagaaaatggcactgcaattggtgctcaagccagtgctcaagggaaaaattcagttgctctgggtgctggttctgtagcgactgacgcggatactgtttctgtgggtaacacaacagctcagcgacaaattgtcaatatggcagcaggtgatatcagcactaccagtactgatgccatcaatggatcacagctttatgctatcagtaagtcagtagcggacaatcttggtgggggggctaccgtcaatgcgcaaggcgtcgttacttccccaaattacaggctgaaaagtggtattttcggcactgttggcgacgccttaacgggcctggacaataatacgttacaatgggactcccttaaaaaggcatatagtgcggcacatggtacagatactaccagtaccatcaccaacgttaaagacggcgctatttctgataccagtaaggatgcggttaacggttctcagctgaaaaccaccaacgataacgtagcgaccaatactgccaatatcaccaccaacactaacagtatcaataccctgacggattccgttggcgaccttaaagacgatgccctgctgtggaatggcaccgcgttcagcgccgcgcacggtaccgaagccaccagcaaaatcaccaacgtcaaagacggtgacctgacggctggcagcactgacgcggtaaacggctctcagctgaaaaccactaacgatgccgtggcagccaacaccaccaatatcgccacgaataccaccaacatcaccaacctgactgacgctgttgacagcctcggtgacgattccctgctgtggaacgctacggcgggggcattcagtgccaaacacggtaccaacggtactgatagcaaaatcaccaacttactggcaggcacggtatcctctgatagcactgacgccattaatggctcacaactttatggcttagctgattcatttacgtcataccttggcggtggtgctgatatcagtgatgcgggtgtattaaccgggccaacctacactattggtggtactgactacaataacgtcggtgatgctctggctgccattaacacgtcatttagcacatcactcggtgacgccctactctgggatgcgaccgccaagggcggtgacggtgcgtttagcgccggtcgcggaaaagataacacggccagcatcattactaatgttgcagacggtgcaatttcctctaccagcagcgacgctattaacggctcacagctctatgacaccagtaagtacattgccgatactctgggtggtgacgcagaagtcaatgctgacggcacaatcaccgcaccgacttatgccatcgctggcggcagttacagcaacgtcggtgacgcgctggaagcgatcgataccacgctggatgacgctctgttgtgggatgcaacagccaatggcggtaatggtgcatttagcgccggtcgcggagtagataaaacggccagcgtcattactaacgtcgcagacggtgcaatttcctccaccagcagcgatgctattaacggctcacaactgtataccaccaacaagtacatcgctgatgcgctgggtggtgacgcagaagtcaacgctgatggttctattactgcgccgagttacaccattgcaaatgccgagtacaacaacgtcggtgacgccctggatgcgctcgacgataacgctctgctgtgggatgcaacggccaatgacggcgcaggtgcctacaacgccagccatgatggcaaggccagcatcatcacaaacgttgctgatggtaacattggcgaaggcagcactgacgccatcaacggttctcagctgtttaacaccaatatgctgatccagcagaacagcgaaatcatcaatcagcttgccggtaacaccagcgaaacctacatcgaagataacggtgcgggcattaactatgtacgtaccaacgacaacggcttagcgttcaacgatgccagcgcttcaggtattggcgctacggctgtgggttataacgctgtcgcctcaggcgaaagcagcgtagccattggtcaaggtagcagcagcaccgttgataccggtattgccctgggtagcagttccgtttccagccgtgtaatagttaaaggttctcgtgacaccagcgtgtcggaagaaggtgttgtgattggttatgacaccacggatggcgaactacttggtgcgttgtctattggtgatgacggtaaatatcgtcaaatcatcaacgtagccgatggttccgaagcccatgacgccgttacggttcgccagttgcaaaatgccattggtgcagtcgctaccacgccgaccaaatacttccacgccaactcaacggaagaagattcactggcagtaggtgaagactcgctagcaatgggcgcgaaaactatcgttaatagtaatgcgggtattggtatcggttatggtgcctacgtggacgcgaatgcacttaatggcattgctatcggtagcaacgcgcgtgcaaaccatgcaaacagcattgctatgggtaatggctcacagacgactcgtggtgctcaaactggctacaccgcctacaacatggacgcaccacagaactctgtgggtgagttctctgtcggcagtgaagacggtcaacgtcagatcaccaacgtcgcggctggttcggctgataccgatgcggttaacgtgggtcagttgaaagtaacggacgcgcaggtttcccagaatacccagagcattactaacctgaacaatcaggtgacgaatctggatactcgcgttaccaatatcgaaaacggcattggcgatatcgtaaccaccggtagcaccaaatacttcaagaccaacaccgatggcgtagatgccaacgcgcagggtaaagacagtgttgcaattggttctggttccattgctgccgctgacaacagcgtcgcgctgggtaccggttccgtggccaacgaagaaaacaccatctctgtgggttcttctaccaaccagcgtcgtatcaccaacgttgctgcaggtgttaatgccaccgatgcggttaacgtttcgcagctgaagtcttctgaggcaggcggcgttcgttacgacaccaaagctgatggttctatagactacagcaacatcactctcggtggtggtaatggcggtacgactcgcatcagcaacgtctccgctggcgtcaacaacaacgacgcagtgaactatgcgcagttgaagcaaagcgtgcaggaaacgaagcaatacaccgatcagcggatggttgagatggataacaaactgtccaaaaccgaaagcaagttgagcggtggtatcgcttctgcaatggcaatgaccggtctgccgcaggcttacactccaggtgccagcatggcctctattggtggcggtacttacaatggtgaatcggctgttgctttaggtgtgtcgatggtgagcgccaatggtcgttgggtctacaaattacaaggtagtaccaatagccagggtgaatactccgccgcgctcggtgccggtattcagtggtaa

SEQ ID NO: 262836 - DNA, 684 bp, Klebsiella pneumoniae
atgaacctaaagaaaacactgttaagcgtgttaataatagtgcctctctgcttattggcagggtgtgactatattgaaaaagcgagtaaggtcgacgacctcgttacacagcaagagttgcaaaaaagcaaaattgaggcgcttgagaaacagcaggaactcgataagcgaaagatagaacatcttgaaaaacaacaaactactgtcataaatagtaccaagacgctcgctggcgtggtgaaagcggttaaagacaagcaggacgaatttgtctttacagaatttaacccagcacaaacacaatatttcattttaaataacggatcggtcggtttggcaggccgggtgctggctattgatgcggttgaaaatggcagtgttattcgtatttcgctggttaaccttttaagcgttcccgtatcaaatattggctttcatgcgacatggggcaatgaaagacccaccgatgccaaagctctggcaaagtggcaacaattacttttcaacaccaccatgaattccactctgcaattaatgcctggtcaatggcaagacattaatctgacattaaaaggcgtttcgcctaataacctgaagtatctgaagttgtccatcaatatggccaatctccagttcgacactgttcaacctgctgaaactcggcagcgaaaaaacaaaaaataa

SEQ ID NO: 262837 - DNA, 363 bp, Klebsiella pneumoniae
atgaaagaagtcgaaaaaaacgaaatcaaacgtctcagcgatcgtctggacgccatccgccaccagcaggccgatctgtcgctggttgaagccgcagacaaatatgccgaactggaaaaagagaaagccactctggaagcagaaattgctcgcctgcgcgaagttcacagccagaaactcagtaaggaagcacagaagctgatgaagatgccgttccagcgcgcgattactaaaaaagagcaagctgatatgggcaaactgaagaagagcgttcgcggactggtcgttgtgcacccaatgaccgcgctgggccgcgaaatgggcctacaagagatgacagggttctctaagactgcgttttaa

SEQ ID NO: 262838 - DNA, 348 bp, Klebsiella pneumoniae
gtgcgatttgttaaatccgtaaccagcgaatttctccaccaggtcgaagattttcatcgccagttcggcgttgattccgttcttttctgcaccttcagcaaatacagaacgctgcttagccatctcttccggctttttcttacccatcgcacgacgcagcatatccgcgccaccgagggtataaccagaaagcacctgggcaatctgcatgacctgttcctgatacaggatgatgccgtaggttggctccagtaccggtttcaggctttcatgctgccactgcacgtccggataggagatctcttcgcgaccatgtttacggtcgataaagttatccaccatccctga

SEQ ID NO: 262839 - DNA, 831 bp, Klebsiella pneumoniae
ttgcaacggaccggggcggaacagtgccaccagtgcgatcatatcttcgaagcagtcaggttgcagacgcttgatcaggtccttcatgccgcgcgattcaagctggaataccgcagtggtttccgagcgttgcagcatgtcgaagcttttcttgtcatccagcgggatcgcggcgatatccagaggcggctcgccattcttcgcccgccgcttgttgatcatctccagcgcccagttgatgatggtgagcgtacgcaaaccaaggaagtcgaacttcaccagtccggcgtattcaacgtcgcttttatcaaactgggtgaccggatgtttgccctcttcatcgcagtaaagcggcgcaaaatcggtaattttggtcggtgcgataaccaccccaccggcgtgcttaccggcgttacgggtgaccccttccagtttgcgcgccatgtcgatcagcgccttaacttcttcatccgcttcgtagatttccggcagctgcggctcggcttcaaacgctttcgccagcgtcatccccggatcgggcgggatcagtttcgagatacggtcgacaaagccgtacggatgccccagcacgcggcctacgtcgcggatcaccgctttcgccgccatcgtaccgaaggtgataatctgcgataccgcatcacgaccgtacatgtccgctacgtgctcgataacctggtcgcgtttctccatacagaagtcaacgtcgaagtcaggcatggagacacgttccgggttaaggaaacgttcgaacagcaggtcaaattccagcggatcgaggtcggtgattttcagcgcgtaggccaccagtga

SEQ ID NO: 262840 - DNA, 291 bp, Klebsiella pneumoniae
gtggatcgcgacgcggatttcgtgtgcgtcaaagtcgctgctgtcgataaagcgcacatcgttagtcgccacgacgggcaaaccgcgcgcttccgccagttccaccgccgcgtgcagatagctttcttcatccggcctgccggtgcggatcagctcgagaaaatagcgatccgggaagtgttcttcataaaacgcgacacactcatctaccagcgcgctgttaccacgcaaaagactgcgtccgacgtcgcccatgcgcccgccggaaagaaggatcaacccttcgtttaa

SEQ ID NO: 262841 - DNA, 597 bp, Klebsiella pneumoniae
atgatcgaatttgtttatccgcacacgcagctggttgcgggtgtggatgaagtcggacgcgggccgttagttggcgcggtcgtcaccgctgcggtgatccttgacccatcgcgcccgattgccgggctgaatgattccaaaaagctgagcgaaaaacgccgtctggcgctctgtgaagagatcaaagataaagcgttgagctggagtctgggccgcgcggaaccccacgaaatcgacgaactgaatattttacacgcgaccatgctggcgatgcagcgtgccgtcgctgggctgcatattgcgccggaatatgtgttgattgatggtaaccgctgcccgaaattaccgatgccttcgatggcagtggtgaaaggcgatagccgcgtaccagaaatcagtgctgcgtctatcctggcgaaagtgacgcgcgacgccgaaatggcggcgctggatattgttttcccgcaatatggttttgcccaacacaaagggtatccaactgcttttcatctggaaaaactggctgaatatggcgcgactgaacatcatcgtcgcagctttgggcctgtcaaacgcgcactgggacttgcgtcctga

SEQ ID NO: 262842 - DNA, 456 bp, Klebsiella pneumoniae
ttgactactaacactcatactctgcagattgaagagattttagaacttctgccgcaccgtttcccgttcttactggtggatcgcgtgctggattttgaagaaggtcgttttctgcgcgcagtaaaaaatgtctctgtcaatgagccattcttccagggccatttccctggaaaaccgattttcccgggtgtgctgattctggaagcaatggcacaggcaacaggtattctggcgtttaaaagcgtaggaaaactggaaccgggtgagctgtactacttcgctggtattgacgaagcgcgcttcaagcgcccggtcgtgcctggcgatcaaatgatcatggaagtcactttcgaaaaaacgcgccgcggcctgacccgttttaaaggggttgctctggtcgacggtaaagtagtttgcgaagcaacgatgatgtgtgctcgtagccgggaggcctga

SEQ ID NO: 262843 - DNA, 1353 bp, Klebsiella pneumoniae
atgctgagttttctctgggatttggcttcgttcatcgttgcactgggtgtacttatcaccgtgcatgaatttggtcatttctgggttgcccggcgttgtggtgttcgcgttgagcgtttctcaatagggtttggtaaggcgctctggcggcgaactgataagctcggcaccgaatatgttatcgccctgatcccgctgggcggttatgtcaaaatgctggatgagcgcgcagaaccggtcgttccggaactccgccaccatgccttcaataataaatctgtcggccaacgagcggcgattattgccgcaggtccggttgcaaacttcatttttgctatctttgcctactggctggtttttattattggtgtgcctggcgtacgtccggtggttggcgaaatagcagccaattcgatagctgcagaagcacaaattgcaccaggtacggaactaaaagccgtagatggtatcgaaacgcctgattgggatgccgtgcgtttgcagttggtcgataaaattggcgatgaaagcaccaccattacagtagcgccatttggcagcgaccaacggcgggatgtaaagctcgatttacgtcactggacgtttgagcctgataaagaagatccgataacttcgctggggattcgtcctcgtgggccgcaaattgaatctgtactggaaaatgtgcagccaaactcggcggcaagcaaggcaggtttgcaagcaggcgacaggatcgttaaagtcgatggtcagcccttaacgcagtgggtgacctttgtgatgcttgtccgggataacccgggtaaatccttagcgttagaaatcgaaaggcaggggagtcccttgtctttgacattaatcccggagagtaaaccgggtaatggtaaagcgattggttttgtcggtattgagccgaaagtcattcctttgccagatgagtataaagttgtacgccagtatgggccgttcaacgccatcgtcgaagccacggacaaaacgtggcagctgatgaagctgacggtcagtatgctgggaaaattgatcaccggtgatgtgaaactgaacaacctcagtgggccgatctctatcgccaagggggctgggatgacagcggaactcggggttgtttattacctgccgtttcttgcgcttattagcgtgaacttagggataattaacctgtttccgttgcccgtacttgacggggggcatctgctgttccttgcgatcgaaaagatcaagggcggaccggtatccgagcgggttcaagacttttgttatcgcattggctcgattctgctggtgctgttaatggggcttgcacttttcaatgatttctctcggttatga

SEQ ID NO: 262844 - DNA, 858 bp, Klebsiella pneumoniae
ttgctgaagtatcgcctgatatctgcttttgtgttaatacccgtcgtcatcgcggcgttgtttctgttgccgccggtggggttcgccattgtaacgctggtggtctgcatgctggcagcgtgggaatggggacagcttagcggttttaccactcgctcgcagcgagtatggttggcggtgttatgtgggttattgttggcgctgatgctttttctgttgccggaatatcaccgaaatattcatcaaccgctggttgaaatctcactttgggcttcgctgggttggtggagtgtcgcgctattgctggtgctgttttacccaggttccgcagcaatctggcgtaactctaaaacattgcgcattatttttggcgtgctaaccattgttcccttcttctggggcatgctggcgttacgggcctggcactacgacgagaatcattacagtggcgcaatatggctgctctatgtcatgatcctggtatggggcgctgactctggcgcatatatgtttggcaaattgtttggtaaacataaactggcaccgaaggtttctccgggtaaaacctggcaaggctttataggtggactcgcgactgcagcggtaatctcatggggttatggcatgtgggcgaatctcgacgtcgctcccgtcaccttactcatttgctctattgtcgcagcgttagcctcagtgctcggcgatctgaccgagagtatgtttaagcgtgaagcaggaattaaggacagcggtcatttaattccaggacacggtggtattttagatcgtattgatagcctgacggctgcggtaccggtctttgcttgcttgttgttactggtattcaggacgctttaa

SEQ ID NO: 262845 - DNA, 690 bp, Klebsiella pneumoniae
atggacggcaatggtcgctgggcaaaaaagcaagggaagattcgtgcctttgggcataaagccggggcaaaatccgtccgccgggctgtctcttttgcggccaacaacggtattgaggcgttaactctgtatgcctttagtagtgaaaactggaaccgaccagcgcaggaagtcagtgcgttaatggaactgtttgtgtgggcgcttgatagcgaagtaaagagtctgcaccgacataacgtgcgtctgcgtattattggcgataccagtcgctttaactcgcgtttgcaagaacgtattcgtaaatctgaagcgctaacagccgggaataccggtctgacgctgaatattgcggcgaactacggtggacgttgggatatagtccagggagtcaggcaactggctgaaaaggtgcagcaaggaaacctgcaaccagatcagatagatgaagagatgctaaaccagcatgtctgtatgcatgaactggcccctgtagatttagtaattaggactgggggggagcatcgcattagtaactttttgctttggcaaattgcctatgccgaactttactttacagatgttctctggcccgatttcgatgaacaagactttgaaggggcgttaaatgcctttgctaatcgagagcgtcgtttcggcggcaccgagcccggtgatgaaacagcctga

SEQ ID NO: 262846 - DNA, 1197 bp, Klebsiella pneumoniae
atgaagcaactcaccattctgggctcgaccggctcgattggttgcagcacgctggacgtggtgcgccataatcccgaacacttccgcgtagttgcgctggtggcaggcaaaaatgtcactcgcatggtagaacagtgcctggaattctctccccgctatgccgtaatggacgatgaagcgagtgcgaaacttcttaaaacgatgctacagcaacagggtagccgcaccgaagtcttaagtgggcaacaagccgcttgcgatatggcagcgcttgaggatgttgatcaggtgatggcagccattgttggcgctgctgggctgttacctacgcttgctgcgatccgcgcgggtaaaaccattttgctggccaataaagaatcactggttacctgcggacgtctgtttatggacgccgtaaagcagagcaaagcgcaattgttaccggtcgatagcgaacataacgccatttttcagagtttaccgcaacctatccagcataatctgggatacgctgaccttgagcaaaatggcgtggtgtccattttacttaccgggtctggtggccctttccgtgagacgccattgcgcgatttggcaacaatgacgcccgatcaagcctgccgtcatccgaactggtcgatgggacgtaaaatttccgtcgattcggctaccatgatgaacaaaggtctggaatacattgaagcgcgttggctgtttaacgccagcgccagccagatggaagtgctgattcacccgcagtcagtgattcactcaatggtgcgctaccaggacggcagtgttctggcgcagctgggtgaaccggatatgcgtacgccaattgctcacaccatggcatggccgaatcgcgtgaactctggcgtgaagccactcgatttttgcaaactaagtgcgttgacatttgccgcaccggattatgatcgttatccatgcctgaaactggcgatggaggcgttcgaacaaggccaggcagcgacgacagcattgaatgccgcaaacgaaatcaccgttgctgcttttcttgcgcaacaaatccgctttacggatatcgccgcgttgaatttatccgtactggaaaaaatggatatgcgcgaaccacaatgtgtggacgatgtgttatctgttgatgcgaacgcgcgtgaagtcgccagaaaagaggtgatgcgtctcgcaagctga

SEQ ID NO: 262847 - DNA, 279 bp, Klebsiella pneumoniae
atgattgcccgttcggcaaccatcctcgggatcacggtaatcggcgggctgatcgcttcgtatgtgcatattaacgtggtgacatcgtttgccatcgacagtacccacagcgtcgcactgcagcaggatttcttcgataaagtcttcccgaacattttaccgatggcctacaccctgttgatgtattacttcctgcgggtgaaaaaagcgcatccggtgctgttaatcggcgtgacttttgtgctctctattgtttgttctgcattcggcattttgtaa

SEQ ID NO: 262848 - DNA, 714 bp, Klebsiella pneumoniae
gtgcaaacccttcaacaagttgaaaactatacggcgttaagtgaacgtgccagcgaatatttattggccgtgatccgtagcaaaccggatgccgtgatttgcctggcgaccggagccacgccattactgacgtatcattatctggtagaaaaaatccaccagcagcaggttgatgtcagccatctcaccttcgtgaagctcgacgaatgggtggatctgccattaactatgcctggcacctgcgaaactttcctacaacagcatatcgtgcagccgctggggctacgtgaagaccagctcatcagctttcgctccgaagagataaatgagacagagtgcgaacgggtaacgaacctgattgcgcgcaaaggcggcctggatttatgcgttctcggattggggaaaaacggtcatcttgggctgaacgaaccgggagaaaacctgcaaccggcctgccatatcagtcaacttgatgccagaacacagcaacatgagatgttaaaaaccgcgggccgtcccgtgactcgtgggatcaccttaggcctgaaggatattctcaatgcccgcgaagttttgttactggtgactggcgaaggaaagcaggatgcgacagatcgttttctcacggctaaagtctctaccgctatcccggcttcatttttatggctgcataactatttcacatgcatgattgatgagatgtgtcgtcgttaa

SEQ ID NO: 262849 - DNA, 864 bp, Klebsiella pneumoniae
atgaaacaacaccaatcggcggataattctcagggccagctttacattgtaccgacgccaatcggcaatctggcggatatcacccagcgtgcgttggaggtattacaggccgttgatctgattgccgccgaggatacgcgtcacaccggtttattgctgcaacattttgggattaatgctcggttgtttgcgctgcacgaccataacgaacaacaaaaagccgaaacgctgctggcgaagctgcaagaggggcaaaacattgcgctggtttccgatgccggaacgccgctaattaacgatcctggctaccatctggtgcgtacctgccgtgaagcggggattcgcgtggtgccgctacccgggccgtgtgctgctatcactgcgttaagcgccgcgggtttaccatccgatcgtttttgttatgaaggctttttacctgccaaatcaaaaggccgccgtgatgcgctaaaagccattgaagcggagccgcgcacgctgattttttatgaatctacccaccgtctgttagatagcctggaagatatcgttgcggtattaggcgaatcccgctacgtcgttctggcgcgtgagctgaccaaaacctgggaaaccattcacggcgcgcccgttggcgagctgctggcgtgggtcaaagaagatgaaaaccgtcgcaaaggcgaaatggtactgattgtcgaaggccataaagcacaggaagaagacttacccgccgatgccctgcgcacgctggcgctgctacaggcagaactgccactgaaaaaagcggcggcgctggcagcagaaattcacggcgtgaagaaaaatgcgctgtataagtatgcactggagcagcagggagagtga

SEQ ID NO: 262850 - DNA, 2037 bp, Klebsiella pneumoniae
atggtaccctcaacattttctcgtttgaaagccgcgcgttgtctgcctgttgttctggcagccctgattttcgccggttgtggcacccatactcccgatcagtccactgcttatatgcagggcacggcgcaggctgattctgccttttacctgcaacagatgcagcaaagttctgatgataccaggatcaactggcaattactcgccattcgtgcactggtgaaagaaggtaaaaccggacaggcggtggagttgtttaaccaactaccgcaagaactgaacgattctcagcgtcgcgagaaaacactgctggcggcagagattaaactggcgcagaaagattttgctggcgcgcaaaacttgctggcgaaaatcacacctgcagatttagaacaaaaccagcaagcgcgttactggcaggcaaaaatcgatgccagccaggggcgtccttccattgatttactgcgcgcgttaattgctcaggaaccgctgctcggcgcgaaagaaaagcagcagaatattgacgccacctggcaggcgctctcctccatgactcaggaacaggcgaatacgctggtgatcaatgccgacgaaaatattctgcaaggctggttggatctgcagcgcatctggtttgataaccgtaacgatcccgacatgatgaaagccgggatcgccgactggcagaaacgttatccgaacaacccgggcgcgaaaatgctgccaacgcagttggttaacgtaaaagcgtttaaacccgcatcgaccaacaaaatcgccctgctgttgccactgaatggccaggcagcggtatttggtcgcactattcagcaaggctttgaagcggcgaaaaatatcggcactcagccagtggcggctcaggtagctgccgcacctgccgcagacgtagcagaacaacctcagccgcaaaccgtggatggcgttgccagcccggcacaagcctcggttagcgatctgaccggtgaacaacctgcggcccagccggtgcctgtaagcgccccggcggcaaccaccgcagcggtaagcgcacccgcgaatccatccgcagagctgaaaatctacgatacatcatcacaaccacttagccagatcctcaaccaggttcaacaggatggcgcgagtattgtggtcggtccgttgctgaaaaataacgttgaagagttgctgaagagcaacaccccgctgaacgtgctggcactgaaccagccggagaatatcgaaaaccgcgtcaatatttgttacttcgcgctttcaccggaagacgaagcgcgcgatgcagcgcgtcatattcgtgaccagggtaaacaagcgccgctggtgctgatcccacgcagttcattgggcgatcgcgtagccaatgcgtttgcgcaagagtggcagaaactgggtggcggcaccgttctgcaacaaaaatttggttccaccagcgaattacgcgcgggtgttaacggcggttctggtattgctttaacgggtagcccgattactcccagagcgacaaccgactccggcatgacgaccaacaatccaacgctgcaaaccacgccaaccgatgaccagttcaccaataatggcggtcgtgtcgatgcggtgtacattgtggcaacgccgggtgaaatcgcttttatcaaaccgatgatcgccatgcgtaacggtagccagagcggtgcaacgctgtacgccagttcccgcagcgcacaaggcatcgcaggcccggatttccgtctggagatggaaggcttgcagtacagcgaaatcccgatgctggcaggcggtaatctgccgttaatgcagcaggcgctcagtgcggtgaacaacgattattcgctggctcgcatgtatgcgatgggcgtcgatgcctggtcgttggcaaatcatttctcacaaatgcgccaggttcagggttttgaaatcaacggtaataccggaagtctgacggctaacccggattgcgtgattaacaggaagttatcatggctacagtaccaacaaggtcaggtagtccccgccagttaa

SEQ ID NO: 262851 - DNA, 396 bp, Klebsiella pneumoniae
atggctacagtaccaacaaggtcaggtagtccccgccagttaaccaccaaacagaccggcgatgcgtgggaagcacaagcgcgtcgctggctggaaggcaaaggactgcggtttatcgccgctaacgtgaacgagcgtggcggcgagatcgatctgataatgcgtgaaggccggatcaccgtttttgtcgaggtgcgttaccgccgctctgcgctttatggcggcgcggcagccagtgtgacccgcagcaaacaacacaaattattacagactgcccgcttgtggctcgcgcgtcataatgggagttttgatactgtggattgccggttcgatgtggtagccttcaccgggaatgaggttgagtggattaaggatgcctttaatgaccactcataa

SEQ ID NO: 262852 - DNA, 576 bp, Klebsiella pneumoniae
atgaaggcattatcgccaatcgcagtccttctttccgcgctgctgttgcaaggttgtgttgccgctgccgtagtgggtaccgctgctgtaggtaccaaagccgcaactgacccacgcagtgtcggcacccaggtggacgatggtaccctggaagtgcgcgtaaacagcgcattgtcgaaagacgaacagattaagaaagaaacccgtattaatgtcacggcgtatcagggcaaagtgctgctggttgggcagtcaccaaacgctgaactttcggctcgcgctaaacaaattgcgatgggcgtagacggtgccaacgaagtgtataacgagattcgtcagggccagccgattggtctgggcgaagcgtctaacgatacgtggatcaccaccaaagtgcgttcgcagctcttaaccagcgacctggtgaaatcgtccaacgtgaaagtgaccaccgaaaacggtgaagtgttcctgatggggctagtgactgaacgtgaagcgaaagcggcggcagatattgccagccgggtaagcggcgtgaagcgggtaaccacggcgtttacgtttattaaataa

SEQ ID NO: 262853 - DNA, 1041 bp, Klebsiella pneumoniae
atgactggtcagtcttcatctcaggcggcaacgcccattcagtggtggaaacccgcgcttttctttctcgttgtcattgctggtctctggtatgtgaaatggcaaccttactacggcaaagcgtttacggctgccgaaacccacagtatcggtaaatctatccttgcgcaggcggatgctaatccgtggcaggcggcgttggattacgcgatgatctatttcctcgcggtatggaaagcggcggtgctgggcgtactgctcgggtcgttgattcaggtgctgatcccgcgtgactggttgctgcgtacgcttgggcaatcgcgctttcgcggcacgctgctgggaacgctgttttcgctgccgggcatgatgtgtacctgctgtgcggctccggtcgcggcgggaatgcgtcgccaacaggtatcgatgggcggggcgctggcattctggatggggaatccgttgttaaacccggcgacgctggtgtttatggggtttgtcctcggctgggggtttgcggcgattcgtctggtcgcggggctggtgatggtgttgctgattgcgacgctggtgcaaaaatgggtacgtgaaacaccgctaacgcaggcaccggtcgaaattgacataccggaagcgcagggcggattttttagccgctggggcagggcgctatggacgcttttctggagtacgatcccggtttatatccttgccgtactcgtgttgggtgccgctcgcgtctggttattcccccatgctgatggtgctgtcgataacagcctgatgtgggtgattgcgatggcggtagcgggatgcttgtttgtcattccaacggcagcagaaattccaattgtacaaacgatgatgctggcaggcatgggaatcgctccggcgctggcattgttgatgacgctcccggcggtgagtttgccgtcactgattatgttgcgtaaagcgttcccggcgaaagccttatggctgacgggggcgatggtggcagtgtcaggtgtgattgtcggcgggctggcgctgttggcctaa

SEQ ID NO: 262854 - DNA, 636 bp, Klebsiella pneumoniae
atgagtcaggtactgattacaggcgcaacggggctggtgggcggtcacctgctgcggatgttgattaacgaaccgaaagttaacgccatagccgcgccgacgcgacgtccgttgggcgatatgcccggggtgtttaatccccatgatccgcaactgaccgacgcgctggcgcaggtcaccgatcccatcgacattgtgttttgttgtctcggcaccacgcggcgagaagcggggagcaaagaggcgtttattcatgccgattacacgctggtagtggataccgcattaaccgggcggcgactgggcgcgcagcatatgctggtagtcagtgctatgggtgccaatgcccactcgccgtttttctataaccgcgtcaagggggagatggaagaagcattaatcgcccagaactggccgaaattgaccattgctcgcccttcgatgttgctgggcgatcgtagcaaacagcggatgaacgaaacgctttttgcgccgctgttccgtttgttaccgggtaactggaaatccattgatgcaagagacgtggcgcgggtcatgctggcagaggcgatgcggcctgagcatgaaggtgtgacgattttaagctcttcagaattacgcaaaagagctgaataa

SEQ ID NO: 262855 - DNA, 444 bp, Klebsiella pneumoniae
atggaaacactcatcaccatcagccgttggttggcaaaacaacatgttgtcacctggtgtgtgcagcaggaaggggaattgtggtgcgccaatgccttttatctttttgatgcgcagaaagttgccttctacattttgacggaagaaaaaacgcgccacgcgcagatgagtgggccgcaggcggcagttgctggaacggtaaacggtcagccgaaaacggtagcgttaattcgcggcgtgcagtttaaaggtgagatccgcagactggaaggtgaggaaagcgacctcgcacgccaggcgtacaatcgacgctttccggttgccagaatgctgtcggccccggtgtgggaaatccggctcgatgaaatcaaattcaccgacaacacgctgggctttggtaaaaaaatgatctggctacgtaactcaggcaccgagcaggcgtaa

SEQ ID NO: 262856 - DNA, 303 bp, Klebsiella pneumoniae
atgacaccctggtttctttacttgatccgtaccgccgacaataagctttataccgggatcaccacagatgtcgaacgccgctatcagcagcaccaaagcggcaaaggggcgaaagcactgcgcgggaaaggagaactaacgctggcgttttccgcgccagtgggcgatcgttcgctggcactacgggcggaatatcgcgttaagcaactgaccaaacggcaaaaagagcgtctggtagcggaaggcgcagggtttgcagaactgttgagcagcctgcaaaccccaaagattaaaagcgattga

SEQ ID NO: 262857 - DNA, 504 bp, Klebsiella pneumoniae
atgctaattcgagtagaaattcccattgatgcgccgggtattgatgccctgctgcgtcgttcattcgaaagtgatgcggaagcgaagctggttcacgatctgcgtgaagatggctttctgacgctggggctggtggcgacagatgacgaaggtcaggtcattggctatgtggcatttagtccggttgatgtgcagggcgaagacctgcagtgggtcggcatggcaccgttggcggttgatgaaaaataccgtggacaggggctggcacgccaactggtctatgaaggactcgattcgcttaatgagttcggctatgccgcagtggtgacgctgggcgatccggcgctgtacagtcgtttcggctttgagctggcggcgcatcacgatctgcgttgccgctggccgggcactgaaagcgccttccaggtacatcgtttagcggatgacgcgctgaacggcgtaaccggtctggttgagtatcacgagcacttcaatcgcttttaa

SEQ ID NO: 262858 - DNA, 525 bp, Klebsiella pneumoniae
gtgttggataaactgcgttcccgtattgtgcatttggggccatctctgttgagtgtaccggtaaaactgacgccatttgcgctaaaacgccaggttcttgagcaggtcttaagctggcaattccgtcaggcgctggatgatggcgagctggagtttcttgaaggccgctggttaagtattcatgtgcgtgatattgacctgcaatggtttacctcggtggtgaatggcaaactggtcgttagccagaacgcgcaagctgatgtgagttttagtgccgacgccagcgatctgctgatgattgcggcgcgtaaacaagatccggatacgctcttcttccagcgtcggctggtgattgaaggcgatacggagctggggctgtatgtgaaaaacctgatggacgccattgaactggagcaaatgccgaaagccttacgcatgatgctgctgcaactggcggattttgttgaggcgggaatgaaaaccgcgcctgaaaccaaacagacatcggtaggtgaaccatgctaa

SEQ ID NO: 262859 - DNA, 717 bp, Klebsiella pneumoniae
gtgggacgtaaatgggccaatattgttgctaaaaaaacggctaaagacggtgcaacgtctaaaatttatgcaaaattcggtgtagaaatctatgctgctgccaaacaaggtgaacccgatccagaattaaacacatctttaaaattcgttattgaacgtgcaaaacaagcacaagttccaaagcacgttattgataaagcaattgataaagccaaaggcggcggagatgaaacgttcgtgcagggacgttatgaaggctttggtcctaatggctcaatgattatcgctgagacattaacttcaaatgttaaccgtacgattgctaacgttcgcacaattttcaataaaaaaggcggcaatatcggagcggcaggttctgtcagctatatgtttgacaatacgggtgtgattgtatttaaaggaacagaccctgaccatatttttgaaattttgcttgaagctgaagttgatgttcgtgatgtaactgaagaagaaggtaatattgttatttatactgaacctactgaccttcataaaggaatcgcggcgctaaaagcagctggaatcactgagttctcaacaacagaattagaaatgattgctcaatctgaagttgagctttccccagaagatttagaaatctttgaagggcttgttgatgcccttgaagatgacgacgatgtacaaaaagtttatcataacgtcgcaaatctctaa

SEQ ID NO: 262860 - DNA, 1455 bp, Klebsiella pneumoniae
atgaataataagggctccggtctgaccccagctcaggcactggataaactcgacgcgctgtatgagcaatctgtagttgctttacgcaacgccattggcaaatatattacaagtggcgaattacctgatgaaaacgcccgcaaacaaggtctttttgtctatccatcactgaccgtaacctgggacggtagcacaactaatccccccaaaacgcgcgcatttggtcgttttacccacgcaggcagctacaccaccacgattactcgccctactctctttcgttcgtatctcaatgaacaacttacgttgctgtatcaggattatggtgcgcatatctcggtgcaaccctcgcagcatgaaatcccttatccttatgtcatcgatggctctgaattgacacttgatcgctcaatgagcgctgggttaactcgctacttcccgacaacagaactggcgcaaattggcgatgaaactgcagacggcatttatcatccaacggaattctccccgctatcgcattttgatgctcgccgggttgatttttccctcgcacggttgcgccattataccggtacgccagtagaacattttcaaccgttcgtcttgtttaccaactacacacgttatgtggatgaattcgttcgttggggatgcagccagatcctcgatcctgatagtccctacattgccctttcttgtgctggcgggaactggatcactgccgaaaccgaagcgccagaagaagccatttccgaccttgcatggaaaaaacaccagatgccagcatggcatttaattaccgctgatggtcagggtattactctggtgaatattggcgtgggaccgtccaatgctaaaaccatctgcgatcatctggcagtgctacgcccggatgtctggttgatgattggtcactgtggcggattacgtgaaagccaggccattggagattatgtccttgcacacgcttatttacgcgatgaccacgttcttgatgcggttctgccgcccgatattcctattccgagcattgctgaagtgcaacgtgcgctttatgacgctaccaagttagtcagcggcaggcctggtgaagaagtcaaacagcggttacgtactggcacggtggtaaccacagatgacaggaactgggagttacgttactcagcttctgcacttcgttttaacttaagccgggccgtagcaattgatatggaaagtgcaaccattgccgcgcaaggatatcgtttccgcgtgccatacgggacactactgtgtgtttcagataaaccgttacatggtgagattaagcttcccggccaggctaaccgtttttatgaaggcgctatttccgaacacctgcaaattggcattcgggcgatcgatttgctgcgcgcagaaggcgaccgactgcattcacgtaaattacgaacctttaatgagccgccgttccgataa

SEQ ID NO: 262861 - DNA, 1317 bp, Klebsiella pneumoniae
atggactccacgctcatctccactcgtcccgatgaagggacgctttcgttaagtcgcgcccgacgagctgcgttaggcagtttcgctggtgccgtcgtcgactggtatgattttctactctatggcattaccgccgcactggtgtttaatcgcgagtttttcccgcaagtaagcccggcgatgggaacgctcgccgcatttgccacctttggtgtcggcttccttttccgaccgctcggcggtgtcattttcggtcactttggcgaccgactgggacgtaagcgcatgttaatgctgaccgtctggatgatgggcatcgcgacagccttaattggtattcttccttcattctcgaccattgggtggtgggcacctattttgctggtgacactgcgtgccattcagggatttgccgtcggcggcgaatggggaggcgcagcgttgctttccgttgaaagtgcgccgaaaaataaaaaagccttttacagtagcggtgtacaagttggctacggtgtaggtttactgctttcaaccggactggtttcattgatcagtatgatgacgactgacgaacagtttttaagctggggctggcgcattcctttcctgtttagcatcgtactggtactgggagcattgtgggtgcgcaatggcatggaggagtccgcggaatttgaacaacagcaacataatcaagcggccgcgaaaaaacgcatcccggttatcgaagctctgttacgacatcccggtgctttcctgaagattattgcactacgactgtgcgagttgctgacgatgtacattgttactgcctttgcacttaattattcaacccagaatatggggttaccgcgcgaacttttccttaatattggtttgctggtaggtggattaagctgcctgacaattccctgttttgcctggcttgccgatcgttttggtcggcgcagggtttatattacaggcgcgttgatcggaacgttgagcgcatttcctttctttatggcgcttgaagcacaatctattttctggatagttttcttctccataatgctggcaaacattgcgcatgacatggtggtgtgtgtgcaacaaccgatgtttaccgaaatgtttggtgccagttatcgctacagtggtgctggagtcggttatcaggttgccagtgtggttggcggtggatttacaccttttattgccgctgcactcatcacttactttgccgggaactggcatagcgtcgccatttatttgctggctggatgcctgatttctgcaatgaccgctttattgatgaaagacaatcaacgctcgtga

SEQ ID NO: 262862 - DNA, 1053 bp, Klebsiella pneumoniae
atgtttttagtatcattgttgagacgtattgcatttagttactacgattataaaacttataattttaatattgaaaaaacagactttgttgtcatacatattcccgatcagattggcgatgctatggccatctttcctgttattcgggcgcttgaattgcataaaattaagcatctattaattgttacgtcgacaattaatttagaagtctttaatgcgctcaaacttgaacagactaaattaacattagtcacaatgactatgcaggatcacgcaacattaaaagaaataaaagatttagcgaagaacataacactgcaatatggtacgccggatctttgtatagaggcgatgcgtaaaaagaacctgaaaacgatgatatttatcagtcagttgaaagcaaaaacgaatttccaggtcgtcggtttaaccatgaagtgctattcccctttgtgtaagaacgcgtcccggatggatcagaatctccgggctcctgtacccatgacatgggcatttatgatgcgtgaggcgggttttccggcagtcaggtcaatatatgaattgccattaagcgatgatgtactcgatgaggtacgcgaggaaatgcgatcgttaggatcttacattgcgctcaatttagaaggtagctcgcaggaacgtacattttcattatcgattgcagaaaatctaatagcaaaaattcaaagtgaaacagatattccaatagtgatcgtttatggacccaaaggggaagataaagccagggcattagtggattgttataataatgtctaccgtttatccttatcaccctcgattaaacgttcagcagcaatcataaaagatgcttatattgcaataactcctgacacctcaatattacatatggcaagtgcctataatacccctgttgttgcaatttatgctgattacaaaacgcgatggcccgcaatggccgatgtttcggagtcagtcgtcgttgggcaaaaaattgacaatataagtctggatgaattcgcaaaggcattaaaaagtgttttggcgagaatttga

SEQ ID NO: 262863 - DNA, 477 bp, Klebsiella pneumoniae; identical to SEQ ID NO: 4554

SEQ ID NO: 262864 - DNA, 1263 bp, Klebsiella pneumoniae
gtgaaggcgaacttcacgctgagcgatggcgacaaagcggttactgatgccgatggcaaagcgaaagtcacgctgaaaggtacaaaagcaggcgctcataccgtgacagcatcgatggttggcggtaagagtgagcagttggtggtgaactttactgcggatacgctcactgcgcaggttaatcttaacgttaccgaggacaatttcatcgccaataacattggaatgaccaggctacaagcaacagtgactgatggaaacggcaacccagtagaaggtataaaagttaatttccgtggaacctccgtcacgctaagcagcaccagcgttgaaacggatgatcaggtttttgctgaaattcttgtgacaagcaccgaggtcggactaaaaacagtttcagcctctctggcagataaacctactgaagtcatctcgcgattactgaatgccaaggtagatgttaattctgcgacgattaccagtcaggagatacctgaaggtcaggtcatggtcgcacaagacatagcagttaaagctcacgttaacgaccagtttggcaacccggtgacgcatcaacccgcgacattcagtgcagcgccatcctcgcaaatgatcatcagccagaacacggtctctactaatacgcagggagtagccgaggtcaccatgacgtctgaaagaaacggctcgtatactgtaaaagcatccctagcgaatggagcttcacttgagaaacaactggaggctattgatgaaaaactgacactcacgtccagtccgcttatcggtgtcaatgctcctaaaggcgctactctgacggcaacgctaacctctgcaaatggcactccagtggagggtcaggtcatcaactttagcgtaacgctagaaggtgcgacgttaagtggcggaaaagtgagaaccaactcttcagatcaggctccagtcgttctgaccagcaataaagtcggtacatatacggtgactgcatcgttccataacggcgtcacaatacagacacagacaaccgtgaaggttactggcaacccaagcaccgcacatgttgctagctttatcgctgatccgtcgactatcgccgccaccaacagtgatttaagtaccttaaaggcaacggttgaggatggcagtggtaacctgatcgaaggtctcactgtgtacttcgccttaaaaagcggctccaccacattaacgtcattaacagccgtgaccgatcaaaacggaatcgcgacaacaaacgtgagatga

SEQ ID NO: 262865 - DNA, 678 bp, Klebsiella pneumoniae
atgcaattcctgaatatgttcttctttgatatctacccgtacatagccggggcggtcttcctgattggtagctggctgcgttatgactacgggcagtacacctggcgcgcggcgtccagccagatgctggatcgcaaagggatgaacctggcgtcgaacctgttccatatcggtattctggggatttttgtcggtcacttctttggtatgctgacgccgcactggatgtatgaagcctggctgccgattgaagtgaaacagaaaatggcgatgtttgctggtggtgccagcggcgtgctgtgtctgattggcggcgtgctgttgctgaaacgtcgtctgttcagcccacgcgtgcgtgcaacgactaccggagcggatatcctgatcctgtctctgctggttatccagtgcgctctgggcttgctgaccattccgttctccgcccagcatatggacggtagcgagatgatgaaactggttggctgggcgcagtcggtagtgaccttccacggtggcgcttctcaacaccttgatggtgtggcgtttatcttccgtctgcacctggtgctggggatgacgttattcttgctgttcccgttctcacgtctggtgcacatctggagcgtaccggtggagtatctgacacgtaagtatcagctggtgcgcgctcgtcactaa

SEQ ID NO: 262866 - DNA, 711 bp, Klebsiella pneumoniae
atgatcgaactcgtgattgtatcgcgtctccttgaatatccggatgctgctttatggcagcatcaacaagagatgtttgaggcaattgctgcgtcgaaaaatctgtcgaaagaagatgcccatgcgctgggcattttcctgcgcgatttaacgacgatggatccgctcgatgcccaggcgcagtacagcgaactgttcgatcgtggtcgcgccacgtcgctgttgctgtttgaacacgttcacggggaatcccgcgatcgcggtcaggcgatggtggacctgctggcacagtacgagcagcacggtttgcagttaaacagccgcgaattgcccgaccatttgccgctgtatctggagtatctggcgcagctgccgcaaagcgaagccgtggaaggtttgaaagatatcgcgccgattctggcattgctctgcgcgcgtctgcaacagcgtgaaagccgttatgccgtgctgtttgatctgctgctgaaactggcgaataccgcaatcgacagcgacaaagtggcggaaaaaattgccgacgaagcgcgcgacgatacgccgcaggcgctggatgctgtctgggaagaagagcaggttaaattctttgctgacaaaggctgcggtgattcagcaatcactgctcatcagcgtcgctttgccggtgccgtcgcgccgcaatatctgaatatcaccaccggaggacagcactaa

SEQ ID NO: 262867 - DNA, 1392 bp, Klebsiella pneumoniae
atgagtcactcatccgcccccgaaagggctactggagctgtcattacagattggcgaccggaagatcctgcgttctggcaacaacgcggtcaacgtattgccagccgcaacctgtggatttccgttccctgtctgctgctggcgttttgcgtatggatgttgttcagcgctgttgcggtgaacttaccaaaagttggttttaattttacgaccgatcagctatttatgttgactgcgctgccttcggtttctggcgcgttattacgtgttccatactcctttatggttcctatcttcggtggtcgtcgctggacggcgttcagcaccggtattctgattattccttgcgtctggctgggttttgccgtgcaggatacctccacgccttatagcgtcttcatcatcatctctctgctgtgcggctttgctggcgcgaacttcgcttccagtatggcaaacatcagcttcttctttccgaaacagaagcagggtggcgcgctgggtctgaatggtggtctgggcaacatgggcgtcagcgtcatgcagttggttgctccgctggtggtatcactgtcgattttcgcagtatttggtagccagggtgtcaaacagccggatgggactgagctgtatctggcgaatgcgtcctgggtatgggtgccgttccttgccatcttcaccattgcggcgtggtttggcatgaacgatcttgctacctcgaaagcctccatcaaggagcagttgccggtactcaaacggggtcatctgtggattatgagcctgctgtatctggcaaccttcggctccttcatcggcttctccgcgggctttgcgatgctgtcaaaaacgcagttcccggatgttcagattctgcaatacgctttcttcgggccgtttattggtgcgctggcgcgttctgcaggtggtgcattatctgaccgtctgggcggaactcgtgtcacactggtgaactttatcctgatggcgattttcagcggcctgctgttcctgaccttaccgactgacgggcagggcggaagcttcatggcgttcttcgcggtcttcctggcgctgttcctgacagctgggctgggtagtggttccactttccagatgatttccgtgatcttccgtaaactgacaatggatcgcgtgaaagcagaagggggttctgacgaacgtgcgatgcgtgaagcggcaaccgacacggcggcggcgctgggtttcatctctgcgattggcgcgattggtggcttctttatcccgaaagcgttcggtagctcgctggcattaacgggttcgccagtcggcgcaatgaaagtatttttgattttctatatcgcctgtgtagtgattacctgggcggtatatggtcggcattctaaaaaataa

SEQ ID NO: 262868 - DNA, 219 bp, Klebsiella pneumoniae
atgagcaataaccttaatgaatgtgacgatacattctggaatggcagtattctcggctattggctgaagtatacccatacccggaaagagttactccttatttgccgtgtggttagtcgctttacatcggtaagggtagggattttacagcaccgtgaaaaatctcataatttttatgaaatcactgtactcactatgggtaatgataaatatcaatga

SEQ ID NO: 262869 - DNA, 1797 bp, Klebsiella pneumoniae
atgcttaaacgttgtctctctccgctcaccctggttaatcaggttgcgcttattgtgttgctttctactgctattggactggcagggatggcggtttctggctggctggtgcaaggcgttcagggcagcgcccatgcgatcaacaaagcgggatcgctgcgcatgcaaagttaccgtctgttggcagcagtgccattaagcgagaaagacaagcccttaattaaagaaatggaacaaacggcatttagcgccgagttaacccgagcagcagaaggagacggacaactggcgcaattacagggtttacaagattactggcgtaatgaactgatccctacgctgatgcgtgcacaaaaccgcgaaacggtgtcagcggatgtcagccagtttgttgccgggcttgatcagctggtatctggttttgaccgcaccacggaaatgcgcattgagacagtggtgctggtccatcgggtaatggcggtatttatggcacttttactggtgttcactattatctggttgcgggcgcgattgctacaaccgtggcggcaactgctggcaatggcgagtgccgtcagccatcgcgattttacccaacgcgcaaacatcagcgggcgcaacgaaatggcgatgcttggaactgcattgaacaatatgtctgcagaactggccgaaagttatgccgtacttgagcagcgggttcaggagaaaactgccgggctggagcataaaaatcagatcctctcttttttatggcaggctaaccgccgtttgcattcccgcgccccgctgtgtgaacgcctgtcacctgtactcaacggcttacagaatttgaccctgctacgtgatatcgaactgcgggtgtatgacactgatgatgaagagaatcatcaggagtttacctgccagccagatatgacttgtgatgataaaggctgccagctctgcccgcgcggcgtattacccgttggcgatcgcggcacaaccctgaagtggcggctggctgactctcatacgcagtacggcattttgctggcgaccctaccgcaggggcgtcatcttagccatgatcaacaacaactggtggataccctggttgaacaactcaccgccacgctggcgttggatcgccatcaggaacgtcagcaacagttgatcgtgatggaagagcgtgccaccattgcgcgcgaactgcatgattctattgcccaatctctctcttgcatgaagatgcaggtgagttgtttacagatgcagggcgatgcgctgccagaaagcagccgcgaactgttaagtcagatccgtaacgaactgaatgcatcctgggcgcagttgcgtgaattgctcaccacattccgcttgcagctcaccgagcctggattacgtccagcgctggaggcgagttgcgaagagtacagcgccaaatttggcttcccggtgaagctggattatcaattgccacctcgtctggtgccttcgcatcaggcaatccacttgttgcaaattgcccgtgaggcattaagtaacgccctcaaacattcgcaagcgagtgaggtcttggtgacggtggcgcaaaacgataatcaggtcaaactgaccgtccaggataacggctgcggcgtgcctgaaaatgccatccgcagcaatcactacggcatgataataatgcgcgaccgtgcgcaaagtttacgaggcgattgccgcgtccgccgtcgtgaatcaggtggcaccgaagtggttgtcacctttattcccgaaaaaactttcacagacgtccaaggagatacccatgagtaa

SEQ ID NO: 262870 - DNA, 1431 bp, Klebsiella pneumoniae
atggtttttcattttttaccggaagttaccgacgttttgagccgtttcgttcctcgcattattccgttttatttactcttgctggcggcaggcggtacagctaacgcacaatctaccttcgagcaaaaagcggcaaatccctttgataataacaatgatggtctgccggatttaggcatggcacctgaaaatcatgatggggaaaaacactttgctgaaattgtgaaagatttcggcgaaaccagtatgaatgataacgggctggatactggcgagcaggcaaaagctttcgcattgggaaaagtccgcgatgcgcttagtcaacaggttaatcagcacgtagagtcctggctatcaccgtggggaaatgccagtgttgacgtcaaagtggataacgaaggacatttcaccggcagtcgtggaagctggtttgtgccgttacaagataatgatcgttatctcacctggagccagcttggtcttactcagcaggatgatgggctggtgagcaatgtgggcgttgggcaacgctgggcgcgcggcagctggctggtgggttataacactttttatgacaacttgctggacgaaaatcttcagcgagcgggcttcggtgccgaagcgtggggcgaatatttgcgactatcggcaaacttttatcagccgtttgctgcatggcatgaacagacagccacgcaggaacaacggatggcgcgcgggtacgacctgacagcccggatgcgcatgccgttttatcaacacctcaataccagtgtcagcgtagaacagtattttggtgatcgtgttgatttgtttaactctggtacgggttatcacaatcccgtcgtgttgagtctgggattaaattataccccagtgccattagtcactgtgacggcccagcataaacagggtgaaagtggcgagaatcaaaataacctcgggctgaatcttaattaccgctttggtgtaccgctcaaaaaacaactttctgcgggcgaggttgccgaaagtcagtcgttacgtggtagtcgctatgacaatccgcagcgaaataatcttccgactcttgagtaccgacagcgaaaaacgttaacggtgtttctggcgacaccgccgtgggatctaaaacctggcgaaacagtgccgctgaaattacaaatccgcagtcgttatggtattcggcaactgatttggcagggcgatacgcagatattaagtttaacgccaggcgcacaagccaacagcgcggagggctggacgctgatcatgcctgactggcaaaacggggaaggggcaagcaatcactggcgattgtcggtggtggtggaagataaccaggggcagcgtgtctcctccaatgagatcacgctaacgcttgtcgaaccgttcgacgcattgtcaaacgacgaactgcgctgggaaccgtaa

SEQ ID NO: 262871 - DNA, 717 bp, Klebsiella pneumoniae
atgcagtggcggaggtgtaaggtgataacgcgtgatttcttgatgaatgccgattgtaaaacggcatttggtgccattgaagaatcactcttatggtcagcagagcaacgggcggcttcgctggcggcgacgctggcttgtcgacctgatgagggaccggtgtggatcttcggttatggatcgttgatgtggaatccggcactggagtttaccgagtcgtgcaccggtacactggttggatggcatcgtgcgttttgcctgcgtctgaccgccgggcgcgggactgcgcaccagccgggacgaatgcttgcactgaaagagggcggacgcaccacaggcgtcgcctatcgactgccagaagagacgctggagcaggaactaaccctgttgtggaagcgcgagatgattaccggctgttatctgccaacctggtgtcagcttgatcttgatgatggacgcacagtaaacgccattgtgtttattatggacccgcgacatccagaatatgaatctgacactcgcgctcaggtcatcgcgccgttgattgcggcggcgagcggtccactgggaaccaacgcacaatacctgttttcactggaacaggagcttatcaaactgggaatgcaggacgatgggctgaatgatttgctggtatcggtaaaaaaactgctggcggagaattatccggatggtgtgttacggccgggattcgcctga

SEQ ID NO: 262872 - DNA, 231 bp, Klebsiella pneumoniae
atgccgtataaaacgaaaagcgatctgccggaaagcgtaaagcacgtgctaccgtctcatgctcaggatatctataaagaagcgttcaacagcgcatgggatcaatataaagataaagaagatcggcgtgatgacgccagtcgcgaagaaaccgcgcataaagtggcctgggctgctgtgaagcatgaatatgccaaaggggatgatgataaatggcataaaaaatcgtaa

SEQ ID NO: 262873 - DNA, 1359 bp, Klebsiella pneumoniae; identical to SEQ ID NO: 7333

SEQ ID NO: 262874 - DNA, 951 bp, Klebsiella pneumoniae
atgcactgcaagggggcgtgtatgaaaccactgctggatgtgttgatgatcctcgatgccttagaaaaagaaggcagttttgcggcggcgtcagccaaactctacaagacgccgtccgctctgagttacaccgttcacaagctggaaagcgaccttaatattcaattgcttgatcgtagcggacaccgcgctaaattcacccgtaccggaaaaatgttattagagaaagggcgggaagttctgcataccgtgcgagaactggaaaagcaggcgatcaaactgcatgaaggctgggaaaacgagctggtgattggcgtggacgacacgtttcctttttctctgcttgcgcctctcattgaagctttttatcaacatcatagcgtgacgcgcctgaagtttatcaatggcgtactcggtggttcctgggatgccctgactcaggggcgagcggatattatcgttggcgcgatgcatgagccaccatcttccagtgagtttggtttctcgcggttgggcgatcttgaacaagtctttgcggtcgcgcctcatcatccgttagcccaggaagaagaaccgttaaaccgtcgtatcattaaacgatatcgggcgattgtggtgggggacactgcgcaggcaggcgcttctacggcctcacaacttctcgacgaacaagaagccattaccgttttcgattttaaaaccaagctggagctgcaaattagcggccttggctgcggctatttaccacggtatctggcgcaacgttttctcgatagtggcgcgttaatcgagaagaaagtggtcgcccaaactctctttgaacccgtctggattggctggaatgaacagaccgcagggcttgccagcggctggtggcgagatgaaattttagcaaatagtgcgatcgccggtgtttatgcaaaatctgatgacggaaaatcagccatttaa

SEQ ID NO: 262875 - DNA, 825 bp, Klebsiella pneumoniae
atgaaaaaggtcgcaattgtcgggttagggtggttaggtatgccgctggcgatgtcactttcagcgcgaggctggcaagtcaccgggagtaaaaccacacaagatggtgtcgaagcggcccgaatgagtggcattgatagctatctgcttcgcatggagcctgagttagtttgcgattctgacgatctggatgcccttatggatgccgatgcgctggtcattacgcttccggcacgtcgtagcggccccggcgatgagttctatttacaagcggtacaagagttagtggatagcgcgctggctcatcgtattccccgtattatttttaccagctcgacgtctgtctatggcgacgcacaaggcacggtgaaagaaaccaccccgcgtaatccggtaaccaacagtggacgagtattagaagaactcgaagactggctgcacaatttacccggtacttcggtcgatattctgcgtcttgcgggcctggtcggaccgggacgtcatcccggacgcttctttgccggaaaaaccgcccctgatggtgaacatggtgttaatttagtccatttagaagatgttattggcgctatcactctgttgttacaggcacctaaaggcggacacatctataatatatgtgcgccagctcaccctgcgcgtaatgttttctatccgcagatggcccgtttactggggctggaacctccgcagttcagaaatagtctggacagcggcaaaggtaagattattgatggcagtcggatttgtaatgaactgggatttgaataccagtatcccgatccgctggtaatgccgctggagtaa

SEQ ID NO: 262876 - DNA, 255 bp, Klebsiella pneumoniae
gtgaaactaatctggtctgaggaatcatgggatgattatctgtactggcaggaagcagataagcgaattgttaaaaagatcaatgaacttatcaaagatacccgcagaacaccatttgaaggtaaggggaaaccagaacccctgaaacataacttgtcaggtttctggtcccgacgcattacagaggagcaccttctggtatacgcggttactgatgattcactgctcattgcagcatgtcgttatcattattga

SEQ ID NO: 262877 - DNA, 252 bp, Klebsiella pneumoniae
atgcgtacaattagctacagcgaagcgcgtcagaatttgtcggcaacaatgatgaaagccgttgaagatcatgccccgatcctcattactcgtcagaatggagaggcttgtgttctgatgtcactcgaagaatacaactcgctggaagagacggcttatctactgcgttcccccgctaacgcccggagattgatggactcaatcgatagcctgaaatcagacaaaggaacggaaaaggacattattgagtga

SEQ ID NO: 262878 - DNA, 900 bp, Klebsiella pneumoniae
atgacagacaacactcgtttacgcatagctatgcagaaatccggccgtttaagtgatgactcacgcgaattactggcgcgctgtggcattaaaatcaatcttcacacccagcgtctgatcgcgatggcagaaaacatgccgattgatattctgcgcgtgcgtgacgacgatattcccggtctggtaatggacggcgtggtagaccttgggattattggcgaaaacgtgctggaagaagagctgcttaaccgccgcgcccagggtgaagatccgcgctactttaccctgcgtcgtctggatttcggcggctgccgcctttcgctggcaacgccggttgatgaagcctgggacggtccgctctccttaaacggtaaacgtatcgccacctcttatcctcacctgctcaagcgttatctcgaccagaaaggtatctcttttaaatcctgcttactgaacggttctgtcgaagttgcgccgcgtgccgggctggcggatgcgatttgcgatctggtttccaccggtgccacgctggaagctaacggcctgcgcgaagtcgaagttatctaccgctcgaaagcctgcctgatccagcgcgatggcgaaatggaagaatccaaacagcaactgatcgacaaactgctgacccgtattcagggtgtgatccaggcgcgcgaatcaaaatacatcatgatgcacgcaccgaccgaacgcctggatgaagtcatcgccctgctgccaggtgccgaacgcccaaccattctgccgctggcgggtgaccaacagcgcgtagcgatgcacatggtgagtagcgaaaccctgttctgggaaacgatggaaaaactgaaagcgctgggtgccagttcaatcctggtcctgccgattgagaagatgatggagtga

SEQ ID NO: 262879 - DNA, 1305 bp, Klebsiella pneumoniae
atgagctttaacacaatcattgactggaatagctgtactgcggagcaacaacgccagctgttaatgcgcccggcgatctccgcttctgaaagcattacccgcaccgttaacgatattctcgataacgtgaaaacgcgtggcgatgaggccctgcgtgaatacagcgcgaagtttgataaaaccacggttaccgcgctgaaggtgtctgctgatgagatcgccgccgccagcgaacgcctgagcgacgagctaaaacaggcgatggcggtggcagtaaagaatattgaaaccttccacactgcgcaaaaactgccgccggtagatgtagaaacgcagccaggcgtgcgttgccagcaggtcacgcgcccggtggcttcagtgggtttgtatattcctggcggctccgccccgctcttctcaacggtattaatgctggcgactccggcgcgtattgcgggctgtaaaaaagtggtgctgtgctcaccgccgccgattgccgatgagatcctttatgcggcgcaactgtgcggtgtgcaggacgtgtttaacgtcggcggcgcacaggccattgccgcgctggcgtttggtacggaatctgtgccgaaagtggacaaaatcttcgggccgggtaacgcctttgtcaccgaagcaaaacgccaggtaagccagcgtctggacggtgcggcgatcgatatgcccgcaggcccgtcggaagtgctggtgattgctgacagcggcgcaacgccggatttcgtggcttctgatttgctctcccaggctgaacacggcccggactcacaggtgattttactgacacctgatgctgatatggcgcgtcgcgttgccgaggccgtcgaacgccagttggcagaattgccgagagctgaaaccgcccgtcaggcactgagcgccagccgcctgatcgtaaccaacgatttagcgcagtgcgtagagatctccaatcagtacggtccggagcacctgatcattcagacccgcaacgcccgcgatctcgtcgatagcattaccagcgccggttcggtatttctcggtgactggtcaccggaatcggcaggtgattacgcctccggcaccaaccacgtgctgccgacttacggttacaccgccacctgttccagcctcgggctggcagatttccagaaacgcatgaccgtacaggaactgtcgaaagaaggtttctccgcgctggcttcgaccattgaaacactggccgccgccgagcgcctgaccgcccacaaaaatgccgttactttgcgtgttaacgtccttaaggagcaagcatga

SEQ ID NO: 262880 - DNA, 1071 bp, Klebsiella pneumoniae
atgagcaccgtgactattactgatttagcgcgtgaaaacgtccgcaacctgacgccgtatcagtcggcgcgtcgtctgggcggtaacggcgacgtctggctgaacgccaacgaatatcccacagccgtggagtttcagcttactcagcaaacgctcaaccgctacccggaatgccagccaaaagcggtgattgaaaattacgcgcaatatgcaggcgtaaaaccggaacaggtgctggtcagccgtggcgcggacgaaggtattgaactgctgatccgcgctttttgcgaaccgggtaaagacgccatcctctactgcccgccaacgtacggcatgtacagcgtcagcgctgaaaccattggcgtcgaatgccgcacagtgccgacgctggaaaactggcaactggacttacagggcatttccgacaagctggacggcgtaaaagtggtctatgtttgcagccccaacaaccccaccgggcaactgatcaacccacaggattttcgcaccctgctggagttaacccgcggtaaggcgattgtggttgccgatgaagcctatatcgagttttgcccgcaggcatcgctggctggctggctggcggaatatccgcacctggctattttgcgcacactgtcgaaagcttttgctctggcggggcttcgttgcggatttacgctggcaaacgaagaagtcatcaacctgctgatgaaagtgatcgccccctacccgctctcgacgccagttgccgacattgccgcacaggcgttaagcccgcagggaatcgtcgccatgcgcgaacgggtggcgcaaattattgcagaacgcgaatacctgattgccgcactgaaagagatcccctgcgtggagcaggttttcgactctgaaaccaactacattctggcgcgctttaaagcctccagtgcagtgtttaaatctttgtgggatcagggcattatcttacgtgatcagaataaacaaccctctttaagcggctgcctgcgaattaccgtcggaacccgtgaagaaagccagcgcgtcattgacgccttacgtgcggagcaagtttga

SEQ ID NO: 262881 - DNA, 1068 bp, Klebsiella pneumoniae
atgagtcagaagtatctttttatcgatcgcgatggaaccctgattagcgaaccgccgagtgattttcaggtggaccgttttgacaaactcgcctttgaacctggcgtgatcccggagctgctgaagctgcaaaaagcgggctataagctggtgatgatcaccaatcaggatggtctgggagcacaaagtttcccgcaggcggatttcgatggcccgcacaacctgatgatgcagatcttcacctcgcaaggcgtgcagtttgatgaagtgctgatttgcccacacctgcccgccgatgagtgcgactgccgtaagccgaaagtaaaactggtggagcgttatctggctgagcaagcgatggatcgcgctaacagttatgtgattggcgatcgcgcgaccgacattcaactggcggaaaacatgggcattaatggtttacgctacgaccgcgaagccctgaactggccaatgattggcgagcaactcactaaacgagaccgttacgcccatgtagtgcgcaacaccaaagagacgcaaattgacgtccaggtgtggctggatcgcgagggtggcagcaagattaacaccggcgttggcttctttgatcacatgctggatcagatcgccacccacggcggtttccgtatggaaatcaacgttaaaggcgacctctatatcgacgatcatcacaccgtcgaagataccggcctggcgctgggggaagcattaaaaattactcttggcgacaaacgcggtatttgccggtttggttttgtgctgccgatggacgaatgccttgcccgctgcgcactggatatctctggtcgcccgcacctggaatataaagccgagtttacctaccagcgtgtgggcgatctcagcaccgagatgatcgagcacttcttccgttcgctctcatacaccatgggcgtgacgctacacctgaaaaccaaaggtaaaaacgatcaccaccgtgtagagagcctgttcaaagcgtttggccgcaccctgcgccaggccatccgcgtggaaggcaacaccctgccctcgtcgaaaggagtgctgtaa

SEQ ID NO: 262882 - DNA, 591 bp, Klebsiella pneumoniae
atgaacgtggtgatccttgatactggctgcgccaacctgaactcggtgaagtctgccattgcgcgtcacggttatgaacccaaagtcagccgtgacctggacgtcgtgttgctggccgataaactgtttttacccggcgttggcaccgcacaagcggcgatggaccaggtgcgcgagcgcgagctgtttgatctcatcaaagcctgtacccaaccggtgctgggcatctgcttagggatgcaactgctggggcggcgcagcgaagagagcaacggcgtcgacttgctgggcatcatcgaagaagacgtgccgaaaatgaccgactttggtctgccactgccacatatgggctggaaccgcgtttacccgcaggcaggcaaccgcctgtttcaggggattgaagacggcgcgtacttttactttgttcacagctacgcaatgccagtcaatccgtggaccatcgcccagtgtaattacggcgaaccgttcaccgcggcggtacaaaaagataacttctacggcgtgcagttccacccggagcgttctggtaccgctggcgctaagttgctgaaaaacttcctggagatgtga

SEQ ID NO: 262883 - DNA, 738 bp, Klebsiella pneumoniae
atgattattccggcattagatttaatcgacggcaccgtggtgcgtctccatcagggcgattatggcaaacagcgcgattacggtaacgacccgctgccgcgcttacaggattacgccgcacaaggtgccgaagtactgcacctggtggatctgaccggggcaaaagatccggctaaacgtcaaatcccgctgattaaaaccctggtcacgggcgttaacgtcccggtgcaggttggcggcggcgtgcgtagcgaagaagacgtggcggcgttactggaagcaggcgttgcgcgtgtggtggttggctccaccgcggtgaaatcaccagaaatggtgaagggctggtttgaacgttttggtgccgatgccttagtgctggcgctggatgtccgtatcgacgagcaaggcaacaagcaggtggcagtcagcggctggcaagagaactcgggcgtttcactggaacaactggtggaaacctatctgcccgtcggcctgaaacatgtgctgtgtaccgatatctcgcgcgacggcacgctggcgggatctaacgtctttttatatgaagaagtgtgtgccagatatccgcaagtggcgtttcagtcctccggcggcattggcgatattaacgatgtggcggccctgcgtggtactggtgtgcgcggcgtaatagttggtcgtgcattactggaaggtaaattcaccgtgaaggaggccatcgcatgctggcaaaacgcataa

SEQ ID NO: 262884 - DNA, 777 bp, Klebsiella pneumoniae
atgctggcaaaacgcataatcccgtgtctcgacgttcgtgatggtcaggtggtgaaaggcgtacagtttcgcaaccatgaaatcattggcgatatcgtgccactggcaaaacgctacgccgaagaaggtgcagatgaactggtgttctacgatatcaccgcttccagcgatggccgtgtggtagataaaagctgggtatctcgcgtggcggaagtaatcgacattccgttttgtgtggcgggtgggattaagtctctggaagatgccgcgaaaattctttcctttggcgcagataaaatctccatcaactctcctgcgctggcggacccgacgttaattactcgcctggccgatcgctttggcgtgcagtgtattgtggtcggtattgatacctggtacgacgccgaaaccggtaaatatcatgtgaatcaatataccggcgatgaaagccgcacccgcgttactcagtgggaaacgctcgactgggtacaggaagtgcaaaaacgcggtgccggagaaatcgtcctcaacatgatgaatcaggacggcgtgcgtaacggttacgacctcgagcagctgaaaaaagtgcgtgaagtttgccacgtcccgctgattgcctccggtggcgcgggcaccatggaacactttctcgaagccttccgcgatgccgacgttgacggcgcgctggcagcttccgtattccacaaacaaataatcaatattggtgaattaaaagcgtacctggcaacacagggcgtggagatcaggatatgttaa

SEQ ID NO: 262885 - DNA, 612 bp, Klebsiella pneumoniae
atgttaacagaacaacaacgtcgcgaactggactgggaaaaaaccgacggtctgatgccggtgattgtgcaacacgcggtatccggcgaagtgctaatgctgggctatatgaacccggaagccttagacaaaaccctcgaaagcggcaaagtcaccttcttctcgcgcactaaacagcgactgtggaccaaaggcgaaacgtcgggcaatattctcaatgtggtgagtattgccccggactgcgacaacgacacgttactggtgctggcaaatcccatcggcccgacctgccacaaaggcaccagcagctgcttcggcgacaccgctcaccagtggctgttcctttatcaactggaacaactgctcgccgaacgtaaatctgccgacccggaaacctcctacaccgccaaactgtatgccagcggcactaaacgcattgcgcagaaagtgggcgaagaaggcgtggaaaccgcactggcagcaacggtacatgaccgctttgagctgaccaacgaggcatctgacttgatgtatcacctgctggtgttgttgcaggatcaggatctggatttagcgacggtaattgagaacctgcgtaaacggcatcagtga

SEQ ID NO: 262886 - DNA, 978 bp, Klebsiella pneumoniae
atgagagtagaaaataataatgtttctgggcaaaaccatgacccggaacagattgatttgattgatttactagtgcagttgtggcgtggcaagatgacaatcatcatttccgtcattgtggctattgccctggctattggttatttggcagtagcgaaggagaaatggacgtcaacagcaattatcactcagcccgacgtggggcaaattgctggctataacaatgccatgaatgttatctatggtcaggctacaccgaaagtatcggatttgcaggagacgttaattggtcgcttcagttctgccttctctgcattagcagaaacgctggataatcaggaagagccagaaaaacttaccatcgaaccttctgttaagaaccagcaattaccattgactgtttcttatgttgggcaaactgcagagggcgcacaaatgaagttggcccaatacattcagcaagttgatgataaagtgaatcaagagctagaaaaggatctcaaggacaacattgctctgggacggaaaaacttgcaggactctttaagaacccaggaagtggtcgcgcaggaacagaaagatctgcgtatccgtcagattcaggaagcgttgcagtatgcgaatcaggcgcaggtgacaaagccgcagattcaacagacgcaggacgtaacccaggatactatgttccttttggggagcgaagcgctggagtcgatgattaagcacgaggcgacccgtccgttggtgttctcatcaagctactatcagactcgtcaaaaccagctggatatcgacaatcttgacgttgataaacttgatattcatgcttaccgctatgtaatgaaaccgacgttacctattcgtcgcgatagcccgaaaaaggcaattaccttgattctggcggtgctgctgggcggcatggttggcgtggggattgtgttggggcgtaacgcgctgcgtaattacaacgcgaaataa

SEQ ID NO: 262887 - DNA, 1167 bp, Klebsiella pneumoniae
atgaaaattaccatttccggtactggctatgtaggcttgtcaaacgggcttctaatcgcacaaaatcatgaggttgtggcattagatattttaccgtcacgcgttgctatgctgaatgatcggatatctcctattgttgataaggaaattcagcagtttttgcaatcagataaaatacactttaatgccacattagataaaaatgaagcctaccgggatgctgattatgtcatcatcgccactccaaccgactatgatcctaaaactaattatttcaatacatccagtgtagaatcagtaattaaagacgtagttgagataaacccttatgcggttatggtcatcaaatcaacggttcccgttggttttaccgcagcgatgcataaaaaatatcgtactgaaaatattatattctccccggaatttctccgtgagggtaaagccctttacgataaccttcatccgtcacgtattgtcatcggtgagcgttcagaacgcgcagaacgttttgctgcgttgttacaggaaggcacgattaagcaaaatatcccgaccctgtttaccgactccactgaagcagaagcgattaaacttttcgctaatacctatctggcgatgcgcgtggcgtactttaacgaactggatagctatgcagaaagtttgggtctgaatacgcgtcagattatcgaaggtgtttgtctcgacccgcgtatcggcaaccattacaacaatccgtcgtttggttatggtggttattgtttgccgaaagataccaaacagttattggcgaattatcagtctgtgccgaataacctgatttcggcaattgtcgatgctaaccgcacgcgtaaagattttattgccgatgccattttgtcacgcaagccgcaagtggtgggtatttatcgtctgattatgaagagcggttcagacaacttccgcgcgtcttccattcaggggattatgaaacgtatcaaggcgaaaggcgttgaagtgatcatttacgaaccggtgatgaaagaagactcattcttcaactctcgcctggaacgagatctcgccactttcaaacaacaagctgacgtcattatctccaatcgtatggcagaagagcttaaggatgtggcagataaggtatacacccgcgatctctttggtagcgattaa

SEQ ID NO: 262888 - DNA, 1407 bp, Klebsiella pneumoniae
atgtcaaagcaacagatcggcgtcgtcggtatggcagtgatggggcgcaaccttgcgctcaacatcgaaagccgtggttataccgtctctattttcaaccgttcccgtgaaaaaacggaagaagtgattgccgaaaatccaggcaaaaaactggttccttactatacggtgaaagagtttgttgaatctctggaaacgcctcgtcgcatcctgttaatggtgaaagcaggtgcaggcacggatgctgctattgattcccttaagccgtacctcgataaaggtgacatcatcattgatggtggtaacaccttcttccaggacactattcgtcgtaatcgtgagctttctgcagaaggctttaacttcatcggtactggtgtttctggcggtgaagaaggcgcgctgaaaggaccttccattatgcctggtggccagaaagaagcctatgaactggttgcgccgatcctgaccaaaatcgccgcagtggctgaagacggggagccatgcgttacctatattggtgccgatggcgcaggccactatgtgaagatggttcacaacggtattgaatacggtgatatgcagctgattgctgaagcctattctctgcttaaaggtggcctgaacctcaccaacgaagaactggcgcagacctttaccgagtggaataacggtgaactgagcagctacctgattgacattaccaaagatatcttcaccaaaaaagatgaagacggtaactacctggttgatgtgattctggatgaagctgcaaacaaaggtacgggtaaatggaccagccagagcgcgctggatctcggcgaaccgctgtcgctgattaccgagtctgtgtttgcacgttatatctcttctctgaaagatcagcgcgttgccgcgtctaaagttctctctggcccgcaagcgcagcgagcaggcgacaaagctgagtttatcgagaaggttcgtcgtgcgctgtatctgggcaaaatcgtttcttacgctcagggcttctctcagttgcgtgctgcgtctgaagaatacaactgggatctgaactacggcgaaatcgcgaagattttccgtgctggctgcatcatccgtgcgcagttcctgcagaaaatcaccgatgcatacgccgaaaatccgcagatcgctaacctgctgctggctccgtactttaagcaaatcgccgatgactatcagcaggcgctgcgcgatgtcgttgcttatgcagtacagaacggtatcccggttccgaccttcgccgctgcggttgcctattatgacagctaccgtgccgctgttctgcctgcaaacctgatccaggcacagcgtgactatttcggtgcacatacttataagcgcatcgataaagaaggtgtgttccataccgaatggctggattaa

SEQ ID NO: 262889 - DNA, 489 bp, Klebsiella pneumoniae
atggtaatcccacgctctttctccaaatcgttggagtccatcacacgttcttgtgcttcagtacgtgcgtcgaacgtaccggattgctgtagcagcttgtcaaccagggtagttttaccatggtcaacgtgcgcgatgatggcgatattacgcagattttcgatcacaactttgcctcaggcattagaaatagcgcgttattgtacacgtattaagcgaaggactgaacaggatcacaaacatcctccgcaaacaagtattgcagagtttctttgtgaccgctttcacggagcgataaaagggcaccgtaacaaaaattgcaccaaaatggtgctcaatgttcacactgaagcactattttggtgcattatctccatcatggtgcagtccttttgcactatggtgcgcatgatacagcgttttatagggcatttaaaagttggcacagatttcgctttatattttttaaggcaacaacgccacttttaa

SEQ ID NO: 262890 - DNA, 165 bp, Klebsiella pneumoniae
atgatggcggggaaaatccccgctttttttctgccggtccccggacagagcacaaaggaagtcgccgccggctccgctttacccggccatgcaggcatggccttgtgggttttcagttatgtggccgccgtgtcgtgtgcgggcggtgccgtgcctccatcttag

SEQ ID NO: 262891 - DNA, 438 bp, Klebsiella pneumoniae
atgccgtttgacctgctgacggttctgttcactcgcctggatgttgaagtgaatggctttaacggtggtgttctgaacggtgttccttctgcatatcactggtatacggaacagtatggcgtgaaggggccttgtgggtatgaggtgaatatcagcagtcagggagacaacttcattcaggttgatttcgacacgccgtggtgtcagccggaaagcgacgttattgcagtattaagccgccgtttcagttgcacgctggagcactggtacgccgagcagggctgcaatttctgtggctggcagcgatatgagcgtggagagcttgttgatgtgctgtggggggaactggaatggtcttccccgacagatgatgatgagctgccggaagtcaccgcgccggagtggatagtcgacaaggtggcgcattacggtggatga

SEQ ID NO: 262892 - DNA, 450 bp, Klebsiella pneumoniae; identical to SEQ ID NO: 7064

SEQ ID NO: 262893 - DNA, 336 bp, Klebsiella pneumoniae
atggcgacaacaatcacagacgaagttttagcactgttccgtgatgagattccaggttatcaggatgaccacgggaaggaaattccgttagaactggactctgatttgttcgactatccacgagatgatttagaggacgctatacggaaatacaaagagaggtttgggattaacctggataatctggactggtctttgtaccttccatgggagtctgcaccattgcttcaacgatggttcaagctcaagcgggaagaggtagaaacaacacgtttaccgttaactgtacggatgtttgcagaatcagcagaagcgggaaaatggctgtatcagtag

SEQ ID NO: 262894 - DNA, 639 bp, Klebsiella pneumoniae
atgaaatactttagcgattctaaatcttcttttagaaaaaaacaggttagtcgactaaactcgcaacactccactaagcgtaaacctgaaaaccagcccacgcgcgtgatcctgttcaataaaccctacgatgttcttccgcagttcaccgatgaagccggacgcaaaacattaaaagaattcatcccggttcagggcgtttatgcagcaggtcgtcttgaccgcgatagcgaagggttactggtgctgaccaataacggcgcgttgcaggcgcgtttaacccagccgggtaaacgcaccggaaaaatctattatgtgcaggtggaaggtattcccacacaagacgcacttgaagccttgcgcaatggcgtaaccttaaatgatggccctaccctgcccgcaggcgtagagctggttgacgaacccgcgtggttatggccgcggaatccaccaattcgtgaacgcaaaagtattcccaccagctggctgaagatcaccttatatgaaggacgtaatcgccaggtgcgccgcatgaccgcccatgttggtttccccacgctgcgactgattcgctatgcgatgggtgattactctttggataatcttgccaacggcgaatggcgagaagcgacagattaa

SEQ ID NO: 262895 - DNA, 462 bp, Klebsiella pneumoniae
atgtttaaaccgcacgttaccgttgcttgcgtggtgcacgcagaaggcaaatttttagtcgttgaagagacgattaatggtaaagcgttatggaaccaacctgccgggcatctggaagccaatgaaaccttagtggaagccgccgcccgtgagctgtgggaagaaaccggcatcagcgcgcagccgcaacactttattcgtatgcatcagtggattgcgccagataaaacgccgtttttgcgtttcctgtttgctattgagcttgagcaaatatgcccgacccagcctcatgacagcgatatcgactgctgccgttgggttagcgccgaagaaattttacaggcgtcaaatctgcgttcgccgctggtggcggaaagtattcgttgttatcaaagcaggcaacgctatccgctagagatgattggcgattttaactggccttttacaaagggtgtcatctaa

SEQ ID NO: 262896 - DNA, 1107 bp, Klebsiella pneumoniae
atgtctgaaaccgcaaaaaaagtaatcgtcggcatgtccggcggtgtcgattcctccgtttctgcctggctgttgcaacaacagggatatcaggtcgaaggcctgtttatgaagaactgggaagaagacgacggtgaggaatattgcacagcggcagcggatctggctgatgcccaggctgtctgcgacaagctcggcattgaactgcacaccgttaactttgctgccgagtactgggacaacgtcttcgaactgttccttgccgaatataaagccggtcgcacgccgaatccggatattctgtgcaacaaagagatcaaatttaaagccttcctcgaatttgccgctgaagatttaggtgccgattatatcgctaccggtcattacgtacgtcgggcagatgtcgatggcaagagccgcctgctgcgtggtctggacagcaataaagaccagagctacttcctttatacgctcagccatgagcagattgcgcaaagcctgttcccggtcggcgaactggaaaaaccgcaggtgcgtaagattgctgaagatctcggtctggtcaccgcgaagaaaaaagactctaccggcatttgcttcattggcgagcgtaaattccgcgagttcctgggccgttatctcccggcgcaaccgggcaaaatcattaccgtcgatggcgatgaaattggtgagcaccaggggctgatgtatcacaccctcggtcagcgtaaaggtctgggtatcggtggcaccaaagacggcaccgaagaaccgtggtatgtggtcgataaagacgtcgaaaacaacattctgattgttgcgcagggccatgaacacccgcgtctgatgtctgtcggtctgattgcccagcagctgcactgggtcgatcgcgagccgttcaccggtactatgcgttgcacagtaaaaacccgctatcgccagaccgacatcccgtgcaccgtcaaggcgctggacgatgatcgcattgaagtgattttcgatgagccggttgccgccgtgacgccgggccagtctgccgttttctataacggtgaagtgtgcctcggtggcggtattattgagcagcgtctgccgctgccggtctga

SEQ ID NO: 262897 - DNA, 642 bp, Klebsiella pneumoniae
gtggcaaagaattactatgacatcaccctcgccctagccggtatttgtcagtcggcacgcctggtgcaacaactcgctcaccaggggcattgtgatgccgatgcgctacacgtctcactcaacagtattattgatatgaaccccagctcgacgctggcggtttttggcggcagcgaagccaacctgcgcgtcgggctggaaaccttgctcggcgtgctcaatgccagcagtcgccagggcttaaacgctgagttaacccgctacacactcagcctgatggtgcttgagcgcaaactctcctcagcgaaaggtgcgctcgacactctgggcaaccggatcaacggcctgcaacgccagctcgaacacttcgatttacagtccgaaacgctgatgagcgcgatggctgctatctatgttgatgtgattagcccgcttggcccgcgcattcaggtaaccggttcccctgctgtactgcaaagcccacaagtgcaggcgaaagttcgcgcaaccctgctggcaggcattcgcgccgccgtgctctggcaccaggttggcggcggacgtctgcaactgatgttttctcgtaatcgcctgaccactcaggcaaaacaaattcttgctcatttaaccccggagttgtga

SEQ ID NO: 262898 - DNA, 1461 bp, Klebsiella pneumoniae
atgaaaaaattactgcgtctttttttcccgctctcgctgcgggtacgttttctgttagcaacggcagcagtagtattggtgctttcgcttgcctacggaatggttgcgctgatcggttatagcgtcagtttcgataaaaccacgtttcggctgttacgtggcgagagcaatctgttctatacccttgcgaagtgggaaaacaataagttgcatgtcgagttacccgaaaatatcgacaagcaaagccccaccatgacgctaatttatgatgagaacgggcagcttttatgggcgcaacgtgacgtgccctggctgatgaagatgatccagcctgactggctgaaatcgaatggttttcatgaaattgaagcggatgttaacgataccagcctcttgctgagtggagatcattcgatacagcaacagttgcaggaagtgcgggaagatgatgacgacgcggagatgacccactcggtggcggtaaacgtctacccggcaacatcgcggatgccaaagttgaccattgtggtggtggataccattccggtggagctaaaaagttcctatatggtctggagctggtttatctatgtgctctcagccaatctgctgttagtgatcccgctgctgtgggtcgccgcctggtggagtttacgccccatcgaagccctggcaaaagaagtccgcgaactggaagaacataaccgcgaattgctcaatccagccacaacgcgagaactgaccagtctggtacgaaacctgaaccgattgttaaaaagtgaacgcgaacgttacgacaaatatcgtacgacgctcaccgacctgacccatagtctgaaaacgccactggcggtgctgcaaagtacgctgcgttctctgcgtagtgagaagatgagcgtcagtgatgctgaaccggtaatgctggagcaaatcagccgcatttcacagcaaattggctactacctgcatcgtgccagtatgcgcggtgggacattgctcagccgcgagctgcatccggtcgccccactgctggacaatctcacctcggcgctgaacaaagtgtatcaacgcaaaggggtcaatatctctctcgatatttcgccagagatcagctttgtcggtgagcagaacgattttgtcgaggtgatgggcaacgtgctggataatgcctgtaaatattgcctcgagtttgtcgaaatatctgcaaggcaaacagacgagcatctctatattgtggtcgaggatgatggccccggtattccattaagcaagcgagaggtcattttcgaccgtggtcaacgggttgatactttacgccctgggcaaggtgtagggctggcggtagcccgcgaaatcaccgagcaatatgagggtaaaatcgtcgccggagagagcatgctgggcggtgcgcggatggaggtgatttttggtcgccagcattctgcgccgaaagatgaataa

SEQ ID NO: 262899 - DNA, 1122 bp, Klebsiella pneumoniae
atggaataccaactcactcttaactggcccgattttcttgaacgtcactggcagaaacgtccggtggtgttaaaacgcggctttaataattttattgacccgatctctccagacgagttggcgggtttggcgatggaaagcgaagtcgacagtcgactggtcagtcaccaggatggcaaatggcaggtcagccacggcccgttcgaaagctacgatcatctcggtgaaactaactggtcattgttagtgcaggcagtgaaccactggcatgagccgaccgccgcgctgatgcgaccgttccgtgaactaccggactggcgtattgatgatctgatgatctctttttctgtacctggcggcggcgtcggcccgcatctcgatcagtacgacgtgtttatcattcagggtaccggacgtcgtcgctggcgagtgggcgaaaagctgcaaatgaaacagcactgcccacatccggatctgttacaggtcgatccgttcgaagccatcatcgatgaagagctggagcctggcgatatcctttatattccgccaggattcccgcatgaaggctacgcgctggaaaatgcgatgaactattccgtgggttttcgcgcgccaaatacgcgggaattaattagcggatttgccgattatgtgctgcaacgtgaactgggcggcaactactacagcgatccggatgttccacctcgcgctcatcctgcggacgttctgccgcaagagatggataaactgcgtgagatgatgctcgaattgatcaaccagccggaacactttaagcaatggtttggcgagtttatatcccagtcacgtcatgaactggatatcgcgccgccagagccgccttatcagccggatgaaatctacgatgcgctaaaacaaggtgatgtgctggtgcgcctgggtggtctgcgcgtattgcgcattggcgacgacgtgtatgccaatggtgagaagatcgattccccgcaccgtccggcactggatgcgctcgccagcaacattgcgctgaccgcggagaattttggtgatgcactggaagatccgtcattcctcgcgatgctcgcagcgctggtcaatagcgggtattggttcttcgaagggtaa

SEQ ID NO: 262900 - DNA, 267 bp, Klebsiella pneumoniae
atgctgccgcagcatagcgatattgaaatagcctggtatgcttcgatacagcaggagccgaatggctggaagaccgtcaccacacagttctacatccaggaattcagtgagtatattgcgccactgcaggatgctgtagatctggaaatcgcaacggaggaagaaagatcgttgctggaggcatggaataaatatcgggtattgttgaatcgtgttgatacatcaactgcacctgatattgagtggccgacttcacctgcagagtaa

SEQ ID NO: 262901 - DNA, 657 bp, Klebsiella pneumoniae
atgaaaaaaaacacagatgatggggctaaaatttacacaccacttaccctaaagctttatgactggtgggttttgggagtatcaaatcggcttgcatggggatgtcctacaaaggaacaccttcttccacactttctggaacatttaggtaacaaccatctggatattggcgttggaactgggttttaccttactcacgtacctgagagcagtctgatatctttaatggatttgaacgaagctagcctgaacgcggcatcgacaagggctggggagtcaaaaattaaacataaaattagccatgatgtttttgatccttatcccgcggcgttacatggtcaatttgattccatttccatgttttaccttcttcactgcctgcctggaaatatatctacaaaaagctgtgtaatacgcaatgcggcgcaggccttaactgacgatggaactctatacggagccacaattcttggtgacggcgttgtgcacaatagcttcggtcaaaaactgatgcgcatttacaatcagaaaggcatcttttcaaacacaaaagattccgaagaaggcttaacacatatactctcagagcatttcgagaatgttaaaaccaagattcaaggtactgtagtaatgttttccgcttcagggaaaaaatag

SEQ ID NO: 262902 - DNA, 330 bp, Klebsiella pneumoniae
atggagacgtttcactggaaagtgcgcccggatatgaatgtggtatcagagccgaaagtggtgacagtgaagctgggcgatggttatgaacagcgtcgtgcggcgggactgaataaccagttgtcgacttacagcgtgacgatacgtgttcgtaaatgtgaacacccatctttaaaagcctttctggaacagcacggtggcgtccgcgcatttcagtggacgccaccttatgactggaaaccgattagggtggtttgtcgtaaatggtcggcaagcgtgggggcgctgtgggtaaccataacggcagattttgaacaggtcgtggcatag

SEQ ID NO: 262903 - DNA, 3066 bp, Klebsiella pneumoniae
atggaccagatagccaacctggtcattgatttggggattgatgcggcagagtttaaaaatgaaattccccgtatcaaaaaccttctgaatggtgcagccagcgatgcagaacggtcttctgcccgtatgcagcgttttatggagcgtcagactcaggccgcccggcagacaacgcaggcggcttcttcggctgcaacagccgcatccgtccatgcgcagacggtggagaagaacgcacaggctcatgaacgcatggcccgcgaggtggagaaaacccgccagcgcatggaggcgctgagccagaaaatgcgcgaggaacaggcgcaggccatggctctggcggaggctcaggataaagcggctgctgcgttttatcgtcagattgacagtgtgaaccaggccagtgcgggtctgcaggaattacagcgtattcagcagcagatccgacaggccagaaacagtggcgggattggtcagcaggattatctggcgctgatttctgaggttacggcgaaaacccgtgttcttacacaggctgaggaagaggctacccgacagaaagtggcgtttatccgtcagcttaaagagcaggcaacccgccagaatctttcttcttctgagttgcttcgtgctaaggctgcccaactgggggtaagcagtgctgcagaagtgtatatccgcaaaatggagcaggcaggaaaagccacgcattcgctggggctgaaaagtgcagcggcccgtcaggagataggcgttctgataggtgaactggcccgcggaaatttaggtgcgctgaggggatccggaataacgctggctaaccgtgccgggtggatagacacattgatgtcaccgaaaggcatgatgcttggcggggttattggcggtattgccgcggctgtctatggtctgggtaaagcctggtatgacggtcagaaggagggggaagaatttaaccgccagctgtcgctgacggggcattatgccggagtcactgccgggcaactgtggacgctcagtcgtgctatttccgggaatggtatcacgcaacatgctgcagccggtgcgctggctcaggtggtggggagtggtgcatttcgtggaaacgatatcggtatggtggcgagagctgccgcacagatggagcgatcggttggccagtcggtcagcgataccataagtcagtttaagcggctgaaggatgatcctgtaaatgccgcgaaggctctggacaatgagctgcattttcttactgccactcagcttgagcagatacgcgtccttggggagcaggggcggtccagtgatgcggcacggatagccatgtctgcactggcagaggaaaccgatcgtcgtactgcggatattgataataacctcaatgcgctgggtagcacgctgcaaactttgtctgactggtggaagcagttctgggatgcggccatgaatattggtcgtgaagactcgctggatgaacagattgccgctttacaggagaaagtgtcgcgggcgaaaagactcccctggatggcatcatcttctcaggttgagtacgatcagcagcgtcttaacgagcttcaggagaaaaaacgccagaaggatttgcaggatgcaaaagagcaggcagagcggaattatcaggagcaacagaaacgccgtaatgctgaaaatgctgcactgaaccggatgaatgaaacggaagcagcacgacatctgcgtgaaattgcgcgtattaatgccatgcagtacgccgaccaggctgtcagggatgcggcgatacaacgtgaaaatgaacgttacgagaaagccctggcatccggtaagaaaaaaacacgcgaaacccgtaatgatgaggccacccggttattgctgcagtacagtcagcaacaggcacaggtggaaggacagattgctgctgccagacagtcagcaggcattgccacggaaaggatgacagaagcgcataaacagcttctggctctgcagcagcgcatcagcgacctggacgggaaaaaactgacggcagatgaaaagagtgtgctggcccgtaaagatgaactgattcaggcactgacgctgctggatgtaaaacagcaggagcttcagaaacagacggcactcaacgagctgaagaaaaaaacaattcagctgaccagtcaactggctgaagaagagcgcgctcagcgtcagcaacatgacctggatatcgccacggtgggtatgggtgatcagcagcggcagcgatatcaggtacaactgagtcttcgccagaaataccagcaacagctggagcagttgaggcgggatagtgagcagaaagggacatataacacggatgactacagaaagtccgagcaggcgctgacggagagcctgaaccgacaactgaatgagaatcgccgttactggcaacagcttgaagttgtgcagggtaactggaaaaacggagtcctgcgtgcatttcaggattttaccgtggatgcagacaatacggcaggaacagcagaacaggtgttctcgtcagccttcagcaacatgggaaatggcctggcaacttttgtcactaccggcaaactcaacttcaaatccttcacctcttcggtgctgtcagatatggcgaaaatcctggcgcaggcaaccgtgatgaaatcgataaaagggattggcagtgtactgggatttgatctcagcagcctttccctgaatgccaatggggggatttatcagtctgctgatttgagtcgttacagtggcacggtggttaaccgtccgacgttttttgcttttgcaaaaggcgcgggtgtgatgggggaagctggacctgaagccattctgccactgcgtcgtggtgctgacggtaagctgggggttgtggcggacattggtggttcaggtatggcgatgtttgccccgcagtacaacatcgagatcaataacgatggcacgaacgggcagataggtccggctgccctgaaggtggtttatgaccttgggaaaaaagcggcagcggactttatgcaacagcaggcccgtgatggtggtcggttaagtggagcatatcggtaa

SEQ ID NO: 262904 - DNA, 330 bp, Klebsiella pneumoniae; identical to SEQ ID NO: 96322

SEQ ID NO: 262905 - DNA, 387 bp, Klebsiella pneumoniae
atgtttctgaaacagggcacgtttaattatgaaaaacagtccgtggtgctcagtgagctgtccgggctgcagagaattgaatatctggcgtttgttcagcagcgaacggcaaagtttgatgccggtgagggagaactgccggaggctgaacgacagattgcttttctgcggatggggatggatatcaatgcctggctggtttcccgctcactgtggaatgcggatcagtctaaggatgtagagacgctttgcgcatccgttattacaacatggtcgtatgatgccctgggtgcgggggcggagatggttctgtcgctgagcggtatgggggccattgataatgccggggatgatgagcatgaggcgctggcgccggaaaagtcctga

SEQ ID NO: 262906 - DNA, 744 bp, Klebsiella pneumoniae
atgaccacaccaaatccactggcaaaaacgaaaggtgcgggaacgacgttctggatgtacaccggcaagggcgatgcgtttgcgaaccctttatcggacactgactggctgcgtcttgcgatggtgaaggatctgcaacctggcgaaatgaccgctgatgcagaagatgacacttatctcgatgatgaagatgcagactggaaaacgacaacccaggggcagaaatccgtcggtgatacttcggcgacgctggcctggcgtccgggtgacagcgggcagaaaaaactggttcagttgttcgactccggtgaagtctgcgcgtttcgtatcaaatatcccaacggtactgttgatgttttccgtggctggctgagttcactgggtaaaaccattgcctcaaaagacgtgatgactcgcaccgtgaaaatcagcggtgtggggcgtccatatctggcagaggagggcactgaaactgtgggcgttaccgggctgacagtatcaccggcgtctgccagtgtaaaagtgggagcaaccaccacgctgacctttacagtaaaacctgacggagccagtgacaaagcgatcagtgtgcattcgacagatccacagacagcctctgtgaccctgaacggacttgtggccacggtgaaaggcgtgaagcagggcagcgtcagcattgtgggcatgacttctgacggcgattttgtggcagtggctacggtggctgtcagcgccgcaggttaa

SEQ ID NO: 262907 - DNA, 402 bp, Klebsiella pneumoniae
atgaaccgacatacacaaatccgccaggtcgtactggcacgccttcgggaacagtgtggagacagcgccacgttttttgacgggcttccggcatttattgatgcgcaggaactgcctgccgtggcggtgtggctgagtgatgctcagtacaccggaaaaatgacggatgaagatgactggcaggctgttctgcatattgctgtcttcatccgggcacaggcaccggattcagagctggatatgtggatggagagcaccattttcccggccctgaatgatgtaccggcactttccggactcatcgacaccctgatcccactcggttttaactatcaacgtgataatgagatggccacctgggcgatggcggaaatcacgtaccagatcacgtacacgaattaa

SEQ ID NO: 262908 - DNA, 579 bp, Klebsiella pneumoniae
atgaaggggcttgagaatgccatccgcaatctgaacagccttgatacccgtatggtgccacaggccagcgcatgggcgataaaccgtgtggcacagaaagcggtctcggttgccacccggcaggttgccgggaataccgttgcgggagataaccaggtgaaagggatccccctgaaactggtacgtcaacgtgtccgggtgtttaaagccagtccgtcaggaaaaatgacggccaggatccgcgttaaccggggcaatctgcccgccattaagctggggacagcccgggtcagactggcccggcgtggtggaaaactgcagtaccgtggcagtgtgctgaaggtgggtaaatatcttttccgggatgcgtttattcagcaactggcgaatggtcgctggcatgtgatgcggcgtattgatggcaaaaatcgttaccccattgatgtagtgaaaatcccgctgtccggaccgctgacacaggcatttgaagatgcccgcgaccgcatcattgctgcggaaatgccgaaacagctggggtatgcactgaaacaacaactgaggttatggctgacccgatga

SEQ ID NO: 262909 - DNA, 243 bp, Klebsiella pneumoniae
atggatgcgatcacggtcagaaagatgggaaagacagcctcgattaatgatgtcgatatgactgtgatcccgggagaaatactggcagagctgaatgctctgtccggacctgcggtatctctggtggtgttttcttcgggataccgcccacgtcgcggggatcgcgttgtttatgacggacaacaatggacggtcacacggcatgaacgctttaacggtaagccaatgatctttattgagtaa

SEQ ID NO: 262910 - DNA, 324 bp, Klebsiella pneumoniae
atggcaaagaattttgtagaagaaggaaaaacggtggcgattgttgccagtgcagccatcagcagcggagatctggtgcaggtgggtgatgtttttgcggtggcactgaccgatattccacagggtgaaacaggcgacggcctgaccgaaggtgtgtttatgctgcctaagctgaaaacggatgatatgaaaacgggtaagaaggtttatctgaagtccggaaaagttcagctgactaacagcggctctgatccgctggtcggggttgtctgggcagatgccggaaccagtgcagaagaagtgccggtaaaactcaatgtctga

SEQ ID NO: 262911 - DNA, 2028 bp, Klebsiella pneumoniae
gtgccgcaacgaaacgacaggagccgcagcataccgacgaccagttcgaagaataattcctggttcaggatgcaggctggtcaccagagtgacgcggatatttatatttatgacgagattggtttctggggtgttacagcgaagcagtttatcagtgatctgaatgcactgggcgatatcacccacattaatctccatattaattcaccgggtggcgatgtctttgaaggcatcgccatttttaatgcgctgaaaacacatggtgcgtccattaccgtttatgtcgacggtgtggcggcgtcaatggcgtcggtcattgcgatggtgggaaacccggtcattatgccggaaaacaccttcatgatgattcataaaccatttggctttacgggcggtgatgcggaggacatgcgcacctatgccgacctgctcgataaggttgaggcggttctgttacccgcttatgcacagaaaaccgggaaaaccaccgatgaaattgctgccatgctggcggatgagacctggatgtccggtgccgaatgtctggcacatggatttgctgatcaggtaacgccagccgttaaggcaatggcatgtattcagtcaaaacgtacagaggaatttaaaaagatgccggaatccattcgaaacatgattactccgccacgcaacagtgctccacgcgtacaggatgatgaacctgcagcctcccggacgccagtgcaggcagcagcacccgtggtggatgaaaacagtatccgtgcgcaggtactggcagagcaaaaagcgcgtgtaaacggtattaatgatctgtttgccatgtttggcgggcgttatcagacgctgcaggctcagtgtcttgccgatcctgaatgttcgctggagcgggcccgcgaaaagctgttgaacgagatggggcgcgagtccacgccatccaataaaaataccccggctcatatttatgccggtaacggtaattttgtgggggacgggatccgccaggcgctgatggcgcgtgccggatttgaaaaaaccgaacgtgataatgtctacaacgggatgaccctgcgtgaatatgcccgtatgtcactgactgaacggggtattggggtttccggttataacccgatgcagatggtcggtgcggcgttcacacacagtacgtctgacttcggtaatattctgctggatgttgcgaacaaagccattctgcagggctgggaagatgcccctgaaacctatgaacagtggacgcggaaaggtcagttgtctgattttaaaattgcccatcgtgtgggtatggggggcttcagtgctctgcgtcaggtgcgtgaaggggcggaatataaatacgtcaccaccggagataaacaggccactattgcactggcgacctatggcgagctgttcagtatcacccgtcaggccattatcaatgatgatctgaatatgctgaccgatgtcccgatgaaactgggccgtgcggcgaaatccactattgccgatctggtttatgccattctgacgtctaacccgaaaatctccacagataatgtaagtctgttcgataaagcgaaacatgcaaacgtactggagagcgctgcaatggacgtggcatcgctggataaagcccgccagttgatgcgcgttcagaaagagggggagcgtcatctgaatattcgtcctgcgttcgtactggtaccgacggcgatggagtctgttgctaaccaggtcattcgctcctcaagtgtcaagggggctgacattaacgccggtattattaacccggtgaaagattttgcgaccgttattgcagagcctcgtcttgatgataacagccagaccaccttctacctggctgcgtcaaaaggctccgatacgattgaagtggcttatctcaacggtgtggatacgccatatattgatcagatggagggcttcagtgtggatggcgtgacaacgaaagtgcgtattgacgccggtgtcgcgccagttgatcaccgcggtctggtgaaatgtacggcgtaa

SEQ ID NO: 262912 - DNA, 1509 bp, Klebsiella pneumoniae
atggcaattcttgatgatgtgattggcgttttttcaccaggatggaaagcggcaaggctgcgttcccgtgcggtgatccaggcttatgaggccgtaaaaacgacgcggacacacaaagcccggcgggaaaaccgaactgccgaccagttaagccagtacggggccgtgtcgttacgtgagcaggcccgttaccttgataacaaccacgatctggttattggtgtatttgacaagctggaagaacgggtggtggggaaaaacgggattattgtcgagccacatccggtattacgcaatggggccattgcccgtgacctggctgcggagattcgcacccgatggagtgaatggtctgtcagcccggaagtcaccgggcagtttacccgtccgatgctggaacgtctgatgctgcgtacctggctgcgcgatggtgaggtgtttgcccagatggtttccgggcgcataaacagcctgacgccttctgccggtgttcatttctggctggaggcgctcgagccggactttattcccatgaccagtgatgagagcaacaggctgaatcagggcgtgtttgttgatgactgggggcgtcccgaaaaatatctggtgtataaaagccgtcccgtatccggacggcagatggaaaccaaagaagtggatgcagagcgaatgctgcatcttaaatttgttcgccgtctgcaccagatgcgcgggacgtctttgttgtccggtgtgctgatccgcctcagtgccctgaaagagtatgaagattctgagctgactgcagcgaggatcgccgctgctctggggatgtacatccggaaaggcgacgggcagagctatgaaccggatggtaatggcagcaaggataaggaacgcgagcttaccattcagccaggcattatttacgacgatctgaaacccggcgaagaaatcggaatggtgaagtcggatcgtcccaatcctaaccttgaaacttttcgtaatggtcagttgcgtgccgtggcggcgggcagtcgtctgagtttttccagtacggcacgcaactataacggtacttacagcgcccagcgtcaggaactggttgagtctactgatggctacctgatcctgcaggactggtttattggtgccgtcacccgcccgatgtatcgtgcctggctgaaacaggctgtggcatccggtgttatcaggctaccccgcgatcttgaccgttcttcactgtataccgcggtgtattccggaccggtgatgccgtggattgaccctgttaaggaggctgaggcctggaaaatccagattcgtggtggagcggcgacagaatcagactgggtacgtgcaggtggtcgtaatccggatgatgtcaaacgtcggcgcaaggccgaaattgatgaaaaccgcaagctggatctggtatttgataccgatccagccagtgataaaggaggcagcagtgccgcaacgaaacgacaggagccgcagcataccgacgaccagttcgaagaataa

SEQ ID NO: 262913 - DNA, 213 bp, Klebsiella pneumoniae; identical to SEQ ID NO: 4467

SEQ ID NO: 262914 - DNA, 2103 bp, Klebsiella pneumoniae
atgctgaatcaggaaaccgcaaaggcagcacgaaccgattcaggttatatccttcgcgcaccgagacgaatgcgggttgctgatgccgttgctcagtatatgcgggtgcccatgggggcagggaactcagtcccgtgggatccgctggtggcaccgtatgttattgagccgatgaactgcctggcctcgcgtgaatacgacgcagtgatatttgttggcccggcacgaaccggcaagactatcggcctgattgacggctgggtgatttacaacgtgatttgcgatcctgctgatatgctgatcattcagatgacggaggaaaaagcccgcgaacactccaaaaaacgactcgccagaacgtttcgcgtcagcccggaagtggtcagtcgcctgagtccgaacaaaaatgacaacaacgtttatgacagaacattccttgctggcaactacctgaaaatcggctggccgtcagtcaatatcatgtcctcatcagattataaatgcgtcgcgctgacggattatgaccgttttccggaagatattgatggcgagggggatgccttctctcttgcctcaaaacgtaccaccacatttatgtccagcggtatgacgctggtggagagttcccccggcagggatgtgaaggatgtgaaatggcgacggacttcaccgcatgaggctccaccaaccacggggatcctgtcgctctataaccgtggtgatcgccgtcgctggtactggccctgtccacactgtggtgagtattttcagccctgcggcgatgtggttgctggtttccgtgatattgccgatcccgtgctggcaagtgaggcggcttatattcagtgtccttcctgttcaggacggattatgcctgaacaaaaacgtgagctgaacggacgtggggtctggttgcgggatggtgaatccatcaatgcggatggcagtcgttatggtgatccccgacgctcacgtattgcgtcattctggatggagggtccggcagctgcttaccagacactctcgcaactcgtttacaaactgcttactgcagaacaggaatacgagacaaccggaagtgaagaaacactcaagacggttatcaataccgactggggattaccttatcttccccgcgccagcatggagcaacgaaaaagtgaactgcttgagcagcgggcagagccagttctttcccgcagtgtgccggatggcgttaatttccttgtggcgacagtggatgtgcaggcgggacgtcatcgccgttttgtggttcaggtaacgggctatggcagccgtggcgaacgctggattattgatcgttacaacatcacgcagtcattgcgcggtgacagcgacggggagagccagcgaattgatccggccagctatccggaagactgggatgtcctgctgacggatgtttttcataaaagctggccgctggcctccaatccttctcaacaaatgcgactgatggcaatggcggtggactccggcggtgaagacggggtcactgataatgcctataaattctggcgtcgttgccgtcgtgatggccttggtaaacgtatttacctgtttaagggcgacagcatccggcgcgcaaaactgatcacccgtacattccctgataacaccggacgaacgggccgacgggcgcaggccgcaggtgatgtgccgctctggcttcttcagacggatgccctgaaagaccgggtgaataacgcgttatggcgtgactcgccaggtcccggctatgtgcatttccctgactggctggggagctggttttacgacgaactgacgtatgaagagcggagcagtgacgggaaatggagtaagccgggtcgcggtgccaacgaagcttttgacctgatggtgtatgccgaggctctggtcattctgcatggatacgaaaagatccgctggccggatgcaccggagtgggcgagccgggaaacctggctggagtgtgtcccggacagtaccgaaccgtcacccacaccggaaccggtatccacgcctgttaaaaaacaaaaacggaagaaaacagtaactgacgatgttaacccctggctgacttccggaggatggttatga

SEQ ID NO: 262915 - DNA, 492 bp, Klebsiella pneumoniae
atggatcatgagttgaaaaacctggtgctgaatattaatcaactggcggctttatctggtctgcaccgccagactgtcgtggcaagactgaaaaacattcgtcccgctggtggacatgacaaactcaagctataccggttgaccgatattctgactgaatttatggggttaccaccgccggttgctgagggcgaaatggatccacatgaacgcaaagcctggtatcagtctgaacgtgagcgtcttaagttcgaacaggaaacggcacaactcattccggccagtgatgtcagacgggagtttgccatctgggcaaaagcggtcgtgcaggtgctggagacattaccggatattctggaacgtgactgcggcctgcagcctgccgctgtgagccgtgttcagtccattattgatgatctgcgcgatcagatagccctgcgggtgactgaagcaggtgcggatgatgaggaggaattacagcaggaggagtaa

SEQ ID NO: 262916 - DNA, 192 bp, Klebsiella pneumoniae
atgaaaaaacaagatattatcccttatatgttaaaagtaatgaatgaaaaaggaaaagttgctttccagccagcatggttccctgagaacgataatcatgaagaaactttcgattctctttgcgagttataccgtgaaggaaaaatcacaatggaaggaggttattacttcgatctaatttttatcctgtaa

SEQ ID NO: 262917 - DNA, 153 bp, Klebsiella pneumoniae
atgccttcgatgatagcgataattttactcatcatccttcacatctggctctgtagacaggatggtgatcacttctggagtgaatccagattaaacatctcattgctgatgcttgaggttaaacatctggcgcgcggtaaggggctgcgttga

SEQ ID NO: 262918 - DNA, 468 bp, Klebsiella pneumoniae
gtgagcagagtcgccgcgattatttatgctctggttatctgcatcatcgtctgcctgtcgtgggcggtcaatcattaccgtgataacgccatcgcctacaaagaacagcgagataaaaaagtcagagagctgaagcaggcgaccgccaccattactgacatgcagcagcgccagcgttctgctgatgcactcgatgctaaatacacgaaggagttagctgatgcgaaagctgaaaatgatgctcttcggcgcaagcttgataatggtggtcgggtgttcgtcaaaggaaaatgccctgtgccatcctcagccgaaacctccagcgcctccggcatgggcaatgatgccaccgtcgaactctctccagttgctggacgaaacgttctcggtatccgggacggaattatccgcgaccaaacagcactgagaacgcttcaggaatacatcaggacgcaatgccttcgatga

SEQ ID NO: 262919 - DNA, 534 bp, Klebsiella pneumoniae; identical to SEQ ID NO: 18338

SEQ ID NO: 262920 - DNA, 351 bp, Klebsiella pneumoniae
atgactcaaaactatgaactgattgtgaaagggatccgcaattttgagaataaagttacggtaactttagcgttacgggacaaaaaacgctttgacggtgaaatttttgacctggacatctcgctggaccgtgttgaaggtgccgcgctggagttttatgaggcagcagccagaaggagcatcagacaggtcttcctggatgttgctgccgggttatgtgaaggggatgagcagtcgccggaaaagcgccccgtaattttagaggcgcagaatgtgtggataacctacaaaggaaagctaccaggaagaattactggttctctgaagactcctccggaatcacaaccttaa

SEQ ID NO: 262921 - DNA, 567 bp, Klebsiella pneumoniae
atgtcattcacaaatacccctgaacgctatggtgttatatctgcggccttccattggctaagcgcaattattgtctacggcatgtttgctttaggtctgtggatggtcacgctcagttattacgatggctggtatcacaaagcacccgaactgcataaaagcatcggtattttgttaatgatggggctggttattcgcgttctgtggcgcgtcatatctccaccgccgggtccgctgcagagttattcgcccatgactcgtcttggcgcaaaggctggacatctcgcattgtacttattgctgttcgccatcggcatcagcggctatctgatctcaactgccgatggtaaaccgatcagcgtttttggctggtttgacgtccccgcgaccctcgccgacgctggcgcacaggctgacttcgccggtgccctgcatttttggctcgcgtggagcgtcgtagtactgtccgttatgcatggatttatggccctgaagcatcatttcatcgataaagacgacactctgaagcgcatgctgggaaagtcgtcatctgactatggagtataa

SEQ ID NO: 262922 - DNA, 576 bp, Klebsiella pneumoniae; identical to SEQ ID NO: 16239

SEQ ID NO: 262923 - DNA, 1053 bp, Klebsiella pneumoniae
atgccagtgttacacaaccgcatttccaacgacgcgttaaaagccaaaatgttggctgagagcgaaccgcgaaccaccatttcgttttacaagtatttccacatcgccgatcctaaggcgacccgtgacgctttatatcagctgtttaccgcgctggatgtttttgggcgagtgtatctggcgcatgagggcattaacgcgcaaatcagcgtacctgcgagcaatgttgaaacatttcgcgcgcagctttatgccttcgacccggctttagagggcttacgcctgaatatcgcgttggatgatgacgggaaatccttctgggtactgcgcatgaaggtccgcgatcgtatcgttgccgacggtattgacgatcctcactttgatgccagcaatgtgggtgagtatctgcaagcggcggaagtgaacgccatgcttgacgatcccgatgcattgtttatcgacatgcgtaaccactatgagtatgaagtggggcactttgaaaacgcgctggaaattccggcagataccttccgtgagcagctgccaaaagcagtcgagatgatgcaggcacataaagataaaaaaatcgttatgtactgcaccggcggcattcgttgtgaaaaggccagtgcctggatgaaacataacggattcaataaagtctggcatatcgagggcggaattattgaatacgcccgcaaggcgcgcgagcagggtttaccggtacgttttattggcaaaaattttgtttttgacgagcggatgggcgaacgtatatcggatgagattatcgcgcattgccaccagtgcggtgcgccgtgcgacagccataccaactgtaaaaatgatggctgccacctgctttttattcagtgtccagtatgtgcggaaaaatacaaaggttgttgtagtgagatttgctgcgaagaaagcgcgttaccgcctgaagaacagcgacgccgtcgggcaggacgtgaaaatggcaataagatctttaataagtctcgtggacgtctgaatacaacactgggcattcctgatccaacagaataa

SEQ ID NO: 262924 - DNA, 921 bp, Klebsiella pneumoniae
atgacgaatctacccaagttctccaccgcactgcttcatccgcgttattggttaacctggttgggtattggcgtactttggttagtcgtgcaattgccctacccggttatctaccgcctcggttgtggattaggaaaacttgcgttacgttttatgaaacgacgcgcaaaaattgtgcatcgcaacctggaactgtgcttcccggaaatgagcgaacaagaacgccgtaaaatggtggtgaagaatttcgaatccgttggcatgggactgatggaaactggcatggcgtggttctggccggaccgcagaatcgcccgctggacggaagtgatcggcatggaacacattcgtgacgtgcaggcgcaaaaacgcggcatcctgttagttggcatccattttctgacactggagctgggtgcgcggcagtttggtatgcaggaaccggggattggcgtttaccgcccgaacgataatccactgattgactggctacaaacctggggccgtttgcgctcaaataaatcgatgctcgaccgcaaagatttaaaaggcatgattaaagccctgaaaaaaggcgaagtggtctggtacgcaccggatcatgattacggcccgcgctcaagcgttttcgtcccgttgtttgccgttgagcaggctgcgaccacgaccggaacctggatgctggcacggatgtccggcgcatgtctggtgcccttcgttccacgccgtaagccagatggcaaagggtatcagttgattatgctgccgccagagtgttctccgccgctggatgatgccgaaaccaccgccgcgtggatgaacaaagtggtcgaaaaatgcatcatgatggcaccagagcagtatatgtggttacaccgtcgctttaaaacacgcccggaaggcgttccttcacgctattaa

SEQ ID NO: 262925 - DNA, 1227 bp, Klebsiella pneumoniae
atgtcaccctgtgaaaatgacacccctataaactggaaacgaaacctgatcgtcgcctggctaggctgttttcttacgggtgccgccttcagcctggtaatgcccttcttacccctctacgttgagcagcttggcgttacgggccactccgccttgaatatgtggtccggtattgtcttcagcattacatttttattttctgccatcgcctcaccgttttggggtggactcgccgaccgtaaaggccgcaaactcatgctattacgctctgccctcggcatgggcatcgtgatggtgttgatggggctggcacaaaatatctggcagtttttgatcctacgggcgcttcttgggttacttggcggatttgtccccaacgctaatgctcttatcgccacacaagtaccgcgtaataaaagcggctgggcgctgggtacgctctccacaggcggcgttagtggtgcgttgctcggcccaatggctggcggcctgctcgccgatagctacggcttacgtccggtattctttattaccgccagtgtgctcatactctgctttttcgtcaccctgttttgcatcagagaaaaattccagccggtcagcaaaaaagagatgctgcacatgcgtgaagtggtgacatcacttaaaaacccgaaactggtactcagcctgtttgtcactacgttaatcatccaggtggcaacgggctcaattgcccccattctgacgctgtatgtccgcgaactggcgggtaacgtcagtaacgtcgcctttatcagtggcatgatcgcctcggtgccaggcgtggcggctctgctaagtgcaccacgactcggcaaacttggcgatcgaatcggacccgaaaagatcctgattacggcgctgatcttttctgtactgctgttgatcccaatgtcttacgttcagacgccattacaacttgggattttacgttttttgctcggtgccgccgatggtgcactactccccgccgtacagacactgttggtttacaactcgagcaaccaaatcgccgggcgtatcttcagctataaccagtcgtttcgtgatattggaaacgttaccggaccattgatgggagccgcgatttcagcgaactacggtttcagagcggtatttctcgtcaccgctggcgtagtgttattcaacgcagtctattcatggaacagtctacgtcgtcgtcgaataccccaggtatcgaactga

SEQ ID NO: 262926 - DNA, 375 bp, Klebsiella pneumoniae
atgaccatgtacgcaacgcttgaagaagccattgacgctgcacgcgaagaatttcttgcagacaaccccggcatcgacgccgaagatgcgaatgtgcaacagttcaatgcccaaaaatacgttttgcaggacggcgacatcatgtggcaagttgagttttttgccgacgaaggggaagaaggtgaatgtttacctatgcttagcggtgaagccgcgcaaagtgtctttgatggcgactatgatgagatagagatccgccaggagtggcaggaagagaatacattacatgaatggggcgagggggaatttcagcttgagccaccgctggataccgaggaaggacgcgcagcagctgatgagtgggatgaacgttaa

SEQ ID NO: 262927 - DNA, 228 bp, Klebsiella pneumoniae
atgcgtttaattgtggtgagcatcatggtgaccttgctgagtggctgtggcagcatcattagccgcactataccggggcaggggcatggcaaccaatattatcccggtgtgcaatgggatgtgcgtgactccgcctggcgttatgtcacaatccttgatctgccattctccctggtttttgatactttactgctgccgatcgacattcatcatggcccgtatgagtaa

SEQ ID NO: 262928 - DNA, 2514 bp, Klebsiella pneumoniae
atgcccatcgccgcaagcgagaaagcggcattgccgaagactgatatccgcgccgttcatcaggcgctggatgccgaccaccgtacctgggcgcgggaggatgactccccgcaaggctcggtaaaggcgcgtctggaacaagcctggccagattcacttgctgatggacagttaattaaagacgacgaagggcgcgatcagcttaaggcgatgccagaagcaaaacgctcctcgatgtttcccgacccgtggcgtaccaacccggtaggccgtttctgggatcgcctgcgtggacgcgatgtaacgccgcgctatctggctcgtttgaccaaagaagagcaggagagcgagcaaaagtggcgtaccgtcggtaccatccgccgttacattctgttgatcctgacgctcgcgcaaactgtcgtcgcgacctggtatatgaagaccattcttccttatcagggttgggcgctgattaatcctatggatatggttggtcaggatttgtgggtttcctttatgcagcttctgccttatatgctgcaaaccggtatcctgatcctctttgcggtactgttctgttgggtgtccgccggattctggacggcgttgatggggttcctgcaactgcttattggtcgcgataaatacagtatatctgcgtcaacagttggcgatgaaccattaaacccggagcatcgcacggcgttgatcatgcctatctgtaacgaagacgtgaaccgtgtttttgctggcttgcgtgcaacgtgggaatcagtaaaagccaccgggaatgccaaacactttgatgtctacattctgagtgacagttataacccggatatctgcgtcgcagagcaaaaagcctggatggagcttatcgctgaagtcggtggcgaaggtcagattttctatcgccgccgccgtcgccgcgtgaagcgtaaaagcggtaatatcgatgacttctgccgtcgctggggcagccagtacagctacatggtggtgctggatgctgactcggtaatgaccggtgattgtttatgcggcctggtgcgtttgatggaagccaacccgaacgccgggatcattcagtcgtcgccgaaagcgtccggtatggatacgctgtatgcacgctgtcagcagttcgcgactcgcgtgtatgggccactgtttacagccggtttgcacttctggcaacttggcgagtcgcactactggggacataacgcgattatccgcgtgaaaccgtttatcgagcactgcgcactggctccgctgccgggcgaaggttcctttgccggttcaatcctgtcacatgacttcgtggaagctgcgttgatgcgccgtgcaggttggggagtctggattgcttacgatctcccgggttcttatgaagaattaccgcctaacttgcttgatgagctaaaacgtgaccgccgctggtgccacggtaacctgatgaacttccgtctgttcctggtgaagggtatgcacccggttcaccgtgcggtatttctgacgggcgtgatgtcttatctctccgctccgctgtggtttatgttcctcgcgctctctactgcattgcaggtagtgcatgcgttgaccgaaccgcaatacttcctgcaaccacggcagttgttcccggtgtggccgcagtggcgtcctgagctggcgattgcactttttgcttcgaccatggtgctgttgttcctgccaaagctattgagcattttgcttatttggtgcaaaggaacgaaagaatatggcggcttctggcgcgttacattatcgttgctgctggaagtgctgttttccgtgctgctggctccggtacgcatgctgttccatacggtcttcgtcgtcagcgcgttccttggctgggaagtggtgtggaattcaccgcagcgtgatgatgactccacttcctggggtgaagcgttcaaacgccacggctcacagctgctgttagggttagtgtgggctgttgggatggcgtggttggatctgcgtttcctgttctggctggcaccgattgtcttctcgttgatcctgtcaccgtttgtttcggtgatttccagccgtgccaccgttggtctgcgcaccaaaagctggaaactgttcctgatcccggaagagtattcaccgccgcaggtgctggttgataccgatcggttccttgagatgaatcgccaacgctcccttgacgatggctttatgcacgcagtgtttaacccgtcatttaacgctctggcaaccgcaatggcgaccgcgcgtcaccgcgccagtaaggtgctggaaatcgcccgtgaccgccacgttgaacaggcgctgaacgagacgccagagaagctgaatcgcgatcgtcgcctggtgctgctaagcgatccggtgacgatggcccgtctgcatttccgcgtctggaattcccctgagagatattcttcatgggtgagttattacgaagggataaagctcaatccactggcattgcgtaaaccggatgcggcttcgcaataa

SEQ ID NO: 262929 - DNA, 1503 bp, Klebsiella pneumoniae
atgttaaccctgtatacatcttcaagctgggctttcagtattgatgatgtcgcaaagcaagctcaatccttagccgggaaaggctatgatgcgcccaaaagcaacttgccctccgttttccgcgacatgaaatacgcggactatcagcagatccagtttaatcatgacaaagcgtactggaacaatctgaagaccccattcaaactcgagttctaccatcagggtatgtacttcgataccccggtcaaaataaatgaagtgactgccaccgcagtcaaacgaatcaaatacagcccggattatttcactttcggcgatgttcagcatgacaaagacacggtaaaagaccttggttttgccggttttaaagtgctttacccgatcaacagcaaagataaaaacgatgaaatcgtcagcatgctcggggccagctatttccgcgtgattggtgcaggtcaggtttatggcctttctgcacgcggcctggcaattgataccgccttgccatcgggtgaagaatttccacgcttcaaagagttctggatcgagcgtccaaaaccgactgataaacgtttaaccatttatgcattgcttgactcgccgcgcgcgacaggtgcttacaaattcgtagttatgccagggcgtgacacggttgtggatgtgcagtcgaaaatctatctgcgcgataaagtcggcaaactgggggttgcaccgttaaccagtatgttcctgtttgggccgaaccaaccgtcgcctgcaaataactatcgtccggagttgcacgactctaacggtctctctatccatgctggtaatggcgaatggatctggcgtccgttgaataacccgaaacatttagcggtcagcagcttctccatggaaaacccgcaaggcttcggtctgttgcagcgcggtcgtgatttctcccgctttgaagatctcgatgatcgttacgatcttcgtccaagcgcatgggtgactccgaaaggggagtggggcaaaggcagcgttgagctggtggaaattccaaccaacgatgaaaccaacgataacatcgtcgcttactggacgccggatcagctgccggagccgggtaaagagatgaactttaaatacaccatcaccttcagccgtgatgaagacaaactgcatgcgccagataacgcatgggtgcaacaaacgcgtcgttcaacgggggatgtgaagcagtcgaacctgattcgccagcctgacggtactatcgcctttgtggtcgattttaccggcgcagagatgaaaaaactgccagaggataccccggtcacagcgcaaaccagcattggtgataatggtgagatagttgaaagcacggtgcgctataacccggttaccaaaggctggcgtctggtgatgcgtgtgaaagtgaaagatgccaagaaaaccactgaaatgcgtgctgcgctggtgaatgccgatcagacgttgagtgaaacctggagctaccagttacctgccaatgaataa

SEQ ID NO: 262930 - DNA, 1158 bp, Klebsiella pneumoniae
atgaatccagtacccgcgcaacgtgaatatttcctcgactccatccgcgcctggctgatgttgttagggatcccttttcatatttctttaatctattcgagccatacatggcatgtgaatagcgccgaaccgtcattatggctgaccctttttaatgacttcatccactcgttccgcatgcaggtatttttcgttatatccgggtacttttcctacatgctttttttacgctatcccttgaaaaaatggtggaaagtacgtgtcgaacgtgtaggtatcccgatgttaacagccatccccctactgacattgccgcaatttattatgctgcaatacgtcaaagggaaagcggaaagttggcctggactgtcattgtatgacaaatataatacgttggcctgggaattaatatcacacctgtggtttttactggtgttagtggtcatgacgacgctgtgcgtctggatattcaaacgtatcagaaataatttagaaaattctgataaaacgaataaaaaattctcgatggtaaaactatcggtgatttttttgtgcctcggcatcggttatgcggtaataagaagaacaatttttattgtgtatccgcccattctgagtaacggcatgttcaattttattgtcatgcaaacgctattttatttgccgttctttatcctcggcgcactggctttcattttccctcatcttaaagccttgtttaccacgccgtctcgtggctgtaccttcgcagcagcattggcatttgtcgcttatttactcaaccagcgctatggcagtggcgatgcctggatgtacgaaaccgagtcggtgatcaccatggtcctcggtctgtggatggtgaatgtggtcttctccttcggccaccgtttgcttaacttccagtcagcgcgggtgacttactttgttaatgcatcgctgtttatctatctggttcaccacccgttaacgctgtttttcggcgcgtacattacaccgcacatcacatccaactggcttggttttctctgtggcctgatattcgtagtagggattgcgataattctgtatgaaattcatttacgcatcccgttactgaagtttttgttctctggtaaaccggttgttaagcgtgagaacgataaagcaccagcccgttaa

SEQ ID NO: 262931 - DNA, 1482 bp, Klebsiella pneumoniae
atgatgaagaaaacacccacctctacgaaagactccttacccaacaaggagatgaatgatttgccccggctggcgagcgcggtgctgccactgtgttcgcaacatcccggtcagtgtggccttttccctctggagaaaagtctggatgcgtttgccgcccggtatcgtctggccgaaatggcagagcatacgctggatgttcagtattacatctggcaggacgatatgtcgggtcggttactcttttccgccctgttagccgcagcaaagcgtggcgttcgcgtccgtttgttgctggacgacaacaatacacccggacttgacgacattttacgcttgcttgacagtcatccccgcattgaagtccggctttttaatcctttctcgtttcgcttgctacgtccgcttggttatatcaccgacttttcccgtctcaatcgccgtatgcacaataaaagtttcactgttgatggcgtggtgacgctggtaggggggcgaaatattggtgatgcctattttggtgcaggggaagagccacttttttcggatttagatgtcatggcaataggaccagttgtagaggacgttgccgatgatttcgcccgctactggtattgcaaatcggtttcacccctacagcaggtgctggatgtcccggaaggtgaaatggcggatcgcatcgagttaccagcatcctggcacaacgatgccatgacgcatcgttatttacgcaaaatggaatccagcccgtttataaatcatctggttgatggaacgttgccgcttatctgggcgaaaacacgtttattaagtgatgatccggcgaaaggggagggcaaggcaaaacggcattcactgttaccgcagcgcctgttcgatatcatgggctcacccagtgaacgcatcgatattatctcttcctattttgtaccgacacgcgcaggtgtggcgcaactcttacggatggtgagaaaaggggtaaagattgcgatcctaaccaattctcttgccgctaacgatgttgctgtcgtccatgccggatacgcgcgctggcgcaaaaaattgctccgctacggcgtggaattatatgaactcaagccgacgcgtgaacaaagtagtacgttacacgatcgcggcataaccggtaattccggtgccagcctgcatgctaaaacctttagcatcgatggtaaaacggtgtttatcggctctttcaatttcgatccgcgttcgacattgctcaatactgaaatggggttcgtgatagagagcgaaacgctggcacagttaattgataaacgctttattcagagccagtatgatgcggcctggcagctccgtctggacaggtggggacggatcaactgggttgatcgtcatgcaaagaaagaaattgttctcaaaaaagaacccgccaccagtttctggaagcgggttatggtcagactggcgtcgatattgcctgtggaatggttattataa

SEQ ID NO: 262932 - DNA, 534 bp, Klebsiella pneumoniae
atgaaaacgcgtattcatgttgtgcagggtgatattaccaaactggccgttgatgtgattgtgaatgcggctaatccgtcattaatgggaggcggcggcgtcgatggggccattcatcgcgcagcgggtccggctctgctggatgcctgtttaaaagtcaggcaacagcagggcgattgccctacggggcatgccgttattacgcttgcaggcgatcttcccgctaaagccgtagtgcacaccgtcgggccagtctggcgtggtggtgaacaaaacgaagaccagcttttgcaggatgcctatctcaatagtctgcgactggtggcggcaaacagctatacgtcagtggcatttcctgcaatcagtactggggtttatggttaccctcgtgcggcagcggctgaaatcgcagtaaaaaccgtttcagaatttattacccgtcacgctttacccgaacaggtatattttgtctgttatgatgaagaaaacacccacctctacgaaagactccttacccaacaaggagatgaatga

SEQ ID NO: 262933 - DNA, 312 bp, Klebsiella pneumoniae
atgttcagaccttttttaaactctcttatgctcggcagtttgttttttccttttattgccatcgcaggaagcagcgcgcaagggggcgtgatccatttttatggccaaattgtggaaccagcatgtgacgtcagcacccagtcatcacccgtagaaatgaactgcccacagaatggctctgttccgggcagaacctattccagcaaagcgttaatgagcggcaatgtcaaaaacgcgcaaatagcctcagtaaaagtgcagtatcttgataaacagaaaaagctggctgtaatgaacatcgaatataactaa

SEQ ID NO: 262934 - DNA, 333 bp, Klebsiella pneumoniae
atgaatgcgttattactccttgcggcactttccagtcagataacctttaatacgacccagcaaggggatatgtacaccattattcctgaagtcactcttactcaatcttgtctgtgcagagtacaaatattgtccctgcgcgaaggcagttcagggcaaagtcagacgaagcaagaaaagaccctctcattgcctgctaatcaacccattgctttgacgaagttgagtttaaatatttccccggacgatcgggtgaaaatagttgttactgtttctgatggacagtcacttcatttatcacaacaatggccgccctcttcagaaaagtcttaa

SEQ ID NO: 262935 - DNA, 456 bp, Klebsiella pneumoniae
atgaaacttttaaaagtagcagcaattgcagcaatcgtattctccggtagcgctctggcaggtgttgttcctcagtacggcggcggcggtaaccacggtggtggcggtaataatagcggcccaaattcagagctgaacatttaccagtacggtggtggtaactctgcacttgctctgcaagctgacgcccgtaactctgatctgaccattacccagcacggcggcggtaacggcgcagatgttggccaaggttctgatgacagctcaatcgatctgactcagcgtggtttcggcaacagcgctactcttgatcagtggaatggtaaagattctactatgactgttaaacagttcggtggcggtaacggtgctgctgttgaccagactgcatctaactccagcgttaacgtcactcaggttggctttggtaacaacgcgaccgctcatcagtactaa

SEQ ID NO: 262936 - DNA, 456 bp, Klebsiella pneumoniae
atgaaaaacaaattgttatttatgatgttaacaatactgggtgcgcctgggattgcagccgcagcaggttatgatttagctaattcagaatataacttcgcggtaaatgaattgagtaagtcttcatttaatcaggcagccataattggtcaagctgggactaataatagtgctcagttacggcagggaggctcaaaacttttggcggttgttgcgcaagaaggtagtagcaatcgggcaaagattgaccagacaggagattataaccttgcatatattgatcaggcgggcagtgccaacgatgccagtatttcgcaaggtgcttatggtaatactgcgatgattatccagaaaggttctggtaataaagcaaatattacacagtatggtactcaaaaaacggcaattgtagtgcagagacagtcgcaaatggcaattcgcgtgacacaacgttaa

SEQ ID NO: 262937 - DNA, 861 bp, Klebsiella pneumoniae
atgaaaatgtacgtggtatcgacaaagcagatgctgaacaacgcacagcgcggcggttatgcggttccggcattcaatattcacaatctcgaaacgatgcaagtggtggtagaaaccgctgccaacctgcatgcgccggtcatcatcgccggaacgcctggcacattcacttatgctggtacagaaaatctgttggcgctggtcagcgcgatggcgaagcaatatcaccatccactggcaattcatctcgaccatcacacgaaatttgacgatatcgctcagaaggttcgttctggcgtgcgctcagtcatgattgacgcctcgcatttgccttttgcgcaaaatatttcacgggtcaaagaggtggtggatttttgccatcgctttgatgtcagcgtcgaggcggagctggggcaacttggcggccaggaagatgatgtgcaagtcaatgaagccgatgcgttgtacaccaaccccgcacaggcgcgtgaatttgccgaggcaaccgggattgattccctggcggtcgccatcggtacggctcacggtatgtatgccagcgcaccggtgcttgatttttctcgactggagaacattcgccagtgggtgaacttaccgctggtgctgcatggcgcgtcaggattatcgactaaggatattcagcaaaccatcaaagtggggatatgcaaaatcaacgttgcaacggagctgaaaaatgccttctcgcaggcgttaaaaaattacctgaccgagcaccccgaagcgaccgatccccgggattatttgcagtcggctaaatccgcaatgcgcgatgtggtgagcaaagtgattgccgattgtggctgcgagggcagggcataa

SEQ ID NO: 262938 - DNA, 1263 bp, Klebsiella pneumoniae
atgaaaacgttaattgcccggcataaagctggtgaacatatcggcatatgttcagtctgttctgcccatccgttggttatcgaagcggcgctggcatttgatcgcaacagcacgcgcaaagtgctgattgaagcaacgtcaaaccaggtcaatcaatttggcggttataccggaatgacaccggcagactttcgcgaatttgtttttacgattgccgataaagttgggtttgcacgcgaacgcattattctcggcggcgatcatctggggccaaactgctggcagcaagaaaatgcggatgcggcgatggaaaaatccgtcgagctggtaaaggaatatgttcgtgccggcttcagtaaaattcatcttgatgcgtcaatgtcctgcgcgggggatcccataccgttagcaccagaaacggttgcggaacgagctgctgtgctttgctttgctgcggaaagtgtggcgacagattgccagcgtgagcaactgagctatgtcattggcaccgaagttccggttccgggcggtgaggccagcgccattcagtcagtacacatcacccatgttgaagatgccgccaatactttacgtacgcatcaaaaggcctttattgcccgtgggctgacagaggcgttaacacgtgtgattgccatcgtggtgcagccgggtgtggaatttgatcacagcaatattatccattatcagccgcaggaagcgcaggcgctggcgcaatggatagaacacacccgaatggtttatgaagcacattctaccgattaccagacccggacggcttattgggaattagtccgcgatcactttgcaatattgaaagtcggtcccgcattaacctttgctttacgcgaggcgatatttgcactggcacaaattgagcaggaacttatcgcccccgaaaatcgcagcggttgcctggcggtaattgaagaagtgatgctcgacgaaccgcaatactggaaaaaatattatcgtacgggttttaacgattcattactggatattcgttacagcctgtcggatcgtattcgttattactggccgcatagtcggattaaaaatagcgtcgaaacgatgatggtgaatctgcaaggcgtggacatcccactgggcatgattagtcagtatcttcccaaacaatttgaacgcattcagtccggggaattatcagcaataccgcatcagctgattatggataaaatttatgatgttttgcgcgcctatcgctacggctgtgcggaataa

SEQ ID NO: 262939 - DNA, 453 bp, Klebsiella pneumoniae
atgactaacctgtttgttcgtagcggaatttcttttgtcgatcgtagcgaagttttaacccatatcggtaatgagatgctcgccaaaggtgtggttcataatacctggccacaggcattaattgccagagaagcagaattccctaccgggataatgcttgagcagcacgccattgcagtaccgcattgtgaggcgattcatgctaagtcgtcagccatttatctgttaaggccaacaaataaagttcattttcagcaagcggatgatgataacgacgtggaggtatcgttggttattgcgttgattgtggaaaatccgcagcagcaattgaaacttttacgctgtttatttggcaagttacaacagcccgatatcgtcgagacactaatcactcttcctgaaacccagttaaaggaatacttcacaaagtatgttttagattcagacgaataa

SEQ ID NO: 262940 - DNA, 285 bp, Klebsiella pneumoniae
atgaaacgcaagattattgtcgcttgcggaggcgcggttgcgacctctacgatggcggcggaagaaattaaagagttgtgtcagaatcataatattcctgttgaattaatccagtgtcgggttaatgaaatagaaacctatatggatggtgtgcatttgatatgcaccactgccaaagtggatcgtagttttggcgatattccgttagttcacggcatgccttttatttctggtgtcggtatcgaagcattacaaaataaaattctgactatcttacaggggtga

SEQ ID NO: 262941 - DNA, 1041 bp, Klebsiella pneumoniae
atgaaatcagtggtgaatgatactgatggtatcgtgcgcgttgcagaaagcgtcattcctgaaattaaacatcaggatgaggtgcgggtaaaaattgccagctcgggcttatgtggttccgatttacccaggatatttaaaaatggtgcacattattatccaataacgttaggccatgaatttagcggctatattgatgcggtgggatccggtgttgatgatttacaccctgacgatgcggttgcctgtgtgccgttattaccctgttttacttgtccagagtgtctgaaagggttttattcccagtgcgcaaaatatgattttattggctcgcggcgtgatggtggatttgctgaatatattgtcgttaagcgaaaaaatgtctttgctctacccacggatatgcctattgaggatggggcttttattgagccgattaccgttggtctgcatgcttttcatttagcgcaaggttgtgagaataaaaacgttattattattggtgccggaaccattggcctgctggctattcagtgcgctgtcgcgctgggagcaaagagtgtgacggctatcgacattagctcagaaaaactggcactggcaaaatctttcggtgcgatgcaaacatttaacagtagcgaaatgagcgcgccgcaaatgcagagcgttttacgcgaactgcgttttaatcagcttatcctcgagacggctggcgtaccgcaaactgtcgaactggcggtagagattgccggtcctcatgcccaactggcgctggtgggcacgttgcatcaggatctgcatttaacatcggcaacgtttggcaaaatattgcgtaaagagctgacggttatcggcagttggatgaactattccagcccttggccggggcaggagtgggaaacggcgagccggttgctgacagaacgtaagttaagcctggagccattaatcgctcaccgtggaagctttgaaagcttcacccaggcggtgcgtgacatcgctcgtaatgccatgccgggcaaagtgttgctcattccatga

SEQ ID NO: 262942 - DNA, 780 bp, Klebsiella pneumoniae
atgacgatgaattcattcgagcgaaggaataagatcatccaattagtgaatgaacagggaaccgtgcttgttcaggatctggcgggagtatttgctgcctcggaagcgacaatccgtgccgatttgcgctttctcgaacaaaaaggcgtggttacgcgctttcatggcggtgcggcgaaaataatgtccggtaatagtgaaaccgagacccaggaagtcgggtttaaagagcgatttcagctcgccagcgcgccaaaaaacagaatagcgcaggcggcagtcaaaatgatccacgaagggatgaccgttattctcgacagcggaagtacgacgatgcttatcgccgaaggattaatgaccgccaaaaatatcacggtgattaccaacagtctcccggcagcgtttgccctttccgaaaataaagacattactctggtcgtctgcggtggcacggtccgccataaaacgcgctcgatgcatggttccattgccgagcgttcattgcaggatattaatgccgatttaatgtttgtcggtgctgatggtattgatgcggttaatggtattacgacctttaatgaaggttattcgattagcggggcgatggtcaccgccgctaataaagtgattgccgttctcgattcatcgaaatttaaccgtcgcggttttaatcaggtactgccaatcgaaaaaattgacattattattaccgatgatgctgtgtctgaggtggataaactggcattgcagaagacacgggtaaaattaattacggtgtag

SEQ ID NO: 262943 - DNA, 900 bp, Klebsiella pneumoniae
atggcagaatttcccgccagcttactgattcttaatggcaaaagtactgacaatctacccttgcgcgaagcaattatgctgttgcgtgaggaaggaatgacgatccatgtgcgggtcacctgggagaaaggcgatgccgcacgatatgtagaggaggcccggaagttgggcgtcgcaacggtgattgccggtggtggcgatggcaccattaatgaagtttctacggcgttgattcagtgtgagggggatgacatacccgcgctgggaattttgccattaggaaccgccaatgattttgccaccagtgtagggattcctgaggcactggataaggcgctgaaactggcaattgccggtaacgccattgcgatagatatggcgcaggtcaacaaacaaacctgttttattaatatggcgacaggcggatttgggacgcgtattaccacagaaacgccggaaaaattaaaagccgcgctgggtggcgtctcttacatcattcatggcttaatgcgcatggatactctgcaaccggaccgttgtgaaatccgcggtgaaaactttcactggcaaggtgacgccctggtcattggtattggtaacgggcgtcaggccggtggcggtcagcaattgtgtccgaacgcgttaattaacgatggcttgctgcaactgcgcatttttaccggcgatgaaattcttccggctctcgtatcaaccttaaaatctgacgaagataacccgaatattatcgaaggcgcttcgtcgtggtttgatatacaagccccacacgaaatcacttttaatcttgatggcgaaccgttgagcggacaaaactttcatattgaaatacttccggcggcgttgcgttgtcgattaccaccagattgtccattattgcgttaa

SEQ ID NO: 262944 - DNA, 318 bp, Klebsiella pneumoniae
atgaaaaagatagctgctatatcattaattagtatttttattatgtctggttgtgctgtgcataatgatgagacaagtatcggtaaatttggtcttgcatataaaagtaatattcagcgtaaactcgataaccaatactacaccgaagccgaagcttctttagccaggggcagaatatctggtgcagaaaatatagtaaaaaatgatgcagcccatttctgtgttactcagggcaaaaaaatgcagatagttgacctgaagacagaaggtgcaggattacatggcgtcgctcgtctgacattcaaatgtggagagtga

SEQ ID NO: 262945 - DNA, 297 bp, Klebsiella pneumoniae; identical to SEQ ID NO: 32199

SEQ ID NO: 262946 - DNA, 171 bp, Klebsiella pneumoniae; identical to SEQ ID NO: 32197

SEQ ID NO: 262947 - DNA, 501 bp, Klebsiella pneumoniae
atgacggttatgactcttgcattagttcaaaaacaacctgcagctctacgcgtcgttataggaaagcatcttgcggaacctcgctggcacgatacctgtgatttttataatcagatgatggagcgtgaccgcttgactgtctgttttcatgctcggttaaaacagcgtcacgcagtaatgcgctttgaagaaatgaatgatgtcgaccgcgaacgtctggcttgtgctatcgatgagctgcgcgctgctttttcaaaacgtcgtcaggttggcgcaagtgaatctgcatatattagttttctaacggtgggtcagcgccgctctttatttctacacgcgggattgagtgaggtcgagttcaatcagccttactggcgcattgacgaagatgcttgttattggcgagagaaactattccgcgctttgcgtgagctttttgggttatttgaacacgcgccaacgatattaacctcggtaaagcctgagcagtatttacattaa

SEQ ID NO: 262948 - DNA, 219 bp, Klebsiella pneumoniae; identical to SEQ ID NO: 32195

SEQ ID NO: 262949 - DNA, 276 bp, Klebsiella pneumoniae; identical to SEQ ID NO: 32194

SEQ ID NO: 262950 - DNA, 924 bp, Klebsiella pneumoniae
ttgccaaaaaatatcgacggctacgcgcttgacggtcagctcgatcacgataccggcaaatctctgaaagatacggccgcagccgtaaccgcatgggcgtctacatggcgtatccctcagtttaaaccgattggcctcccgacaatgggcgcttaccgcgaactgcgtaagctgccgcgcggggtgagtatcgccagcgagtttgacgaccgtgtcgaggccgtccgggctgctgcagatgagggggaatttgacctgtacatcagcgcgcagggtggggcaaacatgccgcgtgatgctcaggcggtcagggtcgcccgtaaggtgacggatgaggtaaacgaatacgaggaggatatcgagaaagtggtcggtatttatgcccctcatcttggggtgagccgcgtacatgtaacccgtacagcggaatggcgcatagttccaaaggttttggccgttgagcctttgaccttaaaaagcggctctgccgcgcctcggagtcctgtcaataactgtggaaagcttgccgacggtggcgatccagttatgacacctacaccgtctgagcaagccgcagcggtgttaaatctgattgaggccggggttatcggctggaatgagccagacgtcatgaaggttcttaacggcgcgttaaaagctggcgcacctcgcaataatcgccagcaaagaagcaatgcgccactcaaaacgagcgagcaagctccatcagccaggatgacaaaaccagaaagggatcgcgtggcgaaaattcgtttcgatttggctcaggagggcattaccccggaacggtgggcgctcgaagcgctggcgcgtggggcaacggtgatttatggcgataaaaaaatcaaatacgcggctgctgatgagtggccgggattctcaattcaagaggagcagaattaa

SEQ ID NO: 262951 - DNA, 465 bp, Klebsiella pneumoniae
atgagcaaaatccatgagttaaaaattgcacctgagtattttaactctttgatatctcaggaaaaacgtgctgaatttcgtctcaatgaccgcgattattctagcggtgatattctcgggttgcatgaatgggaaccggtaaacagatataccgggaaacgtgtatcagtgagggtgacaaacgttacggatttatctgaatgggcggaaaattatgtgatgctgagttttcagttaatgatgccagatgtccagtgcggtatgtccctaatgaactggaaagagttaagcgagaaggggcttgttttcagagttaatcacgaaattctacacccgttagggctggctattagatatgaaacacttaacagcgtttctggtagggcttacatcgctgatgatggtgtctggcaatattccgacaagttggtcgcagatgctaaaaaaaatgggtggttaaaatga

SEQ ID NO: 262952 - DNA, 225 bp, Klebsiella pneumoniae; identical to SEQ ID NO: 32191

SEQ ID NO: 262953 - DNA, 654 bp, Klebsiella pneumoniae; identical to SEQ ID NO: 5343

SEQ ID NO: 262954 - DNA, 1197 bp, Klebsiella pneumoniae
atgaaaactttgttatttatcttcatgaccatagcaatgttgctatggtttttaagtacgctaagacgtaaaccctgtcaaaagaaaggctgtattgacgccattataccagcttataacgaaggcccgtgtctggcgcagtcactggataatctactgcgtaacccttatttttgccgggtaatttgcgttaacgacggctccacggacaataccgaagcggtcatggcggaagtcaaacgcaaatggggcgaccgctttattgccgtcacgcaaaaaaataccggtaaaggtggcgcactaatgcatggactaaaatacgccacgtgtgatcaagtatttttaagtgatgcagatactttcgttccacctgataatgatggaatgggctatatgcttgcagaaatagagcgcggtgctgatgccgtaggcggcattccctctactgcgttgaaaggcgcgggtctgttaccgcacatccgcgcgaccgtaaagttgccgatgattgttatgaagcgcacgctacagcagctcctgggcggcgcaccgtttattatcagcggtgcctgcgggatgttccgtactgatgtattgcgtaagttcggtttctctgatcgtactaaagtcgaagaccttgatctcacctggacgttggtggcaaacggctaccgtattcggcaggcgaatcgctgcatcgtatacccacaggaatgtaacagtccgcgtgaggagtggcgccgctggcggcgttggattgtgggctacgcggtctgtatgcgcctgcataaaagacttttatttagccgcttcggtatcttcagtatatttcctatgctgttggttgtgctttatggcgttgggatttatctcactacctggtttaatgaattcatcaccaccgggccgcatggtgtggtgttggcaatgtttccgcttatctgggtcggcgtagtttgtgttattggtgcttttagcgcctggtttcatcgttgctggttgttggtgcctttagcgccgctttccgttgtgtatgtattattagcttatgccatctggattatttatggacttattgccttttttactggacgcgaacctcagcgcgacaaacccacccgctattccgcactggtggaagcgtcaaccgcttattcccaaccttctgctacaggaactgaaaaactatctgaagcttaa

SEQ ID NO: 262955 - DNA, 357 bp, Klebsiella pneumoniae
atgattactggtacgtacttgtgcgcccaaatatgcctggtttgcaactaccgagtcggcaataaagcattgcggaccaatcgttgcttccgcttcaataaccgcatttttaatttcggtggcaaaaccaatttttacgccattgctgattattgtgccaggacgaataaacgcataattacctatcaggcagtttgcgccaatcactaccggaccctgaataacggcaccgtgacaaatacgggtattcgcgccgataacaacttcacctgcagtttcatcaataattacctggtctgcaatctgaatatttttctctttaacattaagcttcagatagtttttcagttcctgtag

SEQ ID NO: 262956 - DNA, 774 bp, Klebsiella pneumoniae
atgataaagcatacgttattagtgccgtttttttttagtgcattgcccgcttatgccgggttaacttccattaccgcgggctacgattttaccgattattctggcgaacatggcaaccgtaatttagcgtatgctgaactggtggcgaaagttgaaaacgcaacgctgctttttaatctttcccaggggcgtcgtgattatgaaactgaacatttcaatgccactcgcggtcagggtgcggtctggtataaatggaataactggctgacaacccgaacgggtattgcctttgcggataatacgccggtctttgcccgccaggattttcgtcaggatattaacctggcactgttgccaaaaacgcttttcacgaccggttatcgctacacgaaatattacgatgatgtcgaagtcgatgcctggcaaggcggcgtatcactctatactggcccggtgatcaccagctatcgctatacccattatgactccagcgatgcaggtggtagttacagcaatatgatttccgtgcgtctgaatgacccgcgcggcactggttatacgcaactatggctaagccgcggaacaggtgcttacacctatgactggacgccagaaacacgctacggcagcatgaagagcgtcagtttgcaacgtattcaaccgctgactgagcaacttaatctcgggctgacggcaggtaaagtgtggtacgacaccccaaccgatgattataacggtctgcaacttgcagcccatctgacctggaaattctga

SEQ ID NO: 262957 - DNA, 834 bp, Klebsiella pneumoniae
atggaactcattgaaaaacatgccagctttggcggctggcaaaatgtgtatcggcattattccccatcactgaaatgtgaaatgaatgtcggcgtctatctcccaccaaaagccgcaagtgaaaaattgccggtgttgtactggctttcagggctgacttgcaacgagcagaatttcattactaaatcggggatgcagcgttacgcggcggagcacaacattattgttgttgcgccagacaccagtccgcgaggcagtcatgtcgcagatgctgaccgttacgatctcgggcaaggtgccgggttttacctgaacgcaacgcaagcgccgtggaatgaacattacaaaatgtatgactatatccgcaacgagctgccggatttagtgatgcaacattttccggcaacggccagaaagtctatctcaggtcattctatgggcgggctgggtgcactggtgctggcgttacgtaatccagatgaatatgtcagcgtctcggcgttttcgcccattgtctccccatcgcaagtaccgtggggacagcaagcctttgccgcatatcttggtgaaaataaagaggcctggttggattacgatccggtgagccttatttcacaaggtcaacgtgttgcggaaatcatggttgatcaggggttgagtgatgatttttacgcagaacagctgcggactccaaatcttgaaaagatctgccaggagatgaatatcaaaacgttaatccgttatcacgagggttatgatcacagctattattttgtctccagttttattggcgagcatattgcctaccacgccaataaactgaatatgcgttaa

SEQ ID NO: 262958 - DNA, 540 bp, Klebsiella pneumoniae
atggcaaaacttaccttacaagagcaattgctcaaagcaggattagtcaccagcaaaaaagcggcgaaggtcgagagaacggcgaaaaaatcgcgtgttcaggcgcgtgaagctcgggcggcggtagaagaaaacaaaaaggcacagcttgagcgtgataaacagcttagcgagcagcaaaaacaagcggcgttggcgaaagaatataaagctcaggtgaagcagcttatcgaaatgaaccgaatcaccattgccaatggcgatattggttttaacttcactgacggtaatctgattaagaaaatctttgtcgataagctcacgcaagcgcagttgattaatggtcgtctggcgattgcccgcttgttggtcgataacaatagcgaaggtgaatacgccattattcccgccagcgttgccgataaaattgctcagcgtgatgccagcagtattgtgttgcacagcgcgctcagcgccgaagagcaggatgaagacgatccgtatgccgacttcaaagtgcctgatgatttgatgtggtaa

SEQ ID NO: 262959 - DNA, 1212 bp, Klebsiella pneumoniae; identical to SEQ ID NO: 9496

SEQ ID NO: 262960 - DNA, 810 bp, Klebsiella pneumoniae
atgacgaagcatactcttgagcaactggcggcggatttacgccgcgccgcagagcagggcgaagcgattgcgccgctgcgcgatctgattggtatcgataacgctgaagcggcctacgccattcagcacatcaatgtgcaacatgacgtcgctcagggacggcgagtggtggggcgcaaagtggggctgacgcatccgaaagtgcagcaacaactgggcgttgatcaaccggatttcgggacattatttgccgacatgtgttatggcgataacgaaaccattcctttttcccgtgttctgcaaccccgcattgaagcggagattgcactggtgttgaaccgcgatctacccgcaaccgatatcaccttcgacgaattgtataacgccattgaatgggtacttccggcgctggaagtggtggggagccgcattcgcgactggtcgattcagtttgtcgataccgtggcagataacgcctcctgtggagtgtatgtcatcggcggtccggcgcaacgtccggcggggttagacctgaaaaactgcgccatgaagatgacgcgtaataacgaagaggtttccagcgggcgcggcagcgaatgcctgggacatccgcttaatgccgccgtctggctggcacgcaaaatggccagcctgggtgaaccgctgcgcgccggagatatcattcttaccggggcattaggtccgatggtggcggtgaatgcgggcgatcgttttgaagcccatatcgaaggcataggttcagttgctgcgacattttcaagcgcagccccaaaaggaagtctgtcatga

SEQ ID NO: 262961 - DNA, 867 bp, Klebsiella pneumoniae
atgagttatcagccacaaaccgaagccgccaccagccgttttctgaatgtagaagaagcgggtaaaacgctgcgcatccattttaatgactgcggacaaggcgacgaaactgttgtcctgctgcatggttccggcccgggtgctactggctgggcgaacttcagccgcaatatcgatccgctggtagaggcgggctatcgggtgatcctgctggattgtccgggttggggtaagagcgattcgatcgttaatagtggttcgcgatcggatcttaatgcgcgaatcctgaaaagcgtggtggatcaactggatatcgccaaaatccacctgctgggcaactcgatgggcggccacagttctgtggcgttcactcttaactggccggagcgcgtcggcaaactggtgctgatgggcggcggtacgggcggcatgagtttgtttacgccgatgccaaccgaaggtattaagcgactgaatcagctttatcgtcagccgactatcgaaaacctgaagctgatgatggatatcttcgtttttgataccagcgatttgaccgacgccctgtttgaagcgcgcctgaataatatgctgtcgcgccgcgatcacctggaaaacttcgttaagagcctggaagccaatccgaaacagttcccggattttggcccacgtctggcggaaatcaaagcgcaaaccctgattgtctgggggcgcaacgaccgctttgtgccgatggatgcgggtctgcgtctgctgtccggcattgccggttctgaactgcatatcttccgcgactgtggtcactgggcgcagtgggaacatgccgacgctttcaatcaactggtgctgaatttcctcgcacgcccttaa

SEQ ID NO: 262962 - DNA, 945 bp, Klebsiella pneumoniae
atgtacgcttatcttcactgtctttcccactcgccgctggtggggtatgtcgacccggcgcaagaggtgctcgatgaggtcaatggcgtgattgccagcgcccgcgagcgtattgcggctttctcccctgaactggtggtgctgtttgcgccagatcactacaacggctttttctatgacgtgatgccaccgttctgtttaggcgttggagcgacggcaattggtgatttcggcagtgcggcaggagagctgcccgtgcctgtggagctggcggaggcctgtgcgcatgccgtcatgaagagcgggatcgatcttgccgtttcttactgtatgcaggtggaccacgggttcgcccagccgctggagttcctgctcggtgggctggataaggtgccggttctgcctgtgttcatcaacggtgtcgccacaccgctgcccggtttccagcgtacccgcatgttgggggaagccattggacgtttcaccagcactctcaataaacgcgtgctgttccttgggtccggtgggctttcccatcagccgccggtgccagaactggcgaaagccgatgcccatatgcgcgaccgtctgttggggagcgggaaagatttacccgccactgagcgtgaattgcgtcagcagcgggtgattagcgccgctgagaagtttgttgaggatcagagaactctgcatccgctcaacccgatttgggataaccagttcatgactttgctggagcagggacgcatacaggaactggatgccgtcagtaacgaagagctttccgccattgccggaaagtcgacacatgaaatcaaaacctgggtcgccgcttttgccgctatttctgcgtttggcaactggcgtagcgaagggcgttattaccgcccaatcccggagtggattgccggatttggctcgttaagcgccagaacagagaactga

SEQ ID NO: 262963 - DNA, 1665 bp, Klebsiella pneumoniae
atggcaatacaacaccctgacatccagcctgctgttaaccatagcgttcaggtggcgatcgctggtgccggtccggtcgggctgatgatggcgaactatctcggccagatgggcattgacgtgctggtggtggagaaactcgataagttgatcgactacccgcgtgcgattggtattgatgacgaggcgctgcgcaccatgcagtcggttggcctggtcgataatgttctgccgcacactacgccgtggcacgcgatgcgttttctcaccccaaaaggtcgctgttttgctgatattcagccaatgaccgatgaatttggctggccgcgccgtaacgcctttattcagcctcaggtcgatgcggtgatgctggaaggattgtcgcgttttccgaatgtgcgctgcctgttttcccgcgagctggaggccttcagccagcaagatgacgaagtgaccttgcacctgaaaacggcagaagggcagcgggaaacggtcaaagcccagtggctggtggcctgtgatggtggggcaagttttgtccgtcgcaccctgaatgtgccgtttgaaggtaaaactgcgccaaatcagtggattgtggtagatatcgccaacgatccgttaagtacgccgcatatctatttgtgttgtgatccggtgcgcccgtatgtttctgccgcgctgcctcatgcggtacgtcgctttgaatttatggtgatgccgggagaaaccgaagaacagctgcgtgagccgcaaaatatgcgcaagctgttaagcaaagtgctgcctaatccggacaatgttgaattgattcgccagcgtgtctacacccacaacgcgcgactggcgcaacgttttcgtattgatcgcgtactgctggcgggcgatgccgcgcacatcatgccggtgtggcaggggcagggctataacagtggtatgcgcgacgcctttaacctcgcatggaaactggcgttggttatccaggggaaagcccgcgatgcgctgctcgatacctatcaacaagaacgtcgcgatcacgccaaagcgatgattgacctgtccgtgacggcgggcaacgtgctggctccaccgaaacgctggcagggtacgttacgtgacggcgtttcctggctgttgaattatctgccgccagtaaaacgctacttcctcgaaatgcgcttcaagccgatgccgcaatattacggcggtgcgctggtgcgtgagggcgaagcgaagcactctccggtcggcaagatgtttattcagccgaaagtcacgctggaaaacggcgacgtgacgctgctcgataacgcgatcggcgcgaacttcgcggtaattggctggggatgcaatccactgtgggggatgagcgacgagcaaatccagcagtggcgcgcgttgggcacacgcttcattcaggtggtgccggaagtgcaaattcataccgcacaggataaccacgacggcgtactacgcgtgggcgatacgcaaggtcgcctgcgtagctggttcgcgcaacacaatgcttcgctggtggtgatgcgcccggatcgctttgttgccgccaccgccattccgcaaaccctgggcaagaccctgaataaactggcgtcggtgatgacgctgacccgccctgatgccgacgtttctgtcgaaaaggtagcctga

SEQ ID NO: 262964 - DNA, 834 bp, Klebsiella pneumoniae
atgcagaacaatgagcagacggaatacaaaaccgtgcgcggcttaacccgcggtctaatgttattaaatatgttaaataaacttgatggcggtgccagcgtcgggctgctggcggaactcagcggcctgcatcgcaccactgtgcggcgactgctggagacgctgcaggaagagggatatgtccggcgtagtccctccgatgatagttttcgtttgaccatcaaagtgcggcaattaagcgaaggatttcgtgacgaacagtggatttctgcactggcggccccgctgctgggcgatctgttgcgcgaagtggtttggccaacagatgtgtccaccctggatgttgatgcaatggtggtacgcgaaactacccaccgtttcagccgcttatcctttcaccgggcaatggtcgggcgacggttaccgcttctgaaaaccgcctcgggcctgacctggctggccttttgcccggaacaagaacgcaaggaattaatcgaaatgttagcctcccgccccggtgatgactatcaactggcacgggaaccgttaaagctggaagccattctggcgcgcgcgcgcaaagagggttacggacagaactaccgcggctgggatcaggaggagaagatcgcctctattgccgtaccgctgcacagtgaacaacgggtgattggctgtctgaatctggtgtatatggcgagcgcaatgaccattgaacaggcagcggaaaagcatcttccggcgctgcaacgggtggcaaaacagatcgaagaaggggttgaatcgcaggctattctggtggccggacggcgaagcggcgtgcatttacgttga

SEQ ID NO: 262965 - DNA, 1701 bp, Klebsiella pneumoniae; identical to SEQ ID NO: 35781

SEQ ID NO: 262966 - DNA, 1980 bp, Klebsiella pneumoniae; identical to SEQ ID NO: 35780

SEQ ID NO: 262967 - DNA, 576 bp, Klebsiella pneumoniae; identical to SEQ ID NO: 35779

SEQ ID NO: 262968 - DNA, 1044 bp, Klebsiella pneumoniae; identical to SEQ ID NO: 35778

SEQ ID NO: 262969 - DNA, 951 bp, Klebsiella pneumoniae
atgaacgagttagacggcatcaaacagttcaccactgtcgtggcagacagcggcgatattgagtccattcgccattatcatccccaggatgccaccaccaatccttcgctgttactcaaggctgccggattatcacaatatgagcatttaatagacgatgctatcgcctggggtagaaaaaatggcaaaacccaggaacaacaggtggtcgcagcgtgtgacaaactggcggtcaatttcggtgctgaaattctcaaaatcgtacccggtcgcgtgtcaacagaagttgatgcacgcctctcttttgataaagaaaagagtattgagaaagcgcgccatctggtggacttgtatcagcaacaaggcgttgagaaatcacgtattttgatcaagctggcttcaacctgggaaggaattcgcgcggcagaagagctggaaaaagaaggtattaactgcaacctgacactgctgttttcttttgcacaggcgcgggcctgtgcagaagcaggcgtatttctaatttcgccgtttgtcgggcgtatttatgactggtatcaggcacgcaagccgatggacccgtatgtggtggaagaagatccaggcgttaaatcagtacgcaatatctacgactactataagcaacaccactatgaaaccattgtgatgggcgcgagcttccgtcgcaccgaacaaatcctcgccttaaccggctgcgatcgactgactatcgcaccgaatttgctgaaggagctgcaggaaaaagtttcgccagtggtacgtaaattaatcccaccttctcagacgttcccacgccccgctcccatgagcgaagcggagttccgttgggagcacaatcaggatgcgatggcggtagaaaaactgtctgaaggcattcgtctgttcgccgttgatcaacgcaaactggaagatcttcttgccgccaaactataa

SEQ ID NO: 262970 - DNA, 405 bp, Klebsiella pneumoniae
atgcgtgctttaccgatctgtttagtagcactcatgctaagcggctgttccatgttaagcagatcccctgtcgaacccgttcaaagcactgcaccccagccgaaagcggagcctgcaaaaccgaaagcgccgcgcgccacgccggtccgaatttataccaatgcagaagaattagtcggcaaaccgttccgcgatctcggtgaagtcagtggcgattcttgccaggcctccaatcaggactctccgccgagcattccaaccgcacgtaagcggatgcaaatcaacgcctcgaaaatgaaggccaatgcggtattactgcatagctgcgaagtcaccagcggtacgccaggctgctatcgtcaggctgtatgtatcggttctgcgcttaacattacggcgaaatga

SEQ ID NO: 262971 - DNA, 708 bp, Klebsiella pneumoniae
atgagcagtttccagttcgagcaaataggcgttattcgctcgccctataaagaaaaattcgccgttccgcgccagccaggtctggtaaaaagcgccaacggcgaactgcatctcattgctccctacaaccaggccgatgccgttcgcggcctggaagcgttcagccatttatggatccttttcgtctttcatcaaacgatggaaggcggctggcgtccgactgtgcgtccaccgcgcctcggcggtaatgccagaatgggtgttttcgctacgcgctccactttccgccctaacccgattggtatgtcgctggtagagctgaaagaggttgtttgccataaagacagcgtgattctgaagctcggcagtctggatctggtagatggtacgccggtggtggatatcaaaccgtatctcccctttgccgaatcgcttccaaatgccagtgccagctatgcgcaaagtgcgccagcggcagagatggcggtgagctttaccgcagaggtcgaaaagcagcttttgacgctggagaaacgttatccgcagttaacgctgtttatccgcgaagtactggcgcaggacccgcgcccggcctatcgtaaaggtgaggaaacgggcaaaacctatgccgtctggctgcatgattttaacgttcgctggcgcgtcaccgacgcaggttttgaagtctttgcgctggaaccgcgttaa

SEQ ID NO: 262972 - DNA, 825 bp, Klebsiella pneumoniae
atggataaaccaaaggtgcattgccgcctgcttctcccctgctttcttttcctttcggcctgtaccgtagatatcagccagccggactcatcagccacagcggtagatgccggggcgaaaacatgggcagtcaaattccagcatcaaagctcttttaccgaacaatcaataaaagaaataacggaacctgatctcaaacccggcgatttgctgttctcctcaagccatggggtaacctcatttggaatccgcgtcttcagcacttcctctgtgagtcacgttgcaatctatctgggtgaaaataacgttgcagaagcgacaggcgctggcgtccagattgtttccctcaaaaaagcgatgaagcatagcgataagcttttcgtcctacgagtcccggatcttaccccgcaacaagccacagaaatcaccgcgttcgccaacaaaattaaagatagcggttacaactatcgcggcattgtcgaatttattccctttatggtaactcgccagatgtgctcactgaatccgttctccgaggattttcgtcaacagtgcgtcagcggcctggcgaaagcgcagttaagcagtgtgggcgaaggagacaaaaagtcgtggttttgttcggaatttgtcactgatgcatttgccaaagccgggcatccacttacactggcgcaatcgggctggattagccctgccgatctgatgcatatgcgtactggcgatgtctctgcgtttaagccagaaacgcagttacagtatgttgggcacctgaagcctgggatttatatcaaggcgggccgctttgttgggctgactcagtga

SEQ ID NO: 262973 - DNA, 711 bp, Klebsiella pneumoniae
atggtgaaaaaagcgatagtgacagcgatggctgtaatcagcctctttactctgatgggatgtaataatcgggccgaagtcgatacgctttctccggcgcaggctgccgaactgaaaccgatgccgcaaagttggcgcggcgtgctgccgtgtgccgattgcgaagggatcgaaacctctttgttcctcgaaaaagatggaacctgggtgatgaatgaacgctatcttggtgcgcgtgaagagccttcctctttcgcttcctacggtacatgggcgcgaaccgctgacaagctggtattaaccgacagcaaaggtgaaaagtcatattatcgggcgaaaggcgatgcgctggagatgctcgatcgtgaaggtaatccgattgaatcgcagttcaactatacgctggaaccggcgcaatccagtttacctatgacgccgatgaccctgcggggcatgtatttttatatggctgatgcggcgaccttcactgattgcgcgaccggaaaacgtttcatggtagcgaataacgcagagctggagcgtggctacctgactgcgcgcggtcatagtgaaaaaccgatgttactgtcattagaagggcactttacgcttgaggctaatccggataccggtgcgccaaccaaagtattagcgcccgatacggcaggtaaattttacccgaaccaggattgcagtagtttggggcagtaa

SEQ ID NO: 262974 - DNA, 423 bp, Klebsiella pneumoniae
atgattgtgatttcccgacatgttgctatccccgatggtgagcttgagatcaccgccattcgtgcgcagggcgcgggcgggcagcatgttaataagacctcaacggctattcatctgcgttttgacattcgggcgtccagcctgccagagtattacaaagagcgtctgctcgccgccagccatcatttgatcagcagtgatggcgtgattgtcattaaggcacaggaataccgcaatcaggagctcaaccgcgaagcggcgctggcccggctggtagcagtgattaaagatttaacaacagaacaaaaagcccgacgacccacgcggcccacccgcgcatcaaaagagcgcagactggcatcgaaagcacaaaaatcaagcgtgaaggcgatgcgcggcaaagtgcgcagcggtcgggaataa

SEQ ID NO: 262975 - DNA, 546 bp, Klebsiella pneumoniae
atggcgcttaaagcgacaatttataaagcgacggttaatgtggccgatctcgaccgcaaccagtttctcgatgcctctctgacgctggcgcgccacccttcagaaacccaggagcgcatgatgctgcgcctgctggcgtggctgaaatatgctgatgaacgtctgcaatttacccgtggtttgtgtgccgatgatgagccggaagcgtggctgcgtaacgatcacctgggcattgatttgtggattgagctggggctgccggatgagcggcggattaagaaagcctgcacccaggccgcagaagttgcgctgtttacctataatagtcgggcggcgcaaatctggtggcagcaaaatcagagcaaatgtgtgcagtttgccaatctttccatctggtatctggacgatgaacaactggcgaaagtaaacgcctttgccgatcgtaccatgacgctgcaggcaacgattcaggatggcgtgatctggttatcggatgataagaataatctggaagtgaacttaaccgtctggcaacaaccttcatga

SEQ ID NO: 262976 - DNA, 201 bp, Klebsiella pneumoniae; identical to SEQ ID NO: 3723

SEQ ID NO: 262977 - DNA, 261 bp, Klebsiella pneumoniae
atgtcaatgaatgatacgtatcaaccaatcaattgtgatgattacgataatcttgagctcgcctgccagcatcatttaatgctgacacttgagctgaaagatggcgaaaaattgcaggcgaaggccagcgatttagtctcccgcaaaaatgtggagtatctggtcgtcgaggccgctggtgcaacccgcgagctgcgtctggataaaattaccagctttagccacccggaaatcggtacggtggtggtgagcgagtcctga

SEQ ID NO: 262978 - DNA, 1299 bp, Klebsiella pneumoniae
atgacactcacgctcaatagacaacttctcacctcacgccagattctggtggcctttagcggcgggcttgactctaccgtactgctgcatcagttggtgcagtggcgggcggaaaatccgggcgtcactctgcgcgctatccatgtgcatcacggtttaagtgccaatgccgatgcctgggttaggcattgcgagaacatctgccaacagtggcaggtgccgctggtggtcgagcgcgtgcaacttgcgcaagaaggactgggtattgaggcccaggcgcggcaggcgcgttatcaggcatttgcccgcaccttgttgcccggtgaagtgctggtcaccgcgcaacatctcgacgatcaatgcgaaacctttctgctggcgctaaaacgcggtagcggccctgccgggctttcggctatgggggaagtttcggagtttgccggaacacggcttatccgcccgttgctcgcccgcacgcggggagaactggtgcagtgggcgcgtcagtatgatttacgctggattgaagacgaaagtaatcaggatgatagctacgatcgtaacttcctgcgcctgcgcgtggtgccgttattgcagcagcgttggccgcattttgccgaagcaacggcccgcagcgctgcgctttgcgctgaacaagagagcctgttagatgaactgctggcggatgatatagcgcactgtcaaaagccgcaggggacgctgcagattgcgccaatgctggcgatgagtgatgcccgccgcgcggcgattatccgccgctggctggcagggaagaatgcaccgatgccttcccgcgacgcgttggtgaggatctggcaggaagtggcgctggcgcgggaagatgcttccccctgtttacgtctgggcgcgtttgaaatccgccgctatcagtcgcaactgtggtggattaaatccgttgccgggcaaagcgaaaccattgtgccgtggcagacgtggctacaaccgctggaattaccggcgggactgggaagtgtacagcttacagcgggaggcgatattcgccctccgcgtgcagacgaagcggtcagcgtgcgtttcaaagcgccaggattgctgcatattatcgggcgcaacggcggacgtaagctgaagaaaatctggcaagagctgggtgtgccgccgtggctacgtgacaccacgccactgctgttttatggcgaaacgttgattgcggcggcaggggtatttgtgacgcaagaaggtgtggctgaaggtgagaaaggcgtcagttttgtctggcagaaaacgcttagttaa

SEQ ID NO: 262979 - DNA, 390 bp, Klebsiella pneumoniae
atgctgggtttaaaacaggttcaccatattgcgattattgcgacggattatgcggtgagcaaagcgttttactgcgatattcttggtttcacgctgcaaagcgaagtctatcgcgaagcgcgcgactcgtggaaaggggatttggcgcttaatgggcaatatgtgattgagcttttctcatttccgttcccgccggagcgccccagccgaccggaagcttgcggcctgcgtcatctggcttttagcgttgatgatatcgatgcggcagtggcgcaccttgaaagccataacgtgaagtgtgaagccatccgtgtcgatccatacacgcaaaaacgcttcacgttctttaacgatccggacgggctgccgttggaactgtatgagcagtaa

SEQ ID NO: 262980 - DNA, 2142 bp, Klebsiella pneumoniae
atgaacatcattgccattatgggaccgcatggcgtcttttataaagatgagcccatcaaagaactggagtcggcgctggtggcgcaaggctttcagattatctggccacaaaacagcgttgatttgctgaaatttattgaacataaccctcgaatttgcggcgtgatttttgactgggatgagtacagtctcgatttatgtagcgatatcaatcagcttaatgaatatctcccgctttatgccttcatcaacacccactcgacgatggatgtcagcgtgcaggatatgcggatggcgctctggttttttgaatatgcgctggggcaggcagaagatatcgccattcgtatgcgtcagtacaccgacgaatatcttgataacattacaccgccgttcacgaaagccttgtttacctacgtcaaagagcggaagtacaccttttgtacgccgggtcatatgggcggcaccgcatatcaaaaaagcccggttggctgtctgttttatgattttttcggcgggaatactcttaaggctgatgtctctatttcggttaccgagcttggttcgttgctcgaccacaccgggccacacctggaagcggaagagtacatcgcgcggacttttggcgcggaacagagttatatcgttaccaacggaacatcgacgtctaacaaaattgtgggtatgtacgccgcgccgtccggcagtacgctgttgatcgaccgcaattgtcataaatcgctggcgcatctgttgatgatgaacgatgtagtgccagtctggctgaaaccgacgcgtaatgcgttggggattcttggtgggatcccgcgccgtgaatttactcgcgacagcatcgaagagaaagtcgctgctaccacgcaagctcaatggccggttcatgcggtgatcaccaactccacctatgatggcttgctctacaacaccgactggatcaaacagacgctggatgtcccgtcgattcacttcgattctgcctgggtgccgtacacccattttcatccgatctaccagggtaaaagtggtatgagcggcgagcgtgttgcgggaaaagtgatcttcgaaacgcagtcgacccacaaaatgctggcggcgttatcgcaggcttcgctgatccacattaaaggcgagtatgacgaagaggcgtttaacgaagcctttatgatgcataccaccacctcgcccagttatcccattgttgcttcggttgagacggcggcggcgatgctgcgtggtaatccgggcaaacggctgattaaccgttcggtggagcgggcgctgcattttcgcaaagaggtccagcggctgcgggaagagtctgacggttggtttttcgatatctggcaaccgccgcaggtggatgaagccgaatgctggcccgttgcgcctggcgaacagtggcacggctttaacgatgcggatgccgatcatatgtttctcgatccggttaaagtcactattttgacaccggggatggacgagcagggcaatatgagcgaggaggggatcccggcggcgctggtagcaaaattcctcgacgaacgagggatcgtagtagagaaaaccggtccttataacctgctgtttctctttagtattggaatcgataaaaccaaagcaatgggattattgcgtgggttgacggaatttaagcgctcttacgatctcaacctgcggatcaaaaatatgctacccgatctctatgcagaagatcccgatttctaccgcaatatgcgcattcaggatctggcgcaagggatccataagctgattcgtaaacacgatcttcccggtttgatgttgcgggcattcgataccttgccggagatgatcatgacgccacatcaggcatggcagaggcagattaaaggcgaagtagaaaccattgcgctggaacaactggttggtagggtgtcggcaaatatgatcctgccttatccaccgggcgtaccgctgctgatgccaggagaaatgctgaccaaagagagccgcacagtactcgattttctactgatgctttgttccgtagggcaacattaccccggttttgaaacggatattcacggcgcgaaacaggacgaagacggcgtttaccgcgtacgagtcctaaaaatggcgggataa

SEQ ID NO: 262981 - DNA, 1455 bp, Klebsiella pneumoniae
ttgaatatctcctctgctttacgccaggttgttcacggcactcgctggcactctaaacgcaagagctacaaagtgttgttctggcgcgagataaccccgcttgctgttcctatcttcatggagaacgcctgtgtcctgttgatgggggtcctgagcacttttctggtcagctggctgggaaaagatgcgatggccggcgtggggttggcggacagcttcaatatggtcattatggctttttttgcagctatcgatcttggtactactgtcgttgtagcatttagtctcggtaagcgagatcgacgacgagcgagggtggcgacgcggcagtcattggtgatcatgacgttgtttgccgtactgttggcaacgctaattcatcattttggcgaacaaattattgatttcgtcgcgggtgatgccacgacagacgttaaagcactggcgttgacttatctggagctgaccgtattcagttatccagcagctgccatcactcttattggtagcggggcacttcgtggtgcagggaatacgaaaataccgctactgattaacggtagcctgaatattcttaatattattattagcggcatattgatttacggccttttctcctgggcgggactgggatttgtcggggctgggttgggtttaaccatttctcgttatattggcgcagttgcaattttgtgggtgctggcgattggttttaatcctgcgctaaggatttcgttaaagagctattttaaaccgctgaattttagcattatctgggaagtcatggggattggtattccagcgagtgtcgaatcagtgttatttaccagtggtcggttattaacccaaatgttcgttgccgggatggggaccagcgttattgccggaaattttatcgcgttctcaattgcggctcttatcaacttacccggaagtgcgctcggttctgcttctacgatcattacaggccgaaggttgggggtagggcagatagcgcaagcagagattcagttgcggcatgtgttctggctgtccactcttggattaacggccatcgcctggctaacggctccctttgccggggttatggcatcgttttacacccaggatccacaggttaaacacgtcgttgtgattctgatttggctaaatgctttatttatgcctatttggtccgcctcatgggtgctacccgctggatttaaaggtgctcgtgatgcccgttacgccatgtgggtttcgatgttgagcatgtggggttgtcgggttgtagtcggttatgtgctgggaatcatgcttggctggggtgtggttggtgtctggatgggaatgtttgccgactgggctgtgcgggccgtgctgttttactggcgaatggttactggacgttggctatggaaataccctcgatccgagccgcaaaagtgtgaaaaaaagccagttgtgtcggaataa

SEQ ID NO: 262982 - DNA, 918 bp, Klebsiella pneumoniae; identical to SEQ ID NO: 5898

SEQ ID NO: 262983 - DNA, 936 bp, Klebsiella pneumoniae
atgatgcgtcgtgtaaatattctttgctcatttgctctgctttttgccagccaaaatagcctggcggtaacttatccattacctccagagggtagccgtttagtggggcagtcgcttactgtaactgttcctgatcacaatactcagccgctggagacttttgccgcacaatacgggcaagggttaagtaatatgctggaagcgaatccgggcgctgatgtttttttgccgaagcctggctcacaactcaccattccgcagcaactgattttgcccgccactgttcgtaaagggattgtggttaacgtcgctgaaatgcgtctttattactatccgccagacagtaatacagtggaagtctttcctattggtatcggccaggctgggcgagaaaccccgcgtaactgggtgactaccgttgaacgtaaacaagaagtaccaacctggacgccaacgccgaacacccggcgcgaatatgcgaaacgaggggagagtttgcccgcatttgttcctgcggggcccgataaccccatggggctgtacgcgatttatattggcaagttgtatgccatccacggtaccaatgccaattttggtattgggctccgcgtaagtcagggctgtattcgtctgcgtaatgacgatatcaaatatctgtttgataatgttcctgtaggcactcgtgtacaaattattgatcagccagtgaaatacacaacggaaccggatggttcaaagtggctggaagttcatgagccgctgtcgcgcaatcgtgcagaatatgagtctgaccgaaaagtgccattgccggtaaccccatctttgcgggcgtttatcaacgggcaagaagttgatgtaaatcgcgcaaatgctgcgttgcaacatcgatcgggaatgcctgtgcaaattagttctggttcaagacagatgttttaa

SEQ ID NO: 262984 - DNA, 1080 bp, Klebsiella pneumoniae
atgcaaatacttgccgatttactgaatacgatcccagccatcaattctgccgctatgtcgcgtgcacaacggcatgttgacgggttactcaaacctgttggtagcctgggaaagctggaggcgcttgccatacaactggcaggaatgccggggttgaatggcataccgcatgtgggcaaaaaagcagtactggttatgtgtgccgatcacggcgtctgggaggaaggggtcgctatttctccaaaagaagtgacagccatacaggctgaaaatatgacccgtggaacaaccggcgtgtgtgtgctggcagcacaagcgggcgctaacgtccacgtaattgatgttggtattgatactgctgagcctatccccgggcttatcaacatgcgtgtcgcacgaggtagcggcaatattgcttcagctccggcaatgagtcgccgtcaggctgaaaagttgcttttggacgtcatatgttatacgcgggagctggcaaaaaacggtgtcacgctgtttggtgtaggtgaactggggatggcaaacacgacaccggcagcggcaatagtcagcacaatcactggccgggatcctgaagaagtggttgggattggcgcaaacctgccgacagataaactggctaataaaattgatgttgtgcgtcgggcgattacgttgaatcaaccaaatcctcaggatggtgttgatgtcctggcaaaagtgggtggatttgatttggtcggaatagctggagtgatgttaggtgctgcttcctgcggtttacccgtgttgctggatggatttctttcttatgctgctgcgctcgcagcctgccagatgtctcctgcaatcaaaccgtatctcattccttctcacttgtcggcagaaaaaggcgcgcgtatagcgctctcgcatttggggctggagccttatctcaatatggatatgcgtttaggtgaggggagtggtgcagctctggcgatgtccatcatcgaagctgcttgtgcgatatacaacaacatgggcgaacttgctgccagtaatattgttctaccggggaatacgacttctgatttgaacagctaa

SEQ ID NO: 262985 - DNA, 744 bp, Klebsiella pneumoniae; identical to SEQ ID NO: 6666

SEQ ID NO: 262986 - DNA, 546 bp, Klebsiella pneumoniae
atgatgattttggtgacgggaggcgcacggagcgggaagagtcgccacgcagaggtgcttattggggactcttcacaggttctgtatatcgctacctcgcaaatccttgatgatgagatggctgcacggatagaacatcatcggcaaagccgcccggagcactggcgcacagtggagcgctggcaacatcttgatgaattaattcatgcagacattaacccgaatgaggctgtgttgctggaatgcgttaccacaatggtgactaatctgttgtttgattatggcggcgataaagaccctgatgaatgggattatcaggcgatggaacaggcgattaatgctgagattcagtcgttgattgctgcctgccaacgttgccccgcaaaggttgtattagtgactaacgaagtgggaatggggattgtgccggagagtcgtctggcacgacattttcgtgatattgccgggcgggtaaatcagcagttggccgctgcggcaaatgaagtatggctggtggtttcgggtattggagtaaaaatcaaatga

SEQ ID NO: 262987 - DNA, 2148 bp, Klebsiella pneumoniae; identical to SEQ ID NO: 5183

SEQ ID NO: 262988 - DNA, 129 bp, Klebsiella pneumoniae; identical to SEQ ID NO: 5184

SEQ ID NO: 262989 - DNA, 1224 bp, Klebsiella pneumoniae
atgggaaccatacagaagataagaacagatgttaatgtattatatgcggccattcaccgtattgagtggttgtttgagacattttcatctgtttgtttgtctttttctggaggaaaagactctactgtgctgctccatcttacggccgatgtggctcgcaggaagaaacgtcgtttctctgtattattcattgactgggaagctcagtaccagtgcacaattgcacacattctgaagatgagggagatgtatcgggatgtgacggagactttttactgggtggcactccccctgactacggtaaacggtgtctctcagtttcagccggaatggatatgctgggaaccaggtgtggagtgggttcgtcagccaccagatgacgctattacagatatgtcgtatttcccattttatcggtatgccatgacgtttgaagaatttgttccggcattttcttcctggtttgccggtaaccggtgtggagtggcaatactgactggtgttcgtgctgatgaatcgctcaatcgctttatgggactggtgtctcagcgcaaactgagatatgcagatgataaaccctggaccacagcgtcacctgaagggttttattacaccttgtatccgttgtatgactggaaagcccgtgatatatggatatataacgccagaacccgagctatctacaatcccctgtatgacctgatgtaccgtgccggcgtgccgttacgcaacatgcgggtctgtgagccttttggcccggaacagcgtaagggactgtggctttaccatgttctggagccggaaacttgggccaggatgtgtgagcgggtgtcgggtgctgccagcggggcgctttatgccaatgagagcggtgcctattttgccctgcgtaagcgtatcacgaagccacctcatcatacctggcgtagctatgcgatgttcctgctggatgtgatgccggaaagaacggcagaacattaccgtaataaaattgctgtctacctgcgctggtatcagacgcggggcttcccggatgacatcccggatgaacaggagaatgacctggggagccgggatatcccgtcttggcgacgtatctgtaagacactcataaagaatgatttctggtgccggaccctctccttcagtccgaacaaaccccggcactatgaacgttatctgcagcgtatgaaagaaaggaggaaggaatgggggattctgtga

SEQ ID NO: 262990 - DNA, 396 bp, Klebsiella pneumoniae
atgtgtgaaggatatgttgaaaaaccactctacttgttaatcgccgaatggatgatggctgaaaatcggtgggtgatagcaagagagatctctattcatttcgatattgaacacagcaaggcggttaataccctgacttatattctgtcggaagtcacagaaataagctgcgaagttaagatgatccctaataagctggaagggcggggatgtcagtgtcagcgactggttaaagtggtcgatatcgatgagcaaatttacgcgcgcctgcgcaataacagccgggataaattagtcggcgtaagaaagacgccgcgtattcctgccgttccgctcacggaacttaaccgcgagcagaagtggcagatgatgttgtcaaagagtatgcgtcgttaa

SEQ ID NO: 262991 - DNA, 591 bp, Klebsiella pneumoniae
gtgagctattacgcctttgaggggttaattccggtggttcacccgacggcgtttgtccatcccagtgcagtcttgattggcgatgtgattgtgggagccggtgtctacatcggcccactcgcctcactgcgtggtgactacgggcggttgatcgtgcaagcgggagccaatattcaggatggctgcattatgcatggctactgcgacactgacaccatcgttggggaaaacggtcatatcgggcacggagcgatcctgcatggttgtgtgattggtcgcgatgcactggtcgggatgaacagcgtgattatggatggcgcggtcattggcgaagagagcattgttgccgctatgagctttgtcaaagcgggctttcgcggcgagaaacgccagttgttgatgggtacgccagcccgcgctgtacgcagcgtgagtgacgacgagttacactggaaacggttgaataccaaagagtatcaggatcttgtcgggcgctgtcatgcatcgttacatgaaacgcagccactgaggcaaatggaggaaaatcgcccccgtttgcaggggacgacggatgtgacgccgaaacggtga

SEQ ID NO: 262992 - DNA, 786 bp, Klebsiella pneumoniae
atgagtgaatcattacatctgacccgcaatggatcaattctggaaattacccttgatcgcccaaaagcgaatgctattgatgcaaaaaccagctttgaaatgggcgaagtatttctaaatttccgtgacgatccgcaattacgtgtcgccattattaccggtgccggagagaaattcttttccgcgggctgggatttaaaagcggcagcagaaggcgaagcaccggatgctgactttggcccgggtggttttgcgggattaaccgaaattttcaatctcgacaaaccagttatcgccgctgtgaacggctatgcctttggcggcggctttgaactggcactggcggcagattttattgtctgtgccgataacgccagcttcgccctgccggaagccaaactgggcatcgttcctgacagcggcggcgtgctgcgtctgccgaagatcctgccgcctgccatcgtcaatgaaatggtgatgaccggcagacgaatgggcgcagaagaggcgctgcgttggggggtagtcaaccgcgtggttagccaggcggaactgatggataacgcccgcgaactggcgcagcagctggttaacagcgctccgctggcgattgcggcgctgaaagagatctaccgcaccaccagcgaaatgccggtagaagaagcgtatcgctatattcgcagcggcgtgttgaaacactatccgtcggttctgcattcggaagatgccattgaagggccgctggcgtttgccgagaagcgcgatccagtgtggaaaggacgttaa

SEQ ID NO: 262993 - DNA, 1554 bp, Klebsiella pneumoniae
atggatatcattggcggacaacatctacgtcaaatgtgggacgatctggcggacgtttacggtcataaaacggcgctgatttgtgaatccagcagcggagtcgttaaccggtatagttatcttgagttaaatcaggagattaaccgcacggcaaacctgttttatacgctggggattcgcaaaggcgacaaggttgctctacatctcgacaactgcccggaatttatcttttgctggttcgggctggcaaaaattggcgcgattatggtgccgattaacgcccgcctgttacgcgaggaaagcgcgtggatcctgcaaaatagccaggcgtgcctgctggtgaccagtgcgcaattttatcctatgtatcaacagattcagcaggaagatgcctctcagttgcggcacatttgcctgatagatatggcacttcccgctgatgatggcgtgagttcgtttactcaactgaaaaatcaacaacctgccaccttgtgctatgcaccgccgctatcgactgacgatacggcggaaattctcttcacctccggcaccacctcccgaccgaaaggtgtggtgattacccattacaacctgcgcttcgctggatattactccgcctggcaatgtgcactgcgtgacgatgacgtctacctgacggtaatgcctgcgtttcatattgactgccagtgtactgcggcgatggcggcgttttctgccggggccacctttgtgctggtcgagaaatacagcgcccgcgccttctggggacaggtgcagaagtaccgcgccaccattaccgaatgtattccgatgatgattcgtacgttgatggtccagccgccttcagccaacgatcggcaacactgcctgcgggaagtgatgttttatctcaacctgtcggagcaggaaaaagacgcgttttgtgaacgcttcagcgttcgcttgctgacgtcttatgggatgacggaaaccattgtgggcattatcggcgatcgccctggcgataaacgacgctggccgtcgattggtcgggcgggcttttgctacgaagcggagatccgcgacgatcacaatcgtcccctcccggctggtgagctcggtgaaatctgtattaaaggcgtaccagggaaaaccatcttcaaagagtattttctcaacccgaaagccactgcgaaagtgctggaagccgatggctggctacataccggcgataccggataccgcgacgaagagggctttttttatttcgtcgatcgccgctgcaatatgatcaaacgcggtggcgagaatgtctcctgcgtggagctggaaaatattatcgccgcgcacccgaaaattcaggacatcgtggttgtgggtattaaagattcgatacgcgatgaagccatcaaagcatttgtggtgctgaatgaaggtgaaacattgagcgaagaggaatttttccgcttctgcgaacaaaatatggcgaaatttaaagtgccctcttatctggagatcagaaaagatctgccacgtaattgctcggggaaaataattagaaagaatcttaaataa

SEQ ID NO: 262994 - DNA, 1218 bp, Klebsiella pneumoniae
atggatcatctacccatgccgaaattcgggccgctggccggattgcgcgttgtcttctccggtatcgaaatcgccgggccgttcgccgggcaaatgttcgcagaatggggcgcggaagttatttggatcgagaacgtcgcctgggccgacaccattcgcgttcaaccgaactacccgcagctctcccgccgcaatttgcacgcgctgtcgttaaatattttcaaagatgaaggccgcgaagcgtttctgaaattaatggaaaccaccgatatcttcatcgaagccagcaaaggtccggcctttgcccgtcgtggcattaccgatgaagtcctgtggcagcacaacccgaaactggttatcgctcacctgtccggttttggtcagtacggcaccgaggagtacaccaatcttccggcctataacaccatcgcccaggccttcagtggttacctgattcagaacggtgatgttgaccagccaatgcctgccttcccgtataccgccgattacttttctggtctgaccgccaccacggcggcgctggcagcactgcataaagtgcgtgaaaccggtaaaggcgaaagtatcgacatcgccatgtatgaagtgatgctgcgtatgggccagtacttcatgatggattacttcaacggcggcgaaatgtgcccgcgcatgaccaaaggtaaagatccctactacgccggttgcggtctatacaaatgcgccgacggctacatcgtgatggaactggtgggcattactcaaattgaagagtgctttaaagatattggcctcgcacatctgctcggtacgtcggaaatcccggaaggcactcagcttatccaccgtatcgaatgcccttacggcccactggtagaagagaaactcgatgcctggctggctgcacataccatcgcagaagttaaagaacgctttgccgaactgaatatcgcctgtgccaaagtactgaccgtaccggaactggaaagcaatccacagtatgtggctcgcgaatcaatcactcagtggcaaacgatggatggtcgcacctgcaaggggccgaatatcatgccgaaattcaaaaataaccccggaaaaatctggcgcggaatgccctcacatggcatggacacggctgccattttgaaaaatatcggctacagcgaaaacgacattcaggagttggtcagcaaaggtctggccaaagttgaggactaa

SEQ ID NO: 262995 - DNA, 1143 bp, Klebsiella pneumoniae
atggattttaatttaaatgatgagcaggaactgtttgtcgccggtatccgcgaacttatggccagcgaaaactgggaggcctattttgccgagtgcgaccgtgacagcgtctacccggaacgttttgtcaaagcactggcggatatgggtatcgacagtctgctgctccctgaagagcacggtggtctggacgcggggtttgttactctcgccgccgtgtggatggagctgggacgtctgggggcaccaacctatgtactgtaccagttgccgggcgggttcaacaccttcctgcgcgaaggcacacaagagcagatcgacaaaattatggctttccgcggcaccggtaagcagatgtggaactcagcgattaccgaaccgggcgcgggctccgacgtgggtagcctgaaaacgacttatacccgtagaaatggtaagatttatcttaatggtagtaagtgttttattaccagcagcgcctacaccccgtacatcgtggtgatggcgcgcgacggggcttctccggacaaacctgtctacaccgaatggtttgttgatatgagcaaaccgggcatcaaagtgaccaaacttgaaaagctcggtctgcgtatggatagctgctgtgaaatcacctttgacgatgtggaactggacgagaaagacatgttcggtcgggaaggtaacggctttaaccgcgtcaaagaagagttcgaccatgaacgtttcctggtagccctgaccaactacggtacggcgatgtgcgcctttgaagatgcggcgcgctacgccaaccagcgcgtgcagtttggcgaggctattggtcgtttccagttgattcaggaaaaattcgcccacatggcgatcaaattaaactccatgaaaaacatgctgtatgaagcagcgtggaaagcagacaacggcaccatcacctctggcgatgcagcgatgtgcaaatacttctgcgccaatgcggcatttgaagtggtggatagcgcaatgcaggtgctgggcggtgtcgggattgcgggcaaccaccgcatcagccgcttctggcgtgatctgcgtgtagaccgcgtctccgggggatctgacgaaatgcagatcctgacgctgggtcgcgcggtgctgaagcaataccgctaa

SEQ ID NO: 262996 - DNA, 1515 bp, Klebsiella pneumoniae
atgaagaatgaaaagagaaaaacgggaatagaaccgaaggttttctttccgccgttaataatcgtcggcatactttgttggcttacagtcagagatctggatgcagcgaatgtcgttattaatgctgtattcagttacgtcaccaatgtatggggatgggcatttgaatggtatatggtagtgatgcttttcggttggttctggctggtgtttggcccgtatgccaaaaagcgtttaggtaacgaaccacctgaatttagtaccgccagttggatctttatgatgttcgcctcctgtacgtctgctgccgtactgttctggggatcgattgagatctactactacatctccaccccgccgtttggcttagaaccgaactcgacaggggcgaaagagttggggctggcttacagcttgttccactggggacctctgccgtgggccacttacagcttcctttcagtcgccttcgcttacttcttctttgtccgcaaaatggaagtgattcgccccagctcgacactagtgccgctggtaggtgaaaaacacgccaaagggttgttcggcactatcgtcgacaacttctatctcgtcgccttgatcttcgcgatgggcaccagtctgggccttgccacgccgctggtgaccgagtgtatgcaatggttgtttggcattccgcataccctgcaactggacgctatcatcattacctgctggattatcctcaacgccatttgcgtcgcttgcggtctgcaaaaaggggtacgtatcgccagtgacgtgcgtagttacctgagcttcctgatgctgggttgggtgttcattgtcagcggtgccagcttcatcatgaactacttcaccgattcggtggggatgttgctgatgtatctgccgcgcatgttgttctataccgatcccatcgctaaaggcggcttcccgcagggctggaccgtgttctactgggcatggtgggtgatttacgctatccagatgagtatcttcctcgcccgcatctcccgtggtcgtaccgtgcgtgaactgtgcttcggcatggtgctggggctgacagcgtcaacctggatcctgtggactgtactcggtagtaacactctgctgttgatggataaaaacatcatcaacattccaaatctgatcgaacagtacggtgtggcgcgcgccatcattgaaacctgggccgctctgccactcagcaccgccaccatgtggggcttcttcatcctctgctttattgccaccgttacgctggttaacgcctgctcttataccctggcgatgtccacttgccgcgaagtacgcgatggtgaagaaccaccgctgctggtgcgtatcggctggtcaattctggttggcattatcggtattgttctgctggcgctcggcggcctgaaaccgattcaaaccgccattatcgccggaggatgcccgctgttcttcgtcaacattatggtgacgctctcctttattaaagacgcgaaacagaactggaaagattaa

SEQ ID NO: 262997 - DNA, 771 bp, Klebsiella pneumoniae
atgaagattattacttgctataagtgcgtgcctgatgaacaggatattgcggtcaataatgctgatggttcgttagacttcagtaaagccgatgccaaaataagccaatacgatctcaacgctattgaagcggcttgccagctaaagcaacaggcagcagaggcgcaggtgacggccctaagtgtgggcggtaaagccctgaccaacgccaaagggcgtaaagatgtgctatcgcgcggtccggatgaactgattgtggtgattgatgaccagttcgagcaggcactgccgcaacaaacggcgagcgtacttgctgcagccgcccagaaagcaggctttgatttgatcctctgtggcgatggttcttccgacctttatgcccagcaggttggtttgctggtaggcgaaatcctcaatattccggcagttaacggcgtcagcaaaattatctccctgacggcagataccctcaccgttgagcgcgaactggaagatgaaacagaaaccttaagcattccgctgcctgcggttgttgctgtttccactgatatcaactccccacaaattccttcgatgaaagccattctcggcgcggcgaaaaagccagtccaggtatggtcggcggcggatatcggttttaacgcagaggcagcctggtcagaacaacaggttgccgcgccgaaacagcgcgagcgtcagcgcatcgtgattgaaggcgacggcgaagaacagatcgccgcatttgctgaaaatcttcgcaaagtcatttaa

SEQ ID NO: 262998 - DNA, 942 bp, Klebsiella pneumoniae
atgaacacgttttctcaagtctgggtattcagcgataccccttctcgtctgccggaactgatgaacggtgcgcaggctttagctaatcaaatcaatgcctttgtcctcaatgatgccgacggcgcacaggcaatccagctaggcgctaatcatgtctggaaattaaacggcaaaccggacgatcggatggtcgaagattacgccggtgtcatggcggacactattcgccagcacggcgcagacggtctggtgctgttgccgaatacccgtcgcggcaaattactggcggcaaaactgggttatcgccttaaagcggcggtgtctaacgatgccagcaccgtcagcgtacaggacgggaaagcgacagtgaaacacatggtttacggcggtctggcgattggcgaagaacgcattgccacgccgtatgcggtactgaccatcagcagcggcacgtttgatgcggctcagccagacgcgtcacgcactggcgaaacgcacaccgtggagtggcaggctccggctgtggcgattacccgcacggcaacccaggcgcgccagagcaacagcgtcgatctcgacaaagcccgtctggtggtcagcgtcggtcgcggcattggcagcaaagagaacattgcgctggcagaacagctttgtaaggcgataggtgcggagttggcctgttctcgtccggtggcggaaaacgaaaaatggatggagcacgaacgctatgtcggtatctccaacctgatgctgaaacctgaactgtacctggcggtggggatctccgggcagatccagcacatggttggtgctaatgcatcgcaaaccattttcgccatcaataaagataaaaatgcgccgatcttccagtacgcggattacggcattgttggcgacgccgtgaagatccttccggctctgaccgcagctttagcgcgttga

SEQ ID NO: 262999 - DNA, 1287 bp, Klebsiella pneumoniae
atgtccgaagatatctttgacgccatcatcgtcggtgcagggcttgccggttcggttgccgcactggtgctcgcccgcgaaggggcgcaagtgttagttatcgagcgtggcaattccgcaggtgccaagaacgtcaccggcgggcgtctctatgcccacagtctggaacacattattccaggtttcgccgaatccgcccccgtagaacgcctgatcacccatgaaaaactcgcgtttatgacggaaaagtcagcgatgactatggattactgcaacggtgacgaaacctcgccatcccagcgttcttactccgttttgcgcagtaaatttgatgcctggttgatggagcaggccgaagaagcgggcgcgcagttaattaccgggattcgcgtcgataacctcgtacagcgtgatggcaaagttgtcggcgtagaagccgatggcgatgtaattgaagcgaaaacggtgatccttgctgacggggtgaattccatccttgccgaaaagctggggatggcaaaacgcgtcaaaccgacggatgtggcggttggcgtgaaggaactgatcgagttaccgaagtcggttattgaagaccgttttcaattgcagggtaatcagggcgcggcttgcctgtttgcgggatcacccaccaatggcctgatgggcggcggctttctttataccaatgaaaacactctgtcgctggggttggtttgtggtctgcatcatctgcatgacgcgaaaaaatcggtgccgcaaatgctggaagatttcaaacaacatccggccgttgcaccgctgatcgcaggcggcaagctggtggaatattccgctcacgtagtgccggaagcaggcatcaacatgctgccggagttggttggtgacggcgtattgattgccggtgatgccgccggaatgtgtatgaacctcggttttaccattcgcggtatggatctggcgattgccgccggggaagccgcagcaaaaaccgtgctttcagcgatgaaaagcgacgatttcagtaagcaaaaactggcggaatatcgtcagcatcttgagagtggcccgctgcgcgatatgcgtatgtaccagaaactaccggcgttccttgataacccacgcatgtttagcggctacccggaactggcggtgggcgtggcgcgtgacctgttcaccattgacggcagtgcgccggaactgatgcgcaagaaaatcctccgccacggcaagaaagtgggcttcatcaatctgatcaaggatggcatgaaaggagtgaccgttttatga

SEQ ID NO: 263000 - DNA, 288 bp, Klebsiella pneumoniae
atgacttctcccgtcaatgtggacgtcaaactgggcgtcaataaattcaatgtcgatgaagagcatccgcacattgttgtgaaggccgatgccgataaacaggcgctggagctgctggtgaaagcgtgccccgcaggtctgtacaagaagcaggatgacggcagtgtgcgcttcgattacgccggatgtctggagtgcggcacctgtcgcattctggggctggggtcggcgctggaacagtgggaatacccgcgcggcacctttggtgtggagttccgttacggctga

SEQ ID NO: 263001 - DNA, 1332 bp, Klebsiella pneumoniae
atgcaaccgtccagaaactttgacgatcttaaattttcctctattcaccgccgcattttgctgtggggaagcggtggtccgtttctggatggttatgtactggtaatgattggcgtggcgctggagcaactgactccggcgctgaagctggacgctgactggattggcttgctgggcgcgggaacgctcgccgggctgttcgttggcacatcgctgtttggttatatctccgataaagtcggacggcgcaaaatgttcctcattgatatcatcgccatcggcgtgatatcggtggcgacgatgtttgtctcatcccccgtcgaactgttggtgatgcgggtactcatcggtattgtcatcggtgcagattatcccatcgccacttcgatgatcaccgagttctccagtacccgtcagcgggcgttttccatcagctttattgccgccatgtggtatgtcggtgcgacctgcgccgatctggtcggctactggctttatgatgtggaaggcggctggcgctggatgctgggtagcgcggcgatcccttgtttgttgattttgattggtcgattcgaactgcctgaatctccccgctggttgttacgcaaagggcgagtaaaagagtgcgaagagatgatgagcaaactgtttggcgaaccggtggctttcgatgaagagcagccgcagcaaacccgttttcgcgatctgtttaatcgccgccattttccttttgttctgtttgttgccgccatctggacctgccaggtgatcccaatgttcgccatttacacctttggcccgcaaatcgttggtttgttgggattgggtgttggcaaaaacgcggcactggggaacgtggtgattagcctgttctttatgcttggctgtattccgccgatgctgtggttaaacactgccggacggcgtccattgttgattggcagctttgccatgatgacgctggcgctggcggttttggggctgatcccggatatggggatctggctggtagtgatggcctttgcggtgtatgcctttttctctggcgggccaggtaatttgcagtggctctatcctaatgaactcttcccgacagatatccgcgcctctgccgtgggcgtgattatgtccttaagtcgtattggcactattgtttcgacctgggcactgccgatctttatcaacaattacggtatcagtaacacgatgctaatgggggcgggtatctcgctgtttggcttgttgatttccgtagcgtttgccccggagactcgagggatgtcactggcgcagaccagcaatatgaccatccgcgggcagagaatggggtaa

SEQ ID NO: 263002 - DNA, 531 bp, Klebsiella pneumoniae
atgattcttataatttatgcgcatccgtatccgcatcattcccatgcgaataaacggatgcttgaacaggcaaggacgctggaaggcgtcgaaattcgctctctttatcaactctatcctgacttcaatatcgatattgccgccgagcaggaggcgctgtctcgcgccgatctgatcgtctggcagcacccgatgcagtggtacagcattcctccgcttcttaaactttggatcgataaagtcttctcacacggctgggcttacggtcacggcggcacggcgctgcatggcaaacatttgctgtgggcggtgacgaccggcggcggggaaagccattttgaaattggtgcgcatccgggctttgatgtgctatcgcagccgctacaggcgacggcaatctactgcgggctgaactggctgccaccgtttgccatgcactgcacctttatttgtgacgacgaaaccctcgaagggcaggcgcggcactataagcaacgtctgctggaatggcaggaggcacatcatggatag

SEQ ID NO: 263003 - DNA, 234 bp, Klebsiella pneumoniae
atgaacgcattagaaaaagccatacagatcgctggtgacgcaacgaagctagcagaaaaactggacgtctcatctatgactattagccattggaagcatcgccatgggggagccgttcctcagtctcgggttttccaaatcttccgggtaaccggcgttactccgcatgaacttcgcccagacctttacccaaatccaaacgacggtttgtcttcacaaaatctggcgggatga

SEQ ID NO: 263004 - DNA, 300 bp, Klebsiella pneumoniae
atggaagtcgattttttgcttataggaaaaggtctaacagggcaaattaaacggtatgattatccaagagataaattaagggttactgagttaacggttgagtctgccaatgagccagttatagttagaccagtcctagtgtttgacgttattcaacataagtttgatgggaaaacatatgcagttgccatcggggcatcaacagattcagtacagattaatgctcttattgacaggttaaaacctcaacccatacccgaaagtttgcttatgaaagacgacccttacgaacaaaaataa

SEQ ID NO: 263005 - DNA, 687 bp, Klebsiella pneumoniae
atgcgtataacgattattctggtcgcacccgccagagcagaaaatattggggcagcggcgcgggcaatgaaaacgatggggtttagcgaactgcggattgtcgatagtcaggcgcacctggagccagccacccgctgggtcgcacatggatctggtgatattattgataatattaaagttttcccgacactggctgaatcgttacacgatgtcgatttcactgtcgccaccactgcgcgcagtcgggcgaaatatcattactacgctacgccagtagaactggtgccgctgttagaggaaaaatcttcatggatgagccatgccgcgctggtgtttggtcgcgaagattccgggttgactaacgaagagttagcgttggctgacgttcttactggtgtgccgatggtggcggattatccttcgctcaatctggggcaggcggtgatggtctattgctatcaattagcaacattaatacaacaaccggcgaaaagtgacacaacggcagacaaacatcaactgcaagctttacgcgaacgagccatggcactgctgacgactctggcagtggcagatgacataaaactggtcgactggttacaacaacgcctggggcttttagagcaacgagacacggcaatgttgcaccgtttgctgcatgatattgaaaaaaatatcaccaaataa

SEQ ID NO: 263006 - DNA, 933 bp, Klebsiella pneumoniae
atggttaaagtttatgcccctgcttccagtgccaatatgagcgtcgggtttgatgtgctcggggcggcggtgacacctgttgatggtgcattgctcggagatgtagtcacggttgaggcggcagagacattcagtctcaacaacctcggacgctttgccgataagctgccgtcagaacctcgggaaaatatcgtttatcagtgttgggagcgtttttgccaggagctgggtaagcaaattccagtggcgatgaccctggaaaagaatatgccgatcggttcgggcttaggctccagcgcctgttcagtggtcgcggcgctgatggcgatgaatgaacactgcggcaagccgcttaatgacactcgtttgctggctttgatgggcgagctggaaggccgtatctccggcagcattcattacgacaacgtggcaccgtgttttcttggtggtatgcagttgatgatcgaagaaaacgacatcatcagccagcaagtgccagggtttgatgagtggctgtgggtgctggcgtatccggggattaaagtctcgacggcagaagcccgggctattttaccggcgcagtatcgccgccaggattgcattgcgcacgggcgacatctggcaggctttattcacgcctgctattcccgtcagcctgagcttgccgcgaagctgatgaaagatgttatcgctgaaccctaccgtgaacggttactgccaggcttccggcaggcgcggcaggcggtcgcggaaatcggcgcggtagcgagcggtatctccggctccggcccgactttgttcgctctgtgtgacaagccggataccgcccagcgcgttgccgactggttgggtaagaactacctgcaaaatcaggaaggttttgttcatatttgccggctggatacggcgggcgcacgagtactggaaaactaa

SEQ ID NO: 263007 - DNA, 297 bp, Klebsiella pneumoniae
gtgaaaaagatgcaatctatcgtactcgcactttccctggttctggtcgctcccatggcagcgcaggctgcggaaattacgttagtcccgtcagtaaaattacagataggcgatcgtgataatcgtggctattactgggatggcggtcactggcgcgaccacggctggtggaaacaacattatgaatggcgaggcaatcgctggcacccatatggaccgccgccatcgccgcgccataacaagcacaatgatcatcgtggcgatcatcgtccggggcctgacaaacatcatcgctaa

SEQ ID NO: 263008 - DNA, 777 bp, Klebsiella pneumoniae
atgctgattcttatttcacctgcgaaaacgcttgattaccaaagcccgttgaccaccacgcgctatacgctgccggagctgttagacaattcccagcagttgatccatgaagcgcggaaactgacgcctccgcagattagcacgctgatgcgcatcagcgacaaactggcgggtatcaacgccgctcgctttcatgactggcagccagatttcacgccggagaatgcccgccaggcgattctggcatttaaaggtgatgtctacaccggcttgcaggccgaaaccttcagcgaagacgatttcgattttgcccaacagcatttgcgaatgctttccggcttgtatggcgtactgcgcccgctcgatttaatgcagccttatcgtctggaaatggggatccgtcttgagaatgcccgagggaaagatctgtatcaattctggggagatatcatcaccaacaagctgaacgaggcgctcgcagcacaaggcgataatgtggtgattaatctggcgtcagatgagtattttaaatcggtgaagccgaagaaattgaatgccgagattatcaagccggtgttcctcgatgagaagaacggcaaatttaagatcatcagcttctacgctaagaaagcacgcggtctgatgagtcgtttcattattgaaaatcggctgaccaaaccagagcaactgactggttttaatagcgaaggttacttctttgatgaagcttcctccagcaatggtgaactggtgtttaaacgctacgagcagcgttaa

SEQ ID NO: 263009 - DNA, 1431 bp, Klebsiella pneumoniae
atgccagattttttctcctttattaacagcgtcctttggggatcggtaatgatttacctgctcttcggcgcaggttgttggttcacttttcgcaccggatttgtgcagtttcgctacatccgccagtttggcaaaagtcttaaaaatagcattcatccacagccaggcggtttaacctcatttcagtcattgtgtaccagtcttgcggcacgcgtgggtagcggcaacctggccggcgttgcgctggctattaccgccggtggacctggagccgtcttctggatgtgggttgccgcgtttatcggcatggcgacctcgtttgccgaatgttcccttgcacaactttataaagaacgtgacgtcaatgggcagtttcgtggcggaccggcatggtatatggcgcgcgggctggggatgcgttggatgggcgttctgttcgccgtctttttgctcatcgcctacggcataattttcagcggagttcaggcgaacgccgttgcccgcgccctaagtttttcttttgattttcctccgctggtgacaggcattattcttgctgtctttgctctgctggcaatcactcgcggtcttcatggcgtcgcccggctcatgcaggggtttgtcccgttgatggcgttaatctgggtactgaccagcctggtaatttgcgtaatgaatatcgggcaacttccccacgtcatttggtctatttttgagagtgcttttggctggcaggaagcggcaggcggcgcggcgggatataccttaagccaggcgattactaacggttttcagcgcagtatgttttccaatgaggcgggaatggggtcgacgccaaacgcggcagcggcggctgcgtcctggcctccgcatcccgcagcgcaaggaattgtccagatgattggcatttttatcgacaccctggtcatctgtacggcaagcgccatgctgatattactggcgggtaacggcacaacctacatgccactggaaggtattcagcttatccagaaggcgatgcgggtgttaatgggttcctggggtgcggagtttgttaccctcgtggttattctgtttgccttcagctccatcgttgccaactacatttatgccgaaaacaatctcttcttcttacgcctgaacaaccctaaagcgatctggtgtctgcgaatctgcaccttcgcaacggtcatcggcggcaccttgctaagtcttccgctgatgtggcaactggcagatatcataatggcctgcatggctattaccaatttgaccgccatattactgctctcgcctgtggttcataccattgccagtgattatctacgccagcgtaaactcggcgtgcgcccggtgtttgatccgttgcgttatccggatatcggtcgccagctttctccggacgcgtgggatgatgtttcgcaggagtaa

SEQ ID NO: 263010 - DNA, 588 bp, Klebsiella pneumoniae
atgaatactttacgtattggcttagtttccatctctgatcgcgcatccagcggcgtttatcaggataaaggcatccctgcgttggaagaatggctgacatcggcgctaaccacgccgtttgaactggaaacccgcttaatccccgacgagcaggcgatcatcgagcaaacgttgtgtgagctggtggatgaaatgagttgccatctggtgctcaccacgggcggaactggcccggcgcgtcgtgacgtaacgcccgatgcgacgctggcagtagcggaccgcgagatgccaggctttggtgaacagatgcgccagatcagcctgcattttgtaccaactgcgatcctttcgcgtcaggtgggtgtgattcgcaaacaggcgctgatccttaacttacccggtcagccgaagtcgattaaagagacgctggaaggtgtaaaggacgctgagggtaacgttgtggtgcacggtatttttgccagcgtaccgtactgcattcagttgctggaagggccatacgttgaaacggcaccggaagtggttgctgcattcagaccgaagagtgcaagacgcgaagttagcgaataa

SEQ ID NO: 263011 - DNA, 567 bp, Klebsiella pneumoniae
atgggcaacactaagttggctaatccggcaccgctgggcctgatgggcttcggcatgaccaccattctgcttaacctgcacaacgtgggttatttcgctctggacggtattattcttgccatgggcattttctacggcggcatcgcgcaaatttttgctggtctgctggagtacaaaaaaggcaacactttcggtttaaccgcattcacctcttacggttctttctggctgacgctggttgcgattctgctgatgccgaaactgggtctgaccgatgcgccaaatgcacagttccttggtgtctacctgggtctgtggggcgtatttacgctgtttatgttcttcggcacgctgaaaggcgcacgcgttctgcaattcgttttctttagcctgaccgtgctgtttgccctgctggcgatcggtaacattgccggtaacgccgcgatcatccactttgccggctggattggtctgatctgtggtgccagcgcaatctatctggcgatgggtgaagtgctgaacgagcagtttggtcgcaccgttctgccgattggtgaatcgcactaa

SEQ ID NO: 263012 - DNA, 714 bp, Klebsiella pneumoniae
atgaatgttaattacctgaatgattcagatctggattttctccagcattgtagtgaggaacaattggcaaatttcgcccggctgctcacccataatgaaaaaggcaaaactcgcctctccagcgtactgatgcgcaacgaactgtttaaatcgatggaaggacatcccgagcaacatcgccgcaactggcagctgattgccggagaattacaacattttggtggcgatagtatcgccaacaaactgcgtggacacggtaaattgtatcgggccattttgctcgatgtttcaaagcgattgaagctgaaagccgacaaagagatgtctacgtttgaaattgagcaacagttactggaacaatttctgcgtaatacctggaagaaaatggacgaggaacataagcaggagtttctgcacgcagtcgatgccagggtgaatgagctggaagagctgctgccgctgctgatgaaagacaaattattggcaaaaggcgtgtcgcatttgctttccagccaattgacccgcattttacgcacccacgcagcaatgagcgtacttgggcatggtttgctgcgcggcgcggggctgggaggccctgtaggcgcggcactaaatggggttaaagcggtcagcggcagcgcctatcgcgtgacgattccagccgtactgcaaatcgcctgcctgcgccggatggttagtgccactcaggtctga

SEQ ID NO: 263013 - DNA, 405 bp, Klebsiella pneumoniae
atgaaatccgtttttacgatttccgccagcctggcgattagcctgatgctgtgctgcacggcgcaggcaaacgaccataaaatcctcggcgtcattgcaatgccacgtaacgaaaccaacgatctggcgctgaaacttcctgtttgccgaattgttaaacgcatacaactctcagccgaccatggcgatttgcagttaagcggtgcatcggtttatttcaaagtcgcccgtagcgccagtcagagtctgaatattccttcagaaataaaagaagggcaaaccactgactggatcaacattaacagcgataacgacaataaacgctgcgtctcaaaaatcaccttttccggtcatacggttaactcatcggatatggccacgctgaaaattatcggcgacgactaa

SEQ ID NO: 263014 - DNA, 720 bp, Klebsiella pneumoniae
gtgggtatcaccgttggtagccagaacttcgaaggttttttcgccgtcaacttcgtcgatttcgataatagaaatatcgaaagtaccaccacccaggtcataaaccgcgatagtacggttgccagtacctttgtccagaccgtaagccagcgcagctgcggtcggttcgttgatgatacgttttacttccagaccagcgatacggcctgcgtctttggttgcctgacgctgagcatcgttaaagtatgccggtacggtgataacagcttcagttaccggttcacccaggtaatcttcagcggttttcttcatttttttcagcacttcagcagaaatctgcggcggtgccattttctggcctttaacttcgacccatgcgtcgccgttatcagcagcaataattttgaacggcatgatggaaacatcacgctgtacttcttcgtcctggaagcggcggccaatcaggcgtttaatcgcaaacagggtgttttgcgggttcgtcactgcctgacgtttagccggctgaccaaccagagtttcaccatcctgggtataggcaatgatagaaggcgtggtgcgatcgccttcggcgttctccagtacacgaggagtggtgccatccataatcgctacacaagagttggtagtacccaggtcgataccaattattttacccatctaaacgtctccactatatattcggtcatcatgtggttgtga

SEQ ID NO: 263015 - DNA, 1215 bp, Klebsiella pneumoniae; identical to SEQ ID NO: 5070

SEQ ID NO: 263016 - DNA, 759 bp, Klebsiella pneumoniae
atgaataacaccaaaaaatcactaaaagtgctctttattggggaatcctggcatattcatatgattcattcaaaaggatatgacagttttacctcaagtaaatatgaagaaggtgcgacctggttactccaatgtctgaaaaatagtcaggtagatgtcacctatatgccggcacatacggtacaaattgccttccctgaagatgtggcacagttagaacaatatgatgccatcgttattagtgatattggtagtaatactttcctgctacaaaatgatactttttatcaacttcgcataaaaccaaacgctctcgaactgattaaagaatatgtgaataacggtggtgggttattgatgattggcggctatctctcattcatgggaattgaagcaaaagccaattataaaaatacagttctggctgatgtgctcccggttacgatgttagatggtgacgatcgtgtcgaaaaaccagagggtgttattgcacagccatcacaacctgaacatccagttattaaagggttctctgaatatccttttttcctaggttataaccgggcgatcgctaaagaaaatgctgaggtggtattaacaataaacaacgatccattactggtctttggtaactatcacaacgggaaaatagcctgctttatgagtgactgttcaccgcactggggtacacagcagtttatgtcctggccgttctataccgcgttgtgggtaaatatactgactcatattgcaagataa

SEQ ID NO: 263017 - DNA, 966 bp, Klebsiella pneumoniae; identical to SEQ ID NO: 5072

SEQ ID NO: 263018 - DNA, 1035 bp, Klebsiella pneumoniae; identical to SEQ ID NO: 5073

SEQ ID NO: 263019 - DNA, 858 bp, Klebsiella pneumoniae; identical to SEQ ID NO: 5906

SEQ ID NO: 263020 - DNA, 411 bp, Klebsiella pneumoniae
atgcgaattctgaactgttatatggcgaatgacagcaaaggccattttgttacggcgaaagaagcagcgaagcacaaccgccaggacgttttgtgctgtgtgtcctgtggatgcccgttaacacttcagcggggcaatgacggacaaccaccgtggtttgaacatgaccagatgactgtcgctgagaaaatcctgctgcgatgcacctggcttgacccggcagagaaagaggcccgtcgtttgcatctgcagggtatgacggttccggattatacggtgaaggtgagaaagtggttttgtgtgatgtgtgacgaagattatgaaggagaaaagtgctgcccgagttgtggtaccggggtatacagcagggagggggggctgcaggaaggcaactggaaggataggaactga

SEQ ID NO: 263021 - DNA, 570 bp, Klebsiella pneumoniae; identical to SEQ ID NO: 5077

SEQ ID NO: 263022 - DNA, 201 bp, Klebsiella pneumoniae; identical to SEQ ID NO: 5078

SEQ ID NO: 263023 - DNA, 1197 bp, Klebsiella pneumoniae; identical to SEQ ID NO: 5079

SEQ ID NO: 263024 - DNA, 207 bp, Klebsiella pneumoniae
atggctaccccagtttcgctgatggattaccagatggtcgacatggcgtttatcactcaactgaccggcttaaccgataagtggttttacaaactcatcaaggatggtgcctttcctgcccccatcaaaatggggcgcagctcccgctggctgaaaagtgaagtggaagcctggctgcaggcgcgtattgcacaatcccgtccgtaa

SEQ ID NO: 263025 - DNA, 573 bp, Klebsiella pneumoniae
atgcaaaaacttgaaaaccggtgtgatctgctgctcatccagcatcagaaatggatggcaagtgtaacccggtttattgtcgctcatggaatgggctctccgcatcttcatggttatcaccgcctgaccctggcccacttttttctgccggaaaaaggcaccatcatctcagtggcaccacagggactctatcaggtcgtcaacccgggaacgccaccgttcattcctgccattcaggaagggttaatgaccagcattcagactcatgaaatcatgctgcttacacattttaacctgggtggtgttttactcagtgaactacatcgtctgggagaaagccgactggcaaacaggctgaacagtctgctccggcgttttgacgatcgcgatctctaccacaccctgatatggctgtgctggtatgatctgatgtgcgcccactccatgcagccctggactgaagagttaaagcataaatcacacgcagaacttgaaagctgggctgtggcgcgcaaacgggaaaagcgcgagcttgaactgatgattgacgagtacctgttatacgcctgttga

SEQ ID NO: 263026 - DNA, 1134 bp, Klebsiella pneumoniae
atgagtgatattatttacctgaacataaccggagaacaacaaggatgtatttcctctcgttgtggaacgagcgcatcaataggtaatcgctggcagattggccatgaagatgaaatcttcgcgttctcgctctctaatagtattacgaatacaggcaaagggtcacaattgcatggccttagtttctgtaaattgattgacaaaagctccccgttacttattaacgctattaacaataacgagcagttgttcatggagtttgacttctatcggatcaatagatttggtcgatgggagaaatattacaacattcaacttcgcggcgcgctcttatcagcaatcaatcacctgtttactgagaacaatctggatacagaaaccatcactgtcagttatgaatatatactctccaggcatctgattgctaatactgaatttagttatttggcatttcccgataactacaaccgtctgtttataccacggccaaaaactaaagatgataatggcctcaaaacactcaatagtaaagcggttggcagactgcttgctgctggcggcatatacaatgggaatatcgaaggattcagggaaacagcaaacaagttgggaggagatgcacctgctggttacgatcaagttatggataacaaagggttactcatcgctggtgcttcaatagttgctggagttgttctgggaagaatgagattccctgatttggaatcacttgagcatttcggagccagaggagcagtatcaggaagaccatttaatcccgaccttgccggtggtccaattgaaaacctgacgatagatggcgtaacaatcaacagggaaggtatcgctattgttgaaaagcatatctccagatttgatcatgatccagctaatgatgtaatgatttcaaggctaaagaaaatagcaaataaagaattgcttcctgaaaaatacgatctgaactactatactcatgaatgtcgcgagtatcagcgttattgtaatttaggatgggaaacaggtgaaccgaaaggtttagatggatatgaattatggaataatgtacatactgcaactctagaagactttaaaattaaagatactgacttatttcatccggatgcaacaaaatga

SEQ ID NO: 263027 - DNA, 258 bp, Klebsiella pneumoniae; identical to SEQ ID NO: 3853

SEQ ID NO: 263028 - DNA, 246 bp, Klebsiella pneumoniae; identical to SEQ ID NO: 9608

SEQ ID NO: 263029 - DNA, 2262 bp, Klebsiella pneumoniae
atgacaattcttaatcacaccctcggtttccctcgcgttggcctgcgtcgcgagctgaaaaaagcgcaagagagttattgggcggggaactccacgcgtgaagaactgctggcggtagggcgtgaattgcgtgctcgtcactgggatcaacaaaagcaagcgggtatcgacctgctgccggtgggcgattttgcctggtacgatcatgtactgaccaccagtctgctgctgggtaacgttccggcgcgtcatcagaacaaagatggttcggtagatatcgacaccctgttccgtattggtcgtggacgtgcgccgactggcgaacctgcggcggcagcggaaatgaccaaatggtttaataccaactatcactacatggtgccggaattcgttaaaggccaacagttcaaactgacctggacgcagctgctggacgaagtggacgaggcgctggcgctgggccacaaggtgaaacctgtgctgctggggccggttacctacctgtggctgggtaaagtgaaaggtgaacagtttgatcgcctgagcctgctgaacgacattcttccgatttatcagcaagtgctggcagaactggcaaaacgcggcattgagtgggtacagattgatgaacccgcgctggtactggaactgccgcaggcgtggctggacgcatacaaacccgcttacgacgcgctccagggacaggtgaaactgctgctgaccacctattttgaaggcgtaacgccaaatctcgacacgattactgcgctgcctgttcagggtctgcatgtcgatcttgtacatggtaaagatgacgttgctgaactgcacaagcgtctgccttctgactggctgctgtctgcgggtctgatcaatggtcgtaacgtctggcgcgccgatcttaccgagaagtatgcgcaaattaaggacattgtcggcaaacgcgatttgtgggtggcatcttcctgctcactgctgcacagccccatcgacctgagcgtggaaacgcgtcttgatgcagaagtgaaaagctggtttgccttcgccctgcaaaaatgtcatgaactggcactgctgcgcgatgcgctgaacagtggtgacacggctgctctggcagagtggagcgctccgattcaggcgcgtcgtcactctactcgtgttcataatccggcagtagaaaagcgtctggcggcgatcaccgcccaggacagtcagcgtgcgaatgtctatgaagtgcgtgctgaagcccagcgtgcgcgttttaaactgcccgcgtggccgaccaccacgattggttccttcccgcaaaccacggagattcgtaccctgcgtctggattttaaaaagggtaatctcgacgccaataactaccgcacgggcattgcggaacatatcaagcaggccattgttgagcaggaacgtttgggactggatgtgctggtacatggcgaggctgagcgtaatgacatggtggaatactttggcgagcacctcgacggttttgtctttacgcaaaacggttgggtacagagctacggttcacgctgcgtgaagccaccgattgttattggtgacgttagccgcccggcaccgattaccgttgagtgggcgaagtatgcgcaatccctgactgataaaccggtgaaagggatgttgaccggcccggtgactattctctgctggtcgttcccgcgtgaagatgtcagccgtgaaaccatcgccaaacaaattgcgctggcgctgcgtgatgaagtggcggacctggaagccgctggaattggcatcatccagattgatgaaccggcactgcgcgaaggtttaccgctgcgtcgcggcgactgggatgcctatctccagtggggcgtggaggctttccgtatcaacgccgccgtggcgaaagatgacacacaaatccacactcacatgtgttactgcgagttcaacgacatcatggattcgattgcggcgctggacgcagacgtcatcaccatcgaaacctcgcgttccgacatggagttgctggagtcgtttgaagagtttgattatccaaatgaaatcggtcctggcgtctatgacattcactcgccaaacgtaccgagcgtagaatggattgaagccttgctgaagaaagcggcaaaacgcattccggcagagcgtctgtgggtcaacccggactgtggcctgaaaacgcgcggctggccagaaacccgcgcggcactggcgaacatggtgcaggcggcgcagaatttgcgtcggggatga

SEQ ID NO: 263030 - DNA, 954 bp, Klebsiella pneumoniae
atgatcgaagtaaaacatctgaaaacgctacaagcgttgcggaactgcggctcgctcgcagccgctgcggcgacgttgcatcagacgcaatccgccctgtctcaccagtttagcgatctggaacaacgccttggcttccggctatttgtgcgtaagagccagccgcttcgctttacaccgcagggagaaatcctgttgcaactggcaaaccaggtgctgccacaaattagccaggcactgcaagcctgcaatgaaccgcagcagacgcgtctgcgcatcgccattgagtgccatagctgtattcagtggctgacgcccgcgttagaaaatttccataagaactggccgcaggtcgagatggactttaaatcgggcgtgacgtttgacccgcagcctgcgttgcaacagggcgagctggatctggtgatgacgtcagatattctgccgcgcagtggcctgcattattcgccgatgttcgattatgaagtgcgtctggtgttggcacctgaccatccgctggcggcaaaaacgcgtattacaccggaagatctcgccagcgagacgctgttgatttatccggtgcagcgtagccgactggatgtctggcggcattttcttcagccggcaggcgtcagcccgtcactgaaaagcgtcgataacaccttattgttgattcagatggttgccgcgcggatgggtattgccgccctgccgcattgggtagtagagagttttgagcgccagggtctggtggtgaccaaaaccctgggcgaaggcttgtggagccgactgtacgccgccgtgcgcgatggcgagcagcgtcagccgattactgaagcgtttattcgctcagcgcgcaatcacgcctgcgatcatctgccgtttgtgaagagcgcggagcgacccacttacgatgcacccacagtgaggccaggatcaccagcgcgcctgtaa

SEQ ID NO: 263031 - DNA, 900 bp, Klebsiella pneumoniae
gtggcgctacttatcatcaccacgattctgtgggccttctcctttagcttttatggcgagtaccttgcggggcacgtcgatagctattttgcggtgctggtgcgcgttggcctggcggcactcgtttttctgccgtttctgcgtacccgtggcaatagcctgaaaacggtcggcctgtatatgctggtgggcgcgatgcagctcggcgtgatgtatatgctgagttttcgcgcctatctctacctgacggtctccgaattgttgctgttcaccgtactgacgccgctctacattacgttgatttatgacatcatgagtaagcgccgtctgcgctggggctatgcttttagcgccttgttggcggtgattggtgccgggattattcgctatgatcaggtcaccgaccacttctggattggcctgctgctggtgcagctctccaatatcacttttgccatcggcatggtgggttacaaacgtctgatggaaactcgcccgatgccgcagcataacgcctttgcgtggttctatcttggcgcgttcctggtggcggtgattgcatggttcttgctgggaaatgcgcagaaaatgccacaaaccacgttgcaatggggcattctggtgtttcttggcgtggtggcttccgggattggctactttatgtggaactacggcgcaacccaagtagacgccggaacgctgggtattatgaataatatgcacgttccggcagggctgctggtaaacctggctatctggcaccaacagccgcactggccaacgttcattacaggcgcgctggtgatcctggcctcactgtgggtgcatcgtaagtgggtcgctccgcgctcttcacaaacggcagatgatcgcaggcgtgattgcgcgctgagcgaataa

SEQ ID NO: 263032 - DNA, 801 bp, Klebsiella pneumoniae
atgtaccaggttgttgcgtctgatttagatggcacgttactttctcccgaccatacgttatccccttacgccaaagaaactctgaagctgctcaccgcgcgcggcatcaactttgtgtttgcgaccggtcgtcaccacgttgatgtggggcaaattcgcgataatctggagattaagtcttacatgattacctccaatggcgcgcgcgttcacgatctggatggcaatctgatttttgctcataacctggatcgcgacattgccagcgatctgtttggcgtagtcaacgacaatccggacatcattactaacgtttatcgcgacgacgaatggtttatgaatcgccatcgcccggaagagatgcgcttttttaaagaagcggtgttcaaatatgcgctgtatgagccgggattactggagccggaaggcgtcagcaaagtgttcttcacctgcgattcccatgaacaacttctgccgctggagcaggcgatcaacgctcgctggggcgatcgcgtcaacgttagtttctctaccttaacctgtctggaagtgatggcgggcggcgtgtcgaaaggtcatgcgctggaagcggtggcgaagaaactgggctacagcctgaaggattgtattgcctttggtgacgggatgaacgacgccgaaatgctgtcgatggcggggaaaggctgcattatgggcagtgcgcaccagcgtctgaaagatctgcatccggagctggaagtgattggtactaatgccgacgacgcggtgccgcattatctgcgtaagctctatttatcgtaa

SEQ ID NO: 263033 - DNA, 1023 bp, Klebsiella pneumoniae
atgtttcagcagcaaaaagactgggaaacaagagaaaacgcgtttgctgcttttaccatgggaccgctgactgatttctggcgtcagcgagatgaagcagagtttactggtgtggatgacattccggtgcgctttgtccgttttcgcgcacagcaccatgaccgggtggtagtcatctgcccggggcgtattgagagctacgtaaaatatgcggaactggcctacgacctgttccatttggggtttgatgtcttaatcatcgaccatcgcgggcagggacgttccggtcgcctgttagccgatccgcatctcgggcatgttaatcgctttaatgattatgttgatgatctggcggcattctggcaacaggaggtccagcccggtccgtggcgtaaacgctatatactggcacattcgatgggcggtgcgatctccacattatttctgcaacgccatccaggtgtatgtgacgctattgcgctaactgcgccaatgtttgggatcgtgattcgtatgccgtcatttatggcacggcagatcctcaattgggccgaagcgcatccacgtttccgtgatggctatgcaataggcaccgggcgctggcgcgcgttgccgtttgctatcaacgtactgacccacagcagacagcgatatcgacgtaacttacgcttctatgctgatgacccaacgattcgcgtcggtgggccaacctaccattgggtacgcgaaagtattctggctggcgaacaggtgttagccggtgcgggtgatgacgccacgccaacgcttcttttacaagctgaagaggaacgcgtggtggataaccgcatgcacgaccgtttttgtgaactccgcaccgccgcgggccatcctgtcgaaggaggacggccgttggtaattaaaggtgcttaccatgagatcctttttgaaaaggacgcaatgcgctcagtcgcgctccacgccatcgttgattttttcaacaggcataactcacccagcggaaaccgctctacagaggtttaa

SEQ ID NO: 263034 - DNA, 621 bp, Klebsiella pneumoniae
atgaccttagaatggtggtttgcctacctgctgacatcgatcattttaagcctgtcgccaggctctggcgcaatcaacaccatgaccacctcgctcaaccacggttatcgcggcgcggtggcgtctattgctgggcttcagaccggactggcgattcatattgtgctggttggcgtggggttggggacgctattttcccgctcagtgattgcgtttgaagtgttgaagtgggcaggcgcagcttacttgatttggctgggaatacagcaatggcgcgccgctggtgcaattgaccttaaatcgctggcctctactcaatcgcgtcgacatttgttccagcgcgcagtttttgtgaatcttaccaatcccaaaagtattgtgtttctggcggcgctatttccgcaattcatcatgccgcaacagccgcagctgatgcagtatatcgtgctcggcgtcacgactattgtggtcgatattattgtgatgatcggttacgccacccttgctcaacggattgctctatggattaaaggaccaaagcagatgaaggcgttgaataagattttcggctcgttgtttatgctggtgggggcgctgttagcatcggcgaggcatgcgtga

SEQ ID NO: 263035 - DNA, 621 bp, Klebsiella pneumoniae
atgttgatgttattcctcaccgtcgccatggtgcacattgtggcgcttatgagccccggtcccgatttcttttttgtctctcagaccgctgttagtcgttcccgtaaagaagcgatgatgggcgtgctgggcattacctgcggcgtaatggtttgggctgggattgcgttgcttggcctacatttgattatcgaaaaaatggcctggctgcatacgctgattatggtgggcggtggcctgtatctctgctggatgggttatcagatgctgcgtagcgcactgaaaaaagaggtcgtttctgcgcctgcgccacaggtagaactggcaaaaagcggacgcagtttcctgaaaggcttactgaccaatctcgccaatccgaaagcgattatctactttggttcggtattctcgctgtttgtcggcgataacgtcggcaccactgagcgctggggcattttcgcgttgattattatcgaaacactggcgtggtttaccgtcgttgccagcctgtttgccctgccgcaaatgcgccgtggttatcaacgtctggcgaagtggattgatggttttgccggggcgttatttgccggatttggcattcatttgattatttcgcgttga

SEQ ID NO: 263036 - DNA, 891 bp, Klebsiella pneumoniae
atggatgcaaaacaaacgcggcagggcgtattactcgctcttgccgcttattttatttggggtattgcgccagcgtacttcaagctgatttactacgtgcccgccgatgagatcctgacgcatcgcgtgatctggtcgtttttctttatggtggtgctgatgagcatctgccgccagtggtcctatttaaaaacgctgattcagacgccacagaaaatttttatgctggcagtctctgccgtgctgattggtggcaactggctactgtttatctgggcggtgaacaatcaccatatgctggaagcgagccttggttactttattaacccgctggtgaacattgtgctggggatgattttcctcggcgagcgattccgccggatgcaatggctggcggtgattctggcgatatgtggcgtgttggttcagttgtggacttttggttcactaccgtttatcgcgctggggctggcgtttagttttgccttctacggcctggtacgcaagaagattgctgttgaagcgcaaaccggcatgttaatcgaaactatgtggttgctgcccgtggcggcgatttacctgtttgctattgccgacagctcaaccagccatatggggcaaaacccgatttcactgaatttactgctgatcgccgccgggattgtcactaccgtaccgctgttgtgttttactgcggctgcgacacgcctgcgtctctcaacgttaggcttttttcagtacattggcccgacgctgatgttcctgctggctgtgacgttttatggtgaaaaaccgggtgccgataagatggtgaccttcgcctttatttgggtggcgctggcaatttttgtgatggatgcgatttatacgcagcgtagaacgtccaaataa

SEQ ID NO: 263037 - DNA, 390 bp, Klebsiella pneumoniae
atggcaaaggcaccaattcgtgcacgtaagcgtgtaagaaaacaagtctctgacggcgtggctcatatccatgcttcttttaacaacaccatcgttaccatcactgatcgtcagggtaacgcactgggttgggcaacagccggtggttccggtttccgtggttctcgcaaatccactccgttcgcagctcaggttgcagcagagcgttgcgcagaagccgtaaaagaatacggcatcaagaatctggaagttatggtcaaaggtccgggtccgggtcgcgaatctaccattcgtgcactgaacgccgctggtttccgcatcactaatattactgatgtgactccgatccctcataacggttgtcgtccgccgaaaaaacgtcgcgtataa

SEQ ID NO: 263038 - DNA, 2229 bp, Klebsiella pneumoniae
atgtacacacagaccctgtatgagttaagtcaggaggctgaacgcctgttacagctttctcgccaacagttgcagttactggaaaaaatgcctctctctgtccccggagacgatgcgccacaactggctttaccctggagtcagcctaatatcgccgaacgtcacgcgatgctgaataatgagttgcgtaaaatttcccgactggaaatggtgctggcgattgtcggtaccatgaaagcagggaaatcaaccaccattaatgccattgttggtacggaggttttgcctaatcgtaatcgcccaatgactgcgctgccgacgcttattcgccatacgcccgggcaaaaggaaccggtactgcatttttcacatgtcgcgccaatcgattgtttaattcaaaaattacaacagcgcctgcgtgattgcgatattaagcatctgaccgatgtgctggaaatagataaagatatgcgtgcgcttatgcagcggatcgaaaatggcgtcgctttcgaaaaatattatctgggtgcccagcctatttttcattgtctgaaaagtttgaatgatttggtgcgactggcgaaggcgctggacgtcgattttcctttttctgcttacgccgccattgagcatattcccgtgattgaagtggagtttgtccatctggcggggctggagagttatcccggtcagttgacgttactggatacccccgggccaaatgaagccgggcaaccgcatctgcaaaaaatgcttaaccagcagctggctcgcgcctcggcggtactggcggtgctggattatacgcaactgaaatcgatctccgatgaagaggtccgtgaggcgattttggcggtggggcaatcggtgccgctgtatgtgctggtcaataagttcgatcaacaggatcgtaacagtgacgacgccgaccaggtgcgggcactgatttccgggacgctgatgaaaggctgtattacgccacagcagatatttccggtgtcgtcgatgtggggctacctggcgaatcgggcgcgccatgagttagccaacaacggtaagttaccaccgccagagcaacaacgctgggtggaagattttgcccatgccgcgctcggcaggcgctggcgtcatgccgatctggctgacttcgaacatattcgtcatgctgccgatcagttgtgggaagattcgctgttcgcccagccaattcaggcgttgcttcatgccgcttacgctaacgcctcgttgtatgctctgcgatctgccgcgcataaactgttgaattacgcgcagcaggcgcgggaatacctggattttcgtgcgcacgggttaaacgtcgcttgtgaacaattgcggcaaaatatccatcagatcgaagaaagtttgcagctattgcaactcaatcaggcgcaggtgagcggcgagattaaacatgaaatcgagctggccctgacctccgccaaccactttctgcgtcaacagcaagatgcgctgaatgcgcagttagccgccttgtttcaggatgattcggagccgttaagcgagattcgtacccgctgtgagacactgttacagacggcgcagaacaccattagtcgcgactttacgctgcgttttgccgagctggaatccaccctttgccgggtgttaaccgatgttattcgccccattgagcaacaaatcaaaatggaattgagcgagtcagggtttcgtcctgggtttcattttcctgtttttcacggcgcagttccccacttcaacactcgccagctgttcagtgaagtcatttcgcgccaggaagcaacggacgagcagagcacgcgtttaggcgttgtgcgtgagactttttcgcgctggttgaatcagcccgactggggacggggaaatgagaaatccccgacagagacggttgattacagtgtgttgcaacgagcattaagcgcagaagtcgatctttattgccaacaaatggctaaagttctggcagagcaggtcgatgaatctgttacggcaggcatgaatacttttttcgctgagttcgcttcatgtttgacggaattacagacgcgtttacgcgaaagcctggctctgcgtcaacaaaatgaatcggtggtcaggctgatgcagcagcaattgcagcaggctgtgatgactcacagctggatttacaccgacgctcagctgttacgcgatgatattcaaacacttttcacggcagaacgatattga

SEQ ID NO: 263039 - DNA, 879 bp, Klebsiella pneumoniae
ttgaccaagacgttactggacggccccggtcgcgtgctggagtcggttcatccgcgctttttagtggatctggcgcagggcgatgatgcccgccatccacaagcccatcagcagcagtttcgtgaacgactgatgcaggaacttcttgcgcgtgtgcagcttcaggcatggacgaacggcgggatgttaaatgcgccgcttagcctgcgtctgacattggtggaaaaactggcttcgatgctggatccaggtcatctggcgctgacgcagatcgcgcaacatctggcgctgctgcaaaaaatggatcaccgccagcactctgctttcccggagctcccccagcaaattgccgccttgtatgagtggttttcagcccgttgtcgctggaaggaaaaggcgttaacgcaacgaggcctactggtgcaggcaggtgatcagagcgagcaaatttttacccgctggcgtgctggggcgtataacgcctggtcgttgcctgggcgctgttttatcgttctggaggagttgcgctggggggcatttggcgatgcctgccgtctgggaagcccgcaagcggtggcgttgttgctgggtgatttgcgcgagaaagcgacacaacatctggcagagagtatcaatgcggcaccgaccacgcgtcactattaccatcagtggtttgcctcttcgaccattccgacgggcggggatcatgctgattttttaagttggctgggaaagtggaccacggcagataaacaacccgtttgctggtcagtgacccaacgctggcaaactgtcgcgctggggatgccacgactctgttcagcgcagcgtctggcgggggcaatggtcgaggaaatcttctctgtaaatttggtgtaa

SEQ ID NO: 263040 - DNA, 1101 bp, Klebsiella pneumoniae
ttgaatctgatgcgttttctgcgccgaccaatatcgctgcgccaacggctgatattgaccattggggccattttgttggtgtttgagctgatcagcgtcttctggctatggcatgaaagtaccgagcagattcagctgtttgagcaggcgctacgcgacaatcgcaacaacgatcgccacatcatgcgtgagatccgcgaggcggtcgccagcctgatcgtccccggcgtctttatggtcagcctgacgctatttatctgctatcaggcggtacgccgcatcacccggccgctggcggagctgcaaaaagagctggaagcgcgcaccgccgacaacttaacgcctattgccattcacagcgccaccctcgaaatcgaagcggtggtttcggcgttgaacgatctggtcagtcgcctgaccagcacgctggataacgaaaggttgtttaccgctgacgtcgcgcacgaactgcgaacgccactggcgggggtgcgtttgcatctggaactgctggcgaaaacgcatcacattgatgtagcaccgttagtggctcgacttgatcagatgatggagagtgtctcccagctgctgcaactggcgcgtgccggacagtcattttcttccggtaattatcaacatgtaaaactgctggaagatgtcattctcccctcgtatgacgaactcagtaccatgctcgaccagcgacagcaaaccctgctattgccagagagcgccgccgacatcaccgttcagggtgatgcaaccctgctgcggatgttattgcgaaacctggtagaaaacgcccatcgttacagcccgcaaggcagcaacattatgattaagctgcaagaagatggcggagcggtcatggccgttgaagatgaaggaccgggtattgatgagagtaaatgcggggagttgagtaaagcgtttgtacgtatggacagccgttttggcgggattggtctggggttaagtattgtcagccgcattacacagttgcatcacgggcagtttttcctgcaaaaccggcaagagacttccggcacgcgggcctgggtacggctgaagaaagatcagtacgtggcaaaccagatataa

SEQ ID NO: 263041 - DNA, 669 bp, Klebsiella pneumoniae
atgaaaattctgattgttgaagacgatacgctgttattgcagggattgattctggcggcacaaaccgaaggctacgcgtgcgatggcgtgacaaccgcgcggatggcggaacaaagccttgaggccggtcattacagcctggtggtactggatttagggttacccgacgaagatggactgcattttctcgcccgtatccggcagaaaaaatacaccctgccggtactgatcctcaccgctcgcgatacgctgaccgacaaaatcgccgggctggatgtcggtgccgatgactatctggtgaagccttttgcgctggaagagttacacgcccgtatccgcgccctgctacgacgccataataatcagggcgaaagtgagctgattgttggcaatctgacgctgaatatgggtcgccgtcaggtatggatgggcggtgaagagttgattctgacgcccaaagaatatgctctgctgtcacggttaatgctcaaagcaggcagtccggtgcatcgggaaattctctacaacgacatctataactgggacaatgaaccctcgaccaacaccctggaagtgcatatccacaatctgcgcgacaaagtgggcaaagcccgtatccgcaccgtgcgcggctttggctatatgctggtcgcgaatgaggaaaactaa

SEQ ID NO: 263042 - DNA, 1644 bp, Klebsiella pneumoniae
atgttgaagcgcctactaaaaagaccctctttgaatttactcgcctggctattgttggccgctttttatatctctatctgcctgaatattgccttttttaaacaggtgttgcaggcgctgccgctggactcgctgcataacgtactggttttcttgtcgatgccggtcgtcgccttcagcgtgattaatattgtcctgacactaagctctttcttatggcttaatcgaccgctggcctgcctgtttattctggtcggcgcagctgcacaatatttcataatgacttacggcatcgtcatcgaccgctcgatgatagccaatattattgataccactccggcagaaagttatgcgttgatgacaccgcaaatgttattaacgctgggattcagcggcgtgcttgctgcgctgattgcctgctggattaaaatcaaacctgccacctcgcgcctgcgcagtgttcttttccgtggagccaatattctggtgtctgtactgctgattttgctggtcgccgcactgttttataaagactacgcctcattgttccgcaacaacaaagagctggtgaagtccttaagcccctctaacagcattgttgccagctggtcatggtactcccatcagcgactggcaaatctgccgctggtgcgaattggtgaagatgcgcaccgcaacccattaatgcagaacgagacacgtaaaaatttgaccatcctgattgtcggcgaaacctcgcgggcggagaacttctccctcaatggctacccgcgtgaaactaacccgcggctggcgaaagataacgtggtctatttccctaataccgcatcttgcggcacggcaacggcagtttcagtaccgtgcatgttctcggatatgccgcgagagcactacaaagaagagctggcacagcaccaggaaggcgtgctggatatcattcagcgagcgggcatcaacgtgctgtggaatgacaacgatggcggctgtaaaggtgcctgcgaccgcgtgcctcaccagaacgtcaccgcgctgaatctgcctggtcagtgcatcaacggcgaatgctatgacgaagtgctgttccacgggctggaagagtacatcaataacctgcagggtgatggcgtgattgtcttacacaccatcggcagccacggtccgacctattacaaccgctatccgccgcagttcaggaaatttaccccaacctgcgacactaacgagatccagacctgtaccaaagagcaactggtgaacacttacgacaacacgctggtttacgtcgactatattgttgataaagcgattaatctgctgaaagaacatcaggataaatttaccaccagcctggtttatctttctgaccacggtgagtcgttaggtgaaaatggcatctatctgcacggtctgccttatgccatcgccccggatagccaaaaacaggtgccaatgctgctgtggctgtcggaggattatcaaaaacggtatcaggttgaccagaactgcctgcaaaaacaggcgcaaacgcaacactattcacaagataatttattctccacgctattgggattaactggcgttgagacgaagtattaccaggctgcggatgatattctgcaaacttgcaggagagtgagtgaatga

SEQ ID NO: 263043 - DNA, 1338 bp, Klebsiella pneumoniae
atgtcttcggatgctgatgctcacaaagtgggcttaatccccgtcaccctgatggtgtcggggaatattatggggtcaggtgtttttctgttacctgcaaacctggcctccactggcgggattgccatttatggatggttggtgacgattatcggtgcgctggggctctcgatggtatacgccaaaatgtcgttcctcgacccaagtcctggtggttcttacgcttacgcccgccgctgctttgggccgtttctcggttatcaaaccaacgtcctctactggctggcctgctggatcggcaatatcgccatggtggtcattggcgtaggttatttaagttacttcttcccgattctgaaagatccattggtattaaccatcacctgcgtcgtggtgctgtggatcttcgtcctgctgaacattgtcggtccgaaaatgatcacccgtgtgcaggccgttgccaccgtgctggcgctgatccccatcgtcgggattgccgtatttggctggttctggttccgtggtgaaacctatatggcggcatggaacgtcagcggcctgggcaccttcggcgcgattcaaagtacccttaacgttacgctgtggtcgttcatcggtgtggaaagtgcctccgttgccgcaggtgtggtgaaaaacccgaaacgcaacgtccctatcgccaccattggtggggtattgattgccgccgtttgctatgtgctctccaccaccgcgattatggggatgatccctaatgccgcactgcgcgtttctgcctcgccattcggtgatgccgcacggatggcgttgggtgacaccgccggggccattgtttccttctgcgcagctgcgggttgcttaggttcactgggcggctggacgttgctggcgggtcaaacggcgaaagccgctgccgatgacggactgttcccaccgatttttgcccgtgtaaataaagcgggtacgccagtggcagggctgattatcgtcggtattttgatgaccatcttccagctcagtagcatttcgccaaacgcgactaaagagttcggtctggtgtcttccgtgtcggtcatctttacactggtgccatatctttacacctgtgcggcgttactgctgctcggccacggtcactttggtaaagcacgcccggcatatctggcagtgactaccattgccttcctctactgcatctgggccgtggtcgggtccggggcgaaagaggttatgtggtcatttgtcaccctgatggtaatcaccgccatgtatgcgctgaattacaaccggctgcataaaaacccgtatcccttagatgcaccaataagcaaagattaa

SEQ ID NO: 263044 - DNA, 762 bp, Klebsiella pneumoniae
atgaggatttgcagcgaccaaccttgtattgttttattgactgaaaaagatgtctggataagggtgaatgggaaagaacctattagccttaaagctaaccatatggcgttattaaattgtgaaaataatattatcgacgtctcctctcttaataacactttggttgctcatattagtcacgacatcatcaaagattacctccggtttctgaataaagatctctcgcaaataccagtatggcaacgtagcgctacgcccatcctcactctgccatgcctgacgccagacgtctttcgcgttgccgcgcaacatagcatgatgcccgctgaaactgagtcagaaaaggaacgaacacgtgcattattattcactgtgctatcccgttttctcgacagtaaaaaattcctttcactaatgatgtatatgttacgtaattgtgtaagtgacagcgtttatcaaattattgaaagcgatatccacaaagactggaatcttagtatggtagccagttgtttatgtcttagcccaagtctgttaaagaaaaagctgaaaagcgaaaacaccagttatagccaaataatcaccacctgccgcatgcgttatgccgtaaatgaattaatgatggacggtaaaaatatctctcaggtatcacagtcctgcggctacaacagtacgtcgtactttatttctgtctttaaagacttctacggtatgacgcctctgcattatgttagtcagcacagagaacgcactgtcgcctga

SEQ ID NO: 263045 - DNA, 2271 bp, Klebsiella pneumoniae
atgatgaaagtattaattgttgaaagcgagtttctccatcaagacacctgggtcggtaacgccgttgagcgtctggcagatgctttaagccagcaaaatgttaccgtgattaaatccacctcctttgatgatggttttgccattctctcttcaaacgaagccattgactgcctgatgttcagctatcaaatggaacatccggacgaacatcaaaacgtcagacaattgatcggtaagcttcatgagcgccaacaaaacgtgccggtcttcctgttgggcgatcgggaaaaagccctcgccgcaatggaccgggatctgctggagcttgtcgatgaattcgcctggattctggaagataccgccgactttatcgccggacgcgccgttgccgcgatgacccgctaccgccagcagctgttgccgccactgttcagcgcgctgatgaaatatagcgacatccatgaatattcctgggcagcgccaggccaccagggtggcgttggttttaccaaaacacccgccggacgtttctaccatgactactatggtgaaaacctgttccgcaccgacatgggcatcgaacgcacttccctcggttctttgcttgaccatactggcgcatttggcgaaagcgaaaaatatgccgcacgcgtatttggtgccgatcgctcctggtcggtagtcgtcggtacttccggctctaaccgcaccatcatgcaggcttgcatgaccgataacgatgtcgtggtcgttgaccgtaactgccataaatccatcgaacaaggcttgatgctgacaggcgcgaaaccggtctacatggtgccaagccgcaaccgctacggcattatcgggccaatctatccgcaggaaatgcaacctgaaaccttgcagaagaaaatcagtgaaagcccgctgactaaagacaaagccgggcaaaaaccgtcttactgcgtggtgaccaactgcacctatgacggcgtgtgttataacgctaaagaagcgcaggatctgctggaaaaaacctccgatcgtctgcactttgacgaagcctggtacggctatgcacgtttcaacccgatctatgccgatcactatgccatgcgcggcgaacctggcgatcacaacggccctaccgttttcgccacccactccacccacaaactgctgaatgcgctgtcacaggcctcttatattcatgtacgtgaaggtcgtggggcgattaacttctcccgcttcaaccaggcctacatgatgcatgccaccacctccccgctgtatgccatctgcgcatccaacgacgtggcggtgtcgatgatggacggcaacagcggcctgtcactgactcaggaagtgatcgacgaagcggttgatttccgtcaggcgatggcgcggctgtataaagagttcaccgctgacggtagctggttcttcaaaccgtggaacaaagaagtcgtcaccgacccacaaaccggcaaaacctatgactttgctgacgcaccaaccaaactgctgaccaccgttcaggactgctgggtcatgcatccgggcgaaagctggcacggcttcaaagatattccggataactggagtatgctcgacccaattaaagtcagcatccttgctccgggaatgggtgaagatggtgaactggaagaaaccggtgttccggcggcgctggtcactgcctggcttggtcgccacggcattgtgcctacccgcaccactgacttccaaatcatgttcctgttctctatgggcataacccgtgggaaatgggggactctggttaacaccctttgctccttcaaacgccactatgacgccaacacaccgctggcgcaggtgatgccggaacttgttgaacaatatcctgacacttacgcgaacatggggattcacgatctgggtgacaccatgtttgcctggctgaaagaaaacaaccctggcgcacggttgaacgaagcctattccggcctgccggtggcggaaatcaccccacgtgaagcgtacaacgcgattgtcgacaacaatgtcgaactggtatccattgaaaatctgccaggacgcatcgcggcaaactcagttatcccgtatccgccaggaatcccgatgctgctgtctggtgaaaacttcggcgataaaaacagtccgcaagtaagttatttacgctcgctgcaatcctgggaccatcatttccctgggtttgaacacgaaacagaagggacagaaattattgacggtatttaccacattatgtgtgtgaaagcgtaa

SEQ ID NO: 263046 - DNA, 342 bp, Klebsiella pneumoniae; identical to SEQ ID NO: 5920

SEQ ID NO: 263047 - DNA, 3228 bp, Klebsiella pneumoniae
gtggcgacattacgtgaactgattattaaaatctcggcaaattcccggtcattccagtcagagatctcccggtcttcgcgtatggggcaggattactaccgtaccatgcagaacggaggccgacagtccgctgctgcatcccgtgaaatgcggcgtgcactggcagaagtgacggatcagataaatacagctaaatcttcggcactgaacatggcgggggcatttgccggggcttttgctaccggtcatcttatttctctcgccgatgagtggaattcagtaaatgcccgtctgaagcaggcctcacagtccagtgatgattttcagtcatcacagcgtgaattaatggcgatcagccagagaacggggacggctttttctgataacgccagcctttttgcccgctctgcagcttccatgcgggagtatggttacagttctgaggaggtactgaaagtcaccgaggcgatctccacgggcctgaaattatccggtgccagtacagcagaagccagttcggtgatcacgcagttcagtcaggctctggcgcagggagtgctgcgcggtgaagagtttaactcggtgaatgagaacggcgatcgtgttattcgtgctctggctgcgggaatgggagttgcccgtaaggatctgaaggccatggcggataacggaaagttgaccgccgataaggttgttcctgcactgattagtcagcttggggcattacgtgatgaatatgcggcaatgcctgatacggtttcatcctctgcaaccaaagttgaaaacgcctttatggcctgggttggtggtgcgaacgaggcaagcggagtgacgaagacgctctccggtgtgctgaatggtattgcaggcaatattgacaccgtggcaaccgctgccggtgctctggttgccgtcggggtagcccgatattttggcaatatggcgtcgtctgctggatctgcaactgccggattaattactgcagccagaaacgaagtggctcttgctgaagcgcaacttcgggggacacagatagcaaccgccagggcgcgtgcggcggtttatcgtgcgcaacaggcggttgttgctgctcgcggtaccgaaaggcaggccgcagcagaagcgaagctgacagctgcccaggcgtcacttacccgtaatattgcggccagaacagcggcacagacaacgctgaatactgtcacgtcagtggggagtcgtctgttaagtggtgcgctggggttggttggtggtgtgccgggactcgtcatgctgggggcgacggcctggtacacgatgtatcagaatcaggagcaggccagagaatctgcacgccagtatgccgcaacaatcgacgaaattcgccagaaaacgtcggcaatgtcgcttcctgaagcgtcagataatgaggaaaagacgcggcaggcacttgatgagcaaaacaggttaattgacgagcagaaaagtaagattaaatccttacaggaaaaaattgctggctatcagtatgtgctggcaaacccgggctggacaaccgataacggttttatgattaaccacatgacgtcggtaaaaactgtcacagaagggcttgcagaagcaacaaatcaactggcagttgaacagtcccgtctcacacaaatgcagggcaaagcgcaatccattcaggatgtgcttgccgggctggaggagcgacgggtggcgttgatccgtcaacaggccgcggaacaaaacaaagcgtatcagtccctgttgatcatgaatgggcagcataccgagtttaatcgccttctcgggctcggtaatgaattacttcagcagcgacaggggctggtgaatgtaccgttacggctaccacaggcaaccctggatgataaacagcagactgcactgaataacagcgagcgcgaactggctctgtcccgcctgaagggggaagcccgtgagcgtgcccgcctgggttatgctgcggatgatctcggctttgtgggagaggcgtatcagacagccaggcagaattatatcaataactcactggatgcctggcgaaataaccaggcaaataaacccaaaacgcataaaaagaccgaagcggaaaaaacagaagatatttataaacggctgattaaacagcaaaaagaacaaatagcactggcagggcagaatactgaactggctaagatgaaatatcaggtcagtcagggcgaattatcaaccctgtcagaagcgcagaaaaaaacgcttttgcagaatgcagcactcatcgaccagaaaaagattcgtgagcagcttgctgcgtatgagagcagtctggcggacagtaatgccagtgcccgggcatctgacgaagcgcagttgctgggatatggtgaaggctcacggatgcgtgaacgactccaggaaatgtggagtatccggcaggcgtttgagcagaaaaataacgagctgctgagacagtatcaggccggagaaattgaagaagccctgtggaaacaggagaaagaactgaataaaaaatatctggaagagcgtctcagtgatcagcaggattattatgcaaaggccgatgctttacgtaataactggaatgccggactccaggagggactgaccaactgggcagacagtgccaccgattatgcttcacaggcggcagatgctgtcgtttccacgatggacgggctggtatcaaatatttccgatgcactggccgggaatgttgtggactggaggaactgggggagttcagttctccgggaagtttcaaaaattctgatgaatgcagccattgttaacggactgaaatcactctccggtgccggagggtggcttggtacggtcggcggatggatttcgggggcagtggcaaacgcaaaaggtggtgtttacacatcggcaaatctgagtgcttacagtaacactattgtggatacaccgacgtattttgcttttgcgaaaggtgccgggttgatgggcgaggccgggcctgaagcaatcatgccactgacacgggcagcggacggctctcttggggtcagggccattggaaatgtgaatggtggcggtggatttgtttattctcccctgtatcacatcagcattcagaatcaagggagcaatggcgagatagatgcgcgctcagccaggggactggtggatctgatcgacagcagggttgtgtcaattatgcagtcatcgcgtcgggatggaggattgtacagtgcctga

SEQ ID NO: 263048 - DNA, 279 bp, Klebsiella pneumoniae
atgatgctggcgctcaggatggggcgcacattgtcagagttacgccgggaaatgtccgcatcagaaatcatgatgtgggcagaatttgacaggttcagcccgctgggggacgaacgggctgatatccgggctgcccagattgtttcagctgtttacggtgcacagggggtcaaagtgccactgaatgatgcgcttcttcagtgggagaaggagcagacagaaggcgtatcagatccatttgctggactggaaaacgcgcttttaatagtgtctcagtga

SEQ ID NO: 263049 - DNA, 372 bp, Klebsiella pneumoniae
atgactaaaaatatccgtaatctggcactggcaacgatgtcggggtttcgccataaaactgttgatgtgcctgaatgggaaggggcaacggttgtattacgggaaccttctgcagaagcctggttgcgctggcaggagatcgttaaagcaaaagatgatgagacaccgttatccgttgcggagcgcgcccgccgaaatctggaagcggatgttgaactgttcatcgatgttctgtgtgataccggactgcaacctgtattttcagtggatgatcgtgaacaggtgattgccgtgtatggcccggtgcatgcgcggcttcttcggcagtctctggaactgatcagtgatgccggcgaggttaaaaaaaagtag

SEQ ID NO: 263050 - DNA, 705 bp, Klebsiella pneumoniae
atgtcctctaattttgagcgttcgcaactgacgaaaattatgatttcgtctgcaccggtaacagcagaaaccctggattctgccagctatcttggcctgagctgtacaatcaaagaggtgcagtttaccgcaggacaaaagcaggatattgatgtcaccacgctgtgttctgttgagcaggaaaatattaacggccttggggctgcttcagagatttccatgtcaggcaacttttatctgaatgctgcccagaacgcgttgcgcagtgcctatgacaatgacaccacgtatggctttaaagttatttttccgtcaggcaacggatttacctttatggcagaggtgcgtcagcatacctggtctgcaggaaccaatggtgttgtggctgcaacgttttccttgcgcctgaaaggtaaacctgtgctgacgacagagccgctgaaagtgaaggccgatttaaaaagcacgctgcgggttgcttccggagcgaaacttgaaatggcggttgaggctgcgggtggtgtgccgccttattcttatgtctggaagaaaggtggttctcctgtttccggacagacggcggcaacgttcagtaaggcatcggcagtatccggtgatgcgggtgcatatacctgcgagatttctgattcagcaagtcctgttaacaaggtgacctctacttcctgcactgttaccgtcagttaa

SEQ ID NO: 263051 - DNA, 345 bp, Klebsiella pneumoniae
atgagagaggccacactgtattccctgttgtctcagctggccggaggacaggtttatccttatgtggtcccactgacggatggaaagcctgcggtatctccgccgtggctggtgttttctgtggtgtctgacacggcatctgatgtgcttgatgggcaggctgaatccagaattaccgtgcagatcgatgtctgggcgacagtacctgatgacgcagataatattcgtgagcaggcgcttgatgcggtaagaaaactggcaccctccgttatttctaaaacgcagggttatgatcctgactcccgtctgagcagagccacgcttgaattccaagtaatagcctga

SEQ ID NO: 263052 - DNA, 447 bp, Klebsiella pneumoniae
atggatttcagtcttgatttttccggcctggcggatattgcacgggatttggagacgctcagcagggcagaaaacaataaggttctgcgcgatgccacccgtgccggtgctgaagttatgcgggatgcagttgttgaacgtgcgccggagcgaaccgggaaactgaagaaaaatgtggttgttctcactcagcgttcaaagcgtcggggggaaattatctcgggtgtccacattcgcggacggaacctgcgaaccggaaacagtgataacagcatgaaagccagcgatccccgaaatgcattttactggcgctttgtggagctgggaacgataaacatgcccgcgcatccattcattcgcccggctttcgatacgacagaggaactggcagcacggattgccatacagcgaatgaatcaggctattgatgaggtcttaagtaaatga

SEQ ID NO: 263053 - DNA, 339 bp, Klebsiella pneumoniae
atgcaggcgggcagattacgtgatcgcgtaattattctgaatgtcaccaccgcccgctctccgtcagggcatccggtggagacggtgacggagggagctaccgtatgggcagaagttaagggtatcagcgggagggagataatctcaggcggagcagaaaccgctcaggctacggtcagagtctggatgagattccggcgcgatgtgacagcgacttcacgtctgaaagtgctgaccggtgcatttaaaggggccattctgggtatagaaggtccaccaataccggatgcacgcgctacccggcttgaaatactctgcagcctgaaggggaatgtgtga

SEQ ID NO: 263054 - DNA, 318 bp, Klebsiella pneumoniae
atggcagcaatagtggaaaaactcagggcgcagtgccgtattgatacagatgatgcaactgatgatgagttactgatgctgtatttccgggctgcctgccgcaaggcagaaaattttatcaaccgtaagctttatgaggagacggtgccggaaggtgatcctgaaggggtgcttatagctgatgatgttttgctggcgctcatgttgctggtcgggcactggtacgaaaaccgggaaaattcctcagatgtcagcaaggcaccagtcccgtttggtttttcttctctgctggagccttatcgttttattcctttgtag

SEQ ID NO: 263055 - DNA, 1218 bp, Klebsiella pneumoniae
atgaaacttcatgagatgaagcaaaaacgaaacaccattgcaaaggatatgcgtgcactgcatgaaaaaattggtgataacgcatggactgatgagcaacgggcagagtggaacagggcgaaagctgagctggatgcgctggatgagcaaatcgcccgtgaagaagagttgcgccgtcaggatcaggcatatgtggatgagtccgggccggaagagcgccagaataatgaggcggagaacgggaaaaaggcggtggaagagaagcgcgctgcggcatttaaccgttttctgcgtgccggatttgcagaactgaatgctgaagagcgtaatctgatgcgtgaactgcgggctcagagtgtaacaacggattctcagggcggatatacggtgcccacgcagatgcgtaacaaaatcattgacaccatgaaggcttatggcgggattgccagtgttgcgcaacttctgaccacatcaaccgggcaggatatcacctggtcaacgtctgatggcacgactgaagagggcgaactgctggcggaaaatacagccgcaacggaacaggatgtgacgttcgggaccgctattctgggggctaaaaagctgtcatcaaaaataattcgtgtgtccaatgagctgctccaggacagtggggtggatattgaatcttatctggcaaaccgtattgcccagcgtattggtcgtggagaggcgaaatatctggttcaggggaccggaacgggatcaccgttacagccaaaagggctggcagcgtcggtgacgggaatcatccagactgcagcctctgccgctttcacctggaaagaaatgaatgccctgaaacatgccattgatccggcatatcgtggtgggccgaaataccgctgggcattcaatgatgccacattgcagactattgaagagatggaggatggacagaaacgcccgttatggctgccggatattgcaggcggtacgccggctactgtgctggggatcccttatgttattgatcaggctattgacgggattggtaccggaaaaaaattcattttcctgggggatttcaaccgctttatcattcgccgcgttacttatatggaactgaaacgtctggttgagcgttatgctgagtttgatcaggtggcatttctggctttccatcgttttgactgtgtgctggaagatgtggcagccatcaaggcgctcactggcaaataa

SEQ ID NO: 263056 - DNA, 600 bp, Klebsiella pneumoniae
atgaatgaccgtgaaacgcgctgttacagcggggaagtgcgggcagaacaatatgataatgccccgactcatattttggggtatggctcggtatttaacagtcgttcagaacctctgtggggatttcgtgaaatcatcaagccgggggcttttgacgacgtgctgaatgatgatgtacgtggattgtttaatcatgatcctaatttcattctcggacgaagttctgccggcacgttgtcattatcagtggatgaacgtggtttgcgttacgacattgttgcaccggatacgccgacgatttgtgacctggtgctgtcaccaatgttgcgtggtgacattaatcagtcctcgttcgcgtttcgcgtcgctcgtgatggagagagctggtatgaagacgacgaggggattgttatccgggaaatcacgcgcatttctcgtctgtatgacgtcagcccggtgacatatccggcctatcaggacgcagactctggtgtccgctcaatgaaagcctggcaggaagcgcgggcgagtggtgcgctgaagaaagctgttaacgaacgaatggcgcgtgagcgtcttttgacccttcttaatgcataa

SEQ ID NO: 263057 - DNA, 1227 bp, Klebsiella pneumoniae
atgcttcttgatgctctgtttcgcagtgagcctctggaaaatccctcggttccggtaaccggagaggccgctgagacggataatatttttgcccgggatgtgtatgtcagtccggaaacgtccatgaggctggctgctgtctatgcctgtatttatgttatttcatccagtgtggctcagatgcccctgcatgtgatgcgaaaaacgaatgagcatgttcagccggcacgcgatcacccgttgttctggctcgttcatgatgaaccgaatgcctggcagaccagctataagtggcgggaactgaagcagcgtcatgtgctggggtggggcaatggttatacgtgggtgaaacgtaatcgtcgtggcgaggttaccagtcttgaatgctgtatgccatgggaaaccacgttacttaacactggagggcgtcatacctacggtgtgtataacgaagagggtgcatttgcggtaagtccggacgacatgatccatatcagggcgctgggaaacaatcagaaaatgggactgagtccgatcatgcagcatgctgaaaccattggtatgggaatgagtggtcagcagtataccagtgctttttttaacggtaatgcccgtcctgccgggattatttctgtgaaaaatgaactgaacgaacagagttggagcaggctcaagaatatgtggcagcgggcggtgacagcgcttcgcagtcaggaaaataaaaccatgctgctgcctgcgcaactggattaccgtgccctgacagtttctccggtggatgctcagatcattgatatgaccaagctgaaccggtcgatgattgccggaatttttaatgtcccggcgcacatgattaatgacctggaaaaagccacattttcgaatattacacagcaggcgattcagtttgttcgctacacgatgatgccctgggttgcgaactgggagcaggagcttaaccgtcgcctgtttacccgcacagaacgggctgccgggtattacgttcgtttcaaccttacaggattgctccgcgggactccacaggagcgtgcgcagttttatcactttgccattacagatggctggatgagccggaatgaagcgagggcatttgaggacatgaacccggttgatggtctggatgaaatgctggtcagcgtaaatgcagcaaatccgttgaatgattttaaagatacgaaaggcaaagaggaaaagaacgatgaatga

SEQ ID NO: 263058 - DNA, 1758 bp, Klebsiella pneumoniae
atggcaaaagtggctgacgggatccgctacgccgaacgtgttgttgcaggagaaattgttgctggcgaatttgtccgcctggcctgccagcgttttcttgatgatctgaagtacggcgaaaagcgggggatttatttcagtgaaccccgtgcgcagcacatcctgaatttctacaaatttgtgcctcatgtaaaaggggcactggcaggccagcccattgagttgatggactggcatgtatttatcctcattaatatttttggttttgtcattccgctggtcaatgaagaaaccggggaagttgtcatgcgcagcgatggcagcggacgtccggtgatggtgcgccggttccggacggcgtacaacgaagtcgcccgtaaaaacgcaaaatcaaccctgtcatcgggtatcggcctgtatatgacgggggcagatagtgaaggcggagctgaggtgtattcagccgcaaccacgcgtgaccaggccagaatcgtgtttgaagacgccaaaaatatggtcagaaaagcccggtcgacactcgggcggttgtttgatttcaacaagctggcgatttaccaggagcagagcgcatcaaaatttgaaccgctttcctcggatgcaaacaacctggacggtctgaacatccactgcgccattattgatgagctgcatgcacataaaacccgcgacgtgtgggacgttctggaaacggcaaccggtgcccgtctgcagtccctgttatttggtatcaccacggctggctttaacaaggaagggatttgttacgagcagcgtgattacgccatcaaggtattgcgaggctataacagcgacgtggagggcgctgtaaaagacgactcttactttgcgatcatttacacgctcgatgagggagatgatccgtttgatgaaacggtctggcagaaagcgaatcctggcctgggcatctgtaaacgctgggatgatctgcgtcgtctggcgaaaaaagcgaaggagcaggtctctgcgcgggtgaatttttttaccaaacacatgaatgtgtgggtcactgccgaatctgcctggatggatatgattaagtgggagaagtgcgaatacattgctccacaacatgagctgaaaacatatcccatgtgggtcggcgtcgaccttgctcataagattgatatctgtgcggcggcaaaactctggcgaaccgataacggacatgttcatgctgattttaaattctggcttccggaaggacggctggaacgatgctcgcggcagcaggcagaactttaccggaagtgggcggagatggataagctcatcctgacggatggtgatgttatcgatcatgctcagataaaaagtgacttactggaatggattggcggtgaaaacctcagggaactgggatttgacccgtggagcgcaatgcagttcagtctggcactggctgaagaagggataccgctggtggaggttccgcagacggtccgcaatctgtcagaggccatgaaggaaacggaatcactggtttatgccgggcgtttccatcacagcaatcatccggtcatgaactggatgatgtctaacgttactgtaaaaccggacaaaaacgacaacatcttcccgaataaatccacgccggaagccaaaatcgacggccctgttgcgctttttacagccatgagccgctttctggtaaatggcgggggcgtgaatgactttctgtccacgcttgatcctgatgaggacctgttaattctgtga

SEQ ID NO: 263059 - DNA, 483 bp, Klebsiella pneumoniae
atgtcaggacctccgaaaaccccgccacgcctgcatttgattcgaggcaacccctcaaagcgccccgttaaagaccacaaaaaaaccgctaaaaaggatgaaaaaggtcttcctaaaattccgcagcatttaggggctcaggggaagtactggttcaggcgaatggcggaagagctgaatgcggaagggatcatttctcagctcgatgcacgtgcgctcgagttactggtggaagcctacaccgaataccggcatcactgcgaaatactcgatgttgagggttatacctaccgcacgaaaacgcagaatggcgatgtgctgatcaaggcacacccggctgctgcgatgaaggctgatgcctggaagcggatccgggcgatgcttgcagaatttggtatgtcaccggcaagccgggcaaaagtaaataccgccggaccggataatgttgatccgctggcagagcttttaaaagcgagagactga

SEQ ID NO: 263060 - DNA, 351 bp, Klebsiella pneumoniae
atgccatcacgaatcccacgcgcctgccgtaagcgtggatgtgcaggtacaaccacagacagttctggttactgcgataaacatcgtggcgaaggatgggtacagcatcaacgcggactgagccgccaccagcgtggctatggctcgaaatgggatgccatacgtgcgcgcatactgaagcgtgataatcatctgtgtcagaactgcctgcgcaatgggagagccgttgaagccagaactgtggaccacatcattccgaaagctcatggtggcacggatgcagacagtaacctgcagagtctgtgctggccctgtcataaagcaaaaacagcgcgcgaacgcatcaattga

SEQ ID NO: 263061 - DNA, 309 bp, Klebsiella pneumoniae
atgcagcagcgtcagcgtgatgttgctgcgctcgatgcaaagtactcgagagaattagccaatgcgcaagctgaaaatgaaactctgcgcgctgatgttgccgctggccgtaagcgcctgcgggtcaatgccagttgctccgcagccgtgcgtgaagccaccggacccaccagcgtggataatgcaaccatcccccgactggcagacaccgctgaacgggattatttcatcctcagagaccgattgatgacgatgcagatgcaactggaaggggcgcaggaatatatccgcactcagtgcattaagtag

SEQ ID NO: 263062 - DNA, 243 bp, Klebsiella pneumoniae
atgaaaaaagttctgtatggcatttttgccatatctgcgcttgcggcgacttctgcgtgggctgcacctgtacaggtgggcgaagcggcagggtcggcagcaacgtcggtttcggcggggagttcctccgcgaccagcgtcagcaccgtaagctcggcggtgggtgtcgcgctcgcggcaaccggtggcggtgatggttctaataccgggaccacaacaaccacgaccaccagtacccagtaa

SEQ ID NO: 263063 - DNA, 639 bp, Klebsiella pneumoniae
gtgaagcgacctgcactcattcttatctgcctgctattacaggcctgttcagccacgactaaagagctgggcaattcgctgtgggacagtctgttcggcacgccaggcgtacagctgacggacgatgatattcaaaatatgccctacgccagccagtacatgcagcttaatggcgggccgcaattgtttgtggtgctggcctttgctgaagacggacaacaaaaatgggtcactcaggatcaggccactctcgtcacacaacatggtcgtctggtgaagactttgcttggcggcgacaacctgattgacgtgaataaccttgccgccgacccgctgattaaacccgcacaaattgttgatggtgcaacatggacgcgcacgatgggctggaccgagtaccagcaggtacgctacgccaccgcacgctcagtcttcaaatgggatggcaccgataccgtcaaagtcggcagcgatgaaactccggttcgcgtgctggacgaagacgtctccaccgaccaggcgcgctggcataaccgctattggatcgacagcgaagggcaaattcgccagtcggaacagtatctcggcgcggattatttcccggtgaaaaccactctcatcaaggcggcaaaacaatga

SEQ ID NO: 263064 - DNA, 738 bp, Klebsiella pneumoniae
atgattaaacaaactattgtcgcattgattttgagtgtgggggcgtcatcggtcttcgcggcgggaaccgtcaaggtattcagcaatggcagcagtgaggccaaaacgctgacgggggcagagcatttaatcgatctggtaggccaaccgcggctggcaaacagttggtggcccggtgcggtgattagcgaagagctggcaacggcggcagcattgcgtcagcagcaggcgttgctgacacggctggcagaactagccgcagattccagcgctgacgatgccgccgccattaacgccttacgccagcaaattcaggcgttgaaggtgacgggcaggcaaaaaatcaatcttgatcccgatatcgtccgcgttgctgaacgcggtaacccgccgttgcagggcaactacacgctgtgggtcggaccaccgccgtccacggtcacgttattcgggcttatcagccgtcctggcaagcagccattcactccaggtcgcgacgtcgcaagctatctctccggccagaacctgcttagcagtgcggatcgcagctacgcgtgggtggtttacccggacggacgcacgcaaaaagcgccggtggcttactggaacaagcgtcacgtagagccgatgcccggcagcattatttatgttggcctcgcggactccgtctggagtaagacgcctgatgccctgaacgccgacattcttcagactctgacgcagcggataccccaataa

SEQ ID NO: 263065 - DNA, 2097 bp, Klebsiella pneumoniae
atgaaaaaaagacatctgcttagcttactggcgctgggcattagcacagcttgctacggcgaaacatatcctgcgcccattggtccgtcgcagtcggatttcggtggcgtaggattattacaaacgcccaccgcacgtatggcacgggaaggggagctgagcctgaactatcgcgataacgatcagtaccgttattactcagcttcagtgcaactcttcccgtggctggaaacaacgctgcgctacaccgacgtgcgcacccggcagtacagcagcgtcgaagcgttctctggcgatcaaacgtataaagataaagccttcgatctcaaactgcgtttgtgggaagagagttactggctgccgcaagtggcggttggtgcgcgggatatcggcggtacggggctgtttgatgcggaatatcttgttgccagcaaagcctgggggccgttcgattttacgctcggcctgggatggggatatctgggcaccagcggtaatgtgaaaaatccgctctgttcagccagtgataaatattgctatcgcgataacagctacaaacaggcgggatctatcgacggtagccagatgttccacggtcctgcctcactgtttggcggcgtggaataccagacgccctggcaaccgctgcgcctgaaactggagtatgaaggcaataattatcagcaggattttgccgggaagctggagcaaaaaagtaagtttaacgtcggggcgatttatcgcgttaccgattgggccgacgttaaccttagctatgaacgtggcaacacctttatgtttggcgtcacgctgcgcaccaactttaacgatctgcgcccgtcctacaacgataacgcccgcccgcaatatcaaccgcagccgcaggatgccattttgcagcattcggtggtggcaaatcagttaacgctgttgaaatacaacgccggactggccgatccgcagatccaggcgaaaggcgatacgctgtatgtcaccggcgagcaggtgaaatatcgtgattcgcgcgaagggatcatccgtgctaatcggatcgtgatgaacgatctgccggatgggatcaaaacgatccgcattacggagaatcgccttaacatgccgcaggtgacgacggaaaccgatgtcgccagcctgaaaaatcatcttgccggagagccgttgggccacgaaacgacgctggcgcaaaaacgcgtcgagccagtggttccgaagtccaccgagcagggctggtatatcgacaaatcacgctttgatttccatatcgatccggtgctgaaccagtcggtcggtggcccggaaaacttttacatgtatcagctgggcgtgatgggaacggcagatttgtggctgacggaccatctgctgaccactggaagcctgtttgcaaatcttgccaacaactacgacaagtttaactacactaatccaccgcaggactcgcacttaccgcgcgttcgtacccatgtgcgcgagtatgtgcagaacgatgtctatgtgaataacctgcaagccaactacttccagcatctgggcaacggcttctacggtcaggtctacggtggttatctcgaaaccatgtttggcggtgcgggggcagaagtgttgtatcgcccgctggacagcaactgggcgtttggtctggatgccaactacgttaaacagcgcgactggcgtagcgcaaaagatatgatgaaattcaccgactacagcgtgaaaaccggacatctgaccgcatactggacgccatctttcgctcaggatgtgttagtgaaagcgagcgtcgggcagtatctggcaggggataaaggcggcacgctggagatcgccaaacgctttgatagcggcgtggtggtgggtggctatgccacgatcaccaatgtttcgaaagaggagtacggcgaaggggacttcaccaaaggcgtgtatgtctctgtaccgctggatctcttctcgtctggcccgacacgcagccgtgcggcaattggctggacgccgctgacgcgtgacggtggtcagcaacttgggcgtaagttccagttgtatgacatgaccagcgaccgtagcgtcaatttccgctaa

SEQ ID NO: 263066 - DNA, 411 bp, Klebsiella pneumoniae
atgacgtcactctctcgtccgcgcgtggagtttatctccaccattttgcagaccgtactcaatcttggcctgctgtgcctcggcctgattttggttgtcttcctcggcaaagaaacggtgcatctggctgatgtgctgttcgcgccagaacaaaccagcaaatatgagctggtagaagggctggtggtttactttctctatttcgaatttatcgcgctgattgtgaagtactttcagtccggttttcacttcccgctacgttactttgtctatattgggatcaccgccattgtgcgcttgatcatcgtcgatcataaatcgccactggatgtgttgatctactcggcagcgatcctgttgctggtgatcaccctgtggttatgtaattcgaaacggttgaagcgggagtaa

SEQ ID NO: 263067 - DNA, 1116 bp, Klebsiella pneumoniae
atggcgagcgtacagctgcaaaatgtaacgaaagcctggggcgaggtcgtggtatcgaaagatatcaatctcgatatccatgaaggtgaattcgtggtgtttgtcggaccgtctggctgcggtaaatcgactttactgcgcatgattgccgggcttgagacgatcaccagcggcgacctgttcatcggtgagaaacggatgaatgacactccgccagcagaacgcggcgttggtatggtgtttcagtcttacgcgctctatccccacctgtcagtagcagaaaacatgtcatttggcctgaaactggcaggcgcaaaaaaagaggtgattaaccaacgcgtcaaccaggtggcggaagtgctgcaactggcgcatttgctggatcgcaaaccgaaagcgctctccggtggtcagcgtcagcgtgtggcgattggccgtacgctggtggccgagccaagcgtatttttgctcgatgaaccgctctccaacctcgatgctgcactgcgtgtgcaaatgcgtatcgaaatctcccgtctgcataaacgcctgggccgcacaatgatttacgtcacccacgatcaggtcgaagcgatgacgctggccgacaaaatcgtggtgctggacgccggtcgcgtggcgcaggttgggaaaccgctggagctgtaccactatccggcagaccgttttgtcgccggatttatcggttcgccaaagatgaacttcctgccggtaaaagtgaccgccactgcaatcgatcaagtgcaggtggagctgccgatgccaaatcgtcagcaagtctggctgccggttgaaagccgtgatgtccaggttggagccaatatgtcgctgggtattcgcccggaacatctactgccaagtgatatcgctgacgtcatccttgagggtgaagttcaggtcgtcgagcaactcggcaacgaaacccaaatccatatccagatcccttccattcgtcaaaacctggtgtaccgccagaacgacgtggtgttggtagaagaaggtgccacattcgctatcggcctgccgccagagcgttgccatctgttccgtgaggatggcactgcatgtcgtcgactgcataaggagccgggcgtttaa

SEQ ID NO: 263068 - DNA, 921 bp, Klebsiella pneumoniae
atgaaaatgaataaaagtctcatcgccctctgtttatcagcagggttgctggcaagcgcgcctggaatcagccttgccgatgttaactacgtaccgcaaaacaccagcgacgcgccagccattccatctgccgcgctgcaacaactcacctggacaccggtcgatcaatctaaaacccagaccacccaactggcgactggcggccaacaactgaacgttcccggcatcagtggtccggttgctgcgtacagcgtcccggcaaacattggcgaactgaccctaacgctgaccagcgaagtgaacaaacaaaccagcgtatttgcgccgaacgtgctgattcttgatcagaatatgaccccatcagccttcttccccagcagttatttcacctaccaggaaccaggcgtgatgagtgcagatcgtctggaaggcgttatgcgcctgacaccggcgttggggcagcaaaaactttatgttctggtctttaccacggaaaaagacctccagcagacgacccaactgctcgacccggctaaagcctatgccaaaggcgtcggtaactcgatcccggatattcctgacccggttgctcgtcataccaccgatggcttactgaaactgaaagtcaaaacgaactccagttccagcgtgttggtcgggccactatttggttcttccgctccagctccggttacggtaggcaacacggcggcaccagctgtggctgcacccgctccggcaccggtgaagaaaagcgagccgatgctcaacgacacggaaagttattttaataccgcgatcaaaaacgctgtcgcgaaaggtgatgttgataaggcgttaaaactgcttgatgaagctgaacgcctggggtcaacatctgcccgttccacctttatcagcagtgtaaaaggcaaggggtaa

SEQ ID NO: 263069 - DNA, 567 bp, Klebsiella pneumoniae
atgaacatgacaaaaggtgcactcatcctcagcctttcatttttgcttgccgcatgtagttcaattccgcaaaatatcaaaggcaataaccaacctgatattcaaaaaagttttgttgctgttcataaccagccggggttatatgttggtcaacaagcgcgctttggtgggaaggttatcaacgttatcaatggcaaaacggatacgttgttagaaatcgctgtattaccgttggatagctatgcgaagcctgatattgaagccaactatcagggccgactgctcgccagacaaagcggcttccttgatccagtgaactatcgtaatcactttgttaccatcctcggtaccattcagggtgaacaacctggctttatcaataaagtcccgtataacttcctcgaagtgaatatgcagggcatccaggtgtggcatttgagagaagtggttaataccacctataacctgtgggattacggctatggtgcattctggccggaaccgggctggggcgcgccttactacaccaatgcggtgagtcaggtaacacctgagctggtcaaataa

SEQ ID NO: 263070 - DNA, 531 bp, Klebsiella pneumoniae
atgtttcttataattaccagggatacgatgttcttcactgcgatgaaaaacattctgagtaaaggtaatgtcgttcatatacagaacgaagaagagatcgacgtaatgttgcatcagcatgccttcgtcattattgatacattaatgaataatgtatttcattctaatttgctcactcaaattgaacgattaaaacctgtccatgtgattattttctccccctttaatattaaacgctgcctggggaaagtaccggtgacctttgttccgcgaactatcaccatcatcgactttgtcgcactcatcaatggcagttactgctctgtgcctgaagcggatgtgtccctttcgcgcaagcagcatcaggttctgagctgcattgcgaatcaaatgacaacggaagatattctggagaaactgaaaatatcgctaaaaacgttctactgccataaacacaatatcatgatgatcctcaatcttaagcggatcaatgagttggtacgccatcagcatattgattatctggtgtga

SEQ ID NO: 263071 - DNA, 1029 bp, Klebsiella pneumoniae
atgaaccactacacacgctggcttgagttaaaagaacaaaatcccggaaagtacgcgcgtgacatcgcaggtttaatgaatattagcgaagcagaactggcatttgcacgcgtcacgcacgatgcgtggcggatgcgcggcgatatccgtgacattctggcggcgctcgaaagtgttggcgagaccaaatgtatttgtcgtaatgaatatgcagtccatgagcaagttggtgcgttcacaaaccagcatttgaacggacatgccggattgatcctcaatccacgcgcgctggatttgcgtctgtttctcaatcaatgggccagtgtttttcacattaaagaaaatacgactcgtagcgaacgccagagtattcagttctttgatcatcagggcgatgcattactaaaagtttatgccaccgacaataccgatatggcggcatggagtgagcttctggcacggtttatcgccgatgagaatacgccgcttgagttaaaagccggtgatgcgccagtcgttcaaatgcgagccgatgccagtgtggttgagcaagagtggcgggcgatgaccgacgttcatcagttttttacgttgctcaagcgccacaacctgacgcgccaacaggcgttcaatctggtggcagacgatttggcctgcaaagtatccaacagtgcgttggcgcaaattcttgaatctgcacagcaggatggcaatgaaatcatggtgtttgttggcaaccgtggctgcgtacagattttcactggcgtggtagaaaaagtggtgccaatgaaaggttggctgaatatttttaacccgacgtttactcttcatctattagaagagagcattgctgaaacctgggtaacccgtaaacctgctagtgacggttatgtgaccagtctggaattgtttgcccatgatggtacgcagatagcgcaactttatggtcaacgtacagaaggcgaacaggagcaagcgcaatggcgtaagcaaattgcttcgctgataccggaaggcgttactgcataa

SEQ ID NO: 263072 - DNA, 1983 bp, Klebsiella pneumoniae
atgtcacgtccgcaatttacctcgttgcgtttgagtttgttggctttggctgtttctgccaccttgccaacgtttgcttttgctactgaaaccatgaccgttacggcaacggggaatgcccgtagttccttcgaagcgcctatgatggtcagcgtcatcgacacttccgctcctgaaaatcaaacggctacttcagcctccgatctgctgcgtcatgttcctggaattactcttgatggtaccggacgaaccaacggccaggatgtaaatatgcgtggctatgatcatcgcggcgtgctggttcttgtcgatggtgttcgccagggaacggataccggacacctgaatggcacttttctcgatccagcgctgatcaagcgtgttgagattgttcgcggaccttcagcattactgtatggcagtggtgcgctgggtggagtgatctcctacgatacggtcgatgcaaaagatttattgcaggaaggacaaagcagtggttttcgtgtctttggtactggcggcacgggggaccatagcctgggattaggcgcgagcgcgtttgggcgaactgaaaatctggatggtattgtggcctggtccagtcgcgatcggggtgatttacgccagagcaatggtgaaaccgcgccgaatgacgagtccattaataacatgctggcgaaagggacctggcaaattgattcagcccagtctctgagcggtttagtgcgttactacaacaacgacgcgcgtgaaccaaaaaatccgcagaccgttgaagcttctgatagcagcaacccgatggttgatcgttcaacaattcaacgcgatgcgcagctttcttataaactcgccccgcagggcaacgactggttaaatgcagatgcaaaaatttactggtcggaagtccgtattaatgcgcaaaacacggggagttccggcgagtatcgtgaacagataacaaaaggagccaggctggagaaccgttccactctatttgccgacagtttcgcttctcacttactgacatatggcggtgagtattatcgtcaggaacaacatccgggcggcgcgacgacgggcttcccgcaagcaaaaatcgattttagctccggctggctacaggatgagatcaccttacgagatctgccgattactctgcttggcggaacccgctatgacagttatcgcggtagcagcgacggctacaaagatgttgatgccgacaaatggtcatctcgcgcggggatgactatcaacccgactaactggctgatgttatttggctcatatgcccaggcattccgcgccccgacgatgggcgaaatgtataacgattctaagcacttctcgattggtcgcttctataccaactattgggtgccaaacccgaacttacgtccggaaactaacgaaactcaggagtacggttttgggctgcgttttgatgacctgatgttgtccaatgatgccctggaatttaaagccagctactttgataccaaagcgaaggattacatctccacgaccgtcgatttcgcggcggcgacaactatgtcgtataacgtcccgaacgccaaaatctggggctgggatgtgatgacgaaatataccactgatctgtttagccttgatgtggcctataaccgtacccgcggcaaagacaccgataccggcgaatatatctccagtattaacccggataccgttaccagcaccctgaatattccgatcgctcacagtggcttctctgttgggtgggttggtacgtttgccgatcgctcaacacatatcagcagcagttacagcaaacaaccaggctatggcgtgaatgatttctacgtcagttatcaaggacaacaggcgctcaaaggtatgaccactactttggtgttgggtaacgctttcgacaaagagtactggtcgccacaaggcatcccacaggatggtcgtaatggaaaaattttcgtgagttatcaatggtaa

SEQ ID NO: 263073 - DNA, 915 bp, Klebsiella pneumoniae
atgccaaggatcatcaccaggccgtttcttttttccccactgacgttatgtatttcagccgtggcctctgccgcgaagaccgcggtaaaacgaaaaaaattgtttacggcagtactggctcttagctgggcttttagcgtaacggctgccgaacgtatcgtggtcgcaggaggatcgctgacggagctaatctacgcgatgggcgctggcgaacgcgtggttggtgtcgatgaaacgacatcttatccaccagaaaccgccaaactgccgcatattggctactggaaacaactcagcagcgaaggcattttgtcacttcgcccggatagcgtaattacctggcaggatgccgggccacaaattgtgctcgaccaattacgagcgcagaaagtcaacgtcgtcaccctgccgcgtgtgcctgccacccttgagcagatgtacgccaacattcgccaactggcaaaaacgctacaggttcctgaacaaggcgaggcgctggtgacacagatcaaccaacgcctggagcgagtacagcaaaacgtggcggccaaaaaagccccggttaaagccatgtttattctctccgcaggcggaagtgcgccacaggttgccggtaaaggcagcgtcgcggacgccattctttcgcttgccggagcagaaaacgtcgcaacctaccagcagtacaaaagctacagtgcagaatcactgattgcggccaatccagaagtgattgtcgtaacctcacaaatggtcgatggcgatattaatcggctacgttctattgccggaattacccacactgccgcatggaaaaaccagcgcattatcaccgttgatcaaaacctgattctgggaatgggtccgcgtattgctgatgtcgttgagtctttacaccagcagctttggccgcaataa

SEQ ID NO: 263074 - DNA, 1260 bp, Klebsiella pneumoniae
atgatgccgtttcgtggggccattccggttgccaaagagcaactggcacagacctggcaagagatgctcaatcaaacggtatcaccacgtaagcgactggtttatctacacattcctttttgtgcaacacactgcacgttttgtggtttttatcagaaccgttttaatgaagatgcgtgtgctcattataccgacgccctgattcgtgaaatagaaatggaagcggacagcgtattgcatcagtctgcccccatccacgcggtctatttcggtggcggcacgccttccgcgctttctgcacacgatttagccagaattatcaatatattacgagaaaagctgccactggcccctgattgtgaaatcactatcgaaggccgggtactgaattttgacgctgagcgaatcgatgcttgtcttgatgcaggagcaaaccgcttctcaattggtatccagtcgtttaacagcaaaatccgcaagaaaatggcccgcacctcggatggcccaaccgccattgcgtttatggaaagcctggtcaaacgtgaccgtgctgcggtggtctgtgacctgctgtttggcctgccgggtcaggatgcgcaaacctggggagaagatctggctattgcccgcgatatcggtctcgacggcgtcgatctctatgcgctcaatgtcctgcccaatacaccgctgggcaaagccgtggaaaatgggcgtactaccgtgccctctccggcagaacgtcgcgatctttatctgcaagggtgtgattttatggacgatgccggttggcgctgcatcagtaacagccactggggccgtaccacacgcgaacgcaatctctataacctgctgattaaacaaggtgccgattgtctggcctttggttccggagccggcggttcgattaatggttactcctggatgaacgaacgcaatcttcagacctggcatgaatccgtcgcggcaggcaaaaaaccgctgatgatgatcatgcgtaacgccgaacgtaatgcgcaatggcgtcataccttgcagtcaggtgttgaaacagcgcgtgtaccgctggatgaacttacgccacatgccgaaaaactcgcgccgttactggctcaatggcaccaaaaaggcttaagccgcgatgcgtcaacttgcctgcggctgactaatgaaggtcgtttctgggcaagcaatattttgcagtctcttaatgaactaattcaggtactaaatgcgccagcgattgtgcgtgaaaaaccataa

SEQ ID NO: 263075 - DNA, 495 bp, Klebsiella pneumoniae
atgagccatgtctcgttacaagaatttttgaaaacggagccggacggtacgctggaggtggtagccgaacaatacaacaccacactgctggaagtagtgaaaaacctgccctcctcaaccatagtgtcaggcgataaattcgatactgtctgggataccgtctgcgaatggggcaacgtcaccacgttagtacatactgccgatgttatcctcgaatttagcggcgaactgccttcgggtttccaccgccacggctatttcaacctacgcggaaagcacggcatgtccgggcatatcaaagcagaaaactgcacacatattgccttgatcgaacgtaaatttatgggcatggacaccgcatccattctctttttcaacaaagaaggcagcgcaatgctgaaaatcttcctcggcagggatgaccatcgtcagctcctgagcgaacaagtcagcgccttccatgctctggcagcatcgttaaaggaacacgcctga

SEQ ID NO: 263076 - DNA, 624 bp, Klebsiella pneumoniae
atgacgccgtggctactctttggcgcaggcggaaaaggtgtgggtgccagaacgcttgaactggcgctggcggaacaacgtccggtcgttgctgtcgttcgtcatgctgatgccgccacgaaactggcgcaacaaggcgtacaggtttttacaggcgacgcctgtgatgccagcgtagtcgcggctgcttgccgcgcagctggccaggatgcgcttatcatctcaacaatgggcggaactcaggattatctggcacacagaacagtgattgatgaggccgaaaaggccggcatcagtcgcatgattctggtgacctctttgggatgtggcgatagctggccgtttttatcggagcgggcaaaggctgcgtttggtcaggcggtacgggaaaaaacgctggcggaaagctggttgcaaaccagccagcttgattacgccattctccgccctggcggtctgcttgatggggcggcaacgggcaaagcacaacggatacaaaatcaggagtgtcatggttttgttcaccgtgccgatgtcgccgcacatatccatgaactggcaaatgcgccagcacttaaccagcaggtctacagtctgattgaaccggacctgaaaccggcgtga

SEQ ID NO: 263077 - DNA, 957 bp, Klebsiella pneumoniae
atggggctatcactattattgctagctctggtgctgttcggtgccagtcagggagcgttaaggatcagttttgatgctctttttgatgaggaataccgtgatatctggctcaatattcgtctaccacgggttttgctggcggtgctggtaggtgcagcgttggcaaccgccggggtaattatgcaggggctttttcgcaacccaatggctgacccaggattacttggcgtcagtagcggttctgcattaatggttggcgttgctattgtgctgcccttctccttcccagtggtgctggtgctctatgagcaaatggtgtttgccatcgccggaagtttagtggtctgtaccatcatttttctcatcacgcagcgccatcgcgatggcagcatgatgcaattgttactcgccggtatcgccatcaatgccctgtgcggcgcagcgatcggcatcctgagctatatcggcgatgagcaacagctacgacaactcacgttgtggatgatgggcaatctcggtcaggcgcaatggccaacgttattggttgccagttccttcattctgcccgccattatggcaacaacgtgtctcgccggaacgctgaatttgctgcaacttggtgatgaagaagcccattacctcggcgtgaacgtaaagcgtaaacgccaacaattactgttgattagctcactgctcgttggtgccgccgtatcggtaagcggcattatcggctttattggcctggtgatcccgcatctgattcgtatgactaccggggcaaatcaccgctggctaatcccttgctccgccctcgccggagcctgtttattgctgatggcagacacgcttgcccgcacgctggtacagccagcagaaatgcccgtgggattattaaccagcctgcttggcggtccttattttatgtggttgattctgcgcaaccggaggatcacatga

SEQ ID NO: 263078 - DNA, 771 bp, Klebsiella pneumoniae
atgatcagcgcccagaatctggtttatagccttcaggggcggcgtctgactgacaatgtctcgctgacttttcccggtggggaaattgttgccattctcggccctaatggtgcgggaaaatctacgctgcttcgccagttaaccggctatcttcaacctgatagcggcgaatgtcggttgtttaataagccattaaatgaatggtcgattactgaactggcgaaacaccgggccgtgatgcgtcaaaatagccacatggcgtttccattcagcgtacaagaagttatccagatggggcggcatccgcatcgcactggtaatcaggataatgaaacagcacaaataatggcgttatgtgactgtcaggcgttagcaaaccgtgactatcggcaattatccggtggtgaacaacagcgcgtgcaattagcgcgcctgctggtgcaactctgggaacctactccctcaccgaaatggttatttcttgatgaaccaacttcggcgctggatattcaccatcagcagcacttgtttcgtttattacgccagctagttcacgaacggcagttcaatgtttgctgcgtattgcacgatctaaatcttgccgcgcgttatgcagaccgtgttgtattaatgcaaaaaggaaaggttatcgcaaatggtaaaccacaggacgtattgacacagcaggcgctgaccatgctttacggcgcggatattaccgtacttaaagatcctgccagccattcacccctgatcgtcctcgatcattaa

SEQ ID NO: 263079 - DNA, 576 bp, Klebsiella pneumoniae
atgcgcggcaaaggagcagggttacgcacacatgtattaattggcatgggaagcgccctgtttatgattgtttcgaaatatggttttgctgacgtgctgtctttaaatcacgtcggactggaccccagccgtattgctgctcaggtggtgacgggcgtcgggtttatcggcgcaggtaacattctcgttcgtaaccaaaatattgtaggtctgacgacggcagcggatatctgggtgaccgccgccattggtatggttattggtagcggtatgtacgaactgggcatttatggttcagtgatgaccttgctggtgctggaagtcttccatcaattaaccttccgcctgatgaacaaaaattaccatttacagctgacattagtgaacggtaatacggtatcaatgctcgactggtttaagcagcaaaaaataaaaactgatttagtttcgttgcaggaaaatgaagatcatgaagtggtcgccattgatatccagcttcatgccacaacgtcgatagaagacctgttgcgattattaaaaggtatggcaggggtgaaaggcgtttcaattagctaa

SEQ ID NO: 263080 - DNA, 339 bp, Klebsiella pneumoniae
atgggttacaaaatgaatatttcatctctccgtaaagcgtttatttttatgggcgctgtagcggctttgtcactggtgaacgcacaatctgcgctggcagccaatgaatccgctaaagatatgacctgccaggaatttattgatctgaatccaaaagcaatgacaccggttgcatggtggatgctgcatgaagagacagtatataaaggtggcgataccgttactttaaatgaaaccgatctcactcaaattcctaaagtgatcgaatactgcaagaaaaacccgcagaaaaatttgtataccttcaaaaatcaagcatctaatgacttgccgaattaa

SEQ ID NO: 263081 - DNA, 333 bp, Klebsiella pneumoniae
atgaaaaaagtattaggcgttattcttggtggtctgcttcttctgccagttgtgagcaatgcagcggatgcgcaaaaagcagccgataacaaaaaaccggtcaactcctggacctgtgaagatttcttggctgtggacgaatccttccagccaactgcagttggttttgctgaagcgctgaacaacaaagataaaccagaagatgcggttttagatgttcagggtattgcaaccgtaaccccagctatcgttcaggcttgtactcaggataaacaagccaactttaaagataaagttaaaggcgagtgggacaaaattaagaaagatatgtaa

SEQ ID NO: 263082 - DNA, 573 bp, Klebsiella pneumoniae
atgttatatatagataaggcaacaattttgaagtttgatctggagatgctgaaaaagcatcgcagagcaatccagtttattgccgtgttgctgtttatcgtcgggttgctgtgtatcagtttcccgttcgtctctggcgatattttaagcacggtagtgggtgcattattaatctgctcgggcgttgcgcttattgttggattattcagcaaccgcagtcataatttctggccggtattatccggtttcctcgtcgcagtcgcctatttattgatcggctatttcttcatccgcgcaccggagctgggcatttttgccattgcggcatttattgccggtttgttctgtgttgcaggggttattcgcctgatgagttggtatcgtcagcgttcaatgaaaggcagctggctacagctcgttattggtgtgctggatatcgtcattgcatggatattccttggtgcaacgccgatggtgtctgtaactttggtttccacactggtgggtattgaactgatatttagcgccgccagcctgttcagcttcgccagtttgttcgttaagcagcaataa

SEQ ID NO: 263083 - DNA, 246 bp, Klebsiella pneumoniae; identical to SEQ ID NO: 112030

SEQ ID NO: 263084 - DNA, 423 bp, Klebsiella pneumoniae
atgacagcacagatagcggcttacgggcggctggtggctgacccgcagttaaagaccaccagcaagggtacacaaatgacgatggcgagtatggcggtcccacttccgtgcagccaggcagatgacggaacggcgacgatgtggttatccgtcctggcgtttggcagacaggccgaagcactggcaaagcaccgcaagggtgaactcctgagcgtggcgggtaacatgcaggtgagccagtggaccggacagaacggggagacgcggcagggctggcaggttatcgcagacagcgtaatcagtgcgagaacggcgcgaccgggcggcaaaaaaggccaacaggggcaggctactgatgcactgagcagagcaaaacaacaggcgggaaatgatgatccgtacggggataacataccgttttaa

SEQ ID NO: 263085 - DNA, 252 bp, Klebsiella pneumoniae
atgatccgtacggggataacataccgttttaagcaacgagtaacagaagccggagcaatccggcttttttatgggtcctcccggtgtagtgacctgccacggggcgggagcgtcgcggaaaaaggctggtttttgcattttcatggcggcggcagcatgtgtagtaatttattgataattaaaagttatttctgttttcacctgtacaatatttttttctccctgtcattagaccagtttgcaattaattga

SEQ ID NO: 263086 - DNA, 210 bp, Klebsiella pneumoniae
gtgagttgtattaatgacctgaacacgggcgatatcaggggtggttccgttcatctggatgcgcagaccgttatgcgccttaagcagtacaggatcgaccatataaatcatcatcctgaccaaccattaccaggtgtggcgcagattgtcagacatgccgtaaacacctggcttaatcagaatggttttgcatcggtgggggaacaatga

SEQ ID NO: 263087 - DNA, 1914 bp, Klebsiella pneumoniae
atgaatcgctggtacaccattaaggcggcggatgttcgcggagcggcggatatatctatctatgaggagattggcggcttcggtgttactgcaaagcagttcgcggaagacctgaaagcccttggcgatgtttcacatatcaatctgaggatccattcaccaggtggtgatgtgtttgaaggcatcgccatctataacctgctacggaatcatccggcagacattacggtttatatcgatggtgttgcggcttcaatggcttcggtggtcgcaatggctggcgatcgtgttgtgatgccggaaaacgccatgatgatgatacataagccgtggggtatctctggcggaaatgctggtgatatgcgtgattatgctgatttgctggataaggtggaaaccgtgttagtccctgcttatgccagaaaaacgggcaaatcagcacaggaaattaccgccatgctggaagatgaaacctggatggacgggaaagaatgccttaagcacggttttgctgatgaattgttgccatccgtcagagcaatggcgcgaattgaatcgaagcgcacaggagattttttacatatgccggaaaccattaaaggaatgattacaccgccacagggagcggcaaatattgctggtaatgaacagaaacgcatcaatggaataagtgaagtgtttagcctgttcggcagtcgttacgacgggatcaaaatggcgtgtctggaagatgcatcatgtacaccggaaatggcccgtgaaaagctgttgaacgagctggggcgcgagtccacgccatccaataaaaataccccggctcatatctatgccggaaacggaaacataacaggtgatgcaattcgtcaggggctttattcccgtcttgggtatgaacggcctgaacgaggcaacccttacgcgatgatgagtctttttgaaatggcccaggcatcactggttgatcgtggtatcactgtgagcggttttattaatcgctcgcaggttgttaatgcggcttttacacacagcagcagtgatttttctcatattctggctggtggggctgaaaaatctgtactgaaaggctggcaggacagcggcgaaacgttccagaaatggacgcgtaccggttcgctttcaaactttcatgaagcaaagcgcgttggtctgaatggtttttcaaagctggataaagtaccggaaggtgcggaatataaatacatcaccaccagcgataaaggtgtacctattgcgctggccacgtacgggaatatattttccgttacccgtcaggccattatcaacgatgacctgacccagttaactacaatccccatggcgatgggacgcgcagctgccagaacagttggcaatctggtttatctcctgttaaccagcaacggcaagtttacggatggtaaagcgttattccatgccgatcataaaaatcttattgcgaaggatatggacatggaggggcttaacgaagcccgtaagctgatgcgcctccaggaagacgctaacggcgattcgctgaatattacccctgcatttgtcctggtccccgccgcgctggagtctgccgcacatcgcgccattctgtcatcgtcatcactctttccggttgatggcgtgggcactatcaatcagaaccccggcatcattaacgtggtgaaagatatggcggaggtaatcgttgagccacgtcttgataaagccaataacaaggagtggtatgtggcagcggcgaagggtatggacacgatagaggtcgcttatcttgatggtattgatacgccatatcttgaggagcaggagggctttactgttgatggcgtcgcctggaaggtgcgcatagatgcaggtgtcgcggccctcgactatcgcggattactgaaatcgagtggagcatga

SEQ ID NO: 263088 - DNA, 486 bp, Klebsiella pneumoniae
atggatcgggaactgaaaaatctgatgctgaacattaaccagctggcggcgatagcgggaatatgtcgccagactgcggcggcaaggctgaaaaatatccagccagccggaggacatgacaagctgaaactctatcgggtgactgacattctgacttgttttcttgatcttcccgttccggcatcactggaagaaatggagccacatgaccgtaaggcctggtatcagtccgaacgtgaacgcctcaagttcgaacaggaaacggcgcaactcatacccgccgatgatgtgcgaaaagagatggctatatggggggaaatcgtaagcgaggaactggcaaaactccccaatattctggcacgtgatgccgggcttaaaccgatggcagtaaacagagtgcagtcaattattgacgatttgtgtaatcagattatcagccggatggtaaaaaatgacgtagtgaatgaggtcgcaaaacaggcatga

SEQ ID NO: 263089 - DNA, 282 bp, Klebsiella pneumoniae
atgaccgaatctgaaatactgcgattaatccgctgtgctggtggaatcagccagttggctgacgaacaggccgcgcagccggatacagtcaccgctgaaaattacgcgcgtgtggtggctgaggtgatgcgccgtgacggtattgagcttaacggtgtggatatgcgcaacatacgaaccagagttcttgagttgctggcataccgtcgccgttctcaacaacggagggagagcgcgaaaaatacttaccagtggaggaagccggagcacttacggcggtaa

SEQ ID NO: 263090 - DNA, 789 bp, Klebsiella pneumoniae
atgcaagtcgacctgctgagttccgcgcaatctgcgcacgcgttacacctttttcaccaacattcccctcttgtgcactgcatgaccaacgatgtggtgcaaacctttactgccaataccttgctggcgctcggtgcatcgccagcgatggttatcgaaaccgaagaggccagtcagtttgcggctatcgccagtgcgttgctgattaacgttggcacactgacgcagccacgcgcacaggcgatgcgtgccgccgttgagcaagcaaaacgctctcaaacaccctggacgcttgatccggttgcggttggtgcactcgactatcgccgccgtttttgtctggaacttctgtctcataagccaaccgccatacgtggtaatgcttcggaaatcatggcattagctggcattgctaatggcggacggggagtggataccactgacgccgcagctaatgcgatacccgctgcacaaacactggcacgggaaactggcgcaatcgtcgtggtcactggcgaggtggattatgttaccgatggtcgtcgcaccgttggcattcacggcggcgatccgttaatgaccaaagtggtaggaactggctgtgcattatcggcggttgtcgctgcctgttgtgcgctaccaggcgatacgctggaaaatatcgcatctgcctgtcactggatgaaacaagccggagaacgcgcagtcgccagtagcgaggggccaggcagttttgttccacatttccttgatgcgctctggcaattgacgcaggaggtgcaagcgtga

SEQ ID NO: 263091 - DNA, 801 bp, Klebsiella pneumoniae
gtgaaacgaattaacgctctgacgattgccggtactgatccgagtggtggtgcggggattcaggccgatcttaaaaccttctcggcacttggcgcttatggttgctcagttattactgcactggtggcgcaaaatacccgtggtgtacagtcggtgtatcgcattgagcctgattttgtcgccgcccagctcgattcggtgttcagcgatgtgcgaatcgacaccactaaaatcggtatgttggcggaaaccgatattgttgaagcggtggcagaacggttgcaacgttatcagatccaaaacgtggtactcgacaccgttatgctggcaaaaagcggcgacccgctgctttcaccttcggcggttgctacgctgcgcagtcgattattgccacaggtttcattaataacgccaaacttgcccgaagctgctgccttgctcgacgcgccacacgcgcgcaccgaacaggaaatgctggaacaagggcgatcgctgttggcgatgggctgtggcgcagtgctaatgaaaggtggtcatctggatgatgaacaaagcccggactggctgtttactcgtgagggagaacaacgatttactgcaccgcgcattatgaccaaaaacacccacggcactggttgtacgctctctgcggcgttggctgcactacgcccgcgccatacaaactgggctgacaccgtacaggaggcaaaaagctggctttcatcggcgttagcccaggccgacacgctggaagttggtcacggtattggtccggttcaccacttccacgcgtggtggtga

SEQ ID NO: 263092 - DNA, 819 bp, Klebsiella pneumoniae
atgcaactgagaatcaccagtcgaaaaaaattcaccgctttattatgcgctcttgggctaatttccatcgttgcaatttatccgcgtcagacggtgaattttttctactcgacagcaattcagattaaagactacatccacttctacggttatcgtccggtcaaatcttttgctattcgcattcctgccagttacaccattcatggtattgatgtttcacgctggcaggagcgaatcgactggcagcaggtggcaaaaatgcgcgataacggtattcgcttgcagtttgcctttatcaaggcgacggaaggcgaaaagctggtggacccctatttttcgcgtaactggcaactaagccgcgaaaatggcctgctgcgcggggcgtatcattatttctccccgtcggtatccgcttcagttcaggcgcgattatttctgcaaacggtggattttgcccacggcgatctccctgccgtgctggacgtagaagaacggggaaaattatcggcaaaagaattacgcaagcgggtaagtcagtggctaaaaatggtcgaaaaacgcacgggaaaaaagccaattatttactcaggagccgttttttatcacaccaatctggcgggctatttcaatgaatatccgtggtgggtggctcactattatcaacgtcgcccggacaatgacggcatggcctggcgcttctggcagcattccgaccgtggacaggtagatggcattaatggtccggtggattttaatgtgtttaatggcacggtggaggagttgcaggcattcgttgatgggattaaagaaacgccttaa

SEQ ID NO: 263093 - DNA, 966 bp, Klebsiella pneumoniae
atgagcggcgctcgattacacacgctgctgcctgaattagccacgcgtcagccagttatggtgattggcgcggcggtcattgatgtgatcgccgacgcttatgccctcccctggcgtgggtgcgatatcgaactgaaacagcagagcgttaacgttggcggctgcgcactgaatattgccgtggcgttaaagcgcctcggcatcgaagcgggtaatgccttgccgctcggtcagggggtttgggcggagattattcgcaaccggatggcaaaagagggcttaatcagcctgatcgataacgccgaaggtgataacggctggtgtctggcgctggttgagccggatggcgaacgcacttttatgtcattcagcggtgtggaaaatcagtggaatcgccagtggctggcgcgattaaccgttgcgcctggcagcctgctctatttttccggttatcaactggcctcgccctgcggcgaattattagtggaatggctggaaaagctgcaagacgtgacgccgtttatcgattttggcccacgtattggcgatatcccggatgcattgctggcgcggatcatggcctgtcgacctttagtgtcactcaatcgtcaggaggctgagattgccgccgaacgttttgctttatccgcagagataacaacacttggcaagcaatggcaggagaaatttgccgcgccgttgatcattcgtctcgataaagagggcgcatggtatttcagcaacgacgcttctggctgcattccggcatttccaacgcaagttgtagacaccattggggcgggcgacagtcatgcaggtggcgtacttgccgggctagcctctggtctgccactggcggatgccgtattactgggcaatgcagtggcgtcgtgggttgtcgggcatcggggcggtgattgtgcgccaacgcgcgaggaactactcctcgcacacaaaaacgtatag

SEQ ID NO: 263094 - DNA, 1005 bp, Klebsiella pneumoniae
atgaaaacagaacgtattctcggtgctctttatgggcaggcgttaggggatgcgatggggatgccctccgagctttggccgcgcagtcgcgtcaaagcgcactttggctggattgaccgttttctgcctgggccaaaggagaataacgcagcctgttattttaaccgcgccgaattcaccgacgatacctcgatggcgctgtgtctggcggatgcgttactggaacgtgaaggcaagatcgatccggatctgattgggcgtaatattctcgactgggcgctgcgtttcgacgcctttaacaaaaacgtactaggtccgacctcgaagattgcgcttaacgccattcgcgacggtaaacccgttgctgaactggaaaataacggcgtgaccaacggcgcagcgatgcgcgtctcgccattaggttgtttgcttccggcgcgtgatgttgattcctttattgatgatgtggcgctggcctccagcccgacacataaatccgatctggcggttgcgggggcggtagtcatcgcatgggcgatttctcgtgccattgacggagaaagctggtcagcgattgttgattcactaccctcgattgcgcgacatgctcaacaaaaacgcatcactaccttcagcgcctcactggcagcacgtctggagattgcgctgaaaattgtgcgcaatgccgacggcaccgaatccgccagcgaacagctttaccaggtcgttggcgcaggtaccagcactattgagtccgttccgtgcgccattgcgctggttgaactggcacaaaccgacccgaaccgttgcgccgtcctgtgcgctaaccttggcggcgacacagacaccatcggtgctatggcgacagcaatttgtggcgcgttgcatggcgttaacgctatcgatcctgcgttaaaggcggaactggatgcggtaaatcagcttgatttcaaccgctatgccacagcgctggcgaaatatcgtcaacaacgggaggcggtatga

SEQ ID NO: 263095 - DNA, 732 bp, Klebsiella pneumoniae
atgagtaagctgattgtcccgcagtggcccctgccaaaaggtgttgcggcctgtagctctactcgtatcggcggcgtgagcttgcccccgtatgactcgctcaacctcggtgctcattgtggcgataacccggatcacgttgaggagaatcgcaagcgactttttgctgcgggcaatttgccttcaaaaccggtctggcttgagcaggtacacggcagagatgtgcttaagcttactggcgaaccttatgcctcaaaacgagcagatgcctcttatagcaacacgccgggcacggtttgcgcagtgatgactgccgactgcctccccgtgctgttttgcaatcgagcgggaacggaagtcgccgccgctcatgctggctggcgtggactgtgcgctggcgtgttggaggagacggtttcctgttttgctgataatccggaaaatattctcgcctggttagggccggcaattggtccacgcgcgtttgaagtgggggcggaggttcgcgaggcgtttatggcagtagacgccaaagcgagtacagctttcattcagcatggtgataagtatctggcggatatttctctccttgcccggcagcgtctggcgaacgtcggtgtcgaacaaattttcggcggcaaccgttgtacatatacggaaaatgagactttcttctcttatcgtcgcgacaagaccaccggtcgtatggcaagtttcatttggctgatataa

SEQ ID NO: 263096 - DNA, 1161 bp, Klebsiella pneumoniae
atgacatcggaaaatccattactggcgctgcgagagaaaatcagcgcgctggatgaaaaattattagcattactggcagagcggcgcgaactggccgtcgaggtgggaaaagccaaattgctctcgcatcgcccggtacgtgatattgatcgtgaacgcgatttactggaaagattaattacgctcggtaaagcgcaccatctggacgcccattacattactcgcctgttccagctcattattgaagattccgtattaactcagcaggcgttgctccagcaacatctcaataaaattaatccgcactcagcacgcatcgcttttctcggccccaaaggttcttattcccatcttgcggcgcgccagtatgctgcccgtcactttgagcaattcattgaaagtggctgcgccaaatttgccgatatttttaatcaggtggaaaccggccaggccgactatgccgtcgtaccgattgaaaataccagctccggtgccataaatgacgtttacgatctgctgcaacataccagtttgtcgattgttggcgagatgacgttaactatcgaccattgtttgttggtctccggcactactgatttatccaccatcaatacggtctacagccatccgcagccattccagcaatgcagcaaattccttaatcgttatccgcactggaagattgaatataccgaaagtacgtctgcggcaatggaaaaggttgcacaggcaaaatcaccgcatgttgctgcgttgggaagcgaagctggcggcactttgtacggtttgcaggtactggagcgtattgaagcgaatcagcgacaaaacttcacccgatttgtggtgttggcacgtaaagccattaacgtgtctgaccaggttccagcgaaaacgacgttgttaatggcgaccgggcaacaagctggtgcgctggttgaagcgttgctggtactgcgcaaccacaatctgattatgacccgtctggagtcacgcccgattcacggtaatccgtgggaagagatgttttatctggatattcaggccaatcttgaatcagcggaaatgcaaaaagcattgaaagagttaggggaaatcacccgttcaatgaaggtattgggctgttacccaagtgagaacgtagtgcctgttgatccaacctga

SEQ ID NO: 263097 - DNA, 363 bp, Klebsiella pneumoniae
atgaaaaagtttatcgcccccttgttggctttactggttagcggatgtcagattgatccttatactcacgcgccaaccttgaccagcaccgactggtatgatgtcggtatggaagatgcgatatcggccagcgccataaaagatgacgatgcatttagcgattcacaggcggatcgcggtctataccttaaaggatatgccgaaggacaaaagaaaacttgccagaccgattttacttatgcccggggcctttccggtaaaagctttcctgccagctgcaacaatgttgaaaatgccagtcaactgcatgaagtatggcaaaaaggggctgatgaaaatgccagcacaatacgattaaattaa

SEQ ID NO: 263098 - DNA, 519 bp, Klebsiella pneumoniae
atgcgtttttctcaccgactgttcttactgctgattctcctgctgacgggagcaccaatactcgctcaggaaccttctgacgttgcgaaaaacgtgcgtatgatggtttccggtattgtcagttacacccgctggcctgcgctatcagggccaccaaagttatgtatcttttcatcttcacattttagtaacgccctacaagagaatggtacgacatctttgccttatctgcctgtcatcattcacactcaacaagaggcgatgatttcaggctgcaatggtttttattttggcaacgagtcaccgacattccagatggaattaaccgaacaatatccgtcaaaggcgttattattaattgccgaacaaaataccgagtgcattattggtagcgccttttgtctgatcatccacaataatgacgtcagatttgccgtaaacctggatgccttatcgcgtagcggtgtaaaggtcaacccggatgtcttgatgctcgcacggaagaaaaatgatggataa

SEQ ID NO: 263099 - DNA, 1227 bp, Klebsiella pneumoniae
atgatggataacgataattctcttaataagcgccccacgtttaaaagagcattacgcaacatcagtatgaccagcatatttatcactatgatgctgatctggttgctgctttccgtgacctcggtgctgaccctgaaacagtacgcgcaaaaaaacctggcactgacagcagcaacaatgacttacagtctggaagcagcggtcgtttttgccgatggctctgcagcaactgaaacactggcagcgctggggcagcaaggccaattttcaactgcagaagtgcgtgataagcagcaaaatattctggcatcctggcattacacccgtaaggatccaggcgatactttcagtaatttcataagccactggctcttccctgcccccatcgttcagccgattcgtcacaatggtgaaaccattggcgaagttcgcttaaccgctcgcgacagttcaatcagccatttcatctggttttcgctcgctgtcctgaccgcctgcattctgctggcatcaggcatcgcaattaccctcacccgccatttgcacaatggtctggttgaagcgttaaaaaacatcaccgatgtcgtacatgatgtgcgttccaaccgcaatttttcccgacgagtttcggaagaacgtatcgcagagtttcaccgcttcgctctcgacttcaacagtctgctggatgaaatggaagagtggcagcttcgtttacaggccaaaaatgcgcagcttctgcgtaccgcgctacatgacccattaaccgggctggctaaccgcgcagcgtttcgtagcggtatcaatacgttgatgaacaattccgatgcccgaaaaacgtcggcgttactatttcttgatggcgataatttcaaatatatcaatgatacctggggtcatgcgacgggcgatcgtgtcttgattgaggtagcaaaacggttagctgaatttggcgggctgcgacataaagcataccgcctgggcggcgatgaattcgcgatggtgctctatgatgtacagtcggaatctgaagtgcagcagatatgctcagcactgacacaaatctttaatctcccgtttgatcttcataatggccatcagaccaccatgacattaagcattggttacgcgatgaccattgagcacgcctctgcggaaaaattacaagagcttgccgatcacaatatgtatcaggccaaacaccagcgtgccgaaaagctggtgagataa

SEQ ID NO: 263100 - DNA, 483 bp, Klebsiella pneumoniae; identical to SEQ ID NO: 38632

SEQ ID NO: 263101 - DNA, 693 bp, Klebsiella pneumoniae
atgaaaacaattggtttgctgggaggaatgagttgggaatccactattccttattatcgtctgattaatgaaggtattaaacagcggcttggtgggcttcactctgcgcaagtgctgctacatagcgtcgattttcatgaaatagaagagtgccagcgtcgcggcgagtgggacaaaaccggggacattttggctgaggcggcgcttggcttacagcgggcgggcgcagaaggcattgtgttatgtaccaatacgatgcacaaagtggcggatgccattgagtctcgttgctctctgcctttcttacacattgcggatgccaccggacgtgcaattaccggggccgggatgactcgtgtggcgctgctgggtacgcgttacaccatggaacaggatttttatcgcgggcggctgacggaacaattttccatcaactgtctcattcctgaagcggatgaacgggcgaaaattaatcagattatttttgaagaactgtgtctggggcaatttaccgaagcgtcacgcacttattatgcgcaagtgattgctcgccttgcagaacagggcgcacagggcgtcatttttggctgtacggaaattggtttactggtgccagaagagcgcagtgttctgcctgtgtttgataccgcggcgatccatgccgaggatgctgtcgcttttatgctgtcgtag

SEQ ID NO: 263102 - DNA, 936 bp, Klebsiella pneumoniae
atggccgccgttaacttacgtcatattgaaatttttcatgcggtaatgaccgccggaagcctgactgaggcggcacacctgctacacacctcacagccaacagtcagccgcgaactggcgcgctttgagaaggtgatcgggctgaaattgtttgagcgcgtacgtggacgattacatcctaccgtgcaaggactgcgtctgtttgaagaagtgcaacgatcctggtacggactggatcgcattgtcagcgccgcagaaagtctgcgcgagtttcgccagggagaactgtctatagcctgcctgccggtcttttcgcaatcttttttaccgcagctcctgcaaccctttctggcacgttatcccgatgtcagcttaaatatcgtgccccaggaatcacctctacttgaagagtggctctcggcccagcgtcatgatttagggctcactgagacgctccatacgcctgcgggaacagaacgtaccgaattactctctttagatgaagtgtgtgtgttacctccgggtcatccgctggcggcaaaagagatattaacgccagaagattttcacagtgagaactacatcagcctttcccgtactgacagctatcgccagttgctggatcaattgtttactgaacatcaggttaaacgacgcatgatcgtagaaacccacagcgccgcgtcagtctgcgcaatggtacgggcggaggtaggtgtttcggtggttaacccgctcaccgcactggattatgcggcaagcggtttagtggtgcggcggttcagtattgcggttccgttcaccgtcagcctgatccgccccctgcaccgcccgtcatcagcgctggttcaggcgtttagtgagcatttacaagcgggattaccgaaactggtcacttctcttgacgctattttgtcgtcagctacgacagcataa

SEQ ID NO: 263103 - DNA, 1263 bp, Klebsiella pneumoniae
atgccacattcactgttcagcaccgataccgacctcaccgccgaaaatctgctgcgtttgcccgcagaatttggctgcccggtgtgggcctacgatgcgcaaattattcgtcggcagattgcagcgctgaaacagtttgatgtggtgcgcttcgcacagaaagcctgttccaatattcatattttgcgcttaatgcgtgagcagggcgtgaaagtggattccgtctcgttaggcgaaatagagcgtgcgttggcggcgggttacaatccgcaaacgcaccccgatgatattgtttttacggcagatgttatcgatcaggcgacgcttgaacgcgtcagtgaattgcaaattccggtgaatgcgggttctgttgatatgctcgaccaactgggtcaggtttcgccagggcatcgggtatggctgcgtgttaatccggggtttggtcacgggcatagccaaaaaaccaatactggtggcgaaaacagcaagcacggtatctggtacaccgatctgcccgccgcactggacgtgatacaacgtcatcatctacagctggtcggcattcacatgcacattggttctggcgttgattatgcccatctggaacaggtatgtggtgctatggtgcgtctggtcctcgaattcggtcaggatttacaggctatttctgcgggtggtgggctttctattccttatcaacagggtgaagaggcggttgataccgaacattattatggtctgtggaatgccgcgcgtgagcaaatcgcccgccatttgggccaccctgtgaaactggaaattgaaccgggtcgcttcctggtagcgcagtctggcgtgttaattactcaggtgcggagcgtcaaacaaatgggtagccgccactttgtgctggttgatgccgggtttaacgatctgatgcgcccggcaatgtacggtagttaccaccatatcagtgccctggcagctgatggtcgttctctggaacacgcaccaacggtggaaaccgtcgtcgccgggccgttatgtgaatcgggcgatgtctttacccagcaggaagggggaaatgttgaaacccgcgccttgccggaagtgaaggcgggtgattatctggtattgcatgatacgggggcatatggcgcatcaatgtcatccaactacaatagccgtccgctgttaccagaagttctgtttgataatggtcaggcgcggttaattcgccgtcgccagaccatcgaagaattactggcactggaattgctttaa

SEQ ID NO: 263104 - DNA, 1032 bp, Klebsiella pneumoniae
atggcgaccataaaggatgtagcccgactggcaggcgtttcagtcgccaccgtttcccgcgtcattaataattcacccaaagccagcgaagcttcccggcttgctgtgcatagtgcaatggagtctcttagctatcacccgaacgccaacgcccgtgcgctggcgcagcagaccactgaaacggtcggtctggtcgttggtgatgtttccgatccgtttttcggtgcaatggtgaaagcggtcgaacaggtggcttatcacactggtaattttttattgattggcaacggttaccacaacgaacaaaaagagcgtcaggctattgagcaactgatccgccatcgctgtgctgcgttggtcgtccatgccaaaatgataccggatgccgatttagcctcattaatgaaacaaatgcccggtatggtgctgatcaaccgtatcctgcctggctttgaaaaccgttgtattgctctggacgatcgttacggtgcctggctggcaacgcgtcatttaattcagcaaggtcatacccgcattggttatctgtgttctaaccactctatttctgacgccgaagatcgtctgcaagggtattacgatgcccttgctgaaagtggtattgcggccaatgaccggctggtgacatttggcgaaccagacgaaagcggcggcgaacaggcaatgaccgagcttttgggacgaggcagaaatttcactgcggtagcctgttataacgattcaatggcggcgggtgcgatgggcgttctcaatgataatggtattgatgtaccgggtgagatttcgttaattggctttgatgatgtgctggtgtcacgctatgtgcgtccgcgcctgaccaccgtgcgttacccaatcgtgacgatggcgacgcaggctgccgaactggctttggcactggcggataatcgccctctcccggaaatcactaatgtctttagtccgacgctggtacgtcgccattcagtgtcaactccgtcgctggaggcaagtcatcatgcaaccagcgactaa

SEQ ID NO: 263105 - DNA, 2160 bp, Klebsiella pneumoniae
atgctttttagcttttttcgaaatttgtgccgtgttttgtatcgcgttcgcgttacgggtgacacccaggcactgaagggcgagcgcgttctaatcacgcctaatcacgtctcttttattgatggcatactgctggcattgtttttacccgtacgtccggtatttgccgtttacacctcaataagccaacagtggtatatgcgttggctgaaatcatttatcgactttgttcctctcgacccgacgcaacctatggcgattaaacatctggtacgtctggtggaacagggccgaccagtggtgattttccctgaaggacgaatcaccaccacaggctcgctgatgaaaatctacgatggtgcgggttttgtcgcggcgaagtctggtgcaacggttattcctgtgcgtattgaaggggcggaacttacgcacttcagccgcctgaaaggtctggttaaacgtcgcttgttcccgcaaattactctgcatattttgccaccaacgcaggtggagatgccggatgcgccgcgtgcccgtgaccgtcgcaaaatcgctggcgaaatgctgcatcaaataatgatggaagcgcgtatggcggtgcgcccgcgtgaaacgctgtacgaatctttactgagtgcaatataccgcttcggagccgggaagaaatgtgtcgaagacgtcaactttaccccagactcctatcgcaaattgcttacgaaaacgctgtttgttggacgcatccttgaaaaatacagtgttgaaggcgaacgcatcggcttaatgctgcccaatgcaggcatcagtgcggcagtgatttttggggccatcgcccgtcgccgcattcccgcaatgatgaactacaccgccggggtaaaagggctgaccagtgctattacggcggctgaaatcaaaaccatcttcacttcccgccagtttctcgataaaggcaaactctggcatctgccggagcaacttactcaggtgcgctgggtctatctggaagatttaaaagcagatgtcaccactgccgacaaagtatggatcttcgctcatttgctgatgccgcgtctggcacaggtaaaacagcagccggaagaagaggcgctgatcctttttacctccggttctgaaggccatccgaaaggcgtcgtccatagccataaaagcattctggcgaatgtcgagcagattaaaacgattgccgacttcaccaccaacgatcgctttatgtcggcgttaccgctgtttcactcctttgggctgacggtaggcctgtttacgccactgctcacaggtgcagaagtgttcctttatccaagcccgctgcattaccgcattgtgccggagttggtgtatgaccgcagttgcaccgtgttgttcggtacctcgactttcctcggtcactacgcgcgtttcgccaacccgtatgacttctatcgtctacgctatgtggtggcaggcgcagaaaaactacaagaaagtaccaaacagctttggcaggataaatttggcctgcgcatccttgaaggctacggtgtgaccgagtgcgcgcctgtcgtttctatcaacgtaccgatggcggcgaaacccggtacggtagggcgtattctaccaggtatggacgcgcgcctgttgtcggttcctggtatcgaagagggcggacgcctgcaactgaaagggccgaacataatgaacggctatctgcgggtggagaagccaggtgtactggaagtgcccaccgccgagaatgttcgcggcgaaatggagcgcggctggtatgacactggcgatattgtgcgttttgacgagcagggctttgtgcagattcagggccgcgcaaaacgctttgccaaaattgcaggcgaaatggtgtcgctggaaatggtggaacaactggcacttggtgtttcgccagataaagtccatgccactgcgattaagagcgatgccagcaaaggcgaggcactggtgcttttcaccacagataacgaactgacgcgcgataagttacaacagtatgcccgcgagcacggcgtgccggagcttgctgtaccgcgcgatattcgctatctgaaacagatgccattacttggcagcggcaaacctgactttgtcacgttgaaaagctgggtagacgaagcggaacaacacgatgagtga

SEQ ID NO: 263106 - DNA, 1194 bp, Klebsiella pneumoniae
atgagtgagtcagtgcacactaatacttcgttgtggtcgaaggggatgaaagcggttatcgtggcgcagtttctctctgcgtttggcgataatgcgctgctgtttgccactctggcgttactgaaagcgcagttctatccggagtggagccagcccatcctgcaaatggtgtttgtaggtgcttacattctttttgcgccgtttgtcggacaggtggcggatagcttcgccaaaggccgggtgatgatgtttgccaacggcctgaagctgctgggcgcagccagtatctgctttggtatcaatccgtttctcggctatacgctggtgggtgttggtgctgcagcctattcaccggcgaaatacggtattctcggcgaattaaccacgggtagtaagttagtgaaagctaacggtttaatggaagcttctaccatagcggcgattttgctcggttccgtagccggtggtgtgctggctgactggcatgtcctggtcgccctggccgcatgcgcactggcctacggtggtgcggtcgttgccaatatctacattcccaaactggtggcggcgcgtccggggcagtcctggaatctcatcaacatgacccgcagtttcctgaatgcctgcacctcgctatggcgcaatggtgaaacgcgtttttcgctggtgggcaccagtttattctggggagcaggtgtcacgctgcgtttcctgttggtgctgtgggtaccggtggcgctgggcattaccgataacgctacgccgacctatctcaacgcgatggtagcgattggtatcgtggttggcgcaggtgcggcagcgaagttagttacgctggaaaccgtgtcacgctgtatgccagccgggattttgattggtgtggtggtactgattttctccctgcaacacgagctgttgccagcctatgccttgttgatgctgattggcgtgctggggggcttttttgtcgttccgctcaatgcgttgctacaggagcggggtaaaaaaagcgtcggggcggggaatgcaattgcagtacaaaaccttggcgaaaacagcgccatgttgttgatgctgggcatttactcgctggcggtaatggtaggcatcccggtcgtgcccattggcattggcttcggtgcgctgtttgcgctggcaataacggcgctgtggatttggcagcgccgtcattaa

SEQ ID NO: 263107 - DNA, 690 bp, Klebsiella pneumoniae
atgtcccaacctcgcccactgctctctcctcccgaaactgaagaacagttgttagcgcaagcacagcaactttctggttatacattgggagaactggcggcacttgccgggctggttacaccagagaatttaaaacgcgataagggctggattggcgtgttactggagatctggctaggtgccagcgcaggaagtaaacctgagcaagattttgctgccctgggcgtggaacttaaaactatccctgtggatagtcttggtcgtccgctggaaacaacattcgtttgtgttgccccgttaacgggtaatagcggggtgacctgggaaaccagccacgtacgccacaagctcaaacgcgtactgtggataccggttgaaggcgagcgcagcatcccgctggcgcagcgtcgcgtaggatcaccgttactgtggagcccgaatgaagaggaagaccgacagctacgcgaagactgggaagaattaatggatatgattgttctcggtcaggttgagcggattaccgctcgtcacggggaatatttacagatacgaccgaaagcagcgaatgcgaaagcacttaccgaagccattggtgcccggggcgaacggattctgacgctgccacgcggcttttatttgaagaagaatttcaccagtgcactactggcccgtcattttctgatccagtag

SEQ ID NO: 263108 - DNA, 162 bp, Klebsiella pneumoniae
atggaaacagtagtggaggtttttcacagttatcccagctttctgtggataacatggtgtaagatcctgtttattttcagtgaccagatttggaaaacccgttgcagtgttgcgcaactcgattacaggaagcctaaaaagcaatataaatcagagaattga

SEQ ID NO: 263109 - DNA, 1362 bp, Klebsiella pneumoniae
atgtttgataatttaaccgatcgtttgtcgcgcacgctgcgcaatatcagtggccgtggacgcctcactgaagacaacgtaaaagatacgctgcgcgaagtgcgcatggcgctgctggaggcggacgtcgctctgccggtagtgcgtgagtttatcaatcgcgtaaaagagaaagcggttggtcatgaagttaataagagcctgacgccggggcaggagttcgtcaaaatcgtccgtaacgaactggttgcggcgatgggcgaagagaaccagaccctgaacctggctgcgcaaccgcctgcggtcgtgctgatggcaggcctgcaaggtgccggtaaaacaaccagcgttggtaaactcggtaagttcctgcgcgagaagcacaagaagaaagtgctggtggtttccgccgacgtttatcgcccggcggcaatcaaacagcttgagacgctggcagagcaggtgggcgttgatttcttcccttctgatgttggtcagaagccggttgatattgttaacgcggcgctgaaagaagccaaactgaaattctacgacgtgctgctggtggataccgctggtcgtctgcacgttgacgaagcgatgatggacgagatcaaacaagtccatgcgtcgattaatccggttgaaaccctgtttgtggttgacgccatgaccggtcaggatgcggccaatacggcaaaagcatttaatgaagcgttaccgcttaccggcgtagtgttgaccaaagtggacggcgatgcccgcggtggtgcggcgctctctattcgttacatcactggcaaaccgatcaagttcctcggtgttggcgagaaaactgaggcgctggagccgttccatccggaccgcatcgcgtcgcgtattctcggcatgggcgacgtactgtcactgatcgaagatattgaaagcaaagttgaccgcgcgcaggcagagaaattagccagcaagctgaaaaaaggcgacggcttcgatctcaacgactttcttgagcagctgcgccagatgaaaaatatgggcggcatggctagcctgatgggcaagctgccgggcatggggcagatcccggataacgtcaagtcgcagatggacgataaagtgctggtgcgtatggaagccatcatcaactcgatgacgatgaaagagcgcgctaagccagaaatcatcaaaggttcgcgtaagcgtcgtatcgccgccggttgcgggatgcaggtacaggacgttaaccgccttctgaagcagttcgacgacatgcagcgcatgatgaagaaaatgaagaagggcggaatggcgaagatgatgagaagcatgaaggggatgatgccgccgggatttcctggtcgctaa

SEQ ID NO: 263110 - DNA, 867 bp, Klebsiella pneumoniae
atgcaacggttggagcagcgttcacctgacgctatactgcttctctttcttattgctcaaactgtcgacattactatgcccgtttttgctctgctcgcgcttgtcgcctactccgtcagtcttgcgctgattgttcccggtctgctgcaaaaaaacggcggctggcggcgcatggctattatttctgcggtcattgcgctggtctgccacgcaatcgctctggaagcccgcatcctgcccgacggtgatagcggacaaaacctcagcctgctgaacgttggttcattggtcagtttgatgatctgtacggtaatgaccattgtggcttctcgcaatcgtggctggttgctgctacccattgtctatgcctttgcgcttatcaacctggcgctggcgaccttcatgcccaatgaatacatcacccatctggaagcaacgcctgggatgctggtgcacattggcttatcgctcttttcctatgccacgctaattatcgccgccctgtacgcgctgcaactggcgtggattgattaccaactgaagaacaagaaactggcgtttaaccaggaaatgccgccattgatgagtatcgagcgtaaaatgttccacatcacgcagattggcgtggtgctgctaacgctcacgctttgcactggcctgttctacatgcacaacttatttagcatggaaaatatcgacaaggctgtgctctctatcgtggcgtggtttgtctatattgtgctgctgtggggacattatcatgaaggatggcgtggacgccgcgtcgtctggtttaacgttgcgggtgcagtcattctgacactggcctacttcggcagtcgaattgtccagcagttaatcagctaa

SEQ ID NO: 263111 - DNA, 1242 bp, Klebsiella pneumoniae
atggtggtcatttcagcctatttttccgggtccgaaaccggaatgatgaccctcaaccgctatcgtctgcgacatatggcgaaacagggtaatcgctcggccaaacgcgtcgaaaaattgctgcgtaagccagaccgcctgattagcctggtgttaatcggcaataacctggtcaatattcttgcctccgcgctcggcactattgttgggatgcgtttgtacggcgatgcgggcgtggcaattgcgactggtgtgctgacttttgtcgtactggtttttgctgaggtattgccgaaaaccattgccgcgctgtacccggaaaaagtcgcttatccgagtagttttctgctggctccgctgcaaattttgatgatgccgctggtctggttgctgaatgctatcacccgtatgctgatgcgcatgatgggtatcaaaaccgatatcgtggttagcggctctttgagcaaagaagagttgcgcactatcgtgcacgaatcgcgctcacaaatttcccgtcgcaatcaggatatgctgctgtcggtgctcgatctggaaaagatgaccgttgatgacatcatggtgccgcgcagtgaaattatcggtattgatatcaacgatgactggaaatcgattctgcgccaactatcccactcacctcacgggcgcatcgtgctctaccgtgattcgctggacgacgccatcagtatgctgcgagtacgtgaagcctggcggttgatgtcggagaaaaaagagttcaccaaagaaaccatgctgcgcgccgcggacgagatctattttgtcccggaaggtacgcccctcagcacgcagttggtgaagtttcagcgcaacaaaaagaaagtcggcctggtcgtcaacgagtatggagacattcaagggctggtgacggttgaagatattctggaagagatagttggtgatttcaccacgtcgatgtcgccaacacttgccgaagaagtcactccgcaaaacgacggttcggtgattatcgatggcaccgccaacgtgcgggaaatcaacaaagcctttaactggcatctaccggaagatgatgcccgcacggttaatggcgtcattcttgaggcactggaagagatccctgtcgcaggcacccgcgtgcgtattggcgagtacgatatcgatattctcgacgtacaggacaatatgattaagcaggtaaaagtttttcctgtaaaaccgctgcgcgagagtgtggcggagtaa

SEQ ID NO: 263112 - DNA, 594 bp, Klebsiella pneumoniae
atgagtagtaaagaacagaaaacgcctgaggggcaagccccggaagaaattatcatggatcagcacgaagagattgaggcagttgagccagacgcttctgctgagcaggtggatccgcgcgatgaaaaaattgcgaatctcgaagctcagctggctgaagcccagactcgtgaacgtgacggcattttgcgcgtaaaagccgaaatggaaaacctgcgtcgtcgtactgaactggatattgaaaaagcccacaaattcgcgctggagaaattcatcaacgaattgctgccggtgattgatagcctggatcgtgcgctggaagtggctgataaagctaacccggatatgtccgcgatggttgaaggtattgagctgacgctgaagtcgatgctggatgttgtgcgtaagtttggcgttgaagtgatcgccgaaactaacgtcccgctggacccgaatgtgcatcaggccatcgcaatggtggaatctgatgacgttgcgccaggtaacgtactgggcattatgcagaagggttatacgctgaacggtcgtacaattcgtgcggcgatggtgactgtagcgaaggcaaaagcttaa

SEQ ID NO: 263113 - DNA, 879 bp, Klebsiella pneumoniae
atgaataatcatttcaagtgtattggcattgtgggacacccacggcaccccactgcactgacaacacatgaaatgctctaccgctggctgtgcacaaaaggttacgaggtcatcgttgagcagcaaatcgctcacgaactgcaactgaagaatgtgaaaactggcacgctcgcggagattgggcaactggctgatctcgcggtagtcgttggtggcgacggtaatatgctgggcgcggcgcgcacactcgcccgttacgatattaaagttattggaatcaaccgtggcaacctgggtttcctgactgaccttgaccccgataacgcccagcaacaattagccgatgtgctggaaggccactacatcagcgagaaacgttttttgctggaagcgcaagtttgtcagcaagattgccagaaacgcatcagcacggcgattaacgaagtggtacttcatcctggcaaagtggcgcatatgattgagttcgaagtgtatatcgacgagatctttgcgttttctcagcgttctgatggcctgattatttcgacgccaacaggctccaccgcctattccctctctgcgggcggtcctattctgacaccctctctggatgcaattaccctggtgcccatgttcccgcatacgttgtcagcgcgaccgctggtgataaacagcagcagcacgatccgtctgcgtttttcgcatcgccgtaacgacctggaaatcagttgcgacagccagatagcactgccgattcaggaaggtgaagatgtcctgattcgtcgctgtgattaccatctgaatctgattcatccgaaagattacagttatttcaatacattaagcaccaagctcggctggtcaaaaaaattattctaa

SEQ ID NO: 263114 - DNA, 1662 bp, Klebsiella pneumoniae
atgttggcacaactgaccatcagcaactttgctatcgttcgtgagcttgagattgattttcatagcggcatgaccgtaataactggcgagaccggcgcgggtaaatctattgcaatagatgccctcggcctttgtctcggtggtcgcgctgaagccgacatggtgcgtaccggcgctgctcgtgccgacctgtgcgcccgtttttctctgaaagatacgccagcggccctgcgctggctggaagaaaaccagcttgaagacgggcatgaatgtttgcttcgtcgcgtaatcagcagcgatggtcgctcccgtggttttatcaacggtacagcggttcctctttcacaactgcgcgaactgggtcagttgctgattcagatccatggtcagcacgctcatcagttactcaccaaacccgagcaccaaaaattcctgcttgatggctatgccaatgaaacctctctactccaggaaatgaccgcacgttatcagttgtggcatcaaagctgccgtgacctcgcgcatcatcaacagttaagtcaggaacgcgccgcccgtgcagaactgctgcaataccaattaaaagaacttaacgaatttaatccgcagcccggagagtttgagcaaatcgacgaagagtacaaacgtctggcgaacagcggtcaattgctgactaccagccagaatgcattggcagtaatggccgacggtgaagacgcaaacctgcaaagtcagctttacacggctaaacaactggtgagcgaattgattggcatggacagcaaactgtccggcgtacttgatatgctggaagaagctaccatccagattgctgaagccagcgatgaactgcgccactactgcgatcgtctggacctcgatcctaaccgactgtttgaacttgaacagcgcatctcaaaacagatttcgctggcacgtaaacatcacgtcagccctgaggcattgccacagtattaccagtcgctactggaagaacagcagcaactggacgatcaggccgactcacaagaaacgctcgcgctggcggtaacgaaacatcatcagcaggcactggaaacggcgcgcgcgttacaccagcaacgccagcactatgcagaagaacttgcacagctgatcaccgacagtatgcatgcactctctatgccacatgggcagtttacgattgatgttaaatttgacgagcatcacctgggcgctgacggtgccgatcgtattgagtttcgggtaaccaccaacccaggtcagccaatgcagcctattgccaaagttgcatccggtggtgaattgtcccgcatcgcattggcaattcaggtcatcacggcgcgtaaaatggaaaccccggcactgatttttgatgaagtggatgtagggattagcggcccaacagcggcagttgttggcaaactgctgcgtcaactcggcgaatcaactcaggtgatgtgtgttacccacctgccacaagtcgcgggatgtggtcatcaacactattttgtcagcaaagaaaccgatggtgcgatgacagaaacgcatatgcaatccctggataaaaaagcgcggttacaagagctggcgcgcctgcttggtggcagtgaagtcacacgtaacacactggcgaatgcgaaagaactgcttgcggcgtaa

SEQ ID NO: 263115 - DNA, 342 bp, Klebsiella pneumoniae
atgcgctgtaaaacgctgactgctgcagcagcagtactattgatgttgaccgcaggctgttccactctggagcgagtggtttaccgtcctgacatcaaccaggggaactatctgaccgctaacgacgtatccaaaatacgtgttggcatgacgcaacaacaagttgcgtacgcattgggtacaccgctgatgtccgatccatttggtacgaatacctggttctatgtcttccgccagcaaccaggtcatgaaggtgtaacgcagcaaacgctgacgctgacctttaacagtagcggagtgttgaccaacattgataacaaacccgcgctgagtggtaactaa

SEQ ID NO: 263116 - DNA, 291 bp, Klebsiella pneumoniae
gtgccaggtaaaattgccgttgaggtggcttatgcgctacctgagaagcagtacctgcagcgcgtgacgctgcaggagggcgcgacggttgaagaagctattcgcgccagtggcttgctggaattgcgtaccgatatcgatttaactaaaaacaaagtcggcatttacagccgtccggcaaaactcagcgataccgtgcatgatggcgatcgggtggagatttatcgtcctctcattgccgatccgaaagagctgcgcaggcaacgagcagaaaaatcagcgaataaataa

SEQ ID NO: 263117 - DNA, 477 bp, Klebsiella pneumoniae
atgatattatttgttggatttttgttgatggaaattgttatgcctcagattagccggaccgcactggtaccctacagcgcggagcaaatgtatcagttagtgaatgacgttcagtcttatcctcagtttttgccgggttgtaccggaagtcggattctggagtccactcctgggcagatgactgcggcggtagatgtctctaaggccgggatcagcaaaacgtttactacccgcaaccagttgaccaataaccaaagtattcttatgaatctggtggatgggccgttcaagaaattgatcggtggctggaagtttacgccgctgagccaggaggcgtgtcgtatcgagtttcatctcgactttgagtttaccaataagttgattgaactcgcctttggtcgcgtgtttaaagagctggcggctaatatggtccaggcttttacggttcgggcgaaagaggtttacagtgccaggtaa

SEQ ID NO: 263118 - DNA, 699 bp, Klebsiella pneumoniae
atgaatttaaataacctggaaacaaatctcgatgaggaaggtcactatctggcttttggatataacgttgacactcctgacagaataaccgtttctgcttataatgaaaaaaagcctggctgctatggccaatgtcttttaatacaggatgacgaaacagacttatttaacctgataaaagttaaaatttttgaagccaggcataattatgtcgctcaattgatgagcgttccggaatttatgttcaaatttagttatagcgctcaacaaaatagattagaacctcatcttctggttcccacttatttccctctaaaaacaaacgaaccggttacgcaagaggatgtactgttactttatcgtttctttaaaatggatggtgattttaatatattaacatcagatgaatacatgagtatcatgacacctctaatgaagtgtgagcgtagcatccacgaccacaacaggtatgtgacgggcaaagatacccttcttctggactatcctccttctggtaaccagatatatttccatatttttcctgacgaatcagcaacactagtcctttatttttcaaacaatgacattgaatgtttcgtctttgaaagagatattccgagccagtatcgctttttcaaaatgtttaccaatctggcactggttattgatcagttaaccgatgccaatcaaatactttaa

SEQ ID NO: 263119 - DNA, 423 bp, Klebsiella pneumoniae
atgatcccatctcaaatctcgttcaacacccttcctgtcaatgcaacatacgcttcagagacaacagttgacacacaaaaattctctgacatcctctactcagcggggtgttccctaaaggatctggcttatctgagcagatgtctggcatcaatacatccgactatcgccaaaaacatttatgaaacagaaaatctcagcgatcaaaaattactgcatattgattgccgtagtacaaatgaaatcaagataaatatcttttttggtcaacaacgagaaggattaattgaaattaattctgacactgtcatttttccgatattgtcttcattaattgactccgccatttctaaatttcaacaccaaatccccgttaacggttcagtaaatcctgacctattgtatgaggattatactgattaa

SEQ ID NO: 263120 - DNA, 450 bp, Klebsiella pneumoniae
atgaagaaagcaacacttgtgattggcgttattggcgcggactgccatgcagtaggcaataaagttctggaccgcgtttttagcaaccatgacttcagagttattaatctgggcgtaatggtcagccaggacgaatatattgatgctgccattgaaactggtgctgacgcgattgtcgtctcctctatctatgggcatggcgatatcgattgtctgggcatgcgcgaatgctgcatcgagcgtgggctgggtaacatcctgctctatgtgggcggtaacctggtggtcggaaaacatgacttcgctgacgtggaaaccaagttcaaagagatgggatttgatcgcgtcttttccccaagtcatgacttagaagatgtttgtcagctgatggcccacgatatcaaccaacgtcataacgttgatactcgcattcttgaagaggcaatctga

SEQ ID NO: 263121 - DNA, 1389 bp, Klebsiella pneumoniae
atgcaaatcgtctctgtcgatattggttcgacgtggaccaaagcagccctcttcacccgggagggggacgcgttaacgttggttaaccacgttctgaccccaaccaccacccatcatctggcgaaggggtttttctccagcctggaccaggtgttaaacgtagatgatgccctccccctgttaaacagtggtgaggttgcattgaagtattcctcctctgccaaaggtgggctggcggttgccgcaatgggattggtgccttctatcaccctggaaaccgcgaaagtaaccgctcactctgcgggtgctaaaattgcgcaatattacgcctacaagctgaaccgccgtgatatccaggcactggaagaaacgcagcccgatattctcttattcaccggcggcaccgatggcggagaagaaagctacggactgaataacgcccgtgtgttggcagaatccaaactcgactgcgccattatttatgccggaaaccgggatattcaggacgaggtgcaggagatcctcgggcataaagacctgaccatcgtcgacaacgttctgcccgatcttgaccatccgaaccctttagctgcacgccaggctatctgcgacatattccttaaacgcatcgttaaagggaaagggctggatgtcattgttgataaaacaggcgaagaaccaatgccgacaccatggacggtctttgaactggttaaggcaatcagtaacgtcgatcacagctggaaagagttcatgctgatcgacatgggcggtgcaaccaccgatgtctattccgcctgtgccaacacgctctcgcccgacactgttttacatggcgtaccggaacccttcgtaaaacggacggtggaaggcgatctgggaatgcgcgtctcggcaatggtggttggtgaaagtgcgaaagagttagtcagtgtgaattttgctaagcaacccgcacagttggacgctttttatcattacctccgtcatctagtcgctcatcccgactacttacccgcgaatgcagaagaaaaatatttcgataccgtcctggccggactgtgtgtgggttatgccaccgaaagacatgcgggcaccaaaaaagaggtctgcacctgcgtcggcaatgtcgatttacagatgggacgtgacctgacaaccgtgcgtaaagtcgtgggttccggcggttggctctcgcgtgccagtcagttcgatatgcatcactggttgaaataccgcgagttaaacgacgacggtaaacgcattctcttaccgaccgaatttgaatattaccgcgattcccgggggctattaccactgctggcaaacgtcgccagagtcgatccactggccgccgcgcgcaccagtattcaatgcttaaccctataa

SEQ ID NO: 263122 - DNA, 318 bp, Klebsiella pneumoniae
atgaaacagtcaattgtctcactggcgcaagtcattcgttcgaaaaatgccggaccttacgaactggttttagatattttatttaaaacgaaagaaaactatgagcgagttaaatcatcagggcaattaaccccagaactgatcgcgcgcttatatcatgttgaacctgactttattcatcgtattgtctggtttgatccttctaacgcagtaaaaatcgtcatgccacgagatattatctccgggaatgtaggtgacaatgatgtctatggcgcacagcaacatgcacctttattaaatatgagtttcgatttgtaa

SEQ ID NO: 263123 - DNA, 1281 bp, Klebsiella pneumoniae
atgaagaaaataagtttaaccacgatgattcttttggcgctggtacttggaatgattatcggcgtagtgctcaataacactgcttcaccggaaaccgcaaaactctatgcgcaagaaatatcgatattcacgacgattttcttacgactgataaaaatgattatcgctccgttagtggtctctaccctggtggtaggtatagctaaaatgggagatgccaaagcccttggtcgtattttttctaaaacactctttttatttatttgcgcctcattgctgtcaattgccttaggcttgataacagtaaatttcttcatgccaggcacaggaattaattttgttgcacacggagccgaaaccaccggagtggtcgcgtcagaaccctttacgctaaaagtatttatttcgcatgctttccccaccagcattgtcgatgccatggcgcacaatgaaattttgcaaatcgtggtgttctcaattttcctcggctgtagcctgacggcgattggcgagaaaggcagcgccatcgttcacgccttagattcgctggcacatgccatgttaaagctcactggctacgtcatgctcttcgctcccctgaccgtattcgctgctatttcagcattgattgctgaacgaggactggcagttatggtgagcgccggaatctttatgggtgaattttatttcaccatgttattactttgggtgctgcttatcggtctggccatcgtttatgttggcccctgcatcagacgcctgacccgcgccctttcggaacccgccctgctggcatttaccacatccagttctgaagcggcttttccgggaacgcttgaaaaactggagcaatttggcgtttcccccaaaattgccagctttgtcttacccattggctactcatttaatctcgttggatcaatggcctactgctccttcgccacagttttcatcgcccaggcctgcaatatccatttatccatcggtgagcaaatcaccatgctgttgatcctgatgttgacctcgaaaggaatggctggcgtaccacgcgcctcaatggtggttatcgccgccacgctcaaccagttcaatattccggaagcggggctgatcttgctgatgggcgttgatccgttccttgatatggggcgttcagcgacaaacgtcatgagcaacgcaatgggcgctgcgatggtgagtcggtgggaaggcgaacatttcggcgagggctgtcggggtaaagcattaaaacccaatgaatcgaacgttgctctgccctga

SEQ ID NO: 263124 - DNA, 1653 bp, Klebsiella pneumoniae
atgtccaaaccatttatctggcaagaaccgtttctacaaaacaaagacggtacagaatatacattaattagcgatcaacatattacagtaacggaattagacggcgaagaagtgataaaaatcgctcctgaagcattaacgctgcttgcccggcaggcattttatgaagcctcttttttcttacgttccgctcatttgcaacaggtcgccagcattcttaacgatccgcaggccagtagtaatgataaatacgttgcgttgcagttattacgtaatgctgaagtctcagcaaaaggggtattacccaactgtcaggataccggcaccgcaactattgttgccagtaaagggcaacagatatggacgggaggtaacgacgctgaagccttaagcaaaggcatttacagtactttccaggaaaataatctgcgcttttcacaaaatgcgccgctggatatgtataccgaagtcaatacgcaaaccaatctcccggcgcagattgatatcagcgctgtcgctggtaatgagtaccattttctctgtgttaataaagggggcggctccgccaataaagccgcactttatcaggaaaccaaatccttattgcaaccagaaaaactgaccgcatttttaatcgaaaaaatgaaatcgctgggcaccgctgcctgcccgccttaccacatcgcctttgtcgtcggagggctttcagccgatcaaaccttaaaagttgccaagctggcctctacgaaatattacgacaatttgcccaccagcggaaacgagcaaggacaagcattccgtgatattgagctggaaaaagtattgctcgaggccagtcagcaatttggtattggtgcgcaatttggaggtaaatatttcgctcatgatattcgcgtcattcgtctgccgcgtcacggtggctcctgcccgatagctatggcgctctcctgttctgccgatcgcaatatcaaagcaaaaattaacaagcacggtatctggctggaaaaactcgaacacaatccggggcaatatattccagcctcactgcgggaagaaaatcacgcgcaacatgtacaactggatctaaaccgtccgttgcgtgacgtgatgcaggatctcgccagattaccggtaggtacccgcgtgtcgttaagtggtcccatcgtagtggcgcgcgatatcgcccacgccaaaataaaagcgcggctggatagcggcgaaccgatgccggattacctgaagcatcatattgtctattacgctggcccggcgaaaacaccggagaacatggcctgcggttcactgggtccaaccacgggcggtcgaatggacggttatgtcgataccttccaggctgctggcggcagtctggtaatgttatcgaaaggtaaccgcagccagcaggtcaccgatgcctgtcacaaacatggtggcttcaatctgggtagtattggcggtgcagctgcgttactggcgcaagaatatgtcaaaagtctgcgttgtctggaatacccggagctgggtatggaagcggtgtggatgatggaagtggaaaatctgcccgcattcatcctggtagatgataaaggcaataatttctttagtcagtttgagcagcaacaccgctgcgccagttgccctgcgggacattaa

SEQ ID NO: 263125 - DNA, 603 bp, Klebsiella pneumoniae
atggaagcgcgaatttcaactgaacggcatgtgcaacgccagcagaaattgaaggaacaggtcgatacgcgcgtcgcggcggcgatagagaaaaaagggattttgattgttttcaccggcaatggcaaagggaaatccactgccgcgtttggtactgtgacgcgcgcggtgggtcatggcaaaacggtgggggttgcgcagtacatcaaggggcaatgggacaacggcgaatacaaccttctccagccgctcggggttgagtttcatattatgggaaccggttttacctgggagacacagaaccggcaagcggatatcgacgctgcgaaagaggtctggtcggaaagcaaacggatgctggctgacaagcgttacgacttagtggtgcttgatgagctgacctatatgctggcttaccattatctggataccgaagaagtgatcgcttctctgcaaaaccgcccggcacaacaaagtgtcattgtcaccggacgcggttgccacagtcagatattaaaaatggcggatacggtcagcgaaatccgccccgtcaaacatgcttttgataacggcattcaggcgcagccgggtatcgactggtaa

SEQ ID NO: 263126 - DNA, 906 bp, Klebsiella pneumoniae
atgcgaggaaaaatacctaaaacggaactgctggtgacttttgaggtcgtcgcacgtcatgaaagttataccagagcggcagaggagttagcgttgacccaaagtgcagtattcagacaagtgagtgcgctggaggaatttttacatactccgttattttcacactctaaaaaacgtatttttcttaatgatgcagggaagtattacctggggatagtaaaagaaacattaaataagctggaacgcgataccaataccattatgacctggcaacctacagttaaggttattgaacttgccgtgaatcctacgtttagtacccactggttaatcccaaatttacatgaattcacaaagttacatcccgatattattgttaatattcactctttagctaataacggcgattttcttaatcgggagtacgatgctgtcattatgcgcgaaaatttttgcgcgccctgggcggaagtagaatatctctttgatgaggagattttgccggtatgcagcggcagtttgcttgcaatgtccgatcaaaaactgtcagtggcagaactgcttacagagttaccacttctgcatcaaagtacccgtattactggctgggaagagtggtttgccttatctggcgttagcagtccgctggtcaacaacggaccacgtttcgatttgctttcaatgctgattgccgccgtgcgctctaatctcggcgtggcgctgttaccacggttcgctattcaacatgatttggatagtggcgatatggtgattccctgtgatgtgcctattcgtaccggtaatcgttttattatgacgtggcaggaagagaagtctgactcgccgcacttgcagcaatttcgtgaatggttgctggcgaaatcggttgtaccgcaggcgatgtaa

SEQ ID NO: 263127 - DNA, 474 bp, Klebsiella pneumoniae; identical to SEQ ID NO: 10335

SEQ ID NO: 263128 - DNA, 609 bp, Klebsiella pneumoniae
gtgaataacgctgcgctggaaagactggcttcggtcaccgatcgcgttcaggcgcgtccggtgccatcggcgctggaaaaagcgccagccaaaaaagaagcgtatcgctggaaggccaccactccagtgatgcagcaaaaagaagtggtcgctacgccgaaggcgctgaaaaaagcgctggaacatgaaaaaacgccggaactggcggcgaagctggcggcagaagccattgagcgcgacccgtgggcggctcaggtgagtcaactttcgctaccaaaactggtcgaacaggtggcgttaaatgcctggaaagaggagagcgacaacgcagtatgtctgcatttgcgctcctctcagcggcatttgaacaaccgcggcgcacagcaaaaactggctgaagcgttgagcatgttaaaaggttcaacggttgaactgactatcgttgaagatgataatcccgcggtgcgtacgccgctggaatggcgtcaggcgatatacgaagaaaaacttgcgcaggcgcgcgagtccattattgcggataataatattcagaccctgcgtcggttcttcgatgcggagctggatgaagaaagtatccgccccatttga

SEQ ID NO: 263129 - DNA, 330 bp, Klebsiella pneumoniae
atgtttggtaaaggcggtctgggtaacctgatgaagcaagcccagcagatgcaagaaaaaatgcagaaaatgcaggaagagatcgcgcagctggaagtcaccggcgaatctggcgcaggtctggtaaaagtgaccattaacggtgcacacaactgccgtcgcgtagagatcgacccgagcctgctggaagacgacaaagagatgctggaagacttggtggctgcagcattcaacgacgcagcacgtcgtattgaagaaacgcagaaagaaaaaatggcctctgtatcctccggaatgcagctgccgcctggctttaagatgccgttctga

SEQ ID NO: 263130 - DNA, 963 bp, Klebsiella pneumoniae
atgcgtcagactaaaaccggtatcctgctagcaaacctgggtacgcccgatgcccccacacctgaagcggtaaaacgctatctgaaacaatttttaagcgacagacgcgtggttgatacctcacggttgttatggtggccattgctgcgcggcgtgattttgccactgcgctcgccgcgtgtggcgaagctgtatgcctctgtctggatggagggtggctcgccgctgatggtttacagccgccagcaacagcaggcgctggcacaacgtttaccggagacgcccgtagcgctgggaatgagctacggctcgccatcactggaaagcgccgtagatgaactcctggcagagcatgtagatcatattgtggtactgccgctttatccgcaatactcctgttcaacggtcggtgcggtatgggatgaactggcacgcattctggcgcgcaaacgtagcattccggggatatcgtttattcgtgattacgccgataaccacgattacattaatgcactggcgaacagcgtacgtgcttctttcgctaaacatggcgaaccggatctgctgctgctctcttatcatggcattccccagcggtatgcagatgaaggcgatgattatccgcaacgttgccgcacaacgactcgcgaactggcttccgcactggggatggcaccggaaaaagtgatgatgacctttcagtcgcgctttgggcgggaaccctggctgatgccttataccgacgaaacgctgaaaatgctcggagaaaaaggcgtaggtcatattcaggtgatgtgcccgggctttgctgcggattgtctggagacgctggaagagattgccgagcaaaaccgtgaggtcttcctcggtgcgggcgggaaaaaatatgaatatattccggcgcttaatgccactccggaacatatcgagatgatggctaatcttgttgccgcgtatcgctaa

SEQ ID NO: 263131 - DNA, 960 bp, Klebsiella pneumoniae
atgaagctggaaaacaaattacccgttctggaccttatttctgctgaaatgaagaccgttgtgaatactcttcagccggatttaccgccctggcccgcaacgggaacgattgctgagcaacgacagtattacacgcttgagcgccgattctggaatgcgggcgctccagaaatggcaaccagagcttacatggttccaacaaaatatgggcaggtggaaacacgtctcttttgtccgcagccagatagcccagcgacgctattttatttgcatggaggcggttttattctcggcaatctcgatacccacgatcgcatcatgcgcctgctggcaagctacagccaatgtacggtgattggtattgattacaccctttcacctgaagcgcgttttccgcaagcgatagaggaaattgtggctgcttgttgttatttccaccagcaggcggaggattatcaaatcaatatgtcccgcattggctttgccggtgattccgcaggtgccatgctggcgctcgccagtgcgttgtggttgcgtgataaacagatcgattgcggtaaagttgcgggcgttttgctgtggtatgggctttacggattacgggattccgtgactcgtcgtctgttgggcggtgtctgggatggcttaacgcaacaggatttacagatgtatgaagaggcgtatttaagcaacgacgcggaccgcgagtcgccgtattactgcctgtttaataatgatctcactcgcgaagttccgccctgttttattgccggggcggagttcgatccgctgctggatgacagccgtctgctttaccagacgttagcggcgcatcagcagccctgtgagttcaaactctacccaggcacgctgcacgcctttttgcattattcacggatgatgaaaaccgccgacgaggctcttcgcgacggcgctcagttctttaccgctcagctttag

SEQ ID NO: 263132 - DNA, 225 bp, Klebsiella pneumoniae
gtgaccaccgacgatcatcgccagcgatccggcaggcagcgcgcgcgccatctccacatcgcccggtgcgttagagccgtgctcaccattgtcgtaatgccccatatgggtcgccgcgataataatgtctggcttttctgtctgttgcagctcctgaatcaccagcttcgcttcatcggcgggcttacggaactcaatatcggtgaagttttctgggttgcctaa

SEQ ID NO: 263133 - DNA, 543 bp, Klebsiella pneumoniae
atgaaacgttcaattattgctgccgctgtcttttcttctttttttatgagcgctggggtatttgccgcagacgttgataccggaacattaaccattaaagggaatattgcagaatctccgtgtaaattcgaagcgggtggcgattcagtaagtattaatatgccaactgtaccaaccactgtctttgaaggtaaagctaaatactcgacctatgatgatgcagtcggtgtaaccagcagcatgttaaaaattagctgtccgaaagaagttgctggtgtaaaactctcgttgattaccaacgataaaataaccggaaacgataaggcgatagccagtagcaacgataccgtggggtactatctctatttaggtgataacagcgatgtcctggatgtttctgcaccttttaacattgagagttataaaacagcggaaggtcaatatgctattccgtttaaagcaaaatacctgaagctgacagataattcagtgcaatcaggtgatgtgttatcttctctggttatgcgtgtggcgcaggattaa

SEQ ID NO: 263134 - DNA, 675 bp, Klebsiella pneumoniae
atgaaaggattatttgctttactcatttcttctatggtccttcctgcacatgccggtattgttatctacgggacgcgtattatttacccggcagaaaataaagaagtgatggtgcagttgatgaatcagggaaaccgttcttcgctgctgcaggcgtggattgatgatggtgatacgtcgttaccaccagaaaaaattcaggttcctttcatgttaacgccaccagtggcaaaaataggggcaaattccgggcagcaagtaaaaatcaaaattatgccgaataaactgcccactaataaagagagcattttttatctgaatgttctggatattccaccaaatagtccagagcaagagggcaagaatgcactgaaatttgcaatgcaaaacagaatcaaattgttttaccggcctgcgggtattgcaccggtaaataaagcgacatttaaaaagttactggtaaatcgcagtggcaatggattggtgataaaaaatgactcagcaaattgggtaacgatttcggatgtcaaagctaataatgtcaaagtcaattatgaaactattatgattgcccccttagaaagtcagagtattaatgtcaaaagtaataatgcgaataactggtatctgaccattatcgatgaccatggcaactatattagtgacaaaatttaa

SEQ ID NO: 263135 - DNA, 2481 bp, Klebsiella pneumoniae
atgttgagaatgaccccacttgcatcagcaatcgtagcgttattgctcggcattgaagcttatgcagctgaagaaacctttgatacccattttatgataggtggaatgaaagaccagcaggttgcaaatattcgtcttgatgataatcaacccttgccggggcagtatgacatcgatatttatgtcaataagcaatggcgcgggaaatatgagatcattgttaaagacaacccgcaagaaacatgtttatcaagggaaattatcaagcggttaggcattaataccgataactttgccagcggtaagcaatgtttaacatttgagcaacttgttcagggtgggagctatacctgggatatcggagtttttcgtctcgatttcagtgtcccgcaggcgtgggtggaagaactggaaagtggctatgttccaccggaaaactgggagcggggtattaatgcgttttatacctcttattatgtgagtcagtattacagcgactataaagcgtcgggtaatagcaagagtacatatgtacgttttaacagcgggttaaacttactggggtggcaactgcattctgatgccagtttcagtaaaacaaatagcaatccaggggtgtggaaaagcaataccctgtatctggaacgtggatttgcccaacttctcggcacgcttcgcgtgggtgatatgtacacatcaagcgatatttttgattctgttcgcttcagcggtgtgcggttgtttcgtgatatgcagatgttgcctaactcgaaacagaattttactccacgggtgcaggggattgctcagagtaacgcgctggtaactattgaacagaacggttttgtggtttatcagaaagaggttcctcctggcccgtttgcgattacagatttgcagttggccggtggtggagcagatcttgatgtcagcgtgaaagaggcggacggttcggtaaccacctatctggtgccttatgcagcggtgccgaatatgctgcaacctggcgtgtcgaaatatgattttgcggcgggtcgtagccatattgaaggggcgagcaaacaaagtgattttgtccaggcgggttatcagtatggttttaataacttattgacgctgtatggcggatcgatggtcgcgaataattattacgcgttcactttggggactagctggaatacacgcattggtgccatttccgtcgatgccacgaagtcgcatagtaaacaagacaacggcgatgtgtttgacgggcaaagttatcaaattgcctacaacaaatttgtgagccaaacgtcgacgcgttttggtctggcggcctggcgttattcgtcgcgtgattaccggacatttaacgatcacgtttgggcaaacaataaagataattatcgccgtgatgaaaacgatatctatgacattgccgattattaccagaacgattttggccgtaaaaatagcttttctgccaatatgagccagtcattgccagaaggctggggttctgtgtccttaagtacgttatggcgagattactgggggcgtagcggcagcagtaaggattatcagttgagttattccaacaacctgcgacggataagctataccctcgcggcaagccaggcttatgacgagaatcatcatgaagagaaacgttttaatatttttatatcgattccctttgattggggtgatgacgttacgacgcctcgtcggcaaatatatatgtctaactcaacgacgtttgatgatcagggttttgcctcaaataatacgggattatcgggaaccgttggaaaccgggatcaatttaactatggggtcaacctgagtcatcagcatcagggaaatgaaacgacagctggagcgaatttaacctggaacgcgccggttgcgacagtgaatggcagttatagtaagtcgagtacttatcgacaggctggagccagtgtttcagggggcattgtcgcctggtcgggtggcgttaatctggcgaaccgtctttccgaaacgtttgctgtgatgaatgcgccaggaattaaagatgcttatgtcaatgggcaaaaatatcgcacaacaaaccgtaatggagtggtggtatacgacggaatgacaccttatcgggaaaatcacctgatgctggatgtgtcgcaaagcgatagcgaagcagaattgcgcggtaaccggaaaattgccgccccttttcgcggcgcggttgtactggttaattttgataccgatcagcgcaagccctggtttataaaagcgttaagagcggatgggcaaccattaacgtttggttatgaagtcaatgatatccacggtcataatattggcgttgtcggccagggaagtcagttatttattcgcaccaatgaagtaccgccatcggttaatgtagcaattgataagcaacaaggactttcatgcacaatcaccttcggtaaagagattgatgaaagtagaaattatatctgtcggtga

SEQ ID NO: 263136 - DNA, 1035 bp, Klebsiella pneumoniae; identical to SEQ ID NO: 9453

SEQ ID NO: 263137 - DNA, 339 bp, Klebsiella pneumoniae
atgaccattaaaaataagatgttgctgggtgtgcttttgctggttaccagtgccgcctgggccgcaccagccaccgcgggttcgaccaatacctcgggaatttctaagtatgagttaagcagtttcattgctgactttaagcatttcaaaccaggcgataccgtcccagagatgtaccgcaccgatgagtacaacattaagcagtggcagttacgtaacctgcccgcgcctgatgccgggacacactggacctatatgggtggcgcgtacgtgttgatcaacgacaccgacggtaaaatcattaaagcctacgacggtgagattttttatcatcgctga

SEQ ID NO: 263138 - DNA, 825 bp, Klebsiella pneumoniae
atgaccgaatttaccactcttcttcagcaaggaaacgcctggttcttcatccccagcgccatcttacttggtgcgcttcatggcctggaaccagggcactcaaaaacgatgatggcggcgtttatcatcgccatcaaaggcaccattaaacaggcggtgatgctcggactggcagcaaccatttcgcataccgcagtggtctggttgattgcctttggcgggatggtgatcagcaagcgctttactgctcaatcagcagaaccgtggctccagttgatttccgcagtgatcattattggcaccgcgttctggatgttctggcgtacctggcgcggcgaacgcaactggctggagaatatgcacgagcatgatcatgagcatcatcaccacgatcacgaagatcaccacgaccatggacatcatcaccatcacgaacatggcgagtatcaggatgcccatgcacgagcccatgccaatgacattaaacgacgctttgatggtagagaggtcaccaactggcaaattttgttatttggcttaaccggtggccttatcccctgcccggcagcaattaccgtgctgttgatttgcattcagttgaaagccctgacactgggcgcaacactggtcgtcagtttcagcattggcctggcgttaacgctggtcaccgtaggcgttggcgcagcaatcagcgttcagcaggtcgcaaaacgctggagcggatttaacactctcgctaaacgcgccccctatttttccagtctgttgattggcttagttggtgtgtatatgggcgtacatggcttcatgggcataatgcgataa

SEQ ID NO: 263139 - DNA, 1221 bp, Klebsiella pneumoniae
gtgggaaaagcactaaacaaactgagcgattcgacgttaaaaaaattggcggctgtccaggcagaaaaagagcgtttttactccgacgggggcgggctggagattaaacactcaaagggcggcaaattaacctggtatttccggtaccgaacgggaggccgtgaggttgccgcagagcggttaaagctgggggcttaccctgaattgtcgctgaaagccgcaagggaaaaacgcacactgtgccgggcatggctggctgagggtaaaaacccccgttatgagttgtgcgccacagtacaggaagcactaaaacccgttacggtgaaggaagcgattaactactggctggaggaatacgcgaaggataaccgcaaagattacataaagctggtgcagcgtatggataagcacatcatttgccatattggggcaattccccttgataagtgtgatacaaggcagtggatcgcatgttttgaccgcgtacgaaaaaaagcaccagtagcagcgggccatgtcatgcagacatgcaaacaggcgctaaagttttgccgcaggcggcgctacgcgtttagcaacgccctggacgatttgatcgttactgatgtgggtaagagagcagaaatccgcgagagagtgcacagcaacagcgaactaaaagaaattctacgcgctattgatggtgatgtgttcgctccctattacagtgcgttaatgcgcttgttaattgtgttcgggtgcagaacggcagagatcagactttcagagatcaaagaatgggacctgaaagaaatgttgtggacagtgccaaaagagcacagcaaaacgaaggtaacaatattccgacctattcctgatggtattttgccgttcattcagaagctggtggagcaaaacgcacacactgggttattactcggcgaactgaaaaaagataccacggtggcgcaatatggacgaaatgcgcataagcggcttaagcaggaacactggacgctgcatgatttccgacacacgtttacaactatgctgaatgatttaggtgtcgatccgcatatcgtggagcacatcacagcgcatcagatgccaggtcagcaaaaaacctataaccattcacgctatttgcaggcgaaacgggacgcactgaatctatgggttgagcgtcttgatatgattgcaggatataatgaaaatattgtgatattgagagggatacaatga

SEQ ID NO: 263140 - DNA, 711 bp, Klebsiella pneumoniae
atgcctgaatatggatttatgtttggtgctgaatacccgttgcataataattacggggatccatttggagagctgaaagaagacgattggttttgtgataaacaaaaagaatatgaccataaagtgcaaccgaagttaattgagctaagttatgatgatggaattaaacctgtaacaaggtttgatatatcaatgattaataaactgactgcggaaagaggatattggaaggataaaccaatcatcatagataatgagatggttggaagtttaatatcagaagataatgggatgttttgggctgtgatgcgtgaaccagtgaatctcctttctgatacattagataatatgcttgtttctgttgacttactacataacagagatgatgagttgattgaagcgtttacaaaactattaccaaaatggcgtagtgaactttcaattgttgagccagacaaaccaattgcaggaagttgggagagcatacgacgtaaaattattgattataagataatcccattaattgacttattatcttgggagttgtctacagatagaaaaatttcattaggggtgcttgccgtatctttgtatcctgatggtgaaaaggacacttttgctattgctcagactgtaaaacccttcttagaaaaaataatgcgcagcgattctttagaaaaaataagaaaaattttatctaatgaaaattaa

SEQ ID NO: 263141 - DNA, 225 bp, Klebsiella pneumoniae
atgaatcaaaatacacaatttcaatcactaacagatcgcgtaattcgtgaggatgaatgtcgtaagttaacaggcgtcagccgtactacacgctacgaactggagaagaaagggggctttccgtctcgccgtaatcttggggggcgttctgtaggctggttgctttccgaagttatggactgggtgcaaagccgtgaccgcgttaattcaggtaaggcagcgtaa

SEQ ID NO: 263142 - DNA, 306 bp, Klebsiella pneumoniae; identical to SEQ ID NO: 15095

SEQ ID NO: 263143 - DNA, 204 bp, Klebsiella pneumoniae; identical to SEQ ID NO: 112034

SEQ ID NO: 263144 - DNA, 321 bp, Klebsiella pneumoniae
atgcctgatatgtcaaattaccagtacctgattaatccgcattttaactgtgagcatgatattgctaaaaagatttattccgctgcggatggggctactgacaatatatcaatggctgttgcgtcaattggtagcctgatgtggcatgcgtcagaaaatgaggactatgacgaaaaggccatgcgcattgatatgggtaatatcggtttgttactggcaatgcttggacattttgatatttcgttacggtgcaccattgaaaatgccacagatgcattaaatgctataaagaaagcgaatactgattcaaatcggggataa

SEQ ID NO: 263145 - DNA, 300 bp, Klebsiella pneumoniae
atgagaacgtatttatctggcttgactgccagcggttatgcacacccccaaattatccccggcgctatttatctggataagaacggtaacagagtaacggtaaaagaactgatgtttgaccgtgtgtattttatccgtgatggctattcatttcttagttcgctgaacgtggagatctttattagcagattcaggcgggaaatcccgctttccagaaataaccatgtgtcatgtatggatgttgataaaaaactacaggaactaaaaaacatgattgccgcgtggagagagcagaaatga

SEQ ID NO: 263146 - DNA, 1818 bp, Klebsiella pneumoniae
atgaaaaaagcgccaaatttaaaacaccagccgcgtgacaaaatgacggaagtcatcatttttgcgggtagtgatgcgtgggcacatgcgaaacagtggcaggaacaggacgggcgactggctggcgataacgtgccacctgtctggcttggagagcaacaacttgccgaactggacaacctgcaaatcgtaccggacggacgctatcgcgtgcgtctctatcaggcggggttattgcgtccggggcttgttaataccatcgggcagaaactggcagtggcaggtgtcagggatgctgattattaccctgaaggaatgcacagccagaaacgggagaactggcgcgaatatctggaacgtgaacgggcagagcaggcggaaaagaaaaaggtagttgaactgcctgtaaagaaaaaagagcgggtaaaagacgataacgcttcatcactggcgcttaaccagatgggagcaagtcaacgcggcgaagttctcctggcacattatggcggtgaactggcgattcatgctgactctgacactgttcaccattacaacggcgttgtatgggagccagtacaggataaagaattacagcgagctatggcacagattttcattgatgcggagatcagctattcgcagaacgccattaaatcggcggtcgataccatgaagttaagtttgcctgtaatggggaatacagcccgtaacctgattggattcagtaacggggtatttgataccagaacaggtaattttcgggagcataacaaaaacgattggttgttaattgccagtgaattacctttcagcccaccagcagagggggaaacgctggcaacacatgcgccgaatttctggaagtggttacgccgttcggtggctgagaatgaccgcaaggcggatcgcgtactggctgcattattcatggtgctggcgaaccggtacgactggcagttattcattgaggtaacaggtccagggggaagtggtaaaagcgtgatggcggagatttgcaccatgctggcgggtaaggctaatacagtatcagcgagcatgaaggcgctggaagatgcaagggaacgcgcgttagtggttggcttttcgctgattatcatgccggatatgacccgctacgctggtgatggggcgggaattaaggctattacaggcggtgacaaggtggcaatcgacccaaaacataaagccccatattcaacgcgtatcccggcagtagtgctggcggttaacaataacgctatgtcattcagtgaccgcagtggggggatctcgcgccgtcgggtgatattcaatttttcggaagttgtaccggagaacgaacgcgattcaatgctggcggaaaaaatagaaggtgagctggcggtagtgattcgtcatctgcttacacggtttgctgaccaggacgaagccagacgccttttatatgagcagcagaaatcagaagaagcactcgcgataaagcgtgaaggtgattcgctggtggacttctgcggctatctcatggcgtcggtaatgtgtgatggcctgttagtgggtaatgctgaaattgtgccattcagcccgcgcaggtatctctatcatgcctatctggcttatatgaaggcacatgggtttggtaaacctgtaacactgacgcgcttcggtaaagatatgccgggggcaatggcggaatatggcagggagtatatgaaacggaaaacgaagcacggtttgcgttcaaacgtgacactgacggaggaatcagaagactggatgccatcatgtgtatcggtcactaatgacgatagcaaaaattaa

SEQ ID NO: 263147 - DNA, 684 bp, Klebsiella pneumoniae
ttggtcgctcttgccgaacgttttttacagcaaaaacggcttgttcctttacagggctttgagctgaattcattaagaagctgccggatagcacttctattttgcctgcccgttctggagttaggactggaatggctggatggttttcatgaaatcttaatttatcctgcgccatttgtggtcgatgatgaatgggaagacgatatcggtctggtgcataaccaacgtattgttcagtcaggtcagagctggcagcaagggcctatcgttttgaactggttggatatacaagattcttttgatgcttctggttttaacctgattattcatgaagtcgctcataagctggacacccgtaacggcgatcgcgccagcggagttccctttatttcgttgcgtgaggttgctggctgggaacacgatcttcatgctgcaatgaacaacattcaggaagaaatcgaattagttggtgagaatgcggcgagcattgatgcttatgctgccagtgatcctgctgaatgttttgccgtactttctgaatatttctttagcgccccagaactttttgctcctcgtttcccttcattgtggcaacgtttctgtcaattttatcaacaagatcctttgcagagactgcatcacgctaatgatacagactcgttttcggcgacgaatgttcattaa

SEQ ID NO: 263148 - DNA, 1026 bp, Klebsiella pneumoniae
atgggaagacgaaggaaaaatcctgaacacgaaaaattacctccaaatgtatacccaaataaatatagttatgtatggaaaccaacatccagagaatctgtcacactaaccgccatcaaggatggtttagctgctttatggaaaaagtatgaggaaactgtaaataatcgcgatcgtgcaatgacattcggtcgcttgtgggaaaaattcctcgccagcgcctattacagtgaccttagtccaagaacacaaaaagattatctgcaacatcaaaaaaagttgcttgccgtattcggtaaggtaccagcggattccataaaaccagaacacatccgtcgatacatggacaaaagaggggagcagagtaaaacgcaagccaaccatgaaaaaagcagtatgtcccgtgtttacagttgggggtatgagcgagggtacgtgaaggctaacccatgtgcaggtgtaagtaaattcaaggccaaaaaccgcgaacgatatgtaaccgacaaagaataccaggcagtattaagcgttgcacctcttcctgtttttatcgcaatggaaattgcctatctgtgtgcagcgagggtttccgatgtgttatcgctgaaatgggaacagattggaaacgacgggatattcatccagcaagggaaaaccggaaaaaaacagataaaagcatggagtccacgattacaggcagcgatcgaaaaagcaaaacagttgccaaaatctgcctatgtgatcagcaatcaatacggcaaccgatatatgtacaaaggctttaacgaaatgtgggtagatgcaagaaatcgcgcaggcaaaatttcaggtattttaaccgacttcacctttcatgatctgaaggcgaaaggaatttcagactatgaaggaagcagccgggataagcaacttttctctggtcacaaaaccgaagggcaagtgctaatctatgacaggaaggttaaagtttcaccaacacttgatgtcccgttacctgaaaatattccaagaaaatattccaagtaa

SEQ ID NO: 263149 - DNA, 204 bp, Klebsiella pneumoniae; identical to SEQ ID NO: 3627

SEQ ID NO: 263150 - DNA, 531 bp, Klebsiella pneumoniae; identical to SEQ ID NO: 9863

SEQ ID NO: 263151 - DNA, 732 bp, Klebsiella pneumoniae
atgaatcaaccaatacacaatgattactggttatcccgttttgaaagtattctcaacagtgccctggtgcaacaccgtgccgtctcgttaatccgggtggatttacgtttccctgagtatatgcctgtcaccatcatggatcccgatccggattcagcggtgatttcccgttttttcgcatccctgaaagccaaaattcaggcttaccagcggaaaaaaagatgggccaatcagcgtgtgcatgcaaccagcctgcgttatttctggtgccgggagttcggcaagatgtatggcaggaaacattatcacgtgatattactgctcaacaaagatacctggtgctcgctcggggatttcagcgaaccgtcttcgctggcgacgatgatccaggaggcatggtgcagcgccctgcatcttgagccctggcaaggcgatggcctggtccatttttccaggtggacgccttcccgtaaaccgacatcgtctgatgctcgcccttcttccgatgacacgcctttgtcgggtggatgttctgataccaggaaggcttcagacaaaaagccaggtgaagccgctgtgctctggatcaagcgtggtgatgtggaagcgctgcagaaagcccggaacagagccagttatctcgtgaaatatgagacgaagcagcatgacggttccgggcaacgtaattatggttgcagtcgtgggccggggcgtctactggatggcaggtga

SEQ ID NO: 263152 - DNA, 453 bp, Klebsiella pneumoniae; identical to SEQ ID NO: 9862

SEQ ID NO: 263153 - DNA, 936 bp, Klebsiella pneumoniae; identical to SEQ ID NO: 9861

SEQ ID NO: 263154 - DNA, 936 bp, Klebsiella pneumoniae; identical to SEQ ID NO: 9860

SEQ ID NO: 263155 - DNA, 1251 bp, Klebsiella pneumoniae; identical to SEQ ID NO: 9859

SEQ ID NO: 263156 - DNA, 1095 bp, Klebsiella pneumoniae; identical to SEQ ID NO: 9858

SEQ ID NO: 263157 - DNA, 567 bp, Klebsiella pneumoniae; identical to SEQ ID NO: 20449

SEQ ID NO: 263158 - DNA, 576 bp, Klebsiella pneumoniae
atgaatgctatcccttatttcgactatagcctagcacccttctggccgtcttatcagaacaaaatcatcggtgtccttgagcgtgcgctgcgtgagcagtccggctcccggatacgacggatcctgcttcgtctgccatgtgaatatgaccgtaccttcagcagcagaaagatctggttcggtatggactttatcgaaaccgtcagtgcgctgatgaatgcaacacctggacgagatctctgctggctcctgacccgtcatcctgaaaagccggaataccacgtggtgctgtgtgtcagacaggagtatttcgacggccctgaactggaccggctgattctggatgcctggagcaacgtactgggcttcgcgtcaccgggtgaagcaaagcagtatcagaagcagatcacccgggatgtggtgctggacagtcgttcaccggactgtgaaaacatcctcaaagagttgatatgggcgttcagtgatttcgcccgcgatcgtcgtggtgtgtgcgatccggaagcccgttgcctcgccggtaatcccggctatcccggatctgcaggaccgttctga

SEQ ID NO: 263159 - DNA, 198 bp, Klebsiella pneumoniae
atgttgaccacaacaagccacgacagcgtgttactgcgtgccgacgatcccctgatcgacatgaactacatcaccagtttcaccggtatgaccgacaaatggttttacaagttgatcagtgaaggccatttccctaaacccatcaaactggggcgcagcagccgctggtacaaaagtgaagtggagcagtggaagtga

SEQ ID NO: 263160 - DNA, 639 bp, Klebsiella pneumoniae
atgaaaatcgcattgatgaatgaatttagccaggcatctaaaaacgcaataatttttaatgagttagttgcagcaaccgcacatcaaggccatactattttcaatgtaggaatgtgtgatgacaatgatcatcgtctgacttacgttcatctcggcattatttcggctatcttgttaaacagcagatctgttgatttcgttattaccggctgtggtacaggacagggggcattgatggcactgaacacattcccgggagttacttgtggttattgcatcgaaccaacagatgcctacctgtttgcacaggtaaataatgggaatgcactgtccttgccatttgcaaagggttttggctggggggcagaattaaacatgcgctatatttttgaaaaagcatttgatggcgaaaagggattaggctatccggcagaacgtcgtgaatcacaaaatgcgaatgccattatcctgagtaatatgaaagaagcagttagtaagccactcatggatgctctccaggccatcgatccggagttacttaaacaagctcttggtggcgaaaaattccagaaatgcttctttaataatagtaaagataaagaattggttaattacgttaaaaatttattagatagatga

SEQ ID NO: 263161 - DNA, 1419 bp, Klebsiella pneumoniae
atgagtcagaatgtttatcaatttatcgacctgcagcgcgttgatccgccaaagaaaccgctgaagatccgcaaaattgagtttgttgaaatttacgagccgttttccgaaggccaggccaaagcgcaggctgaccgctgcctgtcgtgcggcaacccatactgcgagtggaaatgcccggtacacaactacatcccgaactggctgaagctcgccaacgaggggcgtatttttgaagcggcagaactgtcgcatcagaccaataccctgccggaagtgtgcggacgtgtctgcccgcaagaccgtctgtgcgaaggttcctgcaccctgaacgatgagttcggcgcagtgaccatcggcaacattgagcgctatatcaacgataaagcgttcgagatgggctggcgtccggatatgtccggcgtgaaacaaaccggtaaaaaagtggcgattatcggcgcaggcccggcgggtctggcgtgcgcggatgtcctgacgcgcaacggcgtaaaagcggtcgtcttcgaccgtcacccggaaattggcggattgctgaccttcggtattccggctttcaagctggaaaaagaggtaatgacgcgccgccgtgaaatcttcaccggcatgggtattgaattcaaactcaataccgaagtgggccgcgacgtacagctggacgatctgctgagtgattacgatgccgtgttccttggcgtcgggacttatcagtcaatgcgcggcgggctggaaaacgaagacgccgatggcgtgtacgcagcgctgccgttccttatcgccaacaccaaacagttaatgggctttggcgaaacccgcgaagaaccgttcgtcagcatggaaggcaaacgcgtggtggtacttggcggtggcgacactgcgatggactgcgtgcgtacgtctgtacgccagggagcgaagcacgttacctgtgcctatcgtcgtgatgaagagaacatgccaggttcccgccgcgaagtgaaaaacgcgcgagaagaaggtgtagagttcaaattcaatgtccagccactggggattgaagtgaacggtaacggcaaagtcagcggcgtaaaaatggtacgtaccgaaatgggcgaaccggatgccaaaggccgtcgccgcgcggagatcgtggcaggttccgaacatatcgttccggcagatgcggtgatcatggcgtttggtttccgcccacacagcatggaatggctggcgaaacacagcgtcgagctggattcgcaaggtcgcatcatcgccccagaaggcaacgacaatgccttccagaccagtaacccgaaaatctttgctggcggcgatatcgtccgtggttccgatctggtcgttaccgccatcgccgaaggtcgcaaagcggcagacggcattatgaactggctggaagtttaa

SEQ ID NO: 263162 - DNA, 1113 bp, Klebsiella pneumoniae
atggaatcgctctcagaaggaaccacagcaggctaccagcaaatccacgacggcattattcatctggtcgatagcgcccgaacggaaacggtacgtagcgttaacgcgttaatgaccgcgacgtactgggaaattggccgacgaattgtcgaatttgaacaaggtggcgaggccagggctgcgtatggtgcgcagctaatcaagcgactatcaaaggatttaagtctaaggtataagcgtggattttccaccaggaatttatggcagtttaagaatttttatatttgttttcaaagaattgaaattgtgcagacactgtctgcacaattcacccccacaattctccagactgtgtctggagaatcttgccatttagcgcaactcgccaaatccttccccctgccctggtccacttacgtccgtttgctttctgttaaaaaagctgatgctcgcagcttttatgagaaagagacactccgctgtggctggtctgctcgtcagctcgaacgacaaattgcgacccagttttatgagcggacactactgtcacatgacaaatcagccatgctgcaacaacacgctcctaccgagacgcatattcttccgcagcaggcgatacgcgatccctttgtgctcgaatttctggaattgaaagatgaatactcagaatccgattttgaggaggcgctgatcaaccacctgatggatttcatgctggaacttggggatgattttgcctttgttggtcgacagcgaaggttacgcattgatgacaactggtttcgtgtcgatctgctgtttttccaccgccgtttacgctgcctgctaatcgtcgatctaaaagtgggcaaattcagctatagcgatgccggacagatgaatatgtatctcaactacgccaaagagcactggacactaccggatgaaaatccgcccatcggtctggttctctgtgcagagaaaggagccggcgaagcgtattatgcactggctggtttgcctaacaccgttctggcgagcgaatataagatgcaactacctgatgaaaaacgactcgcggatgaactcgttcgaacacaggcggtgctagaggaaggctatagacgccgttaa

SEQ ID NO: 263163 - DNA, 465 bp, Klebsiella pneumoniae
atgatgatgggtgaagtacagtcattaccgtctgccggattgcatcctgcgttacaggacgcgttaacactagccttagccgccaggccgcaagaaaaagcaccgggtcgttacgaattacagggcgacaatatctttatgaatgtcatgacgtttaacactcaatcgcccgtcgagaaaaaagcggaattgcacgagcaatacattgatatccagctgttgttaaacggtgaggaacggattctgtttggcacggcaggcactgcgcgtcagtgtgaagagttccaccatgaggatgattaccagctttgcagcgccattgagaacgagcaagccatcatcttaaaaccgggaatgttcgccgtgtttatgccgggagaaccgcataaaccaggatgcgttgtcggcgaacctgatgagattaaaaaggttgtggtgaaggttaaggctgatttaatggcttaa

SEQ ID NO: 263164 - DNA, 876 bp, Klebsiella pneumoniae
atgaccacactggcgattgatatcggcggtactaaacttgccgccgcgctgattggcgctgatgggcagatccgcgatcgtcgtgaacttcctacgccagccagccagacaccagaagccttgcgtgatgccttatccgcattagtctctccgttgcaagctcatgcgcagcgggttgccatcgcttcaaccggaattattcgcgacggcagtttgctggcgcttaatccgcataatctcggtggattactacactttccgttagtcaaaacgctggaacaacttaccaatttgccgaccattgccattaacgacgcgcaggccgcagcatgggcagagtatcaggcgctggaaggcgatgtaaccgagatggtgtttatcaccgtttccactggcgtcggcggcggtgtagtgagcggcggcaaactgcttaccggccctggcggtctggcggggcacatcgggcatacgcttgccgatccgcatggtccagtctgcggctgtggacgcacaggttgcgtggaggcgattgcttctggtcgcggcattgcggcggcggcgcaaggggagttggctggtgcgaatgcgaaaactattttcacgcatgccgggcagggcgatgagcaggcgcagcaactgattcaccgttccgcacgtacgcttgcaaggctgatcgctgatattaaagccacaactgattgccagtgcgtggtggtcggtggcagcgttggtctggcagaggggtatctggcgctggtggaaacgtatctggcgcaggagccagcggcatttcatgttgatttactggcggcgcactaccgccacgatgcaggtttacttggggctgcgctgttggcccagggagaaaaattatga

SEQ ID NO: 263165 - DNA, 690 bp, Klebsiella pneumoniae
atgtcgttacttgcacaactggatcaaaaaatcgctgctaacggtggcctgattgtctcctgccagccggttccggacagcccgctcgataaacccgaaatcgtcgccgccatggcattagcggcagagcaggcgggcgcggttgccattcgcattgaaggtgtggcaaatctgcaagccacgcgtgcggtagtgagcgtgccaattatcgggattgtgaaacgcgatctggaggattctccggtacgcatcacggcctatattgaagatgttgatgcgctggcgcaggcgggcgcggacattatcgccattgacggcaccgaccgcccgcgtccggtgcctgttgaaacgttgctggcacgtattcaccatcacggtttactggcgatgaccgactgctcaacgccggaagacggcctggcatgccaaaagctgggagccgaaattattggcactacgctttctggctataccacgcctgaaacgccagaagagccggatctggcgctggtgaaaacgttgagcgacgccggatgtcgggtgattgccgaagggcgttacaacacgcctgctcaggcggcggatgcgatgcgccacggcgcgtgggcggtgacggtcggttctgccattacgcgtcttgaacacatttgtcagtggtacaacacagcgatgaaaaaggcggtgctatga

SEQ ID NO: 263166 - DNA, 1491 bp, Klebsiella pneumoniae
atgagtacttcaacccagaatatcccgtggtatcgccatctcaatcgtgcacaatggcgggcattttccgctgcctggttgggatatctgcttgacggttttgatttcgttttaatcgccctggtactcaccgaagtacaaggtgaattcgggctgacgacggtgcaggcggcaagtctgatctccgcagcctttatctctcgctggttcggcggcctgatgctcggcgctatgggtgaccgctacgggcgtcgtctggcaatggtcaccagcatcgttctcttctcggccgggacgctggcctgcggctttgcgccaggctacatcaccatgtttatcgctcgtctggtcatcggcatggggatggcgggtgaatacggttccagcgccacctatgtcattgaaagctggccaaaacatctgcgtaataaagccagtggttttctgatttccggcttctctgtgggggccgtcgttgccgctcaggtctatagcctggtggttccggtctggggctggcgtgcgctgttctttatcggcattttgccaatcatctttgctctctggctgcgtaaaaacatcccggaagcggaagactggaaagagaaacatgctggtaaagcaccagtacgcacgatggtagatattctctaccgtggtgaacatcgcattgccaatatcgtaatgacactggcggcggctactgcgctgtggttttgcttcgccggtaacctgcaaaatgccgcgatcgtcgctgttcttgggctgttatgcgccgcaatctttatcagctttatggtgcaaagtacgggcaaacgctggccaacgggcgtaatgctgatggtggtcgtgttgtttgctttcctctactcatggccgattcaggcgctgctgccaacgtatctgaaaaccgatctggcttataacccgcatactgtcgccaatgtgctgttctttagtggctttggcgcggcggtgggatgctgcgtaggtggcttcctcggtgactggctgggaacccgcaaagcgtacgtttgtagcctgctggcctcgcagctgctgattattccggtatttgcgattggcggcgcaaacgtctgggtgctcggtctgttactgttcttccagcaaatgcttggacaagggatcgccgggatcttaccgaaactgattggcggttatttcgataccgaccagcgtgcagcgggcctgggctttacctacaacgtcggcgcattgggcggtgcactggccccaatcatcggcgcgttgatcgctcaacgtctggatctgggtactgcgctggcatcgctctcgttcagtctgacatttgtggtgatcctgctgattggtctggatatgccttcccgcgttcagcgttggctgcgcccggaagcattgcgtactcatgacgctatcgacggcaaaccatttagcggtgccgtgccatttggccgcgccaaaaacgatttagtcaaaaccaaaagttaa

SEQ ID NO: 263167 - DNA, 894 bp, Klebsiella pneumoniae
atggcaacgaatttacgtggcgtaatggctgcactcctgactccttttgatcaacaacaagcactggataaagcgagtctgcgtcgcctggttcagttcaatattcagcagggcattgacggtttatacgtgggtggttcgaccggcgaagcctttgtacaaagcctttccgagcgtgaacaggtactggaaatcgtcgccgaagaggcgaaaggtaagattaaactcatcgcccacgtcggttgcgtcagcaccgccgaaagccaacaacttgcggcatcggctaaacgttatggcttcgatgccgtctccgccgtcacgccgttctactatcctttcagctttgaagaacactgcgatcactatcgggcaattattgattcagcggatgggttgccgatggtggtgtacaacattccagccctgagtggggtaaaactgaccctggatcaaatcaacacacttgttacgttgcctggcgtcggtgcgctgaaacagacttctggcgatctctatcagatggaacagatccgtcgtgaacatcctgatctggtgctctataacggttacgacgaaatcttcgcctctggtcttctggcgggcgctgatggtggtatcggtagtacctacaacatcatgggctggcgttatcaggggattgtgaaggcgctgaaagaaggcgatatccagaccgcgcagaagctgcaaaccgaatgtaataaagtcattgatttactgatcaaaacgggcgtattccgcggcctgaaaacggtcctgcattatatggatgtcgtttctgtgccgctgtgccgcaaaccgtttggaccggtagatgaaaaatatctgccagaactgaaggcgttggcccagcagttgatgcaagagcgcgggtga
